(19) United States
(12) Patent Application Publication
(10) Pub. No.: US 2015/0133529 A1
(43) Pub. Date: May 14, 2015

(54) COMPOSITIONS AND METHODS FOR MODULATING BDNF EXPRESSION

(71) Applicants: RaNA Therapeutics, Inc., Cambridge, MA (US); The General Hospital Corporation d/b/a Massachuset General Hospital, Boston, MA (US)

(72) Inventors: Arthur M. Krieg, Cambridge, MA (US); Romesh Subramanian, Framingham, MA (US); James McSwiggen, Arlington, MA (US); Jeannie T. Lee, Boston, MA (US)

(73) Assignees: RaNA Therapeutics, Inc., Cambridge, MA (US); The General Hospital Corporation d/b/a Massachuset General Hospital, Boston, MA (US)

(21) Appl. No.: 14/401,234

(22) PCT Filed: May 16, 2013
(86) PCT No.: PCT/US2013/041385

§ 371 Date: Nov. 14, 2014

Related U.S. Application Data
(60) Provisional application No. 61/648,058, filed on May 16, 2012.

(51) Int. Cl. C12N 15/113; A61K 48/00

(52) U.S. Cl. CPC C12N 15/1136; A61K 48/00; C12N 2310/321; C12N 2310/3231; C12N 2310/315; C12N 2310/351
USPC 514/44 R; 536/23.1; 435/375

(57) ABSTRACT

Aspects of the invention provide single stranded oligonucleotides for activating or enhancing expression of BDNF. Further aspects provide compositions and kits comprising single stranded oligonucleotides for activating or enhancing expression of BDNF. Methods for modulating expression of BDNF using the single stranded oligonucleotides are also provided. Further aspects of the invention provide methods for selecting a candidate oligonucleotide for activating or enhancing expression of BDNF.

### CROSS-REFERENCE TO RELATED APPLICATIONS

[0001] This application claims the benefit under 35 U.S.C. §119(e) of U.S. Provisional Application No. 61/648,058, entitled “COMPOSITIONS AND METHODS FOR MODULATING BDNF EXPRESSION”, filed May 16, 2012, which is incorporated herein by reference in its entirety.

### FIELD OF THE INVENTION

[0002] The invention relates to oligonucleotide based compositions, as well as methods of using oligonucleotide based compositions for treating disease.

### BACKGROUND OF THE INVENTION

[0003] Neurodegeneration is the progressive loss of function or death of neurons and is the cause of a family of devastating diseases including amyotrophic lateral sclerosis (ALS, also known as Lou Gehrig's disease), Alzheimer's Disease (AD), Huntington's disease (HD) and Parkinson's Disease (PD).

[0004] ALS involves degeneration of motor neurons and results in progressive muscle weakness, dysarthria, dysphagia, respiratory difficulty, and eventually death. ALS can be caused by mutations in Cu/Zn superoxide dismutase 1. AD involves degeneration of neurons and synapses in the cerebral cortex, resulting in dementia, confusion, aggression, and long-term memory loss. AD is hypothesized to be caused by misfolded proteins that form small plaques that cause neuronal death. PD involves the death of dopamine-generating neurons in the substantia nigra, resulting in motor defects, psychiatric problems, and autonomic dysfunction. Mutations in some genes, alpha-synuclein (SNCA), parkin (PRKN), leucine-rich repeat kinase 2 (LRRK2 or dardarin), PTEN-induced putative kinase 1 (PINK1), DJ-1 and ATP13A2, cause at least a subset of Parkinson's disease.

[0005] Brain-derived neurotrophic factor (BDNF) is a secreted neurotrophin involved in neuron survival, growth, and differentiation. Additionally, BDNF is important in synaptic transmission and synapse plasticity. Several studies link BDNF with neurodegenerative diseases. BDNF expression is reduced in patients with neurodegenerative diseases such as Alzheimer's disease. Animal studies of neurodegeneration have shown that elevated levels of BDNF can alleviate or are associated with alleviation of the symptoms of AD and PD. Additionally, BDNF mimetics reduced neurodegneration in animal models of AD.

### SUMMARY OF THE INVENTION

[0006] Aspects of the invention disclosed herein provide methods and compositions that are useful for upregulating BDNF in cells. In some embodiments, single stranded oligonucleotides are provided that target a PRC2-associated region of a BDNF gene (e.g., human BDNF) and thereby cause upregulation of the gene. In some embodiments, single stranded oligonucleotides are provided that target a PRC2-associated region of the gene encoding BDNF. In some embodiments, these single stranded oligonucleotides activate or enhance expression of BDNF by relieving or preventing PRC2 mediated repression of BDNF. Aspects of the invention disclosed herein provide methods and compositions that are useful for upregulating BDNF for the treatment and/or prevention of neurodegeneration diseases, such as amyotrophic lateral sclerosis (ALS, also known as Lou Gehrig's disease), AD, Huntington's disease (HD), or Parkinson's Disease (PD).

[0007] Further aspects of the invention provide methods for selecting oligonucleotides for activating or enhancing expression of BDNF. In some embodiments, methods are provided for selecting a set of oligonucleotides that is enriched in candidates (e.g., compared with a random selection of oligonucleotides) for activating or enhancing expression of BDNF. Accordingly, the methods may be used to establish sets of clinical candidates that are enriched in oligonucleotides that activate or enhance expression of BDNF. Such libraries may be utilized, for example, to identify lead oligonucleotides for developing therapeutics to treat BDNF. Furthermore, in some embodiments, oligonucleotide chemistries are provided that are useful for controlling the pharmacokinetics, biodistribution, bioavailability and/or efficacy of the single stranded oligonucleotides for activating expression of BDNF.

[0008] According to some aspects of the invention single stranded oligonucleotides are provided that have a region of complementarity that is complementarty with (e.g., at least 8 consecutive nucleotides of) a PRC2-associated region of a BDNF gene, e.g., a PRC2-associated region of the nucleotide sequence set forth as SEQ ID NO: 1 or 2. In some embodiments, the oligonucleotide has at least one of the following features: a) a sequence that is 5′X—Y—Z, in which X is any nucleotide and in which X is at the 5′ end of the oligonucleotide, Y is a nucleotide sequence of 6 nucleotides in length that is not a human seed sequence of a microRNA, and Z is a nucleotide sequence of 1 to 23 nucleotides in length; b) a sequence that does not comprise three or more consecutive guanosine nucleotides; c) a sequence that has less than a threshold level of sequence identity with every sequence of nucleotides, of equivalent length to the second nucleotide sequence, that are between 50 kilobases upstream of a 5′-end of an off-target gene and 50 kilobases downstream of a 3′-end of the off-target gene; d) a sequence that is complementary to a PRC2-associated region that encodes an RNA that forms a secondary structure comprising at least two single stranded loops; and e) a sequence that has greater than 60% G-C content. In some embodiments, the single stranded oligonucleotide has at least two of features a), b), c), d), and e), each independently selected. In some embodiments, the single stranded oligonucleotide has at least three of features a), b), c), d), and e), each independently selected. In some embodiments, the single stranded oligonucleotide has at least four of features a), b), c), d), and e), each independently selected. In some embodiments, the single stranded oligonucleotide has each of features a), b), c), d), and e). In certain embodiments, the oligonucleotide has the sequence 5′X—Y—Z, in which the oligonucleotide is 8-50 nucleotides in length.

[0009] According to some aspects of the invention, single stranded oligonucleotides are provided that have a sequence X—Y—Z, in which X is any nucleotide, Y is a nucleotide sequence of 6 nucleotides in length that is not a seed sequence of a human microRNA, and Z is a nucleotide sequence of 1 to 23 nucleotides in length, in which the single stranded oligonucleotide is complementary with a PRC2-associated region of a BDNF gene, e.g., a PRC2-associated region of the nucleotide sequence set forth as SEQ ID NO: 1 or 2. In some aspects of the invention, single stranded oligonucleotides are provided that have a sequence 5′-X—Y—Z, in which X is any nucleotide, Y is a nucleotide sequence of 6 nucleotides in length that is not a seed sequence of a human microRNA, and Z is a nucleotide sequence of 1 to 23 nucleotides in length, in which the single stranded oligonucleotide is complementary with at least 8 consecutive nucleotides of a PRC2-associated region of a BDNF gene, e.g., a PRC2-associated region of the nucleotide sequence set forth as SEQ ID NO: 1 or 2. In some embodiments, Y is a sequence selected from Table 1. In some embodiments, the PRC2-associated region is a sequence listed in any one of SEQ ID NOS: 7 to 68.

[0010] In some embodiments, the single stranded oligonucleotide comprises a nucleotide sequence as set forth in any one of SEQ ID NOS: 69 to 62225, or a fragment thereof that is at least 8 nucleotides. In some embodiments, the single stranded oligonucleotide comprises a nucleotide sequence as set forth in any one of SEQ ID NOS: 69 to 62225, in which the 5′ end of the nucleotide sequence provided is the 5′ end of the oligonucleotide. In some embodiments, the region of complementarity (e.g., the at least 8 consecutive nucleotides) is also present within the nucleotide sequence set forth as SEQ ID NO: 5 or 6.

[0011] In some embodiments, the single stranded oligonucleotide comprises a nucleotide sequence as set forth in any one of SEQ ID NOS: 69 to 62225. In some embodiments, the single stranded oligonucleotide comprises a fragment of at least 8 nucleotides of a nucleotide sequence as set forth in any one of SEQ ID NOS: 69 to 62225.

[0012] In some embodiments, the PRC2-associated region is a sequence listed in any one of SEQ ID NOS: 7 to 48. In some embodiments, the single stranded oligonucleotide comprises a nucleotide sequence as set forth in any one of SEQ ID NOS: 69 to 30107 or 62210 to 62225 or a fragment thereof that is at least 8 nucleotides. In some embodiments, the single stranded oligonucleotide comprises a nucleotide sequence as set forth in any one of SEQ ID NOS: 69 to 30107 or 62210 to 62225, wherein the 5′ end of the nucleotide sequence provided in any one of SEQ ID NOS: 69 to 30107 or 62210 to 62225 is the 5′ end of the oligonucleotide. In some embodiments, the at least 8 consecutive nucleotides are also present within the nucleotide sequence set forth as SEQ ID NO: 5.

[0013] In some embodiments, the PRC2-associated region is a sequence listed in any one of SEQ ID NOS: 49 to 68. In some embodiments, the single stranded oligonucleotide comprises a nucleotide sequence as set forth in any one of SEQ ID NOS: 30003 to 62209 or a fragment thereof that is at least 8 nucleotides. In some embodiments, the single stranded oligonucleotide comprises a nucleotide sequence as set forth in any one of SEQ ID NOS: 30003 to 62209, wherein the 5′ end of the nucleotide sequence provided in any one of SEQ ID NOS: 30003 to 62209 is the 5′ end of the oligonucleotide. In some embodiments, the at least 8 consecutive nucleotides are present within the nucleotide sequence set forth as SEQ ID NO: 6.

[0014] In some embodiments, a single stranded oligonucleotide comprises a nucleotide sequence as set forth in any one of SEQ ID NOS: 69 to 62225. In some embodiments, the oligonucleotide is up to 50 nucleotides in length. In some embodiments, a single stranded oligonucleotide comprises a fragment of at least 8 nucleotides of a nucleotide sequence as set forth in any one of SEQ ID NOS: 69 to 62225.

[0015] In some embodiments, a single stranded oligonucleotide comprises a nucleotide sequence as set forth in Table 4. In some embodiments, the single stranded oligonucleotide comprises a fragment of at least 8 nucleotides of a nucleotide sequence as set forth in Table 4. In some embodiments, a single stranded oligonucleotide consists of a nucleotide sequence as set forth in Table 4.

[0016] In some embodiments, the single stranded oligonucleotide does not comprise three or more consecutive guanosine nucleotides. In some embodiments, the single stranded oligonucleotide does not comprise four or more consecutive guanosine nucleotides.

[0017] In some embodiments, the single stranded oligonucleotide is 8 to 30 nucleotides in length. In some embodiments, the single stranded oligonucleotide is up to 50 nucleotides in length. In some embodiments, the single stranded oligonucleotide is 8 to 10 nucleotides in length and all but 1, 2, or 3 of the nucleotides of the complementary sequence of the PRC2-associated region are cytosine or guanosine nucleotides.

[0018] In some embodiments, the single stranded oligonucleotide is complementary with at least 8 consecutive nucleotides of a PRC2-associated region of a BDNF gene, e.g., a PRC2-associated region of a nucleotide sequence set forth as SEQ ID NO: 1 or 2, in which the nucleotide sequence of the single stranded oligonucleotide comprises one or more of a nucleotide sequence selected from the group consisting of

[0019] (a) (X)Xxxxxx, (X)xXxxxx, (X)xxXxxx, (X)xxxXxx, (X)xxxxXx and (X)xxxxxX,

[0020] (b) (X)XXxxxx, (X)XxXxxx, (X)XxxXxx, (X)XxxxXx, (X)XxxxxX, (X)xXXxxx, (X)xXxXxx, (X)xXxxXx, (X)xXxxxX, (X)xxXXxx, (X)xxXxXx, (X)xxXxxX, (X)xxxXXx, (X)xxxXxX and (X)xxxxXX,

[0021] (c) (X)XXXxxx, (X)xXXXxx, (X)xxXXXx, (X)xxxXXX, (X)XXxXxx, (X)XXxxXx, (X)XXxxxX, (X)xXXxXx, (X)xXXxxX, (X)xxXXxX, (X)XxXXxx, (X)XxxXXx (X)XxxxXX, (X)xXxXXx, (X)xXxxXX, (X)xxXxXX, (X)xXxXxX and (X)XxXxXx,

[0022] (d) (X)xxXXX, (X)xXxXXX, (X)xXXxXX, (X)xXXXxX, (X)xXXXXx, (X)XxxXXXX, (X)XxXxXX, (X)XxXXxX, (X)XxXXx, (X)XXxxXX, (X)XXxXxX, (X)XXxXXx, (X)XXXxxX, (X)XXXxXx, and (X)XXXXxx,

[0023] (e) (X)xXXXXX, (X)XxXXXX, (X)XXxXXX, (X)XXXxXX, (X)XXXXxX and (X)XXXXXx, and

[0024] (f) XXXXXX, XxXXXXX, XXxXXXX, XXXxXXX, XXXXxXX, XXXXXxX and XXXXXXx, wherein “X” denotes a nucleotide analogue, (X) denotes an optional nucleotide analogue, and “x” denotes a DNA or RNA nucleotide unit.

[0025] In some embodiments, at least one nucleotide of the oligonucleotide is a nucleotide analogue. In some embodiments, the at least one nucleotide analogue results in an increase in Tm of the oligonucleotide in a range of 1 to 5° C. compared with an oligonucleotide that does not have the at least one nucleotide analogue.

[0026] In some embodiments, at least one nucleotide of the oligonucleotide comprises a 2′ O-methyl. In some embodiments, each nucleotide of the oligonucleotide comprises a 2′ O-methyl. In some embodiments, the oligonucleotide comprises at least one ribonucleotide, at least one deoxyribonucleotide, or at least one bridged nucleotide. In some embodiments, the bridged nucleotide is a LNA nucleotide, a cEt nucleotide or a ENA modified nucleotide. In some embodiments, each nucleotide of the oligonucleotide is a LNA nucleotide.

[0027] In some embodiments, the nucleotides of the oligonucleotide comprise alternating deoxyribonucleotides and 2′-fluoro-deoxyribonucleotides. In some embodiments, the nucleotides of the oligonucleotide comprise alternating deoxyribonucleotides and 2′-O-methyl nucleotides. In some embodiments, the nucleotides of the oligonucleotide comprise alternating deoxyribonucleotides and ENA nucleotide analogues. In some embodiments, the nucleotides of the oligonucleotide comprise alternating deoxyribonucleotides and LNA nucleotides. In some embodiments, the 5′ nucleotide of the oligonucleotide is a deoxyribonucleotide. In some embodiments, the nucleotides of the oligonucleotide comprise alternating LNA nucleotides and 2′-O-methyl nucleotides. In some embodiments, the 5′ nucleotide of the oligonucleotide is a LNA nucleotide. In some embodiments, the nucleotides of the oligonucleotide comprise deoxyribonucleotides flanked by at least one LNA nucleotide on each of the 5′ and 3′ ends of the deoxyribonucleotides.

[0028] In some embodiments, the single stranded oligonucleotide comprises modified internucleotide linkages (e.g., phosphorothioate internucleotide linkages or other linkages) between at least two, at least three, at least four, at least five or more nucleotides. In some embodiments, the single stranded oligonucleotide comprises modified internucleotide linkages (e.g., phosphorothioate internucleotide linkages or other linkages) between between all nucleotides.

[0029] In some embodiments, the nucleotide at the 3′ position of the oligonucleotide has a 3′ hydroxyl group. In some embodiments, the nucleotide at the 3′ position of the oligonucleotide has a 3′ thiophosphate. In some embodiments, the single stranded oligonucleotide has a biotin moiety or other moiety conjugated to its 5′ or 3′ nucleotide. In some embodiments, the single stranded oligonucleotide has cholesterol, Vitamin A, folate, sigma receptor ligands, aptamers, peptides, such as CPP, hydrophobic molecules, such as lipids, ASGPR or dynamic polyconjugates and variants thereof at its 5′ or 3′ end.

[0030] According to some aspects of the invention compositions are provided that comprise any of the oligonucleotides disclosed herein, and a carrier. In some embodiments, compositions are provided that comprise any of the oligonucleotides in a buffered solution. In some embodiments, the oligonucleotide is conjugated to the carrier. In some embodiments, the carrier is a peptide. In some embodiments, the carrier is a steroid. According to some aspects of the invention pharmaceutical compositions are provided that comprise any of the oligonucleotides disclosed herein, and a pharmaceutically acceptable carrier.

[0031] According to other aspects of the invention, kits are provided that comprise a container housing any of the compositions disclosed herein.

[0032] According to some aspects of the invention, methods of increasing expression of BDNF in a cell are provided. In some embodiments, the methods involve delivering any one or more of the single stranded oligonucleotides disclosed herein into the cell. In some embodiments, delivery of the single stranded oligonucleotide into the cell results in a level of expression of BDNF that is greater (e.g., at least 50% greater) than a level of expression of BDNF in a control cell that does not comprise the single stranded oligonucleotide.

[0033] According to some aspects of the invention, methods of increasing levels of BDNF in a subject are provided. According to some aspects of the invention, methods of treating a condition (e.g., neurodegeneration diseases, such as ALS, AD, HD or PD) associated with decreased levels of BDNF in a subject are provided. In some embodiments, the methods involve administering any one or more of the single stranded oligonucleotides disclosed herein to the subject.

### BRIEF DESCRIPTION OF TABLES

[0034] Table 1: Hexamers that are not seed sequences of human miRNAs

[0035] Table 2: Oligonucleotide sequences made for testing in the lab. RQ (column 2) and RQ SE (column 3) shows the activity of the oligo relative to a control well (usually carrier alone) and the standard error or the triplicate replicates of the experiment. [oligo] is shown in nanomolar for in vitro experiments and in milligrams per kilogram of body weight for in vivo experiments. The sequence of each oligonucleotide, including any modified nucleotides, is shown in Table 4.

[0036] Table 3: A listing of oligonucleotide modifications

[0037] Table 4: Formatted oligonucleotide sequences made for testing showing nucleotide modifications. The table shows the sequence of the modified nucleotides, where lnaX represents an LNA nucleotide with 3′ phosphorothioate linkage, omeX is a 2′-O-methyl nucleotide, dX is a deoxy nucleotide. An s at the end of a nucleotide code indicates that the nucleotide had a 3′ phosphorothioate linkage. The “-Sup” at the end of the sequence marks the fact that the 3′ end lacks either a phosphate or thiophosphate on the 3′ linkage. The Formatted Sequence column shows the sequence of the oligonucleotide, including modified nucleotides, for the oligonucleotides tested in Table 2.

[0038] Table 5: Cell lines

### DETAILED DESCRIPTION OF CERTAIN EMBODIMENTS OF THE INVENTION

[0039] Aspects of the invention provided herein relate to the discovery of polycomb repressive complex 2 (PRC2)-interacting RNAs. Polycomb repressive complex 2 (PRC2) is a histone methyltransferase and a known epigenetic regulator involved in silencing of genomic regions through methylation of histone H3. Among other functions, PRC2 interacts with long noncoding RNAs (lncRNAs), such as RepA, Xist, and Tsix, to catalyze trimethylation of histone H3-lysine27. PRC2 contains four subunits, Eed, Suz12, RbAp48, and Ezh2. Aspects of the invention relate to the recognition that single stranded oligonucleotides that bind to PRC2-associated regions of RNAs (e.g., lncRNAs) that are expressed from within a genomic region that encompasses or that is in functional proximity to the BDNF gene can induce or enhance expression of BDNF. In some embodiments, this upregulation is believed to result from inhibition of PRC2 mediated repression of BDNF.

[0040] As used herein, the term “PRC2-associated region” refers to a region of a nucleic acid that comprises or encodes a sequence of nucleotides that interact directly or indirectly with a component of PRC2. A PRC2-associated region may be present in a RNA (e.g., a long non-coding RNA (lncRNA)) that that interacts with a PRC2. A PRC2-associated region may be present in a DNA that encodes an RNA that interacts with PRC2. In some cases, the PRC2-associated region is equivalently referred to as a PRC2-interacting region.

[0041] In some embodiments, a PRC2-associated region is a region of an RNA that crosslinks to a component of PRC2 in response to in situ ultraviolet irradiation of a cell that expresses the RNA, or a region of genomic DNA that encodes that RNA region. In some embodiments, a PRC2-associated region is a region of an RNA that immunoprecipitates with an antibody that targets a component of PRC2, or a region of genomic DNA that encodes that RNA region. In some embodiments, a PRC2-associated region is a region of an RNA that immunoprecipitates with an antibody that binds specifically to SUZ12, EED, EZH2 or RBBP4 (which as noted above are components of PRC2), or a region of genomic DNA that encodes that RNA region.

[0042] In some embodiments, a PRC2-associated region is a region of an RNA that is protected from nucleases (e.g., RNases) in an RNA-immunoprecipitation assay that employs an antibody that targets a component of PRC2, or a region of genomic DNA that encodes that protected RNA region. In some embodiments, a PRC2-associated region is a region of an RNA that is protected from nucleases (e.g., RNases) in an RNA-immunoprecipitation assay that employs an antibody that targets SUZ12, EED, EZH2 or RBBP4, or a region of genomic DNA that encodes that protected RNA region.

[0043] In some embodiments, a PRC2-associated region is a region of an RNA within which occur a relatively high frequency of sequence reads in a sequencing reaction of products of an RNA-immunoprecipitation assay that employs an antibody that targets a component of PRC2, or a region of genomic DNA that encodes that RNA region. In some embodiments, a PRC2-associated region is a region of an RNA within which occur a relatively high frequency of sequence reads in a sequencing reaction of products of an RNA-immunoprecipitation assay that employs an antibody that binds specifically to SUZ12, EED, EZH2 or RBBP4, or a region of genomic DNA that encodes that protected RNA region. In such embodiments, the PRC2-associated region may be referred to as a “peak.”

[0044] In some embodiments, a PRC2-associated region comprises a sequence of 40 to 60 nucleotides that interact with PRC2 complex. In some embodiments, a PRC2-associated region comprises a sequence of 40 to 60 nucleotides that encode an RNA that interacts with PRC2. In some embodiments, a PRC2-associated region comprises a sequence of up to 5 kb in length that comprises a sequence (e.g., of 40 to 60 nucleotides) that interacts with PRC2. In some embodiments, a PRC2-associated region comprises a sequence of up to 5 kb in length within which an RNA is encoded that has a sequence (e.g., of 40 to 60 nucleotides) that is known to interact with PRC2. In some embodiments, a PRC2-associated region comprises a sequence of about 4 kb in length that comprise a sequence (e.g., of 40 to 60 nucleotides) that interacts with PRC2. In some embodiments, a PRC2-associated region comprises a sequence of about 4 kb in length within which an RNA is encoded that includes a sequence (e.g., of 40 to 60 nucleotides) that is known to interact with PRC2. In some embodiments, a PRC2-associated region has a sequence as set forth in any one of SEQ ID NOS: 7 to 68.

[0045] In some embodiments, single stranded oligonucleotides are provided that specifically bind to, or are complementary to, a PRC2-associated region in a genomic region that encompasses or that is in proximity to the BDNF gene. In some embodiments, single stranded oligonucleotides are provided that specifically bind to, or are complementary to, a PRC2-associated region that has a sequence as set forth in any one of SEQ ID NOS: 7 to 68. In some embodiments, single stranded oligonucleotides are provided that specifically bind to, or are complementary to, a PRC2-associated region that has a sequence as set forth in any one of SEQ ID NOS: 7 to 68 combined with up to 2 kb, up to 5 kb, or up to 10 kb of flanking sequences from a corresponding genomic region to which these SEQ IDs map (e.g., in a human genome). In some embodiments, single stranded oligonucleotides have a sequence as set forth in any one of SEQ ID NOS: 69 to 62225. In some embodiments, single stranded oligonucleotides have a sequence as set forth in Table 4.

[0046] Without being bound by a theory of invention, these oligonucleotides are able to interfere with the binding of and function of PRC2, by preventing recruitment of PRC2 to a specific chromosomal locus. For example, a single administration of single stranded oligonucleotides designed to specifically bind a PRC2-associated region lncRNA can stably displace not only the lncRNA, but also the PRC2 that binds to the lncRNA, from binding chromatin. After displacement, the full complement of PRC2 is not recovered for up to 24 hours. Further, lncRNA can recruit PRC2 in a cis fashion, repressing gene expression at or near the specific chromosomal locus from which the lncRNA was transcribed.

[0047] Methods of modulating gene expression are provided, in some embodiments, that may be carried out in vitro, ex vivo, or in vivo. It is understood that any reference to uses of compounds throughout the description contemplates use of the compound in preparation of a pharmaceutical composition or medicament for use in the treatment of condition (e.g., neurodegeneration diseases, such as ALS, AD, HD or PD) associated with decreased levels or activity of BDNF. Thus, as one nonlimiting example, this aspect of the invention includes use of such single stranded oligonucleotides in the preparation of a medicament for use in the treatment of disease, wherein the treatment involves upregulating expression of BDNF.

[0048] BDNF antisense RNA 1 (BDNF-AS1), also known as BDNF opposite strand (BDNFOS), is a natural antisense transcript to BDNF. BDNF-AS1 has reverse complementarity with the BDNF coding exon at 224 nucleotides. BDNF-AS1 represses BDNF.

[0049] In further aspects of the invention, methods are provided for selecting a candidate oligonucleotide for activating expression of BDNF. The methods generally involve selecting as a candidate oligonucleotide, a single stranded oligonucleotide comprising a nucleotide sequence that is complementary to a PRC2-associated region (e.g., a nucleotide sequence as set forth in any one of SEQ ID NOS: 7 to 68). In some embodiments, sets of oligonucleotides may be selected that are enriched (e.g., compared with a random selection of oligonucleotides) in oligonucleotides that activate expression of BDNF.

### Single Stranded Oligonucleotides for Modulating Expression of BDNF

[0050] In one aspect of the invention, single stranded oligonucleotides complementary to the PRC2-associated regions are provided for modulating expression of BDNF in a cell. In some embodiments, expression of BDNF is upregulated or increased. In some embodiments, single stranded oligonucleotides complementary to these PRC2-associated regions inhibit the interaction of PRC2 with long RNA transcripts such that gene expression is upregulated or increased. In some embodiments, single stranded oligonucleotides complementary to these PRC2-associated regions inhibit the interaction of PRC2 with long RNA transcripts, resulting in reduced methylation of histone H3 and reduced gene inactivation, such that gene expression is upregulated or increased. In some embodiments, this interaction may be disrupted or inhibited due to a change in the structure of the long RNA that prevents or reduces binding to PRC2. The oligonucleotide may be selected using any of the methods disclosed herein for selecting a candidate oligonucleotide for activating expression of BDNF.

[0051] The single stranded oligonucleotide may comprise a region of complementarity that is complementary with a PRC2-associated region of a nucleotide sequence set forth in any one of SEQ ID NOS: 1 to 6. The region of complementarity of the single stranded oligonucleotide may be complementary with at least 6, e.g., at least 7, at least 8, at least 9, at least 10, at least 15 or more consecutive nucleotides of the PRC2-associated region.

[0052] The PRC2-associated region may map to a position in a chromosome between 50 kilobases upstream of a 5′-end of the BDNF gene and 50 kilobases downstream of a 3′-end of the BDNF gene. The PRC2-associated region may map to a position in a chromosome between 25 kilobases upstream of a 5′-end of the BDNF gene and 25 kilobases downstream of a 3′-end of the BDNF gene. The PRC2-associated region may map to a position in a chromosome between 12 kilobases upstream of a 5′-end of the BDNF gene and 12 kilobases downstream of a 3′-end of the BDNF gene. The PRC2-associated region may map to a position in a chromosome between 5 kilobases upstream of a 5′-end of the BDNF gene and 5 kilobases downstream of a 3′-end of the BDNF gene.

[0053] The genomic position of the selected PRC2-associated region relative to the BDNF gene may vary. For example, the PRC2-associated region may be upstream of the 5′ end of the BDNF gene. The PRC2-associated region may be downstream of the 3′ end of the BDNF gene. The PRC2-associated region may be within an intron of the BDNF gene. The PRC2-associated region may be within an exon of the BDNF gene. The PRC2-associated region may traverse an intron-exon junction, a 5′-UTR-exon junction or a 3′-UTR-exon junction of the BDNF gene.

[0054] The single stranded oligonucleotide may comprise a sequence having the formula X—Y—Z, in which X is any nucleotide, Y is a nucleotide sequence of 6 nucleotides in length that is not a human seed sequence of a microRNA, and Z is a nucleotide sequence of varying length. In some embodiments X is the 5′ nucleotide of the oligonucleotide. In some embodiments, when X is anchored at the 5′ end of the oligonucleotide, the oligonucleotide does not have any nucleotides or nucleotide analogs linked 5′ to X. In some embodiments, other compounds such as peptides or sterols may be linked at the 5′ end in this embodiment as long as they are not nucleotides or nucleotide analogs. In some embodiments, the single stranded oligonucleotide has a sequence 5′X—Y—Z and is 8-50 nucleotides in length. Oligonucleotides that have these sequence characteristics are predicted to avoid the miRNA pathway. Therefore, in some embodiments, oligonucleotides having these sequence characteristics are unlikely to have an unintended consequence of functioning in a cell as a miRNA molecule. The Y sequence may be a nucleotide sequence of 6 nucleotides in length set forth in Table 1.

[0055] The single stranded oligonucleotide may have a sequence that does not contain guanosine nucleotide stretches (e.g., 3 or more, 4 or more, 5 or more, 6 or more consecutive guanosine nucleotides). In some embodiments, oligonucleotides having guanosine nucleotide stretches have increased non-specific binding and/or off-target effects, compared with oligonucleotides that do not have guanosine nucleotide stretches.

[0056] The single stranded oligonucleotide may have a sequence that has less than a threshold level of sequence identity with every sequence of nucleotides, of equivalent length, that map to a genomic position encompassing or in proximity to an off-target gene. For example, an oligonucleotide may be designed to ensure that it does not have a sequence that maps to genomic positions encompassing or in proximity with all known genes (e.g., all known protein coding genes) other than BDNF. In a similar embodiment, an oligonucleotide may be designed to ensure that it does not have a sequence that maps to any other known PRC2-associated region, particularly PRC2-associated regions that are functionally related to any other known gene (e.g., any other known protein coding gene). In either case, the oligonucleotide is expected to have a reduced likelihood of having off-target effects. The threshold level of sequence identity may be 50%, 60%, 70%, 80%, 85%, 90%, 95%, 99% or 100% sequence identity.

[0057] The single stranded oligonucleotide may have a sequence that is complementary to a PRC2-associated region that encodes an RNA that forms a secondary structure comprising at least two single stranded loops. In has been discovered that, in some embodiments, oligonucleotides that are complementary to a PRC2-associated region that encodes an RNA that forms a secondary structure comprising one or more single stranded loops (e.g., at least two single stranded loops) have a greater likelihood of being active (e.g., of being capable of activating or enhancing expression of a target gene) than a randomly selected oligonucleotide. In some cases, the secondary structure may comprise a double stranded stem between the at least two single stranded loops. Accordingly, the region of complementarity between the oligonucleotide and the PRC2-associated region may be at a location of the PRC2 associated region that encodes at least a portion of at least one of the loops. In some cases, the region of complementarity between the oligonucleotide and the PRC2-associated region may be at a location of the PRC2-associated region that encodes at least a portion of at least two of the loops. In some cases, the region of complementarity between the oligonucleotide and the PRC2-associated region may be at a location of the PRC2-associated region that encodes at least a portion of the double stranded stem. In some embodiments, a PRC2-associated region (e.g., of an lncRNA) is identified (e.g., using RIP-Seq methodology or information derived therefrom). In some embodiments, the predicted secondary structure RNA (e.g., lncRNA) containing the PRC2-associated region is determined using RNA secondary structure prediction algorithms, e.g., RNAfold, mfold. In some embodiments, oligonucleotides are designed to target a region of the RNA that forms a secondary structure comprising one or more single stranded loop (e.g., at least two single stranded loops) structures which may comprise a double stranded stem between the at least two single stranded loops.

[0058] The single stranded oligonucleotide may have a sequence that is has greater than 30% G-C content, greater than 40% G-C content, greater than 50% G-C content, greater than 60% G-C content, greater than 70% G-C content, or greater than 80% G-C content. The single stranded oligonucleotide may have a sequence that has up to 100% G-C content, up to 95% G-C content, up to 90% G-C content, or up to 80% G-C content. In some embodiments in which the oligonucleotide is 8 to 10 nucleotides in length, all but 1, 2, 3, 4, or 5 of the nucleotides of the complementary sequence of the PRC2-associated region are cytosine or guanosine nucleotides. In some embodiments, the sequence of the PRC2-associated region to which the single stranded oligonucleotide is complementary comprises no more than 3 nucleotides selected from adenine and uracil.

[0059] The single stranded oligonucleotide may be complementary to a chromosome of a different species (e.g., a mouse, rat, rabbit, goat, monkey, etc.) at a position that encompasses or that is in proximity to that species' homolog of BDNF. The single stranded oligonucleotide may be complementary to a human genomic region encompassing or in proximity to the BDNF gene and also be complementary to a mouse genomic region encompassing or in proximity to the mouse homolog of BDNF. For example, the single stranded oligonucleotide may be complementary to a sequence as set forth in SEQ ID NO: 1 or 2, which is a human genomic region encompassing or in proximity to the BDNF gene, and also be complementary to a sequence as set forth in SEQ ID NO: 5 or 6, which is a mouse genomic region encompassing or in proximity to the mouse homolog of the BDNF gene. Oligonucleotides having these characteristics may be tested in vivo or in vitro for efficacy in multiple species (e.g., human and mouse). This approach also facilitates development of clinical candidates for treating human disease by selecting a species in which an appropriate animal exists for the disease.

[0060] In some embodiments, the region of complementarity of the single stranded oligonucleotide is complementary with at least 8 to 15, 8 to 30, 8 to 40, or 10 to 50, or 5 to 50, or 5 to 40 bases, e.g., 5, 6, 7, 8, 9, 10, 11, 12, 13, 14, 15, 16, 17, 18, 19, 20, 21, 22, 23, 24, 25, 26, 27, 28, 29, 30, 31, 32, 33, 34, 35, 36, 37, 38, 39, 40, 41, 42, 43, 44, 45, 46, 47, 48, 49, or 50 consecutive nucleotides of a PRC2-associated region. In some embodiments, the region of complementarity is complementary with at least 8 consecutive nucleotides of a PRC2-associated region. In some embodiments the sequence of the single stranded oligonucleotide is based on an RNA sequence that binds to PRC2, or a portion thereof, said portion having a length of from 5 to 40 contiguous base pairs, or about 8 to 40 bases, or about 5 to 15, or about 5 to 30, or about 5 to 40 bases, or about 5 to 50 bases.

[0061] Complementary, as the term is used in the art, refers to the capacity for precise pairing between two nucleotides. For example, if a nucleotide at a certain position of an oligonucleotide is capable of hydrogen bonding with a nucleotide at the same position of PRC2-associated region, then the single stranded nucleotide and PRC2-associated region are considered to be complementary to each other at that position. The single stranded nucleotide and PRC2-associated region are complementary to each other when a sufficient number of corresponding positions in each molecule are occupied by nucleotides that can hydrogen bond with each other through their bases. Thus, “complementary” is a term which is used to indicate a sufficient degree of complementarity or precise pairing such that stable and specific binding occurs between the single stranded nucleotide and PRC2-associated region. For example, if a base at one position of a single stranded nucleotide is capable of hydrogen bonding with a base at the corresponding position of a PRC2-associated region, then the bases are considered to be complementary to each other at that position. 100% complementarity is not required.

[0062] The single stranded oligonucleotide may be at least 80% complementary to (optionally one of at least 85%, 90%, 91%, 92%, 93%, 94%, 95%, 96%, 97%, 98%, 99% or 100% complementary to) the consecutive nucleotides of a PRC2-associated region. In some embodiments the single stranded oligonucleotide may contain 1, 2 or 3 base mismatches compared to the portion of the consecutive nucleotides of a PRC2-associated region. In some embodiments the single stranded oligonucleotide may have up to 3 mismatches over 15 bases, or up to 2 mismatches over 10 bases.

[0063] It is understood in the art that a complementary nucleotide sequence need not be 100% complementary to that of its target to be specifically hybridizable. In some embodiments, a complementary nucleic acid sequence for purposes of the present disclosure is specifically hybridizable when binding of the sequence to the target molecule (e.g., lncRNA) interferes with the normal function of the target (e.g., lncRNA) to cause a loss of activity (e.g., inhibiting PRC2-associated repression with consequent up-regulation of gene expression) and there is a sufficient degree of complementarity to avoid non-specific binding of the sequence to non-target sequences under conditions in which avoidance of non-specific binding is desired, e.g., under physiological conditions in the case of in vivo assays or therapeutic treatment, and in the case of in vitro assays, under conditions in which the assays are performed under suitable conditions of stringency.

[0064] In some embodiments, the single stranded oligonucleotide is 7, 8, 9, 10, 11, 12, 13, 14, 15, 16, 17, 18, 19, 20, 21, 22, 23, 24, 25, 26, 27, 28, 29, 30, 35, 40, 45, 50 or more nucleotides in length. In a preferred embodiment, the oligonucleotide is 8 to 30 nucleotides in length.

[0065] In some embodiments, the PRC2-associated region occurs on the same DNA strand as a gene sequence (sense). In some embodiments, the PRC2-associated region occurs on the opposite DNA strand as a gene sequence (anti-sense). Oligonucleotides complementary to a PRC2-associated region can bind either sense or anti-sense sequences. Base pairings may include both canonical Watson-Crick base pairing and non-Watson-Crick base pairing (e.g., Wobble base pairing and Hoogsteen base pairing). It is understood that for complementary base pairings, adenosine-type bases (A) are complementary to thymidine-type bases (T) or uracil-type bases (U), that cytosine-type bases (C) are complementary to guanosine-type bases (G), and that universal bases such as 3-nitropyrrole or 5-nitroindole can hybridize to and are considered complementary to any A, C, U, or T. Inosine (I) has also been considered in the art to be a universal base and is considered complementary to any A, C, U or T.

[0066] In some embodiments, any one or more thymidine (T) nucleotides (or modified nucleotide thereof) or uridine (U) nucleotides (or a modified nucleotide thereof) in a sequence provided herein, including a sequence provided in the sequence listing, may be replaced with any other nucleotide suitable for base pairing (e.g., via a Watson-Crick base pair) with an adenosine nucleotide. In some embodiments, any one or more thymidine (T) nucleotides (or modified nucleotide thereof) or uridine (U) nucleotides (or a modified nucleotide thereof) in a sequence provided herein, including a sequence provided in the sequence listing, may be suitably replaced with a different pyrimidine nucleotide or vice versa. In some embodiments, any one or more thymidine (T) nucleotides (or modified nucleotide thereof) in a sequence provided herein, including a sequence provided in the sequence listing, may be suitably replaced with a uridine (U) nucleotide (or a modified nucleotide thereof) or vice versa.

[0067] In some embodiments, GC content of the single stranded oligonucleotide is preferably between about 30-60%. Contiguous runs of three or more Gs or Cs may not be preferable in some embodiments. Accordingly, in some embodiments, the oligonucleotide does not comprise a stretch of three or more guanosine nucleotides.

[0068] In some embodiments, the single stranded oligonucleotide specifically binds to, or is complementary to an RNA that is encoded in a genome (e.g., a human genome) as a single contiguous transcript (e.g., a non-spliced RNA). In some embodiments, the single stranded oligonucleotide specifically binds to, or is complementary to an RNA that is encoded in a genome (e.g., a human genome), in which the distance in the genome between the 5′end of the coding region of the RNA and the 3′ end of the coding region of the RNA is less than 1 kb, less than 2 kb, less than 3 kb, less than 4 kb, less than 5 kb, less than 7 kb, less than 8 kb, less than 9 kb, less than 10 kb, or less than 20 kb.

[0069] It is to be understood that any oligonucleotide provided herein can be excluded. In some embodiments, a single stranded oligonucleotide is not complementary to SEQ ID NO: 62226. In some embodiments, a single stranded oligonucleotide is not complementary to SEQ ID NO: 3.

[0070] In some embodiments, a single-stranded oligonucleotide is complementary to a sequence within nucleotides 1 to 75 or 156 to 4048 of SEQ ID NO: 43. In some embodiments, a single-stranded oligonucleotide is complementary to a sequence within nucleotides 1 to 1317 or 1370 to 4049 of SEQ ID NO: 44. In some embodiments, a single-stranded oligonucleotide is complementary to a sequence within nucleotides 1 to 1766 or 1819 to 4083 of SEQ ID NO: 45. In some embodiments, a single-stranded oligonucleotide is complementary to a sequence within nucleotides 1 to 1882 or 1935 to 4031 of SEQ ID NO: 46. In some embodiments, a single-stranded oligonucleotide is complementary to a sequence within nucleotides 92 to 799 or 859 to 4047 of SEQ ID NO: 52. In some embodiments, a single-stranded oligonucleotide is complementary to a sequence within nucleotides 1 to 855, 861 to 863, 1706 to 2546, 2983 to 2988, or 3375 to 4045 of SEQ ID NO: 53. In some embodiments, a single-stranded oligonucleotide is complementary to a sequence within nucleotides 1 to 856, 920 to 2439, or 2487 to 4050 of SEQ ID NO: 59. In some embodiments, a single-stranded oligonucleotide is complementary to a sequence within nucleotides 1 to 752, 816 to 2335, or 2383 to 4043 of SEQ ID NO: 60.

[0071] In some embodiments, it has been found that single stranded oligonucleotides disclosed herein may increase expression of mRNA corresponding to the gene by at least about 50% (i.e. 150% of normal or 1.5 fold), or by about 2 fold to about 5 fold. In some embodiments, expression may be increased by at least about 15 fold, 20 fold, 30 fold, 40 fold, 50 fold or 100 fold, or any range between any of the foregoing numbers. It has also been found that increased mRNA expression has been shown to correlate to increased protein expression.

[0072] In some or any of the embodiments of the oligonucleotides described herein, or processes for designing or synthesizing them, the oligonucleotides will upregulate gene expression and may specifically bind or specifically hybridize or be complementary to the PRC2 binding RNA that is transcribed from the same strand as a protein coding reference gene. The oligonucleotide may bind to a region of the PRC2 binding RNA that originates within or overlaps an intron, exon, intron exon junction, 5′ UTR, 3′ UTR, a translation initiation region, or a translation termination region of a protein coding sense strand of a reference gene (refGene).

[0073] In some or any of the embodiments of oligonucleotides described herein, or processes for designing or synthesizing them, the oligonucleotides will upregulate gene expression and may specifically bind or specifically hybridize or be complementary to a PRC2 binding RNA that transcribed from the opposite strand (the antisense strand) of a protein coding reference gene. The oligonucleotide may bind to a region of the PRC2 binding RNA that originates within or overlaps an intron, exon, intron exon junction, 5′ UTR, 3′ UTR, a translation initiation region, or a translation termination region of a protein coding antisense strand of a reference gene

[0074] The oligonucleotides described herein may be modified, e.g., comprise a modified sugar moiety, a modified internucleoside linkage, a modified nucleotide and/or combinations thereof. In addition, the oligonucleotides can exhibit one or more of the following properties: do not induce substantial cleavage or degradation of the target RNA; do not cause substantially complete cleavage or degradation of the target RNA; do not activate the RNAse H pathway; do not activate RISC; do not recruit any Argonaute family protein; are not cleaved by Dicer; do not mediate alternative splicing; are not immune stimulatory; are nuclease resistant; have improved cell uptake compared to unmodified oligonucleotides; are not toxic to cells or mammals; may have improved endosomal exit; do interfere with interaction of lncRNA with PRC2, preferably the Ezh2 subunit but optionally the Suz12, Eed, RbAp46/48 subunits or accessory factors such as Jarid2; do decrease histone H3 lysine27 methylation and/or do upregulate gene expression.

[0075] Oligonucleotides that are designed to interact with RNA to modulate gene expression are a distinct subset of base sequences from those that are designed to bind a DNA target (e.g., are complementary to the underlying genomic DNA sequence from which the RNA is transcribed).

[0076] Any of the oligonucleotides disclosed herein may be linked to one or more other oligonucleotides disclosed herein by a linker, e.g., a cleavable linker.

### Method for Selecting Candidate Oligonucleotides for Activating Expression of BDNF

[0077] Methods are provided herein for selecting a candidate oligonucleotide for activating or enhancing expression of BDNF. The target selection methods may generally involve steps for selecting single stranded oligonucleotides having any of the structural and functional characteristics disclosed herein. Typically, the methods involve one or more steps aimed at identifying oligonucleotides that target a PRC2-associated region that is functionally related to BDNF, for example a PRC2-associated region of a lncRNA that regulates expression of BDNF by facilitating (e.g., in a cis-regulatory manner) the recruitment of PRC2 to the BDNF gene. Such oligonucleotides are expected to be candidates for activating expression of BDNF because of their ability to hybridize with the PRC2-associated region of a nucleic acid (e.g., a lncRNA). In some embodiments, this hybridization event is understood to disrupt interaction of PRC2 with the nucleic acid (e.g., a lncRNA) and as a result disrupt recruitment of PRC2 and its associated co-repressors (e.g., chromatin remodeling factors) to the BDNF gene locus.

[0078] Methods of selecting a candidate oligonucleotide may involve selecting a PRC2-associated region (e.g., a nucleotide sequence as set forth in any one of SEQ ID NOS: 7 to 68) that maps to a chromosomal position encompassing or in proximity to the BDNF gene (e.g., a chromosomal position having a sequence as set forth in any one of SEQ ID NOS: 1 to 6). The PRC2-associated region may map to the strand of the chromosome comprising the sense strand of the BDNF gene, in which case the candidate oligonucleotide is complementary to the sense strand of the BDNF gene (i.e., is antisense to the BDNF gene). Alternatively, the PRC2-associated region may map to the strand of the first chromosome comprising the antisense strand of the BDNF gene, in which case the oligonucleotide is complementary to the antisense strand (the template strand) of the BDNF gene (i.e., is sense to the BDNF gene).

[0079] Methods for selecting a set of candidate oligonucleotides that is enriched in oligonucleotides that activate expression of BDNF may involve selecting one or more PRC2-associated regions that map to a chromosomal position that encompasses or that is in proximity to the BDNF gene and selecting a set of oligonucleotides, in which each oligonucleotide in the set comprises a nucleotide sequence that is complementary with the one or more PRC2-associated regions. As used herein, the phrase, “a set of oligonucleotides that is enriched in oligonucleotides that activate expression of” refers to a set of oligonucleotides that has a greater number of oligonucleotides that activate expression of a target gene (e.g., BDNF) compared with a random selection of oligonucleotides of the same physicochemical properties (e.g., the same GC content, Tₘ, length etc.) as the enriched set.

[0080] Where the design and/or synthesis of a single stranded oligonucleotide involves design and/or synthesis of a sequence that is complementary to a nucleic acid or PRC2-associated region described by such sequence information, the skilled person is readily able to determine the complementary sequence, e.g., through understanding of Watson Crick base pairing rules which form part of the common general knowledge in the field.

[0081] In some embodiments design and/or synthesis of a single stranded oligonucleotide involves manufacture of an oligonucleotide from starting materials by techniques known to those of skill in the art, where the synthesis may be based on a sequence of a PRC2-associated region, or portion thereof.

[0082] Methods of design and/or synthesis of a single stranded oligonucleotide may involve one or more of the steps of:

[0083] Identifying and/or selecting PRC2-associated region;

[0084] Designing a nucleic acid sequence having a desired degree of sequence identity or complementarity to a PRC2-associated region or a portion thereof;

[0085] Synthesizing a single stranded oligonucleotide to the designed sequence;

[0086] Purifying the synthesized single stranded oligonucleotide; and

[0087] Optionally mixing the synthesized single stranded oligonucleotide with at least one pharmaceutically acceptable diluent, carrier or excipient to form a pharmaceutical composition or medicament.

[0088] Single stranded oligonucleotides so designed and/or synthesized may be useful in method of modulating gene expression as described herein.

[0089] Preferably, single stranded oligonucleotides of the invention are synthesized chemically. Oligonucleotides used to practice this invention can be synthesized in vitro by well-known chemical synthesis techniques.

[0090] Oligonucleotides of the invention can be stabilized against nucleolytic degradation such as by the incorporation of a modification, e.g., a nucleotide modification. For example, nucleic acid sequences of the invention include a phosphorothioate at least the first, second, or third internucleotide linkage at the 5′ or 3′ end of the nucleotide sequence. As another example, the nucleic acid sequence can include a 2′-modified nucleotide, e.g., a 2′-deoxy, 2′-deoxy-2′-fluoro, 2′-O-methyl, 2′-O-methoxyethyl (2′-O-MOE), 2′-O-aminopropyl (2′-O-AP), 2′-O-dimethylaminoethyl (2′-O-DMAOE), 2′-O-dimethylaminopropyl (2′-O-DMAP), 2′-O-dimethylaminoethyloxyethyl (2′-O-DMAEOE), or 2′-O—N-methylacetamido (2′-O-NMA). As another example, the nucleic acid sequence can include at least one 2′-O-methyl-modified nucleotide, and in some embodiments, all of the nucleotides include a 2′-O-methyl modification. In some embodiments, the nucleic acids are “locked,” i.e., comprise nucleic acid analogues in which the ribose ring is “locked” by a methylene bridge connecting the 2′-O atom and the 4′-C atom.

[0091] It is understood that any of the modified chemistries or formats of single stranded oligonucleotides described herein can be combined with each other, and that one, two, three, four, five, or more different types of modifications can be included within the same molecule.

[0092] In some embodiments, the method may further comprise the steps of amplifying the synthesized single stranded oligonucleotide, and/or purifying the single stranded oligonucleotide (or amplified single stranded oligonucleotide), and/or sequencing the single stranded oligonucleotide so obtained.

[0093] As such, the process of preparing a single stranded oligonucleotide may be a process that is for use in the manufacture of a pharmaceutical composition or medicament for use in the treatment of disease, optionally wherein the treatment involves modulating expression of a gene associated with a PRC2-associated region.

[0094] In the methods described above a PRC2-associated region may be, or have been, identified, or obtained, by a method that involves identifying RNA that binds to PRC2.

[0095] Such methods may involve the following steps: providing a sample containing nuclear ribonucleic acids, contacting the sample with an agent that binds specifically to PRC2 or a subunit thereof, allowing complexes to form between the agent and protein in the sample, partitioning the complexes, synthesizing nucleic acid that is complementary to nucleic acid present in the complexes.

[0096] Where the single stranded oligonucleotide is based on a PRC2-associated region, or a portion of such a sequence, it may be based on information about that sequence, e.g., sequence information available in written or electronic form, which may include sequence information contained in publicly available scientific publications or sequence databases.

### Nucleotide Analogues

[0097] In some embodiments, the oligonucleotide may comprise at least one ribonucleotide, at least one deoxyribonucleotide, and/or at least one bridged nucleotide. In some embodiments, the oligonucleotide may comprise a bridged nucleotide, such as a locked nucleic acid (LNA) nucleotide, a constrained ethyl (cEt) nucleotide, or an ethylene bridged nucleic acid (ENA) nucleotide. Examples of such nucleotides are disclosed herein and known in the art. In some embodiments, the oligonucleotide comprises a nucleotide analog disclosed in one of the following United States patent or Patent Application Publications: U.S. Pat. No. 7,399,845, U.S. Pat. No. 7,741,457, U.S. Pat. No. 8,022,193, U.S. Pat. No. 7,569,686, U.S. Pat. No. 7,335,765, U.S. Pat. No. 7,314,923, U.S. Pat. No. 7,335,765, and U.S. Pat. No. 7,816,333, US 20110009471, the entire contents of each of which are incorporated herein by reference for all purposes. The oligonucleotide may have one or more 2′ O-methyl nucleotides. The oligonucleotide may consist entirely of 2′ O-methyl nucleotides.

[0098] Often the single stranded oligonucleotide has one or more nucleotide analogues. For example, the single stranded oligonucleotide may have at least one nucleotide analogue that results in an increase in Tₘ of the oligonucleotide in a range of 1° C., 2° C., 3° C., 4° C., or 5° C. compared with an oligonucleotide that does not have the at least one nucleotide analogue. The single stranded oligonucleotide may have a plurality of nucleotide analogues that results in a total increase in Tₘ of the oligonucleotide in a range of 2° C., 3° C., 4° C., 5° C., 6° C., 7° C., 8° C., 9° C., 10° C., 15° C., 20° C., 25° C., 30° C., 35° C., 40° C., 45° C. or more compared with an oligonucleotide that does not have the nucleotide analogue.

[0099] The oligonucleotide may be of up to 50 nucleotides in length in which 2 to 10, 2 to 15, 2 to 16, 2 to 17, 2 to 18, 2 to 19, 2 to 20, 2 to 25, 2 to 30, 2 to 40, 2 to 45, or more nucleotides of the oligonucleotide are nucleotide analogues. The oligonucleotide may be of 8 to 30 nucleotides in length in which 2 to 10, 2 to 15, 2 to 16, 2 to 17, 2 to 18, 2 to 19, 2 to 20, 2 to 25, 2 to 30 nucleotides of the oligonucleotide are nucleotide analogues.

The oligonucleotide may be of 8 to 15 nucleotides in length in which 2 to 4, 2 to 5, 2 to 6, 2 to 7, 2 to 8, 2 to 9, 2 to 10, 2 to 11, 2 to 12, 2 to 13, 2 to 14 nucleotides of the oligonucleotide are nucleotide analogues. Optionally, the oligonucleotides may have every nucleotide except 1, 2, 3, 4, 5, 6, 7, 8, 9, or 10 nucleotides modified.

[0100] The oligonucleotide may consist entirely of bridged nucleotides (e.g., LNA nucleotides, cEt nucleotides, ENA nucleotides). The oligonucleotide may comprise alternating deoxyribonucleotides and 2′-fluoro-deoxyribonucleotides. The oligonucleotide may comprise alternating deoxyribonucleotides and 2′-O-methyl nucleotides. The oligonucleotide may comprise alternating deoxyribonucleotides and ENA nucleotide analogues. The oligonucleotide may comprise alternating deoxyribonucleotides and LNA nucleotides. The oligonucleotide may comprise alternating LNA nucleotides and 2′-O-methyl nucleotides. The oligonucleotide may have a 5′ nucleotide that is a bridged nucleotide (e.g., a LNA nucleotide, cEt nucleotide, ENA nucleotide). The oligonucleotide may have a 5′ nucleotide that is a deoxyribonucleotide.

[0101] The oligonucleotide may comprise deoxyribonucleotides flanked by at least one bridged nucleotide (e.g., a LNA nucleotide, cEt nucleotide, ENA nucleotide) on each of the 5′ and 3′ ends of the deoxyribonucleotides. The oligonucleotide may comprise deoxyribonucleotides flanked by 1, 2, 3, 4, 5, 6, 7, 8 or more bridged nucleotides (e.g., LNA nucleotides, cEt nucleotides, ENA nucleotides) on each of the 5′ and 3′ ends of the deoxyribonucleotides. The 3′ position of the oligonucleotide may have a 3′ hydroxyl group. The 3′ position of the oligonucleotide may have a 3′ thiophosphate.

[0102] The oligonucleotide may be conjugated with a label. For example, the oligonucleotide may be conjugated with a biotin moiety, cholesterol, Vitamin A, folate, sigma receptor ligands, aptamers, peptides, such as CPP, hydrophobic molecules, such as lipids, ASGPR or dynamic polyconjugates and variants thereof at its 5′ or 3′ end.

[0103] Preferably the single stranded oligonucleotide comprises one or more modifications comprising: a modified sugar moiety, and/or a modified internucleoside linkage, and/or a modified nucleotide and/or combinations thereof. It is not necessary for all positions in a given oligonucleotide to be uniformly modified, and in fact more than one of the modifications described herein may be incorporated in a single oligonucleotide or even at within a single nucleoside within an oligonucleotide.

[0104] In some embodiments, the single stranded oligonucleotides are chimeric oligonucleotides that contain two or more chemically distinct regions, each made up of at least one nucleotide. These oligonucleotides typically contain at least one region of modified nucleotides that confers one or more beneficial properties (such as, for example, increased nuclease resistance, increased uptake into cells, increased binding affinity for the target) and a region that is a substrate for enzymes capable of cleaving RNA:DNA or RNA:RNA hybrids. Chimeric single stranded oligonucleotides of the invention may be formed as composite structures of two or more oligonucleotides, modified oligonucleotides, oligonucleosides and/or oligonucleotide mimetics as described above. Such compounds have also been referred to in the art as hybrids or gapmers. Representative United States patents that teach the preparation of such hybrid structures comprise, but are not limited to, U.S. Pat. Nos. 5,013,830; 5,149,797; 5,220,007; 5,256,775; 5,366,878; 5,403,711; 5,491,133; 5,565,350; 5,623,065; 5,652,355; 5,652,356; and 5,700,922, each of which is herein incorporated by reference.

[0105] In some embodiments, the single stranded oligonucleotide comprises at least one nucleotide modified at the 2′ position of the sugar, most preferably a 2′-O-alkyl, 2′-O-alkyl-O-alkyl or 2′-fluoro-modified nucleotide. In other preferred embodiments, RNA modifications include 2′-fluoro, 2′-amino and 2′ O-methyl modifications on the ribose of pyrimidines, abasic residues or an inverted base at the 3′ end of the RNA. Such modifications are routinely incorporated into oligonucleotides and these oligonucleotides have been shown to have a higher Tm (i.e., higher target binding affinity) than 2′-deoxyoligonucleotides against a given target.

[0106] A number of nucleotide and nucleoside modifications have been shown to make the oligonucleotide into which they are incorporated more resistant to nuclease digestion than the native oligodeoxynucleotide; these modified oligos survive intact for a longer time than unmodified oligonucleotides. Specific examples of modified oligonucleotides include those comprising modified backbones, for example, phosphorothioates, phosphotriesters, methyl phosphonates, short chain alkyl or cycloalkyl intersugar linkages or short chain heteroatomic or heterocyclic intersugar linkages. Most preferred are oligonucleotides with phosphorothioate backbones and those with heteroatom backbones, particularly CH₂—NH—O—CH₂, CH,˜N(CH₃)˜O˜CH₂ (known as a methylene(methylimino) or MMI backbone, CH₂—O—N(CH₃)—CH₂, CH₂—N(CH₃)—N(CH₃)—CH₂ and O—N(CH₃)—CH₂—CH₂ backbones, wherein the native phosphodiester backbone is represented as O—P—O—CH,); amide backbones (see De Mesmaeker et al. Ace. Chem. Res. 1995, 28:366-374); morpholino backbone structures (see Summerton and Weller, U.S. Pat. No. 5,034,506); peptide nucleic acid (PNA) backbone (wherein the phosphodiester backbone of the oligonucleotide is replaced with a polyamide backbone, the nucleotides being bound directly or indirectly to the aza nitrogen atoms of the polyamide backbone, see Nielsen et al., Science 1991, 254, 1497). Phosphorus-containing linkages include, but are not limited to, phosphorothioates, chiral phosphorothioates, phosphorodithioates, phosphotriesters, aminoalkylphosphotriesters, methyl and other alkyl phosphonates comprising 3′alkylene phosphonates and chiral phosphonates, phosphinates, phosphoramidates comprising 3′-amino phosphoramidate and aminoalkylphosphoramidates, thionophosphoramidates, thionoalkylphosphonates, thionoalkylphosphotriesters, and boranophosphates having normal 3′-5′ linkages, 2′-5′ linked analogs of these, and those having inverted polarity wherein the adjacent pairs of nucleoside units are linked 3′-5′ to 5′-3′ or 2′-5′ to 5′-2′; see U.S. Pat. Nos. 3,687,808; 4,469,863; 4,476,301; 5,023,243; 5,177,196; 5,188,897; 5,264,423; 5,276,019; 5,278,302; 5,286,717; 5,321,131; 5,399,676; 5,405,939; 5,453,496; 5,455, 233; 5,466,677; 5,476,925; 5,519,126; 5,536,821; 5,541,306; 5,550,111; 5,563, 253; 5,571,799; 5,587,361; and 5,625,050.

[0107] Morpholino-based oligomeric compounds are described in Dwaine A. Braasch and David R. Corey, Biochemistry, 2002, 41(14), 4503-4510); Genesis, volume 30, issue 3, 2001; Heasman, J., Dev. Biol., 2002, 243, 209-214; Nasevicius et al., Nat. Genet., 2000, 26, 216-220; Lacerra et al., Proc. Natl. Acad. Sci., 2000, 97, 9591-9596; and U.S. Pat. No. 5,034,506, issued Jul. 23, 1991. In some embodiments, the morpholino-based oligomeric compound is a phosphorodiamidate morpholino oligomer (PMO) (e.g., as described in Iverson, Curr. Opin. Mol. Ther., 3:235-238, 2001; and Wang et al., J. Gene Med., 12:354-364, 2010; the disclosures of which are incorporated herein by reference in their entireties).

[0108] Cyclohexenyl nucleic acid oligonucleotide mimetics are described in Wang et al., J. Am. Chem. Soc., 2000, 122, 8595-8602.

[0109] Modified oligonucleotide backbones that do not include a phosphorus atom therein have backbones that are formed by short chain alkyl or cycloalkyl internucleoside linkages, mixed heteroatom and alkyl or cycloalkyl internucleoside linkages, or one or more short chain heteroatomic or heterocyclic internucleoside linkages. These comprise those having morpholino linkages (formed in part from the sugar portion of a nucleoside); siloxane backbones; sulfide, sulfoxide and sulfone backbones; formacetyl and thioformacetyl backbones; methylene formacetyl and thioformacetyl backbones; alkene containing backbones; sulfamate backbones; methyleneimino and methylenehydrazino backbones; sulfonate and sulfonamide backbones; amide backbones; and others having mixed N, O, S and CH2 component parts; see U.S. Pat. Nos. 5,034,506; 5,166,315; 5,185,444; 5,214,134; 5,216,141; 5,235,033; 5,264,562; 5,264,564; 5,405,938; 5,434,257; 5,466,677; 5,470,967; 5,489,677; 5,541,307; 5,561,225; 5,596,086; 5,602,240; 5,610,289; 5,602,240; 5,608,046; 5,610,289; 5,618,704; 5,623,070; 5,663,312; 5,633,360; 5,677,437; and 5,677,439, each of which is herein incorporated by reference.

[0110] Modified oligonucleotides are also known that include oligonucleotides that are based on or constructed from arabinonucleotide or modified arabinonucleotide residues. Arabinonucleosides are stereoisomers of ribonucleosides, differing only in the configuration at the 2′-position of the sugar ring. In some embodiments, a 2′-arabino modification is 2′-F arabino. In some embodiments, the modified oligonucleotide is 2′-fluoro-D-arabinonucleic acid (FANA) (as described in, for example, Lon et al., Biochem., 41:3457-3467, 2002 and Min et al., Bioorg. Med. Chem. Lett., 12:2651-2654, 2002; the disclosures of which are incorporated herein by reference in their entireties). Similar modifications can also be made at other positions on the sugar, particularly the 3′ position of the sugar on a 3′ terminal nucleoside or in 2′-5′ linked oligonucleotides and the 5′ position of 5′ terminal nucleotide.

[0111] PCT Publication No. WO 99/67378 discloses arabinonucleic acids (ANA) oligomers and their analogues for improved sequence specific inhibition of gene expression via association to complementary messenger RNA.

[0112] Other preferred modifications include ethylene-bridged nucleic acids (ENAs) (e.g., International Patent Publication No. WO 2005/042777, Morita et al., Nucleic Acid Res., Suppl 1:241-242, 2001; Surono et al., Hum. Gene Ther., 15:749-757, 2004; Koizumi, Curr. Opin. Mol. Ther., 8:144-149, 2006 and Horie et al., Nucleic Acids Symp. Ser (Oxf), 49:171-172, 2005; the disclosures of which are incorporated herein by reference in their entireties). Preferred ENAs include, but are not limited to, 2′-0,4′-C-ethylene-bridged nucleic acids.

[0113] Examples of LNAs are described in WO/2008/043753 and include compounds of the following general formula.

[chemical structure]

[0114] where X and Y are independently selected among the groups —O—,

[0115] —S—, —N(H)—, N(R)—, —CH₂— or —CH— (if part of a double bond),

[0116] —CH₂—O—, —CH₂—S—, —CH₂—N(H)—, —CH₂—N(R)—, —CH₂—CH₂— or —CH₂—CH— (if part of a double bond),

[0117] —CH═CH—, where R is selected from hydrogen and C₁₋₄-alkyl; Z and Z* are independently selected among an internucleoside linkage, a terminal group or a protecting group; B constitutes a natural or non-natural nucleotide base moiety; and the asymmetric groups may be found in either orientation.

[0118] Preferably, the LNA used in the oligonucleotides described herein comprises at least one LNA unit according any of the formulas

[chemical structure]

[0119] wherein Y is —O—, —S—, —NH—, or N(R^{H}); Z and Z* are independently selected among an internucleoside linkage, a terminal group or a protecting group; B constitutes a natural or non-natural nucleotide base moiety, and RH is selected from hydrogen and C₁₋₄-alkyl.

[0120] In some embodiments, the Locked Nucleic Acid (LNA) used in the oligonucleotides described herein comprises at least one Locked Nucleic Acid (LNA) unit according any of the formulas shown in Scheme 2 of PCT/DK2006/000512.

[0121] In some embodiments, the LNA used in the oligomer of the invention comprises internucleoside linkages selected from —O—P(O)₂—O—, —O—P(O,S)—O—, —O—P(S)₂—O—, —S—P(O)₂—O—, —S—P(O,S)—O—, —S—P(S)₂—O—, —O—P(O)₂—S—, —O—P(O,S)—S—, —S—P(O)₂—S—, —O—PO(R^{H})—O—, O—PO(OCH₃)—O—, —O—PO(NR^{H})—O—, —O—PO(OCH₂CH₂S—R)—O—, —O—PO(BH₃)—O—, —O—PO(NHR^{H})—O—, —O—P(O)₂—NR^{H}—, —NR^{H}—P(O)₂—O—, —NR^{H}—CO—O—, where R^{H} is selected from hydrogen and C₁₋₄-alkyl.

[0122] Specifically preferred LNA units are shown in scheme 2:

[chemical structure]

[0123] The term “thio-LNA” comprises a locked nucleotide in which at least one of X or Y in the general formula above is selected from S or —CH₂—S—. Thio-LNA can be in both beta-D and alpha-L-configuration.

[0124] The term “amino-LNA” comprises a locked nucleotide in which at least one of X or Y in the general formula above is selected from —N(H)—, N(R)—, CH₂—N(H)—, and —CH₂—N(R)— where R is selected from hydrogen and C₁₋₄-alkyl. Amino-LNA can be in both beta-D and alpha-L-configuration.

[0125] The term “oxy-LNA” comprises a locked nucleotide in which at least one of X or Y in the general formula above represents —O— or —CH₂—O—. Oxy-LNA can be in both beta-D and alpha-L-configuration.

[0126] The term “ena-LNA” comprises a locked nucleotide in which Y in the general formula above is —CH₂—O— (where the oxygen atom of —CH₂—O— is attached to the 2′-position relative to the base B).

[0127] LNAs are described in additional detail herein.

[0128] One or more substituted sugar moieties can also be included, e.g., one of the following at the 2′ position: OH, SH, SCH₃, F, OCN, OCH₃ OCH₃, OCH₃ O(CH₂)n CH₃, O(CH₂)n NH₂ or O(CH₂)n CH₃ where n is from 1 to about 10; C1 to C10 lower alkyl, alkoxyalkoxy, substituted lower alkyl, alkaryl or aralkyl; Cl; Br; CN; CF₃; OCF₃; O-, S-, or N-alkyl; O-, S-, or N-alkenyl; SOCH₃; SO₂ CH₃; ONO₂; NO₂; N₃; NH2; heterocycloalkyl; heterocycloalkaryl; amino alkylamino; polyalkylamino; substituted silyl; an RNA cleaving group; a reporter group; an intercalator; a group for improving the pharmacokinetic properties of an oligonucleotide; or a group for improving the pharmacodynamic properties of an oligonucleotide and other substituents having similar properties. A preferred modification includes 2′-methoxyethoxy[2′-O—CH₂CH₂OCH₃, also known as 2′-O-(2-methoxyethyl)] (Martin et al, Helv. Chim. Acta, 1995, 78, 486). Other preferred modifications include 2′-methoxy (2′-O—CH₃), 2′-propoxy (2′-OCH₂ CH₂CH₃) and 2′-fluoro (2′-F). Similar modifications may also be made at other positions on the oligonucleotide, particularly the 3′ position of the sugar on the 3′ terminal nucleotide and the 5′ position of 5′ terminal nucleotide. Oligonucleotides may also have sugar mimetics such as cyclobutyls in place of the pentofuranosyl group.

[0129] Single stranded oligonucleotides can also include, additionally or alternatively, nucleobase (often referred to in the art simply as “base”) modifications or substitutions. As used herein, “unmodified” or “natural” nucleobases include adenine (A), guanine (G), thymine (T), cytosine (C) and uracil (U). Modified nucleobases include nucleobases found only infrequently or transiently in natural nucleic acids, e.g., hypoxanthine, 6-methyladenine, 5-Me pyrimidines, particularly 5-methylcytosine (also referred to as 5-methyl-2′ deoxycytosine and often referred to in the art as 5-Me-C), 5-hydroxymethylcytosine (HMC), glycosyl HMC and gentobiosyl HMC, isocytosine, pseudoisocytosine, as well as synthetic nucleobases, e.g., 2-aminoadenine, 2-(methylamino)adenine, 2-(imidazolylalkyl)adenine, 2-(aminoalklyamino)adenine or other heterosubstituted alkyladenines, 2-thiouracil, 2-thiothymine, 5-bromouracil, 5-hydroxymethyluracil, 5-propynyluracil, 8-azaguanine, 7-deazaguanine, N6 (6-aminohexyl)adenine, 6-aminopurine, 2-aminopurine, 2-chloro-6-aminopurine and 2,6-diaminopurine or other diaminopurines. See, e.g., Kornberg, “DNA Replication,” W. H. Freeman & Co., San Francisco, 1980, pp 75-77; and Gebeyehu, G., et al. Nucl. Acids Res., 15:4513 (1987)). A “universal” base known in the art, e.g., inosine, can also be included. 5-Me-C substitutions have been shown to increase nucleic acid duplex stability by 0.6-1.2° C. (Sanghvi, in Crooke, and Lebleu, eds., Antisense Research and Applications, CRC Press, Boca Raton, 1993, pp. 276-278) and may be used as base substitutions.

[0130] It is not necessary for all positions in a given oligonucleotide to be uniformly modified, and in fact more than one of the modifications described herein may be incorporated in a single oligonucleotide or even at within a single nucleoside within an oligonucleotide.

[0131] In some embodiments, both a sugar and an internucleoside linkage, i.e., the backbone, of the nucleotide units are replaced with novel groups. The base units are maintained for hybridization with an appropriate nucleic acid target compound. One such oligomeric compound, an oligonucleotide mimetic that has been shown to have excellent hybridization properties, is referred to as a peptide nucleic acid (PNA). In PNA compounds, the sugar-backbone of an oligonucleotide is replaced with an amide containing backbone, for example, an aminoethylglycine backbone. The nucleobases are retained and are bound directly or indirectly to aza nitrogen atoms of the amide portion of the backbone. Representative United States patents that teach the preparation of PNA compounds include, but are not limited to, U.S. Pat. Nos. 5,539,082; 5,714,331; and 5,719,262, each of which is herein incorporated by reference. Further teaching of PNA compounds can be found in Nielsen et al, Science, 1991, 254, 1497-1500.

[0132] Single stranded oligonucleotides can also include one or more nucleobase (often referred to in the art simply as “base”) modifications or substitutions. As used herein, “unmodified” or “natural” nucleobases comprise the purine bases adenine (A) and guanine (G), and the pyrimidine bases thymine (T), cytosine (C) and uracil (U). Modified nucleobases comprise other synthetic and natural nucleobases such as 5-methylcytosine (5-me-C), 5-hydroxymethyl cytosine, xanthine, hypoxanthine, 2-aminoadenine, 6-methyl and other alkyl derivatives of adenine and guanine, 2-propyl and other alkyl derivatives of adenine and guanine, 2-thiouracil, 2-thiothymine and 2-thiocytosine, 5-halouracil and cytosine, 5-propynyl uracil and cytosine, 6-azo uracil, cytosine and thymine, 5-uracil (pseudo-uracil), 4-thiouracil, 8-halo, 8-amino, 8-thiol, 8-thioalkyl, 8-hydroxyl and other 8-substituted adenines and guanines, 5-halo particularly 5-bromo, 5-trifluoromethyl and other 5-substituted uracils and cytosines, 7-methylquanine and 7-methyladenine, 8-azaguanine and 8-azaadenine, 7-deazaguanine and 7-deazaadenine and 3-deazaguanine and 3-deazaadenine.

[0133] Further, nucleobases comprise those disclosed in U.S. Pat. No. 3,687,808, those disclosed in “The Concise Encyclopedia of Polymer Science And Engineering”, pages 858-859, Kroschwitz, ed. John Wiley & Sons, 1990; those disclosed by Englisch et al., Angewandle Chemie, International Edition, 1991, 30, page 613, and those disclosed by Sanghvi, Chapter 15, Antisense Research and Applications,” pages 289-302, Crooke, and Lebleu, eds., CRC Press, 1993. Certain of these nucleobases are particularly useful for increasing the binding affinity of the oligomeric compounds of the invention. These include 5-substituted pyrimidines, 6-azapyrimidines and N-2, N-6 and 0-6 substituted purines, comprising 2-aminopropyladenine, 5-propynyluracil and 5-propynylcytosine. 5-methylcytosine substitutions have been shown to increase nucleic acid duplex stability by 0.6-1.2<0>C (Sanghvi, et al., eds, “Antisense Research and Applications,” CRC Press, Boca Raton, 1993, pp. 276-278) and are presently preferred base substitutions, even more particularly when combined with 2′-O-methoxyethyl sugar modifications. Modified nucleobases are described in U.S. Pat. No. 3,687,808, as well as U.S. Pat. Nos. 4,845,205; 5,130,302; 5,134,066; 5,175,273; 5,367,066; 5,432,272; 5,457,187; 5,459,255; 5,484,908; 5,502,177; 5,525,711; 5,552,540; 5,587,469; 5,596,091; 5,614,617; 5,750,692, and 5,681,941, each of which is herein incorporated by reference.

[0134] In some embodiments, the single stranded oligonucleotides are chemically linked to one or more moieties or conjugates that enhance the activity, cellular distribution, or cellular uptake of the oligonucleotide. For example, one or more single stranded oligonucleotides, of the same or different types, can be conjugated to each other; or single stranded oligonucleotides can be conjugated to targeting moieties with enhanced specificity for a cell type or tissue type. Such moieties include, but are not limited to, lipid moieties such as a cholesterol moiety (Letsinger et al., Proc. Natl. Acad. Sci. USA, 1989, 86, 6553-6556), cholic acid (Manoharan et al., Bioorg. Med. Chem. Let., 1994, 4, 1053-1060), a thioether, e.g., hexyl-S-tritylthiol (Manoharan et al, Ann. N. Y. Acad. Sci., 1992, 660, 306-309; Manoharan et al., Bioorg. Med. Chem. Let., 1993, 3, 2765-2770), a thiocholesterol (Oberhauser et al., Nucl. Acids Res., 1992, 20, 533-538), an aliphatic chain, e.g., dodecandiol or undecyl residues (Kabanov et al., FEBS Lett., 1990, 259, 327-330; Svinarchuk et al., Biochimie, 1993, 75, 49-54), a phospholipid, e.g., di-hexadecyl-rac-glycerol or triethylammonium 1,2-di-O-hexadecyl-rac-glycero-3-H-phosphonate (Manoharan et al., Tetrahedron Lett., 1995, 36, 3651-3654; Shea et al., Nucl. Acids Res., 1990, 18, 3777-3783), a polyamine or a polyethylene glycol chain (Mancharan et al., Nucleosides & Nucleotides, 1995, 14, 969-973), or adamantane acetic acid (Manoharan et al., Tetrahedron Lett., 1995, 36, 3651-3654), a palmityl moiety (Mishra et al., Biochim. Biophys. Acta, 1995, 1264, 229-237), or an octadecylamine or hexylamino-carbonyl-t oxycholesterol moiety (Crooke et al., J. Pharmacol. Exp. Ther., 1996, 277, 923-937). See also U.S. Pat. Nos. 4,828,979; 4,948,882; 5,218,105; 5,525,465; 5,541,313; 5,545,730; 5,552,538; 5,578,717, 5,580,731; 5,580,731; 5,591,584; 5,109,124; 5,118,802; 5,138,045; 5,414,077; 5,486, 603; 5,512,439; 5,578,718; 5,608,046; 4,587,044; 4,605,735; 4,667,025; 4,762,779; 4,789,737; 4,824,941; 4,835,263; 4,876,335; 4,904,582; 4,958,013; 5,082,830; 5,112,963; 5,214,136; 5,082,830; 5,112,963; 5,214,136; 5,245,022; 5,254,469; 5,258,506; 5,262,536; 5,272,250; 5,292,873; 5,317,098; 5,371,241, 5,391,723; 5,416,203, 5,451,463; 5,510,475; 5,512,667; 5,514,785; 5,565,552; 5,567,810; 5,574,142; 5,585,481; 5,587,371; 5,595,726; 5,597,696; 5,599,923; 5,599,928 and 5,688,941, each of which is herein incorporated by reference.

[0135] These moieties or conjugates can include conjugate groups covalently bound to functional groups such as primary or secondary hydroxyl groups. Conjugate groups of the invention include intercalators, reporter molecules, polyamines, polyamides, polyethylene glycols, polyethers, groups that enhance the pharmacodynamic properties of oligomers, and groups that enhance the pharmacokinetic properties of oligomers. Typical conjugate groups include cholesterols, lipids, phospholipids, biotin, phenazine, folate, phenanthridine, anthraquinone, acridine, fluoresceins, rhodamines, coumarins, and dyes. Groups that enhance the pharmacodynamic properties, in the context of this invention, include groups that improve uptake, enhance resistance to degradation, and/or strengthen sequence-specific hybridization with the target nucleic acid. Groups that enhance the pharmacokinetic properties, in the context of this invention, include groups that improve uptake, distribution, metabolism or excretion of the compounds of the present invention. Representative conjugate groups are disclosed in International Patent Application No. PCT/US92/09196, filed Oct. 23, 1992, and U.S. Pat. No. 6,287,860, which are incorporated herein by reference. Conjugate moieties include, but are not limited to, lipid moieties such as a cholesterol moiety, cholic acid, a thioether, e.g., hexyl-5-tritylthiol, a thiocholesterol, an aliphatic chain, e.g., dodecandiol or undecyl residues, a phospholipid, e.g., di-hexadecyl-rac-glycerol or triethylammonium 1,2-di-O-hexadecyl-rac-glycero-3-H-phosphonate, a polyamine or a polyethylene glycol chain, or adamantane acetic acid, a palmityl moiety, or an octadecylamine or hexylamino-carbonyl-oxy cholesterol moiety. See, e.g., U.S. Pat. Nos. 4,828,979; 4,948,882; 5,218,105; 5,525,465; 5,541,313; 5,545,730; 5,552,538; 5,578,717, 5,580,731; 5,580,731; 5,591,584; 5,109,124; 5,118,802; 5,138,045; 5,414,077; 5,486,603; 5,512,439; 5,578,718; 5,608,046; 4,587,044; 4,605,735; 4,667,025; 4,762,779; 4,789,737; 4,824,941; 4,835,263; 4,876,335; 4,904,582; 4,958,013; 5,082,830; 5,112,963; 5,214,136; 5,082,830; 5,112,963; 5,214,136; 5,245,022; 5,254,469; 5,258,506; 5,262,536; 5,272,250; 5,292,873; 5,317,098; 5,371,241, 5,391,723; 5,416,203, 5,451,463; 5,510,475; 5,512,667; 5,514,785; 5,565,552; 5,567,810; 5,574,142; 5,585,481; 5,587,371; 5,595,726; 5,597,696; 5,599,923; 5,599,928 and 5,688,941.

[0136] In some embodiments, single stranded oligonucleotide modification include modification of the 5′ or 3′ end of the oligonucleotide. In some embodiments, the 3′ end of the oligonucleotide comprises a hydroxyl group or a thiophosphate. It should be appreciated that additional molecules (e.g. a biotin moiety or a fluorophor) can be conjugated to the 5′ or 3′ end of the single stranded oligonucleotide. In some embodiments, the single stranded oligonucleotide comprises a biotin moiety conjugated to the 5′ nucleotide.

[0137] In some embodiments, the single stranded oligonucleotide comprises locked nucleic acids (LNA), ENA modified nucleotides, 2′-O-methyl nucleotides, or 2′-fluoro-deoxyribonucleotides. In some embodiments, the single stranded oligonucleotide comprises alternating deoxyribonucleotides and 2′-fluoro-deoxyribonucleotides. In some embodiments, the single stranded oligonucleotide comprises alternating deoxyribonucleotides and 2′-O-methyl nucleotides. In some embodiments, the single stranded oligonucleotide comprises alternating deoxyribonucleotides and ENA modified nucleotides. In some embodiments, the single stranded oligonucleotide comprises alternating deoxyribonucleotides and locked nucleic acid nucleotides. In some embodiments, the single stranded oligonucleotide comprises alternating locked nucleic acid nucleotides and 2′-O-methyl nucleotides.

[0138] In some embodiments, the 5′ nucleotide of the oligonucleotide is a deoxyribonucleotide. In some embodiments, the 5′ nucleotide of the oligonucleotide is a locked nucleic acid nucleotide. In some embodiments, the nucleotides of the oligonucleotide comprise deoxyribonucleotides flanked by at least one locked nucleic acid nucleotide on each of the 5′ and 3′ ends of the deoxyribonucleotides. In some embodiments, the nucleotide at the 3′ position of the oligonucleotide has a 3′ hydroxyl group or a 3′ thiophosphate.

[0139] In some embodiments, the single stranded oligonucleotide comprises phosphorothioate internucleotide linkages. In some embodiments, the single stranded oligonucleotide comprises phosphorothioate internucleotide linkages between at least two nucleotides. In some embodiments, the single stranded oligonucleotide comprises phosphorothioate internucleotide linkages between all nucleotides.

[0140] It should be appreciated that the single stranded oligonucleotide can have any combination of modifications as described herein.

[0141] The oligonucleotide may comprise a nucleotide sequence having one or more of the following modification patterns.

[0142] (a) (X)Xxxxxx, (X)xXxxxx, (X)xxXxxx, (X)xxxXxx, (X)xxxxXx and (X)xxxxxX,

[0143] (b) (X)XXxxxx, (X)XxXxxx, (X)XxxXxx, (X)XxxxXx, (X)XxxxxX, (X)xXXxxx, (X)xXxXxx, (X)xXxxXx, (X)xXxxxX, (X)xxXXxx, (X)xxXxXx, (X)xxXxxX, (X)xxxXXx, (X)xxxXxX and (X)xxxxXX,

[0144] (c) (X)XXXxxx, (X)xXXXxx, (X)xxXXXx, (X)xxxXXX, (X)XXxXxx, (X)XXxxXx, (X)XXxxxX, (X)xXXxXx, (X)xXXxxX, (X)xxXXxX, (X)XxXXxx, (X)XxxXXx (X)XxxxXX, (X)xXxXXx, (X)xXxxXX, (X)xxXxXX, (X)xXxXxX and (X)XxXxXx,

[0145] (d) (X)xxXXX, (X)xXxXXX, (X)xXXxXX, (X)xXXXxX, (X)xXXXXx, (X)XxxXXXX, (X)XxXxXX, (X)XxXXxX, (X)XxXXx, (X)XXxxXX, (X)XXxXxX,

[0146] (X)XXxXXx, (X)XXXxxX, (X)XXXxXx, and (X)XXXXxx,

[0147] (e) (X)xXXXXX, (X)XxXXXX, (X)XXxXXX, (X)XXXxXX, (X)XXXXxX and (X)XXXXXx, and

[0148] (f) XXXXXX, XxXXXXX, XXxXXXX, XXXxXXX, XXXXxXX, XXXXXxX and XXXXXXx, in which “X” denotes a nucleotide analogue, (X) denotes an optional nucleotide analogue, and “x” denotes a DNA or RNA nucleotide unit. Each of the above listed patterns may appear one or more times within an oligonucleotide, alone or in combination with any of the other disclosed modification patterns.

### Methods for Modulating Gene Expression

[0149] In one aspect, the invention relates to methods for modulating gene expression in a cell (e.g., a cell for which BDNF levels are reduced) for research purposes (e.g., to study the function of the gene in the cell). In another aspect, the invention relates to methods for modulating gene expression in a cell (e.g., a cell for which BDNF levels are reduced) for gene or epigenetic therapy. The cells can be in vitro, ex vivo, or in vivo (e.g., in a subject who has a disease resulting from reduced expression or activity of BDNF. In some embodiments, methods for modulating gene expression in a cell comprise delivering a single stranded oligonucleotide as described herein. In some embodiments, delivery of the single stranded oligonucleotide to the cell results in a level of expression of gene that is at least 5%, 10%, 20%, 30%, 40%, 50%, 60%, 70%, 80%, 90%, 100%, 200% or more greater than a level of expression of gene in a control cell to which the single stranded oligonucleotide has not been delivered. In certain embodiments, delivery of the single stranded oligonucleotide to the cell results in a level of expression of gene that is at least 50% greater than a level of expression of gene in a control cell to which the single stranded oligonucleotide has not been delivered.

[0150] In another aspect of the invention, methods comprise administering to a subject (e.g. a human) a composition comprising a single stranded oligonucleotide as described herein to increase protein levels in the subject. In some embodiments, the increase in protein levels is at least 5%, 10%, 20%, 30%, 40%, 50%, 60%, 70%, 80%, 90%, 100%, 200%, or more, higher than the amount of a protein in the subject before administering.

[0151] As another example, to increase expression of BDNF in a cell, the methods include introducing into the cell a single stranded oligonucleotide that is sufficiently complementary to a PRC2-associated region (e.g., of a long non-coding RNA) that maps to a genomic position encompassing or in proximity to the BDNF gene.

[0152] In another aspect of the invention provides methods of treating a condition (e.g., neurodegeneration diseases, such as ALS, AD, HD or PD) associated with decreased levels of expression of BDNF in a subject, the method comprising administering a single stranded oligonucleotide as described herein.

[0153] A subject can include a non-human mammal, e.g. mouse, rat, guinea pig, rabbit, cat, dog, goat, cow, or horse. In preferred embodiments, a subject is a human. Single stranded oligonucleotides have been employed as therapeutic moieties in the treatment of disease states in animals, including humans. Single stranded oligonucleotides can be useful therapeutic modalities that can be configured to be useful in treatment regimes for the treatment of cells, tissues and animals, especially humans.

[0154] For therapeutics, an animal, preferably a human, suspected of having neurodegeneration diseases, such as ALS, AD, HD or PD is treated by administering single stranded oligonucleotide in accordance with this invention. For example, in one non-limiting embodiment, the methods comprise the step of administering to the animal in need of treatment, a therapeutically effective amount of a single stranded oligonucleotide as described herein.

### Formulation, Delivery, And Dosing

[0155] The oligonucleotides described herein can be formulated for administration to a subject for treating a condition (e.g., neurodegeneration diseases, such as ALS, AD, HD or PD) associated with decreased levels of BDNF. It should be understood that the formulations, compositions and methods can be practiced with any of the oligonucleotides disclosed herein.

[0156] The formulations may conveniently be presented in unit dosage form and may be prepared by any methods well known in the art of pharmacy. The amount of active ingredient (e.g., an oligonucleotide or compound of the invention) which can be combined with a carrier material to produce a single dosage form will vary depending upon the host being treated, the particular mode of administration, e.g., intradermal or inhalation. The amount of active ingredient which can be combined with a carrier material to produce a single dosage form will generally be that amount of the compound which produces a therapeutic effect, e.g. tumor regression.

[0157] Pharmaceutical formulations of this invention can be prepared according to any method known to the art for the manufacture of pharmaceuticals. Such formulations can contain sweetening agents, flavoring agents, coloring agents and preserving agents. A formulation can be admixtured with nontoxic pharmaceutically acceptable excipients which are suitable for manufacture. Formulations may comprise one or more diluents, emulsifiers, preservatives, buffers, excipients, etc. and may be provided in such forms as liquids, powders, emulsions, lyophilized powders, sprays, creams, lotions, controlled release formulations, tablets, pills, gels, on patches, in implants, etc.

[0158] A formulated single stranded oligonucleotide composition can assume a variety of states. In some examples, the composition is at least partially crystalline, uniformly crystalline, and/or anhydrous (e.g., less than 80, 50, 30, 20, or 10% water). In another example, the single stranded oligonucleotide is in an aqueous phase, e.g., in a solution that includes water. The aqueous phase or the crystalline compositions can, e.g., be incorporated into a delivery vehicle, e.g., a liposome (particularly for the aqueous phase) or a particle (e.g., a microparticle as can be appropriate for a crystalline composition). Generally, the single stranded oligonucleotide composition is formulated in a manner that is compatible with the intended method of administration.

[0159] In some embodiments, the composition is prepared by at least one of the following methods: spray drying, lyophilization, vacuum drying, evaporation, fluid bed drying, or a combination of these techniques; or sonication with a lipid, freeze-drying, condensation and other self-assembly.

[0160] A single stranded oligonucleotide preparation can be formulated or administered (together or separately) in combination with another agent, e.g., another therapeutic agent or an agent that stabilizes a single stranded oligonucleotide, e.g., a protein that complexes with single stranded oligonucleotide. Still other agents include chelators, e.g., EDTA (e.g., to remove divalent cations such as Mg²⁺), salts, RNAse inhibitors (e.g., a broad specificity RNAse inhibitor such as RNAsin) and so forth.

[0161] In one embodiment, the single stranded oligonucleotide preparation includes another single stranded oligonucleotide, e.g., a second single stranded oligonucleotide that modulates expression of a second gene or a second single stranded oligonucleotide that modulates expression of the first gene. Still other preparation can include at least 3, 5, ten, twenty, fifty, or a hundred or more different single stranded oligonucleotide species. Such single stranded oligonucleotides can mediated gene expression with respect to a similar number of different genes. In one embodiment, the single stranded oligonucleotide preparation includes at least a second therapeutic agent (e.g., an agent other than an oligonucleotide).

### Route of Delivery

[0162] A composition that includes a single stranded oligonucleotide can be delivered to a subject by a variety of routes. Exemplary routes include: intravenous, intradermal, topical, rectal, parenteral, anal, intravaginal, intranasal, pulmonary, ocular. The term “therapeutically effective amount” is the amount of oligonucleotide present in the composition that is needed to provide the desired level of BDNF expression in the subject to be treated to give the anticipated physiological response. The term “physiologically effective amount” is that amount delivered to a subject to give the desired palliative or curative effect. The term “pharmaceutically acceptable carrier” means that the carrier can be administered to a subject with no significant adverse toxicological effects to the subject.

[0163] The single stranded oligonucleotide molecules of the invention can be incorporated into pharmaceutical compositions suitable for administration. Such compositions typically include one or more species of single stranded oligonucleotide and a pharmaceutically acceptable carrier. As used herein the language “pharmaceutically acceptable carrier” is intended to include any and all solvents, dispersion media, coatings, antibacterial and antifungal agents, isotonic and absorption delaying agents, and the like, compatible with pharmaceutical administration. The use of such media and agents for pharmaceutically active substances is well known in the art. Except insofar as any conventional media or agent is incompatible with the active compound, use thereof in the compositions is contemplated. Supplementary active compounds can also be incorporated into the compositions.

[0164] The pharmaceutical compositions of the present invention may be administered in a number of ways depending upon whether local or systemic treatment is desired and upon the area to be treated. Administration may be topical (including ophthalmic, vaginal, rectal, intranasal, transdermal), oral or parenteral. Parenteral administration includes intravenous drip, subcutaneous, intraperitoneal or intramuscular injection, or intrathecal or intraventricular administration.

[0165] The route and site of administration may be chosen to enhance targeting. For example, to target muscle cells, intramuscular injection into the muscles of interest would be a logical choice. Lung cells might be targeted by administering the single stranded oligonucleotide in aerosol form. The vascular endothelial cells could be targeted by coating a balloon catheter with the single stranded oligonucleotide and mechanically introducing the oligonucleotide.

[0166] Topical administration refers to the delivery to a subject by contacting the formulation directly to a surface of the subject. The most common form of topical delivery is to the skin, but a composition disclosed herein can also be directly applied to other surfaces of the body, e.g., to the eye, a mucous membrane, to surfaces of a body cavity or to an internal surface. As mentioned above, the most common topical delivery is to the skin. The term encompasses several routes of administration including, but not limited to, topical and transdermal. These modes of administration typically include penetration of the skin's permeability barrier and efficient delivery to the target tissue or stratum. Topical administration can be used as a means to penetrate the epidermis and dermis and ultimately achieve systemic delivery of the composition. Topical administration can also be used as a means to selectively deliver oligonucleotides to the epidermis or dermis of a subject, or to specific strata thereof, or to an underlying tissue.

[0167] Formulations for topical administration may include transdermal patches, ointments, lotions, creams, gels, drops, suppositories, sprays, liquids and powders. Conventional pharmaceutical carriers, aqueous, powder or oily bases, thickeners and the like may be necessary or desirable. Coated condoms, gloves and the like may also be useful.

[0168] Transdermal delivery is a valuable route for the administration of lipid soluble therapeutics. The dermis is more permeable than the epidermis and therefore absorption is much more rapid through abraded, burned or denuded skin. Inflammation and other physiologic conditions that increase blood flow to the skin also enhance transdermal adsorption. Absorption via this route may be enhanced by the use of an oily vehicle (inunction) or through the use of one or more penetration enhancers. Other effective ways to deliver a composition disclosed herein via the transdermal route include hydration of the skin and the use of controlled release topical patches. The transdermal route provides a potentially effective means to deliver a composition disclosed herein for systemic and/or local therapy. In addition, iontophoresis (transfer of ionic solutes through biological membranes under the influence of an electric field), phonophoresis or sonophoresis (use of ultrasound to enhance the absorption of various therapeutic agents across biological membranes, notably the skin and the cornea), and optimization of vehicle characteristics relative to dose position and retention at the site of administration may be useful methods for enhancing the transport of topically applied compositions across skin and mucosal sites.

[0169] Both the oral and nasal membranes offer advantages over other routes of administration. For example, oligonucleotides administered through these membranes may have a rapid onset of action, provide therapeutic plasma levels, avoid first pass effect of hepatic metabolism, and avoid exposure of the oligonucleotides to the hostile gastrointestinal (GI) environment. Additional advantages include easy access to the membrane sites so that the oligonucleotide can be applied, localized and removed easily.

[0170] In oral delivery, compositions can be targeted to a surface of the oral cavity, e.g., to sublingual mucosa which includes the membrane of ventral surface of the tongue and the floor of the mouth or the buccal mucosa which constitutes the lining of the cheek. The sublingual mucosa is relatively permeable thus giving rapid absorption and acceptable bioavailability of many agents. Further, the sublingual mucosa is convenient, acceptable and easily accessible.

[0171] A pharmaceutical composition of single stranded oligonucleotide may also be administered to the buccal cavity of a human being by spraying into the cavity, without inhalation, from a metered dose spray dispenser, a mixed micellar pharmaceutical formulation as described above and a propellant. In one embodiment, the dispenser is first shaken prior to spraying the pharmaceutical formulation and propellant into the buccal cavity.

[0172] Compositions for oral administration include powders or granules, suspensions or solutions in water, syrups, slurries, emulsions, elixirs or non-aqueous media, tablets, capsules, lozenges, or troches. In the case of tablets, carriers that can be used include lactose, sodium citrate and salts of phosphoric acid. Various disintegrants such as starch, and lubricating agents such as magnesium stearate, sodium lauryl sulfate and talc, are commonly used in tablets. For oral administration in capsule form, useful diluents are lactose and high molecular weight polyethylene glycols. When aqueous suspensions are required for oral use, the nucleic acid compositions can be combined with emulsifying and suspending agents. If desired, certain sweetening and/or flavoring agents can be added.

[0173] Parenteral administration includes intravenous drip, subcutaneous, intraperitoneal or intramuscular injection, intrathecal or intraventricular administration. In some embodiments, parental administration involves administration directly to the site of disease (e.g. injection into a tumor).

[0174] Formulations for parenteral administration may include sterile aqueous solutions which may also contain buffers, diluents and other suitable additives. Intraventricular injection may be facilitated by an intraventricular catheter, for example, attached to a reservoir. For intravenous use, the total concentration of solutes should be controlled to render the preparation isotonic.

[0175] Any of the single stranded oligonucleotides described herein can be administered to ocular tissue. For example, the compositions can be applied to the surface of the eye or nearby tissue, e.g., the inside of the eyelid. For ocular administration, ointments or droppable liquids may be delivered by ocular delivery systems known to the art such as applicators or eye droppers. Such compositions can include mucomimetics such as hyaluronic acid, chondroitin sulfate, hydroxypropyl methylcellulose or poly(vinyl alcohol), preservatives such as sorbic acid, EDTA or benzylchronium chloride, and the usual quantities of diluents and/or carriers. The single stranded oligonucleotide can also be administered to the interior of the eye, and can be introduced by a needle or other delivery device which can introduce it to a selected area or structure.

[0176] Pulmonary delivery compositions can be delivered by inhalation by the patient of a dispersion so that the composition, preferably single stranded oligonucleotides, within the dispersion can reach the lung where it can be readily absorbed through the alveolar region directly into blood circulation. Pulmonary delivery can be effective both for systemic delivery and for localized delivery to treat diseases of the lungs.

[0177] Pulmonary delivery can be achieved by different approaches, including the use of nebulized, aerosolized, micellular and dry powder-based formulations. Delivery can be achieved with liquid nebulizers, aerosol-based inhalers, and dry powder dispersion devices. Metered-dose devices are preferred. One of the benefits of using an atomizer or inhaler is that the potential for contamination is minimized because the devices are self-contained. Dry powder dispersion devices, for example, deliver agents that may be readily formulated as dry powders. A single stranded oligonucleotide composition may be stably stored as lyophilized or spray-dried powders by itself or in combination with suitable powder carriers. The delivery of a composition for inhalation can be mediated by a dosing timing element which can include a timer, a dose counter, time measuring device, or a time indicator which when incorporated into the device enables dose tracking, compliance monitoring, and/or dose triggering to a patient during administration of the aerosol medicament.

[0178] The term “powder” means a composition that consists of finely dispersed solid particles that are free flowing and capable of being readily dispersed in an inhalation device and subsequently inhaled by a subject so that the particles reach the lungs to permit penetration into the alveoli. Thus, the powder is said to be “respirable.” Preferably the average particle size is less than about 10 μm in diameter preferably with a relatively uniform spheroidal shape distribution. More preferably the diameter is less than about 7.5 μm and most preferably less than about 5.0 μm. Usually the particle size distribution is between about 0.1 μm and about 5 μm in diameter, particularly about 0.3 μm to about 5 μm.

[0179] The term “dry” means that the composition has a moisture content below about 10% by weight (% w) water, usually below about 5% w and preferably less it than about 3% w. A dry composition can be such that the particles are readily dispersible in an inhalation device to form an aerosol.

[0180] The types of pharmaceutical excipients that are useful as carrier include stabilizers such as human serum albumin (HSA), bulking agents such as carbohydrates, amino acids and polypeptides; pH adjusters or buffers; salts such as sodium chloride; and the like. These carriers may be in a crystalline or amorphous form or may be a mixture of the two.

[0181] Suitable pH adjusters or buffers include organic salts prepared from organic acids and bases, such as sodium citrate, sodium ascorbate, and the like; sodium citrate is preferred. Pulmonary administration of a micellar single stranded oligonucleotide formulation may be achieved through metered dose spray devices with propellants such as tetrafluoroethane, heptafluoroethane, dimethylfluoropropane, tetrafluoropropane, butane, isobutane, dimethyl ether and other non-CFC and CFC propellants.

[0182] Exemplary devices include devices which are introduced into the vasculature, e.g., devices inserted into the lumen of a vascular tissue, or which devices themselves form a part of the vasculature, including stents, catheters, heart valves, and other vascular devices. These devices, e.g., catheters or stents, can be placed in the vasculature of the lung, heart, or leg.

[0183] Other devices include non-vascular devices, e.g., devices implanted in the peritoneum, or in organ or glandular tissue, e.g., artificial organs. The device can release a therapeutic substance in addition to a single stranded oligonucleotide, e.g., a device can release insulin.

[0184] In one embodiment, unit doses or measured doses of a composition that includes single stranded oligonucleotide are dispensed by an implanted device. The device can include a sensor that monitors a parameter within a subject. For example, the device can include pump, e.g., and, optionally, associated electronics.

[0185] Tissue, e.g., cells or organs can be treated with a single stranded oligonucleotide, ex vivo and then administered or implanted in a subject. The tissue can be autologous, allogeneic, or xenogeneic tissue. E.g., tissue can be treated to reduce graft v. host disease. In other embodiments, the tissue is allogeneic and the tissue is treated to treat a disorder characterized by unwanted gene expression in that tissue. E.g., tissue, e.g., hematopoietic cells, e.g., bone marrow hematopoietic cells, can be treated to inhibit unwanted cell proliferation. Introduction of treated tissue, whether autologous or transplant, can be combined with other therapies. In some implementations, the single stranded oligonucleotide treated cells are insulated from other cells, e.g., by a semi-permeable porous barrier that prevents the cells from leaving the implant, but enables molecules from the body to reach the cells and molecules produced by the cells to enter the body. In one embodiment, the porous barrier is formed from alginate.

[0186] In one embodiment, a contraceptive device is coated with or contains a single stranded oligonucleotide. Exemplary devices include condoms, diaphragms, IUD (implantable uterine devices, sponges, vaginal sheaths, and birth control devices.

### Dosage

[0187] In one aspect, the invention features a method of administering a single stranded oligonucleotide (e.g., as a compound or as a component of a composition) to a subject (e.g., a human subject). In one embodiment, the unit dose is between about 10 mg and 25 mg per kg of bodyweight. In one embodiment, the unit dose is between about 1 mg and 100 mg per kg of bodyweight. In one embodiment, the unit dose is between about 0.1 mg and 500 mg per kg of bodyweight. In some embodiments, the unit dose is more than 0.001, 0.005, 0.01, 0.05, 0.1, 0.5, 1, 2, 5, 10, 25, 50 or 100 mg per kg of bodyweight.

[0188] The defined amount can be an amount effective to treat or prevent a disease or disorder, e.g., a disease or disorder associated with the BDNF. The unit dose, for example, can be administered by injection (e.g., intravenous or intramuscular), an inhaled dose, or a topical application.

[0189] In some embodiments, the unit dose is administered daily. In some embodiments, less frequently than once a day, e.g., less than every 2, 4, 8 or 30 days. In another embodiment, the unit dose is not administered with a frequency (e.g., not a regular frequency). For example, the unit dose may be administered a single time. In some embodiments, the unit dose is administered more than once a day, e.g., once an hour, two hours, four hours, eight hours, twelve hours, etc.

[0190] In one embodiment, a subject is administered an initial dose and one or more maintenance doses of a single stranded oligonucleotide. The maintenance dose or doses are generally lower than the initial dose, e.g., one-half less of the initial dose. A maintenance regimen can include treating the subject with a dose or doses ranging from 0.0001 to 100 mg/kg of body weight per day, e.g., 100, 10, 1, 0.1, 0.01, 0.001, or 0.0001 mg per kg of bodyweight per day. The maintenance doses may be administered no more than once every 1, 5, 10, or 30 days. Further, the treatment regimen may last for a period of time which will vary depending upon the nature of the particular disease, its severity and the overall condition of the patient. In some embodiments the dosage may be delivered no more than once per day, e.g., no more than once per 24, 36, 48, or more hours, e.g., no more than once for every 5 or 8 days. Following treatment, the patient can be monitored for changes in his condition and for alleviation of the symptoms of the disease state. The dosage of the oligonucleotide may either be increased in the event the patient does not respond significantly to current dosage levels, or the dose may be decreased if an alleviation of the symptoms of the disease state is observed, if the disease state has been ablated, or if undesired side-effects are observed.

[0191] The effective dose can be administered in a single dose or in two or more doses, as desired or considered appropriate under the specific circumstances. If desired to facilitate repeated or frequent infusions, implantation of a delivery device, e.g., a pump, semi-permanent stent (e.g., intravenous, intraperitoneal, intracisternal or intracapsular), or reservoir may be advisable.

[0192] In some embodiments, the oligonucleotide pharmaceutical composition includes a plurality of single stranded oligonucleotide species. In another embodiment, the single stranded oligonucleotide species has sequences that are non-overlapping and non-adjacent to another species with respect to a naturally occurring target sequence (e.g., a PRC2-associated region). In another embodiment, the plurality of single stranded oligonucleotide species is specific for different PRC2-associated regions. In another embodiment, the single stranded oligonucleotide is allele specific. In some cases, a patient is treated with a single stranded oligonucleotide in conjunction with other therapeutic modalities.

[0193] Following successful treatment, it may be desirable to have the patient undergo maintenance therapy to prevent the recurrence of the disease state, wherein the compound of the invention is administered in maintenance doses, ranging from 0.0001 mg to 100 mg per kg of body weight.

[0194] The concentration of the single stranded oligonucleotide composition is an amount sufficient to be effective in treating or preventing a disorder or to regulate a physiological condition in humans. The concentration or amount of single stranded oligonucleotide administered will depend on the parameters determined for the agent and the method of administration, e.g. nasal, buccal, pulmonary. For example, nasal formulations may tend to require much lower concentrations of some ingredients in order to avoid irritation or burning of the nasal passages. It is sometimes desirable to dilute an oral formulation up to 10-100 times in order to provide a suitable nasal formulation.

[0195] Certain factors may influence the dosage required to effectively treat a subject, including but not limited to the severity of the disease or disorder, previous treatments, the general health and/or age of the subject, and other diseases present. Moreover, treatment of a subject with a therapeutically effective amount of a single stranded oligonucleotide can include a single treatment or, preferably, can include a series of treatments. It will also be appreciated that the effective dosage of a single stranded oligonucleotide used for treatment may increase or decrease over the course of a particular treatment. For example, the subject can be monitored after administering a single stranded oligonucleotide composition. Based on information from the monitoring, an additional amount of the single stranded oligonucleotide composition can be administered.

[0196] Dosing is dependent on severity and responsiveness of the disease condition to be treated, with the course of treatment lasting from several days to several months, or until a cure is effected or a diminution of disease state is achieved. Optimal dosing schedules can be calculated from measurements of BDNF expression levels in the body of the patient. Persons of ordinary skill can easily determine optimum dosages, dosing methodologies and repetition rates. Optimum dosages may vary depending on the relative potency of individual compounds, and can generally be estimated based on EC50s found to be effective in in vitro and in vivo animal models. In some embodiments, the animal models include transgenic animals that express a human BDNF. In another embodiment, the composition for testing includes a single stranded oligonucleotide that is complementary, at least in an internal region, to a sequence that is conserved between BDNF in the animal model and the BDNF in a human.

[0197] In one embodiment, the administration of the single stranded oligonucleotide composition is parenteral, e.g. intravenous (e.g., as a bolus or as a diffusible infusion), intradermal, intraperitoneal, intramuscular, intrathecal, intraventricular, intracranial, subcutaneous, transmucosal, buccal, sublingual, endoscopic, rectal, oral, vaginal, topical, pulmonary, intranasal, urethral or ocular. Administration can be provided by the subject or by another person, e.g., a health care provider. The composition can be provided in measured doses or in a dispenser which delivers a metered dose. Selected modes of delivery are discussed in more detail below.

### Kits

[0198] In certain aspects of the invention, kits are provided, comprising a container housing a composition comprising a single stranded oligonucleotide. In some embodiments, the composition is a pharmaceutical composition comprising a single stranded oligonucleotide and a pharmaceutically acceptable carrier. In some embodiments, the individual components of the pharmaceutical composition may be provided in one container. Alternatively, it may be desirable to provide the components of the pharmaceutical composition separately in two or more containers, e.g., one container for single stranded oligonucleotides, and at least another for a carrier compound. The kit may be packaged in a number of different configurations such as one or more containers in a single box. The different components can be combined, e.g., according to instructions provided with the kit. The components can be combined according to a method described herein, e.g., to prepare and administer a pharmaceutical composition. The kit can also include a delivery device.

[0199] The present invention is further illustrated by the following Examples, which in no way should be construed as further limiting. The entire contents of all of the references (including literature references, issued patents, published patent applications, and co-pending patent applications) cited throughout this application are hereby expressly incorporated by reference.

### EXAMPLES

[0200] The invention is further described in the following examples, which do not limit the scope of the invention described in the claims.

### Materials and Methods:

### Real Time PCR

[0201] RNA was harvested from the cells using Promega SV 96 Total RNA Isolation system or Trizol omitting the DNAse step. In separate pilot experiments, 50 ng of RNA was determined to be sufficient template for the reverse transcriptase reaction. RNA harvested from cells was normalized so that 50 ng of RNA was input to each reverse transcription reaction. For the few samples that were too dilute to reach this limit, the maximum input volume was added. Reverse transcriptase reaction was performed using the Superscript II kit and real time PCR performed on cDNA samples using icycler SYBR green chemistry (Biorad). A baseline level of mRNA expression for each target gene was determined through quantitative PCR as outlined above. Baseline levels were also determined for mRNA of various housekeeping genes which are constitutively expressed. A “control” housekeeping gene with approximately the same level of baseline expression as the target gene was chosen for comparison purposes.

[0202] Cell Culture

[0203] Human hepatocyte Hep3B, human hepatocyte HepG2 cells, mouse hepatoma Hepa1-6 cells, and human renal proximal tubule epithelial cells (RPTEC) were cultured using conditions known in the art (see, e.g. Current Protocols in Cell Biology). Details of the cell lines used in the experiments described herein are provided in Table 5.

TABLE 5
Cell lines

| | | | | | | | Culture |
|---|---|---|---|---|---|---|---|
| Cell line | Source | Species | Gender | Cell Type | Tissue | Status | Conditions |
| Hep3B | ATCC | human | M | hepatocytes | liver | immortalized | Eagle's |
| | | | | | | | MEM + |
| | | | | | | | 10% FBS |
| liv mus | from C57BI/6 | mouse | N/A | multiple cell | liver | primary | |
| C57BI | mice (mice | | | types | | | |
| | obtained from | | | | | | |
| | Jackson Labs) | | | | | | |
| kid mus | from C57BI/6 | mouse | N/A | multiple cell | kidney | primary | |
| C57BI | mice (mice | | | types | | | |
| | obtained from | | | | | | |
| | Jackson Labs) | | | | | | |

### Oligonucleotide Design

[0204] Oligonucleotides were designed within PRC2-interacting regions in order to upregulate BDNF. The sequence and structure of each oligonucleotide is shown in Table 4. The following table provides a description of the nucleotide analogs, modifications and intranucleotide linkages used for certain oligonucleotides tested and described in Table 3.

TABLE 3
Oligonucleotide Modifications

| Symbol | Feature Description |
|---|---|
| bio | 5′ biotin |
| dAs | DNA w/3′ thiophosphate |
| dCs | DNA w/3′ thiophosphate |
| dGs | DNA w/3′ thiophosphate |
| dTs | DNA w/3′ thiophosphate |
| dG | DNA |
| enaAs | ENA w/3′ thiophosphate |
| enaCs | ENA w/3′ thiophosphate |
| enaGs | ENA w/3′ thiophosphate |
| enaTs | ENA w/3′ thiophosphate |
| fluAs | 2′-fluoro w/3′ thiophosphate |
| fluCs | 2′-fluoro w/3′ thiophosphate |
| fluGs | 2′-fluoro w/3′ thiophosphate |
| fluUs | 2′-fluoro w/3′ thiophosphate |
| lnaAs | LNA w/3′ thiophosphate |
| lnaCs | LNA w/3′ thiophosphate |
| lnaGs | LNA w/3′ thiophosphate |
| lnaTs | LNA w/3′ thiophosphate |
| omeAs | 2′-OMe w/3′ thiophosphate |
| omeCs | 2′-OMe w/3′ thiophosphate |
| omeGs | 2′-OMe w/3′ thiophosphate |
| omeTs | 2′-OMe w/3′ thiophosphate |
| lnaAs-Sup | LNA w/3′ thiophosphate at 3′ terminus |
| lnaCs-Sup | LNA w/3′ thiophosphate at 3′ terminus |
| lnaGs-Sup | LNA w/3′ thiophosphate at 3′ terminus |
| lnaTs-Sup | LNA w/3′ thiophosphate at 3′ terminus |
| lnaA-Sup | LNA w/3′ OH at 3′ terminus |
| lnaC-Sup | LNA w/3′ OH at 3′ terminus |
| lnaG-Sup | LNA w/3′ OH at 3′ terminus |
| lnaT-Sup | LNA w/3′ OH at 3′ terminus |
| omeA-Sup | 2′-OMe w/3′ OH at 3′ terminus |
| omeC-Sup | 2′-OMe w/3′ OH at 3′ terminus |
| omeG-Sup | 2′-OMe w/3′ OH at 3′ terminus |
| omeU-Sup | 2′-OMe w/3′ OH at 3′ terminus |
| dAs-Sup | DNA w/3′ thiophosphate at 3′ terminus |
| dCs-Sup | DNA w/3′ thiophosphate at 3′ terminus |
| dGs-Sup | DNA w/3′ thiophosphate at 3′ terminus |
| dTs-Sup | DNA w/3′ thiophosphate at 3′ terminus |
| dA-Sup | DNA w/3′ OH at 3′ terminus |
| dC-Sup | DNA w/3′ OH at 3′ terminus |
| dG-Sup | DNA w/3′ OH at 3′ terminus |
| dT-Sup | DNA w/3′ OH at 3′ terminus |

In Vitro Transfection of Cells with Oligonucleotides

[0205] Cells were seeded into each well of 24-well plates at a density of 25,000 cells per 500 uL and transfections were performed with Lipofectamine and the single stranded oligonucleotides. Control wells contained Lipofectamine alone. At 48 hours post-transfection, approximately 200 uL of cell culture supernatants were stored at −80 C. for ELISA. At 48 hours post-transfection, RNA was harvested from the cells and quantitative PCR was carried out as outlined above. The percent induction of target mRNA expression by each oligonucleotide was determined by normalizing mRNA levels in the presence of the oligonucleotide to the mRNA levels in the presence of control (Lipofectamine alone). This was compared side-by-side with the increase in mRNA expression of the “control” housekeeping gene.

### Results:

### In Vitro Delivery of Single Stranded Oligonucleotides Upregulated BDNF Expression

[0206] Oligonucleotides were designed as candidates for upregulating BDNF expression. A total of 40 single stranded oligonucleotides were designed to be complementary to a PRC2-interacting region within a sequence as set forth in SEQ ID NO: 1 or 2. 30 of the oligonucleotides were tested in at least duplicate. The sequence and structural features of the oligonucleotides are set forth in Table 2. Briefly, cells were transfected in vitro with each of the 30 oligonucleotides as described above. BDNF expression in cells following treatment was evaluated by qRT-PCR. Oligonucleotides that upregulated BDNF expression were identified. Further details are outlined in Table 2.

### Tables

TABLE 1
Hexamers that are not seed
sequences of human miRNAs

AAAAAA, AAAAAG, AAAACA, AAAAGA, AAAAGC, AAAAGG,
AAAAUA, AAACAA, AAACAC, AAACAG, AAACAU, AAACCC,
AAACCU, AAACGA, AAACGC, AAACGU, AAACUA, AAACUC,
AAACUU, AAAGAU, AAAGCC, AAAGGA, AAAGGG, AAAGUC,
AAAUAC, AAAUAU, AAAUCG, AAAUCU, AAAUGC, AAAUGU,
AAAUUA, AAAUUG, AACAAC, AACAAG, AACAAU, AACACA,
AACACG, AACAGA, AACAGC, AACAGG, AACAUC, AACAUG,
AACCAA, AACCAC, AACCAG, AACCAU, AACCCC, AACCCG,
AACCGA, AACCGC, AACCGG, AACCUA, AACCUU, AACGAA,
AACGAC, AACGAG, AACGAU, AACGCU, AACGGG, AACGGU,
AACGUA, AACGUC, AACGUG, AACGUU, AACUAU, AACUCA,
AACUCC, AACUCG, AACUGA, AACUGC, AACUGU, AACUUA,
AACUUC, AACUUG, AACUUU, AAGAAA, AAGAAG, AAGAAU,
AAGACG, AAGAGA, AAGAGC, AAGAGG, AAGAGU, AAGAUU,
AAGCAA, AAGCAC, AAGCAG, AAGCAU, AAGCCA, AAGCCC,
AAGCCG, AAGCCU, AAGCGA, AAGCGG, AAGCGU, AAGCUA,
AAGGAA, AAGGAC, AAGGCU, AAGGGC, AAGGGU, AAGGUU,
AAGUAA, AAGUAC, AAGUAU, AAGUCC, AAGUCG, AAGUGA,
AAGUGG, AAGUUA, AAGUUU, AAUAAA, AAUAAC, AAUAAG,
AAUAAU, AAUACA, AAUACC, AAUACG, AAUAGA, AAUAGC,
AAUAGG, AAUAGU, AAUAUC, AAUAUU, AAUCAA, AAUCAU,
AAUCCA, AAUCCC, AAUCCG, AAUCGA, AAUCGC, AAUCGU,
AAUCUA, AAUCUG, AAUCUU, AAUGAA, AAUGAC, AAUGAG,
AAUGAU, AAUGCG, AAUGCU, AAUGGA, AAUGGU, AAUGUA,
AAUGUC, AAUGUG, AAUUAA, AAUUAC, AAUUAG, AAUUCC,
AAUUCG, AAUUGA, AAUUGG, AAUUGU, AAUUUC, AAUUUG,
ACAAAA, ACAAAC, ACAAAG, ACAAAU, ACAACC, ACAACG,
ACAACU, ACAAGA, ACAAGC, ACAAGU, ACAAUC, ACAAUG,
ACAAUU, ACACAG, ACACCA, ACACCC, ACACCG, ACACCU,
ACACGA, ACACGC, ACACGU, ACACUC, ACACUG, ACACUU,
ACAGAA, ACAGAC, ACAGCC, ACAGCG, ACAGCU, ACAGGG,
ACAGUC, ACAGUG, ACAGUU, ACAUAA, ACAUAC, ACAUCC,
ACAUCG, ACAUCU, ACAUGA, ACAUGC, ACAUGU, ACAUUG,
ACAUUU, ACCAAA, ACCAAC, ACCAAG, ACCAAU, ACCACC,
ACCACG, ACCAGA, ACCAGU, ACCAUA, ACCAUG, ACCAUU,
ACCCAA, ACCCAC, ACCCCA, ACCCCG, ACCCGA, ACCCGC,
ACCCUA, ACCCUC, ACCCUU, ACCGAA, ACCGAC, ACCGAU,
ACCGCA, ACCGCC, ACCGCG, ACCGCU, ACCGGA, ACCGGC,
ACCGGU, ACCGUA, ACCGUC, ACCGUG, ACCGUU, ACCUAA,
ACCUAC, ACCUAG, ACCUAU, ACCUCA, ACCUCC, ACCUCG,
ACCUCU, ACCUGA, ACCUGC, ACCUGU, ACCUUA, ACCUUC,
ACCUUU, ACGAAA, ACGAAC, ACGAAG, ACGAAU, ACGACA,
ACGACC, ACGACG, ACGACU, ACGAGA, ACGAGC, ACGAGG,
ACGAGU, ACGAUA, ACGAUC, ACGAUG, ACGAUU, ACGCAA,
ACGCAG, ACGCAU, ACGCCC, ACGCCG, ACGCCU, ACGCGA,
ACGCGG, ACGCGU, ACGCUA, ACGCUG, ACGCUU, ACGGAA,
ACGGAC, ACGGAG, ACGGAU, ACGGCC, ACGGCG, ACGGCU,
ACGGGC, ACGGGG, ACGGGU, ACGGUA, ACGGUC, ACGGUG,
ACGGUU, ACGUAA, ACGUAC, ACGUAU, ACGUCC, ACGUCG,
ACGUCU, ACGUGA, ACGUGC, ACGUGG, ACGUGU, ACGUUA,
ACGUUC, ACGUUG, ACGUUU, ACUAAA, ACUAAG, ACUAAU,
ACUACA, ACUACC, ACUACG, ACUACU, ACUAGG, ACUAUC,
ACUAUG, ACUAUU, ACUCAU, ACUCCC, ACUCCG, ACUCCU,
ACUCGA, ACUCGC, ACUCGG, ACUCUC, ACUCUU, ACUGAG,
ACUGAU, ACUGCC, ACUGCG, ACUGCU, ACUGGG, ACUGGU,
ACUGUC, ACUUAA, ACUUAC, ACUUAU, ACUUCA, ACUUCC,
ACUUCG, ACUUCU, ACUUGA, ACUUGC, ACUUGU, ACUUUA,
ACUUUC, ACUUUG, AGAAAA, AGAAAC, AGAAAG, AGAACC,
AGAACG, AGAACU, AGAAGC, AGAAGU, AGAAUA, AGAAUC,
AGAAUG, AGAAUU, AGACAA, AGACAC, AGACAU, AGACCA,
AGACCC, AGACCG, AGACCU, AGACGA, AGACGC, AGACGU,
AGACUA, AGACUC, AGACUU, AGAGAC, AGAGAG, AGAGAU,
AGAGCC, AGAGCG, AGAGCU, AGAGGC, AGAGGG, AGAGGU,
AGAGUA, AGAGUU, AGAUAC, AGAUAG, AGAUAU, AGAUCC,
AGAUCG, AGAUCU, AGAUGA, AGAUGC, AGAUGG, AGAUUA,
AGAUUC, AGAUUG, AGAUUU, AGCAAC, AGCACA, AGCACG,
AGCACU, AGCAGA, AGCAUA, AGCAUC, AGCAUG, AGCCAA,
AGCCAU, AGCCCA, AGCCGA, AGCCGC, AGCCGG, AGCCGU,
AGCCUA, AGCCUC, AGCGAA, AGCGAG, AGCGAU, AGCGCA,
AGCGCC, AGCGCG, AGCGCU, AGCGGA, AGCGGC, AGCGGU,
AGCGUA, AGCGUC, AGCGUG, AGCGUU, AGCUAA, AGCUAC,
AGCUAG, AGCUAU, AGCUCA, AGCUCC, AGCUCG, AGCUCU,
AGCUGA, AGCUGG, AGCUGU, AGCUUC, AGCUUU, AGGAAU,
AGGACC, AGGACG, AGGAGA, AGGAGU, AGGAUA, AGGCAA,
AGGCAU, AGGCCG, AGGCGA, AGGCGC, AGGCGG, AGGCUA,
AGGCUC, AGGCUU, AGGGAC, AGGGAU, AGGGGA, AGGGGU,
AGGGUA, AGGGUG, AGGUAA, AGGUAC, AGGUCA, AGGUCC,
AGGUCU, AGGUGA, AGGUGC, AGGUGG, AGGUGU, AGGUUC,
AGGUUG, AGUAAA, AGUAAG, AGUAAU, AGUACA, AGUACG,
AGUAGC, AGUAGG, AGUAUA, AGUAUC, AGUAUG, AGUAUU,
AGUCAA, AGUCAC, AGUCAG, AGUCAU, AGUCCA, AGUCCG,
AGUCCU, AGUCGA, AGUCGC, AGUCGG, AGUCGU, AGUCUA,
AGUCUC, AGUCUG, AGUCUU, AGUGAA, AGUGAC, AGUGCG,
AGUGGG, AGUGUC, AGUUAA, AGUUAC, AGUUAG, AGUUCC,
AGUUCG, AGUUGA, AGUUGC, AGUUGU, AGUUUA, AGUUUC,
AGUUUG, AGUUUU, AUAAAC, AUAAAU, AUAACA, AUAACC,
AUAACG, AUAACU, AUAAGA, AUAAGC, AUAAGG, AUAAGU,
AUAAUC, AUAAUG, AUAAUU, AUACAC, AUACAG, AUACAU,
AUACCA, AUACCC, AUACCG, AUACGA, AUACGC, AUACGG,
AUACGU, AUACUA, AUACUC, AUACUG, AUACUU, AUAGAA,
AUAGAC, AUAGAU, AUAGCA, AUAGCG, AUAGCU, AUAGGA,
AUAGGU, AUAGUA, AUAGUC, AUAGUG, AUAGUU, AUAUAC,
AUAUAG, AUAUCC, AUAUCG, AUAUCU, AUAUGA, AUAUGC,
AUAUGG, AUAUGU, AUAUUC, AUAUUG, AUAUUU, AUCAAA,
AUCAAC, AUCAAG, AUCAAU, AUCACA, AUCACC, AUCACG,
AUCAGC, AUCAGG, AUCCAA, AUCCAU, AUCCCC, AUCCCG,
AUCCGA, AUCCGC, AUCCGG, AUCCUA, AUCCUC, AUCCUG,
AUCGAA, AUCGAC, AUCGAG, AUCGAU, AUCGCA, AUCGCC,
AUCGCG, AUCGCU, AUCGGC, AUCGGG, AUCGGU, AUCGUC,
AUCGUG, AUCGUU, AUCUAA, AUCUAC, AUCUAG, AUCUAU,
AUCUCC, AUCUCG, AUCUGU, AUCUUG, AUCUUU, AUGAAA,
AUGAAC, AUGAAG, AUGAAU, AUGACC, AUGACU, AUGAGG,
AUGAGU, AUGAUA, AUGAUC, AUGAUU, AUGCAA, AUGCAG,
AUGCCA, AUGCCC, AUGCCG, AUGCGA, AUGCGG, AUGCGU,
AUGCUC, AUGCUU, AUGGAC, AUGGCC, AUGGGA, AUGGGC,
AUGGGU, AUGGUC, AUGGUG, AUGUAC, AUGUAU, AUGUCA,
AUGUCC, AUGUCG, AUGUGU, AUGUUA, AUGUUC, AUUAAA,
AUUAAC, AUUAAG, AUUAAU, AUUACA, AUUACC, AUUACG,
AUUACU, AUUAGA, AUUAGC, AUUAGG, AUUAGU, AUUAUA,
AUUAUC, AUUAUG, AUUCAC, AUUCCA, AUUCCG, AUUCCU,
AUUCGA, AUUCGC, AUUCGG, AUUCGU, AUUCUA, AUUCUC,
AUUCUU, AUUGAA, AUUGAC, AUUGAU, AUUGCC, AUUGCG,
AUUGCU, AUUGGA, AUUGGC, AUUGGG, AUUGGU, AUUGUA,
AUUGUC, AUUGUG, AUUGUU, AUUUAA, AUUUAG, AUUUAU,
AUUUCC, AUUUCG, AUUUCU, AUUUGA, AUUUGC, AUUUGU,
AUUUUA, AUUUUC, AUUUUG, AUUUUU, CAAAAG, CAAACA,
CAAACC, CAAACG, CAAACU, CAAAGA, CAAAGG, CAAAUA,
CAAAUU, CAACAC, CAACAU, CAACCA, CAACCC, CAACCG,
CAACGA, CAACGC, CAACGG, CAACGU, CAACUA, CAACUC,
CAACUG, CAACUU, CAAGAA, CAAGAC, CAAGAU, CAAGCA,
CAAGCC, CAAGCG, CAAGCU, CAAGGA, CAAGGG, CAAGUC,
CAAGUG, CAAGUU, CAAUAA, CAAUAC, CAAUAG, CAAUCC,
CAAUCG, CAAUCU, CAAUGA, CAAUGC, CAAUGG, CAAUGU,
CAAUUC, CAAUUG, CAAUUU, CACAAU, CACACA, CACACG,
CACACU, CACAGA, CACAGC, CACAGG, CACAUA, CACAUC,
CACAUU, CACCAA, CACCAC, CACCAU, CACCCA, CACCCC,
CACCCG, CACCGA, CACCGC, CACCGG, CACCGU, CACCUA,
CACCUU, CACGAA, CACGAC, CACGAG, CACGAU, CACGCA,
CACGCC, CACGCU, CACGGA, CACGGC, CACGGG, CACGGU,
CACGUA, CACGUC, CACGUG, CACGUU, CACUAA, CACUAG,
CACUAU, CACUCA, CACUCG, CACUGA, CACUGC, CACUGG,
CACUUA, CACUUC, CACUUU, CAGAAA, CAGAAG, CAGAAU,
CAGACC, CAGACG, CAGAGC, CAGAUA, CAGAUC, CAGCCG,
CAGCCU, CAGCGA, CAGCGC, CAGCGG, CAGCGU, CAGCUC,
CAGCUU, CAGGAU, CAGGGG, CAGGGU, CAGGUA, CAGGUC,
CAGGUU, CAGUAC, CAGUCG, CAGUUG, CAUAAA, CAUAAC,
CAUAAG, CAUAAU, CAUACA, CAUACC, CAUACG, CAUACU,
CAUAGA, CAUAGG, CAUAGU, CAUAUA, CAUAUC, CAUAUG,
CAUCAA, CAUCAC, CAUCAG, CAUCAU, CAUCCA, CAUCCC,
CAUCCG, CAUCGA, CAUCGC, CAUCGG, CAUCGU, CAUCUA,
CAUCUC, CAUCUG, CAUCUU, CAUGAA, CAUGAC, CAUGAG,
CAUGAU, CAUGCA, CAUGCC, CAUGCG, CAUGCU, CAUGGC,
CAUGGG, CAUGGU, CAUGUA, CAUGUC, CAUGUU, CAUUAA,
CAUUAC, CAUUAG, CAUUCA, CAUUCC, CAUUCG, CAUUCU,
CAUUGA, CAUUGG, CAUUUC, CAUUUG, CAUUUU, CCAAAA,
CCAAAC, CCAAAG, CCAAAU, CCAACA, CCAACC, CCAACG,
CCAACU, CCAAGA, CCAAGC, CCAAGG, CCAAUC, CCAAUG,
CCAAUU, CCACAA, CCACAC, CCACAG, CCACAU, CCACCA,
CCACCC, CCACCG, CCACCU, CCACGA, CCACGC, CCACGG,
CCACGU, CCACUA, CCACUC, CCACUU, CCAGAA, CCAGAC,
CCAGAG, CCAGCC, CCAGGU, CCAGUC, CCAGUU, CCAUAA,
CCAUAC, CCAUAG, CCAUAU, CCAUCA, CCAUCC, CCAUCU,
CCAUGA, CCAUGC, CCAUGG, CCAUUC, CCAUUG, CCAUUU,
CCCAAC, CCCAAG, CCCAAU, CCCACA, CCCAGA, CCCAGC,
CCCAGU, CCCAUA, CCCAUC, CCCAUG, CCCAUU, CCCCAA,
CCCCAG, CCCCAU, CCCCCC, CCCCCG, CCCCCU, CCCCGA,
CCCCGC, CCCCGU, CCCCUA, CCCCUC, CCCGAA, CCCGAC,
CCCGAU, CCCGCA, CCCGCU, CCCGGA, CCCGGC, CCCGUA,
CCCGUG, CCCGUU, CCCUAA, CCCUAG, CCCUCA, CCCUCU,
CCCUGC, CCCUUA, CCCUUC, CCCUUU, CCGAAA, CCGAAC,
CCGAAU, CCGACA, CCGACC, CCGACG, CCGACU, CCGAGA,
CCGAGG, CCGAGU, CCGAUA, CCGAUC, CCGAUG, CCGAUU,
CCGCAA, CCGCAC, CCGCAG, CCGCAU, CCGCCA, CCGCCC,
CCGCCG, CCGCCU, CCGCGA, CCGCGC, CCGCGG, CCGCGU,
CCGCUA, CCGCUC, CCGCUG, CCGCUU, CCGGAA, CCGGAU,
CCGGCA, CCGGCC, CCGGCG, CCGGCU, CCGGGA, CCGGGC,
CCGGGG, CCGGGU, CCGGUA, CCGGUC, CCGGUG, CCGUAA,
CCGUAG, CCGUAU, CCGUCA, CCGUCC, CCGUCG, CCGUGA,
CCGUGU, CCGUUA, CCGUUC, CCGUUG, CCGUUU, CCUAAC,
CCUAAG, CCUAAU, CCUACA, CCUACC, CCUACG, CCUACU,
CCUAGA, CCUAGC, CCUAGG, CCUAGU, CCUAUA, CCUAUC,
CCUAUG, CCUAUU, CCUCAA, CCUCAC, CCUCAG, CCUCAU,
CCUCCA, CCUCCC, CCUCCG, CCUCGA, CCUCGC, CCUCGG,
CCUCGU, CCUCUA, CCUCUG, CCUGAC, CCUGAU, CCUGCA,
CCUGGG, CCUGGU, CCUGUU, CCUUAA, CCUUAC, CCUUAG,
CCUUAU, CCUUCG, CCUUGA, CCUUGU, CCUUUA, CCUUUC,
CCUUUU, CGAAAA, CGAAAC, CGAAAG, CGAAAU, CGAACA,
CGAACC, CGAACG, CGAACU, CGAAGA, CGAAGC, CGAAGG,
CGAAGU, CGAAUA, CGAAUC, CGAAUG, CGAAUU, CGACAA,
CGACAC, CGACAU, CGACCA, CGACCU, CGACGA, CGACGC,
CGACGG, CGACGU, CGACUA, CGACUG, CGACUU, CGAGAA,
CGAGAC, CGAGAG, CGAGAU, CGAGCA, CGAGCC, CGAGCG,
CGAGCU, CGAGGC, CGAGGG, CGAGGU, CGAGUA, CGAGUC,
CGAGUG, CGAGUU, CGAUAA, CGAUAC, CGAUAG, CGAUAU,
CGAUCA, CGAUCC, CGAUCG, CGAUCU, CGAUGA, CGAUGC,
CGAUGG, CGAUGU, CGAUUA, CGAUUC, CGAUUG, CGAUUU,
CGCAAA, CGCAAC, CGCAAG, CGCAAU, CGCACA, CGCACC,
CGCACG, CGCAGA, CGCAGC, CGCAGG, CGCAGU, CGCAUA,
CGCAUC, CGCAUG, CGCAUU, CGCCAA, CGCCAC, CGCCAG,
CGCCAU, CGCCCA, CGCCCC, CGCCCG, CGCCGA, CGCCGC,
CGCCGG, CGCCGU, CGCCUA, CGCCUG, CGCCUU, CGCGAA,
CGCGAC, CGCGAG, CGCGAU, CGCGCA, CGCGCC, CGCGCG,
CGCGCU, CGCGGA, CGCGGC, CGCGGG, CGCGGU, CGCGUA,
CGCGUC, CGCGUG, CGCGUU, CGCUAA, CGCUAC, CGCUAG,
CGCUAU, CGCUCA, CGCUCC, CGCUCG, CGCUCU, CGCUGA,
CGCUGC, CGCUGG, CGCUGU, CGCUUA, CGCUUC, CGCUUG,
CGGAAA, CGGAAC, CGGAAG, CGGACA, CGGACC, CGGACG,
CGGACU, CGGAGC, CGGAGG, CGGAGU, CGGAUA, CGGAUU,
CGGCAA, CGGCAC, CGGCAG, CGGCCA, CGGCCC, CGGCCG,
CGGCGC, CGGCGG, CGGCGU, CGGCUA, CGGCUC, CGGCUG,
CGGCUU, CGGGAA, CGGGAC, CGGGAG, CGGGAU, CGGGCA,
CGGGCC, CGGGCG, CGGGCU, CGGGGU, CGGGUA, CGGGUC,
CGGGUG, CGGUAA, CGGUAC, CGGUAG, CGGUAU, CGGUCA,
CGGUCG, CGGUCU, CGGUGA, CGGUGG, CGGUGU, CGGUUA,
CGGUUC, CGGUUG, CGGUUU, CGUAAA, CGUAAC, CGUAAG,
CGUAAU, CGUACA, CGUACG, CGUACU, CGUAGA, CGUAGC,
CGUAGG, CGUAGU, CGUAUA, CGUAUC, CGUAUG, CGUAUU,
CGUCAA, CGUCAC, CGUCAG, CGUCAU, CGUCCA, CGUCCC,
CGUCCG, CGUCCU, CGUCGA, CGUCGG, CGUCGU, CGUCUA,
CGUCUC, CGUCUG, CGUCUU, CGUGAA, CGUGAC, CGUGAG,
CGUGAU, CGUGCC, CGUGCG, CGUGCU, CGUGGA, CGUGGG,
CGUGGU, CGUGUA, CGUGUG, CGUUAA, CGUUAC, CGUUAG,
CGUUAU, CGUUCA, CGUUCC, CGUUCG, CGUUCU, CGUUGA,
CGUUGC, CGUUGU, CGUUUA, CGUUUC, CGUUUU, CUAAAA,
CUAAAC, CUAAAU, CUAACA, CUAACC, CUAACG, CUAACU,
CUAAGA, CUAAGC, CUAAGU, CUAAUA, CUAAUC, CUAAUG,
CUACAC, CUACAU, CUACCA, CUACCC, CUACCG, CUACCU,
CUACGA, CUACGC, CUACGG, CUACGU, CUACUA, CUACUC,
CUACUG, CUAGAA, CUAGAG, CUAGAU, CUAGCA, CUAGCC,
CUAGCG, CUAGCU, CUAGGA, CUAGGG, CUAGGU, CUAGUG,
CUAGUU, CUAUAA, CUAUAG, CUAUAU, CUAUCA, CUAUCC,
CUAUCG, CUAUCU, CUAUGA, CUAUGC, CUAUGG, CUAUGU,
CUAUUA, CUAUUG, CUCAAC, CUCAAG, CUCAAU, CUCACC,
CUCACG, CUCAGC, CUCAUA, CUCAUC, CUCAUG, CUCAUU,
CUCCAC, CUCCCC, CUCCCG, CUCCGA, CUCCGC, CUCCGG,
CUCCUA, CUCCUC, CUCCUU, CUCGAA, CUCGAC, CUCGAG,
CUCGAU, CUCGCA, CUCGCC, CUCGCG, CUCGGG, CUCGGU,
CUCGUA, CUCGUC, CUCGUG, CUCGUU, CUCUAA, CUCUAC,
CUCUAU, CUCUCA, CUCUCC, CUCUCU, CUCUGC, CUCUGU,
CUCUUA, CUCUUG, CUGAAG, CUGACC, CUGACG, CUGAGC,
CUGAUA, CUGAUC, CUGCCG, CUGCCU, CUGCGA, CUGCUA,
CUGCUU, CUGGAG, CUGGAU, CUGGCG, CUGGGU, CUGUAC,
CUGUCA, CUGUCC, CUGUCG, CUGUGG, CUGUGU, CUGUUA,
CUGUUU, CUUAAC, CUUAAG, CUUAAU, CUUACC, CUUACG,
CUUAGA, CUUAGC, CUUAGG, CUUAGU, CUUAUA, CUUAUC,
CUUAUG, CUUAUU, CUUCAG, CUUCAU, CUUCCA, CUUCCC,
CUUCCG, CUUCCU, CUUCGA, CUUCGC, CUUCGG, CUUCGU,
CUUCUA, CUUGAC, CUUGAG, CUUGAU, CUUGCA, CUUGCC,
CUUGCG, CUUGCU, CUUGGC, CUUGGU, CUUGUU, CUUUAC,
CUUUAG, CUUUAU, CUUUCA, CUUUCG, CUUUCU, CUUUGA,
CUUUGC, CUUUGU, CUUUUA, CUUUUC, CUUUUG, CUUUUU,
GAAAAA, GAAAAG, GAAAAU, GAAACC, GAAACG, GAAAGA,
GAAAGC, GAAAGU, GAAAUA, GAAAUC, GAAAUG, GAAAUU,
GAACAA, GAACAC, GAACAG, GAACAU, GAACCA, GAACCC,
GAACCG, GAACCU, GAACGA, GAACGC, GAACGG, GAACGU,
GAACUA, GAACUG, GAACUU, GAAGAC, GAAGAG, GAAGCA,
GAAGCG, GAAGCU, GAAGUC, GAAUAA, GAAUAC, GAAUAG,
GAAUAU, GAAUCC, GAAUCG, GAAUCU, GAAUGA, GAAUGC,
GAAUGU, GAAUUA, GAAUUC, GAAUUU, GACAAA, GACAAG,
GACAAU, GACACC, GACAGA, GACAGG, GACAUA, GACAUG,
GACAUU, GACCAA, GACCAC, GACCAG, GACCCA, GACCCC,
GACCCG, GACCGC, GACCGG, GACCGU, GACCUA, GACCUC,
GACCUU, GACGAA, GACGAC, GACGAG, GACGAU, GACGCA,
GACGCC, GACGCG, GACGCU, GACGGA, GACGGC, GACGGG,
GACGGU, GACGUA, GACGUC, GACGUG, GACGUU, GACUAA,
GACUAC, GACUAG, GACUAU, GACUCA, GACUCC, GACUCG,
GACUGG, GACUGU, GACUUA, GACUUG, GACUUU, GAGAAU,
GAGAGA, GAGAGC, GAGAGG, GAGAUA, GAGAUC, GAGCAA,
GAGCAU, GAGCCA, GAGCGA, GAGCGG, GAGCGU, GAGGGU,
GAGGUC, GAGGUG, GAGUAA, GAGUAG, GAGUCC, GAGUUC,
GAGUUU, GAUAAA, GAUAAC, GAUAAG, GAUAAU, GAUACA,
GAUACC, GAUACG, GAUACU, GAUAGA, GAUAGC, GAUAGG,
GAUAGU, GAUAUA, GAUCAA, GAUCAC, GAUCAU, GAUCCA,
GAUCCC, GAUCCU, GAUCGC, GAUCGG, GAUCGU, GAUCUA,
GAUCUG, GAUCUU, GAUGAA, GAUGAC, GAUGAG, GAUGCA,
GAUGCC, GAUGCG, GAUGCU, GAUGGC, GAUGGG, GAUGGU,
GAUGUG, GAUGUU, GAUUAA, GAUUAC, GAUUAG, GAUUAU,
GAUUCA, GAUUCG, GAUUCU, GAUUGA, GAUUGC, GAUUUA,
GAUUUC, GAUUUG, GAUUUU, GCAAAC, GCAAAG, GCAAAU,
GCAACA, GCAACC, GCAAGC, GCAAGU, GCAAUA, GCAAUC,
GCAAUG, GCAAUU, GCACAA, GCACAC, GCACAG, GCACCC,
GCACCG, GCACCU, GCACGA, GCACGC, GCACGU, GCACUA,
GCACUC, GCACUG, GCACUU, GCAGAU, GCAGCC, GCAGCG,
GCAGGC, GCAGUA, GCAGUC, GCAGUG, GCAGUU, GCAUAA,
GCAUAG, GCAUAU, GCAUCG, GCAUCU, GCAUGA, GCAUGC,
GCAUGG, GCAUGU, GCAUUA, GCAUUC, GCAUUG, GCAUUU,
GCCAAA, GCCAAC, GCCAAU, GCCACA, GCCACC, GCCACG,
GCCAGA, GCCAGU, GCCAUA, GCCAUC, GCCAUG, GCCAUU,
GCCCAA, GCCCAC, GCCCAG, GCCCCG, GCCCGA, GCCCGG,
GCCCGU, GCCGAA, GCCGAC, GCCGAG, GCCGAU, GCCGCA,
GCCGCU, GCCGGA, GCCGGC, GCCGGG, GCCGGU, GCCGUA,
GCCGUC, GCCGUG, GCCGUU, GCCUAA, GCCUAU, GCCUCA,
GCCUCC, GCCUCG, GCCUGA, GCCUUA, GCCUUU, GCGAAA,
GCGAAC, GCGAAG, GCGAAU, GCGACC, GCGACG, GCGACU,
GCGAGA, GCGAGC, GCGAGG, GCGAGU, GCGAUA, GCGAUC,
GCGAUG, GCGAUU, GCGCAA, GCGCAC, GCGCAG, GCGCAU,
GCGCCA, GCGCCC, GCGCCU, GCGCGA, GCGCGU, GCGCUA,
GCGCUC, GCGCUG, GCGCUU, GCGGAA, GCGGAC, GCGGAU,
GCGGCA, GCGGCC, GCGGCU, GCGGGA, GCGGUA, GCGGUC,
GCGGUU, GCGUAA, GCGUAC, GCGUAG, GCGUAU, GCGUCA,
GCGUCC, GCGUCG, GCGUCU, GCGUGA, GCGUGC, GCGUGG,
GCGUGU, GCGUUA, GCGUUC, GCGUUG, GCGUUU, GCUAAA,
GCUAAC, GCUAAG, GCUAAU, GCUACC, GCUACG, GCUACU,
GCUAGA, GCUAGG, GCUAGU, GCUAUA, GCUAUC, GCUAUU,
GCUCAA, GCUCAC, GCUCAG, GCUCAU, GCUCCA, GCUCCC,
GCUCCG, GCUCGA, GCUCGC, GCUCGU, GCUCUA, GCUCUC,
GCUCUU, GCUGAA, GCUGAC, GCUGAU, GCUGCA, GCUGCC,
GCUGCG, GCUGCU, GCUGUG, GCUGUU, GCUUAC, GCUUAG,
GCUUAU, GCUUCA, GCUUCG, GCUUGA, GCUUGG, GCUUGU,
GCUUUA, GCUUUG, GGAAAG, GGAACA, GGAACC, GGAACG,
GGAACU, GGAAGU, GGAAUA, GGAAUC, GGAAUU, GGACAA,
GGACAC, GGACAG, GGACAU, GGACCG, GGACGA, GGACGC,
GGACGU, GGACUA, GGACUC, GGACUU, GGAGAC, GGAGCA,
GGAGCG, GGAGGG, GGAGUA, GGAUAA, GGAUAC, GGAUCA,
GGAUCC, GGAUCG, GGAUCU, GGAUGC, GGAUUA, GGAUUG,
GGCAAU, GGCACA, GGCACU, GGCAGA, GGCAUA, GGCAUC,
GGCCAC, GGCCAG, GGCCCC, GGCCGA, GGCCGC, GGCCGU,
GGCCUA, GGCCUG, GGCCUU, GGCGAA, GGCGAG, GGCGAU,
GGCGCA, GGCGCU, GGCGGU, GGCGUA, GGCGUC, GGCGUG,
GGCGUU, GGCUAA, GGCUAC, GGCUAG, GGCUAU, GGCUCC,
GGCUCG, GGCUGA, GGCUUA, GGCUUC, GGCUUG, GGGAAU,
GGGACA, GGGAGA, GGGAGU, GGGAUA, GGGAUU, GGGCAA,
GGGCAC, GGGCAG, GGGCCG, GGGCGG, GGGGCC, GGGGGG,
GGGGGU, GGGGUA, GGGUAC, GGGUAU, GGGUCA, GGGUCC,
GGGUCG, GGGUGA, GGGUGC, GGGUUA, GGGUUG, GGUAAA,
GGUAAC, GGUAAG, GGUAAU, GGUACA, GGUACC, GGUACG,
GGUACU, GGUAGC, GGUAGG, GGUAGU, GGUAUA, GGUAUC,
GGUAUG, GGUCAA, GGUCAC, GGUCAG, GGUCAU, GGUCCA,
GGUCCG, GGUCCU, GGUCGA, GGUCGC, GGUCGG, GGUCGU,
GGUCUC, GGUCUU, GGUGAA, GGUGAC, GGUGAU, GGUGCA,
GGUGCC, GGUGGC, GGUGUA, GGUGUC, GGUUAA, GGUUAG,
GGUUAU, GGUUCA, GGUUCC, GGUUCG, GGUUGC, GGUUUC,
GGUUUU, GUAAAA, GUAAAG, GUAAAU, GUAACC, GUAACG,
GUAACU, GUAAGA, GUAAGC, GUAAGG, GUAAGU, GUAAUA,
GUAAUC, GUAAUG, GUAAUU, GUACAA, GUACAC, GUACAG,
GUACAU, GUACCA, GUACCC, GUACCG, GUACCU, GUACGA,
GUACGC, GUACGG, GUACGU, GUACUA, GUACUC, GUACUG,
GUACUU, GUAGAA, GUAGAC, GUAGCA, GUAGCC, GUAGCG,
GUAGCU, GUAGGA, GUAGGC, GUAGGG, GUAGGU, GUAGUA,
GUAGUC, GUAUAA, GUAUAC, GUAUAG, GUAUAU, GUAUCA,
GUAUCG, GUAUCU, GUAUGA, GUAUGC, GUAUGG, GUAUUA,
GUAUUG, GUAUUU, GUCAAA, GUCAAG, GUCAAU, GUCACA,
GUCACC, GUCACG, GUCAGA, GUCAGC, GUCAGG, GUCAUA,
GUCAUC, GUCAUG, GUCCAA, GUCCAC, GUCCAU, GUCCCC,
GUCCCU, GUCCGA, GUCCGC, GUCCGG, GUCCGU, GUCCUA,
GUCCUG, GUCCUU, GUCGAA, GUCGAC, GUCGAG, GUCGAU,
GUCGCA, GUCGCC, GUCGCG, GUCGCU, GUCGGA, GUCGGC,
GUCGGG, GUCGGU, GUCGUA, GUCGUC, GUCGUU, GUCUAA,
GUCUAG, GUCUCA, GUCUCC, GUCUCG, GUCUGA, GUCUGG,
GUCUGU, GUCUUC, GUCUUU, GUGAAA, GUGAAC, GUGAAG,
GUGACC, GUGACG, GUGAGA, GUGAGC, GUGAGU, GUGAUC,
GUGAUG, GUGAUU, GUGCAC, GUGCAU, GUGCCC, GUGCCG,
GUGCGA, GUGCGG, GUGCGU, GUGCUA, GUGCUC, GUGCUG,
GUGGAG, GUGGCG, GUGGCU, GUGGGU, GUGGUC, GUGGUG,
GUGUAA, GUGUAG, GUGUCG, GUGUGA, GUGUGC, GUGUGU,
GUGUUG, GUGUUU, GUUAAA, GUUAAC, GUUAAG, GUUACA,
GUUACC, GUUACG, GUUACU, GUUAGA, GUUAGC, GUUAGU,
GUUAUA, GUUAUC, GUUAUG, GUUAUU, GUUCAA, GUUCAC,
GUUCAG, GUUCCA, GUUCCG, GUUCGA, GUUCGC, GUUCGG,
GUUCGU, GUUCUA, GUUCUG, GUUGAA, GUUGAC, GUUGAG,
GUUGAU, GUUGCG, GUUGCU, GUUGGA, GUUGGC, GUUGGU,
GUUGUC, GUUGUG, GUUGUU, GUUUAA, GUUUAC, GUUUAG,
GUUUAU, GUUUCA, GUUUCC, GUUUCU, GUUUGA, GUUUGC,
GUUUGG, GUUUGU, GUUUUA, GUUUUC, GUUUUU, UAAAAA,
UAAAAC, UAAAAG, UAAAAU, UAAACA, UAAACC, UAAACG,
UAAACU, UAAAGA, UAAAGG, UAAAGU, UAAAUA, UAAAUC,
UAAAUG, UAAAUU, UAACAA, UAACAC, UAACAG, UAACCA,
UAACCC, UAACCG, UAACCU, UAACGA, UAACGC, UAACGG,
UAACGU, UAACUA, UAACUG, UAACUU, UAAGAG, UAAGAU,
UAAGCA, UAAGCC, UAAGCG, UAAGCU, UAAGGA, UAAGGC,
UAAGGG, UAAGGU, UAAGUA, UAAGUC, UAAGUG, UAAGUU,
UAAUAA, UAAUCA, UAAUCC, UAAUCG, UAAUCU, UAAUGA,
UAAUGG, UAAUGU, UAAUUA, UAAUUC, UAAUUG, UACAAC,
UACAAG, UACAAU, UACACC, UACACG, UACACU, UACAGA,
UACAGC, UACAUA, UACAUC, UACAUU, UACCAA, UACCAC,
UACCAG, UACCAU, UACCCC, UACCCG, UACCCU, UACCGA,
UACCGC, UACCGG, UACCGU, UACCUA, UACCUG, UACGAA,
UACGAC, UACGAG, UACGAU, UACGCA, UACGCC, UACGCG,
UACGCU, UACGGC, UACGGG, UACGGU, UACGUA, UACGUC,
UACGUG, UACGUU, UACUAA, UACUAC, UACUAG, UACUAU,
UACUCA, UACUCC, UACUCG, UACUCU, UACUGA, UACUGC,
UACUGG, UACUUA, UACUUG, UACUUU, UAGAAA, UAGAAG,
UAGAAU, UAGACA, UAGACG, UAGAGA, UAGAGC, UAGAGU,
UAGAUA, UAGAUC, UAGAUG, UAGCAU, UAGCCC, UAGCCG,
UAGCCU, UAGCGA, UAGCGC, UAGCGU, UAGCUA, UAGCUC,
UAGCUG, UAGGAA, UAGGAU, UAGGCG, UAGGCU, UAGGGU,
UAGGUC, UAGGUG, UAGGUU, UAGUAA, UAGUAC, UAGUAG,
UAGUAU, UAGUCA, UAGUCG, UAGUGU, UAGUUA, UAGUUC,
UAGUUG, UAGUUU, UAUAAC, UAUAAG, UAUACU, UAUAGA,
UAUAGC, UAUAGG, UAUAGU, UAUAUA, UAUAUC, UAUAUG,
UAUAUU, UAUCAA, UAUCAC, UAUCAU, UAUCCA, UAUCCC,
UAUCCG, UAUCCU, UAUCGA, UAUCGC, UAUCGG, UAUCGU,
UAUCUA, UAUCUC, UAUCUG, UAUCUU, UAUGAA, UAUGAC,
UAUGAG, UAUGAU, UAUGCA, UAUGCG, UAUGCU, UAUGGA,
UAUGGC, UAUGUC, UAUGUG, UAUGUU, UAUUAG, UAUUCA,
UAUUCC, UAUUCG, UAUUCU, UAUUGA, UAUUGG, UAUUUA,
UAUUUC, UAUUUG, UAUUUU, UCAAAA, UCAAAC, UCAAAG,
UCAACC, UCAACU, UCAAGA, UCAAGC, UCAAUA, UCAAUC,
UCAAUG, UCAAUU, UCACCC, UCACCG, UCACCU, UCACGA,
UCACGC, UCACGG, UCACGU, UCACUA, UCACUC, UCACUU,
UCAGAA, UCAGAC, UCAGAG, UCAGCG, UCAGCU, UCAGGA,
UCAGGC, UCAGGU, UCAGUC, UCAGUU, UCAUAA, UCAUCA,
UCAUCC, UCAUCG, UCAUGC, UCAUGG, UCAUGU, UCAUUA,
UCAUUG, UCCAAA, UCCAAC, UCCAAG, UCCAAU, UCCACA,
UCCACC, UCCACG, UCCAGC, UCCAGG, UCCAUA, UCCAUC,
UCCAUU, UCCCAA, UCCCAG, UCCCAU, UCCCCC, UCCCCG,
UCCCCU, UCCCGA, UCCCGC, UCCCGG, UCCCGU, UCCCUA,
UCCCUC, UCCGAA, UCCGAC, UCCGAG, UCCGAU, UCCGCA,
UCCGCC, UCCGGA, UCCGGC, UCCGGU, UCCGUA, UCCGUC,
UCCGUG, UCCUAA, UCCUCA, UCCUCG, UCCUCU, UCCUGC,
UCCUGU, UCCUUA, UCCUUC, UCCUUU, UCGAAA, UCGAAC,
UCGAAG, UCGAAU, UCGACA, UCGACC, UCGACG, UCGACU,
UCGAGA, UCGAGC, UCGAGG, UCGAUA, UCGAUC, UCGAUG,
UCGAUU, UCGCAA, UCGCAC, UCGCAG, UCGCAU, UCGCCA,
UCGCCC, UCGCCG, UCGCCU, UCGCGA, UCGCGC, UCGCGU,
UCGCUA, UCGCUC, UCGGAA, UCGGAC, UCGGAG, UCGGAU,
UCGGCA, UCGGCU, UCGGGG, UCGGGU, UCGGUC, UCGGUG,
UCGGUU, UCGUAA, UCGUAC, UCGUAG, UCGUAU, UCGUCA,
UCGUCC, UCGUCG, UCGUCU, UCGUGA, UCGUGU, UCGUUA,
UCGUUC, UCGUUG, UCGUUU, UCUAAC, UCUAAG, UCUAAU,
UCUACA, UCUACC, UCUACG, UCUACU, UCUAGC, UCUAGG,
UCUAGU, UCUAUA, UCUAUC, UCUAUG, UCUAUU, UCUCAG,
UCUCAU, UCUCCG, UCUCGC, UCUCGG, UCUCGU, UCUCUC,
UCUGAA, UCUGAU, UCUGCA, UCUGCG, UCUGCU, UCUGGC,
UCUGGU, UCUGUC, UCUGUG, UCUGUU, UCUUAA, UCUUAC,
UCUUAG, UCUUAU, UCUUCA, UCUUCC, UCUUCG, UCUUCU,
UCUUGC, UCUUGG, UCUUGU, UCUUUA, UCUUUC, UCUUUG,
UCUUUU, UGAAAA, UGAAAC, UGAACA, UGAACC, UGAAGG,
UGAAUC, UGAAUG, UGACAA, UGACAC, UGACAG, UGACCA,
UGACCC, UGACCG, UGACGA, UGACGC, UGACGG, UGACGU,
UGACUA, UGACUC, UGACUU, UGAGAG, UGAGAU, UGAGCA,
UGAGCC, UGAGCU, UGAGGC, UGAGGU, UGAGUA, UGAGUU,
UGAUAC, UGAUAG, UGAUAU, UGAUCA, UGAUCG, UGAUCU,
UGAUGA, UGAUGC, UGAUGG, UGAUGU, UGAUUA, UGAUUC,
UGAUUG, UGAUUU, UGCAAC, UGCAAG, UGCACA, UGCACG,
UGCAGG, UGCAGU, UGCAUC, UGCCCA, UGCCCC, UGCCCG,
UGCCGA, UGCCGC, UGCCGG, UGCCGU, UGCCUA, UGCCUC,
UGCCUG, UGCCUU, UGCGAA, UGCGAC, UGCGAU, UGCGCC,
UGCGCG, UGCGCU, UGCGGC, UGCGGG, UGCGGU, UGCGUA,
UGCGUC, UGCGUG, UGCGUU, UGCUAC, UGCUAU, UGCUCC,
UGCUCG, UGCUGC, UGCUGG, UGCUGU, UGCUUA, UGCUUU,
UGGAAC, UGGAAG, UGGAGC, UGGAUC, UGGAUU, UGGCAA,
UGGCAC, UGGCAG, UGGCCG, UGGCCU, UGGCGA, UGGCGC,
UGGCGU, UGGCUA, UGGCUC, UGGCUU, UGGGAA, UGGGCA,
UGGGCC, UGGGGC, UGGGUC, UGGUAA, UGGUAG, UGGUAU,
UGGUCC, UGGUCG, UGGUCU, UGGUGA, UGGUGC, UGGUGG,
UGGUGU, UGGUUA, UGGUUG, UGUAAA, UGUAAC, UGUAAG,
UGUACC, UGUACG, UGUACU, UGUAGA, UGUAGC, UGUAGU,
UGUAUC, UGUAUU, UGUCAA, UGUCAC, UGUCAG, UGUCAU,
UGUCCA, UGUCCC, UGUCCG, UGUCGA, UGUCGC, UGUCGG,
UGUCGU, UGUCUA, UGUCUC, UGUGAC, UGUGAG, UGUGAU,
UGUGCA, UGUGGU, UGUGUA, UGUGUU, UGUUAC, UGUUAG,
UGUUAU, UGUUCA, UGUUCC, UGUUCG, UGUUGG, UGUUGU,
UGUUUA, UGUUUC, UGUUUG, UGUUUU, UUAAAA, UUAAAC,
UUAAAG, UUAAAU, UUAACC, UUAACG, UUAACU, UUAAGU,
UUAAUA, UUAAUC, UUAAUG, UUAAUU, UUACAA, UUACAC,
UUACAG, UUACAU, UUACCA, UUACCC, UUACCG, UUACCU,
UUACGA, UUACGC, UUACGG, UUACGU, UUACUA, UUACUC,
UUACUG, UUACUU, UUAGAA, UUAGAC, UUAGCC, UUAGCG,
UUAGCU, UUAGGC, UUAGGU, UUAGUA, UUAGUC, UUAGUU,
UUAUAA, UUAUAC, UUAUAG, UUAUAU, UUAUCC, UUAUCG,
UUAUCU, UUAUGA, UUAUGG, UUAUGU, UUAUUA, UUAUUC,
UUAUUG, UUAUUU, UUCAAC, UUCAAU, UUCACA, UUCACC,
UUCACG, UUCACU, UUCAGC, UUCAGG, UUCAGU, UUCAUA,
UUCAUC, UUCAUG, UUCAUU, UUCCAA, UUCCCA, UUCCCG,
UUCCGA, UUCCGU, UUCCUU, UUCGAA, UUCGAC, UUCGAG,
UUCGAU, UUCGCA, UUCGCC, UUCGCG, UUCGCU, UUCGGA,
UUCGGC, UUCGGG, UUCGGU, UUCGUA, UUCGUC, UUCGUG,
UUCGUU, UUCUAC, UUCUAG, UUCUCA, UUCUCG, UUCUGG,
UUCUUA, UUCUUU, UUGAAA, UUGAAC, UUGAAG, UUGAAU,
UUGACC, UUGACG, UUGACU, UUGAGA, UUGAGC, UUGAGU,
UUGAUA, UUGAUC, UUGAUG, UUGAUU, UUGCAA, UUGCAC,
UUGCAG, UUGCAU, UUGCCC, UUGCCG, UUGCGA, UUGCGC,
UUGCGG, UUGCGU, UUGCUA, UUGCUC, UUGCUG, UUGCUU,
UUGGAA, UUGGAG, UUGGCC, UUGGCG, UUGGCU, UUGGGC,
UUGGGU, UUGGUA, UUGGUG, UUGUAA, UUGUAC, UUGUCA,
UUGUCG, UUGUCU, UUGUGC, UUGUGG, UUGUUA, UUGUUG,
UUGUUU, UUUAAA, UUUAAC, UUUAAG, UUUAAU, UUUACA,
UUUACC, UUUACG, UUUACU, UUUAGA, UUUAGC, UUUAGG,
UUUAGU, UUUAUA, UUUAUC, UUUAUG, UUUAUU, UUUCAU,
UUUCCA, UUUCCG, UUUCCU, UUUCGA, UUUCGC, UUUCGG,
UUUCGU, UUUCUA, UUUCUC, UUUCUG, UUUCUU, UUUGAA,
UUUGAC, UUUGAG, UUUGAU, UUUGCC, UUUGCU, UUUGGA,
UUUGGC, UUUGGG, UUUGGU, UUUGUA, UUUGUC, UUUGUU,
UUUUAA, UUUUAG, UUUUAU, UUUUCC, UUUUCG, UUUUCU,
UUUUGA, UUUUGC, UUUUGG, UUUUGU, UUUUUA, UUUUUC,
UUUUUU

TABLE 2
Oligonucleotide sequences made for testing in the lab.

| | | | Gene | Expt | Cell | | Assay |
|---|---|---|---|---|---|---|---|
| Oligo ID | RQ | RQ SE | Name | Type | Line/Tissue | [Oligo] | Type |
| BDNF-01 | 0.658347457 | 0 | BDNF | in vitro | Hep3B | 30 | qRTPCR |
| m02 | | | | | | | |
| BDNF-01 | 0.282513354 | 0.080648333 | BDNF | in vitro | Hep3B | 10 | qRTPCR |
| m02 | | | | | | | |
| BDNF-01 | 2.020691574 | 1.773367664 | BDNF | in vivo | liv mus C57BI | 25 | qRTPCR |
| m02 | | | | | | | |
| BDNF-01 | 1.890590727 | 0.480550547 | BDNF | in vivo | liv mus C57BI | 10 | qRTPCR |
| m02 | | | | | | | |
| BDNF-02 | 1.507252479 | 0 | BDNF | in vitro | Hep3B | 30 | qRTPCR |
| m02 | | | | | | | |
| BDNF-02 | 0.181361249 | 0.016360562 | BDNF | in vitro | Hep3B | 10 | qRTPCR |
| m02 | | | | | | | |
| BDNF-02 | 4.682822957 | 2.116973542 | BDNF | in vivo | liv mus C57BI | 25 | qRTPCR |
| m02 | | | | | | | |
| BDNF-02 | 1.397329188 | 0.449770036 | BDNF | in vivo | liv mus C57BI | 10 | qRTPCR |
| m02 | | | | | | | |
| BDNF-03 | 0.433941497 | 0.112936272 | BDNF | in vitro | Hep3B | 30 | qRTPCR |
| m02 | | | | | | | |
| BDNF-03 | 0.704472154 | 0.107898872 | BDNF | in vitro | Hep3B | 10 | qRTPCR |
| m02 | | | | | | | |
| BDNF-03 | 1.02120249 | 0.288262867 | BDNF | in vivo | kid mus | 25 | qRTPCR |
| m02 | | | | | C57BI | | |
| BDNF-03 | 0.834019396 | 0.034886258 | BDNF | in vivo | kid mus | 10 | qRTPCR |
| m02 | | | | | C57BI | | |
| BDNF-03 | 3.239625501 | 1.535293608 | BDNF | in vivo | liv mus C57BI | 25 | qRTPCR |
| m02 | | | | | | | |
| BDNF-03 | 2.002007629 | 21.58110056 | BDNF | in vivo | liv mus C57BI | 10 | qRTPCR |
| m02 | | | | | | | |
| BDNF-04 | 1.2391966 | 0.380159297 | BDNF | in vitro | Hep3B | 30 | qRTPCR |
| m02 | | | | | | | |
| BDNF-04 | 1.836853076 | 0.169112065 | BDNF | in vitro | Hep3B | 10 | qRTPCR |
| m02 | | | | | | | |
| BDNF-04 | 0.896518494 | 0.137801624 | BDNF | in vivo | kid mus | 25 | qRTPCR |
| m02 | | | | | C57BI | | |
| BDNF-04 | 0.892584372 | 0.111930079 | BDNF | in vivo | kid mus | 10 | qRTPCR |
| m02 | | | | | C57BI | | |
| BDNF-04 | 100.1014559 | 64.41364711 | BDNF | in vivo | liv mus C57BI | 25 | qRTPCR |
| m02 | | | | | | | |
| BDNF-04 | 186.0293662 | 160.6875261 | BDNF | in vivo | liv mus C57BI | 10 | qRTPCR |
| m02 | | | | | | | |
| BDNF-05 | 0.737305708 | 0.230845985 | BDNF | in vitro | Hep3B | 30 | qRTPCR |
| m02 | | | | | | | |
| BDNF-05 | 0.976448173 | 0.178758021 | BDNF | in vitro | Hep3B | 10 | qRTPCR |
| m02 | | | | | | | |
| BDNF-05 | 2.226854577 | 1.000703266 | BDNF | in vivo | kid mus | 25 | qRTPCR |
| m02 | | | | | C57BI | | |
| BDNF-05 | 1.753619037 | 0.288958367 | BDNF | in vivo | kid mus | 10 | qRTPCR |
| m02 | | | | | C57BI | | |
| BDNF-05 | 6.161706234 | 1.548844787 | BDNF | in vivo | liv mus C57BI | 25 | qRTPCR |
| m02 | | | | | | | |
| BDNF-05 | 17.60936455 | 11.73293839 | BDNF | in vivo | liv mus C57BI | 10 | qRTPCR |
| m02 | | | | | | | |
| BDNF-06 | 0.245648671 | 0.113950319 | BDNF | in vitro | Hep3B | 30 | qRTPCR |
| m02 | | | | | | | |
| BDNF-06 | 0.639126937 | 0.088822258 | BDNF | in vitro | Hep3B | 10 | qRTPCR |
| m02 | | | | | | | |
| BDNF-06 | 1.604050297 | 0.192586674 | BDNF | in vivo | kid mus | 25 | qRTPCR |
| m02 | | | | | C57BI | | |
| BDNF-06 | 0.584668058 | 0.039328809 | BDNF | in vivo | kid mus | 10 | qRTPCR |
| m02 | | | | | C57BI | | |
| BDNF-06 | 27.40525087 | 12.16497094 | BDNF | in vivo | liv mus C57BI | 25 | qRTPCR |
| m02 | | | | | | | |
| BDNF-06 | 37.63954563 | 42.48273569 | BDNF | in vivo | liv mus C57BI | 10 | qRTPCR |
| m02 | | | | | | | |
| BDNF-07 | 0.74168684 | 0 | BDNF | in vitro | Hep3B | 30 | qRTPCR |
| m02 | | | | | | | |
| BDNF-07 | 1.472499536 | 0.281748996 | BDNF | in vitro | Hep3B | 10 | qRTPCR |
| m02 | | | | | | | |
| BDNF-07 | 0.45376548 | 0.036386394 | BDNF | in vivo | kid mus | 25 | qRTPCR |
| m02 | | | | | C57BI | | |
| BDNF-07 | 0.390421554 | 0.026369826 | BDNF | in vivo | kid mus | 10 | qRTPCR |
| m02 | | | | | C57BI | | |
| BDNF-07 | 11.28088892 | 6.55145925 | BDNF | in vivo | liv mus C57BI | 25 | qRTPCR |
| m02 | | | | | | | |
| BDNF-07 | 8.78102149 | 7.061030116 | BDNF | in vivo | liv mus C57BI | 10 | qRTPCR |
| m02 | | | | | | | |
| BDNF-08 | 0.718642912 | 0.052875505 | BDNF | in vitro | Hep3B | 30 | qRTPCR |
| m02 | | | | | | | |
| BDNF-08 | 1.192721717 | 0.315986688 | BDNF | in vitro | Hep3B | 10 | qRTPCR |
| m02 | | | | | | | |
| BDNF-09 | 0.616717484 | 0.1250181 | BDNF | in vitro | Hep3B | 30 | qRTPCR |
| m02 | | | | | | | |
| BDNF-09 | 1.352856657 | 0.435426216 | BDNF | in vitro | Hep3B | 10 | qRTPCR |
| m02 | | | | | | | |
| BDNF-10 | 2.316633163 | 0.761276801 | BDNF | in vitro | Hep3B | 30 | qRTPCR |
| m02 | | | | | | | |
| BDNF-10 | 1.650321252 | 0.449925321 | BDNF | in vitro | Hep3B | 10 | qRTPCR |
| m02 | | | | | | | |
| BDNF-11 | 1.017920155 | 0.186151377 | BDNF | in vitro | Hep3B | 30 | qRTPCR |
| m02 | | | | | | | |
| BDNF-11 | 1.42872483 | 0.330772184 | BDNF | in vitro | Hep3B | 10 | qRTPCR |
| m02 | | | | | | | |
| BDNF-11 | 0.938061845 | 0.052194407 | BDNF | in vivo | kid mus | 25 | qRTPCR |
| m02 | | | | | C57BI | | |
| BDNF-11 | 1.015189977 | 0.199591111 | BDNF | in vivo | kid mus | 10 | qRTPCR |
| m02 | | | | | C57BI | | |
| BDNF-12 | 0.543203889 | 0.085552972 | BDNF | in vitro | Hep3B | 30 | qRTPCR |
| m02 | | | | | | | |
| BDNF-12 | 0.624397993 | 0.033331468 | BDNF | in vitro | Hep3B | 10 | qRTPCR |
| m02 | | | | | | | |
| BDNF-13 | 0.311216669 | 0.114540021 | BDNF | in vitro | Hep3B | 30 | qRTPCR |
| m02 | | | | | | | |
| BDNF-13 | 1.343782534 | 0.132030095 | BDNF | in vitro | Hep3B | 10 | qRTPCR |
| m02 | | | | | | | |
| BDNF-14 | 1.291728767 | 0.220756514 | BDNF | in vitro | Hep3B | 30 | qRTPCR |
| m02 | | | | | | | |
| BDNF-14 | 2.045726366 | 0.196078413 | BDNF | in vitro | Hep3B | 10 | qRTPCR |
| m02 | | | | | | | |
| BDNF-15 | 1.260802698 | 0.168013451 | BDNF | in vitro | Hep3B | 30 | qRTPCR |
| m02 | | | | | | | |
| BDNF-15 | 1.578814681 | 0.242398686 | BDNF | in vitro | Hep3B | 10 | qRTPCR |
| m02 | | | | | | | |
| BDNF-16 | 9.483353327 | 0.962953672 | BDNF | in vitro | Hep3B | 30 | qRTPCR |
| m02 | | | | | | | |
| BDNF-16 | 3.385954439 | 0.479571813 | BDNF | in vitro | Hep3B | 10 | qRTPCR |
| m02 | | | | | | | |
| BDNF-17 | 6.254734831 | 0.75286845 | BDNF | in vitro | Hep3B | 30 | qRTPCR |
| m02 | | | | | | | |
| BDNF-17 | 3.778966926 | 0.725404307 | BDNF | in vitro | Hep3B | 10 | qRTPCR |
| m02 | | | | | | | |
| BDNF-18 | 0.831110344 | 0.084627511 | BDNF | in vitro | Hep3B | 30 | qRTPCR |
| m02 | | | | | | | |
| BDNF-18 | 1.437628645 | 0.225973805 | BDNF | in vitro | Hep3B | 10 | qRTPCR |
| m02 | | | | | | | |
| BDNF-18 | 1.262070396 | 0.229953382 | BDNF | in vivo | kid mus | 25 | qRTPCR |
| m02 | | | | | C57BI | | |
| BDNF-18 | 0.960812942 | 0.043540533 | BDNF | in vivo | kid mus | 10 | qRTPCR |
| m02 | | | | | C57BI | | |
| BDNF-19 | 0.50238621 | 0.123477791 | BDNF | in vitro | Hep3B | 30 | qRTPCR |
| m02 | | | | | | | |
| BDNF-19 | 1.721571854 | 0.393106998 | BDNF | in vitro | Hep3B | 10 | qRTPCR |
| m02 | | | | | | | |
| BDNF-20 | 0.678955385 | 0.061672891 | BDNF | in vitro | Hep3B | 30 | qRTPCR |
| m02 | | | | | | | |
| BDNF-20 | 1.363651775 | 0.291599508 | BDNF | in vitro | Hep3B | 10 | qRTPCR |
| m02 | | | | | | | |
| BDNF-21 | 0.38968081 | 0.072631587 | BDNF | in vitro | Hep3B | 30 | qRTPCR |
| m02 | | | | | | | |
| BDNF-21 | 0.762849412 | 0.180532241 | BDNF | in vitro | Hep3B | 10 | qRTPCR |
| m02 | | | | | | | |
| BDNF-22 | 0.480690649 | 0.147239665 | BDNF | in vitro | Hep3B | 30 | qRTPCR |
| m02 | | | | | | | |
| BDNF-22 | 0.617499352 | 0.263150195 | BDNF | in vitro | Hep3B | 10 | qRTPCR |
| m02 | | | | | | | |
| BDNF-23 | 0.665875976 | 0.457524278 | BDNF | in vitro | Hep3B | 30 | qRTPCR |
| m02 | | | | | | | |
| BDNF-23 | 0.644627324 | 0.160313284 | BDNF | in vitro | Hep3B | 10 | qRTPCR |
| m02 | | | | | | | |
| BDNF-24 | 0.19580671 | 0.082872733 | BDNF | in vitro | Hep3B | 30 | qRTPCR |
| m02 | | | | | | | |
| BDNF-24 | 1.158636252 | 0.206418695 | BDNF | in vitro | Hep3B | 10 | qRTPCR |
| m02 | | | | | | | |
| BDNF-25 | 3.225781118 | 0.172512002 | BDNF | in vitro | Hep3B | 30 | qRTPCR |
| m02 | | | | | | | |
| BDNF-25 | 4.395555504 | 0.442543763 | BDNF | in vitro | Hep3B | 10 | qRTPCR |
| m02 | | | | | | | |
| BDNF-26 | 1.356992496 | NA | BDNF | in vitro | Hep3B | 30 | qRTPCR |
| m02 | | | | | | | |
| BDNF-26 | 1.545117505 | 0.376307394 | BDNF | in vitro | Hep3B | 10 | qRTPCR |
| m02 | | | | | | | |
| BDNF-27 | 1.045136802 | 0.169520404 | BDNF | in vitro | Hep3B | 30 | qRTPCR |
| m02 | | | | | | | |
| BDNF-27 | 1.844442021 | 0.26755814 | BDNF | in vitro | Hep3B | 10 | qRTPCR |
| m02 | | | | | | | |
| BDNF-28 | 0.668997022 | 0.1570761 | BDNF | in vitro | Hep3B | 30 | qRTPCR |
| m02 | | | | | | | |
| BDNF-28 | 1.130639417 | 0.120737074 | BDNF | in vitro | Hep3B | 10 | qRTPCR |
| m02 | | | | | | | |
| BDNF-29 | 1.099556016 | NA | BDNF | in vitro | Hep3B | 30 | qRTPCR |
| m02 | | | | | | | |
| BDNF-29 | 0.939912499 | 0.155918621 | BDNF | in vitro | Hep3B | 10 | qRTPCR |
| m02 | | | | | | | |
| BDNF-30 | 0.8073181 | NA | BDNF | in vitro | Hep3B | 30 | qRTPCR |
| m02 | | | | | | | |
| BDNF-30 | 1.632544933 | 0.253640398 | BDNF | in vitro | Hep3B | 10 | qRTPCR |
| m02 | | | | | | | |

TABLE 4
Formatted oligonucleotide sequences made for
testing in the lab showing nucleotide modifications.

| OligoID | Base Sequence | Formatted Sequence | SeqID |
|---|---|---|---|
| BDNF-01 m02 | AAGTATGAAATAACC | dAs;InaAs;dGs;InaTs;dAs;InaTs;dGs;InaAs;dAs; | 42269 |
| | | InaAs;dTs;InaAs;dAs;InaCs;dC-Sup | |
| BDNF-02 m02 | AGTAAGGAAAAGGAT | dAs;InaGs;dTs;InaAs;dAs;InaGs;dGs;InaAs;dAs; | 42286 |
| | | InaAs;dAs;InaGs;dGs;InaAs;dT-Sup | |
| BDNF-03 m02 | TCTCACCTGGTGGAA | dTs;InaCs;dTs;InaCs;dAs;InaCs;dCs;InaTs;dGs; | 42313 |
| | | InaGs;dTs;InaGs;dGs;InaAs;dA-Sup | |
| BDNF-04 m02 | AGAAAGCAGAAACAA | dAs;InaGs;dAs;InaAs;dAs;InaGs;dCs;InaAs;dGs; | 42336 |
| | | InaAs;dAs;InaAs;dCs;InaAs;dA-Sup | |
| BDNF-05 m02 | AAACAAGACAGAAAA | dAs;InaAs;dAs;InaCs;dAs;InaAs;dGs;InaAs;dCs; | 42345 |
| | | InaAs;dGs;InaAs;dAs;InaAs;dA-Sup | |
| BDNF-06 m02 | ATGTTGCTAACTTGA | dAs;InaTs;dGs;InaTs;dTs;InaGs;dCs;InaTs;dAs; | 8673 |
| | | InaAs;dCs;InaTs;dTs;InaGs;dA-Sup | |
| BDNF-07 m02 | ACACTTGCAGTTGTT | dAs;InaCs;dAs;InaCs;dTs;InaTs;dGs;InaCs;dAs; | 8640 |
| | | InaGs;dTs;InaTs;dGs;InaTs;dT-Sup | |
| BDNF-08 m02 | TGTTTCTCGTGACAG | dTs;InaGs;dTs;InaTs;dTs;InaCs;dTs;InaCs;dGs; | 8602 |
| | | InaTs;dGs;InaAs;dCs;InaAs;dG-Sup | |
| BDNF-09 m02 | AGGCGAGGAGGAGGA | dAs;InaGs;dGs;InaCs;dGs;InaAs;dGs;InaGs;dAs; | 62210 |
| | | InaGs;dGs;InaAs;dGs;InaGs;dA-Sup | |
| BDNF-10 m02 | AGAGAACGAAGCTAG | dAs;InaGs;dAs;InaGs;dAs;InaAs;dCs;InaGs;dAs; | 62211 |
| | | InaAs;dGs;InaCs;dTs;InaAs;dG-Sup | |
| BDNF-11 m02 | ACCAGAATCAAAATT | dAs;InaCs;dCs;InaAs;dGs;InaAs;dAs;InaTs;dCs; | 54711 |
| | | InaAs;dAs;InaAs;dAs;InaTs;dT-Sup | |
| BDNF-12 m02 | TATTAGAAGAGTTCC | dTs;InaAs;dTs;InaTs;dAs;InaGs;dAs;InaAs;dGs; | 54752 |
| | | InaAs;dGs;InaTs;dTs;InaCs;dC-Sup | |
| BDNF-13 m02 | AGGGCATTGCATGCT | dAs;InaGs;dGs;InaGs;dCs;InaAs;dTs;InaTs;dGs; | 54772 |
| | | InaCs;dAs;InaTs;dGs;InaCs;dT-Sup | |
| BDNF-14 m02 | CTCGCTCATTCATTA | dCs;InaTs;dCs;InaGs;dCs;InaTs;dCs;InaAs;dTs; | 28776 |
| | | InaTs;dCs;InaAs;dTs;InaTs;dA-Sup | |
| BDNF-15 m02 | AAGAACTCAAAAGGA | dAs;InaAs;dGs;InaAs;dAs;InaCs;dTs;InaCs;dAs; | 28752 |
| | | InaAs;dAs;InaAs;dGs;InaGs;dA-Sup | |
| BDNF-16 m02 | AAACGTGTCTCTCGG | dAs;InaAs;dAs;InaCs;dGs;InaTs;dGs;InaTs;dCs; | 28738 |
| | | InaTs;dCs;InaTs;dCs;InaGs;dG-Sup | |
| BDNF-17 m02 | TCAGAGCGACGGACA | dTs;InaCs;dAs;InaGs;dAs;InaGs;dCs;InaGs;dAs; | 62212 |
| | | InaCs;dGs;InaGs;dAs;InaCs;dA-Sup | |
| BDNF-18 m02 | ACAACTGGTCTACAT | dAs;InaCs;dAs;InaAs;dCs;InaTs;dGs;InaGs;dTs; | 62213 |
| | | InaCs;dTs;InaAs;dCs;InaAs;dT-Sup | |
| BDNF-19 m02 | TTCTGCTCTGCTGTG | dTs;InaTs;dCs;InaTs;dGs;InaCs;dTs;InaCs;dTs; | 62214 |
| | | InaGs;dCs;InaTs;dGs;InaTs;dG-Sup | |
| BDNF-20 m02 | TGAAACTTAAGAGCT | dTs;InaGs;dAs;InaAs;dAs;InaCs;dTs;InaTs;dAs; | 62215 |
| | | InaAs;dGs;InaAs;dGs;InaCs;dT-Sup | |
| BDNF-21 m02 | CCACGGCCAGGGCCT | dCs;InaCs;dAs;InaCs;dGs;InaGs;dCs;InaCs;dAs; | 62216 |
| | | InaGs;dGs;InaGs;dCs;InaCs;dT-Sup | |
| BDNF-22 m02 | ACAGTGATCTGCACA | dAs;InaCs;dAs;InaGs;dTs;InaGs;dAs;InaTs;dCs; | 62217 |
| | | InaTs;dGs;InaCs;dAs;InaCs;dA-Sup | |
| BDNF-23 m02 | ATCGCATTAGTGCCC | dAs;InaTs;dCs;InaGs;dCs;InaAs;dTs;InaTs;dAs; | 62218 |
| | | InaGs;dTs;InaGs;dCs;InaCs;dC-Sup | |
| BDNF-24 m02 | TGTATACCCCATCTT | dTs;InaGs;dTs;InaAs;dTs;InaAs;dCs;InaCs;dCs; | 62219 |
| | | InaCs;dAs;InaTs;dCs;InaTs;dT-Sup | |
| BDNF-25 m02 | AATCAGCCCTCATTT | dAs;InaAs;dTs;InaCs;dAs;InaGs;dCs;InaCs;dCs; | 62220 |
| | | InaTs;dCs;InaAs;dTs;InaTs;dT-Sup | |
| BDNF-26 m02 | TTAGGCGAAGCCCCA | dTs;InaTs;dAs;InaGs;dGs;InaCs;dGs;InaAs;dAs; | 62221 |
| | | InaGs;dCs;InaCs;dCs;InaCs;dA-Sup | |
| BDNF-27 m02 | TCTAAATGGCCCATG | dTs;InaCs;dTs;InaAs;dAs;InaAs;dTs;InaGs;dGs; | 62222 |
| | | InaCs;dCs;InaCs;dAs;InaTs;dG-Sup | |
| BDNF-28 m02 | TATCTCCAAGCCCTT | dTs;InaAs;dTs;InaCs;dTs;InaCs;dCs;InaAs;dAs; | 62223 |
| | | InaGs;dCs;InaCs;dCs;InaTs;dT-Sup | |
| BDNF-29 m02 | ATCTCCTACAGAGAT | dAs;InaTs;dCs;InaTs;dCs;InaCs;dTs;InaAs;dCs; | 62224 |
| | | InaAs;dGs;InaAs;dGs;InaAs;dT-Sup | |
| BDNF-30 m02 | ACTGGTGTACCCAAT | dAs;InaCs;dTs;InaGs;dGs;InaTs;dGs;InaTs;dAs; | 62225 |
| | | InaCs;dCs;InaCs;dAs;InaAs;dT-Sup | |

### BRIEF DESCRIPTION OF THE SEQUENCE LISTING

| SEQ ID | Chrom | Gene | Chr. Start | Chr. End | Strand |
|---|---|---|---|---|---|
| 1 | chr11 | BDNF | 27664441 | 27693196 | − |
| 2 | chr11 | BDNF | 27664441 | 27693196 | + |
| 3 | chr11 | BDNF-AS1 | 27516398 | 27731718 | + |
| 4 | chr11 | BDNF-AS1 | 27516398 | 27731718 | − |
| 5 | chr2 | Bdnf | 109502856 | 109579200 | + |
| 6 | chr2 | Bdnf | 109502856 | 109579200 | − |
| 7 | chr11 | BDNF | 27678819 | 27678888 | − |
| 8 | chr11 | BDNF | 27679423 | 27679469 | − |
| 9 | chr11 | BDNF | 27679512 | 27679558 | − |
| 10 | chr11 | BDNF | 27679705 | 27679749 | − |
| 11 | chr11 | BDNF | 27686657 | 27686742 | − |
| 12 | chr11 | BDNF | 27718502 | 27718548 | − |
| 13 | chr11 | BDNF | 27719743 | 27719780 | − |
| 14 | chr11 | BDNF | 27721391 | 27721434 | − |
| 15 | chr11 | BDNF | 27676819 | 27680888 | − |
| 16 | chr11 | BDNF | 27677423 | 27681469 | − |
| 17 | chr11 | BDNF | 27677512 | 27681558 | − |
| 18 | chr11 | BDNF | 27677705 | 27681749 | − |
| 19 | chr11 | BDNF | 27684657 | 27688742 | − |
| 20 | chr11 | BDNF | 27716502 | 27720548 | − |
| 21 | chr11 | BDNF | 27717743 | 27721780 | − |
| 22 | chr11 | BDNF | 27719391 | 27723434 | − |
| 23 | chr11 | BDNF | 27739230 | 27739276 | − |
| 24 | chr11 | BDNF | 27741576 | 27741622 | − |
| 25 | chr11 | BDNF | 27742481 | 27742526 | − |
| 26 | chr11 | BDNF | 27742552 | 27742602 | − |
| 27 | chr11 | BDNF | 27737230 | 27741276 | − |
| 28 | chr11 | BDNF | 27739576 | 27743622 | − |
| 29 | chr11 | BDNF | 27740481 | 27744526 | − |
| 30 | chr11 | BDNF | 27740552 | 27744602 | − |
| 31 | chr11 | BDNF | 27518527 | 27518574 | − |
| 32 | chr11 | BDNF | 27518780 | 27518823 | − |
| 33 | chr11 | BDNF | 27518870 | 27518922 | − |
| 34 | chr11 | BDNF | 27519285 | 27519333 | − |
| 35 | chr11 | BDNF | 27520498 | 27520547 | − |
| 36 | chr11 | BDNF | 27520913 | 27520996 | − |
| 37 | chr11 | BDNF | 27521081 | 27521112 | − |
| 38 | chr11 | BDNF | 27523348 | 27523395 | − |
| 39 | chr11 | BDNF | 27523423 | 27523469 | − |
| 40 | chr11 | BDNF | 27516527 | 27520574 | − |
| 41 | chr11 | BDNF | 27516780 | 27520823 | − |
| 42 | chr11 | BDNF | 27516870 | 27520922 | − |
| 43 | chr11 | BDNF | 27517285 | 27521333 | − |
| 44 | chr11 | BDNF | 27518498 | 27522547 | − |
| 45 | chr11 | BDNF | 27518913 | 27522996 | − |
| 46 | chr11 | BDNF | 27519081 | 27523112 | − |
| 47 | chr11 | BDNF | 27521348 | 27525395 | − |
| 48 | chr11 | BDNF | 27521423 | 27525469 | − |
| 49 | chr11 | BDNF | 27681917 | 27681964 | + |
| 50 | chr11 | BDNF | 27697978 | 27698023 | + |
| 51 | chr11 | BDNF | 27718599 | 27718680 | + |
| 52 | chr11 | BDNF | 27679917 | 27683964 | + |
| 53 | chr11 | BDNF | 27695978 | 27700023 | + |
| 54 | chr11 | BDNF | 27716599 | 27720680 | + |
| 55 | chr11 | BDNF | 27523708 | 27523784 | + |
| 56 | chr11 | BDNF | 27527959 | 27528009 | + |
| 57 | chr11 | BDNF | 27528063 | 27528106 | + |
| 58 | chr11 | BDNF | 27521708 | 27525784 | + |
| 59 | chr11 | BDNF | 27525959 | 27530009 | + |
| 60 | chr11 | BDNF | 27526063 | 27530106 | + |
| 61 | chr11 | BDNF | 27734836 | 27734884 | + |
| 62 | chr11 | BDNF | 27740311 | 27740344 | + |
| 63 | chr11 | BDNF | 27741786 | 27741828 | + |
| 64 | chr11 | BDNF | 27742450 | 27742493 | + |
| 65 | chr11 | BDNF | 27732836 | 27736884 | + |
| 66 | chr11 | BDNF | 27738311 | 27742344 | + |
| 67 | chr11 | BDNF | 27739786 | 27743828 | + |
| 68 | chr11 | BDNF | 27740450 | 27744493 | + |

### Single Strand Oligonucleotides (Antisense Strand of Target Gene BDNF)

[0209] SegID range: 69-30107, 62210-62225

### SegIDs w/o G Runs:

[0210] 69-119, 140-142, 156-165, 179-227, 241-380, 395-559, 573-588, 602-849, 876-967, 982-1636, 1650-2761, 2765-2817, 2832-2869, 2877-2902, 2916-3015, 3029-3199, 3214-3216, 3230-3409, 3418-3447, 3461-3524, 3538-3568, 3595-3641, 3655-3721, 3735-3757, 3771-3822, 3824-3920, 3934-4107, 4121-4257, 4274-4433, 4447-4733, 4747-4749, 4763-4905, 4919-4978, 4992-5624, 5638-5699, 5719-6026, 6040-6090, 6104-6121, 6136-6142, 6171-6209, 6224-6230, 6244-6245, 6259-6437, 6453-6484, 6498-6499, 6520-6521, 6535-6561, 6584-6607, 6621-6778, 6792-7030, 7044-7117, 7142-7199, 7214-7294, 7308-7573, 7586-7622, 7636-7692, 7717-7742, 7756, 7770-7804, 7819-7981, 7995-8083, 8097-8104, 8118-8316, 8330-8459, 8475-8540, 8554-8826, 8840-8961, 8975-9166, 9180-9208, 9222-9419, 9433-9565, 9579-9646, 9672-9769, 9783-9919, 9933-10186, 10200-10206, 10220-10461, 10475-10740, 10754-10813, 10841-10967, 10981-10985, 10999-11105, 11119, 11133-11143, 11157-11174, 11188-11239, 11253-11341, 11361-11477, 11491-11544, 11559-11583, 11597-11622, 11636-11652, 11666-11671, 11683-11736, 11761-11861, 11877-11981, 12002-12047, 12061-12072, 12086-12270, 12284-12552, 12566-12573, 12587-12588, 12602-12716, 12730-12751, 12766-12815, 12829-12953, 12967-13131, 13156-13167, 13181-13189, 13203-13449, 13471-13487, 13501-13535, 13549-13764, 13778-13855, 13883-13923, 13935-14121, 14136-14296, 14310-14332, 14346-14591, 14605-14668, 14682-14803, 14817-14861, 14875-15470, 15484-15519, 15533-15565, 15579-15585, 15599-15660, 15674-15705, 15719-15779, 15793-15812, 15826-15855, 15869-16013, 16035-16195, 16209-16216, 16230-16372, 16386-16680, 16707-16713, 16727-16815, 16829-16951, 16977-17665, 17679-17707, 17722-18003, 18017-18056, 18072-18110, 18125-18180, 18194-18320, 18335-18338, 18352-18395, 18409-18427, 18457-19016, 19030-19119, 19133-19134, 19148-19217, 19231-19584, 19598-19748, 19762-19770, 19784-19805, 19821-19881, 19896-19919, 19933-19944, 19958-19969, 20004-20029, 20034-20289, 20303-20541, 20555-20559, 20573-20782, 20796-20810, 20825-20860, 20874-21322, 21335-21377, 21390-21420, 21431-21444, 21459-21626, 21629-21663, 21667-21841, 21856-21872, 21886-21895, 21909-21937, 21957-22002, 22017-22209, 22223-22306, 22320-22348, 22362-22637, 22651-22666, 22680-22747, 22761-22855, 22869-23151, 23169-23203, 23218-23452, 23467-23735, 23749-23953, 23967-23982, 23996-24014, 24028-24062, 24076-24121, 24136-24343, 24358-24453, 24467-24475, 24489, 24503-24748, 24762-25030, 25044-25106, 25120-25131, 25145-25227, 25241-25390, 25405-25407, 25436-25444, 25458-25461, 25475-25578, 25653-25691, 25706-25720, 25748-25916, 25944-25991, 26005-26093, 26113-26116, 26139-26178, 26194-26250, 26308-26331, 26345-26362, 26376-26455, 26488-26514, 26528, 26560-26584, 26598-26618, 26638-26642, 26656-26657, 26671-26703, 26717-26933, 26954-26958, 26973-27216, 27238-27275, 27291, 27319-27372, 27391-27410, 27425-27448, 27486-27600, 27615-27754, 27781-27943, 27957-27981, 28011-28015, 28071-28098, 28114-28123, 28137-28235, 28257-28327, 28349-28395, 28409-28505, 28520-28581, 28595-28614, 28628-28717, 28731-28792, 28814-28843, 28857-28872, 28886-28900, 28915-28935, 28955-28999, 29013-29229, 29256-29367, 29393-29438, 29452-29523, 29537-29542, 29557-29656, 29671-29689, 29704-29761, 29784, 29808-29909, 29925-30002, 30013-30020, 30025-30033, 30039-30067, 30074-30107, 62210-62215, 62217-62225

### SeqIDs w/o miR Seeds:

[0211] 69, 73, 76, 79, 81-83, 86-88, 92, 94, 98, 101-102, 104-105, 107-113, 117-120, 123, 132, 134-138, 141-142, 149-152, 156-159, 163-165, 167, 174, 178, 183-185, 187-188, 190-191, 193-195, 200, 202-205, 208-211, 213-217, 220, 225-226, 229, 231-234, 236, 238-239, 241-244, 248-251, 253-261, 263-264, 266-280, 282-283, 285-286, 288-289, 293, 296-300, 303-304, 306-308, 310-311, 313-318, 321, 323, 325-327, 329-336, 338, 343, 346-347, 349, 352-354, 358, 360-368, 372-380, 382, 387-388, 391, 393, 395-401, 404-409, 413, 415-417, 419-420, 422-425, 428, 431-432, 434-438, 440-448, 450-457, 461, 464, 466, 468-471, 474, 476, 479-480, 482-491, 493-494, 496-498, 501, 505-506, 508, 511-516, 518-519, 522, 524-528, 530-531, 533, 537, 539-546, 548-553, 556-558, 562-567, 570-572, 575, 577-582, 584-585, 587, 591-596, 600-605, 607, 609, 613-617, 620-622, 626-627, 629, 631-633, 636, 638-644, 647-648, 651-654, 658-660, 662-663, 665-675, 678-679, 681, 685-686, 688-693, 696, 698-699, 701, 705-707, 711-717, 724-731, 738-742, 744-746, 748-750, 753-754, 756-757, 759-765, 767, 770-772, 774, 777-781, 785, 787, 790-796, 800-814, 818-819, 821-828, 830-832, 834-840, 847, 849-850, 852-860, 864, 868-871, 873, 875, 877-879, 881-883, 885-888, 893-894, 897-898, 900, 903-904, 906-911, 913-914, 919, 921-924, 927, 929-931, 934-939, 941, 943-944, 946-949, 951-956, 958-959, 961-962, 964-965, 967-970, 974, 976-977, 979-989, 991-992, 995-996, 998, 1001-1013, 1015-1017, 1019-1021, 1026-1034, 1036, 1038, 1040-1049, 1051-1053, 1055, 1057, 1059-1061, 1063-1066, 1069-1074, 1077, 1081-1082, 1084-1085, 1087, 1089, 1094-1095, 1097-1104, 1106, 1108, 1110-1116, 1120-1122, 1124-1127, 1130, 1134, 1136-1138, 1140-1143, 1145, 1149, 1151, 1154-1163, 1165-1169, 1171, 1174-1175, 1177, 1179-1181, 1183-1187, 1189, 1191-1194, 1196-1204, 1206, 1209-1210, 1212-1214, 1216-1217, 1221-1222, 1224-1236, 1238, 1240-1241, 1243-1252, 1255-1256, 1258, 1260, 1262-1265, 1267, 1270, 1272-1275, 1277-1283, 1285-1288, 1291-1300, 1302, 1304-1305, 1307, 1309-1314, 1316-1322, 1324-1326, 1330-1332, 1334-1335, 1341-1342, 1344-1351, 1353-1365, 1367, 1369-1370, 1373-1375, 1378-1388, 1390-1392, 1395-1398, 1401-1402, 1406-1420, 1422, 1425, 1428-1429, 1431, 1434-1435, 1439, 1442, 1446, 1448, 1453-1455, 1457, 1459-1469, 1471, 1474-1475, 1477, 1480-1482, 1484-1488, 1490-1493, 1498, 1500-1503, 1505-1511, 1513, 1515, 1520, 1522, 1524-1530, 1533, 1537, 1540-1547, 1550-1551, 1553-1554, 1557-1562, 1564, 1567, 1569, 1571-1572, 1574-1578, 1580-1582, 1584-1585, 1587-1589, 1591-1593, 1596-1598, 1601-1604, 1607-1608, 1610-1617, 1620-1622, 1625-1631, 1633, 1635-1637, 1640-1641, 1643, 1645-1646, 1648, 1650-1651, 1655, 1657, 1659-1662, 1664-1667, 1669, 1671-1675, 1680, 1682-1683, 1688-1692, 1694, 1696-1698, 1700-1703, 1705, 1707-1713, 1715-1716, 1718-1720, 1723, 1727, 1730-1731, 1734, 1738-1741, 1743, 1745-1746, 1748, 1750-1751, 1753, 1755-1760, 1762-1766, 1768-1772, 1774, 1776, 1780, 1784, 1786-1788, 1791, 1793, 1796, 1799-1802, 1805, 1807-1811, 1813, 1815, 1817, 1819-1822, 1824-1826, 1832-1838, 1840, 1842, 1844-1849, 1851, 1853-1854, 1858, 1862, 1864, 1867, 1870, 1872-1873, 1875, 1878, 1880-1884, 1891, 1893-1899, 1901-1905, 1907, 1911-1912, 1916-1920, 1924-1925, 1929, 1931-1932, 1934-1937, 1939-1940, 1943-1947, 1949-1954, 1958-1959, 1962, 1964-1965, 1967-1970, 1973-1974, 1976-1977, 1979-1980, 1982, 1984-1985, 1987, 1989, 1992, 1995-1996, 1998, 2003, 2005, 2007, 2010-2012, 2014-2016, 2018-2022, 2024-2025, 2030, 2032-2033, 2037-2039, 2043-2047, 2051-2056, 2062, 2065-2066, 2074-2075, 2077-2083, 2085-2086, 2089-2090, 2094-2099, 2104-2111, 2113, 2116-2119, 2121-2123, 2125-2127, 2130-2135, 2137-2140, 2142, 2145-2146, 2149-2154, 2156-2167, 2169-2170, 2172-2178, 2180-2181, 2183-2184, 2186-2188, 2190, 2192, 2195-2196, 2198-2199, 2202-2203, 2207-2211, 2213-2222, 2225-2228, 2231-2236, 2238-2244, 2246, 2248, 2250-2251, 2256-2258, 2262-2264, 2266, 2268, 2272-2276, 2279, 2281-2283, 2285-2288, 2292-2297, 2299, 2302-2310, 2312-2313, 2315-2318, 2320-2331, 2335, 2337, 2340, 2345-2347, 2350-2352, 2354-2355, 2360, 2362-2363, 2366-2376, 2378, 2381-2387, 2389, 2391, 2393-2398, 2400-2408, 2410-2411, 2413-2417, 2419, 2425-2432, 2434-2439, 2445, 2447, 2449-2451, 2453-2459, 2463-2467, 2470-2473, 2475-2476, 2478-2481, 2483-2501, 2503-2505, 2509, 2511-2514, 2517-2518, 2522, 2524-2525, 2527, 2530, 2533-2535, 2537-2539, 2542-2552, 2554-2555, 2557, 2560, 2562-2568, 2572-2573, 2576-2577, 2579, 2581-2582, 2584, 2586, 2588-2589, 2591-2592, 2594-2600, 2603-2605, 2611-2613, 2615-2618, 2620-2624, 2626, 2628-2629, 2631, 2634-2639, 2644-2647, 2649-2656, 2659-2660, 2662-2667, 2669-2676, 2679-2682, 2684-2685, 2688-2691, 2693-2694, 2696-2699, 2703, 2705-2711, 2713-2731, 2734-2735, 2737-2740, 2742, 2744-2746, 2749-2755, 2759, 2761-2763, 2766-2769, 2771, 2773-2775, 2777, 2779-2781, 2783-2784, 2786-2787, 2791, 2795-2796, 2804, 2806-2808, 2810, 2812-2813, 2815, 2817-2818, 2826-2827, 2830-2840, 2843-2844, 2850-2857, 2859-2861, 2867, 2869-2872, 2876-2877, 2879-2880, 2885-2887, 2889, 2895-2897, 2899-2903, 2911, 2913-2917, 2919-2920, 2923, 2925-2930, 2933-2938, 2943, 2950-2954, 2956-2958, 2960-2961, 2963-2965, 2970-2971, 2973, 2975-2976, 2978-2980, 2983-2988, 2990-2993, 2995-3010, 3012-3016, 3019, 3021-3023, 3025, 3028-3029, 3032, 3034-3038, 3040, 3043-3049, 3051-3053, 3058-3063, 3066-3069, 3071, 3076-3077, 3079-3082, 3085-3093, 3095-3097, 3099-3101, 3104-3106, 3108-3109, 3111-3112, 3114-3115, 3118-3119, 3121-3123, 3128-3129, 3131, 3133-3140, 3144, 3146, 3148-3156, 3162, 3164, 3166, 3168, 3171-3173, 3175-3176, 3178, 3180-3181, 3183-3186, 3188-3189, 3193-3194, 3197, 3199-3204, 3207-3208, 3210-3212, 3214, 3216, 3219, 3221-3223, 3225-3229, 3232-3234, 3236, 3239, 3241-3242, 3245-3251, 3253-3257, 3259-3265, 3268-3269, 3272-3279, 3283-3285, 3287-3288, 3290, 3293-3295, 3299-3301, 3303, 3306-3308, 3312, 3314-3318, 3324, 3326-3333, 3336, 3338-3340, 3342-3348, 3350, 3352-3355, 3357-3377, 3379-3381, 3383-3385, 3387, 3392-3394, 3397-3398, 3401, 3407, 3409, 3411-3412, 3414, 3418-3424, 3428, 3432, 3436-3437, 3439-3440, 3442, 3445, 3455-3457, 3459, 3461-3465, 3468, 3474, 3478-3479, 3481, 3483, 3485-3487, 3491-3492, 3494-3500, 3502-3508, 3512, 3515, 3521-3530, 3532-3535, 3537-3538, 3540-3541, 3543, 3546, 3548-3551, 3553, 3555-3557, 3559, 3561-3562, 3565-3567, 3572, 3574, 3576, 3579, 3581, 3584, 3589-3590, 3594-3595, 3597-3599, 3602-3606, 3609-3614, 3616, 3618, 3624-3631, 3633-3635, 3637-3639, 3643, 3646, 3649, 3651-3652, 3655-3665, 3669, 3672-3673, 3675, 3677-3678, 3680-3681, 3683-3687, 3689, 3692, 3697-3699, 3701, 3703, 3707-3712, 3716, 3718, 3723-3724, 3726-3731, 3734-3735, 3739-3740, 3743-3748, 3751, 3753-3754, 3756, 3758, 3763-3768, 3772, 3774-3777, 3779-3780, 3782-3783, 3786-3790, 3792, 3794-3799, 3801-3802, 3804, 3806, 3808-3813, 3815, 3817-3821, 3824, 3827-3830, 3832-3833, 3836-3837, 3840-3843, 3846, 3849-3850, 3852-3858, 3860, 3862, 3864-3873, 3875-3885, 3887, 3890-3891, 3893, 3896-3899, 3901, 3904, 3908-3912, 3914-3916, 3920, 3923-3929, 3931-3932, 3934, 3937-3945, 3947-3948, 3950, 3953, 3956-3958, 3961, 3964, 3969, 3971-3975, 3977, 3979-3981, 3983, 3985-3990, 3995, 3997-3999, 4001-4002, 4004, 4006-4010, 4014, 4016, 4020-4023, 4027, 4030-4039, 4041, 4043, 4045-4047, 4049, 4051, 4053-4055, 4058, 4060-4064, 4066, 4068-4077, 4079-4081, 4083, 4085-4086, 4088-4090, 4092-4093, 4095-4096, 4099-4100, 4103-4105, 4107-4108, 4110-4111, 4116-4117, 4119-4120, 4124-4125, 4131-4134, 4136, 4138, 4142-4149, 4156-4169, 4173, 4176-4177, 4179-4182, 4184-4189, 4191-4193, 4195-4199, 4202, 4204-4213, 4215, 4217, 4221, 4223-4226, 4229, 4231-4232, 4234-4235, 4237, 4239, 4241, 4244-4247, 4249-4252, 4255-4256, 4259, 4265, 4268-4271, 4273-4278, 4280-4281, 4283-4285, 4287-4297, 4299, 4301-4302, 4304-4310, 4312-4317, 4319-4325, 4327-4328, 4330, 4332-4338, 4340-4341, 4344-4349, 4353, 4355-4364, 4366-4368, 4370-4374, 4377-4379, 4383, 4387-4390, 4393-4398, 4401-4402, 4404-4411, 4413, 4417-4424, 4427-4428, 4430-4431, 4433-4434, 4437-4439, 4441-4446, 4448, 4454-4455, 4457, 4459, 4461-4462, 4464-4465, 4468-4475, 4477, 4479-4481, 4483-4484, 4486, 4488-4489, 4493-4495, 4500, 4502-4510, 4513-4522, 4524-4530, 4532-4535, 4537, 4539-4544, 4546-4550, 4552, 4557-4558, 4561-4565, 4569-4570, 4573, 4576-4580, 4582-4591, 4593-4600, 4602-4604, 4606-4607, 4611, 4615-4616, 4618-4620, 4622, 4627, 4629-4631, 4633-4635, 4637-4638, 4640, 4643-4644, 4646-4650, 4652, 4654-4655, 4658-4660, 4662-4663, 4666-4668, 4670-4672, 4680-4682, 4684, 4686-4690, 4692-4697, 4699-4700, 4702-4706, 4708-4710, 4712-4713, 4715-4718, 4720-4721, 4723-4727, 4729, 4739-4745, 4747-4750, 4753, 4755-4760, 4762-4764, 4766-4767, 4769-4770, 4772-4775, 4777-4778, 4782, 4785-4792, 4795-4797, 4799, 4801-4802, 4804-4806, 4809-4817, 4819-4824, 4826-4829, 4832-4837, 4839-4847, 4849-4853, 4855-4861, 4863, 4865-4882, 4885-4886, 4888, 4892-4901, 4903, 4905, 4909-4922, 4925-4927, 4931, 4933-4934, 4936-4938, 4941, 4943-4944, 4946-4947, 4955, 4957-4961, 4964, 4966, 4968-4976, 4978, 4981, 4986-4991, 4993, 5000-5003, 5006, 5008-5009, 5012-5013, 5015-5020, 5022-5024, 5026-5031, 5033, 5035, 5037, 5039-5041, 5047-5050, 5054-5055, 5057-5058, 5060, 5062-5064, 5067-5073, 5075, 5077-5081, 5083, 5085-5086, 5090-5095, 5097-5098, 5100-5101, 5103, 5105-5107, 5109-5110, 5112-5113, 5116, 5120-5122, 5124, 5126, 5129, 5131, 5134-5138, 5140-5143, 5146-5159, 5161-5163, 5165-5166, 5168-5171, 5174, 5176, 5178-5182, 5185-5188, 5190-5191, 5193-5195, 5197, 5199, 5201-5203, 5207, 5212, 5214-5215, 5218-5219, 5221, 5223-5224, 5237-5238, 5242-5244, 5246-5248, 5251-5258, 5261, 5263-5265, 5268-5274, 5276-5279, 5281-5282, 5284-5286, 5288, 5291, 5293, 5295-5304, 5306, 5308, 5310-5314, 5320-5323, 5325-5326, 5328, 5330-5337, 5341-5346, 5351-5369, 5372, 5375-5377, 5383-5386, 5389-5391, 5393-5397, 5399, 5402-5407, 5411-5413, 5419-5427, 5429, 5431, 5433-5434, 5436-5437, 5441-5443, 5445-5451, 5453-5454, 5456, 5459, 5461-5465, 5467-5473, 5479-5481, 5483-5485, 5488, 5490, 5492-5493, 5496-5497, 5499-5503, 5507, 5510-5512, 5515, 5518-5521, 5523-5524, 5526-5527, 5529, 5531, 5534-5535, 5537, 5540-5542, 5544, 5546, 5548, 5550, 5552, 5554-5558, 5560-5561, 5563-5566, 5570, 5572-5573, 5577-5579, 5581, 5583-5587, 5590-5592, 5595, 5599-5617, 5627, 5630, 5632-5633, 5635, 5637-5638, 5641-5643, 5645, 5647-5651, 5653-5655, 5657-5662, 5664-5665, 5669, 5671, 5673, 5675, 5677, 5680, 5682-5683, 5685, 5687-5688, 5690, 5692, 5695-5699, 5702, 5707, 5709-5712, 5714, 5717-5718, 5720-5722, 5725, 5727-5729, 5732-5741, 5743-5749, 5752-5755, 5757-5765, 5769-5771, 5773, 5775-5776, 5778-5779, 5782, 5785-5792, 5794, 5797-5799, 5801-5802, 5804-5808, 5811-5812, 5814, 5819, 5821-5830, 5832-5839, 5844-5845, 5848, 5850-5851, 5853-5856, 5858, 5860-5870, 5872, 5874-5875, 5879-5883, 5888-5891, 5893, 5896-5898, 5900-5901, 5903-5905, 5910-5913, 5916-5926, 5929, 5932-5939, 5941, 5944, 5947, 5950-5954, 5956-5957, 5959-5960, 5963-5965, 5969-5973, 5976, 5978-5980, 5982, 5984-5986, 5988-5992, 5997-6002, 6004-6006, 6008-6010, 6012-6017, 6019-6027, 6030, 6034-6036, 6040, 6048-6049, 6052-6059, 6061-6062, 6064, 6066-6069, 6071-6075, 6077, 6079, 6082-6084, 6086-6091, 6093-6094, 6096, 6098-6100, 6106, 6111-6114, 6117, 6125, 6127, 6129, 6131, 6133-6135, 6137-6140, 6144, 6151, 6153, 6157, 6159, 6163, 6166, 6169, 6173-6174, 6176-6181, 6187, 6189, 6191-6194, 6197, 6200-6204, 6206, 6208-6210, 6213, 6215-6220, 6225-6226, 6232, 6235, 6237-6238, 6240-6241, 6245, 6248-6249, 6251, 6253, 6255-6257, 6260-6265, 6269, 6274-6276, 6278, 6282-6283, 6285-6286, 6288-6290, 6294-6297, 6299, 6301-6304, 6306-6308, 6310-6311, 6314-6322, 6324-6333, 6335-6337, 6340, 6342-6347, 6350-6353, 6356, 6361-6362, 6364-6368, 6370, 6373-6385, 6387-6400, 6402-6408, 6413, 6415, 6417-6419, 6425-6437, 6443-6444, 6446, 6451-6454, 6456-6462, 6464-6466, 6469, 6471-6472, 6475-6477, 6481-6485, 6493, 6496, 6498, 6504-6508, 6511, 6513-6522, 6525-6527, 6529-6532, 6534-6550, 6553, 6555-6558, 6561, 6567, 6572-6574, 6576-6578, 6580-6581, 6584, 6587, 6589-6593, 6595, 6599, 6601-6608, 6610-6616, 6619, 6622, 6624-6625, 6629-6630, 6632-6634, 6637-6638, 6640, 6642-6645, 6648-6649, 6651, 6653-6663, 6665-6673, 6676-6682, 6684-6686, 6688-6695, 6698, 6700-6703, 6705-6706, 6709, 6711-6712, 6714-6719, 6722, 6725-6727, 6730, 6732-6735, 6738-6740, 6742, 6744-6746, 6748, 6751-6753, 6756-6762, 6764, 6766, 6768-6772, 6775-6777, 6783, 6785-6786, 6788-6789, 6792-6793, 6795-6797, 6800-6802, 6804, 6806-6813, 6815, 6817-6823, 6825-6826, 6828-6829, 6831, 6833-6834, 6836-6838, 6841-6842, 6847-6848, 6850-6851, 6853, 6856-6858, 6861-6866, 6868-6877, 6879, 6882-6887, 6890, 6894, 6897-6906, 6908-6912, 6916-6917, 6919-6921, 6924, 6926, 6928, 6930-6934, 6938-6940, 6944-6946, 6951, 6955-6957, 6961, 6963, 6965-6966, 6968, 6970-6972, 6976, 6979-6986, 6989-6990, 6993, 6995, 6999-7003, 7005, 7008-7010, 7014-7020, 7022-7026, 7030-7031, 7034-7035, 7037-7039, 7041-7045, 7049-7050, 7054, 7056-7061, 7064-7066, 7068, 7075, 7077-7079, 7081-7082, 7084, 7089-7090, 7093-7096, 7100, 7102-7106, 7108-7110, 7112, 7114-7117, 7119, 7122, 7125, 7131-7133, 7135, 7138, 7140, 7142-7143, 7146, 7148-7150, 7152-7156, 7162-7163, 7165, 7167, 7170, 7172-7173, 7175-7176, 7178, 7181-7183, 7186-7190, 7194-7198, 7201, 7203, 7205, 7210-7213, 7217, 7219-7221, 7224-7226, 7229-7232, 7234-7237, 7239, 7241-7244, 7246, 7248-7251, 7253, 7255-7256, 7259, 7261, 7264-7265, 7269-7271, 7273, 7275-7279, 7281-7282, 7285-7289, 7291, 7293-7296, 7298, 7301, 7303-7305, 7309, 7311-7315, 7318-7319, 7321, 7326-7330, 7335, 7337-7338, 7340, 7342-7343, 7346-7347, 7349, 7352, 7360-7365, 7368-7369, 7371-7373, 7375, 7378, 7380-7386, 7388-7389, 7392, 7394, 7397-7398, 7401-7402, 7404, 7406-7408, 7410-7413, 7415, 7418, 7420-7421, 7424, 7426, 7429-7430, 7433, 7437, 7441-7442, 7444, 7449, 7453, 7456, 7459, 7461-7464, 7466-7467, 7469-7471, 7473, 7475-7476, 7478, 7484, 7489, 7493, 7496, 7499-7506, 7508, 7510-7511, 7517, 7522-7523, 7525-7528, 7530, 7536-7538, 7542-7545, 7550-7556, 7558, 7561-7562, 7564, 7568, 7572-7573, 7575-7576, 7581, 7583, 7587-7591, 7593-7594, 7597, 7599-7602, 7604-7605, 7615, 7618-7619, 7625, 7627-7632, 7635-7636, 7638-7640, 7642, 7648, 7650-7652, 7659-7661, 7663-7665, 7668-7669, 7672, 7675-7676, 7678-7679, 7682-7683, 7686-7688, 7690-7692, 7696, 7699, 7702-7703, 7706, 7711-7715, 7719-7723, 7726, 7728, 7731-7732, 7737-7743, 7746, 7749-7753, 7755-7756, 7759, 7765-7766, 7769, 7771-7772, 7777, 7779-7781, 7783-7789, 7791-7793, 7798-7799, 7803-7805, 7808, 7810-7813, 7815-7817, 7822, 7824-7826, 7830-7838, 7840, 7843-7846, 7853, 7855, 7857-7860, 7862-7873, 7875, 7877, 7881-7884, 7891, 7893-7896, 7898-7901, 7905-7908, 7910-7919, 7921-7922, 7924-7925, 7927, 7929-7932, 7934, 7937, 7943-7945, 7949-7950, 7953, 7955, 7957-7960, 7963-7965, 7968-7972, 7974, 7976-7977, 7980-7983, 7985-7988, 7990, 7992, 7995-8002, 8004-8007, 8009-8010, 8013, 8015-8016, 8018, 8022, 8027, 8029, 8032-8045, 8047, 8049-8050, 8052-8055, 8057, 8062-8065, 8067-8068, 8070, 8072-8075, 8081-8083, 8087, 8090, 8092-8097, 8100, 8105, 8108-8111, 8113, 8115-8116, 8118, 8120, 8122, 8124, 8128-8129, 8131-8140, 8144-8145, 8149-8157, 8159-8162, 8164, 8166-8170, 8173, 8175, 8178, 8181-8182, 8185, 8187-8188, 8190, 8192-8195, 8197-8198, 8200-8204, 8207-8210, 8212-8219, 8222, 8225-8229, 8233-8234, 8238, 8240, 8242, 8245-8246, 8248-8249, 8251, 8254, 8256, 8260-8261, 8263-8264, 8267-8272, 8276, 8278-8281, 8283-8289, 8292-8296, 8298, 8300-8303, 8305-8307, 8309, 8312, 8315-8317, 8320-8322, 8328-8330, 8332-8334, 8339-8341, 8344-8345, 8349-8350, 8353-8356, 8358-8359, 8362-8364, 8366-8369, 8371-8374, 8376-8377, 8379-8382, 8385, 8387, 8392-8393, 8395-8396, 8402-8404, 8406-8408, 8410, 8413-8415, 8418-8420, 8423-8428, 8430, 8432-8434, 8437, 8439-8440, 8444, 8448, 8450-8451, 8455-8456, 8458, 8467-8473, 8476-8478, 8480-8481, 8484-8485, 8487, 8490-8498, 8500-8508, 8510, 8512, 8514, 8516, 8518-8522, 8524, 8527, 8529-8532, 8535, 8539, 8543, 8545-8546, 8548, 8550, 8552-8553, 8558, 8560, 8562-8569, 8572-8576, 8578, 8580-8581, 8584, 8586, 8588, 8590, 8594, 8596-8605, 8608-8616, 8618, 8623-8629, 8631-8639, 8641-8643, 8645-8648, 8650-8656, 8659-8663, 8665-8669, 8671-8672, 8675, 8677, 8680-8684, 8687-8688, 8690-8691, 8693, 8695, 8697-8699, 8701, 8704, 8706-8707, 8709-8710, 8713, 8716, 8718-8720, 8722-8725, 8727-8729, 8736-8737, 8739-8742, 8745, 8747-8748, 8751-8752, 8754, 8756, 8758-8760, 8762, 8764-8766, 8768-8769, 8771-8778, 8780-8785, 8789-8797, 8799-8801, 8803-8806, 8808-8811, 8815-8820, 8825-8826, 8829, 8832-8834, 8837-8839, 8841-8842, 8844, 8848-8855, 8857, 8859-8865, 8867-8868, 8870-8875, 8877, 8879, 8882, 8884-8889, 8892-8901, 8904, 8907-8913, 8915-8918, 8920-8921, 8923, 8925-8929, 8932, 8934-8936, 8938-8946, 8949-8950, 8952, 8954-8955, 8966-8967, 8969, 8974, 8976, 8980, 8982-8990, 8992, 8995-9001, 9003-9007, 9010-9012, 9014-9015, 9019-9022, 9024, 9026-9032, 9034-9039, 9043, 9045-9055, 9058-9062, 9064, 9066, 9069-9075, 9079, 9082-9085, 9087, 9090, 9092-9093, 9095-9098, 9100-9101, 9104, 9106-9113, 9116-9119, 9121-9122, 9125-9126, 9128-9129, 9131, 9134, 9136-9142, 9145-9148, 9150-9152, 9154-9155, 9157, 9159-9163, 9165, 9170, 9172-9174, 9177, 9179, 9183, 9185, 9187, 9189, 9191, 9193, 9197, 9200-9201, 9204, 9206-9209, 9212, 9215-9216, 9219, 9221-9222, 9224-9233, 9236-9240, 9242-9243, 9245-9246, 9248-9258, 9260, 9262-9265, 9269-9271, 9273-9278, 9280, 9284-9287, 9291-9292, 9295-9297, 9299-9301, 9303, 9305, 9307, 9310-9315, 9317, 9319, 9321, 9323, 9326-9335, 9339-9344, 9346-9349, 9351-9352, 9354-9355, 9357-9366, 9369-9373, 9375-9379, 9381-9382, 9384-9390, 9392-9396, 9398-9399, 9401-9403, 9406-9408, 9415-9418, 9420, 9422, 9424, 9426-9428, 9430-9435, 9437-9438, 9440-9441, 9444-9447, 9449-9451, 9456-9459, 9461, 9463, 9465-9467, 9469-9472, 9474, 9477-9479, 9481-9482, 9485-9491, 9493, 9497, 9499, 9502, 9504-9508, 9510-9512, 9515, 9517-9533, 9535, 9537-9538, 9540-9544, 9546-9547, 9549-9550, 9552, 9554, 9557-9563, 9565, 9567, 9569, 9573-9583, 9585-9587, 9589, 9592-9596, 9598-9599, 9602-9604, 9606-9615, 9617-9621, 9623-9624, 9626, 9633-9638, 9640-9643, 9646-9647, 9658-9660, 9662, 9664-9666, 9668, 9670-9676, 9679, 9683-9686, 9688, 9690-9692, 9694-9695, 9697-9705, 9707-9709, 9713-9714, 9717-9719, 9721, 9724-9725, 9728-9730, 9732, 9735, 9741, 9743-9747, 9749, 9752-9757, 9759, 9761, 9763-9765, 9767-9768, 9770, 9772-9780, 9782-9784, 9787, 9790, 9792-9794, 9796-9797, 9800-9804, 9809, 9811, 9813-9819, 9825-9826, 9829, 9831-9836, 9839, 9842-9845, 9847-9854, 9857, 9859-9864, 9866, 9871, 9873, 9876-9877, 9879, 9881-9889, 9891, 9893-9896, 9898, 9903-9905, 9908, 9911, 9913-9917, 9919, 9922, 9925-9930, 9934, 9936-9938, 9941, 9943, 9945-9947, 9949-9956, 9958-9959, 9961, 9964, 9969-9971, 9973-9978, 9980-9986, 9988, 9991, 9993-10000, 10003-10005, 10007, 10009, 10016-10020, 10022, 10024, 10028-10029, 10031-10034, 10040-10047, 10050-10052, 10054-10059, 10061-10062, 10064-10079, 10082-10084, 10087, 10090, 10093-10094, 10099-10100, 10103-10112, 10114-10120, 10122, 10124-10126, 10129-10135, 10137, 10139-10158, 10162, 10164, 10166-10167, 10169-10170, 10172, 10175-10176, 10179, 10182-10183, 10185-10187, 10189, 10191-10192, 10196, 10198-10206, 10208, 10210, 10216-10219, 10221-10225, 10227-10228, 10230-10231, 10233-10239, 10241-10244, 10246, 10248-10253, 10255-10256, 10258-10259, 10261, 10263-10265, 10267-10269, 10271, 10274-10277, 10281-10285, 10288, 10291-10295, 10297-10305, 10307, 10309-10312, 10314, 10316, 10319, 10321-10331, 10334-10335, 10337-10340, 10342-10343, 10345-10348, 10350, 10352-10355, 10357-10361, 10363, 10367, 10369-10370, 10375-10379, 10381-10384, 10386-10388, 10391, 10398-10401, 10404, 10408-10409, 10411-10413, 10415, 10417-10425, 10427-10432, 10435-10438, 10440-10444, 10446-10448, 10450, 10452-10458, 10460-10464, 10469, 10471-10473, 10477-10484, 10490-10495, 10499-10501, 10503-10504, 10506, 10508, 10511-10513, 10515-10520, 10522-10526, 10528, 10530-10531, 10533-10537, 10541, 10545-10552, 10555-10556, 10559, 10562-10565, 10567, 10570-10577, 10581-10582, 10584-10585, 10589-10590, 10592-10594, 10597, 10603-10604, 10611-10613, 10616-10619, 10621-10624, 10626-10627, 10629, 10631, 10633-10643, 10646-10650, 10652, 10658, 10663-10664, 10668-10669, 10671-10675, 10678-10680, 10682-10689, 10692, 10694-10696, 10699-10700, 10702-10704, 10706-10708, 10713-10715, 10717-10719, 10721-10723, 10727-10730, 10732-10737, 10739-10741, 10744-10747, 10749, 10751, 10754-10758, 10762-10763, 10765-10767, 10770-10772, 10774, 10776-10779, 10781, 10783, 10785-10786, 10788-10791, 10795, 10797, 10799, 10801, 10803-10810, 10813, 10815, 10821-10823, 10825-10826, 10828, 10836-10837, 10839, 10842-10843, 10850-10851, 10854, 10858-10866, 10868, 10871-10872, 10874-10876, 10878, 10880-10882, 10884-10886, 10893-10900, 10902-10904, 10906, 10909, 10911-10918, 10920-10923, 10926, 10928, 10931-10935, 10941-10945, 10947, 10949-10950, 10954-10962, 10964, 10966-10968, 10973, 10976-10978, 10980, 10982-10984, 10986-10987, 10989, 10995-10996, 10998-11001, 11003-11005, 11008, 11010, 11012, 11014-11020, 11022-11025, 11027-11028, 11031-11032, 11038-11040, 11042-11044, 11048-11049, 11051-11052, 11055, 11059-11066, 11068, 11072-11073, 11075-11077, 11080, 11083-11097, 11102, 11104-11105, 11108, 11110-11113, 11115-11116, 11124, 11128, 11130-11134, 11136-11137, 11139-11142, 11144, 11151-11152, 11154, 11156-11158, 11162, 11165-11166, 11168-11175, 11177, 11179-11182, 11185-11191, 11194, 11197, 11199-11201, 11203, 11206, 11208, 11210-11213, 11215, 11217, 11219-11222, 11224, 11226, 11228, 11235-11236, 11238, 11242-11243, 11245-11254, 11256-11261, 11264, 11266-11267, 11269-11270, 11273, 11275-11276, 11278, 11280, 11284, 11286, 11289-11294, 11296-11301, 11304-11305, 11307-11308, 11310, 11314-11315, 11317, 11320-11321, 11323-11326, 11328, 11330-11331, 11334-11336, 11338, 11341-11342, 11349-11351, 11354, 11356-11363, 11365-11366, 11369-11373, 11376-11378, 11380-11381, 11383-11384, 11386-11389, 11391, 11393-11394, 11396, 11399-11400, 11402-11405, 11407, 11409-11411, 11414, 11416-11419, 11423-11425, 11427-11429, 11431-11436, 11438, 11445-11447, 11449-11454, 11456, 11459, 11463-11470, 11472, 11475-11477, 11479, 11482-11485, 11487, 11489, 11494, 11496-11502, 11505-11510, 11514-11515, 11518-11520, 11524, 11526, 11528, 11530-11539, 11543-11544, 11550, 11552, 11555, 11557-11563, 11565, 11567, 11569-11570, 11582, 11589-11591, 11593-11594, 11599-11601, 11607-11615, 11617, 11620-11621, 11623, 11631, 11633, 11635-11638, 11640, 11642-11643, 11645, 11647-11648, 11650-11652, 11655, 11658, 11662-11663, 11666, 11668-11669, 11679-11680, 11683, 11685, 11688, 11690-11691, 11693-11696, 11698, 11700-11701, 11705, 11707, 11716, 11721, 11724, 11726-11728, 11731-11732, 11734-11735, 11742-11743, 11745-11748, 11751-11759, 11762, 11766-11767, 11770, 11773-11777, 11779, 11781-11783, 11785-11786, 11788-11790, 11792-11797, 11799-11801, 11803-11804, 11806-11809, 11812-11813, 11819, 11821-11822, 11824-11825, 11827-11829, 11831-11836, 11839-11840, 11842-11844, 11847-11851, 11853-11857, 11859, 11869-11870, 11872, 11874-11875, 11877, 11879-11881, 11884-11891, 11894-11900, 11903, 11905-11908, 11910-11916, 11921, 11923-11938, 11941-11945, 11948-11949, 11951-11957, 11959, 11961, 11963-11970, 11973-11975, 11977-11981, 11983, 11987, 11994, 11996-11998, 12000-12001, 12003-12006, 12008, 12010-12012, 12014-12017, 12019, 12021-12022, 12025-12028, 12030, 12032-12033, 12035-12040, 12048, 12052-12055, 12057, 12059, 12061-12063, 12065, 12067, 12070-12074, 12076, 12078-12079, 12081, 12085-12087, 12089-12090, 12093-12096, 12098, 12100, 12102-12103, 12105, 12108-12117, 12119-12128, 12130, 12133-12134, 12137-12141, 12143-12153, 12155-12160, 12162, 12164, 12167-12173, 12175-12177, 12179-12181, 12183, 12185-12186, 12189-12190, 12193-12195, 12197-12199, 12201-12210, 12212-12214, 12217-12230, 12232, 12236-12238, 12240-12241, 12243-12246, 12248, 12251, 12254-12255, 12257, 12261-12265, 12267, 12270, 12273-12275, 12279-12281, 12284-12287, 12294-12300, 12302-12304, 12307-12308, 12310, 12312-12320, 12322-12325, 12327-12328, 12330-12331, 12333-12336, 12338-12344, 12346, 12348, 12352, 12354, 12358, 12362-12364, 12367-12370, 12372, 12374-12377, 12379-12384, 12386, 12388-12389, 12393, 12395-12397, 12400-12402, 12404-12406, 12409, 12414-12418, 12420-12423, 12426, 12429-12432, 12437-12447, 12449-12451, 12453, 12455, 12458, 12460-12461, 12464, 12466-12471, 12473-12474, 12476-12482, 12485-12492, 12494-12501, 12504, 12507-12508, 12510-12511, 12513-12514, 12517-12518, 12520-12525, 12529-12531, 12533-12534, 12536-12538, 12540-12543, 12545-12547, 12549, 12551-12552, 12560-12561, 12563, 12565-12570, 12572-12574, 12579-12580, 12582-12585, 12587, 12589, 12592, 12594-12599, 12601-12604, 12606, 12608-12609, 12612, 12616, 12618, 12621-12624, 12629-12631, 12634, 12636-12638, 12640-12641, 12643-12644, 12647-12655, 12658, 12661-12668, 12670-12673, 12676-12679, 12682, 12685-12687, 12689-12692, 12694, 12704-12707, 12710-12711, 12715, 12720, 12722-12726, 12733-12734, 12736-12737, 12739-12741, 12743-12751, 12758-12759, 12761-12762, 12764-12767, 12769-12770, 12774-12779, 12781-12782, 12784-12785, 12787-12790, 12792, 12794-12797, 12801-12805, 12807-12813, 12815-12817, 12819, 12821-12822, 12825, 12827-12828, 12830-12831, 12834-12835, 12837-12840, 12843-12844, 12850-12851, 12853-12855, 12858-12864, 12866-12867, 12869, 12872-12873, 12875-12876, 12878, 12881-12882, 12884-12885, 12888-12894, 12896-12897, 12899-12904, 12906-12908, 12910-12911, 12913-12917, 12920-12923, 12925-12926, 12928-12929, 12932, 12934-12935, 12940-12941, 12947, 12949, 12951, 12953, 12956, 12958-12960, 12962, 12964, 12966-12969, 12971-12977, 12979-12981, 12983-12986, 12988, 12992, 12995-12997, 12999-13000, 13002-13004, 13006, 13009-13015, 13017-13024, 13026-13028, 13030-13031, 13036-13037, 13039-13040, 13042-13043, 13049, 13051-13052, 13054-13055, 13057-13060, 13062, 13064-13072, 13075-13076, 13078-13079, 13081, 13083, 13086-13087, 13089, 13092-13107, 13109-13110, 13115-13123, 13125-13129, 13131, 13133, 13135, 13137, 13139, 13142, 13144-13145, 13149-13152, 13154, 13156-13161, 13163-13166, 13168, 13170-13171, 13173-13178, 13180-13183, 13185-13186, 13189-13194, 13198, 13201-13203, 13205-13208, 13212, 13214-13216, 13218, 13220-13222, 13225-13228, 13232-13235, 13237-13239, 13241-13242, 13244, 13249-13255, 13257-13260, 13263-13268, 13270, 13272-13276, 13278-13281, 13283, 13285-13287, 13289-13291, 13293-13295, 13298, 13300-13308, 13310-13312, 13314-13319, 13322, 13325, 13329, 13332-13335, 13339, 13341-13345, 13347-13351, 13354-13356, 13358-13359, 13362, 13365-13366, 13368-13370, 13372, 13374-13376, 13378-13384, 13386, 13388-13397, 13399-13401, 13404-13405, 13408-13410, 13412-13413, 13416, 13418-13421, 13424-13427, 13430-13431, 13434-13438, 13440-13444, 13446, 13448, 13450, 13452, 13456, 13467-13469, 13471-13477, 13479-13480, 13483-13484, 13486-13487, 13490-13491, 13493, 13495-13497, 13499-13501, 13506-13507, 13510, 13512, 13514-13515, 13517, 13519-13523, 13526-13527, 13529-13530, 13532-13534, 13540, 13542-13544, 13546, 13548-13550, 13553-13560, 13563-13564, 13566-13568, 13572, 13574-13577, 13580, 13582, 13586, 13591-13597, 13599, 13601-13604, 13606-13607, 13609-13610, 13612-13616, 13619-13620, 13622, 13624, 13629-13630, 13632-13635, 13637, 13639, 13644-13645, 13648, 13650-13651, 13653, 13655-13656, 13660-13661, 13663, 13665, 13668-13673, 13675-13683, 13686-13687, 13690, 13694-13695, 13697, 13700-13702, 13705-13720, 13722-13725, 13727-13729, 13731-13732, 13734, 13736, 13738-13745, 13748-13749, 13752, 13756-13757, 13759, 13762-13765, 13767, 13772-13773, 13776-13780, 13782, 13786-13787, 13789, 13791, 13794, 13796, 13799, 13801-13807, 13809, 13811-13813, 13815, 13821, 13823, 13825, 13827-13829, 13831-13838, 13840, 13842-13843, 13846-13848, 13850, 13852, 13855-13856, 13859, 13862-13863, 13870, 13874-13876, 13878-13880, 13882-13895, 13898-13899, 13901-13902, 13904-13907, 13910-13917, 13921, 13923-13927, 13930, 13932, 13934-13937, 13939, 13945-13950, 13954, 13958-13959, 13961-13963, 13965, 13967-13969, 13973-13978, 13985, 13994-14001, 14003, 14005-14013, 14015-14016, 14019-14030, 14032-14039, 14041-14046, 14049-14057, 14059-14060, 14062, 14064-14066, 14071-14076, 14078-14081, 14083-14086, 14088-14089, 14091-14093, 14095, 14097-14100, 14102-14107, 14109, 14111, 14114, 14118, 14121-14122, 14125, 14128, 14130-14131, 14133, 14135-14138, 14141-14142, 14144-14146, 14150, 14157, 14160-14161, 14163-14169, 14171-14172, 14175, 14177-14178, 14180, 14183, 14186-14187, 14189-14193, 14195-14198, 14200-14202, 14208-14211, 14214-14219, 14221-14224, 14227-14229, 14232-14240, 14242-14248, 14250-14255, 14257-14261, 14263, 14265, 14267-14268, 14270-14275, 14277-14282, 14284, 14288-14289, 14291-14292, 14294-14297, 14299, 14301, 14303, 14305-14307, 14309-14317, 14319, 14322-14324, 14326-14328, 14335, 14337-14338, 14340, 14344, 14346, 14348, 14350-14351, 14355-14356, 14358, 14360, 14362-14363, 14365, 14370-14371, 14374-14376, 14383, 14385-14387, 14389-14396, 14398, 14400-14404, 14406, 14409-14414, 14417-14418, 14421-14422, 14424-14425, 14427, 14429, 14431-14432, 14434-14439, 14441-14443, 14445-14446, 14448-14452, 14454-14461, 14464, 14469-14470, 14473, 14475, 14478-14481, 14484, 14486-14489, 14491, 14494-14498, 14500, 14502-14503, 14506-14507, 14509-14510, 14513-14520, 14523-14525, 14527, 14529-14530, 14533, 14535-14540, 14543-14545, 14547, 14552-14555, 14557-14558, 14561-14562, 14566-14567, 14569, 14571, 14574, 14576, 14579, 14582-14583, 14586-14590, 14592, 14595-14598, 14601-14605, 14608-14617, 14626-14632, 14637-14638, 14640, 14644-14645, 14648, 14650-14651, 14654-14655, 14657-14659, 14661-14662, 14665-14666, 14668-14669, 14671, 14673, 14676-14677, 14679-14681, 14683-14685, 14687-14694, 14696-14699, 14701, 14704-14705, 14707, 14712-14713, 14715, 14720-14722, 14724-14726, 14728-14731, 14733, 14739-14741, 14743-14746, 14748-14750, 14753-14754, 14758-14763, 14765, 14767, 14772-14773, 14777, 14779-14784, 14788-14798, 14801, 14803-14804, 14808-14811, 14813-14815, 14818-14820, 14822-14824, 14826, 14828, 14832-14838, 14841, 14843, 14845-14847, 14849, 14853, 14861-14865, 14867-14869, 14872, 14876, 14878-14883, 14885-14886, 14890-14903, 14906-14908, 14910-14911, 14913-14916, 14919-14921, 14923, 14926, 14928-14930, 14932-14935, 14937-14938, 14942-14945, 14947-14949, 14951, 14953-14959, 14961-14965, 14967-14968, 14970-14971, 14973-14974, 14976-14977, 14979-14982, 14984-14988, 14992-14994, 14996-15007, 15009, 15012-15015, 15017-15022, 15024-15030, 15032, 15034-15035, 15037-15038, 15040-15043, 15045, 15050, 15053-15057, 15061, 15064-15066, 15070-15072, 15075-15077, 15080-15085, 15088, 15090-15093, 15095-15100, 15103-15110, 15112-15118, 15120-15126, 15130-15131, 15136, 15138-15146, 15148-15150, 15153-15157, 15159-15166, 15168-15175, 15177-15178, 15180-15182, 15184, 15188-15189, 15191, 15193, 15197, 15199-15200, 15202-15206, 15210-15213, 15215, 15219-15220, 15223-15230, 15232-15233, 15235-15239, 15243, 15245, 15247, 15249-15251, 15256, 15259, 15263-15265, 15269, 15271, 15273, 15275, 15277-15280, 15283-15286, 15289-15298, 15300-15307, 15310-15312, 15314, 15317-15322, 15324, 15326-15327, 15330-15331, 15333-15335, 15338-15341, 15346, 15349-15350, 15352, 15356-15357, 15359-15360, 15364, 15366-15368, 15370-15376, 15378-15382, 15386-15392, 15394, 15396-15397, 15399-15402, 15404-15409, 15411, 15417-15421, 15423-15426, 15428-15434, 15436, 15438, 15442-15447, 15449, 15451-15452, 15454, 15456-15457, 15461-15462, 15465-15470, 15475-15479, 15481-15483, 15485, 15489-15490, 15492, 15494-15495, 15499, 15501-15506, 15508, 15511-15512, 15515-15516, 15518-15519, 15522, 15526, 15530, 15533, 15538-15540, 15542, 15545-15546, 15549-15554, 15556, 15562, 15564, 15567, 15570-15571, 15573-15577, 15579-15580, 15583-15587, 15589-15591, 15593, 15595-15600, 15604-15610, 15612-15613, 15617-15628, 15631-15638, 15640-15643, 15645-15654, 15656-15658, 15660-15661, 15664-15666, 15668, 15670, 15672-15675, 15679, 15681, 15688-15690, 15692, 15697-15699, 15701, 15704-15705, 15708-15709, 15714, 15716, 15718-15720, 15722-15723, 15725-15729, 15731, 15733, 15737-15741, 15743, 15746-15752, 15755, 15757-15758, 15762, 15764, 15766-15776, 15778-15779, 15781, 15783-15784, 15787-15792, 15794, 15797-15798, 15800, 15802-15805, 15807-15810, 15812, 15814, 15816, 15819-15822, 15824-15827, 15829-15832, 15835-15838, 15840-15842, 15844, 15847-15848, 15851-15861, 15865-15868, 15870-15873, 15877, 15879-15881, 15885, 15887-15891, 15894-15897, 15899-15900, 15902-15903, 15905-15907, 15911-15919, 15921, 15923, 15926-15928, 15930-15937, 15941-15943, 15945-15949, 15954-15955, 15957-15959, 15962, 15966-15967, 15969-15972, 15974-15978, 15982, 15986, 15990, 15992, 15994-15996, 15999-16000, 16002-16004, 16010, 16012, 16014-16015, 16017, 16023, 16027, 16030-16031, 16035-16036, 16039-16043, 16047, 16050-16058, 16060-16063, 16066-16072, 16074, 16078-16090, 16092-16100, 16102-16109, 16114-16116, 16118, 16120-16126, 16131, 16136, 16138, 16142-16148, 16153-16154, 16156-16158, 16161-16164, 16168-16170, 16174-16175, 16177-16179, 16181-16182, 16185-16187, 16190-16193, 16195, 16198-16200, 16202-16204, 16206-16209, 16211-16212, 16216-16217, 16219-16220, 16224, 16227-16229, 16233-16237, 16239, 16242, 16246, 16249, 16252-16255, 16257-16266, 16268, 16271, 16273, 16277, 16279-16282, 16284, 16286, 16288, 16292-16293, 16295-16302, 16306-16308, 16312, 16319-16320, 16322, 16324-16327, 16329, 16331, 16333, 16335-16336, 16338, 16342-16350, 16357-16358, 16360, 16362-16363, 16365-16369, 16377, 16380, 16382-16386, 16391-16393, 16396-16398, 16400-16402, 16405-16407, 16409, 16411-16413, 16416-16417, 16419-16428, 16431-16433, 16435-16441, 16444-16448, 16450, 16452, 16454, 16457-16458, 16460, 16463-16466, 16468-16470, 16472-16479, 16481-16488, 16490-16494, 16496-16498, 16501, 16503-16504, 16506-16511, 16513, 16515, 16517-16525, 16527-16532, 16534, 16536-16540, 16542, 16544-16546, 16549, 16551, 16553, 16555-16560, 16562-16563, 16565, 16569-16576, 16578-16583, 16585-16590, 16592-16595, 16597, 16599-16601, 16603, 16606-16613, 16616-16619, 16621, 16623-16624, 16626-16629, 16631, 16633, 16635, 16638-16641, 16643-16647, 16651-16654, 16657, 16659-16660, 16663, 16667-16668, 16670-16674, 16677, 16680-16682, 16692, 16700, 16702-16703, 16705-16710, 16712, 16714-16715, 16717-16718, 16724-16726, 16728-16733, 16735-16739, 16742-16745, 16748, 16750, 16754-16755, 16757-16759, 16761-16762, 16764, 16766-16767, 16769-16770, 16773-16776, 16778-16781, 16783-16784, 16786-16787, 16789-16790, 16792-16793, 16795-16797, 16801-16804, 16806, 16808-16817, 16820-16821, 16824, 16826-16829, 16835, 16838-16854, 16857-16859, 16861, 16863, 16871-16873, 16875, 16877-16878, 16881, 16883-16885, 16887-16891, 16895-16899, 16903-16906, 16910-16911, 16921-16924, 16927-16930, 16932-16933, 16937-16938, 16940, 16942-16948, 16953, 16958, 16962, 16964, 16966-16967, 16970, 16972-16977, 16980-16985, 16989-16998, 17000-17001, 17004, 17006, 17012-17014, 17016-17018, 17020-17025, 17028, 17030, 17032, 17035-17038, 17040-17045, 17049-17051, 17053-17056, 17058-17060, 17064-17075, 17079-17082, 17084-17090, 17093-17095, 17097, 17100, 17103-17105, 17109-17119, 17122-17123, 17125-17126, 17128-17129, 17131-17136, 17139-17146, 17148, 17150-17152, 17154-17161, 17163-17164, 17166, 17168-17173, 17175-17176, 17180, 17182, 17184-17194, 17197-17200, 17202-17204, 17206, 17208-17209, 17213, 17215, 17218, 17222-17233, 17235, 17237, 17240, 17242, 17244-17250, 17252-17254, 17256, 17258, 17260-17261, 17264, 17266, 17269, 17271-17272, 17274, 17276-17282, 17284, 17286-17287, 17289-17293, 17296-17306, 17308-17310, 17313-17316, 17318, 17320-17321, 17324-17327, 17329, 17331-17333, 17335-17339, 17341-17342, 17344-17345, 17347-17348, 17351-17352, 17355-17356, 17358, 17360-17361, 17364-17366, 17368-17370, 17372-17374, 17376-17377, 17380, 17382-17391, 17394-17396, 17399, 17401-17404, 17406-17407, 17409, 17411-17412, 17414-17419, 17421-17429, 17432, 17434, 17439-17440, 17444-17449, 17451-17452, 17454, 17459-17460, 17463-17468, 17470-17474, 17476-17477, 17481-17482, 17486-17488, 17490, 17492, 17495-17500, 17503, 17505-17511, 17513, 17522, 17524, 17530-17532, 17534-17535, 17538, 17540, 17542, 17545, 17551, 17553-17556, 17558, 17564-17569, 17572-17575, 17577, 17579, 17582-17587, 17589-17591, 17593-17596, 17601, 17604, 17606-17608, 17611-17613, 17615, 17618-17620, 17623, 17625-17636, 17641-17649, 17651-17653, 17655-17659, 17661-17662, 17664-17666, 17668-17669, 17671-17677, 17679-17683, 17685, 17688-17689, 17692-17693, 17696-17700, 17702-17708, 17711, 17715-17716, 17720-17725, 17727-17730, 17737, 17743-17753, 17756, 17759-17761, 17764-17771, 17775-17783, 17785, 17787-17788, 17792-17794, 17796-17799, 17801-17802, 17805-17808, 17810, 17812-17813, 17818-17819, 17824-17833, 17836, 17840-17849, 17858-17859, 17861-17863, 17869-17872, 17874, 17876-17877, 17883-17884, 17886, 17888, 17892-17896, 17901-17905, 17907-17908, 17910-17919, 17922-17923, 17929-17935, 17939, 17941-17945, 17952-17959, 17963, 17966, 17968-17973, 17977, 17980-17981, 17983-17988, 17990-17992, 17994-17996, 17998-18001, 18003-18004, 18006-18008, 18010-18012, 18020-18026, 18029-18030, 18032, 18036-18037, 18039, 18043-18045, 18048-18056, 18058, 18063, 18066-18069, 18071-18076, 18078-18083, 18085-18087, 18089, 18091, 18093, 18095, 18097-18108, 18110, 18112, 18119, 18121-18122, 18125-18126, 18128, 18130, 18132, 18134-18136, 18138-18143, 18145-18155, 18160, 18162-18172, 18174, 18176-18180, 18182-18183, 18186, 18188-18189, 18192, 18194-18195, 18197-18199, 18202-18203, 18205, 18207, 18209-18210, 18214-18217, 18219-18221, 18223-18226, 18228-18233, 18236, 18239-18244, 18246-18247, 18249, 18251-18252, 18255-18263, 18266, 18268-18269, 18271-18272, 18275, 18277-18278, 18280, 18282-18286, 18292-18297, 18301, 18303-18308, 18310-18311, 18313-18320, 18326-18335, 18337-18339, 18342-18343, 18345-18348, 18351, 18353, 18355, 18359, 18363-18364, 18367-18369, 18371-18372, 18374, 18376-18377, 18379, 18381-18387, 18390-18391, 18395, 18400, 18409-18415, 18417, 18419, 18421-18422, 18424-18427, 18430, 18435-18438, 18448, 18451-18452, 18456, 18458-18464, 18466, 18468-18469, 18472, 18474, 18476-18477, 18479, 18481-18483, 18485-18493, 18496, 18498-18501, 18506-18507, 18509-18514, 18516-18518, 18520, 18522-18523, 18525-18526, 18528-18530, 18533-18536, 18539-18548, 18550-18554, 18557, 18559-18564, 18566, 18568-18574, 18576-18580, 18583-18585, 18588, 18591, 18593-18600, 18603, 18605-18606, 18608, 18610-18611, 18613-18614, 18617-18620, 18623, 18625-18632, 18634, 18637-18645, 18647-18650, 18653-18654, 18656, 18658, 18661-18667, 18669, 18671-18672, 18674, 18676-18689, 18691, 18695-18702, 18704, 18707, 18709, 18711, 18714-18716, 18718-18719, 18723-18727, 18731-18733, 18736, 18739-18741, 18743, 18746-18747, 18750-18751, 18755-18757, 18759, 18763, 18766-18774, 18776-18777, 18780-18786, 18788, 18790, 18794, 18797, 18799, 18802-18805, 18807-18808, 18810-18812, 18814, 18816-18817, 18819-18828, 18831-18835, 18837, 18841-18846, 18848, 18850, 18852-18854, 18856-18860, 18862-18865, 18867-18868, 18870-18873, 18875, 18877-18881, 18883, 18886-18888, 18891-18892, 18894-18900, 18902-18906, 18910, 18913, 18915-18916, 18918, 18920, 18922-18926, 18929, 18931-18933, 18935-18942, 18946-18947, 18950-18952, 18954-18961, 18964-18967, 18970, 18972-18973, 18975-18982, 18984-18986, 18989-18992, 18994-19002, 19004-19010, 19012, 19014-19016, 19022, 19024-19027, 19031-19034, 19037, 19039-19040, 19043-19044, 19046-19054, 19056-19057, 19061-19076, 19078-19080, 19082-19083, 19085-19087, 19089, 19091, 19093-19094, 19096-19097, 19099-19108, 19110-19111, 19113, 19119-19121, 19123, 19126-19127, 19129-19130, 19134, 19137, 19139-19140, 19142-19147, 19151, 19153-19155, 19158, 19161, 19163, 19165, 19167-19170, 19172, 19174-19180, 19183, 19185-19186, 19188-19195, 19199-19202, 19204-19212, 19216-19218, 19220, 19226-19229, 19231-19232, 19235, 19237, 19239-19242, 19244-19246, 19248-19249, 19252-19256, 19262-19263, 19265-19266, 19269-19271, 19274, 19276-19277, 19279, 19285-19291, 19293-19294, 19298-19304, 19306, 19308-19311, 19315-19316, 19318-19319, 19321-19324, 19327-19329, 19331-19338, 19340-19349, 19353, 19356, 19358-19362, 19364-19366, 19369-19371, 19373-19377, 19380-19381, 19383-19389, 19391, 19394-19411, 19414-19415, 19417-19425, 19427, 19429-19430, 19432-19446, 19448-19451, 19453-19463, 19465-19469, 19471-19474, 19477, 19481-19483, 19485, 19488-19492, 19494-19495, 19497-19502, 19505, 19511-19516, 19518-19519, 19521-19522, 19525-19527, 19529, 19531, 19533, 19535-19536, 19540, 19542-19544, 19548-19553, 19556, 19559-19560, 19564-19565, 19569-19572, 19574-19585, 19587, 19589-19592, 19596, 19599-19601, 19604, 19606, 19609-19619, 19621, 19623, 19626, 19628-19630, 19632-19636, 19643-19646, 19648-19650, 19654-19655, 19657-19658, 19660-19666, 19668-19670, 19674, 19676, 19678, 19681-19698, 19700, 19704-19710, 19712-19713, 19717-19728, 19730-19732, 19735-19740, 19742-19744, 19746-19747, 19749-19750, 19752, 19754-19760, 19762-19764, 19767, 19771, 19777, 19779-19780, 19782, 19784, 19786-19787, 19789-19798, 19800-19804, 19813-19819, 19821-19832, 19834, 19836-19844, 19847-19860, 19862, 19865-19873, 19875, 19877-19882, 19888-19890, 19892-19893, 19898-19899, 19901, 19904-19906, 19908-19910, 19912-19914, 19916-19920, 19922, 19924, 19927-19929, 19932, 19934-19937, 19939-19941, 19944-19945, 19947-19950, 19952, 19954, 19956, 19960-19965, 19968, 19970, 19978, 19987-19988, 19990, 19995-19999, 20005, 20007, 20011-20012, 20014-20016, 20018-20022, 20024-20026, 20029-20041, 20043, 20045-20046, 20048-20052, 20054-20055, 20057-20058, 20061-20062, 20064, 20067-20070, 20072, 20075-20078, 20081-20082, 20086, 20091, 20094, 20096-20097, 20099-20105, 20107-20108, 20110-20114, 20117-20119, 20121-20136, 20138-20142, 20144, 20149-20151, 20153-20155, 20157-20164, 20166-20177, 20180, 20182-20188, 20190, 20192, 20196, 20199, 20201-20203, 20205, 20208-20210, 20214-20215, 20218-20221, 20224-20226, 20228-20232, 20234, 20236-20237, 20239, 20241-20244, 20246-20248, 20250-20253, 20255-20262, 20265-20271, 20275-20276, 20282, 20285-20286, 20289-20290, 20292-20293, 20296-20302, 20305, 20307-20319, 20321-20324, 20326-20329, 20332-20334, 20338-20341, 20344-20347, 20350-20354, 20357-20363, 20366, 20368, 20370, 20375-20384, 20388, 20390, 20393-20394, 20396-20397, 20399-20407, 20410-20412, 20414-20421, 20423-20427, 20429-20431, 20434, 20437, 20439-20441, 20444, 20447-20448, 20451-20453, 20455-20459, 20461, 20463-20465, 20468, 20470, 20472-20473, 20475-20477, 20480-20485, 20488, 20490-20492, 20495, 20497-20499, 20501-20502, 20504-20515, 20521-20523, 20525-20526, 20529-20530, 20532-20534, 20537-20538, 20541, 20548-20549, 20551-20553, 20555-20556, 20558-20559, 20562-20576, 20578-20585, 20587-20588, 20590, 20592, 20594, 20597-20601, 20603-20604, 20606-20608, 20610-20611, 20613-20614, 20616-20618, 20623, 20626-20628, 20630-20631, 20633, 20635, 20637-20639, 20641, 20645, 20647, 20649-20652, 20654, 20657-20658, 20660-20661, 20665, 20670-20671, 20673, 20676-20685, 20689, 20691-20697, 20700-20707, 20709-20714, 20716-20717, 20723-20724, 20726-20727, 20729-20743, 20745-20747, 20749-20753, 20757-20759, 20762-20766, 20768-20770, 20772-20779, 20782-20783, 20785-20786, 20789, 20797-20799, 20801-20805, 20807-20809, 20811, 20816-20817, 20820-20822, 20824, 20826-20833, 20835, 20838-20842, 20844-20845, 20849-20853, 20855-20856, 20859, 20862, 20865-20867, 20874, 20877-20880, 20883, 20888, 20890-20899, 20901-20903, 20905-20907, 20910, 20913-20923, 20926-20927, 20930-20932, 20934-20935, 20938-20939, 20941-20944, 20947-20950, 20952, 20954-20962, 20965-20967, 20969, 20971, 20974-20975, 20978-20979, 20981-20984, 20987, 20989-20991, 20993, 20995-20997, 21001-21004, 21007-21010, 21012, 21014-21020, 21022-21023, 21026, 21028, 21030-21034, 21036, 21038-21040, 21042-21043, 21046-21047, 21051-21053, 21055, 21057-21061, 21063, 21066, 21069-21076, 21078-21096, 21098-21102, 21104, 21106-21109, 21112, 21114-21115, 21118-21123, 21130-21136, 21138-21140, 21142-21145, 21147-21149, 21151-21155, 21157-21161, 21163, 21167-21174, 21176-21177, 21180, 21182-21183, 21188, 21190-21194, 21196, 21198-21199, 21201, 21204-21205, 21208, 21210, 21212, 21214-21218, 21225, 21227, 21231-21234, 21236, 21238-21244, 21246-21251, 21253, 21255-21258, 21260-21264, 21266, 21271-21283, 21286, 21289, 21291, 21293, 21295, 21302-21303, 21311-21314, 21316-21319, 21321-21322, 21328-21331, 21333, 21335, 21339, 21342, 21344, 21348, 21351, 21353-21354, 21357-21360, 21362-21363, 21365-21369, 21373-21378, 21383-21388, 21390-21394, 21396-21401, 21408, 21413, 21415, 21417-21418, 21422, 21424, 21427, 21433-21439, 21441, 21445, 21447, 21452-21453, 21455-21456, 21458-21459, 21462, 21464-21468, 21471-21472, 21474-21475, 21477, 21480-21482, 21487-21489, 21491-21493, 21495, 21497, 21499-21501, 21503-21504, 21506-21508, 21510-21511, 21513, 21515-21516, 21518-21530, 21537, 21539-21540, 21543, 21546-21548, 21550-21552, 21554, 21559-21560, 21566-21568, 21570, 21572-21583, 21589, 21592, 21599-21604, 21606-21609, 21611-21612, 21615, 21617-21618, 21621, 21624, 21629, 21634-21636, 21639, 21641, 21644-21647, 21654, 21656, 21658-21662, 21668, 21670-21679, 21684-21689, 21691, 21695-21696, 21699, 21703-21705, 21708-21716, 21718-21724, 21726, 21729-21732, 21734-21735, 21737, 21739, 21741-21742, 21744-21746, 21748-21749, 21751, 21755, 21757-21760, 21762, 21764-21765, 21769, 21771-21780, 21784-21792, 21794-21796, 21798-21800, 21803-21806, 21808-21810, 21812-21814, 21817, 21819, 21821-21823, 21830, 21832-21834, 21837, 21840-21841, 21846-21847, 21849, 21851-21852, 21854, 21856, 21858, 21860, 21863, 21866, 21869-21870, 21872-21873, 21877-21880, 21882, 21884, 21888, 21890-21891, 21894-21895, 21898, 21902-21905, 21907, 21909-21911, 21913-21915, 21918, 21920-21921, 21924, 21927-21929, 21933-21934, 21937, 21943, 21945, 21948, 21951, 21953-21954, 21956-21964, 21967-21968, 21970-21971, 21975-21976, 21979, 21981-21986, 21988-21992, 21996-21999, 22001-22002, 22009, 22012-22013, 22016, 22019-22020, 22023-22027, 22030, 22033, 22036, 22038-22044, 22046, 22049-22050, 22053-22054, 22058-22064, 22067, 22069-22072, 22074-22078, 22081, 22083-22089, 22091, 22094-22097, 22099-22103, 22107-22108, 22111, 22113-22116, 22118, 22120, 22123-22127, 22129, 22131-22133, 22135-22136, 22138-22141, 22143-22144, 22146, 22150-22153, 22155, 22157-22164, 22170-22172, 22174-22176, 22178-22181, 22183-22184, 22186-22187, 22189, 22191-22193, 22195-22197, 22199-22202, 22204-22206, 22210, 22212, 22218-22223, 22225-22226, 22229-22230, 22234, 22237, 22239-22241, 22243, 22245-22246, 22248, 22251-22253, 22255-22264, 22267-22279, 22281-22284, 22286, 22292, 22294, 22296, 22298-22302, 22304-22306, 22309, 22315, 22318, 22320-22327, 22330-22332, 22336, 22339-22340, 22343, 22346-22347, 22350, 22354, 22356, 22358, 22360, 22362, 22364, 22367-22368, 22372-22374, 22376, 22380-22381, 22384-22389, 22393-22397, 22399, 22404, 22408-22409, 22411-22412, 22414-22415, 22417-22419, 22422-22424, 22426-22429, 22432-22433, 22435, 22437, 22439-22442, 22445-22446, 22448-22450, 22453, 22455, 22458-22462, 22467, 22472-22480, 22482, 22484, 22486, 22488, 22492-22493, 22496, 22499, 22501-22508, 22511-22513, 22516-22517, 22519, 22522-22526, 22528-22534, 22537-22539, 22542-22543, 22546-22549, 22551-22558, 22564-22570, 22572, 22575-22584, 22587, 22589-22595, 22598-22602, 22604-22610, 22613, 22615, 22617, 22621-22622, 22624-22629, 22631-22632, 22634-22636, 22638-22639, 22647-22654, 22661-22667, 22670, 22673-22674, 22677-22682, 22685-22689, 22691, 22694, 22696, 22698, 22701, 22703, 22705, 22707, 22710-22715, 22717-22727, 22729-22731, 22736, 22738-22739, 22743-22747, 22750, 22755, 22757, 22761, 22764, 22766-22767, 22770-22777, 22779, 22782-22783, 22786-22787, 22790-22794, 22796-22797, 22799-22808, 22810, 22812-22813, 22815-22819, 22821-22823, 22826, 22828-22830, 22834, 22836-22837, 22839, 22841, 22846-22848, 22850-22851, 22853-22856, 22858-22859, 22864, 22866-22867, 22872, 22874-22876, 22880-22882, 22885-22887, 22890-22900, 22903-22907, 22910-22911, 22914, 22916-22917, 22919, 22921-22922, 22924-22928, 22930-22931, 22933-22948, 22952, 22954-22959, 22961, 22963, 22965, 22970-22973, 22975-22976, 22978, 22982, 22984-22992, 22994-22997, 23000, 23002-23004, 23006, 23012-23017, 23019, 23021-23022, 23025-23030, 23032-23033, 23035-23037, 23039, 23041-23042, 23044-23045, 23049-23052, 23055, 23057, 23059-23060, 23062-23065, 23067, 23069-23078, 23081-23088, 23091-23097, 23104, 23107-23109, 23113-23117, 23120, 23122-23125, 23127-23128, 23131, 23133-23142, 23145-23153, 23155, 23159, 23161, 23164-23168, 23170-23176, 23179-23195, 23198, 23200-23203, 23207, 23209, 23211, 23215-23218, 23220-23222, 23224-23230, 23232, 23234-23238, 23240-23242, 23246-23247, 23252-23257, 23259-23263, 23265-23269, 23272-23273, 23275-23276, 23278, 23281-23288, 23290-23291, 23294-23295, 23298-23299, 23301-23303, 23305-23307, 23309-23311, 23313, 23316-23317, 23319, 23322, 23324, 23328-23330, 23332-23333, 23335, 23337, 23339, 23343-23345, 23349-23350, 23352, 23354, 23356, 23358, 23361-23362, 23364-23374, 23376-23379, 23381-23388, 23391, 23393-23405, 23408, 23410, 23412-23414, 23418, 23420, 23424-23430, 23432-23441, 23446-23454, 23456, 23460-23464, 23467-23469, 23471-23480, 23484-23485, 23487-23488, 23492-23495, 23497-23500, 23502-23503, 23506, 23508-23512, 23515-23521, 23524-23525, 23527-23529, 23532-23534, 23537, 23540-23544, 23547-23548, 23551-23552, 23556, 23559-23563, 23566, 23569-23571, 23580-23582, 23585, 23588-23590, 23592-23595, 23597-23599, 23601, 23603-23607, 23609-23623, 23626-23629, 23631-23632, 23634-23636, 23640, 23642-23643, 23645-23647, 23649-23656, 23660-23662, 23664-23674, 23676-23677, 23680-23684, 23686-23688, 23691, 23693, 23696-23698, 23702-23711, 23713, 23715-23716, 23718, 23721-23737, 23739-23742, 23744, 23748, 23750, 23752-23754, 23756-23759, 23761-23763, 23768-23770, 23772-23774, 23776-23780, 23782-23787, 23790, 23792-23794, 23797, 23799-23801, 23803-23807, 23809-23811, 23813-23816, 23818-23823, 23825-23826, 23828-23831, 23833, 23835-23837, 23840-23841, 23845-23846, 23849-23850, 23853, 23855-23857, 23859-23862, 23864-23871, 23873-23884, 23887, 23889, 23892-23895, 23897, 23899-23907, 23909-23912, 23914, 23918-23927, 23933, 23936-23937, 23939-23944, 23947, 23949, 23953, 23958-23960, 23963, 23970-23971, 23973-23983, 23986-23989, 23991, 23993-23997, 23999-24000, 24003-24006, 24011, 24020-24021, 24023, 24025-24028, 24030-24033, 24035, 24040-24042, 24044-24046, 24048, 24050, 24052, 24054-24057, 24062, 24065, 24067, 24070, 24076-24082, 24084, 24091-24092, 24097-24101, 24104, 24106-24107, 24109-24110, 24112-24119, 24121, 24125, 24127-24128, 24130-24131, 24134, 24137-24138, 24143-24149, 24151-24159, 24161, 24164-24165, 24168, 24170-24171, 24174-24175, 24177, 24179-24186, 24189-24190, 24192-24196, 24198-24201, 24206, 24209, 24213, 24215, 24217, 24219-24220, 24223-24225, 24227-24231, 24233, 24235, 24237, 24239-24241, 24243-24246, 24248, 24250-24251, 24254-24255, 24257-24259, 24261-24266, 24269-24270, 24273, 24275-24276, 24278-24283, 24285-24289, 24291-24292, 24294-24300, 24303-24306, 24310-24313, 24316-24322, 24324-24329, 24331, 24333, 24335, 24337-24343, 24345, 24349-24356, 24361-24362, 24364-24368, 24370-24380, 24382-24391, 24393-24394, 24396-24397, 24400, 24402-24406, 24409, 24411, 24414, 24416-24417, 24419-24420, 24423, 24425, 24427, 24429-24430, 24432-24433, 24437-24438, 24440, 24443-24445, 24447, 24449-24451, 24457, 24460-24464, 24468-24469, 24472, 24474-24475, 24478, 24480, 24483-24484, 24486, 24488-24489, 24493-24496, 24498, 24500, 24503-24505, 24507-24508, 24510-24512, 24514, 24518-24520, 24522, 24524-24525, 24529-24532, 24534, 24536-24539, 24542-24551, 24553, 24555, 24558, 24561-24562, 24564, 24566-24567, 24570, 24574-24575, 24578-24580, 24582-24583, 24585-24587, 24590-24591, 24596-24602, 24605-24607, 24609-24610, 24612, 24615-24619, 24621-24628, 24630, 24632-24633, 24636-24641, 24643-24645, 24647, 24653-24657, 24659-24660, 24664, 24666-24668, 24670-24671, 24673, 24678-24679, 24681-24684, 24686, 24688, 24690-24697, 24702, 24704-24709, 24711-24713, 24715-24726, 24728-24730, 24732-24736, 24738-24739, 24743, 24745-24747, 24755, 24760, 24765-24768, 24772, 24775-24776, 24778, 24780-24783, 24785, 24789, 24791-24798, 24801-24805, 24808-24811, 24813, 24816, 24820-24821, 24823, 24826-24828, 24830-24831, 24833-24834, 24836-24837, 24839-24840, 24842-24844, 24846-24853, 24857-24859, 24862-24865, 24867, 24869-24873, 24877-24879, 24881-24884, 24886-24888, 24890-24891, 24893, 24898-24900, 24903, 24905-24906, 24908-24911, 24913-24914, 24917, 24919, 24922-24923, 24925-24928, 24930-24934, 24936-24938, 24940, 24942, 24944, 24946-24951, 24953-24955, 24957-24960, 24962, 24966-24967, 24969-24970, 24972-24975, 24977-24978, 24980-24985, 24987, 24989-24994, 24996-24997, 24999-25003, 25005, 25007, 25009-25013, 25015, 25017, 25019, 25021-25024, 25027, 25039, 25042-25047, 25050, 25052-25054, 25056-25057, 25059-25069, 25071, 25073-25078, 25080-25082, 25085-25098, 25100-25102, 25105-25107, 25111, 25113-25119, 25122-25125, 25131-25132, 25136-25137, 25139-25143, 25145-25146, 25148-25154, 25156-25157, 25159-25162, 25164-25169, 25172-25173, 25178-25182, 25184, 25186-25188, 25190, 25192-25193, 25196-25198, 25202, 25205-25207, 25209, 25212, 25214-25218, 25221, 25223, 25225, 25227-25228, 25230-25232, 25237-25240, 25242, 25247, 25249-25254, 25257, 25259, 25261-25269, 25271-25272, 25274-25280, 25282-25283, 25285, 25287, 25289-25290, 25292, 25298-25299, 25301, 25303, 25308, 25310-25321, 25324, 25327-25328, 25330-25331, 25333-25338, 25340-25341, 25343, 25345-25346, 25349-25355, 25357-25359, 25361-25364, 25366, 25368-25369, 25372-25375, 25377-25379, 25381, 25389, 25395-25400, 25402, 25404, 25406-25407, 25411, 25419, 25423, 25425-25426, 25428-25430, 25436, 25439-25443, 25446, 25449, 25451-25452, 25455-25456, 25458, 25461-25462, 25469, 25471-25472, 25474, 25476, 25478-25488, 25490-25493, 25496-25499, 25501-25502, 25504, 25506-25513, 25516, 25518-25519, 25521-25523, 25525-25526, 25528, 25531-25532, 25535, 25537, 25539-25542, 25545-25559, 25561-25563, 25565-25567, 25569, 25572-25574, 25576-25578, 25580, 25587, 25593, 25596-25597, 25599, 25604, 25606-25607, 25610, 25612-25615, 25618-25619, 25623, 25626, 25630, 25633, 25635, 25638, 25640, 25645-25655, 25657-25658, 25660, 25662-25672, 25675-25683, 25685, 25687, 25690-25693, 25699-25703, 25706, 25709-25711, 25713, 25715-25716, 25718-25720, 25724, 25730-25735, 25739-25741, 25744-25748, 25751, 25753, 25756, 25758-25759, 25761-25765, 25767-25768, 25773, 25775-25781, 25784-25786, 25788-25789, 25791, 25794-25796, 25799, 25802-25803, 25808, 25813-25814, 25816, 25819, 25823-25830, 25832, 25834, 25836, 25838, 25841, 25844-25845, 25848-25849, 25852-25855, 25857-25858, 25861-25863, 25865-25879, 25884, 25887-25889, 25891-25892, 25894-25905, 25908, 25911-25913, 25915-25917, 25920, 25925, 25927, 25929-25930, 25932, 25936, 25939-25940, 25944, 25947-25956, 25958, 25960-25963, 25966-25973, 25975-25978, 25982-25988, 25990-25991, 25995, 25998, 26000-26006, 26008, 26010, 26012-26014, 26016, 26018-26020, 26022-26024, 26027-26033, 26035-26036, 26038-26043, 26046, 26048-26049, 26052, 26054, 26056-26057, 26062-26063, 26065-26067, 26069-26073, 26075-26076, 26078-26082, 26084-26085, 26087, 26092-26094, 26096, 26101, 26108-26109, 26111-26114, 26116-26117, 26119, 26124, 26131-26133, 26135, 26137, 26141-26143, 26145-26152, 26154, 26156-26158, 26160, 26163-26177, 26179-26180, 26184, 26187, 26189-26190, 26193, 26196, 26198-26199, 26201-26202, 26204-26205, 26207, 26209, 26211-26214, 26217-26218, 26220, 26222-26228, 26230, 26233, 26235, 26238, 26240-26250, 26252-26253, 26257-26260, 26268, 26272, 26276, 26278, 26280, 26282, 26284, 26288-26289, 26293, 26297-26298, 26301-26305, 26307-26308, 26310-26311, 26313, 26315-26316, 26318, 26320-26322, 26324, 26326-26328, 26330-26331, 26333, 26336, 26338, 26340-26343, 26346, 26349, 26351-26359, 26361, 26363, 26372, 26375-26379, 26381-26383, 26385-26386, 26390, 26392, 26396-26400, 26402-26403, 26406-26407, 26412-26413, 26415, 26417-26419, 26421, 26423-26429, 26431-26432, 26434, 26442, 26444, 26446-26447, 26451, 26454-26455, 26457, 26462, 26464, 26468, 26470, 26473-26474, 26476-26477, 26480-26483, 26485-26486, 26488-26492, 26494, 26496-26497, 26499, 26501, 26503-26507, 26511-26512, 26514-26516, 26522, 26524-26527, 26532, 26534, 26536, 26543, 26545-26546, 26548-26554, 26556, 26558-26565, 26567-26568, 26570-26573, 26576-26578, 26580-26581, 26583-26584, 26586-26594, 26596-26599, 26601-26609, 26611-26616, 26622, 26629, 26631, 26633-26635, 26638-26641, 26643, 26646-26647, 26650-26653, 26656-26658, 26662-26663, 26665-26670, 26672-26675, 26677, 26679, 26683-26684, 26688, 26692-26704, 26707, 26709-26713, 26717-26719, 26723, 26725-26728, 26730-26733, 26737-26738, 26740-26741, 26743-26744, 26746, 26748-26749, 26753-26755, 26757-26758, 26760, 26762-26763, 26765, 26767, 26769-26771, 26773-26777, 26780, 26782, 26785-26786, 26788-26789, 26791-26795, 26797-26798, 26802, 26804-26805, 26807-26808, 26810-26812, 26814-26815, 26818, 26820, 26822, 26824, 26826-26828, 26832, 26835, 26837-26838, 26840, 26842, 26844, 26846, 26848, 26850, 26853, 26855-26856, 26858-26859, 26861, 26863, 26871, 26875-26878, 26880-26884, 26887, 26889-26891, 26895-26896, 26898-26900, 26904-26905, 26907, 26910-26913, 26915-26916, 26918-26923, 26926-26928, 26938-26940, 26943, 26947, 26951, 26953, 26958, 26960, 26965, 26967-26968, 26970, 26972-26973, 26975, 26979, 26981, 26983-26984, 26986-26987, 26990-26994, 26996, 26998-27000, 27002-27010, 27013-27014, 27016, 27018-27025, 27028-27029, 27033, 27035-27036, 27038, 27040, 27042-27045, 27047, 27049-27055, 27057-27058, 27065, 27068-27069, 27071, 27073, 27075-27076, 27078, 27081-27085, 27090-27091, 27093-27097, 27100-27101, 27103-27104, 27106-27107, 27109, 27112-27113, 27116-27120, 27123-27124, 27126-27135, 27137-27138, 27143-27144, 27146-27147, 27150-27151, 27153, 27156-27157, 27164-27179, 27182, 27184-27185, 27189, 27191-27194, 27196, 27199-27200, 27202-27203, 27205-27212, 27214-27215, 27218, 27221-27223, 27225, 27233-27234, 27237, 27239-27243, 27246-27247, 27251-27254, 27256-27264, 27266-27269, 27271-27275, 27277, 27279, 27282-27284, 27286, 27288-27289, 27291, 27293, 27296, 27308, 27310, 27312, 27314-27322, 27325, 27329, 27331-27333, 27336, 27338-27345, 27347-27348, 27350-27352, 27355, 27357-27360, 27362-27363, 27365-27367, 27372, 27379, 27387-27391, 27395, 27397-27410, 27414-27415, 27417-27419, 27422-27426, 27428, 27430, 27433-27439, 27443-27445, 27447-27448, 27451, 27453, 27455-27461, 27463-27472, 27474, 27476, 27478-27480, 27482-27483, 27485, 27487-27490, 27492, 27494-27497, 27503-27504, 27506-27508, 27510, 27512-27513, 27516, 27518-27521, 27526-27528, 27530-27532, 27534-27535, 27537-27539, 27541-27544, 27546, 27548-27550, 27552-27554, 27558-27561, 27563-27564, 27566-27568, 27570-27574, 27576-27585, 27588-27589, 27593-27596, 27599, 27605-27610, 27612-27615, 27618, 27620-27625, 27627, 27631-27639, 27641-27644, 27646-27647, 27650-27653, 27655, 27660-27665, 27667-27668, 27671-27676, 27678-27680, 27683-27685, 27687-27688, 27690-27691, 27693, 27696-27701, 27703-27705, 27707-27711, 27713-27715, 27717-27718, 27720-27725, 27728-27729, 27735-27736, 27740, 27742-27747, 27749, 27751-27754, 27758, 27760-27763, 27765-27767, 27770-27774, 27777-27778, 27781, 27786-27790, 27792-27793, 27795-27800, 27802-27803, 27805-27812, 27814-27817, 27820-27821, 27823, 27825, 27827, 27829-27830, 27832-27833, 27835, 27838-27840, 27846, 27848, 27850-27855, 27859-27861, 27863-27876, 27878, 27880, 27882, 27884, 27886, 27888, 27891, 27893-27894, 27896, 27898-27907, 27910-27912, 27914-27919, 27922-27923, 27925-27928, 27931-27936, 27939-27940, 27942-27944, 27947, 27949-27958, 27960-27961, 27963, 27967-27971, 27973-27975, 27977, 27981, 27983, 27991, 27998, 28002-28004, 28006-28010, 28012-28015, 28017, 28020-28021, 28025-28027, 28029, 28034-28038, 28040-28041, 28044, 28048, 28052, 28057-28058, 28064, 28066, 28069-28073, 28075, 28077-28079, 28081-28083, 28085-28086, 28088-28091, 28093-28095, 28097, 28099-28100, 28102, 28105, 28107-28108, 28110-28113, 28116-28119, 28122-28123, 28126, 28130-28132, 28134-28141, 28143-28144, 28149-28153, 28156-28158, 28160, 28163-28178, 28180, 28182-28184, 28186-28188, 28190, 28192, 28196-28199, 28201-28202, 28204, 28206-28208, 28210-28211, 28213, 28217-28218, 28220, 28222, 28224-28227, 28229-28230, 28232-28233, 28235, 28239, 28247, 28249, 28252-28253, 28256-28259, 28261-28263, 28265-28267, 28269-28273, 28277-28278, 28280, 28282-28284, 28286, 28288-28291, 28293-28297, 28300, 28302, 28304-28309, 28311-28313, 28315, 28319, 28321, 28323-28324, 28326-28328, 28331-28332, 28334-28335, 28338-28339, 28342, 28345, 28348-28351, 28357-28358, 28362-28365, 28367-28369, 28371, 28373-28376, 28378-28379, 28382-28383, 28385, 28387-28392, 28394-28396, 28398-28404, 28406, 28408-28410, 28413-28415, 28418, 28420-28422, 28425-28431, 28433-28434, 28436, 28439-28440, 28442, 28444, 28446-28448, 28451-28455, 28457-28464, 28468-28469, 28474, 28478, 28481-28482, 28485-28487, 28489, 28491, 28495-28499, 28501-28505, 28507, 28512, 28514-28518, 28523, 28525, 28527-28529, 28531, 28534, 28536-28540, 28544, 28546-28549, 28551-28552, 28557, 28559-28562, 28564-28567, 28569, 28571-28575, 28579-28581, 28587-28588, 28590, 28593-28595, 28598-28599, 28601-28605, 28607-28608, 28611-28616, 28618-28621, 28623, 28626, 28629-28630, 28632-28633, 28637, 28639-28643, 28645-28647, 28649, 28652, 28655, 28657-28663, 28668-28669, 28671-28681, 28683-28689, 28691-28698, 28700-28713, 28715, 28717-28718, 28727-28728, 28730, 28732, 28734, 28737-28740, 28743-28747, 28750, 28752, 28755-28760, 28763-28769, 28771, 28773-28779, 28781-28788, 28790, 28792-28796, 28799-28800, 28808, 28811-28812, 28815, 28817, 28819, 28821, 28825-28828, 28832, 28838-28845, 28847-28850, 28854, 28856, 28858, 28867, 28869-28873, 28875, 28881-28885, 28887-28892, 28894, 28899-28906, 28908-28909, 28911-28920, 28923, 28926, 28929-28930, 28932, 28934-28936, 28940, 28943-28944, 28946, 28949-28951, 28954, 28957-28959, 28961, 28963, 28965, 28970, 28972-28981, 28984-28988, 28990, 28993-28994, 28996, 28998-28999, 29004-29005, 29009-29010, 29013-29021, 29023, 29025-29028, 29032-29033, 29035-29036, 29038-29041, 29044, 29046-29055, 29057-29058, 29062, 29064-29066, 29068-29073, 29075-29084, 29087, 29089-29094, 29097-29098, 29100, 29103, 29106, 29108, 29110-29114, 29117-29118, 29120-29121, 29124, 29127, 29129-29130, 29132-29133, 29137, 29139-29140, 29142-29143, 29145-29150, 29152-29158, 29161, 29163-29168, 29170-29179, 29182, 29185, 29188-29189, 29193, 29195-29196, 29199-29200, 29202-29212, 29214-29215, 29217-29218, 29220-29222, 29224-29229, 29231, 29235, 29241, 29247-29248, 29250, 29252-29259, 29261, 29265, 29268-29273, 29275-29281, 29283-29284, 29286-29287, 29289-29297, 29299, 29302-29304, 29306-29309, 29311-29313, 29315-29320, 29322-29324, 29326, 29328-29331, 29333-29338, 29340-29342, 29345, 29347-29364, 29371, 29373-29376, 29379-29380, 29384-29386, 29391-29397, 29399, 29402-29406, 29408, 29410-29413, 29417, 29419-29422, 29425-29431, 29437, 29440-29441, 29444, 29446, 29449-29451, 29453-29454, 29456, 29458-29461, 29464, 29466-29476, 29478, 29480-29483, 29485, 29487-29496, 29498-29500, 29502-29504, 29506, 29508, 29510-29511, 29513, 29516-29522, 29526, 29528, 29530-29532, 29536, 29538-29539, 29541-29542, 29547, 29549-29552, 29555, 29557-29566, 29569-29577, 29579-29584, 29586-29592, 29597-29598, 29601-29602, 29604, 29606-29608, 29610-29612, 29614-29618, 29620, 29622-29623, 29625, 29628-29633, 29635-29636, 29638-29640, 29646, 29649-29650, 29655-29656, 29661, 29663-29670, 29675-29676, 29679, 29681-29685, 29689, 29696, 29699-29701, 29703-29705, 29707-29709, 29711-29713, 29715-29719, 29721-29722, 29724-29728, 29735-29747, 29749-29753, 29755-29756, 29760-29761, 29763, 29769, 29771, 29776-29785, 29789, 29791, 29793, 29800, 29802-29803, 29808-29810, 29812-29813, 29816, 29818-29821, 29823, 29825-29827, 29830-29831, 29833-29843, 29846, 29848-29854, 29856, 29858-29859, 29861-29866, 29869-29870, 29876, 29879, 29881, 29884, 29886-29891, 29893, 29896-29897, 29899-29908, 29910, 29912-29913, 29916-29918, 29922, 29924-29939, 29941, 29943-29945, 29947-29950, 29952-29953, 29955-29956, 29958, 29960-29961, 29963, 29965-29968, 29972-29973, 29975-29976, 29978-29983, 29986-29990, 29993, 29995, 29997-30000, 30002, 30005-30006, 30011, 30013-30016, 30020, 30022-30024, 30028, 30037, 30039-30041, 30046-30055, 30057, 30059-30062, 30071, 30073, 30078, 30080, 30083-30084, 30087, 30089, 30093-30094, 30096, 30098, 30101-30103, 30105, 62210, 62213, 62216, 62218-62219, 62221-62223

### Single Strand Oligonucleotides (Sense Strand of Target Gene BDNF)

[0212] SegID range: 30003-62209

### SegIDs w/o G Runs:

[0213] 30013-30020, 30025-30033, 30039-30067, 30074-30433, 30447-30469, 30491-30555, 30569-30591, 30605-30678, 30688-30906, 30922-31097, 31111-31168, 31182-31331, 31345-31392, 31406-31527, 31543-31718, 31732-31879, 31893-32056, 32070-32497, 32511-33009, 33024-33121, 33135-33939, 33953-34029, 34044-34326, 34340-34657, 34671-35030, 35045-35107, 35111-35348, 35362-35370, 35384-35432, 35446-35767, 35781-35811, 35826-36244, 36259-36875, 36889-37145, 37159-37172, 37187-37197, 37211-37222, 37237-37255, 37269-37288, 37302-37644, 37658-37827, 37841-37901, 37915-37960, 37974-38022, 38036-38058, 38073-38145, 38159-38163, 38175-38240, 38253-38353, 38367-38763, 38773-38811, 38825-38887, 38898, 38912-38954, 38969-38986, 39000-39084, 39098-39177, 39193-39425, 39439-39486, 39501-39551, 39574-39584, 39599-39663, 39677-39690, 39704-39717, 39732-39839, 39853-39868, 39883-40073, 40095-40205, 40219-40270, 40284-40397, 40422-40519, 40534-40687, 40711-40775, 40796, 40810-40956, 40970-41642, 41656-41660, 41674-41675, 41689-41730, 41744-41782, 41796-41894, 41913-42057, 42071-42147, 42161-42176, 42190, 42204-42234, 42250-42320, 42334-42354, 42368-42369, 42383-42415, 42429-42784, 42808-42849, 42864-43023, 43037-43058, 43072-43143, 43158-43479, 43493-43531, 43545-44409, 44423-44817, 44831-44892, 44906-45185, 45199-45281, 45295-45317, 45331-45352, 45371-45395, 45409-45480, 45489-45544, 45551-45895, 45909-46075, 46089-46145, 46159-46176, 46190, 46205-46207, 46221-46238, 46257-46270, 46291-46299, 46313-46417, 46431-46493, 46514-46559, 46573-46616, 46636-46697, 46712-46754, 46768-46782, 46796-46800, 46815-46865, 46879-46934, 46948-46980, 46994-47090, 47105-47447, 47461-47538, 47552-47591, 47606-47801, 47815-47819, 47833-47878, 47894-48512, 48526-48582, 48596-48649, 48664-48836, 48850-49135, 49149-49762, 49776-49824, 49838-49879, 49906-49995, 50009-50260, 50274-50356, 50370-50382, 50396-50801, 50815-51308, 51322-51577, 51592-51613, 51632-52026, 52040-52111, 52125-52144, 52158-52261, 52275-52462, 52476-52477, 52515-52623, 52638-52650, 52677-52710, 52725-52816, 52859-52878, 52892-52921, 52935-52958, 52986-53019, 53034-53058, 53079-53096, 53110-53141, 53156-53161, 53175-53264, 53278-53300, 53324-53333, 53347-53351, 53400-53407, 53422-53441, 53455-53571, 53585-53597, 53622-53634, 53649-53660, 53674-53699, 53714-53732, 53747-53760, 53775-53803, 53833-53908, 53928-53929, 53943-54010, 54026-54316, 54330-54383, 54406-54532, 54546-54555, 54572-54595, 54621, 54635-54760, 54774-54842, 54856-55244, 55258-55289, 55303-55417, 55432-56304, 56318-56327, 56342-56714, 56730-56771, 56786-57271, 57302-57523, 57537-57592, 57615-57619, 57633-57950, 57963-58064, 58080-58093, 58108-58111, 58125-58148, 58176-58201, 58216-58281, 58313-58321, 58335-58395, 58409-58468, 58482-58662, 58676-58689, 58704-58735, 58749-58767, 58798-58830, 58844-58858, 58876-58880, 58955-59196, 59210-59326, 59353, 59367-59455, 59480-59637, 59664-59743, 59767-59769, 59784-59788, 59804-60924, 60938-60950, 60964-60993, 61007-61060, 61075-61088, 61102-61137, 61168-61220, 61247-61292, 61306-61354, 61368-61392, 61423-61432, 61446-61609, 61623-61689, 61724-61725, 61739-61779, 61795-61797, 61847-61850, 61866-61914, 61928-62029, 62068-62070, 62094-62100, 62114-62145, 62159-62209

### SeqIDs w/o miR Seeds:

[0214] 30005-30006, 30011, 30013-30016, 30020, 30022-30024, 30028, 30037, 30039-30041, 30046-30055, 30057, 30059-30062, 30071, 30073, 30078, 30080, 30083-30084, 30087, 30089, 30093-30094, 30096, 30098, 30101-30103, 30105, 30108-30109, 30112, 30114-30117, 30119-30120, 30126, 30133, 30136-30137, 30139-30148, 30153-30158, 30160-30164, 30166-30169, 30171-30172, 30176-30178, 30180-30181, 30183-30186, 30189-30191, 30195-30198, 30200-30201, 30204-30210, 30213-30214, 30216-30218, 30221-30222, 30225-30228, 30230-30232, 30235-30240, 30242, 30244-30252, 30254, 30256-30259, 30262-30268, 30271, 30274, 30276-30280, 30282-30283, 30286-30297, 30299-30302, 30304-30305, 30307-30308, 30310-30314, 30316-30318, 30322-30337, 30339-30340, 30342, 30345, 30347-30353, 30355-30356, 30358-30360, 30362-30367, 30369-30375, 30379, 30381-30385, 30387-30390, 30393-30394, 30396-30397, 30399-30400, 30410-30416, 30418-30426, 30428-30429, 30433-30436, 30438, 30444, 30447-30453, 30455-30458, 30460-30461, 30464-30468, 30473-30475, 30479-30483, 30485, 30490-30492, 30495-30504, 30506, 30508-30509, 30511-30514, 30516, 30518, 30520, 30524-30529, 30531-30541, 30544, 30547-30549, 30552, 30554-30555, 30558-30567, 30569-30570, 30572-30573, 30575-30581, 30586-30587, 30589-30590, 30592-30600, 30602, 30607, 30610, 30616, 30618-30619, 30622-30623, 30625, 30627, 30629-30633, 30635-30636, 30638, 30640-30642, 30646, 30650-30652, 30655, 30657-30658, 30660-30664, 30666-30667, 30670-30671, 30674, 30677-30679, 30681, 30683, 30685-30686, 30688, 30690, 30694, 30697, 30699, 30702-30703, 30705-30706, 30709, 30711-30714, 30716-30717, 30719, 30722-30723, 30725, 30727, 30729-30730, 30732, 30734-30738, 30742-30752, 30757-30758, 30761, 30764-30765, 30767, 30769, 30772-30776, 30778-30782, 30784-30786, 30788-30792, 30794-30795, 30797, 30800-30801, 30806-30811, 30813-30814, 30821-30828, 30831, 30833-30839, 30842-30849, 30851, 30853, 30856-30857, 30859-30870, 30872-30874, 30878, 30880-30882, 30884-30894, 30896-30908, 30911, 30913-30915, 30921, 30923-30926, 30928-30929, 30931-30933, 30935-30938, 30940-30942, 30945-30946, 30949-30950, 30952-30961, 30963, 30967-30972, 30974-30981, 30983-30988, 30990-30999, 31002-31003, 31007, 31011-31015, 31017-31020, 31022-31023, 31025-31029, 31031, 31033, 31038, 31040, 31042-31049, 31051, 31053-31055, 31057, 31059-31064, 31066-31067, 31069, 31071, 31073-31074, 31076, 31080-31081, 31083-31091, 31093-31094, 31096-31099, 31101-31104, 31106, 31113, 31116, 31118, 31124-31125, 31127-31128, 31130, 31132-31134, 31136-31137, 31141, 31143, 31147-31148, 31150, 31152-31157, 31160-31161, 31166-31167, 31169-31170, 31173-31174, 31180, 31183-31185, 31188, 31191, 31193-31196, 31199, 31203-31209, 31211, 31213, 31215-31216, 31218-31220, 31222, 31225-31227, 31229-31232, 31234, 31236-31240, 31243-31247, 31249, 31251-31253, 31256-31262, 31264-31268, 31270-31272, 31274, 31277-31282, 31284-31285, 31289, 31291, 31293-31300, 31302-31303, 31305-31309, 31312, 31314, 31320, 31322-31323, 31327, 31329, 31332-31336, 31338-31339, 31341, 31343-31350, 31352-31358, 31361-31366, 31368-31372, 31378-31379, 31382-31386, 31388, 31390-31425, 31428-31431, 31433, 31435, 31438-31439, 31441-31446, 31448-31453, 31457, 31459, 31466-31469, 31472, 31475-31484, 31486, 31488-31489, 31493-31497, 31499, 31502-31503, 31505-31513, 31515, 31517-31524, 31526-31528, 31530, 31534, 31539, 31541-31542, 31545-31546, 31549-31550, 31552-31557, 31559, 31563-31564, 31566, 31569-31570, 31572-31580, 31583-31588, 31590-31593, 31595-31614, 31616, 31618-31625, 31627-31629, 31632, 31634, 31638, 31640-31644, 31647-31649, 31651-31652, 31655, 31659-31663, 31665-31668, 31673, 31675-31682, 31685-31693, 31695, 31698-31704, 31706-31707, 31709, 31711-31721, 31726, 31730-31734, 31737-31741, 31745, 31749-31756, 31758-31761, 31763-31771, 31773, 31775-31778, 31780-31781, 31787-31788, 31791-31798, 31800-31801, 31804-31807, 31809-31812, 31814-31815, 31817-31820, 31822-31834, 31838-31839, 31841-31842, 31844-31845, 31847-31851, 31853, 31855-31856, 31858-31861, 31864-31865, 31869-31870, 31873, 31875-31876, 31879-31888, 31893-31895, 31897, 31899-31900, 31903, 31905-31906, 31908-31912, 31914-31918, 31921-31923, 31925, 31927, 31929-31932, 31934-31945, 31947-31948, 31950-31951, 31954, 31958, 31960, 31962, 31964-31966, 31968, 31973, 31975-31977, 31979-31981, 31987-31991, 31993, 31996-31998, 32000-32003, 32005-32006, 32010-32020, 32022-32024, 32026-32030, 32036, 32039-32043, 32045-32051, 32053-32060, 32062-32064, 32066, 32070-32077, 32083-32084, 32086-32087, 32089, 32091-32093, 32095-32104, 32106-32107, 32110, 32113-32114, 32117-32122, 32124-32126, 32130-32131, 32133-32134, 32137, 32139, 32142, 32144-32145, 32149, 32156, 32158-32159, 32161, 32165-32168, 32171-32178, 32181, 32183-32186, 32188-32203, 32205-32206, 32208, 32210-32213, 32215-32216, 32218, 32220-32222, 32224, 32226, 32228-32238, 32240-32242, 32244-32246, 32249-32254, 32259-32263, 32265-32266, 32268-32269, 32271-32275, 32277-32278, 32281-32293, 32295-32300, 32302, 32307-32312, 32315, 32318, 32320, 32322-32329, 32331-32333, 32340-32345, 32348-32354, 32356-32358, 32360-32366, 32369, 32371-32376, 32378-32388, 32392, 32394-32398, 32406-32411, 32414, 32420-32421, 32426, 32429-32432, 32435-32441, 32444-32449, 32451-32452, 32454, 32456-32458, 32460, 32462, 32464-32465, 32467-32468, 32472, 32475-32476, 32478, 32480-32483, 32485, 32488, 32490-32492, 32494-32495, 32497-32501, 32503-32505, 32507, 32509-32512, 32515, 32517, 32519-32528, 32530-32534, 32537-32544, 32547, 32549-32550, 32552-32553, 32556-32561, 32563-32565, 32567-32568, 32571-32576, 32578-32579, 32581-32583, 32585, 32587, 32589-32590, 32593, 32596-32598, 32600, 32602-32603, 32605-32610, 32613-32622, 32624, 32626-32627, 32629-32630, 32632-32634, 32636, 32640-32643, 32645, 32647-32648, 32651, 32656-32658, 32660-32662, 32664-32666, 32668-32681, 32683-32684, 32686, 32690-32691, 32699-32701, 32704-32705, 32707-32714, 32718, 32720, 32722-32725, 32727-32732, 32734, 32736-32740, 32742-32743, 32747, 32750, 32754, 32756-32758, 32760-32763, 32765-32767, 32769-32780, 32784, 32786-32795, 32799-32803, 32805, 32808-32813, 32815-32816, 32818, 32820, 32822, 32824, 32826, 32828, 32830-32832, 32834-32836, 32838-32839, 32841-32844, 32846, 32848-32850, 32853-32857, 32860-32863, 32865-32866, 32869, 32871-32875, 32878-32880, 32884-32891, 32893-32894, 32896-32897, 32899-32901, 32904-32906, 32908, 32910-32914, 32917, 32919-32922, 32927, 32930-32933, 32938, 32940-32942, 32944-32948, 32951-32955, 32957-32960, 32962-32963, 32966-32968, 32971-32978, 32980-32982, 32984, 32988-32991, 32995-32998, 33001, 33006, 33009-33014, 33016-33017, 33020, 33024-33025, 33027, 33031-33032, 33034, 33036-33039, 33041, 33043, 33047-33048, 33050-33061, 33063, 33065, 33068, 33071-33074, 33076-33078, 33080-33082, 33084, 33086-33087, 33089-33092, 33094, 33096, 33098, 33100-33102, 33104, 33106-33110, 33112-33117, 33119-33122, 33124-33127, 33129, 33132, 33138-33145, 33147, 33149-33154, 33156, 33158-33160, 33162-33163, 33165-33167, 33169-33176, 33178, 33181-33183, 33186, 33190-33191, 33193, 33195-33201, 33205-33209, 33211-33214, 33216, 33220-33225, 33228-33230, 33232-33241, 33247-33248, 33250-33251, 33253-33254, 33256-33261, 33264, 33266, 33268, 33271-33273, 33275-33283, 33286-33291, 33294-33298, 33300, 33303-33307, 33311-33312, 33314-33317, 33319-33321, 33324-33325, 33327-33329, 33331, 33333, 33335, 33338-33341, 33343, 33345-33346, 33348-33349, 33351, 33354-33356, 33358, 33361, 33363, 33368-33370, 33372-33374, 33376, 33380-33382, 33384, 33386, 33389, 33391-33394, 33396-33403, 33405-33407, 33412, 33414-33416, 33418-33420, 33422-33423, 33425-33427, 33429, 33431, 33437, 33440-33442, 33444, 33446, 33448, 33451, 33453, 33455, 33457-33463, 33465, 33467, 33469-33475, 33479-33484, 33487, 33489-33491, 33495-33502, 33504-33508, 33517-33520, 33522-33523, 33526-33527, 33530-33531, 33533-33540, 33543-33553, 33557-33559, 33561-33563, 33566-33575, 33577, 33580-33585, 33587, 33589-33596, 33599-33615, 33617-33619, 33622-33623, 33625, 33628-33636, 33640, 33644-33646, 33648-33649, 33653-33654, 33657-33661, 33664-33665, 33668, 33670-33678, 33680-33682, 33684-33687, 33689, 33691-33699, 33706-33707, 33709-33711, 33717-33725, 33727, 33729-33731, 33733-33736, 33738, 33741, 33743, 33745-33747, 33750, 33753, 33755-33756, 33758, 33760, 33762-33765, 33767-33768, 33770-33771, 33773-33775, 33777-33790, 33792-33794, 33796, 33798-33800, 33804, 33807, 33809, 33811-33812, 33814-33820, 33822-33823, 33827-33828, 33833-33835, 33840-33846, 33848, 33850-33851, 33856-33857, 33859-33861, 33863-33864, 33866-33868, 33870-33872, 33874-33881, 33883-33884, 33886-33887, 33896-33898, 33900-33902, 33904-33906, 33909-33910, 33912-33915, 33919, 33923-33926, 33928, 33931-33935, 33937-33938, 33940-33941, 33944-33946, 33948-33949, 33953-33954, 33956-33958, 33960, 33962-33963, 33965-33967, 33971-33977, 33979-33980, 33982, 33984, 33986-33989, 33992, 33994, 33998, 34001-34003, 34005-34008, 34010-34011, 34013-34014, 34016, 34018-34020, 34025-34026, 34029, 34031, 34033, 34037-34038, 34040, 34044-34048, 34050-34064, 34066-34068, 34070-34078, 34080-34082, 34084, 34086, 34088, 34090, 34093, 34096, 34098, 34104, 34107-34111, 34116, 34118, 34121-34124, 34127-34129, 34132-34138, 34140-34142, 34144, 34148-34154, 34157, 34159, 34161, 34164, 34166-34167, 34169, 34171, 34173-34175, 34177-34178, 34180-34186, 34188-34202, 34204, 34207-34208, 34210, 34212-34213, 34215-34216, 34218, 34223, 34226-34233, 34235-34236, 34238-34240, 34243, 34246, 34249-34253, 34255-34260, 34262-34266, 34268-34270, 34274-34282, 34285-34289, 34292-34293, 34296, 34301, 34303-34307, 34309-34312, 34316-34330, 34333-34334, 34336-34337, 34340, 34342, 34344-34345, 34347, 34351-34358, 34360, 34362-34364, 34366-34369, 34371, 34373-34374, 34377-34385, 34387, 34391, 34394, 34396-34397, 34399-34405, 34407, 34412-34416, 34422-34433, 34437, 34440-34447, 34450-34451, 34457-34458, 34460-34461, 34463-34465, 34467-34471, 34473-34475, 34481-34484, 34488, 34490-34493, 34496-34497, 34499, 34501, 34503-34511, 34513, 34515-34517, 34520, 34522-34523, 34525-34527, 34531-34532, 34534-34537, 34540, 34542, 34544, 34546, 34548-34549, 34554, 34556, 34558, 34560, 34562, 34565-34566, 34568-34570, 34572, 34574, 34576, 34581-34582, 34585-34589, 34591, 34595, 34597-34598, 34600-34601, 34604-34605, 34608, 34611-34614, 34616, 34618-34622, 34624-34625, 34627, 34630, 34633-34634, 34636, 34638, 34640-34641, 34647-34650, 34652-34653, 34659-34660, 34663-34666, 34668-34669, 34671, 34673-34676, 34678, 34680-34681, 34685-34687, 34689-34690, 34694-34697, 34699-34701, 34703-34706, 34709-34719, 34725, 34728, 34731-34734, 34736-34745, 34748-34754, 34759, 34762-34766, 34768-34769, 34772, 34774, 34777, 34782, 34784, 34786, 34790-34791, 34796-34798, 34800, 34804, 34806-34808, 34810-34812, 34814-34816, 34821-34823, 34825-34826, 34828-34832, 34834-34838, 34840-34841, 34843-34846, 34850-34854, 34856-34864, 34867-34870, 34872-34873, 34875, 34881-34886, 34888-34896, 34902, 34906-34918, 34920, 34923, 34926-34928, 34930-34934, 34936, 34942-34944, 34946-34948, 34950-34954, 34958, 34960-34964, 34966-34968, 34974-34979, 34984-34986, 34991, 34999-35012, 35016-35018, 35021-35032, 35035-35036, 35038-35039, 35044-35045, 35047, 35049, 35051-35052, 35054-35056, 35061, 35064-35068, 35070-35072, 35074, 35078, 35081-35087, 35090, 35092-35093, 35096-35097, 35100-35102, 35104-35105, 35107, 35109-35116, 35120-35121, 35123, 35129, 35134-35139, 35143-35149, 35152, 35154, 35156, 35158-35162, 35164-35171, 35173-35181, 35183-35186, 35188, 35192-35193, 35196-35197, 35199-35200, 35202-35206, 35216-35228, 35234-35238, 35240-35248, 35251-35252, 35254-35256, 35258-35261, 35263, 35266, 35268-35269, 35275-35276, 35278-35287, 35289-35303, 35305-35307, 35310-35311, 35314-35317, 35319-35321, 35323, 35327-35329, 35331, 35333, 35335-35337, 35339-35340, 35342-35343, 35345-35347, 35351-35352, 35355-35356, 35361-35363, 35365, 35367-35370, 35373-35375, 35377-35379, 35381, 35383, 35388-35390, 35392, 35394-35395, 35397, 35400, 35402-35405, 35414-35415, 35418, 35420, 35423-35424, 35427-35429, 35433, 35436, 35446-35448, 35450-35452, 35456-35457, 35459, 35462-35469, 35471-35473, 35479, 35481, 35483-35484, 35490, 35494, 35496-35504, 35507-35510, 35512-35513, 35520, 35522, 35525-35527, 35529-35530, 35534-35536, 35539-35545, 35550-35554, 35556-35562, 35564-35580, 35584-35589, 35591, 35593-35594, 35596, 35598-35599, 35601-35603, 35605, 35608-35611, 35613-35616, 35618-35621, 35623-35625, 35628-35632, 35634, 35636-35637, 35640, 35642-35644, 35646-35657, 35661-35662, 35666-35667, 35669-35671, 35675-35676, 35679-35683, 35687-35690, 35692-35693, 35696, 35698-35700, 35702-35703, 35705, 35707-35708, 35710-35711, 35715-35724, 35726-35736, 35738, 35740, 35742-35743, 35746, 35749-35752, 35754-35761, 35763-35771, 35773-35778, 35780-35782, 35784-35788, 35790, 35792-35793, 35795-35799, 35801, 35804-35806, 35809-35812, 35815, 35831-35832, 35834, 35836, 35838-35844, 35846-35848, 35851-35852, 35854-35855, 35857-35867, 35870-35873, 35875-35877, 35881-35884, 35886-35891, 35893-35898, 35900, 35903, 35905-35908, 35913, 35915, 35917-35919, 35924, 35926-35929, 35932-35935, 35937-35939, 35943-35944, 35946, 35950, 35953-35961, 35963-35965, 35969, 35972-35974, 35976, 35980, 35982-35985, 35988-35989, 35991, 35993-35995, 35999, 36001-36015, 36017-36021, 36023-36026, 36028-36029, 36031-36032, 36034-36044, 36046, 36048, 36050, 36054-36055, 36058-36060, 36062-36064, 36066-36074, 36077-36080, 36082, 36086-36095, 36097-36098, 36101-36105, 36110, 36112, 36114-36118, 36121-36124, 36126-36129, 36131-36132, 36134, 36137-36139, 36143-36145, 36148, 36150-36151, 36155-36156, 36158-36159, 36162-36163, 36166-36167, 36169-36171, 36175-36182, 36184-36185, 36187-36189, 36192-36195, 36202-36206, 36209-36214, 36216-36217, 36219, 36221-36222, 36224-36227, 36229-36231, 36233, 36236-36238, 36240, 36247-36254, 36258, 36260, 36262-36266, 36268-36269, 36271-36274, 36277-36279, 36281-36282, 36284-36285, 36290, 36294, 36296-36299, 36301, 36305-36306, 36308, 36310-36313, 36316, 36318, 36320-36328, 36330-36332, 36335, 36337-36342, 36345, 36347-36349, 36351, 36353-36354, 36360, 36362-36364, 36367-36371, 36374, 36376-36379, 36381-36382, 36385, 36387-36394, 36397, 36399, 36401, 36403-36404, 36408-36409, 36412, 36414-36415, 36417-36418, 36421, 36423, 36425-36426, 36429, 36432-36437, 36440, 36442, 36445-36449, 36451-36458, 36460-36461, 36464, 36466, 36468-36471, 36473-36474, 36476, 36481-36482, 36484, 36486-36487, 36489-36490, 36493-36495, 36498-36503, 36505-36507, 36509, 36511-36513, 36518, 36520-36522, 36525-36527, 36530-36537, 36539, 36541, 36543-36544, 36548-36558, 36560-36564, 36568, 36570, 36572-36578, 36581, 36583, 36585-36586, 36588-36590, 36592-36597, 36599-36601, 36604, 36607-36615, 36617-36620, 36622, 36624-36629, 36631, 36634-36635, 36637-36647, 36649, 36653-36657, 36661-36662, 36664-36666, 36668-36669, 36671-36674, 36678-36679, 36681, 36683-36684, 36690-36691, 36693, 36695, 36697-36699, 36701-36712, 36715-36720, 36725-36726, 36728-36731, 36733, 36735-36739, 36741, 36743-36746, 36748-36756, 36758, 36760-36761, 36764-36765, 36768-36776, 36779, 36781, 36783-36785, 36787, 36789-36792, 36794, 36796-36801, 36803-36807, 36812-36813, 36816, 36819-36823, 36826, 36829-36830, 36832, 36834, 36837, 36839, 36841, 36843-36850, 36853, 36856, 36859-36862, 36866-36867, 36869, 36871-36875, 36880, 36882-36884, 36886, 36889-36890, 36893-36898, 36901-36904, 36908, 36910-36918, 36921, 36923-36924, 36928-36931, 36933, 36935-36936, 36939-36940, 36942-36943, 36945-36946, 36948-36950, 36955-36957, 36959-36962, 36964, 36968, 36971, 36973-36978, 36981-36986, 36988-36989, 36991-36995, 36998, 37000, 37002-37004, 37008, 37012, 37015, 37018-37020, 37022-37029, 37032, 37034, 37036, 37038-37039, 37041, 37043, 37045-37046, 37048, 37050, 37053-37056, 37058-37062, 37066-37067, 37069, 37073, 37075, 37077-37079, 37081-37082, 37084, 37086-37093, 37095-37098, 37101-37103, 37105-37106, 37109-37110, 37113-37119, 37121-37123, 37125-37130, 37132, 37134, 37136-37138, 37140, 37142-37143, 37146-37148, 37152-37155, 37158-37162, 37164-37166, 37169-37172, 37175, 37177, 37179, 37181, 37187, 37189, 37192, 37195, 37197, 37199-37200, 37202-37204, 37206-37207, 37209, 37211-37212, 37214, 37218, 37220-37222, 37224-37231, 37233, 37237-37241, 37243, 37245-37248, 37250-37252, 37254-37255, 37257-37259, 37261-37263, 37266, 37271, 37275, 37277, 37279, 37281, 37283-37284, 37287, 37290, 37297-37300, 37302, 37304-37307, 37309-37311, 37313-37314, 37316-37317, 37321, 37324-37327, 37330, 37332-37333, 37339-37343, 37346, 37349, 37351-37354, 37356, 37358-37359, 37361-37370, 37372-37373, 37375-37376, 37379-37380, 37384, 37388, 37390-37393, 37396, 37398-37406, 37409, 37411-37417, 37419-37425, 37427-37429, 37431-37432, 37435, 37438, 37440-37441, 37446-37447, 37449-37451, 37453-37457, 37459-37463, 37465, 37467-37473, 37475-37476, 37478-37482, 37484-37485, 37487, 37490, 37492-37493, 37495-37501, 37503, 37507-37512, 37514, 37520-37524, 37526, 37529, 37532-37536, 37538-37542, 37545-37548, 37551-37552, 37555-37558, 37563-37565, 37567-37573, 37575-37578, 37584-37585, 37588, 37591-37592, 37594-37599, 37601-37602, 37604-37612, 37614-37615, 37620, 37622-37625, 37627-37633, 37636-37637, 37639-37643, 37645-37646, 37651, 37655-37657, 37660-37661, 37663-37675, 37677, 37680, 37682, 37686, 37688-37693, 37695-37698, 37700, 37703-37704, 37706, 37708-37710, 37712-37713, 37715-37721, 37724-37733, 37735, 37737, 37740, 37743-37744, 37749-37753, 37755-37756, 37758-37760, 37762-37767, 37769-37772, 37774, 37776-37778, 37780-37782, 37784, 37786, 37788, 37790-37793, 37795-37797, 37799-37802, 37804-37808, 37810, 37812-37814, 37816-37823, 37825, 37827, 37829-37831, 37833, 37837-37839, 37841-37846, 37848-37849, 37851, 37853, 37855-37860, 37862-37864, 37866, 37868-37873, 37875, 37879, 37881-37885, 37889, 37891-37893, 37896, 37898, 37900, 37902, 37904-37906, 37908-37911, 37913-37918, 37923-37925, 37928-37933, 37935-37937, 37939-37940, 37942-37946, 37949-37951, 37953, 37955, 37957-37963, 37965-37970, 37973-37975, 37979-37981, 37984, 37990-38002, 38004-38008, 38010-38014, 38016-38018, 38020, 38022-38028, 38033, 38035-38038, 38041-38045, 38054-38056, 38058-38059, 38061-38065, 38067, 38070, 38074-38078, 38080, 38083-38088, 38090-38092, 38094, 38096-38097, 38100, 38102-38103, 38105-38118, 38121-38130, 38132, 38136-38139, 38145, 38147-38152, 38156-38158, 38161, 38163-38164, 38167-38168, 38170, 38176-38180, 38186, 38189-38190, 38192-38197, 38199, 38201, 38207, 38209, 38213, 38215-38216, 38220-38221, 38223, 38226, 38228, 38230-38231, 38237, 38244-38245, 38249, 38251-38252, 38254-38256, 38258, 38261-38263, 38265-38266, 38269-38273, 38276, 38278, 38282-38286, 38288, 38290-38291, 38293, 38296-38297, 38299-38304, 38306-38308, 38310, 38312-38314, 38317, 38319-38325, 38327, 38332, 38334-38336, 38338-38340, 38344, 38346-38348, 38350-38352, 38354-38356, 38358, 38360-38361, 38366-38367, 38369-38370, 38374-38375, 38379, 38383-38384, 38388-38392, 38395-38402, 38405, 38407, 38410-38418, 38421-38423, 38425-38426, 38429-38430, 38432-38434, 38436-38441, 38443, 38446, 38448-38454, 38457-38458, 38460, 38462-38473, 38478, 38480-38481, 38483-38490, 38493-38495, 38497-38502, 38506, 38509-38512, 38514-38516, 38518-38521, 38524, 38526-38527, 38529-38530, 38533, 38535-38541, 38544-38557, 38560-38562, 38565, 38569, 38571-38582, 38584, 38586-38587, 38590, 38595, 38598-38607, 38609-38610, 38612-38621, 38626-38629, 38631-38633, 38635, 38637-38643, 38646-38651, 38653-38658, 38660-38665, 38667-38670, 38672, 38674-38691, 38693, 38699-38700, 38703, 38706-38707, 38711-38713, 38716, 38720-38721, 38723-38726, 38728, 38730, 38732-38733, 38736-38738, 38740-38743, 38745, 38747-38751, 38753-38755, 38757-38758, 38760-38761, 38766-38768, 38771-38773, 38775, 38779, 38781-38794, 38797-38799, 38801-38802, 38804-38812, 38815-38816, 38819-38821, 38824-38825, 38827-38828, 38832, 38834-38835, 38838-38840, 38846, 38848-38849, 38852-38855, 38858, 38860, 38862-38864, 38866-38867, 38869, 38871-38874, 38876, 38878-38883, 38885-38889, 38892, 38894, 38896-38898, 38900, 38904-38906, 38908, 38912-38915, 38918, 38923-38924, 38926-38932, 38934-38935, 38937, 38943-38944, 38947-38951, 38954-38955, 38959, 38967-38968, 38970, 38976-38982, 38985-38987, 38989-38992, 38994, 38996, 38999-39000, 39004, 39006-39015, 39020, 39023-39027, 39029-39033, 39035, 39037, 39039, 39041-39045, 39047-39048, 39050-39052, 39055, 39057-39060, 39062, 39064-39071, 39074, 39077, 39080-39082, 39084-39087, 39089-39094, 39097-39100, 39102-39104, 39108, 39111-39112, 39114-39115, 39117-39119, 39121-39123, 39128-39129, 39132-39133, 39135, 39137-39142, 39144, 39146-39149, 39151-39152, 39154-39156, 39158, 39165-39166, 39168-39169, 39172-39173, 39175-39180, 39183-39186, 39190, 39193-39204, 39206-39208, 39210-39214, 39216-39220, 39223, 39226, 39229-39230, 39232, 39235-39236, 39239-39243, 39246-39249, 39252-39258, 39260-39265, 39267, 39271-39273, 39275, 39277-39280, 39282, 39284-39286, 39289, 39292-39295, 39300-39302, 39304-39305, 39308, 39310-39311, 39313, 39315-39320, 39323-39329, 39332-39337, 39340-39342, 39345-39346, 39348-39349, 39354, 39359-39360, 39363-39364, 39369, 39371, 39374-39375, 39377-39379, 39381, 39383-39384, 39386-39387, 39389, 39396-39397, 39399-39404, 39406, 39409-39414, 39416, 39418-39419, 39421-39424, 39426-39428, 39430-39431, 39435, 39437-39440, 39442-39449, 39451-39452, 39455-39464, 39466-39468, 39470, 39472, 39474-39479, 39481-39483, 39488-39489, 39491-39492, 39494, 39502-39503, 39505-39512, 39514, 39517-39518, 39520, 39523-39526, 39529, 39531-39536, 39538-39539, 39541, 39544-39546, 39549-39550, 39552, 39554, 39556, 39558, 39561, 39564-39565, 39567, 39570, 39573-39575, 39577-39578, 39580, 39583-39587, 39590, 39592-39593, 39598-39611, 39613-39615, 39617-39619, 39621, 39624-39625, 39627-39629, 39631-39639, 39641, 39645-39649, 39651, 39653, 39659-39660, 39663, 39665, 39668, 39674, 39678-39679, 39681, 39685-39691, 39694, 39696, 39699-39701, 39703, 39705, 39708-39715, 39718-39719, 39723, 39725-39726, 39732, 39739-39747, 39749-39751, 39753, 39757, 39762-39763, 39765-39767, 39769-39771, 39778-39780, 39785, 39787, 39789-39792, 39796, 39798, 39800-39804, 39807, 39809-39813, 39815-39818, 39820-39821, 39823, 39825, 39827-39828, 39835-39843, 39846-39847, 39849-39851, 39853-39854, 39857-39861, 39864-39866, 39869-39870, 39873-39877, 39882-39889, 39891-39892, 39894, 39898-39901, 39905-39912, 39918, 39921-39924, 39927-39930, 39934, 39937-39939, 39941-39943, 39945, 39947-39953, 39956, 39959, 39961-39965, 39969-39973, 39975-39976, 39979-39984, 39986-39987, 39989-39991, 39993-39995, 39998-39999, 40001-40004, 40007-40008, 40010-40014, 40017, 40019, 40021, 40023-40027, 40029-40033, 40035-40037, 40040, 40043-40044, 40046, 40049-40058, 40060-40062, 40064-40065, 40070, 40072-40074, 40077, 40079, 40081, 40087-40089, 40092, 40094-40107, 40112-40115, 40118, 40121-40126, 40128-40129, 40131, 40134-40136, 40138-40139, 40141, 40143-40144, 40146, 40148-40151, 40154, 40157-40160, 40162, 40165-40178, 40181, 40183-40184, 40186, 40190-40193, 40196-40197, 40200, 40202-40203, 40205-40206, 40208-40209, 40211-40212, 40215, 40217-40220, 40222, 40224, 40226, 40229, 40231-40235, 40237-40239, 40242-40243, 40245-40246, 40250-40259, 40263, 40265-40272, 40275-40276, 40284-40285, 40287, 40289-40290, 40293-40294, 40296, 40298-40299, 40302-40306, 40308-40319, 40321, 40323-40324, 40326, 40328-40331, 40333-40336, 40340-40343, 40345-40347, 40349-40350, 40353, 40355-40358, 40360-40367, 40370, 40373-40377, 40381, 40384, 40386, 40389, 40391-40399, 40401-40405, 40407, 40409, 40411-40415, 40417, 40423-40425, 40427-40434, 40436-40439, 40441-40443, 40445-40446, 40448, 40450-40454, 40457-40471, 40473, 40476-40478, 40480-40486, 40488-40489, 40491, 40493, 40495, 40497-40501, 40503-40505, 40507-40509, 40511-40512, 40514, 40516-40519, 40521-40523, 40525-40528, 40532-40538, 40540-40549, 40551, 40554, 40557-40562, 40578-40584, 40586-40589, 40591, 40593-40594, 40596, 40598-40599, 40601, 40603, 40606-40611, 40613-40616, 40618-40619, 40621-40623, 40625, 40633-40641, 40645, 40647-40648, 40651-40653, 40655-40657, 40659-40664, 40666-40670, 40672-40675, 40677, 40679-40680, 40682-40683, 40685, 40688, 40692-40694, 40696, 40702, 40710-40711, 40714-40718, 40721, 40724-40726, 40728-40730, 40733-40739, 40741-40749, 40751, 40754, 40756, 40758-40759, 40764-40768, 40770-40772, 40774-40775, 40778-40780, 40783, 40787, 40789, 40797-40800, 40802-40805, 40807, 40810, 40813, 40818-40822, 40824-40828, 40830-40831, 40833-40838, 40841-40845, 40848-40862, 40864-40866, 40868, 40870-40872, 40874-40876, 40878, 40881, 40883-40888, 40890, 40892, 40896, 40898-40899, 40902, 40904-40914, 40921-40925, 40928, 40930-40931, 40933, 40936-40940, 40942-40944, 40949-40952, 40955-40959, 40964, 40967, 40969-40970, 40972-40976, 40978, 40980-40981, 40983-40985, 40987-40997, 40999-41001, 41004, 41006-41007, 41009-41011, 41013, 41016-41017, 41019, 41021-41022, 41024, 41026-41031, 41033-41044, 41046, 41049-41050, 41053, 41055-41057, 41059, 41063, 41067-41068, 41070-41071, 41074-41075, 41077-41095, 41098-41100, 41102-41107, 41109, 41111, 41113-41118, 41120-41126, 41128-41129, 41131-41135, 41137-41141, 41144-41148, 41150, 41152, 41154-41155, 41157-41158, 41160-41161, 41163, 41165, 41168, 41171, 41174, 41176-41177, 41180-41181, 41184, 41187, 41189-41193, 41196, 41198, 41200-41210, 41212-41217, 41219, 41222, 41224, 41228, 41230, 41232-41235, 41237, 41239-41242, 41244-41245, 41247-41248, 41250-41252, 41255, 41259-41262, 41264-41265, 41267-41269, 41272-41283, 41285-41290, 41292-41293, 41296-41297, 41302-41303, 41305, 41308, 41311, 41313, 41316, 41319, 41321, 41324, 41328, 41330-41331, 41333-41335, 41337-41338, 41341, 41344, 41348-41349, 41351-41356, 41358-41360, 41364-41366, 41369-41370, 41372, 41374-41376, 41380, 41383-41384, 41387-41389, 41391, 41393-41400, 41402-41405, 41407-41408, 41410, 41412, 41414-41415, 41417-41419, 41424-41426, 41431, 41433-41439, 41442-41444, 41446, 41448-41452, 41456-41458, 41460, 41462, 41465-41478, 41482-41484, 41488-41490, 41493-41497, 41499, 41501-41502, 41504-41505, 41509-41510, 41512-41514, 41516-41517, 41520, 41522-41526, 41528-41529, 41534-41543, 41547, 41549, 41551-41554, 41556, 41559-41563, 41565-41566, 41568, 41570-41578, 41580-41585, 41587-41591, 41595-41598, 41601, 41603, 41605-41607, 41609-41620, 41622, 41624-41627, 41629, 41633-41634, 41636-41643, 41645-41646, 41648-41652, 41657-41670, 41673, 41675-41684, 41687, 41689-41695, 41698-41705, 41707-41708, 41710-41711, 41714-41715, 41718-41719, 41724-41727, 41730-41734, 41737-41740, 41742-41744, 41746, 41748, 41751, 41753-41762, 41764-41766, 41768-41769, 41771-41775, 41777-41789, 41791, 41793, 41796-41799, 41804-41805, 41808, 41811-41817, 41819, 41821-41832, 41835, 41838-41839, 41841-41844, 41846-41848, 41853-41861, 41863, 41865-41866, 41869-41872, 41875, 41877-41880, 41882, 41884-41886, 41888, 41890-41897, 41899, 41902, 41905, 41909, 41911-41914, 41919-41920, 41923-41924, 41926, 41929-41930, 41932-41933, 41935, 41937-41940, 41942-41943, 41945, 41949-41954, 41956-41958, 41961, 41963-41964, 41966, 41968-41969, 41972, 41977, 41979-41981, 41983, 41987-41988, 41994-41996, 41998-42000, 42004-42005, 42007-42019, 42021-42023, 42030-42033, 42036-42039, 42041, 42043, 42045-42052, 42054-42059, 42061-42067, 42069-42071, 42073-42080, 42082-42083, 42085, 42087-42092, 42094-42098, 42100-42101, 42103-42109, 42112-42117, 42120, 42122-42123, 42126-42130, 42132, 42134-42140, 42143, 42146-42148, 42150, 42152-42153, 42157, 42162-42168, 42170-42172, 42176, 42179, 42182-42194, 42196, 42200, 42203-42204, 42209-42211, 42213-42215, 42217, 42222-42223, 42225, 42228, 42230-42233, 42237-42243, 42250-42251, 42255-42265, 42268-42272, 42274, 42276-42288, 42291-42293, 42297-42298, 42300-42303, 42305, 42307, 42309, 42311, 42314, 42317, 42319, 42322-42325, 42329, 42332, 42335-42336, 42338-42339, 42341-42342, 42344-42347, 42350-42353, 42358, 42360-42361, 42369-42373, 42375-42377, 42379-42380, 42382-42384, 42386, 42395-42397, 42399, 42401, 42403-42404, 42406-42409, 42411, 42416-42418, 42421, 42425, 42427-42429, 42432, 42434-42442, 42446-42450, 42453-42457, 42464, 42469-42470, 42472, 42476, 42483, 42485, 42491, 42493, 42495-42496, 42501, 42503, 42507-42509, 42514-42515, 42517-42519, 42521, 42523-42528, 42532-42534, 42537, 42539-42542, 42544-42552, 42555-42557, 42559, 42562, 42564-42566, 42568-42570, 42572-42573, 42575, 42577-42580, 42582, 42592-42595, 42597-42600, 42604, 42610-42611, 42615-42617, 42620-42624, 42629-42642, 42645-42653, 42657, 42661-42664, 42666, 42668-42674, 42676, 42678-42679, 42682, 42686, 42688-42692, 42694-42704, 42706-42709, 42712-42713, 42717, 42719-42723, 42725-42729, 42732-42735, 42740-42743, 42746-42749, 42751-42756, 42758, 42760, 42764, 42766-42768, 42770-42771, 42773-42774, 42778-42780, 42788-42790, 42795, 42799-42800, 42802-42804, 42807-42816, 42818-42819, 42821-42823, 42826-42828, 42831, 42834-42835, 42837-42839, 42841-42843, 42845-42846, 42848-42851, 42855-42856, 42863-42865, 42867-42870, 42876-42877, 42879-42887, 42889-42896, 42898, 42901-42903, 42905-42907, 42910-42915, 42917-42919, 42921-42924, 42927-42928, 42930, 42933-42936, 42939-42940, 42942, 42944-42947, 42949-42954, 42956-42961, 42963-42964, 42967-42972, 42975, 42977-42980, 42985-42989, 42991, 42993-42996, 42998-43006, 43008-43009, 43012-43014, 43016-43025, 43027, 43029, 43036-43037, 43039-43044, 43053-43064, 43068, 43072, 43074-43075, 43078-43080, 43083-43084, 43086, 43089, 43091-43100, 43103-43108, 43110, 43112, 43115-43117, 43119-43120, 43123-43127, 43129, 43131-43137, 43139-43141, 43144, 43146-43147, 43157-43164, 43166-43168, 43170-43176, 43180-43181, 43183-43186, 43188, 43191, 43195, 43198-43200, 43204-43205, 43209-43215, 43218-43220, 43222-43231, 43237, 43240-43242, 43244-43250, 43254-43255, 43257, 43259-43266, 43268, 43270, 43273, 43279, 43281-43282, 43284, 43286-43287, 43290-43291, 43293-43294, 43297-43299, 43302-43307, 43309-43312, 43314-43315, 43318, 43320-43329, 43331-43333, 43336-43341, 43343-43349, 43351-43353, 43355-43357, 43360-43361, 43365-43366, 43368, 43370, 43372, 43375, 43377, 43379, 43381-43386, 43389, 43391, 43393-43395, 43400-43407, 43409, 43411, 43413-43419, 43422, 43428-43429, 43431-43433, 43435-43436, 43439-43445, 43447-43449, 43456-43457, 43465-43470, 43473-43474, 43476-43479, 43482-43485, 43490, 43492-43494, 43496, 43498-43499, 43501-43503, 43505-43506, 43508-43510, 43512, 43514, 43517-43521, 43526-43527, 43529-43534, 43537-43538, 43540-43541, 43543-43546, 43549-43552, 43554, 43556-43557, 43559, 43561-43563, 43566-43573, 43575-43582, 43586-43588, 43592-43595, 43597-43600, 43603, 43607-43614, 43620-43622, 43624-43625, 43627-43628, 43630-43635, 43638-43641, 43643-43645, 43647, 43650-43657, 43659, 43661-43664, 43667, 43669, 43671-43672, 43674-43676, 43680-43686, 43688, 43690-43691, 43693, 43695, 43697-43704, 43711-43712, 43714-43720, 43722-43723, 43725-43727, 43732, 43734, 43736-43738, 43742-43747, 43750, 43753, 43755-43756, 43758, 43761, 43765, 43767, 43769, 43771, 43773-43775, 43777, 43779, 43781-43782, 43785, 43788-43791, 43793-43795, 43797-43798, 43800, 43803-43805, 43808-43810, 43812-43817, 43819-43821, 43823-43825, 43828-43831, 43833-43835, 43837-43842, 43846, 43848-43851, 43854-43856, 43858-43860, 43864, 43868-43869, 43872, 43874, 43876-43879, 43881-43882, 43885, 43887-43900, 43902, 43905, 43907, 43912-43913, 43915, 43918, 43922, 43924, 43926-43931, 43933-43935, 43937, 43939, 43941-43949, 43952-43954, 43956-43959, 43963-43966, 43968, 43971, 43973, 43975-43976, 43978-43992, 43994, 43996, 43998, 44002-44005, 44007, 44009-44011, 44013-44014, 44017-44018, 44020-44025, 44028-44030, 44032, 44034-44036, 44038-44039, 44041, 44043-44047, 44050, 44052, 44054-44055, 44059-44062, 44064, 44066-44067, 44069-44070, 44072-44077, 44079-44081, 44083, 44085-44104, 44108-44114, 44116, 44119-44121, 44123, 44128-44130, 44132, 44134-44138, 44140-44142, 44144-44145, 44147-44150, 44153-44156, 44158-44164, 44167, 44169-44170, 44173-44175, 44179-44180, 44183-44185, 44189, 44196-44200, 44204, 44208-44209, 44212-44218, 44220-44221, 44223-44224, 44226-44230, 44232-44234, 44237-44242, 44248-44249, 44252-44253, 44255-44260, 44262-44263, 44265-44267, 44270-44271, 44273-44274, 44279-44280, 44282, 44284-44291, 44294, 44296, 44300, 44303-44314, 44316-44320, 44322, 44324-44325, 44327-44335, 44338-44348, 44350-44363, 44365-44366, 44368-44370, 44373, 44376-44378, 44380, 44384-44387, 44389-44391, 44394-44401, 44403-44405, 44407, 44409, 44413, 44415, 44418-44419, 44423, 44426, 44428-44431, 44433-44434, 44437, 44439-44447, 44449-44451, 44454, 44456-44462, 44464-44466, 44469, 44473-44476, 44478, 44480-44482, 44485, 44487, 44489-44491, 44495-44497, 44499-44506, 44508, 44511-44512, 44518-44523, 44525, 44527, 44529-44531, 44533-44537, 44540-44543, 44548-44549, 44551-44559, 44566-44568, 44574-44576, 44581, 44584, 44586, 44588, 44590-44594, 44601, 44603, 44605, 44608-44609, 44614, 44616-44617, 44623, 44625-44627, 44629, 44633, 44637-44648, 44651-44654, 44656, 44662, 44664-44665, 44667, 44669-44673, 44675-44678, 44681-44683, 44685, 44687, 44689-44694, 44697-44703, 44705-44706, 44708, 44711-44715, 44717, 44719-44731, 44733-44734, 44736, 44740-44741, 44743, 44745, 44749, 44751-44755, 44757-44766, 44768-44771, 44774-44775, 44778-44780, 44788-44790, 44792-44801, 44803-44804, 44806-44812, 44814-44817, 44820-44822, 44825, 44828, 44832-44839, 44843-44846, 44848, 44850-44852, 44855-44856, 44858-44859, 44861-44875, 44879, 44881-44886, 44888, 44890-44893, 44898, 44901-44902, 44905-44906, 44908-44911, 44914-44915, 44917-44921, 44923-44924, 44927, 44931, 44933-44936, 44938, 44940-44945, 44947, 44949-44950, 44954, 44957-44958, 44960-44965, 44968, 44970-44971, 44973-44974, 44977-44978, 44981-44984, 44986-44988, 44990, 44993-44994, 44997-44998, 45000, 45002-45003, 45005-45006, 45008-45010, 45012, 45015, 45018-45020, 45024, 45026-45031, 45034-45039, 45041, 45043-45045, 45047-45049, 45051-45058, 45060-45066, 45068, 45071-45073, 45075-45081, 45086-45090, 45092-45093, 45095-45096, 45098, 45101-45107, 45109-45122, 45124, 45126-45133, 45135, 45137, 45139, 45141, 45143, 45145-45148, 45150, 45153-45155, 45157, 45159, 45161, 45163-45164, 45166, 45169, 45171, 45173, 45175-45179, 45181-45182, 45184, 45186, 45188-45191, 45194, 45201-45202, 45205-45214, 45218-45220, 45225, 45230-45231, 45233, 45235-45238, 45240-45245, 45248-45251, 45253-45255, 45257-45259, 45261-45263, 45266, 45268, 45271-45272, 45274-45275, 45277-45280, 45282-45283, 45286, 45288, 45294-45296, 45298-45301, 45303, 45307, 45309-45315, 45318-45320, 45322, 45324-45327, 45330-45331, 45335-45336, 45338, 45341-45346, 45348-45350, 45352-45355, 45357-45363, 45365, 45367-45368, 45373-45374, 45376-45377, 45379-45381, 45383-45384, 45388-45396, 45398-45400, 45406-45407, 45409-45412, 45414, 45417, 45422, 45424, 45426, 45429-45430, 45433, 45437-45438, 45440-45441, 45443-45448, 45451-45453, 45455-45456, 45459-45461, 45463-45468, 45470, 45472, 45475, 45477-45479, 45481-45483, 45491-45498, 45501-45504, 45506-45507, 45510-45511, 45513, 45515, 45519, 45522, 45524-45532, 45534-45536, 45540, 45545, 45547, 45549-45550, 45552-45553, 45556, 45558, 45561-45563, 45565-45566, 45569-45572, 45574-45575, 45577-45578, 45580-45581, 45583-45584, 45586-45589, 45593-45600, 45603-45612, 45616-45617, 45619-45620, 45622-45624, 45626-45630, 45632-45633, 45636, 45638-45639, 45641-45648, 45651-45652, 45655, 45657-45658, 45660-45663, 45665-45667, 45669, 45671, 45673-45675, 45677, 45681-45684, 45686-45688, 45690, 45692-45693, 45696-45697, 45699-45701, 45703-45706, 45710, 45712-45713, 45716, 45718, 45720-45721, 45723-45725, 45727, 45729-45730, 45732-45733, 45735-45740, 45742-45744, 45746-45749, 45752, 45759-45760, 45763, 45766-45772, 45774, 45776, 45778-45781, 45783-45784, 45786-45790, 45792-45797, 45799-45806, 45808-45809, 45811, 45813-45815, 45817-45823, 45827, 45829-45830, 45832, 45837, 45839-45842, 45845, 45847, 45854-45856, 45859-45864, 45866, 45869, 45871-45872, 45874-45879, 45883-45897, 45900-45901, 45903, 45908-45918, 45920-45921, 45923, 45925, 45928-45931, 45934-45937, 45939-45942, 45944, 45946, 45948-45966, 45968-45971, 45976-45978, 45980-45985, 45987, 45989-45994, 45997, 45999, 46001-46002, 46005, 46007, 46010, 46012-46017, 46020, 46025-46026, 46028-46037, 46039-46040, 46043-46045, 46048-46050, 46052, 46055-46059, 46061, 46064, 46068-46070, 46072, 46075-46077, 46080, 46082, 46084, 46090-46096, 46098-46100, 46103-46106, 46108-46117, 46120, 46122, 46124, 46126-46127, 46132-46133, 46135-46139, 46143-46146, 46149, 46151-46152, 46154-46163, 46165, 46168-46177, 46179, 46181-46184, 46186, 46189, 46191, 46193, 46198-46199, 46204-46205, 46207-46210, 46214, 46216-46217, 46219-46224, 46226, 46228-46231, 46233-46234, 46236, 46238-46242, 46245, 46248-46249, 46256, 46258-46260, 46262-46263, 46265-46266, 46273-46276, 46279, 46281, 46283, 46290-46292, 46296-46297, 46299, 46302-46303, 46305, 46307-46308, 46314-46319, 46323-46330, 46336, 46340-46341, 46344, 46346, 46348-46349, 46353, 46355-46358, 46361, 46367, 46369-46379, 46381-46382, 46386-46387, 46391-46393, 46395, 46400, 46403-46409, 46411, 46416, 46420-46421, 46424-46427, 46429, 46432-46438, 46440-46443, 46450, 46452, 46455-46457, 46460, 46462-46464, 46468, 46470-46471, 46474-46476, 46478-46482, 46486, 46489, 46494-46496, 46498, 46508, 46510, 46513, 46515-46519, 46521, 46523-46524, 46530-46538, 46540-46541, 46543-46544, 46546, 46549, 46551, 46559, 46561-46566, 46569, 46573-46574, 46577-46578, 46580-46584, 46586-46589, 46591, 46597, 46600, 46604-46605, 46607-46608, 46611-46612, 46614-46615, 46617-46619, 46621-46622, 46624-46625, 46634-46638, 46640-46641, 46643-46644, 46646-46648, 46655, 46657-46658, 46660-46662, 46665, 46670-46672, 46674-46680, 46686, 46689, 46691-46700, 46702-46706, 46708, 46710-46711, 46714, 46716-46717, 46720-46721, 46725-46726, 46728-46731, 46733-46734, 46739-46740, 46742-46743, 46745, 46747, 46749, 46752-46753, 46757, 46762-46764, 46767, 46771, 46773-46774, 46780-46789, 46791, 46799, 46801-46802, 46804-46805, 46808-46809, 46812-46817, 46821-46823, 46825, 46827, 46829-46834, 46836, 46838-46841, 46843-46845, 46850-46855, 46857, 46859, 46862, 46867-46870, 46873, 46879-46882, 46884-46893, 46895, 46898, 46900-46907, 46910, 46912, 46915-46917, 46919-46920, 46923, 46926-46927, 46929-46931, 46933-46937, 46939-46944, 46948, 46950, 46958-46960, 46966-46969, 46972-46973, 46975-46978, 46980-46981, 46986, 46990, 46992-46994, 46996, 46999, 47001-47005, 47008, 47013, 47016-47017, 47019-47020, 47022, 47025-47026, 47030-47033, 47035-47036, 47038-47041, 47044-47051, 47053-47056, 47058-47059, 47061, 47063-47064, 47066-47070, 47074-47077, 47083, 47085, 47087, 47090-47091, 47093-47096, 47098-47099, 47103, 47106-47107, 47109-47111, 47115, 47120-47121, 47123-47124, 47126-47127, 47131, 47134-47135, 47141, 47145-47151, 47155, 47157, 47159-47164, 47166, 47168, 47171-47172, 47174-47179, 47184-47186, 47188-47190, 47192, 47196, 47200-47201, 47205-47213, 47215, 47218-47219, 47221-47225, 47230, 47233-47237, 47241, 47243-47244, 47249-47254, 47256-47261, 47263-47265, 47267, 47269-47270, 47272-47273, 47280, 47282-47293, 47297-47298, 47300-47307, 47310-47311, 47313, 47315-47318, 47320-47321, 47324-47331, 47335-47339, 47343-47346, 47348-47350, 47353-47355, 47357, 47361, 47363-47366, 47368-47369, 47371-47372, 47375-47376, 47378, 47381, 47384-47385, 47387, 47391-47394, 47396, 47398-47401, 47403-47408, 47410, 47412, 47416-47417, 47419-47420, 47422-47423, 47425-47428, 47431-47435, 47437-47438, 47440-47441, 47443-47444, 47447, 47453-47454, 47456, 47458-47463, 47468-47469, 47473-47478, 47480, 47482-47483, 47485-47486, 47489-47490, 47492-47493, 47496, 47498-47501, 47503, 47506-47510, 47512-47519, 47521, 47523, 47525-47528, 47530, 47532-47536, 47538-47541, 47543-47544, 47546, 47548, 47552-47555, 47558-47561, 47565-47567, 47569-47576, 47578, 47580, 47582-47585, 47587-47590, 47594, 47596, 47598-47600, 47604, 47606-47607, 47609, 47611-47615, 47617, 47620-47621, 47626-47627, 47629, 47631-47632, 47636-47637, 47642-47644, 47646, 47649, 47652-47656, 47659-47665, 47670, 47674, 47677, 47682-47683, 47687, 47691-47692, 47696-47700, 47704-47706, 47708-47715, 47717-47728, 47730-47733, 47735, 47737, 47740-47741, 47744, 47747-47756, 47759-47762, 47764-47766, 47770-47772, 47774, 47776-47777, 47780, 47783-47784, 47786-47787, 47790-47793, 47798-47805, 47808, 47810-47811, 47816, 47819-47820, 47822-47824, 47826-47828, 47832-47839, 47841, 47843-47844, 47846-47848, 47851-47861, 47863-47864, 47866, 47869-47870, 47872-47875, 47877-47879, 47881-47883, 47887, 47891, 47894, 47897, 47899, 47901, 47903, 47906-47909, 47911-47912, 47914-47917, 47920-47921, 47923, 47926-47928, 47931-47936, 47938-47939, 47941-47943, 47946, 47948-47952, 47954-47956, 47958-47968, 47972, 47976, 47978, 47980, 47985-47986, 47988-47996, 47998, 48005-48006, 48008-48009, 48011-48018, 48020-48023, 48025-48026, 48028, 48030-48041, 48045-48047, 48051, 48053-48054, 48056, 48058-48059, 48061-48065, 48068-48070, 48073, 48075-48083, 48086, 48088-48089, 48091-48092, 48096-48099, 48101-48102, 48104-48110, 48115-48116, 48119-48123, 48126-48128, 48133-48134, 48136-48137, 48139, 48142, 48144, 48147-48148, 48150-48151, 48153-48154, 48157, 48160, 48162, 48164, 48166-48168, 48171-48175, 48177-48178, 48181, 48185, 48188, 48190, 48192-48194, 48198, 48200-48207, 48209-48211, 48213, 48215-48217, 48221, 48224-48231, 48238-48242, 48244-48249, 48251-48252, 48254, 48256-48258, 48260, 48262-48265, 48267-48268, 48270-48273, 48276-48282, 48285-48290, 48292-48308, 48310-48311, 48313-48321, 48323-48324, 48327-48330, 48333-48336, 48339-48347, 48349, 48351-48359, 48361, 48363-48365, 48368, 48371-48375, 48377-48382, 48385, 48388-48390, 48392-48399, 48404-48405, 48409-48416, 48418, 48421, 48424, 48427-48431, 48433-48438, 48440-48441, 48444-48445, 48447, 48451-48458, 48461, 48463, 48466, 48468, 48473, 48476-48477, 48480-48481, 48483-48484, 48486-48488, 48491-48492, 48496, 48498, 48502, 48504, 48506-48511, 48514-48518, 48521-48522, 48524-48531, 48533, 48535-48545, 48547-48552, 48554-48559, 48561-48563, 48565, 48567-48570, 48572-48574, 48576-48578, 48580-48587, 48589-48590, 48594, 48597-48598, 48602, 48607-48608, 48611-48612, 48614-48623, 48625, 48627-48636, 48642-48644, 48649-48655, 48658, 48666-48667, 48669-48670, 48672-48677, 48679-48681, 48683-48686, 48689, 48691-48692, 48694-48695, 48702, 48704-48708, 48710, 48712-48718, 48720-48722, 48727-48728, 48730-48732, 48738, 48740-48743, 48747-48753, 48756-48758, 48760-48768, 48773, 48775-48776, 48779-48783, 48785, 48790-48794, 48796, 48799-48803, 48806-48809, 48812-48813, 48815-48817, 48820-48822, 48824-48831, 48833-48834, 48836, 48840, 48843-48844, 48848-48852, 48854-48855, 48858-48860, 48862-48864, 48866-48871, 48873-48881, 48883-48899, 48901, 48904-48908, 48911, 48914-48918, 48920, 48922-48924, 48926-48927, 48929, 48931-48933, 48935-48937, 48939-48943, 48946-48949, 48951-48952, 48954, 48957, 48959, 48961-48969, 48973-48975, 48977-48981, 48985, 48988-48993, 48995-49000, 49002, 49004-49007, 49010, 49012, 49014-49015, 49017-49018, 49021-49023, 49025-49026, 49030-49031, 49033, 49035, 49037-49038, 49041-49043, 49045, 49047-49051, 49054-49055, 49057, 49059-49060, 49062-49063, 49067-49068, 49070, 49072-49073, 49076-49081, 49084-49087, 49089-49090, 49094-49095, 49097-49098, 49100-49104, 49106-49109, 49114-49125, 49127, 49129-49145, 49148, 49150, 49152-49153, 49155-49159, 49162-49170, 49172, 49175-49180, 49182, 49184, 49189, 49191, 49198, 49201-49210, 49213, 49215, 49218-49221, 49223, 49225-49229, 49231-49233, 49235, 49237-49238, 49241-49246, 49249-49251, 49253-49256, 49258-49259, 49262-49268, 49272, 49275, 49278-49287, 49289, 49292-49299, 49301-49302, 49305, 49308-49311, 49313-49315, 49318-49320, 49323-49330, 49332, 49334-49336, 49338-49339, 49341-49342, 49345-49347, 49349-49350, 49352, 49354-49355, 49357-49359, 49365, 49367, 49371-49373, 49375, 49377-49380, 49384-49387, 49390-49399, 49402-49406, 49408, 49411-49413, 49420-49425, 49428-49434, 49436-49437, 49439-49443, 49445-49448, 49450, 49452-49454, 49456-49458, 49460-49461, 49463-49469, 49471-49472, 49474-49479, 49481, 49483-49485, 49489-49490, 49492-49493, 49497-49498, 49501-49514, 49516-49517, 49519-49520, 49525-49530, 49532, 49535-49536, 49538-49545, 49548-49549, 49555-49558, 49560-49561, 49563-49566, 49568-49572, 49574-49580, 49582, 49584-49585, 49587-49592, 49594, 49596, 49599, 49601-49603, 49605, 49607, 49609-49610, 49612-49613, 49616, 49618-49623, 49625-49626, 49628, 49631, 49638, 49642, 49644-49645, 49647, 49653, 49656-49657, 49659-49662, 49665, 49668, 49671-49674, 49677-49678, 49680-49681, 49683-49686, 49688-49690, 49692-49693, 49695, 49697, 49699-49700, 49709-49710, 49715, 49718-49734, 49736-49740, 49742-49744, 49747-49753, 49757, 49759-49763, 49765-49766, 49769-49771, 49773-49776, 49780-49784, 49786-49791, 49795, 49797-49801, 49803-49804, 49806-49808, 49811, 49814-49819, 49823, 49825-49826, 49828-49833, 49836, 49839-49844, 49846-49850, 49852-49856, 49859-49864, 49867-49871, 49874-49875, 49879-49882, 49886-49887, 49889-49891, 49893, 49895, 49899, 49902, 49904, 49909-49913, 49915, 49917, 49920-49923, 49925, 49928, 49931, 49933-49943, 49945-49946, 49949, 49951-49952, 49954-49957, 49959, 49963-49972, 49974-49975, 49978-49979, 49981-49983, 49986-49989, 49994, 49998-50003, 50005-50011, 50013-50015, 50018-50022, 50026, 50029, 50031, 50034-50039, 50041, 50043-50044, 50046-50052, 50054-50056, 50058, 50060-50062, 50067-50069, 50071-50077, 50079-50085, 50087, 50089-50094, 50096, 50099-50101, 50103, 50108, 50110, 50115-50117, 50119-50120, 50122-50124, 50127, 50130, 50133-50134, 50137, 50142-50151, 50153-50161, 50164, 50166-50167, 50170-50175, 50177-50180, 50182-50184, 50186-50188, 50191-50202, 50206-50209, 50211-50212, 50214-50219, 50223-50228, 50230-50234, 50237-50239, 50241, 50243-50247, 50253, 50255-50257, 50259-50263, 50265-50266, 50268, 50273-50279, 50281-50283, 50290-50294, 50296, 50299, 50301, 50304, 50307-50308, 50312-50314, 50316, 50318, 50320, 50322-50323, 50325, 50327, 50329-50331, 50334-50336, 50338, 50341-50361, 50364, 50369, 50371-50373, 50375-50379, 50381, 50383, 50388-50391, 50395-50398, 50401, 50403-50407, 50409-50412, 50414, 50416-50417, 50420-50428, 50433-50434, 50436, 50438-50449, 50453, 50456-50461, 50463, 50465-50466, 50468, 50470-50479, 50481-50482, 50485, 50488-50490, 50493, 50498, 50500, 50502, 50505-50507, 50511-50518, 50520-50526, 50530, 50532-50534, 50537, 50539, 50541, 50544, 50547-50548, 50551, 50553-50557, 50559, 50561-50563, 50567-50569, 50571-50573, 50575, 50579, 50581-50585, 50587-50588, 50590-50592, 50594, 50597-50599, 50601, 50603-50608, 50614-50619, 50621, 50623, 50626, 50628-50635, 50637-50638, 50641-50642, 50644-50647, 50651, 50653-50655, 50657-50660, 50663-50666, 50669, 50671-50678, 50681, 50683-50684, 50687, 50689-50690, 50693-50696, 50698, 50700-50704, 50706-50708, 50710-50714, 50718-50719, 50723-50726, 50730-50731, 50733-50737, 50741, 50743-50745, 50747-50749, 50751, 50754-50762, 50764-50769, 50771-50773, 50775, 50777-50779, 50783-50786, 50791-50794, 50796, 50798, 50800-50803, 50806, 50808, 50811, 50814, 50816-50818, 50822-50825, 50827-50829, 50833, 50835, 50838-50840, 50843-50846, 50849-50859, 50861-50864, 50867-50868, 50870-50872, 50875-50880, 50883, 50887, 50890-50891, 50893, 50895, 50897-50898, 50900-50901, 50903, 50906, 50908-50921, 50924-50931, 50937, 50939, 50942-50948, 50951-50954, 50956, 50958, 50962-50964, 50966-50967, 50969-50973, 50975, 50977, 50979, 50984-50990, 50992-50994, 50996-51000, 51002-51011, 51013-51015, 51017-51019, 51021-51022, 51024-51027, 51031-51033, 51035-51040, 51042, 51045-51049, 51051-51056, 51058, 51060-51061, 51063-51064, 51066-51069, 51071-51072, 51074, 51078-51079, 51084-51085, 51088-51095, 51098, 51100-51111, 51119-51122, 51127-51142, 51144-51149, 51151-51152, 51157-51159, 51161, 51163-51165, 51168, 51170-51174, 51177, 51180-51181, 51184, 51186, 51190-51199, 51201-51202, 51204, 51206, 51209, 51211, 51213-51215, 51218-51219, 51221, 51223-51226, 51228-51229, 51231-51232, 51234-51238, 51242, 51244-51245, 51247-51248, 51253, 51255-51257, 51259, 51267-51269, 51271-51273, 51277-51279, 51282, 51284-51287, 51291-51292, 51294-51303, 51306, 51308-51310, 51312, 51314-51315, 51318, 51320-51323, 51326-51329, 51331-51336, 51338, 51340, 51343, 51345-51348, 51350, 51352-51361, 51363-51368, 51370, 51374, 51376, 51378-51384, 51386, 51388-51390, 51392-51395, 51397, 51399, 51401-51402, 51404-51405, 51407, 51410-51411, 51413-51414, 51416-51417, 51420, 51422-51424, 51428, 51431, 51433-51434, 51436-51439, 51441-51444, 51449-51451, 51453-51457, 51459, 51461, 51464-51473, 51477-51478, 51480, 51484-51497, 51499-51500, 51502-51504, 51507-51508, 51510, 51512-51513, 51515-51521, 51525-51527, 51533, 51536-51539, 51541-51543, 51545-51546, 51550-51555, 51557, 51561, 51563, 51565-51566, 51568-51573, 51575-51577, 51579-51580, 51582-51583, 51585-51586, 51588, 51590, 51592-51597, 51599-51602, 51604, 51607-51608, 51611-51612, 51614, 51617, 51621-51622, 51626, 51628, 51631-51634, 51637-51639, 51641, 51643, 51645-51656, 51658-51663, 51665-51670, 51673-51674, 51676-51679, 51681-51684, 51686, 51688-51689, 51694-51702, 51704-51716, 51722-51730, 51732-51733, 51736-51737, 51739-51740, 51742, 51745-51754, 51758-51759, 51764-51765, 51768, 51771-51772, 51774, 51777-51779, 51782, 51784-51788, 51790, 51792, 51794, 51797-51798, 51800, 51802-51805, 51807-51809, 51813, 51815-51816, 51818, 51820-51825, 51831-51836, 51839, 51843, 51846-51847, 51849-51851, 51853-51855, 51857-51864, 51866, 51869-51873, 51876-51887, 51889-51892, 51894-51896, 51900-51903, 51905-51906, 51908-51911, 51919-51923, 51925-51929, 51931-51939, 51941-51944, 51947, 51950-51952, 51956, 51958-51960, 51962-51969, 51971-51978, 51982-51983, 51986, 51988, 51990, 51994-51995, 52003, 52005-52006, 52008, 52011-52014, 52016-52017, 52020, 52022-52024, 52027-52030, 52032-52033, 52035, 52037, 52039-52045, 52049-52051, 52053-52060, 52062-52065, 52070-52071, 52074-52082, 52084-52085, 52088-52089, 52092-52094, 52096, 52099-52102, 52104, 52108-52112, 52114-52117, 52120, 52123, 52125, 52127-52132, 52134, 52136, 52138-52141, 52143-52148, 52154-52156, 52158-52160, 52163, 52166, 52169-52173, 52175-52179, 52181-52186, 52189, 52192-52194, 52196-52204, 52206-52209, 52212-52216, 52218, 52221-52223, 52225-52226, 52229, 52232, 52234, 52237, 52240-52242, 52244, 52246-52250, 52253-52254, 52256-52257, 52259-52260, 52264-52269, 52272, 52274-52277, 52279-52281, 52284-52285, 52289-52290, 52292, 52294-52295, 52297, 52301, 52304-52308, 52310-52313, 52316-52318, 52321, 52326-52329, 52331-52335, 52337-52338, 52340-52344, 52346, 52348, 52351-52353, 52355, 52357, 52360-52361, 52364-52365, 52367-52370, 52372, 52375-52381, 52384-52385, 52387, 52389-52390, 52392-52394, 52396, 52398-52399, 52401-52404, 52406-52407, 52409-52412, 52414-52418, 52422-52429, 52431-52435, 52437, 52439-52446, 52449-52451, 52454, 52456-52464, 52469, 52471, 52475-52479, 52481-52482, 52484-52486, 52492-52493, 52495, 52498-52499, 52504-52505, 52508, 52511, 52514-52516, 52519, 52523-52524, 52526-52527, 52531-52536, 52538-52539, 52541-52544, 52546-52547, 52549, 52551-52553, 52555-52566, 52569, 52571-52572, 52574-52575, 52577-52588, 52590-52605, 52607-52613, 52615-52620, 52622-52623, 52625-52629, 52641, 52643-52651, 52655-52658, 52660, 52667, 52669-52672, 52674, 52676-52678, 52682, 52684-52687, 52689, 52691, 52693, 52695, 52699, 52701-52714, 52716, 52719, 52725-52729, 52731-52732, 52734, 52746, 52749-52752, 52754-52756, 52759-52760, 52764, 52766, 52768-52773, 52775, 52777-52779, 52781, 52784, 52786-52788, 52791-52793, 52796, 52799, 52801-52806, 52808, 52810-52812, 52815-52822, 52836, 52841, 52845, 52847, 52849-52852, 52855-52862, 52864-52871, 52873-52881, 52883-52884, 52888-52889, 52891-52892, 52894, 52896, 52898, 52902, 52905, 52907, 52910-52914, 52917-52921, 52923, 52925-52926, 52928, 52931-52933, 52935, 52937-52941, 52946, 52948, 52950-52959, 52962-52963, 52966, 52968, 52970, 52972-52973, 52979, 52984, 52987, 52990-52993, 52995-52997, 52999-53001, 53003, 53005, 53008-53009, 53011-53016, 53018, 53020-53025, 53027-53028, 53030, 53036-53037, 53039, 53043, 53047, 53050, 53052-53056, 53059-53060, 53062-53065, 53067, 53078-53081, 53083-53085, 53087, 53089-53090, 53092-53095, 53097-53098, 53100-53103, 53105-53107, 53111-53112, 53115-53116, 53120-53124, 53127-53130, 53132-53134, 53136-53139, 53141, 53143, 53145-53146, 53148-53152, 53154-53159, 53162, 53164, 53166-53173, 53175-53176, 53178-53180, 53183, 53186, 53189-53190, 53192-53195, 53197, 53200-53206, 53208-53209, 53211-53213, 53217-53223, 53226, 53229, 53232-53234, 53236, 53238, 53240, 53244-53246, 53248-53252, 53254-53257, 53259, 53262-53264, 53268-53270, 53272, 53274, 53277, 53279-53286, 53288-53289, 53292-53294, 53297, 53305, 53307, 53309, 53315-53318, 53320-53321, 53326-53327, 53329-53338, 53341, 53343-53344, 53349, 53351-53352, 53354-53362, 53364, 53367, 53369-53373, 53375-53380, 53384, 53387-53388, 53391-53394, 53396, 53401, 53403, 53406, 53408-53409, 53411-53417, 53422, 53424, 53426, 53429-53430, 53432, 53437, 53439, 53441, 53444-53449, 53451-53456, 53458-53459, 53463-53470, 53472-53476, 53478-53480, 53482-53487, 53489, 53492-53493, 53495, 53498-53499, 53502, 53504-53505, 53507-53516, 53518-53519, 53521-53522, 53524-53525, 53527-53543, 53546-53558, 53560-53566, 53568, 53570-53575, 53578-53580, 53584-53585, 53587-53588, 53590-53598, 53600-53604, 53606, 53611-53613, 53615-53616, 53622-53628, 53630-53641, 53644, 53646, 53648, 53651, 53654-53655, 53657, 53659, 53661, 53663-53669, 53673-53675, 53677-53678, 53680, 53682-53685, 53688, 53692-53697, 53700-53701, 53715, 53721-53722, 53725-53729, 53732-53741, 53743, 53748-53749, 53752, 53756-53763, 53767, 53770, 53774-53778, 53780-53783, 53785, 53787, 53789, 53792-53795, 53799-53804, 53806-53808, 53810-53811, 53816-53818, 53823, 53825-53826, 53828, 53832-53836, 53839, 53841-53853, 53855-53871, 53873, 53875, 53877-53879, 53881-53882, 53884-53885, 53887, 53889, 53892-53893, 53895-53898, 53900-53901, 53905-53908, 53910, 53920, 53922-53923, 53927-53934, 53936-53937, 53939-53940, 53942-53946, 53948, 53952-53954, 53956-53964, 53966, 53968-53969, 53972, 53974-53975, 53977-53978, 53983-53988, 53990-53993, 53995-53997, 53999-54003, 54005-54012, 54016-54019, 54025-54029, 54033-54036, 54038, 54041-54046, 54048-54059, 54062-54065, 54068-54075, 54077-54078, 54082-54083, 54085, 54089-54095, 54097-54100, 54102-54107, 54110-54111, 54113-54116, 54119, 54121-54125, 54129-54142, 54144, 54146-54147, 54150-54151, 54153, 54155-54166, 54168-54175, 54177-54178, 54181, 54190-54192, 54196-54200, 54202-54213, 54216-54217, 54219-54224, 54227-54246, 54251-54254, 54256, 54259-54260, 54262-54264, 54266-54267, 54269-54270, 54272, 54274, 54276, 54278-54282, 54285-54286, 54288, 54290, 54292, 54294-54295, 54297-54300, 54303, 54305-54307, 54309-54311, 54320, 54322-54324, 54326-54327, 54329-54330, 54333, 54335-54337, 54340, 54342, 54344, 54347-54349, 54352-54355, 54358-54360, 54363-54367, 54370-54374, 54378-54381, 54383, 54385-54392, 54399, 54406-54409, 54411-54413, 54415-54421, 54423-54425, 54428-54434, 54438, 54441, 54443, 54449-54450, 54452-54453, 54455-54460, 54463-54469, 54475-54476, 54479, 54481-54482, 54487, 54490-54492, 54495-54507, 54509-54513, 54515-54516, 54518-54519, 54521-54527, 54529-54530, 54532-54534, 54537, 54544, 54547-54548, 54550-54553, 54556-54565, 54571-54575, 54577-54582, 54586, 54590, 54592-54594, 54596-54597, 54599-54600, 54602, 54605-54606, 54608-54609, 54611-54613, 54619, 54621-54630, 54634-54640, 54642, 54644, 54646-54652, 54654-54656, 54658-54660, 54662-54667, 54670-54672, 54674-54684, 54686-54689, 54691, 54695, 54699-54713, 54715-54717, 54723-54729, 54731-54734, 54737-54754, 54756-54762, 54764-54766, 54768, 54774, 54777, 54779-54782, 54784-54785, 54787, 54789, 54792, 54794-54795, 54798-54802, 54805, 54809-54810, 54814-54817, 54819-54832, 54834-54849, 54856, 54858, 54860-54861, 54864-54866, 54868, 54870-54871, 54875, 54881-54885, 54887, 54889-54892, 54896-54897, 54899-54902, 54905-54906, 54908-54913, 54915-54916, 54919-54922, 54925-54927, 54930, 54936, 54938-54940, 54942-54950, 54952, 54954-54955, 54958, 54963-54964, 54966, 54969-54970, 54972, 54974-54976, 54980, 54983-54986, 54988-54990, 54992, 54994, 54996, 54998-54999, 55002-55005, 55008-55011, 55013-55018, 55020, 55023-55024, 55026-55027, 55029, 55031-55033, 55036-55037, 55039-55042, 55045, 55047-55048, 55052-55061, 55063-55066, 55068, 55070-55073, 55076, 55078-55079, 55081-55089, 55092, 55097-55099, 55101-55106, 55109-55111, 55114-55115, 55117, 55119, 55122, 55124, 55127-55128, 55130-55132, 55134, 55136-55138, 55141, 55145-55151, 55153, 55155-55161, 55163-55164, 55167-55169, 55171-55172, 55174-55176, 55178-55179, 55181-55186, 55190, 55192-55193, 55195, 55199, 55201-55207, 55211-55218, 55220, 55222-55223, 55226-55227, 55231, 55233, 55236-55237, 55240, 55242, 55244-55246, 55249, 55254, 55256-55260, 55263-55264, 55267-55268, 55271, 55273, 55275-55276, 55278, 55280-55281, 55285-55290, 55292-55296, 55298-55300, 55303, 55305-55316, 55318-55323, 55325-55332, 55335-55337, 55340, 55342, 55344-55346, 55348-55349, 55352, 55358-55359, 55361-55364, 55366-55370, 55373-55377, 55379, 55383-55385, 55388-55390, 55393-55395, 55397-55399, 55401-55402, 55404-55405, 55407-55408, 55410-55414, 55416, 55418-55422, 55424-55426, 55428, 55432, 55437-55439, 55441-55443, 55445-55448, 55453-55463, 55465, 55469-55474, 55476-55478, 55480-55481, 55483, 55485-55487, 55489-55492, 55494-55495, 55497-55500, 55502, 55504, 55506-55508, 55510-55513, 55516-55518, 55521-55530, 55532-55533, 55535-55537, 55540-55548, 55550, 55555, 55558, 55560-55561, 55563-55567, 55571-55572, 55574-55576, 55579-55580, 55582-55584, 55586-55587, 55591-55593, 55595-55597, 55599-55601, 55603, 55605, 55608-55609, 55612-55613, 55615-55617, 55619, 55621-55623, 55626, 55628, 55631, 55633-55637, 55639-55642, 55646, 55648, 55650-55653, 55655, 55657, 55659, 55661, 55663-55665, 55669, 55671-55672, 55674-55676, 55682, 55687-55688, 55691-55693, 55696, 55698-55701, 55703-55706, 55709-55710, 55712-55720, 55722, 55727, 55730-55731, 55734-55736, 55738-55741, 55743-55748, 55750-55754, 55756-55765, 55767-55773, 55775, 55778-55782, 55784-55786, 55790, 55796, 55798-55801, 55803-55810, 55812, 55814-55815, 55817, 55823, 55825, 55829-55835, 55838-55843, 55846, 55849, 55852, 55854, 55856-55862, 55864, 55866, 55868-55869, 55874, 55878, 55882, 55884-55887, 55889-55890, 55893-55900, 55903-55906, 55908-55909, 55911-55919, 55921-55925, 55928-55931, 55933-55937, 55939-55944, 55947-55949, 55951-55955, 55958, 55960-55970, 55972-55973, 55975-55976, 55978-55980, 55984, 55986-55990, 55993, 55996-56002, 56005-56006, 56009, 56011-56016, 56018, 56021-56024, 56026, 56028, 56030, 56032-56033, 56035-56044, 56046-56053, 56057, 56059, 56062, 56064, 56067-56068, 56070-56076, 56078, 56080, 56082, 56084, 56086, 56089, 56091-56092, 56094-56099, 56101-56107, 56109-56110, 56112, 56114, 56118-56120, 56123-56124, 56126, 56128-56130, 56132-56136, 56138-56140, 56142-56143, 56145-56151, 56153-56155, 56157-56159, 56161-56164, 56167, 56170, 56174, 56176, 56181-56183, 56185-56189, 56192-56194, 56196-56197, 56199-56204, 56207, 56210-56217, 56219-56221, 56226, 56228, 56230-56234, 56239-56240, 56244, 56250-56253, 56255-56256, 56258-56259, 56261, 56263-56265, 56268-56269, 56274-56275, 56281, 56283-56286, 56288, 56292-56293, 56295-56296, 56298, 56302-56303, 56305-56307, 56309-56312, 56317-56318, 56320, 56323-56325, 56327, 56329, 56332-56333, 56336, 56338, 56342, 56345-56352, 56355-56361, 56363-56367, 56369-56374, 56379-56380, 56382-56388, 56390-56391, 56393-56395, 56397-56408, 56410, 56412, 56415-56429, 56431-56433, 56436, 56438-56441, 56443-56447, 56450-56451, 56455-56457, 56459-56462, 56465-56473, 56475-56476, 56478-56479, 56482-56486, 56488-56494, 56496-56498, 56502, 56504-56505, 56508, 56511-56513, 56516-56517, 56519, 56521-56524, 56527-56529, 56531-56532, 56534, 56537-56538, 56540, 56542-56556, 56559-56560, 56562-56564, 56566-56569, 56579, 56582-56586, 56588-56589, 56591, 56593, 56595-56596, 56599-56601, 56603, 56605, 56607, 56609-56610, 56614-56615, 56617-56620, 56622, 56624-56625, 56629, 56631-56638, 56642-56645, 56647, 56649-56657, 56659, 56661-56662, 56665-56668, 56670-56674, 56677, 56680, 56682-56684, 56686-56687, 56691-56695, 56697, 56699, 56701, 56703-56706, 56708-56710, 56712-56717, 56720-56723, 56731-56732, 56736-56744, 56746, 56752-56758, 56760-56762, 56765-56766, 56769-56772, 56774, 56777-56780, 56782-56783, 56785-56786, 56789, 56793-56796, 56798-56800, 56803-56804, 56807, 56810, 56813-56815, 56817-56826, 56828-56831, 56835, 56837-56840, 56843, 56845, 56847, 56850-56852, 56854-56855, 56858, 56862, 56865-56866, 56869-56875, 56877-56879, 56882-56884, 56891, 56893, 56895-56901, 56905-56911, 56913-56915, 56919-56920, 56922, 56925-56928, 56931-56932, 56934-56936, 56938-56939, 56941-56950, 56953-56958, 56960, 56962, 56965-56966, 56969-56970, 56972-56974, 56977, 56979-56986, 56990-56992, 56994, 56996, 56998-57000, 57002-57003, 57008, 57010-57012, 57014-57019, 57021-57022, 57024-57027, 57029, 57031, 57033-57036, 57038-57040, 57043, 57045, 57047, 57049-57052, 57059, 57061-57064, 57066, 57068-57069, 57071-57073, 57075, 57079-57086, 57088-57090, 57092-57094, 57097-57101, 57104, 57107-57111, 57113-57114, 57116-57117, 57120, 57122, 57124, 57126-57127, 57129-57134, 57137, 57139-57141, 57143, 57145, 57147-57155, 57157-57159, 57161-57164, 57166-57169, 57171-57177, 57179-57180, 57182-57187, 57189, 57191-57192, 57194, 57196-57197, 57199-57203, 57205-57207, 57210, 57212, 57216-57224, 57227-57228, 57230, 57232-57235, 57238, 57241-57243, 57245, 57247-57248, 57251-57255, 57262-57266, 57268, 57270-57274, 57276, 57280, 57282, 57285, 57287, 57290, 57294, 57296-57297, 57301, 57305-57306, 57309-57310, 57312-57313, 57315, 57318, 57320-57321, 57324, 57326-57332, 57335-57346, 57349-57353, 57355, 57358-57362, 57364, 57367-57369, 57371-57374, 57376, 57379-57381, 57383-57387, 57390-57397, 57400, 57402, 57404-57409, 57413-57417, 57419-57423, 57425, 57427, 57429-57434, 57436-57438, 57440, 57442-57443, 57445-57446, 57448, 57450-57451, 57453, 57455-57456, 57459-57461, 57463, 57465-57470, 57472, 57474-57477, 57479-57481, 57488, 57490, 57492, 57494-57496, 57499-57504, 57506-57509, 57511-57515, 57517-57522, 57524-57525, 57527, 57529-57531, 57533-57535, 57537-57539, 57541, 57543-57548, 57550, 57553-57555, 57558, 57560, 57562-57566, 57571-57572, 57575-57577, 57580-57591, 57596, 57598-57599, 57603, 57607-57608, 57611, 57614-57616, 57618-57628, 57634, 57638, 57641-57642, 57644-57645, 57647, 57649, 57653-57658, 57660, 57662, 57666-57667, 57669, 57671, 57675-57677, 57680-57681, 57683, 57685-57690, 57692-57693, 57696-57699, 57701, 57703, 57708, 57710-57712, 57714-57718, 57720-57723, 57725, 57728, 57731-57732, 57734, 57736-57739, 57741-57744, 57746, 57749-57756, 57758-57760, 57766, 57770, 57773-57777, 57780-57781, 57783-57784, 57786-57795, 57798-57799, 57801-57806, 57808-57809, 57812, 57814-57815, 57817-57820, 57822-57824, 57826-57827, 57830, 57836-57838, 57840-57841, 57844, 57846, 57850, 57852-57854, 57856, 57859-57862, 57864-57872, 57874, 57876-57877, 57879-57880, 57882-57885, 57889-57905, 57909, 57912-57915, 57917-57919, 57922-57928, 57930-57943, 57945-57946, 57948, 57952-57953, 57955, 57961, 57963-57984, 57986, 57989-57991, 57994-57998, 58000-58003, 58006-58007, 58010-58015, 58018-58022, 58025-58028, 58030-58031, 58033, 58035-58042, 58044-58048, 58050-58059, 58062, 58064-58066, 58068-58074, 58081, 58083-58084, 58087, 58089-58096, 58098, 58107-58109, 58113-58114, 58117-58119, 58121-58122, 58124-58128, 58131-58133, 58136, 58138-58142, 58144-58146, 58150-58151, 58160, 58166, 58168, 58172, 58174-58179, 58181, 58187, 58190-58191, 58195, 58197-58198, 58201, 58203-58204, 58206-58208, 58211, 58217-58222, 58224, 58228-58229, 58231-58232, 58237, 58239-58240, 58245, 58249, 58252-58256, 58258-58262, 58264-58270, 58272-58274, 58276, 58278-58280, 58282, 58284-58288, 58291, 58293, 58295-58296, 58299, 58301, 58307, 58309-58311, 58313-58314, 58318, 58321-58324, 58326-58327, 58329, 58333, 58335-58339, 58341, 58344-58347, 58349, 58351-58353, 58357-58359, 58361-58362, 58364-58366, 58369-58371, 58373, 58375-58381, 58383-58389, 58392-58393, 58395, 58398-58399, 58401-58402, 58405-58406, 58408-58409, 58413, 58416, 58418-58419, 58422-58424, 58426-58428, 58430-58436, 58438, 58442-58449, 58453-58456, 58458-58463, 58466-58469, 58475, 58480-58483, 58486, 58488-58492, 58497-58498, 58500, 58502-58507, 58510-58513, 58516-58518, 58520-58524, 58526-58528, 58531-58534, 58543, 58547-58552, 58554-58555, 58558-58560, 58562-58564, 58569, 58571-58572, 58574-58580, 58584-58588, 58591, 58593, 58595, 58597-58600, 58602-58607, 58609-58611, 58613-58614, 58616-58621, 58623, 58627, 58630, 58633-58637, 58639-58640, 58648, 58650-58658, 58662-58664, 58666-58667, 58682, 58684-58685, 58687-58690, 58693-58696, 58703-58705, 58707-58708, 58710, 58712-58717, 58719-58720, 58723-58727, 58729, 58731, 58735-58737, 58740-58741, 58743, 58745-58746, 58748-58749, 58751-58758, 58762-58769, 58771-58774, 58776, 58781, 58788-58791, 58798-58804, 58806-58807, 58810, 58813-58817, 58819-58823, 58825, 58829-58830, 58835-58837, 58839, 58844-58847, 58850, 58855-58866, 58871, 58873, 58884, 58889, 58894, 58897, 58905, 58913, 58915-58916, 58922, 58926, 58930, 58936-58937, 58939-58942, 58946, 58950, 58952-58957, 58960-58961, 58963-58969, 58972, 58975, 58978-58979, 58982, 58984-58986, 58988-58989, 58992-58996, 58999-59003, 59005, 59007-59010, 59012, 59015-59019, 59025-59027, 59029-59033, 59035, 59037-59038, 59040, 59042-59043, 59046-59051, 59053-59057, 59059, 59061-59062, 59064, 59066, 59070-59075, 59077-59080, 59082-59089, 59091-59092, 59094-59096, 59099-59102, 59108, 59112-59113, 59115, 59118-59120, 59122-59131, 59134, 59136, 59138, 59141-59142, 59145-59167, 59170, 59172, 59174, 59176, 59178, 59180, 59183, 59189-59190, 59192, 59195-59196, 59198-59199, 59201-59202, 59204-59205, 59211-59213, 59215-59216, 59219, 59222-59225, 59227-59231, 59233-59237, 59239, 59241-59248, 59252, 59254-59258, 59260, 59263-59267, 59269-59274, 59276-59283, 59285, 59287-59293, 59298, 59302, 59304-59321, 59326, 59328-59331, 59333, 59336, 59341, 59344-59348, 59351-59354, 59359, 59362, 59364-59365, 59367-59377, 59379-59383, 59385-59387, 59389-59394, 59396-59397, 59400-59405, 59407, 59409, 59411-59414, 59416-59422, 59424-59427, 59429, 59431-59435, 59438, 59444-59448, 59450, 59452-59459, 59461, 59463-59464, 59469-59472, 59474, 59476, 59478, 59480-59482, 59484, 59488, 59490, 59493-59496, 59498, 59501-59503, 59505-59510, 59512-59519, 59522-59526, 59528-59533, 59536, 59539, 59541-59544, 59546, 59548-59550, 59552-59554, 59556-59557, 59559, 59562-59566, 59569, 59572-59573, 59575-59580, 59582, 59584, 59589, 59593, 59595, 59598, 59600, 59602-59603, 59606-59608, 59610-59620, 59624-59637, 59639-59645, 59648, 59652-59655, 59658, 59663-59665, 59670-59676, 59678-59680, 59682-59684, 59686-59687, 59690-59691, 59695, 59697-59702, 59706, 59709-59713, 59716, 59721-59724, 59726-59727, 59729-59730, 59732-59733, 59735-59739, 59741-59744, 59747-59750, 59752-59753, 59758, 59760-59763, 59765, 59767-59769, 59771-59777, 59781, 59785-59787, 59789, 59791-59795, 59800-59810, 59812-59813, 59815-59819, 59822, 59825, 59827-59829, 59832-59838, 59841, 59843, 59845, 59847, 59849-59850, 59852-59855, 59858-59868, 59870, 59874-59875, 59877-59882, 59893-59894, 59896-59898, 59901-59902, 59905, 59909-59910, 59912-59917, 59920-59927, 59929, 59931-59932, 59938, 59940-59945, 59947-59948, 59951-59962, 59964-59973, 59975, 59978, 59980, 59982-59984, 59987-59988, 59990-59994, 59996-59999, 60002, 60004-60012, 60015-60016, 60019-60022, 60026-60033, 60035-60043, 60047-60050, 60053, 60055-60062, 60064, 60066-60067, 60070-60072, 60077-60084, 60086-60087, 60089-60091, 60093-60098, 60101-60102, 60104, 60106-60116, 60118-60122, 60124-60126, 60128-60135, 60138, 60140-60145, 60150, 60153-60156, 60158-60168, 60171-60177, 60181, 60184, 60186-60192, 60194-60195, 60200-60206, 60208, 60212-60213, 60215, 60217-60222, 60224, 60226, 60228-60235, 60237, 60240-60241, 60243, 60246-60250, 60252-60256, 60259-60267, 60270, 60272-60273, 60275-60276, 60279-60280, 60283-60289, 60291-60292, 60294, 60298, 60303-60305, 60307-60312, 60314, 60317, 60320, 60322-60329, 60334-60337, 60339, 60342-60343, 60345-60346, 60350-60351, 60353, 60355-60357, 60359, 60361-60365, 60367-60368, 60370-60375, 60377-60378, 60380-60382, 60385-60389, 60392-60393, 60396, 60404-60406, 60408-60411, 60413-60416, 60419, 60421, 60423, 60426-60431, 60434-60439, 60443, 60448-60450, 60453-60457, 60459, 60461-60462, 60466-60467, 60469-60475, 60477, 60482, 60484-60486, 60489-60491, 60493-60496, 60498, 60500, 60502-60509, 60511, 60513-60530, 60533-60534, 60537-60538, 60540, 60543, 60546, 60548-60552, 60554-60555, 60557-60559, 60563, 60565, 60567-60568, 60571-60572, 60574-60577, 60579, 60581, 60584, 60588-60589, 60591, 60595, 60599, 60601-60602, 60604, 60606-60611, 60613, 60615-60617, 60619, 60622-60623, 60625, 60632-60637, 60642-60648, 60650, 60652-60655, 60657, 60660-60661, 60664, 60667-60671, 60673-60676, 60684-60690, 60692-60693, 60695, 60698-60700, 60702-60703, 60705-60721, 60723-60724, 60726, 60728, 60730, 60732-60740, 60745-60747, 60749-60750, 60752-60758, 60761-60763, 60765-60768, 60770-60772, 60774, 60776-60778, 60781-60782, 60784, 60789-60794, 60796-60801, 60804-60810, 60812-60813, 60815-60822, 60824, 60827-60828, 60830, 60832-60838, 60840, 60842-60856, 60859-60869, 60871-60878, 60881-60882, 60884, 60888-60906, 60910, 60912-60913, 60915, 60918-60919, 60924, 60926-60929, 60932-60933, 60938-60940, 60943, 60945-60964, 60968-60971, 60975, 60978, 60980-60983, 60987-60988, 60990, 60995, 60997-60999, 61001, 61003-61008, 61014-61021, 61024-61025, 61027, 61029, 61032, 61034-61035, 61037-61042, 61047-61050, 61052, 61054-61058, 61060-61063, 61066, 61074-61078, 61080-61083, 61085-61086, 61089-61095, 61097, 61099-61100, 61103-61105, 61111-61115, 61117-61121, 61123-61124, 61127-61134, 61136, 61138-61141, 61143, 61145-61146, 61149, 61151-61152, 61155, 61157-61161, 61167-61172, 61174-61178, 61182-61184, 61186-61190, 61193-61199, 61201, 61203-61206, 61208-61209, 61212-61220, 61223-61225, 61233, 61236, 61245, 61247-61248, 61251, 61253, 61256-61261, 61263-61264, 61266-61268, 61270-61281, 61284, 61286, 61293, 61295, 61297-61298, 61302, 61305-61313, 61317-61319, 61321-61327, 61331-61333, 61335-61337, 61339, 61341-61345, 61347-61349, 61351-61354, 61357-61361, 61363-61364, 61367-61368, 61372-61381, 61383, 61385-61387, 61391-61392, 61394-61397, 61407-61408, 61415, 61422-61430, 61432-61434, 61438, 61443, 61445-61449, 61451, 61454-61463, 61465-61471, 61473, 61475-61478, 61480-61484, 61489-61493, 61495, 61497-61499, 61502-61506, 61508-61513, 61515-61521, 61526-61528, 61531-61535, 61538-61539, 61541-61543, 61545-61550, 61554-61555, 61557, 61559-61567, 61569, 61571-61572, 61575-61582, 61585, 61587-61593, 61596, 61598-61601, 61604, 61606-61607, 61609-61611, 61614-61617, 61619, 61621-61625, 61627-61628, 61630-61632, 61634, 61636-61637, 61639-61641, 61643-61644, 61646-61648, 61651, 61654, 61659-61660, 61663-61666, 61668-61670, 61675-61678, 61680, 61682-61683, 61687-61690, 61692, 61695, 61697-61698, 61700, 61704, 61711, 61714, 61716, 61718, 61720, 61725, 61727-61728, 61731-61732, 61735, 61738-61742, 61744-61746, 61748-61749, 61751, 61753-61754, 61757-61760, 61763, 61765, 61767, 61769, 61772-61775, 61777, 61779, 61781-61782, 61784-61785, 61788, 61795, 61797-61799, 61801-61802, 61804-61808, 61810-61816, 61818, 61820, 61823, 61825, 61827, 61829-61830, 61833, 61846-61852, 61854-61855, 61857-61859, 61866-61867, 61870, 61877, 61880, 61883-61892, 61895-61898, 61900, 61905, 61907, 61911, 61914, 61917-61920, 61922, 61925, 61928-61942, 61944-61947, 61950-61953, 61955, 61957-61959, 61962, 61966-61969, 61971, 61975-61976, 61978-61983, 61987-61988, 61993-61997, 61999-62007, 62009, 62011-62013, 62015-62017, 62019, 62024, 62028, 62030-62033, 62035, 62038, 62046, 62048-62049, 62051, 62058, 62061-62062, 62069-62076, 62078-62082, 62086, 62093-62095, 62097-62102, 62104-62105, 62107-62109, 62111, 62114, 62116, 62119-62124, 62126-62130, 62132-62133, 62135, 62137, 62140-62145, 62147-62151, 62153-62154, 62160-62166, 62168-62169, 62174-62178, 62180, 62184, 62186, 62188, 62191, 62195, 62197-62198, 62200, 62202-62208

[0215] The foregoing written specification is considered to be sufficient to enable one skilled in the art to practice the invention. The present invention is not to be limited in scope by examples provided, since the examples are intended as a single illustration of one aspect of the invention and other functionally equivalent embodiments are within the scope of the invention. Various modifications of the invention in addition to those shown and described herein will become apparent to those skilled in the art from the foregoing description and fall within the scope of the appended claims. The advantages and objects of the invention are not necessarily encompassed by each embodiment of the invention.

The application's sequence listing, which the Patent Office published only in electronic form, follows.

SEQUENCE LISTING (62226 sequences)

SEQ ID NO: 1 - DNA, 91164 bp, Homo sapiens
tgtaaaataatttgggatgggaagcgaagcttaccttattcaattgaagagttcaggggaactcaaagttgtcagaatgcaattatccctgctgaaatttggtcaggccaacatctgacacttccaaggaatgctgaaggcttttttaatgaacatgaggcttccagattggatttcacctcaattcaaggcataaaacctgcactctgagaatatagagttcagagatgttaattagttcactactgtcaggttcacaattgcccttctagggatcaatagatttaatgccttcatttcacagaagaaaactgagatctggaaaacatcatgcaataaagaaatgagttagtaactttgcttttgtgcactcttttatgttcctaaatccatgggttcctcaattcaattcaattcaacaactacttattggttcctggtttgcaacaggccccttgctgaagtcttggtacagagatgaaggatacctggtttctgctttctgacaattgctactctgggtggagggattgatatggacattagtaatttttcagaaggcagaatgtataatgagctaaagaacacttacagggcgattggaatatgccagaaggaaagagtccctctctggaggaaactgggagagatccctgggggaggtctgtctttatgtgtttccagaaccccaccatagcttccttctgggtttgtcctcttggtcagggtctctgctctgccatttctgagacctaaatcttagtcaaaatttaagataagtctcaaattcattctttcaaaatttgctgaattttggcttggcagtaggggtggatccaggttttgtgagagctgaagtatatacaatttggggggagcctctttaagaaaagaatacactgttacagatacaactgtaggtccaaacacaaatctcgcaaatatttatttagaataagaaaagaggccaaacgtggtggctcacacctgtaatcctaacaattttggagcctagtcgggaggatcacttgagcctaggagttcgagattagcctgggcaacatggtgagacccccatctctacaaaaaataaaaaaaaaaaaaaaaaacacaattagccaggtgttgtggtgtgttccaatagacccagatacttgggaggctgaggtgggaggatcacttgagccttgggaggttgaagctgcagtgagccatgatcttgccactgcactctaacctgggtgacagagctagaccaagtctcaaaaagaaaaaaaaaaaagacaagaaaagaaatcacaaaaaattgttgtagacttagaggttacgtctctttcttcttcagtctctttgtcaatctgcaagaaaggcttacatagaaatacttcctgaatgctccctggcttctaaccctccaccccaccctcaatactctgcagctcctggacactcctatctcttcaggagtctgtgcaagtgagatgtttcattagcttcacggtaaagctgcctttgcttgggcagatgactggctcaatgtcacatagtcagtaaagtcgtcaagccaggactgaaactagggtcgttttagagaaacgagtatgcattttggatcacatagacctggatccaatcctagcccaggcactaactacctgtgtgactttatgaaaatcatttctcagtttcactttctttctctcttatatagggatgataataataagctcacaggccaggtgcggtggttcacgcctgtaatcccaacactttgggaggccaagctaggtggatcacctgaggctaggagtttgagaccagcctggccaatatggcaaaaccccgtgtctactaaaaatacaaaaattagtcgggcgtggtggttggtgcctgtaatcccagctactcaggaggctgagggaggagaatcacttgaacctgggaggcgaaggctgcaatgagccgagatcgtgcctttgcactccagcctgtgcaacaagagcgaaactccatctaaaataaaataaaataaaataaaataaaataaaataaaataaaataaaataaaataataaaataaaaggctcacagggctgcaaagtacctgaattgcctaccaccactcctgacttgaaatagtgctcaagaaattgttaactgtcacaaagattacttcttttccccagtaagcatctcttcttccttgataatagaattaacgtactaggcacatgcatgtcaagttcacatttcccaccctatgtaggagctagatttggccttatgactaagttttgggcaacaatgtataagcaagagcaatttgtccaacttctgagaagtgtccttaaagtaatagggtgcatccttcccaaccagtcttctttcctgatagtgaagaagcagcagtcatgttataccatgagacgacatgcagaataaaactacatacagcagaagatagacagaagacagaaagagcttgggtctctgacactatagaacatcatatggctccagacctacttgtaatttacatggaagtcaaatttctaacacatttaatccactgttagtttagatctggaaggacttgtaaccaaaactagttctaaaattttttaaatcacatgctttttttcactttgctgttctgtttccagtttgtaatgtttttgcctgtgttaaccttgccaggtgtaactggaaatttaaaggatatcgagtccttaaactgaaatgccataacttgaaaaagccaatggtgagattttagccttctggcagaccgaggagggctgcttgtttggaaggggcatttcatccaactccactggcagtcataggcaagatgacctggtttcatcatgattatcagcagcagcagtggcatcactattgcagtgagagtggttaccatttataggatgctatctgcctagcaataaaatatctaattaacacattaagtcctcacaaaactccacacagcaggtgtgattatccctattttacagataaggaaagtgagactcagagatgtcaaattatttgtctgaagaaaccaagtgacttgttaatggcagagcttacctgaatccaaatctcagtccaaaccccaatcccttcataatggcaccttactttctccgtgagcacaaaacaagacctggtaagaatgagcctgtacagaattaatgtggtcacaaatgtctagtaaatcagttcagaaacttttattacatcattgtaacacgttaacaagcactgtaacaaaacttagtggcttactcaacaaccatattatagctgatgaataagaattctggcaggtcttggctaggcaattctttcatttcacatggcactgactggagtcacttagtgaccttcagctggtggctggtctggtctggagtgtccaagtgagttgtactcacatgcccagcatctcagcagggcaaagtggaaggctgggctcagttgggcctttcactctctccatgtaatctcatcactgcttcacattgcatctccagcagggtagttggactttttacatggtggtccagggctccaagagcaggcattccatgacacaggaagagtaagtgaagagtctcctaaggcttggaaccaggaaactagaagtgtaacttttgccttattctattggtcaaagcagtcactgagcccacccgaaagcaggggaggagcagatacaaccccatttcttgatgaaagaactatcaaagaatttgcagtcaactgcaatccctcccaatactaaacttgttgaaggaagtttcacagaaattggaaggcagataattgggccatttgaaatctgtatttgtttgctgtagctgccaaaacaaaaagccacacacttgatgtcaataacagaaactcactttctcacagttctggagactggaagtccaagatcaaggtgccaaccaggttgattttttctgaggcctctcttcttggcttgcagatggatgtcctcttgctgtgtcctcacatggtctttcctctgtgcgtgtgcatccctggtgtctctctcttcttctacttttttttttttgagacagagttttactctcgttgcccaggctggagtacaatggcacaatctcggctcaccgcaacctcaagcaattctcctgcctcagcctcccaagtagctgggattacaggcatgtgccaccacgcccagctaattttgtatttttagtagagatggagtttctccatgttggtcaggctggtctcgaactcccgacctcaggtgatccgcccgcctcggcatcccaaagtgctgggattacaggcgtgagccactgtgcctggccagtttctctcttcttataaaaaaattaggtatattggattggagccccaccctaatgcctcattttaagttaatcacctctttaaagacccagctcccaatacggttactttctgaggtactggaggttgagacttcaatatattaattcagagaggacacaattcaacccacaacaaatgtcaaatctaaggccactatataagtggaaaaactgaggcccagagaaagaaaatggtttgccagcgtcagacgatccagcttgtaacacagtcagcatcaatgctctttccctcccagcccccttccaacacatcagatgattccaagagatgtcctgtcttacaggaggtaggaaatagagtacagagacagggaacaccaagaaaggcccagcattagggccagagattcctctttttctcttgaaatttcaggcttctcccaattgtctttattccaagtcactgggttcataggcttctcaacaggcccagatctctggactgcccattccttttcccatttcttggctgacatttctggcattcaggtcactatttagattctgaatcacagtaatattggagaatatgatgtccttgtttctgccttaacatagatctgtcaagactttgggaacatctccacagtgatctgcacactcaggcccattctgggactttgagtcatcgcattagtgccccctaatttgcagtgtataccccatcttcgatttgctgcttgtagatttcaagaataacctgcatcttagaagcgaattggcctaggttctgtcgaggcctcttcaaggatgcatctgctaccttctaggatggaggtgggggaaaaggaggctccagaagtggtttaagcctccccagaacatacggcaattggtgatcaccattgttcttcagtctctccttgcattgcaatctatgctgctgtgctggataaagttagaaaacaagtcttcccagagataaacagaagcagtttgattctaattcatataggaaaattatattaagtttctattacatagcagtcaaagtattgggagagagggaagcagtatagttaagtgagactggcttgtcccaatactgtaacacaagcaaactgcaacaaaagcaaaaatgtatgtattcagaaaggaagaaagcaagaggggtaaatatggtccagtgcttaaaagcatgaactttagatctgaaaatcctgaattttaattcctcctctactacttacaagcagtgtgactatggaaaagttgcttaacccacctaaagttagttaaccaactttcctacattttggggaagtttgggtcaactacctaaagcagtggacatagagcaactcccctcaaaggctgtccaagtaaaaagacacagagctgaatatcaattttgacagaggaccagagtagtgagctaactcatggaataattgacattttccacatagctcactggtgaattttcagtttcccgaaagcatatatgctccagtaccatacacgtaaaatctgtatgattatcaactctatgagctttatattcccctgctgtaaaattatggggtagcccaggatggtcggcaagtcctttcatctctgagattcagggatcaaatgaagatgttgaggtctcatatgcgaagtcatggacagtgcttttctaccaactgaaaagagaatcagccctggcacagtggctcatgcctgtaatcccagcagtttgagaggctgaggcaggctgatcatttgagtgccagagttcaagaccagactgggcaacacggcgaaaccctgtctctacaaaaaatgtaaaaatgatccgggtgtagtggcatgcacctgtgttcccagctactcgggaggttgaggtgggagaattgttggagctcaggaagcagaggttgcagtgagccaagatcgagccactgaactttagcctgggtgacacagcaagaccctgtctctaaaaataaataaataaaataaaaagagaatgttttccaggattgatgaagaggaaaaagtaatttagagggaaaaccctgcatattataactatttacatttctttgctgaattgatggacaaaatgccattttgggatgaagaggaagcagagatgtgatgtgttacagaagcagaacccttgagcttggggaatgttggtaaagttcaccatatgccttgagtgcagggcttctataggattaataaatgcctgtttgaaaatgttctcaatgaaaaacgacataagatcccctctgcctcctcattttctctctctcacttatttcctgatcccaatctagtgtttacccctccttttgcgagtagtggagttctgccagtaggaacactgctaactgagggcctttagaaaagctagagccattcttctggccttcattccttgccagaatccttctactcttgtttccataaggcactcttgtctcatcctattacttccactacttttagaatgatatcacctcagtgaggtaccatcttttctctccttacaaaagaaaacagacctagtttccttaacctttcagcagaagcaaattccccaaatccctctgtcattctggttgccttctgctgtgctttctctagttccaaaatatcctatttatagaaagaaacccagaatgagctcaggactcagaatatgacctaaccaatcctctttacatgactagaataattttccctgacttttccattgtgcaatgtgcccaatatattccaaatggattctcttttcttttactccaataggtacaaaatgataaatgttcaaactatagccaatgttactgataataagaggttgatgtccactgtgcttaagaactttctagaattaatgggttcaggagcaaattagagtctgtggtttgtgtaacattagagttaaaggaacaggtcttttccttgaattattttttgttatatagcattcacttcagttactaatgaagtgtattaatgaagccataatgcaaatgaaaccataggctggggcagcaagctttagtattttgctgtgcaaaatgtggcacaacttcatatcacctgggaatctgttgaaaatgccaactgttgatgctgtccccagacttagaatctgctttctaaagagttgcccaggagattcatgtgcacattaaattataagaagcacagtttagcatctgtgaaagtttccttccagatgttctaggcagattagatgtcaagcacaccttggtaggccctatcatgatataaaattggctctttttactaattttcacttgcctttccatgatcctaagttttgtgactccttggagtttttatttctcattttatccaattcctaatatgaacttacatttagttaagtacatcttgcaagtcctgacctgacatgctcttgacccatcttaatctccctgtcaacttttcatattaacaatgtcacttctctcttacttgctacccatacttcctcttattcatctcttttctgtaagatggtttagaaagagtcattcagttcttcctcagtattccatgtggtcttgcttcagcctcattatagggttgtctggtgttctgaaattgagttaagtcatgtccagatcttctgtctcatgcttgcttgtcaggctcagaaatgcacagaggttattgcaaactaaatcatgactttcccaaggctttctcttgcttacttctttttgaagttttgattgtttcctttataactaggtttggtagattgaggattctttgagttctttttaaatatgagctcaataccaggttcttggcaatcattgcctattcttgctttcagaaggctttccaaattgtgtgtcgtgattctttgcctctccttctattacctgtggagaaccattagagatcaggaagtgactaagagagccaatctttcttcctacctggtcagaagctcttcttatatcataaacagaaggcttttgctacctgttttttgttttttaggctccaagatagcaattatatcaccatcaggagcttctctgtgactactcttctgcattgattgtaacaagtgatcctgaggtaatgaaggggaaggcactgttgacctctcagctattattaaccaagcactctttaacttctgagatactttaggtagagaattgttaacatgtggatcaccagtcccatcagagtccctggcacagaataagtactgaaaaggaaggagaagtaagagtgggaaggaaggatggaaataatctatccaactccaggtgagatggagagcctggaaattaactacaaccaaatagatttggaaagacaagttgggagaaaagaatggaagtactatctcatctttgtcttccttgatatatagtaaggaatacacaaaccatcctattaaaagtgacttactgaatttccttttagaaataaagacagtggactttgtcttaagaggtactccaattatttcttagttttctaagaaaaaggagttctctttcatttctgactttgtagactcctgctttgttacccatctcccaccaattccaagactacacatctactgagtgaagtttttgtgcctcctaatactgatgagcctcgtattaatttttgaacctatcttcataaagatgtgggcaaagaacaagctttataactgtggcataggtagaaaactgtgaatattaaacagctcatctataaggagtgcaatacccatattttgaaagcaaaaatccttccttctaggttgtattaatacattttgctttaagtttggtcatgttgttaggtagtgatccttaaggaataagatttgttcactattcagtctgaaatgttcttgccattactaaatataaatggggtcaaatgagccagagaagtgtgatattcatatcacagctgattggggttgtatgaaaaaataagataaccccaggaataagtgctactgagatgaaaattgtgacacatacagtgcttggcatctatcttaacaaatgaaattatggcaatctttacttacattagacactggatttctgcagatggaaaaaaattatgtaagtgagtggatggagataaaaggttggagagttgatagtgcaccaagagaagagaattgtctatcagatcactgagaaatccaaagtgggaataggtatatatagatatatggcaaacaccatatcttcaccactctccctagctccctatatcaacccttattatttagcaactcttgtccatcattttggtccctgagttggaggttttagtaatggttccaagaaataagagcactggttaaacatatttcttgggaaatatcttcagtacaatcatgtgtctaaatgatttcaaactaatcagtcattcatgttctgaatcctcaggcacctacaccaacaattcagggtatcccactgtaagatataattttcagaataaagatccagcagaggagtagctgatagtttctatacagaccacaaactgttgacaaaagagtcagaaaaatatatcacattgatggcaatggggaataatatgttcatatacagtggtcatctccttatgtcttttcaagattgcagatctgtgctagtcattgaatttgtcagtaggcaaggaaagttattaacagcattatggattccattctcaaaaaaccagttttgtccacaaagcctgtaccccaagacctctgagaatggtatgtaccagctgtcccagtcttagggcagcatctgctggctaattcatggatggacaaaaagtggcagtttgtgggcaatttgagcagtcctttcatttggcgagaactgttgtgttgatgactgtgagggtttctgaaatcctttcataaggacccatctcaggtctccaggagcctggcaaatctagaactactcctaatgagaaccaggaagcttttgtatacagatattttatctggagcctaagataagcctgtttgactttggaaacatttctagagaagcatgaactcaacactagacttactgctaataataataacccagtaccaatgggggctgcaatgaacagaggtccatgcacataattgggaagtaaaacttattttccataaggaaggcatttctgggatgggagagggaggaccttgaagcagccactgaatgcttatgttctgttgcttctaatcatcctatcgtgtaagtaagatttttctacataagcaagcaagaatgatattcaaacaaagcacttttgactggaataaagaaactggaaattggaaagggctgggtggtctgaaacttaagagctatccaccatcttctgcagcatcgctgtgcctcatccctgcagtcaatagcgccacggccagggcctgtgacgccgttggtgggctccccttggtgggaactcagagcgagtaaaatcatggtgtcagtgccaaaacgacgaaacctgaaatgcgtctggggacttcccagggcactagcgctcctcagagcgacggacatctccataacaactggtctacattcatccctggttcttctgctctgctgtgctagcgatggctgagggtaggcaaagggcagcttcagtggaaagataccttgcgttagcgcctccctaggctgggggacgttgccaaagctcgagttattgcctatttcccgagatttccggagtcgtccccacatctcccgcggagagcggcgcccctccgccccccctcccgcctccccctctattagacactccaagggggtagtttgtttcattgtgctttttttcctcttctcaaagttcatcctttcgcctccaagttactttccgccaacacgtgacctcttcgcttcccagcttgcgcagccactggtggggaagcgcgggcgctaaccgcagggcttcctgggagagccccctccgaggttcgccaccccagccctggctcccgccgcgctcaccccggcaccccggcggcggggcagcccccgcaggatgaggaagcggctccggggaagcagcaccgagcagcagcggagcgcccaacctgccgcctcccctcccgtccctgccttggcccgcggctccgctctccgcggctcgccttccgacctagctgcgcaccggggctgttaactcacatttgggaagccataacccattagagcaaacgcagtcataacttcattcaactcagccgctcgagagctcggcttacacaggttcctgtgggcaactagtggctcgccttggtgcctctcgcctagtcatcagtacctaagaggaaaagggaaagttgttgggctggttcgcgcttcgacgcatgcagatgttcccaaggacaagtcacttactcgcccccctccccccagtccccatttgatcatcactcacgacctcatcggctggagacccttagtcatgatgggggagggggaggggcacgaacttttctaagaagtttcctttttttacccagagagtcacagtgagtcggtcacgtaaacagcgaggttagtcgtcgccgttgccgccccccaccccctccctgctgcgcttttctggtattattattaaagcggtagtctgccggcgctgataagcaacaagttccccagcggtcttcccgccctagcctgacaaggcgaaggttttcttacctggcgacagggaaatctcccgagccgaattcagcttcgccggagccccaggtgtgacctgcgtagtgggcaagggagcggtgtgcaggctgagtttttttttttacaggggtaccctgaaactcctcactttctctgggaactttcagtgccaggacccagtaacgggcggttagaaggcagccctaggaaacacctgctacatagcagggcagttgggcaatcattggtaacctcgctcattcattagaatcacgtaagaactcaaaaggaaacgtgtctctcggagtgagggcgtttgcgtaaatctataggtttttcgacatcgatgccagttgctttgtcttctgtagtcgccaaggtggttgagagtttaagcttgcggatattgcaaagggttattagattcataagtcacaccaagtggtgggcgatccactgagcaaagccgaacttctcacatgatgacttcaaacaagacacattaccttccagcatctgttggggagacgagattttaagacacttgagtctccaggacagcaaaggcacaatggtgagtagcaataaaacctgcattataattgaaaaatcttgacatgttgcttaacaacgggcatatcacggctcttcctagcacttcacacgccaaagaacagcagctactcaggccaggggaatcgggtttttacacagtgcaactttaattggaatcatttgagatttgacacagctatgtggaactgcgtggaacaaacttggagctgggtgggggggtgtgtgttatattggttgttcaaggctgatgcttgtctctcagcagtcttgcattctattcttttccttaatgtgtatggtgtatgatcatattctatgatttatatgtgggcatgtaattgacatttgcaagggggttaatttccatctaaaaacaataatgctgttagaggttggggttagggggtggagtgggggtaagggtggggtaaagactgggagtttaggtgtagatggggggtggggttggggggagagaaataagtcagaagtgcatatcaccggtaatgggtaatcctctcgtagaagaaaaggttctcatcaacatgtgatcaactattaacaggatggctttggcaaagccatccgcacgtgacaaaccgtaaggaagtggaagaaaccgtctagagcaatatcaagtatcacttaattagagatttttaagccttttcctcctgctgtgccgggtgtgtaatccgggcgataggagtccattcagcaccttggacagagccaacggatttgtccgaggtggcggtacccccaggtagtcttcttggccccgctgtaaagccaaccctgtgtcgcccttaaaaagcgtcttttctgaggttcggctcacactgagatcggggctggagagagagtcagattttggagcggagcgtttggaaagcgagccccagtttggtcccctcattgagctcgctgaagttggcttcctagcggtgtaggctggaatagactcttggcaagctccgggttggtatactgggttaactttgggaaatgcaagtgtttatctccaggatctagccaccggggtggtgtaagccgcaaagaaggtaagcaccagggcggggaccccttgcatccccaattcttgagctattttgatactgtcttccggagaggacgcgtggtggaggggaggaggtagagggagagcatgagagggggttgtttcttggtatttgcccagtttgaattgccctaggtgagaaccctggggcaaagggagaaagaaaaaaaagaaactcagtcttcctgcggatataatgagtttagttaacttggacctgcaaatgtctgattcaaatgtaagatttatctctctttttctcctcttcacctccctcttttccgttctctttgctggtgtgtgtgtgtgtgtgtacagtagattcattactaattatgaagcttttgcaaaacattcgaattcctaaaatttgactttgtagcatttagaatcaggcggtggaggtggtgtgcggtggggagaggaggtggaggttgggaagagggaaggaggtaaagctaaacctccaacacaaaaaaatgaatcaaggtaatttcagctcttctagtgagaaggattcattctctctgtatccctccctccctctctttccccctccctccctccttcccgccccccttcttccaccccgccccctcctccagcctccatccctccctcattctatctcttcctctccgtcgccctcgctcctcgctggatgcttctttctgggttttcttttttttttcccttctgtcctccctccccgcgagtttcgggcgctggcttagagggttcccgctttctcaagggaaggggagctgccgagaccgcgctccgctccccagccgggccggatgcctcactgagcccaggtccgagtcagtcggggtaactcagggaaaggggagcctccgcctgggagtagaaggtcctttccggaccgaagagccagagagcgggccgggcgagggggcctgggcggctggaggcggtggagaagaacacttttagctccgtgcggcggctggacagagccaccaatcagctggacgcgcagaccgccctgccagggcgaggttgcgtccggaggcgccggtggagggcggccggctagtcgctgagccgccgccgccacccgggtgggcaggggactggcggtgggtggaggtgaggggcttggcgggtgagatagaagcggcgcggagccgcccagacctgtgttctacctctcccgcccccgcctgcacccccgggggacagcgaactgccggaacgcgcggctgcgttatcctcttgccactcttcagggagctcagggacttaggcgcccctgggcgggggccaccaggctctccacactcctataaccctcacccccacccccttctcaggccttttgttccggccacagagccaagcccggtggcagttttcgccccagggtttggtcgttctggactcctcccccgatcagctcttcttaattaaaaggcaagagcttggggtaggggtgaggggaacgtaggaaaaatctgtttccgaaactcaagaccactgttttaacgaacgaaagaaagaatcccaactctgcgcaggtggattcataggcgaagcgaggatattgtggaaattcagaaggaaaagataaaaaacaggcgctaggatcagatgacggtgataggctgctcggcacacaaagggagcgtagggcagggtttacggagcaagcctgcagcgaatggggcacagattgttccgagatccagtcgttttctcagtcagatctacgcgaagggaggggaggggaggggcgggcaggggagcgtggcgggaggggctgagcttgggggcggggggatttctgatcagtctgatgcaattccaagcgtgctgcaaaggaactccaaggcgcccgcatcaccatcgccacccacccttcccagatggtgctgttttaaatacggatctgcagggctgaacgcagaactgggagatttattgcaaaatcccgggaggggcgggggggggtggtgtgcggaacggggaatggaggagcagaatttaaaggtgcaacgcttgctttttccaatcaggcggcaaccggccggaattattatttttttctttctgtctgcttgtctctggattctaattcaccaagaaagaggtgtaaatattgtgacattttgaggcagcttgatggatgggaaagaaatcatctgtcactctaaattgcagagttccctctccccgcgccatcccttgctagcgaatactcgctgctgcctaatacagttgctagggcttcaaatgaatgcatcgttaagggaatattatccttttagttgacttgccaatttagttgacagttgaatcgagaaaattgtagatttcgtgtctctgggaggaaaaatgcttaacagtctaagtcttgtaaccttgaggtctttaacaacttaaataaacctcaaaagtgtcacgtcatcctctacacacacacacacacacacacacacacacactcaacttgtaagatgacatggtttcacctaaactgttgtggaaatgaatagcactttaaaaatggtgcacctgatattcactgtttatgtgtatttacaaagagctcttcagcatgaaggcaagacatttcaattgtcctgtttggaatcagtcagaagactagaaggtgatggagagaagaagggaagaaagaggaaagagagagaattttaacctagatgctattaaattaacagtaacctagcctacttttataccccttggtcttgcatattaatatttctgtatgtgagattttagcttggtctagctcccccaatggagtataccagtattgattcagatgagaatatgagcatcctgccagtagctttttcagtgtcattgatagtaagacctacaacacagcaatttttggaggatagaagagaatatatataagggctttgcaaactgggaagcaggcactccataaatgggaggtatcattatgacattctctttgcacatatcattttcatttcactgaaccagagtactagttattttaaaacataatctaatgtatatgctcaaggtagtaagtggggattttaaaagcaagtgattagttggcttataaaatattatttttcaattgtctattaatgtacattggaaagaaggcttttaaagatctaaaatcaacataaataagcttcccctttcatttgccagactctttccctatcagatttctgatctaaattcttaataagaagagaagctggtgaatttagtttctttccttttcctggcctgtcctctaggggaagctttagtaagaaacaacattccaaaatcaggcagtgagcgagagagaaggcaagggactggatgaccacaaaatagataatcagccaagaaacagaaatgagggaaaaccagcattaaagcatgacttacaaagggtttttattttgtaattctgtaattttgggaccaggctcaaacttgctcaagtaacattcactcgatcatattgcttacaatctgtcagttaaaatgatgtctaactgagcatattttttattaaatatacttctctcaaaggccagtaaagctactctttggttttaattagacaaactagtctaaccacttaaataactctaatgaatatgaactgatatcatcagatttaaaagctctgctgaaaactaaatttattctgaaaagcactgacttgccagaaaaatatctatttttgcagctttcttttcactctatggataatttaatgagttgcttattttaattttacaactgctacctcagaagtatctcaaattatctttctttggctggtgtctttctctgctgatctgctactgctgtgtgtgtgtgtgtgtgtgtgtgtgtgtctgtgtgtgtgtgtgtatgggcgtgtgtgtctctgtgtgtgttttctagtgggaatttaacaagcagtgagtctcttaaatttacatgccataatctatgtcaagaacattgcgtactacttagcaataaaaataaacattagcatctagtgaaagcttaccatcattgagtgctatggaaatagaggtcttaaagaaagattaaatttttcaacaaaaaaatttttcccctttttggcttaaaggtgattataatttcaaaaatatgacatctttcctcttttactttggaatgtagagctgctgctttaacaagtgtcttttgagaaagatacacgtgtttcataaagattaatacccttaaaacactatggtgcagagagggaaggatgaattctttaaccctgcctctaatctcatttggcaatttttggagtattcattctgactttttaaaaattcaggtggattttttttctgctttctttccaacattataaaacaatcctataagagatttttctgctatagtgcagactttatttgtatttcctagtaataacactttagattcatatagtactttgacagctctctataggtttcatttgatttccttatcagtcatgtaaggtaggaatcaccaatcaccttttacagatgaggaaagtaaggtgcagaattatctaacactacactgccagtaagatgtaaagactaactcagagtctttcttcaaattttaaggaaatttgtgtttgttcctctctagaccatgctgccttaaactccactagggcatcagagggagctgtaggcattattttctcctattttgatttatttaattaaattaaaaacattttttacaaatagttttcaaaatttcaggcctaatggaaagttttaactagtcttcctaagacagtatttccctctcccacagttagacactcaaagaaagcaggactcttcctctagttgacataccatctaagtcatagttgctaattccccaaaaaacaaatacaaagaataagaagaaccaaagccaagatgtacattacctttacttgtgaatcatagaatctgggttctgggaaggttctcagaggtcacttagcccagctcatatctgatacatgaattcatgctggcttgttttgtttcaatcctctggaatttcatcccagtcttggacactgggtacttgtttatcttggtagatgttctgatacttatgtggatcatgagcttggctgatcatttcccattttgcccaaaaggtatactttctatagagactctagcattcataattttattttgtaagtattaattggcaacacataatttgccattatgtgccaggaactgtattacaatctggagattcaagaacaagcaagaccaaatggtccctatcttggtggatcttgtggcctagagacaaagactggtctctttatttgctccaatccttagaaggggacagacctctggactcataagattccttttttcaagagaacacagtgaataagattaaaagcctgagtttaggctttacttccaaccgcttgtcagtacccaaaaaagtcaatcagtcactcttgatctctgcttcctcacacataaaacaaaagagatgttctcagaataaactctaaattccacttccgttccaagtttgagtgatataaaagatatagtctataactatttcttgcagtgtaggggaaattaaggcctaagttaccctaacctttggtgatttacaattctgggtgggtaccgcaaatttttaacttgttaagaagtatatcatgaaaaaaatcaaagtaacatatttgaacccagaatagaaggaatctaggtgttgaacctgttcatttatggaatgatggctaggaaagttttaatttagagaatgatctcaaatttctgcggattatttttaaaagcaggtggtgcgatggaagacctgctatcaaatttactgcttattttctttgtgcaagcagaagttataatttttcaggtcatttccttttaaaatcaaaaatattacatcctgaaattgcctgggtctcatgaataatgcattatatacacatgataatagataattagatggacaagccaaaagaaacatgaaaggaagcaggtagcccaaggattgcagaaggtgtgtgggcattttgacatccaggaaatgctatagatctgtccttaactaactcagcctggtggagataattaagaaaaaaaatgtgggtgtagaaagactgcaagccattccctgggattggctagattgctgcagtagttcaaaaacaattggcacagccacccacactagacatgattgccctttgatgaggcagctattgacttttataaagatgtcatatttaaaataacttctgatgcactaggcataacagacatcattcttgaattctattttagacaaatggcaaaatgtattacaaagtattaatttaaaaataaaaaatctttaaagtctagtgtctaaaaaccagcagtttagtaacatgcaacctctggatttaagaattcagcctgaagctgggagaaagctgtagcttgtataggacattttgatccactctgggcatttcccagaccactacaggaagtaaaatgtactttgtcaaagtttttaacctttgagtgaatgttaaatccactccaaaatcttcgcaacctgggaaaggtgatccaacaattttcctaaatagcggcagaaaatgctctgagatctttgttcccagagtgaatgttataatgttatgctatctagaaatttccttgtagcaccatgctcatcagtaccaaaaggagttagaattgattcctcccgcttcaaggaaatatatcaaccacctcctgtctctaagtaacaaggttactgtggggaaaaaatacacaaattaggtgattgcagaaaggtgtcacaaacatccaaagcctttgggatagggcattgcagtgtgagtgaatagagaaaagaaagagaatgtgggaaaaaattgagaaataaaaagggaagtcacagtggagttctaattatacaggggctcttgaattgactgttctctaccttccatgctcattgttgttctggctactttagtaggaaacaatgatttcttctgctttcaccttcctcctccgctaaggacttcttacttgccaataacttccataatcaatgtttaagaattgctctgatgcccagtgtggtggctaacgcctgtaatcccaacactttgggaggccgaggtgagtggatcacttgaggtcaggagttccagaccagcctggccaacatggcaaaaccctgtctctactaaaaatacaaaaaattagtggttcatgcctgtaatctcagctacttgggaggctgaggtaggagactaacttgaaccatggagacagaggctgtagtaagccgagatcatgccattgcactccagcctggcaaaaaaaaaaaaaaaaaaaagaaagaaagaaagaaagaattgctcactgtaatgactttcatgccatggactcaactctcttggcagtctggtaaagcttatgtaaacccttctcataaaaatgtctaaatggggccaggcgcgacggctcacacctgtaatctcagcactttgggaggccaaggcgggtggatcacttgaggtcaggagttccagaccagcctggccaacatggcaaaaccctgtctttaccaaaaaaaaaaaattagctgggcgtggtggcatgtacctttaatcccagctacttggaaggctgaggcacgagaatcacttgaatctgggaggtggaggttgcagtgagccgagattagccactgcactccagcctggatgacacagtgagactttgtctcaaaaaaaaaaaaaaattctaagtgaatgaaataaatgtataagattacaaaggaagccagtggcattgatgtacagttataaaaacatttaaaataatatattgtgtgatatagtaatatatatgctttttaatacattaaataagatctaacagcaaggtaaatattataattttgaaataatgataagtatcaatgtattttgaaatatctataaaactgacgtgatatgaaggtgtctgtgatgtatactggtgagaaagcatgcaagtactactgtgtaacatttcccacacatatttaacaacagaacacttgagaagcacttattaacacagcatagattcagaaatattaatttagtaaatgtcaacattagccattgttgtttccttcctggcaaaaggaaatcagcattgggagaaaacttttaaaattcacatttgccattagacaagctgtcaagtggggaaaggaccaaatactgagaaggccagggtatggtaagcatgtttctattgactgagcttgctattactctaacgtttatctttagcatcaccagcacaaccccattaccctagcaatccatcactccattgaaaaagataaaaagttcagattctggtcattaactcagcattgcttaagatacctgttctgacctcactaacccaagagattactgaaactcttcctgtttgtcattactacaccatgggaaattataatgatgtgggatgacatttactctgcattcatccagtgctgttatttgttttgtatttggcatatattacttaactcttaaagtaactctcagagatagattaagaaaactagagctcagagaatttaagtaacttgcccaaactaacacagaaaatctgaagtggagaagctaaacttcaaacccaaagttttctggttccaaagtccattatgaagttgtgcctccccatcttatagctaccacccagatttaatctgggtctcccattatcagatggtttacatacacattttcttacaagatcttgaccacaactctttgagatggccatgagtctcacaattcatttccaggagtgctactttagaatcattttgatctttgctaaccgatgagagattttcaaatagctaattgtcacctaccctttttgaagcccagttttcataatcataaaatggaaacagtattacaatgttttgttaggatcatatacattaataataaaatctaactttgttgagctcactatggtgagcattctgcatttccttagttcattgaatcctcacaacaatctttctaggctaagacgattatttttcttttaaagataaggaaactgaggcatcagtaattaattaactatcttaaattagcagagccaataagtggcaaagctgggttcaaacctaggtctgtctaatgtcaaagccctttttttaatcactaatctgcaaatcactattcaatcttagcttttattattataattatcatcacacttaaaacactatcaagatacagaatgatccagacataagtatatagtcactgaagagattagaatctgaaacttttcacctgcatgttcttccttccactttagtttattaacccaatggatgatgtctgactcctttcttaacttgtttagggcagttccaagttagttgacttctgagagttattgagtaagaaatgttataaattgtttggattaggatttagtatgtttagaagctatttcataagtttgcctttgcgaactgttactggctataatactgcagatgctgtgatgaggaacaccctctccaaagacacacagtggatgacaaacctccaaagctaacatgttgtttacagatatggagaagaagaggatggacaagcacagtctaaaacgtaattacaaggcttatagtccctgttggggactagaatgtttattggctttccttgtgcaattcaatgctcttcctccaaaggatccactccaaacttggaactttcctgaaaatagcatctcatttgggagcatgccaggaattggtgtctgggtcctttgtgtctttgcaccaactcagaactctggatactagctctagaaactaagctgggatatattctgggtaagggagtagcatatctacttgggcatcttcctgatacatttatttcatccatcttcctcctagagagcacctcctagaaagatgtggttttaaatgagggattggatgcatactggtatgtcttagcacacaagtcagtggtctttgcagagctgccaaaggcatataagtaatcaaagatgcggaagtctatgaagagacttcatcccacctccactctgatttattcagggaaggaccccatgaacacataatggatttgatacgtcccagagctctgaaagcagcctagcaaaaaaggataatcttgaaggacattttgatgtatgaaaaagtccacctaaagctttgtcagagataactaagtaatatgatggctggtagactgtaagtccttaccttggctcaggaactgtatatcatttggtaaactaaacttgtcgttcaaatttagatagaaaaagtaccttacaaatgatctagttcactgattcccttcatgcattgaaatcacctaaatcatctcttctttctgagataaggtctgaatgtgttgccagctttagcaaactcagtttgtagcccactgacctcatttgattgattgggcaactgaggtgcacagtggtagatctctcaatttattcaataaacaattatatggcccttacgatatctatctgaacaatcttgggctagtgaagttgcttgcccaggttacatggccagaaactgacagttttaaattaggaccaaagttcttttgactactatctgggccttaaaataatatcatatgacaaagatatttcttctgtttcctaatagtcacatcaaaaggaaacaatggacagtttgtgcaagattttagttactttaatgttcaaaataaaattaaaaacagattattactaaaacataagcataacaacactttaatagcattctaatcagatattattaatttcaaaatggtaggacaaaactaattatactttatacttcttaaatatcctatagttactttatgactattgagacactagctaaaacttgaaacttcaagttttcattgattcctatattattacttatttcagagttacttcatttggttcttttatctgagattggacaacagctttatttgattttcagcgacaaaattcttttcactcctgatcctccaccccaagaaaacaacagctactaatatattttccctaaagtgatcaagaaataaaagaggaattctagccaggcgcggtggctcatgcctgtaatcccagctctttgggaggctgaggcgggtggatcacctgaggtcaggagttcgagaccagcctggccaacatggtgaaactccgtctctactaaaacttaaaaaatgagccaagtgtggtggcgcatgcctgtaatcccagctacttgggaggctgaggcaggagaattgcttgaacccaggaggcagaggttgcagtgagccaagattgcgccattgcactccagtctgggtgacagagtgagactctgtatcaaaaaaaaaaaaaaaaaaaaagaggaattctaaaattaattatatctattaatatccctactcttaaaacgttagaaaatgtttgctcatttaaaatttttatttttaaaaccaccttatattccaactaaatactctttggagcaatttctttgttcctcatataatatccatacatataattctgcttttgtgattaacttttattactactcttctaaaattgtgctcttataaacatcagttaattaagagtaaatctgatgttttataaattctttctagaaacagagagcaaaatcatataaataacaatatgaatttccaaaagtacaataataaaaaaaaattagaaaaaaattaatctaggaaatagtcaagaatatgtcaaacttgtacatacttttgagataaattggcatcatgtagattagcatgattcttctttatggaattcaacttatttttactcactttgctctaattagtttttgtgtgcggacaagatggaaggtaatggaaatttggcttgcaaagtagttctaacatgatctacatccacaatctggttataatgctataagaatattatgtgggaatagtagttcaaatcagtatttagtatgaacataaagggacaaacaatgcaaagctaacttaagttgtttacacttggaacttatttaaattaaaaaggccagtggatggtcatatgtttggctcattcttctcaaggccttcaggaaaacatgcctatgaaataaaagatcctcaatattaaacattttactgcatttgggggacacatgaaatctggtaataaaggaagtgttggtcttcatttttctaattcagcatggaaactatcttgaggaaaactgactatggtcttagtttgtgtctcagaaatatatttagtctgaatcatggcgtcgacatctgacttccaaaattggatatctagccgtatagtacctcacctcccacacacaccaccccccattcccaggtcatgactactgtccaagcagcaaaaaaagaagtaatttcccagagtacatacatggcagtgacaaccaaccaaacaaaaaacaattataggggctggaatttaaattaatggctgtactctcaccaattcattccccattccaccccatctctctgtcttcaacttttatgaaacattatatttgtcctattcttctgtatcagcatcagcctttcctatatccaactagacttataacttcttggtgcctctcactggctgactaaggtttcagaagtacctacttacagcaaacacttgcagcagtctctttttggttacaaagtccctggacaatttctcaaggcgatattatgaagaggaagtaaacattctcctctgctaccccatttctttttagagtgctaactttattctatatctggtttaatgtcttcttaggccaattggactgattttacagacaccatagaatatctcctgagtaatgggaacaatatttctgctgatcccatgatttggtctcattgggttgttaggccataatggagacatacttgatgaatttatgaagacttgattctaggtatcatgtaggttagcataattctcttttactgaattcaacttagttttattcactttattctaactggattttgtgtgcagaccaaatgaaaagaaatggttcaatttaggtgaaaggtaaagcttcaaaagtagtgtagtatttcatagaccttacctttgagagaaattatatcagtatataataagcacctgagaatatgaaagcacaaatccaatttaaatgtgaaaggtctacaacttgggattttaaatggagtacagaaaagccactgtttcttaaacaattttgttgagggggaaaacagtgaaagctaaatgttctattcaagagttgtttcttttgaaaataatgcttcatttaaaagctaaggacagaagacgtagctttgttatgaaggctcatctttttattaaacaaccactactttgtctccaagttgcaaagggaagatttgtcaatctgattgaatcttccctttagtttttcccaacagctgtgtccagataattcatgactcctgtgtttcctgagccctggataatttcacacacatgtctggtttggggctccacattttcagaaaaatatagaaatcttggaggaggtccagggtagaccaagggaaatgattaatgggttgaaagttggagtttatgaagaaaggttgtgagatctgatcttttgctacgagaaaagtctgagtggtgacttaataacataaggaggttagtaagcagctgttctccatcttcactaaggttgaatgaaatgaaataagatataaattgcaacaggaacaaaaatgcattacaagtgaggacttccaagcaccagcattgctggattctagatagctccccaaaagaaggatgtgtagtctacttccctggtctgcaatgacaggcctataaatagtgagaaagatgagataatctcttaagatcccttctggacctatcttttataggtctatctatcatatttagaaaaattatttgcctcaaacaaaaattatctgatttcctccctctcaccctatccactccttctcttttgtctaccttttgtaaaacactgctaaccgaaataactggggactgattaaccgtggtgggccctcccccgcctctaagtgccactccagctttgggagcaagtttcttgtccatcactaccaccccctggccactaggggcatgtttaccatcatctttctacacaccaaacctacggcaagggaaaataaaacaaaacaaaacttcctagacttaacaaatttgcaagtgtcaccatggattaaaatacaactcttatgtcctagaatatgagcatgtaaagggctaaaatgtattttatgcatctgcctgtatcagcccatagaatagcctcctgacagatagtagatactcagcaatctttcatcaactgaatgactgtaactatgaagtgaaaggcaactaaagttgagaaagtcaggagtttcggatgtttccaaatgattctgtatgccagactaatctaaagcctaacccattcttcacaaccatgcactattaaggatttcattctcaccatgcctgtgctatctggaggtagaaagagggccagttgcacatcctgctcaagtccttggtcaaaaagaccactaaagagtgctttgtagattcatgtatcagaatcacatgaaagtaggccaaattcttagtgtgtgtttttaaaataagactttaggaagttcacttatttttttctaaattatttttgcatattcttctttttcatttttttcatgaagaatttaaaatttggctgtagaaaatctctcactccaaacatcacacagcctaaataggtgagtctcaaaaataagctaatgttcatctttcatctgattcaatgtcctgaaaccctttggtttaaatttgttaattcttctcatggcttttctcctagcaaaaccaactaataccacagctatttattactgtcagctctaacttatgcccacaatctcacatcccttttgaccacgcttatagaactattacaacaagtaaaccaaatttattcttcattattaatttttaaatgttctcagcacaaatctggtaacttggagggctacaagttgatatttctcatatgtttgggggtttagtctcaacagtttcttaatggtttctatgccgtttttcttgatccaactaaatattattcccagatgggatcagcttttgaccctcttgttctactctcctagtcttggcccttctaaaagtttcttgctgtggttcctttcttttgtctgccactaatggctatgcctggttacataactcctgtaacaggtgttgaccaatttgaacacattttggtatggtattgagctattcttatggttcataaaaagcttagtgagaacgtaacatctcatgaatagggaaattacttctcccttaaggtttttctcaggacaggcctcatacaagaatttcaaggattgcgagtgacatagtttaacattggaccaggcctttcaaattatccaggatgagtttgaaaacacctgtgccactctgctcaacagcagagttttctgtttactaagtattttccctatgctaattacggaaagtttcaacagtttttttaggccaacttatttgatgctagactagacaacttattttttttttcttgcaaggaatactgaaggtaggagtaactaggaagcttaaataaacataaatataaaatgcttatagtgatagaattgacctcagccaattaaaattattaatagaaaaaacatgtcaatgtcaagcctactacctctgttctcacttgagtaatgaggattagtttatatttcccgacaagaatagatgggaattcaaatttcttcctgacctttgttccccctggaacattgggttaggatcatattagaacataaccaaaaagaaataaagattcagacgaattcacaattaatttttaagccccacaaaagtgaaataggtagcattattttttcaagctgtgaaactttccctcattttagtaatagagaaaatgttcagattataaacttggaaactttgctcctaacatatcaattatgccagaggccaatttttaagaagaagagaaatgcatgctctatattctcagcatcatccttgcccacaatagggaaataattttgtaaaatgtttgattttagacctccaaaattatctctatatgctacctgaattaagcaaataaaaaataatatttagaattccatgcaaggcactggtacaattttgtttatcttggcttcattgtttttgaatgtaagatgtacttttaaggcaaataagtacatgttttaagctggtcgcatacagtattggcaatgctataatcacaaatcagaaagtttggaaatgcttacaagtgttaagaggtgtgattcatcatggttatctgaattggcatctgatcttcttttctttctaaatatccctgacatttctgactcctctgtcttttcctcagtaaaactgcaccacacactggaaagcgaagatacacacatttatttatataatgtcaagggagagtaggaataagaagattggccatagacccacccaatcagagtctgggaaatgagaacactttttccttcagcagaaatgctgacgtgccaatgtgaatttagcagaaaaaagatttgccataacttctaagtgagcagccttcagaatgctagcttagattcctggcattaacttgccaggtattttttcaggaaggaaataaattacaattgagcttaaaaacctgagggtagaactcattttcaagcaaatgtgaagcatcagtttgaagttaacaaagttaaagtttggagtagggttcctccagtcctttataatgtagtacaagtattttttttaaatgtataacactagccttttaaattgtattgtgctactaaaagaaattgtgcctgcattcatcttacaacctgggaaccaacgcagagggtctgtggggtagcggtatccagcttcatgccctctgtcctttattgctttctggttagcctgcgtatttcacatacattaaatattccacaataaactctgccatctgtgctgtagggtagtttgtattggtcatgtgctctgtcaagttgacagaggtgcaaagctaaatgtgtgacactcgaagaatatgcatatatttgaataatttgactatttagtccaacaatttgcaaaggcgctctgaatgatcacacattctgataacacttccaaggaacagatagcttcacttagggggtgggggagatggaagcagggttatttctagcaggaattcttgagttcactgaagtcttgtccctggtacttcactgtgtgaacgtgggtaaattatttcctggcagaggatcggattcttcttttataaaacgggtaaataatttctgtcactagtctttagaagttctaaaatagctaatgttagtgaattcattttgctaactgtaaacccttaggtaaattgaactgagtatgtaataatattatatattcagttcaacagcacattcttggtaaccacaagagggtccaggaaaggaaactgtttataaatctttccctttagcaaaattaatgttggagtctttagggaaattcttacagcaatagtcttcgcaattattaggtcaaacccctttgagattacagaaaaacgcacacacacagaaagctgcctgcagaatttgggtgtgggcttggtgggagattcctctgatacccagtgttgtacccccaagagagtgtttctcaaagtgtgacttcagattgtctgcattcgaattgcttgtggtatttattaaaattataactcctgggccctgccccacccctactaaatcacaatttcaggaggagggaccttcattttaacactcacccaggtgatttttatgctccgaggaggtccagggactccaagttaagtacggtactgctgtcttattctttattctaaattttaaggtctgcacaaattggttgaactaatgagaagaaaattcagctttaaagcagaaacacaggtagacggttgacagagttcatcaaatggataattgaaaatgtcctctggaccctagccatataagttctcttcaagggtcttggctacaggcaaatgagaacccgaaaggctatttgctcttttgctgcgggcagtggtgggggtggagggcgggggaggattaactgagccagttctgcccccaccctcgaatcacctacccccactctggttaaagcagaagactttttatttatcttggctgccctggttcgttattaaaagggttagcttatacgtgtgtttgctggggctggaagtgaaaacatctgcaaaagcatgcaatgccctggaacggaactcttctaataaaagatgtatcattttaaatgcgctgaattttgattctggtaattcgtgcactagagtgtctatttcgaggcagcggaggtatcatatgacagcgcacgtcaaggcaccgtggagccctctcgtggactcccacccactttcccattcaccgcggagagggctgctctcgctgccgctccccccggcgaactagcatgaaatctccctgcctctgccgagatcaaatggagcttctcgctgatggggtgcgagtattacctccgccatgcaatttccactatcaataatttaacttctttgctgcagaacagaaggagtacataccgggcaccaaagactcgcgccccctcccccctttaattaagcgaagggaacgtgaaaaaataatagagtgtgggagttttggggccgaagtctttcccggagcagctgccttgatggttactttgacaagtagtgactgaaaaggtgggtttgttttctttctttctctttccgtttttctgtttggtcggctagaaagcgtgtggctttagcgaggtctgtcattgcctgggcttcctggctggaacaagtaacttggtgtaacgttatctgggggcgttcatcaataaaaaatgctgttattatcttgattgaattcctattaggcaaactctagagaggtcagtgcgcgaactctgtttaagccggcgtgtttaaggcagcagagtaaaccaatagcccccatgctctgtgcgatttcattgtgtgctcgcgttcgcaagctccgtagtgcaggaaggtgcgggaaggtgtgtctgtggcccgggaaacgcacgccctctcccagagaacttgggtgctgggatggggaggaaggggagagttgaaagctaggggagcgagacctcggggcgtgcgattctcactcgctccctcccgccccagcgcccacagccggggtttctgcagagggcgcgggacgcggggttccccggggctgaggctggggctggaacacccctcgaagccgcgggcgtcctgtccaaggcgccccaggagggcgcaggactcgcagggcgatgtcgcggggccctaggggaggaggtgaggacaggccccgggggagcggggagttccgggcgcccctcggttccccgcgcgaggaaaagacgcggcgttccctttaagcggccgcctcgaacgggtatcggtagcgcgggcgagcggggagcggggggcggggggcgggggggggggggcggcgccgtttgaccaatcgaagctcaaccgaagagctaaataatgtctgacccgggcgcaaggcgcagcctggagctccgggtccccgacgctgccgccgccgcgcccgggcgcacccgcccgctcgctgtcccgcgcaccccgtagcgcctcgggctcccgggccggacagaggagccagcccggtgcgcccctccacctcctgctcggggggctttaatgagacacccaccgctgctgtggggccggcggggagcagcaccgcgacggggaccggggctgggcgctggagccagaatcggaaccacgatgtgactccgccgccggggacccgtgaggtttgtgtggaccccgaggtaggcaagcgctgggaatggggcttggtgcaggagctgcccgtccgcgggagagagttgactgggggatcccccaccccaaagttgtgggacgaggccagtctccttctttcctcccctccggtagaagggacgatttggagttactcttggggagttttctcccccatcccacaacccagaaggtcagccggcaccaccagggaaaaagggacccggggaagtcacgaagtagaggagggaaggcctggaggagacccagagctgcgtgatgggagcaaagacggcgacccggggatccctcgcagccctcccccagcccaggagtagtcgagagagacttagggggccagagctgtcgagggtcctgactgaggggagggtgctggggctaggctaggaatccttccagggggtgggtggtccccgcgccgacttgcggggggagtgggagggaagcttgcgccttcagcccgcatcccttccccggagctgcacacggctacctgctccccaggaattgagactgaagtggacttacaagtccgaagccaatgtagcttggaaaacttgggaggcggaattcctaccgctgggaactgaaagggtctgcgacactctcgggcaggccgaacccacatctctacccatcctgcgcccctcttctgaagcgccctccagggaagttaagagttttgactttcggggagtggttgggatgtacgtgggggattcttgactcgggttagtctctggggatgcagagccgggaagaggaatgggtgagtgagttactcctggaaagaaatagctgaggattgggggctctgtgcctgacgggcaagaagaaggggagattacagactaggggcatccctaaggaagaagcctcggggctgcgagggtgaactggaggatgcagtgtttgtgtgttgggggtagagcggggatgagggaccggggtggaggggaggcgaggaggaggaggggacccagagaacgaagctagggaaggtagagggtgccctctgccggccatgctgccaagagcagctactgggggcgggaggctgggggtggggaagtggtaaaggaaggttttgcgggatcccttagagagctggtaggagggacttgttgaatggtgctgctgactccagctcggtggggcgtgcgactcgtcgtcggtggattttgactcctcgttcttgtttggcttctatgcaagttttcctcgcgctgggggagctttgataagcctcgattggcggtgtgttagggcttcttggatcttattttagggtcctctagttatcctgcacttactccttaatgtcagtagcaaccaaagaacattttccgacaagcacgcaggaatgttcttggccagaagcaaagaaaggcatatttctgagtgtttattaatcctcctagtaatcttttaaagcaaagtaatatgtaattgggaacgttgattttctaactgcatataaaaggcgacatgatattaaatgagacccctccctactgactcaatatcctgcaaaatctctctctcccctttattattatggaaaaatctatttttatatgagtttgttgtaaggtcaaaagccattttggtcttacaatttgatatgtctttacattttaacttattgaggcataattacagatttaatttgtatgaacgtgtgtgccttcaatgcttatctcatgcaacataatttttaggttggagatttctgatgttatggcatgtagcgtttcaaggcattacacataataggtaacatagcatgttgaaattacaccacaaagttttgaccctgggaacagcaccttttaaaaacaatcactaaactcctgttcctgttttctgattttgcaaatgccttgcttaagacttttttttttttttttttttttttttttttgggaaatttacctctgggttagcaggagaggtaaaaaaaaggaaagagacacttgttgaaatgtaaccataacctttactggaatttaaaacatgttggtcaccattactggaattccagggccataaagtcgttgtcttttttttcttctacttcattttgtaaaatgtgataaatgttggtaaatatagaccagtagtaagtattatgacactaaaagcattatgtatgtggaactattttaagttattacagaacattttctatttataaatgatataagcagaaagaaatgatttccagataaacaaggcttacgtacatgttttgaagcattagaacattgcagacactcttagacatcacattttttaaagcaaaataacagtaatttttcacatacctttggagcctttcatagcccattcagagctgagttagtagctggaagtttcctttattttaaggtgatattttaaaaccatttaacatgtatagtaggtcaacattggtgcatccagaaaatgaagcatttaggaaatctgtttcagtgtcttttcaatgtgtgtaacttttacttgcaaaccaatggaaccaagaaagtcatcatttgcctaaaatgcagtcatcacctcaaatgattcatttatactatgtgagttaattgccttcatctcattaatggccaaggagggaagggaggtcctggggtatttcttgttcattttgactcaccaggagggaaaatcctgtaaaaaaagaaatgcaaatttctaaaatcctggctcaaagtccgtgggtttcctgtttaaaaggggcgccatgaaaatgtaagctattccctttttcctggaatctttaagagtcccagcttttcaatagtcaaaatgtagatgattgatatcatttcttatatgaatagcactggtttgtagttcagcacgcacagtgagctgggcacgcccacctgatagtatagcagagaacttgtttacattctttttacattcatcttctaaaacctggggtgctctctctctctctctctctctctctctctctgtgtgtgtgtgtgtgtgtgtgcgtgcacgtgcgcgtgtgtgtagagggggagagagagagagagagaactgtgaactgtgaaatataacacagccagcagctttgggtctcaatcgtagacttactcttaaggaaatttacagaatggaaaggtcatgttcaagtagtttattaacattttgagatgtaggaaattaatcccggagtacagaagaacaatttcagacttcctgaataaaaacagacagcatagagagtggatgatagctaaactctgaatatcttttgagaagaaaggcactcccatttcaggtgcccataatatggatttgattttagtgattaaaacattaattttcaacttgcatctccctgtgtggaagagttcaatttgtgtgaggggtctcgcctatccaacaaaagtgaatatgtcccttttatagggtaattgctaacttgtctcaacttgttttcaaacaattgttatagagcactcagtttccactaattgcaaaattgttgcttaattgaaggactctcagccatctagtgcagccattcagccactggcaggctctgtgatctcaaactgtgaattgcattttaaagaggaatcgaggagagaattctgtggaattctaggttttaagtgctggctgttgttcaatggaagaggaaatcatttgaacaagaatcgcatcaagttgtgttgtgataaattttctttattaggatgaataacatgcacagatgagcttcaaaagtgaatgagcaaacttactggttacactctgcatccatttactctgtttagtatggagtaatgttaggcaataaatgatgctggcaaatgaaatccgtatgttatttgcatgtggtatttaaacctaggaaacatagagtggctttggtatttgtaggcttagtcatgtgtgtcctaaacgtcctcttaaacttctacttaaggcatagaattatttaatcctaaataattttatacttaagtgcctcactggatttccagaatatttacactgtaaagatttagaaaggtcatgaacccaattattgactatatggaatcattattgatggcagatgcaaaatggagctcactaatgtactgacattgaaaaccttttgcaggggagaggagggggagtggtaaatgtgtgtgttctttaagtggaacaggaaggtattctcttttctgtagaaaaatttgagtatctggtcagataagtgtggaagctttcatttaaattaagtatttaagttcaagtagaagctctagggcacttatcctcttgatgagacaaatcttatcaaatatactagatgctaagaagtggctcattgccctgatgtctcatttatagattgatgtttgaggatgggttgcattaagtgagttagggggctgagtgtgggacaggagaacgattggaaggaagcaaagtaaatttacaagctttagtgacagccataataaagtaaaagtttatttccagagagcctagagagtaaggaacgttatatagttttccccaaaggttcacttgaaagaacttttcattggttgtcatggtagtaatgtcctgattttgaaatctcccagaacctagtagctcttaaacatgctttcatcttggttcctttggtctgacggaaactttatgacgaccctctgtgtttttgacatgcctctgcatttttggagagaggaggtcaggcaagggaggatttcttaaaactaagacagtatagtaaggaaacataaaattatatgataaaaaatcactgaacttcaaattgacttactgaaataaaacctagaaggcaacctgtcgtttaattacaactagcttgtataaaattaaaatttataaaatgggaattcaaagaaaataaacgggcagttccaagtaatttaagcaactcaccaaaaattgaagtaatagtgccacctagagaacaaaatcaccagctttactagccaaatggcttatttccatatgaaccatttttccaacgctacagttactaggatttccttgttaccatattcagatcttgtgagtgtgtatgggggtgggggttgcatgtggaattacagatgaaattttaaaacaagcagatccacaatttgatatatgcactaaatccttttaacgttgtaatgtagccaaatgtagaatagcatgccaggaatcaacggctagcatcctttttaacatttattattttcatggatatgtaccaaaccgaaccattgagtataaaggttctgattttatttatttgctacaggcaattcattatactttctgagatacaataacaccaaataatttgagtagagagacctttaagaatgttttcgatttatgatctacctttaactttaatgtactcagaagatgtgagaataaaataaagtcaaatataagcaagattttaaacacacacacaaaaaacaaacaaacaagaaaaaggaagaaaattataaggattgccttaaccttagaatagatgaaggtatacatctgagccagcaccaaaaaaaaaaaaaaaaaaagttatggaaccaggaaccaataattacaaattgacttaaaattcttggatgacaaaaatctatatttagttcatttttgcatgcgcccacaacagcatccaaaacagttctggggaggcactttgataaatgttgctgaatgcactaatagattgattaatggctgcttcagattatcactagtgatgtagacagaaacttcatgaaaatggtttgtcttgctggaagaaaggcagaaattggaggaaaaggtttaataatatttttccccagtacctattataaaagtcatttagttggcttagttctataatttcttatgtgtaatttgattcacttatgaaattgtgaatatatgaaatgttaaagttgatttagacagcaactataagcttgtggattttcttttaaatgtcttcaaatttttaaatgccagtggagatgccagcgactgtgcttcagggagtagaatatagtatatcttaaatttgtgccaatttctggtaagcagagaaaaaattgcatgataaccaaagaaagtcatattgtttgtgctttgtgttattcatggaagcaatcaggtgcagaaaactttctttttcagaaaaaaaaaattactaaaataaaggtgcgtgtgtgtgtatgcacatatatctaaagggagagagggagaaggaaacttactaaataaaatttttgccacatgggatttagtctaatcagtcttggttttggagttgctatcatcagtagttccattttgtgattctttctttctgccttcatgtgcctttgaaaactgaaactatgcccaaattaaaacaagtttttctgtcttttcacatgttcacttatttcttgaatgtgtttttaaacacagacaaacttcttttacatcatgtagaatctgaaggtcgagaaatttgcagtcattttgctggagagagatgcttggcggagtcccaggccacattcctaggccaaactctcgaaggtattcctcttatgcaacattgggaaaatacatccagcaccgacatgttggctgataatgtgtctgaaggcacagacgatatgcttatcatatgaaacataaagccagcagatattgcagacattctgttgaatgatagaatctggatcatttacatttacttaaatgtaaaatactatgattaagtacaaaaaaatcaatttaggagagaatagagagttgcgggcacggttttaggggatgacttatcagcagattgtagaaaggaagcttgaatgttttaaattaactgcaagttcagtataagccagtggtgtgacaagaggctgttatcatagctactgaaattttgggctgcactgctagaaatataatactgaaatggagaagctaataattcttcactttttaaatagactgtatctagaatattatcatcagttcaaggaaatgaaataagttgttttaggtacatcatcgataaattagtgtacattcaaatcactgtgaccaggatgcatagggaatttgaaagcattgcatgtgagcaatggttgaggggacttggaatgcatgacttagggacaagaaaacttaggctggaatggcaagtggtttttgaatgttgggttgagaagaattctaaaactgtgaaggattagtaaaaataacattcagattgctaatgcctactgtggctgggagattagagtgtcaacatgtgtgatgtatttttgacatccttattttgaggatgggcttcaaagatttgacgaactgtcataagtgtaatttgtgttgcttcagacagcagttctagaaccaatgatgtaaatttagatactctacatggtagttagaaaactttccattaatttaatttagcaaatattgaatgctcactgcatacagagcactttattagaggaatatataataaagaaaaaagaggtctggtgtggtggctcatgcctgtaatcccagcactctgggaggctgaggtgggaggatcacttgagcccaggagatcattacgagtctggacaacatagcaagaccccatctttacaaaagacaaaaaaaattatccaagcctggtgacaggcacttgtagtcccagctacttgggaggctgaggcagtaggatcgtttgagcccaggaggttggggctgcagtgagccgtgattgtcccactgctcttcagcctgggtgacagagtgagaccccgttggagggaaggaagggaaggaaggaagaaaggtaggaaggctgaaatgaaacccttttagaaatgacactaaaatgggaggttggagtaaggtattttctgaagtgcctttgtacttgtttttttctaatgcattggccataagtctgctccttatttatagtccataaacaatcctaatgagaacagttatatatttctgcctttgaatcatctacttgaagtgtttagcatcatgaattgagtatcagaaatccctcccatttctttgcaaagcgctgtattttacttttccttatttgtatacagattctcaaaattggctatttttcctttgggttagacagaacagaatgtctggaaaaaaaagttcttatcaaattcaggtgcccaaattgcttaagaaattaacttttgaggttatatttttttagggttcagtagctaaactaagaaaacttctcaccgttcaccttcacttttggaaaccacaaaatcttcagatattacagttttccaaagagtttctctttttaaatataaactaaaaggaattgactcctcccccaactccctcaggcctcagcatggatagagttactttttttctttaataatttatttataacttattttgctcttctgtagaacagctggagattaagcaacatggccatgacataaaatgcaagttagaccataagatgagcagcccactccaagtatgaatgagtacttattctttgtgatctctcatactgcttttaggtattaatagtgtcagtcagcaaagcaaacagtttaatatttacatctcctttaggatatcatatagtttatagtttgtatgtgttcttgcgtgtatgttttcttctgtttcaaattcttttttcttaaagtaagaatgttatatgtagcaaatggttctttcattaattcatttgttaattcaccgtgcattaattgagtgcccagtgagtgtcaggcactgggctacttggatttcttttccctgtattgatccatatatcttcaggtgctccttgatatggctctccattgactctctcatataaggctttcattacctattcacatactccctcccaaagaggactggtccaaaagtaaaatcttgagcaagttctctgagttatttcagaacttcttgcccccaaactgtatttttaattattgactggtagcattttggaataacttacctctcttttttaaagattgaagttctttatcctctctgattttcaggtgtcagtttgtgtacaaattgagacaataaaaatgtttgttagacattttcttaaagcattttgctatgtgagaatctttcatgaagaactctttttaacaatgactctatagcagaagccacagtagagggagaactactgaatcaaagatggtgtttgagtctatgattttatgatggattttttttttttttacatacaaggatatgcatgggtcttttagtattcaggaatctgttcttcacttgacagtatttataaattgtgtgtttccccctaaaaaaacttaaattgtgagaatgcttccatttactagaagttggttaatgattatgccaaataaggaaaataagacagaaaaatcagtttagtgaatactattttgcctttaaatttagtaatttagtaacagtatctctttggggtttactagaaaccactttttaatccaataggtctctttcattgtgaagtcaggaggtgattttgcttaaatgtgtagtataggaatctatatgtggtgttcaaggatcatgtaaatatgctgatataatcggagcacagtttggcatcattaactcagaaatatttaaactcttgctatacaacatggaagcaaacttgtgcatagtttgtgtgtgtgtgtgtgtgtgaatctcaaaaaaagaaaaaaatcacaggatcaggaagtcggaataggtcccacttttcttctagtaccaaacctacagccatgttcctagccttctcttttactcccaagcaagacagacaggcaaatgaccatcctgctgcccatttctgtgtatattcacttgcattgagagttgtattcacctgcttgttgagagtattcacaaatggtacctgataaagtagatacttctttaaacatgtgaatttttttgcattgtataatgtttagaaataatcatgtataaatggttgaatattaatacaggattgccttatcaagtattttattaatcattaaaatgtggtgtcattaatacaatttattttaagtgcttttcctaaaataccagattatttttctgattttcacatccctgacaatgactttcttaaacttggtagccaggaacagaaaacctaacactgcatgttctcactcataagtgggagctgaacagagagaacacatggactcagggaggggaaccacacacactggggcctggagcagggggcaggggaagggagagagtgcgtcaggacaaacagacaaatagctaatgcatgcgagccttaatacctaggtgatgggttgataggtgcagcaaaccaccatgacacatatttacctatgtaacaaacctgcacattctgcacatgtatcccggaacttaaagtaaaataaaaaataataataaaataaaataaacttagtagcatctattgttccagagcctgtaattgctcttcaggcagtctcacataaaaacctaggagaaccttcactgtcactgttccatgaggtgttaggaaaacttgctctactgcagtgccccagtaggcattggtactgagaccaaaattcagctggtttgttgttactacgattcctacgtgatttcacttgtcatgtagacaagattgcacacttcaataataatcttgtccaaatgtgtggtattccatacatttttaaaatgcattcacatatctcattccatttgatcctacaaataactctataaaaaagattggcagacattatttctatataacagaggaggaaactggagcttagagaagctaaatagcaatccaaaatgcacagctgtagaaccagagcaaggatgatagcccagtgacttcacctaacctagtccccttaccaccactccagctgtctataaccaaaacctgcagtattcaagtaagaaaccatatcttgcccttgatgcattaatgtgagacctggagcaggaacaggctgatattgtcaccctggcctactgtccacctttgtctccagcagagactggtacccttctgtgtgccaaggaataaagtggtaatgggaagattaaaaatgttttttccaaggagttttttaatttaatttttttaaaaaagaaaaaactcttagagggaaaaatgaatatatgacttttgatgtattgttccttagtaacttagttataattttacttaaacctgagactcttgctaagtgaatgattagaaatattaggtggctggccagatggcaaataggaacagctgcagtctgcagctcccagagagatcaatgcagaaggtgggtgatttctgcatttccaactgaggtaccgggctcatctcattgggactggttagacagtgggtgcagcccatggagggtgagccaaagcagggtggagcattgcctcactcaggaagcgcaaggggtcaggggaactccctcccctagccaagggaagccctgagggactgtgccatgagggacagtgctatctggcccagatactacacatttcctacagtctttgcagccggcagaccaggagattcccttgggtgcctacaccaccagggccctgggtttcaagtacaaaactgggtggccatttgggcagacacccagttagctgcaggagttttttctcataccccagtggcacctgaaattccagtgagacagaaccattcactcccccggaaaggggctgaaggccaggcagccaagtgatctagctcagcagatcccacccccatggagcacggcaaggtaagatctgctggtttgaaattctcactgccagcacagctgcctgaagtcaacctgggatgctccagcttggtcgggggaggggcatccgccattactgaggcttgagtaggctgttttcctctcacaatgtaaacaaagccactgggaagtttgaactgggtggagcctaccacagctcagcaaagcccctgtagccagattgcctctctagattctccctctctgggcagggcatctgggaaagaaaggcagcagccccagtcaggggcttatagataaaactcccatctcatgggacagagcacctgggagagggggtggctgtgggcccagcttcagcagacttaaatgttctttgcctgttggctgtgaagagagcagtggatctcccagcacagcacttgagctctgctaagggacagactgccttcttaagcaggtccctgaccctcgtgattcctgagtgggagacacctcccagcaggggtcgacagacacttcatacaggagagctctggctggcatctggtgggtgcccctctgggacaaaccttccagaggaaggaacaggcagcagtctttgctgttctgcagcttctgctggtgatacccaggcaaacagggtctggagtggacctccaccaaattccagcagacctgcagcagaggggcctgactgttagaaggaaaactaacaaacaggaatagcatcaacatcaacaaaaaggatgtccacacgaaaaccccgtacaaaggtcgccaacatcaaagatcaaacatagataaatccacaaggatgaggaaaatccagcacaaaaaggctgaaaattccaaaaaccagaatgcctcttctcctccaagggagcacaactctttgccagcaagggaacaaaactggatggagaatgagtttgatgaattgacagaagtatgcttcagaaagtgggtaaaaacagactcctccaagctaaaggagcatgctctaacccaatgcaaagaagctaagaaccttgaaaaaaggttggaggaattgctaactagaataactagtttagagaagaacataaatgacctaatggagctgaaaaacacagcacgagaactctgtgaagcatacacaagcttcaataactgaatcgataaagcagaggaaaggatatcagagattgaagatcaatttaatgaaataaagcatgaagacaagattagagaaaaaaagaatgaaaaggaaggaacaaagcctccaagaaatgtgggactatgtgaaaagaccaaacctacatttcattggtgtacctgaaagtggcggggacaatggaaccaagttggaaaacactccttaggatattatccaggagaacttccccaaactagcaagacaagccaacattcaaattcaggaaatacagagaacaccacaaagatacccctcaagaagagcaaacccaagacatgtaattgtcagattcaccaaggttgaaatgcaggaaaaaaagttaagggcagcgagagagaaaggtcgggttacccaaaaagggaagcccatcagactaacagtggatctctcagcagaaaccctacaagcctacaagccagaagagagtgggggccaatattcaacattcttaaagaaaagaattttcaacccagaatttcatatccagccaactaagcttcagaagtgaagtagaaataaaatcctttacagacgagcaaatgctgagagattttgtcaccaccaggcatgccttacaagagctcctgaaggaagtactaaataaggaaaggaaaaaccggtaccagccactgcagaaacataccaaattgtaaagaccattgaaactatgaagaaactgcatcaactaatgggcaaaataaccagctaacatcataatgacaggatcaaattcacacataacaatattaaccttaaatataaatgggctaaatgccccaattaaaagaccacagactggcaaattggataaagagtcaagacccatcagtgtgctgtgttctggagacccatctcacatgcaaagacacacataggctgaaaataaagggatggaggaagatctaccaagcaaatggaaagcaaaaaaaaagcaggggttgcaatcctagtctctgataaaacagactttaaaccaacaaagatcaaaagagacaaagaaggccattacataatgataaagggatcaattcaacaagaagagctaactatcctaaacatatatgcacccaatacaggagcacccagattcataaagcaagttcttagagacccacaaagagaccaagactcccacacaataatagtgtgagactttaacaccccaatgtcaatattaggtcaacgagacagaaaattaacaagcatattcaggatttgaactcagctctggacccagtggaactaatagacatctacagaactctccaccccatatcaacagaatatacattcttctcagcaccacatcacacttattctaaaattgaccacataattggaagtaaaacactcctcagcaaatgcaaaagaatggaaatcataacaaacagtctctcagaccaaagtgcaattaaattagaactcaggattaagaaactaactcaaaaccatacaactacagtggaaactgaacaacctgctcctgaatgactactgagtaaataacaaaaagaaggcagaaataaatacattatttgagaccaatgagaataaagatacaacataccagaatctctgggacacagctaaaacagtgtttaggggaaattcatagcaataaatgcccacaggagaaagcaggaaagagctaaaatcaacactctaacatcacaattaaaggaactagagaagcaagagcaaacacattcaaaagctagcagaagacaagaaataactaagatcagagcagaactgaaggagattagagacacaaaaaacccttcaaaaaaatcagtgaatccagaagctggttttttgaaaagattaacaaaatagatagaatgctagccagattgataaagaagaaaagagagaagaatcaaatagacgcaataaaagatgataaagaggatatcaccactgatcccacaaaaatacaatctaccatcagagaacactataaacacctctatgcaaataaactagaaaatctagaagaaatgaataaattcctggacacatacaccctcctaagactaaaggaagaagtcaaattcctgaatagaccaataataagttctgaaatcgaggcagtaattaacagcctaccaaccaaaaaaagcccaggaccagacggattcacagctgaattctaccagaagtacaaagaagagctggtaccattccttctgaaactattccaatcaatagaaaaggagggaatcctccctaactcattttatgagtccggcatcatcctgatacaaaaacctggcagagacacagcaaaaaaataaaattgtaggccaatatccctgatgaacattgatgcaaaaatcttcaataaaaaactggtaaactgaatccagcagcacatcaaaaagcttatctaccatgataatttggcttcatccctgggatgcaaggctggttcaacatatgcaaatcaataaagataatccatcacataaagagaaccaatgacaaaaaccacatgattatttcaatagatgcagaaaaggcctttcataaaattcaacagcccttcatgctaaaaactctcaataaactaggtattgatggaacatatctcaaaataataagagctatttatgagaaacccacagccaatatcatactgaatgggcaaaagctggaagcattcatttgaaaaccggcacaaaacaaggatgccctctgtcaccactcctattcaacatagtattggacgttctagccagggcaatcaggcaatagaaagaaataaagcatattcaaataggaagagaggaagtcaaattgtctctgtttgcagatgacatgattgtatatttagaaaaccccatcatctcagcccaaaatctccttaagctgataagcaacttcagcaaagtctcaggatacaaaatcaatgtgcaaaaatcacgagcattcctatacaccaataatgacaaacagccaagtcatgagtgaactcccattcacaattgctacaaagagaataaaatgcctaggaatacaacttacaagggatgtgaaggacctctttaaagagaactacaaaccactgctcaatgaaataagagaggacacaaacaaatggaagaacattccattctcatggataggaagaatcaatatcgtgaaaatggccatactgcccaaagtaatttatagatccaatgctatccccatcaagctaccattgactttcttcatagaattagaaaaaactactttaaatttcatatggaaccaaaaaacagcccgtatagccaagacaatcctaagcaaaatgaacaagctggaggcatcatgctacctgacttcaaactatactacaaggctacagtaaccaaaacatcatggtactggtacataaacagatagatagaccaatggaacagaacagaggcctcagaaataacgccacacatctacaaccatctgatctttgacaaacatgacaaaaacaagcaatgcagaaaggattccctatttaataaatggtgtcgggaaaactggctagccatttgcagaaaactgaaactggaccccttccttacacgttatacaaaaattaactcaagatggattaaagacttaaacataaaacataaaaccataaaaaccctagaagaaaacctaggcaataccattcaggacataggcatggcaaagacttcatgactaaaataccaaaagcaatggcaacaaaagccaaaattgacaaatgggatctaattaaactaaagagcttctgcacagcaaaagaaactaacatcagagtgaacaggcaaccgacagaatgggtgaaattttttgcaacgtatccatctgacaaaaggctaatatccagaatctacaaggaacctaaacaagtttacaagaaaaaaaacaaccccatcaaaaagtgggcgaagggtatgaacagatgcttctcaaaagaagaaatttatgctgccaacaaacatacgaagaaaagctcatcatcactggtcattagagaaatgcaaatcaaaaccacagtgagataccatcttatgccagttagaatggcgatcattaaaaagtcaggaaacaacagatgcaggagaggatgtagagaaataggaacacttttacactgttggtgggagtgtaaattagttcaaccattgtggaagacagtgtggtgattcctcaaggatctagaaccagaaatatcttttgacccagccatcccattactgggtatatactcaaaggattataaatcatgctactataaagacacatgcacatgtatgtttattgtggcactattcacaatagcaaagacttggaaccaatccgaatgcccatcaatgatagactggataaagaaaatgtgacacacatacaccatggaatactatgcagccataaaaaaggatgagttcatgtcctttgcagggacatggatgaagctggaaaccatcattcttggcaaggtaacacaggaacagaaaaccaaacaccacatgttctcactcataagtgggagttgaacagtgagaacacatggacactgggaggagaacatcacacactggggcctgtcagggtgtaggaggctaggggagggatagcattaggagaaatacctaatgtagatgacaagttgatgagtgcagcaaaccaccatggcatctgtatacctaggtaacaaacctgcacgttctgcacatgtaccccagaacttaaaagtattattattattattataataataataataaaagaaatacaataaaatagaatgcagcatacagcagtgattctcaaacacattcagcatcagaattacccttgaatctttaaaatatatatacatatgagatcttagtctccaagatttgtaagtttggtattgggtccctgggcctatgttgggtttagaaacttctacagatggtttggatgtatgggacagtttaagaatcgctgaactaaaatcaaataaactgaatatcctgtgatttagagagacttatcgtttatttcactatccaagtacttgcattagagcgtggctagaagggatttgcagccttgtaaataatcagaaattcagacattttgagatgagagaactgctgaagattttattctgacttgaaataaattttctaattagaaacttccaggtgagagcaaaggcctggaacaatattcctgagccagaggaggatcgagtttgactccaggcctaacacttactaggtctatgaccttgggtcagtaatttaaattctctgtatctcaacctctcaacagggtattggtagggattaaatgtgttagtgtctgtgaagtgcttagagcagtgcttggcatagtaaatgcttaatgaatttcagccactgtttttatttttagtactttccagctcccccaaaaagatactttttttagacttgtattaagacaataaaaagtttaatcagcatgcttcatacctaaatatgcttcactttatagcaaagtttacaagactaaaactgttttgttgtaattctctgagtctcatgtgtttattaatgattttttctgctgtttattcatctgaattctactcattcttcaagacctagctggaatcctgtttctagaaagactcttgcccataataataaacctgccctatctgagttcctaggtggtctgtacctcataatttggtaattaattgtatatgcacttatataacaaaacattattgtgtgtctttgctgtatcagattctaggctggaagttgtagatatgatgtttttgtctagaaaaatgttctagaatgtcctactcaggacagtctgttgactttaaagacacatttcctaaacagacacttcatgaggcagccccagcctgtacctgtgttcctggacctgatgatcaagtttgatttaagcctcaccacttactagctctgtgattttgggcaagttacttgaattctctgtgtgtagatagaacaatgttgagggaaatccctttcccccatccttgtgtttccacaagggaacttgcttcctaataagtaacactttcaggggaatattctaggcccttctcttatccccattacttgttctttctgtgaaaagaggagaggttaatctgatggatgaaatccttaatctttcatcttctggactgtagagcctgtgaaccaaagcaatggaccacttgcactgaaattgaggctgaccctgtattttgattcttatttggcaacttatttctattctgttcccaattcaaaatcccaaggggagaaggaagataattgattaccagaagtatgtaatggtggtaggaagttgaataaatggtaactttttaaaagttgcatgagatatagtccttatcccagagaagctaagtttgcttttctttcctctcatgtattttagtattatttctacaattagattgtaaaccctttaaaagcaagaatatttctacattttcttactcctgatagcacacagtagactgctgggcacatacatagtaggtggctctgtaggtacttgctaaatgattcaacatgtttttccctcatggaaaagaaagatttcagtattgttcttatcagctaggaaggcactctgaataggaaatcagttctaggcaggtatccataaatgggttatgatttccaacttacttgccccagaggctcgctaatgttgaactcttcatgggtactttgtcttgcttcatgagctatacatgctaaggggttagcagatcatataatcttttgatctacaaaatatgatctttattgaacaaaaacttgggccaaaggcctttctcctttgccaccttcctccctcttttcattctcttttttgggaatgccctttgtgcatgttagttacagcatgtaccacattgcactgtattgttggtttttgggtctaacccacccttaacactgcagtccccaagggcagaaattcagtctcattcattttgatgtcctcagtgcctgtgctcagagaatatctattatttgaaaaaatagtgcaaaagtaaattttaggagactacatcacactcatctaaactgcaagtttgacaagttgacatccaaaagaaaggctctcctaaataacctcgccacagaaatttgggtgacctttgtagctctggagaaagcagaggcaaaaatgaaacctaaaaattatttgtgggtttttaaaaaatgttttctcatggagtaaaggtctacagctgagttcttttcatatgagggaatgacagaaacacagctggttctgactttcagcttcaactgagcgaccagagctctgctggtgaaacaggaacttgtattgtgcccctgacgtgcaccttgaaggtgtcagctcattgtccctttgttcacataaatagttttttaagaattgtttttgatcttgtgagcctctaactaaatgattaaccatgcaaagttggccatttggggtaatactgaagcacttctcttgagggctattgacaggtgggaatgtgcccacctccttgggtctctggttttcatgtcatacttgcaaatcagtgacagtttaaacttggggcaatcacttagcaagtctattgagttaccaagttaattattcccactttgcatgaagcaaccttgaaaatgattttcctaaagcaaagtacatccaaactcagtaccttcttaataacctttgctgaatgaataaatgactaattcataaaaaatgtaacatatctttaattcttacttacgggcagtttaagcctcttgtgtaagaggaggcctcggcttgagataacataggatagtaagcctcctagagaaatttctatatggaaacatggtctgctatgaagctagaagtgagaggacattatatttgaccattatatttggcttcagagcttctcaacatggggcccaaagtcaaggtcccttgtttcattaagaggaggtccaggagtgcatgacacccatcagactactgagacccagctggaactaggcaccttgcacaggggccttgcctaatcaaaatagttcttattttttctgagttccaagtaactagtttcctaacccagtgtctggatagtagtgccaagtgggagtaccttcaatgaacttcctcatgaggttatttctagcctattggaatgtttcgttttaggagggtgaggaagggaagtcttgaatttttgtgcttagtttaatgttgtgatacagctttgaccatccgtttaatgggagatctgttttccagatgactatacatgtggaaaggagaagttttttgagtgttttttttaaccccttttaaagaatggtttttcatttagtctctacatttgggggtaaaaggtcctctagggagacttttcaaaagtatttgaagtttgcatctgatttcagaggtgagttggaggcctatctgtgtatgacagacacatgtctccaacaactatatgttcacaaggactaagagccatccttttgggtccatcattcaacattgatctcacattcgtgttcgtatcagtatctttacagtgcgctcccagttacatctccctaatttcccttagtaggcttcacagaatttgcagtgtatgcaatggcagatgaccacatgtggagtcatttaaccacatcttccactgcaagtcagcccgctcttgatgtctgtttatgtttagattccatcttttggaagatttcattcctctgcactatctcagtatctcagatgcttttgagactgggtccttttcccctcctatgtttggccatggccaccccctcagggttgtgttgtgtttcacagctgctgtttgtagggttgacctttacaatgtacaaagctctttcccatatgttgacaatccctggtgtgatgctgtgagttaggcagggtgtgtatacgtgtcctcatcatattacagtggtaaggcaacagggtttttgaatttgatcacccatgaatttgtctaatttgttggtaaaaaatggtcatgtatcagccgtttcacagggtcagcttaatagaaagtgggagttaggcaggaccagaattcaggacttcagcccccggtcccagggactattctctatacccaattgtcccaccttgaatcagtttcttctagggaaatatctccaaaactgagatggcacccacaggacttcttaattgtagtcattaccaggaaaaacaagcaaaggaactggtgtaaatctctgtttttggtgattggtggagatttggagattgtcttgtgtcaaaagtaaagccactagattaaatgttttgttaataaattggttatttttaatttaattatttgacagttaatttacattattcaaaaatcaaaataaaatttaaaagaagtttacactgaaaagtcttgccccacttataccctgctcacctcagtatcccccaatacataccatctataaggtgatcatttgtattagtttcttgtgaatccttgatagtgtgttttatatagatacaggtaaatatgagtatgtactattatttcccccccaccccaccctgttttttttttgagacggagtctcgctctgtcgcccaggctggagtgcagtggcacgatctcggctcaccgcaagctccaccattttcccccatttttaaaacaaaaggtagtagccatatatacactattttacaccttgttttatcacttactaatatataccagagagctttccatcattttgtacatatgcacctatatctgtcaattattcccagaagtggaattgctgggtcagcaggaaaaatcatgtataattttgataggtattgcctaattgtcctgcacagggcttgaattgtttgtactcccacctttagtgtatgagaagacctgtttctccatagcctcatcaaacagagtgtgtgagattagatgagaaataggaggtgagcagtcttttaccccatccgtagtttgcagtgggaacactgcacagttgcaagagctggtgcaggtatcagattagttccagtggaaacgctgcctcaccatggccatgggcttgcgccagctctagtgacacacacggaatggacccacgttgccacttgcagaatttcctgtagcagaaagttgaacatgcattcattattcatctaactagccatgctggatctaaagagcacaacagtgttttttagaaccaaaaagaaaattgtttcactacaacacactgtgtataaggctttcaatgctcttttctcagctattaacattattttcaggactgagttcaagagatgtatcccaaatcacagggatgtcttgctaagcttggaactttcatactcaagggatgcttttttgaggaatgattttacacttactcaacatttgtaattaaataattagtactttataagataaatttaaactgtccaagtacaatataaacattgaactatgatgcattattgctagactttttccttaaagttgccaagtggtttcctgcattaggcaaataggggatcatataaaaatgccatgatttacggcctagataacatctccaccatttgagcagcatatattccaggtcatccccacataactccttaccattctcattagaaaggttgattcttagtcttatttttctctgaggacagcaaaaaaaaaaatccccttcagttccactgcatagaaaagtgtggtaaatggagccgggcacagtggttatttaatttaaatggacaatattttttatagaattttgacagggccactgtataggggaaagtcactcctcttcccctttatagaagagttgcacctggacagttgcattgatgactgtatccagtctacacaagaggtcattcctgggcataagaatggactgccaaaatctagctgaaacaccattgacaaatagacattttcttttgttaataatacctgtgaaggctttcataacagacatttccagttttgttctcaggctccttgcagctgctcctctaaaagtgtgctctcttccaagagctgacaatggccagaagcaaggtgttctgtcttttgtgccatcatcatctaacttgccacacacatttgggatgtcagcctaggtataggttttgtatccactcagtatggcttgtgggtctggttgcctttgttattcatgctgagggcctctgggcatcagtttggtgtgagagaacccattccatgaccctccttcctttggctgttttgactcgatggctcttgttggcacagtctgtgagtgtctgatgctctatccatgccggaccatctgttctgctgtctctgtggtctgaagtcgttttctgaactattccttgataataaatttgagatgatcttgttctacctttcttttcaagtcacatcttagccccttagccacattcccgaagaacatgacaaatggatgggtcacaagtcacgtagcatagggtgtcagaccacgaggctttgaagggattctgttgggtgctaaaaagaaagattttgtgtcaccacgattttttttaaaggcatgttgacacttaggccttaattgaaagcgttcttactcaagtagagttgacagaggagtatttggtagtcgcggttgctggtctgaagagcatgtggttctgtttcaatgcccaatgagatcttctcacgggaaaatgttctgacatctcaaacaaatgaccttcatgcatagttttgacaaaataccctattaagtatgcatatatggttggtaccttgtggtaataattcaatactggaaacagagtagcaacaaagaaacattagggttatatttaacctctgtggaattagtgtgtaaacaaactgcttatcagaaatgctcatatggggctttgtttaaataaataagaaactggcatatagggtctgcaggatatttctgccaagtagacctccctcacattataagacaccacatctatgtctgaccccatatggaaagaggcatagcaagccagcactggttcatattccctctccaccacataatgggtatgtgatcttagggaatccaccgaaactctctgggcctcagtttcctcagctataaatggtggataatcaaattatttacctcaccattaataaatgttagctattattttttatcaagtttaatacaaagagaaacattttacttatttttccagctatccagagcatcttccaaaatcctatcaccaacaaatactgtattgtatttattatagcaactatgtaaaaatggagtccctgtcctatgcttagatgaaatatgttggtatttgagtttgcatgtcttctataggaatcagtgtttagtgaaaacgggtggagataaacagatgttttcacagtcctgttgttcacagtaccgccaaattgaatgtttccatataggtgcattctaatggcttaaatgatgcagatattttctggccagccatatggatcttttgtcatctaagatgttaatattttccttatattttatagtagttctggagtacagccagtttcttgaatagggtccacatggctcattatgcacagggcctggaaactgccttactcgtgctgttgaaatgaaccgtgacacttcagaagagctgggagctggggtagagcagtggctaggagaacatattcaattatatttcctcctgcattaagctacaagtaatgagcactttcctgtgctttacagttaagtaattaaaagaaattatagagtgggatgcaaaaataacccgaaggacaactggatgtgtggagccaccagttttctccatgagtgcacaaggttaatccttgttactactcagaatgctgagtttctacagaaagggttgcaggtccacacatgttttggcgtctacccacacgcttctgtatggcatgactgtgcatcccagaagaagggctgtgctgtgtacctccacgtttcagtggaatttaacaaactgatccctgaaaatggtttcataaaggtgagtaacagagagctaatagccttctcttgctaattttatctttcccccaagatttcttgataatagtttgaaaaggagtgttattctttggtctctagaggcaacttacctttccagtttcttccatcacctgttttcatctctcttgtttttttaaatttaatgctgtatgtatttcagaggataggatctaatctagtgcggtcccttcatcaggtgagaattattcatctcattttcattttagcccttctgaattaatgacattgaagcccggcagtttggtcctaagatgggtttaattatgtacagatactctttctataatggaaattgctcagataactaattaaccacaagaatacactgtctatggaaaatttcaggagcaccgtctgtggaaaaactgggaagggcatgctgtcaccacagctctggggtctattaaaagtgtggttatgcagcactggtgtctagtggggtgttggctctcaactgccagaattcccatagcatttcatggcagaaagtcaaggtgtccagcaatactctgaaagtgacctgttgattaaagtcgtcaattctgaagaaagagactgaaataagacaaatgggtcttaactttttttctctttctctctcttgtaaaaatgtgtgattgttctggcatgttcccaatccccacataatgccaacatcttttcttaaagggggattccctttatccttggatctgagaattattgcatgttctccctttagggacaatgaatgcagttgcatcacccttgcttttttttttttttttgtacacagcatgcttattcttggatgcagggacttgaaagacaaagccccacctggctttcacaacatctcctattagtaggtgtgccttgtgtgtaatttgaaggaggcggtcccttagctgtgtttacactgtacttttaaatgtggggctgaaggtagaatcaaccatacttaagatgccacctgggaaaatagggttctgtgtcatctcagccccacccatttgcaaatgacttaacagcagcactattagggttcctagtgtgagtcatttgcatttggactggtgaacttggtgacttcttggtgtttggaaacaaacaacctttgcagtctttcgtaaaaagcctgaacagtggaccagtctccagttctacttgcaaagctgcccccatcaaatccctcataatgttcaacttaaaaaatgttacacttttctctggaaatctaaccttttttccttttttaaaagccattttaagtacttcagtcttgaatcaaatgatcccaaatattggacaccaacctagaaattgggttacctcctgggaactttatcgaagaagagagattttggttggagagggggttttgatgtttgatacttatatttactattttaatatttcattgttgttgttgctgctgctgctgtattattttgcgagtttcgtttgtttaaatttcatggtatttggtaggagagagctggatctgttggtttcaggacaagtctagaaataagaaatctgccttgagtgagtgagttggttccctctgttgctatttcaccattaaggacgaaaggaactcacaaggaccagagacatctggctgaaagcaatactagtgtgactggacatctactacctgccatagttggtcatatcgtttccagtatgattctgattgagtgagtgatattaggctatgttcagggatcagggaggctaattatgcttatattgccttgtagcattttggtaagaattaatgattgtgtagatgtccagatttaggtcagcaatattctaaaagttctcattgaactaatcatgtttataagtagcctgtactttctatcataataacaatagtggaaaagctagttgacataaaaggagcccagattttacttaagtaaaaacacaaaagcaaagatattttcccacataaattacaaaagcaaagatattttcccacataaatgtccccataaaacaagttgaaccaaagaggaaagatgacaggtaaccgtatgacacgctaagaaagtatcataatacttaagttaacttcaaccttttatttccttatcctaagcagcctcttttctctttatcatttagtcctgtgcttctcaactttgataagtaaaaaagttattgcactaaataaatcttattgaaatgcaggatctgattgagtgggtggggtaggtggaatgagggtggggaagttgagattctgcatttcttagaagtttctactttatgttaaaatggctaatccatctcaacattgagaagtaaggtttcacttaatttcagcctgtgtaagtttatcccatatgtacatttcctaaaactctaatctcaggccccaggaatttctcctttagttaaaatatttttaggaataaatttgaattgcattaatacacaatttataaatttaacacaaaaaattatttgaagtttgagactttaggttgcatgaaatcaatttcatacttgaaaattttctataaattcaaaagtctgtgtatttaaatacaatttaaatacctgtgttacagtgacatttgtttttctgtctctctctccaccatttccagagtcatcatccctgtacagaaaaatttttcccacatgatttcaccataaattcattaaatatgatgcttacttgataatttctccaggttctttttttttttaattatactttaagttctagggtacatgtgcacaacctgcaggtttgttacatatgtatacatgtgccatgttggtgtgctgcacccattaactcgtcatttacattaggtatatctcctaatgctatccctcccccctacccctactccatgacaggtcccagtgtgtgatgttccccaccctgtgtccaagtgttctcattgttcagttcccacctatgagtgagaacatgcggtgtttggttttctgtccttgcgatagtttgctcagaatgatgtccttgctcactgatggacatttggttggctccaagtatttgctattgtaaatagtgccgcaataaacatacgtgtgcatgtgtctttatagtagcatgatttataatcctctgggtatatacccagtaatgggatggctggctcaaatggtatttctagttctagatcctagaggaatcgccacactgtcttccacaatgtttgaactagtttacagtcccatcaacagtgtaaaagtgttcctatttctctacatcctttccagcacctgttgtttccggactttaatgatcgccattctaactggtgtgagatggtatctcattgtggttttgatttgcatttctctgatggccagtgatgatgagcattttttcatgtgtcttttggctacataaatgtcttcttttgagaagtgtctgttcatatccttcacccactttttgatggggtcatttgattttttcttgtaaatttgtttaagttcttttagattctggatattagccctttgtcagatgggtagattgtaaaaattttctcccattccgtaggtttcctattcactctgatggtagtttcttttgctgtgcagaagctctttagtttaattagatcccatttgtcaattttggcttttgttgccattgcttttggtgttttagtcatgaagtccttgtccatgcctatgtcctgaatggtattgcctaggttttcttctagggtttttatggttttaggtctaacgtgtaagtctttaattcatcttgaattaatttttgtataaggtgtaaagaagggatccagtttcagctttctacatatggctagccagttttcccagcaccatttattaaatagagaatcctttccccatttcttgtttttgtcaggtttgtcaaagatcagatggttgtagatgtgtggtattgtttctgagggctctgttctgttccattggtctatatctctgttttggtaccagtaccatgctgttttggttactgtagccttgtaatatagtttgaagtcaggtagcgtgatgcctccagctttgttcttttggtttaggattgtcttggcgatgcgggctcttttttggttccatatgaactttaaagtagtttttttccaattctgtggagaaagtcattggtagcttgatggggatggcattgaatctataaattaccttgggtagtatggccattttcatgatattgattcttcctacccatgagaatggaatgttcttccatttgtttgcgtcctcttttatttccttgagcagtggtttgtagttctccttgaagaggtcttccacatcccttgtaagttggattcctaagtattttattctctttgaaacaattgtgaatgggagttcactcatgatttggctctctgtttgtctgttattggtgtataggaatgcttgtgatttttgcacattgattttgtatcctgagactttgctgaagttgcttatcagcttaaggagattttgggctgagatgatggggttttctaaatatacaatcatgtcatctgcaaacagagacaatttgacttcctctcttcctatttgaatatcctttatttctttctattgcctgattgccctggctagaacgtccaatactatgttgaataggagtggtgacagaggacatccttgttttgtgccagttttcaaagggaatgcttccagcttttgcccattcagtatgacattggctgtgggtttgtcgtgaatagctcttattattttgagatatgtcccatcaatacctagtttatttagagtttttagcacaaaggctgttgaattttgtcaaaggccttttctgcatctattgagataatcatggtttttgtctttgattctgtttatatgatggattatatttattgatttgcatatgttgaaccagccttgcatcccagggatgaagccaacttgatcatggtggataagctttttgatgttctgctggattcggtttgccagtattttactgaggatttttccatcgatcttcatcagggatattggcctgaaattctctttttttgttgtgtctctgtcaggctgtggtatcaggatgatgctggcctcataaaatgagttagggaggattccctctttttctattgattagaatagtttcagaatggtaccagctcctccttatacctctggtagaattcagctgtgaatccatctggtcctgatggatttttttggttggtaggctattaattattgcctcaatttcagagcctgttattggtctattaagagattcaacttcttcctggtttagtcctgggagggtgtgtgtgtccaggaatttataaatttcttttaggttttctagtttatttgcatagaagtgtttatagtgttctctgatggtagtttgtatttctgtgggattggtggtgatatcccctttatcaccttttattgcatctatttgattcttttctcttttcttctttattagtcttgctagtgatctatcaattttgttgatctttttaaaaaaccagctcctgggttcattgattttttgaaggagtttttctgtctctatctccttcagttctactctgatcttagttatttcttgtcttctgctagcttttgaatgtgtttgctcttgcttctctaaattgtgatgttagggtgtcaattttagatctttcctgctttctcttgtgggcatttagtgctataaatttccctctacacactgctttaaatgtgtcccagagattctggtatgttgtgtctttgttctcattggtttcaaagaacatctttatttctgccttcacttcgttaagtacccagtagtcactcaggagcaggttgctcagtttccatgtagttgagtggttctgagtgagtttcttaatcctgagttctagtttgaaagcactgtagtctgagaggcagtttgttataatttctgttcttttacatttgctgaggagtgctttacttccaactatgtagtcaatttttggaataagtgtgatgtggtgccgagaagaatgtatattctgttgatttggagtggagagttctgtagatgtctattaggtccgcttggtgcagagctgagttcaatttctggatatctttgttaattttctgtcttgttgatctgtctaatattgaccgtggggtgataaagtctcccattattattgtgtgggagtctaagtctctttgtaggtctctaaggacttgctttgtgaatctggtgctcctgtattaggtgcatatatttttaggatagttagctcttcttgttgaattgatccctttatcattatgtaatggccttctttgtctcttttgatctttgttggtttaaagtctgttttatcagagactaggattgcaactcctgcttttttttgctttccatttccttggtagatcttcctccatccctttattttgagcctatgtgcgtctctgcacatgagatgggtctgctgaatacagcacactgatgggtcttgactctttatccaatttgccagtccatgtcttttaactggagcatttagcccatttacatttaaggttaatattgttatgtgtgaatttgatcctgtcattatgatgttagctggttattttgctcgttagttgatgcagtttcttcctagcctcaatgatctttacaatttggcatgtttttgcagtggctggtactggttgttcctttccatgtttagtgcttccttcaggagctcttgtaaggcaggcctggtggtgacaaaatctctcagcatttgcttgtctgtaaaggattttatttctccttcacttatgaagcttagtttggctggatatgaaattctgggttgaaaattcttttctttaagaatgttgaatattggcccccactctcttctggcttgtagagtttctgccgaaagatgctgttagtctgatggacttccctttgtgggtaacctgccctttctctctcgctgcacttaatgttttttccttcatttcaactttggtgaatctgacaattatgtgtctttgagttactcttcttgaggagtatctttgcggcattctctgtatttcctgaatttgaatgctggcctgcctcactagattggggaagttctcctggataatatcctgcagagcgttttccaacttggttccattctccccatcactttcaggtacaccaatcagatgtagatttggtcttttcacatagtcccatatttcttggaggctttgttcatttctttttactcttttttctctaaacttctcttcttgcttcatttcattcatttgatcttcaatccctttcttccacttgattgaatcagctactgaagcttgtgcatgtgtcacatagttctcgtgccatggttttcagctccatcaggtcatttaaggtcttctctatgctgttttttctagttagccattcgtctaatgttttttcaaggtttttagcttctttgctaaaaggttcaaacatcctcctttagctcggaggagtttgttattactgatcatctgaagccttcttctctcaacttgtgaaagtcattctctgtccagctttgttccattgctggcgaggagctgcattcctttggaggagaagacgtgctctgatttttagaattttcagcttctctgctctggtttctccccatcttattggttttatctacctttggtctttgatgatggtgacgtacagatggggttttggtgtggatgttctttctctttgttagttttccttctaacagtcaggaccctcagctgcaggtctgttggagtttgctggaggtccactccagaccctgtttgcttgggtatcaccagcagaggctgcagaacagcaaatattgcagaacggcaaatgttgctccctgattgttcctctggaagcttcgtctcagaggggcacctggccgtatgaggtgtcagtcggcccctactgggaggtgcctcccagttaggctactcaggggtcaggaacccacttgaagaggcagactgtccattctcagatatcatattccatgctgggaggacccctactcttttcaaagctgtcagacagggacatttaagtctgcagaagtttctgctgtcttttgttcagctgtgccctgcccctagaggtggagtctacagaggcaggcaggcctccttgagctgcggtgggctccacccatttcgagcttcctggctgctttgtttacctactcaagtctcagcaatggtggacacccctcccccagcctcgctgctgctttgcagttcgatctcagactgctgtgctagcagtgagccaggctccgtgggcatgggaccctccgagccaggcctgggacataatctcctggtgtgccgtttgctaagaccattggaaaagcacagtattagggtggggagtgtcctgattttccaggtaccgtcagtcatggcttcccttggctaggaaagggaattccccaaccccttgtgcttcctgggtgaggtgatgccccaccctgctttggctcatgctccgtgggttgtacccactgtctgacaagccccagtgagatgaacccggtacctcagttggaaatgcagaaatcacccgtcttctgcatcactcacgctgggggctgtagactggagctgttcatatttggccatcttggaacctccctttccaagttctttattacagagtgggtcactgaaacttcatggaacaaattggaaattatcttcttaattaatgtcactgtctaccatgtatgggaatttggtaaatattatatggtttcaataacatagtagatagaacattgtcaaatctaaacttcagtgaattgtaacagatcccacctgaaattctaaagaaaacagaattctaattgaagaggttaaacttttacagggaatgtcaactgccatttgggtcctgtaaacaaaaaactgttttttaaaaaagtaaactttaaaagtattttcagatgacctcatttgctatccaagtggcttgagtatgcttgatgctaagacttctttgttacagactggagatgtgtgctactggggcagtgttgctctgtgacaaggaggcagaggatgagggcaaggttcgatgtgactgtgaattctgggtggctctggctatcgggagccttcattgattacagcaaaacagttgctttcctagggcaatagtgtctctgtcacccaggctggagttcagtggcatgatcaatcgctcactgtagcctcaacttcttagactcaagtaatcctcccacctcagcctcccaagtagctgaaactacaggtgtgcaccaccacacctaatttttttaatttttaagtttttgtagagacatggtctcactgtgttgcccaggttgatctcgaattcctgggctctagtgatcctcccgcctcggcctcccaaagtgttgggattacaaatgtgagccactgcacctggccctttgcaaccttcttgacaatgcattcctttattccctaactggaagtaacttctttctctttataaaattgtatctgtaccttttctgggtcatttctacctttatattctagttacgtatgtcctacctccctcctagggagggaggtaagtaagactggaaagtagacttcatgtgtgatgaatgaatgaacaaaaggaagtctaacatatggatatagtcaactggatgcaaattaaaaatttttaaatattgatttgcaagatttcattaaggtcaactcttaatagtttgtatcatatatgttaggaaccaaatattaataacttcttcagcattaccattatctttataggactgtctaaaatgagcagccatatctttaaactgtgttttctctgattacacgctcacaggtaaaacccaaaggggctgggaacaaacaagacttttttttttttctgtatgcctgaattatctgtactgttgcttgttttcccacctttggccatagaaacttagttctaacatgctacaatttttgcagttctttctcttagaaaaagaccacattgtctgaaatttcatccatttaagtaatcaagccttaaagttgaaggatcttggtcatgattaatctagacctacaaagtagtatcttaatggcactccttttagaaagttaggttccaggacacacatagctgcagtgtccacattttgtaagctccttcgttgtcacagccactctcttctctgtggctgatattctaaaactggcaacacatcctgatggtaaaagcttggttcaggagacaggtgacctactagctttatggcatttgacaggttacctaacctctctgacgcataattgcctcatctatataatggggataataatacccatcctgtctccttgtaaaaatcaaattagatgacgcctgtgaatgttctatagtctcttagacaaatgtaagttatgactacagcaagagtaaaagagcatgttgttatggacattctttcagtgaaatgtctaagacttgtgagtcacacttaaagctaaacttgatatctacttcattgattttctttttagttctatgtactatattgaatttcctgacagtggggctatgaaagccttcctagcattttatagatgtggttgaattaatggctgtaagccttaaagcagaattagacagcatcaatgaatttattaagtataaataaatatataatctgcttagcaatattacacagcctctttatcttatgtgtgataaagagtcatccgaaggttgaaaatgaagaattgtcctggaagctcttacttaatcttttattatttcctaatacagtatataaaattactcattgaaagcttagcagaataagaaacaagaagttaaaaggctgaaaactacaaattttgctattattattgttattacttcccaagtctcttattgatctgttagaaatagagctacacaggaaattgtaggacagttagtatgtggtagtgttatctgctttttaattattcaagtaaggttttattccattagaggaactcaagaagttggtcatggctgataattgctatctgtcaaattccttagagcagggatccgcaacacccaggccatggattgttaccagtccctggcctgttaggaaccaggctgcacagtaggaagtgagcggcgggtgagcaaacattgccatctgagctctgtctcctttcagatcagcagcagcattagattctcatagaagcatgagccctgttgtgaactgcacatgcaagggatctaggttgtgtgctccttatgagaatccaattccttatgataatttaactgatgatctaaggtggaaccatttcatcccaaaaccatccaccctgctactcccagaccgtggaaaaattgtcttccacaaaactggttcctgctgccaaaaaggttgggaccactgccttagagtttataatttggggttagcacagcctatatttacctgagaatttcaatgggttcactgatctttccaaatgaaaaggcttcttacgaaaattatatccaaactgtcttttctcttagtttaataaacctatcagtaagtttttactgagtactgctattacatttttctctgttaagcattatgggggctcagacatgatccattccctcaaagaacttacctttcagctgaagactgactagaatgagcaaatacggttaacaattaacaagtgagtaggccagctcggccaacatggtgaaaccctgtctctactaaaaatacaaaaattagccgggcatggtggtgggcgcctgtaatcccagctacctcctgctgaggcaggagaattgcttgaacccaggaggtggagattgcagtgagccgagattgcaccattgcactccagcctgggcgacagagcaagactctgtcttgggaaaaaaacaaaacaaaacaagtgagaagggaatcaagtactacgtaagatgtaatgtggaattttagggaaggaaggcagtgtatgctggagtaattagagaaaggggcatgcatgatttgatgcttgaactggatcatgaaggataagcaagattttggcagcaagtgagagggagagaggagtttgtcagaggaatggaacaagtcaggaggcagtaatgtgtacggcactccaaggactctgtcctgatcggagcagaagtgatgaagcattgagtagtttgagaaagttagctaagaagggtgagggcagatgttggagagagttgagtatcagagagaagacattagatttgagcagatagaacaaaaatgccattgccagtttttgtgtaagagaatagtattagggtggttacccaggaagtggtcatcagagttgaatggagcagaaagagtgtctgatacagcatcgggacgttgtggtcacaaaatgaggtggtgagggctgagccaagatggtggcagtgggatggataaaaagggatggccaggacaaatattttaaaggaaaaattaacaggacatctttactgactggattggaaggctatgcaggaaatatattgtcaaacttgattccaggatttctatcctatgcctgggttgcccaaaatatcagggaaccattgttagaaaaggtaggagataccactgttccaacaaaaagtattgagtttggtgttgcacccacttaacttcaaggccttacaagtgagtagacagttagttagaattgcagaagtgccactcagagagcagggcttgcaatgtggggttggactttgtcaccattgtgttaattcctaattctatgcagatgctcagcttgaggaatacccatgtttgggcttcagaatgaaagccaagtaatatttactcagatgccaattttccctctgaaatatttgctcatggaactgagagaacaatatataaagcattaattatttttctcataaagttattaataaaaagataagatcagtgaaaggcagagtaaactagaagccaagtatagaaaatggtatcattcaaagactcattactgtagtggtgaaaacaaaacaattttccaacagcttaagatgcctcagtattttggaccatttttaagtagttagtgtgggcacttagtaaatatgtattaaactatagttcattaattcttttttttttttttttgagatggagtttcactctggtcacccaggctgcatttttgctttcttagtgatatataaaatgtcgagtttcacaatgatggtatcttagatttgattaaatatggtattaaaaaatagctgatcacagaaagtctctaccagtgtgatgtagatggctaaagtattccacatttgcaaacttttattgacctaaataagaggtgccccttgggttgtttttatttggactgggaatattaggagaaagctttttcattcagtgtgtaagtacaatctaccagaaatagaaacccccatggacgatctatttctttgatggtacaggactcagaacattcacaaagatttagttgttagcggaatagacatctgtattttattcaaaccaattttcccttcctaatctgagaacattgtgcaatctaagcagttctaagcatgtttgctattcgtgcaaagtgagagtaaatctaaaagaaatttttttgtgtgtttagggatggtaataaagtctcttagtggttgaaaatgttatttcttacaaaagtggagaacatttgcttttcaataccagagttttcagccatttctgcattctgacctattgactggaggtaggttgcctttgaattcagtaaaacttcatgggcagaaacacagttccttttcctacttatttggatatcatgatggccattgcatgtatgtgtctttttgtaagtccatgcctcagaactgagaagtaggaataaaattagggtcagggctggggatgctactctttgctgctgagaaacacaatgcttcaggtaagtgattctgaagtccttcaccacctgacggtaaccttgggttggtccataggtatgttttcattttgcttgttcatccattttaattggcttcctagagcatgcttgtagatgtagagccaaatttagagtagagcaaccctctggcaaacaggaagagattaattttgtggtatgcttttaagggacttcccaggaaacttcaaaagcagaaaaagaagcactagctgcctattccaaaatgtgtaaaacaccactcagctttttaaaagtaggataaactcagagcgcgcgcacacgcgcgcgcgcacacacacacacacacacagagagaacatctctagtaaaaagaaaagttgagctttcttagctagatgtgtgtattagccagaaaaagccaaggagtgaagggttttagagaactggaggagataaagtggagtctgcatatgggaggcatttgaaatggacttaaatgtctttttaatgctgactttttcagttttctccttaccagacacattgttttcatgacattagccccaggcatagacacatcattaaaatgaacatgtcaaaaaatgatttctgtttagaaataagcaaaacattttcagttgtgaccacccaggtgtagaataaagaacagtggaattgggagccctgagttctaacataaactttcttcatgacataaggcaagtcttctatggcctttggtttccttacctgtaaaacaggatggctcaatgaaattatctttcttctttgctataatagagtatctctgtgggaagaggaaaaaaaaagtcaatttaaaggctccttatagttccccaactgctgttttattgtgctattcatgcctagacatcacatagctagaaaggcccatcagacccctcaggccactgctgttcctgtcacacattcctgcaaaggaccatgttgctaacttgaaaaaaattactattaattacacttgcagttgttgcttagtaacatttatgattttgtgtttctcgtgacagcatgagcagagatcattaaaaattaaacttacaaagctgctaaagtgggaagaaggagaacttgaagccacaatttttgcacttgcttagaagccatctaatctcaggtttatatgctagatcttgggggaaacactgcatgtctctggtttatattaaaccacatacagcacactactgacactgatttgtgtctggtgcagctggagtttatcaccaagacataaaaaaaccttgaccctgcagaatggcctggaattacaatcagatgggccacatggcatcccggtgaaagaaagccctaaccagttttctgtcttgtttctgctttctccctacagttccaccaggtgagaagagtgatgaccatccttttccttactatggttatttcatactttggttgcatgaaggctgcccccatgaaagaagcaaacatccgaggacaaggtggcttggcctacccaggtgtgcggacccatgggactctggagagcgtgaatgggcccaaggcaggttcaagaggcttgacatcattggctgacactttcgaacacgtgatagaagagctgttggatgaggaccagaaagttcggcccaatgaagaaaacaataaggacgcagacttgtacacgtccagggtgatgctcagtagtcaagtgcctttggagcctcctcttctctttctgctggaggaatacaaaaattacctagatgctgcaaacatgtccatgagggtccggcgccactctgaccctgcccgccgaggggagctgagcgtgtgtgacagtattagtgagtgggtaacggcagcagacaaaaagactgcagtggacatgtcgggcgggacggtcacagtccttgaaaaggtccctgtatcaaaaggccaactgaagcaatacttctacgagaccaagtgcaatcccatgggttacacaaaagaaggctgcaggggcatagacaaaaggcattggaactcccagtgccgaactacccagtcgtacgtgcgggcccttaccatggatagcaaaaagagaattggctggcgattcataaggatagacacttcttgtgtatgtacattgaccattaaaaggggaagatagtggatttatgttgtatagattagattatattgagacaaaaattatctatttgtatatatacataacagggtaaattattcagttaagaaaaaaataattttatgaactgcatgtataaatgaagtttatacagtacagtggttctacaatctatttattggacatgtccatgaccagaagggaaacagtcatttgcgcacaacttaaaaagtctgcattacattccttgataatgttgtggtttgttgccgttgccaagaactgaaaacataaaaagttaaaaaaaataataaattgcatgctgctttaattgtgaattgataataaactgtcctctttcagaaaacagaaaaaaaacacacacacacacaacaaaaatttgaaccaaaacattccgtttacattttagacagtaagtatcttcgttcttgttagtactatatctgttttactgcttttaacttctgatagcgttggaattaaaacaatgtcaaggtgctgttgtcattgctttactggcttaggggatgggggatggggggtatatttttgtttgttttgtgtttttttttcgtttgtttgttttgttttttagttcccacagggagtagagatggggaaagaattcctacaatatatattctggctgataaaagatacatttgtatgttgtgaagatgtttgcaatatcgatcagatgactagaaagtgaataaaaattaaggcaactgaacaaaaaaatgctcacactccacatcccgtgatgcacctcccaggccccgctcattctttgggcgttggtcagagtaagctgcttttgacggaaggacctatgtttgctcagaacacattctttccccccctccccctctggtctcctctttgttttgttttaaggaagaaaaatcagttgcgcgttctgaaatattttaccactgctgtgaacaagtgaacacattgtgtcacatcatgacactcgtataagcatggagaacagtgatttttttttagaacagaaaacaacaaaaaataaccccaaaatgaagattattttttatgaggagtgaacatttgggtaaatcatggctaagcttaaaaaaaactcatggtgaggcttaacaatgtcttgtaagcaaaaggtagagccctgtatcaacccagaaacacctagatcagaacaggaatccacattgccagtgacatgagactgaacagccaaatggaggctatgtggagttggcattgcatttaccggcagtgcgggaggaatttctgagtggccatcccaaggtctaggtggaggtggggcatggtatttgagacattccaaaacgaaggcctctgaaggacccttcagaggtggctctggaatgacatgtgtcaagctgcttggacctcgtgctttaagtgcctacattatctaactgtgctcaagaggttctcgactggaggaccacactcaagccgacttatgcccaccatcccacctctggataattttgcataaaattggattagcctggagcaggttgggagccaaatgtggcatttgtgatcatgagattgatgcaatgagatagaagatgtttgctacctgaacacttattgctttgaaactagacttgaggaaaccagggtttatcttttgagaacttttggtaagggaaaagggaacaggaaaagaaaccccaaactcaggccgaatgatcaaggggacccataggaaatcttgtccagagacaagacttcgggaaggtgtctggacattcagaacaccaagacttgaaggtgccttgctcaatggaagaggccaggacagagctgacaaaattttgctccccagtgaaggccacagcaaccttctgcccatcctgtctgttcatggagagggtccctgcctcacctctgccattttgggttaggagaagtcaagttgggagcctgaaatagtggttcttggaaaaatggatccccagtgaaaactagagctctaagcccattcagcccatttcacacctgaaaatgttagtgatcaccacttggaccagcatccttaagtatcagaaagccccaagcaattgctgcatcttagtagggtgagggataagcaaaagaggatgttcaccataacccaggaatgaagataccatcagcaaagaatttcaatttgttcagtctttcatttagagctagtctttcacagtaccatctgaatacctctttgaaagaaggaagactttacgtagtgtagatttgttttgtgttgtttgaaaatattatctttgtaattatttttaatatgtaaggaatgcttggaatatctgctgtatgtcaactttatgcagcttccttttgagggacaaatttaaaacaaacaaccccccatcacaaacttaaaggattgcaagggccagatctgttaagtggtttcataggagacacatccagcaattgtgtggtcagtggctcttttacccaataagatacatcacagtcacatgcttgatggtttatgttgacctaagatttattttgttaaaatctctctctgttgtgttcgttcttgttctgttttgttttgttttttaaagtcttgctgtggtctctttgtggcagaagtgtttcatgcatggcagcaggcctgttgcttttttatggcgattcccattgaaaatgtaagtaaatgtctgtggccttgttctctctatggtaaagatattattcaccatgtaaaacaaaaaacaatatttattgtattttagtatatttatataattatgttattgaaaaaaattggcattaaaacttaaccgcatcagaagcctattgtaaatacaagttctatttaagtgtactaattaacatataatatatgttttaaatatagaatttttaatgtttttaaatatattttcaaagtacataaaatctgggggttctgggtttttttctctttactgtaaaacaaacatgaaaacgtgttttattataaatacgtgtgttccttgctttaagactaatctgactagttttagtaattaaacagccctccagagaggatacttatttgaaagcctgggaggccaatcctgcagtctgtgagcttctgagaagttgtaggattggatctgtcttccatggtggaagatgggagtgtcattttctcggacacttgaaagttttacccctttgaagtgatatactttcatcagataccaaaccatgtatcctagcaacatcaggatccacgaatcacggctggctggctggctctatttgactataaaataactgttaaaaaaaatcaaagtaggtttacttagggataatgagaataaattggcccaaatttagaaagtcaagtactggggaaaaaagtaaaaaaagaaattcaatatttggagacaggtcacatatcctcggtttggaagtggtgccatttgcagtatgtatttgtatccatagcactgatttaatttttgtacgtggagcacacagattttatatcatagtacccacaatctaacagattgctaggatttctaaaaggatttgcctccgtgatggctgccaagccgctgggtaatttagttaaagtgtttaaagttatcactaaatcttagggaaataaatggaaggattttaaatcagagaaggggccattaaggaaaaaaagcatctgttcttactcttcagcctccccatttgaacactgacaacccatcccataacgtggtgaactatatctgtgcaatgtatcatttctatttctaaacatacacacatggtttcctcttgtattgtcttataaataaggatcaggaaagtcataacaaacattgacttgtgttgtgtatatggaaaaacagatcgaatgagatgaattactctatcctaatctgtccagtgaacttgaaaagtactctaagagaagcccttgactgccagtcatgacagcccagccatggacttagaactttgataaacttcaggcttgaccaattttcatagtcagaggactaaaatattttttaaatggttgagtaaaaaaagtaaaaattaaacatgacatccaaattacttgaagttaaacgagtttggtaaacatgactgaaagttttcattagaagatgaggttggagaaaaaaacaaaatagagacatctactaaattatcctacttggagttaataggagtaaccaatgtgtactgcattcattgagtaagcagttaaacttgtttaattactaagatgccaggaaataactcagatcattgctttgatctgttgtttttcaccatactgataagcctctgtggtcattagctgtgtctatgaaatctttttatgagctgtactaattcagtgaataataagacagttcgaaatgagaatctgaactaagtcttagaatgggtcagtgttaaattgttcctcattcatttaagtgacttctagatctggataaaatgtcaaacactttttgaactgcaacaaatggcttcaggcattgcctcagttcagccagcactcccaatagtgttaaggtttaaggttattgtaaaacatacttgtctccatcatgttctaacatcaagcctggtctacaagttaaagtagaaatggctgcatattttgataagccattgttaaataaagactgttaattgggataagaaacaatatacgtgtacataaatttaggaagatgaagcatttagcttgcaaaaagccattcacagatttgatccaacctcagaatgttgaccagcaaaattagtattttatggaacataggccatccttttagctgtgggtttttaaactgtggttttaaaggttggttggctgcttggtttggtgacaagcgggggtaatggttgggaatctgacttttgttggttacattgaactaactggtggttggtgaactccccacctaatagctaaacttagcaactagagtaggtgaagccactccaaaccagcccatgtttatggacattccttctaataaacacactgcctgcatgtctatccccaatcttgtgagtatgatcatccattctctcaattctggccaccatttgaattatttgtagggaaaaaaaagcaaactccttgctttttaatatgtgattatttgcagtaaattacttgaagactatgtttaaatattaacagaaaaagcactgtgatcttacacattatcataattgagaagacccatttctgtggcactctgtaggatttccataggcctttacctcacccccacaccctaattatttacaaggcacagaccaccagattaggagctccccagcctggcatttgcttttctaacaacaatcctgtgtgcttggtaatgtcagtagcatggaattgtaaaaagcaggccttccaattaaacctcaccacacaaacaataaacaagacctttgcatttaagtgtgagctgctattttatatctggaaaaacaaaagtcctttcctttagaaaaataagcttatctgtcctgaaaaaagcctcacacataatgttgtagttaatgacaggacttgtctcaagcctgtaaatgaccaaaaagtgttagttgaaatcctgagcttgaggtgtatgttctacatttagaaaggacataaagatgcttctgcagctctgcactttggtactgtactctatttcaaatggttccttagaaaccaggggctggtctgcatagaatggctgaacccaggggaaatatttttgtctggcttaagtgctcacaatttgaaaaaatccatgtcaagtactgcagtacacatttaaatttatttagtgaagctgcattctccattgagccctaacatttaaaaaatagttgctcaactgggatttggtgcatatcaggaaggaaagaggaaaaagacataaaatagaaaccttacccagcagagacctgctccaacagataccaagcagtgtttacttggagataacagtacccatactctcctccagttagactcatggaatgatctcaaagtgtgttctgcaaccagcatctgcatctctgggaactttttacaaatgcagactctcagttcccatcctagacttactaaataagaagctctgggggtagagtacaacagtctgagttttaacaacccctctaggtgattctgtgcccactcaaatttgaggatcattggactaaggggattaaacagcctttcacatgttctagataataggaagatagcacaacccaagaatttgaaactgtagatctgatcccaatcatgtcactacctatttgcttggccctgaaaacatcaaactatctatgtttgcatttcctaaacaacacaaaagtgatgggtgctcgcaggtggagcaaggcttagtgttgtaagagaagagtgcactgatggtttgaaagtgagcatgcaaatgtgagccaggaaagctcagtgcccttcatagtcaacaatttttttttctttcaaagcaacagcagtagtggattcaggacccagagcacgtagtcgtttgtaacacatttggaacgactgtgagaaatgagaagcaacatgcagcaaattaataaggaaaagattattccatctggggagctggtctctgcacatgccaacacagcccattctctgtgaaatagcgttttataggtcacaaattaaatcagcatcctgaattaatcagctattaacatccagctgaggaaatctaggttcacacctctagaatgaccagactataaatacaaagggcttcctcagactttgtggcaaagcttttctatattgtaggaactggtttctggaaatgaggacctgaacatagctattcccatctctgtgtgtatgtgtatgtgtgtgtgcacactcctgcacattttacaaggcaaattgcattagaagatttttctatttctaggatggaggggagggtgtccaaatgtattacccatccattaggcaatacagaagcctgaattctaacaagcctaccttgggagccaggtatcttggtagttcaatcatcaggttggccaaccctttccggtatctgaacctccatgccctcaactgtcagaggaagagggtgaacttgggggatctcccaagaggatggtcttggaggtaaatttcagttttaatattacaatttcattcttcctacttcattatttgccataaaaagagattaaagaggtttctgaagcacttaaaggctgggaagcattctgagataattcactgtgcatctcctgcctccctccatagctggtgtccttatatcatggtacttgccacaagattaaaagcaggaggcaccttgggttagtgtggcggttggggaggatgtgaccaaaggaaggtttctacttcatatgcaactataaaaatattaccaactgtctgacaagcaggcagaaaataccttggggaaggtgcccatatattcctcaagatgcaaattttctaccagggtctaaccttactttcaaagccaggcaatgtatttacctttgttttatgtcactcattcttactgtattacatggtgcctggcaaggagagattccttgtgttttgccaagttgcagggtcaggaaactctgcatgaaactgctggattagcatcctgtagagtcactgttaacagagctctttgaatgaaatgggtttgcatctctgttctttggggctttataaattcaccaaggatgtacggttcccaatctgtttcaccaccacctcccgagtactctggatagttcctcctcctgagaggatggccttgagaacaaaagtatctcataacaaatcacagcaacaccacattcagcagcagatttcctcagagaaacagcagatatttcagaatggtaaagaggtcattctgagtggagctttggctagcttaggagacaaacctcactggcatgccagtgtttgaaactcctcatttcagcaatccaactttggtttattcctggccctgagtcctttgtgcctgaatctctgagaaatctatgtttttgttcaatccacctctgctcccacttcatgccctgctttccttcctgatgacctcagagctctgcttcctctgggatccaacatctcaccactcagggggcacataatatagtaaagagtggagtctgaatcccaactctgctacaagagctgtgtgactgtaggcaagtcacttaacttctctgtgcctcagttcctcacctgcaaaggacaggtaaaaatattcccacttacctcatgggattttgtgacaattaaatgaggtaatacatataaagcacttaggaaagttacagacccatgagaaagcctcagaaaatgtttacaaactcttggaagtcactctgctgactggtaataagctgggctcatctagtacacacttcagagactcttttctcatattcagactcctggaagagatcccatctcatctgtgccattagcatccagggtcactttgtcttttctggaagactcagagagataactcttgtttacccactagcaataatactgcttggcagttaaactgtggccactacatacactcaagcaaatggaagagatatactacaataaagggtgtttttctagactgtacattccaaatgaagcccattattcctaagtgtctatcccagctgaatggcaatgactgaagccagggtgaaatggatgaactcacatagtctgaaagaaacaaggggccacagtcacatttctaaaaatagacatggcacatcaggaaaatcctacctcaacttctgccccatgtccttgacatacatttaacccattgcacaattatagtgactagtacttactataagcaggcagtgttcaaggcatcttatgcagattttctcactgcacaacaatccataaactaggtggtagttttagtactcccattttagagatgaaaaaaactaaggcacagagaattcaattaagttggcaaaggctgcaacacttgtgagtagcagggcagcctggatctggagccactcttaaaccactgaaaaatttaaaagtgcaaagggcattgagaacatacagaaggaaaaaaaaaaaaaaggccgtggttgtggggaggggggtggaatagctagttacatgtccaagggatttggcttccttcaaaaagggagaccaccagtggtgcttagaatttttagctttcagaagagtcctggattgatcttttaaggttaacatgcaaacagtctttcattgcatggaggcctttccaaaagtggatacaaccctactctgtgctgaaaaacctgaatgtagggtttctagagcttcatgtcagctatttccaatacttggatatggggcagttgtcacccctttaacctcatggacaatctgatgagcttcctgtgaattgctgggattgggcagataggcagagtgttgtggaaccacttgcaagacccaggagtgcccaatcctccctaggtcaatactttacagttattttgtgtttgggattggtggagaagagaaaggataatgactcaggcctgctgggtctgcaatagccctggccaccagcgccagccttctctcccccattcttccatgtatggctgacatcacttgtaagtctttgctgcacctcagcctcacaagtcatgtcaaggtcatgctccactgccaactgaattgaattgaaccaaaagatgaactcagtttgctatcttggctttcccactttcttaagaacagatcccattggtgatggggtagatcaggtagtaaagtcaaggtgctgaggactgatgtgtcccttgagttcagcagaagttagatgcgaaagggtgaagaatgttctataatgagtataaagagttctatcgatgggtttcagacagacgatccatatgcaaagaatcatatgtaaatcaagtaaagggtaagattaccctagcaattggttgaacacaaggacaagtgtttggcaataggcaatactgttacatccctattttgtaccagatgccatgctaaatgctttccatgctatctaaaataatcatgagatagatgtaatttgagagacaagaaaactgacaacacagtagcctaaataacttgcccaaggtcatacagttaataaatgatatagtcagatttgaagccacatctatataatcccaaggtctcgaattttaaccaccagactggtggctctcaatcctgacctgtacatttgaatcacatagggaatttaaaaaatatatctatacccagacgaggtaaatcagaatctctgggggtggggcccaggcatctgtatttcttttttttttttttttttttttgagacggagtctcgctctgtcgcccaggccggactgcggactgcagtggcgcaatctcggctcactgcaagctccgcttcccgggttcacgccattctcctgcctcagcctcccgagtagctgggactacaggcgcccgccaccgcgcccggctaattttttgtatttttagtagagacggtgtttcaccttgttagccaggatggtctcgatctcctgacctcatgatccacccacctcggcctcccaaagtgctgggattacaggcgtgagccaccgcgcccggcatctgtatttcttaaagatctttccagtggttttgttgaccagccagggtagaactgctgctccagattcttcttcctctaggtaaacaggagtcagaggtatcagagatttctgcccatgggactcagagccctaacctggtcccaaacttgggtgtgggattctaatgactgggaattaacaagacaggacgctagttctataggaaattgaatacaagtaggaccctagccatagaaacaagaataatgattttagatagtaaaatcaacattcagagtcagaatggacccaccagaaagctcaatctaacactgagctcctgaacgaggctccttaaatttctttagattccctgtgattagaaacaggagaggcactaatggctgcaggagggctgagtctacagatgaggatctctcatctacagatgaggatcaactgacccagtggtgaggagaagagagctctatgggcttctcacaggcaggtcgtcacctgtcccgcctccaagcaacctgctctgagccaacaacatgtttccacacatttcacactgcttggctcattctgctggactccaaagggctttactaagttgaagcaaagagaaaaaaaaacaatccatgttgactgtttggagtgttttctctgttttcagaagtgactgttagattagtatttggttttatcttctgcatcttctaatatttttatctcctccccatccctacctcaaactgccaagcagtgattcctgcttgacagtaggaaaaaacatctccgagtctcgcagccccttcctggagggcttgttttagaagcagtgcaggacatgcccagcttagccaggccacggggctaatcgaatttggcagatgctctgcgtcagcaggcaccagggtgctaatgccctgggtcagctggtgagagggtaagtgggcaaatgcctggcttcttccccgtgttttcaggacaggaatctgagtcccagtaatcactagcctatgggaccagaggctattttgggccttcttttatccaatggaaagttaggggtggtgacatctgaaactgccaaggagcatccagtttcacccttatccaggacatgtccctagaggaaatggaagcaatgtcaaggagaccaaaacgcgggtgtcagaacttccctttgtttttatttctgtgccgtttgttttcatccattcctttcactttcagctcacctttccactactctggttcaggtcttcattgcatctcgcctgggctatcacagcagccttccaacccatctctctacccccaatctctctaccccaacccacttccaacatcctcccatgatagcagaatgatctctctgaaggttcaatgacaataatgaacatgaaaacacttcgtaatacgttacacaaatagcaacacctacctatacacaaatgtaccgatgtggcaggagagacagaaatgctgtctttaatcactgttgactatgcaggtgtaaaggccagtgcattgcaagggaatgaaatcgatagactaagaggaatgtttctgggaaataatggtctaagttggcacacacagtattggaaccctcaaacgagtcaaaaaggcattcaaggtggacttgcctgcttggcaattgtatgtcactgtgataaacctgatgagagatgtaagatgtagatctaattatgcctatttttcaggtaactgaggctgagagaggcagtaatttgcagaagatcactcagtgagcatatagcagaactagaatataaattcagaggacatatgcttttcaagtgtgccatattgatacagatacattaatgtggatggatggatggatggatggatagatgaatggatgaatagagcatatgatttccctccctttaatatatcaaagggctatccattgctgacagagtaacaaattggtgatattggcattatggccttataggatgtagctttattttcctactttaatgtccagacaacttccaacacacttgacagtgcactccaaccctacttctccctattccctaaatgtaccttacactctacctcctctgcatctttgtccattccctgtctccctctctgattataaaatccctacccaaccataacccataatagggctgccagaaaaaacatcaaaccaaatgaataattgtttaatataagtgtgtgcaaatactctatggaacatatttatagtaaaaaatgatttgtattaatttaaattcaaatttcactgggtgtcctgcaattttaattgtaaaatctagcaaacccacacatcaggcagttgccccatgtataccctctggttttcttctgccatctcaaggtgggatttagcacttcttcgaatttttcatacacaattcactctcactgaataatgagcaatgtgtattttatggaagacttcttaataaatgtgaaaatgaagtttacattccataattgacattttatttttaacagttcttattaaaaatggccttatggctgggcatggaggctcaggcctgtaatctcaacacgttggcaggctgaagcaaaatgattgcttgagacctgaagtttgagaacagcctgggcaacatagcgagaccctgtctctacaaaaaaattaaaaatatatatatatagctgggtgtggtggcatgtgcctgtagtcccagttactcaggaggctgaagcgagagggtcacttgagcccacgagtttgaggctgcagtgagctaagatcatgccattacactccagcctgggtgacagattgagatcccatctctaaaagtcattaagtgtccttttgaccatttccctacacagcatttagtgctgatcacctgctctcactctattatgcagagaagctttcacttttcaaacctaggcactagtccacggcttgtttgtataccatggtagacttatcaaagcaaattttcgattaggcaggtttctcttaacaaatgaattttctatgaatataaaaaatgtttctatatgttaaaggttcaattgcatgaagcctttagcattttcttgggtaaaataattgctcccttactaagctgcagttatttgtataaactcttctagagcagtggacattttcattcacctgtgtacccactgcagttcacctagccatgtaccggaaagcagtcaacaagtgtctattaaattgaatgaatgcagtgtaaggccacattataagtgtatttagccctaagtggctacaacattgtttgcagcagccaaggaagggatcccagcagtcagggaaagcaacttgatagtttaattgagtaattctccaccctagttgcacattaggcatctggggagttttaaaaaaattatgaattgtagaccccatcctgcatccctgcatcaggtaaatcagaatctctgggagtgaagctcaggcatcaatattattttcaaagctcccaggttattttaccaggcaggaaaggttaaaaatgatgaacagttgctggagatttggactagtattcttctctgggtctaatccatgacagaagagagagaccaagataatcagagggagaaatacggatttctttttgcttttccctgttgtagatgttttagagtttacactgttctttcacatgcatgcacatcttgccacatcccacccccaccacatagtctggccactgagccttgagctgtgtgttcactttgtgagtgtgaagaacaacatggctacagccattctatgtaaatatgcaatcttagttttggcttggttgagtattgcttccccaggttcccaactccacttttactgttttaggttctggtttcaccaagaattcagtagctgtggtacttcccgggtatgagagaataaagaacttgtaaagtggaattggccagctttccacacccctaccttcactgcacaccaacctgcactgacatccagaggagaaccaagggaattgtttcctcctggtttggacacattccacttgaagctcctccaggcattgtgaagcagaattcccttcagtatatgtgactgcaaagagatgaatttttgaactggagactttgaaaataaggatgagcatgtacagagtgaaaacatgggcctcgagtcagcagattgaaatccctgaccttgctctgtacgtctctagccacataagctaagcaggtctcccctcac

SEQ ID NO: 2 - DNA, 91164 bp, Homo sapiens
gtgaggggagacctgcttagcttatgtggctagagacgtacagagcaaggtcagggatttcaatctgctgactcgaggcccatgttttcactctgtacatgctcatccttattttcaaagtctccagttcaaaaattcatctctttgcagtcacatatactgaagggaattctgcttcacaatgcctggaggagcttcaagtggaatgtgtccaaaccaggaggaaacaattcccttggttctcctctggatgtcagtgcaggttggtgtgcagtgaaggtaggggtgtggaaagctggccaattccactttacaagttctttattctctcatacccgggaagtaccacagctactgaattcttggtgaaaccagaacctaaaacagtaaaagtggagttgggaacctggggaagcaatactcaaccaagccaaaactaagattgcatatttacatagaatggctgtagccatgttgttcttcacactcacaaagtgaacacacagctcaaggctcagtggccagactatgtggtgggggtgggatgtggcaagatgtgcatgcatgtgaaagaacagtgtaaactctaaaacatctacaacagggaaaagcaaaaagaaatccgtatttctccctctgattatcttggtctctctcttctgtcatggattagacccagagaagaatactagtccaaatctccagcaactgttcatcatttttaacctttcctgcctggtaaaataacctgggagctttgaaaataatattgatgcctgagcttcactcccagagattctgatttacctgatgcagggatgcaggatggggtctacaattcataatttttttaaaactccccagatgcctaatgtgcaactagggtggagaattactcaattaaactatcaagttgctttccctgactgctgggatcccttccttggctgctgcaaacaatgttgtagccacttagggctaaatacacttataatgtggccttacactgcattcattcaatttaatagacacttgttgactgctttccggtacatggctaggtgaactgcagtgggtacacaggtgaatgaaaatgtccactgctctagaagagtttatacaaataactgcagcttagtaagggagcaattattttacccaagaaaatgctaaaggcttcatgcaattgaacctttaacatatagaaacattttttatattcatagaaaattcatttgttaagagaaacctgcctaatcgaaaatttgctttgataagtctaccatggtatacaaacaagccgtggactagtgcctaggtttgaaaagtgaaagcttctctgcataatagagtgagagcaggtgatcagcactaaatgctgtgtagggaaatggtcaaaaggacacttaatgacttttagagatgggatctcaatctgtcacccaggctggagtgtaatggcatgatcttagctcactgcagcctcaaactcgtgggctcaagtgaccctctcgcttcagcctcctgagtaactgggactacaggcacatgccaccacacccagctatatatatatatttttaatttttttgtagagacagggtctcgctatgttgcccaggctgttctcaaacttcaggtctcaagcaatcattttgcttcagcctgccaacgtgttgagattacaggcctgagcctccatgcccagccataaggccatttttaataagaactgttaaaaataaaatgtcaattatggaatgtaaacttcattttcacatttattaagaagtcttccataaaatacacattgctcattattcagtgagagtgaattgtgtatgaaaaattcgaagaagtgctaaatcccaccttgagatggcagaagaaaaccagagggtatacatggggcaactgcctgatgtgtgggtttgctagattttacaattaaaattgcaggacacccagtgaaatttgaatttaaattaatacaaatcattttttactataaatatgttccatagagtatttgcacacacttatattaaacaattattcatttggtttgatgttttttctggcagccctattatgggttatggttgggtagggattttataatcagagagggagacagggaatggacaaagatgcagaggaggtagagtgtaaggtacatttagggaatagggagaagtagggttggagtgcactgtcaagtgtgttggaagttgtctggacattaaagtaggaaaataaagctacatcctataaggccataatgccaatatcaccaatttgttactctgtcagcaatggatagccctttgatatattaaagggagggaaatcatatgctctattcatccattcatctatccatccatccatccatccatccacattaatgtatctgtatcaatatggcacacttgaaaagcatatgtcctctgaatttatattctagttctgctatatgctcactgagtgatcttctgcaaattactgcctctctcagcctcagttacctgaaaaataggcataattagatctacatcttacatctctcatcaggtttatcacagtgacatacaattgccaagcaggcaagtccaccttgaatgcctttttgactcgtttgagggttccaatactgtgtgtgccaacttagaccattatttcccagaaacattcctcttagtctatcgatttcattcccttgcaatgcactggcctttacacctgcatagtcaacagtgattaaagacagcatttctgtctctcctgccacatcggtacatttgtgtataggtaggtgttgctatttgtgtaacgtattacgaagtgttttcatgttcattattgtcattgaaccttcagagagatcattctgctatcatgggaggatgttggaagtgggttggggtagagagattgggggtagagagatgggttggaaggctgctgtgatagcccaggcgagatgcaatgaagacctgaaccagagtagtggaaaggtgagctgaaagtgaaaggaatggatgaaaacaaacggcacagaaataaaaacaaagggaagttctgacacccgcgttttggtctccttgacattgcttccatttcctctagggacatgtcctggataagggtgaaactggatgctccttggcagtttcagatgtcaccacccctaactttccattggataaaagaaggcccaaaatagcctctggtcccataggctagtgattactgggactcagattcctgtcctgaaaacacggggaagaagccaggcatttgcccacttaccctctcaccagctgacccagggcattagcaccctggtgcctgctgacgcagagcatctgccaaattcgattagccccgtggcctggctaagctgggcatgtcctgcactgcttctaaaacaagccctccaggaaggggctgcgagactcggagatgttttttcctactgtcaagcaggaatcactgcttggcagtttgaggtagggatggggaggagataaaaatattagaagatgcagaagataaaaccaaatactaatctaacagtcacttctgaaaacagagaaaacactccaaacagtcaacatggattgtttttttttctctttgcttcaacttagtaaagccctttggagtccagcagaatgagccaagcagtgtgaaatgtgtggaaacatgttgttggctcagagcaggttgcttggaggcgggacaggtgacgacctgcctgtgagaagcccatagagctctcttctcctcaccactgggtcagttgatcctcatctgtagatgagagatcctcatctgtagactcagccctcctgcagccattagtgcctctcctgtttctaatcacagggaatctaaagaaatttaaggagcctcgttcaggagctcagtgttagattgagctttctggtgggtccattctgactctgaatgttgattttactatctaaaatcattattcttgtttctatggctagggtcctacttgtattcaatttcctatagaactagcgtcctgtcttgttaattcccagtcattagaatcccacacccaagtttgggaccaggttagggctctgagtcccatgggcagaaatctctgatacctctgactcctgtttacctagaggaagaagaatctggagcagcagttctaccctggctggtcaacaaaaccactggaaagatctttaagaaatacagatgccgggcgcggtggctcacgcctgtaatcccagcactttgggaggccgaggtgggtggatcatgaggtcaggagatcgagaccatcctggctaacaaggtgaaacaccgtctctactaaaaatacaaaaaattagccgggcgcggtggcgggcgcctgtagtcccagctactcgggaggctgaggcaggagaatggcgtgaacccgggaagcggagcttgcagtgagccgagattgcgccactgcagtccgcagtccggcctgggcgacagagcgagactccgtctcaaaaaaaaaaaaaaaaaaaaaagaaatacagatgcctgggccccacccccagagattctgatttacctcgtctgggtatagatatattttttaaattccctatgtgattcaaatgtacaggtcaggattgagagccaccagtctggtggttaaaattcgagaccttgggattatatagatgtggcttcaaatctgactatatcatttattaactgtatgaccttgggcaagttatttaggctactgtgttgtcagttttcttgtctctcaaattacatctatctcatgattattttagatagcatggaaagcatttagcatggcatctggtacaaaatagggatgtaacagtattgcctattgccaaacacttgtccttgtgttcaaccaattgctagggtaatcttaccctttacttgatttacatatgattctttgcatatggatcgtctgtctgaaacccatcgatagaactctttatactcattatagaacattcttcaccctttcgcatctaacttctgctgaactcaagggacacatcagtcctcagcaccttgactttactacctgatctaccccatcaccaatgggatctgttcttaagaaagtgggaaagccaagatagcaaactgagttcatcttttggttcaattcaattcagttggcagtggagcatgaccttgacatgacttgtgaggctgaggtgcagcaaagacttacaagtgatgtcagccatacatggaagaatgggggagagaaggctggcgctggtggccagggctattgcagacccagcaggcctgagtcattatcctttctcttctccaccaatcccaaacacaaaataactgtaaagtattgacctagggaggattgggcactcctgggtcttgcaagtggttccacaacactctgcctatctgcccaatcccagcaattcacaggaagctcatcagattgtccatgaggttaaaggggtgacaactgccccatatccaagtattggaaatagctgacatgaagctctagaaaccctacattcaggtttttcagcacagagtagggttgtatccacttttggaaaggcctccatgcaatgaaagactgtttgcatgttaaccttaaaagatcaatccaggactcttctgaaagctaaaaattctaagcaccactggtggtctccctttttgaaggaagccaaatcccttggacatgtaactagctattccacccccctccccacaaccacggccttttttttttttttccttctgtatgttctcaatgccctttgcacttttaaatttttcagtggtttaagagtggctccagatccaggctgccctgctactcacaagtgttgcagcctttgccaacttaattgaattctctgtgccttagtttttttcatctctaaaatgggagtactaaaactaccacctagtttatggattgttgtgcagtgagaaaatctgcataagatgccttgaacactgcctgcttatagtaagtactagtcactataattgtgcaatgggttaaatgtatgtcaaggacatggggcagaagttgaggtaggattttcctgatgtgccatgtctatttttagaaatgtgactgtggccccttgtttctttcagactatgtgagttcatccatttcaccctggcttcagtcattgccattcagctgggatagacacttaggaataatgggcttcatttggaatgtacagtctagaaaaacaccctttattgtagtatatctcttccatttgcttgagtgtatgtagtggccacagtttaactgccaagcagtattattgctagtgggtaaacaagagttatctctctgagtcttccagaaaagacaaagtgaccctggatgctaatggcacagatgagatgggatctcttccaggagtctgaatatgagaaaagagtctctgaagtgtgtactagatgagcccagcttattaccagtcagcagagtgacttccaagagtttgtaaacattttctgaggctttctcatgggtctgtaactttcctaagtgctttatatgtattacctcatttaattgtcacaaaatcccatgaggtaagtgggaatatttttacctgtcctttgcaggtgaggaactgaggcacagagaagttaagtgacttgcctacagtcacacagctcttgtagcagagttgggattcagactccactctttactatattatgtgccccctgagtggtgagatgttggatcccagaggaagcagagctctgaggtcatcaggaaggaaagcagggcatgaagtgggagcagaggtggattgaacaaaaacatagatttctcagagattcaggcacaaaggactcagggccaggaataaaccaaagttggattgctgaaatgaggagtttcaaacactggcatgccagtgaggtttgtctcctaagctagccaaagctccactcagaatgacctctttaccattctgaaatatctgctgtttctctgaggaaatctgctgctgaatgtggtgttgctgtgatttgttatgagatacttttgttctcaaggccatcctctcaggaggaggaactatccagagtactcgggaggtggtggtgaaacagattgggaaccgtacatccttggtgaatttataaagccccaaagaacagagatgcaaacccatttcattcaaagagctctgttaacagtgactctacaggatgctaatccagcagtttcatgcagagtttcctgaccctgcaacttggcaaaacacaaggaatctctccttgccaggcaccatgtaatacagtaagaatgagtgacataaaacaaaggtaaatacattgcctggctttgaaagtaaggttagaccctggtagaaaatttgcatcttgaggaatatatgggcaccttccccaaggtattttctgcctgcttgtcagacagttggtaatatttttatagttgcatatgaagtagaaaccttcctttggtcacatcctccccaaccgccacactaacccaaggtgcctcctgcttttaatcttgtggcaagtaccatgatataaggacaccagctatggagggaggcaggagatgcacagtgaattatctcagaatgcttcccagcctttaagtgcttcagaaacctctttaatctctttttatggcaaataatgaagtaggaagaatgaaattgtaatattaaaactgaaatttacctccaagaccatcctcttgggagatcccccaagttcaccctcttcctctgacagttgagggcatggaggttcagataccggaaagggttggccaacctgatgattgaactaccaagatacctggctcccaaggtaggcttgttagaattcaggcttctgtattgcctaatggatgggtaatacatttggacaccctcccctccatcctagaaatagaaaaatcttctaatgcaatttgccttgtaaaatgtgcaggagtgtgcacacacacatacacatacacacagagatgggaatagctatgttcaggtcctcatttccagaaaccagttcctacaatatagaaaagctttgccacaaagtctgaggaagccctttgtatttatagtctggtcattctagaggtgtgaacctagatttcctcagctggatgttaatagctgattaattcaggatgctgatttaatttgtgacctataaaacgctatttcacagagaatgggctgtgttggcatgtgcagagaccagctccccagatggaataatcttttccttattaatttgctgcatgttgcttctcatttctcacagtcgttccaaatgtgttacaaacgactacgtgctctgggtcctgaatccactactgctgttgctttgaaagaaaaaaaaattgttgactatgaagggcactgagctttcctggctcacatttgcatgctcactttcaaaccatcagtgcactcttctcttacaacactaagccttgctccacctgcgagcacccatcacttttgtgttgtttaggaaatgcaaacatagatagtttgatgttttcagggccaagcaaataggtagtgacatgattgggatcagatctacagtttcaaattcttgggttgtgctatcttcctattatctagaacatgtgaaaggctgtttaatccccttagtccaatgatcctcaaatttgagtgggcacagaatcacctagaggggttgttaaaactcagactgttgtactctacccccagagcttcttatttagtaagtctaggatgggaactgagagtctgcatttgtaaaaagttcccagagatgcagatgctggttgcagaacacactttgagatcattccatgagtctaactggaggagagtatgggtactgttatctccaagtaaacactgcttggtatctgttggagcaggtctctgctgggtaaggtttctattttatgtctttttcctctttccttcctgatatgcaccaaatcccagttgagcaactattttttaaatgttagggctcaatggagaatgcagcttcactaaataaatttaaatgtgtactgcagtacttgacatggattttttcaaattgtgagcacttaagccagacaaaaatatttcccctgggttcagccattctatgcagaccagcccctggtttctaaggaaccatttgaaatagagtacagtaccaaagtgcagagctgcagaagcatctttatgtcctttctaaatgtagaacatacacctcaagctcaggatttcaactaacactttttggtcatttacaggcttgagacaagtcctgtcattaactacaacattatgtgtgaggcttttttcaggacagataagcttatttttctaaaggaaaggacttttgtttttccagatataaaatagcagctcacacttaaatgcaaaggtcttgtttattgtttgtgtggtgaggtttaattggaaggcctgctttttacaattccatgctactgacattaccaagcacacaggattgttgttagaaaagcaaatgccaggctggggagctcctaatctggtggtctgtgccttgtaaataattagggtgtgggggtgaggtaaaggcctatggaaatcctacagagtgccacagaaatgggtcttctcaattatgataatgtgtaagatcacagtgctttttctgttaatatttaaacatagtcttcaagtaatttactgcaaataatcacatattaaaaagcaaggagtttgcttttttttccctacaaataattcaaatggtggccagaattgagagaatggatgatcatactcacaagattggggatagacatgcaggcagtgtgtttattagaaggaatgtccataaacatgggctggtttggagtggcttcacctactctagttgctaagtttagctattaggtggggagttcaccaaccaccagttagttcaatgtaaccaacaaaagtcagattcccaaccattacccccgcttgtcaccaaaccaagcagccaaccaacctttaaaaccacagtttaaaaacccacagctaaaaggatggcctatgttccataaaatactaattttgctggtcaacattctgaggttggatcaaatctgtgaatggctttttgcaagctaaatgcttcatcttcctaaatttatgtacacgtatattgtttcttatcccaattaacagtctttatttaacaatggcttatcaaaatatgcagccatttctactttaacttgtagaccaggcttgatgttagaacatgatggagacaagtatgttttacaataaccttaaaccttaacactattgggagtgctggctgaactgaggcaatgcctgaagccatttgttgcagttcaaaaagtgtttgacattttatccagatctagaagtcacttaaatgaatgaggaacaatttaacactgacccattctaagacttagttcagattctcatttcgaactgtcttattattcactgaattagtacagctcataaaaagatttcatagacacagctaatgaccacagaggcttatcagtatggtgaaaaacaacagatcaaagcaatgatctgagttatttcctggcatcttagtaattaaacaagtttaactgcttactcaatgaatgcagtacacattggttactcctattaactccaagtaggataatttagtagatgtctctattttgtttttttctccaacctcatcttctaatgaaaactttcagtcatgtttaccaaactcgtttaacttcaagtaatttggatgtcatgtttaatttttactttttttactcaaccatttaaaaaatattttagtcctctgactatgaaaattggtcaagcctgaagtttatcaaagttctaagtccatggctgggctgtcatgactggcagtcaagggcttctcttagagtacttttcaagttcactggacagattaggatagagtaattcatctcattcgatctgtttttccatatacacaacacaagtcaatgtttgttatgactttcctgatccttatttataagacaatacaagaggaaaccatgtgtgtatgtttagaaatagaaatgatacattgcacagatatagttcaccacgttatgggatgggttgtcagtgttcaaatggggaggctgaagagtaagaacagatgctttttttccttaatggccccttctctgatttaaaatccttccatttatttccctaagatttagtgataactttaaacactttaactaaattacccagcggcttggcagccatcacggaggcaaatccttttagaaatcctagcaatctgttagattgtgggtactatgatataaaatctgtgtgctccacgtacaaaaattaaatcagtgctatggatacaaatacatactgcaaatggcaccacttccaaaccgaggatatgtgacctgtctccaaatattgaatttctttttttacttttttccccagtacttgactttctaaatttgggccaatttattctcattatccctaagtaaacctactttgattttttttaacagttattttatagtcaaatagagccagccagccagccgtgattcgtggatcctgatgttgctaggatacatggtttggtatctgatgaaagtatatcacttcaaaggggtaaaactttcaagtgtccgagaaaatgacactcccatcttccaccatggaagacagatccaatcctacaacttctcagaagctcacagactgcaggattggcctcccaggctttcaaataagtatcctctctggagggctgtttaattactaaaactagtcagattagtcttaaagcaaggaacacacgtatttataataaaacacgttttcatgtttgttttacagtaaagagaaaaaaacccagaacccccagattttatgtactttgaaaatatatttaaaaacattaaaaattctatatttaaaacatatattatatgttaattagtacacttaaatagaacttgtatttacaataggcttctgatgcggttaagttttaatgccaatttttttcaataacataattatataaatatactaaaatacaataaatattgttttttgttttacatggtgaataatatctttaccatagagagaacaaggccacagacatttacttacattttcaatgggaatcgccataaaaaagcaacaggcctgctgccatgcatgaaacacttctgccacaaagagaccacagcaagactttaaaaaacaaaacaaaacagaacaagaacgaacacaacagagagagattttaacaaaataaatcttaggtcaacataaaccatcaagcatgtgactgtgatgtatcttattgggtaaaagagccactgaccacacaattgctggatgtgtctcctatgaaaccacttaacagatctggcccttgcaatcctttaagtttgtgatggggggttgtttgttttaaatttgtccctcaaaaggaagctgcataaagttgacatacagcagatattccaagcattccttacatattaaaaataattacaaagataatattttcaaacaacacaaaacaaatctacactacgtaaagtcttccttctttcaaagaggtattcagatggtactgtgaaagactagctctaaatgaaagactgaacaaattgaaattctttgctgatggtatcttcattcctgggttatggtgaacatcctcttttgcttatccctcaccctactaagatgcagcaattgcttggggctttctgatacttaaggatgctggtccaagtggtgatcactaacattttcaggtgtgaaatgggctgaatgggcttagagctctagttttcactggggatccatttttccaagaaccactatttcaggctcccaacttgacttctcctaacccaaaatggcagaggtgaggcagggaccctctccatgaacagacaggatgggcagaaggttgctgtggccttcactggggagcaaaattttgtcagctctgtcctggcctcttccattgagcaaggcaccttcaagtcttggtgttctgaatgtccagacaccttcccgaagtcttgtctctggacaagatttcctatgggtccccttgatcattcggcctgagtttggggtttcttttcctgttcccttttcccttaccaaaagttctcaaaagataaaccctggtttcctcaagtctagtttcaaagcaataagtgttcaggtagcaaacatcttctatctcattgcatcaatctcatgatcacaaatgccacatttggctcccaacctgctccaggctaatccaattttatgcaaaattatccagaggtgggatggtgggcataagtcggcttgagtgtggtcctccagtcgagaacctcttgagcacagttagataatgtaggcacttaaagcacgaggtccaagcagcttgacacatgtcattccagagccacctctgaagggtccttcagaggccttcgttttggaatgtctcaaataccatgccccacctccacctagaccttgggatggccactcagaaattcctcccgcactgccggtaaatgcaatgccaactccacatagcctccatttggctgttcagtctcatgtcactggcaatgtggattcctgttctgatctaggtgtttctgggttgatacagggctctaccttttgcttacaagacattgttaagcctcaccatgagttttttttaagcttagccatgatttacccaaatgttcactcctcataaaaaataatcttcattttggggttattttttgttgttttctgttctaaaaaaaaatcactgttctccatgcttatacgagtgtcatgatgtgacacaatgtgttcacttgttcacagcagtggtaaaatatttcagaacgcgcaactgatttttcttccttaaaacaaaacaaagaggagaccagagggggagggggggaaagaatgtgttctgagcaaacataggtccttccgtcaaaagcagcttactctgaccaacgcccaaagaatgagcggggcctgggaggtgcatcacgggatgtggagtgtgagcatttttttgttcagttgccttaatttttattcactttctagtcatctgatcgatattgcaaacatcttcacaacatacaaatgtatcttttatcagccagaatatatattgtaggaattctttccccatctctactccctgtgggaactaaaaaacaaaacaaacaaacgaaaaaaaaacacaaaacaaacaaaaatataccccccatcccccatcccctaagccagtaaagcaatgacaacagcaccttgacattgttttaattccaacgctatcagaagttaaaagcagtaaaacagatatagtactaacaagaacgaagatacttactgtctaaaatgtaaacggaatgttttggttcaaatttttgttgtgtgtgtgtgtgttttttttctgttttctgaaagaggacagtttattatcaattcacaattaaagcagcatgcaatttattattttttttaactttttatgttttcagttcttggcaacggcaacaaaccacaacattatcaaggaatgtaatgcagactttttaagttgtgcgcaaatgactgtttcccttctggtcatggacatgtccaataaatagattgtagaaccactgtactgtataaacttcatttatacatgcagttcataaaattatttttttcttaactgaataatttaccctgttatgtatatatacaaatagataatttttgtctcaatataatctaatctatacaacataaatccactatcttccccttttaatggtcaatgtacatacacaagaagtgtctatccttatgaatcgccagccaattctctttttgctatccatggtaagggcccgcacgtacgactgggtagttcggcactgggagttccaatgccttttgtctatgcccctgcagccttcttttgtgtaacccatgggattgcacttggtctcgtagaagtattgcttcagttggccttttgatacagggaccttttcaaggactgtgaccgtcccgcccgacatgtccactgcagtctttttgtctgctgccgttacccactcactaatactgtcacacacgctcagctcccctcggcgggcagggtcagagtggcgccggaccctcatggacatgtttgcagcatctaggtaatttttgtattcctccagcagaaagagaagaggaggctccaaaggcacttgactactgagcatcaccctggacgtgtacaagtctgcgtccttattgttttcttcattgggccgaactttctggtcctcatccaacagctcttctatcacgtgttcgaaagtgtcagccaatgatgtcaagcctcttgaacctgccttgggcccattcacgctctccagagtcccatgggtccgcacacctgggtaggccaagccaccttgtcctcggatgtttgcttctttcatgggggcagccttcatgcaaccaaagtatgaaataaccatagtaaggaaaaggatggtcatcactcttctcacctggtggaactgtagggagaaagcagaaacaagacagaaaactggttagggctttctttcaccgggatgccatgtggcccatctgattgtaattccaggccattctgcagggtcaaggtttttttatgtcttggtgataaactccagctgcaccagacacaaatcagtgtcagtagtgtgctgtatgtggtttaatataaaccagagacatgcagtgtttcccccaagatctagcatataaacctgagattagatggcttctaagcaagtgcaaaaattgtggcttcaagttctccttcttcccactttagcagctttgtaagtttaatttttaatgatctctgctcatgctgtcacgagaaacacaaaatcataaatgttactaagcaacaactgcaagtgtaattaatagtaatttttttcaagttagcaacatggtcctttgcaggaatgtgtgacaggaacagcagtggcctgaggggtctgatgggcctttctagctatgtgatgtctaggcatgaatagcacaataaaacagcagttggggaactataaggagcctttaaattgactttttttttcctcttcccacagagatactctattatagcaaagaagaaagataatttcattgagccatcctgttttacaggtaaggaaaccaaaggccatagaagacttgccttatgtcatgaagaaagtttatgttagaactcagggctcccaattccactgttctttattctacacctgggtggtcacaactgaaaatgttttgcttatttctaaacagaaatcattttttgacatgttcattttaatgatgtgtctatgcctggggctaatgtcatgaaaacaatgtgtctggtaaggagaaaactgaaaaagtcagcattaaaaagacatttaagtccatttcaaatgcctcccatatgcagactccactttatctcctccagttctctaaaacccttcactccttggctttttctggctaatacacacatctagctaagaaagctcaacttttctttttactagagatgttctctctgtgtgtgtgtgtgtgtgtgcgcgcgcgcgtgtgcgcgcgctctgagtttatcctacttttaaaaagctgagtggtgttttacacattttggaataggcagctagtgcttctttttctgcttttgaagtttcctgggaagtcccttaaaagcataccacaaaattaatctcttcctgtttgccagagggttgctctactctaaatttggctctacatctacaagcatgctctaggaagccaattaaaatggatgaacaagcaaaatgaaaacatacctatggaccaacccaaggttaccgtcaggtggtgaaggacttcagaatcacttacctgaagcattgtgtttctcagcagcaaagagtagcatccccagccctgaccctaattttattcctacttctcagttctgaggcatggacttacaaaaagacacatacatgcaatggccatcatgatatccaaataagtaggaaaaggaactgtgtttctgcccatgaagttttactgaattcaaaggcaacctacctccagtcaataggtcagaatgcagaaatggctgaaaactctggtattgaaaagcaaatgttctccacttttgtaagaaataacattttcaaccactaagagactttattaccatccctaaacacacaaaaaaatttcttttagatttactctcactttgcacgaatagcaaacatgcttagaactgcttagattgcacaatgttctcagattaggaagggaaaattggtttgaataaaatacagatgtctattccgctaacaactaaatctttgtgaatgttctgagtcctgtaccatcaaagaaatagatcgtccatgggggtttctatttctggtagattgtacttacacactgaatgaaaaagctttctcctaatattcccagtccaaataaaaacaacccaaggggcacctcttatttaggtcaataaaagtttgcaaatgtggaatactttagccatctacatcacactggtagagactttctgtgatcagctattttttaataccatatttaatcaaatctaagataccatcattgtgaaactcgacattttatatatcactaagaaagcaaaaatgcagcctgggtgaccagagtgaaactccatctcaaaaaaaaaaaaaaaagaattaatgaactatagtttaatacatatttactaagtgcccacactaactacttaaaaatggtccaaaatactgaggcatcttaagctgttggaaaattgttttgttttcaccactacagtaatgagtctttgaatgataccattttctatacttggcttctagtttactctgcctttcactgatcttatctttttattaataactttatgagaaaaataattaatgctttatatattgttctctcagttccatgagcaaatatttcagagggaaaattggcatctgagtaaatattacttggctttcattctgaagcccaaacatgggtattcctcaagctgagcatctgcatagaattaggaattaacacaatggtgacaaagtccaaccccacattgcaagccctgctctctgagtggcacttctgcaattctaactaactgtctactcacttgtaaggccttgaagttaagtgggtgcaacaccaaactcaatactttttgttggaacagtggtatctcctaccttttctaacaatggttccctgatattttgggcaacccaggcataggatagaaatcctggaatcaagtttgacaatatatttcctgcatagccttccaatccagtcagtaaagatgtcctgttaatttttcctttaaaatatttgtcctggccatccctttttatccatcccactgccaccatcttggctcagccctcaccacctcattttgtgaccacaacgtcccgatgctgtatcagacactctttctgctccattcaactctgatgaccacttcctgggtaaccaccctaatactattctcttacacaaaaactggcaatggcatttttgttctatctgctcaaatctaatgtcttctctctgatactcaactctctccaacatctgccctcacccttcttagctaactttctcaaactactcaatgcttcatcacttctgctccgatcaggacagagtccttggagtgccgtacacattactgcctcctgacttgttccattcctctgacaaactcctctctccctctcacttgctgccaaaatcttgcttatccttcatgatccagttcaagcatcaaatcatgcatgcccctttctctaattactccagcatacactgccttccttccctaaaattccacattacatcttacgtagtacttgattcccttctcacttgttttgttttgtttttttcccaagacagagtcttgctctgtcgcccaggctggagtgcaatggtgcaatctcggctcactgcaatctccacctcctgggttcaagcaattctcctgcctcagcaggaggtagctgggattacaggcgcccaccaccatgcccggctaatttttgtatttttagtagagacagggtttcaccatgttggccgagctggcctactcacttgttaattgttaaccgtatttgctcattctagtcagtcttcagctgaaaggtaagttctttgagggaatggatcatgtctgagcccccataatgcttaacagagaaaaatgtaatagcagtactcagtaaaaacttactgataggtttattaaactaagagaaaagacagtttggatataattttcgtaagaagccttttcatttggaaagatcagtgaacccattgaaattctcaggtaaatataggctgtgctaaccccaaattataaactctaaggcagtggtcccaacctttttggcagcaggaaccagttttgtggaagacaatttttccacggtctgggagtagcagggtggatggttttgggatgaaatggttccaccttagatcatcagttaaattatcataaggaattggattctcataaggagcacacaacctagatcccttgcatgtgcagttcacaacagggctcatgcttctatgagaatctaatgctgctgctgatctgaaaggagacagagctcagatggcaatgtttgctcacccgccgctcacttcctactgtgcagcctggttcctaacaggccagggactggtaacaatccatggcctgggtgttgcggatccctgctctaaggaatttgacagatagcaattatcagccatgaccaacttcttgagttcctctaatggaataaaaccttacttgaataattaaaaagcagataacactaccacatactaactgtcctacaatttcctgtgtagctctatttctaacagatcaataagagacttgggaagtaataacaataataatagcaaaatttgtagttttcagccttttaacttcttgtttcttattctgctaagctttcaatgagtaattttatatactgtattaggaaataataaaagattaagtaagagcttccaggacaattcttcattttcaaccttcggatgactctttatcacacataagataaagaggctgtgtaatattgctaagcagattatatatttatttatacttaataaattcattgatgctgtctaattctgctttaaggcttacagccattaattcaaccacatctataaaatgctaggaaggctttcatagccccactgtcaggaaattcaatatagtacatagaactaaaaagaaaatcaatgaagtagatatcaagtttagctttaagtgtgactcacaagtcttagacatttcactgaaagaatgtccataacaacatgctcttttactcttgctgtagtcataacttacatttgtctaagagactatagaacattcacaggcgtcatctaatttgatttttacaaggagacaggatgggtattattatccccattatatagatgaggcaattatgcgtcagagaggttaggtaacctgtcaaatgccataaagctagtaggtcacctgtctcctgaaccaagcttttaccatcaggatgtgttgccagttttagaatatcagccacagagaagagagtggctgtgacaacgaaggagcttacaaaatgtggacactgcagctatgtgtgtcctggaacctaactttctaaaaggagtgccattaagatactactttgtaggtctagattaatcatgaccaagatccttcaactttaaggcttgattacttaaatggatgaaatttcagacaatgtggtctttttctaagagaaagaactgcaaaaattgtagcatgttagaactaagtttctatggccaaaggtgggaaaacaagcaacagtacagataattcaggcatacagaaaaaaaaaaaagtcttgtttgttcccagcccctttgggttttacctgtgagcgtgtaatcagagaaaacacagtttaaagatatggctgctcattttagacagtcctataaagataatggtaatgctgaagaagttattaatatttggttcctaacatatatgatacaaactattaagagttgaccttaatgaaatcttgcaaatcaatatttaaaaatttttaatttgcatccagttgactatatccatatgttagacttccttttgttcattcattcatcacacatgaagtctactttccagtcttacttacctccctccctaggagggaggtaggacatacgtaactagaatataaaggtagaaatgacccagaaaaggtacagatacaattttataaagagaaagaagttacttccagttagggaataaaggaatgcattgtcaagaaggttgcaaagggccaggtgcagtggctcacatttgtaatcccaacactttgggaggccgaggcgggaggatcactagagcccaggaattcgagatcaacctgggcaacacagtgagaccatgtctctacaaaaacttaaaaattaaaaaaattaggtgtggtggtgcacacctgtagtttcagctacttgggaggctgaggtgggaggattacttgagtctaagaagttgaggctacagtgagcgattgatcatgccactgaactccagcctgggtgacagagacactattgccctaggaaagcaactgttttgctgtaatcaatgaaggctcccgatagccagagccacccagaattcacagtcacatcgaaccttgccctcatcctctgcctccttgtcacagagcaacactgccccagtagcacacatctccagtctgtaacaaagaagtcttagcatcaagcatactcaagccacttggatagcaaatgaggtcatctgaaaatacttttaaagtttacttttttaaaaaacagttttttgtttacaggacccaaatggcagttgacattccctgtaaaagtttaacctcttcaattagaattctgttttctttagaatttcaggtgggatctgttacaattcactgaagtttagatttgacaatgttctatctactatgttattgaaaccatataatatttaccaaattcccatacatggtagacagtgacattaattaagaagataatttccaatttgttccatgaagtttcagtgacccactctgtaataaagaacttggaaagggaggttccaagatggccaaatatgaacagctccagtctacagcccccagcgtgagtgatgcagaagacgggtgatttctgcatttccaactgaggtaccgggttcatctcactggggcttgtcagacagtgggtacaacccacggagcatgagccaaagcagggtggggcatcacctcacccaggaagcacaaggggttggggaattccctttcctagccaagggaagccatgactgacggtacctggaaaatcaggacactccccaccctaatactgtgcttttccaatggtcttagcaaacggcacaccaggagattatgtcccaggcctggctcggagggtcccatgcccacggagcctggctcactgctagcacagcagtctgagatcgaactgcaaagcagcagcgaggctgggggaggggtgtccaccattgctgagacttgagtaggtaaacaaagcagccaggaagctcgaaatgggtggagcccaccgcagctcaaggaggcctgcctgcctctgtagactccacctctaggggcagggcacagctgaacaaaagacagcagaaacttctgcagacttaaatgtccctgtctgacagctttgaaaagagtaggggtcctcccagcatggaatatgatatctgagaatggacagtctgcctcttcaagtgggttcctgacccctgagtagcctaactgggaggcacctcccagtaggggccgactgacacctcatacggccaggtgcccctctgagacgaagcttccagaggaacaatcagggagcaacatttgccgttctgcaatatttgctgttctgcagcctctgctggtgatacccaagcaaacagggtctggagtggacctccagcaaactccaacagacctgcagctgagggtcctgactgttagaaggaaaactaacaaagagaaagaacatccacaccaaaaccccatctgtacgtcaccatcatcaaagaccaaaggtagataaaaccaataagatggggagaaaccagagcagagaagctgaaaattctaaaaatcagagcacgtcttctcctccaaaggaatgcagctcctcgccagcaatggaacaaagctggacagagaatgactttcacaagttgagagaagaaggcttcagatgatcagtaataacaaactcctccgagctaaaggaggatgtttgaaccttttagcaaagaagctaaaaaccttgaaaaaacattagacgaatggctaactagaaaaaacagcatagagaagaccttaaatgacctgatggagctgaaaaccatggcacgagaactatgtgacacatgcacaagcttcagtagctgattcaatcaagtggaagaaagggattgaagatcaaatgaatgaaatgaagcaagaagagaagtttagagaaaaaagagtaaaaagaaatgaacaaagcctccaagaaatatgggactatgtgaaaagaccaaatctacatctgattggtgtacctgaaagtgatggggagaatggaaccaagttggaaaacgctctgcaggatattatccaggagaacttccccaatctagtgaggcaggccagcattcaaattcaggaaatacagagaatgccgcaaagatactcctcaagaagagtaactcaaagacacataattgtcagattcaccaaagttgaaatgaaggaaaaaacattaagtgcagcgagagagaaagggcaggttacccacaaagggaagtccatcagactaacagcatctttcggcagaaactctacaagccagaagagagtgggggccaatattcaacattcttaaagaaaagaattttcaacccagaatttcatatccagccaaactaagcttcataagtgaaggagaaataaaatcctttacagacaagcaaatgctgagagattttgtcaccaccaggcctgccttacaagagctcctgaaggaagcactaaacatggaaaggaacaaccagtaccagccactgcaaaaacatgccaaattgtaaagatcattgaggctaggaagaaactgcatcaactaacgagcaaaataaccagctaacatcataatgacaggatcaaattcacacataacaatattaaccttaaatgtaaatgggctaaatgctccagttaaaagacatggactggcaaattggataaagagtcaagacccatcagtgtgctgtattcagcagacccatctcatgtgcagagacgcacataggctcaaaataaagggatggaggaagatctaccaaggaaatggaaagcaaaaaaaagcaggagttgcaatcctagtctctgataaaacagactttaaaccaacaaagatcaaaagagacaaagaaggccattacataatgataaagggatcaattcaacaagaagagctaactatcctaaaaatatatgcacctaatacaggagcaccagattcacaaagcaagtccttagagacctacaaagagacttagactcccacacaataataatgggagactttatcaccccacggtcaatattagacagatcaacaagacagaaaattaacaaagatatccagaaattgaactcagctctgcaccaagcggacctaatagacatctacagaactctccactccaaatcaacagaatatacattcttctcggcaccacatcacacttattccaaaaattgactacatagttggaagtaaagcactcctcagcaaatgtaaaagaacagaaattataacaaactgcctctcagactacagtgctttcaaactagaactcaggattaagaaactcactcagaaccactcaactacatggaaactgagcaacctgctcctgagtgactactgggtacttaacgaagtgaaggcagaaataaagatgttctttgaaaccaatgagaacaaagacacaacataccagaatctctgggacacatttaaagcagtgtgtagagggaaatttatagcactaaatgcccacaagagaaagcaggaaagatctaaaattgacaccctaacatcacaatttagagaagcaagagcaaacacattcaaaagctagcagaagacaagaaataactaagatcagagtagaactgaaggagatagagacagaaaaactccttcaaaaaatcaatgaacccaggagctggttttttaaaaagatcaacaaaattgatagatcactagcaagactaataaagaagaaaagagaaaagaatcaaatagatgcaataaaaggtgataaaggggatatcaccaccaatcccacagaaatacaaactaccatcagagaacactataaacacttctatgcaaataaactagaaaacctaaaagaaatttataaattcctggacacacacaccctcccaggactaaaccaggaagaagttgaatctcttaatagaccaataacaggctctgaaattgaggcaataattaatagcctaccaaccaaaaaaatccatcaggaccagatggattcacagctgaattctaccagaggtataaggaggagctggtaccattctgaaactattctaatcaatagaaaaagagggaatcctccctaactcattttatgaggccagcatcatcctgataccacagcctgacagagacacaacaaaaaaagagaatttcaggccaatatccctgatgaagatcgatggaaaaatcctcagtaaaatactggcaaaccgaatccagcagaacatcaaaaagcttatccaccatgatcaagttggcttcatccctgggatgcaaggctggttcaacatatgcaaatcaataaatataatccatcatataaacagaatcaaagacaaaaaccatgattatctcaatagatgcagaaaaggcctttgacaaaattcaacagcctttgtgctaaaaactctaaataaactaggtattgatgggacatatctcaaaataataagagctattcacgacaaacccacagccaatgtcatactgaatgggcaaaagctggaagcattccctttgaaaactggcacaaaacaaggatgtcctctgtcaccactcctattcaacatagtattggacgttctagccagggcaatcaggcaatagaaagaaataaaggatattcaaataggaagagaggaagtcaaattgtctctgtttgcagatgacatgattgtatatttagaaaaccccatcatctcagcccaaaatctccttaagctgataagcaacttcagcaaagtctcaggatacaaaatcaatgtgcaaaaatcacaagcattcctatacaccaataacagacaaacagagagccaaatcatgagtgaactcccattcacaattgtttcaaagagaataaaatacttaggaatccaacttacaagggatgtggaagacctcttcaaggagaactacaaaccactgctcaaggaaataaaagaggacgcaaacaaatggaagaacattccattctcatgggtaggaagaatcaatatcatgaaaatggccatactacccaaggtaatttatagattcaatgccatccccatcaagctaccaatgactttctccacagaattggaaaaaaactactttaaagttcatatggaaccaaaaaagagcccgcatcgccaagacaatcctaaaccaaaagaacaaagctggaggcatcacgctacctgacttcaaactatattacaaggctacagtaaccaaaacagcatggtactggtaccaaaacagagatatagaccaatggaacagaacagagccctcagaaacaataccacacatctacaaccatctgatctttgacaaacctgacaaaaacaagaaatggggaaaggattctctatttaataaatggtgctgggaaaactggctagccatatgtagaaagctgaaactggatcccttctttacaccttatacaaaaattaattcaagatgaattaaagacttacacgttagacctaaaaccataaaaaccctagaagaaaacctaggcaataccattcaggacataggcatggacaaggacttcatgactaaaacaccaaaagcaatggcaacaaaagccaaaattgacaaatgggatctaattaaactaaagagcttctgcacagcaaaagaaactaccatcagagtgaataggaaacctacggaatgggagaaaatttttacaatctacccatctgacaaagggctaatatccagaatctaaaagaacttaaacaaatttacaagaaaaaatcaaatgaccccatcaaaaagtgggtgaaggatatgaacagacacttctcaaaagaagacatttatgtagccaaaagacacatgaaaaaatgctcatcatcactggccatcagagaaatgcaaatcaaaaccacaatgagataccatctcacaccagttagaatggcgatcattaaagtccggaaacaacaggtgctggaaaggatgtagagaaataggaacacttttacactgttgatgggactgtaaactagttcaaacattgtggaagacagtgtggcgattcctctaggatctagaactagaaataccatttgagccagccatcccattactgggtatatacccagaggattataaatcatgctactataaagacacatgcacacgtatgtttattgcggcactatttacaatagcaaatacttggagccaaccaaatgtccatcagtgagcaaggacatcattctgagcaaactatcgcaaggacagaaaaccaaacaccgcatgttctcactcataggtgggaactgaacaatgagaacacttggacacagggtggggaacatcacacactgggacctgtcatggagtaggggtaggggggagggatagcattaggagatatacctaatgtaaatgacgagttaatgggtgcagcacaccaacatggcacatgtatacatatgtaacaaacctgcaggttgtgcacatgtaccctagaacttaaagtataattaaaaaaaaaaagaacctggagaaattatcaagtaagcatcatatttaatgaatttatggtgaaatcatgtgggaaaaatttttctgtacagggatgatgactctggaaatggtggagagagagacagaaaaacaaatgtcactgtaacacaggtatttaaattgtatttaaatacacagacttttgaatttatagaaaattttcaagtatgaaattgatttcatgcaacctaaagtctcaaacttcaaataattttttgtgttaaatttataaattgtgtattaatgcaattcaaatttattcctaaaaatattttaactaaaggagaaattcctggggcctgagattagagttttaggaaatgtacatatgggataaacttacacaggctgaaattaagtgaaaccttacttctcaatgttgagatggattagccattttaacataaagtagaaacttctaagaaatgcagaatctcaacttccccaccctcattccacctaccccacccactcaatcagatcctgcatttcaataagatttatttagtgcaataacttttttacttatcaaagttgagaagcacaggactaaatgataaagagaaaagaggctgcttaggataaggaaataaaaggttgaagttaacttaagtattatgatactttcttagcgtgtcatacggttacctgtcatctttcctctttggttcaacttgttttatggggacatttatgtgggaaaatatctttgcttttgtaatttatgtgggaaaatatctttgcttttgtgtttttacttaagtaaaatctgggctccttttatgtcaactagcttttccactattgttattatgatagaaagtacaggctacttataaacatgattagttcaatgagaacttttagaatattgctgacctaaatctggacatctacacaatcattaattcttaccaaaatgctacaaggcaatataagcataattagcctccctgatccctgaacatagcctaatatcactcactcaatcagaatcatactggaaacgatatgaccaactatggcaggtagtagatgtccagtcacactagtattgctttcagccagatgtctctggtccttgtgagttcctttcgtccttaatggtgaaatagcaacagagggaaccaactcactcactcaaggcagatttcttatttctagacttgtcctgaaaccaacagatccagctctctcctaccaaataccatgaaatttaaacaaacgaaactcgcaaaataatacagcagcagcagcaacaacaacaatgaaatattaaaatagtaaatataagtatcaaacatcaaaaccccctctccaaccaaaatctctcttcttcgataaagttcccaggaggtaacccaatttctaggttggtgtccaatatttgggatcatttgattcaagactgaagtacttaaaatggcttttaaaaaaggaaaaaaggttagatttccagagaaaagtgtaacattttttaagttgaacattatgagggatttgatgggggcagctttgcaagtagaactggagactggtccactgttcaggctttttacgaaagactgcaaaggttgtttgtttccaaacaccaagaagtcaccaagttcaccagtccaaatgcaaatgactcacactaggaaccctaatagtgctgctgttaagtcatttgcaaatgggtggggctgagatgacacagaaccctattttcccaggtggcatcttaagtatggttgattctaccttcagccccacatttaaaagtacagtgtaaacacagctaagggaccgcctccttcaaattacacacaaggcacacctactaataggagatgttgtgaaagccaggtggggctttgtctttcaagtccctgcatccaagaataagcatgctgtgtacaaaaaaaaaaaaaaaagcaagggtgatgcaactgcattcattgtccctaaagggagaacatgcaataattctcagatccaaggataaagggaatccccctttaagaaaagatgttggcattatgtggggattgggaacatgccagaacaatcacacatttttacaagagagagaaagagaaaaaaagttaagacccatttgtcttatttcagtctctttcttcagaattgacgactttaatcaacaggtcactttcagagtattgctggacaccttgactttctgccatgaaatgctatgggaattctggcagttgagagccaacaccccactagacaccagtgctgcataaccacacttttaatagaccccagagctgtggtgacagcatgcccttcccagtttttccacagacggtgctcctgaaattttccatagacagtgtattcttgtggttaattagttatctgagcaatttccattatagaaagagtatctgtacataattaaacccatcttaggaccaaactgccgggcttcaatgtcattaattcagaagggctaaaatgaaaatgagatgaataattctcacctgatgaagggaccgcactagattagatcctatcctctgaaatacatacagcattaaatttaaaaaaacaagagagatgaaaacaggtgatggaagaaactggaaaggtaagttgcctctagagaccaaagaataacactccttttcaaactattatcaagaaatcttgggggaaagataaaattagcaagagaaggctattagctctctgttactcacctttatgaaaccattttcagggatcagtttgttaaattccactgaaacgtggaggtacacagcacagcccttcttctgggatgcacagtcatgccatacagaagcgtgtgggtagacgccaaaacatgtgtggacctgcaaccctttctgtagaaactcagcattctgagtagtaacaaggattaaccttgtgcactcatggagaaaactggtggctccacacatccagttgtccttcgggttatttttgcatcccactctataatttcttttaattacttaactgtaaagcacaggaaagtgctcattacttgtagcttaatgcaggaggaaatataattgaatatgttctcctagccactgctctaccccagctcccagctcttctgaagtgtcacggttcatttcaacagcacgagtaaggcagtttccaggccctgtgcataatgagccatgtggaccctattcaagaaactggctgtactccagaactactataaaatataaggaaaatattaacatcttagatgacaaaagatccatatggctggccagaaaatatctgcatcatttaagccattagaatgcacctatatggaaacattcaatttggcggtactgtgaacaacaggactgtgaaaacatctgtttatctccacccgttttcactaaacactgattcctatagaagacatgcaaactcaaataccaacatatttcatctaagcataggacagggactccatttttacatagttgctataataaatacaatacagtatttgttggtgataggattttggaagatgctctggatagctggaaaaataagtaaaatgtttctctttgtattaaacttgataaaaaataatagctaacatttattaatggtgaggtaaataatttgattatccaccatttatagctgaggaaactgaggcccagagagtttcggtggattccctaagatcacatacccattatgtggtggagagggaatatgaaccagtgctggcttgctatgcctctttccatatggggtcagacatagatgtggtgtcttataatgtgagggaggtctacttggcagaaatatcctgcagaccctatatgccagtttcttatttatttaaacaaagccccatatgagcatttctgataagcagtttgtttacacactaattccacagaggttaaatataaccctaatgtttctttgttgctactctgtttccagtattgaattattaccacaaggtaccaaccatatatgcatacttaatagggtattttgtcaaaactatgcatgaaggtcatttgtttgagatgtcagaacattttcccgtgagaagatctcattgggcattgaaacagaaccacatgctcttcagaccagcaaccgcgactaccaaatactcctctgtcaactctacttgagtaagaacgctttcaattaaggcctaagtgtcaacatgcctttaaaaaaaatcgtggtgacacaaaatctttctttttagcacccaacagaatcccttcaaagcctcgtggtctgacaccctatgctacgtgacttgtgacccatccatttgtcatgttcttcgggaatgtggctaaggggctaagatgtgacttgaaaagaaaggtagaacaagatcatctcaaatttattatcaaggaatagttcagaaaacgacttcagaccacagagacagcagaacagatggtccggcatggatagagcatcagacactcacagactgtgccaacaagagccatcgagtcaaaacagccaaaggaaggagggtcatggaatgggttctctcacaccaaactgatgcccagaggccctcagcatgaataacaaaggcaaccagacccacaagccatactgagtggatacaaaacctatacctaggctgacatcccaaatgtgtgtggcaagttagatgatgatggcacaaaagacagaacaccttgcttctggccattgtcagctcttggaagagagcacacttttagaggagcagctgcaaggagcctgagaacaaaactggaaatgtctgttatgaaagccttcacaggtattattaacaaaagaaaatgtctatttgtcaatggtgtttcagctagattttggcagtccattcttatgcccaggaatgacctcttgtgtagactggatacagtcatcaatgcaactgtccaggtgcaactcttctataaaggggaagaggagtgactttcccctatacagtggccctgtcaaaattctataaaaaatattgtccatttaaattaaataaccactgtgcccggctccatttaccacacttttctatgcagtggaactgaaggggatttttttttttgctgtcctcagagaaaaataagactaagaatcaacctttctaatgagaatggtaaggagttatgtggggatgacctggaatatatgctgctcaaatggtggagatgttatctaggccgtaaatcatggcatttttatatgatcccctatttgcctaatgcaggaaaccacttggcaactttaaggaaaaagtctagcaataatgcatcatagttcaatgtttatattgtacttggacagtttaaatttatcttataaagtactaattatttaattacaaatgttgagtaagtgtaaaatcattcctcaaaaaagcatcccttgagtatgaaagttccaagcttagcaagacatccctgtgatttgggatacatctcttgaactcagtcctgaaaataatgttaatagctgagaaaagagcattgaaagccttatacacagtgtgttgtagtgaaacaattttctttttggttctaaaaaacactgttgtgctctttagatccagcatggctagttagatgaataatgaatgcatgttcaactttctgctacaggaaattctgcaagtggcaacgtgggtccattccgtgtgtgtcactagagctggcgcaagcccatggccatggtgaggcagcgtttccactggaactaatctgatacctgcaccagctcttgcaactgtgcagtgttcccactgcaaactacggatggggtaaaagactgctcacctcctatttctcatctaatctcacacactctgtttgatgaggctatggagaaacaggtcttctcatacactaaaggtgggagtacaaacaattcaagccctgtgcaggacaattaggcaatacctatcaaaattatacatgatttttcctgctgacccagcaattccacttctgggaataattgacagatataggtgcatatgtacaaaatgatggaaagctctctggtatatattagtaagtgataaaacaaggtgtaaaatagtgtatatatggctactaccttttgttttaaaaatgggggaaaatggtggagcttgcggtgagccgagatcgtgccactgcactccagcctgggcgacagagcgagactccgtctcaaaaaaaaaacagggtggggtgggggggaaataatagtacatactcatatttacctgtatctatataaaacacactatcaaggattcacaagaaactaatacaaatgatcaccttatagatggtatgtattgggggatactgaggtgagcagggtataagtggggcaagacttttcagtgtaaacttcttttaaattttattttgatttttgaataatgtaaattaactgtcaaataattaaattaaaaataaccaatttattaacaaaacatttaatctagtggctttacttttgacacaagacaatctccaaatctccaccaatcaccaaaaacagagatttacaccagttcctttgcttgtttttcctggtaatgactacaattaagaagtcctgtgggtgccatctcagttttggagatatttccctagaagaaactgattcaaggtgggacaattgggtatagagaatagtccctgggaccgggggctgaagtcctgaattctggtcctgcctaactcccactttctattaagctgaccctgtgaaacggctgatacatgaccattttttaccaacaaattagacaaattcatgggtgatcaaattcaaaaaccctgttgccttaccactgtaatatgatgaggacacgtatacacaccctgcctaactcacagcatcacaccagggattgtcaacatatgggaaagagctttgtacattgtaaaggtcaaccctacaaacagcagctgtgaaacacaacacaaccctgagggggtggccatggccaaacataggaggggaaaaggacccagtctcaaaagcatctgagatactgagatagtgcagaggaatgaaatcttccaaaagatggaatctaaacataaacagacatcaagagcgggctgacttgcagtggaagatgtggttaaatgactccacatgtggtcatctgccattgcatacactgcaaattctgtgaagcctactaagggaaattagggagatgtaactgggagcgcactgtaaagatactgatacgaacacgaatgtgagatcaatgttgaatgatggacccaaaaggatggctcttagtccttgtgaacatatagttgttggagacatgtgtctgtcatacacagataggcctccaactcacctctgaaatcagatgcaaacttcaaatacttttgaaaagtctccctagaggaccttttacccccaaatgtagagactaaatgaaaaaccattctttaaaaggggttaaaaaaaacactcaaaaaacttctcctttccacatgtatagtcatctggaaaacagatctcccattaaacggatggtcaaagctgtatcacaacattaaactaagcacaaaaattcaagacttcccttcctcaccctcctaaaacgaaacattccaataggctagaaataacctcatgaggaagttcattgaaggtactcccacttggcactactatccagacactgggttaggaaactagttacttggaactcagaaaaaataagaactattttgattaggcaaggcccctgtgcaaggtgcctagttccagctgggtctcagtagtctgatgggtgtcatgcactcctggacctcctcttaatgaaacaagggaccttgactttgggccccatgttgagaagctctgaagccaaatataatggtcaaatataatgtcctctcacttctagcttcatagcagaccatgtttccatatagaaatttctctaggaggcttactatcctatgttatctcaagccgaggcctcctcttacacaagaggcttaaactgcccgtaagtaagaattaaagatatgttacattttttatgaattagtcatttattcattcagcaaaggttattaagaaggtactgagtttggatgtactttgctttaggaaaatcattttcaaggttgcttcatgcaaagtgggaataattaacttggtaactcaatagacttgctaagtgattgccccaagtttaaactgtcactgatttgcaagtatgacatgaaaaccagagacccaaggaggtgggcacattcccacctgtcaatagccctcaagagaagtgcttcagtattaccccaaatggccaactttgcatggttaatcatttagttagaggctcacaagatcaaaaacaattcttaaaaaactatttatgtgaacaaagggacaatgagctgacaccttcaaggtgcacgtcaggggcacaatacaagttcctgtttcaccagcagagctctggtcgctcagttgaagctgaaagtcagaaccagctgtgtttctgtcattccctcatatgaaaagaactcagctgtagacctttactccatgagaaaacattttttaaaaacccacaaataatttttaggtttcatttttgcctctgctttctccagagctacaaaggtcacccaaatttctgtggcgaggttatttaggagagcctttcttttggatgtcaacttgtcaaacttgcagtttagatgagtgtgatgtagtctcctaaaatttacttttgcactattttttcaaataatagatattctctgagcacaggcactgaggacatcaaaatgaatgagactgaatttctgcccttggggactgcagtgttaagggtgggttagacccaaaaaccaacaatacagtgcaatgtggtacatgctgtaactaacatgcacaaagggcattcccaaaaaagagaatgaaaagagggaggaaggtggcaaaggagaaaggcctttggcccaagtttttgttcaataaagatcatattttgtagatcaaaagattatatgatctgctaaccccttagcatgtatagctcatgaagcaagacaaagtacccatgaagagttcaacattagcgagcctctggggcaagtaagttggaaatcataacccatttatggatacctgcctagaactgatttcctattcagagtgccttcctagctgataagaacaatactgaaatctttcttttccatgagggaaaaacatgttgaatcatttagcaagtacctacagagccacctactatgtatgtgcccagcagtctactgtgtgctatcaggagtaagaaaatgtagaaatattcttgcttttaaagggtttacaatctaattgtagaaataatactaaaatacatgagaggaaagaaaagcaaacttagcttctctgggataaggactatatctcatgcaacttttaaaaagttaccatttattcaacttcctaccaccattacatacttctggtaatcaattatcttccttctccccttgggattttgaattgggaacagaatagaaataagttgccaaataagaatcaaaatacagggtcagcctcaatttcagtgcaagtggtccattgctttggttcacaggctctacagtccagaagatgaaagattaaggatttcatccatcagattaacctctcctcttttcacagaaagaacaagtaatggggataagagaagggcctagaatattcccctgaaagtgttacttattaggaagcaagttcccttgtggaaacacaaggatgggggaaagggatttccctcaacattgttctatctacacacagagaattcaagtaacttgcccaaaatcacagagctagtaagtggtgaggcttaaatcaaacttgatcatcaggtccaggaacacaggtacaggctggggctgcctcatgaagtgtctgtttaggaaatgtgtctttaaagtcaacagactgtcctgagtaggacattctagaacatttttctagacaaaaacatcatatctacaacttccagcctagaatctgatacagcaaagacacacaataatgttttgttatataagtgcatatacaattaattaccaaattatgaggtacagaccacctaggaactcagatagggcaggtttattattatgggcaagagtctttctagaaacaggattccagctaggtcttgaagaatgagtagaattcagatgaataaacagcagaaaaaatcattaataaacacatgagactcagagaattacaacaaaacagttttagtcttgtaaactttgctataaagtgaagcatatttaggtatgaagcatgctgattaaactttttattgtcttaatacaagtctaaaaaaagtatctttttgggggagctggaaagtactaaaaataaaaacagtggctgaaattcattaagcatttactatgccaagcactgctctaagcacttcacagacactaacacatttaatccctaccaataccctgttgagaggttgagatacagagaatttaaattactgacccaaggtcatagacctagtaagtgttaggcctggagtcaaactcgatcctcctctggctcaggaatattgttccaggcctttgctctcacctggaagtttctaattagaaaatttatttcaagtcagaataaaatcttcagcagttctctcatctcaaaatgtctgaatttctgattatttacaaggctgcaaatcccttctagccacgctctaatgcaagtacttggatagtgaaataaacgataagtctctctaaatcacaggatattcagtttatttgattttagttcagcgattcttaaactgtcccatacatccaaaccatctgtagaagtttctaaacccaacataggcccagggacccaataccaaacttacaaatcttggagactaagatctcatatgtatatatattttaaagattcaagggtaattctgatgctgaatgtgtttgagaatcactgctgtatgctgcattctattttattgtatttcttttattattattattataataataataataatacttttaagttctggggtacatgtgcagaacgtgcaggtttgttacctaggtatacagatgccatggtggtttgctgcactcatcaacttgtcatctacattaggtatttctcctaatgctatccctcccctagcctcctacaccctgacaggccccagtgtgtgatgttctcctcccagtgtccatgtgttctcactgttcaactcccacttatgagtgagaacatgtggtgtttggttttctgttcctgtgttaccttgccaagaatgatggtttccagcttcatccatgtccctgcaaaggacatgaactcatccttttttatggctgcatagtattccatggtgtatgtgtgtcacattttctttatccagtctatcattgatgggcattcggattggttccaagtctttgctattgtgaatagtgccacaataaacatacatgtgcatgtgtctttatagtagcatgatttataatcctttgagtatatacccagtaatgggatggctgggtcaaaagatatttctggttctagatccttgaggaatcaccacactgtcttccacaatggttgaactaatttacactcccaccaacagtgtaaaagtgttcctatttctctacatcctctcctgcatctgttgtttcctgactttttaatgatcgccattctaactggcataagatggtatctcactgtggttttgatttgcatttctctaatgaccagtgatgatgagcttttcttcgtatgtttgttggcagcataaatttcttcttttgagaagcatctgttcatacccttcgcccactttttgatggggttgttttttttcttgtaaacttgtttaggttccttgtagattctggatattagccttttgtcagatggatacgttgcaaaaaatttcacccattctgtcggttgcctgttcactctgatgttagtttcttttgctgtgcagaagctctttagtttaattagatcccatttgtcaattttggcttttgttgccattgcttttggtattttagtcatgaagtctttgccatgcctatgtcctgaatggtattgcctaggttttcttctagggtttttatggttttatgttttatgtttaagtctttaatccatcttgagttaatttttgtataacgtgtaaggaaggggtccagtttcagttttctgcaaatggctagccagttttcccgacaccatttattaaatagggaatcctttctgcattgcttgtttttgtcatgtttgtcaaagatcagatggttgtagatgtgtggcgttatttctgaggcctctgttctgttccattggtctatctatctgtttatgtaccagtaccatgatgttttggttactgtagccttgtagtatagtttgaagtcaggtagcatgatgcctccagcttgttcattttgcttaggattgtcttggctatacgggctgttttttggttccatatgaaatttaaagtagttttttctaattctatgaagaaagtcaatggtagcttgatggggatagcattggatctataaattactttgggcagtatggccattttcacgatattgattcttcctatccatgagaatggaatgttcttccatttgtttgtgtcctctcttatttcattgagcagtggtttgtagttctctttaaagaggtccttcacatcccttgtaagttgtattcctaggcattttattctctttgtagcaattgtgaatgggagttcactcatgacttggctgtttgtcattattggtgtataggaatgctcgtgatttttgcacattgattttgtatcctgagactttgctgaagttgcttatcagcttaaggagattttgggctgagatgatggggttttctaaatatacaatcatgtcatctgcaaacagagacaatttgacttcctctcttcctatttgaatatgctttatttctttctattgcctgattgccctggctagaacgtccaatactatgttgaataggagtggtgacagagggcatccttgttttgtgccggttttcaaatgaatgcttccagcttttgcccattcagtatgatattggctgtgggtttctcataaatagctcttattattttgagatatgttccatcaatacctagtttattgagagtttttagcatgaagggctgttgaattttatgaaaggccttttctgcatctattgaaataatcatgtggtttttgtcattggttctctttatgtgatggattatctttattgatttgcatatgttgaaccagccttgcatcccagggatgaagccaaattatcatggtagataagctttttgatgtgctgctggattcagtttaccagttttttattgaagatttttgcatcaatgttcatcagggatattggcctacaattttatttttttgctgtgtctctgccaggtttttgtatcaggatgatgccggactcataaaatgagttagggaggattccctccttttctattgattggaatagtttcagaaggaatggtaccagctcttctttgtacttctggtagaattcagctgtgaatccgtctggtcctgggctttttttggttggtaggctgttaattactgcctcgatttcagaacttattattggtctattcaggaatttgacttcttcctttagtcttaggagggtgtatgtgtccaggaatttattcatttcttctagattttctagtttatttgcatagaggtgtttatagtgttctctgatggtagattgtatttttgtgggatcagtggtgatatcctctttatcatcttttattgcgtctatttgattcttctctcttttcttctttatcaatctggctagcattctatctattttgttaatcttttcaaaaaaccagcttctggattcactgatttttttgaagggttttttgtgtctctaatctccttcagttctgctctgatcttagttatttcttgtcttctgctagcttttgaatgtgtttgctcttgcttctctagttcctttaattgtgatgttagagtgttgattttagctctttcctgctttctcctgtgggcatttattgctatgaatttcccctaaacactgttttagctgtgtcccagagattctggtatgttgtatctttattctcattggtctcaaataatgtatttatttctgccttctttttgttatttactcagtagtcattcaggagcaggttgttcagtttccactgtagttgtatggttttgagttagtttcttaatcctgagttctaatttaattgcactttggtctgagagactgtttgttatgatttccattcttttgcatttgctgaggagtgttttacttccaattatgtggtcaattttagaataagtgtgatgtggtgctgagaagaatgtatattctgttgatatggggtggagagttctgtagatgtctattagttccactgggtccagagctgagttcaaatcctgaatatgcttgttaattttctgtctcgttgacctaatattgacattggggtgttaaagtctcacactattattgtgtgggagtcttggtctctttgtgggtctctaagaacttgctttatgaatctgggtgctcctgtattgggtgcatatatgtttaggatagttagctcttcttgttgaattgatccctttatcattatgtaatggccttctttgtctcttttgatctttgttggtttaaagtctgttttatcagagactaggattgcaacccctgctttttttttgctttccatttgcttggtagatcttcctccatccctttattttcagcctatgtgtgtctttgcatgtgagatgggtctccagaacacagcacactgatgggtcttgactctttatccaatttgccagtctgtggtcttttaattggggcatttagcccatttatatttaaggttaatattgttatgtgtgaatttgatcctgtcattatgatgttagctggttattttgcccattagttgatgcagtttcttcatagtttcaatggtctttacaatttggtatgtttctgcagtggctggtaccggtttttcctttccttatttagtacttccttcaggagctcttgtaaggcatgcctggtggtgacaaaatctctcagcatttgctcgtctgtaaaggattttatttctacttcacttctgaagcttagttggctggatatgaaattctgggttgaaaattcttttctttaagaatgttgaatattggcccccactctcttctggcttgtaggcttgtagggtttctgctgagagatccactgttagtctgatgggcttccctttttgggtaacccgacctttctctctcgctgcccttaactttttttcctgcatttcaaccttggtgaatctgacaattacatgtcttgggtttgctcttcttgaggggtatctttgtggtgttctctgtatttcctgaatttgaatgttggcttgtcttgctagtttggggaagttctcctggataatatcctaaggagtgttttccaacttggttccattgtccccgccactttcaggtacaccaatgaaatgtaggtttggtcttttcacatagtcccacatttcttggaggctttgttccttccttttcattctttttttctctaatcttgtcttcatgctttatttcattaaattgatcttcaatctctgatatcctttcctctgctttatcgattcagttattgaagcttgtgtatgcttcacagagttctcgtgctgtgtttttcagctccattaggtcatttatgttcttctctaaactagttattctagttagcaattcctccaaccttttttcaaggttcttagcttctttgcattgggttagagcatgctcctttagcttggaggagtctgtttttacccactttctgaagcatacttctgtcaattcatcaaactcattctccatccagttttgttcccttgctggcaaagagttgtgctcccttggaggagaagaggcattctggtttttggaattttcagcctttttgtgctggattttcctcatccttgtggatttatctatgtttgatctttgatgttggcgacctttgtacggggttttcgtgtggacatcctttttgttgatgttgatgctattcctgtttgttagttttccttctaacagtcaggcccctctgctgcaggtctgctggaatttggtggaggtccactccagaccctgtttgcctgggtatcaccagcagaagctgcagaacagcaaagactgctgcctgttccttcctctggaaggtttgtcccagaggggcacccaccagatgccagccagagctctcctgtatgaagtgtctgtcgacccctgctgggaggtgtctcccactcaggaatcacgagggtcagggacctgcttaagaaggcagtctgtcccttagcagagctcaagtgctgtgctgggagatccactgctctcttcacagccaacaggcaaagaacatttaagtctgctgaagctgggcccacagccaccccctctcccaggtgctctgtcccatgagatgggagttttatctataagcccctgactggggctgctgcctttctttcccagatgccctgcccagagagggagaatctagagaggcaatctggctacaggggctttgctgagctgtggtaggctccacccagttcaaacttcccagtggctttgtttacattgtgagaggaaaacagcctactcaagcctcagtaatggcggatgcccctcccccgaccaagctggagcatcccaggttgacttcaggcagctgtgctggcagtgagaatttcaaaccagcagatcttaccttgccgtgctccatgggggtgggatctgctgagctagatcacttggctgcctggccttcagcccctttccgggggagtgaatggttctgtctcactggaatttcaggtgccactggggtatgagaaaaaactcctgcagctaactgggtgtctgcccaaatggccacccagttttgtacttgaaacccagggccctggtggtgtaggcacccaagggaatctcctggtctgccggctgcaaagactgtaggaaatgtgtagtatctgggccagatagcactgtccctcatggcacagtccctcagggcttcccttggctaggggagggagttcccctgaccccttgcgcttcctgagtgaggcaatgctccaccctgctttggctcaccctccatgggctgcacccactgtctaaccagtcccaatgagatgagcccggtacctcagttggaaatgcagaaatcacccaccttctgcattgatctctctgggagctgcagactgcagctgttcctatttgccatctggccagccacctaatatttctaatcattcacttagcaagagtctcaggtttaagtaaaattataactaagttactaaggaacaatacatcaaaagtcatatattcatttttccctctaagagttttttcttttttaaaaaaattaaattaaaaaactccttggaaaaaacatttttaatcttcccattaccactttattccttggcacacagaagggtaccagtctctgctggagacaaaggtggacagtaggccagggtgacaatatcagcctgttcctgctccaggtctcacattaatgcatcaagggcaagatatggtttcttacttgaatactgcaggttttggttatagacagctggagtggtggtaaggggactaggttaggtgaagtcactgggctatcatccttgctctggttctacagctgtgcattttggattgctatttagcttctctaagctccagtttcctcctctgttatatagaaataatgtctgccaatcttttttatagagttatttgtaggatcaaatggaatgagatatgtgaatgcattttaaaaatgtatggaataccacacatttggacaagattattattgaagtgtgcaatcttgtctacatgacaagtgaaatcacgtaggaatcgtagtaacaacaaaccagctgaattttggtctcagtaccaatgcctactggggcactgcagtagagcaagttttcctaacacctcatggaacagtgacagtgaaggttctcctaggtttttatgtgagactgcctgaagagcaattacaggctctggaacaatagatgctactaagtttattttattttattattattttttattttactttaagttccgggatacatgtgcagaatgtgcaggtttgttacataggtaaatatgtgtcatggtggtttgctgcacctatcaacccatcacctaggtattaaggctcgcatgcattagctatttgtctgtttgtcctgacgcactctctcccttcccctgccccctgctccaggccccagtgtgtgtggttcccctccctgagtccatgtgttctctctgttcagctcccacttatgagtgagaacatgcagtgttaggttttctgttcctggctaccaagtttaagaaagtcattgtcagggatgtgaaaatcagaaaaataatctggtattttaggaaaagcacttaaaataaattgtattaatgacaccacattttaatgattaataaaatacttgataaggcaatcctgtattaatattcaaccatttatacatgattatttctaaacattatacaatgcaaaaaaattcacatgtttaaagaagtatctactttatcaggtaccatttgtgaatactctcaacaagcaggtgaatacaactctcaatgcaagtgaatatacacagaaatgggcagcaggatggtcatttgcctgtctgtcttgcttgggagtaaaagagaaggctaggaacatggctgtaggtttggtactagaagaaaagtgggacctattccgacttcctgatcctgtgatttttttctttttttgagattcacacacacacacacacacaaactatgcacaagtttgcttccatgttgtatagcaagagtttaaatatttctgagttaatgatgccaaactgtgctccgattatatcagcatatttacatgatccttgaacaccacatatagattcctatactacacatttaagcaaaatcacctcctgacttcacaatgaaagagacctattggattaaaaagtggtttctagtaaaccccaaagagatactgttactaaattactaaatttaaaggcaaaatagtattcactaaactgatttttctgtcttattttccttatttggcataatcattaaccaacttctagtaaatggaagcattctcacaatttaagtttttttagggggaaacacacaatttataaatactgtcaagtgaagaacagattcctgaatactaaaagacccatgcatatccttgtatgtaaaaaaaaaaaaaatccatcataaaatcatagactcaaacaccatctttgattcagtagttctccctctactgtggcttctgctatagagtcattgttaaaaagagttcttcatgaaagattctcacatagcaaaatgctttaagaaaatgtctaacaaacatttttattgtctcaatttgtacacaaactgacacctgaaaatcagagaggataaagaacttcaatctttaaaaaagagaggtaagttattccaaaatgctaccagtcaataattaaaaatacagtttgggggcaagaagttctgaaataactcagagaacttgctcaagattttacttttggaccagtcctctttgggagggagtatgtgaataggtaatgaaagccttatatgagagagtcaatggagagccatatcaaggagcacctgaagatatatggatcaatacagggaaaagaaatccaagtagcccagtgcctgacactcactgggcactcaattaatgcacggtgaattaacaaatgaattaatgaaagaaccatttgctacatataacattcttactttaagaaaaaagaatttgaaacagaagaaaacatacacgcaagaacacatacaaactataaactatatgatatcctaaaggagatgtaaatattaaactgtttgctttgctgactgacactattaatacctaaaagcagtatgagagatcacaaagaataagtactcattcatacttggagtgggctgctcatcttatggtctaacttgcattttatgtcatggccatgttgcttaatctccagctgttctacagaagagcaaaataagttataaataaattattaaagaaaaaaagtaactctatccatgctgaggcctgagggagttgggggaggagtcaattccttttagtttatatttaaaaagagaaactctttggaaaactgtaatatctgaagattttgtggtttccaaaagtgaaggtgaacggtgagaagttttcttagtttagctactgaaccctaaaaaaatataacctcaaaagttaatttcttaagcaatttgggcacctgaatttgataagaacttttttttccagacattctgttctgtctaacccaaaggaaaaatagccaattttgagaatctgtatacaaataaggaaaagtaaaatacagcgctttgcaaagaaatgggagggatttctgatactcaattcatgatgctaaacacttcaagtagatgattcaaaggcagaaatatataactgttctcattaggattgtttatggactataaataaggagcagacttatggccaatgcattagaaaaaaacaagtacaaaggcacttcagaaaataccttactccaacctcccattttagtgtcatttctaaaagggtttcatttcagccttcctacctttcttccttccttcccttccttccctccaacggggtctcactctgtcacccaggctgaagagcagtgggacaatcacggctcactgcagccccaacctcctgggctcaaacgatcctactgcctcagcctcccaagtagctgggactacaagtgcctgtcaccaggcttggataattttttttgtcttttgtaaagatggggtcttgctatgttgtccagactcgtaatgatctcctgggctcaagtgatcctcccacctcagcctcccagagtgctgggattacaggcatgagccaccacaccagacctcttttttctttattatatattcctctaataaagtgctctgtatgcagtgagcattcaatatttgctaaattaaattaatggaaagttttctaactaccatgtagagtatctaaatttacatcattggttctagaactgctgtctgaagcaacacaaattacacttatgacagttcgtcaaatctttgaagcccatcctcaaaataaggatgtcaaaaatacatcacacatgttgacactctaatctcccagccacagtaggcattagcaatctgaatgttatttttactaatccttcacagttttagaattcttctcaacccaacattcaaaaaccacttgccattccagcctaagttttcttgtccctaagtcatgcattccaagtcccctcaaccattgctcacatgcaatgctttcaaattccctatgcatcctggtcacagtgatttgaatgtacactaatttatcgatgatgtacctaaaacaacttatttcatttccttgaactgatgataatattctagatacagtctatttaaaaagtgaagaattattagcttctccatttcagtattatatttctagcagtgcagcccaaaatttcagtagctatgataacagcctcttgtcacaccactggcttatactgaacttgcagttaatttaaaacattcaagcttcctttctacaatctgctgataagtcatcccctaaaaccgtgcccgcaactctctattctctcctaaattgatttttttgtacttaatcatagtattttacatttaagtaaatgtaaatgatccagattctatcattcaacagaatgtctgcaatatctgctggctttatgtttcatatgataagcatatcgtctgtgccttcagacacattatcagccaacatgtcggtgctggatgtattttcccaatgttgcataagaggaataccttcgagagtttggcctaggaatgtggcctgggactccgccaagcatctctctccagcaaaatgactgcaaatttctcgaccttcagattctacatgatgtaaaagaagtttgtctgtgtttaaaaacacattcaagaaataagtgaacatgtgaaaagacagaaaaacttgttttaatttgggcatagtttcagttttcaaaggcacatgaaggcagaaagaaagaatcacaaaatggaactactgatgatagcaactccaaaaccaagactgattagactaaatcccatgtggcaaaaattttatttagtaagtttccttctccctctctccctttagatatatgtgcatacacacacacgcacctttattttagtaattttttttttctgaaaaagaaagttttctgcacctgattgcttccatgaataacacaaagcacaaacaatatgactttctttggttatcatgcaattttttctctgcttaccagaaattggcacaaatttaagatatactatattctactccctgaagcacagtcgctggcatctccactggcatttaaaaatttgaagacatttaaaagaaaatccacaagcttatagttgctgtctaaatcaactttaacatttcatatattcacaatttcataagtgaatcaaattacacataagaaattatagaactaagccaactaaatgacttttataataggtactggggaaaaatattattaaaccttttcctccaatttctgcctttcttccagcaagacaaaccattttcatgaagtttctgtctacatcactagtgataatctgaagcagccattaatcaatctattagtgcattcagcaacatttatcaaagtgcctccccagaactgttttggatgctgttgtgggcgcatgcaaaaatgaactaaatatagatttttgtcatccaagaattttaagtcaatttgtaattattggttcctggttccataactttttttttttttttttttggtgctggctcagatgtataccttcatctattctaaggttaaggcaatccttataattttcttcctttttcttgtttgtttgttttttgtgtgtgtgtttaaaatcttgcttatatttgactttattttattctcacatcttctgagtacattaaagttaaaggtagatcataaatcgaaaacattcttaaaggtctctctactcaaattatttggtgttattgtatctcagaaagtataatgaattgcctgtagcaaataaataaaatcagaacctttatactcaatggttcggtttggtacatatccatgaaaataataaatgttaaaaaggatgctagccgttgattcctggcatgctattctacatttggctacattacaacgttaaaaggatttagtgcatatatcaaattgtggatctgcttgttttaaaatttcatctgtaattccacatgcaacccccacccccatacacactcacaagatctgaatatggtaacaaggaaatcctagtaactgtagcgttggaaaaatggttcatatggaaataagccatttggctagtaaagctggtgattttgttctctaggtggcactattacttcaatttttggtgagttgcttaaattacttggaactgcccgtttattttctttgaattcccattttataaattttaattttatacaagctagttgtaattaaacgacaggttgccttctaggttttatttcagtaagtcaatttgaagttcagtgattttttatcatataattttatgtttccttactatactgtcttagttttaagaaatcctcccttgcctgacctcctctctccaaaaatgcagaggcatgtcaaaaacacagagggtcgtcataaagtttccgtcagaccaaaggaaccaagatgaaagcatgtttaagagctactaggttctgggagatttcaaaatcaggacattactaccatgacaaccaatgaaaagttctttcaagtgaacctttggggaaaactatataacgttccttactctctaggctctctggaaataaacttttactttattatggctgtcactaaagcttgtaaatttactttgcttccttccaatcgttctcctgtcccacactcagccccctaactcacttaatgcaacccatcctcaaacatcaatctataaatgagacatcagggcaatgagccacttcttagcatctagtatatttgataagatttgtctcatcaagaggataagtgccctagagcttctacttgaacttaaatacttaatttaaatgaaagcttccacacttatctgaccagatactcaaatttttctacagaaaagagaataccttcctgttccacttaaagaacacacacatttaccactccccctcctctcccctgcaaaaggttttcaatgtcagtacattagtgagctccattttgcatctgccatcaataatgattccatatagtcaataattgggttcatgacctttctaaatctttacagtgtaaatattctggaaatccagtgaggcacttaagtataaaattatttaggattaaataattctatgccttaagtagaagtttaagaggacgtttaggacacacatgactaagcctacaaataccaaagccactctatgtttcctaggtttaaataccacatgcaaataacatacggatttcatttgccagcatcatttattgcctaacattactccatactaaacagagtaaatggatgcagagtgtaaccagtaagtttgctcattcacttttgaagctcatctgtgcatgttattcatcctaataaagaaaatttatcacaacacaacttgatgcgattcttgttcaaatgatttcctcttccattgaacaacagccagcacttaaaacctagaattccacagaattctctcctcgattcctctttaaaatgcaattcacagtttgagatcacagagcctgccagtggctgaatggctgcactagatggctgagagtccttcaattaagcaacaattttgcaattagtggaaactgagtgctctataacaattgtttgaaaacaagttgagacaagttagcaattaccctataaaagggacatattcacttttgttggataggcgagacccctcacacaaattgaactcttccacacagggagatgcaagttgaaaattaatgttttaatcactaaaatcaaatccatattatgggcacctgaaatgggagtgcctttcttctcaaaagatattcagagtttagctatcatccactctctatgctgtctgtttttattcaggaagtctgaaattgttcttctgtactccgggattaatttcctacatctcaaaatgttaataaactacttgaacatgacctttccattctgtaaatttccttaagagtaagtctacgattgagacccaaagctgctggctgtgttatatttcacagttcacagttctctctctctctctctccccctctacacacacgcgcacgtgcacgcacacacacacacacacacacagagagagagagagagagagagagagagagagcaccccaggttttagaagatgaatgtaaaaagaatgtaaacaagttctctgctatactatcaggtgggcgtgcccagctcactgtgcgtgctgaactacaaaccagtgctattcatataagaaatgatatcaatcatctacattttgactattgaaaagctgggactcttaaagattccaggaaaaagggaatagcttacattttcatggcgccccttttaaacaggaaacccacggactttgagccaggattttagaaatttgcatttctttttttacaggattttccctcctggtgagtcaaaatgaacaagaaataccccaggacctcccttccctccttggccattaatgagatgaaggcaattaactcacatagtataaatgaatcatttgaggtgatgactgcattttaggcaaatgatgactttcttggttccattggtttgcaagtaaaagttacacacattgaaaagacactgaaacagatttcctaaatgcttcattttctggatgcaccaatgttgacctactatacatgttaaatggttttaaaatatcaccttaaaataaaggaaacttccagctactaactcagctctgaatgggctatgaaaggctccaaaggtatgtgaaaaattactgttattttgctttaaaaaatgtgatgtctaagagtgtctgcaatgttctaatgcttcaaaacatgtacgtaagccttgtttatctggaaatcatttctttctgcttatatcatttataaatagaaaatgttctgtaataacttaaaatagttccacatacataatgcttttagtgtcataatacttactactggtctatatttaccaacatttatcacattttacaaaatgaagtagaagaaaaaaaagacaacgactttatggccctggaattccagtaatggtgaccaacatgttttaaattccagtaaaggttatggttacatttcaacaagtgtctctttccttttttttacctctcctgctaacccagaggtaaatttcccaaaaaaaaaaaaaaaaaaaaaaaaaaaaaagtcttaagcaaggcatttgcaaaatcagaaaacaggaacaggagtttagtgattgtttttaaaaggtgctgttcccagggtcaaaactttgtggtgtaatttcaacatgctatgttacctattatgtgtaatgccttgaaacgctacatgccataacatcagaaatctccaacctaaaaattatgttgcatgagataagcattgaaggcacacacgttcatacaaattaaatctgtaattatgcctcaataagttaaaatgtaaagacatatcaaattgtaagaccaaaatggcttttgaccttacaacaaactcatataaaaatagatttttccataataataaaggggagagagagattttgcaggatattgagtcagtagggaggggtctcatttaatatcatgtcgccttttatatgcagttagaaaatcaacgttcccaattacatattactttgctttaaaagattactaggaggattaataaacactcagaaatatgcctttctttgcttctggccaagaacattcctgcgtgcttgtcggaaaatgttctttggttgctactgacattaaggagtaagtgcaggataactagaggaccctaaaataagatccaagaagccctaacacaccgccaatcgaggcttatcaaagctcccccagcgcgaggaaaacttgcatagaagccaaacaagaacgaggagtcaaaatccaccgacgacgagtcgcacgccccaccgagctggagtcagcagcaccattcaacaagtccctcctaccagctctctaagggatcccgcaaaaccttcctttaccacttccccacccccagcctcccgcccccagtagctgctcttggcagcatggccggcagagggcaccctctaccttccctagcttcgttctctgggtcccctcctcctcctcgcctcccctccaccccggtccctcatccccgctctacccccaacacacaaacactgcatcctccagttcaccctcgcagccccgaggcttcttccttagggatgcccctagtctgtaatctccccttcttcttgcccgtcaggcacagagcccccaatcctcagctatttctttccaggagtaactcactcacccattcctcttcccggctctgcatccccagagactaacccgagtcaagaatcccccacgtacatcccaaccactccccgaaagtcaaaactcttaacttccctggagggcgcttcagaagaggggcgcaggatgggtagagatgtgggttcggcctgcccgagagtgtcgcagaccctttcagttcccagcggtaggaattccgcctcccaagttttccaagctacattggcttcggacttgtaagtccacttcagtctcaattcctggggagcaggtagccgtgtgcagctccggggaagggatgcgggctgaaggcgcaagcttccctcccactccccccgcaagtcggcgcggggaccacccaccccctggaaggattcctagcctagccccagcaccctcccctcagtcaggaccctcgacagctctggccccctaagtctctctcgactactcctgggctgggggagggctgcgagggatccccgggtcgccgtctttgctcccatcacgcagctctgggtctcctccaggccttccctcctctacttcgtgacttccccgggtccctttttccctggtggtgccggctgaccttctgggttgtgggatgggggagaaaactccccaagagtaactccaaatcgtcccttctaccggaggggaggaaagaaggagactggcctcgtcccacaactttggggtgggggatcccccagtcaactctctcccgcggacgggcagctcctgcaccaagccccattcccagcgcttgcctacctcggggtccacacaaacctcacgggtccccggcggcggagtcacatcgtggttccgattctggctccagcgcccagccccggtccccgtcgcggtgctgctccccgccggccccacagcagcggtgggtgtctcattaaagccccccgagcaggaggtggaggggcgcaccgggctggctcctctgtccggcccgggagcccgaggcgctacggggtgcgcgggacagcgagcgggcgggtgcgcccgggcgcggcggcggcagcgtcggggacccggagctccaggctgcgccttgcgcccgggtcagacattatttagctcttcggttgagcttcgattggtcaaacggcgccgcccccccccccccgccccccgccccccgctccccgctcgcccgcgctaccgatacccgttcgaggcggccgcttaaagggaacgccgcgtcttttcctcgcgcggggaaccgaggggcgcccggaactccccgctcccccggggcctgtcctcacctcctcccctagggccccgcgacatcgccctgcgagtcctgcgccctcctggggcgccttggacaggacgcccgcggcttcgaggggtgttccagccccagcctcagccccggggaaccccgcgtcccgcgccctctgcagaaaccccggctgtgggcgctggggcgggagggagcgagtgagaatcgcacgccccgaggtctcgctcccctagctttcaactctccccttcctccccatcccagcacccaagttctctgggagagggcgtgcgtttcccgggccacagacacaccttcccgcaccttcctgcactacggagcttgcgaacgcgagcacacaatgaaatcgcacagagcatgggggctattggtttactctgctgccttaaacacgccggcttaaacagagttcgcgcactgacctctctagagtttgcctaataggaattcaatcaagataataacagcattttttattgatgaacgcccccagataacgttacaccaagttacttgttccagccaggaagcccaggcaatgacagacctcgctaaagccacacgctttctagccgaccaaacagaaaaacggaaagagaaagaaagaaaacaaacccaccttttcagtcactacttgtcaaagtaaccatcaaggcagctgctccgggaaagacttcggccccaaaactcccacactctattattttttcacgttcccttcgcttaattaaaggggggagggggcgcgagtctttggtgcccggtatgtactccttctgttctgcagcaaagaagttaaattattgatagtggaaattgcatggcggaggtaatactcgcaccccatcagcgagaagctccatttgatctcggcagaggcagggagatttcatgctagttcgccggggggagcggcagcgagagcagccctctccgcggtgaatgggaaagtgggtgggagtccacgagagggctccacggtgccttgacgtgcgctgtcatatgatacctccgctgcctcgaaatagacactctagtgcacgaattaccagaatcaaaattcagcgcatttaaaatgatacatcttttattagaagagttccgttccagggcattgcatgcttttgcagatgttttcacttccagccccagcaaacacacgtataagctaacccttttaataacgaaccagggcagccaagataaataaaaagtcttctgctttaaccagagtgggggtaggtgattcgagggtgggggcagaactggctcagttaatcctcccccgccctccacccccaccactgcccgcagcaaaagagcaaatagcctttcgggttctcatttgcctgtagccaagacccttgaagagaacttatatggctagggtccagaggacattttcaattatccatttgatgaactctgtcaaccgtctacctgtgtttctgctttaaagctgaattttcttctcattagttcaaccaatttgtgcagaccttaaaatttagaataaagaataagacagcagtaccgtacttaacttggagtccctggacctcctcggagcataaaaatcacctgggtgagtgttaaaatgaaggtccctcctcctgaaattgtgatttagtaggggtggggcagggcccaggagttataattttaataaataccacaagcaattcgaatgcagacaatctgaagtcacactttgagaaacactctcttgggggtacaacactgggtatcagaggaatctcccaccaagcccacacccaaattctgcaggcagctttctgtgtgtgtgcgtttttctgtaatctcaaaggggtttgacctaataattgcgaagactattgctgtaagaatttccctaaagactccaacattaattttgctaaagggaaagatttataaacagtttcctttcctggaccctcttgtggttaccaagaatgtgctgttgaactgaatatataatattattacatactcagttcaatttacctaagggtttacagttagcaaaatgaattcactaacattagctattttagaacttctaaagactagtgacagaaattatttacccgttttataaaagaagaatccgatcctctgccaggaaataatttacccacgttcacacagtgaagtaccagggacaagacttcagtgaactcaagaattcctgctagaaataaccctgcttccatctcccccaccccctaagtgaagctatctgttccttggaagtgttatcagaatgtgtgatcattcagagcgcctttgcaaattgttggactaaatagtcaaattattcaaatatatgcatattcttcgagtgtcacacatttagctttgcacctctgtcaacttgacagagcacatgaccaatacaaactaccctacagcacagatggcagagtttattgtggaatatttaatgtatgtgaaatacgcaggctaaccagaaagcaataaaggacagagggcatgaagctggataccgctaccccacagaccctctgcgttggttcccaggttgtaagatgaatgcaggcacaatttcttttagtagcacaatacaatttaaaaggctagtgttatacatttaaaaaaaatacttgtactacattataaaggactggaggaaccctactccaaactttaactttgttaacttcaaactgatgcttcacatttgcttgaaaatgagttctaccctcaggtttttaagctcaattgtaatttatttccttcctgaaaaaatacctggcaagttaatgccaggaatctaagctagcattctgaaggctgctcacttagaagttatggcaaatcttttttctgctaaattcacattggcacgtcagcatttctgctgaaggaaaaagtgttctcatttcccagactctgattgggtgggtctatggccaatcttcttattcctactctcccttgacattatataaataaatgtgtgtatcttcgctttccagtgtgtggtgcagttttactgaggaaaagacagaggagtcagaaatgtcagggatatttagaaagaaaagaagatcagatgccaattcagataaccatgatgaatcacacctcttaacacttgtaagcatttccaaactttctgatttgtgattatagcattgccaatactgtatgcgaccagcttaaaacatgtacttatttgccttaaaagtacatcttacattcaaaaacaatgaagccaagataaacaaaattgtaccagtgccttgcatggaattctaaatattattttttatttgcttaattcaggtagcatatagagataattttggaggtctaaaatcaaacattttacaaaattatttccctattgtgggcaaggatgatgctgagaatatagagcatgcatttctcttcttcttaaaaattggcctctggcataattgatatgttaggagcaaagtttccaagtttataatctgaacattttctctattactaaaatgagggaaagtttcacagcttgaaaaaataatgctacctatttcacttttgtggggcttaaaaattaattgtgaattcgtctgaatctttatttctttttggttatgttctaatatgatcctaacccaatgttccagggggaacaaaggtcaggaagaaatttgaattcccatctattcttgtcgggaaatataaactaatcctcattactcaagtgagaacagaggtagtaggcttgacattgacatgttttttctattaataattttaattggctgaggtcaattctatcactataagcattttatatttatgtttatttaagcttcctagttactcctaccttcagtattccttgcaagaaaaaaaaaataagttgtctagtctagcatcaaataagttggcctaaaaaaactgttgaaactttccgtaattagcatagggaaaatacttagtaaacagaaaactctgctgttgagcagagtggcacaggtgttttcaaactcatcctggataatttgaaaggcctggtccaatgttaaactatgtcactcgcaatccttgaaattcttgtatgaggcctgtcctgagaaaaaccttaagggagaagtaatttccctattcatgagatgttacgttctcactaagctttttatgaaccataagaatagctcaataccataccaaaatgtgttcaaattggtcaacacctgttacaggagttatgtaaccaggcatagccattagtggcagacaaaagaaaggaaccacagcaagaaacttttagaagggccaagactaggagagtagaacaagagggtcaaaagctgatcccatctgggaataatatttagttggatcaagaaaaacggcatagaaaccattaagaaactgttgagactaaacccccaaacatatgagaaatatcaacttgtagccctccaagttaccagatttgtgctgagaacatttaaaaattaataatgaagaataaatttggtttacttgttgtaatagttctataagcgtggtcaaaagggatgtgagattgtgggcataagttagagctgacagtaataaatagctgtggtattagttggttttgctaggagaaaagccatgagaagaattaacaaatttaaaccaaagggtttcaggacattgaatcagatgaaagatgaacattagcttatttttgagactcacctatttaggctgtgtgatgtttggagtgagagattttctacagccaaattttaaattcttcatgaaaaaaatgaaaaagaagaatatgcaaaaataatttagaaaaaaataagtgaacttcctaaagtcttattttaaaaacacacactaagaatttggcctactttcatgtgattctgatacatgaatctacaaagcactctttagtggtctttttgaccaaggacttgagcaggatgtgcaactggccctctttctacctccagatagcacaggcatggtgagaatgaaatccttaatagtgcatggttgtgaagaatgggttaggctttagattagtctggcatacagaatcatttggaaacatccgaaactcctgactttctcaactttagttgcctttcacttcatagttacagtcattcagttgatgaaagattgctgagtatctactatctgtcaggaggctattctatgggctgatacaggcagatgcataaaatacattttagccctttacatgctcatattctaggacataagagttgtattttaatccatggtgacacttgcaaatttgttaagtctaggaagttttgttttgttttattttcccttgccgtaggtttggtgtgtagaaagatgatggtaaacatgcccctagtggccagggggtggtagtgatggacaagaaacttgctcccaaagctggagtggcacttagaggcgggggagggcccaccacggttaatcagtccccagttatttcggttagcagtgttttacaaaaggtagacaaaagagaaggagtggatagggtgagagggaggaaatcagataatttttgtttgaggcaaataatttttctaaatatgatagatagacctataaaagataggtccagaagggatcttaagagattatctcatctttctcactatttataggcctgtcattgcagaccagggaagtagactacacatccttcttttggggagctatctagaatccagcaatgctggtgcttggaagtcctcacttgtaatgcatttttgttcctgttgcaatttatatcttatttcatttcattcaaccttagtgaagatggagaacagctgcttactaacctccttatgttattaagtcaccactcagacttttctcgtagcaaaagatcagatctcacaacctttcttcataaactccaactttcaacccattaatcatttcccttggtctaccctggacctcctccaagatttctatatttttctgaaaatgtggagccccaaaccagacatgtgtgtgaaattatccagggctcaggaaacacaggagtcatgaattatctggacacagctgttgggaaaaactaaagggaagattcaatcagattgacaaatcttccctttgcaacttggagacaaagtagtggttgtttaataaaaagatgagccttcataacaaagctacgtcttctgtccttagcttttaaatgaagcattattttcaaaagaaacaactcttgaatagaacatttagctttcactgttttccccctcaacaaaattgtttaagaaacagtggcttttctgtactccatttaaaatcccaagttgtagacctttcacatttaaattggatttgtgctttcatattctcaggtgcttattatatactgatataatttctctcaaaggtaaggtctatgaaatactacactacttttgaagctttacctttcacctaaattgaaccatttcttttcatttggtctgcacacaaaatccagttagaataaagtgaataaaactaagttgaattcagtaaaagagaattatgctaacctacatgatacctagaatcaagtcttcataaattcatcaagtatgtctccattatggcctaacaacccaatgagaccaaatcatgggatcagcagaaatattgttcccattactcaggagatattctatggtgtctgtaaaatcagtccaattggcctaagaagacattaaaccagatatagaataaagttagcactctaaaaagaaatggggtagcagaggagaatgtttacttcctcttcataatatcgccttgagaaattgtccagggactttgtaaccaaaaagagactgctgcaagtgtttgctgtaagtaggtacttctgaaaccttagtcagccagtgagaggcaccaagaagttataagtctagttggatataggaaaggctgatgctgatacagaagaataggacaaatataatgtttcataaaagttgaagacagagagatggggtggaatggggaatgaattggtgagagtacagccattaatttaaattccagcccctataattgttttttgtttggttggttgtcactgccatgtatgtactctgggaaattacttctttttttgctgcttggacagtagtcatgacctgggaatggggggtggtgtgtgtgggaggtgaggtactatacggctagatatccaattttggaagtcagatgtcgacgccatgattcagactaaatatatttctgagacacaaactaagaccatagtcagttttcctcaagatagtttccatgctgaattagaaaaatgaagaccaacacttcctttattaccagatttcatgtgtcccccaaatgcagtaaaatgtttaatattgaggatcttttatttcataggcatgttttcctgaaggccttgagaagaatgagccaaacatatgaccatccactggcctttttaatttaaataagttccaagtgtaaacaacttaagttagctttgcattgtttgtccctttatgttcatactaaatactgatttgaactactattcccacataatattcttatagcattataaccagattgtggatgtagatcatgttagaactactttgcaagccaaatttccattaccttccatcttgtccgcacacaaaaactaattagagcaaagtgagtaaaaataagttgaattccataaagaagaatcatgctaatctacatgatgccaatttatctcaaaagtatgtacaagtttgacatattcttgactatttcctagattaatttttttctaatttttttttattattgtacttttggaaattcatattgttatttatatgattttgctctctgtttctagaaagaatttataaaacatcagatttactcttaattaactgatgtttataagagcacaattttagaagagtagtaataaaagttaatcacaaaagcagaattatatgtatggatattatatgaggaacaaagaaattgctccaaagagtatttagttggaatataaggtggttttaaaaataaaaattttaaatgagcaaacattttctaacgttttaagagtagggatattaatagatataattaattttagaattcctctttttttttttttttttttttgatacagagtctcactctgtcacccagactggagtgcaatggcgcaatcttggctcactgcaacctctgcctcctgggttcaagcaattctcctgcctcagcctcccaagtagctgggattacaggcatgcgccaccacacttggctcattttttaagttttagtagagacggagtttcaccatgttggccaggctggtctcgaactcctgacctcaggtgatccacccgcctcagcctcccaaagagctgggattacaggcatgagccaccgcgcctggctagaattcctcttttatttcttgatcactttagggaaaatatattagtagctgttgttttcttggggtggaggatcaggagtgaaaagaattttgtcgctgaaaatcaaataaagctgttgtccaatctcagataaaagaaccaaatgaagtaactctgaaataagtaataatataggaatcaatgaaaacttgaagtttcaagttttagctagtgtctcaatagtcataaagtaactataggatatttaagaagtataaagtataattagttttgtcctaccattttgaaattaataatatctgattagaatgctattaaagtgttgttatgcttatgttttagtaataatctgtttttaattttattttgaacattaaagtaactaaaatcttgcacaaactgtccattgtttccttttgatgtgactattaggaaacagaagaaatatctttgtcatatgatattattttaaggcccagatagtagtcaaaagaactttggtcctaatttaaaactgtcagtttctggccatgtaacctgggcaagcaacttcactagcccaagattgttcagatagatatcgtaagggccatataattgtttattgaataaattgagagatctaccactgtgcacctcagttgcccaatcaatcaaatgaggtcagtgggctacaaactgagtttgctaaagctggcaacacattcagaccttatctcagaaagaagagatgatttaggtgatttcaatgcatgaagggaatcagtgaactagatcatttgtaaggtactttttctatctaaatttgaacgacaagtttagtttaccaaatgatatacagttcctgagccaaggtaaggacttacagtctaccagccatcatattacttagttatctctgacaaagctttaggtggactttttcatacatcaaaatgtccttcaagattatccttttttgctaggctgctttcagagctctgggacgtatcaaatccattatgtgttcatggggtccttccctgaataaatcagagtggaggtgggatgaagtctcttcatagacttccgcatctttgattacttatatgcctttggcagctctgcaaagaccactgacttgtgtgctaagacataccagtatgcatccaatccctcatttaaaaccacatctttctaggaggtgctctctaggaggaagatggatgaaataaatgtatcaggaagatgcccaagtagatatgctactcccttacccagaatatatcccagcttagtttctagagctagtatccagagttctgagttggtgcaaagacacaaaggacccagacaccaattcctggcatgctcccaaatgagatgctattttcaggaaagttccaagtttggagtggatcctttggaggaagagcattgaattgcacaaggaaagccaataaacattctagtccccaacagggactataagccttgtaattacgttttagactgtgcttgtccatcctcttcttctccatatctgtaaacaacatgttagctttggaggtttgtcatccactgtgtgtctttggagagggtgttcctcatcacagcatctgcagtattatagccagtaacagttcgcaaaggcaaacttatgaaatagcttctaaacatactaaatcctaatccaaacaatttataacatttcttactcaataactctcagaagtcaactaacttggaactgccctaaacaagttaagaaaggagtcagacatcatccattgggttaataaactaaagtggaaggaagaacatgcaggtgaaaagtttcagattctaatctcttcagtgactatatacttatgtctggatcattctgtatcttgatagtgttttaagtgtgatgataattataataataaaagctaagattgaatagtgatttgcagattagtgattaaaaaaagggctttgacattagacagacctaggtttgaacccagctttgccacttattggctctgctaatttaagatagttaattaattactgatgcctcagtttccttatctttaaaagaaaaataatcgtcttagcctagaaagattgttgtgaggattcaatgaactaaggaaatgcagaatgctcaccatagtgagctcaacaaagttagattttattattaatgtatatgatcctaacaaaacattgtaatactgtttccattttatgattatgaaaactgggcttcaaaaagggtaggtgacaattagctatttgaaaatctctcatcggttagcaaagatcaaaatgattctaaagtagcactcctggaaatgaattgtgagactcatggccatctcaaagagttgtggtcaagatcttgtaagaaaatgtgtatgtaaaccatctgataatgggagacccagattaaatctgggtggtagctataagatggggaggcacaacttcataatggactttggaaccagaaaactttgggtttgaagtttagcttctccacttcagattttctgtgttagtttgggcaagttacttaaattctctgagctctagttttcttaatctatctctgagagttactttaagagttaagtaatatatgccaaatacaaaacaaataacagcactggatgaatgcagagtaaatgtcatcccacatcattataatttcccatggtgtagtaatgacaaacaggaagagtttcagtaatctcttgggttagtgaggtcagaacaggtatcttaagcaatgctgagttaatgaccagaatctgaactttttatctttttcaatggagtgatggattgctagggtaatggggttgtgctggtgatgctaaagataaacgttagagtaatagcaagctcagtcaatagaaacatgcttaccataccctggccttctcagtatttggtcctttccccacttgacagcttgtctaatggcaaatgtgaattttaaaagttttctcccaatgctgatttccttttgccaggaaggaaacaacaatggctaatgttgacatttactaaattaatatttctgaatctatgctgtgttaataagtgcttctcaagtgttctgttgttaaatatgtgtgggaaatgttacacagtagtacttgcatgctttctcaccagtatacatcacagacaccttcatatcacgtcagttttatagatatttcaaaatacattgatacttatcattatttcaaaattataatatttaccttgctgttagatcttatttaatgtattaaaaagcatatatattactatatcacacaatatattattttaaatgtttttataactgtacatcaatgccactggcttcctttgtaatcttatacatttatttcattcacttagaatttttttttttttttgagacaaagtctcactgtgtcatccaggctggagtgcagtggctaatctcggctcactgcaacctccacctcccagattcaagtgattctcgtgcctcagccttccaagtagctgggattaaaggtacatgccaccacgcccagctaattttttttttttggtaaagacagggttttgccatgttggccaggctggtctggaactcctgacctcaagtgatccacccgccttggcctcccaaagtgctgagattacaggtgtgagccgtcgcgcctggccccatttagacatttttatgagaagggtttacataagctttaccagactgccaagagagttgagtccatggcatgaaagtcattacagtgagcaattctttctttctttctttcttttttttttttttttttttgccaggctggagtgcaatggcatgatctcggcttactacagcctctgtctccatggttcaagttagtctcctacctcagcctcccaagtagctgagattacaggcatgaaccactaattttttgtatttttagtagagacagggttttgccatgttggccaggctggtctggaactcctgacctcaagtgatccactcacctcggcctcccaaagtgttgggattacaggcgttagccaccacactgggcatcagagcaattcttaaacattgattatggaagttattggcaagtaagaagtccttagcggaggaggaaggtgaaagcagaagaaatcattgtttcctactaaagtagccagaacaacaatgagcatggaaggtagagaacagtcaattcaagagcccctgtataattagaactccactgtgacttccctttttatttctcaattttttcccacattctctttcttttctctattcactcacactgcaatgccctatcccaaaggctttggatgtttgtgacacctttctgcaatcacctaatttgtgtattttttccccacagtaaccttgttacttagagacaggaggtggttgatatatttccttgaagcgggaggaatcaattctaactccttttggtactgatgagcatggtgctacaaggaaatttctagatagcataacattataacattcactctgggaacaaagatctcagagcattttctgccgctatttaggaaaattgttggatcacctttcccaggttgcgaagattttggagtggatttaacattcactcaaaggttaaaaactttgacaaagtacattttacttcctgtagtggtctgggaaatgcccagagtggatcaaaatgtcctatacaagctacagctttctcccagcttcaggctgaattcttaaatccagaggttgcatgttactaaactgctggtttttagacactagactttaaagattttttatttttaaattaatactttgtaatacattttgccatttgtctaaaatagaattcaagaatgatgtctgttatgcctagtgcatcagaagttattttaaatatgacatctttataaaagtcaatagctgcctcatcaaagggcaatcatgtctagtgtgggtggctgtgccaattgtttttgaactactgcagcaatctagccaatcccagggaatggcttgcagtctttctacacccacattttttttcttaattatctccaccaggctgagttagttaaggacagatctatagcatttcctggatgtcaaaatgcccacacaccttctgcaatccttgggctacctgcttcctttcatgtttcttttggcttgtccatctaattatctattatcatgtgtatataatgcattattcatgagacccaggcaatttcaggatgtaatatttttgattttaaaaggaaatgacctgaaaaattataacttctgcttgcacaaagaaaataagcagtaaatttgatagcaggtcttccatcgcaccacctgcttttaaaaataatccgcagaaatttgagatcattctctaaattaaaactttcctagccatcattccataaatgaacaggttcaacacctagattccttctattctgggttcaaatatgttactttgatttttttcatgatatacttcttaacaagttaaaaatttgcggtacccacccagaattgtaaatcaccaaaggttagggtaacttaggccttaatttcccctacactgcaagaaatagttatagactatatcttttatatcactcaaacttggaacggaagtggaatttagagtttattctgagaacatctcttttgttttatgtgtgaggaagcagagatcaagagtgactgattgacttttttgggtactgacaagcggttggaagtaaagcctaaactcaggcttttaatcttattcactgtgttctcttgaaaaaaggaatcttatgagtccagaggtctgtccccttctaaggattggagcaaataaagagaccagtctttgtctctaggccacaagatccaccaagatagggaccatttggtcttgcttgttcttgaatctccagattgtaatacagttcctggcacataatggcaaattatgtgttgccaattaatacttacaaaataaaattatgaatgctagagtctctatagaaagtataccttttgggcaaaatgggaaatgatcagccaagctcatgatccacataagtatcagaacatctaccaagataaacaagtacccagtgtccaagactgggatgaaattccagaggattgaaacaaaacaagccagcatgaattcatgtatcagatatgagctgggctaagtgacctctgagaaccttcccagaacccagattctatgattcacaagtaaaggtaatgtacatcttggctttggttcttcttattctttgtatttgttttttggggaattagcaactatgacttagatggtatgtcaactagaggaagagtcctgctttctttgagtgtctaactgtgggagagggaaatactgtcttaggaagactagttaaaactttccattaggcctgaaattttgaaaactatttgtaaaaaatgtttttaatttaattaaataaatcaaaataggagaaaataatgcctacagctccctctgatgccctagtggagtttaaggcagcatggtctagagaggaacaaacacaaatttccttaaaatttgaagaaagactctgagttagtctttacatcttactggcagtgtagtgttagataattctgcaccttactttcctcatctgtaaaaggtgattggtgattcctaccttacatgactgataaggaaatcaaatgaaacctatagagagctgtcaaagtactatatgaatctaaagtgttattactaggaaatacaaataaagtctgcactatagcagaaaaatctcttataggattgttttataatgttggaaagaaagcagaaaaaaaatccacctgaatttttaaaaagtcagaatgaatactccaaaaattgccaaatgagattagaggcagggttaaagaattcatccttccctctctgcaccatagtgttttaagggtattaatctttatgaaacacgtgtatctttctcaaaagacacttgttaaagcagcagctctacattccaaagtaaaagaggaaagatgtcatatttttgaaattataatcacctttaagccaaaaaggggaaaaatttttttgttgaaaaatttaatctttctttaagacctctatttccatagcactcaatgatggtaagctttcactagatgctaatgtttatttttattgctaagtagtacgcaatgttcttgacatagattatggcatgtaaatttaagagactcactgcttgttaaattcccactagaaaacacacacagagacacacacgcccatacacacacacacacagacacacacacacacacacacacacacacagcagtagcagatcagcagagaaagacaccagccaaagaaagataatttgagatacttctgaggtagcagttgtaaaattaaaataagcaactcattaaattatccatagagtgaaaagaaagctgcaaaaatagatatttttctggcaagtcagtgcttttcagaataaatttagttttcagcagagcttttaaatctgatgatatcagttcatattcattagagttatttaagtggttagactagtttgtctaattaaaaccaaagagtagctttactggcctttgagagaagtatatttaataaaaaatatgctcagttagacatcattttaactgacagattgtaagcaatatgatcgagtgaatgttacttgagcaagtttgagcctggtcccaaaattacagaattacaaaataaaaaccctttgtaagtcatgctttaatgctggttttccctcatttctgtttcttggctgattatctattttgtggtcatccagtcccttgccttctctctcgctcactgcctgattttggaatgttgtttcttactaaagcttcccctagaggacaggccaggaaaaggaaagaaactaaattcaccagcttctcttcttattaagaatttagatcagaaatctgatagggaaagagtctggcaaatgaaaggggaagcttatttatgttgattttagatctttaaaagccttctttccaatgtacattaatagacaattgaaaaataatattttataagccaactaatcacttgcttttaaaatccccacttactaccttgagcatatacattagattatgttttaaaataactagtactctggttcagtgaaatgaaaatgatatgtgcaaagagaatgtcataatgatacctcccatttatggagtgcctgcttcccagtttgcaaagcccttatatatattctcttctatcctccaaaaattgctgtgttgtaggtcttactatcaatgacactgaaaaagctactggcaggatgctcatattctcatctgaatcaatactggtatactccattgggggagctagaccaagctaaaatctcacatacagaaatattaatatgcaagaccaaggggtataaaagtaggctaggttactgttaatttaatagcatctaggttaaaattctctctctttcctctttcttcccttcttctctccatcaccttctagtcttctgactgattccaaacaggacaattgaaatgtcttgccttcatgctgaagagctctttgtaaatacacataaacagtgaatatcaggtgcaccatttttaaagtgctattcatttccacaacagtttaggtgaaaccatgtcatcttacaagttgagtgtgtgtgtgtgtgtgtgtgtgtgtgtgtgtagaggatgacgtgacacttttgaggtttatttaagttgttaaagacctcaaggttacaagacttagactgttaagcatttttcctcccagagacacgaaatctacaattttctcgattcaactgtcaactaaattggcaagtcaactaaaaggataatattcccttaacgatgcattcatttgaagccctagcaactgtattaggcagcagcgagtattcgctagcaagggatggcgcggggagagggaactctgcaatttagagtgacagatgatttctttcccatccatcaagctgcctcaaaatgtcacaatatttacacctctttcttggtgaattagaatccagagacaagcagacagaaagaaaaaaataataattccggccggttgccgcctgattggaaaaagcaagcgttgcacctttaaattctgctcctccattccccgttccgcacaccacccccccccgcccctcccgggattttgcaataaatctcccagttctgcgttcagccctgcagatccgtatttaaaacagcaccatctgggaagggtgggtggcgatggtgatgcgggcgccttggagttcctttgcagcacgcttggaattgcatcagactgatcagaaatccccccgcccccaagctcagcccctcccgccacgctcccctgcccgcccctcccctcccctcccttcgcgtagatctgactgagaaaacgactggatctcggaacaatctgtgccccattcgctgcaggcttgctccgtaaaccctgccctacgctccctttgtgtgccgagcagcctatcaccgtcatctgatcctagcgcctgttttttatcttttccttctgaatttccacaatatcctcgcttcgcctatgaatccacctgcgcagagttgggattctttctttcgttcgttaaaacagtggtcttgagtttcggaaacagatttttcctacgttcccctcacccctaccccaagctcttgccttttaattaagaagagctgatcgggggaggagtccagaacgaccaaaccctggggcgaaaactgccaccgggcttggctctgtggccggaacaaaaggcctgagaagggggtgggggtgagggttataggagtgtggagagcctggtggcccccgcccaggggcgcctaagtccctgagctccctgaagagtggcaagaggataacgcagccgcgcgttccggcagttcgctgtcccccgggggtgcaggcgggggcgggagaggtagaacacaggtctgggcggctccgcgccgcttctatctcacccgccaagcccctcacctccacccaccgccagtcccctgcccacccgggtggcggcggcggctcagcgactagccggccgccctccaccggcgcctccggacgcaacctcgccctggcagggcggtctgcgcgtccagctgattggtggctctgtccagccgccgcacggagctaaaagtgttcttctccaccgcctccagccgcccaggccccctcgcccggcccgctctctggctcttcggtccggaaaggaccttctactcccaggcggaggctcccctttccctgagttaccccgactgactcggacctgggctcagtgaggcatccggcccggctggggagcggagcgcggtctcggcagctccccttcccttgagaaagcgggaaccctctaagccagcgcccgaaactcgcggggagggaggacagaagggaaaaaaaaaagaaaacccagaaagaagcatccagcgaggagcgagggcgacggagaggaagagatagaatgagggagggatggaggctggaggagggggcggggtggaagaaggggggcgggaaggagggagggagggggaaagagagggagggagggatacagagagaatgaatccttctcactagaagagctgaaattaccttgattcatttttttgtgttggaggtttagctttacctccttccctcttcccaacctccacctcctctccccaccgcacaccacctccaccgcctgattctaaatgctacaaagtcaaattttaggaattcgaatgttttgcaaaagcttcataattagtaatgaatctactgtacacacacacacacacaccagcaaagagaacggaaaagagggaggtgaagaggagaaaaagagagataaatcttacatttgaatcagacatttgcaggtccaagttaactaaactcattatatccgcaggaagactgagtttcttttttttctttctccctttgccccagggttctcacctagggcaattcaaactgggcaaataccaagaaacaaccccctctcatgctctccctctacctcctcccctccaccacgcgtcctctccggaagacagtatcaaaatagctcaagaattggggatgcaaggggtccccgccctggtgcttaccttctttgcggcttacaccaccccggtggctagatcctggagataaacacttgcatttcccaaagttaacccagtataccaacccggagcttgccaagagtctattccagcctacaccgctaggaagccaacttcagcgagctcaatgaggggaccaaactggggctcgctttccaaacgctccgctccaaaatctgactctctctccagccccgatctcagtgtgagccgaacctcagaaaagacgctttttaagggcgacacagggttggctttacagcggggccaagaagactacctgggggtaccgccacctcggacaaatccgttggctctgtccaaggtgctgaatggactcctatcgcccggattacacacccggcacagcaggaggaaaaggcttaaaaatctctaattaagtgatacttgatattgctctagacggtttcttccacttccttacggtttgtcacgtgcggatggctttgccaaagccatcctgttaatagttgatcacatgttgatgagaaccttttcttctacgagaggattacccattaccggtgatatgcacttctgacttatttctctccccccaaccccaccccccatctacacctaaactcccagtctttaccccacccttacccccactccaccccctaaccccaacctctaacagcattattgtttttagatggaaattaacccccttgcaaatgtcaattacatgcccacatataaatcatagaatatgatcatacaccatacacattaaggaaaagaatagaatgcaagactgctgagagacaagcatcagccttgaacaaccaatataacacacacccccccacccagctccaagtttgttccacgcagttccacatagctgtgtcaaatctcaaatgattccaattaaagttgcactgtgtaaaaacccgattcccctggcctgagtagctgctgttctttggcgtgtgaagtgctaggaagagccgtgatatgcccgttgttaagcaacatgtcaagatttttcaattataatgcaggttttattgctactcaccattgtgcctttgctgtcctggagactcaagtgtcttaaaatctcgtctccccaacagatgctggaaggtaatgtgtcttgtttgaagtcatcatgtgagaagttcggctttgctcagtggatcgcccaccacttggtgtgacttatgaatctaataaccctttgcaatatccgcaagcttaaactctcaaccaccttggcgactacagaagacaaagcaactggcatcgatgtcgaaaaacctatagatttacgcaaacgccctcactccgagagacacgtttccttttgagttcttacgtgattctaatgaatgagcgaggttaccaatgattgcccaactgccctgctatgtagcaggtgtttcctagggctgccttctaaccgcccgttactgggtcctggcactgaaagttcccagagaaagtgaggagtttcagggtacccctgtaaaaaaaaaaactcagcctgcacaccgctcccttgcccactacgcaggtcacacctggggctccggcgaagctgaattcggctcgggagatttccctgtcgccaggtaagaaaaccttcgccttgtcaggctagggcgggaagaccgctggggaacttgttgcttatcagcgccggcagactaccgctttaataataataccagaaaagcgcagcagggagggggtggggggcggcaacggcgacgactaacctcgctgtttacgtgaccgactcactgtgactctctgggtaaaaaaaggaaacttcttagaaaagttcgtgcccctccccctcccccatcatgactaagggtctccagccgatgaggtcgtgagtgatgatcaaatggggactggggggaggggggcgagtaagtgacttgtccttgggaacatctgcatgcgtcgaagcgcgaaccagcccaacaactttcccttttcctcttaggtactgatgactaggcgagaggcaccaaggcgagccactagttgcccacaggaacctgtgtaagccgagctctcgagcggctgagttgaatgaagttatgactgcgtttgctctaatgggttatggcttcccaaatgtgagttaacagccccggtgcgcagctaggtcggaaggcgagccgcggagagcggagccgcgggccaaggcagggacgggaggggaggcggcaggttgggcgctccgctgctgctcggtgctgcttccccggagccgcttcctcatcctgcgggggctgccccgccgccggggtgccggggtgagcgcggcgggagccagggctggggtggcgaacctcggagggggctctcccaggaagccctgcggttagcgcccgcgcttccccaccagtggctgcgcaagctgggaagcgaagaggtcacgtgttggcggaaagtaacttggaggcgaaaggatgaactttgagaagaggaaaaaaagcacaatgaaacaaactacccccttggagtgtctaatagagggggaggcgggagggggggcggaggggcgccgctctccgcgggagatgtggggacgactccggaaatctcgggaaataggcaataactcgagctttggcaacgtcccccagcctagggaggcgctaacgcaaggtatctttccactgaagctgccctttgcctaccctcagccatcgctagcacagcagagcagaagaaccagggatgaatgtagaccagttgttatggagatgtccgtcgctctgaggagcgctagtgccctgggaagtccccagacgcatttcaggtttcgtcgttttggcactgacaccatgattttactcgctctgagttcccaccaaggggagcccaccaacggcgtcacaggccctggccgtggcgctattgactgcagggatgaggcacagcgatgctgcagaagatggtggatagctcttaagtttcagaccacccagccctttccaatttccagtttctttattccagtcaaaagtgctttgtttgaatatcattcttgcttgcttatgtagaaaaatcttacttacacgataggatgattagaagcaacagaacataagcattcagtggctgcttcaaggtcctccctctcccatcccagaaatgccttccttatggaaaataagttttacttcccaattatgtgcatggacctctgttcattgcagcccccattggtactgggttattattattagcagtaagtctagtgttgagttcatgcttctctagaaatgtttccaaagtcaaacaggcttatcttaggctccagataaaatatctgtatacaaaagcttcctggttctcattaggagtagttctagatttgccaggctcctggagacctgagatgggtccttatgaaaggatttcagaaaccctcacagtcatcaacacaacagttctcgccaaatgaaaggactgctcaaattgcccacaaactgccactttttgtccatccatgaattagccagcagatgctgccctaagactgggacagctggtacataccattctcagaggtcttggggtacaggctttgtggacaaaactggttttttgagaatggaatccataatgctgttaataactttccttgcctactgacaaattcaatgactagcacagatctgcaatcttgaaaagacataaggagatgaccactgtatatgaacatattattccccattgccatcaatgtgatatatttttctgactcttttgtcaacagtttgtggtctgtatagaaactatcagctactcctctgctggatctttattctgaaaattatatcttacagtgggataccctgaattgttggtgtaggtgcctgaggattcagaacatgaatgactgattagtttgaaatcatttagacacatgattgtactgaagatatttcccaagaaatatgtttaaccagtgctcttatttcttggaaccattactaaaacctccaactcagggaccaaaatgatggacaagagttgctaaataataagggttgatatagggagctagggagagtggtgaagatatggtgtttgccatatatctatatatacctattcccactttggatttctcagtgatctgatagacaattctcttctcttggtgcactatcaactctccaaccttttatctccatccactcacttacataatttttttccatctgcagaaatccagtgtctaatgtaagtaaagattgccataatttcatttgttaagatagatgccaagcactgtatgtgtcacaattttcatctcagtagcacttattcctggggttatcttattttttcatacaaccccaatcagctgtgatatgaatatcacacttctctggctcatttgaccccatttatatttagtaatggcaagaacatttcagactgaatagtgaacaaatcttattccttaaggatcactacctaacaacatgaccaaacttaaagcaaaatgtattaatacaacctagaaggaaggatttttgctttcaaaatatgggtattgcactccttatagatgagctgtttaatattcacagttttctacctatgccacagttataaagcttgttctttgcccacatctttatgaagataggttcaaaaattaatacgaggctcatcagtattaggaggcacaaaaacttcactcagtagatgtgtagtcttggaattggtgggagatgggtaacaaagcaggagtctacaaagtcagaaatgaaagagaactcctttttcttagaaaactaagaaataattggagtacctcttaagacaaagtccactgtctttatttctaaaaggaaattcagtaagtcacttttaataggatggtttgtgtattccttactatatatcaaggaagacaaagatgagatagtacttccattcttttctcccaacttgtctttccaaatctatttggttgtagttaatttccaggctctccatctcacctggagttggatagattatttccatccttccttcccactcttacttctccttccttttcagtacttattctgtgccagggactctgatgggactggtgatccacatgttaacaattctctacctaaagtatctcagaagttaaagagtgcttggttaataatagctgagaggtcaacagtgccttccccttcattacctcaggatcacttgttacaatcaatgcagaagagtagtcacagagaagctcctgatggtgatataattgctatcttggagcctaaaaaacaaaaaacaggtagcaaaagccttctgtttatgatataagaagagcttctgaccaggtaggaagaaagattggctctcttagtcacttcctgatctctaatggttctccacaggtaatagaaggagaggcaaagaatcacgacacacaatttggaaagccttctgaaagcaagaataggcaatgattgccaagaacctggtattgagctcatatttaaaaagaactcaaagaatcctcaatctaccaaacctagttataaaggaaacaatcaaaacttcaaaaagaagtaagcaagagaaagccttgggaaagtcatgatttagtttgcaataacctctgtgcatttctgagcctgacaagcaagcatgagacagaagatctggacatgacttaactcaatttcagaacaccagacaaccctataatgaggctgaagcaagaccacatggaatactgaggaagaactgaatgactctttctaaaccatcttacagaaaagagatgaataagaggaagtatgggtagcaagtaagagagaagtgacattgttaatatgaaaagttgacagggagattaagatgggtcaagagcatgtcaggtcaggacttgcaagatgtacttaactaaatgtaagttcatattaggaattggataaaatgagaaataaaaactccaaggagtcacaaaacttaggatcatggaaaggcaagtgaaaattagtaaaaagagccaattttatatcatgatagggcctaccaaggtgtgcttgacatctaatctgcctagaacatctggaaggaaactttcacagatgctaaactgtgcttcttataatttaatgtgcacatgaatctcctgggcaactctttagaaagcagattctaagtctggggacagcatcaacagttggcattttcaacagattcccaggtgatatgaagttgtgccacattttgcacagcaaaatactaaagcttgctgccccagcctatggtttcatttgcattatggcttcattaatacacttcattagtaactgaagtgaatgctatataacaaaaaataattcaaggaaaagacctgttcctttaactctaatgttacacaaaccacagactctaatttgctcctgaacccattaattctagaaagttcttaagcacagtggacatcaacctcttattatcagtaacattggctatagtttgaacatttatcattttgtacctattggagtaaaagaaaagagaatccatttggaatatattgggcacattgcacaatggaaaagtcagggaaaattattctagtcatgtaaagaggattggttaggtcatattctgagtcctgagctcattctgggtttctttctataaataggatattttggaactagagaaagcacagcagaaggcaaccagaatgacagagggatttggggaatttgcttctgctgaaaggttaaggaaactaggtctgttttcttttgtaaggagagaaaagatggtacctcactgaggtgatatcattctaaaagtagtggaagtaataggatgagacaagagtgccttatggaaacaagagtagaaggattctggcaaggaatgaaggccagaagaatggctctagcttttctaaaggccctcagttagcagtgttcctactggcagaactccactactcgcaaaaggaggggtaaacactagattgggatcaggaaataagtgagagagagaaaatgaggaggcagaggggatcttatgtcgtttttcattgagaacattttcaaacaggcatttattaatcctatagaagccctgcactcaaggcatatggtgaactttaccaacattccccaagctcaagggttctgcttctgtaacacatcacatctctgcttcctcttcatcccaaaatggcattttgtccatcaattcagcaaagaaatgtaaatagttataatatgcagggttttccctctaaattactttttcctcttcatcaatcctggaaaacattctctttttattttatttatttatttttagagacagggtcttgctgtgtcacccaggctaaagttcagtggctcgatcttggctcactgcaacctctgcttcctgagctccaacaattctcccacctcaacctcccgagtagctgggaacacaggtgcatgccactacacccggatcatttttacattttttgtagagacagggtttcgccgtgttgcccagtctggtcttgaactctggcactcaaatgatcagcctgcctcagcctctcaaactgctgggattacaggcatgagccactgtgccagggctgattctcttttcagttggtagaaaagcactgtccatgacttcgcatatgagacctcaacatcttcatttgatccctgaatctcagagatgaaaggacttgccgaccatcctgggctaccccataattttacagcaggggaatataaagctcatagagttgataatcatacagattttacgtgtatggtactggagcatatatgctttcgggaaactgaaaattcaccagtgagctatgtggaaaatgtcaattattccatgagttagctcactactctggtcctctgtcaaaattgatattcagctctgtgtctttttacttggacagcctttgaggggagttgctctatgtccactgctttaggtagttgacccaaacttccccaaaatgtaggaaagttggttaactaactttaggtgggttaagcaacttttccatagtcacactgcttgtaagtagtagaggaggaattaaaattcaggattttcagatctaaagttcatgcttttaagcactggaccatatttacccctcttgctttcttcctttctgaatacatacatttttgcttttgttgcagtttgcttgtgttacagtattgggacaagccagtctcacttaactatactgcttccctctctcccaatactttgactgctatgtaatagaaacttaatataattttcctatatgaattagaatcaaactgcttctgtttatctctgggaagacttgttttctaactttatccagcacagcagcatagattgcaatgcaaggagagactgaagaacaatggtgatcaccaattgccgtatgttctggggaggcttaaaccacttctggagcctccttttcccccacctccatcctagaaggtagcagatgcatccttgaagaggcctcgacagaacctaggccaattcgcttctaagatgcaggttattcttgaaatctacaagcagcaaatcgaagatggggtatacactgcaaattagggggcactaatgcgatgactcaaagtcccagaatgggcctgagtgtgcagatcactgtggagatgttcccaaagtcttgacagatctatgttaaggcagaaacaaggacatcatattctccaatattactgtgattcagaatctaaatagtgacctgaatgccagaaatgtcagccaagaaatgggaaaaggaatgggcagtccagagatctgggcctgttgagaagcctatgaacccagtgacttggaataaagacaattgggagaagcctgaaatttcaagagaaaaagaggaatctctggccctaatgctgggcctttcttggtgttccctgtctctgtactctatttcctacctcctgtaagacaggacatctcttggaatcatctgatgtgttggaagggggctgggagggaaagagcattgatgctgactgtgttacaagctggatcgtctgacgctggcaaaccattttctttctctgggcctcagtttttccacttatatagtggccttagatttgacatttgttgtgggttgaattgtgtcctctctgaattaatatattgaagtctcaacctccagtacctcagaaagtaaccgtattgggagctgggtctttaaagaggtgattaacttaaaatgaggcattagggtggggctccaatccaatatacctaatttttttataagaagagagaaactggccaggcacagtggctcacgcctgtaatcccagcactttgggatgccgaggcgggcggatcacctgaggtcgggagttcgagaccagcctgaccaacatggagaaactccatctctactaaaaatacaaaattagctgggcgtggtggcacatgcctgtaatcccagctacttgggaggctgaggcaggagaattgcttgaggttgcggtgagccgagattgtgccattgtactccagcctgggcaacgagagtaaaactctgtctcaaaaaaaaaaaagtagaagaagagagagacaccagggatgcacacgcacagaggaaagaccatgtgaggacacagcaagaggacatccatctgcaagccaagaagagaggcctcagaaaaaatcaacctggttggcaccttgatcttggacttccagtctccagaactgtgagaaagtgagtttctgttattgacatcaagtgtgtggctttttgttttggcagctacagcaaacaaatacagatttcaaatggcccaattatctgccttccaatttctgtgaaacttccttcaacaagtttagtattgggagggattgcagttgactgcaaattctttgatagttctttcatcaagaaatggggttgtatctgctcctcccctgctttcgggtgggctcagtgactgctttgaccaatagaataaggcaaaagttacacttctagtttcctggttccaagccttaggagactcttcacttactcttcctgtgtcatggaatgcctgctcttggagccctggaccaccatgtaaaaagtccaactaccctgctggagatgcaatgtgaagcagtgatgagattacatggagagagtgaaaggcccaactgagcccagccttccactttgccctgctgagatgctgggcatgtgagtacaactcacttggacactccagaccagaccagccaccagctgaaggtcactaagtgactccagtcagtgccatgtgaaatgaaagaattgcctagccaagacctgccagaattcttattcatcagctataatatggttgttgagtaagccactaagttttgttacagtgcttgttaacgtgttacaatgatgtaataaaagtttctgaactgatttactagacatttgtgaccacattaattctgtacaggctcattcttaccaggtcttgttttgtgctcacggagaaagtaaggtgccattatgaagggattggggtttggactgagatttggattcaggtaagctctgccattaacaagtcacttggtttcttcagacaaataatttgacatctctgagtctcactttccttatctgtaaaatagggataatcacacctgctgtgtggagttttgtgaggacttaatgtgttaattagatattttattgctaggcagatagcatcctataaatggtaaccactctcactgcaatagtgatgccactgctgctgctgataatcatgatgaaaccaggtcatcttgcctatgactgccagtggagttggatgaaatgccccttccaaacaagcagccctcctcggtctgccagaaggctaaaatctcaccattggctttttcaagttatggcatttcagtttaaggactcgatatcctttaaatttccagttacacctggcaaggttaacacaggcaaaaacattacaaactggaaacagaacagcaaagtgaaaaaaagcatgtgatttaaaaaattttagaactagttttggttacaagtccttccagatctaaactaacagtggattaaatgtgttagaaatttgacttccatgtaaattacaagtaggtctggagccatatgatgttctatagtgtcagagacccaagctctttctgtcttctgtctatcttctgctgtatgtagttttattctgcatgtcgtctcatggtataacatgactgctgcttcttcactatcaggaaagaagactggttgggaaggatgcaccctattactttaaggacacttctcagaagttggacaaattgctcttgcttatacattgttgcccaaaacttagtcataaggccaaatctagctcctacatagggtgggaaatgtgaacttgacatgcatgtgcctagtacgttaattctattatcaaggaagaagagatgcttactggggaaaagaagtaatctttgtgacagttaacaatttcttgagcactatttcaagtcaggagtggtggtaggcaattcaggtactttgcagccctgtgagccttttattttattattttattttattttattttattttattttattttattttattttattttattttagatggagtttcgctcttgttgcacaggctggagtgcaaaggcacgatctcggctcattgcagccttcgcctcccaggttcaagtgattctcctccctcagcctcctgagtagctgggattacaggcaccaaccaccacgcccgactaatttttgtatttttagtagacacggggttttgccatattggccaggctggtctcaaactcctagcctcaggtgatccacctagcttggcctcccaaagtgttgggattacaggcgtgaaccaccgcacctggcctgtgagcttattattatcatccctatataagagagaaagaaagtgaaactgagaaatgattttcataaagtcacacaggtagttagtgcctgggctaggattggatccaggtctatgtgatccaaaatgcatactcgtttctctaaaacgaccctagtttcagtcctggcttgacgactttactgactatgtgacattgagccagtcatctgcccaagcaaaggcagctttaccgtgaagctaatgaaacatctcacttgcacagactcctgaagagataggagtgtccaggagctgcagagtattgagggtggggtggagggttagaagccagggagcattcaggaagtatttctatgtaagcctttcttgcagattgacaaagagactgaagaagaaagagacgtaacctctaagtctacaacaattttttgtgatttcttttcttgtcttttttttttttctttttgagacttggtctagctctgtcacccaggttagagtgcagtggcaagatcatggctcactgcagcttcaacctcccaaggctcaagtgatcctcccacctcagcctcccaagtatctgggtctattggaacacaccacaacacctggctaattgtgttttttttttttttttttattttttgtagagatgggggtctcaccatgttgcccaggctaatctcgaactcctaggctcaagtgatcctcccgactaggctccaaaattgttaggattacaggtgtgagccaccacgtttggcctcttttcttattctaaataaatatttgcgagatttgtgtttggacctacagttgtatctgtaacagtgtattcttttcttaaagaggctccccccaaattgtatatacttcagctctcacaaaacctggatccacccctactgccaagccaaaattcagcaaattttgaaagaatgaatttgagacttatcttaaattttgactaagatttaggtctcagaaatggcagagcagagaccctgaccaagaggacaaacccagaaggaagctatggtggggttctggaaacacataaagacagacctcccccagggatctctcccagtttcctccagagagggactctttccttctggcatattccaatcgccctgtaagtgttctttagctcattatacattctgccttctgaaaaattactaatgtccatatcaatccctccacccagagtagcaattgtcagaaagcagaaaccaggtatccttcatctctgtaccaagacttcagcaaggggcctgttgcaaaccaggaaccaataagtagttgttgaattgaattgaattgaggaacccatggatttaggaacataaaagagtgcacaaaagcaaagttactaactcatttctttattgcatgatgttttccagatctcagttttcttctgtgaaatgaaggcattaaatctattgatccctagaagggcaattgtgaacctgacagtagtgaactaattaacatctctgaactctatattctcagagtgcaggttttatgccttgaattgaggtgaaatccaatctggaagcctcatgttcattaaaaaagccttcagcattccttggaagtgtcagatgttggcctgaccaaatttcagcagggataattgcattctgacaactttgagttcccctgaactcttcaattgaataaggtaagcttcgcttcccatcccaaattattttaca

SEQ ID NO: 3 - DNA, 194952 bp, Homo sapiens
aaaccagattgttggcagaggacacaacaaaatgtaagttagaaaattcataaacatacatttattcaggaaatacaattactagaatccttgatatttcaatgatcattccacattataaaatattcacaaacatgtagttttttaagtctacaccaggtcatgctgacattctttttggataagccataaccatttcttctattaaatgctataatatccattttaattgtaaacaaagtacttgagccagactacttaagtacttgagcaaaataacttaaaaaaatcttaagaggaggaggacaatgatattttttaaaaacatatttgaggctgggcatggtggctcacgccagtaattccagcactttgggaggccgaggcgggcgaatcacgaggtcaggagatcgagatcatcctggctaacacggtgaaaccccgtctctactaaaaatacaaaaaaattagccgggagaggtggcacacgcctgtagtcctagctactcgggaggctgaggcaggagaattgcttgaactgccttgaggtggcggaggctgaagtgagccgagatcacaccactgcacgccagcctgggcaacagagcaagactctgtctcaaaaaaaaacaaaaacaaaaaacaaaaaaaaaatttgaatcgtcaaatcctaaagaactaggctgctattatctagtattatactaacaaatgaagtgcccacattaagacagtacataattattaacgacaatatttctcatctgcaatttttaaacatgctttctcaaataacaaacacgtatttttgtaagttttaaaggcaaagggggcagaatgatgacagacataaaaagctcacatttaaattactggtagattttattaaaaaaaagaaaaaagaaaaaaaaagataagactgtaattacttcccaaataaggaatgccaagtaccttttattcctaaaagaaattacttggccaggtgcagtggctcacgcctataatcctaatgctttgggaggctgaggtggaagccaaggagtttcaggctgcagtgagctatgatcacaccactgtgttccagcctgggagacaaagcaagatcctgtctcttttaaaacaaaaaacaaacaaaccaaaaaaaaaacaaaaaaaaaacctaagaaatgtaattaatcattaagtagctgcaaattgaactgttctattttgatacttcctaagagtgtccagtgtaatcagatcattttataatgggttattgaccctaggtgtcctttagaaccacctggaaagctttacaaaaaaaaaaaaaagggtgattttgatttagttgttatggaataggacccaggtatcaattttttaaagctctgccaggctaatatgtagctaagattgagaatcactaagtcaacacattttgatatatcaagaaaataaatggaaatgggggtgataatttatatttgtaatttacaaatcaaacatctatcatacacttactatgtacctagttttattcacgaatcatccatttctaagataaaaattcccatcatttcctcactgcactaaaccaccactgtacatctttgccaatgaatgactgtatttttctatggtcaagatttaaaattctgggatacattatgaaaactgcattaatgaaaacaacctactgctattcatgctcaacagtagcaagctaaactactgtacttggctcctttgagctacccttattttaagaattataaataggtgtcaacccacacaaagaacagattgtggattaccgtagggaaaaaaatagcttactcaacttactaaaagtttcaacaccaaaaaagatttaacttggctgaaagttctgaaacagctgagacacagaaccaggaagctataatttataatgaaatgttgatacatacttaaaagctactgcagctgtagctatactaaaataagatttcttcagggtttacttaccctgaaatgcaagaatacaagcataacaataatattactgtttttatatgcaccaatacctctctttaatatataaagctctacaacaaatacctctaataattttacaattaaattaagtccatacttctatactactttggtctcaacatttttaaaacatcaattaattttgaaaatttacaatttaacaacatgatcctatcaataacaagcacattttgtagtggattaaagacacattcaaccatgcaatccagtgttcaataccttaatgataaataacaatgctgattgacttttattttgaaaaatcattgaaaactggaataatcatctgagactcacagtgatcacaaacatgcagaaaaaagcatacaattctattcttcctgaaggaatgttacaaaatgcccacttttttatatagggtcaatatgccaaattacttatatttttcaatccatcatcttctaacatttgtcacttaaatttttcttaaagtacaaatgttcctgtaagttgtaacagaaaatgaaccccaactctttcagtctttaagacctcagtcacagtcccacactaatagctgccttttagtaaaatagtgacatccagtggacaaatgaaatatttctcaaattcccatatttgaatcataaacaaaagttgcctctttaaatccaacaattttagtatgagttcctacttattttgatggaatctacagattctcatgaatacttcacatcataatttctatgtatcttaaatatatcctcttttcttcctatttaaaatcaattatttaaattgagctagtaagaatgtctactcttgaagctagtgaggttaaaggtattacttttccttctttgcttcagctacttcccaccaccaaataactggtttgtctctaggaatggaaggactaaaatataggggaaatactgtgcatttaaataaaaatgaatagtatttaaaagaaatcacaaaagatgaaatctgaacctgttttgcatttataatttgatgtacggttgaacataaatagggatgtaataagtaatgctatcaattacatcctcttgcctcaatgctcaaatattaagaatatgtattttagcaatgattgtttcagtgtttaaaaacttactttcataaatcagtataaatgaatatccattatatattatgtttaagtaaaagtgaaaaaacttgcactgtactgagtcatgatttaccactggttatatatattatgtgtgtgttcaaagtacaaaatgcagcaatgatgttaacattgacagtgtaatgaactgccgtagatgagactgttatgcttaatttcttggaaaactgtaaagaaatttcacaggttaaaaaaaatagagtaagcaaaaaaaaagaattggagaactttacttttaaatcagcagctaaatgaagaaaacttttcctttctaaaaaaagattaagaatgtaaaagtacattttaatattaaaaaagcattttaaaaaatctataacaactttatgacaaaatctgcatttgaaaaaggcctgtaaaaacagtaggacagaattgccctcatcaccttttactttttcttgtcagaaaaaagtgtatgcatctctggaaccataaatgatgttaaaataggcatttataaaatgacaaggagaatttcatgataaatttgtttgttttcttacaatcattggcattgcagccattagtaagtcacaaggaaaacttctctagctaaaacgcaaaatgaaatatcaagttttgaaatgtattaggtctgttgcctgcgttttgctgatctcattttttcaaagcgcgactccatttcttctaagactttgggtgtgtatcgtaccactaatttaacctttccttgtgcggctttcagcagttctacagctttttcatgatgttctccttcaacactctaggggaaaaaaaaacaaccaaccatacactaatatctaagttttgaaagtaactcaaaatgcaaaaatgtttacaatatatataatgaagaaaagttttaatgttatattattccaacattacaaaactaagaaataatcctgccttaccattttaatctatatgaaatcctctcttacatcatattctgtttatagtctaaaagctggcttttaagttccaaataattagcatattaatctatatgccttattatttcagtagatcaagcaattggcattttataagagtaaaatgagggtagacttctaatttaatgtattgcctttaataaagagcttatgtcataaaaatgacattaagcactgctaatttacactgcaaaatacacttatagtgcttaaaaaaaaggatcactgtattaatagtactgcctaggattccctcaaggcatttctaaaccacaagtttcttaggtttctcctattactcaaatacgcccccaggtggtcacaacagatcactacaaatagaaataaaattcatccttaccactccattaacagagaggagttgatctccacgtttgaggcccccatgtctatcagcaattccacctggaattattcgggatatatagattggagagttttgttctttgcctcccataatattgaatccaaggccctcttctgtttttggtagctcaacaactcgaggatgagaatgtccttcactggcagcaaatgcagcaacagtagcctgaaagaaagttttacatattaaaaatatgacttttatttacttcagttctttcatcttttgtttccccccgagatggagtctcgctctgtcgcacaggctggagtgcagtggcgtgatcttggctcactgcaagctccacctcctggcttcacgccattctcctgcctcagcctcctgagtagctgagactacaggcgcctgccaccacgcccggctaatttttttgtatttttttttagtagagatggggtttcaccacattagccaggatggtctcgatctcctgacctcgtgatccgcccgccttggcctcccaaagtgctgggattacaggcgtgagccactgcgcctggcctcttttgtctctttttaaaaactacttttgagcacgtatttttgacgtctgaatgctcacaaattcactggtgattctgagaaggtaagctaaacagaaggtattttagagacgacaaatgaataatttcgagttatgcaggaaatgttacgattttttgttatgattttttaggtcattcctagcccattcagtgcccactcttttgtgcagtcctgtatgcgcagggcttggcaagcagacttactgggcagactgatattgtacatggtaaggaggaaaaccccttccccagcatgctagcagccctgggctttagatctggatctcccaactccttcaggagcctttgtgcaggacacaacctacctatataatcaacatggagttgcccttatatgtaatcattttggcttctgtactatttgtactatatactaaatatctaagatgtcaagaaataactcaatattgagaaaaagagaggtacatatagccaatctgaatgttttgttgctttagttaactagacacaactaaaaatccccacagaagatgaaacagagccgtatcttctttaaagctcaactttagactaatccaaactaattataaagttgagattttgtttcactttgctttaaagggtaattatctagtaccatttttttgtgatggatcacaaaaatggggaggaggaaagaaatcaagatttactgaacacccgttatctttgaagaaatcaagatttactgaatacccgttatcttcgaagctctgaaaaaggcctcatttttcagataatggaattaaggctcagaaattcagtaggctatcaaactcacacaactcagcaattaaaaccatgtttctctggtcttttctacactgataaactatatccacatgtttaagtatttgtattcaacaaagaatccaccatttccttttgtgagccagtaactatccataaaaaactatctgctgatgattaatttaagtcaccgactgctgatattaccctgttcaaaccccctatcatgaatagtgaggtcaatacctaaattatttgaggaaaacaatggcacagaaatgcagataatgtaaagaagaaagcaaaaatcaactcggggaagtaccccagctctatcatatgctatttgtgtggtttgcggcaaatcacctcatgcttcctcatcaataagatgaggatagtaattcatatcttaaaattctgattagattttgtataatgaatattatatagtatcatatatataacatatacaacacaattatatattgcatgatacatattgtatgcaagtacatttctattgcattatctaaactgcatgataaaatagcttatgtaagctatttatcatgcagcatttatgtaaaggcaatagaaacaaatgtcttatttcttagtacttgagaaatttggtgtagcttgaaagatacatgttagtcttcaaagtaagtttattatgaatttaataactccatattttaaacttctaatttatgaagaattcttacttttggaaaacaaaaaaatttacctttgcagtagcgttcgctctcacttcaggactgctactgatgtccacagtctcatagacatgttcatatacctgtaaaagccaaagttatatctcagaatataccatgcttgagttctctgtgaagttaaaatttcaggcaaagttatgcatctttataaaatggttttatcagaaattccaaaaatgagagggactggttttaatgttttctaaagtttttcttaagaaatgttgaacccaaatttagagtattatctgacctaattaactcaaatttttgtaaattttaatgatgtttactcacctctctcacagcattgcagaattcactttgaaggactctttgcaaagcctgaagtttctgtggtggtacttctccactcctttgtagtttttccaataattcaattgctctacaaatatctagagttaaacacacacacagataattttctccaagggttttctcaatgcctatgtaacagtggggcagttaggattcattcctcaagggcaaataatatacagacaatcgaggggaaaaaaagcattgaatttgcacatttggtgggaaggagactgtgtgtgtgtacacacatggagggtgagaatgtaaaatgtaagaacactaaattttacagtagataggaaaaactactgagattacagaagcataaaataagaccttggagaaacacaggcaaattgaacacaaaataccaaatgtcatcggaaaggactgtgactcaaatgtgaccgatacatgaacattgtactgcttcagaaaagctagcaatattgtcagaaactagtcaataaaaatttacctaattattattagtaaccaaagcactgaacagtacaaggcactataagctagtaaaatcactggtcattcctcgaaagaaacatgatacataggtagataaccactcgagagcagatgcagttagtggcagggacacatttaaaacaaccataaaaatgcaaaaaacaagcagtacaaatgaaataaactgattttttttcaacttaattaacactgttaattcaaacaagctccaacacttatgtttacaaaaaagaaaaataaaaacaattagctttatcaatctggtctcaataccacctgtgtgaccttgggcaagttacatgatgtccttatgtctcagtttctttcactgtacaatggaaataacagtaccttccatataagggttatgaggaagagttatgagttcagttaacaactgaaccacaaaatacataaaaaagggcttagcaagcaaaagtgttatgttacattggtaccaattaatcataagaaatattggctgggaatagtggcttatgcctgtaatcccagcactttgggaggccgaggcgggtggatcacctgaggtcaagagttcaagaccagcctggccaacatggtgaaaccccaactctactaaaaaaaatacaaaaattagccaggcatggtggcgggtgcctgtaatcccagctacttgggaggccgaggcaggagaagcgcttgatcccaggaggtggaggttgcagtgagctgagattgtgccactgcactccagcctgggtgacaagagtgaaactccatctacaaaaaaccaaacaaaacaaaaacaaacaaacaaacaaaaaaaaccctaagaggttgtatacatttatacaaatgtatgaagcacattagggaattctcactgagaagtgtgaggataagtgttttatgaattgagacattttagaagattcaggaagtcagctataacactgttaactatctctacttttatttttccaaaaactgttttggtatactgtttttgtacccctggtactacaatgcccagtattctattattgctttgcttccttttgacttaagtagaagttcctgatttcgttacactcaaggactggaaatttttctttatagagttagtatggccttcttcgtgtttgcagatagaaaactatgaataaatgtagtaaagaaagatatttatttatttatttgagatggagtctcactctgttgcccaggctggagtgcagtggcgcaatctccactcactgcaacctctgcctcccaggttcaagcaagtctcctgcctcagcctcctgagtagctgggattacaggagtccaccaccatgctcggctaatttttgtatttttagtagagacagggtttcaccctgttggtcaggctggcctcaaactcctgacttcatgatccacccacctcagcttcccaaggtgctgggattacaggcttgggccatcacacctggcagaaagattatttatttatttatttgagatggagtctccctctgttgctgaggctggggtgcagtggtacgatcttggctcactgcaacctctgcctccagggttcaagtgattctcgtgcctcagtctcccgagtagctgggactacaggtacctgccaccaggcccagctaatttttgtatttttagtagagacagggtttcaccatgttggccaggctagtctcaaactcctgacctcaagtgatctgcttgcctcggcctcccaaagtgctgggattacaggcgtgagccactgcgcctggccagaaagcagatttttaaatttgaggtaaagaaagcttaaacttaaaaagttaatcaaatgcaatggaagcaaatagaccttcaccattctgatttcccatcaccagaatgaccgatacatggggactgttggttcatcaattattttgatttataaagttataatatataagccatataaaaatttccagtgaagaaaaaaatggaaaaaagtaaaatgcttttgactaaatctaaaatgtacctactatgtgctcaaatttgtgtttcattaaatcatagtttgatgatttagaaggcactctaaatcatcatatgtgatcaggcactgtattgtaattgtactgtaggattttctactttaggatcgttgggagtgtttgttaatagagtctgttagaattctaaacaagaatcagaggtgatgtaatctgactttcttaccctgctaaatggcaaccactagtacagctgtcttggtaacagtgggggattcattaggaccttcttcagataccacagatatcaagatctgcagatgctcaagtctctgatataaaatgatatagtattggcataaaacctatgcatatcccccctctatactttaaataatctctagattacttacaatatctgacgctacgtaaacagttgttatatcacattgtttagggaataaggacaagaaaaaaatgtctgtacatgttctatacagacacgatttttttctgagtattttcaatctgcagttggttgaaatatggaacccatggatatggagggctgactgtaattcatcctactaagaggtggagtcttctactgaagaacagaaaagaaatctgtaacagcaaaaaacaaagccaagactatcaaaactaaatgccacagaagttccacattttgtgttgcatttaaaaatacaaagaccggccgggtgcagtggctcacgcctgtaatcctagcactttgggaagccgaggcgggcggacttcctaagctcaagagttcgagaccagcctgggcaacacggtgaaaccccgtctctactaaaatacaaaaaacagccgggtttggcggcgttcgcctgcagtcccagctactcgggaggctgaggcaggagaattgcttgaacccgggaggcagaggttgcagtgagccgagatcgcgccactgcactccagcctgggcgacagagcaagactacgtctccaaacagcaacaacaaaaacacaaaagaccaatacgttagaatcttaactagctttcaaagaaaaaacttactcctgttaacaccaaacagatttgctcccatctataaaacacagtgccactgtgctcaagaggaagatgtcagagacttaggcctaactcggcaagtcttcccagagtagctagtcctctaaaatgatgctttaataggcttaacggaaacaatctcatttacagtgaggcttccaaatggtgaacacggtaaagagcaaatcagcaacattaagtgcacatttgtttgtgggaaggcattaggaaagaggtttttctaagtacagtaattctaaaaatgtgttttcttagggaacaatagtaatatttagactaattgcaaatgttaatatgtgcaatataatttcagtctccatcctacatatacatttttttttaccaccagtactcaaaatgtttatttgtacttctcaattcctatcaatgatttctaatgctggtgtatgaaaagcatgcttgaaattgtttgaaataaaggacttagggacagagtggaatgctggaaatctgtaaaaggactggaaacgctggaatgctggaaatcatggtaggcgcatagccagttattttcgtaggcttctctatctctaattactcagcagaggtggttttattttccttgacagtctgctctaggaagcaatcagccaaccagtttgcaattgtagggtttgtaagaaatgaaaaacactgcacctgcaagtgttttagcatctaccactattcggcttacttacgtaacctccttcccaagaccaagtcagtaggattgtttttaaagcaacctctccatttctaggaggggcacaaaagctagcaaataccccaacccgaatacaagcgaggttgtggagaaagtaatgaaggagtttgtgtgcaaacagcggggaaaggaggttctgttgaattgtaccgtgtgtccgttctcgtgctgtacaggcaatgagtgtagtctgtgcgaaccgggtgtgtgacgtttgcttttcgggtgtacgggtctccgaatgctgcttctgctgtgctcaccaagggagcgcgtgtgcggcgtgtgtctgcgaagcgggcaggttgtgtttagttgtgctgtgccttggaacagtccgtgtgaacagaggagggcttacggttaacagacaaaataccgtaagcgcccttcctagagccaggcacagagacaacggcggcctctggcgccggcacaagggacagcgtggcccggatctcagagcctgggtcactcctcctcccctccagcgacacagcactcccccaacccttccgcccacctccgccgagcctcggctgcactcacctctctccagccgcacgggttcccctagcgccgccatcttctcccttaacctacagacccacaggaaatgacgacagaagggctgaggtgggggggcggggcctaggggaagccggaaaagtgagtaccggctagtatcgcgagatcaggaaggtggccgagtgtgtcgccgcggccatcagggtaagggtacctggacttgcggctttttaggtcggcctggctccgctccttccgcggtgacgaggtcccccggcctcctagggttgggaagagctgctttcctgactctcgttccctgcctcaggcttcccttatcccaatcgcttcgaacccttggctcagcgtagaggagtcaagcctggattctagtcccaccttgcccattagcagctctgtgacctgggactgttcacttaccctctctcagcctcagtttccgcatctgtacaacgagaggtcctatctcttaggtccttacaatttttaaactctgggattcggtggcaattaaatgtgtaatgacatgttgtcagttctcaatttgtgacagcattgctttaaatttaaaaatccacggcttgaatcttccctccaaatctgttaaggggtggaaagtacaaagagcatgaaacatatctgggtgagggagagaacaaggtgctttggtgcaccacaaagtaacaattttataagcagctgattcttataaaatcttaagtaaatgaaatattgtgaagcaaataatattcttaatgcattacagatttttgagccacttctgaaattttcgcgaaccaagaagaattttagtacttggatttgactaacatttatccaagcccttagtctgtactgatactgtggtaggtgtgtttacatccagcatttcaacacttcatgatgggactgttttaataacctgtttgcccctggtccaccctttccattcacctttagtattttcttctccaaatccatcatggatgccaccactatgctcctttttctccccttgaattctgatttcatcatcacaagttctgttcagaaactttcaatggtttctctcctgtttcctatttctaaagccttgcatactctgaccctaactcatccaactaacttcatttctcattaccactaagtgcaaccaccacttcagtccagatagtatagtttcaaccatatttattcctgattccaagtctttttgtttgttttagagacagagtttctctctgttgtccagactggagtgcagtggtgcaatcacagctcaagagagcctcctgtctcagtcttgccagtagcgaggactacaggcaagcaccaccatgcctggcaaatttttaaatttttagtagagatgggggtcttgctatgttgcccaggctggtctcaaactcctgagctcaagcagtcctcctgctttggcctcccgaagtgctgggattacaggcgtgggccactgtgccaggctccaaatcttcatttgtgttgttcttgtgtggaatgcccttcttcatcccttcctagtctccaaactttgtacacactcagttgaacccatttcgtgggtccctgctgaaggcatgccacttctaccaagccttttctccatattattccccttttttgtcctctgatggcctaaatacgttgcagtaacactcaggtgcttatctcttactcgttgtcatttttttttgctgcaaatgtgttcaagaaatgtttattaaacacctaatatataccaggtgccttgataggaataccaggtagagcaagacaaatgcaaacattgcccttatttcttcaaatattttttctttccattctcttgctcctctcctttggtgtgactattggagtcatgtgcatgtacataatatacatgtatattgaactaactggcattgtctcacagctcagtgacgctctgttcatttttttttcaagattttctttatgtttccttttggataattgctatgttttcatattcattaatcttttttcaatatctaatattgaaatcctgtccagttcattcttcatataaaacattgtagttgttgcctctaccagtttgatttgggtgtgggtgtgtgtcttacatcttttatgtcttaacatgctcaacttttctgcagcttcttaaacacatagactacaattataatgacagttttaatatccttgtctactaattctatgatctatgctatttctggcatagtttctattgattgatttttctcttcattacagttcataatttcctgcttcttgcatgcctggaaatttttttttttttaacaagatgctagactttgtaaaatttacttacttgaaaaacaattttgttcttttgggttttgattttttttaggtggaaccaattcagtcatttatgtagggttaattgtatcccactactaagacagtacccttcaaagttccttaccccatacccaaagtgaattatgtggtttttctactttggtaggaacgggaactattcttaggaactgagtttgtggactttttttttgctcttttcctttccctgtctggtaatttatttcttcttctttcttccttctccttcttcttcttctttcttcttcttcttcagatggagtcttgctctgtcacccaggctggaatgcagtgacgcagtctcggctcactgcagcctctgcctcctgggttcaagtgattctcatgcgtcagccacccgagtagctaggtttacaggcacctgccaccgcaccctgctaatttttgtatttttcgtagagatgggatttcaccatgtttggctagctggcctcaaactcttgtcctcaagtgattcacccaccttgatttcccaaagtgctggattacaggcgtgagccgccacacccgggtggatgtttaacacatgtaatcatcataaaatttcagaatcctaggaatagatagaagatcctagaagtttccagagaggataaaaaattatattctaaggattggaaatcagaacaagattgtacttctcctcagcagcactggaagctaagacacagagagcaactaaatttttagaaaaaattatttgcaaactagaattctatatccaactgtattaggtttctagggctgccataacaagatacaacaaactgggtgacttaaaacaatagatagtcactgtctcacacttctggaggcgagaaatcagaagccaagatgtcatgtgctctctgaaagtgtagaggattccttccttgtctcttcctagctttctggtagtttgctggcaggctttggtgttccttggtctgcaactgtattacttcaatctctgttgtcattatcacatggcgtcttcccttgtgttatctgttgtcagctggaaatcatcttacaagaacttcctatttcggtgtgaccttaccctaaattagttgcatcatcagtgacctcatttccatataaagtcacattttggggttctgggagttagaactttaattttttttttgaagggaagagatacagttcaccccgtaacaccaaccagagtatcaatcaggtgtgaaggaataatgaaaaatattttacacatgtaagttctaaaaattgttaaccttccatacatactttctcaagagctactagaaaatgtgctccatcaatagtaggaagtgagccaagccaagtacagtagctcatacctgtagttcaaacaactcagaaggctgaggtgggagaatcacttgagcccaggagtttgaggctgcagtgagctatgattgtgccactgcactccagcctgggtgacagagtgagatcccatctttaagaaaaaaagttagctggccagggctggtggctcatgcctgtaatcccagcacttcgggaggctgagacatgtttatcacttgaggtcaggagtttgaacccagcctggccaacattgcgaaactccatctctactaaaaatacaaaaattagccaggggtggtaatcccagcccctcgggaggctgaggcaggagaatcacttgaacccgggaggtgcagtgagccaagattgcgccactgcactccagcctgggcaacagtgcaagaatctgtctcaaaaaaaaaaaaaaaaaaagttagccagtaaaggtatgtgtaatccaagaaaaagaggatccaatatagaggagattaaggtgatttcaaaatgattagtgtatcagggtgcctcacagaaacagaaccaatagaatatatttagatatatagaaaggatttattatgatggattggctcaggagactacagaagccaagaaatcccataatttgctgtcttcaagtgggagacccagaaaagatgctttagttccagtccaagcatgaagaaccaaggcctgagaaccagaagagcctctggtgtaagtactagtctgagtccgaaggcctgagaactgagaacactggagtccaagggcaggagaaagatatctgagctcaaacagaaagggcaaatatgccctccctctgtctttttgctctatttgggccctcagtggattggatgatgtctgttcacattagtgagagtgatctttactcagtttgctgattaaaatgctaatctcttctagaaacttcctgacacactcagaaatattgttttaccagctatctgagcatcacttagcccagtcaaattgacacataaaattaatccaccacaattgtgaagggaagcctagggtagcagacatgcagctggcaaagagagcaatccattcacactgaagcagggcagaagtggaggtgaggtgttgccaagaaaaaaatgaaatatgtagttcaccagtgtgggtgagcatactgataacacatttatgcattttagtggagagtttgggaataaattggtgataggcacatagaaaactaagcaaacgggaggaaataaagcaattattaactccaaaaaaacctgaaaagccatgtaataaaggaaatgtttatgagtataaggtggatcagctgcatacaacatattcagcaacttttaatttttttgagtataaaccctgtaatgctgtttgcatttttaaagacattttaataaaaatgaaaattaataaataggaatcacaatactaaagataatatttgatatattttattttgaaatatttaatttgtattggcctcatcttttcaatttgaaatctttgctcttgggaaggggaataagaaaacttaattataagcacaatttgctgaaaaagcacagacttactaggtttaaagtagtgtttaatgattagacaattttcatttaatagatttgtacatctgctttgtttggtatttgaatctcattgtgctgtagtctatggatttgctacccttgatcagatactcacccttggttcaatcaattctatctggtacagtggaagtaatggttcacccaggtccctgataagtctgggggtagaatatcttcccttagaaaaggctagagtacagcaggcaatgtatttggcctgtctaatatagtacattacatatacatttgggaaaaatgttgcaaattccataagagtagcagcctgacattatgggaagagcacaggactaagtgtcaggagctctggttactaatcatagatgagccaccttgtgatagtgtgatcttgacaatgtcacattctcactctggacctgtttccttatttggcacgaccactgaataagatctgtctgagccagctgcagtgacatccacctgtatgtagtcccagttcttggaagactgaggcaggaggatggaggccgggagtttgaggctgtatgattgcgcctgtaaatagccacttttcttcagcctgagcatcacagcaacaccccaaatctttaaaaaaaatctgtcagcacattaaaaattactttactctatgtcaataaagtaattaatataaatacagattcccttgaacttcatggacttatcaaatcagaatccttaggagaaggctctgggaatctatattttaaaaaatccctagtgattctgacacagctagcctgacacagggacctgtgttcaggatttaaaagattatttctagggcctttttctactaaaattcagtttccctataaaactgcagagaaaaattattgagaaaatgattttcattataaaagaatatgtagctcttgcataaagggcagcatttctagctaattttaaaatttattttatattattttaggcatagataaggaagaaaaaagttttggaaactacttctgagagggaaaaatatgcctgaaattaaccaacagccagcttgtacttaacatacaaaataaacaaaagaatcaactattgtgtaaggagagaaccccgaaatgttcctcgttaatcgaaattcaagagtattagcgtcgggaaagatctagagagtcaactccctcatattaaagaagagaagatggattgctgtcctacattcaaaggaggccattaggagcatgaaccaagggaagctggttttccttctatgcctctgccaggttattaaatcaccaggcctcctaatcaagaattgctcttcgtgtggaagaactcctcttcacctgttgcttcctcatattatttcctgcctcagagatgtagaggaactgtaaaattagaataggatgtttgggtctagacaaatcccagtgaaagctaaattatggaaatttagtctttgtataacaaatgaaaaccctaagtaggctgccaaggtacaaaagctttcttaacccgagacattgcaaatacaacgtactaagtgaaaaaaggagtgggtggggaacagtgggagtagaaggctgtctaaagggaagctaggaaaatggaaagtaatatggagaagcaacatgctccaagtggagtgttttactatttcattgcctgttgaactgtacacaaataggcactactacataaaatagctatttgaaacagttatgccattgcagggtagaacattactctcaagtaaaggcttctaactgtacaattaaagtctcaatcttctttttttaacagaatttctctgatgtactcagcaaagtaaaattttgaatagattattttatttgaagtgaatgatattgtcaaatgttaaagagtctgcattttaaaataatttaaacaatatataaaaacacttggcctaattaagtaatcataacagtatggaaaaatctcttcaagagcacctttgaagggaaattttatcacagatctcagatcagaacatagaaacccatctgtgagttccagagatctaacataaaccctacttttccttgtaggatgagttgcagattctattaaagtgtaagggttgacttttttaatgtcacttgtttcatcatcactctgtagtacatgtaaaggcacagattgatgtatttttctggcatcttcctgacgcacccttgccctatataaatcggtttgccaggatcttgttgcttaaattagcgattgcaaactcttggtcctgccaacacagccgattgtgccaaggttctcagcatctactggcacatgaactgttgccttttctttggctttctgcatgtacctggggccatcatccttccttcacaaagcagcagtctggcttagttgtccctgagaaagacttcaggattggttggactcaactctggccctcttcaggttgtgcatcctgcacaatgtattttcagccacacaatgtattgttcaggatttgtcgtgcacatacttgcagattggcagagccaactgccagagatgagaaccttttaagttgttgtcaaacgtcataaaatgtgttccgtgattaattttgtgggcacagattggtttttgcacagagtccaaaatttaggatatgtcacagtgactaaatggcaccggcatgctgaatgaatttggaatttgttttgtcaagtgtgggagcaggcacacagatgggctttgatccagtggtgctgcttggaattctcattatagcaatgatgtcacttgtcacgtggagtaagtgataatgctgccaaattgtggaaaaagcaaggcaaataggaaagtacacagaccaagagaaaggacttaggtagcacagtaagctttcactatcagatgaatggacataaacattgcttttgggctgccaaaaatatgcatagtaaaaatacaggcagaaaggaaaacttccaactgaaagggcccttaaagtagggcccctgtaatccaagaagtcttcacttcttagagaaaatcaagtaaagcaaacatgtccttgatttttatattaggctatgaaagaaatttctgagctgcaatcaagagtctttctgcaatatctaaccaaaccaaagccaaagtattttgctttataaaaaaaacctttgtctatgaagaagatcagcagtcatgctgggaaattgaaaaaaacaaaaaccttatagtggcaaagaagtacagtatactctcaccaagcatgcacatcagaattctctgtagggctttaaaaatatattcttgatgcagctacagcagtgcttagagggaaatttatagctataagtgcctatattaaaaaaaagaaaaatatcaaattaacaacctaaacttctatcttaagacacttaaagcaaaacaaactaaactcaaactaagtagcagaaaggaaacaacaaaagttagggcagaactagaataaaataacgatacagaataggaaaacatagaatataaataaaaacaattgagaaagatgatgaaaccaaaatctggttccttgaaaagatcaacaaaattgacaatgctttaactagactgaccaggaaaaaaagaggaattactaaaatcaggaatgaaacgggacatttctactaaccttacaagaataaaaaagaatattaggaaatactataaaaatctctctctcttgccacacacgcagtatatactatatataactgaatgtatgtcatgtaacttatctaatttgttgaaaaatatatttgtcacacaattcacgtcagagggtcaccatgtaaattttgattcaaaaactcgagtatggcatgaacatttgtattttctgaaaatataaaggtttttgtgagtgacatgtactttttgttgagaaccattgatctaccacatggaaggcataaaaattgtggaattacaattaaatatgcatcaattagaattaggtatagctgcatataaacacaaaaatccaggctgggcatgttggctcatgcctataatcccaactttggcatgatctcagctcactgcaacctccgcctcccgggttcaagcaattctcctgcctcagcctccccattagctggcattacaggcgcctgccacgacgctcagctaattttttgtgtttttagtagagattggatttcatcatgttgaccaggctggtctcgaactcctgacctcaagtgacccacccaccttgaccttccagagtgctgggattacaggtgtgagccaccgcgcccagctattcccagtattctgggaggctaaggcaggaggatcacttgaggccaggagtttgagatcagcttgggcaacatagcaagaccctgtctctacaaaaataaaaaataaaaaaaattagctagtcataatagtgtgtgcttgtagtcctaactacttaggaggctggggcgggaagattgctcaggcccagaagttcaaggttgtagtgtaccactacactccagcttcggtggcagagcaagaccctgttttggaaaacaaacaaaaaactattttgaaaaaaaaaaaaaaactcacaaaagtccaaaataatagtgcatttaaagtgaatgaaagaaatccatagataggtaacttggtgcaagtatgacagccccatggtatcaccaggatcccagcttttttcattttgcatcaccatcctaggacatggcttccatagtcaagttcactcataatctgagatggctgcaggaatttcagtcattacatgtgagttgcatgccagaaaaaaagaataaggaattgcagaagggtaaaaatcaccctttccagttgaataagcatctttaaagcacccttttcagatgtccaacataatattttgacctatatcttcttagccagactcagttacatgtctccatcttactgcaaaagaactaggaagtaaaatcttttattttgagtgacaaagagcccagctacaaaatctcaactctgtccccaaggaagaaaggtaaaataaatatggggataagccttcagcaagctttgccatactacaccacaacttctggaaattacctttaaacctagttcctgcagcattcccggtcaatagatttatttcccttcattggaaagttttcaacttaactcaaaaacgtttactagcaggtgctacaggagagaggagaaatgtcagatgtgttcatgtccttgaggaactttcaggcaatttcagcaaacggaaactacaccaatgagacagtaggaatgttatctacctgtatgtactgcaatgctatgttttatggtttggaccactactttatattttaaacctaaaaacccattgtctgcaaactgactcaaactaaattgaaataagccacattactgttttaacccaaactgattctgaaagctagtatttactcaactacaaaccattcagtagtgtgaagattaaacaaacaagcaaacaaaaaaaccctctccagatcctccagatccatgtttccccttccttcctttcctgtctgtctctctctttctttctttctttctttccttctttctttctttctttcttttctttctttccttccttccttcctttctttctttctttttctctttccttctttcattctctttctttccttcttccttccttctttccttctctttctttccttcttccttccttccttctttccttctctttctttccttcttccttccttccttctttccttctttctttcttcctttcttcctttctcgcccaggctgaagtgcagtggtccaatcttggctcactgcaacctctgccttgattctcctgcctcagcctcccgagtagctaggattacaggcacctgtgaccatgccagggtaatttattttttatttttagtagagacgggatatcaccttgttggctaggctggtctcaagctcctgatctcaagtgatttgcctgcctcagcctcccaaaatgctaggattacaggcatgaaccaccattccctgttcttagtgtttcttataacttcccagatatgaacaaaaccttgcaaaagagcatttcaataatctttagcttctcgatcttccaactgatgtggccatcaaatggctagtcagaagacaaatagatgaagacaatagctttattaaagtcaattcaaattatgacctactatggtaagacactgtgctggggtctagaggcaccaggacttcacccttctctcaacagctcacaaacccagtggaaagggtcagacatataagcaaccaacagaaacaaaggagatggcattaaatattattctgctcttgttgctttagttgttgctgcttattgttggtcttgttgttgctttagttataggggtttttaacagagttgcaaagtgttgtggagtaatgagtggggagaaatgatttctcactggaggtaaccagaaaacagattagagagcagtgattctcaaccaggggcaattttcaaacccataggacatttggcaatatttggagatatttttaatggttatgacaatggatagatggatagtcagggtgagggttggtactggcacgtagtgagtagaggtcagagatgctgctaagcatttttcaatgcataagacaactccctacaacaaagacttactcagcataaaatgtcagtagtacctaggttgagaaaccctgcttgaataagatggatacgttgtacaagaaggatcagaattttcacaagtggatgaatggggacaagaatcccagagagagtactaaatgagcaaagccccattggaaaaaaaatataggccctgttcaggaagtaggagggagggcttcagtggggtataggttacacaacggaacctgaggaagctgtaaaaggaaagggggcttagcatttagattgaggctgagtgcaagctgctaaagtttggattttattcttttggccagagtgagctattgaaggatttaaaaaatggaagcaataggattaaaagtgtgttttagaaataaaatcagagggaaaagctttgattctcatagcagattgtaagaaaattcctttaagggagtcacccttattttgggtgttgtctgatgtttattaacctctggttgttggaaaatagcaaaactgcagagaagggagaaattctgcatatttgggcctgggttggatgggcagtgaggggtgaggaaggccaagggaatgagagagtggtgcaatgctgatgtttgtgctgtgagacccttcttcatggcttccagagctttggtaatctttacaaaaattataatatgcttgtgcttggatttcttgtgcaaaatgactatatttgggttgattgtgaagattgggagaggaggttggtgacaatggtgcaatggtagcatagaagtaataatttggatgcttctataatgggcagtttcttctcctacttcttcctttcagatcctgtagtcctgtcccacagaactgctcatgcttctccagtacgccagtctgcatcatacttacatgctcttctttctgcttggcacgctttccttttctaacaaacttctgctcatccttcaagacccacttcaaatgttccattctctgctctgccctgtatacaaaatatcaatattgtattgtgtttgctaaagtgtttattttccccaaccagagagtgagccccttcacggctaagaatggcattgtaatcatcactgactctccagcaggtagcaaagcatattaccgaagctccttgatcatttgctgaatgaaccatgggtaataaaatcagtgagtggcagaaagattgtggctctgggcctacatagcctttgcctggttgctgttagaactacattttcttctctttattaattttatattttaaacttcatccccaagcttaaacatttccttccaatagatgatattctatcaggaagagaaaaaaaaaaaaacccaaagtacaactttaatccttgagtgaatgggctaaaatcaggtttcaatatgctttttagaatacttccatgtaattaatttaacattgacctgcttattaagagtccattattaaggaaacaattgtaaaagtcattaagggcatttccacagatcttagctactgactcatcttgctagttctcaataaacgtgacctgaaaatctctcattcgcagtatcaggtaaaatgttatttttctaaccattaggaaacatttactcttgggctgatttttatgtgtttttattgttgttgttaatgtgaagaaagtcctatacaggaacagctgcgcatatgggtaaatgcctgggaatggtttaaagatgccttttcaaaacatcttccccacactggtattatgcaatgcctctgtctcaacaattaataagtatttccttttgagttaaaccatgaagtatatagtcacactagctcattttgagatagggcaagactcttctggcatcagaaacccatatttggaatgtggatattttgtcttttctgtttgttatttcatcttatgttttccttcaggatttagtaaaattctttatgaaagtataagctggcttaggttaggggttttcaactctgctagggggcaagtttaatgagggagccattcatcctggatctgaggaagtcgtaaagatgacaccaaagtttcaaagggccccagaaccctggcaaggttctggcatgaccctcatccctcgtcccccaacactgacagcctctccaccacaatctgcctaagagacaatccaggacaatctcgccactcccttcatcccatataccaaactataaggtcattcctaatagtctagatctacatcctgtttgtttattccctattctgaccccattgcccatttcccacttccaccccttttctgtgctctgtggcccattatcggctaaagccctcatattctcaaccttttctcttagtgtctcctacacattatttttttaactgaaacctggacctctgagtcctgctttcttgtagcctggttgagtggtgcttattttcttttccacacccctttgagttaaggcaggaagcctgtaattattccaggttcctttaggatagagtatgactcttgtgagaccagaaacatatagcctatatttggaatgtgaatttgaatagaattccggacttagagatggggagatgtctccctggtttttattgctcctattagaccaagttctcttctcccttggtgtgaaatttagacatcattaccagctaccctttcttattgcagttatctgctgactgggttactttccacgttctttgaagatgtaaactcccagcttatccgcacttgtttgtgacaacaatttttctgtcacaattcctagatgatcatttcaatactctctggcatctgagtcccttgacctcttctcctataatgatttcattctcttccaacctcagccactcatgctcatggaatgagccattcatagcctcccctcaactttgtccttatcaataactcctcatcttccataatctccatctcccatccaagaactaaccaggtccgaccatgcttagcttctgagctcagacaagatcaagcatgttcagggtggtatagccatagatcaaaatctcaatctcaagcattctaccctaggcccaccacctcatatctttccagctcactgtccctcacattctgacttaaaaatccgttgacctaacaatgaatttgtcctaccatcttttcactgtcctttacatcctgtgtatccttacctccttatccatcctagatcttatagtctatcataatcatcactcactttatacaactgtaactccctggagcctctttcatgttttttttccttctttggaaaacccccaatcctagttatttgcagcccttttcttactctgtacctgttttctggttgctgaacttggctggaggaaagtacccaatctactgcttggtatcactttaaactcatgagcccccaaatttaagtgggcccagcaattctaattcattcaaagagtttgtgaactcttgcttcacaaacatgatctcaaaccttctgctctctcctcaaacttttgcgacttcttggttctttattctcagctgatggccttgatttcttttacacggcgaaaatggaaacaatcagaggagaccttccacatgtggttcccatcacttcttccaaacctgcttgcatcttcgcctgtgtcccctcatccattctgtcctctgaggaactgtccatgggtctgtccaaggcacagccctcctgttctacactaggtcccaggatctcacatctactcaaggagatcactctagcaattttactctagccattttggagaggctctctcttcctgtttgtttttttttttaatttttttaatttttatttatttatttatttattttagatggaatcttgctctgtcacccaggctggagtgcagtggcatgatcgtggctcactgcaacctccacctcccgggttcaagaggttttcctgccttagcctcccgagtagctgagattacaggtgtgcaccaccactcctggctaatttttgtatttttagtagagacggggtttcaccatgttggccaggctggtctcaaactcctgacctcaaatgatccacgtgcctcggcctcccaaaatgctgggattacaggcatacgtgatgacgcccagccaaggctctctcttcttcctcctgatcaatttatgtccatcagtatataaatatgctttatttctatattaaaatactttcccttgatctcaagcttccctgcagctacctttgcatttttcttatcttctttataacaaaacttcttcaaagtattgttcatacttgtagtatccatttctgctctcttactctctcttcaataactctaagtagacttttatctacaccactccaccaaaacaaccccgtcagcatctccagtgacttccacgttgtcaaagcgaattgtcagttttcagtccttatctcactcgaaacaattgatcactgcctccttgatacattttcttcatttgatttcttggatatcatcctttcaagtctgagcacttacagtgtggccatctcaaatagagatgtctgagtcttctatcaaaatcttcgctgaccttattgggtactttctcaatctttctaatggtttctcttacttggcttcttaattttggaggaccctgagaattctatccttagacctgttctttgtctacactcactcactagatgacctcatttggtctaataactacatactatctaataactatatactatcagtgctatcccatacaaatataatgcaagccacattgtagataggtgagtcacagatataattttgaattttctaatggccacattaaaaaatgaaaaggaaacaggttagattaatttggtaacatattttattcagcccaacatattaaaaaattaacatttcaacatgtaatcaatgtaaaatgagtaatgagatgtttttcattttttaaaaatattatttgaatttcagtgtgcattggcatttatagcacatctcaatttgaactagccacgttttaagtgctcagtagctgcatgtggctagtggctactatattagatagcacagacctatatgctggacattggcttttactgagtgagatagccaatggaaaggttttttatatacaaagttttaaatttaaaaatatatatacagatagggtcttactatgttgaccaggctggtctcaaactcctggcctcatgtgatcctcccatctcagcttcccaaagtgctgggatttacaggcatgagccactgtgcccagcccaaatggaaagtgttggggagggaaatgacatgactactctttttttttttttttttttgagatggagtttcacttttgttgcccaggctggagtgcaatggcacgatctcggctcactgcaacctctgcctcctgggttcaagcgattcttctgcccagcctcccaagtagctgggattacaggcgtgtgccaccatgcctggctaattttgtatttttttttttttttagtaaagacggggtttcaccatgttgggcaggctggtcttgaactcctgacctcaagcgagtcacccgcctctgcctcccagaattctggcattacaggcatgagccagcatgcccagccatactactcatttttaaaaggccatcctggctgctccgttgaaaataaacaatgtgggagtaagggggcagcagagagaccagctagaaggttagtataggtcaaagatgaaggagagagtgggatagactggaagaaaagtggtatgttgaaggtagaacatgttgaagaataggatttccagatgaattgtacagaaagaaagcagtccagggtgatccctggatttttaatctgaaccactggaggaattggaagaatagagttgcctttaggtgagatggggaggactgagatcaataaattttggagaagcagagatcagtagtttgaattttggatttgttaagtttgagttttccattaaacgaacagacgaaaaccacaaacaacaacaaaaaaatgaagatagcttctgatagcaacatgtgtcatgaagaaaagaaaatagccatagagtgactgaggaggagtttcttagacaagcttgtcagtgaaagcgtctctgaagaaggggcatttgaactgagtcctgaatgatgaaatgaggccagccaaacaaaaatctggaagaaaatcatttttagttagagggtactacaaagataaaagcttggaggcaggaatatctgagagacagaaaagcggccaatgtgtctgaagtgggtaagatggagaagcagatagggaccagtcatacagtgccttgtcagtcacagtgaaggagtttggatgctattttatgcactgaaggaagcctttgggaggttttaagctagacgtagcatgatctgatttatgtattacaaagaaaactctggctcctggatggcgcatggatttgtattatactaattattattgctattattattacaggagacaaaagtagaagcaaggagagcaattagaagcttttacactaactgggcaatacattatggttctttccactacacagctcttcttctcttgcctctaagtcttttcttgatttcaacgaattcctggagtgagagaatgtgtattcttagtctctgtgccctctgacatgcccagcactatgtcctgcccacagcagaaggctcagtacttatttttgagtgaattatatggctcttctcatcaaggctgaggagcacatttttaaaaaatatatatttgtattttttgtacatagcatattgtctgtcccatagttaagactcaatgaatgtctgttggagtggggcaagacctcacttcagataaccagtttactgagagagatccttggataggcagaggcagcaaagagggtttgggccttgctagcatggagggtaggaggaaggcagggaaggtggagcatgttgagagaagagaggtggataaagtcacccagctctgagcaggccaagggtagatttggtctatattttaatttaaggctggcctggtttcattgatggtgatatgatccctatgtgtgggaataggtgaaatggtttgatcacaatgggaccataatccattacccaaagccttcattaaggagataattctgttcagcctcacacatagccaggcctacaggaatttgccatccagcaccaatactgatgctacaagtcccagcaaacacaggatggcaggccaaattcaagctttctggcactcctcctcttctggctgagcccgatgtcctcaggcctaatctcaggctggcagagagttaagtgctgggctgagtctgtgctttgctgcatgtgctggacttgcatttgattctgtccaaaagaggtctgtggaccagagggatgacatttggcaccaagaaagtaacccaggtgtctgtctctttttcagtcccaaagccttattcttttccctcaagtctatgcaatcgtttggaatccatcactcatcacctagaggtttcagtgcctttagattagggttctgcacccatagctgatgatccactggactaccacacttggcacctgaacagagccaacaggactggttacaaattcgttgttaattactgtgtgtaattacactagacccaaggttggagggagacaccctactctgttgttgtcttatatacgaattctgtataattttttaaaagcccaccatttttactttctaattaggatatggggatttggggcagcaacctttgttatttaatcatgctttttctggggaggggaggagaggaaaatattttcctttttctatcaacaattgctctcttttccgcattaagagggtggaaacttggttcctccctcatcccctttaggcaaagagtccatggctcagattcataaaggttgttgattttgactttgggttgccctactctgtttttccccacctttcatgctaactaacacaatacataagtcttcctagccagcactccctaagggtggggtagaaacacagcccattaaaaaaattttttttaaagctttgagtaatctcctttttatattcacccaaatgaaccaggttggtggcatattctcctttgtttttacatctgagacgtacttaaagtttaaatagtgccagaatgaatcacattgcttgtgttcttatacccagctgcaaatcatgccaggctcaagcccaggaacacaagattgcatgcacgcagagagggtcactgctgtcttatctactcctgctctgctaaaaaattgcatttatttatttatttgtttttgagatggagtcttgctctgttgcccaggctggagtggcagtggcatgatttcagctcactgcaacctctgcctcctgggttcaagcaattctcctgcctcagtctcccaagtagctgggactacagggggcctgccaccatgcctggctaatttttttgtatttttagtaaagacgggttttcaccatgttggccgggctggtctggaactcctgacctcaagtgatccacctgccccggcctcccaaagtgctgggattacaggcgtgagccaccacagctgaccagaaaattgcatttattatatactgccccgtccccatcttggcattctgatatcattgttgcccatcctttccttcccattgagagagtcaacatttcccctttcccatcctattctcattcctacttctagctttactatctactgtataacctgctgagcctcagtttcctcaggagtaaaatggagataataagaaacacctgccttgccagtgtcacacagctattgaggatcaaatgagataatgggataggaaagtgctttatttctacaaatgcaagctattgtcagtatcatttacttaactattcttcgttagctagctacgtagtctagcttaccttgtcgtgttccaaatgtggaaggcttgctgtttctggtaagttgaggaccatttcaaagcctcaagaaaatgattagaaatgaaccaatgtgagaacattttctttgttgggtagttcatccgattattatgtatgttgtttgtcttcttttaatttggatataggttgccttcagctgccagtactgtgaaataagagacgatattataaatcctttggagattaagcatttccatcctaatagctgctgctcaaaatttgatttccccttgattttcaataaaaggaggataacagaatgttattcattctaattataaagcaacgggaattctaggcattactttacaaatagctgctttcatgtcagaataatgagtgttgagaggaagagctctgagccctttactatattctttgttttcattatttttgtacctgtaaggaagatggacacattgagggacagagactccacagaagttgtctgagttgtgacagcttctcatcttctttttcatttccgcatttaacatattttctacaggctttgtaaagaaaataactcagtctatgtttacaattttcacactggctttaacttattttaacttattttatttttggttggtgttcaccctgggtttctgagggttttaagctgtctgcaaaaagctgctatctttgtctccaaagaatggttaagccacttttgtagaatcagaatgttaggtgaagcccatctttacataggaaaaagcaaaaggaactaatattaattgaatgttcactacatgctgggtctcatgcgaggctctttacacatatcattttacataatcctcatagcagctctatattatataatatgatctacatttttttcacaagtaaaaaaatatttaaagggagcaagttacatcatcagagcttaaagatacctgtgctatacccctataaaaaatctaattcactatgtgttttggtctatggcatttacatttttgaaacattttatctttcctaaattgtagttacttccccctaccttgacagatagatattgtattgtaaaaatacaatagaacaagtatcttttaaaaaatatgaaaacaaaacatttctagtcaattgttgaacttctttcaaagttctgggttaatatcaggtaggccttttactaatgcattttatttccttctgtctgccaccagctggagctactgtataaaagccaaccattttgagttcaaaatataactctgcaatatgaaggtagactacttttgctcctaaacaatttgagaataaattgcaaggaattaaagattgagaaatgcaatgtcatagatggttaagtaattgctattgatcacttactagttatgcaatttgggcaaattattttgactgtgactcccagtttagttagttatgaaatggttataactaccaatcttgtggggatcactgtagggaaaattaaatgttaagaaattagtaaggagcctaccacatagtatgtactccacatgtgttcattagtatcattggcagttattattattcattttgttatcagtatcacagccccagggatgctcaattcattgtaattacaattcatattattactcattatcgtgtgcctggcaaatggcaagtgccacttgacctcccattgctcagtgtgtgatttttgggtttcagtgtggtggactgtaggatggcacccacacaaagaggcattctgcttggatgtcaaaggaaaggaacctgtgagaggcatttttgaggttgatcgggtcattttgggtcagagcagtatttcccaatatatgttctgtaggattcttgtctcaatggatcaaataagaatgagaaatataccatatatatcccttttccacttcacggagccacagtgcatgtaagtatatttaaggctctgaaaaatactgtgagaatcaacccttcttctatttatacctaatcataagtgatttctccattttctccatgaaattttaaaaagttgatatgtaatatataaatttagatgaatataggtattcatgatttcatattatagaaaaatatgtttagaaatatggcttttaactcaaattttatgtcttttttccacttaaattttatgagaaagacatcagtgttttcctccttattagcaccacctttggagtcatgtaattttctggagcacttactggctcactggtttgagtcacagcggtttttaaatgtgtatgatttgccacagtagattttatttctagttataagtatccgtttgtataatacctgaattaaaaaattcatcctagtgtatttttataattgttataataaatgatctttaaaaggttttttttttaaaaaaaaaagcaagtaaaattgtgaggttgtaatttcagaaataattgtgaattttagttaaatttactggccttccatttaatactttttgtcaggtaacctctactaatttgacaccaaaactagcatttatttggttaatatgttcgccctaaataatacgtggttgataaagcaattataagagagcccagtaatacaggagctgctataagaactggaatatatgacaattctttcttttctgagggataatttgaggaaaaaccttgtctcatatctatatttacataacccagtgttgtttgtgtgtgaatgtgtatatgtgtgctgaaatacctgtttacgtgctagaaacaccctcgtggtaatggtggcatagtgggtaattgttttcatcaggatttttcttgagaataggctgctagcaagtgctgtatgtgacagaaactttggccaaaaatctgtatttataactatatcaatttcttgtattttcttgttcattttaacttgcttttccctcagaatttaatcaagtcttcaaaaaaaattatggcagagtcactcccatccctgagacacttggtcaggagctttacagaaggttagatactccattaaggttagaatggtggtggattggtggttagaccacagaagaacccccaggggaaggtaaaggcctggggataaagacatggccctttttattctgtcatccttctctccttgtaatctcagcactgatgaaccattagaatctccatggaaggttttaaaaaaacacatgctgtcacctgagaacatttaagtcagaatgtctgggagtggaccccaagcattagtgtctctcaaagtcttcttcaggcttaaaagggttaaaccttctagacaatcatcagtccttttgtgtcttcctcctaaaaatttgaacagtagtgacctattagaagtcaagagttggatctaaactgagaaagcatctgtgcattgtgctctatttcttcgtgtagcttctccccactcccaagtcactcctaatatttccattatagatttagacacagaaaacccagatgaagaagctgcatgctcccgatgggatgggatgatattggtaatgggaagtctcatttctgaattgaatttgagtgctgggaaagcatattggctaatgtttcagtcctttggttgaatttgtgtctttgacaacaaatgcttgtggttgaagttatacaattctcatctctttccatttcccctcactggggcaggcttcctctgtgtatttttttcctctgatgggaaagagcatctgcagctacttttcttctcagccaatagactaccttcttgtgagttataaagaggataatatgtgaatcagaagccaagactagaacccttctcctatggacatggtctattcaggaggcaattttagagataaaaatcaggaacaccagttcaataataataataataccttagaagttaacataccttttaaaacactttcatatttgtcccttttctcttgaacattccaaagagattgacaggacaaataccaatcgcctcattttaagattaagaaacgcagatgctgtgaagataactcagttccccatgataacatggacagggacagaggtcggactaataactggttcttcagtaattactcaccttgagcagctctgaaggtcatagagtagaccagtgagtggttcccaaacttggctgcttactagaatggcatgggaggattataaaataacacaattatgccaacttgcctctggggctctaattcaatacacctgggatggggctcagggaatctgtcatttaaaataatttcttcatagttgttctcaattttgactaaatattagaattacctggcagggaggggctttagaaaatcccactggagaatcacttgagcccaggaggttgaggctgcagtgagctgtgatcatgctgctgcacttcagcctgggtgacagagtgagactctgtttaaaaaacaaacaacagcaacaacaaaaaacatttcccagattgtattccagacaaattaagttagaatttctagtgctgggacccaggcatcagagggtttgtaagtatctccaggtgattccaatgtggaactaaggttgagaaacactgctatagactagagctttacaaactctgtttttcagaatttcagcacagcaagaaggaaaagacaagtgtagaattgtcacatgtctggagtaagaagaccaggattcaagtcctggctctgcctcttgggaatgtcacttcatctctctgagcctcagttttttatttcataaaatgaggaaaatgagcagtacatacctctcagggaggccatgagggttagatgggatattgcaggtggaataaccaagcaccagctattcctgctgttttccaaagaactccattaagattgtgtgtgtgtgtgtgtgtgcgtgtgtgtgtgtttccccctagatgttccctttgtgttcaaagtttccaccctcaaccttacacagagttagacttgtagggcatgaaacagagctccaaaagtttccactaatgaaataaggtttggaaattaaaggaatgtcgttaaggcttctttttgctgttgctattggcatgttcagccctctgaaccttggagttatgaatctgccagtttgctaaatgcatactcagaagggcaatttcgttttcagaatacaaggacactttagctattactactcaccctccccattgctcctttctagctctttgagctcccctgaatgtgcccccaagcacctcttgtttattcccattcagcaaattaaggaaggttctagtatgcgtttcttatgcagcaaatgctgagttcactggaactcaggcctgctggagaacaaattaacccatactataaacacccactctcttgcctgacaatttgcactggttagaacagaaccttctaatattaggaatggtggtgtgaggatcatttcataaccacaaacacagcaaaagcaatcatgaaattatggatgactcattgtcaaaggaacacttggatcattttgagcaaccccctaggttgatcaaatgaggaaacttctgcaccaaactcacaccgtgccattagtcttctctgtaattgattgttattgccagatttgtctcaaccacatcagacctatttttaaacctctcataattgccttctcactaagtaaaatattgttttttgagcacctttcttttatttcatatgtgtctatttgtttctttcttaaactggacagtgcattgagaacagagattatttcttatttatcctaaataaaatagtacctggtgcacagtaggttctagtacataaatgttaaatgtaccataaattgtacattctttcccaatgaaagaggttgtttctaacaagctaaggaaactaagatttgctttgtataccactttctctagggttccatgaacaaataaattttgccatgatatatacacatatatattttagagaaagaaaggagcggggaggaaaagggaatggagaggaggggaagggaggagagaggaacaaaaggaagggtgagagagagataatactaagttcttgatactatttaaggtgttgggatacaaaaatgaacaaaactgcccaaaatacttgctctcagagtttccactcttgcgtgtttatgtgtgtgtgtgtgtgtgtgcatgcatgtaatgaggaaacagacaaaaaacaaaaaagtaagtacaatataatagtgttagatcatgatcaatgctgtagagaaaaataagttagagtaagggaatagagagtgctggatggagtgggctattggattttaaaatggagtagacagggaaggcctcgctgtgaagatgaaacttgagcaaagacttggaggtgaggctgagagtcttgaagctatttgggtgaagaatattccaggtgggaggaataggaagtgtaaagtctctgaggtgagacagaaattcaggagtttccaggatgacgcaggcagttggcctggagtggagcagtgcaggttagagtgtaggataagagatcacgggagtggctggacagctgagtggcagtgttgggagagctttggagggacctgtcattgtaaagaccagcctttactctgactgagatgggaaaccattgaagaatttgatttgatttaaggttgaaagggttatttttgctgccaggataaaaatggtgggtgggaaggtaaagagggaaacaagaaaatcagttaggaaattatggtaataagacaggtgtctcagaccatgatgatagaagaggaagtagtgtatgttaaagaatctgaatagatgttgaagatagaactaatagaattaaccctcagattgatcatgaatcatgggaaagagtgaaaaattatcccaagttgtttgatctgaatagctcagtggatggatggagttgccagtaattgagaaagggattcctaaagaagaggttttgaggtaaaggggaagatgatctatctgtctctttctctttctctagctatttatctacttatctatctatgtatctgtctagctgtctacatacttacctgtctgtgtctatctatctatctatctatctatctaatcagatgttttatatatgaggtattaaaactcaagatgttaggtatctggctgaagatctcatagctaacatgggtgatgctgagtttgaagtgaagtattcctgtatagacttcaaaatccctagtttccctaccctaccagacctttttcatatatcattgcttttaatcttcacaacagcttttatccacactttaaaattataaaacctaaagtttagagagtttacacaactggcctaagtcatgcagctagtgagacagcagagattcaaacttggtctctgactccaaaattcatattctttttttttcacttttattttaggttcaggggtacatgtgcaggtttgttatataggtaaattgcatgtcacagggatttggcgtgcagattattttgtcatcaagcatagcaccaaataggtagttttttattcttacccgcttcccactctctaccctcaagtaggccccagtgtctgttgttgccttttttgtgtctatatatactcaagtgttcagctcccacttagaagtgagaacatgctatttgattttctgttcttgtgttagtttgcttatgataaaggcctccagctccatccatattacactataaaagacaagatattgttctttttatggctacatagtattccatggtatatatgtaccatattttctttatccattctactattgctgggcatttaggtttattccatgtctttgctattgtgaatagtgccacaatgaacatatacatgcatgtgtctttatggtagaacaatttacattccttcaggtatataattaataatgggatttgctgggtcaagtggtaattttgttttaagttctttgagaaattgccaaactgctttccatatggctgaactaatttacattcccaccggcagtgtataagcattcccttctctttacaacctcgtcagcatctgttattttttgactttttaatcatagccattctgactgggtgagatggtatctcactgtggttttgaattgcatttctctaatgattagtgatgttgagccttttttcacgtgcttgttgactgcatttatgtcttcttttgaaaagtgtctattcgtgttctttgcccactctgtgggctttttgtttgtggggttgttttttgcttgtaaatttgtttgagttccttatagattctggactttattgtcagatgcatagtttgtaaatattttctcccattctgtaggttgtctgtttactctgttgatagtttcttttgctgtgcagaaagtttttagtttaattaggttccatttgtcaatttttgctttcattgttattgcttttggcattttcatcatgaaatctttgtctgctcctatgtccagaatagtgttgcctaggttatcttccagggtttttatagttttgagttttacatttaagtctttaatccgtcttgagtttttgtgtatggtgtaaggaaggggtctaatttcaaacttctgcatgtgactagccagttatcacagcaccatttactgaatagggagtcctttcctcattacttgtttttgttgattttgtcaaagatcagatagttctaggtgtgtggcatagtttatgggttctctattccgttccatttgtctatatgtctgtttttgtaccagtaccatgctattttggttactgtaggcttgtagtataatttgaagttacgtagtgtgatgcttgttgttttgttctttttgcttaggattgctttggttatttgggctcctttttggttccgtatggattttagaatagtttttctcattctgtgaagaatgtcattggtagtttataggaatagcattgaatctataaattgcttcgggcagcatggccatttttatgatattgattcttcctatccataagcatggaatgtttttccatttatttgaataagctctcatttctttgagcagtgttttgtagttctccttgtagagatctttcacctccctggttagctgtattcctaggtgtttattctttttatgcctgttgtgaatggaactgcattcttcatttggctttcagtttagattttcttggtgtataggaatgctactgatttttgtacattgattttgtatcctgaaactttgctgaagttgtttatcagatctaggagcttttgggcagagactatgaggttttctaggtatagaatcatattgtctgcaaacagaaatagtttgacttcctctctttctatttggatgccttctttctttctttctttttttttttttttaaaagagtttcactcttgttgcccaggctgaagtgcagtggtgcaatctcagctcactgtaacccccacctcccagctacaagcgattctcctgcctcagcctcccaagtagctgagattacaggcatgtaccaccaggcccagctaattttgtaaatttttagtagggattgggtttcaccatgttggtcaggctggtctcgagctcctgacctcaagtgatccacccatctcggcctcccaaagtgttgggattacatttgtgagccactgcgcctgacctggattccttttatttctttctgttgcctgattgttctggttaggacttccactactatgttgaataggagtaatgagagagggcatccttgtcttgttcaaattttcagggggtttgcttccagcttttgcctattcagtatgatattggcttggatttttcatagctgactcttactatttttatgtatgttcctccaatgcttaatttgttgagggattataacatgaagagatgttgaattttattgaaagccttttctgtatttattgagacgatcatgtggtttctgtttttagttctgtttatatagtggatcacatttattgatttgcatatgttgaaccaaccttgcatcccagagataaggcctacttgattgtggtggattagctttttgatgtgttgctgggtttgctttgccagtattttgttgaggatttttgcatctatttccattaaggatattggcctgaagttttcctttttagttgtgtctctgccaggtttgggtatcaggatgatactgacttcacttagagaggagtccctcctcctcaattttttggaatagtttcagtaggaatggtaccagttcttcttcatacatctggtagaatttggctgtgaatctggtcctgggctttttctggttggttggctttctttctacgaaactatcctccctattatttatgccttgcaaaaaggtggtaaagattaaatgtatgtaacatacccagcatatacaacgtctggtgcatagtatatttaaattaaaggatagctattagagattaatatagatttcatttgtgtatattgtgcttctacctaagggaactataaattcattaaaatacgggacttaaaataattatttagtggcctcaaggacatcataaatatttattatttattgagtatgtacaactactatatttccataataattagaaataataactttttaaaaaacaaagatgatagcaaccacaaaaaacatttattgagtgaatcacgttgggtacaaatgagtatattgtaaaaagtataccatcaacacactgacaatctttatcagtatttcctagtagaagaaacatgaaagtcggagcaggtaggactaaagaatgctagtgtacacaggaccatcagatgccttttagtagaagaggtctagagccttgcggaagagcttcccaccctgtacagagaatgtgttgcctgttctttgctttctgaaaactcttgcctattatcactctgtgattaattctgcactaggctgtctagagctttcacatttgggatcattttatccccgtctctcaaataagttcatgggttcattatgtcgcacatatcttatcttacatgcaaatgtaaatctgttgcacccttaactcacaggtctgagtattttttctaccacacaaagttttttgcaaaaattaaaaaaattgataacattaaatggttacctgagaaaagaagaaagtcctcaaacccttcactttaaacaactagaaaaataaaactaaaataaacccaaacaagcagatggaagaatataacaaagacaagagcagagagcaattaaattaaaaccagaaaaacaatagaaaaaaataaataaaaacaaaagctgattttttgacattaatgacattagcaaaactgaccaaaaaaagagataagccataaattattaatatcaagaatgaaagagggggtatcattacagatcccataaacactaaacagataataaaggaatactaagaacaactctatagacatagatttgaaaacctagatgaaattaaattaaaattatattagtgaactgaactttcagttaaaagtttccaaaaaagcaaccttctagctcagatggttacactggcaaattctaccaattatttgtggaaaattaataccaattccatacaatctcttccagaaataagaagagaacactctcaatttatgaggccagcattaccctgatgcaaaagacagcgtaagaaaaaaatcttttaaacacaaccaaatatacctaattaacataaatgtaaaaatcttcagtaaaatattaaccagctgaattcttaaacatataaaaacaataataatacaccatgaccaagtagagattgtagggggaatataagactggctcaatactggaaaatttttcattgtagtacaccatattaacagtctaaagaagaaaaatcacatgatcatatcaattgttgcaggaaaagtatttgacaaaattcaacattcattcgtgataaagactctctgcaaactagaaataaaaactttctcaacctaataaaaggcatacagaaaagctaacattatacttaatggtgaaagatgaatgctttttccctcaatttaggaataaggcaaggatattgatactttttgtctctgtgtccccacctaaatctcaccttgaattgtagttcccataatccccatgtatcatgggagggacccagtgggaggtaatttaatcatggaggtgtttaccctcatgttgttcttgtgatagggagtgagttctcatgagatctgatggttttatatggcgattttttcccttttgctcagcacttctccttcctgcccttgtatgaagaaggatgtgtttgcttccccttgtgccatgattgtaaatttcctgaggcctcctcagccctgcagaactgtgagtcaattaaacttctttcctttataaattacccagtcttgggtatgtttttattagcagcatgagaacagactaatacagatatctactcccatcattcaacaaacattttactgggtgccctatccagttaataaagttaggaaattaaataaaaggcatgcagattttcagatgatatgattgtctatgccaaaaatttcaaggaattcataagcaaattccaagtactaaaaagtgagtttaatgagattacagggtacagggttcaacacacaagaatcaaatgtatttctttatactagcaatgaataattggcaactaaacatttttaaaaaatttacattagctccaaaaaatgaaacacataggtgtaagtgaaacaaagcatgaacagggtctgtatgctgaaaattacaaaaacttagtgaaataaagcaaaaaagacctaaataaatggagagatacacagttttatggattgaaagaattaacatagaaaaaatgtaactcagctgggcgcagtggctcatgcctgtaatcccagcactttgggaggctgaggcggatggatcacctgagctcgggagttcgagaccaccctgaccaacatagagaaaccctgtctctactaaaaatacaaaattagccaggcatggtggctcatgcctgtaatcccagctacggaggctgaggcaggagaatcacttgaacccgggaggcagaggttgcagtgagctgagactgtgccatttcactccagcctggacaacaagagcgaaactcagtctcaaaaaaaaaaaaagaaagaaaagaaaatatgtaactctgcacaaattgatctatagatttaatgcaattccaagcaaacctcaggagtatttttacagatccagacaagctgattctaaaatttatatggaaagtcaagggaactgtaataaccaaaacaattttgaagcagactagtaaagttggagaaatcacactatcagattttaagatttaatataaagctgtagcaatcaattcagtgtgatattggcaaaaggatagacatagatcagtggaacagagaagccagaagcagacccacacaaatatattctagttatttttcagaaagttgcaaaagcaatttcataaaggaatgatagccattcaacaaatggtgttggaacagccagacaatcatgggcaaaaaaatgaaccttcatcttaatttcaaatcttacataagaattaactaaaagatttacatgtaaaatacaaaattatacaaatttaaaggaaaaaatttaggagaaaaactggcccagagttagacaaagagttattagacatgataccaagagcacaatcatgaaagaaaagatttatgtattggatttcaacaaaatgaaaacttttgctctatcaaagacactgtataagaatgaaaagacaggctacagactgggataaaatatttgcaaatcacatatccaataaaggacttgtatctggaacacaaaaaaactctcataacccaaccataagaaaataaactacccacattaaagaaagtactgcgttcatcaactagaagtctcaatatagtaaagatttagttctcctcaaattgattcatagattcaactcaattcaaatcaaaatcccaacaggactttttgtaggtatataaagctgattctggaatttatatgaaaagaccgtatagcatagggacaatagttaaaaatactgtattgtatacttgcaatctgctaagaagatagatcttaaatctcctcactatacacatacacaaatagtaactgtagaggtaatagatgtgttcattatggggaatgtggtcattatttcgcaatgtatacatatatcagaacatcaagttgtataccttaaatatatgctattttttcatgtcagtgatagttcaataaaactgttgaaaagtagaaaataaaaataggttatgtgaaagacaaaggaactaaaatatgacaaacaatttgggcaaaaggaatgcaaataagcaaattaacaaatgttaatttgctattcagaaaatgaaagttaaaaccaccatgaggtaccatggcacatctattagaatagctgaaataaaaaaatattgacaagggctggtagggatgtggagcaactggaacttgtatacattgctggtagcaaaatgaaaaacagccactctggataacagtttggcagtctcttgtaaaactaaacaaacactttccatatgacccagcagtcccatttctaggtacttgccttaaataaatgaaaacatgttcacacaaaaacctgtacatgaatgtttatagcagctctattcataatcacccaaaatggaaatacctaaatgtctttcaacaagtgaatgtataaacaatctctgttacatttatccaacggaatactactcagcaataaaaggaacaaactatttgtttacaaaacaacttggatgattctgaaaggtattatagtagttggaagaagccagtttcatgaggctgcatacgtataattagttccattcatatgccattttctaaaagacagaactgtaatgatagggaaaagatcagtcatttccagggattaggaatagagagaggatatgactacaaaagggataacaagagaatttatcttttggttatatggaactcttctgtatcattattgtggaggtagttacagaaacctatatatgtgttaaactctaaaactggacacaaaaacatcagttacattgtatggtaatctaaaaataaaatatttacttgaacttttggtgctgaagaacttgatttgtgtcttaaaatcagactttccaaattttggtttcatttgctccctgggttgtctgtattcatctatcaccagcagagagacagagagagaaagagggagaaagaaagttgattagtttatatacttatacacactaatgaagttggaaaaactttgggtgaaatataatgattttgtgggatgatttatgcattaaggtatatgtggaatatttctggtagagatatttgttatagatgtatctaaaattcaagtaagggtggggaattttatttagaaagtaagagatgtagatgtagatgaaagagaatacatagggcgagaaaaaaaactgagaatagaactcaaggatactaatatttgagggaaaatgagaaaaggaactcataaaggaactcatgagtgtaggaggagaaacagggcattgaagaaaagaaaaaggccatggaggctataatagttcattctcacactgctatgaagaactacccgagactgggtaaattataaaggaaagaggtttaattgactcacagttccacagggctggggaggcctgtggaaacttacaatcatagcagaaaaggaagcaaacacatccttcttcacatggtagcaggaaggagaagaatgagagccaagcaatgggggatacccttataaaaccatcagatctcctgagaacttactttcaggagaataccatggagaagctgcccctatgactaaattacctccaaccgggcccctcccaccagacgtggggattataggaactataattcaagatgagatttggatggggacacatatcagaggccaagaaagttgagaaagaagaggcagcactctccaatggcatggagaagttgagtaagatgaggtttgaaaagtctcagtgtgtttgtccaatagaacagcagttctcaacctttttggcaccaaggaccggttttgtggaatataattttttcatggaggtgaggggatgggatggtttggggatgaaactgttctgcctcagatcatcaggcattatttagattctcagaaggaatggacaacctagatctcccacatgcacatttcacaatagagttcacactcctatgagaatctaatgcccagctgatctgacaggaggcagagctcaggcagtaatgctcgctggcccactgctcacctcatgctgtgcatctcaatttttaacaggccatggaccagtatctgtcagtgtcccagtggttggggacccctgctctagaaggtcatcggtaatgttgcaaaagcacttttagggttgatgtgggggcaagaatcttagggacatagctttagaaatacatgagaggtaaggaagtgccctcataaagctttggcttacctgtatttggattcttgaataaagttttggtgggaagattactcttatgtcaaatcattaggccaagctaagtaagaattttagtgaaattttgcatttctggcaaaacttaaagccaagtaatagtggcctggacttaagctttagacataatctttttttttttttggtagtactcaaaattaataagtcagttcaacactagctgagtacctacagtgttgcagatggtgaaaggtatacaaacatgtacaagaaataagaactgaatttatttaacccaaccttctcattttaaagataaagaagctgagacttaggaaggaaataacttggcccaaggacatgcttaatctgcctccctcctctcccattgccatattttgctagttccccaatttttccctttacataagctactctccaccacaaatatagtacacatgcagaagatactcataactacatggctagtccatttctaaatgtattcatgtagtttgttgaatcagatttttttttttttttttttgagacagagtcttgctctgtcacccaggctggagtgcagtggtaagatctcagctcactgaaacctctgcttcccgggttcaagtgatccttgtgcctcagcctcctgagtagctgggattacaggcatgcgccaccatgcccagctagtttttgtatttatagtagagactgagtttcaccatgttggcgaggctggtctcgaactcctgacctcaagtgatctgcccacctcagcttcccaaagtgttgggattacaggcatgagccaccgcacctggccttgaatcagatatttatgagaaaagagaaagtacctacctaggcagtagctggcaacaaattcagtgtgcagagggtatgattgcaaatggttgtgtaaaggaagaagaggtattaggaaatagattgccttttgaaaacaaaacaagacctttggcagaaaaatattggggtagataggtacatattaacagatatttgactctctccctacctggggattattcttctagaattctttgctaaaactctaaaggattcttggtttgctctaatgagacaggcagtttctttaccatacttccagttagtgttttgagggaacatggaataggacaatatggctggagtttgcctccaagatgaattggagaggaagagtggatggcctttaaagcaagactaagtttagaagcacagtgaataagcatgttcatgctcaggttcggtgggtggatgtctgcttgagttcattcagttacttatggggtgtgtaaccttaaaaaagtatcttgacctctttaagactcagtttccccctctgtaaaatgggttccttgtgagtacaaaagatatacaatatacctagtgcagtgccagacttattaaacaaaatacttcatattagattttaattttatgattaattagaaatgtggttctattctttaggaaatggccaaggacacggcaagccaacattttcagacagaaatagttcctgtcttttgtaaattgatctttgtgtggcttcagctggcatgactaggcccctcgatgggaattgcagagatatttagagttgaatgcaaagcctgagctcaaatgggataaatgatgaagcactactaaagatataaatggataggcacactacaccagggggctggtgggtgggagtggaggcattatttgtcaagtggcatcaatgtacacagctgactgtgtctgtgtgaggagaggagatggcagttgctgttgcaaaagggacctggaaacagagagcagcatgagcaaactgctgatcaggtttctttaggaggatgaggggattataatgttctgagagattactgaagcttagaaagaggaagtagtagaatcacatcttcctgcccctgggaatttatgctgctggataccatgtttccaatgcttcttattttatccattcctttacaaagttattttaaaataaagatgaaaacataggtgaaaaaatgtctaacttgtttgtttattgtagatttactcttggattccaaagtaaagaggcaatggcacagggggtgctgtttatattcctttcatcaatcattgctgcaacttagatatttagtatatttatgcctatacacagatacatatgggcaaaagatattctataaaattcatttatgaggactcacagttgcacctctcagaaaaatttctcctccagtcattaaaaaaatttttttatgggcttgtaattcagttacctcttccctggaagtaaaattccagggtagaccagaaaactcactaacaaggcccagtggtcttaaaccccggctgcatgcaaaatcagcagtaaacttaaaacaaacaaacaaaaacaaaaacaaaaacaaaaaaagtatgtgcctggcctgggtctcattccagagcatttaagttagactctctagaagtaattgtcttcagtttacgctataaaaatttaagattttaaaaaaccaggccgggcatggtggctcatgcctgtaatcccagcactttgggaggccgaggtgggcagatcactttaggtcaggagttcgagaccagcctggccaacatggtaaaacaccatctctactaaaaatacaaaaatcagccaggcttggtgacgcatgcctgtaatcccagctacttcggagactgaggcatgggaatcacctgaacctgggaagcagaggttgcagtgagctgagatcctaccactgcactccagcctgggtgacagagtgagactccatctcaaaaaataataataaaaataaaattcaagttggcacaacatttttagctcttataacaaaattcttgacttaatgaatcttctgtgaataactttgggagtattaaaactttgtaaactctgacccagcatatccatcctgggtaatagagcaggaggaaatggtcatggatgcatgcaaaaatgtatcaatcttgagtcattacaataatacttttaataataaaaatcagacgcattataaatgtgcaataagaagagatttttctttcaagcatggtacatccatttagaggtctactttctagccattaaaaataatgtaagagaagaatttaatgcatataacatgcatgcaattcataaagagaaaagaaagatattattcaagtatggggagatatacttctttgaaaaaaatccatttgaatagaaaaaagaccaaatgaatatattccaaaatagtaatatgcattataaagaaatagcatgagaaatgtgatgatttttatactcttccttaggcctcatattatttttcagattttctatactaagcatgaattatttttataaagagaaaaatgctattaaattaaaagcagttatagaactctaaagatttatattaaaatactactctgtggagctgcccacttcatatgtttaaagtaactgacaccattttgcatatgctacctgtgtgaatagattccataaataaaataggcttataaaaacactgttgatttttgtgtgaaagtaaccataggtaagtccttcttcaatgtatgactttgatttaggaagtggagtctggaacaactggcttaatttgacaaaggtagaggaagatgaaattttatgctctgtgattggtttttgcagttgttctgaactaataggttgctttcttctttaatgtgttataatgaggaacagctgctatgagctgtgcagttcgtttttttccctcctttcaaacctccatctcctgaagttaaatcaatctctgtaattaaagaattggtgaaataggcaaggaggtgggctggcaaatttatatattctgttttaaaatgtttaatttaagtatcatgtggaagaactggactgttgtgacatggtggaataacatttacattttccaaaaaagtgtctttcaacatgtgttgttagacctggagaacacaataatattaattaattgggcattcgatgtaaaccacaaaagtgagcagactcacttctccttcaagttgatgggagttcagatcaaccaagaagctaaagatgagatgaattcaagactacactgtttgaagatatatcattatcccttgtgaaagagtaggtgaggtgtggttgatcctagtaacttcatggactaaaaggaaaaaaaaaagtctcattccttgagtatatttcctagttgttttggtgttttgataggtttgttcccaaactgaactgaaccagaaagcccctatgacacctctttccaagggaaagatgcacctagaaggagctgggcctctggtgacagctggaggagtcattctgaagcctcacctcccacatcactgtcatctctaatagtggagactggttgaacttcggaaagggaaaaatcgatggctgaagatgagccttggtgattgtattagtcaggattctccagagaaccagaactaattggaggcccagaagatccatgattgtttctttgcaaactggagaaccagaaacgccagtggtgcagtttggtccatgtccaaaggcctgagaaccaggatgaggtggctgatgctagtcctggagtctgaagacctgagaaccaggcgctctgatgtcgaagggcaggagaaaatggatatcccagctcaagaagagggcaaattcttcctttctccaccttttagttctatgtgtgccctcaacagattgggaaccttaatgggggtgattattcttatcctgtgaggtaagaattagtgaaagtgattattcttaccctatcaattcaaatgctaatctcttctggaaacactctcacagacacacccagaaataatgttttaccaactatcttggcatcctttagcccaatcaagttaacacataaaattaatcatcacaagttcactaaccccttgtcaagtccgcacttatgcatatctctttaaaccatacttaatctccaagtaaatacaataacaaggtcaaaatcccatgtaacatcatacaactaacctgtgtacaaccaaaaacacactaatcccttccctcaaagaggaggtaaaattcttgagtgatgttttctcttctcctggaatcctgtaacttaaatactatgatgtaaaattaacaccatttaaatatggatgtaaagtcaatatatcttttgttactatgataagggaataggaaagaatacaaagatattttctttacacatacacacatgcacaaatatatttataacagaaggagaatatatgcaggacaattacagttctcatttctgtaactggttacatggttgtaagctgatatttataaggaccttcttctactaccattctgtattctcactgctttcagcaagcacctcagctggttgtggttctttaccacaggataaaggtgacccaaacctttattcttgaagggtctgggccattcatagttttgcctggactgggttgttgtagttcctattgaccttaatcacaggacatggcaatactcagaaactctttaagaaatctgtattccacacatactcttctttacctccattgtttaggagtagttcaattttggtggtttggatcaatcactccagccaacactgtaactcccttctttgcttattgacatagaggcattaggagcccaacatggttgggtggcagtcttaacttccagttcaatggagtcattgttgtatctcctggtggaagcagtcttccctctagaactatgacctctaggccagtagagcataaagtcatggaaacaagaagcaaaaattttgccagtgtgtctccagggataatagtgaatgttgccacaaccatgttcaccccttgattcctggacctgtgattctggctatgggagaaacagcaccatatattggttgctgattcaaagtatatggagccttatggaggaccatgcccaagcactgcacctagctggagctgtaacgtgagtctcaaaaggccattccaccattttatcaagacagctgcttcaggatggtagggaacaaggtaacaccagtgaattccctgagtgtgggcccattgctgcaattcttttgctgtgatcagaagtaatgcctggtagaataccatgatggtggataaggcattttgtaaatccatggacagtagttttgtgtgcagggaaggaaaatccatatgcactgttgtctattccagtaaggacaaaatgctgctccttccatggtagaagtggtcagtgtaatgaatctgccaccaggtagctggctaattaccctggagaatggtgccatactggaggctctgtgttggtccctgctgctgacacattaggcacttagcactggccataacaaggtcagcctaggtgagcggaagtccatgttgctaagttcattcatgacctccatccctgccaccatggccactttgttcatgagcccactgcgtgatgacaggagtagcaagggaaagaggctgattagtatccacagaacaggtcatcctattcacttgactattaaaataccctttggccgaagtcaccttttggtgagcattcttgtgggctacaaatatcttcatattttttgctcaaagagatctatccatatatctcttccccaaatttcttgtcaccaattttctaattatgtaccttccaagttcctgaccatccagccaaaccattgactatagttcttcaatcagtatataatcacatgtctggacatttttccttttaagcaaagtgcacaaccaagtgcactgcctgaaattctgcccactgggagaatatcccttcaacactgcctttcagagatgtcccagagagatgttatagtgctacagctgtccactcttgggtagtgcctgtatatcacacagaaccatctgtaaaccatagccaagtcttcacttcctctgtcaactgactgtggggaactccccatggagccatgggtgcagctggaagaagagaaggcagtagcaggaatgaggaccatggatcacttgatgtgacttctttgtgtcttcagggcttgcttgggcccaattacatatataccacttccacttgatgatagagtgttgctgtgcatgcccaattttatgatttgatgggtcagataatacccagttcatgataggcagctcaggttgcgtagtaacttgttgactcctggtcaagtattcagtttccactaaagcccagtagcaggcccagagctgtctctcaaaagaagaatcattacctgcagatgatggcatagctttgctctaaaatcctgaaggcttaaactgcaattcacctatgggagcttgccaaaggatctaaacagcatccctgtctgccattgacacctcaagtaccattggatctgctggatcatatggcctaagtggcagagcagcttacgtagtctcctggatctgttgcagagccttttcctgttctgggacctactcaaaactagtagttttttttgagtcagttggtaaatgggccagaataacatgcttaaataagaaatgcattgcctccaaaatccacataggcccgctagccattgtgccttttttttttttggttagaggccaggtgcaacaacttagccttctccttggaagggctatttcaacatgcccacaccatagacccctagaaatttaactgaggtagatagatcacacctaaactttaattggatttatatcccaccctgtaacacgtaaatgattaccaatcaaatctaaagcggttgctactttttgctcactaggtccaatcagcataatgtcatcaacgtaatgaaccagtatgatgtcttgtggaaggggaaggtgatcaagatccctgtgtgcttgacattgtctaaattatgacatataactggagagttaatataaccctgaggtaggaaaatgaaggtgtattgctggccttgccagctgaaagaaaactgcttctggtgggccttattgacagagatggagaagggggcatctgccagatgatagctacataccaggtaccaaggggtgtgttactttgctcaagcagtgaaactaaatctagtacagcagctgcaattgtagtcaccacttggttaagcttaccataatccactgttattctccaagctccatctgtcttctgcatagaccaaataggagtgttgaatgggaatgtgatgggaatcgccacccctgcatctttcaagtccttaacggtagcactaatctctgcagtccctccaggaatgcagtattgctttttatttactattttttgaggtggaagcaattctaggaactgcttctccttggccctcttcatcatagcccccagtccacaagtcaaggaaccaatgtggagattctgccagtggctaagtatgtcattccaattatttcttctggaactgggaaataactacaggatggattctgacacctattgtgagatgaacttgagctaaaacttccattgatcacctgacctatataagcccctcctctgaatgagaggctacagtgacattttgggtttcctggaatcagtgtcagttcaaatctagtgttcagtagtcccccaaaggtctgattatatgttttaccctggtgcacagttaccctgctaaaattctgtaggtcctttcggagaaagctgggagaaagattcacagtataaattttcatttgagggcttctgggtctgtaaactggctcaagtctgaaaattgattgaggggctctgactctctaattttatgattcaatttaaactttggttcatttgacctggaacttttctgtttatacagatcaagtaaaaatttaataggctttctatctatttcacttctaggaacaccatgattaactagcccacgccacagatctgtgtgagtcagactattctaattgctgctttgactctgccacccaacacagtaactacgcccacctcgcctttggcagtggaatgctgccacttggcctcaccactctggatccaattactcccattgcatttagattttccaattaagtggctgtggttcccactataaggtctggcctacaaagagtaatcacagagttcttcaagaatactggggcttcctttagtaatttatttcttaaagtattgataaaagtgtgtcttctagatcttctcagtgttggggaatatatcataaattataaatccactctttctaatctccctaagcctgtgaatcccttcctctacattaaacctagggagagccgacatttccaatttgcttacaatgggccatcttttgattgtgtttcagccaaccaatcaaccacattattagagccttaactcccaagctgtaatattaaatgcagaatctctgcttagtgggcccacatcaataaatttgacctgatccaacattatgttccttccttcattatcccacacccttaatatcaattcccagacatgtttcctagatttctgcttgtataaattagaaaggttaggtagttcttttggaatatagcatgcctcctcatgggccacactttgtacttcccctttaagggcctgctagggtcttgagtctagttatttgtctagaagaaaagaggagtgttggaggtagctcttgtggagaatcagcagtgtcttgcatggcagctgcctcagaggaggccattcctcaggcaatgcagggctaatcccttcagatggaggtaaatgactcagaccaatgtgaatgaggagatggctcctactggaggtggggatgctgttgacactgggagtagggggtcatttctgctggtattagggatgccacttttgctgggattagggagaccaactactctgggggtgggacctaagctctactgagggtggggagacttctttcactgccaaaatagataatcacagtttagggactcagtgtccccagcttctttagagtcttcccacatacccccatcccaacttgcaagatcccattttttcacagtgtcctcactttacagtatataccttgtgaggctgagagtttcacttgtgttgtaattcagccaattacaggatgagatcctacatttgattttcagcaattttagccctgcactgcaggagataatgctgtccctcagggcacacctataagctcttaggtcatttatgtagcacttgaggtgggaatttgaatcccttagctcatttttttttttgtaaactactttttccagtgattcagtgtcatattccttagttttccaaaagtgttcaaagctaatatatacagagttactaagctccttgcatcttagaagtgtttgattaggaatatccatattttgtatatatctacagtttgtgccacgaactgtttgcctctttactactggaaaaggaatcattatcatctttaaactgtgtcagattagaaagccaatttcagaaactgcagaatgattttttttttaaaaaaccctcacttttgaaaatctgtttctccagagccaatctcaataccaaaatctgtattagccaacgttctccagagaaacagaaccaatatgtactatgtggtggtggtgtgtgtgtgtgtgtgtgtgtgtgtatgtatgtgtgtgtagtcatcccttggtatctgtggggtattggtttcaggaccctctagtggataccaaaatctgaagatgctcaagtcctttatgtgaaattatgtagaatctgcatataacccacataatcctcccatatactttaagtcatctctagattactgactatctaatattgtattgcttagggaataatgatgtgacaaaagtctgtatatgttcagtacagatgcaaccatccatttttttctgaatatttttggtttgcaattggttgaatctacagatttggaacccacagatacagagggctgactagagaaccaataaaagccagtggtataattcagttttaagtacagaggcctaagaaccaaagaaccgatgatgtaactcccagtctaagtccaaaggcctgagaactagggtggttggttggggtggtggctgatgttagtcagtcctagagtctgaaggcctgagaacaaggagctgtccaagggcaggagaagatggatgtcccagctaaagaaagagataatttgtcctgattctgcctttttgttttatgtgggccctcaatggaatggataatgcccacccacataggtgagtgtgatcttctttacctagtctaccaattcagatgctaatctcttctggaaacaccctcagagatacacccataaataatgtgttgccagctatctgggcgtctcttaccccagttaagttgacatataaagttaagaggtcatctgcttacctgtgccatttcccagttgatgaagcttgccacagtttatccaagaatacacggagtgggaaaggtagaatttagtttgcccaggtaatgttctcgcagtgatttccctctgggcctcccaccaacgctgtctcttgtgatgaaactggggagaactgtagggaggaagataatttctgcctctcaaaactcacaggctgatggaaggagatcccataaagcatttattgtagaaaaggaagaagtggcagaggaaaatgctggagaaaagaagatagaagaacaaagcaattgccaagcccaggtgtaaggtgaccaggtctgcctgggatgatggcagcttgaatggtgaggaaagacaaaatgtgagaagaacatgtaagaagatttgaccatgtttgtatagagactatcttccttggttcatccttaaatgaaatgaaaatcctgtagcaccatttctagcatttggtaagtactcaagaaacgtgagcttttactgaccatagactgaacatataggctactaatgagaaaattcctatacttgaagaagcctaacttgctaggccaattttatatttttgctgggctgccatagggttagaattaaaggcacattaaaatatgtattaaaaggccaatagtggtggctcatgcctgtagtcctagcactttaggagggtgagacaggtggaacacttgaggagtttaagaccagtctgggcaacatggtgaaaccctgtctctacaaaaaatacaaaaattagcctggcatagtggtgcatgcctatagtcccagctatttggaggtgagatgattgcttgagcctggaagtcgaggctacagtgagctatgatcatgccactgcactccagcctaggcaacagagtgagaccctgtcccccccaaaaaattgtattaaagatacattataatgtgaatgtgtctgtagtatacattaagtctttatgtctgtaaagacatgccacattctttctttttctctctcagcatatgtacacacatacatacacacttaaatctctgtgtgtgtacgtgtgtgtacatatgtacacaaatggcacattagctttatctagaaatggatacatatgcattaagctactgtaaagtttatgcacacttaaaggcacattaattctatccaggcatatttctctataatgtactgtatatctgtatgtatactaatacattattctatcatccatcataaatttctggcccccccacaggaaatgaccttgtattttatgatcaatgcaaggacaaaagattttgcatccttaaattatattcaatacatactctgtgaataaaaatgccataacttaaaatattgcccttggtatttgcatagtgcctttcattactgttgaacaaaaactaatctatgcattcattctgtggagataagttgtataaatgtgataagtgagatattttcttccttagtccttaaaatgatagtgtaaggaaatggaattcttttgcctggagatgagattacccaagggtataatatttccagaatggatactatgaagttgtaggaagttgctgtatctcattttcagtgaggccacaagagaaaattgttgtagcaagaagttgtggtttaggctttaaaatgcctttgctgtgaggttaacatagaaggaatgggccattaaagaagtttgtatattcttccttttttcgatgtttcaataaagtaaccagttctttgaggttaagtcagtctgttcgacagcctattctaagaagaaatggcgccttcctacccacagtgggtgagtctagggaagtagttttatatcaccacaaccctgatacacctttctttcccccacaacatgtgctgattggaccagggatgggaattgtaatgacgggaaaccaattagaaaactggtcagagacaccatgtagcctgacattaaagaatgaactgcacctatcctgtttactttttcagtaaattactctaagagaaaatgtattttaacaatgggagctgaagttgaagggaagccatgaaatagaggggagttgtctctagccatttgcttagaaaagtagcagggacacacacacacacacacacaaaataaaaacaataagacataagacctacttactatttgataacacaacagggtgactatagtcaataatttaattgtacatttataaataactaaaagagtataactgattgtttgtaacacaatggataaatagttgaggggatgggtactccattttccacgatgtgattattacgcattgcatgcccgtatcaaagtatctcatgcaccccataaatatatgcattatataccccataaacctaatatgtacccacaaaaattaaaaataaaaatgaaaaaagtagcaggtaatattaacaagcagaggaaattatgactagaaagcggaggttggatagacgcaggagagagaaaaatgagcaagaatgctcatgtgactaatgagagacctgctttaattcgtgtcttcccagacctcatgccatgcaccctattcccattttttcttaaagaacttgagagtctgtatcagttagatgatttgggctgcaagaaataaaaatagtcatctgaaagcagtgtaaactagggacatttattatctcacataacatgaagtgtggagaccagcacggttttaggctgtctcagtgatgtcatcagggatacagttccgttctatctttcctatgtgctgtactcatcattttggctgactttggtgcattcttgtgaaattgagttgcttctcagctttctccacggagggcttacattcagctcattcagctttcttgggtctgcaagtcagttctacttgtctgtatgcttcctactttgtaaaattttcttggtcttctctcccctcctattttcctcattattacaaatttatgccttaaaggaaataatactattattttagtggtgttttgagaggaaccagtggtaaatacatgtatttaatcatttaatctgatctgccaactttattgtgaagtcccttgcgtctctcttttaagatgaaagacatttacttgagaagttttctcactagacttcccctcccatatcattggccaagatggagctatatgctgtatgcagaagacagagtcataagccaatcactggcaaggggaatgaggtcactttggcttggacaaattgccattcacttttggcaatgagaaggagcaccttcctttgagcacatagctgtatggaggatgaacaactagagaatgatcttcaaaatactgaacaatggatggagcatggaccaaccagtcaaaatgggcatgctacccaaatagagcaaagaaaaccctataaatacccaaatgaaatctggttcaaccaacaaggaagaagatggaaacaaaagtcttggtttctagcacctaaataacaattgcagaaaataaagtacacaactgcttcagaggaaggaccaaatcacctcataaggaccattccagcctgtaaatttttacgcagaagagaattgttccatttaatgaatattttattaaaggagtctacaacctgaactgagtatcactgcagggagccagagtacatgtaaattacagggttgtgggcactttccaattctggcacaacctttatgtaaaaggttaccctagtcctttaagagtgaacttttagagaaaggttctacctcaatggtatttgcaactaattggctttatcttacttgccagctcttgattgatgaagctggctgaagggttggattgaatagaactcggaggttgagttggaatcagctggaaagagcactatgttcatttggcagtgtgtgtgtgtgtgtgtgtgtgtgtgtgtgtgtgtgtgtttattggcatggggaatggcagcacttgggccatgtattttctctcttctttcaggtcagttttgtatgggctgagactccatggagtcacctaagctggaggcttccaaattacaaactgtacctaagacaaggagacgacctttcttagtgggtgacattcttagtctaggaagaggagcattcctgtggaagagttctcagggatttgggtaacatcagagtcagaaggaaaaggaagttttgttgagtttcatatttgagaagaaagctagaaggcagaagtccaagggtgtgtcagttattttgaaaagtaaaacatgaagaagagaagtataaaatatttccaaagctctgggtttaatgacaccaagtttgctagttttgtttcctggtggtaattagcagtcaaacaacatgtgtgctttgggtcatcaaatattattgtgggtagggagagcagccagtcttgagcaacatgatttcaagggattgagtgagtgatgaaaattattgcaggataggaaagcaagttggatttctggtaactacagtaaagaggaaaagagaatgtgaagaatagactgacagggaagctctaggttgagcgacagaaaggcctgtgtggaggtttccaaatatagtgccttatactactcaaagcccttcctattgtcttgtataattctcttactactctttggattgggtacacttgatatttttagttctgtttttctgaataagttaattttcagagaaggtaaagtaacccaaaagtacacagctagatggaagctgatctaggaccagaaatgagttctttcaacttatagatcagggcctttcctactatcctgcaaggccactgagatctaaaacagaactgtctgatctgcaggatatctagaagtatattaggcacaggtgggggtgtatgggtggggaagacagtattccaagtagaggaaatagcacttgcaagaccctggggaatgagagagaatggtggttcctaagaacacagagcagacccgtagagcaagagcaggaaaagcaatatggacactggtgtaagatgaggctaaacatgtagcaggggccagattctgaagcctttgagggctagcattttacttatttagctaaatctcacactcaccagcagtttcctttctaaataggatcaacatgcatttctttggacctttgctgacaccaaatggtaccagtctttgagcctctcaagtgaggtgggaggtggggaaaggaggacataaaattagcataagtacataaacctagttgcacaccagtcttagtatgagtaaataacatgttctgcattttcatgtgctactactttccaaatgaatatagatgttatgatgaataaaactcaaattcatttcaatgtactcctgaattcctgggagcttttagctgttatgcatataacccttctgcctcttgccttatcggtctgtgacaacaaatacagttacaactccttttgctctacaaattattgtggcttgaaagttgaccccactcaaagtatcatccagctatttctgggtatttccatggggatggaatagatcccttgggctcttcctacctgagtttctccacctcttctcttcttctctgagtttcatgctattgtccatgctctgttctccttgtggttcactgcttttctgtgcctatctttgttcattcccacctcccatgaacccatcactacctttctttattcccgccactcctgaaccccttactatgtttgttcatttccattggtcatgtcagcactgctattgttgggctcaaaggctgagatagtttgttttctacatggaatggaactgtgacagaatctcctgagggttgagggtggctctgtcacttccctgagactggcctcttctccagccatcatctctgcacttctacacccacagctgcagctgatgtaagaggaccagcatatatgcttgtggaaagcccagacttgctcttactacactcttctagcctccccagttgtacaagggctgcttactcccaatgatgaaatttctctgagggtttgatacctaggatttcagtacaaatggcccaacagaaatagaggaattcctttcttcctctagtccggggatcagcaaactaactcaggggccaaatccacttgtttttataaataaaatttcactgaaacccagcaacacctattttatttatatattgtttatgactgctattatactacactggcagagttgaggttatgacagagatggtatgacctacaaagtcaaaaatatttactatctggaattttacagaaaaagattctcagttctttatctcatccataaaatcattcaaggaattgttttaaaatgaaaagtgggtgatatgatcagatttatacttttcaaaggtcactccagttgtagtgacaagagtggactcagggtgggaaaataaaactgtagacagagaccagataagaagctgttccagtaattcagagaagaggtgatggtggcctgaaccgaaggaacaacagtgaaaatgcagagaggtgatggatttgagaactattgaggaggtagaaatgataaaacgtgataatggatcaggtgcttcatgcctcttctctgacactcagccgccaggctctaggtactagaagtctgatcatggatttgcttctttgtttctgtggtctcctgattcctgtctgggtcttcttctaaccccactggagcattagagttctattttcctacttttgcctgattgctagggctctgctgcctcttgactatcctctgtgaggcaattaggggaattcagtattaggatccatgtatcttgtctttgtccaccaatagaagatactgctaacttggacttgcattgccttctgatattataggcagaaacctctgtgagaggttctgtgatttctctgtcaggctgaactttctgctagcagttgtgtattccaggaaatgaatatagctctaaatccaaattctcacagtttgcttggttcttttacagtacttgagatgtgctgggccaattccaaaggtaaagaagagtaggtgggtatcctggggcttcattatattaaaagtgctaattctttgatttttattcacttatctcaactgattaataatttttgatggaatgagaaaagataactctgttttagtcttccctctagggttctgtctttgtttattctatatccctatatgctgataacttcctagtttctgtcctagaatctagcatatatccagcttccactgaattcctccacctggatgttaccaaaacactcaaggttcaatctgtctaaaacctgaaacctttatcttattgctccttttccttttcttcttcccatatcctttgtgctaatgaatggccccaccaatcaatcctgtcacacaagcaaaagatgtggaagtcatcttggagttataaattcttcctatttccttactctacaatctatcaggattctgtctcttaaatacattttaaaaatccttatctcttctacattcttgctgccttagtttagtctttttatgtctcataatgactagtcatttcctggcttgtctctctgcctcttgtcctgttctgatctaatccttcaaggacaggaacaaaatgaccatcattttagtagcctcagaactgaggatgagatgggaacacagaaggtccttgttgaatatgcaccaatctaaataaagaggaaaatcaggatcacatgtgtcttttccttttgatactcctgatctaagattttctcttgtcggtatcttccttctggttcctagaaaattcctcctatgctatggaagacctcaaatgaggtttctaccaagactttgagaagatttgaagcttttttaaaataaaaagtttagctttttcacaggcactgttatggctcactggggaggtgggaaggccttctgctggggtgagaatacaagtcaggctcctaaattttcataacggaatgtcagccttgccacctgacagtctaaaacatatgcccaaagcatatggatctcttttcaatcaacacaacgtcttcacttcctctaaagagctcaatcttggactgactgatattcagccctatccaagaagctcagctaaaaagagtgatatttgagagatatttggagctaatcattcagtctctaagtttggactacaagttaaaaattcgtttggaccacagctctaattccattagaaatgtcatcagtgaataacatttaagtaatgtgctttctgatttttttccctttttttttttgagacggagtctcgcactgtcacccagactggagtgcagtggcgcaatctcggctcactgcaacctcctcctcctaggttcaagtgattctcctgcctcagcgtcccgagtagctgggactataggtgtgcaccaccagggccagctaatttttgtatttttagtagagatggggtttcacaatattggccaggatggtctcaatctcttgacctcgtgatccgcctgcctgggcttcccaaagtgctgggattacaggcgtgagccactggtgcccggcctgtgctttctgattttgtgcaggattgataaaaagatgcctactactgaagaatcacccccaaagtatttttccattatcttaatgtgtctttgagaaaaaaaaaacttctaaagaagtagcatgcttcttatattgggtaatgagaactactatagttctgttcaagacaaagtttcaacatctgagctatccctcttctttggataatagtaactatagataaaataacaaaagagaaaatttaaaatacaataacactttaaggaacaaactaaatatgtctttgactagaaaagaacagaaatgcaaagcagtagggctggagatgagtgtctgctgggctgtagcactgtaggcaggcagagatgattaggagttcagcactcacaaggtgacaggatctaaaagtgccaagcaggtggcaaccagacattggatcattgtttgaaatcagggtctgaggtggagtaccactgcataaaaggaagcttaaaaaaaacaaaaacaaaaaactgctgtctaatactaccagaatatcaagaaaggaagtaaagatgaagctacagttttgaagccagagcttctgtgaagctgccttctggctcagtgacgagtgataatgtcacaattatcccaatgaggcaggaacactgatataacaatataagatgtatttctaatttgggatcctaacagggttggctgagggccattgaaaacccaccagaaagggaggaaagagatggaggaagaaaagcctaaataattgacaaagcttccgcctacccaagacaaacctgaaaatctaaattccataattaatgaagaaaaaaatgctaaaaatagctgtgaagataaattattgacatcaattccttctcagatgaagtgaaaataattatacaatctgaaaaatgctttataataagacatttatgatctttcacagataagataaaaaggaaaaacattcataatgaagactaagaaaatataaaacaaaaccatgcaaaaatgatatgataacaggcagatctaaaaatagcttattaaaaattagagaaataacatggcataaacttttgaaaaggcaaaagcaaagagagaattagtaaatcaaaaaaatagacctgagacattatgaaaaagcagttcagagaaagggaaggaggattgaggaggtgaaaggtatagcagaagctccagaagaagagagaaaagagtgaagtagcaacagttgaagagactttggctatgcatttttcagtgttgaagacacaagtctcagatgacaaatgtaatccaggttctaagaaggatgaatgaaaataaatgcatacttagatacatcttagtaaacttgaagataaggagaaaatattataaagttttagttatgcaagatgaataagttctagagatcaggtgtacaacattgtgcctgtagttaacagtactgtgttttgtacataaacatttgttgagagagtagatctcatgctatgttcttaccacaataaaacacaaagcaaaacaaaaaactatttgaaggaaaaatcagattcttaaagaatggccttggccgggcgcggtggctcatgcctgttatcccagcactttgggagcccaaggcgggcggatcacctgagatcgggcgttcgagaccagcctgaccaacatggagaaaccctgtctctactaaaaatacaaaataaaaatacaaaattagccgggcatggtggcacatgcctgtaattccatctactagggaggctgaggcaggagaattgcttgaacctgggaggaggaggttgtggcgagctgagatggtgccattgcactccagcctgggcaacaagaatgaaacaccgtctcaaaaaaaaaaaaaaaaaaaaaaaaaaaagcatggccactagcagacagttgacttccaattagcaactgtccaatagagcaatatctacaaattgctgagggaaagccactgtcaatctagaattatatgcctggcaaaaccacctatgtgtaaaaggttacatcaggccaggtacctaaacataacaaggctttcccgggaaggaaacatcggttctcacaacatcatttccttggatgcttactgagttaacataaatatggaaggccaggcacggtggctcatgtctgtaatccgagcactgtgggaggccgaggcaggtggatcactagaggtcaggagttcgagaccagcctggccaacattgcgaaaccctatctctactaaaaatataaaaatgtgctgggcatggtggcaggcatctatacccagctactcaggagaatcccttgaacctgggaggcagaggttgcagtgagccgagatcacaccattgtactccaacctgggtgacaagagtgaaactacgtctcaagaaaaaaaacccaaaaagataaatatggaatactgcatgctaagagctaatgatctgtcttgtttactctgaaattcctgattagagagagcatatctggactgagattattctatgtgggcctacaagttttgggcctatatgacaggaacaatatataagagaggtgggaaactaaggcagtagcttctctgtgctaagtgaaaccatatatgtgttgaagtcatccccattttctgtacacatgctgtgtaggtaaggggagataaaggaagctgtgcatacatatacttttaggacctctaagtagtaataaggctgtttttcttgacttctatgcttctataaatctgaataatttaatgatagattaaatcctattgtgttacatgaatttgattccagtcttaacttgtgatcactgctagtaaaataaaacattttttcacatacaaaaattaggagacttttccactcacaaactattatggaatgaactataaaggatgtactttagcaagaagaaaattgaactcaaggaggaagactgagatgcaagaaacaaaaccaagtagagaaacttaaaaattaagtggataactaatggttatctacccaaaggaaaataagtaattatacgaaaaaagatacttgcacacacatgtttatagcagcacagttcacaattgcaaaaatgtaagccaacccaaatgcccaccaatcaatgagtagataaagaaactgtgagatatatatatctagatatatctatatttatatctagtatctagatatttctatatttatatctagtatctagatatatctatatttatatctagtatctagatatatctatatttatatctagtatctagatatatctatatttatatctagtatctagatatatctatatttatatctagtatctagatatatctttatatctagtatctagatatatctttatatctagtatctagatatatctttatatctagtatctagatatatctttatatctagtatctagatatatctttatatctagtatctagatatatctttatatctagtatctagatatatctttatatctagtatctagatatatctttatatctagtatctagatatatctttatatctagtatctagatatatctttatatctagtatctagatatatctttatatctagtatctagatatatctttatatctagtatctagatatatctttatatctagtatctagatatatctttatatctagtatctagatatatctttatatctagtatctagatatatctttatatctagtatctagatatatctttatatctagtatctagatatatctttatatctagtatctagatatatctttatatctagtatctagatatatctttatatctagtatctagatatatctttatatctagtatctagatatatatatggatatatatgtggtaactgtgatatatacatacatatatatataaaatggaatactactcagcccaaaaaggaatgaattaatggcatctgcagcaacctggatgggactggagaccattattggagtaactcaggaatggagaggcaaacatcatatgttctcactcataagtggcagctaagctatgagaatgcaaaggcataagaattgacacaataaaatttggggacctggggaaagggtgagaagggtctgagggataaacgagtacaaattgggttcagtgtatactactctggtgatgggtgcaccaaaatctcacaaatcaccactaaagaacttgctcatgtaaccaaacaccatctgttccccaataacctatggaaatgaaaaaattttttaaaaagttgaatggaaactcaaaaaaaattaagtggataaggttttttttttttcaattaaaaagtgaaacaaattgctaaaccacaataatagaagataaggtgagtcttcactggatacttaatgtgttaacatctttgtcctatttgagaggaagatagagatactatgctgaatgactttatactctccaaaaaaaaacactgaaaaaaggatacagttttaaaattataaagtatatatttttaaaacttatttaaatacatattttatcattttaaaacttaagaataaccattaaaatgagagtaatattctccatagcttctgaattcacagagcaaaaaggagtatagaaaattttatcagtaccccaggaggtagaaaaggaggaaaaaaagaagcaaaaagaaaggaggagaattagataaccaatgagttttcgtttttcctatggctggcaggaagaccagataaaaaatattttccaagtatttcatcctatattcctaatatgattattttcacttttcataagatagtttcatttcttttgccttcattttggatatctatatagtcaagtttaaaaaaagccacaagaaaatcacatggggggttagggcttcaacatatgaattttgggggatataattcagtccataactaccctgaacccctgtcctgcagtaatgccctgccctctctggtggagcctgtgtgtgaaaccctgacttccatctctgccctgcattaacaaggaaacaaaactggtaaattaaacttcatcaaaattacagtattttgctctgtaaaatacctgctacaaagatgaaaaaacaagctgcagactgagagaaaatacttgcaaattacttacctaataaaggacttatatccagaatatataaaggactctctaaattcagtagtaagaaaacaaacaatgcaattagaatatggtcaaaatcttaaacagacacttttctaaagatgacatactggtggcaaatcagtatacgaaaaaatagcctctaggaaaatgcgaattaaagctatatgtgctaccacacctattagaataaccaaaataaaaattactgatagtaccaagtgctgatgaggaatgttaaatggcatagccaatttggaaaatagtttggcagtttcctataaacatacacacaccataggacccagcaatctctttcatcagtgtttatcttagaaaaatgaaaagttatgttcacacaaaaacctgtacatgaatgtttatagcagctttatactgtaccggtcaacactggaaacaacccaaatgtcctacaactgatgaatacaaaaacaaactgtgggccatctatactatagaatactgctcaaaaattaaatggaattaactggttcatgtaacatcttggatggatctcaaaagagttatgcatagtgaaagaggccagtctcaaaaggttgcatattgtatgattccatttatataatattattgatgtggcaaaatcataatgctgcatagatctatgattgccaggagttaggattgggggtaggatatgatcattaaggtgtaactcaagggagtttctttgtggtgataaaacagttctgtatactgactggtgatggttacaccaatcatagaacgatatacacatgcacatacccccaaaagaagtccacacaaaatctggtgaaatccaaataatgtattgtactgttgtgatacacattattattgtattgtatgtaacaatgtcagtttcttacttttgacaacgttctatggttatgcaagatattatcattaggaaaggctgaatgaggggtacatgaaaattctctgtactatatatggaattacttttgcatctaaaactatttcaaagtaagagttataattttaaaaaatcagttgtaagaaattttaaaaaatgttctagcctcaagcctgtctgacttcaaagccagtgtgattaaaccactacaccacatggtaaagatcccttagaaaaatgcctatgtcagcaggcacaaataagggacactcctagctattcaaaattatttttgtctccttaaaccctaaaataaaaaagcacaaaacaagaaatggctaactgagataactataacatttgaggtgggatgattttaatagaccttatataccattttaactcttttaggttaaatcccacttcgttgttcagtgatctcaaaatgtgttatgaattctttttggtagattttcacatcagtatttcaaatcaccttactctagatgtttttctcttgggtgttctttttgttaatatttttaacttcacaaagctcttttctatcattttagtcagttaattgaaagcaaagcttaaaggaaaccaacatgtttaaaataaactttttagggttggagactacatgctttttgttatttttcttgctctgatatctcattagtgttattacattcctgaaatacctaaaatggttaaaagcatgaaaagcacaagtattgaaagaccttaggagactgcattttgaagccctcaaaaatgtgaaccgggaaatacataaaacaactttgtttgttggggttaaggtcatgggaaatacatctgtttgcatttgtggagtatactgtcgtagaaaactacgccgcatgaagcaatggagcaaaaagcacagcagcaatatgcggttacatcatctgctaagcatgtatattacaaattacttgaaagcaataatcatgatattctggatcccaccaaaatgttatgatttaaacatccacaacaaaggctgtgcccagaagcctttgttctgagcagggtttatttgaagaaaatggaatgtgattgtaataagaagcctgggctggctgtgtctctccaactcattaggctgcatgaggtggtagggtgaagggagatgggctggggagaggctggtgagttccacacaacaccctggggcttcacaagggaagaggaatgacaggtgcagaggagatatatgaagttctccatcagatagctcctgcagagttggagtcctagccttcagggcagaactctcaggaggtgcactctatcatagtcaaaaattccagtgatacattgttcatgagaaaaatcagacaaggcaattacaggaaagagcaggaagccacctccgtcttccaatcagattttcaatatttaaccatcacttcctaagtacagttgggctctctgaattatgcagcatccacaagactgtcggagaagatttgttcctaataatggatttttgcatcacaaatgaatagagttctttgtctttatattcatctctcttctctgtggttacttcttcctaatttgcgtttttacctgtcactttgcctataagaaatgtgaaaaatatgaagaatcctcttttattatcatggcctatgagtgcccaaactgtttgaccctatatgaattaaatacacttttttggatattttgttctccctgtatgtagggtttcaaatgggtgcaaataatatacagttaaatctaaatgtgctctttccaccagaagaataaagtctgttaccagctgaagatgagaaagtggaaataggcatagctgagataaattaaaaaaaaatgggagccttgggcatttttcataacagccctggagttagtggttggctgggaggagggactgtcctgtgtgtggctttgaagttatgtggaagtcattcacatttagcacattattctcaggctatgggggtaagggtgatgctcatatctcgtagagagagaatgttcacttactgaaagcctgcctggactttgtccttttccaggcaccatttaactattaggagttctagatcatacttggcattaaggatgtcataacaaactccactttctaaggtttctgatccttaaatataatcaagagaagtaatggtttattttcatctgcatgcattctcatgcctttgttgagactatgccagggaaaagcaagaacatccatttaatgggaagtgtcatatcttcctccgacccaccctcccttcctttcttcattccttccttcagcagaggttttcaagtgcttgccatgtgccagataggcactgtgctaggctctggggaaatcacaactaacgacatgcagcctgtgtttcagggatgattttacattccagtatggaatacagaaaagtgaacaggcaattgcaactcagtgtaataagtagaatacatcttctgattataattataacaataatagggatgtatttcttaggtcattctctcaactatcccttgagctaggtagtaattttattcctgttttactgaaaaagcttgaggcttggtcaattttgcaagttcataaacttagcaagtgtaaagctggaatttgaatcctggcctgtggaatttgaatcctgtttgtgcagtcctagaactcaagcacttaactttgacactaattggttgctatgggaaaacatggtggtgggaatgtacatctggcatggtcttggaagtcccagagggtggttacagaaggcttcttagaggaagttacaactaatctgaggattgaagagagaataatagtgaaaagaataaggcatgaagaataagctatatttaggttggaaacctggccattcctacctcttagcttgggtaaaatgtttaacttctcagcctcaactgccttatctatttaaaaaaatgaggctaatattatccctatttcagagttgttagaatgaaatgagatagcatagcatatgtgaaagttttagcataaggcttggcattaggaagacacccagtaaatgtttattttctacacttttccaagcaataatagcgttctgcattttaccgtgtgtaccatggaatgtgtgatctgccttaacccaaaagccatgggataattcagatagtttaaaatgagagtttagattatttattctaatttatattagtactaaccctaatattgccttggttattttgggtatttcacttatctacttgcctaacaactcattcagctattactgggtgtattttagaataaacattcctggaggaaaaagatgtttggctatttctcagaaataacggagcttgaaaggagcatttatcaaaacaactaaaaaaaaatctctgtgactggttgctggattaaaggaagaagacatgaatctacaacataataaattactaattgtttctcaagttcatggccatttgtaacatttaaaaataattatgtacattatgatagaattactttcagatgtaagaaacccctcttctccacaccatttaattaaacattaggtactgttgaaacaaatggatggaattggtttaggataaatggttgtaccactgttactgcaagatgaatactcataagcaagattcataatctttctcattaaatctcttttcctcttatgtgtcatatctcagttcatatctcagttaatattatcactatcctctaaattactcaggctaaaaactttgacttatttttgtcttctctttatatcaaaccagctgttaaatgtggtaggcagaattctaagatggtccccaagattcctgcaacctggtttaacactttctatataatttcttccctttaagcgtaggtgggacctatgaatatgatgatgtcactttagcgattaggttacattatatggcaaaggcaaagggatttcacagatggaattaaggtccctagtcacttgattttgacttaatcaaagtggattatcctaggtgggcctgacctaatcagatgagccctttaaaacagggatttagccttcctgagtccagacatttggagtagcagatgtactcttgctggttctgaagaaataaactgtaatgtgatcagaagaaagagcatgcggtgagaatatgagagtgacctctaggagctaagaggtggtttccagccagtaagtaccaagaaaaatggggaagtcagtcatataactacaaaaaaaaatgaattctgccaacaacccaattaagcttggaagcagattcttccctagtcaaaccttcagataggaatgtaacccaactgaaacctttactgcagccttgtgagacctgagcagacacctagctaagccacacctgaactcaacccacaaactgtgagatagcaaatgtatgttgctttaactgactacacttgcattagcttgctatgcagcatagaaaactaacacattaagttctcttcattctccccttccagtgtctttatctatccccttttctctattactatggccctcatttatgtcttcatgtctctcacctgaactaataactttctaactagtcttgtcattttcaatttttcacttctccaggaaatccactgcccctatatccactgtattctgtcttatagaatgtagttttgattatatctccccctttaaaaattctcattgctcccagttttctccactgtcaagggagtatagctttgtcatttgggctacgagtttttgatttagagagctatggatttgaatttaaattccaacacttaactaactttatgaacatgggcagtgaataaacatctttaagcctcagtttgtaaagcagagattataattttcccttccttatagggttattgtgagaattaaatgagataatgcatgtaaagattatgttacatagtatgtgctcaataaatcatagctattattgtggttattatgtaattaaattcaaactcttattctggtactcaaagttactaatgatcctcaatagctttttcagccacatctcgtacatctttatgcaaatcttgtggatcagccatgacaacctatcaaaaaacttgaagtccttggttgcatattatgcaatactttttttggtctattttcttccctcaaattagagtccctcccaaccctccactctacacttatcaaaattttgttactcttttgaggcctcccctctaactagggctagctttcagctagcacctgtaagtattcctttactgagtacttacaacccaagtgtgttctgctttgttggaggcccattctgatttgtggtgccatataacttgttggtttttctatcaaccctacctacaaccttccttttcttttatcttttgactcagaatttatctttgtgttcctgcagcagttttcttgcccctatgcttagtatgtcaaactatgttttgaactccaacctgctcacatagttgggtacctccccatataaaaaagggatcattttttatattcccagttcgcttggcacataataagtactcaaaaccttgttggatgattaagaattagtttcactgacctccttgtcagtcctaagaatgatggagcaaatttttgtaatggataataactactaatggttgactggctttagaaacatcttatttggcttaaataattaaatattctacataagaatgcatcaaagtaaactatgtgtgctttataaagcacaataaaatccatgaagaatctagatggccaatttatttaaataaacatatctctatctttatatatgcttctttgacggaataatttcagatcttcattgttccaacaaatctttttattccaaacaattgcatttattatcctgcaaaaagtcttgagataccacctagtgtagaggtctggagacctgaatccatgtaaagtaggaactgtgtcttccctttctctctgttaacatacgcctgttgatacatacactctgcctggcttcttcttccatagccagttgaggaccattcttgctggaaaatgtagacctcaaatagaaattatgcagccttgccttcttttcatctggtaattatgcatagatgttcccaagaagtatttgaatgctgaggaaatcattttgtcttgagaaatataatcttttactttctttttctctccccgtctccctccctccctccctgtccccctcctttctcactctctttccttttgaggcagggtctcactctgtcacgcaggctggagtgcagtggtgcgatctcagcttactgcagccttggcctcttgggctcaaagcgatccttccacctcagcctccatagtagctgcaactacaggcacacaccaccaagcccagctaatttttatgttatttatagagacagagttttgccatgttacccatgctggtctcgaactcctggactccggtaatacacctgcctcagcctcccaaagtacaggtgtgagccactgtgcccggctcactgtacaggattacaggtgtgagccactgtgcccggccaacctcatttctttctgagcaatagctttttaaaactttattcttagaagataataatagcaatgatatccttttgtgttattagttgtatcctcctttatttcactttatatttattttaaatcggagctaggcagactagtttctttcatgaatttcttacttctttcttagaattttagagtccatgaaatactgtaaataatgtgtgtgtgtgtgtgtgtgtgtgtgtgtgtgtgtgtgtgtctttaaaaatgttcactttttgttaaactcagtgctaggtattttatgtgcattttcttagttaatattcccaacaaacctacatggtatatactattacttccttcatttttccaagtgaaaacaacaagcttaggttaagtgattttcctaggcactttcctttgctttacaaaggaaaactctgagacttaaagaggttaaatatcttgctcaatgtcacacaactggtaagtctcgcacctgggattcaaacttatatgtttcttgagtctatagtctgagcttttaccctctgtgctatagctccttcctttcctttgaagttcttgacatctgctttcttaacatcttcagcacatgccagcctctgccctatattttctttcttattacaaattccaagatgacatggtaaccattcagttcttccttgtaagacagaaattggtccaaaaatagcagtctctttgctgtatctgctatcatttcagagatgatattgtcagtaaggtaagtaaaacagtttttaactactttactttgagctgcaaagacttctagtaaatgttgtgagagtttcccatgaacatatagcttacctctgtgccagttttgtcatagaagcagtccattatatttagtacatgaatgtccccaagactgtgcaggaaatcagatccacacatattgaatcgtagacttaggcattataatggaggactctgtttccagaagaataaagaatccttaattataccacaacttttagaaaagacaaaagttgacaggacatagtggttgacatctgtaatccaagcactttgggaggctgagatgagaggattggttaagcccagaagttcgagaccagcctgatcaatggtaagaccctatctctacaaaaaaaagcaaatgggcatggaggtgcattcctgtagtctcagctacttgggaggctgaggtgggaggattgcttgagcctgggaggttgaagctgcagtgagctatgattgcaccactgcactccagcctggatgacagagtgaaagaaaagataaaataaaagttgatgatgttctactttttaattcaatttctttaatattagtttgttcctttataaccaagcatcagtttggcgtcttgaccccaatgacctcagttgatggcaaaggctctgctatttttgttttcagacaggatttcactctgtcacttatgctggagtgcagtggtatgatcacagctcactgcaggcttgacctcctgggttcaagtgatcctcctacctcaccttccagggtaactgggactacaggcatgtgccaccaccccaggctaatttttaattttttgcagaaacagggtctcactatgttgcccaggctgggatgggctacttttgacatacctaatgacctcaatcttggttttaattgtaataagtttaggaaaatatattctttattagtagcattaatatgttcacccttttattccacactcatattttagaaaataactacagagatataatagatactcataattgcatatacactgtattaaggtcaaaggtggctacattgttaaaactaagctgttttggccaaccaatggccaatttcacccaatgatagcttgaaacatttttcaaaagttcatggatagcttaatacttaggtggtgggttcacaggtgcagtaaaccaccatggcacaagtttacctgtgtaacaaacccacacatcctgcgcatgtatcctggaacttaaattaaaaattttaaaaagttcatggatgaatgtccaaattcaagtattaaagtaaatttaggagtataaatatgtcattatgaaaactcagggctgccagtatattttaaaaatgaattaattatctgtaatttttatttgattgaataggctgtagcattcttctataatgattaactctgtttctctctcactttgtcttaacccaaatggtcttcactatgctcctggtgacaagtttaagaattcccattaagattatatcttatgtatcactgggctttcccccttccttttatatttaatccattcatttccagaagaaattctctttagttgtcatattcttcactggaattataccaaatattaataataactcatttattattgttagcatcaatggtagagttaccatataatttcttacctacatcagaaaatgtgtgagagtgaaagggaacactattaattgttactttcttatattaaaatatcaaattcacccttgttatctgtcttaaggtctttatttgcaacaaacataaatccactgaaattaatttaagtaaatgaagaatttattggaagggaatggggatggcttattaaaccctaggataagaaatgaagctgagacttttgaggatctgaacccagcacatggaaagccaagagcttgacgtgttgctctgcttttgaggggtcatagattactaacttagtgattaagtccatgccttttttaggagccataagtaatgaaccattctcagaatgaatagatcaaggatgccatgaggtgtctttccattaccattatatacctatttattgctgtcgtagttcatttttcacgttttcacaaacacccgtaatttgccacgtaagcatgctgccatgtacataatagaagatgagtaaacatttgttgaatgaataagtattataactcacttttagaatgctgtcacattccttcttttacatgaagatgtgacagtgacatttgttcccccattgactgattatgcacatcagtattgccctgggcaggattgatgtgactgatctgacactttatctttgtgttccttgcagactttaattttccacctaacacatgaaaatcttagaagatcaaataacactagtccaggataattatcttcaaaaaccatttgattggttttctttgaaagtcaggcttactgacttgaaaaaaaattttttttaagtaattgagcagtttgaattaattaaaagtctgaattaacaaaatctgccagaatagacttcatttaattttttttttgtagaaattacaaaagtgccaggaatttaattctctgagtgacatccttgtggtgagattaggtcaataaaaagctggagaaaacagccagaagtttcttcgcacaattgttctataccagaccctccctggctcctgtctggggtttttccctccccttattgttcctcatcagaattggtccctgggaccctggtctttggatctgctttcctcccagcgtcttagcaagtcatttctgattcccacccaaactcttctgctcccattaccaacaattccaactggatttctagcatctatctttaaatatctcttgacatccctttgtgaaaacattaattgttgcctctactgcatgatttagctccgcctcccacaccacagactaagactgattaccaattatgcactgctggtaaagatttggttcctaattgtgaggatacattgtttttgtttgttcgtttgtttgtttgttttttgttgttgtggatgttgttgagatggagtctcgctctattgcccaggctggagtgcagcgacacaatctcggctcactgcaacctctgcctcccgggttcaagcgattatcctgcctcagcctcccaagtagctgggactacaggcgcacgccgcaacacctggctaatttttgtatttttagtagagatgaggttttgccatgttggccaggctgggcttgaactcccgatctcaggttatctgcccgcctctgcctcccaaagtgctgagattacaggcgtcagccactgcacccggcctcattgttcatcgttaatatatttccaagcatggatctttgtatctgctctaatgaagagatacaactcgtttattattgttagcatcaaaagtagagttaccatataatttcttacctacatcagaaaatatgtaagagtgaaagggaacactattaataattactctggaataacaggtgcacatcaggattgccctgggcaaactgagactattgtcaccctaatcattactgattatctggcttctctaggaaaatattttgtttctgtattgagattcatttatttttcttcatgtgtttaaatctctttttgagtttgctaatttctggaaataagcagttcagtaagtagattagagatcagtcttattgaaatgctctttagtcctttttgtccgacatctcagcgaggctgcggtgtctgctgctgctgtccgagcttcacaatgccacccaaggatgacaagaagaaggatgctggaaagtcggccaagaaagacaaagacccagttaacaaatccgggggcaaggccaaaaagaagaagtggtccaaaggcaaagttcgggacaagctcaataacttagtcttgtttgacaaagctacctatgacaaactctgtaaggaagttcccaattataaacttataaccccagctgtggtctctgagagactgaagattcgaggctccctggccagggcagcccttcaggagctccttagtaaaggacttatcaaactggtttcaaagcacagagctaaagtaatttacaccagaaataccaagggcggagatgctgcagctgctggtgaagatgcatgaataggtccaaccaactgtacatttggaaaaataaaactttattaaaaaaaaaaaaggaaagaaatgctctttaaaagcgaacaaacgccatgccaaaaccttagactttcaaaactaaggaacatttgacattttacaaatacttgacatggacacttttcttttaaaagtaaggaattgattaccttgtcagaagaagttacctacttttttctttattcacaaataagtactagtttatgtacatcaggatggcattaagtctttaggtttttttttttttagaagcccctgtgacgtagaccagtatggaccataattcaaagttctgtaatagaaacatgcatccaaaattgactaagtagttttgcctcttttatgtagcaatttctaaatttttaagttttggataattctttatatatacattatatacatatatatttatagaatatctgaattgataattacctcacaaaccatctaatttggtggttttcccccttggctgcatatctgaatatttggagagctttaaaaaaatactgtcttttctatctccagaaattctaatttaagtggtctgggatggaacccaggcatagacgttaaaaaaaatgcctcaggtgattctcatgagcagtcagggctgaggcgtctctgatttaattcaaccctggtgtttcacatctgagaaaattgaggcccctcttacttagctgttactgtgggttaacaatctaaatatctctgtgaatctctagatgtttttaaaagggctctgcaaatgtgacatcaccttctttatttagaactgatcataatttttatggcttccaacagatgtcttggtttcttgaattatcctttcacgtcatggggcttctaaggcacttgctgccaaaggagccggaaggtatgcctctttttctgttctccaggtagtagagcatattttagctttttatttcttgccagtattcttgcttcactttcttcatttatcttttgtgcactaaagtttgtcttctaacactttagattatgtggattacatgcctgaagatgtcaaacttcaaaaatgcttctcttttgcctttatatttgaatgatagtttagctcagggatcagcaaattatggcccaagggccaaatgcaataagctgcctgtctttataaagttttattagaacacaaccatgccctttgatttatatgttgtccacagctgctttcaggcacaacagcagaattgagtagctgtgacagagattgtacgagctgaaaatatttaccatctggtcctttactttaaaagttttctaactgattagctaattaaactctctggactgcaagaaatttgtaagcattgcgcctctatcttctaaaggtaaataaagctgtagagataccagaggtcaacttgattcccacctacacttccattacctacattaatgacttggtctttttgcatgattaaagggttttttcctttatctctgaaatctcataacttttaggctaatcttagtgtcactcattcttcatcagtttttcttatcacactgtacatttgattcttttttgttatttttgaatgttgttttgaacacctataatccaaggatgccagttatctacattttcatttaactttgatgggcttgtatagttctatctttttgcatatatattcctattgcttacttttttagccccgtattctgtgtatcttatagtattttcagtaatgcctattcatcttttccctggctcttgtatctctgctttaagattgttaaaaattcttaaaatatatgacaatatgcttgatcataattttgtctgcctggtgacaacatttttttttttaaaaaaacaaatgttccttcttcatctgccatttgttttttctgtttccttcctcctttttttcttgcaatatctttacatagtttgtatactggtttctttttaatcactgtttatctttcaatgagataagttctttctgactatttgcaggagataggacagggttatgttttgagctgtaaagaattttctatggttcatagttgtggcataaactactaattgtatctttcaacactcatttctcctttcttctaaaacaatagaaaccaggttctattcattgtcactgtgctcagctatagccctaaaattctcaactttccttgcagggggttatagccatgtgactgatcttcgtccaagaatatgtaaagaaaaagtgttgagttggcttttaggtaagtaccttaaatgtgagagggaaatggagccttcttcctcatctctgcagcctagaatatggatttaatgaccagagctccagaagccatctaaaaccatgaggcgtgcttgaagatggaagccatgtacggagggtaacagagcagaaagttaggagcctggcttcctgatgacaccatgaagccactatacaaatcttattcctcgaaattttaaaacaaaaaatagcttttttgagatataacttatatatacagttcaccccttgaaagtgtacaatccaatggtttttagtttgttcacagagttgtgcaaccatcaccacaatcaattttagaacatttgaaattcttttaaatgagagaaaaataatcatgttaaagttttttgggtttttttgatacgtagttgaacttcatcttaactgatatggtaataaagctttttataacacagagttgtgttagtgtgagtacgtgggtatgcaagagaatcgctttgcctttattttttcactgcttaccaaaagtgccagcttggagttcaggatcttcctctatcctgcctcatctcaccaataacttgcttcctgttgaaatgtcatgtctgtgcggttctgctttcagtcccagcttccctacttctctaaggtgccaaacaagcaccaaagaagtttcccctctaagcctgcatgttccagcaccattgtttagacaaggaattggtggttgctgtcccacttcttaggagagcacatgctctgcagggttgtctgggctctgcattttccggtgggtcctggctttgtcttcctcatgggccaatttaatgggctcttcccactgggctcttcccagtagactctacattaggcagccccttcctcatagcatgcttcagatttacagtcatttcctagttttctcaaggatggaacttgcattctgttttccttcttctgcttgttgcagtgtgactttggagaagagaaaggagacagatgtttttactccaccattttaaaaccagaagtctccttgcttaattttaaaataactcttttttatttatttagcagaggatatatggtcaccaatcagtggtaactactattaacttttgggagaatatttttccaaattttctctctgtcaatctctctctctctctctctctctctctctctgtctctatctatctatattaacctatttaatttctggaaaacatgatatagaattattaaatagtctacaactttgtttttaattggcctttggcatctcagtgtatgaatataccgtgagttattaaccagtcccctagtttgggccacaggccacagggttgaagagcattacctcaactctagtggtgaggttgacatatgagctctaggctctcatatgaactctaggcacaaaaggccacagactttcaaggactgggatacctgctctgctgggggttcccaacatcataagacccaatggccctctctacttcccattgaagtcttttaaaaaatacttttaaaattttaaaccaattttagacttatgaaatagtaaaagtagtacagaattccttatattccttaccccatgttccttaaagttaacatcttacataagcctaataaaatgatcaggaacggggtattaacattggtacaatactggcaactaaacagaagaccttatttgaatttcatcaatgtttccattaatgcctgttttctgtgctaggatgctaacagtgatcccagattgcatttatttatttctccttagtttctttcagtctataagtctataacagttcctcagtctttccttttttttttttttgtgacattcacacttttaataagtaccagtcagttaatttgtagaatgtcattcaatttggaatgttttctcatgattggattgaggctgtgtgtttttggcaagagcactacaaaaatacacctatatctttctcaaggtatcattatccaggagtaatgatcttgatatgtcttattgctggaggactttatcttgatcagttgttttaagtcggtgtctgatcagttaggccaaattaatgttttttagccacacagtggcctatcgagacactatctcccatatttacttaggttagttacccatccatttcagtgtggttatgttattcatttgtgtatgattaggttcatttgttagtgtttctactcggttctgggttctcctttccttgcatcctggttgattttaagtttttgtttattttgaggatatgtgaagggtttgtgaaactgtggttctaagagtcagagctatacaaaaatagtacttggagaagtgtgactccctcctcatccctaaaactctgtttccattcacctcttttcttctctttttccacttgcttccttaggtaaccacactactaagcttctatttatccttcttttagatcttttgcacaaaagagcagacaccttggtattttctatcttcttcttatgtcctagagatactctttcgggccttgcctttttcacttaacagtatgtcctggaaatcatgccatgcctgttcagagaccttcttcattctttttttaccactgcatagtatttcatggtgtggatgtatcatagtttattcaaccactttactatgtatgggcatttgggtcgcttccagtattgtacagctacaaacaaagctgcaatgaataaccttgcatatatgtattaatgcgtagttgaaagtatatctttggggtagattcctagaagtgggattgctgttgaaaggtaaaaatgtatgtagttttgttaggtattgccaaatttatttccagaagggttgtaccatttgtataattggtacataaaacccataaaaatgactttttcctcacagcatcaccaacagaatgtgtcgtcaagtttttaaactttaaccagtctggtgagaaatgatacttactgtgttttaatttgtatttctctaattatgaatgaatttcagcattttcccatatatctgaaggccatttttaatgtccagtttttgtgaattgcccattcatgtcttttcccattttttatattcttaattttaattttttttttttgagacagaatttctctattgcccacgctggaatgccctggtgtgatcatggctcgtggcagcctccaactcctgggttcaagtgatcattttgcctcggcttccccagtagctggaactatagggacataccaccatgctctattattattattattttggtagtgatgggggtctcactattttgcccaggctggtcctgaattcctgggctcaagtgatcctccttccttggcctcccaaagtgctgggattataggtatgacccaccacgcctgtcctcctatttttttaaattgagttttcagtcttttgtgtctcagttattaagagttcttcatatgttaaaactattagccctttgtctgtggtatatgctgtaaatcttttctctcagttttatcagtcgcttttgactttctttgtggtgcttttgttatataaaatattttttattttcaagtagtaaaatttataaattttgttttttattgcctctgattttttttattttttattgccttgggattttgagtcatccttagaaaacttttccctacactgagattaaaaatgagtttactcatagtttcttctagtacttttacagttttatttttaaatatttagatccctaatttatttgaagtttattaatatggatgatgtgagagatggatctaattttgtctttctccaaatgactacccaggaccatttgtttaagagtgtccatctttactccagtgatttgagcttataaatgagaacatgatattttgttttctgttcctgcattaattctcttggaataatggcctccagccgcatccatgttgctgcaaaggacgtgatttcattccttttatgactgtatagtattctatggtatatatgtactatattttctttatctagttcagtgtggatggacacctagtttgattccatgtctttgcttttgtgaatagtgctgcgatgaacacacaagtgtatatgtctttttggtggaacaacctattttcttttggatatatacctagtaatggcattgctgagttgattggtggatctgttttaagttttttgaaaaatctcggccaggcaaagtggctgacgcctgtaatcccagcactttgggacactgaaggtaggcggatcacttgaggtcaggagttccagaccagaccagcctggtcaacatggcaaaatcccatctctacaaaaatacaaaaattagctgggtgtggtggcacatgtctgtaatcccagctactcaggaggctgaggcaggagaatcacttgaacccgggaggcggaggttgcagtgagccaagaccatgctactgcactccaccctgggcaaaagagtgagattccatatttaaaaaaaaatatcaaaactgctttccacagtggctgaactaatttacattctcatcaacagtgtataagcattcccttttctccacagccctgccagcatttgttttttgactttttaatgattgccattttgactgctatgacatggtatctcattgtggttttgatttgcattatctctgatgattactgatgtggagcattttcccgtttatttgttggccacttatatgtcttctttttagaagtgtccatgtcttttgcccactttttcatgagttttttttttcttgttgagttttttaggtcccttatagattctggatattaggcatttgttggatgcatagtttgtcgtattttctcccattatgtaggttatctctgtactctgttgatagtttcttttgctttgcagaagctctttagtttaattaggtcctacttgtcaacttttgtttttgttgcaattgcttttgaggacttagtcataaattctttcccaacactgatgtccagaatggtgttttctaggttttctcctaggattcttagagtttgaggtcttacatttaaatctttaattcattttaatttttgtaaatggtaaaaggtagcagactggtttcattcttctgcatatggctagctagctataccaggaccatttattgaacaggaagtcctttctccattgcttatttttgttgattttgttgaagatcagatggctgtaggtgtgcagctttatttctgggttctctattctgtttcattggtctatgtgtctgtttttgtaccagtacaatgctgctttggttaccgtagccttatagtcaggtaatgtacctttgaagtcaggtaatgtgatgcctctggctttattcttttttgcttaggattgctttggctatttgggctcttttctggttccacgtgaattttagaatagtttttttctaatactgtgaaaaatgacattggtagtttgataggaataagtgctgaatctgcagatggctttgagctgtatggccgttttaacaatattaattcttccaatccatgaggttggaatgtttttccatttgtttgtgtaatctttgatttctttcagcagtgagaaaactgacatctttatactgttcacttacctaaaccaagaacattttatttgattttattttagtttttctggagtaatttacaattttttgtggagtcttttggttgatctagaactaggaaaagactgtcctaggccataagtggtcaggaaagaaaaaatacactagaaaatgtatcaaagatctggtaaatatgcttacattgtctcaaagttcttcacaaccactctgtgaagcaggcattgttagctacattttacaaatggttacaatgagccttaagtattaaataaatagaaagtggtcaatagtgaaggcaggatataaatttatgtgcctgtatgtcaccactccatatattatttgcaagagcatgccaggtaatggaacatctagggaaggaagcattgataataaagtttaaaatcttcagaatgaggctagaatggtggttagcttagatccagtattagaacccagtgttgagccttgtatttagttctgcacacttcacttttagagggacatggctaggcttggatagcaacaagatttcaccctcttgttaacactacttgattgatcagagctagagagctgtgctgaaattgattacaagacttcatctgggcatattagtaaagtacatagggatcaatatgcaatgttttccatgagtatgaagatagggaaatggggtgtgtcagctatctgtcagtcaaccttgggctatacaacaagtccaaagggaagtgacaaagatggggtgggaactttataagcatgccatggaatggaaggtttgaaatccaggattgggatggaagaagttttgctagttttttgttgttgttgttgttgttgttgtttttaacgttcgaaaaaaaagtcatgtcaactttttatgtgtgattcctgtggttagaacaatgatactgtgtagagtgccaactcaggttccatagaaggaagaactcttctaataatcagagttgcctaaatatgggggaaaatggcctggcagcgatcatgcacttgctgacttttcagtgtgacatagacattgagagttcaggctttgggatcataagatcatgggttacttgtgttgaatatattacagaagtcaaatccctccattatatatactcctaaccctctagagcatgatgtgggacttattttacatttatttgtgtgatcctttgcttaaaatacatctttctcagcacatgagtactctaatgatggcagtgactgttttgctcatagtacctggcacagaataaatgctcaataaatgtttgctgaatgaatgaatgaatgaatgtaggtttgtcactctcagttgttccctcctgggagctactatcaagcttgtgcttgagtcacttgctttgatgtgccaaaatatgttaaccaataggggccccaagagacacagaagtcacagaatggtgacactcaggctttgtgtccccgatgccagtttcactcatggatcaagggagggatgaggcaggggaggagggatgttcagaagataagtgagggaggggtggtaatctcccgatagttgttctttcagactttgcacttcccttttagaaacctcatcatacttctattagttgttcaatattgtcttttctatcagatcctccctgttcaatttctaatttttctgttatgcagtatgccccatgagggtagggaccatgttttccttaattatttccgtaacccgagcacctagaacagtgcctggtgtatagtaagtactcaataaatttttgtgagatgaataaatacataaatgaaatgtggtctagaatctgtgtgcccaataaagtagtgtatgagatattaggacatgcaatacacagtctctgttttcaagttgcttgtggcctaggtagatacttagtaatatgcagacaaaactctaatacacaaagaaaaaaggcactgaagcagaaattaagtttgaatctttgcctgcagtgatttgcctgtgaataggatttcagtgaccaataaaaattaccctgctcctttatggtgagttgtcataaagtatatgtgcccctgccttttcttgtatcttctagtagcaaaagaacacaaggctgcagcttaaaagtccagaatgtagtctcttcagtttccctcaactgtgacaagttagtggggagcaataattcaaaaggatctttctagaggtaatcttgcaaaattcttagaaaaatctaaattgcaaagtgaatgtacaagggggtaatggtgcaagcatcttcagcccaagatgcttcaaaaatactgagtcatcaccaaggccagaaaaatagaccttatcttatataaccacacactgaacttaaaatatgtaaagggaaattaaaaattttttgcatattacacaaaacaagtccctgagaagccagagaatgatatcttggctaaaggagtatttgatgttagttgaactgtaaatttttaggaatttaatattgattacagttatatgcaaagaggacatgaggaatgtgatgggctgccatcagccaggagagactgttgtacttggaaccataagaaacatgtgtgagtggtcagggtgctgaaagaataggactgaaatgggctgtcaagaatgcatgaatgattaatgtgtaagtgcagtgatgtggattggaatatattgcaaatttgattgagtgggaaaagtgggaggggagacttagtgcctctaaatgtatgtgggattgttttaatatcatgcattaatagatactagccagatccattaagaggttgtcaccaagactcatcaatttttcttaccttatatttcttgtattcactcttcatttcctctgccttttctctagtttggaccacacatttcatgtcttggctatttcaatagttttccagttaatcaacatgactagtattccccaaattgggttaacaacatctaaaaccaccaggtcagtatttctaaaacaacacttttctatcttaatccttcattgtccttctccccaaccccccaatattacccagaatagtgggtttcaaactgtgtcctacgatcatacatagaatgctccagaaagagagattatgtttgtttttactcaacgaatatctttctatcacttagcacaatgtggaggcagaaatattcaatgaatatttgttgaatgagtgaacgaggtggctcattggttgctgggaaatggaattagagaaagacaagaaattggattctggggctcctacttcctatcaaatcagcagctccattattatctgcttattatgtaggtgttttgagtaagttttgtctgaaaaagagtcctgttgctctaagtatttgaaagccaattaactaaaaatattttaactcgtacacctaacatacaaatcctaaattaatctttcaaaggaacctgctagtactccccaaaatacagagaatataatgtggtttgttgttgttgttgttgttgcttctgctgttttttttttgttaaatgtttttttgtccagcaatcctctccaaaaccccatgggtctatggggctgccatatttgttagtatatgatcccattcctgagaaataggttttgacccaggcctggcctgttataatgtcttgacatccaggcctgaatttgtttgtgggtagatacctgaccccagctgggccatttgttatcctttcctgggattttaaacagtttttatcagaaaccaagcaataacaatctgatcatttctgtggctaacgtttttcccccggtggctaacattaagagaaactcttcatgatcagatttcccagtgtttggagaagcaaactagagtggaagagtcagaagcaaagatccagaaagatggagatatgagagacagagagagcatcctactggtatttgagttcatttccaaggctgtcgaaggttgggttttactgaaacagtccctgtgatagaatttgtggtgtaggatatttattagggaccagcacttatgggaaggaggaagagaaagcaagattgggaagaggaagaaactgaactcaatgcaagtctgacaactccacagagaattattgagcataataagtccattgagcataaatggcccattgaaattgtgctgcatgagctgagatgttctggcctttatacttccacagtgattagtcactggatatgggctacccagggaagggcaagctcttggacaaggcaactctcagcatctgaggcaaaccctgaagtagatgatagatgaaggctgtctactgaccacatggccagcatctgggaaaacatattgttctgtgaaagggtatctgagcggcacttctccatgtccaccatgtaggcccacctttaccctgccttcaacatgtttgatcttcaacttcttttaatgatgtgagatattccaatatgcttccaatacatttcctttttttttgttttttcgcattctttttttattatgattatacttaagttctgggatacatgtgcagaatgtgcaggtttgttacatagctatacatgtgccatggaggtttgctgcacccatcaacccatcatctatattaggtatttctcctaatgttatccctcccctagccccccacccccctcataggccatagtgtgtgatgttccccttcctgtgcccgtgtgttctcattgttcaactcccacttatgagtgagagcatgtggtgtctggttttctgttcctgtgttagtttgctgagaatgatggtttccagcttcatccatgtccctacaaaggacatgaactcatccttttttatggctgcatagtattgcatggtgtatatgcgccacattttctttatccaatctatcattgatgggcatttggattggttccaagtctttgctattgtgaacagtgctgtaataaacatacgtgtgcatgtgtctttatagtagaatgatttataatcctttgggtatgtacccagtaatgagattgctgggtcaaatggtatttctggttctagatgcttgaggaatcgccacactgtcttccacaatggttgaactaatttacactcccaccaacagtgtaaaagcattcctatttctgtacttcctctccagcatccgttgtttcctaaatttttaatgatcacccttctaactggtgtgagatggtatctcattgtggttttgatttgcatttttctaatgaccagtgatgatgagctttttttcatgtttgttggccgcataaatgtcttcttttgagaagtgtctgttcatatccttcaccgactttttgatggggttgtttgtttttttcttgtaaatttgtttatgttccttatagattctgtatattagcccttcatcatatggatagtttgcaaaaattttctcccattctgtaggttgcctgttcactctgatgatagtttcttttgttgtgccgaagctctttagtttaattagatctcatttgtcaattttggcttttgttgccgttgcttttggtgttttagtcatgaagtctttgcctatgcctatgtcctggatggtatacatttccattttttaaaaatcaaggtcaagttagattgttgtcacttgctatgaacatcctgactgatatccttcagccagccagattgccctccagaatactcttctatccttttggttttgaaatacgtgtgtgtgtgtgtgtgtgtgtgtgtgtgtgtgtgtgtgtgtgttattctctactgctaaggtctgaatgttggtgccttctccaaattcatatgttggaactggaaaaccagtgtgatagtattaagaggtgcagccttggccaggtgcagtggctcaagcctgtaatcccagcactttgagaggctgaggcaggtggatcacgaggtcaggagtttgagaccagcttgaccaacatggtgaaaccccatctctactaaaaatacaaaaattagcgggacatggtggtgggcgcctgtaatcccagcttcttaggaggctgaggcaggagaattgcttgaagccagaaggcggaggttgcagtgagctgagatcatgccactgcactccagcctgggcaacaagagcgagactccacctcaggaaaaaaaaaaaaaaaggtggggggaggtggagcctttgggaagtgaataaataaatcatgcagtttccaccctcatggatgagattagcactcttataaaacagccttcaatggactcccttgttccttctgccacatgaggacacaggtagaaggcgtagttcatgaagcagacgttgaatctgctgcaccatgaacttggacttcccaggctccagaactgtgagaaataaatttctgttgtttataaactgcccagtctaaggtgttttgttacagcatcctgaatggactaggacatctatacagtcattcgtgcgacaaatacttccagtgtacccaccatggatcaggcaagaatctaaaccctccctttcctaaagcttcagcccactgcctttcttcgcacatgactccttatgaagtctgctctcctttgaatgacaatagcactcacattcctcatcacctctaccattcgtccagcactactttgtcttccactggatggctggcctctggcagaactgttttttgtgacactgttttatgaaataatgggtctcaaatgaaggatggggtgagaaaaattccatgggactttgtcccaacctctaaggatgttgttcactacattgcagtgttctttctacaagaccctcaggagatatttcttttctatctcaatatcaataccacatgtgcttctgaataactgcttggtttttatctcactaccttgtgaactgtgcaactggctaaatttctcttttcacattggctgctggataactcaagccaaacttgcacacccttagcaaatgtgtaacatactatgtcagatgccagtaactgttgcctccaggtcattgagactgaggacgtgattgtttgtttaagtgtgttgatatggtttggctgtgtccccaccaaaatctcaccttgagttgtaataatcctcacatgtcaagcatggagccgggggggataactgaatcatgggggcactttcccccatactgttctcatggtagtaagtaagtctcagaagatctgacggttttatagaggggcattcccctgcacaagctcttttgcctgctgccatgtaagatgtccctttgctctctgactttgtcttctaccatgattgtctggcctccccagccatgtagaactgtgagtccattaaacctctttcctttataagttacccagttttggttatgtctttattagcagcatgagaacagaccaacacatggggtttcttaaaaatttaacctgggccaggcacagtggctcacgcctgtaatcccaggactttgggaggccgaggtgggtggatcacgaggtcaggagatcgagaccatcctggccaacatggtgaacccccatctctactaaaactacaaaaaaattagccaggcatggagacatatgactgtagtcccagctattctggaggctgaggcaggagaattgcttgaacccaggagctggaggttgctgtgagccaagattgcaccactgcactccagcctgggcgacagagtgagactccgtctcaaaaagaaaataaataaataaataaaataaattaacctgaatgcattgaggttgggcatagagtcttggttgcctcaaacatactcaccccctgttgtaaacatcacttgtcacttcatatatgtatgcacacgctggcccccttgaagttctttgattttattattcttcctctatagcttgcattaaaaaaatttttaagaataatatttttaatttaacccaccgtattcaaaatgttatcatatcaacttgcaatcaatgcagaaaaaaagtattaatgagatatttttcatttttttgtactaaacctttagagtccaatctgttttttattgttgtaaaacatatataacataaaattgaccttttaaccatttttaagtatacagtttactgaaattaagtacattcgcattgttgtgcaaccatcaccactatctaccagcagaactttttcatctttccaagagaaaactccataccattaaacaataactcctcatactcccctctccccagcccatggcaaccaccattctattttctgtctctatgaatttgacttctccaaatacctcatgtaagaggaattgtacaccatttgtccttttgcgtctagcttattttactcagcataatgtcctcaagattcgtcagcgttgtggcatgtgtaagaacctccttccttttaaggctgaataatatttgatttatatatattccatattccacgttttgtttatctattcatctacggtttccatttttatattagccaattttatgttgttgcccttgttttctctgtaaactgcctttaattattttatgagcagtgtgcagcttaaatacattcatagttttcatcttcaataagacaataagctccttaaaggtagtgtccaacacatgttttgcacaaaggggatgtttgacacgtgtgttcattggcacaagtaacactctgttctaacctataggtgaggtgaatgcagtggggagtcaggggatgcctgcaccttggcttggggtgatgtagaacacagaacatttgtgtccctgtgtccaagcctttggtaatcttatctatctgttctatgctcctgcatttacttttcttccccaatatctttttaatgatcattttagtaacagtactgtcaacatatattacactgaaaatgctgaaaggagtccctttgggaggaggcacacaggctgaaaaattgctcttcttattttcctctccttgctattccagcctcaactgctcttcttggtggagacaaccactatgggaccagagtagattaaaatataaggctgctttaatggtaaaaagtttcccagtattcaaattcagtgaaaaatgcccttaagctttaaaatatagagatataattcagtgatttttggggaaaacctttaaacagcaatctaaaaagaaaagtttggaaagaacctataatcagagcctggttgtcccaggaggtaaggttatatgggcatggtggcttcttctatggtataactaaagaacatgaaagtccttctgaacttacacccagcagaccaggagaattttcccttgtgtagtgacacttgattggcattcatgccaaagggctcttgtgaaatggttgcctgagcagagtgaggtggcgctatagtagcacatcaacactgattccccatgtgctccctgcactgtcagtccctaacaggcaggcataaagcctctgctggagccactgcagggatgggagctcaagaccactcatgcctaccctcacctgagtagcccactgtggtttgggacagccttgttgttagaaaaatctttgttttattgagaccaaaactttctctataaacatcacctttggcttaaaatttgccttaatcacatctaatcttttttttttttttttttttttaaagacagggtcttgcttcattgcccaagcaagcaagagtgcagtggtgcaatcatagctcactgcagcctcaaacacctgggctcaagtgatcctcccacctcagcctcccaagtagctggaactacagccatgggctaccatgcttcctggctaatttttaaattttttgtagagatgggaggtctcactgtgttgcccaggctggtcttgaactcctggccccaagtgatcctcccacctcagcctcccagttccataaaaaggagaactcaccaggagttgctgcacagttcatgttcacaggatgcacgttctttcctattcagcactaagaaagccattggctttaccactgaggtgaggcctgtgaacgagttagggtacagcccaatatatggcttccttttattttcttgttttaaaatggccatctgtagagtcttctggaagccaccatatgtctcctgtgttcttgacaacaaccatgaaaggtggggtaggctggctcctgttctgcagatggtgagatggcacatggggagatggtgttgtacagtgggaaatgcaggctgaagccaaacagacctgggttgaatgcaaggtccaccaagcatctgggtccacactccctgtctggccttggcctagtcatttaaactctccgagcccaggttcctcatctattaagtgggggaaaataatagtagctacagaacagggttgtaataacaatgaatgtataaagttgtatagccctaagcttaaagcttggcttgtgttattgttgttaataaactattctccacccactccctttcatttgagtaaatctgcagcccaagctttactcaaaagaaaatattttgcattatgggaaaaggggaatttttaaaaaatcccttctctatgatacctggagtctgttttatgaacctagaaactaaatattcttatcaacttggcaggtaaatgaaaacaaaattatgtcacaccaaactgaaaaggcgaatgcatctttttgcatctgactttaaaagctgtcaggtctaagccacctagatttcattctaatgaggattcagggccagcttgtgaatcgtgagtcatgtgcaggctctgaacccaacagttggtaagctgggcttcaacaaagaacttaattaaggagaaccaccctcttcccaccccccacttattaccaccctcaatccccacccacaaaccacaaagggatatgcaccttgcactaggtttttgaccttattatgcacagtgtaacatttattacttcactcagcactgctggatgaaaacagtcctctttcaatttacaaaaacgcactttacaggaaatgtaggagaaaggccagagtacagattaatgaatgctatcaaatacatccacctgaaagtgtcaccaattttgctgtgacacagttcctggaattgcctcagagatttaaacttgtggataccccagtattgtatccccaaagactttgaaagaagtgcaaaaaatatgttctgttcataaagcattgtcaaggttatttgcaagggggtttggtttgttttattcctagggcctccaagaaatttggcccccctgccttttccatttttttttgttcctttttggtttagccaacctggcctttttgtttcctgaaccagcaaaggtagccttgcctcaggatatttgcccttggtgttacttttggttagaaaatcctttggttgggggggttttttccccatacaggttttagccaaaaaaccccctccttagagaagcattttttcatcccttctatgaagtagcagccctcagcttttttttagaacatacttttttttttttttttgccttcattgtacagtcttcccttggtatctgtaagagatttgtcccagtacccctggaggatactaaaatcctaggatgctcaagtcctttatgtaaaatagcatagtatttgcatataacatacacacatcctcctgtatacttgacatcatctctagattacttataatacctaatacaatgcttacacatcatttcatttgcttgaattaaacatagcacttggcatgtggcaaattcaagttttgctttttggaactttgtggaacttttttttcccgaacatttttgacccgcaggcagttgaatccatgaatgcagaacccacgaatgtggagggccaagtgtatttaccactatgtctcagtgattttagttaatggaggtgacaacatggagaggtcaatgccattggaacaagacttattacttacatttcccaagagaaggggatatacgacaccacgcagggccacagagaaagcaccaggttttggtaggaggcagaagccagaaaggggagagtctaggccacggtctttatcagagattccatgggaaagtcaagacagggcagaataaatactttaggactggctagttttgataatttctgtgggctttgggctataaaggtggtctctaattgcctcatacgtggttccaggataatttagggcagggaaaatattagcttggtgtgtgagggttagataaagggggtagttggggatatagactctggataggttggttggcatgtgaaaggaatgcctttcataagagctcaatcctgagcttttaactatctctaagaattggctagtgttgcaggaaaagtctctttccagacaacaagatttttcaggtgtcaaaatgtcataagatatacaaaataaaaaaatatgattaatacaaactatatgaaataatctcatttatttttgtctgtctactttaacagaaggtaagccccatgaaggtagggaccgtgtccttattgttcatgaccatatggccagcacaaagtaggtgttcaataaatatttgttgcatgaataaggaaatacgagctcctagagtctgggactgtgtggtcttcacagttgtatctccctgttccaactccatccttattctttctctagcacagtgcagaatacatagtaactgtcatttaaaaagggttgttgaattaatttgaactgagaagggtaatataccattttaatttgtgtagtttaaaatagttttagcaaatgtattcatttgtcacagataaagtggatggcacaaaaaatcatacattttagtaagaagaaataagatcaaacagattcaaaacatatgctccttttaatcagggattagcaatagcatattcaaatatcaaggacaacacatcatggattatagtgacccgatctctgcataaaatagatatttaaattcacctttaaaaacaggagcacagccagacagggttgtatacagctgtagtccaagcttcttgagaggctgaggtgggaggattgcttgagcccaggagtttgagtcttgcctgggcaacacagcaagactctgcctctaaaataataaaaataaataagtaaataggaatgtaatataccaagatgttaaaagcattaatctctagacagcaggagaagtatctttttagttttccacattttccttattttttacaatgaatgtacatgacttttaaaataagaaaaaaaatcattcaaaagaaattagcactttggttatattttattctgacttcctcattagagtatgccagcagattaatagaactaacaaaggagcctaaattctgcaacatttttttctagctccttttttatttatttatgcctcagaagcaatgtgaattctcaaattatcctttattaaatctaatcagagttttgatggactccaacaaacgagagcacagcatgttagttaccatgtcatgcaagaacagaaaataacctggtagattctccatgtcccgctaccaatgtcagccctgccaacgatccttactgacgttcccaaaactgacattcccctttcattgatgtcactgaatcaggaagccgaaaagctgttgcaaaatgactgtttctattgcaaaggtttaaaactttagagattgaaaggttaaagttaaaaatatgtattttaatttgaacaacagatggccttggagtgactacaaggctgaattaactctcaagtctctatggctgtttgtggaaagaaaaaataaaaaagacaaccaaaacccttaaaaagcccacactggaacacacagctcaagtgctggtgacatcagcagaatctctctgttgaattagagtcccgaatttggcttcagagccatctgttagcctccagatagaataatcttctatgaaattatactgcatagtttcactaatgaacatttccaattgtcagggcctcagtctcatagctgtcccacctcttggagcctccatggctccctaagcccctgtgatacacggagggatcctacttgctaaagttcacaatggatctgtcctttgaaaagatgtgtcttatcttagattgagttctatgaaaacagtctttgagatggagagctgcatgcagaaggtttattagaaagtgctcttgggaaatacagctataaggaaatgaggaaggctgcattgtgcaaagggaaaagctgacctacaaggcagttctaactcaggccttgctgtcctgtggcgagctctgttgctgggaagggccgtcagagttgtcccagattgaatcacagaatcttgggtctttgcatcttcatatcagctgtcattggatatcagctgctccctgagaaaatatttagtaaatgattgctttattattattactattgtttgctctagactgaatgtttgtgtcccctcaaaattaatatgtcgaaacctaacccccaaggtgatggtattaggaggtggagctgtggggaactggttaggtcatgaacatagggccctcatgatggaattagtgcccttataaggtgctaataactctggtcaccctttcaccatgtgagaacacagcaaggtggcactgttgatgagccagaaggcaggccctcaccagacaccaccaaatctgccttgatcttggacagcccggcttccagagctgtgtgaaataaatttctgttgcttataaggtacccagtttataatattttgttatgagggtcaaatgggctaagatattattaatcccaaagtgagtggatccttctgctcaacaccaggcaccagttggggagctttggggccatttgtatgggtgatgaggaaggataaagggctgagtagaacacaagtcagatgtgcagtgctggaattaacagaaaggcaatgtcaccctggcatgcctatgcacatgtacggaatatcaaaatgtggggagaaggcagccaccctacccagcagcgatgaagtcctagagtctactggcttgggcatcttgctgctctaaccagaaagctccgcgtctgggctgctgccagagtgggtataagtagtccctttttaggcagaacattatctagattggattacatgcttgtaaactgatcagtgcatcttcatatgctgtcaagcatctgagttcaaacaattgaactattttaataagattagcaacttggccctttcctatagtttttctctctacaggattccattcagaatcctctggagaagagtgtcttagggaagtagtaggatttcaggatgccctgcatctgccttcctgaggcagatacagctaaaaaagaccttcatgtccactagaaccacctgtacaccccaaaatgtgccagagaaatgtgcccaaagtcaagggagtggtattgtggacaggaggtttaataggattaatatgtattcttggttggtaaaccttgcaatgagtgtgcttataactcacccatggattgagagccaatctctgcctccaaaggctagagtgtaaaaaatggccagatggccaataatgaggcagaatttcataataatataatgattaagggtttgaaataaaggttatggaattgcacagatctgcttttcaaatttcagttcctccacttactaattttgaaaacttgatgaagtgatttaacatctctaaatcttactagtttcctcctctttaaagtgggataacaatgcctacttgtggcaaatggacctaagccagtttgctcattcacaaatactagatccttcgaggattatgattgggttctttttagtagatggtaggtagatggtagatgttataatcgttgcaggtagaaggctttcagtttcctcctcaaaatttctctaccaggtgctacttgctacatgaaagcaagtctcaggccagattctcaaattcttccagataggtaggcacaaaaacagtcatctaactcattctgtaagtgtgacaaaatcccagctctctctgtaattctctattggttaataggacaatttttagaggtagaattcaacttaaatttctagtagattctaggtaacaccagcctctcttcagaatcctaaatctagggattcttttttgaagcaattgggctattttagtaaagggggtgtgtctgtatgatacttatagacagtgcagtgcctggaacacttttatttatttcaccaatgagaaatgatttctaacatttttatgctaatgaataaacctttggtgttgaccagaaatcatgatagctaaagaataaagtagttctgtgggaactctttctggaatactgtattctaatatagtctcacaaaagctagtcatttttggagagtgttttcctgattagaattctttgaatattaattgaccaccctaaggtggttttaattagggcaattaactagggtaattaactactttaagatgtggattaaaatacgtatgcaaacactctctcacagacaaactactgtctatgctgatatattttaaagttaaagaccacatagaatgtctcatagaattaaatgacataatcaagtggtaactgacagcctgccctgatttatgggaatgaatgatacttctttggtggccaccagaaatacattgacggtgggggagtttttgcaagggattggaattcttgagtcaacagctaaggggtgggtgtagagagctttagatgttaatgttaatgtgatattgatagatatcactagagggtaaactccataaggacaggaacatttcccctttatttccctgctgtatttcagtgtttagaacagtacctggtatattgtagttgctcaatagatagttgttgaatgaaggaatgaataaattttaaaaatctgatctgattcttttgaggatgttcaggagttagtgcagtgctaggcatagagtaaatgcctaatgaatgtttactaattagtatgaatgaatgaatgaatgaataagcaattgagtgaacaagtaaaagaatttcctaaaggatattgtcaaactagatcaatataatgctgcacagaaatttaatttatgctgtgtttatagcaactctagcgatgatattttagataagatggcctgagcatagtggcattataaccaaatgaatgtctctatctgaagaatacaggttaagagacccatattgaactgaagaaagggctctatagtagtcgttggaaggctcccttctaagctcatcagagtctccatgtagagattgccattttccacgttgtatattttgctttttatgaacagctcttaattttaattttcaaatctatcaacctttccctttttggtttgcacattttataccttgtttaagaaattctcttctagatcaaggttaaaaatatatacttctttattttttattaaagttttgaaaactttgtctctctcagaggtcatcaaaccatcaagaattgatattttgcatatagtataaggtaggaaaatacaatttcattttcccttatatggttggtcattatttaaatataattttatttagtccaataactacattttatcatttccatctaaatcttgactagaggcttttttgggaagtggaaagggcaggttgtacaagtcatgttaattttatcctcccaacttgtgtaaatgggagcctgtgcttagggatttggtgagaggagagatccttcctcccatactccctcctttccagctccaactgtctcaagtctgagacaggccatgactttcttctcattgcaagttcattaatcatctaaggaggatgtcaacctttgggttgtgggaaactttattctagaatctctgctttaccttctcattctgctttattccctcacatctcatgtctgccccaataaaaccaaggctttttgctaccaggagtaaggaattttagtactagattatttctccttattgttgattctggcctcaagggctttgggaattccctttaatctcctgaaagctcattcatgcattaatttttttttaatttaattcaaatttgtagatgttctgaaccatgaggaagtctgcaaaaacctagtctttcacgttttcacgttgctgaaatagaagtctatggtatcttttttgtttatttatttattttttgttttgggggttggtttgtttatttcatcagtgcctttggagactaatgttttttacactcacatctttgatccatacagacttaattttgatatagtaaagggtatggtagggaatcctgctttattttttcaaagtcatccagtaaacacaaaacaacactatttattgaataattcacagaatggaagttttagaatgtaaatactcaatatgtgatagggaaaagaacactaatacaaagtataaaatcttccaaagcaaggccaacccctattattactgtcttaccagtctgcactggatgtggtcagcttcttgaatcaccagggctgtccatgctagagatacttccatctcttttagctcaaaatatttacagaaatacatatactgttgggaatataatggaggatatataatcaactttttcatgttcattgttttgttactatacatagtagatgagtttcagaaaagttgtattacattaaaatcatatttttagttcccctggcaagtgttctctttaaagggattttactttgaattatttttgaaaatcatcttaaagggtaaataatgactccctaatttttctatgatgcaaataagagtttttatttactaagtttctcaatgcaagatatacttgcataatgcagattcttttctaatacaggagaaaaaaatgaggaggctaaattttaaaagcaaatcaatgtgtattttaaaaaatgcgattgttggaatacagacttaaagacatttcttaaggatcatttacatgaatccaatttgcttgcctctatatgagaggcaacattttgggtgattttttttttcaaaatctaatttttaagctttgtagggtaggtgccaaatggtattttaaaaacacacatttaaaaaaggaagaacgtgcagttttgcctggagtacagatggagcctgtgtcaattgaaggcattttgcctaaggacacagagaaaatcacttcttcataaagaccataaactccactcatgtttctgttcattttaatttgtagaaagtgggaagaaatcaaataggggggcatacaggttcatttgtttaaataatctcatcactcaaattttatatcagttatgctctaaaaattatttgacccccaaatcagtaacgtaatttttatatgaaaaaatatggtcatttctggttatttcttgttgcttctcttactgatttttttttctgtcatgtactgtgtattgtgtagatagggcccaattctattccatctccatacctcatacatatcttttatatctcctcactttggtcccctgcagcataccttatattagtaatttaaaaaatgatgatagtaacccttattccctgtgccaggcattgtgctcaggactgtacaggtaacttttcatttaagctgcaaaacagaaatgaggaaccacagagtatttgagagacaagaggcagagccagtatctgagcatgcgctttggcttttaaaaccccttccctttaccactctgccgatattctttataaagacataaatgtgaaactgctggtaagaagataatataaatcttcattgattgacatggaaatgtgtctattataaattgctatgtaaaaaactcagattgtaatacagggtaggcatcaggatcccattcttttaaaaataaatttgcatatgtacaaaaatggctggaaagatagattcctaaatgttaatagcaattcccagtggtttaaaatattcttctttaaatttttggatttcacttttcagggagcgtttttcagtcatggttctttattgcaagcaacaactctgggggaaaaaaaaagcagcagcacatggccagacgtgagatctttggttttaataccatgtgctgctgtatcatttatagatgataatctttttcattttatttcttccttctacttttgattattaagccaattctcatattatcaaatatttgggacaaagttaatcctgcctggcaataatttctcatcggttttctatttttaaagattaactcattttaatctgttctccctgtgtcattaatattgtagtggcatcaagctacagcacaaactgacctgtatgaaaaagggaaatgtattgagttataactggagcacagaggttgagtcagagattctcagtgtcatcagggtattgaaacaacttctctgtgattcctttccctctactctccccgctttgataggctcattcgcattctgcttcctcatccttgtataaaaagctgcagctattacagtctccacatccttaccttcctctcttcagctggagaaagaccatcgcccctgataggtcctgggaaaccatgaagaaacttctttcctagagaaacctcagcaaatgtctgtttcttatttgcccaaatagggtcacctgtaaattcctgaaccaatttctaaatatctaactactaaataccaaattcattactcaatactaattaccatgaagctgagttgggtgggtaggtctccaaagggaaatttggctgctgttagtaggggaagaggaaaatgaaggctgggaagccactcattctcactggcttttatatccaccccccagtacccccaccctcccaactgccactcttaactcttccttacttcatttttgtgacagttttattccacctacctactgaattattttcctcattaaggttttatgaccactttaagaatctaacataacttgcttttggccacaacatcaaacccaaactctcatatccatttaaatttttccctccccaaccattcaccaccacttgatctattatcctaaaacagctctcactttgccccttctttactgaaagttgtctgagtcctggctgcataacaggtgatgttcattcaccctatcctgtcatttgaaaattttgacaatctggcctcatctacaatttaactttttctcttgtccttccccttactatttctagaaaacaccatattctttcttacctccacaactttgaaaacactgtctctttccatctggaaatctttcttttcatagatttggataactaagtaacattctataccatatatttctgcatacttatgtctttttctgtgaattataactgttcataaaaacacaaactagcaatatttatatgaaggcatgtttcattcattagtttatacactgatcgtggtctataaggttctgcatgagcagatgtccacctacctcccagtcttgtgtcacattctcctttttcttgcttgctatgccttaccacacaacaaatgcctaatgctgtttcctgttttagaaattccatacacatatcctccacccaaaatgctctttctccacttcttcacctgaataaactctactcctcttttaggtgtctccttgaatgtcatttctttagaaagacctctgactctcaaaagctttggtcctcctgttatgtgcttttatgggaccctttacttttcctttgtaatatttatttcagttgtaattaattatccattctattatctcttgaatgcttattactcttaacatactctaaacacctaacacgataattagtactggtggatgctccattctttttttgaataaataatggtggatactttttctccacagcagtgctttttttcattaatcttcactggctaacaggtgctgcataatctaacattgcttttatttttggataaagcattgcattcaaatcatttcattagatttagaagtcttcctggaaatagacgtgaactaccaactctagagctttggaggtgactttacttccagctcttctgctgtcttctcctcccgtccttgatcatctcacttgcctaacaagtgagtcattcacataacatttaagaagaaactcccatttgctactttgtgtcctgtttgatgtcttcttttccttaaggacaagacacaggataaaagataagtattacacgaacatgtcttcatcatgcctggccttttccaatcagtattccaaatatatacatgcatataatgcactctgttcatttcaaatgagatctaattaaatgctattttataccaaatatcaaaaatccaattagctattcaagtagactccagaattttttctgtttggccattcttactgaatatttcaagatttattgagtcaaaattttatactatttaaactgaggctacagagtttcagaatgagttttagagaaactaattccaggtgtattcttactgatcctatgatatctttctgtgagaaatataggacaaatacttctcttctgacttcaaaaaatgaagaaatagggattatgtcaatagcccacttctctttggagcaatgaaaatgttctaaatcttggctgttcaatatggtagcactagcgacatgtgattattgaacacttgaaatgtgattagtgcactgagaacctgaattttaaatttaatttaattaacttaaggttacatagtcgcatgtagctaatgattagtgtatatcacagcacagctttatatgctcaaagtgatggataaatgggcttctggatttgtaaaagaagagagtcaagaagggactgttagccaagcgcagtggctcatgcttgtaattccagcacattgggaggctgaggtggaagaattgcttgaggccaagagtttgagaccagcctggacaacatagtgagattccatcgctacaagaaaaaaaaaagattgattgttaattctggttctctcctcatttctcattcaggtgaggggacaattcacaagcagacacttgtttctaataggatgtcctgactatgtgagacattccatgccctaaaactacacatcacctcatcggaaacactgaaagacagacttctgccaaaataatttgctaagcttgtttaaacagacaggctgggtttcttctctctcataagactcagatatagaaatgtttaaagggttccgaatcataccaataatatgagcacgtattatggctgagtgtttgtggaaatattgcacatccacccaactcatcacctgttaagtcacatctttgtttaattttcaaaaatgaaatgattcatagtcatttcattcatgggaattggtgccagtttatttctgggagttcaattgccagcttctggaattgagacacaaatatcttaatataaacaggctatatgcaggagctttcaatcttctttccccttggaaaagcaccagtaatttcatatttggtctaataaatcagtttccggaagaatgtttgctgacgtcattttttatatccctcatggattttatatggaaaaacagcctggtcatgttcaaagcaatagattagttctggtagtgtctttcggcctgtgggagccctcattcctctgcaatcacggtttgggagtggttctatatcctgatacaagagaaatgcttttgtgaaaggcagctttggaggtatgttgagcagagaagctggaaactgatctccttaaaacattgatttcatcatgtctgtgtttaagttgtggctgcagtttgctattttcggagacaaggccaatgtcagcctgtattcaaagctctctgtagtaaagcaatttatacttactaggtgaaccacactgcaaaggcccttctacctcacatttaaaattttatctatgtgaattttgatgaagattaacagtaaaggaaggcttgaagccaaagagatgagaagattccaccaaaaaaaaaaaaaaaaaaaaaagcaacatgcagcataaacatacttaaaaagaagagaggttttctgtctggagcccacactgctgtgattgtatgtttaggagaacagggtgattttcattcatcctgtagctgttttccatgctccaattctagtaattcataatacacctattaagcacctactgtgtgcatagaactgggctcagtggtacaagagaatctgttttcagcctcattggctattttaagccatgcattttaaatgaatctttatttaaaacaatttcaaacacaggaagattgagagactaatacaatgatcctttatgtagtcatcacccagctttaacaattagcaagcattcatcatgtttgcatcacttattcttttctgttgtagttattgttgctaaatatttttaagcaaatcccacatttgatgtgacttcccaacacatttgtgcatatctctaaaaaatattagcattttctcccataactacagtgccatgatcacacccaagaaaattgagaatatttccctgtaccctccaataaccagtccatattcaaattttcctacttattaaaaaaatgcctttttaaaaattagttcgttcaaatcaggaactaaacaaggcctaacattacattacattaacatagccattaccataactgtaaacattacattaatccaatccaaattttcttttatatataatatacttttatataaaaatatttttattatatttatagaataaacacacacaaacacacatatatttgacatgttgaagaaatttggtcagttgtcctgcagtccctgcactccaaaattctaaatttttctgtttacttctttgtggcatcatttatcttaatcctttatccctccattttcttttctcatttttttttcttttctgagatagagtcttgctctgttgcccaggctggagtgcaatggcgtgatctcagctcactgcagcctccacctcccaggctcaagtgattctcatgtctcagcctcccaagtagctgggattacaggcatgagccaccatgcccagctaatttttatatttttagtagagacagggtttcaccatgttggctaggctgctcttgaactcctggcccaagtgatcagcctggcttggcctcccaaagttctgggattatagacatgagtcactactcctggaccctccattttcaataaacttgaaagtttatgttcaatttttcttttggcaagcatgcagtacttcaaaagcggtgctatgtgctgcacattgtatcacatcaggaggcacacaatgttgttcataccactctctaagcatcctccatcttcccctacgaagtttaagagaaccttggggaaatcatttaaccttgcagagcctcagctttctcatagagacaatggggataatagtagtacacccttgcaaagtttagtgtaaagattacactatgtaatctttgtaaagaccataacatggtgcatagtacactgaaaaatataagagaccttaacttattatgaataaggcatgcaaagtagttagtacagtacactggtctaggagagtgttaataatgttagctattattgcctttataaattattttggctgaacaggccaggtaaatttcattgagtagacagtatttgaaggatgaaatgaaaaggcatagaccgcaacacactaagcctcagagaaacctctctgataagtttctttgtaggactagattataaacttcaagatggcaggaatgtattaattatttatccataatatgtagttcaatgcatggccctcaataatatatgagtaaaaaatcctacacaaactcaactttagactggctggtgtcttattgtgaagtcccctgcccccatccctatgatacccacataacatccccttattcccagctctggacacttgcctctgccatttccactgcttagaagacctaggcccagccaggcacagtggctcatgcctgtagtcccagcactttgggaggccaaggagggcagatcacctgatgtcaggagttcaagagcaccctggccaacgtggtgaaaccccatctctactaaaaatacgaaaattagccaggcgtagttgcgggcgcctgtaatcccagctacttgggaggcgaggcaggagaatcacttgaacccgggaggcagaggttgcagtgagccaagattgtgccattgcactccagcctgggcagcaagagtgaaactgtctcaaaaaaaaaaagaaaaaaaaaaaaaaaagacctaagccctctgattctaccaatgtaagttggaccagttcttccatgtctttctcttacctgtgtcctttgggaggacttttctgagactgttccaccctatatcccactttttcttttctcaatacctacatcatactctttgttcacaaagtttgatgcttatactttacagatttgtaggttgtcttgctttctaataactccctacacttccatcttatttcctctaaataaattgtaaactctttaatgggtgatgtgttagtcagtttttgctttgttacaaagagatatctgaagctgtgtgctttatgaaggaaagaggtttaattggctcacggttctgcagactgtacatgaagcatggtgccggtttctgcttctggaaagggcttcaggaagcttacagtcatgatgagggggaaggggagccaacatgtcacatggtgagagggagtaagagagaggagggggaggttccacacccttttaagtaaccagatcttgtgtaaactaacagaacgagaactcactcatcaccaaggggatgacactaagccattcatgaaggatccactcccctcatccaatacctttcactaggccccacctctaacactggggattacatttcaatgtgaggtttagaggagacaaacatcccaaccatatcagctgagttggtgttttctgcctttccatcttctattctcctcttacccaatactcattcccaaccgaaacacctggcacaggagtagacacagtagaacttcatataagtactacctgctaatttagcatctccttattacacctttttcaatgtacttgggaactcaaggacatggtcatcaatacactgcctggatgagagtggcatatccctactaccactgcattatgattgtctgcttatgtgcctgtgtccctatcaaactgatagagtcctggaaacagagattatggatttttacttctgttgccctaggaacttgcacagggattggcacatcacagataatcaatcaatgatgaatttaagaaattgtgggccaaccaatttgatgaaattcacttttgcctaaaaaaaaaatttgactgactatttagactagttcagtcaacaaagtaagatgtttcaaccatttacacatatgggcccagccctcatgagaatatgaaacatatttttaggagtcagataaaattagaactaaaattgaaatggaagaaaaatattaaagacggccattgactactaatggctttattgttctactcaggagcatcatggagctttcaaggttttaaacttaaagaaaaactcttaacagtagaatttaaagcaggagagagagctagcttgaggcctcttggtactgcttaattcacactcaagagatatctctcttctctcttctggaagctatactattgttcctccttccccacccagcgaccaaaaaacaaagcagcttcaagtcctggaaagtacagaagaaaaatcttctctgctcatgttgtaggtgtgtttcttccactacttggggtggaattcatcaaccaggttggggcatgtccaggctgtgttccacacatcttctcctgaatcctcagcccaagcagaaatcagacacctccatgctgtcctttaagagaaaagctggcatttcagtgttttaaacattggcatattctggttcaatggcccagctagatgtaaggaaggtgtgttacccaatttttttcatgctttgaaccaaaaagatgttcttccttatgttttactccacctgaccattgcctggcttgaagaaaaaaagagaacacttttcaggagctgagaaaattggcattgatttaacataatttagttaaaagttagttctcccctgccatgagccacagctgattatttagagaattattaccattcattgttcattgagttttatctttctaaattttcactgattagcatgatttgttactaggaaaaatattatgattttaattgcattttggcatcttaaaagaatgtttcacactgcttaacatctgcagtcaacagatgtttaaacacaactccctcaatgactaaaatttggcaaaatgtataatagttggaacagcttaaaattctaaatatacttctaggaacatgatacaggcagatgaaatactacttgtgtgtgttttatattaaatattaaaatattacatataccatccctctcggagatgacaggtttcagggaaaaaaacaacagccaagagatgtttcaaccctaccataccagatatattctatctataagcagggctatgtcttatggtcactgtcaactgcagtggggacccttttttaagtgctatttattgtggttaactctagaggctggcagaggcaaagctgtgagacagacacgtttgtcccttttgcttccccttttggcatccttcttttctctgactcagatcctcaggagctttcatgaagatatattctaagattaatatgtcagacttgagtttaagttaattggtcagccttcagttaattggggcaaagattcattcatatcagagtgtgtgtgtgtgcgtgtgtgtgtgtgtgtgtgtgtgtgtgtgcacgtgtgtgagtgtggtgtctgtctgctgtctgtttctcaaggcaggggttcagagaggagagaggatgacccaattagcatttcatcaactatttgaccaaccatttaagccgttatgtttagcatggcttaaagaaatccagagaaaaatcatgaatttcatttcgatcacaacttttaacagtctgctcctatgggcactttatgacagttgatgactcggggcttagcagagagttgcttcctgtccccttgttgaactcatccccaatgaaaacgccatttctacatcaagaatcctagaggctgtagcagcaagaatgagaaatccacattttctgtccctggatggttaagttcacagtcacaggaactgtgcagatataaagactttcaatcaatgtatctctgcctaagcttatgaggtcattctgttctctgttactgatttaagtcagtaaattttgagtacagccgattacttaatatattatgggtgggtctactccaatcaattgaaggccttaggagcaaagactaaggtttcctgaagaaaaaagaaattggcctcaaaactgcagcatagaaaccctactagaatttccagcctggcctgacctgcagattgtggactcaacactgactgaaacatcaactcatctgaattttcagaccaccagcttgccctacagattttggactggctggcccccacaactgaataagccaattccctaaaatctcctctctctctcctctccctctcgactagtacacatgtgtatatgtaacatctggattcagagaaagtgactatagccaggaggaagtagaatcatggagagataaataggactaggctatgagaagtgcaatgcaggtggtccatcaggaaggggaagcagcttgtacaaagaccaggagatgggggtctgtgcttttgagggggagaatggagggagagagcctgagagtctgagtctggagactgtgttagagagcagtgagtactaagactggatggattggtaggacccaagaactgatgtgtagaaaagagcctcttcttttttttccacgcagggggcttagaattattgcattttttaaacactgagtcatcttttctgtagtactctacaacagagtccacttcagactgtgcagctgtccccagctatcaccatatcctctgtctttcatatctatcctaaaaggcatttgctcttcctaaaagggatgccctccaaagaaattttaaaagaatcttatcaaggggccctggagaagaaagggatgtgagggtcaagtcacaactttgaggggaaatagaaagagggctcctttctgagaaagaagaatttcaaagagtccaagagaaccaaaaattcaggacccaggagggtaagcattcctgtttttgcaagcttcacagaccatttgagtgagtgggtttttcaggtgacatttaaatgaacaaataatatccatgtctcagggtcagaaatggtactttgcaactgattctgtccctcttgagaggcttctgcaagactgagagggtgggatgacttaatgaacattaaaaacaatgttattaggctggatatggtggcacatgcctgtaattctagcactttgggaggctgaggtgggcaggcccaggagttcaagaccagtctgggcaacatggtgagaccctgtatctaataaaaatacaaaaatttagccaggcatggtggcacacacctggagtcccagctactcaggagactgaggtgggaagatcacctgagctcaggaagtcgaggctgcagtgagccaagattgcactactgcactctagcctacatggataggagtgagacctgtttgaaaaacaaaaaacaatcaaaaacaaaaaaaaacaacccacacaatgttatttttaaaatactgaggggagagaagttggggaaaaaaagggaaaacctaaaactctccataatcctaccatcagaaaattacactaatgtgataagtgactttctcccctctgaatctccaattccattacttgtagtaaatatgaatcttattccacaaactcagacatgcaaaaaaaaaataccactttactttttacataaaattaattctaagcctatagcaactctctttatcatattaggtaattaggaatttggtctcagatattattgtcaccctcagggatggacaagggtctcagggttttgtgtagcaccaaaccctaataagatctcttcagccattgaacttactctacaatattaactgctgaggtgtccatggtctcagactacaaggtgtcttccggttctggcttctctgctgccgcttttcaaatcaggagaatctttggtgaggctttggaattcccagctccctagcccagcctccctagggtcttcctcctcatcagagtgctccagaattcagactaggattccattcacactccaaacaccttcccttctctctccagttcctccaggacaccaagcataatctcctcaatgggtttaggttttacaaaattcagtaccagaatcggaagtgtcttgcagacaactttggcttctggccctatgacaaacatctcccttgtggcaggaggccacaaaaagccctgaccatctgcttacaagggaggaggggaagaaacactgggaggacaaacacaagttaatattccaaaaattataccactacaaactgttgaccgttttctaagtctctttccagaatgttcttgtgcttataaagcaaaaatctctctacacataagcttttcttttttaagcaaaaaggggattgtactatatatatgcagttacagcttgctttttttttcacatagtatagtgtggacactatactatgtgaaataataaggacacttcctagagtgtccttattttatttgtgacattgggtactgctccactgatgggtactcaggtggtttctattgttttgctctttcacacagtgctgtattgtgcacgtacttgtacgtctctgtgttctttttctatcatcactttctagaagtgaactgactaggttgaccaagtggctagtgaatcaatacagaagtttatttgcaaacaggagcatagttatctgtttctctgcactgcgagccccggccaactctggtgggttggttagcatatgctggttttagagaaagagcctgaaaatgcatttctcaagatcgtagtcttcatgcatttgataaagttggtggagttggtgcaaagattattctaaaagtctctctaattagccttggtgaataggactctcattattagtgtataggaaacaataatctgggctttacaactaactagctaagagaccctggacaaaccatgtccacctcgaggtctcaggtagatcatgtaaaatggagatgggacacagataatctcctaaagacttcctgaagtgatatcatacatattgttatacatactctgcattcctaaacatacactgtcctgggcaggtaacaagtatctgtctgtggattgatgacagactttgggctatattgactttgctatgcctcttcagtttcctactttatatttttggaacggtataatacatttgtgttagcttgtgttcctccaaaagctgacccagggacaagggttcaagtttaagaggtttatatttggaaagtgcaggaaagatcaggaagggaggtggctgatataaggtatgttatcaagccagctgtcaccgggcttaatcccaaagggcaatgctgagaaacagcgttaaaacccatgcttcagagttatctgcctttagatcaagggtgctcgggtgtttatacatgaaatcccatcagcacaccgtaatgtgctaatgtgctaattaccagcacatctagcctgccatgcaaaggctgaacagcctgccttggtttaaggaaaagccttcaggtcaagagtgcaaaaagagttttctggaacacagctaagggatgcgggcatggccacagtgtctactgtgtaactctcacagttcccctcacaccagtgttgctttactcttttgtgtctttgctcatgttgtattcactcctttccctttctgatcaatttcaaatcctcagacttcctatgtttgtgtcctgcctctgctacttcctagctgagtgactttgggcatgttacttaagctctctgtgcctcagtttcctcatctggaaataggcatagtgataattctcatctcattaaacagttgttaggatcaaatggtaatggtggaaagcacttatggcagtgcctaccacttaataagtcttcagtaaatgtcatcatatttattatccttcaatagctacttcaagtggtagtgccttgaagaaagcatccctgagacttcaggcagggttaagggctcaggccccttcttaacacattatgatgacactttccatatgcaagtttatcttctcctatggacagtgagtccaggaaggcgtcactgtggcttactcaggtctgcgtcctctgcaattcttgcaggacctaacctgccattctgttaatgagtaatagacagagactttgctttcattcactcataaataaacctttgctttaagattgaccctgagtaaaacgtaaatttcatcaaactgtagtaacaatacactttctttatcctaacacatacattgccaacactgctcccttaaaacacacacacacacacacacacacacacacacacacgcacacacaaaaccactgcttagtatttctgaaatcaggttgtcagtctaaatactgagatttgtttttcattttatctgcctttctttcacaaagtaggctattattaaataaatgctagactctagtattaaaattgacaaatgtatggtttagacctcaaagtgaaggataacttggaaatagttctcggttgctcttcaagaagaaaacaggttcctggggtgcctcgccatgtggtggatctcacactcccgtcattctgctaacacaatcccaggagctgattctgttgcgtctcgcagggtatcagtctcatccagatcaagtatgagcagggcagactggtaggtcctaggagtgggaagggacagaagaactaatttgatgccatgttggaaggtcaagacagagatgccaaatcagatgtcaggatggaggagccaacaaaatgggcaataggggacacagttgaggaatggagtgacagtagcaagagagtgagaagtaggaactcagcagagatgcacacccagccaagaagttaccctgcattaaatgacagtgagctggcctggaatggacaccccaaaaccaagatccatggcagaggggacactggcagtacagggtctggccctggacatcaggtgggtgaaactgttggggatggaggagaagaaggcattgatgatgaaccatgagtgttgggagggtttagtcagatattaaacattgcctcatttaattttgcttgaaaagaaaaataactctggttagaatattttagaatgcaggcttgctagtatcactaaaccagaaaaaaaaattgtcaaaaatatatataaaaaagaaaaacaagagcaaatccagatttgaatccagtctacttgagttaacagctggatgaatttgggcaaacaatttggacaagcgagttctctgcatttaacttttcatcatgaaatacacataatattcctgggctgttgtgaggaattattaagataagaagataatgacagcaatggtctactgaatacttaatatttgcaggcacagtaccaagggttttcccatacttggtcttattttctaaaattagcctacaaggtaagtaccatagattcttattttatagctgcaaattgagtttcagtgtgattaagtaacttgtgccatgtctcgctaaagaatatatataaatcatcacacatagaatacagtaggtgtttaacacatgtgagttttctcctttcactctgcttgcaatgctagccatagaagattttaaaattgtctgatttttgaagaaaaaacccttggaagagcactccctctctgctggactagagtttaactatcatcatgttctttgtgaatttgatagccttttaatccaccgaggccatgaccttcttgtaatgtgttgacttcctctaccgccagtgtttctctcgagggacctccatctgcatttgtttgtggctgtccctctcagtgacatttcctcctttacctgattctcaagataatttgtttttcatttgagcttcagcagcctgagagatgatgtcaaaatcaatcaatcctcctacaagctttgtaaatacaatcccttggctttgcagaaagggtatctctattgcccagttcttcctggagcagtggggccacccaaaggagaatcaggaggttagaacacatcctagaacatgaaatctcatgcatgaggggatgtcagcctcatagcatctgagtcctagtgtgggaagatgggagctgaggaggtgtcatcccctgggacttctgggagctgcaggtggaaccttagagcccttggtccaatgtggataataaggagccctgttagagagccatagaaaccatccctgagtcatgtcttcctttctccttcaatatgaccttctctgggagtcttcttgcggggaggcagcaatgccttggaaagtttgagctggtttctgatgagaggttgaggcagggatctcatggttatctccttcctcaaaatggagccagaagatgcaagccagctgtcatggactgattgaagcctgttatggatttgccttttaatgtgtttgttaaaaatttgaatcaggtgcaacatttaaaatgggagacttcacatgaaactccagatttctggcttcccttgaaaaatcacacctgataatcctgggctagcatttctatgggcaagagtaggctggatctagggaagcctcttcaggtggggcaggtgcagtcctgtgtgccccagtccccacctgaccccatgctcccttaggttacctgtcttgttccctgggcatttgagttttgaaagaaggaacgggaaggaaaataacaatagagttacaagacttacaacctaacacagttaataacaggaaaagtaaaaggcgcttcaggtaactatttcctttacatatcacgcaaaacatccagttttgcagaaagataaattggagaccagagaagtgaattaagctgcttaaagtgttggtaaatggtacaaccaaaatttgaggtttggtctctttgactccaagtcatgtgaccacaaaatcccactttgctacagtggcctcccccagaatctgcttccctttgattaacaggatgccctcacgcttctgcatatccagggcacctgatgccctgtcagatatcaaagagttaatgttataccagtcatcattcttgataccaagaaaattcaagaggagtcttgtttttctctgatgctggctggcatcctctctgctccctgagtctctaatgagaatgtgtacagtggtattcaaatagggtaggagaaacttctttgtgtatcactgaggtcaccatttgcattaagggaaaagaggttcgatgactctcagttcggcaattcagcagccatctgtacttcacatcactggcctgaattttcagcctcattaaattctttcaggtcgtctggtcccaatctttgtggttacccaagtgtatatttatgtctcatgagttattgccatttctcacctgtgcttaactgctcccacctcccactacccttaattgatcttgcagtacttctggtattttttttaaagtcttccctttcccaattatttccaagagcccacaggggttactgcatgtgtatcagacactgtgtcctctgggtttctacatggcttctaccttgttctgtcaaagctccctgtgaactatttttgctgggtaccaccatctcccactggacaccgccgccaagaggtgtttaaggtcatttggggttgcatgcactggtgggtagaatgaatgtttctttctcatggtctgtgtttcacatggctaccaaactgctggtagtgccatgtcttagggagcttagcttggttggtttttgtcacaacatccctctgcctccatacatacctttgcattgctccacaggattcagaggagatgccgtggggaactgggctgagagatataatactgagctagggtttgctccttccctttgatgactaaggctttatttttgcaccaagactatctgcctagtaccctcttcccttaggctgagttttctcccaggtggctctttactcccctgtgcaacccttgctatcttgcctgtattgggcatgactgggtctaagtgatggatatgtcttggtggctcgcagtcaaattggaacccctgaaatctgtttttttgttttctgtttttttgttttgtttgtttttttttttgttttgacaaggtctcactctctcacctactccagagtgaagtggcacactcttggctcactgcagcctcaatctcctgggcccaagtgatcctcccaccttagcttcctgagtagctggcactacagacacatgccaccatgtgtggctcattttgtgtatattttgtagaggtggggttttgccatgttgcccaggctggtcttgaactctgggctcaagcgatccacctgccttggcctcagaaagtgctgagattacagacaggggccaccatacctggccggaacccctgaaatcttaggtggcagtattttatataattttgtgtccttaaagcccaaatcacctgaaatagttttatcatacagcctcaacccagacacagattggcttaagtgttcctctaagtgcttgggtatgcagcttcattgtcttctttcctaaagaaacaagcctgtaactcaaagattttgaaatttggattcttgcttgatgtaagctgagtagcacggttataaggctacagacaccactgcaataggtgggactccttgagccagcttaagccacaaggaggaaatggaagtggaacccaaggaaaggattatggctaggtcttgggaagaagggattgaggcagtgaacttcctcttgttcctgccttcctctgtatctttatgcagactgtctacctttgactcccagttcacaaggtggcatatgaccatcccattcttttcaggtttacatataatagttccagaaatatgcaagacttttctagtcccaatttaaaattcccaagaggaagaacctgattgtttctgtttaggtcagtgttcatctctgattcaatcaactgtgttccattcaccaagtctgtgtctaaggatcaaagatagaccagagaggttacagtgagctgacagccacatacacatccattctacttgaccatttttttttttcccattttctcacatttacttgtacctttctggaaaggcactgagtagaggggcaatactcaagataagcaatgaaagttaaccataatgttttctttcttttcttttcttttcttttttctgtgacagggtctcactctgtcacccaggctggagtgcagtagtgtgatctcagctcactgcaacctctgcttcctgggttcaagtgattcttatgcctcagcctcctgagcatctgggattacaggcgcacacgaccacaccagctaatttctgtatttttaatagaaacggggttttgccatgttggccaggctggtctcgaactgttagcctcaagtgatccccccacatcagcttcccaaagtgctgggattacaagcatgagccactgcactcaaccctaacaaagaatcctagtagctaatgtttactagacatttcgtatgtaacagatactgtattgagtgcatcacaggaattatctcacctattacatacaagaagatcttatcattgattattattattttcatgtgcgtccctgtgaagagaccaccaaacaggctttgtgtgagcaataaagcttttaatcacctgggtgcaggtgggctgagtccgaaaagagagtcagcaaagggagataggggtggggccatttataggatttgggtaggtaagggaaaattacagtcaaaggggggttgttctctggcgggcaggagtggggctcgcaatgtgctcagtgggggtgctttttgagccaggatgagccaggaaaaggactttcacaaggtaatgtcatcacttaaggcaaggaccggccatttacacttcttttgtggtggaatgtcatcagttaaggtggggcagggcatattcacttcttttgtgattcttcagttacttcaggccatctgggcgtatatgtgcaagtcacaggggatgtgatggctgggcttgggctcagaggcctgacattcctgccttcttctattaataagaaaaataaaacaaaatagtattgaagtgttggggcggcaaaaatttttggggggtggtttggagagagaatgggtgatgtttctcagggctacttcaagcaggattaggggcagcgtgggaacctagagtgggagagattaagctgaagggaggtcttgtggtaaggggtgatattgtggggatgttagaagaaacatttgttgtatagaatgattggtgatggcctagatacggttttggatgaattgagaaactaaatggaataacagaaggagaaaaacaggtataaaaggtctaagaattgggacgactcaggatatctgattagagagtgcctaaggagatacagcatagtcctgccagcaaagattatttatttacttcaagagttaacagtggcagtttggggatagcaccaggagatatcagctgtgatggcttggaaaaacagtgtaaactggcagtgtaaacaagagcagggtatgagtagttgagaacggtgaataggagtatgactagacagaagatagtagggatgacaagatttttggggcacagtctaagttggtctggtgtctggaatgagaccggggcctaataaaaaggagcatctatacaggagcttaaatgggctgtaccctgtagcattccgaggacaggcctgaattctgagaagggaaagtggtaaaagtattgtctagtcctttttaagttggtggctgagcttggtgaggtgtgtttttaaaagacctttagtccattctacttttcttgaagacggaggaccgtaagggatataaaggtttcactgaatactaagagcctgaaaaactgcttggctgatttgactaataaaggctcgtctgttatcagactgtatagaggtgggaaggctaaactgaggaattatgtctgacagaacggaagaaatgacctcagtggccttctcagaccctgtaggaaaggcctctacctatccagtgaaagaatctacctagactaagaggtattttagttatctgactcaggccatgttgagtaaagctaatttgccagtcctgggtggggcaaatcctggagcttgatgtgtagggaagggagggggcctgaataatccctgaggagtagtagaatagcagatggaacactgagaagttatttcctcgaggatagatttccacgatggaaaggaaatgagaggttctaagaggcgggctagtggcttgtactatagtataacctgcctttgctggtgtgtggcgattaggcctggtggaactgccgtcaataaatcaagcgtgatcagggtgaggaacaggaaagaaggaaatttggggaaatggggtgaatgtcaggtggatcagagagatagtcatgggggtcaggtgtggtatcaggaataatgtgggaggccggattgaagtctgggccgggaacaacggtaattgtgggagactcaacaaagagtgagtacagctgaaggagccggggagcagaaagtatatgcgtcaggtatggggaagaaaatagattttggaagttatgagaactgtagagagtgagttgagcatagcttgtgattttgagggcctctaaaagtattaaagcagcggcagccgctgcacgcagacatgagggctaggctaaaacagtaaggtcaagttgtttggacagaaaggctacagggtgtggtcctggctcttgtgtaagaattctgaccatgctagccatgcctaggaaggaaaggagttgttgttttgtagaaggtgcttgggtttgagagatcagtcggacacgattggcagggagagcacgtgtgtttttatgagaattatgccgagataggtaacagatgaggaagaaatttgggcttgattgaagtaatgggggctgtctgtgaagctttgcagcagtacagcctaggtaatttgctgagcttgatgggtgtcagggtcagtccaagtgaaagtgaagagaggctgggattaagggtgcaaaggaatagtaaagaaagcatgtttgagatctaggacagaataatgggttgtagagacaggtattgaggataggagagtatatgggtttggcatcacagggtggataggcaaaacaatttggttgataaggcacagatcctgaactaacttgtaaggcttgtctggttttaggacaggtaaaatgggggaattgtaaggagagtttataggctttaaaaggccatgctatagcaggcgagtgataacaggctttaatctttttaaagcgtgctgccggatgggatattggcgttgagtggggtaagggtgattaggttttaatgagatggtaaggggtgcatgatcggtcgccaaggagggagtagaggtatcttatacttgtgggttaaggtggggggatacaagaggaggacgcaaaggaggctttggattgggaagaagggtggcaatgagatatagctgtagtccagggatagtcagggaagcagataatttagttaaagtgtctcagcctaataagggaactgggcaggtggggataactaaaaaggagtgcttaaaagagtattttctaagttggcaccagagttggggagttttaagaggtttagaggcctggccgtcaatacccacaacagttatggaggcaagggaaacaggcccttgaaaagaaggtaatgtggagtgggtagcctccgtattgattaagaaggggacaggcttgccttccactgtgagagttacccgaagctctgcgtctgtgatggtctagggggcttccgaggccatcgggcagtgtcagtcttcagctgcgaagccgagaagatctgggaaggagtcagtcagagagccttgggccagagttccagggcctctgggagtggctgccaggtgagttgaacagtccgattttcagtggggtcccacacagatgggacacggcttaggaggaatcctgggctgcaggcattccttggcctggtggtcagatttctggcacttgtggcaagctcctgggggaggaggttctggaggaacgcctggccgctgagtttcaggcatttggaagttcttgtgtgctggagatgtggctggggtttgtctcacagtggaggcaaggaattgcaacttttttctattattgtacaccttgaaggtgaggttaattaaatcctgttgtggggtttgagggccggaatttaatttttggagttttatttaatgtcaggagcagattgacattattttgagaataagacggccttttgagcttttagggtctagggctgtaaagtgtctcagggttgctgccaaacaagtcatgaactgagctggattattatatttgatgaaaaagagcctaaacgctatctgatttgggataaagaaaaaggagcattaaccttgactatgcctttagctccagccacctttttaagagtaaattgccgggcaggagggggaaggctactcacggaacgaaactgtaagctggaccaggtgtgaggagaggaggtgataaaaagattatagggtggaggagcagaggctgaggaagaattgggacctagctcggcctggcgaggagcagcctggggaggaagggagaggtcagatgggtctgtagaaaaggaagattagaaagactcagcgacgcttggtgttgggactgaggggacaggcgggagggaaagagggaagatttgggacgagttgcactgggcacagagactgggaagggactgatgtgtaaaagaatgcctggatgtcaggcacctcagaccatttgcctattttatgacaagaattatttagatcttgtaggatggaaaaagtcaaagtgccattttctggctatttggaactgctgttgagtttgtattggggtcaggcggcattgcagaagaaaataaggcatttaggttttatgtcaggtgtgagttgaagaggttttaagtttttgagaacacaggccaagggagtagaaggaggaatggagggtggaaggttgcctatagtgaaggaagcaagcctagagaagagagtagagaaacagagggaagaggtttgggggttcttaccttccagaaaagtggaaaaaggggttggggcacagagataaggggttggggcacggaaataagggatggggcacagaaataagggatggggcatggaaataagggatgaggcgtggaaataaggggtaggggcacagaaataaggggtcggggcacagaaataagggattggggtgcagagatacgaggttggggtacttgcccctcctctagaaaagtgggacttgccactaagagtgaaggagaaggggttgaagggtacttgcccctcccccagaaaagcgggacttgccgctaagggtgaaggagaaggggttgaggggtacttgcccctcccccagaaaagcagagaaggggtagagacaaggagagaaggggttggggtacttgcccctttcccagaaaagcgggacctgccgctaagggtgaaggaccaaggcaggcatccctgcatggtctgacacctttgaaacgtgggtgaataatcaggcgtccctgcaatgattaaacaccaagggaaggctgccttcccagtccgtgaccggtgctggagttttggatccacagataaaacgtgtctcctttgtctctcccagaaaatgaaaggaattgaaattaagagaagggagagattgaagagtggaaaggagaaagtggttgagggacagtgagagaggttggagaagagagtaagaagaggccgcttacctgatttaaaattggtgagatgttcgttgggctggtcggtctgaggacctgaggtcgtaggtggatctttctcacggagcaaagaacaggaggacaggggattgatctcccaagggaggacccccgatccgagtcacggcaccaaatttcatgtgtgtccgtgtgaagagaccaccaaacaggctttgtgtgagcaataaagcttttaatcacctgggtgcaggtgggctgagtctgaaaagagagtcagcaaagggagataggggtggggcaatttataggatttgggtaggtaagggaaaattacagtcaaaggggggttgttctctggcaggcaggagtgggggtcgcaaggtgctcagtgggggtgctttttgagccaggatgagccaggaaaaggactttcacaaggtaatgtcatcacttaaggcaaggactggccatttacacttcttttgtggtggaatgtcatcagttaaggtggggcagggcatattcacttcttttgtgattcttcagttacttcaggccatctgggcgtatatgtgcaagtcacaggggatgtgatggcttggcttgggctcagaggcctggcaattattagcctcatttcacatgaggacaccagggttagggggcgggctggaccaagatctatgtggagagcagagttcaacccaaaatgcatgctttttatcactatatttagagatagacacacctggtttcaatccttgaggttgccactagctatgtgatttttgaataatcattctgaatcttagtttccacatctgtaaatgaagataaaaatacctttccaattaaaaatgattttaaactaggcaacttaggcaaattattcttttccttcatgtacctgggctttcccgcctcatctaagcacacttgttctttctaatgctccctgactgtaaccaaaacctccagagcccttcatccatcctctgattgccatgaattgccaacatcagataaatagtttaaaaagtggcaagaaagtaggatttcaagtcagaagacttggatttgaatcttgcttcagctttgtattaattgttatcattctgaatcatagtttccccatctgaaaaataagatgtggagttgttattattggtggtggtctgttctaagcattaaatgaagaaatgcatgtcaaaccttctgaaaactcagacaccaaacacttggaaaggagtctgttacagtctcaccaatgcaccacaatgtagcagtctctccttgtgaggtatcacccaagaccaagagaattaaggagtatggacccaaagggtgaggtcggagtgaaagtttaataagtgaatgaagaaagctctctgttgcagaaaggggacctggaagaggattgctgtttttcacagttgaatgcaaaggcttttataggaaactgatgagggctgggcattttgtttgcataaggcatgtttttctggtagctccaccccatcctcctaaggtgcatgtgggcccttagcttgagttacccatattgctttgttgcccttattatgcatgtgtcaggggatgaaattttccactgctggcatgtctgggcaagtcacctgtgtagcctttcttatctgtgcagctgtgggcatgtcttaggcaagtcccccagtgtaagttcccttatctgtgcctgcaggctgttcttttgtttctaaaaattcaatccagggcccatcctaactgcctgcctgaccggtttctttctttttcctctctcaattcttattaaggcagaaaaattctagaatgactttttgtcctatagccttgttcccagaatgctttggaaatgtaacagccaatttatcaagacaggggaattgcaatagagaaagagtacttaatgcagagcaaagagaaaaaagataaagttcttttaaatatatatagcttggatattcatgtttaattaagcaaattttaaccatagagctcttttgtttaaagaaaatctcttttaaatctcttattaccagactctagtcaggacagccaatatttctggcctttgaattctaccccaggtaaccgcccacatgaaattagtaagttttaattaaggttataacttaaccatggatacaaaaggtgttttaaagagatggtaagcagctttttttttttaaaaacaagatttagaatatccccaaaggtagtacagtgaaaggaaaattcaagacaggaaatcagaagctatctatggggtgaaaaaaaaaaaacctcaataaatggcaaagttccacaaataacaaaccagaaaggaatcattctgtaagccaagaattgaacctgggccaccattgtcaagagataaaaaccttagctactgagctacacagcattgagcagtttctactgctctcccccgaagaagtctacagcagctgatctgaagcttgcaaaggcttttaagtgctcaagataattcttagggctgtgatatgaacccccaaattcctgtcctctggatggtggagaccaggatgaagtacctctacatggtcacaaagttaagctcttaaagacacaaaacaagacagaaatttcatctggtattggtttcagggacccacaacaaagtttataactgaccagcctgccgggttggcttgaaaagcaggattacaggggtcctaaactcatgttctatcctgtgacacccttctctccattacggaaggacaaattcttagtacaaagtgcaccagatttgccacagcctaagactagtctcacaaatccttttttactattcatcaaacctttgcagagacacacagtgacatttattgcttaccactgcccccctccaacacacacacacacacactcacacagacacacaatgcagagagacagagagaaagagagagagagaggccagacacttttctggtaagaattcttgccctttgtgccagcatatcaggtttctgggtcccctttctctgcagcttctagaagaatggagcagcatttgatggccctgttcaccgtgccatagacgtgaggggaccaagccccattacaaaagaaaatgatccttttctgttttatggaaccataggcaaaagcttctcaatgttgcaagatgctgcctgatgggctacatggggaaccaaattaacattttccattccagtggaagcaaaatacacataacgctacagacattggtcaccttgttcagcacccaacatcgacctggcaagactcgaactttttcccgttggtccctgttgtctttgatctacacaaagtggggaatggtgacctccatctgggaattcaatgggtgatctctgggcaagatgaagagcagtcacaaacccgatccagggctgttaaacttctttcaggactcactgaatgtgaccagatagataaggagagttctctgagttaggcctgctagacttccatcagcaattccttcagagatctcctccacatatacaaatacacacatatagacaagacagacagaaggctttccaaatcaagattcctaaccaagaattccagagtatctcttccaaactatcctcctattctctgtttgagaaatctccctgaaatcttcttgattgaggagaagtctcccgaaccaagactctttttactagttaggcagagccaaccgagaccccccaggagccaaaccaagacagacaccccatgttgtagctacagacacctcacaatggagctacagaactagttgcgaaaaggaaggagacattggcagcacctaggatactcaccaacccagacaccctacaatggggctatagacagacaccctgtgatagggctacagttatgggacgtctccccaggactgtttctctattaaatccatgcccattgggtcgggagtgccctgtcagtagagagagtaccagagtcaactcccagtccaagtgaactaggtggctgcttgggctggcccctggatccattgctggagggggctactgaaccacgggcaggtagccacaagggcaatcctggatgagcctcgaaatttgtaaccacccaatggattcaccttgcccactgcttagacagagctgatttattaagacaggggaattgcaatagagaaagagtaattcagccagagccagctgtgcaggagactggagttttattattactcaaatcagtctccccaaaaactcggggatcagagttttcaaggataatttggtgggtagggggccagtgaatcaggagtgctgattggttggctcagggatgaaataacagggagtcaaagctcttctcttatgctgagtcagttcctgggtggagaccacagaactggttggcaggtccaggtggggccgtccagttggtagaaatacagaaacctgaaaagacatctcaaaaggctgatgttacctttaagagtaactggggaagttgcaaatcttatgacctccggaataatggctggtaatatctagaattccagcccctctcattctaacttggtggctggtggcctttccttcattttataagaacagtttagttttggggaagggctattatttaaactataaactaaattccttcccaaggttagttcagcctacgcccaggaatggacaaggacagtttagaggttggaagcaagatggagttggttatgtctgatatctttcactgtcataatttccttagttatcattttgcaaaagcggtttcgggaaggccattgtttgcacagtattttcatactcttaatttgtagctgcatatgtttgcatgtcttactttttaagtggcaggagttttgagtctagggtgtgtctttcaagtttctttacagaacttagaaataatggatgtttaataaacgctagatgtacagataacattcaagctttctatgcatctgtctttcatgtttttgttgggatgtttttcaacagtctggagacctcttaacaatggagtgaaaggctttgaaaaatctctaaaagcctgtataaatgcaaaagtattttaaatttacaggaggtgctgttactactaatactgtgcaaatttatgagtagttgtggaaataataactctatgagcaaaaatgcttctatttctgttttgttctttgcattgtgcaaatatagcctatataaatcaaatttctacatttctgcatcctgtgtgccttaagacatatgttgagatatcaaaagaagaaaaaaacatataacaacctggaatcacaaaaggctgaagcttaaagatcattatgttcagccctgccattgtacagacgaggagactacgtctaacggacacaaaatgactggcctaaggtcacacagcaaaatagtaatcttttttctgtcattattcgttctctgaaatatgtgggtgtgtttagtattgttgacatttccttggaaaaagaacaatttttaaaatgaaatcttttctttccagggctagagcaatgtatcttaggctcacttaaggaagctgtagagatgagcccaaggagggaaaccagaagagccccccaggctcaccagttgtttgttggctccctacaaacatgtcattcaagtggctaatcttacaacagcacaaattcatctaaccaggtgagtttcttcgagtcacttcaaataattatttcttgagcatctacttcatgccaatggtgtgctagattctataagaaaataaatgtgaattactcacagataaaaataaataacaatcaggctgcgtacagtggctcatgcctgtaatcccagcactttgagaggccgagtggggtgtatcactggaggtcgggagttcaagaccagcttgaccaacatggtgaaaccccatcgctactgaaaatgcaaaaattaagtgggcatggtggcacacacttgcaatcccagctactcaggaggctaaggcatgagaaacgcttgaatccgggaggcagaggttgcaatgagccaagatcgcaccattgcactccagcctgggcaacagagtgagactccatctcaataaatgaataaataaataacaatcaagagaatagaatcaatatagcccagtggacaagaccatggattatggagccagactagctacttactagcagaatgattaattttgagcaagacccttaagctctttgggagtcaggttcttcatgtataaagtgtggcttacttaatagtttctgtgaagttgtgaatttaacaaatatcaacctccttgccaaagctaactaatttgctaatcactgattttgcaaagcgtgttgtggagatgtggctggacaggtttgccatcagagtcgatataccgttgtattaaaaacaagataaaaaagctgccaagttctttcgtgagtggttggttagtctgaaatctttgcaagatgctgatgctcaagctgttgacctactcattgcctactttaacaactgtcagagaaacatgatgtggggtaaggaggtgctttttaaaaatcattcatagacttctgtaaaatgcaagataaagttattttaacagtggaaaaaaaacaaatatcaggtgctttcagggtccaacatataataagtgctatagttaacagttattttacatttattatctccctgggtctcaccctaagcctatgaagtaggtagcattcaccttttatagaggagtaaactgaagttaagaggtcaagtagcctgcttaggtcaccctgcaaccagcaacagagccaaaagtcaagcccaggtctgtctgacagccaggcctggcctcataaacactgttctgtgtgctgtcctcagacacaaaccttgctctccagaaagtcatattctagaagccttattgcagggctgaaaacactaagtgccactagagagatagaaataatgtggatggggatttcacaacagggcctgtgggaaattgtttccagcttagaaaatcagagggagttttaaggaagaaatggaatttgagtcttgaatgatttatttgtgcagaagcaggagtgagaaaggacaaacaaaaaaccagggatgagaggggtgaggtatagtttggaaacaggcaatagatggttcaataaaagtggaccctgggatatgtgcaggagagcagggaaaggtgaggcctgcaaccctccctaggtgaagtcagatcacaaggggcctcaagtaccaagctaaagagtgtgcatctaaaattgaaggtccttaaatagctttttaaaagacaaatgggcgaaaagaccaaatgggaaaaaggaaaaaataagacctaagactttgagacatggtgattatttgtcagtaagaattggcggaatatgggcttattaacctagttagttctcttctgaaaaagccacataggttttacagaaaaaaaagttgattttgcaaacaacatacttgttcatttgaagagttgaagcattttttctgaaatgtgatataatttttatatttaagttaaaatgcaattataggtatttttccttgattggataaaatagatccagaatttaaattttatttgtgaattgttcccctccttccctccccctctcccttccttccgtccgcttgcatttgtgtttggttcactcctctctcttagacaaaaggtattttctcatttcttaatcccaatttctccttcatgttttgagtgctgttttatgtttcaatttcatatttattgtaatatgaaccctcagccactaggacatccaacatccctagaatggcagagttgaaatgaacagtagagatgatctattctaacattcatcttacagctgagacaatgaaggctcagagaaagaacatgactttttcaaaaacacagagtgagttcaaggcagaagtgggacttggacttgttttctggctcctttctagtgctcatttcagtgcatcatctgagcacatgtgtaggcagggctctgggcctttaccttcttgagaatggtttagggagtctcaatagacttctcatgtactgctgcaggacttagaatctatgaagtatttagagctggagggaaccttaagatcctcaaattctgcatcgtcctggctatggtctaaatggtccctccaaaattcatgtgttgaaaagaattccccgtgcaacagtgttgggaggtggggcctttttgggagatgtttaggtaaacagattaatgccactataaaagggcttgatgagagtttggcccattttcactctcccatcccttcttcgatgtgagaacacagtgtcctcccatctgaaaaatgcagcatcaaggtgccatcttgtaaacagagagcagccctcaccagacagctgaacctgctggtgccatgatcttggacctcccagcctccagaacagtcagaaataaatttccattctttataaattacccagtctcagcaattctgttaaaacaatacaaatgggtgaagaaactccttttgcagaggagaagaccaaagctgaaagaagtgaggggagacctgcttagcttatgtggctagagacgtacagagcaaggtcagggatttcaatctgctgactcgaggcccatgttttcactctgtacatgctcatccttattttcaaagtctccagttcaaaaattcatctctttgcagtcacatatactgaagggaattctgcttcacaatgcctggaggagcttcaagtggaatgtgtccaaaccaggaggaaacaattcccttggttctcctctggatgtcagtgcaggttggtgtgcagtgaaggtaggggtgtggaaagctggccaattccactttacaagttctttattctctcatacccgggaagtaccacagctactgaattcttggtgaaaccagaacctaaaacagtaaaagtggagttgggaacctggggaagcaatactcaaccaagccaaaactaagattgcatatttacatagaatggctgtagccatgttgttcttcacactcacaaagtgaacacacagctcaaggctcagtggccagactatgtggtgggggtgggatgtggcaagatgtgcatgcatgtgaaagaacagtgtaaactctaaaacatctacaacagggaaaagcaaaaagaaatccgtatttctccctctgattatcttggtctctctcttctgtcatggattagacccagagaagaatactagtccaaatctccagcaactgttcatcatttttaacctttcctgcctggtaaaataacctgggagctttgaaaataatattgatgcctgagcttcactcccagagattctgatttacctgatgcagggatgcaggatggggtctacaattcataatttttttaaaactccccagatgcctaatgtgcaactagggtggagaattactcaattaaactatcaagttgctttccctgactgctgggatcccttccttggctgctgcaaacaatgttgtagccacttagggctaaatacacttataatgtggccttacactgcattcattcaatttaatagacacttgttgactgctttccggtacatggctaggtgaactgcagtgggtacacaggtgaatgaaaatgtccactgctctagaagagtttatacaaataactgcagcttagtaagggagcaattattttacccaagaaaatgctaaaggcttcatgcaattgaacctttaacatatagaaacattttttatattcatagaaaattcatttgttaagagaaacctgcctaatcgaaaatttgctttgataagtctaccatggtatacaaacaagccgtggactagtgcctaggtttgaaaagtgaaagcttctctgcataatagagtgagagcaggtgatcagcactaaatgctgtgtagggaaatggtcaaaaggacacttaatgacttttagagatgggatctcaatctgtcacccaggctggagtgtaatggcatgatcttagctcactgcagcctcaaactcgtgggctcaagtgaccctctcgcttcagcctcctgagtaactgggactacaggcacatgccaccacacccagctatatatatatatttttaatttttttgtagagacagggtctcgctatgttgcccaggctgttctcaaacttcaggtctcaagcaatcattttgcttcagcctgccaacgtgttgagattacaggcctgagcctccatgcccagccataaggccatttttaataagaactgttaaaaataaaatgtcaattatggaatgtaaacttcattttcacatttattaagaagtcttccataaaatacacattgctcattattcagtgagagtgaattgtgtatgaaaaattcgaagaagtgctaaatcccaccttgagatggcagaagaaaaccagagggtatacatggggcaactgcctgatgtgtgggtttgctagattttacaattaaaattgcaggacacccagtgaaatttgaatttaaattaatacaaatcattttttactataaatatgttccatagagtatttgcacacacttatattaaacaattattcatttggtttgatgttttttctggcagccctattatgggttatggttgggtagggattttataatcagagagggagacagggaatggacaaagatgcagaggaggtagagtgtaaggtacatttagggaatagggagaagtagggttggagtgcactgtcaagtgtgttggaagttgtctggacattaaagtaggaaaataaagctacatcctataaggccataatgccaatatcaccaatttgttactctgtcagcaatggatagccctttgatatattaaagggagggaaatcatatgctctattcatccattcatctatccatccatccatccatccatccacattaatgtatctgtatcaatatggcacacttgaaaagcatatgtcctctgaatttatattctagttctgctatatgctcactgagtgatcttctgcaaattactgcctctctcagcctcagttacctgaaaaataggcataattagatctacatcttacatctctcatcaggtttatcacagtgacatacaattgccaagcaggcaagtccaccttgaatgcctttttgactcgtttgagggttccaatactgtgtgtgccaacttagaccattatttcccagaaacattcctcttagtctatcgatttcattcccttgcaatgcactggcctttacacctgcatagtcaacagtgattaaagacagcatttctgtctctcctgccacatcggtacatttgtgtataggtaggtgttgctatttgtgtaacgtattacgaagtgttttcatgttcattattgtcattgaaccttcagagagatcattctgctatcatgggaggatgttggaagtgggttggggtagagagattgggggtagagagatgggttggaaggctgctgtgatagcccaggcgagatgcaatgaagacctgaaccagagtagtggaaaggtgagctgaaagtgaaaggaatggatgaaaacaaacggcacagaaataaaaacaaagggaagttctgacacccgcgttttggtctccttgacattgcttccatttcctctagggacatgtcctggataagggtgaaactggatgctccttggcagtttcagatgtcaccacccctaactttccattggataaaagaaggcccaaaatagcctctggtcccataggctagtgattactgggactcagattcctgtcctgaaaacacggggaagaagccaggcatttgcccacttaccctctcaccagctgacccagggcattagcaccctggtgcctgctgacgcagagcatctgccaaattcgattagccccgtggcctggctaagctgggcatgtcctgcactgcttctaaaacaagccctccaggaaggggctgcgagactcggagatgttttttcctactgtcaagcaggaatcactgcttggcagtttgaggtagggatggggaggagataaaaatattagaagatgcagaagataaaaccaaatactaatctaacagtcacttctgaaaacagagaaaacactccaaacagtcaacatggattgtttttttttctctttgcttcaacttagtaaagccctttggagtccagcagaatgagccaagcagtgtgaaatgtgtggaaacatgttgttggctcagagcaggttgcttggaggcgggacaggtgacgacctgcctgtgagaagcccatagagctctcttctcctcaccactgggtcagttgatcctcatctgtagatgagagatcctcatctgtagactcagccctcctgcagccattagtgcctctcctgtttctaatcacagggaatctaaagaaatttaaggagcctcgttcaggagctcagtgttagattgagctttctggtgggtccattctgactctgaatgttgattttactatctaaaatcattattcttgtttctatggctagggtcctacttgtattcaatttcctatagaactagcgtcctgtcttgttaattcccagtcattagaatcccacacccaagtttgggaccaggttagggctctgagtcccatgggcagaaatctctgatacctctgactcctgtttacctagaggaagaagaatctggagcagcagttctaccctggctggtcaacaaaaccactggaaagatctttaagaaatacagatgccgggcgcggtggctcacgcctgtaatcccagcactttgggaggccgaggtgggtggatcatgaggtcaggagatcgagaccatcctggctaacaaggtgaaacaccgtctctactaaaaatacaaaaaattagccgggcgcggtggcgggcgcctgtagtcccagctactcgggaggctgaggcaggagaatggcgtgaacccgggaagcggagcttgcagtgagccgagattgcgccactgcagtccgcagtccggcctgggcgacagagcgagactccgtctcaaaaaaaaaaaaaaaaaaaaaagaaatacagatgcctgggccccacccccagagattctgatttacctcgtctgggtatagatatattttttaaattccctatgtgattcaaatgtacaggtcaggattgagagccaccagtctggtggttaaaattcgagaccttgggattatatagatgtggcttcaaatctgactatatcatttattaactgtatgaccttgggcaagttatttaggctactgtgttgtcagttttcttgtctctcaaattacatctatctcatgattattttagatagcatggaaagcatttagcatggcatctggtacaaaatagggatgtaacagtattgcctattgccaaacacttgtccttgtgttcaaccaattgctagggtaatcttaccctttacttgatttacatatgattctttgcatatggatcgtctgtctgaaacccatcgatagaactctttatactcattatagaacattcttcaccctttcgcatctaacttctgctgaactcaagggacacatcagtcctcagcaccttgactttactacctgatctaccccatcaccaatgggatctgttcttaagaaagtgggaaagccaagatagcaaactgagttcatcttttggttcaattcaattcagttggcagtggagcatgaccttgacatgacttgtgaggctgaggtgcagcaaagacttacaagtgatgtcagccatacatggaagaatgggggagagaaggctggcgctggtggccagggctattgcagacccagcaggcctgagtcattatcctttctcttctccaccaatcccaaacacaaaataactgtaaagtattgacctagggaggattgggcactcctgggtcttgcaagtggttccacaacactctgcctatctgcccaatcccagcaattcacaggaagctcatcagattgtccatgaggttaaaggggtgacaactgccccatatccaagtattggaaatagctgacatgaagctctagaaaccctacattcaggtttttcagcacagagtagggttgtatccacttttggaaaggcctccatgcaatgaaagactgtttgcatgttaaccttaaaagatcaatccaggactcttctgaaagctaaaaattctaagcaccactggtggtctccctttttgaaggaagccaaatcccttggacatgtaactagctattccacccccctccccacaaccacggccttttttttttttttccttctgtatgttctcaatgccctttgcacttttaaatttttcagtggtttaagagtggctccagatccaggctgccctgctactcacaagtgttgcagcctttgccaacttaattgaattctctgtgccttagtttttttcatctctaaaatgggagtactaaaactaccacctagtttatggattgttgtgcagtgagaaaatctgcataagatgccttgaacactgcctgcttatagtaagtactagtcactataattgtgcaatgggttaaatgtatgtcaaggacatggggcagaagttgaggtaggattttcctgatgtgccatgtctatttttagaaatgtgactgtggccccttgtttctttcagactatgtgagttcatccatttcaccctggcttcagtcattgccattcagctgggatagacacttaggaataatgggcttcatttggaatgtacagtctagaaaaacaccctttattgtagtatatctcttccatttgcttgagtgtatgtagtggccacagtttaactgccaagcagtattattgctagtgggtaaacaagagttatctctctgagtcttccagaaaagacaaagtgaccctggatgctaatggcacagatgagatgggatctcttccaggagtctgaatatgagaaaagagtctctgaagtgtgtactagatgagcccagcttattaccagtcagcagagtgacttccaagagtttgtaaacattttctgaggctttctcatgggtctgtaactttcctaagtgctttatatgtattacctcatttaattgtcacaaaatcccatgaggtaagtgggaatatttttacctgtcctttgcaggtgaggaactgaggcacagagaagttaagtgacttgcctacagtcacacagctcttgtagcagagttgggattcagactccactctttactatattatgtgccccctgagtggtgagatgttggatcccagaggaagcagagctctgaggtcatcaggaaggaaagcagggcatgaagtgggagcagaggtggattgaacaaaaacatagatttctcagagattcaggcacaaaggactcagggccaggaataaaccaaagttggattgctgaaatgaggagtttcaaacactggcatgccagtgaggtttgtctcctaagctagccaaagctccactcagaatgacctctttaccattctgaaatatctgctgtttctctgaggaaatctgctgctgaatgtggtgttgctgtgatttgttatgagatacttttgttctcaaggccatcctctcaggaggaggaactatccagagtactcgggaggtggtggtgaaacagattgggaaccgtacatccttggtgaatttataaagccccaaagaacagagatgcaaacccatttcattcaaagagctctgttaacagtgactctacaggatgctaatccagcagtttcatgcagagtttcctgaccctgcaacttggcaaaacacaaggaatctctccttgccaggcaccatgtaatacagtaagaatgagtgacataaaacaaaggtaaatacattgcctggctttgaaagtaaggttagaccctggtagaaaatttgcatcttgaggaatatatgggcaccttccccaaggtattttctgcctgcttgtcagacagttggtaatatttttatagttgcatatgaagtagaaaccttcctttggtcacatcctccccaaccgccacactaacccaaggtgcctcctgcttttaatcttgtggcaagtaccatgatataaggacaccagctatggagggaggcaggagatgcacagtgaattatctcagaatgcttcccagcctttaagtgcttcagaaacctctttaatctctttttatggcaaataatgaagtaggaagaatgaaattgtaatattaaaactgaaatttacctccaagaccatcctcttgggagatcccccaagttcaccctcttcctctgacagttgagggcatggaggttcagataccggaaagggttggccaacctgatgattgaactaccaagatacctggctcccaaggtaggcttgttagaattcaggcttctgtattgcctaatggatgggtaatacatttggacaccctcccctccatcctagaaatagaaaaatcttctaatgcaatttgccttgtaaaatgtgcaggagtgtgcacacacacatacacatacacacagagatgggaatagctatgttcaggtcctcatttccagaaaccagttcctacaatatagaaaagctttgccacaaagtctgaggaagccctttgtatttatagtctggtcattctagaggtgtgaacctagatttcctcagctggatgttaatagctgattaattcaggatgctgatttaatttgtgacctataaaacgctatttcacagagaatgggctgtgttggcatgtgcagagaccagctccccagatggaataatcttttccttattaatttgctgcatgttgcttctcatttctcacagtcgttccaaatgtgttacaaacgactacgtgctctgggtcctgaatccactactgctgttgctttgaaagaaaaaaaaattgttgactatgaagggcactgagctttcctggctcacatttgcatgctcactttcaaaccatcagtgcactcttctcttacaacactaagccttgctccacctgcgagcacccatcacttttgtgttgtttaggaaatgcaaacatagatagtttgatgttttcagggccaagcaaataggtagtgacatgattgggatcagatctacagtttcaaattcttgggttgtgctatcttcctattatctagaacatgtgaaaggctgtttaatccccttagtccaatgatcctcaaatttgagtgggcacagaatcacctagaggggttgttaaaactcagactgttgtactctacccccagagcttcttatttagtaagtctaggatgggaactgagagtctgcatttgtaaaaagttcccagagatgcagatgctggttgcagaacacactttgagatcattccatgagtctaactggaggagagtatgggtactgttatctccaagtaaacactgcttggtatctgttggagcaggtctctgctgggtaaggtttctattttatgtctttttcctctttccttcctgatatgcaccaaatcccagttgagcaactattttttaaatgttagggctcaatggagaatgcagcttcactaaataaatttaaatgtgtactgcagtacttgacatggattttttcaaattgtgagcacttaagccagacaaaaatatttcccctgggttcagccattctatgcagaccagcccctggtttctaaggaaccatttgaaatagagtacagtaccaaagtgcagagctgcagaagcatctttatgtcctttctaaatgtagaacatacacctcaagctcaggatttcaactaacactttttggtcatttacaggcttgagacaagtcctgtcattaactacaacattatgtgtgaggcttttttcaggacagataagcttatttttctaaaggaaaggacttttgtttttccagatataaaatagcagctcacacttaaatgcaaaggtcttgtttattgtttgtgtggtgaggtttaattggaaggcctgctttttacaattccatgctactgacattaccaagcacacaggattgttgttagaaaagcaaatgccaggctggggagctcctaatctggtggtctgtgccttgtaaataattagggtgtgggggtgaggtaaaggcctatggaaatcctacagagtgccacagaaatgggtcttctcaattatgataatgtgtaagatcacagtgctttttctgttaatatttaaacatagtcttcaagtaatttactgcaaataatcacatattaaaaagcaaggagtttgcttttttttccctacaaataattcaaatggtggccagaattgagagaatggatgatcatactcacaagattggggatagacatgcaggcagtgtgtttattagaaggaatgtccataaacatgggctggtttggagtggcttcacctactctagttgctaagtttagctattaggtggggagttcaccaaccaccagttagttcaatgtaaccaacaaaagtcagattcccaaccattacccccgcttgtcaccaaaccaagcagccaaccaacctttaaaaccacagtttaaaaacccacagctaaaaggatggcctatgttccataaaatactaattttgctggtcaacattctgaggttggatcaaatctgtgaatggctttttgcaagctaaatgcttcatcttcctaaatttatgtacacgtatattgtttcttatcccaattaacagtctttatttaacaatggcttatcaaaatatgcagccatttctactttaacttgtagaccaggcttgatgttagaacatgatggagacaagtatgttttacaataaccttaaaccttaacactattgggagtgctggctgaactgaggcaatgcctgaagccatttgttgcagttcaaaaagtgtttgacattttatccagatctagaagtcacttaaatgaatgaggaacaatttaacactgacccattctaagacttagttcagattctcatttcgaactgtcttattattcactgaattagtacagctcataaaaagatttcatagacacagctaatgaccacagaggcttatcagtatggtgaaaaacaacagatcaaagcaatgatctgagttatttcctggcatcttagtaattaaacaagtttaactgcttactcaatgaatgcagtacacattggttactcctattaactccaagtaggataatttagtagatgtctctattttgtttttttctccaacctcatcttctaatgaaaactttcagtcatgtttaccaaactcgtttaacttcaagtaatttggatgtcatgtttaatttttactttttttactcaaccatttaaaaaatattttagtcctctgactatgaaaattggtcaagcctgaagtttatcaaagttctaagtccatggctgggctgtcatgactggcagtcaagggcttctcttagagtacttttcaagttcactggacagattaggatagagtaattcatctcattcgatctgtttttccatatacacaacacaagtcaatgtttgttatgactttcctgatccttatttataagacaatacaagaggaaaccatgtgtgtatgtttagaaatagaaatgatacattgcacagatatagttcaccacgttatgggatgggttgtcagtgttcaaatggggaggctgaagagtaagaacagatgctttttttccttaatggccccttctctgatttaaaatccttccatttatttccctaagatttagtgataactttaaacactttaactaaattacccagcggcttggcagccatcacggaggcaaatccttttagaaatcctagcaatctgttagattgtgggtactatgatataaaatctgtgtgctccacgtacaaaaattaaatcagtgctatggatacaaatacatactgcaaatggcaccacttccaaaccgaggatatgtgacctgtctccaaatattgaatttctttttttacttttttccccagtacttgactttctaaatttgggccaatttattctcattatccctaagtaaacctactttgattttttttaacagttattttatagtcaaatagagccagccagccagccgtgattcgtggatcctgatgttgctaggatacatggtttggtatctgatgaaagtatatcacttcaaaggggtaaaactttcaagtgtccgagaaaatgacactcccatcttccaccatggaagacagatccaatcctacaacttctcagaagctcacagactgcaggattggcctcccaggctttcaaataagtatcctctctggagggctgtttaattactaaaactagtcagattagtcttaaagcaaggaacacacgtatttataataaaacacgttttcatgtttgttttacagtaaagagaaaaaaacccagaacccccagattttatgtactttgaaaatatatttaaaaacattaaaaattctatatttaaaacatatattatatgttaattagtacacttaaatagaacttgtatttacaataggcttctgatgcggttaagttttaatgccaatttttttcaataacataattatataaatatactaaaatacaataaatattgttttttgttttacatggtgaataatatctttaccatagagagaacaaggccacagacatttacttacattttcaatgggaatcgccataaaaaagcaacaggcctgctgccatgcatgaaacacttctgccacaaagagaccacagcaagactttaaaaaacaaaacaaaacagaacaagaacgaacacaacagagagagattttaacaaaataaatcttaggtcaacataaaccatcaagcatgtgactgtgatgtatcttattgggtaaaagagccactgaccacacaattgctggatgtgtctcctatgaaaccacttaacagatctggcccttgcaatcctttaagtttgtgatggggggttgtttgttttaaatttgtccctcaaaaggaagctgcataaagttgacatacagcagatattccaagcattccttacatattaaaaataattacaaagataatattttcaaacaacacaaaacaaatctacactacgtaaagtcttccttctttcaaagaggtattcagatggtactgtgaaagactagctctaaatgaaagactgaacaaattgaaattctttgctgatggtatcttcattcctgggttatggtgaacatcctcttttgcttatccctcaccctactaagatgcagcaattgcttggggctttctgatacttaaggatgctggtccaagtggtgatcactaacattttcaggtgtgaaatgggctgaatgggcttagagctctagttttcactggggatccatttttccaagaaccactatttcaggctcccaacttgacttctcctaacccaaaatggcagaggtgaggcagggaccctctccatgaacagacaggatgggcagaaggttgctgtggccttcactggggagcaaaattttgtcagctctgtcctggcctcttccattgagcaaggcaccttcaagtcttggtgttctgaatgtccagacaccttcccgaagtcttgtctctggacaagatttcctatgggtccccttgatcattcggcctgagtttggggtttcttttcctgttcccttttcccttaccaaaagttctcaaaagataaaccctggtttcctcaagtctagtttcaaagcaataagtgttcaggtagcaaacatcttctatctcattgcatcaatctcatgatcacaaatgccacatttggctcccaacctgctccaggctaatccaattttatgcaaaattatccagaggtgggatggtgggcataagtcggcttgagtgtggtcctccagtcgagaacctcttgagcacagttagataatgtaggcacttaaagcacgaggtccaagcagcttgacacatgtcattccagagccacctctgaagggtccttcagaggccttcgttttggaatgtctcaaataccatgccccacctccacctagaccttgggatggccactcagaaattcctcccgcactgccggtaaatgcaatgccaactccacatagcctccatttggctgttcagtctcatgtcactggcaatgtggattcctgttctgatctaggtgtttctgggttgatacagggctctaccttttgcttacaagacattgttaagcctcaccatgagttttttttaagcttagccatgatttacccaaatgttcactcctcataaaaaataatcttcattttggggttattttttgttgttttctgttctaaaaaaaaatcactgttctccatgcttatacgagtgtcatgatgtgacacaatgtgttcacttgttcacagcagtggtaaaatatttcagaacgcgcaactgatttttcttccttaaaacaaaacaaagaggagaccagagggggagggggggaaagaatgtgttctgagcaaacataggtccttccgtcaaaagcagcttactctgaccaacgcccaaagaatgagcggggcctgggaggtgcatcacgggatgtggagtgtgagcatttttttgttcagttgccttaatttttattcactttctagtcatctgatcgatattgcaaacatcttcacaacatacaaatgtatcttttatcagccagaatatatattgtaggaattctttccccatctctactccctgtgggaactaaaaaacaaaacaaacaaacgaaaaaaaaacacaaaacaaacaaaaatataccccccatcccccatcccctaagccagtaaagcaatgacaacagcaccttgacattgttttaattccaacgctatcagaagttaaaagcagtaaaacagatatagtactaacaagaacgaagatacttactgtctaaaatgtaaacggaatgttttggttcaaatttttgttgtgtgtgtgtgtgttttttttctgttttctgaaagaggacagtttattatcaattcacaattaaagcagcatgcaatttattattttttttaactttttatgttttcagttcttggcaacggcaacaaaccacaacattatcaaggaatgtaatgcagactttttaagttgtgcgcaaatgactgtttcccttctggtcatggacatgtccaataaatagattgtagaaccactgtactgtataaacttcatttatacatgcagttcataaaattatttttttcttaactgaataatttaccctgttatgtatatatacaaatagataatttttgtctcaatataatctaatctatacaacataaatccactatcttccccttttaatggtcaatgtacatacacaagaagtgtctatccttatgaatcgccagccaattctctttttgctatccatggtaagggcccgcacgtacgactgggtagttcggcactgggagttccaatgccttttgtctatgcccctgcagccttcttttgtgtaacccatgggattgcacttggtctcgtagaagtattgcttcagttggccttttgatacagggaccttttcaaggactgtgaccgtcccgcccgacatgtccactgcagtctttttgtctgctgccgttacccactcactaatactgtcacacacgctcagctcccctcggcgggcagggtcagagtggcgccggaccctcatggacatgtttgcagcatctaggtaatttttgtattcctccagcagaaagagaagaggaggctccaaaggcacttgactactgagcatcaccctggacgtgtacaagtctgcgtccttattgttttcttcattgggccgaactttctggtcctcatccaacagctcttctatcacgtgttcgaaagtgtcagccaatgatgtcaagcctcttgaacctgccttgggcccattcacgctctccagagtcccatgggtccgcacacctgggtaggccaagccaccttgtcctcggatgtttgcttctttcatgggggcagccttcatgcaaccaaagtatgaaataaccatagtaaggaaaaggatggtcatcactcttctcacctggtggaactgtagggagaaagcagaaacaagacagaaaactggttagggctttctttcaccgggatgccatgtggcccatctgattgtaattccaggccattctgcagggtcaaggtttttttatgtcttggtgataaactccagctgcaccagacacaaatcagtgtcagtagtgtgctgtatgtggtttaatataaaccagagacatgcagtgtttcccccaagatctagcatataaacctgagattagatggcttctaagcaagtgcaaaaattgtggcttcaagttctccttcttcccactttagcagctttgtaagtttaatttttaatgatctctgctcatgctgtcacgagaaacacaaaatcataaatgttactaagcaacaactgcaagtgtaattaatagtaatttttttcaagttagcaacatggtcctttgcaggaatgtgtgacaggaacagcagtggcctgaggggtctgatgggcctttctagctatgtgatgtctaggcatgaatagcacaataaaacagcagttggggaactataaggagcctttaaattgactttttttttcctcttcccacagagatactctattatagcaaagaagaaagataatttcattgagccatcctgttttacaggtaaggaaaccaaaggccatagaagacttgccttatgtcatgaagaaagtttatgttagaactcagggctcccaattccactgttctttattctacacctgggtggtcacaactgaaaatgttttgcttatttctaaacagaaatcattttttgacatgttcattttaatgatgtgtctatgcctggggctaatgtcatgaaaacaatgtgtctggtaaggagaaaactgaaaaagtcagcattaaaaagacatttaagtccatttcaaatgcctcccatatgcagactccactttatctcctccagttctctaaaacccttcactccttggctttttctggctaatacacacatctagctaagaaagctcaacttttctttttactagagatgttctctctgtgtgtgtgtgtgtgtgtgcgcgcgcgcgtgtgcgcgcgctctgagtttatcctacttttaaaaagctgagtggtgttttacacattttggaataggcagctagtgcttctttttctgcttttgaagtttcctgggaagtcccttaaaagcataccacaaaattaatctcttcctgtttgccagagggttgctctactctaaatttggctctacatctacaagcatgctctaggaagccaattaaaatggatgaacaagcaaaatgaaaacatacctatggaccaacccaaggttaccgtcaggtggtgaaggacttcagaatcacttacctgaagcattgtgtttctcagcagcaaagagtagcatccccagccctgaccctaattttattcctacttctcagttctgaggcatggacttacaaaaagacacatacatgcaatggccatcatgatatccaaataagtaggaaaaggaactgtgtttctgcccatgaagttttactgaattcaaaggcaacctacctccagtcaataggtcagaatgcagaaatggctgaaaactctggtattgaaaagcaaatgttctccacttttgtaagaaataacattttcaaccactaagagactttattaccatccctaaacacacaaaaaaatttcttttagatttactctcactttgcacgaatagcaaacatgcttagaactgcttagattgcacaatgttctcagattaggaagggaaaattggtttgaataaaatacagatgtctattccgctaacaactaaatctttgtgaatgttctgagtcctgtaccatcaaagaaatagatcgtccatgggggtttctatttctggtagattgtacttacacactgaatgaaaaagctttctcctaatattcccagtccaaataaaaacaacccaaggggcacctcttatttaggtcaataaaagtttgcaaatgtggaatactttagccatctacatcacactggtagagactttctgtgatcagctattttttaataccatatttaatcaaatctaagataccatcattgtgaaactcgacattttatatatcactaagaaagcaaaaatgcagcctgggtgaccagagtgaaactccatctcaaaaaaaaaaaaaaaagaattaatgaactatagtttaatacatatttactaagtgcccacactaactacttaaaaatggtccaaaatactgaggcatcttaagctgttggaaaattgttttgttttcaccactacagtaatgagtctttgaatgataccattttctatacttggcttctagtttactctgcctttcactgatcttatctttttattaataactttatgagaaaaataattaatgctttatatattgttctctcagttccatgagcaaatatttcagagggaaaattggcatctgagtaaatattacttggctttcattctgaagcccaaacatgggtattcctcaagctgagcatctgcatagaattaggaattaacacaatggtgacaaagtccaaccccacattgcaagccctgctctctgagtggcacttctgcaattctaactaactgtctactcacttgtaaggccttgaagttaagtgggtgcaacaccaaactcaatactttttgttggaacagtggtatctcctaccttttctaacaatggttccctgatattttgggcaacccaggcataggatagaaatcctggaatcaagtttgacaatatatttcctgcatagccttccaatccagtcagtaaagatgtcctgttaatttttcctttaaaatatttgtcctggccatccctttttatccatcccactgccaccatcttggctcagccctcaccacctcattttgtgaccacaacgtcccgatgctgtatcagacactctttctgctccattcaactctgatgaccacttcctgggtaaccaccctaatactattctcttacacaaaaactggcaatggcatttttgttctatctgctcaaatctaatgtcttctctctgatactcaactctctccaacatctgccctcacccttcttagctaactttctcaaactactcaatgcttcatcacttctgctccgatcaggacagagtccttggagtgccgtacacattactgcctcctgacttgttccattcctctgacaaactcctctctccctctcacttgctgccaaaatcttgcttatccttcatgatccagttcaagcatcaaatcatgcatgcccctttctctaattactccagcatacactgccttccttccctaaaattccacattacatcttacgtagtacttgattcccttctcacttgttttgttttgtttttttcccaagacagagtcttgctctgtcgcccaggctggagtgcaatggtgcaatctcggctcactgcaatctccacctcctgggttcaagcaattctcctgcctcagcaggaggtagctgggattacaggcgcccaccaccatgcccggctaatttttgtatttttagtagagacagggtttcaccatgttggccgagctggcctactcacttgttaattgttaaccgtatttgctcattctagtcagtcttcagctgaaaggtaagttctttgagggaatggatcatgtctgagcccccataatgcttaacagagaaaaatgtaatagcagtactcagtaaaaacttactgataggtttattaaactaagagaaaagacagtttggatataattttcgtaagaagccttttcatttggaaagatcagtgaacccattgaaattctcaggtaaatataggctgtgctaaccccaaattataaactctaaggcagtggtcccaacctttttggcagcaggaaccagttttgtggaagacaatttttccacggtctgggagtagcagggtggatggttttgggatgaaatggttccaccttagatcatcagttaaattatcataaggaattggattctcataaggagcacacaacctagatcccttgcatgtgcagttcacaacagggctcatgcttctatgagaatctaatgctgctgctgatctgaaaggagacagagctcagatggcaatgtttgctcacccgccgctcacttcctactgtgcagcctggttcctaacaggccagggactggtaacaatccatggcctgggtgttgcggatccctgctctaaggaatttgacagatagcaattatcagccatgaccaacttcttgagttcctctaatggaataaaaccttacttgaataattaaaaagcagataacactaccacatactaactgtcctacaatttcctgtgtagctctatttctaacagatcaataagagacttgggaagtaataacaataataatagcaaaatttgtagttttcagccttttaacttcttgtttcttattctgctaagctttcaatgagtaattttatatactgtattaggaaataataaaagattaagtaagagcttccaggacaattcttcattttcaaccttcggatgactctttatcacacataagataaagaggctgtgtaatattgctaagcagattatatatttatttatacttaataaattcattgatgctgtctaattctgctttaaggcttacagccattaattcaaccacatctataaaatgctaggaaggctttcatagccccactgtcaggaaattcaatatagtacatagaactaaaaagaaaatcaatgaagtagatatcaagtttagctttaagtgtgactcacaagtcttagacatttcactgaaagaatgtccataacaacatgctcttttactcttgctgtagtcataacttacatttgtctaagagactatagaacattcacaggcgtcatctaatttgatttttacaaggagacaggatgggtattattatccccattatatagatgaggcaattatgcgtcagagaggttaggtaacctgtcaaatgccataaagctagtaggtcacctgtctcctgaaccaagcttttaccatcaggatgtgttgccagttttagaatatcagccacagagaagagagtggctgtgacaacgaaggagcttacaaaatgtggacactgcagctatgtgtgtcctggaacctaactttctaaaaggagtgccattaagatactactttgtaggtctagattaatcatgaccaagatccttcaactttaaggcttgattacttaaatggatgaaatttcagacaatgtggtctttttctaagagaaagaactgcaaaaattgtagcatgttagaactaagtttctatggccaaaggtgggaaaacaagcaacagtacagataattcaggcatacagaaaaaaaaaaaagtcttgtttgttcccagcccctttgggttttacctgtgagcgtgtaatcagagaaaacacagtttaaagatatggctgctcattttagacagtcctataaagataatggtaatgctgaagaagttattaatatttggttcctaacatatatgatacaaactattaagagttgaccttaatgaaatcttgcaaatcaatatttaaaaatttttaatttgcatccagttgactatatccatatgttagacttccttttgttcattcattcatcacacatgaagtctactttccagtcttacttacctccctccctaggagggaggtaggacatacgtaactagaatataaaggtagaaatgacccagaaaaggtacagatacaattttataaagagaaagaagttacttccagttagggaataaaggaatgcattgtcaagaaggttgcaaagggccaggtgcagtggctcacatttgtaatcccaacactttgggaggccgaggcgggaggatcactagagcccaggaattcgagatcaacctgggcaacacagtgagaccatgtctctacaaaaacttaaaaattaaaaaaattaggtgtggtggtgcacacctgtagtttcagctacttgggaggctgaggtgggaggattacttgagtctaagaagttgaggctacagtgagcgattgatcatgccactgaactccagcctgggtgacagagacactattgccctaggaaagcaactgttttgctgtaatcaatgaaggctcccgatagccagagccacccagaattcacagtcacatcgaaccttgccctcatcctctgcctccttgtcacagagcaacactgccccagtagcacacatctccagtctgtaacaaagaagtcttagcatcaagcatactcaagccacttggatagcaaatgaggtcatctgaaaatacttttaaagtttacttttttaaaaaacagttttttgtttacaggacccaaatggcagttgacattccctgtaaaagtttaacctcttcaattagaattctgttttctttagaatttcaggtgggatctgttacaattcactgaagtttagatttgacaatgttctatctactatgttattgaaaccatataatatttaccaaattcccatacatggtagacagtgacattaattaagaagataatttccaatttgttccatgaagtttcagtgacccactctgtaataaagaacttggaaagggaggttccaagatggccaaatatgaacagctccagtctacagcccccagcgtgagtgatgcagaagacgggtgatttctgcatttccaactgaggtaccgggttcatctcactggggcttgtcagacagtgggtacaacccacggagcatgagccaaagcagggtggggcatcacctcacccaggaagcacaaggggttggggaattccctttcctagccaagggaagccatgactgacggtacctggaaaatcaggacactccccaccctaatactgtgcttttccaatggtcttagcaaacggcacaccaggagattatgtcccaggcctggctcggagggtcccatgcccacggagcctggctcactgctagcacagcagtctgagatcgaactgcaaagcagcagcgaggctgggggaggggtgtccaccattgctgagacttgagtaggtaaacaaagcagccaggaagctcgaaatgggtggagcccaccgcagctcaaggaggcctgcctgcctctgtagactccacctctaggggcagggcacagctgaacaaaagacagcagaaacttctgcagacttaaatgtccctgtctgacagctttgaaaagagtaggggtcctcccagcatggaatatgatatctgagaatggacagtctgcctcttcaagtgggttcctgacccctgagtagcctaactgggaggcacctcccagtaggggccgactgacacctcatacggccaggtgcccctctgagacgaagcttccagaggaacaatcagggagcaacatttgccgttctgcaatatttgctgttctgcagcctctgctggtgatacccaagcaaacagggtctggagtggacctccagcaaactccaacagacctgcagctgagggtcctgactgttagaaggaaaactaacaaagagaaagaacatccacaccaaaaccccatctgtacgtcaccatcatcaaagaccaaaggtagataaaaccaataagatggggagaaaccagagcagagaagctgaaaattctaaaaatcagagcacgtcttctcctccaaaggaatgcagctcctcgccagcaatggaacaaagctggacagagaatgactttcacaagttgagagaagaaggcttcagatgatcagtaataacaaactcctccgagctaaaggaggatgtttgaaccttttagcaaagaagctaaaaaccttgaaaaaacattagacgaatggctaactagaaaaaacagcatagagaagaccttaaatgacctgatggagctgaaaaccatggcacgagaactatgtgacacatgcacaagcttcagtagctgattcaatcaagtggaagaaagggattgaagatcaaatgaatgaaatgaagcaagaagagaagtttagagaaaaaagagtaaaaagaaatgaacaaagcctccaagaaatatgggactatgtgaaaagaccaaatctacatctgattggtgtacctgaaagtgatggggagaatggaaccaagttggaaaacgctctgcaggatattatccaggagaacttccccaatctagtgaggcaggccagcattcaaattcaggaaatacagagaatgccgcaaagatactcctcaagaagagtaactcaaagacacataattgtcagattcaccaaagttgaaatgaaggaaaaaacattaagtgcagcgagagagaaagggcaggttacccacaaagggaagtccatcagactaacagcatctttcggcagaaactctacaagccagaagagagtgggggccaatattcaacattcttaaagaaaagaattttcaacccagaatttcatatccagccaaactaagcttcataagtgaaggagaaataaaatcctttacagacaagcaaatgctgagagattttgtcaccaccaggcctgccttacaagagctcctgaaggaagcactaaacatggaaaggaacaaccagtaccagccactgcaaaaacatgccaaattgtaaagatcattgaggctaggaagaaactgcatcaactaacgagcaaaataaccagctaacatcataatgacaggatcaaattcacacataacaatattaaccttaaatgtaaatgggctaaatgctccagttaaaagacatggactggcaaattggataaagagtcaagacccatcagtgtgctgtattcagcagacccatctcatgtgcagagacgcacataggctcaaaataaagggatggaggaagatctaccaaggaaatggaaagcaaaaaaaagcaggagttgcaatcctagtctctgataaaacagactttaaaccaacaaagatcaaaagagacaaagaaggccattacataatgataaagggatcaattcaacaagaagagctaactatcctaaaaatatatgcacctaatacaggagcaccagattcacaaagcaagtccttagagacctacaaagagacttagactcccacacaataataatgggagactttatcaccccacggtcaatattagacagatcaacaagacagaaaattaacaaagatatccagaaattgaactcagctctgcaccaagcggacctaatagacatctacagaactctccactccaaatcaacagaatatacattcttctcggcaccacatcacacttattccaaaaattgactacatagttggaagtaaagcactcctcagcaaatgtaaaagaacagaaattataacaaactgcctctcagactacagtgctttcaaactagaactcaggattaagaaactcactcagaaccactcaactacatggaaactgagcaacctgctcctgagtgactactgggtacttaacgaagtgaaggcagaaataaagatgttctttgaaaccaatgagaacaaagacacaacataccagaatctctgggacacatttaaagcagtgtgtagagggaaatttatagcactaaatgcccacaagagaaagcaggaaagatctaaaattgacaccctaacatcacaatttagagaagcaagagcaaacacattcaaaagctagcagaagacaagaaataactaagatcagagtagaactgaaggagatagagacagaaaaactccttcaaaaaatcaatgaacccaggagctggttttttaaaaagatcaacaaaattgatagatcactagcaagactaataaagaagaaaagagaaaagaatcaaatagatgcaataaaaggtgataaaggggatatcaccaccaatcccacagaaatacaaactaccatcagagaacactataaacacttctatgcaaataaactagaaaacctaaaagaaatttataaattcctggacacacacaccctcccaggactaaaccaggaagaagttgaatctcttaatagaccaataacaggctctgaaattgaggcaataattaatagcctaccaaccaaaaaaatccatcaggaccagatggattcacagctgaattctaccagaggtataaggaggagctggtaccattctgaaactattctaatcaatagaaaaagagggaatcctccctaactcattttatgaggccagcatcatcctgataccacagcctgacagagacacaacaaaaaaagagaatttcaggccaatatccctgatgaagatcgatggaaaaatcctcagtaaaatactggcaaaccgaatccagcagaacatcaaaaagcttatccaccatgatcaagttggcttcatccctgggatgcaaggctggttcaacatatgcaaatcaataaatataatccatcatataaacagaatcaaagacaaaaaccatgattatctcaatagatgcagaaaaggcctttgacaaaattcaacagcctttgtgctaaaaactctaaataaactaggtattgatgggacatatctcaaaataataagagctattcacgacaaacccacagccaatgtcatactgaatgggcaaaagctggaagcattccctttgaaaactggcacaaaacaaggatgtcctctgtcaccactcctattcaacatagtattggacgttctagccagggcaatcaggcaatagaaagaaataaaggatattcaaataggaagagaggaagtcaaattgtctctgtttgcagatgacatgattgtatatttagaaaaccccatcatctcagcccaaaatctccttaagctgataagcaacttcagcaaagtctcaggatacaaaatcaatgtgcaaaaatcacaagcattcctatacaccaataacagacaaacagagagccaaatcatgagtgaactcccattcacaattgtttcaaagagaataaaatacttaggaatccaacttacaagggatgtggaagacctcttcaaggagaactacaaaccactgctcaaggaaataaaagaggacgcaaacaaatggaagaacattccattctcatgggtaggaagaatcaatatcatgaaaatggccatactacccaaggtaatttatagattcaatgccatccccatcaagctaccaatgactttctccacagaattggaaaaaaactactttaaagttcatatggaaccaaaaaagagcccgcatcgccaagacaatcctaaaccaaaagaacaaagctggaggcatcacgctacctgacttcaaactatattacaaggctacagtaaccaaaacagcatggtactggtaccaaaacagagatatagaccaatggaacagaacagagccctcagaaacaataccacacatctacaaccatctgatctttgacaaacctgacaaaaacaagaaatggggaaaggattctctatttaataaatggtgctgggaaaactggctagccatatgtagaaagctgaaactggatcccttctttacaccttatacaaaaattaattcaagatgaattaaagacttacacgttagacctaaaaccataaaaaccctagaagaaaacctaggcaataccattcaggacataggcatggacaaggacttcatgactaaaacaccaaaagcaatggcaacaaaagccaaaattgacaaatgggatctaattaaactaaagagcttctgcacagcaaaagaaactaccatcagagtgaataggaaacctacggaatgggagaaaatttttacaatctacccatctgacaaagggctaatatccagaatctaaaagaacttaaacaaatttacaagaaaaaatcaaatgaccccatcaaaaagtgggtgaaggatatgaacagacacttctcaaaagaagacatttatgtagccaaaagacacatgaaaaaatgctcatcatcactggccatcagagaaatgcaaatcaaaaccacaatgagataccatctcacaccagttagaatggcgatcattaaagtccggaaacaacaggtgctggaaaggatgtagagaaataggaacacttttacactgttgatgggactgtaaactagttcaaacattgtggaagacagtgtggcgattcctctaggatctagaactagaaataccatttgagccagccatcccattactgggtatatacccagaggattataaatcatgctactataaagacacatgcacacgtatgtttattgcggcactatttacaatagcaaatacttggagccaaccaaatgtccatcagtgagcaaggacatcattctgagcaaactatcgcaaggacagaaaaccaaacaccgcatgttctcactcataggtgggaactgaacaatgagaacacttggacacagggtggggaacatcacacactgggacctgtcatggagtaggggtaggggggagggatagcattaggagatatacctaatgtaaatgacgagttaatgggtgcagcacaccaacatggcacatgtatacatatgtaacaaacctgcaggttgtgcacatgtaccctagaacttaaagtataattaaaaaaaaaaagaacctggagaaattatcaagtaagcatcatatttaatgaatttatggtgaaatcatgtgggaaaaatttttctgtacagggatgatgactctggaaatggtggagagagagacagaaaaacaaatgtcactgtaacacaggtatttaaattgtatttaaatacacagacttttgaatttatagaaaattttcaagtatgaaattgatttcatgcaacctaaagtctcaaacttcaaataattttttgtgttaaatttataaattgtgtattaatgcaattcaaatttattcctaaaaatattttaactaaaggagaaattcctggggcctgagattagagttttaggaaatgtacatatgggataaacttacacaggctgaaattaagtgaaaccttacttctcaatgttgagatggattagccattttaacataaagtagaaacttctaagaaatgcagaatctcaacttccccaccctcattccacctaccccacccactcaatcagatcctgcatttcaataagatttatttagtgcaataacttttttacttatcaaagttgagaagcacaggactaaatgataaagagaaaagaggctgcttaggataaggaaataaaaggttgaagttaacttaagtattatgatactttcttagcgtgtcatacggttacctgtcatctttcctctttggttcaacttgttttatggggacatttatgtgggaaaatatctttgcttttgtaatttatgtgggaaaatatctttgcttttgtgtttttacttaagtaaaatctgggctccttttatgtcaactagcttttccactattgttattatgatagaaagtacaggctacttataaacatgattagttcaatgagaacttttagaatattgctgacctaaatctggacatctacacaatcattaattcttaccaaaatgctacaaggcaatataagcataattagcctccctgatccctgaacatagcctaatatcactcactcaatcagaatcatactggaaacgatatgaccaactatggcaggtagtagatgtccagtcacactagtattgctttcagccagatgtctctggtccttgtgagttcctttcgtccttaatggtgaaatagcaacagagggaaccaactcactcactcaaggcagatttcttatttctagacttgtcctgaaaccaacagatccagctctctcctaccaaataccatgaaatttaaacaaacgaaactcgcaaaataatacagcagcagcagcaacaacaacaatgaaatattaaaatagtaaatataagtatcaaacatcaaaaccccctctccaaccaaaatctctcttcttcgataaagttcccaggaggtaacccaatttctaggttggtgtccaatatttgggatcatttgattcaagactgaagtacttaaaatggcttttaaaaaaggaaaaaaggttagatttccagagaaaagtgtaacattttttaagttgaacattatgagggatttgatgggggcagctttgcaagtagaactggagactggtccactgttcaggctttttacgaaagactgcaaaggttgtttgtttccaaacaccaagaagtcaccaagttcaccagtccaaatgcaaatgactcacactaggaaccctaatagtgctgctgttaagtcatttgcaaatgggtggggctgagatgacacagaaccctattttcccaggtggcatcttaagtatggttgattctaccttcagccccacatttaaaagtacagtgtaaacacagctaagggaccgcctccttcaaattacacacaaggcacacctactaataggagatgttgtgaaagccaggtggggctttgtctttcaagtccctgcatccaagaataagcatgctgtgtacaaaaaaaaaaaaaaaagcaagggtgatgcaactgcattcattgtccctaaagggagaacatgcaataattctcagatccaaggataaagggaatccccctttaagaaaagatgttggcattatgtggggattgggaacatgccagaacaatcacacatttttacaagagagagaaagagaaaaaaagttaagacccatttgtcttatttcagtctctttcttcagaattgacgactttaatcaacaggtcactttcagagtattgctggacaccttgactttctgccatgaaatgctatgggaattctggcagttgagagccaacaccccactagacaccagtgctgcataaccacacttttaatagaccccagagctgtggtgacagcatgcccttcccagtttttccacagacggtgctcctgaaattttccatagacagtgtattcttgtggttaattagttatctgagcaatttccattatagaaagagtatctgtacataattaaacccatcttaggaccaaactgccgggcttcaatgtcattaattcagaagggctaaaatgaaaatgagatgaataattctcacctgatgaagggaccgcactagattagatcctatcctctgaaatacatacagcattaaatttaaaaaaacaagagagatgaaaacaggtgatggaagaaactggaaaggtaagttgcctctagagaccaaagaataacactccttttcaaactattatcaagaaatcttgggggaaagataaaattagcaagagaaggctattagctctctgttactcacctttatgaaaccattttcagggatcagtttgttaaattccactgaaacgtggaggtacacagcacagcccttcttctgggatgcacagtcatgccatacagaagcgtgtgggtagacgccaaaacatgtgtggacctgcaaccctttctgtagaaactcagcattctgagtagtaacaaggattaaccttgtgcactcatggagaaaactggtggctccacacatccagttgtccttcgggttatttttgcatcccactctataatttcttttaattacttaactgtaaagcacaggaaagtgctcattacttgtagcttaatgcaggaggaaatataattgaatatgttctcctagccactgctctaccccagctcccagctcttctgaagtgtcacggttcatttcaacagcacgagtaaggcagtttccaggccctgtgcataatgagccatgtggaccctattcaagaaactggctgtactccagaactactataaaatataaggaaaatattaacatcttagatgacaaaagatccatatggctggccagaaaatatctgcatcatttaagccattagaatgcacctatatggaaacattcaatttggcggtactgtgaacaacaggactgtgaaaacatctgtttatctccacccgttttcactaaacactgattcctatagaagacatgcaaactcaaataccaacatatttcatctaagcataggacagggactccatttttacatagttgctataataaatacaatacagtatttgttggtgataggattttggaagatgctctggatagctggaaaaataagtaaaatgtttctctttgtattaaacttgataaaaaataatagctaacatttattaatggtgaggtaaataatttgattatccaccatttatagctgaggaaactgaggcccagagagtttcggtggattccctaagatcacatacccattatgtggtggagagggaatatgaaccagtgctggcttgctatgcctctttccatatggggtcagacatagatgtggtgtcttataatgtgagggaggtctacttggcagaaatatcctgcagaccctatatgccagtttcttatttatttaaacaaagccccatatgagcatttctgataagcagtttgtttacacactaattccacagaggttaaatataaccctaatgtttctttgttgctactctgtttccagtattgaattattaccacaaggtaccaaccatatatgcatacttaatagggtattttgtcaaaactatgcatgaaggtcatttgtttgagatgtcagaacattttcccgtgagaagatctcattgggcattgaaacagaaccacatgctcttcagaccagcaaccgcgactaccaaatactcctctgtcaactctacttgagtaagaacgctttcaattaaggcctaagtgtcaacatgcctttaaaaaaaatcgtggtgacacaaaatctttctttttagcacccaacagaatcccttcaaagcctcgtggtctgacaccctatgctacgtgacttgtgacccatccatttgtcatgttcttcgggaatgtggctaaggggctaagatgtgacttgaaaagaaaggtagaacaagatcatctcaaatttattatcaaggaatagttcagaaaacgacttcagaccacagagacagcagaacagatggtccggcatggatagagcatcagacactcacagactgtgccaacaagagccatcgagtcaaaacagccaaaggaaggagggtcatggaatgggttctctcacaccaaactgatgcccagaggccctcagcatgaataacaaaggcaaccagacccacaagccatactgagtggatacaaaacctatacctaggctgacatcccaaatgtgtgtggcaagttagatgatgatggcacaaaagacagaacaccttgcttctggccattgtcagctcttggaagagagcacacttttagaggagcagctgcaaggagcctgagaacaaaactggaaatgtctgttatgaaagccttcacaggtattattaacaaaagaaaatgtctatttgtcaatggtgtttcagctagattttggcagtccattcttatgcccaggaatgacctcttgtgtagactggatacagtcatcaatgcaactgtccaggtgcaactcttctataaaggggaagaggagtgactttcccctatacagtggccctgtcaaaattctataaaaaatattgtccatttaaattaaataaccactgtgcccggctccatttaccacacttttctatgcagtggaactgaaggggatttttttttttgctgtcctcagagaaaaataagactaagaatcaacctttctaatgagaatggtaaggagttatgtggggatgacctggaatatatgctgctcaaatggtggagatgttatctaggccgtaaatcatggcatttttatatgatcccctatttgcctaatgcaggaaaccacttggcaactttaaggaaaaagtctagcaataatgcatcatagttcaatgtttatattgtacttggacagtttaaatttatcttataaagtactaattatttaattacaaatgttgagtaagtgtaaaatcattcctcaaaaaagcatcccttgagtatgaaagttccaagcttagcaagacatccctgtgatttgggatacatctcttgaactcagtcctgaaaataatgttaatagctgagaaaagagcattgaaagccttatacacagtgtgttgtagtgaaacaattttctttttggttctaaaaaacactgttgtgctctttagatccagcatggctagttagatgaataatgaatgcatgttcaactttctgctacaggaaattctgcaagtggcaacgtgggtccattccgtgtgtgtcactagagctggcgcaagcccatggccatggtgaggcagcgtttccactggaactaatctgatacctgcaccagctcttgcaactgtgcagtgttcccactgcaaactacggatggggtaaaagactgctcacctcctatttctcatctaatctcacacactctgtttgatgaggctatggagaaacaggtcttctcatacactaaaggtgggagtacaaacaattcaagccctgtgcaggacaattaggcaatacctatcaaaattatacatgatttttcctgctgacccagcaattccacttctgggaataattgacagatataggtgcatatgtacaaaatgatggaaagctctctggtatatattagtaagtgataaaacaaggtgtaaaatagtgtatatatggctactaccttttgttttaaaaatgggggaaaatggtggagcttgcggtgagccgagatcgtgccactgcactccagcctgggcgacagagcgagactccgtctcaaaaaaaaaacagggtggggtgggggggaaataatagtacatactcatatttacctgtatctatataaaacacactatcaaggattcacaagaaactaatacaaatgatcaccttatagatggtatgtattgggggatactgaggtgagcagggtataagtggggcaagacttttcagtgtaaacttcttttaaattttattttgatttttgaataatgtaaattaactgtcaaataattaaattaaaaataaccaatttattaacaaaacatttaatctagtggctttacttttgacacaagacaatctccaaatctccaccaatcaccaaaaacagagatttacaccagttcctttgcttgtttttcctggtaatgactacaattaagaagtcctgtgggtgccatctcagttttggagatatttccctagaagaaactgattcaaggtgggacaattgggtatagagaatagtccctgggaccgggggctgaagtcctgaattctggtcctgcctaactcccactttctattaagctgaccctgtgaaacggctgatacatgaccattttttaccaacaaattagacaaattcatgggtgatcaaattcaaaaaccctgttgccttaccactgtaatatgatgaggacacgtatacacaccctgcctaactcacagcatcacaccagggattgtcaacatatgggaaagagctttgtacattgtaaaggtcaaccctacaaacagcagctgtgaaacacaacacaaccctgagggggtggccatggccaaacataggaggggaaaaggacccagtctcaaaagcatctgagatactgagatagtgcagaggaatgaaatcttccaaaagatggaatctaaacataaacagacatcaagagcgggctgacttgcagtggaagatgtggttaaatgactccacatgtggtcatctgccattgcatacactgcaaattctgtgaagcctactaagggaaattagggagatgtaactgggagcgcactgtaaagatactgatacgaacacgaatgtgagatcaatgttgaatgatggacccaaaaggatggctcttagtccttgtgaacatatagttgttggagacatgtgtctgtcatacacagataggcctccaactcacctctgaaatcagatgcaaacttcaaatacttttgaaaagtctccctagaggaccttttacccccaaatgtagagactaaatgaaaaaccattctttaaaaggggttaaaaaaaacactcaaaaaacttctcctttccacatgtatagtcatctggaaaacagatctcccattaaacggatggtcaaagctgtatcacaacattaaactaagcacaaaaattcaagacttcccttcctcaccctcctaaaacgaaacattccaataggctagaaataacctcatgaggaagttcattgaaggtactcccacttggcactactatccagacactgggttaggaaactagttacttggaactcagaaaaaataagaactattttgattaggcaaggcccctgtgcaaggtgcctagttccagctgggtctcagtagtctgatgggtgtcatgcactcctggacctcctcttaatgaaacaagggaccttgactttgggccccatgttgagaagctctgaagccaaatataatggtcaaatataatgtcctctcacttctagcttcatagcagaccatgtttccatatagaaatttctctaggaggcttactatcctatgttatctcaagccgaggcctcctcttacacaagaggcttaaactgcccgtaagtaagaattaaagatatgttacattttttatgaattagtcatttattcattcagcaaaggttattaagaaggtactgagtttggatgtactttgctttaggaaaatcattttcaaggttgcttcatgcaaagtgggaataattaacttggtaactcaatagacttgctaagtgattgccccaagtttaaactgtcactgatttgcaagtatgacatgaaaaccagagacccaaggaggtgggcacattcccacctgtcaatagccctcaagagaagtgcttcagtattaccccaaatggccaactttgcatggttaatcatttagttagaggctcacaagatcaaaaacaattcttaaaaaactatttatgtgaacaaagggacaatgagctgacaccttcaaggtgcacgtcaggggcacaatacaagttcctgtttcaccagcagagctctggtcgctcagttgaagctgaaagtcagaaccagctgtgtttctgtcattccctcatatgaaaagaactcagctgtagacctttactccatgagaaaacattttttaaaaacccacaaataatttttaggtttcatttttgcctctgctttctccagagctacaaaggtcacccaaatttctgtggcgaggttatttaggagagcctttcttttggatgtcaacttgtcaaacttgcagtttagatgagtgtgatgtagtctcctaaaatttacttttgcactattttttcaaataatagatattctctgagcacaggcactgaggacatcaaaatgaatgagactgaatttctgcccttggggactgcagtgttaagggtgggttagacccaaaaaccaacaatacagtgcaatgtggtacatgctgtaactaacatgcacaaagggcattcccaaaaaagagaatgaaaagagggaggaaggtggcaaaggagaaaggcctttggcccaagtttttgttcaataaagatcatattttgtagatcaaaagattatatgatctgctaaccccttagcatgtatagctcatgaagcaagacaaagtacccatgaagagttcaacattagcgagcctctggggcaagtaagttggaaatcataacccatttatggatacctgcctagaactgatttcctattcagagtgccttcctagctgataagaacaatactgaaatctttcttttccatgagggaaaaacatgttgaatcatttagcaagtacctacagagccacctactatgtatgtgcccagcagtctactgtgtgctatcaggagtaagaaaatgtagaaatattcttgcttttaaagggtttacaatctaattgtagaaataatactaaaatacatgagaggaaagaaaagcaaacttagcttctctgggataaggactatatctcatgcaacttttaaaaagttaccatttattcaacttcctaccaccattacatacttctggtaatcaattatcttccttctccccttgggattttgaattgggaacagaatagaaataagttgccaaataagaatcaaaatacagggtcagcctcaatttcagtgcaagtggtccattgctttggttcacaggctctacagtccagaagatgaaagattaaggatttcatccatcagattaacctctcctcttttcacagaaagaacaagtaatggggataagagaagggcctagaatattcccctgaaagtgttacttattaggaagcaagttcccttgtggaaacacaaggatgggggaaagggatttccctcaacattgttctatctacacacagagaattcaagtaacttgcccaaaatcacagagctagtaagtggtgaggcttaaatcaaacttgatcatcaggtccaggaacacaggtacaggctggggctgcctcatgaagtgtctgtttaggaaatgtgtctttaaagtcaacagactgtcctgagtaggacattctagaacatttttctagacaaaaacatcatatctacaacttccagcctagaatctgatacagcaaagacacacaataatgttttgttatataagtgcatatacaattaattaccaaattatgaggtacagaccacctaggaactcagatagggcaggtttattattatgggcaagagtctttctagaaacaggattccagctaggtcttgaagaatgagtagaattcagatgaataaacagcagaaaaaatcattaataaacacatgagactcagagaattacaacaaaacagttttagtcttgtaaactttgctataaagtgaagcatatttaggtatgaagcatgctgattaaactttttattgtcttaatacaagtctaaaaaaagtatctttttgggggagctggaaagtactaaaaataaaaacagtggctgaaattcattaagcatttactatgccaagcactgctctaagcacttcacagacactaacacatttaatccctaccaataccctgttgagaggttgagatacagagaatttaaattactgacccaaggtcatagacctagtaagtgttaggcctggagtcaaactcgatcctcctctggctcaggaatattgttccaggcctttgctctcacctggaagtttctaattagaaaatttatttcaagtcagaataaaatcttcagcagttctctcatctcaaaatgtctgaatttctgattatttacaaggctgcaaatcccttctagccacgctctaatgcaagtacttggatagtgaaataaacgataagtctctctaaatcacaggatattcagtttatttgattttagttcagcgattcttaaactgtcccatacatccaaaccatctgtagaagtttctaaacccaacataggcccagggacccaataccaaacttacaaatcttggagactaagatctcatatgtatatatattttaaagattcaagggtaattctgatgctgaatgtgtttgagaatcactgctgtatgctgcattctattttattgtatttcttttattattattattataataataataataatacttttaagttctggggtacatgtgcagaacgtgcaggtttgttacctaggtatacagatgccatggtggtttgctgcactcatcaacttgtcatctacattaggtatttctcctaatgctatccctcccctagcctcctacaccctgacaggccccagtgtgtgatgttctcctcccagtgtccatgtgttctcactgttcaactcccacttatgagtgagaacatgtggtgtttggttttctgttcctgtgttaccttgccaagaatgatggtttccagcttcatccatgtccctgcaaaggacatgaactcatccttttttatggctgcatagtattccatggtgtatgtgtgtcacattttctttatccagtctatcattgatgggcattcggattggttccaagtctttgctattgtgaatagtgccacaataaacatacatgtgcatgtgtctttatagtagcatgatttataatcctttgagtatatacccagtaatgggatggctgggtcaaaagatatttctggttctagatccttgaggaatcaccacactgtcttccacaatggttgaactaatttacactcccaccaacagtgtaaaagtgttcctatttctctacatcctctcctgcatctgttgtttcctgactttttaatgatcgccattctaactggcataagatggtatctcactgtggttttgatttgcatttctctaatgaccagtgatgatgagcttttcttcgtatgtttgttggcagcataaatttcttcttttgagaagcatctgttcatacccttcgcccactttttgatggggttgttttttttcttgtaaacttgtttaggttccttgtagattctggatattagccttttgtcagatggatacgttgcaaaaaatttcacccattctgtcggttgcctgttcactctgatgttagtttcttttgctgtgcagaagctctttagtttaattagatcccatttgtcaattttggcttttgttgccattgcttttggtattttagtcatgaagtctttgccatgcctatgtcctgaatggtattgcctaggttttcttctagggtttttatggttttatgttttatgtttaagtctttaatccatcttgagttaatttttgtataacgtgtaaggaaggggtccagtttcagttttctgcaaatggctagccagttttcccgacaccatttattaaatagggaatcctttctgcattgcttgtttttgtcatgtttgtcaaagatcagatggttgtagatgtgtggcgttatttctgaggcctctgttctgttccattggtctatctatctgtttatgtaccagtaccatgatgttttggttactgtagccttgtagtatagtttgaagtcaggtagcatgatgcctccagcttgttcattttgcttaggattgtcttggctatacgggctgttttttggttccatatgaaatttaaagtagttttttctaattctatgaagaaagtcaatggtagcttgatggggatagcattggatctataaattactttgggcagtatggccattttcacgatattgattcttcctatccatgagaatggaatgttcttccatttgtttgtgtcctctcttatttcattgagcagtggtttgtagttctctttaaagaggtccttcacatcccttgtaagttgtattcctaggcattttattctctttgtagcaattgtgaatgggagttcactcatgacttggctgtttgtcattattggtgtataggaatgctcgtgatttttgcacattgattttgtatcctgagactttgctgaagttgcttatcagcttaaggagattttgggctgagatgatggggttttctaaatatacaatcatgtcatctgcaaacagagacaatttgacttcctctcttcctatttgaatatgctttatttctttctattgcctgattgccctggctagaacgtccaatactatgttgaataggagtggtgacagagggcatccttgttttgtgccggttttcaaatgaatgcttccagcttttgcccattcagtatgatattggctgtgggtttctcataaatagctcttattattttgagatatgttccatcaatacctagtttattgagagtttttagcatgaagggctgttgaattttatgaaaggccttttctgcatctattgaaataatcatgtggtttttgtcattggttctctttatgtgatggattatctttattgatttgcatatgttgaaccagccttgcatcccagggatgaagccaaattatcatggtagataagctttttgatgtgctgctggattcagtttaccagttttttattgaagatttttgcatcaatgttcatcagggatattggcctacaattttatttttttgctgtgtctctgccaggtttttgtatcaggatgatgccggactcataaaatgagttagggaggattccctccttttctattgattggaatagtttcagaaggaatggtaccagctcttctttgtacttctggtagaattcagctgtgaatccgtctggtcctgggctttttttggttggtaggctgttaattactgcctcgatttcagaacttattattggtctattcaggaatttgacttcttcctttagtcttaggagggtgtatgtgtccaggaatttattcatttcttctagattttctagtttatttgcatagaggtgtttatagtgttctctgatggtagattgtatttttgtgggatcagtggtgatatcctctttatcatcttttattgcgtctatttgattcttctctcttttcttctttatcaatctggctagcattctatctattttgttaatcttttcaaaaaaccagcttctggattcactgatttttttgaagggttttttgtgtctctaatctccttcagttctgctctgatcttagttatttcttgtcttctgctagcttttgaatgtgtttgctcttgcttctctagttcctttaattgtgatgttagagtgttgattttagctctttcctgctttctcctgtgggcatttattgctatgaatttcccctaaacactgttttagctgtgtcccagagattctggtatgttgtatctttattctcattggtctcaaataatgtatttatttctgccttctttttgttatttactcagtagtcattcaggagcaggttgttcagtttccactgtagttgtatggttttgagttagtttcttaatcctgagttctaatttaattgcactttggtctgagagactgtttgttatgatttccattcttttgcatttgctgaggagtgttttacttccaattatgtggtcaattttagaataagtgtgatgtggtgctgagaagaatgtatattctgttgatatggggtggagagttctgtagatgtctattagttccactgggtccagagctgagttcaaatcctgaatatgcttgttaattttctgtctcgttgacctaatattgacattggggtgttaaagtctcacactattattgtgtgggagtcttggtctctttgtgggtctctaagaacttgctttatgaatctgggtgctcctgtattgggtgcatatatgtttaggatagttagctcttcttgttgaattgatccctttatcattatgtaatggccttctttgtctcttttgatctttgttggtttaaagtctgttttatcagagactaggattgcaacccctgctttttttttgctttccatttgcttggtagatcttcctccatccctttattttcagcctatgtgtgtctttgcatgtgagatgggtctccagaacacagcacactgatgggtcttgactctttatccaatttgccagtctgtggtcttttaattggggcatttagcccatttatatttaaggttaatattgttatgtgtgaatttgatcctgtcattatgatgttagctggttattttgcccattagttgatgcagtttcttcatagtttcaatggtctttacaatttggtatgtttctgcagtggctggtaccggtttttcctttccttatttagtacttccttcaggagctcttgtaaggcatgcctggtggtgacaaaatctctcagcatttgctcgtctgtaaaggattttatttctacttcacttctgaagcttagttggctggatatgaaattctgggttgaaaattcttttctttaagaatgttgaatattggcccccactctcttctggcttgtaggcttgtagggtttctgctgagagatccactgttagtctgatgggcttccctttttgggtaacccgacctttctctctcgctgcccttaactttttttcctgcatttcaaccttggtgaatctgacaattacatgtcttgggtttgctcttcttgaggggtatctttgtggtgttctctgtatttcctgaatttgaatgttggcttgtcttgctagtttggggaagttctcctggataatatcctaaggagtgttttccaacttggttccattgtccccgccactttcaggtacaccaatgaaatgtaggtttggtcttttcacatagtcccacatttcttggaggctttgttccttccttttcattctttttttctctaatcttgtcttcatgctttatttcattaaattgatcttcaatctctgatatcctttcctctgctttatcgattcagttattgaagcttgtgtatgcttcacagagttctcgtgctgtgtttttcagctccattaggtcatttatgttcttctctaaactagttattctagttagcaattcctccaaccttttttcaaggttcttagcttctttgcattgggttagagcatgctcctttagcttggaggagtctgtttttacccactttctgaagcatacttctgtcaattcatcaaactcattctccatccagttttgttcccttgctggcaaagagttgtgctcccttggaggagaagaggcattctggtttttggaattttcagcctttttgtgctggattttcctcatccttgtggatttatctatgtttgatctttgatgttggcgacctttgtacggggttttcgtgtggacatcctttttgttgatgttgatgctattcctgtttgttagttttccttctaacagtcaggcccctctgctgcaggtctgctggaatttggtggaggtccactccagaccctgtttgcctgggtatcaccagcagaagctgcagaacagcaaagactgctgcctgttccttcctctggaaggtttgtcccagaggggcacccaccagatgccagccagagctctcctgtatgaagtgtctgtcgacccctgctgggaggtgtctcccactcaggaatcacgagggtcagggacctgcttaagaaggcagtctgtcccttagcagagctcaagtgctgtgctgggagatccactgctctcttcacagccaacaggcaaagaacatttaagtctgctgaagctgggcccacagccaccccctctcccaggtgctctgtcccatgagatgggagttttatctataagcccctgactggggctgctgcctttctttcccagatgccctgcccagagagggagaatctagagaggcaatctggctacaggggctttgctgagctgtggtaggctccacccagttcaaacttcccagtggctttgtttacattgtgagaggaaaacagcctactcaagcctcagtaatggcggatgcccctcccccgaccaagctggagcatcccaggttgacttcaggcagctgtgctggcagtgagaatttcaaaccagcagatcttaccttgccgtgctccatgggggtgggatctgctgagctagatcacttggctgcctggccttcagcccctttccgggggagtgaatggttctgtctcactggaatttcaggtgccactggggtatgagaaaaaactcctgcagctaactgggtgtctgcccaaatggccacccagttttgtacttgaaacccagggccctggtggtgtaggcacccaagggaatctcctggtctgccggctgcaaagactgtaggaaatgtgtagtatctgggccagatagcactgtccctcatggcacagtccctcagggcttcccttggctaggggagggagttcccctgaccccttgcgcttcctgagtgaggcaatgctccaccctgctttggctcaccctccatgggctgcacccactgtctaaccagtcccaatgagatgagcccggtacctcagttggaaatgcagaaatcacccaccttctgcattgatctctctgggagctgcagactgcagctgttcctatttgccatctggccagccacctaatatttctaatcattcacttagcaagagtctcaggtttaagtaaaattataactaagttactaaggaacaatacatcaaaagtcatatattcatttttccctctaagagttttttcttttttaaaaaaattaaattaaaaaactccttggaaaaaacatttttaatcttcccattaccactttattccttggcacacagaagggtaccagtctctgctggagacaaaggtggacagtaggccagggtgacaatatcagcctgttcctgctccaggtctcacattaatgcatcaagggcaagatatggtttcttacttgaatactgcaggttttggttatagacagctggagtggtggtaaggggactaggttaggtgaagtcactgggctatcatccttgctctggttctacagctgtgcattttggattgctatttagcttctctaagctccagtttcctcctctgttatatagaaataatgtctgccaatcttttttatagagttatttgtaggatcaaatggaatgagatatgtgaatgcattttaaaaatgtatggaataccacacatttggacaagattattattgaagtgtgcaatcttgtctacatgacaagtgaaatcacgtaggaatcgtagtaacaacaaaccagctgaattttggtctcagtaccaatgcctactggggcactgcagtagagcaagttttcctaacacctcatggaacagtgacagtgaaggttctcctaggtttttatgtgagactgcctgaagagcaattacaggctctggaacaatagatgctactaagtttattttattttattattattttttattttactttaagttccgggatacatgtgcagaatgtgcaggtttgttacataggtaaatatgtgtcatggtggtttgctgcacctatca

SEQ ID NO: 4 - DNA, 194952 bp, Homo sapiens
tgataggtgcagcaaaccaccatgacacatatttacctatgtaacaaacctgcacattctgcacatgtatcccggaacttaaagtaaaataaaaaataataataaaataaaataaacttagtagcatctattgttccagagcctgtaattgctcttcaggcagtctcacataaaaacctaggagaaccttcactgtcactgttccatgaggtgttaggaaaacttgctctactgcagtgccccagtaggcattggtactgagaccaaaattcagctggtttgttgttactacgattcctacgtgatttcacttgtcatgtagacaagattgcacacttcaataataatcttgtccaaatgtgtggtattccatacatttttaaaatgcattcacatatctcattccatttgatcctacaaataactctataaaaaagattggcagacattatttctatataacagaggaggaaactggagcttagagaagctaaatagcaatccaaaatgcacagctgtagaaccagagcaaggatgatagcccagtgacttcacctaacctagtccccttaccaccactccagctgtctataaccaaaacctgcagtattcaagtaagaaaccatatcttgcccttgatgcattaatgtgagacctggagcaggaacaggctgatattgtcaccctggcctactgtccacctttgtctccagcagagactggtacccttctgtgtgccaaggaataaagtggtaatgggaagattaaaaatgttttttccaaggagttttttaatttaatttttttaaaaaagaaaaaactcttagagggaaaaatgaatatatgacttttgatgtattgttccttagtaacttagttataattttacttaaacctgagactcttgctaagtgaatgattagaaatattaggtggctggccagatggcaaataggaacagctgcagtctgcagctcccagagagatcaatgcagaaggtgggtgatttctgcatttccaactgaggtaccgggctcatctcattgggactggttagacagtgggtgcagcccatggagggtgagccaaagcagggtggagcattgcctcactcaggaagcgcaaggggtcaggggaactccctcccctagccaagggaagccctgagggactgtgccatgagggacagtgctatctggcccagatactacacatttcctacagtctttgcagccggcagaccaggagattcccttgggtgcctacaccaccagggccctgggtttcaagtacaaaactgggtggccatttgggcagacacccagttagctgcaggagttttttctcataccccagtggcacctgaaattccagtgagacagaaccattcactcccccggaaaggggctgaaggccaggcagccaagtgatctagctcagcagatcccacccccatggagcacggcaaggtaagatctgctggtttgaaattctcactgccagcacagctgcctgaagtcaacctgggatgctccagcttggtcgggggaggggcatccgccattactgaggcttgagtaggctgttttcctctcacaatgtaaacaaagccactgggaagtttgaactgggtggagcctaccacagctcagcaaagcccctgtagccagattgcctctctagattctccctctctgggcagggcatctgggaaagaaaggcagcagccccagtcaggggcttatagataaaactcccatctcatgggacagagcacctgggagagggggtggctgtgggcccagcttcagcagacttaaatgttctttgcctgttggctgtgaagagagcagtggatctcccagcacagcacttgagctctgctaagggacagactgccttcttaagcaggtccctgaccctcgtgattcctgagtgggagacacctcccagcaggggtcgacagacacttcatacaggagagctctggctggcatctggtgggtgcccctctgggacaaaccttccagaggaaggaacaggcagcagtctttgctgttctgcagcttctgctggtgatacccaggcaaacagggtctggagtggacctccaccaaattccagcagacctgcagcagaggggcctgactgttagaaggaaaactaacaaacaggaatagcatcaacatcaacaaaaaggatgtccacacgaaaaccccgtacaaaggtcgccaacatcaaagatcaaacatagataaatccacaaggatgaggaaaatccagcacaaaaaggctgaaaattccaaaaaccagaatgcctcttctcctccaagggagcacaactctttgccagcaagggaacaaaactggatggagaatgagtttgatgaattgacagaagtatgcttcagaaagtgggtaaaaacagactcctccaagctaaaggagcatgctctaacccaatgcaaagaagctaagaaccttgaaaaaaggttggaggaattgctaactagaataactagtttagagaagaacataaatgacctaatggagctgaaaaacacagcacgagaactctgtgaagcatacacaagcttcaataactgaatcgataaagcagaggaaaggatatcagagattgaagatcaatttaatgaaataaagcatgaagacaagattagagaaaaaaagaatgaaaaggaaggaacaaagcctccaagaaatgtgggactatgtgaaaagaccaaacctacatttcattggtgtacctgaaagtggcggggacaatggaaccaagttggaaaacactccttaggatattatccaggagaacttccccaaactagcaagacaagccaacattcaaattcaggaaatacagagaacaccacaaagatacccctcaagaagagcaaacccaagacatgtaattgtcagattcaccaaggttgaaatgcaggaaaaaaagttaagggcagcgagagagaaaggtcgggttacccaaaaagggaagcccatcagactaacagtggatctctcagcagaaaccctacaagcctacaagccagaagagagtgggggccaatattcaacattcttaaagaaaagaattttcaacccagaatttcatatccagccaactaagcttcagaagtgaagtagaaataaaatcctttacagacgagcaaatgctgagagattttgtcaccaccaggcatgccttacaagagctcctgaaggaagtactaaataaggaaaggaaaaaccggtaccagccactgcagaaacataccaaattgtaaagaccattgaaactatgaagaaactgcatcaactaatgggcaaaataaccagctaacatcataatgacaggatcaaattcacacataacaatattaaccttaaatataaatgggctaaatgccccaattaaaagaccacagactggcaaattggataaagagtcaagacccatcagtgtgctgtgttctggagacccatctcacatgcaaagacacacataggctgaaaataaagggatggaggaagatctaccaagcaaatggaaagcaaaaaaaaagcaggggttgcaatcctagtctctgataaaacagactttaaaccaacaaagatcaaaagagacaaagaaggccattacataatgataaagggatcaattcaacaagaagagctaactatcctaaacatatatgcacccaatacaggagcacccagattcataaagcaagttcttagagacccacaaagagaccaagactcccacacaataatagtgtgagactttaacaccccaatgtcaatattaggtcaacgagacagaaaattaacaagcatattcaggatttgaactcagctctggacccagtggaactaatagacatctacagaactctccaccccatatcaacagaatatacattcttctcagcaccacatcacacttattctaaaattgaccacataattggaagtaaaacactcctcagcaaatgcaaaagaatggaaatcataacaaacagtctctcagaccaaagtgcaattaaattagaactcaggattaagaaactaactcaaaaccatacaactacagtggaaactgaacaacctgctcctgaatgactactgagtaaataacaaaaagaaggcagaaataaatacattatttgagaccaatgagaataaagatacaacataccagaatctctgggacacagctaaaacagtgtttaggggaaattcatagcaataaatgcccacaggagaaagcaggaaagagctaaaatcaacactctaacatcacaattaaaggaactagagaagcaagagcaaacacattcaaaagctagcagaagacaagaaataactaagatcagagcagaactgaaggagattagagacacaaaaaacccttcaaaaaaatcagtgaatccagaagctggttttttgaaaagattaacaaaatagatagaatgctagccagattgataaagaagaaaagagagaagaatcaaatagacgcaataaaagatgataaagaggatatcaccactgatcccacaaaaatacaatctaccatcagagaacactataaacacctctatgcaaataaactagaaaatctagaagaaatgaataaattcctggacacatacaccctcctaagactaaaggaagaagtcaaattcctgaatagaccaataataagttctgaaatcgaggcagtaattaacagcctaccaaccaaaaaaagcccaggaccagacggattcacagctgaattctaccagaagtacaaagaagagctggtaccattccttctgaaactattccaatcaatagaaaaggagggaatcctccctaactcattttatgagtccggcatcatcctgatacaaaaacctggcagagacacagcaaaaaaataaaattgtaggccaatatccctgatgaacattgatgcaaaaatcttcaataaaaaactggtaaactgaatccagcagcacatcaaaaagcttatctaccatgataatttggcttcatccctgggatgcaaggctggttcaacatatgcaaatcaataaagataatccatcacataaagagaaccaatgacaaaaaccacatgattatttcaatagatgcagaaaaggcctttcataaaattcaacagcccttcatgctaaaaactctcaataaactaggtattgatggaacatatctcaaaataataagagctatttatgagaaacccacagccaatatcatactgaatgggcaaaagctggaagcattcatttgaaaaccggcacaaaacaaggatgccctctgtcaccactcctattcaacatagtattggacgttctagccagggcaatcaggcaatagaaagaaataaagcatattcaaataggaagagaggaagtcaaattgtctctgtttgcagatgacatgattgtatatttagaaaaccccatcatctcagcccaaaatctccttaagctgataagcaacttcagcaaagtctcaggatacaaaatcaatgtgcaaaaatcacgagcattcctatacaccaataatgacaaacagccaagtcatgagtgaactcccattcacaattgctacaaagagaataaaatgcctaggaatacaacttacaagggatgtgaaggacctctttaaagagaactacaaaccactgctcaatgaaataagagaggacacaaacaaatggaagaacattccattctcatggataggaagaatcaatatcgtgaaaatggccatactgcccaaagtaatttatagatccaatgctatccccatcaagctaccattgactttcttcatagaattagaaaaaactactttaaatttcatatggaaccaaaaaacagcccgtatagccaagacaatcctaagcaaaatgaacaagctggaggcatcatgctacctgacttcaaactatactacaaggctacagtaaccaaaacatcatggtactggtacataaacagatagatagaccaatggaacagaacagaggcctcagaaataacgccacacatctacaaccatctgatctttgacaaacatgacaaaaacaagcaatgcagaaaggattccctatttaataaatggtgtcgggaaaactggctagccatttgcagaaaactgaaactggaccccttccttacacgttatacaaaaattaactcaagatggattaaagacttaaacataaaacataaaaccataaaaaccctagaagaaaacctaggcaataccattcaggacataggcatggcaaagacttcatgactaaaataccaaaagcaatggcaacaaaagccaaaattgacaaatgggatctaattaaactaaagagcttctgcacagcaaaagaaactaacatcagagtgaacaggcaaccgacagaatgggtgaaattttttgcaacgtatccatctgacaaaaggctaatatccagaatctacaaggaacctaaacaagtttacaagaaaaaaaacaaccccatcaaaaagtgggcgaagggtatgaacagatgcttctcaaaagaagaaatttatgctgccaacaaacatacgaagaaaagctcatcatcactggtcattagagaaatgcaaatcaaaaccacagtgagataccatcttatgccagttagaatggcgatcattaaaaagtcaggaaacaacagatgcaggagaggatgtagagaaataggaacacttttacactgttggtgggagtgtaaattagttcaaccattgtggaagacagtgtggtgattcctcaaggatctagaaccagaaatatcttttgacccagccatcccattactgggtatatactcaaaggattataaatcatgctactataaagacacatgcacatgtatgtttattgtggcactattcacaatagcaaagacttggaaccaatccgaatgcccatcaatgatagactggataaagaaaatgtgacacacatacaccatggaatactatgcagccataaaaaaggatgagttcatgtcctttgcagggacatggatgaagctggaaaccatcattcttggcaaggtaacacaggaacagaaaaccaaacaccacatgttctcactcataagtgggagttgaacagtgagaacacatggacactgggaggagaacatcacacactggggcctgtcagggtgtaggaggctaggggagggatagcattaggagaaatacctaatgtagatgacaagttgatgagtgcagcaaaccaccatggcatctgtatacctaggtaacaaacctgcacgttctgcacatgtaccccagaacttaaaagtattattattattattataataataataataaaagaaatacaataaaatagaatgcagcatacagcagtgattctcaaacacattcagcatcagaattacccttgaatctttaaaatatatatacatatgagatcttagtctccaagatttgtaagtttggtattgggtccctgggcctatgttgggtttagaaacttctacagatggtttggatgtatgggacagtttaagaatcgctgaactaaaatcaaataaactgaatatcctgtgatttagagagacttatcgtttatttcactatccaagtacttgcattagagcgtggctagaagggatttgcagccttgtaaataatcagaaattcagacattttgagatgagagaactgctgaagattttattctgacttgaaataaattttctaattagaaacttccaggtgagagcaaaggcctggaacaatattcctgagccagaggaggatcgagtttgactccaggcctaacacttactaggtctatgaccttgggtcagtaatttaaattctctgtatctcaacctctcaacagggtattggtagggattaaatgtgttagtgtctgtgaagtgcttagagcagtgcttggcatagtaaatgcttaatgaatttcagccactgtttttatttttagtactttccagctcccccaaaaagatactttttttagacttgtattaagacaataaaaagtttaatcagcatgcttcatacctaaatatgcttcactttatagcaaagtttacaagactaaaactgttttgttgtaattctctgagtctcatgtgtttattaatgattttttctgctgtttattcatctgaattctactcattcttcaagacctagctggaatcctgtttctagaaagactcttgcccataataataaacctgccctatctgagttcctaggtggtctgtacctcataatttggtaattaattgtatatgcacttatataacaaaacattattgtgtgtctttgctgtatcagattctaggctggaagttgtagatatgatgtttttgtctagaaaaatgttctagaatgtcctactcaggacagtctgttgactttaaagacacatttcctaaacagacacttcatgaggcagccccagcctgtacctgtgttcctggacctgatgatcaagtttgatttaagcctcaccacttactagctctgtgattttgggcaagttacttgaattctctgtgtgtagatagaacaatgttgagggaaatccctttcccccatccttgtgtttccacaagggaacttgcttcctaataagtaacactttcaggggaatattctaggcccttctcttatccccattacttgttctttctgtgaaaagaggagaggttaatctgatggatgaaatccttaatctttcatcttctggactgtagagcctgtgaaccaaagcaatggaccacttgcactgaaattgaggctgaccctgtattttgattcttatttggcaacttatttctattctgttcccaattcaaaatcccaaggggagaaggaagataattgattaccagaagtatgtaatggtggtaggaagttgaataaatggtaactttttaaaagttgcatgagatatagtccttatcccagagaagctaagtttgcttttctttcctctcatgtattttagtattatttctacaattagattgtaaaccctttaaaagcaagaatatttctacattttcttactcctgatagcacacagtagactgctgggcacatacatagtaggtggctctgtaggtacttgctaaatgattcaacatgtttttccctcatggaaaagaaagatttcagtattgttcttatcagctaggaaggcactctgaataggaaatcagttctaggcaggtatccataaatgggttatgatttccaacttacttgccccagaggctcgctaatgttgaactcttcatgggtactttgtcttgcttcatgagctatacatgctaaggggttagcagatcatataatcttttgatctacaaaatatgatctttattgaacaaaaacttgggccaaaggcctttctcctttgccaccttcctccctcttttcattctcttttttgggaatgccctttgtgcatgttagttacagcatgtaccacattgcactgtattgttggtttttgggtctaacccacccttaacactgcagtccccaagggcagaaattcagtctcattcattttgatgtcctcagtgcctgtgctcagagaatatctattatttgaaaaaatagtgcaaaagtaaattttaggagactacatcacactcatctaaactgcaagtttgacaagttgacatccaaaagaaaggctctcctaaataacctcgccacagaaatttgggtgacctttgtagctctggagaaagcagaggcaaaaatgaaacctaaaaattatttgtgggtttttaaaaaatgttttctcatggagtaaaggtctacagctgagttcttttcatatgagggaatgacagaaacacagctggttctgactttcagcttcaactgagcgaccagagctctgctggtgaaacaggaacttgtattgtgcccctgacgtgcaccttgaaggtgtcagctcattgtccctttgttcacataaatagttttttaagaattgtttttgatcttgtgagcctctaactaaatgattaaccatgcaaagttggccatttggggtaatactgaagcacttctcttgagggctattgacaggtgggaatgtgcccacctccttgggtctctggttttcatgtcatacttgcaaatcagtgacagtttaaacttggggcaatcacttagcaagtctattgagttaccaagttaattattcccactttgcatgaagcaaccttgaaaatgattttcctaaagcaaagtacatccaaactcagtaccttcttaataacctttgctgaatgaataaatgactaattcataaaaaatgtaacatatctttaattcttacttacgggcagtttaagcctcttgtgtaagaggaggcctcggcttgagataacataggatagtaagcctcctagagaaatttctatatggaaacatggtctgctatgaagctagaagtgagaggacattatatttgaccattatatttggcttcagagcttctcaacatggggcccaaagtcaaggtcccttgtttcattaagaggaggtccaggagtgcatgacacccatcagactactgagacccagctggaactaggcaccttgcacaggggccttgcctaatcaaaatagttcttattttttctgagttccaagtaactagtttcctaacccagtgtctggatagtagtgccaagtgggagtaccttcaatgaacttcctcatgaggttatttctagcctattggaatgtttcgttttaggagggtgaggaagggaagtcttgaatttttgtgcttagtttaatgttgtgatacagctttgaccatccgtttaatgggagatctgttttccagatgactatacatgtggaaaggagaagttttttgagtgttttttttaaccccttttaaagaatggtttttcatttagtctctacatttgggggtaaaaggtcctctagggagacttttcaaaagtatttgaagtttgcatctgatttcagaggtgagttggaggcctatctgtgtatgacagacacatgtctccaacaactatatgttcacaaggactaagagccatccttttgggtccatcattcaacattgatctcacattcgtgttcgtatcagtatctttacagtgcgctcccagttacatctccctaatttcccttagtaggcttcacagaatttgcagtgtatgcaatggcagatgaccacatgtggagtcatttaaccacatcttccactgcaagtcagcccgctcttgatgtctgtttatgtttagattccatcttttggaagatttcattcctctgcactatctcagtatctcagatgcttttgagactgggtccttttcccctcctatgtttggccatggccaccccctcagggttgtgttgtgtttcacagctgctgtttgtagggttgacctttacaatgtacaaagctctttcccatatgttgacaatccctggtgtgatgctgtgagttaggcagggtgtgtatacgtgtcctcatcatattacagtggtaaggcaacagggtttttgaatttgatcacccatgaatttgtctaatttgttggtaaaaaatggtcatgtatcagccgtttcacagggtcagcttaatagaaagtgggagttaggcaggaccagaattcaggacttcagcccccggtcccagggactattctctatacccaattgtcccaccttgaatcagtttcttctagggaaatatctccaaaactgagatggcacccacaggacttcttaattgtagtcattaccaggaaaaacaagcaaaggaactggtgtaaatctctgtttttggtgattggtggagatttggagattgtcttgtgtcaaaagtaaagccactagattaaatgttttgttaataaattggttatttttaatttaattatttgacagttaatttacattattcaaaaatcaaaataaaatttaaaagaagtttacactgaaaagtcttgccccacttataccctgctcacctcagtatcccccaatacataccatctataaggtgatcatttgtattagtttcttgtgaatccttgatagtgtgttttatatagatacaggtaaatatgagtatgtactattatttcccccccaccccaccctgttttttttttgagacggagtctcgctctgtcgcccaggctggagtgcagtggcacgatctcggctcaccgcaagctccaccattttcccccatttttaaaacaaaaggtagtagccatatatacactattttacaccttgttttatcacttactaatatataccagagagctttccatcattttgtacatatgcacctatatctgtcaattattcccagaagtggaattgctgggtcagcaggaaaaatcatgtataattttgataggtattgcctaattgtcctgcacagggcttgaattgtttgtactcccacctttagtgtatgagaagacctgtttctccatagcctcatcaaacagagtgtgtgagattagatgagaaataggaggtgagcagtcttttaccccatccgtagtttgcagtgggaacactgcacagttgcaagagctggtgcaggtatcagattagttccagtggaaacgctgcctcaccatggccatgggcttgcgccagctctagtgacacacacggaatggacccacgttgccacttgcagaatttcctgtagcagaaagttgaacatgcattcattattcatctaactagccatgctggatctaaagagcacaacagtgttttttagaaccaaaaagaaaattgtttcactacaacacactgtgtataaggctttcaatgctcttttctcagctattaacattattttcaggactgagttcaagagatgtatcccaaatcacagggatgtcttgctaagcttggaactttcatactcaagggatgcttttttgaggaatgattttacacttactcaacatttgtaattaaataattagtactttataagataaatttaaactgtccaagtacaatataaacattgaactatgatgcattattgctagactttttccttaaagttgccaagtggtttcctgcattaggcaaataggggatcatataaaaatgccatgatttacggcctagataacatctccaccatttgagcagcatatattccaggtcatccccacataactccttaccattctcattagaaaggttgattcttagtcttatttttctctgaggacagcaaaaaaaaaaatccccttcagttccactgcatagaaaagtgtggtaaatggagccgggcacagtggttatttaatttaaatggacaatattttttatagaattttgacagggccactgtataggggaaagtcactcctcttcccctttatagaagagttgcacctggacagttgcattgatgactgtatccagtctacacaagaggtcattcctgggcataagaatggactgccaaaatctagctgaaacaccattgacaaatagacattttcttttgttaataatacctgtgaaggctttcataacagacatttccagttttgttctcaggctccttgcagctgctcctctaaaagtgtgctctcttccaagagctgacaatggccagaagcaaggtgttctgtcttttgtgccatcatcatctaacttgccacacacatttgggatgtcagcctaggtataggttttgtatccactcagtatggcttgtgggtctggttgcctttgttattcatgctgagggcctctgggcatcagtttggtgtgagagaacccattccatgaccctccttcctttggctgttttgactcgatggctcttgttggcacagtctgtgagtgtctgatgctctatccatgccggaccatctgttctgctgtctctgtggtctgaagtcgttttctgaactattccttgataataaatttgagatgatcttgttctacctttcttttcaagtcacatcttagccccttagccacattcccgaagaacatgacaaatggatgggtcacaagtcacgtagcatagggtgtcagaccacgaggctttgaagggattctgttgggtgctaaaaagaaagattttgtgtcaccacgattttttttaaaggcatgttgacacttaggccttaattgaaagcgttcttactcaagtagagttgacagaggagtatttggtagtcgcggttgctggtctgaagagcatgtggttctgtttcaatgcccaatgagatcttctcacgggaaaatgttctgacatctcaaacaaatgaccttcatgcatagttttgacaaaataccctattaagtatgcatatatggttggtaccttgtggtaataattcaatactggaaacagagtagcaacaaagaaacattagggttatatttaacctctgtggaattagtgtgtaaacaaactgcttatcagaaatgctcatatggggctttgtttaaataaataagaaactggcatatagggtctgcaggatatttctgccaagtagacctccctcacattataagacaccacatctatgtctgaccccatatggaaagaggcatagcaagccagcactggttcatattccctctccaccacataatgggtatgtgatcttagggaatccaccgaaactctctgggcctcagtttcctcagctataaatggtggataatcaaattatttacctcaccattaataaatgttagctattattttttatcaagtttaatacaaagagaaacattttacttatttttccagctatccagagcatcttccaaaatcctatcaccaacaaatactgtattgtatttattatagcaactatgtaaaaatggagtccctgtcctatgcttagatgaaatatgttggtatttgagtttgcatgtcttctataggaatcagtgtttagtgaaaacgggtggagataaacagatgttttcacagtcctgttgttcacagtaccgccaaattgaatgtttccatataggtgcattctaatggcttaaatgatgcagatattttctggccagccatatggatcttttgtcatctaagatgttaatattttccttatattttatagtagttctggagtacagccagtttcttgaatagggtccacatggctcattatgcacagggcctggaaactgccttactcgtgctgttgaaatgaaccgtgacacttcagaagagctgggagctggggtagagcagtggctaggagaacatattcaattatatttcctcctgcattaagctacaagtaatgagcactttcctgtgctttacagttaagtaattaaaagaaattatagagtgggatgcaaaaataacccgaaggacaactggatgtgtggagccaccagttttctccatgagtgcacaaggttaatccttgttactactcagaatgctgagtttctacagaaagggttgcaggtccacacatgttttggcgtctacccacacgcttctgtatggcatgactgtgcatcccagaagaagggctgtgctgtgtacctccacgtttcagtggaatttaacaaactgatccctgaaaatggtttcataaaggtgagtaacagagagctaatagccttctcttgctaattttatctttcccccaagatttcttgataatagtttgaaaaggagtgttattctttggtctctagaggcaacttacctttccagtttcttccatcacctgttttcatctctcttgtttttttaaatttaatgctgtatgtatttcagaggataggatctaatctagtgcggtcccttcatcaggtgagaattattcatctcattttcattttagcccttctgaattaatgacattgaagcccggcagtttggtcctaagatgggtttaattatgtacagatactctttctataatggaaattgctcagataactaattaaccacaagaatacactgtctatggaaaatttcaggagcaccgtctgtggaaaaactgggaagggcatgctgtcaccacagctctggggtctattaaaagtgtggttatgcagcactggtgtctagtggggtgttggctctcaactgccagaattcccatagcatttcatggcagaaagtcaaggtgtccagcaatactctgaaagtgacctgttgattaaagtcgtcaattctgaagaaagagactgaaataagacaaatgggtcttaactttttttctctttctctctcttgtaaaaatgtgtgattgttctggcatgttcccaatccccacataatgccaacatcttttcttaaagggggattccctttatccttggatctgagaattattgcatgttctccctttagggacaatgaatgcagttgcatcacccttgcttttttttttttttttgtacacagcatgcttattcttggatgcagggacttgaaagacaaagccccacctggctttcacaacatctcctattagtaggtgtgccttgtgtgtaatttgaaggaggcggtcccttagctgtgtttacactgtacttttaaatgtggggctgaaggtagaatcaaccatacttaagatgccacctgggaaaatagggttctgtgtcatctcagccccacccatttgcaaatgacttaacagcagcactattagggttcctagtgtgagtcatttgcatttggactggtgaacttggtgacttcttggtgtttggaaacaaacaacctttgcagtctttcgtaaaaagcctgaacagtggaccagtctccagttctacttgcaaagctgcccccatcaaatccctcataatgttcaacttaaaaaatgttacacttttctctggaaatctaaccttttttccttttttaaaagccattttaagtacttcagtcttgaatcaaatgatcccaaatattggacaccaacctagaaattgggttacctcctgggaactttatcgaagaagagagattttggttggagagggggttttgatgtttgatacttatatttactattttaatatttcattgttgttgttgctgctgctgctgtattattttgcgagtttcgtttgtttaaatttcatggtatttggtaggagagagctggatctgttggtttcaggacaagtctagaaataagaaatctgccttgagtgagtgagttggttccctctgttgctatttcaccattaaggacgaaaggaactcacaaggaccagagacatctggctgaaagcaatactagtgtgactggacatctactacctgccatagttggtcatatcgtttccagtatgattctgattgagtgagtgatattaggctatgttcagggatcagggaggctaattatgcttatattgccttgtagcattttggtaagaattaatgattgtgtagatgtccagatttaggtcagcaatattctaaaagttctcattgaactaatcatgtttataagtagcctgtactttctatcataataacaatagtggaaaagctagttgacataaaaggagcccagattttacttaagtaaaaacacaaaagcaaagatattttcccacataaattacaaaagcaaagatattttcccacataaatgtccccataaaacaagttgaaccaaagaggaaagatgacaggtaaccgtatgacacgctaagaaagtatcataatacttaagttaacttcaaccttttatttccttatcctaagcagcctcttttctctttatcatttagtcctgtgcttctcaactttgataagtaaaaaagttattgcactaaataaatcttattgaaatgcaggatctgattgagtgggtggggtaggtggaatgagggtggggaagttgagattctgcatttcttagaagtttctactttatgttaaaatggctaatccatctcaacattgagaagtaaggtttcacttaatttcagcctgtgtaagtttatcccatatgtacatttcctaaaactctaatctcaggccccaggaatttctcctttagttaaaatatttttaggaataaatttgaattgcattaatacacaatttataaatttaacacaaaaaattatttgaagtttgagactttaggttgcatgaaatcaatttcatacttgaaaattttctataaattcaaaagtctgtgtatttaaatacaatttaaatacctgtgttacagtgacatttgtttttctgtctctctctccaccatttccagagtcatcatccctgtacagaaaaatttttcccacatgatttcaccataaattcattaaatatgatgcttacttgataatttctccaggttctttttttttttaattatactttaagttctagggtacatgtgcacaacctgcaggtttgttacatatgtatacatgtgccatgttggtgtgctgcacccattaactcgtcatttacattaggtatatctcctaatgctatccctcccccctacccctactccatgacaggtcccagtgtgtgatgttccccaccctgtgtccaagtgttctcattgttcagttcccacctatgagtgagaacatgcggtgtttggttttctgtccttgcgatagtttgctcagaatgatgtccttgctcactgatggacatttggttggctccaagtatttgctattgtaaatagtgccgcaataaacatacgtgtgcatgtgtctttatagtagcatgatttataatcctctgggtatatacccagtaatgggatggctggctcaaatggtatttctagttctagatcctagaggaatcgccacactgtcttccacaatgtttgaactagtttacagtcccatcaacagtgtaaaagtgttcctatttctctacatcctttccagcacctgttgtttccggactttaatgatcgccattctaactggtgtgagatggtatctcattgtggttttgatttgcatttctctgatggccagtgatgatgagcattttttcatgtgtcttttggctacataaatgtcttcttttgagaagtgtctgttcatatccttcacccactttttgatggggtcatttgattttttcttgtaaatttgtttaagttcttttagattctggatattagccctttgtcagatgggtagattgtaaaaattttctcccattccgtaggtttcctattcactctgatggtagtttcttttgctgtgcagaagctctttagtttaattagatcccatttgtcaattttggcttttgttgccattgcttttggtgttttagtcatgaagtccttgtccatgcctatgtcctgaatggtattgcctaggttttcttctagggtttttatggttttaggtctaacgtgtaagtctttaattcatcttgaattaatttttgtataaggtgtaaagaagggatccagtttcagctttctacatatggctagccagttttcccagcaccatttattaaatagagaatcctttccccatttcttgtttttgtcaggtttgtcaaagatcagatggttgtagatgtgtggtattgtttctgagggctctgttctgttccattggtctatatctctgttttggtaccagtaccatgctgttttggttactgtagccttgtaatatagtttgaagtcaggtagcgtgatgcctccagctttgttcttttggtttaggattgtcttggcgatgcgggctcttttttggttccatatgaactttaaagtagtttttttccaattctgtggagaaagtcattggtagcttgatggggatggcattgaatctataaattaccttgggtagtatggccattttcatgatattgattcttcctacccatgagaatggaatgttcttccatttgtttgcgtcctcttttatttccttgagcagtggtttgtagttctccttgaagaggtcttccacatcccttgtaagttggattcctaagtattttattctctttgaaacaattgtgaatgggagttcactcatgatttggctctctgtttgtctgttattggtgtataggaatgcttgtgatttttgcacattgattttgtatcctgagactttgctgaagttgcttatcagcttaaggagattttgggctgagatgatggggttttctaaatatacaatcatgtcatctgcaaacagagacaatttgacttcctctcttcctatttgaatatcctttatttctttctattgcctgattgccctggctagaacgtccaatactatgttgaataggagtggtgacagaggacatccttgttttgtgccagttttcaaagggaatgcttccagcttttgcccattcagtatgacattggctgtgggtttgtcgtgaatagctcttattattttgagatatgtcccatcaatacctagtttatttagagtttttagcacaaaggctgttgaattttgtcaaaggccttttctgcatctattgagataatcatggtttttgtctttgattctgtttatatgatggattatatttattgatttgcatatgttgaaccagccttgcatcccagggatgaagccaacttgatcatggtggataagctttttgatgttctgctggattcggtttgccagtattttactgaggatttttccatcgatcttcatcagggatattggcctgaaattctctttttttgttgtgtctctgtcaggctgtggtatcaggatgatgctggcctcataaaatgagttagggaggattccctctttttctattgattagaatagtttcagaatggtaccagctcctccttatacctctggtagaattcagctgtgaatccatctggtcctgatggatttttttggttggtaggctattaattattgcctcaatttcagagcctgttattggtctattaagagattcaacttcttcctggtttagtcctgggagggtgtgtgtgtccaggaatttataaatttcttttaggttttctagtttatttgcatagaagtgtttatagtgttctctgatggtagtttgtatttctgtgggattggtggtgatatcccctttatcaccttttattgcatctatttgattcttttctcttttcttctttattagtcttgctagtgatctatcaattttgttgatctttttaaaaaaccagctcctgggttcattgattttttgaaggagtttttctgtctctatctccttcagttctactctgatcttagttatttcttgtcttctgctagcttttgaatgtgtttgctcttgcttctctaaattgtgatgttagggtgtcaattttagatctttcctgctttctcttgtgggcatttagtgctataaatttccctctacacactgctttaaatgtgtcccagagattctggtatgttgtgtctttgttctcattggtttcaaagaacatctttatttctgccttcacttcgttaagtacccagtagtcactcaggagcaggttgctcagtttccatgtagttgagtggttctgagtgagtttcttaatcctgagttctagtttgaaagcactgtagtctgagaggcagtttgttataatttctgttcttttacatttgctgaggagtgctttacttccaactatgtagtcaatttttggaataagtgtgatgtggtgccgagaagaatgtatattctgttgatttggagtggagagttctgtagatgtctattaggtccgcttggtgcagagctgagttcaatttctggatatctttgttaattttctgtcttgttgatctgtctaatattgaccgtggggtgataaagtctcccattattattgtgtgggagtctaagtctctttgtaggtctctaaggacttgctttgtgaatctggtgctcctgtattaggtgcatatatttttaggatagttagctcttcttgttgaattgatccctttatcattatgtaatggccttctttgtctcttttgatctttgttggtttaaagtctgttttatcagagactaggattgcaactcctgcttttttttgctttccatttccttggtagatcttcctccatccctttattttgagcctatgtgcgtctctgcacatgagatgggtctgctgaatacagcacactgatgggtcttgactctttatccaatttgccagtccatgtcttttaactggagcatttagcccatttacatttaaggttaatattgttatgtgtgaatttgatcctgtcattatgatgttagctggttattttgctcgttagttgatgcagtttcttcctagcctcaatgatctttacaatttggcatgtttttgcagtggctggtactggttgttcctttccatgtttagtgcttccttcaggagctcttgtaaggcaggcctggtggtgacaaaatctctcagcatttgcttgtctgtaaaggattttatttctccttcacttatgaagcttagtttggctggatatgaaattctgggttgaaaattcttttctttaagaatgttgaatattggcccccactctcttctggcttgtagagtttctgccgaaagatgctgttagtctgatggacttccctttgtgggtaacctgccctttctctctcgctgcacttaatgttttttccttcatttcaactttggtgaatctgacaattatgtgtctttgagttactcttcttgaggagtatctttgcggcattctctgtatttcctgaatttgaatgctggcctgcctcactagattggggaagttctcctggataatatcctgcagagcgttttccaacttggttccattctccccatcactttcaggtacaccaatcagatgtagatttggtcttttcacatagtcccatatttcttggaggctttgttcatttctttttactcttttttctctaaacttctcttcttgcttcatttcattcatttgatcttcaatccctttcttccacttgattgaatcagctactgaagcttgtgcatgtgtcacatagttctcgtgccatggttttcagctccatcaggtcatttaaggtcttctctatgctgttttttctagttagccattcgtctaatgttttttcaaggtttttagcttctttgctaaaaggttcaaacatcctcctttagctcggaggagtttgttattactgatcatctgaagccttcttctctcaacttgtgaaagtcattctctgtccagctttgttccattgctggcgaggagctgcattcctttggaggagaagacgtgctctgatttttagaattttcagcttctctgctctggtttctccccatcttattggttttatctacctttggtctttgatgatggtgacgtacagatggggttttggtgtggatgttctttctctttgttagttttccttctaacagtcaggaccctcagctgcaggtctgttggagtttgctggaggtccactccagaccctgtttgcttgggtatcaccagcagaggctgcagaacagcaaatattgcagaacggcaaatgttgctccctgattgttcctctggaagcttcgtctcagaggggcacctggccgtatgaggtgtcagtcggcccctactgggaggtgcctcccagttaggctactcaggggtcaggaacccacttgaagaggcagactgtccattctcagatatcatattccatgctgggaggacccctactcttttcaaagctgtcagacagggacatttaagtctgcagaagtttctgctgtcttttgttcagctgtgccctgcccctagaggtggagtctacagaggcaggcaggcctccttgagctgcggtgggctccacccatttcgagcttcctggctgctttgtttacctactcaagtctcagcaatggtggacacccctcccccagcctcgctgctgctttgcagttcgatctcagactgctgtgctagcagtgagccaggctccgtgggcatgggaccctccgagccaggcctgggacataatctcctggtgtgccgtttgctaagaccattggaaaagcacagtattagggtggggagtgtcctgattttccaggtaccgtcagtcatggcttcccttggctaggaaagggaattccccaaccccttgtgcttcctgggtgaggtgatgccccaccctgctttggctcatgctccgtgggttgtacccactgtctgacaagccccagtgagatgaacccggtacctcagttggaaatgcagaaatcacccgtcttctgcatcactcacgctgggggctgtagactggagctgttcatatttggccatcttggaacctccctttccaagttctttattacagagtgggtcactgaaacttcatggaacaaattggaaattatcttcttaattaatgtcactgtctaccatgtatgggaatttggtaaatattatatggtttcaataacatagtagatagaacattgtcaaatctaaacttcagtgaattgtaacagatcccacctgaaattctaaagaaaacagaattctaattgaagaggttaaacttttacagggaatgtcaactgccatttgggtcctgtaaacaaaaaactgttttttaaaaaagtaaactttaaaagtattttcagatgacctcatttgctatccaagtggcttgagtatgcttgatgctaagacttctttgttacagactggagatgtgtgctactggggcagtgttgctctgtgacaaggaggcagaggatgagggcaaggttcgatgtgactgtgaattctgggtggctctggctatcgggagccttcattgattacagcaaaacagttgctttcctagggcaatagtgtctctgtcacccaggctggagttcagtggcatgatcaatcgctcactgtagcctcaacttcttagactcaagtaatcctcccacctcagcctcccaagtagctgaaactacaggtgtgcaccaccacacctaatttttttaatttttaagtttttgtagagacatggtctcactgtgttgcccaggttgatctcgaattcctgggctctagtgatcctcccgcctcggcctcccaaagtgttgggattacaaatgtgagccactgcacctggccctttgcaaccttcttgacaatgcattcctttattccctaactggaagtaacttctttctctttataaaattgtatctgtaccttttctgggtcatttctacctttatattctagttacgtatgtcctacctccctcctagggagggaggtaagtaagactggaaagtagacttcatgtgtgatgaatgaatgaacaaaaggaagtctaacatatggatatagtcaactggatgcaaattaaaaatttttaaatattgatttgcaagatttcattaaggtcaactcttaatagtttgtatcatatatgttaggaaccaaatattaataacttcttcagcattaccattatctttataggactgtctaaaatgagcagccatatctttaaactgtgttttctctgattacacgctcacaggtaaaacccaaaggggctgggaacaaacaagacttttttttttttctgtatgcctgaattatctgtactgttgcttgttttcccacctttggccatagaaacttagttctaacatgctacaatttttgcagttctttctcttagaaaaagaccacattgtctgaaatttcatccatttaagtaatcaagccttaaagttgaaggatcttggtcatgattaatctagacctacaaagtagtatcttaatggcactccttttagaaagttaggttccaggacacacatagctgcagtgtccacattttgtaagctccttcgttgtcacagccactctcttctctgtggctgatattctaaaactggcaacacatcctgatggtaaaagcttggttcaggagacaggtgacctactagctttatggcatttgacaggttacctaacctctctgacgcataattgcctcatctatataatggggataataatacccatcctgtctccttgtaaaaatcaaattagatgacgcctgtgaatgttctatagtctcttagacaaatgtaagttatgactacagcaagagtaaaagagcatgttgttatggacattctttcagtgaaatgtctaagacttgtgagtcacacttaaagctaaacttgatatctacttcattgattttctttttagttctatgtactatattgaatttcctgacagtggggctatgaaagccttcctagcattttatagatgtggttgaattaatggctgtaagccttaaagcagaattagacagcatcaatgaatttattaagtataaataaatatataatctgcttagcaatattacacagcctctttatcttatgtgtgataaagagtcatccgaaggttgaaaatgaagaattgtcctggaagctcttacttaatcttttattatttcctaatacagtatataaaattactcattgaaagcttagcagaataagaaacaagaagttaaaaggctgaaaactacaaattttgctattattattgttattacttcccaagtctcttattgatctgttagaaatagagctacacaggaaattgtaggacagttagtatgtggtagtgttatctgctttttaattattcaagtaaggttttattccattagaggaactcaagaagttggtcatggctgataattgctatctgtcaaattccttagagcagggatccgcaacacccaggccatggattgttaccagtccctggcctgttaggaaccaggctgcacagtaggaagtgagcggcgggtgagcaaacattgccatctgagctctgtctcctttcagatcagcagcagcattagattctcatagaagcatgagccctgttgtgaactgcacatgcaagggatctaggttgtgtgctccttatgagaatccaattccttatgataatttaactgatgatctaaggtggaaccatttcatcccaaaaccatccaccctgctactcccagaccgtggaaaaattgtcttccacaaaactggttcctgctgccaaaaaggttgggaccactgccttagagtttataatttggggttagcacagcctatatttacctgagaatttcaatgggttcactgatctttccaaatgaaaaggcttcttacgaaaattatatccaaactgtcttttctcttagtttaataaacctatcagtaagtttttactgagtactgctattacatttttctctgttaagcattatgggggctcagacatgatccattccctcaaagaacttacctttcagctgaagactgactagaatgagcaaatacggttaacaattaacaagtgagtaggccagctcggccaacatggtgaaaccctgtctctactaaaaatacaaaaattagccgggcatggtggtgggcgcctgtaatcccagctacctcctgctgaggcaggagaattgcttgaacccaggaggtggagattgcagtgagccgagattgcaccattgcactccagcctgggcgacagagcaagactctgtcttgggaaaaaaacaaaacaaaacaagtgagaagggaatcaagtactacgtaagatgtaatgtggaattttagggaaggaaggcagtgtatgctggagtaattagagaaaggggcatgcatgatttgatgcttgaactggatcatgaaggataagcaagattttggcagcaagtgagagggagagaggagtttgtcagaggaatggaacaagtcaggaggcagtaatgtgtacggcactccaaggactctgtcctgatcggagcagaagtgatgaagcattgagtagtttgagaaagttagctaagaagggtgagggcagatgttggagagagttgagtatcagagagaagacattagatttgagcagatagaacaaaaatgccattgccagtttttgtgtaagagaatagtattagggtggttacccaggaagtggtcatcagagttgaatggagcagaaagagtgtctgatacagcatcgggacgttgtggtcacaaaatgaggtggtgagggctgagccaagatggtggcagtgggatggataaaaagggatggccaggacaaatattttaaaggaaaaattaacaggacatctttactgactggattggaaggctatgcaggaaatatattgtcaaacttgattccaggatttctatcctatgcctgggttgcccaaaatatcagggaaccattgttagaaaaggtaggagataccactgttccaacaaaaagtattgagtttggtgttgcacccacttaacttcaaggccttacaagtgagtagacagttagttagaattgcagaagtgccactcagagagcagggcttgcaatgtggggttggactttgtcaccattgtgttaattcctaattctatgcagatgctcagcttgaggaatacccatgtttgggcttcagaatgaaagccaagtaatatttactcagatgccaattttccctctgaaatatttgctcatggaactgagagaacaatatataaagcattaattatttttctcataaagttattaataaaaagataagatcagtgaaaggcagagtaaactagaagccaagtatagaaaatggtatcattcaaagactcattactgtagtggtgaaaacaaaacaattttccaacagcttaagatgcctcagtattttggaccatttttaagtagttagtgtgggcacttagtaaatatgtattaaactatagttcattaattcttttttttttttttttgagatggagtttcactctggtcacccaggctgcatttttgctttcttagtgatatataaaatgtcgagtttcacaatgatggtatcttagatttgattaaatatggtattaaaaaatagctgatcacagaaagtctctaccagtgtgatgtagatggctaaagtattccacatttgcaaacttttattgacctaaataagaggtgccccttgggttgtttttatttggactgggaatattaggagaaagctttttcattcagtgtgtaagtacaatctaccagaaatagaaacccccatggacgatctatttctttgatggtacaggactcagaacattcacaaagatttagttgttagcggaatagacatctgtattttattcaaaccaattttcccttcctaatctgagaacattgtgcaatctaagcagttctaagcatgtttgctattcgtgcaaagtgagagtaaatctaaaagaaatttttttgtgtgtttagggatggtaataaagtctcttagtggttgaaaatgttatttcttacaaaagtggagaacatttgcttttcaataccagagttttcagccatttctgcattctgacctattgactggaggtaggttgcctttgaattcagtaaaacttcatgggcagaaacacagttccttttcctacttatttggatatcatgatggccattgcatgtatgtgtctttttgtaagtccatgcctcagaactgagaagtaggaataaaattagggtcagggctggggatgctactctttgctgctgagaaacacaatgcttcaggtaagtgattctgaagtccttcaccacctgacggtaaccttgggttggtccataggtatgttttcattttgcttgttcatccattttaattggcttcctagagcatgcttgtagatgtagagccaaatttagagtagagcaaccctctggcaaacaggaagagattaattttgtggtatgcttttaagggacttcccaggaaacttcaaaagcagaaaaagaagcactagctgcctattccaaaatgtgtaaaacaccactcagctttttaaaagtaggataaactcagagcgcgcgcacacgcgcgcgcgcacacacacacacacacacagagagaacatctctagtaaaaagaaaagttgagctttcttagctagatgtgtgtattagccagaaaaagccaaggagtgaagggttttagagaactggaggagataaagtggagtctgcatatgggaggcatttgaaatggacttaaatgtctttttaatgctgactttttcagttttctccttaccagacacattgttttcatgacattagccccaggcatagacacatcattaaaatgaacatgtcaaaaaatgatttctgtttagaaataagcaaaacattttcagttgtgaccacccaggtgtagaataaagaacagtggaattgggagccctgagttctaacataaactttcttcatgacataaggcaagtcttctatggcctttggtttccttacctgtaaaacaggatggctcaatgaaattatctttcttctttgctataatagagtatctctgtgggaagaggaaaaaaaaagtcaatttaaaggctccttatagttccccaactgctgttttattgtgctattcatgcctagacatcacatagctagaaaggcccatcagacccctcaggccactgctgttcctgtcacacattcctgcaaaggaccatgttgctaacttgaaaaaaattactattaattacacttgcagttgttgcttagtaacatttatgattttgtgtttctcgtgacagcatgagcagagatcattaaaaattaaacttacaaagctgctaaagtgggaagaaggagaacttgaagccacaatttttgcacttgcttagaagccatctaatctcaggtttatatgctagatcttgggggaaacactgcatgtctctggtttatattaaaccacatacagcacactactgacactgatttgtgtctggtgcagctggagtttatcaccaagacataaaaaaaccttgaccctgcagaatggcctggaattacaatcagatgggccacatggcatcccggtgaaagaaagccctaaccagttttctgtcttgtttctgctttctccctacagttccaccaggtgagaagagtgatgaccatccttttccttactatggttatttcatactttggttgcatgaaggctgcccccatgaaagaagcaaacatccgaggacaaggtggcttggcctacccaggtgtgcggacccatgggactctggagagcgtgaatgggcccaaggcaggttcaagaggcttgacatcattggctgacactttcgaacacgtgatagaagagctgttggatgaggaccagaaagttcggcccaatgaagaaaacaataaggacgcagacttgtacacgtccagggtgatgctcagtagtcaagtgcctttggagcctcctcttctctttctgctggaggaatacaaaaattacctagatgctgcaaacatgtccatgagggtccggcgccactctgaccctgcccgccgaggggagctgagcgtgtgtgacagtattagtgagtgggtaacggcagcagacaaaaagactgcagtggacatgtcgggcgggacggtcacagtccttgaaaaggtccctgtatcaaaaggccaactgaagcaatacttctacgagaccaagtgcaatcccatgggttacacaaaagaaggctgcaggggcatagacaaaaggcattggaactcccagtgccgaactacccagtcgtacgtgcgggcccttaccatggatagcaaaaagagaattggctggcgattcataaggatagacacttcttgtgtatgtacattgaccattaaaaggggaagatagtggatttatgttgtatagattagattatattgagacaaaaattatctatttgtatatatacataacagggtaaattattcagttaagaaaaaaataattttatgaactgcatgtataaatgaagtttatacagtacagtggttctacaatctatttattggacatgtccatgaccagaagggaaacagtcatttgcgcacaacttaaaaagtctgcattacattccttgataatgttgtggtttgttgccgttgccaagaactgaaaacataaaaagttaaaaaaaataataaattgcatgctgctttaattgtgaattgataataaactgtcctctttcagaaaacagaaaaaaaacacacacacacacaacaaaaatttgaaccaaaacattccgtttacattttagacagtaagtatcttcgttcttgttagtactatatctgttttactgcttttaacttctgatagcgttggaattaaaacaatgtcaaggtgctgttgtcattgctttactggcttaggggatgggggatggggggtatatttttgtttgttttgtgtttttttttcgtttgtttgttttgttttttagttcccacagggagtagagatggggaaagaattcctacaatatatattctggctgataaaagatacatttgtatgttgtgaagatgtttgcaatatcgatcagatgactagaaagtgaataaaaattaaggcaactgaacaaaaaaatgctcacactccacatcccgtgatgcacctcccaggccccgctcattctttgggcgttggtcagagtaagctgcttttgacggaaggacctatgtttgctcagaacacattctttccccccctccccctctggtctcctctttgttttgttttaaggaagaaaaatcagttgcgcgttctgaaatattttaccactgctgtgaacaagtgaacacattgtgtcacatcatgacactcgtataagcatggagaacagtgatttttttttagaacagaaaacaacaaaaaataaccccaaaatgaagattattttttatgaggagtgaacatttgggtaaatcatggctaagcttaaaaaaaactcatggtgaggcttaacaatgtcttgtaagcaaaaggtagagccctgtatcaacccagaaacacctagatcagaacaggaatccacattgccagtgacatgagactgaacagccaaatggaggctatgtggagttggcattgcatttaccggcagtgcgggaggaatttctgagtggccatcccaaggtctaggtggaggtggggcatggtatttgagacattccaaaacgaaggcctctgaaggacccttcagaggtggctctggaatgacatgtgtcaagctgcttggacctcgtgctttaagtgcctacattatctaactgtgctcaagaggttctcgactggaggaccacactcaagccgacttatgcccaccatcccacctctggataattttgcataaaattggattagcctggagcaggttgggagccaaatgtggcatttgtgatcatgagattgatgcaatgagatagaagatgtttgctacctgaacacttattgctttgaaactagacttgaggaaaccagggtttatcttttgagaacttttggtaagggaaaagggaacaggaaaagaaaccccaaactcaggccgaatgatcaaggggacccataggaaatcttgtccagagacaagacttcgggaaggtgtctggacattcagaacaccaagacttgaaggtgccttgctcaatggaagaggccaggacagagctgacaaaattttgctccccagtgaaggccacagcaaccttctgcccatcctgtctgttcatggagagggtccctgcctcacctctgccattttgggttaggagaagtcaagttgggagcctgaaatagtggttcttggaaaaatggatccccagtgaaaactagagctctaagcccattcagcccatttcacacctgaaaatgttagtgatcaccacttggaccagcatccttaagtatcagaaagccccaagcaattgctgcatcttagtagggtgagggataagcaaaagaggatgttcaccataacccaggaatgaagataccatcagcaaagaatttcaatttgttcagtctttcatttagagctagtctttcacagtaccatctgaatacctctttgaaagaaggaagactttacgtagtgtagatttgttttgtgttgtttgaaaatattatctttgtaattatttttaatatgtaaggaatgcttggaatatctgctgtatgtcaactttatgcagcttccttttgagggacaaatttaaaacaaacaaccccccatcacaaacttaaaggattgcaagggccagatctgttaagtggtttcataggagacacatccagcaattgtgtggtcagtggctcttttacccaataagatacatcacagtcacatgcttgatggtttatgttgacctaagatttattttgttaaaatctctctctgttgtgttcgttcttgttctgttttgttttgttttttaaagtcttgctgtggtctctttgtggcagaagtgtttcatgcatggcagcaggcctgttgcttttttatggcgattcccattgaaaatgtaagtaaatgtctgtggccttgttctctctatggtaaagatattattcaccatgtaaaacaaaaaacaatatttattgtattttagtatatttatataattatgttattgaaaaaaattggcattaaaacttaaccgcatcagaagcctattgtaaatacaagttctatttaagtgtactaattaacatataatatatgttttaaatatagaatttttaatgtttttaaatatattttcaaagtacataaaatctgggggttctgggtttttttctctttactgtaaaacaaacatgaaaacgtgttttattataaatacgtgtgttccttgctttaagactaatctgactagttttagtaattaaacagccctccagagaggatacttatttgaaagcctgggaggccaatcctgcagtctgtgagcttctgagaagttgtaggattggatctgtcttccatggtggaagatgggagtgtcattttctcggacacttgaaagttttacccctttgaagtgatatactttcatcagataccaaaccatgtatcctagcaacatcaggatccacgaatcacggctggctggctggctctatttgactataaaataactgttaaaaaaaatcaaagtaggtttacttagggataatgagaataaattggcccaaatttagaaagtcaagtactggggaaaaaagtaaaaaaagaaattcaatatttggagacaggtcacatatcctcggtttggaagtggtgccatttgcagtatgtatttgtatccatagcactgatttaatttttgtacgtggagcacacagattttatatcatagtacccacaatctaacagattgctaggatttctaaaaggatttgcctccgtgatggctgccaagccgctgggtaatttagttaaagtgtttaaagttatcactaaatcttagggaaataaatggaaggattttaaatcagagaaggggccattaaggaaaaaaagcatctgttcttactcttcagcctccccatttgaacactgacaacccatcccataacgtggtgaactatatctgtgcaatgtatcatttctatttctaaacatacacacatggtttcctcttgtattgtcttataaataaggatcaggaaagtcataacaaacattgacttgtgttgtgtatatggaaaaacagatcgaatgagatgaattactctatcctaatctgtccagtgaacttgaaaagtactctaagagaagcccttgactgccagtcatgacagcccagccatggacttagaactttgataaacttcaggcttgaccaattttcatagtcagaggactaaaatattttttaaatggttgagtaaaaaaagtaaaaattaaacatgacatccaaattacttgaagttaaacgagtttggtaaacatgactgaaagttttcattagaagatgaggttggagaaaaaaacaaaatagagacatctactaaattatcctacttggagttaataggagtaaccaatgtgtactgcattcattgagtaagcagttaaacttgtttaattactaagatgccaggaaataactcagatcattgctttgatctgttgtttttcaccatactgataagcctctgtggtcattagctgtgtctatgaaatctttttatgagctgtactaattcagtgaataataagacagttcgaaatgagaatctgaactaagtcttagaatgggtcagtgttaaattgttcctcattcatttaagtgacttctagatctggataaaatgtcaaacactttttgaactgcaacaaatggcttcaggcattgcctcagttcagccagcactcccaatagtgttaaggtttaaggttattgtaaaacatacttgtctccatcatgttctaacatcaagcctggtctacaagttaaagtagaaatggctgcatattttgataagccattgttaaataaagactgttaattgggataagaaacaatatacgtgtacataaatttaggaagatgaagcatttagcttgcaaaaagccattcacagatttgatccaacctcagaatgttgaccagcaaaattagtattttatggaacataggccatccttttagctgtgggtttttaaactgtggttttaaaggttggttggctgcttggtttggtgacaagcgggggtaatggttgggaatctgacttttgttggttacattgaactaactggtggttggtgaactccccacctaatagctaaacttagcaactagagtaggtgaagccactccaaaccagcccatgtttatggacattccttctaataaacacactgcctgcatgtctatccccaatcttgtgagtatgatcatccattctctcaattctggccaccatttgaattatttgtagggaaaaaaaagcaaactccttgctttttaatatgtgattatttgcagtaaattacttgaagactatgtttaaatattaacagaaaaagcactgtgatcttacacattatcataattgagaagacccatttctgtggcactctgtaggatttccataggcctttacctcacccccacaccctaattatttacaaggcacagaccaccagattaggagctccccagcctggcatttgcttttctaacaacaatcctgtgtgcttggtaatgtcagtagcatggaattgtaaaaagcaggccttccaattaaacctcaccacacaaacaataaacaagacctttgcatttaagtgtgagctgctattttatatctggaaaaacaaaagtcctttcctttagaaaaataagcttatctgtcctgaaaaaagcctcacacataatgttgtagttaatgacaggacttgtctcaagcctgtaaatgaccaaaaagtgttagttgaaatcctgagcttgaggtgtatgttctacatttagaaaggacataaagatgcttctgcagctctgcactttggtactgtactctatttcaaatggttccttagaaaccaggggctggtctgcatagaatggctgaacccaggggaaatatttttgtctggcttaagtgctcacaatttgaaaaaatccatgtcaagtactgcagtacacatttaaatttatttagtgaagctgcattctccattgagccctaacatttaaaaaatagttgctcaactgggatttggtgcatatcaggaaggaaagaggaaaaagacataaaatagaaaccttacccagcagagacctgctccaacagataccaagcagtgtttacttggagataacagtacccatactctcctccagttagactcatggaatgatctcaaagtgtgttctgcaaccagcatctgcatctctgggaactttttacaaatgcagactctcagttcccatcctagacttactaaataagaagctctgggggtagagtacaacagtctgagttttaacaacccctctaggtgattctgtgcccactcaaatttgaggatcattggactaaggggattaaacagcctttcacatgttctagataataggaagatagcacaacccaagaatttgaaactgtagatctgatcccaatcatgtcactacctatttgcttggccctgaaaacatcaaactatctatgtttgcatttcctaaacaacacaaaagtgatgggtgctcgcaggtggagcaaggcttagtgttgtaagagaagagtgcactgatggtttgaaagtgagcatgcaaatgtgagccaggaaagctcagtgcccttcatagtcaacaatttttttttctttcaaagcaacagcagtagtggattcaggacccagagcacgtagtcgtttgtaacacatttggaacgactgtgagaaatgagaagcaacatgcagcaaattaataaggaaaagattattccatctggggagctggtctctgcacatgccaacacagcccattctctgtgaaatagcgttttataggtcacaaattaaatcagcatcctgaattaatcagctattaacatccagctgaggaaatctaggttcacacctctagaatgaccagactataaatacaaagggcttcctcagactttgtggcaaagcttttctatattgtaggaactggtttctggaaatgaggacctgaacatagctattcccatctctgtgtgtatgtgtatgtgtgtgtgcacactcctgcacattttacaaggcaaattgcattagaagatttttctatttctaggatggaggggagggtgtccaaatgtattacccatccattaggcaatacagaagcctgaattctaacaagcctaccttgggagccaggtatcttggtagttcaatcatcaggttggccaaccctttccggtatctgaacctccatgccctcaactgtcagaggaagagggtgaacttgggggatctcccaagaggatggtcttggaggtaaatttcagttttaatattacaatttcattcttcctacttcattatttgccataaaaagagattaaagaggtttctgaagcacttaaaggctgggaagcattctgagataattcactgtgcatctcctgcctccctccatagctggtgtccttatatcatggtacttgccacaagattaaaagcaggaggcaccttgggttagtgtggcggttggggaggatgtgaccaaaggaaggtttctacttcatatgcaactataaaaatattaccaactgtctgacaagcaggcagaaaataccttggggaaggtgcccatatattcctcaagatgcaaattttctaccagggtctaaccttactttcaaagccaggcaatgtatttacctttgttttatgtcactcattcttactgtattacatggtgcctggcaaggagagattccttgtgttttgccaagttgcagggtcaggaaactctgcatgaaactgctggattagcatcctgtagagtcactgttaacagagctctttgaatgaaatgggtttgcatctctgttctttggggctttataaattcaccaaggatgtacggttcccaatctgtttcaccaccacctcccgagtactctggatagttcctcctcctgagaggatggccttgagaacaaaagtatctcataacaaatcacagcaacaccacattcagcagcagatttcctcagagaaacagcagatatttcagaatggtaaagaggtcattctgagtggagctttggctagcttaggagacaaacctcactggcatgccagtgtttgaaactcctcatttcagcaatccaactttggtttattcctggccctgagtcctttgtgcctgaatctctgagaaatctatgtttttgttcaatccacctctgctcccacttcatgccctgctttccttcctgatgacctcagagctctgcttcctctgggatccaacatctcaccactcagggggcacataatatagtaaagagtggagtctgaatcccaactctgctacaagagctgtgtgactgtaggcaagtcacttaacttctctgtgcctcagttcctcacctgcaaaggacaggtaaaaatattcccacttacctcatgggattttgtgacaattaaatgaggtaatacatataaagcacttaggaaagttacagacccatgagaaagcctcagaaaatgtttacaaactcttggaagtcactctgctgactggtaataagctgggctcatctagtacacacttcagagactcttttctcatattcagactcctggaagagatcccatctcatctgtgccattagcatccagggtcactttgtcttttctggaagactcagagagataactcttgtttacccactagcaataatactgcttggcagttaaactgtggccactacatacactcaagcaaatggaagagatatactacaataaagggtgtttttctagactgtacattccaaatgaagcccattattcctaagtgtctatcccagctgaatggcaatgactgaagccagggtgaaatggatgaactcacatagtctgaaagaaacaaggggccacagtcacatttctaaaaatagacatggcacatcaggaaaatcctacctcaacttctgccccatgtccttgacatacatttaacccattgcacaattatagtgactagtacttactataagcaggcagtgttcaaggcatcttatgcagattttctcactgcacaacaatccataaactaggtggtagttttagtactcccattttagagatgaaaaaaactaaggcacagagaattcaattaagttggcaaaggctgcaacacttgtgagtagcagggcagcctggatctggagccactcttaaaccactgaaaaatttaaaagtgcaaagggcattgagaacatacagaaggaaaaaaaaaaaaaaggccgtggttgtggggaggggggtggaatagctagttacatgtccaagggatttggcttccttcaaaaagggagaccaccagtggtgcttagaatttttagctttcagaagagtcctggattgatcttttaaggttaacatgcaaacagtctttcattgcatggaggcctttccaaaagtggatacaaccctactctgtgctgaaaaacctgaatgtagggtttctagagcttcatgtcagctatttccaatacttggatatggggcagttgtcacccctttaacctcatggacaatctgatgagcttcctgtgaattgctgggattgggcagataggcagagtgttgtggaaccacttgcaagacccaggagtgcccaatcctccctaggtcaatactttacagttattttgtgtttgggattggtggagaagagaaaggataatgactcaggcctgctgggtctgcaatagccctggccaccagcgccagccttctctcccccattcttccatgtatggctgacatcacttgtaagtctttgctgcacctcagcctcacaagtcatgtcaaggtcatgctccactgccaactgaattgaattgaaccaaaagatgaactcagtttgctatcttggctttcccactttcttaagaacagatcccattggtgatggggtagatcaggtagtaaagtcaaggtgctgaggactgatgtgtcccttgagttcagcagaagttagatgcgaaagggtgaagaatgttctataatgagtataaagagttctatcgatgggtttcagacagacgatccatatgcaaagaatcatatgtaaatcaagtaaagggtaagattaccctagcaattggttgaacacaaggacaagtgtttggcaataggcaatactgttacatccctattttgtaccagatgccatgctaaatgctttccatgctatctaaaataatcatgagatagatgtaatttgagagacaagaaaactgacaacacagtagcctaaataacttgcccaaggtcatacagttaataaatgatatagtcagatttgaagccacatctatataatcccaaggtctcgaattttaaccaccagactggtggctctcaatcctgacctgtacatttgaatcacatagggaatttaaaaaatatatctatacccagacgaggtaaatcagaatctctgggggtggggcccaggcatctgtatttcttttttttttttttttttttttgagacggagtctcgctctgtcgcccaggccggactgcggactgcagtggcgcaatctcggctcactgcaagctccgcttcccgggttcacgccattctcctgcctcagcctcccgagtagctgggactacaggcgcccgccaccgcgcccggctaattttttgtatttttagtagagacggtgtttcaccttgttagccaggatggtctcgatctcctgacctcatgatccacccacctcggcctcccaaagtgctgggattacaggcgtgagccaccgcgcccggcatctgtatttcttaaagatctttccagtggttttgttgaccagccagggtagaactgctgctccagattcttcttcctctaggtaaacaggagtcagaggtatcagagatttctgcccatgggactcagagccctaacctggtcccaaacttgggtgtgggattctaatgactgggaattaacaagacaggacgctagttctataggaaattgaatacaagtaggaccctagccatagaaacaagaataatgattttagatagtaaaatcaacattcagagtcagaatggacccaccagaaagctcaatctaacactgagctcctgaacgaggctccttaaatttctttagattccctgtgattagaaacaggagaggcactaatggctgcaggagggctgagtctacagatgaggatctctcatctacagatgaggatcaactgacccagtggtgaggagaagagagctctatgggcttctcacaggcaggtcgtcacctgtcccgcctccaagcaacctgctctgagccaacaacatgtttccacacatttcacactgcttggctcattctgctggactccaaagggctttactaagttgaagcaaagagaaaaaaaaacaatccatgttgactgtttggagtgttttctctgttttcagaagtgactgttagattagtatttggttttatcttctgcatcttctaatatttttatctcctccccatccctacctcaaactgccaagcagtgattcctgcttgacagtaggaaaaaacatctccgagtctcgcagccccttcctggagggcttgttttagaagcagtgcaggacatgcccagcttagccaggccacggggctaatcgaatttggcagatgctctgcgtcagcaggcaccagggtgctaatgccctgggtcagctggtgagagggtaagtgggcaaatgcctggcttcttccccgtgttttcaggacaggaatctgagtcccagtaatcactagcctatgggaccagaggctattttgggccttcttttatccaatggaaagttaggggtggtgacatctgaaactgccaaggagcatccagtttcacccttatccaggacatgtccctagaggaaatggaagcaatgtcaaggagaccaaaacgcgggtgtcagaacttccctttgtttttatttctgtgccgtttgttttcatccattcctttcactttcagctcacctttccactactctggttcaggtcttcattgcatctcgcctgggctatcacagcagccttccaacccatctctctacccccaatctctctaccccaacccacttccaacatcctcccatgatagcagaatgatctctctgaaggttcaatgacaataatgaacatgaaaacacttcgtaatacgttacacaaatagcaacacctacctatacacaaatgtaccgatgtggcaggagagacagaaatgctgtctttaatcactgttgactatgcaggtgtaaaggccagtgcattgcaagggaatgaaatcgatagactaagaggaatgtttctgggaaataatggtctaagttggcacacacagtattggaaccctcaaacgagtcaaaaaggcattcaaggtggacttgcctgcttggcaattgtatgtcactgtgataaacctgatgagagatgtaagatgtagatctaattatgcctatttttcaggtaactgaggctgagagaggcagtaatttgcagaagatcactcagtgagcatatagcagaactagaatataaattcagaggacatatgcttttcaagtgtgccatattgatacagatacattaatgtggatggatggatggatggatggatagatgaatggatgaatagagcatatgatttccctccctttaatatatcaaagggctatccattgctgacagagtaacaaattggtgatattggcattatggccttataggatgtagctttattttcctactttaatgtccagacaacttccaacacacttgacagtgcactccaaccctacttctccctattccctaaatgtaccttacactctacctcctctgcatctttgtccattccctgtctccctctctgattataaaatccctacccaaccataacccataatagggctgccagaaaaaacatcaaaccaaatgaataattgtttaatataagtgtgtgcaaatactctatggaacatatttatagtaaaaaatgatttgtattaatttaaattcaaatttcactgggtgtcctgcaattttaattgtaaaatctagcaaacccacacatcaggcagttgccccatgtataccctctggttttcttctgccatctcaaggtgggatttagcacttcttcgaatttttcatacacaattcactctcactgaataatgagcaatgtgtattttatggaagacttcttaataaatgtgaaaatgaagtttacattccataattgacattttatttttaacagttcttattaaaaatggccttatggctgggcatggaggctcaggcctgtaatctcaacacgttggcaggctgaagcaaaatgattgcttgagacctgaagtttgagaacagcctgggcaacatagcgagaccctgtctctacaaaaaaattaaaaatatatatatatagctgggtgtggtggcatgtgcctgtagtcccagttactcaggaggctgaagcgagagggtcacttgagcccacgagtttgaggctgcagtgagctaagatcatgccattacactccagcctgggtgacagattgagatcccatctctaaaagtcattaagtgtccttttgaccatttccctacacagcatttagtgctgatcacctgctctcactctattatgcagagaagctttcacttttcaaacctaggcactagtccacggcttgtttgtataccatggtagacttatcaaagcaaattttcgattaggcaggtttctcttaacaaatgaattttctatgaatataaaaaatgtttctatatgttaaaggttcaattgcatgaagcctttagcattttcttgggtaaaataattgctcccttactaagctgcagttatttgtataaactcttctagagcagtggacattttcattcacctgtgtacccactgcagttcacctagccatgtaccggaaagcagtcaacaagtgtctattaaattgaatgaatgcagtgtaaggccacattataagtgtatttagccctaagtggctacaacattgtttgcagcagccaaggaagggatcccagcagtcagggaaagcaacttgatagtttaattgagtaattctccaccctagttgcacattaggcatctggggagttttaaaaaaattatgaattgtagaccccatcctgcatccctgcatcaggtaaatcagaatctctgggagtgaagctcaggcatcaatattattttcaaagctcccaggttattttaccaggcaggaaaggttaaaaatgatgaacagttgctggagatttggactagtattcttctctgggtctaatccatgacagaagagagagaccaagataatcagagggagaaatacggatttctttttgcttttccctgttgtagatgttttagagtttacactgttctttcacatgcatgcacatcttgccacatcccacccccaccacatagtctggccactgagccttgagctgtgtgttcactttgtgagtgtgaagaacaacatggctacagccattctatgtaaatatgcaatcttagttttggcttggttgagtattgcttccccaggttcccaactccacttttactgttttaggttctggtttcaccaagaattcagtagctgtggtacttcccgggtatgagagaataaagaacttgtaaagtggaattggccagctttccacacccctaccttcactgcacaccaacctgcactgacatccagaggagaaccaagggaattgtttcctcctggtttggacacattccacttgaagctcctccaggcattgtgaagcagaattcccttcagtatatgtgactgcaaagagatgaatttttgaactggagactttgaaaataaggatgagcatgtacagagtgaaaacatgggcctcgagtcagcagattgaaatccctgaccttgctctgtacgtctctagccacataagctaagcaggtctcccctcacttctttcagctttggtcttctcctctgcaaaaggagtttcttcacccatttgtattgttttaacagaattgctgagactgggtaatttataaagaatggaaatttatttctgactgttctggaggctgggaggtccaagatcatggcaccagcaggttcagctgtctggtgagggctgctctctgtttacaagatggcaccttgatgctgcatttttcagatgggaggacactgtgttctcacatcgaagaagggatgggagagtgaaaatgggccaaactctcatcaagcccttttatagtggcattaatctgtttacctaaacatctcccaaaaaggccccacctcccaacactgttgcacggggaattcttttcaacacatgaattttggagggaccatttagaccatagccaggacgatgcagaatttgaggatcttaaggttccctccagctctaaatacttcatagattctaagtcctgcagcagtacatgagaagtctattgagactccctaaaccattctcaagaaggtaaaggcccagagccctgcctacacatgtgctcagatgatgcactgaaatgagcactagaaaggagccagaaaacaagtccaagtcccacttctgccttgaactcactctgtgtttttgaaaaagtcatgttctttctctgagccttcattgtctcagctgtaagatgaatgttagaatagatcatctctactgttcatttcaactctgccattctagggatgttggatgtcctagtggctgagggttcatattacaataaatatgaaattgaaacataaaacagcactcaaaacatgaaggagaaattgggattaagaaatgagaaaataccttttgtctaagagagaggagtgaaccaaacacaaatgcaagcggacggaaggaagggagagggggagggaaggaggggaacaattcacaaataaaatttaaattctggatctattttatccaatcaaggaaaaatacctataattgcattttaacttaaatataaaaattatatcacatttcagaaaaaatgcttcaactcttcaaatgaacaagtatgttgtttgcaaaatcaacttttttttctgtaaaacctatgtggctttttcagaagagaactaactaggttaataagcccatattccgccaattcttactgacaaataatcaccatgtctcaaagtcttaggtcttattttttcctttttcccatttggtcttttcgcccatttgtcttttaaaaagctatttaaggaccttcaattttagatgcacactctttagcttggtacttgaggccccttgtgatctgacttcacctagggagggttgcaggcctcacctttccctgctctcctgcacatatcccagggtccacttttattgaaccatctattgcctgtttccaaactatacctcacccctctcatccctggttttttgtttgtcctttctcactcctgcttctgcacaaataaatcattcaagactcaaattccatttcttccttaaaactccctctgattttctaagctggaaacaatttcccacaggccctgttgtgaaatccccatccacattatttctatctctctagtggcacttagtgttttcagccctgcaataaggcttctagaatatgactttctggagagcaaggtttgtgtctgaggacagcacacagaacagtgtttatgaggccaggcctggctgtcagacagacctgggcttgacttttggctctgttgctggttgcagggtgacctaagcaggctacttgacctcttaacttcagtttactcctctataaaaggtgaatgctacctacttcataggcttagggtgagacccagggagataataaatgtaaaataactgttaactatagcacttattatatgttggaccctgaaagcacctgatatttgttttttttccactgttaaaataactttatcttgcattttacagaagtctatgaatgatttttaaaaagcacctccttaccccacatcatgtttctctgacagttgttaaagtaggcaatgagtaggtcaacagcttgagcatcagcatcttgcaaagatttcagactaaccaaccactcacgaaagaacttggcagcttttttatcttgtttttaatacaacggtatatcgactctgatggcaaacctgtccagccacatctccacaacacgctttgcaaaatcagtgattagcaaattagttagctttggcaaggaggttgatatttgttaaattcacaacttcacagaaactattaagtaagccacactttatacatgaagaacctgactcccaaagagcttaagggtcttgctcaaaattaatcattctgctagtaagtagctagtctggctccataatccatggtcttgtccactgggctatattgattctattctcttgattgttatttatttattcatttattgagatggagtctcactctgttgcccaggctggagtgcaatggtgcgatcttggctcattgcaacctctgcctcccggattcaagcgtttctcatgccttagcctcctgagtagctgggattgcaagtgtgtgccaccatgcccacttaatttttgcattttcagtagcgatggggtttcaccatgttggtcaagctggtcttgaactcccgacctccagtgatacaccccactcggcctctcaaagtgctgggattacaggcatgagccactgtacgcagcctgattgttatttatttttatctgtgagtaattcacatttattttcttatagaatctagcacaccattggcatgaagtagatgctcaagaaataattatttgaagtgactcgaagaaactcacctggttagatgaatttgtgctgttgtaagattagccacttgaatgacatgtttgtagggagccaacaaacaactggtgagcctggggggctcttctggtttccctccttgggctcatctctacagcttccttaagtgagcctaagatacattgctctagccctggaaagaaaagatttcattttaaaaattgttctttttccaaggaaatgtcaacaatactaaacacacccacatatttcagagaacgaataatgacagaaaaaagattactattttgctgtgtgaccttaggccagtcattttgtgtccgttagacgtagtctcctcgtctgtacaatggcagggctgaacataatgatctttaagcttcagccttttgtgattccaggttgttatatgtttttttcttcttttgatatctcaacatatgtcttaaggcacacaggatgcagaaatgtagaaatttgatttatataggctatatttgcacaatgcaaagaacaaaacagaaatagaagcatttttgctcatagagttattatttccacaactactcataaatttgcacagtattagtagtaacagcacctcctgtaaatttaaaatacttttgcatttatacaggcttttagagatttttcaaagcctttcactccattgttaagaggtctccagactgttgaaaaacatcccaacaaaaacatgaaagacagatgcatagaaagcttgaatgttatctgtacatctagcgtttattaaacatccattatttctaagttctgtaaagaaacttgaaagacacaccctagactcaaaactcctgccacttaaaaagtaagacatgcaaacatatgcagctacaaattaagagtatgaaaatactgtgcaaacaatggccttcccgaaaccgcttttgcaaaatgataactaaggaaattatgacagtgaaagatatcagacataaccaactccatcttgcttccaacctctaaactgtccttgtccattcctgggcgtaggctgaactaaccttgggaaggaatttagtttatagtttaaataatagcccttccccaaaactaaactgttcttataaaatgaaggaaaggccaccagccaccaagttagaatgagaggggctggaattctagatattaccagccattattccggaggtcataagatttgcaacttccccagttactcttaaaggtaacatcagccttttgagatgtcttttcaggtttctgtatttctaccaactggacggccccacctggacctgccaaccagttctgtggtctccacccaggaactgactcagcataagagaagagctttgactccctgttatttcatccctgagccaaccaatcagcactcctgattcactggccccctacccaccaaattatccttgaaaactctgatccccgagtttttggggagactgatttgagtaataataaaactccagtctcctgcacagctggctctggctgaattactctttctctattgcaattcccctgtcttaataaatcagctctgtctaagcagtgggcaaggtgaatccattgggtggttacaaatttcgaggctcatccaggattgcccttgtggctacctgcccgtggttcagtagccccctccagcaatggatccaggggccagcccaagcagccacctagttcacttggactgggagttgactctggtactctctctactgacagggcactcccgacccaatgggcatggatttaatagagaaacagtcctggggagacgtcccataactgtagccctatcacagggtgtctgtctatagccccattgtagggtgtctgggttggtgagtatcctaggtgctgccaatgtctccttccttttcgcaactagttctgtagctccattgtgaggtgtctgtagctacaacatggggtgtctgtcttggtttggctcctggggggtctcggttggctctgcctaactagtaaaaagagtcttggttcgggagacttctcctcaatcaagaagatttcagggagatttctcaaacagagaataggaggatagtttggaagagatactctggaattcttggttaggaatcttgatttggaaagccttctgtctgtcttgtctatatgtgtgtatttgtatatgtggaggagatctctgaaggaattgctgatggaagtctagcaggcctaactcagagaactctccttatctatctggtcacattcagtgagtcctgaaagaagtttaacagccctggatcgggtttgtgactgctcttcatcttgcccagagatcacccattgaattcccagatggaggtcaccattccccactttgtgtagatcaaagacaacagggaccaacgggaaaaagttcgagtcttgccaggtcgatgttgggtgctgaacaaggtgaccaatgtctgtagcgttatgtgtattttgcttccactggaatggaaaatgttaatttggttccccatgtagcccatcaggcagcatcttgcaacattgagaagcttttgcctatggttccataaaacagaaaaggatcattttcttttgtaatggggcttggtcccctcacgtctatggcacggtgaacagggccatcaaatgctgctccattcttctagaagctgcagagaaaggggacccagaaacctgatatgctggcacaaagggcaagaattcttaccagaaaagtgtctggcctctctctctctctttctctctgtctctctgcattgtgtgtctgtgtgagtgtgtgtgtgtgtgtgttggaggggggcagtggtaagcaataaatgtcactgtgtgtctctgcaaaggtttgatgaatagtaaaaaaggatttgtgagactagtcttaggctgtggcaaatctggtgcactttgtactaagaatttgtccttccgtaatggagagaagggtgtcacaggatagaacatgagtttaggacccctgtaatcctgcttttcaagccaacccggcaggctggtcagttataaactttgttgtgggtccctgaaaccaataccagatgaaatttctgtcttgttttgtgtctttaagagcttaactttgtgaccatgtagaggtacttcatcctggtctccaccatccagaggacaggaatttgggggttcatatcacagccctaagaattatcttgagcacttaaaagcctttgcaagcttcagatcagctgctgtagacttcttcgggggagagcagtagaaactgctcaatgctgtgtagctcagtagctaaggtttttatctcttgacaatggtggcccaggttcaattcttggcttacagaatgattcctttctggtttgttatttgtggaactttgccatttattgaggttttttttttttcaccccatagatagcttctgatttcctgtcttgaattttcctttcactgtactacctttggggatattctaaatcttgtttttaaaaaaaaaaagctgcttaccatctctttaaaacaccttttgtatccatggttaagttataaccttaattaaaacttactaatttcatgtgggcggttacctggggtagaattcaaaggccagaaatattggctgtcctgactagagtctggtaataagagatttaaaagagattttctttaaacaaaagagctctatggttaaaatttgcttaattaaacatgaatatccaagctatatatatttaaaagaactttatcttttttctctttgctctgcattaagtactctttctctattgcaattcccctgtcttgataaattggctgttacatttccaaagcattctgggaacaaggctataggacaaaaagtcattctagaatttttctgccttaataagaattgagagaggaaaaagaaagaaaccggtcaggcaggcagttaggatgggccctggattgaatttttagaaacaaaagaacagcctgcaggcacagataagggaacttacactgggggacttgcctaagacatgcccacagctgcacagataagaaaggctacacaggtgacttgcccagacatgccagcagtggaaaatttcatcccctgacacatgcataataagggcaacaaagcaatatgggtaactcaagctaagggcccacatgcaccttaggaggatggggtggagctaccagaaaaacatgccttatgcaaacaaaatgcccagccctcatcagtttcctataaaagcctttgcattcaactgtgaaaaacagcaatcctcttccaggtcccctttctgcaacagagagctttcttcattcacttattaaactttcactccgacctcaccctttgggtccatactccttaattctcttggtcttgggtgatacctcacaaggagagactgctacattgtggtgcattggtgagactgtaacagactcctttccaagtgtttggtgtctgagttttcagaaggtttgacatgcatttcttcatttaatgcttagaacagaccaccaccaataataacaactccacatcttatttttcagatggggaaactatgattcagaatgataacaattaatacaaagctgaagcaagattcaaatccaagtcttctgacttgaaatcctactttcttgccactttttaaactatttatctgatgttggcaattcatggcaatcagaggatggatgaagggctctggaggttttggttacagtcagggagcattagaaagaacaagtgtgcttagatgaggcgggaaagcccaggtacatgaaggaaaagaataatttgcctaagttgcctagtttaaaatcatttttaattggaaaggtatttttatcttcatttacagatgtggaaactaagattcagaatgattattcaaaaatcacatagctagtggcaacctcaaggattgaaaccaggtgtgtctatctctaaatatagtgataaaaagcatgcattttgggttgaactctgctctccacatagatcttggtccagcccgccccctaaccctggtgtcctcatgtgaaatgaggctaataattgccaggcctctgagcccaagccaagccatcacatcccctgtgacttgcacatatacgcccagatggcctgaagtaactgaagaatcacaaaagaagtgaatatgccctgccccaccttaactgatgacattccaccacaaaagaagtgtaaatggccagtccttgccttaagtgatgacattaccttgtgaaagtccttttcctggctcatcctggctcaaaaagcacccccactgagcaccttgcgacccccactcctgcctgccagagaacaacccccctttgactgtaattttcccttacctacccaaatcctataaattgccccacccctatctccctttgctgactctcttttcagactcagcccacctgcacccaggtgattaaaagctttattgctcacacaaagcctgtttggtggtctcttcacacggacacacatgaaatttggtgccgtgactcggatcgggggtcctcccttgggagatcaatcccctgtcctcctgttctttgctccgtgagaaagatccacctacgacctcaggtcctcagaccgaccagcccaacgaacatctcaccaattttaaatcaggtaagcggcctcttcttactctcttctccaacctctctcactgtccctcaaccactttctcctttccactcttcaatctctcccttctcttaatttcaattcctttcattttctgggagagacaaaggagacacgttttatctgtggatccaaaactccagcaccggtcacggactgggaaggcagccttcccttggtgtttaatcattgcagggacgcctgattattcacccacgtttcaaaggtgtcagaccatgcagggatgcctgccttggtccttcacccttagcggcaggtcccgcttttctgggaaaggggcaagtaccccaaccccttctctccttgtctctaccccttctctgcttttctgggggaggggcaagtacccctcaaccccttctccttcacccttagcggcaagtcccgcttttctgggggaggggcaagtacccttcaaccccttctccttcactcttagtggcaagtcccacttttctagaggaggggcaagtaccccaacctcgtatctctgcaccccaatcccttatttctgtgccccgaccccttatttctgtgcccctaccccttatttccacgcctcatcccttatttccatgccccatcccttatttctgtgccccatcccttatttccgtgccccaaccccttatctctgtgccccaacccctttttccacttttctggaaggtaagaacccccaaacctcttccctctgtttctctactctcttctctaggcttgcttccttcactataggcaaccttccaccctccattcctccttctactcccttggcctgtgttctcaaaaacttaaaacctcttcaactcacacctgacataaaacctaaatgccttattttcttctgcaatgccgcctgaccccaatacaaactcaacagcagttccaaatagccagaaaatggcactttgactttttccatcctacaagatctaaataattcttgtcataaaataggcaaatggtctgaggtgcctgacatccaggcattcttttacacatcagtcccttcccagtctctgtgcccagtgcaactcgtcccaaatcttccctctttccctcccgcctgtcccctcagtcccaacaccaagcgtcgctgagtctttctaatcttccttttctacagacccatctgacctctcccttcctccccaggctgctcctcgccaggccgagctaggtcccaattcttcctcagcctctgctcctccaccctataatctttttatcacctcctctcctcacacctggtccagcttacagtttcgttccgtgagtagccttccccctcctgcccggcaatttactcttaaaaaggtggctggagctaaaggcatagtcaaggttaatgctcctttttctttatcccaaatcagatagcgtttaggctctttttcatcaaatataataatccagctcagttcatgacttgtttggcagcaaccctgagacactttacagccctagaccctaaaagctcaaaaggccgtcttattctcaaaataatgtcaatctgctcctgacattaaataaaactccaaaaattaaattccggccctcaaaccccacaacaggatttaattaacctcaccttcaaggtgtacaataatagaaaaaagttgcaattccttgcctccactgtgagacaaaccccagccacatctccagcacacaagaacttccaaatgcctgaaactcagcggccaggcgttcctccagaacctcctcccccaggagcttgccacaagtgccagaaatctgaccaccaggccaaggaatgcctgcagcccaggattcctcctaagccgtgtcccatctgtgtgggaccccactgaaaatcggactgttcaactcacctggcagccactcccagaggccctggaactctggcccaaggctctctgactgactccttcccagatcttctcggcttcgcagctgaagactgacactgcccgatggcctcggaagccccctagaccatcacagacgcagagcttcgggtaactctcacagtggaaggcaagcctgtccccttcttaatcaatacggaggctacccactccacattaccttcttttcaagggcctgtttcccttgcctccataactgttgtgggtattgacggccaggcctctaaacctcttaaaactccccaactctggtgccaacttagaaaatactcttttaagcactcctttttagttatccccacctgcccagttcccttattaggctgagacactttaactaaattatctgcttccctgactatccctggactacagctatatctcattgccacccttcttcccaatccaaagcctcctttgcgtcctcctcttgtatccccccaccttaacccacaagtataagatacctctactccctccttggcgaccgatcatgcaccccttaccatctcattaaaacctaatcacccttaccccactcaacgccaatatcccatccggcagcacgctttaaaaagattaaagcctgttatcactcgcctgctatagcatggccttttaaagcctataaactctccttacaattcccccattttacctgtcctaaaaccagacaagccttacaagttagttcaggatctgtgccttatcaaccaaattgttttgcctatccaccctgtgatgccaaacccatatactctcctatcctcaatacctgtctctacaacccattattctgtcctagatctcaaacatgctttctttactattcctttgcacccttaatcccagcctctcttcactttcacttggactgaccctgacacccatcaagctcagcaaattacctaggctgtactgctgcaaagcttcacagacagcccccattacttcaatcaagcccaaatttcttcctcatctgttacctatctcggcataattctcataaaaacacacgtgctctccctgccaatcgtgtccgactgatctctcaaacccaagcaccttctacaaaacaacaactcctttccttcctaggcatggctagcatggtcagaattcttacacaagagccaggaccacaccctgtagcctttctgtccaaacaacttgaccttactgttttagcctagccctcatgtctgcgtgcagcggctgccgctgctttaatacttttagaggccctcaaaatcacaagctatgctcaactcactctctacagttctcataacttccaaaatctattttcttccccatacctgacgcatatactttctgctccccggctccttcagctgtactcactctttgttgagtctcccacaattaccgttgttcccggcccagacttcaatccggcctcccacattattcctgataccacacctgacccccatgactatctctctgatccacctgacattcaccccatttccccaaatttccttctttcctgttcctcaccctgatcacgcttgatttattgacggcagttccaccaggcctaatcgccacacaccagcaaaggcaggttatactatagtacaagccactagcccgcctcttagaacctctcatttcctttccatcgtggaaatctatcctcgaggaaataacttctcagtgttccatctgctattctactactcctcagggattattcaggccccctcccttccctacacatcaagctccaggatttgccccacccaggactggcaaattagctttactcaacatggcctgagtcagataactaaaatacctcttagtctaggtagattctttcactggataggtagaggcctttcctacagggtctgagaaggccactgaggtcatttcttccgttctgtcagacataattcctcagtttagccttcccacctctatacagtctgataacagacgagcctttattagtcaaatcagccaagcagtttttcaggctcttagtattcagtgaaacctttatatcccttacggtcctccgtcttcaagaaaagtagaatggactaaaggtcttttaaaaacacacctcaccaagctcagccaccaacttaaaaaggactagacaatacttttaccactttcccttctcagaattcaggcctgtcctcggaatgctacagggtacagcccatttaagctcctgtatagatgctcctttttattaggccccggtctcattccagacaccagaccaacttagactgtgccccaaaaatcttgtcatccctactatcttctgtctagtcatactcctattcaccgttctcaactactcataccctgctcttgtttacactgccagtttacactgtttttccaagccatcacagctgatatctcctggtgctatccccaaactgccactgttaactcttgaagtaaataaataatctttgctggcaggactatgctgtatctccttaggcactctctaatcagatatcctgagtcgtcccaattcttagaccttttatacctgtttttctccttctgttattccatttagtttctcaattcatccaaaaccgtatctaggccatcaccaatcattctatacaacaaatgtttcttctaacatccccacaatatcaccccttaccacaagacctcccttcagcttaatctctcccactctaggttcccacgctgcccctaatcctgcttgaagtagccctgagaaacatcacccattctctctccaaaccaccccccaaaaatttttgccgccccaacacttcaatactattttgttttatttttcttattaatagaagaaggcaggaatgtcaggcctctgagcccaagcccagccatcacatcccctgtgacttgcacatatacgcccagatggcctgaagtaactgaagaatcacaaaagaagtgaatatgccctgccccaccttaactgatgacattccaccacaaaagaagtgtaaatggccggtccttgccttaagtgatgacattaccttgtgaaagtccttttcctggctcatcctggctcaaaaagcacccccactgagcacattgcgagccccactcctgcccgccagagaacaacccccctttgactgtaattttcccttacctacccaaatcctataaatggccccacccctatctccctttgctgactctcttttcggactcagcccacctgcacccaggtgattaaaagctttattgctcacacaaagcctgtttggtggtctcttcacagggacgcacatgaaaataataataatcaatgataagatcttcttgtatgtaataggtgagataattcctgtgatgcactcaatacagtatctgttacatacgaaatgtctagtaaacattagctactaggattctttgttagggttgagtgcagtggctcatgcttgtaatcccagcactttgggaagctgatgtggggggatcacttgaggctaacagttcgagaccagcctggccaacatggcaaaaccccgtttctattaaaaatacagaaattagctggtgtggtcgtgtgcgcctgtaatcccagatgctcaggaggctgaggcataagaatcacttgaacccaggaagcagaggttgcagtgagctgagatcacactactgcactccagcctgggtgacagagtgagaccctgtcacagaaaaaagaaaagaaaagaaaagaaagaaaacattatggttaactttcattgcttatcttgagtattgcccctctactcagtgcctttccagaaaggtacaagtaaatgtgagaaaatgggaaaaaaaaaaatggtcaagtagaatggatgtgtatgtggctgtcagctcactgtaacctctctggtctatctttgatccttagacacagacttggtgaatggaacacagttgattgaatcagagatgaacactgacctaaacagaaacaatcaggttcttcctcttgggaattttaaattgggactagaaaagtcttgcatatttctggaactattatatgtaaacctgaaaagaatgggatggtcatatgccaccttgtgaactgggagtcaaaggtagacagtctgcataaagatacagaggaaggcaggaacaagaggaagttcactgcctcaatcccttcttcccaagacctagccataatcctttccttgggttccacttccatttcctccttgtggcttaagctggctcaaggagtcccacctattgcagtggtgtctgtagccttataaccgtgctactcagcttacatcaagcaagaatccaaatttcaaaatctttgagttacaggcttgtttctttaggaaagaagacaatgaagctgcatacccaagcacttagaggaacacttaagccaatctgtgtctgggttgaggctgtatgataaaactatttcaggtgatttgggctttaaggacacaaaattatataaaatactgccacctaagatttcaggggttccggccaggtatggtggcccctgtctgtaatctcagcactttctgaggccaaggcaggtggatcgcttgagcccagagttcaagaccagcctgggcaacatggcaaaaccccacctctacaaaatatacacaaaatgagccacacatggtggcatgtgtctgtagtgccagctactcaggaagctaaggtgggaggatcacttgggcccaggagattgaggctgcagtgagccaagagtgtgccacttcactctggagtaggtgagagagtgagaccttgtcaaaacaaaaaaaaaaacaaacaaaacaaaaaaacagaaaacaaaaaaacagatttcaggggttccaatttgactgcgagccaccaagacatatccatcacttagacccagtcatgcccaatacaggcaagatagcaagggttgcacaggggagtaaagagccacctgggagaaaactcagcctaagggaagagggtactaggcagatagtcttggtgcaaaaataaagccttagtcatcaaagggaaggagcaaaccctagctcagtattatatctctcagcccagttccccacggcatctcctctgaatcctgtggagcaatgcaaaggtatgtatggaggcagagggatgttgtgacaaaaaccaaccaagctaagctccctaagacatggcactaccagcagtttggtagccatgtgaaacacagaccatgagaaagaaacattcattctacccaccagtgcatgcaaccccaaatgaccttaaacacctcttggcggcggtgtccagtgggagatggtggtacccagcaaaaatagttcacagggagctttgacagaacaaggtagaagccatgtagaaacccagaggacacagtgtctgatacacatgcagtaacccctgtgggctcttggaaataattgggaaagggaagactttaaaaaaaataccagaagtactgcaagatcaattaagggtagtgggaggtgggagcagttaagcacaggtgagaaatggcaataactcatgagacataaatatacacttgggtaaccacaaagattgggaccagacgacctgaaagaatttaatgaggctgaaaattcaggccagtgatgtgaagtacagatggctgctgaattgccgaactgagagtcatcgaacctcttttcccttaatgcaaatggtgacctcagtgatacacaaagaagtttctcctaccctatttgaataccactgtacacattctcattagagactcagggagcagagaggatgccagccagcatcagagaaaaacaagactcctcttgaattttcttggtatcaagaatgatgactggtataacattaactctttgatatctgacagggcatcaggtgccctggatatgcagaagcgtgagggcatcctgttaatcaaagggaagcagattctgggggaggccactgtagcaaagtgggattttgtggtcacatgacttggagtcaaagagaccaaacctcaaattttggttgtaccatttaccaacactttaagcagcttaattcacttctctggtctccaatttatctttctgcaaaactggatgttttgcgtgatatgtaaaggaaatagttacctgaagcgccttttacttttcctgttattaactgtgttaggttgtaagtcttgtaactctattgttattttccttcccgttccttctttcaaaactcaaatgcccagggaacaagacaggtaacctaagggagcatggggtcaggtggggactggggcacacaggactgcacctgccccacctgaagaggcttccctagatccagcctactcttgcccatagaaatgctagcccaggattatcaggtgtgatttttcaagggaagccagaaatctggagtttcatgtgaagtctcccattttaaatgttgcacctgattcaaatttttaacaaacacattaaaaggcaaatccataacaggcttcaatcagtccatgacagctggcttgcatcttctggctccattttgaggaaggagataaccatgagatccctgcctcaacctctcatcagaaaccagctcaaactttccaaggcattgctgcctccccgcaagaagactcccagagaaggtcatattgaaggagaaaggaagacatgactcagggatggtttctatggctctctaacagggctccttattatccacattggaccaagggctctaaggttccacctgcagctcccagaagtcccaggggatgacacctcctcagctcccatcttcccacactaggactcagatgctatgaggctgacatcccctcatgcatgagatttcatgttctaggatgtgttctaacctcctgattctcctttgggtggccccactgctccaggaagaactgggcaatagagataccctttctgcaaagccaagggattgtatttacaaagcttgtaggaggattgattgattttgacatcatctctcaggctgctgaagctcaaatgaaaaacaaattatcttgagaatcaggtaaaggaggaaatgtcactgagagggacagccacaaacaaatgcagatggaggtccctcgagagaaacactggcggtagaggaagtcaacacattacaagaaggtcatggcctcggtggattaaaaggctatcaaattcacaaagaacatgatgatagttaaactctagtccagcagagagggagtgctcttccaagggttttttcttcaaaaatcagacaattttaaaatcttctatggctagcattgcaagcagagtgaaaggagaaaactcacatgtgttaaacacctactgtattctatgtgtgatgatttatatatattctttagcgagacatggcacaagttacttaatcacactgaaactcaatttgcagctataaaataagaatctatggtacttaccttgtaggctaattttagaaaataagaccaagtatgggaaaacccttggtactgtgcctgcaaatattaagtattcagtagaccattgctgtcattatcttcttatcttaataattcctcacaacagcccaggaatattatgtgtatttcatgatgaaaagttaaatgcagagaactcgcttgtccaaattgtttgcccaaattcatccagctgttaactcaagtagactggattcaaatctggatttgctcttgtttttcttttttatatatatttttgacaatttttttttctggtttagtgatactagcaagcctgcattctaaaatattctaaccagagttatttttcttttcaagcaaaattaaatgaggcaatgtttaatatctgactaaaccctcccaacactcatggttcatcatcaatgccttcttctcctccatccccaacagtttcacccacctgatgtccagggccagaccctgtactgccagtgtcccctctgccatggatcttggttttggggtgtccattccaggccagctcactgtcatttaatgcagggtaacttcttggctgggtgtgcatctctgctgagttcctacttctcactctcttgctactgtcactccattcctcaactgtgtcccctattgcccattttgttggctcctccatcctgacatctgatttggcatctctgtcttgaccttccaacatggcatcaaattagttcttctgtcccttcccactcctaggacctaccagtctgccctgctcatacttgatctggatgagactgataccctgcgagacgcaacagaatcagctcctgggattgtgttagcagaatgacgggagtgtgagatccaccacatggcgaggcaccccaggaacctgttttcttcttgaagagcaaccgagaactatttccaagttatccttcactttgaggtctaaaccatacatttgtcaattttaatactagagtctagcatttatttaataatagcctactttgtgaaagaaaggcagataaaatgaaaaacaaatctcagtatttagactgacaacctgatttcagaaatactaagcagtggttttgtgtgtgcgtgtgtgtgtgtgtgtgtgtgtgtgtgtgtgtgtgttttaagggagcagtgttggcaatgtatgtgttaggataaagaaagtgtattgttactacagtttgatgaaatttacgttttactcagggtcaatcttaaagcaaaggtttatttatgagtgaatgaaagcaaagtctctgtctattactcattaacagaatggcaggttaggtcctgcaagaattgcagaggacgcagacctgagtaagccacagtgacgccttcctggactcactgtccataggagaagataaacttgcatatggaaagtgtcatcataatgtgttaagaaggggcctgagcccttaaccctgcctgaagtctcagggatgctttcttcaaggcactaccacttgaagtagctattgaaggataataaatatgatgacatttactgaagacttattaagtggtaggcactgccataagtgctttccaccattaccatttgatcctaacaactgtttaatgagatgagaattatcactatgcctatttccagatgaggaaactgaggcacagagagcttaagtaacatgcccaaagtcactcagctaggaagtagcagaggcaggacacaaacataggaagtctgaggatttgaaattgatcagaaagggaaaggagtgaatacaacatgagcaaagacacaaaagagtaaagcaacactggtgtgaggggaactgtgagagttacacagtagacactgtggccatgcccgcatcccttagctgtgttccagaaaactctttttgcactcttgacctgaaggcttttccttaaaccaaggcaggctgttcagcctttgcatggcaggctagatgtgctggtaattagcacattagcacattacggtgtgctgatgggatttcatgtataaacacccgagcacccttgatctaaaggcagataactctgaagcatgggttttaacgctgtttctcagcattgccctttgggattaagcccggtgacagctggcttgataacataccttatatcagccacctcccttcctgatctttcctgcactttccaaatataaacctcttaaacttgaacccttgtccctgggtcagcttttggaggaacacaagctaacacaaatgtattataccgttccaaaaatataaagtaggaaactgaagaggcatagcaaagtcaatatagcccaaagtctgtcatcaatccacagacagatacttgttacctgcccaggacagtgtatgtttaggaatgcagagtatgtataacaatatgtatgatatcacttcaggaagtctttaggagattatctgtgtcccatctccattttacatgatctacctgagacctcgaggtggacatggtttgtccagggtctcttagctagttagttgtaaagcccagattattgtttcctatacactaataatgagagtcctattcaccaaggctaattagagagacttttagaataatctttgcaccaactccaccaactttatcaaatgcatgaagactacgatcttgagaaatgcattttcaggctctttctctaaaaccagcatatgctaaccaacccaccagagttggccggggctcgcagtgcagagaaacagataactatgctcctgtttgcaaataaacttctgtattgattcactagccacttggtcaacctagtcagttcacttctagaaagtgatgatagaaaaagaacacagagacgtacaagtacgtgcacaatacagcactgtgtgaaagagcaaaacaatagaaaccacctgagtacccatcagtggagcagtacccaatgtcacaaataaaataaggacactctaggaagtgtccttattatttcacatagtatagtgtccacactatactatgtgaaaaaaaaagcaagctgtaactgcatatatatagtacaatcccctttttgcttaaaaaagaaaagcttatgtgtagagagatttttgctttataagcacaagaacattctggaaagagacttagaaaacggtcaacagtttgtagtggtataatttttggaatattaacttgtgtttgtcctcccagtgtttcttcccctcctcccttgtaagcagatggtcagggctttttgtggcctcctgccacaagggagatgtttgtcatagggccagaagccaaagttgtctgcaagacacttccgattctggtactgaattttgtaaaacctaaacccattgaggagattatgcttggtgtcctggaggaactggagagagaagggaaggtgtttggagtgtgaatggaatcctagtctgaattctggagcactctgatgaggaggaagaccctagggaggctgggctagggagctgggaattccaaagcctcaccaaagattctcctgatttgaaaagcggcagcagagaagccagaaccggaagacaccttgtagtctgagaccatggacacctcagcagttaatattgtagagtaagttcaatggctgaagagatcttattagggtttggtgctacacaaaaccctgagacccttgtccatccctgagggtgacaataatatctgagaccaaattcctaattacctaatatgataaagagagttgctataggcttagaattaattttatgtaaaaagtaaagtggtattttttttttgcatgtctgagtttgtggaataagattcatatttactacaagtaatggaattggagattcagaggggagaaagtcacttatcacattagtgtaattttctgatggtaggattatggagagttttaggttttccctttttttccccaacttctctcccctcagtattttaaaaataacattgtgtgggttgtttttttttgtttttgattgttttttgtttttcaaacaggtctcactcctatccatgtaggctagagtgcagtagtgcaatcttggctcactgcagcctcgacttcctgagctcaggtgatcttcccacctcagtctcctgagtagctgggactccaggtgtgtgccaccatgcctggctaaatttttgtatttttattagatacagggtctcaccatgttgcccagactggtcttgaactcctgggcctgcccacctcagcctcccaaagtgctagaattacaggcatgtgccaccatatccagcctaataacattgtttttaatgttcattaagtcatcccaccctctcagtcttgcagaagcctctcaagagggacagaatcagttgcaaagtaccatttctgaccctgagacatggatattatttgttcatttaaatgtcacctgaaaaacccactcactcaaatggtctgtgaagcttgcaaaaacaggaatgcttaccctcctgggtcctgaatttttggttctcttggactctttgaaattcttctttctcagaaaggagccctctttctatttcccctcaaagttgtgacttgaccctcacatccctttcttctccagggccccttgataagattcttttaaaatttctttggagggcatcccttttaggaagagcaaatgccttttaggatagatatgaaagacagaggatatggtgatagctggggacagctgcacagtctgaagtggactctgttgtagagtactacagaaaagatgactcagtgtttaaaaaatgcaataattctaagccccctgcgtggaaaaaaaagaagaggctcttttctacacatcagttcttgggtcctaccaatccatccagtcttagtactcactgctctctaacacagtctccagactcagactctcaggctctctccctccattctccccctcaaaagcacagacccccatctcctggtctttgtacaagctgcttccccttcctgatggaccacctgcattgcacttctcatagcctagtcctatttatctctccatgattctacttcctcctggctatagtcactttctctgaatccagatgttacatatacacatgtgtactagtcgagagggagaggagagagagaggagattttagggaattggcttattcagttgtgggggccagccagtccaaaatctgtagggcaagctggtggtctgaaaattcagatgagttgatgtttcagtcagtgttgagtccacaatctgcaggtcaggccaggctggaaattctagtagggtttctatgctgcagttttgaggccaatttcttttttcttcaggaaaccttagtctttgctcctaaggccttcaattgattggagtagacccacccataatatattaagtaatcggctgtactcaaaatttactgacttaaatcagtaacagagaacagaatgacctcataagcttaggcagagatacattgattgaaagtctttatatctgcacagttcctgtgactgtgaacttaaccatccagggacagaaaatgtggatttctcattcttgctgctacagcctctaggattcttgatgtagaaatggcgttttcattggggatgagttcaacaaggggacaggaagcaactctctgctaagccccgagtcatcaactgtcataaagtgcccataggagcagactgttaaaagttgtgatcgaaatgaaattcatgatttttctctggatttctttaagccatgctaaacataacggcttaaatggttggtcaaatagttgatgaaatgctaattgggtcatcctctctcctctctgaacccctgccttgagaaacagacagcagacagacaccacactcacacacgtgcacacacacacacacacacacacacacacgcacacacacacactctgatatgaatgaatctttgccccaattaactgaaggctgaccaattaacttaaactcaagtctgacatattaatcttagaatatatcttcatgaaagctcctgaggatctgagtcagagaaaagaaggatgccaaaaggggaagcaaaagggacaaacgtgtctgtctcacagctttgcctctgccagcctctagagttaaccacaataaatagcacttaaaaaagggtccccactgcagttgacagtgaccataagacatagccctgcttatagatagaatatatctggtatggtagggttgaaacatctcttggctgttgtttttttccctgaaacctgtcatctccgagagggatggtatatgtaatattttaatatttaatataaaacacacacaagtagtatttcatctgcctgtatcatgttcctagaagtatatttagaattttaagctgttccaactattatacattttgccaaattttagtcattgagggagttgtgtttaaacatctgttgactgcagatgttaagcagtgtgaaacattcttttaagatgccaaaatgcaattaaaatcataatatttttcctagtaacaaatcatgctaatcagtgaaaatttagaaagataaaactcaatgaacaatgaatggtaataattctctaaataatcagctgtggctcatggcaggggagaactaacttttaactaaattatgttaaatcaatgccaattttctcagctcctgaaaagtgttctctttttttcttcaagccaggcaatggtcaggtggagtaaaacataaggaagaacatctttttggttcaaagcatgaaaaaaattgggtaacacaccttccttacatctagctgggccattgaaccagaatatgccaatgtttaaaacactgaaatgccagcttttctcttaaaggacagcatggaggtgtctgatttctgcttgggctgaggattcaggagaagatgtgtggaacacagcctggacatgccccaacctggttgatgaattccaccccaagtagtggaagaaacacacctacaacatgagcagagaagatttttcttctgtactttccaggacttgaagctgctttgttttttggtcgctgggtggggaaggaggaacaatagtatagcttccagaagagagaagagagatatctcttgagtgtgaattaagcagtaccaagaggcctcaagctagctctctctcctgctttaaattctactgttaagagtttttctttaagtttaaaaccttgaaagctccatgatgctcctgagtagaacaataaagccattagtagtcaatggccgtctttaatatttttcttccatttcaattttagttctaattttatctgactcctaaaaatatgtttcatattctcatgagggctgggcccatatgtgtaaatggttgaaacatcttactttgttgactgaactagtctaaatagtcagtcaaattttttttttaggcaaaagtgaatttcatcaaattggttggcccacaatttcttaaattcatcattgattgattatctgtgatgtgccaatccctgtgcaagttcctagggcaacagaagtaaaaatccataatctctgtttccaggactctatcagtttgatagggacacaggcacataagcagacaatcataatgcagtggtagtagggatatgccactctcatccaggcagtgtattgatgaccatgtccttgagttcccaagtacattgaaaaaggtgtaataaggagatgctaaattagcaggtagtacttatatgaagttctactgtgtctactcctgtgccaggtgtttcggttgggaatgagtattgggtaagaggagaatagaagatggaaaggcagaaaacaccaactcagctgatatggttgggatgtttgtctcctctaaacctcacattgaaatgtaatccccagtgttagaggtggggcctagtgaaaggtattggatgaggggagtggatccttcatgaatggcttagtgtcatccccttggtgatgagtgagttctcgttctgttagtttacacaagatctggttacttaaaagggtgtggaacctccccctcctctctcttactccctctcaccatgtgacatgttggctccccttccccctcatcatgactgtaagcttcctgaagccctttccagaagcagaaaccggcaccatgcttcatgtacagtctgcagaaccgtgagccaattaaacctctttccttcataaagcacacagcttcagatatctctttgtaacaaagcaaaaactgactaacacatcacccattaaagagtttacaatttatttagaggaaataagatggaagtgtagggagttattagaaagcaagacaacctacaaatctgtaaagtataagcatcaaactttgtgaacaaagagtatgatgtaggtattgagaaaagaaaaagtgggatatagggtggaacagtctcagaaaagtcctcccaaaggacacaggtaagagaaagacatggaagaactggtccaacttacattggtagaatcagagggcttaggtcttttttttttttttttctttttttttttgagacagtttcactcttgctgcccaggctggagtgcaatggcacaatcttggctcactgcaacctctgcctcccgggttcaagtgattctcctgcctcgcctcccaagtagctgggattacaggcgcccgcaactacgcctggctaattttcgtatttttagtagagatggggtttcaccacgttggccagggtgctcttgaactcctgacatcaggtgatctgccctccttggcctcccaaagtgctgggactacaggcatgagccactgtgcctggctgggcctaggtcttctaagcagtggaaatggcagaggcaagtgtccagagctgggaataaggggatgttatgtgggtatcatagggatgggggcaggggacttcacaataagacaccagccagtctaaagttgagtttgtgtaggattttttactcatatattattgagggccatgcattgaactacatattatggataaataattaatacattcctgccatcttgaagtttataatctagtcctacaaagaaacttatcagagaggtttctctgaggcttagtgtgttgcggtctatgccttttcatttcatccttcaaatactgtctactcaatgaaatttacctggcctgttcagccaaaataatttataaaggcaataatagctaacattattaacactctcctagaccagtgtactgtactaactactttgcatgccttattcataataagttaaggtctcttatatttttcagtgtactatgcaccatgttatggtctttacaaagattacatagtgtaatctttacactaaactttgcaagggtgtactactattatccccattgtctctatgagaaagctgaggctctgcaaggttaaatgatttccccaaggttctcttaaacttcgtaggggaagatggaggatgcttagagagtggtatgaacaacattgtgtgcctcctgatgtgatacaatgtgcagcacatagcaccgcttttgaagtactgcatgcttgccaaaagaaaaattgaacataaactttcaagtttattgaaaatggagggtccaggagtagtgactcatgtctataatcccagaactttgggaggccaagccaggctgatcacttgggccaggagttcaagagcagcctagccaacatggtgaaaccctgtctctactaaaaatataaaaattagctgggcatggtggctcatgcctgtaatcccagctacttgggaggctgagacatgagaatcacttgagcctgggaggtggaggctgcagtgagctgagatcacgccattgcactccagcctgggcaacagagcaagactctatctcagaaaagaaaaaaaaatgagaaaagaaaatggagggataaaggattaagataaatgatgccacaaagaagtaaacagaaaaatttagaattttggagtgcagggactgcaggacaactgaccaaatttcttcaacatgtcaaatatatgtgtgtttgtgtgtgtttattctataaatataataaaaatatttttatataaaagtatattatatataaaagaaaatttggattggattaatgtaatgtttacagttatggtaatggctatgttaatgtaatgtaatgttaggccttgtttagttcctgatttgaacgaactaatttttaaaaaggcatttttttaataagtaggaaaatttgaatatggactggttattggagggtacagggaaatattctcaattttcttgggtgtgatcatggcactgtagttatgggagaaaatgctaatattttttagagatatgcacaaatgtgttgggaagtcacatcaaatgtgggatttgcttaaaaatatttagcaacaataactacaacagaaaagaataagtgatgcaaacatgatgaatgcttgctaattgttaaagctgggtgatgactacataaaggatcattgtattagtctctcaatcttcctgtgtttgaaattgttttaaataaagattcatttaaaatgcatggcttaaaatagccaatgaggctgaaaacagattctcttgtaccactgagcccagttctatgcacacagtaggtgcttaataggtgtattatgaattactagaattggagcatggaaaacagctacaggatgaatgaaaatcaccctgttctcctaaacatacaatcacagcagtgtgggctccagacagaaaacctctcttctttttaagtatgtttatgctgcatgttgcttttttttttttttttttttttggtggaatcttctcatctctttggcttcaagccttcctttactgttaatcttcatcaaaattcacatagataaaattttaaatgtgaggtagaagggcctttgcagtgtggttcacctagtaagtataaattgctttactacagagagctttgaatacaggctgacattggccttgtctccgaaaatagcaaactgcagccacaacttaaacacagacatgatgaaatcaatgttttaaggagatcagtttccagcttctctgctcaacatacctccaaagctgcctttcacaaaagcatttctcttgtatcaggatatagaaccactcccaaaccgtgattgcagaggaatgagggctcccacaggccgaaagacactaccagaactaatctattgctttgaacatgaccaggctgtttttccatataaaatccatgagggatataaaaaatgacgtcagcaaacattcttccggaaactgatttattagaccaaatatgaaattactggtgcttttccaaggggaaagaagattgaaagctcctgcatatagcctgtttatattaagatatttgtgtctcaattccagaagctggcaattgaactcccagaaataaactggcaccaattcccatgaatgaaatgactatgaatcatttcatttttgaaaattaaacaaagatgtgacttaacaggtgatgagttgggtggatgtgcaatatttccacaaacactcagccataatacgtgctcatattattggtatgattcggaaccctttaaacatttctatatctgagtcttatgagagagaagaaacccagcctgtctgtttaaacaagcttagcaaattattttggcagaagtctgtctttcagtgtttccgatgaggtgatgtgtagttttagggcatggaatgtctcacatagtcaggacatcctattagaaacaagtgtctgcttgtgaattgtcccctcacctgaatgagaaatgaggagagaaccagaattaacaatcaatcttttttttttcttgtagcgatggaatctcactatgttgtccaggctggtctcaaactcttggcctcaagcaattcttccacctcagcctcccaatgtgctggaattacaagcatgagccactgcgcttggctaacagtcccttcttgactctcttcttttacaaatccagaagcccatttatccatcactttgagcatataaagctgtgctgtgatatacactaatcattagctacatgcgactatgtaaccttaagttaattaaattaaatttaaaattcaggttctcagtgcactaatcacatttcaagtgttcaataatcacatgtcgctagtgctaccatattgaacagccaagatttagaacattttcattgctccaaagagaagtgggctattgacataatccctatttcttcattttttgaagtcagaagagaagtatttgtcctatatttctcacagaaagatatcataggatcagtaagaatacacctggaattagtttctctaaaactcattctgaaactctgtagcctcagtttaaatagtataaaattttgactcaataaatcttgaaatattcagtaagaatggccaaacagaaaaaattctggagtctacttgaatagctaattggatttttgatatttggtataaaatagcatttaattagatctcatttgaaatgaacagagtgcattatatgcatgtatatatttggaatactgattggaaaaggccaggcatgatgaagacatgttcgtgtaatacttatcttttatcctgtgtcttgtccttaaggaaaagaagacatcaaacaggacacaaagtagcaaatgggagtttcttcttaaatgttatgtgaatgactcacttgttaggcaagtgagatgatcaaggacgggaggagaagacagcagaagagctggaagtaaagtcacctccaaagctctagagttggtagttcacgtctatttccaggaagacttctaaatctaatgaaatgatttgaatgcaatgctttatccaaaaataaaagcaatgttagattatgcagcacctgttagccagtgaagattaatgaaaaaaagcactgctgtggagaaaaagtatccaccattatttattcaaaaaaagaatggagcatccaccagtactaattatcgtgttaggtgtttagagtatgttaagagtaataagcattcaagagataatagaatggataattaattacaactgaaataaatattacaaaggaaaagtaaagggtcccataaaagcacataacaggaggaccaaagcttttgagagtcagaggtctttctaaagaaatgacattcaaggagacacctaaaagaggagtagagtttattcaggtgaagaagtggagaaagagcattttgggtggaggatatgtgtatggaatttctaaaacaggaaacagcattaggcatttgttgtgtggtaaggcatagcaagcaagaaaaaggagaatgtgacacaagactgggaggtaggtggacatctgctcatgcagaaccttatagaccacgatcagtgtataaactaatgaatgaaacatgccttcatataaatattgctagtttgtgtttttatgaacagttataattcacagaaaaagacataagtatgcagaaatatatggtatagaatgttacttagttatccaaatctatgaaaagaaagatttccagatggaaagagacagtgttttcaaagttgtggaggtaagaaagaatatggtgttttctagaaatagtaaggggaaggacaagagaaaaagttaaattgtagatgaggccagattgtcaaaattttcaaatgacaggatagggtgaatgaacatcacctgttatgcagccaggactcagacaactttcagtaaagaaggggcaaagtgagagctgttttaggataatagatcaagtggtggtgaatggttggggagggaaaaatttaaatggatatgagagtttgggtttgatgttgtggccaaaagcaagttatgttagattcttaaagtggtcataaaaccttaatgaggaaaataattcagtaggtaggtggaataaaactgtcacaaaaatgaagtaaggaagagttaagagtggcagttgggagggtgggggtactggggggtggatataaaagccagtgagaatgagtggcttcccagccttcattttcctcttcccctactaacagcagccaaatttccctttggagacctacccacccaactcagcttcatggtaattagtattgagtaatgaatttggtatttagtagttagatatttagaaattggttcaggaatttacaggtgaccctatttgggcaaataagaaacagacatttgctgaggtttctctaggaaagaagtttcttcatggtttcccaggacctatcaggggcgatggtctttctccagctgaagagaggaaggtaaggatgtggagactgtaatagctgcagctttttatacaaggatgaggaagcagaatgcgaatgagcctatcaaagcggggagagtagagggaaaggaatcacagagaagttgtttcaataccctgatgacactgagaatctctgactcaacctctgtgctccagttataactcaatacatttccctttttcatacaggtcagtttgtgctgtagcttgatgccactacaatattaatgacacagggagaacagattaaaatgagttaatctttaaaaatagaaaaccgatgagaaattattgccaggcaggattaactttgtcccaaatatttgataatatgagaattggcttaataatcaaaagtagaaggaagaaataaaatgaaaaagattatcatctataaatgatacagcagcacatggtattaaaaccaaagatctcacgtctggccatgtgctgctgctttttttttcccccagagttgttgcttgcaataaagaaccatgactgaaaaacgctccctgaaaagtgaaatccaaaaatttaaagaagaatattttaaaccactgggaattgctattaacatttaggaatctatctttccagccatttttgtacatatgcaaatttatttttaaaagaatgggatcctgatgcctaccctgtattacaatctgagttttttacatagcaatttataatagacacatttccatgtcaatcaatgaagatttatattatcttcttaccagcagtttcacatttatgtctttataaagaatatcggcagagtggtaaagggaaggggttttaaaagccaaagcgcatgctcagatactggctctgcctcttgtctctcaaatactctgtggttcctcatttctgttttgcagcttaaatgaaaagttacctgtacagtcctgagcacaatgcctggcacagggaataagggttactatcatcattttttaaattactaatataaggtatgctgcaggggaccaaagtgaggagatataaaagatatgtatgaggtatggagatggaatagaattgggccctatctacacaatacacagtacatgacagaaaaaaaaatcagtaagagaagcaacaagaaataaccagaaatgaccatattttttcatataaaaattacgttactgatttgggggtcaaataatttttagagcataactgatataaaatttgagtgatgagattatttaaacaaatgaacctgtatgcccccctatttgatttcttcccactttctacaaattaaaatgaacagaaacatgagtggagtttatggtctttatgaagaagtgattttctctgtgtccttaggcaaaatgccttcaattgacacaggctccatctgtactccaggcaaaactgcacgttcttccttttttaaatgtgtgtttttaaaataccatttggcacctaccctacaaagcttaaaaattagattttgaaaaaaaaaatcacccaaaatgttgcctctcatatagaggcaagcaaattggattcatgtaaatgatccttaagaaatgtctttaagtctgtattccaacaatcgcattttttaaaatacacattgatttgcttttaaaatttagcctcctcatttttttctcctgtattagaaaagaatctgcattatgcaagtatatcttgcattgagaaacttagtaaataaaaactcttatttgcatcatagaaaaattagggagtcattatttaccctttaagatgattttcaaaaataattcaaagtaaaatccctttaaagagaacacttgccaggggaactaaaaatatgattttaatgtaatacaacttttctgaaactcatctactatgtatagtaacaaaacaatgaacatgaaaaagttgattatatatcctccattatattcccaacagtatatgtatttctgtaaatattttgagctaaaagagatggaagtatctctagcatggacagccctggtgattcaagaagctgaccacatccagtgcagactggtaagacagtaataataggggttggccttgctttggaagattttatactttgtattagtgttcttttccctatcacatattgagtatttacattctaaaacttccattctgtgaattattcaataaatagtgttgttttgtgtttactggatgactttgaaaaaataaagcaggattccctaccataccctttactatatcaaaattaagtctgtatggatcaaagatgtgagtgtaaaaaacattagtctccaaaggcactgatgaaataaacaaaccaacccccaaaacaaaaaataaataaataaacaaaaaagataccatagacttctatttcagcaacgtgaaaacgtgaaagactaggtttttgcagacttcctcatggttcagaacatctacaaatttgaattaaattaaaaaaaaattaatgcatgaatgagctttcaggagattaaagggaattcccaaagcccttgaggccagaatcaacaataaggagaaataatctagtactaaaattccttactcctggtagcaaaaagccttggttttattggggcagacatgagatgtgagggaataaagcagaatgagaaggtaaagcagagattctagaataaagtttcccacaacccaaaggttgacatcctccttagatgattaatgaacttgcaatgagaagaaagtcatggcctgtctcagacttgagacagttggagctggaaaggagggagtatgggaggaaggatctctcctctcaccaaatccctaagcacaggctcccatttacacaagttgggaggataaaattaacatgacttgtacaacctgccctttccacttcccaaaaaagcctctagtcaagatttagatggaaatgataaaatgtagttattggactaaataaaattatatttaaataatgaccaaccatataagggaaaatgaaattgtattttcctaccttatactatatgcaaaatatcaattcttgatggtttgatgacctctgagagagacaaagttttcaaaactttaataaaaaataaagaagtatatatttttaaccttgatctagaagagaatttcttaaacaaggtataaaatgtgcaaaccaaaaagggaaaggttgatagatttgaaaattaaaattaagagctgttcataaaaagcaaaatatacaacgtggaaaatggcaatctctacatggagactctgatgagcttagaagggagccttccaacgactactatagagccctttcttcagttcaatatgggtctcttaacctgtattcttcagatagagacattcatttggttataatgccactatgctcaggccatcttatctaaaatatcatcgctagagttgctataaacacagcataaattaaatttctgtgcagcattatattgatctagtttgacaatatcctttaggaaattcttttacttgttcactcaattgcttattcattcattcattcattcatactaattagtaaacattcattaggcatttactctatgcctagcactgcactaactcctgaacatcctcaaaagaatcagatcagatttttaaaatttattcattccttcattcaacaactatctattgagcaactacaatataccaggtactgttctaaacactgaaatacagcagggaaataaaggggaaatgttcctgtccttatggagtttaccctctagtgatatctatcaatatcacattaacattaacatctaaagctctctacacccaccccttagctgttgactcaagaattccaatcccttgcaaaaactcccccaccgtcaatgtatttctggtggccaccaaagaagtatcattcattcccataaatcagggcaggctgtcagttaccacttgattatgtcatttaattctatgagacattctatgtggtctttaactttaaaatatatcagcatagacagtagtttgtctgtgagagagtgtttgcatacgtattttaatccacatcttaaagtagttaattaccctagttaattgccctaattaaaaccaccttagggtggtcaattaatattcaaagaattctaatcaggaaaacactctccaaaaatgactagcttttgtgagactatattagaatacagtattccagaaagagttcccacagaactactttattctttagctatcatgatttctggtcaacaccaaaggtttattcattagcataaaaatgttagaaatcatttctcattggtgaaataaataaaagtgttccaggcactgcactgtctataagtatcatacagacacaccccctttactaaaatagcccaattgcttcaaaaaagaatccctagatttaggattctgaagagaggctggtgttacctagaatctactagaaatttaagttgaattctacctctaaaaattgtcctattaaccaatagagaattacagagagagctgggattttgtcacacttacagaatgagttagatgactgtttttgtgcctacctatctggaagaatttgagaatctggcctgagacttgctttcatgtagcaagtagcacctggtagagaaattttgaggaggaaactgaaagccttctacctgcaacgattataacatctaccatctacctaccatctactaaaaagaacccaatcataatcctcgaaggatctagtatttgtgaatgagcaaactggcttaggtccatttgccacaagtaggcattgttatcccactttaaagaggaggaaactagtaagatttagagatgttaaatcacttcatcaagttttcaaaattagtaagtggaggaactgaaatttgaaaagcagatctgtgcaattccataacctttatttcaaacccttaatcattatattattatgaaattctgcctcattattggccatctggccattttttacactctagcctttggaggcagagattggctctcaatccatgggtgagttataagcacactcattgcaaggtttaccaaccaagaatacatattaatcctattaaacctcctgtccacaataccactcccttgactttgggcacatttctctggcacattttggggtgtacaggtggttctagtggacatgaaggtcttttttagctgtatctgcctcaggaaggcagatgcagggcatcctgaaatcctactacttccctaagacactcttctccagaggattctgaatggaatcctgtagagagaaaaactataggaaagggccaagttgctaatcttattaaaatagttcaattgtttgaactcagatgcttgacagcatatgaagatgcactgatcagtttacaagcatgtaatccaatctagataatgttctgcctaaaaagggactacttatacccactctggcagcagcccagacgcggagctttctggttagagcagcaagatgcccaagccagtagactctaggacttcatcgctgctgggtagggtggctgccttctccccacattttgatattccgtacatgtgcataggcatgccagggtgacattgcctttctgttaattccagcactgcacatctgacttgtgttctactcagccctttatccttcctcatcacccatacaaatggccccaaagctccccaactggtgcctggtgttgagcagaaggatccactcactttgggattaataatatcttagcccatttgaccctcataacaaaatattataaactgggtaccttataagcaacagaaatttatttcacacagctctggaagccgggctgtccaagatcaaggcagatttggtggtgtctggtgagggcctgccttctggctcatcaacagtgccaccttgctgtgttctcacatggtgaaagggtgaccagagttattagcaccttataagggcactaattccatcatgagggccctatgttcatgacctaaccagttccccacagctccacctcctaataccatcaccttgggggttaggtttcgacatattaattttgaggggacacaaacattcagtctagagcaaacaatagtaataataataaagcaatcatttactaaatattttctcagggagcagctgatatccaatgacagctgatatgaagatgcaaagacccaagattctgtgattcaatctgggacaactctgacggcccttcccagcaacagagctcgccacaggacagcaaggcctgagttagaactgccttgtaggtcagcttttccctttgcacaatgcagccttcctcatttccttatagctgtatttcccaagagcactttctaataaaccttctgcatgcagctctccatctcaaagactgttttcatagaactcaatctaagataagacacatcttttcaaaggacagatccattgtgaactttagcaagtaggatccctccgtgtatcacaggggcttagggagccatggaggctccaagaggtgggacagctatgagactgaggccctgacaattggaaatgttcattagtgaaactatgcagtataatttcatagaagattattctatctggaggctaacagatggctctgaagccaaattcgggactctaattcaacagagagattctgctgatgtcaccagcacttgagctgtgtgttccagtgtgggctttttaagggttttggttgtcttttttattttttctttccacaaacagccatagagacttgagagttaattcagccttgtagtcactccaaggccatctgttgttcaaattaaaatacatatttttaactttaacctttcaatctctaaagttttaaacctttgcaatagaaacagtcattttgcaacagcttttcggcttcctgattcagtgacatcaatgaaaggggaatgtcagttttgggaacgtcagtaaggatcgttggcagggctgacattggtagcgggacatggagaatctaccaggttattttctgttcttgcatgacatggtaactaacatgctgtgctctcgtttgttggagtccatcaaaactctgattagatttaataaaggataatttgagaattcacattgcttctgaggcataaataaataaaaaaggagctagaaaaaaatgttgcagaatttaggctcctttgttagttctattaatctgctggcatactctaatgaggaagtcagaataaaatataaccaaagtgctaatttcttttgaatgattttttttcttattttaaaagtcatgtacattcattgtaaaaaataaggaaaatgtggaaaactaaaaagatacttctcctgctgtctagagattaatgcttttaacatcttggtatattacattcctatttacttatttatttttattattttagaggcagagtcttgctgtgttgcccaggcaagactcaaactcctgggctcaagcaatcctcccacctcagcctctcaagaagcttggactacagctgtatacaaccctgtctggctgtgctcctgtttttaaaggtgaatttaaatatctattttatgcagagatcgggtcactataatccatgatgtgttgtccttgatatttgaatatgctattgctaatccctgattaaaaggagcatatgttttgaatctgtttgatcttatttcttcttactaaaatgtatgattttttgtgccatccactttatctgtgacaaatgaatacatttgctaaaactattttaaactacacaaattaaaatggtatattacccttctcagttcaaattaattcaacaaccctttttaaatgacagttactatgtattctgcactgtgctagagaaagaataaggatggagttggaacagggagatacaactgtgaagaccacacagtcccagactctaggagctcgtatttccttattcatgcaacaaatatttattgaacacctactttgtgctggccatatggtcatgaacaataaggacacggtccctaccttcatggggcttaccttctgttaaagtagacagacaaaaataaatgagattatttcatatagtttgtattaatcatatttttttattttgtatatcttatgacattttgacacctgaaaaatcttgttgtctggaaagagacttttcctgcaacactagccaattcttagagatagttaaaagctcaggattgagctcttatgaaaggcattcctttcacatgccaaccaacctatccagagtctatatccccaactaccccctttatctaaccctcacacaccaagctaatattttccctgccctaaattatcctggaaccacgtatgaggcaattagagaccacctttatagcccaaagcccacagaaattatcaaaactagccagtcctaaagtatttattctgccctgtcttgactttcccatggaatctctgataaagaccgtggcctagactctcccctttctggcttctgcctcctaccaaaacctggtgctttctctgtggccctgcgtggtgtcgtatatccccttctcttgggaaatgtaagtaataagtcttgttccaatggcattgacctctccatgttgtcacctccattaactaaaatcactgagacatagtggtaaatacacttggccctccacattcgtgggttctgcattcatggattcaactgcctgcgggtcaaaaatgttcgggaaaaaaaagttccacaaagttccaaaaagcaaaacttgaatttgccacatgccaagtgctatgtttaattcaagcaaatgaaatgatgtgtaagcattgtattaggtattataagtaatctagagatgatgtcaagtatacaggaggatgtgtgtatgttatatgcaaatactatgctattttacataaaggacttgagcatcctaggattttagtatcctccaggggtactgggacaaatctcttacagataccaagggaagactgtacaatgaaggcaaaaaaaaaaaaaaaagtatgttctaaaaaaaagctgagggctgctacttcatagaagggatgaaaaaatgcttctctaaggagggggttttttggctaaaacctgtatggggaaaaaacccccccaaccaaaggattttctaaccaaaagtaacaccaagggcaaatatcctgaggcaaggctacctttgctggttcaggaaacaaaaaggccaggttggctaaaccaaaaaggaacaaaaaaaaatggaaaaggcaggggggccaaatttcttggaggccctaggaataaaacaaaccaaacccccttgcaaataaccttgacaatgctttatgaacagaacatattttttgcacttctttcaaagtctttggggatacaatactggggtatccacaagtttaaatctctgaggcaattccaggaactgtgtcacagcaaaattggtgacactttcaggtggatgtatttgatagcattcattaatctgtactctggcctttctcctacatttcctgtaaagtgcgtttttgtaaattgaaagaggactgttttcatccagcagtgctgagtgaagtaataaatgttacactgtgcataataaggtcaaaaacctagtgcaaggtgcatatccctttgtggtttgtgggtggggattgagggtggtaataagtggggggtgggaagagggtggttctccttaattaagttctttgttgaagcccagcttaccaactgttgggttcagagcctgcacatgactcacgattcacaagctggccctgaatcctcattagaatgaaatctaggtggcttagacctgacagcttttaaagtcagatgcaaaaagatgcattcgccttttcagtttggtgtgacataattttgttttcatttacctgccaagttgataagaatatttagtttctaggttcataaaacagactccaggtatcatagagaagggattttttaaaaattccccttttcccataatgcaaaatattttcttttgagtaaagcttgggctgcagatttactcaaatgaaagggagtgggtggagaatagtttattaacaacaataacacaagccaagctttaagcttagggctatacaactttatacattcattgttattacaaccctgttctgtagctactattattttcccccacttaatagatgaggaacctgggctcggagagtttaaatgactaggccaaggccagacagggagtgtggacccagatgcttggtggaccttgcattcaacccaggtctgtttggcttcagcctgcatttcccactgtacaacaccatctccccatgtgccatctcaccatctgcagaacaggagccagcctaccccacctttcatggttgttgtcaagaacacaggagacatatggtggcttccagaagactctacagatggccattttaaaacaagaaaataaaaggaagccatatattgggctgtaccctaactcgttcacaggcctcacctcagtggtaaagccaatggctttcttagtgctgaataggaaagaacgtgcatcctgtgaacatgaactgtgcagcaactcctggtgagttctcctttttatggaactgggaggctgaggtgggaggatcacttggggccaggagttcaagaccagcctgggcaacacagtgagacctcccatctctacaaaaaatttaaaaattagccaggaagcatggtagcccatggctgtagttccagctacttgggaggctgaggtgggaggatcacttgagcccaggtgtttgaggctgcagtgagctatgattgcaccactgcactcttgcttgcttgggcaatgaagcaagaccctgtctttaaaaaaaaaaaaaaaaaaaaaagattagatgtgattaaggcaaattttaagccaaaggtgatgtttatagagaaagttttggtctcaataaaacaaagatttttctaacaacaaggctgtcccaaaccacagtgggctactcaggtgagggtaggcatgagtggtcttgagctcccatccctgcagtggctccagcagaggctttatgcctgcctgttagggactgacagtgcagggagcacatggggaatcagtgttgatgtgctactatagcgccacctcactctgctcaggcaaccatttcacaagagccctttggcatgaatgccaatcaagtgtcactacacaagggaaaattctcctggtctgctgggtgtaagttcagaaggactttcatgttctttagttataccatagaagaagccaccatgcccatataaccttacctcctgggacaaccaggctctgattataggttctttccaaacttttctttttagattgctgtttaaaggttttccccaaaaatcactgaattatatctctatattttaaagcttaagggcatttttcactgaatttgaatactgggaaactttttaccattaaagcagccttatattttaatctactctggtcccatagtggttgtctccaccaagaagagcagttgaggctggaatagcaaggagaggaaaataagaagagcaatttttcagcctgtgtgcctcctcccaaagggactcctttcagcattttcagtgtaatatatgttgacagtactgttactaaaatgatcattaaaaagatattggggaagaaaagtaaatgcaggagcatagaacagatagataagattaccaaaggcttggacacagggacacaaatgttctgtgttctacatcaccccaagccaaggtgcaggcatcccctgactccccactgcattcacctcacctataggttagaacagagtgttacttgtgccaatgaacacacgtgtcaaacatcccctttgtgcaaaacatgtgttggacactacctttaaggagcttattgtcttattgaagatgaaaactatgaatgtatttaagctgcacactgctcataaaataattaaaggcagtttacagagaaaacaagggcaacaacataaaattggctaatataaaaatggaaaccgtagatgaatagataaacaaaacgtggaatatggaatatatataaatcaaatattattcagccttaaaaggaaggaggttcttacacatgccacaacgctgacgaatcttgaggacattatgctgagtaaaataagctagacgcaaaaggacaaatggtgtacaattcctcttacatgaggtatttggagaagtcaaattcatagagacagaaaatagaatggtggttgccatgggctggggagaggggagtatgaggagttattgtttaatggtatggagttttctcttggaaagatgaaaaagttctgctggtagatagtggtgatggttgcacaacaatgcgaatgtacttaatttcagtaaactgtatacttaaaaatggttaaaaggtcaattttatgttatatatgttttacaacaataaaaaacagattggactctaaaggtttagtacaaaaaaatgaaaaatatctcattaatactttttttctgcattgattgcaagttgatatgataacattttgaatacggtgggttaaattaaaaatattattcttaaaaatttttttaatgcaagctatagaggaagaataataaaatcaaagaacttcaagggggccagcgtgtgcatacatatatgaagtgacaagtgatgtttacaacagggggtgagtatgtttgaggcaaccaagactctatgcccaacctcaatgcattcaggttaatttattttatttatttatttattttctttttgagacggagtctcactctgtcgcccaggctggagtgcagtggtgcaatcttggctcacagcaacctccagctcctgggttcaagcaattctcctgcctcagcctccagaatagctgggactacagtcatatgtctccatgcctggctaatttttttgtagttttagtagagatgggggttcaccatgttggccaggatggtctcgatctcctgacctcgtgatccacccacctcggcctcccaaagtcctgggattacaggcgtgagccactgtgcctggcccaggttaaatttttaagaaaccccatgtgttggtctgttctcatgctgctaataaagacataaccaaaactgggtaacttataaaggaaagaggtttaatggactcacagttctacatggctggggaggccagacaatcatggtagaagacaaagtcagagagcaaagggacatcttacatggcagcaggcaaaagagcttgtgcaggggaatgcccctctataaaaccgtcagatcttctgagacttacttactaccatgagaacagtatgggggaaagtgcccccatgattcagttatcccccccggctccatgcttgacatgtgaggattattacaactcaaggtgagattttggtggggacacagccaaaccatatcaacacacttaaacaaacaatcacgtcctcagtctcaatgacctggaggcaacagttactggcatctgacatagtatgttacacatttgctaagggtgtgcaagtttggcttgagttatccagcagccaatgtgaaaagagaaatttagccagttgcacagttcacaaggtagtgagataaaaaccaagcagttattcagaagcacatgtggtattgatattgagatagaaaagaaatatctcctgagggtcttgtagaaagaacactgcaatgtagtgaacaacatccttagaggttgggacaaagtcccatggaatttttctcaccccatccttcatttgagacccattatttcataaaacagtgtcacaaaaaacagttctgccagaggccagccatccagtggaagacaaagtagtgctggacgaatggtagaggtgatgaggaatgtgagtgctattgtcattcaaaggagagcagacttcataaggagtcatgtgcgaagaaaggcagtgggctgaagctttaggaaagggagggtttagattcttgcctgatccatggtgggtacactggaagtatttgtcgcacgaatgactgtatagatgtcctagtccattcaggatgctgtaacaaaacaccttagactgggcagtttataaacaacagaaatttatttctcacagttctggagcctgggaagtccaagttcatggtgcagcagattcaacgtctgcttcatgaactacgccttctacctgtgtcctcatgtggcagaaggaacaagggagtccattgaaggctgttttataagagtgctaatctcatccatgagggtggaaactgcatgatttatttattcacttcccaaaggctccacctccccccacctttttttttttttttcctgaggtggagtctcgctcttgttgcccaggctggagtgcagtggcatgatctcagctcactgcaacctccgccttctggcttcaagcaattctcctgcctcagcctcctaagaagctgggattacaggcgcccaccaccatgtcccgctaatttttgtatttttagtagagatggggtttcaccatgttggtcaagctggtctcaaactcctgacctcgtgatccacctgcctcagcctctcaaagtgctgggattacaggcttgagccactgcacctggccaaggctgcacctcttaatactatcacactggttttccagttccaacatatgaatttggagaaggcaccaacattcagaccttagcagtagagaataacacacacacacacacacacacacacacacacacacacacacacgtatttcaaaaccaaaaggatagaagagtattctggagggcaatctggctggctgaaggatatcagtcaggatgttcatagcaagtgacaacaatctaacttgaccttgatttttaaaaaatggaaatgtataccatccaggacataggcataggcaaagacttcatgactaaaacaccaaaagcaacggcaacaaaagccaaaattgacaaatgagatctaattaaactaaagagcttcggcacaacaaaagaaactatcatcagagtgaacaggcaacctacagaatgggagaaaatttttgcaaactatccatatgatgaagggctaatatacagaatctataaggaacataaacaaatttacaagaaaaaaacaaacaaccccatcaaaaagtcggtgaaggatatgaacagacacttctcaaaagaagacatttatgcggccaacaaacatgaaaaaaagctcatcatcactggtcattagaaaaatgcaaatcaaaaccacaatgagataccatctcacaccagttagaagggtgatcattaaaaatttaggaaacaacggatgctggagaggaagtacagaaataggaatgcttttacactgttggtgggagtgtaaattagttcaaccattgtggaagacagtgtggcgattcctcaagcatctagaaccagaaataccatttgacccagcaatctcattactgggtacatacccaaaggattataaatcattctactataaagacacatgcacacgtatgtttattacagcactgttcacaatagcaaagacttggaaccaatccaaatgcccatcaatgatagattggataaagaaaatgtggcgcatatacaccatgcaatactatgcagccataaaaaaggatgagttcatgtcctttgtagggacatggatgaagctggaaaccatcattctcagcaaactaacacaggaacagaaaaccagacaccacatgctctcactcataagtgggagttgaacaatgagaacacacgggcacaggaaggggaacatcacacactatggcctatgaggggggtggggggctaggggagggataacattaggagaaatacctaatatagatgatgggttgatgggtgcagcaaacctccatggcacatgtatagctatgtaacaaacctgcacattctgcacatgtatcccagaacttaagtataatcataataaaaaaagaatgcgaaaaaacaaaaaaaaaggaaatgtattggaagcatattggaatatctcacatcattaaaagaagttgaagatcaaacatgttgaaggcagggtaaaggtgggcctacatggtggacatggagaagtgccgctcagataccctttcacagaacaatatgttttcccagatgctggccatgtggtcagtagacagccttcatctatcatctacttcagggtttgcctcagatgctgagagttgccttgtccaagagcttgcccttccctgggtagcccatatccagtgactaatcactgtggaagtataaaggccagaacatctcagctcatgcagcacaatttcaatgggccatttatgctcaatggacttattatgctcaataattctctgtggagttgtcagacttgcattgagttcagtttcttcctcttcccaatcttgctttctcttcctccttcccataagtgctggtccctaataaatatcctacaccacaaattctatcacagggactgtttcagtaaaacccaaccttcgacagccttggaaatgaactcaaataccagtaggatgctctctctgtctctcatatctccatctttctggatctttgcttctgactcttccactctagtttgcttctccaaacactgggaaatctgatcatgaagagtttctcttaatgttagccaccgggggaaaaacgttagccacagaaatgatcagattgttattgcttggtttctgataaaaactgtttaaaatcccaggaaaggataacaaatggcccagctggggtcaggtatctacccacaaacaaattcaggcctggatgtcaagacattataacaggccaggcctgggtcaaaacctatttctcaggaatgggatcatatactaacaaatatggcagccccatagacccatggggttttggagaggattgctggacaaaaaaacatttaacaaaaaaaaaacagcagaagcaacaacaacaacaacaacaaaccacattatattctctgtattttggggagtactagcaggttcctttgaaagattaatttaggatttgtatgttaggtgtacgagttaaaatatttttagttaattggctttcaaatacttagagcaacaggactctttttcagacaaaacttactcaaaacacctacataataagcagataataatggagctgctgatttgataggaagtaggagccccagaatccaatttcttgtctttctctaattccatttcccagcaaccaatgagccacctcgttcactcattcaacaaatattcattgaatatttctgcctccacattgtgctaagtgatagaaagatattcgttgagtaaaaacaaacataatctctctttctggagcattctatgtatgatcgtaggacacagtttgaaacccactattctgggtaatattggggggttggggagaaggacaatgaaggattaagatagaaaagtgttgttttagaaatactgacctggtggttttagatgttgttaacccaatttggggaatactagtcatgttgattaactggaaaactattgaaatagccaagacatgaaatgtgtggtccaaactagagaaaaggcagaggaaatgaagagtgaatacaagaaatataaggtaagaaaaattgatgagtcttggtgacaacctcttaatggatctggctagtatctattaatgcatgatattaaaacaatcccacatacatttagaggcactaagtctcccctcccacttttcccactcaatcaaatttgcaatatattccaatccacatcactgcacttacacattaatcattcatgcattcttgacagcccatttcagtcctattctttcagcaccctgaccactcacacatgtttcttatggttccaagtacaacagtctctcctggctgatggcagcccatcacattcctcatgtcctctttgcatataactgtaatcaatattaaattcctaaaaatttacagttcaactaacatcaaatactcctttagccaagatatcattctctggcttctcagggacttgttttgtgtaatatgcaaaaaatttttaatttccctttacatattttaagttcagtgtgtggttatataagataaggtctatttttctggccttggtgatgactcagtatttttgaagcatcttgggctgaagatgcttgcaccattacccccttgtacattcactttgcaatttagatttttctaagaattttgcaagattacctctagaaagatccttttgaattattgctccccactaacttgtcacagttgagggaaactgaagagactacattctggacttttaagctgcagccttgtgttcttttgctactagaagatacaagaaaaggcaggggcacatatactttatgacaactcaccataaaggagcagggtaatttttattggtcactgaaatcctattcacaggcaaatcactgcaggcaaagattcaaacttaatttctgcttcagtgccttttttctttgtgtattagagttttgtctgcatattactaagtatctacctaggccacaagcaacttgaaaacagagactgtgtattgcatgtcctaatatctcatacactactttattgggcacacagattctagaccacatttcatttatgtatttattcatctcacaaaaatttattgagtacttactatacaccaggcactgttctaggtgctcgggttacggaaataattaaggaaaacatggtccctaccctcatggggcatactgcataacagaaaaattagaaattgaacagggaggatctgatagaaaagacaatattgaacaactaatagaagtatgatgaggtttctaaaagggaagtgcaaagtctgaaagaacaactatcgggagattaccacccctccctcacttatcttctgaacatccctcctcccctgcctcatccctcccttgatccatgagtgaaactggcatcggggacacaaagcctgagtgtcaccattctgtgacttctgtgtctcttggggcccctattggttaacatattttggcacatcaaagcaagtgactcaagcacaagcttgatagtagctcccaggagggaacaactgagagtgacaaacctacattcattcattcattcattcagcaaacatttattgagcatttattctgtgccaggtactatgagcaaaacagtcactgccatcattagagtactcatgtgctgagaaagatgtattttaagcaaaggatcacacaaataaatgtaaaataagtcccacatcatgctctagagggttaggagtatatataatggagggatttgacttctgtaatatattcaacacaagtaacccatgatcttatgatcccaaagcctgaactctcaatgtctatgtcacactgaaaagtcagcaagtgcatgatcgctgccaggccattttcccccatatttaggcaactctgattattagaagagttcttccttctatggaacctgagttggcactctacacagtatcattgttctaaccacaggaatcacacataaaaagttgacatgacttttttttcgaacgttaaaaacaacaacaacaacaacaacaacaaaaaactagcaaaacttcttccatcccaatcctggatttcaaaccttccattccatggcatgcttataaagttcccaccccatctttgtcacttccctttggacttgttgtatagcccaaggttgactgacagatagctgacacaccccatttccctatcttcatactcatggaaaacattgcatattgatccctatgtactttactaatatgcccagatgaagtcttgtaatcaatttcagcacagctctctagctctgatcaatcaagtagtgttaacaagagggtgaaatcttgttgctatccaagcctagccatgtccctctaaaagtgaagtgtgcagaactaaatacaaggctcaacactgggttctaatactggatctaagctaaccaccattctagcctcattctgaagattttaaactttattatcaatgcttccttccctagatgttccattacctggcatgctcttgcaaataatatatggagtggtgacatacaggcacataaatttatatcctgccttcactattgaccactttctatttatttaatacttaaggctcattgtaaccatttgtaaaatgtagctaacaatgcctgcttcacagagtggttgtgaagaactttgagacaatgtaagcatatttaccagatctttgatacattttctagtgtattttttctttcctgaccacttatggcctaggacagtcttttcctagttctagatcaaccaaaagactccacaaaaaattgtaaattactccagaaaaactaaaataaaatcaaataaaatgttcttggtttaggtaagtgaacagtataaagatgtcagttttctcactgctgaaagaaatcaaagattacacaaacaaatggaaaaacattccaacctcatggattggaagaattaatattgttaaaacggccatacagctcaaagccatctgcagattcagcacttattcctatcaaactaccaatgtcatttttcacagtattagaaaaaaactattctaaaattcacgtggaaccagaaaagagcccaaatagccaaagcaatcctaagcaaaaaagaataaagccagaggcatcacattacctgacttcaaaggtacattacctgactataaggctacggtaaccaaagcagcattgtactggtacaaaaacagacacatagaccaatgaaacagaatagagaacccagaaataaagctgcacacctacagccatctgatcttcaacaaaatcaacaaaaataagcaatggagaaaggacttcctgttcaataaatggtcctggtatagctagctagccatatgcagaagaatgaaaccagtctgctaccttttaccatttacaaaaattaaaatgaattaaagatttaaatgtaagacctcaaactctaagaatcctaggagaaaacctagaaaacaccattctggacatcagtgttgggaaagaatttatgactaagtcctcaaaagcaattgcaacaaaaacaaaagttgacaagtaggacctaattaaactaaagagcttctgcaaagcaaaagaaactatcaacagagtacagagataacctacataatgggagaaaatacgacaaactatgcatccaacaaatgcctaatatccagaatctataagggacctaaaaaactcaacaagaaaaaaaaaactcatgaaaaagtgggcaaaagacatggacacttctaaaaagaagacatataagtggccaacaaataaacgggaaaatgctccacatcagtaatcatcagagataatgcaaatcaaaaccacaatgagataccatgtcatagcagtcaaaatggcaatcattaaaaagtcaaaaaacaaatgctggcagggctgtggagaaaagggaatgcttatacactgttgatgagaatgtaaattagttcagccactgtggaaagcagttttgatatttttttttaaatatggaatctcactcttttgcccagggtggagtgcagtagcatggtcttggctcactgcaacctccgcctcccgggttcaagtgattctcctgcctcagcctcctgagtagctgggattacagacatgtgccaccacacccagctaatttttgtatttttgtagagatgggattttgccatgttgaccaggctggtctggtctggaactcctgacctcaagtgatccgcctaccttcagtgtcccaaagtgctgggattacaggcgtcagccactttgcctggccgagatttttcaaaaaacttaaaacagatccaccaatcaactcagcaatgccattactaggtatatatccaaaagaaaataggttgttccaccaaaaagacatatacacttgtgtgttcatcgcagcactattcacaaaagcaaagacatggaatcaaactaggtgtccatccacactgaactagataaagaaaatatagtacatatataccatagaatactatacagtcataaaaggaatgaaatcacgtcctttgcagcaacatggatgcggctggaggccattattccaagagaattaatgcaggaacagaaaacaaaatatcatgttctcatttataagctcaaatcactggagtaaagatggacactcttaaacaaatggtcctgggtagtcatttggagaaagacaaaattagatccatctctcacatcatccatattaataaacttcaaataaattagggatctaaatatttaaaaataaaactgtaaaagtactagaagaaactatgagtaaactcatttttaatctcagtgtagggaaaagttttctaaggatgactcaaaatcccaaggcaataaaaaataaaaaaaatcagaggcaataaaaaacaaaatttataaattttactacttgaaaataaaaaatattttatataacaaaagcaccacaaagaaagtcaaaagcgactgataaaactgagagaaaagatttacagcatataccacagacaaagggctaatagttttaacatatgaagaactcttaataactgagacacaaaagactgaaaactcaatttaaaaaaataggaggacaggcgtggtgggtcatacctataatcccagcactttgggaggccaaggaaggaggatcacttgagcccaggaattcaggaccagcctgggcaaaatagtgagacccccatcactaccaaaataataataataatagagcatggtggtatgtccctatagttccagctactggggaagccgaggcaaaatgatcacttgaacccaggagttggaggctgccacgagccatgatcacaccagggcattccagcgtgggcaatagagaaattctgtctcaaaaaaaaaaaattaaaattaagaatataaaaaatgggaaaagacatgaatgggcaattcacaaaaactggacattaaaaatggccttcagatatatgggaaaatgctgaaattcattcataattagagaaatacaaattaaaacacagtaagtatcatttctcaccagactggttaaagtttaaaaacttgacgacacattctgttggtgatgctgtgaggaaaaagtcatttttatgggttttatgtaccaattatacaaatggtacaacccttctggaaataaatttggcaatacctaacaaaactacatacatttttacctttcaacagcaatcccacttctaggaatctaccccaaagatatactttcaactacgcattaatacatatatgcaaggttattcattgcagctttgtttgtagctgtacaatactggaagcgacccaaatgcccatacatagtaaagtggttgaataaactatgatacatccacaccatgaaatactatgcagtggtaaaaaaagaatgaagaaggtctctgaacaggcatggcatgatttccaggacatactgttaagtgaaaaaggcaaggcccgaaagagtatctctaggacataagaagaagatagaaaataccaaggtgtctgctcttttgtgcaaaagatctaaaagaaggataaatagaagcttagtagtgtggttacctaaggaagcaagtggaaaaagagaagaaaagaggtgaatggaaacagagttttagggatgaggagggagtcacacttctccaagtactatttttgtatagctctgactcttagaaccacagtttcacaaacccttcacatatcctcaaaataaacaaaaacttaaaatcaaccaggatgcaaggaaaggagaacccagaaccgagtagaaacactaacaaatgaacctaatcatacacaaatgaataacataaccacactgaaatggatgggtaactaacctaagtaaatatgggagatagtgtctcgataggccactgtgtggctaaaaaacattaatttggcctaactgatcagacaccgacttaaaacaactgatcaagataaagtcctccagcaataagacatatcaagatcattactcctggataatgataccttgagaaagatataggtgtatttttgtagtgctcttgccaaaaacacacagcctcaatccaatcatgagaaaacattccaaattgaatgacattctacaaattaactgactggtacttattaaaagtgtgaatgtcacaaaaaaaaaaaaaaggaaagactgaggaactgttatagacttatagactgaaagaaactaaggagaaataaataaatgcaatctgggatcactgttagcatcctagcacagaaaacaggcattaatggaaacattgatgaaattcaaataaggtcttctgtttagttgccagtattgtaccaatgttaataccccgttcctgatcattttattaggcttatgtaagatgttaactttaaggaacatggggtaaggaatataaggaattctgtactacttttactatttcataagtctaaaattggtttaaaattttaaaagtattttttaaaagacttcaatgggaagtagagagggccattgggtcttatgatgttgggaacccccagcagagcaggtatcccagtccttgaaagtctgtggccttttgtgcctagagttcatatgagagcctagagctcatatgtcaacctcaccactagagttgaggtaatgctcttcaaccctgtggcctgtggcccaaactaggggactggttaataactcacggtatattcatacactgagatgccaaaggccaattaaaaacaaagttgtagactatttaataattctatatcatgttttccagaaattaaataggttaatatagatagatagagacagagagagagagagagagagagagagagagattgacagagagaaaatttggaaaaatattctcccaaaagttaatagtagttaccactgattggtgaccatatatcctctgctaaataaataaaaaagagttattttaaaattaagcaaggagacttctggttttaaaatggtggagtaaaaacatctgtctcctttctcttctccaaagtcacactgcaacaagcagaagaaggaaaacagaatgcaagttccatccttgagaaaactaggaaatgactgtaaatctgaagcatgctatgaggaaggggctgcctaatgtagagtctactgggaagagcccagtgggaagagcccattaaattggcccatgaggaagacaaagccaggacccaccggaaaatgcagagcccagacaaccctgcagagcatgtgctctcctaagaagtgggacagcaaccaccaattccttgtctaaacaatggtgctggaacatgcaggcttagaggggaaacttctttggtgcttgtttggcaccttagagaagtagggaagctgggactgaaagcagaaccgcacagacatgacatttcaacaggaagcaagttattggtgagatgaggcaggatagaggaagatcctgaactccaagctggcacttttggtaagcagtgaaaaaataaaggcaaagcgattctcttgcatacccacgtactcacactaacacaactctgtgttataaaaagctttattaccatatcagttaagatgaagttcaactacgtatcaaaaaaacccaaaaaactttaacatgattatttttctctcatttaaaagaatttcaaatgttctaaaattgattgtggtgatggttgcacaactctgtgaacaaactaaaaaccattggattgtacactttcaaggggtgaactgtatatataagttatatctcaaaaaagctattttttgttttaaaatttcgaggaataagatttgtatagtggcttcatggtgtcatcaggaagccaggctcctaactttctgctctgttaccctccgtacatggcttccatcttcaagcacgcctcatggttttagatggcttctggagctctggtcattaaatccatattctaggctgcagagatgaggaagaaggctccatttccctctcacatttaaggtacttacctaaaagccaactcaacactttttctttacatattcttggacgaagatcagtcacatggctataaccccctgcaaggaaagttgagaattttagggctatagctgagcacagtgacaatgaatagaacctggtttctattgttttagaagaaaggagaaatgagtgttgaaagatacaattagtagtttatgccacaactatgaaccatagaaaattctttacagctcaaaacataaccctgtcctatctcctgcaaatagtcagaaagaacttatctcattgaaagataaacagtgattaaaaagaaaccagtatacaaactatgtaaagatattgcaagaaaaaaaggaggaaggaaacagaaaaaacaaatggcagatgaagaaggaacatttgtttttttaaaaaaaaaaatgttgtcaccaggcagacaaaattatgatcaagcatattgtcatatattttaagaatttttaacaatcttaaagcagagatacaagagccagggaaaagatgaataggcattactgaaaatactataagatacacagaatacggggctaaaaaagtaagcaataggaatatatatgcaaaaagatagaactatacaagcccatcaaagttaaatgaaaatgtagataactggcatccttggattataggtgttcaaaacaacattcaaaaataacaaaaaagaatcaaatgtacagtgtgataagaaaaactgatgaagaatgagtgacactaagattagcctaaaagttatgagatttcagagataaaggaaaaaaccctttaatcatgcaaaaagaccaagtcattaatgtaggtaatggaagtgtaggtgggaatcaagttgacctctggtatctctacagctttatttacctttagaagatagaggcgcaatgcttacaaatttcttgcagtccagagagtttaattagctaatcagttagaaaacttttaaagtaaaggaccagatggtaaatattttcagctcgtacaatctctgtcacagctactcaattctgctgttgtgcctgaaagcagctgtggacaacatataaatcaaagggcatggttgtgttctaataaaactttataaagacaggcagcttattgcatttggcccttgggccataatttgctgatccctgagctaaactatcattcaaatataaaggcaaaagagaagcatttttgaagtttgacatcttcaggcatgtaatccacataatctaaagtgttagaagacaaactttagtgcacaaaagataaatgaagaaagtgaagcaagaatactggcaagaaataaaaagctaaaatatgctctactacctggagaacagaaaaagaggcataccttccggctcctttggcagcaagtgccttagaagccccatgacgtgaaaggataattcaagaaaccaagacatctgttggaagccataaaaattatgatcagttctaaataaagaaggtgatgtcacatttgcagagcccttttaaaaacatctagagattcacagagatatttagattgttaacccacagtaacagctaagtaagaggggcctcaattttctcagatgtgaaacaccagggttgaattaaatcagagacgcctcagccctgactgctcatgagaatcacctgaggcattttttttaacgtctatgcctgggttccatcccagaccacttaaattagaatttctggagatagaaaagacagtatttttttaaagctctccaaatattcagatatgcagccaagggggaaaaccaccaaattagatggtttgtgaggtaattatcaattcagatattctataaatatatatgtatataatgtatatataaagaattatccaaaacttaaaaatttagaaattgctacataaaagaggcaaaactacttagtcaattttggatgcatgtttctattacagaactttgaattatggtccatactggtctacgtcacaggggcttctaaaaaaaaaaaaacctaaagacttaatgccatcctgatgtacataaactagtacttatttgtgaataaagaaaaaagtaggtaacttcttctgacaaggtaatcaattccttacttttaaaagaaaagtgtccatgtcaagtatttgtaaaatgtcaaatgttccttagttttgaaagtctaaggttttggcatggcgtttgttcgcttttaaagagcatttctttccttttttttttttaataaagttttatttttccaaatgtacagttggttggacctattcatgcatcttcaccagcagctgcagcatctccgcccttggtatttctggtgtaaattactttagctctgtgctttgaaaccagtttgataagtcctttactaaggagctcctgaagggctgccctggccagggagcctcgaatcttcagtctctcagagaccacagctggggttataagtttataattgggaacttccttacagagtttgtcataggtagctttgtcaaacaagactaagttattgagcttgtcccgaactttgcctttggaccacttcttctttttggccttgcccccggatttgttaactgggtctttgtctttcttggccgactttccagcatccttcttcttgtcatccttgggtggcattgtgaagctcggacagcagcagcagacaccgcagcctcgctgagatgtcggacaaaaaggactaaagagcatttcaataagactgatctctaatctacttactgaactgcttatttccagaaattagcaaactcaaaaagagatttaaacacatgaagaaaaataaatgaatctcaatacagaaacaaaatattttcctagagaagccagataatcagtaatgattagggtgacaatagtctcagtttgcccagggcaatcctgatgtgcacctgttattccagagtaattattaatagtgttccctttcactcttacatattttctgatgtaggtaagaaattatatggtaactctacttttgatgctaacaataataaacgagttgtatctcttcattagagcagatacaaagatccatgcttggaaatatattaacgatgaacaatgaggccgggtgcagtggctgacgcctgtaatctcagcactttgggaggcagaggcgggcagataacctgagatcgggagttcaagcccagcctggccaacatggcaaaacctcatctctactaaaaatacaaaaattagccaggtgttgcggcgtgcgcctgtagtcccagctacttgggaggctgaggcaggataatcgcttgaacccgggaggcagaggttgcagtgagccgagattgtgtcgctgcactccagcctgggcaatagagcgagactccatctcaacaacatccacaacaacaaaaaacaaacaaacaaacgaacaaacaaaaacaatgtatcctcacaattaggaaccaaatctttaccagcagtgcataattggtaatcagtcttagtctgtggtgtgggaggcggagctaaatcatgcagtagaggcaacaattaatgttttcacaaagggatgtcaagagatatttaaagatagatgctagaaatccagttggaattgttggtaatgggagcagaagagtttgggtgggaatcagaaatgacttgctaagacgctgggaggaaagcagatccaaagaccagggtcccagggaccaattctgatgaggaacaataaggggagggaaaaaccccagacaggagccagggagggtctggtatagaacaattgtgcgaagaaacttctggctgttttctccagctttttattgacctaatctcaccacaaggatgtcactcagagaattaaattcctggcacttttgtaatttctacaaaaaaaaaattaaatgaagtctattctggcagattttgttaattcagacttttaattaattcaaactgctcaattacttaaaaaaaattttttttcaagtcagtaagcctgactttcaaagaaaaccaatcaaatggtttttgaagataattatcctggactagtgttatttgatcttctaagattttcatgtgttaggtggaaaattaaagtctgcaaggaacacaaagataaagtgtcagatcagtcacatcaatcctgcccagggcaatactgatgtgcataatcagtcaatgggggaacaaatgtcactgtcacatcttcatgtaaaagaaggaatgtgacagcattctaaaagtgagttataatacttattcattcaacaaatgtttactcatcttctattatgtacatggcagcatgcttacgtggcaaattacgggtgtttgtgaaaacgtgaaaaatgaactacgacagcaataaataggtatataatggtaatggaaagacacctcatggcatccttgatctattcattctgagaatggttcattacttatggctcctaaaaaaggcatggacttaatcactaagttagtaatctatgacccctcaaaagcagagcaacacgtcaagctcttggctttccatgtgctgggttcagatcctcaaaagtctcagcttcatttcttatcctagggtttaataagccatccccattcccttccaataaattcttcatttacttaaattaatttcagtggatttatgtttgttgcaaataaagaccttaagacagataacaagggtgaatttgatattttaatataagaaagtaacaattaatagtgttccctttcactctcacacattttctgatgtaggtaagaaattatatggtaactctaccattgatgctaacaataataaatgagttattattaatatttggtataattccagtgaagaatatgacaactaaagagaatttcttctggaaatgaatggattaaatataaaaggaagggggaaagcccagtgatacataagatataatcttaatgggaattcttaaacttgtcaccaggagcatagtgaagaccatttgggttaagacaaagtgagagagaaacagagttaatcattatagaagaatgctacagcctattcaatcaaataaaaattacagataattaattcatttttaaaatatactggcagccctgagttttcataatgacatatttatactcctaaatttactttaatacttgaatttggacattcatccatgaactttttaaaatttttaatttaagttccaggatacatgcgcaggatgtgtgggtttgttacacaggtaaacttgtgccatggtggtttactgcacctgtgaacccaccacctaagtattaagctatccatgaacttttgaaaaatgtttcaagctatcattgggtgaaattggccattggttggccaaaacagcttagttttaacaatgtagccacctttgaccttaatacagtgtatatgcaattatgagtatctattatatctctgtagttattttctaaaatatgagtgtggaataaaagggtgaacatattaatgctactaataaagaatatattttcctaaacttattacaattaaaaccaagattgaggtcattaggtatgtcaaaagtagcccatcccagcctgggcaacatagtgagaccctgtttctgcaaaaaattaaaaattagcctggggtggtggcacatgcctgtagtcccagttaccctggaaggtgaggtaggaggatcacttgaacccaggaggtcaagcctgcagtgagctgtgatcataccactgcactccagcataagtgacagagtgaaatcctgtctgaaaacaaaaatagcagagcctttgccatcaactgaggtcattggggtcaagacgccaaactgatgcttggttataaaggaacaaactaatattaaagaaattgaattaaaaagtagaacatcatcaacttttattttatcttttctttcactctgtcatccaggctggagtgcagtggtgcaatcatagctcactgcagcttcaacctcccaggctcaagcaatcctcccacctcagcctcccaagtagctgagactacaggaatgcacctccatgcccatttgcttttttttgtagagatagggtcttaccattgatcaggctggtctcgaacttctgggcttaaccaatcctctcatctcagcctcccaaagtgcttggattacagatgtcaaccactatgtcctgtcaacttttgtcttttctaaaagttgtggtataattaaggattctttattcttctggaaacagagtcctccattataatgcctaagtctacgattcaatatgtgtggatctgatttcctgcacagtcttggggacattcatgtactaaatataatggactgcttctatgacaaaactggcacagaggtaagctatatgttcatgggaaactctcacaacatttactagaagtctttgcagctcaaagtaaagtagttaaaaactgttttacttaccttactgacaatatcatctctgaaatgatagcagatacagcaaagagactgctatttttggaccaatttctgtcttacaaggaagaactgaatggttaccatgtcatcttggaatttgtaataagaaagaaaatatagggcagaggctggcatgtgctgaagatgttaagaaagcagatgtcaagaacttcaaaggaaaggaaggagctatagcacagagggtaaaagctcagactatagactcaagaaacatataagtttgaatcccaggtgcgagacttaccagttgtgtgacattgagcaagatatttaacctctttaagtctcagagttttcctttgtaaagcaaaggaaagtgcctaggaaaatcacttaacctaagcttgttgttttcacttggaaaaatgaaggaagtaatagtatataccatgtaggtttgttgggaatattaactaagaaaatgcacataaaatacctagcactgagtttaacaaaaagtgaacatttttaaagacacacacacacacacacacacacacacacacacacacacattatttacagtatttcatggactctaaaattctaagaaagaagtaagaaattcatgaaagaaactagtctgcctagctccgatttaaaataaatataaagtgaaataaaggaggatacaactaataacacaaaaggatatcattgctattattatcttctaagaataaagttttaaaaagctattgctcagaaagaaatgaggttggccgggcacagtggctcacacctgtaatcctgtacagtgagccgggcacagtggctcacacctgtactttgggaggctgaggcaggtgtattaccggagtccaggagttcgagaccagcatgggtaacatggcaaaactctgtctctataaataacataaaaattagctgggcttggtggtgtgtgcctgtagttgcagctactatggaggctgaggtggaaggatcgctttgagcccaagaggccaaggctgcagtaagctgagatcgcaccactgcactccagcctgcgtgacagagtgagaccctgcctcaaaaggaaagagagtgagaaaggagggggacagggagggagggagggagacggggagagaaaaagaaagtaaaagattatatttctcaagacaaaatgatttcctcagcattcaaatacttcttgggaacatctatgcataattaccagatgaaaagaaggcaaggctgcataatttctatttgaggtctacattttccagcaagaatggtcctcaactggctatggaagaagaagccaggcagagtgtatgtatcaacaggcgtatgttaacagagagaaagggaagacacagttcctactttacatggattcaggtctccagacctctacactaggtggtatctcaagactttttgcaggataataaatgcaattgtttggaataaaaagatttgttggaacaatgaagatctgaaattattccgtcaaagaagcatatataaagatagagatatgtttatttaaataaattggccatctagattcttcatggattttattgtgctttataaagcacacatagtttactttgatgcattcttatgtagaatatttaattatttaagccaaataagatgtttctaaagccagtcaaccattagtagttattatccattacaaaaatttgctccatcattcttaggactgacaaggaggtcagtgaaactaattcttaatcatccaacaaggttttgagtacttattatgtgccaagcgaactgggaatataaaaaatgatcccttttttatatggggaggtacccaactatgtgagcaggttggagttcaaaacatagtttgacatactaagcataggggcaagaaaactgctgcaggaacacaaagataaattctgagtcaaaagataaaagaaaaggaaggttgtaggtagggttgatagaaaaaccaacaagttatatggcaccacaaatcagaatgggcctccaacaaagcagaacacacttgggttgtaagtactcagtaaaggaatacttacaggtgctagctgaaagctagccctagttagaggggaggcctcaaaagagtaacaaaattttgataagtgtagagtggagggttgggagggactctaatttgagggaagaaaatagaccaaaaaaagtattgcataatatgcaaccaaggacttcaagttttttgataggttgtcatggctgatccacaagatttgcataaagatgtacgagatgtggctgaaaaagctattgaggatcattagtaactttgagtaccagaataagagtttgaatttaattacataataaccacaataatagctatgatttattgagcacatactatgtaacataatctttacatgcattatctcatttaattctcacaataaccctataaggaagggaaaattataatctctgctttacaaactgaggcttaaagatgtttattcactgcccatgttcataaagttagttaagtgttggaatttaaattcaaatccatagctctctaaatcaaaaactcgtagcccaaatgacaaagctatactcccttgacagtggagaaaactgggagcaatgagaatttttaaagggggagatataatcaaaactacattctataagacagaatacagtggatataggggcagtggatttcctggagaagtgaaaaattgaaaatgacaagactagttagaaagttattagttcaggtgagagacatgaagacataaatgagggccatagtaatagagaaaaggggatagataaagacactggaaggggagaatgaagagaacttaatgtgttagttttctatgctgcatagcaagctaatgcaagtgtagtcagttaaagcaacatacatttgctatctcacagtttgtgggttgagttcaggtgtggcttagctaggtgtctgctcaggtctcacaaggctgcagtaaaggtttcagttgggttacattcctatctgaaggtttgactagggaagaatctgcttccaagcttaattgggttgttggcagaattcatttttttttgtagttatatgactgacttccccatttttcttggtacttactggctggaaaccacctcttagctcctagaggtcactctcatattctcaccgcatgctctttcttctgatcacattacagtttatttcttcagaaccagcaagagtacatctgctactccaaatgtctggactcaggaaggctaaatccctgttttaaagggctcatctgattaggtcaggcccacctaggataatccactttgattaagtcaaaatcaagtgactagggaccttaattccatctgtgaaatccctttgcctttgccatataatgtaacctaatcgctaaagtgacatcatcatattcataggtcccacctacgcttaaagggaagaaattatatagaaagtgttaaaccaggttgcaggaatcttggggaccatcttagaattctgcctaccacatttaacagctggtttgatataaagagaagacaaaaataagtcaaagtttttagcctgagtaatttagaggatagtgataatattaactgagatatgaactgagatatgacacataagaggaaaagagatttaatgagaaagattatgaatcttgcttatgagtattcatcttgcagtaacagtggtacaaccatttatcctaaaccaattccatccatttgtttcaacagtacctaatgtttaattaaatggtgtggagaagaggggtttcttacatctgaaagtaattctatcataatgtacataattatttttaaatgttacaaatggccatgaacttgagaaacaattagtaatttattatgttgtagattcatgtcttcttcctttaatccagcaaccagtcacagagatttttttttagttgttttgataaatgctcctttcaagctccgttatttctgagaaatagccaaacatctttttcctccaggaatgtttattctaaaatacacccagtaatagctgaatgagttgttaggcaagtagataagtgaaatacccaaaataaccaaggcaatattagggttagtactaatataaattagaataaataatctaaactctcattttaaactatctgaattatcccatggcttttgggttaaggcagatcacacattccatggtacacacggtaaaatgcagaacgctattattgcttggaaaagtgtagaaaataaacatttactgggtgtcttcctaatgccaagccttatgctaaaactttcacatatgctatgctatctcatttcattctaacaactctgaaatagggataatattagcctcatttttttaaatagataaggcagttgaggctgagaagttaaacattttacccaagctaagaggtaggaatggccaggtttccaacctaaatatagcttattcttcatgccttattcttttcactattattctctcttcaatcctcagattagttgtaacttcctctaagaagccttctgtaaccaccctctgggacttccaagaccatgccagatgtacattcccaccaccatgttttcccatagcaaccaattagtgtcaaagttaagtgcttgagttctaggactgcacaaacaggattcaaattccacaggccaggattcaaattccagctttacacttgctaagtttatgaacttgcaaaattgaccaagcctcaagctttttcagtaaaacaggaataaaattactacctagctcaagggatagttgagagaatgacctaagaaatacatccctattattgttataattataatcagaagatgtattctacttattacactgagttgcaattgcctgttcacttttctgtattccatactggaatgtaaaatcatccctgaaacacaggctgcatgtcgttagttgtgatttccccagagcctagcacagtgcctatctggcacatggcaagcacttgaaaacctctgctgaaggaaggaatgaagaaaggaagggagggtgggtcggaggaagatatgacacttcccattaaatggatgttcttgcttttccctggcatagtctcaacaaaggcatgagaatgcatgcagatgaaaataaaccattacttctcttgattatatttaaggatcagaaaccttagaaagtggagtttgttatgacatccttaatgccaagtatgatctagaactcctaatagttaaatggtgcctggaaaaggacaaagtccaggcaggctttcagtaagtgaacattctctctctacgagatatgagcatcacccttacccccatagcctgagaataatgtgctaaatgtgaatgacttccacataacttcaaagccacacacaggacagtccctcctcccagccaaccactaactccagggctgttatgaaaaatgcccaaggctcccatttttttttaatttatctcagctatgcctatttccactttctcatcttcagctggtaacagactttattcttctggtggaaagagcacatttagatttaactgtatattatttgcacccatttgaaaccctacatacagggagaacaaaatatccaaaaaagtgtatttaattcatatagggtcaaacagtttgggcactcataggccatgataataaaagaggattcttcatatttttcacatttcttataggcaaagtgacaggtaaaaacgcaaattaggaagaagtaaccacagagaagagagatgaatataaagacaaagaactctattcatttgtgatgcaaaaatccattattaggaacaaatcttctccgacagtcttgtggatgctgcataattcagagagcccaactgtacttaggaagtgatggttaaatattgaaaatctgattggaagacggaggtggcttcctgctctttcctgtaattgccttgtctgatttttctcatgaacaatgtatcactggaatttttgactatgatagagtgcacctcctgagagttctgccctgaaggctaggactccaactctgcaggagctatctgatggagaacttcatatatctcctctgcacctgtcattcctcttcccttgtgaagccccagggtgttgtgtggaactcaccagcctctccccagcccatctcccttcaccctaccacctcatgcagcctaatgagttggagagacacagccagcccaggcttcttattacaatcacattccattttcttcaaataaaccctgctcagaacaaaggcttctgggcacagcctttgttgtggatgtttaaatcataacattttggtgggatccagaatatcatgattattgctttcaagtaatttgtaatatacatgcttagcagatgatgtaaccgcatattgctgctgtgctttttgctccattgcttcatgcggcgtagttttctacgacagtatactccacaaatgcaaacagatgtatttcccatgaccttaaccccaacaaacaaagttgttttatgtatttcccggttcacatttttgagggcttcaaaatgcagtctcctaaggtctttcaatacttgtgcttttcatgcttttaaccattttaggtatttcaggaatgtaataacactaatgagatatcagagcaagaaaaataacaaaaagcatgtagtctccaaccctaaaaagtttattttaaacatgttggtttcctttaagctttgctttcaattaactgactaaaatgatagaaaagagctttgtgaagttaaaaatattaacaaaaagaacacccaagagaaaaacatctagagtaaggtgatttgaaatactgatgtgaaaatctaccaaaaagaattcataacacattttgagatcactgaacaacgaagtgggatttaacctaaaagagttaaaatggtatataaggtctattaaaatcatcccacctcaaatgttatagttatctcagttagccatttcttgttttgtgcttttttattttagggtttaaggagacaaaaataattttgaatagctaggagtgtcccttatttgtgcctgctgacataggcatttttctaagggatctttaccatgtggtgtagtggtttaatcacactggctttgaagtcagacaggcttgaggctagaacattttttaaaatttcttacaactgattttttaaaattataactcttactttgaaatagttttagatgcaaaagtaattccatatatagtacagagaattttcatgtacccctcattcagcctttcctaatgataatatcttgcataaccatagaacgttgtcaaaagtaagaaactgacattgttacatacaatacaataataatgtgtatcacaacagtacaatacattatttggatttcaccagattttgtgtggacttcttttgggggtatgtgcatgtgtatatcgttctatgattggtgtaaccatcaccagtcagtatacagaactgttttatcaccacaaagaaactcccttgagttacaccttaatgatcatatcctacccccaatcctaactcctggcaatcatagatctatgcagcattatgattttgccacatcaataatattatataaatggaatcatacaatatgcaaccttttgagactggcctctttcactatgcataactcttttgagatccatccaagatgttacatgaaccagttaattccatttaatttttgagcagtattctatagtatagatggcccacagtttgtttttgtattcatcagttgtaggacatttgggttgtttccagtgttgaccggtacagtataaagctgctataaacattcatgtacaggtttttgtgtgaacataacttttcatttttctaagataaacactgatgaaagagattgctgggtcctatggtgtgtgtatgtttataggaaactgccaaactattttccaaattggctatgccatttaacattcctcatcagcacttggtactatcagtaatttttattttggttattctaataggtgtggtagcacatatagctttaattcgcattttcctagaggctattttttcgtatactgatttgccaccagtatgtcatctttagaaaagtgtctgtttaagattttgaccatattctaattgcattgtttgttttcttactactgaatttagagagtcctttatatattctggatataagtcctttattaggtaagtaatttgcaagtattttctctcagtctgcagcttgttttttcatctttgtagcaggtattttacagagcaaaatactgtaattttgatgaagtttaatttaccagttttgtttccttgttaatgcagggcagagatggaagtcagggtttcacacacaggctccaccagagagggcagggcattactgcaggacaggggttcagggtagttatggactgaattatatcccccaaaattcatatgttgaagccctaaccccccatgtgattttcttgtggctttttttaaacttgactatatagatatccaaaatgaaggcaaaagaaatgaaactatcttatgaaaagtgaaaataatcatattaggaatataggatgaaatacttggaaaatattttttatctggtcttcctgccagccataggaaaaacgaaaactcattggttatctaattctcctcctttctttttgcttctttttttcctccttttctacctcctggggtactgataaaattttctatactcctttttgctctgtgaattcagaagctatggagaatattactctcattttaatggttattcttaagttttaaaatgataaaatatgtatttaaataagttttaaaaatatatactttataattttaaaactgtatccttttttcagtgtttttttttggagagtataaagtcattcagcatagtatctctatcttcctctcaaataggacaaagatgttaacacattaagtatccagtgaagactcaccttatcttctattattgtggtttagcaatttgtttcactttttaattgaaaaaaaaaaaaccttatccacttaattttttttgagtttccattcaactttttaaaaaattttttcatttccataggttattggggaacagatggtgtttggttacatgagcaagttctttagtggtgatttgtgagattttggtgcacccatcaccagagtagtatacactgaacccaatttgtactcgtttatccctcagacccttctcaccctttccccaggtccccaaattttattgtgtcaattcttatgcctttgcattctcatagcttagctgccacttatgagtgagaacatatgatgtttgcctctccattcctgagttactccaataatggtctccagtcccatccaggttgctgcagatgccattaattcattcctttttgggctgagtagtattccattttatatatatatgtatgtatatatcacagttaccacatatatatccatatatatatctagatactagatataaagatatatctagatactagatataaagatatatctagatactagatataaagatatatctagatactagatataaagatatatctagatactagatataaagatatatctagatactagatataaagatatatctagatactagatataaagatatatctagatactagatataaagatatatctagatactagatataaagatatatctagatactagatataaagatatatctagatactagatataaagatatatctagatactagatataaagatatatctagatactagatataaagatatatctagatactagatataaagatatatctagatactagatataaagatatatctagatactagatataaagatatatctagatactagatataaagatatatctagatactagatataaagatatatctagatactagatataaagatatatctagatactagatataaagatatatctagatactagatataaagatatatctagatactagatataaatatagatatatctagatactagatataaatatagatatatctagatactagatataaatatagatatatctagatactagatataaatatagatatatctagatactagatataaatatagaaatatctagatactagatataaatatagatatatctagatatatatatctcacagtttctttatctactcattgattggtgggcatttgggttggcttacatttttgcaattgtgaactgtgctgctataaacatgtgtgtgcaagtatcttttttcgtataattacttattttcctttgggtagataaccattagttatccacttaatttttaagtttctctacttggttttgtttcttgcatctcagtcttcctccttgagttcaattttcttcttgctaaagtacatcctttatagttcattccataatagtttgtgagtggaaaagtctcctaatttttgtatgtgaaaaaatgttttattttactagcagtgatcacaagttaagactggaatcaaattcatgtaacacaataggatttaatctatcattaaattattcagatttatagaagcatagaagtcaagaaaaacagccttattactacttagaggtcctaaaagtatatgtatgcacagcttcctttatctccccttacctacacagcatgtgtacagaaaatggggatgacttcaacacatatatggtttcacttagcacagagaagctactgccttagtttcccacctctcttatatattgttcctgtcatataggcccaaaacttgtaggcccacatagaataatctcagtccagatatgctctctctaatcaggaatttcagagtaaacaagacagatcattagctcttagcatgcagtattccatatttatctttttgggttttttttcttgagacgtagtttcactcttgtcacccaggttggagtacaatggtgtgatctcggctcactgcaacctctgcctcccaggttcaagggattctcctgagtagctgggtatagatgcctgccaccatgcccagcacatttttatatttttagtagagatagggtttcgcaatgttggccaggctggtctcgaactcctgacctctagtgatccacctgcctcggcctcccacagtgctcggattacagacatgagccaccgtgcctggccttccatatttatgttaactcagtaagcatccaaggaaatgatgttgtgagaaccgatgtttccttcccgggaaagccttgttatgtttaggtacctggcctgatgtaaccttttacacataggtggttttgccaggcatataattctagattgacagtggctttccctcagcaatttgtagatattgctctattggacagttgctaattggaagtcaactgtctgctagtggccatgcttttttttttttttttttttttttttttgagacggtgtttcattcttgttgcccaggctggagtgcaatggcaccatctcagctcgccacaacctcctcctcccaggttcaagcaattctcctgcctcagcctccctagtagatggaattacaggcatgtgccaccatgcccggctaattttgtatttttattttgtatttttagtagagacagggtttctccatgttggtcaggctggtctcgaacgcccgatctcaggtgatccgcccgccttgggctcccaaagtgctgggataacaggcatgagccaccgcgcccggccaaggccattctttaagaatctgatttttccttcaaatagttttttgttttgctttgtgttttattgtggtaagaacatagcatgagatctactctctcaacaaatgtttatgtacaaaacacagtactgttaactacaggcacaatgttgtacacctgatctctagaacttattcatcttgcataactaaaactttataatattttctccttatcttcaagtttactaagatgtatctaagtatgcatttattttcattcatccttcttagaacctggattacatttgtcatctgagacttgtgtcttcaacactgaaaaatgcatagccaaagtctcttcaactgttgctacttcactcttttctctcttcttctggagcttctgctatacctttcacctcctcaatcctccttccctttctctgaactgctttttcataatgtctcaggtctatttttttgatttactaattctctctttgcttttgccttttcaaaagtttatgccatgttatttctctaatttttaataagctatttttagatctgcctgttatcatatcatttttgcatggttttgttttatattttcttagtcttcattatgaatgtttttcctttttatcttatctgtgaaagatcataaatgtcttattataaagcatttttcagattgtataattattttcacttcatctgagaaggaattgatgtcaataatttatcttcacagctatttttagcatttttttcttcattaattatggaatttagattttcaggtttgtcttgggtaggcggaagctttgtcaattatttaggcttttcttcctccatctctttcctccctttctggtgggttttcaatggccctcagccaaccctgttaggatcccaaattagaaatacatcttatattgttatatcagtgttcctgcctcattgggataattgtgacattatcactcgtcactgagccagaaggcagcttcacagaagctctggcttcaaaactgtagcttcatctttacttcctttcttgatattctggtagtattagacagcagttttttgtttttgttttttttaagcttccttttatgcagtggtactccacctcagaccctgatttcaaacaatgatccaatgtctggttgccacctgcttggcacttttagatcctgtcaccttgtgagtgctgaactcctaatcatctctgcctgcctacagtgctacagcccagcagacactcatctccagccctactgctttgcatttctgttcttttctagtcaaagacatatttagtttgttccttaaagtgttattgtattttaaattttctcttttgttattttatctatagttactattatccaaagaagagggatagctcagatgttgaaactttgtcttgaacagaactatagtagttctcattacccaatataagaagcatgctacttctttagaagttttttttttctcaaagacacattaagataatggaaaaatactttgggggtgattcttcagtagtaggcatctttttatcaatcctgcacaaaatcagaaagcacaggccgggcaccagtggctcacgcctgtaatcccagcactttgggaagcccaggcaggcggatcacgaggtcaagagattgagaccatcctggccaatattgtgaaaccccatctctactaaaaatacaaaaattagctggccctggtggtgcacacctatagtcccagctactcgggacgctgaggcaggagaatcacttgaacctaggaggaggaggttgcagtgagccgagattgcgccactgcactccagtctgggtgacagtgcgagactccgtctcaaaaaaaaaaagggaaaaaaatcagaaagcacattacttaaatgttattcactgatgacatttctaatggaattagagctgtggtccaaacgaatttttaacttgtagtccaaacttagagactgaatgattagctccaaatatctctcaaatatcactctttttagctgagcttcttggatagggctgaatatcagtcagtccaagattgagctctttagaggaagtgaagacgttgtgttgattgaaaagagatccatatgctttgggcatatgttttagactgtcaggtggcaaggctgacattccgttatgaaaatttaggagcctgacttgtattctcaccccagcagaaggccttcccacctccccagtgagccataacagtgcctgtgaaaaagctaaactttttattttaaaaaagcttcaaatcttctcaaagtcttggtagaaacctcatttgaggtcttccatagcataggaggaattttctaggaaccagaaggaagataccgacaagagaaaatcttagatcaggagtatcaaaaggaaaagacacatgtgatcctgattttcctctttatttagattggtgcatattcaacaaggaccttctgtgttcccatctcatcctcagttctgaggctactaaaatgatggtcattttgttcctgtccttgaaggattagatcagaacaggacaagaggcagagagacaagccaggaaatgactagtcattatgagacataaaaagactaaactaaggcagcaagaatgtagaagagataaggatttttaaaatgtatttaagagacagaatcctgatagattgtagagtaaggaaataggaagaatttataactccaagatgacttccacatcttttgcttgtgtgacaggattgattggtggggccattcattagcacaaaggatatgggaagaagaaaaggaaaaggagcaataagataaaggtttcaggttttagacagattgaaccttgagtgttttggtaacatccaggtggaggaattcagtggaagctggatatatgctagattctaggacagaaactaggaagttatcagcatatagggatatagaataaacaaagacagaaccctagagggaagactaaaacagagttatcttttctcattccatcaaaaattattaatcagttgagataagtgaataaaaatcaaagaattagcacttttaatataatgaagccccaggatacccacctactcttctttacctttggaattggcccagcacatctcaagtactgtaaaagaaccaagcaaactgtgagaatttggatttagagctatattcatttcctggaatacacaactgctagcagaaagttcagcctgacagagaaatcacagaacctctcacagaggtttctgcctataatatcagaaggcaatgcaagtccaagttagcagtatcttctattggtggacaaagacaagatacatggatcctaatactgaattcccctaattgcctcacagaggatagtcaagaggcagcagagccctagcaatcaggcaaaagtaggaaaatagaactctaatgctccagtggggttagaagaagacccagacaggaatcaggagaccacagaaacaaagaagcaaatccatgatcagacttctagtacctagagcctggcggctgagtgtcagagaagaggcatgaagcacctgatccattatcacgttttatcatttctacctcctcaatagttctcaaatccatcacctctctgcattttcactgttgttccttcggttcaggccaccatcacctcttctctgaattactggaacagcttcttatctggtctctgtctacagttttattttcccaccctgagtccactcttgtcactacaactggagtgacctttgaaaagtataaatctgatcatatcacccacttttcattttaaaacaattccttgaatgattttatggatgagataaagaactgagaatctttttctgtaaaattccagatagtaaatatttttgactttgtaggtcataccatctctgtcataacctcaactctgccagtgtagtataatagcagtcataaacaatatataaataaaataggtgttgctgggtttcagtgaaattttatttataaaaacaagtggatttggcccctgagttagtttgctgatccccggactagaggaagaaaggaattcctctatttctgttgggccatttgtactgaaatcctaggtatcaaaccctcagagaaatttcatcattgggagtaagcagcccttgtacaactggggaggctagaagagtgtagtaagagcaagtctgggctttccacaagcatatatgctggtcctcttacatcagctgcagctgtgggtgtagaagtgcagagatgatggctggagaagaggccagtctcagggaagtgacagagccaccctcaaccctcaggagattctgtcacagttccattccatgtagaaaacaaactatctcagcctttgagcccaacaatagcagtgctgacatgaccaatggaaatgaacaaacatagtaaggggttcaggagtggcgggaataaagaaaggtagtgatgggttcatgggaggtgggaatgaacaaagataggcacagaaaagcagtgaaccacaaggagaacagagcatggacaatagcatgaaactcagagaagaagagaagaggtggagaaactcaggtaggaagagcccaagggatctattccatccccatggaaatacccagaaatagctggatgatactttgagtggggtcaactttcaagccacaataatttgtagagcaaaaggagttgtaactgtatttgttgtcacagaccgataaggcaagaggcagaagggttatatgcataacagctaaaagctcccaggaattcaggagtacattgaaatgaatttgagttttattcatcataacatctatattcatttggaaagtagtagcacatgaaaatgcagaacatgttatttactcatactaagactggtgtgcaactaggtttatgtacttatgctaattttatgtcctcctttccccacctcccacctcacttgagaggctcaaagactggtaccatttggtgtcagcaaaggtccaaagaaatgcatgttgatcctatttagaaaggaaactgctggtgagtgtgagatttagctaaataagtaaaatgctagccctcaaaggcttcagaatctggcccctgctacatgtttagcctcatcttacaccagtgtccatattgcttttcctgctcttgctctacgggtctgctctgtgttcttaggaaccaccattctctctcattccccagggtcttgcaagtgctatttcctctacttggaatactgtcttccccacccatacacccccacctgtgcctaatatacttctagatatcctgcagatcagacagttctgttttagatctcagtggccttgcaggatagtaggaaaggccctgatctataagttgaaagaactcatttctggtcctagatcagcttccatctagctgtgtacttttgggttactttaccttctctgaaaattaacttattcagaaaaacagaactaaaaatatcaagtgtacccaatccaaagagtagtaagagaattatacaagacaataggaagggctttgagtagtataaggcactatatttggaaacctccacacaggcctttctgtcgctcaacctagagcttccctgtcagtctattcttcacattctcttttcctctttactgtagttaccagaaatccaacttgctttcctatcctgcaataattttcatcactcactcaatcccttgaaatcatgttgctcaagactggctgctctccctacccacaataatatttgatgacccaaagcacacatgttgtttgactgctaattaccaccaggaaacaaaactagcaaacttggtgtcattaaacccagagctttggaaatattttatacttctcttcttcatgttttacttttcaaaataactgacacacccttggacttctgccttctagctttcttctcaaatatgaaactcaacaaaacttccttttccttctgactctgatgttacccaaatccctgagaactcttccacaggaatgctcctcttcctagactaagaatgtcacccactaagaaaggtcgtctccttgtcttaggtacagtttgtaatttggaagcctccagcttaggtgactccatggagtctcagcccatacaaaactgacctgaaagaagagagaaaatacatggcccaagtgctgccattccccatgccaataaacacacacacacacacacacacacacacacacacacacactgccaaatgaacatagtgctctttccagctgattccaactcaacctccgagttctattcaatccaacccttcagccagcttcatcaatcaagagctggcaagtaagataaagccaattagttgcaaataccattgaggtagaacctttctctaaaagttcactcttaaaggactagggtaaccttttacataaaggttgtgccagaattggaaagtgcccacaaccctgtaatttacatgtactctggctccctgcagtgatactcagttcaggttgtagactcctttaataaaatattcattaaatggaacaattctcttctgcgtaaaaatttacaggctggaatggtccttatgaggtgatttggtccttcctctgaagcagttgtgtactttattttctgcaattgttatttaggtgctagaaaccaagacttttgtttccatcttcttccttgttggttgaaccagatttcatttgggtatttatagggttttctttgctctatttgggtagcatgcccattttgactggttggtccatgctccatccattgttcagtattttgaagatcattctctagttgttcatcctccatacagctatgtgctcaaaggaaggtgctccttctcattgccaaaagtgaatggcaatttgtccaagccaaagtgacctcattccccttgccagtgattggcttatgactctgtcttctgcatacagcatatagctccatcttggccaatgatatgggaggggaagtctagtgagaaaacttctcaagtaaatgtctttcatcttaaaagagagacgcaagggacttcacaataaagttggcagatcagattaaatgattaaatacatgtatttaccactggttcctctcaaaacaccactaaaataatagtattatttcctttaaggcataaatttgtaataatgaggaaaataggaggggagagaagaccaagaaaattttacaaagtaggaagcatacagacaagtagaactgacttgcagacccaagaaagctgaatgagctgaatgtaagccctccgtggagaaagctgagaagcaactcaatttcacaagaatgcaccaaagtcagccaaaatgatgagtacagcacataggaaagatagaacggaactgtatccctgatgacatcactgagacagcctaaaaccgtgctggtctccacacttcatgttatgtgagataataaatgtccctagtttacactgctttcagatgactatttttatttcttgcagcccaaatcatctaactgatacagactctcaagttctttaagaaaaaatgggaatagggtgcatggcatgaggtctgggaagacacgaattaaagcaggtctctcattagtcacatgagcattcttgctcatttttctctctcctgcgtctatccaacctccgctttctagtcataatttcctctgcttgttaatattacctgctacttttttcatttttatttttaatttttgtgggtacatattaggtttatggggtatataatgcatatatttatggggtgcatgagatactttgatacgggcatgcaatgcgtaataatcacatcgtggaaaatggagtacccatcccctcaactatttatccattgtgttacaaacaatcagttatactcttttagttatttataaatgtacaattaaattattgactatagtcaccctgttgtgttatcaaatagtaagtaggtcttatgtcttattgtttttattttgtgtgtgtgtgtgtgtgtgtccctgctacttttctaagcaaatggctagagacaactcccctctatttcatggcttcccttcaacttcagctcccattgttaaaatacattttctcttagagtaatttactgaaaaagtaaacaggataggtgcagttcattctttaatgtcaggctacatggtgtctctgaccagttttctaattggtttcccgtcattacaattcccatccctggtccaatcagcacatgttgtgggggaaagaaaggtgtatcagggttgtggtgatataaaactacttccctagactcacccactgtgggtaggaaggcgccatttcttcttagaataggctgtcgaacagactgacttaacctcaaagaactggttactttattgaaacatcgaaaaaaggaagaatatacaaacttctttaatggcccattccttctatgttaacctcacagcaaaggcattttaaagcctaaaccacaacttcttgctacaacaattttctcttgtggcctcactgaaaatgagatacagcaacttcctacaacttcatagtatccattctggaaatattatacccttgggtaatctcatctccaggcaaaagaattccatttccttacactatcattttaaggactaaggaagaaaatatctcacttatcacatttatacaacttatctccacagaatgaatgcatagattagtttttgttcaacagtaatgaaaggcactatgcaaataccaagggcaatattttaagttatggcatttttattcacagagtatgtattgaatataatttaaggatgcaaaatcttttgtccttgcattgatcataaaatacaaggtcatttcctgtgggggggccagaaatttatgatggatgatagaataatgtattagtatacatacagatatacagtacattatagagaaatatgcctggatagaattaatgtgcctttaagtgtgcataaactttacagtagcttaatgcatatgtatccatttctagataaagctaatgtgccatttgtgtacatatgtacacacacgtacacacacagagatttaagtgtgtatgtatgtgtgtacatatgctgagagagaaaaagaaagaatgtggcatgtctttacagacataaagacttaatgtatactacagacacattcacattataatgtatctttaatacaattttttgggggggacagggtctcactctgttgcctaggctggagtgcagtggcatgatcatagctcactgtagcctcgacttccaggctcaagcaatcatctcacctccaaatagctgggactataggcatgcaccactatgccaggctaatttttgtattttttgtagagacagggtttcaccatgttgcccagactggtcttaaactcctcaagtgttccacctgtctcaccctcctaaagtgctaggactacaggcatgagccaccactattggccttttaatacatattttaatgtgcctttaattctaaccctatggcagcccagcaaaaatataaaattggcctagcaagttaggcttcttcaagtataggaattttctcattagtagcctatatgttcagtctatggtcagtaaaagctcacgtttcttgagtacttaccaaatgctagaaatggtgctacaggattttcatttcatttaaggatgaaccaaggaagatagtctctatacaaacatggtcaaatcttcttacatgttcttctcacattttgtctttcctcaccattcaagctgccatcatcccaggcagacctggtcaccttacacctgggcttggcaattgctttgttcttctatcttcttttctccagcattttcctctgccacttcttccttttctacaataaatgctttatgggatctccttccatcagcctgtgagttttgagaggcagaaattatcttcctccctacagttctccccagtttcatcacaagagacagcgttggtgggaggcccagagggaaatcactgcgagaacattacctgggcaaactaaattctacctttcccactccgtgtattcttggataaactgtggcaagcttcatcaactgggaaatggcacaggtaagcagatgacctcttaactttatatgtcaacttaactggggtaagagacgcccagatagctggcaacacattatttatgggtgtatctctgagggtgtttccagaagagattagcatctgaattggtagactaggtaaagaagatcacactcacctatgtgggtgggcattatccattccattgagggcccacataaaacaaaaaggcagaatcaggacaaattatctctttctttagctgggacatccatcttctcctgcccttggacagctccttgttctcaggccttcagactctaggactgactaacatcagccaccaccccaaccaaccaccctagttctcaggcctttggacttagactgggagttacatcatcggttctttggttcttaggcctctgtacttaaaactgaattataccactggcttttattggttctctagtcagccctctgtatctgtgggttccaaatctgtagattcaaccaattgcaaaccaaaaatattcagaaaaaaatggatggttgcatctgtactgaacatatacagacttttgtcacatcattattccctaagcaatacaatattagatagtcagtaatctagagatgacttaaagtatatgggaggattatgtgggttatatgcagattctacataatttcacataaaggacttgagcatcttcagattttggtatccactagagggtcctgaaaccaataccccacagataccaagggatgactacacacacatacatacacacacacacacacacacacacaccaccaccacatagtacatattggttctgtttctctggagaacgttggctaatacagattttggtattgagattggctctggagaaacagattttcaaaagtgagggttttttaaaaaaaaaatcattctgcagtttctgaaattggctttctaatctgacacagtttaaagatgataatgattccttttccagtagtaaagaggcaaacagttcgtggcacaaactgtagatatatacaaaatatggatattcctaatcaaacacttctaagatgcaaggagcttagtaactctgtatatattagctttgaacacttttggaaaactaaggaatatgacactgaatcactggaaaaagtagtttacaaaaaaaaaaatgagctaagggattcaaattcccacctcaagtgctacataaatgacctaagagcttataggtgtgccctgagggacagcattatctcctgcagtgcagggctaaaattgctgaaaatcaaatgtaggatctcatcctgtaattggctgaattacaacacaagtgaaactctcagcctcacaaggtatatactgtaaagtgaggacactgtgaaaaaatgggatcttgcaagttgggatgggggtatgtgggaagactctaaagaagctggggacactgagtccctaaactgtgattatctattttggcagtgaaagaagtctccccaccctcagtagagcttaggtcccacccccagagtagttggtctccctaatcccagcaaaagtggcatccctaataccagcagaaatgaccccctactcccagtgtcaacagcatccccacctccagtaggagccatctcctcattcacattggtctgagtcatttacctccatctgaagggattagccctgcattgcctgaggaatggcctcctctgaggcagctgccatgcaagacactgctgattctccacaagagctacctccaacactcctcttttcttctagacaaataactagactcaagaccctagcaggcccttaaaggggaagtacaaagtgtggcccatgaggaggcatgctatattccaaaagaactacctaacctttctaatttatacaagcagaaatctaggaaacatgtctgggaattgatattaagggtgtgggataatgaaggaaggaacataatgttggatcaggtcaaatttattgatgtgggcccactaagcagagattctgcatttaatattacagcttgggagttaaggctctaataatgtggttgattggttggctgaaacacaatcaaaagatggcccattgtaagcaaattggaaatgtcggctctccctaggtttaatgtagaggaagggattcacaggcttagggagattagaaagagtggatttataatttatgatatattccccaacactgagaagatctagaagacacacttttatcaatactttaagaaataaattactaaaggaagccccagtattcttgaagaactctgtgattactctttgtaggccagaccttatagtgggaaccacagccacttaattggaaaatctaaatgcaatgggagtaattggatccagagtggtgaggccaagtggcagcattccactgccaaaggcgaggtgggcgtagttactgtgttgggtggcagagtcaaagcagcaattagaatagtctgactcacacagatctgtggcgtgggctagttaatcatggtgttcctagaagtgaaatagatagaaagcctattaaatttttacttgatctgtataaacagaaaagttccaggtcaaatgaaccaaagtttaaattgaatcataaaattagagagtcagagcccctcaatcaattttcagacttgagccagtttacagacccagaagccctcaaatgaaaatttatactgtgaatctttctcccagctttctccgaaaggacctacagaattttagcagggtaactgtgcaccagggtaaaacatataatcagacctttgggggactactgaacactagatttgaactgacactgattccaggaaacccaaaatgtcactgtagcctctcattcagaggaggggcttatataggtcaggtgatcaatggaagttttagctcaagttcatctcacaataggtgtcagaatccatcctgtagttatttcccagttccagaagaaataattggaatgacatacttagccactggcagaatctccacattggttccttgacttgtggactgggggctatgatgaagagggccaaggagaagcagttcctagaattgcttccacctcaaaaaatagtaaataaaaagcaatactgcattcctggagggactgcagagattagtgctaccgttaaggacttgaaagatgcaggggtggcgattcccatcacattcccattcaacactcctatttggtctatgcagaagacagatggagcttggagaataacagtggattatggtaagcttaaccaagtggtgactacaattgcagctgctgtactagatttagtttcactgcttgagcaaagtaacacaccccttggtacctggtatgtagctatcatctggcagatgcccccttctccatctctgtcaataaggcccaccagaagcagttttctttcagctggcaaggccagcaatacaccttcattttcctacctcagggttatattaactctccagttatatgtcataatttagacaatgtcaagcacacagggatcttgatcaccttccccttccacaagacatcatactggttcattacgttgatgacattatgctgattggacctagtgagcaaaaagtagcaaccgctttagatttgattggtaatcatttacgtgttacagggtgggatataaatccaattaaagtttaggtgtgatctatctacctcagttaaatttctaggggtctatggtgtgggcatgttgaaatagcccttccaaggagaaggctaagttgttgcacctggcctctaaccaaaaaaaaaaaaggcacaatggctagcgggcctatgtggattttggaggcaatgcatttcttatttaagcatgttattctggcccatttaccaactgactcaaaaaaaactactagttttgagtaggtcccagaacaggaaaaggctctgcaacagatccaggagactacgtaagctgctctgccacttaggccatatgatccagcagatccaatggtacttgaggtgtcaatggcagacagggatgctgtttagatcctttggcaagctcccataggtgaattgcagtttaagccttcaggattttagagcaaagctatgccatcatctgcaggtaatgattcttcttttgagagacagctctgggcctgctactgggctttagtggaaactgaatacttgaccaggagtcaacaagttactacgcaacctgagctgcctatcatgaactgggtattatctgacccatcaaatcataaaattgggcatgcacagcaacactctatcatcaagtggaagtggtatatatgtaattgggcccaagcaagccctgaagacacaaagaagtcacatcaagtgatccatggtcctcattcctgctactgccttctcttcttccagctgcacccatggctccatggggagttccccacagtcagttgacagaggaagtgaagacttggctatggtttacagatggttctgtgtgatatacaggcactacccaagagtggacagctgtagcactataacatctctctgggacatctctgaaaggcagtgttgaagggatattctcccagtgggcagaatttcaggcagtgcacttggttgtgcactttgcttaaaaggaaaaatgtccagacatgtgattatatactgattgaagaactatagtcaatggtttggctggatggtcaggaacttggaaggtacataattagaaaattggtgacaagaaatttggggaagagatatatggatagatctctttgagcaaaaaatatgaagatatttgtagcccacaagaatgctcaccaaaaggtgacttcggccaaagggtattttaatagtcaagtgaataggatgacctgttctgtggatactaatcagcctctttcccttgctactcctgtcatcacgcagtgggctcatgaacaaagtggccatggtggcagggatggaggtcatgaatgaacttagcaacatggacttccgctcacctaggctgaccttgttatggccagtgctaagtgcctaatgtgtcagcagcagggaccaacacagagcctccagtatggcaccattctccagggtaattagccagctacctggtggcagattcattacactgaccacttctaccatggaaggagcagcattttgtccttactggaatagacaacagtgcatatggattttccttccctgcacacaaaactactgtccatggatttacaaaatgccttatccaccatcatggtattctaccaggcattacttctgatcacagcaaaagaattgcagcaatgggcccacactcagggaattcactggtgttaccttgttccctaccatcctgaagcagctgtcttgataaaatggtggaatggccttttgagactcacgttacagctccagctaggtgcagtgcttgggcatggtcctccataaggctccatatactttgaatcagcaaccaatatatggtgctgtttctcccatagccagaatcacaggtccaggaatcaaggggtgaacatggttgtggcaacattcactattatccctggagacacactggcaaaatttttgcttcttgtttccatgactttatgctctactggcctagaggtcatagttctagagggaagactgcttccaccaggagatacaacaatgactccattgaactggaagttaagactgccacccaaccatgttgggctcctaatgcctctatgtcaataagcaaagaagggagttacagtgttggctggagtgattgatccaaaccaccaaaattgaactactcctaaacaatggaggtaaagaagagtatgtgtggaatacagatttcttaaagagtttctgagtattgccatgtcctgtgattaaggtcaataggaactacaacaacccagtccaggcaaaactatgaatggcccagacccttcaagaataaaggtttgggtcacctttatcctgtggtaaagaaccacaaccagctgaggtgcttgctgaaagcagtgagaatacagaatggtagtagaagaaggtccttataaatatcagcttacaaccatgtaaccagttacagaaatgagaactgtaattgtcctgcatatattctccttctgttataaatatatttgtgcatgtgtgtatgtgtaaagaaaatatctttgtattctttcctattcccttatcatagtaacaaaagatatattgactttacatccatatttaaatggtgttaattttacatcatagtatttaagttacaggattccaggagaagagaaaacatcactcaagaattttacctcctctttgagggaagggattagtgtgtttttggttgtacacaggttagttgtatgatgttacatgggattttgaccttgttattgtatttacttggagattaagtatggtttaaagagatatgcataagtgcggacttgacaaggggttagtgaacttgtgatgattaattttatgtgttaacttgattgggctaaaggatgccaagatagttggtaaaacattatttctgggtgtgtctgtgagagtgtttccagaagagattagcatttgaattgatagggtaagaataatcactttcactaattcttacctcacaggataagaataatcacccccattaaggttcccaatctgttgagggcacacatagaactaaaaggtggagaaaggaagaatttgccctcttcttgagctgggatatccattttctcctgcccttcgacatcagagcgcctggttctcaggtcttcagactccaggactagcatcagccacctcatcctggttctcaggcctttggacatggaccaaactgcaccactggcgtttctggttctccagtttgcaaagaaacaatcatggatcttctgggcctccaattagttctggttctctggagaatcctgactaatacaatcaccaaggctcatcttcagccatcgatttttccctttccgaagttcaaccagtctccactattagagatgacagtgatgtgggaggtgaggcttcagaatgactcctccagctgtcaccagaggcccagctccttctaggtgcatctttcccttggaaagaggtgtcataggggctttctggttcagttcagtttgggaacaaacctatcaaaacaccaaaacaactaggaaatatactcaaggaatgagacttttttttttccttttagtccatgaagttactaggatcaaccacacctcacctactctttcacaagggataatgatatatcttcaaacagtgtagtcttgaattcatctcatctttagcttcttggttgatctgaactcccatcaacttgaaggagaagtgagtctgctcacttttgtggtttacatcgaatgcccaattaattaatattattgtgttctccaggtctaacaacacatgttgaaagacacttttttggaaaatgtaaatgttattccaccatgtcacaacagtccagttcttccacatgatacttaaattaaacattttaaaacagaatatataaatttgccagcccacctccttgcctatttcaccaattctttaattacagagattgatttaacttcaggagatggaggtttgaaaggagggaaaaaaacgaactgcacagctcatagcagctgttcctcattataacacattaaagaagaaagcaacctattagttcagaacaactgcaaaaaccaatcacagagcataaaatttcatcttcctctacctttgtcaaattaagccagttgttccagactccacttcctaaatcaaagtcatacattgaagaaggacttacctatggttactttcacacaaaaatcaacagtgtttttataagcctattttatttatggaatctattcacacaggtagcatatgcaaaatggtgtcagttactttaaacatatgaagtgggcagctccacagagtagtattttaatataaatctttagagttctataactgcttttaatttaatagcatttttctctttataaaaataattcatgcttagtatagaaaatctgaaaaataatatgaggcctaaggaagagtataaaaatcatcacatttctcatgctatttctttataatgcatattactattttggaatatattcatttggtcttttttctattcaaatggatttttttcaaagaagtatatctccccatacttgaataatatctttcttttctctttatgaattgcatgcatgttatatgcattaaattcttctcttacattatttttaatggctagaaagtagacctctaaatggatgtaccatgcttgaaagaaaaatctcttcttattgcacatttataatgcgtctgatttttattattaaaagtattattgtaatgactcaagattgatacatttttgcatgcatccatgaccatttcctcctgctctattacccaggatggatatgctgggtcagagtttacaaagttttaatactcccaaagttattcacagaagattcattaagtcaagaattttgttataagagctaaaaatgttgtgccaacttgaattttatttttattattattttttgagatggagtctcactctgtcacccaggctggagtgcagtggtaggatctcagctcactgcaacctctgcttcccaggttcaggtgattcccatgcctcagtctccgaagtagctgggattacaggcatgcgtcaccaagcctggctgatttttgtatttttagtagagatggtgttttaccatgttggccaggctggtctcgaactcctgacctaaagtgatctgcccacctcggcctcccaaagtgctgggattacaggcatgagccaccatgcccggcctggttttttaaaatcttaaatttttatagcgtaaactgaagacaattacttctagagagtctaacttaaatgctctggaatgagacccaggccaggcacatactttttttgtttttgtttttgtttttgtttgtttgttttaagtttactgctgattttgcatgcagccggggtttaagaccactgggccttgttagtgagttttctggtctaccctggaattttacttccagggaagaggtaactgaattacaagcccataaaaaaatttttttaatgactggaggagaaatttttctgagaggtgcaactgtgagtcctcataaatgaattttatagaatatcttttgcccatatgtatctgtgtataggcataaatatactaaatatctaagttgcagcaatgattgatgaaaggaatataaacagcaccccctgtgccattgcctctttactttggaatccaagagtaaatctacaataaacaaacaagttagacattttttcacctatgttttcatctttattttaaaataactttgtaaaggaatggataaaataagaagcattggaaacatggtatccagcagcataaattcccaggggcaggaagatgtgattctactacttcctctttctaagcttcagtaatctctcagaacattataatcccctcatcctcctaaagaaacctgatcagcagtttgctcatgctgctctctgtttccaggtcccttttgcaacagcaactgccatctcctctcctcacacagacacagtcagctgtgtacattgatgccacttgacaaataatgcctccactcccacccaccagccccctggtgtagtgtgcctatccatttatatctttagtagtgcttcatcatttatcccatttgagctcaggctttgcattcaactctaaatatctctgcaattcccatcgaggggcctagtcatgccagctgaagccacacaaagatcaatttacaaaagacaggaactatttctgtctgaaaatgttggcttgccgtgtccttggccatttcctaaagaatagaaccacatttctaattaatcataaaattaaaatctaatatgaagtattttgtttaataagtctggcactgcactaggtatattgtatatcttttgtactcacaaggaacccattttacagagggggaaactgagtcttaaagaggtcaagatacttttttaaggttacacaccccataagtaactgaatgaactcaagcagacatccacccaccgaacctgagcatgaacatgcttattcactgtgcttctaaacttagtcttgctttaaaggccatccactcttcctctccaattcatcttggaggcaaactccagccatattgtcctattccatgttccctcaaaacactaactggaagtatggtaaagaaactgcctgtctcattagagcaaaccaagaatcctttagagttttagcaaagaattctagaagaataatccccaggtagggagagagtcaaatatctgttaatatgtacctatctaccccaatatttttctgccaaaggtcttgttttgttttcaaaaggcaatctatttcctaatacctcttcttcctttacacaaccatttgcaatcataccctctgcacactgaatttgttgccagctactgcctaggtaggtactttctcttttctcataaatatctgattcaaggccaggtgcggtggctcatgcctgtaatcccaacactttgggaagctgaggtgggcagatcacttgaggtcaggagttcgagaccagcctcgccaacatggtgaaactcagtctctactataaatacaaaaactagctgggcatggtggcgcatgcctgtaatcccagctactcaggaggctgaggcacaaggatcacttgaacccgggaagcagaggtttcagtgagctgagatcttaccactgcactccagcctgggtgacagagcaagactctgtctcaaaaaaaaaaaaaaaaaaatctgattcaacaaactacatgaatacatttagaaatggactagccatgtagttatgagtatcttctgcatgtgtactatatttgtggtggagagtagcttatgtaaagggaaaaattggggaactagcaaaatatggcaatgggagaggagggaggcagattaagcatgtccttgggccaagttatttccttcctaagtctcagcttctttatctttaaaatgagaaggttgggttaaataaattcagttcttatttcttgtacatgtttgtatacctttcaccatctgcaacactgtaggtactcagctagtgttgaactgacttattaattttgagtactaccaaaaaaaaaaaaagattatgtctaaagcttaagtccaggccactattacttggctttaagttttgccagaaatgcaaaatttcactaaaattcttacttagcttggcctaatgatttgacataagagtaatcttcccaccaaaactttattcaagaatccaaatacaggtaagccaaagctttatgagggcacttccttacctctcatgtatttctaaagctatgtccctaagattcttgcccccacatcaaccctaaaagtgcttttgcaacattaccgatgaccttctagagcaggggtccccaaccactgggacactgacagatactggtccatggcctgttaaaaattgagatgcacagcatgaggtgagcagtgggccagcgagcattactgcctgagctctgcctcctgtcagatcagctgggcattagattctcataggagtgtgaactctattgtgaaatgtgcatgtgggagatctaggttgtccattccttctgagaatctaaataatgcctgatgatctgaggcagaacagtttcatccccaaaccatcccatcccctcacctccatgaaaaaattatattccacaaaaccggtccttggtgccaaaaaggttgagaactgctgttctattggacaaacacactgagacttttcaaacctcatcttactcaacttctccatgccattggagagtgctgcctcttctttctcaactttcttggcctctgatatgtgtccccatccaaatctcatcttgaattatagttcctataatccccacgtctggtgggaggggcccggttggaggtaatttagtcataggggcagcttctccatggtattctcctgaaagtaagttctcaggagatctgatggttttataagggtatcccccattgcttggctctcattcttctccttcctgctaccatgtgaagaaggatgtgtttgcttccttttctgctatgattgtaagtttccacaggcctccccagccctgtggaactgtgagtcaattaaacctctttcctttataatttacccagtctcgggtagttcttcatagcagtgtgagaatgaactattatagcctccatggcctttttcttttcttcaatgccctgtttctcctcctacactcatgagttcctttatgagttccttttctcattttccctcaaatattagtatccttgagttctattctcagttttttttctcgccctatgtattctctttcatctacatctacatctcttactttctaaataaaattccccacccttacttgaattttagatacatctataacaaatatctctaccagaaatattccacatataccttaatgcataaatcatcccacaaaatcattatatttcacccaaagtttttccaacttcattagtgtgtataagtatataaactaatcaactttctttctccctctttctctctctgtctctctgctggtgatagatgaatacagacaacccagggagcaaatgaaaccaaaatttggaaagtctgattttaagacacaaatcaagttcttcagcaccaaaagttcaagtaaatattttatttttagattaccatacaatgtaactgatgtttttgtgtccagttttagagtttaacacatatataggtttctgtaactacctccacaataatgatacagaagagttccatataaccaaaagataaattctcttgttatcccttttgtagtcatatcctctctctattcctaatccctggaaatgactgatcttttccctatcattacagttctgtcttttagaaaatggcatatgaatggaactaattatacgtatgcagcctcatgaaactggcttcttccaactactataatacctttcagaatcatccaagttgttttgtaaacaaatagtttgttccttttattgctgagtagtattccgttggataaatgtaacagagattgtttatacattcacttgttgaaagacatttaggtatttccattttgggtgattatgaatagagctgctataaacattcatgtacaggtttttgtgtgaacatgttttcatttatttaaggcaagtacctagaaatgggactgctgggtcatatggaaagtgtttgtttagttttacaagagactgccaaactgttatccagagtggctgtttttcattttgctaccagcaatgtatacaagttccagttgctccacatccctaccagcccttgtcaatatttttttatttcagctattctaatagatgtgccatggtacctcatggtggttttaactttcattttctgaatagcaaattaacatttgttaatttgcttatttgcattccttttgcccaaattgtttgtcatattttagttcctttgtctttcacataacctatttttattttctacttttcaacagttttattgaactatcactgacatgaaaaaatagcatatatttaaggtatacaacttgatgttctgatatatgtatacattgcgaaataatgaccacattccccataatgaacacatctattacctctacagttactatttgtgtatgtgtatagtgaggagatttaagatctatcttcttagcagattgcaagtatacaatacagtatttttaactattgtccctatgctatacggtcttttcatataaattccagaatcagctttatatacctacaaaaagtcctgttgggattttgatttgaattgagttgaatctatgaatcaatttgaggagaactaaatctttactatattgagacttctagttgatgaacgcagtactttctttaatgtgggtagtttattttcttatggttgggttatgagagtttttttgtgttccagatacaagtcctttattggatatgtgatttgcaaatattttatcccagtctgtagcctgtcttttcattcttatacagtgtctttgatagagcaaaagttttcattttgttgaaatccaatacataaatcttttctttcatgattgtgctcttggtatcatgtctaataactctttgtctaactctgggccagtttttctcctaaattttttcctttaaatttgtataattttgtattttacatgtaaatcttttagttaattcttatgtaagatttgaaattaagatgaaggttcatttttttgcccatgattgtctggctgttccaacaccatttgttgaatggctatcattcctttatgaaattgcttttgcaactttctgaaaaataactagaatatatttgtgtgggtctgcttctggcttctctgttccactgatctatgtctatccttttgccaatatcacactgaattgattgctacagctttatattaaatcttaaaatctgatagtgtgatttctccaactttactagtctgcttcaaaattgttttggttattacagttcccttgactttccatataaattttagaatcagcttgtctggatctgtaaaaatactcctgaggtttgcttggaattgcattaaatctatagatcaatttgtgcagagttacatattttcttttctttctttttttttttttgagactgagtttcgctcttgttgtccaggctggagtgaaatggcacagtctcagctcactgcaacctctgcctcccgggttcaagtgattctcctgcctcagcctccgtagctgggattacaggcatgagccaccatgcctggctaattttgtatttttagtagagacagggtttctctatgttggtcagggtggtctcgaactcccgagctcaggtgatccatccgcctcagcctcccaaagtgctgggattacaggcatgagccactgcgcccagctgagttacattttttctatgttaattctttcaatccataaaactgtgtatctctccatttatttaggtcttttttgctttatttcactaagtttttgtaattttcagcatacagaccctgttcatgctttgtttcacttacacctatgtgtttcattttttggagctaatgtaaattttttaaaaatgtttagttgccaattattcattgctagtataaagaaatacatttgattcttgtgtgttgaaccctgtaccctgtaatctcattaaactcactttttagtacttggaatttgcttatgaattccttgaaatttttggcatagacaatcatatcatctgaaaatctgcatgccttttatttaatttcctaactttattaactggatagggcacccagtaaaatgtttgttgaatgatgggagtagatatctgtattagtctgttctcatgctgctaataaaaacatacccaagactgggtaatttataaaggaaagaagtttaattgactcacagttctgcagggctgaggaggcctcaggaaatttacaatcatggcacaaggggaagcaaacacatccttcttcatacaagggcaggaaggagaagtgctgagcaaaagggaaaaaatcgccatataaaaccatcagatctcatgagaactcactccctatcacaagaacaacatgagggtaaacacctccatgattaaattacctcccactgggtccctcccatgatacatggggattatgggaactacaattcaaggtgagatttaggtggggacacagagacaaaaagtatcaatatccttgccttattcctaaattgagggaaaaagcattcatctttcaccattaagtataatgttagcttttctgtatgccttttattaggttgagaaagtttttatttctagtttgcagagagtctttatcacgaatgaatgttgaattttgtcaaatacttttcctgcaacaattgatatgatcatgtgatttttcttctttagactgttaatatggtgtactacaatgaaaaattttccagtattgagccagtcttatattccccctacaatctctacttggtcatggtgtattattattgtttttatatgtttaagaattcagctggttaatattttactgaagatttttacatttatgttaattaggtatatttggttgtgtttaaaagatttttttcttacgctgtcttttgcatcagggtaatgctggcctcataaattgagagtgttctcttcttatttctggaagagattgtatggaattggtattaattttccacaaataattggtagaatttgccagtgtaaccatctgagctagaaggttgcttttttggaaacttttaactgaaagttcagttcactaatataattttaatttaatttcatctaggttttcaaatctatgtctatagagttgttcttagtattcctttattatctgtttagtgtttatgggatctgtaatgataccccctctttcattcttgatattaataatttatggcttatctctttttttggtcagttttgctaatgtcattaatgtcaaaaaatcagcttttgtttttatttatttttttctattgtttttctggttttaatttaattgctctctgctcttgtctttgttatattcttccatctgcttgtttgggtttattttagttttatttttctagttgtttaaagtgaagggtttgaggactttcttcttttctcaggtaaccatttaatgttatcaatttttttaatttttgcaaaaaactttgtgtggtagaaaaaatactcagacctgtgagttaagggtgcaacagatttacatttgcatgtaagataagatatgtgcgacataatgaacccatgaacttatttgagagacggggataaaatgatcccaaatgtgaaagctctagacagcctagtgcagaattaatcacagagtgataataggcaagagttttcagaaagcaaagaacaggcaacacattctctgtacagggtgggaagctcttccgcaaggctctagacctcttctactaaaaggcatctgatggtcctgtgtacactagcattctttagtcctacctgctccgactttcatgtttcttctactaggaaatactgataaagattgtcagtgtgttgatggtatactttttacaatatactcatttgtacccaacgtgattcactcaataaatgttttttgtggttgctatcatctttgttttttaaaaagttattatttctaattattatggaaatatagtagttgtacatactcaataaataataaatatttatgatgtccttgaggccactaaataattattttaagtcccgtattttaatgaatttatagttcccttaggtagaagcacaatatacacaaatgaaatctatattaatctctaatagctatcctttaatttaaatatactatgcaccagacgttgtatatgctgggtatgttacatacatttaatctttaccacctttttgcaaggcataaataatagggaggatagtttcgtagaaagaaagccaaccaaccagaaaaagcccaggaccagattcacagccaaattctaccagatgtatgaagaagaactggtaccattcctactgaaactattccaaaaaattgaggaggagggactcctctctaagtgaagtcagtatcatcctgatacccaaacctggcagagacacaactaaaaaggaaaacttcaggccaatatccttaatggaaatagatgcaaaaatcctcaacaaaatactggcaaagcaaacccagcaacacatcaaaaagctaatccaccacaatcaagtaggccttatctctgggatgcaaggttggttcaacatatgcaaatcaataaatgtgatccactatataaacagaactaaaaacagaaaccacatgatcgtctcaataaatacagaaaaggctttcaataaaattcaacatctcttcatgttataatccctcaacaaattaagcattggaggaacatacataaaaatagtaagagtcagctatgaaaaatccaagccaatatcatactgaataggcaaaagctggaagcaaaccccctgaaaatttgaacaagacaaggatgccctctctcattactcctattcaacatagtagtggaagtcctaaccagaacaatcaggcaacagaaagaaataaaaggaatccaggtcaggcgcagtggctcacaaatgtaatcccaacactttgggaggccgagatgggtggatcacttgaggtcaggagctcgagaccagcctgaccaacatggtgaaacccaatccctactaaaaatttacaaaattagctgggcctggtggtacatgcctgtaatctcagctacttgggaggctgaggcaggagaatcgcttgtagctgggaggtgggggttacagtgagctgagattgcaccactgcacttcagcctgggcaacaagagtgaaactcttttaaaaaaaaaaaaaaagaaagaaagaaagaaggcatccaaatagaaagagaggaagtcaaactatttctgtttgcagacaatatgattctatacctagaaaacctcatagtctctgcccaaaagctcctagatctgataaacaacttcagcaaagtttcaggatacaaaatcaatgtacaaaaatcagtagcattcctatacaccaagaaaatctaaactgaaagccaaatgaagaatgcagttccattcacaacaggcataaaaagaataaacacctaggaatacagctaaccagggaggtgaaagatctctacaaggagaactacaaaacactgctcaaagaaatgagagcttattcaaataaatggaaaaacattccatgcttatggataggaagaatcaatatcataaaaatggccatgctgcccgaagcaatttatagattcaatgctattcctataaactaccaatgacattcttcacagaatgagaaaaactattctaaaatccatacggaaccaaaaaggagcccaaataaccaaagcaatcctaagcaaaaagaacaaaacaacaagcatcacactacgtaacttcaaattatactacaagcctacagtaaccaaaatagcatggtactggtacaaaaacagacatatagacaaatggaacggaatagagaacccataaactatgccacacacctagaactatctgatctttgacaaaatcaacaaaaacaagtaatgaggaaaggactccctattcagtaaatggtgctgtgataactggctagtcacatgcagaagtttgaaattagaccccttccttacaccatacacaaaaactcaagacggattaaagacttaaatgtaaaactcaaaactataaaaaccctggaagataacctaggcaacactattctggacataggagcagacaaagatttcatgatgaaaatgccaaaagcaataacaatgaaagcaaaaattgacaaatggaacctaattaaactaaaaactttctgcacagcaaaagaaactatcaacagagtaaacagacaacctacagaatgggagaaaatatttacaaactatgcatctgacaataaagtccagaatctataaggaactcaaacaaatttacaagcaaaaaacaaccccacaaacaaaaagcccacagagtgggcaaagaacacgaatagacacttttcaaaagaagacataaatgcagtcaacaagcacgtgaaaaaaggctcaacatcactaatcattagagaaatgcaattcaaaaccacagtgagataccatctcacccagtcagaatggctatgattaaaaagtcaaaaaataacagatgctgacgaggttgtaaagagaagggaatgcttatacactgccggtgggaatgtaaattagttcagccatatggaaagcagtttggcaatttctcaaagaacttaaaacaaaattaccacttgacccagcaaatcccattattaattatatacctgaaggaatgtaaattgttctaccataaagacacatgcatgtatatgttcattgtggcactattcacaatagcaaagacatggaataaacctaaatgcccagcaatagtagaatggataaagaaaatatggtacatatataccatggaatactatgtagccataaaaagaacaatatcttgtcttttatagtgtaatatggatggagctggaggcctttatcataagcaaactaacacaagaacagaaaatcaaatagcatgttctcacttctaagtgggagctgaacacttgagtatatatagacacaaaaaaggcaacaacagacactggggcctacttgagggtagagagtgggaagcgggtaagaataaaaaactacctatttggtgctatgcttgatgacaaaataatctgcacgccaaatccctgtgacatgcaatttacctatataacaaacctgcacatgtacccctgaacctaaaataaaagtgaaaaaaaaagaatatgaattttggagtcagagaccaagtttgaatctctgctgtctcactagctgcatgacttaggccagttgtgtaaactctctaaactttaggttttataattttaaagtgtggataaaagctgttgtgaagattaaaagcaatgatatatgaaaaaggtctggtagggtagggaaactagggattttgaagtctatacaggaatacttcacttcaaactcagcatcacccatgttagctatgagatcttcagccagatacctaacatcttgagttttaatacctcatatataaaacatctgattagatagatagatagatagatagatagacacagacaggtaagtatgtagacagctagacagatacatagatagataagtagataaatagctagagaaagagaaagagacagatagatcatcttcccctttacctcaaaacctcttctttaggaatccctttctcaattactggcaactccatccatccactgagctattcagatcaaacaacttgggataatttttcactctttcccatgattcatgatcaatctgagggttaattctattagttctatcttcaacatctattcagattctttaacatacactacttcctcttctatcatcatggtctgagacacctgtcttattaccataatttcctaactgattttcttgtttccctctttaccttcccacccaccatttttatcctggcagcaaaaataaccctttcaaccttaaatcaaatcaaattcttcaatggtttcccatctcagtcagagtaaaggctggtctttacaatgacaggtccctccaaagctctcccaacactgccactcagctgtccagccactcccgtgatctcttatcctacactctaacctgcactgctccactccaggccaactgcctgcgtcatcctggaaactcctgaatttctgtctcacctcagagactttacacttcctattcctcccacctggaatattcttcacccaaatagcttcaagactctcagcctcacctccaagtctttgctcaagtttcatcttcacagcgaggccttccctgtctactccattttaaaatccaatagcccactccatccagcactctctattcccttactctaacttatttttctctacagcattgatcatgatctaacactattatattgtacttacttttttgttttttgtctgtttcctcattacatgcatgcacacacacacacacacacataaacacgcaagagtggaaactctgagagcaagtattttgggcagttttgttcatttttgtatcccaacaccttaaatagtatcaagaacttagtattatctctctctcacccttccttttgttcctctctcctcccttcccctcctctccattcccttttcctccccgctcctttctttctctaaaatatatatgtgtatatatcatggcaaaatttatttgttcatggaaccctagagaaagtggtatacaaagcaaatcttagtttccttagcttgttagaaacaacctctttcattgggaaagaatgtacaatttatggtacatttaacatttatgtactagaacctactgtgcaccaggtactattttatttaggataaataagaaataatctctgttctcaatgcactgtccagtttaagaaagaaacaaatagacacatatgaaataaaagaaaggtgctcaaaaaacaatattttacttagtgagaaggcaattatgagaggtttaaaaataggtctgatgtggttgagacaaatctggcaataacaatcaattacagagaagactaatggcacggtgtgagtttggtgcagaagtttcctcatttgatcaacctagggggttgctcaaaatgatccaagtgttcctttgacaatgagtcatccataatttcatgattgcttttgctgtgtttgtggttatgaaatgatcctcacaccaccattcctaatattagaaggttctgttctaaccagtgcaaattgtcaggcaagagagtgggtgtttatagtatgggttaatttgttctccagcaggcctgagttccagtgaactcagcatttgctgcataagaaacgcatactagaaccttccttaatttgctgaatgggaataaacaagaggtgcttgggggcacattcaggggagctcaaagagctagaaaggagcaatggggagggtgagtagtaatagctaaagtgtccttgtattctgaaaacgaaattgcccttctgagtatgcatttagcaaactggcagattcataactccaaggttcagagggctgaacatgccaatagcaacagcaaaaagaagccttaacgacattcctttaatttccaaaccttatttcattagtggaaacttttggagctctgtttcatgccctacaagtctaactctgtgtaaggttgagggtggaaactttgaacacaaagggaacatctagggggaaacacacacacacgcacacacacacacacacacaatcttaatggagttctttggaaaacagcaggaatagctggtgcttggttattccacctgcaatatcccatctaaccctcatggcctccctgagaggtatgtactgctcattttcctcattttatgaaataaaaaactgaggctcagagagatgaagtgacattcccaagaggcagagccaggacttgaatcctggtcttcttactccagacatgtgacaattctacacttgtcttttccttcttgctgtgctgaaattctgaaaaacagagtttgtaaagctctagtctatagcagtgtttctcaaccttagttccacattggaatcacctggagatacttacaaaccctctgatgcctgggtcccagcactagaaattctaacttaatttgtctggaatacaatctgggaaatgttttttgttgttgctgttgtttgttttttaaacagagtctcactctgtcacccaggctgaagtgcagcagcatgatcacagctcactgcagcctcaacctcctgggctcaagtgattctccagtgggattttctaaagcccctccctgccaggtaattctaatatttagtcaaaattgagaacaactatgaagaaattattttaaatgacagattccctgagccccatcccaggtgtattgaattagagccccagaggcaagttggcataattgtgttattttataatcctcccatgccattctagtaagcagccaagtttgggaaccactcactggtctactctatgaccttcagagctgctcaaggtgagtaattactgaagaaccagttattagtccgacctctgtccctgtccatgttatcatggggaactgagttatcttcacagcatctgcgtttcttaatcttaaaatgaggcgattggtatttgtcctgtcaatctctttggaatgttcaagagaaaagggacaaatatgaaagtgttttaaaaggtatgttaacttctaaggtattattattattattgaactggtgttcctgatttttatctctaaaattgcctcctgaatagaccatgtccataggagaagggttctagtcttggcttctgattcacatattatcctctttataactcacaagaaggtagtctattggctgagaagaaaagtagctgcagatgctctttcccatcagaggaaaaaaatacacagaggaagcctgccccagtgaggggaaatggaaagagatgagaattgtataacttcaaccacaagcatttgttgtcaaagacacaaattcaaccaaaggactgaaacattagccaatatgctttcccagcactcaaattcaattcagaaatgagacttcccattaccaatatcatcccatcccatcgggagcatgcagcttcttcatctgggttttctgtgtctaaatctataatggaaatattaggagtgacttgggagtggggagaagctacacgaagaaatagagcacaatgcacagatgctttctcagtttagatccaactcttgacttctaataggtcactactgttcaaatttttaggaggaagacacaaaaggactgatgattgtctagaaggtttaacccttttaagcctgaagaagactttgagagacactaatgcttggggtccactcccagacattctgacttaaatgttctcaggtgacagcatgtgtttttttaaaaccttccatggagattctaatggttcatcagtgctgagattacaaggagagaaggatgacagaataaaaagggccatgtctttatccccaggcctttaccttcccctgggggttcttctgtggtctaaccaccaatccaccaccattctaaccttaatggagtatctaaccttctgtaaagctcctgaccaagtgtctcagggatgggagtgactctgccataattttttttgaagacttgattaaattctgagggaaaagcaagttaaaatgaacaagaaaatacaagaaattgatatagttataaatacagatttttggccaaagtttctgtcacatacagcacttgctagcagcctattctcaagaaaaatcctgatgaaaacaattacccactatgccaccattaccacgagggtgtttctagcacgtaaacaggtatttcagcacacatatacacattcacacacaaacaacactgggttatgtaaatatagatatgagacaaggtttttcctcaaattatccctcagaaaagaaagaattgtcatatattccagttcttatagcagctcctgtattactgggctctcttataattgctttatcaaccacgtattatttagggcgaacatattaaccaaataaatgctagttttggtgtcaaattagtagaggttacctgacaaaaagtattaaatggaaggccagtaaatttaactaaaattcacaattatttctgaaattacaacctcacaattttacttgcttttttttttaaaaaaaaaaccttttaaagatcatttattataacaattataaaaatacactaggatgaattttttaattcaggtattatacaaacggatacttataactagaaataaaatctactgtggcaaatcatacacatttaaaaaccgctgtgactcaaaccagtgagccagtaagtgctccagaaaattacatgactccaaaggtggtgctaataaggaggaaaacactgatgtctttctcataaaatttaagtggaaaaaagacataaaatttgagttaaaagccatatttctaaacatatttttctataatatgaaatcatgaatacctatattcatctaaatttatatattacatatcaactttttaaaatttcatggagaaaatggagaaatcacttatgattaggtataaatagaagaagggttgattctcacagtatttttcagagccttaaatatacttacatgcactgtggctccgtgaagtggaaaagggatatatatggtatatttctcattcttatttgatccattgagacaagaatcctacagaacatatattgggaaatactgctctgacccaaaatgacccgatcaacctcaaaaatgcctctcacaggttcctttcctttgacatccaagcagaatgcctctttgtgtgggtgccatcctacagtccaccacactgaaacccaaaaatcacacactgagcaatgggaggtcaagtggcacttgccatttgccaggcacacgataatgagtaataatatgaattgtaattacaatgaattgagcatccctggggctgtgatactgataacaaaatgaataataataactgccaatgatactaatgaacacatgtggagtacatactatgtggtaggctccttactaatttcttaacatttaattttccctacagtgatccccacaagattggtagttataaccatttcataactaactaaactgggagtcacagtcaaaataatttgcccaaattgcataactagtaagtgatcaatagcaattacttaaccatctatgacattgcatttctcaatctttaattccttgcaatttattctcaaattgtttaggagcaaaagtagtctaccttcatattgcagagttatattttgaactcaaaatggttggcttttatacagtagctccagctggtggcagacagaaggaaataaaatgcattagtaaaaggcctacctgatattaacccagaactttgaaagaagttcaacaattgactagaaatgttttgttttcatattttttaaaagatacttgttctattgtatttttacaatacaatatctatctgtcaaggtagggggaagtaactacaatttaggaaagataaaatgtttcaaaaatgtaaatgccatagaccaaaacacatagtgaattagattttttataggggtatagcacaggtatctttaagctctgatgatgtaacttgctccctttaaatatttttttacttgtgaaaaaaatgtagatcatattatataatatagagctgctatgaggattatgtaaaatgatatgtgtaaagagcctcgcatgagacccagcatgtagtgaacattcaattaatattagttccttttgctttttcctatgtaaagatgggcttcacctaacattctgattctacaaaagtggcttaaccattctttggagacaaagatagcagctttttgcagacagcttaaaaccctcagaaacccagggtgaacaccaaccaaaaataaaataagttaaaataagttaaagccagtgtgaaaattgtaaacatagactgagttattttctttacaaagcctgtagaaaatatgttaaatgcggaaatgaaaaagaagatgagaagctgtcacaactcagacaacttctgtggagtctctgtccctcaatgtgtccatcttccttacaggtacaaaaataatgaaaacaaagaatatagtaaagggctcagagctcttcctctcaacactcattattctgacatgaaagcagctatttgtaaagtaatgcctagaattcccgttgctttataattagaatgaataacattctgttatcctccttttattgaaaatcaaggggaaatcaaattttgagcagcagctattaggatggaaatgcttaatctccaaaggatttataatatcgtctcttatttcacagtactggcagctgaaggcaacctatatccaaattaaaagaagacaaacaacatacataataatcggatgaactacccaacaaagaaaatgttctcacattggttcatttctaatcattttcttgaggctttgaaatggtcctcaacttaccagaaacagcaagccttccacatttggaacacgacaaggtaagctagactacgtagctagctaacgaagaatagttaagtaaatgatactgacaatagcttgcatttgtagaaataaagcactttcctatcccattatctcatttgatcctcaatagctgtgtgacactggcaaggcaggtgtttcttattatctccattttactcctgaggaaactgaggctcagcaggttatacagtagatagtaaagctagaagtaggaatgagaataggatgggaaaggggaaatgttgactctctcaatgggaaggaaaggatgggcaacaatgatatcagaatgccaagatggggacggggcagtatataataaatgcaattttctggtcagctgtggtggctcacgcctgtaatcccagcactttgggaggccggggcaggtggatcacttgaggtcaggagttccagaccagcccggccaacatggtgaaaacccgtctttactaaaaatacaaaaaaattagccaggcatggtggcaggccccctgtagtcccagctacttgggagactgaggcaggagaattgcttgaacccaggaggcagaggttgcagtgagctgaaatcatgccactgccactccagcctgggcaacagagcaagactccatctcaaaaacaaataaataaataaatgcaattttttagcagagcaggagtagataagacagcagtgaccctctctgcgtgcatgcaatcttgtgttcctgggcttgagcctggcatgatttgcagctgggtataagaacacaagcaatgtgattcattctggcactatttaaactttaagtacgtctcagatgtaaaaacaaaggagaatatgccaccaacctggttcatttgggtgaatataaaaaggagattactcaaagctttaaaaaaaatttttttaatgggctgtgtttctaccccacccttagggagtgctggctaggaagacttatgtattgtgttagttagcatgaaaggtggggaaaaacagagtagggcaacccaaagtcaaaatcaacaacctttatgaatctgagccatggactctttgcctaaaggggatgagggaggaaccaagtttccaccctcttaatgcggaaaagagagcaattgttgatagaaaaaggaaaatattttcctctcctcccctccccagaaaaagcatgattaaataacaaaggttgctgccccaaatccccatatcctaattagaaagtaaaaatggtgggcttttaaaaaattatacagaattcgtatataagacaacaacagagtagggtgtctccctccaaccttgggtctagtgtaattacacacagtaattaacaacgaatttgtaaccagtcctgttggctctgttcaggtgccaagtgtggtagtccagtggatcatcagctatgggtgcagaaccctaatctaaaggcactgaaacctctaggtgatgagtgatggattccaaacgattgcatagacttgagggaaaagaataaggctttgggactgaaaaagagacagacacctgggttactttcttggtgccaaatgtcatccctctggtccacagacctcttttggacagaatcaaatgcaagtccagcacatgcagcaaagcacagactcagcccagcacttaactctctgccagcctgagattaggcctgaggacatcgggctcagccagaagaggaggagtgccagaaagcttgaatttggcctgccatcctgtgtttgctgggacttgtagcatcagtattggtgctggatggcaaattcctgtaggcctggctatgtgtgaggctgaacagaattatctccttaatgaaggctttgggtaatggattatggtcccattgtgatcaaaccatttcacctattcccacacatagggatcatatcaccatcaatgaaaccaggccagccttaaattaaaatatagaccaaatctacccttggcctgctcagagctgggtgactttatccacctctcttctctcaacatgctccaccttccctgccttcctcctaccctccatgctagcaaggcccaaaccctctttgctgcctctgcctatccaaggatctctctcagtaaactggttatctgaagtgaggtcttgccccactccaacagacattcattgagtcttaactatgggacagacaatatgctatgtacaaaaaatacaaatatatattttttaaaaatgtgctcctcagccttgatgagaagagccatataattcactcaaaaataagtactgagccttctgctgtgggcaggacatagtgctgggcatgtcagagggcacagagactaagaatacacattctctcactccaggaattcgttgaaatcaagaaaagacttagaggcaagagaagaagagctgtgtagtggaaagaaccataatgtattgcccagttagtgtaaaagcttctaattgctctccttgcttctacttttgtctcctgtaataataatagcaataataattagtataatacaaatccatgcgccatccaggagccagagttttctttgtaatacataaatcagatcatgctacgtctagcttaaaacctcccaaaggcttccttcagtgcataaaatagcatccaaactccttcactgtgactgacaaggcactgtatgactggtccctatctgcttctccatcttacccacttcagacacattggccgcttttctgtctctcagatattcctgcctccaagcttttatctttgtagtaccctctaactaaaaatgattttcttccagatttttgtttggctggcctcatttcatcattcaggactcagttcaaatgccccttcttcagagacgctttcactgacaagcttgtctaagaaactcctcctcagtcactctatggctattttcttttcttcatgacacatgttgctatcagaagctatcttcatttttttgttgttgtttgtggttttcgtctgttcgtttaatggaaaactcaaacttaacaaatccaaaattcaaactactgatctctgcttctccaaaatttattgatctcagtcctccccatctcacctaaaggcaactctattcttccaattcctccagtggttcagattaaaaatccagggatcaccctggactgctttctttctgtacaattcatctggaaatcctattcttcaacatgttctaccttcaacataccacttttcttccagtctatcccactctctccttcatctttgacctatactaaccttctagctggtctctctgctgcccccttactcccacattgtttattttcaacggagcagccaggatggccttttaaaaatgagtagtatggctgggcatgctggctcatgcctgtaatgccagaattctgggaggcagaggcgggtgactcgcttgaggtcaggagttcaagaccagcctgcccaacatggtgaaaccccgtctttactaaaaaaaaaaaaaaatacaaaattagccaggcatggtggcacacgcctgtaatcccagctacttgggaggctgggcagaagaatcgcttgaacccaggaggcagaggttgcagtgagccgagatcgtgccattgcactccagcctgggcaacaaaagtgaaactccatctcaaaaaaaaaaaaaaaaaaagagtagtcatgtcatttccctccccaacactttccatttgggctgggcacagtggctcatgcctgtaaatcccagcactttgggaagctgagatgggaggatcacatgaggccaggagtttgagaccagcctggtcaacatagtaagaccctatctgtatatatatttttaaatttaaaactttgtatataaaaaacctttccattggctatctcactcagtaaaagccaatgtccagcatataggtctgtgctatctaatatagtagccactagccacatgcagctactgagcacttaaaacgtggctagttcaaattgagatgtgctataaatgccaatgcacactgaaattcaaataatatttttaaaaaatgaaaaacatctcattactcattttacattgattacatgttgaaatgttaattttttaatatgttgggctgaataaaatatgttaccaaattaatctaacctgtttccttttcattttttaatgtggccattagaaaattcaaaattatatctgtgactcacctatctacaatgtggcttgcattatatttgtatgggatagcactgatagtatatagttattagatagtatgtagttattagaccaaatgaggtcatctagtgagtgagtgtagacaaagaacaggtctaaggatagaattctcagggtcctccaaaattaagaagccaagtaagagaaaccattagaaagattgagaaagtacccaataaggtcagcgaagattttgatagaagactcagacatctctatttgagatggccacactgtaagtgctcagacttgaaaggatgatatccaagaaatcaaatgaagaaaatgtatcaaggaggcagtgatcaattgtttcgagtgagataaggactgaaaactgacaattcgctttgacaacgtggaagtcactggagatgctgacggggttgttttggtggagtggtgtagataaaagtctacttagagttattgaagagagagtaagagagcagaaatggatactacaagtatgaacaatactttgaagaagttttgttataaagaagataagaaaaatgcaaaggtagctgcagggaagcttgagatcaagggaaagtattttaatatagaaataaagcatatttatatactgatggacataaattgatcaggaggaagaagagagagccttggctgggcgtcatcacgtatgcctgtaatcccagcattttgggaggccgaggcacgtggatcatttgaggtcaggagtttgagaccagcctggccaacatggtgaaaccccgtctctactaaaaatacaaaaattagccaggagtggtggtgcacacctgtaatctcagctactcgggaggctaaggcaggaaaacctcttgaacccgggaggtggaggttgcagtgagccacgatcatgccactgcactccagcctgggtgacagagcaagattccatctaaaataaataaataaataaataaaaattaaaaaaattaaaaaaaaaaacaaacaggaagagagagcctctccaaaatggctagagtaaaattgctagagtgatctccttgagtagatgtgagatcctgggacctagtgtagaacaggagggctgtgccttggacagacccatggacagttcctcagaggacagaatggatgaggggacacaggcgaagatgcaagcaggtttggaagaagtgatgggaaccacatgtggaaggtctcctctgattgtttccattttcgccgtgtaaaagaaatcaaggccatcagctgagaataaagaaccaagaagtcgcaaaagtttgaggagagagcagaaggtttgagatcatgtttgtgaagcaagagttcacaaactctttgaatgaattagaattgctgggcccacttaaatttgggggctcatgagtttaaagtgataccaagcagtagattgggtactttcctccagccaagttcagcaaccagaaaacaggtacagagtaagaaaagggctgcaaataactaggattgggggttttccaaagaaggaaaaaaaacatgaaagaggctccagggagttacagttgtataaagtgagtgatgattatgatagactataagatctaggatggataaggaggtaaggatacacaggatgtaaaggacagtgaaaagatggtaggacaaattcattgttaggtcaacggatttttaagtcagaatgtgagggacagtgagctggaaagatatgaggtggtgggcctagggtagaatgcttgagattgagattttgatctatggctataccaccctgaacatgcttgatcttgtctgagctcagaagctaagcatggtcggacctggttagttcttggatgggagatggagattatggaagatgaggagttattgataaggacaaagttgaggggaggctatgaatggctcattccatgagcatgagtggctgaggttggaagagaatgaaatcattataggagaagaggtcaagggactcagatgccagagagtattgaaatgatcatctaggaattgtgacagaaaaattgttgtcacaaacaagtgcggataagctgggagtttacatcttcaaagaacgtggaaagtaacccagtcagcagataactgcaataagaaagggtagctggtaatgatgtctaaatttcacaccaagggagaagagaacttggtctaataggagcaataaaaaccagggagacatctccccatctctaagtccggaattctattcaaattcacattccaaatataggctatatgtttctggtctcacaagagtcatactctatcctaaaggaacctggaataattacaggcttcctgccttaactcaaaggggtgtggaaaagaaaataagcaccactcaaccaggctacaagaaagcaggactcagaggtccaggtttcagttaaaaaaataatgtgtaggagacactaagagaaaaggttgagaatatgagggctttagccgataatgggccacagagcacagaaaaggggtggaagtgggaaatgggcaatggggtcagaatagggaataaacaaacaggatgtagatctagactattaggaatgaccttatagtttggtatatgggatgaagggagtggcgagattgtcctggattgtctcttaggcagattgtggtggagaggctgtcagtgttgggggacgagggatgagggtcatgccagaaccttgccagggttctggggccctttgaaactttggtgtcatctttacgacttcctcagatccaggatgaatggctccctcattaaacttgccccctagcagagttgaaaacccctaacctaagccagcttatactttcataaagaattttactaaatcctgaaggaaaacataagatgaaataacaaacagaaaagacaaaatatccacattccaaatatgggtttctgatgccagaagagtcttgccctatctcaaaatgagctagtgtgactatatacttcatggtttaactcaaaaggaaatacttattaattgttgagacagaggcattgcataataccagtgtggggaagatgttttgaaaaggcatctttaaaccattcccaggcatttacccatatgcgcagctgttcctgtataggactttcttcacattaacaacaacaataaaaacacataaaaatcagcccaagagtaaatgtttcctaatggttagaaaaataacattttacctgatactgcgaatgagagattttcaggtcacgtttattgagaactagcaagatgagtcagtagctaagatctgtggaaatgcccttaatgacttttacaattgtttccttaataatggactcttaataagcaggtcaatgttaaattaattacatggaagtattctaaaaagcatattgaaacctgattttagcccattcactcaaggattaaagttgtactttgggtttttttttttttctcttcctgatagaatatcatctattggaaggaaatgtttaagcttggggatgaagtttaaaatataaaattaataaagagaagaaaatgtagttctaacagcaaccaggcaaaggctatgtaggcccagagccacaatctttctgccactcactgattttattacccatggttcattcagcaaatgatcaaggagcttcggtaatatgctttgctacctgctggagagtcagtgatgattacaatgccattcttagccgtgaaggggctcactctctggttggggaaaataaacactttagcaaacacaatacaatattgatattttgtatacagggcagagcagagaatggaacatttgaagtgggtcttgaaggatgagcagaagtttgttagaaaaggaaagcgtgccaagcagaaagaagagcatgtaagtatgatgcagactggcgtactggagaagcatgagcagttctgtgggacaggactacaggatctgaaaggaagaagtaggagaagaaactgcccattatagaagcatccaaattattacttctatgctaccattgcaccattgtcaccaacctcctctcccaatcttcacaatcaacccaaatatagtcattttgcacaagaaatccaagcacaagcatattataatttttgtaaagattaccaaagctctggaagccatgaagaagggtctcacagcacaaacatcagcattgcaccactctctcattcccttggccttcctcacccctcactgcccatccaacccaggcccaaatatgcagaatttctcccttctctgcagttttgctattttccaacaaccagaggttaataaacatcagacaacacccaaaataagggtgactcccttaaaggaattttcttacaatctgctatgagaatcaaagcttttccctctgattttatttctaaaacacacttttaatcctattgcttccattttttaaatccttcaatagctcactctggccaaaagaataaaatccaaactttagcagcttgcactcagcctcaatctaaatgctaagccccctttccttttacagcttcctcaggttccgttgtgtaacctataccccactgaagccctccctcctacttcctgaacagggcctatattttttttccaatggggctttgctcatttagtactctctctgggattcttgtccccattcatccacttgtgaaaattctgatccttcttgtacaacgtatccatcttattcaagcagggtttctcaacctaggtactactgacattttatgctgagtaagtctttgttgtagggagttgtcttatgcattgaaaaatgcttagcagcatctctgacctctactcactacgtgccagtaccaaccctcaccctgactatccatctatccattgtcataaccattaaaaatatctccaaatattgccaaatgtcctatgggtttgaaaattgcccctggttgagaatcactgctctctaatctgttttctggttacctccagtgagaaatcatttctccccactcattactccacaacactttgcaactctgttaaaaacccctataactaaagcaacaacaagaccaacaataagcagcaacaactaaagcaacaagagcagaataatatttaatgccatctcctttgtttctgttggttgcttatatgtctgaccctttccactgggtttgtgagctgttgagagaagggtgaagtcctggtgcctctagaccccagcacagtgtcttaccatagtaggtcataatttgaattgactttaataaagctattgtcttcatctatttgtcttctgactagccatttgatggccacatcagttggaagatcgagaagctaaagattattgaaatgctcttttgcaaggttttgttcatatctgggaagttataagaaacactaagaacagggaatggtggttcatgcctgtaatcctagcattttgggaggctgaggcaggcaaatcacttgagatcaggagcttgagaccagcctagccaacaaggtgatatcccgtctctactaaaaataaaaaataaattaccctggcatggtcacaggtgcctgtaatcctagctactcgggaggctgaggcaggagaatcaaggcagaggttgcagtgagccaagattggaccactgcacttcagcctgggcgagaaaggaagaaaggaagaaagaaagaaggaaagaaggaaggaaggaagaaggaaagaaagagaaggaaagaaggaaggaaggaagaaggaaagaaagagaaggaaagaaggaaggaagaaggaaagaaagagaatgaaagaaggaaagagaaaaagaaagaaagaaaggaaggaaggaaggaaagaaagaaaagaaagaaagaaagaaagaaggaaagaaagaaagaaagaaagagagagacagacaggaaaggaaggaaggggaaacatggatctggaggatctggagagggtttttttgtttgcttgtttgtttaatcttcacactactgaatggtttgtagttgagtaaatactagctttcagaatcagtttgggttaaaacagtaatgtggcttatttcaatttagtttgagtcagtttgcagacaatgggtttttaggtttaaaatataaagtagtggtccaaaccataaaacatagcattgcagtacatacaggtagataacattcctactgtctcattggtgtagtttccgtttgctgaaattgcctgaaagttcctcaaggacatgaacacatctgacatttctcctctctcctgtagcacctgctagtaaacgtttttgagttaagttgaaaactttccaatgaagggaaataaatctattgaccgggaatgctgcaggaactaggtttaaaggtaatttccagaagttgtggtgtagtatggcaaagcttgctgaaggcttatccccatatttattttacctttcttccttggggacagagttgagattttgtagctgggctctttgtcactcaaaataaaagattttacttcctagttcttttgcagtaagatggagacatgtaactgagtctggctaagaagatataggtcaaaatattatgttggacatctgaaaagggtgctttaaagatgcttattcaactggaaagggtgatttttacccttctgcaattccttattctttttttctggcatgcaactcacatgtaatgactgaaattcctgcagccatctcagattatgagtgaacttgactatggaagccatgtcctaggatggtgatgcaaaatgaaaaaagctgggatcctggtgataccatggggctgtcatacttgcaccaagttacctatctatggatttctttcattcactttaaatgcactattattttggacttttgtgagtttttttttttttttcaaaatagttttttgtttgttttccaaaacagggtcttgctctgccaccgaagctggagtgtagtggtacactacaaccttgaacttctgggcctgagcaatcttcccgccccagcctcctaagtagttaggactacaagcacacactattatgactagctaattttttttattttttatttttgtagagacagggtcttgctatgttgcccaagctgatctcaaactcctggcctcaagtgatcctcctgccttagcctcccagaatactgggaatagctgggcgcggtggctcacacctgtaatcccagcactctggaaggtcaaggtgggtgggtcacttgaggtcaggagttcgagaccagcctggtcaacatgatgaaatccaatctctactaaaaacacaaaaaattagctgagcgtcgtggcaggcgcctgtaatgccagctaatggggaggctgaggcaggagaattgcttgaacccgggaggcggaggttgcagtgagctgagatcatgccaaagttgggattataggcatgagccaacatgcccagcctggatttttgtgtttatatgcagctatacctaattctaattgatgcatatttaattgtaattccacaatttttatgccttccatgtggtagatcaatggttctcaacaaaaagtacatgtcactcacaaaaacctttatattttcagaaaatacaaatgttcatgccatactcgagtttttgaatcaaaatttacatggtgaccctctgacgtgaattgtgtgacaaatatatttttcaacaaattagataagttacatgacatacattcagttatatatagtatatactgcgtgtgtggcaagagagagagatttttatagtatttcctaatattcttttttattcttgtaaggttagtagaaatgtcccgtttcattcctgattttagtaattcctctttttttcctggtcagtctagttaaagcattgtcaattttgttgatcttttcaaggaaccagattttggtttcatcatctttctcaattgtttttatttatattctatgttttcctattctgtatcgttattttattctagttctgccctaacttttgttgtttcctttctgctacttagtttgagtttagtttgttttgctttaagtgtcttaagatagaagtttaggttgttaatttgatatttttcttttttttaatataggcacttatagctataaatttccctctaagcactgctgtagctgcatcaagaatatatttttaaagccctacagagaattctgatgtgcatgcttggtgagagtatactgtacttctttgccactataaggtttttgtttttttcaatttcccagcatgactgctgatcttcttcatagacaaaggttttttttataaagcaaaatactttggctttggtttggttagatattgcagaaagactcttgattgcagctcagaaatttctttcatagcctaatataaaaatcaaggacatgtttgctttacttgattttctctaagaagtgaagacttcttggattacaggggccctactttaagggccctttcagttggaagttttcctttctgcctgtatttttactatgcatatttttggcagcccaaaagcaatgtttatgtccattcatctgatagtgaaagcttactgtgctacctaagtcctttctcttggtctgtgtactttcctatttgccttgctttttccacaatttggcagcattatcacttactccacgtgacaagtgacatcattgctataatgagaattccaagcagcaccactggatcaaagcccatctgtgtgcctgctcccacacttgacaaaacaaattccaaattcattcagcatgccggtgccatttagtcactgtgacatatcctaaattttggactctgtgcaaaaaccaatctgtgcccacaaaattaatcacggaacacattttatgacgtttgacaacaacttaaaaggttctcatctctggcagttggctctgccaatctgcaagtatgtgcacgacaaatcctgaacaatacattgtgtggctgaaaatacattgtgcaggatgcacaacctgaagagggccagagttgagtccaaccaatcctgaagtctttctcagggacaactaagccagactgctgctttgtgaaggaaggatgatggccccaggtacatgcagaaagccaaagaaaaggcaacagttcatgtgccagtagatgctgagaaccttggcacaatcggctgtgttggcaggaccaagagtttgcaatcgctaatttaagcaacaagatcctggcaaaccgatttatatagggcaagggtgcgtcaggaagatgccagaaaaatacatcaatctgtgcctttacatgtactacagagtgatgatgaaacaagtgacattaaaaaagtcaacccttacactttaatagaatctgcaactcatcctacaaggaaaagtagggtttatgttagatctctggaactcacagatgggtttctatgttctgatctgagatctgtgataaaatttcccttcaaaggtgctcttgaagagatttttccatactgttatgattacttaattaggccaagtgtttttatatattgtttaaattattttaaaatgcagactctttaacatttgacaatatcattcacttcaaataaaataatctattcaaaattttactttgctgagtacatcagagaaattctgttaaaaaaagaagattgagactttaattgtacagttagaagcctttacttgagagtaatgttctaccctgcaatggcataactgtttcaaatagctattttatgtagtagtgcctatttgtgtacagttcaacaggcaatgaaatagtaaaacactccacttggagcatgttgcttctccatattactttccattttcctagcttccctttagacagccttctactcccactgttccccacccactccttttttcacttagtacgttgtatttgcaatgtctcgggttaagaaagcttttgtaccttggcagcctacttagggttttcatttgttatacaaagactaaatttccataatttagctttcactgggatttgtctagacccaaacatcctattctaattttacagttcctctacatctctgaggcaggaaataatatgaggaagcaacaggtgaagaggagttcttccacacgaagagcaattcttgattaggaggcctggtgatttaataacctggcagaggcatagaaggaaaaccagcttcccttggttcatgctcctaatggcctcctttgaatgtaggacagcaatccatcttctcttctttaatatgagggagttgactctctagatctttcccgacgctaatactcttgaatttcgattaacgaggaacatttcggggttctctccttacacaatagttgattcttttgtttattttgtatgttaagtacaagctggctgttggttaatttcaggcatatttttccctctcagaagtagtttccaaaacttttttcttccttatctatgcctaaaataatataaaataaattttaaaattagctagaaatgctgccctttatgcaagagctacatattcttttataatgaaaatcattttctcaataatttttctctgcagttttatagggaaactgaattttagtagaaaaaggccctagaaataatcttttaaatcctgaacacaggtccctgtgtcaggctagctgtgtcagaatcactagggattttttaaaatatagattcccagagccttctcctaaggattctgatttgataagtccatgaagttcaagggaatctgtatttatattaattactttattgacatagagtaaagtaatttttaatgtgctgacagattttttttaaagatttggggtgttgctgtgatgctcaggctgaagaaaagtggctatttacaggcgcaatcatacagcctcaaactcccggcctccatcctcctgcctcagtcttccaagaactgggactacatacaggtggatgtcactgcagctggctcagacagatcttattcagtggtcgtgccaaataaggaaacaggtccagagtgagaatgtgacattgtcaagatcacactatcacaaggtggctcatctatgattagtaaccagagctcctgacacttagtcctgtgctcttcccataatgtcaggctgctactcttatggaatttgcaacatttttcccaaatgtatatgtaatgtactatattagacaggccaaatacattgcctgctgtactctagccttttctaagggaagatattctacccccagacttatcagggacctgggtgaaccattacttccactgtaccagatagaattgattgaaccaagggtgagtatctgatcaagggtagcaaatccatagactacagcacaatgagattcaaataccaaacaaagcagatgtacaaatctattaaatgaaaattgtctaatcattaaacactactttaaacctagtaagtctgtgctttttcagcaaattgtgcttataattaagttttcttattccccttcccaagagcaaagatttcaaattgaaaagatgaggccaatacaaattaaatatttcaaaataaaatatatcaaatattatctttagtattgtgattcctatttattaattttcatttttattaaaatgtctttaaaaatgcaaacagcattacagggtttatactcaaaaaaattaaaagttgctgaatatgttgtatgcagctgatccaccttatactcataaacatttcctttattacatggcttttcaggtttttttggagttaataattgctttatttcctcccgtttgcttagttttctatgtgcctatcaccaatttattcccaaactctccactaaaatgcataaatgtgttatcagtatgctcacccacactggtgaactacatatttcatttttttcttggcaacacctcacctccacttctgccctgcttcagtgtgaatggattgctctctttgccagctgcatgtctgctaccctaggcttcccttcacaattgtggtggattaattttatgtgtcaatttgactgggctaagtgatgctcagatagctggtaaaacaatatttctgagtgtgtcaggaagtttctagaagagattagcattttaatcagcaaactgagtaaagatcactctcactaatgtgaacagacatcatccaatccactgagggcccaaatagagcaaaaagacagagggagggcatatttgccctttctgtttgagctcagatatctttctcctgcccttggactccagtgttctcagttctcaggccttcggactcagactagtacttacaccagaggctcttctggttctcaggccttggttcttcatgcttggactggaactaaagcatcttttctgggtctcccacttgaagacagcaaattatgggatttcttggcttctgtagtctcctgagccaatccatcataataaatcctttctatatatctaaatatattctattggttctgtttctgtgaggcaccctgatacactaatcattttgaaatcaccttaatctcctctatattggatcctctttttcttggattacacatacctttactggctaactttttttttttttttttttgagacagattcttgcactgttgcccaggctggagtgcagtggcgcaatcttggctcactgcacctcccgggttcaagtgattctcctgcctcagcctcccgaggggctgggattaccacccctggctaatttttgtatttttagtagagatggagtttcgcaatgttggccaggctgggttcaaactcctgacctcaagtgataaacatgtctcagcctcccgaagtgctgggattacaggcatgagccaccagccctggccagctaactttttttcttaaagatgggatctcactctgtcacccaggctggagtgcagtggcacaatcatagctcactgcagcctcaaactcctgggctcaagtgattctcccacctcagccttctgagttgtttgaactacaggtatgagctactgtacttggcttggctcacttcctactattgatggagcacattttctagtagctcttgagaaagtatgtatggaaggttaacaatttttagaacttacatgtgtaaaatatttttcattattccttcacacctgattgatactctggttggtgttacggggtgaactgtatctcttcccttcaaaaaaaaaattaaagttctaactcccagaaccccaaaatgtgactttatatggaaatgaggtcactgatgatgcaactaatttagggtaaggtcacaccgaaataggaagttcttgtaagatgatttccagctgacaacagataacacaagggaagacgccatgtgataatgacaacagagattgaagtaatacagttgcagaccaaggaacaccaaagcctgccagcaaactaccagaaagctaggaagagacaaggaaggaatcctctacactttcagagagcacatgacatcttggcttctgatttctcgcctccagaagtgtgagacagtgactatctattgttttaagtcacccagtttgttgtatcttgttatggcagccctagaaacctaatacagttggatatagaattctagtttgcaaataattttttctaaaaatttagttgctctctgtgtcttagcttccagtgctgctgaggagaagtacaatcttgttctgatttccaatccttagaatataattttttatcctctctggaaacttctaggatcttctatctattcctaggattctgaaattttatgatgattacatgtgttaaacatccacccgggtgtggcggctcacgcctgtaatccagcactttgggaaatcaaggtgggtgaatcacttgaggacaagagtttgaggccagctagccaaacatggtgaaatcccatctctacgaaaaatacaaaaattagcagggtgcggtggcaggtgcctgtaaacctagctactcgggtggctgacgcatgagaatcacttgaacccaggaggcagaggctgcagtgagccgagactgcgtcactgcattccagcctgggtgacagagcaagactccatctgaagaagaagaagaaagaagaagaagaaggagaaggaagaaagaagaagaaataaattaccagacagggaaaggaaaagagcaaaaaaaaagtccacaaactcagttcctaagaatagttcccgttcctaccaaagtagaaaaaccacataattcactttgggtatggggtaaggaactttgaagggtactgtcttagtagtgggatacaattaaccctacataaatgactgaattggttccacctaaaaaaaatcaaaacccaaaagaacaaaattgtttttcaagtaagtaaattttacaaagtctagcatcttgttaaaaaaaaaaaaatttccaggcatgcaagaagcaggaaattatgaactgtaatgaagagaaaaatcaatcaatagaaactatgccagaaatagcatagatcatagaattagtagacaaggatattaaaactgtcattataattgtagtctatgtgtttaagaagctgcagaaaagttgagcatgttaagacataaaagatgtaagacacacacccacacccaaatcaaactggtagaggcaacaactacaatgttttatatgaagaatgaactggacaggatttcaatattagatattgaaaaaagattaatgaatatgaaaacatagcaattatccaaaaggaaacataaagaaaatcttgaaaaaaaaatgaacagagcgtcactgagctgtgagacaatgccagttagttcaatatacatgtatattatgtacatgcacatgactccaatagtcacaccaaaggagaggagcaagagaatggaaagaaaaaatatttgaagaaataagggcaatgtttgcatttgtcttgctctacctggtattcctatcaaggcacctggtatatattaggtgtttaataaacatttcttgaacacatttgcagcaaaaaaaaatgacaacgagtaagagataagcacctgagtgttactgcaacgtatttaggccatcagaggacaaaaaaggggaataatatggagaaaaggcttggtagaagtggcatgccttcagcagggacccacgaaatgggttcaactgagtgtgtacaaagtttggagactaggaagggatgaagaagggcattccacacaagaacaacacaaatgaagatttggagcctggcacagtggcccacgcctgtaatcccagcacttcgggaggccaaagcaggaggactgcttgagctcaggagtttgagaccagcctgggcaacatagcaagacccccatctctactaaaaatttaaaaatttgccaggcatggtggtgcttgcctgtagtcctcgctactggcaagactgagacaggaggctctcttgagctgtgattgcaccactgcactccagtctggacaacagagagaaactctgtctctaaaacaaacaaaaagacttggaatcaggaataaatatggttgaaactatactatctggactgaagtggtggttgcacttagtggtaatgagaaatgaagttagttggatgagttagggtcagagtatgcaaggctttagaaataggaaacaggagagaaaccattgaaagtttctgaacagaacttgtgatgatgaaatcagaattcaaggggagaaaaaggagcatagtggtggcatccatgatggatttggagaagaaaatactaaaggtgaatggaaagggtggaccaggggcaaacaggttattaaaacagtcccatcatgaagtgttgaaatgctggatgtaaacacacctaccacagtatcagtacagactaagggcttggataaatgttagtcaaatccaagtactaaaattcttcttggttcgcgaaaatttcagaagtggctcaaaaatctgtaatgcattaagaatattatttgcttcacaatatttcatttacttaagattttataagaatcagctgcttataaaattgttactttgtggtgcaccaaagcaccttgttctctccctcacccagatatgtttcatgctctttgtactttccaccccttaacagatttggagggaagattcaagccgtggatttttaaatttaaagcaatgctgtcacaaattgagaactgacaacatgtcattacacatttaattgccaccgaatcccagagtttaaaaattgtaaggacctaagagataggacctctcgttgtacagatgcggaaactgaggctgagagagggtaagtgaacagtcccaggtcacagagctgctaatgggcaaggtgggactagaatccaggcttgactcctctacgctgagccaagggttcgaagcgattgggataagggaagcctgaggcagggaacgagagtcaggaaagcagctcttcccaaccctaggaggccgggggacctcgtcaccgcggaaggagcggagccaggccgacctaaaaagccgcaagtccaggtacccttaccctgatggccgcggcgacacactcggccaccttcctgatctcgcgatactagccggtactcacttttccggcttcccctaggccccgcccccccacctcagcccttctgtcgtcatttcctgtgggtctgtaggttaagggagaagatggcggcgctaggggaacccgtgcggctggagagaggtgagtgcagccgaggctcggcggaggtgggcggaagggttgggggagtgctgtgtcgctggaggggaggaggagtgacccaggctctgagatccgggccacgctgtcccttgtgccggcgccagaggccgccgttgtctctgtgcctggctctaggaagggcgcttacggtattttgtctgttaaccgtaagccctcctctgttcacacggactgttccaaggcacagcacaactaaacacaacctgcccgcttcgcagacacacgccgcacacgcgctcccttggtgagcacagcagaagcagcattcggagacccgtacacccgaaaagcaaacgtcacacacccggttcgcacagactacactcattgcctgtacagcacgagaacggacacacggtacaattcaacagaacctcctttccccgctgtttgcacacaaactccttcattactttctccacaacctcgcttgtattcgggttggggtatttgctagcttttgtgcccctcctagaaatggagaggttgctttaaaaacaatcctactgacttggtcttgggaaggaggttacgtaagtaagccgaatagtggtagatgctaaaacacttgcaggtgcagtgtttttcatttcttacaaaccctacaattgcaaactggttggctgattgcttcctagagcagactgtcaaggaaaataaaaccacctctgctgagtaattagagatagagaagcctacgaaaataactggctatgcgcctaccatgatttccagcattccagcgtttccagtccttttacagatttccagcattccactctgtccctaagtcctttatttcaaacaatttcaagcatgcttttcatacaccagcattagaaatcattgataggaattgagaagtacaaataaacattttgagtactggtggtaaaaaaaaatgtatatgtaggatggagactgaaattatattgcacatattaacatttgcaattagtctaaatattactattgttccctaagaaaacacatttttagaattactgtacttagaaaaacctctttcctaatgccttcccacaaacaaatgtgcacttaatgttgctgatttgctctttaccgtgttcaccatttggaagcctcactgtaaatgagattgtttccgttaagcctattaaagcatcattttagaggactagctactctgggaagacttgccgagttaggcctaagtctctgacatcttcctcttgagcacagtggcactgtgttttatagatgggagcaaatctgtttggtgttaacaggagtaagttttttctttgaaagctagttaagattctaacgtattggtcttttgtgtttttgttgttgctgtttggagacgtagtcttgctctgtcgcccaggctggagtgcagtggcgcgatctcggctcactgcaacctctgcctcccgggttcaagcaattctcctgcctcagcctcccgagtagctgggactgcaggcgaacgccgccaaacccggctgttttttgtattttagtagagacggggtttcaccgtgttgcccaggctggtctcgaactcttgagcttaggaagtccgcccgcctcggcttcccaaagtgctaggattacaggcgtgagccactgcacccggccggtctttgtatttttaaatgcaacacaaaatgtggaacttctgtggcatttagttttgatagtcttggctttgttttttgctgttacagatttcttttctgttcttcagtagaagactccacctcttagtaggatgaattacagtcagccctccatatccatgggttccatatttcaaccaactgcagattgaaaatactcagaaaaaaatcgtgtctgtatagaacatgtacagacatttttttcttgtccttattccctaaacaatgtgatataacaactgtttacgtagcgtcagatattgtaagtaatctagagattatttaaagtatagaggggggatatgcataggttttatgccaatactatatcattttatatcagagacttgagcatctgcagatcttgatatctgtggtatctgaagaaggtcctaatgaatcccccactgttaccaagacagctgtactagtggttgccatttagcagggtaagaaagtcagattacatcacctctgattcttgtttagaattctaacagactctattaacaaacactcccaacgatcctaaagtagaaaatcctacagtacaattacaatacagtgcctgatcacatatgatgatttagagtgccttctaaatcatcaaactatgatttaatgaaacacaaatttgagcacatagtaggtacattttagatttagtcaaaagcattttacttttttccatttttttcttcactggaaatttttatatggcttatatattataactttataaatcaaaataattgatgaaccaacagtccccatgtatcggtcattctggtgatgggaaatcagaatggtgaaggtctatttgcttccattgcatttgattaactttttaagtttaagctttctttacctcaaatttaaaaatctgctttctggccaggcgcagtggctcacgcctgtaatcccagcactttgggaggccgaggcaagcagatcacttgaggtcaggagtttgagactagcctggccaacatggtgaaaccctgtctctactaaaaatacaaaaattagctgggcctggtggcaggtacctgtagtcccagctactcgggagactgaggcacgagaatcacttgaaccctggaggcagaggttgcagtgagccaagatcgtaccactgcaccccagcctcagcaacagagggagactccatctcaaataaataaataaataatctttctgccaggtgtgatggcccaagcctgtaatcccagcaccttgggaagctgaggtgggtggatcatgaagtcaggagtttgaggccagcctgaccaacagggtgaaaccctgtctctactaaaaatacaaaaattagccgagcatggtggtggactcctgtaatcccagctactcaggaggctgaggcaggagacttgcttgaacctgggaggcagaggttgcagtgagtggagattgcgccactgcactccagcctgggcaacagagtgagactccatctcaaataaataaataaatatctttctttactacatttattcatagttttctatctgcaaacacgaagaaggccatactaactctataaagaaaaatttccagtccttgagtgtaacgaaatcaggaacttctacttaagtcaaaaggaagcaaagcaataatagaatactgggcattgtagtaccaggggtacaaaaacagtataccaaaacagtttttggaaaaataaaagtagagatagttaacagtgttatagctgacttcctgaatcttctaaaatgtctcaattcataaaacacttatcctcacacttctcagtgagaattccctaatgtgcttcatacatttgtataaatgtatacaacctcttagggttttttttgtttgtttgtttgtttttgttttgtttggttttttgtagatggagtttcactcttgtcacccaggctggagtgcagtggcacaatctcagctcactgcaacctccacctcctgggatcaagcgcttctcctgcctcggcctcccaagtagctgggattacaggcacccgccaccatgcctggctaatttttgtattttttttagtagagttggggtttcaccatgttggccaggctggtcttgaactcttgacctcaggtgatccacccgcctcggcctcccaaagtgctgggattacaggcataagccactattcccagccaatatttcttatgattaattggtaccaatgtaacataacacttttgcttgctaagcccttttttatgtattttgtggttcagttgttaactgaactcataactcttcctcataacccttatatggaaggtactgttatttccattgtacagtgaaagaaactgagacataaggacatcatgtaacttgcccaaggtcacacaggtggtattgagaccagattgataaagctaattgtttttatttttcttttttgtaaacataagtgttggagcttgtttgaattaacagtgttaattaagttgaaaaaaaatcagtttatttcatttgtactgcttgttttttgcatttttatggttgttttaaatgtgtccctgccactaactgcatctgctctcgagtggttatctacctatgtatcatgtttctttcgaggaatgaccagtgattttactagcttatagtgccttgtactgttcagtgctttggttactaataataattaggtaaatttttattgactagtttctgacaatattgctagcttttctgaagcagtacaatgttcatgtatcggtcacatttgagtcacagtcctttccgatgacatttggtattttgtgttcaatttgcctgtgtttctccaaggtcttattttatgcttctgtaatctcagtagtttttcctatctactgtaaaatttagtgttcttacattttacattctcaccctccatgtgtgtacacacacacagtctccttcccaccaaatgtgcaaattcaatgctttttttcccctcgattgtctgtatattatttgcccttgaggaatgaatcctaactgccccactgttacataggcattgagaaaacccttggagaaaattatctgtgtgtgtgtttaactctagatatttgtagagcaattgaattattggaaaaactacaaaggagtggagaagtaccaccacagaaacttcaggctttgcaaagagtccttcaaagtgaattctgcaatgctgtgagagaggtgagtaaacatcattaaaatttacaaaaatttgagttaattaggtcagataatactctaaatttgggttcaacatttcttaagaaaaactttagaaaacattaaaaccagtccctctcatttttggaatttctgataaaaccattttataaagatgcataactttgcctgaaattttaacttcacagagaactcaagcatggtatattctgagatataactttggcttttacaggtatatgaacatgtctatgagactgtggacatcagtagcagtcctgaagtgagagcgaacgctactgcaaaggtaaatttttttgttttccaaaagtaagaattcttcataaattagaagtttaaaatatggagttattaaattcataataaacttactttgaagactaacatgtatctttcaagctacaccaaatttctcaagtactaagaaataagacatttgtttctattgcctttacataaatgctgcatgataaatagcttacataagctattttatcatgcagtttagataatgcaatagaaatgtacttgcatacaatatgtatcatgcaatatataattgtgttgtatatgttatatatatgatactatataatattcattatacaaaatctaatcagaattttaagatatgaattactatcctcatcttattgatgaggaagcatgaggtgatttgccgcaaaccacacaaatagcatatgatagagctggggtacttccccgagttgatttttgctttcttctttacattatctgcatttctgtgccattgttttcctcaaataatttaggtattgacctcactattcatgatagggggtttgaacagggtaatatcagcagtcggtgacttaaattaatcatcagcagatagttttttatggatagttactggctcacaaaaggaaatggtggattctttgttgaatacaaatacttaaacatgtggatatagtttatcagtgtagaaaagaccagagaaacatggttttaattgctgagttgtgtgagtttgatagcctactgaatttctgagccttaattccattatctgaaaaatgaggcctttttcagagcttcgaagataacgggtattcagtaaatcttgatttcttcaaagataacgggtgttcagtaaatcttgatttctttcctcctccccatttttgtgatccatcacaaaaaaatggtactagataattaccctttaaagcaaagtgaaacaaaatctcaactttataattagtttggattagtctaaagttgagctttaaagaagatacggctctgtttcatcttctgtggggatttttagttgtgtctagttaactaaagcaacaaaacattcagattggctatatgtacctctctttttctcaatattgagttatttcttgacatcttagatatttagtatatagtacaaatagtacagaagccaaaatgattacatataagggcaactccatgttgattatataggtaggttgtgtcctgcacaaaggctcctgaaggagttgggagatccagatctaaagcccagggctgctagcatgctggggaaggggttttcctccttaccatgtacaatatcagtctgcccagtaagtctgcttgccaagccctgcgcatacaggactgcacaaaagagtgggcactgaatgggctaggaatgacctaaaaaatcataacaaaaaatcgtaacatttcctgcataactcgaaattattcatttgtcgtctctaaaataccttctgtttagcttaccttctcagaatcaccagtgaatttgtgagcattcagacgtcaaaaatacgtgctcaaaagtagtttttaaaaagagacaaaagaggccaggcgcagtggctcacgcctgtaatcccagcactttgggaggccaaggcgggcggatcacgaggtcaggagatcgagaccatcctggctaatgtggtgaaaccccatctctactaaaaaaaaatacaaaaaaattagccgggcgtggtggcaggcgcctgtagtctcagctactcaggaggctgaggcaggagaatggcgtgaagccaggaggtggagcttgcagtgagccaagatcacgccactgcactccagcctgtgcgacagagcgagactccatctcggggggaaacaaaagatgaaagaactgaagtaaataaaagtcatatttttaatatgtaaaactttctttcaggctactgttgctgcatttgctgccagtgaaggacattctcatcctcgagttgttgagctaccaaaaacagaagagggccttggattcaatattatgggaggcaaagaacaaaactctccaatctatatatcccgaataattccaggtggaattgctgatagacatgggggcctcaaacgtggagatcaactcctctctgttaatggagtggtaaggatgaattttatttctatttgtagtgatctgttgtgaccacctgggggcgtatttgagtaataggagaaacctaagaaacttgtggtttagaaatgccttgagggaatcctaggcagtactattaatacagtgatccttttttttaagcactataagtgtattttgcagtgtaaattagcagtgcttaatgtcatttttatgacataagctctttattaaaggcaatacattaaattagaagtctaccctcattttactcttataaaatgccaattgcttgatctactgaaataataaggcatatagattaatatgctaattatttggaacttaaaagccagcttttagactataaacagaatatgatgtaagagaggatttcatatagattaaaatggtaaggcaggattatttcttagttttgtaatgttggaataatataacattaaaacttttcttcattatatatattgtaaacatttttgcattttgagttactttcaaaacttagatattagtgtatggttggttgtttttttttcccctagagtgttgaaggagaacatcatgaaaaagctgtagaactgctgaaagccgcacaaggaaaggttaaattagtggtacgatacacacccaaagtcttagaagaaatggagtcgcgctttgaaaaaatgagatcagcaaaacgcaggcaacagacctaatacatttcaaaacttgatatttcattttgcgttttagctagagaagttttccttgtgacttactaatggctgcaatgccaatgattgtaagaaaacaaacaaatttatcatgaaattctccttgtcattttataaatgcctattttaacatcatttatggttccagagatgcatacacttttttctgacaagaaaaagtaaaaggtgatgagggcaattctgtcctactgtttttacaggcctttttcaaatgcagattttgtcataaagttgttatagattttttaaaatgcttttttaatattaaaatgtacttttacattcttaatctttttttagaaaggaaaagttttcttcatttagctgctgatttaaaagtaaagttctccaattctttttttttgcttactctattttttttaacctgtgaaatttctttacagttttccaagaaattaagcataacagtctcatctacggcagttcattacactgtcaatgttaacatcattgctgcattttgtactttgaacacacacataatatatataaccagtggtaaatcatgactcagtacagtgcaagttttttcacttttacttaaacataatatataatggatattcatttatactgatttatgaaagtaagtttttaaacactgaaacaatcattgctaaaatacatattcttaatatttgagcattgaggcaagaggatgtaattgatagcattacttattacatccctatttatgttcaaccgtacatcaaattataaatgcaaaacaggttcagatttcatcttttgtgatttcttttaaatactattcatttttatttaaatgcacagtatttcccctatattttagtccttccattcctagagacaaaccagttatttggtggtgggaagtagctgaagcaaagaaggaaaagtaatacctttaacctcactagcttcaagagtagacattcttactagctcaatttaaataattgattttaaataggaagaaaagaggatatatttaagatacatagaaattatgatgtgaagtattcatgagaatctgtagattccatcaaaataagtaggaactcatactaaaattgttggatttaaagaggcaacttttgtttatgattcaaatatgggaatttgagaaatatttcatttgtccactggatgtcactattttactaaaaggcagctattagtgtgggactgtgactgaggtcttaaagactgaaagagttggggttcattttctgttacaacttacaggaacatttgtactttaagaaaaatttaagtgacaaatgttagaagatgatggattgaaaaatataagtaatttggcatattgaccctatataaaaaagtgggcattttgtaacattccttcaggaagaatagaattgtatgcttttttctgcatgtttgtgatcactgtgagtctcagatgattattccagttttcaatgatttttcaaaataaaagtcaatcagcattgttatttatcattaaggtattgaacactggattgcatggttgaatgtgtctttaatccactacaaaatgtgcttgttattgataggatcatgttgttaaattgtaaattttcaaaattaattgatgttttaaaaatgttgagaccaaagtagtatagaagtatggacttaatttaattgtaaaattattagaggtatttgttgtagagctttatatattaaagagaggtattggtgcatataaaaacagtaatattattgttatgcttgtattcttgcatttcagggtaagtaaaccctgaagaaatcttattttagtatagctacagctgcagtagcttttaagtatgtatcaacatttcattataaattatagcttcctggttctgtgtctcagctgtttcagaactttcagccaagttaaatcttttttggtgttgaaacttttagtaagttgagtaagctatttttttccctacggtaatccacaatctgttctttgtgtgggttgacacctatttataattcttaaaataagggtagctcaaaggagccaagtacagtagtttagcttgctactgttgagcatgaatagcagtaggttgttttcattaatgcagttttcataatgtatcccagaattttaaatcttgaccatagaaaaatacagtcattcattggcaaagatgtacagtggtggtttagtgcagtgaggaaatgatgggaatttttatcttagaaatggatgattcgtgaataaaactaggtacatagtaagtgtatgatagatgtttgatttgtaaattacaaatataaattatcacccccatttccatttattttcttgatatatcaaaatgtgttgacttagtgattctcaatcttagctacatattagcctggcagagctttaaaaaattgatacctgggtcctattccataacaactaaatcaaaatcacccttttttttttttttgtaaagctttccaggtggttctaaaggacacctagggtcaataacccattataaaatgatctgattacactggacactcttaggaagtatcaaaatagaacagttcaatttgcagctacttaatgattaattacatttcttaggttttttttttgttttttttttggtttgtttgttttttgttttaaaagagacaggatcttgctttgtctcccaggctggaacacagtggtgtgatcatagctcactgcagcctgaaactccttggcttccacctcagcctcccaaagcattaggattataggcgtgagccactgcacctggccaagtaatttcttttaggaataaaaggtacttggcattccttatttgggaagtaattacagtcttatctttttttttcttttttcttttttttaataaaatctaccagtaatttaaatgtgagctttttatgtctgtcatcattctgccccctttgcctttaaaacttacaaaaatacgtgtttgttatttgagaaagcatgtttaaaaattgcagatgagaaatattgtcgttaataattatgtactgtcttaatgtgggcacttcatttgttagtataatactagataatagcagcctagttctttaggatttgacgattcaaattttttttttgttttttgtttttgtttttttttgagacagagtcttgctctgttgcccaggctggcgtgcagtggtgtgatctcggctcacttcagcctccgccacctcaaggcagttcaagcaattctcctgcctcagcctcccgagtagctaggactacaggcgtgtgccacctctcccggctaatttttttgtatttttagtagagacggggtttcaccgtgttagccaggatgatctcgatctcctgacctcgtgattcgcccgcctcggcctcccaaagtgctggaattactggcgtgagccaccatgcccagcctcaaatatgtttttaaaaaatatcattgtcctcctcctcttaagatttttttaagttattttgctcaagtacttaagtagtctggctcaagtactttgtttacaattaaaatggatattatagcatttaatagaagaaatggttatggcttatccaaaaagaatgtcagcatgacctggtgtagacttaaaaaactacatgtttgtgaatattttataatgtggaatgatcattgaaatatcaaggattctagtaattgtatttcctgaataaatgtatgtttatgaattttctaacttacattttgttgtgtcctctgccaacaatctggttt

SEQ ID NO: 5 - DNA, 76344 bp, Mus musculus
ggtgaaaccagccaacccatcctttccttttccctcataactggcttccttggcagtataattcctaacacttagctaggcacatgggtgttctgaatctcatgcatgtttcctagcctgcatgtccactagatttggtttgtttttttaaaaaaatgtgtaccagaaaaagcagtatgtttaaatttctagatgctttcaaaacttttccatagctctctagtagatttgctctcgtggtccgggtccctgatatatttgttcttgttattgttgttaaagtttctgctgctgctgttgtttttgttatgggattttttgttgttgttgttgttgttgttgtttttcagacttaaacataaattctcaaaaatctccccaattcattcttttgagctctgctgaatattacattgaaagcaggagtggatacagggtatgtggggtctgaagtatatacaatttgaggggcatcctttacaaaaggaataaaatgttacaaataaaaccttagagccatcagaaatatttatttagaggaagggatctcaaagtgacacagtatgtagaccagccaaaccaggactagaccccagagcatgtgtgcagggagtgtgacagtgctggctcaggcactaacaagctatgtgacactagacacatatcttctcagtttttcccttctatccctcttaaatgagggcaataatactaagcccgcaggactgacaaatgccctaacctccaacactatttctgacatgacaaagtactcaagaagaaccaatcacaaagaaggtgtctttccactcaaaatctcaggttctgtttcagagatgtcactgagggcaaaggctcatcatccatgttcaactgcaaagctacatcttcggcctacacttacttttctgtctggagctatttgaaccaaattaattctaaaattcattaaatcttatgcttttttctattgcttcctgcttgcaatgtatttggatacattagtgttgccaaatgtaactgtgaatgtaaaagatattgaatccttaaacccaaccccacaactcagaaggacccactggagagaccttggctctttgaagtctaacaagagctgttatctggtaaagacacctcagccagtattgctgccagccagagacagcttgacctgatttcatcaccataatcaggtgctgttatattacaagcacagtaatgactcccatttattgaacactcactatctgccttgtaaactggtatctaattaacgcattaaatcctcacaaagcttcacataacagttatgattacccatacttttctgatgaagaaatggagactcggagataacaagtagctcgtcttaagcaaaaccagcaacctgtctctagcttaccagattacagtctcagcaccatgtccaaacccttaaccatcagcagcttactttctgacttggcagatgaagaagtaaaacggtgaaaatgaacctatacaggattgaaagaactataagcacccaataaatcagtaaaattacgttgttatttaaacagactccaaaagttaatagttggcatagacagccatcttacatctgaaacatccattggttcagaattcaggtaaatctcttaaggtggcattgccagggatcactttggtaactgatggttgctctggtctggaggattcaggacagctttactcacagatctagcacctcagggcaaactggaggtgggacctcagtagccctagttccctaaagtctcacagcttccccatgtggtagctccaaggcaccaactacaatcaaattattcatcccaatactaaagctacagaatgggatggttttgttttattttttctacagggataggaagtcagataatttggctctttgaactctgagtttgttgatttgccaaaataaagaacattcttggggtggtttcaaaagcagaaagtctttcttcctatgagaagacagtcatactgaacaaaactccacactacatcctcatcttaaatgaaaaatctcttttacagccaagttctatacctggtcacattctgagacactacagattagaactttgatatatgaaacctgcaagaaggaagaagatgaataatttagcccacaataagtgtcagatctagtgctgttaggtaagttggaaaagatgcccaaagagaaaaggtgtttgccaaggttagacaacccaaactttagcagtgagaacaagaactcttttccattcatcccactaagaaaacattggacagttttcccaagatttatatcctgtgtcttataggagcacaaaacagaagcaggcttggtgtagggactggcaattcctcccattctttagaaatttcaggctctttacaaccacctatatcacaagacactaaggtcacggccttctttgcacacccagatctctgggctatccatatttccctttcttggttgacatttctagagtacaggtcactatttagattctgaatcacagtaatattggagaatatgatgtccttgtttatggcttaacatagatctatcaagactttgggaacatctccacagtaatttgcaaacttagacccattctgggactctgactcatcgcattagtgccccctaatttgcagtgtataccccatctttgatttgcagcttttgggtttcaagaataacctgcatcttggaaagaaattggctaatatactatctaggtttcttctaggatacatctgctaccttctaggatgaagagagctgaagttgtttaacctctagggaaatgtagggcaactggggctcaatgccttttttccagtctctccttgtattccaacatatttctatgctgtatgagattagaatacatgtcttcccagagataaaaggagcaattttatgctaagtcatctagtaaaattatactaagcttgtattatatatcactatggggttggaggaggggaggaggcagtatagtatatatatatagtatatatacatagtatgttgcaacataaataaatttcaacaaaacaaacaaatatgcattaagagaatgatgtggcaaaaaagttttatgctgcataccattcaaaattatggattatgaaaattgaaaatccggagttttaattcttatcctatcagttgctaaccatgtgattcatggtttgttagaaagatgtttaagcagaagtacatatacaaagaactaaataaaaaacctggcacaaatcagtgcccaatacataatagccaccattcttatgcctcctaacagggctgtaagaagtaaatgattgaggcttttgatctctcataatcctcaccaaccttgcaaatatgattttcccccattcttcttcacttcataaatgatttcttcaaatatctacttggtcctgccagaattttccctccagtaagaagcagaggaagacaagatgttgaaggaaagattcacagttccatgttgtctggggcaagagaggtagttaggacaacagaaagcacatatgtgtcagacgtttctaaggaaacactggagagaactgtctttttctctgacttgcttccttggtggaactgatattggcttgcgataccaggttgagtccttggttggttttgggaactcaaaacagaaacttctaacagctagtcacattcacatccaaagccaagagcagagaaaaataaatgcatgtatccttacctgtttttctttaatccagtttttccactcatatggtttaaggcctcctttctagggaatggtgtcatccactgtgaactgggtcctcgcaaataaactaacttaagacaatagtgcatagacatgcccctcagccacactgatatagacagtctttagttgagactgccttcctaattcattcttattctctttctctccctctcccttctctctccctctcctccctcccttccctcctctctctccttcactcctcaccctttctatctccctttttctctctcaaataagtgttttgcctgtatgtatgactgtgcaacatgtacatgtttagtgtcagcagaagccacaagagggaaccaaatctctgggaactaaagttacaaatggttatgagtcatgggtgctgggaatcaaacacagatcctctggaaaaacactaagtgctcttacaagctgagccatctatctgcattcctttggattgacactcaggacatagtcctttctctcaatctaagcttcggttattttccacccagaaaccataggggacctacactctaaacctacaatcctttaagccaggtttcacagggtagccagtcatttctacaggggattgcagccttggttaaaccttgatttcagcatcttcagaagacaccattcttctctcacatccaggactggtgagataaagctgattcagaacccataactcataaaaaatctgagtaacaagtgggcattttctttaaagtactagttttttttattaacaaattaacataggaccctgggagtttcacaccagctagtttttttttttttctcctagaatattttattcctgttccattggtcaggctgattcttttttttttttctttttttttttccattttttattaggtatttagctcatttacatttccaatgctataccaaaagtcccccatacccacccacccccaatcccctacccacccactccccctttttggccctggcgttcccctgtactggggcatataaagtttgcgtgtccaatgggcctctctttccagtgatggccgactaggccatcttttgatacatatgtagctagagtcaagagctccggggtactggttagttcataatgttgttccacctatagggttgcagatccctttagctccttggctactttctctagctcctccattgggagccctgtgatccatccattagctgactgtgagcatccacttctgtgtttgctaggccccggcatagtctcacaagagacagctacatctgggtcctttcgataaaatcttgctagtgtatgcaatggtgtcagcgtttggatgctgattatggggtggatccctggatatggaagtctctacatggaccatcctttcatctcagctccaaactttgtctctgtaactccttccaagggtgttttgttcccacttataaggaggggcatagtgtccacacttcagtcttcatttttcttgagtttcatgtgtttaggaaattgtatatcttgggtatcctaggttttgggctaatatccacttatcagtgagtacatattgtgtgagttcctttgtgaatgtgttacctcactcaggatgatgccctccaggtccatccatttggctaggaatttcataaattcattctttttaatagctgagtagtactccattgtgtagatgtaccacattttctgtatccattcctctgttgaggggcatctgggttctttccagcttctggctattataaataaggctgctatgaacatagtggagcatgtgtccttcttaccagttggggcatcttctggatatatgcccaggagaggtattgcgggatcctccggtagtactatgtccaattttctgaggaaccgccggtcaggctgattcttattcagaagcataggaaagcaggctctgtgagagtgagtattcatggtcatgcattatctgtgttggggtaaggcagttacagacatgaccaccagatatttattttcagggagacatttgggaaagctgcctcttcctcccacctacttcctgaattcctggtcacccacatcaatccaagaccacccaaagcaaaggtcttttggggattttcctgttaaaaacatataaagctgaaatgaattttgacagaagactagagtcctttgataacgcctggcatgtctgacatttccagagagctccctgggtaaatttaagtctctagcatcgatacatattcagtaccatacagacaagcactgagtggtggtcaattcaataaactctgtgtttccctaatataaaatgatggagtcagccagagttacccgaaagtcttactgtctttgaactttacatatagaatatcaatgctgggactgcatatataaaaacactaacaatactttcctatcaggtgaaaaggagactgtattccaggattcatgtggatgaaaaagtcacttaaagaaagcacactgtacgctgaaactattcacatttatttgctgaactgaagagaaataagttccatttttggatgaggcagaaaagtggtgtgttacaataacagagctcttgagcctggggaacgctgataaagtacaccatatgctggagttagggtttccatcgaatttataaatggccatttgaaattttcctcaatcaacaaggagatacttcctcattctctgtctttcccttatttcctgatctatgagcagaggagctttgccaacaggaaccctacttgctgaggccctgaggaaaggcaatggccgttctctggtcttcattccttgccaggatcattctacccttgcgtccgtaaagcactcttttttttttttttttttttttttttttactttttttttttttttaacttttggattttctttttttttttttttccattttttattagggatttcgctcatttacatttgcaatgctatatcaaaagtcccccatagccacccaccccctctcccctacccacccactccccttttatggccctggcgttcccctgtactggggcatataaagtttgcgtgtccaatgggcctctctttccagtgatggccgactaggccatcttttgatgcatatgcagctagagtcaagagctccggggcactcttgtctcagcccattccttctacgtttttcaggatggcaacaaacacctcaatgctgcactatgtctcctctcctttcaaagaaaaacagacctagtttctttaacctttcagcaaattccccaaatccctctgtcattctagttccttctgctatgctttctctagttccaaaataccctatttatagtaagaaacccagaatgagctcaggactcatcatatgacctaaccaattccctttccatgactagaatagttttttttttctgacttctcttccattctgcaatttactcagtgtatctcaaatggagcagataattcttcttttatttcattccatgttaaatgacaaatattcatattctaagctaatgctatttattataaaacactggtgttcattacaatcaacacaattctagaattaataaattcagaaagaggttagagcctgtggtttatacagcattacaattttaaaactgttttttttcccttgattttttttaaactgtatgacattcactccagttactcgagagatttcttagctgtcaatcacaccatcgtgtgagtgaatccattgcctggaagaacacgctttagcactcagctgtgcaaaacaatgcaaccctgtcacctggaaatttgttgaaaatgccagatcttgattcgtatcccagacttggaatctgctttctaacaagccgccaaggaaatcgtgtctattaaattatgagaaatgcagttcagcagctgtgaaatcttccctccagatactgcaggcagagagatcttgagtgtctctcgctaggcctaccacattgcgcttactatgttctcctcactggttttcatttgcctttccataatgttaactatgcccatccatcccttcttactgcctttgattcatctttgcctgtaagacagttttaagagatccactcagctctagttccatactccatggggtcttgcttcagcttcattgtgaggctgtctggttttctgaaactgagttaggtcatatccaaatcttctagctcaagcttagttgtcacactgaggaatgcatcttgcagatgagctcttgcagactaaatcgtgagtttccaaaagctttctgtctctctgtcttttttgatgctctgattgttttctttccagctaaactaggtttgttagatggaagatttcgtgagctctttttaaatatgagctcaacaccaggttcttggcaatcattacccattcttgttttcagaaagctttccaaattgtgcatcgtgattctctgcctctccttctattgcctgtggagaaccattaggaatcaggaagtgactaagagaccaaatctttcttcctacctggacagaatcacttcttatgtcataaacagaatttttttattattacctgttttcttaggctccaagtcagtaactttgctaccatctgaagcttctcagtggccactttcctgcatggattgtaactagcaatcttgaggtgatgaataagagaagaaaacactgagggaaggaaatatcttacattaattaaccaagtgctcaactctgaaattcaaggatgctttaaggaattattaatctatagttcattagcccttatcactctacctggggcagaatgagagcaagaggaaggatttaaagtagtagtaagagagaaaggagaaaataaaacatcaaacactggatgagatggagaactcatcaacaacagagtgatttggtgaaaacacttgggcatacacttgagtactatctcatccacctcaacgtgttagcagagttcccagctcatcagtttgaatatgatgttgtaaatttccatttaaaaactaagagtatgctatttcaaaagatacccaaccatctcttaatttgctaaggaaaatatttctttctaattctgacttctattaccccttcccactacttctgagatgcttcaaacatcaaatgtgttcttgtaccatctattttgatgggctcttattcaattttgtgcttatctttataaagcaacagacagacagaagacaagctttttaactgtggcattgatagaataccatgtgaacacaaacaaagcaaaaatccttcctctgttaggttatgttcctatattttgatttaagtttggatgcatttttgagttgtgatacttaagacatattttttagcattcactttgaaatggtcctatcattgcttaaatgaatggggtcagctaaattggagaagtgtgatattcatatcacagctgactagagttgtgtgagggaaaaaagtggcatggccttgggaacaagtgttcccaagattaaaattgtagcaggtacactggttgacatctattttaacaaataaaatgactgtagccttagcttgtattaggtactagatttctacagacagaaaacaaaaaggaattacataagtgaatttgagcagataaaaacctggaaagctgataatgaaccaggagaacagaattctccttcaggtcagggagaaatcaagaaaggaaaatatacacatgtgtggtcattacacatatatatcacagattgatgtaggtcaaatgccatctcctcactcttccccacaacccactacagtaaatctcattaaatagcgattctcattattcatcttggtccataagttgtatggctttttaataatagctccaagcaaggagggcagaaaaaaaatattcctttggaaatactttcagtacaatcctgtgctgtctaaatattttaaatctaatcactcattcatattttgaatctagaaatacctaagccatcaatttagtgtgcccgtaaaacataacattaatttttagaataaatatctgttagagaaggctataccctataatggccagaaactgttgacaaagtcattaaaatgtcaatgagaaataagtgtattcgcatacagaccatcctcccacgtcattttacgatttcagaccagtctgaattcatcaacaggcaagagaacttactaacagcatgatgaattgcattctcaggaaactggcttttctcacataacctgtaccccaagacctctgaagatggcttatgccagctgtcttagtcttagggcagcatctgctggctaattcatggatggacaaaaagtgacaatttatgaacaatatgaacagtgttgtttcttttttatttgatttttgttttttgtttttagctggaggtaactgttgccttggtgactgtaactggtggatggtattctctaagtgatgatgcacaccaggtcaccaagagcctctaagaggtaaagaaagcctttgtacaaatatatgttggctggagcctagaatgatctgggttgactttgaaaacatctctttaggggtgcatatgaatgcgcaacactggatttactgctaatactaataatctagtaccaatggagagtccaagaacagaacttcacagaaggcattaaggaagtaacgcttaggtttctttaaagaagcattcttaggataggagggggaggggacctgaaccttgaagcagccactgcatgctaatgttcttcaaactcatcctatgtataactctgattttatacaccaagaactacgaattcccttcaaacacagcacatttgatttgattaaagaaacagaaattttaaaggactgggtggtccaaaacttcagagctatccaccatcttccgcaacatctccctgcctcatccctgcagtcaatagcgccacagccagggccagtgatgcctttggtggggtccattggtgggaactccagaggaagagcaaaatcatggtgtcggcaccaaaccggggaaacctgaaaagcagcgtccggggacttcccagggcactcgcactcatccgagctgcgggtatctccataacaactggtttacattacattcattctcggctcctctgcttcgctgcgtaagctaagctgagggtaggcaaaggaagactctagtgaagagatacctggagctagcgcctccctatgttgggggatatggttaactctggacttacagctcatttctagagatttccggacatctgcctaggatctcagcctaagggccttgcccttcccccactgcacccctcccccaccgcatccgcctttcaagagattatttttacacgcccgcgcacacgcgcacacacatacggggggaggaggtttattttattgtgactcttcttgaagttcatctctttccttccaacttactttcctccaacacgtgacctctccacttcccagcctgcgcagtcactagtgggaagtgtagtggccagcgcgaggcttcctgggagagcccccccgcccgaagcccacctcctggagcttgcggcttcagttctcaaccccgggaagcacccaaaatagggcagcgactctggggaggaagcacggagccggagccgacgcggagctgggagactagcgccgatcttcccctcctagcctacaccttttcgctcagagctccagggcggacctagccgcgcacagaggctgttaactctcatttgagaagccataagccattagagcaaacgcagtcataacttcattcaactcaagccgcttgagagcttggcttgcacaggttcctgtgggcaactagtggctcgcccgggtgcctctcgcctagtcatcagtccctaagaggaaaagggaaagttgtggggctgatgcgctcttcgattcacgcagttgttccctagaacaagtcactcccgctccatcacccagccccccccccccctcccatttgatcatcactcacgaccacgtccgctggagacccttagtcatggtgggggaggggcacgaacttttctaagaagtttcctttttaccaagggagtcacagtgagttggtcacgtaactggctcagagaggctgccctggccccctcccctcgccccctccccgctgcgcttttctggtattcttattaaagcagtagccggctggtgcagaaaagcaacaagttccccagcggtcttcccgccctagcttgacaaggcgaagggtttcttacctggcgacagggaaatctcctgagccgagctcatctttgccagagccccaggtgtgacctgagcagtgggcaaaggatcggcgtgcaaattggattatttttatgggggtactctgaaactccctcactttctctgggaactttttgtgctagggctcagtgacaggcgttgagaaagctgcttcaggaaacgcccgctatatagcagggcaattggacagtcattggtaacctcgctcattcattagaatcacgtaagaactcaaagggaaacgtgtctctcagaatgagggcgtttgcgtaaatctataggtttttcaacatcgatgccagttgctttgtcttctgtagtcgccaaggtggatgagagttgaagctttgcggatattgcgaagggttattagattcataagtcacaccaagtggtgggcgatccactgagcaaagccgaacttctcacatgatgacttcaaacaagacacattaccttcctgcatctgttggggagacaagattttaagacactgagtctccaggacagcaaagccacaatggtgagtagcaataaaccgtgcattataattgaaaaatcttgacatgttgcctaacaacaggcatatcatggctcttcctagcacttcacacgccaaagaacagcagctattcaggccaggggaatcgggtttacccactgcaagtttaattggaatcatttgagatttaacacagcagtggggaactgcgtggaacaaacttggaactggagggggttgttatactggctgttcaaagctgatgcttgtctgacaaccgtcttgtattccatcctttgctttactgtatggtgtgtgagcatattgtatgatttatatgtgggcatataattgacatccgcaagggggttaatttcaatctaaaaacaataatgttattagtttggggctggggtggagagggtaagagtgggttagagactaagagtttaggtgaggatagtggtggagttgggggcgagaggaataagtcagaagtgtctatctataatgaaatgggtaatgctcgcatacgtggaaagggtctcatcaacatgtgatcaactattaacaggatggctttggcaaagccatccacacgtgacaaaacgtaaggaagtggaagaaaccgtctagagcaatatcaagtaccacttaattagagaatatttttttaaccttttcctcctcctgcgccgggtgtgtgatcccggagagcagagtccattcagcaccttggacagagccagcggatttgtccgaggtggtagtacttcatccaggtattcttttcctcgctgtcaagccaacccggtgtcgcccttaaaaagcgtcttttccgaggttcggctcacaccgagatcggggctggagagagagtcagattttggagcggagcgtttggagagcgagccccagtttggtcccctcattgagctcgctgaagttggcttcctagcggtgtaggctggaatagactcttggcaagctccgggttggtatactgggttaactttgggaaatgcaagtgtttatcaccaggatctagccaccggggtggtgtaagccgcaaagaaggtaagcaccggggcggggaccctgcatccccaattcttgagctattttgatactcgatcttccggaaaggacgcgtagtggagaggaggaagtggagagagagcatgagaaatggttgtttcttggtatttggctagtttaaattgacctaggtgagaacctggggcaaatcgaggtggaggaagctcaatcttcctgcggatataatgagtttagttaacttggaactgcaaatatctgattcaaatgtaagatttctctcattccccctttccctccctcttttccgttctttttgcttgtgtgtggtgtgtgtgcgtgtacagtagattcattactaattatgaagctttttacacaacattcgatttcctaagatttgactttgtaccatttagaacaagaggatggagggaatgtgcagtggggaaagaggaggtggaagctgggagagggacggaggttagctaaatacccacaaaaatgaatcaaggtaatttcagctcctctagtgaggaggattcattctctcggtatccctgcctccctctctttcccccctccctacctccttcccgccccccttttccaccccgccccctcctcctgcttccatccctccctcattttctctctacctctccatcgccctcacgatcctcgatggatagttctttatgtttgggtgattttttttttttacccctttctatcatccctccccgagagttccgggtgctggcttggagggctcctgcttctcaagggaaggggggccgctgagactgcgctccactccctgccgggccggatgcttcattgagcccaggtccgagtcaggcggggtaactcagggaggaggggggtgctccgctccggagtggaaggtcctttctagatcgaagagcccgggaacggcccggggagggggcctgggtggtttgtggaggtggagaagaacactcctagctccgtgcggcggcaggaccgagccaccaatcagcggggcgcgcagaccgcccagccaagcgaggttgtgtccactgacgcgggtggagggcccgggctccccgccgagctgccgccactacctgggtggcctggtagcctagcagggagtgaagatggagggattggagataagctagactccggctgggagccgcccagtcttttcctccaactcccctgcccccgcctgcgcccccaggggactcggtgcgcccggagcgtgccactgcgctgtcctccagcctctcttccgggagttcagggacttgcgtgcccccgggcggggggcggggaagacctctccacactcttacaaccccccattcccaccgcttccaccgccctttgttcaggccaggagctttgccctgccgcagctttcggagtaaggcttggtgccttgggacccctccccggataaggcttgggatgcgggtgaggggcgttattggggggaaaaggaaagatttccaaaactcaagactcaagattattttaatgaacgaaagcatcccaactctgcgcaggtggaaatgatgaattcatagacgatgctaggatattgtggaaatttgggggggtgaggggggtggagaaagaatgaaaaacaggcagttggatcagatgactgcccataggctgttcgccacacaaagggagcgtagggcagggtttacggatcaagcctgcagcgaatggggcacagacagttccgggatccaggcgttttctcagtcagatctacgcgaaaggagcggaggggaggggccgggagggaagcgtggcgggaggggcagggcttgggggcggggggatttcggatcagtctgatgcaattccaagcgtgctgcaaaggaactccaaggcgcccgcatcaccatcgccacccacccttcccagatggtgctgttttaaatacggatctgcagggctgaacgcagaactgggagatttattgcaaaatcctgagaaggggggccggggacagagaaccaagggacaaaatttaaaggtgcaacgcctgcttttccccaacccagcggcaaccagttggagggatttttttttccttccttctttctttctgtctgcctgtctttggatctaattcaccaaggaataggtgtaaatattatgacattttgagaaagcttaatggatagagaaaaaaataatcatctgtcattctaaattgcagagtttccctcccgcgccatgccttgctcgtgaatacttggggctgcctaatacagttgctagggctttagacgaacgcttcgttaagggaatattgtttttagtccacttgccaatttgtctgacagttgaacagaggaaattataggtatcatgtctgggcgacaaggagaaaaaatacttaccagcctaattatttaacctccattttttttaacaatttaaataagcctcaaaagtgtcacgtcatcctcttacacccaagcatccttgacttgtaaggaaagatggtttccactgtcactttaagaatggtgcccctgatattcactatttttatgtattaacatagatctctttaacgcaaaagcaaaggtatttcaactgccctttttggaatcagaagattaaagatgataggagatggaaagggaggaagagagggagagagagagacatttaaccttataatcttaatagtaatctagcctacttttgtagcccctggtcttgcatattaacactgtaggtgagatttttaccttggtctatctccctcagtgaaatatataagttctgaattagatgaaaatatgatgtgcatcttgccagaatctttcccagtatccttgacattaagacccacaacacagcaatttttggaggacagagaagaacatctgaataggctctgcaaactgccactccagaaatgggcctcatcagtataccatcctttttacatgcagcatttgtacttgattgaaccagagtccttgctaattaaaaagatcatctcatctgtacagtcaaggcaggaaatgaaggttgttgtgtttttttttaagcaagcgattaattggcttgctaaatattgtcagttatctatcagtgtaaattggagagaagctttgaaaagaagtgggatcaacctgtgtaagccgctgctttcatttgcacttcccctaccaagtctttaaattcttaataagaaaaagctggtgaatttaggtctttccttttcctggcctgtcctctaggggaaactttaataagaaacaatgtatcaacaccagcaaagggagaaagagacaagagcctgggtgaccacaaaacagataagcagccactgaaagtcagaaaattgaattgaggcagttgaaactaaaatatgacttacaaaaggagttttatttatttagtttttaaaaagttctgtgatcttggggaccatgttccaaattgctcagatagcattcatttggttgtattgtttacagtctgtaagttaaaatgatgtcttattgaagtgttgatttttcttcctaaataaattcttctacgtaattttttgcttttaattagagcaaactagtccaaccatgcaagtgatcctaacaaatatgaactgatatcatctgatataaaaactctgctgactgaaaactatatttgttctgaacagcactgacttgccagaaaaatatctatttttgtagctttcttttcactctatggataatttaatgagttgcctattttaattttacaactgctacctcagaagtatctcaaattatctttcttttgctagtgtctttctttgctgatctgtcagtgcattgtgtgtgtgtgtgtgtgtgtgtgtgtgtttctagtgggagtttaacaagcagcaaatctcttaaaattacatactgtaatccctataaagaacactgtgtagtagttaataataaaataaacattagcattcagtgaacgtttaccacttactgagtgctctgaaagtggagggggttgccttaagtggagaagattaaatttttaaacaataaaatgttctctccccttctgacttcagactgagcataatatcaagaccataaagccttacatcttttagttgggaatgtagagctgttcctttcacaagtatctctagaaaaaggagacatgttctataagcagtgacgcccctgccccaacttgacacttgggtcaaaatactgaattatcctgcctccattctcgttggtaaggtttttgggggttttgttggtttgggtttggtttggttttttgccaatcctgactccccccacccccatctttcctccctctcttttctcttccattccaacactgtaaaaagaatcctgtaaggagttctctataatcaagcgcacagtttatttgtattttctagtaagaacacttcatggagaattttgacaactcattacaggtttcttcatttgatttccagatgggctatgttgggtggggatcaccatggcctcttacacagggaatttcggtgccaagctgcagagacataccacagtggacggtctgaaggctcggagtctgtctcttccagtttcaaggactgtgcttgttcagtgcccaccatgcccctcagacctatctaaggcctctgagggtattttaggcatcattttctcctattttgatttatctaattttttaaaaaagggatctacaaatactccccaaatttggcagaactaatggaaagttttaatcagcccatgaccttgccttcctaaattcttctttccctctctcaaagttggaggctcaaagaaaacaggaatcttcctgtggctgacacactagctaagtcacagtcactaattcccctgaaaaacaaacacagaagataggtcaaagccaagaagtacattacttttactcatgagtcagagaatctaatggccagacatttgtcagaggtcacttagtccagcccatatccgatgcatgagttcatgctggcttgctctctttcaaccctctggaatttcatcctggttttggattcctggatacttgtttaccttggtagatagtgtttgcctatcttaagtgagctatgatggcatttgctcccagcatatttctgcagaaaattaacagtcataattttattccatatgtattaaatattaatcaattatgagtcccaaactatgtcagaatttgaagattcagccatgagcaagactgaatgatccttatcttgccagaacctataggctggtgacaaaatctgaccccttaaagacatctggatttgtactttcttcaagaaaacacagtgacttgggttcaaagacatagttcaagctttatcctcaactcattatcaataactgaaacgtcaactcagtttctgtttccatgcacatagtacagaaacaatgttctcaggataagttctaaagtctatttcagtgtcatggttgactagtgtacaatatacaacctggaggtggatgaggtatgaggatcacaagctcaaggcctgcctagcctgcagaatgaatttaaactcagtttgtgcaatttaatggttctctgtctcaaaacaaatagtagaaagatagcagggatagttgaaaggtagagcatttggtggtatgcgtgagacccatgggtcatgaccgagcactataggagaattgtgtgcactgtaactatttcccctttcttcacaagaaatccagtttaacttatcctaacctttgatgatttagaattttaaatcactaattttttactttctaaatacatttaaataaaacttaaagacaacagatttgggacctacataggaggtctctggatgtggaatttaccattttttctcaaaaatgatgattatgatagtttaaattgaacaatgaatgaccttatatttgtttagatttattttaaaggaaggatgtggtagaattcccactgtcaaatttgagggcacttttctttgtgacatacatgttctatgttttatgtcatttctttttaaaattaaagatattgcatcctgaaagtgtcttgttcttataaataatgcattatatgtacatgctaatagataattagatggtctagccaggagaaacatgaaagagaactggtaactcaaagcctgcagaaggtgtgtgggcatttggacatccaggaaatgctatagatctgtccttagctaactcagcctcgtggagataattaagaagaaatgtgggtgtcgagagactgcaagccattccctgcgattggctggattgctgcagtagttcaaaaacaattggcacagccacccacactggacatgattgccctttgatgaggcagctattgacttttataaagatgccatatttaaaataacttctgatgcactaaggatgacagacatcactcttgaattctattttaggcaaatggcaaaatacatttcaaagtataaactttttaaaaaaagaataaaccttagggaaattttcttcaagcaagccatttagcaatttgtaattccaaatttaacagttcaacctgaagctggtagaaaaatgtgtcttatatgagatcttttaaactgaaaaggccatttctctggattactatggaaaatagaaatgacctttccaatatttttaacctctgagtgaatgcatataccctttccaaactaggaagcagagcccaacagcagaagaaaaacattgggatcttagtgccagactatgtatcaagtgctgtgatacctagaaaccccatcagagactatatcagtgccaagggaagttaagacagagatctcttcaggttcacagaaatatattgaatatgtacagtctctaagtattaagagctctgtaaactgaaatatcccaattaagtgttctcatgagtgttcacctaagcaggaagccaatagggtaaagcatggctggagagatgaatgcaaaagagagaggaaatgtatagcaatatagaaataatcagggaagcagaaaagaatcgggattgtacaggagctctctgtgggtgtttctccaggccatttctccctggccatgatctctgccttccatgctcgatagttctaattactttagtagaaaaccatgatttccttgactctcactttcatcctcctctgagaacctcttcctctccaatgacttccataatcaatattaaagaattaagctcttattctttatgacatgttgaactaacatgggatttgtagccatttttgtggcatagactcttggcagtctgatgaaccattttgtaaactcgtttcagaatactacttctaaatgaagataataaaaagtttatggttacaaaggaaaacaattgcattacatatagctataataatataaaatgtaatatattgtgatataaaaatatatgcacttttatatattggataatctagcagcaaaatgattgctataattttgaaataactaaccattggcatacaatacaaaaatgtctagcttctgcttgtaataaagtctgcaaatactactgggtaagatccactacacatttgacaacagaacatgtgggaggaaattattaacatagcattgattcagaaatgtgaatttagccaatgtcaacattagccatttggttttcctttctggcaaaggaaattggcattggcagaaaaaaattaaatcagttttaccattagaaaagctacacagtgtgtaaaaggccaattgacaagatagccatggtgtggaatatgtgcttcaattgagctccatatgaccctaatgcataattttagtatcagcagcagcacaattccatggctctagaaatctagtcctcctgtgaaaaggataggaagttccaggggcatgggtagggtatagcttagtggtagagtgcttgattagcatgcatcaagtcttggggtttgatctgcaacatggccacccctgcaaagcagatcttggaattttaagctcgggctattaacttaggtaatattaccctcagaaagctaacaatctttaacaaactcaactgtctgaaaactcttagatattgtcattgttacactgtaggaacattgacagaaattgtgaggtgagggaacatctgtcttacattgaccatgtactaagctctttgctttgcctttgatatatattatttaaccctcaaagtaactcttggagacagattatattctaattatataaacaaggaaactagagcttggggagtttaagtaatttgcccaaacaaacacagtaaattttaagtggaaaagttgaacttcagacctaaagttttttgacttacaagctcattttaaaaccctggttctaagcctagcctgatggcacaggtctgtaatcccactgtttctggaggcaggaaggacagtgggaggaagggaagccaagtattcctgtgtaatgagtgttacacacgccttcatttcatttacagatggtttgcacatgtattctcctaagaagttctcactacatctcttcgaaataggtgagagcctcaaaatcagtggccacaaacactaatttaggatgattttttttttgatttgctgatcagccaatggctttcaagtggttacttctcattttagagtctcattttcacaatcatagaacggagcatggcaacacttaaccagcgtgttaggatcaaatgaaagaatagtgaaacctgattttgtctcatttaatacagtgagcattccaaattactgcacctcaatgaatcctttccatgacaatctctctaggcaaagcctgtcagtgttcatagcttaacataaggaacctgattaatcctttagacagacaattgtgctaaattggctcagccactgtggcaaagctgggctttaacctgtgtctttctaatgccaaagttttcttgtaattattaatctcacctgaaaattcttatacaattttagttgttataattgttgtcatgtctcagacactatccgtacagaattttccagaaataaatatctaaccccactgaattctgaggctcgttacctgcacactcttgtactcacttcggtttattgcccaatggaggatttcttacttctttcttaacttgtttagaacagttccgcatgagctgacttctaagagttattgagtaagaaacgttataaattgtttagattgggatttactgtgtttagaagccatttcataagtttgcctttcctaactgttactggctgtggtactacagatgctctgatggagaacactctctccaaaacacacagtctatgacaaacctccaaaatctaacatattgtttacagatatggagaagaagaaaatggaccagcacagcctgaaacgtaattgcagcctcatagttcctgctagggactaagatgtttattggctttccttgtgcaattcagtgttcttcctctaagggctccactccaaacttgaaacctctctggaaatacatttcatttgggagcatgccaggaatggtatctgggtcctctgtgtctctgcagcacctcagaagggaaaacaccagctctagaagggtagctgagtaggaagacagcagaagacaagaagtcatccatctacttggatgtattcttgataaatttcatccacccttctcctagaaagcagcttacagagacgatgtgattttaaataattgattgaaggcatgtagataaatcttagcacaagtggtcttttcagagatgctaaagtcacatgaggaactaaagctactggtgtctatggaaagaccttattccacttctaccctgatttgagtaaggaaggatgctgaatttattgtacatgcggtacggactgtgaagtcatgaactacctgatgaagtatacctgatggatgaaacatccaggaaagtttgatctctaggtatcaggctggttagtgtgggttttatgtgattggacttgttttattaactttattctaattaggttttaggtattaacaagacagaaatccaaaacctacaatggttttcaggaagtaaaagcctcaaaagtagtgtagtatttcataaaccttattcttcttagagcttgtacaaaagtagtcacccctgaggatctgaaaatagtattccagtttagttaaaagtccacagcttgagatatcaagtagtgtagtgaacatcatttagtcttagacagtattgtttgtcattggatttggggtcagggaatgaataccttgttcaggatctgtttcttttaaaaaaatgcagcacgtttatgctaaggacaaagattcagctttgattcaaaagcttgttcttttataaaaacaacctctcctgtctccaacttccaggggatgatttgtcaatctgattgaatcttcttctcccttagttttccccaacagctgtgttcagataactcacaattccagtgttttctaagtcctggctaatttcccacacatgttgagtgtaggacttcacgttttcagaagaatatggagactttggaggaagtccagagtagagcaatagaagtgatgaatggattggaagttggagtttatgaagaaggttatgaggttcgatatgctatgaaaacggtctgagaggcaatttagcaacatcagaaagttaataagcagctgtccttcatcttcagtaaggctggatgaaatgaaacaagatactaattgtaacaatgaaaacatgctccaagaaggaacttccaagagctagcaatgctagattctagaagtcctgcaaaggaggtttaatctgctatgtaggaagacaggataaccccataacagccctcctaggggctcagtctgtaaagaatttgccccaaagtaagaaggcctgactttgacctctaaaactcacttaaaataccacatgtggtagctactagaggttcagacaaccagatccctggtatttgctgtctaggcagcctagctagacagtgacctccaggccaatgagagaccctttgtctaaacaaccaaggtatttggcactttcaacaggatagattcctgagtaacaacacccacctccacattcatatatatgtgtgtgtgtgtgtgtgtgtgtgtgtttataccttcaaaacacacaaacatgtgtgcttgcacatgctcaggtacacacaacacagatatacatatacacacaccatttccagatctatttttcacaacaacaaaaaactctacctaggagctggagtgatggctctgcagttaggagcacatactgatcttgcagatgacttaggtttggttcctagcacccataccaagcagttcatgactacctaaaactccagttccagagatacctgcacacatggcttgtacataagctcatgcagatacacatacatacacataaacagaataaaagagtttacctactcatatgtcaaaataagatgccgctgataaagatcacttgccccgtatcttctcaacctctctctactcttatttgcttgccttatgaaaacacagttaagcatgaataacaagaaccagggcaatagttaactgtggggtgcccgccctaactcttatttatccctgaagcctcagagggaagtttcttctcaccattactacacggggcagacagatggttatcagcctatatagtaaaacaaacctaaggcaaaacaaaacaatataagttctctcctttggcaaataagtaatggctcttgaactacactataactcatcgccaagactataaactcctaaagcttggagatgtgttttgtttatctgtgccatagcagatagaatggctggcacatgctgatgtccagcaagttatagccagttgaatgaatttaattgtgaagtaaagggaaactgaaattgatggggtgatgatttttggatgattccagatgatgatatgtgctagacagagctgcttgcatgtgctgtggaggcctctccctccccttttgtcatatgcctaggcaggaccaggtcaagagagctgcataacctacccaggtctttcatcacacagttcatttttcaaaggcacacatatcaaaatcccagggaaaatagcccagattcttggtgcacttcctaatatgactttgagaagcaccacaattacttcatgcttttctttcttcatttgtccatggggaaaaaaatgtaaagtttgacaacaggaaaaatctagcttcgactatcacacattaaaacatggttgtatttcaaaattaaggtgacttactcttgatatctgactcaatgtcctgaaacccagtactttaagttagttcatgctttccatggctctactcccagtacaaccaagacacaccatggttagtaagtctagctctgaggtcccaagtccacagttccatgcccttggtgactatgctcatatccagtttaatgagtaaatcaatggctctttcattgttaatctttccatgttttcagggaagatctggtaacttagaggaaggcttaccaataggtgattcttgaatatttagggggttagcctcagcaatttcataatgatttttatggtactttccctgaagcagagaagtatttccagatgggatcatcgtttttcaggtcctccttttcaactctcagtgcccaggccttttgtgcttccttgcttttatctgtccatactgggcctgtcaggatatagaattcctgtaacatgtgttggccaatttggccacatctaagtatagcatggagttatttttatggcctataggaatcttacagagaagtactacccaatgaatacggaaactatttttcccttaaggtatttttctcaagaacagaccttatttaatgattgcaaaggcttgtgaatgacacagttcaaggccaaactagaccttggaaatcatgcagcatggatttgaaaacatccttgtcactctgctcatcggggaagttttctgtttacttactatttccccatgttaattactttctctagttttcaagcagtgtttggggtcaattcatttgataccaaaccttttttttttccccaaagaagagtgaaggcaggagtaaccaagaaacttcaataaacacaattaaacataaaatgcttatagacatagtaggattgacctcatccaattaaaattattaatagaataatatgtcagtatcaaatctgatcctactgcctctgttcccacttgggtaatgaggattagtttgtatttcctgacaagaagagatgggaagtcacatttatgcctcacttttgtccccttgaaacattgagttgggagaatattaggcaataaaccaaaggaactaagaattagactcactcaaaattaacttttaatctccgcagtaatgacatttcttttctccatagtttttttcttcctttttagtggtagagaaaacattggcatcaaatcttagaaggaatttttgctcccaatatcaatcttttatgtcagaaaccaaactgttagaaaaaaagataatgcctcatttaatcaagatttgcctttatgcttaataggacagtaatctactgctctagcaggcacctgcagtacaagatactcacaagtccaagtccaaaatgagtttgagctaaatagtgacacctggtcaaaaacaaagagaagaaaaatcttttttaaaaaaaacatttgatcttaagcccccaaaactagttgaataagttatcagaatgaaaacatttcagaagaattcataacttcctataatgcacaggccattgatccatcttggctctgatgttcttcagtgaaagggaggggaaatttttatggcaaataggtaaatgtcacaagtctagtctcttactgtttgagtattaccacaatcacaaatcagaaagctttaaatactcaaaagtgggaagaagaagtctacttgctcaggtttatctgaattggtacttgatcttctatccccaaatactcctgcctttctggctccttctttttctcagtgaaaatgcaccacccactggaaaaggaagacacaagcatttatgtctatggtgtcaaaggagagtgagactaacaggatcagccatccaatcagagtctcagggtgaaagcatggttccaccctgaggaagtgctaacagggtaatgtaagttccatagtatagagatctgacataatatctacctgagcagcaacacaggtgctagcaaagacatttgcttgcaacagagtttttggaaaagaagtaaattttaacaggttacaaaaccctgggggcaaaacccattcctaacaaatgtaaagttggaaagtagacatttgtttgaagctgatttaaaattatttaccttttaaaattgcaggtaggactcctccagtcctttttaaagatataccagtagctttaaagattgtaatatagtcacttaagttatgatgatagaagaaatcatggttatattcagcctataacctaggaagaaacagagggtctttaaggtggcccaagcctagcttcatgccctctatcatctgtgttgtaagatcctttgttttgatcacatgctccaccaagttgtcagtggggcaaagcgaactgtgagtgacactctgagagtgtgcatatatttgaatagcctgactatccagagcaacaatttgtaaggggactctaaagtagcttgagttctgatgatttccctttactgaaggacaaagggtagaaggaggaggcctttctcgcttgagcttttgaggtctttaagggtggatctctggtattcttggttgaattactataaggtattgaatctctggttcttcacttataaaacagaaagatttctgtcagcaggttttggaagctttcaaatagcaaatattagtaatttcactttgttaaccatcagcccttggtaaatgaatctcagtatacactaccgccatatattcagtacaatagcccactctggtgacaacagacatctgggaaaaagaactgttatgaacctcctttcctctaggaaatttaatgtttaagcattcagatacagtcatacagcaatgccttaacaacgattaagtcattcagatttcacaagcattcacatacaaggggtcacagaagttggggtgcaagagtctcggatacccatttttgcctcctttctgagtcacatatgccaatttttcacggtgacttgaaatcgtctgtgaatgaattgcttattacagtgctaatcactgggccctgtctcagacatactaaaggccagccttagaagaaggagcctctcttttaatcctcagacaggtgattatgttaacaagaggctgtggcaccgtgctcaatactgccctcttgttcttttatatttttttctaaaaaaaaataaaataaaatgaataataaaggtctgtctgccctagcctttacttattggctggattagaggggcaacgtttaacaaagcagcaatccaggtagacacttggcagagtttatcatacagctaaatgaaagtagccctccagaacctagtcatgtaactgatctctcataggttaaaaaaaaaatcaaacaaccaaacaaaaacggtccaaagaccactctctgctctagaggaagggggcttagtgagctacccacccctcaccctaaatcctggttaagtatatatacatatatatattgatgtgttgttgctgcctagataatgacaggcttggcttctgtgtgcgtgaatttgctaggactggaagtgaaaacatctacaaagcatgcaatgccctggaacggaattcttctaataaaagatgtatcattttaaatgcgcggaattctgattctggtaattcgtgcactagagtgtctatttcgaggcagaggaggtatcatatgacagctcacgtcaaggcagcgtggagccctctcgtggactcccacccactttcccattcaccgaggagaggactgctctcgctgccgctccccccacccacccccggcgagctagcatgaaatctcccagcctctgcctagatcaaatggagcttctcgctgaaggcgtgcgagtattacctccgccatgcaatttccactatcaataatttaacttctttgctgcagaacaggagtacatatcggccaccaaagactcgccccctcccccttttaactgaagagaaggggaaatatatagtaagagtctagaaccttggggaccggtcttccccagagcagctgccttgatgtttactttgacaagtagtgactgaaaaaggtgggtttcttttctttctctttcctcacccccccccccgcccccgtttggtctgctgggaagcatatggctttagtgaggtctgttattgcctaggcttcccggctagaagcagtaacttggtgtaatgctatccggggttattcattaataaaaaatactgttattatcttgattgaattctattaggcacactccggagaggtcagggcgcaaactctggttaagccgatgtgtttaaggtagcggagtaaaccataaccccgcacactctgtgtagtttcattgtgtgttcgctttttctagctttgtggtgcgggaaggtgcgggaaggtgtgtctggggccggggcctgggggtgggggtggatgcacgccctctcccacagaacttgggtgctgggatggaaaagatggggagagttgcaaaccaggggagaaagatttgaacgtgtgagactcacactcgcttcctcctactctagagcacattgcggggagtagggtgcctaggaaccgggattcgaccacccctcctagcaaagggcaccctgcggagaccgcagagggcaggcacagagctttgggtttaagcagcgagctccggggaaatggagagaagccagtgcaaggcgatcagggataccccgagggcttccgagggcttccgagggcttccgagggctgagcccccgcaaggaaaaggcgcgtcgtcccctttaagcagccaccccaatgggtatcggtggcgcggcggagcagggaggggataggggcggcgctgtctgaccaatcgaagctcaaccgaagagctaaataatgtctgaccccagtgcctggctctggctgagctctgggtgcccgtcgctgctgccgtgccggggcgcacccgctggctggctgtcgcacggttcccagtgcgcccgggactcccgggcttggagaaggaaaccgcctggggcggcgcgccacctccgcctgggaggctttgatgagacccggttccttcaactgccaccactgccttggggcagacgagaaagcgcacggggcccagggcagggcgcagggaccagaagcgtgacaacaatgtgactccactgccggggatccgagagctttgtgtggaccctgaggtaggcgactgcggggcgtggggctaagtgcgagagccagaggcgcgtgcgcccgggaaagttggctaggggactgagaagttgtgggactgcagaactccggcttcaccttcgtcccgggacagcggaggggcgggcttgctcctggggagcgttctcccgggatcccacgactctgagggacagtgcgaccccaggaatcccttcagtgtgagagaaaaagccaagggaagaggacgacttgcgccatgggagctaagcctgcgtcccggggatccccgaagtcctcccgcagacgaggaagggtggtgagagagatatagagcgacagctgttgggggctcagacggatggcaccgggacagggctgggatgagagcccttaccaccggcttaggcactctccacgcaaatttggaccggggtggtgtgtagtccgagaatgggtcttggcgccttctgtcctcatctcttttcctgggtatcacaacaggctgttcactgtcacctgctctctagggagtactaccaaagcttacttacaggtccaaggtcaacgtttaactaggaaaacttgggacccttcttatcgctggggcctgaaagggtctgcggaactccaggacagcctgtatccgaccctctgtccatcctgcgcacctccctttgggcatcctcctgaggaagtgaaagttttgactttcatccgggagtaggttgggtgtttatggaggatgaagaggctagttttgatttccagggatgctgaaacaggaagagcaatggataagcgacctaagcgtagaaagaaatagctgaagatgggggctttgtgcttgatgacaaggaagaaggggaaattgctgccgggggtggggggggggtggtgttgttccccccggggctgctgagggcggtgagccacaggctgtgagtttgagtttgaactggtgttttagtgaaaacaattcgtgagttgggggtggagcctgggctaggaaactggggatggggacttggggatggggggagccggagggagagagggaggatccaaggaggagggaggggagggccaggagagctgagctaggaaggtagagggtgccctcttctggccacactggcaagagtagctgctggggctcgtcgaatgggggcggggaagtgttttaggggcagttttgctggtcgttatgggggttgcgagtagaaacttgttgagtggcgttttgaaacagcttcctgaagatgtgcggctcggttcggaattttggcttgttgcatttctttccttgagttgccggggtgctttgagataccattgactaagtgctaggattttcttgatcttacttgagggtcttcccggcatcctaaaatatccgtcttctcagcgtcaacaacagccttttagcccctctcacaagaatacaggatgttcttgtctggaagtatgtttctgcctgtttattaatccttctagaacttatcctttttttaaaaagaaagcgatgtataattaggaacagtaattgttatctaattgtatatgaaaggctaaatgactcccccttcccaacaattggatcaacttactgaaaaatatacccctcttttaattcttctccaaaaatcgattcttttatacattagttataaggtcaaaagccattttgatccttcgattgatttttgttttgtcttgttgcattatttatttatttattttatttacgggtttgattcctctaagcatccgggcccctgtaagtttgagacactattttcaggtcggaggtatctgaggttagaacaagagcggttcaagctgttacacacaataggcttagtcaggcgcagaggatgaaataacattagggagctttaaaaataattactgcagttcactgatttttcataaggtttggaggttttggtttgttcttcctcccctcctccccaaggcaagagagagagagagagagagagagagagagagagagagagagagagagagagacttgttgaaacgtaatctctactggaatttgaaatatggtagttaccattattggaattccagaatcataaagttgttttctgttcctcttctatgttattttgtaaaaatgggataaatattggtaaatattaatagtaaatacaacgacacagaacacacgttgtatagagaactgttttacgtcattaaaattttcctgtttataaatgattcaggaagaaagaaataattcccagataaacaagactgttgtgcatgacgtagacatcttgaagcattagaccattgcagacacacttagacataacattttttaaaacagactaacagtaatttttcacatacttctagagtctctcacagcccattcagagcttagtttgtagtttggaatcatgcttgttttagggtgctacttaaggtcatttgaaaggattgcaaacctttatgcatccagaaattaaatcatttaggaaatctggtttaggatgccttgaaagtatgcacccttttaactgcatacaagaggaacctagaaagtgatcatttgcctaaactgcagccatggttgcttaaatctcctaaaggtcccaagagagaaaaggagctgggttacttctagttcatcttgactcgctgggagggagaaatcatattaaatgtaaatgcaaatttctaaaatcctagcacaaagtcttggattttcttttaaagggggcaccattaaaatataagctgttcccagcttcctgtaatgttttaagagtccaattctttttaatagtcccaataatctcatttcttccgaatataaatagctctgggttgtagcttggcacacggagcaggctgagcacgcccacctgatagtatagcaaccagcttgtttttattcttttttagattcatctttgaagcctttagtaaaatccatctcccccttccccccttctttccccacactccacataccctatatgttgtaaattgtagcacagttggcagatttgggttctatagatgttatcttctaatcaccaagagaatctgagatgcacgacatggaaggaaaggtcacacacaagtagttcattaagaatttaaggtgtaggaatttagtcccggagtagagcaaagagcagttgtggattttctgaatgaaaacagaacacagcaagaggagggcagctaaacctttgactgttatggaagacacactcctgctgcagcagttatagtgtactgatctcctgctaatggttaaaacaccagcctgtgtttctctccttgtggggacggtttccgtttgtgtgagggggctcttttggtcctgtgacagtgagtatctctttttaatggggtaattgctcacttgtctcaacttgttttcaaacaattgttatgaagcacttcgtttccactaattgcaaaattgctgcttaattgaaggactctcagccgcctagtgcagccattcagccactggcaggctctgtgagctcaagctgtgaattgcattttaaagaggaatcagaagagagttttgcagaattccaacttgaaaatgctggctgttgttcactggaggcagaaggagccatttgaaggataatcacattaagttgcattatgataaattttctttattaggatggataacatgcccagatgggcatcagaagtgaatgagtagacgtattggttacactctggcctccatttattctgtctagtatggagtaatgctaagaagtaaatgatgttggcaaatgaaatccgtttgtcactggcattggggagttaacccttggaaacatcactaaagctttagtactttaaaacttagggaagtgcatccttaaagcccctccatcttccacttagggatgagattattaatcctaaataattttacacttgatcttagccaaaaggcctaaaagcaataatcctaagtaattttatatttcaaagaattactaaacttccatcactctatcacaggaatatgaaaacttcagaaagttatggacccaattactgaataatggagtcattgttgatagatttaaaaaaaaaatgacgaaactcagtagttgcatgggtatttgaaaattgttaagggggaagggaatgctatcagatcgataggtagatagatagatagatagatagatagatagatagatagatagatagatagatgaaagaaagaatgaattacaagcagtatggcaaatttcatttatgtaagtaccaaagtgcaactacaaactctgagacacacctttggtgaggtaaatctgaccaaacattgtggatggctatggagtagctagttgtcctgaagtttcatttatacatggcctgaagttcaaggatggttacatttggagagcgaggggagtaacataaatttacaagcttcagtggcaggcataataaagtaaaaggttatttccaaagttcccagagagtaatgaatgttatgtagttttccccaaaggttcacttgaaagaacttttcattggttgtcatggtcgtaatgtcctgattttgaaagcttacagaaccttggcgcttttaaatctgctttcatctcagttgctttggtctgactgggattttatgacgaccttctgtggttttgatatgcctccacattttttggagggaaggcaggcaaaggaggatatcctaatttcaatataaccaggaaatacaaaaaaaattacatgattttttttaagtcactgtacttcagattgttctttttaatccaaaatcagtttgtttttttaaatttcaactagtctatatgaaatttgctaagtatgtaatagaaagtcagataaatgtttcaaattaatttaagcagttcattaaacattgaagtcatagtacctactaaagaatttccccagacttcccagtaagtcatcctgttgccatatcaatctttactgcctccctttcttgacaccctgtgcaggcttggggagtgtgtgtgaaggggagagggagacaggtaacatttatctctgcaggtggattttaaagcaagcaactccacagctcaacttttacactaacctttaagaactttaacatgctagtcaatgtaaaattgggaatcaaaggttgctctctctctctctctctctctctctctctctctctttctcatcattttcaagggtttatactgtagcactgaatgcaaaggttttgattttgcccttttgccactggcaattcattccactttctgagatataataacaccaaataaatgaagtaggaagatcttaaggaatatctttcatctctgatctaattttaactttaatgatttgagaagatttaagaataaaatagagggtggtaagtagagtgggagttttaaacactattctacccaccttgcacccttccccctcaaagtaaggaaaataaaagaggcaacaagaaatgataaagatcatctctacctacgaataagtagcatcaaaatgtgatttaaaaaaaaaaggaaccggtaattataagttgacttaaacttctccccagtgacaaaactttatgttattgattagtagtgtacctctgcatgattccacatcagcatcagaacagagcgagtcttacccagacacacttgataaagcgattgaaggagcagatagattcattagcagttacctgagattctgagttgtcaatgtagttgatgaaagaatttaatgtgaaatttaatgtgaaaaaaacaaggtgatcaacgtttttctggcagggagatagaaactggaggaaatatttgataatatttattttccccagcacctttataaaaaccgtttataaagttatagaacttcttgtgcataatttgcttcactcatgaaattatacctggaaaatttgataggttaaagttgatggagacagaaactgcaaacttactggtggaattttttagtgtcttcaagttttaaggggcaagtggagatgctggtccctgtgtattttagggactgaataaagtatatatttaatgtgtgccagtttgtagtaagaaagaacaaacatcattgtaaccaaagaaagtaactgcactctggatgctttgtgttatccctaggagcaatcagaaaacattcttattcaggaaaaataaaaaataaaaaagaaagaaagtatccctccaccccacccccaactccctaagaaaaggaggacagatttatgagacaggaaagggaggctcattcagtaatttttgccacctgctaatcattcctgtattcagagtttctgtctcagagattatattttctgtgggctcctatgcctttgaaatgtgaaactaggcccaaattgaaacaagtttctctatgtttcatgtgtgcacttatttcttggatgtgattttaaacatagactactttctgttatatcacatagaatctaaaggtcgagaaatctacaatcgtgatgctgaagggagatgcttggcagagtcccaggccacattcctagaccaaaggctccaaggtgttctctcttatgcaacatggggaaagcacacccagcacgaaatgttggctggtgatgtgtctgaaggcacagacgatatgcttatcacatcaaaacataaagccaacaggcgctgcagacattctgctgctagatagaagttggatcatatatatttatttaatggaaaatagtgtaattaacttctgtgtgtgggtgttgtgtgcatgtgaattatatgtttatatgtgcttgtgtgtggatgcatgtgcacatgtttgtgtgtaaagaactagaggacaactttaggtgtcatttcttagggatgccatctgccttgttattagagacgaggtgtcttcttgacttggaacacacccactacactaggcttcctggtcacagaactccagtcatccctctggttccactgccccagtgctgggattacaagtagatgccattgtcctttttgtatggggtctgaggacagaactttttggcccttgtgattttgaggcaagtattttacaactgaactatatcatctcagctagtttgattttttaaaaactcagcagaacagaataggaaggtaggggtatgaacttagaggatgttaatcaacagatgtcaagaaggagaaatttgggagttttaaataattgcacattcaatgtaagaccatagtataatccggagctgtttatagagctagtgcaattttggccatggtagtagaagtataatgcacaaatggagaaaccaataatttgcttacttaattttgaattcaggaggtgattttgctcaaatatctatgatgttaagatatatgttatgtccctgggcaatgcctttataactatgtaagtacagcgtaactggcatcaccaacttagaaatatttagcttgccaacatgcaaggaagcacatattcacataattaatttgtaaattttaaaaagaagaaagaagaaagaggtggggagggactcatatgattagtaaaatataaatggtctggccttctatgtggtaccagacctatcgtctcgtgtctcttaatttatttatttatttattataattatttatttattaatctggtctttgaaacaaaataaaaaagacaaacatgtctattatcctctaatttcatgctataaagcctaaaaagcactatactgtaccattcagcaaaatttccctaataagatcataacagggccccagtattgggaagaaaaacaagtaactctggtctagttggagagcatgcatgtagcatgttgtctcctcccctcagcctcagctgctctcctagagatccatgacactctgcttcataaaaccctcttggaaagcaacgtgttctcagtcagaaggcagtaggtcagtagctagaggtccatagcagggtagtcctgggattttattttattttttctgtttgatgtcagtctcccaccatgttttacatcaatttcctgtgttgagagttacatctgtctcctcattcagagtatgcagaaagcagtaagctgggaggtagatttcctttaaaaaaaaaaatcttcaaagcttcccattgtagaattttggaaaatgttgtttatagtggatggaaacacagctgacctacctcgttctttagggtcttcatggtcctggcaatgatttccttgatgactccacaccctctggttgttcttttttcttttctttttttttaaatttatttatttattcactttacatcccaatatcagcctcctttctcccagatccttcttcattcctgtctcccctctcctctgagaggagacccccactctgggtatcacacacacatcctcaccccctccaccttggttgttctttataatcaatattttgcaaaacctaagggttcccacattacttataacctcacatctctatcactatgccccaaaacatacatgcacacacacacacacacacacacacacacacacacacacacacacacaccttactgttactccagcgtgtcacagagattacctgagttaaactcagtgggtcataaagcaaaccaaaaaatcatgaatccagaaaagaacaggtattctaagggagttttaaatgcattttatcttactttttggtaaataaaaacaacaacaacaacaaaaggaaaatggatataggatttggggcatatattttataaagctggggatttgggcgagtgaaatattgaatatataagtaaaatggacataaggaacactgattcccaaacctggtgaccatcagaaatgcctttcaaacttttaagaatataaaggtgaagtccttgaatgcaagactgagcctgggtctgtgctatgcttagcaatttgcacagttgtctcaaccatacagaaacacttgagatccttaaactagaagccatgtaagctgaatagcctatgatttacagggacttatcatttatttcattgccaaattcctaggttagaacatggctagaaaagatttgcagctttccgtataatcagacattcagaggctctgaataggaggccttctaaatattgttctgacttagaaggaatttctatcatagacttccaaagaagagacaaagatcaaagcctatattcctgagcccagtgttggagttggcctaccaactactgagtctgtgatcccagctagcttcttactctgcctcaacctcttgagagggtagtgtgggattaaatgtgttaatccatgtaaagtttagactggcacttgacattaccactgtgctgcattcttagcacttcccaattctagaagaagaggttttagaaccttgtcatcaaagcagcaaaatgtctccctggcatgcttcatgcctaagtgagctttactttatagttagtgacaagatcagaagtctactctaccataattctctgagtcgaatttgtttattgattactctctccacatacaattataccaattcttcaagacccagcaggaattctgtttccactaaaaaaagcctcttgtccatgataaatctgctttgactgagttgttttctgcatctcagagcactgtgattaattgtataatcattaaatcattgtgtatcgtgtctgtgtcagattaggtgttagaagttttggaggtaatgcctagtttgcaaacacgatttagaacatcttagtgcattccattttcttcacatcacagaaatatttctgaaatagaatttgcatgaggtagcccaatactagtgccgttgctgggtctaatgattaaatttaatccaacataccactgacttactcactgatcttaagaaagttgtgtaagtttttgaggtctacaaatatgttgagtcacaagtgcaggtccctcatttcattgggaggtgcacaagtgtgttgtgtgagttagccagcgtagacacagctggacccaagaactgggaactttacatggggccctcagtaatcaaaatagaagggaaggctctacttgcttttactgggttccaagtagctgatttcctgtcccagcatctggatgttggtacaaagttagagcactgctagtagaccccaggttacagcaccaatatgtggttatttccagcttctttggaatgtttcactccgggaaggtgaggaaagcaatgcttagattttcgtgattagtttaacatttcgggacagctttgaccatccgtttaatggtaaatctgctttccagatgactgtgcatatggagatgagaaggggttttggaggagaggtgctttttgaaagaatggtttttcgttcagtctctaatttggggtaaatggtccccagaggacaatttttagaaatgtttgaagttttccatctgattttgaaagtcagttggaggccacctgtgtgaagagggcacttgctccaacaactatactgctcacagaataaggactattctactgggtccttcattcatcataaatctcatggttatatttaagtctgggttctttcttctatagctgcctccctagttgtcctggtagaatttacagagttcaagatattgaggataatcacataaggagtcctttaactatacgtcttcctcttgaagtctctctgtataagtttgttcttgctttctgtttgtgtttatattctttctttggcaagcttacttttgtattattttagtgacttagatactctgggaaacaagtcgtagtcccctccgctgtttgcccgttgcttacctctcattctagcattgtgtgtcataacagttgtttgtagagttgccccttacaggtcacagatcccttgcccttatactggttgtttttcaaaggagcacagaattcagaagggtcctactcttactctcactgcaaagcagagttgaggcacaggtccttacatctgtccacctatgggtttgttcaagttcctttttttttttaaatagtcaaatagctatttaataggattaactttatatgaaatccaagaggaaggatcagaattcatgtttcacattcctaggttccagtcatgaccttctactaacttcttccagggaaatgtaccaaaagatgaaatgcaaaactcagactgccaggtacaacaacaccacaccagtgtggatattggtctaaaaaaacctgaaatattaagtatgtctgactttcatatttagtgaatgaattggttacttagttaattttcttgagtcagagctttgtgtagcttaggttggccttgaactgactgtgtagctcaggatgaccttgaatttttgatcttcctgcctctatcccccaaatatggagattatcagaatgtacaatcttggcctaggatcagtttaaaatttatacttaacttatttacataattcaaatatcaaaatagtgtaaaaaaatcagtatatacaaagaattctgcctcaacctgcacctaccctacacacaacacctgtaattgccattagtatagaactgttttcaaactagtattgtccgctttatagaaatataagcaaatatgactgtgattatcctccctccccccaatttctaaaggaaaagtgacacactgttttacaccttggttttagacacttagcgctgcattccagagaccttttcattccagcttacaggggaaagagcatgcacttcatagctgccagaatctgatatgaaggagttactataggtttattttcttatagttgaaaactggattttttttctattatatacctttttgtattccataaccacatatgtggtatatatgtgcacacatgatgtctgtatatgcatatttgtccctgtgcaattgtctgtacacttgttcttaacagtagaactgctatattgtaggaaagctcacttataaatttgatagttactccataaaatgttctaagccagactgcaactgtttgtattcccactaagagtgtatgggagcatccttctttctgagaagtccatagtatgttccaataagatgagaaatagatagaaacttccaagtggacattgaatcttttattttgtcccaaatttttcagtgggactatgacacagtggatgtaatgtctcaccctggacatgggtttatgccaactctagtaacacacatggaatggacccatgttgccacttgcagaattccctgtaatggaaagctaagaatacattcattattcacctaactagtgaggttggctccaaagaactcagctgtttattggaacagaaaagaaaacttttccaccatcatgttctgtatcccaggtttcaatgttcccttttccgttaccaacctcatttccaagaccaacttcaagatatacacctcaaggcatagagaagtcctgcttagagcattcatacccatgggatattcttttgaggaataattttgtgcttcccccaaagtttataattagtatcttatttatgacaaattaaaattccagagcacaatataaacactgacctgggctgcactgtcagtatacttcatactcggtgttgccgggcagtttcttgcattatgcaagtagggaaccatatgaaagcaatgtgatttatgacctagataacatcttcacgttgtgaatggcattcatcccaggtcatcctcccataactcttaccgttctcattggattgattcttggtctcattcttctctgaggacagtgtgccttatttagaaaaacaaattctgccagtcctgctgccctaggagaatgtggcaaatgaaccgtagcagagcggttatccgatccaagtaggcattcacatatttatctccttacttgtttgcttgcttatgagacaggaccacactctagctctagctggcctgggatgctcgatgtagaccaggctgactttgaacttgtggaaatccttcggcctctgcctcctcactgcttgaataacaggtgtggtaccatgcctgacctaataaaattttctaaaatagaactttgacagggatttgttaaagggaaaatcattttctttccctctgtggaacagttgaacttggacagttgcagtgatgagtgtgtctggactatacaagaaaccatcctttggtgtataagtggacttccaaatgccagctgagacacagggacaaagacacacttgattttgttaatgacacttgcaaagactttcacaacaggcatttccagttttgttctcaagctcctcaaagctgattctctcagtctcctctctcacaagggcagataatggccagaagcaagatgttctaattgtcatctaactcaacatacacatttaggatgtttgcctcccaccctcatccctgagagtactcttggccccaggctggaccatctcttctgccacctttgtggttttcattacttcttgggaatacatctgagattgccttagcataattttctttctttgcatatcttagcccctaggctacaatcttaaaaagtagtacaaaggtcacaaataaggtgccatatagtattagacatttagacaagcaaagtgttacgttacaagcatatttttttctttttttttattacgtattttcctcaattacatttccaatgctatcccaaaagtcccccacacgctcccccacccacccactcccacttcttggccctggcgttcccctgtactgaggcagataaagtttgcaagaccaatgggcctctcttcccagtgatggccaactaggccatcttttgatacatatgcagctagagacacaagctctggaggtactggttagtacatagtgttgttctccactacagggttgcagatcccttcagctccttgggtactttctctagctcctccattgggggccctgtgatccatccaatagctgactgtgagcatccacttctgtgtttgccaggccccggcatagtcacacaagagacagccatatctgggtccttccagcaaaatcttgctagtgtatgcaatggtgtcagcgtttggaggctgaccatgggatggatcccgggatatggcagtctctagatggtccatcctttcatctcagctccaaactgtgtctctgtaactccttccatgggtgccttgctcccaattctaagaaggggcaaagtgtccacactttggtcttcgttcttcttgactttcatgtgtttagcaaattgtaccttatatcttgggtattctaagtttctgggctaatatccacttatcagtgagtgcatatcatgtgagttcttttgtgattgggttacctcacattcttacttcagcagagttagcagagaagcatgtggtaacagtgttagtggtctataaagtacatggttctgtttcagtgtccaaaaagttcccagggggaaaaaatgtctgacacctctaatgaattaccttcatgtcatgtataattttgacattctggcctgataaatatgtagtatgactggcaccttaagggaataacccattaacaaagaaaccataaggttaaattcagactccatagaattagacttcaaacacatcatgtttcagaaaccctcatataggattttgccgaagtaatttaaaaatgtggaataccaagactacattatgtattcactatgtagactttcaaaattgaagacaccatatccacatttgaatctattcagaagaaccaggctccatctccatcacgctgggcataggcaaatttgatgcatcttcctgtgtctcagataccacagttgtaaactgtggttagtttgattgcatggctcatagttagtcagagttaactgttgagttgtcatttttaatgcaaaaagtagtttagtaaattcttagtatttatatagctgcccagaggatcttctaaagtccatctccacccacatgacgactaccaacactgttttttggtagtaggtagaaatagagtcatcacatcattacttagatgaaatatgttgatgtgagtttccatggaacctctacacatttatatttggtgaaaggaaaaaggagaggcttttaccatcctgctacttgcacaggtttgtatacttccatacctgtgcttatgtgggagtggcattttctgaccagcagtacagactgctttttatctgagatggtactggttttcttatatttgttagtagttcagaacacaatcagtatcttgaatatgacccacatggattgtgacacagtgtacagaaattacttacacttacacctagaaatgttgctagctggagtaaggcagtgggcagggagacatattttatttttcctcccacattaagctgcaaataatgagcgctttcctgtgcatcacagtaagcaattaaaagaaattatagagttggatgcaagcataacccgaaggacaactggatgtgtggaaccaccagttttctccatgtgctcaggctaatcctcattaataactcagaaagttgagtttctacagaatgggttgcatgtccatacatgttttggcatctacccacacacttttatgtggtatgactgtgcatcccaggagaaaggctgtggtgtgtgtcgctgcgcctcagtggagccgaacaaactgattgctgaaaatggtgtcgtaaaggtgagcaacaaagaactaataaccttctcttgctaattttatctcctccaaccctgggacatcgtgatagtaatttgaaaaggaatgttgttcttctgttgctagggacaacttatcttcctccacatattttttttttaacctcagtttttaaagcttggtgtttgtgtcttcaatagacagggtctaatcaatagtcatcccttgcttagacaaaacatacccatccttctgaatcaaggatgttcaaggctacagggtttttttcctaatatggacttaattatagacaaatattctttctgtattgggaattgtgctgatagccaccagaatatattggctatggaaatttcaggagcattatctggataaaggctggcaaggacaagtctctacgacagctctagttccattgggtgtgcagttgtatggcagtggtcttgggtgagctgttagctctctgcaatggcaggaagacaggagtatccagcagtactctataaacagtttgattaaagtagctaattgtgaaaaaaagaagaagaaattgaagcaagacagaccgccttgacttcctttttctgtttcttttgttttgaatttctatgaaatgtttctagtcgacacaacagcaaacaatactgcttaaaggggattcccttcatcctcagatctaagagttagcacacattcttcccttagggaaacaaaatgcaactgcattcatcttgcttttggtgaagggcacacttactctttggaggcaagaagacagagcttatctttcaccgtatccgctgcctggtggtgtgcttgaatataaactggaaaaggcagtcctttagcatgttgacatctgtgcctttcaacctgctgttcaaggtagaactcaacagtatctgagacaccacctgggaaagtaagacagtgtcatgtctgccccataaatttgcacacagtagccaagctgccaggcttcccagctctgagcattcattcatatgcagacttgtgaatctgctaagttcttgatgtttagaatctagcaatcctcacaatcttttgtcaagagttcaacagtgggctagtctccagttctggttacaaaattgtttcgacaactccctcatatttttgttcaattccaaaaatgttaagcatttctttcatttttaacttttaaaatgccatttaaggtacttgccttgaagcaactaatttcaaatattagatacttaccaagaaattgtgctgtctagttactagtcatctgttttagagtccaactgaagttgagaaaggattcttgactcctgctacatatacatacacatgaacatacacacaaatatatactatgggtactgttgtcactgttttagtgaaaccttaattatatttttaatttcatggtctatgaaatgtacacatggtatgaaaaagctgaaatctgttggcttcaggaccaattctaaaattaaaaaatctgcctgagtgggtatgttctctctgcttctgactcccctttaccacttcagaacacaaaggaccagagacatctggctgaaagcaatttgacatctggctgagtgcttggaaatctactctcagatctagttagtcatgtcatctccagtatggttctcattgagtgggtgatatcagactgtgcgaagtgattaggagagctaaatgtgtttgcatttgcctcatagcacttgggaaaaattagtaattgaatagcagtccagatttatatcagtggtacactacaagtgctcatgtaacaattcttatttataggtatcctgtaccttatagtatggacagaataaaaaaaagccagttgacaaaaagagccaaagttttacttaaacccattacaaaatcaacaaaacacatacagtgggtgttgagtcagagaggagatgacaggtaactccatggcatactgagaaaggaccatagtgctcaccttgatgtcgtccacttctttccttatcttccttgactgactttctctgtatgaattactcgattacatctcagctttgatgagtttataaatctacttgaagtatctaaatctagctgaaatgcaggttctggtactaggtaggatacctgggatgagagagagaaagctgagatgctgactttctcatgagctccttggtaatgccaatgcagcttgggcattgatgacagctttagaaaaaagcaaggactcatttagtttgaatacattgaattttgtcccatctctgcatttcctacaactctaatttcaggtcctacaaaaatctcttctttttcttggagcaattttcttaacaagtttctattattactatatcattatttgaatgtacaatggttctgtatgatttcacagtcatgtatgttaatgtgggtacatgggtactatggtgtgtatgtggaggtcataggacagccctgagcaattgtcctcatcttctacattgtttgagatgagatctcatcactgctgcatataaatgctaggctggcttaaatgcttctggtgggtttcctgtctctgtctatcatcttcccatggagatgctgaaattaccaaagctcacacaatgcatatggcttttacatgggttctgaagagtcaaactcagatctttcagtttgtgcaacaattgttttacttactgagctctcttcttaggcctgtactgacaattttgaattgcattaatagcaataagtgttacctgatatttgagactttagactgcataaaattaatttcaactttgaatttttttacataaattcaaagtatatatttaaatacagcttagttgtagtttacttgcatctaagtgatgctgaagatgtttttacatccctgtttactttcaaagccatcatgctgtcataaaaatcccacctatggggctatagagatggctcagcagttaagagcactagatgctcttccagaaaaaccagggtttcagttcccagtacccacatggtgtcttacaaccttggaacttcctacttccaagggaattaaatgccctgctctgacctccatgggtaccaggcatgtactcttggacagacaaacttgcaaacaaaacatctatacatataaaatagaataatttttaaaattccatccatgattacatatagttgatgaacatctgtcattaaatatgatattcatgtgatgctacaggttacacattacataattagtcaataacacataatgacactaattgaaattaataatatttgtctaccatgtacaagaatttagtaaaaaatacgtggttagggtgaatagtaacaaatcctgccaggattttggaagaaaataaaatcctaatttaaaacaattttagttcttgattgtcagctgccagttgggccctataattaaaaatagctgttccggaggatatttagaaatgcacatttgatatgcaaatgagataggaatgcttggtactagggctcatttgttagagtcatgtactgcttaggcaaaggagaagggcaggtaggaacaggtctcgctaggggtcttcggcattcagaaacctccattgattgtgggaaacattaggttgcctgaggcgatgttaatggcagtacttagaacctctggaacttggcagctgtgcctaagactaggatgtcaaggtagagaattctctgcccagagctggtctttctattagatcatttttttactccttcccaaatccaaggaatcatttcagctgatactaaaacttatggttcatactttaactaaacttccccatatatcattccaatagcaccagcataaacattattaaatcattcagtagctagagagtccagttgacataatataatgtacaacttactgtgtgtaagaattccagggagactgcttggtctctgtccttatggaatatgtggtctagttttgcttcaaaagaaagataagtcttctgctaatagaaaaataattgtttgactgtttgtttgtttgtttatgtcaggggagaggagaagaaggtaacagaaggctagtattttatcaaagataccagtaaaattttctgtcaaattaatgattcaggaaaatatacatttttctcatggtattaacctatacttcatattatagactaataaactattcagtttttttagtacaattaaataaagtttgtgtcacttaatgccatggaaaaaccagaccaggggttagagtactctggtatgaaagactatgctttatagaaagttatattagtatcttgaaagaaacagtaccaatgtagatatagatgtttgaacacacgcataatacagacattggcacatatgattatgaagggcaagaggcaccatgagatgctgtctgtaagctgcagaccctgttgtactgtagcatggcttgatccatgtctgaaggcacaaagcctaagaatccactcatacaactccagagaactgatacttccggtgtctaacatcagaacttgtacctattgacaataagtattggaaaagataaatatgaaccaattatggggaggaggagccaattgcccttcctctcttgctgttttatttgggcatcagccaatgatatggattgtatccacccacaattgagggcagactttcctattcaatccatcaacttgtctcacaatctcctctggaaacacaatcacacctcaaaacaatattctttaatctagtcaaattaatatctaaatttaatcctttgaatatcttaagacaccaatatttaaatattaccttgtaaaggtacttctaaatgctttgaaacatctacattatcaaatattattttcaaaattattttttatcttcaatcaaatggacaaccagctaaataggtgaatatctgttatgatcattctgtttttccattttaattatgaatttcaactttaattatctcctttgaggaatgtgtgggtgtatttagcattgccttattttttgtttattcttggtttagcaatacatgagaaaataacatgaaaattatgtagattgatgaaacaaactagtgcctttactgtaaggctaaacttctagaatctagattcagaatctaggttctgaccttgttctatcaagggaaccacacagagtggatgagttgattaaaaactctgatctctttcctccagcacaaaatggggataattatagttacctgcatctcttgggtcctatgagtcttaattacttaatatttgcaaagcacttggagatctttgaattaaaagtgctgagccatagaaccaaagttgagtacagttataattggaatgaaagtttgtagtttctcccaatctctctccatgtcctattcttttgccaagccaaacattactgatgattgatacttaactctgcctactactgtaaccactttccctttcaaagcatgtttcaatagagattgatccagacccataattccacatgtaaacaactacttagtatttatttttaaagctcactattcaataagaatacaattattgaacttatttatttaatgtagtctagtttgtcactccttgaagtcttctgtgtgccatgttaaacacctccctctgtttagaaactcttctaggatcttcagtgcccataaagcagcatctaattcagttgccatcattcctagaaccttaatgaatttgggcagttgtttggtcttgtttttaccacttctagtccagagctcttttttccatcttctaattctaatccttctctcatctcaaatccgttcatcatttaattgtcacctacttctatcttatacagagatctctgaatccaatgaaagcttcacaaagcatttcttcatttcttacctggaaagagcatctctctctttttaaaatttcatccattccttccctggatcatttgtcttttttctaaagtcacacaatggtcttaacctcttcttagacattgaaactagaaactagatcccttgccttataattgaacaaacagaagtgaggttgatatatgaatgtggtgaaatcagatgaaagttaaagatttttcatgttatttttcagattttcattagtgtattagggttttactgctgtgaacagacatgatgatggaggcaactcttataaagacaacatttaattgggactgccttacaggctcagagagttcagttcattatcatcatggcaggatcatagataccagcatccaggcaggcaggcatggtaatggagaagctgagacttctgcatcttcatctgaaggctgccaggagactaacttccaggtagctaggactagggtattaaagcccacacctacagtgacacacctactccatcaggggtacacctactccaacaaggccatacctcctaatagtgccactccctgaaccaagcatatttaaaccaccaaattccactccctggcccccataggattgttcaaatacaagagtttatggggaccatacctagcaatcgcattataaaaaaatacatttagtccaacttctgaagttcccatagcctatagcattctcaacaacattaaaagttcaaagtttctttttgagacccatccagtcacttaactgtaatccccaaagcaagacaggaaaccagctgggcaaactccaaattacgggttgatgtgaaagcagtcttcagatccccaactttttttttttttcatttttgttgactgcctgcgacaaacttttttctcctagtctaattccactctctgttagcatctttcttcagcagatattccaaggctcatctcaaacatcttggggtttccaaggcaactttaatgttacagcttcttgttccaatgtctgggatccacacattatcttctaacctcatccaaaggccttgggccacacctccagctctgcctctgtagcactctaggctctggttgactccactccactgctgctactgttcttagtgatcatcctatagcatggcatcttcaatatgctggggtctttcactgcaactaggcttcaccaatagcctctcataggatctctttatggtaccaagcctcaacttctttgcatgactccttcagtcctgggtcatcaaatgcaactgagggtgatccttcaacaatggccttccatggcctctcacagtgccaagcctcagctgctcaccatgaccccttcataccttcaaaatcagtaccacctgggtgactctgacacattaccaagtacagctgaagcacaagttacaaccttggccgtctctagaacagagatttttttgtgctctcagaaaagacttcccagatttcacctcagtagttctggtctcctcttaatcaccactaatttttttagctccagctaactagcaccagttgtcccagtagtcccttctatacttgacactaaagtcagagccacatggacaaagctgccagagttctgctgcttgctggggctggaagatgccaccccaccccccacccctgaccccttacattttattcccagctttctgttttccagctttcttactgcctaaatttggctgtcctataacttgctttgtaggttgaccttgaactcagggatctgaatgactttgtttcctgaatgctggagttaaaggtgtataccaccacacctggactgaagtttttcttcatctagaacctgctctgtcctaggctggccttgaactcagagatctgcttgcctttgcctcctggtctagacctaaacttagctgggtgcccctaggtcaccactcccttaattcaacttaatatccttgaccacaggattcagctccatttcacttcctggtgcctctttaataccatatttttggtatttttcctttctaatcttattacacttgttcaaaacactcttcatgagacttaatcagagaacaaagtctctgctgggtttgtttgtgtgtgtgtgtgtgtgtttgtttgttttgagatttcctttgtcaatgcaattttaatataaatctctttaccttagtctcagttagaatctttagacaagagcaaaaagcagccacattcttcatcaaaataccacaaaacagtctctgggccacatactaaagttctccactgaaacctcttgggcctggtctgcataattcaaatcactcacaaaaaaagtcttccacactcctactaggatagcccattaagcttgacttaaagcattccactagtgtccaaatccaaagtcccaaaatccacattcttccaaacaaaagcatggtcagaccaattacagcaataccccagtccctggtaccaacttctgtcttagttagggttttactgctgggaacagacaccatgaccaaggcaacttttataaggacatttaattggggctgccttacaagttcagaggttcagtccattatcatcaaagcaagagcatggtagcatccaggcaggcatgttgttggagaagctgagagttttacatcttcatctgaaggctgctaggagaagactggcttccaggcagctaagactagggtcttaaagcccacacctacaatggcacacctactccaacagggctacatctcttaataatgctgctccctgagccaagcacattcaaactaccacaatgtggttttaataggtctataccctgtatgacagaattaaacattaactggtctttctttaacattatcattatccttgctagttataagactgtctaagataagccaacctgtcatgaaactgtgttttcttctgcttacatacacaagacaaagagattaggaataaataaagcttgtataggcctctatccccattatcctgatttgcttgtatgattatttgtttcttctcaattttgtccatgaaaatttagttctaacatgactaacttaaagggagaaaacacttttcttggctcacacttcagagatttcacttcatgatcaactgcctccactgcttctaggcctttacaaggcagaatgtcacatagcccctatttcctatggcttctaccttgccccattgaccatttaattattaatctatcaatagatataccatttatgagatcagagccctcatgatttattcacaatttaaaagacccacctctacacctagcttcagtgagaaccaagtcttcaactcatgaggggaagatctaaatgatgacaatgattaaaaacagttctagtagtatctttatcatgctggctttagaaagctggcctttgtgatatgtgatctataactctgtgatatataactatagaaaatggtgcccaagttttgtaagctccctccttgccatacacgttctcttccctgtgattaatattctaaaactggcattaagttctggtagcaaaaacatgggtgaggagacctgttagttttgtgacatttgacagagttagaagtgtaactgctgtaactgtgtgatcacgatgatagtaacttaacttctctttgtgacaatccaatttgatgacgattatgaatgttctgcaatcttttagtcaacacaagttgttgtggaactacagtagaggagcaagctatcatgcatattgtcccggttggattttaggtcttgtgagtcacacttctaactaaactttctttttacttttttttttaatgtagcatgcattatactgactttactgagatgaggctaagaaagtcttcctagaactctctaggtattgattgttgttaagccttggaaaaattagtatcagtgaattaaatataagtagacatagactgatgatctacttagtagtgccacatgacccctttgtctttggatgatgagatttatctggaattgcattaggttttgtcaccatcagaagtatctaagagaaaaggttgaaaggaaaaaaggtttattagagatctcagcaaatggctgtcatggaggggaagggcatagtagaggaatgattcttaccttgcagaacctggaaagcaaagagaaaggggccaaggacaaaatacccttctcaggtaccttccactgactgatttctataccaaaaccctacttcctaaggtttctaccacttcccaaagtacacaccagctgatgactgagccttaaacataggggtctttgtggagcattttatcttcaaagcacaacagggctgcccaacatatcaggagccatgatttcaaaaagtagagcttggcatgatggtacatgttgtattcccagaacttcagaagctgggacagaaggaatgaggctggagccaaccatcctggaggacatagcaagaaacatacaataaacaggaaaagtgggtcatgcctttgtgctcacataaaagcaccgagttacttttcaaggcatcttctaaagccttgtcaacaaataggccaaaagaattgctgaagtaccactcaaaggggatcagagacgtggagctgtgtatgttgccacctagctaattacattatctctttagatgctcagcctggaaggaaagctatgtgttgacttagagaggaagccgagtcacattgactcagatgtcaactgtgcacttggaatgtgcttacagaattgctgagagaatgatagccggagccttgggtgctttccttatcaggatattacccataaaaacaataaataagagccatgaaaggctgaggaaacctcattaagtatataaaatgtatcattagaagactcattggtgtaacagtaatgagacaaatctctagctctgcagctaagatgcctcagtgcctccaaccatttaaaagcattcagccttttagtaaatgcttacaaaatcgacatctcattgcttctaaaattcaccttctgcttatttcaacatgtcagattgcattgtgtcctcttgtagtatcaccttgtgattcttggtcagccaatcattatatccctaccattgccttcatccatttcttttgtttttctgattgattttttttaatgcacctaaggcgtgtgtgtgtgtttgtgtgtgtgtgtgtttaagatgaaaataaaacatggcatataatgtcaaatcttcaccaatgtgatatagatgactaaaatatttatttatttatttatggatagggtctcactggttagcccagaactaactatgtaggataggctagctttgaattaataaagatccacttgtccctgttttctgagtgctgggattaaaagtatgcaccaatataaaacagtttaaatatgtattatttcattggtctaaatttgaagatccccttgagttctttaaatatagacttgtgatattaggagaaaagtctccctcaatggtataagtaccacctgcccagatcagagacctccatgtagggtccatttctgtaatggtgctggatacaaaacactcctaaacttttagatatcagcagaattaacaggtatattttcctcaaaccaatttgcctttctaaccttaaattaccatgtggtccgagcagttcttctctctctctctctctctctctctctctctctctctctctctctctctctctctctctctctctccaaattactaattattcatattggacttttgctggtcagtagtataaaacacacaagcaagcaaacatgaattaatcttctctgggtaatttacaaactcataccggttcatcatgtccaagctcaaggctgcaaagatactctatagaaaacagcaataacaaaagttcctaggacacaagtgacccttggctaagggtgaggtggctatcaagcaatggagatgctgtgcagaacagcggagacagctttaggcagtgtccagactcctggggaaggaagatatgcgccttcttcagagagatgctgcactagtctcaaaccattgcctgactgtgagtgtgaaatgttgtttcactcatttctccttctgtctggctgtgcttgagtaactagctctgtggacaacttctcttactgtggctgatgtgtggaggctgtgcacatatacgaagtcggaaactgttatgtgcattgctctcctgaggggaagagtctcaagataatggtgatgccactgtagaattggaaagagctttaatgtcccactttggcaagaattcccatagcttgtgttgcgtaagctgtctgtgcactgtgccctatttcactggaggtaggttgttcttgtgttcagcatctcattgtgagcagaaacatgcttccttctggtggacttaccctgcataatgaatgctgagtgtgtatgtctttacaagtctatgttccacagccaataagtagaaagaaagttagcctattagagttaaagagatgctactcgttactactaagaggcagaatgcttccggtaagtaattcagaagtcttccaccacctgatgtaagcttggtttggtccataggtatgtgtcaattttgcttgttattcaattttagttgggtttgcggagtatgcttatagatgcaagccaaatttaactttgaggtatgttattaagtgactctgtaggaaagttcaaatgcacagaaagaagtactagatgccaattcaaaagcgtgtaaagtactactcagctttgtaaaggtatgacaactcagtgtcacacacacacacacacacacacacacacacacacacacacacacacacacacttgagaagggggtggagttctgctaatgagaagctgagctctctgtggtttgccaaaacaagccatcaaagtgccctctgagtctggagagatgtctgctcgtgaaaggcattgatcctgacttgaatgcctttccttgaggactgttccagctttccagctttctcttaaaagatacattgttttcatccctgcctcaggcatgtcattagaacaaacctattgaaaatgaattgtttggaaataagcaaaaccttcacagatgtagtaaaacgttggagatgggatctctagttccttaagtttcttcatgagaccgggcaagtcctgtgtggccttttggttccttatccgcaaaacatggtggtctacatcgcctctaggaggaaaaggcccctcccagcattccgaccgaccgctgttttatcatactgctcctgctcagactgcttagagcaccagacacccagccctctagccactaccgtttccatcacacattcctcccaaggactatgctgctgacttgaaaggaagattactattccacttgcagttgttgcttagtaacatttgtgattgtgtttctggtgacagcgtgtgcagagatcattaaaaattaaacccccaaagctgctaaagcgggaggaagtgggagcagggaagccacagtgtgttcacttgcttagaaaccgtttactctcaggcttacatgtaaatcttggggaaaacattgcatgtctctggtttatattaagccacatacagcacagtaactgacattgatttgtgtcccctgcagctggagtggatcagtaagacaaaaaaaaaaaaaaaaaaaaaaaaaaaaggtctgaaattacaagcagatgggccacatgctgtccccgagaaagaaagttctaacctgttctgtgtctgtctctgcttccttcccacagttccaccaggtgagaagagtgatgaccatccttttccttactatggttatttcatacttcggttgcatgaaggcggcgcccatgaaagaagtaaacgtccacggacaaggcaacttggcctacccaggtgtgcggacccatgggactctggagagcgtgaatgggcccagggcaggttcgagaggtctgacgacgacatcactggctgacacttttgagcacgtcatcgaagagctgctggatgaggaccagaaggttcggcccaacgaagaaaaccataaggacgcggacttgtacacttcccgggtgatgctcagcagtcaagtgcctttggagcctcctctactctttctgctggaggaatacaaaaattacctggatgccgcaaacatgtctatgagggttcggcgccactccgaccctgcccgccgtggggagctgagcgtgtgtgacagtattagcgagtgggtcacagcggcagataaaaagactgcagtggacatgtctggcgggacggtcacagtcctagagaaagtcccggtatccaaaggccaactgaagcagtatttctacgagaccaagtgtaatcccatgggttacaccaaggaaggctgcaggggcatagacaaaaggcactggaactcgcaatgccgaactacccaatcgtatgttcgggcccttactatggatagcaaaaagagaattggctggcgattcataaggatagacacttcctgtgtatgtacactgaccattaaaaggggaagatagtggatttatgttgtatagattatattgagacaaaattatctatttgtatatatacataacagggtaaattattcagttaagaaaaaataattttatgaactgcatgtataaatgaagtttatacagtacagtggttctacaatctatttattggacatatccatgacctgaaaggaaacagtcatttgcgcacaactttaaaagtctgcattacattcctcgataatgttgtggtttgttgccgttgccaagaattgaaaacaaaaagtttaaaaaaaataataataaattgcatgctgctttaattgtgaattgataataaactgtccctctttcagaaaacagattaaaaaaacaaaaaacaaaaaaaaaaaaacaaaaaacaaaaacaaaaattggaaccaaaacattccgtttacattttagacactaagtatcttcgttcttgttagtactctgttttactgctttcgacttctgatagcgttggaattaaaacaatgtcaaggtgctgttgtcattgctttactggcgtaagggacggggaatgggaggggtagatttctgtttgttttgtgttttattttgtttgtttgtttgttttgttttttagttccacccggagtagggatggagaaaatttcttcactatccattctggttgataaagcgttacatttgtatgttgtaaagatgtttgcaaaatccaatcagatgactggaaaacaaataaaaattaaggcaactgaataaaatgctcacactccactgcccatgatgtatctccctggtccccctcagctcactcttctggcatgggtcagggaaaattgcttttattggaaagaccagcatttgttcaaagcatactctttccctccctcctcccattttggtcccttctttttgttttgttttaagaaagaaaattaagttgcgcgctttaaaatattttactactgctacaaacagatgaacaatgtgtgtcattttatgacactcatggaaaacagtgatttttttttaccctaaagaaaaacaaataaaaataacccaaaatattctttttttaaaaggcataaatattgggtaaattgtaatatggcctaacagtgtttgcagataaaagttattgtatacacccagatacttagataagagcagggatccacactgccattgaaataggactgaatggccctgcggaggctaagtggagctgacatactatttcctggcagtgcaggaggaatttctgagtggccatcctaaggtctaggatggaggtggggaatggtacttgagacattcctaaaggaaggctcggaagcacccttcagagcaggctctggaatgatgtgtcaagttgcttaggccttctgctttaagtgcctacattacctaacagtgctcaagaggttctcgattggagaaccacactcaaatccatttatagcctccatcccatttctaaataattgtgtataaagttggattaacctggagcaactttggatccaaatatggcacagcaataatgatattaatgcagcatgatgggaaatgtttgctgtgaagagaattgatttgctttgagcttagacttcaggaagcctaggttttttatttttttatttttgagacattttggtaaaaggaaaaaaagaaaacaaacaaacaaacaaacaaaaccagaaaaagcatcaaaactcaggcagaatgagcaatgtctgaaagggctagaaaaacaagacatagcaaggtgctttcactgtgaaagagacaagaacacaggaggaaatattgcttcagtgaagagcacagacggctcctgccaatttattacaagagtcccgtctgtactttaccctttggggttagaagtcaagttggaagcctgaatgaatggacccaatgagaactagtgttaagcccatttccctagtcaggtttttttcaagcgtgaatgtgttagtggttactctcctgggttcctgagcatcagaaaaaaaaaaaaaaagaggcaaacaatcgcttcatcttaggagtggaaaggaaacagaagtggacgtccgctgtgactcagggagtgaagataccatcagcaaatagtttcttttttgttcattcgttcctttcgagttagcctgtcttttggaataccactgaatatgctgtttttgaaagacttcatgtagcatagattgttttgtgccgtttaccaaattaacctttgtcatcgttttttaacctattcaggaatgcttggaatatctgctctatgttaactttttgcagcttcattctgagagacattagtcaaacaaacaaaaggatccccatcacaatcttacagtactgcaagggccaggtctgttaatcggcttcacaggagacatcagcaattgtgtggtcagtggctggctctcttacccactaagatacatcatagctacatgttggtggtttatgttgacctgagatttatttgttaaaatctcttcttcgtttctgttcgttctggttctgttctgttctgttctgttctgttttggttttaaagtcttgctgtggtctcttgttggcagaaatgttttatgcatggcagcaggcctgttgcttttttatagtgattcccattgaaactgtaagtaaatgtctgtggccttgttctctctatggtaaagatattattcaccatgtaaaacaagaaaaaatatttattgtattttagtatatttatataattatgttattgaaaaaattggcattaaaacttaaccacatcagaagcctattgtaaatacaggttctatttaagtgtaccaattaacatataatatatgttttaaatatagaatttttaatgtttttaaatatattttcaaagtacataaagtctgggggttctgggttttttctcttcactgtaaaatatgaaaatgtgtttcattataaatacatgtgttccttgctttaagaccatcttgactagtggtagcaattgaacagtcctccacacaggaagcttatttcaaagcctggggaggccaatcctgcagtctgtaagcttcagagaagctccaggattgggcctgtcttctgtggtagaagacaggagtgtcgttttctaggacacttgaaagttttcccctttgaagtgatatactttcgtcaaataccaaatcatgcatcctagcaacatcaggatccatgaaccagggctgacaggctctatttgattataaaatagctttttttttttttttttaaaaatcaaagtaggtttacttagggataatgagaataaattggttcaaatttagaaagtcactgactgaaaaccctgcagaaattcaatatttggagacaggtcgtgtccccttggtttggaagtggtgccatttgcagcatgtgcttgtatccattgcactgatttaatttttgtatgtggagcatgcagattttatatcatagtatccatgatctaacagattgctacaatctctaaaaagatttgcctccgtgacggctgccaagccgctgggtaatttagttaaagtgtttaaagttatcactaaatcttagggaaataaatggaaggattttaaattatagaaagggccattaaggaagaaagcatctgttctgactcctaaggctccctgtttgagcactgacagcccatcctagaaagtggtgaactatatctgtgcaatgtatcatttctatttcaaacatacacacatggtttcctcggatattgtcttataaataaggatcaggaaagtcataacaaacactgacttgtgttgtgtatatgcaaaagcaaatcaaatgacatgaatgactctaatctgctcgatgcatttgcagagttctctgacctctgagagcagcccctcactcccagacacacagccatgacagcccagtcatgaaattagaactttgcaatacttcaggcttattcaatttttatagttaacaaagactaaaatattttggggaggactgagtaacaagaggtgggaattaaatacgacatccacatttgtgacattaaatttgtgacataaaaccgcatacatacatacatacatacatacatacatacatacatacatggatatttagcctggaaagactatcatggatatggttaactttaacatgctgactagcatgggaaataggatgaagtttccattagtaacaaacgtcagatcaaaagctatagcttacttagccaacataaaatgtcgccttagctgtagagagggggaaagagagggagagagacagagagagaatcaggtcagaggaacaacaaaatggaagtattgctaaattactcaagttggagtttaacaagagtaatcagtttccactggattaaacctgcttaatcattgaggagcttgggaataagagagagagacagagagagagagagagagagagagagagagagagagagagagagagagagagagagggagggagagagagagaaagagagacagagagagagatgtcagagaacaacaacaaaagtggaagtattgctaaattactcaagttggagtttaacgagagtaaccagtttccactggattaaacctgcttaatcactgaggagcttgggaatgagttgcatggtttgctctgttgctttcatcacattaatgagcctctgtggtcattcgatgtgtctatgaagttgttttatcatctgcattgattttatcaataatatcccagctgctaatgaaaatttgaagtaggtcttggaatgaaagggtgaagttttctcgtattcattgaagggattagcacactctagaaaagagagcagacacctttgaactgcaacaagagacttcaggccttacctcgggtcggctagcattcctggcaacgttattactagtttctcctattctagtagcaagagtgttctataagtcagccaaaatgaaatggccatattttcgtaagctattgctaacacagttaactgagatttaaaagaaaaccgcatacatacatacatacatacatacatacatacatacatacatggatatttagtctggaaagactatcatggatatggttaactttaacatgctgactagaaatattagtatttgatgggacatgggccattctttgagctgtgttagctcttgccttaaaggtcagtcctttagtttggaaggttgaagagtaactgtgaccggctctcttttagttacattgacctttctttggttgagcttccatgtgagagccaaaggttccatgtgagagcctgaaaggttagtgtaaagcacccagagcctacacagtccagctagtgaacactctaattgcatctctagcaccagtcttagcatcatctattcttttaattttagcaagtattctttctaggaaaaaaaatgcaagtgccttgctttttaacacatgattcatgataatatattatttaaagaataaatatcacattaatgacaaaaatactgcagcattttacacattctatcattcattaacaaaaatctatttatgtggcatgacatagactctccacaagcctttccctcagttccttttataacttggtaagccacaacctcagaagctcctaacctggcatttgcatggcgtctgcatgcttggtaatgacagtagcatcaaactgtaaaagctagtcttacaattaacaaatcaaaccaaacacgcacacaaagccacctttacatttattttatgtacgagctgctatttgcttttaatcatgaaatatgaagaaagtagtttccttcaggaaaaaaaaaagatgttttctttatcctgaaaacaatctcataccaactgttagagttaatgacaggatgtgtctgaagcatgtaaatagccaaggagtgagttggaacagcttgaggtgtcctcagtgcacaaggctgtggggatctgcttctgctgggctctacttcactgctgtgtatcctttcaaaccattccttagaaacaagaagctgctccggtcataatgtatggactaaggggagatagttttgttttgcttacatgctcacaatttgtaaaaagtctttatcaagtaccatactatacattcaatttatttagtaaagttgtatcacttcaaccaaggcccaacatttaagaaacagtctctgaactgaaattcagtgcacattttttaaaacagcagaacccttccctaaaacctactaaatgtgttcacttggtgatcagtgtccctattcttctcccactgcactagtacagtgagtcccagactgatcttcggacaccagcagcagcagcagcagctctagaaactccttagagttgtacactcttaggccccattctagactcaaagaccaggaggctctggggctgccccaatagtatggttcacaagtactcggattgtgttgtgagtatcactaaaaagggagtccaaccctaccagtcttctatgtgtttatctggataacagagtgttagcacagctcatgggtttggaactgtggtctctggtccttctaggaactatctctttccaagactccagctcccctaccttcaagtagtctagatttccacttcctgaagagcaatgagtacttaaaagtggtataaggctcagggttgcactgacagcttaaaagcctacatggaaatgtaagccaaaaaaagctcactccagtttatagtagacattttgttctctttcctttcaaagtcacaggagtaatggagtcagaatacagagcatgcagtcctttgtaacacatttgggatgactctaggaactgagagccaacatgcagcagactagtaaagaaaagcttagtttatctaagaaggtaggctgtgcccttgacaacagccctgtctctacgaaatactgttcataagttaaatatgcatgctggcctaattagccattaacaggatgaggggtcctaggctgacactctagaatgaccaagtgtcttccctagtctttgtgacttaccttttccttgtagggattggcttgtggaaataaggccctacaccaaggcccatgttctctctctctctctctctctctctctctctctctctctctctctctctctctctctctctcctctctctctgcatattctagacatcaagctgcatttgaagatgaaggaaggctggccaaaattatttcccaattggcaatatggaagattgaattatggcaaacttagcttcaaagccaagaaatctggttaattcagccataactaggcttgccaagacaatctgagtctctgatcctctgctaaggccttctctcactcttagggaaggtcaagctggagtgtcttggggtaagattttagtcctaaggcactctatgtactctattacccacactgacaagagattacaaaagagatttctgacatgctttcatgatggagaatgcctagaaatgttctacatcctgcctccctcctttcttgagcctcttttatttggcaaatgctacaaggctgtgacacctccagtcagtacaaaggtcgtggtggctaggcccccaagagacttttcgctttaaatgcagcttatatagtttttatttttaaccgaatatgtaaaaaataaaaaaatttaaaaaagtatgccttggcaaagctgaccagcgtcaaggggtgaactttttctgcctggttctaaacttaatttgaagctagcaagacaatgctgctaacctgttgtgctttatttctttcctacttgcatgctctattacgtggtgcctggcagaaagaactccagcaagtaactaagttgtggtgacaggtgccacgttaaagtgctggatttacatcccattgtcccggtttcagaagtctttgtaacaaaacggactctcaattcacttctggtggtcattacacctttgccaaggatgtgcgcgtcccagcatgcctctctgccacgtccgaacactaagtccatctctgctgtcttgagagctaggtgtctcacaattagatgtggggatggcattctgaacgacactttggtcagcataggggaccaagctcattggcatgccatggcctggaaccctcattccaacctccaagctttggattattcctggcctagagttcttcaggcctgaatctgtcagagatctgtttaccatataagtctatcttctcctaatgctattttatacctggcttcccttttgatgctctccaggatctgtgtcctctgggtcccatcttctcacctatcagaaggcagacactacggccattaaggttacagagtttgaagcctggcccgtgcgtctgaatttcagccctgctattacagctctgtgactaaagaaaagtcactcaccttatcatgtctgtttcctcccttataaataaaacaggttaaaacatgcataccttaggatattgtgcaaattaaacaaggcaatacacataaagctttgaggggaaaaaaacaaggagctcacagaaaagcctcagaaaacatcacagatccttagaggacattctggtaagtggctgttgcctggcatagaccttagagatccctctgctgttctgtggttcctgggaaggatcccatgttgtctgtgcagcactccagactactttggtttttttctagaaagtaaattcctgtttatccacttttgtgtcagttaagaagtagccactccacatacataggcaaatggaacagaaaactacaataaacggtgattctctggaattcatatttcaaatgttatccattgtccctaagtgtctgtgccagacaaatagcaagggctgaggcagcagtagatggatgaattcatgtctcaaagagaaatggaatcactgtcacatctctgaaggtggtcaaagaagagcctgcctcagtctcctgtcgcatcttaaacatccattccatccctgatcacagaaaactctcgaataccataaacattcctaacacctgcatagagtaactcacatcacaaaatttatgatggattggtcgcaccaatacaaagaaactaagacacaaaggaaatttctgccaaagttctcagtgtttatgagtaatggagcagggctagatttcatgtagcctgcatctgcagccactatcctaactcctgtcaaaattaaaagaacatgaacgaaactgggaaagtacaggggagagggggaggagaggaggaaagcaaagagggaggaagacggagaagaggaagggggaggaaaaaaggagagggggggggacgggaaacggagagacttgagcttccgtcagaaaggaagaccactaatgatgcttattcttttcaacttcaaaagagcactgactggctcttttaagggttaacaggcaaataggctcatattgcatgaaggcccctcccaaagtgtatgcaatgctgctggctctacgctgagcaacactagggcagggttccctctactttaagccagctgttttcaatacctagaaatgagacagctgtcatcccttcaactttgtaacagatctgaaaggcttcctgtgagttgctgggattgggtaggtgagcgttttagaactacttcctaaactcaggaatgctcagtcctccagaagtcagtgttctttgagtggtacttaggactggcatcatgtgtaataggcaagtacactaccacttagcaacacatccagcctgcccaggtcaatactttacagaattatttagtacttatggttggtagagaagaaaaaggacaatggttcgaaccctgataggtctgcaacagtcttggacaccaccacctactatctctctcctcagtcttccatatatatatcatacctctctgcaaagttctaactgaattcatatttcacatggttatgttctgggtgatcacttccaattgacaagaactgacccaaaagatgaacttgacttgctttcctgatttcccagtttttcgagaacaggtctgtcaggtggtggaggttctgacaccaaactcaaggttcagcagacacaaagcctgaaagggtgatacatcttctatagacactaacctcggagtgacatccatggacttcaaacagatgatccagtgagaagccggtaaaggatgggtgtcctaagtgttagttaaacaccaacgaggaaaagaatttgagaacagactctaatagtacatccttaagttgtatgagacaccagagtctctgctttccatgctctgtaaaatataaaccagatggccatgtaattatagacatggaaactgacaacacaggagcctacataggttttctgagttatcacagttaataaataatatagtcagatttgagctaatatccctattgtacaaaggcttcaatcttaacttatggctctcaatattgacatgtacatttgagtcacacaaagaagctttaaaagttcttatgccgacctcaaacacgggcaagttaaattagaatcctgacagtggaacccaggcaactgtattttccaaaagtcttcccagtggtgggttcagggtaaagtattaaccagggttctgcttcctctgagtcagctaatgactaagatcatggaattctaatggttgatcattagccaagcaggaccccaggtctagagtcagctaagcataagtgcgtgcataaccacagcgacaagagacaggcactctagacgctaggagcaacctctggagtcatgacgggacactggagagtccaggttaaccctgtagtattgggccaaggtctatcaactcctgcaggagccctgaacaggaacaatataggcacaaaggctgcaaggagtctgagtctgcaggtgagggtccttggcctagcagtgtagagaatgaagctacaggagttcctcacagccaggtcatcagctgctctcagccagtaacacaccccagtgtcgtttcactactgcctggcttactctgttggcctccaaaaggctttaaatggttcaactggaagaacaaaaacaatctatcatgactatttggaggattttccctattttcaaaagtgaccattaaaatactctttgcctttgtcttctgctccttcagatatttttgtctgtccccctcccctaccgtaaactgccaaataggcagtagtgattgacacttagaagaaagaataaaatctctgaatcctataaccccttcctggagggctccttttagcagcaacgcaggacatgcctggcttagccaggctaatcgaatttggcagatgtactgtgtcagcaggcaccagggtgctaatgccccaggtcagctgcttgagagggtaagtgggcaaatgcctggcttcttccccatgttttcagaataggaatccgagtcccagtaatcatctcgactgtgggaccagaggctattttgggccatctcttatccaatggaaagttaggggcggtgtcatttgaaactgccaaggagcatctgatttcacccttatccgggacatgtccccagaggaaatgggagcaatgtcaaggagatcaaaatgcaggtgtcagaatttccctttgtttgtatttctgggctctttttcatctcttccttccattttcagcttttctttccattgctttggctaaggtgttcactacagctcacctggaatatagcagcctcccagtggtctctacaaacacacacacacacacacacacacacacacacacacacacacacacaccctgcccctgtgttgtctatggcttacctcttgccttttaggatattatctttctgaaggttcaatggaaatgagtgtgaaactgctttgtatcaatcacactgtgcaagtcaccatacccacttatacacaaatgtactcatgtggaaaaagacacaaggatgcagtcttcccttgagggaataaagtccagtgcttttgcaagggataaaatggagcgggaggaatgttttaaatcaacagtgttttaaggcagtgtgtgtgtgtatgtgtgtgtgtgtgtgtctctctctctctctgtgtgtgtgtgtgtgtgtgtgtgtgtgtgtagcttcaaatgagtaccccccaagcattcatggtggcctggtctgcttggtgattgcatgtcagaaacaaatgtagactgtagctctaattatggccatttctcatggaactaatgctgagagaggctgtgaggcagaggcaattactggtataaccaggagataaattcagaggacatatgctctctaatatatcttagtgatagatggacagattatataatctttctccatttaacacgtggagtggctcatcattactgacagagtgcacatcagtcacagtggcattcatgacttttatgatatggcttcaggttattctccccatcatatactcaaacaactcattacataccttacactgccctccctttccacatcttccctctcgctatgtggaatctctatgtaatctatgcctttatttcttttatgcttccttcctggatcatgaaaagtcctagccagctgtaacctaactgtggaagctccctccaagacggatgaccctccttcctcaaaagctatcaactgccagttagatagcttcctcagttagatataggatctgcagagtgcctccccatctacgcagtaattttggctggctttatcttatgcaggtgaccatagctgttgtgagtggaggactacaatagctggggtgtatctagaagacagtagtcctccacaggttctgcactttcaattcttctatctgccaatcctgcctgtaatgtagtaaccccatgtgcatcttctcgtagaaaatcttggtgattgactattttccattctcaccaaatctattcaaaagcaattcacaacaattcgaagttaaccaaatgctacaattacttttcaaaatgctcaggatttcattttcagaagttttagactagcctgataagccattggttttggtcagaaaaaaaaaaaaaaaaaaaaaaacatcactacatgttcttttgactcttttctgccatagctctcagctttgtgctctgcctccattttacaatagaagatgcttccaccttccaaaatcagactcagcccaaggcatcttatgcgccattgtgaacttatcaaagcagcttttcaattaatcacatctttcttcacaaaggaatcttcttcttccaccctcatttttctttaaatgtcacatgctacagaaccttgaagactcccatgaggcttttgggattcctcccttgaaatagtaactacttaatagacagtaattatctttatgctggccagcactcttgttttaccactcttcttctcttaggtactagatatttccattcatctgtttgtctgccacactccagccatccacctgtcagaaagccctcaacatgtatgttttaaattgaatgttcataggataattgaatgaacactacattgtgagtatatctgcccctaaatagccataaaatagcagtacatctcagcaataaaaagaatgtatttaaaagcctaaatgaataattcttttctctggttatatgttggtcatctgggtgtttaaaagaacacaaaaacatgatgtctagacagtattccaagtcaaatgaagcagagccccttcatcaatttcatcaatattgttttgaaagctcctaagtaattttgccagacagcaagattgaaaagcatataattttttttgaaattcaattactattattctgagtctaatccatgacaggtgaaaaacaacaggtaatagggagaagccctgtggatgccttttggtgtttttctaataatttgcatcatgctttcacacaaatgtatatacattgacacataaacgtcacacagtgtggccactgaggttttagatgtttcctctttataactgggaagaacaagatagttccaaaatgcagtgcaaataggtggtggcgttggatttagtgagatcaggttttgcttcaacaggatttcaactctacattcactatgtgggggctctggtttcaccagaataatgataggactttgtgggaataaaacaattaagaacttgctgacggtgaattgctccatctcacacatccccatccctactacacaccaacctgaacagaagaaaactaagcagttggtttcttcttggtttggatacattccacttgatgttcttccaggcattgtgaagtagaattcctttcagtatatgtgactgtaaagagatggattcttgaaatggagactttgggaaatgaggataaacatgagcagggagaaagcatggtcctaggagtcagtcgactggaattcttgaccttgctctgaccctctccaaccatgtaaactgggcaagtcccatcatttcttccagtcttggtctctgcagtacatttatgctgccataacagaagactcaagaccaaggtttataaactacagaaatttatttcaaacagtgctagagacagggaggtgtaaggttaaggcaccagtgggttcagctctctggtgagggctgttctccagatctaagacaatgcattgatgctgcatctcccagaaaagggggacattgtatcttcacatgacaaagaaacagagagggtcaaacttgccctgacacactcctttatggcagcattcattaattcagagctccctttatcccaacactcccgaagtcctaccttccaaggctgttggagtggagctcaaatcttaacacactgattttggggagacaca

SEQ ID NO: 6 - DNA, 76344 bp, Mus musculus
tgtgtctccccaaaatcagtgtgttaagatttgagctccactccaacagccttggaaggtaggacttcgggagtgttgggataaagggagctctgaattaatgaatgctgccataaaggagtgtgtcagggcaagtttgaccctctctgtttctttgtcatgtgaagatacaatgtcccccttttctgggagatgcagcatcaatgcattgtcttagatctggagaacagccctcaccagagagctgaacccactggtgccttaaccttacacctccctgtctctagcactgtttgaaataaatttctgtagtttataaaccttggtcttgagtcttctgttatggcagcataaatgtactgcagagaccaagactggaagaaatgatgggacttgcccagtttacatggttggagagggtcagagcaaggtcaagaattccagtcgactgactcctaggaccatgctttctccctgctcatgtttatcctcatttcccaaagtctccatttcaagaatccatctctttacagtcacatatactgaaaggaattctacttcacaatgcctggaagaacatcaagtggaatgtatccaaaccaagaagaaaccaactgcttagttttcttctgttcaggttggtgtgtagtagggatggggatgtgtgagatggagcaattcaccgtcagcaagttcttaattgttttattcccacaaagtcctatcattattctggtgaaaccagagcccccacatagtgaatgtagagttgaaatcctgttgaagcaaaacctgatctcactaaatccaacgccaccacctatttgcactgcattttggaactatcttgttcttcccagttataaagaggaaacatctaaaacctcagtggccacactgtgtgacgtttatgtgtcaatgtatatacatttgtgtgaaagcatgatgcaaattattagaaaaacaccaaaaggcatccacagggcttctccctattacctgttgtttttcacctgtcatggattagactcagaataatagtaattgaatttcaaaaaaaattatatgcttttcaatcttgctgtctggcaaaattacttaggagctttcaaaacaatattgatgaaattgatgaaggggctctgcttcatttgacttggaatactgtctagacatcatgtttttgtgttcttttaaacacccagatgaccaacatataaccagagaaaagaattattcatttaggcttttaaatacattctttttattgctgagatgtactgctattttatggctatttaggggcagatatactcacaatgtagtgttcattcaattatcctatgaacattcaatttaaaacatacatgttgagggctttctgacaggtggatggctggagtgtggcagacaaacagatgaatggaaatatctagtacctaagagaagaagagtggtaaaacaagagtgctggccagcataaagataattactgtctattaagtagttactatttcaagggaggaatcccaaaagcctcatgggagtcttcaaggttctgtagcatgtgacatttaaagaaaaatgagggtggaagaagaagattcctttgtgaagaaagatgtgattaattgaaaagctgctttgataagttcacaatggcgcataagatgccttgggctgagtctgattttggaaggtggaagcatcttctattgtaaaatggaggcagagcacaaagctgagagctatggcagaaaagagtcaaaagaacatgtagtgatgtttttttttttttttttttttttctgaccaaaaccaatggcttatcaggctagtctaaaacttctgaaaatgaaatcctgagcattttgaaaagtaattgtagcatttggttaacttcgaattgttgtgaattgcttttgaatagatttggtgagaatggaaaatagtcaatcaccaagattttctacgagaagatgcacatggggttactacattacaggcaggattggcagatagaagaattgaaagtgcagaacctgtggaggactactgtcttctagatacaccccagctattgtagtcctccactcacaacagctatggtcacctgcataagataaagccagccaaaattactgcgtagatggggaggcactctgcagatcctatatctaactgaggaagctatctaactggcagttgatagcttttgaggaaggagggtcatccgtcttggagggagcttccacagttaggttacagctggctaggacttttcatgatccaggaaggaagcataaaagaaataaaggcatagattacatagagattccacatagcgagagggaagatgtggaaagggagggcagtgtaaggtatgtaatgagttgtttgagtatatgatggggagaataacctgaagccatatcataaaagtcatgaatgccactgtgactgatgtgcactctgtcagtaatgatgagccactccacgtgttaaatggagaaagattatataatctgtccatctatcactaagatatattagagagcatatgtcctctgaatttatctcctggttataccagtaattgcctctgcctcacagcctctctcagcattagttccatgagaaatggccataattagagctacagtctacatttgtttctgacatgcaatcaccaagcagaccaggccaccatgaatgcttggggggtactcatttgaagctacacacacacacacacacacacacacacacagagagagagagagacacacacacacacacatacacacacacactgccttaaaacactgttgatttaaaacattcctcccgctccattttatcccttgcaaaagcactggactttattccctcaagggaagactgcatccttgtgtctttttccacatgagtacatttgtgtataagtgggtatggtgacttgcacagtgtgattgatacaaagcagtttcacactcatttccattgaaccttcagaaagataatatcctaaaaggcaagaggtaagccatagacaacacaggggcagggtgtgtgtgtgtgtgtgtgtgtgtgtgtgtgtgtgtgtgtgtgtgtgtttgtagagaccactgggaggctgctatattccaggtgagctgtagtgaacaccttagccaaagcaatggaaagaaaagctgaaaatggaaggaagagatgaaaaagagcccagaaatacaaacaaagggaaattctgacacctgcattttgatctccttgacattgctcccatttcctctggggacatgtcccggataagggtgaaatcagatgctccttggcagtttcaaatgacaccgcccctaactttccattggataagagatggcccaaaatagcctctggtcccacagtcgagatgattactgggactcggattcctattctgaaaacatggggaagaagccaggcatttgcccacttaccctctcaagcagctgacctggggcattagcaccctggtgcctgctgacacagtacatctgccaaattcgattagcctggctaagccaggcatgtcctgcgttgctgctaaaaggagccctccaggaaggggttataggattcagagattttattctttcttctaagtgtcaatcactactgcctatttggcagtttacggtaggggagggggacagacaaaaatatctgaaggagcagaagacaaaggcaaagagtattttaatggtcacttttgaaaatagggaaaatcctccaaatagtcatgatagattgtttttgttcttccagttgaaccatttaaagccttttggaggccaacagagtaagccaggcagtagtgaaacgacactggggtgtgttactggctgagagcagctgatgacctggctgtgaggaactcctgtagcttcattctctacactgctaggccaaggaccctcacctgcagactcagactccttgcagcctttgtgcctatattgttcctgttcagggctcctgcaggagttgatagaccttggcccaatactacagggttaacctggactctccagtgtcccgtcatgactccagaggttgctcctagcgtctagagtgcctgtctcttgtcgctgtggttatgcacgcacttatgcttagctgactctagacctggggtcctgcttggctaatgatcaaccattagaattccatgatcttagtcattagctgactcagaggaagcagaaccctggttaatactttaccctgaacccaccactgggaagacttttggaaaatacagttgcctgggttccactgtcaggattctaatttaacttgcccgtgtttgaggtcggcataagaacttttaaagcttctttgtgtgactcaaatgtacatgtcaatattgagagccataagttaagattgaagcctttgtacaatagggatattagctcaaatctgactatattatttattaactgtgataactcagaaaacctatgtaggctcctgtgttgtcagtttccatgtctataattacatggccatctggtttatattttacagagcatggaaagcagagactctggtgtctcatacaacttaaggatgtactattagagtctgttctcaaattcttttcctcgttggtgtttaactaacacttaggacacccatcctttaccggcttctcactggatcatctgtttgaagtccatggatgtcactccgaggttagtgtctatagaagatgtatcaccctttcaggctttgtgtctgctgaaccttgagtttggtgtcagaacctccaccacctgacagacctgttctcgaaaaactgggaaatcaggaaagcaagtcaagttcatcttttgggtcagttcttgtcaattggaagtgatcacccagaacataaccatgtgaaatatgaattcagttagaactttgcagagaggtatgatatatatatggaagactgaggagagagatagtaggtggtggtgtccaagactgttgcagacctatcagggttcgaaccattgtcctttttcttctctaccaaccataagtactaaataattctgtaaagtattgacctgggcaggctggatgtgttgctaagtggtagtgtacttgcctattacacatgatgccagtcctaagtaccactcaaagaacactgacttctggaggactgagcattcctgagtttaggaagtagttctaaaacgctcacctacccaatcccagcaactcacaggaagcctttcagatctgttacaaagttgaagggatgacagctgtctcatttctaggtattgaaaacagctggcttaaagtagagggaaccctgccctagtgttgctcagcgtagagccagcagcattgcatacactttgggaggggccttcatgcaatatgagcctatttgcctgttaacccttaaaagagccagtcagtgctcttttgaagttgaaaagaataagcatcattagtggtcttcctttctgacggaagctcaagtctctccgtttcccgtccccccccctctccttttttcctcccccttcctcttctccgtcttcctccctctttgctttcctcctctcctccccctctcccctgtactttcccagtttcgttcatgttcttttaattttgacaggagttaggatagtggctgcagatgcaggctacatgaaatctagccctgctccattactcataaacactgagaactttggcagaaatttcctttgtgtcttagtttctttgtattggtgcgaccaatccatcataaattttgtgatgtgagttactctatgcaggtgttaggaatgtttatggtattcgagagttttctgtgatcagggatggaatggatgtttaagatgcgacaggagactgaggcaggctcttctttgaccaccttcagagatgtgacagtgattccatttctctttgagacatgaattcatccatctactgctgcctcagcccttgctatttgtctggcacagacacttagggacaatggataacatttgaaatatgaattccagagaatcaccgtttattgtagttttctgttccatttgcctatgtatgtggagtggctacttcttaactgacacaaaagtggataaacaggaatttactttctagaaaaaaaccaaagtagtctggagtgctgcacagacaacatgggatccttcccaggaaccacagaacagcagagggatctctaaggtctatgccaggcaacagccacttaccagaatgtcctctaaggatctgtgatgttttctgaggcttttctgtgagctccttgtttttttcccctcaaagctttatgtgtattgccttgtttaatttgcacaatatcctaaggtatgcatgttttaacctgttttatttataagggaggaaacagacatgataaggtgagtgacttttctttagtcacagagctgtaatagcagggctgaaattcagacgcacgggccaggcttcaaactctgtaaccttaatggccgtagtgtctgccttctgataggtgagaagatgggacccagaggacacagatcctggagagcatcaaaagggaagccaggtataaaatagcattaggagaagatagacttatatggtaaacagatctctgacagattcaggcctgaagaactctaggccaggaataatccaaagcttggaggttggaatgagggttccaggccatggcatgccaatgagcttggtcccctatgctgaccaaagtgtcgttcagaatgccatccccacatctaattgtgagacacctagctctcaagacagcagagatggacttagtgttcggacgtggcagagaggcatgctgggacgcgcacatccttggcaaaggtgtaatgaccaccagaagtgaattgagagtccgttttgttacaaagacttctgaaaccgggacaatgggatgtaaatccagcactttaacgtggcacctgtcaccacaacttagttacttgctggagttctttctgccaggcaccacgtaatagagcatgcaagtaggaaagaaataaagcacaacaggttagcagcattgtcttgctagcttcaaattaagtttagaaccaggcagaaaaagttcaccccttgacgctggtcagctttgccaaggcatacttttttaaatttttttattttttacatattcggttaaaaataaaaactatataagctgcatttaaagcgaaaagtctcttgggggcctagccaccacgacctttgtactgactggaggtgtcacagccttgtagcatttgccaaataaaagaggctcaagaaaggagggaggcaggatgtagaacatttctaggcattctccatcatgaaagcatgtcagaaatctcttttgtaatctcttgtcagtgtgggtaatagagtacatagagtgccttaggactaaaatcttaccccaagacactccagcttgaccttccctaagagtgagagaaggccttagcagaggatcagagactcagattgtcttggcaagcctagttatggctgaattaaccagatttcttggctttgaagctaagtttgccataattcaatcttccatattgccaattgggaaataattttggccagccttccttcatcttcaaatgcagcttgatgtctagaatatgcagagagagaggagagagagagagagagagagagagagagagagagagagagagagagagagagagagagagaacatgggccttggtgtagggccttatttccacaagccaatccctacaaggaaaaggtaagtcacaaagactagggaagacacttggtcattctagagtgtcagcctaggacccctcatcctgttaatggctaattaggccagcatgcatatttaacttatgaacagtatttcgtagagacagggctgttgtcaagggcacagcctaccttcttagataaactaagcttttctttactagtctgctgcatgttggctctcagttcctagagtcatcccaaatgtgttacaaaggactgcatgctctgtattctgactccattactcctgtgactttgaaaggaaagagaacaaaatgtctactataaactggagtgagctttttttggcttacatttccatgtaggcttttaagctgtcagtgcaaccctgagccttataccacttttaagtactcattgctcttcaggaagtggaaatctagactacttgaaggtaggggagctggagtcttggaaagagatagttcctagaaggaccagagaccacagttccaaacccatgagctgtgctaacactctgttatccagataaacacatagaagactggtagggttggactccctttttagtgatactcacaacacaatccgagtacttgtgaaccatactattggggcagccccagagcctcctggtctttgagtctagaatggggcctaagagtgtacaactctaaggagtttctagagctgctgctgctgctgctggtgtccgaagatcagtctgggactcactgtactagtgcagtgggagaagaatagggacactgatcaccaagtgaacacatttagtaggttttagggaagggttctgctgttttaaaaaatgtgcactgaatttcagttcagagactgtttcttaaatgttgggccttggttgaagtgatacaactttactaaataaattgaatgtatagtatggtacttgataaagactttttacaaattgtgagcatgtaagcaaaacaaaactatctccccttagtccatacattatgaccggagcagcttcttgtttctaaggaatggtttgaaaggatacacagcagtgaagtagagcccagcagaagcagatccccacagccttgtgcactgaggacacctcaagctgttccaactcactccttggctatttacatgcttcagacacatcctgtcattaactctaacagttggtatgagattgttttcaggataaagaaaacatcttttttttttcctgaaggaaactactttcttcatatttcatgattaaaagcaaatagcagctcgtacataaaataaatgtaaaggtggctttgtgtgcgtgtttggtttgatttgttaattgtaagactagcttttacagtttgatgctactgtcattaccaagcatgcagacgccatgcaaatgccaggttaggagcttctgaggttgtggcttaccaagttataaaaggaactgagggaaaggcttgtggagagtctatgtcatgccacataaatagatttttgttaatgaatgatagaatgtgtaaaatgctgcagtatttttgtcattaatgtgatatttattctttaaataatatattatcatgaatcatgtgttaaaaagcaaggcacttgcattttttttcctagaaagaatacttgctaaaattaaaagaatagatgatgctaagactggtgctagagatgcaattagagtgttcactagctggactgtgtaggctctgggtgctttacactaacctttcaggctctcacatggaacctttggctctcacatggaagctcaaccaaagaaaggtcaatgtaactaaaagagagccggtcacagttactcttcaaccttccaaactaaaggactgacctttaaggcaagagctaacacagctcaaagaatggcccatgtcccatcaaatactaatatttctagtcagcatgttaaagttaaccatatccatgatagtctttccagactaaatatccatgtatgtatgtatgtatgtatgtatgtatgtatgtatgtatgcggttttcttttaaatctcagttaactgtgttagcaatagcttacgaaaatatggccatttcattttggctgacttatagaacactcttgctactagaataggagaaactagtaataacgttgccaggaatgctagccgacccgaggtaaggcctgaagtctcttgttgcagttcaaaggtgtctgctctcttttctagagtgtgctaatcccttcaatgaatacgagaaaacttcaccctttcattccaagacctacttcaaattttcattagcagctgggatattattgataaaatcaatgcagatgataaaacaacttcatagacacatcgaatgaccacagaggctcattaatgtgatgaaagcaacagagcaaaccatgcaactcattcccaagctcctcagtgattaagcaggtttaatccagtggaaactggttactctcgttaaactccaacttgagtaatttagcaatacttccacttttgttgttgttctctgacatctctctctctgtctctctttctctctctctccctccctctctctctctctctctctctctctctctctctctctctctctctctctctctctgtctctctctcttattcccaagctcctcaatgattaagcaggtttaatccagtggaaactgattactcttgttaaactccaacttgagtaatttagcaatacttccattttgttgttcctctgacctgattctctctctgtctctctccctctctttccccctctctacagctaaggcgacattttatgttggctaagtaagctatagcttttgatctgacgtttgttactaatggaaacttcatcctatttcccatgctagtcagcatgttaaagttaaccatatccatgatagtctttccaggctaaatatccatgtatgtatgtatgtatgtatgtatgtatgtatgtatgtatgcggttttatgtcacaaatttaatgtcacaaatgtggatgtcgtatttaattcccacctcttgttactcagtcctccccaaaatattttagtctttgttaactataaaaattgaataagcctgaagtattgcaaagttctaatttcatgactgggctgtcatggctgtgtgtctgggagtgaggggctgctctcagaggtcagagaactctgcaaatgcatcgagcagattagagtcattcatgtcatttgatttgcttttgcatatacacaacacaagtcagtgtttgttatgactttcctgatccttatttataagacaatatccgaggaaaccatgtgtgtatgtttgaaatagaaatgatacattgcacagatatagttcaccactttctaggatgggctgtcagtgctcaaacagggagccttaggagtcagaacagatgctttcttccttaatggccctttctataatttaaaatccttccatttatttccctaagatttagtgataactttaaacactttaactaaattacccagcggcttggcagccgtcacggaggcaaatctttttagagattgtagcaatctgttagatcatggatactatgatataaaatctgcatgctccacatacaaaaattaaatcagtgcaatggatacaagcacatgctgcaaatggcaccacttccaaaccaaggggacacgacctgtctccaaatattgaatttctgcagggttttcagtcagtgactttctaaatttgaaccaatttattctcattatccctaagtaaacctactttgatttttaaaaaaaaaaaaaaaaagctattttataatcaaatagagcctgtcagccctggttcatggatcctgatgttgctaggatgcatgatttggtatttgacgaaagtatatcacttcaaaggggaaaactttcaagtgtcctagaaaacgacactcctgtcttctaccacagaagacaggcccaatcctggagcttctctgaagcttacagactgcaggattggcctccccaggctttgaaataagcttcctgtgtggaggactgttcaattgctaccactagtcaagatggtcttaaagcaaggaacacatgtatttataatgaaacacattttcatattttacagtgaagagaaaaaacccagaacccccagactttatgtactttgaaaatatatttaaaaacattaaaaattctatatttaaaacatatattatatgttaattggtacacttaaatagaacctgtatttacaataggcttctgatgtggttaagttttaatgccaattttttcaataacataattatataaatatactaaaatacaataaatattttttcttgttttacatggtgaataatatctttaccatagagagaacaaggccacagacatttacttacagtttcaatgggaatcactataaaaaagcaacaggcctgctgccatgcataaaacatttctgccaacaagagaccacagcaagactttaaaaccaaaacagaacagaacagaacagaacagaaccagaacgaacagaaacgaagaagagattttaacaaataaatctcaggtcaacataaaccaccaacatgtagctatgatgtatcttagtgggtaagagagccagccactgaccacacaattgctgatgtctcctgtgaagccgattaacagacctggcccttgcagtactgtaagattgtgatggggatccttttgtttgtttgactaatgtctctcagaatgaagctgcaaaaagttaacatagagcagatattccaagcattcctgaataggttaaaaaacgatgacaaaggttaatttggtaaacggcacaaaacaatctatgctacatgaagtctttcaaaaacagcatattcagtggtattccaaaagacaggctaactcgaaaggaacgaatgaacaaaaaagaaactatttgctgatggtatcttcactccctgagtcacagcggacgtccacttctgtttcctttccactcctaagatgaagcgattgtttgcctctttttttttttttttctgatgctcaggaacccaggagagtaaccactaacacattcacgcttgaaaaaaacctgactagggaaatgggcttaacactagttctcattgggtccattcattcaggcttccaacttgacttctaaccccaaagggtaaagtacagacgggactcttgtaataaattggcaggagccgtctgtgctcttcactgaagcaatatttcctcctgtgttcttgtctctttcacagtgaaagcaccttgctatgtcttgtttttctagccctttcagacattgctcattctgcctgagttttgatgctttttctggttttgtttgtttgtttgtttgttttctttttttccttttaccaaaatgtctcaaaaataaaaaaataaaaaacctaggcttcctgaagtctaagctcaaagcaaatcaattctcttcacagcaaacatttcccatcatgctgcattaatatcattattgctgtgccatatttggatccaaagttgctccaggttaatccaactttatacacaattatttagaaatgggatggaggctataaatggatttgagtgtggttctccaatcgagaacctcttgagcactgttaggtaatgtaggcacttaaagcagaaggcctaagcaacttgacacatcattccagagcctgctctgaagggtgcttccgagccttcctttaggaatgtctcaagtaccattccccacctccatcctagaccttaggatggccactcagaaattcctcctgcactgccaggaaatagtatgtcagctccacttagcctccgcagggccattcagtcctatttcaatggcagtgtggatccctgctcttatctaagtatctgggtgtatacaataacttttatctgcaaacactgttaggccatattacaatttacccaatatttatgccttttaaaaaaagaatattttgggttatttttatttgtttttctttagggtaaaaaaaaatcactgttttccatgagtgtcataaaatgacacacattgttcatctgtttgtagcagtagtaaaatattttaaagcgcgcaacttaattttctttcttaaaacaaaacaaaaagaagggaccaaaatgggaggagggagggaaagagtatgctttgaacaaatgctggtctttccaataaaagcaattttccctgacccatgccagaagagtgagctgagggggaccagggagatacatcatgggcagtggagtgtgagcattttattcagttgccttaatttttatttgttttccagtcatctgattggattttgcaaacatctttacaacatacaaatgtaacgctttatcaaccagaatggatagtgaagaaattttctccatccctactccgggtggaactaaaaaacaaaacaaacaaacaaacaaaataaaacacaaaacaaacagaaatctacccctcccattccccgtcccttacgccagtaaagcaatgacaacagcaccttgacattgttttaattccaacgctatcagaagtcgaaagcagtaaaacagagtactaacaagaacgaagatacttagtgtctaaaatgtaaacggaatgttttggttccaatttttgtttttgttttttgtttttttttttttgttttttgtttttttaatctgttttctgaaagagggacagtttattatcaattcacaattaaagcagcatgcaatttattattattttttttaaactttttgttttcaattcttggcaacggcaacaaaccacaacattatcgaggaatgtaatgcagacttttaaagttgtgcgcaaatgactgtttcctttcaggtcatggatatgtccaataaatagattgtagaaccactgtactgtataaacttcatttatacatgcagttcataaaattattttttcttaactgaataatttaccctgttatgtatatatacaaatagataattttgtctcaatataatctatacaacataaatccactatcttccccttttaatggtcagtgtacatacacaggaagtgtctatccttatgaatcgccagccaattctctttttgctatccatagtaagggcccgaacatacgattgggtagttcggcattgcgagttccagtgccttttgtctatgcccctgcagccttccttggtgtaacccatgggattacacttggtctcgtagaaatactgcttcagttggcctttggataccgggactttctctaggactgtgaccgtcccgccagacatgtccactgcagtctttttatctgccgctgtgacccactcgctaatactgtcacacacgctcagctccccacggcgggcagggtcggagtggcgccgaaccctcatagacatgtttgcggcatccaggtaatttttgtattcctccagcagaaagagtagaggaggctccaaaggcacttgactgctgagcatcacccgggaagtgtacaagtccgcgtccttatggttttcttcgttgggccgaaccttctggtcctcatccagcagctcttcgatgacgtgctcaaaagtgtcagccagtgatgtcgtcgtcagacctctcgaacctgccctgggcccattcacgctctccagagtcccatgggtccgcacacctgggtaggccaagttgccttgtccgtggacgtttacttctttcatgggcgccgccttcatgcaaccgaagtatgaaataaccatagtaaggaaaaggatggtcatcactcttctcacctggtggaactgtgggaaggaagcagagacagacacagaacaggttagaactttctttctcggggacagcatgtggcccatctgcttgtaatttcagaccttttttttttttttttttttttttttttgtcttactgatccactccagctgcaggggacacaaatcaatgtcagttactgtgctgtatgtggcttaatataaaccagagacatgcaatgttttccccaagatttacatgtaagcctgagagtaaacggtttctaagcaagtgaacacactgtggcttccctgctcccacttcctcccgctttagcagctttgggggtttaatttttaatgatctctgcacacgctgtcaccagaaacacaatcacaaatgttactaagcaacaactgcaagtggaatagtaatcttcctttcaagtcagcagcatagtccttgggaggaatgtgtgatggaaacggtagtggctagagggctgggtgtctggtgctctaagcagtctgagcaggagcagtatgataaaacagcggtcggtcggaatgctgggaggggccttttcctcctagaggcgatgtagaccaccatgttttgcggataaggaaccaaaaggccacacaggacttgcccggtctcatgaagaaacttaaggaactagagatcccatctccaacgttttactacatctgtgaaggttttgcttatttccaaacaattcattttcaataggtttgttctaatgacatgcctgaggcagggatgaaaacaatgtatcttttaagagaaagctggaaagctggaacagtcctcaaggaaaggcattcaagtcaggatcaatgcctttcacgagcagacatctctccagactcagagggcactttgatggcttgttttggcaaaccacagagagctcagcttctcattagcagaactccacccccttctcaagtgtgtgtgtgtgtgtgtgtgtgtgtgtgtgtgtgtgtgtgtgtgtgtgtgtgacactgagttgtcatacctttacaaagctgagtagtactttacacgcttttgaattggcatctagtacttctttctgtgcatttgaactttcctacagagtcacttaataacatacctcaaagttaaatttggcttgcatctataagcatactccgcaaacccaactaaaattgaataacaagcaaaattgacacatacctatggaccaaaccaagcttacatcaggtggtggaagacttctgaattacttaccggaagcattctgcctcttagtagtaacgagtagcatctctttaactctaataggctaactttctttctacttattggctgtggaacatagacttgtaaagacatacacactcagcattcattatgcagggtaagtccaccagaaggaagcatgtttctgctcacaatgagatgctgaacacaagaacaacctacctccagtgaaatagggcacagtgcacagacagcttacgcaacacaagctatgggaattcttgccaaagtgggacattaaagctctttccaattctacagtggcatcaccattatcttgagactcttcccctcaggagagcaatgcacataacagtttccgacttcgtatatgtgcacagcctccacacatcagccacagtaagagaagttgtccacagagctagttactcaagcacagccagacagaaggagaaatgagtgaaacaacatttcacactcacagtcaggcaatggtttgagactagtgcagcatctctctgaagaaggcgcatatcttccttccccaggagtctggacactgcctaaagctgtctccgctgttctgcacagcatctccattgcttgatagccacctcacccttagccaagggtcacttgtgtcctaggaacttttgttattgctgttttctatagagtatctttgcagccttgagcttggacatgatgaaccggtatgagtttgtaaattacccagagaagattaattcatgtttgcttgcttgtgtgttttatactactgaccagcaaaagtccaatatgaataattagtaatttggagagagagagagagagagagagagagagagagagagagagagagagagagagagagagagagagaagaactgctcggaccacatggtaatttaaggttagaaaggcaaattggtttgaggaaaatatacctgttaattctgctgatatctaaaagtttaggagtgttttgtatccagcaccattacagaaatggaccctacatggaggtctctgatctgggcaggtggtacttataccattgagggagacttttctcctaatatcacaagtctatatttaaagaactcaaggggatcttcaaatttagaccaatgaaataatacatatttaaactgttttatattggtgcatacttttaatcccagcactcagaaaacagggacaagtggatctttattaattcaaagctagcctatcctacatagttagttctgggctaaccagtgagaccctatccataaataaataaataaatattttagtcatctatatcacattggtgaagatttgacattatatgccatgttttattttcatcttaaacacacacacacacaaacacacacacacgccttaggtgcattaaaaaaaatcaatcagaaaaacaaaagaaatggatgaaggcaatggtagggatataatgattggctgaccaagaatcacaaggtgatactacaagaggacacaatgcaatctgacatgttgaaataagcagaaggtgaattttagaagcaatgagatgtcgattttgtaagcatttactaaaaggctgaatgcttttaaatggttggaggcactgaggcatcttagctgcagagctagagatttgtctcattactgttacaccaatgagtcttctaatgatacattttatatacttaatgaggtttcctcagcctttcatggctcttatttattgtttttatgggtaatatcctgataaggaaagcacccaaggctccggctatcattctctcagcaattctgtaagcacattccaagtgcacagttgacatctgagtcaatgtgactcggcttcctctctaagtcaacacatagctttccttccaggctgagcatctaaagagataatgtaattagctaggtggcaacatacacagctccacgtctctgatcccctttgagtggtacttcagcaattcttttggcctatttgttgacaaggctttagaagatgccttgaaaagtaactcggtgcttttatgtgagcacaaaggcatgacccacttttcctgtttattgtatgtttcttgctatgtcctccaggatggttggctccagcctcattccttctgtcccagcttctgaagttctgggaatacaacatgtaccatcatgccaagctctactttttgaaatcatggctcctgatatgttgggcagccctgttgtgctttgaagataaaatgctccacaaagacccctatgtttaaggctcagtcatcagctggtgtgtactttgggaagtggtagaaaccttaggaagtagggttttggtatagaaatcagtcagtggaaggtacctgagaagggtattttgtccttggcccctttctctttgctttccaggttctgcaaggtaagaatcattcctctactatgcccttcccctccatgacagccatttgctgagatctctaataaaccttttttcctttcaaccttttctcttagatacttctgatggtgacaaaacctaatgcaattccagataaatctcatcatccaaagacaaaggggtcatgtggcactactaagtagatcatcagtctatgtctacttatatttaattcactgatactaatttttccaaggcttaacaacaatcaatacctagagagttctaggaagactttcttagcctcatctcagtaaagtcagtataatgcatgctacattaaaaaaaaaagtaaaaagaaagtttagttagaagtgtgactcacaagacctaaaatccaaccgggacaatatgcatgatagcttgctcctctactgtagttccacaacaacttgtgttgactaaaagattgcagaacattcataatcgtcatcaaattggattgtcacaaagagaagttaagttactatcatcgtgatcacacagttacagcagttacacttctaactctgtcaaatgtcacaaaactaacaggtctcctcacccatgtttttgctaccagaacttaatgccagttttagaatattaatcacagggaagagaacgtgtatggcaaggagggagcttacaaaacttgggcaccattttctatagttatatatcacagagttatagatcacatatcacaaaggccagctttctaaagccagcatgataaagatactactagaactgtttttaatcattgtcatcatttagatcttcccctcatgagttgaagacttggttctcactgaagctaggtgtagaggtgggtcttttaaattgtgaataaatcatgagggctctgatctcataaatggtatatctattgatagattaataattaaatggtcaatggggcaaggtagaagccataggaaataggggctatgtgacattctgccttgtaaaggcctagaagcagtggaggcagttgatcatgaagtgaaatctctgaagtgtgagccaagaaaagtgttttctccctttaagttagtcatgttagaactaaattttcatggacaaaattgagaagaaacaaataatcatacaagcaaatcaggataatggggatagaggcctatacaagctttatttattcctaatctctttgtcttgtgtatgtaagcagaagaaaacacagtttcatgacaggttggcttatcttagacagtcttataactagcaaggataatgataatgttaaagaaagaccagttaatgtttaattctgtcatacagggtatagacctattaaaaccacattgtggtagtttgaatgtgcttggctcagggagcagcattattaagagatgtagccctgttggagtaggtgtgccattgtaggtgtgggctttaagaccctagtcttagctgcctggaagccagtcttctcctagcagccttcagatgaagatgtaaaactctcagcttctccaacaacatgcctgcctggatgctaccatgctcttgctttgatgataatggactgaacctctgaacttgtaaggcagccccaattaaatgtccttataaaagttgccttggtcatggtgtctgttcccagcagtaaaaccctaactaagacagaagttggtaccagggactggggtattgctgtaattggtctgaccatgcttttgtttggaagaatgtggattttgggactttggatttggacactagtggaatgctttaagtcaagcttaatgggctatcctagtaggagtgtggaagactttttttgtgagtgatttgaattatgcagaccaggcccaagaggtttcagtggagaactttagtatgtggcccagagactgttttgtggtattttgatgaagaatgtggctgctttttgctcttgtctaaagattctaactgagactaaggtaaagagatttatattaaaattgcattgacaaaggaaatctcaaaacaaacaaacacacacacacacacacaaacaaacccagcagagactttgttctctgattaagtctcatgaagagtgttttgaacaagtgtaataagattagaaaggaaaaataccaaaaatatggtattaaagaggcaccaggaagtgaaatggagctgaatcctgtggtcaaggatattaagttgaattaagggagtggtgacctaggggcacccagctaagtttaggtctagaccaggaggcaaaggcaagcagatctctgagttcaaggccagcctaggacagagcaggttctagatgaagaaaaacttcagtccaggtgtggtggtatacacctttaactccagcattcaggaaacaaagtcattcagatccctgagttcaaggtcaacctacaaagcaagttataggacagccaaatttaggcagtaagaaagctggaaaacagaaagctgggaataaaatgtaaggggtcaggggtggggggtggggtggcatcttccagccccagcaagcagcagaactctggcagctttgtccatgtggctctgactttagtgtcaagtatagaagggactactgggacaactggtgctagttagctggagctaaaaaaattagtggtgattaagaggagaccagaactactgaggtgaaatctgggaagtcttttctgagagcacaaaaaaatctctgttctagagacggccaaggttgtaacttgtgcttcagctgtacttggtaatgtgtcagagtcacccaggtggtactgattttgaaggtatgaaggggtcatggtgagcagctgaggcttggcactgtgagaggccatggaaggccattgttgaaggatcaccctcagttgcatttgatgacccaggactgaaggagtcatgcaaagaagttgaggcttggtaccataaagagatcctatgagaggctattggtgaagcctagttgcagtgaaagaccccagcatattgaagatgccatgctataggatgatcactaagaacagtagcagcagtggagtggagtcaaccagagcctagagtgctacagaggcagagctggaggtgtggcccaaggcctttggatgaggttagaagataatgtgtggatcccagacattggaacaagaagctgtaacattaaagttgccttggaaaccccaagatgtttgagatgagccttggaatatctgctgaagaaagatgctaacagagagtggaattagactaggagaaaaaagtttgtcgcaggcagtcaacaaaaatgaaaaaaaaaaaaagttggggatctgaagactgctttcacatcaacccgtaatttggagtttgcccagctggtttcctgtcttgctttggggattacagttaagtgactggatgggtctcaaaaagaaactttgaacttttaatgttgttgagaatgctataggctatgggaacttcagaagttggactaaatgtatttttttataatgcgattgctaggtatggtccccataaactcttgtatttgaacaatcctatgggggccagggagtggaatttggtggtttaaatatgcttggttcagggagtggcactattaggaggtatggccttgttggagtaggtgtacccctgatggagtaggtgtgtcactgtaggtgtgggctttaataccctagtcctagctacctggaagttagtctcctggcagccttcagatgaagatgcagaagtctcagcttctccattaccatgcctgcctgcctggatgctggtatctatgatcctgccatgatgataatgaactgaactctctgagcctgtaaggcagtcccaattaaatgttgtctttataagagttgcctccatcatcatgtctgttcacagcagtaaaaccctaatacactaatgaaaatctgaaaaataacatgaaaaatctttaactttcatctgatttcaccacattcatatatcaacctcacttctgtttgttcaattataaggcaagggatctagtttctagtttcaatgtctaagaagaggttaagaccattgtgtgactttagaaaaaagacaaatgatccagggaaggaatggatgaaattttaaaaagagagagatgctctttccaggtaagaaatgaagaaatgctttgtgaagctttcattggattcagagatctctgtataagatagaagtaggtgacaattaaatgatgaacggatttgagatgagagaaggattagaattagaagatggaaaaaagagctctggactagaagtggtaaaaacaagaccaaacaactgcccaaattcattaaggttctaggaatgatggcaactgaattagatgctgctttatgggcactgaagatcctagaagagtttctaaacagagggaggtgtttaacatggcacacagaagacttcaaggagtgacaaactagactacattaaataaataagttcaataattgtattcttattgaatagtgagctttaaaaataaatactaagtagttgtttacatgtggaattatgggtctggatcaatctctattgaaacatgctttgaaagggaaagtggttacagtagtaggcagagttaagtatcaatcatcagtaatgtttggcttggcaaaagaataggacatggagagagattgggagaaactacaaactttcattccaattataactgtactcaactttggttctatggctcagcacttttaattcaaagatctccaagtgctttgcaaatattaagtaattaagactcataggacccaagagatgcaggtaactataattatccccattttgtgctggaggaaagagatcagagtttttaatcaactcatccactctgtgtggttcccttgatagaacaaggtcagaacctagattctgaatctagattctagaagtttagccttacagtaaaggcactagtttgtttcatcaatctacataattttcatgttattttctcatgtattgctaaaccaagaataaacaaaaaataaggcaatgctaaatacacccacacattcctcaaaggagataattaaagttgaaattcataattaaaatggaaaaacagaatgatcataacagatattcacctatttagctggttgtccatttgattgaagataaaaaataattttgaaaataatatttgataatgtagatgtttcaaagcatttagaagtacctttacaaggtaatatttaaatattggtgtcttaagatattcaaaggattaaatttagatattaatttgactagattaaagaatattgttttgaggtgtgattgtgtttccagaggagattgtgagacaagttgatggattgaataggaaagtctgccctcaattgtgggtggatacaatccatatcattggctgatgcccaaataaaacagcaagagaggaagggcaattggctcctcctccccataattggttcatatttatcttttccaatacttattgtcaataggtacaagttctgatgttagacaccggaagtatcagttctctggagttgtatgagtggattcttaggctttgtgccttcagacatggatcaagccatgctacagtacaacagggtctgcagcttacagacagcatctcatggtgcctcttgcccttcataatcatatgtgccaatgtctgtattatgcgtgtgttcaaacatctatatctacattggtactgtttctttcaagatactaatataactttctataaagcatagtctttcataccagagtactctaacccctggtctggtttttccatggcattaagtgacacaaactttatttaattgtactaaaaaaactgaatagtttattagtctataatatgaagtataggttaataccatgagaaaaatgtatattttcctgaatcattaatttgacagaaaattttactggtatctttgataaaatactagccttctgttaccttcttctcctctcccctgacataaacaaacaaacaaacagtcaaacaattatttttctattagcagaagacttatctttcttttgaagcaaaactagaccacatattccataaggacagagaccaagcagtctccctggaattcttacacacagtaagttgtacattatattatgtcaactggactctctagctactgaatgatttaataatgtttatgctggtgctattggaatgatatatggggaagtttagttaaagtatgaaccataagttttagtatcagctgaaatgattccttggatttgggaaggagtaaaaaaatgatctaatagaaagaccagctctgggcagagaattctctaccttgacatcctagtcttaggcacagctgccaagttccagaggttctaagtactgccattaacatcgcctcaggcaacctaatgtttcccacaatcaatggaggtttctgaatgccgaagacccctagcgagacctgttcctacctgcccttctcctttgcctaagcagtacatgactctaacaaatgagccctagtaccaagcattcctatctcatttgcatatcaaatgtgcatttctaaatatcctccggaacagctatttttaattatagggcccaactggcagctgacaatcaagaactaaaattgttttaaattaggattttattttcttccaaaatcctggcaggatttgttactattcaccctaaccacgtattttttactaaattcttgtacatggtagacaaatattattaatttcaattagtgtcattatgtgttattgactaattatgtaatgtgtaacctgtagcatcacatgaatatcatatttaatgacagatgttcatcaactatatgtaatcatggatggaattttaaaaattattctattttatatgtatagatgttttgtttgcaagtttgtctgtccaagagtacatgcctggtacccatggaggtcagagcagggcatttaattcccttggaagtaggaagttccaaggttgtaagacaccatgtgggtactgggaactgaaaccctggtttttctggaagagcatctagtgctcttaactgctgagccatctctatagccccataggtgggatttttatgacagcatgatggctttgaaagtaaacagggatgtaaaaacatcttcagcatcacttagatgcaagtaaactacaactaagctgtatttaaatatatactttgaatttatgtaaaaaaattcaaagttgaaattaattttatgcagtctaaagtctcaaatatcaggtaacacttattgctattaatgcaattcaaaattgtcagtacaggcctaagaagagagctcagtaagtaaaacaattgttgcacaaactgaaagatctgagtttgactcttcagaacccatgtaaaagccatatgcattgtgtgagctttggtaatttcagcatctccatgggaagatgatagacagagacaggaaacccaccagaagcatttaagccagcctagcatttatatgcagcagtgatgagatctcatctcaaacaatgtagaagatgaggacaattgctcagggctgtcctatgacctccacatacacaccatagtacccatgtacccacattaacatacatgactgtgaaatcatacagaaccattgtacattcaaataatgatatagtaataatagaaacttgttaagaaaattgctccaagaaaaagaagagatttttgtaggacctgaaattagagttgtaggaaatgcagagatgggacaaaattcaatgtattcaaactaaatgagtccttgcttttttctaaagctgtcatcaatgcccaagctgcattggcattaccaaggagctcatgagaaagtcagcatctcagctttctctctctcatcccaggtatcctacctagtaccagaacctgcatttcagctagatttagatacttcaagtagatttataaactcatcaaagctgagatgtaatcgagtaattcatacagagaaagtcagtcaaggaagataaggaaagaagtggacgacatcaaggtgagcactatggtcctttctcagtatgccatggagttacctgtcatctcctctctgactcaacacccactgtatgtgttttgttgattttgtaatgggtttaagtaaaactttggctctttttgtcaactggcttttttttattctgtccatactataaggtacaggatacctataaataagaattgttacatgagcacttgtagtgtaccactgatataaatctggactgctattcaattactaatttttcccaagtgctatgaggcaaatgcaaacacatttagctctcctaatcacttcgcacagtctgatatcacccactcaatgagaaccatactggagatgacatgactaactagatctgagagtagatttccaagcactcagccagatgtcaaattgctttcagccagatgtctctggtcctttgtgttctgaagtggtaaaggggagtcagaagcagagagaacatacccactcaggcagattttttaattttagaattggtcctgaagccaacagatttcagctttttcataccatgtgtacatttcatagaccatgaaattaaaaatataattaaggtttcactaaaacagtgacaacagtacccatagtatatatttgtgtgtatgttcatgtgtatgtatatgtagcaggagtcaagaatcctttctcaacttcagttggactctaaaacagatgactagtaactagacagcacaatttcttggtaagtatctaatatttgaaattagttgcttcaaggcaagtaccttaaatggcattttaaaagttaaaaatgaaagaaatgcttaacatttttggaattgaacaaaaatatgagggagttgtcgaaacaattttgtaaccagaactggagactagcccactgttgaactcttgacaaaagattgtgaggattgctagattctaaacatcaagaacttagcagattcacaagtctgcatatgaatgaatgctcagagctgggaagcctggcagcttggctactgtgtgcaaatttatggggcagacatgacactgtcttactttcccaggtggtgtctcagatactgttgagttctaccttgaacagcaggttgaaaggcacagatgtcaacatgctaaaggactgccttttccagtttatattcaagcacaccaccaggcagcggatacggtgaaagataagctctgtcttcttgcctccaaagagtaagtgtgcccttcaccaaaagcaagatgaatgcagttgcattttgtttccctaagggaagaatgtgtgctaactcttagatctgaggatgaagggaatcccctttaagcagtattgtttgctgttgtgtcgactagaaacatttcatagaaattcaaaacaaaagaaacagaaaaaggaagtcaaggcggtctgtcttgcttcaatttcttcttctttttttcacaattagctactttaatcaaactgtttatagagtactgctggatactcctgtcttcctgccattgcagagagctaacagctcacccaagaccactgccatacaactgcacacccaatggaactagagctgtcgtagagacttgtccttgccagcctttatccagataatgctcctgaaatttccatagccaatatattctggtggctatcagcacaattcccaatacagaaagaatatttgtctataattaagtccatattaggaaaaaaaccctgtagccttgaacatccttgattcagaaggatgggtatgttttgtctaagcaagggatgactattgattagaccctgtctattgaagacacaaacaccaagctttaaaaactgaggttaaaaaaaaaatatgtggaggaagataagttgtccctagcaacagaagaacaacattccttttcaaattactatcacgatgtcccagggttggaggagataaaattagcaagagaaggttattagttctttgttgctcacctttacgacaccattttcagcaatcagtttgttcggctccactgaggcgcagcgacacacaccacagcctttctcctgggatgcacagtcataccacataaaagtgtgtgggtagatgccaaaacatgtatggacatgcaacccattctgtagaaactcaactttctgagttattaatgaggattagcctgagcacatggagaaaactggtggttccacacatccagttgtccttcgggttatgcttgcatccaactctataatttcttttaattgcttactgtgatgcacaggaaagcgctcattatttgcagcttaatgtgggaggaaaaataaaatatgtctccctgcccactgccttactccagctagcaacatttctaggtgtaagtgtaagtaatttctgtacactgtgtcacaatccatgtgggtcatattcaagatactgattgtgttctgaactactaacaaatataagaaaaccagtaccatctcagataaaaagcagtctgtactgctggtcagaaaatgccactcccacataagcacaggtatggaagtatacaaacctgtgcaagtagcaggatggtaaaagcctctcctttttcctttcaccaaatataaatgtgtagaggttccatggaaactcacatcaacatatttcatctaagtaatgatgtgatgactctatttctacctactaccaaaaaacagtgttggtagtcgtcatgtgggtggagatggactttagaagatcctctgggcagctatataaatactaagaatttactaaactactttttgcattaaaaatgacaactcaacagttaactctgactaactatgagccatgcaatcaaactaaccacagtttacaactgtggtatctgagacacaggaagatgcatcaaatttgcctatgcccagcgtgatggagatggagcctggttcttctgaatagattcaaatgtggatatggtgtcttcaattttgaaagtctacatagtgaatacataatgtagtcttggtattccacatttttaaattacttcggcaaaatcctatatgagggtttctgaaacatgatgtgtttgaagtctaattctatggagtctgaatttaaccttatggtttctttgttaatgggttattcccttaaggtgccagtcatactacatatttatcaggccagaatgtcaaaattatacatgacatgaaggtaattcattagaggtgtcagacattttttccccctgggaactttttggacactgaaacagaaccatgtactttatagaccactaacactgttaccacatgcttctctgctaactctgctgaagtaagaatgtgaggtaacccaatcacaaaagaactcacatgatatgcactcactgataagtggatattagcccagaaacttagaatacccaagatataaggtacaatttgctaaacacatgaaagtcaagaagaacgaagaccaaagtgtggacactttgccccttcttagaattgggagcaaggcacccatggaaggagttacagagacacagtttggagctgagatgaaaggatggaccatctagagactgccatatcccgggatccatcccatggtcagcctccaaacgctgacaccattgcatacactagcaagattttgctggaaggacccagatatggctgtctcttgtgtgactatgccggggcctggcaaacacagaagtggatgctcacagtcagctattggatggatcacagggcccccaatggaggagctagagaaagtacccaaggagctgaagggatctgcaaccctgtagtggagaacaacactatgtactaaccagtacctccagagcttgtgtctctagctgcatatgtatcaaaagatggcctagttggccatcactgggaagagaggcccattggtcttgcaaactttatctgcctcagtacaggggaacgccagggccaagaagtgggagtgggtgggtgggggagcgtgtgggggacttttgggatagcattggaaatgtaattgaggaaaatacgtaataaaaaaaaagaaaaaaatatgcttgtaacgtaacactttgcttgtctaaatgtctaatactatatggcaccttatttgtgacctttgtactactttttaagattgtagcctaggggctaagatatgcaaagaaagaaaattatgctaaggcaatctcagatgtattcccaagaagtaatgaaaaccacaaaggtggcagaagagatggtccagcctggggccaagagtactctcagggatgagggtgggaggcaaacatcctaaatgtgtatgttgagttagatgacaattagaacatcttgcttctggccattatctgcccttgtgagagaggagactgagagaatcagctttgaggagcttgagaacaaaactggaaatgcctgttgtgaaagtctttgcaagtgtcattaacaaaatcaagtgtgtctttgtccctgtgtctcagctggcatttggaagtccacttatacaccaaaggatggtttcttgtatagtccagacacactcatcactgcaactgtccaagttcaactgttccacagagggaaagaaaatgattttccctttaacaaatccctgtcaaagttctattttagaaaattttattaggtcaggcatggtaccacacctgttattcaagcagtgaggaggcagaggccgaaggatttccacaagttcaaagtcagcctggtctacatcgagcatcccaggccagctagagctagagtgtggtcctgtctcataagcaagcaaacaagtaaggagataaatatgtgaatgcctacttggatcggataaccgctctgctacggttcatttgccacattctcctagggcagcaggactggcagaatttgtttttctaaataaggcacactgtcctcagagaagaatgagaccaagaatcaatccaatgagaacggtaagagttatgggaggatgacctgggatgaatgccattcacaacgtgaagatgttatctaggtcataaatcacattgctttcatatggttccctacttgcataatgcaagaaactgcccggcaacaccgagtatgaagtatactgacagtgcagcccaggtcagtgtttatattgtgctctggaattttaatttgtcataaataagatactaattataaactttgggggaagcacaaaattattcctcaaaagaatatcccatgggtatgaatgctctaagcaggacttctctatgccttgaggtgtatatcttgaagttggtcttggaaatgaggttggtaacggaaaagggaacattgaaacctgggatacagaacatgatggtggaaaagttttcttttctgttccaataaacagctgagttctttggagccaacctcactagttaggtgaataatgaatgtattcttagctttccattacagggaattctgcaagtggcaacatgggtccattccatgtgtgttactagagttggcataaacccatgtccagggtgagacattacatccactgtgtcatagtcccactgaaaaatttgggacaaaataaaagattcaatgtccacttggaagtttctatctatttctcatcttattggaacatactatggacttctcagaaagaaggatgctcccatacactcttagtgggaatacaaacagttgcagtctggcttagaacattttatggagtaactatcaaatttataagtgagctttcctacaatatagcagttctactgttaagaacaagtgtacagacaattgcacagggacaaatatgcatatacagacatcatgtgtgcacatatataccacatatgtggttatggaatacaaaaaggtatataatagaaaaaaaatccagttttcaactataagaaaataaacctatagtaactccttcatatcagattctggcagctatgaagtgcatgctctttcccctgtaagctggaatgaaaaggtctctggaatgcagcgctaagtgtctaaaaccaaggtgtaaaacagtgtgtcacttttcctttagaaattggggggagggaggataatcacagtcatatttgcttatatttctataaagcggacaatactagtttgaaaacagttctatactaatggcaattacaggtgttgtgtgtagggtaggtgcaggttgaggcagaattctttgtatatactgatttttttacactattttgatatttgaattatgtaaataagttaagtataaattttaaactgatcctaggccaagattgtacattctgataatctccatatttgggggatagaggcaggaagatcaaaaattcaaggtcatcctgagctacacagtcagttcaaggccaacctaagctacacaaagctctgactcaagaaaattaactaagtaaccaattcattcactaaatatgaaagtcagacatacttaatatttcaggtttttttagaccaatatccacactggtgtggtgttgttgtacctggcagtctgagttttgcatttcatcttttggtacatttccctggaagaagttagtagaaggtcatgactggaacctaggaatgtgaaacatgaattctgatccttcctcttggatttcatataaagttaatcctattaaatagctatttgactatttaaaaaaaaaaaggaacttgaacaaacccataggtggacagatgtaaggacctgtgcctcaactctgctttgcagtgagagtaagagtaggacccttctgaattctgtgctcctttgaaaaacaaccagtataagggcaagggatctgtgacctgtaaggggcaactctacaaacaactgttatgacacacaatgctagaatgagaggtaagcaacgggcaaacagcggaggggactacgacttgtttcccagagtatctaagtcactaaaataatacaaaagtaagcttgccaaagaaagaatataaacacaaacagaaagcaagaacaaacttatacagagagacttcaagaggaagacgtatagttaaaggactccttatgtgattatcctcaatatcttgaactctgtaaattctaccaggacaactagggaggcagctatagaagaaagaacccagacttaaatataaccatgagatttatgatgaatgaaggacccagtagaatagtccttattctgtgagcagtatagttgttggagcaagtgccctcttcacacaggtggcctccaactgactttcaaaatcagatggaaaacttcaaacatttctaaaaattgtcctctggggaccatttaccccaaattagagactgaacgaaaaaccattctttcaaaaagcacctctcctccaaaaccccttctcatctccatatgcacagtcatctggaaagcagatttaccattaaacggatggtcaaagctgtcccgaaatgttaaactaatcacgaaaatctaagcattgctttcctcaccttcccggagtgaaacattccaaagaagctggaaataaccacatattggtgctgtaacctggggtctactagcagtgctctaactttgtaccaacatccagatgctgggacaggaaatcagctacttggaacccagtaaaagcaagtagagccttcccttctattttgattactgagggccccatgtaaagttcccagttcttgggtccagctgtgtctacgctggctaactcacacaacacacttgtgcacctcccaatgaaatgagggacctgcacttgtgactcaacatatttgtagacctcaaaaacttacacaactttcttaagatcagtgagtaagtcagtggtatgttggattaaatttaatcattagacccagcaacggcactagtattgggctacctcatgcaaattctatttcagaaatatttctgtgatgtgaagaaaatggaatgcactaagatgttctaaatcgtgtttgcaaactaggcattacctccaaaacttctaacacctaatctgacacagacacgatacacaatgatttaatgattatacaattaatcacagtgctctgagatgcagaaaacaactcagtcaaagcagatttatcatggacaagaggctttttttagtggaaacagaattcctgctgggtcttgaagaattggtataattgtatgtggagagagtaatcaataaacaaattcgactcagagaattatggtagagtagacttctgatcttgtcactaactataaagtaaagctcacttaggcatgaagcatgccagggagacattttgctgctttgatgacaaggttctaaaacctcttcttctagaattgggaagtgctaagaatgcagcacagtggtaatgtcaagtgccagtctaaactttacatggattaacacatttaatcccacactaccctctcaagaggttgaggcagagtaagaagctagctgggatcacagactcagtagttggtaggccaactccaacactgggctcaggaatataggctttgatctttgtctcttctttggaagtctatgatagaaattccttctaagtcagaacaatatttagaaggcctcctattcagagcctctgaatgtctgattatacggaaagctgcaaatcttttctagccatgttctaacctaggaatttggcaatgaaataaatgataagtccctgtaaatcataggctattcagcttacatggcttctagtttaaggatctcaagtgtttctgtatggttgagacaactgtgcaaattgctaagcatagcacagacccaggctcagtcttgcattcaaggacttcacctttatattcttaaaagtttgaaaggcatttctgatggtcaccaggtttgggaatcagtgttccttatgtccattttacttatatattcaatatttcactcgcccaaatccccagctttataaaatatatgccccaaatcctatatccattttccttttgttgttgttgttgtttttatttaccaaaaagtaagataaaatgcatttaaaactcccttagaatacctgttcttttctggattcatgattttttggtttgctttatgacccactgagtttaactcaggtaatctctgtgacacgctggagtaacagtaaggtgtgtgtgtgtgtgtgtgtgtgtgtgtgtgtgtgtgtgtgtgtgtgtgcatgtatgttttggggcatagtgatagagatgtgaggttataagtaatgtgggaacccttaggttttgcaaaatattgattataaagaacaaccaaggtggagggggtgaggatgtgtgtgtgatacccagagtgggggtctcctctcagaggagaggggagacaggaatgaagaaggatctgggagaaaggaggctgatattgggatgtaaagtgaataaataaataaatttaaaaaaaaagaaaagaaaaaagaacaaccagagggtgtggagtcatcaaggaaatcattgccaggaccatgaagaccctaaagaacgaggtaggtcagctgtgtttccatccactataaacaacattttccaaaattctacaatgggaagctttgaagatttttttttttaaaggaaatctacctcccagcttactgctttctgcatactctgaatgaggagacagatgtaactctcaacacaggaaattgatgtaaaacatggtgggagactgacatcaaacagaaaaaataaaataaaatcccaggactaccctgctatggacctctagctactgacctactgccttctgactgagaacacgttgctttccaagagggttttatgaagcagagtgtcatggatctctaggagagcagctgaggctgaggggaggagacaacatgctacatgcatgctctccaactagaccagagttacttgtttttcttcccaatactggggccctgttatgatcttattagggaaattttgctgaatggtacagtatagtgctttttaggctttatagcatgaaattagaggataatagacatgtttgtcttttttattttgtttcaaagaccagattaataaataaataattataataaataaataaataaattaagagacacgagacgataggtctggtaccacatagaaggccagaccatttatattttactaatcatatgagtccctccccacctctttcttctttcttctttttaaaatttacaaattaattatgtgaatatgtgcttccttgcatgttggcaagctaaatatttctaagttggtgatgccagttacgctgtacttacatagttataaaggcattgcccagggacataacatatatcttaacatcatagatatttgagcaaaatcacctcctgaattcaaaattaagtaagcaaattattggtttctccatttgtgcattatacttctactaccatggccaaaattgcactagctctataaacagctccggattatactatggtcttacattgaatgtgcaattatttaaaactcccaaatttctccttcttgacatctgttgattaacatcctctaagttcatacccctaccttcctattctgttctgctgagtttttaaaaaatcaaactagctgagatgatatagttcagttgtaaaatacttgcctcaaaatcacaagggccaaaaagttctgtcctcagaccccatacaaaaaggacaatggcatctacttgtaatcccagcactggggcagtggaaccagagggatgactggagttctgtgaccaggaagcctagtgtagtgggtgtgttccaagtcaagaagacacctcgtctctaataacaaggcagatggcatccctaagaaatgacacctaaagttgtcctctagttctttacacacaaacatgtgcacatgcatccacacacaagcacatataaacatataattcacatgcacacaacacccacacacagaagttaattacactattttccattaaataaatatatatgatccaacttctatctagcagcagaatgtctgcagcgcctgttggctttatgttttgatgtgataagcatatcgtctgtgccttcagacacatcaccagccaacatttcgtgctgggtgtgctttccccatgttgcataagagagaacaccttggagcctttggtctaggaatgtggcctgggactctgccaagcatctcccttcagcatcacgattgtagatttctcgacctttagattctatgtgatataacagaaagtagtctatgtttaaaatcacatccaagaaataagtgcacacatgaaacatagagaaacttgtttcaatttgggcctagtttcacatttcaaaggcataggagcccacagaaaatataatctctgagacagaaactctgaatacaggaatgattagcaggtggcaaaaattactgaatgagcctccctttcctgtctcataaatctgtcctccttttcttagggagttgggggtggggtggagggatactttctttcttttttattttttatttttcctgaataagaatgttttctgattgctcctagggataacacaaagcatccagagtgcagttactttctttggttacaatgatgtttgttctttcttactacaaactggcacacattaaatatatactttattcagtccctaaaatacacagggaccagcatctccacttgccccttaaaacttgaagacactaaaaaattccaccagtaagtttgcagtttctgtctccatcaactttaacctatcaaattttccaggtataatttcatgagtgaagcaaattatgcacaagaagttctataactttataaacggtttttataaaggtgctggggaaaataaatattatcaaatatttcctccagtttctatctccctgccagaaaaacgttgatcaccttgtttttttcacattaaatttcacattaaattctttcatcaactacattgacaactcagaatctcaggtaactgctaatgaatctatctgctccttcaatcgctttatcaagtgtgtctgggtaagactcgctctgttctgatgctgatgtggaatcatgcagaggtacactactaatcaataacataaagttttgtcactggggagaagtttaagtcaacttataattaccggttccttttttttttaaatcacattttgatgctacttattcgtaggtagagatgatctttatcatttcttgttgcctcttttattttccttactttgagggggaagggtgcaaggtgggtagaatagtgtttaaaactcccactctacttaccaccctctattttattcttaaatcttctcaaatcattaaagttaaaattagatcagagatgaaagatattccttaagatcttcctacttcatttatttggtgttattatatctcagaaagtggaatgaattgccagtggcaaaagggcaaaatcaaaacctttgcattcagtgctacagtataaacccttgaaaatgatgagaaagagagagagagagagagagagagagagagagagagcaacctttgattcccaattttacattgactagcatgttaaagttcttaaaggttagtgtaaaagttgagctgtggagttgcttgctttaaaatccacctgcagagataaatgttacctgtctccctctccccttcacacacactccccaagcctgcacagggtgtcaagaaagggaggcagtaaagattgatatggcaacaggatgacttactgggaagtctggggaaattctttagtaggtactatgacttcaatgtttaatgaactgcttaaattaatttgaaacatttatctgactttctattacatacttagcaaatttcatatagactagttgaaatttaaaaaaacaaactgattttggattaaaaagaacaatctgaagtacagtgacttaaaaaaaatcatgtaattttttttgtatttcctggttatattgaaattaggatatcctcctttgcctgccttccctccaaaaaatgtggaggcatatcaaaaccacagaaggtcgtcataaaatcccagtcagaccaaagcaactgagatgaaagcagatttaaaagcgccaaggttctgtaagctttcaaaatcaggacattacgaccatgacaaccaatgaaaagttctttcaagtgaacctttggggaaaactacataacattcattactctctgggaactttggaaataaccttttactttattatgcctgccactgaagcttgtaaatttatgttactcccctcgctctccaaatgtaaccatccttgaacttcaggccatgtataaatgaaacttcaggacaactagctactccatagccatccacaatgtttggtcagatttacctcaccaaaggtgtgtctcagagtttgtagttgcactttggtacttacataaatgaaatttgccatactgcttgtaattcattctttctttcatctatctatctatctatctatctatctatctatctatctatctatctatctacctatcgatctgatagcattcccttcccccttaacaattttcaaatacccatgcaactactgagtttcgtcattttttttttaaatctatcaacaatgactccattattcagtaattgggtccataactttctgaagttttcatattcctgtgatagagtgatggaagtttagtaattctttgaaatataaaattacttaggattattgcttttaggccttttggctaagatcaagtgtaaaattatttaggattaataatctcatccctaagtggaagatggaggggctttaaggatgcacttccctaagttttaaagtactaaagctttagtgatgtttccaagggttaactccccaatgccagtgacaaacggatttcatttgccaacatcatttacttcttagcattactccatactagacagaataaatggaggccagagtgtaaccaatacgtctactcattcacttctgatgcccatctgggcatgttatccatcctaataaagaaaatttatcataatgcaacttaatgtgattatccttcaaatggctccttctgcctccagtgaacaacagccagcattttcaagttggaattctgcaaaactctcttctgattcctctttaaaatgcaattcacagcttgagctcacagagcctgccagtggctgaatggctgcactaggcggctgagagtccttcaattaagcagcaattttgcaattagtggaaacgaagtgcttcataacaattgtttgaaaacaagttgagacaagtgagcaattaccccattaaaaagagatactcactgtcacaggaccaaaagagccccctcacacaaacggaaaccgtccccacaaggagagaaacacaggctggtgttttaaccattagcaggagatcagtacactataactgctgcagcaggagtgtgtcttccataacagtcaaaggtttagctgccctcctcttgctgtgttctgttttcattcagaaaatccacaactgctctttgctctactccgggactaaattcctacaccttaaattcttaatgaactacttgtgtgtgacctttccttccatgtcgtgcatctcagattctcttggtgattagaagataacatctatagaacccaaatctgccaactgtgctacaatttacaacatatagggtatgtggagtgtggggaaagaaggggggaagggggagatggattttactaaaggcttcaaagatgaatctaaaaaagaataaaaacaagctggttgctatactatcaggtgggcgtgctcagcctgctccgtgtgccaagctacaacccagagctatttatattcggaagaaatgagattattgggactattaaaaagaattggactcttaaaacattacaggaagctgggaacagcttatattttaatggtgccccctttaaaagaaaatccaagactttgtgctaggattttagaaatttgcatttacatttaatatgatttctccctcccagcgagtcaagatgaactagaagtaacccagctccttttctctcttgggacctttaggagatttaagcaaccatggctgcagtttaggcaaatgatcactttctaggttcctcttgtatgcagttaaaagggtgcatactttcaaggcatcctaaaccagatttcctaaatgatttaatttctggatgcataaaggtttgcaatcctttcaaatgaccttaagtagcaccctaaaacaagcatgattccaaactacaaactaagctctgaatgggctgtgagagactctagaagtatgtgaaaaattactgttagtctgttttaaaaaatgttatgtctaagtgtgtctgcaatggtctaatgcttcaagatgtctacgtcatgcacaacagtcttgtttatctgggaattatttctttcttcctgaatcatttataaacaggaaaattttaatgacgtaaaacagttctctatacaacgtgtgttctgtgtcgttgtatttactattaatatttaccaatatttatcccatttttacaaaataacatagaagaggaacagaaaacaactttatgattctggaattccaataatggtaactaccatatttcaaattccagtagagattacgtttcaacaagtctctctctctctctctctctctctctctctctctctctctctctctctctcttgccttggggaggaggggaggaagaacaaaccaaaacctccaaaccttatgaaaaatcagtgaactgcagtaattatttttaaagctccctaatgttatttcatcctctgcgcctgactaagcctattgtgtgtaacagcttgaaccgctcttgttctaacctcagatacctccgacctgaaaatagtgtctcaaacttacaggggcccggatgcttagaggaatcaaacccgtaaataaaataaataaataaataatgcaacaagacaaaacaaaaatcaatcgaaggatcaaaatggcttttgaccttataactaatgtataaaagaatcgatttttggagaagaattaaaagaggggtatatttttcagtaagttgatccaattgttgggaagggggagtcatttagcctttcatatacaattagataacaattactgttcctaattatacatcgctttctttttaaaaaaaggataagttctagaaggattaataaacaggcagaaacatacttccagacaagaacatcctgtattcttgtgagaggggctaaaaggctgttgttgacgctgagaagacggatattttaggatgccgggaagaccctcaagtaagatcaagaaaatcctagcacttagtcaatggtatctcaaagcaccccggcaactcaaggaaagaaatgcaacaagccaaaattccgaaccgagccgcacatcttcaggaagctgtttcaaaacgccactcaacaagtttctactcgcaacccccataacgaccagcaaaactgcccctaaaacacttccccgcccccattcgacgagccccagcagctactcttgccagtgtggccagaagagggcaccctctaccttcctagctcagctctcctggccctcccctccctcctccttggatcctccctctctccctccggctccccccatccccaagtccccatccccagtttcctagcccaggctccacccccaactcacgaattgttttcactaaaacaccagttcaaactcaaactcacagcctgtggctcaccgccctcagcagccccggggggaacaacaccaccccccccccacccccggcagcaatttccccttcttccttgtcatcaagcacaaagcccccatcttcagctatttctttctacgcttaggtcgcttatccattgctcttcctgtttcagcatccctggaaatcaaaactagcctcttcatcctccataaacacccaacctactcccggatgaaagtcaaaactttcacttcctcaggaggatgcccaaagggaggtgcgcaggatggacagagggtcggatacaggctgtcctggagttccgcagaccctttcaggccccagcgataagaagggtcccaagttttcctagttaaacgttgaccttggacctgtaagtaagctttggtagtactccctagagagcaggtgacagtgaacagcctgttgtgatacccaggaaaagagatgaggacagaaggcgccaagacccattctcggactacacaccaccccggtccaaatttgcgtggagagtgcctaagccggtggtaagggctctcatcccagccctgtcccggtgccatccgtctgagcccccaacagctgtcgctctatatctctctcaccacccttcctcgtctgcgggaggacttcggggatccccgggacgcaggcttagctcccatggcgcaagtcgtcctcttcccttggctttttctctcacactgaagggattcctggggtcgcactgtccctcagagtcgtgggatcccgggagaacgctccccaggagcaagcccgcccctccgctgtcccgggacgaaggtgaagccggagttctgcagtcccacaacttctcagtcccctagccaactttcccgggcgcacgcgcctctggctctcgcacttagccccacgccccgcagtcgcctacctcagggtccacacaaagctctcggatccccggcagtggagtcacattgttgtcacgcttctggtccctgcgccctgccctgggccccgtgcgctttctcgtctgccccaaggcagtggtggcagttgaaggaaccgggtctcatcaaagcctcccaggcggaggtggcgcgccgccccaggcggtttccttctccaagcccgggagtcccgggcgcactgggaaccgtgcgacagccagccagcgggtgcgccccggcacggcagcagcgacgggcacccagagctcagccagagccaggcactggggtcagacattatttagctcttcggttgagcttcgattggtcagacagcgccgcccctatcccctccctgctccgccgcgccaccgatacccattggggtggctgcttaaaggggacgacgcgccttttccttgcgggggctcagccctcggaagccctcggaagccctcggaagccctcggggtatccctgatcgccttgcactggcttctctccatttccccggagctcgctgcttaaacccaaagctctgtgcctgccctctgcggtctccgcagggtgccctttgctaggaggggtggtcgaatcccggttcctaggcaccctactccccgcaatgtgctctagagtaggaggaagcgagtgtgagtctcacacgttcaaatctttctcccctggtttgcaactctccccatcttttccatcccagcacccaagttctgtgggagagggcgtgcatccacccccacccccaggccccggccccagacacaccttcccgcaccttcccgcaccacaaagctagaaaaagcgaacacacaatgaaactacacagagtgtgcggggttatggtttactccgctaccttaaacacatcggcttaaccagagtttgcgccctgacctctccggagtgtgcctaatagaattcaatcaagataataacagtattttttattaatgaataaccccggatagcattacaccaagttactgcttctagccgggaagcctaggcaataacagacctcactaaagccatatgcttcccagcagaccaaacgggggcgggggggggggtgaggaaagagaaagaaaagaaacccacctttttcagtcactacttgtcaaagtaaacatcaaggcagctgctctggggaagaccggtccccaaggttctagactcttactatatatttccccttctcttcagttaaaagggggagggggcgagtctttggtggccgatatgtactcctgttctgcagcaaagaagttaaattattgatagtggaaattgcatggcggaggtaatactcgcacgccttcagcgagaagctccatttgatctaggcagaggctgggagatttcatgctagctcgccgggggtgggtggggggagcggcagcgagagcagtcctctcctcggtgaatgggaaagtgggtgggagtccacgagagggctccacgctgccttgacgtgagctgtcatatgatacctcctctgcctcgaaatagacactctagtgcacgaattaccagaatcagaattccgcgcatttaaaatgatacatcttttattagaagaattccgttccagggcattgcatgctttgtagatgttttcacttccagtcctagcaaattcacgcacacagaagccaagcctgtcattatctaggcagcaacaacacatcaatatatatatgtatatatacttaaccaggatttagggtgaggggtgggtagctcactaagcccccttcctctagagcagagagtggtctttggaccgtttttgtttggttgtttgattttttttttaacctatgagagatcagttacatgactaggttctggagggctactttcatttagctgtatgataaactctgccaagtgtctacctggattgctgctttgttaaacgttgcccctctaatccagccaataagtaaaggctagggcagacagacctttattattcattttattttatttttttttagaaaaaaatataaaagaacaagagggcagtattgagcacggtgccacagcctcttgttaacataatcacctgtctgaggattaaaagagaggctccttcttctaaggctggcctttagtatgtctgagacagggcccagtgattagcactgtaataagcaattcattcacagacgatttcaagtcaccgtgaaaaattggcatatgtgactcagaaaggaggcaaaaatgggtatccgagactcttgcaccccaacttctgtgaccccttgtatgtgaatgcttgtgaaatctgaatgacttaatcgttgttaaggcattgctgtatgactgtatctgaatgcttaaacattaaatttcctagaggaaaggaggttcataacagttctttttcccagatgtctgttgtcaccagagtgggctattgtactgaatatatggcggtagtgtatactgagattcatttaccaagggctgatggttaacaaagtgaaattactaatatttgctatttgaaagcttccaaaacctgctgacagaaatctttctgttttataagtgaagaaccagagattcaataccttatagtaattcaaccaagaataccagagatccacccttaaagacctcaaaagctcaagcgagaaaggcctcctccttctaccctttgtccttcagtaaagggaaatcatcagaactcaagctactttagagtccccttacaaattgttgctctggatagtcaggctattcaaatatatgcacactctcagagtgtcactcacagttcgctttgccccactgacaacttggtggagcatgtgatcaaaacaaaggatcttacaacacagatgatagagggcatgaagctaggcttgggccaccttaaagaccctctgtttcttcctaggttataggctgaatataaccatgatttcttctatcatcataacttaagtgactatattacaatctttaaagctactggtatatctttaaaaaggactggaggagtcctacctgcaattttaaaaggtaaataattttaaatcagcttcaaacaaatgtctactttccaactttacatttgttaggaatgggttttgcccccagggttttgtaacctgttaaaatttacttcttttccaaaaactctgttgcaagcaaatgtctttgctagcacctgtgttgctgctcaggtagatattatgtcagatctctatactatggaacttacattaccctgttagcacttcctcagggtggaaccatgctttcaccctgagactctgattggatggctgatcctgttagtctcactctcctttgacaccatagacataaatgcttgtgtcttccttttccagtgggtggtgcattttcactgagaaaaagaaggagccagaaaggcaggagtatttggggatagaagatcaagtaccaattcagataaacctgagcaagtagacttcttcttcccacttttgagtatttaaagctttctgatttgtgattgtggtaatactcaaacagtaagagactagacttgtgacatttacctatttgccataaaaatttcccctccctttcactgaagaacatcagagccaagatggatcaatggcctgtgcattataggaagttatgaattcttctgaaatgttttcattctgataacttattcaactagttttgggggcttaagatcaaatgttttttttaaaaaagatttttcttctctttgtttttgaccaggtgtcactatttagctcaaactcattttggacttggacttgtgagtatcttgtactgcaggtgcctgctagagcagtagattactgtcctattaagcataaaggcaaatcttgattaaatgaggcattatctttttttctaacagtttggtttctgacataaaagattgatattgggagcaaaaattccttctaagatttgatgccaatgttttctctaccactaaaaaggaagaaaaaaactatggagaaaagaaatgtcattactgcggagattaaaagttaattttgagtgagtctaattcttagttcctttggtttattgcctaatattctcccaactcaatgtttcaaggggacaaaagtgaggcataaatgtgacttcccatctcttcttgtcaggaaatacaaactaatcctcattacccaagtgggaacagaggcagtaggatcagatttgatactgacatattattctattaataattttaattggatgaggtcaatcctactatgtctataagcattttatgtttaattgtgtttattgaagtttcttggttactcctgccttcactcttctttggggaaaaaaaaaaggtttggtatcaaatgaattgaccccaaacactgcttgaaaactagagaaagtaattaacatggggaaatagtaagtaaacagaaaacttccccgatgagcagagtgacaaggatgttttcaaatccatgctgcatgatttccaaggtctagtttggccttgaactgtgtcattcacaagcctttgcaatcattaaataaggtctgttcttgagaaaaataccttaagggaaaaatagtttccgtattcattgggtagtacttctctgtaagattcctataggccataaaaataactccatgctatacttagatgtggccaaattggccaacacatgttacaggaattctatatcctgacaggcccagtatggacagataaaagcaaggaagcacaaaaggcctgggcactgagagttgaaaaggaggacctgaaaaacgatgatcccatctggaaatacttctctgcttcagggaaagtaccataaaaatcattatgaaattgctgaggctaaccccctaaatattcaagaatcacctattggtaagccttcctctaagttaccagatcttccctgaaaacatggaaagattaacaatgaaagagccattgatttactcattaaactggatatgagcatagtcaccaagggcatggaactgtggacttgggacctcagagctagacttactaaccatggtgtgtcttggttgtactgggagtagagccatggaaagcatgaactaacttaaagtactgggtttcaggacattgagtcagatatcaagagtaagtcaccttaattttgaaatacaaccatgttttaatgtgtgatagtcgaagctagatttttcctgttgtcaaactttacatttttttccccatggacaaatgaagaaagaaaagcatgaagtaattgtggtgcttctcaaagtcatattaggaagtgcaccaagaatctgggctattttccctgggattttgatatgtgtgcctttgaaaaatgaactgtgtgatgaaagacctgggtaggttatgcagctctcttgacctggtcctgcctaggcatatgacaaaaggggagggagaggcctccacagcacatgcaagcagctctgtctagcacatatcatcatctggaatcatccaaaaatcatcaccccatcaatttcagtttccctttacttcacaattaaattcattcaactggctataacttgctggacatcagcatgtgccagccattctatctgctatggcacagataaacaaaacacatctccaagctttaggagtttatagtcttggcgatgagttatagtgtagttcaagagccattacttatttgccaaaggagagaacttatattgttttgttttgccttaggtttgttttactatataggctgataaccatctgtctgccccgtgtagtaatggtgagaagaaacttccctctgaggcttcagggataaataagagttagggcgggcaccccacagttaactattgccctggttcttgttattcatgcttaactgtgttttcataaggcaagcaaataagagtagagagaggttgagaagatacggggcaagtgatctttatcagcggcatcttattttgacatatgagtaggtaaactcttttattctgtttatgtgtatgtatgtgtatctgcatgagcttatgtacaagccatgtgtgcaggtatctctggaactggagttttaggtagtcatgaactgcttggtatgggtgctaggaaccaaacctaagtcatctgcaagatcagtatgtgctcctaactgcagagccatcactccagctcctaggtagagttttttgttgttgtgaaaaatagatctggaaatggtgtgtgtatatgtatatctgtgttgtgtgtacctgagcatgtgcaagcacacatgtttgtgtgttttgaaggtataaacacacacacacacacacacacacacatatatatgaatgtggaggtgggtgttgttactcaggaatctatcctgttgaaagtgccaaataccttggttgtttagacaaagggtctctcattggcctggaggtcactgtctagctaggctgcctagacagcaaataccagggatctggttgtctgaacctctagtagctaccacatgtggtattttaagtgagttttagaggtcaaagtcaggccttcttactttggggcaaattctttacagactgagcccctaggagggctgttatggggttatcctgtcttcctacatagcagattaaacctcctttgcaggacttctagaatctagcattgctagctcttggaagttccttcttggagcatgttttcattgttacaattagtatcttgtttcatttcatccagccttactgaagatgaaggacagctgcttattaactttctgatgttgctaaattgcctctcagaccgttttcatagcatatcgaacctcataaccttcttcataaactccaacttccaatccattcatcacttctattgctctactctggacttcctccaaagtctccatattcttctgaaaacgtgaagtcctacactcaacatgtgtgggaaattagccaggacttagaaaacactggaattgtgagttatctgaacacagctgttggggaaaactaagggagaagaagattcaatcagattgacaaatcatcccctggaagttggagacaggagaggttgtttttataaaagaacaagcttttgaatcaaagctgaatctttgtccttagcataaacgtgctgcatttttttaaaagaaacagatcctgaacaaggtattcattccctgaccccaaatccaatgacaaacaatactgtctaagactaaatgatgttcactacactacttgatatctcaagctgtggacttttaactaaactggaatactattttcagatcctcaggggtgactacttttgtacaagctctaagaagaataaggtttatgaaatactacactacttttgaggcttttacttcctgaaaaccattgtaggttttggatttctgtcttgttaatacctaaaacctaattagaataaagttaataaaacaagtccaatcacataaaacccacactaaccagcctgatacctagagatcaaactttcctggatgtttcatccatcaggtatacttcatcaggtagttcatgacttcacagtccgtaccgcatgtacaataaattcagcatccttccttactcaaatcagggtagaagtggaataaggtctttccatagacaccagtagctttagttcctcatgtgactttagcatctctgaaaagaccacttgtgctaagatttatctacatgccttcaatcaattatttaaaatcacatcgtctctgtaagctgctttctaggagaagggtggatgaaatttatcaagaatacatccaagtagatggatgacttcttgtcttctgctgtcttcctactcagctacccttctagagctggtgttttcccttctgaggtgctgcagagacacagaggacccagataccattcctggcatgctcccaaatgaaatgtatttccagagaggtttcaagtttggagtggagcccttagaggaagaacactgaattgcacaaggaaagccaataaacatcttagtccctagcaggaactatgaggctgcaattacgtttcaggctgtgctggtccattttcttcttctccatatctgtaaacaatatgttagattttggaggtttgtcatagactgtgtgttttggagagagtgttctccatcagagcatctgtagtaccacagccagtaacagttaggaaaggcaaacttatgaaatggcttctaaacacagtaaatcccaatctaaacaatttataacgtttcttactcaataactcttagaagtcagctcatgcggaactgttctaaacaagttaagaaagaagtaagaaatcctccattgggcaataaaccgaagtgagtacaagagtgtgcaggtaacgagcctcagaattcagtggggttagatatttatttctggaaaattctgtacggatagtgtctgagacatgacaacaattataacaactaaaattgtataagaattttcaggtgagattaataattacaagaaaactttggcattagaaagacacaggttaaagcccagctttgccacagtggctgagccaatttagcacaattgtctgtctaaaggattaatcaggttccttatgttaagctatgaacactgacaggctttgcctagagagattgtcatggaaaggattcattgaggtgcagtaatttggaatgctcactgtattaaatgagacaaaatcaggtttcactattctttcatttgatcctaacacgctggttaagtgttgccatgctccgttctatgattgtgaaaatgagactctaaaatgagaagtaaccacttgaaagccattggctgatcagcaaatcaaaaaaaaaatcatcctaaattagtgtttgtggccactgattttgaggctctcacctatttcgaagagatgtagtgagaacttcttaggagaatacatgtgcaaaccatctgtaaatgaaatgaaggcgtgtgtaacactcattacacaggaatacttggcttcccttcctcccactgtccttcctgcctccagaaacagtgggattacagacctgtgccatcaggctaggcttagaaccagggttttaaaatgagcttgtaagtcaaaaaactttaggtctgaagttcaacttttccacttaaaatttactgtgtttgtttgggcaaattacttaaactccccaagctctagtttccttgtttatataattagaatataatctgtctccaagagttactttgagggttaaataatatatatcaaaggcaaagcaaagagcttagtacatggtcaatgtaagacagatgttccctcacctcacaatttctgtcaatgttcctacagtgtaacaatgacaatatctaagagttttcagacagttgagtttgttaaagattgttagctttctgagggtaatattacctaagttaatagcccgagcttaaaattccaagatctgctttgcaggggtggccatgttgcagatcaaaccccaagacttgatgcatgctaatcaagcactctaccactaagctataccctacccatgcccctggaacttcctatccttttcacaggaggactagatttctagagccatggaattgtgctgctgctgatactaaaattatgcattagggtcatatggagctcaattgaagcacatattccacaccatggctatcttgtcaattggccttttacacactgtgtagcttttctaatggtaaaactgatttaatttttttctgccaatgccaatttcctttgccagaaaggaaaaccaaatggctaatgttgacattggctaaattcacatttctgaatcaatgctatgttaataatttcctcccacatgttctgttgtcaaatgtgtagtggatcttacccagtagtatttgcagactttattacaagcagaagctagacatttttgtattgtatgccaatggttagttatttcaaaattatagcaatcattttgctgctagattatccaatatataaaagtgcatatatttttatatcacaatatattacattttatattattatagctatatgtaatgcaattgttttcctttgtaaccataaactttttattatcttcatttagaagtagtattctgaaacgagtttacaaaatggttcatcagactgccaagagtctatgccacaaaaatggctacaaatcccatgttagttcaacatgtcataaagaataagagcttaattctttaatattgattatggaagtcattggagaggaagaggttctcagaggaggatgaaagtgagagtcaaggaaatcatggttttctactaaagtaattagaactatcgagcatggaaggcagagatcatggccagggagaaatggcctggagaaacacccacagagagctcctgtacaatcccgattcttttctgcttccctgattatttctatattgctatacatttcctctctcttttgcattcatctctccagccatgctttaccctattggcttcctgcttaggtgaacactcatgagaacacttaattgggatatttcagtttacagagctcttaatacttagagactgtacatattcaatatatttctgtgaacctgaagagatctctgtcttaacttcccttggcactgatatagtctctgatggggtttctaggtatcacagcacttgatacatagtctggcactaagatcccaatgtttttcttctgctgttgggctctgcttcctagtttggaaagggtatatgcattcactcagaggttaaaaatattggaaaggtcatttctattttccatagtaatccagagaaatggccttttcagtttaaaagatctcatataagacacatttttctaccagcttcaggttgaactgttaaatttggaattacaaattgctaaatggcttgcttgaagaaaatttccctaaggtttattctttttttaaaaagtttatactttgaaatgtattttgccatttgcctaaaatagaattcaagagtgatgtctgtcatccttagtgcatcagaagttattttaaatatggcatctttataaaagtcaatagctgcctcatcaaagggcaatcatgtccagtgtgggtggctgtgccaattgtttttgaactactgcagcaatccagccaatcgcagggaatggcttgcagtctctcgacacccacatttcttcttaattatctccacgaggctgagttagctaaggacagatctatagcatttcctggatgtccaaatgcccacacaccttctgcaggctttgagttaccagttctctttcatgtttctcctggctagaccatctaattatctattagcatgtacatataatgcattatttataagaacaagacactttcaggatgcaatatctttaattttaaaaagaaatgacataaaacatagaacatgtatgtcacaaagaaaagtgccctcaaatttgacagtgggaattctaccacatccttcctttaaaataaatctaaacaaatataaggtcattcattgttcaatttaaactatcataatcatcatttttgagaaaaaatggtaaattccacatccagagacctcctatgtaggtcccaaatctgttgtctttaagttttatttaaatgtatttagaaagtaaaaaattagtgatttaaaattctaaatcatcaaaggttaggataagttaaactggatttcttgtgaagaaaggggaaatagttacagtgcacacaattctcctatagtgctcggtcatgacccatgggtctcacgcataccaccaaatgctctacctttcaactatccctgctatctttctactatttgttttgagacagagaaccattaaattgcacaaactgagtttaaattcattctgcaggctaggcaggccttgagcttgtgatcctcatacctcatccacctccaggttgtatattgtacactagtcaaccatgacactgaaatagactttagaacttatcctgagaacattgtttctgtactatgtgcatggaaacagaaactgagttgacgtttcagttattgataatgagttgaggataaagcttgaactatgtctttgaacccaagtcactgtgttttcttgaagaaagtacaaatccagatgtctttaaggggtcagattttgtcaccagcctataggttctggcaagataaggatcattcagtcttgctcatggctgaatcttcaaattctgacatagtttgggactcataattgattaatatttaatacatatggaataaaattatgactgttaattttctgcagaaatatgctgggagcaaatgccatcatagctcacttaagataggcaaacactatctaccaaggtaaacaagtatccaggaatccaaaaccaggatgaaattccagagggttgaaagagagcaagccagcatgaactcatgcatcggatatgggctggactaagtgacctctgacaaatgtctggccattagattctctgactcatgagtaaaagtaatgtacttcttggctttgacctatcttctgtgtttgtttttcaggggaattagtgactgtgacttagctagtgtgtcagccacaggaagattcctgttttctttgagcctccaactttgagagagggaaagaagaatttaggaaggcaaggtcatgggctgattaaaactttccattagttctgccaaatttggggagtatttgtagatcccttttttaaaaaattagataaatcaaaataggagaaaatgatgcctaaaataccctcagaggccttagataggtctgaggggcatggtgggcactgaacaagcacagtccttgaaactggaagagacagactccgagccttcagaccgtccactgtggtatgtctctgcagcttggcaccgaaattccctgtgtaagaggccatggtgatccccacccaacatagcccatctggaaatcaaatgaagaaacctgtaatgagttgtcaaaattctccatgaagtgttcttactagaaaatacaaataaactgtgcgcttgattatagagaactccttacaggattctttttacagtgttggaatggaagagaaaagagagggaggaaagatgggggtggggggagtcaggattggcaaaaaaccaaaccaaacccaaaccaacaaaacccccaaaaaccttaccaacgagaatggaggcaggataattcagtattttgacccaagtgtcaagttggggcaggggcgtcactgcttatagaacatgtctcctttttctagagatacttgtgaaaggaacagctctacattcccaactaaaagatgtaaggctttatggtcttgatattatgctcagtctgaagtcagaaggggagagaacattttattgtttaaaaatttaatcttctccacttaaggcaaccccctccactttcagagcactcagtaagtggtaaacgttcactgaatgctaatgtttattttattattaactactacacagtgttctttatagggattacagtatgtaattttaagagatttgctgcttgttaaactcccactagaaacacacacacacacacacacacacacacaatgcactgacagatcagcaaagaaagacactagcaaaagaaagataatttgagatacttctgaggtagcagttgtaaaattaaaataggcaactcattaaattatccatagagtgaaaagaaagctacaaaaatagatatttttctggcaagtcagtgctgttcagaacaaatatagttttcagtcagcagagtttttatatcagatgatatcagttcatatttgttaggatcacttgcatggttggactagtttgctctaattaaaagcaaaaaattacgtagaagaatttatttaggaagaaaaatcaacacttcaataagacatcattttaacttacagactgtaaacaatacaaccaaatgaatgctatctgagcaatttggaacatggtccccaagatcacagaactttttaaaaactaaataaataaaactccttttgtaagtcatattttagtttcaactgcctcaattcaattttctgactttcagtggctgcttatctgttttgtggtcacccaggctcttgtctctttctccctttgctggtgttgatacattgtttcttattaaagtttcccctagaggacaggccaggaaaaggaaagacctaaattcaccagctttttcttattaagaatttaaagacttggtaggggaagtgcaaatgaaagcagcggcttacacaggttgatcccacttcttttcaaagcttctctccaatttacactgatagataactgacaatatttagcaagccaattaatcgcttgcttaaaaaaaaacacaacaaccttcatttcctgccttgactgtacagatgagatgatctttttaattagcaaggactctggttcaatcaagtacaaatgctgcatgtaaaaaggatggtatactgatgaggcccatttctggagtggcagtttgcagagcctattcagatgttcttctctgtcctccaaaaattgctgtgttgtgggtcttaatgtcaaggatactgggaaagattctggcaagatgcacatcatattttcatctaattcagaacttatatatttcactgagggagatagaccaaggtaaaaatctcacctacagtgttaatatgcaagaccaggggctacaaaagtaggctagattactattaagattataaggttaaatgtctctctctctccctctcttcctccctttccatctcctatcatctttaatcttctgattccaaaaagggcagttgaaatacctttgcttttgcgttaaagagatctatgttaatacataaaaatagtgaatatcaggggcaccattcttaaagtgacagtggaaaccatctttccttacaagtcaaggatgcttgggtgtaagaggatgacgtgacacttttgaggcttatttaaattgttaaaaaaaatggaggttaaataattaggctggtaagtattttttctccttgtcgcccagacatgatacctataatttcctctgttcaactgtcagacaaattggcaagtggactaaaaacaatattcccttaacgaagcgttcgtctaaagccctagcaactgtattaggcagccccaagtattcacgagcaaggcatggcgcgggagggaaactctgcaatttagaatgacagatgattatttttttctctatccattaagctttctcaaaatgtcataatatttacacctattccttggtgaattagatccaaagacaggcagacagaaagaaagaaggaaggaaaaaaaaatccctccaactggttgccgctgggttggggaaaagcaggcgttgcacctttaaattttgtcccttggttctctgtccccggccccccttctcaggattttgcaataaatctcccagttctgcgttcagccctgcagatccgtatttaaaacagcaccatctgggaagggtgggtggcgatggtgatgcgggcgccttggagttcctttgcagcacgcttggaattgcatcagactgatccgaaatccccccgcccccaagccctgcccctcccgccacgcttccctcccggcccctcccctccgctcctttcgcgtagatctgactgagaaaacgcctggatcccggaactgtctgtgccccattcgctgcaggcttgatccgtaaaccctgccctacgctccctttgtgtggcgaacagcctatgggcagtcatctgatccaactgcctgtttttcattctttctccacccccctcacccccccaaatttccacaatatcctagcatcgtctatgaattcatcatttccacctgcgcagagttgggatgctttcgttcattaaaataatcttgagtcttgagttttggaaatctttccttttccccccaataacgcccctcacccgcatcccaagccttatccggggaggggtcccaaggcaccaagccttactccgaaagctgcggcagggcaaagctcctggcctgaacaaagggcggtggaagcggtgggaatggggggttgtaagagtgtggagaggtcttccccgccccccgcccgggggcacgcaagtccctgaactcccggaagagaggctggaggacagcgcagtggcacgctccgggcgcaccgagtcccctgggggcgcaggcgggggcaggggagttggaggaaaagactgggcggctcccagccggagtctagcttatctccaatccctccatcttcactccctgctaggctaccaggccacccaggtagtggcggcagctcggcggggagcccgggccctccacccgcgtcagtggacacaacctcgcttggctgggcggtctgcgcgccccgctgattggtggctcggtcctgccgccgcacggagctaggagtgttcttctccacctccacaaaccacccaggccccctccccgggccgttcccgggctcttcgatctagaaaggaccttccactccggagcggagcacccccctcctccctgagttaccccgcctgactcggacctgggctcaatgaagcatccggcccggcagggagtggagcgcagtctcagcggccccccttcccttgagaagcaggagccctccaagccagcacccggaactctcggggagggatgatagaaaggggtaaaaaaaaaaaatcacccaaacataaagaactatccatcgaggatcgtgagggcgatggagaggtagagagaaaatgagggagggatggaagcaggaggagggggcggggtggaaaaggggggcgggaaggaggtagggaggggggaaagagagggaggcagggataccgagagaatgaatcctcctcactagaggagctgaaattaccttgattcatttttgtgggtatttagctaacctccgtccctctcccagcttccacctcctctttccccactgcacattccctccatcctcttgttctaaatggtacaaagtcaaatcttaggaaatcgaatgttgtgtaaaaagcttcataattagtaatgaatctactgtacacgcacacacaccacacacaagcaaaaagaacggaaaagagggagggaaagggggaatgagagaaatcttacatttgaatcagatatttgcagttccaagttaactaaactcattatatccgcaggaagattgagcttcctccacctcgatttgccccaggttctcacctaggtcaatttaaactagccaaataccaagaaacaaccatttctcatgctctctctccacttcctcctctccactacgcgtcctttccggaagatcgagtatcaaaatagctcaagaattggggatgcagggtccccgccccggtgcttaccttctttgcggcttacaccaccccggtggctagatcctggtgataaacacttgcatttcccaaagttaacccagtataccaacccggagcttgccaagagtctattccagcctacaccgctaggaagccaacttcagcgagctcaatgaggggaccaaactggggctcgctctccaaacgctccgctccaaaatctgactctctctccagccccgatctcggtgtgagccgaacctcggaaaagacgctttttaagggcgacaccgggttggcttgacagcgaggaaaagaatacctggatgaagtactaccacctcggacaaatccgctggctctgtccaaggtgctgaatggactctgctctccgggatcacacacccggcgcaggaggaggaaaaggttaaaaaaatattctctaattaagtggtacttgatattgctctagacggtttcttccacttccttacgttttgtcacgtgtggatggctttgccaaagccatcctgttaatagttgatcacatgttgatgagaccctttccacgtatgcgagcattacccatttcattatagatagacacttctgacttattcctctcgcccccaactccaccactatcctcacctaaactcttagtctctaacccactcttaccctctccaccccagccccaaactaataacattattgtttttagattgaaattaacccccttgcggatgtcaattatatgcccacatataaatcatacaatatgctcacacaccatacagtaaagcaaaggatggaatacaagacggttgtcagacaagcatcagctttgaacagccagtataacaaccccctccagttccaagtttgttccacgcagttccccactgctgtgttaaatctcaaatgattccaattaaacttgcagtgggtaaacccgattcccctggcctgaatagctgctgttctttggcgtgtgaagtgctaggaagagccatgatatgcctgttgttaggcaacatgtcaagatttttcaattataatgcacggtttattgctactcaccattgtggctttgctgtcctggagactcagtgtcttaaaatcttgtctccccaacagatgcaggaaggtaatgtgtcttgtttgaagtcatcatgtgagaagttcggctttgctcagtggatcgcccaccacttggtgtgacttatgaatctaataacccttcgcaatatccgcaaagcttcaactctcatccaccttggcgactacagaagacaaagcaactggcatcgatgttgaaaaacctatagatttacgcaaacgccctcattctgagagacacgtttccctttgagttcttacgtgattctaatgaatgagcgaggttaccaatgactgtccaattgccctgctatatagcgggcgtttcctgaagcagctttctcaacgcctgtcactgagccctagcacaaaaagttcccagagaaagtgagggagtttcagagtacccccataaaaataatccaatttgcacgccgatcctttgcccactgctcaggtcacacctggggctctggcaaagatgagctcggctcaggagatttccctgtcgccaggtaagaaacccttcgccttgtcaagctagggcgggaagaccgctggggaacttgttgcttttctgcaccagccggctactgctttaataagaataccagaaaagcgcagcggggagggggcgaggggagggggccagggcagcctctctgagccagttacgtgaccaactcactgtgactcccttggtaaaaaggaaacttcttagaaaagttcgtgcccctcccccaccatgactaagggtctccagcggacgtggtcgtgagtgatgatcaaatgggagggggggggggggctgggtgatggagcgggagtgacttgttctagggaacaactgcgtgaatcgaagagcgcatcagccccacaactttcccttttcctcttagggactgatgactaggcgagaggcacccgggcgagccactagttgcccacaggaacctgtgcaagccaagctctcaagcggcttgagttgaatgaagttatgactgcgtttgctctaatggcttatggcttctcaaatgagagttaacagcctctgtgcgcggctaggtccgccctggagctctgagcgaaaaggtgtaggctaggaggggaagatcggcgctagtctcccagctccgcgtcggctccggctccgtgcttcctccccagagtcgctgccctattttgggtgcttcccggggttgagaactgaagccgcaagctccaggaggtgggcttcgggcgggggggctctcccaggaagcctcgcgctggccactacacttcccactagtgactgcgcaggctgggaagtggagaggtcacgtgttggaggaaagtaagttggaaggaaagagatgaacttcaagaagagtcacaataaaataaacctcctccccccgtatgtgtgtgcgcgtgtgcgcgggcgtgtaaaaataatctcttgaaaggcggatgcggtgggggaggggtgcagtgggggaagggcaaggcccttaggctgagatcctaggcagatgtccggaaatctctagaaatgagctgtaagtccagagttaaccatatcccccaacatagggaggcgctagctccaggtatctcttcactagagtcttcctttgcctaccctcagcttagcttacgcagcgaagcagaggagccgagaatgaatgtaatgtaaaccagttgttatggagatacccgcagctcggatgagtgcgagtgccctgggaagtccccggacgctgcttttcaggtttccccggtttggtgccgacaccatgattttgctcttcctctggagttcccaccaatggaccccaccaaaggcatcactggccctggctgtggcgctattgactgcagggatgaggcagggagatgttgcggaagatggtggatagctctgaagttttggaccacccagtcctttaaaatttctgtttctttaatcaaatcaaatgtgctgtgtttgaagggaattcgtagttcttggtgtataaaatcagagttatacataggatgagtttgaagaacattagcatgcagtggctgcttcaaggttcaggtcccctccccctcctatcctaagaatgcttctttaaagaaacctaagcgttacttccttaatgccttctgtgaagttctgttcttggactctccattggtactagattattagtattagcagtaaatccagtgttgcgcattcatatgcacccctaaagagatgttttcaaagtcaacccagatcattctaggctccagccaacatatatttgtacaaaggctttctttacctcttagaggctcttggtgacctggtgtgcatcatcacttagagaataccatccaccagttacagtcaccaaggcaacagttacctccagctaaaaacaaaaaacaaaaatcaaataaaaaagaaacaacactgttcatattgttcataaattgtcactttttgtccatccatgaattagccagcagatgctgccctaagactaagacagctggcataagccatcttcagaggtcttggggtacaggttatgtgagaaaagccagtttcctgagaatgcaattcatcatgctgttagtaagttctcttgcctgttgatgaattcagactggtctgaaatcgtaaaatgacgtgggaggatggtctgtatgcgaatacacttatttctcattgacattttaatgactttgtcaacagtttctggccattatagggtatagccttctctaacagatatttattctaaaaattaatgttatgttttacgggcacactaaattgatggcttaggtatttctagattcaaaatatgaatgagtgattagatttaaaatatttagacagcacaggattgtactgaaagtatttccaaaggaatattttttttctgccctccttgcttggagctattattaaaaagccatacaacttatggaccaagatgaataatgagaatcgctatttaatgagatttactgtagtgggttgtggggaagagtgaggagatggcatttgacctacatcaatctgtgatatatatgtgtaatgaccacacatgtgtatattttcctttcttgatttctccctgacctgaaggagaattctgttctcctggttcattatcagctttccaggtttttatctgctcaaattcacttatgtaattcctttttgttttctgtctgtagaaatctagtacctaatacaagctaaggctacagtcattttatttgttaaaatagatgtcaaccagtgtacctgctacaattttaatcttgggaacacttgttcccaaggccatgccacttttttccctcacacaactctagtcagctgtgatatgaatatcacacttctccaatttagctgaccccattcatttaagcaatgataggaccatttcaaagtgaatgctaaaaaatatgtcttaagtatcacaactcaaaaatgcatccaaacttaaatcaaaatataggaacataacctaacagaggaaggatttttgctttgtttgtgttcacatggtattctatcaatgccacagttaaaaagcttgtcttctgtctgtctgttgctttataaagataagcacaaaattgaataagagcccatcaaaatagatggtacaagaacacatttgatgtttgaagcatctcagaagtagtgggaaggggtaatagaagtcagaattagaaagaaatattttccttagcaaattaagagatggttgggtatcttttgaaatagcatactcttagtttttaaatggaaatttacaacatcatattcaaactgatgagctgggaactctgctaacacgttgaggtggatgagatagtactcaagtgtatgcccaagtgttttcaccaaatcactctgttgttgatgagttctccatctcatccagtgtttgatgttttattttctcctttctctcttactactactttaaatccttcctcttgctctcattctgccccaggtagagtgataagggctaatgaactatagattaataattccttaaagcatccttgaatttcagagttgagcacttggttaattaatgtaagatatttccttccctcagtgttttcttctcttattcatcacctcaagattgctagttacaatccatgcaggaaagtggccactgagaagcttcagatggtagcaaagttactgacttggagcctaagaaaacaggtaataataaaaaaattctgtttatgacataagaagtgattctgtccaggtaggaagaaagatttggtctcttagtcacttcctgattcctaatggttctccacaggcaatagaaggagaggcagagaatcacgatgcacaatttggaaagctttctgaaaacaagaatgggtaatgattgccaagaacctggtgttgagctcatatttaaaaagagctcacgaaatcttccatctaacaaacctagtttagctggaaagaaaacaatcagagcatcaaaaaagacagagagacagaaagcttttggaaactcacgatttagtctgcaagagctcatctgcaagatgcattcctcagtgtgacaactaagcttgagctagaagatttggatatgacctaactcagtttcagaaaaccagacagcctcacaatgaagctgaagcaagaccccatggagtatggaactagagctgagtggatctcttaaaactgtcttacaggcaaagatgaatcaaaggcagtaagaagggatggatgggcatagttaacattatggaaaggcaaatgaaaaccagtgaggagaacatagtaagcgcaatgtggtaggcctagcgagagacactcaagatctctctgcctgcagtatctggagggaagatttcacagctgctgaactgcatttctcataatttaatagacacgatttccttggcggcttgttagaaagcagattccaagtctgggatacgaatcaagatctggcattttcaacaaatttccaggtgacagggttgcattgttttgcacagctgagtgctaaagcgtgttcttccaggcaatggattcactcacacgatggtgtgattgacagctaagaaatctctcgagtaactggagtgaatgtcatacagtttaaaaaaaatcaagggaaaaaaaacagttttaaaattgtaatgctgtataaaccacaggctctaacctctttctgaatttattaattctagaattgtgttgattgtaatgaacaccagtgttttataataaatagcattagcttagaatatgaatatttgtcatttaacatggaatgaaataaaagaagaattatctgctccatttgagatacactgagtaaattgcagaatggaagagaagtcagaaaaaaaaaactattctagtcatggaaagggaattggttaggtcatatgatgagtcctgagctcattctgggtttcttactataaatagggtattttggaactagagaaagcatagcagaaggaactagaatgacagagggatttggggaatttgctgaaaggttaaagaaactaggtctgtttttctttgaaaggagaggagacatagtgcagcattgaggtgtttgttgccatcctgaaaaacgtagaaggaatgggctgagacaagagtgccccggagctcttgactctagctgcatatgcatcaaaagatggcctagtcggccatcactggaaagagaggcccattggacacgcaaactttatatgccccagtacaggggaacgccagggccataaaaggggagtgggtgggtaggggagagggggtgggtggctatgggggacttttgatatagcattgcaaatgtaaatgagcgaaatccctaataaaaaatggaaaaaaaaaaaaaaagaaaatccaaaagttaaaaaaaaaaaaaaagtaaaaaaaaaaaaaaaaaaaaaaaaaaaagagtgctttacggacgcaagggtagaatgatcctggcaaggaatgaagaccagagaacggccattgcctttcctcagggcctcagcaagtagggttcctgttggcaaagctcctctgctcatagatcaggaaataagggaaagacagagaatgaggaagtatctccttgttgattgaggaaaatttcaaatggccatttataaattcgatggaaaccctaactccagcatatggtgtactttatcagcgttccccaggctcaagagctctgttattgtaacacaccacttttctgcctcatccaaaaatggaacttatttctcttcagttcagcaaataaatgtgaatagtttcagcgtacagtgtgctttctttaagtgactttttcatccacatgaatcctggaatacagtctccttttcacctgataggaaagtattgttagtgtttttatatatgcagtcccagcattgatattctatatgtaaagttcaaagacagtaagactttcgggtaactctggctgactccatcattttatattagggaaacacagagtttattgaattgaccaccactcagtgcttgtctgtatggtactgaatatgtatcgatgctagagacttaaatttacccagggagctctctggaaatgtcagacatgccaggcgttatcaaaggactctagtcttctgtcaaaattcatttcagctttatatgtttttaacaggaaaatccccaaaagacctttgctttgggtggtcttggattgatgtgggtgaccaggaattcaggaagtaggtgggaggaagaggcagctttcccaaatgtctccctgaaaataaatatctggtggtcatgtctgtaactgccttaccccaacacagataatgcatgaccatgaatactcactctcacagagcctgctttcctatgcttctgaataagaatcagcctgaccggcggttcctcagaaaattggacatagtactaccggaggatcccgcaatacctctcctgggcatatatccagaagatgccccaactggtaagaaggacacatgctccactatgttcatagcagccttatttataatagccagaagctggaaagaacccagatgcccctcaacagaggaatggatacagaaaatgtggtacatctacacaatggagtactactcagctattaaaaagaatgaatttatgaaattcctagccaaatggatggacctggagggcatcatcctgagtgaggtaacacattcacaaaggaactcacacaatatgtactcactgataagtggatattagcccaaaacctaggatacccaagatatacaatttcctaaacacatgaaactcaagaaaaatgaagactgaagtgtggacactatgcccctccttataagtgggaacaaaacacccttggaaggagttacagagacaaagtttggagctgagatgaaaggatggtccatgtagagacttccatatccagggatccaccccataatcagcatccaaacgctgacaccattgcatacactagcaagattttatcgaaaggacccagatgtagctgtctcttgtgagactatgccggggcctagcaaacacagaagtggatgctcacagtcagctaatggatggatcacagggctcccaatggaggagctagagaaagtagccaaggagctaaagggatctgcaaccctataggtggaacaacattatgaactaaccagtaccccggagctcttgactctagctacatatgtatcaaaagatggcctagtcggccatcactggaaagagaggcccattggacacgcaaactttatatgccccagtacaggggaacgccagggccaaaaagggggagtgggtgggtaggggattgggggtgggtgggtatgggggacttttggtatagcattggaaatgtaaatgagctaaatacctaataaaaaatggaaaaaaaaaaagaaaaaaaaaaaagaatcagcctgaccaatggaacaggaataaaatattctaggagaaaaaaaaaaaaactagctggtgtgaaactcccagggtcctatgttaatttgttaataaaaaaaactagtactttaaagaaaatgcccacttgttactcagattttttatgagttatgggttctgaatcagctttatctcaccagtcctggatgtgagagaagaatggtgtcttctgaagatgctgaaatcaaggtttaaccaaggctgcaatcccctgtagaaatgactggctaccctgtgaaacctggcttaaaggattgtaggtttagagtgtaggtcccctatggtttctgggtggaaaataaccgaagcttagattgagagaaaggactatgtcctgagtgtcaatccaaaggaatgcagatagatggctcagcttgtaagagcacttagtgtttttccagaggatctgtgtttgattcccagcacccatgactcataaccatttgtaactttagttcccagagatttggttccctcttgtggcttctgctgacactaaacatgtacatgttgcacagtcatacatacaggcaaaacacttatttgagagagaaaaagggagatagaaagggtgaggagtgaaggagagagaggagggaagggagggaggagagggagagagaagggagagggagagaaagagaataagaatgaattaggaaggcagtctcaactaaagactgtctatatcagtgtggctgaggggcatgtctatgcactattgtcttaagttagtttatttgcgaggacccagttcacagtggatgacaccattccctagaaaggaggccttaaaccatatgagtggaaaaactggattaaagaaaaacaggtaaggatacatgcatttatttttctctgctcttggctttggatgtgaatgtgactagctgttagaagtttctgttttgagttcccaaaaccaaccaaggactcaacctggtatcgcaagccaatatcagttccaccaaggaagcaagtcagagaaaaagacagttctctccagtgtttccttagaaacgtctgacacatatgtgctttctgttgtcctaactacctctcttgccccagacaacatggaactgtgaatctttccttcaacatcttgtcttcctctgcttcttactggagggaaaattctggcaggaccaagtagatatttgaagaaatcatttatgaagtgaagaagaatgggggaaaatcatatttgcaaggttggtgaggattatgagagatcaaaagcctcaatcatttacttcttacagccctgttaggaggcataagaatggtggctattatgtattgggcactgatttgtgccaggttttttatttagttctttgtatatgtacttctgcttaaacatctttctaacaaaccatgaatcacatggttagcaactgataggataagaattaaaactccggattttcaattttcataatccataattttgaatggtatgcagcataaaacttttttgccacatcattctcttaatgcatatttgtttgttttgttgaaatttatttatgttgcaacatactatgtatatatactatatatatatactatactgcctcctcccctcctccaaccccatagtgatatataatacaagcttagtataattttactagatgacttagcataaaattgctccttttatctctgggaagacatgtattctaatctcatacagcatagaaatatgttggaatacaaggagagactggaaaaaaggcattgagccccagttgccctacatttccctagaggttaaacaacttcagctctcttcatcctagaaggtagcagatgtatcctagaagaaacctagatagtatattagccaatttctttccaagatgcaggttattcttgaaacccaaaagctgcaaatcaaagatggggtatacactgcaaattagggggcactaatgcgatgagtcagagtcccagaatgggtctaagtttgcaaattactgtggagatgttcccaaagtcttgatagatctatgttaagccataaacaaggacatcatattctccaatattactgtgattcagaatctaaatagtgacctgtactctagaaatgtcaaccaagaaagggaaatatggatagcccagagatctgggtgtgcaaagaaggccgtgaccttagtgtcttgtgatataggtggttgtaaagagcctgaaatttctaaagaatgggaggaattgccagtccctacaccaagcctgcttctgttttgtgctcctataagacacaggatataaatcttgggaaaactgtccaatgttttcttagtgggatgaatggaaaagagttcttgttctcactgctaaagtttgggttgtctaaccttggcaaacaccttttctctttgggcatcttttccaacttacctaacagcactagatctgacacttattgtgggctaaattattcatcttcttccttcttgcaggtttcatatatcaaagttctaatctgtagtgtctcagaatgtgaccaggtatagaacttggctgtaaaagagatttttcatttaagatgaggatgtagtgtggagttttgttcagtatgactgtcttctcataggaagaaagactttctgcttttgaaaccaccccaagaatgttctttattttggcaaatcaacaaactcagagttcaaagagccaaattatctgacttcctatccctgtagaaaaaataaaacaaaaccatcccattctgtagctttagtattgggatgaataatttgattgtagttggtgccttggagctaccacatggggaagctgtgagactttagggaactagggctactgaggtcccacctccagtttgccctgaggtgctagatctgtgagtaaagctgtcctgaatcctccagaccagagcaaccatcagttaccaaagtgatccctggcaatgccaccttaagagatttacctgaattctgaaccaatggatgtttcagatgtaagatggctgtctatgccaactattaacttttggagtctgtttaaataacaacgtaattttactgatttattgggtgcttatagttctttcaatcctgtataggttcattttcaccgttttacttcttcatctgccaagtcagaaagtaagctgctgatggttaagggtttggacatggtgctgagactgtaatctggtaagctagagacaggttgctggttttgcttaagacgagctacttgttatctccgagtctccatttcttcatcagaaaagtatgggtaatcataactgttatgtgaagctttgtgaggatttaatgcgttaattagataccagtttacaaggcagatagtgagtgttcaataaatgggagtcattactgtgcttgtaatataacagcacctgattatggtgatgaaatcaggtcaagctgtctctggctggcagcaatactggctgaggtgtctttaccagataacagctcttgttagacttcaaagagccaaggtctctccagtgggtccttctgagttgtggggttgggtttaaggattcaatatcttttacattcacagttacatttggcaacactaatgtatccaaatacattgcaagcaggaagcaatagaaaaaagcataagatttaatgaattttagaattaatttggttcaaatagctccagacagaaaagtaagtgtaggccgaagatgtagctttgcagttgaacatggatgatgagcctttgccctcagtgacatctctgaaacagaacctgagattttgagtggaaagacaccttctttgtgattggttcttcttgagtactttgtcatgtcagaaatagtgttggaggttagggcatttgtcagtcctgcgggcttagtattattgccctcatttaagagggatagaagggaaaaactgagaagatatgtgtctagtgtcacatagcttgttagtgcctgagccagcactgtcacactccctgcacacatgctctggggtctagtcctggtttggctggtctacatactgtgtcactttgagatcccttcctctaaataaatatttctgatggctctaaggttttatttgtaacattttattccttttgtaaaggatgcccctcaaattgtatatacttcagaccccacataccctgtatccactcctgctttcaatgtaatattcagcagagctcaaaagaatgaattggggagatttttgagaatttatgtttaagtctgaaaaacaacaacaacaacaacaacaacaaaaaatcccataacaaaaacaacagcagcagcagaaactttaacaacaataacaagaacaaatatatcagggacccggaccacgagagcaaatctactagagagctatggaaaagttttgaaagcatctagaaatttaaacatactgctttttctggtacacatttttttaaaaaaacaaaccaaatctagtggacatgcaggctaggaaacatgcatgagattcagaacacccatgtgcctagctaagtgttaggaattatactgccaaggaagccagttatgagggaaaaggaaaggatgggttggctggtttcacc

SEQ ID NO: 7 - DNA, 69 bp, Homo sapiens
ttaaaacaatgtcaaggtgctgttgtcattgctttactggcttaggggatgggggatggggggtatatt

SEQ ID NO: 8 - DNA, 46 bp, Homo sapiens
gtgcgggcccttaccatggatagcaaaaagagaattggctggcgat

SEQ ID NO: 9 - DNA, 46 bp, Homo sapiens
agtgcaatcccatgggttacacaaaagaaggctgcaggggcataga

SEQ ID NO: 10 - DNA, 44 bp, Homo sapiens
catgtccatgagggtccggcgccactctgaccctgcccgccgag

SEQ ID NO: 11 - DNA, 85 bp, Homo sapiens
ggtaaatattatatggtttcaataacatagtagatagaacattgtcaaatctaaacttcagtgaattgtaacagatcccacctga

SEQ ID NO: 12 - DNA, 46 bp, Homo sapiens
gtagtttattaacattttgagatgtaggaaattaatcccggagtac

SEQ ID NO: 13 - DNA, 37 bp, Homo sapiens
tttttttgggaaatttacctctgggttagcaggagag

SEQ ID NO: 14 - DNA, 43 bp, Homo sapiens
agcaaagacggcgacccggggatccctcgcagccctcccccag

SEQ ID NO: 15 - DNA, 4069 bp, Homo sapiens
gttgtgaccacccaggtgtagaataaagaacagtggaattgggagccctgagttctaacataaactttcttcatgacataaggcaagtcttctatggcctttggtttccttacctgtaaaacaggatggctcaatgaaattatctttcttctttgctataatagagtatctctgtgggaagaggaaaaaaaaagtcaatttaaaggctccttatagttccccaactgctgttttattgtgctattcatgcctagacatcacatagctagaaaggcccatcagacccctcaggccactgctgttcctgtcacacattcctgcaaaggaccatgttgctaacttgaaaaaaattactattaattacacttgcagttgttgcttagtaacatttatgattttgtgtttctcgtgacagcatgagcagagatcattaaaaattaaacttacaaagctgctaaagtgggaagaaggagaacttgaagccacaatttttgcacttgcttagaagccatctaatctcaggtttatatgctagatcttgggggaaacactgcatgtctctggtttatattaaaccacatacagcacactactgacactgatttgtgtctggtgcagctggagtttatcaccaagacataaaaaaaccttgaccctgcagaatggcctggaattacaatcagatgggccacatggcatcccggtgaaagaaagccctaaccagttttctgtcttgtttctgctttctccctacagttccaccaggtgagaagagtgatgaccatccttttccttactatggttatttcatactttggttgcatgaaggctgcccccatgaaagaagcaaacatccgaggacaaggtggcttggcctacccaggtgtgcggacccatgggactctggagagcgtgaatgggcccaaggcaggttcaagaggcttgacatcattggctgacactttcgaacacgtgatagaagagctgttggatgaggaccagaaagttcggcccaatgaagaaaacaataaggacgcagacttgtacacgtccagggtgatgctcagtagtcaagtgcctttggagcctcctcttctctttctgctggaggaatacaaaaattacctagatgctgcaaacatgtccatgagggtccggcgccactctgaccctgcccgccgaggggagctgagcgtgtgtgacagtattagtgagtgggtaacggcagcagacaaaaagactgcagtggacatgtcgggcgggacggtcacagtccttgaaaaggtccctgtatcaaaaggccaactgaagcaatacttctacgagaccaagtgcaatcccatgggttacacaaaagaaggctgcaggggcatagacaaaaggcattggaactcccagtgccgaactacccagtcgtacgtgcgggcccttaccatggatagcaaaaagagaattggctggcgattcataaggatagacacttcttgtgtatgtacattgaccattaaaaggggaagatagtggatttatgttgtatagattagattatattgagacaaaaattatctatttgtatatatacataacagggtaaattattcagttaagaaaaaaataattttatgaactgcatgtataaatgaagtttatacagtacagtggttctacaatctatttattggacatgtccatgaccagaagggaaacagtcatttgcgcacaacttaaaaagtctgcattacattccttgataatgttgtggtttgttgccgttgccaagaactgaaaacataaaaagttaaaaaaaataataaattgcatgctgctttaattgtgaattgataataaactgtcctctttcagaaaacagaaaaaaaacacacacacacacaacaaaaatttgaaccaaaacattccgtttacattttagacagtaagtatcttcgttcttgttagtactatatctgttttactgcttttaacttctgatagcgttggaattaaaacaatgtcaaggtgctgttgtcattgctttactggcttaggggatgggggatggggggtatatttttgtttgttttgtgtttttttttcgtttgtttgttttgttttttagttcccacagggagtagagatggggaaagaattcctacaatatatattctggctgataaaagatacatttgtatgttgtgaagatgtttgcaatatcgatcagatgactagaaagtgaataaaaattaaggcaactgaacaaaaaaatgctcacactccacatcccgtgatgcacctcccaggccccgctcattctttgggcgttggtcagagtaagctgcttttgacggaaggacctatgtttgctcagaacacattctttccccccctccccctctggtctcctctttgttttgttttaaggaagaaaaatcagttgcgcgttctgaaatattttaccactgctgtgaacaagtgaacacattgtgtcacatcatgacactcgtataagcatggagaacagtgatttttttttagaacagaaaacaacaaaaaataaccccaaaatgaagattattttttatgaggagtgaacatttgggtaaatcatggctaagcttaaaaaaaactcatggtgaggcttaacaatgtcttgtaagcaaaaggtagagccctgtatcaacccagaaacacctagatcagaacaggaatccacattgccagtgacatgagactgaacagccaaatggaggctatgtggagttggcattgcatttaccggcagtgcgggaggaatttctgagtggccatcccaaggtctaggtggaggtggggcatggtatttgagacattccaaaacgaaggcctctgaaggacccttcagaggtggctctggaatgacatgtgtcaagctgcttggacctcgtgctttaagtgcctacattatctaactgtgctcaagaggttctcgactggaggaccacactcaagccgacttatgcccaccatcccacctctggataattttgcataaaattggattagcctggagcaggttgggagccaaatgtggcatttgtgatcatgagattgatgcaatgagatagaagatgtttgctacctgaacacttattgctttgaaactagacttgaggaaaccagggtttatcttttgagaacttttggtaagggaaaagggaacaggaaaagaaaccccaaactcaggccgaatgatcaaggggacccataggaaatcttgtccagagacaagacttcgggaaggtgtctggacattcagaacaccaagacttgaaggtgccttgctcaatggaagaggccaggacagagctgacaaaattttgctccccagtgaaggccacagcaaccttctgcccatcctgtctgttcatggagagggtccctgcctcacctctgccattttgggttaggagaagtcaagttgggagcctgaaatagtggttcttggaaaaatggatccccagtgaaaactagagctctaagcccattcagcccatttcacacctgaaaatgttagtgatcaccacttggaccagcatccttaagtatcagaaagccccaagcaattgctgcatcttagtagggtgagggataagcaaaagaggatgttcaccataacccaggaatgaagataccatcagcaaagaatttcaatttgttcagtctttcatttagagctagtctttcacagtaccatctgaatacctctttgaaagaaggaagactttacgtagtgtagatttgttttgtgttgtttgaaaatattatctttgtaattatttttaatatgtaaggaatgcttggaatatctgctgtatgtcaactttatgcagcttccttttgagggacaaatttaaaacaaacaaccccccatcacaaacttaaaggattgcaagggccagatctgttaagtggtttcataggagacacatccagcaattgtgtggtcagtggctcttttacccaataagatacatcacagtcacatgcttgatggtttatgttgacctaagatttattttgttaaaatctctct

SEQ ID NO: 16 - DNA, 4046 bp, Homo sapiens
cttgggttggtccataggtatgttttcattttgcttgttcatccattttaattggcttcctagagcatgcttgtagatgtagagccaaatttagagtagagcaaccctctggcaaacaggaagagattaattttgtggtatgcttttaagggacttcccaggaaacttcaaaagcagaaaaagaagcactagctgcctattccaaaatgtgtaaaacaccactcagctttttaaaagtaggataaactcagagcgcgcgcacacgcgcgcgcgcacacacacacacacacacagagagaacatctctagtaaaaagaaaagttgagctttcttagctagatgtgtgtattagccagaaaaagccaaggagtgaagggttttagagaactggaggagataaagtggagtctgcatatgggaggcatttgaaatggacttaaatgtctttttaatgctgactttttcagttttctccttaccagacacattgttttcatgacattagccccaggcatagacacatcattaaaatgaacatgtcaaaaaatgatttctgtttagaaataagcaaaacattttcagttgtgaccacccaggtgtagaataaagaacagtggaattgggagccctgagttctaacataaactttcttcatgacataaggcaagtcttctatggcctttggtttccttacctgtaaaacaggatggctcaatgaaattatctttcttctttgctataatagagtatctctgtgggaagaggaaaaaaaaagtcaatttaaaggctccttatagttccccaactgctgttttattgtgctattcatgcctagacatcacatagctagaaaggcccatcagacccctcaggccactgctgttcctgtcacacattcctgcaaaggaccatgttgctaacttgaaaaaaattactattaattacacttgcagttgttgcttagtaacatttatgattttgtgtttctcgtgacagcatgagcagagatcattaaaaattaaacttacaaagctgctaaagtgggaagaaggagaacttgaagccacaatttttgcacttgcttagaagccatctaatctcaggtttatatgctagatcttgggggaaacactgcatgtctctggtttatattaaaccacatacagcacactactgacactgatttgtgtctggtgcagctggagtttatcaccaagacataaaaaaaccttgaccctgcagaatggcctggaattacaatcagatgggccacatggcatcccggtgaaagaaagccctaaccagttttctgtcttgtttctgctttctccctacagttccaccaggtgagaagagtgatgaccatccttttccttactatggttatttcatactttggttgcatgaaggctgcccccatgaaagaagcaaacatccgaggacaaggtggcttggcctacccaggtgtgcggacccatgggactctggagagcgtgaatgggcccaaggcaggttcaagaggcttgacatcattggctgacactttcgaacacgtgatagaagagctgttggatgaggaccagaaagttcggcccaatgaagaaaacaataaggacgcagacttgtacacgtccagggtgatgctcagtagtcaagtgcctttggagcctcctcttctctttctgctggaggaatacaaaaattacctagatgctgcaaacatgtccatgagggtccggcgccactctgaccctgcccgccgaggggagctgagcgtgtgtgacagtattagtgagtgggtaacggcagcagacaaaaagactgcagtggacatgtcgggcgggacggtcacagtccttgaaaaggtccctgtatcaaaaggccaactgaagcaatacttctacgagaccaagtgcaatcccatgggttacacaaaagaaggctgcaggggcatagacaaaaggcattggaactcccagtgccgaactacccagtcgtacgtgcgggcccttaccatggatagcaaaaagagaattggctggcgattcataaggatagacacttcttgtgtatgtacattgaccattaaaaggggaagatagtggatttatgttgtatagattagattatattgagacaaaaattatctatttgtatatatacataacagggtaaattattcagttaagaaaaaaataattttatgaactgcatgtataaatgaagtttatacagtacagtggttctacaatctatttattggacatgtccatgaccagaagggaaacagtcatttgcgcacaacttaaaaagtctgcattacattccttgataatgttgtggtttgttgccgttgccaagaactgaaaacataaaaagttaaaaaaaataataaattgcatgctgctttaattgtgaattgataataaactgtcctctttcagaaaacagaaaaaaaacacacacacacacaacaaaaatttgaaccaaaacattccgtttacattttagacagtaagtatcttcgttcttgttagtactatatctgttttactgcttttaacttctgatagcgttggaattaaaacaatgtcaaggtgctgttgtcattgctttactggcttaggggatgggggatggggggtatatttttgtttgttttgtgtttttttttcgtttgtttgttttgttttttagttcccacagggagtagagatggggaaagaattcctacaatatatattctggctgataaaagatacatttgtatgttgtgaagatgtttgcaatatcgatcagatgactagaaagtgaataaaaattaaggcaactgaacaaaaaaatgctcacactccacatcccgtgatgcacctcccaggccccgctcattctttgggcgttggtcagagtaagctgcttttgacggaaggacctatgtttgctcagaacacattctttccccccctccccctctggtctcctctttgttttgttttaaggaagaaaaatcagttgcgcgttctgaaatattttaccactgctgtgaacaagtgaacacattgtgtcacatcatgacactcgtataagcatggagaacagtgatttttttttagaacagaaaacaacaaaaaataaccccaaaatgaagattattttttatgaggagtgaacatttgggtaaatcatggctaagcttaaaaaaaactcatggtgaggcttaacaatgtcttgtaagcaaaaggtagagccctgtatcaacccagaaacacctagatcagaacaggaatccacattgccagtgacatgagactgaacagccaaatggaggctatgtggagttggcattgcatttaccggcagtgcgggaggaatttctgagtggccatcccaaggtctaggtggaggtggggcatggtatttgagacattccaaaacgaaggcctctgaaggacccttcagaggtggctctggaatgacatgtgtcaagctgcttggacctcgtgctttaagtgcctacattatctaactgtgctcaagaggttctcgactggaggaccacactcaagccgacttatgcccaccatcccacctctggataattttgcataaaattggattagcctggagcaggttgggagccaaatgtggcatttgtgatcatgagattgatgcaatgagatagaagatgtttgctacctgaacacttattgctttgaaactagacttgaggaaaccagggtttatcttttgagaacttttggtaagggaaaagggaacaggaaaagaaaccccaaactcaggccgaatgatcaaggggacccataggaaatcttgtccagagacaagacttcgggaaggtgtctggacattcagaacaccaagacttgaaggtgccttgctcaatggaagaggccaggacagagctgacaaaattttgctccccagtgaaggccacagcaaccttctgcccatcctgtctgttcatggagagggtccctgcctcacctctgccattttgggttaggagaagtcaagttgggagcctg

SEQ ID NO: 17 - DNA, 4046 bp, Homo sapiens
ggtcagggctggggatgctactctttgctgctgagaaacacaatgcttcaggtaagtgattctgaagtccttcaccacctgacggtaaccttgggttggtccataggtatgttttcattttgcttgttcatccattttaattggcttcctagagcatgcttgtagatgtagagccaaatttagagtagagcaaccctctggcaaacaggaagagattaattttgtggtatgcttttaagggacttcccaggaaacttcaaaagcagaaaaagaagcactagctgcctattccaaaatgtgtaaaacaccactcagctttttaaaagtaggataaactcagagcgcgcgcacacgcgcgcgcgcacacacacacacacacacagagagaacatctctagtaaaaagaaaagttgagctttcttagctagatgtgtgtattagccagaaaaagccaaggagtgaagggttttagagaactggaggagataaagtggagtctgcatatgggaggcatttgaaatggacttaaatgtctttttaatgctgactttttcagttttctccttaccagacacattgttttcatgacattagccccaggcatagacacatcattaaaatgaacatgtcaaaaaatgatttctgtttagaaataagcaaaacattttcagttgtgaccacccaggtgtagaataaagaacagtggaattgggagccctgagttctaacataaactttcttcatgacataaggcaagtcttctatggcctttggtttccttacctgtaaaacaggatggctcaatgaaattatctttcttctttgctataatagagtatctctgtgggaagaggaaaaaaaaagtcaatttaaaggctccttatagttccccaactgctgttttattgtgctattcatgcctagacatcacatagctagaaaggcccatcagacccctcaggccactgctgttcctgtcacacattcctgcaaaggaccatgttgctaacttgaaaaaaattactattaattacacttgcagttgttgcttagtaacatttatgattttgtgtttctcgtgacagcatgagcagagatcattaaaaattaaacttacaaagctgctaaagtgggaagaaggagaacttgaagccacaatttttgcacttgcttagaagccatctaatctcaggtttatatgctagatcttgggggaaacactgcatgtctctggtttatattaaaccacatacagcacactactgacactgatttgtgtctggtgcagctggagtttatcaccaagacataaaaaaaccttgaccctgcagaatggcctggaattacaatcagatgggccacatggcatcccggtgaaagaaagccctaaccagttttctgtcttgtttctgctttctccctacagttccaccaggtgagaagagtgatgaccatccttttccttactatggttatttcatactttggttgcatgaaggctgcccccatgaaagaagcaaacatccgaggacaaggtggcttggcctacccaggtgtgcggacccatgggactctggagagcgtgaatgggcccaaggcaggttcaagaggcttgacatcattggctgacactttcgaacacgtgatagaagagctgttggatgaggaccagaaagttcggcccaatgaagaaaacaataaggacgcagacttgtacacgtccagggtgatgctcagtagtcaagtgcctttggagcctcctcttctctttctgctggaggaatacaaaaattacctagatgctgcaaacatgtccatgagggtccggcgccactctgaccctgcccgccgaggggagctgagcgtgtgtgacagtattagtgagtgggtaacggcagcagacaaaaagactgcagtggacatgtcgggcgggacggtcacagtccttgaaaaggtccctgtatcaaaaggccaactgaagcaatacttctacgagaccaagtgcaatcccatgggttacacaaaagaaggctgcaggggcatagacaaaaggcattggaactcccagtgccgaactacccagtcgtacgtgcgggcccttaccatggatagcaaaaagagaattggctggcgattcataaggatagacacttcttgtgtatgtacattgaccattaaaaggggaagatagtggatttatgttgtatagattagattatattgagacaaaaattatctatttgtatatatacataacagggtaaattattcagttaagaaaaaaataattttatgaactgcatgtataaatgaagtttatacagtacagtggttctacaatctatttattggacatgtccatgaccagaagggaaacagtcatttgcgcacaacttaaaaagtctgcattacattccttgataatgttgtggtttgttgccgttgccaagaactgaaaacataaaaagttaaaaaaaataataaattgcatgctgctttaattgtgaattgataataaactgtcctctttcagaaaacagaaaaaaaacacacacacacacaacaaaaatttgaaccaaaacattccgtttacattttagacagtaagtatcttcgttcttgttagtactatatctgttttactgcttttaacttctgatagcgttggaattaaaacaatgtcaaggtgctgttgtcattgctttactggcttaggggatgggggatggggggtatatttttgtttgttttgtgtttttttttcgtttgtttgttttgttttttagttcccacagggagtagagatggggaaagaattcctacaatatatattctggctgataaaagatacatttgtatgttgtgaagatgtttgcaatatcgatcagatgactagaaagtgaataaaaattaaggcaactgaacaaaaaaatgctcacactccacatcccgtgatgcacctcccaggccccgctcattctttgggcgttggtcagagtaagctgcttttgacggaaggacctatgtttgctcagaacacattctttccccccctccccctctggtctcctctttgttttgttttaaggaagaaaaatcagttgcgcgttctgaaatattttaccactgctgtgaacaagtgaacacattgtgtcacatcatgacactcgtataagcatggagaacagtgatttttttttagaacagaaaacaacaaaaaataaccccaaaatgaagattattttttatgaggagtgaacatttgggtaaatcatggctaagcttaaaaaaaactcatggtgaggcttaacaatgtcttgtaagcaaaaggtagagccctgtatcaacccagaaacacctagatcagaacaggaatccacattgccagtgacatgagactgaacagccaaatggaggctatgtggagttggcattgcatttaccggcagtgcgggaggaatttctgagtggccatcccaaggtctaggtggaggtggggcatggtatttgagacattccaaaacgaaggcctctgaaggacccttcagaggtggctctggaatgacatgtgtcaagctgcttggacctcgtgctttaagtgcctacattatctaactgtgctcaagaggttctcgactggaggaccacactcaagccgacttatgcccaccatcccacctctggataattttgcataaaattggattagcctggagcaggttgggagccaaatgtggcatttgtgatcatgagattgatgcaatgagatagaagatgtttgctacctgaacacttattgctttgaaactagacttgaggaaaccagggtttatcttttgagaacttttggtaagggaaaagggaacaggaaaagaaaccccaaactcaggccgaatgatcaaggggacccataggaaatcttgtccagagacaagacttcgggaaggtgtctggacattcagaacaccaagacttgaaggtgccttgctcaatggaagaggccaggacagagctgacaaaattttgctccccagtgaaggccacag

SEQ ID NO: 18 - DNA, 4044 bp, Homo sapiens
ataccagagttttcagccatttctgcattctgacctattgactggaggtaggttgcctttgaattcagtaaaacttcatgggcagaaacacagttccttttcctacttatttggatatcatgatggccattgcatgtatgtgtctttttgtaagtccatgcctcagaactgagaagtaggaataaaattagggtcagggctggggatgctactctttgctgctgagaaacacaatgcttcaggtaagtgattctgaagtccttcaccacctgacggtaaccttgggttggtccataggtatgttttcattttgcttgttcatccattttaattggcttcctagagcatgcttgtagatgtagagccaaatttagagtagagcaaccctctggcaaacaggaagagattaattttgtggtatgcttttaagggacttcccaggaaacttcaaaagcagaaaaagaagcactagctgcctattccaaaatgtgtaaaacaccactcagctttttaaaagtaggataaactcagagcgcgcgcacacgcgcgcgcgcacacacacacacacacacagagagaacatctctagtaaaaagaaaagttgagctttcttagctagatgtgtgtattagccagaaaaagccaaggagtgaagggttttagagaactggaggagataaagtggagtctgcatatgggaggcatttgaaatggacttaaatgtctttttaatgctgactttttcagttttctccttaccagacacattgttttcatgacattagccccaggcatagacacatcattaaaatgaacatgtcaaaaaatgatttctgtttagaaataagcaaaacattttcagttgtgaccacccaggtgtagaataaagaacagtggaattgggagccctgagttctaacataaactttcttcatgacataaggcaagtcttctatggcctttggtttccttacctgtaaaacaggatggctcaatgaaattatctttcttctttgctataatagagtatctctgtgggaagaggaaaaaaaaagtcaatttaaaggctccttatagttccccaactgctgttttattgtgctattcatgcctagacatcacatagctagaaaggcccatcagacccctcaggccactgctgttcctgtcacacattcctgcaaaggaccatgttgctaacttgaaaaaaattactattaattacacttgcagttgttgcttagtaacatttatgattttgtgtttctcgtgacagcatgagcagagatcattaaaaattaaacttacaaagctgctaaagtgggaagaaggagaacttgaagccacaatttttgcacttgcttagaagccatctaatctcaggtttatatgctagatcttgggggaaacactgcatgtctctggtttatattaaaccacatacagcacactactgacactgatttgtgtctggtgcagctggagtttatcaccaagacataaaaaaaccttgaccctgcagaatggcctggaattacaatcagatgggccacatggcatcccggtgaaagaaagccctaaccagttttctgtcttgtttctgctttctccctacagttccaccaggtgagaagagtgatgaccatccttttccttactatggttatttcatactttggttgcatgaaggctgcccccatgaaagaagcaaacatccgaggacaaggtggcttggcctacccaggtgtgcggacccatgggactctggagagcgtgaatgggcccaaggcaggttcaagaggcttgacatcattggctgacactttcgaacacgtgatagaagagctgttggatgaggaccagaaagttcggcccaatgaagaaaacaataaggacgcagacttgtacacgtccagggtgatgctcagtagtcaagtgcctttggagcctcctcttctctttctgctggaggaatacaaaaattacctagatgctgcaaacatgtccatgagggtccggcgccactctgaccctgcccgccgaggggagctgagcgtgtgtgacagtattagtgagtgggtaacggcagcagacaaaaagactgcagtggacatgtcgggcgggacggtcacagtccttgaaaaggtccctgtatcaaaaggccaactgaagcaatacttctacgagaccaagtgcaatcccatgggttacacaaaagaaggctgcaggggcatagacaaaaggcattggaactcccagtgccgaactacccagtcgtacgtgcgggcccttaccatggatagcaaaaagagaattggctggcgattcataaggatagacacttcttgtgtatgtacattgaccattaaaaggggaagatagtggatttatgttgtatagattagattatattgagacaaaaattatctatttgtatatatacataacagggtaaattattcagttaagaaaaaaataattttatgaactgcatgtataaatgaagtttatacagtacagtggttctacaatctatttattggacatgtccatgaccagaagggaaacagtcatttgcgcacaacttaaaaagtctgcattacattccttgataatgttgtggtttgttgccgttgccaagaactgaaaacataaaaagttaaaaaaaataataaattgcatgctgctttaattgtgaattgataataaactgtcctctttcagaaaacagaaaaaaaacacacacacacacaacaaaaatttgaaccaaaacattccgtttacattttagacagtaagtatcttcgttcttgttagtactatatctgttttactgcttttaacttctgatagcgttggaattaaaacaatgtcaaggtgctgttgtcattgctttactggcttaggggatgggggatggggggtatatttttgtttgttttgtgtttttttttcgtttgtttgttttgttttttagttcccacagggagtagagatggggaaagaattcctacaatatatattctggctgataaaagatacatttgtatgttgtgaagatgtttgcaatatcgatcagatgactagaaagtgaataaaaattaaggcaactgaacaaaaaaatgctcacactccacatcccgtgatgcacctcccaggccccgctcattctttgggcgttggtcagagtaagctgcttttgacggaaggacctatgtttgctcagaacacattctttccccccctccccctctggtctcctctttgttttgttttaaggaagaaaaatcagttgcgcgttctgaaatattttaccactgctgtgaacaagtgaacacattgtgtcacatcatgacactcgtataagcatggagaacagtgatttttttttagaacagaaaacaacaaaaaataaccccaaaatgaagattattttttatgaggagtgaacatttgggtaaatcatggctaagcttaaaaaaaactcatggtgaggcttaacaatgtcttgtaagcaaaaggtagagccctgtatcaacccagaaacacctagatcagaacaggaatccacattgccagtgacatgagactgaacagccaaatggaggctatgtggagttggcattgcatttaccggcagtgcgggaggaatttctgagtggccatcccaaggtctaggtggaggtggggcatggtatttgagacattccaaaacgaaggcctctgaaggacccttcagaggtggctctggaatgacatgtgtcaagctgcttggacctcgtgctttaagtgcctacattatctaactgtgctcaagaggttctcgactggaggaccacactcaagccgacttatgcccaccatcccacctctggataattttgcataaaattggattagcctggagcaggttgggagccaaatgtggcatttgtgatcatgagattgatgcaatgagatagaagatgtttgctacctgaacacttattgctttgaaactagacttgaggaaaccagggtttatcttttgagaacttttggtaa

SEQ ID NO: 19 - DNA, 4085 bp, Homo sapiens
attttatttctccttcacttatgaagcttagtttggctggatatgaaattctgggttgaaaattcttttctttaagaatgttgaatattggcccccactctcttctggcttgtagagtttctgccgaaagatgctgttagtctgatggacttccctttgtgggtaacctgccctttctctctcgctgcacttaatgttttttccttcatttcaactttggtgaatctgacaattatgtgtctttgagttactcttcttgaggagtatctttgcggcattctctgtatttcctgaatttgaatgctggcctgcctcactagattggggaagttctcctggataatatcctgcagagcgttttccaacttggttccattctccccatcactttcaggtacaccaatcagatgtagatttggtcttttcacatagtcccatatttcttggaggctttgttcatttctttttactcttttttctctaaacttctcttcttgcttcatttcattcatttgatcttcaatccctttcttccacttgattgaatcagctactgaagcttgtgcatgtgtcacatagttctcgtgccatggttttcagctccatcaggtcatttaaggtcttctctatgctgttttttctagttagccattcgtctaatgttttttcaaggtttttagcttctttgctaaaaggttcaaacatcctcctttagctcggaggagtttgttattactgatcatctgaagccttcttctctcaacttgtgaaagtcattctctgtccagctttgttccattgctggcgaggagctgcattcctttggaggagaagacgtgctctgatttttagaattttcagcttctctgctctggtttctccccatcttattggttttatctacctttggtctttgatgatggtgacgtacagatggggttttggtgtggatgttctttctctttgttagttttccttctaacagtcaggaccctcagctgcaggtctgttggagtttgctggaggtccactccagaccctgtttgcttgggtatcaccagcagaggctgcagaacagcaaatattgcagaacggcaaatgttgctccctgattgttcctctggaagcttcgtctcagaggggcacctggccgtatgaggtgtcagtcggcccctactgggaggtgcctcccagttaggctactcaggggtcaggaacccacttgaagaggcagactgtccattctcagatatcatattccatgctgggaggacccctactcttttcaaagctgtcagacagggacatttaagtctgcagaagtttctgctgtcttttgttcagctgtgccctgcccctagaggtggagtctacagaggcaggcaggcctccttgagctgcggtgggctccacccatttcgagcttcctggctgctttgtttacctactcaagtctcagcaatggtggacacccctcccccagcctcgctgctgctttgcagttcgatctcagactgctgtgctagcagtgagccaggctccgtgggcatgggaccctccgagccaggcctgggacataatctcctggtgtgccgtttgctaagaccattggaaaagcacagtattagggtggggagtgtcctgattttccaggtaccgtcagtcatggcttcccttggctaggaaagggaattccccaaccccttgtgcttcctgggtgaggtgatgccccaccctgctttggctcatgctccgtgggttgtacccactgtctgacaagccccagtgagatgaacccggtacctcagttggaaatgcagaaatcacccgtcttctgcatcactcacgctgggggctgtagactggagctgttcatatttggccatcttggaacctccctttccaagttctttattacagagtgggtcactgaaacttcatggaacaaattggaaattatcttcttaattaatgtcactgtctaccatgtatgggaatttggtaaatattatatggtttcaataacatagtagatagaacattgtcaaatctaaacttcagtgaattgtaacagatcccacctgaaattctaaagaaaacagaattctaattgaagaggttaaacttttacagggaatgtcaactgccatttgggtcctgtaaacaaaaaactgttttttaaaaaagtaaactttaaaagtattttcagatgacctcatttgctatccaagtggcttgagtatgcttgatgctaagacttctttgttacagactggagatgtgtgctactggggcagtgttgctctgtgacaaggaggcagaggatgagggcaaggttcgatgtgactgtgaattctgggtggctctggctatcgggagccttcattgattacagcaaaacagttgctttcctagggcaatagtgtctctgtcacccaggctggagttcagtggcatgatcaatcgctcactgtagcctcaacttcttagactcaagtaatcctcccacctcagcctcccaagtagctgaaactacaggtgtgcaccaccacacctaatttttttaatttttaagtttttgtagagacatggtctcactgtgttgcccaggttgatctcgaattcctgggctctagtgatcctcccgcctcggcctcccaaagtgttgggattacaaatgtgagccactgcacctggccctttgcaaccttcttgacaatgcattcctttattccctaactggaagtaacttctttctctttataaaattgtatctgtaccttttctgggtcatttctacctttatattctagttacgtatgtcctacctccctcctagggagggaggtaagtaagactggaaagtagacttcatgtgtgatgaatgaatgaacaaaaggaagtctaacatatggatatagtcaactggatgcaaattaaaaatttttaaatattgatttgcaagatttcattaaggtcaactcttaatagtttgtatcatatatgttaggaaccaaatattaataacttcttcagcattaccattatctttataggactgtctaaaatgagcagccatatctttaaactgtgttttctctgattacacgctcacaggtaaaacccaaaggggctgggaacaaacaagacttttttttttttctgtatgcctgaattatctgtactgttgcttgttttcccacctttggccatagaaacttagttctaacatgctacaatttttgcagttctttctcttagaaaaagaccacattgtctgaaatttcatccatttaagtaatcaagccttaaagttgaaggatcttggtcatgattaatctagacctacaaagtagtatcttaatggcactccttttagaaagttaggttccaggacacacatagctgcagtgtccacattttgtaagctccttcgttgtcacagccactctcttctctgtggctgatattctaaaactggcaacacatcctgatggtaaaagcttggttcaggagacaggtgacctactagctttatggcatttgacaggttacctaacctctctgacgcataattgcctcatctatataatggggataataatacccatcctgtctccttgtaaaaatcaaattagatgacgcctgtgaatgttctatagtctcttagacaaatgtaagttatgactacagcaagagtaaaagagcatgttgttatggacattctttcagtgaaatgtctaagacttgtgagtcacacttaaagctaaacttgatatctacttcattgattttctttttagttctatgtactatattgaatttcctgacagtggggctatgaaagccttcctagcattttatagatgtggttgaattaatggctgtaagccttaaagcagaattagacagcatcaatgaatttattaagtataaataaatatataatctgcttagcaatattacacagcctctttatcttatgtgtgataaagagtcatccgaaggttgaaaatgaagaattgtcctggaagctcttacttaatcttttattatttcctaatacagtatataaaattactcat

SEQ ID NO: 20 - DNA, 4046 bp, Homo sapiens
cggtggggcgtgcgactcgtcgtcggtggattttgactcctcgttcttgtttggcttctatgcaagttttcctcgcgctgggggagctttgataagcctcgattggcggtgtgttagggcttcttggatcttattttagggtcctctagttatcctgcacttactccttaatgtcagtagcaaccaaagaacattttccgacaagcacgcaggaatgttcttggccagaagcaaagaaaggcatatttctgagtgtttattaatcctcctagtaatcttttaaagcaaagtaatatgtaattgggaacgttgattttctaactgcatataaaaggcgacatgatattaaatgagacccctccctactgactcaatatcctgcaaaatctctctctcccctttattattatggaaaaatctatttttatatgagtttgttgtaaggtcaaaagccattttggtcttacaatttgatatgtctttacattttaacttattgaggcataattacagatttaatttgtatgaacgtgtgtgccttcaatgcttatctcatgcaacataatttttaggttggagatttctgatgttatggcatgtagcgtttcaaggcattacacataataggtaacatagcatgttgaaattacaccacaaagttttgaccctgggaacagcaccttttaaaaacaatcactaaactcctgttcctgttttctgattttgcaaatgccttgcttaagacttttttttttttttttttttttttttttttgggaaatttacctctgggttagcaggagaggtaaaaaaaaggaaagagacacttgttgaaatgtaaccataacctttactggaatttaaaacatgttggtcaccattactggaattccagggccataaagtcgttgtcttttttttcttctacttcattttgtaaaatgtgataaatgttggtaaatatagaccagtagtaagtattatgacactaaaagcattatgtatgtggaactattttaagttattacagaacattttctatttataaatgatataagcagaaagaaatgatttccagataaacaaggcttacgtacatgttttgaagcattagaacattgcagacactcttagacatcacattttttaaagcaaaataacagtaatttttcacatacctttggagcctttcatagcccattcagagctgagttagtagctggaagtttcctttattttaaggtgatattttaaaaccatttaacatgtatagtaggtcaacattggtgcatccagaaaatgaagcatttaggaaatctgtttcagtgtcttttcaatgtgtgtaacttttacttgcaaaccaatggaaccaagaaagtcatcatttgcctaaaatgcagtcatcacctcaaatgattcatttatactatgtgagttaattgccttcatctcattaatggccaaggagggaagggaggtcctggggtatttcttgttcattttgactcaccaggagggaaaatcctgtaaaaaaagaaatgcaaatttctaaaatcctggctcaaagtccgtgggtttcctgtttaaaaggggcgccatgaaaatgtaagctattccctttttcctggaatctttaagagtcccagcttttcaatagtcaaaatgtagatgattgatatcatttcttatatgaatagcactggtttgtagttcagcacgcacagtgagctgggcacgcccacctgatagtatagcagagaacttgtttacattctttttacattcatcttctaaaacctggggtgctctctctctctctctctctctctctctctctgtgtgtgtgtgtgtgtgtgtgcgtgcacgtgcgcgtgtgtgtagagggggagagagagagagagagaactgtgaactgtgaaatataacacagccagcagctttgggtctcaatcgtagacttactcttaaggaaatttacagaatggaaaggtcatgttcaagtagtttattaacattttgagatgtaggaaattaatcccggagtacagaagaacaatttcagacttcctgaataaaaacagacagcatagagagtggatgatagctaaactctgaatatcttttgagaagaaaggcactcccatttcaggtgcccataatatggatttgattttagtgattaaaacattaattttcaacttgcatctccctgtgtggaagagttcaatttgtgtgaggggtctcgcctatccaacaaaagtgaatatgtcccttttatagggtaattgctaacttgtctcaacttgttttcaaacaattgttatagagcactcagtttccactaattgcaaaattgttgcttaattgaaggactctcagccatctagtgcagccattcagccactggcaggctctgtgatctcaaactgtgaattgcattttaaagaggaatcgaggagagaattctgtggaattctaggttttaagtgctggctgttgttcaatggaagaggaaatcatttgaacaagaatcgcatcaagttgtgttgtgataaattttctttattaggatgaataacatgcacagatgagcttcaaaagtgaatgagcaaacttactggttacactctgcatccatttactctgtttagtatggagtaatgttaggcaataaatgatgctggcaaatgaaatccgtatgttatttgcatgtggtatttaaacctaggaaacatagagtggctttggtatttgtaggcttagtcatgtgtgtcctaaacgtcctcttaaacttctacttaaggcatagaattatttaatcctaaataattttatacttaagtgcctcactggatttccagaatatttacactgtaaagatttagaaaggtcatgaacccaattattgactatatggaatcattattgatggcagatgcaaaatggagctcactaatgtactgacattgaaaaccttttgcaggggagaggagggggagtggtaaatgtgtgtgttctttaagtggaacaggaaggtattctcttttctgtagaaaaatttgagtatctggtcagataagtgtggaagctttcatttaaattaagtatttaagttcaagtagaagctctagggcacttatcctcttgatgagacaaatcttatcaaatatactagatgctaagaagtggctcattgccctgatgtctcatttatagattgatgtttgaggatgggttgcattaagtgagttagggggctgagtgtgggacaggagaacgattggaaggaagcaaagtaaatttacaagctttagtgacagccataataaagtaaaagtttatttccagagagcctagagagtaaggaacgttatatagttttccccaaaggttcacttgaaagaacttttcattggttgtcatggtagtaatgtcctgattttgaaatctcccagaacctagtagctcttaaacatgctttcatcttggttcctttggtctgacggaaactttatgacgaccctctgtgtttttgacatgcctctgcatttttggagagaggaggtcaggcaagggaggatttcttaaaactaagacagtatagtaaggaaacataaaattatatgataaaaaatcactgaacttcaaattgacttactgaaataaaacctagaaggcaacctgtcgtttaattacaactagcttgtataaaattaaaatttataaaatgggaattcaaagaaaataaacgggcagttccaagtaatttaagcaactcaccaaaaattgaagtaatagtgccacctagagaacaaaatcaccagctttactagccaaatggcttatttccatatgaaccatttttccaacgctacagttactaggatttccttgttaccatattcagatcttgtgagtgtgtatgggggtgggggttgcatgtggaattacagatgaaattttaaaacaagcagatccacaatttgatatatgcactaaatccttttaacgttgtaatgtagccaaatgtagaatagcatgccagg

SEQ ID NO: 21 - DNA, 4037 bp, Homo sapiens
ctggagccagaatcggaaccacgatgtgactccgccgccggggacccgtgaggtttgtgtggaccccgaggtaggcaagcgctgggaatggggcttggtgcaggagctgcccgtccgcgggagagagttgactgggggatcccccaccccaaagttgtgggacgaggccagtctccttctttcctcccctccggtagaagggacgatttggagttactcttggggagttttctcccccatcccacaacccagaaggtcagccggcaccaccagggaaaaagggacccggggaagtcacgaagtagaggagggaaggcctggaggagacccagagctgcgtgatgggagcaaagacggcgacccggggatccctcgcagccctcccccagcccaggagtagtcgagagagacttagggggccagagctgtcgagggtcctgactgaggggagggtgctggggctaggctaggaatccttccagggggtgggtggtccccgcgccgacttgcggggggagtgggagggaagcttgcgccttcagcccgcatcccttccccggagctgcacacggctacctgctccccaggaattgagactgaagtggacttacaagtccgaagccaatgtagcttggaaaacttgggaggcggaattcctaccgctgggaactgaaagggtctgcgacactctcgggcaggccgaacccacatctctacccatcctgcgcccctcttctgaagcgccctccagggaagttaagagttttgactttcggggagtggttgggatgtacgtgggggattcttgactcgggttagtctctggggatgcagagccgggaagaggaatgggtgagtgagttactcctggaaagaaatagctgaggattgggggctctgtgcctgacgggcaagaagaaggggagattacagactaggggcatccctaaggaagaagcctcggggctgcgagggtgaactggaggatgcagtgtttgtgtgttgggggtagagcggggatgagggaccggggtggaggggaggcgaggaggaggaggggacccagagaacgaagctagggaaggtagagggtgccctctgccggccatgctgccaagagcagctactgggggcgggaggctgggggtggggaagtggtaaaggaaggttttgcgggatcccttagagagctggtaggagggacttgttgaatggtgctgctgactccagctcggtggggcgtgcgactcgtcgtcggtggattttgactcctcgttcttgtttggcttctatgcaagttttcctcgcgctgggggagctttgataagcctcgattggcggtgtgttagggcttcttggatcttattttagggtcctctagttatcctgcacttactccttaatgtcagtagcaaccaaagaacattttccgacaagcacgcaggaatgttcttggccagaagcaaagaaaggcatatttctgagtgtttattaatcctcctagtaatcttttaaagcaaagtaatatgtaattgggaacgttgattttctaactgcatataaaaggcgacatgatattaaatgagacccctccctactgactcaatatcctgcaaaatctctctctcccctttattattatggaaaaatctatttttatatgagtttgttgtaaggtcaaaagccattttggtcttacaatttgatatgtctttacattttaacttattgaggcataattacagatttaatttgtatgaacgtgtgtgccttcaatgcttatctcatgcaacataatttttaggttggagatttctgatgttatggcatgtagcgtttcaaggcattacacataataggtaacatagcatgttgaaattacaccacaaagttttgaccctgggaacagcaccttttaaaaacaatcactaaactcctgttcctgttttctgattttgcaaatgccttgcttaagacttttttttttttttttttttttttttttttgggaaatttacctctgggttagcaggagaggtaaaaaaaaggaaagagacacttgttgaaatgtaaccataacctttactggaatttaaaacatgttggtcaccattactggaattccagggccataaagtcgttgtcttttttttcttctacttcattttgtaaaatgtgataaatgttggtaaatatagaccagtagtaagtattatgacactaaaagcattatgtatgtggaactattttaagttattacagaacattttctatttataaatgatataagcagaaagaaatgatttccagataaacaaggcttacgtacatgttttgaagcattagaacattgcagacactcttagacatcacattttttaaagcaaaataacagtaatttttcacatacctttggagcctttcatagcccattcagagctgagttagtagctggaagtttcctttattttaaggtgatattttaaaaccatttaacatgtatagtaggtcaacattggtgcatccagaaaatgaagcatttaggaaatctgtttcagtgtcttttcaatgtgtgtaacttttacttgcaaaccaatggaaccaagaaagtcatcatttgcctaaaatgcagtcatcacctcaaatgattcatttatactatgtgagttaattgccttcatctcattaatggccaaggagggaagggaggtcctggggtatttcttgttcattttgactcaccaggagggaaaatcctgtaaaaaaagaaatgcaaatttctaaaatcctggctcaaagtccgtgggtttcctgtttaaaaggggcgccatgaaaatgtaagctattccctttttcctggaatctttaagagtcccagcttttcaatagtcaaaatgtagatgattgatatcatttcttatatgaatagcactggtttgtagttcagcacgcacagtgagctgggcacgcccacctgatagtatagcagagaacttgtttacattctttttacattcatcttctaaaacctggggtgctctctctctctctctctctctctctctctctgtgtgtgtgtgtgtgtgtgtgcgtgcacgtgcgcgtgtgtgtagagggggagagagagagagagagaactgtgaactgtgaaatataacacagccagcagctttgggtctcaatcgtagacttactcttaaggaaatttacagaatggaaaggtcatgttcaagtagtttattaacattttgagatgtaggaaattaatcccggagtacagaagaacaatttcagacttcctgaataaaaacagacagcatagagagtggatgatagctaaactctgaatatcttttgagaagaaaggcactcccatttcaggtgcccataatatggatttgattttagtgattaaaacattaattttcaacttgcatctccctgtgtggaagagttcaatttgtgtgaggggtctcgcctatccaacaaaagtgaatatgtcccttttatagggtaattgctaacttgtctcaacttgttttcaaacaattgttatagagcactcagtttccactaattgcaaaattgttgcttaattgaaggactctcagccatctagtgcagccattcagccactggcaggctctgtgatctcaaactgtgaattgcattttaaagaggaatcgaggagagaattctgtggaattctaggttttaagtgctggctgttgttcaatggaagaggaaatcatttgaacaagaatcgcatcaagttgtgttgtgataaattttctttattaggatgaataacatgcacagatgagcttcaaaagtgaatgagcaaacttactggttacactctgcatccatttactctgtttagtatggagtaatgttaggcaataaatgatgctggcaaatgaaatccgtatgttatttgcatgtggtatttaaacctaggaaacatagagtggctttggtatttgtaggcttagtcatgtgtgtcctaaacgtcctcttaaacttctacttaaggc

SEQ ID NO: 22 - DNA, 4043 bp, Homo sapiens
ttatttatcttggctgccctggttcgttattaaaagggttagcttatacgtgtgtttgctggggctggaagtgaaaacatctgcaaaagcatgcaatgccctggaacggaactcttctaataaaagatgtatcattttaaatgcgctgaattttgattctggtaattcgtgcactagagtgtctatttcgaggcagcggaggtatcatatgacagcgcacgtcaaggcaccgtggagccctctcgtggactcccacccactttcccattcaccgcggagagggctgctctcgctgccgctccccccggcgaactagcatgaaatctccctgcctctgccgagatcaaatggagcttctcgctgatggggtgcgagtattacctccgccatgcaatttccactatcaataatttaacttctttgctgcagaacagaaggagtacataccgggcaccaaagactcgcgccccctcccccctttaattaagcgaagggaacgtgaaaaaataatagagtgtgggagttttggggccgaagtctttcccggagcagctgccttgatggttactttgacaagtagtgactgaaaaggtgggtttgttttctttctttctctttccgtttttctgtttggtcggctagaaagcgtgtggctttagcgaggtctgtcattgcctgggcttcctggctggaacaagtaacttggtgtaacgttatctgggggcgttcatcaataaaaaatgctgttattatcttgattgaattcctattaggcaaactctagagaggtcagtgcgcgaactctgtttaagccggcgtgtttaaggcagcagagtaaaccaatagcccccatgctctgtgcgatttcattgtgtgctcgcgttcgcaagctccgtagtgcaggaaggtgcgggaaggtgtgtctgtggcccgggaaacgcacgccctctcccagagaacttgggtgctgggatggggaggaaggggagagttgaaagctaggggagcgagacctcggggcgtgcgattctcactcgctccctcccgccccagcgcccacagccggggtttctgcagagggcgcgggacgcggggttccccggggctgaggctggggctggaacacccctcgaagccgcgggcgtcctgtccaaggcgccccaggagggcgcaggactcgcagggcgatgtcgcggggccctaggggaggaggtgaggacaggccccgggggagcggggagttccgggcgcccctcggttccccgcgcgaggaaaagacgcggcgttccctttaagcggccgcctcgaacgggtatcggtagcgcgggcgagcggggagcggggggcggggggcgggggggggggggcggcgccgtttgaccaatcgaagctcaaccgaagagctaaataatgtctgacccgggcgcaaggcgcagcctggagctccgggtccccgacgctgccgccgccgcgcccgggcgcacccgcccgctcgctgtcccgcgcaccccgtagcgcctcgggctcccgggccggacagaggagccagcccggtgcgcccctccacctcctgctcggggggctttaatgagacacccaccgctgctgtggggccggcggggagcagcaccgcgacggggaccggggctgggcgctggagccagaatcggaaccacgatgtgactccgccgccggggacccgtgaggtttgtgtggaccccgaggtaggcaagcgctgggaatggggcttggtgcaggagctgcccgtccgcgggagagagttgactgggggatcccccaccccaaagttgtgggacgaggccagtctccttctttcctcccctccggtagaagggacgatttggagttactcttggggagttttctcccccatcccacaacccagaaggtcagccggcaccaccagggaaaaagggacccggggaagtcacgaagtagaggagggaaggcctggaggagacccagagctgcgtgatgggagcaaagacggcgacccggggatccctcgcagccctcccccagcccaggagtagtcgagagagacttagggggccagagctgtcgagggtcctgactgaggggagggtgctggggctaggctaggaatccttccagggggtgggtggtccccgcgccgacttgcggggggagtgggagggaagcttgcgccttcagcccgcatcccttccccggagctgcacacggctacctgctccccaggaattgagactgaagtggacttacaagtccgaagccaatgtagcttggaaaacttgggaggcggaattcctaccgctgggaactgaaagggtctgcgacactctcgggcaggccgaacccacatctctacccatcctgcgcccctcttctgaagcgccctccagggaagttaagagttttgactttcggggagtggttgggatgtacgtgggggattcttgactcgggttagtctctggggatgcagagccgggaagaggaatgggtgagtgagttactcctggaaagaaatagctgaggattgggggctctgtgcctgacgggcaagaagaaggggagattacagactaggggcatccctaaggaagaagcctcggggctgcgagggtgaactggaggatgcagtgtttgtgtgttgggggtagagcggggatgagggaccggggtggaggggaggcgaggaggaggaggggacccagagaacgaagctagggaaggtagagggtgccctctgccggccatgctgccaagagcagctactgggggcgggaggctgggggtggggaagtggtaaaggaaggttttgcgggatcccttagagagctggtaggagggacttgttgaatggtgctgctgactccagctcggtggggcgtgcgactcgtcgtcggtggattttgactcctcgttcttgtttggcttctatgcaagttttcctcgcgctgggggagctttgataagcctcgattggcggtgtgttagggcttcttggatcttattttagggtcctctagttatcctgcacttactccttaatgtcagtagcaaccaaagaacattttccgacaagcacgcaggaatgttcttggccagaagcaaagaaaggcatatttctgagtgtttattaatcctcctagtaatcttttaaagcaaagtaatatgtaattgggaacgttgattttctaactgcatataaaaggcgacatgatattaaatgagacccctccctactgactcaatatcctgcaaaatctctctctcccctttattattatggaaaaatctatttttatatgagtttgttgtaaggtcaaaagccattttggtcttacaatttgatatgtctttacattttaacttattgaggcataattacagatttaatttgtatgaacgtgtgtgccttcaatgcttatctcatgcaacataatttttaggttggagatttctgatgttatggcatgtagcgtttcaaggcattacacataataggtaacatagcatgttgaaattacaccacaaagttttgaccctgggaacagcaccttttaaaaacaatcactaaactcctgttcctgttttctgattttgcaaatgccttgcttaagacttttttttttttttttttttttttttttttgggaaatttacctctgggttagcaggagaggtaaaaaaaaggaaagagacacttgttgaaatgtaaccataacctttactggaatttaaaacatgttggtcaccattactggaattccagggccataaagtcgttgtcttttttttcttctacttcattttgtaaaatgtgataaatgttggtaaatatagaccagtagtaagtattatgacactaaaagcattatgtatgtggaactattttaagttattacagaacattttctatttataaatgatataagcagaaagaaatgatttccagataaacaaggcttacgtacatgttttgaagcattagaacattgcagacactcttagacatcacattttttaaagcaaaa

SEQ ID NO: 23 - DNA, 46 bp, Homo sapiens
aattgtcctgtttggaatcagtcagaagactagaaggtgatggaga

SEQ ID NO: 24 - DNA, 46 bp, Homo sapiens
ctttttctcctcttcacctccctcttttccgttctctttgctggtg

SEQ ID NO: 25 - DNA, 45 bp, Homo sapiens
aagactgggagtttaggtgtagatggggggtggggttggggggag

SEQ ID NO: 26 - DNA, 50 bp, Homo sapiens
ggttaatttccatctaaaaacaataatgctgttagaggttggggttaggg

SEQ ID NO: 27 - DNA, 4046 bp, Homo sapiens
ctccagcctccatccctccctcattctatctcttcctctccgtcgccctcgctcctcgctggatgcttctttctgggttttcttttttttttcccttctgtcctccctccccgcgagtttcgggcgctggcttagagggttcccgctttctcaagggaaggggagctgccgagaccgcgctccgctccccagccgggccggatgcctcactgagcccaggtccgagtcagtcggggtaactcagggaaaggggagcctccgcctgggagtagaaggtcctttccggaccgaagagccagagagcgggccgggcgagggggcctgggcggctggaggcggtggagaagaacacttttagctccgtgcggcggctggacagagccaccaatcagctggacgcgcagaccgccctgccagggcgaggttgcgtccggaggcgccggtggagggcggccggctagtcgctgagccgccgccgccacccgggtgggcaggggactggcggtgggtggaggtgaggggcttggcgggtgagatagaagcggcgcggagccgcccagacctgtgttctacctctcccgcccccgcctgcacccccgggggacagcgaactgccggaacgcgcggctgcgttatcctcttgccactcttcagggagctcagggacttaggcgcccctgggcgggggccaccaggctctccacactcctataaccctcacccccacccccttctcaggccttttgttccggccacagagccaagcccggtggcagttttcgccccagggtttggtcgttctggactcctcccccgatcagctcttcttaattaaaaggcaagagcttggggtaggggtgaggggaacgtaggaaaaatctgtttccgaaactcaagaccactgttttaacgaacgaaagaaagaatcccaactctgcgcaggtggattcataggcgaagcgaggatattgtggaaattcagaaggaaaagataaaaaacaggcgctaggatcagatgacggtgataggctgctcggcacacaaagggagcgtagggcagggtttacggagcaagcctgcagcgaatggggcacagattgttccgagatccagtcgttttctcagtcagatctacgcgaagggaggggaggggaggggcgggcaggggagcgtggcgggaggggctgagcttgggggcggggggatttctgatcagtctgatgcaattccaagcgtgctgcaaaggaactccaaggcgcccgcatcaccatcgccacccacccttcccagatggtgctgttttaaatacggatctgcagggctgaacgcagaactgggagatttattgcaaaatcccgggaggggcgggggggggtggtgtgcggaacggggaatggaggagcagaatttaaaggtgcaacgcttgctttttccaatcaggcggcaaccggccggaattattatttttttctttctgtctgcttgtctctggattctaattcaccaagaaagaggtgtaaatattgtgacattttgaggcagcttgatggatgggaaagaaatcatctgtcactctaaattgcagagttccctctccccgcgccatcccttgctagcgaatactcgctgctgcctaatacagttgctagggcttcaaatgaatgcatcgttaagggaatattatccttttagttgacttgccaatttagttgacagttgaatcgagaaaattgtagatttcgtgtctctgggaggaaaaatgcttaacagtctaagtcttgtaaccttgaggtctttaacaacttaaataaacctcaaaagtgtcacgtcatcctctacacacacacacacacacacacacacacacactcaacttgtaagatgacatggtttcacctaaactgttgtggaaatgaatagcactttaaaaatggtgcacctgatattcactgtttatgtgtatttacaaagagctcttcagcatgaaggcaagacatttcaattgtcctgtttggaatcagtcagaagactagaaggtgatggagagaagaagggaagaaagaggaaagagagagaattttaacctagatgctattaaattaacagtaacctagcctacttttataccccttggtcttgcatattaatatttctgtatgtgagattttagcttggtctagctcccccaatggagtataccagtattgattcagatgagaatatgagcatcctgccagtagctttttcagtgtcattgatagtaagacctacaacacagcaatttttggaggatagaagagaatatatataagggctttgcaaactgggaagcaggcactccataaatgggaggtatcattatgacattctctttgcacatatcattttcatttcactgaaccagagtactagttattttaaaacataatctaatgtatatgctcaaggtagtaagtggggattttaaaagcaagtgattagttggcttataaaatattatttttcaattgtctattaatgtacattggaaagaaggcttttaaagatctaaaatcaacataaataagcttcccctttcatttgccagactctttccctatcagatttctgatctaaattcttaataagaagagaagctggtgaatttagtttctttccttttcctggcctgtcctctaggggaagctttagtaagaaacaacattccaaaatcaggcagtgagcgagagagaaggcaagggactggatgaccacaaaatagataatcagccaagaaacagaaatgagggaaaaccagcattaaagcatgacttacaaagggtttttattttgtaattctgtaattttgggaccaggctcaaacttgctcaagtaacattcactcgatcatattgcttacaatctgtcagttaaaatgatgtctaactgagcatattttttattaaatatacttctctcaaaggccagtaaagctactctttggttttaattagacaaactagtctaaccacttaaataactctaatgaatatgaactgatatcatcagatttaaaagctctgctgaaaactaaatttattctgaaaagcactgacttgccagaaaaatatctatttttgcagctttcttttcactctatggataatttaatgagttgcttattttaattttacaactgctacctcagaagtatctcaaattatctttctttggctggtgtctttctctgctgatctgctactgctgtgtgtgtgtgtgtgtgtgtgtgtgtgtctgtgtgtgtgtgtgtatgggcgtgtgtgtctctgtgtgtgttttctagtgggaatttaacaagcagtgagtctcttaaatttacatgccataatctatgtcaagaacattgcgtactacttagcaataaaaataaacattagcatctagtgaaagcttaccatcattgagtgctatggaaatagaggtcttaaagaaagattaaatttttcaacaaaaaaatttttcccctttttggcttaaaggtgattataatttcaaaaatatgacatctttcctcttttactttggaatgtagagctgctgctttaacaagtgtcttttgagaaagatacacgtgtttcataaagattaatacccttaaaacactatggtgcagagagggaaggatgaattctttaaccctgcctctaatctcatttggcaatttttggagtattcattctgactttttaaaaattcaggtggattttttttctgctttctttccaacattataaaacaatcctataagagatttttctgctatagtgcagactttatttgtatttcctagtaataacactttagattcatatagtactttgacagctctctataggtttcatttgatttccttatcagtcatgtaaggtaggaatcaccaatcaccttttacagatgaggaaagtaaggtgcagaattatctaacactacactgccagtaagatgtaaagactaactcagagtctttcttcaaattttaaggaaatttgtgtttgttcctctctaga

SEQ ID NO: 28 - DNA, 4046 bp, Homo sapiens
tgcgcttttctggtattattattaaagcggtagtctgccggcgctgataagcaacaagttccccagcggtcttcccgccctagcctgacaaggcgaaggttttcttacctggcgacagggaaatctcccgagccgaattcagcttcgccggagccccaggtgtgacctgcgtagtgggcaagggagcggtgtgcaggctgagtttttttttttacaggggtaccctgaaactcctcactttctctgggaactttcagtgccaggacccagtaacgggcggttagaaggcagccctaggaaacacctgctacatagcagggcagttgggcaatcattggtaacctcgctcattcattagaatcacgtaagaactcaaaaggaaacgtgtctctcggagtgagggcgtttgcgtaaatctataggtttttcgacatcgatgccagttgctttgtcttctgtagtcgccaaggtggttgagagtttaagcttgcggatattgcaaagggttattagattcataagtcacaccaagtggtgggcgatccactgagcaaagccgaacttctcacatgatgacttcaaacaagacacattaccttccagcatctgttggggagacgagattttaagacacttgagtctccaggacagcaaaggcacaatggtgagtagcaataaaacctgcattataattgaaaaatcttgacatgttgcttaacaacgggcatatcacggctcttcctagcacttcacacgccaaagaacagcagctactcaggccaggggaatcgggtttttacacagtgcaactttaattggaatcatttgagatttgacacagctatgtggaactgcgtggaacaaacttggagctgggtgggggggtgtgtgttatattggttgttcaaggctgatgcttgtctctcagcagtcttgcattctattcttttccttaatgtgtatggtgtatgatcatattctatgatttatatgtgggcatgtaattgacatttgcaagggggttaatttccatctaaaaacaataatgctgttagaggttggggttagggggtggagtgggggtaagggtggggtaaagactgggagtttaggtgtagatggggggtggggttggggggagagaaataagtcagaagtgcatatcaccggtaatgggtaatcctctcgtagaagaaaaggttctcatcaacatgtgatcaactattaacaggatggctttggcaaagccatccgcacgtgacaaaccgtaaggaagtggaagaaaccgtctagagcaatatcaagtatcacttaattagagatttttaagccttttcctcctgctgtgccgggtgtgtaatccgggcgataggagtccattcagcaccttggacagagccaacggatttgtccgaggtggcggtacccccaggtagtcttcttggccccgctgtaaagccaaccctgtgtcgcccttaaaaagcgtcttttctgaggttcggctcacactgagatcggggctggagagagagtcagattttggagcggagcgtttggaaagcgagccccagtttggtcccctcattgagctcgctgaagttggcttcctagcggtgtaggctggaatagactcttggcaagctccgggttggtatactgggttaactttgggaaatgcaagtgtttatctccaggatctagccaccggggtggtgtaagccgcaaagaaggtaagcaccagggcggggaccccttgcatccccaattcttgagctattttgatactgtcttccggagaggacgcgtggtggaggggaggaggtagagggagagcatgagagggggttgtttcttggtatttgcccagtttgaattgccctaggtgagaaccctggggcaaagggagaaagaaaaaaaagaaactcagtcttcctgcggatataatgagtttagttaacttggacctgcaaatgtctgattcaaatgtaagatttatctctctttttctcctcttcacctccctcttttccgttctctttgctggtgtgtgtgtgtgtgtgtacagtagattcattactaattatgaagcttttgcaaaacattcgaattcctaaaatttgactttgtagcatttagaatcaggcggtggaggtggtgtgcggtggggagaggaggtggaggttgggaagagggaaggaggtaaagctaaacctccaacacaaaaaaatgaatcaaggtaatttcagctcttctagtgagaaggattcattctctctgtatccctccctccctctctttccccctccctccctccttcccgccccccttcttccaccccgccccctcctccagcctccatccctccctcattctatctcttcctctccgtcgccctcgctcctcgctggatgcttctttctgggttttcttttttttttcccttctgtcctccctccccgcgagtttcgggcgctggcttagagggttcccgctttctcaagggaaggggagctgccgagaccgcgctccgctccccagccgggccggatgcctcactgagcccaggtccgagtcagtcggggtaactcagggaaaggggagcctccgcctgggagtagaaggtcctttccggaccgaagagccagagagcgggccgggcgagggggcctgggcggctggaggcggtggagaagaacacttttagctccgtgcggcggctggacagagccaccaatcagctggacgcgcagaccgccctgccagggcgaggttgcgtccggaggcgccggtggagggcggccggctagtcgctgagccgccgccgccacccgggtgggcaggggactggcggtgggtggaggtgaggggcttggcgggtgagatagaagcggcgcggagccgcccagacctgtgttctacctctcccgcccccgcctgcacccccgggggacagcgaactgccggaacgcgcggctgcgttatcctcttgccactcttcagggagctcagggacttaggcgcccctgggcgggggccaccaggctctccacactcctataaccctcacccccacccccttctcaggccttttgttccggccacagagccaagcccggtggcagttttcgccccagggtttggtcgttctggactcctcccccgatcagctcttcttaattaaaaggcaagagcttggggtaggggtgaggggaacgtaggaaaaatctgtttccgaaactcaagaccactgttttaacgaacgaaagaaagaatcccaactctgcgcaggtggattcataggcgaagcgaggatattgtggaaattcagaaggaaaagataaaaaacaggcgctaggatcagatgacggtgataggctgctcggcacacaaagggagcgtagggcagggtttacggagcaagcctgcagcgaatggggcacagattgttccgagatccagtcgttttctcagtcagatctacgcgaagggaggggaggggaggggcgggcaggggagcgtggcgggaggggctgagcttgggggcggggggatttctgatcagtctgatgcaattccaagcgtgctgcaaaggaactccaaggcgcccgcatcaccatcgccacccacccttcccagatggtgctgttttaaatacggatctgcagggctgaacgcagaactgggagatttattgcaaaatcccgggaggggcgggggggggtggtgtgcggaacggggaatggaggagcagaatttaaaggtgcaacgcttgctttttccaatcaggcggcaaccggccggaattattatttttttctttctgtctgcttgtctctggattctaattcaccaagaaagaggtgtaaatattgtgacattttgaggcagcttgatggatgggaaagaaatcatctgtcactctaaattgcagagttccctctccccgcgccatcccttgctagcgaatactcgctgctgcctaatacagttgctagggcttcaaatgaatgcatcgttaagggaatattatccttttagttgacttg

SEQ ID NO: 29 - DNA, 4045 bp, Homo sapiens
tcgagttattgcctatttcccgagatttccggagtcgtccccacatctcccgcggagagcggcgcccctccgccccccctcccgcctccccctctattagacactccaagggggtagtttgtttcattgtgctttttttcctcttctcaaagttcatcctttcgcctccaagttactttccgccaacacgtgacctcttcgcttcccagcttgcgcagccactggtggggaagcgcgggcgctaaccgcagggcttcctgggagagccccctccgaggttcgccaccccagccctggctcccgccgcgctcaccccggcaccccggcggcggggcagcccccgcaggatgaggaagcggctccggggaagcagcaccgagcagcagcggagcgcccaacctgccgcctcccctcccgtccctgccttggcccgcggctccgctctccgcggctcgccttccgacctagctgcgcaccggggctgttaactcacatttgggaagccataacccattagagcaaacgcagtcataacttcattcaactcagccgctcgagagctcggcttacacaggttcctgtgggcaactagtggctcgccttggtgcctctcgcctagtcatcagtacctaagaggaaaagggaaagttgttgggctggttcgcgcttcgacgcatgcagatgttcccaaggacaagtcacttactcgcccccctccccccagtccccatttgatcatcactcacgacctcatcggctggagacccttagtcatgatgggggagggggaggggcacgaacttttctaagaagtttcctttttttacccagagagtcacagtgagtcggtcacgtaaacagcgaggttagtcgtcgccgttgccgccccccaccccctccctgctgcgcttttctggtattattattaaagcggtagtctgccggcgctgataagcaacaagttccccagcggtcttcccgccctagcctgacaaggcgaaggttttcttacctggcgacagggaaatctcccgagccgaattcagcttcgccggagccccaggtgtgacctgcgtagtgggcaagggagcggtgtgcaggctgagtttttttttttacaggggtaccctgaaactcctcactttctctgggaactttcagtgccaggacccagtaacgggcggttagaaggcagccctaggaaacacctgctacatagcagggcagttgggcaatcattggtaacctcgctcattcattagaatcacgtaagaactcaaaaggaaacgtgtctctcggagtgagggcgtttgcgtaaatctataggtttttcgacatcgatgccagttgctttgtcttctgtagtcgccaaggtggttgagagtttaagcttgcggatattgcaaagggttattagattcataagtcacaccaagtggtgggcgatccactgagcaaagccgaacttctcacatgatgacttcaaacaagacacattaccttccagcatctgttggggagacgagattttaagacacttgagtctccaggacagcaaaggcacaatggtgagtagcaataaaacctgcattataattgaaaaatcttgacatgttgcttaacaacgggcatatcacggctcttcctagcacttcacacgccaaagaacagcagctactcaggccaggggaatcgggtttttacacagtgcaactttaattggaatcatttgagatttgacacagctatgtggaactgcgtggaacaaacttggagctgggtgggggggtgtgtgttatattggttgttcaaggctgatgcttgtctctcagcagtcttgcattctattcttttccttaatgtgtatggtgtatgatcatattctatgatttatatgtgggcatgtaattgacatttgcaagggggttaatttccatctaaaaacaataatgctgttagaggttggggttagggggtggagtgggggtaagggtggggtaaagactgggagtttaggtgtagatggggggtggggttggggggagagaaataagtcagaagtgcatatcaccggtaatgggtaatcctctcgtagaagaaaaggttctcatcaacatgtgatcaactattaacaggatggctttggcaaagccatccgcacgtgacaaaccgtaaggaagtggaagaaaccgtctagagcaatatcaagtatcacttaattagagatttttaagccttttcctcctgctgtgccgggtgtgtaatccgggcgataggagtccattcagcaccttggacagagccaacggatttgtccgaggtggcggtacccccaggtagtcttcttggccccgctgtaaagccaaccctgtgtcgcccttaaaaagcgtcttttctgaggttcggctcacactgagatcggggctggagagagagtcagattttggagcggagcgtttggaaagcgagccccagtttggtcccctcattgagctcgctgaagttggcttcctagcggtgtaggctggaatagactcttggcaagctccgggttggtatactgggttaactttgggaaatgcaagtgtttatctccaggatctagccaccggggtggtgtaagccgcaaagaaggtaagcaccagggcggggaccccttgcatccccaattcttgagctattttgatactgtcttccggagaggacgcgtggtggaggggaggaggtagagggagagcatgagagggggttgtttcttggtatttgcccagtttgaattgccctaggtgagaaccctggggcaaagggagaaagaaaaaaaagaaactcagtcttcctgcggatataatgagtttagttaacttggacctgcaaatgtctgattcaaatgtaagatttatctctctttttctcctcttcacctccctcttttccgttctctttgctggtgtgtgtgtgtgtgtgtacagtagattcattactaattatgaagcttttgcaaaacattcgaattcctaaaatttgactttgtagcatttagaatcaggcggtggaggtggtgtgcggtggggagaggaggtggaggttgggaagagggaaggaggtaaagctaaacctccaacacaaaaaaatgaatcaaggtaatttcagctcttctagtgagaaggattcattctctctgtatccctccctccctctctttccccctccctccctccttcccgccccccttcttccaccccgccccctcctccagcctccatccctccctcattctatctcttcctctccgtcgccctcgctcctcgctggatgcttctttctgggttttcttttttttttcccttctgtcctccctccccgcgagtttcgggcgctggcttagagggttcccgctttctcaagggaaggggagctgccgagaccgcgctccgctccccagccgggccggatgcctcactgagcccaggtccgagtcagtcggggtaactcagggaaaggggagcctccgcctgggagtagaaggtcctttccggaccgaagagccagagagcgggccgggcgagggggcctgggcggctggaggcggtggagaagaacacttttagctccgtgcggcggctggacagagccaccaatcagctggacgcgcagaccgccctgccagggcgaggttgcgtccggaggcgccggtggagggcggccggctagtcgctgagccgccgccgccacccgggtgggcaggggactggcggtgggtggaggtgaggggcttggcgggtgagatagaagcggcgcggagccgcccagacctgtgttctacctctcccgcccccgcctgcacccccgggggacagcgaactgccggaacgcgcggctgcgttatcctcttgccactcttcagggagctcagggacttaggcgcccctgggcgggggccaccaggctctccacactcctataaccctcacccccacccccttctcaggccttttgttccggccacagagccaagcccggtggcagttttcgccccagggtttgg

SEQ ID NO: 30 - DNA, 4050 bp, Homo sapiens
gggtaggcaaagggcagcttcagtggaaagataccttgcgttagcgcctccctaggctgggggacgttgccaaagctcgagttattgcctatttcccgagatttccggagtcgtccccacatctcccgcggagagcggcgcccctccgccccccctcccgcctccccctctattagacactccaagggggtagtttgtttcattgtgctttttttcctcttctcaaagttcatcctttcgcctccaagttactttccgccaacacgtgacctcttcgcttcccagcttgcgcagccactggtggggaagcgcgggcgctaaccgcagggcttcctgggagagccccctccgaggttcgccaccccagccctggctcccgccgcgctcaccccggcaccccggcggcggggcagcccccgcaggatgaggaagcggctccggggaagcagcaccgagcagcagcggagcgcccaacctgccgcctcccctcccgtccctgccttggcccgcggctccgctctccgcggctcgccttccgacctagctgcgcaccggggctgttaactcacatttgggaagccataacccattagagcaaacgcagtcataacttcattcaactcagccgctcgagagctcggcttacacaggttcctgtgggcaactagtggctcgccttggtgcctctcgcctagtcatcagtacctaagaggaaaagggaaagttgttgggctggttcgcgcttcgacgcatgcagatgttcccaaggacaagtcacttactcgcccccctccccccagtccccatttgatcatcactcacgacctcatcggctggagacccttagtcatgatgggggagggggaggggcacgaacttttctaagaagtttcctttttttacccagagagtcacagtgagtcggtcacgtaaacagcgaggttagtcgtcgccgttgccgccccccaccccctccctgctgcgcttttctggtattattattaaagcggtagtctgccggcgctgataagcaacaagttccccagcggtcttcccgccctagcctgacaaggcgaaggttttcttacctggcgacagggaaatctcccgagccgaattcagcttcgccggagccccaggtgtgacctgcgtagtgggcaagggagcggtgtgcaggctgagtttttttttttacaggggtaccctgaaactcctcactttctctgggaactttcagtgccaggacccagtaacgggcggttagaaggcagccctaggaaacacctgctacatagcagggcagttgggcaatcattggtaacctcgctcattcattagaatcacgtaagaactcaaaaggaaacgtgtctctcggagtgagggcgtttgcgtaaatctataggtttttcgacatcgatgccagttgctttgtcttctgtagtcgccaaggtggttgagagtttaagcttgcggatattgcaaagggttattagattcataagtcacaccaagtggtgggcgatccactgagcaaagccgaacttctcacatgatgacttcaaacaagacacattaccttccagcatctgttggggagacgagattttaagacacttgagtctccaggacagcaaaggcacaatggtgagtagcaataaaacctgcattataattgaaaaatcttgacatgttgcttaacaacgggcatatcacggctcttcctagcacttcacacgccaaagaacagcagctactcaggccaggggaatcgggtttttacacagtgcaactttaattggaatcatttgagatttgacacagctatgtggaactgcgtggaacaaacttggagctgggtgggggggtgtgtgttatattggttgttcaaggctgatgcttgtctctcagcagtcttgcattctattcttttccttaatgtgtatggtgtatgatcatattctatgatttatatgtgggcatgtaattgacatttgcaagggggttaatttccatctaaaaacaataatgctgttagaggttggggttagggggtggagtgggggtaagggtggggtaaagactgggagtttaggtgtagatggggggtggggttggggggagagaaataagtcagaagtgcatatcaccggtaatgggtaatcctctcgtagaagaaaaggttctcatcaacatgtgatcaactattaacaggatggctttggcaaagccatccgcacgtgacaaaccgtaaggaagtggaagaaaccgtctagagcaatatcaagtatcacttaattagagatttttaagccttttcctcctgctgtgccgggtgtgtaatccgggcgataggagtccattcagcaccttggacagagccaacggatttgtccgaggtggcggtacccccaggtagtcttcttggccccgctgtaaagccaaccctgtgtcgcccttaaaaagcgtcttttctgaggttcggctcacactgagatcggggctggagagagagtcagattttggagcggagcgtttggaaagcgagccccagtttggtcccctcattgagctcgctgaagttggcttcctagcggtgtaggctggaatagactcttggcaagctccgggttggtatactgggttaactttgggaaatgcaagtgtttatctccaggatctagccaccggggtggtgtaagccgcaaagaaggtaagcaccagggcggggaccccttgcatccccaattcttgagctattttgatactgtcttccggagaggacgcgtggtggaggggaggaggtagagggagagcatgagagggggttgtttcttggtatttgcccagtttgaattgccctaggtgagaaccctggggcaaagggagaaagaaaaaaaagaaactcagtcttcctgcggatataatgagtttagttaacttggacctgcaaatgtctgattcaaatgtaagatttatctctctttttctcctcttcacctccctcttttccgttctctttgctggtgtgtgtgtgtgtgtgtacagtagattcattactaattatgaagcttttgcaaaacattcgaattcctaaaatttgactttgtagcatttagaatcaggcggtggaggtggtgtgcggtggggagaggaggtggaggttgggaagagggaaggaggtaaagctaaacctccaacacaaaaaaatgaatcaaggtaatttcagctcttctagtgagaaggattcattctctctgtatccctccctccctctctttccccctccctccctccttcccgccccccttcttccaccccgccccctcctccagcctccatccctccctcattctatctcttcctctccgtcgccctcgctcctcgctggatgcttctttctgggttttcttttttttttcccttctgtcctccctccccgcgagtttcgggcgctggcttagagggttcccgctttctcaagggaaggggagctgccgagaccgcgctccgctccccagccgggccggatgcctcactgagcccaggtccgagtcagtcggggtaactcagggaaaggggagcctccgcctgggagtagaaggtcctttccggaccgaagagccagagagcgggccgggcgagggggcctgggcggctggaggcggtggagaagaacacttttagctccgtgcggcggctggacagagccaccaatcagctggacgcgcagaccgccctgccagggcgaggttgcgtccggaggcgccggtggagggcggccggctagtcgctgagccgccgccgccacccgggtgggcaggggactggcggtgggtggaggtgaggggcttggcgggtgagatagaagcggcgcggagccgcccagacctgtgttctacctctcccgcccccgcctgcacccccgggggacagcgaactgccggaacgcgcggctgcgttatcctcttgccactcttcagggagctcagggacttaggcgcccctgggcgggggccaccaggctctccacactcctataaccctcacccc

SEQ ID NO: 31 - DNA, 47 bp, Homo sapiens
aattttcaaaattaattgatgttttaaaaatgttgagaccaaagtag

SEQ ID NO: 32 - DNA, 43 bp, Homo sapiens
ctatataaaaaagtgggcattttgtaacattccttcaggaaga

SEQ ID NO: 33 - DNA, 52 bp, Homo sapiens
gttacaacttacaggaacatttgtactttaagaaaaatttaagtgacaaatg

SEQ ID NO: 34 - DNA, 48 bp, Homo sapiens
atattttagtccttccattcctagagacaaaccagttatttggtggtg

SEQ ID NO: 35 - DNA, 49 bp, Homo sapiens
taaacagaatatgatgtaagagaggatttcatatagattaaaatggtaa

SEQ ID NO: 36 - DNA, 83 bp, Homo sapiens
aatctatatatcccgaataattccaggtggaattgctgatagacatgggggcctcaaacgtggagatcaactcctctctgtta

SEQ ID NO: 37 - DNA, 31 bp, Homo sapiens
actgttgctgcatttgctgccagtgaaggac

SEQ ID NO: 38 - DNA, 47 bp, Homo sapiens
ctttgcaaagagtccttcaaagtgaattctgcaatgctgtgagagag

SEQ ID NO: 39 - DNA, 46 bp, Homo sapiens
agatatttgtagagcaattgaattattggaaaaactacaaaggagt

SEQ ID NO: 40 - DNA, 4047 bp, Homo sapiens
ggaacttaaaagccagcttttagactataaacagaatatgatgtaagagaggatttcatatagattaaaatggtaaggcaggattatttcttagttttgtaatgttggaataatataacattaaaacttttcttcattatatatattgtaaacatttttgcattttgagttactttcaaaacttagatattagtgtatggttggttgtttttttttcccctagagtgttgaaggagaacatcatgaaaaagctgtagaactgctgaaagccgcacaaggaaaggttaaattagtggtacgatacacacccaaagtcttagaagaaatggagtcgcgctttgaaaaaatgagatcagcaaaacgcaggcaacagacctaatacatttcaaaacttgatatttcattttgcgttttagctagagaagttttccttgtgacttactaatggctgcaatgccaatgattgtaagaaaacaaacaaatttatcatgaaattctccttgtcattttataaatgcctattttaacatcatttatggttccagagatgcatacacttttttctgacaagaaaaagtaaaaggtgatgagggcaattctgtcctactgtttttacaggcctttttcaaatgcagattttgtcataaagttgttatagattttttaaaatgcttttttaatattaaaatgtacttttacattcttaatctttttttagaaaggaaaagttttcttcatttagctgctgatttaaaagtaaagttctccaattctttttttttgcttactctattttttttaacctgtgaaatttctttacagttttccaagaaattaagcataacagtctcatctacggcagttcattacactgtcaatgttaacatcattgctgcattttgtactttgaacacacacataatatatataaccagtggtaaatcatgactcagtacagtgcaagttttttcacttttacttaaacataatatataatggatattcatttatactgatttatgaaagtaagtttttaaacactgaaacaatcattgctaaaatacatattcttaatatttgagcattgaggcaagaggatgtaattgatagcattacttattacatccctatttatgttcaaccgtacatcaaattataaatgcaaaacaggttcagatttcatcttttgtgatttcttttaaatactattcatttttatttaaatgcacagtatttcccctatattttagtccttccattcctagagacaaaccagttatttggtggtgggaagtagctgaagcaaagaaggaaaagtaatacctttaacctcactagcttcaagagtagacattcttactagctcaatttaaataattgattttaaataggaagaaaagaggatatatttaagatacatagaaattatgatgtgaagtattcatgagaatctgtagattccatcaaaataagtaggaactcatactaaaattgttggatttaaagaggcaacttttgtttatgattcaaatatgggaatttgagaaatatttcatttgtccactggatgtcactattttactaaaaggcagctattagtgtgggactgtgactgaggtcttaaagactgaaagagttggggttcattttctgttacaacttacaggaacatttgtactttaagaaaaatttaagtgacaaatgttagaagatgatggattgaaaaatataagtaatttggcatattgaccctatataaaaaagtgggcattttgtaacattccttcaggaagaatagaattgtatgcttttttctgcatgtttgtgatcactgtgagtctcagatgattattccagttttcaatgatttttcaaaataaaagtcaatcagcattgttatttatcattaaggtattgaacactggattgcatggttgaatgtgtctttaatccactacaaaatgtgcttgttattgataggatcatgttgttaaattgtaaattttcaaaattaattgatgttttaaaaatgttgagaccaaagtagtatagaagtatggacttaatttaattgtaaaattattagaggtatttgttgtagagctttatatattaaagagaggtattggtgcatataaaaacagtaatattattgttatgcttgtattcttgcatttcagggtaagtaaaccctgaagaaatcttattttagtatagctacagctgcagtagcttttaagtatgtatcaacatttcattataaattatagcttcctggttctgtgtctcagctgtttcagaactttcagccaagttaaatcttttttggtgttgaaacttttagtaagttgagtaagctatttttttccctacggtaatccacaatctgttctttgtgtgggttgacacctatttataattcttaaaataagggtagctcaaaggagccaagtacagtagtttagcttgctactgttgagcatgaatagcagtaggttgttttcattaatgcagttttcataatgtatcccagaattttaaatcttgaccatagaaaaatacagtcattcattggcaaagatgtacagtggtggtttagtgcagtgaggaaatgatgggaatttttatcttagaaatggatgattcgtgaataaaactaggtacatagtaagtgtatgatagatgtttgatttgtaaattacaaatataaattatcacccccatttccatttattttcttgatatatcaaaatgtgttgacttagtgattctcaatcttagctacatattagcctggcagagctttaaaaaattgatacctgggtcctattccataacaactaaatcaaaatcacccttttttttttttttgtaaagctttccaggtggttctaaaggacacctagggtcaataacccattataaaatgatctgattacactggacactcttaggaagtatcaaaatagaacagttcaatttgcagctacttaatgattaattacatttcttaggttttttttttgttttttttttggtttgtttgttttttgttttaaaagagacaggatcttgctttgtctcccaggctggaacacagtggtgtgatcatagctcactgcagcctgaaactccttggcttccacctcagcctcccaaagcattaggattataggcgtgagccactgcacctggccaagtaatttcttttaggaataaaaggtacttggcattccttatttgggaagtaattacagtcttatctttttttttcttttttcttttttttaataaaatctaccagtaatttaaatgtgagctttttatgtctgtcatcattctgccccctttgcctttaaaacttacaaaaatacgtgtttgttatttgagaaagcatgtttaaaaattgcagatgagaaatattgtcgttaataattatgtactgtcttaatgtgggcacttcatttgttagtataatactagataatagcagcctagttctttaggatttgacgattcaaattttttttttgttttttgtttttgtttttttttgagacagagtcttgctctgttgcccaggctggcgtgcagtggtgtgatctcggctcacttcagcctccgccacctcaaggcagttcaagcaattctcctgcctcagcctcccgagtagctaggactacaggcgtgtgccacctctcccggctaatttttttgtatttttagtagagacggggtttcaccgtgttagccaggatgatctcgatctcctgacctcgtgattcgcccgcctcggcctcccaaagtgctggaattactggcgtgagccaccatgcccagcctcaaatatgtttttaaaaaatatcattgtcctcctcctcttaagatttttttaagttattttgctcaagtacttaagtagtctggctcaagtactttgtttacaattaaaatggatattatagcatttaatagaagaaatggttatggcttatccaaaaagaatgtcagcatgacctggtgtagacttaaaaaactacatgtttg

SEQ ID NO: 41 - DNA, 4043 bp, Homo sapiens
aacttgtggtttagaaatgccttgagggaatcctaggcagtactattaatacagtgatccttttttttaagcactataagtgtattttgcagtgtaaattagcagtgcttaatgtcatttttatgacataagctctttattaaaggcaatacattaaattagaagtctaccctcattttactcttataaaatgccaattgcttgatctactgaaataataaggcatatagattaatatgctaattatttggaacttaaaagccagcttttagactataaacagaatatgatgtaagagaggatttcatatagattaaaatggtaaggcaggattatttcttagttttgtaatgttggaataatataacattaaaacttttcttcattatatatattgtaaacatttttgcattttgagttactttcaaaacttagatattagtgtatggttggttgtttttttttcccctagagtgttgaaggagaacatcatgaaaaagctgtagaactgctgaaagccgcacaaggaaaggttaaattagtggtacgatacacacccaaagtcttagaagaaatggagtcgcgctttgaaaaaatgagatcagcaaaacgcaggcaacagacctaatacatttcaaaacttgatatttcattttgcgttttagctagagaagttttccttgtgacttactaatggctgcaatgccaatgattgtaagaaaacaaacaaatttatcatgaaattctccttgtcattttataaatgcctattttaacatcatttatggttccagagatgcatacacttttttctgacaagaaaaagtaaaaggtgatgagggcaattctgtcctactgtttttacaggcctttttcaaatgcagattttgtcataaagttgttatagattttttaaaatgcttttttaatattaaaatgtacttttacattcttaatctttttttagaaaggaaaagttttcttcatttagctgctgatttaaaagtaaagttctccaattctttttttttgcttactctattttttttaacctgtgaaatttctttacagttttccaagaaattaagcataacagtctcatctacggcagttcattacactgtcaatgttaacatcattgctgcattttgtactttgaacacacacataatatatataaccagtggtaaatcatgactcagtacagtgcaagttttttcacttttacttaaacataatatataatggatattcatttatactgatttatgaaagtaagtttttaaacactgaaacaatcattgctaaaatacatattcttaatatttgagcattgaggcaagaggatgtaattgatagcattacttattacatccctatttatgttcaaccgtacatcaaattataaatgcaaaacaggttcagatttcatcttttgtgatttcttttaaatactattcatttttatttaaatgcacagtatttcccctatattttagtccttccattcctagagacaaaccagttatttggtggtgggaagtagctgaagcaaagaaggaaaagtaatacctttaacctcactagcttcaagagtagacattcttactagctcaatttaaataattgattttaaataggaagaaaagaggatatatttaagatacatagaaattatgatgtgaagtattcatgagaatctgtagattccatcaaaataagtaggaactcatactaaaattgttggatttaaagaggcaacttttgtttatgattcaaatatgggaatttgagaaatatttcatttgtccactggatgtcactattttactaaaaggcagctattagtgtgggactgtgactgaggtcttaaagactgaaagagttggggttcattttctgttacaacttacaggaacatttgtactttaagaaaaatttaagtgacaaatgttagaagatgatggattgaaaaatataagtaatttggcatattgaccctatataaaaaagtgggcattttgtaacattccttcaggaagaatagaattgtatgcttttttctgcatgtttgtgatcactgtgagtctcagatgattattccagttttcaatgatttttcaaaataaaagtcaatcagcattgttatttatcattaaggtattgaacactggattgcatggttgaatgtgtctttaatccactacaaaatgtgcttgttattgataggatcatgttgttaaattgtaaattttcaaaattaattgatgttttaaaaatgttgagaccaaagtagtatagaagtatggacttaatttaattgtaaaattattagaggtatttgttgtagagctttatatattaaagagaggtattggtgcatataaaaacagtaatattattgttatgcttgtattcttgcatttcagggtaagtaaaccctgaagaaatcttattttagtatagctacagctgcagtagcttttaagtatgtatcaacatttcattataaattatagcttcctggttctgtgtctcagctgtttcagaactttcagccaagttaaatcttttttggtgttgaaacttttagtaagttgagtaagctatttttttccctacggtaatccacaatctgttctttgtgtgggttgacacctatttataattcttaaaataagggtagctcaaaggagccaagtacagtagtttagcttgctactgttgagcatgaatagcagtaggttgttttcattaatgcagttttcataatgtatcccagaattttaaatcttgaccatagaaaaatacagtcattcattggcaaagatgtacagtggtggtttagtgcagtgaggaaatgatgggaatttttatcttagaaatggatgattcgtgaataaaactaggtacatagtaagtgtatgatagatgtttgatttgtaaattacaaatataaattatcacccccatttccatttattttcttgatatatcaaaatgtgttgacttagtgattctcaatcttagctacatattagcctggcagagctttaaaaaattgatacctgggtcctattccataacaactaaatcaaaatcacccttttttttttttttgtaaagctttccaggtggttctaaaggacacctagggtcaataacccattataaaatgatctgattacactggacactcttaggaagtatcaaaatagaacagttcaatttgcagctacttaatgattaattacatttcttaggttttttttttgttttttttttggtttgtttgttttttgttttaaaagagacaggatcttgctttgtctcccaggctggaacacagtggtgtgatcatagctcactgcagcctgaaactccttggcttccacctcagcctcccaaagcattaggattataggcgtgagccactgcacctggccaagtaatttcttttaggaataaaaggtacttggcattccttatttgggaagtaattacagtcttatctttttttttcttttttcttttttttaataaaatctaccagtaatttaaatgtgagctttttatgtctgtcatcattctgccccctttgcctttaaaacttacaaaaatacgtgtttgttatttgagaaagcatgtttaaaaattgcagatgagaaatattgtcgttaataattatgtactgtcttaatgtgggcacttcatttgttagtataatactagataatagcagcctagttctttaggatttgacgattcaaattttttttttgttttttgtttttgtttttttttgagacagagtcttgctctgttgcccaggctggcgtgcagtggtgtgatctcggctcacttcagcctccgccacctcaaggcagttcaagcaattctcctgcctcagcctcccgagtagctaggactacaggcgtgtgccacctctcccggctaatttttttgtatttttagtagagacggggtttcaccgtgttagccaggatgatctcgatctcctgacctcgtgattcgcccgcctc

SEQ ID NO: 42 - DNA, 4052 bp, Homo sapiens
tctctgttaatggagtggtaaggatgaattttatttctatttgtagtgatctgttgtgaccacctgggggcgtatttgagtaataggagaaacctaagaaacttgtggtttagaaatgccttgagggaatcctaggcagtactattaatacagtgatccttttttttaagcactataagtgtattttgcagtgtaaattagcagtgcttaatgtcatttttatgacataagctctttattaaaggcaatacattaaattagaagtctaccctcattttactcttataaaatgccaattgcttgatctactgaaataataaggcatatagattaatatgctaattatttggaacttaaaagccagcttttagactataaacagaatatgatgtaagagaggatttcatatagattaaaatggtaaggcaggattatttcttagttttgtaatgttggaataatataacattaaaacttttcttcattatatatattgtaaacatttttgcattttgagttactttcaaaacttagatattagtgtatggttggttgtttttttttcccctagagtgttgaaggagaacatcatgaaaaagctgtagaactgctgaaagccgcacaaggaaaggttaaattagtggtacgatacacacccaaagtcttagaagaaatggagtcgcgctttgaaaaaatgagatcagcaaaacgcaggcaacagacctaatacatttcaaaacttgatatttcattttgcgttttagctagagaagttttccttgtgacttactaatggctgcaatgccaatgattgtaagaaaacaaacaaatttatcatgaaattctccttgtcattttataaatgcctattttaacatcatttatggttccagagatgcatacacttttttctgacaagaaaaagtaaaaggtgatgagggcaattctgtcctactgtttttacaggcctttttcaaatgcagattttgtcataaagttgttatagattttttaaaatgcttttttaatattaaaatgtacttttacattcttaatctttttttagaaaggaaaagttttcttcatttagctgctgatttaaaagtaaagttctccaattctttttttttgcttactctattttttttaacctgtgaaatttctttacagttttccaagaaattaagcataacagtctcatctacggcagttcattacactgtcaatgttaacatcattgctgcattttgtactttgaacacacacataatatatataaccagtggtaaatcatgactcagtacagtgcaagttttttcacttttacttaaacataatatataatggatattcatttatactgatttatgaaagtaagtttttaaacactgaaacaatcattgctaaaatacatattcttaatatttgagcattgaggcaagaggatgtaattgatagcattacttattacatccctatttatgttcaaccgtacatcaaattataaatgcaaaacaggttcagatttcatcttttgtgatttcttttaaatactattcatttttatttaaatgcacagtatttcccctatattttagtccttccattcctagagacaaaccagttatttggtggtgggaagtagctgaagcaaagaaggaaaagtaatacctttaacctcactagcttcaagagtagacattcttactagctcaatttaaataattgattttaaataggaagaaaagaggatatatttaagatacatagaaattatgatgtgaagtattcatgagaatctgtagattccatcaaaataagtaggaactcatactaaaattgttggatttaaagaggcaacttttgtttatgattcaaatatgggaatttgagaaatatttcatttgtccactggatgtcactattttactaaaaggcagctattagtgtgggactgtgactgaggtcttaaagactgaaagagttggggttcattttctgttacaacttacaggaacatttgtactttaagaaaaatttaagtgacaaatgttagaagatgatggattgaaaaatataagtaatttggcatattgaccctatataaaaaagtgggcattttgtaacattccttcaggaagaatagaattgtatgcttttttctgcatgtttgtgatcactgtgagtctcagatgattattccagttttcaatgatttttcaaaataaaagtcaatcagcattgttatttatcattaaggtattgaacactggattgcatggttgaatgtgtctttaatccactacaaaatgtgcttgttattgataggatcatgttgttaaattgtaaattttcaaaattaattgatgttttaaaaatgttgagaccaaagtagtatagaagtatggacttaatttaattgtaaaattattagaggtatttgttgtagagctttatatattaaagagaggtattggtgcatataaaaacagtaatattattgttatgcttgtattcttgcatttcagggtaagtaaaccctgaagaaatcttattttagtatagctacagctgcagtagcttttaagtatgtatcaacatttcattataaattatagcttcctggttctgtgtctcagctgtttcagaactttcagccaagttaaatcttttttggtgttgaaacttttagtaagttgagtaagctatttttttccctacggtaatccacaatctgttctttgtgtgggttgacacctatttataattcttaaaataagggtagctcaaaggagccaagtacagtagtttagcttgctactgttgagcatgaatagcagtaggttgttttcattaatgcagttttcataatgtatcccagaattttaaatcttgaccatagaaaaatacagtcattcattggcaaagatgtacagtggtggtttagtgcagtgaggaaatgatgggaatttttatcttagaaatggatgattcgtgaataaaactaggtacatagtaagtgtatgatagatgtttgatttgtaaattacaaatataaattatcacccccatttccatttattttcttgatatatcaaaatgtgttgacttagtgattctcaatcttagctacatattagcctggcagagctttaaaaaattgatacctgggtcctattccataacaactaaatcaaaatcacccttttttttttttttgtaaagctttccaggtggttctaaaggacacctagggtcaataacccattataaaatgatctgattacactggacactcttaggaagtatcaaaatagaacagttcaatttgcagctacttaatgattaattacatttcttaggttttttttttgttttttttttggtttgtttgttttttgttttaaaagagacaggatcttgctttgtctcccaggctggaacacagtggtgtgatcatagctcactgcagcctgaaactccttggcttccacctcagcctcccaaagcattaggattataggcgtgagccactgcacctggccaagtaatttcttttaggaataaaaggtacttggcattccttatttgggaagtaattacagtcttatctttttttttcttttttcttttttttaataaaatctaccagtaatttaaatgtgagctttttatgtctgtcatcattctgccccctttgcctttaaaacttacaaaaatacgtgtttgttatttgagaaagcatgtttaaaaattgcagatgagaaatattgtcgttaataattatgtactgtcttaatgtgggcacttcatttgttagtataatactagataatagcagcctagttctttaggatttgacgattcaaattttttttttgttttttgtttttgtttttttttgagacagagtcttgctctgttgcccaggctggcgtgcagtggtgtgatctcggctcacttcagcctccgccacctcaaggcagttcaagcaattctcctgcctcagcctcccgagtagctaggactacaggcgtgtgccacctctcccg

SEQ ID NO: 43 - DNA, 4048 bp, Homo sapiens
gccgggcgtggtggcaggcgcctgtagtctcagctactcaggaggctgaggcaggagaatggcgtgaagccaggaggtggagcttgcagtgagccaagatcacgccactgcactccagcctgtgcgacagagcgagactccatctcggggggaaacaaaagatgaaagaactgaagtaaataaaagtcatatttttaatatgtaaaactttctttcaggctactgttgctgcatttgctgccagtgaaggacattctcatcctcgagttgttgagctaccaaaaacagaagagggccttggattcaatattatgggaggcaaagaacaaaactctccaatctatatatcccgaataattccaggtggaattgctgatagacatgggggcctcaaacgtggagatcaactcctctctgttaatggagtggtaaggatgaattttatttctatttgtagtgatctgttgtgaccacctgggggcgtatttgagtaataggagaaacctaagaaacttgtggtttagaaatgccttgagggaatcctaggcagtactattaatacagtgatccttttttttaagcactataagtgtattttgcagtgtaaattagcagtgcttaatgtcatttttatgacataagctctttattaaaggcaatacattaaattagaagtctaccctcattttactcttataaaatgccaattgcttgatctactgaaataataaggcatatagattaatatgctaattatttggaacttaaaagccagcttttagactataaacagaatatgatgtaagagaggatttcatatagattaaaatggtaaggcaggattatttcttagttttgtaatgttggaataatataacattaaaacttttcttcattatatatattgtaaacatttttgcattttgagttactttcaaaacttagatattagtgtatggttggttgtttttttttcccctagagtgttgaaggagaacatcatgaaaaagctgtagaactgctgaaagccgcacaaggaaaggttaaattagtggtacgatacacacccaaagtcttagaagaaatggagtcgcgctttgaaaaaatgagatcagcaaaacgcaggcaacagacctaatacatttcaaaacttgatatttcattttgcgttttagctagagaagttttccttgtgacttactaatggctgcaatgccaatgattgtaagaaaacaaacaaatttatcatgaaattctccttgtcattttataaatgcctattttaacatcatttatggttccagagatgcatacacttttttctgacaagaaaaagtaaaaggtgatgagggcaattctgtcctactgtttttacaggcctttttcaaatgcagattttgtcataaagttgttatagattttttaaaatgcttttttaatattaaaatgtacttttacattcttaatctttttttagaaaggaaaagttttcttcatttagctgctgatttaaaagtaaagttctccaattctttttttttgcttactctattttttttaacctgtgaaatttctttacagttttccaagaaattaagcataacagtctcatctacggcagttcattacactgtcaatgttaacatcattgctgcattttgtactttgaacacacacataatatatataaccagtggtaaatcatgactcagtacagtgcaagttttttcacttttacttaaacataatatataatggatattcatttatactgatttatgaaagtaagtttttaaacactgaaacaatcattgctaaaatacatattcttaatatttgagcattgaggcaagaggatgtaattgatagcattacttattacatccctatttatgttcaaccgtacatcaaattataaatgcaaaacaggttcagatttcatcttttgtgatttcttttaaatactattcatttttatttaaatgcacagtatttcccctatattttagtccttccattcctagagacaaaccagttatttggtggtgggaagtagctgaagcaaagaaggaaaagtaatacctttaacctcactagcttcaagagtagacattcttactagctcaatttaaataattgattttaaataggaagaaaagaggatatatttaagatacatagaaattatgatgtgaagtattcatgagaatctgtagattccatcaaaataagtaggaactcatactaaaattgttggatttaaagaggcaacttttgtttatgattcaaatatgggaatttgagaaatatttcatttgtccactggatgtcactattttactaaaaggcagctattagtgtgggactgtgactgaggtcttaaagactgaaagagttggggttcattttctgttacaacttacaggaacatttgtactttaagaaaaatttaagtgacaaatgttagaagatgatggattgaaaaatataagtaatttggcatattgaccctatataaaaaagtgggcattttgtaacattccttcaggaagaatagaattgtatgcttttttctgcatgtttgtgatcactgtgagtctcagatgattattccagttttcaatgatttttcaaaataaaagtcaatcagcattgttatttatcattaaggtattgaacactggattgcatggttgaatgtgtctttaatccactacaaaatgtgcttgttattgataggatcatgttgttaaattgtaaattttcaaaattaattgatgttttaaaaatgttgagaccaaagtagtatagaagtatggacttaatttaattgtaaaattattagaggtatttgttgtagagctttatatattaaagagaggtattggtgcatataaaaacagtaatattattgttatgcttgtattcttgcatttcagggtaagtaaaccctgaagaaatcttattttagtatagctacagctgcagtagcttttaagtatgtatcaacatttcattataaattatagcttcctggttctgtgtctcagctgtttcagaactttcagccaagttaaatcttttttggtgttgaaacttttagtaagttgagtaagctatttttttccctacggtaatccacaatctgttctttgtgtgggttgacacctatttataattcttaaaataagggtagctcaaaggagccaagtacagtagtttagcttgctactgttgagcatgaatagcagtaggttgttttcattaatgcagttttcataatgtatcccagaattttaaatcttgaccatagaaaaatacagtcattcattggcaaagatgtacagtggtggtttagtgcagtgaggaaatgatgggaatttttatcttagaaatggatgattcgtgaataaaactaggtacatagtaagtgtatgatagatgtttgatttgtaaattacaaatataaattatcacccccatttccatttattttcttgatatatcaaaatgtgttgacttagtgattctcaatcttagctacatattagcctggcagagctttaaaaaattgatacctgggtcctattccataacaactaaatcaaaatcacccttttttttttttttgtaaagctttccaggtggttctaaaggacacctagggtcaataacccattataaaatgatctgattacactggacactcttaggaagtatcaaaatagaacagttcaatttgcagctacttaatgattaattacatttcttaggttttttttttgttttttttttggtttgtttgttttttgttttaaaagagacaggatcttgctttgtctcccaggctggaacacagtggtgtgatcatagctcactgcagcctgaaactccttggcttccacctcagcctcccaaagcattaggattataggcgtgagccactgcacctggccaagtaatttcttttaggaataaaaggtacttggcattccttatttgggaagtaattacagtcttatctttttttttcttttttctttttttt

SEQ ID NO: 44 - DNA, 4049 bp, Homo sapiens
ctcaaataatttaggtattgacctcactattcatgatagggggtttgaacagggtaatatcagcagtcggtgacttaaattaatcatcagcagatagttttttatggatagttactggctcacaaaaggaaatggtggattctttgttgaatacaaatacttaaacatgtggatatagtttatcagtgtagaaaagaccagagaaacatggttttaattgctgagttgtgtgagtttgatagcctactgaatttctgagccttaattccattatctgaaaaatgaggcctttttcagagcttcgaagataacgggtattcagtaaatcttgatttcttcaaagataacgggtgttcagtaaatcttgatttctttcctcctccccatttttgtgatccatcacaaaaaaatggtactagataattaccctttaaagcaaagtgaaacaaaatctcaactttataattagtttggattagtctaaagttgagctttaaagaagatacggctctgtttcatcttctgtggggatttttagttgtgtctagttaactaaagcaacaaaacattcagattggctatatgtacctctctttttctcaatattgagttatttcttgacatcttagatatttagtatatagtacaaatagtacagaagccaaaatgattacatataagggcaactccatgttgattatataggtaggttgtgtcctgcacaaaggctcctgaaggagttgggagatccagatctaaagcccagggctgctagcatgctggggaaggggttttcctccttaccatgtacaatatcagtctgcccagtaagtctgcttgccaagccctgcgcatacaggactgcacaaaagagtgggcactgaatgggctaggaatgacctaaaaaatcataacaaaaaatcgtaacatttcctgcataactcgaaattattcatttgtcgtctctaaaataccttctgtttagcttaccttctcagaatcaccagtgaatttgtgagcattcagacgtcaaaaatacgtgctcaaaagtagtttttaaaaagagacaaaagaggccaggcgcagtggctcacgcctgtaatcccagcactttgggaggccaaggcgggcggatcacgaggtcaggagatcgagaccatcctggctaatgtggtgaaaccccatctctactaaaaaaaaatacaaaaaaattagccgggcgtggtggcaggcgcctgtagtctcagctactcaggaggctgaggcaggagaatggcgtgaagccaggaggtggagcttgcagtgagccaagatcacgccactgcactccagcctgtgcgacagagcgagactccatctcggggggaaacaaaagatgaaagaactgaagtaaataaaagtcatatttttaatatgtaaaactttctttcaggctactgttgctgcatttgctgccagtgaaggacattctcatcctcgagttgttgagctaccaaaaacagaagagggccttggattcaatattatgggaggcaaagaacaaaactctccaatctatatatcccgaataattccaggtggaattgctgatagacatgggggcctcaaacgtggagatcaactcctctctgttaatggagtggtaaggatgaattttatttctatttgtagtgatctgttgtgaccacctgggggcgtatttgagtaataggagaaacctaagaaacttgtggtttagaaatgccttgagggaatcctaggcagtactattaatacagtgatccttttttttaagcactataagtgtattttgcagtgtaaattagcagtgcttaatgtcatttttatgacataagctctttattaaaggcaatacattaaattagaagtctaccctcattttactcttataaaatgccaattgcttgatctactgaaataataaggcatatagattaatatgctaattatttggaacttaaaagccagcttttagactataaacagaatatgatgtaagagaggatttcatatagattaaaatggtaaggcaggattatttcttagttttgtaatgttggaataatataacattaaaacttttcttcattatatatattgtaaacatttttgcattttgagttactttcaaaacttagatattagtgtatggttggttgtttttttttcccctagagtgttgaaggagaacatcatgaaaaagctgtagaactgctgaaagccgcacaaggaaaggttaaattagtggtacgatacacacccaaagtcttagaagaaatggagtcgcgctttgaaaaaatgagatcagcaaaacgcaggcaacagacctaatacatttcaaaacttgatatttcattttgcgttttagctagagaagttttccttgtgacttactaatggctgcaatgccaatgattgtaagaaaacaaacaaatttatcatgaaattctccttgtcattttataaatgcctattttaacatcatttatggttccagagatgcatacacttttttctgacaagaaaaagtaaaaggtgatgagggcaattctgtcctactgtttttacaggcctttttcaaatgcagattttgtcataaagttgttatagattttttaaaatgcttttttaatattaaaatgtacttttacattcttaatctttttttagaaaggaaaagttttcttcatttagctgctgatttaaaagtaaagttctccaattctttttttttgcttactctattttttttaacctgtgaaatttctttacagttttccaagaaattaagcataacagtctcatctacggcagttcattacactgtcaatgttaacatcattgctgcattttgtactttgaacacacacataatatatataaccagtggtaaatcatgactcagtacagtgcaagttttttcacttttacttaaacataatatataatggatattcatttatactgatttatgaaagtaagtttttaaacactgaaacaatcattgctaaaatacatattcttaatatttgagcattgaggcaagaggatgtaattgatagcattacttattacatccctatttatgttcaaccgtacatcaaattataaatgcaaaacaggttcagatttcatcttttgtgatttcttttaaatactattcatttttatttaaatgcacagtatttcccctatattttagtccttccattcctagagacaaaccagttatttggtggtgggaagtagctgaagcaaagaaggaaaagtaatacctttaacctcactagcttcaagagtagacattcttactagctcaatttaaataattgattttaaataggaagaaaagaggatatatttaagatacatagaaattatgatgtgaagtattcatgagaatctgtagattccatcaaaataagtaggaactcatactaaaattgttggatttaaagaggcaacttttgtttatgattcaaatatgggaatttgagaaatatttcatttgtccactggatgtcactattttactaaaaggcagctattagtgtgggactgtgactgaggtcttaaagactgaaagagttggggttcattttctgttacaacttacaggaacatttgtactttaagaaaaatttaagtgacaaatgttagaagatgatggattgaaaaatataagtaatttggcatattgaccctatataaaaaagtgggcattttgtaacattccttcaggaagaatagaattgtatgcttttttctgcatgtttgtgatcactgtgagtctcagatgattattccagttttcaatgatttttcaaaataaaagtcaatcagcattgttatttatcattaaggtattgaacactggattgcatggttgaatgtgtctttaatccactacaaaatgtgcttgttattgataggatcatgttgttaaattgtaaattttcaaaattaattgatgttttaaaaatgttgagaccaaagtagtatagaagtatggacttaatttaattgta

SEQ ID NO: 45 - DNA, 4083 bp, Homo sapiens
aagtttaaaatatggagttattaaattcataataaacttactttgaagactaacatgtatctttcaagctacaccaaatttctcaagtactaagaaataagacatttgtttctattgcctttacataaatgctgcatgataaatagcttacataagctattttatcatgcagtttagataatgcaatagaaatgtacttgcatacaatatgtatcatgcaatatataattgtgttgtatatgttatatatatgatactatataatattcattatacaaaatctaatcagaattttaagatatgaattactatcctcatcttattgatgaggaagcatgaggtgatttgccgcaaaccacacaaatagcatatgatagagctggggtacttccccgagttgatttttgctttcttctttacattatctgcatttctgtgccattgttttcctcaaataatttaggtattgacctcactattcatgatagggggtttgaacagggtaatatcagcagtcggtgacttaaattaatcatcagcagatagttttttatggatagttactggctcacaaaaggaaatggtggattctttgttgaatacaaatacttaaacatgtggatatagtttatcagtgtagaaaagaccagagaaacatggttttaattgctgagttgtgtgagtttgatagcctactgaatttctgagccttaattccattatctgaaaaatgaggcctttttcagagcttcgaagataacgggtattcagtaaatcttgatttcttcaaagataacgggtgttcagtaaatcttgatttctttcctcctccccatttttgtgatccatcacaaaaaaatggtactagataattaccctttaaagcaaagtgaaacaaaatctcaactttataattagtttggattagtctaaagttgagctttaaagaagatacggctctgtttcatcttctgtggggatttttagttgtgtctagttaactaaagcaacaaaacattcagattggctatatgtacctctctttttctcaatattgagttatttcttgacatcttagatatttagtatatagtacaaatagtacagaagccaaaatgattacatataagggcaactccatgttgattatataggtaggttgtgtcctgcacaaaggctcctgaaggagttgggagatccagatctaaagcccagggctgctagcatgctggggaaggggttttcctccttaccatgtacaatatcagtctgcccagtaagtctgcttgccaagccctgcgcatacaggactgcacaaaagagtgggcactgaatgggctaggaatgacctaaaaaatcataacaaaaaatcgtaacatttcctgcataactcgaaattattcatttgtcgtctctaaaataccttctgtttagcttaccttctcagaatcaccagtgaatttgtgagcattcagacgtcaaaaatacgtgctcaaaagtagtttttaaaaagagacaaaagaggccaggcgcagtggctcacgcctgtaatcccagcactttgggaggccaaggcgggcggatcacgaggtcaggagatcgagaccatcctggctaatgtggtgaaaccccatctctactaaaaaaaaatacaaaaaaattagccgggcgtggtggcaggcgcctgtagtctcagctactcaggaggctgaggcaggagaatggcgtgaagccaggaggtggagcttgcagtgagccaagatcacgccactgcactccagcctgtgcgacagagcgagactccatctcggggggaaacaaaagatgaaagaactgaagtaaataaaagtcatatttttaatatgtaaaactttctttcaggctactgttgctgcatttgctgccagtgaaggacattctcatcctcgagttgttgagctaccaaaaacagaagagggccttggattcaatattatgggaggcaaagaacaaaactctccaatctatatatcccgaataattccaggtggaattgctgatagacatgggggcctcaaacgtggagatcaactcctctctgttaatggagtggtaaggatgaattttatttctatttgtagtgatctgttgtgaccacctgggggcgtatttgagtaataggagaaacctaagaaacttgtggtttagaaatgccttgagggaatcctaggcagtactattaatacagtgatccttttttttaagcactataagtgtattttgcagtgtaaattagcagtgcttaatgtcatttttatgacataagctctttattaaaggcaatacattaaattagaagtctaccctcattttactcttataaaatgccaattgcttgatctactgaaataataaggcatatagattaatatgctaattatttggaacttaaaagccagcttttagactataaacagaatatgatgtaagagaggatttcatatagattaaaatggtaaggcaggattatttcttagttttgtaatgttggaataatataacattaaaacttttcttcattatatatattgtaaacatttttgcattttgagttactttcaaaacttagatattagtgtatggttggttgtttttttttcccctagagtgttgaaggagaacatcatgaaaaagctgtagaactgctgaaagccgcacaaggaaaggttaaattagtggtacgatacacacccaaagtcttagaagaaatggagtcgcgctttgaaaaaatgagatcagcaaaacgcaggcaacagacctaatacatttcaaaacttgatatttcattttgcgttttagctagagaagttttccttgtgacttactaatggctgcaatgccaatgattgtaagaaaacaaacaaatttatcatgaaattctccttgtcattttataaatgcctattttaacatcatttatggttccagagatgcatacacttttttctgacaagaaaaagtaaaaggtgatgagggcaattctgtcctactgtttttacaggcctttttcaaatgcagattttgtcataaagttgttatagattttttaaaatgcttttttaatattaaaatgtacttttacattcttaatctttttttagaaaggaaaagttttcttcatttagctgctgatttaaaagtaaagttctccaattctttttttttgcttactctattttttttaacctgtgaaatttctttacagttttccaagaaattaagcataacagtctcatctacggcagttcattacactgtcaatgttaacatcattgctgcattttgtactttgaacacacacataatatatataaccagtggtaaatcatgactcagtacagtgcaagttttttcacttttacttaaacataatatataatggatattcatttatactgatttatgaaagtaagtttttaaacactgaaacaatcattgctaaaatacatattcttaatatttgagcattgaggcaagaggatgtaattgatagcattacttattacatccctatttatgttcaaccgtacatcaaattataaatgcaaaacaggttcagatttcatcttttgtgatttcttttaaatactattcatttttatttaaatgcacagtatttcccctatattttagtccttccattcctagagacaaaccagttatttggtggtgggaagtagctgaagcaaagaaggaaaagtaatacctttaacctcactagcttcaagagtagacattcttactagctcaatttaaataattgattttaaataggaagaaaagaggatatatttaagatacatagaaattatgatgtgaagtattcatgagaatctgtagattccatcaaaataagtaggaactcatactaaaattgttggatttaaagaggcaacttttgtttatgattcaaatatgggaatttgagaaatatttcatttgtccactggatgtcactattttactaaaaggcagctattagtgtgggactgtgactgaggtcttaaagactgaaagagttggggttcattttctgttacaact

SEQ ID NO: 46 - DNA, 4031 bp, Homo sapiens
tatatgaacatgtctatgagactgtggacatcagtagcagtcctgaagtgagagcgaacgctactgcaaaggtaaatttttttgttttccaaaagtaagaattcttcataaattagaagtttaaaatatggagttattaaattcataataaacttactttgaagactaacatgtatctttcaagctacaccaaatttctcaagtactaagaaataagacatttgtttctattgcctttacataaatgctgcatgataaatagcttacataagctattttatcatgcagtttagataatgcaatagaaatgtacttgcatacaatatgtatcatgcaatatataattgtgttgtatatgttatatatatgatactatataatattcattatacaaaatctaatcagaattttaagatatgaattactatcctcatcttattgatgaggaagcatgaggtgatttgccgcaaaccacacaaatagcatatgatagagctggggtacttccccgagttgatttttgctttcttctttacattatctgcatttctgtgccattgttttcctcaaataatttaggtattgacctcactattcatgatagggggtttgaacagggtaatatcagcagtcggtgacttaaattaatcatcagcagatagttttttatggatagttactggctcacaaaaggaaatggtggattctttgttgaatacaaatacttaaacatgtggatatagtttatcagtgtagaaaagaccagagaaacatggttttaattgctgagttgtgtgagtttgatagcctactgaatttctgagccttaattccattatctgaaaaatgaggcctttttcagagcttcgaagataacgggtattcagtaaatcttgatttcttcaaagataacgggtgttcagtaaatcttgatttctttcctcctccccatttttgtgatccatcacaaaaaaatggtactagataattaccctttaaagcaaagtgaaacaaaatctcaactttataattagtttggattagtctaaagttgagctttaaagaagatacggctctgtttcatcttctgtggggatttttagttgtgtctagttaactaaagcaacaaaacattcagattggctatatgtacctctctttttctcaatattgagttatttcttgacatcttagatatttagtatatagtacaaatagtacagaagccaaaatgattacatataagggcaactccatgttgattatataggtaggttgtgtcctgcacaaaggctcctgaaggagttgggagatccagatctaaagcccagggctgctagcatgctggggaaggggttttcctccttaccatgtacaatatcagtctgcccagtaagtctgcttgccaagccctgcgcatacaggactgcacaaaagagtgggcactgaatgggctaggaatgacctaaaaaatcataacaaaaaatcgtaacatttcctgcataactcgaaattattcatttgtcgtctctaaaataccttctgtttagcttaccttctcagaatcaccagtgaatttgtgagcattcagacgtcaaaaatacgtgctcaaaagtagtttttaaaaagagacaaaagaggccaggcgcagtggctcacgcctgtaatcccagcactttgggaggccaaggcgggcggatcacgaggtcaggagatcgagaccatcctggctaatgtggtgaaaccccatctctactaaaaaaaaatacaaaaaaattagccgggcgtggtggcaggcgcctgtagtctcagctactcaggaggctgaggcaggagaatggcgtgaagccaggaggtggagcttgcagtgagccaagatcacgccactgcactccagcctgtgcgacagagcgagactccatctcggggggaaacaaaagatgaaagaactgaagtaaataaaagtcatatttttaatatgtaaaactttctttcaggctactgttgctgcatttgctgccagtgaaggacattctcatcctcgagttgttgagctaccaaaaacagaagagggccttggattcaatattatgggaggcaaagaacaaaactctccaatctatatatcccgaataattccaggtggaattgctgatagacatgggggcctcaaacgtggagatcaactcctctctgttaatggagtggtaaggatgaattttatttctatttgtagtgatctgttgtgaccacctgggggcgtatttgagtaataggagaaacctaagaaacttgtggtttagaaatgccttgagggaatcctaggcagtactattaatacagtgatccttttttttaagcactataagtgtattttgcagtgtaaattagcagtgcttaatgtcatttttatgacataagctctttattaaaggcaatacattaaattagaagtctaccctcattttactcttataaaatgccaattgcttgatctactgaaataataaggcatatagattaatatgctaattatttggaacttaaaagccagcttttagactataaacagaatatgatgtaagagaggatttcatatagattaaaatggtaaggcaggattatttcttagttttgtaatgttggaataatataacattaaaacttttcttcattatatatattgtaaacatttttgcattttgagttactttcaaaacttagatattagtgtatggttggttgtttttttttcccctagagtgttgaaggagaacatcatgaaaaagctgtagaactgctgaaagccgcacaaggaaaggttaaattagtggtacgatacacacccaaagtcttagaagaaatggagtcgcgctttgaaaaaatgagatcagcaaaacgcaggcaacagacctaatacatttcaaaacttgatatttcattttgcgttttagctagagaagttttccttgtgacttactaatggctgcaatgccaatgattgtaagaaaacaaacaaatttatcatgaaattctccttgtcattttataaatgcctattttaacatcatttatggttccagagatgcatacacttttttctgacaagaaaaagtaaaaggtgatgagggcaattctgtcctactgtttttacaggcctttttcaaatgcagattttgtcataaagttgttatagattttttaaaatgcttttttaatattaaaatgtacttttacattcttaatctttttttagaaaggaaaagttttcttcatttagctgctgatttaaaagtaaagttctccaattctttttttttgcttactctattttttttaacctgtgaaatttctttacagttttccaagaaattaagcataacagtctcatctacggcagttcattacactgtcaatgttaacatcattgctgcattttgtactttgaacacacacataatatatataaccagtggtaaatcatgactcagtacagtgcaagttttttcacttttacttaaacataatatataatggatattcatttatactgatttatgaaagtaagtttttaaacactgaaacaatcattgctaaaatacatattcttaatatttgagcattgaggcaagaggatgtaattgatagcattacttattacatccctatttatgttcaaccgtacatcaaattataaatgcaaaacaggttcagatttcatcttttgtgatttcttttaaatactattcatttttatttaaatgcacagtatttcccctatattttagtccttccattcctagagacaaaccagttatttggtggtgggaagtagctgaagcaaagaaggaaaagtaatacctttaacctcactagcttcaagagtagacattcttactagctcaatttaaataattgattttaaataggaagaaaagaggatatatttaagatacatagaaattatgatgtgaagtattcatgagaatctgtagattccatcaaaataagtaggaactcatactaaaatt

SEQ ID NO: 47 - DNA, 4047 bp, Homo sapiens
gagactccatctcaaataaataaataaataatctttctgccaggtgtgatggcccaagcctgtaatcccagcaccttgggaagctgaggtgggtggatcatgaagtcaggagtttgaggccagcctgaccaacagggtgaaaccctgtctctactaaaaatacaaaaattagccgagcatggtggtggactcctgtaatcccagctactcaggaggctgaggcaggagacttgcttgaacctgggaggcagaggttgcagtgagtggagattgcgccactgcactccagcctgggcaacagagtgagactccatctcaaataaataaataaatatctttctttactacatttattcatagttttctatctgcaaacacgaagaaggccatactaactctataaagaaaaatttccagtccttgagtgtaacgaaatcaggaacttctacttaagtcaaaaggaagcaaagcaataatagaatactgggcattgtagtaccaggggtacaaaaacagtataccaaaacagtttttggaaaaataaaagtagagatagttaacagtgttatagctgacttcctgaatcttctaaaatgtctcaattcataaaacacttatcctcacacttctcagtgagaattccctaatgtgcttcatacatttgtataaatgtatacaacctcttagggttttttttgtttgtttgtttgtttttgttttgtttggttttttgtagatggagtttcactcttgtcacccaggctggagtgcagtggcacaatctcagctcactgcaacctccacctcctgggatcaagcgcttctcctgcctcggcctcccaagtagctgggattacaggcacccgccaccatgcctggctaatttttgtattttttttagtagagttggggtttcaccatgttggccaggctggtcttgaactcttgacctcaggtgatccacccgcctcggcctcccaaagtgctgggattacaggcataagccactattcccagccaatatttcttatgattaattggtaccaatgtaacataacacttttgcttgctaagcccttttttatgtattttgtggttcagttgttaactgaactcataactcttcctcataacccttatatggaaggtactgttatttccattgtacagtgaaagaaactgagacataaggacatcatgtaacttgcccaaggtcacacaggtggtattgagaccagattgataaagctaattgtttttatttttcttttttgtaaacataagtgttggagcttgtttgaattaacagtgttaattaagttgaaaaaaaatcagtttatttcatttgtactgcttgttttttgcatttttatggttgttttaaatgtgtccctgccactaactgcatctgctctcgagtggttatctacctatgtatcatgtttctttcgaggaatgaccagtgattttactagcttatagtgccttgtactgttcagtgctttggttactaataataattaggtaaatttttattgactagtttctgacaatattgctagcttttctgaagcagtacaatgttcatgtatcggtcacatttgagtcacagtcctttccgatgacatttggtattttgtgttcaatttgcctgtgtttctccaaggtcttattttatgcttctgtaatctcagtagtttttcctatctactgtaaaatttagtgttcttacattttacattctcaccctccatgtgtgtacacacacacagtctccttcccaccaaatgtgcaaattcaatgctttttttcccctcgattgtctgtatattatttgcccttgaggaatgaatcctaactgccccactgttacataggcattgagaaaacccttggagaaaattatctgtgtgtgtgtttaactctagatatttgtagagcaattgaattattggaaaaactacaaaggagtggagaagtaccaccacagaaacttcaggctttgcaaagagtccttcaaagtgaattctgcaatgctgtgagagaggtgagtaaacatcattaaaatttacaaaaatttgagttaattaggtcagataatactctaaatttgggttcaacatttcttaagaaaaactttagaaaacattaaaaccagtccctctcatttttggaatttctgataaaaccattttataaagatgcataactttgcctgaaattttaacttcacagagaactcaagcatggtatattctgagatataactttggcttttacaggtatatgaacatgtctatgagactgtggacatcagtagcagtcctgaagtgagagcgaacgctactgcaaaggtaaatttttttgttttccaaaagtaagaattcttcataaattagaagtttaaaatatggagttattaaattcataataaacttactttgaagactaacatgtatctttcaagctacaccaaatttctcaagtactaagaaataagacatttgtttctattgcctttacataaatgctgcatgataaatagcttacataagctattttatcatgcagtttagataatgcaatagaaatgtacttgcatacaatatgtatcatgcaatatataattgtgttgtatatgttatatatatgatactatataatattcattatacaaaatctaatcagaattttaagatatgaattactatcctcatcttattgatgaggaagcatgaggtgatttgccgcaaaccacacaaatagcatatgatagagctggggtacttccccgagttgatttttgctttcttctttacattatctgcatttctgtgccattgttttcctcaaataatttaggtattgacctcactattcatgatagggggtttgaacagggtaatatcagcagtcggtgacttaaattaatcatcagcagatagttttttatggatagttactggctcacaaaaggaaatggtggattctttgttgaatacaaatacttaaacatgtggatatagtttatcagtgtagaaaagaccagagaaacatggttttaattgctgagttgtgtgagtttgatagcctactgaatttctgagccttaattccattatctgaaaaatgaggcctttttcagagcttcgaagataacgggtattcagtaaatcttgatttcttcaaagataacgggtgttcagtaaatcttgatttctttcctcctccccatttttgtgatccatcacaaaaaaatggtactagataattaccctttaaagcaaagtgaaacaaaatctcaactttataattagtttggattagtctaaagttgagctttaaagaagatacggctctgtttcatcttctgtggggatttttagttgtgtctagttaactaaagcaacaaaacattcagattggctatatgtacctctctttttctcaatattgagttatttcttgacatcttagatatttagtatatagtacaaatagtacagaagccaaaatgattacatataagggcaactccatgttgattatataggtaggttgtgtcctgcacaaaggctcctgaaggagttgggagatccagatctaaagcccagggctgctagcatgctggggaaggggttttcctccttaccatgtacaatatcagtctgcccagtaagtctgcttgccaagccctgcgcatacaggactgcacaaaagagtgggcactgaatgggctaggaatgacctaaaaaatcataacaaaaaatcgtaacatttcctgcataactcgaaattattcatttgtcgtctctaaaataccttctgtttagcttaccttctcagaatcaccagtgaatttgtgagcattcagacgtcaaaaatacgtgctcaaaagtagtttttaaaaagagacaaaagaggccaggcgcagtggctcacgcctgtaatcccagcactttgggaggccaaggcgggcggatcacgaggtcaggagatcgagaccatcctggctaatgtggtgaaaccccatctctactaaaaaaa

SEQ ID NO: 48 - DNA, 4046 bp, Homo sapiens
tcacttgaaccctggaggcagaggttgcagtgagccaagatcgtaccactgcaccccagcctcagcaacagagggagactccatctcaaataaataaataaataatctttctgccaggtgtgatggcccaagcctgtaatcccagcaccttgggaagctgaggtgggtggatcatgaagtcaggagtttgaggccagcctgaccaacagggtgaaaccctgtctctactaaaaatacaaaaattagccgagcatggtggtggactcctgtaatcccagctactcaggaggctgaggcaggagacttgcttgaacctgggaggcagaggttgcagtgagtggagattgcgccactgcactccagcctgggcaacagagtgagactccatctcaaataaataaataaatatctttctttactacatttattcatagttttctatctgcaaacacgaagaaggccatactaactctataaagaaaaatttccagtccttgagtgtaacgaaatcaggaacttctacttaagtcaaaaggaagcaaagcaataatagaatactgggcattgtagtaccaggggtacaaaaacagtataccaaaacagtttttggaaaaataaaagtagagatagttaacagtgttatagctgacttcctgaatcttctaaaatgtctcaattcataaaacacttatcctcacacttctcagtgagaattccctaatgtgcttcatacatttgtataaatgtatacaacctcttagggttttttttgtttgtttgtttgtttttgttttgtttggttttttgtagatggagtttcactcttgtcacccaggctggagtgcagtggcacaatctcagctcactgcaacctccacctcctgggatcaagcgcttctcctgcctcggcctcccaagtagctgggattacaggcacccgccaccatgcctggctaatttttgtattttttttagtagagttggggtttcaccatgttggccaggctggtcttgaactcttgacctcaggtgatccacccgcctcggcctcccaaagtgctgggattacaggcataagccactattcccagccaatatttcttatgattaattggtaccaatgtaacataacacttttgcttgctaagcccttttttatgtattttgtggttcagttgttaactgaactcataactcttcctcataacccttatatggaaggtactgttatttccattgtacagtgaaagaaactgagacataaggacatcatgtaacttgcccaaggtcacacaggtggtattgagaccagattgataaagctaattgtttttatttttcttttttgtaaacataagtgttggagcttgtttgaattaacagtgttaattaagttgaaaaaaaatcagtttatttcatttgtactgcttgttttttgcatttttatggttgttttaaatgtgtccctgccactaactgcatctgctctcgagtggttatctacctatgtatcatgtttctttcgaggaatgaccagtgattttactagcttatagtgccttgtactgttcagtgctttggttactaataataattaggtaaatttttattgactagtttctgacaatattgctagcttttctgaagcagtacaatgttcatgtatcggtcacatttgagtcacagtcctttccgatgacatttggtattttgtgttcaatttgcctgtgtttctccaaggtcttattttatgcttctgtaatctcagtagtttttcctatctactgtaaaatttagtgttcttacattttacattctcaccctccatgtgtgtacacacacacagtctccttcccaccaaatgtgcaaattcaatgctttttttcccctcgattgtctgtatattatttgcccttgaggaatgaatcctaactgccccactgttacataggcattgagaaaacccttggagaaaattatctgtgtgtgtgtttaactctagatatttgtagagcaattgaattattggaaaaactacaaaggagtggagaagtaccaccacagaaacttcaggctttgcaaagagtccttcaaagtgaattctgcaatgctgtgagagaggtgagtaaacatcattaaaatttacaaaaatttgagttaattaggtcagataatactctaaatttgggttcaacatttcttaagaaaaactttagaaaacattaaaaccagtccctctcatttttggaatttctgataaaaccattttataaagatgcataactttgcctgaaattttaacttcacagagaactcaagcatggtatattctgagatataactttggcttttacaggtatatgaacatgtctatgagactgtggacatcagtagcagtcctgaagtgagagcgaacgctactgcaaaggtaaatttttttgttttccaaaagtaagaattcttcataaattagaagtttaaaatatggagttattaaattcataataaacttactttgaagactaacatgtatctttcaagctacaccaaatttctcaagtactaagaaataagacatttgtttctattgcctttacataaatgctgcatgataaatagcttacataagctattttatcatgcagtttagataatgcaatagaaatgtacttgcatacaatatgtatcatgcaatatataattgtgttgtatatgttatatatatgatactatataatattcattatacaaaatctaatcagaattttaagatatgaattactatcctcatcttattgatgaggaagcatgaggtgatttgccgcaaaccacacaaatagcatatgatagagctggggtacttccccgagttgatttttgctttcttctttacattatctgcatttctgtgccattgttttcctcaaataatttaggtattgacctcactattcatgatagggggtttgaacagggtaatatcagcagtcggtgacttaaattaatcatcagcagatagttttttatggatagttactggctcacaaaaggaaatggtggattctttgttgaatacaaatacttaaacatgtggatatagtttatcagtgtagaaaagaccagagaaacatggttttaattgctgagttgtgtgagtttgatagcctactgaatttctgagccttaattccattatctgaaaaatgaggcctttttcagagcttcgaagataacgggtattcagtaaatcttgatttcttcaaagataacgggtgttcagtaaatcttgatttctttcctcctccccatttttgtgatccatcacaaaaaaatggtactagataattaccctttaaagcaaagtgaaacaaaatctcaactttataattagtttggattagtctaaagttgagctttaaagaagatacggctctgtttcatcttctgtggggatttttagttgtgtctagttaactaaagcaacaaaacattcagattggctatatgtacctctctttttctcaatattgagttatttcttgacatcttagatatttagtatatagtacaaatagtacagaagccaaaatgattacatataagggcaactccatgttgattatataggtaggttgtgtcctgcacaaaggctcctgaaggagttgggagatccagatctaaagcccagggctgctagcatgctggggaaggggttttcctccttaccatgtacaatatcagtctgcccagtaagtctgcttgccaagccctgcgcatacaggactgcacaaaagagtgggcactgaatgggctaggaatgacctaaaaaatcataacaaaaaatcgtaacatttcctgcataactcgaaattattcatttgtcgtctctaaaataccttctgtttagcttaccttctcagaatcaccagtgaatttgtgagcattcagacgtcaaaaatacgtgctcaaaagtagtttttaaaaagagacaaaagaggccaggcgcagtggctcacgcctgtaatcccagcactttgggaggccaa

SEQ ID NO: 49 - DNA, 47 bp, Homo sapiens
gaagggaaaattggtttgaataaaatacagatgtctattccgctaac

SEQ ID NO: 50 - DNA, 45 bp, Homo sapiens
gtcctcagagaaaaataagactaagaatcaacctttctaatgaga

SEQ ID NO: 51 - DNA, 81 bp, Homo sapiens
tgagacccaaagctgctggctgtgttatatttcacagttcacagttctctctctctctctctccccctctacacacacgcg

SEQ ID NO: 52 - DNA, 4047 bp, Homo sapiens
tgttcgaaagtgtcagccaatgatgtcaagcctcttgaacctgccttgggcccattcacgctctccagagtcccatgggtccgcacacctgggtaggccaagccaccttgtcctcggatgtttgcttctttcatgggggcagccttcatgcaaccaaagtatgaaataaccatagtaaggaaaaggatggtcatcactcttctcacctggtggaactgtagggagaaagcagaaacaagacagaaaactggttagggctttctttcaccgggatgccatgtggcccatctgattgtaattccaggccattctgcagggtcaaggtttttttatgtcttggtgataaactccagctgcaccagacacaaatcagtgtcagtagtgtgctgtatgtggtttaatataaaccagagacatgcagtgtttcccccaagatctagcatataaacctgagattagatggcttctaagcaagtgcaaaaattgtggcttcaagttctccttcttcccactttagcagctttgtaagtttaatttttaatgatctctgctcatgctgtcacgagaaacacaaaatcataaatgttactaagcaacaactgcaagtgtaattaatagtaatttttttcaagttagcaacatggtcctttgcaggaatgtgtgacaggaacagcagtggcctgaggggtctgatgggcctttctagctatgtgatgtctaggcatgaatagcacaataaaacagcagttggggaactataaggagcctttaaattgactttttttttcctcttcccacagagatactctattatagcaaagaagaaagataatttcattgagccatcctgttttacaggtaaggaaaccaaaggccatagaagacttgccttatgtcatgaagaaagtttatgttagaactcagggctcccaattccactgttctttattctacacctgggtggtcacaactgaaaatgttttgcttatttctaaacagaaatcattttttgacatgttcattttaatgatgtgtctatgcctggggctaatgtcatgaaaacaatgtgtctggtaaggagaaaactgaaaaagtcagcattaaaaagacatttaagtccatttcaaatgcctcccatatgcagactccactttatctcctccagttctctaaaacccttcactccttggctttttctggctaatacacacatctagctaagaaagctcaacttttctttttactagagatgttctctctgtgtgtgtgtgtgtgtgtgcgcgcgcgcgtgtgcgcgcgctctgagtttatcctacttttaaaaagctgagtggtgttttacacattttggaataggcagctagtgcttctttttctgcttttgaagtttcctgggaagtcccttaaaagcataccacaaaattaatctcttcctgtttgccagagggttgctctactctaaatttggctctacatctacaagcatgctctaggaagccaattaaaatggatgaacaagcaaaatgaaaacatacctatggaccaacccaaggttaccgtcaggtggtgaaggacttcagaatcacttacctgaagcattgtgtttctcagcagcaaagagtagcatccccagccctgaccctaattttattcctacttctcagttctgaggcatggacttacaaaaagacacatacatgcaatggccatcatgatatccaaataagtaggaaaaggaactgtgtttctgcccatgaagttttactgaattcaaaggcaacctacctccagtcaataggtcagaatgcagaaatggctgaaaactctggtattgaaaagcaaatgttctccacttttgtaagaaataacattttcaaccactaagagactttattaccatccctaaacacacaaaaaaatttcttttagatttactctcactttgcacgaatagcaaacatgcttagaactgcttagattgcacaatgttctcagattaggaagggaaaattggtttgaataaaatacagatgtctattccgctaacaactaaatctttgtgaatgttctgagtcctgtaccatcaaagaaatagatcgtccatgggggtttctatttctggtagattgtacttacacactgaatgaaaaagctttctcctaatattcccagtccaaataaaaacaacccaaggggcacctcttatttaggtcaataaaagtttgcaaatgtggaatactttagccatctacatcacactggtagagactttctgtgatcagctattttttaataccatatttaatcaaatctaagataccatcattgtgaaactcgacattttatatatcactaagaaagcaaaaatgcagcctgggtgaccagagtgaaactccatctcaaaaaaaaaaaaaaaagaattaatgaactatagtttaatacatatttactaagtgcccacactaactacttaaaaatggtccaaaatactgaggcatcttaagctgttggaaaattgttttgttttcaccactacagtaatgagtctttgaatgataccattttctatacttggcttctagtttactctgcctttcactgatcttatctttttattaataactttatgagaaaaataattaatgctttatatattgttctctcagttccatgagcaaatatttcagagggaaaattggcatctgagtaaatattacttggctttcattctgaagcccaaacatgggtattcctcaagctgagcatctgcatagaattaggaattaacacaatggtgacaaagtccaaccccacattgcaagccctgctctctgagtggcacttctgcaattctaactaactgtctactcacttgtaaggccttgaagttaagtgggtgcaacaccaaactcaatactttttgttggaacagtggtatctcctaccttttctaacaatggttccctgatattttgggcaacccaggcataggatagaaatcctggaatcaagtttgacaatatatttcctgcatagccttccaatccagtcagtaaagatgtcctgttaatttttcctttaaaatatttgtcctggccatccctttttatccatcccactgccaccatcttggctcagccctcaccacctcattttgtgaccacaacgtcccgatgctgtatcagacactctttctgctccattcaactctgatgaccacttcctgggtaaccaccctaatactattctcttacacaaaaactggcaatggcatttttgttctatctgctcaaatctaatgtcttctctctgatactcaactctctccaacatctgccctcacccttcttagctaactttctcaaactactcaatgcttcatcacttctgctccgatcaggacagagtccttggagtgccgtacacattactgcctcctgacttgttccattcctctgacaaactcctctctccctctcacttgctgccaaaatcttgcttatccttcatgatccagttcaagcatcaaatcatgcatgcccctttctctaattactccagcatacactgccttccttccctaaaattccacattacatcttacgtagtacttgattcccttctcacttgttttgttttgtttttttcccaagacagagtcttgctctgtcgcccaggctggagtgcaatggtgcaatctcggctcactgcaatctccacctcctgggttcaagcaattctcctgcctcagcaggaggtagctgggattacaggcgcccaccaccatgcccggctaatttttgtatttttagtagagacagggtttcaccatgttggccgagctggcctactcacttgttaattgttaaccgtatttgctcattctagtcagtcttcagctgaaaggtaagttctttgagggaatggatcatgtctgagcccccataatgcttaacagagaaaaatgtaatagcagtactcagtaaaaacttactgataggtttattaaactaagagaaaagacagtttggatataattttcgtaag

SEQ ID NO: 53 - DNA, 4045 bp, Homo sapiens
agctcccagctcttctgaagtgtcacggttcatttcaacagcacgagtaaggcagtttccaggccctgtgcataatgagccatgtggaccctattcaagaaactggctgtactccagaactactataaaatataaggaaaatattaacatcttagatgacaaaagatccatatggctggccagaaaatatctgcatcatttaagccattagaatgcacctatatggaaacattcaatttggcggtactgtgaacaacaggactgtgaaaacatctgtttatctccacccgttttcactaaacactgattcctatagaagacatgcaaactcaaataccaacatatttcatctaagcataggacagggactccatttttacatagttgctataataaatacaatacagtatttgttggtgataggattttggaagatgctctggatagctggaaaaataagtaaaatgtttctctttgtattaaacttgataaaaaataatagctaacatttattaatggtgaggtaaataatttgattatccaccatttatagctgaggaaactgaggcccagagagtttcggtggattccctaagatcacatacccattatgtggtggagagggaatatgaaccagtgctggcttgctatgcctctttccatatggggtcagacatagatgtggtgtcttataatgtgagggaggtctacttggcagaaatatcctgcagaccctatatgccagtttcttatttatttaaacaaagccccatatgagcatttctgataagcagtttgtttacacactaattccacagaggttaaatataaccctaatgtttctttgttgctactctgtttccagtattgaattattaccacaaggtaccaaccatatatgcatacttaatagggtattttgtcaaaactatgcatgaaggtcatttgtttgagatgtcagaacattttcccgtgagaagatctcattgggcattgaaacagaaccacatgctcttcagaccagcaaccgcgactaccaaatactcctctgtcaactctacttgagtaagaacgctttcaattaaggcctaagtgtcaacatgcctttaaaaaaaatcgtggtgacacaaaatctttctttttagcacccaacagaatcccttcaaagcctcgtggtctgacaccctatgctacgtgacttgtgacccatccatttgtcatgttcttcgggaatgtggctaaggggctaagatgtgacttgaaaagaaaggtagaacaagatcatctcaaatttattatcaaggaatagttcagaaaacgacttcagaccacagagacagcagaacagatggtccggcatggatagagcatcagacactcacagactgtgccaacaagagccatcgagtcaaaacagccaaaggaaggagggtcatggaatgggttctctcacaccaaactgatgcccagaggccctcagcatgaataacaaaggcaaccagacccacaagccatactgagtggatacaaaacctatacctaggctgacatcccaaatgtgtgtggcaagttagatgatgatggcacaaaagacagaacaccttgcttctggccattgtcagctcttggaagagagcacacttttagaggagcagctgcaaggagcctgagaacaaaactggaaatgtctgttatgaaagccttcacaggtattattaacaaaagaaaatgtctatttgtcaatggtgtttcagctagattttggcagtccattcttatgcccaggaatgacctcttgtgtagactggatacagtcatcaatgcaactgtccaggtgcaactcttctataaaggggaagaggagtgactttcccctatacagtggccctgtcaaaattctataaaaaatattgtccatttaaattaaataaccactgtgcccggctccatttaccacacttttctatgcagtggaactgaaggggatttttttttttgctgtcctcagagaaaaataagactaagaatcaacctttctaatgagaatggtaaggagttatgtggggatgacctggaatatatgctgctcaaatggtggagatgttatctaggccgtaaatcatggcatttttatatgatcccctatttgcctaatgcaggaaaccacttggcaactttaaggaaaaagtctagcaataatgcatcatagttcaatgtttatattgtacttggacagtttaaatttatcttataaagtactaattatttaattacaaatgttgagtaagtgtaaaatcattcctcaaaaaagcatcccttgagtatgaaagttccaagcttagcaagacatccctgtgatttgggatacatctcttgaactcagtcctgaaaataatgttaatagctgagaaaagagcattgaaagccttatacacagtgtgttgtagtgaaacaattttctttttggttctaaaaaacactgttgtgctctttagatccagcatggctagttagatgaataatgaatgcatgttcaactttctgctacaggaaattctgcaagtggcaacgtgggtccattccgtgtgtgtcactagagctggcgcaagcccatggccatggtgaggcagcgtttccactggaactaatctgatacctgcaccagctcttgcaactgtgcagtgttcccactgcaaactacggatggggtaaaagactgctcacctcctatttctcatctaatctcacacactctgtttgatgaggctatggagaaacaggtcttctcatacactaaaggtgggagtacaaacaattcaagccctgtgcaggacaattaggcaatacctatcaaaattatacatgatttttcctgctgacccagcaattccacttctgggaataattgacagatataggtgcatatgtacaaaatgatggaaagctctctggtatatattagtaagtgataaaacaaggtgtaaaatagtgtatatatggctactaccttttgttttaaaaatgggggaaaatggtggagcttgcggtgagccgagatcgtgccactgcactccagcctgggcgacagagcgagactccgtctcaaaaaaaaaacagggtggggtgggggggaaataatagtacatactcatatttacctgtatctatataaaacacactatcaaggattcacaagaaactaatacaaatgatcaccttatagatggtatgtattgggggatactgaggtgagcagggtataagtggggcaagacttttcagtgtaaacttcttttaaattttattttgatttttgaataatgtaaattaactgtcaaataattaaattaaaaataaccaatttattaacaaaacatttaatctagtggctttacttttgacacaagacaatctccaaatctccaccaatcaccaaaaacagagatttacaccagttcctttgcttgtttttcctggtaatgactacaattaagaagtcctgtgggtgccatctcagttttggagatatttccctagaagaaactgattcaaggtgggacaattgggtatagagaatagtccctgggaccgggggctgaagtcctgaattctggtcctgcctaactcccactttctattaagctgaccctgtgaaacggctgatacatgaccattttttaccaacaaattagacaaattcatgggtgatcaaattcaaaaaccctgttgccttaccactgtaatatgatgaggacacgtatacacaccctgcctaactcacagcatcacaccagggattgtcaacatatgggaaagagctttgtacattgtaaaggtcaaccctacaaacagcagctgtgaaacacaacacaaccctgagggggtggccatggccaaacataggaggggaaaaggacccagtctcaaaagcatctgagatactgagatagtgcagaggaatgaaatcttccaaaagatggaatctaaacataaacagacatcaagagcgggctgacttgcagtggaagatgtggttaaatgactc

SEQ ID NO: 54 - DNA, 4081 bp, Homo sapiens
aattccacatgcaacccccacccccatacacactcacaagatctgaatatggtaacaaggaaatcctagtaactgtagcgttggaaaaatggttcatatggaaataagccatttggctagtaaagctggtgattttgttctctaggtggcactattacttcaatttttggtgagttgcttaaattacttggaactgcccgtttattttctttgaattcccattttataaattttaattttatacaagctagttgtaattaaacgacaggttgccttctaggttttatttcagtaagtcaatttgaagttcagtgattttttatcatataattttatgtttccttactatactgtcttagttttaagaaatcctcccttgcctgacctcctctctccaaaaatgcagaggcatgtcaaaaacacagagggtcgtcataaagtttccgtcagaccaaaggaaccaagatgaaagcatgtttaagagctactaggttctgggagatttcaaaatcaggacattactaccatgacaaccaatgaaaagttctttcaagtgaacctttggggaaaactatataacgttccttactctctaggctctctggaaataaacttttactttattatggctgtcactaaagcttgtaaatttactttgcttccttccaatcgttctcctgtcccacactcagccccctaactcacttaatgcaacccatcctcaaacatcaatctataaatgagacatcagggcaatgagccacttcttagcatctagtatatttgataagatttgtctcatcaagaggataagtgccctagagcttctacttgaacttaaatacttaatttaaatgaaagcttccacacttatctgaccagatactcaaatttttctacagaaaagagaataccttcctgttccacttaaagaacacacacatttaccactccccctcctctcccctgcaaaaggttttcaatgtcagtacattagtgagctccattttgcatctgccatcaataatgattccatatagtcaataattgggttcatgacctttctaaatctttacagtgtaaatattctggaaatccagtgaggcacttaagtataaaattatttaggattaaataattctatgccttaagtagaagtttaagaggacgtttaggacacacatgactaagcctacaaataccaaagccactctatgtttcctaggtttaaataccacatgcaaataacatacggatttcatttgccagcatcatttattgcctaacattactccatactaaacagagtaaatggatgcagagtgtaaccagtaagtttgctcattcacttttgaagctcatctgtgcatgttattcatcctaataaagaaaatttatcacaacacaacttgatgcgattcttgttcaaatgatttcctcttccattgaacaacagccagcacttaaaacctagaattccacagaattctctcctcgattcctctttaaaatgcaattcacagtttgagatcacagagcctgccagtggctgaatggctgcactagatggctgagagtccttcaattaagcaacaattttgcaattagtggaaactgagtgctctataacaattgtttgaaaacaagttgagacaagttagcaattaccctataaaagggacatattcacttttgttggataggcgagacccctcacacaaattgaactcttccacacagggagatgcaagttgaaaattaatgttttaatcactaaaatcaaatccatattatgggcacctgaaatgggagtgcctttcttctcaaaagatattcagagtttagctatcatccactctctatgctgtctgtttttattcaggaagtctgaaattgttcttctgtactccgggattaatttcctacatctcaaaatgttaataaactacttgaacatgacctttccattctgtaaatttccttaagagtaagtctacgattgagacccaaagctgctggctgtgttatatttcacagttcacagttctctctctctctctctccccctctacacacacgcgcacgtgcacgcacacacacacacacacacacagagagagagagagagagagagagagagagagcaccccaggttttagaagatgaatgtaaaaagaatgtaaacaagttctctgctatactatcaggtgggcgtgcccagctcactgtgcgtgctgaactacaaaccagtgctattcatataagaaatgatatcaatcatctacattttgactattgaaaagctgggactcttaaagattccaggaaaaagggaatagcttacattttcatggcgccccttttaaacaggaaacccacggactttgagccaggattttagaaatttgcatttctttttttacaggattttccctcctggtgagtcaaaatgaacaagaaataccccaggacctcccttccctccttggccattaatgagatgaaggcaattaactcacatagtataaatgaatcatttgaggtgatgactgcattttaggcaaatgatgactttcttggttccattggtttgcaagtaaaagttacacacattgaaaagacactgaaacagatttcctaaatgcttcattttctggatgcaccaatgttgacctactatacatgttaaatggttttaaaatatcaccttaaaataaaggaaacttccagctactaactcagctctgaatgggctatgaaaggctccaaaggtatgtgaaaaattactgttattttgctttaaaaaatgtgatgtctaagagtgtctgcaatgttctaatgcttcaaaacatgtacgtaagccttgtttatctggaaatcatttctttctgcttatatcatttataaatagaaaatgttctgtaataacttaaaatagttccacatacataatgcttttagtgtcataatacttactactggtctatatttaccaacatttatcacattttacaaaatgaagtagaagaaaaaaaagacaacgactttatggccctggaattccagtaatggtgaccaacatgttttaaattccagtaaaggttatggttacatttcaacaagtgtctctttccttttttttacctctcctgctaacccagaggtaaatttcccaaaaaaaaaaaaaaaaaaaaaaaaaaaaaagtcttaagcaaggcatttgcaaaatcagaaaacaggaacaggagtttagtgattgtttttaaaaggtgctgttcccagggtcaaaactttgtggtgtaatttcaacatgctatgttacctattatgtgtaatgccttgaaacgctacatgccataacatcagaaatctccaacctaaaaattatgttgcatgagataagcattgaaggcacacacgttcatacaaattaaatctgtaattatgcctcaataagttaaaatgtaaagacatatcaaattgtaagaccaaaatggcttttgaccttacaacaaactcatataaaaatagatttttccataataataaaggggagagagagattttgcaggatattgagtcagtagggaggggtctcatttaatatcatgtcgccttttatatgcagttagaaaatcaacgttcccaattacatattactttgctttaaaagattactaggaggattaataaacactcagaaatatgcctttctttgcttctggccaagaacattcctgcgtgcttgtcggaaaatgttctttggttgctactgacattaaggagtaagtgcaggataactagaggaccctaaaataagatccaagaagccctaacacaccgccaatcgaggcttatcaaagctcccccagcgcgaggaaaacttgcatagaagccaaacaagaacgaggagtcaaaatccaccgacgacgagtcgcacgccccaccgagctggagtcagcagcaccattcaacaagtccctcctaccagctctctaagggatcccgcaaaaccttcctttaccacttccccacccccagcctcccgcccccagtagctgctcttggcagcatggccggc

SEQ ID NO: 55 - DNA, 76 bp, Homo sapiens
tacagaagcataaaataagaccttggagaaacacaggcaaattgaacacaaaataccaaatgtcatcggaaaggac

SEQ ID NO: 56 - DNA, 50 bp, Homo sapiens
gcttctgctgtgctcaccaagggagcgcgtgtgcggcgtgtgtctgcgaa

SEQ ID NO: 57 - DNA, 43 bp, Homo sapiens
ggagggcttacggttaacagacaaaataccgtaagcgcccttc

SEQ ID NO: 58 - DNA, 4076 bp, Homo sapiens
aagcagacttactgggcagactgatattgtacatggtaaggaggaaaaccccttccccagcatgctagcagccctgggctttagatctggatctcccaactccttcaggagcctttgtgcaggacacaacctacctatataatcaacatggagttgcccttatatgtaatcattttggcttctgtactatttgtactatatactaaatatctaagatgtcaagaaataactcaatattgagaaaaagagaggtacatatagccaatctgaatgttttgttgctttagttaactagacacaactaaaaatccccacagaagatgaaacagagccgtatcttctttaaagctcaactttagactaatccaaactaattataaagttgagattttgtttcactttgctttaaagggtaattatctagtaccatttttttgtgatggatcacaaaaatggggaggaggaaagaaatcaagatttactgaacacccgttatctttgaagaaatcaagatttactgaatacccgttatcttcgaagctctgaaaaaggcctcatttttcagataatggaattaaggctcagaaattcagtaggctatcaaactcacacaactcagcaattaaaaccatgtttctctggtcttttctacactgataaactatatccacatgtttaagtatttgtattcaacaaagaatccaccatttccttttgtgagccagtaactatccataaaaaactatctgctgatgattaatttaagtcaccgactgctgatattaccctgttcaaaccccctatcatgaatagtgaggtcaatacctaaattatttgaggaaaacaatggcacagaaatgcagataatgtaaagaagaaagcaaaaatcaactcggggaagtaccccagctctatcatatgctatttgtgtggtttgcggcaaatcacctcatgcttcctcatcaataagatgaggatagtaattcatatcttaaaattctgattagattttgtataatgaatattatatagtatcatatatataacatatacaacacaattatatattgcatgatacatattgtatgcaagtacatttctattgcattatctaaactgcatgataaaatagcttatgtaagctatttatcatgcagcatttatgtaaaggcaatagaaacaaatgtcttatttcttagtacttgagaaatttggtgtagcttgaaagatacatgttagtcttcaaagtaagtttattatgaatttaataactccatattttaaacttctaatttatgaagaattcttacttttggaaaacaaaaaaatttacctttgcagtagcgttcgctctcacttcaggactgctactgatgtccacagtctcatagacatgttcatatacctgtaaaagccaaagttatatctcagaatataccatgcttgagttctctgtgaagttaaaatttcaggcaaagttatgcatctttataaaatggttttatcagaaattccaaaaatgagagggactggttttaatgttttctaaagtttttcttaagaaatgttgaacccaaatttagagtattatctgacctaattaactcaaatttttgtaaattttaatgatgtttactcacctctctcacagcattgcagaattcactttgaaggactctttgcaaagcctgaagtttctgtggtggtacttctccactcctttgtagtttttccaataattcaattgctctacaaatatctagagttaaacacacacacagataattttctccaagggttttctcaatgcctatgtaacagtggggcagttaggattcattcctcaagggcaaataatatacagacaatcgaggggaaaaaaagcattgaatttgcacatttggtgggaaggagactgtgtgtgtgtacacacatggagggtgagaatgtaaaatgtaagaacactaaattttacagtagataggaaaaactactgagattacagaagcataaaataagaccttggagaaacacaggcaaattgaacacaaaataccaaatgtcatcggaaaggactgtgactcaaatgtgaccgatacatgaacattgtactgcttcagaaaagctagcaatattgtcagaaactagtcaataaaaatttacctaattattattagtaaccaaagcactgaacagtacaaggcactataagctagtaaaatcactggtcattcctcgaaagaaacatgatacataggtagataaccactcgagagcagatgcagttagtggcagggacacatttaaaacaaccataaaaatgcaaaaaacaagcagtacaaatgaaataaactgattttttttcaacttaattaacactgttaattcaaacaagctccaacacttatgtttacaaaaaagaaaaataaaaacaattagctttatcaatctggtctcaataccacctgtgtgaccttgggcaagttacatgatgtccttatgtctcagtttctttcactgtacaatggaaataacagtaccttccatataagggttatgaggaagagttatgagttcagttaacaactgaaccacaaaatacataaaaaagggcttagcaagcaaaagtgttatgttacattggtaccaattaatcataagaaatattggctgggaatagtggcttatgcctgtaatcccagcactttgggaggccgaggcgggtggatcacctgaggtcaagagttcaagaccagcctggccaacatggtgaaaccccaactctactaaaaaaaatacaaaaattagccaggcatggtggcgggtgcctgtaatcccagctacttgggaggccgaggcaggagaagcgcttgatcccaggaggtggaggttgcagtgagctgagattgtgccactgcactccagcctgggtgacaagagtgaaactccatctacaaaaaaccaaacaaaacaaaaacaaacaaacaaacaaaaaaaaccctaagaggttgtatacatttatacaaatgtatgaagcacattagggaattctcactgagaagtgtgaggataagtgttttatgaattgagacattttagaagattcaggaagtcagctataacactgttaactatctctacttttatttttccaaaaactgttttggtatactgtttttgtacccctggtactacaatgcccagtattctattattgctttgcttccttttgacttaagtagaagttcctgatttcgttacactcaaggactggaaatttttctttatagagttagtatggccttcttcgtgtttgcagatagaaaactatgaataaatgtagtaaagaaagatatttatttatttatttgagatggagtctcactctgttgcccaggctggagtgcagtggcgcaatctccactcactgcaacctctgcctcccaggttcaagcaagtctcctgcctcagcctcctgagtagctgggattacaggagtccaccaccatgctcggctaatttttgtatttttagtagagacagggtttcaccctgttggtcaggctggcctcaaactcctgacttcatgatccacccacctcagcttcccaaggtgctgggattacaggcttgggccatcacacctggcagaaagattatttatttatttatttgagatggagtctccctctgttgctgaggctggggtgcagtggtacgatcttggctcactgcaacctctgcctccagggttcaagtgattctcgtgcctcagtctcccgagtagctgggactacaggtacctgccaccaggcccagctaatttttgtatttttagtagagacagggtttcaccatgttggccaggctagtctcaaactcctgacctcaagtgatctgcttgcctcggcctcccaaagtgctgggattacaggcgtgagccactgcgcctggccagaaagcagatttttaaatttgaggtaaagaaagcttaaacttaaaaagttaatcaaatgcaatggaagcaaatagaccttcaccattctgatttcccatcaccagaatgaccgatacat

SEQ ID NO: 59 - DNA, 4050 bp, Homo sapiens
aggcactctaaatcatcatatgtgatcaggcactgtattgtaattgtactgtaggattttctactttaggatcgttgggagtgtttgttaatagagtctgttagaattctaaacaagaatcagaggtgatgtaatctgactttcttaccctgctaaatggcaaccactagtacagctgtcttggtaacagtgggggattcattaggaccttcttcagataccacagatatcaagatctgcagatgctcaagtctctgatataaaatgatatagtattggcataaaacctatgcatatcccccctctatactttaaataatctctagattacttacaatatctgacgctacgtaaacagttgttatatcacattgtttagggaataaggacaagaaaaaaatgtctgtacatgttctatacagacacgatttttttctgagtattttcaatctgcagttggttgaaatatggaacccatggatatggagggctgactgtaattcatcctactaagaggtggagtcttctactgaagaacagaaaagaaatctgtaacagcaaaaaacaaagccaagactatcaaaactaaatgccacagaagttccacattttgtgttgcatttaaaaatacaaagaccggccgggtgcagtggctcacgcctgtaatcctagcactttgggaagccgaggcgggcggacttcctaagctcaagagttcgagaccagcctgggcaacacggtgaaaccccgtctctactaaaatacaaaaaacagccgggtttggcggcgttcgcctgcagtcccagctactcgggaggctgaggcaggagaattgcttgaacccgggaggcagaggttgcagtgagccgagatcgcgccactgcactccagcctgggcgacagagcaagactacgtctccaaacagcaacaacaaaaacacaaaagaccaatacgttagaatcttaactagctttcaaagaaaaaacttactcctgttaacaccaaacagatttgctcccatctataaaacacagtgccactgtgctcaagaggaagatgtcagagacttaggcctaactcggcaagtcttcccagagtagctagtcctctaaaatgatgctttaataggcttaacggaaacaatctcatttacagtgaggcttccaaatggtgaacacggtaaagagcaaatcagcaacattaagtgcacatttgtttgtgggaaggcattaggaaagaggtttttctaagtacagtaattctaaaaatgtgttttcttagggaacaatagtaatatttagactaattgcaaatgttaatatgtgcaatataatttcagtctccatcctacatatacatttttttttaccaccagtactcaaaatgtttatttgtacttctcaattcctatcaatgatttctaatgctggtgtatgaaaagcatgcttgaaattgtttgaaataaaggacttagggacagagtggaatgctggaaatctgtaaaaggactggaaacgctggaatgctggaaatcatggtaggcgcatagccagttattttcgtaggcttctctatctctaattactcagcagaggtggttttattttccttgacagtctgctctaggaagcaatcagccaaccagtttgcaattgtagggtttgtaagaaatgaaaaacactgcacctgcaagtgttttagcatctaccactattcggcttacttacgtaacctccttcccaagaccaagtcagtaggattgtttttaaagcaacctctccatttctaggaggggcacaaaagctagcaaataccccaacccgaatacaagcgaggttgtggagaaagtaatgaaggagtttgtgtgcaaacagcggggaaaggaggttctgttgaattgtaccgtgtgtccgttctcgtgctgtacaggcaatgagtgtagtctgtgcgaaccgggtgtgtgacgtttgcttttcgggtgtacgggtctccgaatgctgcttctgctgtgctcaccaagggagcgcgtgtgcggcgtgtgtctgcgaagcgggcaggttgtgtttagttgtgctgtgccttggaacagtccgtgtgaacagaggagggcttacggttaacagacaaaataccgtaagcgcccttcctagagccaggcacagagacaacggcggcctctggcgccggcacaagggacagcgtggcccggatctcagagcctgggtcactcctcctcccctccagcgacacagcactcccccaacccttccgcccacctccgccgagcctcggctgcactcacctctctccagccgcacgggttcccctagcgccgccatcttctcccttaacctacagacccacaggaaatgacgacagaagggctgaggtgggggggcggggcctaggggaagccggaaaagtgagtaccggctagtatcgcgagatcaggaaggtggccgagtgtgtcgccgcggccatcagggtaagggtacctggacttgcggctttttaggtcggcctggctccgctccttccgcggtgacgaggtcccccggcctcctagggttgggaagagctgctttcctgactctcgttccctgcctcaggcttcccttatcccaatcgcttcgaacccttggctcagcgtagaggagtcaagcctggattctagtcccaccttgcccattagcagctctgtgacctgggactgttcacttaccctctctcagcctcagtttccgcatctgtacaacgagaggtcctatctcttaggtccttacaatttttaaactctgggattcggtggcaattaaatgtgtaatgacatgttgtcagttctcaatttgtgacagcattgctttaaatttaaaaatccacggcttgaatcttccctccaaatctgttaaggggtggaaagtacaaagagcatgaaacatatctgggtgagggagagaacaaggtgctttggtgcaccacaaagtaacaattttataagcagctgattcttataaaatcttaagtaaatgaaatattgtgaagcaaataatattcttaatgcattacagatttttgagccacttctgaaattttcgcgaaccaagaagaattttagtacttggatttgactaacatttatccaagcccttagtctgtactgatactgtggtaggtgtgtttacatccagcatttcaacacttcatgatgggactgttttaataacctgtttgcccctggtccaccctttccattcacctttagtattttcttctccaaatccatcatggatgccaccactatgctcctttttctccccttgaattctgatttcatcatcacaagttctgttcagaaactttcaatggtttctctcctgtttcctatttctaaagccttgcatactctgaccctaactcatccaactaacttcatttctcattaccactaagtgcaaccaccacttcagtccagatagtatagtttcaaccatatttattcctgattccaagtctttttgtttgttttagagacagagtttctctctgttgtccagactggagtgcagtggtgcaatcacagctcaagagagcctcctgtctcagtcttgccagtagcgaggactacaggcaagcaccaccatgcctggcaaatttttaaatttttagtagagatgggggtcttgctatgttgcccaggctggtctcaaactcctgagctcaagcagtcctcctgctttggcctcccgaagtgctgggattacaggcgtgggccactgtgccaggctccaaatcttcatttgtgttgttcttgtgtggaatgcccttcttcatcccttcctagtctccaaactttgtacacactcagttgaacccatttcgtgggtccctgctgaaggcatgccacttctaccaagccttttctccatattattccccttttttgtcctctgatggcctaaatacgttgcagtaacactcaggtgcttatctcttactcgttgtcatttttttttgctgcaaatgtgttcaagaaatgtttattaaacacc

SEQ ID NO: 60 - DNA, 4043 bp, Homo sapiens
aattctaaacaagaatcagaggtgatgtaatctgactttcttaccctgctaaatggcaaccactagtacagctgtcttggtaacagtgggggattcattaggaccttcttcagataccacagatatcaagatctgcagatgctcaagtctctgatataaaatgatatagtattggcataaaacctatgcatatcccccctctatactttaaataatctctagattacttacaatatctgacgctacgtaaacagttgttatatcacattgtttagggaataaggacaagaaaaaaatgtctgtacatgttctatacagacacgatttttttctgagtattttcaatctgcagttggttgaaatatggaacccatggatatggagggctgactgtaattcatcctactaagaggtggagtcttctactgaagaacagaaaagaaatctgtaacagcaaaaaacaaagccaagactatcaaaactaaatgccacagaagttccacattttgtgttgcatttaaaaatacaaagaccggccgggtgcagtggctcacgcctgtaatcctagcactttgggaagccgaggcgggcggacttcctaagctcaagagttcgagaccagcctgggcaacacggtgaaaccccgtctctactaaaatacaaaaaacagccgggtttggcggcgttcgcctgcagtcccagctactcgggaggctgaggcaggagaattgcttgaacccgggaggcagaggttgcagtgagccgagatcgcgccactgcactccagcctgggcgacagagcaagactacgtctccaaacagcaacaacaaaaacacaaaagaccaatacgttagaatcttaactagctttcaaagaaaaaacttactcctgttaacaccaaacagatttgctcccatctataaaacacagtgccactgtgctcaagaggaagatgtcagagacttaggcctaactcggcaagtcttcccagagtagctagtcctctaaaatgatgctttaataggcttaacggaaacaatctcatttacagtgaggcttccaaatggtgaacacggtaaagagcaaatcagcaacattaagtgcacatttgtttgtgggaaggcattaggaaagaggtttttctaagtacagtaattctaaaaatgtgttttcttagggaacaatagtaatatttagactaattgcaaatgttaatatgtgcaatataatttcagtctccatcctacatatacatttttttttaccaccagtactcaaaatgtttatttgtacttctcaattcctatcaatgatttctaatgctggtgtatgaaaagcatgcttgaaattgtttgaaataaaggacttagggacagagtggaatgctggaaatctgtaaaaggactggaaacgctggaatgctggaaatcatggtaggcgcatagccagttattttcgtaggcttctctatctctaattactcagcagaggtggttttattttccttgacagtctgctctaggaagcaatcagccaaccagtttgcaattgtagggtttgtaagaaatgaaaaacactgcacctgcaagtgttttagcatctaccactattcggcttacttacgtaacctccttcccaagaccaagtcagtaggattgtttttaaagcaacctctccatttctaggaggggcacaaaagctagcaaataccccaacccgaatacaagcgaggttgtggagaaagtaatgaaggagtttgtgtgcaaacagcggggaaaggaggttctgttgaattgtaccgtgtgtccgttctcgtgctgtacaggcaatgagtgtagtctgtgcgaaccgggtgtgtgacgtttgcttttcgggtgtacgggtctccgaatgctgcttctgctgtgctcaccaagggagcgcgtgtgcggcgtgtgtctgcgaagcgggcaggttgtgtttagttgtgctgtgccttggaacagtccgtgtgaacagaggagggcttacggttaacagacaaaataccgtaagcgcccttcctagagccaggcacagagacaacggcggcctctggcgccggcacaagggacagcgtggcccggatctcagagcctgggtcactcctcctcccctccagcgacacagcactcccccaacccttccgcccacctccgccgagcctcggctgcactcacctctctccagccgcacgggttcccctagcgccgccatcttctcccttaacctacagacccacaggaaatgacgacagaagggctgaggtgggggggcggggcctaggggaagccggaaaagtgagtaccggctagtatcgcgagatcaggaaggtggccgagtgtgtcgccgcggccatcagggtaagggtacctggacttgcggctttttaggtcggcctggctccgctccttccgcggtgacgaggtcccccggcctcctagggttgggaagagctgctttcctgactctcgttccctgcctcaggcttcccttatcccaatcgcttcgaacccttggctcagcgtagaggagtcaagcctggattctagtcccaccttgcccattagcagctctgtgacctgggactgttcacttaccctctctcagcctcagtttccgcatctgtacaacgagaggtcctatctcttaggtccttacaatttttaaactctgggattcggtggcaattaaatgtgtaatgacatgttgtcagttctcaatttgtgacagcattgctttaaatttaaaaatccacggcttgaatcttccctccaaatctgttaaggggtggaaagtacaaagagcatgaaacatatctgggtgagggagagaacaaggtgctttggtgcaccacaaagtaacaattttataagcagctgattcttataaaatcttaagtaaatgaaatattgtgaagcaaataatattcttaatgcattacagatttttgagccacttctgaaattttcgcgaaccaagaagaattttagtacttggatttgactaacatttatccaagcccttagtctgtactgatactgtggtaggtgtgtttacatccagcatttcaacacttcatgatgggactgttttaataacctgtttgcccctggtccaccctttccattcacctttagtattttcttctccaaatccatcatggatgccaccactatgctcctttttctccccttgaattctgatttcatcatcacaagttctgttcagaaactttcaatggtttctctcctgtttcctatttctaaagccttgcatactctgaccctaactcatccaactaacttcatttctcattaccactaagtgcaaccaccacttcagtccagatagtatagtttcaaccatatttattcctgattccaagtctttttgtttgttttagagacagagtttctctctgttgtccagactggagtgcagtggtgcaatcacagctcaagagagcctcctgtctcagtcttgccagtagcgaggactacaggcaagcaccaccatgcctggcaaatttttaaatttttagtagagatgggggtcttgctatgttgcccaggctggtctcaaactcctgagctcaagcagtcctcctgctttggcctcccgaagtgctgggattacaggcgtgggccactgtgccaggctccaaatcttcatttgtgttgttcttgtgtggaatgcccttcttcatcccttcctagtctccaaactttgtacacactcagttgaacccatttcgtgggtccctgctgaaggcatgccacttctaccaagccttttctccatattattccccttttttgtcctctgatggcctaaatacgttgcagtaacactcaggtgcttatctcttactcgttgtcatttttttttgctgcaaatgtgttcaagaaatgtttattaaacacctaatatataccaggtgccttgataggaataccaggtagagcaagacaaatgcaaacattgcccttatttcttcaaatattttttctttccattctct

SEQ ID NO: 61 - DNA, 48 bp, Homo sapiens
tttcctactaaagtagccagaacaacaatgagcatggaaggtagagaa

SEQ ID NO: 62 - DNA, 33 bp, Homo sapiens
cctcgcttcgcctatgaatccacctgcgcagag

SEQ ID NO: 63 - DNA, 42 bp, Homo sapiens
atgctctccctctacctcctcccctccaccacgcgtcctctc

SEQ ID NO: 64 - DNA, 43 bp, Homo sapiens
taccggtgatatgcacttctgacttatttctctccccccaacc

SEQ ID NO: 65 - DNA, 4048 bp, Homo sapiens
agattttattattaatgtatatgatcctaacaaaacattgtaatactgtttccattttatgattatgaaaactgggcttcaaaaagggtaggtgacaattagctatttgaaaatctctcatcggttagcaaagatcaaaatgattctaaagtagcactcctggaaatgaattgtgagactcatggccatctcaaagagttgtggtcaagatcttgtaagaaaatgtgtatgtaaaccatctgataatgggagacccagattaaatctgggtggtagctataagatggggaggcacaacttcataatggactttggaaccagaaaactttgggtttgaagtttagcttctccacttcagattttctgtgttagtttgggcaagttacttaaattctctgagctctagttttcttaatctatctctgagagttactttaagagttaagtaatatatgccaaatacaaaacaaataacagcactggatgaatgcagagtaaatgtcatcccacatcattataatttcccatggtgtagtaatgacaaacaggaagagtttcagtaatctcttgggttagtgaggtcagaacaggtatcttaagcaatgctgagttaatgaccagaatctgaactttttatctttttcaatggagtgatggattgctagggtaatggggttgtgctggtgatgctaaagataaacgttagagtaatagcaagctcagtcaatagaaacatgcttaccataccctggccttctcagtatttggtcctttccccacttgacagcttgtctaatggcaaatgtgaattttaaaagttttctcccaatgctgatttccttttgccaggaaggaaacaacaatggctaatgttgacatttactaaattaatatttctgaatctatgctgtgttaataagtgcttctcaagtgttctgttgttaaatatgtgtgggaaatgttacacagtagtacttgcatgctttctcaccagtatacatcacagacaccttcatatcacgtcagttttatagatatttcaaaatacattgatacttatcattatttcaaaattataatatttaccttgctgttagatcttatttaatgtattaaaaagcatatatattactatatcacacaatatattattttaaatgtttttataactgtacatcaatgccactggcttcctttgtaatcttatacatttatttcattcacttagaatttttttttttttttgagacaaagtctcactgtgtcatccaggctggagtgcagtggctaatctcggctcactgcaacctccacctcccagattcaagtgattctcgtgcctcagccttccaagtagctgggattaaaggtacatgccaccacgcccagctaattttttttttttggtaaagacagggttttgccatgttggccaggctggtctggaactcctgacctcaagtgatccacccgccttggcctcccaaagtgctgagattacaggtgtgagccgtcgcgcctggccccatttagacatttttatgagaagggtttacataagctttaccagactgccaagagagttgagtccatggcatgaaagtcattacagtgagcaattctttctttctttctttcttttttttttttttttttttgccaggctggagtgcaatggcatgatctcggcttactacagcctctgtctccatggttcaagttagtctcctacctcagcctcccaagtagctgagattacaggcatgaaccactaattttttgtatttttagtagagacagggttttgccatgttggccaggctggtctggaactcctgacctcaagtgatccactcacctcggcctcccaaagtgttgggattacaggcgttagccaccacactgggcatcagagcaattcttaaacattgattatggaagttattggcaagtaagaagtccttagcggaggaggaaggtgaaagcagaagaaatcattgtttcctactaaagtagccagaacaacaatgagcatggaaggtagagaacagtcaattcaagagcccctgtataattagaactccactgtgacttccctttttatttctcaattttttcccacattctctttcttttctctattcactcacactgcaatgccctatcccaaaggctttggatgtttgtgacacctttctgcaatcacctaatttgtgtattttttccccacagtaaccttgttacttagagacaggaggtggttgatatatttccttgaagcgggaggaatcaattctaactccttttggtactgatgagcatggtgctacaaggaaatttctagatagcataacattataacattcactctgggaacaaagatctcagagcattttctgccgctatttaggaaaattgttggatcacctttcccaggttgcgaagattttggagtggatttaacattcactcaaaggttaaaaactttgacaaagtacattttacttcctgtagtggtctgggaaatgcccagagtggatcaaaatgtcctatacaagctacagctttctcccagcttcaggctgaattcttaaatccagaggttgcatgttactaaactgctggtttttagacactagactttaaagattttttatttttaaattaatactttgtaatacattttgccatttgtctaaaatagaattcaagaatgatgtctgttatgcctagtgcatcagaagttattttaaatatgacatctttataaaagtcaatagctgcctcatcaaagggcaatcatgtctagtgtgggtggctgtgccaattgtttttgaactactgcagcaatctagccaatcccagggaatggcttgcagtctttctacacccacattttttttcttaattatctccaccaggctgagttagttaaggacagatctatagcatttcctggatgtcaaaatgcccacacaccttctgcaatccttgggctacctgcttcctttcatgtttcttttggcttgtccatctaattatctattatcatgtgtatataatgcattattcatgagacccaggcaatttcaggatgtaatatttttgattttaaaaggaaatgacctgaaaaattataacttctgcttgcacaaagaaaataagcagtaaatttgatagcaggtcttccatcgcaccacctgcttttaaaaataatccgcagaaatttgagatcattctctaaattaaaactttcctagccatcattccataaatgaacaggttcaacacctagattccttctattctgggttcaaatatgttactttgatttttttcatgatatacttcttaacaagttaaaaatttgcggtacccacccagaattgtaaatcaccaaaggttagggtaacttaggccttaatttcccctacactgcaagaaatagttatagactatatcttttatatcactcaaacttggaacggaagtggaatttagagtttattctgagaacatctcttttgttttatgtgtgaggaagcagagatcaagagtgactgattgacttttttgggtactgacaagcggttggaagtaaagcctaaactcaggcttttaatcttattcactgtgttctcttgaaaaaaggaatcttatgagtccagaggtctgtccccttctaaggattggagcaaataaagagaccagtctttgtctctaggccacaagatccaccaagatagggaccatttggtcttgcttgttcttgaatctccagattgtaatacagttcctggcacataatggcaaattatgtgttgccaattaatacttacaaaataaaattatgaatgctagagtctctatagaaagtataccttttgggcaaaatgggaaatgatcagccaagctcatgatccacataagtatcagaacatctaccaagataaacaagtacccagtgtccaagactgggatgaaattccagaggattgaaacaaaacaagccagcatgaattcatgtatcagatatgagctgggctaa

SEQ ID NO: 66 - DNA, 4033 bp, Homo sapiens
ggcctttgagagaagtatatttaataaaaaatatgctcagttagacatcattttaactgacagattgtaagcaatatgatcgagtgaatgttacttgagcaagtttgagcctggtcccaaaattacagaattacaaaataaaaaccctttgtaagtcatgctttaatgctggttttccctcatttctgtttcttggctgattatctattttgtggtcatccagtcccttgccttctctctcgctcactgcctgattttggaatgttgtttcttactaaagcttcccctagaggacaggccaggaaaaggaaagaaactaaattcaccagcttctcttcttattaagaatttagatcagaaatctgatagggaaagagtctggcaaatgaaaggggaagcttatttatgttgattttagatctttaaaagccttctttccaatgtacattaatagacaattgaaaaataatattttataagccaactaatcacttgcttttaaaatccccacttactaccttgagcatatacattagattatgttttaaaataactagtactctggttcagtgaaatgaaaatgatatgtgcaaagagaatgtcataatgatacctcccatttatggagtgcctgcttcccagtttgcaaagcccttatatatattctcttctatcctccaaaaattgctgtgttgtaggtcttactatcaatgacactgaaaaagctactggcaggatgctcatattctcatctgaatcaatactggtatactccattgggggagctagaccaagctaaaatctcacatacagaaatattaatatgcaagaccaaggggtataaaagtaggctaggttactgttaatttaatagcatctaggttaaaattctctctctttcctctttcttcccttcttctctccatcaccttctagtcttctgactgattccaaacaggacaattgaaatgtcttgccttcatgctgaagagctctttgtaaatacacataaacagtgaatatcaggtgcaccatttttaaagtgctattcatttccacaacagtttaggtgaaaccatgtcatcttacaagttgagtgtgtgtgtgtgtgtgtgtgtgtgtgtgtgtagaggatgacgtgacacttttgaggtttatttaagttgttaaagacctcaaggttacaagacttagactgttaagcatttttcctcccagagacacgaaatctacaattttctcgattcaactgtcaactaaattggcaagtcaactaaaaggataatattcccttaacgatgcattcatttgaagccctagcaactgtattaggcagcagcgagtattcgctagcaagggatggcgcggggagagggaactctgcaatttagagtgacagatgatttctttcccatccatcaagctgcctcaaaatgtcacaatatttacacctctttcttggtgaattagaatccagagacaagcagacagaaagaaaaaaataataattccggccggttgccgcctgattggaaaaagcaagcgttgcacctttaaattctgctcctccattccccgttccgcacaccacccccccccgcccctcccgggattttgcaataaatctcccagttctgcgttcagccctgcagatccgtatttaaaacagcaccatctgggaagggtgggtggcgatggtgatgcgggcgccttggagttcctttgcagcacgcttggaattgcatcagactgatcagaaatccccccgcccccaagctcagcccctcccgccacgctcccctgcccgcccctcccctcccctcccttcgcgtagatctgactgagaaaacgactggatctcggaacaatctgtgccccattcgctgcaggcttgctccgtaaaccctgccctacgctccctttgtgtgccgagcagcctatcaccgtcatctgatcctagcgcctgttttttatcttttccttctgaatttccacaatatcctcgcttcgcctatgaatccacctgcgcagagttgggattctttctttcgttcgttaaaacagtggtcttgagtttcggaaacagatttttcctacgttcccctcacccctaccccaagctcttgccttttaattaagaagagctgatcgggggaggagtccagaacgaccaaaccctggggcgaaaactgccaccgggcttggctctgtggccggaacaaaaggcctgagaagggggtgggggtgagggttataggagtgtggagagcctggtggcccccgcccaggggcgcctaagtccctgagctccctgaagagtggcaagaggataacgcagccgcgcgttccggcagttcgctgtcccccgggggtgcaggcgggggcgggagaggtagaacacaggtctgggcggctccgcgccgcttctatctcacccgccaagcccctcacctccacccaccgccagtcccctgcccacccgggtggcggcggcggctcagcgactagccggccgccctccaccggcgcctccggacgcaacctcgccctggcagggcggtctgcgcgtccagctgattggtggctctgtccagccgccgcacggagctaaaagtgttcttctccaccgcctccagccgcccaggccccctcgcccggcccgctctctggctcttcggtccggaaaggaccttctactcccaggcggaggctcccctttccctgagttaccccgactgactcggacctgggctcagtgaggcatccggcccggctggggagcggagcgcggtctcggcagctccccttcccttgagaaagcgggaaccctctaagccagcgcccgaaactcgcggggagggaggacagaagggaaaaaaaaaagaaaacccagaaagaagcatccagcgaggagcgagggcgacggagaggaagagatagaatgagggagggatggaggctggaggagggggcggggtggaagaaggggggcgggaaggagggagggagggggaaagagagggagggagggatacagagagaatgaatccttctcactagaagagctgaaattaccttgattcatttttttgtgttggaggtttagctttacctccttccctcttcccaacctccacctcctctccccaccgcacaccacctccaccgcctgattctaaatgctacaaagtcaaattttaggaattcgaatgttttgcaaaagcttcataattagtaatgaatctactgtacacacacacacacacaccagcaaagagaacggaaaagagggaggtgaagaggagaaaaagagagataaatcttacatttgaatcagacatttgcaggtccaagttaactaaactcattatatccgcaggaagactgagtttcttttttttctttctccctttgccccagggttctcacctagggcaattcaaactgggcaaataccaagaaacaaccccctctcatgctctccctctacctcctcccctccaccacgcgtcctctccggaagacagtatcaaaatagctcaagaattggggatgcaaggggtccccgccctggtgcttaccttctttgcggcttacaccaccccggtggctagatcctggagataaacacttgcatttcccaaagttaacccagtataccaacccggagcttgccaagagtctattccagcctacaccgctaggaagccaacttcagcgagctcaatgaggggaccaaactggggctcgctttccaaacgctccgctccaaaatctgactctctctccagccccgatctcagtgtgagccgaacctcagaaaagacgctttttaagggcgacacagggttggctttacagcggggccaagaagactacctgggggtaccgccacctcggacaaatccgttggctctgtccaaggtgctgaatggactcctatcgcccggattacacacccggcacagcaggaggaaaaggcttaaaaatctctaattaagtgatacttgatattgctctagacggtttcttc

SEQ ID NO: 67 - DNA, 4042 bp, Homo sapiens
agagacaagcagacagaaagaaaaaaataataattccggccggttgccgcctgattggaaaaagcaagcgttgcacctttaaattctgctcctccattccccgttccgcacaccacccccccccgcccctcccgggattttgcaataaatctcccagttctgcgttcagccctgcagatccgtatttaaaacagcaccatctgggaagggtgggtggcgatggtgatgcgggcgccttggagttcctttgcagcacgcttggaattgcatcagactgatcagaaatccccccgcccccaagctcagcccctcccgccacgctcccctgcccgcccctcccctcccctcccttcgcgtagatctgactgagaaaacgactggatctcggaacaatctgtgccccattcgctgcaggcttgctccgtaaaccctgccctacgctccctttgtgtgccgagcagcctatcaccgtcatctgatcctagcgcctgttttttatcttttccttctgaatttccacaatatcctcgcttcgcctatgaatccacctgcgcagagttgggattctttctttcgttcgttaaaacagtggtcttgagtttcggaaacagatttttcctacgttcccctcacccctaccccaagctcttgccttttaattaagaagagctgatcgggggaggagtccagaacgaccaaaccctggggcgaaaactgccaccgggcttggctctgtggccggaacaaaaggcctgagaagggggtgggggtgagggttataggagtgtggagagcctggtggcccccgcccaggggcgcctaagtccctgagctccctgaagagtggcaagaggataacgcagccgcgcgttccggcagttcgctgtcccccgggggtgcaggcgggggcgggagaggtagaacacaggtctgggcggctccgcgccgcttctatctcacccgccaagcccctcacctccacccaccgccagtcccctgcccacccgggtggcggcggcggctcagcgactagccggccgccctccaccggcgcctccggacgcaacctcgccctggcagggcggtctgcgcgtccagctgattggtggctctgtccagccgccgcacggagctaaaagtgttcttctccaccgcctccagccgcccaggccccctcgcccggcccgctctctggctcttcggtccggaaaggaccttctactcccaggcggaggctcccctttccctgagttaccccgactgactcggacctgggctcagtgaggcatccggcccggctggggagcggagcgcggtctcggcagctccccttcccttgagaaagcgggaaccctctaagccagcgcccgaaactcgcggggagggaggacagaagggaaaaaaaaaagaaaacccagaaagaagcatccagcgaggagcgagggcgacggagaggaagagatagaatgagggagggatggaggctggaggagggggcggggtggaagaaggggggcgggaaggagggagggagggggaaagagagggagggagggatacagagagaatgaatccttctcactagaagagctgaaattaccttgattcatttttttgtgttggaggtttagctttacctccttccctcttcccaacctccacctcctctccccaccgcacaccacctccaccgcctgattctaaatgctacaaagtcaaattttaggaattcgaatgttttgcaaaagcttcataattagtaatgaatctactgtacacacacacacacacaccagcaaagagaacggaaaagagggaggtgaagaggagaaaaagagagataaatcttacatttgaatcagacatttgcaggtccaagttaactaaactcattatatccgcaggaagactgagtttcttttttttctttctccctttgccccagggttctcacctagggcaattcaaactgggcaaataccaagaaacaaccccctctcatgctctccctctacctcctcccctccaccacgcgtcctctccggaagacagtatcaaaatagctcaagaattggggatgcaaggggtccccgccctggtgcttaccttctttgcggcttacaccaccccggtggctagatcctggagataaacacttgcatttcccaaagttaacccagtataccaacccggagcttgccaagagtctattccagcctacaccgctaggaagccaacttcagcgagctcaatgaggggaccaaactggggctcgctttccaaacgctccgctccaaaatctgactctctctccagccccgatctcagtgtgagccgaacctcagaaaagacgctttttaagggcgacacagggttggctttacagcggggccaagaagactacctgggggtaccgccacctcggacaaatccgttggctctgtccaaggtgctgaatggactcctatcgcccggattacacacccggcacagcaggaggaaaaggcttaaaaatctctaattaagtgatacttgatattgctctagacggtttcttccacttccttacggtttgtcacgtgcggatggctttgccaaagccatcctgttaatagttgatcacatgttgatgagaaccttttcttctacgagaggattacccattaccggtgatatgcacttctgacttatttctctccccccaaccccaccccccatctacacctaaactcccagtctttaccccacccttacccccactccaccccctaaccccaacctctaacagcattattgtttttagatggaaattaacccccttgcaaatgtcaattacatgcccacatataaatcatagaatatgatcatacaccatacacattaaggaaaagaatagaatgcaagactgctgagagacaagcatcagccttgaacaaccaatataacacacacccccccacccagctccaagtttgttccacgcagttccacatagctgtgtcaaatctcaaatgattccaattaaagttgcactgtgtaaaaacccgattcccctggcctgagtagctgctgttctttggcgtgtgaagtgctaggaagagccgtgatatgcccgttgttaagcaacatgtcaagatttttcaattataatgcaggttttattgctactcaccattgtgcctttgctgtcctggagactcaagtgtcttaaaatctcgtctccccaacagatgctggaaggtaatgtgtcttgtttgaagtcatcatgtgagaagttcggctttgctcagtggatcgcccaccacttggtgtgacttatgaatctaataaccctttgcaatatccgcaagcttaaactctcaaccaccttggcgactacagaagacaaagcaactggcatcgatgtcgaaaaacctatagatttacgcaaacgccctcactccgagagacacgtttccttttgagttcttacgtgattctaatgaatgagcgaggttaccaatgattgcccaactgccctgctatgtagcaggtgtttcctagggctgccttctaaccgcccgttactgggtcctggcactgaaagttcccagagaaagtgaggagtttcagggtacccctgtaaaaaaaaaaactcagcctgcacaccgctcccttgcccactacgcaggtcacacctggggctccggcgaagctgaattcggctcgggagatttccctgtcgccaggtaagaaaaccttcgccttgtcaggctagggcgggaagaccgctggggaacttgttgcttatcagcgccggcagactaccgctttaataataataccagaaaagcgcagcagggagggggtggggggcggcaacggcgacgactaacctcgctgtttacgtgaccgactcactgtgactctctgggtaaaaaaaggaaacttcttagaaaagttcgtgcccctccccctcccccatcatgactaagggtctccagccgatgaggtcgtgagtgatgatcaaatggggactggggggaggggggcgagtaagtga

SEQ ID NO: 68 - DNA, 4043 bp, Homo sapiens
aagagctgatcgggggaggagtccagaacgaccaaaccctggggcgaaaactgccaccgggcttggctctgtggccggaacaaaaggcctgagaagggggtgggggtgagggttataggagtgtggagagcctggtggcccccgcccaggggcgcctaagtccctgagctccctgaagagtggcaagaggataacgcagccgcgcgttccggcagttcgctgtcccccgggggtgcaggcgggggcgggagaggtagaacacaggtctgggcggctccgcgccgcttctatctcacccgccaagcccctcacctccacccaccgccagtcccctgcccacccgggtggcggcggcggctcagcgactagccggccgccctccaccggcgcctccggacgcaacctcgccctggcagggcggtctgcgcgtccagctgattggtggctctgtccagccgccgcacggagctaaaagtgttcttctccaccgcctccagccgcccaggccccctcgcccggcccgctctctggctcttcggtccggaaaggaccttctactcccaggcggaggctcccctttccctgagttaccccgactgactcggacctgggctcagtgaggcatccggcccggctggggagcggagcgcggtctcggcagctccccttcccttgagaaagcgggaaccctctaagccagcgcccgaaactcgcggggagggaggacagaagggaaaaaaaaaagaaaacccagaaagaagcatccagcgaggagcgagggcgacggagaggaagagatagaatgagggagggatggaggctggaggagggggcggggtggaagaaggggggcgggaaggagggagggagggggaaagagagggagggagggatacagagagaatgaatccttctcactagaagagctgaaattaccttgattcatttttttgtgttggaggtttagctttacctccttccctcttcccaacctccacctcctctccccaccgcacaccacctccaccgcctgattctaaatgctacaaagtcaaattttaggaattcgaatgttttgcaaaagcttcataattagtaatgaatctactgtacacacacacacacacaccagcaaagagaacggaaaagagggaggtgaagaggagaaaaagagagataaatcttacatttgaatcagacatttgcaggtccaagttaactaaactcattatatccgcaggaagactgagtttcttttttttctttctccctttgccccagggttctcacctagggcaattcaaactgggcaaataccaagaaacaaccccctctcatgctctccctctacctcctcccctccaccacgcgtcctctccggaagacagtatcaaaatagctcaagaattggggatgcaaggggtccccgccctggtgcttaccttctttgcggcttacaccaccccggtggctagatcctggagataaacacttgcatttcccaaagttaacccagtataccaacccggagcttgccaagagtctattccagcctacaccgctaggaagccaacttcagcgagctcaatgaggggaccaaactggggctcgctttccaaacgctccgctccaaaatctgactctctctccagccccgatctcagtgtgagccgaacctcagaaaagacgctttttaagggcgacacagggttggctttacagcggggccaagaagactacctgggggtaccgccacctcggacaaatccgttggctctgtccaaggtgctgaatggactcctatcgcccggattacacacccggcacagcaggaggaaaaggcttaaaaatctctaattaagtgatacttgatattgctctagacggtttcttccacttccttacggtttgtcacgtgcggatggctttgccaaagccatcctgttaatagttgatcacatgttgatgagaaccttttcttctacgagaggattacccattaccggtgatatgcacttctgacttatttctctccccccaaccccaccccccatctacacctaaactcccagtctttaccccacccttacccccactccaccccctaaccccaacctctaacagcattattgtttttagatggaaattaacccccttgcaaatgtcaattacatgcccacatataaatcatagaatatgatcatacaccatacacattaaggaaaagaatagaatgcaagactgctgagagacaagcatcagccttgaacaaccaatataacacacacccccccacccagctccaagtttgttccacgcagttccacatagctgtgtcaaatctcaaatgattccaattaaagttgcactgtgtaaaaacccgattcccctggcctgagtagctgctgttctttggcgtgtgaagtgctaggaagagccgtgatatgcccgttgttaagcaacatgtcaagatttttcaattataatgcaggttttattgctactcaccattgtgcctttgctgtcctggagactcaagtgtcttaaaatctcgtctccccaacagatgctggaaggtaatgtgtcttgtttgaagtcatcatgtgagaagttcggctttgctcagtggatcgcccaccacttggtgtgacttatgaatctaataaccctttgcaatatccgcaagcttaaactctcaaccaccttggcgactacagaagacaaagcaactggcatcgatgtcgaaaaacctatagatttacgcaaacgccctcactccgagagacacgtttccttttgagttcttacgtgattctaatgaatgagcgaggttaccaatgattgcccaactgccctgctatgtagcaggtgtttcctagggctgccttctaaccgcccgttactgggtcctggcactgaaagttcccagagaaagtgaggagtttcagggtacccctgtaaaaaaaaaaactcagcctgcacaccgctcccttgcccactacgcaggtcacacctggggctccggcgaagctgaattcggctcgggagatttccctgtcgccaggtaagaaaaccttcgccttgtcaggctagggcgggaagaccgctggggaacttgttgcttatcagcgccggcagactaccgctttaataataataccagaaaagcgcagcagggagggggtggggggcggcaacggcgacgactaacctcgctgtttacgtgaccgactcactgtgactctctgggtaaaaaaaggaaacttcttagaaaagttcgtgcccctccccctcccccatcatgactaagggtctccagccgatgaggtcgtgagtgatgatcaaatggggactggggggaggggggcgagtaagtgacttgtccttgggaacatctgcatgcgtcgaagcgcgaaccagcccaacaactttcccttttcctcttaggtactgatgactaggcgagaggcaccaaggcgagccactagttgcccacaggaacctgtgtaagccgagctctcgagcggctgagttgaatgaagttatgactgcgtttgctctaatgggttatggcttcccaaatgtgagttaacagccccggtgcgcagctaggtcggaaggcgagccgcggagagcggagccgcgggccaaggcagggacgggaggggaggcggcaggttgggcgctccgctgctgctcggtgctgcttccccggagccgcttcctcatcctgcgggggctgccccgccgccggggtgccggggtgagcgcggcgggagccagggctggggtggcgaacctcggagggggctctcccaggaagccctgcggttagcgcccgcgcttccccaccagtggctgcgcaagctgggaagcgaagaggtcacgtgttggcggaaagtaacttggaggcgaaaggatgaactttgagaagaggaaaaaaagcacaatgaaacaaactacccccttggagtgtctaatagagggggaggcgggagggggggcggaggggcgccgctctccgcgggagatgtggggacgac

SEQ ID NO: 69 - DNA, 15 bp, Homo sapiens
gccaagccctgcgca

SEQ ID NO: 70 - DNA, 15 bp, Homo sapiens
tgccaagccctgcgc

SEQ ID NO: 71 - DNA, 15 bp, Homo sapiens
ttgccaagccctgcg

SEQ ID NO: 72 - DNA, 15 bp, Homo sapiens
cttgccaagccctgc

SEQ ID NO: 73 - DNA, 15 bp, Homo sapiens
gcttgccaagccctg

SEQ ID NO: 74 - DNA, 15 bp, Homo sapiens
tgcttgccaagccct

SEQ ID NO: 75 - DNA, 15 bp, Homo sapiens
ctgcttgccaagccc

SEQ ID NO: 76 - DNA, 15 bp, Homo sapiens
tctgcttgccaagcc

SEQ ID NO: 77 - DNA, 15 bp, Homo sapiens
gtctgcttgccaagc

SEQ ID NO: 78 - DNA, 15 bp, Homo sapiens
agtctgcttgccaag

SEQ ID NO: 79 - DNA, 15 bp, Homo sapiens
aagtctgcttgccaa

SEQ ID NO: 80 - DNA, 15 bp, Homo sapiens
taagtctgcttgcca

SEQ ID NO: 81 - DNA, 15 bp, Homo sapiens
gtaagtctgcttgcc

SEQ ID NO: 82 - DNA, 15 bp, Homo sapiens
agtaagtctgcttgc

SEQ ID NO: 83 - DNA, 15 bp, Homo sapiens
cagtaagtctgcttg

SEQ ID NO: 84 - DNA, 15 bp, Homo sapiens
ccagtaagtctgctt

SEQ ID NO: 85 - DNA, 15 bp, Homo sapiens
cccagtaagtctgct

SEQ ID NO: 86 - DNA, 15 bp, Homo sapiens
gcccagtaagtctgc

SEQ ID NO: 87 - DNA, 15 bp, Homo sapiens
tgcccagtaagtctg

SEQ ID NO: 88 - DNA, 15 bp, Homo sapiens
ctgcccagtaagtct

SEQ ID NO: 89 - DNA, 15 bp, Homo sapiens
tctgcccagtaagtc

SEQ ID NO: 90 - DNA, 15 bp, Homo sapiens
gtctgcccagtaagt

SEQ ID NO: 91 - DNA, 15 bp, Homo sapiens
agtctgcccagtaag

SEQ ID NO: 92 - DNA, 15 bp, Homo sapiens
cagtctgcccagtaa

SEQ ID NO: 93 - DNA, 15 bp, Homo sapiens
tcagtctgcccagta

SEQ ID NO: 94 - DNA, 15 bp, Homo sapiens
atcagtctgcccagt

SEQ ID NO: 95 - DNA, 15 bp, Homo sapiens
tatcagtctgcccag

SEQ ID NO: 96 - DNA, 15 bp, Homo sapiens
atatcagtctgccca

SEQ ID NO: 97 - DNA, 15 bp, Homo sapiens
aatatcagtctgccc

SEQ ID NO: 98 - DNA, 15 bp, Homo sapiens
caatatcagtctgcc

SEQ ID NO: 99 - DNA, 15 bp, Homo sapiens
acaatatcagtctgc

SEQ ID NO: 100 - DNA, 15 bp, Homo sapiens
tacaatatcagtctg

SEQ ID NO: 101 - DNA, 15 bp, Homo sapiens
gtacaatatcagtct

SEQ ID NO: 102 - DNA, 15 bp, Homo sapiens
tgtacaatatcagtc

SEQ ID NO: 103 - DNA, 15 bp, Homo sapiens
atgtacaatatcagt

SEQ ID NO: 104 - DNA, 15 bp, Homo sapiens
catgtacaatatcag

SEQ ID NO: 105 - DNA, 15 bp, Homo sapiens
ccatgtacaatatca

SEQ ID NO: 106 - DNA, 15 bp, Homo sapiens
accatgtacaatatc

SEQ ID NO: 107 - DNA, 15 bp, Homo sapiens
taccatgtacaatat

SEQ ID NO: 108 - DNA, 15 bp, Homo sapiens
ttaccatgtacaata

SEQ ID NO: 109 - DNA, 15 bp, Homo sapiens
cttaccatgtacaat

SEQ ID NO: 110 - DNA, 15 bp, Homo sapiens
ccttaccatgtacaa

SEQ ID NO: 111 - DNA, 15 bp, Homo sapiens
tccttaccatgtaca

SEQ ID NO: 112 - DNA, 15 bp, Homo sapiens
ctccttaccatgtac

SEQ ID NO: 113 - DNA, 15 bp, Homo sapiens
cctccttaccatgta

SEQ ID NO: 114 - DNA, 15 bp, Homo sapiens
tcctccttaccatgt

SEQ ID NO: 115 - DNA, 15 bp, Homo sapiens
ttcctccttaccatg

SEQ ID NO: 116 - DNA, 15 bp, Homo sapiens
tttcctccttaccat

SEQ ID NO: 117 - DNA, 15 bp, Homo sapiens
ttttcctccttacca

SEQ ID NO: 118 - DNA, 15 bp, Homo sapiens
gttttcctccttacc

SEQ ID NO: 119 - DNA, 15 bp, Homo sapiens
ggttttcctccttac

SEQ ID NO: 120 - DNA, 15 bp, Homo sapiens
gggttttcctcctta

SEQ ID NO: 121 - DNA, 15 bp, Homo sapiens
ggggttttcctcctt

SEQ ID NO: 122 - DNA, 15 bp, Homo sapiens
aggggttttcctcct

SEQ ID NO: 123 - DNA, 15 bp, Homo sapiens
aaggggttttcctcc

SEQ ID NO: 124 - DNA, 15 bp, Homo sapiens
gaaggggttttcctc

SEQ ID NO: 125 - DNA, 15 bp, Homo sapiens
ggaaggggttttcct

SEQ ID NO: 126 - DNA, 15 bp, Homo sapiens
gggaaggggttttcc

SEQ ID NO: 127 - DNA, 15 bp, Homo sapiens
ggggaaggggttttc

SEQ ID NO: 128 - DNA, 15 bp, Homo sapiens
tggggaaggggtttt

SEQ ID NO: 129 - DNA, 15 bp, Homo sapiens
ctggggaaggggttt

SEQ ID NO: 130 - DNA, 15 bp, Homo sapiens
gctggggaaggggtt

SEQ ID NO: 131 - DNA, 15 bp, Homo sapiens
tgctggggaaggggt

SEQ ID NO: 132 - DNA, 15 bp, Homo sapiens
atgctggggaagggg

SEQ ID NO: 133 - DNA, 15 bp, Homo sapiens
catgctggggaaggg

SEQ ID NO: 134 - DNA, 15 bp, Homo sapiens
gcatgctggggaagg

SEQ ID NO: 135 - DNA, 15 bp, Homo sapiens
agcatgctggggaag

SEQ ID NO: 136 - DNA, 15 bp, Homo sapiens
tagcatgctggggaa

SEQ ID NO: 137 - DNA, 15 bp, Homo sapiens
ctagcatgctgggga

SEQ ID NO: 138 - DNA, 15 bp, Homo sapiens
gctagcatgctgggg

SEQ ID NO: 139 - DNA, 15 bp, Homo sapiens
tgctagcatgctggg

SEQ ID NO: 140 - DNA, 15 bp, Homo sapiens
ctgctagcatgctgg

SEQ ID NO: 141 - DNA, 15 bp, Homo sapiens
gctgctagcatgctg

SEQ ID NO: 142 - DNA, 15 bp, Homo sapiens
ggctgctagcatgct

SEQ ID NO: 143 - DNA, 15 bp, Homo sapiens
gggctgctagcatgc

SEQ ID NO: 144 - DNA, 15 bp, Homo sapiens
agggctgctagcatg

SEQ ID NO: 145 - DNA, 15 bp, Homo sapiens
cagggctgctagcat

SEQ ID NO: 146 - DNA, 15 bp, Homo sapiens
ccagggctgctagca

SEQ ID NO: 147 - DNA, 15 bp, Homo sapiens
cccagggctgctagc

SEQ ID NO: 148 - DNA, 15 bp, Homo sapiens
gcccagggctgctag

SEQ ID NO: 149 - DNA, 15 bp, Homo sapiens
agcccagggctgcta

SEQ ID NO: 150 - DNA, 15 bp, Homo sapiens
aagcccagggctgct

SEQ ID NO: 151 - DNA, 15 bp, Homo sapiens
aaagcccagggctgc

SEQ ID NO: 152 - DNA, 15 bp, Homo sapiens
taaagcccagggctg

SEQ ID NO: 153 - DNA, 15 bp, Homo sapiens
ctaaagcccagggct

SEQ ID NO: 154 - DNA, 15 bp, Homo sapiens
tctaaagcccagggc

SEQ ID NO: 155 - DNA, 15 bp, Homo sapiens
atctaaagcccaggg

SEQ ID NO: 156 - DNA, 15 bp, Homo sapiens
gatctaaagcccagg

SEQ ID NO: 157 - DNA, 15 bp, Homo sapiens
agatctaaagcccag

SEQ ID NO: 158 - DNA, 15 bp, Homo sapiens
cagatctaaagccca

SEQ ID NO: 159 - DNA, 15 bp, Homo sapiens
ccagatctaaagccc

SEQ ID NO: 160 - DNA, 15 bp, Homo sapiens
tccagatctaaagcc

SEQ ID NO: 161 - DNA, 15 bp, Homo sapiens
atccagatctaaagc

SEQ ID NO: 162 - DNA, 15 bp, Homo sapiens
gatccagatctaaag

SEQ ID NO: 163 - DNA, 15 bp, Homo sapiens
agatccagatctaaa

SEQ ID NO: 164 - DNA, 15 bp, Homo sapiens
gagatccagatctaa

SEQ ID NO: 165 - DNA, 15 bp, Homo sapiens
ggagatccagatcta

SEQ ID NO: 166 - DNA, 15 bp, Homo sapiens
gggagatccagatct

SEQ ID NO: 167 - DNA, 15 bp, Homo sapiens
tgggagatccagatc

SEQ ID NO: 168 - DNA, 15 bp, Homo sapiens
ttgggagatccagat

SEQ ID NO: 169 - DNA, 15 bp, Homo sapiens
gttgggagatccaga

SEQ ID NO: 170 - DNA, 15 bp, Homo sapiens
agttgggagatccag

SEQ ID NO: 171 - DNA, 15 bp, Homo sapiens
gagttgggagatcca

SEQ ID NO: 172 - DNA, 15 bp, Homo sapiens
ggagttgggagatcc

SEQ ID NO: 173 - DNA, 15 bp, Homo sapiens
aggagttgggagatc

SEQ ID NO: 174 - DNA, 15 bp, Homo sapiens
aaggagttgggagat

SEQ ID NO: 175 - DNA, 15 bp, Homo sapiens
gaaggagttgggaga

SEQ ID NO: 176 - DNA, 15 bp, Homo sapiens
tgaaggagttgggag

SEQ ID NO: 177 - DNA, 15 bp, Homo sapiens
ctgaaggagttggga

SEQ ID NO: 178 - DNA, 15 bp, Homo sapiens
cctgaaggagttggg

SEQ ID NO: 179 - DNA, 15 bp, Homo sapiens
tcctgaaggagttgg

SEQ ID NO: 180 - DNA, 15 bp, Homo sapiens
ctcctgaaggagttg

SEQ ID NO: 181 - DNA, 15 bp, Homo sapiens
gctcctgaaggagtt

SEQ ID NO: 182 - DNA, 15 bp, Homo sapiens
ggctcctgaaggagt

SEQ ID NO: 183 - DNA, 15 bp, Homo sapiens
aggctcctgaaggag

SEQ ID NO: 184 - DNA, 15 bp, Homo sapiens
aaggctcctgaagga

SEQ ID NO: 185 - DNA, 15 bp, Homo sapiens
aaaggctcctgaagg

SEQ ID NO: 186 - DNA, 15 bp, Homo sapiens
caaaggctcctgaag

SEQ ID NO: 187 - DNA, 15 bp, Homo sapiens
acaaaggctcctgaa

SEQ ID NO: 188 - DNA, 15 bp, Homo sapiens
cacaaaggctcctga

SEQ ID NO: 189 - DNA, 15 bp, Homo sapiens
gcacaaaggctcctg

SEQ ID NO: 190 - DNA, 15 bp, Homo sapiens
tgcacaaaggctcct

SEQ ID NO: 191 - DNA, 15 bp, Homo sapiens
ctgcacaaaggctcc

SEQ ID NO: 192 - DNA, 15 bp, Homo sapiens
cctgcacaaaggctc

SEQ ID NO: 193 - DNA, 15 bp, Homo sapiens
tcctgcacaaaggct

SEQ ID NO: 194 - DNA, 15 bp, Homo sapiens
gtcctgcacaaaggc

SEQ ID NO: 195 - DNA, 15 bp, Homo sapiens
tgtcctgcacaaagg

SEQ ID NO: 196 - DNA, 15 bp, Homo sapiens
gtgtcctgcacaaag

SEQ ID NO: 197 - DNA, 15 bp, Homo sapiens
tgtgtcctgcacaaa

SEQ ID NO: 198 - DNA, 15 bp, Homo sapiens
ttgtgtcctgcacaa

SEQ ID NO: 199 - DNA, 15 bp, Homo sapiens
gttgtgtcctgcaca

SEQ ID NO: 200 - DNA, 15 bp, Homo sapiens
ggttgtgtcctgcac

SEQ ID NO: 201 - DNA, 15 bp, Homo sapiens
aggttgtgtcctgca

SEQ ID NO: 202 - DNA, 15 bp, Homo sapiens
taggttgtgtcctgc

SEQ ID NO: 203 - DNA, 15 bp, Homo sapiens
gtaggttgtgtcctg

SEQ ID NO: 204 - DNA, 15 bp, Homo sapiens
ggtaggttgtgtcct

SEQ ID NO: 205 - DNA, 15 bp, Homo sapiens
aggtaggttgtgtcc

SEQ ID NO: 206 - DNA, 15 bp, Homo sapiens
taggtaggttgtgtc

SEQ ID NO: 207 - DNA, 15 bp, Homo sapiens
ataggtaggttgtgt

SEQ ID NO: 208 - DNA, 15 bp, Homo sapiens
tataggtaggttgtg

SEQ ID NO: 209 - DNA, 15 bp, Homo sapiens
atataggtaggttgt

SEQ ID NO: 210 - DNA, 15 bp, Homo sapiens
tatataggtaggttg

SEQ ID NO: 211 - DNA, 15 bp, Homo sapiens
ttatataggtaggtt

SEQ ID NO: 212 - DNA, 15 bp, Homo sapiens
attatataggtaggt

SEQ ID NO: 213 - DNA, 15 bp, Homo sapiens
gattatataggtagg

SEQ ID NO: 214 - DNA, 15 bp, Homo sapiens
tgattatataggtag

SEQ ID NO: 215 - DNA, 15 bp, Homo sapiens
ttgattatataggta

SEQ ID NO: 216 - DNA, 15 bp, Homo sapiens
gttgattatataggt

SEQ ID NO: 217 - DNA, 15 bp, Homo sapiens
tgttgattatatagg

SEQ ID NO: 218 - DNA, 15 bp, Homo sapiens
atgttgattatatag

SEQ ID NO: 219 - DNA, 15 bp, Homo sapiens
catgttgattatata

SEQ ID NO: 220 - DNA, 15 bp, Homo sapiens
ccatgttgattatat

SEQ ID NO: 221 - DNA, 15 bp, Homo sapiens
tccatgttgattata

SEQ ID NO: 222 - DNA, 15 bp, Homo sapiens
ctccatgttgattat

SEQ ID NO: 223 - DNA, 15 bp, Homo sapiens
actccatgttgatta

SEQ ID NO: 224 - DNA, 15 bp, Homo sapiens
aactccatgttgatt

SEQ ID NO: 225 - DNA, 15 bp, Homo sapiens
caactccatgttgat

SEQ ID NO: 226 - DNA, 15 bp, Homo sapiens
gcaactccatgttga

SEQ ID NO: 227 - DNA, 15 bp, Homo sapiens
ggcaactccatgttg

SEQ ID NO: 228 - DNA, 15 bp, Homo sapiens
gggcaactccatgtt

SEQ ID NO: 229 - DNA, 15 bp, Homo sapiens
agggcaactccatgt

SEQ ID NO: 230 - DNA, 15 bp, Homo sapiens
aagggcaactccatg

SEQ ID NO: 231 - DNA, 15 bp, Homo sapiens
taagggcaactccat

SEQ ID NO: 232 - DNA, 15 bp, Homo sapiens
ataagggcaactcca

SEQ ID NO: 233 - DNA, 15 bp, Homo sapiens
tataagggcaactcc

SEQ ID NO: 234 - DNA, 15 bp, Homo sapiens
atataagggcaactc

SEQ ID NO: 235 - DNA, 15 bp, Homo sapiens
catataagggcaact

SEQ ID NO: 236 - DNA, 15 bp, Homo sapiens
acatataagggcaac

SEQ ID NO: 237 - DNA, 15 bp, Homo sapiens
tacatataagggcaa

SEQ ID NO: 238 - DNA, 15 bp, Homo sapiens
ttacatataagggca

SEQ ID NO: 239 - DNA, 15 bp, Homo sapiens
attacatataagggc

SEQ ID NO: 240 - DNA, 15 bp, Homo sapiens
gattacatataaggg

SEQ ID NO: 241 - DNA, 15 bp, Homo sapiens
tgattacatataagg

SEQ ID NO: 242 - DNA, 15 bp, Homo sapiens
atgattacatataag

SEQ ID NO: 243 - DNA, 15 bp, Homo sapiens
aatgattacatataa

SEQ ID NO: 244 - DNA, 15 bp, Homo sapiens
aaatgattacatata

SEQ ID NO: 245 - DNA, 15 bp, Homo sapiens
aaaatgattacatat

SEQ ID NO: 246 - DNA, 15 bp, Homo sapiens
caaaatgattacata

SEQ ID NO: 247 - DNA, 15 bp, Homo sapiens
ccaaaatgattacat

SEQ ID NO: 248 - DNA, 15 bp, Homo sapiens
gccaaaatgattaca

SEQ ID NO: 249 - DNA, 15 bp, Homo sapiens
agccaaaatgattac

SEQ ID NO: 250 - DNA, 15 bp, Homo sapiens
aagccaaaatgatta

SEQ ID NO: 251 - DNA, 15 bp, Homo sapiens
gaagccaaaatgatt

SEQ ID NO: 252 - DNA, 15 bp, Homo sapiens
agaagccaaaatgat

SEQ ID NO: 253 - DNA, 15 bp, Homo sapiens
cagaagccaaaatga

SEQ ID NO: 254 - DNA, 15 bp, Homo sapiens
acagaagccaaaatg

SEQ ID NO: 255 - DNA, 15 bp, Homo sapiens
tacagaagccaaaat

SEQ ID NO: 256 - DNA, 15 bp, Homo sapiens
gtacagaagccaaaa

SEQ ID NO: 257 - DNA, 15 bp, Homo sapiens
agtacagaagccaaa

SEQ ID NO: 258 - DNA, 15 bp, Homo sapiens
tagtacagaagccaa

SEQ ID NO: 259 - DNA, 15 bp, Homo sapiens
atagtacagaagcca

SEQ ID NO: 260 - DNA, 15 bp, Homo sapiens
aatagtacagaagcc

SEQ ID NO: 261 - DNA, 15 bp, Homo sapiens
aaatagtacagaagc

SEQ ID NO: 262 - DNA, 15 bp, Homo sapiens
caaatagtacagaag

SEQ ID NO: 263 - DNA, 15 bp, Homo sapiens
acaaatagtacagaa

SEQ ID NO: 264 - DNA, 15 bp, Homo sapiens
tacaaatagtacaga

SEQ ID NO: 265 - DNA, 15 bp, Homo sapiens
gtacaaatagtacag

SEQ ID NO: 266 - DNA, 15 bp, Homo sapiens
agtacaaatagtaca

SEQ ID NO: 267 - DNA, 15 bp, Homo sapiens
tagtacaaatagtac

SEQ ID NO: 268 - DNA, 15 bp, Homo sapiens
atagtacaaatagta

SEQ ID NO: 269 - DNA, 15 bp, Homo sapiens
tatagtacaaatagt

SEQ ID NO: 270 - DNA, 15 bp, Homo sapiens
atatagtacaaatag

SEQ ID NO: 271 - DNA, 15 bp, Homo sapiens
tatatagtacaaata

SEQ ID NO: 272 - DNA, 15 bp, Homo sapiens
gtatatagtacaaat

SEQ ID NO: 273 - DNA, 15 bp, Homo sapiens
agtatatagtacaaa

SEQ ID NO: 274 - DNA, 15 bp, Homo sapiens
tagtatatagtacaa

SEQ ID NO: 275 - DNA, 15 bp, Homo sapiens
ttagtatatagtaca

SEQ ID NO: 276 - DNA, 15 bp, Homo sapiens
tttagtatatagtac

SEQ ID NO: 277 - DNA, 15 bp, Homo sapiens
atttagtatatagta

SEQ ID NO: 278 - DNA, 15 bp, Homo sapiens
tatttagtatatagt

SEQ ID NO: 279 - DNA, 15 bp, Homo sapiens
atatttagtatatag

SEQ ID NO: 280 - DNA, 15 bp, Homo sapiens
gatatttagtatata

SEQ ID NO: 281 - DNA, 15 bp, Homo sapiens
agatatttagtatat

SEQ ID NO: 282 - DNA, 15 bp, Homo sapiens
tagatatttagtata

SEQ ID NO: 283 - DNA, 15 bp, Homo sapiens
ttagatatttagtat

SEQ ID NO: 284 - DNA, 15 bp, Homo sapiens
cttagatatttagta

SEQ ID NO: 285 - DNA, 15 bp, Homo sapiens
tcttagatatttagt

SEQ ID NO: 286 - DNA, 15 bp, Homo sapiens
atcttagatatttag

SEQ ID NO: 287 - DNA, 15 bp, Homo sapiens
catcttagatattta

SEQ ID NO: 288 - DNA, 15 bp, Homo sapiens
acatcttagatattt

SEQ ID NO: 289 - DNA, 15 bp, Homo sapiens
gacatcttagatatt

SEQ ID NO: 290 - DNA, 15 bp, Homo sapiens
tgacatcttagatat

SEQ ID NO: 291 - DNA, 15 bp, Homo sapiens
ttgacatcttagata

SEQ ID NO: 292 - DNA, 15 bp, Homo sapiens
cttgacatcttagat

SEQ ID NO: 293 - DNA, 15 bp, Homo sapiens
tcttgacatcttaga

SEQ ID NO: 294 - DNA, 15 bp, Homo sapiens
ttcttgacatcttag

SEQ ID NO: 295 - DNA, 15 bp, Homo sapiens
tttcttgacatctta

SEQ ID NO: 296 - DNA, 15 bp, Homo sapiens
atttcttgacatctt

SEQ ID NO: 297 - DNA, 15 bp, Homo sapiens
tatttcttgacatct

SEQ ID NO: 298 - DNA, 15 bp, Homo sapiens
ttatttcttgacatc

SEQ ID NO: 299 - DNA, 15 bp, Homo sapiens
gttatttcttgacat

SEQ ID NO: 300 - DNA, 15 bp, Homo sapiens
agttatttcttgaca

SEQ ID NO: 301 - DNA, 15 bp, Homo sapiens
gagttatttcttgac

SEQ ID NO: 302 - DNA, 15 bp, Homo sapiens
tgagttatttcttga

SEQ ID NO: 303 - DNA, 15 bp, Homo sapiens
ttgagttatttcttg

SEQ ID NO: 304 - DNA, 15 bp, Homo sapiens
attgagttatttctt

SEQ ID NO: 305 - DNA, 15 bp, Homo sapiens
tattgagttatttct

SEQ ID NO: 306 - DNA, 15 bp, Homo sapiens
atattgagttatttc

SEQ ID NO: 307 - DNA, 15 bp, Homo sapiens
aatattgagttattt

SEQ ID NO: 308 - DNA, 15 bp, Homo sapiens
caatattgagttatt

SEQ ID NO: 309 - DNA, 15 bp, Homo sapiens
tcaatattgagttat

SEQ ID NO: 310 - DNA, 15 bp, Homo sapiens
ctcaatattgagtta

SEQ ID NO: 311 - DNA, 15 bp, Homo sapiens
tctcaatattgagtt

SEQ ID NO: 312 - DNA, 15 bp, Homo sapiens
ttctcaatattgagt

SEQ ID NO: 313 - DNA, 15 bp, Homo sapiens
tttctcaatattgag

SEQ ID NO: 314 - DNA, 15 bp, Homo sapiens
ttttctcaatattga

SEQ ID NO: 315 - DNA, 15 bp, Homo sapiens
tttttctcaatattg

SEQ ID NO: 316 - DNA, 15 bp, Homo sapiens
ctttttctcaatatt

SEQ ID NO: 317 - DNA, 15 bp, Homo sapiens
tctttttctcaatat

SEQ ID NO: 318 - DNA, 15 bp, Homo sapiens
ctctttttctcaata

SEQ ID NO: 319 - DNA, 15 bp, Homo sapiens
tctctttttctcaat

SEQ ID NO: 320 - DNA, 15 bp, Homo sapiens
ctctctttttctcaa

SEQ ID NO: 321 - DNA, 15 bp, Homo sapiens
cctctctttttctca

SEQ ID NO: 322 - DNA, 15 bp, Homo sapiens
acctctctttttctc

SEQ ID NO: 323 - DNA, 15 bp, Homo sapiens
tacctctctttttct

SEQ ID NO: 324 - DNA, 15 bp, Homo sapiens
gtacctctctttttc

SEQ ID NO: 325 - DNA, 15 bp, Homo sapiens
tgtacctctcttttt

SEQ ID NO: 326 - DNA, 15 bp, Homo sapiens
atgtacctctctttt

SEQ ID NO: 327 - DNA, 15 bp, Homo sapiens
tatgtacctctcttt

SEQ ID NO: 328 - DNA, 15 bp, Homo sapiens
atatgtacctctctt

SEQ ID NO: 329 - DNA, 15 bp, Homo sapiens
tatatgtacctctct

SEQ ID NO: 330 - DNA, 15 bp, Homo sapiens
ctatatgtacctctc

SEQ ID NO: 331 - DNA, 15 bp, Homo sapiens
gctatatgtacctct

SEQ ID NO: 332 - DNA, 15 bp, Homo sapiens
ggctatatgtacctc

SEQ ID NO: 333 - DNA, 15 bp, Homo sapiens
tggctatatgtacct

SEQ ID NO: 334 - DNA, 15 bp, Homo sapiens
ttggctatatgtacc

SEQ ID NO: 335 - DNA, 15 bp, Homo sapiens
attggctatatgtac

SEQ ID NO: 336 - DNA, 15 bp, Homo sapiens
gattggctatatgta

SEQ ID NO: 337 - DNA, 15 bp, Homo sapiens
agattggctatatgt

SEQ ID NO: 338 - DNA, 15 bp, Homo sapiens
cagattggctatatg

SEQ ID NO: 339 - DNA, 15 bp, Homo sapiens
tcagattggctatat

SEQ ID NO: 340 - DNA, 15 bp, Homo sapiens
ttcagattggctata

SEQ ID NO: 341 - DNA, 15 bp, Homo sapiens
attcagattggctat

SEQ ID NO: 342 - DNA, 15 bp, Homo sapiens
cattcagattggcta

SEQ ID NO: 343 - DNA, 15 bp, Homo sapiens
acattcagattggct

SEQ ID NO: 344 - DNA, 15 bp, Homo sapiens
aacattcagattggc

SEQ ID NO: 345 - DNA, 15 bp, Homo sapiens
aaacattcagattgg

SEQ ID NO: 346 - DNA, 15 bp, Homo sapiens
aaaacattcagattg

SEQ ID NO: 347 - DNA, 15 bp, Homo sapiens
caaaacattcagatt

SEQ ID NO: 348 - DNA, 15 bp, Homo sapiens
acaaaacattcagat

SEQ ID NO: 349 - DNA, 15 bp, Homo sapiens
aacaaaacattcaga

SEQ ID NO: 350 - DNA, 15 bp, Homo sapiens
caacaaaacattcag

SEQ ID NO: 351 - DNA, 15 bp, Homo sapiens
gcaacaaaacattca

SEQ ID NO: 352 - DNA, 15 bp, Homo sapiens
agcaacaaaacattc

SEQ ID NO: 353 - DNA, 15 bp, Homo sapiens
aagcaacaaaacatt

SEQ ID NO: 354 - DNA, 15 bp, Homo sapiens
aaagcaacaaaacat

SEQ ID NO: 355 - DNA, 15 bp, Homo sapiens
taaagcaacaaaaca

SEQ ID NO: 356 - DNA, 15 bp, Homo sapiens
ctaaagcaacaaaac

SEQ ID NO: 357 - DNA, 15 bp, Homo sapiens
actaaagcaacaaaa

SEQ ID NO: 358 - DNA, 15 bp, Homo sapiens
aactaaagcaacaaa

SEQ ID NO: 359 - DNA, 15 bp, Homo sapiens
taactaaagcaacaa

SEQ ID NO: 360 - DNA, 15 bp, Homo sapiens
ttaactaaagcaaca

SEQ ID NO: 361 - DNA, 15 bp, Homo sapiens
gttaactaaagcaac

SEQ ID NO: 362 - DNA, 15 bp, Homo sapiens
agttaactaaagcaa

SEQ ID NO: 363 - DNA, 15 bp, Homo sapiens
tagttaactaaagca

SEQ ID NO: 364 - DNA, 15 bp, Homo sapiens
ctagttaactaaagc

SEQ ID NO: 365 - DNA, 15 bp, Homo sapiens
tctagttaactaaag

SEQ ID NO: 366 - DNA, 15 bp, Homo sapiens
gtctagttaactaaa

SEQ ID NO: 367 - DNA, 15 bp, Homo sapiens
tgtctagttaactaa

SEQ ID NO: 368 - DNA, 15 bp, Homo sapiens
gtgtctagttaacta

SEQ ID NO: 369 - DNA, 15 bp, Homo sapiens
tgtgtctagttaact

SEQ ID NO: 370 - DNA, 15 bp, Homo sapiens
ttgtgtctagttaac

SEQ ID NO: 371 - DNA, 15 bp, Homo sapiens
gttgtgtctagttaa

SEQ ID NO: 372 - DNA, 15 bp, Homo sapiens
agttgtgtctagtta

SEQ ID NO: 373 - DNA, 15 bp, Homo sapiens
tagttgtgtctagtt

SEQ ID NO: 374 - DNA, 15 bp, Homo sapiens
ttagttgtgtctagt

SEQ ID NO: 375 - DNA, 15 bp, Homo sapiens
tttagttgtgtctag

SEQ ID NO: 376 - DNA, 15 bp, Homo sapiens
ttttagttgtgtcta

SEQ ID NO: 377 - DNA, 15 bp, Homo sapiens
tttttagttgtgtct

SEQ ID NO: 378 - DNA, 15 bp, Homo sapiens
atttttagttgtgtc

SEQ ID NO: 379 - DNA, 15 bp, Homo sapiens
gatttttagttgtgt

SEQ ID NO: 380 - DNA, 15 bp, Homo sapiens
ggatttttagttgtg

SEQ ID NO: 381 - DNA, 15 bp, Homo sapiens
gggatttttagttgt

SEQ ID NO: 382 - DNA, 15 bp, Homo sapiens
ggggatttttagttg

SEQ ID NO: 383 - DNA, 15 bp, Homo sapiens
tggggatttttagtt

SEQ ID NO: 384 - DNA, 15 bp, Homo sapiens
gtggggatttttagt

SEQ ID NO: 385 - DNA, 15 bp, Homo sapiens
tgtggggatttttag

SEQ ID NO: 386 - DNA, 15 bp, Homo sapiens
ctgtggggattttta

SEQ ID NO: 387 - DNA, 15 bp, Homo sapiens
tctgtggggattttt

SEQ ID NO: 388 - DNA, 15 bp, Homo sapiens
ttctgtggggatttt

SEQ ID NO: 389 - DNA, 15 bp, Homo sapiens
cttctgtggggattt

SEQ ID NO: 390 - DNA, 15 bp, Homo sapiens
tcttctgtggggatt

SEQ ID NO: 391 - DNA, 15 bp, Homo sapiens
atcttctgtggggat

SEQ ID NO: 392 - DNA, 15 bp, Homo sapiens
catcttctgtgggga

SEQ ID NO: 393 - DNA, 15 bp, Homo sapiens
tcatcttctgtgggg

SEQ ID NO: 394 - DNA, 15 bp, Homo sapiens
ttcatcttctgtggg

SEQ ID NO: 395 - DNA, 15 bp, Homo sapiens
tttcatcttctgtgg

SEQ ID NO: 396 - DNA, 15 bp, Homo sapiens
gtttcatcttctgtg

SEQ ID NO: 397 - DNA, 15 bp, Homo sapiens
tgtttcatcttctgt

SEQ ID NO: 398 - DNA, 15 bp, Homo sapiens
ctgtttcatcttctg

SEQ ID NO: 399 - DNA, 15 bp, Homo sapiens
tctgtttcatcttct

SEQ ID NO: 400 - DNA, 15 bp, Homo sapiens
ctctgtttcatcttc

SEQ ID NO: 401 - DNA, 15 bp, Homo sapiens
gctctgtttcatctt

SEQ ID NO: 402 - DNA, 15 bp, Homo sapiens
ggctctgtttcatct

SEQ ID NO: 403 - DNA, 15 bp, Homo sapiens
cggctctgtttcatc

SEQ ID NO: 404 - DNA, 15 bp, Homo sapiens
acggctctgtttcat

SEQ ID NO: 405 - DNA, 15 bp, Homo sapiens
tacggctctgtttca

SEQ ID NO: 406 - DNA, 15 bp, Homo sapiens
atacggctctgtttc

SEQ ID NO: 407 - DNA, 15 bp, Homo sapiens
gatacggctctgttt

SEQ ID NO: 408 - DNA, 15 bp, Homo sapiens
agatacggctctgtt

SEQ ID NO: 409 - DNA, 15 bp, Homo sapiens
aagatacggctctgt

SEQ ID NO: 410 - DNA, 15 bp, Homo sapiens
gaagatacggctctg

SEQ ID NO: 411 - DNA, 15 bp, Homo sapiens
agaagatacggctct

SEQ ID NO: 412 - DNA, 15 bp, Homo sapiens
aagaagatacggctc

SEQ ID NO: 413 - DNA, 15 bp, Homo sapiens
aaagaagatacggct

SEQ ID NO: 414 - DNA, 15 bp, Homo sapiens
taaagaagatacggc

SEQ ID NO: 415 - DNA, 15 bp, Homo sapiens
ttaaagaagatacgg

SEQ ID NO: 416 - DNA, 15 bp, Homo sapiens
tttaaagaagatacg

SEQ ID NO: 417 - DNA, 15 bp, Homo sapiens
ctttaaagaagatac

SEQ ID NO: 418 - DNA, 15 bp, Homo sapiens
gctttaaagaagata

SEQ ID NO: 419 - DNA, 15 bp, Homo sapiens
agctttaaagaagat

SEQ ID NO: 420 - DNA, 15 bp, Homo sapiens
gagctttaaagaaga

SEQ ID NO: 421 - DNA, 15 bp, Homo sapiens
tgagctttaaagaag

SEQ ID NO: 422 - DNA, 15 bp, Homo sapiens
ttgagctttaaagaa

SEQ ID NO: 423 - DNA, 15 bp, Homo sapiens
gttgagctttaaaga

SEQ ID NO: 424 - DNA, 15 bp, Homo sapiens
agttgagctttaaag

SEQ ID NO: 425 - DNA, 15 bp, Homo sapiens
aagttgagctttaaa

SEQ ID NO: 426 - DNA, 15 bp, Homo sapiens
aaagttgagctttaa

SEQ ID NO: 427 - DNA, 15 bp, Homo sapiens
taaagttgagcttta

SEQ ID NO: 428 - DNA, 15 bp, Homo sapiens
ctaaagttgagcttt

SEQ ID NO: 429 - DNA, 15 bp, Homo sapiens
tctaaagttgagctt

SEQ ID NO: 430 - DNA, 15 bp, Homo sapiens
gtctaaagttgagct

SEQ ID NO: 431 - DNA, 15 bp, Homo sapiens
agtctaaagttgagc

SEQ ID NO: 432 - DNA, 15 bp, Homo sapiens
tagtctaaagttgag

SEQ ID NO: 433 - DNA, 15 bp, Homo sapiens
ttagtctaaagttga

SEQ ID NO: 434 - DNA, 15 bp, Homo sapiens
attagtctaaagttg

SEQ ID NO: 435 - DNA, 15 bp, Homo sapiens
gattagtctaaagtt

SEQ ID NO: 436 - DNA, 15 bp, Homo sapiens
ggattagtctaaagt

SEQ ID NO: 437 - DNA, 15 bp, Homo sapiens
tggattagtctaaag

SEQ ID NO: 438 - DNA, 15 bp, Homo sapiens
ttggattagtctaaa

SEQ ID NO: 439 - DNA, 15 bp, Homo sapiens
tttggattagtctaa

SEQ ID NO: 440 - DNA, 15 bp, Homo sapiens
gtttggattagtcta

SEQ ID NO: 441 - DNA, 15 bp, Homo sapiens
agtttggattagtct

SEQ ID NO: 442 - DNA, 15 bp, Homo sapiens
tagtttggattagtc

SEQ ID NO: 443 - DNA, 15 bp, Homo sapiens
ttagtttggattagt

SEQ ID NO: 444 - DNA, 15 bp, Homo sapiens
attagtttggattag

SEQ ID NO: 445 - DNA, 15 bp, Homo sapiens
aattagtttggatta

SEQ ID NO: 446 - DNA, 15 bp, Homo sapiens
taattagtttggatt

SEQ ID NO: 447 - DNA, 15 bp, Homo sapiens
ataattagtttggat

SEQ ID NO: 448 - DNA, 15 bp, Homo sapiens
tataattagtttgga

SEQ ID NO: 449 - DNA, 15 bp, Homo sapiens
ttataattagtttgg

SEQ ID NO: 450 - DNA, 15 bp, Homo sapiens
tttataattagtttg

SEQ ID NO: 451 - DNA, 15 bp, Homo sapiens
ctttataattagttt

SEQ ID NO: 452 - DNA, 15 bp, Homo sapiens
actttataattagtt

SEQ ID NO: 453 - DNA, 15 bp, Homo sapiens
aactttataattagt

SEQ ID NO: 454 - DNA, 15 bp, Homo sapiens
caactttataattag

SEQ ID NO: 455 - DNA, 15 bp, Homo sapiens
tcaactttataatta

SEQ ID NO: 456 - DNA, 15 bp, Homo sapiens
ctcaactttataatt

SEQ ID NO: 457 - DNA, 15 bp, Homo sapiens
tctcaactttataat

SEQ ID NO: 458 - DNA, 15 bp, Homo sapiens
atctcaactttataa

SEQ ID NO: 459 - DNA, 15 bp, Homo sapiens
aatctcaactttata

SEQ ID NO: 460 - DNA, 15 bp, Homo sapiens
aaatctcaactttat

SEQ ID NO: 461 - DNA, 15 bp, Homo sapiens
aaaatctcaacttta

SEQ ID NO: 462 - DNA, 15 bp, Homo sapiens
caaaatctcaacttt

SEQ ID NO: 463 - DNA, 15 bp, Homo sapiens
acaaaatctcaactt

SEQ ID NO: 464 - DNA, 15 bp, Homo sapiens
aacaaaatctcaact

SEQ ID NO: 465 - DNA, 15 bp, Homo sapiens
aaacaaaatctcaac

SEQ ID NO: 466 - DNA, 15 bp, Homo sapiens
gaaacaaaatctcaa

SEQ ID NO: 467 - DNA, 15 bp, Homo sapiens
tgaaacaaaatctca

SEQ ID NO: 468 - DNA, 15 bp, Homo sapiens
gtgaaacaaaatctc

SEQ ID NO: 469 - DNA, 15 bp, Homo sapiens
agtgaaacaaaatct

SEQ ID NO: 470 - DNA, 15 bp, Homo sapiens
aagtgaaacaaaatc

SEQ ID NO: 471 - DNA, 15 bp, Homo sapiens
aaagtgaaacaaaat

SEQ ID NO: 472 - DNA, 15 bp, Homo sapiens
caaagtgaaacaaaa

SEQ ID NO: 473 - DNA, 15 bp, Homo sapiens
gcaaagtgaaacaaa

SEQ ID NO: 474 - DNA, 15 bp, Homo sapiens
agcaaagtgaaacaa

SEQ ID NO: 475 - DNA, 15 bp, Homo sapiens
aagcaaagtgaaaca

SEQ ID NO: 476 - DNA, 15 bp, Homo sapiens
aaagcaaagtgaaac

SEQ ID NO: 477 - DNA, 15 bp, Homo sapiens
taaagcaaagtgaaa

SEQ ID NO: 478 - DNA, 15 bp, Homo sapiens
ttaaagcaaagtgaa

SEQ ID NO: 479 - DNA, 15 bp, Homo sapiens
tttaaagcaaagtga

SEQ ID NO: 480 - DNA, 15 bp, Homo sapiens
ctttaaagcaaagtg

SEQ ID NO: 481 - DNA, 15 bp, Homo sapiens
cctttaaagcaaagt

SEQ ID NO: 482 - DNA, 15 bp, Homo sapiens
ccctttaaagcaaag

SEQ ID NO: 483 - DNA, 15 bp, Homo sapiens
accctttaaagcaaa

SEQ ID NO: 484 - DNA, 15 bp, Homo sapiens
taccctttaaagcaa

SEQ ID NO: 485 - DNA, 15 bp, Homo sapiens
ttaccctttaaagca

SEQ ID NO: 486 - DNA, 15 bp, Homo sapiens
attaccctttaaagc

SEQ ID NO: 487 - DNA, 15 bp, Homo sapiens
aattaccctttaaag

SEQ ID NO: 488 - DNA, 15 bp, Homo sapiens
taattaccctttaaa

SEQ ID NO: 489 - DNA, 15 bp, Homo sapiens
ataattaccctttaa

SEQ ID NO: 490 - DNA, 15 bp, Homo sapiens
gataattacccttta

SEQ ID NO: 491 - DNA, 15 bp, Homo sapiens
agataattacccttt

SEQ ID NO: 492 - DNA, 15 bp, Homo sapiens
tagataattaccctt

SEQ ID NO: 493 - DNA, 15 bp, Homo sapiens
ctagataattaccct

SEQ ID NO: 494 - DNA, 15 bp, Homo sapiens
actagataattaccc

SEQ ID NO: 495 - DNA, 15 bp, Homo sapiens
tactagataattacc

SEQ ID NO: 496 - DNA, 15 bp, Homo sapiens
gtactagataattac

SEQ ID NO: 497 - DNA, 15 bp, Homo sapiens
ggtactagataatta

SEQ ID NO: 498 - DNA, 15 bp, Homo sapiens
tggtactagataatt

SEQ ID NO: 499 - DNA, 15 bp, Homo sapiens
atggtactagataat

SEQ ID NO: 500 - DNA, 15 bp, Homo sapiens
aatggtactagataa

SEQ ID NO: 501 - DNA, 15 bp, Homo sapiens
aaatggtactagata

SEQ ID NO: 502 - DNA, 15 bp, Homo sapiens
aaaatggtactagat

SEQ ID NO: 503 - DNA, 15 bp, Homo sapiens
aaaaatggtactaga

SEQ ID NO: 504 - DNA, 15 bp, Homo sapiens
aaaaaatggtactag

SEQ ID NO: 505 - DNA, 15 bp, Homo sapiens
aaaaaaatggtacta

SEQ ID NO: 506 - DNA, 15 bp, Homo sapiens
caaaaaaatggtact

SEQ ID NO: 507 - DNA, 15 bp, Homo sapiens
acaaaaaaatggtac

SEQ ID NO: 508 - DNA, 15 bp, Homo sapiens
cacaaaaaaatggta

SEQ ID NO: 509 - DNA, 15 bp, Homo sapiens
tcacaaaaaaatggt

SEQ ID NO: 510 - DNA, 15 bp, Homo sapiens
atcacaaaaaaatgg

SEQ ID NO: 511 - DNA, 15 bp, Homo sapiens
catcacaaaaaaatg

SEQ ID NO: 512 - DNA, 15 bp, Homo sapiens
ccatcacaaaaaaat

SEQ ID NO: 513 - DNA, 15 bp, Homo sapiens
tccatcacaaaaaaa

SEQ ID NO: 514 - DNA, 15 bp, Homo sapiens
atccatcacaaaaaa

SEQ ID NO: 515 - DNA, 15 bp, Homo sapiens
gatccatcacaaaaa

SEQ ID NO: 516 - DNA, 15 bp, Homo sapiens
tgatccatcacaaaa

SEQ ID NO: 517 - DNA, 15 bp, Homo sapiens
gtgatccatcacaaa

SEQ ID NO: 518 - DNA, 15 bp, Homo sapiens
tgtgatccatcacaa

SEQ ID NO: 519 - DNA, 15 bp, Homo sapiens
ttgtgatccatcaca

SEQ ID NO: 520 - DNA, 15 bp, Homo sapiens
tttgtgatccatcac

SEQ ID NO: 521 - DNA, 15 bp, Homo sapiens
ttttgtgatccatca

SEQ ID NO: 522 - DNA, 15 bp, Homo sapiens
tttttgtgatccatc

SEQ ID NO: 523 - DNA, 15 bp, Homo sapiens
atttttgtgatccat

SEQ ID NO: 524 - DNA, 15 bp, Homo sapiens
catttttgtgatcca

SEQ ID NO: 525 - DNA, 15 bp, Homo sapiens
ccatttttgtgatcc

SEQ ID NO: 526 - DNA, 15 bp, Homo sapiens
cccatttttgtgatc

SEQ ID NO: 527 - DNA, 15 bp, Homo sapiens
ccccatttttgtgat

SEQ ID NO: 528 - DNA, 15 bp, Homo sapiens
tccccatttttgtga

SEQ ID NO: 529 - DNA, 15 bp, Homo sapiens
ctccccatttttgtg

SEQ ID NO: 530 - DNA, 15 bp, Homo sapiens
cctccccatttttgt

SEQ ID NO: 531 - DNA, 15 bp, Homo sapiens
tcctccccatttttg

SEQ ID NO: 532 - DNA, 15 bp, Homo sapiens
ctcctccccattttt

SEQ ID NO: 533 - DNA, 15 bp, Homo sapiens
cctcctccccatttt

SEQ ID NO: 534 - DNA, 15 bp, Homo sapiens
tcctcctccccattt

SEQ ID NO: 535 - DNA, 15 bp, Homo sapiens
ttcctcctccccatt

SEQ ID NO: 536 - DNA, 15 bp, Homo sapiens
tttcctcctccccat

SEQ ID NO: 537 - DNA, 15 bp, Homo sapiens
ctttcctcctcccca

SEQ ID NO: 538 - DNA, 15 bp, Homo sapiens
tctttcctcctcccc

SEQ ID NO: 539 - DNA, 15 bp, Homo sapiens
ttctttcctcctccc

SEQ ID NO: 540 - DNA, 15 bp, Homo sapiens
tttctttcctcctcc

SEQ ID NO: 541 - DNA, 15 bp, Homo sapiens
atttctttcctcctc

SEQ ID NO: 542 - DNA, 15 bp, Homo sapiens
gatttctttcctcct

SEQ ID NO: 543 - DNA, 15 bp, Homo sapiens
tgatttctttcctcc

SEQ ID NO: 544 - DNA, 15 bp, Homo sapiens
ttgatttctttcctc

SEQ ID NO: 545 - DNA, 15 bp, Homo sapiens
cttgatttctttcct

SEQ ID NO: 546 - DNA, 15 bp, Homo sapiens
tcttgatttctttcc

SEQ ID NO: 547 - DNA, 15 bp, Homo sapiens
atcttgatttctttc

SEQ ID NO: 548 - DNA, 15 bp, Homo sapiens
aatcttgatttcttt

SEQ ID NO: 549 - DNA, 15 bp, Homo sapiens
aaatcttgatttctt

SEQ ID NO: 550 - DNA, 15 bp, Homo sapiens
taaatcttgatttct

SEQ ID NO: 551 - DNA, 15 bp, Homo sapiens
gtaaatcttgatttc

SEQ ID NO: 552 - DNA, 15 bp, Homo sapiens
agtaaatcttgattt

SEQ ID NO: 553 - DNA, 15 bp, Homo sapiens
cagtaaatcttgatt

SEQ ID NO: 554 - DNA, 15 bp, Homo sapiens
tcagtaaatcttgat

SEQ ID NO: 555 - DNA, 15 bp, Homo sapiens
ttcagtaaatcttga

SEQ ID NO: 556 - DNA, 15 bp, Homo sapiens
gttcagtaaatcttg

SEQ ID NO: 557 - DNA, 15 bp, Homo sapiens
tgttcagtaaatctt

SEQ ID NO: 558 - DNA, 15 bp, Homo sapiens
gtgttcagtaaatct

SEQ ID NO: 559 - DNA, 15 bp, Homo sapiens
ggtgttcagtaaatc

SEQ ID NO: 560 - DNA, 15 bp, Homo sapiens
gggtgttcagtaaat

SEQ ID NO: 561 - DNA, 15 bp, Homo sapiens
cgggtgttcagtaaa

SEQ ID NO: 562 - DNA, 15 bp, Homo sapiens
acgggtgttcagtaa

SEQ ID NO: 563 - DNA, 15 bp, Homo sapiens
aacgggtgttcagta

SEQ ID NO: 564 - DNA, 15 bp, Homo sapiens
taacgggtgttcagt

SEQ ID NO: 565 - DNA, 15 bp, Homo sapiens
ataacgggtgttcag

SEQ ID NO: 566 - DNA, 15 bp, Homo sapiens
gataacgggtgttca

SEQ ID NO: 567 - DNA, 15 bp, Homo sapiens
agataacgggtgttc

SEQ ID NO: 568 - DNA, 15 bp, Homo sapiens
aagataacgggtgtt

SEQ ID NO: 569 - DNA, 15 bp, Homo sapiens
aaagataacgggtgt

SEQ ID NO: 570 - DNA, 15 bp, Homo sapiens
caaagataacgggtg

SEQ ID NO: 571 - DNA, 15 bp, Homo sapiens
tcaaagataacgggt

SEQ ID NO: 572 - DNA, 15 bp, Homo sapiens
ttcaaagataacggg

SEQ ID NO: 573 - DNA, 15 bp, Homo sapiens
cttcaaagataacgg

SEQ ID NO: 574 - DNA, 15 bp, Homo sapiens
tcttcaaagataacg

SEQ ID NO: 575 - DNA, 15 bp, Homo sapiens
ttcttcaaagataac

SEQ ID NO: 576 - DNA, 15 bp, Homo sapiens
tttcttcaaagataa

SEQ ID NO: 577 - DNA, 15 bp, Homo sapiens
atttcttcaaagata

SEQ ID NO: 578 - DNA, 15 bp, Homo sapiens
gatttcttcaaagat

SEQ ID NO: 579 - DNA, 15 bp, Homo sapiens
tgatttcttcaaaga

SEQ ID NO: 580 - DNA, 15 bp, Homo sapiens
ttgatttcttcaaag

SEQ ID NO: 581 - DNA, 15 bp, Homo sapiens
cttgatttcttcaaa

SEQ ID NO: 582 - DNA, 15 bp, Homo sapiens
tcttgatttcttcaa

SEQ ID NO: 583 - DNA, 15 bp, Homo sapiens
atcttgatttcttca

SEQ ID NO: 584 - DNA, 15 bp, Homo sapiens
aatcttgatttcttc

SEQ ID NO: 585 - DNA, 15 bp, Homo sapiens
attcagtaaatcttg

SEQ ID NO: 586 - DNA, 15 bp, Homo sapiens
tattcagtaaatctt

SEQ ID NO: 587 - DNA, 15 bp, Homo sapiens
gtattcagtaaatct

SEQ ID NO: 588 - DNA, 15 bp, Homo sapiens
ggtattcagtaaatc

SEQ ID NO: 589 - DNA, 15 bp, Homo sapiens
gggtattcagtaaat

SEQ ID NO: 590 - DNA, 15 bp, Homo sapiens
cgggtattcagtaaa

SEQ ID NO: 591 - DNA, 15 bp, Homo sapiens
acgggtattcagtaa

SEQ ID NO: 592 - DNA, 15 bp, Homo sapiens
aacgggtattcagta

SEQ ID NO: 593 - DNA, 15 bp, Homo sapiens
taacgggtattcagt

SEQ ID NO: 594 - DNA, 15 bp, Homo sapiens
ataacgggtattcag

SEQ ID NO: 595 - DNA, 15 bp, Homo sapiens
gataacgggtattca

SEQ ID NO: 596 - DNA, 15 bp, Homo sapiens
agataacgggtattc

SEQ ID NO: 597 - DNA, 15 bp, Homo sapiens
aagataacgggtatt

SEQ ID NO: 598 - DNA, 15 bp, Homo sapiens
gaagataacgggtat

SEQ ID NO: 599 - DNA, 15 bp, Homo sapiens
cgaagataacgggta

SEQ ID NO: 600 - DNA, 15 bp, Homo sapiens
tcgaagataacgggt

SEQ ID NO: 601 - DNA, 15 bp, Homo sapiens
ttcgaagataacggg

SEQ ID NO: 602 - DNA, 15 bp, Homo sapiens
cttcgaagataacgg

SEQ ID NO: 603 - DNA, 15 bp, Homo sapiens
gcttcgaagataacg

SEQ ID NO: 604 - DNA, 15 bp, Homo sapiens
agcttcgaagataac

SEQ ID NO: 605 - DNA, 15 bp, Homo sapiens
gagcttcgaagataa

SEQ ID NO: 606 - DNA, 15 bp, Homo sapiens
agagcttcgaagata

SEQ ID NO: 607 - DNA, 15 bp, Homo sapiens
cagagcttcgaagat

SEQ ID NO: 608 - DNA, 15 bp, Homo sapiens
tcagagcttcgaaga

SEQ ID NO: 609 - DNA, 15 bp, Homo sapiens
ttcagagcttcgaag

SEQ ID NO: 610 - DNA, 15 bp, Homo sapiens
tttcagagcttcgaa

SEQ ID NO: 611 - DNA, 15 bp, Homo sapiens
ttttcagagcttcga

SEQ ID NO: 612 - DNA, 15 bp, Homo sapiens
tttttcagagcttcg

SEQ ID NO: 613 - DNA, 15 bp, Homo sapiens
ctttttcagagcttc

SEQ ID NO: 614 - DNA, 15 bp, Homo sapiens
cctttttcagagctt

SEQ ID NO: 615 - DNA, 15 bp, Homo sapiens
gcctttttcagagct

SEQ ID NO: 616 - DNA, 15 bp, Homo sapiens
ggcctttttcagagc

SEQ ID NO: 617 - DNA, 15 bp, Homo sapiens
aggcctttttcagag

SEQ ID NO: 618 - DNA, 15 bp, Homo sapiens
gaggcctttttcaga

SEQ ID NO: 619 - DNA, 15 bp, Homo sapiens
tgaggcctttttcag

SEQ ID NO: 620 - DNA, 15 bp, Homo sapiens
atgaggcctttttca

SEQ ID NO: 621 - DNA, 15 bp, Homo sapiens
aatgaggcctttttc

SEQ ID NO: 622 - DNA, 15 bp, Homo sapiens
aaatgaggccttttt

SEQ ID NO: 623 - DNA, 15 bp, Homo sapiens
aaaatgaggcctttt

SEQ ID NO: 624 - DNA, 15 bp, Homo sapiens
aaaaatgaggccttt

SEQ ID NO: 625 - DNA, 15 bp, Homo sapiens
gaaaaatgaggcctt

SEQ ID NO: 626 - DNA, 15 bp, Homo sapiens
tgaaaaatgaggcct

SEQ ID NO: 627 - DNA, 15 bp, Homo sapiens
ctgaaaaatgaggcc

SEQ ID NO: 628 - DNA, 15 bp, Homo sapiens
tctgaaaaatgaggc

SEQ ID NO: 629 - DNA, 15 bp, Homo sapiens
atctgaaaaatgagg

SEQ ID NO: 630 - DNA, 15 bp, Homo sapiens
tatctgaaaaatgag

SEQ ID NO: 631 - DNA, 15 bp, Homo sapiens
ttatctgaaaaatga

SEQ ID NO: 632 - DNA, 15 bp, Homo sapiens
attatctgaaaaatg

SEQ ID NO: 633 - DNA, 15 bp, Homo sapiens
cattatctgaaaaat

SEQ ID NO: 634 - DNA, 15 bp, Homo sapiens
ccattatctgaaaaa

SEQ ID NO: 635 - DNA, 15 bp, Homo sapiens
tccattatctgaaaa

SEQ ID NO: 636 - DNA, 15 bp, Homo sapiens
ttccattatctgaaa

SEQ ID NO: 637 - DNA, 15 bp, Homo sapiens
attccattatctgaa

SEQ ID NO: 638 - DNA, 15 bp, Homo sapiens
aattccattatctga

SEQ ID NO: 639 - DNA, 15 bp, Homo sapiens
taattccattatctg

SEQ ID NO: 640 - DNA, 15 bp, Homo sapiens
ttaattccattatct

SEQ ID NO: 641 - DNA, 15 bp, Homo sapiens
cttaattccattatc

SEQ ID NO: 642 - DNA, 15 bp, Homo sapiens
ccttaattccattat

SEQ ID NO: 643 - DNA, 15 bp, Homo sapiens
gccttaattccatta

SEQ ID NO: 644 - DNA, 15 bp, Homo sapiens
agccttaattccatt

SEQ ID NO: 645 - DNA, 15 bp, Homo sapiens
gagccttaattccat

SEQ ID NO: 646 - DNA, 15 bp, Homo sapiens
tgagccttaattcca

SEQ ID NO: 647 - DNA, 15 bp, Homo sapiens
ctgagccttaattcc

SEQ ID NO: 648 - DNA, 15 bp, Homo sapiens
tctgagccttaattc

SEQ ID NO: 649 - DNA, 15 bp, Homo sapiens
ttctgagccttaatt

SEQ ID NO: 650 - DNA, 15 bp, Homo sapiens
tttctgagccttaat

SEQ ID NO: 651 - DNA, 15 bp, Homo sapiens
atttctgagccttaa

SEQ ID NO: 652 - DNA, 15 bp, Homo sapiens
aatttctgagcctta

SEQ ID NO: 653 - DNA, 15 bp, Homo sapiens
gaatttctgagcctt

SEQ ID NO: 654 - DNA, 15 bp, Homo sapiens
tgaatttctgagcct

SEQ ID NO: 655 - DNA, 15 bp, Homo sapiens
ctgaatttctgagcc

SEQ ID NO: 656 - DNA, 15 bp, Homo sapiens
actgaatttctgagc

SEQ ID NO: 657 - DNA, 15 bp, Homo sapiens
tactgaatttctgag

SEQ ID NO: 658 - DNA, 15 bp, Homo sapiens
ctactgaatttctga

SEQ ID NO: 659 - DNA, 15 bp, Homo sapiens
cctactgaatttctg

SEQ ID NO: 660 - DNA, 15 bp, Homo sapiens
gcctactgaatttct

SEQ ID NO: 661 - DNA, 15 bp, Homo sapiens
agcctactgaatttc

SEQ ID NO: 662 - DNA, 15 bp, Homo sapiens
tagcctactgaattt

SEQ ID NO: 663 - DNA, 15 bp, Homo sapiens
atagcctactgaatt

SEQ ID NO: 664 - DNA, 15 bp, Homo sapiens
gatagcctactgaat

SEQ ID NO: 665 - DNA, 15 bp, Homo sapiens
tgatagcctactgaa

SEQ ID NO: 666 - DNA, 15 bp, Homo sapiens
ttgatagcctactga

SEQ ID NO: 667 - DNA, 15 bp, Homo sapiens
tttgatagcctactg

SEQ ID NO: 668 - DNA, 15 bp, Homo sapiens
gtttgatagcctact

SEQ ID NO: 669 - DNA, 15 bp, Homo sapiens
agtttgatagcctac

SEQ ID NO: 670 - DNA, 15 bp, Homo sapiens
gagtttgatagccta

SEQ ID NO: 671 - DNA, 15 bp, Homo sapiens
tgagtttgatagcct

SEQ ID NO: 672 - DNA, 15 bp, Homo sapiens
gtgagtttgatagcc

SEQ ID NO: 673 - DNA, 15 bp, Homo sapiens
tgtgagtttgatagc

SEQ ID NO: 674 - DNA, 15 bp, Homo sapiens
gtgtgagtttgatag

SEQ ID NO: 675 - DNA, 15 bp, Homo sapiens
tgtgtgagtttgata

SEQ ID NO: 676 - DNA, 15 bp, Homo sapiens
ttgtgtgagtttgat

SEQ ID NO: 677 - DNA, 15 bp, Homo sapiens
gttgtgtgagtttga

SEQ ID NO: 678 - DNA, 15 bp, Homo sapiens
agttgtgtgagtttg

SEQ ID NO: 679 - DNA, 15 bp, Homo sapiens
gagttgtgtgagttt

SEQ ID NO: 680 - DNA, 15 bp, Homo sapiens
tgagttgtgtgagtt

SEQ ID NO: 681 - DNA, 15 bp, Homo sapiens
ctgagttgtgtgagt

SEQ ID NO: 682 - DNA, 15 bp, Homo sapiens
gctgagttgtgtgag

SEQ ID NO: 683 - DNA, 15 bp, Homo sapiens
tgctgagttgtgtga

SEQ ID NO: 684 - DNA, 15 bp, Homo sapiens
ttgctgagttgtgtg

SEQ ID NO: 685 - DNA, 15 bp, Homo sapiens
attgctgagttgtgt

SEQ ID NO: 686 - DNA, 15 bp, Homo sapiens
aattgctgagttgtg

SEQ ID NO: 687 - DNA, 15 bp, Homo sapiens
taattgctgagttgt

SEQ ID NO: 688 - DNA, 15 bp, Homo sapiens
ttaattgctgagttg

SEQ ID NO: 689 - DNA, 15 bp, Homo sapiens
tttaattgctgagtt

SEQ ID NO: 690 - DNA, 15 bp, Homo sapiens
ttttaattgctgagt

SEQ ID NO: 691 - DNA, 15 bp, Homo sapiens
gttttaattgctgag

SEQ ID NO: 692 - DNA, 15 bp, Homo sapiens
ggttttaattgctga

SEQ ID NO: 693 - DNA, 15 bp, Homo sapiens
tggttttaattgctg

SEQ ID NO: 694 - DNA, 15 bp, Homo sapiens
atggttttaattgct

SEQ ID NO: 695 - DNA, 15 bp, Homo sapiens
catggttttaattgc

SEQ ID NO: 696 - DNA, 15 bp, Homo sapiens
acatggttttaattg

SEQ ID NO: 697 - DNA, 15 bp, Homo sapiens
aacatggttttaatt

SEQ ID NO: 698 - DNA, 15 bp, Homo sapiens
aaacatggttttaat

SEQ ID NO: 699 - DNA, 15 bp, Homo sapiens
gaaacatggttttaa

SEQ ID NO: 700 - DNA, 15 bp, Homo sapiens
agaaacatggtttta

SEQ ID NO: 701 - DNA, 15 bp, Homo sapiens
gagaaacatggtttt

SEQ ID NO: 702 - DNA, 15 bp, Homo sapiens
agagaaacatggttt

SEQ ID NO: 703 - DNA, 15 bp, Homo sapiens
cagagaaacatggtt

SEQ ID NO: 704 - DNA, 15 bp, Homo sapiens
ccagagaaacatggt

SEQ ID NO: 705 - DNA, 15 bp, Homo sapiens
accagagaaacatgg

SEQ ID NO: 706 - DNA, 15 bp, Homo sapiens
gaccagagaaacatg

SEQ ID NO: 707 - DNA, 15 bp, Homo sapiens
agaccagagaaacat

SEQ ID NO: 708 - DNA, 15 bp, Homo sapiens
aagaccagagaaaca

SEQ ID NO: 709 - DNA, 15 bp, Homo sapiens
aaagaccagagaaac

SEQ ID NO: 710 - DNA, 15 bp, Homo sapiens
aaaagaccagagaaa

SEQ ID NO: 711 - DNA, 15 bp, Homo sapiens
gaaaagaccagagaa

SEQ ID NO: 712 - DNA, 15 bp, Homo sapiens
agaaaagaccagaga

SEQ ID NO: 713 - DNA, 15 bp, Homo sapiens
tagaaaagaccagag

SEQ ID NO: 714 - DNA, 15 bp, Homo sapiens
gtagaaaagaccaga

SEQ ID NO: 715 - DNA, 15 bp, Homo sapiens
tgtagaaaagaccag

SEQ ID NO: 716 - DNA, 15 bp, Homo sapiens
gtgtagaaaagacca

SEQ ID NO: 717 - DNA, 15 bp, Homo sapiens
agtgtagaaaagacc

SEQ ID NO: 718 - DNA, 15 bp, Homo sapiens
cagtgtagaaaagac

SEQ ID NO: 719 - DNA, 15 bp, Homo sapiens
tcagtgtagaaaaga

SEQ ID NO: 720 - DNA, 15 bp, Homo sapiens
atcagtgtagaaaag

SEQ ID NO: 721 - DNA, 15 bp, Homo sapiens
tatcagtgtagaaaa

SEQ ID NO: 722 - DNA, 15 bp, Homo sapiens
ttatcagtgtagaaa

SEQ ID NO: 723 - DNA, 15 bp, Homo sapiens
tttatcagtgtagaa

SEQ ID NO: 724 - DNA, 15 bp, Homo sapiens
gtttatcagtgtaga

SEQ ID NO: 725 - DNA, 15 bp, Homo sapiens
agtttatcagtgtag

SEQ ID NO: 726 - DNA, 15 bp, Homo sapiens
tagtttatcagtgta

SEQ ID NO: 727 - DNA, 15 bp, Homo sapiens
atagtttatcagtgt

SEQ ID NO: 728 - DNA, 15 bp, Homo sapiens
tatagtttatcagtg

SEQ ID NO: 729 - DNA, 15 bp, Homo sapiens
atatagtttatcagt

SEQ ID NO: 730 - DNA, 15 bp, Homo sapiens
gatatagtttatcag

SEQ ID NO: 731 - DNA, 15 bp, Homo sapiens
ggatatagtttatca

SEQ ID NO: 732 - DNA, 15 bp, Homo sapiens
tggatatagtttatc

SEQ ID NO: 733 - DNA, 15 bp, Homo sapiens
gtggatatagtttat

SEQ ID NO: 734 - DNA, 15 bp, Homo sapiens
tgtggatatagttta

SEQ ID NO: 735 - DNA, 15 bp, Homo sapiens
atgtggatatagttt

SEQ ID NO: 736 - DNA, 15 bp, Homo sapiens
catgtggatatagtt

SEQ ID NO: 737 - DNA, 15 bp, Homo sapiens
acatgtggatatagt

SEQ ID NO: 738 - DNA, 15 bp, Homo sapiens
aacatgtggatatag

SEQ ID NO: 739 - DNA, 15 bp, Homo sapiens
aaacatgtggatata

SEQ ID NO: 740 - DNA, 15 bp, Homo sapiens
taaacatgtggatat

SEQ ID NO: 741 - DNA, 15 bp, Homo sapiens
ttaaacatgtggata

SEQ ID NO: 742 - DNA, 15 bp, Homo sapiens
cttaaacatgtggat

SEQ ID NO: 743 - DNA, 15 bp, Homo sapiens
acttaaacatgtgga

SEQ ID NO: 744 - DNA, 15 bp, Homo sapiens
tacttaaacatgtgg

SEQ ID NO: 745 - DNA, 15 bp, Homo sapiens
atacttaaacatgtg

SEQ ID NO: 746 - DNA, 15 bp, Homo sapiens
aatacttaaacatgt

SEQ ID NO: 747 - DNA, 15 bp, Homo sapiens
aaatacttaaacatg

SEQ ID NO: 748 - DNA, 15 bp, Homo sapiens
caaatacttaaacat

SEQ ID NO: 749 - DNA, 15 bp, Homo sapiens
acaaatacttaaaca

SEQ ID NO: 750 - DNA, 15 bp, Homo sapiens
tacaaatacttaaac

SEQ ID NO: 751 - DNA, 15 bp, Homo sapiens
atacaaatacttaaa

SEQ ID NO: 752 - DNA, 15 bp, Homo sapiens
aatacaaatacttaa

SEQ ID NO: 753 - DNA, 15 bp, Homo sapiens
gaatacaaatactta

SEQ ID NO: 754 - DNA, 15 bp, Homo sapiens
tgaatacaaatactt

SEQ ID NO: 755 - DNA, 15 bp, Homo sapiens
ttgaatacaaatact

SEQ ID NO: 756 - DNA, 15 bp, Homo sapiens
gttgaatacaaatac

SEQ ID NO: 757 - DNA, 15 bp, Homo sapiens
tgttgaatacaaata

SEQ ID NO: 758 - DNA, 15 bp, Homo sapiens
ttgttgaatacaaat

SEQ ID NO: 759 - DNA, 15 bp, Homo sapiens
tttgttgaatacaaa

SEQ ID NO: 760 - DNA, 15 bp, Homo sapiens
ctttgttgaatacaa

SEQ ID NO: 761 - DNA, 15 bp, Homo sapiens
tctttgttgaataca

SEQ ID NO: 762 - DNA, 15 bp, Homo sapiens
ttctttgttgaatac

SEQ ID NO: 763 - DNA, 15 bp, Homo sapiens
attctttgttgaata

SEQ ID NO: 764 - DNA, 15 bp, Homo sapiens
gattctttgttgaat

SEQ ID NO: 765 - DNA, 15 bp, Homo sapiens
ggattctttgttgaa

SEQ ID NO: 766 - DNA, 15 bp, Homo sapiens
tggattctttgttga

SEQ ID NO: 767 - DNA, 15 bp, Homo sapiens
gtggattctttgttg

SEQ ID NO: 768 - DNA, 15 bp, Homo sapiens
ggtggattctttgtt

SEQ ID NO: 769 - DNA, 15 bp, Homo sapiens
tggtggattctttgt

SEQ ID NO: 770 - DNA, 15 bp, Homo sapiens
atggtggattctttg

SEQ ID NO: 771 - DNA, 15 bp, Homo sapiens
aatggtggattcttt

SEQ ID NO: 772 - DNA, 15 bp, Homo sapiens
aaatggtggattctt

SEQ ID NO: 773 - DNA, 15 bp, Homo sapiens
gaaatggtggattct

SEQ ID NO: 774 - DNA, 15 bp, Homo sapiens
ggaaatggtggattc

SEQ ID NO: 775 - DNA, 15 bp, Homo sapiens
aggaaatggtggatt

SEQ ID NO: 776 - DNA, 15 bp, Homo sapiens
aaggaaatggtggat

SEQ ID NO: 777 - DNA, 15 bp, Homo sapiens
aaaggaaatggtgga

SEQ ID NO: 778 - DNA, 15 bp, Homo sapiens
aaaaggaaatggtgg

SEQ ID NO: 779 - DNA, 15 bp, Homo sapiens
caaaaggaaatggtg

SEQ ID NO: 780 - DNA, 15 bp, Homo sapiens
acaaaaggaaatggt

SEQ ID NO: 781 - DNA, 15 bp, Homo sapiens
cacaaaaggaaatgg

SEQ ID NO: 782 - DNA, 15 bp, Homo sapiens
tcacaaaaggaaatg

SEQ ID NO: 783 - DNA, 15 bp, Homo sapiens
ctcacaaaaggaaat

SEQ ID NO: 784 - DNA, 15 bp, Homo sapiens
gctcacaaaaggaaa

SEQ ID NO: 785 - DNA, 15 bp, Homo sapiens
ggctcacaaaaggaa

SEQ ID NO: 786 - DNA, 15 bp, Homo sapiens
tggctcacaaaagga

SEQ ID NO: 787 - DNA, 15 bp, Homo sapiens
ctggctcacaaaagg

SEQ ID NO: 788 - DNA, 15 bp, Homo sapiens
actggctcacaaaag

SEQ ID NO: 789 - DNA, 15 bp, Homo sapiens
tactggctcacaaaa

SEQ ID NO: 790 - DNA, 15 bp, Homo sapiens
ttactggctcacaaa

SEQ ID NO: 791 - DNA, 15 bp, Homo sapiens
gttactggctcacaa

SEQ ID NO: 792 - DNA, 15 bp, Homo sapiens
agttactggctcaca

SEQ ID NO: 793 - DNA, 15 bp, Homo sapiens
tagttactggctcac

SEQ ID NO: 794 - DNA, 15 bp, Homo sapiens
atagttactggctca

SEQ ID NO: 795 - DNA, 15 bp, Homo sapiens
gatagttactggctc

SEQ ID NO: 796 - DNA, 15 bp, Homo sapiens
ggatagttactggct

SEQ ID NO: 797 - DNA, 15 bp, Homo sapiens
tggatagttactggc

SEQ ID NO: 798 - DNA, 15 bp, Homo sapiens
atggatagttactgg

SEQ ID NO: 799 - DNA, 15 bp, Homo sapiens
tatggatagttactg

SEQ ID NO: 800 - DNA, 15 bp, Homo sapiens
ttatggatagttact

SEQ ID NO: 801 - DNA, 15 bp, Homo sapiens
tttatggatagttac

SEQ ID NO: 802 - DNA, 15 bp, Homo sapiens
ttttatggatagtta

SEQ ID NO: 803 - DNA, 15 bp, Homo sapiens
tttttatggatagtt

SEQ ID NO: 804 - DNA, 15 bp, Homo sapiens
ttttttatggatagt

SEQ ID NO: 805 - DNA, 15 bp, Homo sapiens
gttttttatggatag

SEQ ID NO: 806 - DNA, 15 bp, Homo sapiens
agttttttatggata

SEQ ID NO: 807 - DNA, 15 bp, Homo sapiens
tagttttttatggat

SEQ ID NO: 808 - DNA, 15 bp, Homo sapiens
atagttttttatgga

SEQ ID NO: 809 - DNA, 15 bp, Homo sapiens
gatagttttttatgg

SEQ ID NO: 810 - DNA, 15 bp, Homo sapiens
agatagttttttatg

SEQ ID NO: 811 - DNA, 15 bp, Homo sapiens
cagatagttttttat

SEQ ID NO: 812 - DNA, 15 bp, Homo sapiens
gcagatagtttttta

SEQ ID NO: 813 - DNA, 15 bp, Homo sapiens
agcagatagtttttt

SEQ ID NO: 814 - DNA, 15 bp, Homo sapiens
cagcagatagttttt

SEQ ID NO: 815 - DNA, 15 bp, Homo sapiens
tcagcagatagtttt

SEQ ID NO: 816 - DNA, 15 bp, Homo sapiens
atcagcagatagttt

SEQ ID NO: 817 - DNA, 15 bp, Homo sapiens
catcagcagatagtt

SEQ ID NO: 818 - DNA, 15 bp, Homo sapiens
tcatcagcagatagt

SEQ ID NO: 819 - DNA, 15 bp, Homo sapiens
atcatcagcagatag

SEQ ID NO: 820 - DNA, 15 bp, Homo sapiens
aatcatcagcagata

SEQ ID NO: 821 - DNA, 15 bp, Homo sapiens
taatcatcagcagat

SEQ ID NO: 822 - DNA, 15 bp, Homo sapiens
ttaatcatcagcaga

SEQ ID NO: 823 - DNA, 15 bp, Homo sapiens
attaatcatcagcag

SEQ ID NO: 824 - DNA, 15 bp, Homo sapiens
aattaatcatcagca

SEQ ID NO: 825 - DNA, 15 bp, Homo sapiens
aaattaatcatcagc

SEQ ID NO: 826 - DNA, 15 bp, Homo sapiens
taaattaatcatcag

SEQ ID NO: 827 - DNA, 15 bp, Homo sapiens
ttaaattaatcatca

SEQ ID NO: 828 - DNA, 15 bp, Homo sapiens
cttaaattaatcatc

SEQ ID NO: 829 - DNA, 15 bp, Homo sapiens
acttaaattaatcat

SEQ ID NO: 830 - DNA, 15 bp, Homo sapiens
gacttaaattaatca

SEQ ID NO: 831 - DNA, 15 bp, Homo sapiens
tgacttaaattaatc

SEQ ID NO: 832 - DNA, 15 bp, Homo sapiens
gtgacttaaattaat

SEQ ID NO: 833 - DNA, 15 bp, Homo sapiens
ggtgacttaaattaa

SEQ ID NO: 834 - DNA, 15 bp, Homo sapiens
cggtgacttaaatta

SEQ ID NO: 835 - DNA, 15 bp, Homo sapiens
tcggtgacttaaatt

SEQ ID NO: 836 - DNA, 15 bp, Homo sapiens
gtcggtgacttaaat

SEQ ID NO: 837 - DNA, 15 bp, Homo sapiens
agtcggtgacttaaa

SEQ ID NO: 838 - DNA, 15 bp, Homo sapiens
cagtcggtgacttaa

SEQ ID NO: 839 - DNA, 15 bp, Homo sapiens
gcagtcggtgactta

SEQ ID NO: 840 - DNA, 15 bp, Homo sapiens
agcagtcggtgactt

SEQ ID NO: 841 - DNA, 15 bp, Homo sapiens
cagcagtcggtgact

SEQ ID NO: 842 - DNA, 15 bp, Homo sapiens
tcagcagtcggtgac

SEQ ID NO: 843 - DNA, 15 bp, Homo sapiens
atcagcagtcggtga

SEQ ID NO: 844 - DNA, 15 bp, Homo sapiens
tatcagcagtcggtg

SEQ ID NO: 845 - DNA, 15 bp, Homo sapiens
atatcagcagtcggt

SEQ ID NO: 846 - DNA, 15 bp, Homo sapiens
aatatcagcagtcgg

SEQ ID NO: 847 - DNA, 15 bp, Homo sapiens
taatatcagcagtcg

SEQ ID NO: 848 - DNA, 15 bp, Homo sapiens
gtaatatcagcagtc

SEQ ID NO: 849 - DNA, 15 bp, Homo sapiens
ggtaatatcagcagt

SEQ ID NO: 850 - DNA, 15 bp, Homo sapiens
gggtaatatcagcag

SEQ ID NO: 851 - DNA, 15 bp, Homo sapiens
agggtaatatcagca

SEQ ID NO: 852 - DNA, 15 bp, Homo sapiens
cagggtaatatcagc

SEQ ID NO: 853 - DNA, 15 bp, Homo sapiens
acagggtaatatcag

SEQ ID NO: 854 - DNA, 15 bp, Homo sapiens
aacagggtaatatca

SEQ ID NO: 855 - DNA, 15 bp, Homo sapiens
gaacagggtaatatc

SEQ ID NO: 856 - DNA, 15 bp, Homo sapiens
tgaacagggtaatat

SEQ ID NO: 857 - DNA, 15 bp, Homo sapiens
ttgaacagggtaata

SEQ ID NO: 858 - DNA, 15 bp, Homo sapiens
tttgaacagggtaat

SEQ ID NO: 859 - DNA, 15 bp, Homo sapiens
gtttgaacagggtaa

SEQ ID NO: 860 - DNA, 15 bp, Homo sapiens
ggtttgaacagggta

SEQ ID NO: 861 - DNA, 15 bp, Homo sapiens
gggtttgaacagggt

SEQ ID NO: 862 - DNA, 15 bp, Homo sapiens
ggggtttgaacaggg

SEQ ID NO: 863 - DNA, 15 bp, Homo sapiens
gggggtttgaacagg

SEQ ID NO: 864 - DNA, 15 bp, Homo sapiens
agggggtttgaacag

SEQ ID NO: 865 - DNA, 15 bp, Homo sapiens
tagggggtttgaaca

SEQ ID NO: 866 - DNA, 15 bp, Homo sapiens
atagggggtttgaac

SEQ ID NO: 867 - DNA, 15 bp, Homo sapiens
gatagggggtttgaa

SEQ ID NO: 868 - DNA, 15 bp, Homo sapiens
tgatagggggtttga

SEQ ID NO: 869 - DNA, 15 bp, Homo sapiens
atgatagggggtttg

SEQ ID NO: 870 - DNA, 15 bp, Homo sapiens
catgatagggggttt

SEQ ID NO: 871 - DNA, 15 bp, Homo sapiens
tcatgatagggggtt

SEQ ID NO: 872 - DNA, 15 bp, Homo sapiens
ttcatgatagggggt

SEQ ID NO: 873 - DNA, 15 bp, Homo sapiens
attcatgataggggg

SEQ ID NO: 874 - DNA, 15 bp, Homo sapiens
tattcatgatagggg

SEQ ID NO: 875 - DNA, 15 bp, Homo sapiens
ctattcatgataggg

SEQ ID NO: 876 - DNA, 15 bp, Homo sapiens
actattcatgatagg

SEQ ID NO: 877 - DNA, 15 bp, Homo sapiens
cactattcatgatag

SEQ ID NO: 878 - DNA, 15 bp, Homo sapiens
tcactattcatgata

SEQ ID NO: 879 - DNA, 15 bp, Homo sapiens
ctcactattcatgat

SEQ ID NO: 880 - DNA, 15 bp, Homo sapiens
cctcactattcatga

SEQ ID NO: 881 - DNA, 15 bp, Homo sapiens
acctcactattcatg

SEQ ID NO: 882 - DNA, 15 bp, Homo sapiens
gacctcactattcat

SEQ ID NO: 883 - DNA, 15 bp, Homo sapiens
tgacctcactattca

SEQ ID NO: 884 - DNA, 15 bp, Homo sapiens
ttgacctcactattc

SEQ ID NO: 885 - DNA, 15 bp, Homo sapiens
attgacctcactatt

SEQ ID NO: 886 - DNA, 15 bp, Homo sapiens
tattgacctcactat

SEQ ID NO: 887 - DNA, 15 bp, Homo sapiens
gtattgacctcacta

SEQ ID NO: 888 - DNA, 15 bp, Homo sapiens
ggtattgacctcact

SEQ ID NO: 889 - DNA, 15 bp, Homo sapiens
aggtattgacctcac

SEQ ID NO: 890 - DNA, 15 bp, Homo sapiens
taggtattgacctca

SEQ ID NO: 891 - DNA, 15 bp, Homo sapiens
ttaggtattgacctc

SEQ ID NO: 892 - DNA, 15 bp, Homo sapiens
tttaggtattgacct

SEQ ID NO: 893 - DNA, 15 bp, Homo sapiens
atttaggtattgacc

SEQ ID NO: 894 - DNA, 15 bp, Homo sapiens
aatttaggtattgac

SEQ ID NO: 895 - DNA, 15 bp, Homo sapiens
taatttaggtattga

SEQ ID NO: 896 - DNA, 15 bp, Homo sapiens
ataatttaggtattg

SEQ ID NO: 897 - DNA, 15 bp, Homo sapiens
aataatttaggtatt

SEQ ID NO: 898 - DNA, 15 bp, Homo sapiens
aaataatttaggtat

SEQ ID NO: 899 - DNA, 15 bp, Homo sapiens
caaataatttaggta

SEQ ID NO: 900 - DNA, 15 bp, Homo sapiens
tcaaataatttaggt

SEQ ID NO: 901 - DNA, 15 bp, Homo sapiens
ctcaaataatttagg

SEQ ID NO: 902 - DNA, 15 bp, Homo sapiens
cctcaaataatttag

SEQ ID NO: 903 - DNA, 15 bp, Homo sapiens
tcctcaaataattta

SEQ ID NO: 904 - DNA, 15 bp, Homo sapiens
ttcctcaaataattt

SEQ ID NO: 905 - DNA, 15 bp, Homo sapiens
tttcctcaaataatt

SEQ ID NO: 906 - DNA, 15 bp, Homo sapiens
ttttcctcaaataat

SEQ ID NO: 907 - DNA, 15 bp, Homo sapiens
gttttcctcaaataa

SEQ ID NO: 908 - DNA, 15 bp, Homo sapiens
tgttttcctcaaata

SEQ ID NO: 909 - DNA, 15 bp, Homo sapiens
ttgttttcctcaaat

SEQ ID NO: 910 - DNA, 15 bp, Homo sapiens
attgttttcctcaaa

SEQ ID NO: 911 - DNA, 15 bp, Homo sapiens
cattgttttcctcaa

SEQ ID NO: 912 - DNA, 15 bp, Homo sapiens
ccattgttttcctca

SEQ ID NO: 913 - DNA, 15 bp, Homo sapiens
gccattgttttcctc

SEQ ID NO: 914 - DNA, 15 bp, Homo sapiens
tgccattgttttcct

SEQ ID NO: 915 - DNA, 15 bp, Homo sapiens
gtgccattgttttcc

SEQ ID NO: 916 - DNA, 15 bp, Homo sapiens
tgtgccattgttttc

SEQ ID NO: 917 - DNA, 15 bp, Homo sapiens
ctgtgccattgtttt

SEQ ID NO: 918 - DNA, 15 bp, Homo sapiens
tctgtgccattgttt

SEQ ID NO: 919 - DNA, 15 bp, Homo sapiens
ttctgtgccattgtt

SEQ ID NO: 920 - DNA, 15 bp, Homo sapiens
tttctgtgccattgt

SEQ ID NO: 921 - DNA, 15 bp, Homo sapiens
atttctgtgccattg

SEQ ID NO: 922 - DNA, 15 bp, Homo sapiens
catttctgtgccatt

SEQ ID NO: 923 - DNA, 15 bp, Homo sapiens
gcatttctgtgccat

SEQ ID NO: 924 - DNA, 15 bp, Homo sapiens
tgcatttctgtgcca

SEQ ID NO: 925 - DNA, 15 bp, Homo sapiens
ctgcatttctgtgcc

SEQ ID NO: 926 - DNA, 15 bp, Homo sapiens
tctgcatttctgtgc

SEQ ID NO: 927 - DNA, 15 bp, Homo sapiens
atctgcatttctgtg

SEQ ID NO: 928 - DNA, 15 bp, Homo sapiens
tatctgcatttctgt

SEQ ID NO: 929 - DNA, 15 bp, Homo sapiens
ttatctgcatttctg

SEQ ID NO: 930 - DNA, 15 bp, Homo sapiens
attatctgcatttct

SEQ ID NO: 931 - DNA, 15 bp, Homo sapiens
cattatctgcatttc

SEQ ID NO: 932 - DNA, 15 bp, Homo sapiens
acattatctgcattt

SEQ ID NO: 933 - DNA, 15 bp, Homo sapiens
tacattatctgcatt

SEQ ID NO: 934 - DNA, 15 bp, Homo sapiens
ttacattatctgcat

SEQ ID NO: 935 - DNA, 15 bp, Homo sapiens
tttacattatctgca

SEQ ID NO: 936 - DNA, 15 bp, Homo sapiens
ctttacattatctgc

SEQ ID NO: 937 - DNA, 15 bp, Homo sapiens
tctttacattatctg

SEQ ID NO: 938 - DNA, 15 bp, Homo sapiens
ttctttacattatct

SEQ ID NO: 939 - DNA, 15 bp, Homo sapiens
cttctttacattatc

SEQ ID NO: 940 - DNA, 15 bp, Homo sapiens
tcttctttacattat

SEQ ID NO: 941 - DNA, 15 bp, Homo sapiens
ttcttctttacatta

SEQ ID NO: 942 - DNA, 15 bp, Homo sapiens
tttcttctttacatt

SEQ ID NO: 943 - DNA, 15 bp, Homo sapiens
ctttcttctttacat

SEQ ID NO: 944 - DNA, 15 bp, Homo sapiens
gctttcttctttaca

SEQ ID NO: 945 - DNA, 15 bp, Homo sapiens
tgctttcttctttac

SEQ ID NO: 946 - DNA, 15 bp, Homo sapiens
ttgctttcttcttta

SEQ ID NO: 947 - DNA, 15 bp, Homo sapiens
tttgctttcttcttt

SEQ ID NO: 948 - DNA, 15 bp, Homo sapiens
ttttgctttcttctt

SEQ ID NO: 949 - DNA, 15 bp, Homo sapiens
tttttgctttcttct

SEQ ID NO: 950 - DNA, 15 bp, Homo sapiens
atttttgctttcttc

SEQ ID NO: 951 - DNA, 15 bp, Homo sapiens
gatttttgctttctt

SEQ ID NO: 952 - DNA, 15 bp, Homo sapiens
tgatttttgctttct

SEQ ID NO: 953 - DNA, 15 bp, Homo sapiens
ttgatttttgctttc

SEQ ID NO: 954 - DNA, 15 bp, Homo sapiens
gttgatttttgcttt

SEQ ID NO: 955 - DNA, 15 bp, Homo sapiens
agttgatttttgctt

SEQ ID NO: 956 - DNA, 15 bp, Homo sapiens
gagttgatttttgct

SEQ ID NO: 957 - DNA, 15 bp, Homo sapiens
cgagttgatttttgc

SEQ ID NO: 958 - DNA, 15 bp, Homo sapiens
ccgagttgatttttg

SEQ ID NO: 959 - DNA, 15 bp, Homo sapiens
cccgagttgattttt

SEQ ID NO: 960 - DNA, 15 bp, Homo sapiens
ccccgagttgatttt

SEQ ID NO: 961 - DNA, 15 bp, Homo sapiens
tccccgagttgattt

SEQ ID NO: 962 - DNA, 15 bp, Homo sapiens
ttccccgagttgatt

SEQ ID NO: 963 - DNA, 15 bp, Homo sapiens
cttccccgagttgat

SEQ ID NO: 964 - DNA, 15 bp, Homo sapiens
acttccccgagttga

SEQ ID NO: 965 - DNA, 15 bp, Homo sapiens
tacttccccgagttg

SEQ ID NO: 966 - DNA, 15 bp, Homo sapiens
gtacttccccgagtt

SEQ ID NO: 967 - DNA, 15 bp, Homo sapiens
ggtacttccccgagt

SEQ ID NO: 968 - DNA, 15 bp, Homo sapiens
gggtacttccccgag

SEQ ID NO: 969 - DNA, 15 bp, Homo sapiens
ggggtacttccccga

SEQ ID NO: 970 - DNA, 15 bp, Homo sapiens
tggggtacttccccg

SEQ ID NO: 971 - DNA, 15 bp, Homo sapiens
ctggggtacttcccc

SEQ ID NO: 972 - DNA, 15 bp, Homo sapiens
gctggggtacttccc

SEQ ID NO: 973 - DNA, 15 bp, Homo sapiens
agctggggtacttcc

SEQ ID NO: 974 - DNA, 15 bp, Homo sapiens
gagctggggtacttc

SEQ ID NO: 975 - DNA, 15 bp, Homo sapiens
agagctggggtactt

SEQ ID NO: 976 - DNA, 15 bp, Homo sapiens
tagagctggggtact

SEQ ID NO: 977 - DNA, 15 bp, Homo sapiens
atagagctggggtac

SEQ ID NO: 978 - DNA, 15 bp, Homo sapiens
gatagagctggggta

SEQ ID NO: 979 - DNA, 15 bp, Homo sapiens
tgatagagctggggt

SEQ ID NO: 980 - DNA, 15 bp, Homo sapiens
atgatagagctgggg

SEQ ID NO: 981 - DNA, 15 bp, Homo sapiens
tatgatagagctggg

SEQ ID NO: 982 - DNA, 15 bp, Homo sapiens
atatgatagagctgg

SEQ ID NO: 983 - DNA, 15 bp, Homo sapiens
catatgatagagctg

SEQ ID NO: 984 - DNA, 15 bp, Homo sapiens
gcatatgatagagct

SEQ ID NO: 985 - DNA, 15 bp, Homo sapiens
agcatatgatagagc

SEQ ID NO: 986 - DNA, 15 bp, Homo sapiens
tagcatatgatagag

SEQ ID NO: 987 - DNA, 15 bp, Homo sapiens
atagcatatgataga

SEQ ID NO: 988 - DNA, 15 bp, Homo sapiens
aatagcatatgatag

SEQ ID NO: 989 - DNA, 15 bp, Homo sapiens
aaatagcatatgata

SEQ ID NO: 990 - DNA, 15 bp, Homo sapiens
caaatagcatatgat

SEQ ID NO: 991 - DNA, 15 bp, Homo sapiens
acaaatagcatatga

SEQ ID NO: 992 - DNA, 15 bp, Homo sapiens
cacaaatagcatatg

SEQ ID NO: 993 - DNA, 15 bp, Homo sapiens
acacaaatagcatat

SEQ ID NO: 994 - DNA, 15 bp, Homo sapiens
cacacaaatagcata

SEQ ID NO: 995 - DNA, 15 bp, Homo sapiens
ccacacaaatagcat

SEQ ID NO: 996 - DNA, 15 bp, Homo sapiens
accacacaaatagca

SEQ ID NO: 997 - DNA, 15 bp, Homo sapiens
aaccacacaaatagc

SEQ ID NO: 998 - DNA, 15 bp, Homo sapiens
aaaccacacaaatag

SEQ ID NO: 999 - DNA, 15 bp, Homo sapiens
caaaccacacaaata

SEQ ID NO: 1000 - DNA, 15 bp, Homo sapiens
gcaaaccacacaaat

SEQ ID NO: 1001 - DNA, 15 bp, Homo sapiens
cgcaaaccacacaaa

SEQ ID NO: 1002 - DNA, 15 bp, Homo sapiens
ccgcaaaccacacaa

SEQ ID NO: 1003 - DNA, 15 bp, Homo sapiens
gccgcaaaccacaca

SEQ ID NO: 1004 - DNA, 15 bp, Homo sapiens
tgccgcaaaccacac

SEQ ID NO: 1005 - DNA, 15 bp, Homo sapiens
ttgccgcaaaccaca

SEQ ID NO: 1006 - DNA, 15 bp, Homo sapiens
tttgccgcaaaccac

SEQ ID NO: 1007 - DNA, 15 bp, Homo sapiens
atttgccgcaaacca

SEQ ID NO: 1008 - DNA, 15 bp, Homo sapiens
gatttgccgcaaacc

SEQ ID NO: 1009 - DNA, 15 bp, Homo sapiens
tgatttgccgcaaac

SEQ ID NO: 1010 - DNA, 15 bp, Homo sapiens
gtgatttgccgcaaa

SEQ ID NO: 1011 - DNA, 15 bp, Homo sapiens
ggtgatttgccgcaa

SEQ ID NO: 1012 - DNA, 15 bp, Homo sapiens
aggtgatttgccgca

SEQ ID NO: 1013 - DNA, 15 bp, Homo sapiens
gaggtgatttgccgc

SEQ ID NO: 1014 - DNA, 15 bp, Homo sapiens
tgaggtgatttgccg

SEQ ID NO: 1015 - DNA, 15 bp, Homo sapiens
atgaggtgatttgcc

SEQ ID NO: 1016 - DNA, 15 bp, Homo sapiens
catgaggtgatttgc

SEQ ID NO: 1017 - DNA, 15 bp, Homo sapiens
gcatgaggtgatttg

SEQ ID NO: 1018 - DNA, 15 bp, Homo sapiens
agcatgaggtgattt

SEQ ID NO: 1019 - DNA, 15 bp, Homo sapiens
aagcatgaggtgatt

SEQ ID NO: 1020 - DNA, 15 bp, Homo sapiens
gaagcatgaggtgat

SEQ ID NO: 1021 - DNA, 15 bp, Homo sapiens
ggaagcatgaggtga

SEQ ID NO: 1022 - DNA, 15 bp, Homo sapiens
aggaagcatgaggtg

SEQ ID NO: 1023 - DNA, 15 bp, Homo sapiens
gaggaagcatgaggt

SEQ ID NO: 1024 - DNA, 15 bp, Homo sapiens
tgaggaagcatgagg

SEQ ID NO: 1025 - DNA, 15 bp, Homo sapiens
atgaggaagcatgag

SEQ ID NO: 1026 - DNA, 15 bp, Homo sapiens
gatgaggaagcatga

SEQ ID NO: 1027 - DNA, 15 bp, Homo sapiens
tgatgaggaagcatg

SEQ ID NO: 1028 - DNA, 15 bp, Homo sapiens
ttgatgaggaagcat

SEQ ID NO: 1029 - DNA, 15 bp, Homo sapiens
attgatgaggaagca

SEQ ID NO: 1030 - DNA, 15 bp, Homo sapiens
tattgatgaggaagc

SEQ ID NO: 1031 - DNA, 15 bp, Homo sapiens
ttattgatgaggaag

SEQ ID NO: 1032 - DNA, 15 bp, Homo sapiens
cttattgatgaggaa

SEQ ID NO: 1033 - DNA, 15 bp, Homo sapiens
tcttattgatgagga

SEQ ID NO: 1034 - DNA, 15 bp, Homo sapiens
atcttattgatgagg

SEQ ID NO: 1035 - DNA, 15 bp, Homo sapiens
catcttattgatgag

SEQ ID NO: 1036 - DNA, 15 bp, Homo sapiens
tcatcttattgatga

SEQ ID NO: 1037 - DNA, 15 bp, Homo sapiens
ctcatcttattgatg

SEQ ID NO: 1038 - DNA, 15 bp, Homo sapiens
cctcatcttattgat

SEQ ID NO: 1039 - DNA, 15 bp, Homo sapiens
tcctcatcttattga

SEQ ID NO: 1040 - DNA, 15 bp, Homo sapiens
atcctcatcttattg

SEQ ID NO: 1041 - DNA, 15 bp, Homo sapiens
tatcctcatcttatt

SEQ ID NO: 1042 - DNA, 15 bp, Homo sapiens
ctatcctcatcttat

SEQ ID NO: 1043 - DNA, 15 bp, Homo sapiens
actatcctcatctta

SEQ ID NO: 1044 - DNA, 15 bp, Homo sapiens
tactatcctcatctt

SEQ ID NO: 1045 - DNA, 15 bp, Homo sapiens
ttactatcctcatct

SEQ ID NO: 1046 - DNA, 15 bp, Homo sapiens
attactatcctcatc

SEQ ID NO: 1047 - DNA, 15 bp, Homo sapiens
aattactatcctcat

SEQ ID NO: 1048 - DNA, 15 bp, Homo sapiens
gaattactatcctca

SEQ ID NO: 1049 - DNA, 15 bp, Homo sapiens
tgaattactatcctc

SEQ ID NO: 1050 - DNA, 15 bp, Homo sapiens
atgaattactatcct

SEQ ID NO: 1051 - DNA, 15 bp, Homo sapiens
tatgaattactatcc

SEQ ID NO: 1052 - DNA, 15 bp, Homo sapiens
atatgaattactatc

SEQ ID NO: 1053 - DNA, 15 bp, Homo sapiens
gatatgaattactat

SEQ ID NO: 1054 - DNA, 15 bp, Homo sapiens
agatatgaattacta

SEQ ID NO: 1055 - DNA, 15 bp, Homo sapiens
aagatatgaattact

SEQ ID NO: 1056 - DNA, 15 bp, Homo sapiens
taagatatgaattac

SEQ ID NO: 1057 - DNA, 15 bp, Homo sapiens
ttaagatatgaatta

SEQ ID NO: 1058 - DNA, 15 bp, Homo sapiens
tttaagatatgaatt

SEQ ID NO: 1059 - DNA, 15 bp, Homo sapiens
ttttaagatatgaat

SEQ ID NO: 1060 - DNA, 15 bp, Homo sapiens
attttaagatatgaa

SEQ ID NO: 1061 - DNA, 15 bp, Homo sapiens
aattttaagatatga

SEQ ID NO: 1062 - DNA, 15 bp, Homo sapiens
gaattttaagatatg

SEQ ID NO: 1063 - DNA, 15 bp, Homo sapiens
agaattttaagatat

SEQ ID NO: 1064 - DNA, 15 bp, Homo sapiens
cagaattttaagata

SEQ ID NO: 1065 - DNA, 15 bp, Homo sapiens
tcagaattttaagat

SEQ ID NO: 1066 - DNA, 15 bp, Homo sapiens
atcagaattttaaga

SEQ ID NO: 1067 - DNA, 15 bp, Homo sapiens
aatcagaattttaag

SEQ ID NO: 1068 - DNA, 15 bp, Homo sapiens
taatcagaattttaa

SEQ ID NO: 1069 - DNA, 15 bp, Homo sapiens
ctaatcagaatttta

SEQ ID NO: 1070 - DNA, 15 bp, Homo sapiens
tctaatcagaatttt

SEQ ID NO: 1071 - DNA, 15 bp, Homo sapiens
atctaatcagaattt

SEQ ID NO: 1072 - DNA, 15 bp, Homo sapiens
aatctaatcagaatt

SEQ ID NO: 1073 - DNA, 15 bp, Homo sapiens
aaatctaatcagaat

SEQ ID NO: 1074 - DNA, 15 bp, Homo sapiens
aaaatctaatcagaa

SEQ ID NO: 1075 - DNA, 15 bp, Homo sapiens
caaaatctaatcaga

SEQ ID NO: 1076 - DNA, 15 bp, Homo sapiens
acaaaatctaatcag

SEQ ID NO: 1077 - DNA, 15 bp, Homo sapiens
tacaaaatctaatca

SEQ ID NO: 1078 - DNA, 15 bp, Homo sapiens
atacaaaatctaatc

SEQ ID NO: 1079 - DNA, 15 bp, Homo sapiens
tatacaaaatctaat

SEQ ID NO: 1080 - DNA, 15 bp, Homo sapiens
ttatacaaaatctaa

SEQ ID NO: 1081 - DNA, 15 bp, Homo sapiens
attatacaaaatcta

SEQ ID NO: 1082 - DNA, 15 bp, Homo sapiens
cattatacaaaatct

SEQ ID NO: 1083 - DNA, 15 bp, Homo sapiens
tcattatacaaaatc

SEQ ID NO: 1084 - DNA, 15 bp, Homo sapiens
ttcattatacaaaat

SEQ ID NO: 1085 - DNA, 15 bp, Homo sapiens
attcattatacaaaa

SEQ ID NO: 1086 - DNA, 15 bp, Homo sapiens
tattcattatacaaa

SEQ ID NO: 1087 - DNA, 15 bp, Homo sapiens
atattcattatacaa

SEQ ID NO: 1088 - DNA, 15 bp, Homo sapiens
aatattcattataca

SEQ ID NO: 1089 - DNA, 15 bp, Homo sapiens
taatattcattatac

SEQ ID NO: 1090 - DNA, 15 bp, Homo sapiens
ataatattcattata

SEQ ID NO: 1091 - DNA, 15 bp, Homo sapiens
tataatattcattat

SEQ ID NO: 1092 - DNA, 15 bp, Homo sapiens
atataatattcatta

SEQ ID NO: 1093 - DNA, 15 bp, Homo sapiens
tatataatattcatt

SEQ ID NO: 1094 - DNA, 15 bp, Homo sapiens
ctatataatattcat

SEQ ID NO: 1095 - DNA, 15 bp, Homo sapiens
actatataatattca

SEQ ID NO: 1096 - DNA, 15 bp, Homo sapiens
tactatataatattc

SEQ ID NO: 1097 - DNA, 15 bp, Homo sapiens
atactatataatatt

SEQ ID NO: 1098 - DNA, 15 bp, Homo sapiens
gatactatataatat

SEQ ID NO: 1099 - DNA, 15 bp, Homo sapiens
tgatactatataata

SEQ ID NO: 1100 - DNA, 15 bp, Homo sapiens
atgatactatataat

SEQ ID NO: 1101 - DNA, 15 bp, Homo sapiens
tatgatactatataa

SEQ ID NO: 1102 - DNA, 15 bp, Homo sapiens
atatgatactatata

SEQ ID NO: 1103 - DNA, 15 bp, Homo sapiens
tatatgatactatat

SEQ ID NO: 1104 - DNA, 15 bp, Homo sapiens
atatatgatactata

SEQ ID NO: 1105 - DNA, 15 bp, Homo sapiens
tatatatgatactat

SEQ ID NO: 1106 - DNA, 15 bp, Homo sapiens
atatatatgatacta

SEQ ID NO: 1107 - DNA, 15 bp, Homo sapiens
tatatatatgatact

SEQ ID NO: 1108 - DNA, 15 bp, Homo sapiens
ttatatatatgatac

SEQ ID NO: 1109 - DNA, 15 bp, Homo sapiens
gttatatatatgata

SEQ ID NO: 1110 - DNA, 15 bp, Homo sapiens
tgttatatatatgat

SEQ ID NO: 1111 - DNA, 15 bp, Homo sapiens
atgttatatatatga

SEQ ID NO: 1112 - DNA, 15 bp, Homo sapiens
tatgttatatatatg

SEQ ID NO: 1113 - DNA, 15 bp, Homo sapiens
atatgttatatatat

SEQ ID NO: 1114 - DNA, 15 bp, Homo sapiens
tatatgttatatata

SEQ ID NO: 1115 - DNA, 15 bp, Homo sapiens
gtatatgttatatat

SEQ ID NO: 1116 - DNA, 15 bp, Homo sapiens
tgtatatgttatata

SEQ ID NO: 1117 - DNA, 15 bp, Homo sapiens
ttgtatatgttatat

SEQ ID NO: 1118 - DNA, 15 bp, Homo sapiens
gttgtatatgttata

SEQ ID NO: 1119 - DNA, 15 bp, Homo sapiens
tgttgtatatgttat

SEQ ID NO: 1120 - DNA, 15 bp, Homo sapiens
gtgttgtatatgtta

SEQ ID NO: 1121 - DNA, 15 bp, Homo sapiens
tgtgttgtatatgtt

SEQ ID NO: 1122 - DNA, 15 bp, Homo sapiens
ttgtgttgtatatgt

SEQ ID NO: 1123 - DNA, 15 bp, Homo sapiens
attgtgttgtatatg

SEQ ID NO: 1124 - DNA, 15 bp, Homo sapiens
aattgtgttgtatat

SEQ ID NO: 1125 - DNA, 15 bp, Homo sapiens
taattgtgttgtata

SEQ ID NO: 1126 - DNA, 15 bp, Homo sapiens
ataattgtgttgtat

SEQ ID NO: 1127 - DNA, 15 bp, Homo sapiens
tataattgtgttgta

SEQ ID NO: 1128 - DNA, 15 bp, Homo sapiens
atataattgtgttgt

SEQ ID NO: 1129 - DNA, 15 bp, Homo sapiens
tatataattgtgttg

SEQ ID NO: 1130 - DNA, 15 bp, Homo sapiens
atatataattgtgtt

SEQ ID NO: 1131 - DNA, 15 bp, Homo sapiens
aatatataattgtgt

SEQ ID NO: 1132 - DNA, 15 bp, Homo sapiens
caatatataattgtg

SEQ ID NO: 1133 - DNA, 15 bp, Homo sapiens
gcaatatataattgt

SEQ ID NO: 1134 - DNA, 15 bp, Homo sapiens
tgcaatatataattg

SEQ ID NO: 1135 - DNA, 15 bp, Homo sapiens
atgcaatatataatt

SEQ ID NO: 1136 - DNA, 15 bp, Homo sapiens
catgcaatatataat

SEQ ID NO: 1137 - DNA, 15 bp, Homo sapiens
tcatgcaatatataa

SEQ ID NO: 1138 - DNA, 15 bp, Homo sapiens
atcatgcaatatata

SEQ ID NO: 1139 - DNA, 15 bp, Homo sapiens
tatcatgcaatatat

SEQ ID NO: 1140 - DNA, 15 bp, Homo sapiens
gtatcatgcaatata

SEQ ID NO: 1141 - DNA, 15 bp, Homo sapiens
tgtatcatgcaatat

SEQ ID NO: 1142 - DNA, 15 bp, Homo sapiens
atgtatcatgcaata

SEQ ID NO: 1143 - DNA, 15 bp, Homo sapiens
tatgtatcatgcaat

SEQ ID NO: 1144 - DNA, 15 bp, Homo sapiens
atatgtatcatgcaa

SEQ ID NO: 1145 - DNA, 15 bp, Homo sapiens
aatatgtatcatgca

SEQ ID NO: 1146 - DNA, 15 bp, Homo sapiens
caatatgtatcatgc

SEQ ID NO: 1147 - DNA, 15 bp, Homo sapiens
acaatatgtatcatg

SEQ ID NO: 1148 - DNA, 15 bp, Homo sapiens
tacaatatgtatcat

SEQ ID NO: 1149 - DNA, 15 bp, Homo sapiens
atacaatatgtatca

SEQ ID NO: 1150 - DNA, 15 bp, Homo sapiens
catacaatatgtatc

SEQ ID NO: 1151 - DNA, 15 bp, Homo sapiens
gcatacaatatgtat

SEQ ID NO: 1152 - DNA, 15 bp, Homo sapiens
tgcatacaatatgta

SEQ ID NO: 1153 - DNA, 15 bp, Homo sapiens
ttgcatacaatatgt

SEQ ID NO: 1154 - DNA, 15 bp, Homo sapiens
cttgcatacaatatg

SEQ ID NO: 1155 - DNA, 15 bp, Homo sapiens
acttgcatacaatat

SEQ ID NO: 1156 - DNA, 15 bp, Homo sapiens
tacttgcatacaata

SEQ ID NO: 1157 - DNA, 15 bp, Homo sapiens
gtacttgcatacaat

SEQ ID NO: 1158 - DNA, 15 bp, Homo sapiens
tgtacttgcatacaa

SEQ ID NO: 1159 - DNA, 15 bp, Homo sapiens
atgtacttgcataca

SEQ ID NO: 1160 - DNA, 15 bp, Homo sapiens
aatgtacttgcatac

SEQ ID NO: 1161 - DNA, 15 bp, Homo sapiens
aaatgtacttgcata

SEQ ID NO: 1162 - DNA, 15 bp, Homo sapiens
gaaatgtacttgcat

SEQ ID NO: 1163 - DNA, 15 bp, Homo sapiens
agaaatgtacttgca

SEQ ID NO: 1164 - DNA, 15 bp, Homo sapiens
tagaaatgtacttgc

SEQ ID NO: 1165 - DNA, 15 bp, Homo sapiens
atagaaatgtacttg

SEQ ID NO: 1166 - DNA, 15 bp, Homo sapiens
aatagaaatgtactt

SEQ ID NO: 1167 - DNA, 15 bp, Homo sapiens
caatagaaatgtact

SEQ ID NO: 1168 - DNA, 15 bp, Homo sapiens
gcaatagaaatgtac

SEQ ID NO: 1169 - DNA, 15 bp, Homo sapiens
tgcaatagaaatgta

SEQ ID NO: 1170 - DNA, 15 bp, Homo sapiens
atgcaatagaaatgt

SEQ ID NO: 1171 - DNA, 15 bp, Homo sapiens
aatgcaatagaaatg

SEQ ID NO: 1172 - DNA, 15 bp, Homo sapiens
taatgcaatagaaat

SEQ ID NO: 1173 - DNA, 15 bp, Homo sapiens
ataatgcaatagaaa

SEQ ID NO: 1174 - DNA, 15 bp, Homo sapiens
gataatgcaatagaa

SEQ ID NO: 1175 - DNA, 15 bp, Homo sapiens
agataatgcaataga

SEQ ID NO: 1176 - DNA, 15 bp, Homo sapiens
tagataatgcaatag

SEQ ID NO: 1177 - DNA, 15 bp, Homo sapiens
ttagataatgcaata

SEQ ID NO: 1178 - DNA, 15 bp, Homo sapiens
tttagataatgcaat

SEQ ID NO: 1179 - DNA, 15 bp, Homo sapiens
gtttagataatgcaa

SEQ ID NO: 1180 - DNA, 15 bp, Homo sapiens
agtttagataatgca

SEQ ID NO: 1181 - DNA, 15 bp, Homo sapiens
cagtttagataatgc

SEQ ID NO: 1182 - DNA, 15 bp, Homo sapiens
gcagtttagataatg

SEQ ID NO: 1183 - DNA, 15 bp, Homo sapiens
tgcagtttagataat

SEQ ID NO: 1184 - DNA, 15 bp, Homo sapiens
atgcagtttagataa

SEQ ID NO: 1185 - DNA, 15 bp, Homo sapiens
catgcagtttagata

SEQ ID NO: 1186 - DNA, 15 bp, Homo sapiens
tcatgcagtttagat

SEQ ID NO: 1187 - DNA, 15 bp, Homo sapiens
atcatgcagtttaga

SEQ ID NO: 1188 - DNA, 15 bp, Homo sapiens
tatcatgcagtttag

SEQ ID NO: 1189 - DNA, 15 bp, Homo sapiens
ttatcatgcagttta

SEQ ID NO: 1190 - DNA, 15 bp, Homo sapiens
tttatcatgcagttt

SEQ ID NO: 1191 - DNA, 15 bp, Homo sapiens
ttttatcatgcagtt

SEQ ID NO: 1192 - DNA, 15 bp, Homo sapiens
attttatcatgcagt

SEQ ID NO: 1193 - DNA, 15 bp, Homo sapiens
tattttatcatgcag

SEQ ID NO: 1194 - DNA, 15 bp, Homo sapiens
ctattttatcatgca

SEQ ID NO: 1195 - DNA, 15 bp, Homo sapiens
gctattttatcatgc

SEQ ID NO: 1196 - DNA, 15 bp, Homo sapiens
agctattttatcatg

SEQ ID NO: 1197 - DNA, 15 bp, Homo sapiens
aagctattttatcat

SEQ ID NO: 1198 - DNA, 15 bp, Homo sapiens
taagctattttatca

SEQ ID NO: 1199 - DNA, 15 bp, Homo sapiens
ataagctattttatc

SEQ ID NO: 1200 - DNA, 15 bp, Homo sapiens
cataagctattttat

SEQ ID NO: 1201 - DNA, 15 bp, Homo sapiens
acataagctatttta

SEQ ID NO: 1202 - DNA, 15 bp, Homo sapiens
tacataagctatttt

SEQ ID NO: 1203 - DNA, 15 bp, Homo sapiens
ttacataagctattt

SEQ ID NO: 1204 - DNA, 15 bp, Homo sapiens
cttacataagctatt

SEQ ID NO: 1205 - DNA, 15 bp, Homo sapiens
gcttacataagctat

SEQ ID NO: 1206 - DNA, 15 bp, Homo sapiens
agcttacataagcta

SEQ ID NO: 1207 - DNA, 15 bp, Homo sapiens
tagcttacataagct

SEQ ID NO: 1208 - DNA, 15 bp, Homo sapiens
atagcttacataagc

SEQ ID NO: 1209 - DNA, 15 bp, Homo sapiens
aatagcttacataag

SEQ ID NO: 1210 - DNA, 15 bp, Homo sapiens
aaatagcttacataa

SEQ ID NO: 1211 - DNA, 15 bp, Homo sapiens
taaatagcttacata

SEQ ID NO: 1212 - DNA, 15 bp, Homo sapiens
ataaatagcttacat

SEQ ID NO: 1213 - DNA, 15 bp, Homo sapiens
gataaatagcttaca

SEQ ID NO: 1214 - DNA, 15 bp, Homo sapiens
tgataaatagcttac

SEQ ID NO: 1215 - DNA, 15 bp, Homo sapiens
atgataaatagctta

SEQ ID NO: 1216 - DNA, 15 bp, Homo sapiens
catgataaatagctt

SEQ ID NO: 1217 - DNA, 15 bp, Homo sapiens
gcatgataaatagct

SEQ ID NO: 1218 - DNA, 15 bp, Homo sapiens
tgcatgataaatagc

SEQ ID NO: 1219 - DNA, 15 bp, Homo sapiens
ctgcatgataaatag

SEQ ID NO: 1220 - DNA, 15 bp, Homo sapiens
gctgcatgataaata

SEQ ID NO: 1221 - DNA, 15 bp, Homo sapiens
tgctgcatgataaat

SEQ ID NO: 1222 - DNA, 15 bp, Homo sapiens
atgctgcatgataaa

SEQ ID NO: 1223 - DNA, 15 bp, Homo sapiens
aatgctgcatgataa

SEQ ID NO: 1224 - DNA, 15 bp, Homo sapiens
aaatgctgcatgata

SEQ ID NO: 1225 - DNA, 15 bp, Homo sapiens
taaatgctgcatgat

SEQ ID NO: 1226 - DNA, 15 bp, Homo sapiens
ataaatgctgcatga

SEQ ID NO: 1227 - DNA, 15 bp, Homo sapiens
cataaatgctgcatg

SEQ ID NO: 1228 - DNA, 15 bp, Homo sapiens
acataaatgctgcat

SEQ ID NO: 1229 - DNA, 15 bp, Homo sapiens
tacataaatgctgca

SEQ ID NO: 1230 - DNA, 15 bp, Homo sapiens
ttacataaatgctgc

SEQ ID NO: 1231 - DNA, 15 bp, Homo sapiens
tttacataaatgctg

SEQ ID NO: 1232 - DNA, 15 bp, Homo sapiens
ctttacataaatgct

SEQ ID NO: 1233 - DNA, 15 bp, Homo sapiens
cctttacataaatgc

SEQ ID NO: 1234 - DNA, 15 bp, Homo sapiens
gcctttacataaatg

SEQ ID NO: 1235 - DNA, 15 bp, Homo sapiens
tgcctttacataaat

SEQ ID NO: 1236 - DNA, 15 bp, Homo sapiens
ttgcctttacataaa

SEQ ID NO: 1237 - DNA, 15 bp, Homo sapiens
attgcctttacataa

SEQ ID NO: 1238 - DNA, 15 bp, Homo sapiens
tattgcctttacata

SEQ ID NO: 1239 - DNA, 15 bp, Homo sapiens
ctattgcctttacat

SEQ ID NO: 1240 - DNA, 15 bp, Homo sapiens
tctattgcctttaca

SEQ ID NO: 1241 - DNA, 15 bp, Homo sapiens
ttctattgcctttac

SEQ ID NO: 1242 - DNA, 15 bp, Homo sapiens
tttctattgccttta

SEQ ID NO: 1243 - DNA, 15 bp, Homo sapiens
gtttctattgccttt

SEQ ID NO: 1244 - DNA, 15 bp, Homo sapiens
tgtttctattgcctt

SEQ ID NO: 1245 - DNA, 15 bp, Homo sapiens
ttgtttctattgcct

SEQ ID NO: 1246 - DNA, 15 bp, Homo sapiens
tttgtttctattgcc

SEQ ID NO: 1247 - DNA, 15 bp, Homo sapiens
atttgtttctattgc

SEQ ID NO: 1248 - DNA, 15 bp, Homo sapiens
catttgtttctattg

SEQ ID NO: 1249 - DNA, 15 bp, Homo sapiens
acatttgtttctatt

SEQ ID NO: 1250 - DNA, 15 bp, Homo sapiens
gacatttgtttctat

SEQ ID NO: 1251 - DNA, 15 bp, Homo sapiens
agacatttgtttcta

SEQ ID NO: 1252 - DNA, 15 bp, Homo sapiens
aagacatttgtttct

SEQ ID NO: 1253 - DNA, 15 bp, Homo sapiens
taagacatttgtttc

SEQ ID NO: 1254 - DNA, 15 bp, Homo sapiens
ataagacatttgttt

SEQ ID NO: 1255 - DNA, 15 bp, Homo sapiens
aataagacatttgtt

SEQ ID NO: 1256 - DNA, 15 bp, Homo sapiens
aaataagacatttgt

SEQ ID NO: 1257 - DNA, 15 bp, Homo sapiens
gaaataagacatttg

SEQ ID NO: 1258 - DNA, 15 bp, Homo sapiens
agaaataagacattt

SEQ ID NO: 1259 - DNA, 15 bp, Homo sapiens
aagaaataagacatt

SEQ ID NO: 1260 - DNA, 15 bp, Homo sapiens
taagaaataagacat

SEQ ID NO: 1261 - DNA, 15 bp, Homo sapiens
ctaagaaataagaca

SEQ ID NO: 1262 - DNA, 15 bp, Homo sapiens
actaagaaataagac

SEQ ID NO: 1263 - DNA, 15 bp, Homo sapiens
tactaagaaataaga

SEQ ID NO: 1264 - DNA, 15 bp, Homo sapiens
gtactaagaaataag

SEQ ID NO: 1265 - DNA, 15 bp, Homo sapiens
agtactaagaaataa

SEQ ID NO: 1266 - DNA, 15 bp, Homo sapiens
aagtactaagaaata

SEQ ID NO: 1267 - DNA, 15 bp, Homo sapiens
caagtactaagaaat

SEQ ID NO: 1268 - DNA, 15 bp, Homo sapiens
tcaagtactaagaaa

SEQ ID NO: 1269 - DNA, 15 bp, Homo sapiens
ctcaagtactaagaa

SEQ ID NO: 1270 - DNA, 15 bp, Homo sapiens
tctcaagtactaaga

SEQ ID NO: 1271 - DNA, 15 bp, Homo sapiens
ttctcaagtactaag

SEQ ID NO: 1272 - DNA, 15 bp, Homo sapiens
tttctcaagtactaa

SEQ ID NO: 1273 - DNA, 15 bp, Homo sapiens
atttctcaagtacta

SEQ ID NO: 1274 - DNA, 15 bp, Homo sapiens
aatttctcaagtact

SEQ ID NO: 1275 - DNA, 15 bp, Homo sapiens
aaatttctcaagtac

SEQ ID NO: 1276 - DNA, 15 bp, Homo sapiens
caaatttctcaagta

SEQ ID NO: 1277 - DNA, 15 bp, Homo sapiens
ccaaatttctcaagt

SEQ ID NO: 1278 - DNA, 15 bp, Homo sapiens
accaaatttctcaag

SEQ ID NO: 1279 - DNA, 15 bp, Homo sapiens
caccaaatttctcaa

SEQ ID NO: 1280 - DNA, 15 bp, Homo sapiens
acaccaaatttctca

SEQ ID NO: 1281 - DNA, 15 bp, Homo sapiens
tacaccaaatttctc

SEQ ID NO: 1282 - DNA, 15 bp, Homo sapiens
ctacaccaaatttct

SEQ ID NO: 1283 - DNA, 15 bp, Homo sapiens
gctacaccaaatttc

SEQ ID NO: 1284 - DNA, 15 bp, Homo sapiens
agctacaccaaattt

SEQ ID NO: 1285 - DNA, 15 bp, Homo sapiens
aagctacaccaaatt

SEQ ID NO: 1286 - DNA, 15 bp, Homo sapiens
caagctacaccaaat

SEQ ID NO: 1287 - DNA, 15 bp, Homo sapiens
tcaagctacaccaaa

SEQ ID NO: 1288 - DNA, 15 bp, Homo sapiens
ttcaagctacaccaa

SEQ ID NO: 1289 - DNA, 15 bp, Homo sapiens
tttcaagctacacca

SEQ ID NO: 1290 - DNA, 15 bp, Homo sapiens
ctttcaagctacacc

SEQ ID NO: 1291 - DNA, 15 bp, Homo sapiens
tctttcaagctacac

SEQ ID NO: 1292 - DNA, 15 bp, Homo sapiens
atctttcaagctaca

SEQ ID NO: 1293 - DNA, 15 bp, Homo sapiens
tatctttcaagctac

SEQ ID NO: 1294 - DNA, 15 bp, Homo sapiens
gtatctttcaagcta

SEQ ID NO: 1295 - DNA, 15 bp, Homo sapiens
tgtatctttcaagct

SEQ ID NO: 1296 - DNA, 15 bp, Homo sapiens
atgtatctttcaagc

SEQ ID NO: 1297 - DNA, 15 bp, Homo sapiens
catgtatctttcaag

SEQ ID NO: 1298 - DNA, 15 bp, Homo sapiens
acatgtatctttcaa

SEQ ID NO: 1299 - DNA, 15 bp, Homo sapiens
aacatgtatctttca

SEQ ID NO: 1300 - DNA, 15 bp, Homo sapiens
taacatgtatctttc

SEQ ID NO: 1301 - DNA, 15 bp, Homo sapiens
ctaacatgtatcttt

SEQ ID NO: 1302 - DNA, 15 bp, Homo sapiens
actaacatgtatctt

SEQ ID NO: 1303 - DNA, 15 bp, Homo sapiens
gactaacatgtatct

SEQ ID NO: 1304 - DNA, 15 bp, Homo sapiens
agactaacatgtatc

SEQ ID NO: 1305 - DNA, 15 bp, Homo sapiens
aagactaacatgtat

SEQ ID NO: 1306 - DNA, 15 bp, Homo sapiens
gaagactaacatgta

SEQ ID NO: 1307 - DNA, 15 bp, Homo sapiens
tgaagactaacatgt

SEQ ID NO: 1308 - DNA, 15 bp, Homo sapiens
ttgaagactaacatg

SEQ ID NO: 1309 - DNA, 15 bp, Homo sapiens
tttgaagactaacat

SEQ ID NO: 1310 - DNA, 15 bp, Homo sapiens
ctttgaagactaaca

SEQ ID NO: 1311 - DNA, 15 bp, Homo sapiens
actttgaagactaac

SEQ ID NO: 1312 - DNA, 15 bp, Homo sapiens
tactttgaagactaa

SEQ ID NO: 1313 - DNA, 15 bp, Homo sapiens
ttactttgaagacta

SEQ ID NO: 1314 - DNA, 15 bp, Homo sapiens
cttactttgaagact

SEQ ID NO: 1315 - DNA, 15 bp, Homo sapiens
acttactttgaagac

SEQ ID NO: 1316 - DNA, 15 bp, Homo sapiens
aacttactttgaaga

SEQ ID NO: 1317 - DNA, 15 bp, Homo sapiens
aaacttactttgaag

SEQ ID NO: 1318 - DNA, 15 bp, Homo sapiens
taaacttactttgaa

SEQ ID NO: 1319 - DNA, 15 bp, Homo sapiens
ataaacttactttga

SEQ ID NO: 1320 - DNA, 15 bp, Homo sapiens
aataaacttactttg

SEQ ID NO: 1321 - DNA, 15 bp, Homo sapiens
taataaacttacttt

SEQ ID NO: 1322 - DNA, 15 bp, Homo sapiens
ataataaacttactt

SEQ ID NO: 1323 - DNA, 15 bp, Homo sapiens
cataataaacttact

SEQ ID NO: 1324 - DNA, 15 bp, Homo sapiens
tcataataaacttac

SEQ ID NO: 1325 - DNA, 15 bp, Homo sapiens
ttcataataaactta

SEQ ID NO: 1326 - DNA, 15 bp, Homo sapiens
attcataataaactt

SEQ ID NO: 1327 - DNA, 15 bp, Homo sapiens
aattcataataaact

SEQ ID NO: 1328 - DNA, 15 bp, Homo sapiens
aaattcataataaac

SEQ ID NO: 1329 - DNA, 15 bp, Homo sapiens
taaattcataataaa

SEQ ID NO: 1330 - DNA, 15 bp, Homo sapiens
ttaaattcataataa

SEQ ID NO: 1331 - DNA, 15 bp, Homo sapiens
attaaattcataata

SEQ ID NO: 1332 - DNA, 15 bp, Homo sapiens
tattaaattcataat

SEQ ID NO: 1333 - DNA, 15 bp, Homo sapiens
ttattaaattcataa

SEQ ID NO: 1334 - DNA, 15 bp, Homo sapiens
gttattaaattcata

SEQ ID NO: 1335 - DNA, 15 bp, Homo sapiens
agttattaaattcat

SEQ ID NO: 1336 - DNA, 15 bp, Homo sapiens
gagttattaaattca

SEQ ID NO: 1337 - DNA, 15 bp, Homo sapiens
ggagttattaaattc

SEQ ID NO: 1338 - DNA, 15 bp, Homo sapiens
tggagttattaaatt

SEQ ID NO: 1339 - DNA, 15 bp, Homo sapiens
atggagttattaaat

SEQ ID NO: 1340 - DNA, 15 bp, Homo sapiens
tatggagttattaaa

SEQ ID NO: 1341 - DNA, 15 bp, Homo sapiens
atatggagttattaa

SEQ ID NO: 1342 - DNA, 15 bp, Homo sapiens
aatatggagttatta

SEQ ID NO: 1343 - DNA, 15 bp, Homo sapiens
aaatatggagttatt

SEQ ID NO: 1344 - DNA, 15 bp, Homo sapiens
aaaatatggagttat

SEQ ID NO: 1345 - DNA, 15 bp, Homo sapiens
taaaatatggagtta

SEQ ID NO: 1346 - DNA, 15 bp, Homo sapiens
ttaaaatatggagtt

SEQ ID NO: 1347 - DNA, 15 bp, Homo sapiens
tttaaaatatggagt

SEQ ID NO: 1348 - DNA, 15 bp, Homo sapiens
gtttaaaatatggag

SEQ ID NO: 1349 - DNA, 15 bp, Homo sapiens
agtttaaaatatgga

SEQ ID NO: 1350 - DNA, 15 bp, Homo sapiens
aagtttaaaatatgg

SEQ ID NO: 1351 - DNA, 15 bp, Homo sapiens
gaagtttaaaatatg

SEQ ID NO: 1352 - DNA, 15 bp, Homo sapiens
agaagtttaaaatat

SEQ ID NO: 1353 - DNA, 15 bp, Homo sapiens
tagaagtttaaaata

SEQ ID NO: 1354 - DNA, 15 bp, Homo sapiens
ttagaagtttaaaat

SEQ ID NO: 1355 - DNA, 15 bp, Homo sapiens
attagaagtttaaaa

SEQ ID NO: 1356 - DNA, 15 bp, Homo sapiens
aattagaagtttaaa

SEQ ID NO: 1357 - DNA, 15 bp, Homo sapiens
aaattagaagtttaa

SEQ ID NO: 1358 - DNA, 15 bp, Homo sapiens
taaattagaagttta

SEQ ID NO: 1359 - DNA, 15 bp, Homo sapiens
ataaattagaagttt

SEQ ID NO: 1360 - DNA, 15 bp, Homo sapiens
cataaattagaagtt

SEQ ID NO: 1361 - DNA, 15 bp, Homo sapiens
tcataaattagaagt

SEQ ID NO: 1362 - DNA, 15 bp, Homo sapiens
ttcataaattagaag

SEQ ID NO: 1363 - DNA, 15 bp, Homo sapiens
cttcataaattagaa

SEQ ID NO: 1364 - DNA, 15 bp, Homo sapiens
tcttcataaattaga

SEQ ID NO: 1365 - DNA, 15 bp, Homo sapiens
ttcttcataaattag

SEQ ID NO: 1366 - DNA, 15 bp, Homo sapiens
attcttcataaatta

SEQ ID NO: 1367 - DNA, 15 bp, Homo sapiens
aattcttcataaatt

SEQ ID NO: 1368 - DNA, 15 bp, Homo sapiens
gaattcttcataaat

SEQ ID NO: 1369 - DNA, 15 bp, Homo sapiens
agaattcttcataaa

SEQ ID NO: 1370 - DNA, 15 bp, Homo sapiens
aagaattcttcataa

SEQ ID NO: 1371 - DNA, 15 bp, Homo sapiens
taagaattcttcata

SEQ ID NO: 1372 - DNA, 15 bp, Homo sapiens
gtaagaattcttcat

SEQ ID NO: 1373 - DNA, 15 bp, Homo sapiens
agtaagaattcttca

SEQ ID NO: 1374 - DNA, 15 bp, Homo sapiens
aagtaagaattcttc

SEQ ID NO: 1375 - DNA, 15 bp, Homo sapiens
aaagtaagaattctt

SEQ ID NO: 1376 - DNA, 15 bp, Homo sapiens
aaaagtaagaattct

SEQ ID NO: 1377 - DNA, 15 bp, Homo sapiens
caaaagtaagaattc

SEQ ID NO: 1378 - DNA, 15 bp, Homo sapiens
ccaaaagtaagaatt

SEQ ID NO: 1379 - DNA, 15 bp, Homo sapiens
tccaaaagtaagaat

SEQ ID NO: 1380 - DNA, 15 bp, Homo sapiens
ttccaaaagtaagaa

SEQ ID NO: 1381 - DNA, 15 bp, Homo sapiens
tttccaaaagtaaga

SEQ ID NO: 1382 - DNA, 15 bp, Homo sapiens
ttttccaaaagtaag

SEQ ID NO: 1383 - DNA, 15 bp, Homo sapiens
gttttccaaaagtaa

SEQ ID NO: 1384 - DNA, 15 bp, Homo sapiens
tgttttccaaaagta

SEQ ID NO: 1385 - DNA, 15 bp, Homo sapiens
ttgttttccaaaagt

SEQ ID NO: 1386 - DNA, 15 bp, Homo sapiens
tttgttttccaaaag

SEQ ID NO: 1387 - DNA, 15 bp, Homo sapiens
ttttgttttccaaaa

SEQ ID NO: 1388 - DNA, 15 bp, Homo sapiens
tttttgttttccaaa

SEQ ID NO: 1389 - DNA, 15 bp, Homo sapiens
ttttttgttttccaa

SEQ ID NO: 1390 - DNA, 15 bp, Homo sapiens
tttttttgttttcca

SEQ ID NO: 1391 - DNA, 15 bp, Homo sapiens
atttttttgttttcc

SEQ ID NO: 1392 - DNA, 15 bp, Homo sapiens
aatttttttgttttc

SEQ ID NO: 1393 - DNA, 15 bp, Homo sapiens
aaatttttttgtttt

SEQ ID NO: 1394 - DNA, 15 bp, Homo sapiens
taaatttttttgttt

SEQ ID NO: 1395 - DNA, 15 bp, Homo sapiens
gtaaatttttttgtt

SEQ ID NO: 1396 - DNA, 15 bp, Homo sapiens
ggtaaatttttttgt

SEQ ID NO: 1397 - DNA, 15 bp, Homo sapiens
aggtaaatttttttg

SEQ ID NO: 1398 - DNA, 15 bp, Homo sapiens
aaggtaaattttttt

SEQ ID NO: 1399 - DNA, 15 bp, Homo sapiens
aaaggtaaatttttt

SEQ ID NO: 1400 - DNA, 15 bp, Homo sapiens
caaaggtaaattttt

SEQ ID NO: 1401 - DNA, 15 bp, Homo sapiens
gcaaaggtaaatttt

SEQ ID NO: 1402 - DNA, 15 bp, Homo sapiens
tgcaaaggtaaattt

SEQ ID NO: 1403 - DNA, 15 bp, Homo sapiens
ctgcaaaggtaaatt

SEQ ID NO: 1404 - DNA, 15 bp, Homo sapiens
actgcaaaggtaaat

SEQ ID NO: 1405 - DNA, 15 bp, Homo sapiens
tactgcaaaggtaaa

SEQ ID NO: 1406 - DNA, 15 bp, Homo sapiens
ctactgcaaaggtaa

SEQ ID NO: 1407 - DNA, 15 bp, Homo sapiens
gctactgcaaaggta

SEQ ID NO: 1408 - DNA, 15 bp, Homo sapiens
cgctactgcaaaggt

SEQ ID NO: 1409 - DNA, 15 bp, Homo sapiens
acgctactgcaaagg

SEQ ID NO: 1410 - DNA, 15 bp, Homo sapiens
aacgctactgcaaag

SEQ ID NO: 1411 - DNA, 15 bp, Homo sapiens
gaacgctactgcaaa

SEQ ID NO: 1412 - DNA, 15 bp, Homo sapiens
cgaacgctactgcaa

SEQ ID NO: 1413 - DNA, 15 bp, Homo sapiens
gcgaacgctactgca

SEQ ID NO: 1414 - DNA, 15 bp, Homo sapiens
agcgaacgctactgc

SEQ ID NO: 1415 - DNA, 15 bp, Homo sapiens
gagcgaacgctactg

SEQ ID NO: 1416 - DNA, 15 bp, Homo sapiens
agagcgaacgctact

SEQ ID NO: 1417 - DNA, 15 bp, Homo sapiens
gagagcgaacgctac

SEQ ID NO: 1418 - DNA, 15 bp, Homo sapiens
tgagagcgaacgcta

SEQ ID NO: 1419 - DNA, 15 bp, Homo sapiens
gtgagagcgaacgct

SEQ ID NO: 1420 - DNA, 15 bp, Homo sapiens
agtgagagcgaacgc

SEQ ID NO: 1421 - DNA, 15 bp, Homo sapiens
aagtgagagcgaacg

SEQ ID NO: 1422 - DNA, 15 bp, Homo sapiens
gaagtgagagcgaac

SEQ ID NO: 1423 - DNA, 15 bp, Homo sapiens
tgaagtgagagcgaa

SEQ ID NO: 1424 - DNA, 15 bp, Homo sapiens
ctgaagtgagagcga

SEQ ID NO: 1425 - DNA, 15 bp, Homo sapiens
cctgaagtgagagcg

SEQ ID NO: 1426 - DNA, 15 bp, Homo sapiens
tcctgaagtgagagc

SEQ ID NO: 1427 - DNA, 15 bp, Homo sapiens
gtcctgaagtgagag

SEQ ID NO: 1428 - DNA, 15 bp, Homo sapiens
agtcctgaagtgaga

SEQ ID NO: 1429 - DNA, 15 bp, Homo sapiens
cagtcctgaagtgag

SEQ ID NO: 1430 - DNA, 15 bp, Homo sapiens
gcagtcctgaagtga

SEQ ID NO: 1431 - DNA, 15 bp, Homo sapiens
agcagtcctgaagtg

SEQ ID NO: 1432 - DNA, 15 bp, Homo sapiens
tagcagtcctgaagt

SEQ ID NO: 1433 - DNA, 15 bp, Homo sapiens
gtagcagtcctgaag

SEQ ID NO: 1434 - DNA, 15 bp, Homo sapiens
agtagcagtcctgaa

SEQ ID NO: 1435 - DNA, 15 bp, Homo sapiens
cagtagcagtcctga

SEQ ID NO: 1436 - DNA, 15 bp, Homo sapiens
tcagtagcagtcctg

SEQ ID NO: 1437 - DNA, 15 bp, Homo sapiens
atcagtagcagtcct

SEQ ID NO: 1438 - DNA, 15 bp, Homo sapiens
catcagtagcagtcc

SEQ ID NO: 1439 - DNA, 15 bp, Homo sapiens
acatcagtagcagtc

SEQ ID NO: 1440 - DNA, 15 bp, Homo sapiens
gacatcagtagcagt

SEQ ID NO: 1441 - DNA, 15 bp, Homo sapiens
ggacatcagtagcag

SEQ ID NO: 1442 - DNA, 15 bp, Homo sapiens
tggacatcagtagca

SEQ ID NO: 1443 - DNA, 15 bp, Homo sapiens
gtggacatcagtagc

SEQ ID NO: 1444 - DNA, 15 bp, Homo sapiens
tgtggacatcagtag

SEQ ID NO: 1445 - DNA, 15 bp, Homo sapiens
ctgtggacatcagta

SEQ ID NO: 1446 - DNA, 15 bp, Homo sapiens
actgtggacatcagt

SEQ ID NO: 1447 - DNA, 15 bp, Homo sapiens
gactgtggacatcag

SEQ ID NO: 1448 - DNA, 15 bp, Homo sapiens
agactgtggacatca

SEQ ID NO: 1449 - DNA, 15 bp, Homo sapiens
gagactgtggacatc

SEQ ID NO: 1450 - DNA, 15 bp, Homo sapiens
tgagactgtggacat

SEQ ID NO: 1451 - DNA, 15 bp, Homo sapiens
atgagactgtggaca

SEQ ID NO: 1452 - DNA, 15 bp, Homo sapiens
tatgagactgtggac

SEQ ID NO: 1453 - DNA, 15 bp, Homo sapiens
ctatgagactgtgga

SEQ ID NO: 1454 - DNA, 15 bp, Homo sapiens
tctatgagactgtgg

SEQ ID NO: 1455 - DNA, 15 bp, Homo sapiens
gtctatgagactgtg

SEQ ID NO: 1456 - DNA, 15 bp, Homo sapiens
tgtctatgagactgt

SEQ ID NO: 1457 - DNA, 15 bp, Homo sapiens
atgtctatgagactg

SEQ ID NO: 1458 - DNA, 15 bp, Homo sapiens
catgtctatgagact

SEQ ID NO: 1459 - DNA, 15 bp, Homo sapiens
acatgtctatgagac

SEQ ID NO: 1460 - DNA, 15 bp, Homo sapiens
aacatgtctatgaga

SEQ ID NO: 1461 - DNA, 15 bp, Homo sapiens
gaacatgtctatgag

SEQ ID NO: 1462 - DNA, 15 bp, Homo sapiens
tgaacatgtctatga

SEQ ID NO: 1463 - DNA, 15 bp, Homo sapiens
atgaacatgtctatg

SEQ ID NO: 1464 - DNA, 15 bp, Homo sapiens
tatgaacatgtctat

SEQ ID NO: 1465 - DNA, 15 bp, Homo sapiens
atatgaacatgtcta

SEQ ID NO: 1466 - DNA, 15 bp, Homo sapiens
tatatgaacatgtct

SEQ ID NO: 1467 - DNA, 15 bp, Homo sapiens
gtatatgaacatgtc

SEQ ID NO: 1468 - DNA, 15 bp, Homo sapiens
ggtatatgaacatgt

SEQ ID NO: 1469 - DNA, 15 bp, Homo sapiens
aggtatatgaacatg

SEQ ID NO: 1470 - DNA, 15 bp, Homo sapiens
caggtatatgaacat

SEQ ID NO: 1471 - DNA, 15 bp, Homo sapiens
acaggtatatgaaca

SEQ ID NO: 1472 - DNA, 15 bp, Homo sapiens
tacaggtatatgaac

SEQ ID NO: 1473 - DNA, 15 bp, Homo sapiens
ttacaggtatatgaa

SEQ ID NO: 1474 - DNA, 15 bp, Homo sapiens
tttacaggtatatga

SEQ ID NO: 1475 - DNA, 15 bp, Homo sapiens
ttttacaggtatatg

SEQ ID NO: 1476 - DNA, 15 bp, Homo sapiens
cttttacaggtatat

SEQ ID NO: 1477 - DNA, 15 bp, Homo sapiens
gcttttacaggtata

SEQ ID NO: 1478 - DNA, 15 bp, Homo sapiens
ggcttttacaggtat

SEQ ID NO: 1479 - DNA, 15 bp, Homo sapiens
tggcttttacaggta

SEQ ID NO: 1480 - DNA, 15 bp, Homo sapiens
ttggcttttacaggt

SEQ ID NO: 1481 - DNA, 15 bp, Homo sapiens
tttggcttttacagg

SEQ ID NO: 1482 - DNA, 15 bp, Homo sapiens
ctttggcttttacag

SEQ ID NO: 1483 - DNA, 15 bp, Homo sapiens
actttggcttttaca

SEQ ID NO: 1484 - DNA, 15 bp, Homo sapiens
aactttggcttttac

SEQ ID NO: 1485 - DNA, 15 bp, Homo sapiens
taactttggctttta

SEQ ID NO: 1486 - DNA, 15 bp, Homo sapiens
ataactttggctttt

SEQ ID NO: 1487 - DNA, 15 bp, Homo sapiens
tataactttggcttt

SEQ ID NO: 1488 - DNA, 15 bp, Homo sapiens
atataactttggctt

SEQ ID NO: 1489 - DNA, 15 bp, Homo sapiens
gatataactttggct

SEQ ID NO: 1490 - DNA, 15 bp, Homo sapiens
agatataactttggc

SEQ ID NO: 1491 - DNA, 15 bp, Homo sapiens
gagatataactttgg

SEQ ID NO: 1492 - DNA, 15 bp, Homo sapiens
tgagatataactttg

SEQ ID NO: 1493 - DNA, 15 bp, Homo sapiens
ctgagatataacttt

SEQ ID NO: 1494 - DNA, 15 bp, Homo sapiens
tctgagatataactt

SEQ ID NO: 1495 - DNA, 15 bp, Homo sapiens
ttctgagatataact

SEQ ID NO: 1496 - DNA, 15 bp, Homo sapiens
attctgagatataac

SEQ ID NO: 1497 - DNA, 15 bp, Homo sapiens
tattctgagatataa

SEQ ID NO: 1498 - DNA, 15 bp, Homo sapiens
atattctgagatata

SEQ ID NO: 1499 - DNA, 15 bp, Homo sapiens
tatattctgagatat

SEQ ID NO: 1500 - DNA, 15 bp, Homo sapiens
gtatattctgagata

SEQ ID NO: 1501 - DNA, 15 bp, Homo sapiens
ggtatattctgagat

SEQ ID NO: 1502 - DNA, 15 bp, Homo sapiens
tggtatattctgaga

SEQ ID NO: 1503 - DNA, 15 bp, Homo sapiens
atggtatattctgag

SEQ ID NO: 1504 - DNA, 15 bp, Homo sapiens
catggtatattctga

SEQ ID NO: 1505 - DNA, 15 bp, Homo sapiens
gcatggtatattctg

SEQ ID NO: 1506 - DNA, 15 bp, Homo sapiens
agcatggtatattct

SEQ ID NO: 1507 - DNA, 15 bp, Homo sapiens
aagcatggtatattc

SEQ ID NO: 1508 - DNA, 15 bp, Homo sapiens
caagcatggtatatt

SEQ ID NO: 1509 - DNA, 15 bp, Homo sapiens
tcaagcatggtatat

SEQ ID NO: 1510 - DNA, 15 bp, Homo sapiens
ctcaagcatggtata

SEQ ID NO: 1511 - DNA, 15 bp, Homo sapiens
actcaagcatggtat

SEQ ID NO: 1512 - DNA, 15 bp, Homo sapiens
aactcaagcatggta

SEQ ID NO: 1513 - DNA, 15 bp, Homo sapiens
gaactcaagcatggt

SEQ ID NO: 1514 - DNA, 15 bp, Homo sapiens
agaactcaagcatgg

SEQ ID NO: 1515 - DNA, 15 bp, Homo sapiens
gagaactcaagcatg

SEQ ID NO: 1516 - DNA, 15 bp, Homo sapiens
agagaactcaagcat

SEQ ID NO: 1517 - DNA, 15 bp, Homo sapiens
cagagaactcaagca

SEQ ID NO: 1518 - DNA, 15 bp, Homo sapiens
acagagaactcaagc

SEQ ID NO: 1519 - DNA, 15 bp, Homo sapiens
cacagagaactcaag

SEQ ID NO: 1520 - DNA, 15 bp, Homo sapiens
tcacagagaactcaa

SEQ ID NO: 1521 - DNA, 15 bp, Homo sapiens
ttcacagagaactca

SEQ ID NO: 1522 - DNA, 15 bp, Homo sapiens
cttcacagagaactc

SEQ ID NO: 1523 - DNA, 15 bp, Homo sapiens
acttcacagagaact

SEQ ID NO: 1524 - DNA, 15 bp, Homo sapiens
aacttcacagagaac

SEQ ID NO: 1525 - DNA, 15 bp, Homo sapiens
taacttcacagagaa

SEQ ID NO: 1526 - DNA, 15 bp, Homo sapiens
ttaacttcacagaga

SEQ ID NO: 1527 - DNA, 15 bp, Homo sapiens
tttaacttcacagag

SEQ ID NO: 1528 - DNA, 15 bp, Homo sapiens
ttttaacttcacaga

SEQ ID NO: 1529 - DNA, 15 bp, Homo sapiens
attttaacttcacag

SEQ ID NO: 1530 - DNA, 15 bp, Homo sapiens
aattttaacttcaca

SEQ ID NO: 1531 - DNA, 15 bp, Homo sapiens
aaattttaacttcac

SEQ ID NO: 1532 - DNA, 15 bp, Homo sapiens
gaaattttaacttca

SEQ ID NO: 1533 - DNA, 15 bp, Homo sapiens
tgaaattttaacttc

SEQ ID NO: 1534 - DNA, 15 bp, Homo sapiens
ctgaaattttaactt

SEQ ID NO: 1535 - DNA, 15 bp, Homo sapiens
cctgaaattttaact

SEQ ID NO: 1536 - DNA, 15 bp, Homo sapiens
gcctgaaattttaac

SEQ ID NO: 1537 - DNA, 15 bp, Homo sapiens
tgcctgaaattttaa

SEQ ID NO: 1538 - DNA, 15 bp, Homo sapiens
ttgcctgaaatttta

SEQ ID NO: 1539 - DNA, 15 bp, Homo sapiens
tttgcctgaaatttt

SEQ ID NO: 1540 - DNA, 15 bp, Homo sapiens
ctttgcctgaaattt

SEQ ID NO: 1541 - DNA, 15 bp, Homo sapiens
actttgcctgaaatt

SEQ ID NO: 1542 - DNA, 15 bp, Homo sapiens
aactttgcctgaaat

SEQ ID NO: 1543 - DNA, 15 bp, Homo sapiens
taactttgcctgaaa

SEQ ID NO: 1544 - DNA, 15 bp, Homo sapiens
ataactttgcctgaa

SEQ ID NO: 1545 - DNA, 15 bp, Homo sapiens
cataactttgcctga

SEQ ID NO: 1546 - DNA, 15 bp, Homo sapiens
gcataactttgcctg

SEQ ID NO: 1547 - DNA, 15 bp, Homo sapiens
tgcataactttgcct

SEQ ID NO: 1548 - DNA, 15 bp, Homo sapiens
atgcataactttgcc

SEQ ID NO: 1549 - DNA, 15 bp, Homo sapiens
gatgcataactttgc

SEQ ID NO: 1550 - DNA, 15 bp, Homo sapiens
agatgcataactttg

SEQ ID NO: 1551 - DNA, 15 bp, Homo sapiens
aagatgcataacttt

SEQ ID NO: 1552 - DNA, 15 bp, Homo sapiens
aaagatgcataactt

SEQ ID NO: 1553 - DNA, 15 bp, Homo sapiens
taaagatgcataact

SEQ ID NO: 1554 - DNA, 15 bp, Homo sapiens
ataaagatgcataac

SEQ ID NO: 1555 - DNA, 15 bp, Homo sapiens
tataaagatgcataa

SEQ ID NO: 1556 - DNA, 15 bp, Homo sapiens
ttataaagatgcata

SEQ ID NO: 1557 - DNA, 15 bp, Homo sapiens
tttataaagatgcat

SEQ ID NO: 1558 - DNA, 15 bp, Homo sapiens
ttttataaagatgca

SEQ ID NO: 1559 - DNA, 15 bp, Homo sapiens
attttataaagatgc

SEQ ID NO: 1560 - DNA, 15 bp, Homo sapiens
cattttataaagatg

SEQ ID NO: 1561 - DNA, 15 bp, Homo sapiens
ccattttataaagat

SEQ ID NO: 1562 - DNA, 15 bp, Homo sapiens
accattttataaaga

SEQ ID NO: 1563 - DNA, 15 bp, Homo sapiens
aaccattttataaag

SEQ ID NO: 1564 - DNA, 15 bp, Homo sapiens
aaaccattttataaa

SEQ ID NO: 1565 - DNA, 15 bp, Homo sapiens
aaaaccattttataa

SEQ ID NO: 1566 - DNA, 15 bp, Homo sapiens
taaaaccattttata

SEQ ID NO: 1567 - DNA, 15 bp, Homo sapiens
ataaaaccattttat

SEQ ID NO: 1568 - DNA, 15 bp, Homo sapiens
gataaaaccatttta

SEQ ID NO: 1569 - DNA, 15 bp, Homo sapiens
tgataaaaccatttt

SEQ ID NO: 1570 - DNA, 15 bp, Homo sapiens
ctgataaaaccattt

SEQ ID NO: 1571 - DNA, 15 bp, Homo sapiens
tctgataaaaccatt

SEQ ID NO: 1572 - DNA, 15 bp, Homo sapiens
ttctgataaaaccat

SEQ ID NO: 1573 - DNA, 15 bp, Homo sapiens
tttctgataaaacca

SEQ ID NO: 1574 - DNA, 15 bp, Homo sapiens
atttctgataaaacc

SEQ ID NO: 1575 - DNA, 15 bp, Homo sapiens
aatttctgataaaac

SEQ ID NO: 1576 - DNA, 15 bp, Homo sapiens
gaatttctgataaaa

SEQ ID NO: 1577 - DNA, 15 bp, Homo sapiens
ggaatttctgataaa

SEQ ID NO: 1578 - DNA, 15 bp, Homo sapiens
tggaatttctgataa

SEQ ID NO: 1579 - DNA, 15 bp, Homo sapiens
ttggaatttctgata

SEQ ID NO: 1580 - DNA, 15 bp, Homo sapiens
tttggaatttctgat

SEQ ID NO: 1581 - DNA, 15 bp, Homo sapiens
ttttggaatttctga

SEQ ID NO: 1582 - DNA, 15 bp, Homo sapiens
tttttggaatttctg

SEQ ID NO: 1583 - DNA, 15 bp, Homo sapiens
atttttggaatttct

SEQ ID NO: 1584 - DNA, 15 bp, Homo sapiens
catttttggaatttc

SEQ ID NO: 1585 - DNA, 15 bp, Homo sapiens
tcatttttggaattt

SEQ ID NO: 1586 - DNA, 15 bp, Homo sapiens
ctcatttttggaatt

SEQ ID NO: 1587 - DNA, 15 bp, Homo sapiens
tctcatttttggaat

SEQ ID NO: 1588 - DNA, 15 bp, Homo sapiens
ctctcatttttggaa

SEQ ID NO: 1589 - DNA, 15 bp, Homo sapiens
cctctcatttttgga

SEQ ID NO: 1590 - DNA, 15 bp, Homo sapiens
ccctctcatttttgg

SEQ ID NO: 1591 - DNA, 15 bp, Homo sapiens
tccctctcatttttg

SEQ ID NO: 1592 - DNA, 15 bp, Homo sapiens
gtccctctcattttt

SEQ ID NO: 1593 - DNA, 15 bp, Homo sapiens
agtccctctcatttt

SEQ ID NO: 1594 - DNA, 15 bp, Homo sapiens
cagtccctctcattt

SEQ ID NO: 1595 - DNA, 15 bp, Homo sapiens
ccagtccctctcatt

SEQ ID NO: 1596 - DNA, 15 bp, Homo sapiens
accagtccctctcat

SEQ ID NO: 1597 - DNA, 15 bp, Homo sapiens
aaccagtccctctca

SEQ ID NO: 1598 - DNA, 15 bp, Homo sapiens
aaaccagtccctctc

SEQ ID NO: 1599 - DNA, 15 bp, Homo sapiens
aaaaccagtccctct

SEQ ID NO: 1600 - DNA, 15 bp, Homo sapiens
taaaaccagtccctc

SEQ ID NO: 1601 - DNA, 15 bp, Homo sapiens
ttaaaaccagtccct

SEQ ID NO: 1602 - DNA, 15 bp, Homo sapiens
attaaaaccagtccc

SEQ ID NO: 1603 - DNA, 15 bp, Homo sapiens
cattaaaaccagtcc

SEQ ID NO: 1604 - DNA, 15 bp, Homo sapiens
acattaaaaccagtc

SEQ ID NO: 1605 - DNA, 15 bp, Homo sapiens
aacattaaaaccagt

SEQ ID NO: 1606 - DNA, 15 bp, Homo sapiens
aaacattaaaaccag

SEQ ID NO: 1607 - DNA, 15 bp, Homo sapiens
aaaacattaaaacca

SEQ ID NO: 1608 - DNA, 15 bp, Homo sapiens
gaaaacattaaaacc

SEQ ID NO: 1609 - DNA, 15 bp, Homo sapiens
agaaaacattaaaac

SEQ ID NO: 1610 - DNA, 15 bp, Homo sapiens
tagaaaacattaaaa

SEQ ID NO: 1611 - DNA, 15 bp, Homo sapiens
ttagaaaacattaaa

SEQ ID NO: 1612 - DNA, 15 bp, Homo sapiens
tttagaaaacattaa

SEQ ID NO: 1613 - DNA, 15 bp, Homo sapiens
ctttagaaaacatta

SEQ ID NO: 1614 - DNA, 15 bp, Homo sapiens
actttagaaaacatt

SEQ ID NO: 1615 - DNA, 15 bp, Homo sapiens
aactttagaaaacat

SEQ ID NO: 1616 - DNA, 15 bp, Homo sapiens
aaactttagaaaaca

SEQ ID NO: 1617 - DNA, 15 bp, Homo sapiens
aaaactttagaaaac

SEQ ID NO: 1618 - DNA, 15 bp, Homo sapiens
aaaaactttagaaaa

SEQ ID NO: 1619 - DNA, 15 bp, Homo sapiens
gaaaaactttagaaa

SEQ ID NO: 1620 - DNA, 15 bp, Homo sapiens
agaaaaactttagaa

SEQ ID NO: 1621 - DNA, 15 bp, Homo sapiens
aagaaaaactttaga

SEQ ID NO: 1622 - DNA, 15 bp, Homo sapiens
taagaaaaactttag

SEQ ID NO: 1623 - DNA, 15 bp, Homo sapiens
ttaagaaaaacttta

SEQ ID NO: 1624 - DNA, 15 bp, Homo sapiens
cttaagaaaaacttt

SEQ ID NO: 1625 - DNA, 15 bp, Homo sapiens
tcttaagaaaaactt

SEQ ID NO: 1626 - DNA, 15 bp, Homo sapiens
ttcttaagaaaaact

SEQ ID NO: 1627 - DNA, 15 bp, Homo sapiens
tttcttaagaaaaac

SEQ ID NO: 1628 - DNA, 15 bp, Homo sapiens
atttcttaagaaaaa

SEQ ID NO: 1629 - DNA, 15 bp, Homo sapiens
catttcttaagaaaa

SEQ ID NO: 1630 - DNA, 15 bp, Homo sapiens
acatttcttaagaaa

SEQ ID NO: 1631 - DNA, 15 bp, Homo sapiens
aacatttcttaagaa

SEQ ID NO: 1632 - DNA, 15 bp, Homo sapiens
caacatttcttaaga

SEQ ID NO: 1633 - DNA, 15 bp, Homo sapiens
tcaacatttcttaag

SEQ ID NO: 1634 - DNA, 15 bp, Homo sapiens
ttcaacatttcttaa

SEQ ID NO: 1635 - DNA, 15 bp, Homo sapiens
gttcaacatttctta

SEQ ID NO: 1636 - DNA, 15 bp, Homo sapiens
ggttcaacatttctt

SEQ ID NO: 1637 - DNA, 15 bp, Homo sapiens
gggttcaacatttct

SEQ ID NO: 1638 - DNA, 15 bp, Homo sapiens
tgggttcaacatttc

SEQ ID NO: 1639 - DNA, 15 bp, Homo sapiens
ttgggttcaacattt

SEQ ID NO: 1640 - DNA, 15 bp, Homo sapiens
tttgggttcaacatt

SEQ ID NO: 1641 - DNA, 15 bp, Homo sapiens
atttgggttcaacat

SEQ ID NO: 1642 - DNA, 15 bp, Homo sapiens
aatttgggttcaaca

SEQ ID NO: 1643 - DNA, 15 bp, Homo sapiens
aaatttgggttcaac

SEQ ID NO: 1644 - DNA, 15 bp, Homo sapiens
taaatttgggttcaa

SEQ ID NO: 1645 - DNA, 15 bp, Homo sapiens
ctaaatttgggttca

SEQ ID NO: 1646 - DNA, 15 bp, Homo sapiens
tctaaatttgggttc

SEQ ID NO: 1647 - DNA, 15 bp, Homo sapiens
ctctaaatttgggtt

SEQ ID NO: 1648 - DNA, 15 bp, Homo sapiens
actctaaatttgggt

SEQ ID NO: 1649 - DNA, 15 bp, Homo sapiens
tactctaaatttggg

SEQ ID NO: 1650 - DNA, 15 bp, Homo sapiens
atactctaaatttgg

SEQ ID NO: 1651 - DNA, 15 bp, Homo sapiens
aatactctaaatttg

SEQ ID NO: 1652 - DNA, 15 bp, Homo sapiens
taatactctaaattt

SEQ ID NO: 1653 - DNA, 15 bp, Homo sapiens
ataatactctaaatt

SEQ ID NO: 1654 - DNA, 15 bp, Homo sapiens
gataatactctaaat

SEQ ID NO: 1655 - DNA, 15 bp, Homo sapiens
agataatactctaaa

SEQ ID NO: 1656 - DNA, 15 bp, Homo sapiens
cagataatactctaa

SEQ ID NO: 1657 - DNA, 15 bp, Homo sapiens
tcagataatactcta

SEQ ID NO: 1658 - DNA, 15 bp, Homo sapiens
gtcagataatactct

SEQ ID NO: 1659 - DNA, 15 bp, Homo sapiens
ggtcagataatactc

SEQ ID NO: 1660 - DNA, 15 bp, Homo sapiens
aggtcagataatact

SEQ ID NO: 1661 - DNA, 15 bp, Homo sapiens
taggtcagataatac

SEQ ID NO: 1662 - DNA, 15 bp, Homo sapiens
ttaggtcagataata

SEQ ID NO: 1663 - DNA, 15 bp, Homo sapiens
attaggtcagataat

SEQ ID NO: 1664 - DNA, 15 bp, Homo sapiens
aattaggtcagataa

SEQ ID NO: 1665 - DNA, 15 bp, Homo sapiens
taattaggtcagata

SEQ ID NO: 1666 - DNA, 15 bp, Homo sapiens
ttaattaggtcagat

SEQ ID NO: 1667 - DNA, 15 bp, Homo sapiens
gttaattaggtcaga

SEQ ID NO: 1668 - DNA, 15 bp, Homo sapiens
agttaattaggtcag

SEQ ID NO: 1669 - DNA, 15 bp, Homo sapiens
gagttaattaggtca

SEQ ID NO: 1670 - DNA, 15 bp, Homo sapiens
tgagttaattaggtc

SEQ ID NO: 1671 - DNA, 15 bp, Homo sapiens
ttgagttaattaggt

SEQ ID NO: 1672 - DNA, 15 bp, Homo sapiens
tttgagttaattagg

SEQ ID NO: 1673 - DNA, 15 bp, Homo sapiens
atttgagttaattag

SEQ ID NO: 1674 - DNA, 15 bp, Homo sapiens
aatttgagttaatta

SEQ ID NO: 1675 - DNA, 15 bp, Homo sapiens
aaatttgagttaatt

SEQ ID NO: 1676 - DNA, 15 bp, Homo sapiens
aaaatttgagttaat

SEQ ID NO: 1677 - DNA, 15 bp, Homo sapiens
aaaaatttgagttaa

SEQ ID NO: 1678 - DNA, 15 bp, Homo sapiens
caaaaatttgagtta

SEQ ID NO: 1679 - DNA, 15 bp, Homo sapiens
acaaaaatttgagtt

SEQ ID NO: 1680 - DNA, 15 bp, Homo sapiens
tacaaaaatttgagt

SEQ ID NO: 1681 - DNA, 15 bp, Homo sapiens
ttacaaaaatttgag

SEQ ID NO: 1682 - DNA, 15 bp, Homo sapiens
tttacaaaaatttga

SEQ ID NO: 1683 - DNA, 15 bp, Homo sapiens
atttacaaaaatttg

SEQ ID NO: 1684 - DNA, 15 bp, Homo sapiens
aatttacaaaaattt

SEQ ID NO: 1685 - DNA, 15 bp, Homo sapiens
aaatttacaaaaatt

SEQ ID NO: 1686 - DNA, 15 bp, Homo sapiens
aaaatttacaaaaat

SEQ ID NO: 1687 - DNA, 15 bp, Homo sapiens
taaaatttacaaaaa

SEQ ID NO: 1688 - DNA, 15 bp, Homo sapiens
ttaaaatttacaaaa

SEQ ID NO: 1689 - DNA, 15 bp, Homo sapiens
attaaaatttacaaa

SEQ ID NO: 1690 - DNA, 15 bp, Homo sapiens
cattaaaatttacaa

SEQ ID NO: 1691 - DNA, 15 bp, Homo sapiens
tcattaaaatttaca

SEQ ID NO: 1692 - DNA, 15 bp, Homo sapiens
atcattaaaatttac

SEQ ID NO: 1693 - DNA, 15 bp, Homo sapiens
catcattaaaattta

SEQ ID NO: 1694 - DNA, 15 bp, Homo sapiens
acatcattaaaattt

SEQ ID NO: 1695 - DNA, 15 bp, Homo sapiens
aacatcattaaaatt

SEQ ID NO: 1696 - DNA, 15 bp, Homo sapiens
aaacatcattaaaat

SEQ ID NO: 1697 - DNA, 15 bp, Homo sapiens
taaacatcattaaaa

SEQ ID NO: 1698 - DNA, 15 bp, Homo sapiens
gtaaacatcattaaa

SEQ ID NO: 1699 - DNA, 15 bp, Homo sapiens
agtaaacatcattaa

SEQ ID NO: 1700 - DNA, 15 bp, Homo sapiens
gagtaaacatcatta

SEQ ID NO: 1701 - DNA, 15 bp, Homo sapiens
tgagtaaacatcatt

SEQ ID NO: 1702 - DNA, 15 bp, Homo sapiens
gtgagtaaacatcat

SEQ ID NO: 1703 - DNA, 15 bp, Homo sapiens
ggtgagtaaacatca

SEQ ID NO: 1704 - DNA, 15 bp, Homo sapiens
aggtgagtaaacatc

SEQ ID NO: 1705 - DNA, 15 bp, Homo sapiens
gaggtgagtaaacat

SEQ ID NO: 1706 - DNA, 15 bp, Homo sapiens
agaggtgagtaaaca

SEQ ID NO: 1707 - DNA, 15 bp, Homo sapiens
gagaggtgagtaaac

SEQ ID NO: 1708 - DNA, 15 bp, Homo sapiens
agagaggtgagtaaa

SEQ ID NO: 1709 - DNA, 15 bp, Homo sapiens
gagagaggtgagtaa

SEQ ID NO: 1710 - DNA, 15 bp, Homo sapiens
tgagagaggtgagta

SEQ ID NO: 1711 - DNA, 15 bp, Homo sapiens
gtgagagaggtgagt

SEQ ID NO: 1712 - DNA, 15 bp, Homo sapiens
tgtgagagaggtgag

SEQ ID NO: 1713 - DNA, 15 bp, Homo sapiens
ctgtgagagaggtga

SEQ ID NO: 1714 - DNA, 15 bp, Homo sapiens
gctgtgagagaggtg

SEQ ID NO: 1715 - DNA, 15 bp, Homo sapiens
tgctgtgagagaggt

SEQ ID NO: 1716 - DNA, 15 bp, Homo sapiens
atgctgtgagagagg

SEQ ID NO: 1717 - DNA, 15 bp, Homo sapiens
aatgctgtgagagag

SEQ ID NO: 1718 - DNA, 15 bp, Homo sapiens
caatgctgtgagaga

SEQ ID NO: 1719 - DNA, 15 bp, Homo sapiens
gcaatgctgtgagag

SEQ ID NO: 1720 - DNA, 15 bp, Homo sapiens
tgcaatgctgtgaga

SEQ ID NO: 1721 - DNA, 15 bp, Homo sapiens
ctgcaatgctgtgag

SEQ ID NO: 1722 - DNA, 15 bp, Homo sapiens
tctgcaatgctgtga

SEQ ID NO: 1723 - DNA, 15 bp, Homo sapiens
ttctgcaatgctgtg

SEQ ID NO: 1724 - DNA, 15 bp, Homo sapiens
attctgcaatgctgt

SEQ ID NO: 1725 - DNA, 15 bp, Homo sapiens
aattctgcaatgctg

SEQ ID NO: 1726 - DNA, 15 bp, Homo sapiens
gaattctgcaatgct

SEQ ID NO: 1727 - DNA, 15 bp, Homo sapiens
tgaattctgcaatgc

SEQ ID NO: 1728 - DNA, 15 bp, Homo sapiens
gtgaattctgcaatg

SEQ ID NO: 1729 - DNA, 15 bp, Homo sapiens
agtgaattctgcaat

SEQ ID NO: 1730 - DNA, 15 bp, Homo sapiens
aagtgaattctgcaa

SEQ ID NO: 1731 - DNA, 15 bp, Homo sapiens
aaagtgaattctgca

SEQ ID NO: 1732 - DNA, 15 bp, Homo sapiens
caaagtgaattctgc

SEQ ID NO: 1733 - DNA, 15 bp, Homo sapiens
tcaaagtgaattctg

SEQ ID NO: 1734 - DNA, 15 bp, Homo sapiens
ttcaaagtgaattct

SEQ ID NO: 1735 - DNA, 15 bp, Homo sapiens
cttcaaagtgaattc

SEQ ID NO: 1736 - DNA, 15 bp, Homo sapiens
ccttcaaagtgaatt

SEQ ID NO: 1737 - DNA, 15 bp, Homo sapiens
tccttcaaagtgaat

SEQ ID NO: 1738 - DNA, 15 bp, Homo sapiens
gtccttcaaagtgaa

SEQ ID NO: 1739 - DNA, 15 bp, Homo sapiens
agtccttcaaagtga

SEQ ID NO: 1740 - DNA, 15 bp, Homo sapiens
gagtccttcaaagtg

SEQ ID NO: 1741 - DNA, 15 bp, Homo sapiens
agagtccttcaaagt

SEQ ID NO: 1742 - DNA, 15 bp, Homo sapiens
aagagtccttcaaag

SEQ ID NO: 1743 - DNA, 15 bp, Homo sapiens
aaagagtccttcaaa

SEQ ID NO: 1744 - DNA, 15 bp, Homo sapiens
caaagagtccttcaa

SEQ ID NO: 1745 - DNA, 15 bp, Homo sapiens
gcaaagagtccttca

SEQ ID NO: 1746 - DNA, 15 bp, Homo sapiens
tgcaaagagtccttc

SEQ ID NO: 1747 - DNA, 15 bp, Homo sapiens
ttgcaaagagtcctt

SEQ ID NO: 1748 - DNA, 15 bp, Homo sapiens
tttgcaaagagtcct

SEQ ID NO: 1749 - DNA, 15 bp, Homo sapiens
ctttgcaaagagtcc

SEQ ID NO: 1750 - DNA, 15 bp, Homo sapiens
gctttgcaaagagtc

SEQ ID NO: 1751 - DNA, 15 bp, Homo sapiens
ggctttgcaaagagt

SEQ ID NO: 1752 - DNA, 15 bp, Homo sapiens
aggctttgcaaagag

SEQ ID NO: 1753 - DNA, 15 bp, Homo sapiens
caggctttgcaaaga

SEQ ID NO: 1754 - DNA, 15 bp, Homo sapiens
tcaggctttgcaaag

SEQ ID NO: 1755 - DNA, 15 bp, Homo sapiens
ttcaggctttgcaaa

SEQ ID NO: 1756 - DNA, 15 bp, Homo sapiens
cttcaggctttgcaa

SEQ ID NO: 1757 - DNA, 15 bp, Homo sapiens
acttcaggctttgca

SEQ ID NO: 1758 - DNA, 15 bp, Homo sapiens
aacttcaggctttgc

SEQ ID NO: 1759 - DNA, 15 bp, Homo sapiens
aaacttcaggctttg

SEQ ID NO: 1760 - DNA, 15 bp, Homo sapiens
gaaacttcaggcttt

SEQ ID NO: 1761 - DNA, 15 bp, Homo sapiens
agaaacttcaggctt

SEQ ID NO: 1762 - DNA, 15 bp, Homo sapiens
cagaaacttcaggct

SEQ ID NO: 1763 - DNA, 15 bp, Homo sapiens
acagaaacttcaggc

SEQ ID NO: 1764 - DNA, 15 bp, Homo sapiens
cacagaaacttcagg

SEQ ID NO: 1765 - DNA, 15 bp, Homo sapiens
ccacagaaacttcag

SEQ ID NO: 1766 - DNA, 15 bp, Homo sapiens
accacagaaacttca

SEQ ID NO: 1767 - DNA, 15 bp, Homo sapiens
caccacagaaacttc

SEQ ID NO: 1768 - DNA, 15 bp, Homo sapiens
ccaccacagaaactt

SEQ ID NO: 1769 - DNA, 15 bp, Homo sapiens
accaccacagaaact

SEQ ID NO: 1770 - DNA, 15 bp, Homo sapiens
taccaccacagaaac

SEQ ID NO: 1771 - DNA, 15 bp, Homo sapiens
gtaccaccacagaaa

SEQ ID NO: 1772 - DNA, 15 bp, Homo sapiens
agtaccaccacagaa

SEQ ID NO: 1773 - DNA, 15 bp, Homo sapiens
aagtaccaccacaga

SEQ ID NO: 1774 - DNA, 15 bp, Homo sapiens
gaagtaccaccacag

SEQ ID NO: 1775 - DNA, 15 bp, Homo sapiens
agaagtaccaccaca

SEQ ID NO: 1776 - DNA, 15 bp, Homo sapiens
gagaagtaccaccac

SEQ ID NO: 1777 - DNA, 15 bp, Homo sapiens
ggagaagtaccacca

SEQ ID NO: 1778 - DNA, 15 bp, Homo sapiens
tggagaagtaccacc

SEQ ID NO: 1779 - DNA, 15 bp, Homo sapiens
gtggagaagtaccac

SEQ ID NO: 1780 - DNA, 15 bp, Homo sapiens
agtggagaagtacca

SEQ ID NO: 1781 - DNA, 15 bp, Homo sapiens
gagtggagaagtacc

SEQ ID NO: 1782 - DNA, 15 bp, Homo sapiens
ggagtggagaagtac

SEQ ID NO: 1783 - DNA, 15 bp, Homo sapiens
aggagtggagaagta

SEQ ID NO: 1784 - DNA, 15 bp, Homo sapiens
aaggagtggagaagt

SEQ ID NO: 1785 - DNA, 15 bp, Homo sapiens
aaaggagtggagaag

SEQ ID NO: 1786 - DNA, 15 bp, Homo sapiens
caaaggagtggagaa

SEQ ID NO: 1787 - DNA, 15 bp, Homo sapiens
acaaaggagtggaga

SEQ ID NO: 1788 - DNA, 15 bp, Homo sapiens
tacaaaggagtggag

SEQ ID NO: 1789 - DNA, 15 bp, Homo sapiens
ctacaaaggagtgga

SEQ ID NO: 1790 - DNA, 15 bp, Homo sapiens
actacaaaggagtgg

SEQ ID NO: 1791 - DNA, 15 bp, Homo sapiens
aactacaaaggagtg

SEQ ID NO: 1792 - DNA, 15 bp, Homo sapiens
aaactacaaaggagt

SEQ ID NO: 1793 - DNA, 15 bp, Homo sapiens
aaaactacaaaggag

SEQ ID NO: 1794 - DNA, 15 bp, Homo sapiens
aaaaactacaaagga

SEQ ID NO: 1795 - DNA, 15 bp, Homo sapiens
gaaaaactacaaagg

SEQ ID NO: 1796 - DNA, 15 bp, Homo sapiens
ggaaaaactacaaag

SEQ ID NO: 1797 - DNA, 15 bp, Homo sapiens
tggaaaaactacaaa

SEQ ID NO: 1798 - DNA, 15 bp, Homo sapiens
ttggaaaaactacaa

SEQ ID NO: 1799 - DNA, 15 bp, Homo sapiens
attggaaaaactaca

SEQ ID NO: 1800 - DNA, 15 bp, Homo sapiens
tattggaaaaactac

SEQ ID NO: 1801 - DNA, 15 bp, Homo sapiens
ttattggaaaaacta

SEQ ID NO: 1802 - DNA, 15 bp, Homo sapiens
attattggaaaaact

SEQ ID NO: 1803 - DNA, 15 bp, Homo sapiens
aattattggaaaaac

SEQ ID NO: 1804 - DNA, 15 bp, Homo sapiens
gaattattggaaaaa

SEQ ID NO: 1805 - DNA, 15 bp, Homo sapiens
tgaattattggaaaa

SEQ ID NO: 1806 - DNA, 15 bp, Homo sapiens
ttgaattattggaaa

SEQ ID NO: 1807 - DNA, 15 bp, Homo sapiens
attgaattattggaa

SEQ ID NO: 1808 - DNA, 15 bp, Homo sapiens
aattgaattattgga

SEQ ID NO: 1809 - DNA, 15 bp, Homo sapiens
caattgaattattgg

SEQ ID NO: 1810 - DNA, 15 bp, Homo sapiens
gcaattgaattattg

SEQ ID NO: 1811 - DNA, 15 bp, Homo sapiens
agcaattgaattatt

SEQ ID NO: 1812 - DNA, 15 bp, Homo sapiens
gagcaattgaattat

SEQ ID NO: 1813 - DNA, 15 bp, Homo sapiens
agagcaattgaatta

SEQ ID NO: 1814 - DNA, 15 bp, Homo sapiens
tagagcaattgaatt

SEQ ID NO: 1815 - DNA, 15 bp, Homo sapiens
gtagagcaattgaat

SEQ ID NO: 1816 - DNA, 15 bp, Homo sapiens
tgtagagcaattgaa

SEQ ID NO: 1817 - DNA, 15 bp, Homo sapiens
ttgtagagcaattga

SEQ ID NO: 1818 - DNA, 15 bp, Homo sapiens
tttgtagagcaattg

SEQ ID NO: 1819 - DNA, 15 bp, Homo sapiens
atttgtagagcaatt

SEQ ID NO: 1820 - DNA, 15 bp, Homo sapiens
tatttgtagagcaat

SEQ ID NO: 1821 - DNA, 15 bp, Homo sapiens
atatttgtagagcaa

SEQ ID NO: 1822 - DNA, 15 bp, Homo sapiens
gatatttgtagagca

SEQ ID NO: 1823 - DNA, 15 bp, Homo sapiens
agatatttgtagagc

SEQ ID NO: 1824 - DNA, 15 bp, Homo sapiens
tagatatttgtagag

SEQ ID NO: 1825 - DNA, 15 bp, Homo sapiens
ctagatatttgtaga

SEQ ID NO: 1826 - DNA, 15 bp, Homo sapiens
tctagatatttgtag

SEQ ID NO: 1827 - DNA, 15 bp, Homo sapiens
ctctagatatttgta

SEQ ID NO: 1828 - DNA, 15 bp, Homo sapiens
actctagatatttgt

SEQ ID NO: 1829 - DNA, 15 bp, Homo sapiens
aactctagatatttg

SEQ ID NO: 1830 - DNA, 15 bp, Homo sapiens
taactctagatattt

SEQ ID NO: 1831 - DNA, 15 bp, Homo sapiens
ttaactctagatatt

SEQ ID NO: 1832 - DNA, 15 bp, Homo sapiens
tttaactctagatat

SEQ ID NO: 1833 - DNA, 15 bp, Homo sapiens
gtttaactctagata

SEQ ID NO: 1834 - DNA, 15 bp, Homo sapiens
tgtttaactctagat

SEQ ID NO: 1835 - DNA, 15 bp, Homo sapiens
gtgtttaactctaga

SEQ ID NO: 1836 - DNA, 15 bp, Homo sapiens
tgtgtttaactctag

SEQ ID NO: 1837 - DNA, 15 bp, Homo sapiens
gtgtgtttaactcta

SEQ ID NO: 1838 - DNA, 15 bp, Homo sapiens
tgtgtgtttaactct

SEQ ID NO: 1839 - DNA, 15 bp, Homo sapiens
gtgtgtgtttaactc

SEQ ID NO: 1840 - DNA, 15 bp, Homo sapiens
tgtgtgtgtttaact

SEQ ID NO: 1841 - DNA, 15 bp, Homo sapiens
gtgtgtgtgtttaac

SEQ ID NO: 1842 - DNA, 15 bp, Homo sapiens
tgtgtgtgtgtttaa

SEQ ID NO: 1843 - DNA, 15 bp, Homo sapiens
ctgtgtgtgtgttta

SEQ ID NO: 1844 - DNA, 15 bp, Homo sapiens
tctgtgtgtgtgttt

SEQ ID NO: 1845 - DNA, 15 bp, Homo sapiens
atctgtgtgtgtgtt

SEQ ID NO: 1846 - DNA, 15 bp, Homo sapiens
tatctgtgtgtgtgt

SEQ ID NO: 1847 - DNA, 15 bp, Homo sapiens
ttatctgtgtgtgtg

SEQ ID NO: 1848 - DNA, 15 bp, Homo sapiens
attatctgtgtgtgt

SEQ ID NO: 1849 - DNA, 15 bp, Homo sapiens
aattatctgtgtgtg

SEQ ID NO: 1850 - DNA, 15 bp, Homo sapiens
aaattatctgtgtgt

SEQ ID NO: 1851 - DNA, 15 bp, Homo sapiens
aaaattatctgtgtg

SEQ ID NO: 1852 - DNA, 15 bp, Homo sapiens
gaaaattatctgtgt

SEQ ID NO: 1853 - DNA, 15 bp, Homo sapiens
agaaaattatctgtg

SEQ ID NO: 1854 - DNA, 15 bp, Homo sapiens
gagaaaattatctgt

SEQ ID NO: 1855 - DNA, 15 bp, Homo sapiens
ggagaaaattatctg

SEQ ID NO: 1856 - DNA, 15 bp, Homo sapiens
tggagaaaattatct

SEQ ID NO: 1857 - DNA, 15 bp, Homo sapiens
ttggagaaaattatc

SEQ ID NO: 1858 - DNA, 15 bp, Homo sapiens
cttggagaaaattat

SEQ ID NO: 1859 - DNA, 15 bp, Homo sapiens
ccttggagaaaatta

SEQ ID NO: 1860 - DNA, 15 bp, Homo sapiens
cccttggagaaaatt

SEQ ID NO: 1861 - DNA, 15 bp, Homo sapiens
acccttggagaaaat

SEQ ID NO: 1862 - DNA, 15 bp, Homo sapiens
aacccttggagaaaa

SEQ ID NO: 1863 - DNA, 15 bp, Homo sapiens
aaacccttggagaaa

SEQ ID NO: 1864 - DNA, 15 bp, Homo sapiens
aaaacccttggagaa

SEQ ID NO: 1865 - DNA, 15 bp, Homo sapiens
gaaaacccttggaga

SEQ ID NO: 1866 - DNA, 15 bp, Homo sapiens
agaaaacccttggag

SEQ ID NO: 1867 - DNA, 15 bp, Homo sapiens
gagaaaacccttgga

SEQ ID NO: 1868 - DNA, 15 bp, Homo sapiens
tgagaaaacccttgg

SEQ ID NO: 1869 - DNA, 15 bp, Homo sapiens
ttgagaaaacccttg

SEQ ID NO: 1870 - DNA, 15 bp, Homo sapiens
attgagaaaaccctt

SEQ ID NO: 1871 - DNA, 15 bp, Homo sapiens
cattgagaaaaccct

SEQ ID NO: 1872 - DNA, 15 bp, Homo sapiens
gcattgagaaaaccc

SEQ ID NO: 1873 - DNA, 15 bp, Homo sapiens
ggcattgagaaaacc

SEQ ID NO: 1874 - DNA, 15 bp, Homo sapiens
aggcattgagaaaac

SEQ ID NO: 1875 - DNA, 15 bp, Homo sapiens
taggcattgagaaaa

SEQ ID NO: 1876 - DNA, 15 bp, Homo sapiens
ataggcattgagaaa

SEQ ID NO: 1877 - DNA, 15 bp, Homo sapiens
cataggcattgagaa

SEQ ID NO: 1878 - DNA, 15 bp, Homo sapiens
acataggcattgaga

SEQ ID NO: 1879 - DNA, 15 bp, Homo sapiens
tacataggcattgag

SEQ ID NO: 1880 - DNA, 15 bp, Homo sapiens
ttacataggcattga

SEQ ID NO: 1881 - DNA, 15 bp, Homo sapiens
gttacataggcattg

SEQ ID NO: 1882 - DNA, 15 bp, Homo sapiens
tgttacataggcatt

SEQ ID NO: 1883 - DNA, 15 bp, Homo sapiens
ctgttacataggcat

SEQ ID NO: 1884 - DNA, 15 bp, Homo sapiens
actgttacataggca

SEQ ID NO: 1885 - DNA, 15 bp, Homo sapiens
cactgttacataggc

SEQ ID NO: 1886 - DNA, 15 bp, Homo sapiens
ccactgttacatagg

SEQ ID NO: 1887 - DNA, 15 bp, Homo sapiens
cccactgttacatag

SEQ ID NO: 1888 - DNA, 15 bp, Homo sapiens
ccccactgttacata

SEQ ID NO: 1889 - DNA, 15 bp, Homo sapiens
gccccactgttacat

SEQ ID NO: 1890 - DNA, 15 bp, Homo sapiens
tgccccactgttaca

SEQ ID NO: 1891 - DNA, 15 bp, Homo sapiens
ctgccccactgttac

SEQ ID NO: 1892 - DNA, 15 bp, Homo sapiens
actgccccactgtta

SEQ ID NO: 1893 - DNA, 15 bp, Homo sapiens
aactgccccactgtt

SEQ ID NO: 1894 - DNA, 15 bp, Homo sapiens
taactgccccactgt

SEQ ID NO: 1895 - DNA, 15 bp, Homo sapiens
ctaactgccccactg

SEQ ID NO: 1896 - DNA, 15 bp, Homo sapiens
cctaactgccccact

SEQ ID NO: 1897 - DNA, 15 bp, Homo sapiens
tcctaactgccccac

SEQ ID NO: 1898 - DNA, 15 bp, Homo sapiens
atcctaactgcccca

SEQ ID NO: 1899 - DNA, 15 bp, Homo sapiens
aatcctaactgcccc

SEQ ID NO: 1900 - DNA, 15 bp, Homo sapiens
gaatcctaactgccc

SEQ ID NO: 1901 - DNA, 15 bp, Homo sapiens
tgaatcctaactgcc

SEQ ID NO: 1902 - DNA, 15 bp, Homo sapiens
atgaatcctaactgc

SEQ ID NO: 1903 - DNA, 15 bp, Homo sapiens
aatgaatcctaactg

SEQ ID NO: 1904 - DNA, 15 bp, Homo sapiens
gaatgaatcctaact

SEQ ID NO: 1905 - DNA, 15 bp, Homo sapiens
ggaatgaatcctaac

SEQ ID NO: 1906 - DNA, 15 bp, Homo sapiens
aggaatgaatcctaa

SEQ ID NO: 1907 - DNA, 15 bp, Homo sapiens
gaggaatgaatccta

SEQ ID NO: 1908 - DNA, 15 bp, Homo sapiens
tgaggaatgaatcct

SEQ ID NO: 1909 - DNA, 15 bp, Homo sapiens
ttgaggaatgaatcc

SEQ ID NO: 1910 - DNA, 15 bp, Homo sapiens
cttgaggaatgaatc

SEQ ID NO: 1911 - DNA, 15 bp, Homo sapiens
ccttgaggaatgaat

SEQ ID NO: 1912 - DNA, 15 bp, Homo sapiens
cccttgaggaatgaa

SEQ ID NO: 1913 - DNA, 15 bp, Homo sapiens
gcccttgaggaatga

SEQ ID NO: 1914 - DNA, 15 bp, Homo sapiens
tgcccttgaggaatg

SEQ ID NO: 1915 - DNA, 15 bp, Homo sapiens
ttgcccttgaggaat

SEQ ID NO: 1916 - DNA, 15 bp, Homo sapiens
tttgcccttgaggaa

SEQ ID NO: 1917 - DNA, 15 bp, Homo sapiens
atttgcccttgagga

SEQ ID NO: 1918 - DNA, 15 bp, Homo sapiens
tatttgcccttgagg

SEQ ID NO: 1919 - DNA, 15 bp, Homo sapiens
ttatttgcccttgag

SEQ ID NO: 1920 - DNA, 15 bp, Homo sapiens
attatttgcccttga

SEQ ID NO: 1921 - DNA, 15 bp, Homo sapiens
tattatttgcccttg

SEQ ID NO: 1922 - DNA, 15 bp, Homo sapiens
atattatttgccctt

SEQ ID NO: 1923 - DNA, 15 bp, Homo sapiens
tatattatttgccct

SEQ ID NO: 1924 - DNA, 15 bp, Homo sapiens
gtatattatttgccc

SEQ ID NO: 1925 - DNA, 15 bp, Homo sapiens
tgtatattatttgcc

SEQ ID NO: 1926 - DNA, 15 bp, Homo sapiens
ctgtatattatttgc

SEQ ID NO: 1927 - DNA, 15 bp, Homo sapiens
tctgtatattatttg

SEQ ID NO: 1928 - DNA, 15 bp, Homo sapiens
gtctgtatattattt

SEQ ID NO: 1929 - DNA, 15 bp, Homo sapiens
tgtctgtatattatt

SEQ ID NO: 1930 - DNA, 15 bp, Homo sapiens
ttgtctgtatattat

SEQ ID NO: 1931 - DNA, 15 bp, Homo sapiens
attgtctgtatatta

SEQ ID NO: 1932 - DNA, 15 bp, Homo sapiens
gattgtctgtatatt

SEQ ID NO: 1933 - DNA, 15 bp, Homo sapiens
cgattgtctgtatat

SEQ ID NO: 1934 - DNA, 15 bp, Homo sapiens
tcgattgtctgtata

SEQ ID NO: 1935 - DNA, 15 bp, Homo sapiens
ctcgattgtctgtat

SEQ ID NO: 1936 - DNA, 15 bp, Homo sapiens
cctcgattgtctgta

SEQ ID NO: 1937 - DNA, 15 bp, Homo sapiens
ccctcgattgtctgt

SEQ ID NO: 1938 - DNA, 15 bp, Homo sapiens
cccctcgattgtctg

SEQ ID NO: 1939 - DNA, 15 bp, Homo sapiens
tcccctcgattgtct

SEQ ID NO: 1940 - DNA, 15 bp, Homo sapiens
ttcccctcgattgtc

SEQ ID NO: 1941 - DNA, 15 bp, Homo sapiens
tttcccctcgattgt

SEQ ID NO: 1942 - DNA, 15 bp, Homo sapiens
ttttcccctcgattg

SEQ ID NO: 1943 - DNA, 15 bp, Homo sapiens
tttttcccctcgatt

SEQ ID NO: 1944 - DNA, 15 bp, Homo sapiens
ttttttcccctcgat

SEQ ID NO: 1945 - DNA, 15 bp, Homo sapiens
tttttttcccctcga

SEQ ID NO: 1946 - DNA, 15 bp, Homo sapiens
ctttttttcccctcg

SEQ ID NO: 1947 - DNA, 15 bp, Homo sapiens
gctttttttcccctc

SEQ ID NO: 1948 - DNA, 15 bp, Homo sapiens
tgctttttttcccct

SEQ ID NO: 1949 - DNA, 15 bp, Homo sapiens
atgctttttttcccc

SEQ ID NO: 1950 - DNA, 15 bp, Homo sapiens
aatgctttttttccc

SEQ ID NO: 1951 - DNA, 15 bp, Homo sapiens
caatgctttttttcc

SEQ ID NO: 1952 - DNA, 15 bp, Homo sapiens
tcaatgctttttttc

SEQ ID NO: 1953 - DNA, 15 bp, Homo sapiens
ttcaatgcttttttt

SEQ ID NO: 1954 - DNA, 15 bp, Homo sapiens
attcaatgctttttt

SEQ ID NO: 1955 - DNA, 15 bp, Homo sapiens
aattcaatgcttttt

SEQ ID NO: 1956 - DNA, 15 bp, Homo sapiens
aaattcaatgctttt

SEQ ID NO: 1957 - DNA, 15 bp, Homo sapiens
caaattcaatgcttt

SEQ ID NO: 1958 - DNA, 15 bp, Homo sapiens
gcaaattcaatgctt

SEQ ID NO: 1959 - DNA, 15 bp, Homo sapiens
tgcaaattcaatgct

SEQ ID NO: 1960 - DNA, 15 bp, Homo sapiens
gtgcaaattcaatgc

SEQ ID NO: 1961 - DNA, 15 bp, Homo sapiens
tgtgcaaattcaatg

SEQ ID NO: 1962 - DNA, 15 bp, Homo sapiens
atgtgcaaattcaat

SEQ ID NO: 1963 - DNA, 15 bp, Homo sapiens
aatgtgcaaattcaa

SEQ ID NO: 1964 - DNA, 15 bp, Homo sapiens
aaatgtgcaaattca

SEQ ID NO: 1965 - DNA, 15 bp, Homo sapiens
caaatgtgcaaattc

SEQ ID NO: 1966 - DNA, 15 bp, Homo sapiens
ccaaatgtgcaaatt

SEQ ID NO: 1967 - DNA, 15 bp, Homo sapiens
accaaatgtgcaaat

SEQ ID NO: 1968 - DNA, 15 bp, Homo sapiens
caccaaatgtgcaaa

SEQ ID NO: 1969 - DNA, 15 bp, Homo sapiens
ccaccaaatgtgcaa

SEQ ID NO: 1970 - DNA, 15 bp, Homo sapiens
cccaccaaatgtgca

SEQ ID NO: 1971 - DNA, 15 bp, Homo sapiens
tcccaccaaatgtgc

SEQ ID NO: 1972 - DNA, 15 bp, Homo sapiens
ttcccaccaaatgtg

SEQ ID NO: 1973 - DNA, 15 bp, Homo sapiens
cttcccaccaaatgt

SEQ ID NO: 1974 - DNA, 15 bp, Homo sapiens
ccttcccaccaaatg

SEQ ID NO: 1975 - DNA, 15 bp, Homo sapiens
tccttcccaccaaat

SEQ ID NO: 1976 - DNA, 15 bp, Homo sapiens
ctccttcccaccaaa

SEQ ID NO: 1977 - DNA, 15 bp, Homo sapiens
tctccttcccaccaa

SEQ ID NO: 1978 - DNA, 15 bp, Homo sapiens
gtctccttcccacca

SEQ ID NO: 1979 - DNA, 15 bp, Homo sapiens
agtctccttcccacc

SEQ ID NO: 1980 - DNA, 15 bp, Homo sapiens
cagtctccttcccac

SEQ ID NO: 1981 - DNA, 15 bp, Homo sapiens
acagtctccttccca

SEQ ID NO: 1982 - DNA, 15 bp, Homo sapiens
cacagtctccttccc

SEQ ID NO: 1983 - DNA, 15 bp, Homo sapiens
acacagtctccttcc

SEQ ID NO: 1984 - DNA, 15 bp, Homo sapiens
cacacagtctccttc

SEQ ID NO: 1985 - DNA, 15 bp, Homo sapiens
acacacagtctcctt

SEQ ID NO: 1986 - DNA, 15 bp, Homo sapiens
cacacacagtctcct

SEQ ID NO: 1987 - DNA, 15 bp, Homo sapiens
acacacacagtctcc

SEQ ID NO: 1988 - DNA, 15 bp, Homo sapiens
cacacacacagtctc

SEQ ID NO: 1989 - DNA, 15 bp, Homo sapiens
acacacacacagtct

SEQ ID NO: 1990 - DNA, 15 bp, Homo sapiens
tacacacacacagtc

SEQ ID NO: 1991 - DNA, 15 bp, Homo sapiens
gtacacacacacagt

SEQ ID NO: 1992 - DNA, 15 bp, Homo sapiens
tgtacacacacacag

SEQ ID NO: 1993 - DNA, 15 bp, Homo sapiens
gtgtacacacacaca

SEQ ID NO: 1994 - DNA, 15 bp, Homo sapiens
tgtgtacacacacac

SEQ ID NO: 1995 - DNA, 15 bp, Homo sapiens
gtgtgtacacacaca

SEQ ID NO: 1996 - DNA, 15 bp, Homo sapiens
tgtgtgtacacacac

SEQ ID NO: 1997 - DNA, 15 bp, Homo sapiens
atgtgtgtacacaca

SEQ ID NO: 1998 - DNA, 15 bp, Homo sapiens
catgtgtgtacacac

SEQ ID NO: 1999 - DNA, 15 bp, Homo sapiens
ccatgtgtgtacaca

SEQ ID NO: 2000 - DNA, 15 bp, Homo sapiens
tccatgtgtgtacac

SEQ ID NO: 2001 - DNA, 15 bp, Homo sapiens
ctccatgtgtgtaca

SEQ ID NO: 2002 - DNA, 15 bp, Homo sapiens
cctccatgtgtgtac

SEQ ID NO: 2003 - DNA, 15 bp, Homo sapiens
ccctccatgtgtgta

SEQ ID NO: 2004 - DNA, 15 bp, Homo sapiens
accctccatgtgtgt

SEQ ID NO: 2005 - DNA, 15 bp, Homo sapiens
caccctccatgtgtg

SEQ ID NO: 2006 - DNA, 15 bp, Homo sapiens
tcaccctccatgtgt

SEQ ID NO: 2007 - DNA, 15 bp, Homo sapiens
ctcaccctccatgtg

SEQ ID NO: 2008 - DNA, 15 bp, Homo sapiens
tctcaccctccatgt

SEQ ID NO: 2009 - DNA, 15 bp, Homo sapiens
ttctcaccctccatg

SEQ ID NO: 2010 - DNA, 15 bp, Homo sapiens
attctcaccctccat

SEQ ID NO: 2011 - DNA, 15 bp, Homo sapiens
cattctcaccctcca

SEQ ID NO: 2012 - DNA, 15 bp, Homo sapiens
acattctcaccctcc

SEQ ID NO: 2013 - DNA, 15 bp, Homo sapiens
tacattctcaccctc

SEQ ID NO: 2014 - DNA, 15 bp, Homo sapiens
ttacattctcaccct

SEQ ID NO: 2015 - DNA, 15 bp, Homo sapiens
tttacattctcaccc

SEQ ID NO: 2016 - DNA, 15 bp, Homo sapiens
ttttacattctcacc

SEQ ID NO: 2017 - DNA, 15 bp, Homo sapiens
attttacattctcac

SEQ ID NO: 2018 - DNA, 15 bp, Homo sapiens
cattttacattctca

SEQ ID NO: 2019 - DNA, 15 bp, Homo sapiens
acattttacattctc

SEQ ID NO: 2020 - DNA, 15 bp, Homo sapiens
tacattttacattct

SEQ ID NO: 2021 - DNA, 15 bp, Homo sapiens
ttacattttacattc

SEQ ID NO: 2022 - DNA, 15 bp, Homo sapiens
cttacattttacatt

SEQ ID NO: 2023 - DNA, 15 bp, Homo sapiens
tcttacattttacat

SEQ ID NO: 2024 - DNA, 15 bp, Homo sapiens
ttcttacattttaca

SEQ ID NO: 2025 - DNA, 15 bp, Homo sapiens
gttcttacattttac

SEQ ID NO: 2026 - DNA, 15 bp, Homo sapiens
tgttcttacatttta

SEQ ID NO: 2027 - DNA, 15 bp, Homo sapiens
gtgttcttacatttt

SEQ ID NO: 2028 - DNA, 15 bp, Homo sapiens
agtgttcttacattt

SEQ ID NO: 2029 - DNA, 15 bp, Homo sapiens
tagtgttcttacatt

SEQ ID NO: 2030 - DNA, 15 bp, Homo sapiens
ttagtgttcttacat

SEQ ID NO: 2031 - DNA, 15 bp, Homo sapiens
tttagtgttcttaca

SEQ ID NO: 2032 - DNA, 15 bp, Homo sapiens
atttagtgttcttac

SEQ ID NO: 2033 - DNA, 15 bp, Homo sapiens
aatttagtgttctta

SEQ ID NO: 2034 - DNA, 15 bp, Homo sapiens
aaatttagtgttctt

SEQ ID NO: 2035 - DNA, 15 bp, Homo sapiens
aaaatttagtgttct

SEQ ID NO: 2036 - DNA, 15 bp, Homo sapiens
taaaatttagtgttc

SEQ ID NO: 2037 - DNA, 15 bp, Homo sapiens
gtaaaatttagtgtt

SEQ ID NO: 2038 - DNA, 15 bp, Homo sapiens
tgtaaaatttagtgt

SEQ ID NO: 2039 - DNA, 15 bp, Homo sapiens
ctgtaaaatttagtg

SEQ ID NO: 2040 - DNA, 15 bp, Homo sapiens
actgtaaaatttagt

SEQ ID NO: 2041 - DNA, 15 bp, Homo sapiens
tactgtaaaatttag

SEQ ID NO: 2042 - DNA, 15 bp, Homo sapiens
ctactgtaaaattta

SEQ ID NO: 2043 - DNA, 15 bp, Homo sapiens
tctactgtaaaattt

SEQ ID NO: 2044 - DNA, 15 bp, Homo sapiens
atctactgtaaaatt

SEQ ID NO: 2045 - DNA, 15 bp, Homo sapiens
tatctactgtaaaat

SEQ ID NO: 2046 - DNA, 15 bp, Homo sapiens
ctatctactgtaaaa

SEQ ID NO: 2047 - DNA, 15 bp, Homo sapiens
cctatctactgtaaa

SEQ ID NO: 2048 - DNA, 15 bp, Homo sapiens
tcctatctactgtaa

SEQ ID NO: 2049 - DNA, 15 bp, Homo sapiens
ttcctatctactgta

SEQ ID NO: 2050 - DNA, 15 bp, Homo sapiens
tttcctatctactgt

SEQ ID NO: 2051 - DNA, 15 bp, Homo sapiens
ttttcctatctactg

SEQ ID NO: 2052 - DNA, 15 bp, Homo sapiens
tttttcctatctact

SEQ ID NO: 2053 - DNA, 15 bp, Homo sapiens
gtttttcctatctac

SEQ ID NO: 2054 - DNA, 15 bp, Homo sapiens
agtttttcctatcta

SEQ ID NO: 2055 - DNA, 15 bp, Homo sapiens
tagtttttcctatct

SEQ ID NO: 2056 - DNA, 15 bp, Homo sapiens
gtagtttttcctatc

SEQ ID NO: 2057 - DNA, 15 bp, Homo sapiens
agtagtttttcctat

SEQ ID NO: 2058 - DNA, 15 bp, Homo sapiens
cagtagtttttccta

SEQ ID NO: 2059 - DNA, 15 bp, Homo sapiens
tcagtagtttttcct

SEQ ID NO: 2060 - DNA, 15 bp, Homo sapiens
ctcagtagtttttcc

SEQ ID NO: 2061 - DNA, 15 bp, Homo sapiens
tctcagtagtttttc

SEQ ID NO: 2062 - DNA, 15 bp, Homo sapiens
atctcagtagttttt

SEQ ID NO: 2063 - DNA, 15 bp, Homo sapiens
aatctcagtagtttt

SEQ ID NO: 2064 - DNA, 15 bp, Homo sapiens
taatctcagtagttt

SEQ ID NO: 2065 - DNA, 15 bp, Homo sapiens
gtaatctcagtagtt

SEQ ID NO: 2066 - DNA, 15 bp, Homo sapiens
tgtaatctcagtagt

SEQ ID NO: 2067 - DNA, 15 bp, Homo sapiens
ctgtaatctcagtag

SEQ ID NO: 2068 - DNA, 15 bp, Homo sapiens
tctgtaatctcagta

SEQ ID NO: 2069 - DNA, 15 bp, Homo sapiens
ttctgtaatctcagt

SEQ ID NO: 2070 - DNA, 15 bp, Homo sapiens
cttctgtaatctcag

SEQ ID NO: 2071 - DNA, 15 bp, Homo sapiens
gcttctgtaatctca

SEQ ID NO: 2072 - DNA, 15 bp, Homo sapiens
tgcttctgtaatctc

SEQ ID NO: 2073 - DNA, 15 bp, Homo sapiens
atgcttctgtaatct

SEQ ID NO: 2074 - DNA, 15 bp, Homo sapiens
tatgcttctgtaatc

SEQ ID NO: 2075 - DNA, 15 bp, Homo sapiens
ttatgcttctgtaat

SEQ ID NO: 2076 - DNA, 15 bp, Homo sapiens
tttatgcttctgtaa

SEQ ID NO: 2077 - DNA, 15 bp, Homo sapiens
ttttatgcttctgta

SEQ ID NO: 2078 - DNA, 15 bp, Homo sapiens
attttatgcttctgt

SEQ ID NO: 2079 - DNA, 15 bp, Homo sapiens
tattttatgcttctg

SEQ ID NO: 2080 - DNA, 15 bp, Homo sapiens
ttattttatgcttct

SEQ ID NO: 2081 - DNA, 15 bp, Homo sapiens
cttattttatgcttc

SEQ ID NO: 2082 - DNA, 15 bp, Homo sapiens
tcttattttatgctt

SEQ ID NO: 2083 - DNA, 15 bp, Homo sapiens
gtcttattttatgct

SEQ ID NO: 2084 - DNA, 15 bp, Homo sapiens
ggtcttattttatgc

SEQ ID NO: 2085 - DNA, 15 bp, Homo sapiens
aggtcttattttatg

SEQ ID NO: 2086 - DNA, 15 bp, Homo sapiens
aaggtcttattttat

SEQ ID NO: 2087 - DNA, 15 bp, Homo sapiens
caaggtcttatttta

SEQ ID NO: 2088 - DNA, 15 bp, Homo sapiens
ccaaggtcttatttt

SEQ ID NO: 2089 - DNA, 15 bp, Homo sapiens
tccaaggtcttattt

SEQ ID NO: 2090 - DNA, 15 bp, Homo sapiens
ctccaaggtcttatt

SEQ ID NO: 2091 - DNA, 15 bp, Homo sapiens
tctccaaggtcttat

SEQ ID NO: 2092 - DNA, 15 bp, Homo sapiens
ttctccaaggtctta

SEQ ID NO: 2093 - DNA, 15 bp, Homo sapiens
tttctccaaggtctt

SEQ ID NO: 2094 - DNA, 15 bp, Homo sapiens
gtttctccaaggtct

SEQ ID NO: 2095 - DNA, 15 bp, Homo sapiens
tgtttctccaaggtc

SEQ ID NO: 2096 - DNA, 15 bp, Homo sapiens
gtgtttctccaaggt

SEQ ID NO: 2097 - DNA, 15 bp, Homo sapiens
tgtgtttctccaagg

SEQ ID NO: 2098 - DNA, 15 bp, Homo sapiens
ctgtgtttctccaag

SEQ ID NO: 2099 - DNA, 15 bp, Homo sapiens
cctgtgtttctccaa

SEQ ID NO: 2100 - DNA, 15 bp, Homo sapiens
gcctgtgtttctcca

SEQ ID NO: 2101 - DNA, 15 bp, Homo sapiens
tgcctgtgtttctcc

SEQ ID NO: 2102 - DNA, 15 bp, Homo sapiens
ttgcctgtgtttctc

SEQ ID NO: 2103 - DNA, 15 bp, Homo sapiens
tttgcctgtgtttct

SEQ ID NO: 2104 - DNA, 15 bp, Homo sapiens
atttgcctgtgtttc

SEQ ID NO: 2105 - DNA, 15 bp, Homo sapiens
aatttgcctgtgttt

SEQ ID NO: 2106 - DNA, 15 bp, Homo sapiens
caatttgcctgtgtt

SEQ ID NO: 2107 - DNA, 15 bp, Homo sapiens
tcaatttgcctgtgt

SEQ ID NO: 2108 - DNA, 15 bp, Homo sapiens
ttcaatttgcctgtg

SEQ ID NO: 2109 - DNA, 15 bp, Homo sapiens
gttcaatttgcctgt

SEQ ID NO: 2110 - DNA, 15 bp, Homo sapiens
tgttcaatttgcctg

SEQ ID NO: 2111 - DNA, 15 bp, Homo sapiens
gtgttcaatttgcct

SEQ ID NO: 2112 - DNA, 15 bp, Homo sapiens
tgtgttcaatttgcc

SEQ ID NO: 2113 - DNA, 15 bp, Homo sapiens
ttgtgttcaatttgc

SEQ ID NO: 2114 - DNA, 15 bp, Homo sapiens
tttgtgttcaatttg

SEQ ID NO: 2115 - DNA, 15 bp, Homo sapiens
ttttgtgttcaattt

SEQ ID NO: 2116 - DNA, 15 bp, Homo sapiens
attttgtgttcaatt

SEQ ID NO: 2117 - DNA, 15 bp, Homo sapiens
tattttgtgttcaat

SEQ ID NO: 2118 - DNA, 15 bp, Homo sapiens
gtattttgtgttcaa

SEQ ID NO: 2119 - DNA, 15 bp, Homo sapiens
ggtattttgtgttca

SEQ ID NO: 2120 - DNA, 15 bp, Homo sapiens
tggtattttgtgttc

SEQ ID NO: 2121 - DNA, 15 bp, Homo sapiens
ttggtattttgtgtt

SEQ ID NO: 2122 - DNA, 15 bp, Homo sapiens
tttggtattttgtgt

SEQ ID NO: 2123 - DNA, 15 bp, Homo sapiens
atttggtattttgtg

SEQ ID NO: 2124 - DNA, 15 bp, Homo sapiens
catttggtattttgt

SEQ ID NO: 2125 - DNA, 15 bp, Homo sapiens
acatttggtattttg

SEQ ID NO: 2126 - DNA, 15 bp, Homo sapiens
gacatttggtatttt

SEQ ID NO: 2127 - DNA, 15 bp, Homo sapiens
tgacatttggtattt

SEQ ID NO: 2128 - DNA, 15 bp, Homo sapiens
atgacatttggtatt

SEQ ID NO: 2129 - DNA, 15 bp, Homo sapiens
gatgacatttggtat

SEQ ID NO: 2130 - DNA, 15 bp, Homo sapiens
cgatgacatttggta

SEQ ID NO: 2131 - DNA, 15 bp, Homo sapiens
ccgatgacatttggt

SEQ ID NO: 2132 - DNA, 15 bp, Homo sapiens
tccgatgacatttgg

SEQ ID NO: 2133 - DNA, 15 bp, Homo sapiens
ttccgatgacatttg

SEQ ID NO: 2134 - DNA, 15 bp, Homo sapiens
tttccgatgacattt

SEQ ID NO: 2135 - DNA, 15 bp, Homo sapiens
ctttccgatgacatt

SEQ ID NO: 2136 - DNA, 15 bp, Homo sapiens
cctttccgatgacat

SEQ ID NO: 2137 - DNA, 15 bp, Homo sapiens
tcctttccgatgaca

SEQ ID NO: 2138 - DNA, 15 bp, Homo sapiens
gtcctttccgatgac

SEQ ID NO: 2139 - DNA, 15 bp, Homo sapiens
agtcctttccgatga

SEQ ID NO: 2140 - DNA, 15 bp, Homo sapiens
cagtcctttccgatg

SEQ ID NO: 2141 - DNA, 15 bp, Homo sapiens
acagtcctttccgat

SEQ ID NO: 2142 - DNA, 15 bp, Homo sapiens
cacagtcctttccga

SEQ ID NO: 2143 - DNA, 15 bp, Homo sapiens
tcacagtcctttccg

SEQ ID NO: 2144 - DNA, 15 bp, Homo sapiens
gtcacagtcctttcc

SEQ ID NO: 2145 - DNA, 15 bp, Homo sapiens
agtcacagtcctttc

SEQ ID NO: 2146 - DNA, 15 bp, Homo sapiens
gagtcacagtccttt

SEQ ID NO: 2147 - DNA, 15 bp, Homo sapiens
tgagtcacagtcctt

SEQ ID NO: 2148 - DNA, 15 bp, Homo sapiens
ttgagtcacagtcct

SEQ ID NO: 2149 - DNA, 15 bp, Homo sapiens
tttgagtcacagtcc

SEQ ID NO: 2150 - DNA, 15 bp, Homo sapiens
atttgagtcacagtc

SEQ ID NO: 2151 - DNA, 15 bp, Homo sapiens
catttgagtcacagt

SEQ ID NO: 2152 - DNA, 15 bp, Homo sapiens
acatttgagtcacag

SEQ ID NO: 2153 - DNA, 15 bp, Homo sapiens
cacatttgagtcaca

SEQ ID NO: 2154 - DNA, 15 bp, Homo sapiens
tcacatttgagtcac

SEQ ID NO: 2155 - DNA, 15 bp, Homo sapiens
gtcacatttgagtca

SEQ ID NO: 2156 - DNA, 15 bp, Homo sapiens
ggtcacatttgagtc

SEQ ID NO: 2157 - DNA, 15 bp, Homo sapiens
cggtcacatttgagt

SEQ ID NO: 2158 - DNA, 15 bp, Homo sapiens
tcggtcacatttgag

SEQ ID NO: 2159 - DNA, 15 bp, Homo sapiens
atcggtcacatttga

SEQ ID NO: 2160 - DNA, 15 bp, Homo sapiens
tatcggtcacatttg

SEQ ID NO: 2161 - DNA, 15 bp, Homo sapiens
gtatcggtcacattt

SEQ ID NO: 2162 - DNA, 15 bp, Homo sapiens
tgtatcggtcacatt

SEQ ID NO: 2163 - DNA, 15 bp, Homo sapiens
atgtatcggtcacat

SEQ ID NO: 2164 - DNA, 15 bp, Homo sapiens
catgtatcggtcaca

SEQ ID NO: 2165 - DNA, 15 bp, Homo sapiens
tcatgtatcggtcac

SEQ ID NO: 2166 - DNA, 15 bp, Homo sapiens
ttcatgtatcggtca

SEQ ID NO: 2167 - DNA, 15 bp, Homo sapiens
gttcatgtatcggtc

SEQ ID NO: 2168 - DNA, 15 bp, Homo sapiens
tgttcatgtatcggt

SEQ ID NO: 2169 - DNA, 15 bp, Homo sapiens
atgttcatgtatcgg

SEQ ID NO: 2170 - DNA, 15 bp, Homo sapiens
aatgttcatgtatcg

SEQ ID NO: 2171 - DNA, 15 bp, Homo sapiens
caatgttcatgtatc

SEQ ID NO: 2172 - DNA, 15 bp, Homo sapiens
acaatgttcatgtat

SEQ ID NO: 2173 - DNA, 15 bp, Homo sapiens
tacaatgttcatgta

SEQ ID NO: 2174 - DNA, 15 bp, Homo sapiens
gtacaatgttcatgt

SEQ ID NO: 2175 - DNA, 15 bp, Homo sapiens
agtacaatgttcatg

SEQ ID NO: 2176 - DNA, 15 bp, Homo sapiens
cagtacaatgttcat

SEQ ID NO: 2177 - DNA, 15 bp, Homo sapiens
gcagtacaatgttca

SEQ ID NO: 2178 - DNA, 15 bp, Homo sapiens
agcagtacaatgttc

SEQ ID NO: 2179 - DNA, 15 bp, Homo sapiens
aagcagtacaatgtt

SEQ ID NO: 2180 - DNA, 15 bp, Homo sapiens
gaagcagtacaatgt

SEQ ID NO: 2181 - DNA, 15 bp, Homo sapiens
tgaagcagtacaatg

SEQ ID NO: 2182 - DNA, 15 bp, Homo sapiens
ctgaagcagtacaat

SEQ ID NO: 2183 - DNA, 15 bp, Homo sapiens
tctgaagcagtacaa

SEQ ID NO: 2184 - DNA, 15 bp, Homo sapiens
ttctgaagcagtaca

SEQ ID NO: 2185 - DNA, 15 bp, Homo sapiens
tttctgaagcagtac

SEQ ID NO: 2186 - DNA, 15 bp, Homo sapiens
ttttctgaagcagta

SEQ ID NO: 2187 - DNA, 15 bp, Homo sapiens
cttttctgaagcagt

SEQ ID NO: 2188 - DNA, 15 bp, Homo sapiens
gcttttctgaagcag

SEQ ID NO: 2189 - DNA, 15 bp, Homo sapiens
agcttttctgaagca

SEQ ID NO: 2190 - DNA, 15 bp, Homo sapiens
tagcttttctgaagc

SEQ ID NO: 2191 - DNA, 15 bp, Homo sapiens
ctagcttttctgaag

SEQ ID NO: 2192 - DNA, 15 bp, Homo sapiens
gctagcttttctgaa

SEQ ID NO: 2193 - DNA, 15 bp, Homo sapiens
tgctagcttttctga

SEQ ID NO: 2194 - DNA, 15 bp, Homo sapiens
ttgctagcttttctg

SEQ ID NO: 2195 - DNA, 15 bp, Homo sapiens
attgctagcttttct

SEQ ID NO: 2196 - DNA, 15 bp, Homo sapiens
tattgctagcttttc

SEQ ID NO: 2197 - DNA, 15 bp, Homo sapiens
atattgctagctttt

SEQ ID NO: 2198 - DNA, 15 bp, Homo sapiens
aatattgctagcttt

SEQ ID NO: 2199 - DNA, 15 bp, Homo sapiens
caatattgctagctt

SEQ ID NO: 2200 - DNA, 15 bp, Homo sapiens
acaatattgctagct

SEQ ID NO: 2201 - DNA, 15 bp, Homo sapiens
gacaatattgctagc

SEQ ID NO: 2202 - DNA, 15 bp, Homo sapiens
tgacaatattgctag

SEQ ID NO: 2203 - DNA, 15 bp, Homo sapiens
ctgacaatattgcta

SEQ ID NO: 2204 - DNA, 15 bp, Homo sapiens
tctgacaatattgct

SEQ ID NO: 2205 - DNA, 15 bp, Homo sapiens
ttctgacaatattgc

SEQ ID NO: 2206 - DNA, 15 bp, Homo sapiens
tttctgacaatattg

SEQ ID NO: 2207 - DNA, 15 bp, Homo sapiens
gtttctgacaatatt

SEQ ID NO: 2208 - DNA, 15 bp, Homo sapiens
agtttctgacaatat

SEQ ID NO: 2209 - DNA, 15 bp, Homo sapiens
tagtttctgacaata

SEQ ID NO: 2210 - DNA, 15 bp, Homo sapiens
ctagtttctgacaat

SEQ ID NO: 2211 - DNA, 15 bp, Homo sapiens
actagtttctgacaa

SEQ ID NO: 2212 - DNA, 15 bp, Homo sapiens
gactagtttctgaca

SEQ ID NO: 2213 - DNA, 15 bp, Homo sapiens
tgactagtttctgac

SEQ ID NO: 2214 - DNA, 15 bp, Homo sapiens
ttgactagtttctga

SEQ ID NO: 2215 - DNA, 15 bp, Homo sapiens
attgactagtttctg

SEQ ID NO: 2216 - DNA, 15 bp, Homo sapiens
tattgactagtttct

SEQ ID NO: 2217 - DNA, 15 bp, Homo sapiens
ttattgactagtttc

SEQ ID NO: 2218 - DNA, 15 bp, Homo sapiens
tttattgactagttt

SEQ ID NO: 2219 - DNA, 15 bp, Homo sapiens
ttttattgactagtt

SEQ ID NO: 2220 - DNA, 15 bp, Homo sapiens
tttttattgactagt

SEQ ID NO: 2221 - DNA, 15 bp, Homo sapiens
atttttattgactag

SEQ ID NO: 2222 - DNA, 15 bp, Homo sapiens
aatttttattgacta

SEQ ID NO: 2223 - DNA, 15 bp, Homo sapiens
aaatttttattgact

SEQ ID NO: 2224 - DNA, 15 bp, Homo sapiens
taaatttttattgac

SEQ ID NO: 2225 - DNA, 15 bp, Homo sapiens
gtaaatttttattga

SEQ ID NO: 2226 - DNA, 15 bp, Homo sapiens
ggtaaatttttattg

SEQ ID NO: 2227 - DNA, 15 bp, Homo sapiens
aggtaaatttttatt

SEQ ID NO: 2228 - DNA, 15 bp, Homo sapiens
taggtaaatttttat

SEQ ID NO: 2229 - DNA, 15 bp, Homo sapiens
ttaggtaaattttta

SEQ ID NO: 2230 - DNA, 15 bp, Homo sapiens
attaggtaaattttt

SEQ ID NO: 2231 - DNA, 15 bp, Homo sapiens
aattaggtaaatttt

SEQ ID NO: 2232 - DNA, 15 bp, Homo sapiens
taattaggtaaattt

SEQ ID NO: 2233 - DNA, 15 bp, Homo sapiens
ataattaggtaaatt

SEQ ID NO: 2234 - DNA, 15 bp, Homo sapiens
aataattaggtaaat

SEQ ID NO: 2235 - DNA, 15 bp, Homo sapiens
taataattaggtaaa

SEQ ID NO: 2236 - DNA, 15 bp, Homo sapiens
ataataattaggtaa

SEQ ID NO: 2237 - DNA, 15 bp, Homo sapiens
aataataattaggta

SEQ ID NO: 2238 - DNA, 15 bp, Homo sapiens
taataataattaggt

SEQ ID NO: 2239 - DNA, 15 bp, Homo sapiens
ctaataataattagg

SEQ ID NO: 2240 - DNA, 15 bp, Homo sapiens
actaataataattag

SEQ ID NO: 2241 - DNA, 15 bp, Homo sapiens
tactaataataatta

SEQ ID NO: 2242 - DNA, 15 bp, Homo sapiens
ttactaataataatt

SEQ ID NO: 2243 - DNA, 15 bp, Homo sapiens
gttactaataataat

SEQ ID NO: 2244 - DNA, 15 bp, Homo sapiens
ggttactaataataa

SEQ ID NO: 2245 - DNA, 15 bp, Homo sapiens
tggttactaataata

SEQ ID NO: 2246 - DNA, 15 bp, Homo sapiens
ttggttactaataat

SEQ ID NO: 2247 - DNA, 15 bp, Homo sapiens
tttggttactaataa

SEQ ID NO: 2248 - DNA, 15 bp, Homo sapiens
ctttggttactaata

SEQ ID NO: 2249 - DNA, 15 bp, Homo sapiens
gctttggttactaat

SEQ ID NO: 2250 - DNA, 15 bp, Homo sapiens
tgctttggttactaa

SEQ ID NO: 2251 - DNA, 15 bp, Homo sapiens
gtgctttggttacta

SEQ ID NO: 2252 - DNA, 15 bp, Homo sapiens
agtgctttggttact

SEQ ID NO: 2253 - DNA, 15 bp, Homo sapiens
cagtgctttggttac

SEQ ID NO: 2254 - DNA, 15 bp, Homo sapiens
tcagtgctttggtta

SEQ ID NO: 2255 - DNA, 15 bp, Homo sapiens
ttcagtgctttggtt

SEQ ID NO: 2256 - DNA, 15 bp, Homo sapiens
gttcagtgctttggt

SEQ ID NO: 2257 - DNA, 15 bp, Homo sapiens
tgttcagtgctttgg

SEQ ID NO: 2258 - DNA, 15 bp, Homo sapiens
ctgttcagtgctttg

SEQ ID NO: 2259 - DNA, 15 bp, Homo sapiens
actgttcagtgcttt

SEQ ID NO: 2260 - DNA, 15 bp, Homo sapiens
tactgttcagtgctt

SEQ ID NO: 2261 - DNA, 15 bp, Homo sapiens
gtactgttcagtgct

SEQ ID NO: 2262 - DNA, 15 bp, Homo sapiens
tgtactgttcagtgc

SEQ ID NO: 2263 - DNA, 15 bp, Homo sapiens
ttgtactgttcagtg

SEQ ID NO: 2264 - DNA, 15 bp, Homo sapiens
cttgtactgttcagt

SEQ ID NO: 2265 - DNA, 15 bp, Homo sapiens
ccttgtactgttcag

SEQ ID NO: 2266 - DNA, 15 bp, Homo sapiens
gccttgtactgttca

SEQ ID NO: 2267 - DNA, 15 bp, Homo sapiens
tgccttgtactgttc

SEQ ID NO: 2268 - DNA, 15 bp, Homo sapiens
gtgccttgtactgtt

SEQ ID NO: 2269 - DNA, 15 bp, Homo sapiens
agtgccttgtactgt

SEQ ID NO: 2270 - DNA, 15 bp, Homo sapiens
tagtgccttgtactg

SEQ ID NO: 2271 - DNA, 15 bp, Homo sapiens
atagtgccttgtact

SEQ ID NO: 2272 - DNA, 15 bp, Homo sapiens
tatagtgccttgtac

SEQ ID NO: 2273 - DNA, 15 bp, Homo sapiens
ttatagtgccttgta

SEQ ID NO: 2274 - DNA, 15 bp, Homo sapiens
cttatagtgccttgt

SEQ ID NO: 2275 - DNA, 15 bp, Homo sapiens
gcttatagtgccttg

SEQ ID NO: 2276 - DNA, 15 bp, Homo sapiens
agcttatagtgcctt

SEQ ID NO: 2277 - DNA, 15 bp, Homo sapiens
tagcttatagtgcct

SEQ ID NO: 2278 - DNA, 15 bp, Homo sapiens
ctagcttatagtgcc

SEQ ID NO: 2279 - DNA, 15 bp, Homo sapiens
actagcttatagtgc

SEQ ID NO: 2280 - DNA, 15 bp, Homo sapiens
tactagcttatagtg

SEQ ID NO: 2281 - DNA, 15 bp, Homo sapiens
ttactagcttatagt

SEQ ID NO: 2282 - DNA, 15 bp, Homo sapiens
tttactagcttatag

SEQ ID NO: 2283 - DNA, 15 bp, Homo sapiens
ttttactagcttata

SEQ ID NO: 2284 - DNA, 15 bp, Homo sapiens
attttactagcttat

SEQ ID NO: 2285 - DNA, 15 bp, Homo sapiens
gattttactagctta

SEQ ID NO: 2286 - DNA, 15 bp, Homo sapiens
tgattttactagctt

SEQ ID NO: 2287 - DNA, 15 bp, Homo sapiens
gtgattttactagct

SEQ ID NO: 2288 - DNA, 15 bp, Homo sapiens
agtgattttactagc

SEQ ID NO: 2289 - DNA, 15 bp, Homo sapiens
cagtgattttactag

SEQ ID NO: 2290 - DNA, 15 bp, Homo sapiens
ccagtgattttacta

SEQ ID NO: 2291 - DNA, 15 bp, Homo sapiens
accagtgattttact

SEQ ID NO: 2292 - DNA, 15 bp, Homo sapiens
gaccagtgattttac

SEQ ID NO: 2293 - DNA, 15 bp, Homo sapiens
tgaccagtgatttta

SEQ ID NO: 2294 - DNA, 15 bp, Homo sapiens
atgaccagtgatttt

SEQ ID NO: 2295 - DNA, 15 bp, Homo sapiens
aatgaccagtgattt

SEQ ID NO: 2296 - DNA, 15 bp, Homo sapiens
gaatgaccagtgatt

SEQ ID NO: 2297 - DNA, 15 bp, Homo sapiens
ggaatgaccagtgat

SEQ ID NO: 2298 - DNA, 15 bp, Homo sapiens
aggaatgaccagtga

SEQ ID NO: 2299 - DNA, 15 bp, Homo sapiens
gaggaatgaccagtg

SEQ ID NO: 2300 - DNA, 15 bp, Homo sapiens
cgaggaatgaccagt

SEQ ID NO: 2301 - DNA, 15 bp, Homo sapiens
tcgaggaatgaccag

SEQ ID NO: 2302 - DNA, 15 bp, Homo sapiens
ttcgaggaatgacca

SEQ ID NO: 2303 - DNA, 15 bp, Homo sapiens
tttcgaggaatgacc

SEQ ID NO: 2304 - DNA, 15 bp, Homo sapiens
ctttcgaggaatgac

SEQ ID NO: 2305 - DNA, 15 bp, Homo sapiens
tctttcgaggaatga

SEQ ID NO: 2306 - DNA, 15 bp, Homo sapiens
ttctttcgaggaatg

SEQ ID NO: 2307 - DNA, 15 bp, Homo sapiens
tttctttcgaggaat

SEQ ID NO: 2308 - DNA, 15 bp, Homo sapiens
gtttctttcgaggaa

SEQ ID NO: 2309 - DNA, 15 bp, Homo sapiens
tgtttctttcgagga

SEQ ID NO: 2310 - DNA, 15 bp, Homo sapiens
atgtttctttcgagg

SEQ ID NO: 2311 - DNA, 15 bp, Homo sapiens
catgtttctttcgag

SEQ ID NO: 2312 - DNA, 15 bp, Homo sapiens
tcatgtttctttcga

SEQ ID NO: 2313 - DNA, 15 bp, Homo sapiens
atcatgtttctttcg

SEQ ID NO: 2314 - DNA, 15 bp, Homo sapiens
tatcatgtttctttc

SEQ ID NO: 2315 - DNA, 15 bp, Homo sapiens
gtatcatgtttcttt

SEQ ID NO: 2316 - DNA, 15 bp, Homo sapiens
tgtatcatgtttctt

SEQ ID NO: 2317 - DNA, 15 bp, Homo sapiens
atgtatcatgtttct

SEQ ID NO: 2318 - DNA, 15 bp, Homo sapiens
tatgtatcatgtttc

SEQ ID NO: 2319 - DNA, 15 bp, Homo sapiens
ctatgtatcatgttt

SEQ ID NO: 2320 - DNA, 15 bp, Homo sapiens
cctatgtatcatgtt

SEQ ID NO: 2321 - DNA, 15 bp, Homo sapiens
acctatgtatcatgt

SEQ ID NO: 2322 - DNA, 15 bp, Homo sapiens
tacctatgtatcatg

SEQ ID NO: 2323 - DNA, 15 bp, Homo sapiens
ctacctatgtatcat

SEQ ID NO: 2324 - DNA, 15 bp, Homo sapiens
tctacctatgtatca

SEQ ID NO: 2325 - DNA, 15 bp, Homo sapiens
atctacctatgtatc

SEQ ID NO: 2326 - DNA, 15 bp, Homo sapiens
tatctacctatgtat

SEQ ID NO: 2327 - DNA, 15 bp, Homo sapiens
ttatctacctatgta

SEQ ID NO: 2328 - DNA, 15 bp, Homo sapiens
gttatctacctatgt

SEQ ID NO: 2329 - DNA, 15 bp, Homo sapiens
ggttatctacctatg

SEQ ID NO: 2330 - DNA, 15 bp, Homo sapiens
tggttatctacctat

SEQ ID NO: 2331 - DNA, 15 bp, Homo sapiens
gtggttatctaccta

SEQ ID NO: 2332 - DNA, 15 bp, Homo sapiens
agtggttatctacct

SEQ ID NO: 2333 - DNA, 15 bp, Homo sapiens
gagtggttatctacc

SEQ ID NO: 2334 - DNA, 15 bp, Homo sapiens
cgagtggttatctac

SEQ ID NO: 2335 - DNA, 15 bp, Homo sapiens
tcgagtggttatcta

SEQ ID NO: 2336 - DNA, 15 bp, Homo sapiens
ctcgagtggttatct

SEQ ID NO: 2337 - DNA, 15 bp, Homo sapiens
tctcgagtggttatc

SEQ ID NO: 2338 - DNA, 15 bp, Homo sapiens
ctctcgagtggttat

SEQ ID NO: 2339 - DNA, 15 bp, Homo sapiens
gctctcgagtggtta

SEQ ID NO: 2340 - DNA, 15 bp, Homo sapiens
tgctctcgagtggtt

SEQ ID NO: 2341 - DNA, 15 bp, Homo sapiens
ctgctctcgagtggt

SEQ ID NO: 2342 - DNA, 15 bp, Homo sapiens
tctgctctcgagtgg

SEQ ID NO: 2343 - DNA, 15 bp, Homo sapiens
atctgctctcgagtg

SEQ ID NO: 2344 - DNA, 15 bp, Homo sapiens
catctgctctcgagt

SEQ ID NO: 2345 - DNA, 15 bp, Homo sapiens
gcatctgctctcgag

SEQ ID NO: 2346 - DNA, 15 bp, Homo sapiens
tgcatctgctctcga

SEQ ID NO: 2347 - DNA, 15 bp, Homo sapiens
ctgcatctgctctcg

SEQ ID NO: 2348 - DNA, 15 bp, Homo sapiens
actgcatctgctctc

SEQ ID NO: 2349 - DNA, 15 bp, Homo sapiens
aactgcatctgctct

SEQ ID NO: 2350 - DNA, 15 bp, Homo sapiens
taactgcatctgctc

SEQ ID NO: 2351 - DNA, 15 bp, Homo sapiens
ctaactgcatctgct

SEQ ID NO: 2352 - DNA, 15 bp, Homo sapiens
actaactgcatctgc

SEQ ID NO: 2353 - DNA, 15 bp, Homo sapiens
cactaactgcatctg

SEQ ID NO: 2354 - DNA, 15 bp, Homo sapiens
ccactaactgcatct

SEQ ID NO: 2355 - DNA, 15 bp, Homo sapiens
gccactaactgcatc

SEQ ID NO: 2356 - DNA, 15 bp, Homo sapiens
tgccactaactgcat

SEQ ID NO: 2357 - DNA, 15 bp, Homo sapiens
ctgccactaactgca

SEQ ID NO: 2358 - DNA, 15 bp, Homo sapiens
cctgccactaactgc

SEQ ID NO: 2359 - DNA, 15 bp, Homo sapiens
ccctgccactaactg

SEQ ID NO: 2360 - DNA, 15 bp, Homo sapiens
tccctgccactaact

SEQ ID NO: 2361 - DNA, 15 bp, Homo sapiens
gtccctgccactaac

SEQ ID NO: 2362 - DNA, 15 bp, Homo sapiens
tgtccctgccactaa

SEQ ID NO: 2363 - DNA, 15 bp, Homo sapiens
gtgtccctgccacta

SEQ ID NO: 2364 - DNA, 15 bp, Homo sapiens
tgtgtccctgccact

SEQ ID NO: 2365 - DNA, 15 bp, Homo sapiens
atgtgtccctgccac

SEQ ID NO: 2366 - DNA, 15 bp, Homo sapiens
aatgtgtccctgcca

SEQ ID NO: 2367 - DNA, 15 bp, Homo sapiens
aaatgtgtccctgcc

SEQ ID NO: 2368 - DNA, 15 bp, Homo sapiens
taaatgtgtccctgc

SEQ ID NO: 2369 - DNA, 15 bp, Homo sapiens
ttaaatgtgtccctg

SEQ ID NO: 2370 - DNA, 15 bp, Homo sapiens
tttaaatgtgtccct

SEQ ID NO: 2371 - DNA, 15 bp, Homo sapiens
ttttaaatgtgtccc

SEQ ID NO: 2372 - DNA, 15 bp, Homo sapiens
gttttaaatgtgtcc

SEQ ID NO: 2373 - DNA, 15 bp, Homo sapiens
tgttttaaatgtgtc

SEQ ID NO: 2374 - DNA, 15 bp, Homo sapiens
ttgttttaaatgtgt

SEQ ID NO: 2375 - DNA, 15 bp, Homo sapiens
gttgttttaaatgtg

SEQ ID NO: 2376 - DNA, 15 bp, Homo sapiens
ggttgttttaaatgt

SEQ ID NO: 2377 - DNA, 15 bp, Homo sapiens
tggttgttttaaatg

SEQ ID NO: 2378 - DNA, 15 bp, Homo sapiens
atggttgttttaaat

SEQ ID NO: 2379 - DNA, 15 bp, Homo sapiens
tatggttgttttaaa

SEQ ID NO: 2380 - DNA, 15 bp, Homo sapiens
ttatggttgttttaa

SEQ ID NO: 2381 - DNA, 15 bp, Homo sapiens
tttatggttgtttta

SEQ ID NO: 2382 - DNA, 15 bp, Homo sapiens
ttttatggttgtttt

SEQ ID NO: 2383 - DNA, 15 bp, Homo sapiens
tttttatggttgttt

SEQ ID NO: 2384 - DNA, 15 bp, Homo sapiens
atttttatggttgtt

SEQ ID NO: 2385 - DNA, 15 bp, Homo sapiens
catttttatggttgt

SEQ ID NO: 2386 - DNA, 15 bp, Homo sapiens
gcatttttatggttg

SEQ ID NO: 2387 - DNA, 15 bp, Homo sapiens
tgcatttttatggtt

SEQ ID NO: 2388 - DNA, 15 bp, Homo sapiens
ttgcatttttatggt

SEQ ID NO: 2389 - DNA, 15 bp, Homo sapiens
tttgcatttttatgg

SEQ ID NO: 2390 - DNA, 15 bp, Homo sapiens
ttttgcatttttatg

SEQ ID NO: 2391 - DNA, 15 bp, Homo sapiens
tttttgcatttttat

SEQ ID NO: 2392 - DNA, 15 bp, Homo sapiens
ttttttgcattttta

SEQ ID NO: 2393 - DNA, 15 bp, Homo sapiens
gttttttgcattttt

SEQ ID NO: 2394 - DNA, 15 bp, Homo sapiens
tgttttttgcatttt

SEQ ID NO: 2395 - DNA, 15 bp, Homo sapiens
ttgttttttgcattt

SEQ ID NO: 2396 - DNA, 15 bp, Homo sapiens
cttgttttttgcatt

SEQ ID NO: 2397 - DNA, 15 bp, Homo sapiens
gcttgttttttgcat

SEQ ID NO: 2398 - DNA, 15 bp, Homo sapiens
tgcttgttttttgca

SEQ ID NO: 2399 - DNA, 15 bp, Homo sapiens
ctgcttgttttttgc

SEQ ID NO: 2400 - DNA, 15 bp, Homo sapiens
actgcttgttttttg

SEQ ID NO: 2401 - DNA, 15 bp, Homo sapiens
tactgcttgtttttt

SEQ ID NO: 2402 - DNA, 15 bp, Homo sapiens
gtactgcttgttttt

SEQ ID NO: 2403 - DNA, 15 bp, Homo sapiens
tgtactgcttgtttt

SEQ ID NO: 2404 - DNA, 15 bp, Homo sapiens
ttgtactgcttgttt

SEQ ID NO: 2405 - DNA, 15 bp, Homo sapiens
tttgtactgcttgtt

SEQ ID NO: 2406 - DNA, 15 bp, Homo sapiens
atttgtactgcttgt

SEQ ID NO: 2407 - DNA, 15 bp, Homo sapiens
catttgtactgcttg

SEQ ID NO: 2408 - DNA, 15 bp, Homo sapiens
tcatttgtactgctt

SEQ ID NO: 2409 - DNA, 15 bp, Homo sapiens
ttcatttgtactgct

SEQ ID NO: 2410 - DNA, 15 bp, Homo sapiens
tttcatttgtactgc

SEQ ID NO: 2411 - DNA, 15 bp, Homo sapiens
atttcatttgtactg

SEQ ID NO: 2412 - DNA, 15 bp, Homo sapiens
tatttcatttgtact

SEQ ID NO: 2413 - DNA, 15 bp, Homo sapiens
ttatttcatttgtac

SEQ ID NO: 2414 - DNA, 15 bp, Homo sapiens
tttatttcatttgta

SEQ ID NO: 2415 - DNA, 15 bp, Homo sapiens
gtttatttcatttgt

SEQ ID NO: 2416 - DNA, 15 bp, Homo sapiens
agtttatttcatttg

SEQ ID NO: 2417 - DNA, 15 bp, Homo sapiens
cagtttatttcattt

SEQ ID NO: 2418 - DNA, 15 bp, Homo sapiens
tcagtttatttcatt

SEQ ID NO: 2419 - DNA, 15 bp, Homo sapiens
atcagtttatttcat

SEQ ID NO: 2420 - DNA, 15 bp, Homo sapiens
aatcagtttatttca

SEQ ID NO: 2421 - DNA, 15 bp, Homo sapiens
aaatcagtttatttc

SEQ ID NO: 2422 - DNA, 15 bp, Homo sapiens
aaaatcagtttattt

SEQ ID NO: 2423 - DNA, 15 bp, Homo sapiens
aaaaatcagtttatt

SEQ ID NO: 2424 - DNA, 15 bp, Homo sapiens
aaaaaatcagtttat

SEQ ID NO: 2425 - DNA, 15 bp, Homo sapiens
aaaaaaatcagttta

SEQ ID NO: 2426 - DNA, 15 bp, Homo sapiens
aaaaaaaatcagttt

SEQ ID NO: 2427 - DNA, 15 bp, Homo sapiens
gaaaaaaaatcagtt

SEQ ID NO: 2428 - DNA, 15 bp, Homo sapiens
tgaaaaaaaatcagt

SEQ ID NO: 2429 - DNA, 15 bp, Homo sapiens
ttgaaaaaaaatcag

SEQ ID NO: 2430 - DNA, 15 bp, Homo sapiens
gttgaaaaaaaatca

SEQ ID NO: 2431 - DNA, 15 bp, Homo sapiens
agttgaaaaaaaatc

SEQ ID NO: 2432 - DNA, 15 bp, Homo sapiens
aagttgaaaaaaaat

SEQ ID NO: 2433 - DNA, 15 bp, Homo sapiens
taagttgaaaaaaaa

SEQ ID NO: 2434 - DNA, 15 bp, Homo sapiens
ttaagttgaaaaaaa

SEQ ID NO: 2435 - DNA, 15 bp, Homo sapiens
attaagttgaaaaaa

SEQ ID NO: 2436 - DNA, 15 bp, Homo sapiens
aattaagttgaaaaa

SEQ ID NO: 2437 - DNA, 15 bp, Homo sapiens
taattaagttgaaaa

SEQ ID NO: 2438 - DNA, 15 bp, Homo sapiens
ttaattaagttgaaa

SEQ ID NO: 2439 - DNA, 15 bp, Homo sapiens
gttaattaagttgaa

SEQ ID NO: 2440 - DNA, 15 bp, Homo sapiens
tgttaattaagttga

SEQ ID NO: 2441 - DNA, 15 bp, Homo sapiens
gtgttaattaagttg

SEQ ID NO: 2442 - DNA, 15 bp, Homo sapiens
agtgttaattaagtt

SEQ ID NO: 2443 - DNA, 15 bp, Homo sapiens
cagtgttaattaagt

SEQ ID NO: 2444 - DNA, 15 bp, Homo sapiens
acagtgttaattaag

SEQ ID NO: 2445 - DNA, 15 bp, Homo sapiens
aacagtgttaattaa

SEQ ID NO: 2446 - DNA, 15 bp, Homo sapiens
taacagtgttaatta

SEQ ID NO: 2447 - DNA, 15 bp, Homo sapiens
ttaacagtgttaatt

SEQ ID NO: 2448 - DNA, 15 bp, Homo sapiens
attaacagtgttaat

SEQ ID NO: 2449 - DNA, 15 bp, Homo sapiens
aattaacagtgttaa

SEQ ID NO: 2450 - DNA, 15 bp, Homo sapiens
gaattaacagtgtta

SEQ ID NO: 2451 - DNA, 15 bp, Homo sapiens
tgaattaacagtgtt

SEQ ID NO: 2452 - DNA, 15 bp, Homo sapiens
ttgaattaacagtgt

SEQ ID NO: 2453 - DNA, 15 bp, Homo sapiens
tttgaattaacagtg

SEQ ID NO: 2454 - DNA, 15 bp, Homo sapiens
gtttgaattaacagt

SEQ ID NO: 2455 - DNA, 15 bp, Homo sapiens
tgtttgaattaacag

SEQ ID NO: 2456 - DNA, 15 bp, Homo sapiens
ttgtttgaattaaca

SEQ ID NO: 2457 - DNA, 15 bp, Homo sapiens
cttgtttgaattaac

SEQ ID NO: 2458 - DNA, 15 bp, Homo sapiens
gcttgtttgaattaa

SEQ ID NO: 2459 - DNA, 15 bp, Homo sapiens
agcttgtttgaatta

SEQ ID NO: 2460 - DNA, 15 bp, Homo sapiens
gagcttgtttgaatt

SEQ ID NO: 2461 - DNA, 15 bp, Homo sapiens
ggagcttgtttgaat

SEQ ID NO: 2462 - DNA, 15 bp, Homo sapiens
tggagcttgtttgaa

SEQ ID NO: 2463 - DNA, 15 bp, Homo sapiens
ttggagcttgtttga

SEQ ID NO: 2464 - DNA, 15 bp, Homo sapiens
gttggagcttgtttg

SEQ ID NO: 2465 - DNA, 15 bp, Homo sapiens
tgttggagcttgttt

SEQ ID NO: 2466 - DNA, 15 bp, Homo sapiens
gtgttggagcttgtt

SEQ ID NO: 2467 - DNA, 15 bp, Homo sapiens
agtgttggagcttgt

SEQ ID NO: 2468 - DNA, 15 bp, Homo sapiens
aagtgttggagcttg

SEQ ID NO: 2469 - DNA, 15 bp, Homo sapiens
taagtgttggagctt

SEQ ID NO: 2470 - DNA, 15 bp, Homo sapiens
ataagtgttggagct

SEQ ID NO: 2471 - DNA, 15 bp, Homo sapiens
cataagtgttggagc

SEQ ID NO: 2472 - DNA, 15 bp, Homo sapiens
acataagtgttggag

SEQ ID NO: 2473 - DNA, 15 bp, Homo sapiens
aacataagtgttgga

SEQ ID NO: 2474 - DNA, 15 bp, Homo sapiens
aaacataagtgttgg

SEQ ID NO: 2475 - DNA, 15 bp, Homo sapiens
taaacataagtgttg

SEQ ID NO: 2476 - DNA, 15 bp, Homo sapiens
gtaaacataagtgtt

SEQ ID NO: 2477 - DNA, 15 bp, Homo sapiens
tgtaaacataagtgt

SEQ ID NO: 2478 - DNA, 15 bp, Homo sapiens
ttgtaaacataagtg

SEQ ID NO: 2479 - DNA, 15 bp, Homo sapiens
tttgtaaacataagt

SEQ ID NO: 2480 - DNA, 15 bp, Homo sapiens
ttttgtaaacataag

SEQ ID NO: 2481 - DNA, 15 bp, Homo sapiens
tttttgtaaacataa

SEQ ID NO: 2482 - DNA, 15 bp, Homo sapiens
ttttttgtaaacata

SEQ ID NO: 2483 - DNA, 15 bp, Homo sapiens
cttttttgtaaacat

SEQ ID NO: 2484 - DNA, 15 bp, Homo sapiens
tcttttttgtaaaca

SEQ ID NO: 2485 - DNA, 15 bp, Homo sapiens
ttcttttttgtaaac

SEQ ID NO: 2486 - DNA, 15 bp, Homo sapiens
tttcttttttgtaaa

SEQ ID NO: 2487 - DNA, 15 bp, Homo sapiens
ttttcttttttgtaa

SEQ ID NO: 2488 - DNA, 15 bp, Homo sapiens
tttttcttttttgta

SEQ ID NO: 2489 - DNA, 15 bp, Homo sapiens
atttttcttttttgt

SEQ ID NO: 2490 - DNA, 15 bp, Homo sapiens
tatttttcttttttg

SEQ ID NO: 2491 - DNA, 15 bp, Homo sapiens
ttatttttctttttt

SEQ ID NO: 2492 - DNA, 15 bp, Homo sapiens
tttatttttcttttt

SEQ ID NO: 2493 - DNA, 15 bp, Homo sapiens
ttttatttttctttt

SEQ ID NO: 2494 - DNA, 15 bp, Homo sapiens
tttttatttttcttt

SEQ ID NO: 2495 - DNA, 15 bp, Homo sapiens
gtttttatttttctt

SEQ ID NO: 2496 - DNA, 15 bp, Homo sapiens
tgtttttatttttct

SEQ ID NO: 2497 - DNA, 15 bp, Homo sapiens
ttgtttttatttttc

SEQ ID NO: 2498 - DNA, 15 bp, Homo sapiens
attgtttttattttt

SEQ ID NO: 2499 - DNA, 15 bp, Homo sapiens
aattgtttttatttt

SEQ ID NO: 2500 - DNA, 15 bp, Homo sapiens
taattgtttttattt

SEQ ID NO: 2501 - DNA, 15 bp, Homo sapiens
ctaattgtttttatt

SEQ ID NO: 2502 - DNA, 15 bp, Homo sapiens
gctaattgtttttat

SEQ ID NO: 2503 - DNA, 15 bp, Homo sapiens
agctaattgttttta

SEQ ID NO: 2504 - DNA, 15 bp, Homo sapiens
aagctaattgttttt

SEQ ID NO: 2505 - DNA, 15 bp, Homo sapiens
aaagctaattgtttt

SEQ ID NO: 2506 - DNA, 15 bp, Homo sapiens
taaagctaattgttt

SEQ ID NO: 2507 - DNA, 15 bp, Homo sapiens
ataaagctaattgtt

SEQ ID NO: 2508 - DNA, 15 bp, Homo sapiens
gataaagctaattgt

SEQ ID NO: 2509 - DNA, 15 bp, Homo sapiens
tgataaagctaattg

SEQ ID NO: 2510 - DNA, 15 bp, Homo sapiens
ttgataaagctaatt

SEQ ID NO: 2511 - DNA, 15 bp, Homo sapiens
attgataaagctaat

SEQ ID NO: 2512 - DNA, 15 bp, Homo sapiens
gattgataaagctaa

SEQ ID NO: 2513 - DNA, 15 bp, Homo sapiens
agattgataaagcta

SEQ ID NO: 2514 - DNA, 15 bp, Homo sapiens
cagattgataaagct

SEQ ID NO: 2515 - DNA, 15 bp, Homo sapiens
ccagattgataaagc

SEQ ID NO: 2516 - DNA, 15 bp, Homo sapiens
accagattgataaag

SEQ ID NO: 2517 - DNA, 15 bp, Homo sapiens
gaccagattgataaa

SEQ ID NO: 2518 - DNA, 15 bp, Homo sapiens
agaccagattgataa

SEQ ID NO: 2519 - DNA, 15 bp, Homo sapiens
gagaccagattgata

SEQ ID NO: 2520 - DNA, 15 bp, Homo sapiens
tgagaccagattgat

SEQ ID NO: 2521 - DNA, 15 bp, Homo sapiens
ttgagaccagattga

SEQ ID NO: 2522 - DNA, 15 bp, Homo sapiens
attgagaccagattg

SEQ ID NO: 2523 - DNA, 15 bp, Homo sapiens
tattgagaccagatt

SEQ ID NO: 2524 - DNA, 15 bp, Homo sapiens
gtattgagaccagat

SEQ ID NO: 2525 - DNA, 15 bp, Homo sapiens
ggtattgagaccaga

SEQ ID NO: 2526 - DNA, 15 bp, Homo sapiens
tggtattgagaccag

SEQ ID NO: 2527 - DNA, 15 bp, Homo sapiens
gtggtattgagacca

SEQ ID NO: 2528 - DNA, 15 bp, Homo sapiens
ggtggtattgagacc

SEQ ID NO: 2529 - DNA, 15 bp, Homo sapiens
aggtggtattgagac

SEQ ID NO: 2530 - DNA, 15 bp, Homo sapiens
caggtggtattgaga

SEQ ID NO: 2531 - DNA, 15 bp, Homo sapiens
acaggtggtattgag

SEQ ID NO: 2532 - DNA, 15 bp, Homo sapiens
cacaggtggtattga

SEQ ID NO: 2533 - DNA, 15 bp, Homo sapiens
acacaggtggtattg

SEQ ID NO: 2534 - DNA, 15 bp, Homo sapiens
cacacaggtggtatt

SEQ ID NO: 2535 - DNA, 15 bp, Homo sapiens
tcacacaggtggtat

SEQ ID NO: 2536 - DNA, 15 bp, Homo sapiens
gtcacacaggtggta

SEQ ID NO: 2537 - DNA, 15 bp, Homo sapiens
ggtcacacaggtggt

SEQ ID NO: 2538 - DNA, 15 bp, Homo sapiens
aggtcacacaggtgg

SEQ ID NO: 2539 - DNA, 15 bp, Homo sapiens
aaggtcacacaggtg

SEQ ID NO: 2540 - DNA, 15 bp, Homo sapiens
caaggtcacacaggt

SEQ ID NO: 2541 - DNA, 15 bp, Homo sapiens
ccaaggtcacacagg

SEQ ID NO: 2542 - DNA, 15 bp, Homo sapiens
cccaaggtcacacag

SEQ ID NO: 2543 - DNA, 15 bp, Homo sapiens
gcccaaggtcacaca

SEQ ID NO: 2544 - DNA, 15 bp, Homo sapiens
tgcccaaggtcacac

SEQ ID NO: 2545 - DNA, 15 bp, Homo sapiens
ttgcccaaggtcaca

SEQ ID NO: 2546 - DNA, 15 bp, Homo sapiens
cttgcccaaggtcac

SEQ ID NO: 2547 - DNA, 15 bp, Homo sapiens
acttgcccaaggtca

SEQ ID NO: 2548 - DNA, 15 bp, Homo sapiens
aacttgcccaaggtc

SEQ ID NO: 2549 - DNA, 15 bp, Homo sapiens
taacttgcccaaggt

SEQ ID NO: 2550 - DNA, 15 bp, Homo sapiens
gtaacttgcccaagg

SEQ ID NO: 2551 - DNA, 15 bp, Homo sapiens
tgtaacttgcccaag

SEQ ID NO: 2552 - DNA, 15 bp, Homo sapiens
atgtaacttgcccaa

SEQ ID NO: 2553 - DNA, 15 bp, Homo sapiens
catgtaacttgccca

SEQ ID NO: 2554 - DNA, 15 bp, Homo sapiens
tcatgtaacttgccc

SEQ ID NO: 2555 - DNA, 15 bp, Homo sapiens
atcatgtaacttgcc

SEQ ID NO: 2556 - DNA, 15 bp, Homo sapiens
catcatgtaacttgc

SEQ ID NO: 2557 - DNA, 15 bp, Homo sapiens
acatcatgtaacttg

SEQ ID NO: 2558 - DNA, 15 bp, Homo sapiens
gacatcatgtaactt

SEQ ID NO: 2559 - DNA, 15 bp, Homo sapiens
ggacatcatgtaact

SEQ ID NO: 2560 - DNA, 15 bp, Homo sapiens
aggacatcatgtaac

SEQ ID NO: 2561 - DNA, 15 bp, Homo sapiens
aaggacatcatgtaa

SEQ ID NO: 2562 - DNA, 15 bp, Homo sapiens
taaggacatcatgta

SEQ ID NO: 2563 - DNA, 15 bp, Homo sapiens
ataaggacatcatgt

SEQ ID NO: 2564 - DNA, 15 bp, Homo sapiens
cataaggacatcatg

SEQ ID NO: 2565 - DNA, 15 bp, Homo sapiens
acataaggacatcat

SEQ ID NO: 2566 - DNA, 15 bp, Homo sapiens
gacataaggacatca

SEQ ID NO: 2567 - DNA, 15 bp, Homo sapiens
agacataaggacatc

SEQ ID NO: 2568 - DNA, 15 bp, Homo sapiens
gagacataaggacat

SEQ ID NO: 2569 - DNA, 15 bp, Homo sapiens
tgagacataaggaca

SEQ ID NO: 2570 - DNA, 15 bp, Homo sapiens
ctgagacataaggac

SEQ ID NO: 2571 - DNA, 15 bp, Homo sapiens
actgagacataagga

SEQ ID NO: 2572 - DNA, 15 bp, Homo sapiens
aactgagacataagg

SEQ ID NO: 2573 - DNA, 15 bp, Homo sapiens
aaactgagacataag

SEQ ID NO: 2574 - DNA, 15 bp, Homo sapiens
gaaactgagacataa

SEQ ID NO: 2575 - DNA, 15 bp, Homo sapiens
agaaactgagacata

SEQ ID NO: 2576 - DNA, 15 bp, Homo sapiens
aagaaactgagacat

SEQ ID NO: 2577 - DNA, 15 bp, Homo sapiens
aaagaaactgagaca

SEQ ID NO: 2578 - DNA, 15 bp, Homo sapiens
gaaagaaactgagac

SEQ ID NO: 2579 - DNA, 15 bp, Homo sapiens
tgaaagaaactgaga

SEQ ID NO: 2580 - DNA, 15 bp, Homo sapiens
gtgaaagaaactgag

SEQ ID NO: 2581 - DNA, 15 bp, Homo sapiens
agtgaaagaaactga

SEQ ID NO: 2582 - DNA, 15 bp, Homo sapiens
cagtgaaagaaactg

SEQ ID NO: 2583 - DNA, 15 bp, Homo sapiens
acagtgaaagaaact

SEQ ID NO: 2584 - DNA, 15 bp, Homo sapiens
tacagtgaaagaaac

SEQ ID NO: 2585 - DNA, 15 bp, Homo sapiens
gtacagtgaaagaaa

SEQ ID NO: 2586 - DNA, 15 bp, Homo sapiens
tgtacagtgaaagaa

SEQ ID NO: 2587 - DNA, 15 bp, Homo sapiens
ttgtacagtgaaaga

SEQ ID NO: 2588 - DNA, 15 bp, Homo sapiens
attgtacagtgaaag

SEQ ID NO: 2589 - DNA, 15 bp, Homo sapiens
cattgtacagtgaaa

SEQ ID NO: 2590 - DNA, 15 bp, Homo sapiens
ccattgtacagtgaa

SEQ ID NO: 2591 - DNA, 15 bp, Homo sapiens
tccattgtacagtga

SEQ ID NO: 2592 - DNA, 15 bp, Homo sapiens
ttccattgtacagtg

SEQ ID NO: 2593 - DNA, 15 bp, Homo sapiens
tttccattgtacagt

SEQ ID NO: 2594 - DNA, 15 bp, Homo sapiens
atttccattgtacag

SEQ ID NO: 2595 - DNA, 15 bp, Homo sapiens
tatttccattgtaca

SEQ ID NO: 2596 - DNA, 15 bp, Homo sapiens
ttatttccattgtac

SEQ ID NO: 2597 - DNA, 15 bp, Homo sapiens
gttatttccattgta

SEQ ID NO: 2598 - DNA, 15 bp, Homo sapiens
tgttatttccattgt

SEQ ID NO: 2599 - DNA, 15 bp, Homo sapiens
ctgttatttccattg

SEQ ID NO: 2600 - DNA, 15 bp, Homo sapiens
actgttatttccatt

SEQ ID NO: 2601 - DNA, 15 bp, Homo sapiens
tactgttatttccat

SEQ ID NO: 2602 - DNA, 15 bp, Homo sapiens
gtactgttatttcca

SEQ ID NO: 2603 - DNA, 15 bp, Homo sapiens
ggtactgttatttcc

SEQ ID NO: 2604 - DNA, 15 bp, Homo sapiens
aggtactgttatttc

SEQ ID NO: 2605 - DNA, 15 bp, Homo sapiens
aaggtactgttattt

SEQ ID NO: 2606 - DNA, 15 bp, Homo sapiens
gaaggtactgttatt

SEQ ID NO: 2607 - DNA, 15 bp, Homo sapiens
ggaaggtactgttat

SEQ ID NO: 2608 - DNA, 15 bp, Homo sapiens
tggaaggtactgtta

SEQ ID NO: 2609 - DNA, 15 bp, Homo sapiens
atggaaggtactgtt

SEQ ID NO: 2610 - DNA, 15 bp, Homo sapiens
tatggaaggtactgt

SEQ ID NO: 2611 - DNA, 15 bp, Homo sapiens
atatggaaggtactg

SEQ ID NO: 2612 - DNA, 15 bp, Homo sapiens
tatatggaaggtact

SEQ ID NO: 2613 - DNA, 15 bp, Homo sapiens
ttatatggaaggtac

SEQ ID NO: 2614 - DNA, 15 bp, Homo sapiens
cttatatggaaggta

SEQ ID NO: 2615 - DNA, 15 bp, Homo sapiens
ccttatatggaaggt

SEQ ID NO: 2616 - DNA, 15 bp, Homo sapiens
cccttatatggaagg

SEQ ID NO: 2617 - DNA, 15 bp, Homo sapiens
acccttatatggaag

SEQ ID NO: 2618 - DNA, 15 bp, Homo sapiens
aacccttatatggaa

SEQ ID NO: 2619 - DNA, 15 bp, Homo sapiens
taacccttatatgga

SEQ ID NO: 2620 - DNA, 15 bp, Homo sapiens
ataacccttatatgg

SEQ ID NO: 2621 - DNA, 15 bp, Homo sapiens
cataacccttatatg

SEQ ID NO: 2622 - DNA, 15 bp, Homo sapiens
tcataacccttatat

SEQ ID NO: 2623 - DNA, 15 bp, Homo sapiens
ctcataacccttata

SEQ ID NO: 2624 - DNA, 15 bp, Homo sapiens
cctcataacccttat

SEQ ID NO: 2625 - DNA, 15 bp, Homo sapiens
tcctcataaccctta

SEQ ID NO: 2626 - DNA, 15 bp, Homo sapiens
ttcctcataaccctt

SEQ ID NO: 2627 - DNA, 15 bp, Homo sapiens
cttcctcataaccct

SEQ ID NO: 2628 - DNA, 15 bp, Homo sapiens
tcttcctcataaccc

SEQ ID NO: 2629 - DNA, 15 bp, Homo sapiens
ctcttcctcataacc

SEQ ID NO: 2630 - DNA, 15 bp, Homo sapiens
actcttcctcataac

SEQ ID NO: 2631 - DNA, 15 bp, Homo sapiens
aactcttcctcataa

SEQ ID NO: 2632 - DNA, 15 bp, Homo sapiens
taactcttcctcata

SEQ ID NO: 2633 - DNA, 15 bp, Homo sapiens
ataactcttcctcat

SEQ ID NO: 2634 - DNA, 15 bp, Homo sapiens
cataactcttcctca

SEQ ID NO: 2635 - DNA, 15 bp, Homo sapiens
tcataactcttcctc

SEQ ID NO: 2636 - DNA, 15 bp, Homo sapiens
ctcataactcttcct

SEQ ID NO: 2637 - DNA, 15 bp, Homo sapiens
actcataactcttcc

SEQ ID NO: 2638 - DNA, 15 bp, Homo sapiens
aactcataactcttc

SEQ ID NO: 2639 - DNA, 15 bp, Homo sapiens
gaactcataactctt

SEQ ID NO: 2640 - DNA, 15 bp, Homo sapiens
tgaactcataactct

SEQ ID NO: 2641 - DNA, 15 bp, Homo sapiens
ctgaactcataactc

SEQ ID NO: 2642 - DNA, 15 bp, Homo sapiens
actgaactcataact

SEQ ID NO: 2643 - DNA, 15 bp, Homo sapiens
aactgaactcataac

SEQ ID NO: 2644 - DNA, 15 bp, Homo sapiens
taactgaactcataa

SEQ ID NO: 2645 - DNA, 15 bp, Homo sapiens
ttaactgaactcata

SEQ ID NO: 2646 - DNA, 15 bp, Homo sapiens
gttaactgaactcat

SEQ ID NO: 2647 - DNA, 15 bp, Homo sapiens
tgttaactgaactca

SEQ ID NO: 2648 - DNA, 15 bp, Homo sapiens
ttgttaactgaactc

SEQ ID NO: 2649 - DNA, 15 bp, Homo sapiens
gttgttaactgaact

SEQ ID NO: 2650 - DNA, 15 bp, Homo sapiens
agttgttaactgaac

SEQ ID NO: 2651 - DNA, 15 bp, Homo sapiens
cagttgttaactgaa

SEQ ID NO: 2652 - DNA, 15 bp, Homo sapiens
tcagttgttaactga

SEQ ID NO: 2653 - DNA, 15 bp, Homo sapiens
ttcagttgttaactg

SEQ ID NO: 2654 - DNA, 15 bp, Homo sapiens
gttcagttgttaact

SEQ ID NO: 2655 - DNA, 15 bp, Homo sapiens
ggttcagttgttaac

SEQ ID NO: 2656 - DNA, 15 bp, Homo sapiens
tggttcagttgttaa

SEQ ID NO: 2657 - DNA, 15 bp, Homo sapiens
gtggttcagttgtta

SEQ ID NO: 2658 - DNA, 15 bp, Homo sapiens
tgtggttcagttgtt

SEQ ID NO: 2659 - DNA, 15 bp, Homo sapiens
ttgtggttcagttgt

SEQ ID NO: 2660 - DNA, 15 bp, Homo sapiens
tttgtggttcagttg

SEQ ID NO: 2661 - DNA, 15 bp, Homo sapiens
ttttgtggttcagtt

SEQ ID NO: 2662 - DNA, 15 bp, Homo sapiens
attttgtggttcagt

SEQ ID NO: 2663 - DNA, 15 bp, Homo sapiens
tattttgtggttcag

SEQ ID NO: 2664 - DNA, 15 bp, Homo sapiens
gtattttgtggttca

SEQ ID NO: 2665 - DNA, 15 bp, Homo sapiens
tgtattttgtggttc

SEQ ID NO: 2666 - DNA, 15 bp, Homo sapiens
atgtattttgtggtt

SEQ ID NO: 2667 - DNA, 15 bp, Homo sapiens
tatgtattttgtggt

SEQ ID NO: 2668 - DNA, 15 bp, Homo sapiens
ttatgtattttgtgg

SEQ ID NO: 2669 - DNA, 15 bp, Homo sapiens
tttatgtattttgtg

SEQ ID NO: 2670 - DNA, 15 bp, Homo sapiens
ttttatgtattttgt

SEQ ID NO: 2671 - DNA, 15 bp, Homo sapiens
tttttatgtattttg

SEQ ID NO: 2672 - DNA, 15 bp, Homo sapiens
ttttttatgtatttt

SEQ ID NO: 2673 - DNA, 15 bp, Homo sapiens
cttttttatgtattt

SEQ ID NO: 2674 - DNA, 15 bp, Homo sapiens
ccttttttatgtatt

SEQ ID NO: 2675 - DNA, 15 bp, Homo sapiens
cccttttttatgtat

SEQ ID NO: 2676 - DNA, 15 bp, Homo sapiens
gcccttttttatgta

SEQ ID NO: 2677 - DNA, 15 bp, Homo sapiens
agcccttttttatgt

SEQ ID NO: 2678 - DNA, 15 bp, Homo sapiens
aagcccttttttatg

SEQ ID NO: 2679 - DNA, 15 bp, Homo sapiens
taagcccttttttat

SEQ ID NO: 2680 - DNA, 15 bp, Homo sapiens
ctaagccctttttta

SEQ ID NO: 2681 - DNA, 15 bp, Homo sapiens
gctaagccctttttt

SEQ ID NO: 2682 - DNA, 15 bp, Homo sapiens
tgctaagcccttttt

SEQ ID NO: 2683 - DNA, 15 bp, Homo sapiens
ttgctaagccctttt

SEQ ID NO: 2684 - DNA, 15 bp, Homo sapiens
cttgctaagcccttt

SEQ ID NO: 2685 - DNA, 15 bp, Homo sapiens
gcttgctaagccctt

SEQ ID NO: 2686 - DNA, 15 bp, Homo sapiens
tgcttgctaagccct

SEQ ID NO: 2687 - DNA, 15 bp, Homo sapiens
ttgcttgctaagccc

SEQ ID NO: 2688 - DNA, 15 bp, Homo sapiens
tttgcttgctaagcc

SEQ ID NO: 2689 - DNA, 15 bp, Homo sapiens
ttttgcttgctaagc

SEQ ID NO: 2690 - DNA, 15 bp, Homo sapiens
cttttgcttgctaag

SEQ ID NO: 2691 - DNA, 15 bp, Homo sapiens
acttttgcttgctaa

SEQ ID NO: 2692 - DNA, 15 bp, Homo sapiens
cacttttgcttgcta

SEQ ID NO: 2693 - DNA, 15 bp, Homo sapiens
acacttttgcttgct

SEQ ID NO: 2694 - DNA, 15 bp, Homo sapiens
aacacttttgcttgc

SEQ ID NO: 2695 - DNA, 15 bp, Homo sapiens
taacacttttgcttg

SEQ ID NO: 2696 - DNA, 15 bp, Homo sapiens
ataacacttttgctt

SEQ ID NO: 2697 - DNA, 15 bp, Homo sapiens
cataacacttttgct

SEQ ID NO: 2698 - DNA, 15 bp, Homo sapiens
acataacacttttgc

SEQ ID NO: 2699 - DNA, 15 bp, Homo sapiens
aacataacacttttg

SEQ ID NO: 2700 - DNA, 15 bp, Homo sapiens
taacataacactttt

SEQ ID NO: 2701 - DNA, 15 bp, Homo sapiens
gtaacataacacttt

SEQ ID NO: 2702 - DNA, 15 bp, Homo sapiens
tgtaacataacactt

SEQ ID NO: 2703 - DNA, 15 bp, Homo sapiens
atgtaacataacact

SEQ ID NO: 2704 - DNA, 15 bp, Homo sapiens
aatgtaacataacac

SEQ ID NO: 2705 - DNA, 15 bp, Homo sapiens
caatgtaacataaca

SEQ ID NO: 2706 - DNA, 15 bp, Homo sapiens
ccaatgtaacataac

SEQ ID NO: 2707 - DNA, 15 bp, Homo sapiens
accaatgtaacataa

SEQ ID NO: 2708 - DNA, 15 bp, Homo sapiens
taccaatgtaacata

SEQ ID NO: 2709 - DNA, 15 bp, Homo sapiens
gtaccaatgtaacat

SEQ ID NO: 2710 - DNA, 15 bp, Homo sapiens
ggtaccaatgtaaca

SEQ ID NO: 2711 - DNA, 15 bp, Homo sapiens
tggtaccaatgtaac

SEQ ID NO: 2712 - DNA, 15 bp, Homo sapiens
ttggtaccaatgtaa

SEQ ID NO: 2713 - DNA, 15 bp, Homo sapiens
attggtaccaatgta

SEQ ID NO: 2714 - DNA, 15 bp, Homo sapiens
aattggtaccaatgt

SEQ ID NO: 2715 - DNA, 15 bp, Homo sapiens
taattggtaccaatg

SEQ ID NO: 2716 - DNA, 15 bp, Homo sapiens
ttaattggtaccaat

SEQ ID NO: 2717 - DNA, 15 bp, Homo sapiens
attaattggtaccaa

SEQ ID NO: 2718 - DNA, 15 bp, Homo sapiens
gattaattggtacca

SEQ ID NO: 2719 - DNA, 15 bp, Homo sapiens
tgattaattggtacc

SEQ ID NO: 2720 - DNA, 15 bp, Homo sapiens
atgattaattggtac

SEQ ID NO: 2721 - DNA, 15 bp, Homo sapiens
tatgattaattggta

SEQ ID NO: 2722 - DNA, 15 bp, Homo sapiens
ttatgattaattggt

SEQ ID NO: 2723 - DNA, 15 bp, Homo sapiens
cttatgattaattgg

SEQ ID NO: 2724 - DNA, 15 bp, Homo sapiens
tcttatgattaattg

SEQ ID NO: 2725 - DNA, 15 bp, Homo sapiens
ttcttatgattaatt

SEQ ID NO: 2726 - DNA, 15 bp, Homo sapiens
tttcttatgattaat

SEQ ID NO: 2727 - DNA, 15 bp, Homo sapiens
atttcttatgattaa

SEQ ID NO: 2728 - DNA, 15 bp, Homo sapiens
tatttcttatgatta

SEQ ID NO: 2729 - DNA, 15 bp, Homo sapiens
atatttcttatgatt

SEQ ID NO: 2730 - DNA, 15 bp, Homo sapiens
aatatttcttatgat

SEQ ID NO: 2731 - DNA, 15 bp, Homo sapiens
caatatttcttatga

SEQ ID NO: 2732 - DNA, 15 bp, Homo sapiens
ccaatatttcttatg

SEQ ID NO: 2733 - DNA, 15 bp, Homo sapiens
gccaatatttcttat

SEQ ID NO: 2734 - DNA, 15 bp, Homo sapiens
agccaatatttctta

SEQ ID NO: 2735 - DNA, 15 bp, Homo sapiens
cagccaatatttctt

SEQ ID NO: 2736 - DNA, 15 bp, Homo sapiens
ccagccaatatttct

SEQ ID NO: 2737 - DNA, 15 bp, Homo sapiens
cccagccaatatttc

SEQ ID NO: 2738 - DNA, 15 bp, Homo sapiens
tcccagccaatattt

SEQ ID NO: 2739 - DNA, 15 bp, Homo sapiens
ttcccagccaatatt

SEQ ID NO: 2740 - DNA, 15 bp, Homo sapiens
attcccagccaatat

SEQ ID NO: 2741 - DNA, 15 bp, Homo sapiens
tattcccagccaata

SEQ ID NO: 2742 - DNA, 15 bp, Homo sapiens
ctattcccagccaat

SEQ ID NO: 2743 - DNA, 15 bp, Homo sapiens
actattcccagccaa

SEQ ID NO: 2744 - DNA, 15 bp, Homo sapiens
cactattcccagcca

SEQ ID NO: 2745 - DNA, 15 bp, Homo sapiens
ccactattcccagcc

SEQ ID NO: 2746 - DNA, 15 bp, Homo sapiens
gccactattcccagc

SEQ ID NO: 2747 - DNA, 15 bp, Homo sapiens
agccactattcccag

SEQ ID NO: 2748 - DNA, 15 bp, Homo sapiens
aagccactattccca

SEQ ID NO: 2749 - DNA, 15 bp, Homo sapiens
taagccactattccc

SEQ ID NO: 2750 - DNA, 15 bp, Homo sapiens
ataagccactattcc

SEQ ID NO: 2751 - DNA, 15 bp, Homo sapiens
cataagccactattc

SEQ ID NO: 2752 - DNA, 15 bp, Homo sapiens
gcataagccactatt

SEQ ID NO: 2753 - DNA, 15 bp, Homo sapiens
ggcataagccactat

SEQ ID NO: 2754 - DNA, 15 bp, Homo sapiens
aggcataagccacta

SEQ ID NO: 2755 - DNA, 15 bp, Homo sapiens
caggcataagccact

SEQ ID NO: 2756 - DNA, 15 bp, Homo sapiens
acaggcataagccac

SEQ ID NO: 2757 - DNA, 15 bp, Homo sapiens
tacaggcataagcca

SEQ ID NO: 2758 - DNA, 15 bp, Homo sapiens
ttacaggcataagcc

SEQ ID NO: 2759 - DNA, 15 bp, Homo sapiens
attacaggcataagc

SEQ ID NO: 2760 - DNA, 15 bp, Homo sapiens
gattacaggcataag

SEQ ID NO: 2761 - DNA, 15 bp, Homo sapiens
ggattacaggcataa

SEQ ID NO: 2762 - DNA, 15 bp, Homo sapiens
gggattacaggcata

SEQ ID NO: 2763 - DNA, 15 bp, Homo sapiens
tgggattacaggcat

SEQ ID NO: 2764 - DNA, 15 bp, Homo sapiens
ctgggattacaggca

SEQ ID NO: 2765 - DNA, 15 bp, Homo sapiens
acccgcctcggcctc

SEQ ID NO: 2766 - DNA, 15 bp, Homo sapiens
cacccgcctcggcct

SEQ ID NO: 2767 - DNA, 15 bp, Homo sapiens
ccacccgcctcggcc

SEQ ID NO: 2768 - DNA, 15 bp, Homo sapiens
tccacccgcctcggc

SEQ ID NO: 2769 - DNA, 15 bp, Homo sapiens
atccacccgcctcgg

SEQ ID NO: 2770 - DNA, 15 bp, Homo sapiens
gatccacccgcctcg

SEQ ID NO: 2771 - DNA, 15 bp, Homo sapiens
tgatccacccgcctc

SEQ ID NO: 2772 - DNA, 15 bp, Homo sapiens
gtgatccacccgcct

SEQ ID NO: 2773 - DNA, 15 bp, Homo sapiens
ggtgatccacccgcc

SEQ ID NO: 2774 - DNA, 15 bp, Homo sapiens
aggtgatccacccgc

SEQ ID NO: 2775 - DNA, 15 bp, Homo sapiens
caggtgatccacccg

SEQ ID NO: 2776 - DNA, 15 bp, Homo sapiens
tcaggtgatccaccc

SEQ ID NO: 2777 - DNA, 15 bp, Homo sapiens
ctcaggtgatccacc

SEQ ID NO: 2778 - DNA, 15 bp, Homo sapiens
cctcaggtgatccac

SEQ ID NO: 2779 - DNA, 15 bp, Homo sapiens
acctcaggtgatcca

SEQ ID NO: 2780 - DNA, 15 bp, Homo sapiens
gacctcaggtgatcc

SEQ ID NO: 2781 - DNA, 15 bp, Homo sapiens
tgacctcaggtgatc

SEQ ID NO: 2782 - DNA, 15 bp, Homo sapiens
ttgacctcaggtgat

SEQ ID NO: 2783 - DNA, 15 bp, Homo sapiens
cttgacctcaggtga

SEQ ID NO: 2784 - DNA, 15 bp, Homo sapiens
tcttgacctcaggtg

SEQ ID NO: 2785 - DNA, 15 bp, Homo sapiens
ctcttgacctcaggt

SEQ ID NO: 2786 - DNA, 15 bp, Homo sapiens
actcttgacctcagg

SEQ ID NO: 2787 - DNA, 15 bp, Homo sapiens
aactcttgacctcag

SEQ ID NO: 2788 - DNA, 15 bp, Homo sapiens
gaactcttgacctca

SEQ ID NO: 2789 - DNA, 15 bp, Homo sapiens
tgaactcttgacctc

SEQ ID NO: 2790 - DNA, 15 bp, Homo sapiens
ttgaactcttgacct

SEQ ID NO: 2791 - DNA, 15 bp, Homo sapiens
cttgaactcttgacc

SEQ ID NO: 2792 - DNA, 15 bp, Homo sapiens
tcttgaactcttgac

SEQ ID NO: 2793 - DNA, 15 bp, Homo sapiens
gtcttgaactcttga

SEQ ID NO: 2794 - DNA, 15 bp, Homo sapiens
ggtcttgaactcttg

SEQ ID NO: 2795 - DNA, 15 bp, Homo sapiens
tggtcttgaactctt

SEQ ID NO: 2796 - DNA, 15 bp, Homo sapiens
ctggtcttgaactct

SEQ ID NO: 2797 - DNA, 15 bp, Homo sapiens
gctggtcttgaactc

SEQ ID NO: 2798 - DNA, 15 bp, Homo sapiens
ggctggtcttgaact

SEQ ID NO: 2799 - DNA, 15 bp, Homo sapiens
aggctggtcttgaac

SEQ ID NO: 2800 - DNA, 15 bp, Homo sapiens
caggctggtcttgaa

SEQ ID NO: 2801 - DNA, 15 bp, Homo sapiens
ccaggctggtcttga

SEQ ID NO: 2802 - DNA, 15 bp, Homo sapiens
gccaggctggtcttg

SEQ ID NO: 2803 - DNA, 15 bp, Homo sapiens
ggccaggctggtctt

SEQ ID NO: 2804 - DNA, 15 bp, Homo sapiens
tggccaggctggtct

SEQ ID NO: 2805 - DNA, 15 bp, Homo sapiens
ttggccaggctggtc

SEQ ID NO: 2806 - DNA, 15 bp, Homo sapiens
gttggccaggctggt

SEQ ID NO: 2807 - DNA, 15 bp, Homo sapiens
tgttggccaggctgg

SEQ ID NO: 2808 - DNA, 15 bp, Homo sapiens
atgttggccaggctg

SEQ ID NO: 2809 - DNA, 15 bp, Homo sapiens
catgttggccaggct

SEQ ID NO: 2810 - DNA, 15 bp, Homo sapiens
ccatgttggccaggc

SEQ ID NO: 2811 - DNA, 15 bp, Homo sapiens
accatgttggccagg

SEQ ID NO: 2812 - DNA, 15 bp, Homo sapiens
caccatgttggccag

SEQ ID NO: 2813 - DNA, 15 bp, Homo sapiens
tcaccatgttggcca

SEQ ID NO: 2814 - DNA, 15 bp, Homo sapiens
ttcaccatgttggcc

SEQ ID NO: 2815 - DNA, 15 bp, Homo sapiens
tttcaccatgttggc

SEQ ID NO: 2816 - DNA, 15 bp, Homo sapiens
gtttcaccatgttgg

SEQ ID NO: 2817 - DNA, 15 bp, Homo sapiens
ggtttcaccatgttg

SEQ ID NO: 2818 - DNA, 15 bp, Homo sapiens
gggtttcaccatgtt

SEQ ID NO: 2819 - DNA, 15 bp, Homo sapiens
ggggtttcaccatgt

SEQ ID NO: 2820 - DNA, 15 bp, Homo sapiens
tggggtttcaccatg

SEQ ID NO: 2821 - DNA, 15 bp, Homo sapiens
ttggggtttcaccat

SEQ ID NO: 2822 - DNA, 15 bp, Homo sapiens
gttggggtttcacca

SEQ ID NO: 2823 - DNA, 15 bp, Homo sapiens
agttggggtttcacc

SEQ ID NO: 2824 - DNA, 15 bp, Homo sapiens
gagttggggtttcac

SEQ ID NO: 2825 - DNA, 15 bp, Homo sapiens
agagttggggtttca

SEQ ID NO: 2826 - DNA, 15 bp, Homo sapiens
tagagttggggtttc

SEQ ID NO: 2827 - DNA, 15 bp, Homo sapiens
gtagagttggggttt

SEQ ID NO: 2828 - DNA, 15 bp, Homo sapiens
agtagagttggggtt

SEQ ID NO: 2829 - DNA, 15 bp, Homo sapiens
tagtagagttggggt

SEQ ID NO: 2830 - DNA, 15 bp, Homo sapiens
ttagtagagttgggg

SEQ ID NO: 2831 - DNA, 15 bp, Homo sapiens
tttagtagagttggg

SEQ ID NO: 2832 - DNA, 15 bp, Homo sapiens
ttttagtagagttgg

SEQ ID NO: 2833 - DNA, 15 bp, Homo sapiens
tttttagtagagttg

SEQ ID NO: 2834 - DNA, 15 bp, Homo sapiens
ttttttagtagagtt

SEQ ID NO: 2835 - DNA, 15 bp, Homo sapiens
tttttttagtagagt

SEQ ID NO: 2836 - DNA, 15 bp, Homo sapiens
attttttttagtaga

SEQ ID NO: 2837 - DNA, 15 bp, Homo sapiens
tattttttttagtag

SEQ ID NO: 2838 - DNA, 15 bp, Homo sapiens
gtattttttttagta

SEQ ID NO: 2839 - DNA, 15 bp, Homo sapiens
tgtattttttttagt

SEQ ID NO: 2840 - DNA, 15 bp, Homo sapiens
ttgtattttttttag

SEQ ID NO: 2841 - DNA, 15 bp, Homo sapiens
tttgtatttttttta

SEQ ID NO: 2842 - DNA, 15 bp, Homo sapiens
atttttgtatttttt

SEQ ID NO: 2843 - DNA, 15 bp, Homo sapiens
tggctaatttttgta

SEQ ID NO: 2844 - DNA, 15 bp, Homo sapiens
ctggctaatttttgt

SEQ ID NO: 2845 - DNA, 15 bp, Homo sapiens
cctggctaatttttg

SEQ ID NO: 2846 - DNA, 15 bp, Homo sapiens
gcctggctaattttt

SEQ ID NO: 2847 - DNA, 15 bp, Homo sapiens
tgcctggctaatttt

SEQ ID NO: 2848 - DNA, 15 bp, Homo sapiens
atgcctggctaattt

SEQ ID NO: 2849 - DNA, 15 bp, Homo sapiens
catgcctggctaatt

SEQ ID NO: 2850 - DNA, 15 bp, Homo sapiens
ccatgcctggctaat

SEQ ID NO: 2851 - DNA, 15 bp, Homo sapiens
accatgcctggctaa

SEQ ID NO: 2852 - DNA, 15 bp, Homo sapiens
caccatgcctggcta

SEQ ID NO: 2853 - DNA, 15 bp, Homo sapiens
ccaccatgcctggct

SEQ ID NO: 2854 - DNA, 15 bp, Homo sapiens
gccaccatgcctggc

SEQ ID NO: 2855 - DNA, 15 bp, Homo sapiens
cgccaccatgcctgg

SEQ ID NO: 2856 - DNA, 15 bp, Homo sapiens
ccgccaccatgcctg

SEQ ID NO: 2857 - DNA, 15 bp, Homo sapiens
cccgccaccatgcct

SEQ ID NO: 2858 - DNA, 15 bp, Homo sapiens
acccgccaccatgcc

SEQ ID NO: 2859 - DNA, 15 bp, Homo sapiens
cacccgccaccatgc

SEQ ID NO: 2860 - DNA, 15 bp, Homo sapiens
gcacccgccaccatg

SEQ ID NO: 2861 - DNA, 15 bp, Homo sapiens
ggcacccgccaccat

SEQ ID NO: 2862 - DNA, 15 bp, Homo sapiens
aggcacccgccacca

SEQ ID NO: 2863 - DNA, 15 bp, Homo sapiens
caggcacccgccacc

SEQ ID NO: 2864 - DNA, 15 bp, Homo sapiens
acaggcacccgccac

SEQ ID NO: 2865 - DNA, 15 bp, Homo sapiens
tacaggcacccgcca

SEQ ID NO: 2866 - DNA, 15 bp, Homo sapiens
ttacaggcacccgcc

SEQ ID NO: 2867 - DNA, 15 bp, Homo sapiens
attacaggcacccgc

SEQ ID NO: 2868 - DNA, 15 bp, Homo sapiens
gattacaggcacccg

SEQ ID NO: 2869 - DNA, 15 bp, Homo sapiens
ggattacaggcaccc

SEQ ID NO: 2870 - DNA, 15 bp, Homo sapiens
gggattacaggcacc

SEQ ID NO: 2871 - DNA, 15 bp, Homo sapiens
tgggattacaggcac

SEQ ID NO: 2872 - DNA, 15 bp, Homo sapiens
aagtagctgggatta

SEQ ID NO: 2873 - DNA, 15 bp, Homo sapiens
caagtagctgggatt

SEQ ID NO: 2874 - DNA, 15 bp, Homo sapiens
ccaagtagctgggat

SEQ ID NO: 2875 - DNA, 15 bp, Homo sapiens
cccaagtagctggga

SEQ ID NO: 2876 - DNA, 15 bp, Homo sapiens
tcccaagtagctggg

SEQ ID NO: 2877 - DNA, 15 bp, Homo sapiens
ctcccaagtagctgg

SEQ ID NO: 2878 - DNA, 15 bp, Homo sapiens
cctcccaagtagctg

SEQ ID NO: 2879 - DNA, 15 bp, Homo sapiens
gcctcccaagtagct

SEQ ID NO: 2880 - DNA, 15 bp, Homo sapiens
ggcctcccaagtagc

SEQ ID NO: 2881 - DNA, 15 bp, Homo sapiens
cggcctcccaagtag

SEQ ID NO: 2882 - DNA, 15 bp, Homo sapiens
tcggcctcccaagta

SEQ ID NO: 2883 - DNA, 15 bp, Homo sapiens
ctcggcctcccaagt

SEQ ID NO: 2884 - DNA, 15 bp, Homo sapiens
cctcggcctcccaag

SEQ ID NO: 2885 - DNA, 15 bp, Homo sapiens
tgcctcggcctccca

SEQ ID NO: 2886 - DNA, 15 bp, Homo sapiens
ctgcctcggcctccc

SEQ ID NO: 2887 - DNA, 15 bp, Homo sapiens
cctgcctcggcctcc

SEQ ID NO: 2888 - DNA, 15 bp, Homo sapiens
tcctgcctcggcctc

SEQ ID NO: 2889 - DNA, 15 bp, Homo sapiens
ctcctgcctcggcct

SEQ ID NO: 2890 - DNA, 15 bp, Homo sapiens
tctcctgcctcggcc

SEQ ID NO: 2891 - DNA, 15 bp, Homo sapiens
ttctcctgcctcggc

SEQ ID NO: 2892 - DNA, 15 bp, Homo sapiens
cttctcctgcctcgg

SEQ ID NO: 2893 - DNA, 15 bp, Homo sapiens
gcttctcctgcctcg

SEQ ID NO: 2894 - DNA, 15 bp, Homo sapiens
cgcttctcctgcctc

SEQ ID NO: 2895 - DNA, 15 bp, Homo sapiens
gcgcttctcctgcct

SEQ ID NO: 2896 - DNA, 15 bp, Homo sapiens
agcgcttctcctgcc

SEQ ID NO: 2897 - DNA, 15 bp, Homo sapiens
aagcgcttctcctgc

SEQ ID NO: 2898 - DNA, 15 bp, Homo sapiens
caagcgcttctcctg

SEQ ID NO: 2899 - DNA, 15 bp, Homo sapiens
tcaagcgcttctcct

SEQ ID NO: 2900 - DNA, 15 bp, Homo sapiens
atcaagcgcttctcc

SEQ ID NO: 2901 - DNA, 15 bp, Homo sapiens
gatcaagcgcttctc

SEQ ID NO: 2902 - DNA, 15 bp, Homo sapiens
ggatcaagcgcttct

SEQ ID NO: 2903 - DNA, 15 bp, Homo sapiens
gggatcaagcgcttc

SEQ ID NO: 2904 - DNA, 15 bp, Homo sapiens
tgggatcaagcgctt

SEQ ID NO: 2905 - DNA, 15 bp, Homo sapiens
ctgggatcaagcgct

SEQ ID NO: 2906 - DNA, 15 bp, Homo sapiens
cctgggatcaagcgc

SEQ ID NO: 2907 - DNA, 15 bp, Homo sapiens
tcctgggatcaagcg

SEQ ID NO: 2908 - DNA, 15 bp, Homo sapiens
ctcctgggatcaagc

SEQ ID NO: 2909 - DNA, 15 bp, Homo sapiens
cctcctgggatcaag

SEQ ID NO: 2910 - DNA, 15 bp, Homo sapiens
acctcctgggatcaa

SEQ ID NO: 2911 - DNA, 15 bp, Homo sapiens
cacctcctgggatca

SEQ ID NO: 2912 - DNA, 15 bp, Homo sapiens
ccacctcctgggatc

SEQ ID NO: 2913 - DNA, 15 bp, Homo sapiens
tccacctcctgggat

SEQ ID NO: 2914 - DNA, 15 bp, Homo sapiens
ctccacctcctggga

SEQ ID NO: 2915 - DNA, 15 bp, Homo sapiens
cctccacctcctggg

SEQ ID NO: 2916 - DNA, 15 bp, Homo sapiens
acctccacctcctgg

SEQ ID NO: 2917 - DNA, 15 bp, Homo sapiens
aacctccacctcctg

SEQ ID NO: 2918 - DNA, 15 bp, Homo sapiens
gcaacctccacctcc

SEQ ID NO: 2919 - DNA, 15 bp, Homo sapiens
tgcaacctccacctc

SEQ ID NO: 2920 - DNA, 15 bp, Homo sapiens
ctgcaacctccacct

SEQ ID NO: 2921 - DNA, 15 bp, Homo sapiens
actgcaacctccacc

SEQ ID NO: 2922 - DNA, 15 bp, Homo sapiens
cactgcaacctccac

SEQ ID NO: 2923 - DNA, 15 bp, Homo sapiens
tcactgcaacctcca

SEQ ID NO: 2924 - DNA, 15 bp, Homo sapiens
ctcactgcaacctcc

SEQ ID NO: 2925 - DNA, 15 bp, Homo sapiens
agctcactgcaacct

SEQ ID NO: 2926 - DNA, 15 bp, Homo sapiens
cagctcactgcaacc

SEQ ID NO: 2927 - DNA, 15 bp, Homo sapiens
tcagctcactgcaac

SEQ ID NO: 2928 - DNA, 15 bp, Homo sapiens
ctcagctcactgcaa

SEQ ID NO: 2929 - DNA, 15 bp, Homo sapiens
tctcagctcactgca

SEQ ID NO: 2930 - DNA, 15 bp, Homo sapiens
atctcagctcactgc

SEQ ID NO: 2931 - DNA, 15 bp, Homo sapiens
aatctcagctcactg

SEQ ID NO: 2932 - DNA, 15 bp, Homo sapiens
caatctcagctcact

SEQ ID NO: 2933 - DNA, 15 bp, Homo sapiens
acaatctcagctcac

SEQ ID NO: 2934 - DNA, 15 bp, Homo sapiens
cacaatctcagctca

SEQ ID NO: 2935 - DNA, 15 bp, Homo sapiens
gcacaatctcagctc

SEQ ID NO: 2936 - DNA, 15 bp, Homo sapiens
ggcacaatctcagct

SEQ ID NO: 2937 - DNA, 15 bp, Homo sapiens
tggcacaatctcagc

SEQ ID NO: 2938 - DNA, 15 bp, Homo sapiens
gtggcacaatctcag

SEQ ID NO: 2939 - DNA, 15 bp, Homo sapiens
agtggcacaatctca

SEQ ID NO: 2940 - DNA, 15 bp, Homo sapiens
cagtggcacaatctc

SEQ ID NO: 2941 - DNA, 15 bp, Homo sapiens
gcagtggcacaatct

SEQ ID NO: 2942 - DNA, 15 bp, Homo sapiens
tgcagtggcacaatc

SEQ ID NO: 2943 - DNA, 15 bp, Homo sapiens
gtgcagtggcacaat

SEQ ID NO: 2944 - DNA, 15 bp, Homo sapiens
agtgcagtggcacaa

SEQ ID NO: 2945 - DNA, 15 bp, Homo sapiens
gagtgcagtggcaca

SEQ ID NO: 2946 - DNA, 15 bp, Homo sapiens
ggagtgcagtggcac

SEQ ID NO: 2947 - DNA, 15 bp, Homo sapiens
tggagtgcagtggca

SEQ ID NO: 2948 - DNA, 15 bp, Homo sapiens
acccaggctggagtg

SEQ ID NO: 2949 - DNA, 15 bp, Homo sapiens
cacccaggctggagt

SEQ ID NO: 2950 - DNA, 15 bp, Homo sapiens
tcacccaggctggag

SEQ ID NO: 2951 - DNA, 15 bp, Homo sapiens
gtcacccaggctgga

SEQ ID NO: 2952 - DNA, 15 bp, Homo sapiens
tgtcacccaggctgg

SEQ ID NO: 2953 - DNA, 15 bp, Homo sapiens
ttgtcacccaggctg

SEQ ID NO: 2954 - DNA, 15 bp, Homo sapiens
cttgtcacccaggct

SEQ ID NO: 2955 - DNA, 15 bp, Homo sapiens
tcttgtcacccaggc

SEQ ID NO: 2956 - DNA, 15 bp, Homo sapiens
ctcttgtcacccagg

SEQ ID NO: 2957 - DNA, 15 bp, Homo sapiens
actcttgtcacccag

SEQ ID NO: 2958 - DNA, 15 bp, Homo sapiens
cactcttgtcaccca

SEQ ID NO: 2959 - DNA, 15 bp, Homo sapiens
tcactcttgtcaccc

SEQ ID NO: 2960 - DNA, 15 bp, Homo sapiens
ttcactcttgtcacc

SEQ ID NO: 2961 - DNA, 15 bp, Homo sapiens
tttcactcttgtcac

SEQ ID NO: 2962 - DNA, 15 bp, Homo sapiens
gtttcactcttgtca

SEQ ID NO: 2963 - DNA, 15 bp, Homo sapiens
agtttcactcttgtc

SEQ ID NO: 2964 - DNA, 15 bp, Homo sapiens
gagtttcactcttgt

SEQ ID NO: 2965 - DNA, 15 bp, Homo sapiens
ggagtttcactcttg

SEQ ID NO: 2966 - DNA, 15 bp, Homo sapiens
tggagtttcactctt

SEQ ID NO: 2967 - DNA, 15 bp, Homo sapiens
atggagtttcactct

SEQ ID NO: 2968 - DNA, 15 bp, Homo sapiens
gatggagtttcactc

SEQ ID NO: 2969 - DNA, 15 bp, Homo sapiens
agatggagtttcact

SEQ ID NO: 2970 - DNA, 15 bp, Homo sapiens
tagatggagtttcac

SEQ ID NO: 2971 - DNA, 15 bp, Homo sapiens
gtagatggagtttca

SEQ ID NO: 2972 - DNA, 15 bp, Homo sapiens
tgtagatggagtttc

SEQ ID NO: 2973 - DNA, 15 bp, Homo sapiens
ttgtagatggagttt

SEQ ID NO: 2974 - DNA, 15 bp, Homo sapiens
tttgtagatggagtt

SEQ ID NO: 2975 - DNA, 15 bp, Homo sapiens
ttttgtagatggagt

SEQ ID NO: 2976 - DNA, 15 bp, Homo sapiens
tttttgtagatggag

SEQ ID NO: 2977 - DNA, 15 bp, Homo sapiens
ttttttgtagatgga

SEQ ID NO: 2978 - DNA, 15 bp, Homo sapiens
gttttttgtagatgg

SEQ ID NO: 2979 - DNA, 15 bp, Homo sapiens
ggttttttgtagatg

SEQ ID NO: 2980 - DNA, 15 bp, Homo sapiens
tggttttttgtagat

SEQ ID NO: 2981 - DNA, 15 bp, Homo sapiens
ttggttttttgtaga

SEQ ID NO: 2982 - DNA, 15 bp, Homo sapiens
tttggttttttgtag

SEQ ID NO: 2983 - DNA, 15 bp, Homo sapiens
gtttggttttttgta

SEQ ID NO: 2984 - DNA, 15 bp, Homo sapiens
tgtttggttttttgt

SEQ ID NO: 2985 - DNA, 15 bp, Homo sapiens
ttgtttggttttttg

SEQ ID NO: 2986 - DNA, 15 bp, Homo sapiens
tttgtttggtttttt

SEQ ID NO: 2987 - DNA, 15 bp, Homo sapiens
ttttgtttggttttt

SEQ ID NO: 2988 - DNA, 15 bp, Homo sapiens
gttttgtttggtttt

SEQ ID NO: 2989 - DNA, 15 bp, Homo sapiens
tgttttgtttggttt

SEQ ID NO: 2990 - DNA, 15 bp, Homo sapiens
ttgttttgtttggtt

SEQ ID NO: 2991 - DNA, 15 bp, Homo sapiens
tttgttttgtttggt

SEQ ID NO: 2992 - DNA, 15 bp, Homo sapiens
ttttgttttgtttgg

SEQ ID NO: 2993 - DNA, 15 bp, Homo sapiens
tttttgttttgtttg

SEQ ID NO: 2994 - DNA, 15 bp, Homo sapiens
gtttttgttttgttt

SEQ ID NO: 2995 - DNA, 15 bp, Homo sapiens
tgtttttgttttgtt

SEQ ID NO: 2996 - DNA, 15 bp, Homo sapiens
ttgtttttgttttgt

SEQ ID NO: 2997 - DNA, 15 bp, Homo sapiens
tttgtttttgttttg

SEQ ID NO: 2998 - DNA, 15 bp, Homo sapiens
gtttgtttttgtttt

SEQ ID NO: 2999 - DNA, 15 bp, Homo sapiens
tgtttgtttttgttt

SEQ ID NO: 3000 - DNA, 15 bp, Homo sapiens
ttgtttgtttttgtt

SEQ ID NO: 3001 - DNA, 15 bp, Homo sapiens
tttgtttgtttttgt

SEQ ID NO: 3002 - DNA, 15 bp, Homo sapiens
gtttgtttgtttttg

SEQ ID NO: 3003 - DNA, 15 bp, Homo sapiens
tgtttgtttgttttt

SEQ ID NO: 3004 - DNA, 15 bp, Homo sapiens
ttgtttgtttgtttt

SEQ ID NO: 3005 - DNA, 15 bp, Homo sapiens
tttgtttgtttgttt

SEQ ID NO: 3006 - DNA, 15 bp, Homo sapiens
gtttgtttgtttgtt

SEQ ID NO: 3007 - DNA, 15 bp, Homo sapiens
tgtttgtttgtttgt

SEQ ID NO: 3008 - DNA, 15 bp, Homo sapiens
ttgtttgtttgtttg

SEQ ID NO: 3009 - DNA, 15 bp, Homo sapiens
ttttgtttgtttgtt

SEQ ID NO: 3010 - DNA, 15 bp, Homo sapiens
tttttgtttgtttgt

SEQ ID NO: 3011 - DNA, 15 bp, Homo sapiens
ttttttgtttgtttg

SEQ ID NO: 3012 - DNA, 15 bp, Homo sapiens
tttttttgtttgttt

SEQ ID NO: 3013 - DNA, 15 bp, Homo sapiens
ttttttttgtttgtt

SEQ ID NO: 3014 - DNA, 15 bp, Homo sapiens
gttttttttgtttgt

SEQ ID NO: 3015 - DNA, 15 bp, Homo sapiens
ggttttttttgtttg

SEQ ID NO: 3016 - DNA, 15 bp, Homo sapiens
gggttttttttgttt

SEQ ID NO: 3017 - DNA, 15 bp, Homo sapiens
agggttttttttgtt

SEQ ID NO: 3018 - DNA, 15 bp, Homo sapiens
tagggttttttttgt

SEQ ID NO: 3019 - DNA, 15 bp, Homo sapiens
ttagggttttttttg

SEQ ID NO: 3020 - DNA, 15 bp, Homo sapiens
cttagggtttttttt

SEQ ID NO: 3021 - DNA, 15 bp, Homo sapiens
tcttagggttttttt

SEQ ID NO: 3022 - DNA, 15 bp, Homo sapiens
ctcttagggtttttt

SEQ ID NO: 3023 - DNA, 15 bp, Homo sapiens
cctcttagggttttt

SEQ ID NO: 3024 - DNA, 15 bp, Homo sapiens
acctcttagggtttt

SEQ ID NO: 3025 - DNA, 15 bp, Homo sapiens
aacctcttagggttt

SEQ ID NO: 3026 - DNA, 15 bp, Homo sapiens
caacctcttagggtt

SEQ ID NO: 3027 - DNA, 15 bp, Homo sapiens
acaacctcttagggt

SEQ ID NO: 3028 - DNA, 15 bp, Homo sapiens
tacaacctcttaggg

SEQ ID NO: 3029 - DNA, 15 bp, Homo sapiens
atacaacctcttagg

SEQ ID NO: 3030 - DNA, 15 bp, Homo sapiens
tatacaacctcttag

SEQ ID NO: 3031 - DNA, 15 bp, Homo sapiens
gtatacaacctctta

SEQ ID NO: 3032 - DNA, 15 bp, Homo sapiens
tgtatacaacctctt

SEQ ID NO: 3033 - DNA, 15 bp, Homo sapiens
atgtatacaacctct

SEQ ID NO: 3034 - DNA, 15 bp, Homo sapiens
aatgtatacaacctc

SEQ ID NO: 3035 - DNA, 15 bp, Homo sapiens
aaatgtatacaacct

SEQ ID NO: 3036 - DNA, 15 bp, Homo sapiens
taaatgtatacaacc

SEQ ID NO: 3037 - DNA, 15 bp, Homo sapiens
ataaatgtatacaac

SEQ ID NO: 3038 - DNA, 15 bp, Homo sapiens
tataaatgtatacaa

SEQ ID NO: 3039 - DNA, 15 bp, Homo sapiens
gtataaatgtataca

SEQ ID NO: 3040 - DNA, 15 bp, Homo sapiens
tgtataaatgtatac

SEQ ID NO: 3041 - DNA, 15 bp, Homo sapiens
ttgtataaatgtata

SEQ ID NO: 3042 - DNA, 15 bp, Homo sapiens
tttgtataaatgtat

SEQ ID NO: 3043 - DNA, 15 bp, Homo sapiens
atttgtataaatgta

SEQ ID NO: 3044 - DNA, 15 bp, Homo sapiens
catttgtataaatgt

SEQ ID NO: 3045 - DNA, 15 bp, Homo sapiens
acatttgtataaatg

SEQ ID NO: 3046 - DNA, 15 bp, Homo sapiens
tacatttgtataaat

SEQ ID NO: 3047 - DNA, 15 bp, Homo sapiens
atacatttgtataaa

SEQ ID NO: 3048 - DNA, 15 bp, Homo sapiens
catacatttgtataa

SEQ ID NO: 3049 - DNA, 15 bp, Homo sapiens
tcatacatttgtata

SEQ ID NO: 3050 - DNA, 15 bp, Homo sapiens
ttcatacatttgtat

SEQ ID NO: 3051 - DNA, 15 bp, Homo sapiens
cttcatacatttgta

SEQ ID NO: 3052 - DNA, 15 bp, Homo sapiens
gcttcatacatttgt

SEQ ID NO: 3053 - DNA, 15 bp, Homo sapiens
tgcttcatacatttg

SEQ ID NO: 3054 - DNA, 15 bp, Homo sapiens
gtgcttcatacattt

SEQ ID NO: 3055 - DNA, 15 bp, Homo sapiens
tgtgcttcatacatt

SEQ ID NO: 3056 - DNA, 15 bp, Homo sapiens
atgtgcttcatacat

SEQ ID NO: 3057 - DNA, 15 bp, Homo sapiens
aatgtgcttcataca

SEQ ID NO: 3058 - DNA, 15 bp, Homo sapiens
taatgtgcttcatac

SEQ ID NO: 3059 - DNA, 15 bp, Homo sapiens
ctaatgtgcttcata

SEQ ID NO: 3060 - DNA, 15 bp, Homo sapiens
cctaatgtgcttcat

SEQ ID NO: 3061 - DNA, 15 bp, Homo sapiens
ccctaatgtgcttca

SEQ ID NO: 3062 - DNA, 15 bp, Homo sapiens
tccctaatgtgcttc

SEQ ID NO: 3063 - DNA, 15 bp, Homo sapiens
ttccctaatgtgctt

SEQ ID NO: 3064 - DNA, 15 bp, Homo sapiens
attccctaatgtgct

SEQ ID NO: 3065 - DNA, 15 bp, Homo sapiens
aattccctaatgtgc

SEQ ID NO: 3066 - DNA, 15 bp, Homo sapiens
gaattccctaatgtg

SEQ ID NO: 3067 - DNA, 15 bp, Homo sapiens
agaattccctaatgt

SEQ ID NO: 3068 - DNA, 15 bp, Homo sapiens
gagaattccctaatg

SEQ ID NO: 3069 - DNA, 15 bp, Homo sapiens
tgagaattccctaat

SEQ ID NO: 3070 - DNA, 15 bp, Homo sapiens
gtgagaattccctaa

SEQ ID NO: 3071 - DNA, 15 bp, Homo sapiens
agtgagaattcccta

SEQ ID NO: 3072 - DNA, 15 bp, Homo sapiens
cagtgagaattccct

SEQ ID NO: 3073 - DNA, 15 bp, Homo sapiens
tcagtgagaattccc

SEQ ID NO: 3074 - DNA, 15 bp, Homo sapiens
ctcagtgagaattcc

SEQ ID NO: 3075 - DNA, 15 bp, Homo sapiens
tctcagtgagaattc

SEQ ID NO: 3076 - DNA, 15 bp, Homo sapiens
ttctcagtgagaatt

SEQ ID NO: 3077 - DNA, 15 bp, Homo sapiens
cttctcagtgagaat

SEQ ID NO: 3078 - DNA, 15 bp, Homo sapiens
acttctcagtgagaa

SEQ ID NO: 3079 - DNA, 15 bp, Homo sapiens
cacttctcagtgaga

SEQ ID NO: 3080 - DNA, 15 bp, Homo sapiens
acacttctcagtgag

SEQ ID NO: 3081 - DNA, 15 bp, Homo sapiens
cacacttctcagtga

SEQ ID NO: 3082 - DNA, 15 bp, Homo sapiens
tcacacttctcagtg

SEQ ID NO: 3083 - DNA, 15 bp, Homo sapiens
ctcacacttctcagt

SEQ ID NO: 3084 - DNA, 15 bp, Homo sapiens
cctcacacttctcag

SEQ ID NO: 3085 - DNA, 15 bp, Homo sapiens
tcctcacacttctca

SEQ ID NO: 3086 - DNA, 15 bp, Homo sapiens
atcctcacacttctc

SEQ ID NO: 3087 - DNA, 15 bp, Homo sapiens
tatcctcacacttct

SEQ ID NO: 3088 - DNA, 15 bp, Homo sapiens
ttatcctcacacttc

SEQ ID NO: 3089 - DNA, 15 bp, Homo sapiens
cttatcctcacactt

SEQ ID NO: 3090 - DNA, 15 bp, Homo sapiens
acttatcctcacact

SEQ ID NO: 3091 - DNA, 15 bp, Homo sapiens
cacttatcctcacac

SEQ ID NO: 3092 - DNA, 15 bp, Homo sapiens
acacttatcctcaca

SEQ ID NO: 3093 - DNA, 15 bp, Homo sapiens
aacacttatcctcac

SEQ ID NO: 3094 - DNA, 15 bp, Homo sapiens
aaacacttatcctca

SEQ ID NO: 3095 - DNA, 15 bp, Homo sapiens
aaaacacttatcctc

SEQ ID NO: 3096 - DNA, 15 bp, Homo sapiens
taaaacacttatcct

SEQ ID NO: 3097 - DNA, 15 bp, Homo sapiens
ataaaacacttatcc

SEQ ID NO: 3098 - DNA, 15 bp, Homo sapiens
cataaaacacttatc

SEQ ID NO: 3099 - DNA, 15 bp, Homo sapiens
tcataaaacacttat

SEQ ID NO: 3100 - DNA, 15 bp, Homo sapiens
ttcataaaacactta

SEQ ID NO: 3101 - DNA, 15 bp, Homo sapiens
attcataaaacactt

SEQ ID NO: 3102 - DNA, 15 bp, Homo sapiens
aattcataaaacact

SEQ ID NO: 3103 - DNA, 15 bp, Homo sapiens
caattcataaaacac

SEQ ID NO: 3104 - DNA, 15 bp, Homo sapiens
tcaattcataaaaca

SEQ ID NO: 3105 - DNA, 15 bp, Homo sapiens
ctcaattcataaaac

SEQ ID NO: 3106 - DNA, 15 bp, Homo sapiens
tctcaattcataaaa

SEQ ID NO: 3107 - DNA, 15 bp, Homo sapiens
gtctcaattcataaa

SEQ ID NO: 3108 - DNA, 15 bp, Homo sapiens
tgtctcaattcataa

SEQ ID NO: 3109 - DNA, 15 bp, Homo sapiens
atgtctcaattcata

SEQ ID NO: 3110 - DNA, 15 bp, Homo sapiens
aatgtctcaattcat

SEQ ID NO: 3111 - DNA, 15 bp, Homo sapiens
aaatgtctcaattca

SEQ ID NO: 3112 - DNA, 15 bp, Homo sapiens
aaaatgtctcaattc

SEQ ID NO: 3113 - DNA, 15 bp, Homo sapiens
taaaatgtctcaatt

SEQ ID NO: 3114 - DNA, 15 bp, Homo sapiens
ctaaaatgtctcaat

SEQ ID NO: 3115 - DNA, 15 bp, Homo sapiens
tctaaaatgtctcaa

SEQ ID NO: 3116 - DNA, 15 bp, Homo sapiens
ttctaaaatgtctca

SEQ ID NO: 3117 - DNA, 15 bp, Homo sapiens
cttctaaaatgtctc

SEQ ID NO: 3118 - DNA, 15 bp, Homo sapiens
tcttctaaaatgtct

SEQ ID NO: 3119 - DNA, 15 bp, Homo sapiens
atcttctaaaatgtc

SEQ ID NO: 3120 - DNA, 15 bp, Homo sapiens
aatcttctaaaatgt

SEQ ID NO: 3121 - DNA, 15 bp, Homo sapiens
gaatcttctaaaatg

SEQ ID NO: 3122 - DNA, 15 bp, Homo sapiens
tgaatcttctaaaat

SEQ ID NO: 3123 - DNA, 15 bp, Homo sapiens
ctgaatcttctaaaa

SEQ ID NO: 3124 - DNA, 15 bp, Homo sapiens
cctgaatcttctaaa

SEQ ID NO: 3125 - DNA, 15 bp, Homo sapiens
tcctgaatcttctaa

SEQ ID NO: 3126 - DNA, 15 bp, Homo sapiens
ttcctgaatcttcta

SEQ ID NO: 3127 - DNA, 15 bp, Homo sapiens
cttcctgaatcttct

SEQ ID NO: 3128 - DNA, 15 bp, Homo sapiens
acttcctgaatcttc

SEQ ID NO: 3129 - DNA, 15 bp, Homo sapiens
gacttcctgaatctt

SEQ ID NO: 3130 - DNA, 15 bp, Homo sapiens
tgacttcctgaatct

SEQ ID NO: 3131 - DNA, 15 bp, Homo sapiens
ctgacttcctgaatc

SEQ ID NO: 3132 - DNA, 15 bp, Homo sapiens
gctgacttcctgaat

SEQ ID NO: 3133 - DNA, 15 bp, Homo sapiens
agctgacttcctgaa

SEQ ID NO: 3134 - DNA, 15 bp, Homo sapiens
tagctgacttcctga

SEQ ID NO: 3135 - DNA, 15 bp, Homo sapiens
atagctgacttcctg

SEQ ID NO: 3136 - DNA, 15 bp, Homo sapiens
tatagctgacttcct

SEQ ID NO: 3137 - DNA, 15 bp, Homo sapiens
ttatagctgacttcc

SEQ ID NO: 3138 - DNA, 15 bp, Homo sapiens
gttatagctgacttc

SEQ ID NO: 3139 - DNA, 15 bp, Homo sapiens
tgttatagctgactt

SEQ ID NO: 3140 - DNA, 15 bp, Homo sapiens
gtgttatagctgact

SEQ ID NO: 3141 - DNA, 15 bp, Homo sapiens
agtgttatagctgac

SEQ ID NO: 3142 - DNA, 15 bp, Homo sapiens
cagtgttatagctga

SEQ ID NO: 3143 - DNA, 15 bp, Homo sapiens
acagtgttatagctg

SEQ ID NO: 3144 - DNA, 15 bp, Homo sapiens
aacagtgttatagct

SEQ ID NO: 3145 - DNA, 15 bp, Homo sapiens
taacagtgttatagc

SEQ ID NO: 3146 - DNA, 15 bp, Homo sapiens
ttaacagtgttatag

SEQ ID NO: 3147 - DNA, 15 bp, Homo sapiens
gttaacagtgttata

SEQ ID NO: 3148 - DNA, 15 bp, Homo sapiens
agttaacagtgttat

SEQ ID NO: 3149 - DNA, 15 bp, Homo sapiens
tagttaacagtgtta

SEQ ID NO: 3150 - DNA, 15 bp, Homo sapiens
atagttaacagtgtt

SEQ ID NO: 3151 - DNA, 15 bp, Homo sapiens
gatagttaacagtgt

SEQ ID NO: 3152 - DNA, 15 bp, Homo sapiens
agatagttaacagtg

SEQ ID NO: 3153 - DNA, 15 bp, Homo sapiens
gagatagttaacagt

SEQ ID NO: 3154 - DNA, 15 bp, Homo sapiens
agagatagttaacag

SEQ ID NO: 3155 - DNA, 15 bp, Homo sapiens
tagagatagttaaca

SEQ ID NO: 3156 - DNA, 15 bp, Homo sapiens
gtagagatagttaac

SEQ ID NO: 3157 - DNA, 15 bp, Homo sapiens
agtagagatagttaa

SEQ ID NO: 3158 - DNA, 15 bp, Homo sapiens
aagtagagatagtta

SEQ ID NO: 3159 - DNA, 15 bp, Homo sapiens
aaagtagagatagtt

SEQ ID NO: 3160 - DNA, 15 bp, Homo sapiens
aaaagtagagatagt

SEQ ID NO: 3161 - DNA, 15 bp, Homo sapiens
taaaagtagagatag

SEQ ID NO: 3162 - DNA, 15 bp, Homo sapiens
ataaaagtagagata

SEQ ID NO: 3163 - DNA, 15 bp, Homo sapiens
aataaaagtagagat

SEQ ID NO: 3164 - DNA, 15 bp, Homo sapiens
aaataaaagtagaga

SEQ ID NO: 3165 - DNA, 15 bp, Homo sapiens
aaaataaaagtagag

SEQ ID NO: 3166 - DNA, 15 bp, Homo sapiens
aaaaataaaagtaga

SEQ ID NO: 3167 - DNA, 15 bp, Homo sapiens
gaaaaataaaagtag

SEQ ID NO: 3168 - DNA, 15 bp, Homo sapiens
ggaaaaataaaagta

SEQ ID NO: 3169 - DNA, 15 bp, Homo sapiens
tggaaaaataaaagt

SEQ ID NO: 3170 - DNA, 15 bp, Homo sapiens
ttggaaaaataaaag

SEQ ID NO: 3171 - DNA, 15 bp, Homo sapiens
tttggaaaaataaaa

SEQ ID NO: 3172 - DNA, 15 bp, Homo sapiens
ttttggaaaaataaa

SEQ ID NO: 3173 - DNA, 15 bp, Homo sapiens
tttttggaaaaataa

SEQ ID NO: 3174 - DNA, 15 bp, Homo sapiens
gtttttggaaaaata

SEQ ID NO: 3175 - DNA, 15 bp, Homo sapiens
agtttttggaaaaat

SEQ ID NO: 3176 - DNA, 15 bp, Homo sapiens
cagtttttggaaaaa

SEQ ID NO: 3177 - DNA, 15 bp, Homo sapiens
acagtttttggaaaa

SEQ ID NO: 3178 - DNA, 15 bp, Homo sapiens
aacagtttttggaaa

SEQ ID NO: 3179 - DNA, 15 bp, Homo sapiens
aaacagtttttggaa

SEQ ID NO: 3180 - DNA, 15 bp, Homo sapiens
aaaacagtttttgga

SEQ ID NO: 3181 - DNA, 15 bp, Homo sapiens
caaaacagtttttgg

SEQ ID NO: 3182 - DNA, 15 bp, Homo sapiens
ccaaaacagtttttg

SEQ ID NO: 3183 - DNA, 15 bp, Homo sapiens
accaaaacagttttt

SEQ ID NO: 3184 - DNA, 15 bp, Homo sapiens
taccaaaacagtttt

SEQ ID NO: 3185 - DNA, 15 bp, Homo sapiens
ataccaaaacagttt

SEQ ID NO: 3186 - DNA, 15 bp, Homo sapiens
tataccaaaacagtt

SEQ ID NO: 3187 - DNA, 15 bp, Homo sapiens
gtataccaaaacagt

SEQ ID NO: 3188 - DNA, 15 bp, Homo sapiens
agtataccaaaacag

SEQ ID NO: 3189 - DNA, 15 bp, Homo sapiens
cagtataccaaaaca

SEQ ID NO: 3190 - DNA, 15 bp, Homo sapiens
acagtataccaaaac

SEQ ID NO: 3191 - DNA, 15 bp, Homo sapiens
aacagtataccaaaa

SEQ ID NO: 3192 - DNA, 15 bp, Homo sapiens
aaacagtataccaaa

SEQ ID NO: 3193 - DNA, 15 bp, Homo sapiens
aaaacagtataccaa

SEQ ID NO: 3194 - DNA, 15 bp, Homo sapiens
aaaaacagtatacca

SEQ ID NO: 3195 - DNA, 15 bp, Homo sapiens
caaaaacagtatacc

SEQ ID NO: 3196 - DNA, 15 bp, Homo sapiens
acaaaaacagtatac

SEQ ID NO: 3197 - DNA, 15 bp, Homo sapiens
tacaaaaacagtata

SEQ ID NO: 3198 - DNA, 15 bp, Homo sapiens
gtacaaaaacagtat

SEQ ID NO: 3199 - DNA, 15 bp, Homo sapiens
ggtacaaaaacagta

SEQ ID NO: 3200 - DNA, 15 bp, Homo sapiens
gggtacaaaaacagt

SEQ ID NO: 3201 - DNA, 15 bp, Homo sapiens
ggggtacaaaaacag

SEQ ID NO: 3202 - DNA, 15 bp, Homo sapiens
aggggtacaaaaaca

SEQ ID NO: 3203 - DNA, 15 bp, Homo sapiens
caggggtacaaaaac

SEQ ID NO: 3204 - DNA, 15 bp, Homo sapiens
ccaggggtacaaaaa

SEQ ID NO: 3205 - DNA, 15 bp, Homo sapiens
accaggggtacaaaa

SEQ ID NO: 3206 - DNA, 15 bp, Homo sapiens
taccaggggtacaaa

SEQ ID NO: 3207 - DNA, 15 bp, Homo sapiens
gtaccaggggtacaa

SEQ ID NO: 3208 - DNA, 15 bp, Homo sapiens
agtaccaggggtaca

SEQ ID NO: 3209 - DNA, 15 bp, Homo sapiens
tagtaccaggggtac

SEQ ID NO: 3210 - DNA, 15 bp, Homo sapiens
gtagtaccaggggta

SEQ ID NO: 3211 - DNA, 15 bp, Homo sapiens
tgtagtaccaggggt

SEQ ID NO: 3212 - DNA, 15 bp, Homo sapiens
ttgtagtaccagggg

SEQ ID NO: 3213 - DNA, 15 bp, Homo sapiens
attgtagtaccaggg

SEQ ID NO: 3214 - DNA, 15 bp, Homo sapiens
cattgtagtaccagg

SEQ ID NO: 3215 - DNA, 15 bp, Homo sapiens
gcattgtagtaccag

SEQ ID NO: 3216 - DNA, 15 bp, Homo sapiens
ggcattgtagtacca

SEQ ID NO: 3217 - DNA, 15 bp, Homo sapiens
gggcattgtagtacc

SEQ ID NO: 3218 - DNA, 15 bp, Homo sapiens
tgggcattgtagtac

SEQ ID NO: 3219 - DNA, 15 bp, Homo sapiens
ctgggcattgtagta

SEQ ID NO: 3220 - DNA, 15 bp, Homo sapiens
actgggcattgtagt

SEQ ID NO: 3221 - DNA, 15 bp, Homo sapiens
tactgggcattgtag

SEQ ID NO: 3222 - DNA, 15 bp, Homo sapiens
atactgggcattgta

SEQ ID NO: 3223 - DNA, 15 bp, Homo sapiens
aatactgggcattgt

SEQ ID NO: 3224 - DNA, 15 bp, Homo sapiens
gaatactgggcattg

SEQ ID NO: 3225 - DNA, 15 bp, Homo sapiens
agaatactgggcatt

SEQ ID NO: 3226 - DNA, 15 bp, Homo sapiens
tagaatactgggcat

SEQ ID NO: 3227 - DNA, 15 bp, Homo sapiens
atagaatactgggca

SEQ ID NO: 3228 - DNA, 15 bp, Homo sapiens
aatagaatactgggc

SEQ ID NO: 3229 - DNA, 15 bp, Homo sapiens
taatagaatactggg

SEQ ID NO: 3230 - DNA, 15 bp, Homo sapiens
ataatagaatactgg

SEQ ID NO: 3231 - DNA, 15 bp, Homo sapiens
aataatagaatactg

SEQ ID NO: 3232 - DNA, 15 bp, Homo sapiens
caataatagaatact

SEQ ID NO: 3233 - DNA, 15 bp, Homo sapiens
gcaataatagaatac

SEQ ID NO: 3234 - DNA, 15 bp, Homo sapiens
agcaataatagaata

SEQ ID NO: 3235 - DNA, 15 bp, Homo sapiens
aagcaataatagaat

SEQ ID NO: 3236 - DNA, 15 bp, Homo sapiens
aaagcaataatagaa

SEQ ID NO: 3237 - DNA, 15 bp, Homo sapiens
caaagcaataataga

SEQ ID NO: 3238 - DNA, 15 bp, Homo sapiens
gcaaagcaataatag

SEQ ID NO: 3239 - DNA, 15 bp, Homo sapiens
agcaaagcaataata

SEQ ID NO: 3240 - DNA, 15 bp, Homo sapiens
aagcaaagcaataat

SEQ ID NO: 3241 - DNA, 15 bp, Homo sapiens
gaagcaaagcaataa

SEQ ID NO: 3242 - DNA, 15 bp, Homo sapiens
ggaagcaaagcaata

SEQ ID NO: 3243 - DNA, 15 bp, Homo sapiens
aggaagcaaagcaat

SEQ ID NO: 3244 - DNA, 15 bp, Homo sapiens
aaggaagcaaagcaa

SEQ ID NO: 3245 - DNA, 15 bp, Homo sapiens
aaaggaagcaaagca

SEQ ID NO: 3246 - DNA, 15 bp, Homo sapiens
aaaaggaagcaaagc

SEQ ID NO: 3247 - DNA, 15 bp, Homo sapiens
caaaaggaagcaaag

SEQ ID NO: 3248 - DNA, 15 bp, Homo sapiens
tcaaaaggaagcaaa

SEQ ID NO: 3249 - DNA, 15 bp, Homo sapiens
gtcaaaaggaagcaa

SEQ ID NO: 3250 - DNA, 15 bp, Homo sapiens
agtcaaaaggaagca

SEQ ID NO: 3251 - DNA, 15 bp, Homo sapiens
aagtcaaaaggaagc

SEQ ID NO: 3252 - DNA, 15 bp, Homo sapiens
taagtcaaaaggaag

SEQ ID NO: 3253 - DNA, 15 bp, Homo sapiens
ttaagtcaaaaggaa

SEQ ID NO: 3254 - DNA, 15 bp, Homo sapiens
cttaagtcaaaagga

SEQ ID NO: 3255 - DNA, 15 bp, Homo sapiens
acttaagtcaaaagg

SEQ ID NO: 3256 - DNA, 15 bp, Homo sapiens
tacttaagtcaaaag

SEQ ID NO: 3257 - DNA, 15 bp, Homo sapiens
ctacttaagtcaaaa

SEQ ID NO: 3258 - DNA, 15 bp, Homo sapiens
tctacttaagtcaaa

SEQ ID NO: 3259 - DNA, 15 bp, Homo sapiens
ttctacttaagtcaa

SEQ ID NO: 3260 - DNA, 15 bp, Homo sapiens
cttctacttaagtca

SEQ ID NO: 3261 - DNA, 15 bp, Homo sapiens
acttctacttaagtc

SEQ ID NO: 3262 - DNA, 15 bp, Homo sapiens
aacttctacttaagt

SEQ ID NO: 3263 - DNA, 15 bp, Homo sapiens
gaacttctacttaag

SEQ ID NO: 3264 - DNA, 15 bp, Homo sapiens
ggaacttctacttaa

SEQ ID NO: 3265 - DNA, 15 bp, Homo sapiens
aggaacttctactta

SEQ ID NO: 3266 - DNA, 15 bp, Homo sapiens
caggaacttctactt

SEQ ID NO: 3267 - DNA, 15 bp, Homo sapiens
tcaggaacttctact

SEQ ID NO: 3268 - DNA, 15 bp, Homo sapiens
atcaggaacttctac

SEQ ID NO: 3269 - DNA, 15 bp, Homo sapiens
aatcaggaacttcta

SEQ ID NO: 3270 - DNA, 15 bp, Homo sapiens
aaatcaggaacttct

SEQ ID NO: 3271 - DNA, 15 bp, Homo sapiens
gaaatcaggaacttc

SEQ ID NO: 3272 - DNA, 15 bp, Homo sapiens
cgaaatcaggaactt

SEQ ID NO: 3273 - DNA, 15 bp, Homo sapiens
acgaaatcaggaact

SEQ ID NO: 3274 - DNA, 15 bp, Homo sapiens
aacgaaatcaggaac

SEQ ID NO: 3275 - DNA, 15 bp, Homo sapiens
taacgaaatcaggaa

SEQ ID NO: 3276 - DNA, 15 bp, Homo sapiens
gtaacgaaatcagga

SEQ ID NO: 3277 - DNA, 15 bp, Homo sapiens
tgtaacgaaatcagg

SEQ ID NO: 3278 - DNA, 15 bp, Homo sapiens
gtgtaacgaaatcag

SEQ ID NO: 3279 - DNA, 15 bp, Homo sapiens
agtgtaacgaaatca

SEQ ID NO: 3280 - DNA, 15 bp, Homo sapiens
gagtgtaacgaaatc

SEQ ID NO: 3281 - DNA, 15 bp, Homo sapiens
tgagtgtaacgaaat

SEQ ID NO: 3282 - DNA, 15 bp, Homo sapiens
ttgagtgtaacgaaa

SEQ ID NO: 3283 - DNA, 15 bp, Homo sapiens
cttgagtgtaacgaa

SEQ ID NO: 3284 - DNA, 15 bp, Homo sapiens
ccttgagtgtaacga

SEQ ID NO: 3285 - DNA, 15 bp, Homo sapiens
tccttgagtgtaacg

SEQ ID NO: 3286 - DNA, 15 bp, Homo sapiens
gtccttgagtgtaac

SEQ ID NO: 3287 - DNA, 15 bp, Homo sapiens
agtccttgagtgtaa

SEQ ID NO: 3288 - DNA, 15 bp, Homo sapiens
cagtccttgagtgta

SEQ ID NO: 3289 - DNA, 15 bp, Homo sapiens
ccagtccttgagtgt

SEQ ID NO: 3290 - DNA, 15 bp, Homo sapiens
tccagtccttgagtg

SEQ ID NO: 3291 - DNA, 15 bp, Homo sapiens
ttccagtccttgagt

SEQ ID NO: 3292 - DNA, 15 bp, Homo sapiens
tttccagtccttgag

SEQ ID NO: 3293 - DNA, 15 bp, Homo sapiens
atttccagtccttga

SEQ ID NO: 3294 - DNA, 15 bp, Homo sapiens
aatttccagtccttg

SEQ ID NO: 3295 - DNA, 15 bp, Homo sapiens
aaatttccagtcctt

SEQ ID NO: 3296 - DNA, 15 bp, Homo sapiens
aaaatttccagtcct

SEQ ID NO: 3297 - DNA, 15 bp, Homo sapiens
aaaaatttccagtcc

SEQ ID NO: 3298 - DNA, 15 bp, Homo sapiens
gaaaaatttccagtc

SEQ ID NO: 3299 - DNA, 15 bp, Homo sapiens
agaaaaatttccagt

SEQ ID NO: 3300 - DNA, 15 bp, Homo sapiens
aagaaaaatttccag

SEQ ID NO: 3301 - DNA, 15 bp, Homo sapiens
aaagaaaaatttcca

SEQ ID NO: 3302 - DNA, 15 bp, Homo sapiens
taaagaaaaatttcc

SEQ ID NO: 3303 - DNA, 15 bp, Homo sapiens
ataaagaaaaatttc

SEQ ID NO: 3304 - DNA, 15 bp, Homo sapiens
tataaagaaaaattt

SEQ ID NO: 3305 - DNA, 15 bp, Homo sapiens
ctataaagaaaaatt

SEQ ID NO: 3306 - DNA, 15 bp, Homo sapiens
tctataaagaaaaat

SEQ ID NO: 3307 - DNA, 15 bp, Homo sapiens
ctctataaagaaaaa

SEQ ID NO: 3308 - DNA, 15 bp, Homo sapiens
actctataaagaaaa

SEQ ID NO: 3309 - DNA, 15 bp, Homo sapiens
aactctataaagaaa

SEQ ID NO: 3310 - DNA, 15 bp, Homo sapiens
taactctataaagaa

SEQ ID NO: 3311 - DNA, 15 bp, Homo sapiens
ctaactctataaaga

SEQ ID NO: 3312 - DNA, 15 bp, Homo sapiens
actaactctataaag

SEQ ID NO: 3313 - DNA, 15 bp, Homo sapiens
tactaactctataaa

SEQ ID NO: 3314 - DNA, 15 bp, Homo sapiens
atactaactctataa

SEQ ID NO: 3315 - DNA, 15 bp, Homo sapiens
catactaactctata

SEQ ID NO: 3316 - DNA, 15 bp, Homo sapiens
ccatactaactctat

SEQ ID NO: 3317 - DNA, 15 bp, Homo sapiens
gccatactaactcta

SEQ ID NO: 3318 - DNA, 15 bp, Homo sapiens
ggccatactaactct

SEQ ID NO: 3319 - DNA, 15 bp, Homo sapiens
aggccatactaactc

SEQ ID NO: 3320 - DNA, 15 bp, Homo sapiens
aaggccatactaact

SEQ ID NO: 3321 - DNA, 15 bp, Homo sapiens
gaaggccatactaac

SEQ ID NO: 3322 - DNA, 15 bp, Homo sapiens
agaaggccatactaa

SEQ ID NO: 3323 - DNA, 15 bp, Homo sapiens
aagaaggccatacta

SEQ ID NO: 3324 - DNA, 15 bp, Homo sapiens
gaagaaggccatact

SEQ ID NO: 3325 - DNA, 15 bp, Homo sapiens
cgaagaaggccatac

SEQ ID NO: 3326 - DNA, 15 bp, Homo sapiens
acgaagaaggccata

SEQ ID NO: 3327 - DNA, 15 bp, Homo sapiens
cacgaagaaggccat

SEQ ID NO: 3328 - DNA, 15 bp, Homo sapiens
acacgaagaaggcca

SEQ ID NO: 3329 - DNA, 15 bp, Homo sapiens
aacacgaagaaggcc

SEQ ID NO: 3330 - DNA, 15 bp, Homo sapiens
aaacacgaagaaggc

SEQ ID NO: 3331 - DNA, 15 bp, Homo sapiens
caaacacgaagaagg

SEQ ID NO: 3332 - DNA, 15 bp, Homo sapiens
gcaaacacgaagaag

SEQ ID NO: 3333 - DNA, 15 bp, Homo sapiens
tgcaaacacgaagaa

SEQ ID NO: 3334 - DNA, 15 bp, Homo sapiens
ctgcaaacacgaaga

SEQ ID NO: 3335 - DNA, 15 bp, Homo sapiens
tctgcaaacacgaag

SEQ ID NO: 3336 - DNA, 15 bp, Homo sapiens
atctgcaaacacgaa

SEQ ID NO: 3337 - DNA, 15 bp, Homo sapiens
tatctgcaaacacga

SEQ ID NO: 3338 - DNA, 15 bp, Homo sapiens
ctatctgcaaacacg

SEQ ID NO: 3339 - DNA, 15 bp, Homo sapiens
tctatctgcaaacac

SEQ ID NO: 3340 - DNA, 15 bp, Homo sapiens
ttctatctgcaaaca

SEQ ID NO: 3341 - DNA, 15 bp, Homo sapiens
tttctatctgcaaac

SEQ ID NO: 3342 - DNA, 15 bp, Homo sapiens
ttttctatctgcaaa

SEQ ID NO: 3343 - DNA, 15 bp, Homo sapiens
gttttctatctgcaa

SEQ ID NO: 3344 - DNA, 15 bp, Homo sapiens
agttttctatctgca

SEQ ID NO: 3345 - DNA, 15 bp, Homo sapiens
tagttttctatctgc

SEQ ID NO: 3346 - DNA, 15 bp, Homo sapiens
atagttttctatctg

SEQ ID NO: 3347 - DNA, 15 bp, Homo sapiens
catagttttctatct

SEQ ID NO: 3348 - DNA, 15 bp, Homo sapiens
tcatagttttctatc

SEQ ID NO: 3349 - DNA, 15 bp, Homo sapiens
ttcatagttttctat

SEQ ID NO: 3350 - DNA, 15 bp, Homo sapiens
attcatagttttcta

SEQ ID NO: 3351 - DNA, 15 bp, Homo sapiens
tattcatagttttct

SEQ ID NO: 3352 - DNA, 15 bp, Homo sapiens
ttattcatagttttc

SEQ ID NO: 3353 - DNA, 15 bp, Homo sapiens
tttattcatagtttt

SEQ ID NO: 3354 - DNA, 15 bp, Homo sapiens
atttattcatagttt

SEQ ID NO: 3355 - DNA, 15 bp, Homo sapiens
catttattcatagtt

SEQ ID NO: 3356 - DNA, 15 bp, Homo sapiens
acatttattcatagt

SEQ ID NO: 3357 - DNA, 15 bp, Homo sapiens
tacatttattcatag

SEQ ID NO: 3358 - DNA, 15 bp, Homo sapiens
ctacatttattcata

SEQ ID NO: 3359 - DNA, 15 bp, Homo sapiens
actacatttattcat

SEQ ID NO: 3360 - DNA, 15 bp, Homo sapiens
tactacatttattca

SEQ ID NO: 3361 - DNA, 15 bp, Homo sapiens
ttactacatttattc

SEQ ID NO: 3362 - DNA, 15 bp, Homo sapiens
tttactacatttatt

SEQ ID NO: 3363 - DNA, 15 bp, Homo sapiens
ctttactacatttat

SEQ ID NO: 3364 - DNA, 15 bp, Homo sapiens
tctttactacattta

SEQ ID NO: 3365 - DNA, 15 bp, Homo sapiens
ttctttactacattt

SEQ ID NO: 3366 - DNA, 15 bp, Homo sapiens
tttctttactacatt

SEQ ID NO: 3367 - DNA, 15 bp, Homo sapiens
ctttctttactacat

SEQ ID NO: 3368 - DNA, 15 bp, Homo sapiens
tctttctttactaca

SEQ ID NO: 3369 - DNA, 15 bp, Homo sapiens
atctttctttactac

SEQ ID NO: 3370 - DNA, 15 bp, Homo sapiens
tatctttctttacta

SEQ ID NO: 3371 - DNA, 15 bp, Homo sapiens
atatctttctttact

SEQ ID NO: 3372 - DNA, 15 bp, Homo sapiens
aatatctttctttac

SEQ ID NO: 3373 - DNA, 15 bp, Homo sapiens
aaatatctttcttta

SEQ ID NO: 3374 - DNA, 15 bp, Homo sapiens
taaatatctttcttt

SEQ ID NO: 3375 - DNA, 15 bp, Homo sapiens
ataaatatctttctt

SEQ ID NO: 3376 - DNA, 15 bp, Homo sapiens
aataaatatctttct

SEQ ID NO: 3377 - DNA, 15 bp, Homo sapiens
aaataaatatctttc

SEQ ID NO: 3378 - DNA, 15 bp, Homo sapiens
taaataaatatcttt

SEQ ID NO: 3379 - DNA, 15 bp, Homo sapiens
ataaataaatatctt

SEQ ID NO: 3380 - DNA, 15 bp, Homo sapiens
aataaataaatatct

SEQ ID NO: 3381 - DNA, 15 bp, Homo sapiens
aaataaataaatatc

SEQ ID NO: 3382 - DNA, 15 bp, Homo sapiens
taaataaataaatat

SEQ ID NO: 3383 - DNA, 15 bp, Homo sapiens
ataaataaataaata

SEQ ID NO: 3384 - DNA, 15 bp, Homo sapiens
aataaataaataaat

SEQ ID NO: 3385 - DNA, 15 bp, Homo sapiens
aaataaataaataaa

SEQ ID NO: 3386 - DNA, 15 bp, Homo sapiens
caaataaataaataa

SEQ ID NO: 3387 - DNA, 15 bp, Homo sapiens
tcaaataaataaata

SEQ ID NO: 3388 - DNA, 15 bp, Homo sapiens
ctcaaataaataaat

SEQ ID NO: 3389 - DNA, 15 bp, Homo sapiens
tctcaaataaataaa

SEQ ID NO: 3390 - DNA, 15 bp, Homo sapiens
atctcaaataaataa

SEQ ID NO: 3391 - DNA, 15 bp, Homo sapiens
catctcaaataaata

SEQ ID NO: 3392 - DNA, 15 bp, Homo sapiens
ccatctcaaataaat

SEQ ID NO: 3393 - DNA, 15 bp, Homo sapiens
tccatctcaaataaa

SEQ ID NO: 3394 - DNA, 15 bp, Homo sapiens
ctccatctcaaataa

SEQ ID NO: 3395 - DNA, 15 bp, Homo sapiens
actccatctcaaata

SEQ ID NO: 3396 - DNA, 15 bp, Homo sapiens
gactccatctcaaat

SEQ ID NO: 3397 - DNA, 15 bp, Homo sapiens
agactccatctcaaa

SEQ ID NO: 3398 - DNA, 15 bp, Homo sapiens
gagactccatctcaa

SEQ ID NO: 3399 - DNA, 15 bp, Homo sapiens
tgagactccatctca

SEQ ID NO: 3400 - DNA, 15 bp, Homo sapiens
gtgagactccatctc

SEQ ID NO: 3401 - DNA, 15 bp, Homo sapiens
agtgagactccatct

SEQ ID NO: 3402 - DNA, 15 bp, Homo sapiens
gagtgagactccatc

SEQ ID NO: 3403 - DNA, 15 bp, Homo sapiens
agagtgagactccat

SEQ ID NO: 3404 - DNA, 15 bp, Homo sapiens
cagagtgagactcca

SEQ ID NO: 3405 - DNA, 15 bp, Homo sapiens
acagagtgagactcc

SEQ ID NO: 3406 - DNA, 15 bp, Homo sapiens
aacagagtgagactc

SEQ ID NO: 3407 - DNA, 15 bp, Homo sapiens
caacagagtgagact

SEQ ID NO: 3408 - DNA, 15 bp, Homo sapiens
gcaacagagtgagac

SEQ ID NO: 3409 - DNA, 15 bp, Homo sapiens
ggcaacagagtgaga

SEQ ID NO: 3410 - DNA, 15 bp, Homo sapiens
gggcaacagagtgag

SEQ ID NO: 3411 - DNA, 15 bp, Homo sapiens
tgggcaacagagtga

SEQ ID NO: 3412 - DNA, 15 bp, Homo sapiens
ctgggcaacagagtg

SEQ ID NO: 3413 - DNA, 15 bp, Homo sapiens
cctgggcaacagagt

SEQ ID NO: 3414 - DNA, 15 bp, Homo sapiens
tccagcctgggcaac

SEQ ID NO: 3415 - DNA, 15 bp, Homo sapiens
ctccagcctgggcaa

SEQ ID NO: 3416 - DNA, 15 bp, Homo sapiens
actccagcctgggca

SEQ ID NO: 3417 - DNA, 15 bp, Homo sapiens
cactccagcctgggc

SEQ ID NO: 3418 - DNA, 15 bp, Homo sapiens
gcgccactgcactcc

SEQ ID NO: 3419 - DNA, 15 bp, Homo sapiens
tgcgccactgcactc

SEQ ID NO: 3420 - DNA, 15 bp, Homo sapiens
ttgcgccactgcact

SEQ ID NO: 3421 - DNA, 15 bp, Homo sapiens
attgcgccactgcac

SEQ ID NO: 3422 - DNA, 15 bp, Homo sapiens
gattgcgccactgca

SEQ ID NO: 3423 - DNA, 15 bp, Homo sapiens
agattgcgccactgc

SEQ ID NO: 3424 - DNA, 15 bp, Homo sapiens
gagattgcgccactg

SEQ ID NO: 3425 - DNA, 15 bp, Homo sapiens
ggagattgcgccact

SEQ ID NO: 3426 - DNA, 15 bp, Homo sapiens
tggagattgcgccac

SEQ ID NO: 3427 - DNA, 15 bp, Homo sapiens
gtggagattgcgcca

SEQ ID NO: 3428 - DNA, 15 bp, Homo sapiens
agtggagattgcgcc

SEQ ID NO: 3429 - DNA, 15 bp, Homo sapiens
gagtggagattgcgc

SEQ ID NO: 3430 - DNA, 15 bp, Homo sapiens
tgagtggagattgcg

SEQ ID NO: 3431 - DNA, 15 bp, Homo sapiens
gtgagtggagattgc

SEQ ID NO: 3432 - DNA, 15 bp, Homo sapiens
agtgagtggagattg

SEQ ID NO: 3433 - DNA, 15 bp, Homo sapiens
cagtgagtggagatt

SEQ ID NO: 3434 - DNA, 15 bp, Homo sapiens
gcagtgagtggagat

SEQ ID NO: 3435 - DNA, 15 bp, Homo sapiens
tgcagtgagtggaga

SEQ ID NO: 3436 - DNA, 15 bp, Homo sapiens
ttgcagtgagtggag

SEQ ID NO: 3437 - DNA, 15 bp, Homo sapiens
gttgcagtgagtgga

SEQ ID NO: 3438 - DNA, 15 bp, Homo sapiens
ggttgcagtgagtgg

SEQ ID NO: 3439 - DNA, 15 bp, Homo sapiens
aggttgcagtgagtg

SEQ ID NO: 3440 - DNA, 15 bp, Homo sapiens
gaggttgcagtgagt

SEQ ID NO: 3441 - DNA, 15 bp, Homo sapiens
agaggttgcagtgag

SEQ ID NO: 3442 - DNA, 15 bp, Homo sapiens
cagaggttgcagtga

SEQ ID NO: 3443 - DNA, 15 bp, Homo sapiens
gcagaggttgcagtg

SEQ ID NO: 3444 - DNA, 15 bp, Homo sapiens
ggcagaggttgcagt

SEQ ID NO: 3445 - DNA, 15 bp, Homo sapiens
aggcagaggttgcag

SEQ ID NO: 3446 - DNA, 15 bp, Homo sapiens
gaggcagaggttgca

SEQ ID NO: 3447 - DNA, 15 bp, Homo sapiens
ggaggcagaggttgc

SEQ ID NO: 3448 - DNA, 15 bp, Homo sapiens
gggaggcagaggttg

SEQ ID NO: 3449 - DNA, 15 bp, Homo sapiens
tgggaggcagaggtt

SEQ ID NO: 3450 - DNA, 15 bp, Homo sapiens
ctgggaggcagaggt

SEQ ID NO: 3451 - DNA, 15 bp, Homo sapiens
cctgggaggcagagg

SEQ ID NO: 3452 - DNA, 15 bp, Homo sapiens
acctgggaggcagag

SEQ ID NO: 3453 - DNA, 15 bp, Homo sapiens
aacctgggaggcaga

SEQ ID NO: 3454 - DNA, 15 bp, Homo sapiens
gaacctgggaggcag

SEQ ID NO: 3455 - DNA, 15 bp, Homo sapiens
tgaacctgggaggca

SEQ ID NO: 3456 - DNA, 15 bp, Homo sapiens
ttgaacctgggaggc

SEQ ID NO: 3457 - DNA, 15 bp, Homo sapiens
cttgaacctgggagg

SEQ ID NO: 3458 - DNA, 15 bp, Homo sapiens
gcttgaacctgggag

SEQ ID NO: 3459 - DNA, 15 bp, Homo sapiens
tgcttgaacctggga

SEQ ID NO: 3460 - DNA, 15 bp, Homo sapiens
ttgcttgaacctggg

SEQ ID NO: 3461 - DNA, 15 bp, Homo sapiens
cttgcttgaacctgg

SEQ ID NO: 3462 - DNA, 15 bp, Homo sapiens
acttgcttgaacctg

SEQ ID NO: 3463 - DNA, 15 bp, Homo sapiens
gacttgcttgaacct

SEQ ID NO: 3464 - DNA, 15 bp, Homo sapiens
agacttgcttgaacc

SEQ ID NO: 3465 - DNA, 15 bp, Homo sapiens
gagacttgcttgaac

SEQ ID NO: 3466 - DNA, 15 bp, Homo sapiens
ggagacttgcttgaa

SEQ ID NO: 3467 - DNA, 15 bp, Homo sapiens
aggagacttgcttga

SEQ ID NO: 3468 - DNA, 15 bp, Homo sapiens
caggagacttgcttg

SEQ ID NO: 3469 - DNA, 15 bp, Homo sapiens
gcaggagacttgctt

SEQ ID NO: 3470 - DNA, 15 bp, Homo sapiens
ggcaggagacttgct

SEQ ID NO: 3471 - DNA, 15 bp, Homo sapiens
aggcaggagacttgc

SEQ ID NO: 3472 - DNA, 15 bp, Homo sapiens
gaggcaggagacttg

SEQ ID NO: 3473 - DNA, 15 bp, Homo sapiens
tgaggcaggagactt

SEQ ID NO: 3474 - DNA, 15 bp, Homo sapiens
ctgaggcaggagact

SEQ ID NO: 3475 - DNA, 15 bp, Homo sapiens
gctgaggcaggagac

SEQ ID NO: 3476 - DNA, 15 bp, Homo sapiens
ccagctactcaggag

SEQ ID NO: 3477 - DNA, 15 bp, Homo sapiens
cccagctactcagga

SEQ ID NO: 3478 - DNA, 15 bp, Homo sapiens
tcccagctactcagg

SEQ ID NO: 3479 - DNA, 15 bp, Homo sapiens
atcccagctactcag

SEQ ID NO: 3480 - DNA, 15 bp, Homo sapiens
aatcccagctactca

SEQ ID NO: 3481 - DNA, 15 bp, Homo sapiens
taatcccagctactc

SEQ ID NO: 3482 - DNA, 15 bp, Homo sapiens
tcctgtaatcccagc

SEQ ID NO: 3483 - DNA, 15 bp, Homo sapiens
ctcctgtaatcccag

SEQ ID NO: 3484 - DNA, 15 bp, Homo sapiens
actcctgtaatccca

SEQ ID NO: 3485 - DNA, 15 bp, Homo sapiens
gactcctgtaatccc

SEQ ID NO: 3486 - DNA, 15 bp, Homo sapiens
ggactcctgtaatcc

SEQ ID NO: 3487 - DNA, 15 bp, Homo sapiens
tggactcctgtaatc

SEQ ID NO: 3488 - DNA, 15 bp, Homo sapiens
gtggactcctgtaat

SEQ ID NO: 3489 - DNA, 15 bp, Homo sapiens
ggtggactcctgtaa

SEQ ID NO: 3490 - DNA, 15 bp, Homo sapiens
tggtggactcctgta

SEQ ID NO: 3491 - DNA, 15 bp, Homo sapiens
gtggtggactcctgt

SEQ ID NO: 3492 - DNA, 15 bp, Homo sapiens
ggtggtggactcctg

SEQ ID NO: 3493 - DNA, 15 bp, Homo sapiens
tggtggtggactcct

SEQ ID NO: 3494 - DNA, 15 bp, Homo sapiens
atggtggtggactcc

SEQ ID NO: 3495 - DNA, 15 bp, Homo sapiens
catggtggtggactc

SEQ ID NO: 3496 - DNA, 15 bp, Homo sapiens
gcatggtggtggact

SEQ ID NO: 3497 - DNA, 15 bp, Homo sapiens
agcatggtggtggac

SEQ ID NO: 3498 - DNA, 15 bp, Homo sapiens
gagcatggtggtgga

SEQ ID NO: 3499 - DNA, 15 bp, Homo sapiens
cgagcatggtggtgg

SEQ ID NO: 3500 - DNA, 15 bp, Homo sapiens
ccgagcatggtggtg

SEQ ID NO: 3501 - DNA, 15 bp, Homo sapiens
gccgagcatggtggt

SEQ ID NO: 3502 - DNA, 15 bp, Homo sapiens
agccgagcatggtgg

SEQ ID NO: 3503 - DNA, 15 bp, Homo sapiens
tagccgagcatggtg

SEQ ID NO: 3504 - DNA, 15 bp, Homo sapiens
ttagccgagcatggt

SEQ ID NO: 3505 - DNA, 15 bp, Homo sapiens
attagccgagcatgg

SEQ ID NO: 3506 - DNA, 15 bp, Homo sapiens
aattagccgagcatg

SEQ ID NO: 3507 - DNA, 15 bp, Homo sapiens
aaattagccgagcat

SEQ ID NO: 3508 - DNA, 15 bp, Homo sapiens
aaaattagccgagca

SEQ ID NO: 3509 - DNA, 15 bp, Homo sapiens
aaaaattagccgagc

SEQ ID NO: 3510 - DNA, 15 bp, Homo sapiens
caaaaattagccgag

SEQ ID NO: 3511 - DNA, 15 bp, Homo sapiens
acaaaaattagccga

SEQ ID NO: 3512 - DNA, 15 bp, Homo sapiens
tacaaaaattagccg

SEQ ID NO: 3513 - DNA, 15 bp, Homo sapiens
taaaaatacaaaaat

SEQ ID NO: 3514 - DNA, 15 bp, Homo sapiens
tgtctctactaaaaa

SEQ ID NO: 3515 - DNA, 15 bp, Homo sapiens
ctgtctctactaaaa

SEQ ID NO: 3516 - DNA, 15 bp, Homo sapiens
cctgtctctactaaa

SEQ ID NO: 3517 - DNA, 15 bp, Homo sapiens
ccctgtctctactaa

SEQ ID NO: 3518 - DNA, 15 bp, Homo sapiens
accctgtctctacta

SEQ ID NO: 3519 - DNA, 15 bp, Homo sapiens
aaccctgtctctact

SEQ ID NO: 3520 - DNA, 15 bp, Homo sapiens
aaaccctgtctctac

SEQ ID NO: 3521 - DNA, 15 bp, Homo sapiens
gaaaccctgtctcta

SEQ ID NO: 3522 - DNA, 15 bp, Homo sapiens
tgaaaccctgtctct

SEQ ID NO: 3523 - DNA, 15 bp, Homo sapiens
gtgaaaccctgtctc

SEQ ID NO: 3524 - DNA, 15 bp, Homo sapiens
ggtgaaaccctgtct

SEQ ID NO: 3525 - DNA, 15 bp, Homo sapiens
gggtgaaaccctgtc

SEQ ID NO: 3526 - DNA, 15 bp, Homo sapiens
agggtgaaaccctgt

SEQ ID NO: 3527 - DNA, 15 bp, Homo sapiens
cagggtgaaaccctg

SEQ ID NO: 3528 - DNA, 15 bp, Homo sapiens
acagggtgaaaccct

SEQ ID NO: 3529 - DNA, 15 bp, Homo sapiens
aacagggtgaaaccc

SEQ ID NO: 3530 - DNA, 15 bp, Homo sapiens
caacagggtgaaacc

SEQ ID NO: 3531 - DNA, 15 bp, Homo sapiens
ccaacagggtgaaac

SEQ ID NO: 3532 - DNA, 15 bp, Homo sapiens
accaacagggtgaaa

SEQ ID NO: 3533 - DNA, 15 bp, Homo sapiens
gaccaacagggtgaa

SEQ ID NO: 3534 - DNA, 15 bp, Homo sapiens
tgaccaacagggtga

SEQ ID NO: 3535 - DNA, 15 bp, Homo sapiens
ctgaccaacagggtg

SEQ ID NO: 3536 - DNA, 15 bp, Homo sapiens
cctgaccaacagggt

SEQ ID NO: 3537 - DNA, 15 bp, Homo sapiens
gcctgaccaacaggg

SEQ ID NO: 3538 - DNA, 15 bp, Homo sapiens
agcctgaccaacagg

SEQ ID NO: 3539 - DNA, 15 bp, Homo sapiens
cagcctgaccaacag

SEQ ID NO: 3540 - DNA, 15 bp, Homo sapiens
ccagcctgaccaaca

SEQ ID NO: 3541 - DNA, 15 bp, Homo sapiens
gccagcctgaccaac

SEQ ID NO: 3542 - DNA, 15 bp, Homo sapiens
ggccagcctgaccaa

SEQ ID NO: 3543 - DNA, 15 bp, Homo sapiens
aggccagcctgacca

SEQ ID NO: 3544 - DNA, 15 bp, Homo sapiens
gaggccagcctgacc

SEQ ID NO: 3545 - DNA, 15 bp, Homo sapiens
tgaggccagcctgac

SEQ ID NO: 3546 - DNA, 15 bp, Homo sapiens
ttgaggccagcctga

SEQ ID NO: 3547 - DNA, 15 bp, Homo sapiens
tttgaggccagcctg

SEQ ID NO: 3548 - DNA, 15 bp, Homo sapiens
gtttgaggccagcct

SEQ ID NO: 3549 - DNA, 15 bp, Homo sapiens
agtttgaggccagcc

SEQ ID NO: 3550 - DNA, 15 bp, Homo sapiens
gagtttgaggccagc

SEQ ID NO: 3551 - DNA, 15 bp, Homo sapiens
ggagtttgaggccag

SEQ ID NO: 3552 - DNA, 15 bp, Homo sapiens
aggagtttgaggcca

SEQ ID NO: 3553 - DNA, 15 bp, Homo sapiens
caggagtttgaggcc

SEQ ID NO: 3554 - DNA, 15 bp, Homo sapiens
tcaggagtttgaggc

SEQ ID NO: 3555 - DNA, 15 bp, Homo sapiens
gtcaggagtttgagg

SEQ ID NO: 3556 - DNA, 15 bp, Homo sapiens
agtcaggagtttgag

SEQ ID NO: 3557 - DNA, 15 bp, Homo sapiens
aagtcaggagtttga

SEQ ID NO: 3558 - DNA, 15 bp, Homo sapiens
gaagtcaggagtttg

SEQ ID NO: 3559 - DNA, 15 bp, Homo sapiens
tgaagtcaggagttt

SEQ ID NO: 3560 - DNA, 15 bp, Homo sapiens
atgaagtcaggagtt

SEQ ID NO: 3561 - DNA, 15 bp, Homo sapiens
catgaagtcaggagt

SEQ ID NO: 3562 - DNA, 15 bp, Homo sapiens
tcatgaagtcaggag

SEQ ID NO: 3563 - DNA, 15 bp, Homo sapiens
atcatgaagtcagga

SEQ ID NO: 3564 - DNA, 15 bp, Homo sapiens
gatcatgaagtcagg

SEQ ID NO: 3565 - DNA, 15 bp, Homo sapiens
ggatcatgaagtcag

SEQ ID NO: 3566 - DNA, 15 bp, Homo sapiens
tggatcatgaagtca

SEQ ID NO: 3567 - DNA, 15 bp, Homo sapiens
gtggatcatgaagtc

SEQ ID NO: 3568 - DNA, 15 bp, Homo sapiens
ggtggatcatgaagt

SEQ ID NO: 3569 - DNA, 15 bp, Homo sapiens
gggtggatcatgaag

SEQ ID NO: 3570 - DNA, 15 bp, Homo sapiens
tgggtggatcatgaa

SEQ ID NO: 3571 - DNA, 15 bp, Homo sapiens
gtgggtggatcatga

SEQ ID NO: 3572 - DNA, 15 bp, Homo sapiens
ggtgggtggatcatg

SEQ ID NO: 3573 - DNA, 15 bp, Homo sapiens
aggtgggtggatcat

SEQ ID NO: 3574 - DNA, 15 bp, Homo sapiens
gaggtgggtggatca

SEQ ID NO: 3575 - DNA, 15 bp, Homo sapiens
tgaggtgggtggatc

SEQ ID NO: 3576 - DNA, 15 bp, Homo sapiens
ctgaggtgggtggat

SEQ ID NO: 3577 - DNA, 15 bp, Homo sapiens
gctgaggtgggtgga

SEQ ID NO: 3578 - DNA, 15 bp, Homo sapiens
agctgaggtgggtgg

SEQ ID NO: 3579 - DNA, 15 bp, Homo sapiens
aagctgaggtgggtg

SEQ ID NO: 3580 - DNA, 15 bp, Homo sapiens
gaagctgaggtgggt

SEQ ID NO: 3581 - DNA, 15 bp, Homo sapiens
ggaagctgaggtggg

SEQ ID NO: 3582 - DNA, 15 bp, Homo sapiens
gggaagctgaggtgg

SEQ ID NO: 3583 - DNA, 15 bp, Homo sapiens
tgggaagctgaggtg

SEQ ID NO: 3584 - DNA, 15 bp, Homo sapiens
ttgggaagctgaggt

SEQ ID NO: 3585 - DNA, 15 bp, Homo sapiens
cttgggaagctgagg

SEQ ID NO: 3586 - DNA, 15 bp, Homo sapiens
ccttgggaagctgag

SEQ ID NO: 3587 - DNA, 15 bp, Homo sapiens
accttgggaagctga

SEQ ID NO: 3588 - DNA, 15 bp, Homo sapiens
caccttgggaagctg

SEQ ID NO: 3589 - DNA, 15 bp, Homo sapiens
gcaccttgggaagct

SEQ ID NO: 3590 - DNA, 15 bp, Homo sapiens
agcaccttgggaagc

SEQ ID NO: 3591 - DNA, 15 bp, Homo sapiens
cagcaccttgggaag

SEQ ID NO: 3592 - DNA, 15 bp, Homo sapiens
ccagcaccttgggaa

SEQ ID NO: 3593 - DNA, 15 bp, Homo sapiens
cccagcaccttggga

SEQ ID NO: 3594 - DNA, 15 bp, Homo sapiens
tcccagcaccttggg

SEQ ID NO: 3595 - DNA, 15 bp, Homo sapiens
atcccagcaccttgg

SEQ ID NO: 3596 - DNA, 15 bp, Homo sapiens
aatcccagcaccttg

SEQ ID NO: 3597 - DNA, 15 bp, Homo sapiens
taatcccagcacctt

SEQ ID NO: 3598 - DNA, 15 bp, Homo sapiens
gtaatcccagcacct

SEQ ID NO: 3599 - DNA, 15 bp, Homo sapiens
tgtaatcccagcacc

SEQ ID NO: 3600 - DNA, 15 bp, Homo sapiens
agcctgtaatcccag

SEQ ID NO: 3601 - DNA, 15 bp, Homo sapiens
aagcctgtaatccca

SEQ ID NO: 3602 - DNA, 15 bp, Homo sapiens
caagcctgtaatccc

SEQ ID NO: 3603 - DNA, 15 bp, Homo sapiens
ccaagcctgtaatcc

SEQ ID NO: 3604 - DNA, 15 bp, Homo sapiens
cccaagcctgtaatc

SEQ ID NO: 3605 - DNA, 15 bp, Homo sapiens
gcccaagcctgtaat

SEQ ID NO: 3606 - DNA, 15 bp, Homo sapiens
ggcccaagcctgtaa

SEQ ID NO: 3607 - DNA, 15 bp, Homo sapiens
tggcccaagcctgta

SEQ ID NO: 3608 - DNA, 15 bp, Homo sapiens
atggcccaagcctgt

SEQ ID NO: 3609 - DNA, 15 bp, Homo sapiens
gatggcccaagcctg

SEQ ID NO: 3610 - DNA, 15 bp, Homo sapiens
tgatggcccaagcct

SEQ ID NO: 3611 - DNA, 15 bp, Homo sapiens
gtgatggcccaagcc

SEQ ID NO: 3612 - DNA, 15 bp, Homo sapiens
tgtgatggcccaagc

SEQ ID NO: 3613 - DNA, 15 bp, Homo sapiens
gtgtgatggcccaag

SEQ ID NO: 3614 - DNA, 15 bp, Homo sapiens
ggtgtgatggcccaa

SEQ ID NO: 3615 - DNA, 15 bp, Homo sapiens
aggtgtgatggccca

SEQ ID NO: 3616 - DNA, 15 bp, Homo sapiens
caggtgtgatggccc

SEQ ID NO: 3617 - DNA, 15 bp, Homo sapiens
ccaggtgtgatggcc

SEQ ID NO: 3618 - DNA, 15 bp, Homo sapiens
gccaggtgtgatggc

SEQ ID NO: 3619 - DNA, 15 bp, Homo sapiens
tgccaggtgtgatgg

SEQ ID NO: 3620 - DNA, 15 bp, Homo sapiens
ctgccaggtgtgatg

SEQ ID NO: 3621 - DNA, 15 bp, Homo sapiens
tctgccaggtgtgat

SEQ ID NO: 3622 - DNA, 15 bp, Homo sapiens
ttctgccaggtgtga

SEQ ID NO: 3623 - DNA, 15 bp, Homo sapiens
tttctgccaggtgtg

SEQ ID NO: 3624 - DNA, 15 bp, Homo sapiens
ctttctgccaggtgt

SEQ ID NO: 3625 - DNA, 15 bp, Homo sapiens
tctttctgccaggtg

SEQ ID NO: 3626 - DNA, 15 bp, Homo sapiens
atctttctgccaggt

SEQ ID NO: 3627 - DNA, 15 bp, Homo sapiens
aatctttctgccagg

SEQ ID NO: 3628 - DNA, 15 bp, Homo sapiens
taatctttctgccag

SEQ ID NO: 3629 - DNA, 15 bp, Homo sapiens
ataatctttctgcca

SEQ ID NO: 3630 - DNA, 15 bp, Homo sapiens
aataatctttctgcc

SEQ ID NO: 3631 - DNA, 15 bp, Homo sapiens
aaataatctttctgc

SEQ ID NO: 3632 - DNA, 15 bp, Homo sapiens
taaataatctttctg

SEQ ID NO: 3633 - DNA, 15 bp, Homo sapiens
ataaataatctttct

SEQ ID NO: 3634 - DNA, 15 bp, Homo sapiens
aataaataatctttc

SEQ ID NO: 3635 - DNA, 15 bp, Homo sapiens
aaataaataatcttt

SEQ ID NO: 3636 - DNA, 15 bp, Homo sapiens
taaataaataatctt

SEQ ID NO: 3637 - DNA, 15 bp, Homo sapiens
ataaataaataatct

SEQ ID NO: 3638 - DNA, 15 bp, Homo sapiens
aataaataaataatc

SEQ ID NO: 3639 - DNA, 15 bp, Homo sapiens
aaataaataaataat

SEQ ID NO: 3640 - DNA, 15 bp, Homo sapiens
taaataaataaataa

SEQ ID NO: 3641 - DNA, 15 bp, Homo sapiens
ggagactccatctca

SEQ ID NO: 3642 - DNA, 15 bp, Homo sapiens
gggagactccatctc

SEQ ID NO: 3643 - DNA, 15 bp, Homo sapiens
agggagactccatct

SEQ ID NO: 3644 - DNA, 15 bp, Homo sapiens
gagggagactccatc

SEQ ID NO: 3645 - DNA, 15 bp, Homo sapiens
agagggagactccat

SEQ ID NO: 3646 - DNA, 15 bp, Homo sapiens
cagagggagactcca

SEQ ID NO: 3647 - DNA, 15 bp, Homo sapiens
acagagggagactcc

SEQ ID NO: 3648 - DNA, 15 bp, Homo sapiens
aacagagggagactc

SEQ ID NO: 3649 - DNA, 15 bp, Homo sapiens
caacagagggagact

SEQ ID NO: 3650 - DNA, 15 bp, Homo sapiens
gcaacagagggagac

SEQ ID NO: 3651 - DNA, 15 bp, Homo sapiens
agcaacagagggaga

SEQ ID NO: 3652 - DNA, 15 bp, Homo sapiens
cagcaacagagggag

SEQ ID NO: 3653 - DNA, 15 bp, Homo sapiens
tcagcaacagaggga

SEQ ID NO: 3654 - DNA, 15 bp, Homo sapiens
ctcagcaacagaggg

SEQ ID NO: 3655 - DNA, 15 bp, Homo sapiens
cctcagcaacagagg

SEQ ID NO: 3656 - DNA, 15 bp, Homo sapiens
gcctcagcaacagag

SEQ ID NO: 3657 - DNA, 15 bp, Homo sapiens
agcctcagcaacaga

SEQ ID NO: 3658 - DNA, 15 bp, Homo sapiens
cagcctcagcaacag

SEQ ID NO: 3659 - DNA, 15 bp, Homo sapiens
ccagcctcagcaaca

SEQ ID NO: 3660 - DNA, 15 bp, Homo sapiens
cccagcctcagcaac

SEQ ID NO: 3661 - DNA, 15 bp, Homo sapiens
ccccagcctcagcaa

SEQ ID NO: 3662 - DNA, 15 bp, Homo sapiens
accccagcctcagca

SEQ ID NO: 3663 - DNA, 15 bp, Homo sapiens
caccccagcctcagc

SEQ ID NO: 3664 - DNA, 15 bp, Homo sapiens
gcaccccagcctcag

SEQ ID NO: 3665 - DNA, 15 bp, Homo sapiens
tgcaccccagcctca

SEQ ID NO: 3666 - DNA, 15 bp, Homo sapiens
ctgcaccccagcctc

SEQ ID NO: 3667 - DNA, 15 bp, Homo sapiens
actgcaccccagcct

SEQ ID NO: 3668 - DNA, 15 bp, Homo sapiens
cactgcaccccagcc

SEQ ID NO: 3669 - DNA, 15 bp, Homo sapiens
ccactgcaccccagc

SEQ ID NO: 3670 - DNA, 15 bp, Homo sapiens
accactgcaccccag

SEQ ID NO: 3671 - DNA, 15 bp, Homo sapiens
taccactgcacccca

SEQ ID NO: 3672 - DNA, 15 bp, Homo sapiens
gtaccactgcacccc

SEQ ID NO: 3673 - DNA, 15 bp, Homo sapiens
cgtaccactgcaccc

SEQ ID NO: 3674 - DNA, 15 bp, Homo sapiens
tcgtaccactgcacc

SEQ ID NO: 3675 - DNA, 15 bp, Homo sapiens
atcgtaccactgcac

SEQ ID NO: 3676 - DNA, 15 bp, Homo sapiens
gatcgtaccactgca

SEQ ID NO: 3677 - DNA, 15 bp, Homo sapiens
agatcgtaccactgc

SEQ ID NO: 3678 - DNA, 15 bp, Homo sapiens
aagatcgtaccactg

SEQ ID NO: 3679 - DNA, 15 bp, Homo sapiens
caagatcgtaccact

SEQ ID NO: 3680 - DNA, 15 bp, Homo sapiens
ccaagatcgtaccac

SEQ ID NO: 3681 - DNA, 15 bp, Homo sapiens
gccaagatcgtacca

SEQ ID NO: 3682 - DNA, 15 bp, Homo sapiens
agccaagatcgtacc

SEQ ID NO: 3683 - DNA, 15 bp, Homo sapiens
gagccaagatcgtac

SEQ ID NO: 3684 - DNA, 15 bp, Homo sapiens
tgagccaagatcgta

SEQ ID NO: 3685 - DNA, 15 bp, Homo sapiens
gtgagccaagatcgt

SEQ ID NO: 3686 - DNA, 15 bp, Homo sapiens
agtgagccaagatcg

SEQ ID NO: 3687 - DNA, 15 bp, Homo sapiens
gttgcagtgagccaa

SEQ ID NO: 3688 - DNA, 15 bp, Homo sapiens
ggttgcagtgagcca

SEQ ID NO: 3689 - DNA, 15 bp, Homo sapiens
aggttgcagtgagcc

SEQ ID NO: 3690 - DNA, 15 bp, Homo sapiens
tggaggcagaggttg

SEQ ID NO: 3691 - DNA, 15 bp, Homo sapiens
ctggaggcagaggtt

SEQ ID NO: 3692 - DNA, 15 bp, Homo sapiens
cctggaggcagaggt

SEQ ID NO: 3693 - DNA, 15 bp, Homo sapiens
ccctggaggcagagg

SEQ ID NO: 3694 - DNA, 15 bp, Homo sapiens
accctggaggcagag

SEQ ID NO: 3695 - DNA, 15 bp, Homo sapiens
aaccctggaggcaga

SEQ ID NO: 3696 - DNA, 15 bp, Homo sapiens
gaaccctggaggcag

SEQ ID NO: 3697 - DNA, 15 bp, Homo sapiens
tgaaccctggaggca

SEQ ID NO: 3698 - DNA, 15 bp, Homo sapiens
ttgaaccctggaggc

SEQ ID NO: 3699 - DNA, 15 bp, Homo sapiens
cttgaaccctggagg

SEQ ID NO: 3700 - DNA, 15 bp, Homo sapiens
acttgaaccctggag

SEQ ID NO: 3701 - DNA, 15 bp, Homo sapiens
cacttgaaccctgga

SEQ ID NO: 3702 - DNA, 15 bp, Homo sapiens
tcacttgaaccctgg

SEQ ID NO: 3703 - DNA, 15 bp, Homo sapiens
atcacttgaaccctg

SEQ ID NO: 3704 - DNA, 15 bp, Homo sapiens
aatcacttgaaccct

SEQ ID NO: 3705 - DNA, 15 bp, Homo sapiens
gaatcacttgaaccc

SEQ ID NO: 3706 - DNA, 15 bp, Homo sapiens
agaatcacttgaacc

SEQ ID NO: 3707 - DNA, 15 bp, Homo sapiens
gagaatcacttgaac

SEQ ID NO: 3708 - DNA, 15 bp, Homo sapiens
cgagaatcacttgaa

SEQ ID NO: 3709 - DNA, 15 bp, Homo sapiens
acgagaatcacttga

SEQ ID NO: 3710 - DNA, 15 bp, Homo sapiens
cacgagaatcacttg

SEQ ID NO: 3711 - DNA, 15 bp, Homo sapiens
gcacgagaatcactt

SEQ ID NO: 3712 - DNA, 15 bp, Homo sapiens
ggcacgagaatcact

SEQ ID NO: 3713 - DNA, 15 bp, Homo sapiens
aggcacgagaatcac

SEQ ID NO: 3714 - DNA, 15 bp, Homo sapiens
gaggcacgagaatca

SEQ ID NO: 3715 - DNA, 15 bp, Homo sapiens
tgaggcacgagaatc

SEQ ID NO: 3716 - DNA, 15 bp, Homo sapiens
ctgaggcacgagaat

SEQ ID NO: 3717 - DNA, 15 bp, Homo sapiens
actgaggcacgagaa

SEQ ID NO: 3718 - DNA, 15 bp, Homo sapiens
gactgaggcacgaga

SEQ ID NO: 3719 - DNA, 15 bp, Homo sapiens
agactgaggcacgag

SEQ ID NO: 3720 - DNA, 15 bp, Homo sapiens
gagactgaggcacga

SEQ ID NO: 3721 - DNA, 15 bp, Homo sapiens
ggagactgaggcacg

SEQ ID NO: 3722 - DNA, 15 bp, Homo sapiens
gggagactgaggcac

SEQ ID NO: 3723 - DNA, 15 bp, Homo sapiens
cgggagactgaggca

SEQ ID NO: 3724 - DNA, 15 bp, Homo sapiens
tcgggagactgaggc

SEQ ID NO: 3725 - DNA, 15 bp, Homo sapiens
ctcgggagactgagg

SEQ ID NO: 3726 - DNA, 15 bp, Homo sapiens
actcgggagactgag

SEQ ID NO: 3727 - DNA, 15 bp, Homo sapiens
tactcgggagactga

SEQ ID NO: 3728 - DNA, 15 bp, Homo sapiens
ctactcgggagactg

SEQ ID NO: 3729 - DNA, 15 bp, Homo sapiens
gctactcgggagact

SEQ ID NO: 3730 - DNA, 15 bp, Homo sapiens
agctactcgggagac

SEQ ID NO: 3731 - DNA, 15 bp, Homo sapiens
cagctactcgggaga

SEQ ID NO: 3732 - DNA, 15 bp, Homo sapiens
ccagctactcgggag

SEQ ID NO: 3733 - DNA, 15 bp, Homo sapiens
cccagctactcggga

SEQ ID NO: 3734 - DNA, 15 bp, Homo sapiens
tcccagctactcggg

SEQ ID NO: 3735 - DNA, 15 bp, Homo sapiens
gtcccagctactcgg

SEQ ID NO: 3736 - DNA, 15 bp, Homo sapiens
agtcccagctactcg

SEQ ID NO: 3737 - DNA, 15 bp, Homo sapiens
tagtcccagctactc

SEQ ID NO: 3738 - DNA, 15 bp, Homo sapiens
gtagtcccagctact

SEQ ID NO: 3739 - DNA, 15 bp, Homo sapiens
tgtagtcccagctac

SEQ ID NO: 3740 - DNA, 15 bp, Homo sapiens
ctgtagtcccagcta

SEQ ID NO: 3741 - DNA, 15 bp, Homo sapiens
cctgtagtcccagct

SEQ ID NO: 3742 - DNA, 15 bp, Homo sapiens
acctgtagtcccagc

SEQ ID NO: 3743 - DNA, 15 bp, Homo sapiens
tacctgtagtcccag

SEQ ID NO: 3744 - DNA, 15 bp, Homo sapiens
gtacctgtagtccca

SEQ ID NO: 3745 - DNA, 15 bp, Homo sapiens
ggtacctgtagtccc

SEQ ID NO: 3746 - DNA, 15 bp, Homo sapiens
aggtacctgtagtcc

SEQ ID NO: 3747 - DNA, 15 bp, Homo sapiens
caggtacctgtagtc

SEQ ID NO: 3748 - DNA, 15 bp, Homo sapiens
gcaggtacctgtagt

SEQ ID NO: 3749 - DNA, 15 bp, Homo sapiens
ggcaggtacctgtag

SEQ ID NO: 3750 - DNA, 15 bp, Homo sapiens
tggcaggtacctgta

SEQ ID NO: 3751 - DNA, 15 bp, Homo sapiens
gtggcaggtacctgt

SEQ ID NO: 3752 - DNA, 15 bp, Homo sapiens
ggtggcaggtacctg

SEQ ID NO: 3753 - DNA, 15 bp, Homo sapiens
tggtggcaggtacct

SEQ ID NO: 3754 - DNA, 15 bp, Homo sapiens
ctggtggcaggtacc

SEQ ID NO: 3755 - DNA, 15 bp, Homo sapiens
cctggtggcaggtac

SEQ ID NO: 3756 - DNA, 15 bp, Homo sapiens
gcctggtggcaggta

SEQ ID NO: 3757 - DNA, 15 bp, Homo sapiens
ggcctggtggcaggt

SEQ ID NO: 3758 - DNA, 15 bp, Homo sapiens
gggcctggtggcagg

SEQ ID NO: 3759 - DNA, 15 bp, Homo sapiens
tgggcctggtggcag

SEQ ID NO: 3760 - DNA, 15 bp, Homo sapiens
ctgggcctggtggca

SEQ ID NO: 3761 - DNA, 15 bp, Homo sapiens
gctgggcctggtggc

SEQ ID NO: 3762 - DNA, 15 bp, Homo sapiens
agctgggcctggtgg

SEQ ID NO: 3763 - DNA, 15 bp, Homo sapiens
tagctgggcctggtg

SEQ ID NO: 3764 - DNA, 15 bp, Homo sapiens
ttagctgggcctggt

SEQ ID NO: 3765 - DNA, 15 bp, Homo sapiens
attagctgggcctgg

SEQ ID NO: 3766 - DNA, 15 bp, Homo sapiens
aattagctgggcctg

SEQ ID NO: 3767 - DNA, 15 bp, Homo sapiens
aaattagctgggcct

SEQ ID NO: 3768 - DNA, 15 bp, Homo sapiens
aaaattagctgggcc

SEQ ID NO: 3769 - DNA, 15 bp, Homo sapiens
aaaaattagctgggc

SEQ ID NO: 3770 - DNA, 15 bp, Homo sapiens
caaaaattagctggg

SEQ ID NO: 3771 - DNA, 15 bp, Homo sapiens
acaaaaattagctgg

SEQ ID NO: 3772 - DNA, 15 bp, Homo sapiens
tacaaaaattagctg

SEQ ID NO: 3773 - DNA, 15 bp, Homo sapiens
atacaaaaattagct

SEQ ID NO: 3774 - DNA, 15 bp, Homo sapiens
tggtgaaaccctgtc

SEQ ID NO: 3775 - DNA, 15 bp, Homo sapiens
atggtgaaaccctgt

SEQ ID NO: 3776 - DNA, 15 bp, Homo sapiens
catggtgaaaccctg

SEQ ID NO: 3777 - DNA, 15 bp, Homo sapiens
acatggtgaaaccct

SEQ ID NO: 3778 - DNA, 15 bp, Homo sapiens
tagcctggccaacat

SEQ ID NO: 3779 - DNA, 15 bp, Homo sapiens
ctagcctggccaaca

SEQ ID NO: 3780 - DNA, 15 bp, Homo sapiens
actagcctggccaac

SEQ ID NO: 3781 - DNA, 15 bp, Homo sapiens
gactagcctggccaa

SEQ ID NO: 3782 - DNA, 15 bp, Homo sapiens
agactagcctggcca

SEQ ID NO: 3783 - DNA, 15 bp, Homo sapiens
gagactagcctggcc

SEQ ID NO: 3784 - DNA, 15 bp, Homo sapiens
tgagactagcctggc

SEQ ID NO: 3785 - DNA, 15 bp, Homo sapiens
ttgagactagcctgg

SEQ ID NO: 3786 - DNA, 15 bp, Homo sapiens
tttgagactagcctg

SEQ ID NO: 3787 - DNA, 15 bp, Homo sapiens
gtttgagactagcct

SEQ ID NO: 3788 - DNA, 15 bp, Homo sapiens
agtttgagactagcc

SEQ ID NO: 3789 - DNA, 15 bp, Homo sapiens
gagtttgagactagc

SEQ ID NO: 3790 - DNA, 15 bp, Homo sapiens
ggagtttgagactag

SEQ ID NO: 3791 - DNA, 15 bp, Homo sapiens
aggagtttgagacta

SEQ ID NO: 3792 - DNA, 15 bp, Homo sapiens
caggagtttgagact

SEQ ID NO: 3793 - DNA, 15 bp, Homo sapiens
tcaggagtttgagac

SEQ ID NO: 3794 - DNA, 15 bp, Homo sapiens
gtcaggagtttgaga

SEQ ID NO: 3795 - DNA, 15 bp, Homo sapiens
ggtcaggagtttgag

SEQ ID NO: 3796 - DNA, 15 bp, Homo sapiens
aggtcaggagtttga

SEQ ID NO: 3797 - DNA, 15 bp, Homo sapiens
gaggtcaggagtttg

SEQ ID NO: 3798 - DNA, 15 bp, Homo sapiens
tgaggtcaggagttt

SEQ ID NO: 3799 - DNA, 15 bp, Homo sapiens
ttgaggtcaggagtt

SEQ ID NO: 3800 - DNA, 15 bp, Homo sapiens
cttgaggtcaggagt

SEQ ID NO: 3801 - DNA, 15 bp, Homo sapiens
acttgaggtcaggag

SEQ ID NO: 3802 - DNA, 15 bp, Homo sapiens
cacttgaggtcagga

SEQ ID NO: 3803 - DNA, 15 bp, Homo sapiens
tcacttgaggtcagg

SEQ ID NO: 3804 - DNA, 15 bp, Homo sapiens
atcacttgaggtcag

SEQ ID NO: 3805 - DNA, 15 bp, Homo sapiens
gatcacttgaggtca

SEQ ID NO: 3806 - DNA, 15 bp, Homo sapiens
agatcacttgaggtc

SEQ ID NO: 3807 - DNA, 15 bp, Homo sapiens
cagatcacttgaggt

SEQ ID NO: 3808 - DNA, 15 bp, Homo sapiens
gcagatcacttgagg

SEQ ID NO: 3809 - DNA, 15 bp, Homo sapiens
agcagatcacttgag

SEQ ID NO: 3810 - DNA, 15 bp, Homo sapiens
aagcagatcacttga

SEQ ID NO: 3811 - DNA, 15 bp, Homo sapiens
caagcagatcacttg

SEQ ID NO: 3812 - DNA, 15 bp, Homo sapiens
gcaagcagatcactt

SEQ ID NO: 3813 - DNA, 15 bp, Homo sapiens
ggcaagcagatcact

SEQ ID NO: 3814 - DNA, 15 bp, Homo sapiens
aggcaagcagatcac

SEQ ID NO: 3815 - DNA, 15 bp, Homo sapiens
gaggcaagcagatca

SEQ ID NO: 3816 - DNA, 15 bp, Homo sapiens
cgaggcaagcagatc

SEQ ID NO: 3817 - DNA, 15 bp, Homo sapiens
ccgaggcaagcagat

SEQ ID NO: 3818 - DNA, 15 bp, Homo sapiens
gccgaggcaagcaga

SEQ ID NO: 3819 - DNA, 15 bp, Homo sapiens
ggccgaggcaagcag

SEQ ID NO: 3820 - DNA, 15 bp, Homo sapiens
aggccgaggcaagca

SEQ ID NO: 3821 - DNA, 15 bp, Homo sapiens
gaggccgaggcaagc

SEQ ID NO: 3822 - DNA, 15 bp, Homo sapiens
ggaggccgaggcaag

SEQ ID NO: 3823 - DNA, 15 bp, Homo sapiens
gggaggccgaggcaa

SEQ ID NO: 3824 - DNA, 15 bp, Homo sapiens
tggccaggcgcagtg

SEQ ID NO: 3825 - DNA, 15 bp, Homo sapiens
ctggccaggcgcagt

SEQ ID NO: 3826 - DNA, 15 bp, Homo sapiens
tctggccaggcgcag

SEQ ID NO: 3827 - DNA, 15 bp, Homo sapiens
ttctggccaggcgca

SEQ ID NO: 3828 - DNA, 15 bp, Homo sapiens
tttctggccaggcgc

SEQ ID NO: 3829 - DNA, 15 bp, Homo sapiens
ctttctggccaggcg

SEQ ID NO: 3830 - DNA, 15 bp, Homo sapiens
gctttctggccaggc

SEQ ID NO: 3831 - DNA, 15 bp, Homo sapiens
tgctttctggccagg

SEQ ID NO: 3832 - DNA, 15 bp, Homo sapiens
ctgctttctggccag

SEQ ID NO: 3833 - DNA, 15 bp, Homo sapiens
tctgctttctggcca

SEQ ID NO: 3834 - DNA, 15 bp, Homo sapiens
atctgctttctggcc

SEQ ID NO: 3835 - DNA, 15 bp, Homo sapiens
aatctgctttctggc

SEQ ID NO: 3836 - DNA, 15 bp, Homo sapiens
aaatctgctttctgg

SEQ ID NO: 3837 - DNA, 15 bp, Homo sapiens
aaaatctgctttctg

SEQ ID NO: 3838 - DNA, 15 bp, Homo sapiens
aaaaatctgctttct

SEQ ID NO: 3839 - DNA, 15 bp, Homo sapiens
taaaaatctgctttc

SEQ ID NO: 3840 - DNA, 15 bp, Homo sapiens
ttaaaaatctgcttt

SEQ ID NO: 3841 - DNA, 15 bp, Homo sapiens
tttaaaaatctgctt

SEQ ID NO: 3842 - DNA, 15 bp, Homo sapiens
atttaaaaatctgct

SEQ ID NO: 3843 - DNA, 15 bp, Homo sapiens
aatttaaaaatctgc

SEQ ID NO: 3844 - DNA, 15 bp, Homo sapiens
aaatttaaaaatctg

SEQ ID NO: 3845 - DNA, 15 bp, Homo sapiens
caaatttaaaaatct

SEQ ID NO: 3846 - DNA, 15 bp, Homo sapiens
tcaaatttaaaaatc

SEQ ID NO: 3847 - DNA, 15 bp, Homo sapiens
ctcaaatttaaaaat

SEQ ID NO: 3848 - DNA, 15 bp, Homo sapiens
cctcaaatttaaaaa

SEQ ID NO: 3849 - DNA, 15 bp, Homo sapiens
acctcaaatttaaaa

SEQ ID NO: 3850 - DNA, 15 bp, Homo sapiens
tacctcaaatttaaa

SEQ ID NO: 3851 - DNA, 15 bp, Homo sapiens
ttacctcaaatttaa

SEQ ID NO: 3852 - DNA, 15 bp, Homo sapiens
tttacctcaaattta

SEQ ID NO: 3853 - DNA, 15 bp, Homo sapiens
ctttacctcaaattt

SEQ ID NO: 3854 - DNA, 15 bp, Homo sapiens
tctttacctcaaatt

SEQ ID NO: 3855 - DNA, 15 bp, Homo sapiens
ttctttacctcaaat

SEQ ID NO: 3856 - DNA, 15 bp, Homo sapiens
tttctttacctcaaa

SEQ ID NO: 3857 - DNA, 15 bp, Homo sapiens
ctttctttacctcaa

SEQ ID NO: 3858 - DNA, 15 bp, Homo sapiens
gctttctttacctca

SEQ ID NO: 3859 - DNA, 15 bp, Homo sapiens
agctttctttacctc

SEQ ID NO: 3860 - DNA, 15 bp, Homo sapiens
aagctttctttacct

SEQ ID NO: 3861 - DNA, 15 bp, Homo sapiens
taagctttctttacc

SEQ ID NO: 3862 - DNA, 15 bp, Homo sapiens
ttaagctttctttac

SEQ ID NO: 3863 - DNA, 15 bp, Homo sapiens
tttaagctttcttta

SEQ ID NO: 3864 - DNA, 15 bp, Homo sapiens
gtttaagctttcttt

SEQ ID NO: 3865 - DNA, 15 bp, Homo sapiens
agtttaagctttctt

SEQ ID NO: 3866 - DNA, 15 bp, Homo sapiens
aagtttaagctttct

SEQ ID NO: 3867 - DNA, 15 bp, Homo sapiens
taagtttaagctttc

SEQ ID NO: 3868 - DNA, 15 bp, Homo sapiens
ttaagtttaagcttt

SEQ ID NO: 3869 - DNA, 15 bp, Homo sapiens
tttaagtttaagctt

SEQ ID NO: 3870 - DNA, 15 bp, Homo sapiens
ttttaagtttaagct

SEQ ID NO: 3871 - DNA, 15 bp, Homo sapiens
tttttaagtttaagc

SEQ ID NO: 3872 - DNA, 15 bp, Homo sapiens
ctttttaagtttaag

SEQ ID NO: 3873 - DNA, 15 bp, Homo sapiens
actttttaagtttaa

SEQ ID NO: 3874 - DNA, 15 bp, Homo sapiens
aactttttaagttta

SEQ ID NO: 3875 - DNA, 15 bp, Homo sapiens
taactttttaagttt

SEQ ID NO: 3876 - DNA, 15 bp, Homo sapiens
ttaactttttaagtt

SEQ ID NO: 3877 - DNA, 15 bp, Homo sapiens
attaactttttaagt

SEQ ID NO: 3878 - DNA, 15 bp, Homo sapiens
gattaactttttaag

SEQ ID NO: 3879 - DNA, 15 bp, Homo sapiens
tgattaactttttaa

SEQ ID NO: 3880 - DNA, 15 bp, Homo sapiens
ttgattaacttttta

SEQ ID NO: 3881 - DNA, 15 bp, Homo sapiens
tttgattaacttttt

SEQ ID NO: 3882 - DNA, 15 bp, Homo sapiens
atttgattaactttt

SEQ ID NO: 3883 - DNA, 15 bp, Homo sapiens
catttgattaacttt

SEQ ID NO: 3884 - DNA, 15 bp, Homo sapiens
gcatttgattaactt

SEQ ID NO: 3885 - DNA, 15 bp, Homo sapiens
tgcatttgattaact

SEQ ID NO: 3886 - DNA, 15 bp, Homo sapiens
ttgcatttgattaac

SEQ ID NO: 3887 - DNA, 15 bp, Homo sapiens
attgcatttgattaa

SEQ ID NO: 3888 - DNA, 15 bp, Homo sapiens
cattgcatttgatta

SEQ ID NO: 3889 - DNA, 15 bp, Homo sapiens
ccattgcatttgatt

SEQ ID NO: 3890 - DNA, 15 bp, Homo sapiens
tccattgcatttgat

SEQ ID NO: 3891 - DNA, 15 bp, Homo sapiens
ttccattgcatttga

SEQ ID NO: 3892 - DNA, 15 bp, Homo sapiens
cttccattgcatttg

SEQ ID NO: 3893 - DNA, 15 bp, Homo sapiens
gcttccattgcattt

SEQ ID NO: 3894 - DNA, 15 bp, Homo sapiens
tgcttccattgcatt

SEQ ID NO: 3895 - DNA, 15 bp, Homo sapiens
ttgcttccattgcat

SEQ ID NO: 3896 - DNA, 15 bp, Homo sapiens
tttgcttccattgca

SEQ ID NO: 3897 - DNA, 15 bp, Homo sapiens
atttgcttccattgc

SEQ ID NO: 3898 - DNA, 15 bp, Homo sapiens
tatttgcttccattg

SEQ ID NO: 3899 - DNA, 15 bp, Homo sapiens
ctatttgcttccatt

SEQ ID NO: 3900 - DNA, 15 bp, Homo sapiens
tctatttgcttccat

SEQ ID NO: 3901 - DNA, 15 bp, Homo sapiens
gtctatttgcttcca

SEQ ID NO: 3902 - DNA, 15 bp, Homo sapiens
ggtctatttgcttcc

SEQ ID NO: 3903 - DNA, 15 bp, Homo sapiens
aggtctatttgcttc

SEQ ID NO: 3904 - DNA, 15 bp, Homo sapiens
aaggtctatttgctt

SEQ ID NO: 3905 - DNA, 15 bp, Homo sapiens
gaaggtctatttgct

SEQ ID NO: 3906 - DNA, 15 bp, Homo sapiens
tgaaggtctatttgc

SEQ ID NO: 3907 - DNA, 15 bp, Homo sapiens
gtgaaggtctatttg

SEQ ID NO: 3908 - DNA, 15 bp, Homo sapiens
ggtgaaggtctattt

SEQ ID NO: 3909 - DNA, 15 bp, Homo sapiens
tggtgaaggtctatt

SEQ ID NO: 3910 - DNA, 15 bp, Homo sapiens
atggtgaaggtctat

SEQ ID NO: 3911 - DNA, 15 bp, Homo sapiens
aatggtgaaggtcta

SEQ ID NO: 3912 - DNA, 15 bp, Homo sapiens
gaatggtgaaggtct

SEQ ID NO: 3913 - DNA, 15 bp, Homo sapiens
agaatggtgaaggtc

SEQ ID NO: 3914 - DNA, 15 bp, Homo sapiens
cagaatggtgaaggt

SEQ ID NO: 3915 - DNA, 15 bp, Homo sapiens
tcagaatggtgaagg

SEQ ID NO: 3916 - DNA, 15 bp, Homo sapiens
atcagaatggtgaag

SEQ ID NO: 3917 - DNA, 15 bp, Homo sapiens
aatcagaatggtgaa

SEQ ID NO: 3918 - DNA, 15 bp, Homo sapiens
aaatcagaatggtga

SEQ ID NO: 3919 - DNA, 15 bp, Homo sapiens
gaaatcagaatggtg

SEQ ID NO: 3920 - DNA, 15 bp, Homo sapiens
ggaaatcagaatggt

SEQ ID NO: 3921 - DNA, 15 bp, Homo sapiens
gggaaatcagaatgg

SEQ ID NO: 3922 - DNA, 15 bp, Homo sapiens
tgggaaatcagaatg

SEQ ID NO: 3923 - DNA, 15 bp, Homo sapiens
atgggaaatcagaat

SEQ ID NO: 3924 - DNA, 15 bp, Homo sapiens
gatgggaaatcagaa

SEQ ID NO: 3925 - DNA, 15 bp, Homo sapiens
tgatgggaaatcaga

SEQ ID NO: 3926 - DNA, 15 bp, Homo sapiens
gtgatgggaaatcag

SEQ ID NO: 3927 - DNA, 15 bp, Homo sapiens
ggtgatgggaaatca

SEQ ID NO: 3928 - DNA, 15 bp, Homo sapiens
tggtgatgggaaatc

SEQ ID NO: 3929 - DNA, 15 bp, Homo sapiens
ctggtgatgggaaat

SEQ ID NO: 3930 - DNA, 15 bp, Homo sapiens
tctggtgatgggaaa

SEQ ID NO: 3931 - DNA, 15 bp, Homo sapiens
ttctggtgatgggaa

SEQ ID NO: 3932 - DNA, 15 bp, Homo sapiens
attctggtgatggga

SEQ ID NO: 3933 - DNA, 15 bp, Homo sapiens
cattctggtgatggg

SEQ ID NO: 3934 - DNA, 15 bp, Homo sapiens
tcattctggtgatgg

SEQ ID NO: 3935 - DNA, 15 bp, Homo sapiens
gtcattctggtgatg

SEQ ID NO: 3936 - DNA, 15 bp, Homo sapiens
ggtcattctggtgat

SEQ ID NO: 3937 - DNA, 15 bp, Homo sapiens
cggtcattctggtga

SEQ ID NO: 3938 - DNA, 15 bp, Homo sapiens
tcggtcattctggtg

SEQ ID NO: 3939 - DNA, 15 bp, Homo sapiens
atcggtcattctggt

SEQ ID NO: 3940 - DNA, 15 bp, Homo sapiens
tatcggtcattctgg

SEQ ID NO: 3941 - DNA, 15 bp, Homo sapiens
gtatcggtcattctg

SEQ ID NO: 3942 - DNA, 15 bp, Homo sapiens
tgtatcggtcattct

SEQ ID NO: 3943 - DNA, 15 bp, Homo sapiens
atgtatcggtcattc

SEQ ID NO: 3944 - DNA, 15 bp, Homo sapiens
catgtatcggtcatt

SEQ ID NO: 3945 - DNA, 15 bp, Homo sapiens
ccatgtatcggtcat

SEQ ID NO: 3946 - DNA, 15 bp, Homo sapiens
cccatgtatcggtca

SEQ ID NO: 3947 - DNA, 15 bp, Homo sapiens
ccccatgtatcggtc

SEQ ID NO: 3948 - DNA, 15 bp, Homo sapiens
tccccatgtatcggt

SEQ ID NO: 3949 - DNA, 15 bp, Homo sapiens
gtccccatgtatcgg

SEQ ID NO: 3950 - DNA, 15 bp, Homo sapiens
agtccccatgtatcg

SEQ ID NO: 3951 - DNA, 15 bp, Homo sapiens
cagtccccatgtatc

SEQ ID NO: 3952 - DNA, 15 bp, Homo sapiens
acagtccccatgtat

SEQ ID NO: 3953 - DNA, 15 bp, Homo sapiens
aacagtccccatgta

SEQ ID NO: 3954 - DNA, 15 bp, Homo sapiens
caacagtccccatgt

SEQ ID NO: 3955 - DNA, 15 bp, Homo sapiens
ccaacagtccccatg

SEQ ID NO: 3956 - DNA, 15 bp, Homo sapiens
accaacagtccccat

SEQ ID NO: 3957 - DNA, 15 bp, Homo sapiens
aaccaacagtcccca

SEQ ID NO: 3958 - DNA, 15 bp, Homo sapiens
tctaaatcatcaaac

SEQ ID NO: 3959 - DNA, 15 bp, Homo sapiens
ttctaaatcatcaaa

SEQ ID NO: 3960 - DNA, 15 bp, Homo sapiens
cttctaaatcatcaa

SEQ ID NO: 3961 - DNA, 15 bp, Homo sapiens
ccttctaaatcatca

SEQ ID NO: 3962 - DNA, 15 bp, Homo sapiens
gccttctaaatcatc

SEQ ID NO: 3963 - DNA, 15 bp, Homo sapiens
tgccttctaaatcat

SEQ ID NO: 3964 - DNA, 15 bp, Homo sapiens
gtgccttctaaatca

SEQ ID NO: 3965 - DNA, 15 bp, Homo sapiens
agtgccttctaaatc

SEQ ID NO: 3966 - DNA, 15 bp, Homo sapiens
gagtgccttctaaat

SEQ ID NO: 3967 - DNA, 15 bp, Homo sapiens
agagtgccttctaaa

SEQ ID NO: 3968 - DNA, 15 bp, Homo sapiens
tagagtgccttctaa

SEQ ID NO: 3969 - DNA, 15 bp, Homo sapiens
ttagagtgccttcta

SEQ ID NO: 3970 - DNA, 15 bp, Homo sapiens
tttagagtgccttct

SEQ ID NO: 3971 - DNA, 15 bp, Homo sapiens
atttagagtgccttc

SEQ ID NO: 3972 - DNA, 15 bp, Homo sapiens
gatttagagtgcctt

SEQ ID NO: 3973 - DNA, 15 bp, Homo sapiens
tgatttagagtgcct

SEQ ID NO: 3974 - DNA, 15 bp, Homo sapiens
atgatttagagtgcc

SEQ ID NO: 3975 - DNA, 15 bp, Homo sapiens
gatgatttagagtgc

SEQ ID NO: 3976 - DNA, 15 bp, Homo sapiens
tgatgatttagagtg

SEQ ID NO: 3977 - DNA, 15 bp, Homo sapiens
atgatgatttagagt

SEQ ID NO: 3978 - DNA, 15 bp, Homo sapiens
tatgatgatttagag

SEQ ID NO: 3979 - DNA, 15 bp, Homo sapiens
atatgatgatttaga

SEQ ID NO: 3980 - DNA, 15 bp, Homo sapiens
catatgatgatttag

SEQ ID NO: 3981 - DNA, 15 bp, Homo sapiens
acatatgatgattta

SEQ ID NO: 3982 - DNA, 15 bp, Homo sapiens
cacatatgatgattt

SEQ ID NO: 3983 - DNA, 15 bp, Homo sapiens
tcacatatgatgatt

SEQ ID NO: 3984 - DNA, 15 bp, Homo sapiens
atcacatatgatgat

SEQ ID NO: 3985 - DNA, 15 bp, Homo sapiens
gatcacatatgatga

SEQ ID NO: 3986 - DNA, 15 bp, Homo sapiens
tgatcacatatgatg

SEQ ID NO: 3987 - DNA, 15 bp, Homo sapiens
ctgatcacatatgat

SEQ ID NO: 3988 - DNA, 15 bp, Homo sapiens
cctgatcacatatga

SEQ ID NO: 3989 - DNA, 15 bp, Homo sapiens
gcctgatcacatatg

SEQ ID NO: 3990 - DNA, 15 bp, Homo sapiens
tgcctgatcacatat

SEQ ID NO: 3991 - DNA, 15 bp, Homo sapiens
gtgcctgatcacata

SEQ ID NO: 3992 - DNA, 15 bp, Homo sapiens
agtgcctgatcacat

SEQ ID NO: 3993 - DNA, 15 bp, Homo sapiens
cagtgcctgatcaca

SEQ ID NO: 3994 - DNA, 15 bp, Homo sapiens
acagtgcctgatcac

SEQ ID NO: 3995 - DNA, 15 bp, Homo sapiens
tacagtgcctgatca

SEQ ID NO: 3996 - DNA, 15 bp, Homo sapiens
atacagtgcctgatc

SEQ ID NO: 3997 - DNA, 15 bp, Homo sapiens
aatacagtgcctgat

SEQ ID NO: 3998 - DNA, 15 bp, Homo sapiens
caatacagtgcctga

SEQ ID NO: 3999 - DNA, 15 bp, Homo sapiens
acaatacagtgcctg

SEQ ID NO: 4000 - DNA, 15 bp, Homo sapiens
tacaatacagtgcct

SEQ ID NO: 4001 - DNA, 15 bp, Homo sapiens
ttacaatacagtgcc

SEQ ID NO: 4002 - DNA, 15 bp, Homo sapiens
attacaatacagtgc

SEQ ID NO: 4003 - DNA, 15 bp, Homo sapiens
aattacaatacagtg

SEQ ID NO: 4004 - DNA, 15 bp, Homo sapiens
caattacaatacagt

SEQ ID NO: 4005 - DNA, 15 bp, Homo sapiens
acaattacaatacag

SEQ ID NO: 4006 - DNA, 15 bp, Homo sapiens
tacaattacaataca

SEQ ID NO: 4007 - DNA, 15 bp, Homo sapiens
gtacaattacaatac

SEQ ID NO: 4008 - DNA, 15 bp, Homo sapiens
agtacaattacaata

SEQ ID NO: 4009 - DNA, 15 bp, Homo sapiens
cagtacaattacaat

SEQ ID NO: 4010 - DNA, 15 bp, Homo sapiens
acagtacaattacaa

SEQ ID NO: 4011 - DNA, 15 bp, Homo sapiens
tacagtacaattaca

SEQ ID NO: 4012 - DNA, 15 bp, Homo sapiens
ctacagtacaattac

SEQ ID NO: 4013 - DNA, 15 bp, Homo sapiens
cctacagtacaatta

SEQ ID NO: 4014 - DNA, 15 bp, Homo sapiens
tcctacagtacaatt

SEQ ID NO: 4015 - DNA, 15 bp, Homo sapiens
atcctacagtacaat

SEQ ID NO: 4016 - DNA, 15 bp, Homo sapiens
aatcctacagtacaa

SEQ ID NO: 4017 - DNA, 15 bp, Homo sapiens
aaatcctacagtaca

SEQ ID NO: 4018 - DNA, 15 bp, Homo sapiens
aaaatcctacagtac

SEQ ID NO: 4019 - DNA, 15 bp, Homo sapiens
gaaaatcctacagta

SEQ ID NO: 4020 - DNA, 15 bp, Homo sapiens
agaaaatcctacagt

SEQ ID NO: 4021 - DNA, 15 bp, Homo sapiens
tagaaaatcctacag

SEQ ID NO: 4022 - DNA, 15 bp, Homo sapiens
gtagaaaatcctaca

SEQ ID NO: 4023 - DNA, 15 bp, Homo sapiens
agtagaaaatcctac

SEQ ID NO: 4024 - DNA, 15 bp, Homo sapiens
aagtagaaaatccta

SEQ ID NO: 4025 - DNA, 15 bp, Homo sapiens
aaagtagaaaatcct

SEQ ID NO: 4026 - DNA, 15 bp, Homo sapiens
taaagtagaaaatcc

SEQ ID NO: 4027 - DNA, 15 bp, Homo sapiens
ctaaagtagaaaatc

SEQ ID NO: 4028 - DNA, 15 bp, Homo sapiens
cctaaagtagaaaat

SEQ ID NO: 4029 - DNA, 15 bp, Homo sapiens
tcctaaagtagaaaa

SEQ ID NO: 4030 - DNA, 15 bp, Homo sapiens
atcctaaagtagaaa

SEQ ID NO: 4031 - DNA, 15 bp, Homo sapiens
gatcctaaagtagaa

SEQ ID NO: 4032 - DNA, 15 bp, Homo sapiens
cgatcctaaagtaga

SEQ ID NO: 4033 - DNA, 15 bp, Homo sapiens
acgatcctaaagtag

SEQ ID NO: 4034 - DNA, 15 bp, Homo sapiens
aacgatcctaaagta

SEQ ID NO: 4035 - DNA, 15 bp, Homo sapiens
caacgatcctaaagt

SEQ ID NO: 4036 - DNA, 15 bp, Homo sapiens
ccaacgatcctaaag

SEQ ID NO: 4037 - DNA, 15 bp, Homo sapiens
cccaacgatcctaaa

SEQ ID NO: 4038 - DNA, 15 bp, Homo sapiens
tcccaacgatcctaa

SEQ ID NO: 4039 - DNA, 15 bp, Homo sapiens
ctcccaacgatccta

SEQ ID NO: 4040 - DNA, 15 bp, Homo sapiens
actcccaacgatcct

SEQ ID NO: 4041 - DNA, 15 bp, Homo sapiens
cactcccaacgatcc

SEQ ID NO: 4042 - DNA, 15 bp, Homo sapiens
acactcccaacgatc

SEQ ID NO: 4043 - DNA, 15 bp, Homo sapiens
aacactcccaacgat

SEQ ID NO: 4044 - DNA, 15 bp, Homo sapiens
aaacactcccaacga

SEQ ID NO: 4045 - DNA, 15 bp, Homo sapiens
caaacactcccaacg

SEQ ID NO: 4046 - DNA, 15 bp, Homo sapiens
acaaacactcccaac

SEQ ID NO: 4047 - DNA, 15 bp, Homo sapiens
aacaaacactcccaa

SEQ ID NO: 4048 - DNA, 15 bp, Homo sapiens
taacaaacactccca

SEQ ID NO: 4049 - DNA, 15 bp, Homo sapiens
ttaacaaacactccc

SEQ ID NO: 4050 - DNA, 15 bp, Homo sapiens
attaacaaacactcc

SEQ ID NO: 4051 - DNA, 15 bp, Homo sapiens
tattaacaaacactc

SEQ ID NO: 4052 - DNA, 15 bp, Homo sapiens
ctattaacaaacact

SEQ ID NO: 4053 - DNA, 15 bp, Homo sapiens
tctattaacaaacac

SEQ ID NO: 4054 - DNA, 15 bp, Homo sapiens
ctctattaacaaaca

SEQ ID NO: 4055 - DNA, 15 bp, Homo sapiens
actctattaacaaac

SEQ ID NO: 4056 - DNA, 15 bp, Homo sapiens
gactctattaacaaa

SEQ ID NO: 4057 - DNA, 15 bp, Homo sapiens
agactctattaacaa

SEQ ID NO: 4058 - DNA, 15 bp, Homo sapiens
cagactctattaaca

SEQ ID NO: 4059 - DNA, 15 bp, Homo sapiens
acagactctattaac

SEQ ID NO: 4060 - DNA, 15 bp, Homo sapiens
aacagactctattaa

SEQ ID NO: 4061 - DNA, 15 bp, Homo sapiens
taacagactctatta

SEQ ID NO: 4062 - DNA, 15 bp, Homo sapiens
ctaacagactctatt

SEQ ID NO: 4063 - DNA, 15 bp, Homo sapiens
tctaacagactctat

SEQ ID NO: 4064 - DNA, 15 bp, Homo sapiens
ttctaacagactcta

SEQ ID NO: 4065 - DNA, 15 bp, Homo sapiens
attctaacagactct

SEQ ID NO: 4066 - DNA, 15 bp, Homo sapiens
aattctaacagactc

SEQ ID NO: 4067 - DNA, 15 bp, Homo sapiens
gaattctaacagact

SEQ ID NO: 4068 - DNA, 15 bp, Homo sapiens
agaattctaacagac

SEQ ID NO: 4069 - DNA, 15 bp, Homo sapiens
tagaattctaacaga

SEQ ID NO: 4070 - DNA, 15 bp, Homo sapiens
ttagaattctaacag

SEQ ID NO: 4071 - DNA, 15 bp, Homo sapiens
tttagaattctaaca

SEQ ID NO: 4072 - DNA, 15 bp, Homo sapiens
gtttagaattctaac

SEQ ID NO: 4073 - DNA, 15 bp, Homo sapiens
tgtttagaattctaa

SEQ ID NO: 4074 - DNA, 15 bp, Homo sapiens
ttgtttagaattcta

SEQ ID NO: 4075 - DNA, 15 bp, Homo sapiens
cttgtttagaattct

SEQ ID NO: 4076 - DNA, 15 bp, Homo sapiens
tcttgtttagaattc

SEQ ID NO: 4077 - DNA, 15 bp, Homo sapiens
ttcttgtttagaatt

SEQ ID NO: 4078 - DNA, 15 bp, Homo sapiens
attcttgtttagaat

SEQ ID NO: 4079 - DNA, 15 bp, Homo sapiens
gattcttgtttagaa

SEQ ID NO: 4080 - DNA, 15 bp, Homo sapiens
tgattcttgtttaga

SEQ ID NO: 4081 - DNA, 15 bp, Homo sapiens
ctgattcttgtttag

SEQ ID NO: 4082 - DNA, 15 bp, Homo sapiens
tctgattcttgttta

SEQ ID NO: 4083 - DNA, 15 bp, Homo sapiens
ctctgattcttgttt

SEQ ID NO: 4084 - DNA, 15 bp, Homo sapiens
cctctgattcttgtt

SEQ ID NO: 4085 - DNA, 15 bp, Homo sapiens
acctctgattcttgt

SEQ ID NO: 4086 - DNA, 15 bp, Homo sapiens
cacctctgattcttg

SEQ ID NO: 4087 - DNA, 15 bp, Homo sapiens
tcacctctgattctt

SEQ ID NO: 4088 - DNA, 15 bp, Homo sapiens
atcacctctgattct

SEQ ID NO: 4089 - DNA, 15 bp, Homo sapiens
catcacctctgattc

SEQ ID NO: 4090 - DNA, 15 bp, Homo sapiens
acatcacctctgatt

SEQ ID NO: 4091 - DNA, 15 bp, Homo sapiens
tacatcacctctgat

SEQ ID NO: 4092 - DNA, 15 bp, Homo sapiens
ttacatcacctctga

SEQ ID NO: 4093 - DNA, 15 bp, Homo sapiens
attacatcacctctg

SEQ ID NO: 4094 - DNA, 15 bp, Homo sapiens
gattacatcacctct

SEQ ID NO: 4095 - DNA, 15 bp, Homo sapiens
agattacatcacctc

SEQ ID NO: 4096 - DNA, 15 bp, Homo sapiens
cagattacatcacct

SEQ ID NO: 4097 - DNA, 15 bp, Homo sapiens
tcagattacatcacc

SEQ ID NO: 4098 - DNA, 15 bp, Homo sapiens
gtcagattacatcac

SEQ ID NO: 4099 - DNA, 15 bp, Homo sapiens
agtcagattacatca

SEQ ID NO: 4100 - DNA, 15 bp, Homo sapiens
aagtcagattacatc

SEQ ID NO: 4101 - DNA, 15 bp, Homo sapiens
aaagtcagattacat

SEQ ID NO: 4102 - DNA, 15 bp, Homo sapiens
gaaagtcagattaca

SEQ ID NO: 4103 - DNA, 15 bp, Homo sapiens
agaaagtcagattac

SEQ ID NO: 4104 - DNA, 15 bp, Homo sapiens
aagaaagtcagatta

SEQ ID NO: 4105 - DNA, 15 bp, Homo sapiens
taagaaagtcagatt

SEQ ID NO: 4106 - DNA, 15 bp, Homo sapiens
gtaagaaagtcagat

SEQ ID NO: 4107 - DNA, 15 bp, Homo sapiens
ggtaagaaagtcaga

SEQ ID NO: 4108 - DNA, 15 bp, Homo sapiens
gggtaagaaagtcag

SEQ ID NO: 4109 - DNA, 15 bp, Homo sapiens
agggtaagaaagtca

SEQ ID NO: 4110 - DNA, 15 bp, Homo sapiens
cagggtaagaaagtc

SEQ ID NO: 4111 - DNA, 15 bp, Homo sapiens
gcagggtaagaaagt

SEQ ID NO: 4112 - DNA, 15 bp, Homo sapiens
agcagggtaagaaag

SEQ ID NO: 4113 - DNA, 15 bp, Homo sapiens
tagcagggtaagaaa

SEQ ID NO: 4114 - DNA, 15 bp, Homo sapiens
ttagcagggtaagaa

SEQ ID NO: 4115 - DNA, 15 bp, Homo sapiens
tttagcagggtaaga

SEQ ID NO: 4116 - DNA, 15 bp, Homo sapiens
atttagcagggtaag

SEQ ID NO: 4117 - DNA, 15 bp, Homo sapiens
catttagcagggtaa

SEQ ID NO: 4118 - DNA, 15 bp, Homo sapiens
ccatttagcagggta

SEQ ID NO: 4119 - DNA, 15 bp, Homo sapiens
gccatttagcagggt

SEQ ID NO: 4120 - DNA, 15 bp, Homo sapiens
tgccatttagcaggg

SEQ ID NO: 4121 - DNA, 15 bp, Homo sapiens
ttgccatttagcagg

SEQ ID NO: 4122 - DNA, 15 bp, Homo sapiens
gttgccatttagcag

SEQ ID NO: 4123 - DNA, 15 bp, Homo sapiens
ggttgccatttagca

SEQ ID NO: 4124 - DNA, 15 bp, Homo sapiens
tggttgccatttagc

SEQ ID NO: 4125 - DNA, 15 bp, Homo sapiens
gtggttgccatttag

SEQ ID NO: 4126 - DNA, 15 bp, Homo sapiens
agtggttgccattta

SEQ ID NO: 4127 - DNA, 15 bp, Homo sapiens
tagtggttgccattt

SEQ ID NO: 4128 - DNA, 15 bp, Homo sapiens
ctagtggttgccatt

SEQ ID NO: 4129 - DNA, 15 bp, Homo sapiens
actagtggttgccat

SEQ ID NO: 4130 - DNA, 15 bp, Homo sapiens
tactagtggttgcca

SEQ ID NO: 4131 - DNA, 15 bp, Homo sapiens
gtactagtggttgcc

SEQ ID NO: 4132 - DNA, 15 bp, Homo sapiens
tgtactagtggttgc

SEQ ID NO: 4133 - DNA, 15 bp, Homo sapiens
ctgtactagtggttg

SEQ ID NO: 4134 - DNA, 15 bp, Homo sapiens
gctgtactagtggtt

SEQ ID NO: 4135 - DNA, 15 bp, Homo sapiens
agctgtactagtggt

SEQ ID NO: 4136 - DNA, 15 bp, Homo sapiens
cagctgtactagtgg

SEQ ID NO: 4137 - DNA, 15 bp, Homo sapiens
acagctgtactagtg

SEQ ID NO: 4138 - DNA, 15 bp, Homo sapiens
gacagctgtactagt

SEQ ID NO: 4139 - DNA, 15 bp, Homo sapiens
agacagctgtactag

SEQ ID NO: 4140 - DNA, 15 bp, Homo sapiens
aagacagctgtacta

SEQ ID NO: 4141 - DNA, 15 bp, Homo sapiens
caagacagctgtact

SEQ ID NO: 4142 - DNA, 15 bp, Homo sapiens
ccaagacagctgtac

SEQ ID NO: 4143 - DNA, 15 bp, Homo sapiens
accaagacagctgta

SEQ ID NO: 4144 - DNA, 15 bp, Homo sapiens
taccaagacagctgt

SEQ ID NO: 4145 - DNA, 15 bp, Homo sapiens
ttaccaagacagctg

SEQ ID NO: 4146 - DNA, 15 bp, Homo sapiens
gttaccaagacagct

SEQ ID NO: 4147 - DNA, 15 bp, Homo sapiens
tgttaccaagacagc

SEQ ID NO: 4148 - DNA, 15 bp, Homo sapiens
ctgttaccaagacag

SEQ ID NO: 4149 - DNA, 15 bp, Homo sapiens
actgttaccaagaca

SEQ ID NO: 4150 - DNA, 15 bp, Homo sapiens
cactgttaccaagac

SEQ ID NO: 4151 - DNA, 15 bp, Homo sapiens
ccactgttaccaaga

SEQ ID NO: 4152 - DNA, 15 bp, Homo sapiens
cccactgttaccaag

SEQ ID NO: 4153 - DNA, 15 bp, Homo sapiens
ccccactgttaccaa

SEQ ID NO: 4154 - DNA, 15 bp, Homo sapiens
cccccactgttacca

SEQ ID NO: 4155 - DNA, 15 bp, Homo sapiens
tcccccactgttacc

SEQ ID NO: 4156 - DNA, 15 bp, Homo sapiens
atcccccactgttac

SEQ ID NO: 4157 - DNA, 15 bp, Homo sapiens
aatcccccactgtta

SEQ ID NO: 4158 - DNA, 15 bp, Homo sapiens
gaatcccccactgtt

SEQ ID NO: 4159 - DNA, 15 bp, Homo sapiens
tgaatcccccactgt

SEQ ID NO: 4160 - DNA, 15 bp, Homo sapiens
atgaatcccccactg

SEQ ID NO: 4161 - DNA, 15 bp, Homo sapiens
aatgaatcccccact

SEQ ID NO: 4162 - DNA, 15 bp, Homo sapiens
taatgaatcccccac

SEQ ID NO: 4163 - DNA, 15 bp, Homo sapiens
ctaatgaatccccca

SEQ ID NO: 4164 - DNA, 15 bp, Homo sapiens
cctaatgaatccccc

SEQ ID NO: 4165 - DNA, 15 bp, Homo sapiens
tcctaatgaatcccc

SEQ ID NO: 4166 - DNA, 15 bp, Homo sapiens
gtcctaatgaatccc

SEQ ID NO: 4167 - DNA, 15 bp, Homo sapiens
ggtcctaatgaatcc

SEQ ID NO: 4168 - DNA, 15 bp, Homo sapiens
aggtcctaatgaatc

SEQ ID NO: 4169 - DNA, 15 bp, Homo sapiens
aaggtcctaatgaat

SEQ ID NO: 4170 - DNA, 15 bp, Homo sapiens
gaaggtcctaatgaa

SEQ ID NO: 4171 - DNA, 15 bp, Homo sapiens
agaaggtcctaatga

SEQ ID NO: 4172 - DNA, 15 bp, Homo sapiens
aagaaggtcctaatg

SEQ ID NO: 4173 - DNA, 15 bp, Homo sapiens
gaagaaggtcctaat

SEQ ID NO: 4174 - DNA, 15 bp, Homo sapiens
tgaagaaggtcctaa

SEQ ID NO: 4175 - DNA, 15 bp, Homo sapiens
ctgaagaaggtccta

SEQ ID NO: 4176 - DNA, 15 bp, Homo sapiens
tctgaagaaggtcct

SEQ ID NO: 4177 - DNA, 15 bp, Homo sapiens
atctgaagaaggtcc

SEQ ID NO: 4178 - DNA, 15 bp, Homo sapiens
tatctgaagaaggtc

SEQ ID NO: 4179 - DNA, 15 bp, Homo sapiens
gtatctgaagaaggt

SEQ ID NO: 4180 - DNA, 15 bp, Homo sapiens
ggtatctgaagaagg

SEQ ID NO: 4181 - DNA, 15 bp, Homo sapiens
tggtatctgaagaag

SEQ ID NO: 4182 - DNA, 15 bp, Homo sapiens
gtggtatctgaagaa

SEQ ID NO: 4183 - DNA, 15 bp, Homo sapiens
tgtggtatctgaaga

SEQ ID NO: 4184 - DNA, 15 bp, Homo sapiens
ctgtggtatctgaag

SEQ ID NO: 4185 - DNA, 15 bp, Homo sapiens
tctgtggtatctgaa

SEQ ID NO: 4186 - DNA, 15 bp, Homo sapiens
atctgtggtatctga

SEQ ID NO: 4187 - DNA, 15 bp, Homo sapiens
tatctgtggtatctg

SEQ ID NO: 4188 - DNA, 15 bp, Homo sapiens
atatctgtggtatct

SEQ ID NO: 4189 - DNA, 15 bp, Homo sapiens
gatatctgtggtatc

SEQ ID NO: 4190 - DNA, 15 bp, Homo sapiens
tgatatctgtggtat

SEQ ID NO: 4191 - DNA, 15 bp, Homo sapiens
ttgatatctgtggta

SEQ ID NO: 4192 - DNA, 15 bp, Homo sapiens
cttgatatctgtggt

SEQ ID NO: 4193 - DNA, 15 bp, Homo sapiens
tcttgatatctgtgg

SEQ ID NO: 4194 - DNA, 15 bp, Homo sapiens
atcttgatatctgtg

SEQ ID NO: 4195 - DNA, 15 bp, Homo sapiens
gatcttgatatctgt

SEQ ID NO: 4196 - DNA, 15 bp, Homo sapiens
agatcttgatatctg

SEQ ID NO: 4197 - DNA, 15 bp, Homo sapiens
cagatcttgatatct

SEQ ID NO: 4198 - DNA, 15 bp, Homo sapiens
gcagatcttgatatc

SEQ ID NO: 4199 - DNA, 15 bp, Homo sapiens
tgcagatcttgatat

SEQ ID NO: 4200 - DNA, 15 bp, Homo sapiens
ctgcagatcttgata

SEQ ID NO: 4201 - DNA, 15 bp, Homo sapiens
tctgcagatcttgat

SEQ ID NO: 4202 - DNA, 15 bp, Homo sapiens
atctgcagatcttga

SEQ ID NO: 4203 - DNA, 15 bp, Homo sapiens
catctgcagatcttg

SEQ ID NO: 4204 - DNA, 15 bp, Homo sapiens
gcatctgcagatctt

SEQ ID NO: 4205 - DNA, 15 bp, Homo sapiens
agcatctgcagatct

SEQ ID NO: 4206 - DNA, 15 bp, Homo sapiens
gagcatctgcagatc

SEQ ID NO: 4207 - DNA, 15 bp, Homo sapiens
tgagcatctgcagat

SEQ ID NO: 4208 - DNA, 15 bp, Homo sapiens
ttgagcatctgcaga

SEQ ID NO: 4209 - DNA, 15 bp, Homo sapiens
cttgagcatctgcag

SEQ ID NO: 4210 - DNA, 15 bp, Homo sapiens
acttgagcatctgca

SEQ ID NO: 4211 - DNA, 15 bp, Homo sapiens
gacttgagcatctgc

SEQ ID NO: 4212 - DNA, 15 bp, Homo sapiens
agacttgagcatctg

SEQ ID NO: 4213 - DNA, 15 bp, Homo sapiens
gagacttgagcatct

SEQ ID NO: 4214 - DNA, 15 bp, Homo sapiens
agagacttgagcatc

SEQ ID NO: 4215 - DNA, 15 bp, Homo sapiens
cagagacttgagcat

SEQ ID NO: 4216 - DNA, 15 bp, Homo sapiens
tcagagacttgagca

SEQ ID NO: 4217 - DNA, 15 bp, Homo sapiens
atcagagacttgagc

SEQ ID NO: 4218 - DNA, 15 bp, Homo sapiens
tatcagagacttgag

SEQ ID NO: 4219 - DNA, 15 bp, Homo sapiens
atatcagagacttga

SEQ ID NO: 4220 - DNA, 15 bp, Homo sapiens
tatatcagagacttg

SEQ ID NO: 4221 - DNA, 15 bp, Homo sapiens
ttatatcagagactt

SEQ ID NO: 4222 - DNA, 15 bp, Homo sapiens
tttatatcagagact

SEQ ID NO: 4223 - DNA, 15 bp, Homo sapiens
ttttatatcagagac

SEQ ID NO: 4224 - DNA, 15 bp, Homo sapiens
attttatatcagaga

SEQ ID NO: 4225 - DNA, 15 bp, Homo sapiens
cattttatatcagag

SEQ ID NO: 4226 - DNA, 15 bp, Homo sapiens
tcattttatatcaga

SEQ ID NO: 4227 - DNA, 15 bp, Homo sapiens
atcattttatatcag

SEQ ID NO: 4228 - DNA, 15 bp, Homo sapiens
tatcattttatatca

SEQ ID NO: 4229 - DNA, 15 bp, Homo sapiens
atatcattttatatc

SEQ ID NO: 4230 - DNA, 15 bp, Homo sapiens
tatatcattttatat

SEQ ID NO: 4231 - DNA, 15 bp, Homo sapiens
ctatatcattttata

SEQ ID NO: 4232 - DNA, 15 bp, Homo sapiens
actatatcattttat

SEQ ID NO: 4233 - DNA, 15 bp, Homo sapiens
tactatatcatttta

SEQ ID NO: 4234 - DNA, 15 bp, Homo sapiens
atactatatcatttt

SEQ ID NO: 4235 - DNA, 15 bp, Homo sapiens
aatactatatcattt

SEQ ID NO: 4236 - DNA, 15 bp, Homo sapiens
caatactatatcatt

SEQ ID NO: 4237 - DNA, 15 bp, Homo sapiens
ccaatactatatcat

SEQ ID NO: 4238 - DNA, 15 bp, Homo sapiens
gccaatactatatca

SEQ ID NO: 4239 - DNA, 15 bp, Homo sapiens
tgccaatactatatc

SEQ ID NO: 4240 - DNA, 15 bp, Homo sapiens
atgccaatactatat

SEQ ID NO: 4241 - DNA, 15 bp, Homo sapiens
tatgccaatactata

SEQ ID NO: 4242 - DNA, 15 bp, Homo sapiens
ttatgccaatactat

SEQ ID NO: 4243 - DNA, 15 bp, Homo sapiens
tttatgccaatacta

SEQ ID NO: 4244 - DNA, 15 bp, Homo sapiens
ttttatgccaatact

SEQ ID NO: 4245 - DNA, 15 bp, Homo sapiens
gttttatgccaatac

SEQ ID NO: 4246 - DNA, 15 bp, Homo sapiens
ggttttatgccaata

SEQ ID NO: 4247 - DNA, 15 bp, Homo sapiens
aggttttatgccaat

SEQ ID NO: 4248 - DNA, 15 bp, Homo sapiens
taggttttatgccaa

SEQ ID NO: 4249 - DNA, 15 bp, Homo sapiens
ataggttttatgcca

SEQ ID NO: 4250 - DNA, 15 bp, Homo sapiens
cataggttttatgcc

SEQ ID NO: 4251 - DNA, 15 bp, Homo sapiens
gcataggttttatgc

SEQ ID NO: 4252 - DNA, 15 bp, Homo sapiens
tgcataggttttatg

SEQ ID NO: 4253 - DNA, 15 bp, Homo sapiens
atgcataggttttat

SEQ ID NO: 4254 - DNA, 15 bp, Homo sapiens
tatgcataggtttta

SEQ ID NO: 4255 - DNA, 15 bp, Homo sapiens
atatgcataggtttt

SEQ ID NO: 4256 - DNA, 15 bp, Homo sapiens
gatatgcataggttt

SEQ ID NO: 4257 - DNA, 15 bp, Homo sapiens
ggatatgcataggtt

SEQ ID NO: 4258 - DNA, 15 bp, Homo sapiens
gggatatgcataggt

SEQ ID NO: 4259 - DNA, 15 bp, Homo sapiens
ggggatatgcatagg

SEQ ID NO: 4260 - DNA, 15 bp, Homo sapiens
gggggatatgcatag

SEQ ID NO: 4261 - DNA, 15 bp, Homo sapiens
ggggggatatgcata

SEQ ID NO: 4262 - DNA, 15 bp, Homo sapiens
aggggggatatgcat

SEQ ID NO: 4263 - DNA, 15 bp, Homo sapiens
gaggggggatatgca

SEQ ID NO: 4264 - DNA, 15 bp, Homo sapiens
agaggggggatatgc

SEQ ID NO: 4265 - DNA, 15 bp, Homo sapiens
tagaggggggatatg

SEQ ID NO: 4266 - DNA, 15 bp, Homo sapiens
atagaggggggatat

SEQ ID NO: 4267 - DNA, 15 bp, Homo sapiens
tatagaggggggata

SEQ ID NO: 4268 - DNA, 15 bp, Homo sapiens
gtatagaggggggat

SEQ ID NO: 4269 - DNA, 15 bp, Homo sapiens
agtatagagggggga

SEQ ID NO: 4270 - DNA, 15 bp, Homo sapiens
aagtatagagggggg

SEQ ID NO: 4271 - DNA, 15 bp, Homo sapiens
aaagtatagaggggg

SEQ ID NO: 4272 - DNA, 15 bp, Homo sapiens
taaagtatagagggg

SEQ ID NO: 4273 - DNA, 15 bp, Homo sapiens
ttaaagtatagaggg

SEQ ID NO: 4274 - DNA, 15 bp, Homo sapiens
tttaaagtatagagg

SEQ ID NO: 4275 - DNA, 15 bp, Homo sapiens
atttaaagtatagag

SEQ ID NO: 4276 - DNA, 15 bp, Homo sapiens
tatttaaagtataga

SEQ ID NO: 4277 - DNA, 15 bp, Homo sapiens
ttatttaaagtatag

SEQ ID NO: 4278 - DNA, 15 bp, Homo sapiens
attatttaaagtata

SEQ ID NO: 4279 - DNA, 15 bp, Homo sapiens
gattatttaaagtat

SEQ ID NO: 4280 - DNA, 15 bp, Homo sapiens
agattatttaaagta

SEQ ID NO: 4281 - DNA, 15 bp, Homo sapiens
gagattatttaaagt

SEQ ID NO: 4282 - DNA, 15 bp, Homo sapiens
agagattatttaaag

SEQ ID NO: 4283 - DNA, 15 bp, Homo sapiens
tagagattatttaaa

SEQ ID NO: 4284 - DNA, 15 bp, Homo sapiens
ctagagattatttaa

SEQ ID NO: 4285 - DNA, 15 bp, Homo sapiens
tctagagattattta

SEQ ID NO: 4286 - DNA, 15 bp, Homo sapiens
atctagagattattt

SEQ ID NO: 4287 - DNA, 15 bp, Homo sapiens
aatctagagattatt

SEQ ID NO: 4288 - DNA, 15 bp, Homo sapiens
taatctagagattat

SEQ ID NO: 4289 - DNA, 15 bp, Homo sapiens
gtaatctagagatta

SEQ ID NO: 4290 - DNA, 15 bp, Homo sapiens
agtaatctagagatt

SEQ ID NO: 4291 - DNA, 15 bp, Homo sapiens
aagtaatctagagat

SEQ ID NO: 4292 - DNA, 15 bp, Homo sapiens
taagtaatctagaga

SEQ ID NO: 4293 - DNA, 15 bp, Homo sapiens
gtaagtaatctagag

SEQ ID NO: 4294 - DNA, 15 bp, Homo sapiens
tgtaagtaatctaga

SEQ ID NO: 4295 - DNA, 15 bp, Homo sapiens
ttgtaagtaatctag

SEQ ID NO: 4296 - DNA, 15 bp, Homo sapiens
attgtaagtaatcta

SEQ ID NO: 4297 - DNA, 15 bp, Homo sapiens
tattgtaagtaatct

SEQ ID NO: 4298 - DNA, 15 bp, Homo sapiens
atattgtaagtaatc

SEQ ID NO: 4299 - DNA, 15 bp, Homo sapiens
gatattgtaagtaat

SEQ ID NO: 4300 - DNA, 15 bp, Homo sapiens
agatattgtaagtaa

SEQ ID NO: 4301 - DNA, 15 bp, Homo sapiens
cagatattgtaagta

SEQ ID NO: 4302 - DNA, 15 bp, Homo sapiens
tcagatattgtaagt

SEQ ID NO: 4303 - DNA, 15 bp, Homo sapiens
gtcagatattgtaag

SEQ ID NO: 4304 - DNA, 15 bp, Homo sapiens
cgtcagatattgtaa

SEQ ID NO: 4305 - DNA, 15 bp, Homo sapiens
gcgtcagatattgta

SEQ ID NO: 4306 - DNA, 15 bp, Homo sapiens
agcgtcagatattgt

SEQ ID NO: 4307 - DNA, 15 bp, Homo sapiens
tagcgtcagatattg

SEQ ID NO: 4308 - DNA, 15 bp, Homo sapiens
gtagcgtcagatatt

SEQ ID NO: 4309 - DNA, 15 bp, Homo sapiens
cgtagcgtcagatat

SEQ ID NO: 4310 - DNA, 15 bp, Homo sapiens
acgtagcgtcagata

SEQ ID NO: 4311 - DNA, 15 bp, Homo sapiens
tacgtagcgtcagat

SEQ ID NO: 4312 - DNA, 15 bp, Homo sapiens
ttacgtagcgtcaga

SEQ ID NO: 4313 - DNA, 15 bp, Homo sapiens
tttacgtagcgtcag

SEQ ID NO: 4314 - DNA, 15 bp, Homo sapiens
gtttacgtagcgtca

SEQ ID NO: 4315 - DNA, 15 bp, Homo sapiens
tgtttacgtagcgtc

SEQ ID NO: 4316 - DNA, 15 bp, Homo sapiens
ctgtttacgtagcgt

SEQ ID NO: 4317 - DNA, 15 bp, Homo sapiens
actgtttacgtagcg

SEQ ID NO: 4318 - DNA, 15 bp, Homo sapiens
aactgtttacgtagc

SEQ ID NO: 4319 - DNA, 15 bp, Homo sapiens
caactgtttacgtag

SEQ ID NO: 4320 - DNA, 15 bp, Homo sapiens
acaactgtttacgta

SEQ ID NO: 4321 - DNA, 15 bp, Homo sapiens
aacaactgtttacgt

SEQ ID NO: 4322 - DNA, 15 bp, Homo sapiens
taacaactgtttacg

SEQ ID NO: 4323 - DNA, 15 bp, Homo sapiens
ataacaactgtttac

SEQ ID NO: 4324 - DNA, 15 bp, Homo sapiens
tataacaactgttta

SEQ ID NO: 4325 - DNA, 15 bp, Homo sapiens
atataacaactgttt

SEQ ID NO: 4326 - DNA, 15 bp, Homo sapiens
gatataacaactgtt

SEQ ID NO: 4327 - DNA, 15 bp, Homo sapiens
tgatataacaactgt

SEQ ID NO: 4328 - DNA, 15 bp, Homo sapiens
gtgatataacaactg

SEQ ID NO: 4329 - DNA, 15 bp, Homo sapiens
tgtgatataacaact

SEQ ID NO: 4330 - DNA, 15 bp, Homo sapiens
atgtgatataacaac

SEQ ID NO: 4331 - DNA, 15 bp, Homo sapiens
aatgtgatataacaa

SEQ ID NO: 4332 - DNA, 15 bp, Homo sapiens
caatgtgatataaca

SEQ ID NO: 4333 - DNA, 15 bp, Homo sapiens
acaatgtgatataac

SEQ ID NO: 4334 - DNA, 15 bp, Homo sapiens
aacaatgtgatataa

SEQ ID NO: 4335 - DNA, 15 bp, Homo sapiens
aaacaatgtgatata

SEQ ID NO: 4336 - DNA, 15 bp, Homo sapiens
taaacaatgtgatat

SEQ ID NO: 4337 - DNA, 15 bp, Homo sapiens
ctaaacaatgtgata

SEQ ID NO: 4338 - DNA, 15 bp, Homo sapiens
cctaaacaatgtgat

SEQ ID NO: 4339 - DNA, 15 bp, Homo sapiens
ccctaaacaatgtga

SEQ ID NO: 4340 - DNA, 15 bp, Homo sapiens
tccctaaacaatgtg

SEQ ID NO: 4341 - DNA, 15 bp, Homo sapiens
ttccctaaacaatgt

SEQ ID NO: 4342 - DNA, 15 bp, Homo sapiens
attccctaaacaatg

SEQ ID NO: 4343 - DNA, 15 bp, Homo sapiens
tattccctaaacaat

SEQ ID NO: 4344 - DNA, 15 bp, Homo sapiens
ttattccctaaacaa

SEQ ID NO: 4345 - DNA, 15 bp, Homo sapiens
cttattccctaaaca

SEQ ID NO: 4346 - DNA, 15 bp, Homo sapiens
ccttattccctaaac

SEQ ID NO: 4347 - DNA, 15 bp, Homo sapiens
tccttattccctaaa

SEQ ID NO: 4348 - DNA, 15 bp, Homo sapiens
gtccttattccctaa

SEQ ID NO: 4349 - DNA, 15 bp, Homo sapiens
tgtccttattcccta

SEQ ID NO: 4350 - DNA, 15 bp, Homo sapiens
ttgtccttattccct

SEQ ID NO: 4351 - DNA, 15 bp, Homo sapiens
cttgtccttattccc

SEQ ID NO: 4352 - DNA, 15 bp, Homo sapiens
tcttgtccttattcc

SEQ ID NO: 4353 - DNA, 15 bp, Homo sapiens
ttcttgtccttattc

SEQ ID NO: 4354 - DNA, 15 bp, Homo sapiens
tttcttgtccttatt

SEQ ID NO: 4355 - DNA, 15 bp, Homo sapiens
ttttcttgtccttat

SEQ ID NO: 4356 - DNA, 15 bp, Homo sapiens
tttttcttgtcctta

SEQ ID NO: 4357 - DNA, 15 bp, Homo sapiens
ttttttcttgtcctt

SEQ ID NO: 4358 - DNA, 15 bp, Homo sapiens
tttttttcttgtcct

SEQ ID NO: 4359 - DNA, 15 bp, Homo sapiens
atttttttcttgtcc

SEQ ID NO: 4360 - DNA, 15 bp, Homo sapiens
catttttttcttgtc

SEQ ID NO: 4361 - DNA, 15 bp, Homo sapiens
acatttttttcttgt

SEQ ID NO: 4362 - DNA, 15 bp, Homo sapiens
gacatttttttcttg

SEQ ID NO: 4363 - DNA, 15 bp, Homo sapiens
agacatttttttctt

SEQ ID NO: 4364 - DNA, 15 bp, Homo sapiens
cagacatttttttct

SEQ ID NO: 4365 - DNA, 15 bp, Homo sapiens
acagacatttttttc

SEQ ID NO: 4366 - DNA, 15 bp, Homo sapiens
tacagacattttttt

SEQ ID NO: 4367 - DNA, 15 bp, Homo sapiens
gtacagacatttttt

SEQ ID NO: 4368 - DNA, 15 bp, Homo sapiens
tgtacagacattttt

SEQ ID NO: 4369 - DNA, 15 bp, Homo sapiens
atgtacagacatttt

SEQ ID NO: 4370 - DNA, 15 bp, Homo sapiens
catgtacagacattt

SEQ ID NO: 4371 - DNA, 15 bp, Homo sapiens
acatgtacagacatt

SEQ ID NO: 4372 - DNA, 15 bp, Homo sapiens
aacatgtacagacat

SEQ ID NO: 4373 - DNA, 15 bp, Homo sapiens
gaacatgtacagaca

SEQ ID NO: 4374 - DNA, 15 bp, Homo sapiens
agaacatgtacagac

SEQ ID NO: 4375 - DNA, 15 bp, Homo sapiens
tagaacatgtacaga

SEQ ID NO: 4376 - DNA, 15 bp, Homo sapiens
atagaacatgtacag

SEQ ID NO: 4377 - DNA, 15 bp, Homo sapiens
tatagaacatgtaca

SEQ ID NO: 4378 - DNA, 15 bp, Homo sapiens
gtatagaacatgtac

SEQ ID NO: 4379 - DNA, 15 bp, Homo sapiens
tgtatagaacatgta

SEQ ID NO: 4380 - DNA, 15 bp, Homo sapiens
ctgtatagaacatgt

SEQ ID NO: 4381 - DNA, 15 bp, Homo sapiens
tctgtatagaacatg

SEQ ID NO: 4382 - DNA, 15 bp, Homo sapiens
gtctgtatagaacat

SEQ ID NO: 4383 - DNA, 15 bp, Homo sapiens
tgtctgtatagaaca

SEQ ID NO: 4384 - DNA, 15 bp, Homo sapiens
gtgtctgtatagaac

SEQ ID NO: 4385 - DNA, 15 bp, Homo sapiens
cgtgtctgtatagaa

SEQ ID NO: 4386 - DNA, 15 bp, Homo sapiens
tcgtgtctgtataga

SEQ ID NO: 4387 - DNA, 15 bp, Homo sapiens
atcgtgtctgtatag

SEQ ID NO: 4388 - DNA, 15 bp, Homo sapiens
aatcgtgtctgtata

SEQ ID NO: 4389 - DNA, 15 bp, Homo sapiens
aaatcgtgtctgtat

SEQ ID NO: 4390 - DNA, 15 bp, Homo sapiens
aaaatcgtgtctgta

SEQ ID NO: 4391 - DNA, 15 bp, Homo sapiens
aaaaatcgtgtctgt

SEQ ID NO: 4392 - DNA, 15 bp, Homo sapiens
aaaaaatcgtgtctg

SEQ ID NO: 4393 - DNA, 15 bp, Homo sapiens
aaaaaaatcgtgtct

SEQ ID NO: 4394 - DNA, 15 bp, Homo sapiens
gaaaaaaatcgtgtc

SEQ ID NO: 4395 - DNA, 15 bp, Homo sapiens
agaaaaaaatcgtgt

SEQ ID NO: 4396 - DNA, 15 bp, Homo sapiens
cagaaaaaaatcgtg

SEQ ID NO: 4397 - DNA, 15 bp, Homo sapiens
tcagaaaaaaatcgt

SEQ ID NO: 4398 - DNA, 15 bp, Homo sapiens
ctcagaaaaaaatcg

SEQ ID NO: 4399 - DNA, 15 bp, Homo sapiens
actcagaaaaaaatc

SEQ ID NO: 4400 - DNA, 15 bp, Homo sapiens
tactcagaaaaaaat

SEQ ID NO: 4401 - DNA, 15 bp, Homo sapiens
atactcagaaaaaaa

SEQ ID NO: 4402 - DNA, 15 bp, Homo sapiens
aatactcagaaaaaa

SEQ ID NO: 4403 - DNA, 15 bp, Homo sapiens
aaatactcagaaaaa

SEQ ID NO: 4404 - DNA, 15 bp, Homo sapiens
aaaatactcagaaaa

SEQ ID NO: 4405 - DNA, 15 bp, Homo sapiens
gaaaatactcagaaa

SEQ ID NO: 4406 - DNA, 15 bp, Homo sapiens
tgaaaatactcagaa

SEQ ID NO: 4407 - DNA, 15 bp, Homo sapiens
ttgaaaatactcaga

SEQ ID NO: 4408 - DNA, 15 bp, Homo sapiens
attgaaaatactcag

SEQ ID NO: 4409 - DNA, 15 bp, Homo sapiens
gattgaaaatactca

SEQ ID NO: 4410 - DNA, 15 bp, Homo sapiens
agattgaaaatactc

SEQ ID NO: 4411 - DNA, 15 bp, Homo sapiens
cagattgaaaatact

SEQ ID NO: 4412 - DNA, 15 bp, Homo sapiens
gcagattgaaaatac

SEQ ID NO: 4413 - DNA, 15 bp, Homo sapiens
tgcagattgaaaata

SEQ ID NO: 4414 - DNA, 15 bp, Homo sapiens
ctgcagattgaaaat

SEQ ID NO: 4415 - DNA, 15 bp, Homo sapiens
actgcagattgaaaa

SEQ ID NO: 4416 - DNA, 15 bp, Homo sapiens
aactgcagattgaaa

SEQ ID NO: 4417 - DNA, 15 bp, Homo sapiens
caactgcagattgaa

SEQ ID NO: 4418 - DNA, 15 bp, Homo sapiens
ccaactgcagattga

SEQ ID NO: 4419 - DNA, 15 bp, Homo sapiens
accaactgcagattg

SEQ ID NO: 4420 - DNA, 15 bp, Homo sapiens
aaccaactgcagatt

SEQ ID NO: 4421 - DNA, 15 bp, Homo sapiens
caaccaactgcagat

SEQ ID NO: 4422 - DNA, 15 bp, Homo sapiens
tcaaccaactgcaga

SEQ ID NO: 4423 - DNA, 15 bp, Homo sapiens
ttcaaccaactgcag

SEQ ID NO: 4424 - DNA, 15 bp, Homo sapiens
tttcaaccaactgca

SEQ ID NO: 4425 - DNA, 15 bp, Homo sapiens
atttcaaccaactgc

SEQ ID NO: 4426 - DNA, 15 bp, Homo sapiens
tatttcaaccaactg

SEQ ID NO: 4427 - DNA, 15 bp, Homo sapiens
atatttcaaccaact

SEQ ID NO: 4428 - DNA, 15 bp, Homo sapiens
catatttcaaccaac

SEQ ID NO: 4429 - DNA, 15 bp, Homo sapiens
ccatatttcaaccaa

SEQ ID NO: 4430 - DNA, 15 bp, Homo sapiens
tccatatttcaacca

SEQ ID NO: 4431 - DNA, 15 bp, Homo sapiens
ttccatatttcaacc

SEQ ID NO: 4432 - DNA, 15 bp, Homo sapiens
gttccatatttcaac

SEQ ID NO: 4433 - DNA, 15 bp, Homo sapiens
ggttccatatttcaa

SEQ ID NO: 4434 - DNA, 15 bp, Homo sapiens
gggttccatatttca

SEQ ID NO: 4435 - DNA, 15 bp, Homo sapiens
tgggttccatatttc

SEQ ID NO: 4436 - DNA, 15 bp, Homo sapiens
atgggttccatattt

SEQ ID NO: 4437 - DNA, 15 bp, Homo sapiens
catgggttccatatt

SEQ ID NO: 4438 - DNA, 15 bp, Homo sapiens
ccatgggttccatat

SEQ ID NO: 4439 - DNA, 15 bp, Homo sapiens
tccatgggttccata

SEQ ID NO: 4440 - DNA, 15 bp, Homo sapiens
atccatgggttccat

SEQ ID NO: 4441 - DNA, 15 bp, Homo sapiens
tatccatgggttcca

SEQ ID NO: 4442 - DNA, 15 bp, Homo sapiens
atatccatgggttcc

SEQ ID NO: 4443 - DNA, 15 bp, Homo sapiens
catatccatgggttc

SEQ ID NO: 4444 - DNA, 15 bp, Homo sapiens
ccatatccatgggtt

SEQ ID NO: 4445 - DNA, 15 bp, Homo sapiens
tccatatccatgggt

SEQ ID NO: 4446 - DNA, 15 bp, Homo sapiens
ctccatatccatggg

SEQ ID NO: 4447 - DNA, 15 bp, Homo sapiens
cctccatatccatgg

SEQ ID NO: 4448 - DNA, 15 bp, Homo sapiens
ccctccatatccatg

SEQ ID NO: 4449 - DNA, 15 bp, Homo sapiens
gccctccatatccat

SEQ ID NO: 4450 - DNA, 15 bp, Homo sapiens
agccctccatatcca

SEQ ID NO: 4451 - DNA, 15 bp, Homo sapiens
cagccctccatatcc

SEQ ID NO: 4452 - DNA, 15 bp, Homo sapiens
tcagccctccatatc

SEQ ID NO: 4453 - DNA, 15 bp, Homo sapiens
gtcagccctccatat

SEQ ID NO: 4454 - DNA, 15 bp, Homo sapiens
agtcagccctccata

SEQ ID NO: 4455 - DNA, 15 bp, Homo sapiens
cagtcagccctccat

SEQ ID NO: 4456 - DNA, 15 bp, Homo sapiens
acagtcagccctcca

SEQ ID NO: 4457 - DNA, 15 bp, Homo sapiens
tacagtcagccctcc

SEQ ID NO: 4458 - DNA, 15 bp, Homo sapiens
ttacagtcagccctc

SEQ ID NO: 4459 - DNA, 15 bp, Homo sapiens
attacagtcagccct

SEQ ID NO: 4460 - DNA, 15 bp, Homo sapiens
aattacagtcagccc

SEQ ID NO: 4461 - DNA, 15 bp, Homo sapiens
gaattacagtcagcc

SEQ ID NO: 4462 - DNA, 15 bp, Homo sapiens
tgaattacagtcagc

SEQ ID NO: 4463 - DNA, 15 bp, Homo sapiens
atgaattacagtcag

SEQ ID NO: 4464 - DNA, 15 bp, Homo sapiens
gatgaattacagtca

SEQ ID NO: 4465 - DNA, 15 bp, Homo sapiens
ggatgaattacagtc

SEQ ID NO: 4466 - DNA, 15 bp, Homo sapiens
aggatgaattacagt

SEQ ID NO: 4467 - DNA, 15 bp, Homo sapiens
taggatgaattacag

SEQ ID NO: 4468 - DNA, 15 bp, Homo sapiens
gtaggatgaattaca

SEQ ID NO: 4469 - DNA, 15 bp, Homo sapiens
agtaggatgaattac

SEQ ID NO: 4470 - DNA, 15 bp, Homo sapiens
tagtaggatgaatta

SEQ ID NO: 4471 - DNA, 15 bp, Homo sapiens
ttagtaggatgaatt

SEQ ID NO: 4472 - DNA, 15 bp, Homo sapiens
cttagtaggatgaat

SEQ ID NO: 4473 - DNA, 15 bp, Homo sapiens
tcttagtaggatgaa

SEQ ID NO: 4474 - DNA, 15 bp, Homo sapiens
ctcttagtaggatga

SEQ ID NO: 4475 - DNA, 15 bp, Homo sapiens
cctcttagtaggatg

SEQ ID NO: 4476 - DNA, 15 bp, Homo sapiens
acctcttagtaggat

SEQ ID NO: 4477 - DNA, 15 bp, Homo sapiens
cacctcttagtagga

SEQ ID NO: 4478 - DNA, 15 bp, Homo sapiens
ccacctcttagtagg

SEQ ID NO: 4479 - DNA, 15 bp, Homo sapiens
tccacctcttagtag

SEQ ID NO: 4480 - DNA, 15 bp, Homo sapiens
ctccacctcttagta

SEQ ID NO: 4481 - DNA, 15 bp, Homo sapiens
actccacctcttagt

SEQ ID NO: 4482 - DNA, 15 bp, Homo sapiens
gactccacctcttag

SEQ ID NO: 4483 - DNA, 15 bp, Homo sapiens
agactccacctctta

SEQ ID NO: 4484 - DNA, 15 bp, Homo sapiens
aagactccacctctt

SEQ ID NO: 4485 - DNA, 15 bp, Homo sapiens
gaagactccacctct

SEQ ID NO: 4486 - DNA, 15 bp, Homo sapiens
agaagactccacctc

SEQ ID NO: 4487 - DNA, 15 bp, Homo sapiens
tagaagactccacct

SEQ ID NO: 4488 - DNA, 15 bp, Homo sapiens
gtagaagactccacc

SEQ ID NO: 4489 - DNA, 15 bp, Homo sapiens
agtagaagactccac

SEQ ID NO: 4490 - DNA, 15 bp, Homo sapiens
cagtagaagactcca

SEQ ID NO: 4491 - DNA, 15 bp, Homo sapiens
tcagtagaagactcc

SEQ ID NO: 4492 - DNA, 15 bp, Homo sapiens
ttcagtagaagactc

SEQ ID NO: 4493 - DNA, 15 bp, Homo sapiens
cttcagtagaagact

SEQ ID NO: 4494 - DNA, 15 bp, Homo sapiens
tcttcagtagaagac

SEQ ID NO: 4495 - DNA, 15 bp, Homo sapiens
ttcttcagtagaaga

SEQ ID NO: 4496 - DNA, 15 bp, Homo sapiens
gttcttcagtagaag

SEQ ID NO: 4497 - DNA, 15 bp, Homo sapiens
tgttcttcagtagaa

SEQ ID NO: 4498 - DNA, 15 bp, Homo sapiens
ctgttcttcagtaga

SEQ ID NO: 4499 - DNA, 15 bp, Homo sapiens
tctgttcttcagtag

SEQ ID NO: 4500 - DNA, 15 bp, Homo sapiens
ttctgttcttcagta

SEQ ID NO: 4501 - DNA, 15 bp, Homo sapiens
tttctgttcttcagt

SEQ ID NO: 4502 - DNA, 15 bp, Homo sapiens
ttttctgttcttcag

SEQ ID NO: 4503 - DNA, 15 bp, Homo sapiens
cttttctgttcttca

SEQ ID NO: 4504 - DNA, 15 bp, Homo sapiens
tcttttctgttcttc

SEQ ID NO: 4505 - DNA, 15 bp, Homo sapiens
ttcttttctgttctt

SEQ ID NO: 4506 - DNA, 15 bp, Homo sapiens
tttcttttctgttct

SEQ ID NO: 4507 - DNA, 15 bp, Homo sapiens
atttcttttctgttc

SEQ ID NO: 4508 - DNA, 15 bp, Homo sapiens
gatttcttttctgtt

SEQ ID NO: 4509 - DNA, 15 bp, Homo sapiens
agatttcttttctgt

SEQ ID NO: 4510 - DNA, 15 bp, Homo sapiens
cagatttcttttctg

SEQ ID NO: 4511 - DNA, 15 bp, Homo sapiens
acagatttcttttct

SEQ ID NO: 4512 - DNA, 15 bp, Homo sapiens
tacagatttcttttc

SEQ ID NO: 4513 - DNA, 15 bp, Homo sapiens
ttacagatttctttt

SEQ ID NO: 4514 - DNA, 15 bp, Homo sapiens
gttacagatttcttt

SEQ ID NO: 4515 - DNA, 15 bp, Homo sapiens
tgttacagatttctt

SEQ ID NO: 4516 - DNA, 15 bp, Homo sapiens
ctgttacagatttct

SEQ ID NO: 4517 - DNA, 15 bp, Homo sapiens
gctgttacagatttc

SEQ ID NO: 4518 - DNA, 15 bp, Homo sapiens
tgctgttacagattt

SEQ ID NO: 4519 - DNA, 15 bp, Homo sapiens
ttgctgttacagatt

SEQ ID NO: 4520 - DNA, 15 bp, Homo sapiens
tttgctgttacagat

SEQ ID NO: 4521 - DNA, 15 bp, Homo sapiens
ttttgctgttacaga

SEQ ID NO: 4522 - DNA, 15 bp, Homo sapiens
tttttgctgttacag

SEQ ID NO: 4523 - DNA, 15 bp, Homo sapiens
ttttttgctgttaca

SEQ ID NO: 4524 - DNA, 15 bp, Homo sapiens
gttttttgctgttac

SEQ ID NO: 4525 - DNA, 15 bp, Homo sapiens
tgttttttgctgtta

SEQ ID NO: 4526 - DNA, 15 bp, Homo sapiens
ttgttttttgctgtt

SEQ ID NO: 4527 - DNA, 15 bp, Homo sapiens
tttgttttttgctgt

SEQ ID NO: 4528 - DNA, 15 bp, Homo sapiens
ctttgttttttgctg

SEQ ID NO: 4529 - DNA, 15 bp, Homo sapiens
gctttgttttttgct

SEQ ID NO: 4530 - DNA, 15 bp, Homo sapiens
ggctttgttttttgc

SEQ ID NO: 4531 - DNA, 15 bp, Homo sapiens
tggctttgttttttg

SEQ ID NO: 4532 - DNA, 15 bp, Homo sapiens
ttggctttgtttttt

SEQ ID NO: 4533 - DNA, 15 bp, Homo sapiens
cttggctttgttttt

SEQ ID NO: 4534 - DNA, 15 bp, Homo sapiens
tcttggctttgtttt

SEQ ID NO: 4535 - DNA, 15 bp, Homo sapiens
gtcttggctttgttt

SEQ ID NO: 4536 - DNA, 15 bp, Homo sapiens
agtcttggctttgtt

SEQ ID NO: 4537 - DNA, 15 bp, Homo sapiens
tagtcttggctttgt

SEQ ID NO: 4538 - DNA, 15 bp, Homo sapiens
atagtcttggctttg

SEQ ID NO: 4539 - DNA, 15 bp, Homo sapiens
gatagtcttggcttt

SEQ ID NO: 4540 - DNA, 15 bp, Homo sapiens
tgatagtcttggctt

SEQ ID NO: 4541 - DNA, 15 bp, Homo sapiens
ttgatagtcttggct

SEQ ID NO: 4542 - DNA, 15 bp, Homo sapiens
tttgatagtcttggc

SEQ ID NO: 4543 - DNA, 15 bp, Homo sapiens
ttttgatagtcttgg

SEQ ID NO: 4544 - DNA, 15 bp, Homo sapiens
gttttgatagtcttg

SEQ ID NO: 4545 - DNA, 15 bp, Homo sapiens
agttttgatagtctt

SEQ ID NO: 4546 - DNA, 15 bp, Homo sapiens
tagttttgatagtct

SEQ ID NO: 4547 - DNA, 15 bp, Homo sapiens
ttagttttgatagtc

SEQ ID NO: 4548 - DNA, 15 bp, Homo sapiens
tttagttttgatagt

SEQ ID NO: 4549 - DNA, 15 bp, Homo sapiens
atttagttttgatag

SEQ ID NO: 4550 - DNA, 15 bp, Homo sapiens
catttagttttgata

SEQ ID NO: 4551 - DNA, 15 bp, Homo sapiens
gcatttagttttgat

SEQ ID NO: 4552 - DNA, 15 bp, Homo sapiens
ggcatttagttttga

SEQ ID NO: 4553 - DNA, 15 bp, Homo sapiens
tggcatttagttttg

SEQ ID NO: 4554 - DNA, 15 bp, Homo sapiens
gtggcatttagtttt

SEQ ID NO: 4555 - DNA, 15 bp, Homo sapiens
tgtggcatttagttt

SEQ ID NO: 4556 - DNA, 15 bp, Homo sapiens
ctgtggcatttagtt

SEQ ID NO: 4557 - DNA, 15 bp, Homo sapiens
tctgtggcatttagt

SEQ ID NO: 4558 - DNA, 15 bp, Homo sapiens
ttctgtggcatttag

SEQ ID NO: 4559 - DNA, 15 bp, Homo sapiens
cttctgtggcattta

SEQ ID NO: 4560 - DNA, 15 bp, Homo sapiens
acttctgtggcattt

SEQ ID NO: 4561 - DNA, 15 bp, Homo sapiens
aacttctgtggcatt

SEQ ID NO: 4562 - DNA, 15 bp, Homo sapiens
gaacttctgtggcat

SEQ ID NO: 4563 - DNA, 15 bp, Homo sapiens
ggaacttctgtggca

SEQ ID NO: 4564 - DNA, 15 bp, Homo sapiens
tggaacttctgtggc

SEQ ID NO: 4565 - DNA, 15 bp, Homo sapiens
gtggaacttctgtgg

SEQ ID NO: 4566 - DNA, 15 bp, Homo sapiens
tgtggaacttctgtg

SEQ ID NO: 4567 - DNA, 15 bp, Homo sapiens
atgtggaacttctgt

SEQ ID NO: 4568 - DNA, 15 bp, Homo sapiens
aatgtggaacttctg

SEQ ID NO: 4569 - DNA, 15 bp, Homo sapiens
aaatgtggaacttct

SEQ ID NO: 4570 - DNA, 15 bp, Homo sapiens
aaaatgtggaacttc

SEQ ID NO: 4571 - DNA, 15 bp, Homo sapiens
caaaatgtggaactt

SEQ ID NO: 4572 - DNA, 15 bp, Homo sapiens
acaaaatgtggaact

SEQ ID NO: 4573 - DNA, 15 bp, Homo sapiens
cacaaaatgtggaac

SEQ ID NO: 4574 - DNA, 15 bp, Homo sapiens
acacaaaatgtggaa

SEQ ID NO: 4575 - DNA, 15 bp, Homo sapiens
aacacaaaatgtgga

SEQ ID NO: 4576 - DNA, 15 bp, Homo sapiens
caacacaaaatgtgg

SEQ ID NO: 4577 - DNA, 15 bp, Homo sapiens
gcaacacaaaatgtg

SEQ ID NO: 4578 - DNA, 15 bp, Homo sapiens
tgcaacacaaaatgt

SEQ ID NO: 4579 - DNA, 15 bp, Homo sapiens
atgcaacacaaaatg

SEQ ID NO: 4580 - DNA, 15 bp, Homo sapiens
aatgcaacacaaaat

SEQ ID NO: 4581 - DNA, 15 bp, Homo sapiens
aaatgcaacacaaaa

SEQ ID NO: 4582 - DNA, 15 bp, Homo sapiens
taaatgcaacacaaa

SEQ ID NO: 4583 - DNA, 15 bp, Homo sapiens
ttaaatgcaacacaa

SEQ ID NO: 4584 - DNA, 15 bp, Homo sapiens
tttaaatgcaacaca

SEQ ID NO: 4585 - DNA, 15 bp, Homo sapiens
ttttaaatgcaacac

SEQ ID NO: 4586 - DNA, 15 bp, Homo sapiens
tttttaaatgcaaca

SEQ ID NO: 4587 - DNA, 15 bp, Homo sapiens
atttttaaatgcaac

SEQ ID NO: 4588 - DNA, 15 bp, Homo sapiens
tatttttaaatgcaa

SEQ ID NO: 4589 - DNA, 15 bp, Homo sapiens
gtatttttaaatgca

SEQ ID NO: 4590 - DNA, 15 bp, Homo sapiens
tgtatttttaaatgc

SEQ ID NO: 4591 - DNA, 15 bp, Homo sapiens
ttgtatttttaaatg

SEQ ID NO: 4592 - DNA, 15 bp, Homo sapiens
tttgtatttttaaat

SEQ ID NO: 4593 - DNA, 15 bp, Homo sapiens
ctttgtatttttaaa

SEQ ID NO: 4594 - DNA, 15 bp, Homo sapiens
tctttgtatttttaa

SEQ ID NO: 4595 - DNA, 15 bp, Homo sapiens
gtctttgtattttta

SEQ ID NO: 4596 - DNA, 15 bp, Homo sapiens
ggtctttgtattttt

SEQ ID NO: 4597 - DNA, 15 bp, Homo sapiens
cggtctttgtatttt

SEQ ID NO: 4598 - DNA, 15 bp, Homo sapiens
ccggtctttgtattt

SEQ ID NO: 4599 - DNA, 15 bp, Homo sapiens
gccggtctttgtatt

SEQ ID NO: 4600 - DNA, 15 bp, Homo sapiens
ggccggtctttgtat

SEQ ID NO: 4601 - DNA, 15 bp, Homo sapiens
cggccggtctttgta

SEQ ID NO: 4602 - DNA, 15 bp, Homo sapiens
ccggccggtctttgt

SEQ ID NO: 4603 - DNA, 15 bp, Homo sapiens
cccggccggtctttg

SEQ ID NO: 4604 - DNA, 15 bp, Homo sapiens
acccggccggtcttt

SEQ ID NO: 4605 - DNA, 15 bp, Homo sapiens
cacccggccggtctt

SEQ ID NO: 4606 - DNA, 15 bp, Homo sapiens
gcacccggccggtct

SEQ ID NO: 4607 - DNA, 15 bp, Homo sapiens
tgcacccggccggtc

SEQ ID NO: 4608 - DNA, 15 bp, Homo sapiens
ctgcacccggccggt

SEQ ID NO: 4609 - DNA, 15 bp, Homo sapiens
actgcacccggccgg

SEQ ID NO: 4610 - DNA, 15 bp, Homo sapiens
cactgcacccggccg

SEQ ID NO: 4611 - DNA, 15 bp, Homo sapiens
ccactgcacccggcc

SEQ ID NO: 4612 - DNA, 15 bp, Homo sapiens
gccactgcacccggc

SEQ ID NO: 4613 - DNA, 15 bp, Homo sapiens
agccactgcacccgg

SEQ ID NO: 4614 - DNA, 15 bp, Homo sapiens
gagccactgcacccg

SEQ ID NO: 4615 - DNA, 15 bp, Homo sapiens
tgagccactgcaccc

SEQ ID NO: 4616 - DNA, 15 bp, Homo sapiens
aggattacaggcgtg

SEQ ID NO: 4617 - DNA, 15 bp, Homo sapiens
taggattacaggcgt

SEQ ID NO: 4618 - DNA, 15 bp, Homo sapiens
ctaggattacaggcg

SEQ ID NO: 4619 - DNA, 15 bp, Homo sapiens
gctaggattacaggc

SEQ ID NO: 4620 - DNA, 15 bp, Homo sapiens
tgctaggattacagg

SEQ ID NO: 4621 - DNA, 15 bp, Homo sapiens
gtgctaggattacag

SEQ ID NO: 4622 - DNA, 15 bp, Homo sapiens
agtgctaggattaca

SEQ ID NO: 4623 - DNA, 15 bp, Homo sapiens
aagtgctaggattac

SEQ ID NO: 4624 - DNA, 15 bp, Homo sapiens
aaagtgctaggatta

SEQ ID NO: 4625 - DNA, 15 bp, Homo sapiens
caaagtgctaggatt

SEQ ID NO: 4626 - DNA, 15 bp, Homo sapiens
ccaaagtgctaggat

SEQ ID NO: 4627 - DNA, 15 bp, Homo sapiens
cccaaagtgctagga

SEQ ID NO: 4628 - DNA, 15 bp, Homo sapiens
tcccaaagtgctagg

SEQ ID NO: 4629 - DNA, 15 bp, Homo sapiens
ttcccaaagtgctag

SEQ ID NO: 4630 - DNA, 15 bp, Homo sapiens
cttcccaaagtgcta

SEQ ID NO: 4631 - DNA, 15 bp, Homo sapiens
gcttcccaaagtgct

SEQ ID NO: 4632 - DNA, 15 bp, Homo sapiens
ggcttcccaaagtgc

SEQ ID NO: 4633 - DNA, 15 bp, Homo sapiens
cggcttcccaaagtg

SEQ ID NO: 4634 - DNA, 15 bp, Homo sapiens
tcggcttcccaaagt

SEQ ID NO: 4635 - DNA, 15 bp, Homo sapiens
ctcggcttcccaaag

SEQ ID NO: 4636 - DNA, 15 bp, Homo sapiens
cctcggcttcccaaa

SEQ ID NO: 4637 - DNA, 15 bp, Homo sapiens
gcctcggcttcccaa

SEQ ID NO: 4638 - DNA, 15 bp, Homo sapiens
cgcctcggcttccca

SEQ ID NO: 4639 - DNA, 15 bp, Homo sapiens
ccgcctcggcttccc

SEQ ID NO: 4640 - DNA, 15 bp, Homo sapiens
cccgcctcggcttcc

SEQ ID NO: 4641 - DNA, 15 bp, Homo sapiens
gcccgcctcggcttc

SEQ ID NO: 4642 - DNA, 15 bp, Homo sapiens
cgcccgcctcggctt

SEQ ID NO: 4643 - DNA, 15 bp, Homo sapiens
ccgcccgcctcggct

SEQ ID NO: 4644 - DNA, 15 bp, Homo sapiens
tccgcccgcctcggc

SEQ ID NO: 4645 - DNA, 15 bp, Homo sapiens
gtccgcccgcctcgg

SEQ ID NO: 4646 - DNA, 15 bp, Homo sapiens
agtccgcccgcctcg

SEQ ID NO: 4647 - DNA, 15 bp, Homo sapiens
aagtccgcccgcctc

SEQ ID NO: 4648 - DNA, 15 bp, Homo sapiens
gaagtccgcccgcct

SEQ ID NO: 4649 - DNA, 15 bp, Homo sapiens
ggaagtccgcccgcc

SEQ ID NO: 4650 - DNA, 15 bp, Homo sapiens
aggaagtccgcccgc

SEQ ID NO: 4651 - DNA, 15 bp, Homo sapiens
taggaagtccgcccg

SEQ ID NO: 4652 - DNA, 15 bp, Homo sapiens
ttaggaagtccgccc

SEQ ID NO: 4653 - DNA, 15 bp, Homo sapiens
cttaggaagtccgcc

SEQ ID NO: 4654 - DNA, 15 bp, Homo sapiens
gcttaggaagtccgc

SEQ ID NO: 4655 - DNA, 15 bp, Homo sapiens
agcttaggaagtccg

SEQ ID NO: 4656 - DNA, 15 bp, Homo sapiens
gagcttaggaagtcc

SEQ ID NO: 4657 - DNA, 15 bp, Homo sapiens
tgagcttaggaagtc

SEQ ID NO: 4658 - DNA, 15 bp, Homo sapiens
ttgagcttaggaagt

SEQ ID NO: 4659 - DNA, 15 bp, Homo sapiens
cttgagcttaggaag

SEQ ID NO: 4660 - DNA, 15 bp, Homo sapiens
tcttgagcttaggaa

SEQ ID NO: 4661 - DNA, 15 bp, Homo sapiens
ctcttgagcttagga

SEQ ID NO: 4662 - DNA, 15 bp, Homo sapiens
actcttgagcttagg

SEQ ID NO: 4663 - DNA, 15 bp, Homo sapiens
aactcttgagcttag

SEQ ID NO: 4664 - DNA, 15 bp, Homo sapiens
gaactcttgagctta

SEQ ID NO: 4665 - DNA, 15 bp, Homo sapiens
cgaactcttgagctt

SEQ ID NO: 4666 - DNA, 15 bp, Homo sapiens
tcgaactcttgagct

SEQ ID NO: 4667 - DNA, 15 bp, Homo sapiens
ctcgaactcttgagc

SEQ ID NO: 4668 - DNA, 15 bp, Homo sapiens
tctcgaactcttgag

SEQ ID NO: 4669 - DNA, 15 bp, Homo sapiens
gtctcgaactcttga

SEQ ID NO: 4670 - DNA, 15 bp, Homo sapiens
ggtctcgaactcttg

SEQ ID NO: 4671 - DNA, 15 bp, Homo sapiens
tggtctcgaactctt

SEQ ID NO: 4672 - DNA, 15 bp, Homo sapiens
ctggtctcgaactct

SEQ ID NO: 4673 - DNA, 15 bp, Homo sapiens
gctggtctcgaactc

SEQ ID NO: 4674 - DNA, 15 bp, Homo sapiens
ggctggtctcgaact

SEQ ID NO: 4675 - DNA, 15 bp, Homo sapiens
aggctggtctcgaac

SEQ ID NO: 4676 - DNA, 15 bp, Homo sapiens
caggctggtctcgaa

SEQ ID NO: 4677 - DNA, 15 bp, Homo sapiens
ccaggctggtctcga

SEQ ID NO: 4678 - DNA, 15 bp, Homo sapiens
cccaggctggtctcg

SEQ ID NO: 4679 - DNA, 15 bp, Homo sapiens
gcccaggctggtctc

SEQ ID NO: 4680 - DNA, 15 bp, Homo sapiens
tgcccaggctggtct

SEQ ID NO: 4681 - DNA, 15 bp, Homo sapiens
ttgcccaggctggtc

SEQ ID NO: 4682 - DNA, 15 bp, Homo sapiens
gttgcccaggctggt

SEQ ID NO: 4683 - DNA, 15 bp, Homo sapiens
gtgttgcccaggctg

SEQ ID NO: 4684 - DNA, 15 bp, Homo sapiens
cgtgttgcccaggct

SEQ ID NO: 4685 - DNA, 15 bp, Homo sapiens
ccgtgttgcccaggc

SEQ ID NO: 4686 - DNA, 15 bp, Homo sapiens
accgtgttgcccagg

SEQ ID NO: 4687 - DNA, 15 bp, Homo sapiens
caccgtgttgcccag

SEQ ID NO: 4688 - DNA, 15 bp, Homo sapiens
tcaccgtgttgccca

SEQ ID NO: 4689 - DNA, 15 bp, Homo sapiens
ttcaccgtgttgccc

SEQ ID NO: 4690 - DNA, 15 bp, Homo sapiens
tttcaccgtgttgcc

SEQ ID NO: 4691 - DNA, 15 bp, Homo sapiens
gtttcaccgtgttgc

SEQ ID NO: 4692 - DNA, 15 bp, Homo sapiens
ggtttcaccgtgttg

SEQ ID NO: 4693 - DNA, 15 bp, Homo sapiens
attttagtagagacg

SEQ ID NO: 4694 - DNA, 15 bp, Homo sapiens
tattttagtagagac

SEQ ID NO: 4695 - DNA, 15 bp, Homo sapiens
gtattttagtagaga

SEQ ID NO: 4696 - DNA, 15 bp, Homo sapiens
tgtattttagtagag

SEQ ID NO: 4697 - DNA, 15 bp, Homo sapiens
ttgtattttagtaga

SEQ ID NO: 4698 - DNA, 15 bp, Homo sapiens
tttgtattttagtag

SEQ ID NO: 4699 - DNA, 15 bp, Homo sapiens
ttttgtattttagta

SEQ ID NO: 4700 - DNA, 15 bp, Homo sapiens
tttttgtattttagt

SEQ ID NO: 4701 - DNA, 15 bp, Homo sapiens
ttttttgtattttag

SEQ ID NO: 4702 - DNA, 15 bp, Homo sapiens
gttttttgtatttta

SEQ ID NO: 4703 - DNA, 15 bp, Homo sapiens
tgttttttgtatttt

SEQ ID NO: 4704 - DNA, 15 bp, Homo sapiens
ctgttttttgtattt

SEQ ID NO: 4705 - DNA, 15 bp, Homo sapiens
gctgttttttgtatt

SEQ ID NO: 4706 - DNA, 15 bp, Homo sapiens
ggctgttttttgtat

SEQ ID NO: 4707 - DNA, 15 bp, Homo sapiens
cggctgttttttgta

SEQ ID NO: 4708 - DNA, 15 bp, Homo sapiens
ccggctgttttttgt

SEQ ID NO: 4709 - DNA, 15 bp, Homo sapiens
cccggctgttttttg

SEQ ID NO: 4710 - DNA, 15 bp, Homo sapiens
acccggctgtttttt

SEQ ID NO: 4711 - DNA, 15 bp, Homo sapiens
aacccggctgttttt

SEQ ID NO: 4712 - DNA, 15 bp, Homo sapiens
aaacccggctgtttt

SEQ ID NO: 4713 - DNA, 15 bp, Homo sapiens
caaacccggctgttt

SEQ ID NO: 4714 - DNA, 15 bp, Homo sapiens
ccaaacccggctgtt

SEQ ID NO: 4715 - DNA, 15 bp, Homo sapiens
gccaaacccggctgt

SEQ ID NO: 4716 - DNA, 15 bp, Homo sapiens
cgccaaacccggctg

SEQ ID NO: 4717 - DNA, 15 bp, Homo sapiens
ccgccaaacccggct

SEQ ID NO: 4718 - DNA, 15 bp, Homo sapiens
gccgccaaacccggc

SEQ ID NO: 4719 - DNA, 15 bp, Homo sapiens
cgccgccaaacccgg

SEQ ID NO: 4720 - DNA, 15 bp, Homo sapiens
acgccgccaaacccg

SEQ ID NO: 4721 - DNA, 15 bp, Homo sapiens
aacgccgccaaaccc

SEQ ID NO: 4722 - DNA, 15 bp, Homo sapiens
gaacgccgccaaacc

SEQ ID NO: 4723 - DNA, 15 bp, Homo sapiens
cgaacgccgccaaac

SEQ ID NO: 4724 - DNA, 15 bp, Homo sapiens
gcgaacgccgccaaa

SEQ ID NO: 4725 - DNA, 15 bp, Homo sapiens
ggcgaacgccgccaa

SEQ ID NO: 4726 - DNA, 15 bp, Homo sapiens
aggcgaacgccgcca

SEQ ID NO: 4727 - DNA, 15 bp, Homo sapiens
caggcgaacgccgcc

SEQ ID NO: 4728 - DNA, 15 bp, Homo sapiens
gcaggcgaacgccgc

SEQ ID NO: 4729 - DNA, 15 bp, Homo sapiens
tgcaggcgaacgccg

SEQ ID NO: 4730 - DNA, 15 bp, Homo sapiens
ctgcaggcgaacgcc

SEQ ID NO: 4731 - DNA, 15 bp, Homo sapiens
actgcaggcgaacgc

SEQ ID NO: 4732 - DNA, 15 bp, Homo sapiens
gactgcaggcgaacg

SEQ ID NO: 4733 - DNA, 15 bp, Homo sapiens
ggactgcaggcgaac

SEQ ID NO: 4734 - DNA, 15 bp, Homo sapiens
gggactgcaggcgaa

SEQ ID NO: 4735 - DNA, 15 bp, Homo sapiens
tgggactgcaggcga

SEQ ID NO: 4736 - DNA, 15 bp, Homo sapiens
ctgggactgcaggcg

SEQ ID NO: 4737 - DNA, 15 bp, Homo sapiens
gctgggactgcaggc

SEQ ID NO: 4738 - DNA, 15 bp, Homo sapiens
agctgggactgcagg

SEQ ID NO: 4739 - DNA, 15 bp, Homo sapiens
tagctgggactgcag

SEQ ID NO: 4740 - DNA, 15 bp, Homo sapiens
gtagctgggactgca

SEQ ID NO: 4741 - DNA, 15 bp, Homo sapiens
agtagctgggactgc

SEQ ID NO: 4742 - DNA, 15 bp, Homo sapiens
gagtagctgggactg

SEQ ID NO: 4743 - DNA, 15 bp, Homo sapiens
cgagtagctgggact

SEQ ID NO: 4744 - DNA, 15 bp, Homo sapiens
ccgagtagctgggac

SEQ ID NO: 4745 - DNA, 15 bp, Homo sapiens
cccgagtagctggga

SEQ ID NO: 4746 - DNA, 15 bp, Homo sapiens
tcccgagtagctggg

SEQ ID NO: 4747 - DNA, 15 bp, Homo sapiens
ctcccgagtagctgg

SEQ ID NO: 4748 - DNA, 15 bp, Homo sapiens
cctcccgagtagctg

SEQ ID NO: 4749 - DNA, 15 bp, Homo sapiens
ggttcaagcaattct

SEQ ID NO: 4750 - DNA, 15 bp, Homo sapiens
gggttcaagcaattc

SEQ ID NO: 4751 - DNA, 15 bp, Homo sapiens
cgggttcaagcaatt

SEQ ID NO: 4752 - DNA, 15 bp, Homo sapiens
ccgggttcaagcaat

SEQ ID NO: 4753 - DNA, 15 bp, Homo sapiens
cccgggttcaagcaa

SEQ ID NO: 4754 - DNA, 15 bp, Homo sapiens
tcccgggttcaagca

SEQ ID NO: 4755 - DNA, 15 bp, Homo sapiens
ctcccgggttcaagc

SEQ ID NO: 4756 - DNA, 15 bp, Homo sapiens
cctcccgggttcaag

SEQ ID NO: 4757 - DNA, 15 bp, Homo sapiens
gcctcccgggttcaa

SEQ ID NO: 4758 - DNA, 15 bp, Homo sapiens
tgcctcccgggttca

SEQ ID NO: 4759 - DNA, 15 bp, Homo sapiens
ctgcctcccgggttc

SEQ ID NO: 4760 - DNA, 15 bp, Homo sapiens
tctgcctcccgggtt

SEQ ID NO: 4761 - DNA, 15 bp, Homo sapiens
ctctgcctcccgggt

SEQ ID NO: 4762 - DNA, 15 bp, Homo sapiens
cctctgcctcccggg

SEQ ID NO: 4763 - DNA, 15 bp, Homo sapiens
acctctgcctcccgg

SEQ ID NO: 4764 - DNA, 15 bp, Homo sapiens
aacctctgcctcccg

SEQ ID NO: 4765 - DNA, 15 bp, Homo sapiens
cggctcactgcaacc

SEQ ID NO: 4766 - DNA, 15 bp, Homo sapiens
tcggctcactgcaac

SEQ ID NO: 4767 - DNA, 15 bp, Homo sapiens
ctcggctcactgcaa

SEQ ID NO: 4768 - DNA, 15 bp, Homo sapiens
tctcggctcactgca

SEQ ID NO: 4769 - DNA, 15 bp, Homo sapiens
atctcggctcactgc

SEQ ID NO: 4770 - DNA, 15 bp, Homo sapiens
gatctcggctcactg

SEQ ID NO: 4771 - DNA, 15 bp, Homo sapiens
cgatctcggctcact

SEQ ID NO: 4772 - DNA, 15 bp, Homo sapiens
gcgatctcggctcac

SEQ ID NO: 4773 - DNA, 15 bp, Homo sapiens
cgcgatctcggctca

SEQ ID NO: 4774 - DNA, 15 bp, Homo sapiens
gcgcgatctcggctc

SEQ ID NO: 4775 - DNA, 15 bp, Homo sapiens
ggcgcgatctcggct

SEQ ID NO: 4776 - DNA, 15 bp, Homo sapiens
tggcgcgatctcggc

SEQ ID NO: 4777 - DNA, 15 bp, Homo sapiens
gtggcgcgatctcgg

SEQ ID NO: 4778 - DNA, 15 bp, Homo sapiens
agtggcgcgatctcg

SEQ ID NO: 4779 - DNA, 15 bp, Homo sapiens
cagtggcgcgatctc

SEQ ID NO: 4780 - DNA, 15 bp, Homo sapiens
gcagtggcgcgatct

SEQ ID NO: 4781 - DNA, 15 bp, Homo sapiens
tgcagtggcgcgatc

SEQ ID NO: 4782 - DNA, 15 bp, Homo sapiens
gtgcagtggcgcgat

SEQ ID NO: 4783 - DNA, 15 bp, Homo sapiens
agtgcagtggcgcga

SEQ ID NO: 4784 - DNA, 15 bp, Homo sapiens
gagtgcagtggcgcg

SEQ ID NO: 4785 - DNA, 15 bp, Homo sapiens
cgcccaggctggagt

SEQ ID NO: 4786 - DNA, 15 bp, Homo sapiens
tcgcccaggctggag

SEQ ID NO: 4787 - DNA, 15 bp, Homo sapiens
gtcgcccaggctgga

SEQ ID NO: 4788 - DNA, 15 bp, Homo sapiens
tgtcgcccaggctgg

SEQ ID NO: 4789 - DNA, 15 bp, Homo sapiens
ctgtcgcccaggctg

SEQ ID NO: 4790 - DNA, 15 bp, Homo sapiens
tctgtcgcccaggct

SEQ ID NO: 4791 - DNA, 15 bp, Homo sapiens
ctctgtcgcccaggc

SEQ ID NO: 4792 - DNA, 15 bp, Homo sapiens
gctctgtcgcccagg

SEQ ID NO: 4793 - DNA, 15 bp, Homo sapiens
tgctctgtcgcccag

SEQ ID NO: 4794 - DNA, 15 bp, Homo sapiens
ttgctctgtcgccca

SEQ ID NO: 4795 - DNA, 15 bp, Homo sapiens
cttgctctgtcgccc

SEQ ID NO: 4796 - DNA, 15 bp, Homo sapiens
tcttgctctgtcgcc

SEQ ID NO: 4797 - DNA, 15 bp, Homo sapiens
gtcttgctctgtcgc

SEQ ID NO: 4798 - DNA, 15 bp, Homo sapiens
agtcttgctctgtcg

SEQ ID NO: 4799 - DNA, 15 bp, Homo sapiens
tagtcttgctctgtc

SEQ ID NO: 4800 - DNA, 15 bp, Homo sapiens
gtagtcttgctctgt

SEQ ID NO: 4801 - DNA, 15 bp, Homo sapiens
cgtagtcttgctctg

SEQ ID NO: 4802 - DNA, 15 bp, Homo sapiens
acgtagtcttgctct

SEQ ID NO: 4803 - DNA, 15 bp, Homo sapiens
gacgtagtcttgctc

SEQ ID NO: 4804 - DNA, 15 bp, Homo sapiens
agacgtagtcttgct

SEQ ID NO: 4805 - DNA, 15 bp, Homo sapiens
gagacgtagtcttgc

SEQ ID NO: 4806 - DNA, 15 bp, Homo sapiens
ggagacgtagtcttg

SEQ ID NO: 4807 - DNA, 15 bp, Homo sapiens
tggagacgtagtctt

SEQ ID NO: 4808 - DNA, 15 bp, Homo sapiens
ttggagacgtagtct

SEQ ID NO: 4809 - DNA, 15 bp, Homo sapiens
tttggagacgtagtc

SEQ ID NO: 4810 - DNA, 15 bp, Homo sapiens
gtttggagacgtagt

SEQ ID NO: 4811 - DNA, 15 bp, Homo sapiens
tgtttggagacgtag

SEQ ID NO: 4812 - DNA, 15 bp, Homo sapiens
ctgtttggagacgta

SEQ ID NO: 4813 - DNA, 15 bp, Homo sapiens
gctgtttggagacgt

SEQ ID NO: 4814 - DNA, 15 bp, Homo sapiens
tgctgtttggagacg

SEQ ID NO: 4815 - DNA, 15 bp, Homo sapiens
ttgctgtttggagac

SEQ ID NO: 4816 - DNA, 15 bp, Homo sapiens
gttgctgtttggaga

SEQ ID NO: 4817 - DNA, 15 bp, Homo sapiens
tgttgctgtttggag

SEQ ID NO: 4818 - DNA, 15 bp, Homo sapiens
ttgttgctgtttgga

SEQ ID NO: 4819 - DNA, 15 bp, Homo sapiens
gttgttgctgtttgg

SEQ ID NO: 4820 - DNA, 15 bp, Homo sapiens
tgttgttgctgtttg

SEQ ID NO: 4821 - DNA, 15 bp, Homo sapiens
ttgttgttgctgttt

SEQ ID NO: 4822 - DNA, 15 bp, Homo sapiens
tttgttgttgctgtt

SEQ ID NO: 4823 - DNA, 15 bp, Homo sapiens
ttttgttgttgctgt

SEQ ID NO: 4824 - DNA, 15 bp, Homo sapiens
tttttgttgttgctg

SEQ ID NO: 4825 - DNA, 15 bp, Homo sapiens
gtttttgttgttgct

SEQ ID NO: 4826 - DNA, 15 bp, Homo sapiens
tgtttttgttgttgc

SEQ ID NO: 4827 - DNA, 15 bp, Homo sapiens
gtgtttttgttgttg

SEQ ID NO: 4828 - DNA, 15 bp, Homo sapiens
tgtgtttttgttgtt

SEQ ID NO: 4829 - DNA, 15 bp, Homo sapiens
ttgtgtttttgttgt

SEQ ID NO: 4830 - DNA, 15 bp, Homo sapiens
tttgtgtttttgttg

SEQ ID NO: 4831 - DNA, 15 bp, Homo sapiens
ttttgtgtttttgtt

SEQ ID NO: 4832 - DNA, 15 bp, Homo sapiens
cttttgtgtttttgt

SEQ ID NO: 4833 - DNA, 15 bp, Homo sapiens
tcttttgtgtttttg

SEQ ID NO: 4834 - DNA, 15 bp, Homo sapiens
gtcttttgtgttttt

SEQ ID NO: 4835 - DNA, 15 bp, Homo sapiens
ggtcttttgtgtttt

SEQ ID NO: 4836 - DNA, 15 bp, Homo sapiens
tggtcttttgtgttt

SEQ ID NO: 4837 - DNA, 15 bp, Homo sapiens
ttggtcttttgtgtt

SEQ ID NO: 4838 - DNA, 15 bp, Homo sapiens
attggtcttttgtgt

SEQ ID NO: 4839 - DNA, 15 bp, Homo sapiens
tattggtcttttgtg

SEQ ID NO: 4840 - DNA, 15 bp, Homo sapiens
gtattggtcttttgt

SEQ ID NO: 4841 - DNA, 15 bp, Homo sapiens
cgtattggtcttttg

SEQ ID NO: 4842 - DNA, 15 bp, Homo sapiens
acgtattggtctttt

SEQ ID NO: 4843 - DNA, 15 bp, Homo sapiens
aacgtattggtcttt

SEQ ID NO: 4844 - DNA, 15 bp, Homo sapiens
taacgtattggtctt

SEQ ID NO: 4845 - DNA, 15 bp, Homo sapiens
ctaacgtattggtct

SEQ ID NO: 4846 - DNA, 15 bp, Homo sapiens
tctaacgtattggtc

SEQ ID NO: 4847 - DNA, 15 bp, Homo sapiens
ttctaacgtattggt

SEQ ID NO: 4848 - DNA, 15 bp, Homo sapiens
attctaacgtattgg

SEQ ID NO: 4849 - DNA, 15 bp, Homo sapiens
gattctaacgtattg

SEQ ID NO: 4850 - DNA, 15 bp, Homo sapiens
agattctaacgtatt

SEQ ID NO: 4851 - DNA, 15 bp, Homo sapiens
aagattctaacgtat

SEQ ID NO: 4852 - DNA, 15 bp, Homo sapiens
taagattctaacgta

SEQ ID NO: 4853 - DNA, 15 bp, Homo sapiens
ttaagattctaacgt

SEQ ID NO: 4854 - DNA, 15 bp, Homo sapiens
gttaagattctaacg

SEQ ID NO: 4855 - DNA, 15 bp, Homo sapiens
agttaagattctaac

SEQ ID NO: 4856 - DNA, 15 bp, Homo sapiens
tagttaagattctaa

SEQ ID NO: 4857 - DNA, 15 bp, Homo sapiens
ctagttaagattcta

SEQ ID NO: 4858 - DNA, 15 bp, Homo sapiens
gctagttaagattct

SEQ ID NO: 4859 - DNA, 15 bp, Homo sapiens
agctagttaagattc

SEQ ID NO: 4860 - DNA, 15 bp, Homo sapiens
aagctagttaagatt

SEQ ID NO: 4861 - DNA, 15 bp, Homo sapiens
aaagctagttaagat

SEQ ID NO: 4862 - DNA, 15 bp, Homo sapiens
gaaagctagttaaga

SEQ ID NO: 4863 - DNA, 15 bp, Homo sapiens
tgaaagctagttaag

SEQ ID NO: 4864 - DNA, 15 bp, Homo sapiens
ttgaaagctagttaa

SEQ ID NO: 4865 - DNA, 15 bp, Homo sapiens
tttgaaagctagtta

SEQ ID NO: 4866 - DNA, 15 bp, Homo sapiens
ctttgaaagctagtt

SEQ ID NO: 4867 - DNA, 15 bp, Homo sapiens
tctttgaaagctagt

SEQ ID NO: 4868 - DNA, 15 bp, Homo sapiens
ttctttgaaagctag

SEQ ID NO: 4869 - DNA, 15 bp, Homo sapiens
tttctttgaaagcta

SEQ ID NO: 4870 - DNA, 15 bp, Homo sapiens
ttttctttgaaagct

SEQ ID NO: 4871 - DNA, 15 bp, Homo sapiens
tttttctttgaaagc

SEQ ID NO: 4872 - DNA, 15 bp, Homo sapiens
ttttttctttgaaag

SEQ ID NO: 4873 - DNA, 15 bp, Homo sapiens
gttttttctttgaaa

SEQ ID NO: 4874 - DNA, 15 bp, Homo sapiens
agttttttctttgaa

SEQ ID NO: 4875 - DNA, 15 bp, Homo sapiens
aagttttttctttga

SEQ ID NO: 4876 - DNA, 15 bp, Homo sapiens
taagttttttctttg

SEQ ID NO: 4877 - DNA, 15 bp, Homo sapiens
gtaagttttttcttt

SEQ ID NO: 4878 - DNA, 15 bp, Homo sapiens
agtaagttttttctt

SEQ ID NO: 4879 - DNA, 15 bp, Homo sapiens
gagtaagttttttct

SEQ ID NO: 4880 - DNA, 15 bp, Homo sapiens
ggagtaagttttttc

SEQ ID NO: 4881 - DNA, 15 bp, Homo sapiens
aggagtaagtttttt

SEQ ID NO: 4882 - DNA, 15 bp, Homo sapiens
caggagtaagttttt

SEQ ID NO: 4883 - DNA, 15 bp, Homo sapiens
acaggagtaagtttt

SEQ ID NO: 4884 - DNA, 15 bp, Homo sapiens
aacaggagtaagttt

SEQ ID NO: 4885 - DNA, 15 bp, Homo sapiens
taacaggagtaagtt

SEQ ID NO: 4886 - DNA, 15 bp, Homo sapiens
ttaacaggagtaagt

SEQ ID NO: 4887 - DNA, 15 bp, Homo sapiens
gttaacaggagtaag

SEQ ID NO: 4888 - DNA, 15 bp, Homo sapiens
tgttaacaggagtaa

SEQ ID NO: 4889 - DNA, 15 bp, Homo sapiens
gtgttaacaggagta

SEQ ID NO: 4890 - DNA, 15 bp, Homo sapiens
ggtgttaacaggagt

SEQ ID NO: 4891 - DNA, 15 bp, Homo sapiens
tggtgttaacaggag

SEQ ID NO: 4892 - DNA, 15 bp, Homo sapiens
ttggtgttaacagga

SEQ ID NO: 4893 - DNA, 15 bp, Homo sapiens
tttggtgttaacagg

SEQ ID NO: 4894 - DNA, 15 bp, Homo sapiens
gtttggtgttaacag

SEQ ID NO: 4895 - DNA, 15 bp, Homo sapiens
tgtttggtgttaaca

SEQ ID NO: 4896 - DNA, 15 bp, Homo sapiens
ctgtttggtgttaac

SEQ ID NO: 4897 - DNA, 15 bp, Homo sapiens
tctgtttggtgttaa

SEQ ID NO: 4898 - DNA, 15 bp, Homo sapiens
atctgtttggtgtta

SEQ ID NO: 4899 - DNA, 15 bp, Homo sapiens
aatctgtttggtgtt

SEQ ID NO: 4900 - DNA, 15 bp, Homo sapiens
aaatctgtttggtgt

SEQ ID NO: 4901 - DNA, 15 bp, Homo sapiens
caaatctgtttggtg

SEQ ID NO: 4902 - DNA, 15 bp, Homo sapiens
gcaaatctgtttggt

SEQ ID NO: 4903 - DNA, 15 bp, Homo sapiens
agcaaatctgtttgg

SEQ ID NO: 4904 - DNA, 15 bp, Homo sapiens
gagcaaatctgtttg

SEQ ID NO: 4905 - DNA, 15 bp, Homo sapiens
ggagcaaatctgttt

SEQ ID NO: 4906 - DNA, 15 bp, Homo sapiens
gggagcaaatctgtt

SEQ ID NO: 4907 - DNA, 15 bp, Homo sapiens
tgggagcaaatctgt

SEQ ID NO: 4908 - DNA, 15 bp, Homo sapiens
atgggagcaaatctg

SEQ ID NO: 4909 - DNA, 15 bp, Homo sapiens
gatgggagcaaatct

SEQ ID NO: 4910 - DNA, 15 bp, Homo sapiens
agatgggagcaaatc

SEQ ID NO: 4911 - DNA, 15 bp, Homo sapiens
tagatgggagcaaat

SEQ ID NO: 4912 - DNA, 15 bp, Homo sapiens
atagatgggagcaaa

SEQ ID NO: 4913 - DNA, 15 bp, Homo sapiens
tatagatgggagcaa

SEQ ID NO: 4914 - DNA, 15 bp, Homo sapiens
ttatagatgggagca

SEQ ID NO: 4915 - DNA, 15 bp, Homo sapiens
tttatagatgggagc

SEQ ID NO: 4916 - DNA, 15 bp, Homo sapiens
ttttatagatgggag

SEQ ID NO: 4917 - DNA, 15 bp, Homo sapiens
gttttatagatggga

SEQ ID NO: 4918 - DNA, 15 bp, Homo sapiens
tgttttatagatggg

SEQ ID NO: 4919 - DNA, 15 bp, Homo sapiens
gtgttttatagatgg

SEQ ID NO: 4920 - DNA, 15 bp, Homo sapiens
tgtgttttatagatg

SEQ ID NO: 4921 - DNA, 15 bp, Homo sapiens
ctgtgttttatagat

SEQ ID NO: 4922 - DNA, 15 bp, Homo sapiens
actgtgttttataga

SEQ ID NO: 4923 - DNA, 15 bp, Homo sapiens
cactgtgttttatag

SEQ ID NO: 4924 - DNA, 15 bp, Homo sapiens
gcactgtgttttata

SEQ ID NO: 4925 - DNA, 15 bp, Homo sapiens
ggcactgtgttttat

SEQ ID NO: 4926 - DNA, 15 bp, Homo sapiens
tggcactgtgtttta

SEQ ID NO: 4927 - DNA, 15 bp, Homo sapiens
gtggcactgtgtttt

SEQ ID NO: 4928 - DNA, 15 bp, Homo sapiens
agtggcactgtgttt

SEQ ID NO: 4929 - DNA, 15 bp, Homo sapiens
cagtggcactgtgtt

SEQ ID NO: 4930 - DNA, 15 bp, Homo sapiens
acagtggcactgtgt

SEQ ID NO: 4931 - DNA, 15 bp, Homo sapiens
cacagtggcactgtg

SEQ ID NO: 4932 - DNA, 15 bp, Homo sapiens
gcacagtggcactgt

SEQ ID NO: 4933 - DNA, 15 bp, Homo sapiens
agcacagtggcactg

SEQ ID NO: 4934 - DNA, 15 bp, Homo sapiens
gagcacagtggcact

SEQ ID NO: 4935 - DNA, 15 bp, Homo sapiens
tgagcacagtggcac

SEQ ID NO: 4936 - DNA, 15 bp, Homo sapiens
ttgagcacagtggca

SEQ ID NO: 4937 - DNA, 15 bp, Homo sapiens
cttgagcacagtggc

SEQ ID NO: 4938 - DNA, 15 bp, Homo sapiens
tcttgagcacagtgg

SEQ ID NO: 4939 - DNA, 15 bp, Homo sapiens
ctcttgagcacagtg

SEQ ID NO: 4940 - DNA, 15 bp, Homo sapiens
tcctcttgagcacag

SEQ ID NO: 4941 - DNA, 15 bp, Homo sapiens
ttcctcttgagcaca

SEQ ID NO: 4942 - DNA, 15 bp, Homo sapiens
cttcctcttgagcac

SEQ ID NO: 4943 - DNA, 15 bp, Homo sapiens
tcttcctcttgagca

SEQ ID NO: 4944 - DNA, 15 bp, Homo sapiens
atcttcctcttgagc

SEQ ID NO: 4945 - DNA, 15 bp, Homo sapiens
catcttcctcttgag

SEQ ID NO: 4946 - DNA, 15 bp, Homo sapiens
acatcttcctcttga

SEQ ID NO: 4947 - DNA, 15 bp, Homo sapiens
gacatcttcctcttg

SEQ ID NO: 4948 - DNA, 15 bp, Homo sapiens
tgacatcttcctctt

SEQ ID NO: 4949 - DNA, 15 bp, Homo sapiens
ctgacatcttcctct

SEQ ID NO: 4950 - DNA, 15 bp, Homo sapiens
tctgacatcttcctc

SEQ ID NO: 4951 - DNA, 15 bp, Homo sapiens
ctctgacatcttcct

SEQ ID NO: 4952 - DNA, 15 bp, Homo sapiens
tctctgacatcttcc

SEQ ID NO: 4953 - DNA, 15 bp, Homo sapiens
gtctctgacatcttc

SEQ ID NO: 4954 - DNA, 15 bp, Homo sapiens
agtctctgacatctt

SEQ ID NO: 4955 - DNA, 15 bp, Homo sapiens
aagtctctgacatct

SEQ ID NO: 4956 - DNA, 15 bp, Homo sapiens
taagtctctgacatc

SEQ ID NO: 4957 - DNA, 15 bp, Homo sapiens
ctaagtctctgacat

SEQ ID NO: 4958 - DNA, 15 bp, Homo sapiens
cctaagtctctgaca

SEQ ID NO: 4959 - DNA, 15 bp, Homo sapiens
gcctaagtctctgac

SEQ ID NO: 4960 - DNA, 15 bp, Homo sapiens
ggcctaagtctctga

SEQ ID NO: 4961 - DNA, 15 bp, Homo sapiens
aggcctaagtctctg

SEQ ID NO: 4962 - DNA, 15 bp, Homo sapiens
taggcctaagtctct

SEQ ID NO: 4963 - DNA, 15 bp, Homo sapiens
ttaggcctaagtctc

SEQ ID NO: 4964 - DNA, 15 bp, Homo sapiens
gttaggcctaagtct

SEQ ID NO: 4965 - DNA, 15 bp, Homo sapiens
agttaggcctaagtc

SEQ ID NO: 4966 - DNA, 15 bp, Homo sapiens
gagttaggcctaagt

SEQ ID NO: 4967 - DNA, 15 bp, Homo sapiens
cgagttaggcctaag

SEQ ID NO: 4968 - DNA, 15 bp, Homo sapiens
ccgagttaggcctaa

SEQ ID NO: 4969 - DNA, 15 bp, Homo sapiens
gccgagttaggccta

SEQ ID NO: 4970 - DNA, 15 bp, Homo sapiens
tgccgagttaggcct

SEQ ID NO: 4971 - DNA, 15 bp, Homo sapiens
ttgccgagttaggcc

SEQ ID NO: 4972 - DNA, 15 bp, Homo sapiens
cttgccgagttaggc

SEQ ID NO: 4973 - DNA, 15 bp, Homo sapiens
acttgccgagttagg

SEQ ID NO: 4974 - DNA, 15 bp, Homo sapiens
gacttgccgagttag

SEQ ID NO: 4975 - DNA, 15 bp, Homo sapiens
agacttgccgagtta

SEQ ID NO: 4976 - DNA, 15 bp, Homo sapiens
aagacttgccgagtt

SEQ ID NO: 4977 - DNA, 15 bp, Homo sapiens
gaagacttgccgagt

SEQ ID NO: 4978 - DNA, 15 bp, Homo sapiens
ggaagacttgccgag

SEQ ID NO: 4979 - DNA, 15 bp, Homo sapiens
gggaagacttgccga

SEQ ID NO: 4980 - DNA, 15 bp, Homo sapiens
tgggaagacttgccg

SEQ ID NO: 4981 - DNA, 15 bp, Homo sapiens
ctgggaagacttgcc

SEQ ID NO: 4982 - DNA, 15 bp, Homo sapiens
tctgggaagacttgc

SEQ ID NO: 4983 - DNA, 15 bp, Homo sapiens
ctctgggaagacttg

SEQ ID NO: 4984 - DNA, 15 bp, Homo sapiens
actctgggaagactt

SEQ ID NO: 4985 - DNA, 15 bp, Homo sapiens
tactctgggaagact

SEQ ID NO: 4986 - DNA, 15 bp, Homo sapiens
ctactctgggaagac

SEQ ID NO: 4987 - DNA, 15 bp, Homo sapiens
gctactctgggaaga

SEQ ID NO: 4988 - DNA, 15 bp, Homo sapiens
agctactctgggaag

SEQ ID NO: 4989 - DNA, 15 bp, Homo sapiens
tagctactctgggaa

SEQ ID NO: 4990 - DNA, 15 bp, Homo sapiens
ctagctactctggga

SEQ ID NO: 4991 - DNA, 15 bp, Homo sapiens
actagctactctggg

SEQ ID NO: 4992 - DNA, 15 bp, Homo sapiens
gactagctactctgg

SEQ ID NO: 4993 - DNA, 15 bp, Homo sapiens
ggactagctactctg

SEQ ID NO: 4994 - DNA, 15 bp, Homo sapiens
aggactagctactct

SEQ ID NO: 4995 - DNA, 15 bp, Homo sapiens
gaggactagctactc

SEQ ID NO: 4996 - DNA, 15 bp, Homo sapiens
agaggactagctact

SEQ ID NO: 4997 - DNA, 15 bp, Homo sapiens
tagaggactagctac

SEQ ID NO: 4998 - DNA, 15 bp, Homo sapiens
ttagaggactagcta

SEQ ID NO: 4999 - DNA, 15 bp, Homo sapiens
tttagaggactagct

SEQ ID NO: 5000 - DNA, 15 bp, Homo sapiens
ttttagaggactagc

SEQ ID NO: 5001 - DNA, 15 bp, Homo sapiens
attttagaggactag

SEQ ID NO: 5002 - DNA, 15 bp, Homo sapiens
cattttagaggacta

SEQ ID NO: 5003 - DNA, 15 bp, Homo sapiens
tcattttagaggact

SEQ ID NO: 5004 - DNA, 15 bp, Homo sapiens
atcattttagaggac

SEQ ID NO: 5005 - DNA, 15 bp, Homo sapiens
catcattttagagga

SEQ ID NO: 5006 - DNA, 15 bp, Homo sapiens
gcatcattttagagg

SEQ ID NO: 5007 - DNA, 15 bp, Homo sapiens
agcatcattttagag

SEQ ID NO: 5008 - DNA, 15 bp, Homo sapiens
aagcatcattttaga

SEQ ID NO: 5009 - DNA, 15 bp, Homo sapiens
aaagcatcattttag

SEQ ID NO: 5010 - DNA, 15 bp, Homo sapiens
taaagcatcatttta

SEQ ID NO: 5011 - DNA, 15 bp, Homo sapiens
ttaaagcatcatttt

SEQ ID NO: 5012 - DNA, 15 bp, Homo sapiens
attaaagcatcattt

SEQ ID NO: 5013 - DNA, 15 bp, Homo sapiens
tattaaagcatcatt

SEQ ID NO: 5014 - DNA, 15 bp, Homo sapiens
ctattaaagcatcat

SEQ ID NO: 5015 - DNA, 15 bp, Homo sapiens
cctattaaagcatca

SEQ ID NO: 5016 - DNA, 15 bp, Homo sapiens
gcctattaaagcatc

SEQ ID NO: 5017 - DNA, 15 bp, Homo sapiens
agcctattaaagcat

SEQ ID NO: 5018 - DNA, 15 bp, Homo sapiens
aagcctattaaagca

SEQ ID NO: 5019 - DNA, 15 bp, Homo sapiens
taagcctattaaagc

SEQ ID NO: 5020 - DNA, 15 bp, Homo sapiens
ttaagcctattaaag

SEQ ID NO: 5021 - DNA, 15 bp, Homo sapiens
gttaagcctattaaa

SEQ ID NO: 5022 - DNA, 15 bp, Homo sapiens
cgttaagcctattaa

SEQ ID NO: 5023 - DNA, 15 bp, Homo sapiens
ccgttaagcctatta

SEQ ID NO: 5024 - DNA, 15 bp, Homo sapiens
tccgttaagcctatt

SEQ ID NO: 5025 - DNA, 15 bp, Homo sapiens
ttccgttaagcctat

SEQ ID NO: 5026 - DNA, 15 bp, Homo sapiens
tttccgttaagccta

SEQ ID NO: 5027 - DNA, 15 bp, Homo sapiens
gtttccgttaagcct

SEQ ID NO: 5028 - DNA, 15 bp, Homo sapiens
tgtttccgttaagcc

SEQ ID NO: 5029 - DNA, 15 bp, Homo sapiens
ttgtttccgttaagc

SEQ ID NO: 5030 - DNA, 15 bp, Homo sapiens
attgtttccgttaag

SEQ ID NO: 5031 - DNA, 15 bp, Homo sapiens
gattgtttccgttaa

SEQ ID NO: 5032 - DNA, 15 bp, Homo sapiens
agattgtttccgtta

SEQ ID NO: 5033 - DNA, 15 bp, Homo sapiens
gagattgtttccgtt

SEQ ID NO: 5034 - DNA, 15 bp, Homo sapiens
tgagattgtttccgt

SEQ ID NO: 5035 - DNA, 15 bp, Homo sapiens
atgagattgtttccg

SEQ ID NO: 5036 - DNA, 15 bp, Homo sapiens
aatgagattgtttcc

SEQ ID NO: 5037 - DNA, 15 bp, Homo sapiens
aaatgagattgtttc

SEQ ID NO: 5038 - DNA, 15 bp, Homo sapiens
taaatgagattgttt

SEQ ID NO: 5039 - DNA, 15 bp, Homo sapiens
gtaaatgagattgtt

SEQ ID NO: 5040 - DNA, 15 bp, Homo sapiens
tgtaaatgagattgt

SEQ ID NO: 5041 - DNA, 15 bp, Homo sapiens
ctgtaaatgagattg

SEQ ID NO: 5042 - DNA, 15 bp, Homo sapiens
actgtaaatgagatt

SEQ ID NO: 5043 - DNA, 15 bp, Homo sapiens
cactgtaaatgagat

SEQ ID NO: 5044 - DNA, 15 bp, Homo sapiens
tcactgtaaatgaga

SEQ ID NO: 5045 - DNA, 15 bp, Homo sapiens
ctcactgtaaatgag

SEQ ID NO: 5046 - DNA, 15 bp, Homo sapiens
cctcactgtaaatga

SEQ ID NO: 5047 - DNA, 15 bp, Homo sapiens
gcctcactgtaaatg

SEQ ID NO: 5048 - DNA, 15 bp, Homo sapiens
agcctcactgtaaat

SEQ ID NO: 5049 - DNA, 15 bp, Homo sapiens
aagcctcactgtaaa

SEQ ID NO: 5050 - DNA, 15 bp, Homo sapiens
gaagcctcactgtaa

SEQ ID NO: 5051 - DNA, 15 bp, Homo sapiens
ggaagcctcactgta

SEQ ID NO: 5052 - DNA, 15 bp, Homo sapiens
tggaagcctcactgt

SEQ ID NO: 5053 - DNA, 15 bp, Homo sapiens
ttggaagcctcactg

SEQ ID NO: 5054 - DNA, 15 bp, Homo sapiens
tttggaagcctcact

SEQ ID NO: 5055 - DNA, 15 bp, Homo sapiens
atttggaagcctcac

SEQ ID NO: 5056 - DNA, 15 bp, Homo sapiens
catttggaagcctca

SEQ ID NO: 5057 - DNA, 15 bp, Homo sapiens
ccatttggaagcctc

SEQ ID NO: 5058 - DNA, 15 bp, Homo sapiens
accatttggaagcct

SEQ ID NO: 5059 - DNA, 15 bp, Homo sapiens
caccatttggaagcc

SEQ ID NO: 5060 - DNA, 15 bp, Homo sapiens
tcaccatttggaagc

SEQ ID NO: 5061 - DNA, 15 bp, Homo sapiens
ttcaccatttggaag

SEQ ID NO: 5062 - DNA, 15 bp, Homo sapiens
gttcaccatttggaa

SEQ ID NO: 5063 - DNA, 15 bp, Homo sapiens
tgttcaccatttgga

SEQ ID NO: 5064 - DNA, 15 bp, Homo sapiens
gtgttcaccatttgg

SEQ ID NO: 5065 - DNA, 15 bp, Homo sapiens
cgtgttcaccatttg

SEQ ID NO: 5066 - DNA, 15 bp, Homo sapiens
ccgtgttcaccattt

SEQ ID NO: 5067 - DNA, 15 bp, Homo sapiens
accgtgttcaccatt

SEQ ID NO: 5068 - DNA, 15 bp, Homo sapiens
taccgtgttcaccat

SEQ ID NO: 5069 - DNA, 15 bp, Homo sapiens
ttaccgtgttcacca

SEQ ID NO: 5070 - DNA, 15 bp, Homo sapiens
tttaccgtgttcacc

SEQ ID NO: 5071 - DNA, 15 bp, Homo sapiens
ctttaccgtgttcac

SEQ ID NO: 5072 - DNA, 15 bp, Homo sapiens
tctttaccgtgttca

SEQ ID NO: 5073 - DNA, 15 bp, Homo sapiens
ctctttaccgtgttc

SEQ ID NO: 5074 - DNA, 15 bp, Homo sapiens
gctctttaccgtgtt

SEQ ID NO: 5075 - DNA, 15 bp, Homo sapiens
tgctctttaccgtgt

SEQ ID NO: 5076 - DNA, 15 bp, Homo sapiens
ttgctctttaccgtg

SEQ ID NO: 5077 - DNA, 15 bp, Homo sapiens
tttgctctttaccgt

SEQ ID NO: 5078 - DNA, 15 bp, Homo sapiens
atttgctctttaccg

SEQ ID NO: 5079 - DNA, 15 bp, Homo sapiens
gatttgctctttacc

SEQ ID NO: 5080 - DNA, 15 bp, Homo sapiens
tgatttgctctttac

SEQ ID NO: 5081 - DNA, 15 bp, Homo sapiens
ctgatttgctcttta

SEQ ID NO: 5082 - DNA, 15 bp, Homo sapiens
gctgatttgctcttt

SEQ ID NO: 5083 - DNA, 15 bp, Homo sapiens
tgctgatttgctctt

SEQ ID NO: 5084 - DNA, 15 bp, Homo sapiens
ttgctgatttgctct

SEQ ID NO: 5085 - DNA, 15 bp, Homo sapiens
gttgctgatttgctc

SEQ ID NO: 5086 - DNA, 15 bp, Homo sapiens
tgttgctgatttgct

SEQ ID NO: 5087 - DNA, 15 bp, Homo sapiens
atgttgctgatttgc

SEQ ID NO: 5088 - DNA, 15 bp, Homo sapiens
aatgttgctgatttg

SEQ ID NO: 5089 - DNA, 15 bp, Homo sapiens
taatgttgctgattt

SEQ ID NO: 5090 - DNA, 15 bp, Homo sapiens
ttaatgttgctgatt

SEQ ID NO: 5091 - DNA, 15 bp, Homo sapiens
cttaatgttgctgat

SEQ ID NO: 5092 - DNA, 15 bp, Homo sapiens
acttaatgttgctga

SEQ ID NO: 5093 - DNA, 15 bp, Homo sapiens
cacttaatgttgctg

SEQ ID NO: 5094 - DNA, 15 bp, Homo sapiens
gcacttaatgttgct

SEQ ID NO: 5095 - DNA, 15 bp, Homo sapiens
tgcacttaatgttgc

SEQ ID NO: 5096 - DNA, 15 bp, Homo sapiens
gtgcacttaatgttg

SEQ ID NO: 5097 - DNA, 15 bp, Homo sapiens
tgtgcacttaatgtt

SEQ ID NO: 5098 - DNA, 15 bp, Homo sapiens
atgtgcacttaatgt

SEQ ID NO: 5099 - DNA, 15 bp, Homo sapiens
aatgtgcacttaatg

SEQ ID NO: 5100 - DNA, 15 bp, Homo sapiens
aaatgtgcacttaat

SEQ ID NO: 5101 - DNA, 15 bp, Homo sapiens
caaatgtgcacttaa

SEQ ID NO: 5102 - DNA, 15 bp, Homo sapiens
acaaatgtgcactta

SEQ ID NO: 5103 - DNA, 15 bp, Homo sapiens
aacaaatgtgcactt

SEQ ID NO: 5104 - DNA, 15 bp, Homo sapiens
aaacaaatgtgcact

SEQ ID NO: 5105 - DNA, 15 bp, Homo sapiens
caaacaaatgtgcac

SEQ ID NO: 5106 - DNA, 15 bp, Homo sapiens
acaaacaaatgtgca

SEQ ID NO: 5107 - DNA, 15 bp, Homo sapiens
cacaaacaaatgtgc

SEQ ID NO: 5108 - DNA, 15 bp, Homo sapiens
ccacaaacaaatgtg

SEQ ID NO: 5109 - DNA, 15 bp, Homo sapiens
cccacaaacaaatgt

SEQ ID NO: 5110 - DNA, 15 bp, Homo sapiens
tcccacaaacaaatg

SEQ ID NO: 5111 - DNA, 15 bp, Homo sapiens
ttcccacaaacaaat

SEQ ID NO: 5112 - DNA, 15 bp, Homo sapiens
cttcccacaaacaaa

SEQ ID NO: 5113 - DNA, 15 bp, Homo sapiens
ccttcccacaaacaa

SEQ ID NO: 5114 - DNA, 15 bp, Homo sapiens
gccttcccacaaaca

SEQ ID NO: 5115 - DNA, 15 bp, Homo sapiens
tgccttcccacaaac

SEQ ID NO: 5116 - DNA, 15 bp, Homo sapiens
atgccttcccacaaa

SEQ ID NO: 5117 - DNA, 15 bp, Homo sapiens
aatgccttcccacaa

SEQ ID NO: 5118 - DNA, 15 bp, Homo sapiens
taatgccttcccaca

SEQ ID NO: 5119 - DNA, 15 bp, Homo sapiens
ctaatgccttcccac

SEQ ID NO: 5120 - DNA, 15 bp, Homo sapiens
cctaatgccttccca

SEQ ID NO: 5121 - DNA, 15 bp, Homo sapiens
tcctaatgccttccc

SEQ ID NO: 5122 - DNA, 15 bp, Homo sapiens
ttcctaatgccttcc

SEQ ID NO: 5123 - DNA, 15 bp, Homo sapiens
tttcctaatgccttc

SEQ ID NO: 5124 - DNA, 15 bp, Homo sapiens
ctttcctaatgcctt

SEQ ID NO: 5125 - DNA, 15 bp, Homo sapiens
tctttcctaatgcct

SEQ ID NO: 5126 - DNA, 15 bp, Homo sapiens
ctctttcctaatgcc

SEQ ID NO: 5127 - DNA, 15 bp, Homo sapiens
cctctttcctaatgc

SEQ ID NO: 5128 - DNA, 15 bp, Homo sapiens
acctctttcctaatg

SEQ ID NO: 5129 - DNA, 15 bp, Homo sapiens
aacctctttcctaat

SEQ ID NO: 5130 - DNA, 15 bp, Homo sapiens
aaacctctttcctaa

SEQ ID NO: 5131 - DNA, 15 bp, Homo sapiens
aaaacctctttccta

SEQ ID NO: 5132 - DNA, 15 bp, Homo sapiens
aaaaacctctttcct

SEQ ID NO: 5133 - DNA, 15 bp, Homo sapiens
gaaaaacctctttcc

SEQ ID NO: 5134 - DNA, 15 bp, Homo sapiens
agaaaaacctctttc

SEQ ID NO: 5135 - DNA, 15 bp, Homo sapiens
tagaaaaacctcttt

SEQ ID NO: 5136 - DNA, 15 bp, Homo sapiens
ttagaaaaacctctt

SEQ ID NO: 5137 - DNA, 15 bp, Homo sapiens
cttagaaaaacctct

SEQ ID NO: 5138 - DNA, 15 bp, Homo sapiens
acttagaaaaacctc

SEQ ID NO: 5139 - DNA, 15 bp, Homo sapiens
tacttagaaaaacct

SEQ ID NO: 5140 - DNA, 15 bp, Homo sapiens
gtacttagaaaaacc

SEQ ID NO: 5141 - DNA, 15 bp, Homo sapiens
tgtacttagaaaaac

SEQ ID NO: 5142 - DNA, 15 bp, Homo sapiens
ctgtacttagaaaaa

SEQ ID NO: 5143 - DNA, 15 bp, Homo sapiens
actgtacttagaaaa

SEQ ID NO: 5144 - DNA, 15 bp, Homo sapiens
tactgtacttagaaa

SEQ ID NO: 5145 - DNA, 15 bp, Homo sapiens
ttactgtacttagaa

SEQ ID NO: 5146 - DNA, 15 bp, Homo sapiens
attactgtacttaga

SEQ ID NO: 5147 - DNA, 15 bp, Homo sapiens
aattactgtacttag

SEQ ID NO: 5148 - DNA, 15 bp, Homo sapiens
gaattactgtactta

SEQ ID NO: 5149 - DNA, 15 bp, Homo sapiens
agaattactgtactt

SEQ ID NO: 5150 - DNA, 15 bp, Homo sapiens
tagaattactgtact

SEQ ID NO: 5151 - DNA, 15 bp, Homo sapiens
ttagaattactgtac

SEQ ID NO: 5152 - DNA, 15 bp, Homo sapiens
tttagaattactgta

SEQ ID NO: 5153 - DNA, 15 bp, Homo sapiens
ttttagaattactgt

SEQ ID NO: 5154 - DNA, 15 bp, Homo sapiens
tttttagaattactg

SEQ ID NO: 5155 - DNA, 15 bp, Homo sapiens
atttttagaattact

SEQ ID NO: 5156 - DNA, 15 bp, Homo sapiens
catttttagaattac

SEQ ID NO: 5157 - DNA, 15 bp, Homo sapiens
acatttttagaatta

SEQ ID NO: 5158 - DNA, 15 bp, Homo sapiens
cacatttttagaatt

SEQ ID NO: 5159 - DNA, 15 bp, Homo sapiens
acacatttttagaat

SEQ ID NO: 5160 - DNA, 15 bp, Homo sapiens
aacacatttttagaa

SEQ ID NO: 5161 - DNA, 15 bp, Homo sapiens
aaacacatttttaga

SEQ ID NO: 5162 - DNA, 15 bp, Homo sapiens
aaaacacatttttag

SEQ ID NO: 5163 - DNA, 15 bp, Homo sapiens
gaaaacacattttta

SEQ ID NO: 5164 - DNA, 15 bp, Homo sapiens
agaaaacacattttt

SEQ ID NO: 5165 - DNA, 15 bp, Homo sapiens
aagaaaacacatttt

SEQ ID NO: 5166 - DNA, 15 bp, Homo sapiens
taagaaaacacattt

SEQ ID NO: 5167 - DNA, 15 bp, Homo sapiens
ctaagaaaacacatt

SEQ ID NO: 5168 - DNA, 15 bp, Homo sapiens
cctaagaaaacacat

SEQ ID NO: 5169 - DNA, 15 bp, Homo sapiens
ccctaagaaaacaca

SEQ ID NO: 5170 - DNA, 15 bp, Homo sapiens
tccctaagaaaacac

SEQ ID NO: 5171 - DNA, 15 bp, Homo sapiens
ttccctaagaaaaca

SEQ ID NO: 5172 - DNA, 15 bp, Homo sapiens
gttccctaagaaaac

SEQ ID NO: 5173 - DNA, 15 bp, Homo sapiens
tgttccctaagaaaa

SEQ ID NO: 5174 - DNA, 15 bp, Homo sapiens
ttgttccctaagaaa

SEQ ID NO: 5175 - DNA, 15 bp, Homo sapiens
attgttccctaagaa

SEQ ID NO: 5176 - DNA, 15 bp, Homo sapiens
tattgttccctaaga

SEQ ID NO: 5177 - DNA, 15 bp, Homo sapiens
ctattgttccctaag

SEQ ID NO: 5178 - DNA, 15 bp, Homo sapiens
actattgttccctaa

SEQ ID NO: 5179 - DNA, 15 bp, Homo sapiens
tactattgttcccta

SEQ ID NO: 5180 - DNA, 15 bp, Homo sapiens
ttactattgttccct

SEQ ID NO: 5181 - DNA, 15 bp, Homo sapiens
attactattgttccc

SEQ ID NO: 5182 - DNA, 15 bp, Homo sapiens
tattactattgttcc

SEQ ID NO: 5183 - DNA, 15 bp, Homo sapiens
atattactattgttc

SEQ ID NO: 5184 - DNA, 15 bp, Homo sapiens
aatattactattgtt

SEQ ID NO: 5185 - DNA, 15 bp, Homo sapiens
aaatattactattgt

SEQ ID NO: 5186 - DNA, 15 bp, Homo sapiens
taaatattactattg

SEQ ID NO: 5187 - DNA, 15 bp, Homo sapiens
ctaaatattactatt

SEQ ID NO: 5188 - DNA, 15 bp, Homo sapiens
tctaaatattactat

SEQ ID NO: 5189 - DNA, 15 bp, Homo sapiens
gtctaaatattacta

SEQ ID NO: 5190 - DNA, 15 bp, Homo sapiens
agtctaaatattact

SEQ ID NO: 5191 - DNA, 15 bp, Homo sapiens
tagtctaaatattac

SEQ ID NO: 5192 - DNA, 15 bp, Homo sapiens
ttagtctaaatatta

SEQ ID NO: 5193 - DNA, 15 bp, Homo sapiens
attagtctaaatatt

SEQ ID NO: 5194 - DNA, 15 bp, Homo sapiens
aattagtctaaatat

SEQ ID NO: 5195 - DNA, 15 bp, Homo sapiens
caattagtctaaata

SEQ ID NO: 5196 - DNA, 15 bp, Homo sapiens
gcaattagtctaaat

SEQ ID NO: 5197 - DNA, 15 bp, Homo sapiens
tgcaattagtctaaa

SEQ ID NO: 5198 - DNA, 15 bp, Homo sapiens
ttgcaattagtctaa

SEQ ID NO: 5199 - DNA, 15 bp, Homo sapiens
tttgcaattagtcta

SEQ ID NO: 5200 - DNA, 15 bp, Homo sapiens
atttgcaattagtct

SEQ ID NO: 5201 - DNA, 15 bp, Homo sapiens
catttgcaattagtc

SEQ ID NO: 5202 - DNA, 15 bp, Homo sapiens
acatttgcaattagt

SEQ ID NO: 5203 - DNA, 15 bp, Homo sapiens
aacatttgcaattag

SEQ ID NO: 5204 - DNA, 15 bp, Homo sapiens
taacatttgcaatta

SEQ ID NO: 5205 - DNA, 15 bp, Homo sapiens
ttaacatttgcaatt

SEQ ID NO: 5206 - DNA, 15 bp, Homo sapiens
attaacatttgcaat

SEQ ID NO: 5207 - DNA, 15 bp, Homo sapiens
tattaacatttgcaa

SEQ ID NO: 5208 - DNA, 15 bp, Homo sapiens
atattaacatttgca

SEQ ID NO: 5209 - DNA, 15 bp, Homo sapiens
catattaacatttgc

SEQ ID NO: 5210 - DNA, 15 bp, Homo sapiens
acatattaacatttg

SEQ ID NO: 5211 - DNA, 15 bp, Homo sapiens
cacatattaacattt

SEQ ID NO: 5212 - DNA, 15 bp, Homo sapiens
gcacatattaacatt

SEQ ID NO: 5213 - DNA, 15 bp, Homo sapiens
tgcacatattaacat

SEQ ID NO: 5214 - DNA, 15 bp, Homo sapiens
ttgcacatattaaca

SEQ ID NO: 5215 - DNA, 15 bp, Homo sapiens
attgcacatattaac

SEQ ID NO: 5216 - DNA, 15 bp, Homo sapiens
tattgcacatattaa

SEQ ID NO: 5217 - DNA, 15 bp, Homo sapiens
atattgcacatatta

SEQ ID NO: 5218 - DNA, 15 bp, Homo sapiens
tatattgcacatatt

SEQ ID NO: 5219 - DNA, 15 bp, Homo sapiens
ttatattgcacatat

SEQ ID NO: 5220 - DNA, 15 bp, Homo sapiens
attatattgcacata

SEQ ID NO: 5221 - DNA, 15 bp, Homo sapiens
aattatattgcacat

SEQ ID NO: 5222 - DNA, 15 bp, Homo sapiens
aaattatattgcaca

SEQ ID NO: 5223 - DNA, 15 bp, Homo sapiens
gaaattatattgcac

SEQ ID NO: 5224 - DNA, 15 bp, Homo sapiens
tgaaattatattgca

SEQ ID NO: 5225 - DNA, 15 bp, Homo sapiens
ctgaaattatattgc

SEQ ID NO: 5226 - DNA, 15 bp, Homo sapiens
actgaaattatattg

SEQ ID NO: 5227 - DNA, 15 bp, Homo sapiens
gactgaaattatatt

SEQ ID NO: 5228 - DNA, 15 bp, Homo sapiens
agactgaaattatat

SEQ ID NO: 5229 - DNA, 15 bp, Homo sapiens
gagactgaaattata

SEQ ID NO: 5230 - DNA, 15 bp, Homo sapiens
ggagactgaaattat

SEQ ID NO: 5231 - DNA, 15 bp, Homo sapiens
tggagactgaaatta

SEQ ID NO: 5232 - DNA, 15 bp, Homo sapiens
atggagactgaaatt

SEQ ID NO: 5233 - DNA, 15 bp, Homo sapiens
gatggagactgaaat

SEQ ID NO: 5234 - DNA, 15 bp, Homo sapiens
ggatggagactgaaa

SEQ ID NO: 5235 - DNA, 15 bp, Homo sapiens
aggatggagactgaa

SEQ ID NO: 5236 - DNA, 15 bp, Homo sapiens
taggatggagactga

SEQ ID NO: 5237 - DNA, 15 bp, Homo sapiens
gtaggatggagactg

SEQ ID NO: 5238 - DNA, 15 bp, Homo sapiens
tgtaggatggagact

SEQ ID NO: 5239 - DNA, 15 bp, Homo sapiens
atgtaggatggagac

SEQ ID NO: 5240 - DNA, 15 bp, Homo sapiens
tatgtaggatggaga

SEQ ID NO: 5241 - DNA, 15 bp, Homo sapiens
atatgtaggatggag

SEQ ID NO: 5242 - DNA, 15 bp, Homo sapiens
tatatgtaggatgga

SEQ ID NO: 5243 - DNA, 15 bp, Homo sapiens
gtatatgtaggatgg

SEQ ID NO: 5244 - DNA, 15 bp, Homo sapiens
tgtatatgtaggatg

SEQ ID NO: 5245 - DNA, 15 bp, Homo sapiens
atgtatatgtaggat

SEQ ID NO: 5246 - DNA, 15 bp, Homo sapiens
aatgtatatgtagga

SEQ ID NO: 5247 - DNA, 15 bp, Homo sapiens
aaatgtatatgtagg

SEQ ID NO: 5248 - DNA, 15 bp, Homo sapiens
aaaatgtatatgtag

SEQ ID NO: 5249 - DNA, 15 bp, Homo sapiens
aaaaatgtatatgta

SEQ ID NO: 5250 - DNA, 15 bp, Homo sapiens
aaaaaatgtatatgt

SEQ ID NO: 5251 - DNA, 15 bp, Homo sapiens
aaaaaaatgtatatg

SEQ ID NO: 5252 - DNA, 15 bp, Homo sapiens
aaaaaaaatgtatat

SEQ ID NO: 5253 - DNA, 15 bp, Homo sapiens
aaaaaaaaatgtata

SEQ ID NO: 5254 - DNA, 15 bp, Homo sapiens
taaaaaaaaatgtat

SEQ ID NO: 5255 - DNA, 15 bp, Homo sapiens
gtaaaaaaaaatgta

SEQ ID NO: 5256 - DNA, 15 bp, Homo sapiens
ggtaaaaaaaaatgt

SEQ ID NO: 5257 - DNA, 15 bp, Homo sapiens
tggtaaaaaaaaatg

SEQ ID NO: 5258 - DNA, 15 bp, Homo sapiens
gtggtaaaaaaaaat

SEQ ID NO: 5259 - DNA, 15 bp, Homo sapiens
ggtggtaaaaaaaaa

SEQ ID NO: 5260 - DNA, 15 bp, Homo sapiens
tggtggtaaaaaaaa

SEQ ID NO: 5261 - DNA, 15 bp, Homo sapiens
ctggtggtaaaaaaa

SEQ ID NO: 5262 - DNA, 15 bp, Homo sapiens
actggtggtaaaaaa

SEQ ID NO: 5263 - DNA, 15 bp, Homo sapiens
tactggtggtaaaaa

SEQ ID NO: 5264 - DNA, 15 bp, Homo sapiens
gtactggtggtaaaa

SEQ ID NO: 5265 - DNA, 15 bp, Homo sapiens
agtactggtggtaaa

SEQ ID NO: 5266 - DNA, 15 bp, Homo sapiens
gagtactggtggtaa

SEQ ID NO: 5267 - DNA, 15 bp, Homo sapiens
tgagtactggtggta

SEQ ID NO: 5268 - DNA, 15 bp, Homo sapiens
ttgagtactggtggt

SEQ ID NO: 5269 - DNA, 15 bp, Homo sapiens
tttgagtactggtgg

SEQ ID NO: 5270 - DNA, 15 bp, Homo sapiens
ttttgagtactggtg

SEQ ID NO: 5271 - DNA, 15 bp, Homo sapiens
attttgagtactggt

SEQ ID NO: 5272 - DNA, 15 bp, Homo sapiens
cattttgagtactgg

SEQ ID NO: 5273 - DNA, 15 bp, Homo sapiens
acattttgagtactg

SEQ ID NO: 5274 - DNA, 15 bp, Homo sapiens
aacattttgagtact

SEQ ID NO: 5275 - DNA, 15 bp, Homo sapiens
aaacattttgagtac

SEQ ID NO: 5276 - DNA, 15 bp, Homo sapiens
taaacattttgagta

SEQ ID NO: 5277 - DNA, 15 bp, Homo sapiens
ataaacattttgagt

SEQ ID NO: 5278 - DNA, 15 bp, Homo sapiens
aataaacattttgag

SEQ ID NO: 5279 - DNA, 15 bp, Homo sapiens
aaataaacattttga

SEQ ID NO: 5280 - DNA, 15 bp, Homo sapiens
caaataaacattttg

SEQ ID NO: 5281 - DNA, 15 bp, Homo sapiens
acaaataaacatttt

SEQ ID NO: 5282 - DNA, 15 bp, Homo sapiens
tacaaataaacattt

SEQ ID NO: 5283 - DNA, 15 bp, Homo sapiens
gtacaaataaacatt

SEQ ID NO: 5284 - DNA, 15 bp, Homo sapiens
agtacaaataaacat

SEQ ID NO: 5285 - DNA, 15 bp, Homo sapiens
aagtacaaataaaca

SEQ ID NO: 5286 - DNA, 15 bp, Homo sapiens
gaagtacaaataaac

SEQ ID NO: 5287 - DNA, 15 bp, Homo sapiens
agaagtacaaataaa

SEQ ID NO: 5288 - DNA, 15 bp, Homo sapiens
gagaagtacaaataa

SEQ ID NO: 5289 - DNA, 15 bp, Homo sapiens
tgagaagtacaaata

SEQ ID NO: 5290 - DNA, 15 bp, Homo sapiens
ttgagaagtacaaat

SEQ ID NO: 5291 - DNA, 15 bp, Homo sapiens
attgagaagtacaaa

SEQ ID NO: 5292 - DNA, 15 bp, Homo sapiens
aattgagaagtacaa

SEQ ID NO: 5293 - DNA, 15 bp, Homo sapiens
gaattgagaagtaca

SEQ ID NO: 5294 - DNA, 15 bp, Homo sapiens
ggaattgagaagtac

SEQ ID NO: 5295 - DNA, 15 bp, Homo sapiens
aggaattgagaagta

SEQ ID NO: 5296 - DNA, 15 bp, Homo sapiens
taggaattgagaagt

SEQ ID NO: 5297 - DNA, 15 bp, Homo sapiens
ataggaattgagaag

SEQ ID NO: 5298 - DNA, 15 bp, Homo sapiens
gataggaattgagaa

SEQ ID NO: 5299 - DNA, 15 bp, Homo sapiens
tgataggaattgaga

SEQ ID NO: 5300 - DNA, 15 bp, Homo sapiens
ttgataggaattgag

SEQ ID NO: 5301 - DNA, 15 bp, Homo sapiens
attgataggaattga

SEQ ID NO: 5302 - DNA, 15 bp, Homo sapiens
cattgataggaattg

SEQ ID NO: 5303 - DNA, 15 bp, Homo sapiens
tcattgataggaatt

SEQ ID NO: 5304 - DNA, 15 bp, Homo sapiens
atcattgataggaat

SEQ ID NO: 5305 - DNA, 15 bp, Homo sapiens
aatcattgataggaa

SEQ ID NO: 5306 - DNA, 15 bp, Homo sapiens
aaatcattgatagga

SEQ ID NO: 5307 - DNA, 15 bp, Homo sapiens
gaaatcattgatagg

SEQ ID NO: 5308 - DNA, 15 bp, Homo sapiens
agaaatcattgatag

SEQ ID NO: 5309 - DNA, 15 bp, Homo sapiens
tagaaatcattgata

SEQ ID NO: 5310 - DNA, 15 bp, Homo sapiens
ttagaaatcattgat

SEQ ID NO: 5311 - DNA, 15 bp, Homo sapiens
attagaaatcattga

SEQ ID NO: 5312 - DNA, 15 bp, Homo sapiens
cattagaaatcattg

SEQ ID NO: 5313 - DNA, 15 bp, Homo sapiens
gcattagaaatcatt

SEQ ID NO: 5314 - DNA, 15 bp, Homo sapiens
agcattagaaatcat

SEQ ID NO: 5315 - DNA, 15 bp, Homo sapiens
cagcattagaaatca

SEQ ID NO: 5316 - DNA, 15 bp, Homo sapiens
ccagcattagaaatc

SEQ ID NO: 5317 - DNA, 15 bp, Homo sapiens
accagcattagaaat

SEQ ID NO: 5318 - DNA, 15 bp, Homo sapiens
caccagcattagaaa

SEQ ID NO: 5319 - DNA, 15 bp, Homo sapiens
acaccagcattagaa

SEQ ID NO: 5320 - DNA, 15 bp, Homo sapiens
tacaccagcattaga

SEQ ID NO: 5321 - DNA, 15 bp, Homo sapiens
atacaccagcattag

SEQ ID NO: 5322 - DNA, 15 bp, Homo sapiens
catacaccagcatta

SEQ ID NO: 5323 - DNA, 15 bp, Homo sapiens
tcatacaccagcatt

SEQ ID NO: 5324 - DNA, 15 bp, Homo sapiens
ttcatacaccagcat

SEQ ID NO: 5325 - DNA, 15 bp, Homo sapiens
tttcatacaccagca

SEQ ID NO: 5326 - DNA, 15 bp, Homo sapiens
ttttcatacaccagc

SEQ ID NO: 5327 - DNA, 15 bp, Homo sapiens
cttttcatacaccag

SEQ ID NO: 5328 - DNA, 15 bp, Homo sapiens
gcttttcatacacca

SEQ ID NO: 5329 - DNA, 15 bp, Homo sapiens
tgcttttcatacacc

SEQ ID NO: 5330 - DNA, 15 bp, Homo sapiens
atgcttttcatacac

SEQ ID NO: 5331 - DNA, 15 bp, Homo sapiens
catgcttttcataca

SEQ ID NO: 5332 - DNA, 15 bp, Homo sapiens
gcatgcttttcatac

SEQ ID NO: 5333 - DNA, 15 bp, Homo sapiens
agcatgcttttcata

SEQ ID NO: 5334 - DNA, 15 bp, Homo sapiens
aagcatgcttttcat

SEQ ID NO: 5335 - DNA, 15 bp, Homo sapiens
caagcatgcttttca

SEQ ID NO: 5336 - DNA, 15 bp, Homo sapiens
tcaagcatgcttttc

SEQ ID NO: 5337 - DNA, 15 bp, Homo sapiens
ttcaagcatgctttt

SEQ ID NO: 5338 - DNA, 15 bp, Homo sapiens
tttcaagcatgcttt

SEQ ID NO: 5339 - DNA, 15 bp, Homo sapiens
atttcaagcatgctt

SEQ ID NO: 5340 - DNA, 15 bp, Homo sapiens
aatttcaagcatgct

SEQ ID NO: 5341 - DNA, 15 bp, Homo sapiens
caatttcaagcatgc

SEQ ID NO: 5342 - DNA, 15 bp, Homo sapiens
acaatttcaagcatg

SEQ ID NO: 5343 - DNA, 15 bp, Homo sapiens
aacaatttcaagcat

SEQ ID NO: 5344 - DNA, 15 bp, Homo sapiens
aaacaatttcaagca

SEQ ID NO: 5345 - DNA, 15 bp, Homo sapiens
caaacaatttcaagc

SEQ ID NO: 5346 - DNA, 15 bp, Homo sapiens
tcaaacaatttcaag

SEQ ID NO: 5347 - DNA, 15 bp, Homo sapiens
ttcaaacaatttcaa

SEQ ID NO: 5348 - DNA, 15 bp, Homo sapiens
tttcaaacaatttca

SEQ ID NO: 5349 - DNA, 15 bp, Homo sapiens
atttcaaacaatttc

SEQ ID NO: 5350 - DNA, 15 bp, Homo sapiens
tatttcaaacaattt

SEQ ID NO: 5351 - DNA, 15 bp, Homo sapiens
ttatttcaaacaatt

SEQ ID NO: 5352 - DNA, 15 bp, Homo sapiens
tttatttcaaacaat

SEQ ID NO: 5353 - DNA, 15 bp, Homo sapiens
ctttatttcaaacaa

SEQ ID NO: 5354 - DNA, 15 bp, Homo sapiens
cctttatttcaaaca

SEQ ID NO: 5355 - DNA, 15 bp, Homo sapiens
tcctttatttcaaac

SEQ ID NO: 5356 - DNA, 15 bp, Homo sapiens
gtcctttatttcaaa

SEQ ID NO: 5357 - DNA, 15 bp, Homo sapiens
agtcctttatttcaa

SEQ ID NO: 5358 - DNA, 15 bp, Homo sapiens
aagtcctttatttca

SEQ ID NO: 5359 - DNA, 15 bp, Homo sapiens
taagtcctttatttc

SEQ ID NO: 5360 - DNA, 15 bp, Homo sapiens
ctaagtcctttattt

SEQ ID NO: 5361 - DNA, 15 bp, Homo sapiens
cctaagtcctttatt

SEQ ID NO: 5362 - DNA, 15 bp, Homo sapiens
ccctaagtcctttat

SEQ ID NO: 5363 - DNA, 15 bp, Homo sapiens
tccctaagtccttta

SEQ ID NO: 5364 - DNA, 15 bp, Homo sapiens
gtccctaagtccttt

SEQ ID NO: 5365 - DNA, 15 bp, Homo sapiens
tgtccctaagtcctt

SEQ ID NO: 5366 - DNA, 15 bp, Homo sapiens
ctgtccctaagtcct

SEQ ID NO: 5367 - DNA, 15 bp, Homo sapiens
tctgtccctaagtcc

SEQ ID NO: 5368 - DNA, 15 bp, Homo sapiens
ctctgtccctaagtc

SEQ ID NO: 5369 - DNA, 15 bp, Homo sapiens
actctgtccctaagt

SEQ ID NO: 5370 - DNA, 15 bp, Homo sapiens
cactctgtccctaag

SEQ ID NO: 5371 - DNA, 15 bp, Homo sapiens
ccactctgtccctaa

SEQ ID NO: 5372 - DNA, 15 bp, Homo sapiens
tccactctgtcccta

SEQ ID NO: 5373 - DNA, 15 bp, Homo sapiens
ttccactctgtccct

SEQ ID NO: 5374 - DNA, 15 bp, Homo sapiens
attccactctgtccc

SEQ ID NO: 5375 - DNA, 15 bp, Homo sapiens
cattccactctgtcc

SEQ ID NO: 5376 - DNA, 15 bp, Homo sapiens
gcattccactctgtc

SEQ ID NO: 5377 - DNA, 15 bp, Homo sapiens
agcattccactctgt

SEQ ID NO: 5378 - DNA, 15 bp, Homo sapiens
cagcattccactctg

SEQ ID NO: 5379 - DNA, 15 bp, Homo sapiens
ccagcattccactct

SEQ ID NO: 5380 - DNA, 15 bp, Homo sapiens
tccagcattccactc

SEQ ID NO: 5381 - DNA, 15 bp, Homo sapiens
ttccagcattccact

SEQ ID NO: 5382 - DNA, 15 bp, Homo sapiens
tttccagcattccac

SEQ ID NO: 5383 - DNA, 15 bp, Homo sapiens
atttccagcattcca

SEQ ID NO: 5384 - DNA, 15 bp, Homo sapiens
gatttccagcattcc

SEQ ID NO: 5385 - DNA, 15 bp, Homo sapiens
agatttccagcattc

SEQ ID NO: 5386 - DNA, 15 bp, Homo sapiens
cagatttccagcatt

SEQ ID NO: 5387 - DNA, 15 bp, Homo sapiens
acagatttccagcat

SEQ ID NO: 5388 - DNA, 15 bp, Homo sapiens
tacagatttccagca

SEQ ID NO: 5389 - DNA, 15 bp, Homo sapiens
ttacagatttccagc

SEQ ID NO: 5390 - DNA, 15 bp, Homo sapiens
tttacagatttccag

SEQ ID NO: 5391 - DNA, 15 bp, Homo sapiens
ttttacagatttcca

SEQ ID NO: 5392 - DNA, 15 bp, Homo sapiens
cttttacagatttcc

SEQ ID NO: 5393 - DNA, 15 bp, Homo sapiens
ccttttacagatttc

SEQ ID NO: 5394 - DNA, 15 bp, Homo sapiens
tccttttacagattt

SEQ ID NO: 5395 - DNA, 15 bp, Homo sapiens
gtccttttacagatt

SEQ ID NO: 5396 - DNA, 15 bp, Homo sapiens
agtccttttacagat

SEQ ID NO: 5397 - DNA, 15 bp, Homo sapiens
cagtccttttacaga

SEQ ID NO: 5398 - DNA, 15 bp, Homo sapiens
ccagtccttttacag

SEQ ID NO: 5399 - DNA, 15 bp, Homo sapiens
tccagtccttttaca

SEQ ID NO: 5400 - DNA, 15 bp, Homo sapiens
ttccagtccttttac

SEQ ID NO: 5401 - DNA, 15 bp, Homo sapiens
tttccagtcctttta

SEQ ID NO: 5402 - DNA, 15 bp, Homo sapiens
gtttccagtcctttt

SEQ ID NO: 5403 - DNA, 15 bp, Homo sapiens
cgtttccagtccttt

SEQ ID NO: 5404 - DNA, 15 bp, Homo sapiens
gcgtttccagtcctt

SEQ ID NO: 5405 - DNA, 15 bp, Homo sapiens
agcgtttccagtcct

SEQ ID NO: 5406 - DNA, 15 bp, Homo sapiens
cagcgtttccagtcc

SEQ ID NO: 5407 - DNA, 15 bp, Homo sapiens
ccagcgtttccagtc

SEQ ID NO: 5408 - DNA, 15 bp, Homo sapiens
tccagcgtttccagt

SEQ ID NO: 5409 - DNA, 15 bp, Homo sapiens
ttccagcgtttccag

SEQ ID NO: 5410 - DNA, 15 bp, Homo sapiens
attccagcgtttcca

SEQ ID NO: 5411 - DNA, 15 bp, Homo sapiens
cattccagcgtttcc

SEQ ID NO: 5412 - DNA, 15 bp, Homo sapiens
gcattccagcgtttc

SEQ ID NO: 5413 - DNA, 15 bp, Homo sapiens
agcattccagcgttt

SEQ ID NO: 5414 - DNA, 15 bp, Homo sapiens
cagcattccagcgtt

SEQ ID NO: 5415 - DNA, 15 bp, Homo sapiens
ccagcattccagcgt

SEQ ID NO: 5416 - DNA, 15 bp, Homo sapiens
tccagcattccagcg

SEQ ID NO: 5417 - DNA, 15 bp, Homo sapiens
ttccagcattccagc

SEQ ID NO: 5418 - DNA, 15 bp, Homo sapiens
tttccagcattccag

SEQ ID NO: 5419 - DNA, 15 bp, Homo sapiens
tgatttccagcattc

SEQ ID NO: 5420 - DNA, 15 bp, Homo sapiens
atgatttccagcatt

SEQ ID NO: 5421 - DNA, 15 bp, Homo sapiens
catgatttccagcat

SEQ ID NO: 5422 - DNA, 15 bp, Homo sapiens
ccatgatttccagca

SEQ ID NO: 5423 - DNA, 15 bp, Homo sapiens
accatgatttccagc

SEQ ID NO: 5424 - DNA, 15 bp, Homo sapiens
taccatgatttccag

SEQ ID NO: 5425 - DNA, 15 bp, Homo sapiens
ctaccatgatttcca

SEQ ID NO: 5426 - DNA, 15 bp, Homo sapiens
cctaccatgatttcc

SEQ ID NO: 5427 - DNA, 15 bp, Homo sapiens
gcctaccatgatttc

SEQ ID NO: 5428 - DNA, 15 bp, Homo sapiens
cgcctaccatgattt

SEQ ID NO: 5429 - DNA, 15 bp, Homo sapiens
gcgcctaccatgatt

SEQ ID NO: 5430 - DNA, 15 bp, Homo sapiens
tgcgcctaccatgat

SEQ ID NO: 5431 - DNA, 15 bp, Homo sapiens
atgcgcctaccatga

SEQ ID NO: 5432 - DNA, 15 bp, Homo sapiens
tatgcgcctaccatg

SEQ ID NO: 5433 - DNA, 15 bp, Homo sapiens
ctatgcgcctaccat

SEQ ID NO: 5434 - DNA, 15 bp, Homo sapiens
gctatgcgcctacca

SEQ ID NO: 5435 - DNA, 15 bp, Homo sapiens
ggctatgcgcctacc

SEQ ID NO: 5436 - DNA, 15 bp, Homo sapiens
tggctatgcgcctac

SEQ ID NO: 5437 - DNA, 15 bp, Homo sapiens
ctggctatgcgccta

SEQ ID NO: 5438 - DNA, 15 bp, Homo sapiens
actggctatgcgcct

SEQ ID NO: 5439 - DNA, 15 bp, Homo sapiens
aactggctatgcgcc

SEQ ID NO: 5440 - DNA, 15 bp, Homo sapiens
taactggctatgcgc

SEQ ID NO: 5441 - DNA, 15 bp, Homo sapiens
ataactggctatgcg

SEQ ID NO: 5442 - DNA, 15 bp, Homo sapiens
aataactggctatgc

SEQ ID NO: 5443 - DNA, 15 bp, Homo sapiens
aaataactggctatg

SEQ ID NO: 5444 - DNA, 15 bp, Homo sapiens
aaaataactggctat

SEQ ID NO: 5445 - DNA, 15 bp, Homo sapiens
gaaaataactggcta

SEQ ID NO: 5446 - DNA, 15 bp, Homo sapiens
cgaaaataactggct

SEQ ID NO: 5447 - DNA, 15 bp, Homo sapiens
acgaaaataactggc

SEQ ID NO: 5448 - DNA, 15 bp, Homo sapiens
tacgaaaataactgg

SEQ ID NO: 5449 - DNA, 15 bp, Homo sapiens
ctacgaaaataactg

SEQ ID NO: 5450 - DNA, 15 bp, Homo sapiens
cctacgaaaataact

SEQ ID NO: 5451 - DNA, 15 bp, Homo sapiens
gcctacgaaaataac

SEQ ID NO: 5452 - DNA, 15 bp, Homo sapiens
agcctacgaaaataa

SEQ ID NO: 5453 - DNA, 15 bp, Homo sapiens
aagcctacgaaaata

SEQ ID NO: 5454 - DNA, 15 bp, Homo sapiens
gaagcctacgaaaat

SEQ ID NO: 5455 - DNA, 15 bp, Homo sapiens
agaagcctacgaaaa

SEQ ID NO: 5456 - DNA, 15 bp, Homo sapiens
gagaagcctacgaaa

SEQ ID NO: 5457 - DNA, 15 bp, Homo sapiens
agagaagcctacgaa

SEQ ID NO: 5458 - DNA, 15 bp, Homo sapiens
tagagaagcctacga

SEQ ID NO: 5459 - DNA, 15 bp, Homo sapiens
atagagaagcctacg

SEQ ID NO: 5460 - DNA, 15 bp, Homo sapiens
gatagagaagcctac

SEQ ID NO: 5461 - DNA, 15 bp, Homo sapiens
agatagagaagccta

SEQ ID NO: 5462 - DNA, 15 bp, Homo sapiens
gagatagagaagcct

SEQ ID NO: 5463 - DNA, 15 bp, Homo sapiens
agagatagagaagcc

SEQ ID NO: 5464 - DNA, 15 bp, Homo sapiens
tagagatagagaagc

SEQ ID NO: 5465 - DNA, 15 bp, Homo sapiens
ttagagatagagaag

SEQ ID NO: 5466 - DNA, 15 bp, Homo sapiens
attagagatagagaa

SEQ ID NO: 5467 - DNA, 15 bp, Homo sapiens
aattagagatagaga

SEQ ID NO: 5468 - DNA, 15 bp, Homo sapiens
taattagagatagag

SEQ ID NO: 5469 - DNA, 15 bp, Homo sapiens
gtaattagagataga

SEQ ID NO: 5470 - DNA, 15 bp, Homo sapiens
agtaattagagatag

SEQ ID NO: 5471 - DNA, 15 bp, Homo sapiens
gagtaattagagata

SEQ ID NO: 5472 - DNA, 15 bp, Homo sapiens
tgagtaattagagat

SEQ ID NO: 5473 - DNA, 15 bp, Homo sapiens
ctgagtaattagaga

SEQ ID NO: 5474 - DNA, 15 bp, Homo sapiens
gctgagtaattagag

SEQ ID NO: 5475 - DNA, 15 bp, Homo sapiens
tgctgagtaattaga

SEQ ID NO: 5476 - DNA, 15 bp, Homo sapiens
ctgctgagtaattag

SEQ ID NO: 5477 - DNA, 15 bp, Homo sapiens
tctgctgagtaatta

SEQ ID NO: 5478 - DNA, 15 bp, Homo sapiens
ctctgctgagtaatt

SEQ ID NO: 5479 - DNA, 15 bp, Homo sapiens
cctctgctgagtaat

SEQ ID NO: 5480 - DNA, 15 bp, Homo sapiens
acctctgctgagtaa

SEQ ID NO: 5481 - DNA, 15 bp, Homo sapiens
cacctctgctgagta

SEQ ID NO: 5482 - DNA, 15 bp, Homo sapiens
ccacctctgctgagt

SEQ ID NO: 5483 - DNA, 15 bp, Homo sapiens
accacctctgctgag

SEQ ID NO: 5484 - DNA, 15 bp, Homo sapiens
aaccacctctgctga

SEQ ID NO: 5485 - DNA, 15 bp, Homo sapiens
aaaccacctctgctg

SEQ ID NO: 5486 - DNA, 15 bp, Homo sapiens
aaaaccacctctgct

SEQ ID NO: 5487 - DNA, 15 bp, Homo sapiens
taaaaccacctctgc

SEQ ID NO: 5488 - DNA, 15 bp, Homo sapiens
ataaaaccacctctg

SEQ ID NO: 5489 - DNA, 15 bp, Homo sapiens
aataaaaccacctct

SEQ ID NO: 5490 - DNA, 15 bp, Homo sapiens
aaataaaaccacctc

SEQ ID NO: 5491 - DNA, 15 bp, Homo sapiens
aaaataaaaccacct

SEQ ID NO: 5492 - DNA, 15 bp, Homo sapiens
gaaaataaaaccacc

SEQ ID NO: 5493 - DNA, 15 bp, Homo sapiens
ggaaaataaaaccac

SEQ ID NO: 5494 - DNA, 15 bp, Homo sapiens
aggaaaataaaacca

SEQ ID NO: 5495 - DNA, 15 bp, Homo sapiens
aaggaaaataaaacc

SEQ ID NO: 5496 - DNA, 15 bp, Homo sapiens
caaggaaaataaaac

SEQ ID NO: 5497 - DNA, 15 bp, Homo sapiens
tcaaggaaaataaaa

SEQ ID NO: 5498 - DNA, 15 bp, Homo sapiens
gtcaaggaaaataaa

SEQ ID NO: 5499 - DNA, 15 bp, Homo sapiens
tgtcaaggaaaataa

SEQ ID NO: 5500 - DNA, 15 bp, Homo sapiens
ctgtcaaggaaaata

SEQ ID NO: 5501 - DNA, 15 bp, Homo sapiens
actgtcaaggaaaat

SEQ ID NO: 5502 - DNA, 15 bp, Homo sapiens
gactgtcaaggaaaa

SEQ ID NO: 5503 - DNA, 15 bp, Homo sapiens
agactgtcaaggaaa

SEQ ID NO: 5504 - DNA, 15 bp, Homo sapiens
cagactgtcaaggaa

SEQ ID NO: 5505 - DNA, 15 bp, Homo sapiens
gcagactgtcaagga

SEQ ID NO: 5506 - DNA, 15 bp, Homo sapiens
agcagactgtcaagg

SEQ ID NO: 5507 - DNA, 15 bp, Homo sapiens
gagcagactgtcaag

SEQ ID NO: 5508 - DNA, 15 bp, Homo sapiens
agagcagactgtcaa

SEQ ID NO: 5509 - DNA, 15 bp, Homo sapiens
tagagcagactgtca

SEQ ID NO: 5510 - DNA, 15 bp, Homo sapiens
ctagagcagactgtc

SEQ ID NO: 5511 - DNA, 15 bp, Homo sapiens
cctagagcagactgt

SEQ ID NO: 5512 - DNA, 15 bp, Homo sapiens
tcctagagcagactg

SEQ ID NO: 5513 - DNA, 15 bp, Homo sapiens
ttcctagagcagact

SEQ ID NO: 5514 - DNA, 15 bp, Homo sapiens
cttcctagagcagac

SEQ ID NO: 5515 - DNA, 15 bp, Homo sapiens
gcttcctagagcaga

SEQ ID NO: 5516 - DNA, 15 bp, Homo sapiens
tgcttcctagagcag

SEQ ID NO: 5517 - DNA, 15 bp, Homo sapiens
ttgcttcctagagca

SEQ ID NO: 5518 - DNA, 15 bp, Homo sapiens
attgcttcctagagc

SEQ ID NO: 5519 - DNA, 15 bp, Homo sapiens
gattgcttcctagag

SEQ ID NO: 5520 - DNA, 15 bp, Homo sapiens
tgattgcttcctaga

SEQ ID NO: 5521 - DNA, 15 bp, Homo sapiens
ctgattgcttcctag

SEQ ID NO: 5522 - DNA, 15 bp, Homo sapiens
gctgattgcttccta

SEQ ID NO: 5523 - DNA, 15 bp, Homo sapiens
ggctgattgcttcct

SEQ ID NO: 5524 - DNA, 15 bp, Homo sapiens
tggctgattgcttcc

SEQ ID NO: 5525 - DNA, 15 bp, Homo sapiens
ttggctgattgcttc

SEQ ID NO: 5526 - DNA, 15 bp, Homo sapiens
gttggctgattgctt

SEQ ID NO: 5527 - DNA, 15 bp, Homo sapiens
ggttggctgattgct

SEQ ID NO: 5528 - DNA, 15 bp, Homo sapiens
tggttggctgattgc

SEQ ID NO: 5529 - DNA, 15 bp, Homo sapiens
ctggttggctgattg

SEQ ID NO: 5530 - DNA, 15 bp, Homo sapiens
actggttggctgatt

SEQ ID NO: 5531 - DNA, 15 bp, Homo sapiens
aactggttggctgat

SEQ ID NO: 5532 - DNA, 15 bp, Homo sapiens
aaactggttggctga

SEQ ID NO: 5533 - DNA, 15 bp, Homo sapiens
caaactggttggctg

SEQ ID NO: 5534 - DNA, 15 bp, Homo sapiens
gcaaactggttggct

SEQ ID NO: 5535 - DNA, 15 bp, Homo sapiens
tgcaaactggttggc

SEQ ID NO: 5536 - DNA, 15 bp, Homo sapiens
ttgcaaactggttgg

SEQ ID NO: 5537 - DNA, 15 bp, Homo sapiens
attgcaaactggttg

SEQ ID NO: 5538 - DNA, 15 bp, Homo sapiens
aattgcaaactggtt

SEQ ID NO: 5539 - DNA, 15 bp, Homo sapiens
caattgcaaactggt

SEQ ID NO: 5540 - DNA, 15 bp, Homo sapiens
acaattgcaaactgg

SEQ ID NO: 5541 - DNA, 15 bp, Homo sapiens
tacaattgcaaactg

SEQ ID NO: 5542 - DNA, 15 bp, Homo sapiens
ctacaattgcaaact

SEQ ID NO: 5543 - DNA, 15 bp, Homo sapiens
cctacaattgcaaac

SEQ ID NO: 5544 - DNA, 15 bp, Homo sapiens
ccctacaattgcaaa

SEQ ID NO: 5545 - DNA, 15 bp, Homo sapiens
accctacaattgcaa

SEQ ID NO: 5546 - DNA, 15 bp, Homo sapiens
aaccctacaattgca

SEQ ID NO: 5547 - DNA, 15 bp, Homo sapiens
aaaccctacaattgc

SEQ ID NO: 5548 - DNA, 15 bp, Homo sapiens
caaaccctacaattg

SEQ ID NO: 5549 - DNA, 15 bp, Homo sapiens
acaaaccctacaatt

SEQ ID NO: 5550 - DNA, 15 bp, Homo sapiens
tacaaaccctacaat

SEQ ID NO: 5551 - DNA, 15 bp, Homo sapiens
ttacaaaccctacaa

SEQ ID NO: 5552 - DNA, 15 bp, Homo sapiens
cttacaaaccctaca

SEQ ID NO: 5553 - DNA, 15 bp, Homo sapiens
tcttacaaaccctac

SEQ ID NO: 5554 - DNA, 15 bp, Homo sapiens
ttcttacaaacccta

SEQ ID NO: 5555 - DNA, 15 bp, Homo sapiens
tttcttacaaaccct

SEQ ID NO: 5556 - DNA, 15 bp, Homo sapiens
atttcttacaaaccc

SEQ ID NO: 5557 - DNA, 15 bp, Homo sapiens
catttcttacaaacc

SEQ ID NO: 5558 - DNA, 15 bp, Homo sapiens
tcatttcttacaaac

SEQ ID NO: 5559 - DNA, 15 bp, Homo sapiens
ttcatttcttacaaa

SEQ ID NO: 5560 - DNA, 15 bp, Homo sapiens
tttcatttcttacaa

SEQ ID NO: 5561 - DNA, 15 bp, Homo sapiens
ttttcatttcttaca

SEQ ID NO: 5562 - DNA, 15 bp, Homo sapiens
tttttcatttcttac

SEQ ID NO: 5563 - DNA, 15 bp, Homo sapiens
gtttttcatttctta

SEQ ID NO: 5564 - DNA, 15 bp, Homo sapiens
tgtttttcatttctt

SEQ ID NO: 5565 - DNA, 15 bp, Homo sapiens
gtgtttttcatttct

SEQ ID NO: 5566 - DNA, 15 bp, Homo sapiens
agtgtttttcatttc

SEQ ID NO: 5567 - DNA, 15 bp, Homo sapiens
cagtgtttttcattt

SEQ ID NO: 5568 - DNA, 15 bp, Homo sapiens
gcagtgtttttcatt

SEQ ID NO: 5569 - DNA, 15 bp, Homo sapiens
tgcagtgtttttcat

SEQ ID NO: 5570 - DNA, 15 bp, Homo sapiens
gtgcagtgtttttca

SEQ ID NO: 5571 - DNA, 15 bp, Homo sapiens
ggtgcagtgtttttc

SEQ ID NO: 5572 - DNA, 15 bp, Homo sapiens
aggtgcagtgttttt

SEQ ID NO: 5573 - DNA, 15 bp, Homo sapiens
caggtgcagtgtttt

SEQ ID NO: 5574 - DNA, 15 bp, Homo sapiens
gcaggtgcagtgttt

SEQ ID NO: 5575 - DNA, 15 bp, Homo sapiens
tgcaggtgcagtgtt

SEQ ID NO: 5576 - DNA, 15 bp, Homo sapiens
ttgcaggtgcagtgt

SEQ ID NO: 5577 - DNA, 15 bp, Homo sapiens
cttgcaggtgcagtg

SEQ ID NO: 5578 - DNA, 15 bp, Homo sapiens
acttgcaggtgcagt

SEQ ID NO: 5579 - DNA, 15 bp, Homo sapiens
cacttgcaggtgcag

SEQ ID NO: 5580 - DNA, 15 bp, Homo sapiens
acacttgcaggtgca

SEQ ID NO: 5581 - DNA, 15 bp, Homo sapiens
aacacttgcaggtgc

SEQ ID NO: 5582 - DNA, 15 bp, Homo sapiens
aaacacttgcaggtg

SEQ ID NO: 5583 - DNA, 15 bp, Homo sapiens
aaaacacttgcaggt

SEQ ID NO: 5584 - DNA, 15 bp, Homo sapiens
taaaacacttgcagg

SEQ ID NO: 5585 - DNA, 15 bp, Homo sapiens
ctaaaacacttgcag

SEQ ID NO: 5586 - DNA, 15 bp, Homo sapiens
gctaaaacacttgca

SEQ ID NO: 5587 - DNA, 15 bp, Homo sapiens
tgctaaaacacttgc

SEQ ID NO: 5588 - DNA, 15 bp, Homo sapiens
atgctaaaacacttg

SEQ ID NO: 5589 - DNA, 15 bp, Homo sapiens
gatgctaaaacactt

SEQ ID NO: 5590 - DNA, 15 bp, Homo sapiens
agatgctaaaacact

SEQ ID NO: 5591 - DNA, 15 bp, Homo sapiens
tagatgctaaaacac

SEQ ID NO: 5592 - DNA, 15 bp, Homo sapiens
gtagatgctaaaaca

SEQ ID NO: 5593 - DNA, 15 bp, Homo sapiens
ggtagatgctaaaac

SEQ ID NO: 5594 - DNA, 15 bp, Homo sapiens
tggtagatgctaaaa

SEQ ID NO: 5595 - DNA, 15 bp, Homo sapiens
gtggtagatgctaaa

SEQ ID NO: 5596 - DNA, 15 bp, Homo sapiens
agtggtagatgctaa

SEQ ID NO: 5597 - DNA, 15 bp, Homo sapiens
tagtggtagatgcta

SEQ ID NO: 5598 - DNA, 15 bp, Homo sapiens
atagtggtagatgct

SEQ ID NO: 5599 - DNA, 15 bp, Homo sapiens
aatagtggtagatgc

SEQ ID NO: 5600 - DNA, 15 bp, Homo sapiens
gaatagtggtagatg

SEQ ID NO: 5601 - DNA, 15 bp, Homo sapiens
cgaatagtggtagat

SEQ ID NO: 5602 - DNA, 15 bp, Homo sapiens
ccgaatagtggtaga

SEQ ID NO: 5603 - DNA, 15 bp, Homo sapiens
gccgaatagtggtag

SEQ ID NO: 5604 - DNA, 15 bp, Homo sapiens
agccgaatagtggta

SEQ ID NO: 5605 - DNA, 15 bp, Homo sapiens
aagccgaatagtggt

SEQ ID NO: 5606 - DNA, 15 bp, Homo sapiens
taagccgaatagtgg

SEQ ID NO: 5607 - DNA, 15 bp, Homo sapiens
gtaagccgaatagtg

SEQ ID NO: 5608 - DNA, 15 bp, Homo sapiens
agtaagccgaatagt

SEQ ID NO: 5609 - DNA, 15 bp, Homo sapiens
aagtaagccgaatag

SEQ ID NO: 5610 - DNA, 15 bp, Homo sapiens
taagtaagccgaata

SEQ ID NO: 5611 - DNA, 15 bp, Homo sapiens
gtaagtaagccgaat

SEQ ID NO: 5612 - DNA, 15 bp, Homo sapiens
cgtaagtaagccgaa

SEQ ID NO: 5613 - DNA, 15 bp, Homo sapiens
acgtaagtaagccga

SEQ ID NO: 5614 - DNA, 15 bp, Homo sapiens
tacgtaagtaagccg

SEQ ID NO: 5615 - DNA, 15 bp, Homo sapiens
ttacgtaagtaagcc

SEQ ID NO: 5616 - DNA, 15 bp, Homo sapiens
gttacgtaagtaagc

SEQ ID NO: 5617 - DNA, 15 bp, Homo sapiens
ggttacgtaagtaag

SEQ ID NO: 5618 - DNA, 15 bp, Homo sapiens
aggttacgtaagtaa

SEQ ID NO: 5619 - DNA, 15 bp, Homo sapiens
gaggttacgtaagta

SEQ ID NO: 5620 - DNA, 15 bp, Homo sapiens
ggaggttacgtaagt

SEQ ID NO: 5621 - DNA, 15 bp, Homo sapiens
aggaggttacgtaag

SEQ ID NO: 5622 - DNA, 15 bp, Homo sapiens
aaggaggttacgtaa

SEQ ID NO: 5623 - DNA, 15 bp, Homo sapiens
gaaggaggttacgta

SEQ ID NO: 5624 - DNA, 15 bp, Homo sapiens
ggaaggaggttacgt

SEQ ID NO: 5625 - DNA, 15 bp, Homo sapiens
gggaaggaggttacg

SEQ ID NO: 5626 - DNA, 15 bp, Homo sapiens
tgggaaggaggttac

SEQ ID NO: 5627 - DNA, 15 bp, Homo sapiens
ttgggaaggaggtta

SEQ ID NO: 5628 - DNA, 15 bp, Homo sapiens
cttgggaaggaggtt

SEQ ID NO: 5629 - DNA, 15 bp, Homo sapiens
tcttgggaaggaggt

SEQ ID NO: 5630 - DNA, 15 bp, Homo sapiens
gtcttgggaaggagg

SEQ ID NO: 5631 - DNA, 15 bp, Homo sapiens
ggtcttgggaaggag

SEQ ID NO: 5632 - DNA, 15 bp, Homo sapiens
tggtcttgggaagga

SEQ ID NO: 5633 - DNA, 15 bp, Homo sapiens
ttggtcttgggaagg

SEQ ID NO: 5634 - DNA, 15 bp, Homo sapiens
cttggtcttgggaag

SEQ ID NO: 5635 - DNA, 15 bp, Homo sapiens
acttggtcttgggaa

SEQ ID NO: 5636 - DNA, 15 bp, Homo sapiens
gacttggtcttggga

SEQ ID NO: 5637 - DNA, 15 bp, Homo sapiens
tgacttggtcttggg

SEQ ID NO: 5638 - DNA, 15 bp, Homo sapiens
ctgacttggtcttgg

SEQ ID NO: 5639 - DNA, 15 bp, Homo sapiens
actgacttggtcttg

SEQ ID NO: 5640 - DNA, 15 bp, Homo sapiens
tactgacttggtctt

SEQ ID NO: 5641 - DNA, 15 bp, Homo sapiens
ctactgacttggtct

SEQ ID NO: 5642 - DNA, 15 bp, Homo sapiens
cctactgacttggtc

SEQ ID NO: 5643 - DNA, 15 bp, Homo sapiens
tcctactgacttggt

SEQ ID NO: 5644 - DNA, 15 bp, Homo sapiens
atcctactgacttgg

SEQ ID NO: 5645 - DNA, 15 bp, Homo sapiens
aatcctactgacttg

SEQ ID NO: 5646 - DNA, 15 bp, Homo sapiens
caatcctactgactt

SEQ ID NO: 5647 - DNA, 15 bp, Homo sapiens
acaatcctactgact

SEQ ID NO: 5648 - DNA, 15 bp, Homo sapiens
aacaatcctactgac

SEQ ID NO: 5649 - DNA, 15 bp, Homo sapiens
aaacaatcctactga

SEQ ID NO: 5650 - DNA, 15 bp, Homo sapiens
aaaacaatcctactg

SEQ ID NO: 5651 - DNA, 15 bp, Homo sapiens
aaaaacaatcctact

SEQ ID NO: 5652 - DNA, 15 bp, Homo sapiens
taaaaacaatcctac

SEQ ID NO: 5653 - DNA, 15 bp, Homo sapiens
ttaaaaacaatccta

SEQ ID NO: 5654 - DNA, 15 bp, Homo sapiens
tttaaaaacaatcct

SEQ ID NO: 5655 - DNA, 15 bp, Homo sapiens
ctttaaaaacaatcc

SEQ ID NO: 5656 - DNA, 15 bp, Homo sapiens
gctttaaaaacaatc

SEQ ID NO: 5657 - DNA, 15 bp, Homo sapiens
tgctttaaaaacaat

SEQ ID NO: 5658 - DNA, 15 bp, Homo sapiens
ttgctttaaaaacaa

SEQ ID NO: 5659 - DNA, 15 bp, Homo sapiens
gttgctttaaaaaca

SEQ ID NO: 5660 - DNA, 15 bp, Homo sapiens
ggttgctttaaaaac

SEQ ID NO: 5661 - DNA, 15 bp, Homo sapiens
aggttgctttaaaaa

SEQ ID NO: 5662 - DNA, 15 bp, Homo sapiens
gaggttgctttaaaa

SEQ ID NO: 5663 - DNA, 15 bp, Homo sapiens
agaggttgctttaaa

SEQ ID NO: 5664 - DNA, 15 bp, Homo sapiens
gagaggttgctttaa

SEQ ID NO: 5665 - DNA, 15 bp, Homo sapiens
ggagaggttgcttta

SEQ ID NO: 5666 - DNA, 15 bp, Homo sapiens
tggagaggttgcttt

SEQ ID NO: 5667 - DNA, 15 bp, Homo sapiens
atggagaggttgctt

SEQ ID NO: 5668 - DNA, 15 bp, Homo sapiens
aatggagaggttgct

SEQ ID NO: 5669 - DNA, 15 bp, Homo sapiens
aaatggagaggttgc

SEQ ID NO: 5670 - DNA, 15 bp, Homo sapiens
gaaatggagaggttg

SEQ ID NO: 5671 - DNA, 15 bp, Homo sapiens
agaaatggagaggtt

SEQ ID NO: 5672 - DNA, 15 bp, Homo sapiens
tagaaatggagaggt

SEQ ID NO: 5673 - DNA, 15 bp, Homo sapiens
ctagaaatggagagg

SEQ ID NO: 5674 - DNA, 15 bp, Homo sapiens
cctagaaatggagag

SEQ ID NO: 5675 - DNA, 15 bp, Homo sapiens
tcctagaaatggaga

SEQ ID NO: 5676 - DNA, 15 bp, Homo sapiens
ctcctagaaatggag

SEQ ID NO: 5677 - DNA, 15 bp, Homo sapiens
cctcctagaaatgga

SEQ ID NO: 5678 - DNA, 15 bp, Homo sapiens
ccctcctagaaatgg

SEQ ID NO: 5679 - DNA, 15 bp, Homo sapiens
cccctcctagaaatg

SEQ ID NO: 5680 - DNA, 15 bp, Homo sapiens
gcccctcctagaaat

SEQ ID NO: 5681 - DNA, 15 bp, Homo sapiens
tgcccctcctagaaa

SEQ ID NO: 5682 - DNA, 15 bp, Homo sapiens
gtgcccctcctagaa

SEQ ID NO: 5683 - DNA, 15 bp, Homo sapiens
tgtgcccctcctaga

SEQ ID NO: 5684 - DNA, 15 bp, Homo sapiens
ttgtgcccctcctag

SEQ ID NO: 5685 - DNA, 15 bp, Homo sapiens
tttgtgcccctccta

SEQ ID NO: 5686 - DNA, 15 bp, Homo sapiens
ttttgtgcccctcct

SEQ ID NO: 5687 - DNA, 15 bp, Homo sapiens
cttttgtgcccctcc

SEQ ID NO: 5688 - DNA, 15 bp, Homo sapiens
gcttttgtgcccctc

SEQ ID NO: 5689 - DNA, 15 bp, Homo sapiens
agcttttgtgcccct

SEQ ID NO: 5690 - DNA, 15 bp, Homo sapiens
tagcttttgtgcccc

SEQ ID NO: 5691 - DNA, 15 bp, Homo sapiens
ctagcttttgtgccc

SEQ ID NO: 5692 - DNA, 15 bp, Homo sapiens
gctagcttttgtgcc

SEQ ID NO: 5693 - DNA, 15 bp, Homo sapiens
tgctagcttttgtgc

SEQ ID NO: 5694 - DNA, 15 bp, Homo sapiens
ttgctagcttttgtg

SEQ ID NO: 5695 - DNA, 15 bp, Homo sapiens
tttgctagcttttgt

SEQ ID NO: 5696 - DNA, 15 bp, Homo sapiens
atttgctagcttttg

SEQ ID NO: 5697 - DNA, 15 bp, Homo sapiens
tatttgctagctttt

SEQ ID NO: 5698 - DNA, 15 bp, Homo sapiens
gtatttgctagcttt

SEQ ID NO: 5699 - DNA, 15 bp, Homo sapiens
ggtatttgctagctt

SEQ ID NO: 5700 - DNA, 15 bp, Homo sapiens
gggtatttgctagct

SEQ ID NO: 5701 - DNA, 15 bp, Homo sapiens
ggggtatttgctagc

SEQ ID NO: 5702 - DNA, 15 bp, Homo sapiens
tggggtatttgctag

SEQ ID NO: 5703 - DNA, 15 bp, Homo sapiens
ttggggtatttgcta

SEQ ID NO: 5704 - DNA, 15 bp, Homo sapiens
gttggggtatttgct

SEQ ID NO: 5705 - DNA, 15 bp, Homo sapiens
ggttggggtatttgc

SEQ ID NO: 5706 - DNA, 15 bp, Homo sapiens
gggttggggtatttg

SEQ ID NO: 5707 - DNA, 15 bp, Homo sapiens
cgggttggggtattt

SEQ ID NO: 5708 - DNA, 15 bp, Homo sapiens
tcgggttggggtatt

SEQ ID NO: 5709 - DNA, 15 bp, Homo sapiens
ttcgggttggggtat

SEQ ID NO: 5710 - DNA, 15 bp, Homo sapiens
attcgggttggggta

SEQ ID NO: 5711 - DNA, 15 bp, Homo sapiens
tattcgggttggggt

SEQ ID NO: 5712 - DNA, 15 bp, Homo sapiens
gtattcgggttgggg

SEQ ID NO: 5713 - DNA, 15 bp, Homo sapiens
tgtattcgggttggg

SEQ ID NO: 5714 - DNA, 15 bp, Homo sapiens
ttgtattcgggttgg

SEQ ID NO: 5715 - DNA, 15 bp, Homo sapiens
cttgtattcgggttg

SEQ ID NO: 5716 - DNA, 15 bp, Homo sapiens
gcttgtattcgggtt

SEQ ID NO: 5717 - DNA, 15 bp, Homo sapiens
cgcttgtattcgggt

SEQ ID NO: 5718 - DNA, 15 bp, Homo sapiens
tcgcttgtattcggg

SEQ ID NO: 5719 - DNA, 15 bp, Homo sapiens
ctcgcttgtattcgg

SEQ ID NO: 5720 - DNA, 15 bp, Homo sapiens
cctcgcttgtattcg

SEQ ID NO: 5721 - DNA, 15 bp, Homo sapiens
acctcgcttgtattc

SEQ ID NO: 5722 - DNA, 15 bp, Homo sapiens
aacctcgcttgtatt

SEQ ID NO: 5723 - DNA, 15 bp, Homo sapiens
caacctcgcttgtat

SEQ ID NO: 5724 - DNA, 15 bp, Homo sapiens
acaacctcgcttgta

SEQ ID NO: 5725 - DNA, 15 bp, Homo sapiens
cacaacctcgcttgt

SEQ ID NO: 5726 - DNA, 15 bp, Homo sapiens
ccacaacctcgcttg

SEQ ID NO: 5727 - DNA, 15 bp, Homo sapiens
tccacaacctcgctt

SEQ ID NO: 5728 - DNA, 15 bp, Homo sapiens
ctccacaacctcgct

SEQ ID NO: 5729 - DNA, 15 bp, Homo sapiens
tctccacaacctcgc

SEQ ID NO: 5730 - DNA, 15 bp, Homo sapiens
ttctccacaacctcg

SEQ ID NO: 5731 - DNA, 15 bp, Homo sapiens
tttctccacaacctc

SEQ ID NO: 5732 - DNA, 15 bp, Homo sapiens
ctttctccacaacct

SEQ ID NO: 5733 - DNA, 15 bp, Homo sapiens
actttctccacaacc

SEQ ID NO: 5734 - DNA, 15 bp, Homo sapiens
tactttctccacaac

SEQ ID NO: 5735 - DNA, 15 bp, Homo sapiens
ttactttctccacaa

SEQ ID NO: 5736 - DNA, 15 bp, Homo sapiens
attactttctccaca

SEQ ID NO: 5737 - DNA, 15 bp, Homo sapiens
cattactttctccac

SEQ ID NO: 5738 - DNA, 15 bp, Homo sapiens
tcattactttctcca

SEQ ID NO: 5739 - DNA, 15 bp, Homo sapiens
ttcattactttctcc

SEQ ID NO: 5740 - DNA, 15 bp, Homo sapiens
cttcattactttctc

SEQ ID NO: 5741 - DNA, 15 bp, Homo sapiens
ccttcattactttct

SEQ ID NO: 5742 - DNA, 15 bp, Homo sapiens
tccttcattactttc

SEQ ID NO: 5743 - DNA, 15 bp, Homo sapiens
ctccttcattacttt

SEQ ID NO: 5744 - DNA, 15 bp, Homo sapiens
actccttcattactt

SEQ ID NO: 5745 - DNA, 15 bp, Homo sapiens
aactccttcattact

SEQ ID NO: 5746 - DNA, 15 bp, Homo sapiens
aaactccttcattac

SEQ ID NO: 5747 - DNA, 15 bp, Homo sapiens
caaactccttcatta

SEQ ID NO: 5748 - DNA, 15 bp, Homo sapiens
acaaactccttcatt

SEQ ID NO: 5749 - DNA, 15 bp, Homo sapiens
cacaaactccttcat

SEQ ID NO: 5750 - DNA, 15 bp, Homo sapiens
acacaaactccttca

SEQ ID NO: 5751 - DNA, 15 bp, Homo sapiens
cacacaaactccttc

SEQ ID NO: 5752 - DNA, 15 bp, Homo sapiens
gcacacaaactcctt

SEQ ID NO: 5753 - DNA, 15 bp, Homo sapiens
tgcacacaaactcct

SEQ ID NO: 5754 - DNA, 15 bp, Homo sapiens
ttgcacacaaactcc

SEQ ID NO: 5755 - DNA, 15 bp, Homo sapiens
tttgcacacaaactc

SEQ ID NO: 5756 - DNA, 15 bp, Homo sapiens
gtttgcacacaaact

SEQ ID NO: 5757 - DNA, 15 bp, Homo sapiens
tgtttgcacacaaac

SEQ ID NO: 5758 - DNA, 15 bp, Homo sapiens
ctgtttgcacacaaa

SEQ ID NO: 5759 - DNA, 15 bp, Homo sapiens
gctgtttgcacacaa

SEQ ID NO: 5760 - DNA, 15 bp, Homo sapiens
cgctgtttgcacaca

SEQ ID NO: 5761 - DNA, 15 bp, Homo sapiens
ccgctgtttgcacac

SEQ ID NO: 5762 - DNA, 15 bp, Homo sapiens
cccgctgtttgcaca

SEQ ID NO: 5763 - DNA, 15 bp, Homo sapiens
ccccgctgtttgcac

SEQ ID NO: 5764 - DNA, 15 bp, Homo sapiens
tccccgctgtttgca

SEQ ID NO: 5765 - DNA, 15 bp, Homo sapiens
ttccccgctgtttgc

SEQ ID NO: 5766 - DNA, 15 bp, Homo sapiens
tttccccgctgtttg

SEQ ID NO: 5767 - DNA, 15 bp, Homo sapiens
ctttccccgctgttt

SEQ ID NO: 5768 - DNA, 15 bp, Homo sapiens
cctttccccgctgtt

SEQ ID NO: 5769 - DNA, 15 bp, Homo sapiens
tcctttccccgctgt

SEQ ID NO: 5770 - DNA, 15 bp, Homo sapiens
ctcctttccccgctg

SEQ ID NO: 5771 - DNA, 15 bp, Homo sapiens
cctcctttccccgct

SEQ ID NO: 5772 - DNA, 15 bp, Homo sapiens
acctcctttccccgc

SEQ ID NO: 5773 - DNA, 15 bp, Homo sapiens
aacctcctttccccg

SEQ ID NO: 5774 - DNA, 15 bp, Homo sapiens
gaacctcctttcccc

SEQ ID NO: 5775 - DNA, 15 bp, Homo sapiens
agaacctcctttccc

SEQ ID NO: 5776 - DNA, 15 bp, Homo sapiens
cagaacctcctttcc

SEQ ID NO: 5777 - DNA, 15 bp, Homo sapiens
acagaacctcctttc

SEQ ID NO: 5778 - DNA, 15 bp, Homo sapiens
aacagaacctccttt

SEQ ID NO: 5779 - DNA, 15 bp, Homo sapiens
caacagaacctcctt

SEQ ID NO: 5780 - DNA, 15 bp, Homo sapiens
tcaacagaacctcct

SEQ ID NO: 5781 - DNA, 15 bp, Homo sapiens
ttcaacagaacctcc

SEQ ID NO: 5782 - DNA, 15 bp, Homo sapiens
attcaacagaacctc

SEQ ID NO: 5783 - DNA, 15 bp, Homo sapiens
aattcaacagaacct

SEQ ID NO: 5784 - DNA, 15 bp, Homo sapiens
caattcaacagaacc

SEQ ID NO: 5785 - DNA, 15 bp, Homo sapiens
acaattcaacagaac

SEQ ID NO: 5786 - DNA, 15 bp, Homo sapiens
tacaattcaacagaa

SEQ ID NO: 5787 - DNA, 15 bp, Homo sapiens
gtacaattcaacaga

SEQ ID NO: 5788 - DNA, 15 bp, Homo sapiens
ggtacaattcaacag

SEQ ID NO: 5789 - DNA, 15 bp, Homo sapiens
cggtacaattcaaca

SEQ ID NO: 5790 - DNA, 15 bp, Homo sapiens
acggtacaattcaac

SEQ ID NO: 5791 - DNA, 15 bp, Homo sapiens
cacggtacaattcaa

SEQ ID NO: 5792 - DNA, 15 bp, Homo sapiens
acacggtacaattca

SEQ ID NO: 5793 - DNA, 15 bp, Homo sapiens
cacacggtacaattc

SEQ ID NO: 5794 - DNA, 15 bp, Homo sapiens
acacacggtacaatt

SEQ ID NO: 5795 - DNA, 15 bp, Homo sapiens
gacacacggtacaat

SEQ ID NO: 5796 - DNA, 15 bp, Homo sapiens
ggacacacggtacaa

SEQ ID NO: 5797 - DNA, 15 bp, Homo sapiens
cggacacacggtaca

SEQ ID NO: 5798 - DNA, 15 bp, Homo sapiens
acggacacacggtac

SEQ ID NO: 5799 - DNA, 15 bp, Homo sapiens
aacggacacacggta

SEQ ID NO: 5800 - DNA, 15 bp, Homo sapiens
gaacggacacacggt

SEQ ID NO: 5801 - DNA, 15 bp, Homo sapiens
agaacggacacacgg

SEQ ID NO: 5802 - DNA, 15 bp, Homo sapiens
gagaacggacacacg

SEQ ID NO: 5803 - DNA, 15 bp, Homo sapiens
cgagaacggacacac

SEQ ID NO: 5804 - DNA, 15 bp, Homo sapiens
acgagaacggacaca

SEQ ID NO: 5805 - DNA, 15 bp, Homo sapiens
cacgagaacggacac

SEQ ID NO: 5806 - DNA, 15 bp, Homo sapiens
gcacgagaacggaca

SEQ ID NO: 5807 - DNA, 15 bp, Homo sapiens
agcacgagaacggac

SEQ ID NO: 5808 - DNA, 15 bp, Homo sapiens
cagcacgagaacgga

SEQ ID NO: 5809 - DNA, 15 bp, Homo sapiens
acagcacgagaacgg

SEQ ID NO: 5810 - DNA, 15 bp, Homo sapiens
tacagcacgagaacg

SEQ ID NO: 5811 - DNA, 15 bp, Homo sapiens
gtacagcacgagaac

SEQ ID NO: 5812 - DNA, 15 bp, Homo sapiens
tgtacagcacgagaa

SEQ ID NO: 5813 - DNA, 15 bp, Homo sapiens
ctgtacagcacgaga

SEQ ID NO: 5814 - DNA, 15 bp, Homo sapiens
cctgtacagcacgag

SEQ ID NO: 5815 - DNA, 15 bp, Homo sapiens
gcctgtacagcacga

SEQ ID NO: 5816 - DNA, 15 bp, Homo sapiens
tgcctgtacagcacg

SEQ ID NO: 5817 - DNA, 15 bp, Homo sapiens
ttgcctgtacagcac

SEQ ID NO: 5818 - DNA, 15 bp, Homo sapiens
attgcctgtacagca

SEQ ID NO: 5819 - DNA, 15 bp, Homo sapiens
cattgcctgtacagc

SEQ ID NO: 5820 - DNA, 15 bp, Homo sapiens
tcattgcctgtacag

SEQ ID NO: 5821 - DNA, 15 bp, Homo sapiens
ctcattgcctgtaca

SEQ ID NO: 5822 - DNA, 15 bp, Homo sapiens
actcattgcctgtac

SEQ ID NO: 5823 - DNA, 15 bp, Homo sapiens
cactcattgcctgta

SEQ ID NO: 5824 - DNA, 15 bp, Homo sapiens
acactcattgcctgt

SEQ ID NO: 5825 - DNA, 15 bp, Homo sapiens
tacactcattgcctg

SEQ ID NO: 5826 - DNA, 15 bp, Homo sapiens
ctacactcattgcct

SEQ ID NO: 5827 - DNA, 15 bp, Homo sapiens
actacactcattgcc

SEQ ID NO: 5828 - DNA, 15 bp, Homo sapiens
gactacactcattgc

SEQ ID NO: 5829 - DNA, 15 bp, Homo sapiens
agactacactcattg

SEQ ID NO: 5830 - DNA, 15 bp, Homo sapiens
cagactacactcatt

SEQ ID NO: 5831 - DNA, 15 bp, Homo sapiens
acagactacactcat

SEQ ID NO: 5832 - DNA, 15 bp, Homo sapiens
cacagactacactca

SEQ ID NO: 5833 - DNA, 15 bp, Homo sapiens
gcacagactacactc

SEQ ID NO: 5834 - DNA, 15 bp, Homo sapiens
cgcacagactacact

SEQ ID NO: 5835 - DNA, 15 bp, Homo sapiens
tcgcacagactacac

SEQ ID NO: 5836 - DNA, 15 bp, Homo sapiens
ttcgcacagactaca

SEQ ID NO: 5837 - DNA, 15 bp, Homo sapiens
gttcgcacagactac

SEQ ID NO: 5838 - DNA, 15 bp, Homo sapiens
ggttcgcacagacta

SEQ ID NO: 5839 - DNA, 15 bp, Homo sapiens
cggttcgcacagact

SEQ ID NO: 5840 - DNA, 15 bp, Homo sapiens
ccggttcgcacagac

SEQ ID NO: 5841 - DNA, 15 bp, Homo sapiens
cccggttcgcacaga

SEQ ID NO: 5842 - DNA, 15 bp, Homo sapiens
acccggttcgcacag

SEQ ID NO: 5843 - DNA, 15 bp, Homo sapiens
cacccggttcgcaca

SEQ ID NO: 5844 - DNA, 15 bp, Homo sapiens
acacccggttcgcac

SEQ ID NO: 5845 - DNA, 15 bp, Homo sapiens
cacacccggttcgca

SEQ ID NO: 5846 - DNA, 15 bp, Homo sapiens
acacacccggttcgc

SEQ ID NO: 5847 - DNA, 15 bp, Homo sapiens
cacacacccggttcg

SEQ ID NO: 5848 - DNA, 15 bp, Homo sapiens
tcacacacccggttc

SEQ ID NO: 5849 - DNA, 15 bp, Homo sapiens
gtcacacacccggtt

SEQ ID NO: 5850 - DNA, 15 bp, Homo sapiens
cgtcacacacccggt

SEQ ID NO: 5851 - DNA, 15 bp, Homo sapiens
acgtcacacacccgg

SEQ ID NO: 5852 - DNA, 15 bp, Homo sapiens
aacgtcacacacccg

SEQ ID NO: 5853 - DNA, 15 bp, Homo sapiens
aaacgtcacacaccc

SEQ ID NO: 5854 - DNA, 15 bp, Homo sapiens
caaacgtcacacacc

SEQ ID NO: 5855 - DNA, 15 bp, Homo sapiens
gcaaacgtcacacac

SEQ ID NO: 5856 - DNA, 15 bp, Homo sapiens
agcaaacgtcacaca

SEQ ID NO: 5857 - DNA, 15 bp, Homo sapiens
aagcaaacgtcacac

SEQ ID NO: 5858 - DNA, 15 bp, Homo sapiens
aaagcaaacgtcaca

SEQ ID NO: 5859 - DNA, 15 bp, Homo sapiens
aaaagcaaacgtcac

SEQ ID NO: 5860 - DNA, 15 bp, Homo sapiens
gaaaagcaaacgtca

SEQ ID NO: 5861 - DNA, 15 bp, Homo sapiens
cgaaaagcaaacgtc

SEQ ID NO: 5862 - DNA, 15 bp, Homo sapiens
ccgaaaagcaaacgt

SEQ ID NO: 5863 - DNA, 15 bp, Homo sapiens
cccgaaaagcaaacg

SEQ ID NO: 5864 - DNA, 15 bp, Homo sapiens
acccgaaaagcaaac

SEQ ID NO: 5865 - DNA, 15 bp, Homo sapiens
cacccgaaaagcaaa

SEQ ID NO: 5866 - DNA, 15 bp, Homo sapiens
acacccgaaaagcaa

SEQ ID NO: 5867 - DNA, 15 bp, Homo sapiens
tacacccgaaaagca

SEQ ID NO: 5868 - DNA, 15 bp, Homo sapiens
gtacacccgaaaagc

SEQ ID NO: 5869 - DNA, 15 bp, Homo sapiens
cgtacacccgaaaag

SEQ ID NO: 5870 - DNA, 15 bp, Homo sapiens
ccgtacacccgaaaa

SEQ ID NO: 5871 - DNA, 15 bp, Homo sapiens
cccgtacacccgaaa

SEQ ID NO: 5872 - DNA, 15 bp, Homo sapiens
acccgtacacccgaa

SEQ ID NO: 5873 - DNA, 15 bp, Homo sapiens
gacccgtacacccga

SEQ ID NO: 5874 - DNA, 15 bp, Homo sapiens
agacccgtacacccg

SEQ ID NO: 5875 - DNA, 15 bp, Homo sapiens
gagacccgtacaccc

SEQ ID NO: 5876 - DNA, 15 bp, Homo sapiens
ggagacccgtacacc

SEQ ID NO: 5877 - DNA, 15 bp, Homo sapiens
cggagacccgtacac

SEQ ID NO: 5878 - DNA, 15 bp, Homo sapiens
tcggagacccgtaca

SEQ ID NO: 5879 - DNA, 15 bp, Homo sapiens
ttcggagacccgtac

SEQ ID NO: 5880 - DNA, 15 bp, Homo sapiens
attcggagacccgta

SEQ ID NO: 5881 - DNA, 15 bp, Homo sapiens
cattcggagacccgt

SEQ ID NO: 5882 - DNA, 15 bp, Homo sapiens
gcattcggagacccg

SEQ ID NO: 5883 - DNA, 15 bp, Homo sapiens
agcattcggagaccc

SEQ ID NO: 5884 - DNA, 15 bp, Homo sapiens
cagcattcggagacc

SEQ ID NO: 5885 - DNA, 15 bp, Homo sapiens
gcagcattcggagac

SEQ ID NO: 5886 - DNA, 15 bp, Homo sapiens
agcagcattcggaga

SEQ ID NO: 5887 - DNA, 15 bp, Homo sapiens
aagcagcattcggag

SEQ ID NO: 5888 - DNA, 15 bp, Homo sapiens
gaagcagcattcgga

SEQ ID NO: 5889 - DNA, 15 bp, Homo sapiens
agaagcagcattcgg

SEQ ID NO: 5890 - DNA, 15 bp, Homo sapiens
cagaagcagcattcg

SEQ ID NO: 5891 - DNA, 15 bp, Homo sapiens
gcagaagcagcattc

SEQ ID NO: 5892 - DNA, 15 bp, Homo sapiens
agcagaagcagcatt

SEQ ID NO: 5893 - DNA, 15 bp, Homo sapiens
cagcagaagcagcat

SEQ ID NO: 5894 - DNA, 15 bp, Homo sapiens
acagcagaagcagca

SEQ ID NO: 5895 - DNA, 15 bp, Homo sapiens
cacagcagaagcagc

SEQ ID NO: 5896 - DNA, 15 bp, Homo sapiens
gcacagcagaagcag

SEQ ID NO: 5897 - DNA, 15 bp, Homo sapiens
agcacagcagaagca

SEQ ID NO: 5898 - DNA, 15 bp, Homo sapiens
gagcacagcagaagc

SEQ ID NO: 5899 - DNA, 15 bp, Homo sapiens
tgagcacagcagaag

SEQ ID NO: 5900 - DNA, 15 bp, Homo sapiens
gtgagcacagcagaa

SEQ ID NO: 5901 - DNA, 15 bp, Homo sapiens
ggtgagcacagcaga

SEQ ID NO: 5902 - DNA, 15 bp, Homo sapiens
tggtgagcacagcag

SEQ ID NO: 5903 - DNA, 15 bp, Homo sapiens
ttggtgagcacagca

SEQ ID NO: 5904 - DNA, 15 bp, Homo sapiens
cttggtgagcacagc

SEQ ID NO: 5905 - DNA, 15 bp, Homo sapiens
ccttggtgagcacag

SEQ ID NO: 5906 - DNA, 15 bp, Homo sapiens
cccttggtgagcaca

SEQ ID NO: 5907 - DNA, 15 bp, Homo sapiens
tcccttggtgagcac

SEQ ID NO: 5908 - DNA, 15 bp, Homo sapiens
ctcccttggtgagca

SEQ ID NO: 5909 - DNA, 15 bp, Homo sapiens
gctcccttggtgagc

SEQ ID NO: 5910 - DNA, 15 bp, Homo sapiens
cgctcccttggtgag

SEQ ID NO: 5911 - DNA, 15 bp, Homo sapiens
gcgctcccttggtga

SEQ ID NO: 5912 - DNA, 15 bp, Homo sapiens
cgcgctcccttggtg

SEQ ID NO: 5913 - DNA, 15 bp, Homo sapiens
acgcgctcccttggt

SEQ ID NO: 5914 - DNA, 15 bp, Homo sapiens
cacgcgctcccttgg

SEQ ID NO: 5915 - DNA, 15 bp, Homo sapiens
acacgcgctcccttg

SEQ ID NO: 5916 - DNA, 15 bp, Homo sapiens
cacacgcgctccctt

SEQ ID NO: 5917 - DNA, 15 bp, Homo sapiens
gcacacgcgctccct

SEQ ID NO: 5918 - DNA, 15 bp, Homo sapiens
cgcacacgcgctccc

SEQ ID NO: 5919 - DNA, 15 bp, Homo sapiens
ccgcacacgcgctcc

SEQ ID NO: 5920 - DNA, 15 bp, Homo sapiens
gccgcacacgcgctc

SEQ ID NO: 5921 - DNA, 15 bp, Homo sapiens
cgccgcacacgcgct

SEQ ID NO: 5922 - DNA, 15 bp, Homo sapiens
acgccgcacacgcgc

SEQ ID NO: 5923 - DNA, 15 bp, Homo sapiens
cacgccgcacacgcg

SEQ ID NO: 5924 - DNA, 15 bp, Homo sapiens
acacgccgcacacgc

SEQ ID NO: 5925 - DNA, 15 bp, Homo sapiens
cacacgccgcacacg

SEQ ID NO: 5926 - DNA, 15 bp, Homo sapiens
acacacgccgcacac

SEQ ID NO: 5927 - DNA, 15 bp, Homo sapiens
gacacacgccgcaca

SEQ ID NO: 5928 - DNA, 15 bp, Homo sapiens
agacacacgccgcac

SEQ ID NO: 5929 - DNA, 15 bp, Homo sapiens
cagacacacgccgca

SEQ ID NO: 5930 - DNA, 15 bp, Homo sapiens
gcagacacacgccgc

SEQ ID NO: 5931 - DNA, 15 bp, Homo sapiens
cgcagacacacgccg

SEQ ID NO: 5932 - DNA, 15 bp, Homo sapiens
tcgcagacacacgcc

SEQ ID NO: 5933 - DNA, 15 bp, Homo sapiens
ttcgcagacacacgc

SEQ ID NO: 5934 - DNA, 15 bp, Homo sapiens
cttcgcagacacacg

SEQ ID NO: 5935 - DNA, 15 bp, Homo sapiens
gcttcgcagacacac

SEQ ID NO: 5936 - DNA, 15 bp, Homo sapiens
cgcttcgcagacaca

SEQ ID NO: 5937 - DNA, 15 bp, Homo sapiens
ccgcttcgcagacac

SEQ ID NO: 5938 - DNA, 15 bp, Homo sapiens
cccgcttcgcagaca

SEQ ID NO: 5939 - DNA, 15 bp, Homo sapiens
gcccgcttcgcagac

SEQ ID NO: 5940 - DNA, 15 bp, Homo sapiens
tgcccgcttcgcaga

SEQ ID NO: 5941 - DNA, 15 bp, Homo sapiens
ctgcccgcttcgcag

SEQ ID NO: 5942 - DNA, 15 bp, Homo sapiens
cctgcccgcttcgca

SEQ ID NO: 5943 - DNA, 15 bp, Homo sapiens
acctgcccgcttcgc

SEQ ID NO: 5944 - DNA, 15 bp, Homo sapiens
aacctgcccgcttcg

SEQ ID NO: 5945 - DNA, 15 bp, Homo sapiens
caacctgcccgcttc

SEQ ID NO: 5946 - DNA, 15 bp, Homo sapiens
acaacctgcccgctt

SEQ ID NO: 5947 - DNA, 15 bp, Homo sapiens
cacaacctgcccgct

SEQ ID NO: 5948 - DNA, 15 bp, Homo sapiens
acacaacctgcccgc

SEQ ID NO: 5949 - DNA, 15 bp, Homo sapiens
aacacaacctgcccg

SEQ ID NO: 5950 - DNA, 15 bp, Homo sapiens
aaacacaacctgccc

SEQ ID NO: 5951 - DNA, 15 bp, Homo sapiens
taaacacaacctgcc

SEQ ID NO: 5952 - DNA, 15 bp, Homo sapiens
ctaaacacaacctgc

SEQ ID NO: 5953 - DNA, 15 bp, Homo sapiens
actaaacacaacctg

SEQ ID NO: 5954 - DNA, 15 bp, Homo sapiens
aactaaacacaacct

SEQ ID NO: 5955 - DNA, 15 bp, Homo sapiens
caactaaacacaacc

SEQ ID NO: 5956 - DNA, 15 bp, Homo sapiens
acaactaaacacaac

SEQ ID NO: 5957 - DNA, 15 bp, Homo sapiens
cacaactaaacacaa

SEQ ID NO: 5958 - DNA, 15 bp, Homo sapiens
gcacaactaaacaca

SEQ ID NO: 5959 - DNA, 15 bp, Homo sapiens
agcacaactaaacac

SEQ ID NO: 5960 - DNA, 15 bp, Homo sapiens
cagcacaactaaaca

SEQ ID NO: 5961 - DNA, 15 bp, Homo sapiens
acagcacaactaaac

SEQ ID NO: 5962 - DNA, 15 bp, Homo sapiens
cacagcacaactaaa

SEQ ID NO: 5963 - DNA, 15 bp, Homo sapiens
gcacagcacaactaa

SEQ ID NO: 5964 - DNA, 15 bp, Homo sapiens
ggcacagcacaacta

SEQ ID NO: 5965 - DNA, 15 bp, Homo sapiens
aggcacagcacaact

SEQ ID NO: 5966 - DNA, 15 bp, Homo sapiens
aaggcacagcacaac

SEQ ID NO: 5967 - DNA, 15 bp, Homo sapiens
caaggcacagcacaa

SEQ ID NO: 5968 - DNA, 15 bp, Homo sapiens
ccaaggcacagcaca

SEQ ID NO: 5969 - DNA, 15 bp, Homo sapiens
tccaaggcacagcac

SEQ ID NO: 5970 - DNA, 15 bp, Homo sapiens
ttccaaggcacagca

SEQ ID NO: 5971 - DNA, 15 bp, Homo sapiens
gttccaaggcacagc

SEQ ID NO: 5972 - DNA, 15 bp, Homo sapiens
tgttccaaggcacag

SEQ ID NO: 5973 - DNA, 15 bp, Homo sapiens
ctgttccaaggcaca

SEQ ID NO: 5974 - DNA, 15 bp, Homo sapiens
actgttccaaggcac

SEQ ID NO: 5975 - DNA, 15 bp, Homo sapiens
gactgttccaaggca

SEQ ID NO: 5976 - DNA, 15 bp, Homo sapiens
ggactgttccaaggc

SEQ ID NO: 5977 - DNA, 15 bp, Homo sapiens
cggactgttccaagg

SEQ ID NO: 5978 - DNA, 15 bp, Homo sapiens
acggactgttccaag

SEQ ID NO: 5979 - DNA, 15 bp, Homo sapiens
cacggactgttccaa

SEQ ID NO: 5980 - DNA, 15 bp, Homo sapiens
acacggactgttcca

SEQ ID NO: 5981 - DNA, 15 bp, Homo sapiens
cacacggactgttcc

SEQ ID NO: 5982 - DNA, 15 bp, Homo sapiens
tcacacggactgttc

SEQ ID NO: 5983 - DNA, 15 bp, Homo sapiens
ttcacacggactgtt

SEQ ID NO: 5984 - DNA, 15 bp, Homo sapiens
gttcacacggactgt

SEQ ID NO: 5985 - DNA, 15 bp, Homo sapiens
tgttcacacggactg

SEQ ID NO: 5986 - DNA, 15 bp, Homo sapiens
ctgttcacacggact

SEQ ID NO: 5987 - DNA, 15 bp, Homo sapiens
tctgttcacacggac

SEQ ID NO: 5988 - DNA, 15 bp, Homo sapiens
ctctgttcacacgga

SEQ ID NO: 5989 - DNA, 15 bp, Homo sapiens
cctctgttcacacgg

SEQ ID NO: 5990 - DNA, 15 bp, Homo sapiens
tcctctgttcacacg

SEQ ID NO: 5991 - DNA, 15 bp, Homo sapiens
ctcctctgttcacac

SEQ ID NO: 5992 - DNA, 15 bp, Homo sapiens
cctcctctgttcaca

SEQ ID NO: 5993 - DNA, 15 bp, Homo sapiens
ccctcctctgttcac

SEQ ID NO: 5994 - DNA, 15 bp, Homo sapiens
gccctcctctgttca

SEQ ID NO: 5995 - DNA, 15 bp, Homo sapiens
agccctcctctgttc

SEQ ID NO: 5996 - DNA, 15 bp, Homo sapiens
aagccctcctctgtt

SEQ ID NO: 5997 - DNA, 15 bp, Homo sapiens
taagccctcctctgt

SEQ ID NO: 5998 - DNA, 15 bp, Homo sapiens
gtaagccctcctctg

SEQ ID NO: 5999 - DNA, 15 bp, Homo sapiens
cgtaagccctcctct

SEQ ID NO: 6000 - DNA, 15 bp, Homo sapiens
ccgtaagccctcctc

SEQ ID NO: 6001 - DNA, 15 bp, Homo sapiens
accgtaagccctcct

SEQ ID NO: 6002 - DNA, 15 bp, Homo sapiens
aaccgtaagccctcc

SEQ ID NO: 6003 - DNA, 15 bp, Homo sapiens
taaccgtaagccctc

SEQ ID NO: 6004 - DNA, 15 bp, Homo sapiens
ttaaccgtaagccct

SEQ ID NO: 6005 - DNA, 15 bp, Homo sapiens
gttaaccgtaagccc

SEQ ID NO: 6006 - DNA, 15 bp, Homo sapiens
tgttaaccgtaagcc

SEQ ID NO: 6007 - DNA, 15 bp, Homo sapiens
ctgttaaccgtaagc

SEQ ID NO: 6008 - DNA, 15 bp, Homo sapiens
tctgttaaccgtaag

SEQ ID NO: 6009 - DNA, 15 bp, Homo sapiens
gtctgttaaccgtaa

SEQ ID NO: 6010 - DNA, 15 bp, Homo sapiens
tgtctgttaaccgta

SEQ ID NO: 6011 - DNA, 15 bp, Homo sapiens
ttgtctgttaaccgt

SEQ ID NO: 6012 - DNA, 15 bp, Homo sapiens
tttgtctgttaaccg

SEQ ID NO: 6013 - DNA, 15 bp, Homo sapiens
ttttgtctgttaacc

SEQ ID NO: 6014 - DNA, 15 bp, Homo sapiens
attttgtctgttaac

SEQ ID NO: 6015 - DNA, 15 bp, Homo sapiens
tattttgtctgttaa

SEQ ID NO: 6016 - DNA, 15 bp, Homo sapiens
gtattttgtctgtta

SEQ ID NO: 6017 - DNA, 15 bp, Homo sapiens
ggtattttgtctgtt

SEQ ID NO: 6018 - DNA, 15 bp, Homo sapiens
cggtattttgtctgt

SEQ ID NO: 6019 - DNA, 15 bp, Homo sapiens
acggtattttgtctg

SEQ ID NO: 6020 - DNA, 15 bp, Homo sapiens
tacggtattttgtct

SEQ ID NO: 6021 - DNA, 15 bp, Homo sapiens
ttacggtattttgtc

SEQ ID NO: 6022 - DNA, 15 bp, Homo sapiens
cttacggtattttgt

SEQ ID NO: 6023 - DNA, 15 bp, Homo sapiens
gcttacggtattttg

SEQ ID NO: 6024 - DNA, 15 bp, Homo sapiens
cgcttacggtatttt

SEQ ID NO: 6025 - DNA, 15 bp, Homo sapiens
gcgcttacggtattt

SEQ ID NO: 6026 - DNA, 15 bp, Homo sapiens
ggcgcttacggtatt

SEQ ID NO: 6027 - DNA, 15 bp, Homo sapiens
gggcgcttacggtat

SEQ ID NO: 6028 - DNA, 15 bp, Homo sapiens
agggcgcttacggta

SEQ ID NO: 6029 - DNA, 15 bp, Homo sapiens
aagggcgcttacggt

SEQ ID NO: 6030 - DNA, 15 bp, Homo sapiens
gaagggcgcttacgg

SEQ ID NO: 6031 - DNA, 15 bp, Homo sapiens
ggaagggcgcttacg

SEQ ID NO: 6032 - DNA, 15 bp, Homo sapiens
aggaagggcgcttac

SEQ ID NO: 6033 - DNA, 15 bp, Homo sapiens
taggaagggcgctta

SEQ ID NO: 6034 - DNA, 15 bp, Homo sapiens
ctaggaagggcgctt

SEQ ID NO: 6035 - DNA, 15 bp, Homo sapiens
tctaggaagggcgct

SEQ ID NO: 6036 - DNA, 15 bp, Homo sapiens
ctctaggaagggcgc

SEQ ID NO: 6037 - DNA, 15 bp, Homo sapiens
gctctaggaagggcg

SEQ ID NO: 6038 - DNA, 15 bp, Homo sapiens
ggctctaggaagggc

SEQ ID NO: 6039 - DNA, 15 bp, Homo sapiens
tggctctaggaaggg

SEQ ID NO: 6040 - DNA, 15 bp, Homo sapiens
ctggctctaggaagg

SEQ ID NO: 6041 - DNA, 15 bp, Homo sapiens
cctggctctaggaag

SEQ ID NO: 6042 - DNA, 15 bp, Homo sapiens
gcctggctctaggaa

SEQ ID NO: 6043 - DNA, 15 bp, Homo sapiens
tgcctggctctagga

SEQ ID NO: 6044 - DNA, 15 bp, Homo sapiens
gtgcctggctctagg

SEQ ID NO: 6045 - DNA, 15 bp, Homo sapiens
tgtgcctggctctag

SEQ ID NO: 6046 - DNA, 15 bp, Homo sapiens
ctgtgcctggctcta

SEQ ID NO: 6047 - DNA, 15 bp, Homo sapiens
tctgtgcctggctct

SEQ ID NO: 6048 - DNA, 15 bp, Homo sapiens
ctctgtgcctggctc

SEQ ID NO: 6049 - DNA, 15 bp, Homo sapiens
tctctgtgcctggct

SEQ ID NO: 6050 - DNA, 15 bp, Homo sapiens
gtctctgtgcctggc

SEQ ID NO: 6051 - DNA, 15 bp, Homo sapiens
tgtctctgtgcctgg

SEQ ID NO: 6052 - DNA, 15 bp, Homo sapiens
ttgtctctgtgcctg

SEQ ID NO: 6053 - DNA, 15 bp, Homo sapiens
gttgtctctgtgcct

SEQ ID NO: 6054 - DNA, 15 bp, Homo sapiens
cgttgtctctgtgcc

SEQ ID NO: 6055 - DNA, 15 bp, Homo sapiens
ccgttgtctctgtgc

SEQ ID NO: 6056 - DNA, 15 bp, Homo sapiens
gccgttgtctctgtg

SEQ ID NO: 6057 - DNA, 15 bp, Homo sapiens
cgccgttgtctctgt

SEQ ID NO: 6058 - DNA, 15 bp, Homo sapiens
ccgccgttgtctctg

SEQ ID NO: 6059 - DNA, 15 bp, Homo sapiens
gccgccgttgtctct

SEQ ID NO: 6060 - DNA, 15 bp, Homo sapiens
ggccgccgttgtctc

SEQ ID NO: 6061 - DNA, 15 bp, Homo sapiens
aggccgccgttgtct

SEQ ID NO: 6062 - DNA, 15 bp, Homo sapiens
gaggccgccgttgtc

SEQ ID NO: 6063 - DNA, 15 bp, Homo sapiens
agaggccgccgttgt

SEQ ID NO: 6064 - DNA, 15 bp, Homo sapiens
cagaggccgccgttg

SEQ ID NO: 6065 - DNA, 15 bp, Homo sapiens
ccagaggccgccgtt

SEQ ID NO: 6066 - DNA, 15 bp, Homo sapiens
gccagaggccgccgt

SEQ ID NO: 6067 - DNA, 15 bp, Homo sapiens
cgccagaggccgccg

SEQ ID NO: 6068 - DNA, 15 bp, Homo sapiens
gcgccagaggccgcc

SEQ ID NO: 6069 - DNA, 15 bp, Homo sapiens
ggcgccagaggccgc

SEQ ID NO: 6070 - DNA, 15 bp, Homo sapiens
cggcgccagaggccg

SEQ ID NO: 6071 - DNA, 15 bp, Homo sapiens
ccggcgccagaggcc

SEQ ID NO: 6072 - DNA, 15 bp, Homo sapiens
gccggcgccagaggc

SEQ ID NO: 6073 - DNA, 15 bp, Homo sapiens
tgccggcgccagagg

SEQ ID NO: 6074 - DNA, 15 bp, Homo sapiens
gtgccggcgccagag

SEQ ID NO: 6075 - DNA, 15 bp, Homo sapiens
tgtgccggcgccaga

SEQ ID NO: 6076 - DNA, 15 bp, Homo sapiens
ttgtgccggcgccag

SEQ ID NO: 6077 - DNA, 15 bp, Homo sapiens
cttgtgccggcgcca

SEQ ID NO: 6078 - DNA, 15 bp, Homo sapiens
ccttgtgccggcgcc

SEQ ID NO: 6079 - DNA, 15 bp, Homo sapiens
cccttgtgccggcgc

SEQ ID NO: 6080 - DNA, 15 bp, Homo sapiens
tcccttgtgccggcg

SEQ ID NO: 6081 - DNA, 15 bp, Homo sapiens
gtcccttgtgccggc

SEQ ID NO: 6082 - DNA, 15 bp, Homo sapiens
tgtcccttgtgccgg

SEQ ID NO: 6083 - DNA, 15 bp, Homo sapiens
ctgtcccttgtgccg

SEQ ID NO: 6084 - DNA, 15 bp, Homo sapiens
gctgtcccttgtgcc

SEQ ID NO: 6085 - DNA, 15 bp, Homo sapiens
cgctgtcccttgtgc

SEQ ID NO: 6086 - DNA, 15 bp, Homo sapiens
acgctgtcccttgtg

SEQ ID NO: 6087 - DNA, 15 bp, Homo sapiens
cacgctgtcccttgt

SEQ ID NO: 6088 - DNA, 15 bp, Homo sapiens
ccacgctgtcccttg

SEQ ID NO: 6089 - DNA, 15 bp, Homo sapiens
gccacgctgtccctt

SEQ ID NO: 6090 - DNA, 15 bp, Homo sapiens
ggccacgctgtccct

SEQ ID NO: 6091 - DNA, 15 bp, Homo sapiens
gggccacgctgtccc

SEQ ID NO: 6092 - DNA, 15 bp, Homo sapiens
cgggccacgctgtcc

SEQ ID NO: 6093 - DNA, 15 bp, Homo sapiens
ccgggccacgctgtc

SEQ ID NO: 6094 - DNA, 15 bp, Homo sapiens
tccgggccacgctgt

SEQ ID NO: 6095 - DNA, 15 bp, Homo sapiens
atccgggccacgctg

SEQ ID NO: 6096 - DNA, 15 bp, Homo sapiens
gatccgggccacgct

SEQ ID NO: 6097 - DNA, 15 bp, Homo sapiens
agatccgggccacgc

SEQ ID NO: 6098 - DNA, 15 bp, Homo sapiens
gagatccgggccacg

SEQ ID NO: 6099 - DNA, 15 bp, Homo sapiens
tgagatccgggccac

SEQ ID NO: 6100 - DNA, 15 bp, Homo sapiens
ctgagatccgggcca

SEQ ID NO: 6101 - DNA, 15 bp, Homo sapiens
tctgagatccgggcc

SEQ ID NO: 6102 - DNA, 15 bp, Homo sapiens
ctctgagatccgggc

SEQ ID NO: 6103 - DNA, 15 bp, Homo sapiens
gctctgagatccggg

SEQ ID NO: 6104 - DNA, 15 bp, Homo sapiens
ggctctgagatccgg

SEQ ID NO: 6105 - DNA, 15 bp, Homo sapiens
aggctctgagatccg

SEQ ID NO: 6106 - DNA, 15 bp, Homo sapiens
caggctctgagatcc

SEQ ID NO: 6107 - DNA, 15 bp, Homo sapiens
ccaggctctgagatc

SEQ ID NO: 6108 - DNA, 15 bp, Homo sapiens
cccaggctctgagat

SEQ ID NO: 6109 - DNA, 15 bp, Homo sapiens
acccaggctctgaga

SEQ ID NO: 6110 - DNA, 15 bp, Homo sapiens
gacccaggctctgag

SEQ ID NO: 6111 - DNA, 15 bp, Homo sapiens
tgacccaggctctga

SEQ ID NO: 6112 - DNA, 15 bp, Homo sapiens
gtgacccaggctctg

SEQ ID NO: 6113 - DNA, 15 bp, Homo sapiens
agtgacccaggctct

SEQ ID NO: 6114 - DNA, 15 bp, Homo sapiens
gagtgacccaggctc

SEQ ID NO: 6115 - DNA, 15 bp, Homo sapiens
ggagtgacccaggct

SEQ ID NO: 6116 - DNA, 15 bp, Homo sapiens
aggagtgacccaggc

SEQ ID NO: 6117 - DNA, 15 bp, Homo sapiens
gaggagtgacccagg

SEQ ID NO: 6118 - DNA, 15 bp, Homo sapiens
ggaggagtgacccag

SEQ ID NO: 6119 - DNA, 15 bp, Homo sapiens
aggaggagtgaccca

SEQ ID NO: 6120 - DNA, 15 bp, Homo sapiens
gaggaggagtgaccc

SEQ ID NO: 6121 - DNA, 15 bp, Homo sapiens
ggaggaggagtgacc

SEQ ID NO: 6122 - DNA, 15 bp, Homo sapiens
gggaggaggagtgac

SEQ ID NO: 6123 - DNA, 15 bp, Homo sapiens
ggggaggaggagtga

SEQ ID NO: 6124 - DNA, 15 bp, Homo sapiens
aggggaggaggagtg

SEQ ID NO: 6125 - DNA, 15 bp, Homo sapiens
gaggggaggaggagt

SEQ ID NO: 6126 - DNA, 15 bp, Homo sapiens
ggaggggaggaggag

SEQ ID NO: 6127 - DNA, 15 bp, Homo sapiens
tggaggggaggagga

SEQ ID NO: 6128 - DNA, 15 bp, Homo sapiens
ctggaggggaggagg

SEQ ID NO: 6129 - DNA, 15 bp, Homo sapiens
gctggaggggaggag

SEQ ID NO: 6130 - DNA, 15 bp, Homo sapiens
cgctggaggggagga

SEQ ID NO: 6131 - DNA, 15 bp, Homo sapiens
tcgctggaggggagg

SEQ ID NO: 6132 - DNA, 15 bp, Homo sapiens
gtcgctggaggggag

SEQ ID NO: 6133 - DNA, 15 bp, Homo sapiens
tgtcgctggagggga

SEQ ID NO: 6134 - DNA, 15 bp, Homo sapiens
gtgtcgctggagggg

SEQ ID NO: 6135 - DNA, 15 bp, Homo sapiens
tgtgtcgctggaggg

SEQ ID NO: 6136 - DNA, 15 bp, Homo sapiens
ctgtgtcgctggagg

SEQ ID NO: 6137 - DNA, 15 bp, Homo sapiens
gctgtgtcgctggag

SEQ ID NO: 6138 - DNA, 15 bp, Homo sapiens
tgctgtgtcgctgga

SEQ ID NO: 6139 - DNA, 15 bp, Homo sapiens
gtgctgtgtcgctgg

SEQ ID NO: 6140 - DNA, 15 bp, Homo sapiens
agtgctgtgtcgctg

SEQ ID NO: 6141 - DNA, 15 bp, Homo sapiens
gagtgctgtgtcgct

SEQ ID NO: 6142 - DNA, 15 bp, Homo sapiens
ggagtgctgtgtcgc

SEQ ID NO: 6143 - DNA, 15 bp, Homo sapiens
gggagtgctgtgtcg

SEQ ID NO: 6144 - DNA, 15 bp, Homo sapiens
ggggagtgctgtgtc

SEQ ID NO: 6145 - DNA, 15 bp, Homo sapiens
gggggagtgctgtgt

SEQ ID NO: 6146 - DNA, 15 bp, Homo sapiens
tgggggagtgctgtg

SEQ ID NO: 6147 - DNA, 15 bp, Homo sapiens
ttgggggagtgctgt

SEQ ID NO: 6148 - DNA, 15 bp, Homo sapiens
gttgggggagtgctg

SEQ ID NO: 6149 - DNA, 15 bp, Homo sapiens
ggttgggggagtgct

SEQ ID NO: 6150 - DNA, 15 bp, Homo sapiens
gggttgggggagtgc

SEQ ID NO: 6151 - DNA, 15 bp, Homo sapiens
agggttgggggagtg

SEQ ID NO: 6152 - DNA, 15 bp, Homo sapiens
aagggttgggggagt

SEQ ID NO: 6153 - DNA, 15 bp, Homo sapiens
gaagggttgggggag

SEQ ID NO: 6154 - DNA, 15 bp, Homo sapiens
ggaagggttggggga

SEQ ID NO: 6155 - DNA, 15 bp, Homo sapiens
cggaagggttggggg

SEQ ID NO: 6156 - DNA, 15 bp, Homo sapiens
gcggaagggttgggg

SEQ ID NO: 6157 - DNA, 15 bp, Homo sapiens
ggcggaagggttggg

SEQ ID NO: 6158 - DNA, 15 bp, Homo sapiens
gggcggaagggttgg

SEQ ID NO: 6159 - DNA, 15 bp, Homo sapiens
tgggcggaagggttg

SEQ ID NO: 6160 - DNA, 15 bp, Homo sapiens
gtgggcggaagggtt

SEQ ID NO: 6161 - DNA, 15 bp, Homo sapiens
ggtgggcggaagggt

SEQ ID NO: 6162 - DNA, 15 bp, Homo sapiens
aggtgggcggaaggg

SEQ ID NO: 6163 - DNA, 15 bp, Homo sapiens
gaggtgggcggaagg

SEQ ID NO: 6164 - DNA, 15 bp, Homo sapiens
ggaggtgggcggaag

SEQ ID NO: 6165 - DNA, 15 bp, Homo sapiens
cggaggtgggcggaa

SEQ ID NO: 6166 - DNA, 15 bp, Homo sapiens
gcggaggtgggcgga

SEQ ID NO: 6167 - DNA, 15 bp, Homo sapiens
ggcggaggtgggcgg

SEQ ID NO: 6168 - DNA, 15 bp, Homo sapiens
cggcggaggtgggcg

SEQ ID NO: 6169 - DNA, 15 bp, Homo sapiens
tcggcggaggtgggc

SEQ ID NO: 6170 - DNA, 15 bp, Homo sapiens
ctcggcggaggtggg

SEQ ID NO: 6171 - DNA, 15 bp, Homo sapiens
gctcggcggaggtgg

SEQ ID NO: 6172 - DNA, 15 bp, Homo sapiens
ggctcggcggaggtg

SEQ ID NO: 6173 - DNA, 15 bp, Homo sapiens
aggctcggcggaggt

SEQ ID NO: 6174 - DNA, 15 bp, Homo sapiens
gaggctcggcggagg

SEQ ID NO: 6175 - DNA, 15 bp, Homo sapiens
cgaggctcggcggag

SEQ ID NO: 6176 - DNA, 15 bp, Homo sapiens
ccgaggctcggcgga

SEQ ID NO: 6177 - DNA, 15 bp, Homo sapiens
gccgaggctcggcgg

SEQ ID NO: 6178 - DNA, 15 bp, Homo sapiens
agccgaggctcggcg

SEQ ID NO: 6179 - DNA, 15 bp, Homo sapiens
cagccgaggctcggc

SEQ ID NO: 6180 - DNA, 15 bp, Homo sapiens
gcagccgaggctcgg

SEQ ID NO: 6181 - DNA, 15 bp, Homo sapiens
tgcagccgaggctcg

SEQ ID NO: 6182 - DNA, 15 bp, Homo sapiens
gtgcagccgaggctc

SEQ ID NO: 6183 - DNA, 15 bp, Homo sapiens
agtgcagccgaggct

SEQ ID NO: 6184 - DNA, 15 bp, Homo sapiens
gagtgcagccgaggc

SEQ ID NO: 6185 - DNA, 15 bp, Homo sapiens
tgagtgcagccgagg

SEQ ID NO: 6186 - DNA, 15 bp, Homo sapiens
gtgagtgcagccgag

SEQ ID NO: 6187 - DNA, 15 bp, Homo sapiens
ggtgagtgcagccga

SEQ ID NO: 6188 - DNA, 15 bp, Homo sapiens
aggtgagtgcagccg

SEQ ID NO: 6189 - DNA, 15 bp, Homo sapiens
gaggtgagtgcagcc

SEQ ID NO: 6190 - DNA, 15 bp, Homo sapiens
agaggtgagtgcagc

SEQ ID NO: 6191 - DNA, 15 bp, Homo sapiens
gagaggtgagtgcag

SEQ ID NO: 6192 - DNA, 15 bp, Homo sapiens
agagaggtgagtgca

SEQ ID NO: 6193 - DNA, 15 bp, Homo sapiens
gagagaggtgagtgc

SEQ ID NO: 6194 - DNA, 15 bp, Homo sapiens
ggagagaggtgagtg

SEQ ID NO: 6195 - DNA, 15 bp, Homo sapiens
tggagagaggtgagt

SEQ ID NO: 6196 - DNA, 15 bp, Homo sapiens
ctggagagaggtgag

SEQ ID NO: 6197 - DNA, 15 bp, Homo sapiens
gctggagagaggtga

SEQ ID NO: 6198 - DNA, 15 bp, Homo sapiens
ggctggagagaggtg

SEQ ID NO: 6199 - DNA, 15 bp, Homo sapiens
cggctggagagaggt

SEQ ID NO: 6200 - DNA, 15 bp, Homo sapiens
gcggctggagagagg

SEQ ID NO: 6201 - DNA, 15 bp, Homo sapiens
tgcggctggagagag

SEQ ID NO: 6202 - DNA, 15 bp, Homo sapiens
gtgcggctggagaga

SEQ ID NO: 6203 - DNA, 15 bp, Homo sapiens
cgtgcggctggagag

SEQ ID NO: 6204 - DNA, 15 bp, Homo sapiens
ccgtgcggctggaga

SEQ ID NO: 6205 - DNA, 15 bp, Homo sapiens
cccgtgcggctggag

SEQ ID NO: 6206 - DNA, 15 bp, Homo sapiens
acccgtgcggctgga

SEQ ID NO: 6207 - DNA, 15 bp, Homo sapiens
aacccgtgcggctgg

SEQ ID NO: 6208 - DNA, 15 bp, Homo sapiens
gaacccgtgcggctg

SEQ ID NO: 6209 - DNA, 15 bp, Homo sapiens
ggaacccgtgcggct

SEQ ID NO: 6210 - DNA, 15 bp, Homo sapiens
gggaacccgtgcggc

SEQ ID NO: 6211 - DNA, 15 bp, Homo sapiens
ggggaacccgtgcgg

SEQ ID NO: 6212 - DNA, 15 bp, Homo sapiens
aggggaacccgtgcg

SEQ ID NO: 6213 - DNA, 15 bp, Homo sapiens
taggggaacccgtgc

SEQ ID NO: 6214 - DNA, 15 bp, Homo sapiens
ctaggggaacccgtg

SEQ ID NO: 6215 - DNA, 15 bp, Homo sapiens
gctaggggaacccgt

SEQ ID NO: 6216 - DNA, 15 bp, Homo sapiens
cgctaggggaacccg

SEQ ID NO: 6217 - DNA, 15 bp, Homo sapiens
gcgctaggggaaccc

SEQ ID NO: 6218 - DNA, 15 bp, Homo sapiens
ggcgctaggggaacc

SEQ ID NO: 6219 - DNA, 15 bp, Homo sapiens
cggcgctaggggaac

SEQ ID NO: 6220 - DNA, 15 bp, Homo sapiens
gcggcgctaggggaa

SEQ ID NO: 6221 - DNA, 15 bp, Homo sapiens
ggcggcgctagggga

SEQ ID NO: 6222 - DNA, 15 bp, Homo sapiens
tggcggcgctagggg

SEQ ID NO: 6223 - DNA, 15 bp, Homo sapiens
atggcggcgctaggg

SEQ ID NO: 6224 - DNA, 15 bp, Homo sapiens
gatggcggcgctagg

SEQ ID NO: 6225 - DNA, 15 bp, Homo sapiens
agatggcggcgctag

SEQ ID NO: 6226 - DNA, 15 bp, Homo sapiens
aagatggcggcgcta

SEQ ID NO: 6227 - DNA, 15 bp, Homo sapiens
gaagatggcggcgct

SEQ ID NO: 6228 - DNA, 15 bp, Homo sapiens
agaagatggcggcgc

SEQ ID NO: 6229 - DNA, 15 bp, Homo sapiens
gagaagatggcggcg

SEQ ID NO: 6230 - DNA, 15 bp, Homo sapiens
ggagaagatggcggc

SEQ ID NO: 6231 - DNA, 15 bp, Homo sapiens
gggagaagatggcgg

SEQ ID NO: 6232 - DNA, 15 bp, Homo sapiens
agggagaagatggcg

SEQ ID NO: 6233 - DNA, 15 bp, Homo sapiens
aagggagaagatggc

SEQ ID NO: 6234 - DNA, 15 bp, Homo sapiens
taagggagaagatgg

SEQ ID NO: 6235 - DNA, 15 bp, Homo sapiens
ttaagggagaagatg

SEQ ID NO: 6236 - DNA, 15 bp, Homo sapiens
gttaagggagaagat

SEQ ID NO: 6237 - DNA, 15 bp, Homo sapiens
ggttaagggagaaga

SEQ ID NO: 6238 - DNA, 15 bp, Homo sapiens
aggttaagggagaag

SEQ ID NO: 6239 - DNA, 15 bp, Homo sapiens
taggttaagggagaa

SEQ ID NO: 6240 - DNA, 15 bp, Homo sapiens
gtaggttaagggaga

SEQ ID NO: 6241 - DNA, 15 bp, Homo sapiens
tgtaggttaagggag

SEQ ID NO: 6242 - DNA, 15 bp, Homo sapiens
ctgtaggttaaggga

SEQ ID NO: 6243 - DNA, 15 bp, Homo sapiens
tctgtaggttaaggg

SEQ ID NO: 6244 - DNA, 15 bp, Homo sapiens
gtctgtaggttaagg

SEQ ID NO: 6245 - DNA, 15 bp, Homo sapiens
ggtctgtaggttaag

SEQ ID NO: 6246 - DNA, 15 bp, Homo sapiens
gggtctgtaggttaa

SEQ ID NO: 6247 - DNA, 15 bp, Homo sapiens
tgggtctgtaggtta

SEQ ID NO: 6248 - DNA, 15 bp, Homo sapiens
gtgggtctgtaggtt

SEQ ID NO: 6249 - DNA, 15 bp, Homo sapiens
tgtgggtctgtaggt

SEQ ID NO: 6250 - DNA, 15 bp, Homo sapiens
ctgtgggtctgtagg

SEQ ID NO: 6251 - DNA, 15 bp, Homo sapiens
cctgtgggtctgtag

SEQ ID NO: 6252 - DNA, 15 bp, Homo sapiens
tcctgtgggtctgta

SEQ ID NO: 6253 - DNA, 15 bp, Homo sapiens
ttcctgtgggtctgt

SEQ ID NO: 6254 - DNA, 15 bp, Homo sapiens
tttcctgtgggtctg

SEQ ID NO: 6255 - DNA, 15 bp, Homo sapiens
atttcctgtgggtct

SEQ ID NO: 6256 - DNA, 15 bp, Homo sapiens
catttcctgtgggtc

SEQ ID NO: 6257 - DNA, 15 bp, Homo sapiens
tcatttcctgtgggt

SEQ ID NO: 6258 - DNA, 15 bp, Homo sapiens
gtcatttcctgtggg

SEQ ID NO: 6259 - DNA, 15 bp, Homo sapiens
cgtcatttcctgtgg

SEQ ID NO: 6260 - DNA, 15 bp, Homo sapiens
tcgtcatttcctgtg

SEQ ID NO: 6261 - DNA, 15 bp, Homo sapiens
gtcgtcatttcctgt

SEQ ID NO: 6262 - DNA, 15 bp, Homo sapiens
tgtcgtcatttcctg

SEQ ID NO: 6263 - DNA, 15 bp, Homo sapiens
ctgtcgtcatttcct

SEQ ID NO: 6264 - DNA, 15 bp, Homo sapiens
tctgtcgtcatttcc

SEQ ID NO: 6265 - DNA, 15 bp, Homo sapiens
ttctgtcgtcatttc

SEQ ID NO: 6266 - DNA, 15 bp, Homo sapiens
cttctgtcgtcattt

SEQ ID NO: 6267 - DNA, 15 bp, Homo sapiens
ccttctgtcgtcatt

SEQ ID NO: 6268 - DNA, 15 bp, Homo sapiens
cccttctgtcgtcat

SEQ ID NO: 6269 - DNA, 15 bp, Homo sapiens
gcccttctgtcgtca

SEQ ID NO: 6270 - DNA, 15 bp, Homo sapiens
agcccttctgtcgtc

SEQ ID NO: 6271 - DNA, 15 bp, Homo sapiens
cagcccttctgtcgt

SEQ ID NO: 6272 - DNA, 15 bp, Homo sapiens
tcagcccttctgtcg

SEQ ID NO: 6273 - DNA, 15 bp, Homo sapiens
ctcagcccttctgtc

SEQ ID NO: 6274 - DNA, 15 bp, Homo sapiens
cctcagcccttctgt

SEQ ID NO: 6275 - DNA, 15 bp, Homo sapiens
acctcagcccttctg

SEQ ID NO: 6276 - DNA, 15 bp, Homo sapiens
cacctcagcccttct

SEQ ID NO: 6277 - DNA, 15 bp, Homo sapiens
ccacctcagcccttc

SEQ ID NO: 6278 - DNA, 15 bp, Homo sapiens
cccacctcagccctt

SEQ ID NO: 6279 - DNA, 15 bp, Homo sapiens
ccccacctcagccct

SEQ ID NO: 6280 - DNA, 15 bp, Homo sapiens
cccccacctcagccc

SEQ ID NO: 6281 - DNA, 15 bp, Homo sapiens
ccccccacctcagcc

SEQ ID NO: 6282 - DNA, 15 bp, Homo sapiens
cccccccacctcagc

SEQ ID NO: 6283 - DNA, 15 bp, Homo sapiens
gcccccccacctcag

SEQ ID NO: 6284 - DNA, 15 bp, Homo sapiens
cgcccccccacctca

SEQ ID NO: 6285 - DNA, 15 bp, Homo sapiens
ccgcccccccacctc

SEQ ID NO: 6286 - DNA, 15 bp, Homo sapiens
cccgcccccccacct

SEQ ID NO: 6287 - DNA, 15 bp, Homo sapiens
ccccgcccccccacc

SEQ ID NO: 6288 - DNA, 15 bp, Homo sapiens
gccccgcccccccac

SEQ ID NO: 6289 - DNA, 15 bp, Homo sapiens
ggccccgccccccca

SEQ ID NO: 6290 - DNA, 15 bp, Homo sapiens
aggccccgccccccc

SEQ ID NO: 6291 - DNA, 15 bp, Homo sapiens
taggccccgcccccc

SEQ ID NO: 6292 - DNA, 15 bp, Homo sapiens
ctaggccccgccccc

SEQ ID NO: 6293 - DNA, 15 bp, Homo sapiens
cctaggccccgcccc

SEQ ID NO: 6294 - DNA, 15 bp, Homo sapiens
ccctaggccccgccc

SEQ ID NO: 6295 - DNA, 15 bp, Homo sapiens
cccctaggccccgcc

SEQ ID NO: 6296 - DNA, 15 bp, Homo sapiens
tcccctaggccccgc

SEQ ID NO: 6297 - DNA, 15 bp, Homo sapiens
ttcccctaggccccg

SEQ ID NO: 6298 - DNA, 15 bp, Homo sapiens
cttcccctaggcccc

SEQ ID NO: 6299 - DNA, 15 bp, Homo sapiens
gcttcccctaggccc

SEQ ID NO: 6300 - DNA, 15 bp, Homo sapiens
ggcttcccctaggcc

SEQ ID NO: 6301 - DNA, 15 bp, Homo sapiens
cggcttcccctaggc

SEQ ID NO: 6302 - DNA, 15 bp, Homo sapiens
ccggcttcccctagg

SEQ ID NO: 6303 - DNA, 15 bp, Homo sapiens
tccggcttcccctag

SEQ ID NO: 6304 - DNA, 15 bp, Homo sapiens
ttccggcttccccta

SEQ ID NO: 6305 - DNA, 15 bp, Homo sapiens
tttccggcttcccct

SEQ ID NO: 6306 - DNA, 15 bp, Homo sapiens
ttttccggcttcccc

SEQ ID NO: 6307 - DNA, 15 bp, Homo sapiens
cttttccggcttccc

SEQ ID NO: 6308 - DNA, 15 bp, Homo sapiens
acttttccggcttcc

SEQ ID NO: 6309 - DNA, 15 bp, Homo sapiens
cacttttccggcttc

SEQ ID NO: 6310 - DNA, 15 bp, Homo sapiens
tcacttttccggctt

SEQ ID NO: 6311 - DNA, 15 bp, Homo sapiens
ctcacttttccggct

SEQ ID NO: 6312 - DNA, 15 bp, Homo sapiens
actcacttttccggc

SEQ ID NO: 6313 - DNA, 15 bp, Homo sapiens
tactcacttttccgg

SEQ ID NO: 6314 - DNA, 15 bp, Homo sapiens
gtactcacttttccg

SEQ ID NO: 6315 - DNA, 15 bp, Homo sapiens
ggtactcacttttcc

SEQ ID NO: 6316 - DNA, 15 bp, Homo sapiens
cggtactcacttttc

SEQ ID NO: 6317 - DNA, 15 bp, Homo sapiens
ccggtactcactttt

SEQ ID NO: 6318 - DNA, 15 bp, Homo sapiens
gccggtactcacttt

SEQ ID NO: 6319 - DNA, 15 bp, Homo sapiens
agccggtactcactt

SEQ ID NO: 6320 - DNA, 15 bp, Homo sapiens
tagccggtactcact

SEQ ID NO: 6321 - DNA, 15 bp, Homo sapiens
ctagccggtactcac

SEQ ID NO: 6322 - DNA, 15 bp, Homo sapiens
actagccggtactca

SEQ ID NO: 6323 - DNA, 15 bp, Homo sapiens
tactagccggtactc

SEQ ID NO: 6324 - DNA, 15 bp, Homo sapiens
atactagccggtact

SEQ ID NO: 6325 - DNA, 15 bp, Homo sapiens
gatactagccggtac

SEQ ID NO: 6326 - DNA, 15 bp, Homo sapiens
cgatactagccggta

SEQ ID NO: 6327 - DNA, 15 bp, Homo sapiens
gcgatactagccggt

SEQ ID NO: 6328 - DNA, 15 bp, Homo sapiens
cgcgatactagccgg

SEQ ID NO: 6329 - DNA, 15 bp, Homo sapiens
tcgcgatactagccg

SEQ ID NO: 6330 - DNA, 15 bp, Homo sapiens
ctcgcgatactagcc

SEQ ID NO: 6331 - DNA, 15 bp, Homo sapiens
tctcgcgatactagc

SEQ ID NO: 6332 - DNA, 15 bp, Homo sapiens
atctcgcgatactag

SEQ ID NO: 6333 - DNA, 15 bp, Homo sapiens
gatctcgcgatacta

SEQ ID NO: 6334 - DNA, 15 bp, Homo sapiens
tgatctcgcgatact

SEQ ID NO: 6335 - DNA, 15 bp, Homo sapiens
ctgatctcgcgatac

SEQ ID NO: 6336 - DNA, 15 bp, Homo sapiens
cctgatctcgcgata

SEQ ID NO: 6337 - DNA, 15 bp, Homo sapiens
tcctgatctcgcgat

SEQ ID NO: 6338 - DNA, 15 bp, Homo sapiens
ttcctgatctcgcga

SEQ ID NO: 6339 - DNA, 15 bp, Homo sapiens
cttcctgatctcgcg

SEQ ID NO: 6340 - DNA, 15 bp, Homo sapiens
ccttcctgatctcgc

SEQ ID NO: 6341 - DNA, 15 bp, Homo sapiens
accttcctgatctcg

SEQ ID NO: 6342 - DNA, 15 bp, Homo sapiens
caccttcctgatctc

SEQ ID NO: 6343 - DNA, 15 bp, Homo sapiens
ccaccttcctgatct

SEQ ID NO: 6344 - DNA, 15 bp, Homo sapiens
gccaccttcctgatc

SEQ ID NO: 6345 - DNA, 15 bp, Homo sapiens
ggccaccttcctgat

SEQ ID NO: 6346 - DNA, 15 bp, Homo sapiens
cggccaccttcctga

SEQ ID NO: 6347 - DNA, 15 bp, Homo sapiens
tcggccaccttcctg

SEQ ID NO: 6348 - DNA, 15 bp, Homo sapiens
ctcggccaccttcct

SEQ ID NO: 6349 - DNA, 15 bp, Homo sapiens
actcggccaccttcc

SEQ ID NO: 6350 - DNA, 15 bp, Homo sapiens
cactcggccaccttc

SEQ ID NO: 6351 - DNA, 15 bp, Homo sapiens
acactcggccacctt

SEQ ID NO: 6352 - DNA, 15 bp, Homo sapiens
cacactcggccacct

SEQ ID NO: 6353 - DNA, 15 bp, Homo sapiens
acacactcggccacc

SEQ ID NO: 6354 - DNA, 15 bp, Homo sapiens
gacacactcggccac

SEQ ID NO: 6355 - DNA, 15 bp, Homo sapiens
cgacacactcggcca

SEQ ID NO: 6356 - DNA, 15 bp, Homo sapiens
gcgacacactcggcc

SEQ ID NO: 6357 - DNA, 15 bp, Homo sapiens
ggcgacacactcggc

SEQ ID NO: 6358 - DNA, 15 bp, Homo sapiens
cggcgacacactcgg

SEQ ID NO: 6359 - DNA, 15 bp, Homo sapiens
gcggcgacacactcg

SEQ ID NO: 6360 - DNA, 15 bp, Homo sapiens
cgcggcgacacactc

SEQ ID NO: 6361 - DNA, 15 bp, Homo sapiens
ccgcggcgacacact

SEQ ID NO: 6362 - DNA, 15 bp, Homo sapiens
gccgcggcgacacac

SEQ ID NO: 6363 - DNA, 15 bp, Homo sapiens
ggccgcggcgacaca

SEQ ID NO: 6364 - DNA, 15 bp, Homo sapiens
tggccgcggcgacac

SEQ ID NO: 6365 - DNA, 15 bp, Homo sapiens
atggccgcggcgaca

SEQ ID NO: 6366 - DNA, 15 bp, Homo sapiens
gatggccgcggcgac

SEQ ID NO: 6367 - DNA, 15 bp, Homo sapiens
tgatggccgcggcga

SEQ ID NO: 6368 - DNA, 15 bp, Homo sapiens
ctgatggccgcggcg

SEQ ID NO: 6369 - DNA, 15 bp, Homo sapiens
cctgatggccgcggc

SEQ ID NO: 6370 - DNA, 15 bp, Homo sapiens
ccctgatggccgcgg

SEQ ID NO: 6371 - DNA, 15 bp, Homo sapiens
accctgatggccgcg

SEQ ID NO: 6372 - DNA, 15 bp, Homo sapiens
taccctgatggccgc

SEQ ID NO: 6373 - DNA, 15 bp, Homo sapiens
ttaccctgatggccg

SEQ ID NO: 6374 - DNA, 15 bp, Homo sapiens
cttaccctgatggcc

SEQ ID NO: 6375 - DNA, 15 bp, Homo sapiens
ccttaccctgatggc

SEQ ID NO: 6376 - DNA, 15 bp, Homo sapiens
cccttaccctgatgg

SEQ ID NO: 6377 - DNA, 15 bp, Homo sapiens
acccttaccctgatg

SEQ ID NO: 6378 - DNA, 15 bp, Homo sapiens
tacccttaccctgat

SEQ ID NO: 6379 - DNA, 15 bp, Homo sapiens
gtacccttaccctga

SEQ ID NO: 6380 - DNA, 15 bp, Homo sapiens
ggtacccttaccctg

SEQ ID NO: 6381 - DNA, 15 bp, Homo sapiens
aggtacccttaccct

SEQ ID NO: 6382 - DNA, 15 bp, Homo sapiens
caggtacccttaccc

SEQ ID NO: 6383 - DNA, 15 bp, Homo sapiens
ccaggtacccttacc

SEQ ID NO: 6384 - DNA, 15 bp, Homo sapiens
tccaggtacccttac

SEQ ID NO: 6385 - DNA, 15 bp, Homo sapiens
gtccaggtaccctta

SEQ ID NO: 6386 - DNA, 15 bp, Homo sapiens
agtccaggtaccctt

SEQ ID NO: 6387 - DNA, 15 bp, Homo sapiens
aagtccaggtaccct

SEQ ID NO: 6388 - DNA, 15 bp, Homo sapiens
caagtccaggtaccc

SEQ ID NO: 6389 - DNA, 15 bp, Homo sapiens
gcaagtccaggtacc

SEQ ID NO: 6390 - DNA, 15 bp, Homo sapiens
cgcaagtccaggtac

SEQ ID NO: 6391 - DNA, 15 bp, Homo sapiens
ccgcaagtccaggta

SEQ ID NO: 6392 - DNA, 15 bp, Homo sapiens
gccgcaagtccaggt

SEQ ID NO: 6393 - DNA, 15 bp, Homo sapiens
agccgcaagtccagg

SEQ ID NO: 6394 - DNA, 15 bp, Homo sapiens
aagccgcaagtccag

SEQ ID NO: 6395 - DNA, 15 bp, Homo sapiens
aaagccgcaagtcca

SEQ ID NO: 6396 - DNA, 15 bp, Homo sapiens
aaaagccgcaagtcc

SEQ ID NO: 6397 - DNA, 15 bp, Homo sapiens
aaaaagccgcaagtc

SEQ ID NO: 6398 - DNA, 15 bp, Homo sapiens
taaaaagccgcaagt

SEQ ID NO: 6399 - DNA, 15 bp, Homo sapiens
ctaaaaagccgcaag

SEQ ID NO: 6400 - DNA, 15 bp, Homo sapiens
cctaaaaagccgcaa

SEQ ID NO: 6401 - DNA, 15 bp, Homo sapiens
acctaaaaagccgca

SEQ ID NO: 6402 - DNA, 15 bp, Homo sapiens
gacctaaaaagccgc

SEQ ID NO: 6403 - DNA, 15 bp, Homo sapiens
cgacctaaaaagccg

SEQ ID NO: 6404 - DNA, 15 bp, Homo sapiens
ccgacctaaaaagcc

SEQ ID NO: 6405 - DNA, 15 bp, Homo sapiens
gccgacctaaaaagc

SEQ ID NO: 6406 - DNA, 15 bp, Homo sapiens
ggccgacctaaaaag

SEQ ID NO: 6407 - DNA, 15 bp, Homo sapiens
aggccgacctaaaaa

SEQ ID NO: 6408 - DNA, 15 bp, Homo sapiens
caggccgacctaaaa

SEQ ID NO: 6409 - DNA, 15 bp, Homo sapiens
ccaggccgacctaaa

SEQ ID NO: 6410 - DNA, 15 bp, Homo sapiens
gccaggccgacctaa

SEQ ID NO: 6411 - DNA, 15 bp, Homo sapiens
agccaggccgaccta

SEQ ID NO: 6412 - DNA, 15 bp, Homo sapiens
gagccaggccgacct

SEQ ID NO: 6413 - DNA, 15 bp, Homo sapiens
ggagccaggccgacc

SEQ ID NO: 6414 - DNA, 15 bp, Homo sapiens
cggagccaggccgac

SEQ ID NO: 6415 - DNA, 15 bp, Homo sapiens
gcggagccaggccga

SEQ ID NO: 6416 - DNA, 15 bp, Homo sapiens
agcggagccaggccg

SEQ ID NO: 6417 - DNA, 15 bp, Homo sapiens
gagcggagccaggcc

SEQ ID NO: 6418 - DNA, 15 bp, Homo sapiens
ggagcggagccaggc

SEQ ID NO: 6419 - DNA, 15 bp, Homo sapiens
aggagcggagccagg

SEQ ID NO: 6420 - DNA, 15 bp, Homo sapiens
aaggagcggagccag

SEQ ID NO: 6421 - DNA, 15 bp, Homo sapiens
gaaggagcggagcca

SEQ ID NO: 6422 - DNA, 15 bp, Homo sapiens
ggaaggagcggagcc

SEQ ID NO: 6423 - DNA, 15 bp, Homo sapiens
cggaaggagcggagc

SEQ ID NO: 6424 - DNA, 15 bp, Homo sapiens
gcggaaggagcggag

SEQ ID NO: 6425 - DNA, 15 bp, Homo sapiens
cgcggaaggagcgga

SEQ ID NO: 6426 - DNA, 15 bp, Homo sapiens
ccgcggaaggagcgg

SEQ ID NO: 6427 - DNA, 15 bp, Homo sapiens
accgcggaaggagcg

SEQ ID NO: 6428 - DNA, 15 bp, Homo sapiens
caccgcggaaggagc

SEQ ID NO: 6429 - DNA, 15 bp, Homo sapiens
tcaccgcggaaggag

SEQ ID NO: 6430 - DNA, 15 bp, Homo sapiens
gtcaccgcggaagga

SEQ ID NO: 6431 - DNA, 15 bp, Homo sapiens
cgtcaccgcggaagg

SEQ ID NO: 6432 - DNA, 15 bp, Homo sapiens
tcgtcaccgcggaag

SEQ ID NO: 6433 - DNA, 15 bp, Homo sapiens
ctcgtcaccgcggaa

SEQ ID NO: 6434 - DNA, 15 bp, Homo sapiens
cctcgtcaccgcgga

SEQ ID NO: 6435 - DNA, 15 bp, Homo sapiens
acctcgtcaccgcgg

SEQ ID NO: 6436 - DNA, 15 bp, Homo sapiens
gacctcgtcaccgcg

SEQ ID NO: 6437 - DNA, 15 bp, Homo sapiens
ggacctcgtcaccgc

SEQ ID NO: 6438 - DNA, 15 bp, Homo sapiens
gggacctcgtcaccg

SEQ ID NO: 6439 - DNA, 15 bp, Homo sapiens
ggggacctcgtcacc

SEQ ID NO: 6440 - DNA, 15 bp, Homo sapiens
gggggacctcgtcac

SEQ ID NO: 6441 - DNA, 15 bp, Homo sapiens
cgggggacctcgtca

SEQ ID NO: 6442 - DNA, 15 bp, Homo sapiens
ccgggggacctcgtc

SEQ ID NO: 6443 - DNA, 15 bp, Homo sapiens
gccgggggacctcgt

SEQ ID NO: 6444 - DNA, 15 bp, Homo sapiens
ggccgggggacctcg

SEQ ID NO: 6445 - DNA, 15 bp, Homo sapiens
aggccgggggacctc

SEQ ID NO: 6446 - DNA, 15 bp, Homo sapiens
gaggccgggggacct

SEQ ID NO: 6447 - DNA, 15 bp, Homo sapiens
ggaggccgggggacc

SEQ ID NO: 6448 - DNA, 15 bp, Homo sapiens
aggaggccgggggac

SEQ ID NO: 6449 - DNA, 15 bp, Homo sapiens
taggaggccggggga

SEQ ID NO: 6450 - DNA, 15 bp, Homo sapiens
ctaggaggccggggg

SEQ ID NO: 6451 - DNA, 15 bp, Homo sapiens
cctaggaggccgggg

SEQ ID NO: 6452 - DNA, 15 bp, Homo sapiens
ccctaggaggccggg

SEQ ID NO: 6453 - DNA, 15 bp, Homo sapiens
accctaggaggccgg

SEQ ID NO: 6454 - DNA, 15 bp, Homo sapiens
aaccctaggaggccg

SEQ ID NO: 6455 - DNA, 15 bp, Homo sapiens
caaccctaggaggcc

SEQ ID NO: 6456 - DNA, 15 bp, Homo sapiens
ccaaccctaggaggc

SEQ ID NO: 6457 - DNA, 15 bp, Homo sapiens
cccaaccctaggagg

SEQ ID NO: 6458 - DNA, 15 bp, Homo sapiens
tcccaaccctaggag

SEQ ID NO: 6459 - DNA, 15 bp, Homo sapiens
ttcccaaccctagga

SEQ ID NO: 6460 - DNA, 15 bp, Homo sapiens
cttcccaaccctagg

SEQ ID NO: 6461 - DNA, 15 bp, Homo sapiens
tcttcccaaccctag

SEQ ID NO: 6462 - DNA, 15 bp, Homo sapiens
ctcttcccaacccta

SEQ ID NO: 6463 - DNA, 15 bp, Homo sapiens
gctcttcccaaccct

SEQ ID NO: 6464 - DNA, 15 bp, Homo sapiens
agctcttcccaaccc

SEQ ID NO: 6465 - DNA, 15 bp, Homo sapiens
cagctcttcccaacc

SEQ ID NO: 6466 - DNA, 15 bp, Homo sapiens
gcagctcttcccaac

SEQ ID NO: 6467 - DNA, 15 bp, Homo sapiens
agcagctcttcccaa

SEQ ID NO: 6468 - DNA, 15 bp, Homo sapiens
aagcagctcttccca

SEQ ID NO: 6469 - DNA, 15 bp, Homo sapiens
aaagcagctcttccc

SEQ ID NO: 6470 - DNA, 15 bp, Homo sapiens
gaaagcagctcttcc

SEQ ID NO: 6471 - DNA, 15 bp, Homo sapiens
ggaaagcagctcttc

SEQ ID NO: 6472 - DNA, 15 bp, Homo sapiens
aggaaagcagctctt

SEQ ID NO: 6473 - DNA, 15 bp, Homo sapiens
caggaaagcagctct

SEQ ID NO: 6474 - DNA, 15 bp, Homo sapiens
tcaggaaagcagctc

SEQ ID NO: 6475 - DNA, 15 bp, Homo sapiens
gtcaggaaagcagct

SEQ ID NO: 6476 - DNA, 15 bp, Homo sapiens
agtcaggaaagcagc

SEQ ID NO: 6477 - DNA, 15 bp, Homo sapiens
gagtcaggaaagcag

SEQ ID NO: 6478 - DNA, 15 bp, Homo sapiens
agagtcaggaaagca

SEQ ID NO: 6479 - DNA, 15 bp, Homo sapiens
gagagtcaggaaagc

SEQ ID NO: 6480 - DNA, 15 bp, Homo sapiens
cgagagtcaggaaag

SEQ ID NO: 6481 - DNA, 15 bp, Homo sapiens
acgagagtcaggaaa

SEQ ID NO: 6482 - DNA, 15 bp, Homo sapiens
aacgagagtcaggaa

SEQ ID NO: 6483 - DNA, 15 bp, Homo sapiens
gaacgagagtcagga

SEQ ID NO: 6484 - DNA, 15 bp, Homo sapiens
ggaacgagagtcagg

SEQ ID NO: 6485 - DNA, 15 bp, Homo sapiens
gggaacgagagtcag

SEQ ID NO: 6486 - DNA, 15 bp, Homo sapiens
agggaacgagagtca

SEQ ID NO: 6487 - DNA, 15 bp, Homo sapiens
cagggaacgagagtc

SEQ ID NO: 6488 - DNA, 15 bp, Homo sapiens
gcagggaacgagagt

SEQ ID NO: 6489 - DNA, 15 bp, Homo sapiens
ggcagggaacgagag

SEQ ID NO: 6490 - DNA, 15 bp, Homo sapiens
aggcagggaacgaga

SEQ ID NO: 6491 - DNA, 15 bp, Homo sapiens
gaggcagggaacgag

SEQ ID NO: 6492 - DNA, 15 bp, Homo sapiens
tgaggcagggaacga

SEQ ID NO: 6493 - DNA, 15 bp, Homo sapiens
ctgaggcagggaacg

SEQ ID NO: 6494 - DNA, 15 bp, Homo sapiens
cctgaggcagggaac

SEQ ID NO: 6495 - DNA, 15 bp, Homo sapiens
gcctgaggcagggaa

SEQ ID NO: 6496 - DNA, 15 bp, Homo sapiens
agcctgaggcaggga

SEQ ID NO: 6497 - DNA, 15 bp, Homo sapiens
aagcctgaggcaggg

SEQ ID NO: 6498 - DNA, 15 bp, Homo sapiens
gaagcctgaggcagg

SEQ ID NO: 6499 - DNA, 15 bp, Homo sapiens
ggaagcctgaggcag

SEQ ID NO: 6500 - DNA, 15 bp, Homo sapiens
gggaagcctgaggca

SEQ ID NO: 6501 - DNA, 15 bp, Homo sapiens
agggaagcctgaggc

SEQ ID NO: 6502 - DNA, 15 bp, Homo sapiens
aagggaagcctgagg

SEQ ID NO: 6503 - DNA, 15 bp, Homo sapiens
taagggaagcctgag

SEQ ID NO: 6504 - DNA, 15 bp, Homo sapiens
ataagggaagcctga

SEQ ID NO: 6505 - DNA, 15 bp, Homo sapiens
gataagggaagcctg

SEQ ID NO: 6506 - DNA, 15 bp, Homo sapiens
ggataagggaagcct

SEQ ID NO: 6507 - DNA, 15 bp, Homo sapiens
gggataagggaagcc

SEQ ID NO: 6508 - DNA, 15 bp, Homo sapiens
tgggataagggaagc

SEQ ID NO: 6509 - DNA, 15 bp, Homo sapiens
ttgggataagggaag

SEQ ID NO: 6510 - DNA, 15 bp, Homo sapiens
attgggataagggaa

SEQ ID NO: 6511 - DNA, 15 bp, Homo sapiens
gattgggataaggga

SEQ ID NO: 6512 - DNA, 15 bp, Homo sapiens
cgattgggataaggg

SEQ ID NO: 6513 - DNA, 15 bp, Homo sapiens
gcgattgggataagg

SEQ ID NO: 6514 - DNA, 15 bp, Homo sapiens
agcgattgggataag

SEQ ID NO: 6515 - DNA, 15 bp, Homo sapiens
aagcgattgggataa

SEQ ID NO: 6516 - DNA, 15 bp, Homo sapiens
gaagcgattgggata

SEQ ID NO: 6517 - DNA, 15 bp, Homo sapiens
cgaagcgattgggat

SEQ ID NO: 6518 - DNA, 15 bp, Homo sapiens
tcgaagcgattggga

SEQ ID NO: 6519 - DNA, 15 bp, Homo sapiens
ttcgaagcgattggg

SEQ ID NO: 6520 - DNA, 15 bp, Homo sapiens
gttcgaagcgattgg

SEQ ID NO: 6521 - DNA, 15 bp, Homo sapiens
ggttcgaagcgattg

SEQ ID NO: 6522 - DNA, 15 bp, Homo sapiens
gggttcgaagcgatt

SEQ ID NO: 6523 - DNA, 15 bp, Homo sapiens
agggttcgaagcgat

SEQ ID NO: 6524 - DNA, 15 bp, Homo sapiens
aagggttcgaagcga

SEQ ID NO: 6525 - DNA, 15 bp, Homo sapiens
caagggttcgaagcg

SEQ ID NO: 6526 - DNA, 15 bp, Homo sapiens
ccaagggttcgaagc

SEQ ID NO: 6527 - DNA, 15 bp, Homo sapiens
gccaagggttcgaag

SEQ ID NO: 6528 - DNA, 15 bp, Homo sapiens
agccaagggttcgaa

SEQ ID NO: 6529 - DNA, 15 bp, Homo sapiens
gagccaagggttcga

SEQ ID NO: 6530 - DNA, 15 bp, Homo sapiens
tgagccaagggttcg

SEQ ID NO: 6531 - DNA, 15 bp, Homo sapiens
ctgagccaagggttc

SEQ ID NO: 6532 - DNA, 15 bp, Homo sapiens
gctgagccaagggtt

SEQ ID NO: 6533 - DNA, 15 bp, Homo sapiens
cgctgagccaagggt

SEQ ID NO: 6534 - DNA, 15 bp, Homo sapiens
acgctgagccaaggg

SEQ ID NO: 6535 - DNA, 15 bp, Homo sapiens
tacgctgagccaagg

SEQ ID NO: 6536 - DNA, 15 bp, Homo sapiens
ctacgctgagccaag

SEQ ID NO: 6537 - DNA, 15 bp, Homo sapiens
tctacgctgagccaa

SEQ ID NO: 6538 - DNA, 15 bp, Homo sapiens
ctctacgctgagcca

SEQ ID NO: 6539 - DNA, 15 bp, Homo sapiens
cctctacgctgagcc

SEQ ID NO: 6540 - DNA, 15 bp, Homo sapiens
tcctctacgctgagc

SEQ ID NO: 6541 - DNA, 15 bp, Homo sapiens
ctcctctacgctgag

SEQ ID NO: 6542 - DNA, 15 bp, Homo sapiens
actcctctacgctga

SEQ ID NO: 6543 - DNA, 15 bp, Homo sapiens
gactcctctacgctg

SEQ ID NO: 6544 - DNA, 15 bp, Homo sapiens
tgactcctctacgct

SEQ ID NO: 6545 - DNA, 15 bp, Homo sapiens
ttgactcctctacgc

SEQ ID NO: 6546 - DNA, 15 bp, Homo sapiens
cttgactcctctacg

SEQ ID NO: 6547 - DNA, 15 bp, Homo sapiens
gcttgactcctctac

SEQ ID NO: 6548 - DNA, 15 bp, Homo sapiens
ggcttgactcctcta

SEQ ID NO: 6549 - DNA, 15 bp, Homo sapiens
aggcttgactcctct

SEQ ID NO: 6550 - DNA, 15 bp, Homo sapiens
caggcttgactcctc

SEQ ID NO: 6551 - DNA, 15 bp, Homo sapiens
ccaggcttgactcct

SEQ ID NO: 6552 - DNA, 15 bp, Homo sapiens
tccaggcttgactcc

SEQ ID NO: 6553 - DNA, 15 bp, Homo sapiens
atccaggcttgactc

SEQ ID NO: 6554 - DNA, 15 bp, Homo sapiens
aatccaggcttgact

SEQ ID NO: 6555 - DNA, 15 bp, Homo sapiens
gaatccaggcttgac

SEQ ID NO: 6556 - DNA, 15 bp, Homo sapiens
agaatccaggcttga

SEQ ID NO: 6557 - DNA, 15 bp, Homo sapiens
tagaatccaggcttg

SEQ ID NO: 6558 - DNA, 15 bp, Homo sapiens
ctagaatccaggctt

SEQ ID NO: 6559 - DNA, 15 bp, Homo sapiens
actagaatccaggct

SEQ ID NO: 6560 - DNA, 15 bp, Homo sapiens
gactagaatccaggc

SEQ ID NO: 6561 - DNA, 15 bp, Homo sapiens
ggactagaatccagg

SEQ ID NO: 6562 - DNA, 15 bp, Homo sapiens
gggactagaatccag

SEQ ID NO: 6563 - DNA, 15 bp, Homo sapiens
tgggactagaatcca

SEQ ID NO: 6564 - DNA, 15 bp, Homo sapiens
gtgggactagaatcc

SEQ ID NO: 6565 - DNA, 15 bp, Homo sapiens
ggtgggactagaatc

SEQ ID NO: 6566 - DNA, 15 bp, Homo sapiens
aggtgggactagaat

SEQ ID NO: 6567 - DNA, 15 bp, Homo sapiens
aaggtgggactagaa

SEQ ID NO: 6568 - DNA, 15 bp, Homo sapiens
caaggtgggactaga

SEQ ID NO: 6569 - DNA, 15 bp, Homo sapiens
gcaaggtgggactag

SEQ ID NO: 6570 - DNA, 15 bp, Homo sapiens
ggcaaggtgggacta

SEQ ID NO: 6571 - DNA, 15 bp, Homo sapiens
gggcaaggtgggact

SEQ ID NO: 6572 - DNA, 15 bp, Homo sapiens
tgggcaaggtgggac

SEQ ID NO: 6573 - DNA, 15 bp, Homo sapiens
atgggcaaggtggga

SEQ ID NO: 6574 - DNA, 15 bp, Homo sapiens
aatgggcaaggtggg

SEQ ID NO: 6575 - DNA, 15 bp, Homo sapiens
taatgggcaaggtgg

SEQ ID NO: 6576 - DNA, 15 bp, Homo sapiens
ctaatgggcaaggtg

SEQ ID NO: 6577 - DNA, 15 bp, Homo sapiens
gctaatgggcaaggt

SEQ ID NO: 6578 - DNA, 15 bp, Homo sapiens
tgctaatgggcaagg

SEQ ID NO: 6579 - DNA, 15 bp, Homo sapiens
ctgctaatgggcaag

SEQ ID NO: 6580 - DNA, 15 bp, Homo sapiens
gctgctaatgggcaa

SEQ ID NO: 6581 - DNA, 15 bp, Homo sapiens
agctgctaatgggca

SEQ ID NO: 6582 - DNA, 15 bp, Homo sapiens
gagctgctaatgggc

SEQ ID NO: 6583 - DNA, 15 bp, Homo sapiens
agagctgctaatggg

SEQ ID NO: 6584 - DNA, 15 bp, Homo sapiens
cagagctgctaatgg

SEQ ID NO: 6585 - DNA, 15 bp, Homo sapiens
acagagctgctaatg

SEQ ID NO: 6586 - DNA, 15 bp, Homo sapiens
cacagagctgctaat

SEQ ID NO: 6587 - DNA, 15 bp, Homo sapiens
tcacagagctgctaa

SEQ ID NO: 6588 - DNA, 15 bp, Homo sapiens
gtcacagagctgcta

SEQ ID NO: 6589 - DNA, 15 bp, Homo sapiens
ggtcacagagctgct

SEQ ID NO: 6590 - DNA, 15 bp, Homo sapiens
aggtcacagagctgc

SEQ ID NO: 6591 - DNA, 15 bp, Homo sapiens
caggtcacagagctg

SEQ ID NO: 6592 - DNA, 15 bp, Homo sapiens
ccaggtcacagagct

SEQ ID NO: 6593 - DNA, 15 bp, Homo sapiens
cccaggtcacagagc

SEQ ID NO: 6594 - DNA, 15 bp, Homo sapiens
tcccaggtcacagag

SEQ ID NO: 6595 - DNA, 15 bp, Homo sapiens
gtcccaggtcacaga

SEQ ID NO: 6596 - DNA, 15 bp, Homo sapiens
agtcccaggtcacag

SEQ ID NO: 6597 - DNA, 15 bp, Homo sapiens
cagtcccaggtcaca

SEQ ID NO: 6598 - DNA, 15 bp, Homo sapiens
acagtcccaggtcac

SEQ ID NO: 6599 - DNA, 15 bp, Homo sapiens
aacagtcccaggtca

SEQ ID NO: 6600 - DNA, 15 bp, Homo sapiens
gaacagtcccaggtc

SEQ ID NO: 6601 - DNA, 15 bp, Homo sapiens
tgaacagtcccaggt

SEQ ID NO: 6602 - DNA, 15 bp, Homo sapiens
gtgaacagtcccagg

SEQ ID NO: 6603 - DNA, 15 bp, Homo sapiens
agtgaacagtcccag

SEQ ID NO: 6604 - DNA, 15 bp, Homo sapiens
aagtgaacagtccca

SEQ ID NO: 6605 - DNA, 15 bp, Homo sapiens
taagtgaacagtccc

SEQ ID NO: 6606 - DNA, 15 bp, Homo sapiens
gtaagtgaacagtcc

SEQ ID NO: 6607 - DNA, 15 bp, Homo sapiens
ggtaagtgaacagtc

SEQ ID NO: 6608 - DNA, 15 bp, Homo sapiens
gggtaagtgaacagt

SEQ ID NO: 6609 - DNA, 15 bp, Homo sapiens
agggtaagtgaacag

SEQ ID NO: 6610 - DNA, 15 bp, Homo sapiens
gagggtaagtgaaca

SEQ ID NO: 6611 - DNA, 15 bp, Homo sapiens
agagggtaagtgaac

SEQ ID NO: 6612 - DNA, 15 bp, Homo sapiens
gagagggtaagtgaa

SEQ ID NO: 6613 - DNA, 15 bp, Homo sapiens
agagagggtaagtga

SEQ ID NO: 6614 - DNA, 15 bp, Homo sapiens
gagagagggtaagtg

SEQ ID NO: 6615 - DNA, 15 bp, Homo sapiens
tgagagagggtaagt

SEQ ID NO: 6616 - DNA, 15 bp, Homo sapiens
ctgagagagggtaag

SEQ ID NO: 6617 - DNA, 15 bp, Homo sapiens
gctgagagagggtaa

SEQ ID NO: 6618 - DNA, 15 bp, Homo sapiens
ggctgagagagggta

SEQ ID NO: 6619 - DNA, 15 bp, Homo sapiens
aggctgagagagggt

SEQ ID NO: 6620 - DNA, 15 bp, Homo sapiens
gaggctgagagaggg

SEQ ID NO: 6621 - DNA, 15 bp, Homo sapiens
tgaggctgagagagg

SEQ ID NO: 6622 - DNA, 15 bp, Homo sapiens
ctgaggctgagagag

SEQ ID NO: 6623 - DNA, 15 bp, Homo sapiens
actgaggctgagaga

SEQ ID NO: 6624 - DNA, 15 bp, Homo sapiens
aactgaggctgagag

SEQ ID NO: 6625 - DNA, 15 bp, Homo sapiens
aaactgaggctgaga

SEQ ID NO: 6626 - DNA, 15 bp, Homo sapiens
gaaactgaggctgag

SEQ ID NO: 6627 - DNA, 15 bp, Homo sapiens
ggaaactgaggctga

SEQ ID NO: 6628 - DNA, 15 bp, Homo sapiens
cggaaactgaggctg

SEQ ID NO: 6629 - DNA, 15 bp, Homo sapiens
gcggaaactgaggct

SEQ ID NO: 6630 - DNA, 15 bp, Homo sapiens
tgcggaaactgaggc

SEQ ID NO: 6631 - DNA, 15 bp, Homo sapiens
atgcggaaactgagg

SEQ ID NO: 6632 - DNA, 15 bp, Homo sapiens
gatgcggaaactgag

SEQ ID NO: 6633 - DNA, 15 bp, Homo sapiens
agatgcggaaactga

SEQ ID NO: 6634 - DNA, 15 bp, Homo sapiens
cagatgcggaaactg

SEQ ID NO: 6635 - DNA, 15 bp, Homo sapiens
acagatgcggaaact

SEQ ID NO: 6636 - DNA, 15 bp, Homo sapiens
tacagatgcggaaac

SEQ ID NO: 6637 - DNA, 15 bp, Homo sapiens
gtacagatgcggaaa

SEQ ID NO: 6638 - DNA, 15 bp, Homo sapiens
tgtacagatgcggaa

SEQ ID NO: 6639 - DNA, 15 bp, Homo sapiens
ttgtacagatgcgga

SEQ ID NO: 6640 - DNA, 15 bp, Homo sapiens
gttgtacagatgcgg

SEQ ID NO: 6641 - DNA, 15 bp, Homo sapiens
cgttgtacagatgcg

SEQ ID NO: 6642 - DNA, 15 bp, Homo sapiens
tcgttgtacagatgc

SEQ ID NO: 6643 - DNA, 15 bp, Homo sapiens
ctcgttgtacagatg

SEQ ID NO: 6644 - DNA, 15 bp, Homo sapiens
tctcgttgtacagat

SEQ ID NO: 6645 - DNA, 15 bp, Homo sapiens
ctctcgttgtacaga

SEQ ID NO: 6646 - DNA, 15 bp, Homo sapiens
cctctcgttgtacag

SEQ ID NO: 6647 - DNA, 15 bp, Homo sapiens
acctctcgttgtaca

SEQ ID NO: 6648 - DNA, 15 bp, Homo sapiens
gacctctcgttgtac

SEQ ID NO: 6649 - DNA, 15 bp, Homo sapiens
ggacctctcgttgta

SEQ ID NO: 6650 - DNA, 15 bp, Homo sapiens
aggacctctcgttgt

SEQ ID NO: 6651 - DNA, 15 bp, Homo sapiens
taggacctctcgttg

SEQ ID NO: 6652 - DNA, 15 bp, Homo sapiens
ataggacctctcgtt

SEQ ID NO: 6653 - DNA, 15 bp, Homo sapiens
gataggacctctcgt

SEQ ID NO: 6654 - DNA, 15 bp, Homo sapiens
agataggacctctcg

SEQ ID NO: 6655 - DNA, 15 bp, Homo sapiens
gagataggacctctc

SEQ ID NO: 6656 - DNA, 15 bp, Homo sapiens
agagataggacctct

SEQ ID NO: 6657 - DNA, 15 bp, Homo sapiens
aagagataggacctc

SEQ ID NO: 6658 - DNA, 15 bp, Homo sapiens
taagagataggacct

SEQ ID NO: 6659 - DNA, 15 bp, Homo sapiens
ctaagagataggacc

SEQ ID NO: 6660 - DNA, 15 bp, Homo sapiens
cctaagagataggac

SEQ ID NO: 6661 - DNA, 15 bp, Homo sapiens
acctaagagatagga

SEQ ID NO: 6662 - DNA, 15 bp, Homo sapiens
gacctaagagatagg

SEQ ID NO: 6663 - DNA, 15 bp, Homo sapiens
ggacctaagagatag

SEQ ID NO: 6664 - DNA, 15 bp, Homo sapiens
aggacctaagagata

SEQ ID NO: 6665 - DNA, 15 bp, Homo sapiens
aaggacctaagagat

SEQ ID NO: 6666 - DNA, 15 bp, Homo sapiens
taaggacctaagaga

SEQ ID NO: 6667 - DNA, 15 bp, Homo sapiens
gtaaggacctaagag

SEQ ID NO: 6668 - DNA, 15 bp, Homo sapiens
tgtaaggacctaaga

SEQ ID NO: 6669 - DNA, 15 bp, Homo sapiens
ttgtaaggacctaag

SEQ ID NO: 6670 - DNA, 15 bp, Homo sapiens
attgtaaggacctaa

SEQ ID NO: 6671 - DNA, 15 bp, Homo sapiens
aattgtaaggaccta

SEQ ID NO: 6672 - DNA, 15 bp, Homo sapiens
aaattgtaaggacct

SEQ ID NO: 6673 - DNA, 15 bp, Homo sapiens
aaaattgtaaggacc

SEQ ID NO: 6674 - DNA, 15 bp, Homo sapiens
aaaaattgtaaggac

SEQ ID NO: 6675 - DNA, 15 bp, Homo sapiens
taaaaattgtaagga

SEQ ID NO: 6676 - DNA, 15 bp, Homo sapiens
ttaaaaattgtaagg

SEQ ID NO: 6677 - DNA, 15 bp, Homo sapiens
tttaaaaattgtaag

SEQ ID NO: 6678 - DNA, 15 bp, Homo sapiens
gtttaaaaattgtaa

SEQ ID NO: 6679 - DNA, 15 bp, Homo sapiens
agtttaaaaattgta

SEQ ID NO: 6680 - DNA, 15 bp, Homo sapiens
gagtttaaaaattgt

SEQ ID NO: 6681 - DNA, 15 bp, Homo sapiens
agagtttaaaaattg

SEQ ID NO: 6682 - DNA, 15 bp, Homo sapiens
cagagtttaaaaatt

SEQ ID NO: 6683 - DNA, 15 bp, Homo sapiens
ccagagtttaaaaat

SEQ ID NO: 6684 - DNA, 15 bp, Homo sapiens
cccagagtttaaaaa

SEQ ID NO: 6685 - DNA, 15 bp, Homo sapiens
tcccagagtttaaaa

SEQ ID NO: 6686 - DNA, 15 bp, Homo sapiens
atcccagagtttaaa

SEQ ID NO: 6687 - DNA, 15 bp, Homo sapiens
aatcccagagtttaa

SEQ ID NO: 6688 - DNA, 15 bp, Homo sapiens
gaatcccagagttta

SEQ ID NO: 6689 - DNA, 15 bp, Homo sapiens
cgaatcccagagttt

SEQ ID NO: 6690 - DNA, 15 bp, Homo sapiens
ccgaatcccagagtt

SEQ ID NO: 6691 - DNA, 15 bp, Homo sapiens
accgaatcccagagt

SEQ ID NO: 6692 - DNA, 15 bp, Homo sapiens
caccgaatcccagag

SEQ ID NO: 6693 - DNA, 15 bp, Homo sapiens
ccaccgaatcccaga

SEQ ID NO: 6694 - DNA, 15 bp, Homo sapiens
gccaccgaatcccag

SEQ ID NO: 6695 - DNA, 15 bp, Homo sapiens
tgccaccgaatccca

SEQ ID NO: 6696 - DNA, 15 bp, Homo sapiens
ttgccaccgaatccc

SEQ ID NO: 6697 - DNA, 15 bp, Homo sapiens
attgccaccgaatcc

SEQ ID NO: 6698 - DNA, 15 bp, Homo sapiens
aattgccaccgaatc

SEQ ID NO: 6699 - DNA, 15 bp, Homo sapiens
taattgccaccgaat

SEQ ID NO: 6700 - DNA, 15 bp, Homo sapiens
ttaattgccaccgaa

SEQ ID NO: 6701 - DNA, 15 bp, Homo sapiens
tttaattgccaccga

SEQ ID NO: 6702 - DNA, 15 bp, Homo sapiens
atttaattgccaccg

SEQ ID NO: 6703 - DNA, 15 bp, Homo sapiens
catttaattgccacc

SEQ ID NO: 6704 - DNA, 15 bp, Homo sapiens
acatttaattgccac

SEQ ID NO: 6705 - DNA, 15 bp, Homo sapiens
cacatttaattgcca

SEQ ID NO: 6706 - DNA, 15 bp, Homo sapiens
acacatttaattgcc

SEQ ID NO: 6707 - DNA, 15 bp, Homo sapiens
tacacatttaattgc

SEQ ID NO: 6708 - DNA, 15 bp, Homo sapiens
ttacacatttaattg

SEQ ID NO: 6709 - DNA, 15 bp, Homo sapiens
attacacatttaatt

SEQ ID NO: 6710 - DNA, 15 bp, Homo sapiens
cattacacatttaat

SEQ ID NO: 6711 - DNA, 15 bp, Homo sapiens
tcattacacatttaa

SEQ ID NO: 6712 - DNA, 15 bp, Homo sapiens
gtcattacacattta

SEQ ID NO: 6713 - DNA, 15 bp, Homo sapiens
tgtcattacacattt

SEQ ID NO: 6714 - DNA, 15 bp, Homo sapiens
atgtcattacacatt

SEQ ID NO: 6715 - DNA, 15 bp, Homo sapiens
catgtcattacacat

SEQ ID NO: 6716 - DNA, 15 bp, Homo sapiens
acatgtcattacaca

SEQ ID NO: 6717 - DNA, 15 bp, Homo sapiens
aacatgtcattacac

SEQ ID NO: 6718 - DNA, 15 bp, Homo sapiens
caacatgtcattaca

SEQ ID NO: 6719 - DNA, 15 bp, Homo sapiens
acaacatgtcattac

SEQ ID NO: 6720 - DNA, 15 bp, Homo sapiens
gacaacatgtcatta

SEQ ID NO: 6721 - DNA, 15 bp, Homo sapiens
tgacaacatgtcatt

SEQ ID NO: 6722 - DNA, 15 bp, Homo sapiens
ctgacaacatgtcat

SEQ ID NO: 6723 - DNA, 15 bp, Homo sapiens
actgacaacatgtca

SEQ ID NO: 6724 - DNA, 15 bp, Homo sapiens
aactgacaacatgtc

SEQ ID NO: 6725 - DNA, 15 bp, Homo sapiens
gaactgacaacatgt

SEQ ID NO: 6726 - DNA, 15 bp, Homo sapiens
agaactgacaacatg

SEQ ID NO: 6727 - DNA, 15 bp, Homo sapiens
gagaactgacaacat

SEQ ID NO: 6728 - DNA, 15 bp, Homo sapiens
tgagaactgacaaca

SEQ ID NO: 6729 - DNA, 15 bp, Homo sapiens
ttgagaactgacaac

SEQ ID NO: 6730 - DNA, 15 bp, Homo sapiens
attgagaactgacaa

SEQ ID NO: 6731 - DNA, 15 bp, Homo sapiens
aattgagaactgaca

SEQ ID NO: 6732 - DNA, 15 bp, Homo sapiens
aaattgagaactgac

SEQ ID NO: 6733 - DNA, 15 bp, Homo sapiens
caaattgagaactga

SEQ ID NO: 6734 - DNA, 15 bp, Homo sapiens
acaaattgagaactg

SEQ ID NO: 6735 - DNA, 15 bp, Homo sapiens
cacaaattgagaact

SEQ ID NO: 6736 - DNA, 15 bp, Homo sapiens
tcacaaattgagaac

SEQ ID NO: 6737 - DNA, 15 bp, Homo sapiens
gtcacaaattgagaa

SEQ ID NO: 6738 - DNA, 15 bp, Homo sapiens
tgtcacaaattgaga

SEQ ID NO: 6739 - DNA, 15 bp, Homo sapiens
ctgtcacaaattgag

SEQ ID NO: 6740 - DNA, 15 bp, Homo sapiens
gctgtcacaaattga

SEQ ID NO: 6741 - DNA, 15 bp, Homo sapiens
tgctgtcacaaattg

SEQ ID NO: 6742 - DNA, 15 bp, Homo sapiens
atgctgtcacaaatt

SEQ ID NO: 6743 - DNA, 15 bp, Homo sapiens
aatgctgtcacaaat

SEQ ID NO: 6744 - DNA, 15 bp, Homo sapiens
caatgctgtcacaaa

SEQ ID NO: 6745 - DNA, 15 bp, Homo sapiens
gcaatgctgtcacaa

SEQ ID NO: 6746 - DNA, 15 bp, Homo sapiens
agcaatgctgtcaca

SEQ ID NO: 6747 - DNA, 15 bp, Homo sapiens
aagcaatgctgtcac

SEQ ID NO: 6748 - DNA, 15 bp, Homo sapiens
aaagcaatgctgtca

SEQ ID NO: 6749 - DNA, 15 bp, Homo sapiens
taaagcaatgctgtc

SEQ ID NO: 6750 - DNA, 15 bp, Homo sapiens
ttaaagcaatgctgt

SEQ ID NO: 6751 - DNA, 15 bp, Homo sapiens
tttaaagcaatgctg

SEQ ID NO: 6752 - DNA, 15 bp, Homo sapiens
atttaaagcaatgct

SEQ ID NO: 6753 - DNA, 15 bp, Homo sapiens
aatttaaagcaatgc

SEQ ID NO: 6754 - DNA, 15 bp, Homo sapiens
aaatttaaagcaatg

SEQ ID NO: 6755 - DNA, 15 bp, Homo sapiens
taaatttaaagcaat

SEQ ID NO: 6756 - DNA, 15 bp, Homo sapiens
ttaaatttaaagcaa

SEQ ID NO: 6757 - DNA, 15 bp, Homo sapiens
tttaaatttaaagca

SEQ ID NO: 6758 - DNA, 15 bp, Homo sapiens
ttttaaatttaaagc

SEQ ID NO: 6759 - DNA, 15 bp, Homo sapiens
tttttaaatttaaag

SEQ ID NO: 6760 - DNA, 15 bp, Homo sapiens
atttttaaatttaaa

SEQ ID NO: 6761 - DNA, 15 bp, Homo sapiens
gatttttaaatttaa

SEQ ID NO: 6762 - DNA, 15 bp, Homo sapiens
ggatttttaaattta

SEQ ID NO: 6763 - DNA, 15 bp, Homo sapiens
tggatttttaaattt

SEQ ID NO: 6764 - DNA, 15 bp, Homo sapiens
gtggatttttaaatt

SEQ ID NO: 6765 - DNA, 15 bp, Homo sapiens
cgtggatttttaaat

SEQ ID NO: 6766 - DNA, 15 bp, Homo sapiens
ccgtggatttttaaa

SEQ ID NO: 6767 - DNA, 15 bp, Homo sapiens
gccgtggatttttaa

SEQ ID NO: 6768 - DNA, 15 bp, Homo sapiens
agccgtggattttta

SEQ ID NO: 6769 - DNA, 15 bp, Homo sapiens
aagccgtggattttt

SEQ ID NO: 6770 - DNA, 15 bp, Homo sapiens
caagccgtggatttt

SEQ ID NO: 6771 - DNA, 15 bp, Homo sapiens
tcaagccgtggattt

SEQ ID NO: 6772 - DNA, 15 bp, Homo sapiens
ttcaagccgtggatt

SEQ ID NO: 6773 - DNA, 15 bp, Homo sapiens
attcaagccgtggat

SEQ ID NO: 6774 - DNA, 15 bp, Homo sapiens
gattcaagccgtgga

SEQ ID NO: 6775 - DNA, 15 bp, Homo sapiens
agattcaagccgtgg

SEQ ID NO: 6776 - DNA, 15 bp, Homo sapiens
aagattcaagccgtg

SEQ ID NO: 6777 - DNA, 15 bp, Homo sapiens
gaagattcaagccgt

SEQ ID NO: 6778 - DNA, 15 bp, Homo sapiens
ggaagattcaagccg

SEQ ID NO: 6779 - DNA, 15 bp, Homo sapiens
gggaagattcaagcc

SEQ ID NO: 6780 - DNA, 15 bp, Homo sapiens
agggaagattcaagc

SEQ ID NO: 6781 - DNA, 15 bp, Homo sapiens
gagggaagattcaag

SEQ ID NO: 6782 - DNA, 15 bp, Homo sapiens
ggagggaagattcaa

SEQ ID NO: 6783 - DNA, 15 bp, Homo sapiens
tggagggaagattca

SEQ ID NO: 6784 - DNA, 15 bp, Homo sapiens
ttggagggaagattc

SEQ ID NO: 6785 - DNA, 15 bp, Homo sapiens
tttggagggaagatt

SEQ ID NO: 6786 - DNA, 15 bp, Homo sapiens
atttggagggaagat

SEQ ID NO: 6787 - DNA, 15 bp, Homo sapiens
gatttggagggaaga

SEQ ID NO: 6788 - DNA, 15 bp, Homo sapiens
agatttggagggaag

SEQ ID NO: 6789 - DNA, 15 bp, Homo sapiens
cagatttggagggaa

SEQ ID NO: 6790 - DNA, 15 bp, Homo sapiens
acagatttggaggga

SEQ ID NO: 6791 - DNA, 15 bp, Homo sapiens
aacagatttggaggg

SEQ ID NO: 6792 - DNA, 15 bp, Homo sapiens
taacagatttggagg

SEQ ID NO: 6793 - DNA, 15 bp, Homo sapiens
ttaacagatttggag

SEQ ID NO: 6794 - DNA, 15 bp, Homo sapiens
cttaacagatttgga

SEQ ID NO: 6795 - DNA, 15 bp, Homo sapiens
ccttaacagatttgg

SEQ ID NO: 6796 - DNA, 15 bp, Homo sapiens
cccttaacagatttg

SEQ ID NO: 6797 - DNA, 15 bp, Homo sapiens
ccccttaacagattt

SEQ ID NO: 6798 - DNA, 15 bp, Homo sapiens
accccttaacagatt

SEQ ID NO: 6799 - DNA, 15 bp, Homo sapiens
caccccttaacagat

SEQ ID NO: 6800 - DNA, 15 bp, Homo sapiens
ccaccccttaacaga

SEQ ID NO: 6801 - DNA, 15 bp, Homo sapiens
tccaccccttaacag

SEQ ID NO: 6802 - DNA, 15 bp, Homo sapiens
ttccaccccttaaca

SEQ ID NO: 6803 - DNA, 15 bp, Homo sapiens
tttccaccccttaac

SEQ ID NO: 6804 - DNA, 15 bp, Homo sapiens
ctttccaccccttaa

SEQ ID NO: 6805 - DNA, 15 bp, Homo sapiens
actttccacccctta

SEQ ID NO: 6806 - DNA, 15 bp, Homo sapiens
tactttccacccctt

SEQ ID NO: 6807 - DNA, 15 bp, Homo sapiens
gtactttccacccct

SEQ ID NO: 6808 - DNA, 15 bp, Homo sapiens
tgtactttccacccc

SEQ ID NO: 6809 - DNA, 15 bp, Homo sapiens
ttgtactttccaccc

SEQ ID NO: 6810 - DNA, 15 bp, Homo sapiens
tttgtactttccacc

SEQ ID NO: 6811 - DNA, 15 bp, Homo sapiens
ctttgtactttccac

SEQ ID NO: 6812 - DNA, 15 bp, Homo sapiens
tctttgtactttcca

SEQ ID NO: 6813 - DNA, 15 bp, Homo sapiens
ctctttgtactttcc

SEQ ID NO: 6814 - DNA, 15 bp, Homo sapiens
gctctttgtactttc

SEQ ID NO: 6815 - DNA, 15 bp, Homo sapiens
tgctctttgtacttt

SEQ ID NO: 6816 - DNA, 15 bp, Homo sapiens
atgctctttgtactt

SEQ ID NO: 6817 - DNA, 15 bp, Homo sapiens
catgctctttgtact

SEQ ID NO: 6818 - DNA, 15 bp, Homo sapiens
tcatgctctttgtac

SEQ ID NO: 6819 - DNA, 15 bp, Homo sapiens
ttcatgctctttgta

SEQ ID NO: 6820 - DNA, 15 bp, Homo sapiens
tttcatgctctttgt

SEQ ID NO: 6821 - DNA, 15 bp, Homo sapiens
gtttcatgctctttg

SEQ ID NO: 6822 - DNA, 15 bp, Homo sapiens
tgtttcatgctcttt

SEQ ID NO: 6823 - DNA, 15 bp, Homo sapiens
atgtttcatgctctt

SEQ ID NO: 6824 - DNA, 15 bp, Homo sapiens
tatgtttcatgctct

SEQ ID NO: 6825 - DNA, 15 bp, Homo sapiens
atatgtttcatgctc

SEQ ID NO: 6826 - DNA, 15 bp, Homo sapiens
gatatgtttcatgct

SEQ ID NO: 6827 - DNA, 15 bp, Homo sapiens
agatatgtttcatgc

SEQ ID NO: 6828 - DNA, 15 bp, Homo sapiens
cagatatgtttcatg

SEQ ID NO: 6829 - DNA, 15 bp, Homo sapiens
ccagatatgtttcat

SEQ ID NO: 6830 - DNA, 15 bp, Homo sapiens
cccagatatgtttca

SEQ ID NO: 6831 - DNA, 15 bp, Homo sapiens
acccagatatgtttc

SEQ ID NO: 6832 - DNA, 15 bp, Homo sapiens
cacccagatatgttt

SEQ ID NO: 6833 - DNA, 15 bp, Homo sapiens
tcacccagatatgtt

SEQ ID NO: 6834 - DNA, 15 bp, Homo sapiens
ctcacccagatatgt

SEQ ID NO: 6835 - DNA, 15 bp, Homo sapiens
cctcacccagatatg

SEQ ID NO: 6836 - DNA, 15 bp, Homo sapiens
ccctcacccagatat

SEQ ID NO: 6837 - DNA, 15 bp, Homo sapiens
tccctcacccagata

SEQ ID NO: 6838 - DNA, 15 bp, Homo sapiens
ctccctcacccagat

SEQ ID NO: 6839 - DNA, 15 bp, Homo sapiens
tctccctcacccaga

SEQ ID NO: 6840 - DNA, 15 bp, Homo sapiens
ctctccctcacccag

SEQ ID NO: 6841 - DNA, 15 bp, Homo sapiens
tctctccctcaccca

SEQ ID NO: 6842 - DNA, 15 bp, Homo sapiens
ttctctccctcaccc

SEQ ID NO: 6843 - DNA, 15 bp, Homo sapiens
gttctctccctcacc

SEQ ID NO: 6844 - DNA, 15 bp, Homo sapiens
tgttctctccctcac

SEQ ID NO: 6845 - DNA, 15 bp, Homo sapiens
ttgttctctccctca

SEQ ID NO: 6846 - DNA, 15 bp, Homo sapiens
cttgttctctccctc

SEQ ID NO: 6847 - DNA, 15 bp, Homo sapiens
ccttgttctctccct

SEQ ID NO: 6848 - DNA, 15 bp, Homo sapiens
accttgttctctccc

SEQ ID NO: 6849 - DNA, 15 bp, Homo sapiens
caccttgttctctcc

SEQ ID NO: 6850 - DNA, 15 bp, Homo sapiens
gcaccttgttctctc

SEQ ID NO: 6851 - DNA, 15 bp, Homo sapiens
agcaccttgttctct

SEQ ID NO: 6852 - DNA, 15 bp, Homo sapiens
aagcaccttgttctc

SEQ ID NO: 6853 - DNA, 15 bp, Homo sapiens
aaagcaccttgttct

SEQ ID NO: 6854 - DNA, 15 bp, Homo sapiens
caaagcaccttgttc

SEQ ID NO: 6855 - DNA, 15 bp, Homo sapiens
ccaaagcaccttgtt

SEQ ID NO: 6856 - DNA, 15 bp, Homo sapiens
accaaagcaccttgt

SEQ ID NO: 6857 - DNA, 15 bp, Homo sapiens
caccaaagcaccttg

SEQ ID NO: 6858 - DNA, 15 bp, Homo sapiens
gcaccaaagcacctt

SEQ ID NO: 6859 - DNA, 15 bp, Homo sapiens
tgcaccaaagcacct

SEQ ID NO: 6860 - DNA, 15 bp, Homo sapiens
gtgcaccaaagcacc

SEQ ID NO: 6861 - DNA, 15 bp, Homo sapiens
ggtgcaccaaagcac

SEQ ID NO: 6862 - DNA, 15 bp, Homo sapiens
tggtgcaccaaagca

SEQ ID NO: 6863 - DNA, 15 bp, Homo sapiens
gtggtgcaccaaagc

SEQ ID NO: 6864 - DNA, 15 bp, Homo sapiens
tgtggtgcaccaaag

SEQ ID NO: 6865 - DNA, 15 bp, Homo sapiens
ttgtggtgcaccaaa

SEQ ID NO: 6866 - DNA, 15 bp, Homo sapiens
tttgtggtgcaccaa

SEQ ID NO: 6867 - DNA, 15 bp, Homo sapiens
ctttgtggtgcacca

SEQ ID NO: 6868 - DNA, 15 bp, Homo sapiens
actttgtggtgcacc

SEQ ID NO: 6869 - DNA, 15 bp, Homo sapiens
tactttgtggtgcac

SEQ ID NO: 6870 - DNA, 15 bp, Homo sapiens
ttactttgtggtgca

SEQ ID NO: 6871 - DNA, 15 bp, Homo sapiens
gttactttgtggtgc

SEQ ID NO: 6872 - DNA, 15 bp, Homo sapiens
tgttactttgtggtg

SEQ ID NO: 6873 - DNA, 15 bp, Homo sapiens
ttgttactttgtggt

SEQ ID NO: 6874 - DNA, 15 bp, Homo sapiens
attgttactttgtgg

SEQ ID NO: 6875 - DNA, 15 bp, Homo sapiens
aattgttactttgtg

SEQ ID NO: 6876 - DNA, 15 bp, Homo sapiens
aaattgttactttgt

SEQ ID NO: 6877 - DNA, 15 bp, Homo sapiens
aaaattgttactttg

SEQ ID NO: 6878 - DNA, 15 bp, Homo sapiens
taaaattgttacttt

SEQ ID NO: 6879 - DNA, 15 bp, Homo sapiens
ataaaattgttactt

SEQ ID NO: 6880 - DNA, 15 bp, Homo sapiens
tataaaattgttact

SEQ ID NO: 6881 - DNA, 15 bp, Homo sapiens
ttataaaattgttac

SEQ ID NO: 6882 - DNA, 15 bp, Homo sapiens
cttataaaattgtta

SEQ ID NO: 6883 - DNA, 15 bp, Homo sapiens
gcttataaaattgtt

SEQ ID NO: 6884 - DNA, 15 bp, Homo sapiens
tgcttataaaattgt

SEQ ID NO: 6885 - DNA, 15 bp, Homo sapiens
ctgcttataaaattg

SEQ ID NO: 6886 - DNA, 15 bp, Homo sapiens
gctgcttataaaatt

SEQ ID NO: 6887 - DNA, 15 bp, Homo sapiens
agctgcttataaaat

SEQ ID NO: 6888 - DNA, 15 bp, Homo sapiens
cagctgcttataaaa

SEQ ID NO: 6889 - DNA, 15 bp, Homo sapiens
tcagctgcttataaa

SEQ ID NO: 6890 - DNA, 15 bp, Homo sapiens
atcagctgcttataa

SEQ ID NO: 6891 - DNA, 15 bp, Homo sapiens
aatcagctgcttata

SEQ ID NO: 6892 - DNA, 15 bp, Homo sapiens
gaatcagctgcttat

SEQ ID NO: 6893 - DNA, 15 bp, Homo sapiens
agaatcagctgctta

SEQ ID NO: 6894 - DNA, 15 bp, Homo sapiens
aagaatcagctgctt

SEQ ID NO: 6895 - DNA, 15 bp, Homo sapiens
taagaatcagctgct

SEQ ID NO: 6896 - DNA, 15 bp, Homo sapiens
ataagaatcagctgc

SEQ ID NO: 6897 - DNA, 15 bp, Homo sapiens
tataagaatcagctg

SEQ ID NO: 6898 - DNA, 15 bp, Homo sapiens
ttataagaatcagct

SEQ ID NO: 6899 - DNA, 15 bp, Homo sapiens
tttataagaatcagc

SEQ ID NO: 6900 - DNA, 15 bp, Homo sapiens
ttttataagaatcag

SEQ ID NO: 6901 - DNA, 15 bp, Homo sapiens
attttataagaatca

SEQ ID NO: 6902 - DNA, 15 bp, Homo sapiens
gattttataagaatc

SEQ ID NO: 6903 - DNA, 15 bp, Homo sapiens
agattttataagaat

SEQ ID NO: 6904 - DNA, 15 bp, Homo sapiens
aagattttataagaa

SEQ ID NO: 6905 - DNA, 15 bp, Homo sapiens
taagattttataaga

SEQ ID NO: 6906 - DNA, 15 bp, Homo sapiens
ttaagattttataag

SEQ ID NO: 6907 - DNA, 15 bp, Homo sapiens
cttaagattttataa

SEQ ID NO: 6908 - DNA, 15 bp, Homo sapiens
acttaagattttata

SEQ ID NO: 6909 - DNA, 15 bp, Homo sapiens
tacttaagattttat

SEQ ID NO: 6910 - DNA, 15 bp, Homo sapiens
ttacttaagatttta

SEQ ID NO: 6911 - DNA, 15 bp, Homo sapiens
tttacttaagatttt

SEQ ID NO: 6912 - DNA, 15 bp, Homo sapiens
atttacttaagattt

SEQ ID NO: 6913 - DNA, 15 bp, Homo sapiens
catttacttaagatt

SEQ ID NO: 6914 - DNA, 15 bp, Homo sapiens
tcatttacttaagat

SEQ ID NO: 6915 - DNA, 15 bp, Homo sapiens
ttcatttacttaaga

SEQ ID NO: 6916 - DNA, 15 bp, Homo sapiens
tttcatttacttaag

SEQ ID NO: 6917 - DNA, 15 bp, Homo sapiens
atttcatttacttaa

SEQ ID NO: 6918 - DNA, 15 bp, Homo sapiens
tatttcatttactta

SEQ ID NO: 6919 - DNA, 15 bp, Homo sapiens
atatttcatttactt

SEQ ID NO: 6920 - DNA, 15 bp, Homo sapiens
aatatttcatttact

SEQ ID NO: 6921 - DNA, 15 bp, Homo sapiens
caatatttcatttac

SEQ ID NO: 6922 - DNA, 15 bp, Homo sapiens
acaatatttcattta

SEQ ID NO: 6923 - DNA, 15 bp, Homo sapiens
cacaatatttcattt

SEQ ID NO: 6924 - DNA, 15 bp, Homo sapiens
tcacaatatttcatt

SEQ ID NO: 6925 - DNA, 15 bp, Homo sapiens
ttcacaatatttcat

SEQ ID NO: 6926 - DNA, 15 bp, Homo sapiens
cttcacaatatttca

SEQ ID NO: 6927 - DNA, 15 bp, Homo sapiens
gcttcacaatatttc

SEQ ID NO: 6928 - DNA, 15 bp, Homo sapiens
tgcttcacaatattt

SEQ ID NO: 6929 - DNA, 15 bp, Homo sapiens
ttgcttcacaatatt

SEQ ID NO: 6930 - DNA, 15 bp, Homo sapiens
tttgcttcacaatat

SEQ ID NO: 6931 - DNA, 15 bp, Homo sapiens
atttgcttcacaata

SEQ ID NO: 6932 - DNA, 15 bp, Homo sapiens
tatttgcttcacaat

SEQ ID NO: 6933 - DNA, 15 bp, Homo sapiens
ttatttgcttcacaa

SEQ ID NO: 6934 - DNA, 15 bp, Homo sapiens
attatttgcttcaca

SEQ ID NO: 6935 - DNA, 15 bp, Homo sapiens
tattatttgcttcac

SEQ ID NO: 6936 - DNA, 15 bp, Homo sapiens
atattatttgcttca

SEQ ID NO: 6937 - DNA, 15 bp, Homo sapiens
aatattatttgcttc

SEQ ID NO: 6938 - DNA, 15 bp, Homo sapiens
gaatattatttgctt

SEQ ID NO: 6939 - DNA, 15 bp, Homo sapiens
agaatattatttgct

SEQ ID NO: 6940 - DNA, 15 bp, Homo sapiens
aagaatattatttgc

SEQ ID NO: 6941 - DNA, 15 bp, Homo sapiens
taagaatattatttg

SEQ ID NO: 6942 - DNA, 15 bp, Homo sapiens
ttaagaatattattt

SEQ ID NO: 6943 - DNA, 15 bp, Homo sapiens
attaagaatattatt

SEQ ID NO: 6944 - DNA, 15 bp, Homo sapiens
cattaagaatattat

SEQ ID NO: 6945 - DNA, 15 bp, Homo sapiens
gcattaagaatatta

SEQ ID NO: 6946 - DNA, 15 bp, Homo sapiens
tgcattaagaatatt

SEQ ID NO: 6947 - DNA, 15 bp, Homo sapiens
atgcattaagaatat

SEQ ID NO: 6948 - DNA, 15 bp, Homo sapiens
aatgcattaagaata

SEQ ID NO: 6949 - DNA, 15 bp, Homo sapiens
taatgcattaagaat

SEQ ID NO: 6950 - DNA, 15 bp, Homo sapiens
gtaatgcattaagaa

SEQ ID NO: 6951 - DNA, 15 bp, Homo sapiens
tgtaatgcattaaga

SEQ ID NO: 6952 - DNA, 15 bp, Homo sapiens
ctgtaatgcattaag

SEQ ID NO: 6953 - DNA, 15 bp, Homo sapiens
tctgtaatgcattaa

SEQ ID NO: 6954 - DNA, 15 bp, Homo sapiens
atctgtaatgcatta

SEQ ID NO: 6955 - DNA, 15 bp, Homo sapiens
aatctgtaatgcatt

SEQ ID NO: 6956 - DNA, 15 bp, Homo sapiens
aaatctgtaatgcat

SEQ ID NO: 6957 - DNA, 15 bp, Homo sapiens
aaaatctgtaatgca

SEQ ID NO: 6958 - DNA, 15 bp, Homo sapiens
aaaaatctgtaatgc

SEQ ID NO: 6959 - DNA, 15 bp, Homo sapiens
caaaaatctgtaatg

SEQ ID NO: 6960 - DNA, 15 bp, Homo sapiens
tcaaaaatctgtaat

SEQ ID NO: 6961 - DNA, 15 bp, Homo sapiens
ctcaaaaatctgtaa

SEQ ID NO: 6962 - DNA, 15 bp, Homo sapiens
gctcaaaaatctgta

SEQ ID NO: 6963 - DNA, 15 bp, Homo sapiens
ggctcaaaaatctgt

SEQ ID NO: 6964 - DNA, 15 bp, Homo sapiens
tggctcaaaaatctg

SEQ ID NO: 6965 - DNA, 15 bp, Homo sapiens
gtggctcaaaaatct

SEQ ID NO: 6966 - DNA, 15 bp, Homo sapiens
agtggctcaaaaatc

SEQ ID NO: 6967 - DNA, 15 bp, Homo sapiens
aagtggctcaaaaat

SEQ ID NO: 6968 - DNA, 15 bp, Homo sapiens
gaagtggctcaaaaa

SEQ ID NO: 6969 - DNA, 15 bp, Homo sapiens
agaagtggctcaaaa

SEQ ID NO: 6970 - DNA, 15 bp, Homo sapiens
cagaagtggctcaaa

SEQ ID NO: 6971 - DNA, 15 bp, Homo sapiens
tcagaagtggctcaa

SEQ ID NO: 6972 - DNA, 15 bp, Homo sapiens
ttcagaagtggctca

SEQ ID NO: 6973 - DNA, 15 bp, Homo sapiens
tttcagaagtggctc

SEQ ID NO: 6974 - DNA, 15 bp, Homo sapiens
atttcagaagtggct

SEQ ID NO: 6975 - DNA, 15 bp, Homo sapiens
aatttcagaagtggc

SEQ ID NO: 6976 - DNA, 15 bp, Homo sapiens
aaatttcagaagtgg

SEQ ID NO: 6977 - DNA, 15 bp, Homo sapiens
aaaatttcagaagtg

SEQ ID NO: 6978 - DNA, 15 bp, Homo sapiens
gaaaatttcagaagt

SEQ ID NO: 6979 - DNA, 15 bp, Homo sapiens
cgaaaatttcagaag

SEQ ID NO: 6980 - DNA, 15 bp, Homo sapiens
gcgaaaatttcagaa

SEQ ID NO: 6981 - DNA, 15 bp, Homo sapiens
cgcgaaaatttcaga

SEQ ID NO: 6982 - DNA, 15 bp, Homo sapiens
tcgcgaaaatttcag

SEQ ID NO: 6983 - DNA, 15 bp, Homo sapiens
ttcgcgaaaatttca

SEQ ID NO: 6984 - DNA, 15 bp, Homo sapiens
gttcgcgaaaatttc

SEQ ID NO: 6985 - DNA, 15 bp, Homo sapiens
ggttcgcgaaaattt

SEQ ID NO: 6986 - DNA, 15 bp, Homo sapiens
tggttcgcgaaaatt

SEQ ID NO: 6987 - DNA, 15 bp, Homo sapiens
ttggttcgcgaaaat

SEQ ID NO: 6988 - DNA, 15 bp, Homo sapiens
cttggttcgcgaaaa

SEQ ID NO: 6989 - DNA, 15 bp, Homo sapiens
tcttggttcgcgaaa

SEQ ID NO: 6990 - DNA, 15 bp, Homo sapiens
ttcttggttcgcgaa

SEQ ID NO: 6991 - DNA, 15 bp, Homo sapiens
cttcttggttcgcga

SEQ ID NO: 6992 - DNA, 15 bp, Homo sapiens
tcttcttggttcgcg

SEQ ID NO: 6993 - DNA, 15 bp, Homo sapiens
ttcttcttggttcgc

SEQ ID NO: 6994 - DNA, 15 bp, Homo sapiens
attcttcttggttcg

SEQ ID NO: 6995 - DNA, 15 bp, Homo sapiens
aattcttcttggttc

SEQ ID NO: 6996 - DNA, 15 bp, Homo sapiens
aaattcttcttggtt

SEQ ID NO: 6997 - DNA, 15 bp, Homo sapiens
aaaattcttcttggt

SEQ ID NO: 6998 - DNA, 15 bp, Homo sapiens
taaaattcttcttgg

SEQ ID NO: 6999 - DNA, 15 bp, Homo sapiens
ctaaaattcttcttg

SEQ ID NO: 7000 - DNA, 15 bp, Homo sapiens
actaaaattcttctt

SEQ ID NO: 7001 - DNA, 15 bp, Homo sapiens
tactaaaattcttct

SEQ ID NO: 7002 - DNA, 15 bp, Homo sapiens
gtactaaaattcttc

SEQ ID NO: 7003 - DNA, 15 bp, Homo sapiens
agtactaaaattctt

SEQ ID NO: 7004 - DNA, 15 bp, Homo sapiens
aagtactaaaattct

SEQ ID NO: 7005 - DNA, 15 bp, Homo sapiens
caagtactaaaattc

SEQ ID NO: 7006 - DNA, 15 bp, Homo sapiens
ccaagtactaaaatt

SEQ ID NO: 7007 - DNA, 15 bp, Homo sapiens
tccaagtactaaaat

SEQ ID NO: 7008 - DNA, 15 bp, Homo sapiens
atccaagtactaaaa

SEQ ID NO: 7009 - DNA, 15 bp, Homo sapiens
aatccaagtactaaa

SEQ ID NO: 7010 - DNA, 15 bp, Homo sapiens
aaatccaagtactaa

SEQ ID NO: 7011 - DNA, 15 bp, Homo sapiens
caaatccaagtacta

SEQ ID NO: 7012 - DNA, 15 bp, Homo sapiens
tcaaatccaagtact

SEQ ID NO: 7013 - DNA, 15 bp, Homo sapiens
gtcaaatccaagtac

SEQ ID NO: 7014 - DNA, 15 bp, Homo sapiens
agtcaaatccaagta

SEQ ID NO: 7015 - DNA, 15 bp, Homo sapiens
tagtcaaatccaagt

SEQ ID NO: 7016 - DNA, 15 bp, Homo sapiens
ttagtcaaatccaag

SEQ ID NO: 7017 - DNA, 15 bp, Homo sapiens
gttagtcaaatccaa

SEQ ID NO: 7018 - DNA, 15 bp, Homo sapiens
tgttagtcaaatcca

SEQ ID NO: 7019 - DNA, 15 bp, Homo sapiens
atgttagtcaaatcc

SEQ ID NO: 7020 - DNA, 15 bp, Homo sapiens
aatgttagtcaaatc

SEQ ID NO: 7021 - DNA, 15 bp, Homo sapiens
aaatgttagtcaaat

SEQ ID NO: 7022 - DNA, 15 bp, Homo sapiens
taaatgttagtcaaa

SEQ ID NO: 7023 - DNA, 15 bp, Homo sapiens
ataaatgttagtcaa

SEQ ID NO: 7024 - DNA, 15 bp, Homo sapiens
gataaatgttagtca

SEQ ID NO: 7025 - DNA, 15 bp, Homo sapiens
ggataaatgttagtc

SEQ ID NO: 7026 - DNA, 15 bp, Homo sapiens
tggataaatgttagt

SEQ ID NO: 7027 - DNA, 15 bp, Homo sapiens
ttggataaatgttag

SEQ ID NO: 7028 - DNA, 15 bp, Homo sapiens
cttggataaatgtta

SEQ ID NO: 7029 - DNA, 15 bp, Homo sapiens
gcttggataaatgtt

SEQ ID NO: 7030 - DNA, 15 bp, Homo sapiens
ggcttggataaatgt

SEQ ID NO: 7031 - DNA, 15 bp, Homo sapiens
gggcttggataaatg

SEQ ID NO: 7032 - DNA, 15 bp, Homo sapiens
agggcttggataaat

SEQ ID NO: 7033 - DNA, 15 bp, Homo sapiens
aagggcttggataaa

SEQ ID NO: 7034 - DNA, 15 bp, Homo sapiens
taagggcttggataa

SEQ ID NO: 7035 - DNA, 15 bp, Homo sapiens
ctaagggcttggata

SEQ ID NO: 7036 - DNA, 15 bp, Homo sapiens
actaagggcttggat

SEQ ID NO: 7037 - DNA, 15 bp, Homo sapiens
gactaagggcttgga

SEQ ID NO: 7038 - DNA, 15 bp, Homo sapiens
agactaagggcttgg

SEQ ID NO: 7039 - DNA, 15 bp, Homo sapiens
cagactaagggcttg

SEQ ID NO: 7040 - DNA, 15 bp, Homo sapiens
acagactaagggctt

SEQ ID NO: 7041 - DNA, 15 bp, Homo sapiens
tacagactaagggct

SEQ ID NO: 7042 - DNA, 15 bp, Homo sapiens
gtacagactaagggc

SEQ ID NO: 7043 - DNA, 15 bp, Homo sapiens
agtacagactaaggg

SEQ ID NO: 7044 - DNA, 15 bp, Homo sapiens
cagtacagactaagg

SEQ ID NO: 7045 - DNA, 15 bp, Homo sapiens
tcagtacagactaag

SEQ ID NO: 7046 - DNA, 15 bp, Homo sapiens
atcagtacagactaa

SEQ ID NO: 7047 - DNA, 15 bp, Homo sapiens
tatcagtacagacta

SEQ ID NO: 7048 - DNA, 15 bp, Homo sapiens
gtatcagtacagact

SEQ ID NO: 7049 - DNA, 15 bp, Homo sapiens
agtatcagtacagac

SEQ ID NO: 7050 - DNA, 15 bp, Homo sapiens
cagtatcagtacaga

SEQ ID NO: 7051 - DNA, 15 bp, Homo sapiens
acagtatcagtacag

SEQ ID NO: 7052 - DNA, 15 bp, Homo sapiens
cacagtatcagtaca

SEQ ID NO: 7053 - DNA, 15 bp, Homo sapiens
ccacagtatcagtac

SEQ ID NO: 7054 - DNA, 15 bp, Homo sapiens
accacagtatcagta

SEQ ID NO: 7055 - DNA, 15 bp, Homo sapiens
taccacagtatcagt

SEQ ID NO: 7056 - DNA, 15 bp, Homo sapiens
ctaccacagtatcag

SEQ ID NO: 7057 - DNA, 15 bp, Homo sapiens
cctaccacagtatca

SEQ ID NO: 7058 - DNA, 15 bp, Homo sapiens
acctaccacagtatc

SEQ ID NO: 7059 - DNA, 15 bp, Homo sapiens
cacctaccacagtat

SEQ ID NO: 7060 - DNA, 15 bp, Homo sapiens
acacctaccacagta

SEQ ID NO: 7061 - DNA, 15 bp, Homo sapiens
cacacctaccacagt

SEQ ID NO: 7062 - DNA, 15 bp, Homo sapiens
acacacctaccacag

SEQ ID NO: 7063 - DNA, 15 bp, Homo sapiens
aacacacctaccaca

SEQ ID NO: 7064 - DNA, 15 bp, Homo sapiens
aaacacacctaccac

SEQ ID NO: 7065 - DNA, 15 bp, Homo sapiens
taaacacacctacca

SEQ ID NO: 7066 - DNA, 15 bp, Homo sapiens
gtaaacacacctacc

SEQ ID NO: 7067 - DNA, 15 bp, Homo sapiens
tgtaaacacacctac

SEQ ID NO: 7068 - DNA, 15 bp, Homo sapiens
atgtaaacacaccta

SEQ ID NO: 7069 - DNA, 15 bp, Homo sapiens
gatgtaaacacacct

SEQ ID NO: 7070 - DNA, 15 bp, Homo sapiens
ggatgtaaacacacc

SEQ ID NO: 7071 - DNA, 15 bp, Homo sapiens
tggatgtaaacacac

SEQ ID NO: 7072 - DNA, 15 bp, Homo sapiens
ctggatgtaaacaca

SEQ ID NO: 7073 - DNA, 15 bp, Homo sapiens
gctggatgtaaacac

SEQ ID NO: 7074 - DNA, 15 bp, Homo sapiens
tgctggatgtaaaca

SEQ ID NO: 7075 - DNA, 15 bp, Homo sapiens
atgctggatgtaaac

SEQ ID NO: 7076 - DNA, 15 bp, Homo sapiens
aatgctggatgtaaa

SEQ ID NO: 7077 - DNA, 15 bp, Homo sapiens
aaatgctggatgtaa

SEQ ID NO: 7078 - DNA, 15 bp, Homo sapiens
gaaatgctggatgta

SEQ ID NO: 7079 - DNA, 15 bp, Homo sapiens
tgaaatgctggatgt

SEQ ID NO: 7080 - DNA, 15 bp, Homo sapiens
ttgaaatgctggatg

SEQ ID NO: 7081 - DNA, 15 bp, Homo sapiens
gttgaaatgctggat

SEQ ID NO: 7082 - DNA, 15 bp, Homo sapiens
tgttgaaatgctgga

SEQ ID NO: 7083 - DNA, 15 bp, Homo sapiens
gtgttgaaatgctgg

SEQ ID NO: 7084 - DNA, 15 bp, Homo sapiens
agtgttgaaatgctg

SEQ ID NO: 7085 - DNA, 15 bp, Homo sapiens
aagtgttgaaatgct

SEQ ID NO: 7086 - DNA, 15 bp, Homo sapiens
gaagtgttgaaatgc

SEQ ID NO: 7087 - DNA, 15 bp, Homo sapiens
tgaagtgttgaaatg

SEQ ID NO: 7088 - DNA, 15 bp, Homo sapiens
atgaagtgttgaaat

SEQ ID NO: 7089 - DNA, 15 bp, Homo sapiens
catgaagtgttgaaa

SEQ ID NO: 7090 - DNA, 15 bp, Homo sapiens
tcatgaagtgttgaa

SEQ ID NO: 7091 - DNA, 15 bp, Homo sapiens
atcatgaagtgttga

SEQ ID NO: 7092 - DNA, 15 bp, Homo sapiens
catcatgaagtgttg

SEQ ID NO: 7093 - DNA, 15 bp, Homo sapiens
ccatcatgaagtgtt

SEQ ID NO: 7094 - DNA, 15 bp, Homo sapiens
cccatcatgaagtgt

SEQ ID NO: 7095 - DNA, 15 bp, Homo sapiens
tcccatcatgaagtg

SEQ ID NO: 7096 - DNA, 15 bp, Homo sapiens
gtcccatcatgaagt

SEQ ID NO: 7097 - DNA, 15 bp, Homo sapiens
agtcccatcatgaag

SEQ ID NO: 7098 - DNA, 15 bp, Homo sapiens
cagtcccatcatgaa

SEQ ID NO: 7099 - DNA, 15 bp, Homo sapiens
acagtcccatcatga

SEQ ID NO: 7100 - DNA, 15 bp, Homo sapiens
aacagtcccatcatg

SEQ ID NO: 7101 - DNA, 15 bp, Homo sapiens
aaacagtcccatcat

SEQ ID NO: 7102 - DNA, 15 bp, Homo sapiens
aaaacagtcccatca

SEQ ID NO: 7103 - DNA, 15 bp, Homo sapiens
taaaacagtcccatc

SEQ ID NO: 7104 - DNA, 15 bp, Homo sapiens
ttaaaacagtcccat

SEQ ID NO: 7105 - DNA, 15 bp, Homo sapiens
attaaaacagtccca

SEQ ID NO: 7106 - DNA, 15 bp, Homo sapiens
tattaaaacagtccc

SEQ ID NO: 7107 - DNA, 15 bp, Homo sapiens
ttattaaaacagtcc

SEQ ID NO: 7108 - DNA, 15 bp, Homo sapiens
gttattaaaacagtc

SEQ ID NO: 7109 - DNA, 15 bp, Homo sapiens
ggttattaaaacagt

SEQ ID NO: 7110 - DNA, 15 bp, Homo sapiens
aggttattaaaacag

SEQ ID NO: 7111 - DNA, 15 bp, Homo sapiens
caggttattaaaaca

SEQ ID NO: 7112 - DNA, 15 bp, Homo sapiens
acaggttattaaaac

SEQ ID NO: 7113 - DNA, 15 bp, Homo sapiens
aacaggttattaaaa

SEQ ID NO: 7114 - DNA, 15 bp, Homo sapiens
aaacaggttattaaa

SEQ ID NO: 7115 - DNA, 15 bp, Homo sapiens
caaacaggttattaa

SEQ ID NO: 7116 - DNA, 15 bp, Homo sapiens
gcaaacaggttatta

SEQ ID NO: 7117 - DNA, 15 bp, Homo sapiens
ggcaaacaggttatt

SEQ ID NO: 7118 - DNA, 15 bp, Homo sapiens
gggcaaacaggttat

SEQ ID NO: 7119 - DNA, 15 bp, Homo sapiens
ggggcaaacaggtta

SEQ ID NO: 7120 - DNA, 15 bp, Homo sapiens
aggggcaaacaggtt

SEQ ID NO: 7121 - DNA, 15 bp, Homo sapiens
caggggcaaacaggt

SEQ ID NO: 7122 - DNA, 15 bp, Homo sapiens
ccaggggcaaacagg

SEQ ID NO: 7123 - DNA, 15 bp, Homo sapiens
accaggggcaaacag

SEQ ID NO: 7124 - DNA, 15 bp, Homo sapiens
gaccaggggcaaaca

SEQ ID NO: 7125 - DNA, 15 bp, Homo sapiens
ggaccaggggcaaac

SEQ ID NO: 7126 - DNA, 15 bp, Homo sapiens
tggaccaggggcaaa

SEQ ID NO: 7127 - DNA, 15 bp, Homo sapiens
gtggaccaggggcaa

SEQ ID NO: 7128 - DNA, 15 bp, Homo sapiens
ggtggaccaggggca

SEQ ID NO: 7129 - DNA, 15 bp, Homo sapiens
gggtggaccaggggc

SEQ ID NO: 7130 - DNA, 15 bp, Homo sapiens
agggtggaccagggg

SEQ ID NO: 7131 - DNA, 15 bp, Homo sapiens
aagggtggaccaggg

SEQ ID NO: 7132 - DNA, 15 bp, Homo sapiens
aaagggtggaccagg

SEQ ID NO: 7133 - DNA, 15 bp, Homo sapiens
gaaagggtggaccag

SEQ ID NO: 7134 - DNA, 15 bp, Homo sapiens
ggaaagggtggacca

SEQ ID NO: 7135 - DNA, 15 bp, Homo sapiens
tggaaagggtggacc

SEQ ID NO: 7136 - DNA, 15 bp, Homo sapiens
atggaaagggtggac

SEQ ID NO: 7137 - DNA, 15 bp, Homo sapiens
aatggaaagggtgga

SEQ ID NO: 7138 - DNA, 15 bp, Homo sapiens
gaatggaaagggtgg

SEQ ID NO: 7139 - DNA, 15 bp, Homo sapiens
tgaatggaaagggtg

SEQ ID NO: 7140 - DNA, 15 bp, Homo sapiens
gtgaatggaaagggt

SEQ ID NO: 7141 - DNA, 15 bp, Homo sapiens
ggtgaatggaaaggg

SEQ ID NO: 7142 - DNA, 15 bp, Homo sapiens
aggtgaatggaaagg

SEQ ID NO: 7143 - DNA, 15 bp, Homo sapiens
aaggtgaatggaaag

SEQ ID NO: 7144 - DNA, 15 bp, Homo sapiens
aaaggtgaatggaaa

SEQ ID NO: 7145 - DNA, 15 bp, Homo sapiens
taaaggtgaatggaa

SEQ ID NO: 7146 - DNA, 15 bp, Homo sapiens
ctaaaggtgaatgga

SEQ ID NO: 7147 - DNA, 15 bp, Homo sapiens
actaaaggtgaatgg

SEQ ID NO: 7148 - DNA, 15 bp, Homo sapiens
tactaaaggtgaatg

SEQ ID NO: 7149 - DNA, 15 bp, Homo sapiens
atactaaaggtgaat

SEQ ID NO: 7150 - DNA, 15 bp, Homo sapiens
aatactaaaggtgaa

SEQ ID NO: 7151 - DNA, 15 bp, Homo sapiens
aaatactaaaggtga

SEQ ID NO: 7152 - DNA, 15 bp, Homo sapiens
aaaatactaaaggtg

SEQ ID NO: 7153 - DNA, 15 bp, Homo sapiens
gaaaatactaaaggt

SEQ ID NO: 7154 - DNA, 15 bp, Homo sapiens
agaaaatactaaagg

SEQ ID NO: 7155 - DNA, 15 bp, Homo sapiens
aagaaaatactaaag

SEQ ID NO: 7156 - DNA, 15 bp, Homo sapiens
gaagaaaatactaaa

SEQ ID NO: 7157 - DNA, 15 bp, Homo sapiens
agaagaaaatactaa

SEQ ID NO: 7158 - DNA, 15 bp, Homo sapiens
gagaagaaaatacta

SEQ ID NO: 7159 - DNA, 15 bp, Homo sapiens
ggagaagaaaatact

SEQ ID NO: 7160 - DNA, 15 bp, Homo sapiens
tggagaagaaaatac

SEQ ID NO: 7161 - DNA, 15 bp, Homo sapiens
ttggagaagaaaata

SEQ ID NO: 7162 - DNA, 15 bp, Homo sapiens
tttggagaagaaaat

SEQ ID NO: 7163 - DNA, 15 bp, Homo sapiens
atttggagaagaaaa

SEQ ID NO: 7164 - DNA, 15 bp, Homo sapiens
gatttggagaagaaa

SEQ ID NO: 7165 - DNA, 15 bp, Homo sapiens
ggatttggagaagaa

SEQ ID NO: 7166 - DNA, 15 bp, Homo sapiens
tggatttggagaaga

SEQ ID NO: 7167 - DNA, 15 bp, Homo sapiens
atggatttggagaag

SEQ ID NO: 7168 - DNA, 15 bp, Homo sapiens
gatggatttggagaa

SEQ ID NO: 7169 - DNA, 15 bp, Homo sapiens
tgatggatttggaga

SEQ ID NO: 7170 - DNA, 15 bp, Homo sapiens
atgatggatttggag

SEQ ID NO: 7171 - DNA, 15 bp, Homo sapiens
catgatggatttgga

SEQ ID NO: 7172 - DNA, 15 bp, Homo sapiens
ccatgatggatttgg

SEQ ID NO: 7173 - DNA, 15 bp, Homo sapiens
tccatgatggatttg

SEQ ID NO: 7174 - DNA, 15 bp, Homo sapiens
atccatgatggattt

SEQ ID NO: 7175 - DNA, 15 bp, Homo sapiens
catccatgatggatt

SEQ ID NO: 7176 - DNA, 15 bp, Homo sapiens
gcatccatgatggat

SEQ ID NO: 7177 - DNA, 15 bp, Homo sapiens
ggcatccatgatgga

SEQ ID NO: 7178 - DNA, 15 bp, Homo sapiens
tggcatccatgatgg

SEQ ID NO: 7179 - DNA, 15 bp, Homo sapiens
gtggcatccatgatg

SEQ ID NO: 7180 - DNA, 15 bp, Homo sapiens
ggtggcatccatgat

SEQ ID NO: 7181 - DNA, 15 bp, Homo sapiens
tggtggcatccatga

SEQ ID NO: 7182 - DNA, 15 bp, Homo sapiens
gtggtggcatccatg

SEQ ID NO: 7183 - DNA, 15 bp, Homo sapiens
agtggtggcatccat

SEQ ID NO: 7184 - DNA, 15 bp, Homo sapiens
tagtggtggcatcca

SEQ ID NO: 7185 - DNA, 15 bp, Homo sapiens
atagtggtggcatcc

SEQ ID NO: 7186 - DNA, 15 bp, Homo sapiens
catagtggtggcatc

SEQ ID NO: 7187 - DNA, 15 bp, Homo sapiens
gcatagtggtggcat

SEQ ID NO: 7188 - DNA, 15 bp, Homo sapiens
agcatagtggtggca

SEQ ID NO: 7189 - DNA, 15 bp, Homo sapiens
gagcatagtggtggc

SEQ ID NO: 7190 - DNA, 15 bp, Homo sapiens
ggagcatagtggtgg

SEQ ID NO: 7191 - DNA, 15 bp, Homo sapiens
aggagcatagtggtg

SEQ ID NO: 7192 - DNA, 15 bp, Homo sapiens
aaggagcatagtggt

SEQ ID NO: 7193 - DNA, 15 bp, Homo sapiens
aaaggagcatagtgg

SEQ ID NO: 7194 - DNA, 15 bp, Homo sapiens
aaaaggagcatagtg

SEQ ID NO: 7195 - DNA, 15 bp, Homo sapiens
aaaaaggagcatagt

SEQ ID NO: 7196 - DNA, 15 bp, Homo sapiens
gaaaaaggagcatag

SEQ ID NO: 7197 - DNA, 15 bp, Homo sapiens
agaaaaaggagcata

SEQ ID NO: 7198 - DNA, 15 bp, Homo sapiens
gagaaaaaggagcat

SEQ ID NO: 7199 - DNA, 15 bp, Homo sapiens
ggagaaaaaggagca

SEQ ID NO: 7200 - DNA, 15 bp, Homo sapiens
gggagaaaaaggagc

SEQ ID NO: 7201 - DNA, 15 bp, Homo sapiens
ggggagaaaaaggag

SEQ ID NO: 7202 - DNA, 15 bp, Homo sapiens
aggggagaaaaagga

SEQ ID NO: 7203 - DNA, 15 bp, Homo sapiens
aaggggagaaaaagg

SEQ ID NO: 7204 - DNA, 15 bp, Homo sapiens
caaggggagaaaaag

SEQ ID NO: 7205 - DNA, 15 bp, Homo sapiens
tcaaggggagaaaaa

SEQ ID NO: 7206 - DNA, 15 bp, Homo sapiens
ttcaaggggagaaaa

SEQ ID NO: 7207 - DNA, 15 bp, Homo sapiens
attcaaggggagaaa

SEQ ID NO: 7208 - DNA, 15 bp, Homo sapiens
aattcaaggggagaa

SEQ ID NO: 7209 - DNA, 15 bp, Homo sapiens
gaattcaaggggaga

SEQ ID NO: 7210 - DNA, 15 bp, Homo sapiens
agaattcaaggggag

SEQ ID NO: 7211 - DNA, 15 bp, Homo sapiens
cagaattcaagggga

SEQ ID NO: 7212 - DNA, 15 bp, Homo sapiens
tcagaattcaagggg

SEQ ID NO: 7213 - DNA, 15 bp, Homo sapiens
atcagaattcaaggg

SEQ ID NO: 7214 - DNA, 15 bp, Homo sapiens
aatcagaattcaagg

SEQ ID NO: 7215 - DNA, 15 bp, Homo sapiens
aaatcagaattcaag

SEQ ID NO: 7216 - DNA, 15 bp, Homo sapiens
gaaatcagaattcaa

SEQ ID NO: 7217 - DNA, 15 bp, Homo sapiens
tgaaatcagaattca

SEQ ID NO: 7218 - DNA, 15 bp, Homo sapiens
atgaaatcagaattc

SEQ ID NO: 7219 - DNA, 15 bp, Homo sapiens
gatgaaatcagaatt

SEQ ID NO: 7220 - DNA, 15 bp, Homo sapiens
tgatgaaatcagaat

SEQ ID NO: 7221 - DNA, 15 bp, Homo sapiens
atgatgaaatcagaa

SEQ ID NO: 7222 - DNA, 15 bp, Homo sapiens
gatgatgaaatcaga

SEQ ID NO: 7223 - DNA, 15 bp, Homo sapiens
tgatgatgaaatcag

SEQ ID NO: 7224 - DNA, 15 bp, Homo sapiens
gtgatgatgaaatca

SEQ ID NO: 7225 - DNA, 15 bp, Homo sapiens
tgtgatgatgaaatc

SEQ ID NO: 7226 - DNA, 15 bp, Homo sapiens
ttgtgatgatgaaat

SEQ ID NO: 7227 - DNA, 15 bp, Homo sapiens
cttgtgatgatgaaa

SEQ ID NO: 7228 - DNA, 15 bp, Homo sapiens
acttgtgatgatgaa

SEQ ID NO: 7229 - DNA, 15 bp, Homo sapiens
aacttgtgatgatga

SEQ ID NO: 7230 - DNA, 15 bp, Homo sapiens
gaacttgtgatgatg

SEQ ID NO: 7231 - DNA, 15 bp, Homo sapiens
agaacttgtgatgat

SEQ ID NO: 7232 - DNA, 15 bp, Homo sapiens
cagaacttgtgatga

SEQ ID NO: 7233 - DNA, 15 bp, Homo sapiens
acagaacttgtgatg

SEQ ID NO: 7234 - DNA, 15 bp, Homo sapiens
aacagaacttgtgat

SEQ ID NO: 7235 - DNA, 15 bp, Homo sapiens
gaacagaacttgtga

SEQ ID NO: 7236 - DNA, 15 bp, Homo sapiens
tgaacagaacttgtg

SEQ ID NO: 7237 - DNA, 15 bp, Homo sapiens
ctgaacagaacttgt

SEQ ID NO: 7238 - DNA, 15 bp, Homo sapiens
tctgaacagaacttg

SEQ ID NO: 7239 - DNA, 15 bp, Homo sapiens
ttctgaacagaactt

SEQ ID NO: 7240 - DNA, 15 bp, Homo sapiens
tttctgaacagaact

SEQ ID NO: 7241 - DNA, 15 bp, Homo sapiens
gtttctgaacagaac

SEQ ID NO: 7242 - DNA, 15 bp, Homo sapiens
agtttctgaacagaa

SEQ ID NO: 7243 - DNA, 15 bp, Homo sapiens
aagtttctgaacaga

SEQ ID NO: 7244 - DNA, 15 bp, Homo sapiens
aaagtttctgaacag

SEQ ID NO: 7245 - DNA, 15 bp, Homo sapiens
gaaagtttctgaaca

SEQ ID NO: 7246 - DNA, 15 bp, Homo sapiens
tgaaagtttctgaac

SEQ ID NO: 7247 - DNA, 15 bp, Homo sapiens
ttgaaagtttctgaa

SEQ ID NO: 7248 - DNA, 15 bp, Homo sapiens
attgaaagtttctga

SEQ ID NO: 7249 - DNA, 15 bp, Homo sapiens
cattgaaagtttctg

SEQ ID NO: 7250 - DNA, 15 bp, Homo sapiens
ccattgaaagtttct

SEQ ID NO: 7251 - DNA, 15 bp, Homo sapiens
accattgaaagtttc

SEQ ID NO: 7252 - DNA, 15 bp, Homo sapiens
aaccattgaaagttt

SEQ ID NO: 7253 - DNA, 15 bp, Homo sapiens
aaaccattgaaagtt

SEQ ID NO: 7254 - DNA, 15 bp, Homo sapiens
gaaaccattgaaagt

SEQ ID NO: 7255 - DNA, 15 bp, Homo sapiens
agaaaccattgaaag

SEQ ID NO: 7256 - DNA, 15 bp, Homo sapiens
gagaaaccattgaaa

SEQ ID NO: 7257 - DNA, 15 bp, Homo sapiens
agagaaaccattgaa

SEQ ID NO: 7258 - DNA, 15 bp, Homo sapiens
gagagaaaccattga

SEQ ID NO: 7259 - DNA, 15 bp, Homo sapiens
ggagagaaaccattg

SEQ ID NO: 7260 - DNA, 15 bp, Homo sapiens
aggagagaaaccatt

SEQ ID NO: 7261 - DNA, 15 bp, Homo sapiens
caggagagaaaccat

SEQ ID NO: 7262 - DNA, 15 bp, Homo sapiens
acaggagagaaacca

SEQ ID NO: 7263 - DNA, 15 bp, Homo sapiens
aacaggagagaaacc

SEQ ID NO: 7264 - DNA, 15 bp, Homo sapiens
aaacaggagagaaac

SEQ ID NO: 7265 - DNA, 15 bp, Homo sapiens
gaaacaggagagaaa

SEQ ID NO: 7266 - DNA, 15 bp, Homo sapiens
ggaaacaggagagaa

SEQ ID NO: 7267 - DNA, 15 bp, Homo sapiens
aggaaacaggagaga

SEQ ID NO: 7268 - DNA, 15 bp, Homo sapiens
taggaaacaggagag

SEQ ID NO: 7269 - DNA, 15 bp, Homo sapiens
ataggaaacaggaga

SEQ ID NO: 7270 - DNA, 15 bp, Homo sapiens
aataggaaacaggag

SEQ ID NO: 7271 - DNA, 15 bp, Homo sapiens
aaataggaaacagga

SEQ ID NO: 7272 - DNA, 15 bp, Homo sapiens
gaaataggaaacagg

SEQ ID NO: 7273 - DNA, 15 bp, Homo sapiens
agaaataggaaacag

SEQ ID NO: 7274 - DNA, 15 bp, Homo sapiens
tagaaataggaaaca

SEQ ID NO: 7275 - DNA, 15 bp, Homo sapiens
ttagaaataggaaac

SEQ ID NO: 7276 - DNA, 15 bp, Homo sapiens
tttagaaataggaaa

SEQ ID NO: 7277 - DNA, 15 bp, Homo sapiens
ctttagaaataggaa

SEQ ID NO: 7278 - DNA, 15 bp, Homo sapiens
gctttagaaatagga

SEQ ID NO: 7279 - DNA, 15 bp, Homo sapiens
ggctttagaaatagg

SEQ ID NO: 7280 - DNA, 15 bp, Homo sapiens
aggctttagaaatag

SEQ ID NO: 7281 - DNA, 15 bp, Homo sapiens
aaggctttagaaata

SEQ ID NO: 7282 - DNA, 15 bp, Homo sapiens
caaggctttagaaat

SEQ ID NO: 7283 - DNA, 15 bp, Homo sapiens
gcaaggctttagaaa

SEQ ID NO: 7284 - DNA, 15 bp, Homo sapiens
tgcaaggctttagaa

SEQ ID NO: 7285 - DNA, 15 bp, Homo sapiens
atgcaaggctttaga

SEQ ID NO: 7286 - DNA, 15 bp, Homo sapiens
tatgcaaggctttag

SEQ ID NO: 7287 - DNA, 15 bp, Homo sapiens
gtatgcaaggcttta

SEQ ID NO: 7288 - DNA, 15 bp, Homo sapiens
agtatgcaaggcttt

SEQ ID NO: 7289 - DNA, 15 bp, Homo sapiens
gagtatgcaaggctt

SEQ ID NO: 7290 - DNA, 15 bp, Homo sapiens
agagtatgcaaggct

SEQ ID NO: 7291 - DNA, 15 bp, Homo sapiens
cagagtatgcaaggc

SEQ ID NO: 7292 - DNA, 15 bp, Homo sapiens
tcagagtatgcaagg

SEQ ID NO: 7293 - DNA, 15 bp, Homo sapiens
gtcagagtatgcaag

SEQ ID NO: 7294 - DNA, 15 bp, Homo sapiens
ggtcagagtatgcaa

SEQ ID NO: 7295 - DNA, 15 bp, Homo sapiens
gggtcagagtatgca

SEQ ID NO: 7296 - DNA, 15 bp, Homo sapiens
agggtcagagtatgc

SEQ ID NO: 7297 - DNA, 15 bp, Homo sapiens
tagggtcagagtatg

SEQ ID NO: 7298 - DNA, 15 bp, Homo sapiens
ttagggtcagagtat

SEQ ID NO: 7299 - DNA, 15 bp, Homo sapiens
gttagggtcagagta

SEQ ID NO: 7300 - DNA, 15 bp, Homo sapiens
agttagggtcagagt

SEQ ID NO: 7301 - DNA, 15 bp, Homo sapiens
gagttagggtcagag

SEQ ID NO: 7302 - DNA, 15 bp, Homo sapiens
tgagttagggtcaga

SEQ ID NO: 7303 - DNA, 15 bp, Homo sapiens
atgagttagggtcag

SEQ ID NO: 7304 - DNA, 15 bp, Homo sapiens
gatgagttagggtca

SEQ ID NO: 7305 - DNA, 15 bp, Homo sapiens
ggatgagttagggtc

SEQ ID NO: 7306 - DNA, 15 bp, Homo sapiens
tggatgagttagggt

SEQ ID NO: 7307 - DNA, 15 bp, Homo sapiens
ttggatgagttaggg

SEQ ID NO: 7308 - DNA, 15 bp, Homo sapiens
gttggatgagttagg

SEQ ID NO: 7309 - DNA, 15 bp, Homo sapiens
agttggatgagttag

SEQ ID NO: 7310 - DNA, 15 bp, Homo sapiens
tagttggatgagtta

SEQ ID NO: 7311 - DNA, 15 bp, Homo sapiens
ttagttggatgagtt

SEQ ID NO: 7312 - DNA, 15 bp, Homo sapiens
gttagttggatgagt

SEQ ID NO: 7313 - DNA, 15 bp, Homo sapiens
agttagttggatgag

SEQ ID NO: 7314 - DNA, 15 bp, Homo sapiens
aagttagttggatga

SEQ ID NO: 7315 - DNA, 15 bp, Homo sapiens
gaagttagttggatg

SEQ ID NO: 7316 - DNA, 15 bp, Homo sapiens
tgaagttagttggat

SEQ ID NO: 7317 - DNA, 15 bp, Homo sapiens
atgaagttagttgga

SEQ ID NO: 7318 - DNA, 15 bp, Homo sapiens
aatgaagttagttgg

SEQ ID NO: 7319 - DNA, 15 bp, Homo sapiens
aaatgaagttagttg

SEQ ID NO: 7320 - DNA, 15 bp, Homo sapiens
gaaatgaagttagtt

SEQ ID NO: 7321 - DNA, 15 bp, Homo sapiens
agaaatgaagttagt

SEQ ID NO: 7322 - DNA, 15 bp, Homo sapiens
gagaaatgaagttag

SEQ ID NO: 7323 - DNA, 15 bp, Homo sapiens
tgagaaatgaagtta

SEQ ID NO: 7324 - DNA, 15 bp, Homo sapiens
atgagaaatgaagtt

SEQ ID NO: 7325 - DNA, 15 bp, Homo sapiens
aatgagaaatgaagt

SEQ ID NO: 7326 - DNA, 15 bp, Homo sapiens
taatgagaaatgaag

SEQ ID NO: 7327 - DNA, 15 bp, Homo sapiens
gtaatgagaaatgaa

SEQ ID NO: 7328 - DNA, 15 bp, Homo sapiens
ggtaatgagaaatga

SEQ ID NO: 7329 - DNA, 15 bp, Homo sapiens
tggtaatgagaaatg

SEQ ID NO: 7330 - DNA, 15 bp, Homo sapiens
gtggtaatgagaaat

SEQ ID NO: 7331 - DNA, 15 bp, Homo sapiens
agtggtaatgagaaa

SEQ ID NO: 7332 - DNA, 15 bp, Homo sapiens
tagtggtaatgagaa

SEQ ID NO: 7333 - DNA, 15 bp, Homo sapiens
ttagtggtaatgaga

SEQ ID NO: 7334 - DNA, 15 bp, Homo sapiens
cttagtggtaatgag

SEQ ID NO: 7335 - DNA, 15 bp, Homo sapiens
acttagtggtaatga

SEQ ID NO: 7336 - DNA, 15 bp, Homo sapiens
cacttagtggtaatg

SEQ ID NO: 7337 - DNA, 15 bp, Homo sapiens
gcacttagtggtaat

SEQ ID NO: 7338 - DNA, 15 bp, Homo sapiens
tgcacttagtggtaa

SEQ ID NO: 7339 - DNA, 15 bp, Homo sapiens
ttgcacttagtggta

SEQ ID NO: 7340 - DNA, 15 bp, Homo sapiens
gttgcacttagtggt

SEQ ID NO: 7341 - DNA, 15 bp, Homo sapiens
ggttgcacttagtgg

SEQ ID NO: 7342 - DNA, 15 bp, Homo sapiens
tggttgcacttagtg

SEQ ID NO: 7343 - DNA, 15 bp, Homo sapiens
gtggttgcacttagt

SEQ ID NO: 7344 - DNA, 15 bp, Homo sapiens
ggtggttgcacttag

SEQ ID NO: 7345 - DNA, 15 bp, Homo sapiens
tggtggttgcactta

SEQ ID NO: 7346 - DNA, 15 bp, Homo sapiens
gtggtggttgcactt

SEQ ID NO: 7347 - DNA, 15 bp, Homo sapiens
agtggtggttgcact

SEQ ID NO: 7348 - DNA, 15 bp, Homo sapiens
aagtggtggttgcac

SEQ ID NO: 7349 - DNA, 15 bp, Homo sapiens
gaagtggtggttgca

SEQ ID NO: 7350 - DNA, 15 bp, Homo sapiens
tgaagtggtggttgc

SEQ ID NO: 7351 - DNA, 15 bp, Homo sapiens
ctgaagtggtggttg

SEQ ID NO: 7352 - DNA, 15 bp, Homo sapiens
actgaagtggtggtt

SEQ ID NO: 7353 - DNA, 15 bp, Homo sapiens
gactgaagtggtggt

SEQ ID NO: 7354 - DNA, 15 bp, Homo sapiens
ggactgaagtggtgg

SEQ ID NO: 7355 - DNA, 15 bp, Homo sapiens
tggactgaagtggtg

SEQ ID NO: 7356 - DNA, 15 bp, Homo sapiens
ctggactgaagtggt

SEQ ID NO: 7357 - DNA, 15 bp, Homo sapiens
tctggactgaagtgg

SEQ ID NO: 7358 - DNA, 15 bp, Homo sapiens
atctggactgaagtg

SEQ ID NO: 7359 - DNA, 15 bp, Homo sapiens
tatctggactgaagt

SEQ ID NO: 7360 - DNA, 15 bp, Homo sapiens
ctatctggactgaag

SEQ ID NO: 7361 - DNA, 15 bp, Homo sapiens
actatctggactgaa

SEQ ID NO: 7362 - DNA, 15 bp, Homo sapiens
tactatctggactga

SEQ ID NO: 7363 - DNA, 15 bp, Homo sapiens
atactatctggactg

SEQ ID NO: 7364 - DNA, 15 bp, Homo sapiens
tatactatctggact

SEQ ID NO: 7365 - DNA, 15 bp, Homo sapiens
ctatactatctggac

SEQ ID NO: 7366 - DNA, 15 bp, Homo sapiens
actatactatctgga

SEQ ID NO: 7367 - DNA, 15 bp, Homo sapiens
aactatactatctgg

SEQ ID NO: 7368 - DNA, 15 bp, Homo sapiens
aaactatactatctg

SEQ ID NO: 7369 - DNA, 15 bp, Homo sapiens
gaaactatactatct

SEQ ID NO: 7370 - DNA, 15 bp, Homo sapiens
tgaaactatactatc

SEQ ID NO: 7371 - DNA, 15 bp, Homo sapiens
ttgaaactatactat

SEQ ID NO: 7372 - DNA, 15 bp, Homo sapiens
gttgaaactatacta

SEQ ID NO: 7373 - DNA, 15 bp, Homo sapiens
ggttgaaactatact

SEQ ID NO: 7374 - DNA, 15 bp, Homo sapiens
tggttgaaactatac

SEQ ID NO: 7375 - DNA, 15 bp, Homo sapiens
atggttgaaactata

SEQ ID NO: 7376 - DNA, 15 bp, Homo sapiens
tatggttgaaactat

SEQ ID NO: 7377 - DNA, 15 bp, Homo sapiens
atatggttgaaacta

SEQ ID NO: 7378 - DNA, 15 bp, Homo sapiens
aatatggttgaaact

SEQ ID NO: 7379 - DNA, 15 bp, Homo sapiens
aaatatggttgaaac

SEQ ID NO: 7380 - DNA, 15 bp, Homo sapiens
taaatatggttgaaa

SEQ ID NO: 7381 - DNA, 15 bp, Homo sapiens
ataaatatggttgaa

SEQ ID NO: 7382 - DNA, 15 bp, Homo sapiens
aataaatatggttga

SEQ ID NO: 7383 - DNA, 15 bp, Homo sapiens
gaataaatatggttg

SEQ ID NO: 7384 - DNA, 15 bp, Homo sapiens
ggaataaatatggtt

SEQ ID NO: 7385 - DNA, 15 bp, Homo sapiens
aggaataaatatggt

SEQ ID NO: 7386 - DNA, 15 bp, Homo sapiens
caggaataaatatgg

SEQ ID NO: 7387 - DNA, 15 bp, Homo sapiens
tcaggaataaatatg

SEQ ID NO: 7388 - DNA, 15 bp, Homo sapiens
atcaggaataaatat

SEQ ID NO: 7389 - DNA, 15 bp, Homo sapiens
aatcaggaataaata

SEQ ID NO: 7390 - DNA, 15 bp, Homo sapiens
gaatcaggaataaat

SEQ ID NO: 7391 - DNA, 15 bp, Homo sapiens
ggaatcaggaataaa

SEQ ID NO: 7392 - DNA, 15 bp, Homo sapiens
tggaatcaggaataa

SEQ ID NO: 7393 - DNA, 15 bp, Homo sapiens
ttggaatcaggaata

SEQ ID NO: 7394 - DNA, 15 bp, Homo sapiens
cttggaatcaggaat

SEQ ID NO: 7395 - DNA, 15 bp, Homo sapiens
acttggaatcaggaa

SEQ ID NO: 7396 - DNA, 15 bp, Homo sapiens
gacttggaatcagga

SEQ ID NO: 7397 - DNA, 15 bp, Homo sapiens
agacttggaatcagg

SEQ ID NO: 7398 - DNA, 15 bp, Homo sapiens
aagacttggaatcag

SEQ ID NO: 7399 - DNA, 15 bp, Homo sapiens
aaagacttggaatca

SEQ ID NO: 7400 - DNA, 15 bp, Homo sapiens
aaaagacttggaatc

SEQ ID NO: 7401 - DNA, 15 bp, Homo sapiens
aaaaagacttggaat

SEQ ID NO: 7402 - DNA, 15 bp, Homo sapiens
caaaaagacttggaa

SEQ ID NO: 7403 - DNA, 15 bp, Homo sapiens
acaaaaagacttgga

SEQ ID NO: 7404 - DNA, 15 bp, Homo sapiens
aacaaaaagacttgg

SEQ ID NO: 7405 - DNA, 15 bp, Homo sapiens
aaacaaaaagacttg

SEQ ID NO: 7406 - DNA, 15 bp, Homo sapiens
caaacaaaaagactt

SEQ ID NO: 7407 - DNA, 15 bp, Homo sapiens
acaaacaaaaagact

SEQ ID NO: 7408 - DNA, 15 bp, Homo sapiens
aacaaacaaaaagac

SEQ ID NO: 7409 - DNA, 15 bp, Homo sapiens
aaacaaacaaaaaga

SEQ ID NO: 7410 - DNA, 15 bp, Homo sapiens
aaaacaaacaaaaag

SEQ ID NO: 7411 - DNA, 15 bp, Homo sapiens
taaaacaaacaaaaa

SEQ ID NO: 7412 - DNA, 15 bp, Homo sapiens
ctaaaacaaacaaaa

SEQ ID NO: 7413 - DNA, 15 bp, Homo sapiens
tctaaaacaaacaaa

SEQ ID NO: 7414 - DNA, 15 bp, Homo sapiens
ctctaaaacaaacaa

SEQ ID NO: 7415 - DNA, 15 bp, Homo sapiens
tctctaaaacaaaca

SEQ ID NO: 7416 - DNA, 15 bp, Homo sapiens
gtctctaaaacaaac

SEQ ID NO: 7417 - DNA, 15 bp, Homo sapiens
tgtctctaaaacaaa

SEQ ID NO: 7418 - DNA, 15 bp, Homo sapiens
ctgtctctaaaacaa

SEQ ID NO: 7419 - DNA, 15 bp, Homo sapiens
tctgtctctaaaaca

SEQ ID NO: 7420 - DNA, 15 bp, Homo sapiens
ctctgtctctaaaac

SEQ ID NO: 7421 - DNA, 15 bp, Homo sapiens
actctgtctctaaaa

SEQ ID NO: 7422 - DNA, 15 bp, Homo sapiens
aactctgtctctaaa

SEQ ID NO: 7423 - DNA, 15 bp, Homo sapiens
aaactctgtctctaa

SEQ ID NO: 7424 - DNA, 15 bp, Homo sapiens
gaaactctgtctcta

SEQ ID NO: 7425 - DNA, 15 bp, Homo sapiens
agaaactctgtctct

SEQ ID NO: 7426 - DNA, 15 bp, Homo sapiens
gagaaactctgtctc

SEQ ID NO: 7427 - DNA, 15 bp, Homo sapiens
agagaaactctgtct

SEQ ID NO: 7428 - DNA, 15 bp, Homo sapiens
gagagaaactctgtc

SEQ ID NO: 7429 - DNA, 15 bp, Homo sapiens
agagagaaactctgt

SEQ ID NO: 7430 - DNA, 15 bp, Homo sapiens
cagagagaaactctg

SEQ ID NO: 7431 - DNA, 15 bp, Homo sapiens
acagagagaaactct

SEQ ID NO: 7432 - DNA, 15 bp, Homo sapiens
aacagagagaaactc

SEQ ID NO: 7433 - DNA, 15 bp, Homo sapiens
caacagagagaaact

SEQ ID NO: 7434 - DNA, 15 bp, Homo sapiens
acaacagagagaaac

SEQ ID NO: 7435 - DNA, 15 bp, Homo sapiens
gacaacagagagaaa

SEQ ID NO: 7436 - DNA, 15 bp, Homo sapiens
ggacaacagagagaa

SEQ ID NO: 7437 - DNA, 15 bp, Homo sapiens
tggacaacagagaga

SEQ ID NO: 7438 - DNA, 15 bp, Homo sapiens
ctggacaacagagag

SEQ ID NO: 7439 - DNA, 15 bp, Homo sapiens
tctggacaacagaga

SEQ ID NO: 7440 - DNA, 15 bp, Homo sapiens
gtctggacaacagag

SEQ ID NO: 7441 - DNA, 15 bp, Homo sapiens
agtctggacaacaga

SEQ ID NO: 7442 - DNA, 15 bp, Homo sapiens
cagtctggacaacag

SEQ ID NO: 7443 - DNA, 15 bp, Homo sapiens
ccagtctggacaaca

SEQ ID NO: 7444 - DNA, 15 bp, Homo sapiens
tccagtctggacaac

SEQ ID NO: 7445 - DNA, 15 bp, Homo sapiens
ctccagtctggacaa

SEQ ID NO: 7446 - DNA, 15 bp, Homo sapiens
actccagtctggaca

SEQ ID NO: 7447 - DNA, 15 bp, Homo sapiens
cactccagtctggac

SEQ ID NO: 7448 - DNA, 15 bp, Homo sapiens
gcactccagtctgga

SEQ ID NO: 7449 - DNA, 15 bp, Homo sapiens
tgcactccagtctgg

SEQ ID NO: 7450 - DNA, 15 bp, Homo sapiens
ctgcactccagtctg

SEQ ID NO: 7451 - DNA, 15 bp, Homo sapiens
actgcactccagtct

SEQ ID NO: 7452 - DNA, 15 bp, Homo sapiens
cactgcactccagtc

SEQ ID NO: 7453 - DNA, 15 bp, Homo sapiens
ccactgcactccagt

SEQ ID NO: 7454 - DNA, 15 bp, Homo sapiens
accactgcactccag

SEQ ID NO: 7455 - DNA, 15 bp, Homo sapiens
caccactgcactcca

SEQ ID NO: 7456 - DNA, 15 bp, Homo sapiens
gcaccactgcactcc

SEQ ID NO: 7457 - DNA, 15 bp, Homo sapiens
tgcaccactgcactc

SEQ ID NO: 7458 - DNA, 15 bp, Homo sapiens
ttgcaccactgcact

SEQ ID NO: 7459 - DNA, 15 bp, Homo sapiens
attgcaccactgcac

SEQ ID NO: 7460 - DNA, 15 bp, Homo sapiens
gattgcaccactgca

SEQ ID NO: 7461 - DNA, 15 bp, Homo sapiens
tgattgcaccactgc

SEQ ID NO: 7462 - DNA, 15 bp, Homo sapiens
gtgattgcaccactg

SEQ ID NO: 7463 - DNA, 15 bp, Homo sapiens
tgtgattgcaccact

SEQ ID NO: 7464 - DNA, 15 bp, Homo sapiens
ctgtgattgcaccac

SEQ ID NO: 7465 - DNA, 15 bp, Homo sapiens
gctgtgattgcacca

SEQ ID NO: 7466 - DNA, 15 bp, Homo sapiens
agctgtgattgcacc

SEQ ID NO: 7467 - DNA, 15 bp, Homo sapiens
gagctgtgattgcac

SEQ ID NO: 7468 - DNA, 15 bp, Homo sapiens
tgagctgtgattgca

SEQ ID NO: 7469 - DNA, 15 bp, Homo sapiens
ttgagctgtgattgc

SEQ ID NO: 7470 - DNA, 15 bp, Homo sapiens
cttgagctgtgattg

SEQ ID NO: 7471 - DNA, 15 bp, Homo sapiens
tcttgagctgtgatt

SEQ ID NO: 7472 - DNA, 15 bp, Homo sapiens
ctcttgagctgtgat

SEQ ID NO: 7473 - DNA, 15 bp, Homo sapiens
tctcttgagctgtga

SEQ ID NO: 7474 - DNA, 15 bp, Homo sapiens
ctctcttgagctgtg

SEQ ID NO: 7475 - DNA, 15 bp, Homo sapiens
gctctcttgagctgt

SEQ ID NO: 7476 - DNA, 15 bp, Homo sapiens
ggctctcttgagctg

SEQ ID NO: 7477 - DNA, 15 bp, Homo sapiens
aggctctcttgagct

SEQ ID NO: 7478 - DNA, 15 bp, Homo sapiens
gaggctctcttgagc

SEQ ID NO: 7479 - DNA, 15 bp, Homo sapiens
ggaggctctcttgag

SEQ ID NO: 7480 - DNA, 15 bp, Homo sapiens
aggaggctctcttga

SEQ ID NO: 7481 - DNA, 15 bp, Homo sapiens
caggaggctctcttg

SEQ ID NO: 7482 - DNA, 15 bp, Homo sapiens
acaggaggctctctt

SEQ ID NO: 7483 - DNA, 15 bp, Homo sapiens
gacaggaggctctct

SEQ ID NO: 7484 - DNA, 15 bp, Homo sapiens
agacaggaggctctc

SEQ ID NO: 7485 - DNA, 15 bp, Homo sapiens
gagacaggaggctct

SEQ ID NO: 7486 - DNA, 15 bp, Homo sapiens
tgagacaggaggctc

SEQ ID NO: 7487 - DNA, 15 bp, Homo sapiens
ctgagacaggaggct

SEQ ID NO: 7488 - DNA, 15 bp, Homo sapiens
actgagacaggaggc

SEQ ID NO: 7489 - DNA, 15 bp, Homo sapiens
gactgagacaggagg

SEQ ID NO: 7490 - DNA, 15 bp, Homo sapiens
agactgagacaggag

SEQ ID NO: 7491 - DNA, 15 bp, Homo sapiens
aagactgagacagga

SEQ ID NO: 7492 - DNA, 15 bp, Homo sapiens
caagactgagacagg

SEQ ID NO: 7493 - DNA, 15 bp, Homo sapiens
gcaagactgagacag

SEQ ID NO: 7494 - DNA, 15 bp, Homo sapiens
ggcaagactgagaca

SEQ ID NO: 7495 - DNA, 15 bp, Homo sapiens
tggcaagactgagac

SEQ ID NO: 7496 - DNA, 15 bp, Homo sapiens
ctggcaagactgaga

SEQ ID NO: 7497 - DNA, 15 bp, Homo sapiens
actggcaagactgag

SEQ ID NO: 7498 - DNA, 15 bp, Homo sapiens
tactggcaagactga

SEQ ID NO: 7499 - DNA, 15 bp, Homo sapiens
ctactggcaagactg

SEQ ID NO: 7500 - DNA, 15 bp, Homo sapiens
gctactggcaagact

SEQ ID NO: 7501 - DNA, 15 bp, Homo sapiens
cgctactggcaagac

SEQ ID NO: 7502 - DNA, 15 bp, Homo sapiens
tcgctactggcaaga

SEQ ID NO: 7503 - DNA, 15 bp, Homo sapiens
ctcgctactggcaag

SEQ ID NO: 7504 - DNA, 15 bp, Homo sapiens
cctcgctactggcaa

SEQ ID NO: 7505 - DNA, 15 bp, Homo sapiens
tcctcgctactggca

SEQ ID NO: 7506 - DNA, 15 bp, Homo sapiens
gtcctcgctactggc

SEQ ID NO: 7507 - DNA, 15 bp, Homo sapiens
agtcctcgctactgg

SEQ ID NO: 7508 - DNA, 15 bp, Homo sapiens
tagtcctcgctactg

SEQ ID NO: 7509 - DNA, 15 bp, Homo sapiens
gtagtcctcgctact

SEQ ID NO: 7510 - DNA, 15 bp, Homo sapiens
tgtagtcctcgctac

SEQ ID NO: 7511 - DNA, 15 bp, Homo sapiens
ctgtagtcctcgcta

SEQ ID NO: 7512 - DNA, 15 bp, Homo sapiens
cctgtagtcctcgct

SEQ ID NO: 7513 - DNA, 15 bp, Homo sapiens
gcctgtagtcctcgc

SEQ ID NO: 7514 - DNA, 15 bp, Homo sapiens
tgcctgtagtcctcg

SEQ ID NO: 7515 - DNA, 15 bp, Homo sapiens
ttgcctgtagtcctc

SEQ ID NO: 7516 - DNA, 15 bp, Homo sapiens
cttgcctgtagtcct

SEQ ID NO: 7517 - DNA, 15 bp, Homo sapiens
gcttgcctgtagtcc

SEQ ID NO: 7518 - DNA, 15 bp, Homo sapiens
tgcttgcctgtagtc

SEQ ID NO: 7519 - DNA, 15 bp, Homo sapiens
gtgcttgcctgtagt

SEQ ID NO: 7520 - DNA, 15 bp, Homo sapiens
ggtgcttgcctgtag

SEQ ID NO: 7521 - DNA, 15 bp, Homo sapiens
tggtgcttgcctgta

SEQ ID NO: 7522 - DNA, 15 bp, Homo sapiens
gtggtgcttgcctgt

SEQ ID NO: 7523 - DNA, 15 bp, Homo sapiens
ggtggtgcttgcctg

SEQ ID NO: 7524 - DNA, 15 bp, Homo sapiens
tggtggtgcttgcct

SEQ ID NO: 7525 - DNA, 15 bp, Homo sapiens
atggtggtgcttgcc

SEQ ID NO: 7526 - DNA, 15 bp, Homo sapiens
catggtggtgcttgc

SEQ ID NO: 7527 - DNA, 15 bp, Homo sapiens
gcatggtggtgcttg

SEQ ID NO: 7528 - DNA, 15 bp, Homo sapiens
ggcatggtggtgctt

SEQ ID NO: 7529 - DNA, 15 bp, Homo sapiens
aggcatggtggtgct

SEQ ID NO: 7530 - DNA, 15 bp, Homo sapiens
caggcatggtggtgc

SEQ ID NO: 7531 - DNA, 15 bp, Homo sapiens
ccaggcatggtggtg

SEQ ID NO: 7532 - DNA, 15 bp, Homo sapiens
gccaggcatggtggt

SEQ ID NO: 7533 - DNA, 15 bp, Homo sapiens
tgccaggcatggtgg

SEQ ID NO: 7534 - DNA, 15 bp, Homo sapiens
ttgccaggcatggtg

SEQ ID NO: 7535 - DNA, 15 bp, Homo sapiens
tttgccaggcatggt

SEQ ID NO: 7536 - DNA, 15 bp, Homo sapiens
atttgccaggcatgg

SEQ ID NO: 7537 - DNA, 15 bp, Homo sapiens
aatttgccaggcatg

SEQ ID NO: 7538 - DNA, 15 bp, Homo sapiens
aaatttgccaggcat

SEQ ID NO: 7539 - DNA, 15 bp, Homo sapiens
aaaatttgccaggca

SEQ ID NO: 7540 - DNA, 15 bp, Homo sapiens
aaaaatttgccaggc

SEQ ID NO: 7541 - DNA, 15 bp, Homo sapiens
taaaaatttgccagg

SEQ ID NO: 7542 - DNA, 15 bp, Homo sapiens
ttaaaaatttgccag

SEQ ID NO: 7543 - DNA, 15 bp, Homo sapiens
tttaaaaatttgcca

SEQ ID NO: 7544 - DNA, 15 bp, Homo sapiens
atttaaaaatttgcc

SEQ ID NO: 7545 - DNA, 15 bp, Homo sapiens
aatttaaaaatttgc

SEQ ID NO: 7546 - DNA, 15 bp, Homo sapiens
aaatttaaaaatttg

SEQ ID NO: 7547 - DNA, 15 bp, Homo sapiens
aaaatttaaaaattt

SEQ ID NO: 7548 - DNA, 15 bp, Homo sapiens
aaaaatttaaaaatt

SEQ ID NO: 7549 - DNA, 15 bp, Homo sapiens
taaaaatttaaaaat

SEQ ID NO: 7550 - DNA, 15 bp, Homo sapiens
ctaaaaatttaaaaa

SEQ ID NO: 7551 - DNA, 15 bp, Homo sapiens
actaaaaatttaaaa

SEQ ID NO: 7552 - DNA, 15 bp, Homo sapiens
tactaaaaatttaaa

SEQ ID NO: 7553 - DNA, 15 bp, Homo sapiens
ctactaaaaatttaa

SEQ ID NO: 7554 - DNA, 15 bp, Homo sapiens
tctactaaaaattta

SEQ ID NO: 7555 - DNA, 15 bp, Homo sapiens
ctctactaaaaattt

SEQ ID NO: 7556 - DNA, 15 bp, Homo sapiens
tctctactaaaaatt

SEQ ID NO: 7557 - DNA, 15 bp, Homo sapiens
atctctactaaaaat

SEQ ID NO: 7558 - DNA, 15 bp, Homo sapiens
cccccatctctacta

SEQ ID NO: 7559 - DNA, 15 bp, Homo sapiens
acccccatctctact

SEQ ID NO: 7560 - DNA, 15 bp, Homo sapiens
gacccccatctctac

SEQ ID NO: 7561 - DNA, 15 bp, Homo sapiens
agacccccatctcta

SEQ ID NO: 7562 - DNA, 15 bp, Homo sapiens
aagacccccatctct

SEQ ID NO: 7563 - DNA, 15 bp, Homo sapiens
caagacccccatctc

SEQ ID NO: 7564 - DNA, 15 bp, Homo sapiens
gcaagacccccatct

SEQ ID NO: 7565 - DNA, 15 bp, Homo sapiens
agcaagacccccatc

SEQ ID NO: 7566 - DNA, 15 bp, Homo sapiens
tagcaagacccccat

SEQ ID NO: 7567 - DNA, 15 bp, Homo sapiens
atagcaagaccccca

SEQ ID NO: 7568 - DNA, 15 bp, Homo sapiens
catagcaagaccccc

SEQ ID NO: 7569 - DNA, 15 bp, Homo sapiens
acatagcaagacccc

SEQ ID NO: 7570 - DNA, 15 bp, Homo sapiens
aacatagcaagaccc

SEQ ID NO: 7571 - DNA, 15 bp, Homo sapiens
caacatagcaagacc

SEQ ID NO: 7572 - DNA, 15 bp, Homo sapiens
gcaacatagcaagac

SEQ ID NO: 7573 - DNA, 15 bp, Homo sapiens
ggcaacatagcaaga

SEQ ID NO: 7574 - DNA, 15 bp, Homo sapiens
gggcaacatagcaag

SEQ ID NO: 7575 - DNA, 15 bp, Homo sapiens
tgggcaacatagcaa

SEQ ID NO: 7576 - DNA, 15 bp, Homo sapiens
ctgggcaacatagca

SEQ ID NO: 7577 - DNA, 15 bp, Homo sapiens
cctgggcaacatagc

SEQ ID NO: 7578 - DNA, 15 bp, Homo sapiens
gcctgggcaacatag

SEQ ID NO: 7579 - DNA, 15 bp, Homo sapiens
agcctgggcaacata

SEQ ID NO: 7580 - DNA, 15 bp, Homo sapiens
cagcctgggcaacat

SEQ ID NO: 7581 - DNA, 15 bp, Homo sapiens
accagcctgggcaac

SEQ ID NO: 7582 - DNA, 15 bp, Homo sapiens
gaccagcctgggcaa

SEQ ID NO: 7583 - DNA, 15 bp, Homo sapiens
agaccagcctgggca

SEQ ID NO: 7584 - DNA, 15 bp, Homo sapiens
gagaccagcctgggc

SEQ ID NO: 7585 - DNA, 15 bp, Homo sapiens
tgagaccagcctggg

SEQ ID NO: 7586 - DNA, 15 bp, Homo sapiens
ttgagaccagcctgg

SEQ ID NO: 7587 - DNA, 15 bp, Homo sapiens
tttgagaccagcctg

SEQ ID NO: 7588 - DNA, 15 bp, Homo sapiens
gtttgagaccagcct

SEQ ID NO: 7589 - DNA, 15 bp, Homo sapiens
agtttgagaccagcc

SEQ ID NO: 7590 - DNA, 15 bp, Homo sapiens
gagtttgagaccagc

SEQ ID NO: 7591 - DNA, 15 bp, Homo sapiens
ggagtttgagaccag

SEQ ID NO: 7592 - DNA, 15 bp, Homo sapiens
aggagtttgagacca

SEQ ID NO: 7593 - DNA, 15 bp, Homo sapiens
caggagtttgagacc

SEQ ID NO: 7594 - DNA, 15 bp, Homo sapiens
ctcaggagtttgaga

SEQ ID NO: 7595 - DNA, 15 bp, Homo sapiens
gctcaggagtttgag

SEQ ID NO: 7596 - DNA, 15 bp, Homo sapiens
agctcaggagtttga

SEQ ID NO: 7597 - DNA, 15 bp, Homo sapiens
gagctcaggagtttg

SEQ ID NO: 7598 - DNA, 15 bp, Homo sapiens
tgagctcaggagttt

SEQ ID NO: 7599 - DNA, 15 bp, Homo sapiens
ttgagctcaggagtt

SEQ ID NO: 7600 - DNA, 15 bp, Homo sapiens
cttgagctcaggagt

SEQ ID NO: 7601 - DNA, 15 bp, Homo sapiens
gcttgagctcaggag

SEQ ID NO: 7602 - DNA, 15 bp, Homo sapiens
tgcttgagctcagga

SEQ ID NO: 7603 - DNA, 15 bp, Homo sapiens
ctgcttgagctcagg

SEQ ID NO: 7604 - DNA, 15 bp, Homo sapiens
actgcttgagctcag

SEQ ID NO: 7605 - DNA, 15 bp, Homo sapiens
gactgcttgagctca

SEQ ID NO: 7606 - DNA, 15 bp, Homo sapiens
ggactgcttgagctc

SEQ ID NO: 7607 - DNA, 15 bp, Homo sapiens
aggactgcttgagct

SEQ ID NO: 7608 - DNA, 15 bp, Homo sapiens
gaggactgcttgagc

SEQ ID NO: 7609 - DNA, 15 bp, Homo sapiens
ggaggactgcttgag

SEQ ID NO: 7610 - DNA, 15 bp, Homo sapiens
aggaggactgcttga

SEQ ID NO: 7611 - DNA, 15 bp, Homo sapiens
caggaggactgcttg

SEQ ID NO: 7612 - DNA, 15 bp, Homo sapiens
gcaggaggactgctt

SEQ ID NO: 7613 - DNA, 15 bp, Homo sapiens
agcaggaggactgct

SEQ ID NO: 7614 - DNA, 15 bp, Homo sapiens
aagcaggaggactgc

SEQ ID NO: 7615 - DNA, 15 bp, Homo sapiens
aaagcaggaggactg

SEQ ID NO: 7616 - DNA, 15 bp, Homo sapiens
caaagcaggaggact

SEQ ID NO: 7617 - DNA, 15 bp, Homo sapiens
ccaaagcaggaggac

SEQ ID NO: 7618 - DNA, 15 bp, Homo sapiens
gccaaagcaggagga

SEQ ID NO: 7619 - DNA, 15 bp, Homo sapiens
ggccaaagcaggagg

SEQ ID NO: 7620 - DNA, 15 bp, Homo sapiens
aggccaaagcaggag

SEQ ID NO: 7621 - DNA, 15 bp, Homo sapiens
gaggccaaagcagga

SEQ ID NO: 7622 - DNA, 15 bp, Homo sapiens
ggaggccaaagcagg

SEQ ID NO: 7623 - DNA, 15 bp, Homo sapiens
gggaggccaaagcag

SEQ ID NO: 7624 - DNA, 15 bp, Homo sapiens
cgggaggccaaagca

SEQ ID NO: 7625 - DNA, 15 bp, Homo sapiens
tcgggaggccaaagc

SEQ ID NO: 7626 - DNA, 15 bp, Homo sapiens
ttcgggaggccaaag

SEQ ID NO: 7627 - DNA, 15 bp, Homo sapiens
cttcgggaggccaaa

SEQ ID NO: 7628 - DNA, 15 bp, Homo sapiens
acttcgggaggccaa

SEQ ID NO: 7629 - DNA, 15 bp, Homo sapiens
cacttcgggaggcca

SEQ ID NO: 7630 - DNA, 15 bp, Homo sapiens
gcacttcgggaggcc

SEQ ID NO: 7631 - DNA, 15 bp, Homo sapiens
agcacttcgggaggc

SEQ ID NO: 7632 - DNA, 15 bp, Homo sapiens
cagcacttcgggagg

SEQ ID NO: 7633 - DNA, 15 bp, Homo sapiens
ccagcacttcgggag

SEQ ID NO: 7634 - DNA, 15 bp, Homo sapiens
cccagcacttcggga

SEQ ID NO: 7635 - DNA, 15 bp, Homo sapiens
tcccagcacttcggg

SEQ ID NO: 7636 - DNA, 15 bp, Homo sapiens
atcccagcacttcgg

SEQ ID NO: 7637 - DNA, 15 bp, Homo sapiens
aatcccagcacttcg

SEQ ID NO: 7638 - DNA, 15 bp, Homo sapiens
taatcccagcacttc

SEQ ID NO: 7639 - DNA, 15 bp, Homo sapiens
ccacgcctgtaatcc

SEQ ID NO: 7640 - DNA, 15 bp, Homo sapiens
cccacgcctgtaatc

SEQ ID NO: 7641 - DNA, 15 bp, Homo sapiens
gcccacgcctgtaat

SEQ ID NO: 7642 - DNA, 15 bp, Homo sapiens
ggcccacgcctgtaa

SEQ ID NO: 7643 - DNA, 15 bp, Homo sapiens
tggcccacgcctgta

SEQ ID NO: 7644 - DNA, 15 bp, Homo sapiens
gtggcccacgcctgt

SEQ ID NO: 7645 - DNA, 15 bp, Homo sapiens
agtggcccacgcctg

SEQ ID NO: 7646 - DNA, 15 bp, Homo sapiens
cagtggcccacgcct

SEQ ID NO: 7647 - DNA, 15 bp, Homo sapiens
acagtggcccacgcc

SEQ ID NO: 7648 - DNA, 15 bp, Homo sapiens
cacagtggcccacgc

SEQ ID NO: 7649 - DNA, 15 bp, Homo sapiens
gcacagtggcccacg

SEQ ID NO: 7650 - DNA, 15 bp, Homo sapiens
ggcacagtggcccac

SEQ ID NO: 7651 - DNA, 15 bp, Homo sapiens
tggcacagtggccca

SEQ ID NO: 7652 - DNA, 15 bp, Homo sapiens
ctggcacagtggccc

SEQ ID NO: 7653 - DNA, 15 bp, Homo sapiens
cctggcacagtggcc

SEQ ID NO: 7654 - DNA, 15 bp, Homo sapiens
gcctggcacagtggc

SEQ ID NO: 7655 - DNA, 15 bp, Homo sapiens
agcctggcacagtgg

SEQ ID NO: 7656 - DNA, 15 bp, Homo sapiens
gagcctggcacagtg

SEQ ID NO: 7657 - DNA, 15 bp, Homo sapiens
ggagcctggcacagt

SEQ ID NO: 7658 - DNA, 15 bp, Homo sapiens
tggagcctggcacag

SEQ ID NO: 7659 - DNA, 15 bp, Homo sapiens
ttggagcctggcaca

SEQ ID NO: 7660 - DNA, 15 bp, Homo sapiens
tttggagcctggcac

SEQ ID NO: 7661 - DNA, 15 bp, Homo sapiens
atttggagcctggca

SEQ ID NO: 7662 - DNA, 15 bp, Homo sapiens
gatttggagcctggc

SEQ ID NO: 7663 - DNA, 15 bp, Homo sapiens
agatttggagcctgg

SEQ ID NO: 7664 - DNA, 15 bp, Homo sapiens
aagatttggagcctg

SEQ ID NO: 7665 - DNA, 15 bp, Homo sapiens
gaagatttggagcct

SEQ ID NO: 7666 - DNA, 15 bp, Homo sapiens
tgaagatttggagcc

SEQ ID NO: 7667 - DNA, 15 bp, Homo sapiens
atgaagatttggagc

SEQ ID NO: 7668 - DNA, 15 bp, Homo sapiens
aatgaagatttggag

SEQ ID NO: 7669 - DNA, 15 bp, Homo sapiens
aaatgaagatttgga

SEQ ID NO: 7670 - DNA, 15 bp, Homo sapiens
caaatgaagatttgg

SEQ ID NO: 7671 - DNA, 15 bp, Homo sapiens
acaaatgaagatttg

SEQ ID NO: 7672 - DNA, 15 bp, Homo sapiens
cacaaatgaagattt

SEQ ID NO: 7673 - DNA, 15 bp, Homo sapiens
acacaaatgaagatt

SEQ ID NO: 7674 - DNA, 15 bp, Homo sapiens
aacacaaatgaagat

SEQ ID NO: 7675 - DNA, 15 bp, Homo sapiens
caacacaaatgaaga

SEQ ID NO: 7676 - DNA, 15 bp, Homo sapiens
acaacacaaatgaag

SEQ ID NO: 7677 - DNA, 15 bp, Homo sapiens
aacaacacaaatgaa

SEQ ID NO: 7678 - DNA, 15 bp, Homo sapiens
gaacaacacaaatga

SEQ ID NO: 7679 - DNA, 15 bp, Homo sapiens
agaacaacacaaatg

SEQ ID NO: 7680 - DNA, 15 bp, Homo sapiens
aagaacaacacaaat

SEQ ID NO: 7681 - DNA, 15 bp, Homo sapiens
caagaacaacacaaa

SEQ ID NO: 7682 - DNA, 15 bp, Homo sapiens
acaagaacaacacaa

SEQ ID NO: 7683 - DNA, 15 bp, Homo sapiens
cacaagaacaacaca

SEQ ID NO: 7684 - DNA, 15 bp, Homo sapiens
acacaagaacaacac

SEQ ID NO: 7685 - DNA, 15 bp, Homo sapiens
cacacaagaacaaca

SEQ ID NO: 7686 - DNA, 15 bp, Homo sapiens
ccacacaagaacaac

SEQ ID NO: 7687 - DNA, 15 bp, Homo sapiens
tccacacaagaacaa

SEQ ID NO: 7688 - DNA, 15 bp, Homo sapiens
ttccacacaagaaca

SEQ ID NO: 7689 - DNA, 15 bp, Homo sapiens
attccacacaagaac

SEQ ID NO: 7690 - DNA, 15 bp, Homo sapiens
cattccacacaagaa

SEQ ID NO: 7691 - DNA, 15 bp, Homo sapiens
gcattccacacaaga

SEQ ID NO: 7692 - DNA, 15 bp, Homo sapiens
ggcattccacacaag

SEQ ID NO: 7693 - DNA, 15 bp, Homo sapiens
gggcattccacacaa

SEQ ID NO: 7694 - DNA, 15 bp, Homo sapiens
agggcattccacaca

SEQ ID NO: 7695 - DNA, 15 bp, Homo sapiens
aagggcattccacac

SEQ ID NO: 7696 - DNA, 15 bp, Homo sapiens
gaagggcattccaca

SEQ ID NO: 7697 - DNA, 15 bp, Homo sapiens
agaagggcattccac

SEQ ID NO: 7698 - DNA, 15 bp, Homo sapiens
aagaagggcattcca

SEQ ID NO: 7699 - DNA, 15 bp, Homo sapiens
gaagaagggcattcc

SEQ ID NO: 7700 - DNA, 15 bp, Homo sapiens
tgaagaagggcattc

SEQ ID NO: 7701 - DNA, 15 bp, Homo sapiens
atgaagaagggcatt

SEQ ID NO: 7702 - DNA, 15 bp, Homo sapiens
gatgaagaagggcat

SEQ ID NO: 7703 - DNA, 15 bp, Homo sapiens
ggatgaagaagggca

SEQ ID NO: 7704 - DNA, 15 bp, Homo sapiens
gggatgaagaagggc

SEQ ID NO: 7705 - DNA, 15 bp, Homo sapiens
agggatgaagaaggg

SEQ ID NO: 7706 - DNA, 15 bp, Homo sapiens
aagggatgaagaagg

SEQ ID NO: 7707 - DNA, 15 bp, Homo sapiens
gaagggatgaagaag

SEQ ID NO: 7708 - DNA, 15 bp, Homo sapiens
ggaagggatgaagaa

SEQ ID NO: 7709 - DNA, 15 bp, Homo sapiens
aggaagggatgaaga

SEQ ID NO: 7710 - DNA, 15 bp, Homo sapiens
taggaagggatgaag

SEQ ID NO: 7711 - DNA, 15 bp, Homo sapiens
ctaggaagggatgaa

SEQ ID NO: 7712 - DNA, 15 bp, Homo sapiens
actaggaagggatga

SEQ ID NO: 7713 - DNA, 15 bp, Homo sapiens
gactaggaagggatg

SEQ ID NO: 7714 - DNA, 15 bp, Homo sapiens
agactaggaagggat

SEQ ID NO: 7715 - DNA, 15 bp, Homo sapiens
gagactaggaaggga

SEQ ID NO: 7716 - DNA, 15 bp, Homo sapiens
ggagactaggaaggg

SEQ ID NO: 7717 - DNA, 15 bp, Homo sapiens
tggagactaggaagg

SEQ ID NO: 7718 - DNA, 15 bp, Homo sapiens
ttggagactaggaag

SEQ ID NO: 7719 - DNA, 15 bp, Homo sapiens
tttggagactaggaa

SEQ ID NO: 7720 - DNA, 15 bp, Homo sapiens
gtttggagactagga

SEQ ID NO: 7721 - DNA, 15 bp, Homo sapiens
agtttggagactagg

SEQ ID NO: 7722 - DNA, 15 bp, Homo sapiens
aagtttggagactag

SEQ ID NO: 7723 - DNA, 15 bp, Homo sapiens
aaagtttggagacta

SEQ ID NO: 7724 - DNA, 15 bp, Homo sapiens
caaagtttggagact

SEQ ID NO: 7725 - DNA, 15 bp, Homo sapiens
acaaagtttggagac

SEQ ID NO: 7726 - DNA, 15 bp, Homo sapiens
tacaaagtttggaga

SEQ ID NO: 7727 - DNA, 15 bp, Homo sapiens
gtacaaagtttggag

SEQ ID NO: 7728 - DNA, 15 bp, Homo sapiens
tgtacaaagtttgga

SEQ ID NO: 7729 - DNA, 15 bp, Homo sapiens
gtgtacaaagtttgg

SEQ ID NO: 7730 - DNA, 15 bp, Homo sapiens
tgtgtacaaagtttg

SEQ ID NO: 7731 - DNA, 15 bp, Homo sapiens
gtgtgtacaaagttt

SEQ ID NO: 7732 - DNA, 15 bp, Homo sapiens
agtgtgtacaaagtt

SEQ ID NO: 7733 - DNA, 15 bp, Homo sapiens
gagtgtgtacaaagt

SEQ ID NO: 7734 - DNA, 15 bp, Homo sapiens
tgagtgtgtacaaag

SEQ ID NO: 7735 - DNA, 15 bp, Homo sapiens
ctgagtgtgtacaaa

SEQ ID NO: 7736 - DNA, 15 bp, Homo sapiens
actgagtgtgtacaa

SEQ ID NO: 7737 - DNA, 15 bp, Homo sapiens
aactgagtgtgtaca

SEQ ID NO: 7738 - DNA, 15 bp, Homo sapiens
caactgagtgtgtac

SEQ ID NO: 7739 - DNA, 15 bp, Homo sapiens
tcaactgagtgtgta

SEQ ID NO: 7740 - DNA, 15 bp, Homo sapiens
ttcaactgagtgtgt

SEQ ID NO: 7741 - DNA, 15 bp, Homo sapiens
gttcaactgagtgtg

SEQ ID NO: 7742 - DNA, 15 bp, Homo sapiens
ggttcaactgagtgt

SEQ ID NO: 7743 - DNA, 15 bp, Homo sapiens
gggttcaactgagtg

SEQ ID NO: 7744 - DNA, 15 bp, Homo sapiens
tgggttcaactgagt

SEQ ID NO: 7745 - DNA, 15 bp, Homo sapiens
atgggttcaactgag

SEQ ID NO: 7746 - DNA, 15 bp, Homo sapiens
aatgggttcaactga

SEQ ID NO: 7747 - DNA, 15 bp, Homo sapiens
aaatgggttcaactg

SEQ ID NO: 7748 - DNA, 15 bp, Homo sapiens
gaaatgggttcaact

SEQ ID NO: 7749 - DNA, 15 bp, Homo sapiens
cgaaatgggttcaac

SEQ ID NO: 7750 - DNA, 15 bp, Homo sapiens
acgaaatgggttcaa

SEQ ID NO: 7751 - DNA, 15 bp, Homo sapiens
cacgaaatgggttca

SEQ ID NO: 7752 - DNA, 15 bp, Homo sapiens
ccacgaaatgggttc

SEQ ID NO: 7753 - DNA, 15 bp, Homo sapiens
cccacgaaatgggtt

SEQ ID NO: 7754 - DNA, 15 bp, Homo sapiens
acccacgaaatgggt

SEQ ID NO: 7755 - DNA, 15 bp, Homo sapiens
gacccacgaaatggg

SEQ ID NO: 7756 - DNA, 15 bp, Homo sapiens
ggacccacgaaatgg

SEQ ID NO: 7757 - DNA, 15 bp, Homo sapiens
gggacccacgaaatg

SEQ ID NO: 7758 - DNA, 15 bp, Homo sapiens
agggacccacgaaat

SEQ ID NO: 7759 - DNA, 15 bp, Homo sapiens
cagggacccacgaaa

SEQ ID NO: 7760 - DNA, 15 bp, Homo sapiens
gcagggacccacgaa

SEQ ID NO: 7761 - DNA, 15 bp, Homo sapiens
agcagggacccacga

SEQ ID NO: 7762 - DNA, 15 bp, Homo sapiens
cagcagggacccacg

SEQ ID NO: 7763 - DNA, 15 bp, Homo sapiens
tcagcagggacccac

SEQ ID NO: 7764 - DNA, 15 bp, Homo sapiens
ttcagcagggaccca

SEQ ID NO: 7765 - DNA, 15 bp, Homo sapiens
cttcagcagggaccc

SEQ ID NO: 7766 - DNA, 15 bp, Homo sapiens
ccttcagcagggacc

SEQ ID NO: 7767 - DNA, 15 bp, Homo sapiens
gccttcagcagggac

SEQ ID NO: 7768 - DNA, 15 bp, Homo sapiens
tgccttcagcaggga

SEQ ID NO: 7769 - DNA, 15 bp, Homo sapiens
atgccttcagcaggg

SEQ ID NO: 7770 - DNA, 15 bp, Homo sapiens
catgccttcagcagg

SEQ ID NO: 7771 - DNA, 15 bp, Homo sapiens
gcatgccttcagcag

SEQ ID NO: 7772 - DNA, 15 bp, Homo sapiens
ggcatgccttcagca

SEQ ID NO: 7773 - DNA, 15 bp, Homo sapiens
tggcatgccttcagc

SEQ ID NO: 7774 - DNA, 15 bp, Homo sapiens
gtggcatgccttcag

SEQ ID NO: 7775 - DNA, 15 bp, Homo sapiens
agtggcatgccttca

SEQ ID NO: 7776 - DNA, 15 bp, Homo sapiens
aagtggcatgccttc

SEQ ID NO: 7777 - DNA, 15 bp, Homo sapiens
gaagtggcatgcctt

SEQ ID NO: 7778 - DNA, 15 bp, Homo sapiens
agaagtggcatgcct

SEQ ID NO: 7779 - DNA, 15 bp, Homo sapiens
tagaagtggcatgcc

SEQ ID NO: 7780 - DNA, 15 bp, Homo sapiens
gtagaagtggcatgc

SEQ ID NO: 7781 - DNA, 15 bp, Homo sapiens
ggtagaagtggcatg

SEQ ID NO: 7782 - DNA, 15 bp, Homo sapiens
tggtagaagtggcat

SEQ ID NO: 7783 - DNA, 15 bp, Homo sapiens
ttggtagaagtggca

SEQ ID NO: 7784 - DNA, 15 bp, Homo sapiens
cttggtagaagtggc

SEQ ID NO: 7785 - DNA, 15 bp, Homo sapiens
gcttggtagaagtgg

SEQ ID NO: 7786 - DNA, 15 bp, Homo sapiens
ggcttggtagaagtg

SEQ ID NO: 7787 - DNA, 15 bp, Homo sapiens
aggcttggtagaagt

SEQ ID NO: 7788 - DNA, 15 bp, Homo sapiens
aaggcttggtagaag

SEQ ID NO: 7789 - DNA, 15 bp, Homo sapiens
aaaggcttggtagaa

SEQ ID NO: 7790 - DNA, 15 bp, Homo sapiens
aaaaggcttggtaga

SEQ ID NO: 7791 - DNA, 15 bp, Homo sapiens
gaaaaggcttggtag

SEQ ID NO: 7792 - DNA, 15 bp, Homo sapiens
agaaaaggcttggta

SEQ ID NO: 7793 - DNA, 15 bp, Homo sapiens
gagaaaaggcttggt

SEQ ID NO: 7794 - DNA, 15 bp, Homo sapiens
ggagaaaaggcttgg

SEQ ID NO: 7795 - DNA, 15 bp, Homo sapiens
tggagaaaaggcttg

SEQ ID NO: 7796 - DNA, 15 bp, Homo sapiens
atggagaaaaggctt

SEQ ID NO: 7797 - DNA, 15 bp, Homo sapiens
tatggagaaaaggct

SEQ ID NO: 7798 - DNA, 15 bp, Homo sapiens
atatggagaaaaggc

SEQ ID NO: 7799 - DNA, 15 bp, Homo sapiens
aatatggagaaaagg

SEQ ID NO: 7800 - DNA, 15 bp, Homo sapiens
taatatggagaaaag

SEQ ID NO: 7801 - DNA, 15 bp, Homo sapiens
ataatatggagaaaa

SEQ ID NO: 7802 - DNA, 15 bp, Homo sapiens
aataatatggagaaa

SEQ ID NO: 7803 - DNA, 15 bp, Homo sapiens
gaataatatggagaa

SEQ ID NO: 7804 - DNA, 15 bp, Homo sapiens
ggaataatatggaga

SEQ ID NO: 7805 - DNA, 15 bp, Homo sapiens
gggaataatatggag

SEQ ID NO: 7806 - DNA, 15 bp, Homo sapiens
ggggaataatatgga

SEQ ID NO: 7807 - DNA, 15 bp, Homo sapiens
aggggaataatatgg

SEQ ID NO: 7808 - DNA, 15 bp, Homo sapiens
aaggggaataatatg

SEQ ID NO: 7809 - DNA, 15 bp, Homo sapiens
aaaggggaataatat

SEQ ID NO: 7810 - DNA, 15 bp, Homo sapiens
aaaaggggaataata

SEQ ID NO: 7811 - DNA, 15 bp, Homo sapiens
aaaaaggggaataat

SEQ ID NO: 7812 - DNA, 15 bp, Homo sapiens
aaaaaaggggaataa

SEQ ID NO: 7813 - DNA, 15 bp, Homo sapiens
caaaaaaggggaata

SEQ ID NO: 7814 - DNA, 15 bp, Homo sapiens
acaaaaaaggggaat

SEQ ID NO: 7815 - DNA, 15 bp, Homo sapiens
gacaaaaaaggggaa

SEQ ID NO: 7816 - DNA, 15 bp, Homo sapiens
ggacaaaaaagggga

SEQ ID NO: 7817 - DNA, 15 bp, Homo sapiens
aggacaaaaaagggg

SEQ ID NO: 7818 - DNA, 15 bp, Homo sapiens
gaggacaaaaaaggg

SEQ ID NO: 7819 - DNA, 15 bp, Homo sapiens
agaggacaaaaaagg

SEQ ID NO: 7820 - DNA, 15 bp, Homo sapiens
cagaggacaaaaaag

SEQ ID NO: 7821 - DNA, 15 bp, Homo sapiens
tcagaggacaaaaaa

SEQ ID NO: 7822 - DNA, 15 bp, Homo sapiens
atcagaggacaaaaa

SEQ ID NO: 7823 - DNA, 15 bp, Homo sapiens
catcagaggacaaaa

SEQ ID NO: 7824 - DNA, 15 bp, Homo sapiens
ccatcagaggacaaa

SEQ ID NO: 7825 - DNA, 15 bp, Homo sapiens
gccatcagaggacaa

SEQ ID NO: 7826 - DNA, 15 bp, Homo sapiens
ggccatcagaggaca

SEQ ID NO: 7827 - DNA, 15 bp, Homo sapiens
aggccatcagaggac

SEQ ID NO: 7828 - DNA, 15 bp, Homo sapiens
taggccatcagagga

SEQ ID NO: 7829 - DNA, 15 bp, Homo sapiens
ttaggccatcagagg

SEQ ID NO: 7830 - DNA, 15 bp, Homo sapiens
tttaggccatcagag

SEQ ID NO: 7831 - DNA, 15 bp, Homo sapiens
atttaggccatcaga

SEQ ID NO: 7832 - DNA, 15 bp, Homo sapiens
tatttaggccatcag

SEQ ID NO: 7833 - DNA, 15 bp, Homo sapiens
gtatttaggccatca

SEQ ID NO: 7834 - DNA, 15 bp, Homo sapiens
cgtatttaggccatc

SEQ ID NO: 7835 - DNA, 15 bp, Homo sapiens
acgtatttaggccat

SEQ ID NO: 7836 - DNA, 15 bp, Homo sapiens
aacgtatttaggcca

SEQ ID NO: 7837 - DNA, 15 bp, Homo sapiens
caacgtatttaggcc

SEQ ID NO: 7838 - DNA, 15 bp, Homo sapiens
gcaacgtatttaggc

SEQ ID NO: 7839 - DNA, 15 bp, Homo sapiens
tgcaacgtatttagg

SEQ ID NO: 7840 - DNA, 15 bp, Homo sapiens
ctgcaacgtatttag

SEQ ID NO: 7841 - DNA, 15 bp, Homo sapiens
actgcaacgtattta

SEQ ID NO: 7842 - DNA, 15 bp, Homo sapiens
tactgcaacgtattt

SEQ ID NO: 7843 - DNA, 15 bp, Homo sapiens
ttactgcaacgtatt

SEQ ID NO: 7844 - DNA, 15 bp, Homo sapiens
gttactgcaacgtat

SEQ ID NO: 7845 - DNA, 15 bp, Homo sapiens
tgttactgcaacgta

SEQ ID NO: 7846 - DNA, 15 bp, Homo sapiens
gtgttactgcaacgt

SEQ ID NO: 7847 - DNA, 15 bp, Homo sapiens
agtgttactgcaacg

SEQ ID NO: 7848 - DNA, 15 bp, Homo sapiens
gagtgttactgcaac

SEQ ID NO: 7849 - DNA, 15 bp, Homo sapiens
tgagtgttactgcaa

SEQ ID NO: 7850 - DNA, 15 bp, Homo sapiens
ctgagtgttactgca

SEQ ID NO: 7851 - DNA, 15 bp, Homo sapiens
cctgagtgttactgc

SEQ ID NO: 7852 - DNA, 15 bp, Homo sapiens
acctgagtgttactg

SEQ ID NO: 7853 - DNA, 15 bp, Homo sapiens
cacctgagtgttact

SEQ ID NO: 7854 - DNA, 15 bp, Homo sapiens
gcacctgagtgttac

SEQ ID NO: 7855 - DNA, 15 bp, Homo sapiens
agcacctgagtgtta

SEQ ID NO: 7856 - DNA, 15 bp, Homo sapiens
aagcacctgagtgtt

SEQ ID NO: 7857 - DNA, 15 bp, Homo sapiens
taagcacctgagtgt

SEQ ID NO: 7858 - DNA, 15 bp, Homo sapiens
ataagcacctgagtg

SEQ ID NO: 7859 - DNA, 15 bp, Homo sapiens
gataagcacctgagt

SEQ ID NO: 7860 - DNA, 15 bp, Homo sapiens
agataagcacctgag

SEQ ID NO: 7861 - DNA, 15 bp, Homo sapiens
gagataagcacctga

SEQ ID NO: 7862 - DNA, 15 bp, Homo sapiens
agagataagcacctg

SEQ ID NO: 7863 - DNA, 15 bp, Homo sapiens
aagagataagcacct

SEQ ID NO: 7864 - DNA, 15 bp, Homo sapiens
taagagataagcacc

SEQ ID NO: 7865 - DNA, 15 bp, Homo sapiens
gtaagagataagcac

SEQ ID NO: 7866 - DNA, 15 bp, Homo sapiens
agtaagagataagca

SEQ ID NO: 7867 - DNA, 15 bp, Homo sapiens
gagtaagagataagc

SEQ ID NO: 7868 - DNA, 15 bp, Homo sapiens
cgagtaagagataag

SEQ ID NO: 7869 - DNA, 15 bp, Homo sapiens
acgagtaagagataa

SEQ ID NO: 7870 - DNA, 15 bp, Homo sapiens
aacgagtaagagata

SEQ ID NO: 7871 - DNA, 15 bp, Homo sapiens
caacgagtaagagat

SEQ ID NO: 7872 - DNA, 15 bp, Homo sapiens
acaacgagtaagaga

SEQ ID NO: 7873 - DNA, 15 bp, Homo sapiens
gacaacgagtaagag

SEQ ID NO: 7874 - DNA, 15 bp, Homo sapiens
tgacaacgagtaaga

SEQ ID NO: 7875 - DNA, 15 bp, Homo sapiens
atgacaacgagtaag

SEQ ID NO: 7876 - DNA, 15 bp, Homo sapiens
aatgacaacgagtaa

SEQ ID NO: 7877 - DNA, 15 bp, Homo sapiens
aaatgacaacgagta

SEQ ID NO: 7878 - DNA, 15 bp, Homo sapiens
aaaatgacaacgagt

SEQ ID NO: 7879 - DNA, 15 bp, Homo sapiens
aaaaatgacaacgag

SEQ ID NO: 7880 - DNA, 15 bp, Homo sapiens
aaaaaatgacaacga

SEQ ID NO: 7881 - DNA, 15 bp, Homo sapiens
aaaaaaatgacaacg

SEQ ID NO: 7882 - DNA, 15 bp, Homo sapiens
aaaaaaaatgacaac

SEQ ID NO: 7883 - DNA, 15 bp, Homo sapiens
aaaaaaaaatgacaa

SEQ ID NO: 7884 - DNA, 15 bp, Homo sapiens
caaaaaaaaatgaca

SEQ ID NO: 7885 - DNA, 15 bp, Homo sapiens
gcaaaaaaaaatgac

SEQ ID NO: 7886 - DNA, 15 bp, Homo sapiens
agcaaaaaaaaatga

SEQ ID NO: 7887 - DNA, 15 bp, Homo sapiens
cagcaaaaaaaaatg

SEQ ID NO: 7888 - DNA, 15 bp, Homo sapiens
gcagcaaaaaaaaat

SEQ ID NO: 7889 - DNA, 15 bp, Homo sapiens
tgcagcaaaaaaaaa

SEQ ID NO: 7890 - DNA, 15 bp, Homo sapiens
ttgcagcaaaaaaaa

SEQ ID NO: 7891 - DNA, 15 bp, Homo sapiens
tttgcagcaaaaaaa

SEQ ID NO: 7892 - DNA, 15 bp, Homo sapiens
atttgcagcaaaaaa

SEQ ID NO: 7893 - DNA, 15 bp, Homo sapiens
catttgcagcaaaaa

SEQ ID NO: 7894 - DNA, 15 bp, Homo sapiens
acatttgcagcaaaa

SEQ ID NO: 7895 - DNA, 15 bp, Homo sapiens
cacatttgcagcaaa

SEQ ID NO: 7896 - DNA, 15 bp, Homo sapiens
acacatttgcagcaa

SEQ ID NO: 7897 - DNA, 15 bp, Homo sapiens
aacacatttgcagca

SEQ ID NO: 7898 - DNA, 15 bp, Homo sapiens
gaacacatttgcagc

SEQ ID NO: 7899 - DNA, 15 bp, Homo sapiens
tgaacacatttgcag

SEQ ID NO: 7900 - DNA, 15 bp, Homo sapiens
ttgaacacatttgca

SEQ ID NO: 7901 - DNA, 15 bp, Homo sapiens
cttgaacacatttgc

SEQ ID NO: 7902 - DNA, 15 bp, Homo sapiens
tcttgaacacatttg

SEQ ID NO: 7903 - DNA, 15 bp, Homo sapiens
ttcttgaacacattt

SEQ ID NO: 7904 - DNA, 15 bp, Homo sapiens
tttcttgaacacatt

SEQ ID NO: 7905 - DNA, 15 bp, Homo sapiens
atttcttgaacacat

SEQ ID NO: 7906 - DNA, 15 bp, Homo sapiens
catttcttgaacaca

SEQ ID NO: 7907 - DNA, 15 bp, Homo sapiens
acatttcttgaacac

SEQ ID NO: 7908 - DNA, 15 bp, Homo sapiens
aacatttcttgaaca

SEQ ID NO: 7909 - DNA, 15 bp, Homo sapiens
aaacatttcttgaac

SEQ ID NO: 7910 - DNA, 15 bp, Homo sapiens
taaacatttcttgaa

SEQ ID NO: 7911 - DNA, 15 bp, Homo sapiens
ataaacatttcttga

SEQ ID NO: 7912 - DNA, 15 bp, Homo sapiens
aataaacatttcttg

SEQ ID NO: 7913 - DNA, 15 bp, Homo sapiens
taataaacatttctt

SEQ ID NO: 7914 - DNA, 15 bp, Homo sapiens
ttaataaacatttct

SEQ ID NO: 7915 - DNA, 15 bp, Homo sapiens
tttaataaacatttc

SEQ ID NO: 7916 - DNA, 15 bp, Homo sapiens
gtttaataaacattt

SEQ ID NO: 7917 - DNA, 15 bp, Homo sapiens
tgtttaataaacatt

SEQ ID NO: 7918 - DNA, 15 bp, Homo sapiens
gtgtttaataaacat

SEQ ID NO: 7919 - DNA, 15 bp, Homo sapiens
ggtgtttaataaaca

SEQ ID NO: 7920 - DNA, 15 bp, Homo sapiens
aggtgtttaataaac

SEQ ID NO: 7921 - DNA, 15 bp, Homo sapiens
taggtgtttaataaa

SEQ ID NO: 7922 - DNA, 15 bp, Homo sapiens
ttaggtgtttaataa

SEQ ID NO: 7923 - DNA, 15 bp, Homo sapiens
attaggtgtttaata

SEQ ID NO: 7924 - DNA, 15 bp, Homo sapiens
tattaggtgtttaat

SEQ ID NO: 7925 - DNA, 15 bp, Homo sapiens
atattaggtgtttaa

SEQ ID NO: 7926 - DNA, 15 bp, Homo sapiens
tatattaggtgttta

SEQ ID NO: 7927 - DNA, 15 bp, Homo sapiens
atatattaggtgttt

SEQ ID NO: 7928 - DNA, 15 bp, Homo sapiens
tatatattaggtgtt

SEQ ID NO: 7929 - DNA, 15 bp, Homo sapiens
gtatatattaggtgt

SEQ ID NO: 7930 - DNA, 15 bp, Homo sapiens
ggtatatattaggtg

SEQ ID NO: 7931 - DNA, 15 bp, Homo sapiens
tggtatatattaggt

SEQ ID NO: 7932 - DNA, 15 bp, Homo sapiens
ctggtatatattagg

SEQ ID NO: 7933 - DNA, 15 bp, Homo sapiens
cctggtatatattag

SEQ ID NO: 7934 - DNA, 15 bp, Homo sapiens
acctggtatatatta

SEQ ID NO: 7935 - DNA, 15 bp, Homo sapiens
cacctggtatatatt

SEQ ID NO: 7936 - DNA, 15 bp, Homo sapiens
gcacctggtatatat

SEQ ID NO: 7937 - DNA, 15 bp, Homo sapiens
ggcacctggtatata

SEQ ID NO: 7938 - DNA, 15 bp, Homo sapiens
aggcacctggtatat

SEQ ID NO: 7939 - DNA, 15 bp, Homo sapiens
aaggcacctggtata

SEQ ID NO: 7940 - DNA, 15 bp, Homo sapiens
caaggcacctggtat

SEQ ID NO: 7941 - DNA, 15 bp, Homo sapiens
tcaaggcacctggta

SEQ ID NO: 7942 - DNA, 15 bp, Homo sapiens
atcaaggcacctggt

SEQ ID NO: 7943 - DNA, 15 bp, Homo sapiens
tatcaaggcacctgg

SEQ ID NO: 7944 - DNA, 15 bp, Homo sapiens
ctatcaaggcacctg

SEQ ID NO: 7945 - DNA, 15 bp, Homo sapiens
cctatcaaggcacct

SEQ ID NO: 7946 - DNA, 15 bp, Homo sapiens
tcctatcaaggcacc

SEQ ID NO: 7947 - DNA, 15 bp, Homo sapiens
ttcctatcaaggcac

SEQ ID NO: 7948 - DNA, 15 bp, Homo sapiens
attcctatcaaggca

SEQ ID NO: 7949 - DNA, 15 bp, Homo sapiens
tattcctatcaaggc

SEQ ID NO: 7950 - DNA, 15 bp, Homo sapiens
gtattcctatcaagg

SEQ ID NO: 7951 - DNA, 15 bp, Homo sapiens
ggtattcctatcaag

SEQ ID NO: 7952 - DNA, 15 bp, Homo sapiens
tggtattcctatcaa

SEQ ID NO: 7953 - DNA, 15 bp, Homo sapiens
ctggtattcctatca

SEQ ID NO: 7954 - DNA, 15 bp, Homo sapiens
cctggtattcctatc

SEQ ID NO: 7955 - DNA, 15 bp, Homo sapiens
acctggtattcctat

SEQ ID NO: 7956 - DNA, 15 bp, Homo sapiens
tacctggtattccta

SEQ ID NO: 7957 - DNA, 15 bp, Homo sapiens
ctacctggtattcct

SEQ ID NO: 7958 - DNA, 15 bp, Homo sapiens
tctacctggtattcc

SEQ ID NO: 7959 - DNA, 15 bp, Homo sapiens
ctctacctggtattc

SEQ ID NO: 7960 - DNA, 15 bp, Homo sapiens
gctctacctggtatt

SEQ ID NO: 7961 - DNA, 15 bp, Homo sapiens
tgctctacctggtat

SEQ ID NO: 7962 - DNA, 15 bp, Homo sapiens
ttgctctacctggta

SEQ ID NO: 7963 - DNA, 15 bp, Homo sapiens
cttgctctacctggt

SEQ ID NO: 7964 - DNA, 15 bp, Homo sapiens
tcttgctctacctgg

SEQ ID NO: 7965 - DNA, 15 bp, Homo sapiens
gtcttgctctacctg

SEQ ID NO: 7966 - DNA, 15 bp, Homo sapiens
tgtcttgctctacct

SEQ ID NO: 7967 - DNA, 15 bp, Homo sapiens
ttgtcttgctctacc

SEQ ID NO: 7968 - DNA, 15 bp, Homo sapiens
tttgtcttgctctac

SEQ ID NO: 7969 - DNA, 15 bp, Homo sapiens
atttgtcttgctcta

SEQ ID NO: 7970 - DNA, 15 bp, Homo sapiens
catttgtcttgctct

SEQ ID NO: 7971 - DNA, 15 bp, Homo sapiens
gcatttgtcttgctc

SEQ ID NO: 7972 - DNA, 15 bp, Homo sapiens
tgcatttgtcttgct

SEQ ID NO: 7973 - DNA, 15 bp, Homo sapiens
ttgcatttgtcttgc

SEQ ID NO: 7974 - DNA, 15 bp, Homo sapiens
tttgcatttgtcttg

SEQ ID NO: 7975 - DNA, 15 bp, Homo sapiens
gtttgcatttgtctt

SEQ ID NO: 7976 - DNA, 15 bp, Homo sapiens
tgtttgcatttgtct

SEQ ID NO: 7977 - DNA, 15 bp, Homo sapiens
atgtttgcatttgtc

SEQ ID NO: 7978 - DNA, 15 bp, Homo sapiens
aatgtttgcatttgt

SEQ ID NO: 7979 - DNA, 15 bp, Homo sapiens
caatgtttgcatttg

SEQ ID NO: 7980 - DNA, 15 bp, Homo sapiens
gcaatgtttgcattt

SEQ ID NO: 7981 - DNA, 15 bp, Homo sapiens
ggcaatgtttgcatt

SEQ ID NO: 7982 - DNA, 15 bp, Homo sapiens
gggcaatgtttgcat

SEQ ID NO: 7983 - DNA, 15 bp, Homo sapiens
agggcaatgtttgca

SEQ ID NO: 7984 - DNA, 15 bp, Homo sapiens
aagggcaatgtttgc

SEQ ID NO: 7985 - DNA, 15 bp, Homo sapiens
taagggcaatgtttg

SEQ ID NO: 7986 - DNA, 15 bp, Homo sapiens
ataagggcaatgttt

SEQ ID NO: 7987 - DNA, 15 bp, Homo sapiens
aataagggcaatgtt

SEQ ID NO: 7988 - DNA, 15 bp, Homo sapiens
aaataagggcaatgt

SEQ ID NO: 7989 - DNA, 15 bp, Homo sapiens
gaaataagggcaatg

SEQ ID NO: 7990 - DNA, 15 bp, Homo sapiens
agaaataagggcaat

SEQ ID NO: 7991 - DNA, 15 bp, Homo sapiens
aagaaataagggcaa

SEQ ID NO: 7992 - DNA, 15 bp, Homo sapiens
gaagaaataagggca

SEQ ID NO: 7993 - DNA, 15 bp, Homo sapiens
tgaagaaataagggc

SEQ ID NO: 7994 - DNA, 15 bp, Homo sapiens
ttgaagaaataaggg

SEQ ID NO: 7995 - DNA, 15 bp, Homo sapiens
tttgaagaaataagg

SEQ ID NO: 7996 - DNA, 15 bp, Homo sapiens
atttgaagaaataag

SEQ ID NO: 7997 - DNA, 15 bp, Homo sapiens
tatttgaagaaataa

SEQ ID NO: 7998 - DNA, 15 bp, Homo sapiens
atatttgaagaaata

SEQ ID NO: 7999 - DNA, 15 bp, Homo sapiens
aatatttgaagaaat

SEQ ID NO: 8000 - DNA, 15 bp, Homo sapiens
aaatatttgaagaaa

SEQ ID NO: 8001 - DNA, 15 bp, Homo sapiens
aaaatatttgaagaa

SEQ ID NO: 8002 - DNA, 15 bp, Homo sapiens
aaaaatatttgaaga

SEQ ID NO: 8003 - DNA, 15 bp, Homo sapiens
aaaaaatatttgaag

SEQ ID NO: 8004 - DNA, 15 bp, Homo sapiens
gaaaaaatatttgaa

SEQ ID NO: 8005 - DNA, 15 bp, Homo sapiens
agaaaaaatatttga

SEQ ID NO: 8006 - DNA, 15 bp, Homo sapiens
aagaaaaaatatttg

SEQ ID NO: 8007 - DNA, 15 bp, Homo sapiens
aaagaaaaaatattt

SEQ ID NO: 8008 - DNA, 15 bp, Homo sapiens
gaaagaaaaaatatt

SEQ ID NO: 8009 - DNA, 15 bp, Homo sapiens
ggaaagaaaaaatat

SEQ ID NO: 8010 - DNA, 15 bp, Homo sapiens
tggaaagaaaaaata

SEQ ID NO: 8011 - DNA, 15 bp, Homo sapiens
atggaaagaaaaaat

SEQ ID NO: 8012 - DNA, 15 bp, Homo sapiens
aatggaaagaaaaaa

SEQ ID NO: 8013 - DNA, 15 bp, Homo sapiens
gaatggaaagaaaaa

SEQ ID NO: 8014 - DNA, 15 bp, Homo sapiens
agaatggaaagaaaa

SEQ ID NO: 8015 - DNA, 15 bp, Homo sapiens
gagaatggaaagaaa

SEQ ID NO: 8016 - DNA, 15 bp, Homo sapiens
agagaatggaaagaa

SEQ ID NO: 8017 - DNA, 15 bp, Homo sapiens
aagagaatggaaaga

SEQ ID NO: 8018 - DNA, 15 bp, Homo sapiens
caagagaatggaaag

SEQ ID NO: 8019 - DNA, 15 bp, Homo sapiens
gcaagagaatggaaa

SEQ ID NO: 8020 - DNA, 15 bp, Homo sapiens
agcaagagaatggaa

SEQ ID NO: 8021 - DNA, 15 bp, Homo sapiens
gagcaagagaatgga

SEQ ID NO: 8022 - DNA, 15 bp, Homo sapiens
ggagcaagagaatgg

SEQ ID NO: 8023 - DNA, 15 bp, Homo sapiens
aggagcaagagaatg

SEQ ID NO: 8024 - DNA, 15 bp, Homo sapiens
gaggagcaagagaat

SEQ ID NO: 8025 - DNA, 15 bp, Homo sapiens
agaggagcaagagaa

SEQ ID NO: 8026 - DNA, 15 bp, Homo sapiens
gagaggagcaagaga

SEQ ID NO: 8027 - DNA, 15 bp, Homo sapiens
ggagaggagcaagag

SEQ ID NO: 8028 - DNA, 15 bp, Homo sapiens
aggagaggagcaaga

SEQ ID NO: 8029 - DNA, 15 bp, Homo sapiens
aaggagaggagcaag

SEQ ID NO: 8030 - DNA, 15 bp, Homo sapiens
aaaggagaggagcaa

SEQ ID NO: 8031 - DNA, 15 bp, Homo sapiens
cgtgatagaagagct

SEQ ID NO: 8032 - DNA, 15 bp, Homo sapiens
acgtgatagaagagc

SEQ ID NO: 8033 - DNA, 15 bp, Homo sapiens
cacgtgatagaagag

SEQ ID NO: 8034 - DNA, 15 bp, Homo sapiens
acacgtgatagaaga

SEQ ID NO: 8035 - DNA, 15 bp, Homo sapiens
aacacgtgatagaag

SEQ ID NO: 8036 - DNA, 15 bp, Homo sapiens
gaacacgtgatagaa

SEQ ID NO: 8037 - DNA, 15 bp, Homo sapiens
cgaacacgtgataga

SEQ ID NO: 8038 - DNA, 15 bp, Homo sapiens
tcgaacacgtgatag

SEQ ID NO: 8039 - DNA, 15 bp, Homo sapiens
ttcgaacacgtgata

SEQ ID NO: 8040 - DNA, 15 bp, Homo sapiens
tttcgaacacgtgat

SEQ ID NO: 8041 - DNA, 15 bp, Homo sapiens
ctttcgaacacgtga

SEQ ID NO: 8042 - DNA, 15 bp, Homo sapiens
actttcgaacacgtg

SEQ ID NO: 8043 - DNA, 15 bp, Homo sapiens
cactttcgaacacgt

SEQ ID NO: 8044 - DNA, 15 bp, Homo sapiens
acactttcgaacacg

SEQ ID NO: 8045 - DNA, 15 bp, Homo sapiens
gacactttcgaacac

SEQ ID NO: 8046 - DNA, 15 bp, Homo sapiens
tgacactttcgaaca

SEQ ID NO: 8047 - DNA, 15 bp, Homo sapiens
ctgacactttcgaac

SEQ ID NO: 8048 - DNA, 15 bp, Homo sapiens
gctgacactttcgaa

SEQ ID NO: 8049 - DNA, 15 bp, Homo sapiens
ggctgacactttcga

SEQ ID NO: 8050 - DNA, 15 bp, Homo sapiens
tggctgacactttcg

SEQ ID NO: 8051 - DNA, 15 bp, Homo sapiens
ttggctgacactttc

SEQ ID NO: 8052 - DNA, 15 bp, Homo sapiens
attggctgacacttt

SEQ ID NO: 8053 - DNA, 15 bp, Homo sapiens
cattggctgacactt

SEQ ID NO: 8054 - DNA, 15 bp, Homo sapiens
tcattggctgacact

SEQ ID NO: 8055 - DNA, 15 bp, Homo sapiens
atcattggctgacac

SEQ ID NO: 8056 - DNA, 15 bp, Homo sapiens
catcattggctgaca

SEQ ID NO: 8057 - DNA, 15 bp, Homo sapiens
acatcattggctgac

SEQ ID NO: 8058 - DNA, 15 bp, Homo sapiens
gacatcattggctga

SEQ ID NO: 8059 - DNA, 15 bp, Homo sapiens
tgacatcattggctg

SEQ ID NO: 8060 - DNA, 15 bp, Homo sapiens
ttgacatcattggct

SEQ ID NO: 8061 - DNA, 15 bp, Homo sapiens
cttgacatcattggc

SEQ ID NO: 8062 - DNA, 15 bp, Homo sapiens
gcttgacatcattgg

SEQ ID NO: 8063 - DNA, 15 bp, Homo sapiens
ggcttgacatcattg

SEQ ID NO: 8064 - DNA, 15 bp, Homo sapiens
aggcttgacatcatt

SEQ ID NO: 8065 - DNA, 15 bp, Homo sapiens
gaggcttgacatcat

SEQ ID NO: 8066 - DNA, 15 bp, Homo sapiens
agaggcttgacatca

SEQ ID NO: 8067 - DNA, 15 bp, Homo sapiens
aagaggcttgacatc

SEQ ID NO: 8068 - DNA, 15 bp, Homo sapiens
caagaggcttgacat

SEQ ID NO: 8069 - DNA, 15 bp, Homo sapiens
tcaagaggcttgaca

SEQ ID NO: 8070 - DNA, 15 bp, Homo sapiens
ttcaagaggcttgac

SEQ ID NO: 8071 - DNA, 15 bp, Homo sapiens
gttcaagaggcttga

SEQ ID NO: 8072 - DNA, 15 bp, Homo sapiens
ggttcaagaggcttg

SEQ ID NO: 8073 - DNA, 15 bp, Homo sapiens
aggttcaagaggctt

SEQ ID NO: 8074 - DNA, 15 bp, Homo sapiens
caggttcaagaggct

SEQ ID NO: 8075 - DNA, 15 bp, Homo sapiens
gcaggttcaagaggc

SEQ ID NO: 8076 - DNA, 15 bp, Homo sapiens
ggcaggttcaagagg

SEQ ID NO: 8077 - DNA, 15 bp, Homo sapiens
aggcaggttcaagag

SEQ ID NO: 8078 - DNA, 15 bp, Homo sapiens
aaggcaggttcaaga

SEQ ID NO: 8079 - DNA, 15 bp, Homo sapiens
caaggcaggttcaag

SEQ ID NO: 8080 - DNA, 15 bp, Homo sapiens
ccaaggcaggttcaa

SEQ ID NO: 8081 - DNA, 15 bp, Homo sapiens
cccaaggcaggttca

SEQ ID NO: 8082 - DNA, 15 bp, Homo sapiens
gcccaaggcaggttc

SEQ ID NO: 8083 - DNA, 15 bp, Homo sapiens
ggcccaaggcaggtt

SEQ ID NO: 8084 - DNA, 15 bp, Homo sapiens
gggcccaaggcaggt

SEQ ID NO: 8085 - DNA, 15 bp, Homo sapiens
tgggcccaaggcagg

SEQ ID NO: 8086 - DNA, 15 bp, Homo sapiens
atgggcccaaggcag

SEQ ID NO: 8087 - DNA, 15 bp, Homo sapiens
aatgggcccaaggca

SEQ ID NO: 8088 - DNA, 15 bp, Homo sapiens
gaatgggcccaaggc

SEQ ID NO: 8089 - DNA, 15 bp, Homo sapiens
tgaatgggcccaagg

SEQ ID NO: 8090 - DNA, 15 bp, Homo sapiens
gtgaatgggcccaag

SEQ ID NO: 8091 - DNA, 15 bp, Homo sapiens
cgtgaatgggcccaa

SEQ ID NO: 8092 - DNA, 15 bp, Homo sapiens
gcgtgaatgggccca

SEQ ID NO: 8093 - DNA, 15 bp, Homo sapiens
agcgtgaatgggccc

SEQ ID NO: 8094 - DNA, 15 bp, Homo sapiens
gagcgtgaatgggcc

SEQ ID NO: 8095 - DNA, 15 bp, Homo sapiens
agagcgtgaatgggc

SEQ ID NO: 8096 - DNA, 15 bp, Homo sapiens
gagagcgtgaatggg

SEQ ID NO: 8097 - DNA, 15 bp, Homo sapiens
ggagagcgtgaatgg

SEQ ID NO: 8098 - DNA, 15 bp, Homo sapiens
tggagagcgtgaatg

SEQ ID NO: 8099 - DNA, 15 bp, Homo sapiens
ctggagagcgtgaat

SEQ ID NO: 8100 - DNA, 15 bp, Homo sapiens
tctggagagcgtgaa

SEQ ID NO: 8101 - DNA, 15 bp, Homo sapiens
ctctggagagcgtga

SEQ ID NO: 8102 - DNA, 15 bp, Homo sapiens
actctggagagcgtg

SEQ ID NO: 8103 - DNA, 15 bp, Homo sapiens
gactctggagagcgt

SEQ ID NO: 8104 - DNA, 15 bp, Homo sapiens
ggactctggagagcg

SEQ ID NO: 8105 - DNA, 15 bp, Homo sapiens
gggactctggagagc

SEQ ID NO: 8106 - DNA, 15 bp, Homo sapiens
tgggactctggagag

SEQ ID NO: 8107 - DNA, 15 bp, Homo sapiens
atgggactctggaga

SEQ ID NO: 8108 - DNA, 15 bp, Homo sapiens
catgggactctggag

SEQ ID NO: 8109 - DNA, 15 bp, Homo sapiens
ccatgggactctgga

SEQ ID NO: 8110 - DNA, 15 bp, Homo sapiens
cccatgggactctgg

SEQ ID NO: 8111 - DNA, 15 bp, Homo sapiens
acccatgggactctg

SEQ ID NO: 8112 - DNA, 15 bp, Homo sapiens
gacccatgggactct

SEQ ID NO: 8113 - DNA, 15 bp, Homo sapiens
ggacccatgggactc

SEQ ID NO: 8114 - DNA, 15 bp, Homo sapiens
cggacccatgggact

SEQ ID NO: 8115 - DNA, 15 bp, Homo sapiens
gcggacccatgggac

SEQ ID NO: 8116 - DNA, 15 bp, Homo sapiens
tgcggacccatggga

SEQ ID NO: 8117 - DNA, 15 bp, Homo sapiens
gtgcggacccatggg

SEQ ID NO: 8118 - DNA, 15 bp, Homo sapiens
tgtgcggacccatgg

SEQ ID NO: 8119 - DNA, 15 bp, Homo sapiens
gtgtgcggacccatg

SEQ ID NO: 8120 - DNA, 15 bp, Homo sapiens
ggtgtgcggacccat

SEQ ID NO: 8121 - DNA, 15 bp, Homo sapiens
aggtgtgcggaccca

SEQ ID NO: 8122 - DNA, 15 bp, Homo sapiens
caggtgtgcggaccc

SEQ ID NO: 8123 - DNA, 15 bp, Homo sapiens
ccaggtgtgcggacc

SEQ ID NO: 8124 - DNA, 15 bp, Homo sapiens
cccaggtgtgcggac

SEQ ID NO: 8125 - DNA, 15 bp, Homo sapiens
acccaggtgtgcgga

SEQ ID NO: 8126 - DNA, 15 bp, Homo sapiens
tacccaggtgtgcgg

SEQ ID NO: 8127 - DNA, 15 bp, Homo sapiens
ctacccaggtgtgcg

SEQ ID NO: 8128 - DNA, 15 bp, Homo sapiens
cctacccaggtgtgc

SEQ ID NO: 8129 - DNA, 15 bp, Homo sapiens
gcctacccaggtgtg

SEQ ID NO: 8130 - DNA, 15 bp, Homo sapiens
ggcctacccaggtgt

SEQ ID NO: 8131 - DNA, 15 bp, Homo sapiens
tggcctacccaggtg

SEQ ID NO: 8132 - DNA, 15 bp, Homo sapiens
ttggcctacccaggt

SEQ ID NO: 8133 - DNA, 15 bp, Homo sapiens
cttggcctacccagg

SEQ ID NO: 8134 - DNA, 15 bp, Homo sapiens
gcttggcctacccag

SEQ ID NO: 8135 - DNA, 15 bp, Homo sapiens
ggcttggcctaccca

SEQ ID NO: 8136 - DNA, 15 bp, Homo sapiens
tggcttggcctaccc

SEQ ID NO: 8137 - DNA, 15 bp, Homo sapiens
gtggcttggcctacc

SEQ ID NO: 8138 - DNA, 15 bp, Homo sapiens
ggtggcttggcctac

SEQ ID NO: 8139 - DNA, 15 bp, Homo sapiens
aggtggcttggccta

SEQ ID NO: 8140 - DNA, 15 bp, Homo sapiens
aaggtggcttggcct

SEQ ID NO: 8141 - DNA, 15 bp, Homo sapiens
caaggtggcttggcc

SEQ ID NO: 8142 - DNA, 15 bp, Homo sapiens
acaaggtggcttggc

SEQ ID NO: 8143 - DNA, 15 bp, Homo sapiens
gacaaggtggcttgg

SEQ ID NO: 8144 - DNA, 15 bp, Homo sapiens
ggacaaggtggcttg

SEQ ID NO: 8145 - DNA, 15 bp, Homo sapiens
aggacaaggtggctt

SEQ ID NO: 8146 - DNA, 15 bp, Homo sapiens
gaggacaaggtggct

SEQ ID NO: 8147 - DNA, 15 bp, Homo sapiens
cgaggacaaggtggc

SEQ ID NO: 8148 - DNA, 15 bp, Homo sapiens
ccgaggacaaggtgg

SEQ ID NO: 8149 - DNA, 15 bp, Homo sapiens
tccgaggacaaggtg

SEQ ID NO: 8150 - DNA, 15 bp, Homo sapiens
atccgaggacaaggt

SEQ ID NO: 8151 - DNA, 15 bp, Homo sapiens
catccgaggacaagg

SEQ ID NO: 8152 - DNA, 15 bp, Homo sapiens
acatccgaggacaag

SEQ ID NO: 8153 - DNA, 15 bp, Homo sapiens
aacatccgaggacaa

SEQ ID NO: 8154 - DNA, 15 bp, Homo sapiens
aaacatccgaggaca

SEQ ID NO: 8155 - DNA, 15 bp, Homo sapiens
caaacatccgaggac

SEQ ID NO: 8156 - DNA, 15 bp, Homo sapiens
gcaaacatccgagga

SEQ ID NO: 8157 - DNA, 15 bp, Homo sapiens
agcaaacatccgagg

SEQ ID NO: 8158 - DNA, 15 bp, Homo sapiens
aagcaaacatccgag

SEQ ID NO: 8159 - DNA, 15 bp, Homo sapiens
gaagcaaacatccga

SEQ ID NO: 8160 - DNA, 15 bp, Homo sapiens
agaagcaaacatccg

SEQ ID NO: 8161 - DNA, 15 bp, Homo sapiens
aagaagcaaacatcc

SEQ ID NO: 8162 - DNA, 15 bp, Homo sapiens
aaagaagcaaacatc

SEQ ID NO: 8163 - DNA, 15 bp, Homo sapiens
gaaagaagcaaacat

SEQ ID NO: 8164 - DNA, 15 bp, Homo sapiens
tgaaagaagcaaaca

SEQ ID NO: 8165 - DNA, 15 bp, Homo sapiens
atgaaagaagcaaac

SEQ ID NO: 8166 - DNA, 15 bp, Homo sapiens
catgaaagaagcaaa

SEQ ID NO: 8167 - DNA, 15 bp, Homo sapiens
ccatgaaagaagcaa

SEQ ID NO: 8168 - DNA, 15 bp, Homo sapiens
cccatgaaagaagca

SEQ ID NO: 8169 - DNA, 15 bp, Homo sapiens
ccccatgaaagaagc

SEQ ID NO: 8170 - DNA, 15 bp, Homo sapiens
cccccatgaaagaag

SEQ ID NO: 8171 - DNA, 15 bp, Homo sapiens
gcccccatgaaagaa

SEQ ID NO: 8172 - DNA, 15 bp, Homo sapiens
tgcccccatgaaaga

SEQ ID NO: 8173 - DNA, 15 bp, Homo sapiens
ctgcccccatgaaag

SEQ ID NO: 8174 - DNA, 15 bp, Homo sapiens
gctgcccccatgaaa

SEQ ID NO: 8175 - DNA, 15 bp, Homo sapiens
ggctgcccccatgaa

SEQ ID NO: 8176 - DNA, 15 bp, Homo sapiens
aggctgcccccatga

SEQ ID NO: 8177 - DNA, 15 bp, Homo sapiens
aaggctgcccccatg

SEQ ID NO: 8178 - DNA, 15 bp, Homo sapiens
gaaggctgcccccat

SEQ ID NO: 8179 - DNA, 15 bp, Homo sapiens
tgaaggctgccccca

SEQ ID NO: 8180 - DNA, 15 bp, Homo sapiens
atgaaggctgccccc

SEQ ID NO: 8181 - DNA, 15 bp, Homo sapiens
catgaaggctgcccc

SEQ ID NO: 8182 - DNA, 15 bp, Homo sapiens
gcatgaaggctgccc

SEQ ID NO: 8183 - DNA, 15 bp, Homo sapiens
tgcatgaaggctgcc

SEQ ID NO: 8184 - DNA, 15 bp, Homo sapiens
ttgcatgaaggctgc

SEQ ID NO: 8185 - DNA, 15 bp, Homo sapiens
gttgcatgaaggctg

SEQ ID NO: 8186 - DNA, 15 bp, Homo sapiens
ggttgcatgaaggct

SEQ ID NO: 8187 - DNA, 15 bp, Homo sapiens
tggttgcatgaaggc

SEQ ID NO: 8188 - DNA, 15 bp, Homo sapiens
ttggttgcatgaagg

SEQ ID NO: 8189 - DNA, 15 bp, Homo sapiens
tttggttgcatgaag

SEQ ID NO: 8190 - DNA, 15 bp, Homo sapiens
ctttggttgcatgaa

SEQ ID NO: 8191 - DNA, 15 bp, Homo sapiens
actttggttgcatga

SEQ ID NO: 8192 - DNA, 15 bp, Homo sapiens
tactttggttgcatg

SEQ ID NO: 8193 - DNA, 15 bp, Homo sapiens
atactttggttgcat

SEQ ID NO: 8194 - DNA, 15 bp, Homo sapiens
catactttggttgca

SEQ ID NO: 8195 - DNA, 15 bp, Homo sapiens
tcatactttggttgc

SEQ ID NO: 8196 - DNA, 15 bp, Homo sapiens
ttcatactttggttg

SEQ ID NO: 8197 - DNA, 15 bp, Homo sapiens
tttcatactttggtt

SEQ ID NO: 8198 - DNA, 15 bp, Homo sapiens
atttcatactttggt

SEQ ID NO: 8199 - DNA, 15 bp, Homo sapiens
tatttcatactttgg

SEQ ID NO: 8200 - DNA, 15 bp, Homo sapiens
ttatttcatactttg

SEQ ID NO: 8201 - DNA, 15 bp, Homo sapiens
gttatttcatacttt

SEQ ID NO: 8202 - DNA, 15 bp, Homo sapiens
ggttatttcatactt

SEQ ID NO: 8203 - DNA, 15 bp, Homo sapiens
tggttatttcatact

SEQ ID NO: 8204 - DNA, 15 bp, Homo sapiens
atggttatttcatac

SEQ ID NO: 8205 - DNA, 15 bp, Homo sapiens
tatggttatttcata

SEQ ID NO: 8206 - DNA, 15 bp, Homo sapiens
ctatggttatttcat

SEQ ID NO: 8207 - DNA, 15 bp, Homo sapiens
actatggttatttca

SEQ ID NO: 8208 - DNA, 15 bp, Homo sapiens
tactatggttatttc

SEQ ID NO: 8209 - DNA, 15 bp, Homo sapiens
ttactatggttattt

SEQ ID NO: 8210 - DNA, 15 bp, Homo sapiens
cttactatggttatt

SEQ ID NO: 8211 - DNA, 15 bp, Homo sapiens
ccttactatggttat

SEQ ID NO: 8212 - DNA, 15 bp, Homo sapiens
tccttactatggtta

SEQ ID NO: 8213 - DNA, 15 bp, Homo sapiens
ttccttactatggtt

SEQ ID NO: 8214 - DNA, 15 bp, Homo sapiens
tttccttactatggt

SEQ ID NO: 8215 - DNA, 15 bp, Homo sapiens
ttttccttactatgg

SEQ ID NO: 8216 - DNA, 15 bp, Homo sapiens
cttttccttactatg

SEQ ID NO: 8217 - DNA, 15 bp, Homo sapiens
ccttttccttactat

SEQ ID NO: 8218 - DNA, 15 bp, Homo sapiens
tccttttccttacta

SEQ ID NO: 8219 - DNA, 15 bp, Homo sapiens
atccttttccttact

SEQ ID NO: 8220 - DNA, 15 bp, Homo sapiens
catccttttccttac

SEQ ID NO: 8221 - DNA, 15 bp, Homo sapiens
ccatccttttcctta

SEQ ID NO: 8222 - DNA, 15 bp, Homo sapiens
accatccttttcctt

SEQ ID NO: 8223 - DNA, 15 bp, Homo sapiens
gaccatccttttcct

SEQ ID NO: 8224 - DNA, 15 bp, Homo sapiens
tgaccatccttttcc

SEQ ID NO: 8225 - DNA, 15 bp, Homo sapiens
atgaccatccttttc

SEQ ID NO: 8226 - DNA, 15 bp, Homo sapiens
gatgaccatcctttt

SEQ ID NO: 8227 - DNA, 15 bp, Homo sapiens
tgatgaccatccttt

SEQ ID NO: 8228 - DNA, 15 bp, Homo sapiens
gtgatgaccatcctt

SEQ ID NO: 8229 - DNA, 15 bp, Homo sapiens
agtgatgaccatcct

SEQ ID NO: 8230 - DNA, 15 bp, Homo sapiens
gagtgatgaccatcc

SEQ ID NO: 8231 - DNA, 15 bp, Homo sapiens
agagtgatgaccatc

SEQ ID NO: 8232 - DNA, 15 bp, Homo sapiens
aagagtgatgaccat

SEQ ID NO: 8233 - DNA, 15 bp, Homo sapiens
gaagagtgatgacca

SEQ ID NO: 8234 - DNA, 15 bp, Homo sapiens
agaagagtgatgacc

SEQ ID NO: 8235 - DNA, 15 bp, Homo sapiens
gagaagagtgatgac

SEQ ID NO: 8236 - DNA, 15 bp, Homo sapiens
tgagaagagtgatga

SEQ ID NO: 8237 - DNA, 15 bp, Homo sapiens
gtgagaagagtgatg

SEQ ID NO: 8238 - DNA, 15 bp, Homo sapiens
ggtgagaagagtgat

SEQ ID NO: 8239 - DNA, 15 bp, Homo sapiens
aggtgagaagagtga

SEQ ID NO: 8240 - DNA, 15 bp, Homo sapiens
caggtgagaagagtg

SEQ ID NO: 8241 - DNA, 15 bp, Homo sapiens
ccaggtgagaagagt

SEQ ID NO: 8242 - DNA, 15 bp, Homo sapiens
accaggtgagaagag

SEQ ID NO: 8243 - DNA, 15 bp, Homo sapiens
caccaggtgagaaga

SEQ ID NO: 8244 - DNA, 15 bp, Homo sapiens
ccaccaggtgagaag

SEQ ID NO: 8245 - DNA, 15 bp, Homo sapiens
tccaccaggtgagaa

SEQ ID NO: 8246 - DNA, 15 bp, Homo sapiens
ttccaccaggtgaga

SEQ ID NO: 8247 - DNA, 15 bp, Homo sapiens
gttccaccaggtgag

SEQ ID NO: 8248 - DNA, 15 bp, Homo sapiens
agttccaccaggtga

SEQ ID NO: 8249 - DNA, 15 bp, Homo sapiens
cagttccaccaggtg

SEQ ID NO: 8250 - DNA, 15 bp, Homo sapiens
acagttccaccaggt

SEQ ID NO: 8251 - DNA, 15 bp, Homo sapiens
tacagttccaccagg

SEQ ID NO: 8252 - DNA, 15 bp, Homo sapiens
ctacagttccaccag

SEQ ID NO: 8253 - DNA, 15 bp, Homo sapiens
cctacagttccacca

SEQ ID NO: 8254 - DNA, 15 bp, Homo sapiens
ccctacagttccacc

SEQ ID NO: 8255 - DNA, 15 bp, Homo sapiens
tccctacagttccac

SEQ ID NO: 8256 - DNA, 15 bp, Homo sapiens
ctccctacagttcca

SEQ ID NO: 8257 - DNA, 15 bp, Homo sapiens
tctccctacagttcc

SEQ ID NO: 8258 - DNA, 15 bp, Homo sapiens
ttctccctacagttc

SEQ ID NO: 8259 - DNA, 15 bp, Homo sapiens
tttctccctacagtt

SEQ ID NO: 8260 - DNA, 15 bp, Homo sapiens
ctttctccctacagt

SEQ ID NO: 8261 - DNA, 15 bp, Homo sapiens
gctttctccctacag

SEQ ID NO: 8262 - DNA, 15 bp, Homo sapiens
tgctttctccctaca

SEQ ID NO: 8263 - DNA, 15 bp, Homo sapiens
ctgctttctccctac

SEQ ID NO: 8264 - DNA, 15 bp, Homo sapiens
tctgctttctcccta

SEQ ID NO: 8265 - DNA, 15 bp, Homo sapiens
ttctgctttctccct

SEQ ID NO: 8266 - DNA, 15 bp, Homo sapiens
tttctgctttctccc

SEQ ID NO: 8267 - DNA, 15 bp, Homo sapiens
gtttctgctttctcc

SEQ ID NO: 8268 - DNA, 15 bp, Homo sapiens
tgtttctgctttctc

SEQ ID NO: 8269 - DNA, 15 bp, Homo sapiens
ttgtttctgctttct

SEQ ID NO: 8270 - DNA, 15 bp, Homo sapiens
cttgtttctgctttc

SEQ ID NO: 8271 - DNA, 15 bp, Homo sapiens
tcttgtttctgcttt

SEQ ID NO: 8272 - DNA, 15 bp, Homo sapiens
gtcttgtttctgctt

SEQ ID NO: 8273 - DNA, 15 bp, Homo sapiens
tgtcttgtttctgct

SEQ ID NO: 8274 - DNA, 15 bp, Homo sapiens
ctgtcttgtttctgc

SEQ ID NO: 8275 - DNA, 15 bp, Homo sapiens
tctgtcttgtttctg

SEQ ID NO: 8276 - DNA, 15 bp, Homo sapiens
ttctgtcttgtttct

SEQ ID NO: 8277 - DNA, 15 bp, Homo sapiens
tttctgtcttgtttc

SEQ ID NO: 8278 - DNA, 15 bp, Homo sapiens
ttttctgtcttgttt

SEQ ID NO: 8279 - DNA, 15 bp, Homo sapiens
gttttctgtcttgtt

SEQ ID NO: 8280 - DNA, 15 bp, Homo sapiens
agttttctgtcttgt

SEQ ID NO: 8281 - DNA, 15 bp, Homo sapiens
cagttttctgtcttg

SEQ ID NO: 8282 - DNA, 15 bp, Homo sapiens
ccagttttctgtctt

SEQ ID NO: 8283 - DNA, 15 bp, Homo sapiens
accagttttctgtct

SEQ ID NO: 8284 - DNA, 15 bp, Homo sapiens
aaccagttttctgtc

SEQ ID NO: 8285 - DNA, 15 bp, Homo sapiens
taaccagttttctgt

SEQ ID NO: 8286 - DNA, 15 bp, Homo sapiens
ctaaccagttttctg

SEQ ID NO: 8287 - DNA, 15 bp, Homo sapiens
cctaaccagttttct

SEQ ID NO: 8288 - DNA, 15 bp, Homo sapiens
ccctaaccagttttc

SEQ ID NO: 8289 - DNA, 15 bp, Homo sapiens
gccctaaccagtttt

SEQ ID NO: 8290 - DNA, 15 bp, Homo sapiens
agccctaaccagttt

SEQ ID NO: 8291 - DNA, 15 bp, Homo sapiens
aagccctaaccagtt

SEQ ID NO: 8292 - DNA, 15 bp, Homo sapiens
aaagccctaaccagt

SEQ ID NO: 8293 - DNA, 15 bp, Homo sapiens
gaaagccctaaccag

SEQ ID NO: 8294 - DNA, 15 bp, Homo sapiens
agaaagccctaacca

SEQ ID NO: 8295 - DNA, 15 bp, Homo sapiens
aagaaagccctaacc

SEQ ID NO: 8296 - DNA, 15 bp, Homo sapiens
aaagaaagccctaac

SEQ ID NO: 8297 - DNA, 15 bp, Homo sapiens
gaaagaaagccctaa

SEQ ID NO: 8298 - DNA, 15 bp, Homo sapiens
tgaaagaaagcccta

SEQ ID NO: 8299 - DNA, 15 bp, Homo sapiens
gtgaaagaaagccct

SEQ ID NO: 8300 - DNA, 15 bp, Homo sapiens
ggtgaaagaaagccc

SEQ ID NO: 8301 - DNA, 15 bp, Homo sapiens
cggtgaaagaaagcc

SEQ ID NO: 8302 - DNA, 15 bp, Homo sapiens
ccggtgaaagaaagc

SEQ ID NO: 8303 - DNA, 15 bp, Homo sapiens
cccggtgaaagaaag

SEQ ID NO: 8304 - DNA, 15 bp, Homo sapiens
tcccggtgaaagaaa

SEQ ID NO: 8305 - DNA, 15 bp, Homo sapiens
atcccggtgaaagaa

SEQ ID NO: 8306 - DNA, 15 bp, Homo sapiens
catcccggtgaaaga

SEQ ID NO: 8307 - DNA, 15 bp, Homo sapiens
gcatcccggtgaaag

SEQ ID NO: 8308 - DNA, 15 bp, Homo sapiens
ggcatcccggtgaaa

SEQ ID NO: 8309 - DNA, 15 bp, Homo sapiens
tggcatcccggtgaa

SEQ ID NO: 8310 - DNA, 15 bp, Homo sapiens
atggcatcccggtga

SEQ ID NO: 8311 - DNA, 15 bp, Homo sapiens
catggcatcccggtg

SEQ ID NO: 8312 - DNA, 15 bp, Homo sapiens
acatggcatcccggt

SEQ ID NO: 8313 - DNA, 15 bp, Homo sapiens
cacatggcatcccgg

SEQ ID NO: 8314 - DNA, 15 bp, Homo sapiens
ccacatggcatcccg

SEQ ID NO: 8315 - DNA, 15 bp, Homo sapiens
gccacatggcatccc

SEQ ID NO: 8316 - DNA, 15 bp, Homo sapiens
ggccacatggcatcc

SEQ ID NO: 8317 - DNA, 15 bp, Homo sapiens
gggccacatggcatc

SEQ ID NO: 8318 - DNA, 15 bp, Homo sapiens
tgggccacatggcat

SEQ ID NO: 8319 - DNA, 15 bp, Homo sapiens
atgggccacatggca

SEQ ID NO: 8320 - DNA, 15 bp, Homo sapiens
gatgggccacatggc

SEQ ID NO: 8321 - DNA, 15 bp, Homo sapiens
agatgggccacatgg

SEQ ID NO: 8322 - DNA, 15 bp, Homo sapiens
cagatgggccacatg

SEQ ID NO: 8323 - DNA, 15 bp, Homo sapiens
tcagatgggccacat

SEQ ID NO: 8324 - DNA, 15 bp, Homo sapiens
atcagatgggccaca

SEQ ID NO: 8325 - DNA, 15 bp, Homo sapiens
aatcagatgggccac

SEQ ID NO: 8326 - DNA, 15 bp, Homo sapiens
caatcagatgggcca

SEQ ID NO: 8327 - DNA, 15 bp, Homo sapiens
acaatcagatgggcc

SEQ ID NO: 8328 - DNA, 15 bp, Homo sapiens
tacaatcagatgggc

SEQ ID NO: 8329 - DNA, 15 bp, Homo sapiens
ttacaatcagatggg

SEQ ID NO: 8330 - DNA, 15 bp, Homo sapiens
attacaatcagatgg

SEQ ID NO: 8331 - DNA, 15 bp, Homo sapiens
aattacaatcagatg

SEQ ID NO: 8332 - DNA, 15 bp, Homo sapiens
gaattacaatcagat

SEQ ID NO: 8333 - DNA, 15 bp, Homo sapiens
ggaattacaatcaga

SEQ ID NO: 8334 - DNA, 15 bp, Homo sapiens
tggaattacaatcag

SEQ ID NO: 8335 - DNA, 15 bp, Homo sapiens
ctggaattacaatca

SEQ ID NO: 8336 - DNA, 15 bp, Homo sapiens
cctggaattacaatc

SEQ ID NO: 8337 - DNA, 15 bp, Homo sapiens
gcctggaattacaat

SEQ ID NO: 8338 - DNA, 15 bp, Homo sapiens
ggcctggaattacaa

SEQ ID NO: 8339 - DNA, 15 bp, Homo sapiens
tggcctggaattaca

SEQ ID NO: 8340 - DNA, 15 bp, Homo sapiens
atggcctggaattac

SEQ ID NO: 8341 - DNA, 15 bp, Homo sapiens
aatggcctggaatta

SEQ ID NO: 8342 - DNA, 15 bp, Homo sapiens
gaatggcctggaatt

SEQ ID NO: 8343 - DNA, 15 bp, Homo sapiens
agaatggcctggaat

SEQ ID NO: 8344 - DNA, 15 bp, Homo sapiens
cagaatggcctggaa

SEQ ID NO: 8345 - DNA, 15 bp, Homo sapiens
gcagaatggcctgga

SEQ ID NO: 8346 - DNA, 15 bp, Homo sapiens
tgcagaatggcctgg

SEQ ID NO: 8347 - DNA, 15 bp, Homo sapiens
ctgcagaatggcctg

SEQ ID NO: 8348 - DNA, 15 bp, Homo sapiens
cctgcagaatggcct

SEQ ID NO: 8349 - DNA, 15 bp, Homo sapiens
ccctgcagaatggcc

SEQ ID NO: 8350 - DNA, 15 bp, Homo sapiens
accctgcagaatggc

SEQ ID NO: 8351 - DNA, 15 bp, Homo sapiens
gaccctgcagaatgg

SEQ ID NO: 8352 - DNA, 15 bp, Homo sapiens
tgaccctgcagaatg

SEQ ID NO: 8353 - DNA, 15 bp, Homo sapiens
ttgaccctgcagaat

SEQ ID NO: 8354 - DNA, 15 bp, Homo sapiens
cttgaccctgcagaa

SEQ ID NO: 8355 - DNA, 15 bp, Homo sapiens
ccttgaccctgcaga

SEQ ID NO: 8356 - DNA, 15 bp, Homo sapiens
accttgaccctgcag

SEQ ID NO: 8357 - DNA, 15 bp, Homo sapiens
aaccttgaccctgca

SEQ ID NO: 8358 - DNA, 15 bp, Homo sapiens
aaaccttgaccctgc

SEQ ID NO: 8359 - DNA, 15 bp, Homo sapiens
aaaaccttgaccctg

SEQ ID NO: 8360 - DNA, 15 bp, Homo sapiens
aaaaaccttgaccct

SEQ ID NO: 8361 - DNA, 15 bp, Homo sapiens
aaaaaaccttgaccc

SEQ ID NO: 8362 - DNA, 15 bp, Homo sapiens
aaaaaaaccttgacc

SEQ ID NO: 8363 - DNA, 15 bp, Homo sapiens
taaaaaaaccttgac

SEQ ID NO: 8364 - DNA, 15 bp, Homo sapiens
ataaaaaaaccttga

SEQ ID NO: 8365 - DNA, 15 bp, Homo sapiens
cataaaaaaaccttg

SEQ ID NO: 8366 - DNA, 15 bp, Homo sapiens
acataaaaaaacctt

SEQ ID NO: 8367 - DNA, 15 bp, Homo sapiens
gacataaaaaaacct

SEQ ID NO: 8368 - DNA, 15 bp, Homo sapiens
agacataaaaaaacc

SEQ ID NO: 8369 - DNA, 15 bp, Homo sapiens
aagacataaaaaaac

SEQ ID NO: 8370 - DNA, 15 bp, Homo sapiens
caagacataaaaaaa

SEQ ID NO: 8371 - DNA, 15 bp, Homo sapiens
ccaagacataaaaaa

SEQ ID NO: 8372 - DNA, 15 bp, Homo sapiens
accaagacataaaaa

SEQ ID NO: 8373 - DNA, 15 bp, Homo sapiens
caccaagacataaaa

SEQ ID NO: 8374 - DNA, 15 bp, Homo sapiens
tcaccaagacataaa

SEQ ID NO: 8375 - DNA, 15 bp, Homo sapiens
atcaccaagacataa

SEQ ID NO: 8376 - DNA, 15 bp, Homo sapiens
tatcaccaagacata

SEQ ID NO: 8377 - DNA, 15 bp, Homo sapiens
ttatcaccaagacat

SEQ ID NO: 8378 - DNA, 15 bp, Homo sapiens
tttatcaccaagaca

SEQ ID NO: 8379 - DNA, 15 bp, Homo sapiens
gtttatcaccaagac

SEQ ID NO: 8380 - DNA, 15 bp, Homo sapiens
agtttatcaccaaga

SEQ ID NO: 8381 - DNA, 15 bp, Homo sapiens
gagtttatcaccaag

SEQ ID NO: 8382 - DNA, 15 bp, Homo sapiens
ggagtttatcaccaa

SEQ ID NO: 8383 - DNA, 15 bp, Homo sapiens
tggagtttatcacca

SEQ ID NO: 8384 - DNA, 15 bp, Homo sapiens
ctggagtttatcacc

SEQ ID NO: 8385 - DNA, 15 bp, Homo sapiens
gctggagtttatcac

SEQ ID NO: 8386 - DNA, 15 bp, Homo sapiens
agctggagtttatca

SEQ ID NO: 8387 - DNA, 15 bp, Homo sapiens
cagctggagtttatc

SEQ ID NO: 8388 - DNA, 15 bp, Homo sapiens
gcagctggagtttat

SEQ ID NO: 8389 - DNA, 15 bp, Homo sapiens
tgcagctggagttta

SEQ ID NO: 8390 - DNA, 15 bp, Homo sapiens
gtgcagctggagttt

SEQ ID NO: 8391 - DNA, 15 bp, Homo sapiens
ggtgcagctggagtt

SEQ ID NO: 8392 - DNA, 15 bp, Homo sapiens
tggtgcagctggagt

SEQ ID NO: 8393 - DNA, 15 bp, Homo sapiens
ctggtgcagctggag

SEQ ID NO: 8394 - DNA, 15 bp, Homo sapiens
tctggtgcagctgga

SEQ ID NO: 8395 - DNA, 15 bp, Homo sapiens
gtctggtgcagctgg

SEQ ID NO: 8396 - DNA, 15 bp, Homo sapiens
tgtctggtgcagctg

SEQ ID NO: 8397 - DNA, 15 bp, Homo sapiens
gtgtctggtgcagct

SEQ ID NO: 8398 - DNA, 15 bp, Homo sapiens
tgtgtctggtgcagc

SEQ ID NO: 8399 - DNA, 15 bp, Homo sapiens
ttgtgtctggtgcag

SEQ ID NO: 8400 - DNA, 15 bp, Homo sapiens
tttgtgtctggtgca

SEQ ID NO: 8401 - DNA, 15 bp, Homo sapiens
atttgtgtctggtgc

SEQ ID NO: 8402 - DNA, 15 bp, Homo sapiens
gatttgtgtctggtg

SEQ ID NO: 8403 - DNA, 15 bp, Homo sapiens
tgatttgtgtctggt

SEQ ID NO: 8404 - DNA, 15 bp, Homo sapiens
ctgatttgtgtctgg

SEQ ID NO: 8405 - DNA, 15 bp, Homo sapiens
actgatttgtgtctg

SEQ ID NO: 8406 - DNA, 15 bp, Homo sapiens
cactgatttgtgtct

SEQ ID NO: 8407 - DNA, 15 bp, Homo sapiens
acactgatttgtgtc

SEQ ID NO: 8408 - DNA, 15 bp, Homo sapiens
gacactgatttgtgt

SEQ ID NO: 8409 - DNA, 15 bp, Homo sapiens
tgacactgatttgtg

SEQ ID NO: 8410 - DNA, 15 bp, Homo sapiens
ctgacactgatttgt

SEQ ID NO: 8411 - DNA, 15 bp, Homo sapiens
actgacactgatttg

SEQ ID NO: 8412 - DNA, 15 bp, Homo sapiens
tactgacactgattt

SEQ ID NO: 8413 - DNA, 15 bp, Homo sapiens
ctactgacactgatt

SEQ ID NO: 8414 - DNA, 15 bp, Homo sapiens
actactgacactgat

SEQ ID NO: 8415 - DNA, 15 bp, Homo sapiens
cactactgacactga

SEQ ID NO: 8416 - DNA, 15 bp, Homo sapiens
acactactgacactg

SEQ ID NO: 8417 - DNA, 15 bp, Homo sapiens
cacactactgacact

SEQ ID NO: 8418 - DNA, 15 bp, Homo sapiens
gcacactactgacac

SEQ ID NO: 8419 - DNA, 15 bp, Homo sapiens
agcacactactgaca

SEQ ID NO: 8420 - DNA, 15 bp, Homo sapiens
cagcacactactgac

SEQ ID NO: 8421 - DNA, 15 bp, Homo sapiens
acagcacactactga

SEQ ID NO: 8422 - DNA, 15 bp, Homo sapiens
tacagcacactactg

SEQ ID NO: 8423 - DNA, 15 bp, Homo sapiens
atacagcacactact

SEQ ID NO: 8424 - DNA, 15 bp, Homo sapiens
catacagcacactac

SEQ ID NO: 8425 - DNA, 15 bp, Homo sapiens
acatacagcacacta

SEQ ID NO: 8426 - DNA, 15 bp, Homo sapiens
cacatacagcacact

SEQ ID NO: 8427 - DNA, 15 bp, Homo sapiens
ccacatacagcacac

SEQ ID NO: 8428 - DNA, 15 bp, Homo sapiens
accacatacagcaca

SEQ ID NO: 8429 - DNA, 15 bp, Homo sapiens
aaccacatacagcac

SEQ ID NO: 8430 - DNA, 15 bp, Homo sapiens
aaaccacatacagca

SEQ ID NO: 8431 - DNA, 15 bp, Homo sapiens
taaaccacatacagc

SEQ ID NO: 8432 - DNA, 15 bp, Homo sapiens
ttaaaccacatacag

SEQ ID NO: 8433 - DNA, 15 bp, Homo sapiens
attaaaccacataca

SEQ ID NO: 8434 - DNA, 15 bp, Homo sapiens
tattaaaccacatac

SEQ ID NO: 8435 - DNA, 15 bp, Homo sapiens
atattaaaccacata

SEQ ID NO: 8436 - DNA, 15 bp, Homo sapiens
tatattaaaccacat

SEQ ID NO: 8437 - DNA, 15 bp, Homo sapiens
ttatattaaaccaca

SEQ ID NO: 8438 - DNA, 15 bp, Homo sapiens
tttatattaaaccac

SEQ ID NO: 8439 - DNA, 15 bp, Homo sapiens
gtttatattaaacca

SEQ ID NO: 8440 - DNA, 15 bp, Homo sapiens
ggtttatattaaacc

SEQ ID NO: 8441 - DNA, 15 bp, Homo sapiens
tggtttatattaaac

SEQ ID NO: 8442 - DNA, 15 bp, Homo sapiens
ctggtttatattaaa

SEQ ID NO: 8443 - DNA, 15 bp, Homo sapiens
tctggtttatattaa

SEQ ID NO: 8444 - DNA, 15 bp, Homo sapiens
ctctggtttatatta

SEQ ID NO: 8445 - DNA, 15 bp, Homo sapiens
tctctggtttatatt

SEQ ID NO: 8446 - DNA, 15 bp, Homo sapiens
gtctctggtttatat

SEQ ID NO: 8447 - DNA, 15 bp, Homo sapiens
tgtctctggtttata

SEQ ID NO: 8448 - DNA, 15 bp, Homo sapiens
atgtctctggtttat

SEQ ID NO: 8449 - DNA, 15 bp, Homo sapiens
catgtctctggttta

SEQ ID NO: 8450 - DNA, 15 bp, Homo sapiens
gcatgtctctggttt

SEQ ID NO: 8451 - DNA, 15 bp, Homo sapiens
tgcatgtctctggtt

SEQ ID NO: 8452 - DNA, 15 bp, Homo sapiens
ctgcatgtctctggt

SEQ ID NO: 8453 - DNA, 15 bp, Homo sapiens
actgcatgtctctgg

SEQ ID NO: 8454 - DNA, 15 bp, Homo sapiens
cactgcatgtctctg

SEQ ID NO: 8455 - DNA, 15 bp, Homo sapiens
acactgcatgtctct

SEQ ID NO: 8456 - DNA, 15 bp, Homo sapiens
aacactgcatgtctc

SEQ ID NO: 8457 - DNA, 15 bp, Homo sapiens
aaacactgcatgtct

SEQ ID NO: 8458 - DNA, 15 bp, Homo sapiens
gaaacactgcatgtc

SEQ ID NO: 8459 - DNA, 15 bp, Homo sapiens
ggaaacactgcatgt

SEQ ID NO: 8460 - DNA, 15 bp, Homo sapiens
gggaaacactgcatg

SEQ ID NO: 8461 - DNA, 15 bp, Homo sapiens
ggggaaacactgcat

SEQ ID NO: 8462 - DNA, 15 bp, Homo sapiens
gggggaaacactgca

SEQ ID NO: 8463 - DNA, 15 bp, Homo sapiens
tgggggaaacactgc

SEQ ID NO: 8464 - DNA, 15 bp, Homo sapiens
ttgggggaaacactg

SEQ ID NO: 8465 - DNA, 15 bp, Homo sapiens
cttgggggaaacact

SEQ ID NO: 8466 - DNA, 15 bp, Homo sapiens
tcttgggggaaacac

SEQ ID NO: 8467 - DNA, 15 bp, Homo sapiens
atcttgggggaaaca

SEQ ID NO: 8468 - DNA, 15 bp, Homo sapiens
gatcttgggggaaac

SEQ ID NO: 8469 - DNA, 15 bp, Homo sapiens
agatcttgggggaaa

SEQ ID NO: 8470 - DNA, 15 bp, Homo sapiens
tagatcttgggggaa

SEQ ID NO: 8471 - DNA, 15 bp, Homo sapiens
ctagatcttggggga

SEQ ID NO: 8472 - DNA, 15 bp, Homo sapiens
gctagatcttggggg

SEQ ID NO: 8473 - DNA, 15 bp, Homo sapiens
tgctagatcttgggg

SEQ ID NO: 8474 - DNA, 15 bp, Homo sapiens
atgctagatcttggg

SEQ ID NO: 8475 - DNA, 15 bp, Homo sapiens
tatgctagatcttgg

SEQ ID NO: 8476 - DNA, 15 bp, Homo sapiens
atatgctagatcttg

SEQ ID NO: 8477 - DNA, 15 bp, Homo sapiens
tatatgctagatctt

SEQ ID NO: 8478 - DNA, 15 bp, Homo sapiens
ttatatgctagatct

SEQ ID NO: 8479 - DNA, 15 bp, Homo sapiens
tttatatgctagatc

SEQ ID NO: 8480 - DNA, 15 bp, Homo sapiens
gtttatatgctagat

SEQ ID NO: 8481 - DNA, 15 bp, Homo sapiens
ggtttatatgctaga

SEQ ID NO: 8482 - DNA, 15 bp, Homo sapiens
aggtttatatgctag

SEQ ID NO: 8483 - DNA, 15 bp, Homo sapiens
caggtttatatgcta

SEQ ID NO: 8484 - DNA, 15 bp, Homo sapiens
tcaggtttatatgct

SEQ ID NO: 8485 - DNA, 15 bp, Homo sapiens
ctcaggtttatatgc

SEQ ID NO: 8486 - DNA, 15 bp, Homo sapiens
tctcaggtttatatg

SEQ ID NO: 8487 - DNA, 15 bp, Homo sapiens
atctcaggtttatat

SEQ ID NO: 8488 - DNA, 15 bp, Homo sapiens
aatctcaggtttata

SEQ ID NO: 8489 - DNA, 15 bp, Homo sapiens
taatctcaggtttat

SEQ ID NO: 8490 - DNA, 15 bp, Homo sapiens
ctaatctcaggttta

SEQ ID NO: 8491 - DNA, 15 bp, Homo sapiens
tctaatctcaggttt

SEQ ID NO: 8492 - DNA, 15 bp, Homo sapiens
atctaatctcaggtt

SEQ ID NO: 8493 - DNA, 15 bp, Homo sapiens
catctaatctcaggt

SEQ ID NO: 8494 - DNA, 15 bp, Homo sapiens
ccatctaatctcagg

SEQ ID NO: 8495 - DNA, 15 bp, Homo sapiens
gccatctaatctcag

SEQ ID NO: 8496 - DNA, 15 bp, Homo sapiens
agccatctaatctca

SEQ ID NO: 8497 - DNA, 15 bp, Homo sapiens
aagccatctaatctc

SEQ ID NO: 8498 - DNA, 15 bp, Homo sapiens
gaagccatctaatct

SEQ ID NO: 8499 - DNA, 15 bp, Homo sapiens
agaagccatctaatc

SEQ ID NO: 8500 - DNA, 15 bp, Homo sapiens
tagaagccatctaat

SEQ ID NO: 8501 - DNA, 15 bp, Homo sapiens
ttagaagccatctaa

SEQ ID NO: 8502 - DNA, 15 bp, Homo sapiens
cttagaagccatcta

SEQ ID NO: 8503 - DNA, 15 bp, Homo sapiens
gcttagaagccatct

SEQ ID NO: 8504 - DNA, 15 bp, Homo sapiens
tgcttagaagccatc

SEQ ID NO: 8505 - DNA, 15 bp, Homo sapiens
ttgcttagaagccat

SEQ ID NO: 8506 - DNA, 15 bp, Homo sapiens
cttgcttagaagcca

SEQ ID NO: 8507 - DNA, 15 bp, Homo sapiens
acttgcttagaagcc

SEQ ID NO: 8508 - DNA, 15 bp, Homo sapiens
cacttgcttagaagc

SEQ ID NO: 8509 - DNA, 15 bp, Homo sapiens
gcacttgcttagaag

SEQ ID NO: 8510 - DNA, 15 bp, Homo sapiens
tgcacttgcttagaa

SEQ ID NO: 8511 - DNA, 15 bp, Homo sapiens
ttgcacttgcttaga

SEQ ID NO: 8512 - DNA, 15 bp, Homo sapiens
tttgcacttgcttag

SEQ ID NO: 8513 - DNA, 15 bp, Homo sapiens
ttttgcacttgctta

SEQ ID NO: 8514 - DNA, 15 bp, Homo sapiens
tttttgcacttgctt

SEQ ID NO: 8515 - DNA, 15 bp, Homo sapiens
atttttgcacttgct

SEQ ID NO: 8516 - DNA, 15 bp, Homo sapiens
aatttttgcacttgc

SEQ ID NO: 8517 - DNA, 15 bp, Homo sapiens
caatttttgcacttg

SEQ ID NO: 8518 - DNA, 15 bp, Homo sapiens
acaatttttgcactt

SEQ ID NO: 8519 - DNA, 15 bp, Homo sapiens
cacaatttttgcact

SEQ ID NO: 8520 - DNA, 15 bp, Homo sapiens
ccacaatttttgcac

SEQ ID NO: 8521 - DNA, 15 bp, Homo sapiens
gccacaatttttgca

SEQ ID NO: 8522 - DNA, 15 bp, Homo sapiens
agccacaatttttgc

SEQ ID NO: 8523 - DNA, 15 bp, Homo sapiens
aagccacaatttttg

SEQ ID NO: 8524 - DNA, 15 bp, Homo sapiens
gaagccacaattttt

SEQ ID NO: 8525 - DNA, 15 bp, Homo sapiens
tgaagccacaatttt

SEQ ID NO: 8526 - DNA, 15 bp, Homo sapiens
ttgaagccacaattt

SEQ ID NO: 8527 - DNA, 15 bp, Homo sapiens
cttgaagccacaatt

SEQ ID NO: 8528 - DNA, 15 bp, Homo sapiens
acttgaagccacaat

SEQ ID NO: 8529 - DNA, 15 bp, Homo sapiens
aacttgaagccacaa

SEQ ID NO: 8530 - DNA, 15 bp, Homo sapiens
gaacttgaagccaca

SEQ ID NO: 8531 - DNA, 15 bp, Homo sapiens
agaacttgaagccac

SEQ ID NO: 8532 - DNA, 15 bp, Homo sapiens
gagaacttgaagcca

SEQ ID NO: 8533 - DNA, 15 bp, Homo sapiens
ggagaacttgaagcc

SEQ ID NO: 8534 - DNA, 15 bp, Homo sapiens
aggagaacttgaagc

SEQ ID NO: 8535 - DNA, 15 bp, Homo sapiens
aaggagaacttgaag

SEQ ID NO: 8536 - DNA, 15 bp, Homo sapiens
gaaggagaacttgaa

SEQ ID NO: 8537 - DNA, 15 bp, Homo sapiens
agaaggagaacttga

SEQ ID NO: 8538 - DNA, 15 bp, Homo sapiens
aagaaggagaacttg

SEQ ID NO: 8539 - DNA, 15 bp, Homo sapiens
gaagaaggagaactt

SEQ ID NO: 8540 - DNA, 15 bp, Homo sapiens
ggaagaaggagaact

SEQ ID NO: 8541 - DNA, 15 bp, Homo sapiens
gggaagaaggagaac

SEQ ID NO: 8542 - DNA, 15 bp, Homo sapiens
tgggaagaaggagaa

SEQ ID NO: 8543 - DNA, 15 bp, Homo sapiens
gtgggaagaaggaga

SEQ ID NO: 8544 - DNA, 15 bp, Homo sapiens
agtgggaagaaggag

SEQ ID NO: 8545 - DNA, 15 bp, Homo sapiens
aagtgggaagaagga

SEQ ID NO: 8546 - DNA, 15 bp, Homo sapiens
aaagtgggaagaagg

SEQ ID NO: 8547 - DNA, 15 bp, Homo sapiens
taaagtgggaagaag

SEQ ID NO: 8548 - DNA, 15 bp, Homo sapiens
ctaaagtgggaagaa

SEQ ID NO: 8549 - DNA, 15 bp, Homo sapiens
gctaaagtgggaaga

SEQ ID NO: 8550 - DNA, 15 bp, Homo sapiens
tgctaaagtgggaag

SEQ ID NO: 8551 - DNA, 15 bp, Homo sapiens
ctgctaaagtgggaa

SEQ ID NO: 8552 - DNA, 15 bp, Homo sapiens
gctgctaaagtggga

SEQ ID NO: 8553 - DNA, 15 bp, Homo sapiens
agctgctaaagtggg

SEQ ID NO: 8554 - DNA, 15 bp, Homo sapiens
aagctgctaaagtgg

SEQ ID NO: 8555 - DNA, 15 bp, Homo sapiens
aaagctgctaaagtg

SEQ ID NO: 8556 - DNA, 15 bp, Homo sapiens
caaagctgctaaagt

SEQ ID NO: 8557 - DNA, 15 bp, Homo sapiens
acaaagctgctaaag

SEQ ID NO: 8558 - DNA, 15 bp, Homo sapiens
tacaaagctgctaaa

SEQ ID NO: 8559 - DNA, 15 bp, Homo sapiens
ttacaaagctgctaa

SEQ ID NO: 8560 - DNA, 15 bp, Homo sapiens
cttacaaagctgcta

SEQ ID NO: 8561 - DNA, 15 bp, Homo sapiens
acttacaaagctgct

SEQ ID NO: 8562 - DNA, 15 bp, Homo sapiens
aacttacaaagctgc

SEQ ID NO: 8563 - DNA, 15 bp, Homo sapiens
aaacttacaaagctg

SEQ ID NO: 8564 - DNA, 15 bp, Homo sapiens
taaacttacaaagct

SEQ ID NO: 8565 - DNA, 15 bp, Homo sapiens
ttaaacttacaaagc

SEQ ID NO: 8566 - DNA, 15 bp, Homo sapiens
attaaacttacaaag

SEQ ID NO: 8567 - DNA, 15 bp, Homo sapiens
aattaaacttacaaa

SEQ ID NO: 8568 - DNA, 15 bp, Homo sapiens
aaattaaacttacaa

SEQ ID NO: 8569 - DNA, 15 bp, Homo sapiens
aaaattaaacttaca

SEQ ID NO: 8570 - DNA, 15 bp, Homo sapiens
aaaaattaaacttac

SEQ ID NO: 8571 - DNA, 15 bp, Homo sapiens
taaaaattaaactta

SEQ ID NO: 8572 - DNA, 15 bp, Homo sapiens
ttaaaaattaaactt

SEQ ID NO: 8573 - DNA, 15 bp, Homo sapiens
attaaaaattaaact

SEQ ID NO: 8574 - DNA, 15 bp, Homo sapiens
cattaaaaattaaac

SEQ ID NO: 8575 - DNA, 15 bp, Homo sapiens
tcattaaaaattaaa

SEQ ID NO: 8576 - DNA, 15 bp, Homo sapiens
atcattaaaaattaa

SEQ ID NO: 8577 - DNA, 15 bp, Homo sapiens
gatcattaaaaatta

SEQ ID NO: 8578 - DNA, 15 bp, Homo sapiens
agatcattaaaaatt

SEQ ID NO: 8579 - DNA, 15 bp, Homo sapiens
gagatcattaaaaat

SEQ ID NO: 8580 - DNA, 15 bp, Homo sapiens
agagatcattaaaaa

SEQ ID NO: 8581 - DNA, 15 bp, Homo sapiens
cagagatcattaaaa

SEQ ID NO: 8582 - DNA, 15 bp, Homo sapiens
gcagagatcattaaa

SEQ ID NO: 8583 - DNA, 15 bp, Homo sapiens
agcagagatcattaa

SEQ ID NO: 8584 - DNA, 15 bp, Homo sapiens
gagcagagatcatta

SEQ ID NO: 8585 - DNA, 15 bp, Homo sapiens
tgagcagagatcatt

SEQ ID NO: 8586 - DNA, 15 bp, Homo sapiens
atgagcagagatcat

SEQ ID NO: 8587 - DNA, 15 bp, Homo sapiens
catgagcagagatca

SEQ ID NO: 8588 - DNA, 15 bp, Homo sapiens
gcatgagcagagatc

SEQ ID NO: 8589 - DNA, 15 bp, Homo sapiens
agcatgagcagagat

SEQ ID NO: 8590 - DNA, 15 bp, Homo sapiens
cagcatgagcagaga

SEQ ID NO: 8591 - DNA, 15 bp, Homo sapiens
acagcatgagcagag

SEQ ID NO: 8592 - DNA, 15 bp, Homo sapiens
gacagcatgagcaga

SEQ ID NO: 8593 - DNA, 15 bp, Homo sapiens
tgacagcatgagcag

SEQ ID NO: 8594 - DNA, 15 bp, Homo sapiens
gtgacagcatgagca

SEQ ID NO: 8595 - DNA, 15 bp, Homo sapiens
cgtgacagcatgagc

SEQ ID NO: 8596 - DNA, 15 bp, Homo sapiens
tcgtgacagcatgag

SEQ ID NO: 8597 - DNA, 15 bp, Homo sapiens
ctcgtgacagcatga

SEQ ID NO: 8598 - DNA, 15 bp, Homo sapiens
tctcgtgacagcatg

SEQ ID NO: 8599 - DNA, 15 bp, Homo sapiens
ttctcgtgacagcat

SEQ ID NO: 8600 - DNA, 15 bp, Homo sapiens
tttctcgtgacagca

SEQ ID NO: 8601 - DNA, 15 bp, Homo sapiens
gtttctcgtgacagc

SEQ ID NO: 8602 - DNA, 15 bp, Homo sapiens
tgtttctcgtgacag

SEQ ID NO: 8603 - DNA, 15 bp, Homo sapiens
gtgtttctcgtgaca

SEQ ID NO: 8604 - DNA, 15 bp, Homo sapiens
tgtgtttctcgtgac

SEQ ID NO: 8605 - DNA, 15 bp, Homo sapiens
ttgtgtttctcgtga

SEQ ID NO: 8606 - DNA, 15 bp, Homo sapiens
tttgtgtttctcgtg

SEQ ID NO: 8607 - DNA, 15 bp, Homo sapiens
ttttgtgtttctcgt

SEQ ID NO: 8608 - DNA, 15 bp, Homo sapiens
attttgtgtttctcg

SEQ ID NO: 8609 - DNA, 15 bp, Homo sapiens
gattttgtgtttctc

SEQ ID NO: 8610 - DNA, 15 bp, Homo sapiens
tgattttgtgtttct

SEQ ID NO: 8611 - DNA, 15 bp, Homo sapiens
atgattttgtgtttc

SEQ ID NO: 8612 - DNA, 15 bp, Homo sapiens
tatgattttgtgttt

SEQ ID NO: 8613 - DNA, 15 bp, Homo sapiens
ttatgattttgtgtt

SEQ ID NO: 8614 - DNA, 15 bp, Homo sapiens
tttatgattttgtgt

SEQ ID NO: 8615 - DNA, 15 bp, Homo sapiens
atttatgattttgtg

SEQ ID NO: 8616 - DNA, 15 bp, Homo sapiens
catttatgattttgt

SEQ ID NO: 8617 - DNA, 15 bp, Homo sapiens
acatttatgattttg

SEQ ID NO: 8618 - DNA, 15 bp, Homo sapiens
aacatttatgatttt

SEQ ID NO: 8619 - DNA, 15 bp, Homo sapiens
taacatttatgattt

SEQ ID NO: 8620 - DNA, 15 bp, Homo sapiens
gtaacatttatgatt

SEQ ID NO: 8621 - DNA, 15 bp, Homo sapiens
agtaacatttatgat

SEQ ID NO: 8622 - DNA, 15 bp, Homo sapiens
tagtaacatttatga

SEQ ID NO: 8623 - DNA, 15 bp, Homo sapiens
ttagtaacatttatg

SEQ ID NO: 8624 - DNA, 15 bp, Homo sapiens
cttagtaacatttat

SEQ ID NO: 8625 - DNA, 15 bp, Homo sapiens
gcttagtaacattta

SEQ ID NO: 8626 - DNA, 15 bp, Homo sapiens
tgcttagtaacattt

SEQ ID NO: 8627 - DNA, 15 bp, Homo sapiens
ttgcttagtaacatt

SEQ ID NO: 8628 - DNA, 15 bp, Homo sapiens
gttgcttagtaacat

SEQ ID NO: 8629 - DNA, 15 bp, Homo sapiens
tgttgcttagtaaca

SEQ ID NO: 8630 - DNA, 15 bp, Homo sapiens
ttgttgcttagtaac

SEQ ID NO: 8631 - DNA, 15 bp, Homo sapiens
gttgttgcttagtaa

SEQ ID NO: 8632 - DNA, 15 bp, Homo sapiens
agttgttgcttagta

SEQ ID NO: 8633 - DNA, 15 bp, Homo sapiens
cagttgttgcttagt

SEQ ID NO: 8634 - DNA, 15 bp, Homo sapiens
gcagttgttgcttag

SEQ ID NO: 8635 - DNA, 15 bp, Homo sapiens
tgcagttgttgctta

SEQ ID NO: 8636 - DNA, 15 bp, Homo sapiens
ttgcagttgttgctt

SEQ ID NO: 8637 - DNA, 15 bp, Homo sapiens
cttgcagttgttgct

SEQ ID NO: 8638 - DNA, 15 bp, Homo sapiens
acttgcagttgttgc

SEQ ID NO: 8639 - DNA, 15 bp, Homo sapiens
cacttgcagttgttg

SEQ ID NO: 8640 - DNA, 15 bp, Homo sapiens
acacttgcagttgtt

SEQ ID NO: 8641 - DNA, 15 bp, Homo sapiens
tacacttgcagttgt

SEQ ID NO: 8642 - DNA, 15 bp, Homo sapiens
ttacacttgcagttg

SEQ ID NO: 8643 - DNA, 15 bp, Homo sapiens
attacacttgcagtt

SEQ ID NO: 8644 - DNA, 15 bp, Homo sapiens
aattacacttgcagt

SEQ ID NO: 8645 - DNA, 15 bp, Homo sapiens
taattacacttgcag

SEQ ID NO: 8646 - DNA, 15 bp, Homo sapiens
ttaattacacttgca

SEQ ID NO: 8647 - DNA, 15 bp, Homo sapiens
attaattacacttgc

SEQ ID NO: 8648 - DNA, 15 bp, Homo sapiens
tattaattacacttg

SEQ ID NO: 8649 - DNA, 15 bp, Homo sapiens
ctattaattacactt

SEQ ID NO: 8650 - DNA, 15 bp, Homo sapiens
actattaattacact

SEQ ID NO: 8651 - DNA, 15 bp, Homo sapiens
tactattaattacac

SEQ ID NO: 8652 - DNA, 15 bp, Homo sapiens
ttactattaattaca

SEQ ID NO: 8653 - DNA, 15 bp, Homo sapiens
attactattaattac

SEQ ID NO: 8654 - DNA, 15 bp, Homo sapiens
aattactattaatta

SEQ ID NO: 8655 - DNA, 15 bp, Homo sapiens
aaattactattaatt

SEQ ID NO: 8656 - DNA, 15 bp, Homo sapiens
aaaattactattaat

SEQ ID NO: 8657 - DNA, 15 bp, Homo sapiens
aaaaattactattaa

SEQ ID NO: 8658 - DNA, 15 bp, Homo sapiens
aaaaaattactatta

SEQ ID NO: 8659 - DNA, 15 bp, Homo sapiens
aaaaaaattactatt

SEQ ID NO: 8660 - DNA, 15 bp, Homo sapiens
gaaaaaaattactat

SEQ ID NO: 8661 - DNA, 15 bp, Homo sapiens
tgaaaaaaattacta

SEQ ID NO: 8662 - DNA, 15 bp, Homo sapiens
ttgaaaaaaattact

SEQ ID NO: 8663 - DNA, 15 bp, Homo sapiens
cttgaaaaaaattac

SEQ ID NO: 8664 - DNA, 15 bp, Homo sapiens
acttgaaaaaaatta

SEQ ID NO: 8665 - DNA, 15 bp, Homo sapiens
aacttgaaaaaaatt

SEQ ID NO: 8666 - DNA, 15 bp, Homo sapiens
taacttgaaaaaaat

SEQ ID NO: 8667 - DNA, 15 bp, Homo sapiens
ctaacttgaaaaaaa

SEQ ID NO: 8668 - DNA, 15 bp, Homo sapiens
gctaacttgaaaaaa

SEQ ID NO: 8669 - DNA, 15 bp, Homo sapiens
tgctaacttgaaaaa

SEQ ID NO: 8670 - DNA, 15 bp, Homo sapiens
ttgctaacttgaaaa

SEQ ID NO: 8671 - DNA, 15 bp, Homo sapiens
gttgctaacttgaaa

SEQ ID NO: 8672 - DNA, 15 bp, Homo sapiens
tgttgctaacttgaa

SEQ ID NO: 8673 - DNA, 15 bp, Homo sapiens
atgttgctaacttga

SEQ ID NO: 8674 - DNA, 15 bp, Homo sapiens
catgttgctaacttg

SEQ ID NO: 8675 - DNA, 15 bp, Homo sapiens
ccatgttgctaactt

SEQ ID NO: 8676 - DNA, 15 bp, Homo sapiens
accatgttgctaact

SEQ ID NO: 8677 - DNA, 15 bp, Homo sapiens
gaccatgttgctaac

SEQ ID NO: 8678 - DNA, 15 bp, Homo sapiens
ggaccatgttgctaa

SEQ ID NO: 8679 - DNA, 15 bp, Homo sapiens
aggaccatgttgcta

SEQ ID NO: 8680 - DNA, 15 bp, Homo sapiens
aaggaccatgttgct

SEQ ID NO: 8681 - DNA, 15 bp, Homo sapiens
aaaggaccatgttgc

SEQ ID NO: 8682 - DNA, 15 bp, Homo sapiens
caaaggaccatgttg

SEQ ID NO: 8683 - DNA, 15 bp, Homo sapiens
gcaaaggaccatgtt

SEQ ID NO: 8684 - DNA, 15 bp, Homo sapiens
tgcaaaggaccatgt

SEQ ID NO: 8685 - DNA, 15 bp, Homo sapiens
ctgcaaaggaccatg

SEQ ID NO: 8686 - DNA, 15 bp, Homo sapiens
cctgcaaaggaccat

SEQ ID NO: 8687 - DNA, 15 bp, Homo sapiens
tcctgcaaaggacca

SEQ ID NO: 8688 - DNA, 15 bp, Homo sapiens
ttcctgcaaaggacc

SEQ ID NO: 8689 - DNA, 15 bp, Homo sapiens
attcctgcaaaggac

SEQ ID NO: 8690 - DNA, 15 bp, Homo sapiens
cattcctgcaaagga

SEQ ID NO: 8691 - DNA, 15 bp, Homo sapiens
acattcctgcaaagg

SEQ ID NO: 8692 - DNA, 15 bp, Homo sapiens
cacattcctgcaaag

SEQ ID NO: 8693 - DNA, 15 bp, Homo sapiens
acacattcctgcaaa

SEQ ID NO: 8694 - DNA, 15 bp, Homo sapiens
cacacattcctgcaa

SEQ ID NO: 8695 - DNA, 15 bp, Homo sapiens
tcacacattcctgca

SEQ ID NO: 8696 - DNA, 15 bp, Homo sapiens
gtcacacattcctgc

SEQ ID NO: 8697 - DNA, 15 bp, Homo sapiens
tgtcacacattcctg

SEQ ID NO: 8698 - DNA, 15 bp, Homo sapiens
ctgtcacacattcct

SEQ ID NO: 8699 - DNA, 15 bp, Homo sapiens
cctgtcacacattcc

SEQ ID NO: 8700 - DNA, 15 bp, Homo sapiens
tcctgtcacacattc

SEQ ID NO: 8701 - DNA, 15 bp, Homo sapiens
ttcctgtcacacatt

SEQ ID NO: 8702 - DNA, 15 bp, Homo sapiens
gttcctgtcacacat

SEQ ID NO: 8703 - DNA, 15 bp, Homo sapiens
tgttcctgtcacaca

SEQ ID NO: 8704 - DNA, 15 bp, Homo sapiens
ctgttcctgtcacac

SEQ ID NO: 8705 - DNA, 15 bp, Homo sapiens
gctgttcctgtcaca

SEQ ID NO: 8706 - DNA, 15 bp, Homo sapiens
tgctgttcctgtcac

SEQ ID NO: 8707 - DNA, 15 bp, Homo sapiens
ctgctgttcctgtca

SEQ ID NO: 8708 - DNA, 15 bp, Homo sapiens
actgctgttcctgtc

SEQ ID NO: 8709 - DNA, 15 bp, Homo sapiens
cactgctgttcctgt

SEQ ID NO: 8710 - DNA, 15 bp, Homo sapiens
ccactgctgttcctg

SEQ ID NO: 8711 - DNA, 15 bp, Homo sapiens
gccactgctgttcct

SEQ ID NO: 8712 - DNA, 15 bp, Homo sapiens
ggccactgctgttcc

SEQ ID NO: 8713 - DNA, 15 bp, Homo sapiens
aggccactgctgttc

SEQ ID NO: 8714 - DNA, 15 bp, Homo sapiens
caggccactgctgtt

SEQ ID NO: 8715 - DNA, 15 bp, Homo sapiens
tcaggccactgctgt

SEQ ID NO: 8716 - DNA, 15 bp, Homo sapiens
ctcaggccactgctg

SEQ ID NO: 8717 - DNA, 15 bp, Homo sapiens
cctcaggccactgct

SEQ ID NO: 8718 - DNA, 15 bp, Homo sapiens
ccctcaggccactgc

SEQ ID NO: 8719 - DNA, 15 bp, Homo sapiens
cccctcaggccactg

SEQ ID NO: 8720 - DNA, 15 bp, Homo sapiens
acccctcaggccact

SEQ ID NO: 8721 - DNA, 15 bp, Homo sapiens
gacccctcaggccac

SEQ ID NO: 8722 - DNA, 15 bp, Homo sapiens
agacccctcaggcca

SEQ ID NO: 8723 - DNA, 15 bp, Homo sapiens
cagacccctcaggcc

SEQ ID NO: 8724 - DNA, 15 bp, Homo sapiens
tcagacccctcaggc

SEQ ID NO: 8725 - DNA, 15 bp, Homo sapiens
atcagacccctcagg

SEQ ID NO: 8726 - DNA, 15 bp, Homo sapiens
catcagacccctcag

SEQ ID NO: 8727 - DNA, 15 bp, Homo sapiens
ccatcagacccctca

SEQ ID NO: 8728 - DNA, 15 bp, Homo sapiens
cccatcagacccctc

SEQ ID NO: 8729 - DNA, 15 bp, Homo sapiens
gcccatcagacccct

SEQ ID NO: 8730 - DNA, 15 bp, Homo sapiens
ggcccatcagacccc

SEQ ID NO: 8731 - DNA, 15 bp, Homo sapiens
aggcccatcagaccc

SEQ ID NO: 8732 - DNA, 15 bp, Homo sapiens
aaggcccatcagacc

SEQ ID NO: 8733 - DNA, 15 bp, Homo sapiens
aaaggcccatcagac

SEQ ID NO: 8734 - DNA, 15 bp, Homo sapiens
gaaaggcccatcaga

SEQ ID NO: 8735 - DNA, 15 bp, Homo sapiens
agaaaggcccatcag

SEQ ID NO: 8736 - DNA, 15 bp, Homo sapiens
tagaaaggcccatca

SEQ ID NO: 8737 - DNA, 15 bp, Homo sapiens
ctagaaaggcccatc

SEQ ID NO: 8738 - DNA, 15 bp, Homo sapiens
gctagaaaggcccat

SEQ ID NO: 8739 - DNA, 15 bp, Homo sapiens
agctagaaaggccca

SEQ ID NO: 8740 - DNA, 15 bp, Homo sapiens
tagctagaaaggccc

SEQ ID NO: 8741 - DNA, 15 bp, Homo sapiens
atagctagaaaggcc

SEQ ID NO: 8742 - DNA, 15 bp, Homo sapiens
catagctagaaaggc

SEQ ID NO: 8743 - DNA, 15 bp, Homo sapiens
acatagctagaaagg

SEQ ID NO: 8744 - DNA, 15 bp, Homo sapiens
cacatagctagaaag

SEQ ID NO: 8745 - DNA, 15 bp, Homo sapiens
tcacatagctagaaa

SEQ ID NO: 8746 - DNA, 15 bp, Homo sapiens
atcacatagctagaa

SEQ ID NO: 8747 - DNA, 15 bp, Homo sapiens
catcacatagctaga

SEQ ID NO: 8748 - DNA, 15 bp, Homo sapiens
acatcacatagctag

SEQ ID NO: 8749 - DNA, 15 bp, Homo sapiens
gacatcacatagcta

SEQ ID NO: 8750 - DNA, 15 bp, Homo sapiens
agacatcacatagct

SEQ ID NO: 8751 - DNA, 15 bp, Homo sapiens
tagacatcacatagc

SEQ ID NO: 8752 - DNA, 15 bp, Homo sapiens
ctagacatcacatag

SEQ ID NO: 8753 - DNA, 15 bp, Homo sapiens
cctagacatcacata

SEQ ID NO: 8754 - DNA, 15 bp, Homo sapiens
gcctagacatcacat

SEQ ID NO: 8755 - DNA, 15 bp, Homo sapiens
tgcctagacatcaca

SEQ ID NO: 8756 - DNA, 15 bp, Homo sapiens
atgcctagacatcac

SEQ ID NO: 8757 - DNA, 15 bp, Homo sapiens
catgcctagacatca

SEQ ID NO: 8758 - DNA, 15 bp, Homo sapiens
tcatgcctagacatc

SEQ ID NO: 8759 - DNA, 15 bp, Homo sapiens
ttcatgcctagacat

SEQ ID NO: 8760 - DNA, 15 bp, Homo sapiens
attcatgcctagaca

SEQ ID NO: 8761 - DNA, 15 bp, Homo sapiens
tattcatgcctagac

SEQ ID NO: 8762 - DNA, 15 bp, Homo sapiens
ctattcatgcctaga

SEQ ID NO: 8763 - DNA, 15 bp, Homo sapiens
gctattcatgcctag

SEQ ID NO: 8764 - DNA, 15 bp, Homo sapiens
tgctattcatgccta

SEQ ID NO: 8765 - DNA, 15 bp, Homo sapiens
gtgctattcatgcct

SEQ ID NO: 8766 - DNA, 15 bp, Homo sapiens
tgtgctattcatgcc

SEQ ID NO: 8767 - DNA, 15 bp, Homo sapiens
ttgtgctattcatgc

SEQ ID NO: 8768 - DNA, 15 bp, Homo sapiens
attgtgctattcatg

SEQ ID NO: 8769 - DNA, 15 bp, Homo sapiens
tattgtgctattcat

SEQ ID NO: 8770 - DNA, 15 bp, Homo sapiens
ttattgtgctattca

SEQ ID NO: 8771 - DNA, 15 bp, Homo sapiens
tttattgtgctattc

SEQ ID NO: 8772 - DNA, 15 bp, Homo sapiens
ttttattgtgctatt

SEQ ID NO: 8773 - DNA, 15 bp, Homo sapiens
gttttattgtgctat

SEQ ID NO: 8774 - DNA, 15 bp, Homo sapiens
tgttttattgtgcta

SEQ ID NO: 8775 - DNA, 15 bp, Homo sapiens
ctgttttattgtgct

SEQ ID NO: 8776 - DNA, 15 bp, Homo sapiens
gctgttttattgtgc

SEQ ID NO: 8777 - DNA, 15 bp, Homo sapiens
tgctgttttattgtg

SEQ ID NO: 8778 - DNA, 15 bp, Homo sapiens
ctgctgttttattgt

SEQ ID NO: 8779 - DNA, 15 bp, Homo sapiens
actgctgttttattg

SEQ ID NO: 8780 - DNA, 15 bp, Homo sapiens
aactgctgttttatt

SEQ ID NO: 8781 - DNA, 15 bp, Homo sapiens
caactgctgttttat

SEQ ID NO: 8782 - DNA, 15 bp, Homo sapiens
ccaactgctgtttta

SEQ ID NO: 8783 - DNA, 15 bp, Homo sapiens
cccaactgctgtttt

SEQ ID NO: 8784 - DNA, 15 bp, Homo sapiens
ccccaactgctgttt

SEQ ID NO: 8785 - DNA, 15 bp, Homo sapiens
tccccaactgctgtt

SEQ ID NO: 8786 - DNA, 15 bp, Homo sapiens
ttccccaactgctgt

SEQ ID NO: 8787 - DNA, 15 bp, Homo sapiens
gttccccaactgctg

SEQ ID NO: 8788 - DNA, 15 bp, Homo sapiens
agttccccaactgct

SEQ ID NO: 8789 - DNA, 15 bp, Homo sapiens
tagttccccaactgc

SEQ ID NO: 8790 - DNA, 15 bp, Homo sapiens
atagttccccaactg

SEQ ID NO: 8791 - DNA, 15 bp, Homo sapiens
tatagttccccaact

SEQ ID NO: 8792 - DNA, 15 bp, Homo sapiens
ttatagttccccaac

SEQ ID NO: 8793 - DNA, 15 bp, Homo sapiens
cttatagttccccaa

SEQ ID NO: 8794 - DNA, 15 bp, Homo sapiens
ccttatagttcccca

SEQ ID NO: 8795 - DNA, 15 bp, Homo sapiens
tccttatagttcccc

SEQ ID NO: 8796 - DNA, 15 bp, Homo sapiens
ctccttatagttccc

SEQ ID NO: 8797 - DNA, 15 bp, Homo sapiens
gctccttatagttcc

SEQ ID NO: 8798 - DNA, 15 bp, Homo sapiens
ggctccttatagttc

SEQ ID NO: 8799 - DNA, 15 bp, Homo sapiens
aggctccttatagtt

SEQ ID NO: 8800 - DNA, 15 bp, Homo sapiens
aaggctccttatagt

SEQ ID NO: 8801 - DNA, 15 bp, Homo sapiens
aaaggctccttatag

SEQ ID NO: 8802 - DNA, 15 bp, Homo sapiens
taaaggctccttata

SEQ ID NO: 8803 - DNA, 15 bp, Homo sapiens
ttaaaggctccttat

SEQ ID NO: 8804 - DNA, 15 bp, Homo sapiens
tttaaaggctcctta

SEQ ID NO: 8805 - DNA, 15 bp, Homo sapiens
atttaaaggctcctt

SEQ ID NO: 8806 - DNA, 15 bp, Homo sapiens
aatttaaaggctcct

SEQ ID NO: 8807 - DNA, 15 bp, Homo sapiens
caatttaaaggctcc

SEQ ID NO: 8808 - DNA, 15 bp, Homo sapiens
tcaatttaaaggctc

SEQ ID NO: 8809 - DNA, 15 bp, Homo sapiens
gtcaatttaaaggct

SEQ ID NO: 8810 - DNA, 15 bp, Homo sapiens
agtcaatttaaaggc

SEQ ID NO: 8811 - DNA, 15 bp, Homo sapiens
aagtcaatttaaagg

SEQ ID NO: 8812 - DNA, 15 bp, Homo sapiens
aaagtcaatttaaag

SEQ ID NO: 8813 - DNA, 15 bp, Homo sapiens
aaaagtcaatttaaa

SEQ ID NO: 8814 - DNA, 15 bp, Homo sapiens
aaaaagtcaatttaa

SEQ ID NO: 8815 - DNA, 15 bp, Homo sapiens
aaaaaagtcaattta

SEQ ID NO: 8816 - DNA, 15 bp, Homo sapiens
aaaaaaagtcaattt

SEQ ID NO: 8817 - DNA, 15 bp, Homo sapiens
aaaaaaaagtcaatt

SEQ ID NO: 8818 - DNA, 15 bp, Homo sapiens
aaaaaaaaagtcaat

SEQ ID NO: 8819 - DNA, 15 bp, Homo sapiens
gaaaaaaaaagtcaa

SEQ ID NO: 8820 - DNA, 15 bp, Homo sapiens
ggaaaaaaaaagtca

SEQ ID NO: 8821 - DNA, 15 bp, Homo sapiens
aggaaaaaaaaagtc

SEQ ID NO: 8822 - DNA, 15 bp, Homo sapiens
gaggaaaaaaaaagt

SEQ ID NO: 8823 - DNA, 15 bp, Homo sapiens
agaggaaaaaaaaag

SEQ ID NO: 8824 - DNA, 15 bp, Homo sapiens
aagaggaaaaaaaaa

SEQ ID NO: 8825 - DNA, 15 bp, Homo sapiens
gaagaggaaaaaaaa

SEQ ID NO: 8826 - DNA, 15 bp, Homo sapiens
ggaagaggaaaaaaa

SEQ ID NO: 8827 - DNA, 15 bp, Homo sapiens
gggaagaggaaaaaa

SEQ ID NO: 8828 - DNA, 15 bp, Homo sapiens
tgggaagaggaaaaa

SEQ ID NO: 8829 - DNA, 15 bp, Homo sapiens
gtgggaagaggaaaa

SEQ ID NO: 8830 - DNA, 15 bp, Homo sapiens
tgtgggaagaggaaa

SEQ ID NO: 8831 - DNA, 15 bp, Homo sapiens
ctgtgggaagaggaa

SEQ ID NO: 8832 - DNA, 15 bp, Homo sapiens
tctgtgggaagagga

SEQ ID NO: 8833 - DNA, 15 bp, Homo sapiens
ctctgtgggaagagg

SEQ ID NO: 8834 - DNA, 15 bp, Homo sapiens
tctctgtgggaagag

SEQ ID NO: 8835 - DNA, 15 bp, Homo sapiens
atctctgtgggaaga

SEQ ID NO: 8836 - DNA, 15 bp, Homo sapiens
tatctctgtgggaag

SEQ ID NO: 8837 - DNA, 15 bp, Homo sapiens
gtatctctgtgggaa

SEQ ID NO: 8838 - DNA, 15 bp, Homo sapiens
agtatctctgtggga

SEQ ID NO: 8839 - DNA, 15 bp, Homo sapiens
gagtatctctgtggg

SEQ ID NO: 8840 - DNA, 15 bp, Homo sapiens
agagtatctctgtgg

SEQ ID NO: 8841 - DNA, 15 bp, Homo sapiens
tagagtatctctgtg

SEQ ID NO: 8842 - DNA, 15 bp, Homo sapiens
atagagtatctctgt

SEQ ID NO: 8843 - DNA, 15 bp, Homo sapiens
aatagagtatctctg

SEQ ID NO: 8844 - DNA, 15 bp, Homo sapiens
taatagagtatctct

SEQ ID NO: 8845 - DNA, 15 bp, Homo sapiens
ataatagagtatctc

SEQ ID NO: 8846 - DNA, 15 bp, Homo sapiens
tataatagagtatct

SEQ ID NO: 8847 - DNA, 15 bp, Homo sapiens
ctataatagagtatc

SEQ ID NO: 8848 - DNA, 15 bp, Homo sapiens
gctataatagagtat

SEQ ID NO: 8849 - DNA, 15 bp, Homo sapiens
tgctataatagagta

SEQ ID NO: 8850 - DNA, 15 bp, Homo sapiens
ttgctataatagagt

SEQ ID NO: 8851 - DNA, 15 bp, Homo sapiens
tttgctataatagag

SEQ ID NO: 8852 - DNA, 15 bp, Homo sapiens
ctttgctataataga

SEQ ID NO: 8853 - DNA, 15 bp, Homo sapiens
tctttgctataatag

SEQ ID NO: 8854 - DNA, 15 bp, Homo sapiens
ttctttgctataata

SEQ ID NO: 8855 - DNA, 15 bp, Homo sapiens
cttctttgctataat

SEQ ID NO: 8856 - DNA, 15 bp, Homo sapiens
tcttctttgctataa

SEQ ID NO: 8857 - DNA, 15 bp, Homo sapiens
ttcttctttgctata

SEQ ID NO: 8858 - DNA, 15 bp, Homo sapiens
tttcttctttgctat

SEQ ID NO: 8859 - DNA, 15 bp, Homo sapiens
ctttcttctttgcta

SEQ ID NO: 8860 - DNA, 15 bp, Homo sapiens
tctttcttctttgct

SEQ ID NO: 8861 - DNA, 15 bp, Homo sapiens
atctttcttctttgc

SEQ ID NO: 8862 - DNA, 15 bp, Homo sapiens
tatctttcttctttg

SEQ ID NO: 8863 - DNA, 15 bp, Homo sapiens
ttatctttcttcttt

SEQ ID NO: 8864 - DNA, 15 bp, Homo sapiens
attatctttcttctt

SEQ ID NO: 8865 - DNA, 15 bp, Homo sapiens
aattatctttcttct

SEQ ID NO: 8866 - DNA, 15 bp, Homo sapiens
aaattatctttcttc

SEQ ID NO: 8867 - DNA, 15 bp, Homo sapiens
gaaattatctttctt

SEQ ID NO: 8868 - DNA, 15 bp, Homo sapiens
tgaaattatctttct

SEQ ID NO: 8869 - DNA, 15 bp, Homo sapiens
atgaaattatctttc

SEQ ID NO: 8870 - DNA, 15 bp, Homo sapiens
aatgaaattatcttt

SEQ ID NO: 8871 - DNA, 15 bp, Homo sapiens
caatgaaattatctt

SEQ ID NO: 8872 - DNA, 15 bp, Homo sapiens
tcaatgaaattatct

SEQ ID NO: 8873 - DNA, 15 bp, Homo sapiens
ctcaatgaaattatc

SEQ ID NO: 8874 - DNA, 15 bp, Homo sapiens
gctcaatgaaattat

SEQ ID NO: 8875 - DNA, 15 bp, Homo sapiens
ggctcaatgaaatta

SEQ ID NO: 8876 - DNA, 15 bp, Homo sapiens
tggctcaatgaaatt

SEQ ID NO: 8877 - DNA, 15 bp, Homo sapiens
atggctcaatgaaat

SEQ ID NO: 8878 - DNA, 15 bp, Homo sapiens
gatggctcaatgaaa

SEQ ID NO: 8879 - DNA, 15 bp, Homo sapiens
ggatggctcaatgaa

SEQ ID NO: 8880 - DNA, 15 bp, Homo sapiens
aggatggctcaatga

SEQ ID NO: 8881 - DNA, 15 bp, Homo sapiens
caggatggctcaatg

SEQ ID NO: 8882 - DNA, 15 bp, Homo sapiens
acaggatggctcaat

SEQ ID NO: 8883 - DNA, 15 bp, Homo sapiens
aacaggatggctcaa

SEQ ID NO: 8884 - DNA, 15 bp, Homo sapiens
aaacaggatggctca

SEQ ID NO: 8885 - DNA, 15 bp, Homo sapiens
aaaacaggatggctc

SEQ ID NO: 8886 - DNA, 15 bp, Homo sapiens
taaaacaggatggct

SEQ ID NO: 8887 - DNA, 15 bp, Homo sapiens
gtaaaacaggatggc

SEQ ID NO: 8888 - DNA, 15 bp, Homo sapiens
tgtaaaacaggatgg

SEQ ID NO: 8889 - DNA, 15 bp, Homo sapiens
ctgtaaaacaggatg

SEQ ID NO: 8890 - DNA, 15 bp, Homo sapiens
cctgtaaaacaggat

SEQ ID NO: 8891 - DNA, 15 bp, Homo sapiens
acctgtaaaacagga

SEQ ID NO: 8892 - DNA, 15 bp, Homo sapiens
tacctgtaaaacagg

SEQ ID NO: 8893 - DNA, 15 bp, Homo sapiens
ttacctgtaaaacag

SEQ ID NO: 8894 - DNA, 15 bp, Homo sapiens
cttacctgtaaaaca

SEQ ID NO: 8895 - DNA, 15 bp, Homo sapiens
ccttacctgtaaaac

SEQ ID NO: 8896 - DNA, 15 bp, Homo sapiens
tccttacctgtaaaa

SEQ ID NO: 8897 - DNA, 15 bp, Homo sapiens
ttccttacctgtaaa

SEQ ID NO: 8898 - DNA, 15 bp, Homo sapiens
tttccttacctgtaa

SEQ ID NO: 8899 - DNA, 15 bp, Homo sapiens
gtttccttacctgta

SEQ ID NO: 8900 - DNA, 15 bp, Homo sapiens
ggtttccttacctgt

SEQ ID NO: 8901 - DNA, 15 bp, Homo sapiens
tggtttccttacctg

SEQ ID NO: 8902 - DNA, 15 bp, Homo sapiens
ttggtttccttacct

SEQ ID NO: 8903 - DNA, 15 bp, Homo sapiens
tttggtttccttacc

SEQ ID NO: 8904 - DNA, 15 bp, Homo sapiens
ctttggtttccttac

SEQ ID NO: 8905 - DNA, 15 bp, Homo sapiens
cctttggtttcctta

SEQ ID NO: 8906 - DNA, 15 bp, Homo sapiens
gcctttggtttcctt

SEQ ID NO: 8907 - DNA, 15 bp, Homo sapiens
ggcctttggtttcct

SEQ ID NO: 8908 - DNA, 15 bp, Homo sapiens
tggcctttggtttcc

SEQ ID NO: 8909 - DNA, 15 bp, Homo sapiens
atggcctttggtttc

SEQ ID NO: 8910 - DNA, 15 bp, Homo sapiens
tatggcctttggttt

SEQ ID NO: 8911 - DNA, 15 bp, Homo sapiens
ctatggcctttggtt

SEQ ID NO: 8912 - DNA, 15 bp, Homo sapiens
tctatggcctttggt

SEQ ID NO: 8913 - DNA, 15 bp, Homo sapiens
ttctatggcctttgg

SEQ ID NO: 8914 - DNA, 15 bp, Homo sapiens
cttctatggcctttg

SEQ ID NO: 8915 - DNA, 15 bp, Homo sapiens
tcttctatggccttt

SEQ ID NO: 8916 - DNA, 15 bp, Homo sapiens
gtcttctatggcctt

SEQ ID NO: 8917 - DNA, 15 bp, Homo sapiens
agtcttctatggcct

SEQ ID NO: 8918 - DNA, 15 bp, Homo sapiens
aagtcttctatggcc

SEQ ID NO: 8919 - DNA, 15 bp, Homo sapiens
caagtcttctatggc

SEQ ID NO: 8920 - DNA, 15 bp, Homo sapiens
gcaagtcttctatgg

SEQ ID NO: 8921 - DNA, 15 bp, Homo sapiens
ggcaagtcttctatg

SEQ ID NO: 8922 - DNA, 15 bp, Homo sapiens
aggcaagtcttctat

SEQ ID NO: 8923 - DNA, 15 bp, Homo sapiens
aaggcaagtcttcta

SEQ ID NO: 8924 - DNA, 15 bp, Homo sapiens
taaggcaagtcttct

SEQ ID NO: 8925 - DNA, 15 bp, Homo sapiens
ataaggcaagtcttc

SEQ ID NO: 8926 - DNA, 15 bp, Homo sapiens
cataaggcaagtctt

SEQ ID NO: 8927 - DNA, 15 bp, Homo sapiens
acataaggcaagtct

SEQ ID NO: 8928 - DNA, 15 bp, Homo sapiens
gacataaggcaagtc

SEQ ID NO: 8929 - DNA, 15 bp, Homo sapiens
tgacataaggcaagt

SEQ ID NO: 8930 - DNA, 15 bp, Homo sapiens
atgacataaggcaag

SEQ ID NO: 8931 - DNA, 15 bp, Homo sapiens
catgacataaggcaa

SEQ ID NO: 8932 - DNA, 15 bp, Homo sapiens
tcatgacataaggca

SEQ ID NO: 8933 - DNA, 15 bp, Homo sapiens
ttcatgacataaggc

SEQ ID NO: 8934 - DNA, 15 bp, Homo sapiens
cttcatgacataagg

SEQ ID NO: 8935 - DNA, 15 bp, Homo sapiens
tcttcatgacataag

SEQ ID NO: 8936 - DNA, 15 bp, Homo sapiens
ttcttcatgacataa

SEQ ID NO: 8937 - DNA, 15 bp, Homo sapiens
tttcttcatgacata

SEQ ID NO: 8938 - DNA, 15 bp, Homo sapiens
ctttcttcatgacat

SEQ ID NO: 8939 - DNA, 15 bp, Homo sapiens
actttcttcatgaca

SEQ ID NO: 8940 - DNA, 15 bp, Homo sapiens
aactttcttcatgac

SEQ ID NO: 8941 - DNA, 15 bp, Homo sapiens
aaactttcttcatga

SEQ ID NO: 8942 - DNA, 15 bp, Homo sapiens
taaactttcttcatg

SEQ ID NO: 8943 - DNA, 15 bp, Homo sapiens
ataaactttcttcat

SEQ ID NO: 8944 - DNA, 15 bp, Homo sapiens
cataaactttcttca

SEQ ID NO: 8945 - DNA, 15 bp, Homo sapiens
acataaactttcttc

SEQ ID NO: 8946 - DNA, 15 bp, Homo sapiens
aacataaactttctt

SEQ ID NO: 8947 - DNA, 15 bp, Homo sapiens
taacataaactttct

SEQ ID NO: 8948 - DNA, 15 bp, Homo sapiens
ctaacataaactttc

SEQ ID NO: 8949 - DNA, 15 bp, Homo sapiens
tctaacataaacttt

SEQ ID NO: 8950 - DNA, 15 bp, Homo sapiens
ttctaacataaactt

SEQ ID NO: 8951 - DNA, 15 bp, Homo sapiens
gttctaacataaact

SEQ ID NO: 8952 - DNA, 15 bp, Homo sapiens
agttctaacataaac

SEQ ID NO: 8953 - DNA, 15 bp, Homo sapiens
gagttctaacataaa

SEQ ID NO: 8954 - DNA, 15 bp, Homo sapiens
tgagttctaacataa

SEQ ID NO: 8955 - DNA, 15 bp, Homo sapiens
ctgagttctaacata

SEQ ID NO: 8956 - DNA, 15 bp, Homo sapiens
cctgagttctaacat

SEQ ID NO: 8957 - DNA, 15 bp, Homo sapiens
ccctgagttctaaca

SEQ ID NO: 8958 - DNA, 15 bp, Homo sapiens
gccctgagttctaac

SEQ ID NO: 8959 - DNA, 15 bp, Homo sapiens
agccctgagttctaa

SEQ ID NO: 8960 - DNA, 15 bp, Homo sapiens
gagccctgagttcta

SEQ ID NO: 8961 - DNA, 15 bp, Homo sapiens
ggagccctgagttct

SEQ ID NO: 8962 - DNA, 15 bp, Homo sapiens
gggagccctgagttc

SEQ ID NO: 8963 - DNA, 15 bp, Homo sapiens
tgggagccctgagtt

SEQ ID NO: 8964 - DNA, 15 bp, Homo sapiens
ttgggagccctgagt

SEQ ID NO: 8965 - DNA, 15 bp, Homo sapiens
attgggagccctgag

SEQ ID NO: 8966 - DNA, 15 bp, Homo sapiens
aattgggagccctga

SEQ ID NO: 8967 - DNA, 15 bp, Homo sapiens
gaattgggagccctg

SEQ ID NO: 8968 - DNA, 15 bp, Homo sapiens
ggaattgggagccct

SEQ ID NO: 8969 - DNA, 15 bp, Homo sapiens
tggaattgggagccc

SEQ ID NO: 8970 - DNA, 15 bp, Homo sapiens
gtggaattgggagcc

SEQ ID NO: 8971 - DNA, 15 bp, Homo sapiens
agtggaattgggagc

SEQ ID NO: 8972 - DNA, 15 bp, Homo sapiens
cagtggaattgggag

SEQ ID NO: 8973 - DNA, 15 bp, Homo sapiens
acagtggaattggga

SEQ ID NO: 8974 - DNA, 15 bp, Homo sapiens
aacagtggaattggg

SEQ ID NO: 8975 - DNA, 15 bp, Homo sapiens
gaacagtggaattgg

SEQ ID NO: 8976 - DNA, 15 bp, Homo sapiens
agaacagtggaattg

SEQ ID NO: 8977 - DNA, 15 bp, Homo sapiens
aagaacagtggaatt

SEQ ID NO: 8978 - DNA, 15 bp, Homo sapiens
aaagaacagtggaat

SEQ ID NO: 8979 - DNA, 15 bp, Homo sapiens
taaagaacagtggaa

SEQ ID NO: 8980 - DNA, 15 bp, Homo sapiens
ataaagaacagtgga

SEQ ID NO: 8981 - DNA, 15 bp, Homo sapiens
aataaagaacagtgg

SEQ ID NO: 8982 - DNA, 15 bp, Homo sapiens
gaataaagaacagtg

SEQ ID NO: 8983 - DNA, 15 bp, Homo sapiens
agaataaagaacagt

SEQ ID NO: 8984 - DNA, 15 bp, Homo sapiens
tagaataaagaacag

SEQ ID NO: 8985 - DNA, 15 bp, Homo sapiens
gtagaataaagaaca

SEQ ID NO: 8986 - DNA, 15 bp, Homo sapiens
tgtagaataaagaac

SEQ ID NO: 8987 - DNA, 15 bp, Homo sapiens
gtgtagaataaagaa

SEQ ID NO: 8988 - DNA, 15 bp, Homo sapiens
ggtgtagaataaaga

SEQ ID NO: 8989 - DNA, 15 bp, Homo sapiens
aggtgtagaataaag

SEQ ID NO: 8990 - DNA, 15 bp, Homo sapiens
caggtgtagaataaa

SEQ ID NO: 8991 - DNA, 15 bp, Homo sapiens
ccaggtgtagaataa

SEQ ID NO: 8992 - DNA, 15 bp, Homo sapiens
cccaggtgtagaata

SEQ ID NO: 8993 - DNA, 15 bp, Homo sapiens
acccaggtgtagaat

SEQ ID NO: 8994 - DNA, 15 bp, Homo sapiens
cacccaggtgtagaa

SEQ ID NO: 8995 - DNA, 15 bp, Homo sapiens
ccacccaggtgtaga

SEQ ID NO: 8996 - DNA, 15 bp, Homo sapiens
accacccaggtgtag

SEQ ID NO: 8997 - DNA, 15 bp, Homo sapiens
gaccacccaggtgta

SEQ ID NO: 8998 - DNA, 15 bp, Homo sapiens
tgaccacccaggtgt

SEQ ID NO: 8999 - DNA, 15 bp, Homo sapiens
gtgaccacccaggtg

SEQ ID NO: 9000 - DNA, 15 bp, Homo sapiens
tgtgaccacccaggt

SEQ ID NO: 9001 - DNA, 15 bp, Homo sapiens
ttgtgaccacccagg

SEQ ID NO: 9002 - DNA, 15 bp, Homo sapiens
gttgtgaccacccag

SEQ ID NO: 9003 - DNA, 15 bp, Homo sapiens
agttgtgaccaccca

SEQ ID NO: 9004 - DNA, 15 bp, Homo sapiens
cagttgtgaccaccc

SEQ ID NO: 9005 - DNA, 15 bp, Homo sapiens
tcagttgtgaccacc

SEQ ID NO: 9006 - DNA, 15 bp, Homo sapiens
ttcagttgtgaccac

SEQ ID NO: 9007 - DNA, 15 bp, Homo sapiens
tttcagttgtgacca

SEQ ID NO: 9008 - DNA, 15 bp, Homo sapiens
ttttcagttgtgacc

SEQ ID NO: 9009 - DNA, 15 bp, Homo sapiens
attttcagttgtgac

SEQ ID NO: 9010 - DNA, 15 bp, Homo sapiens
cattttcagttgtga

SEQ ID NO: 9011 - DNA, 15 bp, Homo sapiens
acattttcagttgtg

SEQ ID NO: 9012 - DNA, 15 bp, Homo sapiens
aacattttcagttgt

SEQ ID NO: 9013 - DNA, 15 bp, Homo sapiens
aaacattttcagttg

SEQ ID NO: 9014 - DNA, 15 bp, Homo sapiens
aaaacattttcagtt

SEQ ID NO: 9015 - DNA, 15 bp, Homo sapiens
caaaacattttcagt

SEQ ID NO: 9016 - DNA, 15 bp, Homo sapiens
gcaaaacattttcag

SEQ ID NO: 9017 - DNA, 15 bp, Homo sapiens
agcaaaacattttca

SEQ ID NO: 9018 - DNA, 15 bp, Homo sapiens
aagcaaaacattttc

SEQ ID NO: 9019 - DNA, 15 bp, Homo sapiens
taagcaaaacatttt

SEQ ID NO: 9020 - DNA, 15 bp, Homo sapiens
ataagcaaaacattt

SEQ ID NO: 9021 - DNA, 15 bp, Homo sapiens
aataagcaaaacatt

SEQ ID NO: 9022 - DNA, 15 bp, Homo sapiens
aaataagcaaaacat

SEQ ID NO: 9023 - DNA, 15 bp, Homo sapiens
gaaataagcaaaaca

SEQ ID NO: 9024 - DNA, 15 bp, Homo sapiens
agaaataagcaaaac

SEQ ID NO: 9025 - DNA, 15 bp, Homo sapiens
tagaaataagcaaaa

SEQ ID NO: 9026 - DNA, 15 bp, Homo sapiens
ttagaaataagcaaa

SEQ ID NO: 9027 - DNA, 15 bp, Homo sapiens
tttagaaataagcaa

SEQ ID NO: 9028 - DNA, 15 bp, Homo sapiens
gtttagaaataagca

SEQ ID NO: 9029 - DNA, 15 bp, Homo sapiens
tgtttagaaataagc

SEQ ID NO: 9030 - DNA, 15 bp, Homo sapiens
ctgtttagaaataag

SEQ ID NO: 9031 - DNA, 15 bp, Homo sapiens
tctgtttagaaataa

SEQ ID NO: 9032 - DNA, 15 bp, Homo sapiens
ttctgtttagaaata

SEQ ID NO: 9033 - DNA, 15 bp, Homo sapiens
tttctgtttagaaat

SEQ ID NO: 9034 - DNA, 15 bp, Homo sapiens
atttctgtttagaaa

SEQ ID NO: 9035 - DNA, 15 bp, Homo sapiens
gatttctgtttagaa

SEQ ID NO: 9036 - DNA, 15 bp, Homo sapiens
tgatttctgtttaga

SEQ ID NO: 9037 - DNA, 15 bp, Homo sapiens
atgatttctgtttag

SEQ ID NO: 9038 - DNA, 15 bp, Homo sapiens
aatgatttctgttta

SEQ ID NO: 9039 - DNA, 15 bp, Homo sapiens
aaatgatttctgttt

SEQ ID NO: 9040 - DNA, 15 bp, Homo sapiens
aaaatgatttctgtt

SEQ ID NO: 9041 - DNA, 15 bp, Homo sapiens
aaaaatgatttctgt

SEQ ID NO: 9042 - DNA, 15 bp, Homo sapiens
aaaaaatgatttctg

SEQ ID NO: 9043 - DNA, 15 bp, Homo sapiens
caaaaaatgatttct

SEQ ID NO: 9044 - DNA, 15 bp, Homo sapiens
tcaaaaaatgatttc

SEQ ID NO: 9045 - DNA, 15 bp, Homo sapiens
gtcaaaaaatgattt

SEQ ID NO: 9046 - DNA, 15 bp, Homo sapiens
tgtcaaaaaatgatt

SEQ ID NO: 9047 - DNA, 15 bp, Homo sapiens
atgtcaaaaaatgat

SEQ ID NO: 9048 - DNA, 15 bp, Homo sapiens
catgtcaaaaaatga

SEQ ID NO: 9049 - DNA, 15 bp, Homo sapiens
acatgtcaaaaaatg

SEQ ID NO: 9050 - DNA, 15 bp, Homo sapiens
aacatgtcaaaaaat

SEQ ID NO: 9051 - DNA, 15 bp, Homo sapiens
gaacatgtcaaaaaa

SEQ ID NO: 9052 - DNA, 15 bp, Homo sapiens
tgaacatgtcaaaaa

SEQ ID NO: 9053 - DNA, 15 bp, Homo sapiens
atgaacatgtcaaaa

SEQ ID NO: 9054 - DNA, 15 bp, Homo sapiens
aatgaacatgtcaaa

SEQ ID NO: 9055 - DNA, 15 bp, Homo sapiens
aaatgaacatgtcaa

SEQ ID NO: 9056 - DNA, 15 bp, Homo sapiens
aaaatgaacatgtca

SEQ ID NO: 9057 - DNA, 15 bp, Homo sapiens
taaaatgaacatgtc

SEQ ID NO: 9058 - DNA, 15 bp, Homo sapiens
ttaaaatgaacatgt

SEQ ID NO: 9059 - DNA, 15 bp, Homo sapiens
attaaaatgaacatg

SEQ ID NO: 9060 - DNA, 15 bp, Homo sapiens
cattaaaatgaacat

SEQ ID NO: 9061 - DNA, 15 bp, Homo sapiens
tcattaaaatgaaca

SEQ ID NO: 9062 - DNA, 15 bp, Homo sapiens
atcattaaaatgaac

SEQ ID NO: 9063 - DNA, 15 bp, Homo sapiens
catcattaaaatgaa

SEQ ID NO: 9064 - DNA, 15 bp, Homo sapiens
acatcattaaaatga

SEQ ID NO: 9065 - DNA, 15 bp, Homo sapiens
cacatcattaaaatg

SEQ ID NO: 9066 - DNA, 15 bp, Homo sapiens
acacatcattaaaat

SEQ ID NO: 9067 - DNA, 15 bp, Homo sapiens
gacacatcattaaaa

SEQ ID NO: 9068 - DNA, 15 bp, Homo sapiens
agacacatcattaaa

SEQ ID NO: 9069 - DNA, 15 bp, Homo sapiens
tagacacatcattaa

SEQ ID NO: 9070 - DNA, 15 bp, Homo sapiens
atagacacatcatta

SEQ ID NO: 9071 - DNA, 15 bp, Homo sapiens
catagacacatcatt

SEQ ID NO: 9072 - DNA, 15 bp, Homo sapiens
gcatagacacatcat

SEQ ID NO: 9073 - DNA, 15 bp, Homo sapiens
ggcatagacacatca

SEQ ID NO: 9074 - DNA, 15 bp, Homo sapiens
aggcatagacacatc

SEQ ID NO: 9075 - DNA, 15 bp, Homo sapiens
caggcatagacacat

SEQ ID NO: 9076 - DNA, 15 bp, Homo sapiens
ccaggcatagacaca

SEQ ID NO: 9077 - DNA, 15 bp, Homo sapiens
cccaggcatagacac

SEQ ID NO: 9078 - DNA, 15 bp, Homo sapiens
ccccaggcatagaca

SEQ ID NO: 9079 - DNA, 15 bp, Homo sapiens
gccccaggcatagac

SEQ ID NO: 9080 - DNA, 15 bp, Homo sapiens
agccccaggcataga

SEQ ID NO: 9081 - DNA, 15 bp, Homo sapiens
tagccccaggcatag

SEQ ID NO: 9082 - DNA, 15 bp, Homo sapiens
ttagccccaggcata

SEQ ID NO: 9083 - DNA, 15 bp, Homo sapiens
attagccccaggcat

SEQ ID NO: 9084 - DNA, 15 bp, Homo sapiens
cattagccccaggca

SEQ ID NO: 9085 - DNA, 15 bp, Homo sapiens
acattagccccaggc

SEQ ID NO: 9086 - DNA, 15 bp, Homo sapiens
gacattagccccagg

SEQ ID NO: 9087 - DNA, 15 bp, Homo sapiens
tgacattagccccag

SEQ ID NO: 9088 - DNA, 15 bp, Homo sapiens
atgacattagcccca

SEQ ID NO: 9089 - DNA, 15 bp, Homo sapiens
catgacattagcccc

SEQ ID NO: 9090 - DNA, 15 bp, Homo sapiens
tcatgacattagccc

SEQ ID NO: 9091 - DNA, 15 bp, Homo sapiens
ttcatgacattagcc

SEQ ID NO: 9092 - DNA, 15 bp, Homo sapiens
tttcatgacattagc

SEQ ID NO: 9093 - DNA, 15 bp, Homo sapiens
ttttcatgacattag

SEQ ID NO: 9094 - DNA, 15 bp, Homo sapiens
gttttcatgacatta

SEQ ID NO: 9095 - DNA, 15 bp, Homo sapiens
tgttttcatgacatt

SEQ ID NO: 9096 - DNA, 15 bp, Homo sapiens
ttgttttcatgacat

SEQ ID NO: 9097 - DNA, 15 bp, Homo sapiens
attgttttcatgaca

SEQ ID NO: 9098 - DNA, 15 bp, Homo sapiens
cattgttttcatgac

SEQ ID NO: 9099 - DNA, 15 bp, Homo sapiens
acattgttttcatga

SEQ ID NO: 9100 - DNA, 15 bp, Homo sapiens
cacattgttttcatg

SEQ ID NO: 9101 - DNA, 15 bp, Homo sapiens
acacattgttttcat

SEQ ID NO: 9102 - DNA, 15 bp, Homo sapiens
gacacattgttttca

SEQ ID NO: 9103 - DNA, 15 bp, Homo sapiens
agacacattgttttc

SEQ ID NO: 9104 - DNA, 15 bp, Homo sapiens
cagacacattgtttt

SEQ ID NO: 9105 - DNA, 15 bp, Homo sapiens
ccagacacattgttt

SEQ ID NO: 9106 - DNA, 15 bp, Homo sapiens
accagacacattgtt

SEQ ID NO: 9107 - DNA, 15 bp, Homo sapiens
taccagacacattgt

SEQ ID NO: 9108 - DNA, 15 bp, Homo sapiens
ttaccagacacattg

SEQ ID NO: 9109 - DNA, 15 bp, Homo sapiens
cttaccagacacatt

SEQ ID NO: 9110 - DNA, 15 bp, Homo sapiens
ccttaccagacacat

SEQ ID NO: 9111 - DNA, 15 bp, Homo sapiens
tccttaccagacaca

SEQ ID NO: 9112 - DNA, 15 bp, Homo sapiens
ctccttaccagacac

SEQ ID NO: 9113 - DNA, 15 bp, Homo sapiens
tctccttaccagaca

SEQ ID NO: 9114 - DNA, 15 bp, Homo sapiens
ttctccttaccagac

SEQ ID NO: 9115 - DNA, 15 bp, Homo sapiens
tttctccttaccaga

SEQ ID NO: 9116 - DNA, 15 bp, Homo sapiens
ttttctccttaccag

SEQ ID NO: 9117 - DNA, 15 bp, Homo sapiens
gttttctccttacca

SEQ ID NO: 9118 - DNA, 15 bp, Homo sapiens
agttttctccttacc

SEQ ID NO: 9119 - DNA, 15 bp, Homo sapiens
cagttttctccttac

SEQ ID NO: 9120 - DNA, 15 bp, Homo sapiens
tcagttttctcctta

SEQ ID NO: 9121 - DNA, 15 bp, Homo sapiens
ttcagttttctcctt

SEQ ID NO: 9122 - DNA, 15 bp, Homo sapiens
tttcagttttctcct

SEQ ID NO: 9123 - DNA, 15 bp, Homo sapiens
ttttcagttttctcc

SEQ ID NO: 9124 - DNA, 15 bp, Homo sapiens
tttttcagttttctc

SEQ ID NO: 9125 - DNA, 15 bp, Homo sapiens
ctttttcagttttct

SEQ ID NO: 9126 - DNA, 15 bp, Homo sapiens
actttttcagttttc

SEQ ID NO: 9127 - DNA, 15 bp, Homo sapiens
gactttttcagtttt

SEQ ID NO: 9128 - DNA, 15 bp, Homo sapiens
tgactttttcagttt

SEQ ID NO: 9129 - DNA, 15 bp, Homo sapiens
ctgactttttcagtt

SEQ ID NO: 9130 - DNA, 15 bp, Homo sapiens
gctgactttttcagt

SEQ ID NO: 9131 - DNA, 15 bp, Homo sapiens
tgctgactttttcag

SEQ ID NO: 9132 - DNA, 15 bp, Homo sapiens
atgctgactttttca

SEQ ID NO: 9133 - DNA, 15 bp, Homo sapiens
aatgctgactttttc

SEQ ID NO: 9134 - DNA, 15 bp, Homo sapiens
taatgctgacttttt

SEQ ID NO: 9135 - DNA, 15 bp, Homo sapiens
ttaatgctgactttt

SEQ ID NO: 9136 - DNA, 15 bp, Homo sapiens
tttaatgctgacttt

SEQ ID NO: 9137 - DNA, 15 bp, Homo sapiens
ttttaatgctgactt

SEQ ID NO: 9138 - DNA, 15 bp, Homo sapiens
tttttaatgctgact

SEQ ID NO: 9139 - DNA, 15 bp, Homo sapiens
ctttttaatgctgac

SEQ ID NO: 9140 - DNA, 15 bp, Homo sapiens
tctttttaatgctga

SEQ ID NO: 9141 - DNA, 15 bp, Homo sapiens
gtctttttaatgctg

SEQ ID NO: 9142 - DNA, 15 bp, Homo sapiens
tgtctttttaatgct

SEQ ID NO: 9143 - DNA, 15 bp, Homo sapiens
atgtctttttaatgc

SEQ ID NO: 9144 - DNA, 15 bp, Homo sapiens
aatgtctttttaatg

SEQ ID NO: 9145 - DNA, 15 bp, Homo sapiens
aaatgtctttttaat

SEQ ID NO: 9146 - DNA, 15 bp, Homo sapiens
taaatgtctttttaa

SEQ ID NO: 9147 - DNA, 15 bp, Homo sapiens
ttaaatgtcttttta

SEQ ID NO: 9148 - DNA, 15 bp, Homo sapiens
cttaaatgtcttttt

SEQ ID NO: 9149 - DNA, 15 bp, Homo sapiens
acttaaatgtctttt

SEQ ID NO: 9150 - DNA, 15 bp, Homo sapiens
gacttaaatgtcttt

SEQ ID NO: 9151 - DNA, 15 bp, Homo sapiens
ggacttaaatgtctt

SEQ ID NO: 9152 - DNA, 15 bp, Homo sapiens
tggacttaaatgtct

SEQ ID NO: 9153 - DNA, 15 bp, Homo sapiens
atggacttaaatgtc

SEQ ID NO: 9154 - DNA, 15 bp, Homo sapiens
aatggacttaaatgt

SEQ ID NO: 9155 - DNA, 15 bp, Homo sapiens
aaatggacttaaatg

SEQ ID NO: 9156 - DNA, 15 bp, Homo sapiens
gaaatggacttaaat

SEQ ID NO: 9157 - DNA, 15 bp, Homo sapiens
tgaaatggacttaaa

SEQ ID NO: 9158 - DNA, 15 bp, Homo sapiens
ttgaaatggacttaa

SEQ ID NO: 9159 - DNA, 15 bp, Homo sapiens
tttgaaatggactta

SEQ ID NO: 9160 - DNA, 15 bp, Homo sapiens
atttgaaatggactt

SEQ ID NO: 9161 - DNA, 15 bp, Homo sapiens
catttgaaatggact

SEQ ID NO: 9162 - DNA, 15 bp, Homo sapiens
gcatttgaaatggac

SEQ ID NO: 9163 - DNA, 15 bp, Homo sapiens
ggcatttgaaatgga

SEQ ID NO: 9164 - DNA, 15 bp, Homo sapiens
aggcatttgaaatgg

SEQ ID NO: 9165 - DNA, 15 bp, Homo sapiens
gaggcatttgaaatg

SEQ ID NO: 9166 - DNA, 15 bp, Homo sapiens
ggaggcatttgaaat

SEQ ID NO: 9167 - DNA, 15 bp, Homo sapiens
gggaggcatttgaaa

SEQ ID NO: 9168 - DNA, 15 bp, Homo sapiens
tgggaggcatttgaa

SEQ ID NO: 9169 - DNA, 15 bp, Homo sapiens
atgggaggcatttga

SEQ ID NO: 9170 - DNA, 15 bp, Homo sapiens
tatgggaggcatttg

SEQ ID NO: 9171 - DNA, 15 bp, Homo sapiens
atatgggaggcattt

SEQ ID NO: 9172 - DNA, 15 bp, Homo sapiens
catatgggaggcatt

SEQ ID NO: 9173 - DNA, 15 bp, Homo sapiens
gcatatgggaggcat

SEQ ID NO: 9174 - DNA, 15 bp, Homo sapiens
tgcatatgggaggca

SEQ ID NO: 9175 - DNA, 15 bp, Homo sapiens
ctgcatatgggaggc

SEQ ID NO: 9176 - DNA, 15 bp, Homo sapiens
tctgcatatgggagg

SEQ ID NO: 9177 - DNA, 15 bp, Homo sapiens
gtctgcatatgggag

SEQ ID NO: 9178 - DNA, 15 bp, Homo sapiens
agtctgcatatggga

SEQ ID NO: 9179 - DNA, 15 bp, Homo sapiens
gagtctgcatatggg

SEQ ID NO: 9180 - DNA, 15 bp, Homo sapiens
ggagtctgcatatgg

SEQ ID NO: 9181 - DNA, 15 bp, Homo sapiens
tggagtctgcatatg

SEQ ID NO: 9182 - DNA, 15 bp, Homo sapiens
gtggagtctgcatat

SEQ ID NO: 9183 - DNA, 15 bp, Homo sapiens
agtggagtctgcata

SEQ ID NO: 9184 - DNA, 15 bp, Homo sapiens
aagtggagtctgcat

SEQ ID NO: 9185 - DNA, 15 bp, Homo sapiens
aaagtggagtctgca

SEQ ID NO: 9186 - DNA, 15 bp, Homo sapiens
taaagtggagtctgc

SEQ ID NO: 9187 - DNA, 15 bp, Homo sapiens
ataaagtggagtctg

SEQ ID NO: 9188 - DNA, 15 bp, Homo sapiens
gataaagtggagtct

SEQ ID NO: 9189 - DNA, 15 bp, Homo sapiens
agataaagtggagtc

SEQ ID NO: 9190 - DNA, 15 bp, Homo sapiens
gagataaagtggagt

SEQ ID NO: 9191 - DNA, 15 bp, Homo sapiens
ggagataaagtggag

SEQ ID NO: 9192 - DNA, 15 bp, Homo sapiens
aggagataaagtgga

SEQ ID NO: 9193 - DNA, 15 bp, Homo sapiens
gaggagataaagtgg

SEQ ID NO: 9194 - DNA, 15 bp, Homo sapiens
ggaggagataaagtg

SEQ ID NO: 9195 - DNA, 15 bp, Homo sapiens
tggaggagataaagt

SEQ ID NO: 9196 - DNA, 15 bp, Homo sapiens
ctggaggagataaag

SEQ ID NO: 9197 - DNA, 15 bp, Homo sapiens
actggaggagataaa

SEQ ID NO: 9198 - DNA, 15 bp, Homo sapiens
aactggaggagataa

SEQ ID NO: 9199 - DNA, 15 bp, Homo sapiens
gaactggaggagata

SEQ ID NO: 9200 - DNA, 15 bp, Homo sapiens
agaactggaggagat

SEQ ID NO: 9201 - DNA, 15 bp, Homo sapiens
gagaactggaggaga

SEQ ID NO: 9202 - DNA, 15 bp, Homo sapiens
agagaactggaggag

SEQ ID NO: 9203 - DNA, 15 bp, Homo sapiens
tagagaactggagga

SEQ ID NO: 9204 - DNA, 15 bp, Homo sapiens
ttagagaactggagg

SEQ ID NO: 9205 - DNA, 15 bp, Homo sapiens
tttagagaactggag

SEQ ID NO: 9206 - DNA, 15 bp, Homo sapiens
ttttagagaactgga

SEQ ID NO: 9207 - DNA, 15 bp, Homo sapiens
gttttagagaactgg

SEQ ID NO: 9208 - DNA, 15 bp, Homo sapiens
ggttttagagaactg

SEQ ID NO: 9209 - DNA, 15 bp, Homo sapiens
gggttttagagaact

SEQ ID NO: 9210 - DNA, 15 bp, Homo sapiens
agggttttagagaac

SEQ ID NO: 9211 - DNA, 15 bp, Homo sapiens
aagggttttagagaa

SEQ ID NO: 9212 - DNA, 15 bp, Homo sapiens
gaagggttttagaga

SEQ ID NO: 9213 - DNA, 15 bp, Homo sapiens
tgaagggttttagag

SEQ ID NO: 9214 - DNA, 15 bp, Homo sapiens
gtgaagggttttaga

SEQ ID NO: 9215 - DNA, 15 bp, Homo sapiens
agtgaagggttttag

SEQ ID NO: 9216 - DNA, 15 bp, Homo sapiens
gagtgaagggtttta

SEQ ID NO: 9217 - DNA, 15 bp, Homo sapiens
ggagtgaagggtttt

SEQ ID NO: 9218 - DNA, 15 bp, Homo sapiens
aggagtgaagggttt

SEQ ID NO: 9219 - DNA, 15 bp, Homo sapiens
aaggagtgaagggtt

SEQ ID NO: 9220 - DNA, 15 bp, Homo sapiens
caaggagtgaagggt

SEQ ID NO: 9221 - DNA, 15 bp, Homo sapiens
ccaaggagtgaaggg

SEQ ID NO: 9222 - DNA, 15 bp, Homo sapiens
gccaaggagtgaagg

SEQ ID NO: 9223 - DNA, 15 bp, Homo sapiens
agccaaggagtgaag

SEQ ID NO: 9224 - DNA, 15 bp, Homo sapiens
aagccaaggagtgaa

SEQ ID NO: 9225 - DNA, 15 bp, Homo sapiens
aaagccaaggagtga

SEQ ID NO: 9226 - DNA, 15 bp, Homo sapiens
aaaagccaaggagtg

SEQ ID NO: 9227 - DNA, 15 bp, Homo sapiens
aaaaagccaaggagt

SEQ ID NO: 9228 - DNA, 15 bp, Homo sapiens
gaaaaagccaaggag

SEQ ID NO: 9229 - DNA, 15 bp, Homo sapiens
agaaaaagccaagga

SEQ ID NO: 9230 - DNA, 15 bp, Homo sapiens
cagaaaaagccaagg

SEQ ID NO: 9231 - DNA, 15 bp, Homo sapiens
ccagaaaaagccaag

SEQ ID NO: 9232 - DNA, 15 bp, Homo sapiens
gccagaaaaagccaa

SEQ ID NO: 9233 - DNA, 15 bp, Homo sapiens
agccagaaaaagcca

SEQ ID NO: 9234 - DNA, 15 bp, Homo sapiens
tagccagaaaaagcc

SEQ ID NO: 9235 - DNA, 15 bp, Homo sapiens
ttagccagaaaaagc

SEQ ID NO: 9236 - DNA, 15 bp, Homo sapiens
attagccagaaaaag

SEQ ID NO: 9237 - DNA, 15 bp, Homo sapiens
tattagccagaaaaa

SEQ ID NO: 9238 - DNA, 15 bp, Homo sapiens
gtattagccagaaaa

SEQ ID NO: 9239 - DNA, 15 bp, Homo sapiens
tgtattagccagaaa

SEQ ID NO: 9240 - DNA, 15 bp, Homo sapiens
gtgtattagccagaa

SEQ ID NO: 9241 - DNA, 15 bp, Homo sapiens
tgtgtattagccaga

SEQ ID NO: 9242 - DNA, 15 bp, Homo sapiens
gtgtgtattagccag

SEQ ID NO: 9243 - DNA, 15 bp, Homo sapiens
tgtgtgtattagcca

SEQ ID NO: 9244 - DNA, 15 bp, Homo sapiens
atgtgtgtattagcc

SEQ ID NO: 9245 - DNA, 15 bp, Homo sapiens
gatgtgtgtattagc

SEQ ID NO: 9246 - DNA, 15 bp, Homo sapiens
agatgtgtgtattag

SEQ ID NO: 9247 - DNA, 15 bp, Homo sapiens
tagatgtgtgtatta

SEQ ID NO: 9248 - DNA, 15 bp, Homo sapiens
ctagatgtgtgtatt

SEQ ID NO: 9249 - DNA, 15 bp, Homo sapiens
gctagatgtgtgtat

SEQ ID NO: 9250 - DNA, 15 bp, Homo sapiens
agctagatgtgtgta

SEQ ID NO: 9251 - DNA, 15 bp, Homo sapiens
tagctagatgtgtgt

SEQ ID NO: 9252 - DNA, 15 bp, Homo sapiens
ttagctagatgtgtg

SEQ ID NO: 9253 - DNA, 15 bp, Homo sapiens
cttagctagatgtgt

SEQ ID NO: 9254 - DNA, 15 bp, Homo sapiens
tcttagctagatgtg

SEQ ID NO: 9255 - DNA, 15 bp, Homo sapiens
ttcttagctagatgt

SEQ ID NO: 9256 - DNA, 15 bp, Homo sapiens
tttcttagctagatg

SEQ ID NO: 9257 - DNA, 15 bp, Homo sapiens
ctttcttagctagat

SEQ ID NO: 9258 - DNA, 15 bp, Homo sapiens
gctttcttagctaga

SEQ ID NO: 9259 - DNA, 15 bp, Homo sapiens
agctttcttagctag

SEQ ID NO: 9260 - DNA, 15 bp, Homo sapiens
gagctttcttagcta

SEQ ID NO: 9261 - DNA, 15 bp, Homo sapiens
tgagctttcttagct

SEQ ID NO: 9262 - DNA, 15 bp, Homo sapiens
ttgagctttcttagc

SEQ ID NO: 9263 - DNA, 15 bp, Homo sapiens
gttgagctttcttag

SEQ ID NO: 9264 - DNA, 15 bp, Homo sapiens
agttgagctttctta

SEQ ID NO: 9265 - DNA, 15 bp, Homo sapiens
aagttgagctttctt

SEQ ID NO: 9266 - DNA, 15 bp, Homo sapiens
aaagttgagctttct

SEQ ID NO: 9267 - DNA, 15 bp, Homo sapiens
aaaagttgagctttc

SEQ ID NO: 9268 - DNA, 15 bp, Homo sapiens
gaaaagttgagcttt

SEQ ID NO: 9269 - DNA, 15 bp, Homo sapiens
agaaaagttgagctt

SEQ ID NO: 9270 - DNA, 15 bp, Homo sapiens
aagaaaagttgagct

SEQ ID NO: 9271 - DNA, 15 bp, Homo sapiens
aaagaaaagttgagc

SEQ ID NO: 9272 - DNA, 15 bp, Homo sapiens
aaaagaaaagttgag

SEQ ID NO: 9273 - DNA, 15 bp, Homo sapiens
aaaaagaaaagttga

SEQ ID NO: 9274 - DNA, 15 bp, Homo sapiens
taaaaagaaaagttg

SEQ ID NO: 9275 - DNA, 15 bp, Homo sapiens
gtaaaaagaaaagtt

SEQ ID NO: 9276 - DNA, 15 bp, Homo sapiens
agtaaaaagaaaagt

SEQ ID NO: 9277 - DNA, 15 bp, Homo sapiens
tagtaaaaagaaaag

SEQ ID NO: 9278 - DNA, 15 bp, Homo sapiens
ctagtaaaaagaaaa

SEQ ID NO: 9279 - DNA, 15 bp, Homo sapiens
tctagtaaaaagaaa

SEQ ID NO: 9280 - DNA, 15 bp, Homo sapiens
ctctagtaaaaagaa

SEQ ID NO: 9281 - DNA, 15 bp, Homo sapiens
tctctagtaaaaaga

SEQ ID NO: 9282 - DNA, 15 bp, Homo sapiens
atctctagtaaaaag

SEQ ID NO: 9283 - DNA, 15 bp, Homo sapiens
catctctagtaaaaa

SEQ ID NO: 9284 - DNA, 15 bp, Homo sapiens
acatctctagtaaaa

SEQ ID NO: 9285 - DNA, 15 bp, Homo sapiens
aacatctctagtaaa

SEQ ID NO: 9286 - DNA, 15 bp, Homo sapiens
gaacatctctagtaa

SEQ ID NO: 9287 - DNA, 15 bp, Homo sapiens
agaacatctctagta

SEQ ID NO: 9288 - DNA, 15 bp, Homo sapiens
gagaacatctctagt

SEQ ID NO: 9289 - DNA, 15 bp, Homo sapiens
agagaacatctctag

SEQ ID NO: 9290 - DNA, 15 bp, Homo sapiens
gagagaacatctcta

SEQ ID NO: 9291 - DNA, 15 bp, Homo sapiens
agagagaacatctct

SEQ ID NO: 9292 - DNA, 15 bp, Homo sapiens
cagagagaacatctc

SEQ ID NO: 9293 - DNA, 15 bp, Homo sapiens
acagagagaacatct

SEQ ID NO: 9294 - DNA, 15 bp, Homo sapiens
cacagagagaacatc

SEQ ID NO: 9295 - DNA, 15 bp, Homo sapiens
acacagagagaacat

SEQ ID NO: 9296 - DNA, 15 bp, Homo sapiens
cacacagagagaaca

SEQ ID NO: 9297 - DNA, 15 bp, Homo sapiens
acacacagagagaac

SEQ ID NO: 9298 - DNA, 15 bp, Homo sapiens
cacacacagagagaa

SEQ ID NO: 9299 - DNA, 15 bp, Homo sapiens
gcgcacacacacaca

SEQ ID NO: 9300 - DNA, 15 bp, Homo sapiens
cgcgcacacacacac

SEQ ID NO: 9301 - DNA, 15 bp, Homo sapiens
gcgcgcacacacaca

SEQ ID NO: 9302 - DNA, 15 bp, Homo sapiens
cgcgcgcacacacac

SEQ ID NO: 9303 - DNA, 15 bp, Homo sapiens
gcgcgcgcacacaca

SEQ ID NO: 9304 - DNA, 15 bp, Homo sapiens
cgcgcgcgcacacac

SEQ ID NO: 9305 - DNA, 15 bp, Homo sapiens
gcgcgcgcgcacaca

SEQ ID NO: 9306 - DNA, 15 bp, Homo sapiens
cgcgcgcgcgcacac

SEQ ID NO: 9307 - DNA, 15 bp, Homo sapiens
acgcgcgcgcgcaca

SEQ ID NO: 9308 - DNA, 15 bp, Homo sapiens
cacgcgcgcgcgcac

SEQ ID NO: 9309 - DNA, 15 bp, Homo sapiens
acacgcgcgcgcgca

SEQ ID NO: 9310 - DNA, 15 bp, Homo sapiens
cacacgcgcgcgcgc

SEQ ID NO: 9311 - DNA, 15 bp, Homo sapiens
gcacacgcgcgcgcg

SEQ ID NO: 9312 - DNA, 15 bp, Homo sapiens
cgcacacgcgcgcgc

SEQ ID NO: 9313 - DNA, 15 bp, Homo sapiens
gcgcacacgcgcgcg

SEQ ID NO: 9314 - DNA, 15 bp, Homo sapiens
cgcgcacacgcgcgc

SEQ ID NO: 9315 - DNA, 15 bp, Homo sapiens
gcgcgcacacgcgcg

SEQ ID NO: 9316 - DNA, 15 bp, Homo sapiens
cgcgcgcacacgcgc

SEQ ID NO: 9317 - DNA, 15 bp, Homo sapiens
gcgcgcgcacacgcg

SEQ ID NO: 9318 - DNA, 15 bp, Homo sapiens
agcgcgcgcacacgc

SEQ ID NO: 9319 - DNA, 15 bp, Homo sapiens
gagcgcgcgcacacg

SEQ ID NO: 9320 - DNA, 15 bp, Homo sapiens
agagcgcgcgcacac

SEQ ID NO: 9321 - DNA, 15 bp, Homo sapiens
cagagcgcgcgcaca

SEQ ID NO: 9322 - DNA, 15 bp, Homo sapiens
tcagagcgcgcgcac

SEQ ID NO: 9323 - DNA, 15 bp, Homo sapiens
ctcagagcgcgcgca

SEQ ID NO: 9324 - DNA, 15 bp, Homo sapiens
actcagagcgcgcgc

SEQ ID NO: 9325 - DNA, 15 bp, Homo sapiens
aactcagagcgcgcg

SEQ ID NO: 9326 - DNA, 15 bp, Homo sapiens
aaactcagagcgcgc

SEQ ID NO: 9327 - DNA, 15 bp, Homo sapiens
taaactcagagcgcg

SEQ ID NO: 9328 - DNA, 15 bp, Homo sapiens
ataaactcagagcgc

SEQ ID NO: 9329 - DNA, 15 bp, Homo sapiens
gataaactcagagcg

SEQ ID NO: 9330 - DNA, 15 bp, Homo sapiens
ggataaactcagagc

SEQ ID NO: 9331 - DNA, 15 bp, Homo sapiens
aggataaactcagag

SEQ ID NO: 9332 - DNA, 15 bp, Homo sapiens
taggataaactcaga

SEQ ID NO: 9333 - DNA, 15 bp, Homo sapiens
gtaggataaactcag

SEQ ID NO: 9334 - DNA, 15 bp, Homo sapiens
agtaggataaactca

SEQ ID NO: 9335 - DNA, 15 bp, Homo sapiens
aagtaggataaactc

SEQ ID NO: 9336 - DNA, 15 bp, Homo sapiens
aaagtaggataaact

SEQ ID NO: 9337 - DNA, 15 bp, Homo sapiens
aaaagtaggataaac

SEQ ID NO: 9338 - DNA, 15 bp, Homo sapiens
taaaagtaggataaa

SEQ ID NO: 9339 - DNA, 15 bp, Homo sapiens
ttaaaagtaggataa

SEQ ID NO: 9340 - DNA, 15 bp, Homo sapiens
tttaaaagtaggata

SEQ ID NO: 9341 - DNA, 15 bp, Homo sapiens
ttttaaaagtaggat

SEQ ID NO: 9342 - DNA, 15 bp, Homo sapiens
tttttaaaagtagga

SEQ ID NO: 9343 - DNA, 15 bp, Homo sapiens
ctttttaaaagtagg

SEQ ID NO: 9344 - DNA, 15 bp, Homo sapiens
gctttttaaaagtag

SEQ ID NO: 9345 - DNA, 15 bp, Homo sapiens
agctttttaaaagta

SEQ ID NO: 9346 - DNA, 15 bp, Homo sapiens
cagctttttaaaagt

SEQ ID NO: 9347 - DNA, 15 bp, Homo sapiens
tcagctttttaaaag

SEQ ID NO: 9348 - DNA, 15 bp, Homo sapiens
ctcagctttttaaaa

SEQ ID NO: 9349 - DNA, 15 bp, Homo sapiens
actcagctttttaaa

SEQ ID NO: 9350 - DNA, 15 bp, Homo sapiens
cactcagctttttaa

SEQ ID NO: 9351 - DNA, 15 bp, Homo sapiens
ccactcagcttttta

SEQ ID NO: 9352 - DNA, 15 bp, Homo sapiens
accactcagcttttt

SEQ ID NO: 9353 - DNA, 15 bp, Homo sapiens
caccactcagctttt

SEQ ID NO: 9354 - DNA, 15 bp, Homo sapiens
acaccactcagcttt

SEQ ID NO: 9355 - DNA, 15 bp, Homo sapiens
aacaccactcagctt

SEQ ID NO: 9356 - DNA, 15 bp, Homo sapiens
aaacaccactcagct

SEQ ID NO: 9357 - DNA, 15 bp, Homo sapiens
aaaacaccactcagc

SEQ ID NO: 9358 - DNA, 15 bp, Homo sapiens
taaaacaccactcag

SEQ ID NO: 9359 - DNA, 15 bp, Homo sapiens
gtaaaacaccactca

SEQ ID NO: 9360 - DNA, 15 bp, Homo sapiens
tgtaaaacaccactc

SEQ ID NO: 9361 - DNA, 15 bp, Homo sapiens
gtgtaaaacaccact

SEQ ID NO: 9362 - DNA, 15 bp, Homo sapiens
tgtgtaaaacaccac

SEQ ID NO: 9363 - DNA, 15 bp, Homo sapiens
atgtgtaaaacacca

SEQ ID NO: 9364 - DNA, 15 bp, Homo sapiens
aatgtgtaaaacacc

SEQ ID NO: 9365 - DNA, 15 bp, Homo sapiens
aaatgtgtaaaacac

SEQ ID NO: 9366 - DNA, 15 bp, Homo sapiens
aaaatgtgtaaaaca

SEQ ID NO: 9367 - DNA, 15 bp, Homo sapiens
caaaatgtgtaaaac

SEQ ID NO: 9368 - DNA, 15 bp, Homo sapiens
ccaaaatgtgtaaaa

SEQ ID NO: 9369 - DNA, 15 bp, Homo sapiens
tccaaaatgtgtaaa

SEQ ID NO: 9370 - DNA, 15 bp, Homo sapiens
ttccaaaatgtgtaa

SEQ ID NO: 9371 - DNA, 15 bp, Homo sapiens
attccaaaatgtgta

SEQ ID NO: 9372 - DNA, 15 bp, Homo sapiens
tattccaaaatgtgt

SEQ ID NO: 9373 - DNA, 15 bp, Homo sapiens
ctattccaaaatgtg

SEQ ID NO: 9374 - DNA, 15 bp, Homo sapiens
cctattccaaaatgt

SEQ ID NO: 9375 - DNA, 15 bp, Homo sapiens
gcctattccaaaatg

SEQ ID NO: 9376 - DNA, 15 bp, Homo sapiens
tgcctattccaaaat

SEQ ID NO: 9377 - DNA, 15 bp, Homo sapiens
ctgcctattccaaaa

SEQ ID NO: 9378 - DNA, 15 bp, Homo sapiens
gctgcctattccaaa

SEQ ID NO: 9379 - DNA, 15 bp, Homo sapiens
agctgcctattccaa

SEQ ID NO: 9380 - DNA, 15 bp, Homo sapiens
tagctgcctattcca

SEQ ID NO: 9381 - DNA, 15 bp, Homo sapiens
ctagctgcctattcc

SEQ ID NO: 9382 - DNA, 15 bp, Homo sapiens
actagctgcctattc

SEQ ID NO: 9383 - DNA, 15 bp, Homo sapiens
cactagctgcctatt

SEQ ID NO: 9384 - DNA, 15 bp, Homo sapiens
gcactagctgcctat

SEQ ID NO: 9385 - DNA, 15 bp, Homo sapiens
agcactagctgccta

SEQ ID NO: 9386 - DNA, 15 bp, Homo sapiens
aagcactagctgcct

SEQ ID NO: 9387 - DNA, 15 bp, Homo sapiens
gaagcactagctgcc

SEQ ID NO: 9388 - DNA, 15 bp, Homo sapiens
agaagcactagctgc

SEQ ID NO: 9389 - DNA, 15 bp, Homo sapiens
aagaagcactagctg

SEQ ID NO: 9390 - DNA, 15 bp, Homo sapiens
aaagaagcactagct

SEQ ID NO: 9391 - DNA, 15 bp, Homo sapiens
aaaagaagcactagc

SEQ ID NO: 9392 - DNA, 15 bp, Homo sapiens
aaaaagaagcactag

SEQ ID NO: 9393 - DNA, 15 bp, Homo sapiens
gaaaaagaagcacta

SEQ ID NO: 9394 - DNA, 15 bp, Homo sapiens
agaaaaagaagcact

SEQ ID NO: 9395 - DNA, 15 bp, Homo sapiens
cagaaaaagaagcac

SEQ ID NO: 9396 - DNA, 15 bp, Homo sapiens
gcagaaaaagaagca

SEQ ID NO: 9397 - DNA, 15 bp, Homo sapiens
agcagaaaaagaagc

SEQ ID NO: 9398 - DNA, 15 bp, Homo sapiens
aagcagaaaaagaag

SEQ ID NO: 9399 - DNA, 15 bp, Homo sapiens
aaagcagaaaaagaa

SEQ ID NO: 9400 - DNA, 15 bp, Homo sapiens
aaaagcagaaaaaga

SEQ ID NO: 9401 - DNA, 15 bp, Homo sapiens
caaaagcagaaaaag

SEQ ID NO: 9402 - DNA, 15 bp, Homo sapiens
tcaaaagcagaaaaa

SEQ ID NO: 9403 - DNA, 15 bp, Homo sapiens
ttcaaaagcagaaaa

SEQ ID NO: 9404 - DNA, 15 bp, Homo sapiens
cttcaaaagcagaaa

SEQ ID NO: 9405 - DNA, 15 bp, Homo sapiens
acttcaaaagcagaa

SEQ ID NO: 9406 - DNA, 15 bp, Homo sapiens
aacttcaaaagcaga

SEQ ID NO: 9407 - DNA, 15 bp, Homo sapiens
aaacttcaaaagcag

SEQ ID NO: 9408 - DNA, 15 bp, Homo sapiens
gaaacttcaaaagca

SEQ ID NO: 9409 - DNA, 15 bp, Homo sapiens
ggaaacttcaaaagc

SEQ ID NO: 9410 - DNA, 15 bp, Homo sapiens
aggaaacttcaaaag

SEQ ID NO: 9411 - DNA, 15 bp, Homo sapiens
caggaaacttcaaaa

SEQ ID NO: 9412 - DNA, 15 bp, Homo sapiens
ccaggaaacttcaaa

SEQ ID NO: 9413 - DNA, 15 bp, Homo sapiens
cccaggaaacttcaa

SEQ ID NO: 9414 - DNA, 15 bp, Homo sapiens
tcccaggaaacttca

SEQ ID NO: 9415 - DNA, 15 bp, Homo sapiens
ttcccaggaaacttc

SEQ ID NO: 9416 - DNA, 15 bp, Homo sapiens
cttcccaggaaactt

SEQ ID NO: 9417 - DNA, 15 bp, Homo sapiens
acttcccaggaaact

SEQ ID NO: 9418 - DNA, 15 bp, Homo sapiens
gacttcccaggaaac

SEQ ID NO: 9419 - DNA, 15 bp, Homo sapiens
ggacttcccaggaaa

SEQ ID NO: 9420 - DNA, 15 bp, Homo sapiens
gggacttcccaggaa

SEQ ID NO: 9421 - DNA, 15 bp, Homo sapiens
agggacttcccagga

SEQ ID NO: 9422 - DNA, 15 bp, Homo sapiens
aagggacttcccagg

SEQ ID NO: 9423 - DNA, 15 bp, Homo sapiens
taagggacttcccag

SEQ ID NO: 9424 - DNA, 15 bp, Homo sapiens
ttaagggacttccca

SEQ ID NO: 9425 - DNA, 15 bp, Homo sapiens
tttaagggacttccc

SEQ ID NO: 9426 - DNA, 15 bp, Homo sapiens
ttttaagggacttcc

SEQ ID NO: 9427 - DNA, 15 bp, Homo sapiens
cttttaagggacttc

SEQ ID NO: 9428 - DNA, 15 bp, Homo sapiens
gcttttaagggactt

SEQ ID NO: 9429 - DNA, 15 bp, Homo sapiens
tgcttttaagggact

SEQ ID NO: 9430 - DNA, 15 bp, Homo sapiens
atgcttttaagggac

SEQ ID NO: 9431 - DNA, 15 bp, Homo sapiens
tatgcttttaaggga

SEQ ID NO: 9432 - DNA, 15 bp, Homo sapiens
gtatgcttttaaggg

SEQ ID NO: 9433 - DNA, 15 bp, Homo sapiens
ggtatgcttttaagg

SEQ ID NO: 9434 - DNA, 15 bp, Homo sapiens
tggtatgcttttaag

SEQ ID NO: 9435 - DNA, 15 bp, Homo sapiens
gtggtatgcttttaa

SEQ ID NO: 9436 - DNA, 15 bp, Homo sapiens
tgtggtatgctttta

SEQ ID NO: 9437 - DNA, 15 bp, Homo sapiens
ttgtggtatgctttt

SEQ ID NO: 9438 - DNA, 15 bp, Homo sapiens
tttgtggtatgcttt

SEQ ID NO: 9439 - DNA, 15 bp, Homo sapiens
ttttgtggtatgctt

SEQ ID NO: 9440 - DNA, 15 bp, Homo sapiens
attttgtggtatgct

SEQ ID NO: 9441 - DNA, 15 bp, Homo sapiens
aattttgtggtatgc

SEQ ID NO: 9442 - DNA, 15 bp, Homo sapiens
taattttgtggtatg

SEQ ID NO: 9443 - DNA, 15 bp, Homo sapiens
ttaattttgtggtat

SEQ ID NO: 9444 - DNA, 15 bp, Homo sapiens
attaattttgtggta

SEQ ID NO: 9445 - DNA, 15 bp, Homo sapiens
gattaattttgtggt

SEQ ID NO: 9446 - DNA, 15 bp, Homo sapiens
agattaattttgtgg

SEQ ID NO: 9447 - DNA, 15 bp, Homo sapiens
gagattaattttgtg

SEQ ID NO: 9448 - DNA, 15 bp, Homo sapiens
agagattaattttgt

SEQ ID NO: 9449 - DNA, 15 bp, Homo sapiens
aagagattaattttg

SEQ ID NO: 9450 - DNA, 15 bp, Homo sapiens
gaagagattaatttt

SEQ ID NO: 9451 - DNA, 15 bp, Homo sapiens
ggaagagattaattt

SEQ ID NO: 9452 - DNA, 15 bp, Homo sapiens
aggaagagattaatt

SEQ ID NO: 9453 - DNA, 15 bp, Homo sapiens
caggaagagattaat

SEQ ID NO: 9454 - DNA, 15 bp, Homo sapiens
acaggaagagattaa

SEQ ID NO: 9455 - DNA, 15 bp, Homo sapiens
aacaggaagagatta

SEQ ID NO: 9456 - DNA, 15 bp, Homo sapiens
aaacaggaagagatt

SEQ ID NO: 9457 - DNA, 15 bp, Homo sapiens
caaacaggaagagat

SEQ ID NO: 9458 - DNA, 15 bp, Homo sapiens
gcaaacaggaagaga

SEQ ID NO: 9459 - DNA, 15 bp, Homo sapiens
ggcaaacaggaagag

SEQ ID NO: 9460 - DNA, 15 bp, Homo sapiens
tggcaaacaggaaga

SEQ ID NO: 9461 - DNA, 15 bp, Homo sapiens
ctggcaaacaggaag

SEQ ID NO: 9462 - DNA, 15 bp, Homo sapiens
tctggcaaacaggaa

SEQ ID NO: 9463 - DNA, 15 bp, Homo sapiens
ctctggcaaacagga

SEQ ID NO: 9464 - DNA, 15 bp, Homo sapiens
cctctggcaaacagg

SEQ ID NO: 9465 - DNA, 15 bp, Homo sapiens
ccctctggcaaacag

SEQ ID NO: 9466 - DNA, 15 bp, Homo sapiens
accctctggcaaaca

SEQ ID NO: 9467 - DNA, 15 bp, Homo sapiens
aaccctctggcaaac

SEQ ID NO: 9468 - DNA, 15 bp, Homo sapiens
caaccctctggcaaa

SEQ ID NO: 9469 - DNA, 15 bp, Homo sapiens
gcaaccctctggcaa

SEQ ID NO: 9470 - DNA, 15 bp, Homo sapiens
agcaaccctctggca

SEQ ID NO: 9471 - DNA, 15 bp, Homo sapiens
gagcaaccctctggc

SEQ ID NO: 9472 - DNA, 15 bp, Homo sapiens
agagcaaccctctgg

SEQ ID NO: 9473 - DNA, 15 bp, Homo sapiens
tagagcaaccctctg

SEQ ID NO: 9474 - DNA, 15 bp, Homo sapiens
gtagagcaaccctct

SEQ ID NO: 9475 - DNA, 15 bp, Homo sapiens
agtagagcaaccctc

SEQ ID NO: 9476 - DNA, 15 bp, Homo sapiens
gagtagagcaaccct

SEQ ID NO: 9477 - DNA, 15 bp, Homo sapiens
agagtagagcaaccc

SEQ ID NO: 9478 - DNA, 15 bp, Homo sapiens
tagagtagagcaacc

SEQ ID NO: 9479 - DNA, 15 bp, Homo sapiens
ttagagtagagcaac

SEQ ID NO: 9480 - DNA, 15 bp, Homo sapiens
tttagagtagagcaa

SEQ ID NO: 9481 - DNA, 15 bp, Homo sapiens
atttagagtagagca

SEQ ID NO: 9482 - DNA, 15 bp, Homo sapiens
aatttagagtagagc

SEQ ID NO: 9483 - DNA, 15 bp, Homo sapiens
aaatttagagtagag

SEQ ID NO: 9484 - DNA, 15 bp, Homo sapiens
caaatttagagtaga

SEQ ID NO: 9485 - DNA, 15 bp, Homo sapiens
ccaaatttagagtag

SEQ ID NO: 9486 - DNA, 15 bp, Homo sapiens
gccaaatttagagta

SEQ ID NO: 9487 - DNA, 15 bp, Homo sapiens
agccaaatttagagt

SEQ ID NO: 9488 - DNA, 15 bp, Homo sapiens
gagccaaatttagag

SEQ ID NO: 9489 - DNA, 15 bp, Homo sapiens
agagccaaatttaga

SEQ ID NO: 9490 - DNA, 15 bp, Homo sapiens
tagagccaaatttag

SEQ ID NO: 9491 - DNA, 15 bp, Homo sapiens
gtagagccaaattta

SEQ ID NO: 9492 - DNA, 15 bp, Homo sapiens
tgtagagccaaattt

SEQ ID NO: 9493 - DNA, 15 bp, Homo sapiens
atgtagagccaaatt

SEQ ID NO: 9494 - DNA, 15 bp, Homo sapiens
gatgtagagccaaat

SEQ ID NO: 9495 - DNA, 15 bp, Homo sapiens
agatgtagagccaaa

SEQ ID NO: 9496 - DNA, 15 bp, Homo sapiens
tagatgtagagccaa

SEQ ID NO: 9497 - DNA, 15 bp, Homo sapiens
gtagatgtagagcca

SEQ ID NO: 9498 - DNA, 15 bp, Homo sapiens
tgtagatgtagagcc

SEQ ID NO: 9499 - DNA, 15 bp, Homo sapiens
ttgtagatgtagagc

SEQ ID NO: 9500 - DNA, 15 bp, Homo sapiens
cttgtagatgtagag

SEQ ID NO: 9501 - DNA, 15 bp, Homo sapiens
gcttgtagatgtaga

SEQ ID NO: 9502 - DNA, 15 bp, Homo sapiens
tgcttgtagatgtag

SEQ ID NO: 9503 - DNA, 15 bp, Homo sapiens
atgcttgtagatgta

SEQ ID NO: 9504 - DNA, 15 bp, Homo sapiens
catgcttgtagatgt

SEQ ID NO: 9505 - DNA, 15 bp, Homo sapiens
gcatgcttgtagatg

SEQ ID NO: 9506 - DNA, 15 bp, Homo sapiens
agcatgcttgtagat

SEQ ID NO: 9507 - DNA, 15 bp, Homo sapiens
gagcatgcttgtaga

SEQ ID NO: 9508 - DNA, 15 bp, Homo sapiens
agagcatgcttgtag

SEQ ID NO: 9509 - DNA, 15 bp, Homo sapiens
tagagcatgcttgta

SEQ ID NO: 9510 - DNA, 15 bp, Homo sapiens
ctagagcatgcttgt

SEQ ID NO: 9511 - DNA, 15 bp, Homo sapiens
cctagagcatgcttg

SEQ ID NO: 9512 - DNA, 15 bp, Homo sapiens
tcctagagcatgctt

SEQ ID NO: 9513 - DNA, 15 bp, Homo sapiens
ttcctagagcatgct

SEQ ID NO: 9514 - DNA, 15 bp, Homo sapiens
cttcctagagcatgc

SEQ ID NO: 9515 - DNA, 15 bp, Homo sapiens
gcttcctagagcatg

SEQ ID NO: 9516 - DNA, 15 bp, Homo sapiens
ggcttcctagagcat

SEQ ID NO: 9517 - DNA, 15 bp, Homo sapiens
tggcttcctagagca

SEQ ID NO: 9518 - DNA, 15 bp, Homo sapiens
ttggcttcctagagc

SEQ ID NO: 9519 - DNA, 15 bp, Homo sapiens
attggcttcctagag

SEQ ID NO: 9520 - DNA, 15 bp, Homo sapiens
aattggcttcctaga

SEQ ID NO: 9521 - DNA, 15 bp, Homo sapiens
taattggcttcctag

SEQ ID NO: 9522 - DNA, 15 bp, Homo sapiens
ttaattggcttccta

SEQ ID NO: 9523 - DNA, 15 bp, Homo sapiens
tttaattggcttcct

SEQ ID NO: 9524 - DNA, 15 bp, Homo sapiens
ttttaattggcttcc

SEQ ID NO: 9525 - DNA, 15 bp, Homo sapiens
attttaattggcttc

SEQ ID NO: 9526 - DNA, 15 bp, Homo sapiens
cattttaattggctt

SEQ ID NO: 9527 - DNA, 15 bp, Homo sapiens
ccattttaattggct

SEQ ID NO: 9528 - DNA, 15 bp, Homo sapiens
tccattttaattggc

SEQ ID NO: 9529 - DNA, 15 bp, Homo sapiens
atccattttaattgg

SEQ ID NO: 9530 - DNA, 15 bp, Homo sapiens
catccattttaattg

SEQ ID NO: 9531 - DNA, 15 bp, Homo sapiens
tcatccattttaatt

SEQ ID NO: 9532 - DNA, 15 bp, Homo sapiens
ttcatccattttaat

SEQ ID NO: 9533 - DNA, 15 bp, Homo sapiens
gttcatccattttaa

SEQ ID NO: 9534 - DNA, 15 bp, Homo sapiens
tgttcatccatttta

SEQ ID NO: 9535 - DNA, 15 bp, Homo sapiens
ttgttcatccatttt

SEQ ID NO: 9536 - DNA, 15 bp, Homo sapiens
cttgttcatccattt

SEQ ID NO: 9537 - DNA, 15 bp, Homo sapiens
gcttgttcatccatt

SEQ ID NO: 9538 - DNA, 15 bp, Homo sapiens
tgcttgttcatccat

SEQ ID NO: 9539 - DNA, 15 bp, Homo sapiens
ttgcttgttcatcca

SEQ ID NO: 9540 - DNA, 15 bp, Homo sapiens
tttgcttgttcatcc

SEQ ID NO: 9541 - DNA, 15 bp, Homo sapiens
ttttgcttgttcatc

SEQ ID NO: 9542 - DNA, 15 bp, Homo sapiens
attttgcttgttcat

SEQ ID NO: 9543 - DNA, 15 bp, Homo sapiens
cattttgcttgttca

SEQ ID NO: 9544 - DNA, 15 bp, Homo sapiens
tcattttgcttgttc

SEQ ID NO: 9545 - DNA, 15 bp, Homo sapiens
ttcattttgcttgtt

SEQ ID NO: 9546 - DNA, 15 bp, Homo sapiens
tttcattttgcttgt

SEQ ID NO: 9547 - DNA, 15 bp, Homo sapiens
ttttcattttgcttg

SEQ ID NO: 9548 - DNA, 15 bp, Homo sapiens
gttttcattttgctt

SEQ ID NO: 9549 - DNA, 15 bp, Homo sapiens
tgttttcattttgct

SEQ ID NO: 9550 - DNA, 15 bp, Homo sapiens
atgttttcattttgc

SEQ ID NO: 9551 - DNA, 15 bp, Homo sapiens
tatgttttcattttg

SEQ ID NO: 9552 - DNA, 15 bp, Homo sapiens
gtatgttttcatttt

SEQ ID NO: 9553 - DNA, 15 bp, Homo sapiens
ggtatgttttcattt

SEQ ID NO: 9554 - DNA, 15 bp, Homo sapiens
aggtatgttttcatt

SEQ ID NO: 9555 - DNA, 15 bp, Homo sapiens
taggtatgttttcat

SEQ ID NO: 9556 - DNA, 15 bp, Homo sapiens
ataggtatgttttca

SEQ ID NO: 9557 - DNA, 15 bp, Homo sapiens
cataggtatgttttc

SEQ ID NO: 9558 - DNA, 15 bp, Homo sapiens
ccataggtatgtttt

SEQ ID NO: 9559 - DNA, 15 bp, Homo sapiens
tccataggtatgttt

SEQ ID NO: 9560 - DNA, 15 bp, Homo sapiens
gtccataggtatgtt

SEQ ID NO: 9561 - DNA, 15 bp, Homo sapiens
ggtccataggtatgt

SEQ ID NO: 9562 - DNA, 15 bp, Homo sapiens
tggtccataggtatg

SEQ ID NO: 9563 - DNA, 15 bp, Homo sapiens
ttggtccataggtat

SEQ ID NO: 9564 - DNA, 15 bp, Homo sapiens
gttggtccataggta

SEQ ID NO: 9565 - DNA, 15 bp, Homo sapiens
ggttggtccataggt

SEQ ID NO: 9566 - DNA, 15 bp, Homo sapiens
gggttggtccatagg

SEQ ID NO: 9567 - DNA, 15 bp, Homo sapiens
tgggttggtccatag

SEQ ID NO: 9568 - DNA, 15 bp, Homo sapiens
ttgggttggtccata

SEQ ID NO: 9569 - DNA, 15 bp, Homo sapiens
cttgggttggtccat

SEQ ID NO: 9570 - DNA, 15 bp, Homo sapiens
ccttgggttggtcca

SEQ ID NO: 9571 - DNA, 15 bp, Homo sapiens
accttgggttggtcc

SEQ ID NO: 9572 - DNA, 15 bp, Homo sapiens
aaccttgggttggtc

SEQ ID NO: 9573 - DNA, 15 bp, Homo sapiens
taaccttgggttggt

SEQ ID NO: 9574 - DNA, 15 bp, Homo sapiens
gtaaccttgggttgg

SEQ ID NO: 9575 - DNA, 15 bp, Homo sapiens
ggtaaccttgggttg

SEQ ID NO: 9576 - DNA, 15 bp, Homo sapiens
cggtaaccttgggtt

SEQ ID NO: 9577 - DNA, 15 bp, Homo sapiens
acggtaaccttgggt

SEQ ID NO: 9578 - DNA, 15 bp, Homo sapiens
gacggtaaccttggg

SEQ ID NO: 9579 - DNA, 15 bp, Homo sapiens
tgacggtaaccttgg

SEQ ID NO: 9580 - DNA, 15 bp, Homo sapiens
ctgacggtaaccttg

SEQ ID NO: 9581 - DNA, 15 bp, Homo sapiens
cctgacggtaacctt

SEQ ID NO: 9582 - DNA, 15 bp, Homo sapiens
acctgacggtaacct

SEQ ID NO: 9583 - DNA, 15 bp, Homo sapiens
cacctgacggtaacc

SEQ ID NO: 9584 - DNA, 15 bp, Homo sapiens
ccacctgacggtaac

SEQ ID NO: 9585 - DNA, 15 bp, Homo sapiens
accacctgacggtaa

SEQ ID NO: 9586 - DNA, 15 bp, Homo sapiens
caccacctgacggta

SEQ ID NO: 9587 - DNA, 15 bp, Homo sapiens
tcaccacctgacggt

SEQ ID NO: 9588 - DNA, 15 bp, Homo sapiens
ttcaccacctgacgg

SEQ ID NO: 9589 - DNA, 15 bp, Homo sapiens
cttcaccacctgacg

SEQ ID NO: 9590 - DNA, 15 bp, Homo sapiens
ccttcaccacctgac

SEQ ID NO: 9591 - DNA, 15 bp, Homo sapiens
tccttcaccacctga

SEQ ID NO: 9592 - DNA, 15 bp, Homo sapiens
gtccttcaccacctg

SEQ ID NO: 9593 - DNA, 15 bp, Homo sapiens
agtccttcaccacct

SEQ ID NO: 9594 - DNA, 15 bp, Homo sapiens
aagtccttcaccacc

SEQ ID NO: 9595 - DNA, 15 bp, Homo sapiens
gaagtccttcaccac

SEQ ID NO: 9596 - DNA, 15 bp, Homo sapiens
tgaagtccttcacca

SEQ ID NO: 9597 - DNA, 15 bp, Homo sapiens
ctgaagtccttcacc

SEQ ID NO: 9598 - DNA, 15 bp, Homo sapiens
tctgaagtccttcac

SEQ ID NO: 9599 - DNA, 15 bp, Homo sapiens
ttctgaagtccttca

SEQ ID NO: 9600 - DNA, 15 bp, Homo sapiens
attctgaagtccttc

SEQ ID NO: 9601 - DNA, 15 bp, Homo sapiens
gattctgaagtcctt

SEQ ID NO: 9602 - DNA, 15 bp, Homo sapiens
tgattctgaagtcct

SEQ ID NO: 9603 - DNA, 15 bp, Homo sapiens
gtgattctgaagtcc

SEQ ID NO: 9604 - DNA, 15 bp, Homo sapiens
agtgattctgaagtc

SEQ ID NO: 9605 - DNA, 15 bp, Homo sapiens
aagtgattctgaagt

SEQ ID NO: 9606 - DNA, 15 bp, Homo sapiens
taagtgattctgaag

SEQ ID NO: 9607 - DNA, 15 bp, Homo sapiens
gtaagtgattctgaa

SEQ ID NO: 9608 - DNA, 15 bp, Homo sapiens
ggtaagtgattctga

SEQ ID NO: 9609 - DNA, 15 bp, Homo sapiens
aggtaagtgattctg

SEQ ID NO: 9610 - DNA, 15 bp, Homo sapiens
caggtaagtgattct

SEQ ID NO: 9611 - DNA, 15 bp, Homo sapiens
tcaggtaagtgattc

SEQ ID NO: 9612 - DNA, 15 bp, Homo sapiens
ttcaggtaagtgatt

SEQ ID NO: 9613 - DNA, 15 bp, Homo sapiens
cttcaggtaagtgat

SEQ ID NO: 9614 - DNA, 15 bp, Homo sapiens
gcttcaggtaagtga

SEQ ID NO: 9615 - DNA, 15 bp, Homo sapiens
tgcttcaggtaagtg

SEQ ID NO: 9616 - DNA, 15 bp, Homo sapiens
atgcttcaggtaagt

SEQ ID NO: 9617 - DNA, 15 bp, Homo sapiens
aatgcttcaggtaag

SEQ ID NO: 9618 - DNA, 15 bp, Homo sapiens
caatgcttcaggtaa

SEQ ID NO: 9619 - DNA, 15 bp, Homo sapiens
acaatgcttcaggta

SEQ ID NO: 9620 - DNA, 15 bp, Homo sapiens
cacaatgcttcaggt

SEQ ID NO: 9621 - DNA, 15 bp, Homo sapiens
acacaatgcttcagg

SEQ ID NO: 9622 - DNA, 15 bp, Homo sapiens
aacacaatgcttcag

SEQ ID NO: 9623 - DNA, 15 bp, Homo sapiens
aaacacaatgcttca

SEQ ID NO: 9624 - DNA, 15 bp, Homo sapiens
gaaacacaatgcttc

SEQ ID NO: 9625 - DNA, 15 bp, Homo sapiens
agaaacacaatgctt

SEQ ID NO: 9626 - DNA, 15 bp, Homo sapiens
gagaaacacaatgct

SEQ ID NO: 9627 - DNA, 15 bp, Homo sapiens
tgagaaacacaatgc

SEQ ID NO: 9628 - DNA, 15 bp, Homo sapiens
ctgagaaacacaatg

SEQ ID NO: 9629 - DNA, 15 bp, Homo sapiens
gctgagaaacacaat

SEQ ID NO: 9630 - DNA, 15 bp, Homo sapiens
tgctgagaaacacaa

SEQ ID NO: 9631 - DNA, 15 bp, Homo sapiens
ctgctgagaaacaca

SEQ ID NO: 9632 - DNA, 15 bp, Homo sapiens
gctgctgagaaacac

SEQ ID NO: 9633 - DNA, 15 bp, Homo sapiens
tgctgctgagaaaca

SEQ ID NO: 9634 - DNA, 15 bp, Homo sapiens
ttgctgctgagaaac

SEQ ID NO: 9635 - DNA, 15 bp, Homo sapiens
tttgctgctgagaaa

SEQ ID NO: 9636 - DNA, 15 bp, Homo sapiens
ctttgctgctgagaa

SEQ ID NO: 9637 - DNA, 15 bp, Homo sapiens
tctttgctgctgaga

SEQ ID NO: 9638 - DNA, 15 bp, Homo sapiens
ctctttgctgctgag

SEQ ID NO: 9639 - DNA, 15 bp, Homo sapiens
actctttgctgctga

SEQ ID NO: 9640 - DNA, 15 bp, Homo sapiens
tactctttgctgctg

SEQ ID NO: 9641 - DNA, 15 bp, Homo sapiens
ctactctttgctgct

SEQ ID NO: 9642 - DNA, 15 bp, Homo sapiens
gctactctttgctgc

SEQ ID NO: 9643 - DNA, 15 bp, Homo sapiens
tgctactctttgctg

SEQ ID NO: 9644 - DNA, 15 bp, Homo sapiens
atgctactctttgct

SEQ ID NO: 9645 - DNA, 15 bp, Homo sapiens
gatgctactctttgc

SEQ ID NO: 9646 - DNA, 15 bp, Homo sapiens
ggatgctactctttg

SEQ ID NO: 9647 - DNA, 15 bp, Homo sapiens
gggatgctactcttt

SEQ ID NO: 9648 - DNA, 15 bp, Homo sapiens
ggggatgctactctt

SEQ ID NO: 9649 - DNA, 15 bp, Homo sapiens
tggggatgctactct

SEQ ID NO: 9650 - DNA, 15 bp, Homo sapiens
ctggggatgctactc

SEQ ID NO: 9651 - DNA, 15 bp, Homo sapiens
gctggggatgctact

SEQ ID NO: 9652 - DNA, 15 bp, Homo sapiens
ggctggggatgctac

SEQ ID NO: 9653 - DNA, 15 bp, Homo sapiens
gggctggggatgcta

SEQ ID NO: 9654 - DNA, 15 bp, Homo sapiens
agggctggggatgct

SEQ ID NO: 9655 - DNA, 15 bp, Homo sapiens
cagggctggggatgc

SEQ ID NO: 9656 - DNA, 15 bp, Homo sapiens
tcagggctggggatg

SEQ ID NO: 9657 - DNA, 15 bp, Homo sapiens
gtcagggctggggat

SEQ ID NO: 9658 - DNA, 15 bp, Homo sapiens
ggtcagggctgggga

SEQ ID NO: 9659 - DNA, 15 bp, Homo sapiens
gggtcagggctgggg

SEQ ID NO: 9660 - DNA, 15 bp, Homo sapiens
agggtcagggctggg

SEQ ID NO: 9661 - DNA, 15 bp, Homo sapiens
tagggtcagggctgg

SEQ ID NO: 9662 - DNA, 15 bp, Homo sapiens
ttagggtcagggctg

SEQ ID NO: 9663 - DNA, 15 bp, Homo sapiens
attagggtcagggct

SEQ ID NO: 9664 - DNA, 15 bp, Homo sapiens
aattagggtcagggc

SEQ ID NO: 9665 - DNA, 15 bp, Homo sapiens
aaattagggtcaggg

SEQ ID NO: 9666 - DNA, 15 bp, Homo sapiens
aaaattagggtcagg

SEQ ID NO: 9667 - DNA, 15 bp, Homo sapiens
taaaattagggtcag

SEQ ID NO: 9668 - DNA, 15 bp, Homo sapiens
ataaaattagggtca

SEQ ID NO: 9669 - DNA, 15 bp, Homo sapiens
aataaaattagggtc

SEQ ID NO: 9670 - DNA, 15 bp, Homo sapiens
gaataaaattagggt

SEQ ID NO: 9671 - DNA, 15 bp, Homo sapiens
ggaataaaattaggg

SEQ ID NO: 9672 - DNA, 15 bp, Homo sapiens
aggaataaaattagg

SEQ ID NO: 9673 - DNA, 15 bp, Homo sapiens
taggaataaaattag

SEQ ID NO: 9674 - DNA, 15 bp, Homo sapiens
gtaggaataaaatta

SEQ ID NO: 9675 - DNA, 15 bp, Homo sapiens
agtaggaataaaatt

SEQ ID NO: 9676 - DNA, 15 bp, Homo sapiens
aagtaggaataaaat

SEQ ID NO: 9677 - DNA, 15 bp, Homo sapiens
gaagtaggaataaaa

SEQ ID NO: 9678 - DNA, 15 bp, Homo sapiens
agaagtaggaataaa

SEQ ID NO: 9679 - DNA, 15 bp, Homo sapiens
gagaagtaggaataa

SEQ ID NO: 9680 - DNA, 15 bp, Homo sapiens
tgagaagtaggaata

SEQ ID NO: 9681 - DNA, 15 bp, Homo sapiens
ctgagaagtaggaat

SEQ ID NO: 9682 - DNA, 15 bp, Homo sapiens
actgagaagtaggaa

SEQ ID NO: 9683 - DNA, 15 bp, Homo sapiens
aactgagaagtagga

SEQ ID NO: 9684 - DNA, 15 bp, Homo sapiens
gaactgagaagtagg

SEQ ID NO: 9685 - DNA, 15 bp, Homo sapiens
agaactgagaagtag

SEQ ID NO: 9686 - DNA, 15 bp, Homo sapiens
cagaactgagaagta

SEQ ID NO: 9687 - DNA, 15 bp, Homo sapiens
tcagaactgagaagt

SEQ ID NO: 9688 - DNA, 15 bp, Homo sapiens
ctcagaactgagaag

SEQ ID NO: 9689 - DNA, 15 bp, Homo sapiens
cctcagaactgagaa

SEQ ID NO: 9690 - DNA, 15 bp, Homo sapiens
gcctcagaactgaga

SEQ ID NO: 9691 - DNA, 15 bp, Homo sapiens
tgcctcagaactgag

SEQ ID NO: 9692 - DNA, 15 bp, Homo sapiens
atgcctcagaactga

SEQ ID NO: 9693 - DNA, 15 bp, Homo sapiens
catgcctcagaactg

SEQ ID NO: 9694 - DNA, 15 bp, Homo sapiens
ccatgcctcagaact

SEQ ID NO: 9695 - DNA, 15 bp, Homo sapiens
tccatgcctcagaac

SEQ ID NO: 9696 - DNA, 15 bp, Homo sapiens
gtccatgcctcagaa

SEQ ID NO: 9697 - DNA, 15 bp, Homo sapiens
agtccatgcctcaga

SEQ ID NO: 9698 - DNA, 15 bp, Homo sapiens
aagtccatgcctcag

SEQ ID NO: 9699 - DNA, 15 bp, Homo sapiens
taagtccatgcctca

SEQ ID NO: 9700 - DNA, 15 bp, Homo sapiens
gtaagtccatgcctc

SEQ ID NO: 9701 - DNA, 15 bp, Homo sapiens
tgtaagtccatgcct

SEQ ID NO: 9702 - DNA, 15 bp, Homo sapiens
ttgtaagtccatgcc

SEQ ID NO: 9703 - DNA, 15 bp, Homo sapiens
tttgtaagtccatgc

SEQ ID NO: 9704 - DNA, 15 bp, Homo sapiens
ttttgtaagtccatg

SEQ ID NO: 9705 - DNA, 15 bp, Homo sapiens
tttttgtaagtccat

SEQ ID NO: 9706 - DNA, 15 bp, Homo sapiens
ctttttgtaagtcca

SEQ ID NO: 9707 - DNA, 15 bp, Homo sapiens
tctttttgtaagtcc

SEQ ID NO: 9708 - DNA, 15 bp, Homo sapiens
gtctttttgtaagtc

SEQ ID NO: 9709 - DNA, 15 bp, Homo sapiens
tgtctttttgtaagt

SEQ ID NO: 9710 - DNA, 15 bp, Homo sapiens
gtgtctttttgtaag

SEQ ID NO: 9711 - DNA, 15 bp, Homo sapiens
tgtgtctttttgtaa

SEQ ID NO: 9712 - DNA, 15 bp, Homo sapiens
atgtgtctttttgta

SEQ ID NO: 9713 - DNA, 15 bp, Homo sapiens
tatgtgtctttttgt

SEQ ID NO: 9714 - DNA, 15 bp, Homo sapiens
gtatgtgtctttttg

SEQ ID NO: 9715 - DNA, 15 bp, Homo sapiens
tgtatgtgtcttttt

SEQ ID NO: 9716 - DNA, 15 bp, Homo sapiens
atgtatgtgtctttt

SEQ ID NO: 9717 - DNA, 15 bp, Homo sapiens
catgtatgtgtcttt

SEQ ID NO: 9718 - DNA, 15 bp, Homo sapiens
gcatgtatgtgtctt

SEQ ID NO: 9719 - DNA, 15 bp, Homo sapiens
tgcatgtatgtgtct

SEQ ID NO: 9720 - DNA, 15 bp, Homo sapiens
ttgcatgtatgtgtc

SEQ ID NO: 9721 - DNA, 15 bp, Homo sapiens
attgcatgtatgtgt

SEQ ID NO: 9722 - DNA, 15 bp, Homo sapiens
cattgcatgtatgtg

SEQ ID NO: 9723 - DNA, 15 bp, Homo sapiens
ccattgcatgtatgt

SEQ ID NO: 9724 - DNA, 15 bp, Homo sapiens
gccattgcatgtatg

SEQ ID NO: 9725 - DNA, 15 bp, Homo sapiens
ggccattgcatgtat

SEQ ID NO: 9726 - DNA, 15 bp, Homo sapiens
tggccattgcatgta

SEQ ID NO: 9727 - DNA, 15 bp, Homo sapiens
atggccattgcatgt

SEQ ID NO: 9728 - DNA, 15 bp, Homo sapiens
gatggccattgcatg

SEQ ID NO: 9729 - DNA, 15 bp, Homo sapiens
tgatggccattgcat

SEQ ID NO: 9730 - DNA, 15 bp, Homo sapiens
atgatggccattgca

SEQ ID NO: 9731 - DNA, 15 bp, Homo sapiens
catgatggccattgc

SEQ ID NO: 9732 - DNA, 15 bp, Homo sapiens
tcatgatggccattg

SEQ ID NO: 9733 - DNA, 15 bp, Homo sapiens
atcatgatggccatt

SEQ ID NO: 9734 - DNA, 15 bp, Homo sapiens
tatcatgatggccat

SEQ ID NO: 9735 - DNA, 15 bp, Homo sapiens
atatcatgatggcca

SEQ ID NO: 9736 - DNA, 15 bp, Homo sapiens
gatatcatgatggcc

SEQ ID NO: 9737 - DNA, 15 bp, Homo sapiens
ggatatcatgatggc

SEQ ID NO: 9738 - DNA, 15 bp, Homo sapiens
tggatatcatgatgg

SEQ ID NO: 9739 - DNA, 15 bp, Homo sapiens
ttggatatcatgatg

SEQ ID NO: 9740 - DNA, 15 bp, Homo sapiens
tttggatatcatgat

SEQ ID NO: 9741 - DNA, 15 bp, Homo sapiens
atttggatatcatga

SEQ ID NO: 9742 - DNA, 15 bp, Homo sapiens
tatttggatatcatg

SEQ ID NO: 9743 - DNA, 15 bp, Homo sapiens
ttatttggatatcat

SEQ ID NO: 9744 - DNA, 15 bp, Homo sapiens
cttatttggatatca

SEQ ID NO: 9745 - DNA, 15 bp, Homo sapiens
acttatttggatatc

SEQ ID NO: 9746 - DNA, 15 bp, Homo sapiens
tacttatttggatat

SEQ ID NO: 9747 - DNA, 15 bp, Homo sapiens
ctacttatttggata

SEQ ID NO: 9748 - DNA, 15 bp, Homo sapiens
cctacttatttggat

SEQ ID NO: 9749 - DNA, 15 bp, Homo sapiens
tcctacttatttgga

SEQ ID NO: 9750 - DNA, 15 bp, Homo sapiens
ttcctacttatttgg

SEQ ID NO: 9751 - DNA, 15 bp, Homo sapiens
tttcctacttatttg

SEQ ID NO: 9752 - DNA, 15 bp, Homo sapiens
ttttcctacttattt

SEQ ID NO: 9753 - DNA, 15 bp, Homo sapiens
cttttcctacttatt

SEQ ID NO: 9754 - DNA, 15 bp, Homo sapiens
ccttttcctacttat

SEQ ID NO: 9755 - DNA, 15 bp, Homo sapiens
tccttttcctactta

SEQ ID NO: 9756 - DNA, 15 bp, Homo sapiens
ttccttttcctactt

SEQ ID NO: 9757 - DNA, 15 bp, Homo sapiens
gttccttttcctact

SEQ ID NO: 9758 - DNA, 15 bp, Homo sapiens
agttccttttcctac

SEQ ID NO: 9759 - DNA, 15 bp, Homo sapiens
cagttccttttccta

SEQ ID NO: 9760 - DNA, 15 bp, Homo sapiens
acagttccttttcct

SEQ ID NO: 9761 - DNA, 15 bp, Homo sapiens
cacagttccttttcc

SEQ ID NO: 9762 - DNA, 15 bp, Homo sapiens
acacagttccttttc

SEQ ID NO: 9763 - DNA, 15 bp, Homo sapiens
aacacagttcctttt

SEQ ID NO: 9764 - DNA, 15 bp, Homo sapiens
aaacacagttccttt

SEQ ID NO: 9765 - DNA, 15 bp, Homo sapiens
gaaacacagttcctt

SEQ ID NO: 9766 - DNA, 15 bp, Homo sapiens
agaaacacagttcct

SEQ ID NO: 9767 - DNA, 15 bp, Homo sapiens
cagaaacacagttcc

SEQ ID NO: 9768 - DNA, 15 bp, Homo sapiens
gcagaaacacagttc

SEQ ID NO: 9769 - DNA, 15 bp, Homo sapiens
ggcagaaacacagtt

SEQ ID NO: 9770 - DNA, 15 bp, Homo sapiens
gggcagaaacacagt

SEQ ID NO: 9771 - DNA, 15 bp, Homo sapiens
tgggcagaaacacag

SEQ ID NO: 9772 - DNA, 15 bp, Homo sapiens
atgggcagaaacaca

SEQ ID NO: 9773 - DNA, 15 bp, Homo sapiens
catgggcagaaacac

SEQ ID NO: 9774 - DNA, 15 bp, Homo sapiens
tcatgggcagaaaca

SEQ ID NO: 9775 - DNA, 15 bp, Homo sapiens
ttcatgggcagaaac

SEQ ID NO: 9776 - DNA, 15 bp, Homo sapiens
cttcatgggcagaaa

SEQ ID NO: 9777 - DNA, 15 bp, Homo sapiens
acttcatgggcagaa

SEQ ID NO: 9778 - DNA, 15 bp, Homo sapiens
aacttcatgggcaga

SEQ ID NO: 9779 - DNA, 15 bp, Homo sapiens
aaacttcatgggcag

SEQ ID NO: 9780 - DNA, 15 bp, Homo sapiens
aaaacttcatgggca

SEQ ID NO: 9781 - DNA, 15 bp, Homo sapiens
taaaacttcatgggc

SEQ ID NO: 9782 - DNA, 15 bp, Homo sapiens
gtaaaacttcatggg

SEQ ID NO: 9783 - DNA, 15 bp, Homo sapiens
agtaaaacttcatgg

SEQ ID NO: 9784 - DNA, 15 bp, Homo sapiens
cagtaaaacttcatg

SEQ ID NO: 9785 - DNA, 15 bp, Homo sapiens
tcagtaaaacttcat

SEQ ID NO: 9786 - DNA, 15 bp, Homo sapiens
ttcagtaaaacttca

SEQ ID NO: 9787 - DNA, 15 bp, Homo sapiens
attcagtaaaacttc

SEQ ID NO: 9788 - DNA, 15 bp, Homo sapiens
aattcagtaaaactt

SEQ ID NO: 9789 - DNA, 15 bp, Homo sapiens
gaattcagtaaaact

SEQ ID NO: 9790 - DNA, 15 bp, Homo sapiens
tgaattcagtaaaac

SEQ ID NO: 9791 - DNA, 15 bp, Homo sapiens
ttgaattcagtaaaa

SEQ ID NO: 9792 - DNA, 15 bp, Homo sapiens
tttgaattcagtaaa

SEQ ID NO: 9793 - DNA, 15 bp, Homo sapiens
ctttgaattcagtaa

SEQ ID NO: 9794 - DNA, 15 bp, Homo sapiens
cctttgaattcagta

SEQ ID NO: 9795 - DNA, 15 bp, Homo sapiens
gcctttgaattcagt

SEQ ID NO: 9796 - DNA, 15 bp, Homo sapiens
tgcctttgaattcag

SEQ ID NO: 9797 - DNA, 15 bp, Homo sapiens
ttgcctttgaattca

SEQ ID NO: 9798 - DNA, 15 bp, Homo sapiens
gttgcctttgaattc

SEQ ID NO: 9799 - DNA, 15 bp, Homo sapiens
ggttgcctttgaatt

SEQ ID NO: 9800 - DNA, 15 bp, Homo sapiens
aggttgcctttgaat

SEQ ID NO: 9801 - DNA, 15 bp, Homo sapiens
taggttgcctttgaa

SEQ ID NO: 9802 - DNA, 15 bp, Homo sapiens
gtaggttgcctttga

SEQ ID NO: 9803 - DNA, 15 bp, Homo sapiens
ggtaggttgcctttg

SEQ ID NO: 9804 - DNA, 15 bp, Homo sapiens
aggtaggttgccttt

SEQ ID NO: 9805 - DNA, 15 bp, Homo sapiens
gaggtaggttgcctt

SEQ ID NO: 9806 - DNA, 15 bp, Homo sapiens
ggaggtaggttgcct

SEQ ID NO: 9807 - DNA, 15 bp, Homo sapiens
tggaggtaggttgcc

SEQ ID NO: 9808 - DNA, 15 bp, Homo sapiens
ctggaggtaggttgc

SEQ ID NO: 9809 - DNA, 15 bp, Homo sapiens
actggaggtaggttg

SEQ ID NO: 9810 - DNA, 15 bp, Homo sapiens
gactggaggtaggtt

SEQ ID NO: 9811 - DNA, 15 bp, Homo sapiens
tgactggaggtaggt

SEQ ID NO: 9812 - DNA, 15 bp, Homo sapiens
ttgactggaggtagg

SEQ ID NO: 9813 - DNA, 15 bp, Homo sapiens
attgactggaggtag

SEQ ID NO: 9814 - DNA, 15 bp, Homo sapiens
tattgactggaggta

SEQ ID NO: 9815 - DNA, 15 bp, Homo sapiens
ctattgactggaggt

SEQ ID NO: 9816 - DNA, 15 bp, Homo sapiens
cctattgactggagg

SEQ ID NO: 9817 - DNA, 15 bp, Homo sapiens
acctattgactggag

SEQ ID NO: 9818 - DNA, 15 bp, Homo sapiens
gacctattgactgga

SEQ ID NO: 9819 - DNA, 15 bp, Homo sapiens
tgacctattgactgg

SEQ ID NO: 9820 - DNA, 15 bp, Homo sapiens
ctgacctattgactg

SEQ ID NO: 9821 - DNA, 15 bp, Homo sapiens
tctgacctattgact

SEQ ID NO: 9822 - DNA, 15 bp, Homo sapiens
ttctgacctattgac

SEQ ID NO: 9823 - DNA, 15 bp, Homo sapiens
attctgacctattga

SEQ ID NO: 9824 - DNA, 15 bp, Homo sapiens
cattctgacctattg

SEQ ID NO: 9825 - DNA, 15 bp, Homo sapiens
gcattctgacctatt

SEQ ID NO: 9826 - DNA, 15 bp, Homo sapiens
tgcattctgacctat

SEQ ID NO: 9827 - DNA, 15 bp, Homo sapiens
ctgcattctgaccta

SEQ ID NO: 9828 - DNA, 15 bp, Homo sapiens
tctgcattctgacct

SEQ ID NO: 9829 - DNA, 15 bp, Homo sapiens
ttctgcattctgacc

SEQ ID NO: 9830 - DNA, 15 bp, Homo sapiens
tttctgcattctgac

SEQ ID NO: 9831 - DNA, 15 bp, Homo sapiens
atttctgcattctga

SEQ ID NO: 9832 - DNA, 15 bp, Homo sapiens
catttctgcattctg

SEQ ID NO: 9833 - DNA, 15 bp, Homo sapiens
ccatttctgcattct

SEQ ID NO: 9834 - DNA, 15 bp, Homo sapiens
gccatttctgcattc

SEQ ID NO: 9835 - DNA, 15 bp, Homo sapiens
agccatttctgcatt

SEQ ID NO: 9836 - DNA, 15 bp, Homo sapiens
cagccatttctgcat

SEQ ID NO: 9837 - DNA, 15 bp, Homo sapiens
tcagccatttctgca

SEQ ID NO: 9838 - DNA, 15 bp, Homo sapiens
ttcagccatttctgc

SEQ ID NO: 9839 - DNA, 15 bp, Homo sapiens
tttcagccatttctg

SEQ ID NO: 9840 - DNA, 15 bp, Homo sapiens
ttttcagccatttct

SEQ ID NO: 9841 - DNA, 15 bp, Homo sapiens
gttttcagccatttc

SEQ ID NO: 9842 - DNA, 15 bp, Homo sapiens
agttttcagccattt

SEQ ID NO: 9843 - DNA, 15 bp, Homo sapiens
gagttttcagccatt

SEQ ID NO: 9844 - DNA, 15 bp, Homo sapiens
agagttttcagccat

SEQ ID NO: 9845 - DNA, 15 bp, Homo sapiens
cagagttttcagcca

SEQ ID NO: 9846 - DNA, 15 bp, Homo sapiens
ccagagttttcagcc

SEQ ID NO: 9847 - DNA, 15 bp, Homo sapiens
accagagttttcagc

SEQ ID NO: 9848 - DNA, 15 bp, Homo sapiens
taccagagttttcag

SEQ ID NO: 9849 - DNA, 15 bp, Homo sapiens
ataccagagttttca

SEQ ID NO: 9850 - DNA, 15 bp, Homo sapiens
aataccagagttttc

SEQ ID NO: 9851 - DNA, 15 bp, Homo sapiens
caataccagagtttt

SEQ ID NO: 9852 - DNA, 15 bp, Homo sapiens
tcaataccagagttt

SEQ ID NO: 9853 - DNA, 15 bp, Homo sapiens
ttcaataccagagtt

SEQ ID NO: 9854 - DNA, 15 bp, Homo sapiens
tttcaataccagagt

SEQ ID NO: 9855 - DNA, 15 bp, Homo sapiens
ttttcaataccagag

SEQ ID NO: 9856 - DNA, 15 bp, Homo sapiens
cttttcaataccaga

SEQ ID NO: 9857 - DNA, 15 bp, Homo sapiens
gcttttcaataccag

SEQ ID NO: 9858 - DNA, 15 bp, Homo sapiens
tgcttttcaatacca

SEQ ID NO: 9859 - DNA, 15 bp, Homo sapiens
ttgcttttcaatacc

SEQ ID NO: 9860 - DNA, 15 bp, Homo sapiens
tttgcttttcaatac

SEQ ID NO: 9861 - DNA, 15 bp, Homo sapiens
atttgcttttcaata

SEQ ID NO: 9862 - DNA, 15 bp, Homo sapiens
catttgcttttcaat

SEQ ID NO: 9863 - DNA, 15 bp, Homo sapiens
acatttgcttttcaa

SEQ ID NO: 9864 - DNA, 15 bp, Homo sapiens
aacatttgcttttca

SEQ ID NO: 9865 - DNA, 15 bp, Homo sapiens
gaacatttgcttttc

SEQ ID NO: 9866 - DNA, 15 bp, Homo sapiens
agaacatttgctttt

SEQ ID NO: 9867 - DNA, 15 bp, Homo sapiens
gagaacatttgcttt

SEQ ID NO: 9868 - DNA, 15 bp, Homo sapiens
ggagaacatttgctt

SEQ ID NO: 9869 - DNA, 15 bp, Homo sapiens
tggagaacatttgct

SEQ ID NO: 9870 - DNA, 15 bp, Homo sapiens
gtggagaacatttgc

SEQ ID NO: 9871 - DNA, 15 bp, Homo sapiens
agtggagaacatttg

SEQ ID NO: 9872 - DNA, 15 bp, Homo sapiens
aagtggagaacattt

SEQ ID NO: 9873 - DNA, 15 bp, Homo sapiens
aaagtggagaacatt

SEQ ID NO: 9874 - DNA, 15 bp, Homo sapiens
aaaagtggagaacat

SEQ ID NO: 9875 - DNA, 15 bp, Homo sapiens
caaaagtggagaaca

SEQ ID NO: 9876 - DNA, 15 bp, Homo sapiens
acaaaagtggagaac

SEQ ID NO: 9877 - DNA, 15 bp, Homo sapiens
tacaaaagtggagaa

SEQ ID NO: 9878 - DNA, 15 bp, Homo sapiens
ttacaaaagtggaga

SEQ ID NO: 9879 - DNA, 15 bp, Homo sapiens
cttacaaaagtggag

SEQ ID NO: 9880 - DNA, 15 bp, Homo sapiens
tcttacaaaagtgga

SEQ ID NO: 9881 - DNA, 15 bp, Homo sapiens
ttcttacaaaagtgg

SEQ ID NO: 9882 - DNA, 15 bp, Homo sapiens
tttcttacaaaagtg

SEQ ID NO: 9883 - DNA, 15 bp, Homo sapiens
atttcttacaaaagt

SEQ ID NO: 9884 - DNA, 15 bp, Homo sapiens
tatttcttacaaaag

SEQ ID NO: 9885 - DNA, 15 bp, Homo sapiens
ttatttcttacaaaa

SEQ ID NO: 9886 - DNA, 15 bp, Homo sapiens
gttatttcttacaaa

SEQ ID NO: 9887 - DNA, 15 bp, Homo sapiens
tgttatttcttacaa

SEQ ID NO: 9888 - DNA, 15 bp, Homo sapiens
atgttatttcttaca

SEQ ID NO: 9889 - DNA, 15 bp, Homo sapiens
aatgttatttcttac

SEQ ID NO: 9890 - DNA, 15 bp, Homo sapiens
aaatgttatttctta

SEQ ID NO: 9891 - DNA, 15 bp, Homo sapiens
aaaatgttatttctt

SEQ ID NO: 9892 - DNA, 15 bp, Homo sapiens
gaaaatgttatttct

SEQ ID NO: 9893 - DNA, 15 bp, Homo sapiens
tgaaaatgttatttc

SEQ ID NO: 9894 - DNA, 15 bp, Homo sapiens
ttgaaaatgttattt

SEQ ID NO: 9895 - DNA, 15 bp, Homo sapiens
gttgaaaatgttatt

SEQ ID NO: 9896 - DNA, 15 bp, Homo sapiens
ggttgaaaatgttat

SEQ ID NO: 9897 - DNA, 15 bp, Homo sapiens
tggttgaaaatgtta

SEQ ID NO: 9898 - DNA, 15 bp, Homo sapiens
gtggttgaaaatgtt

SEQ ID NO: 9899 - DNA, 15 bp, Homo sapiens
agtggttgaaaatgt

SEQ ID NO: 9900 - DNA, 15 bp, Homo sapiens
tagtggttgaaaatg

SEQ ID NO: 9901 - DNA, 15 bp, Homo sapiens
ttagtggttgaaaat

SEQ ID NO: 9902 - DNA, 15 bp, Homo sapiens
cttagtggttgaaaa

SEQ ID NO: 9903 - DNA, 15 bp, Homo sapiens
tcttagtggttgaaa

SEQ ID NO: 9904 - DNA, 15 bp, Homo sapiens
ctcttagtggttgaa

SEQ ID NO: 9905 - DNA, 15 bp, Homo sapiens
tctcttagtggttga

SEQ ID NO: 9906 - DNA, 15 bp, Homo sapiens
gtctcttagtggttg

SEQ ID NO: 9907 - DNA, 15 bp, Homo sapiens
agtctcttagtggtt

SEQ ID NO: 9908 - DNA, 15 bp, Homo sapiens
aagtctcttagtggt

SEQ ID NO: 9909 - DNA, 15 bp, Homo sapiens
aaagtctcttagtgg

SEQ ID NO: 9910 - DNA, 15 bp, Homo sapiens
taaagtctcttagtg

SEQ ID NO: 9911 - DNA, 15 bp, Homo sapiens
ataaagtctcttagt

SEQ ID NO: 9912 - DNA, 15 bp, Homo sapiens
aataaagtctcttag

SEQ ID NO: 9913 - DNA, 15 bp, Homo sapiens
taataaagtctctta

SEQ ID NO: 9914 - DNA, 15 bp, Homo sapiens
gtaataaagtctctt

SEQ ID NO: 9915 - DNA, 15 bp, Homo sapiens
ggtaataaagtctct

SEQ ID NO: 9916 - DNA, 15 bp, Homo sapiens
tggtaataaagtctc

SEQ ID NO: 9917 - DNA, 15 bp, Homo sapiens
atggtaataaagtct

SEQ ID NO: 9918 - DNA, 15 bp, Homo sapiens
gatggtaataaagtc

SEQ ID NO: 9919 - DNA, 15 bp, Homo sapiens
ggatggtaataaagt

SEQ ID NO: 9920 - DNA, 15 bp, Homo sapiens
gggatggtaataaag

SEQ ID NO: 9921 - DNA, 15 bp, Homo sapiens
agggatggtaataaa

SEQ ID NO: 9922 - DNA, 15 bp, Homo sapiens
tagggatggtaataa

SEQ ID NO: 9923 - DNA, 15 bp, Homo sapiens
ttagggatggtaata

SEQ ID NO: 9924 - DNA, 15 bp, Homo sapiens
tttagggatggtaat

SEQ ID NO: 9925 - DNA, 15 bp, Homo sapiens
gtttagggatggtaa

SEQ ID NO: 9926 - DNA, 15 bp, Homo sapiens
tgtttagggatggta

SEQ ID NO: 9927 - DNA, 15 bp, Homo sapiens
gtgtttagggatggt

SEQ ID NO: 9928 - DNA, 15 bp, Homo sapiens
tgtgtttagggatgg

SEQ ID NO: 9929 - DNA, 15 bp, Homo sapiens
gtgtgtttagggatg

SEQ ID NO: 9930 - DNA, 15 bp, Homo sapiens
tgtgtgtttagggat

SEQ ID NO: 9931 - DNA, 15 bp, Homo sapiens
ttgtgtgtttaggga

SEQ ID NO: 9932 - DNA, 15 bp, Homo sapiens
tttgtgtgtttaggg

SEQ ID NO: 9933 - DNA, 15 bp, Homo sapiens
ttttgtgtgtttagg

SEQ ID NO: 9934 - DNA, 15 bp, Homo sapiens
tttttgtgtgtttag

SEQ ID NO: 9935 - DNA, 15 bp, Homo sapiens
ttttttgtgtgttta

SEQ ID NO: 9936 - DNA, 15 bp, Homo sapiens
tttttttgtgtgttt

SEQ ID NO: 9937 - DNA, 15 bp, Homo sapiens
atttttttgtgtgtt

SEQ ID NO: 9938 - DNA, 15 bp, Homo sapiens
aatttttttgtgtgt

SEQ ID NO: 9939 - DNA, 15 bp, Homo sapiens
aaatttttttgtgtg

SEQ ID NO: 9940 - DNA, 15 bp, Homo sapiens
gaaatttttttgtgt

SEQ ID NO: 9941 - DNA, 15 bp, Homo sapiens
agaaatttttttgtg

SEQ ID NO: 9942 - DNA, 15 bp, Homo sapiens
aagaaatttttttgt

SEQ ID NO: 9943 - DNA, 15 bp, Homo sapiens
aaagaaatttttttg

SEQ ID NO: 9944 - DNA, 15 bp, Homo sapiens
aaaagaaattttttt

SEQ ID NO: 9945 - DNA, 15 bp, Homo sapiens
taaaagaaatttttt

SEQ ID NO: 9946 - DNA, 15 bp, Homo sapiens
ctaaaagaaattttt

SEQ ID NO: 9947 - DNA, 15 bp, Homo sapiens
tctaaaagaaatttt

SEQ ID NO: 9948 - DNA, 15 bp, Homo sapiens
atctaaaagaaattt

SEQ ID NO: 9949 - DNA, 15 bp, Homo sapiens
aatctaaaagaaatt

SEQ ID NO: 9950 - DNA, 15 bp, Homo sapiens
aaatctaaaagaaat

SEQ ID NO: 9951 - DNA, 15 bp, Homo sapiens
taaatctaaaagaaa

SEQ ID NO: 9952 - DNA, 15 bp, Homo sapiens
gtaaatctaaaagaa

SEQ ID NO: 9953 - DNA, 15 bp, Homo sapiens
agtaaatctaaaaga

SEQ ID NO: 9954 - DNA, 15 bp, Homo sapiens
gagtaaatctaaaag

SEQ ID NO: 9955 - DNA, 15 bp, Homo sapiens
agagtaaatctaaaa

SEQ ID NO: 9956 - DNA, 15 bp, Homo sapiens
gagagtaaatctaaa

SEQ ID NO: 9957 - DNA, 15 bp, Homo sapiens
tgagagtaaatctaa

SEQ ID NO: 9958 - DNA, 15 bp, Homo sapiens
gtgagagtaaatcta

SEQ ID NO: 9959 - DNA, 15 bp, Homo sapiens
agtgagagtaaatct

SEQ ID NO: 9960 - DNA, 15 bp, Homo sapiens
aagtgagagtaaatc

SEQ ID NO: 9961 - DNA, 15 bp, Homo sapiens
aaagtgagagtaaat

SEQ ID NO: 9962 - DNA, 15 bp, Homo sapiens
caaagtgagagtaaa

SEQ ID NO: 9963 - DNA, 15 bp, Homo sapiens
gcaaagtgagagtaa

SEQ ID NO: 9964 - DNA, 15 bp, Homo sapiens
tgcaaagtgagagta

SEQ ID NO: 9965 - DNA, 15 bp, Homo sapiens
gtgcaaagtgagagt

SEQ ID NO: 9966 - DNA, 15 bp, Homo sapiens
cgtgcaaagtgagag

SEQ ID NO: 9967 - DNA, 15 bp, Homo sapiens
tcgtgcaaagtgaga

SEQ ID NO: 9968 - DNA, 15 bp, Homo sapiens
ttcgtgcaaagtgag

SEQ ID NO: 9969 - DNA, 15 bp, Homo sapiens
attcgtgcaaagtga

SEQ ID NO: 9970 - DNA, 15 bp, Homo sapiens
tattcgtgcaaagtg

SEQ ID NO: 9971 - DNA, 15 bp, Homo sapiens
ctattcgtgcaaagt

SEQ ID NO: 9972 - DNA, 15 bp, Homo sapiens
gctattcgtgcaaag

SEQ ID NO: 9973 - DNA, 15 bp, Homo sapiens
tgctattcgtgcaaa

SEQ ID NO: 9974 - DNA, 15 bp, Homo sapiens
ttgctattcgtgcaa

SEQ ID NO: 9975 - DNA, 15 bp, Homo sapiens
tttgctattcgtgca

SEQ ID NO: 9976 - DNA, 15 bp, Homo sapiens
gtttgctattcgtgc

SEQ ID NO: 9977 - DNA, 15 bp, Homo sapiens
tgtttgctattcgtg

SEQ ID NO: 9978 - DNA, 15 bp, Homo sapiens
atgtttgctattcgt

SEQ ID NO: 9979 - DNA, 15 bp, Homo sapiens
catgtttgctattcg

SEQ ID NO: 9980 - DNA, 15 bp, Homo sapiens
gcatgtttgctattc

SEQ ID NO: 9981 - DNA, 15 bp, Homo sapiens
agcatgtttgctatt

SEQ ID NO: 9982 - DNA, 15 bp, Homo sapiens
aagcatgtttgctat

SEQ ID NO: 9983 - DNA, 15 bp, Homo sapiens
taagcatgtttgcta

SEQ ID NO: 9984 - DNA, 15 bp, Homo sapiens
ctaagcatgtttgct

SEQ ID NO: 9985 - DNA, 15 bp, Homo sapiens
tctaagcatgtttgc

SEQ ID NO: 9986 - DNA, 15 bp, Homo sapiens
ttctaagcatgtttg

SEQ ID NO: 9987 - DNA, 15 bp, Homo sapiens
gttctaagcatgttt

SEQ ID NO: 9988 - DNA, 15 bp, Homo sapiens
agttctaagcatgtt

SEQ ID NO: 9989 - DNA, 15 bp, Homo sapiens
cagttctaagcatgt

SEQ ID NO: 9990 - DNA, 15 bp, Homo sapiens
gcagttctaagcatg

SEQ ID NO: 9991 - DNA, 15 bp, Homo sapiens
agcagttctaagcat

SEQ ID NO: 9992 - DNA, 15 bp, Homo sapiens
aagcagttctaagca

SEQ ID NO: 9993 - DNA, 15 bp, Homo sapiens
taagcagttctaagc

SEQ ID NO: 9994 - DNA, 15 bp, Homo sapiens
ctaagcagttctaag

SEQ ID NO: 9995 - DNA, 15 bp, Homo sapiens
tctaagcagttctaa

SEQ ID NO: 9996 - DNA, 15 bp, Homo sapiens
atctaagcagttcta

SEQ ID NO: 9997 - DNA, 15 bp, Homo sapiens
aatctaagcagttct

SEQ ID NO: 9998 - DNA, 15 bp, Homo sapiens
caatctaagcagttc

SEQ ID NO: 9999 - DNA, 15 bp, Homo sapiens
gcaatctaagcagtt

SEQ ID NO: 10000 - DNA, 15 bp, Homo sapiens
tgcaatctaagcagt

SEQ ID NO: 10001 - DNA, 15 bp, Homo sapiens
gtgcaatctaagcag

SEQ ID NO: 10002 - DNA, 15 bp, Homo sapiens
tgtgcaatctaagca

SEQ ID NO: 10003 - DNA, 15 bp, Homo sapiens
ttgtgcaatctaagc

SEQ ID NO: 10004 - DNA, 15 bp, Homo sapiens
attgtgcaatctaag

SEQ ID NO: 10005 - DNA, 15 bp, Homo sapiens
cattgtgcaatctaa

SEQ ID NO: 10006 - DNA, 15 bp, Homo sapiens
acattgtgcaatcta

SEQ ID NO: 10007 - DNA, 15 bp, Homo sapiens
aacattgtgcaatct

SEQ ID NO: 10008 - DNA, 15 bp, Homo sapiens
gaacattgtgcaatc

SEQ ID NO: 10009 - DNA, 15 bp, Homo sapiens
agaacattgtgcaat

SEQ ID NO: 10010 - DNA, 15 bp, Homo sapiens
gagaacattgtgcaa

SEQ ID NO: 10011 - DNA, 15 bp, Homo sapiens
tgagaacattgtgca

SEQ ID NO: 10012 - DNA, 15 bp, Homo sapiens
ctgagaacattgtgc

SEQ ID NO: 10013 - DNA, 15 bp, Homo sapiens
tctgagaacattgtg

SEQ ID NO: 10014 - DNA, 15 bp, Homo sapiens
atctgagaacattgt

SEQ ID NO: 10015 - DNA, 15 bp, Homo sapiens
aatctgagaacattg

SEQ ID NO: 10016 - DNA, 15 bp, Homo sapiens
taatctgagaacatt

SEQ ID NO: 10017 - DNA, 15 bp, Homo sapiens
ctaatctgagaacat

SEQ ID NO: 10018 - DNA, 15 bp, Homo sapiens
cctaatctgagaaca

SEQ ID NO: 10019 - DNA, 15 bp, Homo sapiens
tcctaatctgagaac

SEQ ID NO: 10020 - DNA, 15 bp, Homo sapiens
ttcctaatctgagaa

SEQ ID NO: 10021 - DNA, 15 bp, Homo sapiens
cttcctaatctgaga

SEQ ID NO: 10022 - DNA, 15 bp, Homo sapiens
ccttcctaatctgag

SEQ ID NO: 10023 - DNA, 15 bp, Homo sapiens
cccttcctaatctga

SEQ ID NO: 10024 - DNA, 15 bp, Homo sapiens
tcccttcctaatctg

SEQ ID NO: 10025 - DNA, 15 bp, Homo sapiens
ttcccttcctaatct

SEQ ID NO: 10026 - DNA, 15 bp, Homo sapiens
tttcccttcctaatc

SEQ ID NO: 10027 - DNA, 15 bp, Homo sapiens
ttttcccttcctaat

SEQ ID NO: 10028 - DNA, 15 bp, Homo sapiens
attttcccttcctaa

SEQ ID NO: 10029 - DNA, 15 bp, Homo sapiens
aattttcccttccta

SEQ ID NO: 10030 - DNA, 15 bp, Homo sapiens
caattttcccttcct

SEQ ID NO: 10031 - DNA, 15 bp, Homo sapiens
ccaattttcccttcc

SEQ ID NO: 10032 - DNA, 15 bp, Homo sapiens
accaattttcccttc

SEQ ID NO: 10033 - DNA, 15 bp, Homo sapiens
aaccaattttccctt

SEQ ID NO: 10034 - DNA, 15 bp, Homo sapiens
aaaccaattttccct

SEQ ID NO: 10035 - DNA, 15 bp, Homo sapiens
caaaccaattttccc

SEQ ID NO: 10036 - DNA, 15 bp, Homo sapiens
tcaaaccaattttcc

SEQ ID NO: 10037 - DNA, 15 bp, Homo sapiens
ttcaaaccaattttc

SEQ ID NO: 10038 - DNA, 15 bp, Homo sapiens
attcaaaccaatttt

SEQ ID NO: 10039 - DNA, 15 bp, Homo sapiens
tattcaaaccaattt

SEQ ID NO: 10040 - DNA, 15 bp, Homo sapiens
ttattcaaaccaatt

SEQ ID NO: 10041 - DNA, 15 bp, Homo sapiens
tttattcaaaccaat

SEQ ID NO: 10042 - DNA, 15 bp, Homo sapiens
ttttattcaaaccaa

SEQ ID NO: 10043 - DNA, 15 bp, Homo sapiens
attttattcaaacca

SEQ ID NO: 10044 - DNA, 15 bp, Homo sapiens
tattttattcaaacc

SEQ ID NO: 10045 - DNA, 15 bp, Homo sapiens
gtattttattcaaac

SEQ ID NO: 10046 - DNA, 15 bp, Homo sapiens
tgtattttattcaaa

SEQ ID NO: 10047 - DNA, 15 bp, Homo sapiens
ctgtattttattcaa

SEQ ID NO: 10048 - DNA, 15 bp, Homo sapiens
tctgtattttattca

SEQ ID NO: 10049 - DNA, 15 bp, Homo sapiens
atctgtattttattc

SEQ ID NO: 10050 - DNA, 15 bp, Homo sapiens
catctgtattttatt

SEQ ID NO: 10051 - DNA, 15 bp, Homo sapiens
acatctgtattttat

SEQ ID NO: 10052 - DNA, 15 bp, Homo sapiens
gacatctgtatttta

SEQ ID NO: 10053 - DNA, 15 bp, Homo sapiens
agacatctgtatttt

SEQ ID NO: 10054 - DNA, 15 bp, Homo sapiens
tagacatctgtattt

SEQ ID NO: 10055 - DNA, 15 bp, Homo sapiens
atagacatctgtatt

SEQ ID NO: 10056 - DNA, 15 bp, Homo sapiens
aatagacatctgtat

SEQ ID NO: 10057 - DNA, 15 bp, Homo sapiens
gaatagacatctgta

SEQ ID NO: 10058 - DNA, 15 bp, Homo sapiens
ggaatagacatctgt

SEQ ID NO: 10059 - DNA, 15 bp, Homo sapiens
cggaatagacatctg

SEQ ID NO: 10060 - DNA, 15 bp, Homo sapiens
gcggaatagacatct

SEQ ID NO: 10061 - DNA, 15 bp, Homo sapiens
agcggaatagacatc

SEQ ID NO: 10062 - DNA, 15 bp, Homo sapiens
tagcggaatagacat

SEQ ID NO: 10063 - DNA, 15 bp, Homo sapiens
ttagcggaatagaca

SEQ ID NO: 10064 - DNA, 15 bp, Homo sapiens
gttagcggaatagac

SEQ ID NO: 10065 - DNA, 15 bp, Homo sapiens
tgttagcggaataga

SEQ ID NO: 10066 - DNA, 15 bp, Homo sapiens
ttgttagcggaatag

SEQ ID NO: 10067 - DNA, 15 bp, Homo sapiens
gttgttagcggaata

SEQ ID NO: 10068 - DNA, 15 bp, Homo sapiens
agttgttagcggaat

SEQ ID NO: 10069 - DNA, 15 bp, Homo sapiens
tagttgttagcggaa

SEQ ID NO: 10070 - DNA, 15 bp, Homo sapiens
ttagttgttagcgga

SEQ ID NO: 10071 - DNA, 15 bp, Homo sapiens
tttagttgttagcgg

SEQ ID NO: 10072 - DNA, 15 bp, Homo sapiens
atttagttgttagcg

SEQ ID NO: 10073 - DNA, 15 bp, Homo sapiens
gatttagttgttagc

SEQ ID NO: 10074 - DNA, 15 bp, Homo sapiens
agatttagttgttag

SEQ ID NO: 10075 - DNA, 15 bp, Homo sapiens
aagatttagttgtta

SEQ ID NO: 10076 - DNA, 15 bp, Homo sapiens
aaagatttagttgtt

SEQ ID NO: 10077 - DNA, 15 bp, Homo sapiens
caaagatttagttgt

SEQ ID NO: 10078 - DNA, 15 bp, Homo sapiens
acaaagatttagttg

SEQ ID NO: 10079 - DNA, 15 bp, Homo sapiens
cacaaagatttagtt

SEQ ID NO: 10080 - DNA, 15 bp, Homo sapiens
tcacaaagatttagt

SEQ ID NO: 10081 - DNA, 15 bp, Homo sapiens
ttcacaaagatttag

SEQ ID NO: 10082 - DNA, 15 bp, Homo sapiens
attcacaaagattta

SEQ ID NO: 10083 - DNA, 15 bp, Homo sapiens
cattcacaaagattt

SEQ ID NO: 10084 - DNA, 15 bp, Homo sapiens
acattcacaaagatt

SEQ ID NO: 10085 - DNA, 15 bp, Homo sapiens
aacattcacaaagat

SEQ ID NO: 10086 - DNA, 15 bp, Homo sapiens
gaacattcacaaaga

SEQ ID NO: 10087 - DNA, 15 bp, Homo sapiens
agaacattcacaaag

SEQ ID NO: 10088 - DNA, 15 bp, Homo sapiens
cagaacattcacaaa

SEQ ID NO: 10089 - DNA, 15 bp, Homo sapiens
tcagaacattcacaa

SEQ ID NO: 10090 - DNA, 15 bp, Homo sapiens
ctcagaacattcaca

SEQ ID NO: 10091 - DNA, 15 bp, Homo sapiens
actcagaacattcac

SEQ ID NO: 10092 - DNA, 15 bp, Homo sapiens
gactcagaacattca

SEQ ID NO: 10093 - DNA, 15 bp, Homo sapiens
ggactcagaacattc

SEQ ID NO: 10094 - DNA, 15 bp, Homo sapiens
aggactcagaacatt

SEQ ID NO: 10095 - DNA, 15 bp, Homo sapiens
caggactcagaacat

SEQ ID NO: 10096 - DNA, 15 bp, Homo sapiens
acaggactcagaaca

SEQ ID NO: 10097 - DNA, 15 bp, Homo sapiens
tacaggactcagaac

SEQ ID NO: 10098 - DNA, 15 bp, Homo sapiens
gtacaggactcagaa

SEQ ID NO: 10099 - DNA, 15 bp, Homo sapiens
ggtacaggactcaga

SEQ ID NO: 10100 - DNA, 15 bp, Homo sapiens
tggtacaggactcag

SEQ ID NO: 10101 - DNA, 15 bp, Homo sapiens
atggtacaggactca

SEQ ID NO: 10102 - DNA, 15 bp, Homo sapiens
gatggtacaggactc

SEQ ID NO: 10103 - DNA, 15 bp, Homo sapiens
tgatggtacaggact

SEQ ID NO: 10104 - DNA, 15 bp, Homo sapiens
ttgatggtacaggac

SEQ ID NO: 10105 - DNA, 15 bp, Homo sapiens
tttgatggtacagga

SEQ ID NO: 10106 - DNA, 15 bp, Homo sapiens
ctttgatggtacagg

SEQ ID NO: 10107 - DNA, 15 bp, Homo sapiens
tctttgatggtacag

SEQ ID NO: 10108 - DNA, 15 bp, Homo sapiens
ttctttgatggtaca

SEQ ID NO: 10109 - DNA, 15 bp, Homo sapiens
tttctttgatggtac

SEQ ID NO: 10110 - DNA, 15 bp, Homo sapiens
atttctttgatggta

SEQ ID NO: 10111 - DNA, 15 bp, Homo sapiens
tatttctttgatggt

SEQ ID NO: 10112 - DNA, 15 bp, Homo sapiens
ctatttctttgatgg

SEQ ID NO: 10113 - DNA, 15 bp, Homo sapiens
tctatttctttgatg

SEQ ID NO: 10114 - DNA, 15 bp, Homo sapiens
atctatttctttgat

SEQ ID NO: 10115 - DNA, 15 bp, Homo sapiens
gatctatttctttga

SEQ ID NO: 10116 - DNA, 15 bp, Homo sapiens
cgatctatttctttg

SEQ ID NO: 10117 - DNA, 15 bp, Homo sapiens
acgatctatttcttt

SEQ ID NO: 10118 - DNA, 15 bp, Homo sapiens
gacgatctatttctt

SEQ ID NO: 10119 - DNA, 15 bp, Homo sapiens
ggacgatctatttct

SEQ ID NO: 10120 - DNA, 15 bp, Homo sapiens
tggacgatctatttc

SEQ ID NO: 10121 - DNA, 15 bp, Homo sapiens
atggacgatctattt

SEQ ID NO: 10122 - DNA, 15 bp, Homo sapiens
catggacgatctatt

SEQ ID NO: 10123 - DNA, 15 bp, Homo sapiens
ccatggacgatctat

SEQ ID NO: 10124 - DNA, 15 bp, Homo sapiens
cccatggacgatcta

SEQ ID NO: 10125 - DNA, 15 bp, Homo sapiens
ccccatggacgatct

SEQ ID NO: 10126 - DNA, 15 bp, Homo sapiens
cccccatggacgatc

SEQ ID NO: 10127 - DNA, 15 bp, Homo sapiens
acccccatggacgat

SEQ ID NO: 10128 - DNA, 15 bp, Homo sapiens
aacccccatggacga

SEQ ID NO: 10129 - DNA, 15 bp, Homo sapiens
aaacccccatggacg

SEQ ID NO: 10130 - DNA, 15 bp, Homo sapiens
gaaacccccatggac

SEQ ID NO: 10131 - DNA, 15 bp, Homo sapiens
agaaacccccatgga

SEQ ID NO: 10132 - DNA, 15 bp, Homo sapiens
tagaaacccccatgg

SEQ ID NO: 10133 - DNA, 15 bp, Homo sapiens
atagaaacccccatg

SEQ ID NO: 10134 - DNA, 15 bp, Homo sapiens
aatagaaacccccat

SEQ ID NO: 10135 - DNA, 15 bp, Homo sapiens
aaatagaaaccccca

SEQ ID NO: 10136 - DNA, 15 bp, Homo sapiens
gaaatagaaaccccc

SEQ ID NO: 10137 - DNA, 15 bp, Homo sapiens
agaaatagaaacccc

SEQ ID NO: 10138 - DNA, 15 bp, Homo sapiens
cagaaatagaaaccc

SEQ ID NO: 10139 - DNA, 15 bp, Homo sapiens
ccagaaatagaaacc

SEQ ID NO: 10140 - DNA, 15 bp, Homo sapiens
accagaaatagaaac

SEQ ID NO: 10141 - DNA, 15 bp, Homo sapiens
taccagaaatagaaa

SEQ ID NO: 10142 - DNA, 15 bp, Homo sapiens
ctaccagaaatagaa

SEQ ID NO: 10143 - DNA, 15 bp, Homo sapiens
tctaccagaaataga

SEQ ID NO: 10144 - DNA, 15 bp, Homo sapiens
atctaccagaaatag

SEQ ID NO: 10145 - DNA, 15 bp, Homo sapiens
aatctaccagaaata

SEQ ID NO: 10146 - DNA, 15 bp, Homo sapiens
caatctaccagaaat

SEQ ID NO: 10147 - DNA, 15 bp, Homo sapiens
acaatctaccagaaa

SEQ ID NO: 10148 - DNA, 15 bp, Homo sapiens
tacaatctaccagaa

SEQ ID NO: 10149 - DNA, 15 bp, Homo sapiens
gtacaatctaccaga

SEQ ID NO: 10150 - DNA, 15 bp, Homo sapiens
agtacaatctaccag

SEQ ID NO: 10151 - DNA, 15 bp, Homo sapiens
aagtacaatctacca

SEQ ID NO: 10152 - DNA, 15 bp, Homo sapiens
taagtacaatctacc

SEQ ID NO: 10153 - DNA, 15 bp, Homo sapiens
gtaagtacaatctac

SEQ ID NO: 10154 - DNA, 15 bp, Homo sapiens
tgtaagtacaatcta

SEQ ID NO: 10155 - DNA, 15 bp, Homo sapiens
gtgtaagtacaatct

SEQ ID NO: 10156 - DNA, 15 bp, Homo sapiens
tgtgtaagtacaatc

SEQ ID NO: 10157 - DNA, 15 bp, Homo sapiens
gtgtgtaagtacaat

SEQ ID NO: 10158 - DNA, 15 bp, Homo sapiens
agtgtgtaagtacaa

SEQ ID NO: 10159 - DNA, 15 bp, Homo sapiens
cagtgtgtaagtaca

SEQ ID NO: 10160 - DNA, 15 bp, Homo sapiens
tcagtgtgtaagtac

SEQ ID NO: 10161 - DNA, 15 bp, Homo sapiens
ttcagtgtgtaagta

SEQ ID NO: 10162 - DNA, 15 bp, Homo sapiens
attcagtgtgtaagt

SEQ ID NO: 10163 - DNA, 15 bp, Homo sapiens
cattcagtgtgtaag

SEQ ID NO: 10164 - DNA, 15 bp, Homo sapiens
tcattcagtgtgtaa

SEQ ID NO: 10165 - DNA, 15 bp, Homo sapiens
ttcattcagtgtgta

SEQ ID NO: 10166 - DNA, 15 bp, Homo sapiens
tttcattcagtgtgt

SEQ ID NO: 10167 - DNA, 15 bp, Homo sapiens
ttttcattcagtgtg

SEQ ID NO: 10168 - DNA, 15 bp, Homo sapiens
tttttcattcagtgt

SEQ ID NO: 10169 - DNA, 15 bp, Homo sapiens
ctttttcattcagtg

SEQ ID NO: 10170 - DNA, 15 bp, Homo sapiens
gctttttcattcagt

SEQ ID NO: 10171 - DNA, 15 bp, Homo sapiens
agctttttcattcag

SEQ ID NO: 10172 - DNA, 15 bp, Homo sapiens
aagctttttcattca

SEQ ID NO: 10173 - DNA, 15 bp, Homo sapiens
aaagctttttcattc

SEQ ID NO: 10174 - DNA, 15 bp, Homo sapiens
gaaagctttttcatt

SEQ ID NO: 10175 - DNA, 15 bp, Homo sapiens
agaaagctttttcat

SEQ ID NO: 10176 - DNA, 15 bp, Homo sapiens
gagaaagctttttca

SEQ ID NO: 10177 - DNA, 15 bp, Homo sapiens
ggagaaagctttttc

SEQ ID NO: 10178 - DNA, 15 bp, Homo sapiens
aggagaaagcttttt

SEQ ID NO: 10179 - DNA, 15 bp, Homo sapiens
taggagaaagctttt

SEQ ID NO: 10180 - DNA, 15 bp, Homo sapiens
ttaggagaaagcttt

SEQ ID NO: 10181 - DNA, 15 bp, Homo sapiens
attaggagaaagctt

SEQ ID NO: 10182 - DNA, 15 bp, Homo sapiens
tattaggagaaagct

SEQ ID NO: 10183 - DNA, 15 bp, Homo sapiens
atattaggagaaagc

SEQ ID NO: 10184 - DNA, 15 bp, Homo sapiens
aatattaggagaaag

SEQ ID NO: 10185 - DNA, 15 bp, Homo sapiens
gaatattaggagaaa

SEQ ID NO: 10186 - DNA, 15 bp, Homo sapiens
ggaatattaggagaa

SEQ ID NO: 10187 - DNA, 15 bp, Homo sapiens
gggaatattaggaga

SEQ ID NO: 10188 - DNA, 15 bp, Homo sapiens
tgggaatattaggag

SEQ ID NO: 10189 - DNA, 15 bp, Homo sapiens
ctgggaatattagga

SEQ ID NO: 10190 - DNA, 15 bp, Homo sapiens
actgggaatattagg

SEQ ID NO: 10191 - DNA, 15 bp, Homo sapiens
gactgggaatattag

SEQ ID NO: 10192 - DNA, 15 bp, Homo sapiens
ggactgggaatatta

SEQ ID NO: 10193 - DNA, 15 bp, Homo sapiens
tggactgggaatatt

SEQ ID NO: 10194 - DNA, 15 bp, Homo sapiens
ttggactgggaatat

SEQ ID NO: 10195 - DNA, 15 bp, Homo sapiens
tttggactgggaata

SEQ ID NO: 10196 - DNA, 15 bp, Homo sapiens
atttggactgggaat

SEQ ID NO: 10197 - DNA, 15 bp, Homo sapiens
tatttggactgggaa

SEQ ID NO: 10198 - DNA, 15 bp, Homo sapiens
ttatttggactggga

SEQ ID NO: 10199 - DNA, 15 bp, Homo sapiens
tttatttggactggg

SEQ ID NO: 10200 - DNA, 15 bp, Homo sapiens
ttttatttggactgg

SEQ ID NO: 10201 - DNA, 15 bp, Homo sapiens
tttttatttggactg

SEQ ID NO: 10202 - DNA, 15 bp, Homo sapiens
gtttttatttggact

SEQ ID NO: 10203 - DNA, 15 bp, Homo sapiens
tgtttttatttggac

SEQ ID NO: 10204 - DNA, 15 bp, Homo sapiens
ttgtttttatttgga

SEQ ID NO: 10205 - DNA, 15 bp, Homo sapiens
gttgtttttatttgg

SEQ ID NO: 10206 - DNA, 15 bp, Homo sapiens
ggttgtttttatttg

SEQ ID NO: 10207 - DNA, 15 bp, Homo sapiens
gggttgtttttattt

SEQ ID NO: 10208 - DNA, 15 bp, Homo sapiens
tgggttgtttttatt

SEQ ID NO: 10209 - DNA, 15 bp, Homo sapiens
ttgggttgtttttat

SEQ ID NO: 10210 - DNA, 15 bp, Homo sapiens
cttgggttgttttta

SEQ ID NO: 10211 - DNA, 15 bp, Homo sapiens
ccttgggttgttttt

SEQ ID NO: 10212 - DNA, 15 bp, Homo sapiens
cccttgggttgtttt

SEQ ID NO: 10213 - DNA, 15 bp, Homo sapiens
ccccttgggttgttt

SEQ ID NO: 10214 - DNA, 15 bp, Homo sapiens
gccccttgggttgtt

SEQ ID NO: 10215 - DNA, 15 bp, Homo sapiens
tgccccttgggttgt

SEQ ID NO: 10216 - DNA, 15 bp, Homo sapiens
gtgccccttgggttg

SEQ ID NO: 10217 - DNA, 15 bp, Homo sapiens
ggtgccccttgggtt

SEQ ID NO: 10218 - DNA, 15 bp, Homo sapiens
aggtgccccttgggt

SEQ ID NO: 10219 - DNA, 15 bp, Homo sapiens
gaggtgccccttggg

SEQ ID NO: 10220 - DNA, 15 bp, Homo sapiens
agaggtgccccttgg

SEQ ID NO: 10221 - DNA, 15 bp, Homo sapiens
aagaggtgccccttg

SEQ ID NO: 10222 - DNA, 15 bp, Homo sapiens
taagaggtgcccctt

SEQ ID NO: 10223 - DNA, 15 bp, Homo sapiens
ataagaggtgcccct

SEQ ID NO: 10224 - DNA, 15 bp, Homo sapiens
aataagaggtgcccc

SEQ ID NO: 10225 - DNA, 15 bp, Homo sapiens
aaataagaggtgccc

SEQ ID NO: 10226 - DNA, 15 bp, Homo sapiens
taaataagaggtgcc

SEQ ID NO: 10227 - DNA, 15 bp, Homo sapiens
ctaaataagaggtgc

SEQ ID NO: 10228 - DNA, 15 bp, Homo sapiens
cctaaataagaggtg

SEQ ID NO: 10229 - DNA, 15 bp, Homo sapiens
acctaaataagaggt

SEQ ID NO: 10230 - DNA, 15 bp, Homo sapiens
gacctaaataagagg

SEQ ID NO: 10231 - DNA, 15 bp, Homo sapiens
tgacctaaataagag

SEQ ID NO: 10232 - DNA, 15 bp, Homo sapiens
ttgacctaaataaga

SEQ ID NO: 10233 - DNA, 15 bp, Homo sapiens
attgacctaaataag

SEQ ID NO: 10234 - DNA, 15 bp, Homo sapiens
tattgacctaaataa

SEQ ID NO: 10235 - DNA, 15 bp, Homo sapiens
ttattgacctaaata

SEQ ID NO: 10236 - DNA, 15 bp, Homo sapiens
tttattgacctaaat

SEQ ID NO: 10237 - DNA, 15 bp, Homo sapiens
ttttattgacctaaa

SEQ ID NO: 10238 - DNA, 15 bp, Homo sapiens
cttttattgacctaa

SEQ ID NO: 10239 - DNA, 15 bp, Homo sapiens
acttttattgaccta

SEQ ID NO: 10240 - DNA, 15 bp, Homo sapiens
aacttttattgacct

SEQ ID NO: 10241 - DNA, 15 bp, Homo sapiens
aaacttttattgacc

SEQ ID NO: 10242 - DNA, 15 bp, Homo sapiens
caaacttttattgac

SEQ ID NO: 10243 - DNA, 15 bp, Homo sapiens
gcaaacttttattga

SEQ ID NO: 10244 - DNA, 15 bp, Homo sapiens
tgcaaacttttattg

SEQ ID NO: 10245 - DNA, 15 bp, Homo sapiens
ttgcaaacttttatt

SEQ ID NO: 10246 - DNA, 15 bp, Homo sapiens
tttgcaaacttttat

SEQ ID NO: 10247 - DNA, 15 bp, Homo sapiens
atttgcaaactttta

SEQ ID NO: 10248 - DNA, 15 bp, Homo sapiens
catttgcaaactttt

SEQ ID NO: 10249 - DNA, 15 bp, Homo sapiens
acatttgcaaacttt

SEQ ID NO: 10250 - DNA, 15 bp, Homo sapiens
cacatttgcaaactt

SEQ ID NO: 10251 - DNA, 15 bp, Homo sapiens
ccacatttgcaaact

SEQ ID NO: 10252 - DNA, 15 bp, Homo sapiens
tccacatttgcaaac

SEQ ID NO: 10253 - DNA, 15 bp, Homo sapiens
ttccacatttgcaaa

SEQ ID NO: 10254 - DNA, 15 bp, Homo sapiens
attccacatttgcaa

SEQ ID NO: 10255 - DNA, 15 bp, Homo sapiens
tattccacatttgca

SEQ ID NO: 10256 - DNA, 15 bp, Homo sapiens
gtattccacatttgc

SEQ ID NO: 10257 - DNA, 15 bp, Homo sapiens
agtattccacatttg

SEQ ID NO: 10258 - DNA, 15 bp, Homo sapiens
aagtattccacattt

SEQ ID NO: 10259 - DNA, 15 bp, Homo sapiens
aaagtattccacatt

SEQ ID NO: 10260 - DNA, 15 bp, Homo sapiens
taaagtattccacat

SEQ ID NO: 10261 - DNA, 15 bp, Homo sapiens
ctaaagtattccaca

SEQ ID NO: 10262 - DNA, 15 bp, Homo sapiens
gctaaagtattccac

SEQ ID NO: 10263 - DNA, 15 bp, Homo sapiens
ggctaaagtattcca

SEQ ID NO: 10264 - DNA, 15 bp, Homo sapiens
tggctaaagtattcc

SEQ ID NO: 10265 - DNA, 15 bp, Homo sapiens
atggctaaagtattc

SEQ ID NO: 10266 - DNA, 15 bp, Homo sapiens
gatggctaaagtatt

SEQ ID NO: 10267 - DNA, 15 bp, Homo sapiens
agatggctaaagtat

SEQ ID NO: 10268 - DNA, 15 bp, Homo sapiens
tagatggctaaagta

SEQ ID NO: 10269 - DNA, 15 bp, Homo sapiens
gtagatggctaaagt

SEQ ID NO: 10270 - DNA, 15 bp, Homo sapiens
tgtagatggctaaag

SEQ ID NO: 10271 - DNA, 15 bp, Homo sapiens
atgtagatggctaaa

SEQ ID NO: 10272 - DNA, 15 bp, Homo sapiens
gatgtagatggctaa

SEQ ID NO: 10273 - DNA, 15 bp, Homo sapiens
tgatgtagatggcta

SEQ ID NO: 10274 - DNA, 15 bp, Homo sapiens
gtgatgtagatggct

SEQ ID NO: 10275 - DNA, 15 bp, Homo sapiens
tgtgatgtagatggc

SEQ ID NO: 10276 - DNA, 15 bp, Homo sapiens
gtgtgatgtagatgg

SEQ ID NO: 10277 - DNA, 15 bp, Homo sapiens
agtgtgatgtagatg

SEQ ID NO: 10278 - DNA, 15 bp, Homo sapiens
cagtgtgatgtagat

SEQ ID NO: 10279 - DNA, 15 bp, Homo sapiens
ccagtgtgatgtaga

SEQ ID NO: 10280 - DNA, 15 bp, Homo sapiens
accagtgtgatgtag

SEQ ID NO: 10281 - DNA, 15 bp, Homo sapiens
taccagtgtgatgta

SEQ ID NO: 10282 - DNA, 15 bp, Homo sapiens
ctaccagtgtgatgt

SEQ ID NO: 10283 - DNA, 15 bp, Homo sapiens
tctaccagtgtgatg

SEQ ID NO: 10284 - DNA, 15 bp, Homo sapiens
ctctaccagtgtgat

SEQ ID NO: 10285 - DNA, 15 bp, Homo sapiens
tctctaccagtgtga

SEQ ID NO: 10286 - DNA, 15 bp, Homo sapiens
gtctctaccagtgtg

SEQ ID NO: 10287 - DNA, 15 bp, Homo sapiens
agtctctaccagtgt

SEQ ID NO: 10288 - DNA, 15 bp, Homo sapiens
aagtctctaccagtg

SEQ ID NO: 10289 - DNA, 15 bp, Homo sapiens
aaagtctctaccagt

SEQ ID NO: 10290 - DNA, 15 bp, Homo sapiens
gaaagtctctaccag

SEQ ID NO: 10291 - DNA, 15 bp, Homo sapiens
agaaagtctctacca

SEQ ID NO: 10292 - DNA, 15 bp, Homo sapiens
cagaaagtctctacc

SEQ ID NO: 10293 - DNA, 15 bp, Homo sapiens
acagaaagtctctac

SEQ ID NO: 10294 - DNA, 15 bp, Homo sapiens
cacagaaagtctcta

SEQ ID NO: 10295 - DNA, 15 bp, Homo sapiens
tcacagaaagtctct

SEQ ID NO: 10296 - DNA, 15 bp, Homo sapiens
atcacagaaagtctc

SEQ ID NO: 10297 - DNA, 15 bp, Homo sapiens
gatcacagaaagtct

SEQ ID NO: 10298 - DNA, 15 bp, Homo sapiens
tgatcacagaaagtc

SEQ ID NO: 10299 - DNA, 15 bp, Homo sapiens
ctgatcacagaaagt

SEQ ID NO: 10300 - DNA, 15 bp, Homo sapiens
gctgatcacagaaag

SEQ ID NO: 10301 - DNA, 15 bp, Homo sapiens
agctgatcacagaaa

SEQ ID NO: 10302 - DNA, 15 bp, Homo sapiens
tagctgatcacagaa

SEQ ID NO: 10303 - DNA, 15 bp, Homo sapiens
atagctgatcacaga

SEQ ID NO: 10304 - DNA, 15 bp, Homo sapiens
aatagctgatcacag

SEQ ID NO: 10305 - DNA, 15 bp, Homo sapiens
aaatagctgatcaca

SEQ ID NO: 10306 - DNA, 15 bp, Homo sapiens
aaaatagctgatcac

SEQ ID NO: 10307 - DNA, 15 bp, Homo sapiens
aaaaatagctgatca

SEQ ID NO: 10308 - DNA, 15 bp, Homo sapiens
aaaaaatagctgatc

SEQ ID NO: 10309 - DNA, 15 bp, Homo sapiens
taaaaaatagctgat

SEQ ID NO: 10310 - DNA, 15 bp, Homo sapiens
ttaaaaaatagctga

SEQ ID NO: 10311 - DNA, 15 bp, Homo sapiens
attaaaaaatagctg

SEQ ID NO: 10312 - DNA, 15 bp, Homo sapiens
tattaaaaaatagct

SEQ ID NO: 10313 - DNA, 15 bp, Homo sapiens
gtattaaaaaatagc

SEQ ID NO: 10314 - DNA, 15 bp, Homo sapiens
ggtattaaaaaatag

SEQ ID NO: 10315 - DNA, 15 bp, Homo sapiens
tggtattaaaaaata

SEQ ID NO: 10316 - DNA, 15 bp, Homo sapiens
atggtattaaaaaat

SEQ ID NO: 10317 - DNA, 15 bp, Homo sapiens
tatggtattaaaaaa

SEQ ID NO: 10318 - DNA, 15 bp, Homo sapiens
atatggtattaaaaa

SEQ ID NO: 10319 - DNA, 15 bp, Homo sapiens
aatatggtattaaaa

SEQ ID NO: 10320 - DNA, 15 bp, Homo sapiens
aaatatggtattaaa

SEQ ID NO: 10321 - DNA, 15 bp, Homo sapiens
taaatatggtattaa

SEQ ID NO: 10322 - DNA, 15 bp, Homo sapiens
ttaaatatggtatta

SEQ ID NO: 10323 - DNA, 15 bp, Homo sapiens
attaaatatggtatt

SEQ ID NO: 10324 - DNA, 15 bp, Homo sapiens
gattaaatatggtat

SEQ ID NO: 10325 - DNA, 15 bp, Homo sapiens
tgattaaatatggta

SEQ ID NO: 10326 - DNA, 15 bp, Homo sapiens
ttgattaaatatggt

SEQ ID NO: 10327 - DNA, 15 bp, Homo sapiens
tttgattaaatatgg

SEQ ID NO: 10328 - DNA, 15 bp, Homo sapiens
atttgattaaatatg

SEQ ID NO: 10329 - DNA, 15 bp, Homo sapiens
gatttgattaaatat

SEQ ID NO: 10330 - DNA, 15 bp, Homo sapiens
agatttgattaaata

SEQ ID NO: 10331 - DNA, 15 bp, Homo sapiens
tagatttgattaaat

SEQ ID NO: 10332 - DNA, 15 bp, Homo sapiens
ttagatttgattaaa

SEQ ID NO: 10333 - DNA, 15 bp, Homo sapiens
cttagatttgattaa

SEQ ID NO: 10334 - DNA, 15 bp, Homo sapiens
tcttagatttgatta

SEQ ID NO: 10335 - DNA, 15 bp, Homo sapiens
atcttagatttgatt

SEQ ID NO: 10336 - DNA, 15 bp, Homo sapiens
tatcttagatttgat

SEQ ID NO: 10337 - DNA, 15 bp, Homo sapiens
gtatcttagatttga

SEQ ID NO: 10338 - DNA, 15 bp, Homo sapiens
ggtatcttagatttg

SEQ ID NO: 10339 - DNA, 15 bp, Homo sapiens
tggtatcttagattt

SEQ ID NO: 10340 - DNA, 15 bp, Homo sapiens
atggtatcttagatt

SEQ ID NO: 10341 - DNA, 15 bp, Homo sapiens
gatggtatcttagat

SEQ ID NO: 10342 - DNA, 15 bp, Homo sapiens
tgatggtatcttaga

SEQ ID NO: 10343 - DNA, 15 bp, Homo sapiens
atgatggtatcttag

SEQ ID NO: 10344 - DNA, 15 bp, Homo sapiens
aatgatggtatctta

SEQ ID NO: 10345 - DNA, 15 bp, Homo sapiens
caatgatggtatctt

SEQ ID NO: 10346 - DNA, 15 bp, Homo sapiens
acaatgatggtatct

SEQ ID NO: 10347 - DNA, 15 bp, Homo sapiens
cacaatgatggtatc

SEQ ID NO: 10348 - DNA, 15 bp, Homo sapiens
tcacaatgatggtat

SEQ ID NO: 10349 - DNA, 15 bp, Homo sapiens
ttcacaatgatggta

SEQ ID NO: 10350 - DNA, 15 bp, Homo sapiens
tttcacaatgatggt

SEQ ID NO: 10351 - DNA, 15 bp, Homo sapiens
gtttcacaatgatgg

SEQ ID NO: 10352 - DNA, 15 bp, Homo sapiens
agtttcacaatgatg

SEQ ID NO: 10353 - DNA, 15 bp, Homo sapiens
gagtttcacaatgat

SEQ ID NO: 10354 - DNA, 15 bp, Homo sapiens
cgagtttcacaatga

SEQ ID NO: 10355 - DNA, 15 bp, Homo sapiens
tcgagtttcacaatg

SEQ ID NO: 10356 - DNA, 15 bp, Homo sapiens
gtcgagtttcacaat

SEQ ID NO: 10357 - DNA, 15 bp, Homo sapiens
tgtcgagtttcacaa

SEQ ID NO: 10358 - DNA, 15 bp, Homo sapiens
atgtcgagtttcaca

SEQ ID NO: 10359 - DNA, 15 bp, Homo sapiens
aatgtcgagtttcac

SEQ ID NO: 10360 - DNA, 15 bp, Homo sapiens
aaatgtcgagtttca

SEQ ID NO: 10361 - DNA, 15 bp, Homo sapiens
aaaatgtcgagtttc

SEQ ID NO: 10362 - DNA, 15 bp, Homo sapiens
taaaatgtcgagttt

SEQ ID NO: 10363 - DNA, 15 bp, Homo sapiens
ataaaatgtcgagtt

SEQ ID NO: 10364 - DNA, 15 bp, Homo sapiens
tataaaatgtcgagt

SEQ ID NO: 10365 - DNA, 15 bp, Homo sapiens
atataaaatgtcgag

SEQ ID NO: 10366 - DNA, 15 bp, Homo sapiens
tatataaaatgtcga

SEQ ID NO: 10367 - DNA, 15 bp, Homo sapiens
atatataaaatgtcg

SEQ ID NO: 10368 - DNA, 15 bp, Homo sapiens
gatatataaaatgtc

SEQ ID NO: 10369 - DNA, 15 bp, Homo sapiens
tgatatataaaatgt

SEQ ID NO: 10370 - DNA, 15 bp, Homo sapiens
gtgatatataaaatg

SEQ ID NO: 10371 - DNA, 15 bp, Homo sapiens
agtgatatataaaat

SEQ ID NO: 10372 - DNA, 15 bp, Homo sapiens
tagtgatatataaaa

SEQ ID NO: 10373 - DNA, 15 bp, Homo sapiens
ttagtgatatataaa

SEQ ID NO: 10374 - DNA, 15 bp, Homo sapiens
cttagtgatatataa

SEQ ID NO: 10375 - DNA, 15 bp, Homo sapiens
tcttagtgatatata

SEQ ID NO: 10376 - DNA, 15 bp, Homo sapiens
ttcttagtgatatat

SEQ ID NO: 10377 - DNA, 15 bp, Homo sapiens
tttcttagtgatata

SEQ ID NO: 10378 - DNA, 15 bp, Homo sapiens
ctttcttagtgatat

SEQ ID NO: 10379 - DNA, 15 bp, Homo sapiens
gctttcttagtgata

SEQ ID NO: 10380 - DNA, 15 bp, Homo sapiens
tgctttcttagtgat

SEQ ID NO: 10381 - DNA, 15 bp, Homo sapiens
ttgctttcttagtga

SEQ ID NO: 10382 - DNA, 15 bp, Homo sapiens
tttgctttcttagtg

SEQ ID NO: 10383 - DNA, 15 bp, Homo sapiens
ttttgctttcttagt

SEQ ID NO: 10384 - DNA, 15 bp, Homo sapiens
tttttgctttcttag

SEQ ID NO: 10385 - DNA, 15 bp, Homo sapiens
atttttgctttctta

SEQ ID NO: 10386 - DNA, 15 bp, Homo sapiens
catttttgctttctt

SEQ ID NO: 10387 - DNA, 15 bp, Homo sapiens
gcatttttgctttct

SEQ ID NO: 10388 - DNA, 15 bp, Homo sapiens
tgcatttttgctttc

SEQ ID NO: 10389 - DNA, 15 bp, Homo sapiens
ctgcatttttgcttt

SEQ ID NO: 10390 - DNA, 15 bp, Homo sapiens
gctgcatttttgctt

SEQ ID NO: 10391 - DNA, 15 bp, Homo sapiens
ggctgcatttttgct

SEQ ID NO: 10392 - DNA, 15 bp, Homo sapiens
aggctgcatttttgc

SEQ ID NO: 10393 - DNA, 15 bp, Homo sapiens
caggctgcatttttg

SEQ ID NO: 10394 - DNA, 15 bp, Homo sapiens
ccaggctgcattttt

SEQ ID NO: 10395 - DNA, 15 bp, Homo sapiens
cccaggctgcatttt

SEQ ID NO: 10396 - DNA, 15 bp, Homo sapiens
acccaggctgcattt

SEQ ID NO: 10397 - DNA, 15 bp, Homo sapiens
cacccaggctgcatt

SEQ ID NO: 10398 - DNA, 15 bp, Homo sapiens
tcacccaggctgcat

SEQ ID NO: 10399 - DNA, 15 bp, Homo sapiens
gtcacccaggctgca

SEQ ID NO: 10400 - DNA, 15 bp, Homo sapiens
ggtcacccaggctgc

SEQ ID NO: 10401 - DNA, 15 bp, Homo sapiens
tggtcacccaggctg

SEQ ID NO: 10402 - DNA, 15 bp, Homo sapiens
ctggtcacccaggct

SEQ ID NO: 10403 - DNA, 15 bp, Homo sapiens
tctggtcacccaggc

SEQ ID NO: 10404 - DNA, 15 bp, Homo sapiens
ctctggtcacccagg

SEQ ID NO: 10405 - DNA, 15 bp, Homo sapiens
actctggtcacccag

SEQ ID NO: 10406 - DNA, 15 bp, Homo sapiens
cactctggtcaccca

SEQ ID NO: 10407 - DNA, 15 bp, Homo sapiens
tcactctggtcaccc

SEQ ID NO: 10408 - DNA, 15 bp, Homo sapiens
ttcactctggtcacc

SEQ ID NO: 10409 - DNA, 15 bp, Homo sapiens
tttcactctggtcac

SEQ ID NO: 10410 - DNA, 15 bp, Homo sapiens
gtttcactctggtca

SEQ ID NO: 10411 - DNA, 15 bp, Homo sapiens
agtttcactctggtc

SEQ ID NO: 10412 - DNA, 15 bp, Homo sapiens
gagtttcactctggt

SEQ ID NO: 10413 - DNA, 15 bp, Homo sapiens
ggagtttcactctgg

SEQ ID NO: 10414 - DNA, 15 bp, Homo sapiens
tggagtttcactctg

SEQ ID NO: 10415 - DNA, 15 bp, Homo sapiens
gagatggagtttcac

SEQ ID NO: 10416 - DNA, 15 bp, Homo sapiens
tgagatggagtttca

SEQ ID NO: 10417 - DNA, 15 bp, Homo sapiens
ttgagatggagtttc

SEQ ID NO: 10418 - DNA, 15 bp, Homo sapiens
tttgagatggagttt

SEQ ID NO: 10419 - DNA, 15 bp, Homo sapiens
ttttgagatggagtt

SEQ ID NO: 10420 - DNA, 15 bp, Homo sapiens
tttttttgagatgga

SEQ ID NO: 10421 - DNA, 15 bp, Homo sapiens
ttttttttgagatgg

SEQ ID NO: 10422 - DNA, 15 bp, Homo sapiens
tttttttttgagatg

SEQ ID NO: 10423 - DNA, 15 bp, Homo sapiens
ttttttttttgagat

SEQ ID NO: 10424 - DNA, 15 bp, Homo sapiens
attcttttttttttt

SEQ ID NO: 10425 - DNA, 15 bp, Homo sapiens
aattctttttttttt

SEQ ID NO: 10426 - DNA, 15 bp, Homo sapiens
taattcttttttttt

SEQ ID NO: 10427 - DNA, 15 bp, Homo sapiens
ttaattctttttttt

SEQ ID NO: 10428 - DNA, 15 bp, Homo sapiens
attaattcttttttt

SEQ ID NO: 10429 - DNA, 15 bp, Homo sapiens
cattaattctttttt

SEQ ID NO: 10430 - DNA, 15 bp, Homo sapiens
tcattaattcttttt

SEQ ID NO: 10431 - DNA, 15 bp, Homo sapiens
ttcattaattctttt

SEQ ID NO: 10432 - DNA, 15 bp, Homo sapiens
gttcattaattcttt

SEQ ID NO: 10433 - DNA, 15 bp, Homo sapiens
agttcattaattctt

SEQ ID NO: 10434 - DNA, 15 bp, Homo sapiens
tagttcattaattct

SEQ ID NO: 10435 - DNA, 15 bp, Homo sapiens
atagttcattaattc

SEQ ID NO: 10436 - DNA, 15 bp, Homo sapiens
tatagttcattaatt

SEQ ID NO: 10437 - DNA, 15 bp, Homo sapiens
ctatagttcattaat

SEQ ID NO: 10438 - DNA, 15 bp, Homo sapiens
actatagttcattaa

SEQ ID NO: 10439 - DNA, 15 bp, Homo sapiens
aactatagttcatta

SEQ ID NO: 10440 - DNA, 15 bp, Homo sapiens
aaactatagttcatt

SEQ ID NO: 10441 - DNA, 15 bp, Homo sapiens
taaactatagttcat

SEQ ID NO: 10442 - DNA, 15 bp, Homo sapiens
ttaaactatagttca

SEQ ID NO: 10443 - DNA, 15 bp, Homo sapiens
attaaactatagttc

SEQ ID NO: 10444 - DNA, 15 bp, Homo sapiens
tattaaactatagtt

SEQ ID NO: 10445 - DNA, 15 bp, Homo sapiens
gtattaaactatagt

SEQ ID NO: 10446 - DNA, 15 bp, Homo sapiens
tgtattaaactatag

SEQ ID NO: 10447 - DNA, 15 bp, Homo sapiens
atgtattaaactata

SEQ ID NO: 10448 - DNA, 15 bp, Homo sapiens
tatgtattaaactat

SEQ ID NO: 10449 - DNA, 15 bp, Homo sapiens
atatgtattaaacta

SEQ ID NO: 10450 - DNA, 15 bp, Homo sapiens
aatatgtattaaact

SEQ ID NO: 10451 - DNA, 15 bp, Homo sapiens
aaatatgtattaaac

SEQ ID NO: 10452 - DNA, 15 bp, Homo sapiens
taaatatgtattaaa

SEQ ID NO: 10453 - DNA, 15 bp, Homo sapiens
gtaaatatgtattaa

SEQ ID NO: 10454 - DNA, 15 bp, Homo sapiens
agtaaatatgtatta

SEQ ID NO: 10455 - DNA, 15 bp, Homo sapiens
tagtaaatatgtatt

SEQ ID NO: 10456 - DNA, 15 bp, Homo sapiens
ttagtaaatatgtat

SEQ ID NO: 10457 - DNA, 15 bp, Homo sapiens
cttagtaaatatgta

SEQ ID NO: 10458 - DNA, 15 bp, Homo sapiens
acttagtaaatatgt

SEQ ID NO: 10459 - DNA, 15 bp, Homo sapiens
cacttagtaaatatg

SEQ ID NO: 10460 - DNA, 15 bp, Homo sapiens
gcacttagtaaatat

SEQ ID NO: 10461 - DNA, 15 bp, Homo sapiens
ggcacttagtaaata

SEQ ID NO: 10462 - DNA, 15 bp, Homo sapiens
gggcacttagtaaat

SEQ ID NO: 10463 - DNA, 15 bp, Homo sapiens
tgggcacttagtaaa

SEQ ID NO: 10464 - DNA, 15 bp, Homo sapiens
gtgggcacttagtaa

SEQ ID NO: 10465 - DNA, 15 bp, Homo sapiens
tgtgggcacttagta

SEQ ID NO: 10466 - DNA, 15 bp, Homo sapiens
gtgtgggcacttagt

SEQ ID NO: 10467 - DNA, 15 bp, Homo sapiens
agtgtgggcacttag

SEQ ID NO: 10468 - DNA, 15 bp, Homo sapiens
tagtgtgggcactta

SEQ ID NO: 10469 - DNA, 15 bp, Homo sapiens
ttagtgtgggcactt

SEQ ID NO: 10470 - DNA, 15 bp, Homo sapiens
gttagtgtgggcact

SEQ ID NO: 10471 - DNA, 15 bp, Homo sapiens
agttagtgtgggcac

SEQ ID NO: 10472 - DNA, 15 bp, Homo sapiens
tagttagtgtgggca

SEQ ID NO: 10473 - DNA, 15 bp, Homo sapiens
gtagttagtgtgggc

SEQ ID NO: 10474 - DNA, 15 bp, Homo sapiens
agtagttagtgtggg

SEQ ID NO: 10475 - DNA, 15 bp, Homo sapiens
aagtagttagtgtgg

SEQ ID NO: 10476 - DNA, 15 bp, Homo sapiens
taagtagttagtgtg

SEQ ID NO: 10477 - DNA, 15 bp, Homo sapiens
ttaagtagttagtgt

SEQ ID NO: 10478 - DNA, 15 bp, Homo sapiens
tttaagtagttagtg

SEQ ID NO: 10479 - DNA, 15 bp, Homo sapiens
ttttaagtagttagt

SEQ ID NO: 10480 - DNA, 15 bp, Homo sapiens
tttttaagtagttag

SEQ ID NO: 10481 - DNA, 15 bp, Homo sapiens
atttttaagtagtta

SEQ ID NO: 10482 - DNA, 15 bp, Homo sapiens
catttttaagtagtt

SEQ ID NO: 10483 - DNA, 15 bp, Homo sapiens
ccatttttaagtagt

SEQ ID NO: 10484 - DNA, 15 bp, Homo sapiens
accatttttaagtag

SEQ ID NO: 10485 - DNA, 15 bp, Homo sapiens
gaccatttttaagta

SEQ ID NO: 10486 - DNA, 15 bp, Homo sapiens
ggaccatttttaagt

SEQ ID NO: 10487 - DNA, 15 bp, Homo sapiens
tggaccatttttaag

SEQ ID NO: 10488 - DNA, 15 bp, Homo sapiens
ttggaccatttttaa

SEQ ID NO: 10489 - DNA, 15 bp, Homo sapiens
tttggaccattttta

SEQ ID NO: 10490 - DNA, 15 bp, Homo sapiens
ttttggaccattttt

SEQ ID NO: 10491 - DNA, 15 bp, Homo sapiens
attttggaccatttt

SEQ ID NO: 10492 - DNA, 15 bp, Homo sapiens
tattttggaccattt

SEQ ID NO: 10493 - DNA, 15 bp, Homo sapiens
gtattttggaccatt

SEQ ID NO: 10494 - DNA, 15 bp, Homo sapiens
agtattttggaccat

SEQ ID NO: 10495 - DNA, 15 bp, Homo sapiens
cagtattttggacca

SEQ ID NO: 10496 - DNA, 15 bp, Homo sapiens
tcagtattttggacc

SEQ ID NO: 10497 - DNA, 15 bp, Homo sapiens
ctcagtattttggac

SEQ ID NO: 10498 - DNA, 15 bp, Homo sapiens
cctcagtattttgga

SEQ ID NO: 10499 - DNA, 15 bp, Homo sapiens
gcctcagtattttgg

SEQ ID NO: 10500 - DNA, 15 bp, Homo sapiens
tgcctcagtattttg

SEQ ID NO: 10501 - DNA, 15 bp, Homo sapiens
atgcctcagtatttt

SEQ ID NO: 10502 - DNA, 15 bp, Homo sapiens
gatgcctcagtattt

SEQ ID NO: 10503 - DNA, 15 bp, Homo sapiens
agatgcctcagtatt

SEQ ID NO: 10504 - DNA, 15 bp, Homo sapiens
aagatgcctcagtat

SEQ ID NO: 10505 - DNA, 15 bp, Homo sapiens
taagatgcctcagta

SEQ ID NO: 10506 - DNA, 15 bp, Homo sapiens
ttaagatgcctcagt

SEQ ID NO: 10507 - DNA, 15 bp, Homo sapiens
cttaagatgcctcag

SEQ ID NO: 10508 - DNA, 15 bp, Homo sapiens
gcttaagatgcctca

SEQ ID NO: 10509 - DNA, 15 bp, Homo sapiens
agcttaagatgcctc

SEQ ID NO: 10510 - DNA, 15 bp, Homo sapiens
cagcttaagatgcct

SEQ ID NO: 10511 - DNA, 15 bp, Homo sapiens
acagcttaagatgcc

SEQ ID NO: 10512 - DNA, 15 bp, Homo sapiens
aacagcttaagatgc

SEQ ID NO: 10513 - DNA, 15 bp, Homo sapiens
caacagcttaagatg

SEQ ID NO: 10514 - DNA, 15 bp, Homo sapiens
ccaacagcttaagat

SEQ ID NO: 10515 - DNA, 15 bp, Homo sapiens
tccaacagcttaaga

SEQ ID NO: 10516 - DNA, 15 bp, Homo sapiens
ttccaacagcttaag

SEQ ID NO: 10517 - DNA, 15 bp, Homo sapiens
tttccaacagcttaa

SEQ ID NO: 10518 - DNA, 15 bp, Homo sapiens
ttttccaacagctta

SEQ ID NO: 10519 - DNA, 15 bp, Homo sapiens
attttccaacagctt

SEQ ID NO: 10520 - DNA, 15 bp, Homo sapiens
aattttccaacagct

SEQ ID NO: 10521 - DNA, 15 bp, Homo sapiens
caattttccaacagc

SEQ ID NO: 10522 - DNA, 15 bp, Homo sapiens
acaattttccaacag

SEQ ID NO: 10523 - DNA, 15 bp, Homo sapiens
aacaattttccaaca

SEQ ID NO: 10524 - DNA, 15 bp, Homo sapiens
aaacaattttccaac

SEQ ID NO: 10525 - DNA, 15 bp, Homo sapiens
aaaacaattttccaa

SEQ ID NO: 10526 - DNA, 15 bp, Homo sapiens
caaaacaattttcca

SEQ ID NO: 10527 - DNA, 15 bp, Homo sapiens
acaaaacaattttcc

SEQ ID NO: 10528 - DNA, 15 bp, Homo sapiens
aacaaaacaattttc

SEQ ID NO: 10529 - DNA, 15 bp, Homo sapiens
aaacaaaacaatttt

SEQ ID NO: 10530 - DNA, 15 bp, Homo sapiens
aaaacaaaacaattt

SEQ ID NO: 10531 - DNA, 15 bp, Homo sapiens
gaaaacaaaacaatt

SEQ ID NO: 10532 - DNA, 15 bp, Homo sapiens
tgaaaacaaaacaat

SEQ ID NO: 10533 - DNA, 15 bp, Homo sapiens
gtgaaaacaaaacaa

SEQ ID NO: 10534 - DNA, 15 bp, Homo sapiens
ggtgaaaacaaaaca

SEQ ID NO: 10535 - DNA, 15 bp, Homo sapiens
tggtgaaaacaaaac

SEQ ID NO: 10536 - DNA, 15 bp, Homo sapiens
gtggtgaaaacaaaa

SEQ ID NO: 10537 - DNA, 15 bp, Homo sapiens
agtggtgaaaacaaa

SEQ ID NO: 10538 - DNA, 15 bp, Homo sapiens
tagtggtgaaaacaa

SEQ ID NO: 10539 - DNA, 15 bp, Homo sapiens
gtagtggtgaaaaca

SEQ ID NO: 10540 - DNA, 15 bp, Homo sapiens
tgtagtggtgaaaac

SEQ ID NO: 10541 - DNA, 15 bp, Homo sapiens
ctgtagtggtgaaaa

SEQ ID NO: 10542 - DNA, 15 bp, Homo sapiens
actgtagtggtgaaa

SEQ ID NO: 10543 - DNA, 15 bp, Homo sapiens
tactgtagtggtgaa

SEQ ID NO: 10544 - DNA, 15 bp, Homo sapiens
ttactgtagtggtga

SEQ ID NO: 10545 - DNA, 15 bp, Homo sapiens
attactgtagtggtg

SEQ ID NO: 10546 - DNA, 15 bp, Homo sapiens
cattactgtagtggt

SEQ ID NO: 10547 - DNA, 15 bp, Homo sapiens
tcattactgtagtgg

SEQ ID NO: 10548 - DNA, 15 bp, Homo sapiens
ctcattactgtagtg

SEQ ID NO: 10549 - DNA, 15 bp, Homo sapiens
actcattactgtagt

SEQ ID NO: 10550 - DNA, 15 bp, Homo sapiens
gactcattactgtag

SEQ ID NO: 10551 - DNA, 15 bp, Homo sapiens
agactcattactgta

SEQ ID NO: 10552 - DNA, 15 bp, Homo sapiens
aagactcattactgt

SEQ ID NO: 10553 - DNA, 15 bp, Homo sapiens
aaagactcattactg

SEQ ID NO: 10554 - DNA, 15 bp, Homo sapiens
caaagactcattact

SEQ ID NO: 10555 - DNA, 15 bp, Homo sapiens
tcaaagactcattac

SEQ ID NO: 10556 - DNA, 15 bp, Homo sapiens
ttcaaagactcatta

SEQ ID NO: 10557 - DNA, 15 bp, Homo sapiens
attcaaagactcatt

SEQ ID NO: 10558 - DNA, 15 bp, Homo sapiens
cattcaaagactcat

SEQ ID NO: 10559 - DNA, 15 bp, Homo sapiens
tcattcaaagactca

SEQ ID NO: 10560 - DNA, 15 bp, Homo sapiens
atcattcaaagactc

SEQ ID NO: 10561 - DNA, 15 bp, Homo sapiens
tatcattcaaagact

SEQ ID NO: 10562 - DNA, 15 bp, Homo sapiens
gtatcattcaaagac

SEQ ID NO: 10563 - DNA, 15 bp, Homo sapiens
ggtatcattcaaaga

SEQ ID NO: 10564 - DNA, 15 bp, Homo sapiens
tggtatcattcaaag

SEQ ID NO: 10565 - DNA, 15 bp, Homo sapiens
atggtatcattcaaa

SEQ ID NO: 10566 - DNA, 15 bp, Homo sapiens
aatggtatcattcaa

SEQ ID NO: 10567 - DNA, 15 bp, Homo sapiens
aaatggtatcattca

SEQ ID NO: 10568 - DNA, 15 bp, Homo sapiens
aaaatggtatcattc

SEQ ID NO: 10569 - DNA, 15 bp, Homo sapiens
gaaaatggtatcatt

SEQ ID NO: 10570 - DNA, 15 bp, Homo sapiens
agaaaatggtatcat

SEQ ID NO: 10571 - DNA, 15 bp, Homo sapiens
tagaaaatggtatca

SEQ ID NO: 10572 - DNA, 15 bp, Homo sapiens
atagaaaatggtatc

SEQ ID NO: 10573 - DNA, 15 bp, Homo sapiens
tatagaaaatggtat

SEQ ID NO: 10574 - DNA, 15 bp, Homo sapiens
gtatagaaaatggta

SEQ ID NO: 10575 - DNA, 15 bp, Homo sapiens
agtatagaaaatggt

SEQ ID NO: 10576 - DNA, 15 bp, Homo sapiens
aagtatagaaaatgg

SEQ ID NO: 10577 - DNA, 15 bp, Homo sapiens
caagtatagaaaatg

SEQ ID NO: 10578 - DNA, 15 bp, Homo sapiens
ccaagtatagaaaat

SEQ ID NO: 10579 - DNA, 15 bp, Homo sapiens
gccaagtatagaaaa

SEQ ID NO: 10580 - DNA, 15 bp, Homo sapiens
agccaagtatagaaa

SEQ ID NO: 10581 - DNA, 15 bp, Homo sapiens
aagccaagtatagaa

SEQ ID NO: 10582 - DNA, 15 bp, Homo sapiens
gaagccaagtataga

SEQ ID NO: 10583 - DNA, 15 bp, Homo sapiens
agaagccaagtatag

SEQ ID NO: 10584 - DNA, 15 bp, Homo sapiens
tagaagccaagtata

SEQ ID NO: 10585 - DNA, 15 bp, Homo sapiens
ctagaagccaagtat

SEQ ID NO: 10586 - DNA, 15 bp, Homo sapiens
actagaagccaagta

SEQ ID NO: 10587 - DNA, 15 bp, Homo sapiens
aactagaagccaagt

SEQ ID NO: 10588 - DNA, 15 bp, Homo sapiens
aaactagaagccaag

SEQ ID NO: 10589 - DNA, 15 bp, Homo sapiens
taaactagaagccaa

SEQ ID NO: 10590 - DNA, 15 bp, Homo sapiens
gtaaactagaagcca

SEQ ID NO: 10591 - DNA, 15 bp, Homo sapiens
agtaaactagaagcc

SEQ ID NO: 10592 - DNA, 15 bp, Homo sapiens
gagtaaactagaagc

SEQ ID NO: 10593 - DNA, 15 bp, Homo sapiens
agagtaaactagaag

SEQ ID NO: 10594 - DNA, 15 bp, Homo sapiens
cagagtaaactagaa

SEQ ID NO: 10595 - DNA, 15 bp, Homo sapiens
gcagagtaaactaga

SEQ ID NO: 10596 - DNA, 15 bp, Homo sapiens
ggcagagtaaactag

SEQ ID NO: 10597 - DNA, 15 bp, Homo sapiens
aggcagagtaaacta

SEQ ID NO: 10598 - DNA, 15 bp, Homo sapiens
aaggcagagtaaact

SEQ ID NO: 10599 - DNA, 15 bp, Homo sapiens
aaaggcagagtaaac

SEQ ID NO: 10600 - DNA, 15 bp, Homo sapiens
gaaaggcagagtaaa

SEQ ID NO: 10601 - DNA, 15 bp, Homo sapiens
tgaaaggcagagtaa

SEQ ID NO: 10602 - DNA, 15 bp, Homo sapiens
gtgaaaggcagagta

SEQ ID NO: 10603 - DNA, 15 bp, Homo sapiens
agtgaaaggcagagt

SEQ ID NO: 10604 - DNA, 15 bp, Homo sapiens
cagtgaaaggcagag

SEQ ID NO: 10605 - DNA, 15 bp, Homo sapiens
tcagtgaaaggcaga

SEQ ID NO: 10606 - DNA, 15 bp, Homo sapiens
atcagtgaaaggcag

SEQ ID NO: 10607 - DNA, 15 bp, Homo sapiens
gatcagtgaaaggca

SEQ ID NO: 10608 - DNA, 15 bp, Homo sapiens
agatcagtgaaaggc

SEQ ID NO: 10609 - DNA, 15 bp, Homo sapiens
aagatcagtgaaagg

SEQ ID NO: 10610 - DNA, 15 bp, Homo sapiens
taagatcagtgaaag

SEQ ID NO: 10611 - DNA, 15 bp, Homo sapiens
ataagatcagtgaaa

SEQ ID NO: 10612 - DNA, 15 bp, Homo sapiens
gataagatcagtgaa

SEQ ID NO: 10613 - DNA, 15 bp, Homo sapiens
agataagatcagtga

SEQ ID NO: 10614 - DNA, 15 bp, Homo sapiens
aagataagatcagtg

SEQ ID NO: 10615 - DNA, 15 bp, Homo sapiens
aaagataagatcagt

SEQ ID NO: 10616 - DNA, 15 bp, Homo sapiens
aaaagataagatcag

SEQ ID NO: 10617 - DNA, 15 bp, Homo sapiens
aaaaagataagatca

SEQ ID NO: 10618 - DNA, 15 bp, Homo sapiens
taaaaagataagatc

SEQ ID NO: 10619 - DNA, 15 bp, Homo sapiens
ataaaaagataagat

SEQ ID NO: 10620 - DNA, 15 bp, Homo sapiens
aataaaaagataaga

SEQ ID NO: 10621 - DNA, 15 bp, Homo sapiens
taataaaaagataag

SEQ ID NO: 10622 - DNA, 15 bp, Homo sapiens
ttaataaaaagataa

SEQ ID NO: 10623 - DNA, 15 bp, Homo sapiens
attaataaaaagata

SEQ ID NO: 10624 - DNA, 15 bp, Homo sapiens
tattaataaaaagat

SEQ ID NO: 10625 - DNA, 15 bp, Homo sapiens
ttattaataaaaaga

SEQ ID NO: 10626 - DNA, 15 bp, Homo sapiens
gttattaataaaaag

SEQ ID NO: 10627 - DNA, 15 bp, Homo sapiens
agttattaataaaaa

SEQ ID NO: 10628 - DNA, 15 bp, Homo sapiens
aagttattaataaaa

SEQ ID NO: 10629 - DNA, 15 bp, Homo sapiens
aaagttattaataaa

SEQ ID NO: 10630 - DNA, 15 bp, Homo sapiens
taaagttattaataa

SEQ ID NO: 10631 - DNA, 15 bp, Homo sapiens
ataaagttattaata

SEQ ID NO: 10632 - DNA, 15 bp, Homo sapiens
cataaagttattaat

SEQ ID NO: 10633 - DNA, 15 bp, Homo sapiens
tcataaagttattaa

SEQ ID NO: 10634 - DNA, 15 bp, Homo sapiens
ctcataaagttatta

SEQ ID NO: 10635 - DNA, 15 bp, Homo sapiens
tctcataaagttatt

SEQ ID NO: 10636 - DNA, 15 bp, Homo sapiens
ttctcataaagttat

SEQ ID NO: 10637 - DNA, 15 bp, Homo sapiens
tttctcataaagtta

SEQ ID NO: 10638 - DNA, 15 bp, Homo sapiens
ttttctcataaagtt

SEQ ID NO: 10639 - DNA, 15 bp, Homo sapiens
tttttctcataaagt

SEQ ID NO: 10640 - DNA, 15 bp, Homo sapiens
atttttctcataaag

SEQ ID NO: 10641 - DNA, 15 bp, Homo sapiens
tatttttctcataaa

SEQ ID NO: 10642 - DNA, 15 bp, Homo sapiens
ttatttttctcataa

SEQ ID NO: 10643 - DNA, 15 bp, Homo sapiens
attatttttctcata

SEQ ID NO: 10644 - DNA, 15 bp, Homo sapiens
aattatttttctcat

SEQ ID NO: 10645 - DNA, 15 bp, Homo sapiens
taattatttttctca

SEQ ID NO: 10646 - DNA, 15 bp, Homo sapiens
ttaattatttttctc

SEQ ID NO: 10647 - DNA, 15 bp, Homo sapiens
attaattatttttct

SEQ ID NO: 10648 - DNA, 15 bp, Homo sapiens
cattaattatttttc

SEQ ID NO: 10649 - DNA, 15 bp, Homo sapiens
gcattaattattttt

SEQ ID NO: 10650 - DNA, 15 bp, Homo sapiens
agcattaattatttt

SEQ ID NO: 10651 - DNA, 15 bp, Homo sapiens
aagcattaattattt

SEQ ID NO: 10652 - DNA, 15 bp, Homo sapiens
aaagcattaattatt

SEQ ID NO: 10653 - DNA, 15 bp, Homo sapiens
taaagcattaattat

SEQ ID NO: 10654 - DNA, 15 bp, Homo sapiens
ataaagcattaatta

SEQ ID NO: 10655 - DNA, 15 bp, Homo sapiens
tataaagcattaatt

SEQ ID NO: 10656 - DNA, 15 bp, Homo sapiens
atataaagcattaat

SEQ ID NO: 10657 - DNA, 15 bp, Homo sapiens
tatataaagcattaa

SEQ ID NO: 10658 - DNA, 15 bp, Homo sapiens
atatataaagcatta

SEQ ID NO: 10659 - DNA, 15 bp, Homo sapiens
aatatataaagcatt

SEQ ID NO: 10660 - DNA, 15 bp, Homo sapiens
caatatataaagcat

SEQ ID NO: 10661 - DNA, 15 bp, Homo sapiens
acaatatataaagca

SEQ ID NO: 10662 - DNA, 15 bp, Homo sapiens
aacaatatataaagc

SEQ ID NO: 10663 - DNA, 15 bp, Homo sapiens
gaacaatatataaag

SEQ ID NO: 10664 - DNA, 15 bp, Homo sapiens
agaacaatatataaa

SEQ ID NO: 10665 - DNA, 15 bp, Homo sapiens
gagaacaatatataa

SEQ ID NO: 10666 - DNA, 15 bp, Homo sapiens
agagaacaatatata

SEQ ID NO: 10667 - DNA, 15 bp, Homo sapiens
gagagaacaatatat

SEQ ID NO: 10668 - DNA, 15 bp, Homo sapiens
tgagagaacaatata

SEQ ID NO: 10669 - DNA, 15 bp, Homo sapiens
ctgagagaacaatat

SEQ ID NO: 10670 - DNA, 15 bp, Homo sapiens
actgagagaacaata

SEQ ID NO: 10671 - DNA, 15 bp, Homo sapiens
aactgagagaacaat

SEQ ID NO: 10672 - DNA, 15 bp, Homo sapiens
gaactgagagaacaa

SEQ ID NO: 10673 - DNA, 15 bp, Homo sapiens
ggaactgagagaaca

SEQ ID NO: 10674 - DNA, 15 bp, Homo sapiens
tggaactgagagaac

SEQ ID NO: 10675 - DNA, 15 bp, Homo sapiens
atggaactgagagaa

SEQ ID NO: 10676 - DNA, 15 bp, Homo sapiens
catggaactgagaga

SEQ ID NO: 10677 - DNA, 15 bp, Homo sapiens
tcatggaactgagag

SEQ ID NO: 10678 - DNA, 15 bp, Homo sapiens
ctcatggaactgaga

SEQ ID NO: 10679 - DNA, 15 bp, Homo sapiens
gctcatggaactgag

SEQ ID NO: 10680 - DNA, 15 bp, Homo sapiens
tgctcatggaactga

SEQ ID NO: 10681 - DNA, 15 bp, Homo sapiens
ttgctcatggaactg

SEQ ID NO: 10682 - DNA, 15 bp, Homo sapiens
tttgctcatggaact

SEQ ID NO: 10683 - DNA, 15 bp, Homo sapiens
atttgctcatggaac

SEQ ID NO: 10684 - DNA, 15 bp, Homo sapiens
tatttgctcatggaa

SEQ ID NO: 10685 - DNA, 15 bp, Homo sapiens
atatttgctcatgga

SEQ ID NO: 10686 - DNA, 15 bp, Homo sapiens
aatatttgctcatgg

SEQ ID NO: 10687 - DNA, 15 bp, Homo sapiens
aaatatttgctcatg

SEQ ID NO: 10688 - DNA, 15 bp, Homo sapiens
gaaatatttgctcat

SEQ ID NO: 10689 - DNA, 15 bp, Homo sapiens
tgaaatatttgctca

SEQ ID NO: 10690 - DNA, 15 bp, Homo sapiens
ctgaaatatttgctc

SEQ ID NO: 10691 - DNA, 15 bp, Homo sapiens
tctgaaatatttgct

SEQ ID NO: 10692 - DNA, 15 bp, Homo sapiens
ctctgaaatatttgc

SEQ ID NO: 10693 - DNA, 15 bp, Homo sapiens
cctctgaaatatttg

SEQ ID NO: 10694 - DNA, 15 bp, Homo sapiens
ccctctgaaatattt

SEQ ID NO: 10695 - DNA, 15 bp, Homo sapiens
tccctctgaaatatt

SEQ ID NO: 10696 - DNA, 15 bp, Homo sapiens
ttccctctgaaatat

SEQ ID NO: 10697 - DNA, 15 bp, Homo sapiens
tttccctctgaaata

SEQ ID NO: 10698 - DNA, 15 bp, Homo sapiens
ttttccctctgaaat

SEQ ID NO: 10699 - DNA, 15 bp, Homo sapiens
attttccctctgaaa

SEQ ID NO: 10700 - DNA, 15 bp, Homo sapiens
aattttccctctgaa

SEQ ID NO: 10701 - DNA, 15 bp, Homo sapiens
caattttccctctga

SEQ ID NO: 10702 - DNA, 15 bp, Homo sapiens
ccaattttccctctg

SEQ ID NO: 10703 - DNA, 15 bp, Homo sapiens
gccaattttccctct

SEQ ID NO: 10704 - DNA, 15 bp, Homo sapiens
tgccaattttccctc

SEQ ID NO: 10705 - DNA, 15 bp, Homo sapiens
atgccaattttccct

SEQ ID NO: 10706 - DNA, 15 bp, Homo sapiens
gatgccaattttccc

SEQ ID NO: 10707 - DNA, 15 bp, Homo sapiens
agatgccaattttcc

SEQ ID NO: 10708 - DNA, 15 bp, Homo sapiens
cagatgccaattttc

SEQ ID NO: 10709 - DNA, 15 bp, Homo sapiens
tcagatgccaatttt

SEQ ID NO: 10710 - DNA, 15 bp, Homo sapiens
ctcagatgccaattt

SEQ ID NO: 10711 - DNA, 15 bp, Homo sapiens
actcagatgccaatt

SEQ ID NO: 10712 - DNA, 15 bp, Homo sapiens
tactcagatgccaat

SEQ ID NO: 10713 - DNA, 15 bp, Homo sapiens
ttactcagatgccaa

SEQ ID NO: 10714 - DNA, 15 bp, Homo sapiens
tttactcagatgcca

SEQ ID NO: 10715 - DNA, 15 bp, Homo sapiens
atttactcagatgcc

SEQ ID NO: 10716 - DNA, 15 bp, Homo sapiens
tatttactcagatgc

SEQ ID NO: 10717 - DNA, 15 bp, Homo sapiens
atatttactcagatg

SEQ ID NO: 10718 - DNA, 15 bp, Homo sapiens
aatatttactcagat

SEQ ID NO: 10719 - DNA, 15 bp, Homo sapiens
taatatttactcaga

SEQ ID NO: 10720 - DNA, 15 bp, Homo sapiens
gtaatatttactcag

SEQ ID NO: 10721 - DNA, 15 bp, Homo sapiens
agtaatatttactca

SEQ ID NO: 10722 - DNA, 15 bp, Homo sapiens
aagtaatatttactc

SEQ ID NO: 10723 - DNA, 15 bp, Homo sapiens
caagtaatatttact

SEQ ID NO: 10724 - DNA, 15 bp, Homo sapiens
ccaagtaatatttac

SEQ ID NO: 10725 - DNA, 15 bp, Homo sapiens
gccaagtaatattta

SEQ ID NO: 10726 - DNA, 15 bp, Homo sapiens
agccaagtaatattt

SEQ ID NO: 10727 - DNA, 15 bp, Homo sapiens
aagccaagtaatatt

SEQ ID NO: 10728 - DNA, 15 bp, Homo sapiens
aaagccaagtaatat

SEQ ID NO: 10729 - DNA, 15 bp, Homo sapiens
gaaagccaagtaata

SEQ ID NO: 10730 - DNA, 15 bp, Homo sapiens
tgaaagccaagtaat

SEQ ID NO: 10731 - DNA, 15 bp, Homo sapiens
atgaaagccaagtaa

SEQ ID NO: 10732 - DNA, 15 bp, Homo sapiens
aatgaaagccaagta

SEQ ID NO: 10733 - DNA, 15 bp, Homo sapiens
gaatgaaagccaagt

SEQ ID NO: 10734 - DNA, 15 bp, Homo sapiens
agaatgaaagccaag

SEQ ID NO: 10735 - DNA, 15 bp, Homo sapiens
cagaatgaaagccaa

SEQ ID NO: 10736 - DNA, 15 bp, Homo sapiens
tcagaatgaaagcca

SEQ ID NO: 10737 - DNA, 15 bp, Homo sapiens
ttcagaatgaaagcc

SEQ ID NO: 10738 - DNA, 15 bp, Homo sapiens
cttcagaatgaaagc

SEQ ID NO: 10739 - DNA, 15 bp, Homo sapiens
gcttcagaatgaaag

SEQ ID NO: 10740 - DNA, 15 bp, Homo sapiens
ggcttcagaatgaaa

SEQ ID NO: 10741 - DNA, 15 bp, Homo sapiens
gggcttcagaatgaa

SEQ ID NO: 10742 - DNA, 15 bp, Homo sapiens
tgggcttcagaatga

SEQ ID NO: 10743 - DNA, 15 bp, Homo sapiens
ttgggcttcagaatg

SEQ ID NO: 10744 - DNA, 15 bp, Homo sapiens
tttgggcttcagaat

SEQ ID NO: 10745 - DNA, 15 bp, Homo sapiens
gtttgggcttcagaa

SEQ ID NO: 10746 - DNA, 15 bp, Homo sapiens
tgtttgggcttcaga

SEQ ID NO: 10747 - DNA, 15 bp, Homo sapiens
atgtttgggcttcag

SEQ ID NO: 10748 - DNA, 15 bp, Homo sapiens
catgtttgggcttca

SEQ ID NO: 10749 - DNA, 15 bp, Homo sapiens
ccatgtttgggcttc

SEQ ID NO: 10750 - DNA, 15 bp, Homo sapiens
cccatgtttgggctt

SEQ ID NO: 10751 - DNA, 15 bp, Homo sapiens
acccatgtttgggct

SEQ ID NO: 10752 - DNA, 15 bp, Homo sapiens
tacccatgtttgggc

SEQ ID NO: 10753 - DNA, 15 bp, Homo sapiens
atacccatgtttggg

SEQ ID NO: 10754 - DNA, 15 bp, Homo sapiens
aatacccatgtttgg

SEQ ID NO: 10755 - DNA, 15 bp, Homo sapiens
gaatacccatgtttg

SEQ ID NO: 10756 - DNA, 15 bp, Homo sapiens
ggaatacccatgttt

SEQ ID NO: 10757 - DNA, 15 bp, Homo sapiens
aggaatacccatgtt

SEQ ID NO: 10758 - DNA, 15 bp, Homo sapiens
gaggaatacccatgt

SEQ ID NO: 10759 - DNA, 15 bp, Homo sapiens
tgaggaatacccatg

SEQ ID NO: 10760 - DNA, 15 bp, Homo sapiens
ttgaggaatacccat

SEQ ID NO: 10761 - DNA, 15 bp, Homo sapiens
cttgaggaataccca

SEQ ID NO: 10762 - DNA, 15 bp, Homo sapiens
gcttgaggaataccc

SEQ ID NO: 10763 - DNA, 15 bp, Homo sapiens
agcttgaggaatacc

SEQ ID NO: 10764 - DNA, 15 bp, Homo sapiens
cagcttgaggaatac

SEQ ID NO: 10765 - DNA, 15 bp, Homo sapiens
tcagcttgaggaata

SEQ ID NO: 10766 - DNA, 15 bp, Homo sapiens
ctcagcttgaggaat

SEQ ID NO: 10767 - DNA, 15 bp, Homo sapiens
gctcagcttgaggaa

SEQ ID NO: 10768 - DNA, 15 bp, Homo sapiens
tgctcagcttgagga

SEQ ID NO: 10769 - DNA, 15 bp, Homo sapiens
atgctcagcttgagg

SEQ ID NO: 10770 - DNA, 15 bp, Homo sapiens
gatgctcagcttgag

SEQ ID NO: 10771 - DNA, 15 bp, Homo sapiens
agatgctcagcttga

SEQ ID NO: 10772 - DNA, 15 bp, Homo sapiens
cagatgctcagcttg

SEQ ID NO: 10773 - DNA, 15 bp, Homo sapiens
gcagatgctcagctt

SEQ ID NO: 10774 - DNA, 15 bp, Homo sapiens
tgcagatgctcagct

SEQ ID NO: 10775 - DNA, 15 bp, Homo sapiens
atgcagatgctcagc

SEQ ID NO: 10776 - DNA, 15 bp, Homo sapiens
tatgcagatgctcag

SEQ ID NO: 10777 - DNA, 15 bp, Homo sapiens
ctatgcagatgctca

SEQ ID NO: 10778 - DNA, 15 bp, Homo sapiens
tctatgcagatgctc

SEQ ID NO: 10779 - DNA, 15 bp, Homo sapiens
ttctatgcagatgct

SEQ ID NO: 10780 - DNA, 15 bp, Homo sapiens
attctatgcagatgc

SEQ ID NO: 10781 - DNA, 15 bp, Homo sapiens
aattctatgcagatg

SEQ ID NO: 10782 - DNA, 15 bp, Homo sapiens
taattctatgcagat

SEQ ID NO: 10783 - DNA, 15 bp, Homo sapiens
ctaattctatgcaga

SEQ ID NO: 10784 - DNA, 15 bp, Homo sapiens
cctaattctatgcag

SEQ ID NO: 10785 - DNA, 15 bp, Homo sapiens
tcctaattctatgca

SEQ ID NO: 10786 - DNA, 15 bp, Homo sapiens
ttcctaattctatgc

SEQ ID NO: 10787 - DNA, 15 bp, Homo sapiens
attcctaattctatg

SEQ ID NO: 10788 - DNA, 15 bp, Homo sapiens
aattcctaattctat

SEQ ID NO: 10789 - DNA, 15 bp, Homo sapiens
taattcctaattcta

SEQ ID NO: 10790 - DNA, 15 bp, Homo sapiens
ttaattcctaattct

SEQ ID NO: 10791 - DNA, 15 bp, Homo sapiens
gttaattcctaattc

SEQ ID NO: 10792 - DNA, 15 bp, Homo sapiens
tgttaattcctaatt

SEQ ID NO: 10793 - DNA, 15 bp, Homo sapiens
gtgttaattcctaat

SEQ ID NO: 10794 - DNA, 15 bp, Homo sapiens
tgtgttaattcctaa

SEQ ID NO: 10795 - DNA, 15 bp, Homo sapiens
ttgtgttaattccta

SEQ ID NO: 10796 - DNA, 15 bp, Homo sapiens
attgtgttaattcct

SEQ ID NO: 10797 - DNA, 15 bp, Homo sapiens
cattgtgttaattcc

SEQ ID NO: 10798 - DNA, 15 bp, Homo sapiens
ccattgtgttaattc

SEQ ID NO: 10799 - DNA, 15 bp, Homo sapiens
accattgtgttaatt

SEQ ID NO: 10800 - DNA, 15 bp, Homo sapiens
caccattgtgttaat

SEQ ID NO: 10801 - DNA, 15 bp, Homo sapiens
tcaccattgtgttaa

SEQ ID NO: 10802 - DNA, 15 bp, Homo sapiens
gtcaccattgtgtta

SEQ ID NO: 10803 - DNA, 15 bp, Homo sapiens
tgtcaccattgtgtt

SEQ ID NO: 10804 - DNA, 15 bp, Homo sapiens
ttgtcaccattgtgt

SEQ ID NO: 10805 - DNA, 15 bp, Homo sapiens
tttgtcaccattgtg

SEQ ID NO: 10806 - DNA, 15 bp, Homo sapiens
ctttgtcaccattgt

SEQ ID NO: 10807 - DNA, 15 bp, Homo sapiens
actttgtcaccattg

SEQ ID NO: 10808 - DNA, 15 bp, Homo sapiens
gactttgtcaccatt

SEQ ID NO: 10809 - DNA, 15 bp, Homo sapiens
ggactttgtcaccat

SEQ ID NO: 10810 - DNA, 15 bp, Homo sapiens
tggactttgtcacca

SEQ ID NO: 10811 - DNA, 15 bp, Homo sapiens
ttggactttgtcacc

SEQ ID NO: 10812 - DNA, 15 bp, Homo sapiens
gttggactttgtcac

SEQ ID NO: 10813 - DNA, 15 bp, Homo sapiens
ggttggactttgtca

SEQ ID NO: 10814 - DNA, 15 bp, Homo sapiens
gggttggactttgtc

SEQ ID NO: 10815 - DNA, 15 bp, Homo sapiens
ggggttggactttgt

SEQ ID NO: 10816 - DNA, 15 bp, Homo sapiens
tggggttggactttg

SEQ ID NO: 10817 - DNA, 15 bp, Homo sapiens
gtggggttggacttt

SEQ ID NO: 10818 - DNA, 15 bp, Homo sapiens
tgtggggttggactt

SEQ ID NO: 10819 - DNA, 15 bp, Homo sapiens
atgtggggttggact

SEQ ID NO: 10820 - DNA, 15 bp, Homo sapiens
aatgtggggttggac

SEQ ID NO: 10821 - DNA, 15 bp, Homo sapiens
caatgtggggttgga

SEQ ID NO: 10822 - DNA, 15 bp, Homo sapiens
gcaatgtggggttgg

SEQ ID NO: 10823 - DNA, 15 bp, Homo sapiens
tgcaatgtggggttg

SEQ ID NO: 10824 - DNA, 15 bp, Homo sapiens
ttgcaatgtggggtt

SEQ ID NO: 10825 - DNA, 15 bp, Homo sapiens
cttgcaatgtggggt

SEQ ID NO: 10826 - DNA, 15 bp, Homo sapiens
gcttgcaatgtgggg

SEQ ID NO: 10827 - DNA, 15 bp, Homo sapiens
ggcttgcaatgtggg

SEQ ID NO: 10828 - DNA, 15 bp, Homo sapiens
gggcttgcaatgtgg

SEQ ID NO: 10829 - DNA, 15 bp, Homo sapiens
agggcttgcaatgtg

SEQ ID NO: 10830 - DNA, 15 bp, Homo sapiens
cagggcttgcaatgt

SEQ ID NO: 10831 - DNA, 15 bp, Homo sapiens
gcagggcttgcaatg

SEQ ID NO: 10832 - DNA, 15 bp, Homo sapiens
agcagggcttgcaat

SEQ ID NO: 10833 - DNA, 15 bp, Homo sapiens
gagcagggcttgcaa

SEQ ID NO: 10834 - DNA, 15 bp, Homo sapiens
agagcagggcttgca

SEQ ID NO: 10835 - DNA, 15 bp, Homo sapiens
gagagcagggcttgc

SEQ ID NO: 10836 - DNA, 15 bp, Homo sapiens
agagagcagggcttg

SEQ ID NO: 10837 - DNA, 15 bp, Homo sapiens
cagagagcagggctt

SEQ ID NO: 10838 - DNA, 15 bp, Homo sapiens
tcagagagcagggct

SEQ ID NO: 10839 - DNA, 15 bp, Homo sapiens
ctcagagagcagggc

SEQ ID NO: 10840 - DNA, 15 bp, Homo sapiens
actcagagagcaggg

SEQ ID NO: 10841 - DNA, 15 bp, Homo sapiens
cactcagagagcagg

SEQ ID NO: 10842 - DNA, 15 bp, Homo sapiens
ccactcagagagcag

SEQ ID NO: 10843 - DNA, 15 bp, Homo sapiens
gccactcagagagca

SEQ ID NO: 10844 - DNA, 15 bp, Homo sapiens
tgccactcagagagc

SEQ ID NO: 10845 - DNA, 15 bp, Homo sapiens
gtgccactcagagag

SEQ ID NO: 10846 - DNA, 15 bp, Homo sapiens
agtgccactcagaga

SEQ ID NO: 10847 - DNA, 15 bp, Homo sapiens
aagtgccactcagag

SEQ ID NO: 10848 - DNA, 15 bp, Homo sapiens
gaagtgccactcaga

SEQ ID NO: 10849 - DNA, 15 bp, Homo sapiens
agaagtgccactcag

SEQ ID NO: 10850 - DNA, 15 bp, Homo sapiens
cagaagtgccactca

SEQ ID NO: 10851 - DNA, 15 bp, Homo sapiens
gcagaagtgccactc

SEQ ID NO: 10852 - DNA, 15 bp, Homo sapiens
tgcagaagtgccact

SEQ ID NO: 10853 - DNA, 15 bp, Homo sapiens
ttgcagaagtgccac

SEQ ID NO: 10854 - DNA, 15 bp, Homo sapiens
attgcagaagtgcca

SEQ ID NO: 10855 - DNA, 15 bp, Homo sapiens
aattgcagaagtgcc

SEQ ID NO: 10856 - DNA, 15 bp, Homo sapiens
gaattgcagaagtgc

SEQ ID NO: 10857 - DNA, 15 bp, Homo sapiens
agaattgcagaagtg

SEQ ID NO: 10858 - DNA, 15 bp, Homo sapiens
tagaattgcagaagt

SEQ ID NO: 10859 - DNA, 15 bp, Homo sapiens
ttagaattgcagaag

SEQ ID NO: 10860 - DNA, 15 bp, Homo sapiens
gttagaattgcagaa

SEQ ID NO: 10861 - DNA, 15 bp, Homo sapiens
agttagaattgcaga

SEQ ID NO: 10862 - DNA, 15 bp, Homo sapiens
tagttagaattgcag

SEQ ID NO: 10863 - DNA, 15 bp, Homo sapiens
ttagttagaattgca

SEQ ID NO: 10864 - DNA, 15 bp, Homo sapiens
gttagttagaattgc

SEQ ID NO: 10865 - DNA, 15 bp, Homo sapiens
agttagttagaattg

SEQ ID NO: 10866 - DNA, 15 bp, Homo sapiens
cagttagttagaatt

SEQ ID NO: 10867 - DNA, 15 bp, Homo sapiens
acagttagttagaat

SEQ ID NO: 10868 - DNA, 15 bp, Homo sapiens
gacagttagttagaa

SEQ ID NO: 10869 - DNA, 15 bp, Homo sapiens
agacagttagttaga

SEQ ID NO: 10870 - DNA, 15 bp, Homo sapiens
tagacagttagttag

SEQ ID NO: 10871 - DNA, 15 bp, Homo sapiens
gtagacagttagtta

SEQ ID NO: 10872 - DNA, 15 bp, Homo sapiens
agtagacagttagtt

SEQ ID NO: 10873 - DNA, 15 bp, Homo sapiens
gagtagacagttagt

SEQ ID NO: 10874 - DNA, 15 bp, Homo sapiens
tgagtagacagttag

SEQ ID NO: 10875 - DNA, 15 bp, Homo sapiens
gtgagtagacagtta

SEQ ID NO: 10876 - DNA, 15 bp, Homo sapiens
agtgagtagacagtt

SEQ ID NO: 10877 - DNA, 15 bp, Homo sapiens
aagtgagtagacagt

SEQ ID NO: 10878 - DNA, 15 bp, Homo sapiens
caagtgagtagacag

SEQ ID NO: 10879 - DNA, 15 bp, Homo sapiens
acaagtgagtagaca

SEQ ID NO: 10880 - DNA, 15 bp, Homo sapiens
tacaagtgagtagac

SEQ ID NO: 10881 - DNA, 15 bp, Homo sapiens
ttacaagtgagtaga

SEQ ID NO: 10882 - DNA, 15 bp, Homo sapiens
cttacaagtgagtag

SEQ ID NO: 10883 - DNA, 15 bp, Homo sapiens
ccttacaagtgagta

SEQ ID NO: 10884 - DNA, 15 bp, Homo sapiens
gccttacaagtgagt

SEQ ID NO: 10885 - DNA, 15 bp, Homo sapiens
ggccttacaagtgag

SEQ ID NO: 10886 - DNA, 15 bp, Homo sapiens
aggccttacaagtga

SEQ ID NO: 10887 - DNA, 15 bp, Homo sapiens
aaggccttacaagtg

SEQ ID NO: 10888 - DNA, 15 bp, Homo sapiens
caaggccttacaagt

SEQ ID NO: 10889 - DNA, 15 bp, Homo sapiens
tcaaggccttacaag

SEQ ID NO: 10890 - DNA, 15 bp, Homo sapiens
ttcaaggccttacaa

SEQ ID NO: 10891 - DNA, 15 bp, Homo sapiens
cttcaaggccttaca

SEQ ID NO: 10892 - DNA, 15 bp, Homo sapiens
acttcaaggccttac

SEQ ID NO: 10893 - DNA, 15 bp, Homo sapiens
aacttcaaggcctta

SEQ ID NO: 10894 - DNA, 15 bp, Homo sapiens
taacttcaaggcctt

SEQ ID NO: 10895 - DNA, 15 bp, Homo sapiens
ttaacttcaaggcct

SEQ ID NO: 10896 - DNA, 15 bp, Homo sapiens
cttaacttcaaggcc

SEQ ID NO: 10897 - DNA, 15 bp, Homo sapiens
acttaacttcaaggc

SEQ ID NO: 10898 - DNA, 15 bp, Homo sapiens
cacttaacttcaagg

SEQ ID NO: 10899 - DNA, 15 bp, Homo sapiens
ccacttaacttcaag

SEQ ID NO: 10900 - DNA, 15 bp, Homo sapiens
cccacttaacttcaa

SEQ ID NO: 10901 - DNA, 15 bp, Homo sapiens
acccacttaacttca

SEQ ID NO: 10902 - DNA, 15 bp, Homo sapiens
cacccacttaacttc

SEQ ID NO: 10903 - DNA, 15 bp, Homo sapiens
gcacccacttaactt

SEQ ID NO: 10904 - DNA, 15 bp, Homo sapiens
tgcacccacttaact

SEQ ID NO: 10905 - DNA, 15 bp, Homo sapiens
ttgcacccacttaac

SEQ ID NO: 10906 - DNA, 15 bp, Homo sapiens
gttgcacccacttaa

SEQ ID NO: 10907 - DNA, 15 bp, Homo sapiens
tgttgcacccactta

SEQ ID NO: 10908 - DNA, 15 bp, Homo sapiens
gtgttgcacccactt

SEQ ID NO: 10909 - DNA, 15 bp, Homo sapiens
ggtgttgcacccact

SEQ ID NO: 10910 - DNA, 15 bp, Homo sapiens
tggtgttgcacccac

SEQ ID NO: 10911 - DNA, 15 bp, Homo sapiens
ttggtgttgcaccca

SEQ ID NO: 10912 - DNA, 15 bp, Homo sapiens
tttggtgttgcaccc

SEQ ID NO: 10913 - DNA, 15 bp, Homo sapiens
gtttggtgttgcacc

SEQ ID NO: 10914 - DNA, 15 bp, Homo sapiens
agtttggtgttgcac

SEQ ID NO: 10915 - DNA, 15 bp, Homo sapiens
gagtttggtgttgca

SEQ ID NO: 10916 - DNA, 15 bp, Homo sapiens
tgagtttggtgttgc

SEQ ID NO: 10917 - DNA, 15 bp, Homo sapiens
ttgagtttggtgttg

SEQ ID NO: 10918 - DNA, 15 bp, Homo sapiens
attgagtttggtgtt

SEQ ID NO: 10919 - DNA, 15 bp, Homo sapiens
tattgagtttggtgt

SEQ ID NO: 10920 - DNA, 15 bp, Homo sapiens
gtattgagtttggtg

SEQ ID NO: 10921 - DNA, 15 bp, Homo sapiens
agtattgagtttggt

SEQ ID NO: 10922 - DNA, 15 bp, Homo sapiens
aagtattgagtttgg

SEQ ID NO: 10923 - DNA, 15 bp, Homo sapiens
aaagtattgagtttg

SEQ ID NO: 10924 - DNA, 15 bp, Homo sapiens
aaaagtattgagttt

SEQ ID NO: 10925 - DNA, 15 bp, Homo sapiens
aaaaagtattgagtt

SEQ ID NO: 10926 - DNA, 15 bp, Homo sapiens
caaaaagtattgagt

SEQ ID NO: 10927 - DNA, 15 bp, Homo sapiens
acaaaaagtattgag

SEQ ID NO: 10928 - DNA, 15 bp, Homo sapiens
aacaaaaagtattga

SEQ ID NO: 10929 - DNA, 15 bp, Homo sapiens
caacaaaaagtattg

SEQ ID NO: 10930 - DNA, 15 bp, Homo sapiens
ccaacaaaaagtatt

SEQ ID NO: 10931 - DNA, 15 bp, Homo sapiens
tccaacaaaaagtat

SEQ ID NO: 10932 - DNA, 15 bp, Homo sapiens
ttccaacaaaaagta

SEQ ID NO: 10933 - DNA, 15 bp, Homo sapiens
gttccaacaaaaagt

SEQ ID NO: 10934 - DNA, 15 bp, Homo sapiens
tgttccaacaaaaag

SEQ ID NO: 10935 - DNA, 15 bp, Homo sapiens
ctgttccaacaaaaa

SEQ ID NO: 10936 - DNA, 15 bp, Homo sapiens
actgttccaacaaaa

SEQ ID NO: 10937 - DNA, 15 bp, Homo sapiens
cactgttccaacaaa

SEQ ID NO: 10938 - DNA, 15 bp, Homo sapiens
ccactgttccaacaa

SEQ ID NO: 10939 - DNA, 15 bp, Homo sapiens
accactgttccaaca

SEQ ID NO: 10940 - DNA, 15 bp, Homo sapiens
taccactgttccaac

SEQ ID NO: 10941 - DNA, 15 bp, Homo sapiens
ataccactgttccaa

SEQ ID NO: 10942 - DNA, 15 bp, Homo sapiens
gataccactgttcca

SEQ ID NO: 10943 - DNA, 15 bp, Homo sapiens
agataccactgttcc

SEQ ID NO: 10944 - DNA, 15 bp, Homo sapiens
gagataccactgttc

SEQ ID NO: 10945 - DNA, 15 bp, Homo sapiens
ggagataccactgtt

SEQ ID NO: 10946 - DNA, 15 bp, Homo sapiens
aggagataccactgt

SEQ ID NO: 10947 - DNA, 15 bp, Homo sapiens
taggagataccactg

SEQ ID NO: 10948 - DNA, 15 bp, Homo sapiens
gtaggagataccact

SEQ ID NO: 10949 - DNA, 15 bp, Homo sapiens
ggtaggagataccac

SEQ ID NO: 10950 - DNA, 15 bp, Homo sapiens
aggtaggagatacca

SEQ ID NO: 10951 - DNA, 15 bp, Homo sapiens
aaggtaggagatacc

SEQ ID NO: 10952 - DNA, 15 bp, Homo sapiens
aaaggtaggagatac

SEQ ID NO: 10953 - DNA, 15 bp, Homo sapiens
aaaaggtaggagata

SEQ ID NO: 10954 - DNA, 15 bp, Homo sapiens
gaaaaggtaggagat

SEQ ID NO: 10955 - DNA, 15 bp, Homo sapiens
agaaaaggtaggaga

SEQ ID NO: 10956 - DNA, 15 bp, Homo sapiens
tagaaaaggtaggag

SEQ ID NO: 10957 - DNA, 15 bp, Homo sapiens
ttagaaaaggtagga

SEQ ID NO: 10958 - DNA, 15 bp, Homo sapiens
gttagaaaaggtagg

SEQ ID NO: 10959 - DNA, 15 bp, Homo sapiens
tgttagaaaaggtag

SEQ ID NO: 10960 - DNA, 15 bp, Homo sapiens
ttgttagaaaaggta

SEQ ID NO: 10961 - DNA, 15 bp, Homo sapiens
attgttagaaaaggt

SEQ ID NO: 10962 - DNA, 15 bp, Homo sapiens
cattgttagaaaagg

SEQ ID NO: 10963 - DNA, 15 bp, Homo sapiens
ccattgttagaaaag

SEQ ID NO: 10964 - DNA, 15 bp, Homo sapiens
accattgttagaaaa

SEQ ID NO: 10965 - DNA, 15 bp, Homo sapiens
aaccattgttagaaa

SEQ ID NO: 10966 - DNA, 15 bp, Homo sapiens
gaaccattgttagaa

SEQ ID NO: 10967 - DNA, 15 bp, Homo sapiens
ggaaccattgttaga

SEQ ID NO: 10968 - DNA, 15 bp, Homo sapiens
gggaaccattgttag

SEQ ID NO: 10969 - DNA, 15 bp, Homo sapiens
agggaaccattgtta

SEQ ID NO: 10970 - DNA, 15 bp, Homo sapiens
cagggaaccattgtt

SEQ ID NO: 10971 - DNA, 15 bp, Homo sapiens
tcagggaaccattgt

SEQ ID NO: 10972 - DNA, 15 bp, Homo sapiens
atcagggaaccattg

SEQ ID NO: 10973 - DNA, 15 bp, Homo sapiens
tatcagggaaccatt

SEQ ID NO: 10974 - DNA, 15 bp, Homo sapiens
atatcagggaaccat

SEQ ID NO: 10975 - DNA, 15 bp, Homo sapiens
aatatcagggaacca

SEQ ID NO: 10976 - DNA, 15 bp, Homo sapiens
aaatatcagggaacc

SEQ ID NO: 10977 - DNA, 15 bp, Homo sapiens
aaaatatcagggaac

SEQ ID NO: 10978 - DNA, 15 bp, Homo sapiens
caaaatatcagggaa

SEQ ID NO: 10979 - DNA, 15 bp, Homo sapiens
ccaaaatatcaggga

SEQ ID NO: 10980 - DNA, 15 bp, Homo sapiens
cccaaaatatcaggg

SEQ ID NO: 10981 - DNA, 15 bp, Homo sapiens
gcccaaaatatcagg

SEQ ID NO: 10982 - DNA, 15 bp, Homo sapiens
tgcccaaaatatcag

SEQ ID NO: 10983 - DNA, 15 bp, Homo sapiens
ttgcccaaaatatca

SEQ ID NO: 10984 - DNA, 15 bp, Homo sapiens
gttgcccaaaatatc

SEQ ID NO: 10985 - DNA, 15 bp, Homo sapiens
ggttgcccaaaatat

SEQ ID NO: 10986 - DNA, 15 bp, Homo sapiens
gggttgcccaaaata

SEQ ID NO: 10987 - DNA, 15 bp, Homo sapiens
tgggttgcccaaaat

SEQ ID NO: 10988 - DNA, 15 bp, Homo sapiens
ctgggttgcccaaaa

SEQ ID NO: 10989 - DNA, 15 bp, Homo sapiens
cctgggttgcccaaa

SEQ ID NO: 10990 - DNA, 15 bp, Homo sapiens
gcctgggttgcccaa

SEQ ID NO: 10991 - DNA, 15 bp, Homo sapiens
tgcctgggttgccca

SEQ ID NO: 10992 - DNA, 15 bp, Homo sapiens
atgcctgggttgccc

SEQ ID NO: 10993 - DNA, 15 bp, Homo sapiens
tatgcctgggttgcc

SEQ ID NO: 10994 - DNA, 15 bp, Homo sapiens
ctatgcctgggttgc

SEQ ID NO: 10995 - DNA, 15 bp, Homo sapiens
cctatgcctgggttg

SEQ ID NO: 10996 - DNA, 15 bp, Homo sapiens
tcctatgcctgggtt

SEQ ID NO: 10997 - DNA, 15 bp, Homo sapiens
atcctatgcctgggt

SEQ ID NO: 10998 - DNA, 15 bp, Homo sapiens
tatcctatgcctggg

SEQ ID NO: 10999 - DNA, 15 bp, Homo sapiens
ctatcctatgcctgg

SEQ ID NO: 11000 - DNA, 15 bp, Homo sapiens
tctatcctatgcctg

SEQ ID NO: 11001 - DNA, 15 bp, Homo sapiens
ttctatcctatgcct

SEQ ID NO: 11002 - DNA, 15 bp, Homo sapiens
tttctatcctatgcc

SEQ ID NO: 11003 - DNA, 15 bp, Homo sapiens
atttctatcctatgc

SEQ ID NO: 11004 - DNA, 15 bp, Homo sapiens
gatttctatcctatg

SEQ ID NO: 11005 - DNA, 15 bp, Homo sapiens
ggatttctatcctat

SEQ ID NO: 11006 - DNA, 15 bp, Homo sapiens
aggatttctatccta

SEQ ID NO: 11007 - DNA, 15 bp, Homo sapiens
caggatttctatcct

SEQ ID NO: 11008 - DNA, 15 bp, Homo sapiens
ccaggatttctatcc

SEQ ID NO: 11009 - DNA, 15 bp, Homo sapiens
tccaggatttctatc

SEQ ID NO: 11010 - DNA, 15 bp, Homo sapiens
ttccaggatttctat

SEQ ID NO: 11011 - DNA, 15 bp, Homo sapiens
attccaggatttcta

SEQ ID NO: 11012 - DNA, 15 bp, Homo sapiens
gattccaggatttct

SEQ ID NO: 11013 - DNA, 15 bp, Homo sapiens
tgattccaggatttc

SEQ ID NO: 11014 - DNA, 15 bp, Homo sapiens
ttgattccaggattt

SEQ ID NO: 11015 - DNA, 15 bp, Homo sapiens
cttgattccaggatt

SEQ ID NO: 11016 - DNA, 15 bp, Homo sapiens
acttgattccaggat

SEQ ID NO: 11017 - DNA, 15 bp, Homo sapiens
aacttgattccagga

SEQ ID NO: 11018 - DNA, 15 bp, Homo sapiens
aaacttgattccagg

SEQ ID NO: 11019 - DNA, 15 bp, Homo sapiens
caaacttgattccag

SEQ ID NO: 11020 - DNA, 15 bp, Homo sapiens
tcaaacttgattcca

SEQ ID NO: 11021 - DNA, 15 bp, Homo sapiens
gtcaaacttgattcc

SEQ ID NO: 11022 - DNA, 15 bp, Homo sapiens
tgtcaaacttgattc

SEQ ID NO: 11023 - DNA, 15 bp, Homo sapiens
ttgtcaaacttgatt

SEQ ID NO: 11024 - DNA, 15 bp, Homo sapiens
attgtcaaacttgat

SEQ ID NO: 11025 - DNA, 15 bp, Homo sapiens
tattgtcaaacttga

SEQ ID NO: 11026 - DNA, 15 bp, Homo sapiens
atattgtcaaacttg

SEQ ID NO: 11027 - DNA, 15 bp, Homo sapiens
tatattgtcaaactt

SEQ ID NO: 11028 - DNA, 15 bp, Homo sapiens
atatattgtcaaact

SEQ ID NO: 11029 - DNA, 15 bp, Homo sapiens
aatatattgtcaaac

SEQ ID NO: 11030 - DNA, 15 bp, Homo sapiens
aaatatattgtcaaa

SEQ ID NO: 11031 - DNA, 15 bp, Homo sapiens
gaaatatattgtcaa

SEQ ID NO: 11032 - DNA, 15 bp, Homo sapiens
ggaaatatattgtca

SEQ ID NO: 11033 - DNA, 15 bp, Homo sapiens
aggaaatatattgtc

SEQ ID NO: 11034 - DNA, 15 bp, Homo sapiens
caggaaatatattgt

SEQ ID NO: 11035 - DNA, 15 bp, Homo sapiens
gcaggaaatatattg

SEQ ID NO: 11036 - DNA, 15 bp, Homo sapiens
tgcaggaaatatatt

SEQ ID NO: 11037 - DNA, 15 bp, Homo sapiens
atgcaggaaatatat

SEQ ID NO: 11038 - DNA, 15 bp, Homo sapiens
tatgcaggaaatata

SEQ ID NO: 11039 - DNA, 15 bp, Homo sapiens
ctatgcaggaaatat

SEQ ID NO: 11040 - DNA, 15 bp, Homo sapiens
gctatgcaggaaata

SEQ ID NO: 11041 - DNA, 15 bp, Homo sapiens
ggctatgcaggaaat

SEQ ID NO: 11042 - DNA, 15 bp, Homo sapiens
aggctatgcaggaaa

SEQ ID NO: 11043 - DNA, 15 bp, Homo sapiens
aaggctatgcaggaa

SEQ ID NO: 11044 - DNA, 15 bp, Homo sapiens
gaaggctatgcagga

SEQ ID NO: 11045 - DNA, 15 bp, Homo sapiens
ggaaggctatgcagg

SEQ ID NO: 11046 - DNA, 15 bp, Homo sapiens
tggaaggctatgcag

SEQ ID NO: 11047 - DNA, 15 bp, Homo sapiens
ttggaaggctatgca

SEQ ID NO: 11048 - DNA, 15 bp, Homo sapiens
attggaaggctatgc

SEQ ID NO: 11049 - DNA, 15 bp, Homo sapiens
gattggaaggctatg

SEQ ID NO: 11050 - DNA, 15 bp, Homo sapiens
ggattggaaggctat

SEQ ID NO: 11051 - DNA, 15 bp, Homo sapiens
tggattggaaggcta

SEQ ID NO: 11052 - DNA, 15 bp, Homo sapiens
ctggattggaaggct

SEQ ID NO: 11053 - DNA, 15 bp, Homo sapiens
actggattggaaggc

SEQ ID NO: 11054 - DNA, 15 bp, Homo sapiens
gactggattggaagg

SEQ ID NO: 11055 - DNA, 15 bp, Homo sapiens
tgactggattggaag

SEQ ID NO: 11056 - DNA, 15 bp, Homo sapiens
ctgactggattggaa

SEQ ID NO: 11057 - DNA, 15 bp, Homo sapiens
actgactggattgga

SEQ ID NO: 11058 - DNA, 15 bp, Homo sapiens
tactgactggattgg

SEQ ID NO: 11059 - DNA, 15 bp, Homo sapiens
ttactgactggattg

SEQ ID NO: 11060 - DNA, 15 bp, Homo sapiens
tttactgactggatt

SEQ ID NO: 11061 - DNA, 15 bp, Homo sapiens
ctttactgactggat

SEQ ID NO: 11062 - DNA, 15 bp, Homo sapiens
tctttactgactgga

SEQ ID NO: 11063 - DNA, 15 bp, Homo sapiens
atctttactgactgg

SEQ ID NO: 11064 - DNA, 15 bp, Homo sapiens
catctttactgactg

SEQ ID NO: 11065 - DNA, 15 bp, Homo sapiens
acatctttactgact

SEQ ID NO: 11066 - DNA, 15 bp, Homo sapiens
gacatctttactgac

SEQ ID NO: 11067 - DNA, 15 bp, Homo sapiens
ggacatctttactga

SEQ ID NO: 11068 - DNA, 15 bp, Homo sapiens
aggacatctttactg

SEQ ID NO: 11069 - DNA, 15 bp, Homo sapiens
caggacatctttact

SEQ ID NO: 11070 - DNA, 15 bp, Homo sapiens
acaggacatctttac

SEQ ID NO: 11071 - DNA, 15 bp, Homo sapiens
aacaggacatcttta

SEQ ID NO: 11072 - DNA, 15 bp, Homo sapiens
taacaggacatcttt

SEQ ID NO: 11073 - DNA, 15 bp, Homo sapiens
ttaacaggacatctt

SEQ ID NO: 11074 - DNA, 15 bp, Homo sapiens
attaacaggacatct

SEQ ID NO: 11075 - DNA, 15 bp, Homo sapiens
aattaacaggacatc

SEQ ID NO: 11076 - DNA, 15 bp, Homo sapiens
aaattaacaggacat

SEQ ID NO: 11077 - DNA, 15 bp, Homo sapiens
aaaattaacaggaca

SEQ ID NO: 11078 - DNA, 15 bp, Homo sapiens
aaaaattaacaggac

SEQ ID NO: 11079 - DNA, 15 bp, Homo sapiens
gaaaaattaacagga

SEQ ID NO: 11080 - DNA, 15 bp, Homo sapiens
ggaaaaattaacagg

SEQ ID NO: 11081 - DNA, 15 bp, Homo sapiens
aggaaaaattaacag

SEQ ID NO: 11082 - DNA, 15 bp, Homo sapiens
aaggaaaaattaaca

SEQ ID NO: 11083 - DNA, 15 bp, Homo sapiens
aaaggaaaaattaac

SEQ ID NO: 11084 - DNA, 15 bp, Homo sapiens
taaaggaaaaattaa

SEQ ID NO: 11085 - DNA, 15 bp, Homo sapiens
ttaaaggaaaaatta

SEQ ID NO: 11086 - DNA, 15 bp, Homo sapiens
tttaaaggaaaaatt

SEQ ID NO: 11087 - DNA, 15 bp, Homo sapiens
ttttaaaggaaaaat

SEQ ID NO: 11088 - DNA, 15 bp, Homo sapiens
attttaaaggaaaaa

SEQ ID NO: 11089 - DNA, 15 bp, Homo sapiens
tattttaaaggaaaa

SEQ ID NO: 11090 - DNA, 15 bp, Homo sapiens
atattttaaaggaaa

SEQ ID NO: 11091 - DNA, 15 bp, Homo sapiens
aatattttaaaggaa

SEQ ID NO: 11092 - DNA, 15 bp, Homo sapiens
aaatattttaaagga

SEQ ID NO: 11093 - DNA, 15 bp, Homo sapiens
caaatattttaaagg

SEQ ID NO: 11094 - DNA, 15 bp, Homo sapiens
acaaatattttaaag

SEQ ID NO: 11095 - DNA, 15 bp, Homo sapiens
gacaaatattttaaa

SEQ ID NO: 11096 - DNA, 15 bp, Homo sapiens
ggacaaatattttaa

SEQ ID NO: 11097 - DNA, 15 bp, Homo sapiens
aggacaaatatttta

SEQ ID NO: 11098 - DNA, 15 bp, Homo sapiens
caggacaaatatttt

SEQ ID NO: 11099 - DNA, 15 bp, Homo sapiens
ccaggacaaatattt

SEQ ID NO: 11100 - DNA, 15 bp, Homo sapiens
gccaggacaaatatt

SEQ ID NO: 11101 - DNA, 15 bp, Homo sapiens
ggccaggacaaatat

SEQ ID NO: 11102 - DNA, 15 bp, Homo sapiens
tggccaggacaaata

SEQ ID NO: 11103 - DNA, 15 bp, Homo sapiens
atggccaggacaaat

SEQ ID NO: 11104 - DNA, 15 bp, Homo sapiens
gatggccaggacaaa

SEQ ID NO: 11105 - DNA, 15 bp, Homo sapiens
ggatggccaggacaa

SEQ ID NO: 11106 - DNA, 15 bp, Homo sapiens
gggatggccaggaca

SEQ ID NO: 11107 - DNA, 15 bp, Homo sapiens
agggatggccaggac

SEQ ID NO: 11108 - DNA, 15 bp, Homo sapiens
aagggatggccagga

SEQ ID NO: 11109 - DNA, 15 bp, Homo sapiens
aaagggatggccagg

SEQ ID NO: 11110 - DNA, 15 bp, Homo sapiens
aaaagggatggccag

SEQ ID NO: 11111 - DNA, 15 bp, Homo sapiens
aaaaagggatggcca

SEQ ID NO: 11112 - DNA, 15 bp, Homo sapiens
taaaaagggatggcc

SEQ ID NO: 11113 - DNA, 15 bp, Homo sapiens
ataaaaagggatggc

SEQ ID NO: 11114 - DNA, 15 bp, Homo sapiens
gataaaaagggatgg

SEQ ID NO: 11115 - DNA, 15 bp, Homo sapiens
ggataaaaagggatg

SEQ ID NO: 11116 - DNA, 15 bp, Homo sapiens
tggataaaaagggat

SEQ ID NO: 11117 - DNA, 15 bp, Homo sapiens
atggataaaaaggga

SEQ ID NO: 11118 - DNA, 15 bp, Homo sapiens
gatggataaaaaggg

SEQ ID NO: 11119 - DNA, 15 bp, Homo sapiens
ggatggataaaaagg

SEQ ID NO: 11120 - DNA, 15 bp, Homo sapiens
gggatggataaaaag

SEQ ID NO: 11121 - DNA, 15 bp, Homo sapiens
tgggatggataaaaa

SEQ ID NO: 11122 - DNA, 15 bp, Homo sapiens
gtgggatggataaaa

SEQ ID NO: 11123 - DNA, 15 bp, Homo sapiens
agtgggatggataaa

SEQ ID NO: 11124 - DNA, 15 bp, Homo sapiens
cagtgggatggataa

SEQ ID NO: 11125 - DNA, 15 bp, Homo sapiens
gcagtgggatggata

SEQ ID NO: 11126 - DNA, 15 bp, Homo sapiens
ggcagtgggatggat

SEQ ID NO: 11127 - DNA, 15 bp, Homo sapiens
tggcagtgggatgga

SEQ ID NO: 11128 - DNA, 15 bp, Homo sapiens
gtggcagtgggatgg

SEQ ID NO: 11129 - DNA, 15 bp, Homo sapiens
ggtggcagtgggatg

SEQ ID NO: 11130 - DNA, 15 bp, Homo sapiens
tggtggcagtgggat

SEQ ID NO: 11131 - DNA, 15 bp, Homo sapiens
atggtggcagtggga

SEQ ID NO: 11132 - DNA, 15 bp, Homo sapiens
gatggtggcagtggg

SEQ ID NO: 11133 - DNA, 15 bp, Homo sapiens
agatggtggcagtgg

SEQ ID NO: 11134 - DNA, 15 bp, Homo sapiens
aagatggtggcagtg

SEQ ID NO: 11135 - DNA, 15 bp, Homo sapiens
caagatggtggcagt

SEQ ID NO: 11136 - DNA, 15 bp, Homo sapiens
ccaagatggtggcag

SEQ ID NO: 11137 - DNA, 15 bp, Homo sapiens
gccaagatggtggca

SEQ ID NO: 11138 - DNA, 15 bp, Homo sapiens
agccaagatggtggc

SEQ ID NO: 11139 - DNA, 15 bp, Homo sapiens
gagccaagatggtgg

SEQ ID NO: 11140 - DNA, 15 bp, Homo sapiens
tgagccaagatggtg

SEQ ID NO: 11141 - DNA, 15 bp, Homo sapiens
ctgagccaagatggt

SEQ ID NO: 11142 - DNA, 15 bp, Homo sapiens
gctgagccaagatgg

SEQ ID NO: 11143 - DNA, 15 bp, Homo sapiens
ggctgagccaagatg

SEQ ID NO: 11144 - DNA, 15 bp, Homo sapiens
gggctgagccaagat

SEQ ID NO: 11145 - DNA, 15 bp, Homo sapiens
agggctgagccaaga

SEQ ID NO: 11146 - DNA, 15 bp, Homo sapiens
gagggctgagccaag

SEQ ID NO: 11147 - DNA, 15 bp, Homo sapiens
tgagggctgagccaa

SEQ ID NO: 11148 - DNA, 15 bp, Homo sapiens
gtgagggctgagcca

SEQ ID NO: 11149 - DNA, 15 bp, Homo sapiens
ggtgagggctgagcc

SEQ ID NO: 11150 - DNA, 15 bp, Homo sapiens
tggtgagggctgagc

SEQ ID NO: 11151 - DNA, 15 bp, Homo sapiens
gtggtgagggctgag

SEQ ID NO: 11152 - DNA, 15 bp, Homo sapiens
ggtggtgagggctga

SEQ ID NO: 11153 - DNA, 15 bp, Homo sapiens
aggtggtgagggctg

SEQ ID NO: 11154 - DNA, 15 bp, Homo sapiens
gaggtggtgagggct

SEQ ID NO: 11155 - DNA, 15 bp, Homo sapiens
tgaggtggtgagggc

SEQ ID NO: 11156 - DNA, 15 bp, Homo sapiens
atgaggtggtgaggg

SEQ ID NO: 11157 - DNA, 15 bp, Homo sapiens
aatgaggtggtgagg

SEQ ID NO: 11158 - DNA, 15 bp, Homo sapiens
aaatgaggtggtgag

SEQ ID NO: 11159 - DNA, 15 bp, Homo sapiens
aaaatgaggtggtga

SEQ ID NO: 11160 - DNA, 15 bp, Homo sapiens
caaaatgaggtggtg

SEQ ID NO: 11161 - DNA, 15 bp, Homo sapiens
acaaaatgaggtggt

SEQ ID NO: 11162 - DNA, 15 bp, Homo sapiens
cacaaaatgaggtgg

SEQ ID NO: 11163 - DNA, 15 bp, Homo sapiens
tcacaaaatgaggtg

SEQ ID NO: 11164 - DNA, 15 bp, Homo sapiens
gtcacaaaatgaggt

SEQ ID NO: 11165 - DNA, 15 bp, Homo sapiens
ggtcacaaaatgagg

SEQ ID NO: 11166 - DNA, 15 bp, Homo sapiens
tggtcacaaaatgag

SEQ ID NO: 11167 - DNA, 15 bp, Homo sapiens
gtggtcacaaaatga

SEQ ID NO: 11168 - DNA, 15 bp, Homo sapiens
tgtggtcacaaaatg

SEQ ID NO: 11169 - DNA, 15 bp, Homo sapiens
ttgtggtcacaaaat

SEQ ID NO: 11170 - DNA, 15 bp, Homo sapiens
gttgtggtcacaaaa

SEQ ID NO: 11171 - DNA, 15 bp, Homo sapiens
cgttgtggtcacaaa

SEQ ID NO: 11172 - DNA, 15 bp, Homo sapiens
acgttgtggtcacaa

SEQ ID NO: 11173 - DNA, 15 bp, Homo sapiens
gacgttgtggtcaca

SEQ ID NO: 11174 - DNA, 15 bp, Homo sapiens
ggacgttgtggtcac

SEQ ID NO: 11175 - DNA, 15 bp, Homo sapiens
gggacgttgtggtca

SEQ ID NO: 11176 - DNA, 15 bp, Homo sapiens
cgggacgttgtggtc

SEQ ID NO: 11177 - DNA, 15 bp, Homo sapiens
tcgggacgttgtggt

SEQ ID NO: 11178 - DNA, 15 bp, Homo sapiens
atcgggacgttgtgg

SEQ ID NO: 11179 - DNA, 15 bp, Homo sapiens
catcgggacgttgtg

SEQ ID NO: 11180 - DNA, 15 bp, Homo sapiens
gcatcgggacgttgt

SEQ ID NO: 11181 - DNA, 15 bp, Homo sapiens
agcatcgggacgttg

SEQ ID NO: 11182 - DNA, 15 bp, Homo sapiens
cagcatcgggacgtt

SEQ ID NO: 11183 - DNA, 15 bp, Homo sapiens
acagcatcgggacgt

SEQ ID NO: 11184 - DNA, 15 bp, Homo sapiens
tacagcatcgggacg

SEQ ID NO: 11185 - DNA, 15 bp, Homo sapiens
atacagcatcgggac

SEQ ID NO: 11186 - DNA, 15 bp, Homo sapiens
gatacagcatcggga

SEQ ID NO: 11187 - DNA, 15 bp, Homo sapiens
tgatacagcatcggg

SEQ ID NO: 11188 - DNA, 15 bp, Homo sapiens
ctgatacagcatcgg

SEQ ID NO: 11189 - DNA, 15 bp, Homo sapiens
tctgatacagcatcg

SEQ ID NO: 11190 - DNA, 15 bp, Homo sapiens
gtctgatacagcatc

SEQ ID NO: 11191 - DNA, 15 bp, Homo sapiens
tgtctgatacagcat

SEQ ID NO: 11192 - DNA, 15 bp, Homo sapiens
gtgtctgatacagca

SEQ ID NO: 11193 - DNA, 15 bp, Homo sapiens
agtgtctgatacagc

SEQ ID NO: 11194 - DNA, 15 bp, Homo sapiens
gagtgtctgatacag

SEQ ID NO: 11195 - DNA, 15 bp, Homo sapiens
agagtgtctgataca

SEQ ID NO: 11196 - DNA, 15 bp, Homo sapiens
aagagtgtctgatac

SEQ ID NO: 11197 - DNA, 15 bp, Homo sapiens
aaagagtgtctgata

SEQ ID NO: 11198 - DNA, 15 bp, Homo sapiens
gaaagagtgtctgat

SEQ ID NO: 11199 - DNA, 15 bp, Homo sapiens
agaaagagtgtctga

SEQ ID NO: 11200 - DNA, 15 bp, Homo sapiens
cagaaagagtgtctg

SEQ ID NO: 11201 - DNA, 15 bp, Homo sapiens
gcagaaagagtgtct

SEQ ID NO: 11202 - DNA, 15 bp, Homo sapiens
agcagaaagagtgtc

SEQ ID NO: 11203 - DNA, 15 bp, Homo sapiens
gagcagaaagagtgt

SEQ ID NO: 11204 - DNA, 15 bp, Homo sapiens
ggagcagaaagagtg

SEQ ID NO: 11205 - DNA, 15 bp, Homo sapiens
tggagcagaaagagt

SEQ ID NO: 11206 - DNA, 15 bp, Homo sapiens
atggagcagaaagag

SEQ ID NO: 11207 - DNA, 15 bp, Homo sapiens
aatggagcagaaaga

SEQ ID NO: 11208 - DNA, 15 bp, Homo sapiens
gaatggagcagaaag

SEQ ID NO: 11209 - DNA, 15 bp, Homo sapiens
tgaatggagcagaaa

SEQ ID NO: 11210 - DNA, 15 bp, Homo sapiens
ttgaatggagcagaa

SEQ ID NO: 11211 - DNA, 15 bp, Homo sapiens
gttgaatggagcaga

SEQ ID NO: 11212 - DNA, 15 bp, Homo sapiens
agttgaatggagcag

SEQ ID NO: 11213 - DNA, 15 bp, Homo sapiens
gagttgaatggagca

SEQ ID NO: 11214 - DNA, 15 bp, Homo sapiens
agagttgaatggagc

SEQ ID NO: 11215 - DNA, 15 bp, Homo sapiens
cagagttgaatggag

SEQ ID NO: 11216 - DNA, 15 bp, Homo sapiens
tcagagttgaatgga

SEQ ID NO: 11217 - DNA, 15 bp, Homo sapiens
atcagagttgaatgg

SEQ ID NO: 11218 - DNA, 15 bp, Homo sapiens
catcagagttgaatg

SEQ ID NO: 11219 - DNA, 15 bp, Homo sapiens
tcatcagagttgaat

SEQ ID NO: 11220 - DNA, 15 bp, Homo sapiens
gtcatcagagttgaa

SEQ ID NO: 11221 - DNA, 15 bp, Homo sapiens
ggtcatcagagttga

SEQ ID NO: 11222 - DNA, 15 bp, Homo sapiens
tggtcatcagagttg

SEQ ID NO: 11223 - DNA, 15 bp, Homo sapiens
gtggtcatcagagtt

SEQ ID NO: 11224 - DNA, 15 bp, Homo sapiens
agtggtcatcagagt

SEQ ID NO: 11225 - DNA, 15 bp, Homo sapiens
aagtggtcatcagag

SEQ ID NO: 11226 - DNA, 15 bp, Homo sapiens
gaagtggtcatcaga

SEQ ID NO: 11227 - DNA, 15 bp, Homo sapiens
ggaagtggtcatcag

SEQ ID NO: 11228 - DNA, 15 bp, Homo sapiens
aggaagtggtcatca

SEQ ID NO: 11229 - DNA, 15 bp, Homo sapiens
caggaagtggtcatc

SEQ ID NO: 11230 - DNA, 15 bp, Homo sapiens
ccaggaagtggtcat

SEQ ID NO: 11231 - DNA, 15 bp, Homo sapiens
cccaggaagtggtca

SEQ ID NO: 11232 - DNA, 15 bp, Homo sapiens
acccaggaagtggtc

SEQ ID NO: 11233 - DNA, 15 bp, Homo sapiens
tacccaggaagtggt

SEQ ID NO: 11234 - DNA, 15 bp, Homo sapiens
ttacccaggaagtgg

SEQ ID NO: 11235 - DNA, 15 bp, Homo sapiens
gttacccaggaagtg

SEQ ID NO: 11236 - DNA, 15 bp, Homo sapiens
ggttacccaggaagt

SEQ ID NO: 11237 - DNA, 15 bp, Homo sapiens
tggttacccaggaag

SEQ ID NO: 11238 - DNA, 15 bp, Homo sapiens
gtggttacccaggaa

SEQ ID NO: 11239 - DNA, 15 bp, Homo sapiens
ggtggttacccagga

SEQ ID NO: 11240 - DNA, 15 bp, Homo sapiens
gggtggttacccagg

SEQ ID NO: 11241 - DNA, 15 bp, Homo sapiens
agggtggttacccag

SEQ ID NO: 11242 - DNA, 15 bp, Homo sapiens
tagggtggttaccca

SEQ ID NO: 11243 - DNA, 15 bp, Homo sapiens
ttagggtggttaccc

SEQ ID NO: 11244 - DNA, 15 bp, Homo sapiens
attagggtggttacc

SEQ ID NO: 11245 - DNA, 15 bp, Homo sapiens
tattagggtggttac

SEQ ID NO: 11246 - DNA, 15 bp, Homo sapiens
gtattagggtggtta

SEQ ID NO: 11247 - DNA, 15 bp, Homo sapiens
agtattagggtggtt

SEQ ID NO: 11248 - DNA, 15 bp, Homo sapiens
tagtattagggtggt

SEQ ID NO: 11249 - DNA, 15 bp, Homo sapiens
atagtattagggtgg

SEQ ID NO: 11250 - DNA, 15 bp, Homo sapiens
aatagtattagggtg

SEQ ID NO: 11251 - DNA, 15 bp, Homo sapiens
gaatagtattagggt

SEQ ID NO: 11252 - DNA, 15 bp, Homo sapiens
agaatagtattaggg

SEQ ID NO: 11253 - DNA, 15 bp, Homo sapiens
gagaatagtattagg

SEQ ID NO: 11254 - DNA, 15 bp, Homo sapiens
agagaatagtattag

SEQ ID NO: 11255 - DNA, 15 bp, Homo sapiens
aagagaatagtatta

SEQ ID NO: 11256 - DNA, 15 bp, Homo sapiens
taagagaatagtatt

SEQ ID NO: 11257 - DNA, 15 bp, Homo sapiens
gtaagagaatagtat

SEQ ID NO: 11258 - DNA, 15 bp, Homo sapiens
tgtaagagaatagta

SEQ ID NO: 11259 - DNA, 15 bp, Homo sapiens
gtgtaagagaatagt

SEQ ID NO: 11260 - DNA, 15 bp, Homo sapiens
tgtgtaagagaatag

SEQ ID NO: 11261 - DNA, 15 bp, Homo sapiens
ttgtgtaagagaata

SEQ ID NO: 11262 - DNA, 15 bp, Homo sapiens
tttgtgtaagagaat

SEQ ID NO: 11263 - DNA, 15 bp, Homo sapiens
ttttgtgtaagagaa

SEQ ID NO: 11264 - DNA, 15 bp, Homo sapiens
tttttgtgtaagaga

SEQ ID NO: 11265 - DNA, 15 bp, Homo sapiens
gtttttgtgtaagag

SEQ ID NO: 11266 - DNA, 15 bp, Homo sapiens
agtttttgtgtaaga

SEQ ID NO: 11267 - DNA, 15 bp, Homo sapiens
cagtttttgtgtaag

SEQ ID NO: 11268 - DNA, 15 bp, Homo sapiens
ccagtttttgtgtaa

SEQ ID NO: 11269 - DNA, 15 bp, Homo sapiens
gccagtttttgtgta

SEQ ID NO: 11270 - DNA, 15 bp, Homo sapiens
tgccagtttttgtgt

SEQ ID NO: 11271 - DNA, 15 bp, Homo sapiens
ttgccagtttttgtg

SEQ ID NO: 11272 - DNA, 15 bp, Homo sapiens
attgccagtttttgt

SEQ ID NO: 11273 - DNA, 15 bp, Homo sapiens
cattgccagtttttg

SEQ ID NO: 11274 - DNA, 15 bp, Homo sapiens
ccattgccagttttt

SEQ ID NO: 11275 - DNA, 15 bp, Homo sapiens
gccattgccagtttt

SEQ ID NO: 11276 - DNA, 15 bp, Homo sapiens
tgccattgccagttt

SEQ ID NO: 11277 - DNA, 15 bp, Homo sapiens
atgccattgccagtt

SEQ ID NO: 11278 - DNA, 15 bp, Homo sapiens
aatgccattgccagt

SEQ ID NO: 11279 - DNA, 15 bp, Homo sapiens
aaatgccattgccag

SEQ ID NO: 11280 - DNA, 15 bp, Homo sapiens
aaaatgccattgcca

SEQ ID NO: 11281 - DNA, 15 bp, Homo sapiens
aaaaatgccattgcc

SEQ ID NO: 11282 - DNA, 15 bp, Homo sapiens
caaaaatgccattgc

SEQ ID NO: 11283 - DNA, 15 bp, Homo sapiens
acaaaaatgccattg

SEQ ID NO: 11284 - DNA, 15 bp, Homo sapiens
aacaaaaatgccatt

SEQ ID NO: 11285 - DNA, 15 bp, Homo sapiens
gaacaaaaatgccat

SEQ ID NO: 11286 - DNA, 15 bp, Homo sapiens
agaacaaaaatgcca

SEQ ID NO: 11287 - DNA, 15 bp, Homo sapiens
tagaacaaaaatgcc

SEQ ID NO: 11288 - DNA, 15 bp, Homo sapiens
atagaacaaaaatgc

SEQ ID NO: 11289 - DNA, 15 bp, Homo sapiens
gatagaacaaaaatg

SEQ ID NO: 11290 - DNA, 15 bp, Homo sapiens
agatagaacaaaaat

SEQ ID NO: 11291 - DNA, 15 bp, Homo sapiens
cagatagaacaaaaa

SEQ ID NO: 11292 - DNA, 15 bp, Homo sapiens
gcagatagaacaaaa

SEQ ID NO: 11293 - DNA, 15 bp, Homo sapiens
agcagatagaacaaa

SEQ ID NO: 11294 - DNA, 15 bp, Homo sapiens
gagcagatagaacaa

SEQ ID NO: 11295 - DNA, 15 bp, Homo sapiens
tgagcagatagaaca

SEQ ID NO: 11296 - DNA, 15 bp, Homo sapiens
ttgagcagatagaac

SEQ ID NO: 11297 - DNA, 15 bp, Homo sapiens
tttgagcagatagaa

SEQ ID NO: 11298 - DNA, 15 bp, Homo sapiens
atttgagcagataga

SEQ ID NO: 11299 - DNA, 15 bp, Homo sapiens
gatttgagcagatag

SEQ ID NO: 11300 - DNA, 15 bp, Homo sapiens
agatttgagcagata

SEQ ID NO: 11301 - DNA, 15 bp, Homo sapiens
tagatttgagcagat

SEQ ID NO: 11302 - DNA, 15 bp, Homo sapiens
ttagatttgagcaga

SEQ ID NO: 11303 - DNA, 15 bp, Homo sapiens
attagatttgagcag

SEQ ID NO: 11304 - DNA, 15 bp, Homo sapiens
cattagatttgagca

SEQ ID NO: 11305 - DNA, 15 bp, Homo sapiens
acattagatttgagc

SEQ ID NO: 11306 - DNA, 15 bp, Homo sapiens
gacattagatttgag

SEQ ID NO: 11307 - DNA, 15 bp, Homo sapiens
agacattagatttga

SEQ ID NO: 11308 - DNA, 15 bp, Homo sapiens
aagacattagatttg

SEQ ID NO: 11309 - DNA, 15 bp, Homo sapiens
gaagacattagattt

SEQ ID NO: 11310 - DNA, 15 bp, Homo sapiens
agaagacattagatt

SEQ ID NO: 11311 - DNA, 15 bp, Homo sapiens
gagaagacattagat

SEQ ID NO: 11312 - DNA, 15 bp, Homo sapiens
agagaagacattaga

SEQ ID NO: 11313 - DNA, 15 bp, Homo sapiens
gagagaagacattag

SEQ ID NO: 11314 - DNA, 15 bp, Homo sapiens
agagagaagacatta

SEQ ID NO: 11315 - DNA, 15 bp, Homo sapiens
cagagagaagacatt

SEQ ID NO: 11316 - DNA, 15 bp, Homo sapiens
tcagagagaagacat

SEQ ID NO: 11317 - DNA, 15 bp, Homo sapiens
atcagagagaagaca

SEQ ID NO: 11318 - DNA, 15 bp, Homo sapiens
tatcagagagaagac

SEQ ID NO: 11319 - DNA, 15 bp, Homo sapiens
gtatcagagagaaga

SEQ ID NO: 11320 - DNA, 15 bp, Homo sapiens
agtatcagagagaag

SEQ ID NO: 11321 - DNA, 15 bp, Homo sapiens
gagtatcagagagaa

SEQ ID NO: 11322 - DNA, 15 bp, Homo sapiens
tgagtatcagagaga

SEQ ID NO: 11323 - DNA, 15 bp, Homo sapiens
ttgagtatcagagag

SEQ ID NO: 11324 - DNA, 15 bp, Homo sapiens
gttgagtatcagaga

SEQ ID NO: 11325 - DNA, 15 bp, Homo sapiens
agttgagtatcagag

SEQ ID NO: 11326 - DNA, 15 bp, Homo sapiens
gagttgagtatcaga

SEQ ID NO: 11327 - DNA, 15 bp, Homo sapiens
agagttgagtatcag

SEQ ID NO: 11328 - DNA, 15 bp, Homo sapiens
gagagttgagtatca

SEQ ID NO: 11329 - DNA, 15 bp, Homo sapiens
agagagttgagtatc

SEQ ID NO: 11330 - DNA, 15 bp, Homo sapiens
gagagagttgagtat

SEQ ID NO: 11331 - DNA, 15 bp, Homo sapiens
ggagagagttgagta

SEQ ID NO: 11332 - DNA, 15 bp, Homo sapiens
tggagagagttgagt

SEQ ID NO: 11333 - DNA, 15 bp, Homo sapiens
ttggagagagttgag

SEQ ID NO: 11334 - DNA, 15 bp, Homo sapiens
gttggagagagttga

SEQ ID NO: 11335 - DNA, 15 bp, Homo sapiens
tgttggagagagttg

SEQ ID NO: 11336 - DNA, 15 bp, Homo sapiens
atgttggagagagtt

SEQ ID NO: 11337 - DNA, 15 bp, Homo sapiens
gatgttggagagagt

SEQ ID NO: 11338 - DNA, 15 bp, Homo sapiens
agatgttggagagag

SEQ ID NO: 11339 - DNA, 15 bp, Homo sapiens
cagatgttggagaga

SEQ ID NO: 11340 - DNA, 15 bp, Homo sapiens
gcagatgttggagag

SEQ ID NO: 11341 - DNA, 15 bp, Homo sapiens
ggcagatgttggaga

SEQ ID NO: 11342 - DNA, 15 bp, Homo sapiens
gggcagatgttggag

SEQ ID NO: 11343 - DNA, 15 bp, Homo sapiens
agggcagatgttgga

SEQ ID NO: 11344 - DNA, 15 bp, Homo sapiens
gagggcagatgttgg

SEQ ID NO: 11345 - DNA, 15 bp, Homo sapiens
tgagggcagatgttg

SEQ ID NO: 11346 - DNA, 15 bp, Homo sapiens
gtgagggcagatgtt

SEQ ID NO: 11347 - DNA, 15 bp, Homo sapiens
ggtgagggcagatgt

SEQ ID NO: 11348 - DNA, 15 bp, Homo sapiens
gggtgagggcagatg

SEQ ID NO: 11349 - DNA, 15 bp, Homo sapiens
agggtgagggcagat

SEQ ID NO: 11350 - DNA, 15 bp, Homo sapiens
aagggtgagggcaga

SEQ ID NO: 11351 - DNA, 15 bp, Homo sapiens
gaagggtgagggcag

SEQ ID NO: 11352 - DNA, 15 bp, Homo sapiens
agaagggtgagggca

SEQ ID NO: 11353 - DNA, 15 bp, Homo sapiens
aagaagggtgagggc

SEQ ID NO: 11354 - DNA, 15 bp, Homo sapiens
taagaagggtgaggg

SEQ ID NO: 11355 - DNA, 15 bp, Homo sapiens
ctaagaagggtgagg

SEQ ID NO: 11356 - DNA, 15 bp, Homo sapiens
gctaagaagggtgag

SEQ ID NO: 11357 - DNA, 15 bp, Homo sapiens
agctaagaagggtga

SEQ ID NO: 11358 - DNA, 15 bp, Homo sapiens
tagctaagaagggtg

SEQ ID NO: 11359 - DNA, 15 bp, Homo sapiens
ttagctaagaagggt

SEQ ID NO: 11360 - DNA, 15 bp, Homo sapiens
gttagctaagaaggg

SEQ ID NO: 11361 - DNA, 15 bp, Homo sapiens
agttagctaagaagg

SEQ ID NO: 11362 - DNA, 15 bp, Homo sapiens
aagttagctaagaag

SEQ ID NO: 11363 - DNA, 15 bp, Homo sapiens
aaagttagctaagaa

SEQ ID NO: 11364 - DNA, 15 bp, Homo sapiens
gaaagttagctaaga

SEQ ID NO: 11365 - DNA, 15 bp, Homo sapiens
agaaagttagctaag

SEQ ID NO: 11366 - DNA, 15 bp, Homo sapiens
gagaaagttagctaa

SEQ ID NO: 11367 - DNA, 15 bp, Homo sapiens
tgagaaagttagcta

SEQ ID NO: 11368 - DNA, 15 bp, Homo sapiens
ttgagaaagttagct

SEQ ID NO: 11369 - DNA, 15 bp, Homo sapiens
tttgagaaagttagc

SEQ ID NO: 11370 - DNA, 15 bp, Homo sapiens
gtttgagaaagttag

SEQ ID NO: 11371 - DNA, 15 bp, Homo sapiens
agtttgagaaagtta

SEQ ID NO: 11372 - DNA, 15 bp, Homo sapiens
tagtttgagaaagtt

SEQ ID NO: 11373 - DNA, 15 bp, Homo sapiens
gtagtttgagaaagt

SEQ ID NO: 11374 - DNA, 15 bp, Homo sapiens
agtagtttgagaaag

SEQ ID NO: 11375 - DNA, 15 bp, Homo sapiens
gagtagtttgagaaa

SEQ ID NO: 11376 - DNA, 15 bp, Homo sapiens
tgagtagtttgagaa

SEQ ID NO: 11377 - DNA, 15 bp, Homo sapiens
ttgagtagtttgaga

SEQ ID NO: 11378 - DNA, 15 bp, Homo sapiens
attgagtagtttgag

SEQ ID NO: 11379 - DNA, 15 bp, Homo sapiens
cattgagtagtttga

SEQ ID NO: 11380 - DNA, 15 bp, Homo sapiens
gcattgagtagtttg

SEQ ID NO: 11381 - DNA, 15 bp, Homo sapiens
agcattgagtagttt

SEQ ID NO: 11382 - DNA, 15 bp, Homo sapiens
aagcattgagtagtt

SEQ ID NO: 11383 - DNA, 15 bp, Homo sapiens
gaagcattgagtagt

SEQ ID NO: 11384 - DNA, 15 bp, Homo sapiens
tgaagcattgagtag

SEQ ID NO: 11385 - DNA, 15 bp, Homo sapiens
atgaagcattgagta

SEQ ID NO: 11386 - DNA, 15 bp, Homo sapiens
gatgaagcattgagt

SEQ ID NO: 11387 - DNA, 15 bp, Homo sapiens
tgatgaagcattgag

SEQ ID NO: 11388 - DNA, 15 bp, Homo sapiens
gtgatgaagcattga

SEQ ID NO: 11389 - DNA, 15 bp, Homo sapiens
agtgatgaagcattg

SEQ ID NO: 11390 - DNA, 15 bp, Homo sapiens
aagtgatgaagcatt

SEQ ID NO: 11391 - DNA, 15 bp, Homo sapiens
gaagtgatgaagcat

SEQ ID NO: 11392 - DNA, 15 bp, Homo sapiens
agaagtgatgaagca

SEQ ID NO: 11393 - DNA, 15 bp, Homo sapiens
cagaagtgatgaagc

SEQ ID NO: 11394 - DNA, 15 bp, Homo sapiens
gcagaagtgatgaag

SEQ ID NO: 11395 - DNA, 15 bp, Homo sapiens
agcagaagtgatgaa

SEQ ID NO: 11396 - DNA, 15 bp, Homo sapiens
gagcagaagtgatga

SEQ ID NO: 11397 - DNA, 15 bp, Homo sapiens
ggagcagaagtgatg

SEQ ID NO: 11398 - DNA, 15 bp, Homo sapiens
cggagcagaagtgat

SEQ ID NO: 11399 - DNA, 15 bp, Homo sapiens
tcggagcagaagtga

SEQ ID NO: 11400 - DNA, 15 bp, Homo sapiens
atcggagcagaagtg

SEQ ID NO: 11401 - DNA, 15 bp, Homo sapiens
gatcggagcagaagt

SEQ ID NO: 11402 - DNA, 15 bp, Homo sapiens
tgatcggagcagaag

SEQ ID NO: 11403 - DNA, 15 bp, Homo sapiens
ctgatcggagcagaa

SEQ ID NO: 11404 - DNA, 15 bp, Homo sapiens
cctgatcggagcaga

SEQ ID NO: 11405 - DNA, 15 bp, Homo sapiens
tcctgatcggagcag

SEQ ID NO: 11406 - DNA, 15 bp, Homo sapiens
gtcctgatcggagca

SEQ ID NO: 11407 - DNA, 15 bp, Homo sapiens
tgtcctgatcggagc

SEQ ID NO: 11408 - DNA, 15 bp, Homo sapiens
ctgtcctgatcggag

SEQ ID NO: 11409 - DNA, 15 bp, Homo sapiens
tctgtcctgatcgga

SEQ ID NO: 11410 - DNA, 15 bp, Homo sapiens
ctctgtcctgatcgg

SEQ ID NO: 11411 - DNA, 15 bp, Homo sapiens
actctgtcctgatcg

SEQ ID NO: 11412 - DNA, 15 bp, Homo sapiens
gactctgtcctgatc

SEQ ID NO: 11413 - DNA, 15 bp, Homo sapiens
ggactctgtcctgat

SEQ ID NO: 11414 - DNA, 15 bp, Homo sapiens
aggactctgtcctga

SEQ ID NO: 11415 - DNA, 15 bp, Homo sapiens
aaggactctgtcctg

SEQ ID NO: 11416 - DNA, 15 bp, Homo sapiens
caaggactctgtcct

SEQ ID NO: 11417 - DNA, 15 bp, Homo sapiens
ccaaggactctgtcc

SEQ ID NO: 11418 - DNA, 15 bp, Homo sapiens
tccaaggactctgtc

SEQ ID NO: 11419 - DNA, 15 bp, Homo sapiens
ctccaaggactctgt

SEQ ID NO: 11420 - DNA, 15 bp, Homo sapiens
actccaaggactctg

SEQ ID NO: 11421 - DNA, 15 bp, Homo sapiens
cactccaaggactct

SEQ ID NO: 11422 - DNA, 15 bp, Homo sapiens
gcactccaaggactc

SEQ ID NO: 11423 - DNA, 15 bp, Homo sapiens
ggcactccaaggact

SEQ ID NO: 11424 - DNA, 15 bp, Homo sapiens
cggcactccaaggac

SEQ ID NO: 11425 - DNA, 15 bp, Homo sapiens
acggcactccaagga

SEQ ID NO: 11426 - DNA, 15 bp, Homo sapiens
tacggcactccaagg

SEQ ID NO: 11427 - DNA, 15 bp, Homo sapiens
gtacggcactccaag

SEQ ID NO: 11428 - DNA, 15 bp, Homo sapiens
tgtacggcactccaa

SEQ ID NO: 11429 - DNA, 15 bp, Homo sapiens
gtgtacggcactcca

SEQ ID NO: 11430 - DNA, 15 bp, Homo sapiens
tgtgtacggcactcc

SEQ ID NO: 11431 - DNA, 15 bp, Homo sapiens
atgtgtacggcactc

SEQ ID NO: 11432 - DNA, 15 bp, Homo sapiens
aatgtgtacggcact

SEQ ID NO: 11433 - DNA, 15 bp, Homo sapiens
taatgtgtacggcac

SEQ ID NO: 11434 - DNA, 15 bp, Homo sapiens
gtaatgtgtacggca

SEQ ID NO: 11435 - DNA, 15 bp, Homo sapiens
agtaatgtgtacggc

SEQ ID NO: 11436 - DNA, 15 bp, Homo sapiens
cagtaatgtgtacgg

SEQ ID NO: 11437 - DNA, 15 bp, Homo sapiens
gcagtaatgtgtacg

SEQ ID NO: 11438 - DNA, 15 bp, Homo sapiens
ggcagtaatgtgtac

SEQ ID NO: 11439 - DNA, 15 bp, Homo sapiens
aggcagtaatgtgta

SEQ ID NO: 11440 - DNA, 15 bp, Homo sapiens
gaggcagtaatgtgt

SEQ ID NO: 11441 - DNA, 15 bp, Homo sapiens
ggaggcagtaatgtg

SEQ ID NO: 11442 - DNA, 15 bp, Homo sapiens
aggaggcagtaatgt

SEQ ID NO: 11443 - DNA, 15 bp, Homo sapiens
caggaggcagtaatg

SEQ ID NO: 11444 - DNA, 15 bp, Homo sapiens
tcaggaggcagtaat

SEQ ID NO: 11445 - DNA, 15 bp, Homo sapiens
gtcaggaggcagtaa

SEQ ID NO: 11446 - DNA, 15 bp, Homo sapiens
agtcaggaggcagta

SEQ ID NO: 11447 - DNA, 15 bp, Homo sapiens
aagtcaggaggcagt

SEQ ID NO: 11448 - DNA, 15 bp, Homo sapiens
caagtcaggaggcag

SEQ ID NO: 11449 - DNA, 15 bp, Homo sapiens
acaagtcaggaggca

SEQ ID NO: 11450 - DNA, 15 bp, Homo sapiens
aacaagtcaggaggc

SEQ ID NO: 11451 - DNA, 15 bp, Homo sapiens
gaacaagtcaggagg

SEQ ID NO: 11452 - DNA, 15 bp, Homo sapiens
ggaacaagtcaggag

SEQ ID NO: 11453 - DNA, 15 bp, Homo sapiens
tggaacaagtcagga

SEQ ID NO: 11454 - DNA, 15 bp, Homo sapiens
atggaacaagtcagg

SEQ ID NO: 11455 - DNA, 15 bp, Homo sapiens
aatggaacaagtcag

SEQ ID NO: 11456 - DNA, 15 bp, Homo sapiens
gaatggaacaagtca

SEQ ID NO: 11457 - DNA, 15 bp, Homo sapiens
ggaatggaacaagtc

SEQ ID NO: 11458 - DNA, 15 bp, Homo sapiens
aggaatggaacaagt

SEQ ID NO: 11459 - DNA, 15 bp, Homo sapiens
gaggaatggaacaag

SEQ ID NO: 11460 - DNA, 15 bp, Homo sapiens
agaggaatggaacaa

SEQ ID NO: 11461 - DNA, 15 bp, Homo sapiens
cagaggaatggaaca

SEQ ID NO: 11462 - DNA, 15 bp, Homo sapiens
tcagaggaatggaac

SEQ ID NO: 11463 - DNA, 15 bp, Homo sapiens
gtcagaggaatggaa

SEQ ID NO: 11464 - DNA, 15 bp, Homo sapiens
tgtcagaggaatgga

SEQ ID NO: 11465 - DNA, 15 bp, Homo sapiens
ttgtcagaggaatgg

SEQ ID NO: 11466 - DNA, 15 bp, Homo sapiens
tttgtcagaggaatg

SEQ ID NO: 11467 - DNA, 15 bp, Homo sapiens
gtttgtcagaggaat

SEQ ID NO: 11468 - DNA, 15 bp, Homo sapiens
agtttgtcagaggaa

SEQ ID NO: 11469 - DNA, 15 bp, Homo sapiens
gagtttgtcagagga

SEQ ID NO: 11470 - DNA, 15 bp, Homo sapiens
ggagtttgtcagagg

SEQ ID NO: 11471 - DNA, 15 bp, Homo sapiens
aggagtttgtcagag

SEQ ID NO: 11472 - DNA, 15 bp, Homo sapiens
gaggagtttgtcaga

SEQ ID NO: 11473 - DNA, 15 bp, Homo sapiens
agaggagtttgtcag

SEQ ID NO: 11474 - DNA, 15 bp, Homo sapiens
gagaggagtttgtca

SEQ ID NO: 11475 - DNA, 15 bp, Homo sapiens
agagaggagtttgtc

SEQ ID NO: 11476 - DNA, 15 bp, Homo sapiens
gagagaggagtttgt

SEQ ID NO: 11477 - DNA, 15 bp, Homo sapiens
ggagagaggagtttg

SEQ ID NO: 11478 - DNA, 15 bp, Homo sapiens
gggagagaggagttt

SEQ ID NO: 11479 - DNA, 15 bp, Homo sapiens
agggagagaggagtt

SEQ ID NO: 11480 - DNA, 15 bp, Homo sapiens
gagggagagaggagt

SEQ ID NO: 11481 - DNA, 15 bp, Homo sapiens
agagggagagaggag

SEQ ID NO: 11482 - DNA, 15 bp, Homo sapiens
gagagggagagagga

SEQ ID NO: 11483 - DNA, 15 bp, Homo sapiens
tgagagggagagagg

SEQ ID NO: 11484 - DNA, 15 bp, Homo sapiens
gtgagagggagagag

SEQ ID NO: 11485 - DNA, 15 bp, Homo sapiens
agtgagagggagaga

SEQ ID NO: 11486 - DNA, 15 bp, Homo sapiens
aagtgagagggagag

SEQ ID NO: 11487 - DNA, 15 bp, Homo sapiens
caagtgagagggaga

SEQ ID NO: 11488 - DNA, 15 bp, Homo sapiens
gcaagtgagagggag

SEQ ID NO: 11489 - DNA, 15 bp, Homo sapiens
agcaagtgagaggga

SEQ ID NO: 11490 - DNA, 15 bp, Homo sapiens
cagcaagtgagaggg

SEQ ID NO: 11491 - DNA, 15 bp, Homo sapiens
gcagcaagtgagagg

SEQ ID NO: 11492 - DNA, 15 bp, Homo sapiens
ggcagcaagtgagag

SEQ ID NO: 11493 - DNA, 15 bp, Homo sapiens
tggcagcaagtgaga

SEQ ID NO: 11494 - DNA, 15 bp, Homo sapiens
ttggcagcaagtgag

SEQ ID NO: 11495 - DNA, 15 bp, Homo sapiens
tttggcagcaagtga

SEQ ID NO: 11496 - DNA, 15 bp, Homo sapiens
ttttggcagcaagtg

SEQ ID NO: 11497 - DNA, 15 bp, Homo sapiens
attttggcagcaagt

SEQ ID NO: 11498 - DNA, 15 bp, Homo sapiens
gattttggcagcaag

SEQ ID NO: 11499 - DNA, 15 bp, Homo sapiens
agattttggcagcaa

SEQ ID NO: 11500 - DNA, 15 bp, Homo sapiens
aagattttggcagca

SEQ ID NO: 11501 - DNA, 15 bp, Homo sapiens
caagattttggcagc

SEQ ID NO: 11502 - DNA, 15 bp, Homo sapiens
gcaagattttggcag

SEQ ID NO: 11503 - DNA, 15 bp, Homo sapiens
agcaagattttggca

SEQ ID NO: 11504 - DNA, 15 bp, Homo sapiens
aagcaagattttggc

SEQ ID NO: 11505 - DNA, 15 bp, Homo sapiens
taagcaagattttgg

SEQ ID NO: 11506 - DNA, 15 bp, Homo sapiens
ataagcaagattttg

SEQ ID NO: 11507 - DNA, 15 bp, Homo sapiens
gataagcaagatttt

SEQ ID NO: 11508 - DNA, 15 bp, Homo sapiens
ggataagcaagattt

SEQ ID NO: 11509 - DNA, 15 bp, Homo sapiens
aggataagcaagatt

SEQ ID NO: 11510 - DNA, 15 bp, Homo sapiens
aaggataagcaagat

SEQ ID NO: 11511 - DNA, 15 bp, Homo sapiens
gaaggataagcaaga

SEQ ID NO: 11512 - DNA, 15 bp, Homo sapiens
tgaaggataagcaag

SEQ ID NO: 11513 - DNA, 15 bp, Homo sapiens
atgaaggataagcaa

SEQ ID NO: 11514 - DNA, 15 bp, Homo sapiens
catgaaggataagca

SEQ ID NO: 11515 - DNA, 15 bp, Homo sapiens
tcatgaaggataagc

SEQ ID NO: 11516 - DNA, 15 bp, Homo sapiens
atcatgaaggataag

SEQ ID NO: 11517 - DNA, 15 bp, Homo sapiens
gatcatgaaggataa

SEQ ID NO: 11518 - DNA, 15 bp, Homo sapiens
ggatcatgaaggata

SEQ ID NO: 11519 - DNA, 15 bp, Homo sapiens
tggatcatgaaggat

SEQ ID NO: 11520 - DNA, 15 bp, Homo sapiens
ctggatcatgaagga

SEQ ID NO: 11521 - DNA, 15 bp, Homo sapiens
actggatcatgaagg

SEQ ID NO: 11522 - DNA, 15 bp, Homo sapiens
aactggatcatgaag

SEQ ID NO: 11523 - DNA, 15 bp, Homo sapiens
gaactggatcatgaa

SEQ ID NO: 11524 - DNA, 15 bp, Homo sapiens
tgaactggatcatga

SEQ ID NO: 11525 - DNA, 15 bp, Homo sapiens
ttgaactggatcatg

SEQ ID NO: 11526 - DNA, 15 bp, Homo sapiens
cttgaactggatcat

SEQ ID NO: 11527 - DNA, 15 bp, Homo sapiens
gcttgaactggatca

SEQ ID NO: 11528 - DNA, 15 bp, Homo sapiens
tgcttgaactggatc

SEQ ID NO: 11529 - DNA, 15 bp, Homo sapiens
atgcttgaactggat

SEQ ID NO: 11530 - DNA, 15 bp, Homo sapiens
gatgcttgaactgga

SEQ ID NO: 11531 - DNA, 15 bp, Homo sapiens
tgatgcttgaactgg

SEQ ID NO: 11532 - DNA, 15 bp, Homo sapiens
ttgatgcttgaactg

SEQ ID NO: 11533 - DNA, 15 bp, Homo sapiens
tttgatgcttgaact

SEQ ID NO: 11534 - DNA, 15 bp, Homo sapiens
atttgatgcttgaac

SEQ ID NO: 11535 - DNA, 15 bp, Homo sapiens
gatttgatgcttgaa

SEQ ID NO: 11536 - DNA, 15 bp, Homo sapiens
tgatttgatgcttga

SEQ ID NO: 11537 - DNA, 15 bp, Homo sapiens
atgatttgatgcttg

SEQ ID NO: 11538 - DNA, 15 bp, Homo sapiens
catgatttgatgctt

SEQ ID NO: 11539 - DNA, 15 bp, Homo sapiens
gcatgatttgatgct

SEQ ID NO: 11540 - DNA, 15 bp, Homo sapiens
tgcatgatttgatgc

SEQ ID NO: 11541 - DNA, 15 bp, Homo sapiens
atgcatgatttgatg

SEQ ID NO: 11542 - DNA, 15 bp, Homo sapiens
catgcatgatttgat

SEQ ID NO: 11543 - DNA, 15 bp, Homo sapiens
gcatgcatgatttga

SEQ ID NO: 11544 - DNA, 15 bp, Homo sapiens
ggcatgcatgatttg

SEQ ID NO: 11545 - DNA, 15 bp, Homo sapiens
gggcatgcatgattt

SEQ ID NO: 11546 - DNA, 15 bp, Homo sapiens
ggggcatgcatgatt

SEQ ID NO: 11547 - DNA, 15 bp, Homo sapiens
aggggcatgcatgat

SEQ ID NO: 11548 - DNA, 15 bp, Homo sapiens
aaggggcatgcatga

SEQ ID NO: 11549 - DNA, 15 bp, Homo sapiens
aaaggggcatgcatg

SEQ ID NO: 11550 - DNA, 15 bp, Homo sapiens
gaaaggggcatgcat

SEQ ID NO: 11551 - DNA, 15 bp, Homo sapiens
agaaaggggcatgca

SEQ ID NO: 11552 - DNA, 15 bp, Homo sapiens
gagaaaggggcatgc

SEQ ID NO: 11553 - DNA, 15 bp, Homo sapiens
agagaaaggggcatg

SEQ ID NO: 11554 - DNA, 15 bp, Homo sapiens
tagagaaaggggcat

SEQ ID NO: 11555 - DNA, 15 bp, Homo sapiens
ttagagaaaggggca

SEQ ID NO: 11556 - DNA, 15 bp, Homo sapiens
attagagaaaggggc

SEQ ID NO: 11557 - DNA, 15 bp, Homo sapiens
aattagagaaagggg

SEQ ID NO: 11558 - DNA, 15 bp, Homo sapiens
taattagagaaaggg

SEQ ID NO: 11559 - DNA, 15 bp, Homo sapiens
gtaattagagaaagg

SEQ ID NO: 11560 - DNA, 15 bp, Homo sapiens
agtaattagagaaag

SEQ ID NO: 11561 - DNA, 15 bp, Homo sapiens
gagtaattagagaaa

SEQ ID NO: 11562 - DNA, 15 bp, Homo sapiens
ggagtaattagagaa

SEQ ID NO: 11563 - DNA, 15 bp, Homo sapiens
tggagtaattagaga

SEQ ID NO: 11564 - DNA, 15 bp, Homo sapiens
ctggagtaattagag

SEQ ID NO: 11565 - DNA, 15 bp, Homo sapiens
gctggagtaattaga

SEQ ID NO: 11566 - DNA, 15 bp, Homo sapiens
tgctggagtaattag

SEQ ID NO: 11567 - DNA, 15 bp, Homo sapiens
atgctggagtaatta

SEQ ID NO: 11568 - DNA, 15 bp, Homo sapiens
tatgctggagtaatt

SEQ ID NO: 11569 - DNA, 15 bp, Homo sapiens
gtatgctggagtaat

SEQ ID NO: 11570 - DNA, 15 bp, Homo sapiens
tgtatgctggagtaa

SEQ ID NO: 11571 - DNA, 15 bp, Homo sapiens
gtgtatgctggagta

SEQ ID NO: 11572 - DNA, 15 bp, Homo sapiens
agtgtatgctggagt

SEQ ID NO: 11573 - DNA, 15 bp, Homo sapiens
cagtgtatgctggag

SEQ ID NO: 11574 - DNA, 15 bp, Homo sapiens
gcagtgtatgctgga

SEQ ID NO: 11575 - DNA, 15 bp, Homo sapiens
ggcagtgtatgctgg

SEQ ID NO: 11576 - DNA, 15 bp, Homo sapiens
aggcagtgtatgctg

SEQ ID NO: 11577 - DNA, 15 bp, Homo sapiens
aaggcagtgtatgct

SEQ ID NO: 11578 - DNA, 15 bp, Homo sapiens
gaaggcagtgtatgc

SEQ ID NO: 11579 - DNA, 15 bp, Homo sapiens
ggaaggcagtgtatg

SEQ ID NO: 11580 - DNA, 15 bp, Homo sapiens
aggaaggcagtgtat

SEQ ID NO: 11581 - DNA, 15 bp, Homo sapiens
aaggaaggcagtgta

SEQ ID NO: 11582 - DNA, 15 bp, Homo sapiens
gaaggaaggcagtgt

SEQ ID NO: 11583 - DNA, 15 bp, Homo sapiens
ggaaggaaggcagtg

SEQ ID NO: 11584 - DNA, 15 bp, Homo sapiens
gggaaggaaggcagt

SEQ ID NO: 11585 - DNA, 15 bp, Homo sapiens
agggaaggaaggcag

SEQ ID NO: 11586 - DNA, 15 bp, Homo sapiens
tagggaaggaaggca

SEQ ID NO: 11587 - DNA, 15 bp, Homo sapiens
ttagggaaggaaggc

SEQ ID NO: 11588 - DNA, 15 bp, Homo sapiens
tttagggaaggaagg

SEQ ID NO: 11589 - DNA, 15 bp, Homo sapiens
ttttagggaaggaag

SEQ ID NO: 11590 - DNA, 15 bp, Homo sapiens
attttagggaaggaa

SEQ ID NO: 11591 - DNA, 15 bp, Homo sapiens
aattttagggaagga

SEQ ID NO: 11592 - DNA, 15 bp, Homo sapiens
gaattttagggaagg

SEQ ID NO: 11593 - DNA, 15 bp, Homo sapiens
ggaattttagggaag

SEQ ID NO: 11594 - DNA, 15 bp, Homo sapiens
tggaattttagggaa

SEQ ID NO: 11595 - DNA, 15 bp, Homo sapiens
gtggaattttaggga

SEQ ID NO: 11596 - DNA, 15 bp, Homo sapiens
tgtggaattttaggg

SEQ ID NO: 11597 - DNA, 15 bp, Homo sapiens
atgtggaattttagg

SEQ ID NO: 11598 - DNA, 15 bp, Homo sapiens
aatgtggaattttag

SEQ ID NO: 11599 - DNA, 15 bp, Homo sapiens
taatgtggaatttta

SEQ ID NO: 11600 - DNA, 15 bp, Homo sapiens
gtaatgtggaatttt

SEQ ID NO: 11601 - DNA, 15 bp, Homo sapiens
tgtaatgtggaattt

SEQ ID NO: 11602 - DNA, 15 bp, Homo sapiens
atgtaatgtggaatt

SEQ ID NO: 11603 - DNA, 15 bp, Homo sapiens
gatgtaatgtggaat

SEQ ID NO: 11604 - DNA, 15 bp, Homo sapiens
agatgtaatgtggaa

SEQ ID NO: 11605 - DNA, 15 bp, Homo sapiens
aagatgtaatgtgga

SEQ ID NO: 11606 - DNA, 15 bp, Homo sapiens
taagatgtaatgtgg

SEQ ID NO: 11607 - DNA, 15 bp, Homo sapiens
gtaagatgtaatgtg

SEQ ID NO: 11608 - DNA, 15 bp, Homo sapiens
cgtaagatgtaatgt

SEQ ID NO: 11609 - DNA, 15 bp, Homo sapiens
acgtaagatgtaatg

SEQ ID NO: 11610 - DNA, 15 bp, Homo sapiens
tacgtaagatgtaat

SEQ ID NO: 11611 - DNA, 15 bp, Homo sapiens
ctacgtaagatgtaa

SEQ ID NO: 11612 - DNA, 15 bp, Homo sapiens
actacgtaagatgta

SEQ ID NO: 11613 - DNA, 15 bp, Homo sapiens
tactacgtaagatgt

SEQ ID NO: 11614 - DNA, 15 bp, Homo sapiens
gtactacgtaagatg

SEQ ID NO: 11615 - DNA, 15 bp, Homo sapiens
agtactacgtaagat

SEQ ID NO: 11616 - DNA, 15 bp, Homo sapiens
aagtactacgtaaga

SEQ ID NO: 11617 - DNA, 15 bp, Homo sapiens
caagtactacgtaag

SEQ ID NO: 11618 - DNA, 15 bp, Homo sapiens
tcaagtactacgtaa

SEQ ID NO: 11619 - DNA, 15 bp, Homo sapiens
atcaagtactacgta

SEQ ID NO: 11620 - DNA, 15 bp, Homo sapiens
aatcaagtactacgt

SEQ ID NO: 11621 - DNA, 15 bp, Homo sapiens
gaatcaagtactacg

SEQ ID NO: 11622 - DNA, 15 bp, Homo sapiens
ggaatcaagtactac

SEQ ID NO: 11623 - DNA, 15 bp, Homo sapiens
gggaatcaagtacta

SEQ ID NO: 11624 - DNA, 15 bp, Homo sapiens
agggaatcaagtact

SEQ ID NO: 11625 - DNA, 15 bp, Homo sapiens
aagggaatcaagtac

SEQ ID NO: 11626 - DNA, 15 bp, Homo sapiens
gaagggaatcaagta

SEQ ID NO: 11627 - DNA, 15 bp, Homo sapiens
agaagggaatcaagt

SEQ ID NO: 11628 - DNA, 15 bp, Homo sapiens
gagaagggaatcaag

SEQ ID NO: 11629 - DNA, 15 bp, Homo sapiens
tgagaagggaatcaa

SEQ ID NO: 11630 - DNA, 15 bp, Homo sapiens
gtgagaagggaatca

SEQ ID NO: 11631 - DNA, 15 bp, Homo sapiens
agtgagaagggaatc

SEQ ID NO: 11632 - DNA, 15 bp, Homo sapiens
aagtgagaagggaat

SEQ ID NO: 11633 - DNA, 15 bp, Homo sapiens
caagtgagaagggaa

SEQ ID NO: 11634 - DNA, 15 bp, Homo sapiens
acaagtgagaaggga

SEQ ID NO: 11635 - DNA, 15 bp, Homo sapiens
aacaagtgagaaggg

SEQ ID NO: 11636 - DNA, 15 bp, Homo sapiens
aaacaagtgagaagg

SEQ ID NO: 11637 - DNA, 15 bp, Homo sapiens
aaaacaagtgagaag

SEQ ID NO: 11638 - DNA, 15 bp, Homo sapiens
caaaacaagtgagaa

SEQ ID NO: 11639 - DNA, 15 bp, Homo sapiens
acaaaacaagtgaga

SEQ ID NO: 11640 - DNA, 15 bp, Homo sapiens
aacaaaacaagtgag

SEQ ID NO: 11641 - DNA, 15 bp, Homo sapiens
aaacaaaacaagtga

SEQ ID NO: 11642 - DNA, 15 bp, Homo sapiens
aaaacaaaacaagtg

SEQ ID NO: 11643 - DNA, 15 bp, Homo sapiens
caaaacaaaacaagt

SEQ ID NO: 11644 - DNA, 15 bp, Homo sapiens
acaaaacaaaacaag

SEQ ID NO: 11645 - DNA, 15 bp, Homo sapiens
aacaaaacaaaacaa

SEQ ID NO: 11646 - DNA, 15 bp, Homo sapiens
aaacaaaacaaaaca

SEQ ID NO: 11647 - DNA, 15 bp, Homo sapiens
aaaacaaaacaaaac

SEQ ID NO: 11648 - DNA, 15 bp, Homo sapiens
aaaaacaaaacaaaa

SEQ ID NO: 11649 - DNA, 15 bp, Homo sapiens
aaaaaacaaaacaaa

SEQ ID NO: 11650 - DNA, 15 bp, Homo sapiens
aaaaaaacaaaacaa

SEQ ID NO: 11651 - DNA, 15 bp, Homo sapiens
gaaaaaaacaaaaca

SEQ ID NO: 11652 - DNA, 15 bp, Homo sapiens
ggaaaaaaacaaaac

SEQ ID NO: 11653 - DNA, 15 bp, Homo sapiens
gggaaaaaaacaaaa

SEQ ID NO: 11654 - DNA, 15 bp, Homo sapiens
tgggaaaaaaacaaa

SEQ ID NO: 11655 - DNA, 15 bp, Homo sapiens
ttgggaaaaaaacaa

SEQ ID NO: 11656 - DNA, 15 bp, Homo sapiens
cttgggaaaaaaaca

SEQ ID NO: 11657 - DNA, 15 bp, Homo sapiens
tcttgggaaaaaaac

SEQ ID NO: 11658 - DNA, 15 bp, Homo sapiens
gtcttgggaaaaaaa

SEQ ID NO: 11659 - DNA, 15 bp, Homo sapiens
tgtcttgggaaaaaa

SEQ ID NO: 11660 - DNA, 15 bp, Homo sapiens
ctgtcttgggaaaaa

SEQ ID NO: 11661 - DNA, 15 bp, Homo sapiens
tctgtcttgggaaaa

SEQ ID NO: 11662 - DNA, 15 bp, Homo sapiens
ctctgtcttgggaaa

SEQ ID NO: 11663 - DNA, 15 bp, Homo sapiens
actctgtcttgggaa

SEQ ID NO: 11664 - DNA, 15 bp, Homo sapiens
gactctgtcttggga

SEQ ID NO: 11665 - DNA, 15 bp, Homo sapiens
agactctgtcttggg

SEQ ID NO: 11666 - DNA, 15 bp, Homo sapiens
aagactctgtcttgg

SEQ ID NO: 11667 - DNA, 15 bp, Homo sapiens
caagactctgtcttg

SEQ ID NO: 11668 - DNA, 15 bp, Homo sapiens
gcaagactctgtctt

SEQ ID NO: 11669 - DNA, 15 bp, Homo sapiens
cgacagagcaagact

SEQ ID NO: 11670 - DNA, 15 bp, Homo sapiens
gcgacagagcaagac

SEQ ID NO: 11671 - DNA, 15 bp, Homo sapiens
ggcgacagagcaaga

SEQ ID NO: 11672 - DNA, 15 bp, Homo sapiens
gggcgacagagcaag

SEQ ID NO: 11673 - DNA, 15 bp, Homo sapiens
tgggcgacagagcaa

SEQ ID NO: 11674 - DNA, 15 bp, Homo sapiens
ctgggcgacagagca

SEQ ID NO: 11675 - DNA, 15 bp, Homo sapiens
cctgggcgacagagc

SEQ ID NO: 11676 - DNA, 15 bp, Homo sapiens
gcctgggcgacagag

SEQ ID NO: 11677 - DNA, 15 bp, Homo sapiens
agcctgggcgacaga

SEQ ID NO: 11678 - DNA, 15 bp, Homo sapiens
cagcctgggcgacag

SEQ ID NO: 11679 - DNA, 15 bp, Homo sapiens
ccagcctgggcgaca

SEQ ID NO: 11680 - DNA, 15 bp, Homo sapiens
tccagcctgggcgac

SEQ ID NO: 11681 - DNA, 15 bp, Homo sapiens
ctccagcctgggcga

SEQ ID NO: 11682 - DNA, 15 bp, Homo sapiens
actccagcctgggcg

SEQ ID NO: 11683 - DNA, 15 bp, Homo sapiens
accattgcactccag

SEQ ID NO: 11684 - DNA, 15 bp, Homo sapiens
caccattgcactcca

SEQ ID NO: 11685 - DNA, 15 bp, Homo sapiens
gcaccattgcactcc

SEQ ID NO: 11686 - DNA, 15 bp, Homo sapiens
tgcaccattgcactc

SEQ ID NO: 11687 - DNA, 15 bp, Homo sapiens
ttgcaccattgcact

SEQ ID NO: 11688 - DNA, 15 bp, Homo sapiens
attgcaccattgcac

SEQ ID NO: 11689 - DNA, 15 bp, Homo sapiens
gattgcaccattgca

SEQ ID NO: 11690 - DNA, 15 bp, Homo sapiens
agattgcaccattgc

SEQ ID NO: 11691 - DNA, 15 bp, Homo sapiens
gagattgcaccattg

SEQ ID NO: 11692 - DNA, 15 bp, Homo sapiens
cgagattgcaccatt

SEQ ID NO: 11693 - DNA, 15 bp, Homo sapiens
ccgagattgcaccat

SEQ ID NO: 11694 - DNA, 15 bp, Homo sapiens
gccgagattgcacca

SEQ ID NO: 11695 - DNA, 15 bp, Homo sapiens
agccgagattgcacc

SEQ ID NO: 11696 - DNA, 15 bp, Homo sapiens
gagccgagattgcac

SEQ ID NO: 11697 - DNA, 15 bp, Homo sapiens
tgagccgagattgca

SEQ ID NO: 11698 - DNA, 15 bp, Homo sapiens
attgcagtgagccga

SEQ ID NO: 11699 - DNA, 15 bp, Homo sapiens
gattgcagtgagccg

SEQ ID NO: 11700 - DNA, 15 bp, Homo sapiens
agattgcagtgagcc

SEQ ID NO: 11701 - DNA, 15 bp, Homo sapiens
gagattgcagtgagc

SEQ ID NO: 11702 - DNA, 15 bp, Homo sapiens
ggagattgcagtgag

SEQ ID NO: 11703 - DNA, 15 bp, Homo sapiens
tggagattgcagtga

SEQ ID NO: 11704 - DNA, 15 bp, Homo sapiens
gtggagattgcagtg

SEQ ID NO: 11705 - DNA, 15 bp, Homo sapiens
ggtggagattgcagt

SEQ ID NO: 11706 - DNA, 15 bp, Homo sapiens
aggtggagattgcag

SEQ ID NO: 11707 - DNA, 15 bp, Homo sapiens
gaggtggagattgca

SEQ ID NO: 11708 - DNA, 15 bp, Homo sapiens
ggaggtggagattgc

SEQ ID NO: 11709 - DNA, 15 bp, Homo sapiens
aggaggtggagattg

SEQ ID NO: 11710 - DNA, 15 bp, Homo sapiens
caggaggtggagatt

SEQ ID NO: 11711 - DNA, 15 bp, Homo sapiens
ccaggaggtggagat

SEQ ID NO: 11712 - DNA, 15 bp, Homo sapiens
cccaggaggtggaga

SEQ ID NO: 11713 - DNA, 15 bp, Homo sapiens
acccaggaggtggag

SEQ ID NO: 11714 - DNA, 15 bp, Homo sapiens
aacccaggaggtgga

SEQ ID NO: 11715 - DNA, 15 bp, Homo sapiens
gaacccaggaggtgg

SEQ ID NO: 11716 - DNA, 15 bp, Homo sapiens
tgaacccaggaggtg

SEQ ID NO: 11717 - DNA, 15 bp, Homo sapiens
tgctgaggcaggaga

SEQ ID NO: 11718 - DNA, 15 bp, Homo sapiens
ctgctgaggcaggag

SEQ ID NO: 11719 - DNA, 15 bp, Homo sapiens
cctgctgaggcagga

SEQ ID NO: 11720 - DNA, 15 bp, Homo sapiens
tcctgctgaggcagg

SEQ ID NO: 11721 - DNA, 15 bp, Homo sapiens
ctcctgctgaggcag

SEQ ID NO: 11722 - DNA, 15 bp, Homo sapiens
cctcctgctgaggca

SEQ ID NO: 11723 - DNA, 15 bp, Homo sapiens
acctcctgctgaggc

SEQ ID NO: 11724 - DNA, 15 bp, Homo sapiens
tacctcctgctgagg

SEQ ID NO: 11725 - DNA, 15 bp, Homo sapiens
ctacctcctgctgag

SEQ ID NO: 11726 - DNA, 15 bp, Homo sapiens
gctacctcctgctga

SEQ ID NO: 11727 - DNA, 15 bp, Homo sapiens
agctacctcctgctg

SEQ ID NO: 11728 - DNA, 15 bp, Homo sapiens
cagctacctcctgct

SEQ ID NO: 11729 - DNA, 15 bp, Homo sapiens
ccagctacctcctgc

SEQ ID NO: 11730 - DNA, 15 bp, Homo sapiens
cccagctacctcctg

SEQ ID NO: 11731 - DNA, 15 bp, Homo sapiens
tcccagctacctcct

SEQ ID NO: 11732 - DNA, 15 bp, Homo sapiens
atcccagctacctcc

SEQ ID NO: 11733 - DNA, 15 bp, Homo sapiens
aatcccagctacctc

SEQ ID NO: 11734 - DNA, 15 bp, Homo sapiens
taatcccagctacct

SEQ ID NO: 11735 - DNA, 15 bp, Homo sapiens
gtaatcccagctacc

SEQ ID NO: 11736 - DNA, 15 bp, Homo sapiens
ggcgcctgtaatccc

SEQ ID NO: 11737 - DNA, 15 bp, Homo sapiens
gggcgcctgtaatcc

SEQ ID NO: 11738 - DNA, 15 bp, Homo sapiens
tgggcgcctgtaatc

SEQ ID NO: 11739 - DNA, 15 bp, Homo sapiens
gtgggcgcctgtaat

SEQ ID NO: 11740 - DNA, 15 bp, Homo sapiens
ggtgggcgcctgtaa

SEQ ID NO: 11741 - DNA, 15 bp, Homo sapiens
tggtgggcgcctgta

SEQ ID NO: 11742 - DNA, 15 bp, Homo sapiens
gtggtgggcgcctgt

SEQ ID NO: 11743 - DNA, 15 bp, Homo sapiens
ggtggtgggcgcctg

SEQ ID NO: 11744 - DNA, 15 bp, Homo sapiens
tggtggtgggcgcct

SEQ ID NO: 11745 - DNA, 15 bp, Homo sapiens
atggtggtgggcgcc

SEQ ID NO: 11746 - DNA, 15 bp, Homo sapiens
catggtggtgggcgc

SEQ ID NO: 11747 - DNA, 15 bp, Homo sapiens
gcatggtggtgggcg

SEQ ID NO: 11748 - DNA, 15 bp, Homo sapiens
ggcatggtggtgggc

SEQ ID NO: 11749 - DNA, 15 bp, Homo sapiens
gggcatggtggtggg

SEQ ID NO: 11750 - DNA, 15 bp, Homo sapiens
cgggcatggtggtgg

SEQ ID NO: 11751 - DNA, 15 bp, Homo sapiens
ccgggcatggtggtg

SEQ ID NO: 11752 - DNA, 15 bp, Homo sapiens
gccgggcatggtggt

SEQ ID NO: 11753 - DNA, 15 bp, Homo sapiens
agccgggcatggtgg

SEQ ID NO: 11754 - DNA, 15 bp, Homo sapiens
tagccgggcatggtg

SEQ ID NO: 11755 - DNA, 15 bp, Homo sapiens
ttagccgggcatggt

SEQ ID NO: 11756 - DNA, 15 bp, Homo sapiens
attagccgggcatgg

SEQ ID NO: 11757 - DNA, 15 bp, Homo sapiens
aattagccgggcatg

SEQ ID NO: 11758 - DNA, 15 bp, Homo sapiens
aaattagccgggcat

SEQ ID NO: 11759 - DNA, 15 bp, Homo sapiens
aaaattagccgggca

SEQ ID NO: 11760 - DNA, 15 bp, Homo sapiens
caaaaattagccggg

SEQ ID NO: 11761 - DNA, 15 bp, Homo sapiens
acaaaaattagccgg

SEQ ID NO: 11762 - DNA, 15 bp, Homo sapiens
tcggccaacatggtg

SEQ ID NO: 11763 - DNA, 15 bp, Homo sapiens
ctcggccaacatggt

SEQ ID NO: 11764 - DNA, 15 bp, Homo sapiens
gctcggccaacatgg

SEQ ID NO: 11765 - DNA, 15 bp, Homo sapiens
agctcggccaacatg

SEQ ID NO: 11766 - DNA, 15 bp, Homo sapiens
cagctcggccaacat

SEQ ID NO: 11767 - DNA, 15 bp, Homo sapiens
ccagctcggccaaca

SEQ ID NO: 11768 - DNA, 15 bp, Homo sapiens
gccagctcggccaac

SEQ ID NO: 11769 - DNA, 15 bp, Homo sapiens
ggccagctcggccaa

SEQ ID NO: 11770 - DNA, 15 bp, Homo sapiens
aggccagctcggcca

SEQ ID NO: 11771 - DNA, 15 bp, Homo sapiens
taggccagctcggcc

SEQ ID NO: 11772 - DNA, 15 bp, Homo sapiens
gtaggccagctcggc

SEQ ID NO: 11773 - DNA, 15 bp, Homo sapiens
agtaggccagctcgg

SEQ ID NO: 11774 - DNA, 15 bp, Homo sapiens
gagtaggccagctcg

SEQ ID NO: 11775 - DNA, 15 bp, Homo sapiens
tgagtaggccagctc

SEQ ID NO: 11776 - DNA, 15 bp, Homo sapiens
gtgagtaggccagct

SEQ ID NO: 11777 - DNA, 15 bp, Homo sapiens
agtgagtaggccagc

SEQ ID NO: 11778 - DNA, 15 bp, Homo sapiens
aagtgagtaggccag

SEQ ID NO: 11779 - DNA, 15 bp, Homo sapiens
caagtgagtaggcca

SEQ ID NO: 11780 - DNA, 15 bp, Homo sapiens
acaagtgagtaggcc

SEQ ID NO: 11781 - DNA, 15 bp, Homo sapiens
aacaagtgagtaggc

SEQ ID NO: 11782 - DNA, 15 bp, Homo sapiens
taacaagtgagtagg

SEQ ID NO: 11783 - DNA, 15 bp, Homo sapiens
ttaacaagtgagtag

SEQ ID NO: 11784 - DNA, 15 bp, Homo sapiens
attaacaagtgagta

SEQ ID NO: 11785 - DNA, 15 bp, Homo sapiens
aattaacaagtgagt

SEQ ID NO: 11786 - DNA, 15 bp, Homo sapiens
caattaacaagtgag

SEQ ID NO: 11787 - DNA, 15 bp, Homo sapiens
acaattaacaagtga

SEQ ID NO: 11788 - DNA, 15 bp, Homo sapiens
aacaattaacaagtg

SEQ ID NO: 11789 - DNA, 15 bp, Homo sapiens
taacaattaacaagt

SEQ ID NO: 11790 - DNA, 15 bp, Homo sapiens
ttaacaattaacaag

SEQ ID NO: 11791 - DNA, 15 bp, Homo sapiens
gttaacaattaacaa

SEQ ID NO: 11792 - DNA, 15 bp, Homo sapiens
ggttaacaattaaca

SEQ ID NO: 11793 - DNA, 15 bp, Homo sapiens
cggttaacaattaac

SEQ ID NO: 11794 - DNA, 15 bp, Homo sapiens
acggttaacaattaa

SEQ ID NO: 11795 - DNA, 15 bp, Homo sapiens
tacggttaacaatta

SEQ ID NO: 11796 - DNA, 15 bp, Homo sapiens
atacggttaacaatt

SEQ ID NO: 11797 - DNA, 15 bp, Homo sapiens
aatacggttaacaat

SEQ ID NO: 11798 - DNA, 15 bp, Homo sapiens
aaatacggttaacaa

SEQ ID NO: 11799 - DNA, 15 bp, Homo sapiens
caaatacggttaaca

SEQ ID NO: 11800 - DNA, 15 bp, Homo sapiens
gcaaatacggttaac

SEQ ID NO: 11801 - DNA, 15 bp, Homo sapiens
agcaaatacggttaa

SEQ ID NO: 11802 - DNA, 15 bp, Homo sapiens
gagcaaatacggtta

SEQ ID NO: 11803 - DNA, 15 bp, Homo sapiens
tgagcaaatacggtt

SEQ ID NO: 11804 - DNA, 15 bp, Homo sapiens
atgagcaaatacggt

SEQ ID NO: 11805 - DNA, 15 bp, Homo sapiens
aatgagcaaatacgg

SEQ ID NO: 11806 - DNA, 15 bp, Homo sapiens
gaatgagcaaatacg

SEQ ID NO: 11807 - DNA, 15 bp, Homo sapiens
agaatgagcaaatac

SEQ ID NO: 11808 - DNA, 15 bp, Homo sapiens
tagaatgagcaaata

SEQ ID NO: 11809 - DNA, 15 bp, Homo sapiens
ctagaatgagcaaat

SEQ ID NO: 11810 - DNA, 15 bp, Homo sapiens
actagaatgagcaaa

SEQ ID NO: 11811 - DNA, 15 bp, Homo sapiens
gactagaatgagcaa

SEQ ID NO: 11812 - DNA, 15 bp, Homo sapiens
tgactagaatgagca

SEQ ID NO: 11813 - DNA, 15 bp, Homo sapiens
ctgactagaatgagc

SEQ ID NO: 11814 - DNA, 15 bp, Homo sapiens
actgactagaatgag

SEQ ID NO: 11815 - DNA, 15 bp, Homo sapiens
gactgactagaatga

SEQ ID NO: 11816 - DNA, 15 bp, Homo sapiens
agactgactagaatg

SEQ ID NO: 11817 - DNA, 15 bp, Homo sapiens
aagactgactagaat

SEQ ID NO: 11818 - DNA, 15 bp, Homo sapiens
gaagactgactagaa

SEQ ID NO: 11819 - DNA, 15 bp, Homo sapiens
tgaagactgactaga

SEQ ID NO: 11820 - DNA, 15 bp, Homo sapiens
ctgaagactgactag

SEQ ID NO: 11821 - DNA, 15 bp, Homo sapiens
gctgaagactgacta

SEQ ID NO: 11822 - DNA, 15 bp, Homo sapiens
agctgaagactgact

SEQ ID NO: 11823 - DNA, 15 bp, Homo sapiens
tcagctgaagactga

SEQ ID NO: 11824 - DNA, 15 bp, Homo sapiens
ttcagctgaagactg

SEQ ID NO: 11825 - DNA, 15 bp, Homo sapiens
tttcagctgaagact

SEQ ID NO: 11826 - DNA, 15 bp, Homo sapiens
ctttcagctgaagac

SEQ ID NO: 11827 - DNA, 15 bp, Homo sapiens
cctttcagctgaaga

SEQ ID NO: 11828 - DNA, 15 bp, Homo sapiens
acctttcagctgaag

SEQ ID NO: 11829 - DNA, 15 bp, Homo sapiens
tacctttcagctgaa

SEQ ID NO: 11830 - DNA, 15 bp, Homo sapiens
ttacctttcagctga

SEQ ID NO: 11831 - DNA, 15 bp, Homo sapiens
cttacctttcagctg

SEQ ID NO: 11832 - DNA, 15 bp, Homo sapiens
acttacctttcagct

SEQ ID NO: 11833 - DNA, 15 bp, Homo sapiens
aacttacctttcagc

SEQ ID NO: 11834 - DNA, 15 bp, Homo sapiens
gaacttacctttcag

SEQ ID NO: 11835 - DNA, 15 bp, Homo sapiens
agaacttacctttca

SEQ ID NO: 11836 - DNA, 15 bp, Homo sapiens
aagaacttacctttc

SEQ ID NO: 11837 - DNA, 15 bp, Homo sapiens
aaagaacttaccttt

SEQ ID NO: 11838 - DNA, 15 bp, Homo sapiens
caaagaacttacctt

SEQ ID NO: 11839 - DNA, 15 bp, Homo sapiens
tcaaagaacttacct

SEQ ID NO: 11840 - DNA, 15 bp, Homo sapiens
ctcaaagaacttacc

SEQ ID NO: 11841 - DNA, 15 bp, Homo sapiens
cctcaaagaacttac

SEQ ID NO: 11842 - DNA, 15 bp, Homo sapiens
ccctcaaagaactta

SEQ ID NO: 11843 - DNA, 15 bp, Homo sapiens
tccctcaaagaactt

SEQ ID NO: 11844 - DNA, 15 bp, Homo sapiens
ttccctcaaagaact

SEQ ID NO: 11845 - DNA, 15 bp, Homo sapiens
attccctcaaagaac

SEQ ID NO: 11846 - DNA, 15 bp, Homo sapiens
cattccctcaaagaa

SEQ ID NO: 11847 - DNA, 15 bp, Homo sapiens
ccattccctcaaaga

SEQ ID NO: 11848 - DNA, 15 bp, Homo sapiens
tccattccctcaaag

SEQ ID NO: 11849 - DNA, 15 bp, Homo sapiens
atccattccctcaaa

SEQ ID NO: 11850 - DNA, 15 bp, Homo sapiens
gatccattccctcaa

SEQ ID NO: 11851 - DNA, 15 bp, Homo sapiens
tgatccattccctca

SEQ ID NO: 11852 - DNA, 15 bp, Homo sapiens
atgatccattccctc

SEQ ID NO: 11853 - DNA, 15 bp, Homo sapiens
catgatccattccct

SEQ ID NO: 11854 - DNA, 15 bp, Homo sapiens
acatgatccattccc

SEQ ID NO: 11855 - DNA, 15 bp, Homo sapiens
gacatgatccattcc

SEQ ID NO: 11856 - DNA, 15 bp, Homo sapiens
agacatgatccattc

SEQ ID NO: 11857 - DNA, 15 bp, Homo sapiens
cagacatgatccatt

SEQ ID NO: 11858 - DNA, 15 bp, Homo sapiens
tcagacatgatccat

SEQ ID NO: 11859 - DNA, 15 bp, Homo sapiens
ctcagacatgatcca

SEQ ID NO: 11860 - DNA, 15 bp, Homo sapiens
gctcagacatgatcc

SEQ ID NO: 11861 - DNA, 15 bp, Homo sapiens
ggctcagacatgatc

SEQ ID NO: 11862 - DNA, 15 bp, Homo sapiens
gggctcagacatgat

SEQ ID NO: 11863 - DNA, 15 bp, Homo sapiens
ggggctcagacatga

SEQ ID NO: 11864 - DNA, 15 bp, Homo sapiens
gggggctcagacatg

SEQ ID NO: 11865 - DNA, 15 bp, Homo sapiens
tgggggctcagacat

SEQ ID NO: 11866 - DNA, 15 bp, Homo sapiens
atgggggctcagaca

SEQ ID NO: 11867 - DNA, 15 bp, Homo sapiens
tatgggggctcagac

SEQ ID NO: 11868 - DNA, 15 bp, Homo sapiens
ttatgggggctcaga

SEQ ID NO: 11869 - DNA, 15 bp, Homo sapiens
attatgggggctcag

SEQ ID NO: 11870 - DNA, 15 bp, Homo sapiens
cattatgggggctca

SEQ ID NO: 11871 - DNA, 15 bp, Homo sapiens
gcattatgggggctc

SEQ ID NO: 11872 - DNA, 15 bp, Homo sapiens
agcattatgggggct

SEQ ID NO: 11873 - DNA, 15 bp, Homo sapiens
aagcattatgggggc

SEQ ID NO: 11874 - DNA, 15 bp, Homo sapiens
taagcattatggggg

SEQ ID NO: 11875 - DNA, 15 bp, Homo sapiens
ttaagcattatgggg

SEQ ID NO: 11876 - DNA, 15 bp, Homo sapiens
gttaagcattatggg

SEQ ID NO: 11877 - DNA, 15 bp, Homo sapiens
tgttaagcattatgg

SEQ ID NO: 11878 - DNA, 15 bp, Homo sapiens
ctgttaagcattatg

SEQ ID NO: 11879 - DNA, 15 bp, Homo sapiens
tctgttaagcattat

SEQ ID NO: 11880 - DNA, 15 bp, Homo sapiens
ctctgttaagcatta

SEQ ID NO: 11881 - DNA, 15 bp, Homo sapiens
tctctgttaagcatt

SEQ ID NO: 11882 - DNA, 15 bp, Homo sapiens
ttctctgttaagcat

SEQ ID NO: 11883 - DNA, 15 bp, Homo sapiens
tttctctgttaagca

SEQ ID NO: 11884 - DNA, 15 bp, Homo sapiens
ttttctctgttaagc

SEQ ID NO: 11885 - DNA, 15 bp, Homo sapiens
tttttctctgttaag

SEQ ID NO: 11886 - DNA, 15 bp, Homo sapiens
atttttctctgttaa

SEQ ID NO: 11887 - DNA, 15 bp, Homo sapiens
catttttctctgtta

SEQ ID NO: 11888 - DNA, 15 bp, Homo sapiens
acatttttctctgtt

SEQ ID NO: 11889 - DNA, 15 bp, Homo sapiens
tacatttttctctgt

SEQ ID NO: 11890 - DNA, 15 bp, Homo sapiens
ttacatttttctctg

SEQ ID NO: 11891 - DNA, 15 bp, Homo sapiens
attacatttttctct

SEQ ID NO: 11892 - DNA, 15 bp, Homo sapiens
tattacatttttctc

SEQ ID NO: 11893 - DNA, 15 bp, Homo sapiens
ctattacatttttct

SEQ ID NO: 11894 - DNA, 15 bp, Homo sapiens
gctattacatttttc

SEQ ID NO: 11895 - DNA, 15 bp, Homo sapiens
tgctattacattttt

SEQ ID NO: 11896 - DNA, 15 bp, Homo sapiens
ctgctattacatttt

SEQ ID NO: 11897 - DNA, 15 bp, Homo sapiens
actgctattacattt

SEQ ID NO: 11898 - DNA, 15 bp, Homo sapiens
tactgctattacatt

SEQ ID NO: 11899 - DNA, 15 bp, Homo sapiens
gtactgctattacat

SEQ ID NO: 11900 - DNA, 15 bp, Homo sapiens
agtactgctattaca

SEQ ID NO: 11901 - DNA, 15 bp, Homo sapiens
gagtactgctattac

SEQ ID NO: 11902 - DNA, 15 bp, Homo sapiens
tgagtactgctatta

SEQ ID NO: 11903 - DNA, 15 bp, Homo sapiens
ctgagtactgctatt

SEQ ID NO: 11904 - DNA, 15 bp, Homo sapiens
actgagtactgctat

SEQ ID NO: 11905 - DNA, 15 bp, Homo sapiens
tactgagtactgcta

SEQ ID NO: 11906 - DNA, 15 bp, Homo sapiens
ttactgagtactgct

SEQ ID NO: 11907 - DNA, 15 bp, Homo sapiens
tttactgagtactgc

SEQ ID NO: 11908 - DNA, 15 bp, Homo sapiens
ttttactgagtactg

SEQ ID NO: 11909 - DNA, 15 bp, Homo sapiens
tttttactgagtact

SEQ ID NO: 11910 - DNA, 15 bp, Homo sapiens
gtttttactgagtac

SEQ ID NO: 11911 - DNA, 15 bp, Homo sapiens
agtttttactgagta

SEQ ID NO: 11912 - DNA, 15 bp, Homo sapiens
aagtttttactgagt

SEQ ID NO: 11913 - DNA, 15 bp, Homo sapiens
taagtttttactgag

SEQ ID NO: 11914 - DNA, 15 bp, Homo sapiens
gtaagtttttactga

SEQ ID NO: 11915 - DNA, 15 bp, Homo sapiens
agtaagtttttactg

SEQ ID NO: 11916 - DNA, 15 bp, Homo sapiens
cagtaagtttttact

SEQ ID NO: 11917 - DNA, 15 bp, Homo sapiens
tcagtaagtttttac

SEQ ID NO: 11918 - DNA, 15 bp, Homo sapiens
atcagtaagttttta

SEQ ID NO: 11919 - DNA, 15 bp, Homo sapiens
tatcagtaagttttt

SEQ ID NO: 11920 - DNA, 15 bp, Homo sapiens
ctatcagtaagtttt

SEQ ID NO: 11921 - DNA, 15 bp, Homo sapiens
cctatcagtaagttt

SEQ ID NO: 11922 - DNA, 15 bp, Homo sapiens
acctatcagtaagtt

SEQ ID NO: 11923 - DNA, 15 bp, Homo sapiens
aacctatcagtaagt

SEQ ID NO: 11924 - DNA, 15 bp, Homo sapiens
aaacctatcagtaag

SEQ ID NO: 11925 - DNA, 15 bp, Homo sapiens
taaacctatcagtaa

SEQ ID NO: 11926 - DNA, 15 bp, Homo sapiens
ataaacctatcagta

SEQ ID NO: 11927 - DNA, 15 bp, Homo sapiens
aataaacctatcagt

SEQ ID NO: 11928 - DNA, 15 bp, Homo sapiens
taataaacctatcag

SEQ ID NO: 11929 - DNA, 15 bp, Homo sapiens
ttaataaacctatca

SEQ ID NO: 11930 - DNA, 15 bp, Homo sapiens
tttaataaacctatc

SEQ ID NO: 11931 - DNA, 15 bp, Homo sapiens
gtttaataaacctat

SEQ ID NO: 11932 - DNA, 15 bp, Homo sapiens
agtttaataaaccta

SEQ ID NO: 11933 - DNA, 15 bp, Homo sapiens
tagtttaataaacct

SEQ ID NO: 11934 - DNA, 15 bp, Homo sapiens
ttagtttaataaacc

SEQ ID NO: 11935 - DNA, 15 bp, Homo sapiens
cttagtttaataaac

SEQ ID NO: 11936 - DNA, 15 bp, Homo sapiens
tcttagtttaataaa

SEQ ID NO: 11937 - DNA, 15 bp, Homo sapiens
ctcttagtttaataa

SEQ ID NO: 11938 - DNA, 15 bp, Homo sapiens
tctcttagtttaata

SEQ ID NO: 11939 - DNA, 15 bp, Homo sapiens
ttctcttagtttaat

SEQ ID NO: 11940 - DNA, 15 bp, Homo sapiens
tttctcttagtttaa

SEQ ID NO: 11941 - DNA, 15 bp, Homo sapiens
ttttctcttagttta

SEQ ID NO: 11942 - DNA, 15 bp, Homo sapiens
cttttctcttagttt

SEQ ID NO: 11943 - DNA, 15 bp, Homo sapiens
tcttttctcttagtt

SEQ ID NO: 11944 - DNA, 15 bp, Homo sapiens
gtcttttctcttagt

SEQ ID NO: 11945 - DNA, 15 bp, Homo sapiens
tgtcttttctcttag

SEQ ID NO: 11946 - DNA, 15 bp, Homo sapiens
ctgtcttttctctta

SEQ ID NO: 11947 - DNA, 15 bp, Homo sapiens
actgtcttttctctt

SEQ ID NO: 11948 - DNA, 15 bp, Homo sapiens
aactgtcttttctct

SEQ ID NO: 11949 - DNA, 15 bp, Homo sapiens
aaactgtcttttctc

SEQ ID NO: 11950 - DNA, 15 bp, Homo sapiens
caaactgtcttttct

SEQ ID NO: 11951 - DNA, 15 bp, Homo sapiens
ccaaactgtcttttc

SEQ ID NO: 11952 - DNA, 15 bp, Homo sapiens
tccaaactgtctttt

SEQ ID NO: 11953 - DNA, 15 bp, Homo sapiens
atccaaactgtcttt

SEQ ID NO: 11954 - DNA, 15 bp, Homo sapiens
tatccaaactgtctt

SEQ ID NO: 11955 - DNA, 15 bp, Homo sapiens
atatccaaactgtct

SEQ ID NO: 11956 - DNA, 15 bp, Homo sapiens
tatatccaaactgtc

SEQ ID NO: 11957 - DNA, 15 bp, Homo sapiens
ttatatccaaactgt

SEQ ID NO: 11958 - DNA, 15 bp, Homo sapiens
attatatccaaactg

SEQ ID NO: 11959 - DNA, 15 bp, Homo sapiens
aattatatccaaact

SEQ ID NO: 11960 - DNA, 15 bp, Homo sapiens
aaattatatccaaac

SEQ ID NO: 11961 - DNA, 15 bp, Homo sapiens
aaaattatatccaaa

SEQ ID NO: 11962 - DNA, 15 bp, Homo sapiens
gaaaattatatccaa

SEQ ID NO: 11963 - DNA, 15 bp, Homo sapiens
cgaaaattatatcca

SEQ ID NO: 11964 - DNA, 15 bp, Homo sapiens
acgaaaattatatcc

SEQ ID NO: 11965 - DNA, 15 bp, Homo sapiens
tacgaaaattatatc

SEQ ID NO: 11966 - DNA, 15 bp, Homo sapiens
ttacgaaaattatat

SEQ ID NO: 11967 - DNA, 15 bp, Homo sapiens
cttacgaaaattata

SEQ ID NO: 11968 - DNA, 15 bp, Homo sapiens
tcttacgaaaattat

SEQ ID NO: 11969 - DNA, 15 bp, Homo sapiens
ttcttacgaaaatta

SEQ ID NO: 11970 - DNA, 15 bp, Homo sapiens
cttcttacgaaaatt

SEQ ID NO: 11971 - DNA, 15 bp, Homo sapiens
gcttcttacgaaaat

SEQ ID NO: 11972 - DNA, 15 bp, Homo sapiens
ggcttcttacgaaaa

SEQ ID NO: 11973 - DNA, 15 bp, Homo sapiens
aggcttcttacgaaa

SEQ ID NO: 11974 - DNA, 15 bp, Homo sapiens
aaggcttcttacgaa

SEQ ID NO: 11975 - DNA, 15 bp, Homo sapiens
aaaggcttcttacga

SEQ ID NO: 11976 - DNA, 15 bp, Homo sapiens
aaaaggcttcttacg

SEQ ID NO: 11977 - DNA, 15 bp, Homo sapiens
gaaaaggcttcttac

SEQ ID NO: 11978 - DNA, 15 bp, Homo sapiens
tgaaaaggcttctta

SEQ ID NO: 11979 - DNA, 15 bp, Homo sapiens
atgaaaaggcttctt

SEQ ID NO: 11980 - DNA, 15 bp, Homo sapiens
aatgaaaaggcttct

SEQ ID NO: 11981 - DNA, 15 bp, Homo sapiens
aaatgaaaaggcttc

SEQ ID NO: 11982 - DNA, 15 bp, Homo sapiens
ggggtagagcagtgg

SEQ ID NO: 11983 - DNA, 15 bp, Homo sapiens
tggggtagagcagtg

SEQ ID NO: 11984 - DNA, 15 bp, Homo sapiens
ctggggtagagcagt

SEQ ID NO: 11985 - DNA, 15 bp, Homo sapiens
gctggggtagagcag

SEQ ID NO: 11986 - DNA, 15 bp, Homo sapiens
agctggggtagagca

SEQ ID NO: 11987 - DNA, 15 bp, Homo sapiens
gagctggggtagagc

SEQ ID NO: 11988 - DNA, 15 bp, Homo sapiens
ggagctggggtagag

SEQ ID NO: 11989 - DNA, 15 bp, Homo sapiens
gggagctggggtaga

SEQ ID NO: 11990 - DNA, 15 bp, Homo sapiens
tgggagctggggtag

SEQ ID NO: 11991 - DNA, 15 bp, Homo sapiens
ctgggagctggggta

SEQ ID NO: 11992 - DNA, 15 bp, Homo sapiens
gctgggagctggggt

SEQ ID NO: 11993 - DNA, 15 bp, Homo sapiens
agctgggagctgggg

SEQ ID NO: 11994 - DNA, 15 bp, Homo sapiens
gagctgggagctggg

SEQ ID NO: 11995 - DNA, 15 bp, Homo sapiens
agagctgggagctgg

SEQ ID NO: 11996 - DNA, 15 bp, Homo sapiens
aagagctgggagctg

SEQ ID NO: 11997 - DNA, 15 bp, Homo sapiens
gaagagctgggagct

SEQ ID NO: 11998 - DNA, 15 bp, Homo sapiens
agaagagctgggagc

SEQ ID NO: 11999 - DNA, 15 bp, Homo sapiens
cagaagagctgggag

SEQ ID NO: 12000 - DNA, 15 bp, Homo sapiens
tcagaagagctggga

SEQ ID NO: 12001 - DNA, 15 bp, Homo sapiens
ttcagaagagctggg

SEQ ID NO: 12002 - DNA, 15 bp, Homo sapiens
cttcagaagagctgg

SEQ ID NO: 12003 - DNA, 15 bp, Homo sapiens
acttcagaagagctg

SEQ ID NO: 12004 - DNA, 15 bp, Homo sapiens
cacttcagaagagct

SEQ ID NO: 12005 - DNA, 15 bp, Homo sapiens
acacttcagaagagc

SEQ ID NO: 12006 - DNA, 15 bp, Homo sapiens
gacacttcagaagag

SEQ ID NO: 12007 - DNA, 15 bp, Homo sapiens
tgacacttcagaaga

SEQ ID NO: 12008 - DNA, 15 bp, Homo sapiens
gtgacacttcagaag

SEQ ID NO: 12009 - DNA, 15 bp, Homo sapiens
cgtgacacttcagaa

SEQ ID NO: 12010 - DNA, 15 bp, Homo sapiens
ccgtgacacttcaga

SEQ ID NO: 12011 - DNA, 15 bp, Homo sapiens
accgtgacacttcag

SEQ ID NO: 12012 - DNA, 15 bp, Homo sapiens
aaccgtgacacttca

SEQ ID NO: 12013 - DNA, 15 bp, Homo sapiens
gaaccgtgacacttc

SEQ ID NO: 12014 - DNA, 15 bp, Homo sapiens
tgaaccgtgacactt

SEQ ID NO: 12015 - DNA, 15 bp, Homo sapiens
atgaaccgtgacact

SEQ ID NO: 12016 - DNA, 15 bp, Homo sapiens
aatgaaccgtgacac

SEQ ID NO: 12017 - DNA, 15 bp, Homo sapiens
aaatgaaccgtgaca

SEQ ID NO: 12018 - DNA, 15 bp, Homo sapiens
gaaatgaaccgtgac

SEQ ID NO: 12019 - DNA, 15 bp, Homo sapiens
tgaaatgaaccgtga

SEQ ID NO: 12020 - DNA, 15 bp, Homo sapiens
ttgaaatgaaccgtg

SEQ ID NO: 12021 - DNA, 15 bp, Homo sapiens
gttgaaatgaaccgt

SEQ ID NO: 12022 - DNA, 15 bp, Homo sapiens
tgttgaaatgaaccg

SEQ ID NO: 12023 - DNA, 15 bp, Homo sapiens
ctgttgaaatgaacc

SEQ ID NO: 12024 - DNA, 15 bp, Homo sapiens
gctgttgaaatgaac

SEQ ID NO: 12025 - DNA, 15 bp, Homo sapiens
tgctgttgaaatgaa

SEQ ID NO: 12026 - DNA, 15 bp, Homo sapiens
gtgctgttgaaatga

SEQ ID NO: 12027 - DNA, 15 bp, Homo sapiens
cgtgctgttgaaatg

SEQ ID NO: 12028 - DNA, 15 bp, Homo sapiens
tcgtgctgttgaaat

SEQ ID NO: 12029 - DNA, 15 bp, Homo sapiens
ctcgtgctgttgaaa

SEQ ID NO: 12030 - DNA, 15 bp, Homo sapiens
actcgtgctgttgaa

SEQ ID NO: 12031 - DNA, 15 bp, Homo sapiens
tactcgtgctgttga

SEQ ID NO: 12032 - DNA, 15 bp, Homo sapiens
ttactcgtgctgttg

SEQ ID NO: 12033 - DNA, 15 bp, Homo sapiens
cttactcgtgctgtt

SEQ ID NO: 12034 - DNA, 15 bp, Homo sapiens
ccttactcgtgctgt

SEQ ID NO: 12035 - DNA, 15 bp, Homo sapiens
gccttactcgtgctg

SEQ ID NO: 12036 - DNA, 15 bp, Homo sapiens
tgccttactcgtgct

SEQ ID NO: 12037 - DNA, 15 bp, Homo sapiens
ctgccttactcgtgc

SEQ ID NO: 12038 - DNA, 15 bp, Homo sapiens
actgccttactcgtg

SEQ ID NO: 12039 - DNA, 15 bp, Homo sapiens
aactgccttactcgt

SEQ ID NO: 12040 - DNA, 15 bp, Homo sapiens
aaactgccttactcg

SEQ ID NO: 12041 - DNA, 15 bp, Homo sapiens
gaaactgccttactc

SEQ ID NO: 12042 - DNA, 15 bp, Homo sapiens
ggaaactgccttact

SEQ ID NO: 12043 - DNA, 15 bp, Homo sapiens
tggaaactgccttac

SEQ ID NO: 12044 - DNA, 15 bp, Homo sapiens
ctggaaactgcctta

SEQ ID NO: 12045 - DNA, 15 bp, Homo sapiens
cctggaaactgcctt

SEQ ID NO: 12046 - DNA, 15 bp, Homo sapiens
gcctggaaactgcct

SEQ ID NO: 12047 - DNA, 15 bp, Homo sapiens
ggcctggaaactgcc

SEQ ID NO: 12048 - DNA, 15 bp, Homo sapiens
gggcctggaaactgc

SEQ ID NO: 12049 - DNA, 15 bp, Homo sapiens
agggcctggaaactg

SEQ ID NO: 12050 - DNA, 15 bp, Homo sapiens
cagggcctggaaact

SEQ ID NO: 12051 - DNA, 15 bp, Homo sapiens
acagggcctggaaac

SEQ ID NO: 12052 - DNA, 15 bp, Homo sapiens
cacagggcctggaaa

SEQ ID NO: 12053 - DNA, 15 bp, Homo sapiens
gcacagggcctggaa

SEQ ID NO: 12054 - DNA, 15 bp, Homo sapiens
tgcacagggcctgga

SEQ ID NO: 12055 - DNA, 15 bp, Homo sapiens
atgcacagggcctgg

SEQ ID NO: 12056 - DNA, 15 bp, Homo sapiens
tatgcacagggcctg

SEQ ID NO: 12057 - DNA, 15 bp, Homo sapiens
ttatgcacagggcct

SEQ ID NO: 12058 - DNA, 15 bp, Homo sapiens
attatgcacagggcc

SEQ ID NO: 12059 - DNA, 15 bp, Homo sapiens
cattatgcacagggc

SEQ ID NO: 12060 - DNA, 15 bp, Homo sapiens
tcattatgcacaggg

SEQ ID NO: 12061 - DNA, 15 bp, Homo sapiens
ctcattatgcacagg

SEQ ID NO: 12062 - DNA, 15 bp, Homo sapiens
gctcattatgcacag

SEQ ID NO: 12063 - DNA, 15 bp, Homo sapiens
ggctcattatgcaca

SEQ ID NO: 12064 - DNA, 15 bp, Homo sapiens
tggctcattatgcac

SEQ ID NO: 12065 - DNA, 15 bp, Homo sapiens
atggctcattatgca

SEQ ID NO: 12066 - DNA, 15 bp, Homo sapiens
catggctcattatgc

SEQ ID NO: 12067 - DNA, 15 bp, Homo sapiens
acatggctcattatg

SEQ ID NO: 12068 - DNA, 15 bp, Homo sapiens
cacatggctcattat

SEQ ID NO: 12069 - DNA, 15 bp, Homo sapiens
ccacatggctcatta

SEQ ID NO: 12070 - DNA, 15 bp, Homo sapiens
tccacatggctcatt

SEQ ID NO: 12071 - DNA, 15 bp, Homo sapiens
gtccacatggctcat

SEQ ID NO: 12072 - DNA, 15 bp, Homo sapiens
ggtccacatggctca

SEQ ID NO: 12073 - DNA, 15 bp, Homo sapiens
gggtccacatggctc

SEQ ID NO: 12074 - DNA, 15 bp, Homo sapiens
agggtccacatggct

SEQ ID NO: 12075 - DNA, 15 bp, Homo sapiens
tagggtccacatggc

SEQ ID NO: 12076 - DNA, 15 bp, Homo sapiens
atagggtccacatgg

SEQ ID NO: 12077 - DNA, 15 bp, Homo sapiens
aatagggtccacatg

SEQ ID NO: 12078 - DNA, 15 bp, Homo sapiens
gaatagggtccacat

SEQ ID NO: 12079 - DNA, 15 bp, Homo sapiens
tgaatagggtccaca

SEQ ID NO: 12080 - DNA, 15 bp, Homo sapiens
ttgaatagggtccac

SEQ ID NO: 12081 - DNA, 15 bp, Homo sapiens
cttgaatagggtcca

SEQ ID NO: 12082 - DNA, 15 bp, Homo sapiens
tcttgaatagggtcc

SEQ ID NO: 12083 - DNA, 15 bp, Homo sapiens
ttcttgaatagggtc

SEQ ID NO: 12084 - DNA, 15 bp, Homo sapiens
tttcttgaatagggt

SEQ ID NO: 12085 - DNA, 15 bp, Homo sapiens
gtttcttgaataggg

SEQ ID NO: 12086 - DNA, 15 bp, Homo sapiens
agtttcttgaatagg

SEQ ID NO: 12087 - DNA, 15 bp, Homo sapiens
cagtttcttgaatag

SEQ ID NO: 12088 - DNA, 15 bp, Homo sapiens
ccagtttcttgaata

SEQ ID NO: 12089 - DNA, 15 bp, Homo sapiens
gccagtttcttgaat

SEQ ID NO: 12090 - DNA, 15 bp, Homo sapiens
agccagtttcttgaa

SEQ ID NO: 12091 - DNA, 15 bp, Homo sapiens
cagccagtttcttga

SEQ ID NO: 12092 - DNA, 15 bp, Homo sapiens
acagccagtttcttg

SEQ ID NO: 12093 - DNA, 15 bp, Homo sapiens
tacagccagtttctt

SEQ ID NO: 12094 - DNA, 15 bp, Homo sapiens
gtacagccagtttct

SEQ ID NO: 12095 - DNA, 15 bp, Homo sapiens
agtacagccagtttc

SEQ ID NO: 12096 - DNA, 15 bp, Homo sapiens
gagtacagccagttt

SEQ ID NO: 12097 - DNA, 15 bp, Homo sapiens
ggagtacagccagtt

SEQ ID NO: 12098 - DNA, 15 bp, Homo sapiens
tggagtacagccagt

SEQ ID NO: 12099 - DNA, 15 bp, Homo sapiens
ctggagtacagccag

SEQ ID NO: 12100 - DNA, 15 bp, Homo sapiens
tctggagtacagcca

SEQ ID NO: 12101 - DNA, 15 bp, Homo sapiens
ttctggagtacagcc

SEQ ID NO: 12102 - DNA, 15 bp, Homo sapiens
gttctggagtacagc

SEQ ID NO: 12103 - DNA, 15 bp, Homo sapiens
agttctggagtacag

SEQ ID NO: 12104 - DNA, 15 bp, Homo sapiens
tagttctggagtaca

SEQ ID NO: 12105 - DNA, 15 bp, Homo sapiens
gtagttctggagtac

SEQ ID NO: 12106 - DNA, 15 bp, Homo sapiens
agtagttctggagta

SEQ ID NO: 12107 - DNA, 15 bp, Homo sapiens
tagtagttctggagt

SEQ ID NO: 12108 - DNA, 15 bp, Homo sapiens
atagtagttctggag

SEQ ID NO: 12109 - DNA, 15 bp, Homo sapiens
tatagtagttctgga

SEQ ID NO: 12110 - DNA, 15 bp, Homo sapiens
ttatagtagttctgg

SEQ ID NO: 12111 - DNA, 15 bp, Homo sapiens
tttatagtagttctg

SEQ ID NO: 12112 - DNA, 15 bp, Homo sapiens
ttttatagtagttct

SEQ ID NO: 12113 - DNA, 15 bp, Homo sapiens
attttatagtagttc

SEQ ID NO: 12114 - DNA, 15 bp, Homo sapiens
tattttatagtagtt

SEQ ID NO: 12115 - DNA, 15 bp, Homo sapiens
atattttatagtagt

SEQ ID NO: 12116 - DNA, 15 bp, Homo sapiens
tatattttatagtag

SEQ ID NO: 12117 - DNA, 15 bp, Homo sapiens
ttatattttatagta

SEQ ID NO: 12118 - DNA, 15 bp, Homo sapiens
cttatattttatagt

SEQ ID NO: 12119 - DNA, 15 bp, Homo sapiens
ccttatattttatag

SEQ ID NO: 12120 - DNA, 15 bp, Homo sapiens
tccttatattttata

SEQ ID NO: 12121 - DNA, 15 bp, Homo sapiens
ttccttatattttat

SEQ ID NO: 12122 - DNA, 15 bp, Homo sapiens
tttccttatatttta

SEQ ID NO: 12123 - DNA, 15 bp, Homo sapiens
ttttccttatatttt

SEQ ID NO: 12124 - DNA, 15 bp, Homo sapiens
attttccttatattt

SEQ ID NO: 12125 - DNA, 15 bp, Homo sapiens
tattttccttatatt

SEQ ID NO: 12126 - DNA, 15 bp, Homo sapiens
atattttccttatat

SEQ ID NO: 12127 - DNA, 15 bp, Homo sapiens
aatattttccttata

SEQ ID NO: 12128 - DNA, 15 bp, Homo sapiens
taatattttccttat

SEQ ID NO: 12129 - DNA, 15 bp, Homo sapiens
ttaatattttcctta

SEQ ID NO: 12130 - DNA, 15 bp, Homo sapiens
gttaatattttcctt

SEQ ID NO: 12131 - DNA, 15 bp, Homo sapiens
tgttaatattttcct

SEQ ID NO: 12132 - DNA, 15 bp, Homo sapiens
atgttaatattttcc

SEQ ID NO: 12133 - DNA, 15 bp, Homo sapiens
gatgttaatattttc

SEQ ID NO: 12134 - DNA, 15 bp, Homo sapiens
agatgttaatatttt

SEQ ID NO: 12135 - DNA, 15 bp, Homo sapiens
aagatgttaatattt

SEQ ID NO: 12136 - DNA, 15 bp, Homo sapiens
taagatgttaatatt

SEQ ID NO: 12137 - DNA, 15 bp, Homo sapiens
ctaagatgttaatat

SEQ ID NO: 12138 - DNA, 15 bp, Homo sapiens
tctaagatgttaata

SEQ ID NO: 12139 - DNA, 15 bp, Homo sapiens
atctaagatgttaat

SEQ ID NO: 12140 - DNA, 15 bp, Homo sapiens
catctaagatgttaa

SEQ ID NO: 12141 - DNA, 15 bp, Homo sapiens
tcatctaagatgtta

SEQ ID NO: 12142 - DNA, 15 bp, Homo sapiens
gtcatctaagatgtt

SEQ ID NO: 12143 - DNA, 15 bp, Homo sapiens
tgtcatctaagatgt

SEQ ID NO: 12144 - DNA, 15 bp, Homo sapiens
ttgtcatctaagatg

SEQ ID NO: 12145 - DNA, 15 bp, Homo sapiens
tttgtcatctaagat

SEQ ID NO: 12146 - DNA, 15 bp, Homo sapiens
ttttgtcatctaaga

SEQ ID NO: 12147 - DNA, 15 bp, Homo sapiens
cttttgtcatctaag

SEQ ID NO: 12148 - DNA, 15 bp, Homo sapiens
tcttttgtcatctaa

SEQ ID NO: 12149 - DNA, 15 bp, Homo sapiens
atcttttgtcatcta

SEQ ID NO: 12150 - DNA, 15 bp, Homo sapiens
gatcttttgtcatct

SEQ ID NO: 12151 - DNA, 15 bp, Homo sapiens
ggatcttttgtcatc

SEQ ID NO: 12152 - DNA, 15 bp, Homo sapiens
tggatcttttgtcat

SEQ ID NO: 12153 - DNA, 15 bp, Homo sapiens
atggatcttttgtca

SEQ ID NO: 12154 - DNA, 15 bp, Homo sapiens
tatggatcttttgtc

SEQ ID NO: 12155 - DNA, 15 bp, Homo sapiens
atatggatcttttgt

SEQ ID NO: 12156 - DNA, 15 bp, Homo sapiens
catatggatcttttg

SEQ ID NO: 12157 - DNA, 15 bp, Homo sapiens
ccatatggatctttt

SEQ ID NO: 12158 - DNA, 15 bp, Homo sapiens
gccatatggatcttt

SEQ ID NO: 12159 - DNA, 15 bp, Homo sapiens
agccatatggatctt

SEQ ID NO: 12160 - DNA, 15 bp, Homo sapiens
cagccatatggatct

SEQ ID NO: 12161 - DNA, 15 bp, Homo sapiens
ccagccatatggatc

SEQ ID NO: 12162 - DNA, 15 bp, Homo sapiens
gccagccatatggat

SEQ ID NO: 12163 - DNA, 15 bp, Homo sapiens
ggccagccatatgga

SEQ ID NO: 12164 - DNA, 15 bp, Homo sapiens
tggccagccatatgg

SEQ ID NO: 12165 - DNA, 15 bp, Homo sapiens
ctggccagccatatg

SEQ ID NO: 12166 - DNA, 15 bp, Homo sapiens
tctggccagccatat

SEQ ID NO: 12167 - DNA, 15 bp, Homo sapiens
ttctggccagccata

SEQ ID NO: 12168 - DNA, 15 bp, Homo sapiens
tttctggccagccat

SEQ ID NO: 12169 - DNA, 15 bp, Homo sapiens
ttttctggccagcca

SEQ ID NO: 12170 - DNA, 15 bp, Homo sapiens
attttctggccagcc

SEQ ID NO: 12171 - DNA, 15 bp, Homo sapiens
tattttctggccagc

SEQ ID NO: 12172 - DNA, 15 bp, Homo sapiens
atattttctggccag

SEQ ID NO: 12173 - DNA, 15 bp, Homo sapiens
gatattttctggcca

SEQ ID NO: 12174 - DNA, 15 bp, Homo sapiens
agatattttctggcc

SEQ ID NO: 12175 - DNA, 15 bp, Homo sapiens
cagatattttctggc

SEQ ID NO: 12176 - DNA, 15 bp, Homo sapiens
gcagatattttctgg

SEQ ID NO: 12177 - DNA, 15 bp, Homo sapiens
tgcagatattttctg

SEQ ID NO: 12178 - DNA, 15 bp, Homo sapiens
atgcagatattttct

SEQ ID NO: 12179 - DNA, 15 bp, Homo sapiens
gatgcagatattttc

SEQ ID NO: 12180 - DNA, 15 bp, Homo sapiens
tgatgcagatatttt

SEQ ID NO: 12181 - DNA, 15 bp, Homo sapiens
atgatgcagatattt

SEQ ID NO: 12182 - DNA, 15 bp, Homo sapiens
aatgatgcagatatt

SEQ ID NO: 12183 - DNA, 15 bp, Homo sapiens
aaatgatgcagatat

SEQ ID NO: 12184 - DNA, 15 bp, Homo sapiens
taaatgatgcagata

SEQ ID NO: 12185 - DNA, 15 bp, Homo sapiens
ttaaatgatgcagat

SEQ ID NO: 12186 - DNA, 15 bp, Homo sapiens
cttaaatgatgcaga

SEQ ID NO: 12187 - DNA, 15 bp, Homo sapiens
gcttaaatgatgcag

SEQ ID NO: 12188 - DNA, 15 bp, Homo sapiens
ggcttaaatgatgca

SEQ ID NO: 12189 - DNA, 15 bp, Homo sapiens
tggcttaaatgatgc

SEQ ID NO: 12190 - DNA, 15 bp, Homo sapiens
atggcttaaatgatg

SEQ ID NO: 12191 - DNA, 15 bp, Homo sapiens
aatggcttaaatgat

SEQ ID NO: 12192 - DNA, 15 bp, Homo sapiens
taatggcttaaatga

SEQ ID NO: 12193 - DNA, 15 bp, Homo sapiens
ctaatggcttaaatg

SEQ ID NO: 12194 - DNA, 15 bp, Homo sapiens
tctaatggcttaaat

SEQ ID NO: 12195 - DNA, 15 bp, Homo sapiens
ttctaatggcttaaa

SEQ ID NO: 12196 - DNA, 15 bp, Homo sapiens
attctaatggcttaa

SEQ ID NO: 12197 - DNA, 15 bp, Homo sapiens
cattctaatggctta

SEQ ID NO: 12198 - DNA, 15 bp, Homo sapiens
gcattctaatggctt

SEQ ID NO: 12199 - DNA, 15 bp, Homo sapiens
tgcattctaatggct

SEQ ID NO: 12200 - DNA, 15 bp, Homo sapiens
gtgcattctaatggc

SEQ ID NO: 12201 - DNA, 15 bp, Homo sapiens
ggtgcattctaatgg

SEQ ID NO: 12202 - DNA, 15 bp, Homo sapiens
aggtgcattctaatg

SEQ ID NO: 12203 - DNA, 15 bp, Homo sapiens
taggtgcattctaat

SEQ ID NO: 12204 - DNA, 15 bp, Homo sapiens
ataggtgcattctaa

SEQ ID NO: 12205 - DNA, 15 bp, Homo sapiens
tataggtgcattcta

SEQ ID NO: 12206 - DNA, 15 bp, Homo sapiens
atataggtgcattct

SEQ ID NO: 12207 - DNA, 15 bp, Homo sapiens
catataggtgcattc

SEQ ID NO: 12208 - DNA, 15 bp, Homo sapiens
ccatataggtgcatt

SEQ ID NO: 12209 - DNA, 15 bp, Homo sapiens
tccatataggtgcat

SEQ ID NO: 12210 - DNA, 15 bp, Homo sapiens
ttccatataggtgca

SEQ ID NO: 12211 - DNA, 15 bp, Homo sapiens
tttccatataggtgc

SEQ ID NO: 12212 - DNA, 15 bp, Homo sapiens
gtttccatataggtg

SEQ ID NO: 12213 - DNA, 15 bp, Homo sapiens
tgtttccatataggt

SEQ ID NO: 12214 - DNA, 15 bp, Homo sapiens
atgtttccatatagg

SEQ ID NO: 12215 - DNA, 15 bp, Homo sapiens
aatgtttccatatag

SEQ ID NO: 12216 - DNA, 15 bp, Homo sapiens
gaatgtttccatata

SEQ ID NO: 12217 - DNA, 15 bp, Homo sapiens
tgaatgtttccatat

SEQ ID NO: 12218 - DNA, 15 bp, Homo sapiens
ttgaatgtttccata

SEQ ID NO: 12219 - DNA, 15 bp, Homo sapiens
attgaatgtttccat

SEQ ID NO: 12220 - DNA, 15 bp, Homo sapiens
aattgaatgtttcca

SEQ ID NO: 12221 - DNA, 15 bp, Homo sapiens
aaattgaatgtttcc

SEQ ID NO: 12222 - DNA, 15 bp, Homo sapiens
caaattgaatgtttc

SEQ ID NO: 12223 - DNA, 15 bp, Homo sapiens
ccaaattgaatgttt

SEQ ID NO: 12224 - DNA, 15 bp, Homo sapiens
gccaaattgaatgtt

SEQ ID NO: 12225 - DNA, 15 bp, Homo sapiens
cgccaaattgaatgt

SEQ ID NO: 12226 - DNA, 15 bp, Homo sapiens
ccgccaaattgaatg

SEQ ID NO: 12227 - DNA, 15 bp, Homo sapiens
accgccaaattgaat

SEQ ID NO: 12228 - DNA, 15 bp, Homo sapiens
taccgccaaattgaa

SEQ ID NO: 12229 - DNA, 15 bp, Homo sapiens
gtaccgccaaattga

SEQ ID NO: 12230 - DNA, 15 bp, Homo sapiens
agtaccgccaaattg

SEQ ID NO: 12231 - DNA, 15 bp, Homo sapiens
cagtaccgccaaatt

SEQ ID NO: 12232 - DNA, 15 bp, Homo sapiens
acagtaccgccaaat

SEQ ID NO: 12233 - DNA, 15 bp, Homo sapiens
cacagtaccgccaaa

SEQ ID NO: 12234 - DNA, 15 bp, Homo sapiens
tcacagtaccgccaa

SEQ ID NO: 12235 - DNA, 15 bp, Homo sapiens
ttcacagtaccgcca

SEQ ID NO: 12236 - DNA, 15 bp, Homo sapiens
gttcacagtaccgcc

SEQ ID NO: 12237 - DNA, 15 bp, Homo sapiens
tgttcacagtaccgc

SEQ ID NO: 12238 - DNA, 15 bp, Homo sapiens
ttgttcacagtaccg

SEQ ID NO: 12239 - DNA, 15 bp, Homo sapiens
gttgttcacagtacc

SEQ ID NO: 12240 - DNA, 15 bp, Homo sapiens
tgttgttcacagtac

SEQ ID NO: 12241 - DNA, 15 bp, Homo sapiens
ctgttgttcacagta

SEQ ID NO: 12242 - DNA, 15 bp, Homo sapiens
cctgttgttcacagt

SEQ ID NO: 12243 - DNA, 15 bp, Homo sapiens
tcctgttgttcacag

SEQ ID NO: 12244 - DNA, 15 bp, Homo sapiens
gtcctgttgttcaca

SEQ ID NO: 12245 - DNA, 15 bp, Homo sapiens
agtcctgttgttcac

SEQ ID NO: 12246 - DNA, 15 bp, Homo sapiens
cagtcctgttgttca

SEQ ID NO: 12247 - DNA, 15 bp, Homo sapiens
acagtcctgttgttc

SEQ ID NO: 12248 - DNA, 15 bp, Homo sapiens
cacagtcctgttgtt

SEQ ID NO: 12249 - DNA, 15 bp, Homo sapiens
tcacagtcctgttgt

SEQ ID NO: 12250 - DNA, 15 bp, Homo sapiens
ttcacagtcctgttg

SEQ ID NO: 12251 - DNA, 15 bp, Homo sapiens
tttcacagtcctgtt

SEQ ID NO: 12252 - DNA, 15 bp, Homo sapiens
ttttcacagtcctgt

SEQ ID NO: 12253 - DNA, 15 bp, Homo sapiens
gttttcacagtcctg

SEQ ID NO: 12254 - DNA, 15 bp, Homo sapiens
tgttttcacagtcct

SEQ ID NO: 12255 - DNA, 15 bp, Homo sapiens
atgttttcacagtcc

SEQ ID NO: 12256 - DNA, 15 bp, Homo sapiens
gatgttttcacagtc

SEQ ID NO: 12257 - DNA, 15 bp, Homo sapiens
agatgttttcacagt

SEQ ID NO: 12258 - DNA, 15 bp, Homo sapiens
cagatgttttcacag

SEQ ID NO: 12259 - DNA, 15 bp, Homo sapiens
acagatgttttcaca

SEQ ID NO: 12260 - DNA, 15 bp, Homo sapiens
aacagatgttttcac

SEQ ID NO: 12261 - DNA, 15 bp, Homo sapiens
aaacagatgttttca

SEQ ID NO: 12262 - DNA, 15 bp, Homo sapiens
taaacagatgttttc

SEQ ID NO: 12263 - DNA, 15 bp, Homo sapiens
ataaacagatgtttt

SEQ ID NO: 12264 - DNA, 15 bp, Homo sapiens
gataaacagatgttt

SEQ ID NO: 12265 - DNA, 15 bp, Homo sapiens
agataaacagatgtt

SEQ ID NO: 12266 - DNA, 15 bp, Homo sapiens
gagataaacagatgt

SEQ ID NO: 12267 - DNA, 15 bp, Homo sapiens
ggagataaacagatg

SEQ ID NO: 12268 - DNA, 15 bp, Homo sapiens
tggagataaacagat

SEQ ID NO: 12269 - DNA, 15 bp, Homo sapiens
gtggagataaacaga

SEQ ID NO: 12270 - DNA, 15 bp, Homo sapiens
ggtggagataaacag

SEQ ID NO: 12271 - DNA, 15 bp, Homo sapiens
gggtggagataaaca

SEQ ID NO: 12272 - DNA, 15 bp, Homo sapiens
cgggtggagataaac

SEQ ID NO: 12273 - DNA, 15 bp, Homo sapiens
acgggtggagataaa

SEQ ID NO: 12274 - DNA, 15 bp, Homo sapiens
aacgggtggagataa

SEQ ID NO: 12275 - DNA, 15 bp, Homo sapiens
aaacgggtggagata

SEQ ID NO: 12276 - DNA, 15 bp, Homo sapiens
aaaacgggtggagat

SEQ ID NO: 12277 - DNA, 15 bp, Homo sapiens
gaaaacgggtggaga

SEQ ID NO: 12278 - DNA, 15 bp, Homo sapiens
tgaaaacgggtggag

SEQ ID NO: 12279 - DNA, 15 bp, Homo sapiens
gtgaaaacgggtgga

SEQ ID NO: 12280 - DNA, 15 bp, Homo sapiens
agtgaaaacgggtgg

SEQ ID NO: 12281 - DNA, 15 bp, Homo sapiens
tagtgaaaacgggtg

SEQ ID NO: 12282 - DNA, 15 bp, Homo sapiens
ttagtgaaaacgggt

SEQ ID NO: 12283 - DNA, 15 bp, Homo sapiens
tttagtgaaaacggg

SEQ ID NO: 12284 - DNA, 15 bp, Homo sapiens
gtttagtgaaaacgg

SEQ ID NO: 12285 - DNA, 15 bp, Homo sapiens
tgtttagtgaaaacg

SEQ ID NO: 12286 - DNA, 15 bp, Homo sapiens
gtgtttagtgaaaac

SEQ ID NO: 12287 - DNA, 15 bp, Homo sapiens
agtgtttagtgaaaa

SEQ ID NO: 12288 - DNA, 15 bp, Homo sapiens
cagtgtttagtgaaa

SEQ ID NO: 12289 - DNA, 15 bp, Homo sapiens
tcagtgtttagtgaa

SEQ ID NO: 12290 - DNA, 15 bp, Homo sapiens
atcagtgtttagtga

SEQ ID NO: 12291 - DNA, 15 bp, Homo sapiens
aatcagtgtttagtg

SEQ ID NO: 12292 - DNA, 15 bp, Homo sapiens
gaatcagtgtttagt

SEQ ID NO: 12293 - DNA, 15 bp, Homo sapiens
ggaatcagtgtttag

SEQ ID NO: 12294 - DNA, 15 bp, Homo sapiens
aggaatcagtgttta

SEQ ID NO: 12295 - DNA, 15 bp, Homo sapiens
taggaatcagtgttt

SEQ ID NO: 12296 - DNA, 15 bp, Homo sapiens
ataggaatcagtgtt

SEQ ID NO: 12297 - DNA, 15 bp, Homo sapiens
tataggaatcagtgt

SEQ ID NO: 12298 - DNA, 15 bp, Homo sapiens
ctataggaatcagtg

SEQ ID NO: 12299 - DNA, 15 bp, Homo sapiens
tctataggaatcagt

SEQ ID NO: 12300 - DNA, 15 bp, Homo sapiens
ttctataggaatcag

SEQ ID NO: 12301 - DNA, 15 bp, Homo sapiens
cttctataggaatca

SEQ ID NO: 12302 - DNA, 15 bp, Homo sapiens
tcttctataggaatc

SEQ ID NO: 12303 - DNA, 15 bp, Homo sapiens
gtcttctataggaat

SEQ ID NO: 12304 - DNA, 15 bp, Homo sapiens
tgtcttctataggaa

SEQ ID NO: 12305 - DNA, 15 bp, Homo sapiens
atgtcttctatagga

SEQ ID NO: 12306 - DNA, 15 bp, Homo sapiens
catgtcttctatagg

SEQ ID NO: 12307 - DNA, 15 bp, Homo sapiens
gcatgtcttctatag

SEQ ID NO: 12308 - DNA, 15 bp, Homo sapiens
tgcatgtcttctata

SEQ ID NO: 12309 - DNA, 15 bp, Homo sapiens
ttgcatgtcttctat

SEQ ID NO: 12310 - DNA, 15 bp, Homo sapiens
tttgcatgtcttcta

SEQ ID NO: 12311 - DNA, 15 bp, Homo sapiens
gtttgcatgtcttct

SEQ ID NO: 12312 - DNA, 15 bp, Homo sapiens
agtttgcatgtcttc

SEQ ID NO: 12313 - DNA, 15 bp, Homo sapiens
gagtttgcatgtctt

SEQ ID NO: 12314 - DNA, 15 bp, Homo sapiens
tgagtttgcatgtct

SEQ ID NO: 12315 - DNA, 15 bp, Homo sapiens
ttgagtttgcatgtc

SEQ ID NO: 12316 - DNA, 15 bp, Homo sapiens
tttgagtttgcatgt

SEQ ID NO: 12317 - DNA, 15 bp, Homo sapiens
atttgagtttgcatg

SEQ ID NO: 12318 - DNA, 15 bp, Homo sapiens
tatttgagtttgcat

SEQ ID NO: 12319 - DNA, 15 bp, Homo sapiens
gtatttgagtttgca

SEQ ID NO: 12320 - DNA, 15 bp, Homo sapiens
ggtatttgagtttgc

SEQ ID NO: 12321 - DNA, 15 bp, Homo sapiens
tggtatttgagtttg

SEQ ID NO: 12322 - DNA, 15 bp, Homo sapiens
ttggtatttgagttt

SEQ ID NO: 12323 - DNA, 15 bp, Homo sapiens
gttggtatttgagtt

SEQ ID NO: 12324 - DNA, 15 bp, Homo sapiens
tgttggtatttgagt

SEQ ID NO: 12325 - DNA, 15 bp, Homo sapiens
atgttggtatttgag

SEQ ID NO: 12326 - DNA, 15 bp, Homo sapiens
tatgttggtatttga

SEQ ID NO: 12327 - DNA, 15 bp, Homo sapiens
atatgttggtatttg

SEQ ID NO: 12328 - DNA, 15 bp, Homo sapiens
aatatgttggtattt

SEQ ID NO: 12329 - DNA, 15 bp, Homo sapiens
aaatatgttggtatt

SEQ ID NO: 12330 - DNA, 15 bp, Homo sapiens
gaaatatgttggtat

SEQ ID NO: 12331 - DNA, 15 bp, Homo sapiens
tgaaatatgttggta

SEQ ID NO: 12332 - DNA, 15 bp, Homo sapiens
atgaaatatgttggt

SEQ ID NO: 12333 - DNA, 15 bp, Homo sapiens
gatgaaatatgttgg

SEQ ID NO: 12334 - DNA, 15 bp, Homo sapiens
agatgaaatatgttg

SEQ ID NO: 12335 - DNA, 15 bp, Homo sapiens
tagatgaaatatgtt

SEQ ID NO: 12336 - DNA, 15 bp, Homo sapiens
ttagatgaaatatgt

SEQ ID NO: 12337 - DNA, 15 bp, Homo sapiens
cttagatgaaatatg

SEQ ID NO: 12338 - DNA, 15 bp, Homo sapiens
gcttagatgaaatat

SEQ ID NO: 12339 - DNA, 15 bp, Homo sapiens
tgcttagatgaaata

SEQ ID NO: 12340 - DNA, 15 bp, Homo sapiens
atgcttagatgaaat

SEQ ID NO: 12341 - DNA, 15 bp, Homo sapiens
tatgcttagatgaaa

SEQ ID NO: 12342 - DNA, 15 bp, Homo sapiens
ctatgcttagatgaa

SEQ ID NO: 12343 - DNA, 15 bp, Homo sapiens
cctatgcttagatga

SEQ ID NO: 12344 - DNA, 15 bp, Homo sapiens
tcctatgcttagatg

SEQ ID NO: 12345 - DNA, 15 bp, Homo sapiens
gtcctatgcttagat

SEQ ID NO: 12346 - DNA, 15 bp, Homo sapiens
tgtcctatgcttaga

SEQ ID NO: 12347 - DNA, 15 bp, Homo sapiens
ctgtcctatgcttag

SEQ ID NO: 12348 - DNA, 15 bp, Homo sapiens
cctgtcctatgctta

SEQ ID NO: 12349 - DNA, 15 bp, Homo sapiens
ccctgtcctatgctt

SEQ ID NO: 12350 - DNA, 15 bp, Homo sapiens
tccctgtcctatgct

SEQ ID NO: 12351 - DNA, 15 bp, Homo sapiens
gtccctgtcctatgc

SEQ ID NO: 12352 - DNA, 15 bp, Homo sapiens
agtccctgtcctatg

SEQ ID NO: 12353 - DNA, 15 bp, Homo sapiens
gagtccctgtcctat

SEQ ID NO: 12354 - DNA, 15 bp, Homo sapiens
ggagtccctgtccta

SEQ ID NO: 12355 - DNA, 15 bp, Homo sapiens
tggagtccctgtcct

SEQ ID NO: 12356 - DNA, 15 bp, Homo sapiens
atggagtccctgtcc

SEQ ID NO: 12357 - DNA, 15 bp, Homo sapiens
aatggagtccctgtc

SEQ ID NO: 12358 - DNA, 15 bp, Homo sapiens
aaatggagtccctgt

SEQ ID NO: 12359 - DNA, 15 bp, Homo sapiens
aaaatggagtccctg

SEQ ID NO: 12360 - DNA, 15 bp, Homo sapiens
aaaaatggagtccct

SEQ ID NO: 12361 - DNA, 15 bp, Homo sapiens
taaaaatggagtccc

SEQ ID NO: 12362 - DNA, 15 bp, Homo sapiens
gtaaaaatggagtcc

SEQ ID NO: 12363 - DNA, 15 bp, Homo sapiens
tgtaaaaatggagtc

SEQ ID NO: 12364 - DNA, 15 bp, Homo sapiens
atgtaaaaatggagt

SEQ ID NO: 12365 - DNA, 15 bp, Homo sapiens
tatgtaaaaatggag

SEQ ID NO: 12366 - DNA, 15 bp, Homo sapiens
ctatgtaaaaatgga

SEQ ID NO: 12367 - DNA, 15 bp, Homo sapiens
actatgtaaaaatgg

SEQ ID NO: 12368 - DNA, 15 bp, Homo sapiens
aactatgtaaaaatg

SEQ ID NO: 12369 - DNA, 15 bp, Homo sapiens
caactatgtaaaaat

SEQ ID NO: 12370 - DNA, 15 bp, Homo sapiens
gcaactatgtaaaaa

SEQ ID NO: 12371 - DNA, 15 bp, Homo sapiens
agcaactatgtaaaa

SEQ ID NO: 12372 - DNA, 15 bp, Homo sapiens
tagcaactatgtaaa

SEQ ID NO: 12373 - DNA, 15 bp, Homo sapiens
atagcaactatgtaa

SEQ ID NO: 12374 - DNA, 15 bp, Homo sapiens
tatagcaactatgta

SEQ ID NO: 12375 - DNA, 15 bp, Homo sapiens
ttatagcaactatgt

SEQ ID NO: 12376 - DNA, 15 bp, Homo sapiens
attatagcaactatg

SEQ ID NO: 12377 - DNA, 15 bp, Homo sapiens
tattatagcaactat

SEQ ID NO: 12378 - DNA, 15 bp, Homo sapiens
ttattatagcaacta

SEQ ID NO: 12379 - DNA, 15 bp, Homo sapiens
tttattatagcaact

SEQ ID NO: 12380 - DNA, 15 bp, Homo sapiens
atttattatagcaac

SEQ ID NO: 12381 - DNA, 15 bp, Homo sapiens
tatttattatagcaa

SEQ ID NO: 12382 - DNA, 15 bp, Homo sapiens
gtatttattatagca

SEQ ID NO: 12383 - DNA, 15 bp, Homo sapiens
tgtatttattatagc

SEQ ID NO: 12384 - DNA, 15 bp, Homo sapiens
ttgtatttattatag

SEQ ID NO: 12385 - DNA, 15 bp, Homo sapiens
attgtatttattata

SEQ ID NO: 12386 - DNA, 15 bp, Homo sapiens
tattgtatttattat

SEQ ID NO: 12387 - DNA, 15 bp, Homo sapiens
gtattgtatttatta

SEQ ID NO: 12388 - DNA, 15 bp, Homo sapiens
tgtattgtatttatt

SEQ ID NO: 12389 - DNA, 15 bp, Homo sapiens
ctgtattgtatttat

SEQ ID NO: 12390 - DNA, 15 bp, Homo sapiens
actgtattgtattta

SEQ ID NO: 12391 - DNA, 15 bp, Homo sapiens
tactgtattgtattt

SEQ ID NO: 12392 - DNA, 15 bp, Homo sapiens
atactgtattgtatt

SEQ ID NO: 12393 - DNA, 15 bp, Homo sapiens
aatactgtattgtat

SEQ ID NO: 12394 - DNA, 15 bp, Homo sapiens
aaatactgtattgta

SEQ ID NO: 12395 - DNA, 15 bp, Homo sapiens
caaatactgtattgt

SEQ ID NO: 12396 - DNA, 15 bp, Homo sapiens
acaaatactgtattg

SEQ ID NO: 12397 - DNA, 15 bp, Homo sapiens
aacaaatactgtatt

SEQ ID NO: 12398 - DNA, 15 bp, Homo sapiens
caacaaatactgtat

SEQ ID NO: 12399 - DNA, 15 bp, Homo sapiens
ccaacaaatactgta

SEQ ID NO: 12400 - DNA, 15 bp, Homo sapiens
accaacaaatactgt

SEQ ID NO: 12401 - DNA, 15 bp, Homo sapiens
caccaacaaatactg

SEQ ID NO: 12402 - DNA, 15 bp, Homo sapiens
tcaccaacaaatact

SEQ ID NO: 12403 - DNA, 15 bp, Homo sapiens
atcaccaacaaatac

SEQ ID NO: 12404 - DNA, 15 bp, Homo sapiens
tatcaccaacaaata

SEQ ID NO: 12405 - DNA, 15 bp, Homo sapiens
ctatcaccaacaaat

SEQ ID NO: 12406 - DNA, 15 bp, Homo sapiens
cctatcaccaacaaa

SEQ ID NO: 12407 - DNA, 15 bp, Homo sapiens
tcctatcaccaacaa

SEQ ID NO: 12408 - DNA, 15 bp, Homo sapiens
atcctatcaccaaca

SEQ ID NO: 12409 - DNA, 15 bp, Homo sapiens
aatcctatcaccaac

SEQ ID NO: 12410 - DNA, 15 bp, Homo sapiens
aaatcctatcaccaa

SEQ ID NO: 12411 - DNA, 15 bp, Homo sapiens
aaaatcctatcacca

SEQ ID NO: 12412 - DNA, 15 bp, Homo sapiens
caaaatcctatcacc

SEQ ID NO: 12413 - DNA, 15 bp, Homo sapiens
ccaaaatcctatcac

SEQ ID NO: 12414 - DNA, 15 bp, Homo sapiens
tccaaaatcctatca

SEQ ID NO: 12415 - DNA, 15 bp, Homo sapiens
ttccaaaatcctatc

SEQ ID NO: 12416 - DNA, 15 bp, Homo sapiens
cttccaaaatcctat

SEQ ID NO: 12417 - DNA, 15 bp, Homo sapiens
tcttccaaaatccta

SEQ ID NO: 12418 - DNA, 15 bp, Homo sapiens
atcttccaaaatcct

SEQ ID NO: 12419 - DNA, 15 bp, Homo sapiens
catcttccaaaatcc

SEQ ID NO: 12420 - DNA, 15 bp, Homo sapiens
gcatcttccaaaatc

SEQ ID NO: 12421 - DNA, 15 bp, Homo sapiens
agcatcttccaaaat

SEQ ID NO: 12422 - DNA, 15 bp, Homo sapiens
gagcatcttccaaaa

SEQ ID NO: 12423 - DNA, 15 bp, Homo sapiens
agagcatcttccaaa

SEQ ID NO: 12424 - DNA, 15 bp, Homo sapiens
cagagcatcttccaa

SEQ ID NO: 12425 - DNA, 15 bp, Homo sapiens
ccagagcatcttcca

SEQ ID NO: 12426 - DNA, 15 bp, Homo sapiens
tccagagcatcttcc

SEQ ID NO: 12427 - DNA, 15 bp, Homo sapiens
atccagagcatcttc

SEQ ID NO: 12428 - DNA, 15 bp, Homo sapiens
tatccagagcatctt

SEQ ID NO: 12429 - DNA, 15 bp, Homo sapiens
ctatccagagcatct

SEQ ID NO: 12430 - DNA, 15 bp, Homo sapiens
gctatccagagcatc

SEQ ID NO: 12431 - DNA, 15 bp, Homo sapiens
agctatccagagcat

SEQ ID NO: 12432 - DNA, 15 bp, Homo sapiens
cagctatccagagca

SEQ ID NO: 12433 - DNA, 15 bp, Homo sapiens
ccagctatccagagc

SEQ ID NO: 12434 - DNA, 15 bp, Homo sapiens
tccagctatccagag

SEQ ID NO: 12435 - DNA, 15 bp, Homo sapiens
ttccagctatccaga

SEQ ID NO: 12436 - DNA, 15 bp, Homo sapiens
tttccagctatccag

SEQ ID NO: 12437 - DNA, 15 bp, Homo sapiens
ttttccagctatcca

SEQ ID NO: 12438 - DNA, 15 bp, Homo sapiens
tttttccagctatcc

SEQ ID NO: 12439 - DNA, 15 bp, Homo sapiens
atttttccagctatc

SEQ ID NO: 12440 - DNA, 15 bp, Homo sapiens
tatttttccagctat

SEQ ID NO: 12441 - DNA, 15 bp, Homo sapiens
ttatttttccagcta

SEQ ID NO: 12442 - DNA, 15 bp, Homo sapiens
cttatttttccagct

SEQ ID NO: 12443 - DNA, 15 bp, Homo sapiens
acttatttttccagc

SEQ ID NO: 12444 - DNA, 15 bp, Homo sapiens
tacttatttttccag

SEQ ID NO: 12445 - DNA, 15 bp, Homo sapiens
ttacttatttttcca

SEQ ID NO: 12446 - DNA, 15 bp, Homo sapiens
tttacttatttttcc

SEQ ID NO: 12447 - DNA, 15 bp, Homo sapiens
ttttacttatttttc

SEQ ID NO: 12448 - DNA, 15 bp, Homo sapiens
attttacttattttt

SEQ ID NO: 12449 - DNA, 15 bp, Homo sapiens
cattttacttatttt

SEQ ID NO: 12450 - DNA, 15 bp, Homo sapiens
acattttacttattt

SEQ ID NO: 12451 - DNA, 15 bp, Homo sapiens
aacattttacttatt

SEQ ID NO: 12452 - DNA, 15 bp, Homo sapiens
aaacattttacttat

SEQ ID NO: 12453 - DNA, 15 bp, Homo sapiens
gaaacattttactta

SEQ ID NO: 12454 - DNA, 15 bp, Homo sapiens
agaaacattttactt

SEQ ID NO: 12455 - DNA, 15 bp, Homo sapiens
gagaaacattttact

SEQ ID NO: 12456 - DNA, 15 bp, Homo sapiens
agagaaacattttac

SEQ ID NO: 12457 - DNA, 15 bp, Homo sapiens
aagagaaacatttta

SEQ ID NO: 12458 - DNA, 15 bp, Homo sapiens
aaagagaaacatttt

SEQ ID NO: 12459 - DNA, 15 bp, Homo sapiens
caaagagaaacattt

SEQ ID NO: 12460 - DNA, 15 bp, Homo sapiens
acaaagagaaacatt

SEQ ID NO: 12461 - DNA, 15 bp, Homo sapiens
tacaaagagaaacat

SEQ ID NO: 12462 - DNA, 15 bp, Homo sapiens
atacaaagagaaaca

SEQ ID NO: 12463 - DNA, 15 bp, Homo sapiens
aatacaaagagaaac

SEQ ID NO: 12464 - DNA, 15 bp, Homo sapiens
taatacaaagagaaa

SEQ ID NO: 12465 - DNA, 15 bp, Homo sapiens
ttaatacaaagagaa

SEQ ID NO: 12466 - DNA, 15 bp, Homo sapiens
tttaatacaaagaga

SEQ ID NO: 12467 - DNA, 15 bp, Homo sapiens
gtttaatacaaagag

SEQ ID NO: 12468 - DNA, 15 bp, Homo sapiens
agtttaatacaaaga

SEQ ID NO: 12469 - DNA, 15 bp, Homo sapiens
aagtttaatacaaag

SEQ ID NO: 12470 - DNA, 15 bp, Homo sapiens
caagtttaatacaaa

SEQ ID NO: 12471 - DNA, 15 bp, Homo sapiens
tcaagtttaatacaa

SEQ ID NO: 12472 - DNA, 15 bp, Homo sapiens
atcaagtttaataca

SEQ ID NO: 12473 - DNA, 15 bp, Homo sapiens
tatcaagtttaatac

SEQ ID NO: 12474 - DNA, 15 bp, Homo sapiens
ttatcaagtttaata

SEQ ID NO: 12475 - DNA, 15 bp, Homo sapiens
tttatcaagtttaat

SEQ ID NO: 12476 - DNA, 15 bp, Homo sapiens
ttttatcaagtttaa

SEQ ID NO: 12477 - DNA, 15 bp, Homo sapiens
tttttatcaagttta

SEQ ID NO: 12478 - DNA, 15 bp, Homo sapiens
ttttttatcaagttt

SEQ ID NO: 12479 - DNA, 15 bp, Homo sapiens
attttttatcaagtt

SEQ ID NO: 12480 - DNA, 15 bp, Homo sapiens
tattttttatcaagt

SEQ ID NO: 12481 - DNA, 15 bp, Homo sapiens
ttattttttatcaag

SEQ ID NO: 12482 - DNA, 15 bp, Homo sapiens
attattttttatcaa

SEQ ID NO: 12483 - DNA, 15 bp, Homo sapiens
tattattttttatca

SEQ ID NO: 12484 - DNA, 15 bp, Homo sapiens
ctattattttttatc

SEQ ID NO: 12485 - DNA, 15 bp, Homo sapiens
gctattattttttat

SEQ ID NO: 12486 - DNA, 15 bp, Homo sapiens
agctattatttttta

SEQ ID NO: 12487 - DNA, 15 bp, Homo sapiens
tagctattatttttt

SEQ ID NO: 12488 - DNA, 15 bp, Homo sapiens
ttagctattattttt

SEQ ID NO: 12489 - DNA, 15 bp, Homo sapiens
gttagctattatttt

SEQ ID NO: 12490 - DNA, 15 bp, Homo sapiens
tgttagctattattt

SEQ ID NO: 12491 - DNA, 15 bp, Homo sapiens
atgttagctattatt

SEQ ID NO: 12492 - DNA, 15 bp, Homo sapiens
aatgttagctattat

SEQ ID NO: 12493 - DNA, 15 bp, Homo sapiens
aaatgttagctatta

SEQ ID NO: 12494 - DNA, 15 bp, Homo sapiens
taaatgttagctatt

SEQ ID NO: 12495 - DNA, 15 bp, Homo sapiens
ataaatgttagctat

SEQ ID NO: 12496 - DNA, 15 bp, Homo sapiens
aataaatgttagcta

SEQ ID NO: 12497 - DNA, 15 bp, Homo sapiens
taataaatgttagct

SEQ ID NO: 12498 - DNA, 15 bp, Homo sapiens
ttaataaatgttagc

SEQ ID NO: 12499 - DNA, 15 bp, Homo sapiens
attaataaatgttag

SEQ ID NO: 12500 - DNA, 15 bp, Homo sapiens
cattaataaatgtta

SEQ ID NO: 12501 - DNA, 15 bp, Homo sapiens
ccattaataaatgtt

SEQ ID NO: 12502 - DNA, 15 bp, Homo sapiens
accattaataaatgt

SEQ ID NO: 12503 - DNA, 15 bp, Homo sapiens
caccattaataaatg

SEQ ID NO: 12504 - DNA, 15 bp, Homo sapiens
tcaccattaataaat

SEQ ID NO: 12505 - DNA, 15 bp, Homo sapiens
ctcaccattaataaa

SEQ ID NO: 12506 - DNA, 15 bp, Homo sapiens
cctcaccattaataa

SEQ ID NO: 12507 - DNA, 15 bp, Homo sapiens
acctcaccattaata

SEQ ID NO: 12508 - DNA, 15 bp, Homo sapiens
tacctcaccattaat

SEQ ID NO: 12509 - DNA, 15 bp, Homo sapiens
ttacctcaccattaa

SEQ ID NO: 12510 - DNA, 15 bp, Homo sapiens
tttacctcaccatta

SEQ ID NO: 12511 - DNA, 15 bp, Homo sapiens
atttacctcaccatt

SEQ ID NO: 12512 - DNA, 15 bp, Homo sapiens
tatttacctcaccat

SEQ ID NO: 12513 - DNA, 15 bp, Homo sapiens
ttatttacctcacca

SEQ ID NO: 12514 - DNA, 15 bp, Homo sapiens
attatttacctcacc

SEQ ID NO: 12515 - DNA, 15 bp, Homo sapiens
aattatttacctcac

SEQ ID NO: 12516 - DNA, 15 bp, Homo sapiens
aaattatttacctca

SEQ ID NO: 12517 - DNA, 15 bp, Homo sapiens
caaattatttacctc

SEQ ID NO: 12518 - DNA, 15 bp, Homo sapiens
tcaaattatttacct

SEQ ID NO: 12519 - DNA, 15 bp, Homo sapiens
atcaaattatttacc

SEQ ID NO: 12520 - DNA, 15 bp, Homo sapiens
aatcaaattatttac

SEQ ID NO: 12521 - DNA, 15 bp, Homo sapiens
taatcaaattattta

SEQ ID NO: 12522 - DNA, 15 bp, Homo sapiens
ataatcaaattattt

SEQ ID NO: 12523 - DNA, 15 bp, Homo sapiens
gataatcaaattatt

SEQ ID NO: 12524 - DNA, 15 bp, Homo sapiens
ggataatcaaattat

SEQ ID NO: 12525 - DNA, 15 bp, Homo sapiens
tggataatcaaatta

SEQ ID NO: 12526 - DNA, 15 bp, Homo sapiens
gtggataatcaaatt

SEQ ID NO: 12527 - DNA, 15 bp, Homo sapiens
ggtggataatcaaat

SEQ ID NO: 12528 - DNA, 15 bp, Homo sapiens
tggtggataatcaaa

SEQ ID NO: 12529 - DNA, 15 bp, Homo sapiens
atggtggataatcaa

SEQ ID NO: 12530 - DNA, 15 bp, Homo sapiens
aatggtggataatca

SEQ ID NO: 12531 - DNA, 15 bp, Homo sapiens
aaatggtggataatc

SEQ ID NO: 12532 - DNA, 15 bp, Homo sapiens
taaatggtggataat

SEQ ID NO: 12533 - DNA, 15 bp, Homo sapiens
ataaatggtggataa

SEQ ID NO: 12534 - DNA, 15 bp, Homo sapiens
tataaatggtggata

SEQ ID NO: 12535 - DNA, 15 bp, Homo sapiens
ctataaatggtggat

SEQ ID NO: 12536 - DNA, 15 bp, Homo sapiens
gctataaatggtgga

SEQ ID NO: 12537 - DNA, 15 bp, Homo sapiens
agctataaatggtgg

SEQ ID NO: 12538 - DNA, 15 bp, Homo sapiens
cagctataaatggtg

SEQ ID NO: 12539 - DNA, 15 bp, Homo sapiens
tcagctataaatggt

SEQ ID NO: 12540 - DNA, 15 bp, Homo sapiens
ctcagctataaatgg

SEQ ID NO: 12541 - DNA, 15 bp, Homo sapiens
cctcagctataaatg

SEQ ID NO: 12542 - DNA, 15 bp, Homo sapiens
tcctcagctataaat

SEQ ID NO: 12543 - DNA, 15 bp, Homo sapiens
ttcctcagctataaa

SEQ ID NO: 12544 - DNA, 15 bp, Homo sapiens
tttcctcagctataa

SEQ ID NO: 12545 - DNA, 15 bp, Homo sapiens
gtttcctcagctata

SEQ ID NO: 12546 - DNA, 15 bp, Homo sapiens
agtttcctcagctat

SEQ ID NO: 12547 - DNA, 15 bp, Homo sapiens
cagtttcctcagcta

SEQ ID NO: 12548 - DNA, 15 bp, Homo sapiens
tcagtttcctcagct

SEQ ID NO: 12549 - DNA, 15 bp, Homo sapiens
ctcagtttcctcagc

SEQ ID NO: 12550 - DNA, 15 bp, Homo sapiens
cctcagtttcctcag

SEQ ID NO: 12551 - DNA, 15 bp, Homo sapiens
gcctcagtttcctca

SEQ ID NO: 12552 - DNA, 15 bp, Homo sapiens
ggcctcagtttcctc

SEQ ID NO: 12553 - DNA, 15 bp, Homo sapiens
gggcctcagtttcct

SEQ ID NO: 12554 - DNA, 15 bp, Homo sapiens
tgggcctcagtttcc

SEQ ID NO: 12555 - DNA, 15 bp, Homo sapiens
ctgggcctcagtttc

SEQ ID NO: 12556 - DNA, 15 bp, Homo sapiens
tctgggcctcagttt

SEQ ID NO: 12557 - DNA, 15 bp, Homo sapiens
ctctgggcctcagtt

SEQ ID NO: 12558 - DNA, 15 bp, Homo sapiens
tctctgggcctcagt

SEQ ID NO: 12559 - DNA, 15 bp, Homo sapiens
ctctctgggcctcag

SEQ ID NO: 12560 - DNA, 15 bp, Homo sapiens
actctctgggcctca

SEQ ID NO: 12561 - DNA, 15 bp, Homo sapiens
aactctctgggcctc

SEQ ID NO: 12562 - DNA, 15 bp, Homo sapiens
aaactctctgggcct

SEQ ID NO: 12563 - DNA, 15 bp, Homo sapiens
gaaactctctgggcc

SEQ ID NO: 12564 - DNA, 15 bp, Homo sapiens
cgaaactctctgggc

SEQ ID NO: 12565 - DNA, 15 bp, Homo sapiens
ccgaaactctctggg

SEQ ID NO: 12566 - DNA, 15 bp, Homo sapiens
accgaaactctctgg

SEQ ID NO: 12567 - DNA, 15 bp, Homo sapiens
caccgaaactctctg

SEQ ID NO: 12568 - DNA, 15 bp, Homo sapiens
ccaccgaaactctct

SEQ ID NO: 12569 - DNA, 15 bp, Homo sapiens
tccaccgaaactctc

SEQ ID NO: 12570 - DNA, 15 bp, Homo sapiens
atccaccgaaactct

SEQ ID NO: 12571 - DNA, 15 bp, Homo sapiens
aatccaccgaaactc

SEQ ID NO: 12572 - DNA, 15 bp, Homo sapiens
gaatccaccgaaact

SEQ ID NO: 12573 - DNA, 15 bp, Homo sapiens
ggaatccaccgaaac

SEQ ID NO: 12574 - DNA, 15 bp, Homo sapiens
gggaatccaccgaaa

SEQ ID NO: 12575 - DNA, 15 bp, Homo sapiens
agggaatccaccgaa

SEQ ID NO: 12576 - DNA, 15 bp, Homo sapiens
tagggaatccaccga

SEQ ID NO: 12577 - DNA, 15 bp, Homo sapiens
ttagggaatccaccg

SEQ ID NO: 12578 - DNA, 15 bp, Homo sapiens
cttagggaatccacc

SEQ ID NO: 12579 - DNA, 15 bp, Homo sapiens
tcttagggaatccac

SEQ ID NO: 12580 - DNA, 15 bp, Homo sapiens
atcttagggaatcca

SEQ ID NO: 12581 - DNA, 15 bp, Homo sapiens
gatcttagggaatcc

SEQ ID NO: 12582 - DNA, 15 bp, Homo sapiens
tgatcttagggaatc

SEQ ID NO: 12583 - DNA, 15 bp, Homo sapiens
gtgatcttagggaat

SEQ ID NO: 12584 - DNA, 15 bp, Homo sapiens
tgtgatcttagggaa

SEQ ID NO: 12585 - DNA, 15 bp, Homo sapiens
atgtgatcttaggga

SEQ ID NO: 12586 - DNA, 15 bp, Homo sapiens
tatgtgatcttaggg

SEQ ID NO: 12587 - DNA, 15 bp, Homo sapiens
gtatgtgatcttagg

SEQ ID NO: 12588 - DNA, 15 bp, Homo sapiens
ggtatgtgatcttag

SEQ ID NO: 12589 - DNA, 15 bp, Homo sapiens
gggtatgtgatctta

SEQ ID NO: 12590 - DNA, 15 bp, Homo sapiens
tgggtatgtgatctt

SEQ ID NO: 12591 - DNA, 15 bp, Homo sapiens
atgggtatgtgatct

SEQ ID NO: 12592 - DNA, 15 bp, Homo sapiens
aatgggtatgtgatc

SEQ ID NO: 12593 - DNA, 15 bp, Homo sapiens
taatgggtatgtgat

SEQ ID NO: 12594 - DNA, 15 bp, Homo sapiens
ataatgggtatgtga

SEQ ID NO: 12595 - DNA, 15 bp, Homo sapiens
cataatgggtatgtg

SEQ ID NO: 12596 - DNA, 15 bp, Homo sapiens
acataatgggtatgt

SEQ ID NO: 12597 - DNA, 15 bp, Homo sapiens
cacataatgggtatg

SEQ ID NO: 12598 - DNA, 15 bp, Homo sapiens
ccacataatgggtat

SEQ ID NO: 12599 - DNA, 15 bp, Homo sapiens
accacataatgggta

SEQ ID NO: 12600 - DNA, 15 bp, Homo sapiens
caccacataatgggt

SEQ ID NO: 12601 - DNA, 15 bp, Homo sapiens
ccaccacataatggg

SEQ ID NO: 12602 - DNA, 15 bp, Homo sapiens
tccaccacataatgg

SEQ ID NO: 12603 - DNA, 15 bp, Homo sapiens
ctccaccacataatg

SEQ ID NO: 12604 - DNA, 15 bp, Homo sapiens
tctccaccacataat

SEQ ID NO: 12605 - DNA, 15 bp, Homo sapiens
ctctccaccacataa

SEQ ID NO: 12606 - DNA, 15 bp, Homo sapiens
cctctccaccacata

SEQ ID NO: 12607 - DNA, 15 bp, Homo sapiens
ccctctccaccacat

SEQ ID NO: 12608 - DNA, 15 bp, Homo sapiens
tccctctccaccaca

SEQ ID NO: 12609 - DNA, 15 bp, Homo sapiens
ttccctctccaccac

SEQ ID NO: 12610 - DNA, 15 bp, Homo sapiens
attccctctccacca

SEQ ID NO: 12611 - DNA, 15 bp, Homo sapiens
tattccctctccacc

SEQ ID NO: 12612 - DNA, 15 bp, Homo sapiens
atattccctctccac

SEQ ID NO: 12613 - DNA, 15 bp, Homo sapiens
catattccctctcca

SEQ ID NO: 12614 - DNA, 15 bp, Homo sapiens
tcatattccctctcc

SEQ ID NO: 12615 - DNA, 15 bp, Homo sapiens
ttcatattccctctc

SEQ ID NO: 12616 - DNA, 15 bp, Homo sapiens
gttcatattccctct

SEQ ID NO: 12617 - DNA, 15 bp, Homo sapiens
ggttcatattccctc

SEQ ID NO: 12618 - DNA, 15 bp, Homo sapiens
tggttcatattccct

SEQ ID NO: 12619 - DNA, 15 bp, Homo sapiens
ctggttcatattccc

SEQ ID NO: 12620 - DNA, 15 bp, Homo sapiens
actggttcatattcc

SEQ ID NO: 12621 - DNA, 15 bp, Homo sapiens
cactggttcatattc

SEQ ID NO: 12622 - DNA, 15 bp, Homo sapiens
gcactggttcatatt

SEQ ID NO: 12623 - DNA, 15 bp, Homo sapiens
agcactggttcatat

SEQ ID NO: 12624 - DNA, 15 bp, Homo sapiens
cagcactggttcata

SEQ ID NO: 12625 - DNA, 15 bp, Homo sapiens
ccagcactggttcat

SEQ ID NO: 12626 - DNA, 15 bp, Homo sapiens
gccagcactggttca

SEQ ID NO: 12627 - DNA, 15 bp, Homo sapiens
agccagcactggttc

SEQ ID NO: 12628 - DNA, 15 bp, Homo sapiens
aagccagcactggtt

SEQ ID NO: 12629 - DNA, 15 bp, Homo sapiens
caagccagcactggt

SEQ ID NO: 12630 - DNA, 15 bp, Homo sapiens
gcaagccagcactgg

SEQ ID NO: 12631 - DNA, 15 bp, Homo sapiens
agcaagccagcactg

SEQ ID NO: 12632 - DNA, 15 bp, Homo sapiens
tagcaagccagcact

SEQ ID NO: 12633 - DNA, 15 bp, Homo sapiens
atagcaagccagcac

SEQ ID NO: 12634 - DNA, 15 bp, Homo sapiens
catagcaagccagca

SEQ ID NO: 12635 - DNA, 15 bp, Homo sapiens
gcatagcaagccagc

SEQ ID NO: 12636 - DNA, 15 bp, Homo sapiens
ggcatagcaagccag

SEQ ID NO: 12637 - DNA, 15 bp, Homo sapiens
aggcatagcaagcca

SEQ ID NO: 12638 - DNA, 15 bp, Homo sapiens
gaggcatagcaagcc

SEQ ID NO: 12639 - DNA, 15 bp, Homo sapiens
agaggcatagcaagc

SEQ ID NO: 12640 - DNA, 15 bp, Homo sapiens
aagaggcatagcaag

SEQ ID NO: 12641 - DNA, 15 bp, Homo sapiens
aaagaggcatagcaa

SEQ ID NO: 12642 - DNA, 15 bp, Homo sapiens
gaaagaggcatagca

SEQ ID NO: 12643 - DNA, 15 bp, Homo sapiens
ggaaagaggcatagc

SEQ ID NO: 12644 - DNA, 15 bp, Homo sapiens
tggaaagaggcatag

SEQ ID NO: 12645 - DNA, 15 bp, Homo sapiens
atggaaagaggcata

SEQ ID NO: 12646 - DNA, 15 bp, Homo sapiens
tatggaaagaggcat

SEQ ID NO: 12647 - DNA, 15 bp, Homo sapiens
atatggaaagaggca

SEQ ID NO: 12648 - DNA, 15 bp, Homo sapiens
catatggaaagaggc

SEQ ID NO: 12649 - DNA, 15 bp, Homo sapiens
ccatatggaaagagg

SEQ ID NO: 12650 - DNA, 15 bp, Homo sapiens
cccatatggaaagag

SEQ ID NO: 12651 - DNA, 15 bp, Homo sapiens
ccccatatggaaaga

SEQ ID NO: 12652 - DNA, 15 bp, Homo sapiens
accccatatggaaag

SEQ ID NO: 12653 - DNA, 15 bp, Homo sapiens
gaccccatatggaaa

SEQ ID NO: 12654 - DNA, 15 bp, Homo sapiens
tgaccccatatggaa

SEQ ID NO: 12655 - DNA, 15 bp, Homo sapiens
ctgaccccatatgga

SEQ ID NO: 12656 - DNA, 15 bp, Homo sapiens
tctgaccccatatgg

SEQ ID NO: 12657 - DNA, 15 bp, Homo sapiens
gtctgaccccatatg

SEQ ID NO: 12658 - DNA, 15 bp, Homo sapiens
tgtctgaccccatat

SEQ ID NO: 12659 - DNA, 15 bp, Homo sapiens
atgtctgaccccata

SEQ ID NO: 12660 - DNA, 15 bp, Homo sapiens
tatgtctgaccccat

SEQ ID NO: 12661 - DNA, 15 bp, Homo sapiens
ctatgtctgacccca

SEQ ID NO: 12662 - DNA, 15 bp, Homo sapiens
tctatgtctgacccc

SEQ ID NO: 12663 - DNA, 15 bp, Homo sapiens
atctatgtctgaccc

SEQ ID NO: 12664 - DNA, 15 bp, Homo sapiens
catctatgtctgacc

SEQ ID NO: 12665 - DNA, 15 bp, Homo sapiens
acatctatgtctgac

SEQ ID NO: 12666 - DNA, 15 bp, Homo sapiens
cacatctatgtctga

SEQ ID NO: 12667 - DNA, 15 bp, Homo sapiens
ccacatctatgtctg

SEQ ID NO: 12668 - DNA, 15 bp, Homo sapiens
accacatctatgtct

SEQ ID NO: 12669 - DNA, 15 bp, Homo sapiens
caccacatctatgtc

SEQ ID NO: 12670 - DNA, 15 bp, Homo sapiens
acaccacatctatgt

SEQ ID NO: 12671 - DNA, 15 bp, Homo sapiens
gacaccacatctatg

SEQ ID NO: 12672 - DNA, 15 bp, Homo sapiens
agacaccacatctat

SEQ ID NO: 12673 - DNA, 15 bp, Homo sapiens
aagacaccacatcta

SEQ ID NO: 12674 - DNA, 15 bp, Homo sapiens
taagacaccacatct

SEQ ID NO: 12675 - DNA, 15 bp, Homo sapiens
ataagacaccacatc

SEQ ID NO: 12676 - DNA, 15 bp, Homo sapiens
tataagacaccacat

SEQ ID NO: 12677 - DNA, 15 bp, Homo sapiens
ttataagacaccaca

SEQ ID NO: 12678 - DNA, 15 bp, Homo sapiens
attataagacaccac

SEQ ID NO: 12679 - DNA, 15 bp, Homo sapiens
cattataagacacca

SEQ ID NO: 12680 - DNA, 15 bp, Homo sapiens
acattataagacacc

SEQ ID NO: 12681 - DNA, 15 bp, Homo sapiens
cacattataagacac

SEQ ID NO: 12682 - DNA, 15 bp, Homo sapiens
tcacattataagaca

SEQ ID NO: 12683 - DNA, 15 bp, Homo sapiens
ctcacattataagac

SEQ ID NO: 12684 - DNA, 15 bp, Homo sapiens
cctcacattataaga

SEQ ID NO: 12685 - DNA, 15 bp, Homo sapiens
ccctcacattataag

SEQ ID NO: 12686 - DNA, 15 bp, Homo sapiens
tccctcacattataa

SEQ ID NO: 12687 - DNA, 15 bp, Homo sapiens
ctccctcacattata

SEQ ID NO: 12688 - DNA, 15 bp, Homo sapiens
cctccctcacattat

SEQ ID NO: 12689 - DNA, 15 bp, Homo sapiens
acctccctcacatta

SEQ ID NO: 12690 - DNA, 15 bp, Homo sapiens
gacctccctcacatt

SEQ ID NO: 12691 - DNA, 15 bp, Homo sapiens
agacctccctcacat

SEQ ID NO: 12692 - DNA, 15 bp, Homo sapiens
tagacctccctcaca

SEQ ID NO: 12693 - DNA, 15 bp, Homo sapiens
gtagacctccctcac

SEQ ID NO: 12694 - DNA, 15 bp, Homo sapiens
agtagacctccctca

SEQ ID NO: 12695 - DNA, 15 bp, Homo sapiens
aagtagacctccctc

SEQ ID NO: 12696 - DNA, 15 bp, Homo sapiens
caagtagacctccct

SEQ ID NO: 12697 - DNA, 15 bp, Homo sapiens
ccaagtagacctccc

SEQ ID NO: 12698 - DNA, 15 bp, Homo sapiens
gccaagtagacctcc

SEQ ID NO: 12699 - DNA, 15 bp, Homo sapiens
tgccaagtagacctc

SEQ ID NO: 12700 - DNA, 15 bp, Homo sapiens
ctgccaagtagacct

SEQ ID NO: 12701 - DNA, 15 bp, Homo sapiens
tctgccaagtagacc

SEQ ID NO: 12702 - DNA, 15 bp, Homo sapiens
ttctgccaagtagac

SEQ ID NO: 12703 - DNA, 15 bp, Homo sapiens
tttctgccaagtaga

SEQ ID NO: 12704 - DNA, 15 bp, Homo sapiens
atttctgccaagtag

SEQ ID NO: 12705 - DNA, 15 bp, Homo sapiens
tatttctgccaagta

SEQ ID NO: 12706 - DNA, 15 bp, Homo sapiens
atatttctgccaagt

SEQ ID NO: 12707 - DNA, 15 bp, Homo sapiens
gatatttctgccaag

SEQ ID NO: 12708 - DNA, 15 bp, Homo sapiens
ggatatttctgccaa

SEQ ID NO: 12709 - DNA, 15 bp, Homo sapiens
aggatatttctgcca

SEQ ID NO: 12710 - DNA, 15 bp, Homo sapiens
caggatatttctgcc

SEQ ID NO: 12711 - DNA, 15 bp, Homo sapiens
gcaggatatttctgc

SEQ ID NO: 12712 - DNA, 15 bp, Homo sapiens
tgcaggatatttctg

SEQ ID NO: 12713 - DNA, 15 bp, Homo sapiens
ctgcaggatatttct

SEQ ID NO: 12714 - DNA, 15 bp, Homo sapiens
tctgcaggatatttc

SEQ ID NO: 12715 - DNA, 15 bp, Homo sapiens
gtctgcaggatattt

SEQ ID NO: 12716 - DNA, 15 bp, Homo sapiens
ggtctgcaggatatt

SEQ ID NO: 12717 - DNA, 15 bp, Homo sapiens
gggtctgcaggatat

SEQ ID NO: 12718 - DNA, 15 bp, Homo sapiens
agggtctgcaggata

SEQ ID NO: 12719 - DNA, 15 bp, Homo sapiens
tagggtctgcaggat

SEQ ID NO: 12720 - DNA, 15 bp, Homo sapiens
atagggtctgcagga

SEQ ID NO: 12721 - DNA, 15 bp, Homo sapiens
tatagggtctgcagg

SEQ ID NO: 12722 - DNA, 15 bp, Homo sapiens
atatagggtctgcag

SEQ ID NO: 12723 - DNA, 15 bp, Homo sapiens
catatagggtctgca

SEQ ID NO: 12724 - DNA, 15 bp, Homo sapiens
gcatatagggtctgc

SEQ ID NO: 12725 - DNA, 15 bp, Homo sapiens
ggcatatagggtctg

SEQ ID NO: 12726 - DNA, 15 bp, Homo sapiens
tggcatatagggtct

SEQ ID NO: 12727 - DNA, 15 bp, Homo sapiens
ctggcatatagggtc

SEQ ID NO: 12728 - DNA, 15 bp, Homo sapiens
actggcatatagggt

SEQ ID NO: 12729 - DNA, 15 bp, Homo sapiens
aactggcatataggg

SEQ ID NO: 12730 - DNA, 15 bp, Homo sapiens
aaactggcatatagg

SEQ ID NO: 12731 - DNA, 15 bp, Homo sapiens
gaaactggcatatag

SEQ ID NO: 12732 - DNA, 15 bp, Homo sapiens
agaaactggcatata

SEQ ID NO: 12733 - DNA, 15 bp, Homo sapiens
aagaaactggcatat

SEQ ID NO: 12734 - DNA, 15 bp, Homo sapiens
taagaaactggcata

SEQ ID NO: 12735 - DNA, 15 bp, Homo sapiens
ataagaaactggcat

SEQ ID NO: 12736 - DNA, 15 bp, Homo sapiens
aataagaaactggca

SEQ ID NO: 12737 - DNA, 15 bp, Homo sapiens
aaataagaaactggc

SEQ ID NO: 12738 - DNA, 15 bp, Homo sapiens
taaataagaaactgg

SEQ ID NO: 12739 - DNA, 15 bp, Homo sapiens
ataaataagaaactg

SEQ ID NO: 12740 - DNA, 15 bp, Homo sapiens
aataaataagaaact

SEQ ID NO: 12741 - DNA, 15 bp, Homo sapiens
aaataaataagaaac

SEQ ID NO: 12742 - DNA, 15 bp, Homo sapiens
taaataaataagaaa

SEQ ID NO: 12743 - DNA, 15 bp, Homo sapiens
ttaaataaataagaa

SEQ ID NO: 12744 - DNA, 15 bp, Homo sapiens
tttaaataaataaga

SEQ ID NO: 12745 - DNA, 15 bp, Homo sapiens
gtttaaataaataag

SEQ ID NO: 12746 - DNA, 15 bp, Homo sapiens
tgtttaaataaataa

SEQ ID NO: 12747 - DNA, 15 bp, Homo sapiens
ttgtttaaataaata

SEQ ID NO: 12748 - DNA, 15 bp, Homo sapiens
tttgtttaaataaat

SEQ ID NO: 12749 - DNA, 15 bp, Homo sapiens
ctttgtttaaataaa

SEQ ID NO: 12750 - DNA, 15 bp, Homo sapiens
gctttgtttaaataa

SEQ ID NO: 12751 - DNA, 15 bp, Homo sapiens
ggctttgtttaaata

SEQ ID NO: 12752 - DNA, 15 bp, Homo sapiens
gggctttgtttaaat

SEQ ID NO: 12753 - DNA, 15 bp, Homo sapiens
ggggctttgtttaaa

SEQ ID NO: 12754 - DNA, 15 bp, Homo sapiens
tggggctttgtttaa

SEQ ID NO: 12755 - DNA, 15 bp, Homo sapiens
atggggctttgttta

SEQ ID NO: 12756 - DNA, 15 bp, Homo sapiens
tatggggctttgttt

SEQ ID NO: 12757 - DNA, 15 bp, Homo sapiens
atatggggctttgtt

SEQ ID NO: 12758 - DNA, 15 bp, Homo sapiens
catatggggctttgt

SEQ ID NO: 12759 - DNA, 15 bp, Homo sapiens
tcatatggggctttg

SEQ ID NO: 12760 - DNA, 15 bp, Homo sapiens
ctcatatggggcttt

SEQ ID NO: 12761 - DNA, 15 bp, Homo sapiens
gctcatatggggctt

SEQ ID NO: 12762 - DNA, 15 bp, Homo sapiens
tgctcatatggggct

SEQ ID NO: 12763 - DNA, 15 bp, Homo sapiens
atgctcatatggggc

SEQ ID NO: 12764 - DNA, 15 bp, Homo sapiens
aatgctcatatgggg

SEQ ID NO: 12765 - DNA, 15 bp, Homo sapiens
aaatgctcatatggg

SEQ ID NO: 12766 - DNA, 15 bp, Homo sapiens
gaaatgctcatatgg

SEQ ID NO: 12767 - DNA, 15 bp, Homo sapiens
agaaatgctcatatg

SEQ ID NO: 12768 - DNA, 15 bp, Homo sapiens
cagaaatgctcatat

SEQ ID NO: 12769 - DNA, 15 bp, Homo sapiens
tcagaaatgctcata

SEQ ID NO: 12770 - DNA, 15 bp, Homo sapiens
atcagaaatgctcat

SEQ ID NO: 12771 - DNA, 15 bp, Homo sapiens
tatcagaaatgctca

SEQ ID NO: 12772 - DNA, 15 bp, Homo sapiens
ttatcagaaatgctc

SEQ ID NO: 12773 - DNA, 15 bp, Homo sapiens
cttatcagaaatgct

SEQ ID NO: 12774 - DNA, 15 bp, Homo sapiens
gcttatcagaaatgc

SEQ ID NO: 12775 - DNA, 15 bp, Homo sapiens
tgcttatcagaaatg

SEQ ID NO: 12776 - DNA, 15 bp, Homo sapiens
ctgcttatcagaaat

SEQ ID NO: 12777 - DNA, 15 bp, Homo sapiens
actgcttatcagaaa

SEQ ID NO: 12778 - DNA, 15 bp, Homo sapiens
aactgcttatcagaa

SEQ ID NO: 12779 - DNA, 15 bp, Homo sapiens
aaactgcttatcaga

SEQ ID NO: 12780 - DNA, 15 bp, Homo sapiens
caaactgcttatcag

SEQ ID NO: 12781 - DNA, 15 bp, Homo sapiens
acaaactgcttatca

SEQ ID NO: 12782 - DNA, 15 bp, Homo sapiens
aacaaactgcttatc

SEQ ID NO: 12783 - DNA, 15 bp, Homo sapiens
aaacaaactgcttat

SEQ ID NO: 12784 - DNA, 15 bp, Homo sapiens
taaacaaactgctta

SEQ ID NO: 12785 - DNA, 15 bp, Homo sapiens
gtaaacaaactgctt

SEQ ID NO: 12786 - DNA, 15 bp, Homo sapiens
tgtaaacaaactgct

SEQ ID NO: 12787 - DNA, 15 bp, Homo sapiens
gtgtaaacaaactgc

SEQ ID NO: 12788 - DNA, 15 bp, Homo sapiens
tgtgtaaacaaactg

SEQ ID NO: 12789 - DNA, 15 bp, Homo sapiens
gtgtgtaaacaaact

SEQ ID NO: 12790 - DNA, 15 bp, Homo sapiens
agtgtgtaaacaaac

SEQ ID NO: 12791 - DNA, 15 bp, Homo sapiens
tagtgtgtaaacaaa

SEQ ID NO: 12792 - DNA, 15 bp, Homo sapiens
ttagtgtgtaaacaa

SEQ ID NO: 12793 - DNA, 15 bp, Homo sapiens
attagtgtgtaaaca

SEQ ID NO: 12794 - DNA, 15 bp, Homo sapiens
aattagtgtgtaaac

SEQ ID NO: 12795 - DNA, 15 bp, Homo sapiens
gaattagtgtgtaaa

SEQ ID NO: 12796 - DNA, 15 bp, Homo sapiens
ggaattagtgtgtaa

SEQ ID NO: 12797 - DNA, 15 bp, Homo sapiens
tggaattagtgtgta

SEQ ID NO: 12798 - DNA, 15 bp, Homo sapiens
gtggaattagtgtgt

SEQ ID NO: 12799 - DNA, 15 bp, Homo sapiens
tgtggaattagtgtg

SEQ ID NO: 12800 - DNA, 15 bp, Homo sapiens
ctgtggaattagtgt

SEQ ID NO: 12801 - DNA, 15 bp, Homo sapiens
tctgtggaattagtg

SEQ ID NO: 12802 - DNA, 15 bp, Homo sapiens
ctctgtggaattagt

SEQ ID NO: 12803 - DNA, 15 bp, Homo sapiens
cctctgtggaattag

SEQ ID NO: 12804 - DNA, 15 bp, Homo sapiens
acctctgtggaatta

SEQ ID NO: 12805 - DNA, 15 bp, Homo sapiens
aacctctgtggaatt

SEQ ID NO: 12806 - DNA, 15 bp, Homo sapiens
taacctctgtggaat

SEQ ID NO: 12807 - DNA, 15 bp, Homo sapiens
ttaacctctgtggaa

SEQ ID NO: 12808 - DNA, 15 bp, Homo sapiens
tttaacctctgtgga

SEQ ID NO: 12809 - DNA, 15 bp, Homo sapiens
atttaacctctgtgg

SEQ ID NO: 12810 - DNA, 15 bp, Homo sapiens
tatttaacctctgtg

SEQ ID NO: 12811 - DNA, 15 bp, Homo sapiens
atatttaacctctgt

SEQ ID NO: 12812 - DNA, 15 bp, Homo sapiens
tatatttaacctctg

SEQ ID NO: 12813 - DNA, 15 bp, Homo sapiens
ttatatttaacctct

SEQ ID NO: 12814 - DNA, 15 bp, Homo sapiens
gttatatttaacctc

SEQ ID NO: 12815 - DNA, 15 bp, Homo sapiens
ggttatatttaacct

SEQ ID NO: 12816 - DNA, 15 bp, Homo sapiens
gggttatatttaacc

SEQ ID NO: 12817 - DNA, 15 bp, Homo sapiens
agggttatatttaac

SEQ ID NO: 12818 - DNA, 15 bp, Homo sapiens
tagggttatatttaa

SEQ ID NO: 12819 - DNA, 15 bp, Homo sapiens
ttagggttatattta

SEQ ID NO: 12820 - DNA, 15 bp, Homo sapiens
attagggttatattt

SEQ ID NO: 12821 - DNA, 15 bp, Homo sapiens
cattagggttatatt

SEQ ID NO: 12822 - DNA, 15 bp, Homo sapiens
acattagggttatat

SEQ ID NO: 12823 - DNA, 15 bp, Homo sapiens
aacattagggttata

SEQ ID NO: 12824 - DNA, 15 bp, Homo sapiens
aaacattagggttat

SEQ ID NO: 12825 - DNA, 15 bp, Homo sapiens
gaaacattagggtta

SEQ ID NO: 12826 - DNA, 15 bp, Homo sapiens
agaaacattagggtt

SEQ ID NO: 12827 - DNA, 15 bp, Homo sapiens
aagaaacattagggt

SEQ ID NO: 12828 - DNA, 15 bp, Homo sapiens
aaagaaacattaggg

SEQ ID NO: 12829 - DNA, 15 bp, Homo sapiens
caaagaaacattagg

SEQ ID NO: 12830 - DNA, 15 bp, Homo sapiens
acaaagaaacattag

SEQ ID NO: 12831 - DNA, 15 bp, Homo sapiens
aacaaagaaacatta

SEQ ID NO: 12832 - DNA, 15 bp, Homo sapiens
caacaaagaaacatt

SEQ ID NO: 12833 - DNA, 15 bp, Homo sapiens
gcaacaaagaaacat

SEQ ID NO: 12834 - DNA, 15 bp, Homo sapiens
agcaacaaagaaaca

SEQ ID NO: 12835 - DNA, 15 bp, Homo sapiens
tagcaacaaagaaac

SEQ ID NO: 12836 - DNA, 15 bp, Homo sapiens
gtagcaacaaagaaa

SEQ ID NO: 12837 - DNA, 15 bp, Homo sapiens
agtagcaacaaagaa

SEQ ID NO: 12838 - DNA, 15 bp, Homo sapiens
gagtagcaacaaaga

SEQ ID NO: 12839 - DNA, 15 bp, Homo sapiens
agagtagcaacaaag

SEQ ID NO: 12840 - DNA, 15 bp, Homo sapiens
cagagtagcaacaaa

SEQ ID NO: 12841 - DNA, 15 bp, Homo sapiens
acagagtagcaacaa

SEQ ID NO: 12842 - DNA, 15 bp, Homo sapiens
aacagagtagcaaca

SEQ ID NO: 12843 - DNA, 15 bp, Homo sapiens
aaacagagtagcaac

SEQ ID NO: 12844 - DNA, 15 bp, Homo sapiens
gaaacagagtagcaa

SEQ ID NO: 12845 - DNA, 15 bp, Homo sapiens
ggaaacagagtagca

SEQ ID NO: 12846 - DNA, 15 bp, Homo sapiens
tggaaacagagtagc

SEQ ID NO: 12847 - DNA, 15 bp, Homo sapiens
ctggaaacagagtag

SEQ ID NO: 12848 - DNA, 15 bp, Homo sapiens
actggaaacagagta

SEQ ID NO: 12849 - DNA, 15 bp, Homo sapiens
tactggaaacagagt

SEQ ID NO: 12850 - DNA, 15 bp, Homo sapiens
atactggaaacagag

SEQ ID NO: 12851 - DNA, 15 bp, Homo sapiens
aatactggaaacaga

SEQ ID NO: 12852 - DNA, 15 bp, Homo sapiens
caatactggaaacag

SEQ ID NO: 12853 - DNA, 15 bp, Homo sapiens
tcaatactggaaaca

SEQ ID NO: 12854 - DNA, 15 bp, Homo sapiens
ttcaatactggaaac

SEQ ID NO: 12855 - DNA, 15 bp, Homo sapiens
attcaatactggaaa

SEQ ID NO: 12856 - DNA, 15 bp, Homo sapiens
aattcaatactggaa

SEQ ID NO: 12857 - DNA, 15 bp, Homo sapiens
taattcaatactgga

SEQ ID NO: 12858 - DNA, 15 bp, Homo sapiens
ataattcaatactgg

SEQ ID NO: 12859 - DNA, 15 bp, Homo sapiens
aataattcaatactg

SEQ ID NO: 12860 - DNA, 15 bp, Homo sapiens
taataattcaatact

SEQ ID NO: 12861 - DNA, 15 bp, Homo sapiens
gtaataattcaatac

SEQ ID NO: 12862 - DNA, 15 bp, Homo sapiens
ggtaataattcaata

SEQ ID NO: 12863 - DNA, 15 bp, Homo sapiens
tggtaataattcaat

SEQ ID NO: 12864 - DNA, 15 bp, Homo sapiens
gtggtaataattcaa

SEQ ID NO: 12865 - DNA, 15 bp, Homo sapiens
tgtggtaataattca

SEQ ID NO: 12866 - DNA, 15 bp, Homo sapiens
ttgtggtaataattc

SEQ ID NO: 12867 - DNA, 15 bp, Homo sapiens
cttgtggtaataatt

SEQ ID NO: 12868 - DNA, 15 bp, Homo sapiens
ccttgtggtaataat

SEQ ID NO: 12869 - DNA, 15 bp, Homo sapiens
accttgtggtaataa

SEQ ID NO: 12870 - DNA, 15 bp, Homo sapiens
taccttgtggtaata

SEQ ID NO: 12871 - DNA, 15 bp, Homo sapiens
gtaccttgtggtaat

SEQ ID NO: 12872 - DNA, 15 bp, Homo sapiens
ggtaccttgtggtaa

SEQ ID NO: 12873 - DNA, 15 bp, Homo sapiens
tggtaccttgtggta

SEQ ID NO: 12874 - DNA, 15 bp, Homo sapiens
ttggtaccttgtggt

SEQ ID NO: 12875 - DNA, 15 bp, Homo sapiens
gttggtaccttgtgg

SEQ ID NO: 12876 - DNA, 15 bp, Homo sapiens
ggttggtaccttgtg

SEQ ID NO: 12877 - DNA, 15 bp, Homo sapiens
tggttggtaccttgt

SEQ ID NO: 12878 - DNA, 15 bp, Homo sapiens
atggttggtaccttg

SEQ ID NO: 12879 - DNA, 15 bp, Homo sapiens
tatggttggtacctt

SEQ ID NO: 12880 - DNA, 15 bp, Homo sapiens
atatggttggtacct

SEQ ID NO: 12881 - DNA, 15 bp, Homo sapiens
tatatggttggtacc

SEQ ID NO: 12882 - DNA, 15 bp, Homo sapiens
atatatggttggtac

SEQ ID NO: 12883 - DNA, 15 bp, Homo sapiens
catatatggttggta

SEQ ID NO: 12884 - DNA, 15 bp, Homo sapiens
gcatatatggttggt

SEQ ID NO: 12885 - DNA, 15 bp, Homo sapiens
tgcatatatggttgg

SEQ ID NO: 12886 - DNA, 15 bp, Homo sapiens
atgcatatatggttg

SEQ ID NO: 12887 - DNA, 15 bp, Homo sapiens
tatgcatatatggtt

SEQ ID NO: 12888 - DNA, 15 bp, Homo sapiens
gtatgcatatatggt

SEQ ID NO: 12889 - DNA, 15 bp, Homo sapiens
agtatgcatatatgg

SEQ ID NO: 12890 - DNA, 15 bp, Homo sapiens
aagtatgcatatatg

SEQ ID NO: 12891 - DNA, 15 bp, Homo sapiens
taagtatgcatatat

SEQ ID NO: 12892 - DNA, 15 bp, Homo sapiens
ttaagtatgcatata

SEQ ID NO: 12893 - DNA, 15 bp, Homo sapiens
attaagtatgcatat

SEQ ID NO: 12894 - DNA, 15 bp, Homo sapiens
tattaagtatgcata

SEQ ID NO: 12895 - DNA, 15 bp, Homo sapiens
ctattaagtatgcat

SEQ ID NO: 12896 - DNA, 15 bp, Homo sapiens
cctattaagtatgca

SEQ ID NO: 12897 - DNA, 15 bp, Homo sapiens
ccctattaagtatgc

SEQ ID NO: 12898 - DNA, 15 bp, Homo sapiens
accctattaagtatg

SEQ ID NO: 12899 - DNA, 15 bp, Homo sapiens
taccctattaagtat

SEQ ID NO: 12900 - DNA, 15 bp, Homo sapiens
ataccctattaagta

SEQ ID NO: 12901 - DNA, 15 bp, Homo sapiens
aataccctattaagt

SEQ ID NO: 12902 - DNA, 15 bp, Homo sapiens
aaataccctattaag

SEQ ID NO: 12903 - DNA, 15 bp, Homo sapiens
aaaataccctattaa

SEQ ID NO: 12904 - DNA, 15 bp, Homo sapiens
caaaataccctatta

SEQ ID NO: 12905 - DNA, 15 bp, Homo sapiens
acaaaataccctatt

SEQ ID NO: 12906 - DNA, 15 bp, Homo sapiens
gacaaaataccctat

SEQ ID NO: 12907 - DNA, 15 bp, Homo sapiens
tgacaaaatacccta

SEQ ID NO: 12908 - DNA, 15 bp, Homo sapiens
ttgacaaaataccct

SEQ ID NO: 12909 - DNA, 15 bp, Homo sapiens
tttgacaaaataccc

SEQ ID NO: 12910 - DNA, 15 bp, Homo sapiens
ttttgacaaaatacc

SEQ ID NO: 12911 - DNA, 15 bp, Homo sapiens
gttttgacaaaatac

SEQ ID NO: 12912 - DNA, 15 bp, Homo sapiens
agttttgacaaaata

SEQ ID NO: 12913 - DNA, 15 bp, Homo sapiens
tagttttgacaaaat

SEQ ID NO: 12914 - DNA, 15 bp, Homo sapiens
atagttttgacaaaa

SEQ ID NO: 12915 - DNA, 15 bp, Homo sapiens
catagttttgacaaa

SEQ ID NO: 12916 - DNA, 15 bp, Homo sapiens
gcatagttttgacaa

SEQ ID NO: 12917 - DNA, 15 bp, Homo sapiens
tgcatagttttgaca

SEQ ID NO: 12918 - DNA, 15 bp, Homo sapiens
atgcatagttttgac

SEQ ID NO: 12919 - DNA, 15 bp, Homo sapiens
catgcatagttttga

SEQ ID NO: 12920 - DNA, 15 bp, Homo sapiens
tcatgcatagttttg

SEQ ID NO: 12921 - DNA, 15 bp, Homo sapiens
ttcatgcatagtttt

SEQ ID NO: 12922 - DNA, 15 bp, Homo sapiens
cttcatgcatagttt

SEQ ID NO: 12923 - DNA, 15 bp, Homo sapiens
ccttcatgcatagtt

SEQ ID NO: 12924 - DNA, 15 bp, Homo sapiens
accttcatgcatagt

SEQ ID NO: 12925 - DNA, 15 bp, Homo sapiens
gaccttcatgcatag

SEQ ID NO: 12926 - DNA, 15 bp, Homo sapiens
tgaccttcatgcata

SEQ ID NO: 12927 - DNA, 15 bp, Homo sapiens
atgaccttcatgcat

SEQ ID NO: 12928 - DNA, 15 bp, Homo sapiens
aatgaccttcatgca

SEQ ID NO: 12929 - DNA, 15 bp, Homo sapiens
aaatgaccttcatgc

SEQ ID NO: 12930 - DNA, 15 bp, Homo sapiens
caaatgaccttcatg

SEQ ID NO: 12931 - DNA, 15 bp, Homo sapiens
acaaatgaccttcat

SEQ ID NO: 12932 - DNA, 15 bp, Homo sapiens
aacaaatgaccttca

SEQ ID NO: 12933 - DNA, 15 bp, Homo sapiens
aaacaaatgaccttc

SEQ ID NO: 12934 - DNA, 15 bp, Homo sapiens
caaacaaatgacctt

SEQ ID NO: 12935 - DNA, 15 bp, Homo sapiens
tcaaacaaatgacct

SEQ ID NO: 12936 - DNA, 15 bp, Homo sapiens
ctcaaacaaatgacc

SEQ ID NO: 12937 - DNA, 15 bp, Homo sapiens
tctcaaacaaatgac

SEQ ID NO: 12938 - DNA, 15 bp, Homo sapiens
atctcaaacaaatga

SEQ ID NO: 12939 - DNA, 15 bp, Homo sapiens
catctcaaacaaatg

SEQ ID NO: 12940 - DNA, 15 bp, Homo sapiens
acatctcaaacaaat

SEQ ID NO: 12941 - DNA, 15 bp, Homo sapiens
gacatctcaaacaaa

SEQ ID NO: 12942 - DNA, 15 bp, Homo sapiens
tgacatctcaaacaa

SEQ ID NO: 12943 - DNA, 15 bp, Homo sapiens
ctgacatctcaaaca

SEQ ID NO: 12944 - DNA, 15 bp, Homo sapiens
tctgacatctcaaac

SEQ ID NO: 12945 - DNA, 15 bp, Homo sapiens
ttctgacatctcaaa

SEQ ID NO: 12946 - DNA, 15 bp, Homo sapiens
gttctgacatctcaa

SEQ ID NO: 12947 - DNA, 15 bp, Homo sapiens
tgttctgacatctca

SEQ ID NO: 12948 - DNA, 15 bp, Homo sapiens
atgttctgacatctc

SEQ ID NO: 12949 - DNA, 15 bp, Homo sapiens
aatgttctgacatct

SEQ ID NO: 12950 - DNA, 15 bp, Homo sapiens
aaatgttctgacatc

SEQ ID NO: 12951 - DNA, 15 bp, Homo sapiens
aaaatgttctgacat

SEQ ID NO: 12952 - DNA, 15 bp, Homo sapiens
gaaaatgttctgaca

SEQ ID NO: 12953 - DNA, 15 bp, Homo sapiens
ggaaaatgttctgac

SEQ ID NO: 12954 - DNA, 15 bp, Homo sapiens
gggaaaatgttctga

SEQ ID NO: 12955 - DNA, 15 bp, Homo sapiens
cgggaaaatgttctg

SEQ ID NO: 12956 - DNA, 15 bp, Homo sapiens
acgggaaaatgttct

SEQ ID NO: 12957 - DNA, 15 bp, Homo sapiens
cacgggaaaatgttc

SEQ ID NO: 12958 - DNA, 15 bp, Homo sapiens
tcacgggaaaatgtt

SEQ ID NO: 12959 - DNA, 15 bp, Homo sapiens
ctcacgggaaaatgt

SEQ ID NO: 12960 - DNA, 15 bp, Homo sapiens
tctcacgggaaaatg

SEQ ID NO: 12961 - DNA, 15 bp, Homo sapiens
ttctcacgggaaaat

SEQ ID NO: 12962 - DNA, 15 bp, Homo sapiens
cttctcacgggaaaa

SEQ ID NO: 12963 - DNA, 15 bp, Homo sapiens
tcttctcacgggaaa

SEQ ID NO: 12964 - DNA, 15 bp, Homo sapiens
atcttctcacgggaa

SEQ ID NO: 12965 - DNA, 15 bp, Homo sapiens
gatcttctcacggga

SEQ ID NO: 12966 - DNA, 15 bp, Homo sapiens
agatcttctcacggg

SEQ ID NO: 12967 - DNA, 15 bp, Homo sapiens
gagatcttctcacgg

SEQ ID NO: 12968 - DNA, 15 bp, Homo sapiens
tgagatcttctcacg

SEQ ID NO: 12969 - DNA, 15 bp, Homo sapiens
atgagatcttctcac

SEQ ID NO: 12970 - DNA, 15 bp, Homo sapiens
aatgagatcttctca

SEQ ID NO: 12971 - DNA, 15 bp, Homo sapiens
caatgagatcttctc

SEQ ID NO: 12972 - DNA, 15 bp, Homo sapiens
ccaatgagatcttct

SEQ ID NO: 12973 - DNA, 15 bp, Homo sapiens
cccaatgagatcttc

SEQ ID NO: 12974 - DNA, 15 bp, Homo sapiens
gcccaatgagatctt

SEQ ID NO: 12975 - DNA, 15 bp, Homo sapiens
tgcccaatgagatct

SEQ ID NO: 12976 - DNA, 15 bp, Homo sapiens
atgcccaatgagatc

SEQ ID NO: 12977 - DNA, 15 bp, Homo sapiens
aatgcccaatgagat

SEQ ID NO: 12978 - DNA, 15 bp, Homo sapiens
caatgcccaatgaga

SEQ ID NO: 12979 - DNA, 15 bp, Homo sapiens
tcaatgcccaatgag

SEQ ID NO: 12980 - DNA, 15 bp, Homo sapiens
ttcaatgcccaatga

SEQ ID NO: 12981 - DNA, 15 bp, Homo sapiens
tttcaatgcccaatg

SEQ ID NO: 12982 - DNA, 15 bp, Homo sapiens
gtttcaatgcccaat

SEQ ID NO: 12983 - DNA, 15 bp, Homo sapiens
tgtttcaatgcccaa

SEQ ID NO: 12984 - DNA, 15 bp, Homo sapiens
ctgtttcaatgccca

SEQ ID NO: 12985 - DNA, 15 bp, Homo sapiens
tctgtttcaatgccc

SEQ ID NO: 12986 - DNA, 15 bp, Homo sapiens
ttctgtttcaatgcc

SEQ ID NO: 12987 - DNA, 15 bp, Homo sapiens
gttctgtttcaatgc

SEQ ID NO: 12988 - DNA, 15 bp, Homo sapiens
ggttctgtttcaatg

SEQ ID NO: 12989 - DNA, 15 bp, Homo sapiens
tggttctgtttcaat

SEQ ID NO: 12990 - DNA, 15 bp, Homo sapiens
gtggttctgtttcaa

SEQ ID NO: 12991 - DNA, 15 bp, Homo sapiens
tgtggttctgtttca

SEQ ID NO: 12992 - DNA, 15 bp, Homo sapiens
atgtggttctgtttc

SEQ ID NO: 12993 - DNA, 15 bp, Homo sapiens
catgtggttctgttt

SEQ ID NO: 12994 - DNA, 15 bp, Homo sapiens
gcatgtggttctgtt

SEQ ID NO: 12995 - DNA, 15 bp, Homo sapiens
agcatgtggttctgt

SEQ ID NO: 12996 - DNA, 15 bp, Homo sapiens
gagcatgtggttctg

SEQ ID NO: 12997 - DNA, 15 bp, Homo sapiens
agagcatgtggttct

SEQ ID NO: 12998 - DNA, 15 bp, Homo sapiens
aagagcatgtggttc

SEQ ID NO: 12999 - DNA, 15 bp, Homo sapiens
gaagagcatgtggtt

SEQ ID NO: 13000 - DNA, 15 bp, Homo sapiens
tgaagagcatgtggt

SEQ ID NO: 13001 - DNA, 15 bp, Homo sapiens
ctgaagagcatgtgg

SEQ ID NO: 13002 - DNA, 15 bp, Homo sapiens
tctgaagagcatgtg

SEQ ID NO: 13003 - DNA, 15 bp, Homo sapiens
gtctgaagagcatgt

SEQ ID NO: 13004 - DNA, 15 bp, Homo sapiens
ggtctgaagagcatg

SEQ ID NO: 13005 - DNA, 15 bp, Homo sapiens
tggtctgaagagcat

SEQ ID NO: 13006 - DNA, 15 bp, Homo sapiens
ctggtctgaagagca

SEQ ID NO: 13007 - DNA, 15 bp, Homo sapiens
gctggtctgaagagc

SEQ ID NO: 13008 - DNA, 15 bp, Homo sapiens
tgctggtctgaagag

SEQ ID NO: 13009 - DNA, 15 bp, Homo sapiens
ttgctggtctgaaga

SEQ ID NO: 13010 - DNA, 15 bp, Homo sapiens
gttgctggtctgaag

SEQ ID NO: 13011 - DNA, 15 bp, Homo sapiens
ggttgctggtctgaa

SEQ ID NO: 13012 - DNA, 15 bp, Homo sapiens
cggttgctggtctga

SEQ ID NO: 13013 - DNA, 15 bp, Homo sapiens
gcggttgctggtctg

SEQ ID NO: 13014 - DNA, 15 bp, Homo sapiens
cgcggttgctggtct

SEQ ID NO: 13015 - DNA, 15 bp, Homo sapiens
tcgcggttgctggtc

SEQ ID NO: 13016 - DNA, 15 bp, Homo sapiens
gtcgcggttgctggt

SEQ ID NO: 13017 - DNA, 15 bp, Homo sapiens
agtcgcggttgctgg

SEQ ID NO: 13018 - DNA, 15 bp, Homo sapiens
tagtcgcggttgctg

SEQ ID NO: 13019 - DNA, 15 bp, Homo sapiens
gtagtcgcggttgct

SEQ ID NO: 13020 - DNA, 15 bp, Homo sapiens
ggtagtcgcggttgc

SEQ ID NO: 13021 - DNA, 15 bp, Homo sapiens
tggtagtcgcggttg

SEQ ID NO: 13022 - DNA, 15 bp, Homo sapiens
ttggtagtcgcggtt

SEQ ID NO: 13023 - DNA, 15 bp, Homo sapiens
tttggtagtcgcggt

SEQ ID NO: 13024 - DNA, 15 bp, Homo sapiens
atttggtagtcgcgg

SEQ ID NO: 13025 - DNA, 15 bp, Homo sapiens
tatttggtagtcgcg

SEQ ID NO: 13026 - DNA, 15 bp, Homo sapiens
gtatttggtagtcgc

SEQ ID NO: 13027 - DNA, 15 bp, Homo sapiens
agtatttggtagtcg

SEQ ID NO: 13028 - DNA, 15 bp, Homo sapiens
gagtatttggtagtc

SEQ ID NO: 13029 - DNA, 15 bp, Homo sapiens
ggagtatttggtagt

SEQ ID NO: 13030 - DNA, 15 bp, Homo sapiens
aggagtatttggtag

SEQ ID NO: 13031 - DNA, 15 bp, Homo sapiens
gaggagtatttggta

SEQ ID NO: 13032 - DNA, 15 bp, Homo sapiens
agaggagtatttggt

SEQ ID NO: 13033 - DNA, 15 bp, Homo sapiens
cagaggagtatttgg

SEQ ID NO: 13034 - DNA, 15 bp, Homo sapiens
acagaggagtatttg

SEQ ID NO: 13035 - DNA, 15 bp, Homo sapiens
gacagaggagtattt

SEQ ID NO: 13036 - DNA, 15 bp, Homo sapiens
tgacagaggagtatt

SEQ ID NO: 13037 - DNA, 15 bp, Homo sapiens
ttgacagaggagtat

SEQ ID NO: 13038 - DNA, 15 bp, Homo sapiens
gttgacagaggagta

SEQ ID NO: 13039 - DNA, 15 bp, Homo sapiens
agttgacagaggagt

SEQ ID NO: 13040 - DNA, 15 bp, Homo sapiens
gagttgacagaggag

SEQ ID NO: 13041 - DNA, 15 bp, Homo sapiens
agagttgacagagga

SEQ ID NO: 13042 - DNA, 15 bp, Homo sapiens
tagagttgacagagg

SEQ ID NO: 13043 - DNA, 15 bp, Homo sapiens
gtagagttgacagag

SEQ ID NO: 13044 - DNA, 15 bp, Homo sapiens
agtagagttgacaga

SEQ ID NO: 13045 - DNA, 15 bp, Homo sapiens
aagtagagttgacag

SEQ ID NO: 13046 - DNA, 15 bp, Homo sapiens
caagtagagttgaca

SEQ ID NO: 13047 - DNA, 15 bp, Homo sapiens
tcaagtagagttgac

SEQ ID NO: 13048 - DNA, 15 bp, Homo sapiens
ctcaagtagagttga

SEQ ID NO: 13049 - DNA, 15 bp, Homo sapiens
actcaagtagagttg

SEQ ID NO: 13050 - DNA, 15 bp, Homo sapiens
tactcaagtagagtt

SEQ ID NO: 13051 - DNA, 15 bp, Homo sapiens
ttactcaagtagagt

SEQ ID NO: 13052 - DNA, 15 bp, Homo sapiens
cttactcaagtagag

SEQ ID NO: 13053 - DNA, 15 bp, Homo sapiens
tcttactcaagtaga

SEQ ID NO: 13054 - DNA, 15 bp, Homo sapiens
ttcttactcaagtag

SEQ ID NO: 13055 - DNA, 15 bp, Homo sapiens
gttcttactcaagta

SEQ ID NO: 13056 - DNA, 15 bp, Homo sapiens
cgttcttactcaagt

SEQ ID NO: 13057 - DNA, 15 bp, Homo sapiens
gcgttcttactcaag

SEQ ID NO: 13058 - DNA, 15 bp, Homo sapiens
agcgttcttactcaa

SEQ ID NO: 13059 - DNA, 15 bp, Homo sapiens
aagcgttcttactca

SEQ ID NO: 13060 - DNA, 15 bp, Homo sapiens
aaagcgttcttactc

SEQ ID NO: 13061 - DNA, 15 bp, Homo sapiens
gaaagcgttcttact

SEQ ID NO: 13062 - DNA, 15 bp, Homo sapiens
tgaaagcgttcttac

SEQ ID NO: 13063 - DNA, 15 bp, Homo sapiens
ttgaaagcgttctta

SEQ ID NO: 13064 - DNA, 15 bp, Homo sapiens
attgaaagcgttctt

SEQ ID NO: 13065 - DNA, 15 bp, Homo sapiens
aattgaaagcgttct

SEQ ID NO: 13066 - DNA, 15 bp, Homo sapiens
taattgaaagcgttc

SEQ ID NO: 13067 - DNA, 15 bp, Homo sapiens
ttaattgaaagcgtt

SEQ ID NO: 13068 - DNA, 15 bp, Homo sapiens
cttaattgaaagcgt

SEQ ID NO: 13069 - DNA, 15 bp, Homo sapiens
ccttaattgaaagcg

SEQ ID NO: 13070 - DNA, 15 bp, Homo sapiens
gccttaattgaaagc

SEQ ID NO: 13071 - DNA, 15 bp, Homo sapiens
ggccttaattgaaag

SEQ ID NO: 13072 - DNA, 15 bp, Homo sapiens
aggccttaattgaaa

SEQ ID NO: 13073 - DNA, 15 bp, Homo sapiens
taggccttaattgaa

SEQ ID NO: 13074 - DNA, 15 bp, Homo sapiens
ttaggccttaattga

SEQ ID NO: 13075 - DNA, 15 bp, Homo sapiens
cttaggccttaattg

SEQ ID NO: 13076 - DNA, 15 bp, Homo sapiens
acttaggccttaatt

SEQ ID NO: 13077 - DNA, 15 bp, Homo sapiens
cacttaggccttaat

SEQ ID NO: 13078 - DNA, 15 bp, Homo sapiens
acacttaggccttaa

SEQ ID NO: 13079 - DNA, 15 bp, Homo sapiens
gacacttaggcctta

SEQ ID NO: 13080 - DNA, 15 bp, Homo sapiens
tgacacttaggcctt

SEQ ID NO: 13081 - DNA, 15 bp, Homo sapiens
ttgacacttaggcct

SEQ ID NO: 13082 - DNA, 15 bp, Homo sapiens
gttgacacttaggcc

SEQ ID NO: 13083 - DNA, 15 bp, Homo sapiens
tgttgacacttaggc

SEQ ID NO: 13084 - DNA, 15 bp, Homo sapiens
atgttgacacttagg

SEQ ID NO: 13085 - DNA, 15 bp, Homo sapiens
catgttgacacttag

SEQ ID NO: 13086 - DNA, 15 bp, Homo sapiens
gcatgttgacactta

SEQ ID NO: 13087 - DNA, 15 bp, Homo sapiens
ggcatgttgacactt

SEQ ID NO: 13088 - DNA, 15 bp, Homo sapiens
aggcatgttgacact

SEQ ID NO: 13089 - DNA, 15 bp, Homo sapiens
aaggcatgttgacac

SEQ ID NO: 13090 - DNA, 15 bp, Homo sapiens
aaaggcatgttgaca

SEQ ID NO: 13091 - DNA, 15 bp, Homo sapiens
taaaggcatgttgac

SEQ ID NO: 13092 - DNA, 15 bp, Homo sapiens
ttaaaggcatgttga

SEQ ID NO: 13093 - DNA, 15 bp, Homo sapiens
tttaaaggcatgttg

SEQ ID NO: 13094 - DNA, 15 bp, Homo sapiens
ttttaaaggcatgtt

SEQ ID NO: 13095 - DNA, 15 bp, Homo sapiens
tttttaaaggcatgt

SEQ ID NO: 13096 - DNA, 15 bp, Homo sapiens
ttttttaaaggcatg

SEQ ID NO: 13097 - DNA, 15 bp, Homo sapiens
tttttttaaaggcat

SEQ ID NO: 13098 - DNA, 15 bp, Homo sapiens
ttttttttaaaggca

SEQ ID NO: 13099 - DNA, 15 bp, Homo sapiens
attttttttaaaggc

SEQ ID NO: 13100 - DNA, 15 bp, Homo sapiens
gattttttttaaagg

SEQ ID NO: 13101 - DNA, 15 bp, Homo sapiens
cgattttttttaaag

SEQ ID NO: 13102 - DNA, 15 bp, Homo sapiens
acgattttttttaaa

SEQ ID NO: 13103 - DNA, 15 bp, Homo sapiens
cacgattttttttaa

SEQ ID NO: 13104 - DNA, 15 bp, Homo sapiens
ccacgatttttttta

SEQ ID NO: 13105 - DNA, 15 bp, Homo sapiens
accacgatttttttt

SEQ ID NO: 13106 - DNA, 15 bp, Homo sapiens
caccacgattttttt

SEQ ID NO: 13107 - DNA, 15 bp, Homo sapiens
tcaccacgatttttt

SEQ ID NO: 13108 - DNA, 15 bp, Homo sapiens
gtcaccacgattttt

SEQ ID NO: 13109 - DNA, 15 bp, Homo sapiens
tgtcaccacgatttt

SEQ ID NO: 13110 - DNA, 15 bp, Homo sapiens
gtgtcaccacgattt

SEQ ID NO: 13111 - DNA, 15 bp, Homo sapiens
tgtgtcaccacgatt

SEQ ID NO: 13112 - DNA, 15 bp, Homo sapiens
ttgtgtcaccacgat

SEQ ID NO: 13113 - DNA, 15 bp, Homo sapiens
tttgtgtcaccacga

SEQ ID NO: 13114 - DNA, 15 bp, Homo sapiens
ttttgtgtcaccacg

SEQ ID NO: 13115 - DNA, 15 bp, Homo sapiens
attttgtgtcaccac

SEQ ID NO: 13116 - DNA, 15 bp, Homo sapiens
gattttgtgtcacca

SEQ ID NO: 13117 - DNA, 15 bp, Homo sapiens
agattttgtgtcacc

SEQ ID NO: 13118 - DNA, 15 bp, Homo sapiens
aagattttgtgtcac

SEQ ID NO: 13119 - DNA, 15 bp, Homo sapiens
aaagattttgtgtca

SEQ ID NO: 13120 - DNA, 15 bp, Homo sapiens
gaaagattttgtgtc

SEQ ID NO: 13121 - DNA, 15 bp, Homo sapiens
agaaagattttgtgt

SEQ ID NO: 13122 - DNA, 15 bp, Homo sapiens
aagaaagattttgtg

SEQ ID NO: 13123 - DNA, 15 bp, Homo sapiens
aaagaaagattttgt

SEQ ID NO: 13124 - DNA, 15 bp, Homo sapiens
aaaagaaagattttg

SEQ ID NO: 13125 - DNA, 15 bp, Homo sapiens
aaaaagaaagatttt

SEQ ID NO: 13126 - DNA, 15 bp, Homo sapiens
taaaaagaaagattt

SEQ ID NO: 13127 - DNA, 15 bp, Homo sapiens
ctaaaaagaaagatt

SEQ ID NO: 13128 - DNA, 15 bp, Homo sapiens
gctaaaaagaaagat

SEQ ID NO: 13129 - DNA, 15 bp, Homo sapiens
tgctaaaaagaaaga

SEQ ID NO: 13130 - DNA, 15 bp, Homo sapiens
gtgctaaaaagaaag

SEQ ID NO: 13131 - DNA, 15 bp, Homo sapiens
ggtgctaaaaagaaa

SEQ ID NO: 13132 - DNA, 15 bp, Homo sapiens
gggtgctaaaaagaa

SEQ ID NO: 13133 - DNA, 15 bp, Homo sapiens
tgggtgctaaaaaga

SEQ ID NO: 13134 - DNA, 15 bp, Homo sapiens
ttgggtgctaaaaag

SEQ ID NO: 13135 - DNA, 15 bp, Homo sapiens
gttgggtgctaaaaa

SEQ ID NO: 13136 - DNA, 15 bp, Homo sapiens
tgttgggtgctaaaa

SEQ ID NO: 13137 - DNA, 15 bp, Homo sapiens
ctgttgggtgctaaa

SEQ ID NO: 13138 - DNA, 15 bp, Homo sapiens
tctgttgggtgctaa

SEQ ID NO: 13139 - DNA, 15 bp, Homo sapiens
ttctgttgggtgcta

SEQ ID NO: 13140 - DNA, 15 bp, Homo sapiens
attctgttgggtgct

SEQ ID NO: 13141 - DNA, 15 bp, Homo sapiens
gattctgttgggtgc

SEQ ID NO: 13142 - DNA, 15 bp, Homo sapiens
ggattctgttgggtg

SEQ ID NO: 13143 - DNA, 15 bp, Homo sapiens
gggattctgttgggt

SEQ ID NO: 13144 - DNA, 15 bp, Homo sapiens
agggattctgttggg

SEQ ID NO: 13145 - DNA, 15 bp, Homo sapiens
aagggattctgttgg

SEQ ID NO: 13146 - DNA, 15 bp, Homo sapiens
gaagggattctgttg

SEQ ID NO: 13147 - DNA, 15 bp, Homo sapiens
tgaagggattctgtt

SEQ ID NO: 13148 - DNA, 15 bp, Homo sapiens
ttgaagggattctgt

SEQ ID NO: 13149 - DNA, 15 bp, Homo sapiens
tttgaagggattctg

SEQ ID NO: 13150 - DNA, 15 bp, Homo sapiens
ctttgaagggattct

SEQ ID NO: 13151 - DNA, 15 bp, Homo sapiens
gctttgaagggattc

SEQ ID NO: 13152 - DNA, 15 bp, Homo sapiens
ggctttgaagggatt

SEQ ID NO: 13153 - DNA, 15 bp, Homo sapiens
aggctttgaagggat

SEQ ID NO: 13154 - DNA, 15 bp, Homo sapiens
gaggctttgaaggga

SEQ ID NO: 13155 - DNA, 15 bp, Homo sapiens
cgaggctttgaaggg

SEQ ID NO: 13156 - DNA, 15 bp, Homo sapiens
acgaggctttgaagg

SEQ ID NO: 13157 - DNA, 15 bp, Homo sapiens
cacgaggctttgaag

SEQ ID NO: 13158 - DNA, 15 bp, Homo sapiens
ccacgaggctttgaa

SEQ ID NO: 13159 - DNA, 15 bp, Homo sapiens
accacgaggctttga

SEQ ID NO: 13160 - DNA, 15 bp, Homo sapiens
gaccacgaggctttg

SEQ ID NO: 13161 - DNA, 15 bp, Homo sapiens
agaccacgaggcttt

SEQ ID NO: 13162 - DNA, 15 bp, Homo sapiens
cagaccacgaggctt

SEQ ID NO: 13163 - DNA, 15 bp, Homo sapiens
tcagaccacgaggct

SEQ ID NO: 13164 - DNA, 15 bp, Homo sapiens
gtcagaccacgaggc

SEQ ID NO: 13165 - DNA, 15 bp, Homo sapiens
tgtcagaccacgagg

SEQ ID NO: 13166 - DNA, 15 bp, Homo sapiens
gtgtcagaccacgag

SEQ ID NO: 13167 - DNA, 15 bp, Homo sapiens
ggtgtcagaccacga

SEQ ID NO: 13168 - DNA, 15 bp, Homo sapiens
gggtgtcagaccacg

SEQ ID NO: 13169 - DNA, 15 bp, Homo sapiens
agggtgtcagaccac

SEQ ID NO: 13170 - DNA, 15 bp, Homo sapiens
tagggtgtcagacca

SEQ ID NO: 13171 - DNA, 15 bp, Homo sapiens
atagggtgtcagacc

SEQ ID NO: 13172 - DNA, 15 bp, Homo sapiens
catagggtgtcagac

SEQ ID NO: 13173 - DNA, 15 bp, Homo sapiens
gcatagggtgtcaga

SEQ ID NO: 13174 - DNA, 15 bp, Homo sapiens
agcatagggtgtcag

SEQ ID NO: 13175 - DNA, 15 bp, Homo sapiens
tagcatagggtgtca

SEQ ID NO: 13176 - DNA, 15 bp, Homo sapiens
gtagcatagggtgtc

SEQ ID NO: 13177 - DNA, 15 bp, Homo sapiens
cgtagcatagggtgt

SEQ ID NO: 13178 - DNA, 15 bp, Homo sapiens
acgtagcatagggtg

SEQ ID NO: 13179 - DNA, 15 bp, Homo sapiens
cacgtagcatagggt

SEQ ID NO: 13180 - DNA, 15 bp, Homo sapiens
tcacgtagcataggg

SEQ ID NO: 13181 - DNA, 15 bp, Homo sapiens
gtcacgtagcatagg

SEQ ID NO: 13182 - DNA, 15 bp, Homo sapiens
agtcacgtagcatag

SEQ ID NO: 13183 - DNA, 15 bp, Homo sapiens
aagtcacgtagcata

SEQ ID NO: 13184 - DNA, 15 bp, Homo sapiens
caagtcacgtagcat

SEQ ID NO: 13185 - DNA, 15 bp, Homo sapiens
acaagtcacgtagca

SEQ ID NO: 13186 - DNA, 15 bp, Homo sapiens
cacaagtcacgtagc

SEQ ID NO: 13187 - DNA, 15 bp, Homo sapiens
tcacaagtcacgtag

SEQ ID NO: 13188 - DNA, 15 bp, Homo sapiens
gtcacaagtcacgta

SEQ ID NO: 13189 - DNA, 15 bp, Homo sapiens
ggtcacaagtcacgt

SEQ ID NO: 13190 - DNA, 15 bp, Homo sapiens
gggtcacaagtcacg

SEQ ID NO: 13191 - DNA, 15 bp, Homo sapiens
tgggtcacaagtcac

SEQ ID NO: 13192 - DNA, 15 bp, Homo sapiens
atgggtcacaagtca

SEQ ID NO: 13193 - DNA, 15 bp, Homo sapiens
gatgggtcacaagtc

SEQ ID NO: 13194 - DNA, 15 bp, Homo sapiens
ggatgggtcacaagt

SEQ ID NO: 13195 - DNA, 15 bp, Homo sapiens
tggatgggtcacaag

SEQ ID NO: 13196 - DNA, 15 bp, Homo sapiens
atggatgggtcacaa

SEQ ID NO: 13197 - DNA, 15 bp, Homo sapiens
aatggatgggtcaca

SEQ ID NO: 13198 - DNA, 15 bp, Homo sapiens
aaatggatgggtcac

SEQ ID NO: 13199 - DNA, 15 bp, Homo sapiens
caaatggatgggtca

SEQ ID NO: 13200 - DNA, 15 bp, Homo sapiens
acaaatggatgggtc

SEQ ID NO: 13201 - DNA, 15 bp, Homo sapiens
gacaaatggatgggt

SEQ ID NO: 13202 - DNA, 15 bp, Homo sapiens
tgacaaatggatggg

SEQ ID NO: 13203 - DNA, 15 bp, Homo sapiens
atgacaaatggatgg

SEQ ID NO: 13204 - DNA, 15 bp, Homo sapiens
catgacaaatggatg

SEQ ID NO: 13205 - DNA, 15 bp, Homo sapiens
acatgacaaatggat

SEQ ID NO: 13206 - DNA, 15 bp, Homo sapiens
aacatgacaaatgga

SEQ ID NO: 13207 - DNA, 15 bp, Homo sapiens
gaacatgacaaatgg

SEQ ID NO: 13208 - DNA, 15 bp, Homo sapiens
agaacatgacaaatg

SEQ ID NO: 13209 - DNA, 15 bp, Homo sapiens
aagaacatgacaaat

SEQ ID NO: 13210 - DNA, 15 bp, Homo sapiens
gaagaacatgacaaa

SEQ ID NO: 13211 - DNA, 15 bp, Homo sapiens
cgaagaacatgacaa

SEQ ID NO: 13212 - DNA, 15 bp, Homo sapiens
ccgaagaacatgaca

SEQ ID NO: 13213 - DNA, 15 bp, Homo sapiens
cccgaagaacatgac

SEQ ID NO: 13214 - DNA, 15 bp, Homo sapiens
tcccgaagaacatga

SEQ ID NO: 13215 - DNA, 15 bp, Homo sapiens
ttcccgaagaacatg

SEQ ID NO: 13216 - DNA, 15 bp, Homo sapiens
attcccgaagaacat

SEQ ID NO: 13217 - DNA, 15 bp, Homo sapiens
cattcccgaagaaca

SEQ ID NO: 13218 - DNA, 15 bp, Homo sapiens
acattcccgaagaac

SEQ ID NO: 13219 - DNA, 15 bp, Homo sapiens
cacattcccgaagaa

SEQ ID NO: 13220 - DNA, 15 bp, Homo sapiens
ccacattcccgaaga

SEQ ID NO: 13221 - DNA, 15 bp, Homo sapiens
gccacattcccgaag

SEQ ID NO: 13222 - DNA, 15 bp, Homo sapiens
agccacattcccgaa

SEQ ID NO: 13223 - DNA, 15 bp, Homo sapiens
tagccacattcccga

SEQ ID NO: 13224 - DNA, 15 bp, Homo sapiens
ttagccacattcccg

SEQ ID NO: 13225 - DNA, 15 bp, Homo sapiens
cttagccacattccc

SEQ ID NO: 13226 - DNA, 15 bp, Homo sapiens
ccttagccacattcc

SEQ ID NO: 13227 - DNA, 15 bp, Homo sapiens
cccttagccacattc

SEQ ID NO: 13228 - DNA, 15 bp, Homo sapiens
ccccttagccacatt

SEQ ID NO: 13229 - DNA, 15 bp, Homo sapiens
gccccttagccacat

SEQ ID NO: 13230 - DNA, 15 bp, Homo sapiens
agccccttagccaca

SEQ ID NO: 13231 - DNA, 15 bp, Homo sapiens
tagccccttagccac

SEQ ID NO: 13232 - DNA, 15 bp, Homo sapiens
ttagccccttagcca

SEQ ID NO: 13233 - DNA, 15 bp, Homo sapiens
cttagccccttagcc

SEQ ID NO: 13234 - DNA, 15 bp, Homo sapiens
tcttagccccttagc

SEQ ID NO: 13235 - DNA, 15 bp, Homo sapiens
atcttagccccttag

SEQ ID NO: 13236 - DNA, 15 bp, Homo sapiens
catcttagcccctta

SEQ ID NO: 13237 - DNA, 15 bp, Homo sapiens
acatcttagcccctt

SEQ ID NO: 13238 - DNA, 15 bp, Homo sapiens
cacatcttagcccct

SEQ ID NO: 13239 - DNA, 15 bp, Homo sapiens
tcacatcttagcccc

SEQ ID NO: 13240 - DNA, 15 bp, Homo sapiens
gtcacatcttagccc

SEQ ID NO: 13241 - DNA, 15 bp, Homo sapiens
agtcacatcttagcc

SEQ ID NO: 13242 - DNA, 15 bp, Homo sapiens
aagtcacatcttagc

SEQ ID NO: 13243 - DNA, 15 bp, Homo sapiens
caagtcacatcttag

SEQ ID NO: 13244 - DNA, 15 bp, Homo sapiens
tcaagtcacatctta

SEQ ID NO: 13245 - DNA, 15 bp, Homo sapiens
ttcaagtcacatctt

SEQ ID NO: 13246 - DNA, 15 bp, Homo sapiens
tttcaagtcacatct

SEQ ID NO: 13247 - DNA, 15 bp, Homo sapiens
ttttcaagtcacatc

SEQ ID NO: 13248 - DNA, 15 bp, Homo sapiens
cttttcaagtcacat

SEQ ID NO: 13249 - DNA, 15 bp, Homo sapiens
tcttttcaagtcaca

SEQ ID NO: 13250 - DNA, 15 bp, Homo sapiens
ttcttttcaagtcac

SEQ ID NO: 13251 - DNA, 15 bp, Homo sapiens
tttcttttcaagtca

SEQ ID NO: 13252 - DNA, 15 bp, Homo sapiens
ctttcttttcaagtc

SEQ ID NO: 13253 - DNA, 15 bp, Homo sapiens
cctttcttttcaagt

SEQ ID NO: 13254 - DNA, 15 bp, Homo sapiens
acctttcttttcaag

SEQ ID NO: 13255 - DNA, 15 bp, Homo sapiens
tacctttcttttcaa

SEQ ID NO: 13256 - DNA, 15 bp, Homo sapiens
ctacctttcttttca

SEQ ID NO: 13257 - DNA, 15 bp, Homo sapiens
tctacctttcttttc

SEQ ID NO: 13258 - DNA, 15 bp, Homo sapiens
ttctacctttctttt

SEQ ID NO: 13259 - DNA, 15 bp, Homo sapiens
gttctacctttcttt

SEQ ID NO: 13260 - DNA, 15 bp, Homo sapiens
tgttctacctttctt

SEQ ID NO: 13261 - DNA, 15 bp, Homo sapiens
ttgttctacctttct

SEQ ID NO: 13262 - DNA, 15 bp, Homo sapiens
cttgttctacctttc

SEQ ID NO: 13263 - DNA, 15 bp, Homo sapiens
tcttgttctaccttt

SEQ ID NO: 13264 - DNA, 15 bp, Homo sapiens
atcttgttctacctt

SEQ ID NO: 13265 - DNA, 15 bp, Homo sapiens
gatcttgttctacct

SEQ ID NO: 13266 - DNA, 15 bp, Homo sapiens
tgatcttgttctacc

SEQ ID NO: 13267 - DNA, 15 bp, Homo sapiens
atgatcttgttctac

SEQ ID NO: 13268 - DNA, 15 bp, Homo sapiens
gatgatcttgttcta

SEQ ID NO: 13269 - DNA, 15 bp, Homo sapiens
agatgatcttgttct

SEQ ID NO: 13270 - DNA, 15 bp, Homo sapiens
gagatgatcttgttc

SEQ ID NO: 13271 - DNA, 15 bp, Homo sapiens
tgagatgatcttgtt

SEQ ID NO: 13272 - DNA, 15 bp, Homo sapiens
ttgagatgatcttgt

SEQ ID NO: 13273 - DNA, 15 bp, Homo sapiens
tttgagatgatcttg

SEQ ID NO: 13274 - DNA, 15 bp, Homo sapiens
atttgagatgatctt

SEQ ID NO: 13275 - DNA, 15 bp, Homo sapiens
aatttgagatgatct

SEQ ID NO: 13276 - DNA, 15 bp, Homo sapiens
aaatttgagatgatc

SEQ ID NO: 13277 - DNA, 15 bp, Homo sapiens
taaatttgagatgat

SEQ ID NO: 13278 - DNA, 15 bp, Homo sapiens
ataaatttgagatga

SEQ ID NO: 13279 - DNA, 15 bp, Homo sapiens
aataaatttgagatg

SEQ ID NO: 13280 - DNA, 15 bp, Homo sapiens
taataaatttgagat

SEQ ID NO: 13281 - DNA, 15 bp, Homo sapiens
ataataaatttgaga

SEQ ID NO: 13282 - DNA, 15 bp, Homo sapiens
gataataaatttgag

SEQ ID NO: 13283 - DNA, 15 bp, Homo sapiens
tgataataaatttga

SEQ ID NO: 13284 - DNA, 15 bp, Homo sapiens
ttgataataaatttg

SEQ ID NO: 13285 - DNA, 15 bp, Homo sapiens
cttgataataaattt

SEQ ID NO: 13286 - DNA, 15 bp, Homo sapiens
ccttgataataaatt

SEQ ID NO: 13287 - DNA, 15 bp, Homo sapiens
tccttgataataaat

SEQ ID NO: 13288 - DNA, 15 bp, Homo sapiens
ttccttgataataaa

SEQ ID NO: 13289 - DNA, 15 bp, Homo sapiens
attccttgataataa

SEQ ID NO: 13290 - DNA, 15 bp, Homo sapiens
tattccttgataata

SEQ ID NO: 13291 - DNA, 15 bp, Homo sapiens
ctattccttgataat

SEQ ID NO: 13292 - DNA, 15 bp, Homo sapiens
actattccttgataa

SEQ ID NO: 13293 - DNA, 15 bp, Homo sapiens
aactattccttgata

SEQ ID NO: 13294 - DNA, 15 bp, Homo sapiens
gaactattccttgat

SEQ ID NO: 13295 - DNA, 15 bp, Homo sapiens
tgaactattccttga

SEQ ID NO: 13296 - DNA, 15 bp, Homo sapiens
ctgaactattccttg

SEQ ID NO: 13297 - DNA, 15 bp, Homo sapiens
tctgaactattcctt

SEQ ID NO: 13298 - DNA, 15 bp, Homo sapiens
ttctgaactattcct

SEQ ID NO: 13299 - DNA, 15 bp, Homo sapiens
tttctgaactattcc

SEQ ID NO: 13300 - DNA, 15 bp, Homo sapiens
ttttctgaactattc

SEQ ID NO: 13301 - DNA, 15 bp, Homo sapiens
gttttctgaactatt

SEQ ID NO: 13302 - DNA, 15 bp, Homo sapiens
cgttttctgaactat

SEQ ID NO: 13303 - DNA, 15 bp, Homo sapiens
tcgttttctgaacta

SEQ ID NO: 13304 - DNA, 15 bp, Homo sapiens
gtcgttttctgaact

SEQ ID NO: 13305 - DNA, 15 bp, Homo sapiens
agtcgttttctgaac

SEQ ID NO: 13306 - DNA, 15 bp, Homo sapiens
aagtcgttttctgaa

SEQ ID NO: 13307 - DNA, 15 bp, Homo sapiens
gaagtcgttttctga

SEQ ID NO: 13308 - DNA, 15 bp, Homo sapiens
tgaagtcgttttctg

SEQ ID NO: 13309 - DNA, 15 bp, Homo sapiens
ctgaagtcgttttct

SEQ ID NO: 13310 - DNA, 15 bp, Homo sapiens
tctgaagtcgttttc

SEQ ID NO: 13311 - DNA, 15 bp, Homo sapiens
gtctgaagtcgtttt

SEQ ID NO: 13312 - DNA, 15 bp, Homo sapiens
ggtctgaagtcgttt

SEQ ID NO: 13313 - DNA, 15 bp, Homo sapiens
tggtctgaagtcgtt

SEQ ID NO: 13314 - DNA, 15 bp, Homo sapiens
gtggtctgaagtcgt

SEQ ID NO: 13315 - DNA, 15 bp, Homo sapiens
tgtggtctgaagtcg

SEQ ID NO: 13316 - DNA, 15 bp, Homo sapiens
ctgtggtctgaagtc

SEQ ID NO: 13317 - DNA, 15 bp, Homo sapiens
tctgtggtctgaagt

SEQ ID NO: 13318 - DNA, 15 bp, Homo sapiens
ctctgtggtctgaag

SEQ ID NO: 13319 - DNA, 15 bp, Homo sapiens
tctctgtggtctgaa

SEQ ID NO: 13320 - DNA, 15 bp, Homo sapiens
gtctctgtggtctga

SEQ ID NO: 13321 - DNA, 15 bp, Homo sapiens
tgtctctgtggtctg

SEQ ID NO: 13322 - DNA, 15 bp, Homo sapiens
ctgtctctgtggtct

SEQ ID NO: 13323 - DNA, 15 bp, Homo sapiens
gctgtctctgtggtc

SEQ ID NO: 13324 - DNA, 15 bp, Homo sapiens
tgctgtctctgtggt

SEQ ID NO: 13325 - DNA, 15 bp, Homo sapiens
ctgctgtctctgtgg

SEQ ID NO: 13326 - DNA, 15 bp, Homo sapiens
tctgctgtctctgtg

SEQ ID NO: 13327 - DNA, 15 bp, Homo sapiens
ttctgctgtctctgt

SEQ ID NO: 13328 - DNA, 15 bp, Homo sapiens
gttctgctgtctctg

SEQ ID NO: 13329 - DNA, 15 bp, Homo sapiens
tgttctgctgtctct

SEQ ID NO: 13330 - DNA, 15 bp, Homo sapiens
ctgttctgctgtctc

SEQ ID NO: 13331 - DNA, 15 bp, Homo sapiens
tctgttctgctgtct

SEQ ID NO: 13332 - DNA, 15 bp, Homo sapiens
atctgttctgctgtc

SEQ ID NO: 13333 - DNA, 15 bp, Homo sapiens
catctgttctgctgt

SEQ ID NO: 13334 - DNA, 15 bp, Homo sapiens
ccatctgttctgctg

SEQ ID NO: 13335 - DNA, 15 bp, Homo sapiens
accatctgttctgct

SEQ ID NO: 13336 - DNA, 15 bp, Homo sapiens
gaccatctgttctgc

SEQ ID NO: 13337 - DNA, 15 bp, Homo sapiens
ggaccatctgttctg

SEQ ID NO: 13338 - DNA, 15 bp, Homo sapiens
cggaccatctgttct

SEQ ID NO: 13339 - DNA, 15 bp, Homo sapiens
ccggaccatctgttc

SEQ ID NO: 13340 - DNA, 15 bp, Homo sapiens
gccggaccatctgtt

SEQ ID NO: 13341 - DNA, 15 bp, Homo sapiens
tgccggaccatctgt

SEQ ID NO: 13342 - DNA, 15 bp, Homo sapiens
atgccggaccatctg

SEQ ID NO: 13343 - DNA, 15 bp, Homo sapiens
catgccggaccatct

SEQ ID NO: 13344 - DNA, 15 bp, Homo sapiens
ccatgccggaccatc

SEQ ID NO: 13345 - DNA, 15 bp, Homo sapiens
tccatgccggaccat

SEQ ID NO: 13346 - DNA, 15 bp, Homo sapiens
atccatgccggacca

SEQ ID NO: 13347 - DNA, 15 bp, Homo sapiens
tatccatgccggacc

SEQ ID NO: 13348 - DNA, 15 bp, Homo sapiens
ctatccatgccggac

SEQ ID NO: 13349 - DNA, 15 bp, Homo sapiens
tctatccatgccgga

SEQ ID NO: 13350 - DNA, 15 bp, Homo sapiens
ctctatccatgccgg

SEQ ID NO: 13351 - DNA, 15 bp, Homo sapiens
gctctatccatgccg

SEQ ID NO: 13352 - DNA, 15 bp, Homo sapiens
tgctctatccatgcc

SEQ ID NO: 13353 - DNA, 15 bp, Homo sapiens
atgctctatccatgc

SEQ ID NO: 13354 - DNA, 15 bp, Homo sapiens
gatgctctatccatg

SEQ ID NO: 13355 - DNA, 15 bp, Homo sapiens
tgatgctctatccat

SEQ ID NO: 13356 - DNA, 15 bp, Homo sapiens
ctgatgctctatcca

SEQ ID NO: 13357 - DNA, 15 bp, Homo sapiens
tctgatgctctatcc

SEQ ID NO: 13358 - DNA, 15 bp, Homo sapiens
gtctgatgctctatc

SEQ ID NO: 13359 - DNA, 15 bp, Homo sapiens
tgtctgatgctctat

SEQ ID NO: 13360 - DNA, 15 bp, Homo sapiens
gtgtctgatgctcta

SEQ ID NO: 13361 - DNA, 15 bp, Homo sapiens
agtgtctgatgctct

SEQ ID NO: 13362 - DNA, 15 bp, Homo sapiens
gagtgtctgatgctc

SEQ ID NO: 13363 - DNA, 15 bp, Homo sapiens
tgagtgtctgatgct

SEQ ID NO: 13364 - DNA, 15 bp, Homo sapiens
gtgagtgtctgatgc

SEQ ID NO: 13365 - DNA, 15 bp, Homo sapiens
tgtgagtgtctgatg

SEQ ID NO: 13366 - DNA, 15 bp, Homo sapiens
ctgtgagtgtctgat

SEQ ID NO: 13367 - DNA, 15 bp, Homo sapiens
tctgtgagtgtctga

SEQ ID NO: 13368 - DNA, 15 bp, Homo sapiens
gtctgtgagtgtctg

SEQ ID NO: 13369 - DNA, 15 bp, Homo sapiens
agtctgtgagtgtct

SEQ ID NO: 13370 - DNA, 15 bp, Homo sapiens
cagtctgtgagtgtc

SEQ ID NO: 13371 - DNA, 15 bp, Homo sapiens
acagtctgtgagtgt

SEQ ID NO: 13372 - DNA, 15 bp, Homo sapiens
cacagtctgtgagtg

SEQ ID NO: 13373 - DNA, 15 bp, Homo sapiens
gcacagtctgtgagt

SEQ ID NO: 13374 - DNA, 15 bp, Homo sapiens
ggcacagtctgtgag

SEQ ID NO: 13375 - DNA, 15 bp, Homo sapiens
tggcacagtctgtga

SEQ ID NO: 13376 - DNA, 15 bp, Homo sapiens
ttggcacagtctgtg

SEQ ID NO: 13377 - DNA, 15 bp, Homo sapiens
gttggcacagtctgt

SEQ ID NO: 13378 - DNA, 15 bp, Homo sapiens
tgttggcacagtctg

SEQ ID NO: 13379 - DNA, 15 bp, Homo sapiens
ttgttggcacagtct

SEQ ID NO: 13380 - DNA, 15 bp, Homo sapiens
cttgttggcacagtc

SEQ ID NO: 13381 - DNA, 15 bp, Homo sapiens
tcttgttggcacagt

SEQ ID NO: 13382 - DNA, 15 bp, Homo sapiens
ctcttgttggcacag

SEQ ID NO: 13383 - DNA, 15 bp, Homo sapiens
gctcttgttggcaca

SEQ ID NO: 13384 - DNA, 15 bp, Homo sapiens
ggctcttgttggcac

SEQ ID NO: 13385 - DNA, 15 bp, Homo sapiens
tggctcttgttggca

SEQ ID NO: 13386 - DNA, 15 bp, Homo sapiens
atggctcttgttggc

SEQ ID NO: 13387 - DNA, 15 bp, Homo sapiens
gatggctcttgttgg

SEQ ID NO: 13388 - DNA, 15 bp, Homo sapiens
cgatggctcttgttg

SEQ ID NO: 13389 - DNA, 15 bp, Homo sapiens
tcgatggctcttgtt

SEQ ID NO: 13390 - DNA, 15 bp, Homo sapiens
ctcgatggctcttgt

SEQ ID NO: 13391 - DNA, 15 bp, Homo sapiens
actcgatggctcttg

SEQ ID NO: 13392 - DNA, 15 bp, Homo sapiens
gactcgatggctctt

SEQ ID NO: 13393 - DNA, 15 bp, Homo sapiens
tgactcgatggctct

SEQ ID NO: 13394 - DNA, 15 bp, Homo sapiens
ttgactcgatggctc

SEQ ID NO: 13395 - DNA, 15 bp, Homo sapiens
tttgactcgatggct

SEQ ID NO: 13396 - DNA, 15 bp, Homo sapiens
ttttgactcgatggc

SEQ ID NO: 13397 - DNA, 15 bp, Homo sapiens
gttttgactcgatgg

SEQ ID NO: 13398 - DNA, 15 bp, Homo sapiens
tgttttgactcgatg

SEQ ID NO: 13399 - DNA, 15 bp, Homo sapiens
ctgttttgactcgat

SEQ ID NO: 13400 - DNA, 15 bp, Homo sapiens
gctgttttgactcga

SEQ ID NO: 13401 - DNA, 15 bp, Homo sapiens
ggctgttttgactcg

SEQ ID NO: 13402 - DNA, 15 bp, Homo sapiens
tggctgttttgactc

SEQ ID NO: 13403 - DNA, 15 bp, Homo sapiens
ttggctgttttgact

SEQ ID NO: 13404 - DNA, 15 bp, Homo sapiens
tttggctgttttgac

SEQ ID NO: 13405 - DNA, 15 bp, Homo sapiens
ctttggctgttttga

SEQ ID NO: 13406 - DNA, 15 bp, Homo sapiens
cctttggctgttttg

SEQ ID NO: 13407 - DNA, 15 bp, Homo sapiens
tcctttggctgtttt

SEQ ID NO: 13408 - DNA, 15 bp, Homo sapiens
ttcctttggctgttt

SEQ ID NO: 13409 - DNA, 15 bp, Homo sapiens
cttcctttggctgtt

SEQ ID NO: 13410 - DNA, 15 bp, Homo sapiens
ccttcctttggctgt

SEQ ID NO: 13411 - DNA, 15 bp, Homo sapiens
tccttcctttggctg

SEQ ID NO: 13412 - DNA, 15 bp, Homo sapiens
ctccttcctttggct

SEQ ID NO: 13413 - DNA, 15 bp, Homo sapiens
cctccttcctttggc

SEQ ID NO: 13414 - DNA, 15 bp, Homo sapiens
ccctccttcctttgg

SEQ ID NO: 13415 - DNA, 15 bp, Homo sapiens
accctccttcctttg

SEQ ID NO: 13416 - DNA, 15 bp, Homo sapiens
gaccctccttccttt

SEQ ID NO: 13417 - DNA, 15 bp, Homo sapiens
tgaccctccttcctt

SEQ ID NO: 13418 - DNA, 15 bp, Homo sapiens
atgaccctccttcct

SEQ ID NO: 13419 - DNA, 15 bp, Homo sapiens
catgaccctccttcc

SEQ ID NO: 13420 - DNA, 15 bp, Homo sapiens
ccatgaccctccttc

SEQ ID NO: 13421 - DNA, 15 bp, Homo sapiens
tccatgaccctcctt

SEQ ID NO: 13422 - DNA, 15 bp, Homo sapiens
ttccatgaccctcct

SEQ ID NO: 13423 - DNA, 15 bp, Homo sapiens
attccatgaccctcc

SEQ ID NO: 13424 - DNA, 15 bp, Homo sapiens
cattccatgaccctc

SEQ ID NO: 13425 - DNA, 15 bp, Homo sapiens
ccattccatgaccct

SEQ ID NO: 13426 - DNA, 15 bp, Homo sapiens
cccattccatgaccc

SEQ ID NO: 13427 - DNA, 15 bp, Homo sapiens
acccattccatgacc

SEQ ID NO: 13428 - DNA, 15 bp, Homo sapiens
aacccattccatgac

SEQ ID NO: 13429 - DNA, 15 bp, Homo sapiens
gaacccattccatga

SEQ ID NO: 13430 - DNA, 15 bp, Homo sapiens
agaacccattccatg

SEQ ID NO: 13431 - DNA, 15 bp, Homo sapiens
gagaacccattccat

SEQ ID NO: 13432 - DNA, 15 bp, Homo sapiens
agagaacccattcca

SEQ ID NO: 13433 - DNA, 15 bp, Homo sapiens
gagagaacccattcc

SEQ ID NO: 13434 - DNA, 15 bp, Homo sapiens
tgagagaacccattc

SEQ ID NO: 13435 - DNA, 15 bp, Homo sapiens
gtgagagaacccatt

SEQ ID NO: 13436 - DNA, 15 bp, Homo sapiens
tgtgagagaacccat

SEQ ID NO: 13437 - DNA, 15 bp, Homo sapiens
gtgtgagagaaccca

SEQ ID NO: 13438 - DNA, 15 bp, Homo sapiens
ggtgtgagagaaccc

SEQ ID NO: 13439 - DNA, 15 bp, Homo sapiens
tggtgtgagagaacc

SEQ ID NO: 13440 - DNA, 15 bp, Homo sapiens
ttggtgtgagagaac

SEQ ID NO: 13441 - DNA, 15 bp, Homo sapiens
tttggtgtgagagaa

SEQ ID NO: 13442 - DNA, 15 bp, Homo sapiens
gtttggtgtgagaga

SEQ ID NO: 13443 - DNA, 15 bp, Homo sapiens
agtttggtgtgagag

SEQ ID NO: 13444 - DNA, 15 bp, Homo sapiens
cagtttggtgtgaga

SEQ ID NO: 13445 - DNA, 15 bp, Homo sapiens
tcagtttggtgtgag

SEQ ID NO: 13446 - DNA, 15 bp, Homo sapiens
atcagtttggtgtga

SEQ ID NO: 13447 - DNA, 15 bp, Homo sapiens
catcagtttggtgtg

SEQ ID NO: 13448 - DNA, 15 bp, Homo sapiens
gcatcagtttggtgt

SEQ ID NO: 13449 - DNA, 15 bp, Homo sapiens
ggcatcagtttggtg

SEQ ID NO: 13450 - DNA, 15 bp, Homo sapiens
gggcatcagtttggt

SEQ ID NO: 13451 - DNA, 15 bp, Homo sapiens
tgggcatcagtttgg

SEQ ID NO: 13452 - DNA, 15 bp, Homo sapiens
ctgggcatcagtttg

SEQ ID NO: 13453 - DNA, 15 bp, Homo sapiens
tctgggcatcagttt

SEQ ID NO: 13454 - DNA, 15 bp, Homo sapiens
ctctgggcatcagtt

SEQ ID NO: 13455 - DNA, 15 bp, Homo sapiens
cctctgggcatcagt

SEQ ID NO: 13456 - DNA, 15 bp, Homo sapiens
gcctctgggcatcag

SEQ ID NO: 13457 - DNA, 15 bp, Homo sapiens
ggcctctgggcatca

SEQ ID NO: 13458 - DNA, 15 bp, Homo sapiens
gggcctctgggcatc

SEQ ID NO: 13459 - DNA, 15 bp, Homo sapiens
agggcctctgggcat

SEQ ID NO: 13460 - DNA, 15 bp, Homo sapiens
gagggcctctgggca

SEQ ID NO: 13461 - DNA, 15 bp, Homo sapiens
tgagggcctctgggc

SEQ ID NO: 13462 - DNA, 15 bp, Homo sapiens
ctgagggcctctggg

SEQ ID NO: 13463 - DNA, 15 bp, Homo sapiens
gctgagggcctctgg

SEQ ID NO: 13464 - DNA, 15 bp, Homo sapiens
tgctgagggcctctg

SEQ ID NO: 13465 - DNA, 15 bp, Homo sapiens
atgctgagggcctct

SEQ ID NO: 13466 - DNA, 15 bp, Homo sapiens
catgctgagggcctc

SEQ ID NO: 13467 - DNA, 15 bp, Homo sapiens
tcatgctgagggcct

SEQ ID NO: 13468 - DNA, 15 bp, Homo sapiens
ttcatgctgagggcc

SEQ ID NO: 13469 - DNA, 15 bp, Homo sapiens
attcatgctgagggc

SEQ ID NO: 13470 - DNA, 15 bp, Homo sapiens
tattcatgctgaggg

SEQ ID NO: 13471 - DNA, 15 bp, Homo sapiens
ttattcatgctgagg

SEQ ID NO: 13472 - DNA, 15 bp, Homo sapiens
gttattcatgctgag

SEQ ID NO: 13473 - DNA, 15 bp, Homo sapiens
tgttattcatgctga

SEQ ID NO: 13474 - DNA, 15 bp, Homo sapiens
ttgttattcatgctg

SEQ ID NO: 13475 - DNA, 15 bp, Homo sapiens
tttgttattcatgct

SEQ ID NO: 13476 - DNA, 15 bp, Homo sapiens
ctttgttattcatgc

SEQ ID NO: 13477 - DNA, 15 bp, Homo sapiens
cctttgttattcatg

SEQ ID NO: 13478 - DNA, 15 bp, Homo sapiens
gcctttgttattcat

SEQ ID NO: 13479 - DNA, 15 bp, Homo sapiens
tgcctttgttattca

SEQ ID NO: 13480 - DNA, 15 bp, Homo sapiens
ttgcctttgttattc

SEQ ID NO: 13481 - DNA, 15 bp, Homo sapiens
gttgcctttgttatt

SEQ ID NO: 13482 - DNA, 15 bp, Homo sapiens
ggttgcctttgttat

SEQ ID NO: 13483 - DNA, 15 bp, Homo sapiens
tggttgcctttgtta

SEQ ID NO: 13484 - DNA, 15 bp, Homo sapiens
ctggttgcctttgtt

SEQ ID NO: 13485 - DNA, 15 bp, Homo sapiens
tctggttgcctttgt

SEQ ID NO: 13486 - DNA, 15 bp, Homo sapiens
gtctggttgcctttg

SEQ ID NO: 13487 - DNA, 15 bp, Homo sapiens
ggtctggttgccttt

SEQ ID NO: 13488 - DNA, 15 bp, Homo sapiens
gggtctggttgcctt

SEQ ID NO: 13489 - DNA, 15 bp, Homo sapiens
tgggtctggttgcct

SEQ ID NO: 13490 - DNA, 15 bp, Homo sapiens
gtgggtctggttgcc

SEQ ID NO: 13491 - DNA, 15 bp, Homo sapiens
tgtgggtctggttgc

SEQ ID NO: 13492 - DNA, 15 bp, Homo sapiens
ttgtgggtctggttg

SEQ ID NO: 13493 - DNA, 15 bp, Homo sapiens
cttgtgggtctggtt

SEQ ID NO: 13494 - DNA, 15 bp, Homo sapiens
gcttgtgggtctggt

SEQ ID NO: 13495 - DNA, 15 bp, Homo sapiens
ggcttgtgggtctgg

SEQ ID NO: 13496 - DNA, 15 bp, Homo sapiens
tggcttgtgggtctg

SEQ ID NO: 13497 - DNA, 15 bp, Homo sapiens
atggcttgtgggtct

SEQ ID NO: 13498 - DNA, 15 bp, Homo sapiens
tatggcttgtgggtc

SEQ ID NO: 13499 - DNA, 15 bp, Homo sapiens
gtatggcttgtgggt

SEQ ID NO: 13500 - DNA, 15 bp, Homo sapiens
agtatggcttgtggg

SEQ ID NO: 13501 - DNA, 15 bp, Homo sapiens
cagtatggcttgtgg

SEQ ID NO: 13502 - DNA, 15 bp, Homo sapiens
tcagtatggcttgtg

SEQ ID NO: 13503 - DNA, 15 bp, Homo sapiens
ctcagtatggcttgt

SEQ ID NO: 13504 - DNA, 15 bp, Homo sapiens
actcagtatggcttg

SEQ ID NO: 13505 - DNA, 15 bp, Homo sapiens
cactcagtatggctt

SEQ ID NO: 13506 - DNA, 15 bp, Homo sapiens
ccactcagtatggct

SEQ ID NO: 13507 - DNA, 15 bp, Homo sapiens
tccactcagtatggc

SEQ ID NO: 13508 - DNA, 15 bp, Homo sapiens
atccactcagtatgg

SEQ ID NO: 13509 - DNA, 15 bp, Homo sapiens
tatccactcagtatg

SEQ ID NO: 13510 - DNA, 15 bp, Homo sapiens
gtatccactcagtat

SEQ ID NO: 13511 - DNA, 15 bp, Homo sapiens
tgtatccactcagta

SEQ ID NO: 13512 - DNA, 15 bp, Homo sapiens
ttgtatccactcagt

SEQ ID NO: 13513 - DNA, 15 bp, Homo sapiens
tttgtatccactcag

SEQ ID NO: 13514 - DNA, 15 bp, Homo sapiens
ttttgtatccactca

SEQ ID NO: 13515 - DNA, 15 bp, Homo sapiens
gttttgtatccactc

SEQ ID NO: 13516 - DNA, 15 bp, Homo sapiens
ggttttgtatccact

SEQ ID NO: 13517 - DNA, 15 bp, Homo sapiens
aggttttgtatccac

SEQ ID NO: 13518 - DNA, 15 bp, Homo sapiens
taggttttgtatcca

SEQ ID NO: 13519 - DNA, 15 bp, Homo sapiens
ataggttttgtatcc

SEQ ID NO: 13520 - DNA, 15 bp, Homo sapiens
tataggttttgtatc

SEQ ID NO: 13521 - DNA, 15 bp, Homo sapiens
gtataggttttgtat

SEQ ID NO: 13522 - DNA, 15 bp, Homo sapiens
ggtataggttttgta

SEQ ID NO: 13523 - DNA, 15 bp, Homo sapiens
aggtataggttttgt

SEQ ID NO: 13524 - DNA, 15 bp, Homo sapiens
taggtataggttttg

SEQ ID NO: 13525 - DNA, 15 bp, Homo sapiens
ctaggtataggtttt

SEQ ID NO: 13526 - DNA, 15 bp, Homo sapiens
cctaggtataggttt

SEQ ID NO: 13527 - DNA, 15 bp, Homo sapiens
gcctaggtataggtt

SEQ ID NO: 13528 - DNA, 15 bp, Homo sapiens
agcctaggtataggt

SEQ ID NO: 13529 - DNA, 15 bp, Homo sapiens
cagcctaggtatagg

SEQ ID NO: 13530 - DNA, 15 bp, Homo sapiens
tcagcctaggtatag

SEQ ID NO: 13531 - DNA, 15 bp, Homo sapiens
gtcagcctaggtata

SEQ ID NO: 13532 - DNA, 15 bp, Homo sapiens
tgtcagcctaggtat

SEQ ID NO: 13533 - DNA, 15 bp, Homo sapiens
atgtcagcctaggta

SEQ ID NO: 13534 - DNA, 15 bp, Homo sapiens
gatgtcagcctaggt

SEQ ID NO: 13535 - DNA, 15 bp, Homo sapiens
ggatgtcagcctagg

SEQ ID NO: 13536 - DNA, 15 bp, Homo sapiens
gggatgtcagcctag

SEQ ID NO: 13537 - DNA, 15 bp, Homo sapiens
tgggatgtcagccta

SEQ ID NO: 13538 - DNA, 15 bp, Homo sapiens
ttgggatgtcagcct

SEQ ID NO: 13539 - DNA, 15 bp, Homo sapiens
tttgggatgtcagcc

SEQ ID NO: 13540 - DNA, 15 bp, Homo sapiens
atttgggatgtcagc

SEQ ID NO: 13541 - DNA, 15 bp, Homo sapiens
catttgggatgtcag

SEQ ID NO: 13542 - DNA, 15 bp, Homo sapiens
acatttgggatgtca

SEQ ID NO: 13543 - DNA, 15 bp, Homo sapiens
cacatttgggatgtc

SEQ ID NO: 13544 - DNA, 15 bp, Homo sapiens
acacatttgggatgt

SEQ ID NO: 13545 - DNA, 15 bp, Homo sapiens
cacacatttgggatg

SEQ ID NO: 13546 - DNA, 15 bp, Homo sapiens
acacacatttgggat

SEQ ID NO: 13547 - DNA, 15 bp, Homo sapiens
cacacacatttggga

SEQ ID NO: 13548 - DNA, 15 bp, Homo sapiens
ccacacacatttggg

SEQ ID NO: 13549 - DNA, 15 bp, Homo sapiens
gccacacacatttgg

SEQ ID NO: 13550 - DNA, 15 bp, Homo sapiens
tgccacacacatttg

SEQ ID NO: 13551 - DNA, 15 bp, Homo sapiens
ttgccacacacattt

SEQ ID NO: 13552 - DNA, 15 bp, Homo sapiens
cttgccacacacatt

SEQ ID NO: 13553 - DNA, 15 bp, Homo sapiens
acttgccacacacat

SEQ ID NO: 13554 - DNA, 15 bp, Homo sapiens
aacttgccacacaca

SEQ ID NO: 13555 - DNA, 15 bp, Homo sapiens
taacttgccacacac

SEQ ID NO: 13556 - DNA, 15 bp, Homo sapiens
ctaacttgccacaca

SEQ ID NO: 13557 - DNA, 15 bp, Homo sapiens
tctaacttgccacac

SEQ ID NO: 13558 - DNA, 15 bp, Homo sapiens
atctaacttgccaca

SEQ ID NO: 13559 - DNA, 15 bp, Homo sapiens
catctaacttgccac

SEQ ID NO: 13560 - DNA, 15 bp, Homo sapiens
tcatctaacttgcca

SEQ ID NO: 13561 - DNA, 15 bp, Homo sapiens
atcatctaacttgcc

SEQ ID NO: 13562 - DNA, 15 bp, Homo sapiens
catcatctaacttgc

SEQ ID NO: 13563 - DNA, 15 bp, Homo sapiens
tcatcatctaacttg

SEQ ID NO: 13564 - DNA, 15 bp, Homo sapiens
atcatcatctaactt

SEQ ID NO: 13565 - DNA, 15 bp, Homo sapiens
catcatcatctaact

SEQ ID NO: 13566 - DNA, 15 bp, Homo sapiens
ccatcatcatctaac

SEQ ID NO: 13567 - DNA, 15 bp, Homo sapiens
gccatcatcatctaa

SEQ ID NO: 13568 - DNA, 15 bp, Homo sapiens
tgccatcatcatcta

SEQ ID NO: 13569 - DNA, 15 bp, Homo sapiens
gtgccatcatcatct

SEQ ID NO: 13570 - DNA, 15 bp, Homo sapiens
tgtgccatcatcatc

SEQ ID NO: 13571 - DNA, 15 bp, Homo sapiens
ttgtgccatcatcat

SEQ ID NO: 13572 - DNA, 15 bp, Homo sapiens
tttgtgccatcatca

SEQ ID NO: 13573 - DNA, 15 bp, Homo sapiens
ttttgtgccatcatc

SEQ ID NO: 13574 - DNA, 15 bp, Homo sapiens
cttttgtgccatcat

SEQ ID NO: 13575 - DNA, 15 bp, Homo sapiens
tcttttgtgccatca

SEQ ID NO: 13576 - DNA, 15 bp, Homo sapiens
gtcttttgtgccatc

SEQ ID NO: 13577 - DNA, 15 bp, Homo sapiens
tgtcttttgtgccat

SEQ ID NO: 13578 - DNA, 15 bp, Homo sapiens
ctgtcttttgtgcca

SEQ ID NO: 13579 - DNA, 15 bp, Homo sapiens
tctgtcttttgtgcc

SEQ ID NO: 13580 - DNA, 15 bp, Homo sapiens
ttctgtcttttgtgc

SEQ ID NO: 13581 - DNA, 15 bp, Homo sapiens
gttctgtcttttgtg

SEQ ID NO: 13582 - DNA, 15 bp, Homo sapiens
tgttctgtcttttgt

SEQ ID NO: 13583 - DNA, 15 bp, Homo sapiens
gtgttctgtcttttg

SEQ ID NO: 13584 - DNA, 15 bp, Homo sapiens
ggtgttctgtctttt

SEQ ID NO: 13585 - DNA, 15 bp, Homo sapiens
aggtgttctgtcttt

SEQ ID NO: 13586 - DNA, 15 bp, Homo sapiens
aaggtgttctgtctt

SEQ ID NO: 13587 - DNA, 15 bp, Homo sapiens
caaggtgttctgtct

SEQ ID NO: 13588 - DNA, 15 bp, Homo sapiens
gcaaggtgttctgtc

SEQ ID NO: 13589 - DNA, 15 bp, Homo sapiens
agcaaggtgttctgt

SEQ ID NO: 13590 - DNA, 15 bp, Homo sapiens
aagcaaggtgttctg

SEQ ID NO: 13591 - DNA, 15 bp, Homo sapiens
gaagcaaggtgttct

SEQ ID NO: 13592 - DNA, 15 bp, Homo sapiens
agaagcaaggtgttc

SEQ ID NO: 13593 - DNA, 15 bp, Homo sapiens
cagaagcaaggtgtt

SEQ ID NO: 13594 - DNA, 15 bp, Homo sapiens
ccagaagcaaggtgt

SEQ ID NO: 13595 - DNA, 15 bp, Homo sapiens
gccagaagcaaggtg

SEQ ID NO: 13596 - DNA, 15 bp, Homo sapiens
ggccagaagcaaggt

SEQ ID NO: 13597 - DNA, 15 bp, Homo sapiens
tggccagaagcaagg

SEQ ID NO: 13598 - DNA, 15 bp, Homo sapiens
atggccagaagcaag

SEQ ID NO: 13599 - DNA, 15 bp, Homo sapiens
aatggccagaagcaa

SEQ ID NO: 13600 - DNA, 15 bp, Homo sapiens
caatggccagaagca

SEQ ID NO: 13601 - DNA, 15 bp, Homo sapiens
acaatggccagaagc

SEQ ID NO: 13602 - DNA, 15 bp, Homo sapiens
gacaatggccagaag

SEQ ID NO: 13603 - DNA, 15 bp, Homo sapiens
tgacaatggccagaa

SEQ ID NO: 13604 - DNA, 15 bp, Homo sapiens
ctgacaatggccaga

SEQ ID NO: 13605 - DNA, 15 bp, Homo sapiens
gctgacaatggccag

SEQ ID NO: 13606 - DNA, 15 bp, Homo sapiens
agctgacaatggcca

SEQ ID NO: 13607 - DNA, 15 bp, Homo sapiens
gagctgacaatggcc

SEQ ID NO: 13608 - DNA, 15 bp, Homo sapiens
agagctgacaatggc

SEQ ID NO: 13609 - DNA, 15 bp, Homo sapiens
aagagctgacaatgg

SEQ ID NO: 13610 - DNA, 15 bp, Homo sapiens
caagagctgacaatg

SEQ ID NO: 13611 - DNA, 15 bp, Homo sapiens
ccaagagctgacaat

SEQ ID NO: 13612 - DNA, 15 bp, Homo sapiens
tccaagagctgacaa

SEQ ID NO: 13613 - DNA, 15 bp, Homo sapiens
ttccaagagctgaca

SEQ ID NO: 13614 - DNA, 15 bp, Homo sapiens
cttccaagagctgac

SEQ ID NO: 13615 - DNA, 15 bp, Homo sapiens
tcttccaagagctga

SEQ ID NO: 13616 - DNA, 15 bp, Homo sapiens
ctcttccaagagctg

SEQ ID NO: 13617 - DNA, 15 bp, Homo sapiens
tctcttccaagagct

SEQ ID NO: 13618 - DNA, 15 bp, Homo sapiens
ctctcttccaagagc

SEQ ID NO: 13619 - DNA, 15 bp, Homo sapiens
gctctcttccaagag

SEQ ID NO: 13620 - DNA, 15 bp, Homo sapiens
tgctctcttccaaga

SEQ ID NO: 13621 - DNA, 15 bp, Homo sapiens
gtgctctcttccaag

SEQ ID NO: 13622 - DNA, 15 bp, Homo sapiens
tgtgctctcttccaa

SEQ ID NO: 13623 - DNA, 15 bp, Homo sapiens
gtgtgctctcttcca

SEQ ID NO: 13624 - DNA, 15 bp, Homo sapiens
agtgtgctctcttcc

SEQ ID NO: 13625 - DNA, 15 bp, Homo sapiens
aagtgtgctctcttc

SEQ ID NO: 13626 - DNA, 15 bp, Homo sapiens
aaagtgtgctctctt

SEQ ID NO: 13627 - DNA, 15 bp, Homo sapiens
aaaagtgtgctctct

SEQ ID NO: 13628 - DNA, 15 bp, Homo sapiens
taaaagtgtgctctc

SEQ ID NO: 13629 - DNA, 15 bp, Homo sapiens
ctaaaagtgtgctct

SEQ ID NO: 13630 - DNA, 15 bp, Homo sapiens
tctaaaagtgtgctc

SEQ ID NO: 13631 - DNA, 15 bp, Homo sapiens
ctctaaaagtgtgct

SEQ ID NO: 13632 - DNA, 15 bp, Homo sapiens
cctctaaaagtgtgc

SEQ ID NO: 13633 - DNA, 15 bp, Homo sapiens
tcctctaaaagtgtg

SEQ ID NO: 13634 - DNA, 15 bp, Homo sapiens
ctcctctaaaagtgt

SEQ ID NO: 13635 - DNA, 15 bp, Homo sapiens
gctcctctaaaagtg

SEQ ID NO: 13636 - DNA, 15 bp, Homo sapiens
tgctcctctaaaagt

SEQ ID NO: 13637 - DNA, 15 bp, Homo sapiens
ctgctcctctaaaag

SEQ ID NO: 13638 - DNA, 15 bp, Homo sapiens
gctgctcctctaaaa

SEQ ID NO: 13639 - DNA, 15 bp, Homo sapiens
agctgctcctctaaa

SEQ ID NO: 13640 - DNA, 15 bp, Homo sapiens
cagctgctcctctaa

SEQ ID NO: 13641 - DNA, 15 bp, Homo sapiens
gcagctgctcctcta

SEQ ID NO: 13642 - DNA, 15 bp, Homo sapiens
tgcagctgctcctct

SEQ ID NO: 13643 - DNA, 15 bp, Homo sapiens
ttgcagctgctcctc

SEQ ID NO: 13644 - DNA, 15 bp, Homo sapiens
cttgcagctgctcct

SEQ ID NO: 13645 - DNA, 15 bp, Homo sapiens
ccttgcagctgctcc

SEQ ID NO: 13646 - DNA, 15 bp, Homo sapiens
tccttgcagctgctc

SEQ ID NO: 13647 - DNA, 15 bp, Homo sapiens
ctccttgcagctgct

SEQ ID NO: 13648 - DNA, 15 bp, Homo sapiens
gctccttgcagctgc

SEQ ID NO: 13649 - DNA, 15 bp, Homo sapiens
ggctccttgcagctg

SEQ ID NO: 13650 - DNA, 15 bp, Homo sapiens
aggctccttgcagct

SEQ ID NO: 13651 - DNA, 15 bp, Homo sapiens
caggctccttgcagc

SEQ ID NO: 13652 - DNA, 15 bp, Homo sapiens
tcaggctccttgcag

SEQ ID NO: 13653 - DNA, 15 bp, Homo sapiens
ctcaggctccttgca

SEQ ID NO: 13654 - DNA, 15 bp, Homo sapiens
tctcaggctccttgc

SEQ ID NO: 13655 - DNA, 15 bp, Homo sapiens
ttctcaggctccttg

SEQ ID NO: 13656 - DNA, 15 bp, Homo sapiens
gttctcaggctcctt

SEQ ID NO: 13657 - DNA, 15 bp, Homo sapiens
tgttctcaggctcct

SEQ ID NO: 13658 - DNA, 15 bp, Homo sapiens
ttgttctcaggctcc

SEQ ID NO: 13659 - DNA, 15 bp, Homo sapiens
tttgttctcaggctc

SEQ ID NO: 13660 - DNA, 15 bp, Homo sapiens
ttttgttctcaggct

SEQ ID NO: 13661 - DNA, 15 bp, Homo sapiens
gttttgttctcaggc

SEQ ID NO: 13662 - DNA, 15 bp, Homo sapiens
agttttgttctcagg

SEQ ID NO: 13663 - DNA, 15 bp, Homo sapiens
cagttttgttctcag

SEQ ID NO: 13664 - DNA, 15 bp, Homo sapiens
ccagttttgttctca

SEQ ID NO: 13665 - DNA, 15 bp, Homo sapiens
tccagttttgttctc

SEQ ID NO: 13666 - DNA, 15 bp, Homo sapiens
ttccagttttgttct

SEQ ID NO: 13667 - DNA, 15 bp, Homo sapiens
tttccagttttgttc

SEQ ID NO: 13668 - DNA, 15 bp, Homo sapiens
atttccagttttgtt

SEQ ID NO: 13669 - DNA, 15 bp, Homo sapiens
catttccagttttgt

SEQ ID NO: 13670 - DNA, 15 bp, Homo sapiens
acatttccagttttg

SEQ ID NO: 13671 - DNA, 15 bp, Homo sapiens
gacatttccagtttt

SEQ ID NO: 13672 - DNA, 15 bp, Homo sapiens
agacatttccagttt

SEQ ID NO: 13673 - DNA, 15 bp, Homo sapiens
cagacatttccagtt

SEQ ID NO: 13674 - DNA, 15 bp, Homo sapiens
acagacatttccagt

SEQ ID NO: 13675 - DNA, 15 bp, Homo sapiens
aacagacatttccag

SEQ ID NO: 13676 - DNA, 15 bp, Homo sapiens
taacagacatttcca

SEQ ID NO: 13677 - DNA, 15 bp, Homo sapiens
ataacagacatttcc

SEQ ID NO: 13678 - DNA, 15 bp, Homo sapiens
cataacagacatttc

SEQ ID NO: 13679 - DNA, 15 bp, Homo sapiens
tcataacagacattt

SEQ ID NO: 13680 - DNA, 15 bp, Homo sapiens
ttcataacagacatt

SEQ ID NO: 13681 - DNA, 15 bp, Homo sapiens
tttcataacagacat

SEQ ID NO: 13682 - DNA, 15 bp, Homo sapiens
ctttcataacagaca

SEQ ID NO: 13683 - DNA, 15 bp, Homo sapiens
gctttcataacagac

SEQ ID NO: 13684 - DNA, 15 bp, Homo sapiens
ggctttcataacaga

SEQ ID NO: 13685 - DNA, 15 bp, Homo sapiens
aggctttcataacag

SEQ ID NO: 13686 - DNA, 15 bp, Homo sapiens
aaggctttcataaca

SEQ ID NO: 13687 - DNA, 15 bp, Homo sapiens
gaaggctttcataac

SEQ ID NO: 13688 - DNA, 15 bp, Homo sapiens
tgaaggctttcataa

SEQ ID NO: 13689 - DNA, 15 bp, Homo sapiens
gtgaaggctttcata

SEQ ID NO: 13690 - DNA, 15 bp, Homo sapiens
tgtgaaggctttcat

SEQ ID NO: 13691 - DNA, 15 bp, Homo sapiens
ctgtgaaggctttca

SEQ ID NO: 13692 - DNA, 15 bp, Homo sapiens
cctgtgaaggctttc

SEQ ID NO: 13693 - DNA, 15 bp, Homo sapiens
acctgtgaaggcttt

SEQ ID NO: 13694 - DNA, 15 bp, Homo sapiens
tacctgtgaaggctt

SEQ ID NO: 13695 - DNA, 15 bp, Homo sapiens
atacctgtgaaggct

SEQ ID NO: 13696 - DNA, 15 bp, Homo sapiens
aatacctgtgaaggc

SEQ ID NO: 13697 - DNA, 15 bp, Homo sapiens
taatacctgtgaagg

SEQ ID NO: 13698 - DNA, 15 bp, Homo sapiens
ataatacctgtgaag

SEQ ID NO: 13699 - DNA, 15 bp, Homo sapiens
aataatacctgtgaa

SEQ ID NO: 13700 - DNA, 15 bp, Homo sapiens
taataatacctgtga

SEQ ID NO: 13701 - DNA, 15 bp, Homo sapiens
ttaataatacctgtg

SEQ ID NO: 13702 - DNA, 15 bp, Homo sapiens
gttaataatacctgt

SEQ ID NO: 13703 - DNA, 15 bp, Homo sapiens
tgttaataatacctg

SEQ ID NO: 13704 - DNA, 15 bp, Homo sapiens
ttgttaataatacct

SEQ ID NO: 13705 - DNA, 15 bp, Homo sapiens
tttgttaataatacc

SEQ ID NO: 13706 - DNA, 15 bp, Homo sapiens
ttttgttaataatac

SEQ ID NO: 13707 - DNA, 15 bp, Homo sapiens
cttttgttaataata

SEQ ID NO: 13708 - DNA, 15 bp, Homo sapiens
tcttttgttaataat

SEQ ID NO: 13709 - DNA, 15 bp, Homo sapiens
ttcttttgttaataa

SEQ ID NO: 13710 - DNA, 15 bp, Homo sapiens
tttcttttgttaata

SEQ ID NO: 13711 - DNA, 15 bp, Homo sapiens
ttttcttttgttaat

SEQ ID NO: 13712 - DNA, 15 bp, Homo sapiens
attttcttttgttaa

SEQ ID NO: 13713 - DNA, 15 bp, Homo sapiens
cattttcttttgtta

SEQ ID NO: 13714 - DNA, 15 bp, Homo sapiens
acattttcttttgtt

SEQ ID NO: 13715 - DNA, 15 bp, Homo sapiens
gacattttcttttgt

SEQ ID NO: 13716 - DNA, 15 bp, Homo sapiens
agacattttcttttg

SEQ ID NO: 13717 - DNA, 15 bp, Homo sapiens
tagacattttctttt

SEQ ID NO: 13718 - DNA, 15 bp, Homo sapiens
atagacattttcttt

SEQ ID NO: 13719 - DNA, 15 bp, Homo sapiens
aatagacattttctt

SEQ ID NO: 13720 - DNA, 15 bp, Homo sapiens
aaatagacattttct

SEQ ID NO: 13721 - DNA, 15 bp, Homo sapiens
caaatagacattttc

SEQ ID NO: 13722 - DNA, 15 bp, Homo sapiens
acaaatagacatttt

SEQ ID NO: 13723 - DNA, 15 bp, Homo sapiens
gacaaatagacattt

SEQ ID NO: 13724 - DNA, 15 bp, Homo sapiens
tgacaaatagacatt

SEQ ID NO: 13725 - DNA, 15 bp, Homo sapiens
ttgacaaatagacat

SEQ ID NO: 13726 - DNA, 15 bp, Homo sapiens
attgacaaatagaca

SEQ ID NO: 13727 - DNA, 15 bp, Homo sapiens
cattgacaaatagac

SEQ ID NO: 13728 - DNA, 15 bp, Homo sapiens
ccattgacaaataga

SEQ ID NO: 13729 - DNA, 15 bp, Homo sapiens
accattgacaaatag

SEQ ID NO: 13730 - DNA, 15 bp, Homo sapiens
caccattgacaaata

SEQ ID NO: 13731 - DNA, 15 bp, Homo sapiens
acaccattgacaaat

SEQ ID NO: 13732 - DNA, 15 bp, Homo sapiens
aacaccattgacaaa

SEQ ID NO: 13733 - DNA, 15 bp, Homo sapiens
aaacaccattgacaa

SEQ ID NO: 13734 - DNA, 15 bp, Homo sapiens
gaaacaccattgaca

SEQ ID NO: 13735 - DNA, 15 bp, Homo sapiens
tgaaacaccattgac

SEQ ID NO: 13736 - DNA, 15 bp, Homo sapiens
ctgaaacaccattga

SEQ ID NO: 13737 - DNA, 15 bp, Homo sapiens
gctgaaacaccattg

SEQ ID NO: 13738 - DNA, 15 bp, Homo sapiens
agctgaaacaccatt

SEQ ID NO: 13739 - DNA, 15 bp, Homo sapiens
tagctgaaacaccat

SEQ ID NO: 13740 - DNA, 15 bp, Homo sapiens
ctagctgaaacacca

SEQ ID NO: 13741 - DNA, 15 bp, Homo sapiens
tctagctgaaacacc

SEQ ID NO: 13742 - DNA, 15 bp, Homo sapiens
atctagctgaaacac

SEQ ID NO: 13743 - DNA, 15 bp, Homo sapiens
aatctagctgaaaca

SEQ ID NO: 13744 - DNA, 15 bp, Homo sapiens
aaatctagctgaaac

SEQ ID NO: 13745 - DNA, 15 bp, Homo sapiens
aaaatctagctgaaa

SEQ ID NO: 13746 - DNA, 15 bp, Homo sapiens
caaaatctagctgaa

SEQ ID NO: 13747 - DNA, 15 bp, Homo sapiens
ccaaaatctagctga

SEQ ID NO: 13748 - DNA, 15 bp, Homo sapiens
gccaaaatctagctg

SEQ ID NO: 13749 - DNA, 15 bp, Homo sapiens
tgccaaaatctagct

SEQ ID NO: 13750 - DNA, 15 bp, Homo sapiens
ctgccaaaatctagc

SEQ ID NO: 13751 - DNA, 15 bp, Homo sapiens
actgccaaaatctag

SEQ ID NO: 13752 - DNA, 15 bp, Homo sapiens
gactgccaaaatcta

SEQ ID NO: 13753 - DNA, 15 bp, Homo sapiens
ggactgccaaaatct

SEQ ID NO: 13754 - DNA, 15 bp, Homo sapiens
tggactgccaaaatc

SEQ ID NO: 13755 - DNA, 15 bp, Homo sapiens
atggactgccaaaat

SEQ ID NO: 13756 - DNA, 15 bp, Homo sapiens
aatggactgccaaaa

SEQ ID NO: 13757 - DNA, 15 bp, Homo sapiens
gaatggactgccaaa

SEQ ID NO: 13758 - DNA, 15 bp, Homo sapiens
agaatggactgccaa

SEQ ID NO: 13759 - DNA, 15 bp, Homo sapiens
aagaatggactgcca

SEQ ID NO: 13760 - DNA, 15 bp, Homo sapiens
taagaatggactgcc

SEQ ID NO: 13761 - DNA, 15 bp, Homo sapiens
ataagaatggactgc

SEQ ID NO: 13762 - DNA, 15 bp, Homo sapiens
cataagaatggactg

SEQ ID NO: 13763 - DNA, 15 bp, Homo sapiens
gcataagaatggact

SEQ ID NO: 13764 - DNA, 15 bp, Homo sapiens
ggcataagaatggac

SEQ ID NO: 13765 - DNA, 15 bp, Homo sapiens
gggcataagaatgga

SEQ ID NO: 13766 - DNA, 15 bp, Homo sapiens
tgggcataagaatgg

SEQ ID NO: 13767 - DNA, 15 bp, Homo sapiens
ctgggcataagaatg

SEQ ID NO: 13768 - DNA, 15 bp, Homo sapiens
cctgggcataagaat

SEQ ID NO: 13769 - DNA, 15 bp, Homo sapiens
tcctgggcataagaa

SEQ ID NO: 13770 - DNA, 15 bp, Homo sapiens
ttcctgggcataaga

SEQ ID NO: 13771 - DNA, 15 bp, Homo sapiens
attcctgggcataag

SEQ ID NO: 13772 - DNA, 15 bp, Homo sapiens
cattcctgggcataa

SEQ ID NO: 13773 - DNA, 15 bp, Homo sapiens
tcattcctgggcata

SEQ ID NO: 13774 - DNA, 15 bp, Homo sapiens
gtcattcctgggcat

SEQ ID NO: 13775 - DNA, 15 bp, Homo sapiens
ggtcattcctgggca

SEQ ID NO: 13776 - DNA, 15 bp, Homo sapiens
aggtcattcctgggc

SEQ ID NO: 13777 - DNA, 15 bp, Homo sapiens
gaggtcattcctggg

SEQ ID NO: 13778 - DNA, 15 bp, Homo sapiens
agaggtcattcctgg

SEQ ID NO: 13779 - DNA, 15 bp, Homo sapiens
aagaggtcattcctg

SEQ ID NO: 13780 - DNA, 15 bp, Homo sapiens
caagaggtcattcct

SEQ ID NO: 13781 - DNA, 15 bp, Homo sapiens
acaagaggtcattcc

SEQ ID NO: 13782 - DNA, 15 bp, Homo sapiens
cacaagaggtcattc

SEQ ID NO: 13783 - DNA, 15 bp, Homo sapiens
acacaagaggtcatt

SEQ ID NO: 13784 - DNA, 15 bp, Homo sapiens
tacacaagaggtcat

SEQ ID NO: 13785 - DNA, 15 bp, Homo sapiens
ctacacaagaggtca

SEQ ID NO: 13786 - DNA, 15 bp, Homo sapiens
tctacacaagaggtc

SEQ ID NO: 13787 - DNA, 15 bp, Homo sapiens
gtctacacaagaggt

SEQ ID NO: 13788 - DNA, 15 bp, Homo sapiens
agtctacacaagagg

SEQ ID NO: 13789 - DNA, 15 bp, Homo sapiens
cagtctacacaagag

SEQ ID NO: 13790 - DNA, 15 bp, Homo sapiens
ccagtctacacaaga

SEQ ID NO: 13791 - DNA, 15 bp, Homo sapiens
tccagtctacacaag

SEQ ID NO: 13792 - DNA, 15 bp, Homo sapiens
atccagtctacacaa

SEQ ID NO: 13793 - DNA, 15 bp, Homo sapiens
tatccagtctacaca

SEQ ID NO: 13794 - DNA, 15 bp, Homo sapiens
gtatccagtctacac

SEQ ID NO: 13795 - DNA, 15 bp, Homo sapiens
tgtatccagtctaca

SEQ ID NO: 13796 - DNA, 15 bp, Homo sapiens
ctgtatccagtctac

SEQ ID NO: 13797 - DNA, 15 bp, Homo sapiens
actgtatccagtcta

SEQ ID NO: 13798 - DNA, 15 bp, Homo sapiens
gactgtatccagtct

SEQ ID NO: 13799 - DNA, 15 bp, Homo sapiens
tgactgtatccagtc

SEQ ID NO: 13800 - DNA, 15 bp, Homo sapiens
atgactgtatccagt

SEQ ID NO: 13801 - DNA, 15 bp, Homo sapiens
gatgactgtatccag

SEQ ID NO: 13802 - DNA, 15 bp, Homo sapiens
tgatgactgtatcca

SEQ ID NO: 13803 - DNA, 15 bp, Homo sapiens
ttgatgactgtatcc

SEQ ID NO: 13804 - DNA, 15 bp, Homo sapiens
attgatgactgtatc

SEQ ID NO: 13805 - DNA, 15 bp, Homo sapiens
cattgatgactgtat

SEQ ID NO: 13806 - DNA, 15 bp, Homo sapiens
gcattgatgactgta

SEQ ID NO: 13807 - DNA, 15 bp, Homo sapiens
tgcattgatgactgt

SEQ ID NO: 13808 - DNA, 15 bp, Homo sapiens
ttgcattgatgactg

SEQ ID NO: 13809 - DNA, 15 bp, Homo sapiens
gttgcattgatgact

SEQ ID NO: 13810 - DNA, 15 bp, Homo sapiens
agttgcattgatgac

SEQ ID NO: 13811 - DNA, 15 bp, Homo sapiens
cagttgcattgatga

SEQ ID NO: 13812 - DNA, 15 bp, Homo sapiens
acagttgcattgatg

SEQ ID NO: 13813 - DNA, 15 bp, Homo sapiens
gacagttgcattgat

SEQ ID NO: 13814 - DNA, 15 bp, Homo sapiens
ggacagttgcattga

SEQ ID NO: 13815 - DNA, 15 bp, Homo sapiens
tggacagttgcattg

SEQ ID NO: 13816 - DNA, 15 bp, Homo sapiens
ctggacagttgcatt

SEQ ID NO: 13817 - DNA, 15 bp, Homo sapiens
cctggacagttgcat

SEQ ID NO: 13818 - DNA, 15 bp, Homo sapiens
acctggacagttgca

SEQ ID NO: 13819 - DNA, 15 bp, Homo sapiens
cacctggacagttgc

SEQ ID NO: 13820 - DNA, 15 bp, Homo sapiens
gcacctggacagttg

SEQ ID NO: 13821 - DNA, 15 bp, Homo sapiens
tgcacctggacagtt

SEQ ID NO: 13822 - DNA, 15 bp, Homo sapiens
ttgcacctggacagt

SEQ ID NO: 13823 - DNA, 15 bp, Homo sapiens
gttgcacctggacag

SEQ ID NO: 13824 - DNA, 15 bp, Homo sapiens
agttgcacctggaca

SEQ ID NO: 13825 - DNA, 15 bp, Homo sapiens
gagttgcacctggac

SEQ ID NO: 13826 - DNA, 15 bp, Homo sapiens
agagttgcacctgga

SEQ ID NO: 13827 - DNA, 15 bp, Homo sapiens
aagagttgcacctgg

SEQ ID NO: 13828 - DNA, 15 bp, Homo sapiens
gaagagttgcacctg

SEQ ID NO: 13829 - DNA, 15 bp, Homo sapiens
agaagagttgcacct

SEQ ID NO: 13830 - DNA, 15 bp, Homo sapiens
tagaagagttgcacc

SEQ ID NO: 13831 - DNA, 15 bp, Homo sapiens
atagaagagttgcac

SEQ ID NO: 13832 - DNA, 15 bp, Homo sapiens
tatagaagagttgca

SEQ ID NO: 13833 - DNA, 15 bp, Homo sapiens
ttatagaagagttgc

SEQ ID NO: 13834 - DNA, 15 bp, Homo sapiens
tttatagaagagttg

SEQ ID NO: 13835 - DNA, 15 bp, Homo sapiens
ctttatagaagagtt

SEQ ID NO: 13836 - DNA, 15 bp, Homo sapiens
cctttatagaagagt

SEQ ID NO: 13837 - DNA, 15 bp, Homo sapiens
ccctttatagaagag

SEQ ID NO: 13838 - DNA, 15 bp, Homo sapiens
cccctttatagaaga

SEQ ID NO: 13839 - DNA, 15 bp, Homo sapiens
tcccctttatagaag

SEQ ID NO: 13840 - DNA, 15 bp, Homo sapiens
ttcccctttatagaa

SEQ ID NO: 13841 - DNA, 15 bp, Homo sapiens
cttcccctttataga

SEQ ID NO: 13842 - DNA, 15 bp, Homo sapiens
tcttcccctttatag

SEQ ID NO: 13843 - DNA, 15 bp, Homo sapiens
ctcttcccctttata

SEQ ID NO: 13844 - DNA, 15 bp, Homo sapiens
cctcttcccctttat

SEQ ID NO: 13845 - DNA, 15 bp, Homo sapiens
tcctcttccccttta

SEQ ID NO: 13846 - DNA, 15 bp, Homo sapiens
ctcctcttccccttt

SEQ ID NO: 13847 - DNA, 15 bp, Homo sapiens
actcctcttcccctt

SEQ ID NO: 13848 - DNA, 15 bp, Homo sapiens
cactcctcttcccct

SEQ ID NO: 13849 - DNA, 15 bp, Homo sapiens
tcactcctcttcccc

SEQ ID NO: 13850 - DNA, 15 bp, Homo sapiens
gtcactcctcttccc

SEQ ID NO: 13851 - DNA, 15 bp, Homo sapiens
agtcactcctcttcc

SEQ ID NO: 13852 - DNA, 15 bp, Homo sapiens
aagtcactcctcttc

SEQ ID NO: 13853 - DNA, 15 bp, Homo sapiens
aaagtcactcctctt

SEQ ID NO: 13854 - DNA, 15 bp, Homo sapiens
gaaagtcactcctct

SEQ ID NO: 13855 - DNA, 15 bp, Homo sapiens
ggaaagtcactcctc

SEQ ID NO: 13856 - DNA, 15 bp, Homo sapiens
gggaaagtcactcct

SEQ ID NO: 13857 - DNA, 15 bp, Homo sapiens
ggggaaagtcactcc

SEQ ID NO: 13858 - DNA, 15 bp, Homo sapiens
aggggaaagtcactc

SEQ ID NO: 13859 - DNA, 15 bp, Homo sapiens
taggggaaagtcact

SEQ ID NO: 13860 - DNA, 15 bp, Homo sapiens
ataggggaaagtcac

SEQ ID NO: 13861 - DNA, 15 bp, Homo sapiens
tataggggaaagtca

SEQ ID NO: 13862 - DNA, 15 bp, Homo sapiens
gtataggggaaagtc

SEQ ID NO: 13863 - DNA, 15 bp, Homo sapiens
tgtataggggaaagt

SEQ ID NO: 13864 - DNA, 15 bp, Homo sapiens
ctgtataggggaaag

SEQ ID NO: 13865 - DNA, 15 bp, Homo sapiens
actgtataggggaaa

SEQ ID NO: 13866 - DNA, 15 bp, Homo sapiens
cactgtataggggaa

SEQ ID NO: 13867 - DNA, 15 bp, Homo sapiens
ccactgtatagggga

SEQ ID NO: 13868 - DNA, 15 bp, Homo sapiens
gccactgtatagggg

SEQ ID NO: 13869 - DNA, 15 bp, Homo sapiens
ggccactgtataggg

SEQ ID NO: 13870 - DNA, 15 bp, Homo sapiens
gggccactgtatagg

SEQ ID NO: 13871 - DNA, 15 bp, Homo sapiens
agggccactgtatag

SEQ ID NO: 13872 - DNA, 15 bp, Homo sapiens
cagggccactgtata

SEQ ID NO: 13873 - DNA, 15 bp, Homo sapiens
acagggccactgtat

SEQ ID NO: 13874 - DNA, 15 bp, Homo sapiens
gacagggccactgta

SEQ ID NO: 13875 - DNA, 15 bp, Homo sapiens
tgacagggccactgt

SEQ ID NO: 13876 - DNA, 15 bp, Homo sapiens
ttgacagggccactg

SEQ ID NO: 13877 - DNA, 15 bp, Homo sapiens
tttgacagggccact

SEQ ID NO: 13878 - DNA, 15 bp, Homo sapiens
ttttgacagggccac

SEQ ID NO: 13879 - DNA, 15 bp, Homo sapiens
attttgacagggcca

SEQ ID NO: 13880 - DNA, 15 bp, Homo sapiens
aattttgacagggcc

SEQ ID NO: 13881 - DNA, 15 bp, Homo sapiens
gaattttgacagggc

SEQ ID NO: 13882 - DNA, 15 bp, Homo sapiens
agaattttgacaggg

SEQ ID NO: 13883 - DNA, 15 bp, Homo sapiens
tagaattttgacagg

SEQ ID NO: 13884 - DNA, 15 bp, Homo sapiens
atagaattttgacag

SEQ ID NO: 13885 - DNA, 15 bp, Homo sapiens
tatagaattttgaca

SEQ ID NO: 13886 - DNA, 15 bp, Homo sapiens
ttatagaattttgac

SEQ ID NO: 13887 - DNA, 15 bp, Homo sapiens
tttatagaattttga

SEQ ID NO: 13888 - DNA, 15 bp, Homo sapiens
ttttatagaattttg

SEQ ID NO: 13889 - DNA, 15 bp, Homo sapiens
tttttatagaatttt

SEQ ID NO: 13890 - DNA, 15 bp, Homo sapiens
ttttttatagaattt

SEQ ID NO: 13891 - DNA, 15 bp, Homo sapiens
attttttatagaatt

SEQ ID NO: 13892 - DNA, 15 bp, Homo sapiens
tattttttatagaat

SEQ ID NO: 13893 - DNA, 15 bp, Homo sapiens
atattttttatagaa

SEQ ID NO: 13894 - DNA, 15 bp, Homo sapiens
aatattttttataga

SEQ ID NO: 13895 - DNA, 15 bp, Homo sapiens
caatattttttatag

SEQ ID NO: 13896 - DNA, 15 bp, Homo sapiens
acaatattttttata

SEQ ID NO: 13897 - DNA, 15 bp, Homo sapiens
gacaatattttttat

SEQ ID NO: 13898 - DNA, 15 bp, Homo sapiens
ggacaatatttttta

SEQ ID NO: 13899 - DNA, 15 bp, Homo sapiens
tggacaatatttttt

SEQ ID NO: 13900 - DNA, 15 bp, Homo sapiens
atggacaatattttt

SEQ ID NO: 13901 - DNA, 15 bp, Homo sapiens
aatggacaatatttt

SEQ ID NO: 13902 - DNA, 15 bp, Homo sapiens
aaatggacaatattt

SEQ ID NO: 13903 - DNA, 15 bp, Homo sapiens
taaatggacaatatt

SEQ ID NO: 13904 - DNA, 15 bp, Homo sapiens
ttaaatggacaatat

SEQ ID NO: 13905 - DNA, 15 bp, Homo sapiens
tttaaatggacaata

SEQ ID NO: 13906 - DNA, 15 bp, Homo sapiens
atttaaatggacaat

SEQ ID NO: 13907 - DNA, 15 bp, Homo sapiens
aatttaaatggacaa

SEQ ID NO: 13908 - DNA, 15 bp, Homo sapiens
taatttaaatggaca

SEQ ID NO: 13909 - DNA, 15 bp, Homo sapiens
ttaatttaaatggac

SEQ ID NO: 13910 - DNA, 15 bp, Homo sapiens
tttaatttaaatgga

SEQ ID NO: 13911 - DNA, 15 bp, Homo sapiens
atttaatttaaatgg

SEQ ID NO: 13912 - DNA, 15 bp, Homo sapiens
tatttaatttaaatg

SEQ ID NO: 13913 - DNA, 15 bp, Homo sapiens
ttatttaatttaaat

SEQ ID NO: 13914 - DNA, 15 bp, Homo sapiens
gttatttaatttaaa

SEQ ID NO: 13915 - DNA, 15 bp, Homo sapiens
ggttatttaatttaa

SEQ ID NO: 13916 - DNA, 15 bp, Homo sapiens
tggttatttaattta

SEQ ID NO: 13917 - DNA, 15 bp, Homo sapiens
gtggttatttaattt

SEQ ID NO: 13918 - DNA, 15 bp, Homo sapiens
agtggttatttaatt

SEQ ID NO: 13919 - DNA, 15 bp, Homo sapiens
cagtggttatttaat

SEQ ID NO: 13920 - DNA, 15 bp, Homo sapiens
acagtggttatttaa

SEQ ID NO: 13921 - DNA, 15 bp, Homo sapiens
cacagtggttattta

SEQ ID NO: 13922 - DNA, 15 bp, Homo sapiens
gcacagtggttattt

SEQ ID NO: 13923 - DNA, 15 bp, Homo sapiens
ggcacagtggttatt

SEQ ID NO: 13924 - DNA, 15 bp, Homo sapiens
gggcacagtggttat

SEQ ID NO: 13925 - DNA, 15 bp, Homo sapiens
cgggcacagtggtta

SEQ ID NO: 13926 - DNA, 15 bp, Homo sapiens
ccgggcacagtggtt

SEQ ID NO: 13927 - DNA, 15 bp, Homo sapiens
gccgggcacagtggt

SEQ ID NO: 13928 - DNA, 15 bp, Homo sapiens
ggagccgggcacagt

SEQ ID NO: 13929 - DNA, 15 bp, Homo sapiens
tggagccgggcacag

SEQ ID NO: 13930 - DNA, 15 bp, Homo sapiens
atggagccgggcaca

SEQ ID NO: 13931 - DNA, 15 bp, Homo sapiens
aatggagccgggcac

SEQ ID NO: 13932 - DNA, 15 bp, Homo sapiens
aaatggagccgggca

SEQ ID NO: 13933 - DNA, 15 bp, Homo sapiens
taaatggagccgggc

SEQ ID NO: 13934 - DNA, 15 bp, Homo sapiens
gtaaatggagccggg

SEQ ID NO: 13935 - DNA, 15 bp, Homo sapiens
ggtaaatggagccgg

SEQ ID NO: 13936 - DNA, 15 bp, Homo sapiens
tggtaaatggagccg

SEQ ID NO: 13937 - DNA, 15 bp, Homo sapiens
gtggtaaatggagcc

SEQ ID NO: 13938 - DNA, 15 bp, Homo sapiens
tgtggtaaatggagc

SEQ ID NO: 13939 - DNA, 15 bp, Homo sapiens
gtgtggtaaatggag

SEQ ID NO: 13940 - DNA, 15 bp, Homo sapiens
agtgtggtaaatgga

SEQ ID NO: 13941 - DNA, 15 bp, Homo sapiens
aagtgtggtaaatgg

SEQ ID NO: 13942 - DNA, 15 bp, Homo sapiens
aaagtgtggtaaatg

SEQ ID NO: 13943 - DNA, 15 bp, Homo sapiens
aaaagtgtggtaaat

SEQ ID NO: 13944 - DNA, 15 bp, Homo sapiens
gaaaagtgtggtaaa

SEQ ID NO: 13945 - DNA, 15 bp, Homo sapiens
agaaaagtgtggtaa

SEQ ID NO: 13946 - DNA, 15 bp, Homo sapiens
tagaaaagtgtggta

SEQ ID NO: 13947 - DNA, 15 bp, Homo sapiens
atagaaaagtgtggt

SEQ ID NO: 13948 - DNA, 15 bp, Homo sapiens
catagaaaagtgtgg

SEQ ID NO: 13949 - DNA, 15 bp, Homo sapiens
gcatagaaaagtgtg

SEQ ID NO: 13950 - DNA, 15 bp, Homo sapiens
tgcatagaaaagtgt

SEQ ID NO: 13951 - DNA, 15 bp, Homo sapiens
ctgcatagaaaagtg

SEQ ID NO: 13952 - DNA, 15 bp, Homo sapiens
actgcatagaaaagt

SEQ ID NO: 13953 - DNA, 15 bp, Homo sapiens
cactgcatagaaaag

SEQ ID NO: 13954 - DNA, 15 bp, Homo sapiens
ccactgcatagaaaa

SEQ ID NO: 13955 - DNA, 15 bp, Homo sapiens
tccactgcatagaaa

SEQ ID NO: 13956 - DNA, 15 bp, Homo sapiens
ttccactgcatagaa

SEQ ID NO: 13957 - DNA, 15 bp, Homo sapiens
gttccactgcataga

SEQ ID NO: 13958 - DNA, 15 bp, Homo sapiens
agttccactgcatag

SEQ ID NO: 13959 - DNA, 15 bp, Homo sapiens
cagttccactgcata

SEQ ID NO: 13960 - DNA, 15 bp, Homo sapiens
tcagttccactgcat

SEQ ID NO: 13961 - DNA, 15 bp, Homo sapiens
ttcagttccactgca

SEQ ID NO: 13962 - DNA, 15 bp, Homo sapiens
cttcagttccactgc

SEQ ID NO: 13963 - DNA, 15 bp, Homo sapiens
ccttcagttccactg

SEQ ID NO: 13964 - DNA, 15 bp, Homo sapiens
cccttcagttccact

SEQ ID NO: 13965 - DNA, 15 bp, Homo sapiens
ccccttcagttccac

SEQ ID NO: 13966 - DNA, 15 bp, Homo sapiens
tccccttcagttcca

SEQ ID NO: 13967 - DNA, 15 bp, Homo sapiens
atccccttcagttcc

SEQ ID NO: 13968 - DNA, 15 bp, Homo sapiens
aatccccttcagttc

SEQ ID NO: 13969 - DNA, 15 bp, Homo sapiens
aaatccccttcagtt

SEQ ID NO: 13970 - DNA, 15 bp, Homo sapiens
aaaatccccttcagt

SEQ ID NO: 13971 - DNA, 15 bp, Homo sapiens
aaaaatccccttcag

SEQ ID NO: 13972 - DNA, 15 bp, Homo sapiens
aaaaaatccccttca

SEQ ID NO: 13973 - DNA, 15 bp, Homo sapiens
aaaaaaatccccttc

SEQ ID NO: 13974 - DNA, 15 bp, Homo sapiens
aaaaaaaatcccctt

SEQ ID NO: 13975 - DNA, 15 bp, Homo sapiens
aaaaaaaaatcccct

SEQ ID NO: 13976 - DNA, 15 bp, Homo sapiens
aaaaaaaaaatcccc

SEQ ID NO: 13977 - DNA, 15 bp, Homo sapiens
aaaaaaaaaaatccc

SEQ ID NO: 13978 - DNA, 15 bp, Homo sapiens
caaaaaaaaaaatcc

SEQ ID NO: 13979 - DNA, 15 bp, Homo sapiens
gcaaaaaaaaaaatc

SEQ ID NO: 13980 - DNA, 15 bp, Homo sapiens
agcaaaaaaaaaaat

SEQ ID NO: 13981 - DNA, 15 bp, Homo sapiens
cagcaaaaaaaaaaa

SEQ ID NO: 13982 - DNA, 15 bp, Homo sapiens
acagcaaaaaaaaaa

SEQ ID NO: 13983 - DNA, 15 bp, Homo sapiens
gacagcaaaaaaaaa

SEQ ID NO: 13984 - DNA, 15 bp, Homo sapiens
ggacagcaaaaaaaa

SEQ ID NO: 13985 - DNA, 15 bp, Homo sapiens
aggacagcaaaaaaa

SEQ ID NO: 13986 - DNA, 15 bp, Homo sapiens
gaggacagcaaaaaa

SEQ ID NO: 13987 - DNA, 15 bp, Homo sapiens
tgaggacagcaaaaa

SEQ ID NO: 13988 - DNA, 15 bp, Homo sapiens
ctgaggacagcaaaa

SEQ ID NO: 13989 - DNA, 15 bp, Homo sapiens
tctgaggacagcaaa

SEQ ID NO: 13990 - DNA, 15 bp, Homo sapiens
ctctgaggacagcaa

SEQ ID NO: 13991 - DNA, 15 bp, Homo sapiens
tctctgaggacagca

SEQ ID NO: 13992 - DNA, 15 bp, Homo sapiens
ttctctgaggacagc

SEQ ID NO: 13993 - DNA, 15 bp, Homo sapiens
tttctctgaggacag

SEQ ID NO: 13994 - DNA, 15 bp, Homo sapiens
ttttctctgaggaca

SEQ ID NO: 13995 - DNA, 15 bp, Homo sapiens
tttttctctgaggac

SEQ ID NO: 13996 - DNA, 15 bp, Homo sapiens
atttttctctgagga

SEQ ID NO: 13997 - DNA, 15 bp, Homo sapiens
tatttttctctgagg

SEQ ID NO: 13998 - DNA, 15 bp, Homo sapiens
ttatttttctctgag

SEQ ID NO: 13999 - DNA, 15 bp, Homo sapiens
cttatttttctctga

SEQ ID NO: 14000 - DNA, 15 bp, Homo sapiens
tcttatttttctctg

SEQ ID NO: 14001 - DNA, 15 bp, Homo sapiens
gtcttatttttctct

SEQ ID NO: 14002 - DNA, 15 bp, Homo sapiens
agtcttatttttctc

SEQ ID NO: 14003 - DNA, 15 bp, Homo sapiens
tagtcttatttttct

SEQ ID NO: 14004 - DNA, 15 bp, Homo sapiens
ttagtcttatttttc

SEQ ID NO: 14005 - DNA, 15 bp, Homo sapiens
cttagtcttattttt

SEQ ID NO: 14006 - DNA, 15 bp, Homo sapiens
tcttagtcttatttt

SEQ ID NO: 14007 - DNA, 15 bp, Homo sapiens
ttcttagtcttattt

SEQ ID NO: 14008 - DNA, 15 bp, Homo sapiens
attcttagtcttatt

SEQ ID NO: 14009 - DNA, 15 bp, Homo sapiens
gattcttagtcttat

SEQ ID NO: 14010 - DNA, 15 bp, Homo sapiens
tgattcttagtctta

SEQ ID NO: 14011 - DNA, 15 bp, Homo sapiens
ttgattcttagtctt

SEQ ID NO: 14012 - DNA, 15 bp, Homo sapiens
gttgattcttagtct

SEQ ID NO: 14013 - DNA, 15 bp, Homo sapiens
ggttgattcttagtc

SEQ ID NO: 14014 - DNA, 15 bp, Homo sapiens
aggttgattcttagt

SEQ ID NO: 14015 - DNA, 15 bp, Homo sapiens
aaggttgattcttag

SEQ ID NO: 14016 - DNA, 15 bp, Homo sapiens
aaaggttgattctta

SEQ ID NO: 14017 - DNA, 15 bp, Homo sapiens
gaaaggttgattctt

SEQ ID NO: 14018 - DNA, 15 bp, Homo sapiens
agaaaggttgattct

SEQ ID NO: 14019 - DNA, 15 bp, Homo sapiens
tagaaaggttgattc

SEQ ID NO: 14020 - DNA, 15 bp, Homo sapiens
ttagaaaggttgatt

SEQ ID NO: 14021 - DNA, 15 bp, Homo sapiens
attagaaaggttgat

SEQ ID NO: 14022 - DNA, 15 bp, Homo sapiens
cattagaaaggttga

SEQ ID NO: 14023 - DNA, 15 bp, Homo sapiens
tcattagaaaggttg

SEQ ID NO: 14024 - DNA, 15 bp, Homo sapiens
ctcattagaaaggtt

SEQ ID NO: 14025 - DNA, 15 bp, Homo sapiens
tctcattagaaaggt

SEQ ID NO: 14026 - DNA, 15 bp, Homo sapiens
ttctcattagaaagg

SEQ ID NO: 14027 - DNA, 15 bp, Homo sapiens
attctcattagaaag

SEQ ID NO: 14028 - DNA, 15 bp, Homo sapiens
cattctcattagaaa

SEQ ID NO: 14029 - DNA, 15 bp, Homo sapiens
ccattctcattagaa

SEQ ID NO: 14030 - DNA, 15 bp, Homo sapiens
accattctcattaga

SEQ ID NO: 14031 - DNA, 15 bp, Homo sapiens
taccattctcattag

SEQ ID NO: 14032 - DNA, 15 bp, Homo sapiens
ttaccattctcatta

SEQ ID NO: 14033 - DNA, 15 bp, Homo sapiens
cttaccattctcatt

SEQ ID NO: 14034 - DNA, 15 bp, Homo sapiens
ccttaccattctcat

SEQ ID NO: 14035 - DNA, 15 bp, Homo sapiens
tccttaccattctca

SEQ ID NO: 14036 - DNA, 15 bp, Homo sapiens
ctccttaccattctc

SEQ ID NO: 14037 - DNA, 15 bp, Homo sapiens
actccttaccattct

SEQ ID NO: 14038 - DNA, 15 bp, Homo sapiens
aactccttaccattc

SEQ ID NO: 14039 - DNA, 15 bp, Homo sapiens
taactccttaccatt

SEQ ID NO: 14040 - DNA, 15 bp, Homo sapiens
ataactccttaccat

SEQ ID NO: 14041 - DNA, 15 bp, Homo sapiens
cataactccttacca

SEQ ID NO: 14042 - DNA, 15 bp, Homo sapiens
acataactccttacc

SEQ ID NO: 14043 - DNA, 15 bp, Homo sapiens
cacataactccttac

SEQ ID NO: 14044 - DNA, 15 bp, Homo sapiens
ccacataactcctta

SEQ ID NO: 14045 - DNA, 15 bp, Homo sapiens
cccacataactcctt

SEQ ID NO: 14046 - DNA, 15 bp, Homo sapiens
ccccacataactcct

SEQ ID NO: 14047 - DNA, 15 bp, Homo sapiens
tccccacataactcc

SEQ ID NO: 14048 - DNA, 15 bp, Homo sapiens
atccccacataactc

SEQ ID NO: 14049 - DNA, 15 bp, Homo sapiens
catccccacataact

SEQ ID NO: 14050 - DNA, 15 bp, Homo sapiens
tcatccccacataac

SEQ ID NO: 14051 - DNA, 15 bp, Homo sapiens
gtcatccccacataa

SEQ ID NO: 14052 - DNA, 15 bp, Homo sapiens
ggtcatccccacata

SEQ ID NO: 14053 - DNA, 15 bp, Homo sapiens
aggtcatccccacat

SEQ ID NO: 14054 - DNA, 15 bp, Homo sapiens
caggtcatccccaca

SEQ ID NO: 14055 - DNA, 15 bp, Homo sapiens
ccaggtcatccccac

SEQ ID NO: 14056 - DNA, 15 bp, Homo sapiens
tccaggtcatcccca

SEQ ID NO: 14057 - DNA, 15 bp, Homo sapiens
ttccaggtcatcccc

SEQ ID NO: 14058 - DNA, 15 bp, Homo sapiens
attccaggtcatccc

SEQ ID NO: 14059 - DNA, 15 bp, Homo sapiens
tattccaggtcatcc

SEQ ID NO: 14060 - DNA, 15 bp, Homo sapiens
atattccaggtcatc

SEQ ID NO: 14061 - DNA, 15 bp, Homo sapiens
tatattccaggtcat

SEQ ID NO: 14062 - DNA, 15 bp, Homo sapiens
atatattccaggtca

SEQ ID NO: 14063 - DNA, 15 bp, Homo sapiens
catatattccaggtc

SEQ ID NO: 14064 - DNA, 15 bp, Homo sapiens
gcatatattccaggt

SEQ ID NO: 14065 - DNA, 15 bp, Homo sapiens
agcatatattccagg

SEQ ID NO: 14066 - DNA, 15 bp, Homo sapiens
cagcatatattccag

SEQ ID NO: 14067 - DNA, 15 bp, Homo sapiens
gcagcatatattcca

SEQ ID NO: 14068 - DNA, 15 bp, Homo sapiens
agcagcatatattcc

SEQ ID NO: 14069 - DNA, 15 bp, Homo sapiens
gagcagcatatattc

SEQ ID NO: 14070 - DNA, 15 bp, Homo sapiens
tgagcagcatatatt

SEQ ID NO: 14071 - DNA, 15 bp, Homo sapiens
ttgagcagcatatat

SEQ ID NO: 14072 - DNA, 15 bp, Homo sapiens
tttgagcagcatata

SEQ ID NO: 14073 - DNA, 15 bp, Homo sapiens
atttgagcagcatat

SEQ ID NO: 14074 - DNA, 15 bp, Homo sapiens
catttgagcagcata

SEQ ID NO: 14075 - DNA, 15 bp, Homo sapiens
ccatttgagcagcat

SEQ ID NO: 14076 - DNA, 15 bp, Homo sapiens
accatttgagcagca

SEQ ID NO: 14077 - DNA, 15 bp, Homo sapiens
caccatttgagcagc

SEQ ID NO: 14078 - DNA, 15 bp, Homo sapiens
ccaccatttgagcag

SEQ ID NO: 14079 - DNA, 15 bp, Homo sapiens
tccaccatttgagca

SEQ ID NO: 14080 - DNA, 15 bp, Homo sapiens
ctccaccatttgagc

SEQ ID NO: 14081 - DNA, 15 bp, Homo sapiens
tctccaccatttgag

SEQ ID NO: 14082 - DNA, 15 bp, Homo sapiens
atctccaccatttga

SEQ ID NO: 14083 - DNA, 15 bp, Homo sapiens
catctccaccatttg

SEQ ID NO: 14084 - DNA, 15 bp, Homo sapiens
acatctccaccattt

SEQ ID NO: 14085 - DNA, 15 bp, Homo sapiens
aacatctccaccatt

SEQ ID NO: 14086 - DNA, 15 bp, Homo sapiens
taacatctccaccat

SEQ ID NO: 14087 - DNA, 15 bp, Homo sapiens
ataacatctccacca

SEQ ID NO: 14088 - DNA, 15 bp, Homo sapiens
gataacatctccacc

SEQ ID NO: 14089 - DNA, 15 bp, Homo sapiens
agataacatctccac

SEQ ID NO: 14090 - DNA, 15 bp, Homo sapiens
tagataacatctcca

SEQ ID NO: 14091 - DNA, 15 bp, Homo sapiens
ctagataacatctcc

SEQ ID NO: 14092 - DNA, 15 bp, Homo sapiens
cctagataacatctc

SEQ ID NO: 14093 - DNA, 15 bp, Homo sapiens
gcctagataacatct

SEQ ID NO: 14094 - DNA, 15 bp, Homo sapiens
ggcctagataacatc

SEQ ID NO: 14095 - DNA, 15 bp, Homo sapiens
cggcctagataacat

SEQ ID NO: 14096 - DNA, 15 bp, Homo sapiens
acggcctagataaca

SEQ ID NO: 14097 - DNA, 15 bp, Homo sapiens
tacggcctagataac

SEQ ID NO: 14098 - DNA, 15 bp, Homo sapiens
ttacggcctagataa

SEQ ID NO: 14099 - DNA, 15 bp, Homo sapiens
tttacggcctagata

SEQ ID NO: 14100 - DNA, 15 bp, Homo sapiens
atttacggcctagat

SEQ ID NO: 14101 - DNA, 15 bp, Homo sapiens
gatttacggcctaga

SEQ ID NO: 14102 - DNA, 15 bp, Homo sapiens
tgatttacggcctag

SEQ ID NO: 14103 - DNA, 15 bp, Homo sapiens
atgatttacggccta

SEQ ID NO: 14104 - DNA, 15 bp, Homo sapiens
catgatttacggcct

SEQ ID NO: 14105 - DNA, 15 bp, Homo sapiens
ccatgatttacggcc

SEQ ID NO: 14106 - DNA, 15 bp, Homo sapiens
gccatgatttacggc

SEQ ID NO: 14107 - DNA, 15 bp, Homo sapiens
tgccatgatttacgg

SEQ ID NO: 14108 - DNA, 15 bp, Homo sapiens
atgccatgatttacg

SEQ ID NO: 14109 - DNA, 15 bp, Homo sapiens
aatgccatgatttac

SEQ ID NO: 14110 - DNA, 15 bp, Homo sapiens
aaatgccatgattta

SEQ ID NO: 14111 - DNA, 15 bp, Homo sapiens
aaaatgccatgattt

SEQ ID NO: 14112 - DNA, 15 bp, Homo sapiens
aaaaatgccatgatt

SEQ ID NO: 14113 - DNA, 15 bp, Homo sapiens
taaaaatgccatgat

SEQ ID NO: 14114 - DNA, 15 bp, Homo sapiens
ataaaaatgccatga

SEQ ID NO: 14115 - DNA, 15 bp, Homo sapiens
tataaaaatgccatg

SEQ ID NO: 14116 - DNA, 15 bp, Homo sapiens
atataaaaatgccat

SEQ ID NO: 14117 - DNA, 15 bp, Homo sapiens
catataaaaatgcca

SEQ ID NO: 14118 - DNA, 15 bp, Homo sapiens
tcatataaaaatgcc

SEQ ID NO: 14119 - DNA, 15 bp, Homo sapiens
atcatataaaaatgc

SEQ ID NO: 14120 - DNA, 15 bp, Homo sapiens
gatcatataaaaatg

SEQ ID NO: 14121 - DNA, 15 bp, Homo sapiens
ggatcatataaaaat

SEQ ID NO: 14122 - DNA, 15 bp, Homo sapiens
gggatcatataaaaa

SEQ ID NO: 14123 - DNA, 15 bp, Homo sapiens
ggggatcatataaaa

SEQ ID NO: 14124 - DNA, 15 bp, Homo sapiens
aggggatcatataaa

SEQ ID NO: 14125 - DNA, 15 bp, Homo sapiens
taggggatcatataa

SEQ ID NO: 14126 - DNA, 15 bp, Homo sapiens
ataggggatcatata

SEQ ID NO: 14127 - DNA, 15 bp, Homo sapiens
aataggggatcatat

SEQ ID NO: 14128 - DNA, 15 bp, Homo sapiens
aaataggggatcata

SEQ ID NO: 14129 - DNA, 15 bp, Homo sapiens
caaataggggatcat

SEQ ID NO: 14130 - DNA, 15 bp, Homo sapiens
gcaaataggggatca

SEQ ID NO: 14131 - DNA, 15 bp, Homo sapiens
ggcaaataggggatc

SEQ ID NO: 14132 - DNA, 15 bp, Homo sapiens
aggcaaataggggat

SEQ ID NO: 14133 - DNA, 15 bp, Homo sapiens
taggcaaatagggga

SEQ ID NO: 14134 - DNA, 15 bp, Homo sapiens
ttaggcaaatagggg

SEQ ID NO: 14135 - DNA, 15 bp, Homo sapiens
attaggcaaataggg

SEQ ID NO: 14136 - DNA, 15 bp, Homo sapiens
cattaggcaaatagg

SEQ ID NO: 14137 - DNA, 15 bp, Homo sapiens
gcattaggcaaatag

SEQ ID NO: 14138 - DNA, 15 bp, Homo sapiens
tgcattaggcaaata

SEQ ID NO: 14139 - DNA, 15 bp, Homo sapiens
ctgcattaggcaaat

SEQ ID NO: 14140 - DNA, 15 bp, Homo sapiens
cctgcattaggcaaa

SEQ ID NO: 14141 - DNA, 15 bp, Homo sapiens
tcctgcattaggcaa

SEQ ID NO: 14142 - DNA, 15 bp, Homo sapiens
ttcctgcattaggca

SEQ ID NO: 14143 - DNA, 15 bp, Homo sapiens
tttcctgcattaggc

SEQ ID NO: 14144 - DNA, 15 bp, Homo sapiens
gtttcctgcattagg

SEQ ID NO: 14145 - DNA, 15 bp, Homo sapiens
ggtttcctgcattag

SEQ ID NO: 14146 - DNA, 15 bp, Homo sapiens
tggtttcctgcatta

SEQ ID NO: 14147 - DNA, 15 bp, Homo sapiens
gtggtttcctgcatt

SEQ ID NO: 14148 - DNA, 15 bp, Homo sapiens
agtggtttcctgcat

SEQ ID NO: 14149 - DNA, 15 bp, Homo sapiens
aagtggtttcctgca

SEQ ID NO: 14150 - DNA, 15 bp, Homo sapiens
caagtggtttcctgc

SEQ ID NO: 14151 - DNA, 15 bp, Homo sapiens
ccaagtggtttcctg

SEQ ID NO: 14152 - DNA, 15 bp, Homo sapiens
gccaagtggtttcct

SEQ ID NO: 14153 - DNA, 15 bp, Homo sapiens
tgccaagtggtttcc

SEQ ID NO: 14154 - DNA, 15 bp, Homo sapiens
ttgccaagtggtttc

SEQ ID NO: 14155 - DNA, 15 bp, Homo sapiens
gttgccaagtggttt

SEQ ID NO: 14156 - DNA, 15 bp, Homo sapiens
agttgccaagtggtt

SEQ ID NO: 14157 - DNA, 15 bp, Homo sapiens
aagttgccaagtggt

SEQ ID NO: 14158 - DNA, 15 bp, Homo sapiens
aaagttgccaagtgg

SEQ ID NO: 14159 - DNA, 15 bp, Homo sapiens
taaagttgccaagtg

SEQ ID NO: 14160 - DNA, 15 bp, Homo sapiens
ttaaagttgccaagt

SEQ ID NO: 14161 - DNA, 15 bp, Homo sapiens
cttaaagttgccaag

SEQ ID NO: 14162 - DNA, 15 bp, Homo sapiens
ccttaaagttgccaa

SEQ ID NO: 14163 - DNA, 15 bp, Homo sapiens
tccttaaagttgcca

SEQ ID NO: 14164 - DNA, 15 bp, Homo sapiens
ttccttaaagttgcc

SEQ ID NO: 14165 - DNA, 15 bp, Homo sapiens
tttccttaaagttgc

SEQ ID NO: 14166 - DNA, 15 bp, Homo sapiens
ttttccttaaagttg

SEQ ID NO: 14167 - DNA, 15 bp, Homo sapiens
tttttccttaaagtt

SEQ ID NO: 14168 - DNA, 15 bp, Homo sapiens
ctttttccttaaagt

SEQ ID NO: 14169 - DNA, 15 bp, Homo sapiens
actttttccttaaag

SEQ ID NO: 14170 - DNA, 15 bp, Homo sapiens
gactttttccttaaa

SEQ ID NO: 14171 - DNA, 15 bp, Homo sapiens
agactttttccttaa

SEQ ID NO: 14172 - DNA, 15 bp, Homo sapiens
tagactttttcctta

SEQ ID NO: 14173 - DNA, 15 bp, Homo sapiens
ctagactttttcctt

SEQ ID NO: 14174 - DNA, 15 bp, Homo sapiens
gctagactttttcct

SEQ ID NO: 14175 - DNA, 15 bp, Homo sapiens
tgctagactttttcc

SEQ ID NO: 14176 - DNA, 15 bp, Homo sapiens
ttgctagactttttc

SEQ ID NO: 14177 - DNA, 15 bp, Homo sapiens
attgctagacttttt

SEQ ID NO: 14178 - DNA, 15 bp, Homo sapiens
tattgctagactttt

SEQ ID NO: 14179 - DNA, 15 bp, Homo sapiens
ttattgctagacttt

SEQ ID NO: 14180 - DNA, 15 bp, Homo sapiens
attattgctagactt

SEQ ID NO: 14181 - DNA, 15 bp, Homo sapiens
cattattgctagact

SEQ ID NO: 14182 - DNA, 15 bp, Homo sapiens
gcattattgctagac

SEQ ID NO: 14183 - DNA, 15 bp, Homo sapiens
tgcattattgctaga

SEQ ID NO: 14184 - DNA, 15 bp, Homo sapiens
atgcattattgctag

SEQ ID NO: 14185 - DNA, 15 bp, Homo sapiens
gatgcattattgcta

SEQ ID NO: 14186 - DNA, 15 bp, Homo sapiens
tgatgcattattgct

SEQ ID NO: 14187 - DNA, 15 bp, Homo sapiens
atgatgcattattgc

SEQ ID NO: 14188 - DNA, 15 bp, Homo sapiens
tatgatgcattattg

SEQ ID NO: 14189 - DNA, 15 bp, Homo sapiens
ctatgatgcattatt

SEQ ID NO: 14190 - DNA, 15 bp, Homo sapiens
actatgatgcattat

SEQ ID NO: 14191 - DNA, 15 bp, Homo sapiens
aactatgatgcatta

SEQ ID NO: 14192 - DNA, 15 bp, Homo sapiens
gaactatgatgcatt

SEQ ID NO: 14193 - DNA, 15 bp, Homo sapiens
tgaactatgatgcat

SEQ ID NO: 14194 - DNA, 15 bp, Homo sapiens
ttgaactatgatgca

SEQ ID NO: 14195 - DNA, 15 bp, Homo sapiens
attgaactatgatgc

SEQ ID NO: 14196 - DNA, 15 bp, Homo sapiens
cattgaactatgatg

SEQ ID NO: 14197 - DNA, 15 bp, Homo sapiens
acattgaactatgat

SEQ ID NO: 14198 - DNA, 15 bp, Homo sapiens
aacattgaactatga

SEQ ID NO: 14199 - DNA, 15 bp, Homo sapiens
aaacattgaactatg

SEQ ID NO: 14200 - DNA, 15 bp, Homo sapiens
taaacattgaactat

SEQ ID NO: 14201 - DNA, 15 bp, Homo sapiens
ataaacattgaacta

SEQ ID NO: 14202 - DNA, 15 bp, Homo sapiens
tataaacattgaact

SEQ ID NO: 14203 - DNA, 15 bp, Homo sapiens
atataaacattgaac

SEQ ID NO: 14204 - DNA, 15 bp, Homo sapiens
aatataaacattgaa

SEQ ID NO: 14205 - DNA, 15 bp, Homo sapiens
caatataaacattga

SEQ ID NO: 14206 - DNA, 15 bp, Homo sapiens
acaatataaacattg

SEQ ID NO: 14207 - DNA, 15 bp, Homo sapiens
tacaatataaacatt

SEQ ID NO: 14208 - DNA, 15 bp, Homo sapiens
gtacaatataaacat

SEQ ID NO: 14209 - DNA, 15 bp, Homo sapiens
agtacaatataaaca

SEQ ID NO: 14210 - DNA, 15 bp, Homo sapiens
aagtacaatataaac

SEQ ID NO: 14211 - DNA, 15 bp, Homo sapiens
caagtacaatataaa

SEQ ID NO: 14212 - DNA, 15 bp, Homo sapiens
ccaagtacaatataa

SEQ ID NO: 14213 - DNA, 15 bp, Homo sapiens
tccaagtacaatata

SEQ ID NO: 14214 - DNA, 15 bp, Homo sapiens
gtccaagtacaatat

SEQ ID NO: 14215 - DNA, 15 bp, Homo sapiens
tgtccaagtacaata

SEQ ID NO: 14216 - DNA, 15 bp, Homo sapiens
ctgtccaagtacaat

SEQ ID NO: 14217 - DNA, 15 bp, Homo sapiens
actgtccaagtacaa

SEQ ID NO: 14218 - DNA, 15 bp, Homo sapiens
aactgtccaagtaca

SEQ ID NO: 14219 - DNA, 15 bp, Homo sapiens
aaactgtccaagtac

SEQ ID NO: 14220 - DNA, 15 bp, Homo sapiens
taaactgtccaagta

SEQ ID NO: 14221 - DNA, 15 bp, Homo sapiens
ttaaactgtccaagt

SEQ ID NO: 14222 - DNA, 15 bp, Homo sapiens
tttaaactgtccaag

SEQ ID NO: 14223 - DNA, 15 bp, Homo sapiens
atttaaactgtccaa

SEQ ID NO: 14224 - DNA, 15 bp, Homo sapiens
aatttaaactgtcca

SEQ ID NO: 14225 - DNA, 15 bp, Homo sapiens
aaatttaaactgtcc

SEQ ID NO: 14226 - DNA, 15 bp, Homo sapiens
taaatttaaactgtc

SEQ ID NO: 14227 - DNA, 15 bp, Homo sapiens
ataaatttaaactgt

SEQ ID NO: 14228 - DNA, 15 bp, Homo sapiens
gataaatttaaactg

SEQ ID NO: 14229 - DNA, 15 bp, Homo sapiens
agataaatttaaact

SEQ ID NO: 14230 - DNA, 15 bp, Homo sapiens
aagataaatttaaac

SEQ ID NO: 14231 - DNA, 15 bp, Homo sapiens
taagataaatttaaa

SEQ ID NO: 14232 - DNA, 15 bp, Homo sapiens
ataagataaatttaa

SEQ ID NO: 14233 - DNA, 15 bp, Homo sapiens
tataagataaattta

SEQ ID NO: 14234 - DNA, 15 bp, Homo sapiens
ttataagataaattt

SEQ ID NO: 14235 - DNA, 15 bp, Homo sapiens
tttataagataaatt

SEQ ID NO: 14236 - DNA, 15 bp, Homo sapiens
ctttataagataaat

SEQ ID NO: 14237 - DNA, 15 bp, Homo sapiens
actttataagataaa

SEQ ID NO: 14238 - DNA, 15 bp, Homo sapiens
tactttataagataa

SEQ ID NO: 14239 - DNA, 15 bp, Homo sapiens
gtactttataagata

SEQ ID NO: 14240 - DNA, 15 bp, Homo sapiens
agtactttataagat

SEQ ID NO: 14241 - DNA, 15 bp, Homo sapiens
tagtactttataaga

SEQ ID NO: 14242 - DNA, 15 bp, Homo sapiens
ttagtactttataag

SEQ ID NO: 14243 - DNA, 15 bp, Homo sapiens
attagtactttataa

SEQ ID NO: 14244 - DNA, 15 bp, Homo sapiens
aattagtactttata

SEQ ID NO: 14245 - DNA, 15 bp, Homo sapiens
taattagtactttat

SEQ ID NO: 14246 - DNA, 15 bp, Homo sapiens
ataattagtacttta

SEQ ID NO: 14247 - DNA, 15 bp, Homo sapiens
aataattagtacttt

SEQ ID NO: 14248 - DNA, 15 bp, Homo sapiens
aaataattagtactt

SEQ ID NO: 14249 - DNA, 15 bp, Homo sapiens
taaataattagtact

SEQ ID NO: 14250 - DNA, 15 bp, Homo sapiens
ttaaataattagtac

SEQ ID NO: 14251 - DNA, 15 bp, Homo sapiens
attaaataattagta

SEQ ID NO: 14252 - DNA, 15 bp, Homo sapiens
aattaaataattagt

SEQ ID NO: 14253 - DNA, 15 bp, Homo sapiens
taattaaataattag

SEQ ID NO: 14254 - DNA, 15 bp, Homo sapiens
gtaattaaataatta

SEQ ID NO: 14255 - DNA, 15 bp, Homo sapiens
tgtaattaaataatt

SEQ ID NO: 14256 - DNA, 15 bp, Homo sapiens
ttgtaattaaataat

SEQ ID NO: 14257 - DNA, 15 bp, Homo sapiens
tttgtaattaaataa

SEQ ID NO: 14258 - DNA, 15 bp, Homo sapiens
atttgtaattaaata

SEQ ID NO: 14259 - DNA, 15 bp, Homo sapiens
catttgtaattaaat

SEQ ID NO: 14260 - DNA, 15 bp, Homo sapiens
acatttgtaattaaa

SEQ ID NO: 14261 - DNA, 15 bp, Homo sapiens
aacatttgtaattaa

SEQ ID NO: 14262 - DNA, 15 bp, Homo sapiens
caacatttgtaatta

SEQ ID NO: 14263 - DNA, 15 bp, Homo sapiens
tcaacatttgtaatt

SEQ ID NO: 14264 - DNA, 15 bp, Homo sapiens
ctcaacatttgtaat

SEQ ID NO: 14265 - DNA, 15 bp, Homo sapiens
actcaacatttgtaa

SEQ ID NO: 14266 - DNA, 15 bp, Homo sapiens
tactcaacatttgta

SEQ ID NO: 14267 - DNA, 15 bp, Homo sapiens
ttactcaacatttgt

SEQ ID NO: 14268 - DNA, 15 bp, Homo sapiens
cttactcaacatttg

SEQ ID NO: 14269 - DNA, 15 bp, Homo sapiens
acttactcaacattt

SEQ ID NO: 14270 - DNA, 15 bp, Homo sapiens
cacttactcaacatt

SEQ ID NO: 14271 - DNA, 15 bp, Homo sapiens
acacttactcaacat

SEQ ID NO: 14272 - DNA, 15 bp, Homo sapiens
tacacttactcaaca

SEQ ID NO: 14273 - DNA, 15 bp, Homo sapiens
ttacacttactcaac

SEQ ID NO: 14274 - DNA, 15 bp, Homo sapiens
tttacacttactcaa

SEQ ID NO: 14275 - DNA, 15 bp, Homo sapiens
ttttacacttactca

SEQ ID NO: 14276 - DNA, 15 bp, Homo sapiens
attttacacttactc

SEQ ID NO: 14277 - DNA, 15 bp, Homo sapiens
gattttacacttact

SEQ ID NO: 14278 - DNA, 15 bp, Homo sapiens
tgattttacacttac

SEQ ID NO: 14279 - DNA, 15 bp, Homo sapiens
atgattttacactta

SEQ ID NO: 14280 - DNA, 15 bp, Homo sapiens
aatgattttacactt

SEQ ID NO: 14281 - DNA, 15 bp, Homo sapiens
gaatgattttacact

SEQ ID NO: 14282 - DNA, 15 bp, Homo sapiens
ggaatgattttacac

SEQ ID NO: 14283 - DNA, 15 bp, Homo sapiens
aggaatgattttaca

SEQ ID NO: 14284 - DNA, 15 bp, Homo sapiens
gaggaatgattttac

SEQ ID NO: 14285 - DNA, 15 bp, Homo sapiens
tgaggaatgatttta

SEQ ID NO: 14286 - DNA, 15 bp, Homo sapiens
ttgaggaatgatttt

SEQ ID NO: 14287 - DNA, 15 bp, Homo sapiens
tttgaggaatgattt

SEQ ID NO: 14288 - DNA, 15 bp, Homo sapiens
ttttgaggaatgatt

SEQ ID NO: 14289 - DNA, 15 bp, Homo sapiens
tttttgaggaatgat

SEQ ID NO: 14290 - DNA, 15 bp, Homo sapiens
ttttttgaggaatga

SEQ ID NO: 14291 - DNA, 15 bp, Homo sapiens
cttttttgaggaatg

SEQ ID NO: 14292 - DNA, 15 bp, Homo sapiens
gcttttttgaggaat

SEQ ID NO: 14293 - DNA, 15 bp, Homo sapiens
tgcttttttgaggaa

SEQ ID NO: 14294 - DNA, 15 bp, Homo sapiens
atgcttttttgagga

SEQ ID NO: 14295 - DNA, 15 bp, Homo sapiens
gatgcttttttgagg

SEQ ID NO: 14296 - DNA, 15 bp, Homo sapiens
ggatgcttttttgag

SEQ ID NO: 14297 - DNA, 15 bp, Homo sapiens
gggatgcttttttga

SEQ ID NO: 14298 - DNA, 15 bp, Homo sapiens
agggatgcttttttg

SEQ ID NO: 14299 - DNA, 15 bp, Homo sapiens
aagggatgctttttt

SEQ ID NO: 14300 - DNA, 15 bp, Homo sapiens
caagggatgcttttt

SEQ ID NO: 14301 - DNA, 15 bp, Homo sapiens
tcaagggatgctttt

SEQ ID NO: 14302 - DNA, 15 bp, Homo sapiens
ctcaagggatgcttt

SEQ ID NO: 14303 - DNA, 15 bp, Homo sapiens
actcaagggatgctt

SEQ ID NO: 14304 - DNA, 15 bp, Homo sapiens
tactcaagggatgct

SEQ ID NO: 14305 - DNA, 15 bp, Homo sapiens
atactcaagggatgc

SEQ ID NO: 14306 - DNA, 15 bp, Homo sapiens
catactcaagggatg

SEQ ID NO: 14307 - DNA, 15 bp, Homo sapiens
tcatactcaagggat

SEQ ID NO: 14308 - DNA, 15 bp, Homo sapiens
ttcatactcaaggga

SEQ ID NO: 14309 - DNA, 15 bp, Homo sapiens
tttcatactcaaggg

SEQ ID NO: 14310 - DNA, 15 bp, Homo sapiens
ctttcatactcaagg

SEQ ID NO: 14311 - DNA, 15 bp, Homo sapiens
actttcatactcaag

SEQ ID NO: 14312 - DNA, 15 bp, Homo sapiens
aactttcatactcaa

SEQ ID NO: 14313 - DNA, 15 bp, Homo sapiens
gaactttcatactca

SEQ ID NO: 14314 - DNA, 15 bp, Homo sapiens
ggaactttcatactc

SEQ ID NO: 14315 - DNA, 15 bp, Homo sapiens
tggaactttcatact

SEQ ID NO: 14316 - DNA, 15 bp, Homo sapiens
ttggaactttcatac

SEQ ID NO: 14317 - DNA, 15 bp, Homo sapiens
cttggaactttcata

SEQ ID NO: 14318 - DNA, 15 bp, Homo sapiens
gcttggaactttcat

SEQ ID NO: 14319 - DNA, 15 bp, Homo sapiens
agcttggaactttca

SEQ ID NO: 14320 - DNA, 15 bp, Homo sapiens
aagcttggaactttc

SEQ ID NO: 14321 - DNA, 15 bp, Homo sapiens
taagcttggaacttt

SEQ ID NO: 14322 - DNA, 15 bp, Homo sapiens
ctaagcttggaactt

SEQ ID NO: 14323 - DNA, 15 bp, Homo sapiens
gctaagcttggaact

SEQ ID NO: 14324 - DNA, 15 bp, Homo sapiens
tgctaagcttggaac

SEQ ID NO: 14325 - DNA, 15 bp, Homo sapiens
ttgctaagcttggaa

SEQ ID NO: 14326 - DNA, 15 bp, Homo sapiens
cttgctaagcttgga

SEQ ID NO: 14327 - DNA, 15 bp, Homo sapiens
tcttgctaagcttgg

SEQ ID NO: 14328 - DNA, 15 bp, Homo sapiens
gtcttgctaagcttg

SEQ ID NO: 14329 - DNA, 15 bp, Homo sapiens
tgtcttgctaagctt

SEQ ID NO: 14330 - DNA, 15 bp, Homo sapiens
atgtcttgctaagct

SEQ ID NO: 14331 - DNA, 15 bp, Homo sapiens
gatgtcttgctaagc

SEQ ID NO: 14332 - DNA, 15 bp, Homo sapiens
ggatgtcttgctaag

SEQ ID NO: 14333 - DNA, 15 bp, Homo sapiens
gggatgtcttgctaa

SEQ ID NO: 14334 - DNA, 15 bp, Homo sapiens
agggatgtcttgcta

SEQ ID NO: 14335 - DNA, 15 bp, Homo sapiens
cagggatgtcttgct

SEQ ID NO: 14336 - DNA, 15 bp, Homo sapiens
acagggatgtcttgc

SEQ ID NO: 14337 - DNA, 15 bp, Homo sapiens
cacagggatgtcttg

SEQ ID NO: 14338 - DNA, 15 bp, Homo sapiens
tcacagggatgtctt

SEQ ID NO: 14339 - DNA, 15 bp, Homo sapiens
atcacagggatgtct

SEQ ID NO: 14340 - DNA, 15 bp, Homo sapiens
aatcacagggatgtc

SEQ ID NO: 14341 - DNA, 15 bp, Homo sapiens
aaatcacagggatgt

SEQ ID NO: 14342 - DNA, 15 bp, Homo sapiens
caaatcacagggatg

SEQ ID NO: 14343 - DNA, 15 bp, Homo sapiens
ccaaatcacagggat

SEQ ID NO: 14344 - DNA, 15 bp, Homo sapiens
cccaaatcacaggga

SEQ ID NO: 14345 - DNA, 15 bp, Homo sapiens
tcccaaatcacaggg

SEQ ID NO: 14346 - DNA, 15 bp, Homo sapiens
atcccaaatcacagg

SEQ ID NO: 14347 - DNA, 15 bp, Homo sapiens
tatcccaaatcacag

SEQ ID NO: 14348 - DNA, 15 bp, Homo sapiens
gtatcccaaatcaca

SEQ ID NO: 14349 - DNA, 15 bp, Homo sapiens
tgtatcccaaatcac

SEQ ID NO: 14350 - DNA, 15 bp, Homo sapiens
atgtatcccaaatca

SEQ ID NO: 14351 - DNA, 15 bp, Homo sapiens
gatgtatcccaaatc

SEQ ID NO: 14352 - DNA, 15 bp, Homo sapiens
agatgtatcccaaat

SEQ ID NO: 14353 - DNA, 15 bp, Homo sapiens
gagatgtatcccaaa

SEQ ID NO: 14354 - DNA, 15 bp, Homo sapiens
agagatgtatcccaa

SEQ ID NO: 14355 - DNA, 15 bp, Homo sapiens
aagagatgtatccca

SEQ ID NO: 14356 - DNA, 15 bp, Homo sapiens
caagagatgtatccc

SEQ ID NO: 14357 - DNA, 15 bp, Homo sapiens
tcaagagatgtatcc

SEQ ID NO: 14358 - DNA, 15 bp, Homo sapiens
ttcaagagatgtatc

SEQ ID NO: 14359 - DNA, 15 bp, Homo sapiens
gttcaagagatgtat

SEQ ID NO: 14360 - DNA, 15 bp, Homo sapiens
agttcaagagatgta

SEQ ID NO: 14361 - DNA, 15 bp, Homo sapiens
gagttcaagagatgt

SEQ ID NO: 14362 - DNA, 15 bp, Homo sapiens
tgagttcaagagatg

SEQ ID NO: 14363 - DNA, 15 bp, Homo sapiens
ctgagttcaagagat

SEQ ID NO: 14364 - DNA, 15 bp, Homo sapiens
actgagttcaagaga

SEQ ID NO: 14365 - DNA, 15 bp, Homo sapiens
gactgagttcaagag

SEQ ID NO: 14366 - DNA, 15 bp, Homo sapiens
ggactgagttcaaga

SEQ ID NO: 14367 - DNA, 15 bp, Homo sapiens
aggactgagttcaag

SEQ ID NO: 14368 - DNA, 15 bp, Homo sapiens
caggactgagttcaa

SEQ ID NO: 14369 - DNA, 15 bp, Homo sapiens
tcaggactgagttca

SEQ ID NO: 14370 - DNA, 15 bp, Homo sapiens
ttcaggactgagttc

SEQ ID NO: 14371 - DNA, 15 bp, Homo sapiens
tttcaggactgagtt

SEQ ID NO: 14372 - DNA, 15 bp, Homo sapiens
ttttcaggactgagt

SEQ ID NO: 14373 - DNA, 15 bp, Homo sapiens
attttcaggactgag

SEQ ID NO: 14374 - DNA, 15 bp, Homo sapiens
tattttcaggactga

SEQ ID NO: 14375 - DNA, 15 bp, Homo sapiens
ttattttcaggactg

SEQ ID NO: 14376 - DNA, 15 bp, Homo sapiens
attattttcaggact

SEQ ID NO: 14377 - DNA, 15 bp, Homo sapiens
cattattttcaggac

SEQ ID NO: 14378 - DNA, 15 bp, Homo sapiens
acattattttcagga

SEQ ID NO: 14379 - DNA, 15 bp, Homo sapiens
aacattattttcagg

SEQ ID NO: 14380 - DNA, 15 bp, Homo sapiens
taacattattttcag

SEQ ID NO: 14381 - DNA, 15 bp, Homo sapiens
ttaacattattttca

SEQ ID NO: 14382 - DNA, 15 bp, Homo sapiens
attaacattattttc

SEQ ID NO: 14383 - DNA, 15 bp, Homo sapiens
tattaacattatttt

SEQ ID NO: 14384 - DNA, 15 bp, Homo sapiens
ctattaacattattt

SEQ ID NO: 14385 - DNA, 15 bp, Homo sapiens
gctattaacattatt

SEQ ID NO: 14386 - DNA, 15 bp, Homo sapiens
agctattaacattat

SEQ ID NO: 14387 - DNA, 15 bp, Homo sapiens
cagctattaacatta

SEQ ID NO: 14388 - DNA, 15 bp, Homo sapiens
tcagctattaacatt

SEQ ID NO: 14389 - DNA, 15 bp, Homo sapiens
ctcagctattaacat

SEQ ID NO: 14390 - DNA, 15 bp, Homo sapiens
tctcagctattaaca

SEQ ID NO: 14391 - DNA, 15 bp, Homo sapiens
ttctcagctattaac

SEQ ID NO: 14392 - DNA, 15 bp, Homo sapiens
tttctcagctattaa

SEQ ID NO: 14393 - DNA, 15 bp, Homo sapiens
ttttctcagctatta

SEQ ID NO: 14394 - DNA, 15 bp, Homo sapiens
cttttctcagctatt

SEQ ID NO: 14395 - DNA, 15 bp, Homo sapiens
tcttttctcagctat

SEQ ID NO: 14396 - DNA, 15 bp, Homo sapiens
ctcttttctcagcta

SEQ ID NO: 14397 - DNA, 15 bp, Homo sapiens
gctcttttctcagct

SEQ ID NO: 14398 - DNA, 15 bp, Homo sapiens
tgctcttttctcagc

SEQ ID NO: 14399 - DNA, 15 bp, Homo sapiens
atgctcttttctcag

SEQ ID NO: 14400 - DNA, 15 bp, Homo sapiens
aatgctcttttctca

SEQ ID NO: 14401 - DNA, 15 bp, Homo sapiens
caatgctcttttctc

SEQ ID NO: 14402 - DNA, 15 bp, Homo sapiens
tcaatgctcttttct

SEQ ID NO: 14403 - DNA, 15 bp, Homo sapiens
ttcaatgctcttttc

SEQ ID NO: 14404 - DNA, 15 bp, Homo sapiens
tttcaatgctctttt

SEQ ID NO: 14405 - DNA, 15 bp, Homo sapiens
ctttcaatgctcttt

SEQ ID NO: 14406 - DNA, 15 bp, Homo sapiens
gctttcaatgctctt

SEQ ID NO: 14407 - DNA, 15 bp, Homo sapiens
ggctttcaatgctct

SEQ ID NO: 14408 - DNA, 15 bp, Homo sapiens
aggctttcaatgctc

SEQ ID NO: 14409 - DNA, 15 bp, Homo sapiens
aaggctttcaatgct

SEQ ID NO: 14410 - DNA, 15 bp, Homo sapiens
taaggctttcaatgc

SEQ ID NO: 14411 - DNA, 15 bp, Homo sapiens
ataaggctttcaatg

SEQ ID NO: 14412 - DNA, 15 bp, Homo sapiens
tataaggctttcaat

SEQ ID NO: 14413 - DNA, 15 bp, Homo sapiens
gtataaggctttcaa

SEQ ID NO: 14414 - DNA, 15 bp, Homo sapiens
tgtataaggctttca

SEQ ID NO: 14415 - DNA, 15 bp, Homo sapiens
gtgtataaggctttc

SEQ ID NO: 14416 - DNA, 15 bp, Homo sapiens
tgtgtataaggcttt

SEQ ID NO: 14417 - DNA, 15 bp, Homo sapiens
ctgtgtataaggctt

SEQ ID NO: 14418 - DNA, 15 bp, Homo sapiens
actgtgtataaggct

SEQ ID NO: 14419 - DNA, 15 bp, Homo sapiens
cactgtgtataaggc

SEQ ID NO: 14420 - DNA, 15 bp, Homo sapiens
acactgtgtataagg

SEQ ID NO: 14421 - DNA, 15 bp, Homo sapiens
cacactgtgtataag

SEQ ID NO: 14422 - DNA, 15 bp, Homo sapiens
acacactgtgtataa

SEQ ID NO: 14423 - DNA, 15 bp, Homo sapiens
aacacactgtgtata

SEQ ID NO: 14424 - DNA, 15 bp, Homo sapiens
caacacactgtgtat

SEQ ID NO: 14425 - DNA, 15 bp, Homo sapiens
acaacacactgtgta

SEQ ID NO: 14426 - DNA, 15 bp, Homo sapiens
tacaacacactgtgt

SEQ ID NO: 14427 - DNA, 15 bp, Homo sapiens
ctacaacacactgtg

SEQ ID NO: 14428 - DNA, 15 bp, Homo sapiens
actacaacacactgt

SEQ ID NO: 14429 - DNA, 15 bp, Homo sapiens
cactacaacacactg

SEQ ID NO: 14430 - DNA, 15 bp, Homo sapiens
tcactacaacacact

SEQ ID NO: 14431 - DNA, 15 bp, Homo sapiens
ttcactacaacacac

SEQ ID NO: 14432 - DNA, 15 bp, Homo sapiens
tttcactacaacaca

SEQ ID NO: 14433 - DNA, 15 bp, Homo sapiens
gtttcactacaacac

SEQ ID NO: 14434 - DNA, 15 bp, Homo sapiens
tgtttcactacaaca

SEQ ID NO: 14435 - DNA, 15 bp, Homo sapiens
ttgtttcactacaac

SEQ ID NO: 14436 - DNA, 15 bp, Homo sapiens
attgtttcactacaa

SEQ ID NO: 14437 - DNA, 15 bp, Homo sapiens
aattgtttcactaca

SEQ ID NO: 14438 - DNA, 15 bp, Homo sapiens
aaattgtttcactac

SEQ ID NO: 14439 - DNA, 15 bp, Homo sapiens
aaaattgtttcacta

SEQ ID NO: 14440 - DNA, 15 bp, Homo sapiens
gaaaattgtttcact

SEQ ID NO: 14441 - DNA, 15 bp, Homo sapiens
agaaaattgtttcac

SEQ ID NO: 14442 - DNA, 15 bp, Homo sapiens
aagaaaattgtttca

SEQ ID NO: 14443 - DNA, 15 bp, Homo sapiens
aaagaaaattgtttc

SEQ ID NO: 14444 - DNA, 15 bp, Homo sapiens
aaaagaaaattgttt

SEQ ID NO: 14445 - DNA, 15 bp, Homo sapiens
aaaaagaaaattgtt

SEQ ID NO: 14446 - DNA, 15 bp, Homo sapiens
caaaaagaaaattgt

SEQ ID NO: 14447 - DNA, 15 bp, Homo sapiens
ccaaaaagaaaattg

SEQ ID NO: 14448 - DNA, 15 bp, Homo sapiens
accaaaaagaaaatt

SEQ ID NO: 14449 - DNA, 15 bp, Homo sapiens
aaccaaaaagaaaat

SEQ ID NO: 14450 - DNA, 15 bp, Homo sapiens
gaaccaaaaagaaaa

SEQ ID NO: 14451 - DNA, 15 bp, Homo sapiens
agaaccaaaaagaaa

SEQ ID NO: 14452 - DNA, 15 bp, Homo sapiens
tagaaccaaaaagaa

SEQ ID NO: 14453 - DNA, 15 bp, Homo sapiens
ttagaaccaaaaaga

SEQ ID NO: 14454 - DNA, 15 bp, Homo sapiens
tttagaaccaaaaag

SEQ ID NO: 14455 - DNA, 15 bp, Homo sapiens
ttttagaaccaaaaa

SEQ ID NO: 14456 - DNA, 15 bp, Homo sapiens
tttttagaaccaaaa

SEQ ID NO: 14457 - DNA, 15 bp, Homo sapiens
ttttttagaaccaaa

SEQ ID NO: 14458 - DNA, 15 bp, Homo sapiens
gttttttagaaccaa

SEQ ID NO: 14459 - DNA, 15 bp, Homo sapiens
tgttttttagaacca

SEQ ID NO: 14460 - DNA, 15 bp, Homo sapiens
gtgttttttagaacc

SEQ ID NO: 14461 - DNA, 15 bp, Homo sapiens
agtgttttttagaac

SEQ ID NO: 14462 - DNA, 15 bp, Homo sapiens
cagtgttttttagaa

SEQ ID NO: 14463 - DNA, 15 bp, Homo sapiens
acagtgttttttaga

SEQ ID NO: 14464 - DNA, 15 bp, Homo sapiens
aacagtgttttttag

SEQ ID NO: 14465 - DNA, 15 bp, Homo sapiens
caacagtgtttttta

SEQ ID NO: 14466 - DNA, 15 bp, Homo sapiens
acaacagtgtttttt

SEQ ID NO: 14467 - DNA, 15 bp, Homo sapiens
cacaacagtgttttt

SEQ ID NO: 14468 - DNA, 15 bp, Homo sapiens
gcacaacagtgtttt

SEQ ID NO: 14469 - DNA, 15 bp, Homo sapiens
agcacaacagtgttt

SEQ ID NO: 14470 - DNA, 15 bp, Homo sapiens
gagcacaacagtgtt

SEQ ID NO: 14471 - DNA, 15 bp, Homo sapiens
agagcacaacagtgt

SEQ ID NO: 14472 - DNA, 15 bp, Homo sapiens
aagagcacaacagtg

SEQ ID NO: 14473 - DNA, 15 bp, Homo sapiens
aaagagcacaacagt

SEQ ID NO: 14474 - DNA, 15 bp, Homo sapiens
taaagagcacaacag

SEQ ID NO: 14475 - DNA, 15 bp, Homo sapiens
ctaaagagcacaaca

SEQ ID NO: 14476 - DNA, 15 bp, Homo sapiens
tctaaagagcacaac

SEQ ID NO: 14477 - DNA, 15 bp, Homo sapiens
atctaaagagcacaa

SEQ ID NO: 14478 - DNA, 15 bp, Homo sapiens
gatctaaagagcaca

SEQ ID NO: 14479 - DNA, 15 bp, Homo sapiens
ggatctaaagagcac

SEQ ID NO: 14480 - DNA, 15 bp, Homo sapiens
tggatctaaagagca

SEQ ID NO: 14481 - DNA, 15 bp, Homo sapiens
ctggatctaaagagc

SEQ ID NO: 14482 - DNA, 15 bp, Homo sapiens
gctggatctaaagag

SEQ ID NO: 14483 - DNA, 15 bp, Homo sapiens
tgctggatctaaaga

SEQ ID NO: 14484 - DNA, 15 bp, Homo sapiens
atgctggatctaaag

SEQ ID NO: 14485 - DNA, 15 bp, Homo sapiens
catgctggatctaaa

SEQ ID NO: 14486 - DNA, 15 bp, Homo sapiens
ccatgctggatctaa

SEQ ID NO: 14487 - DNA, 15 bp, Homo sapiens
gccatgctggatcta

SEQ ID NO: 14488 - DNA, 15 bp, Homo sapiens
agccatgctggatct

SEQ ID NO: 14489 - DNA, 15 bp, Homo sapiens
tagccatgctggatc

SEQ ID NO: 14490 - DNA, 15 bp, Homo sapiens
ctagccatgctggat

SEQ ID NO: 14491 - DNA, 15 bp, Homo sapiens
actagccatgctgga

SEQ ID NO: 14492 - DNA, 15 bp, Homo sapiens
aactagccatgctgg

SEQ ID NO: 14493 - DNA, 15 bp, Homo sapiens
taactagccatgctg

SEQ ID NO: 14494 - DNA, 15 bp, Homo sapiens
ctaactagccatgct

SEQ ID NO: 14495 - DNA, 15 bp, Homo sapiens
tctaactagccatgc

SEQ ID NO: 14496 - DNA, 15 bp, Homo sapiens
atctaactagccatg

SEQ ID NO: 14497 - DNA, 15 bp, Homo sapiens
catctaactagccat

SEQ ID NO: 14498 - DNA, 15 bp, Homo sapiens
tcatctaactagcca

SEQ ID NO: 14499 - DNA, 15 bp, Homo sapiens
ttcatctaactagcc

SEQ ID NO: 14500 - DNA, 15 bp, Homo sapiens
attcatctaactagc

SEQ ID NO: 14501 - DNA, 15 bp, Homo sapiens
tattcatctaactag

SEQ ID NO: 14502 - DNA, 15 bp, Homo sapiens
ttattcatctaacta

SEQ ID NO: 14503 - DNA, 15 bp, Homo sapiens
attattcatctaact

SEQ ID NO: 14504 - DNA, 15 bp, Homo sapiens
cattattcatctaac

SEQ ID NO: 14505 - DNA, 15 bp, Homo sapiens
tcattattcatctaa

SEQ ID NO: 14506 - DNA, 15 bp, Homo sapiens
ttcattattcatcta

SEQ ID NO: 14507 - DNA, 15 bp, Homo sapiens
attcattattcatct

SEQ ID NO: 14508 - DNA, 15 bp, Homo sapiens
cattcattattcatc

SEQ ID NO: 14509 - DNA, 15 bp, Homo sapiens
gcattcattattcat

SEQ ID NO: 14510 - DNA, 15 bp, Homo sapiens
tgcattcattattca

SEQ ID NO: 14511 - DNA, 15 bp, Homo sapiens
atgcattcattattc

SEQ ID NO: 14512 - DNA, 15 bp, Homo sapiens
catgcattcattatt

SEQ ID NO: 14513 - DNA, 15 bp, Homo sapiens
acatgcattcattat

SEQ ID NO: 14514 - DNA, 15 bp, Homo sapiens
aacatgcattcatta

SEQ ID NO: 14515 - DNA, 15 bp, Homo sapiens
gaacatgcattcatt

SEQ ID NO: 14516 - DNA, 15 bp, Homo sapiens
tgaacatgcattcat

SEQ ID NO: 14517 - DNA, 15 bp, Homo sapiens
ttgaacatgcattca

SEQ ID NO: 14518 - DNA, 15 bp, Homo sapiens
gttgaacatgcattc

SEQ ID NO: 14519 - DNA, 15 bp, Homo sapiens
agttgaacatgcatt

SEQ ID NO: 14520 - DNA, 15 bp, Homo sapiens
aagttgaacatgcat

SEQ ID NO: 14521 - DNA, 15 bp, Homo sapiens
aaagttgaacatgca

SEQ ID NO: 14522 - DNA, 15 bp, Homo sapiens
gaaagttgaacatgc

SEQ ID NO: 14523 - DNA, 15 bp, Homo sapiens
agaaagttgaacatg

SEQ ID NO: 14524 - DNA, 15 bp, Homo sapiens
cagaaagttgaacat

SEQ ID NO: 14525 - DNA, 15 bp, Homo sapiens
gcagaaagttgaaca

SEQ ID NO: 14526 - DNA, 15 bp, Homo sapiens
agcagaaagttgaac

SEQ ID NO: 14527 - DNA, 15 bp, Homo sapiens
tagcagaaagttgaa

SEQ ID NO: 14528 - DNA, 15 bp, Homo sapiens
gtagcagaaagttga

SEQ ID NO: 14529 - DNA, 15 bp, Homo sapiens
tgtagcagaaagttg

SEQ ID NO: 14530 - DNA, 15 bp, Homo sapiens
ctgtagcagaaagtt

SEQ ID NO: 14531 - DNA, 15 bp, Homo sapiens
cctgtagcagaaagt

SEQ ID NO: 14532 - DNA, 15 bp, Homo sapiens
tcctgtagcagaaag

SEQ ID NO: 14533 - DNA, 15 bp, Homo sapiens
ttcctgtagcagaaa

SEQ ID NO: 14534 - DNA, 15 bp, Homo sapiens
tttcctgtagcagaa

SEQ ID NO: 14535 - DNA, 15 bp, Homo sapiens
atttcctgtagcaga

SEQ ID NO: 14536 - DNA, 15 bp, Homo sapiens
aatttcctgtagcag

SEQ ID NO: 14537 - DNA, 15 bp, Homo sapiens
gaatttcctgtagca

SEQ ID NO: 14538 - DNA, 15 bp, Homo sapiens
agaatttcctgtagc

SEQ ID NO: 14539 - DNA, 15 bp, Homo sapiens
cagaatttcctgtag

SEQ ID NO: 14540 - DNA, 15 bp, Homo sapiens
gcagaatttcctgta

SEQ ID NO: 14541 - DNA, 15 bp, Homo sapiens
tgcagaatttcctgt

SEQ ID NO: 14542 - DNA, 15 bp, Homo sapiens
ttgcagaatttcctg

SEQ ID NO: 14543 - DNA, 15 bp, Homo sapiens
cttgcagaatttcct

SEQ ID NO: 14544 - DNA, 15 bp, Homo sapiens
acttgcagaatttcc

SEQ ID NO: 14545 - DNA, 15 bp, Homo sapiens
cacttgcagaatttc

SEQ ID NO: 14546 - DNA, 15 bp, Homo sapiens
ccacttgcagaattt

SEQ ID NO: 14547 - DNA, 15 bp, Homo sapiens
gccacttgcagaatt

SEQ ID NO: 14548 - DNA, 15 bp, Homo sapiens
tgccacttgcagaat

SEQ ID NO: 14549 - DNA, 15 bp, Homo sapiens
ttgccacttgcagaa

SEQ ID NO: 14550 - DNA, 15 bp, Homo sapiens
gttgccacttgcaga

SEQ ID NO: 14551 - DNA, 15 bp, Homo sapiens
cgttgccacttgcag

SEQ ID NO: 14552 - DNA, 15 bp, Homo sapiens
acgttgccacttgca

SEQ ID NO: 14553 - DNA, 15 bp, Homo sapiens
cacgttgccacttgc

SEQ ID NO: 14554 - DNA, 15 bp, Homo sapiens
ccacgttgccacttg

SEQ ID NO: 14555 - DNA, 15 bp, Homo sapiens
cccacgttgccactt

SEQ ID NO: 14556 - DNA, 15 bp, Homo sapiens
acccacgttgccact

SEQ ID NO: 14557 - DNA, 15 bp, Homo sapiens
gacccacgttgccac

SEQ ID NO: 14558 - DNA, 15 bp, Homo sapiens
ggacccacgttgcca

SEQ ID NO: 14559 - DNA, 15 bp, Homo sapiens
tggacccacgttgcc

SEQ ID NO: 14560 - DNA, 15 bp, Homo sapiens
atggacccacgttgc

SEQ ID NO: 14561 - DNA, 15 bp, Homo sapiens
aatggacccacgttg

SEQ ID NO: 14562 - DNA, 15 bp, Homo sapiens
gaatggacccacgtt

SEQ ID NO: 14563 - DNA, 15 bp, Homo sapiens
ggaatggacccacgt

SEQ ID NO: 14564 - DNA, 15 bp, Homo sapiens
cggaatggacccacg

SEQ ID NO: 14565 - DNA, 15 bp, Homo sapiens
acggaatggacccac

SEQ ID NO: 14566 - DNA, 15 bp, Homo sapiens
cacggaatggaccca

SEQ ID NO: 14567 - DNA, 15 bp, Homo sapiens
acacggaatggaccc

SEQ ID NO: 14568 - DNA, 15 bp, Homo sapiens
cacacggaatggacc

SEQ ID NO: 14569 - DNA, 15 bp, Homo sapiens
acacacggaatggac

SEQ ID NO: 14570 - DNA, 15 bp, Homo sapiens
cacacacggaatgga

SEQ ID NO: 14571 - DNA, 15 bp, Homo sapiens
acacacacggaatgg

SEQ ID NO: 14572 - DNA, 15 bp, Homo sapiens
gacacacacggaatg

SEQ ID NO: 14573 - DNA, 15 bp, Homo sapiens
tgacacacacggaat

SEQ ID NO: 14574 - DNA, 15 bp, Homo sapiens
gtgacacacacggaa

SEQ ID NO: 14575 - DNA, 15 bp, Homo sapiens
agtgacacacacgga

SEQ ID NO: 14576 - DNA, 15 bp, Homo sapiens
tagtgacacacacgg

SEQ ID NO: 14577 - DNA, 15 bp, Homo sapiens
ctagtgacacacacg

SEQ ID NO: 14578 - DNA, 15 bp, Homo sapiens
tctagtgacacacac

SEQ ID NO: 14579 - DNA, 15 bp, Homo sapiens
ctctagtgacacaca

SEQ ID NO: 14580 - DNA, 15 bp, Homo sapiens
gctctagtgacacac

SEQ ID NO: 14581 - DNA, 15 bp, Homo sapiens
agctctagtgacaca

SEQ ID NO: 14582 - DNA, 15 bp, Homo sapiens
cagctctagtgacac

SEQ ID NO: 14583 - DNA, 15 bp, Homo sapiens
ccagctctagtgaca

SEQ ID NO: 14584 - DNA, 15 bp, Homo sapiens
gccagctctagtgac

SEQ ID NO: 14585 - DNA, 15 bp, Homo sapiens
cgccagctctagtga

SEQ ID NO: 14586 - DNA, 15 bp, Homo sapiens
gcgccagctctagtg

SEQ ID NO: 14587 - DNA, 15 bp, Homo sapiens
tgcgccagctctagt

SEQ ID NO: 14588 - DNA, 15 bp, Homo sapiens
ttgcgccagctctag

SEQ ID NO: 14589 - DNA, 15 bp, Homo sapiens
cttgcgccagctcta

SEQ ID NO: 14590 - DNA, 15 bp, Homo sapiens
gcttgcgccagctct

SEQ ID NO: 14591 - DNA, 15 bp, Homo sapiens
ggcttgcgccagctc

SEQ ID NO: 14592 - DNA, 15 bp, Homo sapiens
gggcttgcgccagct

SEQ ID NO: 14593 - DNA, 15 bp, Homo sapiens
tgggcttgcgccagc

SEQ ID NO: 14594 - DNA, 15 bp, Homo sapiens
atgggcttgcgccag

SEQ ID NO: 14595 - DNA, 15 bp, Homo sapiens
catgggcttgcgcca

SEQ ID NO: 14596 - DNA, 15 bp, Homo sapiens
ccatgggcttgcgcc

SEQ ID NO: 14597 - DNA, 15 bp, Homo sapiens
gccatgggcttgcgc

SEQ ID NO: 14598 - DNA, 15 bp, Homo sapiens
ggccatgggcttgcg

SEQ ID NO: 14599 - DNA, 15 bp, Homo sapiens
tggccatgggcttgc

SEQ ID NO: 14600 - DNA, 15 bp, Homo sapiens
atggccatgggcttg

SEQ ID NO: 14601 - DNA, 15 bp, Homo sapiens
catggccatgggctt

SEQ ID NO: 14602 - DNA, 15 bp, Homo sapiens
ccatggccatgggct

SEQ ID NO: 14603 - DNA, 15 bp, Homo sapiens
accatggccatgggc

SEQ ID NO: 14604 - DNA, 15 bp, Homo sapiens
caccatggccatggg

SEQ ID NO: 14605 - DNA, 15 bp, Homo sapiens
tcaccatggccatgg

SEQ ID NO: 14606 - DNA, 15 bp, Homo sapiens
ctcaccatggccatg

SEQ ID NO: 14607 - DNA, 15 bp, Homo sapiens
cctcaccatggccat

SEQ ID NO: 14608 - DNA, 15 bp, Homo sapiens
gcctcaccatggcca

SEQ ID NO: 14609 - DNA, 15 bp, Homo sapiens
tgcctcaccatggcc

SEQ ID NO: 14610 - DNA, 15 bp, Homo sapiens
ctgcctcaccatggc

SEQ ID NO: 14611 - DNA, 15 bp, Homo sapiens
gctgcctcaccatgg

SEQ ID NO: 14612 - DNA, 15 bp, Homo sapiens
cgctgcctcaccatg

SEQ ID NO: 14613 - DNA, 15 bp, Homo sapiens
acgctgcctcaccat

SEQ ID NO: 14614 - DNA, 15 bp, Homo sapiens
aacgctgcctcacca

SEQ ID NO: 14615 - DNA, 15 bp, Homo sapiens
aaacgctgcctcacc

SEQ ID NO: 14616 - DNA, 15 bp, Homo sapiens
gaaacgctgcctcac

SEQ ID NO: 14617 - DNA, 15 bp, Homo sapiens
ggaaacgctgcctca

SEQ ID NO: 14618 - DNA, 15 bp, Homo sapiens
tggaaacgctgcctc

SEQ ID NO: 14619 - DNA, 15 bp, Homo sapiens
gtggaaacgctgcct

SEQ ID NO: 14620 - DNA, 15 bp, Homo sapiens
agtggaaacgctgcc

SEQ ID NO: 14621 - DNA, 15 bp, Homo sapiens
cagtggaaacgctgc

SEQ ID NO: 14622 - DNA, 15 bp, Homo sapiens
ccagtggaaacgctg

SEQ ID NO: 14623 - DNA, 15 bp, Homo sapiens
tccagtggaaacgct

SEQ ID NO: 14624 - DNA, 15 bp, Homo sapiens
ttccagtggaaacgc

SEQ ID NO: 14625 - DNA, 15 bp, Homo sapiens
gttccagtggaaacg

SEQ ID NO: 14626 - DNA, 15 bp, Homo sapiens
agttccagtggaaac

SEQ ID NO: 14627 - DNA, 15 bp, Homo sapiens
tagttccagtggaaa

SEQ ID NO: 14628 - DNA, 15 bp, Homo sapiens
ttagttccagtggaa

SEQ ID NO: 14629 - DNA, 15 bp, Homo sapiens
attagttccagtgga

SEQ ID NO: 14630 - DNA, 15 bp, Homo sapiens
gattagttccagtgg

SEQ ID NO: 14631 - DNA, 15 bp, Homo sapiens
agattagttccagtg

SEQ ID NO: 14632 - DNA, 15 bp, Homo sapiens
cagattagttccagt

SEQ ID NO: 14633 - DNA, 15 bp, Homo sapiens
tcagattagttccag

SEQ ID NO: 14634 - DNA, 15 bp, Homo sapiens
atcagattagttcca

SEQ ID NO: 14635 - DNA, 15 bp, Homo sapiens
tatcagattagttcc

SEQ ID NO: 14636 - DNA, 15 bp, Homo sapiens
gtatcagattagttc

SEQ ID NO: 14637 - DNA, 15 bp, Homo sapiens
ggtatcagattagtt

SEQ ID NO: 14638 - DNA, 15 bp, Homo sapiens
aggtatcagattagt

SEQ ID NO: 14639 - DNA, 15 bp, Homo sapiens
caggtatcagattag

SEQ ID NO: 14640 - DNA, 15 bp, Homo sapiens
gcaggtatcagatta

SEQ ID NO: 14641 - DNA, 15 bp, Homo sapiens
tgcaggtatcagatt

SEQ ID NO: 14642 - DNA, 15 bp, Homo sapiens
gtgcaggtatcagat

SEQ ID NO: 14643 - DNA, 15 bp, Homo sapiens
ggtgcaggtatcaga

SEQ ID NO: 14644 - DNA, 15 bp, Homo sapiens
tggtgcaggtatcag

SEQ ID NO: 14645 - DNA, 15 bp, Homo sapiens
ctggtgcaggtatca

SEQ ID NO: 14646 - DNA, 15 bp, Homo sapiens
gctggtgcaggtatc

SEQ ID NO: 14647 - DNA, 15 bp, Homo sapiens
agctggtgcaggtat

SEQ ID NO: 14648 - DNA, 15 bp, Homo sapiens
gagctggtgcaggta

SEQ ID NO: 14649 - DNA, 15 bp, Homo sapiens
agagctggtgcaggt

SEQ ID NO: 14650 - DNA, 15 bp, Homo sapiens
aagagctggtgcagg

SEQ ID NO: 14651 - DNA, 15 bp, Homo sapiens
caagagctggtgcag

SEQ ID NO: 14652 - DNA, 15 bp, Homo sapiens
gcaagagctggtgca

SEQ ID NO: 14653 - DNA, 15 bp, Homo sapiens
tgcaagagctggtgc

SEQ ID NO: 14654 - DNA, 15 bp, Homo sapiens
ttgcaagagctggtg

SEQ ID NO: 14655 - DNA, 15 bp, Homo sapiens
gttgcaagagctggt

SEQ ID NO: 14656 - DNA, 15 bp, Homo sapiens
agttgcaagagctgg

SEQ ID NO: 14657 - DNA, 15 bp, Homo sapiens
cagttgcaagagctg

SEQ ID NO: 14658 - DNA, 15 bp, Homo sapiens
acagttgcaagagct

SEQ ID NO: 14659 - DNA, 15 bp, Homo sapiens
cacagttgcaagagc

SEQ ID NO: 14660 - DNA, 15 bp, Homo sapiens
gcacagttgcaagag

SEQ ID NO: 14661 - DNA, 15 bp, Homo sapiens
tgcacagttgcaaga

SEQ ID NO: 14662 - DNA, 15 bp, Homo sapiens
ctgcacagttgcaag

SEQ ID NO: 14663 - DNA, 15 bp, Homo sapiens
actgcacagttgcaa

SEQ ID NO: 14664 - DNA, 15 bp, Homo sapiens
cactgcacagttgca

SEQ ID NO: 14665 - DNA, 15 bp, Homo sapiens
acactgcacagttgc

SEQ ID NO: 14666 - DNA, 15 bp, Homo sapiens
aacactgcacagttg

SEQ ID NO: 14667 - DNA, 15 bp, Homo sapiens
gaacactgcacagtt

SEQ ID NO: 14668 - DNA, 15 bp, Homo sapiens
ggaacactgcacagt

SEQ ID NO: 14669 - DNA, 15 bp, Homo sapiens
gggaacactgcacag

SEQ ID NO: 14670 - DNA, 15 bp, Homo sapiens
tgggaacactgcaca

SEQ ID NO: 14671 - DNA, 15 bp, Homo sapiens
gtgggaacactgcac

SEQ ID NO: 14672 - DNA, 15 bp, Homo sapiens
agtgggaacactgca

SEQ ID NO: 14673 - DNA, 15 bp, Homo sapiens
cagtgggaacactgc

SEQ ID NO: 14674 - DNA, 15 bp, Homo sapiens
gcagtgggaacactg

SEQ ID NO: 14675 - DNA, 15 bp, Homo sapiens
tgcagtgggaacact

SEQ ID NO: 14676 - DNA, 15 bp, Homo sapiens
ttgcagtgggaacac

SEQ ID NO: 14677 - DNA, 15 bp, Homo sapiens
tttgcagtgggaaca

SEQ ID NO: 14678 - DNA, 15 bp, Homo sapiens
gtttgcagtgggaac

SEQ ID NO: 14679 - DNA, 15 bp, Homo sapiens
agtttgcagtgggaa

SEQ ID NO: 14680 - DNA, 15 bp, Homo sapiens
tagtttgcagtggga

SEQ ID NO: 14681 - DNA, 15 bp, Homo sapiens
gtagtttgcagtggg

SEQ ID NO: 14682 - DNA, 15 bp, Homo sapiens
cgtagtttgcagtgg

SEQ ID NO: 14683 - DNA, 15 bp, Homo sapiens
ccgtagtttgcagtg

SEQ ID NO: 14684 - DNA, 15 bp, Homo sapiens
tccgtagtttgcagt

SEQ ID NO: 14685 - DNA, 15 bp, Homo sapiens
atccgtagtttgcag

SEQ ID NO: 14686 - DNA, 15 bp, Homo sapiens
catccgtagtttgca

SEQ ID NO: 14687 - DNA, 15 bp, Homo sapiens
ccatccgtagtttgc

SEQ ID NO: 14688 - DNA, 15 bp, Homo sapiens
cccatccgtagtttg

SEQ ID NO: 14689 - DNA, 15 bp, Homo sapiens
ccccatccgtagttt

SEQ ID NO: 14690 - DNA, 15 bp, Homo sapiens
accccatccgtagtt

SEQ ID NO: 14691 - DNA, 15 bp, Homo sapiens
taccccatccgtagt

SEQ ID NO: 14692 - DNA, 15 bp, Homo sapiens
ttaccccatccgtag

SEQ ID NO: 14693 - DNA, 15 bp, Homo sapiens
tttaccccatccgta

SEQ ID NO: 14694 - DNA, 15 bp, Homo sapiens
ttttaccccatccgt

SEQ ID NO: 14695 - DNA, 15 bp, Homo sapiens
cttttaccccatccg

SEQ ID NO: 14696 - DNA, 15 bp, Homo sapiens
tcttttaccccatcc

SEQ ID NO: 14697 - DNA, 15 bp, Homo sapiens
gtcttttaccccatc

SEQ ID NO: 14698 - DNA, 15 bp, Homo sapiens
agtcttttaccccat

SEQ ID NO: 14699 - DNA, 15 bp, Homo sapiens
cagtcttttacccca

SEQ ID NO: 14700 - DNA, 15 bp, Homo sapiens
gcagtcttttacccc

SEQ ID NO: 14701 - DNA, 15 bp, Homo sapiens
agcagtcttttaccc

SEQ ID NO: 14702 - DNA, 15 bp, Homo sapiens
gagcagtcttttacc

SEQ ID NO: 14703 - DNA, 15 bp, Homo sapiens
tgagcagtcttttac

SEQ ID NO: 14704 - DNA, 15 bp, Homo sapiens
gtgagcagtctttta

SEQ ID NO: 14705 - DNA, 15 bp, Homo sapiens
ggtgagcagtctttt

SEQ ID NO: 14706 - DNA, 15 bp, Homo sapiens
aggtgagcagtcttt

SEQ ID NO: 14707 - DNA, 15 bp, Homo sapiens
gaggtgagcagtctt

SEQ ID NO: 14708 - DNA, 15 bp, Homo sapiens
ggaggtgagcagtct

SEQ ID NO: 14709 - DNA, 15 bp, Homo sapiens
aggaggtgagcagtc

SEQ ID NO: 14710 - DNA, 15 bp, Homo sapiens
taggaggtgagcagt

SEQ ID NO: 14711 - DNA, 15 bp, Homo sapiens
ataggaggtgagcag

SEQ ID NO: 14712 - DNA, 15 bp, Homo sapiens
aataggaggtgagca

SEQ ID NO: 14713 - DNA, 15 bp, Homo sapiens
aaataggaggtgagc

SEQ ID NO: 14714 - DNA, 15 bp, Homo sapiens
gaaataggaggtgag

SEQ ID NO: 14715 - DNA, 15 bp, Homo sapiens
agaaataggaggtga

SEQ ID NO: 14716 - DNA, 15 bp, Homo sapiens
gagaaataggaggtg

SEQ ID NO: 14717 - DNA, 15 bp, Homo sapiens
tgagaaataggaggt

SEQ ID NO: 14718 - DNA, 15 bp, Homo sapiens
atgagaaataggagg

SEQ ID NO: 14719 - DNA, 15 bp, Homo sapiens
gatgagaaataggag

SEQ ID NO: 14720 - DNA, 15 bp, Homo sapiens
agatgagaaatagga

SEQ ID NO: 14721 - DNA, 15 bp, Homo sapiens
tagatgagaaatagg

SEQ ID NO: 14722 - DNA, 15 bp, Homo sapiens
ttagatgagaaatag

SEQ ID NO: 14723 - DNA, 15 bp, Homo sapiens
attagatgagaaata

SEQ ID NO: 14724 - DNA, 15 bp, Homo sapiens
gattagatgagaaat

SEQ ID NO: 14725 - DNA, 15 bp, Homo sapiens
agattagatgagaaa

SEQ ID NO: 14726 - DNA, 15 bp, Homo sapiens
gagattagatgagaa

SEQ ID NO: 14727 - DNA, 15 bp, Homo sapiens
tgagattagatgaga

SEQ ID NO: 14728 - DNA, 15 bp, Homo sapiens
gtgagattagatgag

SEQ ID NO: 14729 - DNA, 15 bp, Homo sapiens
tgtgagattagatga

SEQ ID NO: 14730 - DNA, 15 bp, Homo sapiens
gtgtgagattagatg

SEQ ID NO: 14731 - DNA, 15 bp, Homo sapiens
tgtgtgagattagat

SEQ ID NO: 14732 - DNA, 15 bp, Homo sapiens
gtgtgtgagattaga

SEQ ID NO: 14733 - DNA, 15 bp, Homo sapiens
agtgtgtgagattag

SEQ ID NO: 14734 - DNA, 15 bp, Homo sapiens
gagtgtgtgagatta

SEQ ID NO: 14735 - DNA, 15 bp, Homo sapiens
agagtgtgtgagatt

SEQ ID NO: 14736 - DNA, 15 bp, Homo sapiens
cagagtgtgtgagat

SEQ ID NO: 14737 - DNA, 15 bp, Homo sapiens
acagagtgtgtgaga

SEQ ID NO: 14738 - DNA, 15 bp, Homo sapiens
aacagagtgtgtgag

SEQ ID NO: 14739 - DNA, 15 bp, Homo sapiens
aaacagagtgtgtga

SEQ ID NO: 14740 - DNA, 15 bp, Homo sapiens
caaacagagtgtgtg

SEQ ID NO: 14741 - DNA, 15 bp, Homo sapiens
tcaaacagagtgtgt

SEQ ID NO: 14742 - DNA, 15 bp, Homo sapiens
atcaaacagagtgtg

SEQ ID NO: 14743 - DNA, 15 bp, Homo sapiens
catcaaacagagtgt

SEQ ID NO: 14744 - DNA, 15 bp, Homo sapiens
tcatcaaacagagtg

SEQ ID NO: 14745 - DNA, 15 bp, Homo sapiens
ctcatcaaacagagt

SEQ ID NO: 14746 - DNA, 15 bp, Homo sapiens
cctcatcaaacagag

SEQ ID NO: 14747 - DNA, 15 bp, Homo sapiens
gcctcatcaaacaga

SEQ ID NO: 14748 - DNA, 15 bp, Homo sapiens
agcctcatcaaacag

SEQ ID NO: 14749 - DNA, 15 bp, Homo sapiens
tagcctcatcaaaca

SEQ ID NO: 14750 - DNA, 15 bp, Homo sapiens
atagcctcatcaaac

SEQ ID NO: 14751 - DNA, 15 bp, Homo sapiens
catagcctcatcaaa

SEQ ID NO: 14752 - DNA, 15 bp, Homo sapiens
ccatagcctcatcaa

SEQ ID NO: 14753 - DNA, 15 bp, Homo sapiens
tccatagcctcatca

SEQ ID NO: 14754 - DNA, 15 bp, Homo sapiens
ctccatagcctcatc

SEQ ID NO: 14755 - DNA, 15 bp, Homo sapiens
tctccatagcctcat

SEQ ID NO: 14756 - DNA, 15 bp, Homo sapiens
ttctccatagcctca

SEQ ID NO: 14757 - DNA, 15 bp, Homo sapiens
tttctccatagcctc

SEQ ID NO: 14758 - DNA, 15 bp, Homo sapiens
gtttctccatagcct

SEQ ID NO: 14759 - DNA, 15 bp, Homo sapiens
tgtttctccatagcc

SEQ ID NO: 14760 - DNA, 15 bp, Homo sapiens
ctgtttctccatagc

SEQ ID NO: 14761 - DNA, 15 bp, Homo sapiens
cctgtttctccatag

SEQ ID NO: 14762 - DNA, 15 bp, Homo sapiens
acctgtttctccata

SEQ ID NO: 14763 - DNA, 15 bp, Homo sapiens
gacctgtttctccat

SEQ ID NO: 14764 - DNA, 15 bp, Homo sapiens
agacctgtttctcca

SEQ ID NO: 14765 - DNA, 15 bp, Homo sapiens
aagacctgtttctcc

SEQ ID NO: 14766 - DNA, 15 bp, Homo sapiens
gaagacctgtttctc

SEQ ID NO: 14767 - DNA, 15 bp, Homo sapiens
agaagacctgtttct

SEQ ID NO: 14768 - DNA, 15 bp, Homo sapiens
gagaagacctgtttc

SEQ ID NO: 14769 - DNA, 15 bp, Homo sapiens
tgagaagacctgttt

SEQ ID NO: 14770 - DNA, 15 bp, Homo sapiens
atgagaagacctgtt

SEQ ID NO: 14771 - DNA, 15 bp, Homo sapiens
tatgagaagacctgt

SEQ ID NO: 14772 - DNA, 15 bp, Homo sapiens
gtatgagaagacctg

SEQ ID NO: 14773 - DNA, 15 bp, Homo sapiens
tgtatgagaagacct

SEQ ID NO: 14774 - DNA, 15 bp, Homo sapiens
gtgtatgagaagacc

SEQ ID NO: 14775 - DNA, 15 bp, Homo sapiens
agtgtatgagaagac

SEQ ID NO: 14776 - DNA, 15 bp, Homo sapiens
tagtgtatgagaaga

SEQ ID NO: 14777 - DNA, 15 bp, Homo sapiens
ttagtgtatgagaag

SEQ ID NO: 14778 - DNA, 15 bp, Homo sapiens
tttagtgtatgagaa

SEQ ID NO: 14779 - DNA, 15 bp, Homo sapiens
ctttagtgtatgaga

SEQ ID NO: 14780 - DNA, 15 bp, Homo sapiens
cctttagtgtatgag

SEQ ID NO: 14781 - DNA, 15 bp, Homo sapiens
acctttagtgtatga

SEQ ID NO: 14782 - DNA, 15 bp, Homo sapiens
cacctttagtgtatg

SEQ ID NO: 14783 - DNA, 15 bp, Homo sapiens
ccacctttagtgtat

SEQ ID NO: 14784 - DNA, 15 bp, Homo sapiens
cccacctttagtgta

SEQ ID NO: 14785 - DNA, 15 bp, Homo sapiens
tcccacctttagtgt

SEQ ID NO: 14786 - DNA, 15 bp, Homo sapiens
ctcccacctttagtg

SEQ ID NO: 14787 - DNA, 15 bp, Homo sapiens
actcccacctttagt

SEQ ID NO: 14788 - DNA, 15 bp, Homo sapiens
tactcccacctttag

SEQ ID NO: 14789 - DNA, 15 bp, Homo sapiens
gtactcccaccttta

SEQ ID NO: 14790 - DNA, 15 bp, Homo sapiens
tgtactcccaccttt

SEQ ID NO: 14791 - DNA, 15 bp, Homo sapiens
ttgtactcccacctt

SEQ ID NO: 14792 - DNA, 15 bp, Homo sapiens
tttgtactcccacct

SEQ ID NO: 14793 - DNA, 15 bp, Homo sapiens
gtttgtactcccacc

SEQ ID NO: 14794 - DNA, 15 bp, Homo sapiens
tgtttgtactcccac

SEQ ID NO: 14795 - DNA, 15 bp, Homo sapiens
ttgtttgtactccca

SEQ ID NO: 14796 - DNA, 15 bp, Homo sapiens
attgtttgtactccc

SEQ ID NO: 14797 - DNA, 15 bp, Homo sapiens
aattgtttgtactcc

SEQ ID NO: 14798 - DNA, 15 bp, Homo sapiens
gaattgtttgtactc

SEQ ID NO: 14799 - DNA, 15 bp, Homo sapiens
tgaattgtttgtact

SEQ ID NO: 14800 - DNA, 15 bp, Homo sapiens
ttgaattgtttgtac

SEQ ID NO: 14801 - DNA, 15 bp, Homo sapiens
cttgaattgtttgta

SEQ ID NO: 14802 - DNA, 15 bp, Homo sapiens
gcttgaattgtttgt

SEQ ID NO: 14803 - DNA, 15 bp, Homo sapiens
ggcttgaattgtttg

SEQ ID NO: 14804 - DNA, 15 bp, Homo sapiens
gggcttgaattgttt

SEQ ID NO: 14805 - DNA, 15 bp, Homo sapiens
agggcttgaattgtt

SEQ ID NO: 14806 - DNA, 15 bp, Homo sapiens
cagggcttgaattgt

SEQ ID NO: 14807 - DNA, 15 bp, Homo sapiens
acagggcttgaattg

SEQ ID NO: 14808 - DNA, 15 bp, Homo sapiens
cacagggcttgaatt

SEQ ID NO: 14809 - DNA, 15 bp, Homo sapiens
gcacagggcttgaat

SEQ ID NO: 14810 - DNA, 15 bp, Homo sapiens
tgcacagggcttgaa

SEQ ID NO: 14811 - DNA, 15 bp, Homo sapiens
ctgcacagggcttga

SEQ ID NO: 14812 - DNA, 15 bp, Homo sapiens
cctgcacagggcttg

SEQ ID NO: 14813 - DNA, 15 bp, Homo sapiens
tcctgcacagggctt

SEQ ID NO: 14814 - DNA, 15 bp, Homo sapiens
gtcctgcacagggct

SEQ ID NO: 14815 - DNA, 15 bp, Homo sapiens
tgtcctgcacagggc

SEQ ID NO: 14816 - DNA, 15 bp, Homo sapiens
ttgtcctgcacaggg

SEQ ID NO: 14817 - DNA, 15 bp, Homo sapiens
attgtcctgcacagg

SEQ ID NO: 14818 - DNA, 15 bp, Homo sapiens
aattgtcctgcacag

SEQ ID NO: 14819 - DNA, 15 bp, Homo sapiens
taattgtcctgcaca

SEQ ID NO: 14820 - DNA, 15 bp, Homo sapiens
ctaattgtcctgcac

SEQ ID NO: 14821 - DNA, 15 bp, Homo sapiens
cctaattgtcctgca

SEQ ID NO: 14822 - DNA, 15 bp, Homo sapiens
gcctaattgtcctgc

SEQ ID NO: 14823 - DNA, 15 bp, Homo sapiens
tgcctaattgtcctg

SEQ ID NO: 14824 - DNA, 15 bp, Homo sapiens
ttgcctaattgtcct

SEQ ID NO: 14825 - DNA, 15 bp, Homo sapiens
attgcctaattgtcc

SEQ ID NO: 14826 - DNA, 15 bp, Homo sapiens
tattgcctaattgtc

SEQ ID NO: 14827 - DNA, 15 bp, Homo sapiens
gtattgcctaattgt

SEQ ID NO: 14828 - DNA, 15 bp, Homo sapiens
ggtattgcctaattg

SEQ ID NO: 14829 - DNA, 15 bp, Homo sapiens
aggtattgcctaatt

SEQ ID NO: 14830 - DNA, 15 bp, Homo sapiens
taggtattgcctaat

SEQ ID NO: 14831 - DNA, 15 bp, Homo sapiens
ataggtattgcctaa

SEQ ID NO: 14832 - DNA, 15 bp, Homo sapiens
gataggtattgccta

SEQ ID NO: 14833 - DNA, 15 bp, Homo sapiens
tgataggtattgcct

SEQ ID NO: 14834 - DNA, 15 bp, Homo sapiens
ttgataggtattgcc

SEQ ID NO: 14835 - DNA, 15 bp, Homo sapiens
tttgataggtattgc

SEQ ID NO: 14836 - DNA, 15 bp, Homo sapiens
ttttgataggtattg

SEQ ID NO: 14837 - DNA, 15 bp, Homo sapiens
attttgataggtatt

SEQ ID NO: 14838 - DNA, 15 bp, Homo sapiens
aattttgataggtat

SEQ ID NO: 14839 - DNA, 15 bp, Homo sapiens
taattttgataggta

SEQ ID NO: 14840 - DNA, 15 bp, Homo sapiens
ataattttgataggt

SEQ ID NO: 14841 - DNA, 15 bp, Homo sapiens
tataattttgatagg

SEQ ID NO: 14842 - DNA, 15 bp, Homo sapiens
gtataattttgatag

SEQ ID NO: 14843 - DNA, 15 bp, Homo sapiens
tgtataattttgata

SEQ ID NO: 14844 - DNA, 15 bp, Homo sapiens
atgtataattttgat

SEQ ID NO: 14845 - DNA, 15 bp, Homo sapiens
catgtataattttga

SEQ ID NO: 14846 - DNA, 15 bp, Homo sapiens
tcatgtataattttg

SEQ ID NO: 14847 - DNA, 15 bp, Homo sapiens
atcatgtataatttt

SEQ ID NO: 14848 - DNA, 15 bp, Homo sapiens
aatcatgtataattt

SEQ ID NO: 14849 - DNA, 15 bp, Homo sapiens
aaatcatgtataatt

SEQ ID NO: 14850 - DNA, 15 bp, Homo sapiens
aaaatcatgtataat

SEQ ID NO: 14851 - DNA, 15 bp, Homo sapiens
aaaaatcatgtataa

SEQ ID NO: 14852 - DNA, 15 bp, Homo sapiens
gaaaaatcatgtata

SEQ ID NO: 14853 - DNA, 15 bp, Homo sapiens
ggaaaaatcatgtat

SEQ ID NO: 14854 - DNA, 15 bp, Homo sapiens
aggaaaaatcatgta

SEQ ID NO: 14855 - DNA, 15 bp, Homo sapiens
caggaaaaatcatgt

SEQ ID NO: 14856 - DNA, 15 bp, Homo sapiens
gcaggaaaaatcatg

SEQ ID NO: 14857 - DNA, 15 bp, Homo sapiens
agcaggaaaaatcat

SEQ ID NO: 14858 - DNA, 15 bp, Homo sapiens
cagcaggaaaaatca

SEQ ID NO: 14859 - DNA, 15 bp, Homo sapiens
tcagcaggaaaaatc

SEQ ID NO: 14860 - DNA, 15 bp, Homo sapiens
gtcagcaggaaaaat

SEQ ID NO: 14861 - DNA, 15 bp, Homo sapiens
ggtcagcaggaaaaa

SEQ ID NO: 14862 - DNA, 15 bp, Homo sapiens
gggtcagcaggaaaa

SEQ ID NO: 14863 - DNA, 15 bp, Homo sapiens
tgggtcagcaggaaa

SEQ ID NO: 14864 - DNA, 15 bp, Homo sapiens
ctgggtcagcaggaa

SEQ ID NO: 14865 - DNA, 15 bp, Homo sapiens
gctgggtcagcagga

SEQ ID NO: 14866 - DNA, 15 bp, Homo sapiens
tgctgggtcagcagg

SEQ ID NO: 14867 - DNA, 15 bp, Homo sapiens
ttgctgggtcagcag

SEQ ID NO: 14868 - DNA, 15 bp, Homo sapiens
attgctgggtcagca

SEQ ID NO: 14869 - DNA, 15 bp, Homo sapiens
aattgctgggtcagc

SEQ ID NO: 14870 - DNA, 15 bp, Homo sapiens
gaattgctgggtcag

SEQ ID NO: 14871 - DNA, 15 bp, Homo sapiens
ggaattgctgggtca

SEQ ID NO: 14872 - DNA, 15 bp, Homo sapiens
tggaattgctgggtc

SEQ ID NO: 14873 - DNA, 15 bp, Homo sapiens
gtggaattgctgggt

SEQ ID NO: 14874 - DNA, 15 bp, Homo sapiens
agtggaattgctggg

SEQ ID NO: 14875 - DNA, 15 bp, Homo sapiens
aagtggaattgctgg

SEQ ID NO: 14876 - DNA, 15 bp, Homo sapiens
gaagtggaattgctg

SEQ ID NO: 14877 - DNA, 15 bp, Homo sapiens
agaagtggaattgct

SEQ ID NO: 14878 - DNA, 15 bp, Homo sapiens
cagaagtggaattgc

SEQ ID NO: 14879 - DNA, 15 bp, Homo sapiens
ccagaagtggaattg

SEQ ID NO: 14880 - DNA, 15 bp, Homo sapiens
cccagaagtggaatt

SEQ ID NO: 14881 - DNA, 15 bp, Homo sapiens
tcccagaagtggaat

SEQ ID NO: 14882 - DNA, 15 bp, Homo sapiens
ttcccagaagtggaa

SEQ ID NO: 14883 - DNA, 15 bp, Homo sapiens
attcccagaagtgga

SEQ ID NO: 14884 - DNA, 15 bp, Homo sapiens
tattcccagaagtgg

SEQ ID NO: 14885 - DNA, 15 bp, Homo sapiens
ttattcccagaagtg

SEQ ID NO: 14886 - DNA, 15 bp, Homo sapiens
attattcccagaagt

SEQ ID NO: 14887 - DNA, 15 bp, Homo sapiens
aattattcccagaag

SEQ ID NO: 14888 - DNA, 15 bp, Homo sapiens
caattattcccagaa

SEQ ID NO: 14889 - DNA, 15 bp, Homo sapiens
tcaattattcccaga

SEQ ID NO: 14890 - DNA, 15 bp, Homo sapiens
gtcaattattcccag

SEQ ID NO: 14891 - DNA, 15 bp, Homo sapiens
tgtcaattattccca

SEQ ID NO: 14892 - DNA, 15 bp, Homo sapiens
ctgtcaattattccc

SEQ ID NO: 14893 - DNA, 15 bp, Homo sapiens
tctgtcaattattcc

SEQ ID NO: 14894 - DNA, 15 bp, Homo sapiens
atctgtcaattattc

SEQ ID NO: 14895 - DNA, 15 bp, Homo sapiens
tatctgtcaattatt

SEQ ID NO: 14896 - DNA, 15 bp, Homo sapiens
atatctgtcaattat

SEQ ID NO: 14897 - DNA, 15 bp, Homo sapiens
tatatctgtcaatta

SEQ ID NO: 14898 - DNA, 15 bp, Homo sapiens
ctatatctgtcaatt

SEQ ID NO: 14899 - DNA, 15 bp, Homo sapiens
cctatatctgtcaat

SEQ ID NO: 14900 - DNA, 15 bp, Homo sapiens
acctatatctgtcaa

SEQ ID NO: 14901 - DNA, 15 bp, Homo sapiens
cacctatatctgtca

SEQ ID NO: 14902 - DNA, 15 bp, Homo sapiens
gcacctatatctgtc

SEQ ID NO: 14903 - DNA, 15 bp, Homo sapiens
tgcacctatatctgt

SEQ ID NO: 14904 - DNA, 15 bp, Homo sapiens
atgcacctatatctg

SEQ ID NO: 14905 - DNA, 15 bp, Homo sapiens
tatgcacctatatct

SEQ ID NO: 14906 - DNA, 15 bp, Homo sapiens
atatgcacctatatc

SEQ ID NO: 14907 - DNA, 15 bp, Homo sapiens
catatgcacctatat

SEQ ID NO: 14908 - DNA, 15 bp, Homo sapiens
acatatgcacctata

SEQ ID NO: 14909 - DNA, 15 bp, Homo sapiens
tacatatgcacctat

SEQ ID NO: 14910 - DNA, 15 bp, Homo sapiens
gtacatatgcaccta

SEQ ID NO: 14911 - DNA, 15 bp, Homo sapiens
tgtacatatgcacct

SEQ ID NO: 14912 - DNA, 15 bp, Homo sapiens
ttgtacatatgcacc

SEQ ID NO: 14913 - DNA, 15 bp, Homo sapiens
tttgtacatatgcac

SEQ ID NO: 14914 - DNA, 15 bp, Homo sapiens
attttgtacatatgc

SEQ ID NO: 14915 - DNA, 15 bp, Homo sapiens
cattttgtacatatg

SEQ ID NO: 14916 - DNA, 15 bp, Homo sapiens
tcattttgtacatat

SEQ ID NO: 14917 - DNA, 15 bp, Homo sapiens
atcattttgtacata

SEQ ID NO: 14918 - DNA, 15 bp, Homo sapiens
catcattttgtacat

SEQ ID NO: 14919 - DNA, 15 bp, Homo sapiens
ccatcattttgtaca

SEQ ID NO: 14920 - DNA, 15 bp, Homo sapiens
tccatcattttgtac

SEQ ID NO: 14921 - DNA, 15 bp, Homo sapiens
ttccatcattttgta

SEQ ID NO: 14922 - DNA, 15 bp, Homo sapiens
tttccatcattttgt

SEQ ID NO: 14923 - DNA, 15 bp, Homo sapiens
ctttccatcattttg

SEQ ID NO: 14924 - DNA, 15 bp, Homo sapiens
gctttccatcatttt

SEQ ID NO: 14925 - DNA, 15 bp, Homo sapiens
agctttccatcattt

SEQ ID NO: 14926 - DNA, 15 bp, Homo sapiens
gagctttccatcatt

SEQ ID NO: 14927 - DNA, 15 bp, Homo sapiens
agagctttccatcat

SEQ ID NO: 14928 - DNA, 15 bp, Homo sapiens
gagagctttccatca

SEQ ID NO: 14929 - DNA, 15 bp, Homo sapiens
agagagctttccatc

SEQ ID NO: 14930 - DNA, 15 bp, Homo sapiens
cagagagctttccat

SEQ ID NO: 14931 - DNA, 15 bp, Homo sapiens
ccagagagctttcca

SEQ ID NO: 14932 - DNA, 15 bp, Homo sapiens
accagagagctttcc

SEQ ID NO: 14933 - DNA, 15 bp, Homo sapiens
taccagagagctttc

SEQ ID NO: 14934 - DNA, 15 bp, Homo sapiens
ataccagagagcttt

SEQ ID NO: 14935 - DNA, 15 bp, Homo sapiens
tataccagagagctt

SEQ ID NO: 14936 - DNA, 15 bp, Homo sapiens
atataccagagagct

SEQ ID NO: 14937 - DNA, 15 bp, Homo sapiens
tatataccagagagc

SEQ ID NO: 14938 - DNA, 15 bp, Homo sapiens
atatataccagagag

SEQ ID NO: 14939 - DNA, 15 bp, Homo sapiens
aatatataccagaga

SEQ ID NO: 14940 - DNA, 15 bp, Homo sapiens
taatatataccagag

SEQ ID NO: 14941 - DNA, 15 bp, Homo sapiens
ctaatatataccaga

SEQ ID NO: 14942 - DNA, 15 bp, Homo sapiens
actaatatataccag

SEQ ID NO: 14943 - DNA, 15 bp, Homo sapiens
tactaatatatacca

SEQ ID NO: 14944 - DNA, 15 bp, Homo sapiens
ttactaatatatacc

SEQ ID NO: 14945 - DNA, 15 bp, Homo sapiens
cttactaatatatac

SEQ ID NO: 14946 - DNA, 15 bp, Homo sapiens
acttactaatatata

SEQ ID NO: 14947 - DNA, 15 bp, Homo sapiens
cacttactaatatat

SEQ ID NO: 14948 - DNA, 15 bp, Homo sapiens
tcacttactaatata

SEQ ID NO: 14949 - DNA, 15 bp, Homo sapiens
atcacttactaatat

SEQ ID NO: 14950 - DNA, 15 bp, Homo sapiens
tatcacttactaata

SEQ ID NO: 14951 - DNA, 15 bp, Homo sapiens
ttatcacttactaat

SEQ ID NO: 14952 - DNA, 15 bp, Homo sapiens
tttatcacttactaa

SEQ ID NO: 14953 - DNA, 15 bp, Homo sapiens
ttttatcacttacta

SEQ ID NO: 14954 - DNA, 15 bp, Homo sapiens
gttttatcacttact

SEQ ID NO: 14955 - DNA, 15 bp, Homo sapiens
tgttttatcacttac

SEQ ID NO: 14956 - DNA, 15 bp, Homo sapiens
ttgttttatcactta

SEQ ID NO: 14957 - DNA, 15 bp, Homo sapiens
cttgttttatcactt

SEQ ID NO: 14958 - DNA, 15 bp, Homo sapiens
ccttgttttatcact

SEQ ID NO: 14959 - DNA, 15 bp, Homo sapiens
accttgttttatcac

SEQ ID NO: 14960 - DNA, 15 bp, Homo sapiens
caccttgttttatca

SEQ ID NO: 14961 - DNA, 15 bp, Homo sapiens
acaccttgttttatc

SEQ ID NO: 14962 - DNA, 15 bp, Homo sapiens
tacaccttgttttat

SEQ ID NO: 14963 - DNA, 15 bp, Homo sapiens
ttacaccttgtttta

SEQ ID NO: 14964 - DNA, 15 bp, Homo sapiens
tttacaccttgtttt

SEQ ID NO: 14965 - DNA, 15 bp, Homo sapiens
ttttacaccttgttt

SEQ ID NO: 14966 - DNA, 15 bp, Homo sapiens
attttacaccttgtt

SEQ ID NO: 14967 - DNA, 15 bp, Homo sapiens
tattttacaccttgt

SEQ ID NO: 14968 - DNA, 15 bp, Homo sapiens
ctattttacaccttg

SEQ ID NO: 14969 - DNA, 15 bp, Homo sapiens
actattttacacctt

SEQ ID NO: 14970 - DNA, 15 bp, Homo sapiens
cactattttacacct

SEQ ID NO: 14971 - DNA, 15 bp, Homo sapiens
acactattttacacc

SEQ ID NO: 14972 - DNA, 15 bp, Homo sapiens
tacactattttacac

SEQ ID NO: 14973 - DNA, 15 bp, Homo sapiens
atacactattttaca

SEQ ID NO: 14974 - DNA, 15 bp, Homo sapiens
tatacactattttac

SEQ ID NO: 14975 - DNA, 15 bp, Homo sapiens
atatacactatttta

SEQ ID NO: 14976 - DNA, 15 bp, Homo sapiens
tatatacactatttt

SEQ ID NO: 14977 - DNA, 15 bp, Homo sapiens
atatatacactattt

SEQ ID NO: 14978 - DNA, 15 bp, Homo sapiens
catatatacactatt

SEQ ID NO: 14979 - DNA, 15 bp, Homo sapiens
ccatatatacactat

SEQ ID NO: 14980 - DNA, 15 bp, Homo sapiens
gccatatatacacta

SEQ ID NO: 14981 - DNA, 15 bp, Homo sapiens
agccatatatacact

SEQ ID NO: 14982 - DNA, 15 bp, Homo sapiens
tagccatatatacac

SEQ ID NO: 14983 - DNA, 15 bp, Homo sapiens
gtagccatatataca

SEQ ID NO: 14984 - DNA, 15 bp, Homo sapiens
agtagccatatatac

SEQ ID NO: 14985 - DNA, 15 bp, Homo sapiens
tagtagccatatata

SEQ ID NO: 14986 - DNA, 15 bp, Homo sapiens
gtagtagccatatat

SEQ ID NO: 14987 - DNA, 15 bp, Homo sapiens
ggtagtagccatata

SEQ ID NO: 14988 - DNA, 15 bp, Homo sapiens
aggtagtagccatat

SEQ ID NO: 14989 - DNA, 15 bp, Homo sapiens
aaggtagtagccata

SEQ ID NO: 14990 - DNA, 15 bp, Homo sapiens
aaaggtagtagccat

SEQ ID NO: 14991 - DNA, 15 bp, Homo sapiens
aaaaggtagtagcca

SEQ ID NO: 14992 - DNA, 15 bp, Homo sapiens
caaaaggtagtagcc

SEQ ID NO: 14993 - DNA, 15 bp, Homo sapiens
acaaaaggtagtagc

SEQ ID NO: 14994 - DNA, 15 bp, Homo sapiens
aacaaaaggtagtag

SEQ ID NO: 14995 - DNA, 15 bp, Homo sapiens
aaacaaaaggtagta

SEQ ID NO: 14996 - DNA, 15 bp, Homo sapiens
aaaacaaaaggtagt

SEQ ID NO: 14997 - DNA, 15 bp, Homo sapiens
taaaacaaaaggtag

SEQ ID NO: 14998 - DNA, 15 bp, Homo sapiens
ttaaaacaaaaggta

SEQ ID NO: 14999 - DNA, 15 bp, Homo sapiens
tttaaaacaaaaggt

SEQ ID NO: 15000 - DNA, 15 bp, Homo sapiens
ttttaaaacaaaagg

SEQ ID NO: 15001 - DNA, 15 bp, Homo sapiens
tttttaaaacaaaag

SEQ ID NO: 15002 - DNA, 15 bp, Homo sapiens
atttttaaaacaaaa

SEQ ID NO: 15003 - DNA, 15 bp, Homo sapiens
catttttaaaacaaa

SEQ ID NO: 15004 - DNA, 15 bp, Homo sapiens
ccatttttaaaacaa

SEQ ID NO: 15005 - DNA, 15 bp, Homo sapiens
cccatttttaaaaca

SEQ ID NO: 15006 - DNA, 15 bp, Homo sapiens
ccccatttttaaaac

SEQ ID NO: 15007 - DNA, 15 bp, Homo sapiens
cccccatttttaaaa

SEQ ID NO: 15008 - DNA, 15 bp, Homo sapiens
tcccccatttttaaa

SEQ ID NO: 15009 - DNA, 15 bp, Homo sapiens
ttcccccatttttaa

SEQ ID NO: 15010 - DNA, 15 bp, Homo sapiens
tttcccccattttta

SEQ ID NO: 15011 - DNA, 15 bp, Homo sapiens
ttttcccccattttt

SEQ ID NO: 15012 - DNA, 15 bp, Homo sapiens
attttcccccatttt

SEQ ID NO: 15013 - DNA, 15 bp, Homo sapiens
cattttcccccattt

SEQ ID NO: 15014 - DNA, 15 bp, Homo sapiens
ccattttcccccatt

SEQ ID NO: 15015 - DNA, 15 bp, Homo sapiens
accattttcccccat

SEQ ID NO: 15016 - DNA, 15 bp, Homo sapiens
caccattttccccca

SEQ ID NO: 15017 - DNA, 15 bp, Homo sapiens
ccaccattttccccc

SEQ ID NO: 15018 - DNA, 15 bp, Homo sapiens
tccaccattttcccc

SEQ ID NO: 15019 - DNA, 15 bp, Homo sapiens
ctccaccattttccc

SEQ ID NO: 15020 - DNA, 15 bp, Homo sapiens
gctccaccattttcc

SEQ ID NO: 15021 - DNA, 15 bp, Homo sapiens
agctccaccattttc

SEQ ID NO: 15022 - DNA, 15 bp, Homo sapiens
aagctccaccatttt

SEQ ID NO: 15023 - DNA, 15 bp, Homo sapiens
caagctccaccattt

SEQ ID NO: 15024 - DNA, 15 bp, Homo sapiens
gcaagctccaccatt

SEQ ID NO: 15025 - DNA, 15 bp, Homo sapiens
cgcaagctccaccat

SEQ ID NO: 15026 - DNA, 15 bp, Homo sapiens
ccgcaagctccacca

SEQ ID NO: 15027 - DNA, 15 bp, Homo sapiens
accgcaagctccacc

SEQ ID NO: 15028 - DNA, 15 bp, Homo sapiens
caccgcaagctccac

SEQ ID NO: 15029 - DNA, 15 bp, Homo sapiens
tcaccgcaagctcca

SEQ ID NO: 15030 - DNA, 15 bp, Homo sapiens
ctcaccgcaagctcc

SEQ ID NO: 15031 - DNA, 15 bp, Homo sapiens
gctcaccgcaagctc

SEQ ID NO: 15032 - DNA, 15 bp, Homo sapiens
ggctcaccgcaagct

SEQ ID NO: 15033 - DNA, 15 bp, Homo sapiens
cggctcaccgcaagc

SEQ ID NO: 15034 - DNA, 15 bp, Homo sapiens
tcggctcaccgcaag

SEQ ID NO: 15035 - DNA, 15 bp, Homo sapiens
ctcggctcaccgcaa

SEQ ID NO: 15036 - DNA, 15 bp, Homo sapiens
tctcggctcaccgca

SEQ ID NO: 15037 - DNA, 15 bp, Homo sapiens
atctcggctcaccgc

SEQ ID NO: 15038 - DNA, 15 bp, Homo sapiens
gatctcggctcaccg

SEQ ID NO: 15039 - DNA, 15 bp, Homo sapiens
cgatctcggctcacc

SEQ ID NO: 15040 - DNA, 15 bp, Homo sapiens
acgatctcggctcac

SEQ ID NO: 15041 - DNA, 15 bp, Homo sapiens
cacgatctcggctca

SEQ ID NO: 15042 - DNA, 15 bp, Homo sapiens
gcacgatctcggctc

SEQ ID NO: 15043 - DNA, 15 bp, Homo sapiens
ggcacgatctcggct

SEQ ID NO: 15044 - DNA, 15 bp, Homo sapiens
tggcacgatctcggc

SEQ ID NO: 15045 - DNA, 15 bp, Homo sapiens
gtggcacgatctcgg

SEQ ID NO: 15046 - DNA, 15 bp, Homo sapiens
agtggcacgatctcg

SEQ ID NO: 15047 - DNA, 15 bp, Homo sapiens
cagtggcacgatctc

SEQ ID NO: 15048 - DNA, 15 bp, Homo sapiens
gcagtggcacgatct

SEQ ID NO: 15049 - DNA, 15 bp, Homo sapiens
tgcagtggcacgatc

SEQ ID NO: 15050 - DNA, 15 bp, Homo sapiens
gtgcagtggcacgat

SEQ ID NO: 15051 - DNA, 15 bp, Homo sapiens
agtgcagtggcacga

SEQ ID NO: 15052 - DNA, 15 bp, Homo sapiens
gagtgcagtggcacg

SEQ ID NO: 15053 - DNA, 15 bp, Homo sapiens
gttttttttttgaga

SEQ ID NO: 15054 - DNA, 15 bp, Homo sapiens
tgttttttttttgag

SEQ ID NO: 15055 - DNA, 15 bp, Homo sapiens
ctgttttttttttga

SEQ ID NO: 15056 - DNA, 15 bp, Homo sapiens
cctgttttttttttg

SEQ ID NO: 15057 - DNA, 15 bp, Homo sapiens
ccctgtttttttttt

SEQ ID NO: 15058 - DNA, 15 bp, Homo sapiens
accctgttttttttt

SEQ ID NO: 15059 - DNA, 15 bp, Homo sapiens
caccctgtttttttt

SEQ ID NO: 15060 - DNA, 15 bp, Homo sapiens
ccaccctgttttttt

SEQ ID NO: 15061 - DNA, 15 bp, Homo sapiens
cccaccctgtttttt

SEQ ID NO: 15062 - DNA, 15 bp, Homo sapiens
ccccaccctgttttt

SEQ ID NO: 15063 - DNA, 15 bp, Homo sapiens
accccaccctgtttt

SEQ ID NO: 15064 - DNA, 15 bp, Homo sapiens
caccccaccctgttt

SEQ ID NO: 15065 - DNA, 15 bp, Homo sapiens
ccaccccaccctgtt

SEQ ID NO: 15066 - DNA, 15 bp, Homo sapiens
cccaccccaccctgt

SEQ ID NO: 15067 - DNA, 15 bp, Homo sapiens
ccccaccccaccctg

SEQ ID NO: 15068 - DNA, 15 bp, Homo sapiens
cccccaccccaccct

SEQ ID NO: 15069 - DNA, 15 bp, Homo sapiens
ccccccaccccaccc

SEQ ID NO: 15070 - DNA, 15 bp, Homo sapiens
cccccccaccccacc

SEQ ID NO: 15071 - DNA, 15 bp, Homo sapiens
tcccccccaccccac

SEQ ID NO: 15072 - DNA, 15 bp, Homo sapiens
ttcccccccacccca

SEQ ID NO: 15073 - DNA, 15 bp, Homo sapiens
tttcccccccacccc

SEQ ID NO: 15074 - DNA, 15 bp, Homo sapiens
atttcccccccaccc

SEQ ID NO: 15075 - DNA, 15 bp, Homo sapiens
tatttcccccccacc

SEQ ID NO: 15076 - DNA, 15 bp, Homo sapiens
ttatttcccccccac

SEQ ID NO: 15077 - DNA, 15 bp, Homo sapiens
attatttccccccca

SEQ ID NO: 15078 - DNA, 15 bp, Homo sapiens
tattatttccccccc

SEQ ID NO: 15079 - DNA, 15 bp, Homo sapiens
ctattatttcccccc

SEQ ID NO: 15080 - DNA, 15 bp, Homo sapiens
actattatttccccc

SEQ ID NO: 15081 - DNA, 15 bp, Homo sapiens
tactattatttcccc

SEQ ID NO: 15082 - DNA, 15 bp, Homo sapiens
gtactattatttccc

SEQ ID NO: 15083 - DNA, 15 bp, Homo sapiens
tgtactattatttcc

SEQ ID NO: 15084 - DNA, 15 bp, Homo sapiens
atgtactattatttc

SEQ ID NO: 15085 - DNA, 15 bp, Homo sapiens
tatgtactattattt

SEQ ID NO: 15086 - DNA, 15 bp, Homo sapiens
gtatgtactattatt

SEQ ID NO: 15087 - DNA, 15 bp, Homo sapiens
agtatgtactattat

SEQ ID NO: 15088 - DNA, 15 bp, Homo sapiens
gagtatgtactatta

SEQ ID NO: 15089 - DNA, 15 bp, Homo sapiens
tgagtatgtactatt

SEQ ID NO: 15090 - DNA, 15 bp, Homo sapiens
atgagtatgtactat

SEQ ID NO: 15091 - DNA, 15 bp, Homo sapiens
tatgagtatgtacta

SEQ ID NO: 15092 - DNA, 15 bp, Homo sapiens
atatgagtatgtact

SEQ ID NO: 15093 - DNA, 15 bp, Homo sapiens
aatatgagtatgtac

SEQ ID NO: 15094 - DNA, 15 bp, Homo sapiens
aaatatgagtatgta

SEQ ID NO: 15095 - DNA, 15 bp, Homo sapiens
taaatatgagtatgt

SEQ ID NO: 15096 - DNA, 15 bp, Homo sapiens
gtaaatatgagtatg

SEQ ID NO: 15097 - DNA, 15 bp, Homo sapiens
ggtaaatatgagtat

SEQ ID NO: 15098 - DNA, 15 bp, Homo sapiens
aggtaaatatgagta

SEQ ID NO: 15099 - DNA, 15 bp, Homo sapiens
caggtaaatatgagt

SEQ ID NO: 15100 - DNA, 15 bp, Homo sapiens
acaggtaaatatgag

SEQ ID NO: 15101 - DNA, 15 bp, Homo sapiens
tacaggtaaatatga

SEQ ID NO: 15102 - DNA, 15 bp, Homo sapiens
atacaggtaaatatg

SEQ ID NO: 15103 - DNA, 15 bp, Homo sapiens
gatacaggtaaatat

SEQ ID NO: 15104 - DNA, 15 bp, Homo sapiens
agatacaggtaaata

SEQ ID NO: 15105 - DNA, 15 bp, Homo sapiens
tagatacaggtaaat

SEQ ID NO: 15106 - DNA, 15 bp, Homo sapiens
atagatacaggtaaa

SEQ ID NO: 15107 - DNA, 15 bp, Homo sapiens
tatagatacaggtaa

SEQ ID NO: 15108 - DNA, 15 bp, Homo sapiens
atatagatacaggta

SEQ ID NO: 15109 - DNA, 15 bp, Homo sapiens
tatatagatacaggt

SEQ ID NO: 15110 - DNA, 15 bp, Homo sapiens
ttatatagatacagg

SEQ ID NO: 15111 - DNA, 15 bp, Homo sapiens
tttatatagatacag

SEQ ID NO: 15112 - DNA, 15 bp, Homo sapiens
ttttatatagataca

SEQ ID NO: 15113 - DNA, 15 bp, Homo sapiens
gttttatatagatac

SEQ ID NO: 15114 - DNA, 15 bp, Homo sapiens
tgttttatatagata

SEQ ID NO: 15115 - DNA, 15 bp, Homo sapiens
gtgttttatatagat

SEQ ID NO: 15116 - DNA, 15 bp, Homo sapiens
tgtgttttatataga

SEQ ID NO: 15117 - DNA, 15 bp, Homo sapiens
gtgtgttttatatag

SEQ ID NO: 15118 - DNA, 15 bp, Homo sapiens
agtgtgttttatata

SEQ ID NO: 15119 - DNA, 15 bp, Homo sapiens
tagtgtgttttatat

SEQ ID NO: 15120 - DNA, 15 bp, Homo sapiens
atagtgtgttttata

SEQ ID NO: 15121 - DNA, 15 bp, Homo sapiens
gatagtgtgttttat

SEQ ID NO: 15122 - DNA, 15 bp, Homo sapiens
tgatagtgtgtttta

SEQ ID NO: 15123 - DNA, 15 bp, Homo sapiens
ttgatagtgtgtttt

SEQ ID NO: 15124 - DNA, 15 bp, Homo sapiens
cttgatagtgtgttt

SEQ ID NO: 15125 - DNA, 15 bp, Homo sapiens
ccttgatagtgtgtt

SEQ ID NO: 15126 - DNA, 15 bp, Homo sapiens
tccttgatagtgtgt

SEQ ID NO: 15127 - DNA, 15 bp, Homo sapiens
atccttgatagtgtg

SEQ ID NO: 15128 - DNA, 15 bp, Homo sapiens
aatccttgatagtgt

SEQ ID NO: 15129 - DNA, 15 bp, Homo sapiens
gaatccttgatagtg

SEQ ID NO: 15130 - DNA, 15 bp, Homo sapiens
tgaatccttgatagt

SEQ ID NO: 15131 - DNA, 15 bp, Homo sapiens
gtgaatccttgatag

SEQ ID NO: 15132 - DNA, 15 bp, Homo sapiens
tgtgaatccttgata

SEQ ID NO: 15133 - DNA, 15 bp, Homo sapiens
ttgtgaatccttgat

SEQ ID NO: 15134 - DNA, 15 bp, Homo sapiens
cttgtgaatccttga

SEQ ID NO: 15135 - DNA, 15 bp, Homo sapiens
tcttgtgaatccttg

SEQ ID NO: 15136 - DNA, 15 bp, Homo sapiens
ttcttgtgaatcctt

SEQ ID NO: 15137 - DNA, 15 bp, Homo sapiens
tttcttgtgaatcct

SEQ ID NO: 15138 - DNA, 15 bp, Homo sapiens
gtttcttgtgaatcc

SEQ ID NO: 15139 - DNA, 15 bp, Homo sapiens
agtttcttgtgaatc

SEQ ID NO: 15140 - DNA, 15 bp, Homo sapiens
tagtttcttgtgaat

SEQ ID NO: 15141 - DNA, 15 bp, Homo sapiens
ttagtttcttgtgaa

SEQ ID NO: 15142 - DNA, 15 bp, Homo sapiens
attagtttcttgtga

SEQ ID NO: 15143 - DNA, 15 bp, Homo sapiens
tattagtttcttgtg

SEQ ID NO: 15144 - DNA, 15 bp, Homo sapiens
gtattagtttcttgt

SEQ ID NO: 15145 - DNA, 15 bp, Homo sapiens
tgtattagtttcttg

SEQ ID NO: 15146 - DNA, 15 bp, Homo sapiens
ttgtattagtttctt

SEQ ID NO: 15147 - DNA, 15 bp, Homo sapiens
tttgtattagtttct

SEQ ID NO: 15148 - DNA, 15 bp, Homo sapiens
atttgtattagtttc

SEQ ID NO: 15149 - DNA, 15 bp, Homo sapiens
catttgtattagttt

SEQ ID NO: 15150 - DNA, 15 bp, Homo sapiens
tcatttgtattagtt

SEQ ID NO: 15151 - DNA, 15 bp, Homo sapiens
atcatttgtattagt

SEQ ID NO: 15152 - DNA, 15 bp, Homo sapiens
gatcatttgtattag

SEQ ID NO: 15153 - DNA, 15 bp, Homo sapiens
tgatcatttgtatta

SEQ ID NO: 15154 - DNA, 15 bp, Homo sapiens
gtgatcatttgtatt

SEQ ID NO: 15155 - DNA, 15 bp, Homo sapiens
ggtgatcatttgtat

SEQ ID NO: 15156 - DNA, 15 bp, Homo sapiens
aggtgatcatttgta

SEQ ID NO: 15157 - DNA, 15 bp, Homo sapiens
aaggtgatcatttgt

SEQ ID NO: 15158 - DNA, 15 bp, Homo sapiens
taaggtgatcatttg

SEQ ID NO: 15159 - DNA, 15 bp, Homo sapiens
ataaggtgatcattt

SEQ ID NO: 15160 - DNA, 15 bp, Homo sapiens
tataaggtgatcatt

SEQ ID NO: 15161 - DNA, 15 bp, Homo sapiens
ctataaggtgatcat

SEQ ID NO: 15162 - DNA, 15 bp, Homo sapiens
tctataaggtgatca

SEQ ID NO: 15163 - DNA, 15 bp, Homo sapiens
atctataaggtgatc

SEQ ID NO: 15164 - DNA, 15 bp, Homo sapiens
catctataaggtgat

SEQ ID NO: 15165 - DNA, 15 bp, Homo sapiens
ccatctataaggtga

SEQ ID NO: 15166 - DNA, 15 bp, Homo sapiens
accatctataaggtg

SEQ ID NO: 15167 - DNA, 15 bp, Homo sapiens
taccatctataaggt

SEQ ID NO: 15168 - DNA, 15 bp, Homo sapiens
ataccatctataagg

SEQ ID NO: 15169 - DNA, 15 bp, Homo sapiens
cataccatctataag

SEQ ID NO: 15170 - DNA, 15 bp, Homo sapiens
acataccatctataa

SEQ ID NO: 15171 - DNA, 15 bp, Homo sapiens
tacataccatctata

SEQ ID NO: 15172 - DNA, 15 bp, Homo sapiens
atacataccatctat

SEQ ID NO: 15173 - DNA, 15 bp, Homo sapiens
aatacataccatcta

SEQ ID NO: 15174 - DNA, 15 bp, Homo sapiens
caatacataccatct

SEQ ID NO: 15175 - DNA, 15 bp, Homo sapiens
ccaatacataccatc

SEQ ID NO: 15176 - DNA, 15 bp, Homo sapiens
cccaatacataccat

SEQ ID NO: 15177 - DNA, 15 bp, Homo sapiens
ccccaatacatacca

SEQ ID NO: 15178 - DNA, 15 bp, Homo sapiens
cccccaatacatacc

SEQ ID NO: 15179 - DNA, 15 bp, Homo sapiens
tcccccaatacatac

SEQ ID NO: 15180 - DNA, 15 bp, Homo sapiens
atcccccaatacata

SEQ ID NO: 15181 - DNA, 15 bp, Homo sapiens
tatcccccaatacat

SEQ ID NO: 15182 - DNA, 15 bp, Homo sapiens
gtatcccccaataca

SEQ ID NO: 15183 - DNA, 15 bp, Homo sapiens
agtatcccccaatac

SEQ ID NO: 15184 - DNA, 15 bp, Homo sapiens
cagtatcccccaata

SEQ ID NO: 15185 - DNA, 15 bp, Homo sapiens
tcagtatcccccaat

SEQ ID NO: 15186 - DNA, 15 bp, Homo sapiens
ctcagtatcccccaa

SEQ ID NO: 15187 - DNA, 15 bp, Homo sapiens
cctcagtatccccca

SEQ ID NO: 15188 - DNA, 15 bp, Homo sapiens
acctcagtatccccc

SEQ ID NO: 15189 - DNA, 15 bp, Homo sapiens
cacctcagtatcccc

SEQ ID NO: 15190 - DNA, 15 bp, Homo sapiens
tcacctcagtatccc

SEQ ID NO: 15191 - DNA, 15 bp, Homo sapiens
ctcacctcagtatcc

SEQ ID NO: 15192 - DNA, 15 bp, Homo sapiens
gctcacctcagtatc

SEQ ID NO: 15193 - DNA, 15 bp, Homo sapiens
tgctcacctcagtat

SEQ ID NO: 15194 - DNA, 15 bp, Homo sapiens
ctgctcacctcagta

SEQ ID NO: 15195 - DNA, 15 bp, Homo sapiens
cctgctcacctcagt

SEQ ID NO: 15196 - DNA, 15 bp, Homo sapiens
ccctgctcacctcag

SEQ ID NO: 15197 - DNA, 15 bp, Homo sapiens
accctgctcacctca

SEQ ID NO: 15198 - DNA, 15 bp, Homo sapiens
taccctgctcacctc

SEQ ID NO: 15199 - DNA, 15 bp, Homo sapiens
ataccctgctcacct

SEQ ID NO: 15200 - DNA, 15 bp, Homo sapiens
tataccctgctcacc

SEQ ID NO: 15201 - DNA, 15 bp, Homo sapiens
ttataccctgctcac

SEQ ID NO: 15202 - DNA, 15 bp, Homo sapiens
cttataccctgctca

SEQ ID NO: 15203 - DNA, 15 bp, Homo sapiens
acttataccctgctc

SEQ ID NO: 15204 - DNA, 15 bp, Homo sapiens
cacttataccctgct

SEQ ID NO: 15205 - DNA, 15 bp, Homo sapiens
ccacttataccctgc

SEQ ID NO: 15206 - DNA, 15 bp, Homo sapiens
cccacttataccctg

SEQ ID NO: 15207 - DNA, 15 bp, Homo sapiens
ccccacttataccct

SEQ ID NO: 15208 - DNA, 15 bp, Homo sapiens
gccccacttataccc

SEQ ID NO: 15209 - DNA, 15 bp, Homo sapiens
tgccccacttatacc

SEQ ID NO: 15210 - DNA, 15 bp, Homo sapiens
ttgccccacttatac

SEQ ID NO: 15211 - DNA, 15 bp, Homo sapiens
cttgccccacttata

SEQ ID NO: 15212 - DNA, 15 bp, Homo sapiens
tcttgccccacttat

SEQ ID NO: 15213 - DNA, 15 bp, Homo sapiens
gtcttgccccactta

SEQ ID NO: 15214 - DNA, 15 bp, Homo sapiens
agtcttgccccactt

SEQ ID NO: 15215 - DNA, 15 bp, Homo sapiens
aagtcttgccccact

SEQ ID NO: 15216 - DNA, 15 bp, Homo sapiens
aaagtcttgccccac

SEQ ID NO: 15217 - DNA, 15 bp, Homo sapiens
aaaagtcttgcccca

SEQ ID NO: 15218 - DNA, 15 bp, Homo sapiens
gaaaagtcttgcccc

SEQ ID NO: 15219 - DNA, 15 bp, Homo sapiens
tgaaaagtcttgccc

SEQ ID NO: 15220 - DNA, 15 bp, Homo sapiens
ctgaaaagtcttgcc

SEQ ID NO: 15221 - DNA, 15 bp, Homo sapiens
actgaaaagtcttgc

SEQ ID NO: 15222 - DNA, 15 bp, Homo sapiens
cactgaaaagtcttg

SEQ ID NO: 15223 - DNA, 15 bp, Homo sapiens
acactgaaaagtctt

SEQ ID NO: 15224 - DNA, 15 bp, Homo sapiens
tacactgaaaagtct

SEQ ID NO: 15225 - DNA, 15 bp, Homo sapiens
ttacactgaaaagtc

SEQ ID NO: 15226 - DNA, 15 bp, Homo sapiens
tttacactgaaaagt

SEQ ID NO: 15227 - DNA, 15 bp, Homo sapiens
gtttacactgaaaag

SEQ ID NO: 15228 - DNA, 15 bp, Homo sapiens
agtttacactgaaaa

SEQ ID NO: 15229 - DNA, 15 bp, Homo sapiens
aagtttacactgaaa

SEQ ID NO: 15230 - DNA, 15 bp, Homo sapiens
gaagtttacactgaa

SEQ ID NO: 15231 - DNA, 15 bp, Homo sapiens
agaagtttacactga

SEQ ID NO: 15232 - DNA, 15 bp, Homo sapiens
aagaagtttacactg

SEQ ID NO: 15233 - DNA, 15 bp, Homo sapiens
aaagaagtttacact

SEQ ID NO: 15234 - DNA, 15 bp, Homo sapiens
aaaagaagtttacac

SEQ ID NO: 15235 - DNA, 15 bp, Homo sapiens
taaaagaagtttaca

SEQ ID NO: 15236 - DNA, 15 bp, Homo sapiens
ttaaaagaagtttac

SEQ ID NO: 15237 - DNA, 15 bp, Homo sapiens
tttaaaagaagttta

SEQ ID NO: 15238 - DNA, 15 bp, Homo sapiens
atttaaaagaagttt

SEQ ID NO: 15239 - DNA, 15 bp, Homo sapiens
aatttaaaagaagtt

SEQ ID NO: 15240 - DNA, 15 bp, Homo sapiens
aaatttaaaagaagt

SEQ ID NO: 15241 - DNA, 15 bp, Homo sapiens
aaaatttaaaagaag

SEQ ID NO: 15242 - DNA, 15 bp, Homo sapiens
taaaatttaaaagaa

SEQ ID NO: 15243 - DNA, 15 bp, Homo sapiens
ataaaatttaaaaga

SEQ ID NO: 15244 - DNA, 15 bp, Homo sapiens
aataaaatttaaaag

SEQ ID NO: 15245 - DNA, 15 bp, Homo sapiens
aaataaaatttaaaa

SEQ ID NO: 15246 - DNA, 15 bp, Homo sapiens
aaaataaaatttaaa

SEQ ID NO: 15247 - DNA, 15 bp, Homo sapiens
caaaataaaatttaa

SEQ ID NO: 15248 - DNA, 15 bp, Homo sapiens
tcaaaataaaattta

SEQ ID NO: 15249 - DNA, 15 bp, Homo sapiens
atcaaaataaaattt

SEQ ID NO: 15250 - DNA, 15 bp, Homo sapiens
aatcaaaataaaatt

SEQ ID NO: 15251 - DNA, 15 bp, Homo sapiens
aaatcaaaataaaat

SEQ ID NO: 15252 - DNA, 15 bp, Homo sapiens
aaaatcaaaataaaa

SEQ ID NO: 15253 - DNA, 15 bp, Homo sapiens
aaaaatcaaaataaa

SEQ ID NO: 15254 - DNA, 15 bp, Homo sapiens
caaaaatcaaaataa

SEQ ID NO: 15255 - DNA, 15 bp, Homo sapiens
tcaaaaatcaaaata

SEQ ID NO: 15256 - DNA, 15 bp, Homo sapiens
ttcaaaaatcaaaat

SEQ ID NO: 15257 - DNA, 15 bp, Homo sapiens
attcaaaaatcaaaa

SEQ ID NO: 15258 - DNA, 15 bp, Homo sapiens
tattcaaaaatcaaa

SEQ ID NO: 15259 - DNA, 15 bp, Homo sapiens
ttattcaaaaatcaa

SEQ ID NO: 15260 - DNA, 15 bp, Homo sapiens
cattattcaaaaatc

SEQ ID NO: 15261 - DNA, 15 bp, Homo sapiens
acattattcaaaaat

SEQ ID NO: 15262 - DNA, 15 bp, Homo sapiens
tacattattcaaaaa

SEQ ID NO: 15263 - DNA, 15 bp, Homo sapiens
ttacattattcaaaa

SEQ ID NO: 15264 - DNA, 15 bp, Homo sapiens
tttacattattcaaa

SEQ ID NO: 15265 - DNA, 15 bp, Homo sapiens
atttacattattcaa

SEQ ID NO: 15266 - DNA, 15 bp, Homo sapiens
aatttacattattca

SEQ ID NO: 15267 - DNA, 15 bp, Homo sapiens
taatttacattattc

SEQ ID NO: 15268 - DNA, 15 bp, Homo sapiens
ttaatttacattatt

SEQ ID NO: 15269 - DNA, 15 bp, Homo sapiens
gttaatttacattat

SEQ ID NO: 15270 - DNA, 15 bp, Homo sapiens
agttaatttacatta

SEQ ID NO: 15271 - DNA, 15 bp, Homo sapiens
cagttaatttacatt

SEQ ID NO: 15272 - DNA, 15 bp, Homo sapiens
acagttaatttacat

SEQ ID NO: 15273 - DNA, 15 bp, Homo sapiens
gacagttaatttaca

SEQ ID NO: 15274 - DNA, 15 bp, Homo sapiens
tgacagttaatttac

SEQ ID NO: 15275 - DNA, 15 bp, Homo sapiens
ttgacagttaattta

SEQ ID NO: 15276 - DNA, 15 bp, Homo sapiens
tttgacagttaattt

SEQ ID NO: 15277 - DNA, 15 bp, Homo sapiens
atttgacagttaatt

SEQ ID NO: 15278 - DNA, 15 bp, Homo sapiens
tatttgacagttaat

SEQ ID NO: 15279 - DNA, 15 bp, Homo sapiens
ttatttgacagttaa

SEQ ID NO: 15280 - DNA, 15 bp, Homo sapiens
attatttgacagtta

SEQ ID NO: 15281 - DNA, 15 bp, Homo sapiens
aattatttgacagtt

SEQ ID NO: 15282 - DNA, 15 bp, Homo sapiens
taattatttgacagt

SEQ ID NO: 15283 - DNA, 15 bp, Homo sapiens
ttaattatttgacag

SEQ ID NO: 15284 - DNA, 15 bp, Homo sapiens
tttaattatttgaca

SEQ ID NO: 15285 - DNA, 15 bp, Homo sapiens
atttaattatttgac

SEQ ID NO: 15286 - DNA, 15 bp, Homo sapiens
aatttaattatttga

SEQ ID NO: 15287 - DNA, 15 bp, Homo sapiens
taatttaattatttg

SEQ ID NO: 15288 - DNA, 15 bp, Homo sapiens
ttaatttaattattt

SEQ ID NO: 15289 - DNA, 15 bp, Homo sapiens
tttaatttaattatt

SEQ ID NO: 15290 - DNA, 15 bp, Homo sapiens
ttttaatttaattat

SEQ ID NO: 15291 - DNA, 15 bp, Homo sapiens
tttttaatttaatta

SEQ ID NO: 15292 - DNA, 15 bp, Homo sapiens
atttttaatttaatt

SEQ ID NO: 15293 - DNA, 15 bp, Homo sapiens
tatttttaatttaat

SEQ ID NO: 15294 - DNA, 15 bp, Homo sapiens
ttatttttaatttaa

SEQ ID NO: 15295 - DNA, 15 bp, Homo sapiens
gttatttttaattta

SEQ ID NO: 15296 - DNA, 15 bp, Homo sapiens
ggttatttttaattt

SEQ ID NO: 15297 - DNA, 15 bp, Homo sapiens
tggttatttttaatt

SEQ ID NO: 15298 - DNA, 15 bp, Homo sapiens
ttggttatttttaat

SEQ ID NO: 15299 - DNA, 15 bp, Homo sapiens
attggttatttttaa

SEQ ID NO: 15300 - DNA, 15 bp, Homo sapiens
aattggttattttta

SEQ ID NO: 15301 - DNA, 15 bp, Homo sapiens
aaattggttattttt

SEQ ID NO: 15302 - DNA, 15 bp, Homo sapiens
taaattggttatttt

SEQ ID NO: 15303 - DNA, 15 bp, Homo sapiens
ataaattggttattt

SEQ ID NO: 15304 - DNA, 15 bp, Homo sapiens
aataaattggttatt

SEQ ID NO: 15305 - DNA, 15 bp, Homo sapiens
taataaattggttat

SEQ ID NO: 15306 - DNA, 15 bp, Homo sapiens
ttaataaattggtta

SEQ ID NO: 15307 - DNA, 15 bp, Homo sapiens
gttaataaattggtt

SEQ ID NO: 15308 - DNA, 15 bp, Homo sapiens
tgttaataaattggt

SEQ ID NO: 15309 - DNA, 15 bp, Homo sapiens
ttgttaataaattgg

SEQ ID NO: 15310 - DNA, 15 bp, Homo sapiens
tttgttaataaattg

SEQ ID NO: 15311 - DNA, 15 bp, Homo sapiens
ttttgttaataaatt

SEQ ID NO: 15312 - DNA, 15 bp, Homo sapiens
gttttgttaataaat

SEQ ID NO: 15313 - DNA, 15 bp, Homo sapiens
tgttttgttaataaa

SEQ ID NO: 15314 - DNA, 15 bp, Homo sapiens
atgttttgttaataa

SEQ ID NO: 15315 - DNA, 15 bp, Homo sapiens
aatgttttgttaata

SEQ ID NO: 15316 - DNA, 15 bp, Homo sapiens
aaatgttttgttaat

SEQ ID NO: 15317 - DNA, 15 bp, Homo sapiens
taaatgttttgttaa

SEQ ID NO: 15318 - DNA, 15 bp, Homo sapiens
ttaaatgttttgtta

SEQ ID NO: 15319 - DNA, 15 bp, Homo sapiens
attaaatgttttgtt

SEQ ID NO: 15320 - DNA, 15 bp, Homo sapiens
gattaaatgttttgt

SEQ ID NO: 15321 - DNA, 15 bp, Homo sapiens
agattaaatgttttg

SEQ ID NO: 15322 - DNA, 15 bp, Homo sapiens
tagattaaatgtttt

SEQ ID NO: 15323 - DNA, 15 bp, Homo sapiens
ctagattaaatgttt

SEQ ID NO: 15324 - DNA, 15 bp, Homo sapiens
actagattaaatgtt

SEQ ID NO: 15325 - DNA, 15 bp, Homo sapiens
cactagattaaatgt

SEQ ID NO: 15326 - DNA, 15 bp, Homo sapiens
ccactagattaaatg

SEQ ID NO: 15327 - DNA, 15 bp, Homo sapiens
gccactagattaaat

SEQ ID NO: 15328 - DNA, 15 bp, Homo sapiens
agccactagattaaa

SEQ ID NO: 15329 - DNA, 15 bp, Homo sapiens
aagccactagattaa

SEQ ID NO: 15330 - DNA, 15 bp, Homo sapiens
aaagccactagatta

SEQ ID NO: 15331 - DNA, 15 bp, Homo sapiens
taaagccactagatt

SEQ ID NO: 15332 - DNA, 15 bp, Homo sapiens
gtaaagccactagat

SEQ ID NO: 15333 - DNA, 15 bp, Homo sapiens
agtaaagccactaga

SEQ ID NO: 15334 - DNA, 15 bp, Homo sapiens
aagtaaagccactag

SEQ ID NO: 15335 - DNA, 15 bp, Homo sapiens
aaagtaaagccacta

SEQ ID NO: 15336 - DNA, 15 bp, Homo sapiens
aaaagtaaagccact

SEQ ID NO: 15337 - DNA, 15 bp, Homo sapiens
caaaagtaaagccac

SEQ ID NO: 15338 - DNA, 15 bp, Homo sapiens
tcaaaagtaaagcca

SEQ ID NO: 15339 - DNA, 15 bp, Homo sapiens
gtcaaaagtaaagcc

SEQ ID NO: 15340 - DNA, 15 bp, Homo sapiens
tgtcaaaagtaaagc

SEQ ID NO: 15341 - DNA, 15 bp, Homo sapiens
gtgtcaaaagtaaag

SEQ ID NO: 15342 - DNA, 15 bp, Homo sapiens
tgtgtcaaaagtaaa

SEQ ID NO: 15343 - DNA, 15 bp, Homo sapiens
ttgtgtcaaaagtaa

SEQ ID NO: 15344 - DNA, 15 bp, Homo sapiens
cttgtgtcaaaagta

SEQ ID NO: 15345 - DNA, 15 bp, Homo sapiens
tcttgtgtcaaaagt

SEQ ID NO: 15346 - DNA, 15 bp, Homo sapiens
gtcttgtgtcaaaag

SEQ ID NO: 15347 - DNA, 15 bp, Homo sapiens
tgtcttgtgtcaaaa

SEQ ID NO: 15348 - DNA, 15 bp, Homo sapiens
ttgtcttgtgtcaaa

SEQ ID NO: 15349 - DNA, 15 bp, Homo sapiens
attgtcttgtgtcaa

SEQ ID NO: 15350 - DNA, 15 bp, Homo sapiens
gattgtcttgtgtca

SEQ ID NO: 15351 - DNA, 15 bp, Homo sapiens
agattgtcttgtgtc

SEQ ID NO: 15352 - DNA, 15 bp, Homo sapiens
gagattgtcttgtgt

SEQ ID NO: 15353 - DNA, 15 bp, Homo sapiens
ggagattgtcttgtg

SEQ ID NO: 15354 - DNA, 15 bp, Homo sapiens
tggagattgtcttgt

SEQ ID NO: 15355 - DNA, 15 bp, Homo sapiens
ttggagattgtcttg

SEQ ID NO: 15356 - DNA, 15 bp, Homo sapiens
tttggagattgtctt

SEQ ID NO: 15357 - DNA, 15 bp, Homo sapiens
atttggagattgtct

SEQ ID NO: 15358 - DNA, 15 bp, Homo sapiens
gatttggagattgtc

SEQ ID NO: 15359 - DNA, 15 bp, Homo sapiens
agatttggagattgt

SEQ ID NO: 15360 - DNA, 15 bp, Homo sapiens
gagatttggagattg

SEQ ID NO: 15361 - DNA, 15 bp, Homo sapiens
ggagatttggagatt

SEQ ID NO: 15362 - DNA, 15 bp, Homo sapiens
tggagatttggagat

SEQ ID NO: 15363 - DNA, 15 bp, Homo sapiens
gtggagatttggaga

SEQ ID NO: 15364 - DNA, 15 bp, Homo sapiens
ggtggagatttggag

SEQ ID NO: 15365 - DNA, 15 bp, Homo sapiens
tggtggagatttgga

SEQ ID NO: 15366 - DNA, 15 bp, Homo sapiens
ttggtggagatttgg

SEQ ID NO: 15367 - DNA, 15 bp, Homo sapiens
attggtggagatttg

SEQ ID NO: 15368 - DNA, 15 bp, Homo sapiens
gattggtggagattt

SEQ ID NO: 15369 - DNA, 15 bp, Homo sapiens
tgattggtggagatt

SEQ ID NO: 15370 - DNA, 15 bp, Homo sapiens
gtgattggtggagat

SEQ ID NO: 15371 - DNA, 15 bp, Homo sapiens
ggtgattggtggaga

SEQ ID NO: 15372 - DNA, 15 bp, Homo sapiens
tggtgattggtggag

SEQ ID NO: 15373 - DNA, 15 bp, Homo sapiens
ttggtgattggtgga

SEQ ID NO: 15374 - DNA, 15 bp, Homo sapiens
tttggtgattggtgg

SEQ ID NO: 15375 - DNA, 15 bp, Homo sapiens
ttttggtgattggtg

SEQ ID NO: 15376 - DNA, 15 bp, Homo sapiens
tttttggtgattggt

SEQ ID NO: 15377 - DNA, 15 bp, Homo sapiens
gtttttggtgattgg

SEQ ID NO: 15378 - DNA, 15 bp, Homo sapiens
tgtttttggtgattg

SEQ ID NO: 15379 - DNA, 15 bp, Homo sapiens
ctgtttttggtgatt

SEQ ID NO: 15380 - DNA, 15 bp, Homo sapiens
tctgtttttggtgat

SEQ ID NO: 15381 - DNA, 15 bp, Homo sapiens
ctctgtttttggtga

SEQ ID NO: 15382 - DNA, 15 bp, Homo sapiens
tctctgtttttggtg

SEQ ID NO: 15383 - DNA, 15 bp, Homo sapiens
atctctgtttttggt

SEQ ID NO: 15384 - DNA, 15 bp, Homo sapiens
aatctctgtttttgg

SEQ ID NO: 15385 - DNA, 15 bp, Homo sapiens
aaatctctgtttttg

SEQ ID NO: 15386 - DNA, 15 bp, Homo sapiens
taaatctctgttttt

SEQ ID NO: 15387 - DNA, 15 bp, Homo sapiens
gtaaatctctgtttt

SEQ ID NO: 15388 - DNA, 15 bp, Homo sapiens
tgtaaatctctgttt

SEQ ID NO: 15389 - DNA, 15 bp, Homo sapiens
gtgtaaatctctgtt

SEQ ID NO: 15390 - DNA, 15 bp, Homo sapiens
ggtgtaaatctctgt

SEQ ID NO: 15391 - DNA, 15 bp, Homo sapiens
tggtgtaaatctctg

SEQ ID NO: 15392 - DNA, 15 bp, Homo sapiens
ctggtgtaaatctct

SEQ ID NO: 15393 - DNA, 15 bp, Homo sapiens
actggtgtaaatctc

SEQ ID NO: 15394 - DNA, 15 bp, Homo sapiens
aactggtgtaaatct

SEQ ID NO: 15395 - DNA, 15 bp, Homo sapiens
gaactggtgtaaatc

SEQ ID NO: 15396 - DNA, 15 bp, Homo sapiens
ggaactggtgtaaat

SEQ ID NO: 15397 - DNA, 15 bp, Homo sapiens
aggaactggtgtaaa

SEQ ID NO: 15398 - DNA, 15 bp, Homo sapiens
aaggaactggtgtaa

SEQ ID NO: 15399 - DNA, 15 bp, Homo sapiens
aaaggaactggtgta

SEQ ID NO: 15400 - DNA, 15 bp, Homo sapiens
caaaggaactggtgt

SEQ ID NO: 15401 - DNA, 15 bp, Homo sapiens
gcaaaggaactggtg

SEQ ID NO: 15402 - DNA, 15 bp, Homo sapiens
agcaaaggaactggt

SEQ ID NO: 15403 - DNA, 15 bp, Homo sapiens
aagcaaaggaactgg

SEQ ID NO: 15404 - DNA, 15 bp, Homo sapiens
caagcaaaggaactg

SEQ ID NO: 15405 - DNA, 15 bp, Homo sapiens
acaagcaaaggaact

SEQ ID NO: 15406 - DNA, 15 bp, Homo sapiens
aacaagcaaaggaac

SEQ ID NO: 15407 - DNA, 15 bp, Homo sapiens
aaacaagcaaaggaa

SEQ ID NO: 15408 - DNA, 15 bp, Homo sapiens
aaaacaagcaaagga

SEQ ID NO: 15409 - DNA, 15 bp, Homo sapiens
aaaaacaagcaaagg

SEQ ID NO: 15410 - DNA, 15 bp, Homo sapiens
gaaaaacaagcaaag

SEQ ID NO: 15411 - DNA, 15 bp, Homo sapiens
ggaaaaacaagcaaa

SEQ ID NO: 15412 - DNA, 15 bp, Homo sapiens
aggaaaaacaagcaa

SEQ ID NO: 15413 - DNA, 15 bp, Homo sapiens
caggaaaaacaagca

SEQ ID NO: 15414 - DNA, 15 bp, Homo sapiens
ccaggaaaaacaagc

SEQ ID NO: 15415 - DNA, 15 bp, Homo sapiens
accaggaaaaacaag

SEQ ID NO: 15416 - DNA, 15 bp, Homo sapiens
taccaggaaaaacaa

SEQ ID NO: 15417 - DNA, 15 bp, Homo sapiens
ttaccaggaaaaaca

SEQ ID NO: 15418 - DNA, 15 bp, Homo sapiens
attaccaggaaaaac

SEQ ID NO: 15419 - DNA, 15 bp, Homo sapiens
cattaccaggaaaaa

SEQ ID NO: 15420 - DNA, 15 bp, Homo sapiens
tcattaccaggaaaa

SEQ ID NO: 15421 - DNA, 15 bp, Homo sapiens
gtcattaccaggaaa

SEQ ID NO: 15422 - DNA, 15 bp, Homo sapiens
agtcattaccaggaa

SEQ ID NO: 15423 - DNA, 15 bp, Homo sapiens
tagtcattaccagga

SEQ ID NO: 15424 - DNA, 15 bp, Homo sapiens
gtagtcattaccagg

SEQ ID NO: 15425 - DNA, 15 bp, Homo sapiens
tgtagtcattaccag

SEQ ID NO: 15426 - DNA, 15 bp, Homo sapiens
ttgtagtcattacca

SEQ ID NO: 15427 - DNA, 15 bp, Homo sapiens
attgtagtcattacc

SEQ ID NO: 15428 - DNA, 15 bp, Homo sapiens
aattgtagtcattac

SEQ ID NO: 15429 - DNA, 15 bp, Homo sapiens
taattgtagtcatta

SEQ ID NO: 15430 - DNA, 15 bp, Homo sapiens
ttaattgtagtcatt

SEQ ID NO: 15431 - DNA, 15 bp, Homo sapiens
cttaattgtagtcat

SEQ ID NO: 15432 - DNA, 15 bp, Homo sapiens
tcttaattgtagtca

SEQ ID NO: 15433 - DNA, 15 bp, Homo sapiens
ttcttaattgtagtc

SEQ ID NO: 15434 - DNA, 15 bp, Homo sapiens
cttcttaattgtagt

SEQ ID NO: 15435 - DNA, 15 bp, Homo sapiens
acttcttaattgtag

SEQ ID NO: 15436 - DNA, 15 bp, Homo sapiens
gacttcttaattgta

SEQ ID NO: 15437 - DNA, 15 bp, Homo sapiens
ggacttcttaattgt

SEQ ID NO: 15438 - DNA, 15 bp, Homo sapiens
aggacttcttaattg

SEQ ID NO: 15439 - DNA, 15 bp, Homo sapiens
caggacttcttaatt

SEQ ID NO: 15440 - DNA, 15 bp, Homo sapiens
acaggacttcttaat

SEQ ID NO: 15441 - DNA, 15 bp, Homo sapiens
cacaggacttcttaa

SEQ ID NO: 15442 - DNA, 15 bp, Homo sapiens
ccacaggacttctta

SEQ ID NO: 15443 - DNA, 15 bp, Homo sapiens
cccacaggacttctt

SEQ ID NO: 15444 - DNA, 15 bp, Homo sapiens
acccacaggacttct

SEQ ID NO: 15445 - DNA, 15 bp, Homo sapiens
cacccacaggacttc

SEQ ID NO: 15446 - DNA, 15 bp, Homo sapiens
gcacccacaggactt

SEQ ID NO: 15447 - DNA, 15 bp, Homo sapiens
ggcacccacaggact

SEQ ID NO: 15448 - DNA, 15 bp, Homo sapiens
tggcacccacaggac

SEQ ID NO: 15449 - DNA, 15 bp, Homo sapiens
atggcacccacagga

SEQ ID NO: 15450 - DNA, 15 bp, Homo sapiens
gatggcacccacagg

SEQ ID NO: 15451 - DNA, 15 bp, Homo sapiens
agatggcacccacag

SEQ ID NO: 15452 - DNA, 15 bp, Homo sapiens
gagatggcacccaca

SEQ ID NO: 15453 - DNA, 15 bp, Homo sapiens
tgagatggcacccac

SEQ ID NO: 15454 - DNA, 15 bp, Homo sapiens
ctgagatggcaccca

SEQ ID NO: 15455 - DNA, 15 bp, Homo sapiens
actgagatggcaccc

SEQ ID NO: 15456 - DNA, 15 bp, Homo sapiens
aactgagatggcacc

SEQ ID NO: 15457 - DNA, 15 bp, Homo sapiens
aaactgagatggcac

SEQ ID NO: 15458 - DNA, 15 bp, Homo sapiens
aaaactgagatggca

SEQ ID NO: 15459 - DNA, 15 bp, Homo sapiens
caaaactgagatggc

SEQ ID NO: 15460 - DNA, 15 bp, Homo sapiens
ccaaaactgagatgg

SEQ ID NO: 15461 - DNA, 15 bp, Homo sapiens
tccaaaactgagatg

SEQ ID NO: 15462 - DNA, 15 bp, Homo sapiens
ctccaaaactgagat

SEQ ID NO: 15463 - DNA, 15 bp, Homo sapiens
tctccaaaactgaga

SEQ ID NO: 15464 - DNA, 15 bp, Homo sapiens
atctccaaaactgag

SEQ ID NO: 15465 - DNA, 15 bp, Homo sapiens
tatctccaaaactga

SEQ ID NO: 15466 - DNA, 15 bp, Homo sapiens
atatctccaaaactg

SEQ ID NO: 15467 - DNA, 15 bp, Homo sapiens
aatatctccaaaact

SEQ ID NO: 15468 - DNA, 15 bp, Homo sapiens
aaatatctccaaaac

SEQ ID NO: 15469 - DNA, 15 bp, Homo sapiens
gaaatatctccaaaa

SEQ ID NO: 15470 - DNA, 15 bp, Homo sapiens
ggaaatatctccaaa

SEQ ID NO: 15471 - DNA, 15 bp, Homo sapiens
gggaaatatctccaa

SEQ ID NO: 15472 - DNA, 15 bp, Homo sapiens
agggaaatatctcca

SEQ ID NO: 15473 - DNA, 15 bp, Homo sapiens
tagggaaatatctcc

SEQ ID NO: 15474 - DNA, 15 bp, Homo sapiens
ctagggaaatatctc

SEQ ID NO: 15475 - DNA, 15 bp, Homo sapiens
tctagggaaatatct

SEQ ID NO: 15476 - DNA, 15 bp, Homo sapiens
ttctagggaaatatc

SEQ ID NO: 15477 - DNA, 15 bp, Homo sapiens
cttctagggaaatat

SEQ ID NO: 15478 - DNA, 15 bp, Homo sapiens
tcttctagggaaata

SEQ ID NO: 15479 - DNA, 15 bp, Homo sapiens
ttcttctagggaaat

SEQ ID NO: 15480 - DNA, 15 bp, Homo sapiens
tttcttctagggaaa

SEQ ID NO: 15481 - DNA, 15 bp, Homo sapiens
gtttcttctagggaa

SEQ ID NO: 15482 - DNA, 15 bp, Homo sapiens
agtttcttctaggga

SEQ ID NO: 15483 - DNA, 15 bp, Homo sapiens
cagtttcttctaggg

SEQ ID NO: 15484 - DNA, 15 bp, Homo sapiens
tcagtttcttctagg

SEQ ID NO: 15485 - DNA, 15 bp, Homo sapiens
atcagtttcttctag

SEQ ID NO: 15486 - DNA, 15 bp, Homo sapiens
aatcagtttcttcta

SEQ ID NO: 15487 - DNA, 15 bp, Homo sapiens
gaatcagtttcttct

SEQ ID NO: 15488 - DNA, 15 bp, Homo sapiens
tgaatcagtttcttc

SEQ ID NO: 15489 - DNA, 15 bp, Homo sapiens
ttgaatcagtttctt

SEQ ID NO: 15490 - DNA, 15 bp, Homo sapiens
cttgaatcagtttct

SEQ ID NO: 15491 - DNA, 15 bp, Homo sapiens
ccttgaatcagtttc

SEQ ID NO: 15492 - DNA, 15 bp, Homo sapiens
accttgaatcagttt

SEQ ID NO: 15493 - DNA, 15 bp, Homo sapiens
caccttgaatcagtt

SEQ ID NO: 15494 - DNA, 15 bp, Homo sapiens
ccaccttgaatcagt

SEQ ID NO: 15495 - DNA, 15 bp, Homo sapiens
cccaccttgaatcag

SEQ ID NO: 15496 - DNA, 15 bp, Homo sapiens
tcccaccttgaatca

SEQ ID NO: 15497 - DNA, 15 bp, Homo sapiens
gtcccaccttgaatc

SEQ ID NO: 15498 - DNA, 15 bp, Homo sapiens
tgtcccaccttgaat

SEQ ID NO: 15499 - DNA, 15 bp, Homo sapiens
ttgtcccaccttgaa

SEQ ID NO: 15500 - DNA, 15 bp, Homo sapiens
attgtcccaccttga

SEQ ID NO: 15501 - DNA, 15 bp, Homo sapiens
aattgtcccaccttg

SEQ ID NO: 15502 - DNA, 15 bp, Homo sapiens
caattgtcccacctt

SEQ ID NO: 15503 - DNA, 15 bp, Homo sapiens
ccaattgtcccacct

SEQ ID NO: 15504 - DNA, 15 bp, Homo sapiens
cccaattgtcccacc

SEQ ID NO: 15505 - DNA, 15 bp, Homo sapiens
acccaattgtcccac

SEQ ID NO: 15506 - DNA, 15 bp, Homo sapiens
tacccaattgtccca

SEQ ID NO: 15507 - DNA, 15 bp, Homo sapiens
atacccaattgtccc

SEQ ID NO: 15508 - DNA, 15 bp, Homo sapiens
tatacccaattgtcc

SEQ ID NO: 15509 - DNA, 15 bp, Homo sapiens
ctatacccaattgtc

SEQ ID NO: 15510 - DNA, 15 bp, Homo sapiens
tctatacccaattgt

SEQ ID NO: 15511 - DNA, 15 bp, Homo sapiens
ctctatacccaattg

SEQ ID NO: 15512 - DNA, 15 bp, Homo sapiens
tctctatacccaatt

SEQ ID NO: 15513 - DNA, 15 bp, Homo sapiens
ttctctatacccaat

SEQ ID NO: 15514 - DNA, 15 bp, Homo sapiens
attctctatacccaa

SEQ ID NO: 15515 - DNA, 15 bp, Homo sapiens
tattctctataccca

SEQ ID NO: 15516 - DNA, 15 bp, Homo sapiens
ctattctctataccc

SEQ ID NO: 15517 - DNA, 15 bp, Homo sapiens
actattctctatacc

SEQ ID NO: 15518 - DNA, 15 bp, Homo sapiens
gactattctctatac

SEQ ID NO: 15519 - DNA, 15 bp, Homo sapiens
ggactattctctata

SEQ ID NO: 15520 - DNA, 15 bp, Homo sapiens
gggactattctctat

SEQ ID NO: 15521 - DNA, 15 bp, Homo sapiens
agggactattctcta

SEQ ID NO: 15522 - DNA, 15 bp, Homo sapiens
cagggactattctct

SEQ ID NO: 15523 - DNA, 15 bp, Homo sapiens
ccagggactattctc

SEQ ID NO: 15524 - DNA, 15 bp, Homo sapiens
cccagggactattct

SEQ ID NO: 15525 - DNA, 15 bp, Homo sapiens
tcccagggactattc

SEQ ID NO: 15526 - DNA, 15 bp, Homo sapiens
gtcccagggactatt

SEQ ID NO: 15527 - DNA, 15 bp, Homo sapiens
ggtcccagggactat

SEQ ID NO: 15528 - DNA, 15 bp, Homo sapiens
cggtcccagggacta

SEQ ID NO: 15529 - DNA, 15 bp, Homo sapiens
ccggtcccagggact

SEQ ID NO: 15530 - DNA, 15 bp, Homo sapiens
cccggtcccagggac

SEQ ID NO: 15531 - DNA, 15 bp, Homo sapiens
ccccggtcccaggga

SEQ ID NO: 15532 - DNA, 15 bp, Homo sapiens
cccccggtcccaggg

SEQ ID NO: 15533 - DNA, 15 bp, Homo sapiens
gcccccggtcccagg

SEQ ID NO: 15534 - DNA, 15 bp, Homo sapiens
agcccccggtcccag

SEQ ID NO: 15535 - DNA, 15 bp, Homo sapiens
cagcccccggtccca

SEQ ID NO: 15536 - DNA, 15 bp, Homo sapiens
tcagcccccggtccc

SEQ ID NO: 15537 - DNA, 15 bp, Homo sapiens
ttcagcccccggtcc

SEQ ID NO: 15538 - DNA, 15 bp, Homo sapiens
cttcagcccccggtc

SEQ ID NO: 15539 - DNA, 15 bp, Homo sapiens
acttcagcccccggt

SEQ ID NO: 15540 - DNA, 15 bp, Homo sapiens
gacttcagcccccgg

SEQ ID NO: 15541 - DNA, 15 bp, Homo sapiens
ggacttcagcccccg

SEQ ID NO: 15542 - DNA, 15 bp, Homo sapiens
aggacttcagccccc

SEQ ID NO: 15543 - DNA, 15 bp, Homo sapiens
caggacttcagcccc

SEQ ID NO: 15544 - DNA, 15 bp, Homo sapiens
tcaggacttcagccc

SEQ ID NO: 15545 - DNA, 15 bp, Homo sapiens
ttcaggacttcagcc

SEQ ID NO: 15546 - DNA, 15 bp, Homo sapiens
attcaggacttcagc

SEQ ID NO: 15547 - DNA, 15 bp, Homo sapiens
aattcaggacttcag

SEQ ID NO: 15548 - DNA, 15 bp, Homo sapiens
gaattcaggacttca

SEQ ID NO: 15549 - DNA, 15 bp, Homo sapiens
agaattcaggacttc

SEQ ID NO: 15550 - DNA, 15 bp, Homo sapiens
cagaattcaggactt

SEQ ID NO: 15551 - DNA, 15 bp, Homo sapiens
ccagaattcaggact

SEQ ID NO: 15552 - DNA, 15 bp, Homo sapiens
accagaattcaggac

SEQ ID NO: 15553 - DNA, 15 bp, Homo sapiens
gaccagaattcagga

SEQ ID NO: 15554 - DNA, 15 bp, Homo sapiens
ggaccagaattcagg

SEQ ID NO: 15555 - DNA, 15 bp, Homo sapiens
aggaccagaattcag

SEQ ID NO: 15556 - DNA, 15 bp, Homo sapiens
caggaccagaattca

SEQ ID NO: 15557 - DNA, 15 bp, Homo sapiens
gcaggaccagaattc

SEQ ID NO: 15558 - DNA, 15 bp, Homo sapiens
ggcaggaccagaatt

SEQ ID NO: 15559 - DNA, 15 bp, Homo sapiens
aggcaggaccagaat

SEQ ID NO: 15560 - DNA, 15 bp, Homo sapiens
taggcaggaccagaa

SEQ ID NO: 15561 - DNA, 15 bp, Homo sapiens
ttaggcaggaccaga

SEQ ID NO: 15562 - DNA, 15 bp, Homo sapiens
gttaggcaggaccag

SEQ ID NO: 15563 - DNA, 15 bp, Homo sapiens
agttaggcaggacca

SEQ ID NO: 15564 - DNA, 15 bp, Homo sapiens
gagttaggcaggacc

SEQ ID NO: 15565 - DNA, 15 bp, Homo sapiens
ggagttaggcaggac

SEQ ID NO: 15566 - DNA, 15 bp, Homo sapiens
gggagttaggcagga

SEQ ID NO: 15567 - DNA, 15 bp, Homo sapiens
tgggagttaggcagg

SEQ ID NO: 15568 - DNA, 15 bp, Homo sapiens
gtgggagttaggcag

SEQ ID NO: 15569 - DNA, 15 bp, Homo sapiens
agtgggagttaggca

SEQ ID NO: 15570 - DNA, 15 bp, Homo sapiens
aagtgggagttaggc

SEQ ID NO: 15571 - DNA, 15 bp, Homo sapiens
aaagtgggagttagg

SEQ ID NO: 15572 - DNA, 15 bp, Homo sapiens
gaaagtgggagttag

SEQ ID NO: 15573 - DNA, 15 bp, Homo sapiens
agaaagtgggagtta

SEQ ID NO: 15574 - DNA, 15 bp, Homo sapiens
tagaaagtgggagtt

SEQ ID NO: 15575 - DNA, 15 bp, Homo sapiens
atagaaagtgggagt

SEQ ID NO: 15576 - DNA, 15 bp, Homo sapiens
aatagaaagtgggag

SEQ ID NO: 15577 - DNA, 15 bp, Homo sapiens
taatagaaagtggga

SEQ ID NO: 15578 - DNA, 15 bp, Homo sapiens
ttaatagaaagtggg

SEQ ID NO: 15579 - DNA, 15 bp, Homo sapiens
cttaatagaaagtgg

SEQ ID NO: 15580 - DNA, 15 bp, Homo sapiens
gcttaatagaaagtg

SEQ ID NO: 15581 - DNA, 15 bp, Homo sapiens
agcttaatagaaagt

SEQ ID NO: 15582 - DNA, 15 bp, Homo sapiens
cagcttaatagaaag

SEQ ID NO: 15583 - DNA, 15 bp, Homo sapiens
tcagcttaatagaaa

SEQ ID NO: 15584 - DNA, 15 bp, Homo sapiens
gtcagcttaatagaa

SEQ ID NO: 15585 - DNA, 15 bp, Homo sapiens
ggtcagcttaataga

SEQ ID NO: 15586 - DNA, 15 bp, Homo sapiens
gggtcagcttaatag

SEQ ID NO: 15587 - DNA, 15 bp, Homo sapiens
agggtcagcttaata

SEQ ID NO: 15588 - DNA, 15 bp, Homo sapiens
cagggtcagcttaat

SEQ ID NO: 15589 - DNA, 15 bp, Homo sapiens
acagggtcagcttaa

SEQ ID NO: 15590 - DNA, 15 bp, Homo sapiens
cacagggtcagctta

SEQ ID NO: 15591 - DNA, 15 bp, Homo sapiens
tcacagggtcagctt

SEQ ID NO: 15592 - DNA, 15 bp, Homo sapiens
ttcacagggtcagct

SEQ ID NO: 15593 - DNA, 15 bp, Homo sapiens
tttcacagggtcagc

SEQ ID NO: 15594 - DNA, 15 bp, Homo sapiens
gtttcacagggtcag

SEQ ID NO: 15595 - DNA, 15 bp, Homo sapiens
cgtttcacagggtca

SEQ ID NO: 15596 - DNA, 15 bp, Homo sapiens
ccgtttcacagggtc

SEQ ID NO: 15597 - DNA, 15 bp, Homo sapiens
gccgtttcacagggt

SEQ ID NO: 15598 - DNA, 15 bp, Homo sapiens
agccgtttcacaggg

SEQ ID NO: 15599 - DNA, 15 bp, Homo sapiens
cagccgtttcacagg

SEQ ID NO: 15600 - DNA, 15 bp, Homo sapiens
tcagccgtttcacag

SEQ ID NO: 15601 - DNA, 15 bp, Homo sapiens
atcagccgtttcaca

SEQ ID NO: 15602 - DNA, 15 bp, Homo sapiens
tatcagccgtttcac

SEQ ID NO: 15603 - DNA, 15 bp, Homo sapiens
gtatcagccgtttca

SEQ ID NO: 15604 - DNA, 15 bp, Homo sapiens
tgtatcagccgtttc

SEQ ID NO: 15605 - DNA, 15 bp, Homo sapiens
atgtatcagccgttt

SEQ ID NO: 15606 - DNA, 15 bp, Homo sapiens
catgtatcagccgtt

SEQ ID NO: 15607 - DNA, 15 bp, Homo sapiens
tcatgtatcagccgt

SEQ ID NO: 15608 - DNA, 15 bp, Homo sapiens
gtcatgtatcagccg

SEQ ID NO: 15609 - DNA, 15 bp, Homo sapiens
ggtcatgtatcagcc

SEQ ID NO: 15610 - DNA, 15 bp, Homo sapiens
tggtcatgtatcagc

SEQ ID NO: 15611 - DNA, 15 bp, Homo sapiens
atggtcatgtatcag

SEQ ID NO: 15612 - DNA, 15 bp, Homo sapiens
aatggtcatgtatca

SEQ ID NO: 15613 - DNA, 15 bp, Homo sapiens
aaatggtcatgtatc

SEQ ID NO: 15614 - DNA, 15 bp, Homo sapiens
aaaatggtcatgtat

SEQ ID NO: 15615 - DNA, 15 bp, Homo sapiens
aaaaatggtcatgta

SEQ ID NO: 15616 - DNA, 15 bp, Homo sapiens
aaaaaatggtcatgt

SEQ ID NO: 15617 - DNA, 15 bp, Homo sapiens
taaaaaatggtcatg

SEQ ID NO: 15618 - DNA, 15 bp, Homo sapiens
gtaaaaaatggtcat

SEQ ID NO: 15619 - DNA, 15 bp, Homo sapiens
ggtaaaaaatggtca

SEQ ID NO: 15620 - DNA, 15 bp, Homo sapiens
tggtaaaaaatggtc

SEQ ID NO: 15621 - DNA, 15 bp, Homo sapiens
ttggtaaaaaatggt

SEQ ID NO: 15622 - DNA, 15 bp, Homo sapiens
gttggtaaaaaatgg

SEQ ID NO: 15623 - DNA, 15 bp, Homo sapiens
tgttggtaaaaaatg

SEQ ID NO: 15624 - DNA, 15 bp, Homo sapiens
ttgttggtaaaaaat

SEQ ID NO: 15625 - DNA, 15 bp, Homo sapiens
tttgttggtaaaaaa

SEQ ID NO: 15626 - DNA, 15 bp, Homo sapiens
atttgttggtaaaaa

SEQ ID NO: 15627 - DNA, 15 bp, Homo sapiens
aatttgttggtaaaa

SEQ ID NO: 15628 - DNA, 15 bp, Homo sapiens
taatttgttggtaaa

SEQ ID NO: 15629 - DNA, 15 bp, Homo sapiens
ctaatttgttggtaa

SEQ ID NO: 15630 - DNA, 15 bp, Homo sapiens
tctaatttgttggta

SEQ ID NO: 15631 - DNA, 15 bp, Homo sapiens
gtctaatttgttggt

SEQ ID NO: 15632 - DNA, 15 bp, Homo sapiens
tgtctaatttgttgg

SEQ ID NO: 15633 - DNA, 15 bp, Homo sapiens
ttgtctaatttgttg

SEQ ID NO: 15634 - DNA, 15 bp, Homo sapiens
tttgtctaatttgtt

SEQ ID NO: 15635 - DNA, 15 bp, Homo sapiens
atttgtctaatttgt

SEQ ID NO: 15636 - DNA, 15 bp, Homo sapiens
aatttgtctaatttg

SEQ ID NO: 15637 - DNA, 15 bp, Homo sapiens
gaatttgtctaattt

SEQ ID NO: 15638 - DNA, 15 bp, Homo sapiens
tgaatttgtctaatt

SEQ ID NO: 15639 - DNA, 15 bp, Homo sapiens
atgaatttgtctaat

SEQ ID NO: 15640 - DNA, 15 bp, Homo sapiens
catgaatttgtctaa

SEQ ID NO: 15641 - DNA, 15 bp, Homo sapiens
ccatgaatttgtcta

SEQ ID NO: 15642 - DNA, 15 bp, Homo sapiens
cccatgaatttgtct

SEQ ID NO: 15643 - DNA, 15 bp, Homo sapiens
acccatgaatttgtc

SEQ ID NO: 15644 - DNA, 15 bp, Homo sapiens
cacccatgaatttgt

SEQ ID NO: 15645 - DNA, 15 bp, Homo sapiens
tcacccatgaatttg

SEQ ID NO: 15646 - DNA, 15 bp, Homo sapiens
atcacccatgaattt

SEQ ID NO: 15647 - DNA, 15 bp, Homo sapiens
gatcacccatgaatt

SEQ ID NO: 15648 - DNA, 15 bp, Homo sapiens
tgatcacccatgaat

SEQ ID NO: 15649 - DNA, 15 bp, Homo sapiens
ttgatcacccatgaa

SEQ ID NO: 15650 - DNA, 15 bp, Homo sapiens
tttgatcacccatga

SEQ ID NO: 15651 - DNA, 15 bp, Homo sapiens
atttgatcacccatg

SEQ ID NO: 15652 - DNA, 15 bp, Homo sapiens
aatttgatcacccat

SEQ ID NO: 15653 - DNA, 15 bp, Homo sapiens
gaatttgatcaccca

SEQ ID NO: 15654 - DNA, 15 bp, Homo sapiens
tgaatttgatcaccc

SEQ ID NO: 15655 - DNA, 15 bp, Homo sapiens
ttgaatttgatcacc

SEQ ID NO: 15656 - DNA, 15 bp, Homo sapiens
tttgaatttgatcac

SEQ ID NO: 15657 - DNA, 15 bp, Homo sapiens
ttttgaatttgatca

SEQ ID NO: 15658 - DNA, 15 bp, Homo sapiens
tttttgaatttgatc

SEQ ID NO: 15659 - DNA, 15 bp, Homo sapiens
gtttttgaatttgat

SEQ ID NO: 15660 - DNA, 15 bp, Homo sapiens
ggtttttgaatttga

SEQ ID NO: 15661 - DNA, 15 bp, Homo sapiens
gggtttttgaatttg

SEQ ID NO: 15662 - DNA, 15 bp, Homo sapiens
agggtttttgaattt

SEQ ID NO: 15663 - DNA, 15 bp, Homo sapiens
cagggtttttgaatt

SEQ ID NO: 15664 - DNA, 15 bp, Homo sapiens
acagggtttttgaat

SEQ ID NO: 15665 - DNA, 15 bp, Homo sapiens
aacagggtttttgaa

SEQ ID NO: 15666 - DNA, 15 bp, Homo sapiens
caacagggtttttga

SEQ ID NO: 15667 - DNA, 15 bp, Homo sapiens
gcaacagggtttttg

SEQ ID NO: 15668 - DNA, 15 bp, Homo sapiens
ggcaacagggttttt

SEQ ID NO: 15669 - DNA, 15 bp, Homo sapiens
aggcaacagggtttt

SEQ ID NO: 15670 - DNA, 15 bp, Homo sapiens
aaggcaacagggttt

SEQ ID NO: 15671 - DNA, 15 bp, Homo sapiens
taaggcaacagggtt

SEQ ID NO: 15672 - DNA, 15 bp, Homo sapiens
gtaaggcaacagggt

SEQ ID NO: 15673 - DNA, 15 bp, Homo sapiens
ggtaaggcaacaggg

SEQ ID NO: 15674 - DNA, 15 bp, Homo sapiens
tggtaaggcaacagg

SEQ ID NO: 15675 - DNA, 15 bp, Homo sapiens
gtggtaaggcaacag

SEQ ID NO: 15676 - DNA, 15 bp, Homo sapiens
agtggtaaggcaaca

SEQ ID NO: 15677 - DNA, 15 bp, Homo sapiens
cagtggtaaggcaac

SEQ ID NO: 15678 - DNA, 15 bp, Homo sapiens
acagtggtaaggcaa

SEQ ID NO: 15679 - DNA, 15 bp, Homo sapiens
tacagtggtaaggca

SEQ ID NO: 15680 - DNA, 15 bp, Homo sapiens
ttacagtggtaaggc

SEQ ID NO: 15681 - DNA, 15 bp, Homo sapiens
attacagtggtaagg

SEQ ID NO: 15682 - DNA, 15 bp, Homo sapiens
tattacagtggtaag

SEQ ID NO: 15683 - DNA, 15 bp, Homo sapiens
atattacagtggtaa

SEQ ID NO: 15684 - DNA, 15 bp, Homo sapiens
catattacagtggta

SEQ ID NO: 15685 - DNA, 15 bp, Homo sapiens
tcatattacagtggt

SEQ ID NO: 15686 - DNA, 15 bp, Homo sapiens
atcatattacagtgg

SEQ ID NO: 15687 - DNA, 15 bp, Homo sapiens
catcatattacagtg

SEQ ID NO: 15688 - DNA, 15 bp, Homo sapiens
tcatcatattacagt

SEQ ID NO: 15689 - DNA, 15 bp, Homo sapiens
ctcatcatattacag

SEQ ID NO: 15690 - DNA, 15 bp, Homo sapiens
cctcatcatattaca

SEQ ID NO: 15691 - DNA, 15 bp, Homo sapiens
tcctcatcatattac

SEQ ID NO: 15692 - DNA, 15 bp, Homo sapiens
gtcctcatcatatta

SEQ ID NO: 15693 - DNA, 15 bp, Homo sapiens
tgtcctcatcatatt

SEQ ID NO: 15694 - DNA, 15 bp, Homo sapiens
gtgtcctcatcatat

SEQ ID NO: 15695 - DNA, 15 bp, Homo sapiens
cgtgtcctcatcata

SEQ ID NO: 15696 - DNA, 15 bp, Homo sapiens
acgtgtcctcatcat

SEQ ID NO: 15697 - DNA, 15 bp, Homo sapiens
tacgtgtcctcatca

SEQ ID NO: 15698 - DNA, 15 bp, Homo sapiens
atacgtgtcctcatc

SEQ ID NO: 15699 - DNA, 15 bp, Homo sapiens
tatacgtgtcctcat

SEQ ID NO: 15700 - DNA, 15 bp, Homo sapiens
gtatacgtgtcctca

SEQ ID NO: 15701 - DNA, 15 bp, Homo sapiens
tgtatacgtgtcctc

SEQ ID NO: 15702 - DNA, 15 bp, Homo sapiens
gtgtatacgtgtcct

SEQ ID NO: 15703 - DNA, 15 bp, Homo sapiens
tgtgtatacgtgtcc

SEQ ID NO: 15704 - DNA, 15 bp, Homo sapiens
gtgtgtatacgtgtc

SEQ ID NO: 15705 - DNA, 15 bp, Homo sapiens
ggtgtgtatacgtgt

SEQ ID NO: 15706 - DNA, 15 bp, Homo sapiens
gggtgtgtatacgtg

SEQ ID NO: 15707 - DNA, 15 bp, Homo sapiens
agggtgtgtatacgt

SEQ ID NO: 15708 - DNA, 15 bp, Homo sapiens
cagggtgtgtatacg

SEQ ID NO: 15709 - DNA, 15 bp, Homo sapiens
gcagggtgtgtatac

SEQ ID NO: 15710 - DNA, 15 bp, Homo sapiens
ggcagggtgtgtata

SEQ ID NO: 15711 - DNA, 15 bp, Homo sapiens
aggcagggtgtgtat

SEQ ID NO: 15712 - DNA, 15 bp, Homo sapiens
taggcagggtgtgta

SEQ ID NO: 15713 - DNA, 15 bp, Homo sapiens
ttaggcagggtgtgt

SEQ ID NO: 15714 - DNA, 15 bp, Homo sapiens
gttaggcagggtgtg

SEQ ID NO: 15715 - DNA, 15 bp, Homo sapiens
agttaggcagggtgt

SEQ ID NO: 15716 - DNA, 15 bp, Homo sapiens
gagttaggcagggtg

SEQ ID NO: 15717 - DNA, 15 bp, Homo sapiens
tgagttaggcagggt

SEQ ID NO: 15718 - DNA, 15 bp, Homo sapiens
gtgagttaggcaggg

SEQ ID NO: 15719 - DNA, 15 bp, Homo sapiens
tgtgagttaggcagg

SEQ ID NO: 15720 - DNA, 15 bp, Homo sapiens
ctgtgagttaggcag

SEQ ID NO: 15721 - DNA, 15 bp, Homo sapiens
gctgtgagttaggca

SEQ ID NO: 15722 - DNA, 15 bp, Homo sapiens
tgctgtgagttaggc

SEQ ID NO: 15723 - DNA, 15 bp, Homo sapiens
atgctgtgagttagg

SEQ ID NO: 15724 - DNA, 15 bp, Homo sapiens
gatgctgtgagttag

SEQ ID NO: 15725 - DNA, 15 bp, Homo sapiens
tgatgctgtgagtta

SEQ ID NO: 15726 - DNA, 15 bp, Homo sapiens
gtgatgctgtgagtt

SEQ ID NO: 15727 - DNA, 15 bp, Homo sapiens
tgtgatgctgtgagt

SEQ ID NO: 15728 - DNA, 15 bp, Homo sapiens
gtgtgatgctgtgag

SEQ ID NO: 15729 - DNA, 15 bp, Homo sapiens
ggtgtgatgctgtga

SEQ ID NO: 15730 - DNA, 15 bp, Homo sapiens
tggtgtgatgctgtg

SEQ ID NO: 15731 - DNA, 15 bp, Homo sapiens
ctggtgtgatgctgt

SEQ ID NO: 15732 - DNA, 15 bp, Homo sapiens
cctggtgtgatgctg

SEQ ID NO: 15733 - DNA, 15 bp, Homo sapiens
ccctggtgtgatgct

SEQ ID NO: 15734 - DNA, 15 bp, Homo sapiens
tccctggtgtgatgc

SEQ ID NO: 15735 - DNA, 15 bp, Homo sapiens
atccctggtgtgatg

SEQ ID NO: 15736 - DNA, 15 bp, Homo sapiens
aatccctggtgtgat

SEQ ID NO: 15737 - DNA, 15 bp, Homo sapiens
caatccctggtgtga

SEQ ID NO: 15738 - DNA, 15 bp, Homo sapiens
acaatccctggtgtg

SEQ ID NO: 15739 - DNA, 15 bp, Homo sapiens
gacaatccctggtgt

SEQ ID NO: 15740 - DNA, 15 bp, Homo sapiens
tgacaatccctggtg

SEQ ID NO: 15741 - DNA, 15 bp, Homo sapiens
ttgacaatccctggt

SEQ ID NO: 15742 - DNA, 15 bp, Homo sapiens
gttgacaatccctgg

SEQ ID NO: 15743 - DNA, 15 bp, Homo sapiens
tgttgacaatccctg

SEQ ID NO: 15744 - DNA, 15 bp, Homo sapiens
atgttgacaatccct

SEQ ID NO: 15745 - DNA, 15 bp, Homo sapiens
tatgttgacaatccc

SEQ ID NO: 15746 - DNA, 15 bp, Homo sapiens
atatgttgacaatcc

SEQ ID NO: 15747 - DNA, 15 bp, Homo sapiens
catatgttgacaatc

SEQ ID NO: 15748 - DNA, 15 bp, Homo sapiens
ccatatgttgacaat

SEQ ID NO: 15749 - DNA, 15 bp, Homo sapiens
cccatatgttgacaa

SEQ ID NO: 15750 - DNA, 15 bp, Homo sapiens
tcccatatgttgaca

SEQ ID NO: 15751 - DNA, 15 bp, Homo sapiens
ttcccatatgttgac

SEQ ID NO: 15752 - DNA, 15 bp, Homo sapiens
tttcccatatgttga

SEQ ID NO: 15753 - DNA, 15 bp, Homo sapiens
ctttcccatatgttg

SEQ ID NO: 15754 - DNA, 15 bp, Homo sapiens
tctttcccatatgtt

SEQ ID NO: 15755 - DNA, 15 bp, Homo sapiens
ctctttcccatatgt

SEQ ID NO: 15756 - DNA, 15 bp, Homo sapiens
gctctttcccatatg

SEQ ID NO: 15757 - DNA, 15 bp, Homo sapiens
agctctttcccatat

SEQ ID NO: 15758 - DNA, 15 bp, Homo sapiens
aagctctttcccata

SEQ ID NO: 15759 - DNA, 15 bp, Homo sapiens
aaagctctttcccat

SEQ ID NO: 15760 - DNA, 15 bp, Homo sapiens
caaagctctttccca

SEQ ID NO: 15761 - DNA, 15 bp, Homo sapiens
acaaagctctttccc

SEQ ID NO: 15762 - DNA, 15 bp, Homo sapiens
tacaaagctctttcc

SEQ ID NO: 15763 - DNA, 15 bp, Homo sapiens
gtacaaagctctttc

SEQ ID NO: 15764 - DNA, 15 bp, Homo sapiens
tgtacaaagctcttt

SEQ ID NO: 15765 - DNA, 15 bp, Homo sapiens
atgtacaaagctctt

SEQ ID NO: 15766 - DNA, 15 bp, Homo sapiens
aatgtacaaagctct

SEQ ID NO: 15767 - DNA, 15 bp, Homo sapiens
caatgtacaaagctc

SEQ ID NO: 15768 - DNA, 15 bp, Homo sapiens
acaatgtacaaagct

SEQ ID NO: 15769 - DNA, 15 bp, Homo sapiens
tacaatgtacaaagc

SEQ ID NO: 15770 - DNA, 15 bp, Homo sapiens
ttacaatgtacaaag

SEQ ID NO: 15771 - DNA, 15 bp, Homo sapiens
tttacaatgtacaaa

SEQ ID NO: 15772 - DNA, 15 bp, Homo sapiens
ctttacaatgtacaa

SEQ ID NO: 15773 - DNA, 15 bp, Homo sapiens
cctttacaatgtaca

SEQ ID NO: 15774 - DNA, 15 bp, Homo sapiens
acctttacaatgtac

SEQ ID NO: 15775 - DNA, 15 bp, Homo sapiens
gacctttacaatgta

SEQ ID NO: 15776 - DNA, 15 bp, Homo sapiens
tgacctttacaatgt

SEQ ID NO: 15777 - DNA, 15 bp, Homo sapiens
ttgacctttacaatg

SEQ ID NO: 15778 - DNA, 15 bp, Homo sapiens
gttgacctttacaat

SEQ ID NO: 15779 - DNA, 15 bp, Homo sapiens
ggttgacctttacaa

SEQ ID NO: 15780 - DNA, 15 bp, Homo sapiens
gggttgacctttaca

SEQ ID NO: 15781 - DNA, 15 bp, Homo sapiens
agggttgacctttac

SEQ ID NO: 15782 - DNA, 15 bp, Homo sapiens
tagggttgaccttta

SEQ ID NO: 15783 - DNA, 15 bp, Homo sapiens
gtagggttgaccttt

SEQ ID NO: 15784 - DNA, 15 bp, Homo sapiens
tgtagggttgacctt

SEQ ID NO: 15785 - DNA, 15 bp, Homo sapiens
ttgtagggttgacct

SEQ ID NO: 15786 - DNA, 15 bp, Homo sapiens
tttgtagggttgacc

SEQ ID NO: 15787 - DNA, 15 bp, Homo sapiens
gtttgtagggttgac

SEQ ID NO: 15788 - DNA, 15 bp, Homo sapiens
tgtttgtagggttga

SEQ ID NO: 15789 - DNA, 15 bp, Homo sapiens
ctgtttgtagggttg

SEQ ID NO: 15790 - DNA, 15 bp, Homo sapiens
gctgtttgtagggtt

SEQ ID NO: 15791 - DNA, 15 bp, Homo sapiens
tgctgtttgtagggt

SEQ ID NO: 15792 - DNA, 15 bp, Homo sapiens
ctgctgtttgtaggg

SEQ ID NO: 15793 - DNA, 15 bp, Homo sapiens
gctgctgtttgtagg

SEQ ID NO: 15794 - DNA, 15 bp, Homo sapiens
agctgctgtttgtag

SEQ ID NO: 15795 - DNA, 15 bp, Homo sapiens
cagctgctgtttgta

SEQ ID NO: 15796 - DNA, 15 bp, Homo sapiens
acagctgctgtttgt

SEQ ID NO: 15797 - DNA, 15 bp, Homo sapiens
cacagctgctgtttg

SEQ ID NO: 15798 - DNA, 15 bp, Homo sapiens
tcacagctgctgttt

SEQ ID NO: 15799 - DNA, 15 bp, Homo sapiens
ttcacagctgctgtt

SEQ ID NO: 15800 - DNA, 15 bp, Homo sapiens
tttcacagctgctgt

SEQ ID NO: 15801 - DNA, 15 bp, Homo sapiens
gtttcacagctgctg

SEQ ID NO: 15802 - DNA, 15 bp, Homo sapiens
tgtttcacagctgct

SEQ ID NO: 15803 - DNA, 15 bp, Homo sapiens
gtgtttcacagctgc

SEQ ID NO: 15804 - DNA, 15 bp, Homo sapiens
tgtgtttcacagctg

SEQ ID NO: 15805 - DNA, 15 bp, Homo sapiens
ttgtgtttcacagct

SEQ ID NO: 15806 - DNA, 15 bp, Homo sapiens
gttgtgtttcacagc

SEQ ID NO: 15807 - DNA, 15 bp, Homo sapiens
tgttgtgtttcacag

SEQ ID NO: 15808 - DNA, 15 bp, Homo sapiens
gtgttgtgtttcaca

SEQ ID NO: 15809 - DNA, 15 bp, Homo sapiens
tgtgttgtgtttcac

SEQ ID NO: 15810 - DNA, 15 bp, Homo sapiens
ttgtgttgtgtttca

SEQ ID NO: 15811 - DNA, 15 bp, Homo sapiens
gttgtgttgtgtttc

SEQ ID NO: 15812 - DNA, 15 bp, Homo sapiens
ggttgtgttgtgttt

SEQ ID NO: 15813 - DNA, 15 bp, Homo sapiens
gggttgtgttgtgtt

SEQ ID NO: 15814 - DNA, 15 bp, Homo sapiens
agggttgtgttgtgt

SEQ ID NO: 15815 - DNA, 15 bp, Homo sapiens
cagggttgtgttgtg

SEQ ID NO: 15816 - DNA, 15 bp, Homo sapiens
tcagggttgtgttgt

SEQ ID NO: 15817 - DNA, 15 bp, Homo sapiens
ctcagggttgtgttg

SEQ ID NO: 15818 - DNA, 15 bp, Homo sapiens
cctcagggttgtgtt

SEQ ID NO: 15819 - DNA, 15 bp, Homo sapiens
ccctcagggttgtgt

SEQ ID NO: 15820 - DNA, 15 bp, Homo sapiens
cccctcagggttgtg

SEQ ID NO: 15821 - DNA, 15 bp, Homo sapiens
ccccctcagggttgt

SEQ ID NO: 15822 - DNA, 15 bp, Homo sapiens
accccctcagggttg

SEQ ID NO: 15823 - DNA, 15 bp, Homo sapiens
caccccctcagggtt

SEQ ID NO: 15824 - DNA, 15 bp, Homo sapiens
ccaccccctcagggt

SEQ ID NO: 15825 - DNA, 15 bp, Homo sapiens
gccaccccctcaggg

SEQ ID NO: 15826 - DNA, 15 bp, Homo sapiens
ggccaccccctcagg

SEQ ID NO: 15827 - DNA, 15 bp, Homo sapiens
tggccaccccctcag

SEQ ID NO: 15828 - DNA, 15 bp, Homo sapiens
atggccaccccctca

SEQ ID NO: 15829 - DNA, 15 bp, Homo sapiens
catggccaccccctc

SEQ ID NO: 15830 - DNA, 15 bp, Homo sapiens
ccatggccaccccct

SEQ ID NO: 15831 - DNA, 15 bp, Homo sapiens
gccatggccaccccc

SEQ ID NO: 15832 - DNA, 15 bp, Homo sapiens
ggccatggccacccc

SEQ ID NO: 15833 - DNA, 15 bp, Homo sapiens
tggccatggccaccc

SEQ ID NO: 15834 - DNA, 15 bp, Homo sapiens
ttggccatggccacc

SEQ ID NO: 15835 - DNA, 15 bp, Homo sapiens
tttggccatggccac

SEQ ID NO: 15836 - DNA, 15 bp, Homo sapiens
gtttggccatggcca

SEQ ID NO: 15837 - DNA, 15 bp, Homo sapiens
tgtttggccatggcc

SEQ ID NO: 15838 - DNA, 15 bp, Homo sapiens
atgtttggccatggc

SEQ ID NO: 15839 - DNA, 15 bp, Homo sapiens
tatgtttggccatgg

SEQ ID NO: 15840 - DNA, 15 bp, Homo sapiens
ctatgtttggccatg

SEQ ID NO: 15841 - DNA, 15 bp, Homo sapiens
cctatgtttggccat

SEQ ID NO: 15842 - DNA, 15 bp, Homo sapiens
tcctatgtttggcca

SEQ ID NO: 15843 - DNA, 15 bp, Homo sapiens
ctcctatgtttggcc

SEQ ID NO: 15844 - DNA, 15 bp, Homo sapiens
cctcctatgtttggc

SEQ ID NO: 15845 - DNA, 15 bp, Homo sapiens
ccctcctatgtttgg

SEQ ID NO: 15846 - DNA, 15 bp, Homo sapiens
cccctcctatgtttg

SEQ ID NO: 15847 - DNA, 15 bp, Homo sapiens
tcccctcctatgttt

SEQ ID NO: 15848 - DNA, 15 bp, Homo sapiens
ttcccctcctatgtt

SEQ ID NO: 15849 - DNA, 15 bp, Homo sapiens
tttcccctcctatgt

SEQ ID NO: 15850 - DNA, 15 bp, Homo sapiens
ttttcccctcctatg

SEQ ID NO: 15851 - DNA, 15 bp, Homo sapiens
cttttcccctcctat

SEQ ID NO: 15852 - DNA, 15 bp, Homo sapiens
ccttttcccctccta

SEQ ID NO: 15853 - DNA, 15 bp, Homo sapiens
tccttttcccctcct

SEQ ID NO: 15854 - DNA, 15 bp, Homo sapiens
gtccttttcccctcc

SEQ ID NO: 15855 - DNA, 15 bp, Homo sapiens
ggtccttttcccctc

SEQ ID NO: 15856 - DNA, 15 bp, Homo sapiens
gggtccttttcccct

SEQ ID NO: 15857 - DNA, 15 bp, Homo sapiens
tgggtccttttcccc

SEQ ID NO: 15858 - DNA, 15 bp, Homo sapiens
ctgggtccttttccc

SEQ ID NO: 15859 - DNA, 15 bp, Homo sapiens
actgggtccttttcc

SEQ ID NO: 15860 - DNA, 15 bp, Homo sapiens
gactgggtccttttc

SEQ ID NO: 15861 - DNA, 15 bp, Homo sapiens
agactgggtcctttt

SEQ ID NO: 15862 - DNA, 15 bp, Homo sapiens
gagactgggtccttt

SEQ ID NO: 15863 - DNA, 15 bp, Homo sapiens
tgagactgggtcctt

SEQ ID NO: 15864 - DNA, 15 bp, Homo sapiens
ttgagactgggtcct

SEQ ID NO: 15865 - DNA, 15 bp, Homo sapiens
tttgagactgggtcc

SEQ ID NO: 15866 - DNA, 15 bp, Homo sapiens
ttttgagactgggtc

SEQ ID NO: 15867 - DNA, 15 bp, Homo sapiens
cttttgagactgggt

SEQ ID NO: 15868 - DNA, 15 bp, Homo sapiens
gcttttgagactggg

SEQ ID NO: 15869 - DNA, 15 bp, Homo sapiens
tgcttttgagactgg

SEQ ID NO: 15870 - DNA, 15 bp, Homo sapiens
atgcttttgagactg

SEQ ID NO: 15871 - DNA, 15 bp, Homo sapiens
gatgcttttgagact

SEQ ID NO: 15872 - DNA, 15 bp, Homo sapiens
agatgcttttgagac

SEQ ID NO: 15873 - DNA, 15 bp, Homo sapiens
cagatgcttttgaga

SEQ ID NO: 15874 - DNA, 15 bp, Homo sapiens
tcagatgcttttgag

SEQ ID NO: 15875 - DNA, 15 bp, Homo sapiens
ctcagatgcttttga

SEQ ID NO: 15876 - DNA, 15 bp, Homo sapiens
tctcagatgcttttg

SEQ ID NO: 15877 - DNA, 15 bp, Homo sapiens
atctcagatgctttt

SEQ ID NO: 15878 - DNA, 15 bp, Homo sapiens
tatctcagatgcttt

SEQ ID NO: 15879 - DNA, 15 bp, Homo sapiens
gtatctcagatgctt

SEQ ID NO: 15880 - DNA, 15 bp, Homo sapiens
agtatctcagatgct

SEQ ID NO: 15881 - DNA, 15 bp, Homo sapiens
cagtatctcagatgc

SEQ ID NO: 15882 - DNA, 15 bp, Homo sapiens
tcagtatctcagatg

SEQ ID NO: 15883 - DNA, 15 bp, Homo sapiens
ctcagtatctcagat

SEQ ID NO: 15884 - DNA, 15 bp, Homo sapiens
tctcagtatctcaga

SEQ ID NO: 15885 - DNA, 15 bp, Homo sapiens
atctcagtatctcag

SEQ ID NO: 15886 - DNA, 15 bp, Homo sapiens
tatctcagtatctca

SEQ ID NO: 15887 - DNA, 15 bp, Homo sapiens
ctatctcagtatctc

SEQ ID NO: 15888 - DNA, 15 bp, Homo sapiens
actatctcagtatct

SEQ ID NO: 15889 - DNA, 15 bp, Homo sapiens
cactatctcagtatc

SEQ ID NO: 15890 - DNA, 15 bp, Homo sapiens
gcactatctcagtat

SEQ ID NO: 15891 - DNA, 15 bp, Homo sapiens
tgcactatctcagta

SEQ ID NO: 15892 - DNA, 15 bp, Homo sapiens
ctgcactatctcagt

SEQ ID NO: 15893 - DNA, 15 bp, Homo sapiens
tctgcactatctcag

SEQ ID NO: 15894 - DNA, 15 bp, Homo sapiens
ctctgcactatctca

SEQ ID NO: 15895 - DNA, 15 bp, Homo sapiens
cctctgcactatctc

SEQ ID NO: 15896 - DNA, 15 bp, Homo sapiens
tcctctgcactatct

SEQ ID NO: 15897 - DNA, 15 bp, Homo sapiens
ttcctctgcactatc

SEQ ID NO: 15898 - DNA, 15 bp, Homo sapiens
attcctctgcactat

SEQ ID NO: 15899 - DNA, 15 bp, Homo sapiens
cattcctctgcacta

SEQ ID NO: 15900 - DNA, 15 bp, Homo sapiens
tcattcctctgcact

SEQ ID NO: 15901 - DNA, 15 bp, Homo sapiens
ttcattcctctgcac

SEQ ID NO: 15902 - DNA, 15 bp, Homo sapiens
tttcattcctctgca

SEQ ID NO: 15903 - DNA, 15 bp, Homo sapiens
atttcattcctctgc

SEQ ID NO: 15904 - DNA, 15 bp, Homo sapiens
gatttcattcctctg

SEQ ID NO: 15905 - DNA, 15 bp, Homo sapiens
agatttcattcctct

SEQ ID NO: 15906 - DNA, 15 bp, Homo sapiens
aagatttcattcctc

SEQ ID NO: 15907 - DNA, 15 bp, Homo sapiens
gaagatttcattcct

SEQ ID NO: 15908 - DNA, 15 bp, Homo sapiens
ggaagatttcattcc

SEQ ID NO: 15909 - DNA, 15 bp, Homo sapiens
tggaagatttcattc

SEQ ID NO: 15910 - DNA, 15 bp, Homo sapiens
ttggaagatttcatt

SEQ ID NO: 15911 - DNA, 15 bp, Homo sapiens
tttggaagatttcat

SEQ ID NO: 15912 - DNA, 15 bp, Homo sapiens
ttttggaagatttca

SEQ ID NO: 15913 - DNA, 15 bp, Homo sapiens
cttttggaagatttc

SEQ ID NO: 15914 - DNA, 15 bp, Homo sapiens
tcttttggaagattt

SEQ ID NO: 15915 - DNA, 15 bp, Homo sapiens
atcttttggaagatt

SEQ ID NO: 15916 - DNA, 15 bp, Homo sapiens
catcttttggaagat

SEQ ID NO: 15917 - DNA, 15 bp, Homo sapiens
ccatcttttggaaga

SEQ ID NO: 15918 - DNA, 15 bp, Homo sapiens
tccatcttttggaag

SEQ ID NO: 15919 - DNA, 15 bp, Homo sapiens
ttccatcttttggaa

SEQ ID NO: 15920 - DNA, 15 bp, Homo sapiens
attccatcttttgga

SEQ ID NO: 15921 - DNA, 15 bp, Homo sapiens
gattccatcttttgg

SEQ ID NO: 15922 - DNA, 15 bp, Homo sapiens
agattccatcttttg

SEQ ID NO: 15923 - DNA, 15 bp, Homo sapiens
tagattccatctttt

SEQ ID NO: 15924 - DNA, 15 bp, Homo sapiens
ttagattccatcttt

SEQ ID NO: 15925 - DNA, 15 bp, Homo sapiens
tttagattccatctt

SEQ ID NO: 15926 - DNA, 15 bp, Homo sapiens
gtttagattccatct

SEQ ID NO: 15927 - DNA, 15 bp, Homo sapiens
tgtttagattccatc

SEQ ID NO: 15928 - DNA, 15 bp, Homo sapiens
atgtttagattccat

SEQ ID NO: 15929 - DNA, 15 bp, Homo sapiens
tatgtttagattcca

SEQ ID NO: 15930 - DNA, 15 bp, Homo sapiens
ttatgtttagattcc

SEQ ID NO: 15931 - DNA, 15 bp, Homo sapiens
tttatgtttagattc

SEQ ID NO: 15932 - DNA, 15 bp, Homo sapiens
gtttatgtttagatt

SEQ ID NO: 15933 - DNA, 15 bp, Homo sapiens
tgtttatgtttagat

SEQ ID NO: 15934 - DNA, 15 bp, Homo sapiens
ctgtttatgtttaga

SEQ ID NO: 15935 - DNA, 15 bp, Homo sapiens
tctgtttatgtttag

SEQ ID NO: 15936 - DNA, 15 bp, Homo sapiens
gtctgtttatgttta

SEQ ID NO: 15937 - DNA, 15 bp, Homo sapiens
tgtctgtttatgttt

SEQ ID NO: 15938 - DNA, 15 bp, Homo sapiens
atgtctgtttatgtt

SEQ ID NO: 15939 - DNA, 15 bp, Homo sapiens
gatgtctgtttatgt

SEQ ID NO: 15940 - DNA, 15 bp, Homo sapiens
tgatgtctgtttatg

SEQ ID NO: 15941 - DNA, 15 bp, Homo sapiens
ttgatgtctgtttat

SEQ ID NO: 15942 - DNA, 15 bp, Homo sapiens
cttgatgtctgttta

SEQ ID NO: 15943 - DNA, 15 bp, Homo sapiens
tcttgatgtctgttt

SEQ ID NO: 15944 - DNA, 15 bp, Homo sapiens
ctcttgatgtctgtt

SEQ ID NO: 15945 - DNA, 15 bp, Homo sapiens
gctcttgatgtctgt

SEQ ID NO: 15946 - DNA, 15 bp, Homo sapiens
cgctcttgatgtctg

SEQ ID NO: 15947 - DNA, 15 bp, Homo sapiens
ccgctcttgatgtct

SEQ ID NO: 15948 - DNA, 15 bp, Homo sapiens
cccgctcttgatgtc

SEQ ID NO: 15949 - DNA, 15 bp, Homo sapiens
gcccgctcttgatgt

SEQ ID NO: 15950 - DNA, 15 bp, Homo sapiens
agcccgctcttgatg

SEQ ID NO: 15951 - DNA, 15 bp, Homo sapiens
cagcccgctcttgat

SEQ ID NO: 15952 - DNA, 15 bp, Homo sapiens
tcagcccgctcttga

SEQ ID NO: 15953 - DNA, 15 bp, Homo sapiens
gtcagcccgctcttg

SEQ ID NO: 15954 - DNA, 15 bp, Homo sapiens
agtcagcccgctctt

SEQ ID NO: 15955 - DNA, 15 bp, Homo sapiens
aagtcagcccgctct

SEQ ID NO: 15956 - DNA, 15 bp, Homo sapiens
caagtcagcccgctc

SEQ ID NO: 15957 - DNA, 15 bp, Homo sapiens
gcaagtcagcccgct

SEQ ID NO: 15958 - DNA, 15 bp, Homo sapiens
tgcaagtcagcccgc

SEQ ID NO: 15959 - DNA, 15 bp, Homo sapiens
ctgcaagtcagcccg

SEQ ID NO: 15960 - DNA, 15 bp, Homo sapiens
actgcaagtcagccc

SEQ ID NO: 15961 - DNA, 15 bp, Homo sapiens
cactgcaagtcagcc

SEQ ID NO: 15962 - DNA, 15 bp, Homo sapiens
ccactgcaagtcagc

SEQ ID NO: 15963 - DNA, 15 bp, Homo sapiens
tccactgcaagtcag

SEQ ID NO: 15964 - DNA, 15 bp, Homo sapiens
ttccactgcaagtca

SEQ ID NO: 15965 - DNA, 15 bp, Homo sapiens
cttccactgcaagtc

SEQ ID NO: 15966 - DNA, 15 bp, Homo sapiens
tcttccactgcaagt

SEQ ID NO: 15967 - DNA, 15 bp, Homo sapiens
atcttccactgcaag

SEQ ID NO: 15968 - DNA, 15 bp, Homo sapiens
catcttccactgcaa

SEQ ID NO: 15969 - DNA, 15 bp, Homo sapiens
acatcttccactgca

SEQ ID NO: 15970 - DNA, 15 bp, Homo sapiens
cacatcttccactgc

SEQ ID NO: 15971 - DNA, 15 bp, Homo sapiens
ccacatcttccactg

SEQ ID NO: 15972 - DNA, 15 bp, Homo sapiens
accacatcttccact

SEQ ID NO: 15973 - DNA, 15 bp, Homo sapiens
aaccacatcttccac

SEQ ID NO: 15974 - DNA, 15 bp, Homo sapiens
taaccacatcttcca

SEQ ID NO: 15975 - DNA, 15 bp, Homo sapiens
ttaaccacatcttcc

SEQ ID NO: 15976 - DNA, 15 bp, Homo sapiens
tttaaccacatcttc

SEQ ID NO: 15977 - DNA, 15 bp, Homo sapiens
atttaaccacatctt

SEQ ID NO: 15978 - DNA, 15 bp, Homo sapiens
catttaaccacatct

SEQ ID NO: 15979 - DNA, 15 bp, Homo sapiens
tcatttaaccacatc

SEQ ID NO: 15980 - DNA, 15 bp, Homo sapiens
gtcatttaaccacat

SEQ ID NO: 15981 - DNA, 15 bp, Homo sapiens
agtcatttaaccaca

SEQ ID NO: 15982 - DNA, 15 bp, Homo sapiens
gagtcatttaaccac

SEQ ID NO: 15983 - DNA, 15 bp, Homo sapiens
ggagtcatttaacca

SEQ ID NO: 15984 - DNA, 15 bp, Homo sapiens
tggagtcatttaacc

SEQ ID NO: 15985 - DNA, 15 bp, Homo sapiens
gtggagtcatttaac

SEQ ID NO: 15986 - DNA, 15 bp, Homo sapiens
tgtggagtcatttaa

SEQ ID NO: 15987 - DNA, 15 bp, Homo sapiens
atgtggagtcattta

SEQ ID NO: 15988 - DNA, 15 bp, Homo sapiens
catgtggagtcattt

SEQ ID NO: 15989 - DNA, 15 bp, Homo sapiens
acatgtggagtcatt

SEQ ID NO: 15990 - DNA, 15 bp, Homo sapiens
cacatgtggagtcat

SEQ ID NO: 15991 - DNA, 15 bp, Homo sapiens
ccacatgtggagtca

SEQ ID NO: 15992 - DNA, 15 bp, Homo sapiens
accacatgtggagtc

SEQ ID NO: 15993 - DNA, 15 bp, Homo sapiens
gaccacatgtggagt

SEQ ID NO: 15994 - DNA, 15 bp, Homo sapiens
tgaccacatgtggag

SEQ ID NO: 15995 - DNA, 15 bp, Homo sapiens
atgaccacatgtgga

SEQ ID NO: 15996 - DNA, 15 bp, Homo sapiens
gatgaccacatgtgg

SEQ ID NO: 15997 - DNA, 15 bp, Homo sapiens
acagatgaaatttta

SEQ ID NO: 15998 - DNA, 15 bp, Homo sapiens
tacagatgaaatttt

SEQ ID NO: 15999 - DNA, 15 bp, Homo sapiens
ttacagatgaaattt

SEQ ID NO: 16000 - DNA, 15 bp, Homo sapiens
attacagatgaaatt

SEQ ID NO: 16001 - DNA, 15 bp, Homo sapiens
aattacagatgaaat

SEQ ID NO: 16002 - DNA, 15 bp, Homo sapiens
gaattacagatgaaa

SEQ ID NO: 16003 - DNA, 15 bp, Homo sapiens
ggaattacagatgaa

SEQ ID NO: 16004 - DNA, 15 bp, Homo sapiens
tggaattacagatga

SEQ ID NO: 16005 - DNA, 15 bp, Homo sapiens
gtggaattacagatg

SEQ ID NO: 16006 - DNA, 15 bp, Homo sapiens
tgtggaattacagat

SEQ ID NO: 16007 - DNA, 15 bp, Homo sapiens
atgtggaattacaga

SEQ ID NO: 16008 - DNA, 15 bp, Homo sapiens
catgtggaattacag

SEQ ID NO: 16009 - DNA, 15 bp, Homo sapiens
gcatgtggaattaca

SEQ ID NO: 16010 - DNA, 15 bp, Homo sapiens
tgcatgtggaattac

SEQ ID NO: 16011 - DNA, 15 bp, Homo sapiens
ttgcatgtggaatta

SEQ ID NO: 16012 - DNA, 15 bp, Homo sapiens
gttgcatgtggaatt

SEQ ID NO: 16013 - DNA, 15 bp, Homo sapiens
ggttgcatgtggaat

SEQ ID NO: 16014 - DNA, 15 bp, Homo sapiens
gggttgcatgtggaa

SEQ ID NO: 16015 - DNA, 15 bp, Homo sapiens
ggggttgcatgtgga

SEQ ID NO: 16016 - DNA, 15 bp, Homo sapiens
gggggttgcatgtgg

SEQ ID NO: 16017 - DNA, 15 bp, Homo sapiens
tgggggttgcatgtg

SEQ ID NO: 16018 - DNA, 15 bp, Homo sapiens
gtgggggttgcatgt

SEQ ID NO: 16019 - DNA, 15 bp, Homo sapiens
ggtgggggttgcatg

SEQ ID NO: 16020 - DNA, 15 bp, Homo sapiens
gggtgggggttgcat

SEQ ID NO: 16021 - DNA, 15 bp, Homo sapiens
ggggtgggggttgca

SEQ ID NO: 16022 - DNA, 15 bp, Homo sapiens
gggggtgggggttgc

SEQ ID NO: 16023 - DNA, 15 bp, Homo sapiens
tgggggtgggggttg

SEQ ID NO: 16024 - DNA, 15 bp, Homo sapiens
atgggggtgggggtt

SEQ ID NO: 16025 - DNA, 15 bp, Homo sapiens
tatgggggtgggggt

SEQ ID NO: 16026 - DNA, 15 bp, Homo sapiens
gtatgggggtggggg

SEQ ID NO: 16027 - DNA, 15 bp, Homo sapiens
tgtatgggggtgggg

SEQ ID NO: 16028 - DNA, 15 bp, Homo sapiens
gtgtatgggggtggg

SEQ ID NO: 16029 - DNA, 15 bp, Homo sapiens
tgtgtatgggggtgg

SEQ ID NO: 16030 - DNA, 15 bp, Homo sapiens
gtgtgtatgggggtg

SEQ ID NO: 16031 - DNA, 15 bp, Homo sapiens
agtgtgtatgggggt

SEQ ID NO: 16032 - DNA, 15 bp, Homo sapiens
gagtgtgtatggggg

SEQ ID NO: 16033 - DNA, 15 bp, Homo sapiens
tgagtgtgtatgggg

SEQ ID NO: 16034 - DNA, 15 bp, Homo sapiens
gtgagtgtgtatggg

SEQ ID NO: 16035 - DNA, 15 bp, Homo sapiens
tgtgagtgtgtatgg

SEQ ID NO: 16036 - DNA, 15 bp, Homo sapiens
ttgtgagtgtgtatg

SEQ ID NO: 16037 - DNA, 15 bp, Homo sapiens
cttgtgagtgtgtat

SEQ ID NO: 16038 - DNA, 15 bp, Homo sapiens
tcttgtgagtgtgta

SEQ ID NO: 16039 - DNA, 15 bp, Homo sapiens
atcttgtgagtgtgt

SEQ ID NO: 16040 - DNA, 15 bp, Homo sapiens
gatcttgtgagtgtg

SEQ ID NO: 16041 - DNA, 15 bp, Homo sapiens
agatcttgtgagtgt

SEQ ID NO: 16042 - DNA, 15 bp, Homo sapiens
cagatcttgtgagtg

SEQ ID NO: 16043 - DNA, 15 bp, Homo sapiens
tcagatcttgtgagt

SEQ ID NO: 16044 - DNA, 15 bp, Homo sapiens
ttcagatcttgtgag

SEQ ID NO: 16045 - DNA, 15 bp, Homo sapiens
attcagatcttgtga

SEQ ID NO: 16046 - DNA, 15 bp, Homo sapiens
tattcagatcttgtg

SEQ ID NO: 16047 - DNA, 15 bp, Homo sapiens
atattcagatcttgt

SEQ ID NO: 16048 - DNA, 15 bp, Homo sapiens
catattcagatcttg

SEQ ID NO: 16049 - DNA, 15 bp, Homo sapiens
ccatattcagatctt

SEQ ID NO: 16050 - DNA, 15 bp, Homo sapiens
accatattcagatct

SEQ ID NO: 16051 - DNA, 15 bp, Homo sapiens
taccatattcagatc

SEQ ID NO: 16052 - DNA, 15 bp, Homo sapiens
ttaccatattcagat

SEQ ID NO: 16053 - DNA, 15 bp, Homo sapiens
gttaccatattcaga

SEQ ID NO: 16054 - DNA, 15 bp, Homo sapiens
tgttaccatattcag

SEQ ID NO: 16055 - DNA, 15 bp, Homo sapiens
ttgttaccatattca

SEQ ID NO: 16056 - DNA, 15 bp, Homo sapiens
cttgttaccatattc

SEQ ID NO: 16057 - DNA, 15 bp, Homo sapiens
ccttgttaccatatt

SEQ ID NO: 16058 - DNA, 15 bp, Homo sapiens
tccttgttaccatat

SEQ ID NO: 16059 - DNA, 15 bp, Homo sapiens
ttccttgttaccata

SEQ ID NO: 16060 - DNA, 15 bp, Homo sapiens
tttccttgttaccat

SEQ ID NO: 16061 - DNA, 15 bp, Homo sapiens
atttccttgttacca

SEQ ID NO: 16062 - DNA, 15 bp, Homo sapiens
gatttccttgttacc

SEQ ID NO: 16063 - DNA, 15 bp, Homo sapiens
ggatttccttgttac

SEQ ID NO: 16064 - DNA, 15 bp, Homo sapiens
aggatttccttgtta

SEQ ID NO: 16065 - DNA, 15 bp, Homo sapiens
taggatttccttgtt

SEQ ID NO: 16066 - DNA, 15 bp, Homo sapiens
ctaggatttccttgt

SEQ ID NO: 16067 - DNA, 15 bp, Homo sapiens
actaggatttccttg

SEQ ID NO: 16068 - DNA, 15 bp, Homo sapiens
tactaggatttcctt

SEQ ID NO: 16069 - DNA, 15 bp, Homo sapiens
ttactaggatttcct

SEQ ID NO: 16070 - DNA, 15 bp, Homo sapiens
gttactaggatttcc

SEQ ID NO: 16071 - DNA, 15 bp, Homo sapiens
agttactaggatttc

SEQ ID NO: 16072 - DNA, 15 bp, Homo sapiens
cagttactaggattt

SEQ ID NO: 16073 - DNA, 15 bp, Homo sapiens
acagttactaggatt

SEQ ID NO: 16074 - DNA, 15 bp, Homo sapiens
tacagttactaggat

SEQ ID NO: 16075 - DNA, 15 bp, Homo sapiens
ctacagttactagga

SEQ ID NO: 16076 - DNA, 15 bp, Homo sapiens
gctacagttactagg

SEQ ID NO: 16077 - DNA, 15 bp, Homo sapiens
cgctacagttactag

SEQ ID NO: 16078 - DNA, 15 bp, Homo sapiens
acgctacagttacta

SEQ ID NO: 16079 - DNA, 15 bp, Homo sapiens
aacgctacagttact

SEQ ID NO: 16080 - DNA, 15 bp, Homo sapiens
caacgctacagttac

SEQ ID NO: 16081 - DNA, 15 bp, Homo sapiens
ccaacgctacagtta

SEQ ID NO: 16082 - DNA, 15 bp, Homo sapiens
tccaacgctacagtt

SEQ ID NO: 16083 - DNA, 15 bp, Homo sapiens
ttccaacgctacagt

SEQ ID NO: 16084 - DNA, 15 bp, Homo sapiens
tttccaacgctacag

SEQ ID NO: 16085 - DNA, 15 bp, Homo sapiens
ttttccaacgctaca

SEQ ID NO: 16086 - DNA, 15 bp, Homo sapiens
tttttccaacgctac

SEQ ID NO: 16087 - DNA, 15 bp, Homo sapiens
atttttccaacgcta

SEQ ID NO: 16088 - DNA, 15 bp, Homo sapiens
catttttccaacgct

SEQ ID NO: 16089 - DNA, 15 bp, Homo sapiens
ccatttttccaacgc

SEQ ID NO: 16090 - DNA, 15 bp, Homo sapiens
accatttttccaacg

SEQ ID NO: 16091 - DNA, 15 bp, Homo sapiens
aaccatttttccaac

SEQ ID NO: 16092 - DNA, 15 bp, Homo sapiens
gaaccatttttccaa

SEQ ID NO: 16093 - DNA, 15 bp, Homo sapiens
tgaaccatttttcca

SEQ ID NO: 16094 - DNA, 15 bp, Homo sapiens
atgaaccatttttcc

SEQ ID NO: 16095 - DNA, 15 bp, Homo sapiens
tatgaaccatttttc

SEQ ID NO: 16096 - DNA, 15 bp, Homo sapiens
atatgaaccattttt

SEQ ID NO: 16097 - DNA, 15 bp, Homo sapiens
catatgaaccatttt

SEQ ID NO: 16098 - DNA, 15 bp, Homo sapiens
ccatatgaaccattt

SEQ ID NO: 16099 - DNA, 15 bp, Homo sapiens
tccatatgaaccatt

SEQ ID NO: 16100 - DNA, 15 bp, Homo sapiens
ttccatatgaaccat

SEQ ID NO: 16101 - DNA, 15 bp, Homo sapiens
tttccatatgaacca

SEQ ID NO: 16102 - DNA, 15 bp, Homo sapiens
atttccatatgaacc

SEQ ID NO: 16103 - DNA, 15 bp, Homo sapiens
tatttccatatgaac

SEQ ID NO: 16104 - DNA, 15 bp, Homo sapiens
ttatttccatatgaa

SEQ ID NO: 16105 - DNA, 15 bp, Homo sapiens
cttatttccatatga

SEQ ID NO: 16106 - DNA, 15 bp, Homo sapiens
gcttatttccatatg

SEQ ID NO: 16107 - DNA, 15 bp, Homo sapiens
ggcttatttccatat

SEQ ID NO: 16108 - DNA, 15 bp, Homo sapiens
tggcttatttccata

SEQ ID NO: 16109 - DNA, 15 bp, Homo sapiens
atggcttatttccat

SEQ ID NO: 16110 - DNA, 15 bp, Homo sapiens
aatggcttatttcca

SEQ ID NO: 16111 - DNA, 15 bp, Homo sapiens
aaatggcttatttcc

SEQ ID NO: 16112 - DNA, 15 bp, Homo sapiens
caaatggcttatttc

SEQ ID NO: 16113 - DNA, 15 bp, Homo sapiens
ccaaatggcttattt

SEQ ID NO: 16114 - DNA, 15 bp, Homo sapiens
gccaaatggcttatt

SEQ ID NO: 16115 - DNA, 15 bp, Homo sapiens
agccaaatggcttat

SEQ ID NO: 16116 - DNA, 15 bp, Homo sapiens
tagccaaatggctta

SEQ ID NO: 16117 - DNA, 15 bp, Homo sapiens
ctagccaaatggctt

SEQ ID NO: 16118 - DNA, 15 bp, Homo sapiens
actagccaaatggct

SEQ ID NO: 16119 - DNA, 15 bp, Homo sapiens
tactagccaaatggc

SEQ ID NO: 16120 - DNA, 15 bp, Homo sapiens
ttactagccaaatgg

SEQ ID NO: 16121 - DNA, 15 bp, Homo sapiens
tttactagccaaatg

SEQ ID NO: 16122 - DNA, 15 bp, Homo sapiens
ctttactagccaaat

SEQ ID NO: 16123 - DNA, 15 bp, Homo sapiens
gctttactagccaaa

SEQ ID NO: 16124 - DNA, 15 bp, Homo sapiens
agctttactagccaa

SEQ ID NO: 16125 - DNA, 15 bp, Homo sapiens
cagctttactagcca

SEQ ID NO: 16126 - DNA, 15 bp, Homo sapiens
ccagctttactagcc

SEQ ID NO: 16127 - DNA, 15 bp, Homo sapiens
accagctttactagc

SEQ ID NO: 16128 - DNA, 15 bp, Homo sapiens
caccagctttactag

SEQ ID NO: 16129 - DNA, 15 bp, Homo sapiens
tcaccagctttacta

SEQ ID NO: 16130 - DNA, 15 bp, Homo sapiens
atcaccagctttact

SEQ ID NO: 16131 - DNA, 15 bp, Homo sapiens
aatcaccagctttac

SEQ ID NO: 16132 - DNA, 15 bp, Homo sapiens
aaatcaccagcttta

SEQ ID NO: 16133 - DNA, 15 bp, Homo sapiens
aaaatcaccagcttt

SEQ ID NO: 16134 - DNA, 15 bp, Homo sapiens
caaaatcaccagctt

SEQ ID NO: 16135 - DNA, 15 bp, Homo sapiens
acaaaatcaccagct

SEQ ID NO: 16136 - DNA, 15 bp, Homo sapiens
aacaaaatcaccagc

SEQ ID NO: 16137 - DNA, 15 bp, Homo sapiens
gaacaaaatcaccag

SEQ ID NO: 16138 - DNA, 15 bp, Homo sapiens
agaacaaaatcacca

SEQ ID NO: 16139 - DNA, 15 bp, Homo sapiens
gagaacaaaatcacc

SEQ ID NO: 16140 - DNA, 15 bp, Homo sapiens
agagaacaaaatcac

SEQ ID NO: 16141 - DNA, 15 bp, Homo sapiens
tagagaacaaaatca

SEQ ID NO: 16142 - DNA, 15 bp, Homo sapiens
ctagagaacaaaatc

SEQ ID NO: 16143 - DNA, 15 bp, Homo sapiens
cctagagaacaaaat

SEQ ID NO: 16144 - DNA, 15 bp, Homo sapiens
acctagagaacaaaa

SEQ ID NO: 16145 - DNA, 15 bp, Homo sapiens
cacctagagaacaaa

SEQ ID NO: 16146 - DNA, 15 bp, Homo sapiens
ccacctagagaacaa

SEQ ID NO: 16147 - DNA, 15 bp, Homo sapiens
gccacctagagaaca

SEQ ID NO: 16148 - DNA, 15 bp, Homo sapiens
tgccacctagagaac

SEQ ID NO: 16149 - DNA, 15 bp, Homo sapiens
gtgccacctagagaa

SEQ ID NO: 16150 - DNA, 15 bp, Homo sapiens
agtgccacctagaga

SEQ ID NO: 16151 - DNA, 15 bp, Homo sapiens
tagtgccacctagag

SEQ ID NO: 16152 - DNA, 15 bp, Homo sapiens
atagtgccacctaga

SEQ ID NO: 16153 - DNA, 15 bp, Homo sapiens
aatagtgccacctag

SEQ ID NO: 16154 - DNA, 15 bp, Homo sapiens
taatagtgccaccta

SEQ ID NO: 16155 - DNA, 15 bp, Homo sapiens
gtaatagtgccacct

SEQ ID NO: 16156 - DNA, 15 bp, Homo sapiens
agtaatagtgccacc

SEQ ID NO: 16157 - DNA, 15 bp, Homo sapiens
aagtaatagtgccac

SEQ ID NO: 16158 - DNA, 15 bp, Homo sapiens
gaagtaatagtgcca

SEQ ID NO: 16159 - DNA, 15 bp, Homo sapiens
tgaagtaatagtgcc

SEQ ID NO: 16160 - DNA, 15 bp, Homo sapiens
ttgaagtaatagtgc

SEQ ID NO: 16161 - DNA, 15 bp, Homo sapiens
attgaagtaatagtg

SEQ ID NO: 16162 - DNA, 15 bp, Homo sapiens
aattgaagtaatagt

SEQ ID NO: 16163 - DNA, 15 bp, Homo sapiens
aaattgaagtaatag

SEQ ID NO: 16164 - DNA, 15 bp, Homo sapiens
aaaattgaagtaata

SEQ ID NO: 16165 - DNA, 15 bp, Homo sapiens
aaaaattgaagtaat

SEQ ID NO: 16166 - DNA, 15 bp, Homo sapiens
caaaaattgaagtaa

SEQ ID NO: 16167 - DNA, 15 bp, Homo sapiens
ccaaaaattgaagta

SEQ ID NO: 16168 - DNA, 15 bp, Homo sapiens
accaaaaattgaagt

SEQ ID NO: 16169 - DNA, 15 bp, Homo sapiens
caccaaaaattgaag

SEQ ID NO: 16170 - DNA, 15 bp, Homo sapiens
tcaccaaaaattgaa

SEQ ID NO: 16171 - DNA, 15 bp, Homo sapiens
ctcaccaaaaattga

SEQ ID NO: 16172 - DNA, 15 bp, Homo sapiens
actcaccaaaaattg

SEQ ID NO: 16173 - DNA, 15 bp, Homo sapiens
aactcaccaaaaatt

SEQ ID NO: 16174 - DNA, 15 bp, Homo sapiens
caactcaccaaaaat

SEQ ID NO: 16175 - DNA, 15 bp, Homo sapiens
gcaactcaccaaaaa

SEQ ID NO: 16176 - DNA, 15 bp, Homo sapiens
agcaactcaccaaaa

SEQ ID NO: 16177 - DNA, 15 bp, Homo sapiens
aagcaactcaccaaa

SEQ ID NO: 16178 - DNA, 15 bp, Homo sapiens
taagcaactcaccaa

SEQ ID NO: 16179 - DNA, 15 bp, Homo sapiens
ttaagcaactcacca

SEQ ID NO: 16180 - DNA, 15 bp, Homo sapiens
tttaagcaactcacc

SEQ ID NO: 16181 - DNA, 15 bp, Homo sapiens
atttaagcaactcac

SEQ ID NO: 16182 - DNA, 15 bp, Homo sapiens
aatttaagcaactca

SEQ ID NO: 16183 - DNA, 15 bp, Homo sapiens
taatttaagcaactc

SEQ ID NO: 16184 - DNA, 15 bp, Homo sapiens
gtaatttaagcaact

SEQ ID NO: 16185 - DNA, 15 bp, Homo sapiens
agtaatttaagcaac

SEQ ID NO: 16186 - DNA, 15 bp, Homo sapiens
aagtaatttaagcaa

SEQ ID NO: 16187 - DNA, 15 bp, Homo sapiens
caagtaatttaagca

SEQ ID NO: 16188 - DNA, 15 bp, Homo sapiens
ccaagtaatttaagc

SEQ ID NO: 16189 - DNA, 15 bp, Homo sapiens
tccaagtaatttaag

SEQ ID NO: 16190 - DNA, 15 bp, Homo sapiens
ttccaagtaatttaa

SEQ ID NO: 16191 - DNA, 15 bp, Homo sapiens
gttccaagtaattta

SEQ ID NO: 16192 - DNA, 15 bp, Homo sapiens
agttccaagtaattt

SEQ ID NO: 16193 - DNA, 15 bp, Homo sapiens
cagttccaagtaatt

SEQ ID NO: 16194 - DNA, 15 bp, Homo sapiens
gcagttccaagtaat

SEQ ID NO: 16195 - DNA, 15 bp, Homo sapiens
ggcagttccaagtaa

SEQ ID NO: 16196 - DNA, 15 bp, Homo sapiens
gggcagttccaagta

SEQ ID NO: 16197 - DNA, 15 bp, Homo sapiens
cgggcagttccaagt

SEQ ID NO: 16198 - DNA, 15 bp, Homo sapiens
acgggcagttccaag

SEQ ID NO: 16199 - DNA, 15 bp, Homo sapiens
aacgggcagttccaa

SEQ ID NO: 16200 - DNA, 15 bp, Homo sapiens
aaacgggcagttcca

SEQ ID NO: 16201 - DNA, 15 bp, Homo sapiens
taaacgggcagttcc

SEQ ID NO: 16202 - DNA, 15 bp, Homo sapiens
ataaacgggcagttc

SEQ ID NO: 16203 - DNA, 15 bp, Homo sapiens
aataaacgggcagtt

SEQ ID NO: 16204 - DNA, 15 bp, Homo sapiens
aaataaacgggcagt

SEQ ID NO: 16205 - DNA, 15 bp, Homo sapiens
aaaataaacgggcag

SEQ ID NO: 16206 - DNA, 15 bp, Homo sapiens
gaaaataaacgggca

SEQ ID NO: 16207 - DNA, 15 bp, Homo sapiens
agaaaataaacgggc

SEQ ID NO: 16208 - DNA, 15 bp, Homo sapiens
aagaaaataaacggg

SEQ ID NO: 16209 - DNA, 15 bp, Homo sapiens
aaagaaaataaacgg

SEQ ID NO: 16210 - DNA, 15 bp, Homo sapiens
caaagaaaataaacg

SEQ ID NO: 16211 - DNA, 15 bp, Homo sapiens
tcaaagaaaataaac

SEQ ID NO: 16212 - DNA, 15 bp, Homo sapiens
ttcaaagaaaataaa

SEQ ID NO: 16213 - DNA, 15 bp, Homo sapiens
attcaaagaaaataa

SEQ ID NO: 16214 - DNA, 15 bp, Homo sapiens
aattcaaagaaaata

SEQ ID NO: 16215 - DNA, 15 bp, Homo sapiens
gaattcaaagaaaat

SEQ ID NO: 16216 - DNA, 15 bp, Homo sapiens
ggaattcaaagaaaa

SEQ ID NO: 16217 - DNA, 15 bp, Homo sapiens
gggaattcaaagaaa

SEQ ID NO: 16218 - DNA, 15 bp, Homo sapiens
tgggaattcaaagaa

SEQ ID NO: 16219 - DNA, 15 bp, Homo sapiens
atgggaattcaaaga

SEQ ID NO: 16220 - DNA, 15 bp, Homo sapiens
aatgggaattcaaag

SEQ ID NO: 16221 - DNA, 15 bp, Homo sapiens
aaatgggaattcaaa

SEQ ID NO: 16222 - DNA, 15 bp, Homo sapiens
aaaatgggaattcaa

SEQ ID NO: 16223 - DNA, 15 bp, Homo sapiens
taaaatgggaattca

SEQ ID NO: 16224 - DNA, 15 bp, Homo sapiens
ataaaatgggaattc

SEQ ID NO: 16225 - DNA, 15 bp, Homo sapiens
tataaaatgggaatt

SEQ ID NO: 16226 - DNA, 15 bp, Homo sapiens
ttataaaatgggaat

SEQ ID NO: 16227 - DNA, 15 bp, Homo sapiens
tttataaaatgggaa

SEQ ID NO: 16228 - DNA, 15 bp, Homo sapiens
atttataaaatggga

SEQ ID NO: 16229 - DNA, 15 bp, Homo sapiens
aatttataaaatggg

SEQ ID NO: 16230 - DNA, 15 bp, Homo sapiens
aaatttataaaatgg

SEQ ID NO: 16231 - DNA, 15 bp, Homo sapiens
aaaatttataaaatg

SEQ ID NO: 16232 - DNA, 15 bp, Homo sapiens
taaaatttataaaat

SEQ ID NO: 16233 - DNA, 15 bp, Homo sapiens
ttaaaatttataaaa

SEQ ID NO: 16234 - DNA, 15 bp, Homo sapiens
attaaaatttataaa

SEQ ID NO: 16235 - DNA, 15 bp, Homo sapiens
aattaaaatttataa

SEQ ID NO: 16236 - DNA, 15 bp, Homo sapiens
aaattaaaatttata

SEQ ID NO: 16237 - DNA, 15 bp, Homo sapiens
aaaattaaaatttat

SEQ ID NO: 16238 - DNA, 15 bp, Homo sapiens
taaaattaaaattta

SEQ ID NO: 16239 - DNA, 15 bp, Homo sapiens
ataaaattaaaattt

SEQ ID NO: 16240 - DNA, 15 bp, Homo sapiens
tataaaattaaaatt

SEQ ID NO: 16241 - DNA, 15 bp, Homo sapiens
gtataaaattaaaat

SEQ ID NO: 16242 - DNA, 15 bp, Homo sapiens
tgtataaaattaaaa

SEQ ID NO: 16243 - DNA, 15 bp, Homo sapiens
ttgtataaaattaaa

SEQ ID NO: 16244 - DNA, 15 bp, Homo sapiens
cttgtataaaattaa

SEQ ID NO: 16245 - DNA, 15 bp, Homo sapiens
gcttgtataaaatta

SEQ ID NO: 16246 - DNA, 15 bp, Homo sapiens
agcttgtataaaatt

SEQ ID NO: 16247 - DNA, 15 bp, Homo sapiens
tagcttgtataaaat

SEQ ID NO: 16248 - DNA, 15 bp, Homo sapiens
ctagcttgtataaaa

SEQ ID NO: 16249 - DNA, 15 bp, Homo sapiens
actagcttgtataaa

SEQ ID NO: 16250 - DNA, 15 bp, Homo sapiens
aactagcttgtataa

SEQ ID NO: 16251 - DNA, 15 bp, Homo sapiens
caactagcttgtata

SEQ ID NO: 16252 - DNA, 15 bp, Homo sapiens
acaactagcttgtat

SEQ ID NO: 16253 - DNA, 15 bp, Homo sapiens
tacaactagcttgta

SEQ ID NO: 16254 - DNA, 15 bp, Homo sapiens
ttacaactagcttgt

SEQ ID NO: 16255 - DNA, 15 bp, Homo sapiens
attacaactagcttg

SEQ ID NO: 16256 - DNA, 15 bp, Homo sapiens
aattacaactagctt

SEQ ID NO: 16257 - DNA, 15 bp, Homo sapiens
taattacaactagct

SEQ ID NO: 16258 - DNA, 15 bp, Homo sapiens
ttaattacaactagc

SEQ ID NO: 16259 - DNA, 15 bp, Homo sapiens
tttaattacaactag

SEQ ID NO: 16260 - DNA, 15 bp, Homo sapiens
gtttaattacaacta

SEQ ID NO: 16261 - DNA, 15 bp, Homo sapiens
cgtttaattacaact

SEQ ID NO: 16262 - DNA, 15 bp, Homo sapiens
tcgtttaattacaac

SEQ ID NO: 16263 - DNA, 15 bp, Homo sapiens
gtcgtttaattacaa

SEQ ID NO: 16264 - DNA, 15 bp, Homo sapiens
tgtcgtttaattaca

SEQ ID NO: 16265 - DNA, 15 bp, Homo sapiens
ctgtcgtttaattac

SEQ ID NO: 16266 - DNA, 15 bp, Homo sapiens
cctgtcgtttaatta

SEQ ID NO: 16267 - DNA, 15 bp, Homo sapiens
acctgtcgtttaatt

SEQ ID NO: 16268 - DNA, 15 bp, Homo sapiens
aacctgtcgtttaat

SEQ ID NO: 16269 - DNA, 15 bp, Homo sapiens
caacctgtcgtttaa

SEQ ID NO: 16270 - DNA, 15 bp, Homo sapiens
gcaacctgtcgttta

SEQ ID NO: 16271 - DNA, 15 bp, Homo sapiens
ggcaacctgtcgttt

SEQ ID NO: 16272 - DNA, 15 bp, Homo sapiens
aggcaacctgtcgtt

SEQ ID NO: 16273 - DNA, 15 bp, Homo sapiens
aaggcaacctgtcgt

SEQ ID NO: 16274 - DNA, 15 bp, Homo sapiens
gaaggcaacctgtcg

SEQ ID NO: 16275 - DNA, 15 bp, Homo sapiens
agaaggcaacctgtc

SEQ ID NO: 16276 - DNA, 15 bp, Homo sapiens
tagaaggcaacctgt

SEQ ID NO: 16277 - DNA, 15 bp, Homo sapiens
ctagaaggcaacctg

SEQ ID NO: 16278 - DNA, 15 bp, Homo sapiens
cctagaaggcaacct

SEQ ID NO: 16279 - DNA, 15 bp, Homo sapiens
acctagaaggcaacc

SEQ ID NO: 16280 - DNA, 15 bp, Homo sapiens
aacctagaaggcaac

SEQ ID NO: 16281 - DNA, 15 bp, Homo sapiens
aaacctagaaggcaa

SEQ ID NO: 16282 - DNA, 15 bp, Homo sapiens
aaaacctagaaggca

SEQ ID NO: 16283 - DNA, 15 bp, Homo sapiens
taaaacctagaaggc

SEQ ID NO: 16284 - DNA, 15 bp, Homo sapiens
ataaaacctagaagg

SEQ ID NO: 16285 - DNA, 15 bp, Homo sapiens
aataaaacctagaag

SEQ ID NO: 16286 - DNA, 15 bp, Homo sapiens
aaataaaacctagaa

SEQ ID NO: 16287 - DNA, 15 bp, Homo sapiens
gaaataaaacctaga

SEQ ID NO: 16288 - DNA, 15 bp, Homo sapiens
tgaaataaaacctag

SEQ ID NO: 16289 - DNA, 15 bp, Homo sapiens
ctgaaataaaaccta

SEQ ID NO: 16290 - DNA, 15 bp, Homo sapiens
actgaaataaaacct

SEQ ID NO: 16291 - DNA, 15 bp, Homo sapiens
tactgaaataaaacc

SEQ ID NO: 16292 - DNA, 15 bp, Homo sapiens
ttactgaaataaaac

SEQ ID NO: 16293 - DNA, 15 bp, Homo sapiens
cttactgaaataaaa

SEQ ID NO: 16294 - DNA, 15 bp, Homo sapiens
acttactgaaataaa

SEQ ID NO: 16295 - DNA, 15 bp, Homo sapiens
gacttactgaaataa

SEQ ID NO: 16296 - DNA, 15 bp, Homo sapiens
tgacttactgaaata

SEQ ID NO: 16297 - DNA, 15 bp, Homo sapiens
ttgacttactgaaat

SEQ ID NO: 16298 - DNA, 15 bp, Homo sapiens
attgacttactgaaa

SEQ ID NO: 16299 - DNA, 15 bp, Homo sapiens
aattgacttactgaa

SEQ ID NO: 16300 - DNA, 15 bp, Homo sapiens
aaattgacttactga

SEQ ID NO: 16301 - DNA, 15 bp, Homo sapiens
caaattgacttactg

SEQ ID NO: 16302 - DNA, 15 bp, Homo sapiens
tcaaattgacttact

SEQ ID NO: 16303 - DNA, 15 bp, Homo sapiens
ttcaaattgacttac

SEQ ID NO: 16304 - DNA, 15 bp, Homo sapiens
cttcaaattgactta

SEQ ID NO: 16305 - DNA, 15 bp, Homo sapiens
acttcaaattgactt

SEQ ID NO: 16306 - DNA, 15 bp, Homo sapiens
aacttcaaattgact

SEQ ID NO: 16307 - DNA, 15 bp, Homo sapiens
gaacttcaaattgac

SEQ ID NO: 16308 - DNA, 15 bp, Homo sapiens
tgaacttcaaattga

SEQ ID NO: 16309 - DNA, 15 bp, Homo sapiens
ctgaacttcaaattg

SEQ ID NO: 16310 - DNA, 15 bp, Homo sapiens
actgaacttcaaatt

SEQ ID NO: 16311 - DNA, 15 bp, Homo sapiens
cactgaacttcaaat

SEQ ID NO: 16312 - DNA, 15 bp, Homo sapiens
tcactgaacttcaaa

SEQ ID NO: 16313 - DNA, 15 bp, Homo sapiens
atcactgaacttcaa

SEQ ID NO: 16314 - DNA, 15 bp, Homo sapiens
aatcactgaacttca

SEQ ID NO: 16315 - DNA, 15 bp, Homo sapiens
aaatcactgaacttc

SEQ ID NO: 16316 - DNA, 15 bp, Homo sapiens
aaaatcactgaactt

SEQ ID NO: 16317 - DNA, 15 bp, Homo sapiens
aaaaatcactgaact

SEQ ID NO: 16318 - DNA, 15 bp, Homo sapiens
aaaaaatcactgaac

SEQ ID NO: 16319 - DNA, 15 bp, Homo sapiens
taaaaaatcactgaa

SEQ ID NO: 16320 - DNA, 15 bp, Homo sapiens
ataaaaaatcactga

SEQ ID NO: 16321 - DNA, 15 bp, Homo sapiens
gataaaaaatcactg

SEQ ID NO: 16322 - DNA, 15 bp, Homo sapiens
tgataaaaaatcact

SEQ ID NO: 16323 - DNA, 15 bp, Homo sapiens
atgataaaaaatcac

SEQ ID NO: 16324 - DNA, 15 bp, Homo sapiens
tatgataaaaaatca

SEQ ID NO: 16325 - DNA, 15 bp, Homo sapiens
atatgataaaaaatc

SEQ ID NO: 16326 - DNA, 15 bp, Homo sapiens
tatatgataaaaaat

SEQ ID NO: 16327 - DNA, 15 bp, Homo sapiens
ttatatgataaaaaa

SEQ ID NO: 16328 - DNA, 15 bp, Homo sapiens
attatatgataaaaa

SEQ ID NO: 16329 - DNA, 15 bp, Homo sapiens
aattatatgataaaa

SEQ ID NO: 16330 - DNA, 15 bp, Homo sapiens
aaattatatgataaa

SEQ ID NO: 16331 - DNA, 15 bp, Homo sapiens
aaaattatatgataa

SEQ ID NO: 16332 - DNA, 15 bp, Homo sapiens
taaaattatatgata

SEQ ID NO: 16333 - DNA, 15 bp, Homo sapiens
ataaaattatatgat

SEQ ID NO: 16334 - DNA, 15 bp, Homo sapiens
cataaaattatatga

SEQ ID NO: 16335 - DNA, 15 bp, Homo sapiens
acataaaattatatg

SEQ ID NO: 16336 - DNA, 15 bp, Homo sapiens
aacataaaattatat

SEQ ID NO: 16337 - DNA, 15 bp, Homo sapiens
aaacataaaattata

SEQ ID NO: 16338 - DNA, 15 bp, Homo sapiens
gaaacataaaattat

SEQ ID NO: 16339 - DNA, 15 bp, Homo sapiens
ggaaacataaaatta

SEQ ID NO: 16340 - DNA, 15 bp, Homo sapiens
aggaaacataaaatt

SEQ ID NO: 16341 - DNA, 15 bp, Homo sapiens
aaggaaacataaaat

SEQ ID NO: 16342 - DNA, 15 bp, Homo sapiens
taaggaaacataaaa

SEQ ID NO: 16343 - DNA, 15 bp, Homo sapiens
gtaaggaaacataaa

SEQ ID NO: 16344 - DNA, 15 bp, Homo sapiens
agtaaggaaacataa

SEQ ID NO: 16345 - DNA, 15 bp, Homo sapiens
tagtaaggaaacata

SEQ ID NO: 16346 - DNA, 15 bp, Homo sapiens
atagtaaggaaacat

SEQ ID NO: 16347 - DNA, 15 bp, Homo sapiens
tatagtaaggaaaca

SEQ ID NO: 16348 - DNA, 15 bp, Homo sapiens
gtatagtaaggaaac

SEQ ID NO: 16349 - DNA, 15 bp, Homo sapiens
agtatagtaaggaaa

SEQ ID NO: 16350 - DNA, 15 bp, Homo sapiens
cagtatagtaaggaa

SEQ ID NO: 16351 - DNA, 15 bp, Homo sapiens
acagtatagtaagga

SEQ ID NO: 16352 - DNA, 15 bp, Homo sapiens
gacagtatagtaagg

SEQ ID NO: 16353 - DNA, 15 bp, Homo sapiens
agacagtatagtaag

SEQ ID NO: 16354 - DNA, 15 bp, Homo sapiens
aagacagtatagtaa

SEQ ID NO: 16355 - DNA, 15 bp, Homo sapiens
taagacagtatagta

SEQ ID NO: 16356 - DNA, 15 bp, Homo sapiens
ctaagacagtatagt

SEQ ID NO: 16357 - DNA, 15 bp, Homo sapiens
actaagacagtatag

SEQ ID NO: 16358 - DNA, 15 bp, Homo sapiens
aactaagacagtata

SEQ ID NO: 16359 - DNA, 15 bp, Homo sapiens
aaactaagacagtat

SEQ ID NO: 16360 - DNA, 15 bp, Homo sapiens
aaaactaagacagta

SEQ ID NO: 16361 - DNA, 15 bp, Homo sapiens
taaaactaagacagt

SEQ ID NO: 16362 - DNA, 15 bp, Homo sapiens
ttaaaactaagacag

SEQ ID NO: 16363 - DNA, 15 bp, Homo sapiens
cttaaaactaagaca

SEQ ID NO: 16364 - DNA, 15 bp, Homo sapiens
tcttaaaactaagac

SEQ ID NO: 16365 - DNA, 15 bp, Homo sapiens
ttcttaaaactaaga

SEQ ID NO: 16366 - DNA, 15 bp, Homo sapiens
tttcttaaaactaag

SEQ ID NO: 16367 - DNA, 15 bp, Homo sapiens
atttcttaaaactaa

SEQ ID NO: 16368 - DNA, 15 bp, Homo sapiens
gatttcttaaaacta

SEQ ID NO: 16369 - DNA, 15 bp, Homo sapiens
ggatttcttaaaact

SEQ ID NO: 16370 - DNA, 15 bp, Homo sapiens
aggatttcttaaaac

SEQ ID NO: 16371 - DNA, 15 bp, Homo sapiens
gaggatttcttaaaa

SEQ ID NO: 16372 - DNA, 15 bp, Homo sapiens
ggaggatttcttaaa

SEQ ID NO: 16373 - DNA, 15 bp, Homo sapiens
gggaggatttcttaa

SEQ ID NO: 16374 - DNA, 15 bp, Homo sapiens
agggaggatttctta

SEQ ID NO: 16375 - DNA, 15 bp, Homo sapiens
aagggaggatttctt

SEQ ID NO: 16376 - DNA, 15 bp, Homo sapiens
caagggaggatttct

SEQ ID NO: 16377 - DNA, 15 bp, Homo sapiens
gcaagggaggatttc

SEQ ID NO: 16378 - DNA, 15 bp, Homo sapiens
ggcaagggaggattt

SEQ ID NO: 16379 - DNA, 15 bp, Homo sapiens
aggcaagggaggatt

SEQ ID NO: 16380 - DNA, 15 bp, Homo sapiens
caggcaagggaggat

SEQ ID NO: 16381 - DNA, 15 bp, Homo sapiens
tcaggcaagggagga

SEQ ID NO: 16382 - DNA, 15 bp, Homo sapiens
gtcaggcaagggagg

SEQ ID NO: 16383 - DNA, 15 bp, Homo sapiens
ggtcaggcaagggag

SEQ ID NO: 16384 - DNA, 15 bp, Homo sapiens
aggtcaggcaaggga

SEQ ID NO: 16385 - DNA, 15 bp, Homo sapiens
gaggtcaggcaaggg

SEQ ID NO: 16386 - DNA, 15 bp, Homo sapiens
ggaggtcaggcaagg

SEQ ID NO: 16387 - DNA, 15 bp, Homo sapiens
aggaggtcaggcaag

SEQ ID NO: 16388 - DNA, 15 bp, Homo sapiens
gaggaggtcaggcaa

SEQ ID NO: 16389 - DNA, 15 bp, Homo sapiens
agaggaggtcaggca

SEQ ID NO: 16390 - DNA, 15 bp, Homo sapiens
gagaggaggtcaggc

SEQ ID NO: 16391 - DNA, 15 bp, Homo sapiens
agagaggaggtcagg

SEQ ID NO: 16392 - DNA, 15 bp, Homo sapiens
gagagaggaggtcag

SEQ ID NO: 16393 - DNA, 15 bp, Homo sapiens
ggagagaggaggtca

SEQ ID NO: 16394 - DNA, 15 bp, Homo sapiens
tggagagaggaggtc

SEQ ID NO: 16395 - DNA, 15 bp, Homo sapiens
ttggagagaggaggt

SEQ ID NO: 16396 - DNA, 15 bp, Homo sapiens
tttggagagaggagg

SEQ ID NO: 16397 - DNA, 15 bp, Homo sapiens
ttttggagagaggag

SEQ ID NO: 16398 - DNA, 15 bp, Homo sapiens
tttttggagagagga

SEQ ID NO: 16399 - DNA, 15 bp, Homo sapiens
atttttggagagagg

SEQ ID NO: 16400 - DNA, 15 bp, Homo sapiens
catttttggagagag

SEQ ID NO: 16401 - DNA, 15 bp, Homo sapiens
gcatttttggagaga

SEQ ID NO: 16402 - DNA, 15 bp, Homo sapiens
tgcatttttggagag

SEQ ID NO: 16403 - DNA, 15 bp, Homo sapiens
ctgcatttttggaga

SEQ ID NO: 16404 - DNA, 15 bp, Homo sapiens
tctgcatttttggag

SEQ ID NO: 16405 - DNA, 15 bp, Homo sapiens
ctctgcatttttgga

SEQ ID NO: 16406 - DNA, 15 bp, Homo sapiens
cctctgcatttttgg

SEQ ID NO: 16407 - DNA, 15 bp, Homo sapiens
gcctctgcatttttg

SEQ ID NO: 16408 - DNA, 15 bp, Homo sapiens
tgcctctgcattttt

SEQ ID NO: 16409 - DNA, 15 bp, Homo sapiens
atgcctctgcatttt

SEQ ID NO: 16410 - DNA, 15 bp, Homo sapiens
catgcctctgcattt

SEQ ID NO: 16411 - DNA, 15 bp, Homo sapiens
acatgcctctgcatt

SEQ ID NO: 16412 - DNA, 15 bp, Homo sapiens
gacatgcctctgcat

SEQ ID NO: 16413 - DNA, 15 bp, Homo sapiens
tgacatgcctctgca

SEQ ID NO: 16414 - DNA, 15 bp, Homo sapiens
ttgacatgcctctgc

SEQ ID NO: 16415 - DNA, 15 bp, Homo sapiens
tttgacatgcctctg

SEQ ID NO: 16416 - DNA, 15 bp, Homo sapiens
ttttgacatgcctct

SEQ ID NO: 16417 - DNA, 15 bp, Homo sapiens
tttttgacatgcctc

SEQ ID NO: 16418 - DNA, 15 bp, Homo sapiens
gtttttgacatgcct

SEQ ID NO: 16419 - DNA, 15 bp, Homo sapiens
tgtttttgacatgcc

SEQ ID NO: 16420 - DNA, 15 bp, Homo sapiens
gtgtttttgacatgc

SEQ ID NO: 16421 - DNA, 15 bp, Homo sapiens
tgtgtttttgacatg

SEQ ID NO: 16422 - DNA, 15 bp, Homo sapiens
ctgtgtttttgacat

SEQ ID NO: 16423 - DNA, 15 bp, Homo sapiens
tctgtgtttttgaca

SEQ ID NO: 16424 - DNA, 15 bp, Homo sapiens
ctctgtgtttttgac

SEQ ID NO: 16425 - DNA, 15 bp, Homo sapiens
cctctgtgtttttga

SEQ ID NO: 16426 - DNA, 15 bp, Homo sapiens
ccctctgtgtttttg

SEQ ID NO: 16427 - DNA, 15 bp, Homo sapiens
accctctgtgttttt

SEQ ID NO: 16428 - DNA, 15 bp, Homo sapiens
gaccctctgtgtttt

SEQ ID NO: 16429 - DNA, 15 bp, Homo sapiens
cgaccctctgtgttt

SEQ ID NO: 16430 - DNA, 15 bp, Homo sapiens
acgaccctctgtgtt

SEQ ID NO: 16431 - DNA, 15 bp, Homo sapiens
gacgaccctctgtgt

SEQ ID NO: 16432 - DNA, 15 bp, Homo sapiens
tgacgaccctctgtg

SEQ ID NO: 16433 - DNA, 15 bp, Homo sapiens
atgacgaccctctgt

SEQ ID NO: 16434 - DNA, 15 bp, Homo sapiens
tatgacgaccctctg

SEQ ID NO: 16435 - DNA, 15 bp, Homo sapiens
ttatgacgaccctct

SEQ ID NO: 16436 - DNA, 15 bp, Homo sapiens
tttatgacgaccctc

SEQ ID NO: 16437 - DNA, 15 bp, Homo sapiens
ctttatgacgaccct

SEQ ID NO: 16438 - DNA, 15 bp, Homo sapiens
actttatgacgaccc

SEQ ID NO: 16439 - DNA, 15 bp, Homo sapiens
aactttatgacgacc

SEQ ID NO: 16440 - DNA, 15 bp, Homo sapiens
aaactttatgacgac

SEQ ID NO: 16441 - DNA, 15 bp, Homo sapiens
gaaactttatgacga

SEQ ID NO: 16442 - DNA, 15 bp, Homo sapiens
ggaaactttatgacg

SEQ ID NO: 16443 - DNA, 15 bp, Homo sapiens
cggaaactttatgac

SEQ ID NO: 16444 - DNA, 15 bp, Homo sapiens
acggaaactttatga

SEQ ID NO: 16445 - DNA, 15 bp, Homo sapiens
gacggaaactttatg

SEQ ID NO: 16446 - DNA, 15 bp, Homo sapiens
tgacggaaactttat

SEQ ID NO: 16447 - DNA, 15 bp, Homo sapiens
ctgacggaaacttta

SEQ ID NO: 16448 - DNA, 15 bp, Homo sapiens
tctgacggaaacttt

SEQ ID NO: 16449 - DNA, 15 bp, Homo sapiens
gtctgacggaaactt

SEQ ID NO: 16450 - DNA, 15 bp, Homo sapiens
ggtctgacggaaact

SEQ ID NO: 16451 - DNA, 15 bp, Homo sapiens
tggtctgacggaaac

SEQ ID NO: 16452 - DNA, 15 bp, Homo sapiens
ttggtctgacggaaa

SEQ ID NO: 16453 - DNA, 15 bp, Homo sapiens
tttggtctgacggaa

SEQ ID NO: 16454 - DNA, 15 bp, Homo sapiens
ctttggtctgacgga

SEQ ID NO: 16455 - DNA, 15 bp, Homo sapiens
cctttggtctgacgg

SEQ ID NO: 16456 - DNA, 15 bp, Homo sapiens
tcctttggtctgacg

SEQ ID NO: 16457 - DNA, 15 bp, Homo sapiens
ttcctttggtctgac

SEQ ID NO: 16458 - DNA, 15 bp, Homo sapiens
gttcctttggtctga

SEQ ID NO: 16459 - DNA, 15 bp, Homo sapiens
ggttcctttggtctg

SEQ ID NO: 16460 - DNA, 15 bp, Homo sapiens
tggttcctttggtct

SEQ ID NO: 16461 - DNA, 15 bp, Homo sapiens
ttggttcctttggtc

SEQ ID NO: 16462 - DNA, 15 bp, Homo sapiens
cttggttcctttggt

SEQ ID NO: 16463 - DNA, 15 bp, Homo sapiens
tcttggttcctttgg

SEQ ID NO: 16464 - DNA, 15 bp, Homo sapiens
atcttggttcctttg

SEQ ID NO: 16465 - DNA, 15 bp, Homo sapiens
catcttggttccttt

SEQ ID NO: 16466 - DNA, 15 bp, Homo sapiens
tcatcttggttcctt

SEQ ID NO: 16467 - DNA, 15 bp, Homo sapiens
ttcatcttggttcct

SEQ ID NO: 16468 - DNA, 15 bp, Homo sapiens
tttcatcttggttcc

SEQ ID NO: 16469 - DNA, 15 bp, Homo sapiens
ctttcatcttggttc

SEQ ID NO: 16470 - DNA, 15 bp, Homo sapiens
gctttcatcttggtt

SEQ ID NO: 16471 - DNA, 15 bp, Homo sapiens
tgctttcatcttggt

SEQ ID NO: 16472 - DNA, 15 bp, Homo sapiens
atgctttcatcttgg

SEQ ID NO: 16473 - DNA, 15 bp, Homo sapiens
catgctttcatcttg

SEQ ID NO: 16474 - DNA, 15 bp, Homo sapiens
acatgctttcatctt

SEQ ID NO: 16475 - DNA, 15 bp, Homo sapiens
aacatgctttcatct

SEQ ID NO: 16476 - DNA, 15 bp, Homo sapiens
aaacatgctttcatc

SEQ ID NO: 16477 - DNA, 15 bp, Homo sapiens
taaacatgctttcat

SEQ ID NO: 16478 - DNA, 15 bp, Homo sapiens
ttaaacatgctttca

SEQ ID NO: 16479 - DNA, 15 bp, Homo sapiens
cttaaacatgctttc

SEQ ID NO: 16480 - DNA, 15 bp, Homo sapiens
tcttaaacatgcttt

SEQ ID NO: 16481 - DNA, 15 bp, Homo sapiens
ctcttaaacatgctt

SEQ ID NO: 16482 - DNA, 15 bp, Homo sapiens
gctcttaaacatgct

SEQ ID NO: 16483 - DNA, 15 bp, Homo sapiens
agctcttaaacatgc

SEQ ID NO: 16484 - DNA, 15 bp, Homo sapiens
tagctcttaaacatg

SEQ ID NO: 16485 - DNA, 15 bp, Homo sapiens
gtagctcttaaacat

SEQ ID NO: 16486 - DNA, 15 bp, Homo sapiens
agtagctcttaaaca

SEQ ID NO: 16487 - DNA, 15 bp, Homo sapiens
tagtagctcttaaac

SEQ ID NO: 16488 - DNA, 15 bp, Homo sapiens
ctagtagctcttaaa

SEQ ID NO: 16489 - DNA, 15 bp, Homo sapiens
cctagtagctcttaa

SEQ ID NO: 16490 - DNA, 15 bp, Homo sapiens
acctagtagctctta

SEQ ID NO: 16491 - DNA, 15 bp, Homo sapiens
aacctagtagctctt

SEQ ID NO: 16492 - DNA, 15 bp, Homo sapiens
gaacctagtagctct

SEQ ID NO: 16493 - DNA, 15 bp, Homo sapiens
agaacctagtagctc

SEQ ID NO: 16494 - DNA, 15 bp, Homo sapiens
cagaacctagtagct

SEQ ID NO: 16495 - DNA, 15 bp, Homo sapiens
ccagaacctagtagc

SEQ ID NO: 16496 - DNA, 15 bp, Homo sapiens
cccagaacctagtag

SEQ ID NO: 16497 - DNA, 15 bp, Homo sapiens
tcccagaacctagta

SEQ ID NO: 16498 - DNA, 15 bp, Homo sapiens
ctcccagaacctagt

SEQ ID NO: 16499 - DNA, 15 bp, Homo sapiens
tctcccagaacctag

SEQ ID NO: 16500 - DNA, 15 bp, Homo sapiens
atctcccagaaccta

SEQ ID NO: 16501 - DNA, 15 bp, Homo sapiens
aatctcccagaacct

SEQ ID NO: 16502 - DNA, 15 bp, Homo sapiens
aaatctcccagaacc

SEQ ID NO: 16503 - DNA, 15 bp, Homo sapiens
gaaatctcccagaac

SEQ ID NO: 16504 - DNA, 15 bp, Homo sapiens
tgaaatctcccagaa

SEQ ID NO: 16505 - DNA, 15 bp, Homo sapiens
ttgaaatctcccaga

SEQ ID NO: 16506 - DNA, 15 bp, Homo sapiens
tttgaaatctcccag

SEQ ID NO: 16507 - DNA, 15 bp, Homo sapiens
ttttgaaatctccca

SEQ ID NO: 16508 - DNA, 15 bp, Homo sapiens
attttgaaatctccc

SEQ ID NO: 16509 - DNA, 15 bp, Homo sapiens
gattttgaaatctcc

SEQ ID NO: 16510 - DNA, 15 bp, Homo sapiens
tgattttgaaatctc

SEQ ID NO: 16511 - DNA, 15 bp, Homo sapiens
ctgattttgaaatct

SEQ ID NO: 16512 - DNA, 15 bp, Homo sapiens
cctgattttgaaatc

SEQ ID NO: 16513 - DNA, 15 bp, Homo sapiens
tcctgattttgaaat

SEQ ID NO: 16514 - DNA, 15 bp, Homo sapiens
gtcctgattttgaaa

SEQ ID NO: 16515 - DNA, 15 bp, Homo sapiens
tgtcctgattttgaa

SEQ ID NO: 16516 - DNA, 15 bp, Homo sapiens
atgtcctgattttga

SEQ ID NO: 16517 - DNA, 15 bp, Homo sapiens
aatgtcctgattttg

SEQ ID NO: 16518 - DNA, 15 bp, Homo sapiens
taatgtcctgatttt

SEQ ID NO: 16519 - DNA, 15 bp, Homo sapiens
gtaatgtcctgattt

SEQ ID NO: 16520 - DNA, 15 bp, Homo sapiens
agtaatgtcctgatt

SEQ ID NO: 16521 - DNA, 15 bp, Homo sapiens
tagtaatgtcctgat

SEQ ID NO: 16522 - DNA, 15 bp, Homo sapiens
gtagtaatgtcctga

SEQ ID NO: 16523 - DNA, 15 bp, Homo sapiens
ggtagtaatgtcctg

SEQ ID NO: 16524 - DNA, 15 bp, Homo sapiens
tggtagtaatgtcct

SEQ ID NO: 16525 - DNA, 15 bp, Homo sapiens
atggtagtaatgtcc

SEQ ID NO: 16526 - DNA, 15 bp, Homo sapiens
catggtagtaatgtc

SEQ ID NO: 16527 - DNA, 15 bp, Homo sapiens
tcatggtagtaatgt

SEQ ID NO: 16528 - DNA, 15 bp, Homo sapiens
gtcatggtagtaatg

SEQ ID NO: 16529 - DNA, 15 bp, Homo sapiens
tgtcatggtagtaat

SEQ ID NO: 16530 - DNA, 15 bp, Homo sapiens
ttgtcatggtagtaa

SEQ ID NO: 16531 - DNA, 15 bp, Homo sapiens
gttgtcatggtagta

SEQ ID NO: 16532 - DNA, 15 bp, Homo sapiens
ggttgtcatggtagt

SEQ ID NO: 16533 - DNA, 15 bp, Homo sapiens
tggttgtcatggtag

SEQ ID NO: 16534 - DNA, 15 bp, Homo sapiens
ttggttgtcatggta

SEQ ID NO: 16535 - DNA, 15 bp, Homo sapiens
attggttgtcatggt

SEQ ID NO: 16536 - DNA, 15 bp, Homo sapiens
cattggttgtcatgg

SEQ ID NO: 16537 - DNA, 15 bp, Homo sapiens
tcattggttgtcatg

SEQ ID NO: 16538 - DNA, 15 bp, Homo sapiens
ttcattggttgtcat

SEQ ID NO: 16539 - DNA, 15 bp, Homo sapiens
tttcattggttgtca

SEQ ID NO: 16540 - DNA, 15 bp, Homo sapiens
ttttcattggttgtc

SEQ ID NO: 16541 - DNA, 15 bp, Homo sapiens
cttttcattggttgt

SEQ ID NO: 16542 - DNA, 15 bp, Homo sapiens
acttttcattggttg

SEQ ID NO: 16543 - DNA, 15 bp, Homo sapiens
aacttttcattggtt

SEQ ID NO: 16544 - DNA, 15 bp, Homo sapiens
gaacttttcattggt

SEQ ID NO: 16545 - DNA, 15 bp, Homo sapiens
agaacttttcattgg

SEQ ID NO: 16546 - DNA, 15 bp, Homo sapiens
aagaacttttcattg

SEQ ID NO: 16547 - DNA, 15 bp, Homo sapiens
aaagaacttttcatt

SEQ ID NO: 16548 - DNA, 15 bp, Homo sapiens
gaaagaacttttcat

SEQ ID NO: 16549 - DNA, 15 bp, Homo sapiens
tgaaagaacttttca

SEQ ID NO: 16550 - DNA, 15 bp, Homo sapiens
ttgaaagaacttttc

SEQ ID NO: 16551 - DNA, 15 bp, Homo sapiens
cttgaaagaactttt

SEQ ID NO: 16552 - DNA, 15 bp, Homo sapiens
acttgaaagaacttt

SEQ ID NO: 16553 - DNA, 15 bp, Homo sapiens
cacttgaaagaactt

SEQ ID NO: 16554 - DNA, 15 bp, Homo sapiens
tcacttgaaagaact

SEQ ID NO: 16555 - DNA, 15 bp, Homo sapiens
ttcacttgaaagaac

SEQ ID NO: 16556 - DNA, 15 bp, Homo sapiens
gttcacttgaaagaa

SEQ ID NO: 16557 - DNA, 15 bp, Homo sapiens
ggttcacttgaaaga

SEQ ID NO: 16558 - DNA, 15 bp, Homo sapiens
aggttcacttgaaag

SEQ ID NO: 16559 - DNA, 15 bp, Homo sapiens
aaggttcacttgaaa

SEQ ID NO: 16560 - DNA, 15 bp, Homo sapiens
aaaggttcacttgaa

SEQ ID NO: 16561 - DNA, 15 bp, Homo sapiens
caaaggttcacttga

SEQ ID NO: 16562 - DNA, 15 bp, Homo sapiens
ccaaaggttcacttg

SEQ ID NO: 16563 - DNA, 15 bp, Homo sapiens
cccaaaggttcactt

SEQ ID NO: 16564 - DNA, 15 bp, Homo sapiens
ccccaaaggttcact

SEQ ID NO: 16565 - DNA, 15 bp, Homo sapiens
tccccaaaggttcac

SEQ ID NO: 16566 - DNA, 15 bp, Homo sapiens
ttccccaaaggttca

SEQ ID NO: 16567 - DNA, 15 bp, Homo sapiens
tttccccaaaggttc

SEQ ID NO: 16568 - DNA, 15 bp, Homo sapiens
ttttccccaaaggtt

SEQ ID NO: 16569 - DNA, 15 bp, Homo sapiens
gttttccccaaaggt

SEQ ID NO: 16570 - DNA, 15 bp, Homo sapiens
agttttccccaaagg

SEQ ID NO: 16571 - DNA, 15 bp, Homo sapiens
tagttttccccaaag

SEQ ID NO: 16572 - DNA, 15 bp, Homo sapiens
atagttttccccaaa

SEQ ID NO: 16573 - DNA, 15 bp, Homo sapiens
tatagttttccccaa

SEQ ID NO: 16574 - DNA, 15 bp, Homo sapiens
atatagttttcccca

SEQ ID NO: 16575 - DNA, 15 bp, Homo sapiens
tatatagttttcccc

SEQ ID NO: 16576 - DNA, 15 bp, Homo sapiens
ttatatagttttccc

SEQ ID NO: 16577 - DNA, 15 bp, Homo sapiens
gttatatagttttcc

SEQ ID NO: 16578 - DNA, 15 bp, Homo sapiens
cgttatatagttttc

SEQ ID NO: 16579 - DNA, 15 bp, Homo sapiens
acgttatatagtttt

SEQ ID NO: 16580 - DNA, 15 bp, Homo sapiens
aacgttatatagttt

SEQ ID NO: 16581 - DNA, 15 bp, Homo sapiens
gaacgttatatagtt

SEQ ID NO: 16582 - DNA, 15 bp, Homo sapiens
ggaacgttatatagt

SEQ ID NO: 16583 - DNA, 15 bp, Homo sapiens
aggaacgttatatag

SEQ ID NO: 16584 - DNA, 15 bp, Homo sapiens
aaggaacgttatata

SEQ ID NO: 16585 - DNA, 15 bp, Homo sapiens
taaggaacgttatat

SEQ ID NO: 16586 - DNA, 15 bp, Homo sapiens
gtaaggaacgttata

SEQ ID NO: 16587 - DNA, 15 bp, Homo sapiens
agtaaggaacgttat

SEQ ID NO: 16588 - DNA, 15 bp, Homo sapiens
gagtaaggaacgtta

SEQ ID NO: 16589 - DNA, 15 bp, Homo sapiens
agagtaaggaacgtt

SEQ ID NO: 16590 - DNA, 15 bp, Homo sapiens
gagagtaaggaacgt

SEQ ID NO: 16591 - DNA, 15 bp, Homo sapiens
agagagtaaggaacg

SEQ ID NO: 16592 - DNA, 15 bp, Homo sapiens
tagagagtaaggaac

SEQ ID NO: 16593 - DNA, 15 bp, Homo sapiens
ctagagagtaaggaa

SEQ ID NO: 16594 - DNA, 15 bp, Homo sapiens
cctagagagtaagga

SEQ ID NO: 16595 - DNA, 15 bp, Homo sapiens
gcctagagagtaagg

SEQ ID NO: 16596 - DNA, 15 bp, Homo sapiens
agcctagagagtaag

SEQ ID NO: 16597 - DNA, 15 bp, Homo sapiens
gagcctagagagtaa

SEQ ID NO: 16598 - DNA, 15 bp, Homo sapiens
agagcctagagagta

SEQ ID NO: 16599 - DNA, 15 bp, Homo sapiens
gagagcctagagagt

SEQ ID NO: 16600 - DNA, 15 bp, Homo sapiens
agagagcctagagag

SEQ ID NO: 16601 - DNA, 15 bp, Homo sapiens
cagagagcctagaga

SEQ ID NO: 16602 - DNA, 15 bp, Homo sapiens
ccagagagcctagag

SEQ ID NO: 16603 - DNA, 15 bp, Homo sapiens
tccagagagcctaga

SEQ ID NO: 16604 - DNA, 15 bp, Homo sapiens
ttccagagagcctag

SEQ ID NO: 16605 - DNA, 15 bp, Homo sapiens
tttccagagagccta

SEQ ID NO: 16606 - DNA, 15 bp, Homo sapiens
atttccagagagcct

SEQ ID NO: 16607 - DNA, 15 bp, Homo sapiens
tatttccagagagcc

SEQ ID NO: 16608 - DNA, 15 bp, Homo sapiens
ttatttccagagagc

SEQ ID NO: 16609 - DNA, 15 bp, Homo sapiens
tttatttccagagag

SEQ ID NO: 16610 - DNA, 15 bp, Homo sapiens
gtttatttccagaga

SEQ ID NO: 16611 - DNA, 15 bp, Homo sapiens
agtttatttccagag

SEQ ID NO: 16612 - DNA, 15 bp, Homo sapiens
aagtttatttccaga

SEQ ID NO: 16613 - DNA, 15 bp, Homo sapiens
aaagtttatttccag

SEQ ID NO: 16614 - DNA, 15 bp, Homo sapiens
aaaagtttatttcca

SEQ ID NO: 16615 - DNA, 15 bp, Homo sapiens
taaaagtttatttcc

SEQ ID NO: 16616 - DNA, 15 bp, Homo sapiens
gtaaaagtttatttc

SEQ ID NO: 16617 - DNA, 15 bp, Homo sapiens
agtaaaagtttattt

SEQ ID NO: 16618 - DNA, 15 bp, Homo sapiens
aagtaaaagtttatt

SEQ ID NO: 16619 - DNA, 15 bp, Homo sapiens
aaagtaaaagtttat

SEQ ID NO: 16620 - DNA, 15 bp, Homo sapiens
taaagtaaaagttta

SEQ ID NO: 16621 - DNA, 15 bp, Homo sapiens
ataaagtaaaagttt

SEQ ID NO: 16622 - DNA, 15 bp, Homo sapiens
aataaagtaaaagtt

SEQ ID NO: 16623 - DNA, 15 bp, Homo sapiens
taataaagtaaaagt

SEQ ID NO: 16624 - DNA, 15 bp, Homo sapiens
ataataaagtaaaag

SEQ ID NO: 16625 - DNA, 15 bp, Homo sapiens
cataataaagtaaaa

SEQ ID NO: 16626 - DNA, 15 bp, Homo sapiens
ccataataaagtaaa

SEQ ID NO: 16627 - DNA, 15 bp, Homo sapiens
gccataataaagtaa

SEQ ID NO: 16628 - DNA, 15 bp, Homo sapiens
agccataataaagta

SEQ ID NO: 16629 - DNA, 15 bp, Homo sapiens
cagccataataaagt

SEQ ID NO: 16630 - DNA, 15 bp, Homo sapiens
acagccataataaag

SEQ ID NO: 16631 - DNA, 15 bp, Homo sapiens
gacagccataataaa

SEQ ID NO: 16632 - DNA, 15 bp, Homo sapiens
tgacagccataataa

SEQ ID NO: 16633 - DNA, 15 bp, Homo sapiens
gtgacagccataata

SEQ ID NO: 16634 - DNA, 15 bp, Homo sapiens
agtgacagccataat

SEQ ID NO: 16635 - DNA, 15 bp, Homo sapiens
tagtgacagccataa

SEQ ID NO: 16636 - DNA, 15 bp, Homo sapiens
ttagtgacagccata

SEQ ID NO: 16637 - DNA, 15 bp, Homo sapiens
tttagtgacagccat

SEQ ID NO: 16638 - DNA, 15 bp, Homo sapiens
ctttagtgacagcca

SEQ ID NO: 16639 - DNA, 15 bp, Homo sapiens
gctttagtgacagcc

SEQ ID NO: 16640 - DNA, 15 bp, Homo sapiens
agctttagtgacagc

SEQ ID NO: 16641 - DNA, 15 bp, Homo sapiens
aagctttagtgacag

SEQ ID NO: 16642 - DNA, 15 bp, Homo sapiens
caagctttagtgaca

SEQ ID NO: 16643 - DNA, 15 bp, Homo sapiens
acaagctttagtgac

SEQ ID NO: 16644 - DNA, 15 bp, Homo sapiens
tacaagctttagtga

SEQ ID NO: 16645 - DNA, 15 bp, Homo sapiens
ttacaagctttagtg

SEQ ID NO: 16646 - DNA, 15 bp, Homo sapiens
tttacaagctttagt

SEQ ID NO: 16647 - DNA, 15 bp, Homo sapiens
atttacaagctttag

SEQ ID NO: 16648 - DNA, 15 bp, Homo sapiens
aatttacaagcttta

SEQ ID NO: 16649 - DNA, 15 bp, Homo sapiens
aaatttacaagcttt

SEQ ID NO: 16650 - DNA, 15 bp, Homo sapiens
taaatttacaagctt

SEQ ID NO: 16651 - DNA, 15 bp, Homo sapiens
gtaaatttacaagct

SEQ ID NO: 16652 - DNA, 15 bp, Homo sapiens
agtaaatttacaagc

SEQ ID NO: 16653 - DNA, 15 bp, Homo sapiens
aagtaaatttacaag

SEQ ID NO: 16654 - DNA, 15 bp, Homo sapiens
aaagtaaatttacaa

SEQ ID NO: 16655 - DNA, 15 bp, Homo sapiens
caaagtaaatttaca

SEQ ID NO: 16656 - DNA, 15 bp, Homo sapiens
gcaaagtaaatttac

SEQ ID NO: 16657 - DNA, 15 bp, Homo sapiens
agcaaagtaaattta

SEQ ID NO: 16658 - DNA, 15 bp, Homo sapiens
aagcaaagtaaattt

SEQ ID NO: 16659 - DNA, 15 bp, Homo sapiens
gaagcaaagtaaatt

SEQ ID NO: 16660 - DNA, 15 bp, Homo sapiens
ggaagcaaagtaaat

SEQ ID NO: 16661 - DNA, 15 bp, Homo sapiens
aggaagcaaagtaaa

SEQ ID NO: 16662 - DNA, 15 bp, Homo sapiens
aaggaagcaaagtaa

SEQ ID NO: 16663 - DNA, 15 bp, Homo sapiens
gaaggaagcaaagta

SEQ ID NO: 16664 - DNA, 15 bp, Homo sapiens
ggaaggaagcaaagt

SEQ ID NO: 16665 - DNA, 15 bp, Homo sapiens
tggaaggaagcaaag

SEQ ID NO: 16666 - DNA, 15 bp, Homo sapiens
ttggaaggaagcaaa

SEQ ID NO: 16667 - DNA, 15 bp, Homo sapiens
attggaaggaagcaa

SEQ ID NO: 16668 - DNA, 15 bp, Homo sapiens
gattggaaggaagca

SEQ ID NO: 16669 - DNA, 15 bp, Homo sapiens
cgattggaaggaagc

SEQ ID NO: 16670 - DNA, 15 bp, Homo sapiens
acgattggaaggaag

SEQ ID NO: 16671 - DNA, 15 bp, Homo sapiens
aacgattggaaggaa

SEQ ID NO: 16672 - DNA, 15 bp, Homo sapiens
gaacgattggaagga

SEQ ID NO: 16673 - DNA, 15 bp, Homo sapiens
agaacgattggaagg

SEQ ID NO: 16674 - DNA, 15 bp, Homo sapiens
gagaacgattggaag

SEQ ID NO: 16675 - DNA, 15 bp, Homo sapiens
ggagaacgattggaa

SEQ ID NO: 16676 - DNA, 15 bp, Homo sapiens
aggagaacgattgga

SEQ ID NO: 16677 - DNA, 15 bp, Homo sapiens
caggagaacgattgg

SEQ ID NO: 16678 - DNA, 15 bp, Homo sapiens
acaggagaacgattg

SEQ ID NO: 16679 - DNA, 15 bp, Homo sapiens
gacaggagaacgatt

SEQ ID NO: 16680 - DNA, 15 bp, Homo sapiens
ggacaggagaacgat

SEQ ID NO: 16681 - DNA, 15 bp, Homo sapiens
gggacaggagaacga

SEQ ID NO: 16682 - DNA, 15 bp, Homo sapiens
tgggacaggagaacg

SEQ ID NO: 16683 - DNA, 15 bp, Homo sapiens
gtgggacaggagaac

SEQ ID NO: 16684 - DNA, 15 bp, Homo sapiens
tgtgggacaggagaa

SEQ ID NO: 16685 - DNA, 15 bp, Homo sapiens
gtgtgggacaggaga

SEQ ID NO: 16686 - DNA, 15 bp, Homo sapiens
agtgtgggacaggag

SEQ ID NO: 16687 - DNA, 15 bp, Homo sapiens
gagtgtgggacagga

SEQ ID NO: 16688 - DNA, 15 bp, Homo sapiens
tgagtgtgggacagg

SEQ ID NO: 16689 - DNA, 15 bp, Homo sapiens
ctgagtgtgggacag

SEQ ID NO: 16690 - DNA, 15 bp, Homo sapiens
gctgagtgtgggaca

SEQ ID NO: 16691 - DNA, 15 bp, Homo sapiens
ggctgagtgtgggac

SEQ ID NO: 16692 - DNA, 15 bp, Homo sapiens
gggctgagtgtggga

SEQ ID NO: 16693 - DNA, 15 bp, Homo sapiens
ggggctgagtgtggg

SEQ ID NO: 16694 - DNA, 15 bp, Homo sapiens
gggggctgagtgtgg

SEQ ID NO: 16695 - DNA, 15 bp, Homo sapiens
agggggctgagtgtg

SEQ ID NO: 16696 - DNA, 15 bp, Homo sapiens
tagggggctgagtgt

SEQ ID NO: 16697 - DNA, 15 bp, Homo sapiens
ttagggggctgagtg

SEQ ID NO: 16698 - DNA, 15 bp, Homo sapiens
gttagggggctgagt

SEQ ID NO: 16699 - DNA, 15 bp, Homo sapiens
agttagggggctgag

SEQ ID NO: 16700 - DNA, 15 bp, Homo sapiens
gagttagggggctga

SEQ ID NO: 16701 - DNA, 15 bp, Homo sapiens
tgagttagggggctg

SEQ ID NO: 16702 - DNA, 15 bp, Homo sapiens
gtgagttagggggct

SEQ ID NO: 16703 - DNA, 15 bp, Homo sapiens
agtgagttagggggc

SEQ ID NO: 16704 - DNA, 15 bp, Homo sapiens
aagtgagttaggggg

SEQ ID NO: 16705 - DNA, 15 bp, Homo sapiens
taagtgagttagggg

SEQ ID NO: 16706 - DNA, 15 bp, Homo sapiens
ttaagtgagttaggg

SEQ ID NO: 16707 - DNA, 15 bp, Homo sapiens
attaagtgagttagg

SEQ ID NO: 16708 - DNA, 15 bp, Homo sapiens
cattaagtgagttag

SEQ ID NO: 16709 - DNA, 15 bp, Homo sapiens
gcattaagtgagtta

SEQ ID NO: 16710 - DNA, 15 bp, Homo sapiens
tgcattaagtgagtt

SEQ ID NO: 16711 - DNA, 15 bp, Homo sapiens
ttgcattaagtgagt

SEQ ID NO: 16712 - DNA, 15 bp, Homo sapiens
gttgcattaagtgag

SEQ ID NO: 16713 - DNA, 15 bp, Homo sapiens
ggttgcattaagtga

SEQ ID NO: 16714 - DNA, 15 bp, Homo sapiens
gggttgcattaagtg

SEQ ID NO: 16715 - DNA, 15 bp, Homo sapiens
tgggttgcattaagt

SEQ ID NO: 16716 - DNA, 15 bp, Homo sapiens
atgggttgcattaag

SEQ ID NO: 16717 - DNA, 15 bp, Homo sapiens
gatgggttgcattaa

SEQ ID NO: 16718 - DNA, 15 bp, Homo sapiens
ggatgggttgcatta

SEQ ID NO: 16719 - DNA, 15 bp, Homo sapiens
aggatgggttgcatt

SEQ ID NO: 16720 - DNA, 15 bp, Homo sapiens
gaggatgggttgcat

SEQ ID NO: 16721 - DNA, 15 bp, Homo sapiens
tgaggatgggttgca

SEQ ID NO: 16722 - DNA, 15 bp, Homo sapiens
ttgaggatgggttgc

SEQ ID NO: 16723 - DNA, 15 bp, Homo sapiens
tttgaggatgggttg

SEQ ID NO: 16724 - DNA, 15 bp, Homo sapiens
gtttgaggatgggtt

SEQ ID NO: 16725 - DNA, 15 bp, Homo sapiens
tgtttgaggatgggt

SEQ ID NO: 16726 - DNA, 15 bp, Homo sapiens
atgtttgaggatggg

SEQ ID NO: 16727 - DNA, 15 bp, Homo sapiens
gatgtttgaggatgg

SEQ ID NO: 16728 - DNA, 15 bp, Homo sapiens
tgatgtttgaggatg

SEQ ID NO: 16729 - DNA, 15 bp, Homo sapiens
ttgatgtttgaggat

SEQ ID NO: 16730 - DNA, 15 bp, Homo sapiens
attgatgtttgagga

SEQ ID NO: 16731 - DNA, 15 bp, Homo sapiens
gattgatgtttgagg

SEQ ID NO: 16732 - DNA, 15 bp, Homo sapiens
agattgatgtttgag

SEQ ID NO: 16733 - DNA, 15 bp, Homo sapiens
tagattgatgtttga

SEQ ID NO: 16734 - DNA, 15 bp, Homo sapiens
atagattgatgtttg

SEQ ID NO: 16735 - DNA, 15 bp, Homo sapiens
tatagattgatgttt

SEQ ID NO: 16736 - DNA, 15 bp, Homo sapiens
ttatagattgatgtt

SEQ ID NO: 16737 - DNA, 15 bp, Homo sapiens
tttatagattgatgt

SEQ ID NO: 16738 - DNA, 15 bp, Homo sapiens
atttatagattgatg

SEQ ID NO: 16739 - DNA, 15 bp, Homo sapiens
catttatagattgat

SEQ ID NO: 16740 - DNA, 15 bp, Homo sapiens
tcatttatagattga

SEQ ID NO: 16741 - DNA, 15 bp, Homo sapiens
ctcatttatagattg

SEQ ID NO: 16742 - DNA, 15 bp, Homo sapiens
tctcatttatagatt

SEQ ID NO: 16743 - DNA, 15 bp, Homo sapiens
gtctcatttatagat

SEQ ID NO: 16744 - DNA, 15 bp, Homo sapiens
tgtctcatttataga

SEQ ID NO: 16745 - DNA, 15 bp, Homo sapiens
atgtctcatttatag

SEQ ID NO: 16746 - DNA, 15 bp, Homo sapiens
gatgtctcatttata

SEQ ID NO: 16747 - DNA, 15 bp, Homo sapiens
tgatgtctcatttat

SEQ ID NO: 16748 - DNA, 15 bp, Homo sapiens
ctgatgtctcattta

SEQ ID NO: 16749 - DNA, 15 bp, Homo sapiens
cctgatgtctcattt

SEQ ID NO: 16750 - DNA, 15 bp, Homo sapiens
ccctgatgtctcatt

SEQ ID NO: 16751 - DNA, 15 bp, Homo sapiens
gccctgatgtctcat

SEQ ID NO: 16752 - DNA, 15 bp, Homo sapiens
tgccctgatgtctca

SEQ ID NO: 16753 - DNA, 15 bp, Homo sapiens
ttgccctgatgtctc

SEQ ID NO: 16754 - DNA, 15 bp, Homo sapiens
attgccctgatgtct

SEQ ID NO: 16755 - DNA, 15 bp, Homo sapiens
cattgccctgatgtc

SEQ ID NO: 16756 - DNA, 15 bp, Homo sapiens
tcattgccctgatgt

SEQ ID NO: 16757 - DNA, 15 bp, Homo sapiens
ctcattgccctgatg

SEQ ID NO: 16758 - DNA, 15 bp, Homo sapiens
gctcattgccctgat

SEQ ID NO: 16759 - DNA, 15 bp, Homo sapiens
ggctcattgccctga

SEQ ID NO: 16760 - DNA, 15 bp, Homo sapiens
tggctcattgccctg

SEQ ID NO: 16761 - DNA, 15 bp, Homo sapiens
gtggctcattgccct

SEQ ID NO: 16762 - DNA, 15 bp, Homo sapiens
agtggctcattgccc

SEQ ID NO: 16763 - DNA, 15 bp, Homo sapiens
aagtggctcattgcc

SEQ ID NO: 16764 - DNA, 15 bp, Homo sapiens
gaagtggctcattgc

SEQ ID NO: 16765 - DNA, 15 bp, Homo sapiens
agaagtggctcattg

SEQ ID NO: 16766 - DNA, 15 bp, Homo sapiens
aagaagtggctcatt

SEQ ID NO: 16767 - DNA, 15 bp, Homo sapiens
taagaagtggctcat

SEQ ID NO: 16768 - DNA, 15 bp, Homo sapiens
ctaagaagtggctca

SEQ ID NO: 16769 - DNA, 15 bp, Homo sapiens
gctaagaagtggctc

SEQ ID NO: 16770 - DNA, 15 bp, Homo sapiens
tgctaagaagtggct

SEQ ID NO: 16771 - DNA, 15 bp, Homo sapiens
atgctaagaagtggc

SEQ ID NO: 16772 - DNA, 15 bp, Homo sapiens
gatgctaagaagtgg

SEQ ID NO: 16773 - DNA, 15 bp, Homo sapiens
agatgctaagaagtg

SEQ ID NO: 16774 - DNA, 15 bp, Homo sapiens
tagatgctaagaagt

SEQ ID NO: 16775 - DNA, 15 bp, Homo sapiens
ctagatgctaagaag

SEQ ID NO: 16776 - DNA, 15 bp, Homo sapiens
actagatgctaagaa

SEQ ID NO: 16777 - DNA, 15 bp, Homo sapiens
tactagatgctaaga

SEQ ID NO: 16778 - DNA, 15 bp, Homo sapiens
atactagatgctaag

SEQ ID NO: 16779 - DNA, 15 bp, Homo sapiens
tatactagatgctaa

SEQ ID NO: 16780 - DNA, 15 bp, Homo sapiens
atatactagatgcta

SEQ ID NO: 16781 - DNA, 15 bp, Homo sapiens
aatatactagatgct

SEQ ID NO: 16782 - DNA, 15 bp, Homo sapiens
aaatatactagatgc

SEQ ID NO: 16783 - DNA, 15 bp, Homo sapiens
caaatatactagatg

SEQ ID NO: 16784 - DNA, 15 bp, Homo sapiens
tcaaatatactagat

SEQ ID NO: 16785 - DNA, 15 bp, Homo sapiens
atcaaatatactaga

SEQ ID NO: 16786 - DNA, 15 bp, Homo sapiens
tatcaaatatactag

SEQ ID NO: 16787 - DNA, 15 bp, Homo sapiens
ttatcaaatatacta

SEQ ID NO: 16788 - DNA, 15 bp, Homo sapiens
cttatcaaatatact

SEQ ID NO: 16789 - DNA, 15 bp, Homo sapiens
tcttatcaaatatac

SEQ ID NO: 16790 - DNA, 15 bp, Homo sapiens
atcttatcaaatata

SEQ ID NO: 16791 - DNA, 15 bp, Homo sapiens
aatcttatcaaatat

SEQ ID NO: 16792 - DNA, 15 bp, Homo sapiens
aaatcttatcaaata

SEQ ID NO: 16793 - DNA, 15 bp, Homo sapiens
caaatcttatcaaat

SEQ ID NO: 16794 - DNA, 15 bp, Homo sapiens
acaaatcttatcaaa

SEQ ID NO: 16795 - DNA, 15 bp, Homo sapiens
gacaaatcttatcaa

SEQ ID NO: 16796 - DNA, 15 bp, Homo sapiens
agacaaatcttatca

SEQ ID NO: 16797 - DNA, 15 bp, Homo sapiens
gagacaaatcttatc

SEQ ID NO: 16798 - DNA, 15 bp, Homo sapiens
tgagacaaatcttat

SEQ ID NO: 16799 - DNA, 15 bp, Homo sapiens
atgagacaaatctta

SEQ ID NO: 16800 - DNA, 15 bp, Homo sapiens
gatgagacaaatctt

SEQ ID NO: 16801 - DNA, 15 bp, Homo sapiens
tgatgagacaaatct

SEQ ID NO: 16802 - DNA, 15 bp, Homo sapiens
ttgatgagacaaatc

SEQ ID NO: 16803 - DNA, 15 bp, Homo sapiens
cttgatgagacaaat

SEQ ID NO: 16804 - DNA, 15 bp, Homo sapiens
tcttgatgagacaaa

SEQ ID NO: 16805 - DNA, 15 bp, Homo sapiens
ctcttgatgagacaa

SEQ ID NO: 16806 - DNA, 15 bp, Homo sapiens
cctcttgatgagaca

SEQ ID NO: 16807 - DNA, 15 bp, Homo sapiens
tcctcttgatgagac

SEQ ID NO: 16808 - DNA, 15 bp, Homo sapiens
atcctcttgatgaga

SEQ ID NO: 16809 - DNA, 15 bp, Homo sapiens
tatcctcttgatgag

SEQ ID NO: 16810 - DNA, 15 bp, Homo sapiens
ttatcctcttgatga

SEQ ID NO: 16811 - DNA, 15 bp, Homo sapiens
cttatcctcttgatg

SEQ ID NO: 16812 - DNA, 15 bp, Homo sapiens
acttatcctcttgat

SEQ ID NO: 16813 - DNA, 15 bp, Homo sapiens
cacttatcctcttga

SEQ ID NO: 16814 - DNA, 15 bp, Homo sapiens
gcacttatcctcttg

SEQ ID NO: 16815 - DNA, 15 bp, Homo sapiens
ggcacttatcctctt

SEQ ID NO: 16816 - DNA, 15 bp, Homo sapiens
gggcacttatcctct

SEQ ID NO: 16817 - DNA, 15 bp, Homo sapiens
agggcacttatcctc

SEQ ID NO: 16818 - DNA, 15 bp, Homo sapiens
tagggcacttatcct

SEQ ID NO: 16819 - DNA, 15 bp, Homo sapiens
ctagggcacttatcc

SEQ ID NO: 16820 - DNA, 15 bp, Homo sapiens
tctagggcacttatc

SEQ ID NO: 16821 - DNA, 15 bp, Homo sapiens
ctctagggcacttat

SEQ ID NO: 16822 - DNA, 15 bp, Homo sapiens
gctctagggcactta

SEQ ID NO: 16823 - DNA, 15 bp, Homo sapiens
agctctagggcactt

SEQ ID NO: 16824 - DNA, 15 bp, Homo sapiens
aagctctagggcact

SEQ ID NO: 16825 - DNA, 15 bp, Homo sapiens
gaagctctagggcac

SEQ ID NO: 16826 - DNA, 15 bp, Homo sapiens
agaagctctagggca

SEQ ID NO: 16827 - DNA, 15 bp, Homo sapiens
tagaagctctagggc

SEQ ID NO: 16828 - DNA, 15 bp, Homo sapiens
gtagaagctctaggg

SEQ ID NO: 16829 - DNA, 15 bp, Homo sapiens
agtagaagctctagg

SEQ ID NO: 16830 - DNA, 15 bp, Homo sapiens
aagtagaagctctag

SEQ ID NO: 16831 - DNA, 15 bp, Homo sapiens
caagtagaagctcta

SEQ ID NO: 16832 - DNA, 15 bp, Homo sapiens
tcaagtagaagctct

SEQ ID NO: 16833 - DNA, 15 bp, Homo sapiens
ttcaagtagaagctc

SEQ ID NO: 16834 - DNA, 15 bp, Homo sapiens
gttcaagtagaagct

SEQ ID NO: 16835 - DNA, 15 bp, Homo sapiens
agttcaagtagaagc

SEQ ID NO: 16836 - DNA, 15 bp, Homo sapiens
aagttcaagtagaag

SEQ ID NO: 16837 - DNA, 15 bp, Homo sapiens
taagttcaagtagaa

SEQ ID NO: 16838 - DNA, 15 bp, Homo sapiens
ttaagttcaagtaga

SEQ ID NO: 16839 - DNA, 15 bp, Homo sapiens
tttaagttcaagtag

SEQ ID NO: 16840 - DNA, 15 bp, Homo sapiens
atttaagttcaagta

SEQ ID NO: 16841 - DNA, 15 bp, Homo sapiens
tatttaagttcaagt

SEQ ID NO: 16842 - DNA, 15 bp, Homo sapiens
gtatttaagttcaag

SEQ ID NO: 16843 - DNA, 15 bp, Homo sapiens
agtatttaagttcaa

SEQ ID NO: 16844 - DNA, 15 bp, Homo sapiens
aagtatttaagttca

SEQ ID NO: 16845 - DNA, 15 bp, Homo sapiens
taagtatttaagttc

SEQ ID NO: 16846 - DNA, 15 bp, Homo sapiens
ttaagtatttaagtt

SEQ ID NO: 16847 - DNA, 15 bp, Homo sapiens
attaagtatttaagt

SEQ ID NO: 16848 - DNA, 15 bp, Homo sapiens
aattaagtatttaag

SEQ ID NO: 16849 - DNA, 15 bp, Homo sapiens
aaattaagtatttaa

SEQ ID NO: 16850 - DNA, 15 bp, Homo sapiens
taaattaagtattta

SEQ ID NO: 16851 - DNA, 15 bp, Homo sapiens
ttaaattaagtattt

SEQ ID NO: 16852 - DNA, 15 bp, Homo sapiens
tttaaattaagtatt

SEQ ID NO: 16853 - DNA, 15 bp, Homo sapiens
atttaaattaagtat

SEQ ID NO: 16854 - DNA, 15 bp, Homo sapiens
catttaaattaagta

SEQ ID NO: 16855 - DNA, 15 bp, Homo sapiens
tcatttaaattaagt

SEQ ID NO: 16856 - DNA, 15 bp, Homo sapiens
ttcatttaaattaag

SEQ ID NO: 16857 - DNA, 15 bp, Homo sapiens
tttcatttaaattaa

SEQ ID NO: 16858 - DNA, 15 bp, Homo sapiens
ctttcatttaaatta

SEQ ID NO: 16859 - DNA, 15 bp, Homo sapiens
gctttcatttaaatt

SEQ ID NO: 16860 - DNA, 15 bp, Homo sapiens
agctttcatttaaat

SEQ ID NO: 16861 - DNA, 15 bp, Homo sapiens
aagctttcatttaaa

SEQ ID NO: 16862 - DNA, 15 bp, Homo sapiens
gaagctttcatttaa

SEQ ID NO: 16863 - DNA, 15 bp, Homo sapiens
ggaagctttcattta

SEQ ID NO: 16864 - DNA, 15 bp, Homo sapiens
tggaagctttcattt

SEQ ID NO: 16865 - DNA, 15 bp, Homo sapiens
gtggaagctttcatt

SEQ ID NO: 16866 - DNA, 15 bp, Homo sapiens
tgtggaagctttcat

SEQ ID NO: 16867 - DNA, 15 bp, Homo sapiens
gtgtggaagctttca

SEQ ID NO: 16868 - DNA, 15 bp, Homo sapiens
agtgtggaagctttc

SEQ ID NO: 16869 - DNA, 15 bp, Homo sapiens
aagtgtggaagcttt

SEQ ID NO: 16870 - DNA, 15 bp, Homo sapiens
taagtgtggaagctt

SEQ ID NO: 16871 - DNA, 15 bp, Homo sapiens
ataagtgtggaagct

SEQ ID NO: 16872 - DNA, 15 bp, Homo sapiens
gataagtgtggaagc

SEQ ID NO: 16873 - DNA, 15 bp, Homo sapiens
agataagtgtggaag

SEQ ID NO: 16874 - DNA, 15 bp, Homo sapiens
cagataagtgtggaa

SEQ ID NO: 16875 - DNA, 15 bp, Homo sapiens
tcagataagtgtgga

SEQ ID NO: 16876 - DNA, 15 bp, Homo sapiens
gtcagataagtgtgg

SEQ ID NO: 16877 - DNA, 15 bp, Homo sapiens
ggtcagataagtgtg

SEQ ID NO: 16878 - DNA, 15 bp, Homo sapiens
tggtcagataagtgt

SEQ ID NO: 16879 - DNA, 15 bp, Homo sapiens
ctggtcagataagtg

SEQ ID NO: 16880 - DNA, 15 bp, Homo sapiens
tctggtcagataagt

SEQ ID NO: 16881 - DNA, 15 bp, Homo sapiens
atctggtcagataag

SEQ ID NO: 16882 - DNA, 15 bp, Homo sapiens
tatctggtcagataa

SEQ ID NO: 16883 - DNA, 15 bp, Homo sapiens
gtatctggtcagata

SEQ ID NO: 16884 - DNA, 15 bp, Homo sapiens
agtatctggtcagat

SEQ ID NO: 16885 - DNA, 15 bp, Homo sapiens
gagtatctggtcaga

SEQ ID NO: 16886 - DNA, 15 bp, Homo sapiens
tgagtatctggtcag

SEQ ID NO: 16887 - DNA, 15 bp, Homo sapiens
ttgagtatctggtca

SEQ ID NO: 16888 - DNA, 15 bp, Homo sapiens
tttgagtatctggtc

SEQ ID NO: 16889 - DNA, 15 bp, Homo sapiens
atttgagtatctggt

SEQ ID NO: 16890 - DNA, 15 bp, Homo sapiens
aatttgagtatctgg

SEQ ID NO: 16891 - DNA, 15 bp, Homo sapiens
aaatttgagtatctg

SEQ ID NO: 16892 - DNA, 15 bp, Homo sapiens
aaaatttgagtatct

SEQ ID NO: 16893 - DNA, 15 bp, Homo sapiens
aaaaatttgagtatc

SEQ ID NO: 16894 - DNA, 15 bp, Homo sapiens
gaaaaatttgagtat

SEQ ID NO: 16895 - DNA, 15 bp, Homo sapiens
agaaaaatttgagta

SEQ ID NO: 16896 - DNA, 15 bp, Homo sapiens
tagaaaaatttgagt

SEQ ID NO: 16897 - DNA, 15 bp, Homo sapiens
gtagaaaaatttgag

SEQ ID NO: 16898 - DNA, 15 bp, Homo sapiens
tgtagaaaaatttga

SEQ ID NO: 16899 - DNA, 15 bp, Homo sapiens
ctgtagaaaaatttg

SEQ ID NO: 16900 - DNA, 15 bp, Homo sapiens
tctgtagaaaaattt

SEQ ID NO: 16901 - DNA, 15 bp, Homo sapiens
ttctgtagaaaaatt

SEQ ID NO: 16902 - DNA, 15 bp, Homo sapiens
tttctgtagaaaaat

SEQ ID NO: 16903 - DNA, 15 bp, Homo sapiens
ttttctgtagaaaaa

SEQ ID NO: 16904 - DNA, 15 bp, Homo sapiens
cttttctgtagaaaa

SEQ ID NO: 16905 - DNA, 15 bp, Homo sapiens
tcttttctgtagaaa

SEQ ID NO: 16906 - DNA, 15 bp, Homo sapiens
ctcttttctgtagaa

SEQ ID NO: 16907 - DNA, 15 bp, Homo sapiens
tctcttttctgtaga

SEQ ID NO: 16908 - DNA, 15 bp, Homo sapiens
ttctcttttctgtag

SEQ ID NO: 16909 - DNA, 15 bp, Homo sapiens
attctcttttctgta

SEQ ID NO: 16910 - DNA, 15 bp, Homo sapiens
tattctcttttctgt

SEQ ID NO: 16911 - DNA, 15 bp, Homo sapiens
gtattctcttttctg

SEQ ID NO: 16912 - DNA, 15 bp, Homo sapiens
ggtattctcttttct

SEQ ID NO: 16913 - DNA, 15 bp, Homo sapiens
aggtattctcttttc

SEQ ID NO: 16914 - DNA, 15 bp, Homo sapiens
aaggtattctctttt

SEQ ID NO: 16915 - DNA, 15 bp, Homo sapiens
gaaggtattctcttt

SEQ ID NO: 16916 - DNA, 15 bp, Homo sapiens
ggaaggtattctctt

SEQ ID NO: 16917 - DNA, 15 bp, Homo sapiens
aggaaggtattctct

SEQ ID NO: 16918 - DNA, 15 bp, Homo sapiens
caggaaggtattctc

SEQ ID NO: 16919 - DNA, 15 bp, Homo sapiens
acaggaaggtattct

SEQ ID NO: 16920 - DNA, 15 bp, Homo sapiens
aacaggaaggtattc

SEQ ID NO: 16921 - DNA, 15 bp, Homo sapiens
gaacaggaaggtatt

SEQ ID NO: 16922 - DNA, 15 bp, Homo sapiens
ggaacaggaaggtat

SEQ ID NO: 16923 - DNA, 15 bp, Homo sapiens
tggaacaggaaggta

SEQ ID NO: 16924 - DNA, 15 bp, Homo sapiens
gtggaacaggaaggt

SEQ ID NO: 16925 - DNA, 15 bp, Homo sapiens
agtggaacaggaagg

SEQ ID NO: 16926 - DNA, 15 bp, Homo sapiens
aagtggaacaggaag

SEQ ID NO: 16927 - DNA, 15 bp, Homo sapiens
taagtggaacaggaa

SEQ ID NO: 16928 - DNA, 15 bp, Homo sapiens
ttaagtggaacagga

SEQ ID NO: 16929 - DNA, 15 bp, Homo sapiens
tttaagtggaacagg

SEQ ID NO: 16930 - DNA, 15 bp, Homo sapiens
ctttaagtggaacag

SEQ ID NO: 16931 - DNA, 15 bp, Homo sapiens
tctttaagtggaaca

SEQ ID NO: 16932 - DNA, 15 bp, Homo sapiens
ttctttaagtggaac

SEQ ID NO: 16933 - DNA, 15 bp, Homo sapiens
gttctttaagtggaa

SEQ ID NO: 16934 - DNA, 15 bp, Homo sapiens
tgttctttaagtgga

SEQ ID NO: 16935 - DNA, 15 bp, Homo sapiens
gtgttctttaagtgg

SEQ ID NO: 16936 - DNA, 15 bp, Homo sapiens
tgtgttctttaagtg

SEQ ID NO: 16937 - DNA, 15 bp, Homo sapiens
gtgtgttctttaagt

SEQ ID NO: 16938 - DNA, 15 bp, Homo sapiens
tgtgtgttctttaag

SEQ ID NO: 16939 - DNA, 15 bp, Homo sapiens
gtgtgtgttctttaa

SEQ ID NO: 16940 - DNA, 15 bp, Homo sapiens
tgtgtgtgttcttta

SEQ ID NO: 16941 - DNA, 15 bp, Homo sapiens
atgtgtgtgttcttt

SEQ ID NO: 16942 - DNA, 15 bp, Homo sapiens
aatgtgtgtgttctt

SEQ ID NO: 16943 - DNA, 15 bp, Homo sapiens
aaatgtgtgtgttct

SEQ ID NO: 16944 - DNA, 15 bp, Homo sapiens
taaatgtgtgtgttc

SEQ ID NO: 16945 - DNA, 15 bp, Homo sapiens
gtaaatgtgtgtgtt

SEQ ID NO: 16946 - DNA, 15 bp, Homo sapiens
ggtaaatgtgtgtgt

SEQ ID NO: 16947 - DNA, 15 bp, Homo sapiens
tggtaaatgtgtgtg

SEQ ID NO: 16948 - DNA, 15 bp, Homo sapiens
gtggtaaatgtgtgt

SEQ ID NO: 16949 - DNA, 15 bp, Homo sapiens
agtggtaaatgtgtg

SEQ ID NO: 16950 - DNA, 15 bp, Homo sapiens
gagtggtaaatgtgt

SEQ ID NO: 16951 - DNA, 15 bp, Homo sapiens
ggagtggtaaatgtg

SEQ ID NO: 16952 - DNA, 15 bp, Homo sapiens
gggagtggtaaatgt

SEQ ID NO: 16953 - DNA, 15 bp, Homo sapiens
ggggagtggtaaatg

SEQ ID NO: 16954 - DNA, 15 bp, Homo sapiens
gggggagtggtaaat

SEQ ID NO: 16955 - DNA, 15 bp, Homo sapiens
agggggagtggtaaa

SEQ ID NO: 16956 - DNA, 15 bp, Homo sapiens
gagggggagtggtaa

SEQ ID NO: 16957 - DNA, 15 bp, Homo sapiens
ggagggggagtggta

SEQ ID NO: 16958 - DNA, 15 bp, Homo sapiens
aggagggggagtggt

SEQ ID NO: 16959 - DNA, 15 bp, Homo sapiens
gaggagggggagtgg

SEQ ID NO: 16960 - DNA, 15 bp, Homo sapiens
agaggagggggagtg

SEQ ID NO: 16961 - DNA, 15 bp, Homo sapiens
gagaggagggggagt

SEQ ID NO: 16962 - DNA, 15 bp, Homo sapiens
ggagaggagggggag

SEQ ID NO: 16963 - DNA, 15 bp, Homo sapiens
gggagaggaggggga

SEQ ID NO: 16964 - DNA, 15 bp, Homo sapiens
ggggagaggaggggg

SEQ ID NO: 16965 - DNA, 15 bp, Homo sapiens
aggggagaggagggg

SEQ ID NO: 16966 - DNA, 15 bp, Homo sapiens
caggggagaggaggg

SEQ ID NO: 16967 - DNA, 15 bp, Homo sapiens
gcaggggagaggagg

SEQ ID NO: 16968 - DNA, 15 bp, Homo sapiens
tgcaggggagaggag

SEQ ID NO: 16969 - DNA, 15 bp, Homo sapiens
ttgcaggggagagga

SEQ ID NO: 16970 - DNA, 15 bp, Homo sapiens
tttgcaggggagagg

SEQ ID NO: 16971 - DNA, 15 bp, Homo sapiens
ttttgcaggggagag

SEQ ID NO: 16972 - DNA, 15 bp, Homo sapiens
cttttgcaggggaga

SEQ ID NO: 16973 - DNA, 15 bp, Homo sapiens
ccttttgcaggggag

SEQ ID NO: 16974 - DNA, 15 bp, Homo sapiens
accttttgcagggga

SEQ ID NO: 16975 - DNA, 15 bp, Homo sapiens
aaccttttgcagggg

SEQ ID NO: 16976 - DNA, 15 bp, Homo sapiens
aaaccttttgcaggg

SEQ ID NO: 16977 - DNA, 15 bp, Homo sapiens
aaaaccttttgcagg

SEQ ID NO: 16978 - DNA, 15 bp, Homo sapiens
gaaaaccttttgcag

SEQ ID NO: 16979 - DNA, 15 bp, Homo sapiens
tgaaaaccttttgca

SEQ ID NO: 16980 - DNA, 15 bp, Homo sapiens
ttgaaaaccttttgc

SEQ ID NO: 16981 - DNA, 15 bp, Homo sapiens
attgaaaaccttttg

SEQ ID NO: 16982 - DNA, 15 bp, Homo sapiens
cattgaaaacctttt

SEQ ID NO: 16983 - DNA, 15 bp, Homo sapiens
acattgaaaaccttt

SEQ ID NO: 16984 - DNA, 15 bp, Homo sapiens
gacattgaaaacctt

SEQ ID NO: 16985 - DNA, 15 bp, Homo sapiens
tgacattgaaaacct

SEQ ID NO: 16986 - DNA, 15 bp, Homo sapiens
ctgacattgaaaacc

SEQ ID NO: 16987 - DNA, 15 bp, Homo sapiens
actgacattgaaaac

SEQ ID NO: 16988 - DNA, 15 bp, Homo sapiens
tactgacattgaaaa

SEQ ID NO: 16989 - DNA, 15 bp, Homo sapiens
gtactgacattgaaa

SEQ ID NO: 16990 - DNA, 15 bp, Homo sapiens
tgtactgacattgaa

SEQ ID NO: 16991 - DNA, 15 bp, Homo sapiens
atgtactgacattga

SEQ ID NO: 16992 - DNA, 15 bp, Homo sapiens
aatgtactgacattg

SEQ ID NO: 16993 - DNA, 15 bp, Homo sapiens
taatgtactgacatt

SEQ ID NO: 16994 - DNA, 15 bp, Homo sapiens
ctaatgtactgacat

SEQ ID NO: 16995 - DNA, 15 bp, Homo sapiens
actaatgtactgaca

SEQ ID NO: 16996 - DNA, 15 bp, Homo sapiens
cactaatgtactgac

SEQ ID NO: 16997 - DNA, 15 bp, Homo sapiens
tcactaatgtactga

SEQ ID NO: 16998 - DNA, 15 bp, Homo sapiens
ctcactaatgtactg

SEQ ID NO: 16999 - DNA, 15 bp, Homo sapiens
gctcactaatgtact

SEQ ID NO: 17000 - DNA, 15 bp, Homo sapiens
agctcactaatgtac

SEQ ID NO: 17001 - DNA, 15 bp, Homo sapiens
gagctcactaatgta

SEQ ID NO: 17002 - DNA, 15 bp, Homo sapiens
ggagctcactaatgt

SEQ ID NO: 17003 - DNA, 15 bp, Homo sapiens
tggagctcactaatg

SEQ ID NO: 17004 - DNA, 15 bp, Homo sapiens
atggagctcactaat

SEQ ID NO: 17005 - DNA, 15 bp, Homo sapiens
aatggagctcactaa

SEQ ID NO: 17006 - DNA, 15 bp, Homo sapiens
aaatggagctcacta

SEQ ID NO: 17007 - DNA, 15 bp, Homo sapiens
aaaatggagctcact

SEQ ID NO: 17008 - DNA, 15 bp, Homo sapiens
caaaatggagctcac

SEQ ID NO: 17009 - DNA, 15 bp, Homo sapiens
gcaaaatggagctca

SEQ ID NO: 17010 - DNA, 15 bp, Homo sapiens
tgcaaaatggagctc

SEQ ID NO: 17011 - DNA, 15 bp, Homo sapiens
atgcaaaatggagct

SEQ ID NO: 17012 - DNA, 15 bp, Homo sapiens
gatgcaaaatggagc

SEQ ID NO: 17013 - DNA, 15 bp, Homo sapiens
agatgcaaaatggag

SEQ ID NO: 17014 - DNA, 15 bp, Homo sapiens
cagatgcaaaatgga

SEQ ID NO: 17015 - DNA, 15 bp, Homo sapiens
gcagatgcaaaatgg

SEQ ID NO: 17016 - DNA, 15 bp, Homo sapiens
ggcagatgcaaaatg

SEQ ID NO: 17017 - DNA, 15 bp, Homo sapiens
tggcagatgcaaaat

SEQ ID NO: 17018 - DNA, 15 bp, Homo sapiens
atggcagatgcaaaa

SEQ ID NO: 17019 - DNA, 15 bp, Homo sapiens
gatggcagatgcaaa

SEQ ID NO: 17020 - DNA, 15 bp, Homo sapiens
tgatggcagatgcaa

SEQ ID NO: 17021 - DNA, 15 bp, Homo sapiens
ttgatggcagatgca

SEQ ID NO: 17022 - DNA, 15 bp, Homo sapiens
attgatggcagatgc

SEQ ID NO: 17023 - DNA, 15 bp, Homo sapiens
tattgatggcagatg

SEQ ID NO: 17024 - DNA, 15 bp, Homo sapiens
ttattgatggcagat

SEQ ID NO: 17025 - DNA, 15 bp, Homo sapiens
attattgatggcaga

SEQ ID NO: 17026 - DNA, 15 bp, Homo sapiens
cattattgatggcag

SEQ ID NO: 17027 - DNA, 15 bp, Homo sapiens
tcattattgatggca

SEQ ID NO: 17028 - DNA, 15 bp, Homo sapiens
atcattattgatggc

SEQ ID NO: 17029 - DNA, 15 bp, Homo sapiens
aatcattattgatgg

SEQ ID NO: 17030 - DNA, 15 bp, Homo sapiens
gaatcattattgatg

SEQ ID NO: 17031 - DNA, 15 bp, Homo sapiens
ggaatcattattgat

SEQ ID NO: 17032 - DNA, 15 bp, Homo sapiens
tggaatcattattga

SEQ ID NO: 17033 - DNA, 15 bp, Homo sapiens
atggaatcattattg

SEQ ID NO: 17034 - DNA, 15 bp, Homo sapiens
tatggaatcattatt

SEQ ID NO: 17035 - DNA, 15 bp, Homo sapiens
atatggaatcattat

SEQ ID NO: 17036 - DNA, 15 bp, Homo sapiens
tatatggaatcatta

SEQ ID NO: 17037 - DNA, 15 bp, Homo sapiens
ctatatggaatcatt

SEQ ID NO: 17038 - DNA, 15 bp, Homo sapiens
actatatggaatcat

SEQ ID NO: 17039 - DNA, 15 bp, Homo sapiens
gactatatggaatca

SEQ ID NO: 17040 - DNA, 15 bp, Homo sapiens
tgactatatggaatc

SEQ ID NO: 17041 - DNA, 15 bp, Homo sapiens
ttgactatatggaat

SEQ ID NO: 17042 - DNA, 15 bp, Homo sapiens
attgactatatggaa

SEQ ID NO: 17043 - DNA, 15 bp, Homo sapiens
tattgactatatgga

SEQ ID NO: 17044 - DNA, 15 bp, Homo sapiens
ttattgactatatgg

SEQ ID NO: 17045 - DNA, 15 bp, Homo sapiens
attattgactatatg

SEQ ID NO: 17046 - DNA, 15 bp, Homo sapiens
aattattgactatat

SEQ ID NO: 17047 - DNA, 15 bp, Homo sapiens
caattattgactata

SEQ ID NO: 17048 - DNA, 15 bp, Homo sapiens
ccaattattgactat

SEQ ID NO: 17049 - DNA, 15 bp, Homo sapiens
cccaattattgacta

SEQ ID NO: 17050 - DNA, 15 bp, Homo sapiens
acccaattattgact

SEQ ID NO: 17051 - DNA, 15 bp, Homo sapiens
aacccaattattgac

SEQ ID NO: 17052 - DNA, 15 bp, Homo sapiens
gaacccaattattga

SEQ ID NO: 17053 - DNA, 15 bp, Homo sapiens
tgaacccaattattg

SEQ ID NO: 17054 - DNA, 15 bp, Homo sapiens
atgaacccaattatt

SEQ ID NO: 17055 - DNA, 15 bp, Homo sapiens
catgaacccaattat

SEQ ID NO: 17056 - DNA, 15 bp, Homo sapiens
tcatgaacccaatta

SEQ ID NO: 17057 - DNA, 15 bp, Homo sapiens
gtcatgaacccaatt

SEQ ID NO: 17058 - DNA, 15 bp, Homo sapiens
ggtcatgaacccaat

SEQ ID NO: 17059 - DNA, 15 bp, Homo sapiens
aggtcatgaacccaa

SEQ ID NO: 17060 - DNA, 15 bp, Homo sapiens
aaggtcatgaaccca

SEQ ID NO: 17061 - DNA, 15 bp, Homo sapiens
aaaggtcatgaaccc

SEQ ID NO: 17062 - DNA, 15 bp, Homo sapiens
gaaaggtcatgaacc

SEQ ID NO: 17063 - DNA, 15 bp, Homo sapiens
agaaaggtcatgaac

SEQ ID NO: 17064 - DNA, 15 bp, Homo sapiens
tagaaaggtcatgaa

SEQ ID NO: 17065 - DNA, 15 bp, Homo sapiens
ttagaaaggtcatga

SEQ ID NO: 17066 - DNA, 15 bp, Homo sapiens
tttagaaaggtcatg

SEQ ID NO: 17067 - DNA, 15 bp, Homo sapiens
atttagaaaggtcat

SEQ ID NO: 17068 - DNA, 15 bp, Homo sapiens
gatttagaaaggtca

SEQ ID NO: 17069 - DNA, 15 bp, Homo sapiens
agatttagaaaggtc

SEQ ID NO: 17070 - DNA, 15 bp, Homo sapiens
aagatttagaaaggt

SEQ ID NO: 17071 - DNA, 15 bp, Homo sapiens
aaagatttagaaagg

SEQ ID NO: 17072 - DNA, 15 bp, Homo sapiens
taaagatttagaaag

SEQ ID NO: 17073 - DNA, 15 bp, Homo sapiens
gtaaagatttagaaa

SEQ ID NO: 17074 - DNA, 15 bp, Homo sapiens
tgtaaagatttagaa

SEQ ID NO: 17075 - DNA, 15 bp, Homo sapiens
ctgtaaagatttaga

SEQ ID NO: 17076 - DNA, 15 bp, Homo sapiens
actgtaaagatttag

SEQ ID NO: 17077 - DNA, 15 bp, Homo sapiens
cactgtaaagattta

SEQ ID NO: 17078 - DNA, 15 bp, Homo sapiens
acactgtaaagattt

SEQ ID NO: 17079 - DNA, 15 bp, Homo sapiens
tacactgtaaagatt

SEQ ID NO: 17080 - DNA, 15 bp, Homo sapiens
ttacactgtaaagat

SEQ ID NO: 17081 - DNA, 15 bp, Homo sapiens
tttacactgtaaaga

SEQ ID NO: 17082 - DNA, 15 bp, Homo sapiens
atttacactgtaaag

SEQ ID NO: 17083 - DNA, 15 bp, Homo sapiens
tatttacactgtaaa

SEQ ID NO: 17084 - DNA, 15 bp, Homo sapiens
atatttacactgtaa

SEQ ID NO: 17085 - DNA, 15 bp, Homo sapiens
aatatttacactgta

SEQ ID NO: 17086 - DNA, 15 bp, Homo sapiens
gaatatttacactgt

SEQ ID NO: 17087 - DNA, 15 bp, Homo sapiens
agaatatttacactg

SEQ ID NO: 17088 - DNA, 15 bp, Homo sapiens
cagaatatttacact

SEQ ID NO: 17089 - DNA, 15 bp, Homo sapiens
ccagaatatttacac

SEQ ID NO: 17090 - DNA, 15 bp, Homo sapiens
tccagaatatttaca

SEQ ID NO: 17091 - DNA, 15 bp, Homo sapiens
ttccagaatatttac

SEQ ID NO: 17092 - DNA, 15 bp, Homo sapiens
tttccagaatattta

SEQ ID NO: 17093 - DNA, 15 bp, Homo sapiens
atttccagaatattt

SEQ ID NO: 17094 - DNA, 15 bp, Homo sapiens
gatttccagaatatt

SEQ ID NO: 17095 - DNA, 15 bp, Homo sapiens
ggatttccagaatat

SEQ ID NO: 17096 - DNA, 15 bp, Homo sapiens
tggatttccagaata

SEQ ID NO: 17097 - DNA, 15 bp, Homo sapiens
ctggatttccagaat

SEQ ID NO: 17098 - DNA, 15 bp, Homo sapiens
actggatttccagaa

SEQ ID NO: 17099 - DNA, 15 bp, Homo sapiens
cactggatttccaga

SEQ ID NO: 17100 - DNA, 15 bp, Homo sapiens
tcactggatttccag

SEQ ID NO: 17101 - DNA, 15 bp, Homo sapiens
ctcactggatttcca

SEQ ID NO: 17102 - DNA, 15 bp, Homo sapiens
cctcactggatttcc

SEQ ID NO: 17103 - DNA, 15 bp, Homo sapiens
gcctcactggatttc

SEQ ID NO: 17104 - DNA, 15 bp, Homo sapiens
tgcctcactggattt

SEQ ID NO: 17105 - DNA, 15 bp, Homo sapiens
gtgcctcactggatt

SEQ ID NO: 17106 - DNA, 15 bp, Homo sapiens
agtgcctcactggat

SEQ ID NO: 17107 - DNA, 15 bp, Homo sapiens
aagtgcctcactgga

SEQ ID NO: 17108 - DNA, 15 bp, Homo sapiens
taagtgcctcactgg

SEQ ID NO: 17109 - DNA, 15 bp, Homo sapiens
ttaagtgcctcactg

SEQ ID NO: 17110 - DNA, 15 bp, Homo sapiens
cttaagtgcctcact

SEQ ID NO: 17111 - DNA, 15 bp, Homo sapiens
acttaagtgcctcac

SEQ ID NO: 17112 - DNA, 15 bp, Homo sapiens
tacttaagtgcctca

SEQ ID NO: 17113 - DNA, 15 bp, Homo sapiens
atacttaagtgcctc

SEQ ID NO: 17114 - DNA, 15 bp, Homo sapiens
tatacttaagtgcct

SEQ ID NO: 17115 - DNA, 15 bp, Homo sapiens
ttatacttaagtgcc

SEQ ID NO: 17116 - DNA, 15 bp, Homo sapiens
tttatacttaagtgc

SEQ ID NO: 17117 - DNA, 15 bp, Homo sapiens
ttttatacttaagtg

SEQ ID NO: 17118 - DNA, 15 bp, Homo sapiens
attttatacttaagt

SEQ ID NO: 17119 - DNA, 15 bp, Homo sapiens
aattttatacttaag

SEQ ID NO: 17120 - DNA, 15 bp, Homo sapiens
taattttatacttaa

SEQ ID NO: 17121 - DNA, 15 bp, Homo sapiens
ataattttatactta

SEQ ID NO: 17122 - DNA, 15 bp, Homo sapiens
aataattttatactt

SEQ ID NO: 17123 - DNA, 15 bp, Homo sapiens
aaataattttatact

SEQ ID NO: 17124 - DNA, 15 bp, Homo sapiens
taaataattttatac

SEQ ID NO: 17125 - DNA, 15 bp, Homo sapiens
ctaaataattttata

SEQ ID NO: 17126 - DNA, 15 bp, Homo sapiens
cctaaataattttat

SEQ ID NO: 17127 - DNA, 15 bp, Homo sapiens
tcctaaataatttta

SEQ ID NO: 17128 - DNA, 15 bp, Homo sapiens
atcctaaataatttt

SEQ ID NO: 17129 - DNA, 15 bp, Homo sapiens
aatcctaaataattt

SEQ ID NO: 17130 - DNA, 15 bp, Homo sapiens
taatcctaaataatt

SEQ ID NO: 17131 - DNA, 15 bp, Homo sapiens
ttaatcctaaataat

SEQ ID NO: 17132 - DNA, 15 bp, Homo sapiens
tttaatcctaaataa

SEQ ID NO: 17133 - DNA, 15 bp, Homo sapiens
atttaatcctaaata

SEQ ID NO: 17134 - DNA, 15 bp, Homo sapiens
tatttaatcctaaat

SEQ ID NO: 17135 - DNA, 15 bp, Homo sapiens
ttatttaatcctaaa

SEQ ID NO: 17136 - DNA, 15 bp, Homo sapiens
attatttaatcctaa

SEQ ID NO: 17137 - DNA, 15 bp, Homo sapiens
aattatttaatccta

SEQ ID NO: 17138 - DNA, 15 bp, Homo sapiens
gaattatttaatcct

SEQ ID NO: 17139 - DNA, 15 bp, Homo sapiens
agaattatttaatcc

SEQ ID NO: 17140 - DNA, 15 bp, Homo sapiens
tagaattatttaatc

SEQ ID NO: 17141 - DNA, 15 bp, Homo sapiens
atagaattatttaat

SEQ ID NO: 17142 - DNA, 15 bp, Homo sapiens
catagaattatttaa

SEQ ID NO: 17143 - DNA, 15 bp, Homo sapiens
gcatagaattattta

SEQ ID NO: 17144 - DNA, 15 bp, Homo sapiens
ggcatagaattattt

SEQ ID NO: 17145 - DNA, 15 bp, Homo sapiens
aggcatagaattatt

SEQ ID NO: 17146 - DNA, 15 bp, Homo sapiens
aaggcatagaattat

SEQ ID NO: 17147 - DNA, 15 bp, Homo sapiens
taaggcatagaatta

SEQ ID NO: 17148 - DNA, 15 bp, Homo sapiens
ttaaggcatagaatt

SEQ ID NO: 17149 - DNA, 15 bp, Homo sapiens
cttaaggcatagaat

SEQ ID NO: 17150 - DNA, 15 bp, Homo sapiens
acttaaggcatagaa

SEQ ID NO: 17151 - DNA, 15 bp, Homo sapiens
tacttaaggcataga

SEQ ID NO: 17152 - DNA, 15 bp, Homo sapiens
ctacttaaggcatag

SEQ ID NO: 17153 - DNA, 15 bp, Homo sapiens
tctacttaaggcata

SEQ ID NO: 17154 - DNA, 15 bp, Homo sapiens
ttctacttaaggcat

SEQ ID NO: 17155 - DNA, 15 bp, Homo sapiens
cttctacttaaggca

SEQ ID NO: 17156 - DNA, 15 bp, Homo sapiens
acttctacttaaggc

SEQ ID NO: 17157 - DNA, 15 bp, Homo sapiens
aacttctacttaagg

SEQ ID NO: 17158 - DNA, 15 bp, Homo sapiens
aaacttctacttaag

SEQ ID NO: 17159 - DNA, 15 bp, Homo sapiens
taaacttctacttaa

SEQ ID NO: 17160 - DNA, 15 bp, Homo sapiens
ttaaacttctactta

SEQ ID NO: 17161 - DNA, 15 bp, Homo sapiens
cttaaacttctactt

SEQ ID NO: 17162 - DNA, 15 bp, Homo sapiens
tcttaaacttctact

SEQ ID NO: 17163 - DNA, 15 bp, Homo sapiens
ctcttaaacttctac

SEQ ID NO: 17164 - DNA, 15 bp, Homo sapiens
cctcttaaacttcta

SEQ ID NO: 17165 - DNA, 15 bp, Homo sapiens
tcctcttaaacttct

SEQ ID NO: 17166 - DNA, 15 bp, Homo sapiens
gtcctcttaaacttc

SEQ ID NO: 17167 - DNA, 15 bp, Homo sapiens
cgtcctcttaaactt

SEQ ID NO: 17168 - DNA, 15 bp, Homo sapiens
acgtcctcttaaact

SEQ ID NO: 17169 - DNA, 15 bp, Homo sapiens
aacgtcctcttaaac

SEQ ID NO: 17170 - DNA, 15 bp, Homo sapiens
aaacgtcctcttaaa

SEQ ID NO: 17171 - DNA, 15 bp, Homo sapiens
taaacgtcctcttaa

SEQ ID NO: 17172 - DNA, 15 bp, Homo sapiens
ctaaacgtcctctta

SEQ ID NO: 17173 - DNA, 15 bp, Homo sapiens
cctaaacgtcctctt

SEQ ID NO: 17174 - DNA, 15 bp, Homo sapiens
tcctaaacgtcctct

SEQ ID NO: 17175 - DNA, 15 bp, Homo sapiens
gtcctaaacgtcctc

SEQ ID NO: 17176 - DNA, 15 bp, Homo sapiens
tgtcctaaacgtcct

SEQ ID NO: 17177 - DNA, 15 bp, Homo sapiens
gtgtcctaaacgtcc

SEQ ID NO: 17178 - DNA, 15 bp, Homo sapiens
tgtgtcctaaacgtc

SEQ ID NO: 17179 - DNA, 15 bp, Homo sapiens
gtgtgtcctaaacgt

SEQ ID NO: 17180 - DNA, 15 bp, Homo sapiens
tgtgtgtcctaaacg

SEQ ID NO: 17181 - DNA, 15 bp, Homo sapiens
atgtgtgtcctaaac

SEQ ID NO: 17182 - DNA, 15 bp, Homo sapiens
catgtgtgtcctaaa

SEQ ID NO: 17183 - DNA, 15 bp, Homo sapiens
tcatgtgtgtcctaa

SEQ ID NO: 17184 - DNA, 15 bp, Homo sapiens
gtcatgtgtgtccta

SEQ ID NO: 17185 - DNA, 15 bp, Homo sapiens
agtcatgtgtgtcct

SEQ ID NO: 17186 - DNA, 15 bp, Homo sapiens
tagtcatgtgtgtcc

SEQ ID NO: 17187 - DNA, 15 bp, Homo sapiens
ttagtcatgtgtgtc

SEQ ID NO: 17188 - DNA, 15 bp, Homo sapiens
cttagtcatgtgtgt

SEQ ID NO: 17189 - DNA, 15 bp, Homo sapiens
gcttagtcatgtgtg

SEQ ID NO: 17190 - DNA, 15 bp, Homo sapiens
ggcttagtcatgtgt

SEQ ID NO: 17191 - DNA, 15 bp, Homo sapiens
aggcttagtcatgtg

SEQ ID NO: 17192 - DNA, 15 bp, Homo sapiens
taggcttagtcatgt

SEQ ID NO: 17193 - DNA, 15 bp, Homo sapiens
gtaggcttagtcatg

SEQ ID NO: 17194 - DNA, 15 bp, Homo sapiens
tgtaggcttagtcat

SEQ ID NO: 17195 - DNA, 15 bp, Homo sapiens
ttgtaggcttagtca

SEQ ID NO: 17196 - DNA, 15 bp, Homo sapiens
tttgtaggcttagtc

SEQ ID NO: 17197 - DNA, 15 bp, Homo sapiens
atttgtaggcttagt

SEQ ID NO: 17198 - DNA, 15 bp, Homo sapiens
tatttgtaggcttag

SEQ ID NO: 17199 - DNA, 15 bp, Homo sapiens
gtatttgtaggctta

SEQ ID NO: 17200 - DNA, 15 bp, Homo sapiens
ggtatttgtaggctt

SEQ ID NO: 17201 - DNA, 15 bp, Homo sapiens
tggtatttgtaggct

SEQ ID NO: 17202 - DNA, 15 bp, Homo sapiens
ttggtatttgtaggc

SEQ ID NO: 17203 - DNA, 15 bp, Homo sapiens
tttggtatttgtagg

SEQ ID NO: 17204 - DNA, 15 bp, Homo sapiens
ctttggtatttgtag

SEQ ID NO: 17205 - DNA, 15 bp, Homo sapiens
gctttggtatttgta

SEQ ID NO: 17206 - DNA, 15 bp, Homo sapiens
ggctttggtatttgt

SEQ ID NO: 17207 - DNA, 15 bp, Homo sapiens
tggctttggtatttg

SEQ ID NO: 17208 - DNA, 15 bp, Homo sapiens
gtggctttggtattt

SEQ ID NO: 17209 - DNA, 15 bp, Homo sapiens
agtggctttggtatt

SEQ ID NO: 17210 - DNA, 15 bp, Homo sapiens
gagtggctttggtat

SEQ ID NO: 17211 - DNA, 15 bp, Homo sapiens
agagtggctttggta

SEQ ID NO: 17212 - DNA, 15 bp, Homo sapiens
tagagtggctttggt

SEQ ID NO: 17213 - DNA, 15 bp, Homo sapiens
atagagtggctttgg

SEQ ID NO: 17214 - DNA, 15 bp, Homo sapiens
catagagtggctttg

SEQ ID NO: 17215 - DNA, 15 bp, Homo sapiens
acatagagtggcttt

SEQ ID NO: 17216 - DNA, 15 bp, Homo sapiens
aacatagagtggctt

SEQ ID NO: 17217 - DNA, 15 bp, Homo sapiens
aaacatagagtggct

SEQ ID NO: 17218 - DNA, 15 bp, Homo sapiens
gaaacatagagtggc

SEQ ID NO: 17219 - DNA, 15 bp, Homo sapiens
ggaaacatagagtgg

SEQ ID NO: 17220 - DNA, 15 bp, Homo sapiens
aggaaacatagagtg

SEQ ID NO: 17221 - DNA, 15 bp, Homo sapiens
taggaaacatagagt

SEQ ID NO: 17222 - DNA, 15 bp, Homo sapiens
ctaggaaacatagag

SEQ ID NO: 17223 - DNA, 15 bp, Homo sapiens
cctaggaaacataga

SEQ ID NO: 17224 - DNA, 15 bp, Homo sapiens
acctaggaaacatag

SEQ ID NO: 17225 - DNA, 15 bp, Homo sapiens
aacctaggaaacata

SEQ ID NO: 17226 - DNA, 15 bp, Homo sapiens
aaacctaggaaacat

SEQ ID NO: 17227 - DNA, 15 bp, Homo sapiens
taaacctaggaaaca

SEQ ID NO: 17228 - DNA, 15 bp, Homo sapiens
ttaaacctaggaaac

SEQ ID NO: 17229 - DNA, 15 bp, Homo sapiens
tttaaacctaggaaa

SEQ ID NO: 17230 - DNA, 15 bp, Homo sapiens
atttaaacctaggaa

SEQ ID NO: 17231 - DNA, 15 bp, Homo sapiens
tatttaaacctagga

SEQ ID NO: 17232 - DNA, 15 bp, Homo sapiens
gtatttaaacctagg

SEQ ID NO: 17233 - DNA, 15 bp, Homo sapiens
ggtatttaaacctag

SEQ ID NO: 17234 - DNA, 15 bp, Homo sapiens
tggtatttaaaccta

SEQ ID NO: 17235 - DNA, 15 bp, Homo sapiens
gtggtatttaaacct

SEQ ID NO: 17236 - DNA, 15 bp, Homo sapiens
tgtggtatttaaacc

SEQ ID NO: 17237 - DNA, 15 bp, Homo sapiens
atgtggtatttaaac

SEQ ID NO: 17238 - DNA, 15 bp, Homo sapiens
catgtggtatttaaa

SEQ ID NO: 17239 - DNA, 15 bp, Homo sapiens
gcatgtggtatttaa

SEQ ID NO: 17240 - DNA, 15 bp, Homo sapiens
tgcatgtggtattta

SEQ ID NO: 17241 - DNA, 15 bp, Homo sapiens
ttgcatgtggtattt

SEQ ID NO: 17242 - DNA, 15 bp, Homo sapiens
tttgcatgtggtatt

SEQ ID NO: 17243 - DNA, 15 bp, Homo sapiens
atttgcatgtggtat

SEQ ID NO: 17244 - DNA, 15 bp, Homo sapiens
tatttgcatgtggta

SEQ ID NO: 17245 - DNA, 15 bp, Homo sapiens
ttatttgcatgtggt

SEQ ID NO: 17246 - DNA, 15 bp, Homo sapiens
gttatttgcatgtgg

SEQ ID NO: 17247 - DNA, 15 bp, Homo sapiens
tgttatttgcatgtg

SEQ ID NO: 17248 - DNA, 15 bp, Homo sapiens
atgttatttgcatgt

SEQ ID NO: 17249 - DNA, 15 bp, Homo sapiens
tatgttatttgcatg

SEQ ID NO: 17250 - DNA, 15 bp, Homo sapiens
gtatgttatttgcat

SEQ ID NO: 17251 - DNA, 15 bp, Homo sapiens
cgtatgttatttgca

SEQ ID NO: 17252 - DNA, 15 bp, Homo sapiens
ccgtatgttatttgc

SEQ ID NO: 17253 - DNA, 15 bp, Homo sapiens
tccgtatgttatttg

SEQ ID NO: 17254 - DNA, 15 bp, Homo sapiens
atccgtatgttattt

SEQ ID NO: 17255 - DNA, 15 bp, Homo sapiens
aatccgtatgttatt

SEQ ID NO: 17256 - DNA, 15 bp, Homo sapiens
aaatccgtatgttat

SEQ ID NO: 17257 - DNA, 15 bp, Homo sapiens
gaaatccgtatgtta

SEQ ID NO: 17258 - DNA, 15 bp, Homo sapiens
tgaaatccgtatgtt

SEQ ID NO: 17259 - DNA, 15 bp, Homo sapiens
atgaaatccgtatgt

SEQ ID NO: 17260 - DNA, 15 bp, Homo sapiens
aatgaaatccgtatg

SEQ ID NO: 17261 - DNA, 15 bp, Homo sapiens
aaatgaaatccgtat

SEQ ID NO: 17262 - DNA, 15 bp, Homo sapiens
caaatgaaatccgta

SEQ ID NO: 17263 - DNA, 15 bp, Homo sapiens
gcaaatgaaatccgt

SEQ ID NO: 17264 - DNA, 15 bp, Homo sapiens
ggcaaatgaaatccg

SEQ ID NO: 17265 - DNA, 15 bp, Homo sapiens
tggcaaatgaaatcc

SEQ ID NO: 17266 - DNA, 15 bp, Homo sapiens
ctggcaaatgaaatc

SEQ ID NO: 17267 - DNA, 15 bp, Homo sapiens
gctggcaaatgaaat

SEQ ID NO: 17268 - DNA, 15 bp, Homo sapiens
tgctggcaaatgaaa

SEQ ID NO: 17269 - DNA, 15 bp, Homo sapiens
atgctggcaaatgaa

SEQ ID NO: 17270 - DNA, 15 bp, Homo sapiens
gatgctggcaaatga

SEQ ID NO: 17271 - DNA, 15 bp, Homo sapiens
tgatgctggcaaatg

SEQ ID NO: 17272 - DNA, 15 bp, Homo sapiens
atgatgctggcaaat

SEQ ID NO: 17273 - DNA, 15 bp, Homo sapiens
aatgatgctggcaaa

SEQ ID NO: 17274 - DNA, 15 bp, Homo sapiens
aaatgatgctggcaa

SEQ ID NO: 17275 - DNA, 15 bp, Homo sapiens
taaatgatgctggca

SEQ ID NO: 17276 - DNA, 15 bp, Homo sapiens
ataaatgatgctggc

SEQ ID NO: 17277 - DNA, 15 bp, Homo sapiens
aataaatgatgctgg

SEQ ID NO: 17278 - DNA, 15 bp, Homo sapiens
caataaatgatgctg

SEQ ID NO: 17279 - DNA, 15 bp, Homo sapiens
gcaataaatgatgct

SEQ ID NO: 17280 - DNA, 15 bp, Homo sapiens
ggcaataaatgatgc

SEQ ID NO: 17281 - DNA, 15 bp, Homo sapiens
aggcaataaatgatg

SEQ ID NO: 17282 - DNA, 15 bp, Homo sapiens
taggcaataaatgat

SEQ ID NO: 17283 - DNA, 15 bp, Homo sapiens
ttaggcaataaatga

SEQ ID NO: 17284 - DNA, 15 bp, Homo sapiens
gttaggcaataaatg

SEQ ID NO: 17285 - DNA, 15 bp, Homo sapiens
tgttaggcaataaat

SEQ ID NO: 17286 - DNA, 15 bp, Homo sapiens
atgttaggcaataaa

SEQ ID NO: 17287 - DNA, 15 bp, Homo sapiens
aatgttaggcaataa

SEQ ID NO: 17288 - DNA, 15 bp, Homo sapiens
taatgttaggcaata

SEQ ID NO: 17289 - DNA, 15 bp, Homo sapiens
gtaatgttaggcaat

SEQ ID NO: 17290 - DNA, 15 bp, Homo sapiens
agtaatgttaggcaa

SEQ ID NO: 17291 - DNA, 15 bp, Homo sapiens
gagtaatgttaggca

SEQ ID NO: 17292 - DNA, 15 bp, Homo sapiens
ggagtaatgttaggc

SEQ ID NO: 17293 - DNA, 15 bp, Homo sapiens
tggagtaatgttagg

SEQ ID NO: 17294 - DNA, 15 bp, Homo sapiens
atggagtaatgttag

SEQ ID NO: 17295 - DNA, 15 bp, Homo sapiens
tatggagtaatgtta

SEQ ID NO: 17296 - DNA, 15 bp, Homo sapiens
gtatggagtaatgtt

SEQ ID NO: 17297 - DNA, 15 bp, Homo sapiens
agtatggagtaatgt

SEQ ID NO: 17298 - DNA, 15 bp, Homo sapiens
tagtatggagtaatg

SEQ ID NO: 17299 - DNA, 15 bp, Homo sapiens
ttagtatggagtaat

SEQ ID NO: 17300 - DNA, 15 bp, Homo sapiens
tttagtatggagtaa

SEQ ID NO: 17301 - DNA, 15 bp, Homo sapiens
gtttagtatggagta

SEQ ID NO: 17302 - DNA, 15 bp, Homo sapiens
tgtttagtatggagt

SEQ ID NO: 17303 - DNA, 15 bp, Homo sapiens
ctgtttagtatggag

SEQ ID NO: 17304 - DNA, 15 bp, Homo sapiens
tctgtttagtatgga

SEQ ID NO: 17305 - DNA, 15 bp, Homo sapiens
ctctgtttagtatgg

SEQ ID NO: 17306 - DNA, 15 bp, Homo sapiens
actctgtttagtatg

SEQ ID NO: 17307 - DNA, 15 bp, Homo sapiens
tactctgtttagtat

SEQ ID NO: 17308 - DNA, 15 bp, Homo sapiens
ttactctgtttagta

SEQ ID NO: 17309 - DNA, 15 bp, Homo sapiens
tttactctgtttagt

SEQ ID NO: 17310 - DNA, 15 bp, Homo sapiens
atttactctgtttag

SEQ ID NO: 17311 - DNA, 15 bp, Homo sapiens
catttactctgttta

SEQ ID NO: 17312 - DNA, 15 bp, Homo sapiens
ccatttactctgttt

SEQ ID NO: 17313 - DNA, 15 bp, Homo sapiens
tccatttactctgtt

SEQ ID NO: 17314 - DNA, 15 bp, Homo sapiens
atccatttactctgt

SEQ ID NO: 17315 - DNA, 15 bp, Homo sapiens
catccatttactctg

SEQ ID NO: 17316 - DNA, 15 bp, Homo sapiens
gcatccatttactct

SEQ ID NO: 17317 - DNA, 15 bp, Homo sapiens
tgcatccatttactc

SEQ ID NO: 17318 - DNA, 15 bp, Homo sapiens
ctgcatccatttact

SEQ ID NO: 17319 - DNA, 15 bp, Homo sapiens
tctgcatccatttac

SEQ ID NO: 17320 - DNA, 15 bp, Homo sapiens
ctctgcatccattta

SEQ ID NO: 17321 - DNA, 15 bp, Homo sapiens
actctgcatccattt

SEQ ID NO: 17322 - DNA, 15 bp, Homo sapiens
cactctgcatccatt

SEQ ID NO: 17323 - DNA, 15 bp, Homo sapiens
acactctgcatccat

SEQ ID NO: 17324 - DNA, 15 bp, Homo sapiens
tacactctgcatcca

SEQ ID NO: 17325 - DNA, 15 bp, Homo sapiens
ttacactctgcatcc

SEQ ID NO: 17326 - DNA, 15 bp, Homo sapiens
gttacactctgcatc

SEQ ID NO: 17327 - DNA, 15 bp, Homo sapiens
ggttacactctgcat

SEQ ID NO: 17328 - DNA, 15 bp, Homo sapiens
tggttacactctgca

SEQ ID NO: 17329 - DNA, 15 bp, Homo sapiens
ctggttacactctgc

SEQ ID NO: 17330 - DNA, 15 bp, Homo sapiens
actggttacactctg

SEQ ID NO: 17331 - DNA, 15 bp, Homo sapiens
tactggttacactct

SEQ ID NO: 17332 - DNA, 15 bp, Homo sapiens
ttactggttacactc

SEQ ID NO: 17333 - DNA, 15 bp, Homo sapiens
cttactggttacact

SEQ ID NO: 17334 - DNA, 15 bp, Homo sapiens
acttactggttacac

SEQ ID NO: 17335 - DNA, 15 bp, Homo sapiens
aacttactggttaca

SEQ ID NO: 17336 - DNA, 15 bp, Homo sapiens
aaacttactggttac

SEQ ID NO: 17337 - DNA, 15 bp, Homo sapiens
caaacttactggtta

SEQ ID NO: 17338 - DNA, 15 bp, Homo sapiens
gcaaacttactggtt

SEQ ID NO: 17339 - DNA, 15 bp, Homo sapiens
agcaaacttactggt

SEQ ID NO: 17340 - DNA, 15 bp, Homo sapiens
gagcaaacttactgg

SEQ ID NO: 17341 - DNA, 15 bp, Homo sapiens
tgagcaaacttactg

SEQ ID NO: 17342 - DNA, 15 bp, Homo sapiens
atgagcaaacttact

SEQ ID NO: 17343 - DNA, 15 bp, Homo sapiens
aatgagcaaacttac

SEQ ID NO: 17344 - DNA, 15 bp, Homo sapiens
gaatgagcaaactta

SEQ ID NO: 17345 - DNA, 15 bp, Homo sapiens
tgaatgagcaaactt

SEQ ID NO: 17346 - DNA, 15 bp, Homo sapiens
agtgaatgagcaaac

SEQ ID NO: 17347 - DNA, 15 bp, Homo sapiens
aagtgaatgagcaaa

SEQ ID NO: 17348 - DNA, 15 bp, Homo sapiens
aaagtgaatgagcaa

SEQ ID NO: 17349 - DNA, 15 bp, Homo sapiens
aaaagtgaatgagca

SEQ ID NO: 17350 - DNA, 15 bp, Homo sapiens
caaaagtgaatgagc

SEQ ID NO: 17351 - DNA, 15 bp, Homo sapiens
tcaaaagtgaatgag

SEQ ID NO: 17352 - DNA, 15 bp, Homo sapiens
ttcaaaagtgaatga

SEQ ID NO: 17353 - DNA, 15 bp, Homo sapiens
cttcaaaagtgaatg

SEQ ID NO: 17354 - DNA, 15 bp, Homo sapiens
gcttcaaaagtgaat

SEQ ID NO: 17355 - DNA, 15 bp, Homo sapiens
agcttcaaaagtgaa

SEQ ID NO: 17356 - DNA, 15 bp, Homo sapiens
gagcttcaaaagtga

SEQ ID NO: 17357 - DNA, 15 bp, Homo sapiens
tgagcttcaaaagtg

SEQ ID NO: 17358 - DNA, 15 bp, Homo sapiens
atgagcttcaaaagt

SEQ ID NO: 17359 - DNA, 15 bp, Homo sapiens
gatgagcttcaaaag

SEQ ID NO: 17360 - DNA, 15 bp, Homo sapiens
agatgagcttcaaaa

SEQ ID NO: 17361 - DNA, 15 bp, Homo sapiens
cagatgagcttcaaa

SEQ ID NO: 17362 - DNA, 15 bp, Homo sapiens
acagatgagcttcaa

SEQ ID NO: 17363 - DNA, 15 bp, Homo sapiens
cacagatgagcttca

SEQ ID NO: 17364 - DNA, 15 bp, Homo sapiens
gcacagatgagcttc

SEQ ID NO: 17365 - DNA, 15 bp, Homo sapiens
tgcacagatgagctt

SEQ ID NO: 17366 - DNA, 15 bp, Homo sapiens
atgcacagatgagct

SEQ ID NO: 17367 - DNA, 15 bp, Homo sapiens
catgcacagatgagc

SEQ ID NO: 17368 - DNA, 15 bp, Homo sapiens
acatgcacagatgag

SEQ ID NO: 17369 - DNA, 15 bp, Homo sapiens
aacatgcacagatga

SEQ ID NO: 17370 - DNA, 15 bp, Homo sapiens
taacatgcacagatg

SEQ ID NO: 17371 - DNA, 15 bp, Homo sapiens
ataacatgcacagat

SEQ ID NO: 17372 - DNA, 15 bp, Homo sapiens
aataacatgcacaga

SEQ ID NO: 17373 - DNA, 15 bp, Homo sapiens
gaataacatgcacag

SEQ ID NO: 17374 - DNA, 15 bp, Homo sapiens
tgaataacatgcaca

SEQ ID NO: 17375 - DNA, 15 bp, Homo sapiens
atgaataacatgcac

SEQ ID NO: 17376 - DNA, 15 bp, Homo sapiens
gatgaataacatgca

SEQ ID NO: 17377 - DNA, 15 bp, Homo sapiens
ggatgaataacatgc

SEQ ID NO: 17378 - DNA, 15 bp, Homo sapiens
aggatgaataacatg

SEQ ID NO: 17379 - DNA, 15 bp, Homo sapiens
taggatgaataacat

SEQ ID NO: 17380 - DNA, 15 bp, Homo sapiens
ttaggatgaataaca

SEQ ID NO: 17381 - DNA, 15 bp, Homo sapiens
attaggatgaataac

SEQ ID NO: 17382 - DNA, 15 bp, Homo sapiens
tattaggatgaataa

SEQ ID NO: 17383 - DNA, 15 bp, Homo sapiens
ttattaggatgaata

SEQ ID NO: 17384 - DNA, 15 bp, Homo sapiens
tttattaggatgaat

SEQ ID NO: 17385 - DNA, 15 bp, Homo sapiens
ctttattaggatgaa

SEQ ID NO: 17386 - DNA, 15 bp, Homo sapiens
tctttattaggatga

SEQ ID NO: 17387 - DNA, 15 bp, Homo sapiens
ttctttattaggatg

SEQ ID NO: 17388 - DNA, 15 bp, Homo sapiens
tttctttattaggat

SEQ ID NO: 17389 - DNA, 15 bp, Homo sapiens
ttttctttattagga

SEQ ID NO: 17390 - DNA, 15 bp, Homo sapiens
attttctttattagg

SEQ ID NO: 17391 - DNA, 15 bp, Homo sapiens
aattttctttattag

SEQ ID NO: 17392 - DNA, 15 bp, Homo sapiens
aaattttctttatta

SEQ ID NO: 17393 - DNA, 15 bp, Homo sapiens
taaattttctttatt

SEQ ID NO: 17394 - DNA, 15 bp, Homo sapiens
ataaattttctttat

SEQ ID NO: 17395 - DNA, 15 bp, Homo sapiens
gataaattttcttta

SEQ ID NO: 17396 - DNA, 15 bp, Homo sapiens
tgataaattttcttt

SEQ ID NO: 17397 - DNA, 15 bp, Homo sapiens
gtgataaattttctt

SEQ ID NO: 17398 - DNA, 15 bp, Homo sapiens
tgtgataaattttct

SEQ ID NO: 17399 - DNA, 15 bp, Homo sapiens
ttgtgataaattttc

SEQ ID NO: 17400 - DNA, 15 bp, Homo sapiens
gttgtgataaatttt

SEQ ID NO: 17401 - DNA, 15 bp, Homo sapiens
tgttgtgataaattt

SEQ ID NO: 17402 - DNA, 15 bp, Homo sapiens
gtgttgtgataaatt

SEQ ID NO: 17403 - DNA, 15 bp, Homo sapiens
tgtgttgtgataaat

SEQ ID NO: 17404 - DNA, 15 bp, Homo sapiens
ttgtgttgtgataaa

SEQ ID NO: 17405 - DNA, 15 bp, Homo sapiens
gttgtgttgtgataa

SEQ ID NO: 17406 - DNA, 15 bp, Homo sapiens
agttgtgttgtgata

SEQ ID NO: 17407 - DNA, 15 bp, Homo sapiens
aagttgtgttgtgat

SEQ ID NO: 17408 - DNA, 15 bp, Homo sapiens
caagttgtgttgtga

SEQ ID NO: 17409 - DNA, 15 bp, Homo sapiens
tcaagttgtgttgtg

SEQ ID NO: 17410 - DNA, 15 bp, Homo sapiens
atcaagttgtgttgt

SEQ ID NO: 17411 - DNA, 15 bp, Homo sapiens
catcaagttgtgttg

SEQ ID NO: 17412 - DNA, 15 bp, Homo sapiens
gcatcaagttgtgtt

SEQ ID NO: 17413 - DNA, 15 bp, Homo sapiens
cgcatcaagttgtgt

SEQ ID NO: 17414 - DNA, 15 bp, Homo sapiens
tcgcatcaagttgtg

SEQ ID NO: 17415 - DNA, 15 bp, Homo sapiens
atcgcatcaagttgt

SEQ ID NO: 17416 - DNA, 15 bp, Homo sapiens
aatcgcatcaagttg

SEQ ID NO: 17417 - DNA, 15 bp, Homo sapiens
gaatcgcatcaagtt

SEQ ID NO: 17418 - DNA, 15 bp, Homo sapiens
agaatcgcatcaagt

SEQ ID NO: 17419 - DNA, 15 bp, Homo sapiens
aagaatcgcatcaag

SEQ ID NO: 17420 - DNA, 15 bp, Homo sapiens
caagaatcgcatcaa

SEQ ID NO: 17421 - DNA, 15 bp, Homo sapiens
acaagaatcgcatca

SEQ ID NO: 17422 - DNA, 15 bp, Homo sapiens
aacaagaatcgcatc

SEQ ID NO: 17423 - DNA, 15 bp, Homo sapiens
gaacaagaatcgcat

SEQ ID NO: 17424 - DNA, 15 bp, Homo sapiens
tgaacaagaatcgca

SEQ ID NO: 17425 - DNA, 15 bp, Homo sapiens
ttgaacaagaatcgc

SEQ ID NO: 17426 - DNA, 15 bp, Homo sapiens
tttgaacaagaatcg

SEQ ID NO: 17427 - DNA, 15 bp, Homo sapiens
atttgaacaagaatc

SEQ ID NO: 17428 - DNA, 15 bp, Homo sapiens
catttgaacaagaat

SEQ ID NO: 17429 - DNA, 15 bp, Homo sapiens
tcatttgaacaagaa

SEQ ID NO: 17430 - DNA, 15 bp, Homo sapiens
atcatttgaacaaga

SEQ ID NO: 17431 - DNA, 15 bp, Homo sapiens
aatcatttgaacaag

SEQ ID NO: 17432 - DNA, 15 bp, Homo sapiens
aaatcatttgaacaa

SEQ ID NO: 17433 - DNA, 15 bp, Homo sapiens
gaaatcatttgaaca

SEQ ID NO: 17434 - DNA, 15 bp, Homo sapiens
ggaaatcatttgaac

SEQ ID NO: 17435 - DNA, 15 bp, Homo sapiens
aggaaatcatttgaa

SEQ ID NO: 17436 - DNA, 15 bp, Homo sapiens
gaggaaatcatttga

SEQ ID NO: 17437 - DNA, 15 bp, Homo sapiens
agaggaaatcatttg

SEQ ID NO: 17438 - DNA, 15 bp, Homo sapiens
aagaggaaatcattt

SEQ ID NO: 17439 - DNA, 15 bp, Homo sapiens
gaagaggaaatcatt

SEQ ID NO: 17440 - DNA, 15 bp, Homo sapiens
ggaagaggaaatcat

SEQ ID NO: 17441 - DNA, 15 bp, Homo sapiens
tggaagaggaaatca

SEQ ID NO: 17442 - DNA, 15 bp, Homo sapiens
atggaagaggaaatc

SEQ ID NO: 17443 - DNA, 15 bp, Homo sapiens
aatggaagaggaaat

SEQ ID NO: 17444 - DNA, 15 bp, Homo sapiens
caatggaagaggaaa

SEQ ID NO: 17445 - DNA, 15 bp, Homo sapiens
tcaatggaagaggaa

SEQ ID NO: 17446 - DNA, 15 bp, Homo sapiens
ttcaatggaagagga

SEQ ID NO: 17447 - DNA, 15 bp, Homo sapiens
gttcaatggaagagg

SEQ ID NO: 17448 - DNA, 15 bp, Homo sapiens
tgttcaatggaagag

SEQ ID NO: 17449 - DNA, 15 bp, Homo sapiens
ttgttcaatggaaga

SEQ ID NO: 17450 - DNA, 15 bp, Homo sapiens
gttgttcaatggaag

SEQ ID NO: 17451 - DNA, 15 bp, Homo sapiens
tgttgttcaatggaa

SEQ ID NO: 17452 - DNA, 15 bp, Homo sapiens
ctgttgttcaatgga

SEQ ID NO: 17453 - DNA, 15 bp, Homo sapiens
gctgttgttcaatgg

SEQ ID NO: 17454 - DNA, 15 bp, Homo sapiens
ggctgttgttcaatg

SEQ ID NO: 17455 - DNA, 15 bp, Homo sapiens
tggctgttgttcaat

SEQ ID NO: 17456 - DNA, 15 bp, Homo sapiens
ctggctgttgttcaa

SEQ ID NO: 17457 - DNA, 15 bp, Homo sapiens
gctggctgttgttca

SEQ ID NO: 17458 - DNA, 15 bp, Homo sapiens
tgctggctgttgttc

SEQ ID NO: 17459 - DNA, 15 bp, Homo sapiens
gtgctggctgttgtt

SEQ ID NO: 17460 - DNA, 15 bp, Homo sapiens
agtgctggctgttgt

SEQ ID NO: 17461 - DNA, 15 bp, Homo sapiens
aagtgctggctgttg

SEQ ID NO: 17462 - DNA, 15 bp, Homo sapiens
taagtgctggctgtt

SEQ ID NO: 17463 - DNA, 15 bp, Homo sapiens
ttaagtgctggctgt

SEQ ID NO: 17464 - DNA, 15 bp, Homo sapiens
tttaagtgctggctg

SEQ ID NO: 17465 - DNA, 15 bp, Homo sapiens
ttttaagtgctggct

SEQ ID NO: 17466 - DNA, 15 bp, Homo sapiens
gttttaagtgctggc

SEQ ID NO: 17467 - DNA, 15 bp, Homo sapiens
ggttttaagtgctgg

SEQ ID NO: 17468 - DNA, 15 bp, Homo sapiens
aggttttaagtgctg

SEQ ID NO: 17469 - DNA, 15 bp, Homo sapiens
taggttttaagtgct

SEQ ID NO: 17470 - DNA, 15 bp, Homo sapiens
ctaggttttaagtgc

SEQ ID NO: 17471 - DNA, 15 bp, Homo sapiens
tctaggttttaagtg

SEQ ID NO: 17472 - DNA, 15 bp, Homo sapiens
ttctaggttttaagt

SEQ ID NO: 17473 - DNA, 15 bp, Homo sapiens
attctaggttttaag

SEQ ID NO: 17474 - DNA, 15 bp, Homo sapiens
aattctaggttttaa

SEQ ID NO: 17475 - DNA, 15 bp, Homo sapiens
gaattctaggtttta

SEQ ID NO: 17476 - DNA, 15 bp, Homo sapiens
ggaattctaggtttt

SEQ ID NO: 17477 - DNA, 15 bp, Homo sapiens
tggaattctaggttt

SEQ ID NO: 17478 - DNA, 15 bp, Homo sapiens
gtggaattctaggtt

SEQ ID NO: 17479 - DNA, 15 bp, Homo sapiens
tgtggaattctaggt

SEQ ID NO: 17480 - DNA, 15 bp, Homo sapiens
ctgtggaattctagg

SEQ ID NO: 17481 - DNA, 15 bp, Homo sapiens
tctgtggaattctag

SEQ ID NO: 17482 - DNA, 15 bp, Homo sapiens
ttctgtggaattcta

SEQ ID NO: 17483 - DNA, 15 bp, Homo sapiens
attctgtggaattct

SEQ ID NO: 17484 - DNA, 15 bp, Homo sapiens
aattctgtggaattc

SEQ ID NO: 17485 - DNA, 15 bp, Homo sapiens
gaattctgtggaatt

SEQ ID NO: 17486 - DNA, 15 bp, Homo sapiens
agaattctgtggaat

SEQ ID NO: 17487 - DNA, 15 bp, Homo sapiens
gagaattctgtggaa

SEQ ID NO: 17488 - DNA, 15 bp, Homo sapiens
agagaattctgtgga

SEQ ID NO: 17489 - DNA, 15 bp, Homo sapiens
gagagaattctgtgg

SEQ ID NO: 17490 - DNA, 15 bp, Homo sapiens
ggagagaattctgtg

SEQ ID NO: 17491 - DNA, 15 bp, Homo sapiens
aggagagaattctgt

SEQ ID NO: 17492 - DNA, 15 bp, Homo sapiens
gaggagagaattctg

SEQ ID NO: 17493 - DNA, 15 bp, Homo sapiens
cgaggagagaattct

SEQ ID NO: 17494 - DNA, 15 bp, Homo sapiens
tcgaggagagaattc

SEQ ID NO: 17495 - DNA, 15 bp, Homo sapiens
atcgaggagagaatt

SEQ ID NO: 17496 - DNA, 15 bp, Homo sapiens
aatcgaggagagaat

SEQ ID NO: 17497 - DNA, 15 bp, Homo sapiens
gaatcgaggagagaa

SEQ ID NO: 17498 - DNA, 15 bp, Homo sapiens
ggaatcgaggagaga

SEQ ID NO: 17499 - DNA, 15 bp, Homo sapiens
aggaatcgaggagag

SEQ ID NO: 17500 - DNA, 15 bp, Homo sapiens
gaggaatcgaggaga

SEQ ID NO: 17501 - DNA, 15 bp, Homo sapiens
agaggaatcgaggag

SEQ ID NO: 17502 - DNA, 15 bp, Homo sapiens
aagaggaatcgagga

SEQ ID NO: 17503 - DNA, 15 bp, Homo sapiens
aaagaggaatcgagg

SEQ ID NO: 17504 - DNA, 15 bp, Homo sapiens
taaagaggaatcgag

SEQ ID NO: 17505 - DNA, 15 bp, Homo sapiens
ttaaagaggaatcga

SEQ ID NO: 17506 - DNA, 15 bp, Homo sapiens
tttaaagaggaatcg

SEQ ID NO: 17507 - DNA, 15 bp, Homo sapiens
ttttaaagaggaatc

SEQ ID NO: 17508 - DNA, 15 bp, Homo sapiens
attttaaagaggaat

SEQ ID NO: 17509 - DNA, 15 bp, Homo sapiens
cattttaaagaggaa

SEQ ID NO: 17510 - DNA, 15 bp, Homo sapiens
gcattttaaagagga

SEQ ID NO: 17511 - DNA, 15 bp, Homo sapiens
tgcattttaaagagg

SEQ ID NO: 17512 - DNA, 15 bp, Homo sapiens
ttgcattttaaagag

SEQ ID NO: 17513 - DNA, 15 bp, Homo sapiens
attgcattttaaaga

SEQ ID NO: 17514 - DNA, 15 bp, Homo sapiens
aattgcattttaaag

SEQ ID NO: 17515 - DNA, 15 bp, Homo sapiens
gaattgcattttaaa

SEQ ID NO: 17516 - DNA, 15 bp, Homo sapiens
tgaattgcattttaa

SEQ ID NO: 17517 - DNA, 15 bp, Homo sapiens
gtgaattgcatttta

SEQ ID NO: 17518 - DNA, 15 bp, Homo sapiens
tgtgaattgcatttt

SEQ ID NO: 17519 - DNA, 15 bp, Homo sapiens
ctgtgaattgcattt

SEQ ID NO: 17520 - DNA, 15 bp, Homo sapiens
actgtgaattgcatt

SEQ ID NO: 17521 - DNA, 15 bp, Homo sapiens
aactgtgaattgcat

SEQ ID NO: 17522 - DNA, 15 bp, Homo sapiens
aaactgtgaattgca

SEQ ID NO: 17523 - DNA, 15 bp, Homo sapiens
caaactgtgaattgc

SEQ ID NO: 17524 - DNA, 15 bp, Homo sapiens
tcaaactgtgaattg

SEQ ID NO: 17525 - DNA, 15 bp, Homo sapiens
ctcaaactgtgaatt

SEQ ID NO: 17526 - DNA, 15 bp, Homo sapiens
tctcaaactgtgaat

SEQ ID NO: 17527 - DNA, 15 bp, Homo sapiens
atctcaaactgtgaa

SEQ ID NO: 17528 - DNA, 15 bp, Homo sapiens
gatctcaaactgtga

SEQ ID NO: 17529 - DNA, 15 bp, Homo sapiens
tgatctcaaactgtg

SEQ ID NO: 17530 - DNA, 15 bp, Homo sapiens
gtgatctcaaactgt

SEQ ID NO: 17531 - DNA, 15 bp, Homo sapiens
tgtgatctcaaactg

SEQ ID NO: 17532 - DNA, 15 bp, Homo sapiens
ctgtgatctcaaact

SEQ ID NO: 17533 - DNA, 15 bp, Homo sapiens
tctgtgatctcaaac

SEQ ID NO: 17534 - DNA, 15 bp, Homo sapiens
ctctgtgatctcaaa

SEQ ID NO: 17535 - DNA, 15 bp, Homo sapiens
gctctgtgatctcaa

SEQ ID NO: 17536 - DNA, 15 bp, Homo sapiens
ggctctgtgatctca

SEQ ID NO: 17537 - DNA, 15 bp, Homo sapiens
aggctctgtgatctc

SEQ ID NO: 17538 - DNA, 15 bp, Homo sapiens
caggctctgtgatct

SEQ ID NO: 17539 - DNA, 15 bp, Homo sapiens
gcaggctctgtgatc

SEQ ID NO: 17540 - DNA, 15 bp, Homo sapiens
ggcaggctctgtgat

SEQ ID NO: 17541 - DNA, 15 bp, Homo sapiens
tggcaggctctgtga

SEQ ID NO: 17542 - DNA, 15 bp, Homo sapiens
ctggcaggctctgtg

SEQ ID NO: 17543 - DNA, 15 bp, Homo sapiens
actggcaggctctgt

SEQ ID NO: 17544 - DNA, 15 bp, Homo sapiens
cactggcaggctctg

SEQ ID NO: 17545 - DNA, 15 bp, Homo sapiens
ccactggcaggctct

SEQ ID NO: 17546 - DNA, 15 bp, Homo sapiens
gccactggcaggctc

SEQ ID NO: 17547 - DNA, 15 bp, Homo sapiens
agccactggcaggct

SEQ ID NO: 17548 - DNA, 15 bp, Homo sapiens
cagccactggcaggc

SEQ ID NO: 17549 - DNA, 15 bp, Homo sapiens
tcagccactggcagg

SEQ ID NO: 17550 - DNA, 15 bp, Homo sapiens
ttcagccactggcag

SEQ ID NO: 17551 - DNA, 15 bp, Homo sapiens
attcagccactggca

SEQ ID NO: 17552 - DNA, 15 bp, Homo sapiens
cattcagccactggc

SEQ ID NO: 17553 - DNA, 15 bp, Homo sapiens
ccattcagccactgg

SEQ ID NO: 17554 - DNA, 15 bp, Homo sapiens
gccattcagccactg

SEQ ID NO: 17555 - DNA, 15 bp, Homo sapiens
agccattcagccact

SEQ ID NO: 17556 - DNA, 15 bp, Homo sapiens
cagccattcagccac

SEQ ID NO: 17557 - DNA, 15 bp, Homo sapiens
gcagccattcagcca

SEQ ID NO: 17558 - DNA, 15 bp, Homo sapiens
tgcagccattcagcc

SEQ ID NO: 17559 - DNA, 15 bp, Homo sapiens
gtgcagccattcagc

SEQ ID NO: 17560 - DNA, 15 bp, Homo sapiens
agtgcagccattcag

SEQ ID NO: 17561 - DNA, 15 bp, Homo sapiens
tagtgcagccattca

SEQ ID NO: 17562 - DNA, 15 bp, Homo sapiens
ctagtgcagccattc

SEQ ID NO: 17563 - DNA, 15 bp, Homo sapiens
tctagtgcagccatt

SEQ ID NO: 17564 - DNA, 15 bp, Homo sapiens
atctagtgcagccat

SEQ ID NO: 17565 - DNA, 15 bp, Homo sapiens
catctagtgcagcca

SEQ ID NO: 17566 - DNA, 15 bp, Homo sapiens
ccatctagtgcagcc

SEQ ID NO: 17567 - DNA, 15 bp, Homo sapiens
gccatctagtgcagc

SEQ ID NO: 17568 - DNA, 15 bp, Homo sapiens
agccatctagtgcag

SEQ ID NO: 17569 - DNA, 15 bp, Homo sapiens
cagccatctagtgca

SEQ ID NO: 17570 - DNA, 15 bp, Homo sapiens
tcagccatctagtgc

SEQ ID NO: 17571 - DNA, 15 bp, Homo sapiens
ctcagccatctagtg

SEQ ID NO: 17572 - DNA, 15 bp, Homo sapiens
tctcagccatctagt

SEQ ID NO: 17573 - DNA, 15 bp, Homo sapiens
ctctcagccatctag

SEQ ID NO: 17574 - DNA, 15 bp, Homo sapiens
actctcagccatcta

SEQ ID NO: 17575 - DNA, 15 bp, Homo sapiens
gactctcagccatct

SEQ ID NO: 17576 - DNA, 15 bp, Homo sapiens
ggactctcagccatc

SEQ ID NO: 17577 - DNA, 15 bp, Homo sapiens
aggactctcagccat

SEQ ID NO: 17578 - DNA, 15 bp, Homo sapiens
aaggactctcagcca

SEQ ID NO: 17579 - DNA, 15 bp, Homo sapiens
gaaggactctcagcc

SEQ ID NO: 17580 - DNA, 15 bp, Homo sapiens
tgaaggactctcagc

SEQ ID NO: 17581 - DNA, 15 bp, Homo sapiens
ttgaaggactctcag

SEQ ID NO: 17582 - DNA, 15 bp, Homo sapiens
attgaaggactctca

SEQ ID NO: 17583 - DNA, 15 bp, Homo sapiens
aattgaaggactctc

SEQ ID NO: 17584 - DNA, 15 bp, Homo sapiens
taattgaaggactct

SEQ ID NO: 17585 - DNA, 15 bp, Homo sapiens
ttaattgaaggactc

SEQ ID NO: 17586 - DNA, 15 bp, Homo sapiens
cttaattgaaggact

SEQ ID NO: 17587 - DNA, 15 bp, Homo sapiens
gcttaattgaaggac

SEQ ID NO: 17588 - DNA, 15 bp, Homo sapiens
tgcttaattgaagga

SEQ ID NO: 17589 - DNA, 15 bp, Homo sapiens
ttgcttaattgaagg

SEQ ID NO: 17590 - DNA, 15 bp, Homo sapiens
gttgcttaattgaag

SEQ ID NO: 17591 - DNA, 15 bp, Homo sapiens
tgttgcttaattgaa

SEQ ID NO: 17592 - DNA, 15 bp, Homo sapiens
ttgttgcttaattga

SEQ ID NO: 17593 - DNA, 15 bp, Homo sapiens
attgttgcttaattg

SEQ ID NO: 17594 - DNA, 15 bp, Homo sapiens
aattgttgcttaatt

SEQ ID NO: 17595 - DNA, 15 bp, Homo sapiens
aaattgttgcttaat

SEQ ID NO: 17596 - DNA, 15 bp, Homo sapiens
aaaattgttgcttaa

SEQ ID NO: 17597 - DNA, 15 bp, Homo sapiens
caaaattgttgctta

SEQ ID NO: 17598 - DNA, 15 bp, Homo sapiens
gcaaaattgttgctt

SEQ ID NO: 17599 - DNA, 15 bp, Homo sapiens
tgcaaaattgttgct

SEQ ID NO: 17600 - DNA, 15 bp, Homo sapiens
ttgcaaaattgttgc

SEQ ID NO: 17601 - DNA, 15 bp, Homo sapiens
attgcaaaattgttg

SEQ ID NO: 17602 - DNA, 15 bp, Homo sapiens
aattgcaaaattgtt

SEQ ID NO: 17603 - DNA, 15 bp, Homo sapiens
taattgcaaaattgt

SEQ ID NO: 17604 - DNA, 15 bp, Homo sapiens
ctaattgcaaaattg

SEQ ID NO: 17605 - DNA, 15 bp, Homo sapiens
actaattgcaaaatt

SEQ ID NO: 17606 - DNA, 15 bp, Homo sapiens
cactaattgcaaaat

SEQ ID NO: 17607 - DNA, 15 bp, Homo sapiens
ccactaattgcaaaa

SEQ ID NO: 17608 - DNA, 15 bp, Homo sapiens
tccactaattgcaaa

SEQ ID NO: 17609 - DNA, 15 bp, Homo sapiens
ttccactaattgcaa

SEQ ID NO: 17610 - DNA, 15 bp, Homo sapiens
tttccactaattgca

SEQ ID NO: 17611 - DNA, 15 bp, Homo sapiens
gtttccactaattgc

SEQ ID NO: 17612 - DNA, 15 bp, Homo sapiens
agtttccactaattg

SEQ ID NO: 17613 - DNA, 15 bp, Homo sapiens
cagtttccactaatt

SEQ ID NO: 17614 - DNA, 15 bp, Homo sapiens
tcagtttccactaat

SEQ ID NO: 17615 - DNA, 15 bp, Homo sapiens
ctcagtttccactaa

SEQ ID NO: 17616 - DNA, 15 bp, Homo sapiens
actcagtttccacta

SEQ ID NO: 17617 - DNA, 15 bp, Homo sapiens
cactcagtttccact

SEQ ID NO: 17618 - DNA, 15 bp, Homo sapiens
gcactcagtttccac

SEQ ID NO: 17619 - DNA, 15 bp, Homo sapiens
agcactcagtttcca

SEQ ID NO: 17620 - DNA, 15 bp, Homo sapiens
gagcactcagtttcc

SEQ ID NO: 17621 - DNA, 15 bp, Homo sapiens
agagcactcagtttc

SEQ ID NO: 17622 - DNA, 15 bp, Homo sapiens
tagagcactcagttt

SEQ ID NO: 17623 - DNA, 15 bp, Homo sapiens
atagagcactcagtt

SEQ ID NO: 17624 - DNA, 15 bp, Homo sapiens
tatagagcactcagt

SEQ ID NO: 17625 - DNA, 15 bp, Homo sapiens
ttatagagcactcag

SEQ ID NO: 17626 - DNA, 15 bp, Homo sapiens
gttatagagcactca

SEQ ID NO: 17627 - DNA, 15 bp, Homo sapiens
tgttatagagcactc

SEQ ID NO: 17628 - DNA, 15 bp, Homo sapiens
ttgttatagagcact

SEQ ID NO: 17629 - DNA, 15 bp, Homo sapiens
attgttatagagcac

SEQ ID NO: 17630 - DNA, 15 bp, Homo sapiens
aattgttatagagca

SEQ ID NO: 17631 - DNA, 15 bp, Homo sapiens
caattgttatagagc

SEQ ID NO: 17632 - DNA, 15 bp, Homo sapiens
acaattgttatagag

SEQ ID NO: 17633 - DNA, 15 bp, Homo sapiens
aacaattgttataga

SEQ ID NO: 17634 - DNA, 15 bp, Homo sapiens
aaacaattgttatag

SEQ ID NO: 17635 - DNA, 15 bp, Homo sapiens
caaacaattgttata

SEQ ID NO: 17636 - DNA, 15 bp, Homo sapiens
tcaaacaattgttat

SEQ ID NO: 17637 - DNA, 15 bp, Homo sapiens
ttcaaacaattgtta

SEQ ID NO: 17638 - DNA, 15 bp, Homo sapiens
tttcaaacaattgtt

SEQ ID NO: 17639 - DNA, 15 bp, Homo sapiens
ttttcaaacaattgt

SEQ ID NO: 17640 - DNA, 15 bp, Homo sapiens
gttttcaaacaattg

SEQ ID NO: 17641 - DNA, 15 bp, Homo sapiens
tgttttcaaacaatt

SEQ ID NO: 17642 - DNA, 15 bp, Homo sapiens
ttgttttcaaacaat

SEQ ID NO: 17643 - DNA, 15 bp, Homo sapiens
cttgttttcaaacaa

SEQ ID NO: 17644 - DNA, 15 bp, Homo sapiens
acttgttttcaaaca

SEQ ID NO: 17645 - DNA, 15 bp, Homo sapiens
aacttgttttcaaac

SEQ ID NO: 17646 - DNA, 15 bp, Homo sapiens
caacttgttttcaaa

SEQ ID NO: 17647 - DNA, 15 bp, Homo sapiens
tcaacttgttttcaa

SEQ ID NO: 17648 - DNA, 15 bp, Homo sapiens
ctcaacttgttttca

SEQ ID NO: 17649 - DNA, 15 bp, Homo sapiens
tctcaacttgttttc

SEQ ID NO: 17650 - DNA, 15 bp, Homo sapiens
gtctcaacttgtttt

SEQ ID NO: 17651 - DNA, 15 bp, Homo sapiens
tgtctcaacttgttt

SEQ ID NO: 17652 - DNA, 15 bp, Homo sapiens
ttgtctcaacttgtt

SEQ ID NO: 17653 - DNA, 15 bp, Homo sapiens
cttgtctcaacttgt

SEQ ID NO: 17654 - DNA, 15 bp, Homo sapiens
acttgtctcaacttg

SEQ ID NO: 17655 - DNA, 15 bp, Homo sapiens
aacttgtctcaactt

SEQ ID NO: 17656 - DNA, 15 bp, Homo sapiens
taacttgtctcaact

SEQ ID NO: 17657 - DNA, 15 bp, Homo sapiens
ctaacttgtctcaac

SEQ ID NO: 17658 - DNA, 15 bp, Homo sapiens
gctaacttgtctcaa

SEQ ID NO: 17659 - DNA, 15 bp, Homo sapiens
tgctaacttgtctca

SEQ ID NO: 17660 - DNA, 15 bp, Homo sapiens
ttgctaacttgtctc

SEQ ID NO: 17661 - DNA, 15 bp, Homo sapiens
attgctaacttgtct

SEQ ID NO: 17662 - DNA, 15 bp, Homo sapiens
aattgctaacttgtc

SEQ ID NO: 17663 - DNA, 15 bp, Homo sapiens
taattgctaacttgt

SEQ ID NO: 17664 - DNA, 15 bp, Homo sapiens
gtaattgctaacttg

SEQ ID NO: 17665 - DNA, 15 bp, Homo sapiens
ggtaattgctaactt

SEQ ID NO: 17666 - DNA, 15 bp, Homo sapiens
gggtaattgctaact

SEQ ID NO: 17667 - DNA, 15 bp, Homo sapiens
agggtaattgctaac

SEQ ID NO: 17668 - DNA, 15 bp, Homo sapiens
tagggtaattgctaa

SEQ ID NO: 17669 - DNA, 15 bp, Homo sapiens
atagggtaattgcta

SEQ ID NO: 17670 - DNA, 15 bp, Homo sapiens
tatagggtaattgct

SEQ ID NO: 17671 - DNA, 15 bp, Homo sapiens
ttatagggtaattgc

SEQ ID NO: 17672 - DNA, 15 bp, Homo sapiens
tttatagggtaattg

SEQ ID NO: 17673 - DNA, 15 bp, Homo sapiens
ttttatagggtaatt

SEQ ID NO: 17674 - DNA, 15 bp, Homo sapiens
cttttatagggtaat

SEQ ID NO: 17675 - DNA, 15 bp, Homo sapiens
ccttttatagggtaa

SEQ ID NO: 17676 - DNA, 15 bp, Homo sapiens
cccttttatagggta

SEQ ID NO: 17677 - DNA, 15 bp, Homo sapiens
tcccttttatagggt

SEQ ID NO: 17678 - DNA, 15 bp, Homo sapiens
gtcccttttataggg

SEQ ID NO: 17679 - DNA, 15 bp, Homo sapiens
tgtcccttttatagg

SEQ ID NO: 17680 - DNA, 15 bp, Homo sapiens
atgtcccttttatag

SEQ ID NO: 17681 - DNA, 15 bp, Homo sapiens
tatgtcccttttata

SEQ ID NO: 17682 - DNA, 15 bp, Homo sapiens
atatgtcccttttat

SEQ ID NO: 17683 - DNA, 15 bp, Homo sapiens
aatatgtccctttta

SEQ ID NO: 17684 - DNA, 15 bp, Homo sapiens
gaatatgtccctttt

SEQ ID NO: 17685 - DNA, 15 bp, Homo sapiens
tgaatatgtcccttt

SEQ ID NO: 17686 - DNA, 15 bp, Homo sapiens
gtgaatatgtccctt

SEQ ID NO: 17687 - DNA, 15 bp, Homo sapiens
agtgaatatgtccct

SEQ ID NO: 17688 - DNA, 15 bp, Homo sapiens
aagtgaatatgtccc

SEQ ID NO: 17689 - DNA, 15 bp, Homo sapiens
aaagtgaatatgtcc

SEQ ID NO: 17690 - DNA, 15 bp, Homo sapiens
aaaagtgaatatgtc

SEQ ID NO: 17691 - DNA, 15 bp, Homo sapiens
caaaagtgaatatgt

SEQ ID NO: 17692 - DNA, 15 bp, Homo sapiens
acaaaagtgaatatg

SEQ ID NO: 17693 - DNA, 15 bp, Homo sapiens
aacaaaagtgaatat

SEQ ID NO: 17694 - DNA, 15 bp, Homo sapiens
caacaaaagtgaata

SEQ ID NO: 17695 - DNA, 15 bp, Homo sapiens
ccaacaaaagtgaat

SEQ ID NO: 17696 - DNA, 15 bp, Homo sapiens
tccaacaaaagtgaa

SEQ ID NO: 17697 - DNA, 15 bp, Homo sapiens
atccaacaaaagtga

SEQ ID NO: 17698 - DNA, 15 bp, Homo sapiens
tatccaacaaaagtg

SEQ ID NO: 17699 - DNA, 15 bp, Homo sapiens
ctatccaacaaaagt

SEQ ID NO: 17700 - DNA, 15 bp, Homo sapiens
cctatccaacaaaag

SEQ ID NO: 17701 - DNA, 15 bp, Homo sapiens
gcctatccaacaaaa

SEQ ID NO: 17702 - DNA, 15 bp, Homo sapiens
cgcctatccaacaaa

SEQ ID NO: 17703 - DNA, 15 bp, Homo sapiens
tcgcctatccaacaa

SEQ ID NO: 17704 - DNA, 15 bp, Homo sapiens
ctcgcctatccaaca

SEQ ID NO: 17705 - DNA, 15 bp, Homo sapiens
tctcgcctatccaac

SEQ ID NO: 17706 - DNA, 15 bp, Homo sapiens
gtctcgcctatccaa

SEQ ID NO: 17707 - DNA, 15 bp, Homo sapiens
ggtctcgcctatcca

SEQ ID NO: 17708 - DNA, 15 bp, Homo sapiens
gggtctcgcctatcc

SEQ ID NO: 17709 - DNA, 15 bp, Homo sapiens
ggggtctcgcctatc

SEQ ID NO: 17710 - DNA, 15 bp, Homo sapiens
aggggtctcgcctat

SEQ ID NO: 17711 - DNA, 15 bp, Homo sapiens
gaggggtctcgccta

SEQ ID NO: 17712 - DNA, 15 bp, Homo sapiens
tgaggggtctcgcct

SEQ ID NO: 17713 - DNA, 15 bp, Homo sapiens
gtgaggggtctcgcc

SEQ ID NO: 17714 - DNA, 15 bp, Homo sapiens
tgtgaggggtctcgc

SEQ ID NO: 17715 - DNA, 15 bp, Homo sapiens
gtgtgaggggtctcg

SEQ ID NO: 17716 - DNA, 15 bp, Homo sapiens
tgtgtgaggggtctc

SEQ ID NO: 17717 - DNA, 15 bp, Homo sapiens
ttgtgtgaggggtct

SEQ ID NO: 17718 - DNA, 15 bp, Homo sapiens
tttgtgtgaggggtc

SEQ ID NO: 17719 - DNA, 15 bp, Homo sapiens
atttgtgtgaggggt

SEQ ID NO: 17720 - DNA, 15 bp, Homo sapiens
aatttgtgtgagggg

SEQ ID NO: 17721 - DNA, 15 bp, Homo sapiens
caatttgtgtgaggg

SEQ ID NO: 17722 - DNA, 15 bp, Homo sapiens
tcaatttgtgtgagg

SEQ ID NO: 17723 - DNA, 15 bp, Homo sapiens
ttcaatttgtgtgag

SEQ ID NO: 17724 - DNA, 15 bp, Homo sapiens
gttcaatttgtgtga

SEQ ID NO: 17725 - DNA, 15 bp, Homo sapiens
agttcaatttgtgtg

SEQ ID NO: 17726 - DNA, 15 bp, Homo sapiens
gagttcaatttgtgt

SEQ ID NO: 17727 - DNA, 15 bp, Homo sapiens
agagttcaatttgtg

SEQ ID NO: 17728 - DNA, 15 bp, Homo sapiens
aagagttcaatttgt

SEQ ID NO: 17729 - DNA, 15 bp, Homo sapiens
gaagagttcaatttg

SEQ ID NO: 17730 - DNA, 15 bp, Homo sapiens
ggaagagttcaattt

SEQ ID NO: 17731 - DNA, 15 bp, Homo sapiens
tggaagagttcaatt

SEQ ID NO: 17732 - DNA, 15 bp, Homo sapiens
gtggaagagttcaat

SEQ ID NO: 17733 - DNA, 15 bp, Homo sapiens
tgtggaagagttcaa

SEQ ID NO: 17734 - DNA, 15 bp, Homo sapiens
gtgtggaagagttca

SEQ ID NO: 17735 - DNA, 15 bp, Homo sapiens
tgtgtggaagagttc

SEQ ID NO: 17736 - DNA, 15 bp, Homo sapiens
ctgtgtggaagagtt

SEQ ID NO: 17737 - DNA, 15 bp, Homo sapiens
cctgtgtggaagagt

SEQ ID NO: 17738 - DNA, 15 bp, Homo sapiens
ccctgtgtggaagag

SEQ ID NO: 17739 - DNA, 15 bp, Homo sapiens
tccctgtgtggaaga

SEQ ID NO: 17740 - DNA, 15 bp, Homo sapiens
ctccctgtgtggaag

SEQ ID NO: 17741 - DNA, 15 bp, Homo sapiens
tctccctgtgtggaa

SEQ ID NO: 17742 - DNA, 15 bp, Homo sapiens
atctccctgtgtgga

SEQ ID NO: 17743 - DNA, 15 bp, Homo sapiens
catctccctgtgtgg

SEQ ID NO: 17744 - DNA, 15 bp, Homo sapiens
gcatctccctgtgtg

SEQ ID NO: 17745 - DNA, 15 bp, Homo sapiens
tgcatctccctgtgt

SEQ ID NO: 17746 - DNA, 15 bp, Homo sapiens
ttgcatctccctgtg

SEQ ID NO: 17747 - DNA, 15 bp, Homo sapiens
cttgcatctccctgt

SEQ ID NO: 17748 - DNA, 15 bp, Homo sapiens
acttgcatctccctg

SEQ ID NO: 17749 - DNA, 15 bp, Homo sapiens
aacttgcatctccct

SEQ ID NO: 17750 - DNA, 15 bp, Homo sapiens
caacttgcatctccc

SEQ ID NO: 17751 - DNA, 15 bp, Homo sapiens
tcaacttgcatctcc

SEQ ID NO: 17752 - DNA, 15 bp, Homo sapiens
ttcaacttgcatctc

SEQ ID NO: 17753 - DNA, 15 bp, Homo sapiens
tttcaacttgcatct

SEQ ID NO: 17754 - DNA, 15 bp, Homo sapiens
ttttcaacttgcatc

SEQ ID NO: 17755 - DNA, 15 bp, Homo sapiens
attttcaacttgcat

SEQ ID NO: 17756 - DNA, 15 bp, Homo sapiens
aattttcaacttgca

SEQ ID NO: 17757 - DNA, 15 bp, Homo sapiens
taattttcaacttgc

SEQ ID NO: 17758 - DNA, 15 bp, Homo sapiens
ttaattttcaacttg

SEQ ID NO: 17759 - DNA, 15 bp, Homo sapiens
attaattttcaactt

SEQ ID NO: 17760 - DNA, 15 bp, Homo sapiens
cattaattttcaact

SEQ ID NO: 17761 - DNA, 15 bp, Homo sapiens
acattaattttcaac

SEQ ID NO: 17762 - DNA, 15 bp, Homo sapiens
aacattaattttcaa

SEQ ID NO: 17763 - DNA, 15 bp, Homo sapiens
aaacattaattttca

SEQ ID NO: 17764 - DNA, 15 bp, Homo sapiens
aaaacattaattttc

SEQ ID NO: 17765 - DNA, 15 bp, Homo sapiens
taaaacattaatttt

SEQ ID NO: 17766 - DNA, 15 bp, Homo sapiens
ttaaaacattaattt

SEQ ID NO: 17767 - DNA, 15 bp, Homo sapiens
attaaaacattaatt

SEQ ID NO: 17768 - DNA, 15 bp, Homo sapiens
gattaaaacattaat

SEQ ID NO: 17769 - DNA, 15 bp, Homo sapiens
tgattaaaacattaa

SEQ ID NO: 17770 - DNA, 15 bp, Homo sapiens
gtgattaaaacatta

SEQ ID NO: 17771 - DNA, 15 bp, Homo sapiens
agtgattaaaacatt

SEQ ID NO: 17772 - DNA, 15 bp, Homo sapiens
tagtgattaaaacat

SEQ ID NO: 17773 - DNA, 15 bp, Homo sapiens
ttagtgattaaaaca

SEQ ID NO: 17774 - DNA, 15 bp, Homo sapiens
tttagtgattaaaac

SEQ ID NO: 17775 - DNA, 15 bp, Homo sapiens
ttttagtgattaaaa

SEQ ID NO: 17776 - DNA, 15 bp, Homo sapiens
attttagtgattaaa

SEQ ID NO: 17777 - DNA, 15 bp, Homo sapiens
gattttagtgattaa

SEQ ID NO: 17778 - DNA, 15 bp, Homo sapiens
tgattttagtgatta

SEQ ID NO: 17779 - DNA, 15 bp, Homo sapiens
ttgattttagtgatt

SEQ ID NO: 17780 - DNA, 15 bp, Homo sapiens
tttgattttagtgat

SEQ ID NO: 17781 - DNA, 15 bp, Homo sapiens
atttgattttagtga

SEQ ID NO: 17782 - DNA, 15 bp, Homo sapiens
gatttgattttagtg

SEQ ID NO: 17783 - DNA, 15 bp, Homo sapiens
ggatttgattttagt

SEQ ID NO: 17784 - DNA, 15 bp, Homo sapiens
tggatttgattttag

SEQ ID NO: 17785 - DNA, 15 bp, Homo sapiens
atggatttgatttta

SEQ ID NO: 17786 - DNA, 15 bp, Homo sapiens
tatggatttgatttt

SEQ ID NO: 17787 - DNA, 15 bp, Homo sapiens
atatggatttgattt

SEQ ID NO: 17788 - DNA, 15 bp, Homo sapiens
aatatggatttgatt

SEQ ID NO: 17789 - DNA, 15 bp, Homo sapiens
taatatggatttgat

SEQ ID NO: 17790 - DNA, 15 bp, Homo sapiens
ataatatggatttga

SEQ ID NO: 17791 - DNA, 15 bp, Homo sapiens
cataatatggatttg

SEQ ID NO: 17792 - DNA, 15 bp, Homo sapiens
ccataatatggattt

SEQ ID NO: 17793 - DNA, 15 bp, Homo sapiens
cccataatatggatt

SEQ ID NO: 17794 - DNA, 15 bp, Homo sapiens
gcccataatatggat

SEQ ID NO: 17795 - DNA, 15 bp, Homo sapiens
tgcccataatatgga

SEQ ID NO: 17796 - DNA, 15 bp, Homo sapiens
gtgcccataatatgg

SEQ ID NO: 17797 - DNA, 15 bp, Homo sapiens
ggtgcccataatatg

SEQ ID NO: 17798 - DNA, 15 bp, Homo sapiens
aggtgcccataatat

SEQ ID NO: 17799 - DNA, 15 bp, Homo sapiens
caggtgcccataata

SEQ ID NO: 17800 - DNA, 15 bp, Homo sapiens
tcaggtgcccataat

SEQ ID NO: 17801 - DNA, 15 bp, Homo sapiens
ttcaggtgcccataa

SEQ ID NO: 17802 - DNA, 15 bp, Homo sapiens
tttcaggtgcccata

SEQ ID NO: 17803 - DNA, 15 bp, Homo sapiens
atttcaggtgcccat

SEQ ID NO: 17804 - DNA, 15 bp, Homo sapiens
catttcaggtgccca

SEQ ID NO: 17805 - DNA, 15 bp, Homo sapiens
ccatttcaggtgccc

SEQ ID NO: 17806 - DNA, 15 bp, Homo sapiens
cccatttcaggtgcc

SEQ ID NO: 17807 - DNA, 15 bp, Homo sapiens
tcccatttcaggtgc

SEQ ID NO: 17808 - DNA, 15 bp, Homo sapiens
ctcccatttcaggtg

SEQ ID NO: 17809 - DNA, 15 bp, Homo sapiens
actcccatttcaggt

SEQ ID NO: 17810 - DNA, 15 bp, Homo sapiens
cactcccatttcagg

SEQ ID NO: 17811 - DNA, 15 bp, Homo sapiens
gcactcccatttcag

SEQ ID NO: 17812 - DNA, 15 bp, Homo sapiens
ggcactcccatttca

SEQ ID NO: 17813 - DNA, 15 bp, Homo sapiens
aggcactcccatttc

SEQ ID NO: 17814 - DNA, 15 bp, Homo sapiens
aaggcactcccattt

SEQ ID NO: 17815 - DNA, 15 bp, Homo sapiens
aaaggcactcccatt

SEQ ID NO: 17816 - DNA, 15 bp, Homo sapiens
gaaaggcactcccat

SEQ ID NO: 17817 - DNA, 15 bp, Homo sapiens
agaaaggcactccca

SEQ ID NO: 17818 - DNA, 15 bp, Homo sapiens
aagaaaggcactccc

SEQ ID NO: 17819 - DNA, 15 bp, Homo sapiens
gaagaaaggcactcc

SEQ ID NO: 17820 - DNA, 15 bp, Homo sapiens
agaagaaaggcactc

SEQ ID NO: 17821 - DNA, 15 bp, Homo sapiens
gagaagaaaggcact

SEQ ID NO: 17822 - DNA, 15 bp, Homo sapiens
tgagaagaaaggcac

SEQ ID NO: 17823 - DNA, 15 bp, Homo sapiens
ttgagaagaaaggca

SEQ ID NO: 17824 - DNA, 15 bp, Homo sapiens
tttgagaagaaaggc

SEQ ID NO: 17825 - DNA, 15 bp, Homo sapiens
ttttgagaagaaagg

SEQ ID NO: 17826 - DNA, 15 bp, Homo sapiens
cttttgagaagaaag

SEQ ID NO: 17827 - DNA, 15 bp, Homo sapiens
tcttttgagaagaaa

SEQ ID NO: 17828 - DNA, 15 bp, Homo sapiens
atcttttgagaagaa

SEQ ID NO: 17829 - DNA, 15 bp, Homo sapiens
tatcttttgagaaga

SEQ ID NO: 17830 - DNA, 15 bp, Homo sapiens
atatcttttgagaag

SEQ ID NO: 17831 - DNA, 15 bp, Homo sapiens
aatatcttttgagaa

SEQ ID NO: 17832 - DNA, 15 bp, Homo sapiens
gaatatcttttgaga

SEQ ID NO: 17833 - DNA, 15 bp, Homo sapiens
tgaatatcttttgag

SEQ ID NO: 17834 - DNA, 15 bp, Homo sapiens
ctgaatatcttttga

SEQ ID NO: 17835 - DNA, 15 bp, Homo sapiens
tctgaatatcttttg

SEQ ID NO: 17836 - DNA, 15 bp, Homo sapiens
ctctgaatatctttt

SEQ ID NO: 17837 - DNA, 15 bp, Homo sapiens
actctgaatatcttt

SEQ ID NO: 17838 - DNA, 15 bp, Homo sapiens
aactctgaatatctt

SEQ ID NO: 17839 - DNA, 15 bp, Homo sapiens
aaactctgaatatct

SEQ ID NO: 17840 - DNA, 15 bp, Homo sapiens
taaactctgaatatc

SEQ ID NO: 17841 - DNA, 15 bp, Homo sapiens
ctaaactctgaatat

SEQ ID NO: 17842 - DNA, 15 bp, Homo sapiens
gctaaactctgaata

SEQ ID NO: 17843 - DNA, 15 bp, Homo sapiens
agctaaactctgaat

SEQ ID NO: 17844 - DNA, 15 bp, Homo sapiens
tagctaaactctgaa

SEQ ID NO: 17845 - DNA, 15 bp, Homo sapiens
atagctaaactctga

SEQ ID NO: 17846 - DNA, 15 bp, Homo sapiens
gatagctaaactctg

SEQ ID NO: 17847 - DNA, 15 bp, Homo sapiens
tgatagctaaactct

SEQ ID NO: 17848 - DNA, 15 bp, Homo sapiens
atgatagctaaactc

SEQ ID NO: 17849 - DNA, 15 bp, Homo sapiens
gatgatagctaaact

SEQ ID NO: 17850 - DNA, 15 bp, Homo sapiens
ggatgatagctaaac

SEQ ID NO: 17851 - DNA, 15 bp, Homo sapiens
tggatgatagctaaa

SEQ ID NO: 17852 - DNA, 15 bp, Homo sapiens
gtggatgatagctaa

SEQ ID NO: 17853 - DNA, 15 bp, Homo sapiens
agtggatgatagcta

SEQ ID NO: 17854 - DNA, 15 bp, Homo sapiens
gagtggatgatagct

SEQ ID NO: 17855 - DNA, 15 bp, Homo sapiens
agagtggatgatagc

SEQ ID NO: 17856 - DNA, 15 bp, Homo sapiens
gagagtggatgatag

SEQ ID NO: 17857 - DNA, 15 bp, Homo sapiens
agagagtggatgata

SEQ ID NO: 17858 - DNA, 15 bp, Homo sapiens
tagagagtggatgat

SEQ ID NO: 17859 - DNA, 15 bp, Homo sapiens
atagagagtggatga

SEQ ID NO: 17860 - DNA, 15 bp, Homo sapiens
catagagagtggatg

SEQ ID NO: 17861 - DNA, 15 bp, Homo sapiens
gcatagagagtggat

SEQ ID NO: 17862 - DNA, 15 bp, Homo sapiens
agcatagagagtgga

SEQ ID NO: 17863 - DNA, 15 bp, Homo sapiens
cagcatagagagtgg

SEQ ID NO: 17864 - DNA, 15 bp, Homo sapiens
acagcatagagagtg

SEQ ID NO: 17865 - DNA, 15 bp, Homo sapiens
gacagcatagagagt

SEQ ID NO: 17866 - DNA, 15 bp, Homo sapiens
agacagcatagagag

SEQ ID NO: 17867 - DNA, 15 bp, Homo sapiens
cagacagcatagaga

SEQ ID NO: 17868 - DNA, 15 bp, Homo sapiens
acagacagcatagag

SEQ ID NO: 17869 - DNA, 15 bp, Homo sapiens
aacagacagcataga

SEQ ID NO: 17870 - DNA, 15 bp, Homo sapiens
aaacagacagcatag

SEQ ID NO: 17871 - DNA, 15 bp, Homo sapiens
aaaacagacagcata

SEQ ID NO: 17872 - DNA, 15 bp, Homo sapiens
aaaaacagacagcat

SEQ ID NO: 17873 - DNA, 15 bp, Homo sapiens
taaaaacagacagca

SEQ ID NO: 17874 - DNA, 15 bp, Homo sapiens
ataaaaacagacagc

SEQ ID NO: 17875 - DNA, 15 bp, Homo sapiens
aataaaaacagacag

SEQ ID NO: 17876 - DNA, 15 bp, Homo sapiens
gaataaaaacagaca

SEQ ID NO: 17877 - DNA, 15 bp, Homo sapiens
tgaataaaaacagac

SEQ ID NO: 17878 - DNA, 15 bp, Homo sapiens
ctgaataaaaacaga

SEQ ID NO: 17879 - DNA, 15 bp, Homo sapiens
cctgaataaaaacag

SEQ ID NO: 17880 - DNA, 15 bp, Homo sapiens
tcctgaataaaaaca

SEQ ID NO: 17881 - DNA, 15 bp, Homo sapiens
ttcctgaataaaaac

SEQ ID NO: 17882 - DNA, 15 bp, Homo sapiens
cttcctgaataaaaa

SEQ ID NO: 17883 - DNA, 15 bp, Homo sapiens
acttcctgaataaaa

SEQ ID NO: 17884 - DNA, 15 bp, Homo sapiens
gacttcctgaataaa

SEQ ID NO: 17885 - DNA, 15 bp, Homo sapiens
agacttcctgaataa

SEQ ID NO: 17886 - DNA, 15 bp, Homo sapiens
cagacttcctgaata

SEQ ID NO: 17887 - DNA, 15 bp, Homo sapiens
tcagacttcctgaat

SEQ ID NO: 17888 - DNA, 15 bp, Homo sapiens
ttcagacttcctgaa

SEQ ID NO: 17889 - DNA, 15 bp, Homo sapiens
tttcagacttcctga

SEQ ID NO: 17890 - DNA, 15 bp, Homo sapiens
atttcagacttcctg

SEQ ID NO: 17891 - DNA, 15 bp, Homo sapiens
aatttcagacttcct

SEQ ID NO: 17892 - DNA, 15 bp, Homo sapiens
caatttcagacttcc

SEQ ID NO: 17893 - DNA, 15 bp, Homo sapiens
acaatttcagacttc

SEQ ID NO: 17894 - DNA, 15 bp, Homo sapiens
aacaatttcagactt

SEQ ID NO: 17895 - DNA, 15 bp, Homo sapiens
gaacaatttcagact

SEQ ID NO: 17896 - DNA, 15 bp, Homo sapiens
agaacaatttcagac

SEQ ID NO: 17897 - DNA, 15 bp, Homo sapiens
aagaacaatttcaga

SEQ ID NO: 17898 - DNA, 15 bp, Homo sapiens
gaagaacaatttcag

SEQ ID NO: 17899 - DNA, 15 bp, Homo sapiens
agaagaacaatttca

SEQ ID NO: 17900 - DNA, 15 bp, Homo sapiens
cagaagaacaatttc

SEQ ID NO: 17901 - DNA, 15 bp, Homo sapiens
acagaagaacaattt

SEQ ID NO: 17902 - DNA, 15 bp, Homo sapiens
tacagaagaacaatt

SEQ ID NO: 17903 - DNA, 15 bp, Homo sapiens
gtacagaagaacaat

SEQ ID NO: 17904 - DNA, 15 bp, Homo sapiens
agtacagaagaacaa

SEQ ID NO: 17905 - DNA, 15 bp, Homo sapiens
gagtacagaagaaca

SEQ ID NO: 17906 - DNA, 15 bp, Homo sapiens
ggagtacagaagaac

SEQ ID NO: 17907 - DNA, 15 bp, Homo sapiens
cggagtacagaagaa

SEQ ID NO: 17908 - DNA, 15 bp, Homo sapiens
ccggagtacagaaga

SEQ ID NO: 17909 - DNA, 15 bp, Homo sapiens
cccggagtacagaag

SEQ ID NO: 17910 - DNA, 15 bp, Homo sapiens
tcccggagtacagaa

SEQ ID NO: 17911 - DNA, 15 bp, Homo sapiens
atcccggagtacaga

SEQ ID NO: 17912 - DNA, 15 bp, Homo sapiens
aatcccggagtacag

SEQ ID NO: 17913 - DNA, 15 bp, Homo sapiens
taatcccggagtaca

SEQ ID NO: 17914 - DNA, 15 bp, Homo sapiens
ttaatcccggagtac

SEQ ID NO: 17915 - DNA, 15 bp, Homo sapiens
attaatcccggagta

SEQ ID NO: 17916 - DNA, 15 bp, Homo sapiens
aattaatcccggagt

SEQ ID NO: 17917 - DNA, 15 bp, Homo sapiens
aaattaatcccggag

SEQ ID NO: 17918 - DNA, 15 bp, Homo sapiens
gaaattaatcccgga

SEQ ID NO: 17919 - DNA, 15 bp, Homo sapiens
ggaaattaatcccgg

SEQ ID NO: 17920 - DNA, 15 bp, Homo sapiens
aggaaattaatcccg

SEQ ID NO: 17921 - DNA, 15 bp, Homo sapiens
taggaaattaatccc

SEQ ID NO: 17922 - DNA, 15 bp, Homo sapiens
gtaggaaattaatcc

SEQ ID NO: 17923 - DNA, 15 bp, Homo sapiens
tgtaggaaattaatc

SEQ ID NO: 17924 - DNA, 15 bp, Homo sapiens
atgtaggaaattaat

SEQ ID NO: 17925 - DNA, 15 bp, Homo sapiens
gatgtaggaaattaa

SEQ ID NO: 17926 - DNA, 15 bp, Homo sapiens
agatgtaggaaatta

SEQ ID NO: 17927 - DNA, 15 bp, Homo sapiens
gagatgtaggaaatt

SEQ ID NO: 17928 - DNA, 15 bp, Homo sapiens
tgagatgtaggaaat

SEQ ID NO: 17929 - DNA, 15 bp, Homo sapiens
ttgagatgtaggaaa

SEQ ID NO: 17930 - DNA, 15 bp, Homo sapiens
tttgagatgtaggaa

SEQ ID NO: 17931 - DNA, 15 bp, Homo sapiens
ttttgagatgtagga

SEQ ID NO: 17932 - DNA, 15 bp, Homo sapiens
attttgagatgtagg

SEQ ID NO: 17933 - DNA, 15 bp, Homo sapiens
cattttgagatgtag

SEQ ID NO: 17934 - DNA, 15 bp, Homo sapiens
acattttgagatgta

SEQ ID NO: 17935 - DNA, 15 bp, Homo sapiens
aacattttgagatgt

SEQ ID NO: 17936 - DNA, 15 bp, Homo sapiens
taacattttgagatg

SEQ ID NO: 17937 - DNA, 15 bp, Homo sapiens
ttaacattttgagat

SEQ ID NO: 17938 - DNA, 15 bp, Homo sapiens
attaacattttgaga

SEQ ID NO: 17939 - DNA, 15 bp, Homo sapiens
tattaacattttgag

SEQ ID NO: 17940 - DNA, 15 bp, Homo sapiens
ttattaacattttga

SEQ ID NO: 17941 - DNA, 15 bp, Homo sapiens
tttattaacattttg

SEQ ID NO: 17942 - DNA, 15 bp, Homo sapiens
gtttattaacatttt

SEQ ID NO: 17943 - DNA, 15 bp, Homo sapiens
agtttattaacattt

SEQ ID NO: 17944 - DNA, 15 bp, Homo sapiens
tagtttattaacatt

SEQ ID NO: 17945 - DNA, 15 bp, Homo sapiens
gtagtttattaacat

SEQ ID NO: 17946 - DNA, 15 bp, Homo sapiens
agtagtttattaaca

SEQ ID NO: 17947 - DNA, 15 bp, Homo sapiens
aagtagtttattaac

SEQ ID NO: 17948 - DNA, 15 bp, Homo sapiens
caagtagtttattaa

SEQ ID NO: 17949 - DNA, 15 bp, Homo sapiens
tcaagtagtttatta

SEQ ID NO: 17950 - DNA, 15 bp, Homo sapiens
ttcaagtagtttatt

SEQ ID NO: 17951 - DNA, 15 bp, Homo sapiens
gttcaagtagtttat

SEQ ID NO: 17952 - DNA, 15 bp, Homo sapiens
tgttcaagtagttta

SEQ ID NO: 17953 - DNA, 15 bp, Homo sapiens
atgttcaagtagttt

SEQ ID NO: 17954 - DNA, 15 bp, Homo sapiens
catgttcaagtagtt

SEQ ID NO: 17955 - DNA, 15 bp, Homo sapiens
tcatgttcaagtagt

SEQ ID NO: 17956 - DNA, 15 bp, Homo sapiens
gtcatgttcaagtag

SEQ ID NO: 17957 - DNA, 15 bp, Homo sapiens
ggtcatgttcaagta

SEQ ID NO: 17958 - DNA, 15 bp, Homo sapiens
aggtcatgttcaagt

SEQ ID NO: 17959 - DNA, 15 bp, Homo sapiens
aaggtcatgttcaag

SEQ ID NO: 17960 - DNA, 15 bp, Homo sapiens
aaaggtcatgttcaa

SEQ ID NO: 17961 - DNA, 15 bp, Homo sapiens
gaaaggtcatgttca

SEQ ID NO: 17962 - DNA, 15 bp, Homo sapiens
ggaaaggtcatgttc

SEQ ID NO: 17963 - DNA, 15 bp, Homo sapiens
tggaaaggtcatgtt

SEQ ID NO: 17964 - DNA, 15 bp, Homo sapiens
atggaaaggtcatgt

SEQ ID NO: 17965 - DNA, 15 bp, Homo sapiens
aatggaaaggtcatg

SEQ ID NO: 17966 - DNA, 15 bp, Homo sapiens
gaatggaaaggtcat

SEQ ID NO: 17967 - DNA, 15 bp, Homo sapiens
agaatggaaaggtca

SEQ ID NO: 17968 - DNA, 15 bp, Homo sapiens
cagaatggaaaggtc

SEQ ID NO: 17969 - DNA, 15 bp, Homo sapiens
acagaatggaaaggt

SEQ ID NO: 17970 - DNA, 15 bp, Homo sapiens
tacagaatggaaagg

SEQ ID NO: 17971 - DNA, 15 bp, Homo sapiens
ttacagaatggaaag

SEQ ID NO: 17972 - DNA, 15 bp, Homo sapiens
tttacagaatggaaa

SEQ ID NO: 17973 - DNA, 15 bp, Homo sapiens
atttacagaatggaa

SEQ ID NO: 17974 - DNA, 15 bp, Homo sapiens
aatttacagaatgga

SEQ ID NO: 17975 - DNA, 15 bp, Homo sapiens
aaatttacagaatgg

SEQ ID NO: 17976 - DNA, 15 bp, Homo sapiens
gaaatttacagaatg

SEQ ID NO: 17977 - DNA, 15 bp, Homo sapiens
ggaaatttacagaat

SEQ ID NO: 17978 - DNA, 15 bp, Homo sapiens
aggaaatttacagaa

SEQ ID NO: 17979 - DNA, 15 bp, Homo sapiens
aaggaaatttacaga

SEQ ID NO: 17980 - DNA, 15 bp, Homo sapiens
taaggaaatttacag

SEQ ID NO: 17981 - DNA, 15 bp, Homo sapiens
ttaaggaaatttaca

SEQ ID NO: 17982 - DNA, 15 bp, Homo sapiens
cttaaggaaatttac

SEQ ID NO: 17983 - DNA, 15 bp, Homo sapiens
tcttaaggaaattta

SEQ ID NO: 17984 - DNA, 15 bp, Homo sapiens
ctcttaaggaaattt

SEQ ID NO: 17985 - DNA, 15 bp, Homo sapiens
actcttaaggaaatt

SEQ ID NO: 17986 - DNA, 15 bp, Homo sapiens
tactcttaaggaaat

SEQ ID NO: 17987 - DNA, 15 bp, Homo sapiens
ttactcttaaggaaa

SEQ ID NO: 17988 - DNA, 15 bp, Homo sapiens
cttactcttaaggaa

SEQ ID NO: 17989 - DNA, 15 bp, Homo sapiens
acttactcttaagga

SEQ ID NO: 17990 - DNA, 15 bp, Homo sapiens
gacttactcttaagg

SEQ ID NO: 17991 - DNA, 15 bp, Homo sapiens
agacttactcttaag

SEQ ID NO: 17992 - DNA, 15 bp, Homo sapiens
tagacttactcttaa

SEQ ID NO: 17993 - DNA, 15 bp, Homo sapiens
gtagacttactctta

SEQ ID NO: 17994 - DNA, 15 bp, Homo sapiens
cgtagacttactctt

SEQ ID NO: 17995 - DNA, 15 bp, Homo sapiens
tcgtagacttactct

SEQ ID NO: 17996 - DNA, 15 bp, Homo sapiens
atcgtagacttactc

SEQ ID NO: 17997 - DNA, 15 bp, Homo sapiens
aatcgtagacttact

SEQ ID NO: 17998 - DNA, 15 bp, Homo sapiens
caatcgtagacttac

SEQ ID NO: 17999 - DNA, 15 bp, Homo sapiens
tcaatcgtagactta

SEQ ID NO: 18000 - DNA, 15 bp, Homo sapiens
ctcaatcgtagactt

SEQ ID NO: 18001 - DNA, 15 bp, Homo sapiens
tctcaatcgtagact

SEQ ID NO: 18002 - DNA, 15 bp, Homo sapiens
gtctcaatcgtagac

SEQ ID NO: 18003 - DNA, 15 bp, Homo sapiens
ggtctcaatcgtaga

SEQ ID NO: 18004 - DNA, 15 bp, Homo sapiens
gggtctcaatcgtag

SEQ ID NO: 18005 - DNA, 15 bp, Homo sapiens
tgggtctcaatcgta

SEQ ID NO: 18006 - DNA, 15 bp, Homo sapiens
ttgggtctcaatcgt

SEQ ID NO: 18007 - DNA, 15 bp, Homo sapiens
tttgggtctcaatcg

SEQ ID NO: 18008 - DNA, 15 bp, Homo sapiens
ctttgggtctcaatc

SEQ ID NO: 18009 - DNA, 15 bp, Homo sapiens
gctttgggtctcaat

SEQ ID NO: 18010 - DNA, 15 bp, Homo sapiens
agctttgggtctcaa

SEQ ID NO: 18011 - DNA, 15 bp, Homo sapiens
cagctttgggtctca

SEQ ID NO: 18012 - DNA, 15 bp, Homo sapiens
gcagctttgggtctc

SEQ ID NO: 18013 - DNA, 15 bp, Homo sapiens
agcagctttgggtct

SEQ ID NO: 18014 - DNA, 15 bp, Homo sapiens
cagcagctttgggtc

SEQ ID NO: 18015 - DNA, 15 bp, Homo sapiens
ccagcagctttgggt

SEQ ID NO: 18016 - DNA, 15 bp, Homo sapiens
gccagcagctttggg

SEQ ID NO: 18017 - DNA, 15 bp, Homo sapiens
agccagcagctttgg

SEQ ID NO: 18018 - DNA, 15 bp, Homo sapiens
cagccagcagctttg

SEQ ID NO: 18019 - DNA, 15 bp, Homo sapiens
acagccagcagcttt

SEQ ID NO: 18020 - DNA, 15 bp, Homo sapiens
cacagccagcagctt

SEQ ID NO: 18021 - DNA, 15 bp, Homo sapiens
acacagccagcagct

SEQ ID NO: 18022 - DNA, 15 bp, Homo sapiens
aacacagccagcagc

SEQ ID NO: 18023 - DNA, 15 bp, Homo sapiens
taacacagccagcag

SEQ ID NO: 18024 - DNA, 15 bp, Homo sapiens
ataacacagccagca

SEQ ID NO: 18025 - DNA, 15 bp, Homo sapiens
tataacacagccagc

SEQ ID NO: 18026 - DNA, 15 bp, Homo sapiens
atataacacagccag

SEQ ID NO: 18027 - DNA, 15 bp, Homo sapiens
aatataacacagcca

SEQ ID NO: 18028 - DNA, 15 bp, Homo sapiens
aaatataacacagcc

SEQ ID NO: 18029 - DNA, 15 bp, Homo sapiens
gaaatataacacagc

SEQ ID NO: 18030 - DNA, 15 bp, Homo sapiens
tgaaatataacacag

SEQ ID NO: 18031 - DNA, 15 bp, Homo sapiens
gtgaaatataacaca

SEQ ID NO: 18032 - DNA, 15 bp, Homo sapiens
tgtgaaatataacac

SEQ ID NO: 18033 - DNA, 15 bp, Homo sapiens
ctgtgaaatataaca

SEQ ID NO: 18034 - DNA, 15 bp, Homo sapiens
actgtgaaatataac

SEQ ID NO: 18035 - DNA, 15 bp, Homo sapiens
aactgtgaaatataa

SEQ ID NO: 18036 - DNA, 15 bp, Homo sapiens
gaactgtgaaatata

SEQ ID NO: 18037 - DNA, 15 bp, Homo sapiens
tgaactgtgaaatat

SEQ ID NO: 18038 - DNA, 15 bp, Homo sapiens
gtgaactgtgaaata

SEQ ID NO: 18039 - DNA, 15 bp, Homo sapiens
tgtgaactgtgaaat

SEQ ID NO: 18040 - DNA, 15 bp, Homo sapiens
ctgtgaactgtgaaa

SEQ ID NO: 18041 - DNA, 15 bp, Homo sapiens
actgtgaactgtgaa

SEQ ID NO: 18042 - DNA, 15 bp, Homo sapiens
aactgtgaactgtga

SEQ ID NO: 18043 - DNA, 15 bp, Homo sapiens
gaactgtgaactgtg

SEQ ID NO: 18044 - DNA, 15 bp, Homo sapiens
agaactgtgaactgt

SEQ ID NO: 18045 - DNA, 15 bp, Homo sapiens
gagaactgtgaactg

SEQ ID NO: 18046 - DNA, 15 bp, Homo sapiens
agagaactgtgaact

SEQ ID NO: 18047 - DNA, 15 bp, Homo sapiens
gagagaactgtgaac

SEQ ID NO: 18048 - DNA, 15 bp, Homo sapiens
agagagaactgtgaa

SEQ ID NO: 18049 - DNA, 15 bp, Homo sapiens
gagagagaactgtga

SEQ ID NO: 18050 - DNA, 15 bp, Homo sapiens
agagagagaactgtg

SEQ ID NO: 18051 - DNA, 15 bp, Homo sapiens
gagagagagaactgt

SEQ ID NO: 18052 - DNA, 15 bp, Homo sapiens
agagagagagaactg

SEQ ID NO: 18053 - DNA, 15 bp, Homo sapiens
gagagagagagaact

SEQ ID NO: 18054 - DNA, 15 bp, Homo sapiens
agagagagagagaac

SEQ ID NO: 18055 - DNA, 15 bp, Homo sapiens
gagagagagagagaa

SEQ ID NO: 18056 - DNA, 15 bp, Homo sapiens
ggagagagagagaga

SEQ ID NO: 18057 - DNA, 15 bp, Homo sapiens
gggagagagagagag

SEQ ID NO: 18058 - DNA, 15 bp, Homo sapiens
ggggagagagagaga

SEQ ID NO: 18059 - DNA, 15 bp, Homo sapiens
gggggagagagagag

SEQ ID NO: 18060 - DNA, 15 bp, Homo sapiens
agggggagagagaga

SEQ ID NO: 18061 - DNA, 15 bp, Homo sapiens
gagggggagagagag

SEQ ID NO: 18062 - DNA, 15 bp, Homo sapiens
agagggggagagaga

SEQ ID NO: 18063 - DNA, 15 bp, Homo sapiens
tagagggggagagag

SEQ ID NO: 18064 - DNA, 15 bp, Homo sapiens
gtagagggggagaga

SEQ ID NO: 18065 - DNA, 15 bp, Homo sapiens
tgtagagggggagag

SEQ ID NO: 18066 - DNA, 15 bp, Homo sapiens
gtgtagagggggaga

SEQ ID NO: 18067 - DNA, 15 bp, Homo sapiens
tgtgtagagggggag

SEQ ID NO: 18068 - DNA, 15 bp, Homo sapiens
gtgtgtagaggggga

SEQ ID NO: 18069 - DNA, 15 bp, Homo sapiens
tgtgtgtagaggggg

SEQ ID NO: 18070 - DNA, 15 bp, Homo sapiens
gtgtgtgtagagggg

SEQ ID NO: 18071 - DNA, 15 bp, Homo sapiens
cgtgtgtgtagaggg

SEQ ID NO: 18072 - DNA, 15 bp, Homo sapiens
gcgtgtgtgtagagg

SEQ ID NO: 18073 - DNA, 15 bp, Homo sapiens
cgcgtgtgtgtagag

SEQ ID NO: 18074 - DNA, 15 bp, Homo sapiens
gcgcgtgtgtgtaga

SEQ ID NO: 18075 - DNA, 15 bp, Homo sapiens
tgcgcgtgtgtgtag

SEQ ID NO: 18076 - DNA, 15 bp, Homo sapiens
gtgcgcgtgtgtgta

SEQ ID NO: 18077 - DNA, 15 bp, Homo sapiens
cgtgcgcgtgtgtgt

SEQ ID NO: 18078 - DNA, 15 bp, Homo sapiens
acgtgcgcgtgtgtg

SEQ ID NO: 18079 - DNA, 15 bp, Homo sapiens
cacgtgcgcgtgtgt

SEQ ID NO: 18080 - DNA, 15 bp, Homo sapiens
gcacgtgcgcgtgtg

SEQ ID NO: 18081 - DNA, 15 bp, Homo sapiens
tgcacgtgcgcgtgt

SEQ ID NO: 18082 - DNA, 15 bp, Homo sapiens
gtgcacgtgcgcgtg

SEQ ID NO: 18083 - DNA, 15 bp, Homo sapiens
cgtgcacgtgcgcgt

SEQ ID NO: 18084 - DNA, 15 bp, Homo sapiens
gcgtgcacgtgcgcg

SEQ ID NO: 18085 - DNA, 15 bp, Homo sapiens
tgcgtgcacgtgcgc

SEQ ID NO: 18086 - DNA, 15 bp, Homo sapiens
gtgcgtgcacgtgcg

SEQ ID NO: 18087 - DNA, 15 bp, Homo sapiens
tgtgcgtgcacgtgc

SEQ ID NO: 18088 - DNA, 15 bp, Homo sapiens
gtgtgcgtgcacgtg

SEQ ID NO: 18089 - DNA, 15 bp, Homo sapiens
tgtgtgcgtgcacgt

SEQ ID NO: 18090 - DNA, 15 bp, Homo sapiens
gtgtgtgcgtgcacg

SEQ ID NO: 18091 - DNA, 15 bp, Homo sapiens
tgtgtgtgcgtgcac

SEQ ID NO: 18092 - DNA, 15 bp, Homo sapiens
gtgtgtgtgcgtgca

SEQ ID NO: 18093 - DNA, 15 bp, Homo sapiens
tgtgtgtgtgcgtgc

SEQ ID NO: 18094 - DNA, 15 bp, Homo sapiens
gtgtgtgtgtgcgtg

SEQ ID NO: 18095 - DNA, 15 bp, Homo sapiens
tgtgtgtgtgtgcgt

SEQ ID NO: 18096 - DNA, 15 bp, Homo sapiens
gtgtgtgtgtgtgcg

SEQ ID NO: 18097 - DNA, 15 bp, Homo sapiens
tgtgtgtgtgtgtgc

SEQ ID NO: 18098 - DNA, 15 bp, Homo sapiens
ctctctctgtgtgtg

SEQ ID NO: 18099 - DNA, 15 bp, Homo sapiens
tctctctctgtgtgt

SEQ ID NO: 18100 - DNA, 15 bp, Homo sapiens
ctctctctctgtgtg

SEQ ID NO: 18101 - DNA, 15 bp, Homo sapiens
tctctctctctgtgt

SEQ ID NO: 18102 - DNA, 15 bp, Homo sapiens
ctctctctctctgtg

SEQ ID NO: 18103 - DNA, 15 bp, Homo sapiens
tctctctctctctgt

SEQ ID NO: 18104 - DNA, 15 bp, Homo sapiens
ctctctctctctctg

SEQ ID NO: 18105 - DNA, 15 bp, Homo sapiens
tctctctctctctct

SEQ ID NO: 18106 - DNA, 15 bp, Homo sapiens
ctctctctctctctc

SEQ ID NO: 18107 - DNA, 15 bp, Homo sapiens
gctctctctctctct

SEQ ID NO: 18108 - DNA, 15 bp, Homo sapiens
tgctctctctctctc

SEQ ID NO: 18109 - DNA, 15 bp, Homo sapiens
gtgctctctctctct

SEQ ID NO: 18110 - DNA, 15 bp, Homo sapiens
ggtgctctctctctc

SEQ ID NO: 18111 - DNA, 15 bp, Homo sapiens
gggtgctctctctct

SEQ ID NO: 18112 - DNA, 15 bp, Homo sapiens
ggggtgctctctctc

SEQ ID NO: 18113 - DNA, 15 bp, Homo sapiens
tggggtgctctctct

SEQ ID NO: 18114 - DNA, 15 bp, Homo sapiens
ctggggtgctctctc

SEQ ID NO: 18115 - DNA, 15 bp, Homo sapiens
cctggggtgctctct

SEQ ID NO: 18116 - DNA, 15 bp, Homo sapiens
acctggggtgctctc

SEQ ID NO: 18117 - DNA, 15 bp, Homo sapiens
aacctggggtgctct

SEQ ID NO: 18118 - DNA, 15 bp, Homo sapiens
aaacctggggtgctc

SEQ ID NO: 18119 - DNA, 15 bp, Homo sapiens
aaaacctggggtgct

SEQ ID NO: 18120 - DNA, 15 bp, Homo sapiens
taaaacctggggtgc

SEQ ID NO: 18121 - DNA, 15 bp, Homo sapiens
ctaaaacctggggtg

SEQ ID NO: 18122 - DNA, 15 bp, Homo sapiens
tctaaaacctggggt

SEQ ID NO: 18123 - DNA, 15 bp, Homo sapiens
ttctaaaacctgggg

SEQ ID NO: 18124 - DNA, 15 bp, Homo sapiens
cttctaaaacctggg

SEQ ID NO: 18125 - DNA, 15 bp, Homo sapiens
tcttctaaaacctgg

SEQ ID NO: 18126 - DNA, 15 bp, Homo sapiens
atcttctaaaacctg

SEQ ID NO: 18127 - DNA, 15 bp, Homo sapiens
catcttctaaaacct

SEQ ID NO: 18128 - DNA, 15 bp, Homo sapiens
tcatcttctaaaacc

SEQ ID NO: 18129 - DNA, 15 bp, Homo sapiens
ttcatcttctaaaac

SEQ ID NO: 18130 - DNA, 15 bp, Homo sapiens
attcatcttctaaaa

SEQ ID NO: 18131 - DNA, 15 bp, Homo sapiens
cattcatcttctaaa

SEQ ID NO: 18132 - DNA, 15 bp, Homo sapiens
acattcatcttctaa

SEQ ID NO: 18133 - DNA, 15 bp, Homo sapiens
tacattcatcttcta

SEQ ID NO: 18134 - DNA, 15 bp, Homo sapiens
ttacattcatcttct

SEQ ID NO: 18135 - DNA, 15 bp, Homo sapiens
tttacattcatcttc

SEQ ID NO: 18136 - DNA, 15 bp, Homo sapiens
ttttacattcatctt

SEQ ID NO: 18137 - DNA, 15 bp, Homo sapiens
tttttacattcatct

SEQ ID NO: 18138 - DNA, 15 bp, Homo sapiens
ctttttacattcatc

SEQ ID NO: 18139 - DNA, 15 bp, Homo sapiens
tctttttacattcat

SEQ ID NO: 18140 - DNA, 15 bp, Homo sapiens
ttctttttacattca

SEQ ID NO: 18141 - DNA, 15 bp, Homo sapiens
attctttttacattc

SEQ ID NO: 18142 - DNA, 15 bp, Homo sapiens
cattctttttacatt

SEQ ID NO: 18143 - DNA, 15 bp, Homo sapiens
acattctttttacat

SEQ ID NO: 18144 - DNA, 15 bp, Homo sapiens
tacattctttttaca

SEQ ID NO: 18145 - DNA, 15 bp, Homo sapiens
ttacattctttttac

SEQ ID NO: 18146 - DNA, 15 bp, Homo sapiens
tttacattcttttta

SEQ ID NO: 18147 - DNA, 15 bp, Homo sapiens
gtttacattcttttt

SEQ ID NO: 18148 - DNA, 15 bp, Homo sapiens
tgtttacattctttt

SEQ ID NO: 18149 - DNA, 15 bp, Homo sapiens
ttgtttacattcttt

SEQ ID NO: 18150 - DNA, 15 bp, Homo sapiens
cttgtttacattctt

SEQ ID NO: 18151 - DNA, 15 bp, Homo sapiens
acttgtttacattct

SEQ ID NO: 18152 - DNA, 15 bp, Homo sapiens
aacttgtttacattc

SEQ ID NO: 18153 - DNA, 15 bp, Homo sapiens
gaacttgtttacatt

SEQ ID NO: 18154 - DNA, 15 bp, Homo sapiens
agaacttgtttacat

SEQ ID NO: 18155 - DNA, 15 bp, Homo sapiens
gagaacttgtttaca

SEQ ID NO: 18156 - DNA, 15 bp, Homo sapiens
agagaacttgtttac

SEQ ID NO: 18157 - DNA, 15 bp, Homo sapiens
cagagaacttgttta

SEQ ID NO: 18158 - DNA, 15 bp, Homo sapiens
gcagagaacttgttt

SEQ ID NO: 18159 - DNA, 15 bp, Homo sapiens
agcagagaacttgtt

SEQ ID NO: 18160 - DNA, 15 bp, Homo sapiens
tagcagagaacttgt

SEQ ID NO: 18161 - DNA, 15 bp, Homo sapiens
atagcagagaacttg

SEQ ID NO: 18162 - DNA, 15 bp, Homo sapiens
tatagcagagaactt

SEQ ID NO: 18163 - DNA, 15 bp, Homo sapiens
gtatagcagagaact

SEQ ID NO: 18164 - DNA, 15 bp, Homo sapiens
agtatagcagagaac

SEQ ID NO: 18165 - DNA, 15 bp, Homo sapiens
tagtatagcagagaa

SEQ ID NO: 18166 - DNA, 15 bp, Homo sapiens
atagtatagcagaga

SEQ ID NO: 18167 - DNA, 15 bp, Homo sapiens
gatagtatagcagag

SEQ ID NO: 18168 - DNA, 15 bp, Homo sapiens
tgatagtatagcaga

SEQ ID NO: 18169 - DNA, 15 bp, Homo sapiens
ctgatagtatagcag

SEQ ID NO: 18170 - DNA, 15 bp, Homo sapiens
cctgatagtatagca

SEQ ID NO: 18171 - DNA, 15 bp, Homo sapiens
acctgatagtatagc

SEQ ID NO: 18172 - DNA, 15 bp, Homo sapiens
cacctgatagtatag

SEQ ID NO: 18173 - DNA, 15 bp, Homo sapiens
ccacctgatagtata

SEQ ID NO: 18174 - DNA, 15 bp, Homo sapiens
cccacctgatagtat

SEQ ID NO: 18175 - DNA, 15 bp, Homo sapiens
gcccacctgatagta

SEQ ID NO: 18176 - DNA, 15 bp, Homo sapiens
cgcccacctgatagt

SEQ ID NO: 18177 - DNA, 15 bp, Homo sapiens
acgcccacctgatag

SEQ ID NO: 18178 - DNA, 15 bp, Homo sapiens
cacgcccacctgata

SEQ ID NO: 18179 - DNA, 15 bp, Homo sapiens
gcacgcccacctgat

SEQ ID NO: 18180 - DNA, 15 bp, Homo sapiens
ggcacgcccacctga

SEQ ID NO: 18181 - DNA, 15 bp, Homo sapiens
gggcacgcccacctg

SEQ ID NO: 18182 - DNA, 15 bp, Homo sapiens
tgggcacgcccacct

SEQ ID NO: 18183 - DNA, 15 bp, Homo sapiens
ctgggcacgcccacc

SEQ ID NO: 18184 - DNA, 15 bp, Homo sapiens
gctgggcacgcccac

SEQ ID NO: 18185 - DNA, 15 bp, Homo sapiens
agctgggcacgccca

SEQ ID NO: 18186 - DNA, 15 bp, Homo sapiens
gagctgggcacgccc

SEQ ID NO: 18187 - DNA, 15 bp, Homo sapiens
tgagctgggcacgcc

SEQ ID NO: 18188 - DNA, 15 bp, Homo sapiens
gtgagctgggcacgc

SEQ ID NO: 18189 - DNA, 15 bp, Homo sapiens
agtgagctgggcacg

SEQ ID NO: 18190 - DNA, 15 bp, Homo sapiens
cagtgagctgggcac

SEQ ID NO: 18191 - DNA, 15 bp, Homo sapiens
acagtgagctgggca

SEQ ID NO: 18192 - DNA, 15 bp, Homo sapiens
cacagtgagctgggc

SEQ ID NO: 18193 - DNA, 15 bp, Homo sapiens
gcacagtgagctggg

SEQ ID NO: 18194 - DNA, 15 bp, Homo sapiens
cgcacagtgagctgg

SEQ ID NO: 18195 - DNA, 15 bp, Homo sapiens
acgcacagtgagctg

SEQ ID NO: 18196 - DNA, 15 bp, Homo sapiens
cacgcacagtgagct

SEQ ID NO: 18197 - DNA, 15 bp, Homo sapiens
gcacgcacagtgagc

SEQ ID NO: 18198 - DNA, 15 bp, Homo sapiens
agcacgcacagtgag

SEQ ID NO: 18199 - DNA, 15 bp, Homo sapiens
cagcacgcacagtga

SEQ ID NO: 18200 - DNA, 15 bp, Homo sapiens
tcagcacgcacagtg

SEQ ID NO: 18201 - DNA, 15 bp, Homo sapiens
ttcagcacgcacagt

SEQ ID NO: 18202 - DNA, 15 bp, Homo sapiens
gttcagcacgcacag

SEQ ID NO: 18203 - DNA, 15 bp, Homo sapiens
agttcagcacgcaca

SEQ ID NO: 18204 - DNA, 15 bp, Homo sapiens
tagttcagcacgcac

SEQ ID NO: 18205 - DNA, 15 bp, Homo sapiens
gtagttcagcacgca

SEQ ID NO: 18206 - DNA, 15 bp, Homo sapiens
tgtagttcagcacgc

SEQ ID NO: 18207 - DNA, 15 bp, Homo sapiens
ttgtagttcagcacg

SEQ ID NO: 18208 - DNA, 15 bp, Homo sapiens
tttgtagttcagcac

SEQ ID NO: 18209 - DNA, 15 bp, Homo sapiens
gtttgtagttcagca

SEQ ID NO: 18210 - DNA, 15 bp, Homo sapiens
ggtttgtagttcagc

SEQ ID NO: 18211 - DNA, 15 bp, Homo sapiens
tggtttgtagttcag

SEQ ID NO: 18212 - DNA, 15 bp, Homo sapiens
ctggtttgtagttca

SEQ ID NO: 18213 - DNA, 15 bp, Homo sapiens
actggtttgtagttc

SEQ ID NO: 18214 - DNA, 15 bp, Homo sapiens
cactggtttgtagtt

SEQ ID NO: 18215 - DNA, 15 bp, Homo sapiens
gcactggtttgtagt

SEQ ID NO: 18216 - DNA, 15 bp, Homo sapiens
agcactggtttgtag

SEQ ID NO: 18217 - DNA, 15 bp, Homo sapiens
tagcactggtttgta

SEQ ID NO: 18218 - DNA, 15 bp, Homo sapiens
atagcactggtttgt

SEQ ID NO: 18219 - DNA, 15 bp, Homo sapiens
aatagcactggtttg

SEQ ID NO: 18220 - DNA, 15 bp, Homo sapiens
gaatagcactggttt

SEQ ID NO: 18221 - DNA, 15 bp, Homo sapiens
tgaatagcactggtt

SEQ ID NO: 18222 - DNA, 15 bp, Homo sapiens
atgaatagcactggt

SEQ ID NO: 18223 - DNA, 15 bp, Homo sapiens
tatgaatagcactgg

SEQ ID NO: 18224 - DNA, 15 bp, Homo sapiens
atatgaatagcactg

SEQ ID NO: 18225 - DNA, 15 bp, Homo sapiens
tatatgaatagcact

SEQ ID NO: 18226 - DNA, 15 bp, Homo sapiens
ttatatgaatagcac

SEQ ID NO: 18227 - DNA, 15 bp, Homo sapiens
cttatatgaatagca

SEQ ID NO: 18228 - DNA, 15 bp, Homo sapiens
tcttatatgaatagc

SEQ ID NO: 18229 - DNA, 15 bp, Homo sapiens
ttcttatatgaatag

SEQ ID NO: 18230 - DNA, 15 bp, Homo sapiens
tttcttatatgaata

SEQ ID NO: 18231 - DNA, 15 bp, Homo sapiens
atttcttatatgaat

SEQ ID NO: 18232 - DNA, 15 bp, Homo sapiens
catttcttatatgaa

SEQ ID NO: 18233 - DNA, 15 bp, Homo sapiens
tcatttcttatatga

SEQ ID NO: 18234 - DNA, 15 bp, Homo sapiens
atcatttcttatatg

SEQ ID NO: 18235 - DNA, 15 bp, Homo sapiens
tatcatttcttatat

SEQ ID NO: 18236 - DNA, 15 bp, Homo sapiens
atatcatttcttata

SEQ ID NO: 18237 - DNA, 15 bp, Homo sapiens
gatatcatttcttat

SEQ ID NO: 18238 - DNA, 15 bp, Homo sapiens
tgatatcatttctta

SEQ ID NO: 18239 - DNA, 15 bp, Homo sapiens
ttgatatcatttctt

SEQ ID NO: 18240 - DNA, 15 bp, Homo sapiens
attgatatcatttct

SEQ ID NO: 18241 - DNA, 15 bp, Homo sapiens
gattgatatcatttc

SEQ ID NO: 18242 - DNA, 15 bp, Homo sapiens
tgattgatatcattt

SEQ ID NO: 18243 - DNA, 15 bp, Homo sapiens
atgattgatatcatt

SEQ ID NO: 18244 - DNA, 15 bp, Homo sapiens
gatgattgatatcat

SEQ ID NO: 18245 - DNA, 15 bp, Homo sapiens
agatgattgatatca

SEQ ID NO: 18246 - DNA, 15 bp, Homo sapiens
tagatgattgatatc

SEQ ID NO: 18247 - DNA, 15 bp, Homo sapiens
gtagatgattgatat

SEQ ID NO: 18248 - DNA, 15 bp, Homo sapiens
tgtagatgattgata

SEQ ID NO: 18249 - DNA, 15 bp, Homo sapiens
atgtagatgattgat

SEQ ID NO: 18250 - DNA, 15 bp, Homo sapiens
aatgtagatgattga

SEQ ID NO: 18251 - DNA, 15 bp, Homo sapiens
aaatgtagatgattg

SEQ ID NO: 18252 - DNA, 15 bp, Homo sapiens
aaaatgtagatgatt

SEQ ID NO: 18253 - DNA, 15 bp, Homo sapiens
caaaatgtagatgat

SEQ ID NO: 18254 - DNA, 15 bp, Homo sapiens
tcaaaatgtagatga

SEQ ID NO: 18255 - DNA, 15 bp, Homo sapiens
gtcaaaatgtagatg

SEQ ID NO: 18256 - DNA, 15 bp, Homo sapiens
agtcaaaatgtagat

SEQ ID NO: 18257 - DNA, 15 bp, Homo sapiens
tagtcaaaatgtaga

SEQ ID NO: 18258 - DNA, 15 bp, Homo sapiens
atagtcaaaatgtag

SEQ ID NO: 18259 - DNA, 15 bp, Homo sapiens
aatagtcaaaatgta

SEQ ID NO: 18260 - DNA, 15 bp, Homo sapiens
caatagtcaaaatgt

SEQ ID NO: 18261 - DNA, 15 bp, Homo sapiens
tcaatagtcaaaatg

SEQ ID NO: 18262 - DNA, 15 bp, Homo sapiens
ttcaatagtcaaaat

SEQ ID NO: 18263 - DNA, 15 bp, Homo sapiens
tttcaatagtcaaaa

SEQ ID NO: 18264 - DNA, 15 bp, Homo sapiens
ttttcaatagtcaaa

SEQ ID NO: 18265 - DNA, 15 bp, Homo sapiens
cttttcaatagtcaa

SEQ ID NO: 18266 - DNA, 15 bp, Homo sapiens
gcttttcaatagtca

SEQ ID NO: 18267 - DNA, 15 bp, Homo sapiens
agcttttcaatagtc

SEQ ID NO: 18268 - DNA, 15 bp, Homo sapiens
cagcttttcaatagt

SEQ ID NO: 18269 - DNA, 15 bp, Homo sapiens
ccagcttttcaatag

SEQ ID NO: 18270 - DNA, 15 bp, Homo sapiens
cccagcttttcaata

SEQ ID NO: 18271 - DNA, 15 bp, Homo sapiens
tcccagcttttcaat

SEQ ID NO: 18272 - DNA, 15 bp, Homo sapiens
gtcccagcttttcaa

SEQ ID NO: 18273 - DNA, 15 bp, Homo sapiens
agtcccagcttttca

SEQ ID NO: 18274 - DNA, 15 bp, Homo sapiens
gagtcccagcttttc

SEQ ID NO: 18275 - DNA, 15 bp, Homo sapiens
agagtcccagctttt

SEQ ID NO: 18276 - DNA, 15 bp, Homo sapiens
aagagtcccagcttt

SEQ ID NO: 18277 - DNA, 15 bp, Homo sapiens
taagagtcccagctt

SEQ ID NO: 18278 - DNA, 15 bp, Homo sapiens
ttaagagtcccagct

SEQ ID NO: 18279 - DNA, 15 bp, Homo sapiens
tttaagagtcccagc

SEQ ID NO: 18280 - DNA, 15 bp, Homo sapiens
ctttaagagtcccag

SEQ ID NO: 18281 - DNA, 15 bp, Homo sapiens
tctttaagagtccca

SEQ ID NO: 18282 - DNA, 15 bp, Homo sapiens
atctttaagagtccc

SEQ ID NO: 18283 - DNA, 15 bp, Homo sapiens
aatctttaagagtcc

SEQ ID NO: 18284 - DNA, 15 bp, Homo sapiens
gaatctttaagagtc

SEQ ID NO: 18285 - DNA, 15 bp, Homo sapiens
ggaatctttaagagt

SEQ ID NO: 18286 - DNA, 15 bp, Homo sapiens
tggaatctttaagag

SEQ ID NO: 18287 - DNA, 15 bp, Homo sapiens
ctggaatctttaaga

SEQ ID NO: 18288 - DNA, 15 bp, Homo sapiens
cctggaatctttaag

SEQ ID NO: 18289 - DNA, 15 bp, Homo sapiens
tcctggaatctttaa

SEQ ID NO: 18290 - DNA, 15 bp, Homo sapiens
ttcctggaatcttta

SEQ ID NO: 18291 - DNA, 15 bp, Homo sapiens
tttcctggaatcttt

SEQ ID NO: 18292 - DNA, 15 bp, Homo sapiens
ttttcctggaatctt

SEQ ID NO: 18293 - DNA, 15 bp, Homo sapiens
tttttcctggaatct

SEQ ID NO: 18294 - DNA, 15 bp, Homo sapiens
ctttttcctggaatc

SEQ ID NO: 18295 - DNA, 15 bp, Homo sapiens
cctttttcctggaat

SEQ ID NO: 18296 - DNA, 15 bp, Homo sapiens
ccctttttcctggaa

SEQ ID NO: 18297 - DNA, 15 bp, Homo sapiens
tccctttttcctgga

SEQ ID NO: 18298 - DNA, 15 bp, Homo sapiens
ttccctttttcctgg

SEQ ID NO: 18299 - DNA, 15 bp, Homo sapiens
attccctttttcctg

SEQ ID NO: 18300 - DNA, 15 bp, Homo sapiens
tattccctttttcct

SEQ ID NO: 18301 - DNA, 15 bp, Homo sapiens
ctattccctttttcc

SEQ ID NO: 18302 - DNA, 15 bp, Homo sapiens
gctattccctttttc

SEQ ID NO: 18303 - DNA, 15 bp, Homo sapiens
agctattcccttttt

SEQ ID NO: 18304 - DNA, 15 bp, Homo sapiens
aagctattccctttt

SEQ ID NO: 18305 - DNA, 15 bp, Homo sapiens
taagctattcccttt

SEQ ID NO: 18306 - DNA, 15 bp, Homo sapiens
gtaagctattccctt

SEQ ID NO: 18307 - DNA, 15 bp, Homo sapiens
tgtaagctattccct

SEQ ID NO: 18308 - DNA, 15 bp, Homo sapiens
atgtaagctattccc

SEQ ID NO: 18309 - DNA, 15 bp, Homo sapiens
aatgtaagctattcc

SEQ ID NO: 18310 - DNA, 15 bp, Homo sapiens
aaatgtaagctattc

SEQ ID NO: 18311 - DNA, 15 bp, Homo sapiens
aaaatgtaagctatt

SEQ ID NO: 18312 - DNA, 15 bp, Homo sapiens
gaaaatgtaagctat

SEQ ID NO: 18313 - DNA, 15 bp, Homo sapiens
tgaaaatgtaagcta

SEQ ID NO: 18314 - DNA, 15 bp, Homo sapiens
atgaaaatgtaagct

SEQ ID NO: 18315 - DNA, 15 bp, Homo sapiens
catgaaaatgtaagc

SEQ ID NO: 18316 - DNA, 15 bp, Homo sapiens
ccatgaaaatgtaag

SEQ ID NO: 18317 - DNA, 15 bp, Homo sapiens
gccatgaaaatgtaa

SEQ ID NO: 18318 - DNA, 15 bp, Homo sapiens
cgccatgaaaatgta

SEQ ID NO: 18319 - DNA, 15 bp, Homo sapiens
gcgccatgaaaatgt

SEQ ID NO: 18320 - DNA, 15 bp, Homo sapiens
ggcgccatgaaaatg

SEQ ID NO: 18321 - DNA, 15 bp, Homo sapiens
gggcgccatgaaaat

SEQ ID NO: 18322 - DNA, 15 bp, Homo sapiens
ggggcgccatgaaaa

SEQ ID NO: 18323 - DNA, 15 bp, Homo sapiens
aggggcgccatgaaa

SEQ ID NO: 18324 - DNA, 15 bp, Homo sapiens
aaggggcgccatgaa

SEQ ID NO: 18325 - DNA, 15 bp, Homo sapiens
aaaggggcgccatga

SEQ ID NO: 18326 - DNA, 15 bp, Homo sapiens
aaaaggggcgccatg

SEQ ID NO: 18327 - DNA, 15 bp, Homo sapiens
taaaaggggcgccat

SEQ ID NO: 18328 - DNA, 15 bp, Homo sapiens
ttaaaaggggcgcca

SEQ ID NO: 18329 - DNA, 15 bp, Homo sapiens
tttaaaaggggcgcc

SEQ ID NO: 18330 - DNA, 15 bp, Homo sapiens
gtttaaaaggggcgc

SEQ ID NO: 18331 - DNA, 15 bp, Homo sapiens
tgtttaaaaggggcg

SEQ ID NO: 18332 - DNA, 15 bp, Homo sapiens
ctgtttaaaaggggc

SEQ ID NO: 18333 - DNA, 15 bp, Homo sapiens
cctgtttaaaagggg

SEQ ID NO: 18334 - DNA, 15 bp, Homo sapiens
tcctgtttaaaaggg

SEQ ID NO: 18335 - DNA, 15 bp, Homo sapiens
ttcctgtttaaaagg

SEQ ID NO: 18336 - DNA, 15 bp, Homo sapiens
tttcctgtttaaaag

SEQ ID NO: 18337 - DNA, 15 bp, Homo sapiens
gtttcctgtttaaaa

SEQ ID NO: 18338 - DNA, 15 bp, Homo sapiens
ggtttcctgtttaaa

SEQ ID NO: 18339 - DNA, 15 bp, Homo sapiens
gggtttcctgtttaa

SEQ ID NO: 18340 - DNA, 15 bp, Homo sapiens
tgggtttcctgttta

SEQ ID NO: 18341 - DNA, 15 bp, Homo sapiens
gtgggtttcctgttt

SEQ ID NO: 18342 - DNA, 15 bp, Homo sapiens
cgtgggtttcctgtt

SEQ ID NO: 18343 - DNA, 15 bp, Homo sapiens
ccgtgggtttcctgt

SEQ ID NO: 18344 - DNA, 15 bp, Homo sapiens
tccgtgggtttcctg

SEQ ID NO: 18345 - DNA, 15 bp, Homo sapiens
gtccgtgggtttcct

SEQ ID NO: 18346 - DNA, 15 bp, Homo sapiens
agtccgtgggtttcc

SEQ ID NO: 18347 - DNA, 15 bp, Homo sapiens
aagtccgtgggtttc

SEQ ID NO: 18348 - DNA, 15 bp, Homo sapiens
aaagtccgtgggttt

SEQ ID NO: 18349 - DNA, 15 bp, Homo sapiens
caaagtccgtgggtt

SEQ ID NO: 18350 - DNA, 15 bp, Homo sapiens
tcaaagtccgtgggt

SEQ ID NO: 18351 - DNA, 15 bp, Homo sapiens
ctcaaagtccgtggg

SEQ ID NO: 18352 - DNA, 15 bp, Homo sapiens
gctcaaagtccgtgg

SEQ ID NO: 18353 - DNA, 15 bp, Homo sapiens
ggctcaaagtccgtg

SEQ ID NO: 18354 - DNA, 15 bp, Homo sapiens
tggctcaaagtccgt

SEQ ID NO: 18355 - DNA, 15 bp, Homo sapiens
ctggctcaaagtccg

SEQ ID NO: 18356 - DNA, 15 bp, Homo sapiens
cctggctcaaagtcc

SEQ ID NO: 18357 - DNA, 15 bp, Homo sapiens
tcctggctcaaagtc

SEQ ID NO: 18358 - DNA, 15 bp, Homo sapiens
atcctggctcaaagt

SEQ ID NO: 18359 - DNA, 15 bp, Homo sapiens
aatcctggctcaaag

SEQ ID NO: 18360 - DNA, 15 bp, Homo sapiens
aaatcctggctcaaa

SEQ ID NO: 18361 - DNA, 15 bp, Homo sapiens
aaaatcctggctcaa

SEQ ID NO: 18362 - DNA, 15 bp, Homo sapiens
taaaatcctggctca

SEQ ID NO: 18363 - DNA, 15 bp, Homo sapiens
ctaaaatcctggctc

SEQ ID NO: 18364 - DNA, 15 bp, Homo sapiens
tctaaaatcctggct

SEQ ID NO: 18365 - DNA, 15 bp, Homo sapiens
ttctaaaatcctggc

SEQ ID NO: 18366 - DNA, 15 bp, Homo sapiens
tttctaaaatcctgg

SEQ ID NO: 18367 - DNA, 15 bp, Homo sapiens
atttctaaaatcctg

SEQ ID NO: 18368 - DNA, 15 bp, Homo sapiens
aatttctaaaatcct

SEQ ID NO: 18369 - DNA, 15 bp, Homo sapiens
aaatttctaaaatcc

SEQ ID NO: 18370 - DNA, 15 bp, Homo sapiens
caaatttctaaaatc

SEQ ID NO: 18371 - DNA, 15 bp, Homo sapiens
gcaaatttctaaaat

SEQ ID NO: 18372 - DNA, 15 bp, Homo sapiens
tgcaaatttctaaaa

SEQ ID NO: 18373 - DNA, 15 bp, Homo sapiens
atgcaaatttctaaa

SEQ ID NO: 18374 - DNA, 15 bp, Homo sapiens
aatgcaaatttctaa

SEQ ID NO: 18375 - DNA, 15 bp, Homo sapiens
aaatgcaaatttcta

SEQ ID NO: 18376 - DNA, 15 bp, Homo sapiens
gaaatgcaaatttct

SEQ ID NO: 18377 - DNA, 15 bp, Homo sapiens
agaaatgcaaatttc

SEQ ID NO: 18378 - DNA, 15 bp, Homo sapiens
aagaaatgcaaattt

SEQ ID NO: 18379 - DNA, 15 bp, Homo sapiens
aaagaaatgcaaatt

SEQ ID NO: 18380 - DNA, 15 bp, Homo sapiens
aaaagaaatgcaaat

SEQ ID NO: 18381 - DNA, 15 bp, Homo sapiens
aaaaagaaatgcaaa

SEQ ID NO: 18382 - DNA, 15 bp, Homo sapiens
aaaaaagaaatgcaa

SEQ ID NO: 18383 - DNA, 15 bp, Homo sapiens
aaaaaaagaaatgca

SEQ ID NO: 18384 - DNA, 15 bp, Homo sapiens
taaaaaaagaaatgc

SEQ ID NO: 18385 - DNA, 15 bp, Homo sapiens
gtaaaaaaagaaatg

SEQ ID NO: 18386 - DNA, 15 bp, Homo sapiens
tgtaaaaaaagaaat

SEQ ID NO: 18387 - DNA, 15 bp, Homo sapiens
ctgtaaaaaaagaaa

SEQ ID NO: 18388 - DNA, 15 bp, Homo sapiens
cctgtaaaaaaagaa

SEQ ID NO: 18389 - DNA, 15 bp, Homo sapiens
tcctgtaaaaaaaga

SEQ ID NO: 18390 - DNA, 15 bp, Homo sapiens
atcctgtaaaaaaag

SEQ ID NO: 18391 - DNA, 15 bp, Homo sapiens
aatcctgtaaaaaaa

SEQ ID NO: 18392 - DNA, 15 bp, Homo sapiens
aaatcctgtaaaaaa

SEQ ID NO: 18393 - DNA, 15 bp, Homo sapiens
aaaatcctgtaaaaa

SEQ ID NO: 18394 - DNA, 15 bp, Homo sapiens
gaaaatcctgtaaaa

SEQ ID NO: 18395 - DNA, 15 bp, Homo sapiens
ggaaaatcctgtaaa

SEQ ID NO: 18396 - DNA, 15 bp, Homo sapiens
gggaaaatcctgtaa

SEQ ID NO: 18397 - DNA, 15 bp, Homo sapiens
agggaaaatcctgta

SEQ ID NO: 18398 - DNA, 15 bp, Homo sapiens
gagggaaaatcctgt

SEQ ID NO: 18399 - DNA, 15 bp, Homo sapiens
ggagggaaaatcctg

SEQ ID NO: 18400 - DNA, 15 bp, Homo sapiens
aggagggaaaatcct

SEQ ID NO: 18401 - DNA, 15 bp, Homo sapiens
caggagggaaaatcc

SEQ ID NO: 18402 - DNA, 15 bp, Homo sapiens
ccaggagggaaaatc

SEQ ID NO: 18403 - DNA, 15 bp, Homo sapiens
accaggagggaaaat

SEQ ID NO: 18404 - DNA, 15 bp, Homo sapiens
caccaggagggaaaa

SEQ ID NO: 18405 - DNA, 15 bp, Homo sapiens
tcaccaggagggaaa

SEQ ID NO: 18406 - DNA, 15 bp, Homo sapiens
ctcaccaggagggaa

SEQ ID NO: 18407 - DNA, 15 bp, Homo sapiens
actcaccaggaggga

SEQ ID NO: 18408 - DNA, 15 bp, Homo sapiens
gactcaccaggaggg

SEQ ID NO: 18409 - DNA, 15 bp, Homo sapiens
tgactcaccaggagg

SEQ ID NO: 18410 - DNA, 15 bp, Homo sapiens
ttgactcaccaggag

SEQ ID NO: 18411 - DNA, 15 bp, Homo sapiens
tttgactcaccagga

SEQ ID NO: 18412 - DNA, 15 bp, Homo sapiens
ttttgactcaccagg

SEQ ID NO: 18413 - DNA, 15 bp, Homo sapiens
attttgactcaccag

SEQ ID NO: 18414 - DNA, 15 bp, Homo sapiens
cattttgactcacca

SEQ ID NO: 18415 - DNA, 15 bp, Homo sapiens
tcattttgactcacc

SEQ ID NO: 18416 - DNA, 15 bp, Homo sapiens
ttcattttgactcac

SEQ ID NO: 18417 - DNA, 15 bp, Homo sapiens
gttcattttgactca

SEQ ID NO: 18418 - DNA, 15 bp, Homo sapiens
tgttcattttgactc

SEQ ID NO: 18419 - DNA, 15 bp, Homo sapiens
ttgttcattttgact

SEQ ID NO: 18420 - DNA, 15 bp, Homo sapiens
cttgttcattttgac

SEQ ID NO: 18421 - DNA, 15 bp, Homo sapiens
tcttgttcattttga

SEQ ID NO: 18422 - DNA, 15 bp, Homo sapiens
ttcttgttcattttg

SEQ ID NO: 18423 - DNA, 15 bp, Homo sapiens
tttcttgttcatttt

SEQ ID NO: 18424 - DNA, 15 bp, Homo sapiens
atttcttgttcattt

SEQ ID NO: 18425 - DNA, 15 bp, Homo sapiens
tatttcttgttcatt

SEQ ID NO: 18426 - DNA, 15 bp, Homo sapiens
gtatttcttgttcat

SEQ ID NO: 18427 - DNA, 15 bp, Homo sapiens
ggtatttcttgttca

SEQ ID NO: 18428 - DNA, 15 bp, Homo sapiens
gggtatttcttgttc

SEQ ID NO: 18429 - DNA, 15 bp, Homo sapiens
ggggtatttcttgtt

SEQ ID NO: 18430 - DNA, 15 bp, Homo sapiens
tggggtatttcttgt

SEQ ID NO: 18431 - DNA, 15 bp, Homo sapiens
ctggggtatttcttg

SEQ ID NO: 18432 - DNA, 15 bp, Homo sapiens
cctggggtatttctt

SEQ ID NO: 18433 - DNA, 15 bp, Homo sapiens
tcctggggtatttct

SEQ ID NO: 18434 - DNA, 15 bp, Homo sapiens
gtcctggggtatttc

SEQ ID NO: 18435 - DNA, 15 bp, Homo sapiens
ggtcctggggtattt

SEQ ID NO: 18436 - DNA, 15 bp, Homo sapiens
aggtcctggggtatt

SEQ ID NO: 18437 - DNA, 15 bp, Homo sapiens
gaggtcctggggtat

SEQ ID NO: 18438 - DNA, 15 bp, Homo sapiens
ggaggtcctggggta

SEQ ID NO: 18439 - DNA, 15 bp, Homo sapiens
gggaggtcctggggt

SEQ ID NO: 18440 - DNA, 15 bp, Homo sapiens
agggaggtcctgggg

SEQ ID NO: 18441 - DNA, 15 bp, Homo sapiens
aagggaggtcctggg

SEQ ID NO: 18442 - DNA, 15 bp, Homo sapiens
gaagggaggtcctgg

SEQ ID NO: 18443 - DNA, 15 bp, Homo sapiens
ggaagggaggtcctg

SEQ ID NO: 18444 - DNA, 15 bp, Homo sapiens
gggaagggaggtcct

SEQ ID NO: 18445 - DNA, 15 bp, Homo sapiens
agggaagggaggtcc

SEQ ID NO: 18446 - DNA, 15 bp, Homo sapiens
gagggaagggaggtc

SEQ ID NO: 18447 - DNA, 15 bp, Homo sapiens
ggagggaagggaggt

SEQ ID NO: 18448 - DNA, 15 bp, Homo sapiens
aggagggaagggagg

SEQ ID NO: 18449 - DNA, 15 bp, Homo sapiens
aaggagggaagggag

SEQ ID NO: 18450 - DNA, 15 bp, Homo sapiens
caaggagggaaggga

SEQ ID NO: 18451 - DNA, 15 bp, Homo sapiens
ccaaggagggaaggg

SEQ ID NO: 18452 - DNA, 15 bp, Homo sapiens
gccaaggagggaagg

SEQ ID NO: 18453 - DNA, 15 bp, Homo sapiens
ggccaaggagggaag

SEQ ID NO: 18454 - DNA, 15 bp, Homo sapiens
tggccaaggagggaa

SEQ ID NO: 18455 - DNA, 15 bp, Homo sapiens
atggccaaggaggga

SEQ ID NO: 18456 - DNA, 15 bp, Homo sapiens
aatggccaaggaggg

SEQ ID NO: 18457 - DNA, 15 bp, Homo sapiens
taatggccaaggagg

SEQ ID NO: 18458 - DNA, 15 bp, Homo sapiens
ttaatggccaaggag

SEQ ID NO: 18459 - DNA, 15 bp, Homo sapiens
attaatggccaagga

SEQ ID NO: 18460 - DNA, 15 bp, Homo sapiens
cattaatggccaagg

SEQ ID NO: 18461 - DNA, 15 bp, Homo sapiens
tcattaatggccaag

SEQ ID NO: 18462 - DNA, 15 bp, Homo sapiens
ctcattaatggccaa

SEQ ID NO: 18463 - DNA, 15 bp, Homo sapiens
tctcattaatggcca

SEQ ID NO: 18464 - DNA, 15 bp, Homo sapiens
atctcattaatggcc

SEQ ID NO: 18465 - DNA, 15 bp, Homo sapiens
catctcattaatggc

SEQ ID NO: 18466 - DNA, 15 bp, Homo sapiens
tcatctcattaatgg

SEQ ID NO: 18467 - DNA, 15 bp, Homo sapiens
ttcatctcattaatg

SEQ ID NO: 18468 - DNA, 15 bp, Homo sapiens
cttcatctcattaat

SEQ ID NO: 18469 - DNA, 15 bp, Homo sapiens
ccttcatctcattaa

SEQ ID NO: 18470 - DNA, 15 bp, Homo sapiens
gccttcatctcatta

SEQ ID NO: 18471 - DNA, 15 bp, Homo sapiens
tgccttcatctcatt

SEQ ID NO: 18472 - DNA, 15 bp, Homo sapiens
ttgccttcatctcat

SEQ ID NO: 18473 - DNA, 15 bp, Homo sapiens
attgccttcatctca

SEQ ID NO: 18474 - DNA, 15 bp, Homo sapiens
aattgccttcatctc

SEQ ID NO: 18475 - DNA, 15 bp, Homo sapiens
taattgccttcatct

SEQ ID NO: 18476 - DNA, 15 bp, Homo sapiens
ttaattgccttcatc

SEQ ID NO: 18477 - DNA, 15 bp, Homo sapiens
gttaattgccttcat

SEQ ID NO: 18478 - DNA, 15 bp, Homo sapiens
agttaattgccttca

SEQ ID NO: 18479 - DNA, 15 bp, Homo sapiens
gagttaattgccttc

SEQ ID NO: 18480 - DNA, 15 bp, Homo sapiens
tgagttaattgcctt

SEQ ID NO: 18481 - DNA, 15 bp, Homo sapiens
gtgagttaattgcct

SEQ ID NO: 18482 - DNA, 15 bp, Homo sapiens
tgtgagttaattgcc

SEQ ID NO: 18483 - DNA, 15 bp, Homo sapiens
atgtgagttaattgc

SEQ ID NO: 18484 - DNA, 15 bp, Homo sapiens
tatgtgagttaattg

SEQ ID NO: 18485 - DNA, 15 bp, Homo sapiens
ctatgtgagttaatt

SEQ ID NO: 18486 - DNA, 15 bp, Homo sapiens
actatgtgagttaat

SEQ ID NO: 18487 - DNA, 15 bp, Homo sapiens
tactatgtgagttaa

SEQ ID NO: 18488 - DNA, 15 bp, Homo sapiens
atactatgtgagtta

SEQ ID NO: 18489 - DNA, 15 bp, Homo sapiens
tatactatgtgagtt

SEQ ID NO: 18490 - DNA, 15 bp, Homo sapiens
ttatactatgtgagt

SEQ ID NO: 18491 - DNA, 15 bp, Homo sapiens
tttatactatgtgag

SEQ ID NO: 18492 - DNA, 15 bp, Homo sapiens
atttatactatgtga

SEQ ID NO: 18493 - DNA, 15 bp, Homo sapiens
catttatactatgtg

SEQ ID NO: 18494 - DNA, 15 bp, Homo sapiens
tcatttatactatgt

SEQ ID NO: 18495 - DNA, 15 bp, Homo sapiens
ttcatttatactatg

SEQ ID NO: 18496 - DNA, 15 bp, Homo sapiens
attcatttatactat

SEQ ID NO: 18497 - DNA, 15 bp, Homo sapiens
gattcatttatacta

SEQ ID NO: 18498 - DNA, 15 bp, Homo sapiens
tgattcatttatact

SEQ ID NO: 18499 - DNA, 15 bp, Homo sapiens
atgattcatttatac

SEQ ID NO: 18500 - DNA, 15 bp, Homo sapiens
aatgattcatttata

SEQ ID NO: 18501 - DNA, 15 bp, Homo sapiens
aaatgattcatttat

SEQ ID NO: 18502 - DNA, 15 bp, Homo sapiens
caaatgattcattta

SEQ ID NO: 18503 - DNA, 15 bp, Homo sapiens
tcaaatgattcattt

SEQ ID NO: 18504 - DNA, 15 bp, Homo sapiens
ctcaaatgattcatt

SEQ ID NO: 18505 - DNA, 15 bp, Homo sapiens
cctcaaatgattcat

SEQ ID NO: 18506 - DNA, 15 bp, Homo sapiens
acctcaaatgattca

SEQ ID NO: 18507 - DNA, 15 bp, Homo sapiens
cacctcaaatgattc

SEQ ID NO: 18508 - DNA, 15 bp, Homo sapiens
tcacctcaaatgatt

SEQ ID NO: 18509 - DNA, 15 bp, Homo sapiens
atcacctcaaatgat

SEQ ID NO: 18510 - DNA, 15 bp, Homo sapiens
catcacctcaaatga

SEQ ID NO: 18511 - DNA, 15 bp, Homo sapiens
tcatcacctcaaatg

SEQ ID NO: 18512 - DNA, 15 bp, Homo sapiens
gtcatcacctcaaat

SEQ ID NO: 18513 - DNA, 15 bp, Homo sapiens
agtcatcacctcaaa

SEQ ID NO: 18514 - DNA, 15 bp, Homo sapiens
cagtcatcacctcaa

SEQ ID NO: 18515 - DNA, 15 bp, Homo sapiens
gcagtcatcacctca

SEQ ID NO: 18516 - DNA, 15 bp, Homo sapiens
tgcagtcatcacctc

SEQ ID NO: 18517 - DNA, 15 bp, Homo sapiens
atgcagtcatcacct

SEQ ID NO: 18518 - DNA, 15 bp, Homo sapiens
aatgcagtcatcacc

SEQ ID NO: 18519 - DNA, 15 bp, Homo sapiens
aaatgcagtcatcac

SEQ ID NO: 18520 - DNA, 15 bp, Homo sapiens
aaaatgcagtcatca

SEQ ID NO: 18521 - DNA, 15 bp, Homo sapiens
taaaatgcagtcatc

SEQ ID NO: 18522 - DNA, 15 bp, Homo sapiens
ctaaaatgcagtcat

SEQ ID NO: 18523 - DNA, 15 bp, Homo sapiens
cctaaaatgcagtca

SEQ ID NO: 18524 - DNA, 15 bp, Homo sapiens
gcctaaaatgcagtc

SEQ ID NO: 18525 - DNA, 15 bp, Homo sapiens
tgcctaaaatgcagt

SEQ ID NO: 18526 - DNA, 15 bp, Homo sapiens
ttgcctaaaatgcag

SEQ ID NO: 18527 - DNA, 15 bp, Homo sapiens
tttgcctaaaatgca

SEQ ID NO: 18528 - DNA, 15 bp, Homo sapiens
atttgcctaaaatgc

SEQ ID NO: 18529 - DNA, 15 bp, Homo sapiens
catttgcctaaaatg

SEQ ID NO: 18530 - DNA, 15 bp, Homo sapiens
tcatttgcctaaaat

SEQ ID NO: 18531 - DNA, 15 bp, Homo sapiens
atcatttgcctaaaa

SEQ ID NO: 18532 - DNA, 15 bp, Homo sapiens
catcatttgcctaaa

SEQ ID NO: 18533 - DNA, 15 bp, Homo sapiens
tcatcatttgcctaa

SEQ ID NO: 18534 - DNA, 15 bp, Homo sapiens
gtcatcatttgccta

SEQ ID NO: 18535 - DNA, 15 bp, Homo sapiens
agtcatcatttgcct

SEQ ID NO: 18536 - DNA, 15 bp, Homo sapiens
aagtcatcatttgcc

SEQ ID NO: 18537 - DNA, 15 bp, Homo sapiens
aaagtcatcatttgc

SEQ ID NO: 18538 - DNA, 15 bp, Homo sapiens
gaaagtcatcatttg

SEQ ID NO: 18539 - DNA, 15 bp, Homo sapiens
agaaagtcatcattt

SEQ ID NO: 18540 - DNA, 15 bp, Homo sapiens
aagaaagtcatcatt

SEQ ID NO: 18541 - DNA, 15 bp, Homo sapiens
caagaaagtcatcat

SEQ ID NO: 18542 - DNA, 15 bp, Homo sapiens
ccaagaaagtcatca

SEQ ID NO: 18543 - DNA, 15 bp, Homo sapiens
accaagaaagtcatc

SEQ ID NO: 18544 - DNA, 15 bp, Homo sapiens
aaccaagaaagtcat

SEQ ID NO: 18545 - DNA, 15 bp, Homo sapiens
gaaccaagaaagtca

SEQ ID NO: 18546 - DNA, 15 bp, Homo sapiens
ggaaccaagaaagtc

SEQ ID NO: 18547 - DNA, 15 bp, Homo sapiens
tggaaccaagaaagt

SEQ ID NO: 18548 - DNA, 15 bp, Homo sapiens
atggaaccaagaaag

SEQ ID NO: 18549 - DNA, 15 bp, Homo sapiens
aatggaaccaagaaa

SEQ ID NO: 18550 - DNA, 15 bp, Homo sapiens
caatggaaccaagaa

SEQ ID NO: 18551 - DNA, 15 bp, Homo sapiens
ccaatggaaccaaga

SEQ ID NO: 18552 - DNA, 15 bp, Homo sapiens
accaatggaaccaag

SEQ ID NO: 18553 - DNA, 15 bp, Homo sapiens
aaccaatggaaccaa

SEQ ID NO: 18554 - DNA, 15 bp, Homo sapiens
aaaccaatggaacca

SEQ ID NO: 18555 - DNA, 15 bp, Homo sapiens
caaaccaatggaacc

SEQ ID NO: 18556 - DNA, 15 bp, Homo sapiens
gcaaaccaatggaac

SEQ ID NO: 18557 - DNA, 15 bp, Homo sapiens
tgcaaaccaatggaa

SEQ ID NO: 18558 - DNA, 15 bp, Homo sapiens
ttgcaaaccaatgga

SEQ ID NO: 18559 - DNA, 15 bp, Homo sapiens
cttgcaaaccaatgg

SEQ ID NO: 18560 - DNA, 15 bp, Homo sapiens
acttgcaaaccaatg

SEQ ID NO: 18561 - DNA, 15 bp, Homo sapiens
tacttgcaaaccaat

SEQ ID NO: 18562 - DNA, 15 bp, Homo sapiens
ttacttgcaaaccaa

SEQ ID NO: 18563 - DNA, 15 bp, Homo sapiens
tttacttgcaaacca

SEQ ID NO: 18564 - DNA, 15 bp, Homo sapiens
ttttacttgcaaacc

SEQ ID NO: 18565 - DNA, 15 bp, Homo sapiens
cttttacttgcaaac

SEQ ID NO: 18566 - DNA, 15 bp, Homo sapiens
acttttacttgcaaa

SEQ ID NO: 18567 - DNA, 15 bp, Homo sapiens
aacttttacttgcaa

SEQ ID NO: 18568 - DNA, 15 bp, Homo sapiens
taacttttacttgca

SEQ ID NO: 18569 - DNA, 15 bp, Homo sapiens
gtaacttttacttgc

SEQ ID NO: 18570 - DNA, 15 bp, Homo sapiens
tgtaacttttacttg

SEQ ID NO: 18571 - DNA, 15 bp, Homo sapiens
gtgtaacttttactt

SEQ ID NO: 18572 - DNA, 15 bp, Homo sapiens
tgtgtaacttttact

SEQ ID NO: 18573 - DNA, 15 bp, Homo sapiens
gtgtgtaacttttac

SEQ ID NO: 18574 - DNA, 15 bp, Homo sapiens
tgtgtgtaactttta

SEQ ID NO: 18575 - DNA, 15 bp, Homo sapiens
atgtgtgtaactttt

SEQ ID NO: 18576 - DNA, 15 bp, Homo sapiens
aatgtgtgtaacttt

SEQ ID NO: 18577 - DNA, 15 bp, Homo sapiens
caatgtgtgtaactt

SEQ ID NO: 18578 - DNA, 15 bp, Homo sapiens
tcaatgtgtgtaact

SEQ ID NO: 18579 - DNA, 15 bp, Homo sapiens
ttcaatgtgtgtaac

SEQ ID NO: 18580 - DNA, 15 bp, Homo sapiens
tttcaatgtgtgtaa

SEQ ID NO: 18581 - DNA, 15 bp, Homo sapiens
ttttcaatgtgtgta

SEQ ID NO: 18582 - DNA, 15 bp, Homo sapiens
cttttcaatgtgtgt

SEQ ID NO: 18583 - DNA, 15 bp, Homo sapiens
tcttttcaatgtgtg

SEQ ID NO: 18584 - DNA, 15 bp, Homo sapiens
gtcttttcaatgtgt

SEQ ID NO: 18585 - DNA, 15 bp, Homo sapiens
tgtcttttcaatgtg

SEQ ID NO: 18586 - DNA, 15 bp, Homo sapiens
gtgtcttttcaatgt

SEQ ID NO: 18587 - DNA, 15 bp, Homo sapiens
agtgtcttttcaatg

SEQ ID NO: 18588 - DNA, 15 bp, Homo sapiens
cagtgtcttttcaat

SEQ ID NO: 18589 - DNA, 15 bp, Homo sapiens
tcagtgtcttttcaa

SEQ ID NO: 18590 - DNA, 15 bp, Homo sapiens
ttcagtgtcttttca

SEQ ID NO: 18591 - DNA, 15 bp, Homo sapiens
tttcagtgtcttttc

SEQ ID NO: 18592 - DNA, 15 bp, Homo sapiens
gtttcagtgtctttt

SEQ ID NO: 18593 - DNA, 15 bp, Homo sapiens
tgtttcagtgtcttt

SEQ ID NO: 18594 - DNA, 15 bp, Homo sapiens
ctgtttcagtgtctt

SEQ ID NO: 18595 - DNA, 15 bp, Homo sapiens
tctgtttcagtgtct

SEQ ID NO: 18596 - DNA, 15 bp, Homo sapiens
atctgtttcagtgtc

SEQ ID NO: 18597 - DNA, 15 bp, Homo sapiens
aatctgtttcagtgt

SEQ ID NO: 18598 - DNA, 15 bp, Homo sapiens
aaatctgtttcagtg

SEQ ID NO: 18599 - DNA, 15 bp, Homo sapiens
gaaatctgtttcagt

SEQ ID NO: 18600 - DNA, 15 bp, Homo sapiens
ggaaatctgtttcag

SEQ ID NO: 18601 - DNA, 15 bp, Homo sapiens
aggaaatctgtttca

SEQ ID NO: 18602 - DNA, 15 bp, Homo sapiens
taggaaatctgtttc

SEQ ID NO: 18603 - DNA, 15 bp, Homo sapiens
ttaggaaatctgttt

SEQ ID NO: 18604 - DNA, 15 bp, Homo sapiens
tttaggaaatctgtt

SEQ ID NO: 18605 - DNA, 15 bp, Homo sapiens
atttaggaaatctgt

SEQ ID NO: 18606 - DNA, 15 bp, Homo sapiens
catttaggaaatctg

SEQ ID NO: 18607 - DNA, 15 bp, Homo sapiens
gcatttaggaaatct

SEQ ID NO: 18608 - DNA, 15 bp, Homo sapiens
agcatttaggaaatc

SEQ ID NO: 18609 - DNA, 15 bp, Homo sapiens
aagcatttaggaaat

SEQ ID NO: 18610 - DNA, 15 bp, Homo sapiens
gaagcatttaggaaa

SEQ ID NO: 18611 - DNA, 15 bp, Homo sapiens
tgaagcatttaggaa

SEQ ID NO: 18612 - DNA, 15 bp, Homo sapiens
atgaagcatttagga

SEQ ID NO: 18613 - DNA, 15 bp, Homo sapiens
aatgaagcatttagg

SEQ ID NO: 18614 - DNA, 15 bp, Homo sapiens
aaatgaagcatttag

SEQ ID NO: 18615 - DNA, 15 bp, Homo sapiens
aaaatgaagcattta

SEQ ID NO: 18616 - DNA, 15 bp, Homo sapiens
gaaaatgaagcattt

SEQ ID NO: 18617 - DNA, 15 bp, Homo sapiens
agaaaatgaagcatt

SEQ ID NO: 18618 - DNA, 15 bp, Homo sapiens
cagaaaatgaagcat

SEQ ID NO: 18619 - DNA, 15 bp, Homo sapiens
ccagaaaatgaagca

SEQ ID NO: 18620 - DNA, 15 bp, Homo sapiens
tccagaaaatgaagc

SEQ ID NO: 18621 - DNA, 15 bp, Homo sapiens
atccagaaaatgaag

SEQ ID NO: 18622 - DNA, 15 bp, Homo sapiens
catccagaaaatgaa

SEQ ID NO: 18623 - DNA, 15 bp, Homo sapiens
gcatccagaaaatga

SEQ ID NO: 18624 - DNA, 15 bp, Homo sapiens
tgcatccagaaaatg

SEQ ID NO: 18625 - DNA, 15 bp, Homo sapiens
gtgcatccagaaaat

SEQ ID NO: 18626 - DNA, 15 bp, Homo sapiens
ggtgcatccagaaaa

SEQ ID NO: 18627 - DNA, 15 bp, Homo sapiens
tggtgcatccagaaa

SEQ ID NO: 18628 - DNA, 15 bp, Homo sapiens
ttggtgcatccagaa

SEQ ID NO: 18629 - DNA, 15 bp, Homo sapiens
attggtgcatccaga

SEQ ID NO: 18630 - DNA, 15 bp, Homo sapiens
cattggtgcatccag

SEQ ID NO: 18631 - DNA, 15 bp, Homo sapiens
acattggtgcatcca

SEQ ID NO: 18632 - DNA, 15 bp, Homo sapiens
aacattggtgcatcc

SEQ ID NO: 18633 - DNA, 15 bp, Homo sapiens
caacattggtgcatc

SEQ ID NO: 18634 - DNA, 15 bp, Homo sapiens
tcaacattggtgcat

SEQ ID NO: 18635 - DNA, 15 bp, Homo sapiens
gtcaacattggtgca

SEQ ID NO: 18636 - DNA, 15 bp, Homo sapiens
ggtcaacattggtgc

SEQ ID NO: 18637 - DNA, 15 bp, Homo sapiens
aggtcaacattggtg

SEQ ID NO: 18638 - DNA, 15 bp, Homo sapiens
taggtcaacattggt

SEQ ID NO: 18639 - DNA, 15 bp, Homo sapiens
gtaggtcaacattgg

SEQ ID NO: 18640 - DNA, 15 bp, Homo sapiens
agtaggtcaacattg

SEQ ID NO: 18641 - DNA, 15 bp, Homo sapiens
tagtaggtcaacatt

SEQ ID NO: 18642 - DNA, 15 bp, Homo sapiens
atagtaggtcaacat

SEQ ID NO: 18643 - DNA, 15 bp, Homo sapiens
tatagtaggtcaaca

SEQ ID NO: 18644 - DNA, 15 bp, Homo sapiens
gtatagtaggtcaac

SEQ ID NO: 18645 - DNA, 15 bp, Homo sapiens
tgtatagtaggtcaa

SEQ ID NO: 18646 - DNA, 15 bp, Homo sapiens
atgtatagtaggtca

SEQ ID NO: 18647 - DNA, 15 bp, Homo sapiens
catgtatagtaggtc

SEQ ID NO: 18648 - DNA, 15 bp, Homo sapiens
acatgtatagtaggt

SEQ ID NO: 18649 - DNA, 15 bp, Homo sapiens
aacatgtatagtagg

SEQ ID NO: 18650 - DNA, 15 bp, Homo sapiens
taacatgtatagtag

SEQ ID NO: 18651 - DNA, 15 bp, Homo sapiens
ttaacatgtatagta

SEQ ID NO: 18652 - DNA, 15 bp, Homo sapiens
tttaacatgtatagt

SEQ ID NO: 18653 - DNA, 15 bp, Homo sapiens
atttaacatgtatag

SEQ ID NO: 18654 - DNA, 15 bp, Homo sapiens
catttaacatgtata

SEQ ID NO: 18655 - DNA, 15 bp, Homo sapiens
ccatttaacatgtat

SEQ ID NO: 18656 - DNA, 15 bp, Homo sapiens
accatttaacatgta

SEQ ID NO: 18657 - DNA, 15 bp, Homo sapiens
aaccatttaacatgt

SEQ ID NO: 18658 - DNA, 15 bp, Homo sapiens
aaaccatttaacatg

SEQ ID NO: 18659 - DNA, 15 bp, Homo sapiens
aaaaccatttaacat

SEQ ID NO: 18660 - DNA, 15 bp, Homo sapiens
taaaaccatttaaca

SEQ ID NO: 18661 - DNA, 15 bp, Homo sapiens
ttaaaaccatttaac

SEQ ID NO: 18662 - DNA, 15 bp, Homo sapiens
tttaaaaccatttaa

SEQ ID NO: 18663 - DNA, 15 bp, Homo sapiens
ttttaaaaccattta

SEQ ID NO: 18664 - DNA, 15 bp, Homo sapiens
attttaaaaccattt

SEQ ID NO: 18665 - DNA, 15 bp, Homo sapiens
tattttaaaaccatt

SEQ ID NO: 18666 - DNA, 15 bp, Homo sapiens
atattttaaaaccat

SEQ ID NO: 18667 - DNA, 15 bp, Homo sapiens
gatattttaaaacca

SEQ ID NO: 18668 - DNA, 15 bp, Homo sapiens
tgatattttaaaacc

SEQ ID NO: 18669 - DNA, 15 bp, Homo sapiens
gtgatattttaaaac

SEQ ID NO: 18670 - DNA, 15 bp, Homo sapiens
ggtgatattttaaaa

SEQ ID NO: 18671 - DNA, 15 bp, Homo sapiens
aggtgatattttaaa

SEQ ID NO: 18672 - DNA, 15 bp, Homo sapiens
aaggtgatattttaa

SEQ ID NO: 18673 - DNA, 15 bp, Homo sapiens
taaggtgatatttta

SEQ ID NO: 18674 - DNA, 15 bp, Homo sapiens
ttaaggtgatatttt

SEQ ID NO: 18675 - DNA, 15 bp, Homo sapiens
tttaaggtgatattt

SEQ ID NO: 18676 - DNA, 15 bp, Homo sapiens
ttttaaggtgatatt

SEQ ID NO: 18677 - DNA, 15 bp, Homo sapiens
attttaaggtgatat

SEQ ID NO: 18678 - DNA, 15 bp, Homo sapiens
tattttaaggtgata

SEQ ID NO: 18679 - DNA, 15 bp, Homo sapiens
ttattttaaggtgat

SEQ ID NO: 18680 - DNA, 15 bp, Homo sapiens
tttattttaaggtga

SEQ ID NO: 18681 - DNA, 15 bp, Homo sapiens
ctttattttaaggtg

SEQ ID NO: 18682 - DNA, 15 bp, Homo sapiens
cctttattttaaggt

SEQ ID NO: 18683 - DNA, 15 bp, Homo sapiens
tcctttattttaagg

SEQ ID NO: 18684 - DNA, 15 bp, Homo sapiens
ttcctttattttaag

SEQ ID NO: 18685 - DNA, 15 bp, Homo sapiens
tttcctttattttaa

SEQ ID NO: 18686 - DNA, 15 bp, Homo sapiens
gtttcctttatttta

SEQ ID NO: 18687 - DNA, 15 bp, Homo sapiens
agtttcctttatttt

SEQ ID NO: 18688 - DNA, 15 bp, Homo sapiens
aagtttcctttattt

SEQ ID NO: 18689 - DNA, 15 bp, Homo sapiens
gaagtttcctttatt

SEQ ID NO: 18690 - DNA, 15 bp, Homo sapiens
ggaagtttcctttat

SEQ ID NO: 18691 - DNA, 15 bp, Homo sapiens
tggaagtttccttta

SEQ ID NO: 18692 - DNA, 15 bp, Homo sapiens
ctggaagtttccttt

SEQ ID NO: 18693 - DNA, 15 bp, Homo sapiens
gctggaagtttcctt

SEQ ID NO: 18694 - DNA, 15 bp, Homo sapiens
agctggaagtttcct

SEQ ID NO: 18695 - DNA, 15 bp, Homo sapiens
tagctggaagtttcc

SEQ ID NO: 18696 - DNA, 15 bp, Homo sapiens
gtagctggaagtttc

SEQ ID NO: 18697 - DNA, 15 bp, Homo sapiens
agtagctggaagttt

SEQ ID NO: 18698 - DNA, 15 bp, Homo sapiens
tagtagctggaagtt

SEQ ID NO: 18699 - DNA, 15 bp, Homo sapiens
ttagtagctggaagt

SEQ ID NO: 18700 - DNA, 15 bp, Homo sapiens
gttagtagctggaag

SEQ ID NO: 18701 - DNA, 15 bp, Homo sapiens
agttagtagctggaa

SEQ ID NO: 18702 - DNA, 15 bp, Homo sapiens
gagttagtagctgga

SEQ ID NO: 18703 - DNA, 15 bp, Homo sapiens
tgagttagtagctgg

SEQ ID NO: 18704 - DNA, 15 bp, Homo sapiens
ctgagttagtagctg

SEQ ID NO: 18705 - DNA, 15 bp, Homo sapiens
gctgagttagtagct

SEQ ID NO: 18706 - DNA, 15 bp, Homo sapiens
agctgagttagtagc

SEQ ID NO: 18707 - DNA, 15 bp, Homo sapiens
gagctgagttagtag

SEQ ID NO: 18708 - DNA, 15 bp, Homo sapiens
agagctgagttagta

SEQ ID NO: 18709 - DNA, 15 bp, Homo sapiens
cagagctgagttagt

SEQ ID NO: 18710 - DNA, 15 bp, Homo sapiens
tcagagctgagttag

SEQ ID NO: 18711 - DNA, 15 bp, Homo sapiens
ttcagagctgagtta

SEQ ID NO: 18712 - DNA, 15 bp, Homo sapiens
attcagagctgagtt

SEQ ID NO: 18713 - DNA, 15 bp, Homo sapiens
cattcagagctgagt

SEQ ID NO: 18714 - DNA, 15 bp, Homo sapiens
ccattcagagctgag

SEQ ID NO: 18715 - DNA, 15 bp, Homo sapiens
cccattcagagctga

SEQ ID NO: 18716 - DNA, 15 bp, Homo sapiens
gcccattcagagctg

SEQ ID NO: 18717 - DNA, 15 bp, Homo sapiens
agcccattcagagct

SEQ ID NO: 18718 - DNA, 15 bp, Homo sapiens
tagcccattcagagc

SEQ ID NO: 18719 - DNA, 15 bp, Homo sapiens
atagcccattcagag

SEQ ID NO: 18720 - DNA, 15 bp, Homo sapiens
catagcccattcaga

SEQ ID NO: 18721 - DNA, 15 bp, Homo sapiens
tcatagcccattcag

SEQ ID NO: 18722 - DNA, 15 bp, Homo sapiens
ttcatagcccattca

SEQ ID NO: 18723 - DNA, 15 bp, Homo sapiens
tttcatagcccattc

SEQ ID NO: 18724 - DNA, 15 bp, Homo sapiens
ctttcatagcccatt

SEQ ID NO: 18725 - DNA, 15 bp, Homo sapiens
cctttcatagcccat

SEQ ID NO: 18726 - DNA, 15 bp, Homo sapiens
gcctttcatagccca

SEQ ID NO: 18727 - DNA, 15 bp, Homo sapiens
agcctttcatagccc

SEQ ID NO: 18728 - DNA, 15 bp, Homo sapiens
gagcctttcatagcc

SEQ ID NO: 18729 - DNA, 15 bp, Homo sapiens
ggagcctttcatagc

SEQ ID NO: 18730 - DNA, 15 bp, Homo sapiens
tggagcctttcatag

SEQ ID NO: 18731 - DNA, 15 bp, Homo sapiens
ttggagcctttcata

SEQ ID NO: 18732 - DNA, 15 bp, Homo sapiens
tttggagcctttcat

SEQ ID NO: 18733 - DNA, 15 bp, Homo sapiens
ctttggagcctttca

SEQ ID NO: 18734 - DNA, 15 bp, Homo sapiens
cctttggagcctttc

SEQ ID NO: 18735 - DNA, 15 bp, Homo sapiens
acctttggagccttt

SEQ ID NO: 18736 - DNA, 15 bp, Homo sapiens
tacctttggagcctt

SEQ ID NO: 18737 - DNA, 15 bp, Homo sapiens
atacctttggagcct

SEQ ID NO: 18738 - DNA, 15 bp, Homo sapiens
catacctttggagcc

SEQ ID NO: 18739 - DNA, 15 bp, Homo sapiens
acatacctttggagc

SEQ ID NO: 18740 - DNA, 15 bp, Homo sapiens
cacatacctttggag

SEQ ID NO: 18741 - DNA, 15 bp, Homo sapiens
tcacatacctttgga

SEQ ID NO: 18742 - DNA, 15 bp, Homo sapiens
ttcacatacctttgg

SEQ ID NO: 18743 - DNA, 15 bp, Homo sapiens
tttcacatacctttg

SEQ ID NO: 18744 - DNA, 15 bp, Homo sapiens
ttttcacataccttt

SEQ ID NO: 18745 - DNA, 15 bp, Homo sapiens
tttttcacatacctt

SEQ ID NO: 18746 - DNA, 15 bp, Homo sapiens
atttttcacatacct

SEQ ID NO: 18747 - DNA, 15 bp, Homo sapiens
aatttttcacatacc

SEQ ID NO: 18748 - DNA, 15 bp, Homo sapiens
taatttttcacatac

SEQ ID NO: 18749 - DNA, 15 bp, Homo sapiens
gtaatttttcacata

SEQ ID NO: 18750 - DNA, 15 bp, Homo sapiens
agtaatttttcacat

SEQ ID NO: 18751 - DNA, 15 bp, Homo sapiens
cagtaatttttcaca

SEQ ID NO: 18752 - DNA, 15 bp, Homo sapiens
acagtaatttttcac

SEQ ID NO: 18753 - DNA, 15 bp, Homo sapiens
aacagtaatttttca

SEQ ID NO: 18754 - DNA, 15 bp, Homo sapiens
taacagtaatttttc

SEQ ID NO: 18755 - DNA, 15 bp, Homo sapiens
ataacagtaattttt

SEQ ID NO: 18756 - DNA, 15 bp, Homo sapiens
aataacagtaatttt

SEQ ID NO: 18757 - DNA, 15 bp, Homo sapiens
aaataacagtaattt

SEQ ID NO: 18758 - DNA, 15 bp, Homo sapiens
aaaataacagtaatt

SEQ ID NO: 18759 - DNA, 15 bp, Homo sapiens
caaaataacagtaat

SEQ ID NO: 18760 - DNA, 15 bp, Homo sapiens
gcaaaataacagtaa

SEQ ID NO: 18761 - DNA, 15 bp, Homo sapiens
agcaaaataacagta

SEQ ID NO: 18762 - DNA, 15 bp, Homo sapiens
aagcaaaataacagt

SEQ ID NO: 18763 - DNA, 15 bp, Homo sapiens
aaagcaaaataacag

SEQ ID NO: 18764 - DNA, 15 bp, Homo sapiens
taaagcaaaataaca

SEQ ID NO: 18765 - DNA, 15 bp, Homo sapiens
ttaaagcaaaataac

SEQ ID NO: 18766 - DNA, 15 bp, Homo sapiens
tttaaagcaaaataa

SEQ ID NO: 18767 - DNA, 15 bp, Homo sapiens
ttttaaagcaaaata

SEQ ID NO: 18768 - DNA, 15 bp, Homo sapiens
tttttaaagcaaaat

SEQ ID NO: 18769 - DNA, 15 bp, Homo sapiens
ttttttaaagcaaaa

SEQ ID NO: 18770 - DNA, 15 bp, Homo sapiens
attttttaaagcaaa

SEQ ID NO: 18771 - DNA, 15 bp, Homo sapiens
cattttttaaagcaa

SEQ ID NO: 18772 - DNA, 15 bp, Homo sapiens
acattttttaaagca

SEQ ID NO: 18773 - DNA, 15 bp, Homo sapiens
cacattttttaaagc

SEQ ID NO: 18774 - DNA, 15 bp, Homo sapiens
tcacattttttaaag

SEQ ID NO: 18775 - DNA, 15 bp, Homo sapiens
atcacattttttaaa

SEQ ID NO: 18776 - DNA, 15 bp, Homo sapiens
catcacattttttaa

SEQ ID NO: 18777 - DNA, 15 bp, Homo sapiens
acatcacatttttta

SEQ ID NO: 18778 - DNA, 15 bp, Homo sapiens
gacatcacatttttt

SEQ ID NO: 18779 - DNA, 15 bp, Homo sapiens
agacatcacattttt

SEQ ID NO: 18780 - DNA, 15 bp, Homo sapiens
tagacatcacatttt

SEQ ID NO: 18781 - DNA, 15 bp, Homo sapiens
ttagacatcacattt

SEQ ID NO: 18782 - DNA, 15 bp, Homo sapiens
cttagacatcacatt

SEQ ID NO: 18783 - DNA, 15 bp, Homo sapiens
tcttagacatcacat

SEQ ID NO: 18784 - DNA, 15 bp, Homo sapiens
ctcttagacatcaca

SEQ ID NO: 18785 - DNA, 15 bp, Homo sapiens
actcttagacatcac

SEQ ID NO: 18786 - DNA, 15 bp, Homo sapiens
cactcttagacatca

SEQ ID NO: 18787 - DNA, 15 bp, Homo sapiens
acactcttagacatc

SEQ ID NO: 18788 - DNA, 15 bp, Homo sapiens
gacactcttagacat

SEQ ID NO: 18789 - DNA, 15 bp, Homo sapiens
agacactcttagaca

SEQ ID NO: 18790 - DNA, 15 bp, Homo sapiens
cagacactcttagac

SEQ ID NO: 18791 - DNA, 15 bp, Homo sapiens
gcagacactcttaga

SEQ ID NO: 18792 - DNA, 15 bp, Homo sapiens
tgcagacactcttag

SEQ ID NO: 18793 - DNA, 15 bp, Homo sapiens
ttgcagacactctta

SEQ ID NO: 18794 - DNA, 15 bp, Homo sapiens
attgcagacactctt

SEQ ID NO: 18795 - DNA, 15 bp, Homo sapiens
cattgcagacactct

SEQ ID NO: 18796 - DNA, 15 bp, Homo sapiens
acattgcagacactc

SEQ ID NO: 18797 - DNA, 15 bp, Homo sapiens
aacattgcagacact

SEQ ID NO: 18798 - DNA, 15 bp, Homo sapiens
gaacattgcagacac

SEQ ID NO: 18799 - DNA, 15 bp, Homo sapiens
agaacattgcagaca

SEQ ID NO: 18800 - DNA, 15 bp, Homo sapiens
tagaacattgcagac

SEQ ID NO: 18801 - DNA, 15 bp, Homo sapiens
ttagaacattgcaga

SEQ ID NO: 18802 - DNA, 15 bp, Homo sapiens
attagaacattgcag

SEQ ID NO: 18803 - DNA, 15 bp, Homo sapiens
cattagaacattgca

SEQ ID NO: 18804 - DNA, 15 bp, Homo sapiens
gcattagaacattgc

SEQ ID NO: 18805 - DNA, 15 bp, Homo sapiens
agcattagaacattg

SEQ ID NO: 18806 - DNA, 15 bp, Homo sapiens
aagcattagaacatt

SEQ ID NO: 18807 - DNA, 15 bp, Homo sapiens
gaagcattagaacat

SEQ ID NO: 18808 - DNA, 15 bp, Homo sapiens
tgaagcattagaaca

SEQ ID NO: 18809 - DNA, 15 bp, Homo sapiens
ttgaagcattagaac

SEQ ID NO: 18810 - DNA, 15 bp, Homo sapiens
tttgaagcattagaa

SEQ ID NO: 18811 - DNA, 15 bp, Homo sapiens
ttttgaagcattaga

SEQ ID NO: 18812 - DNA, 15 bp, Homo sapiens
gttttgaagcattag

SEQ ID NO: 18813 - DNA, 15 bp, Homo sapiens
tgttttgaagcatta

SEQ ID NO: 18814 - DNA, 15 bp, Homo sapiens
atgttttgaagcatt

SEQ ID NO: 18815 - DNA, 15 bp, Homo sapiens
catgttttgaagcat

SEQ ID NO: 18816 - DNA, 15 bp, Homo sapiens
acatgttttgaagca

SEQ ID NO: 18817 - DNA, 15 bp, Homo sapiens
tacatgttttgaagc

SEQ ID NO: 18818 - DNA, 15 bp, Homo sapiens
gtacatgttttgaag

SEQ ID NO: 18819 - DNA, 15 bp, Homo sapiens
cgtacatgttttgaa

SEQ ID NO: 18820 - DNA, 15 bp, Homo sapiens
acgtacatgttttga

SEQ ID NO: 18821 - DNA, 15 bp, Homo sapiens
tacgtacatgttttg

SEQ ID NO: 18822 - DNA, 15 bp, Homo sapiens
ttacgtacatgtttt

SEQ ID NO: 18823 - DNA, 15 bp, Homo sapiens
cttacgtacatgttt

SEQ ID NO: 18824 - DNA, 15 bp, Homo sapiens
gcttacgtacatgtt

SEQ ID NO: 18825 - DNA, 15 bp, Homo sapiens
ggcttacgtacatgt

SEQ ID NO: 18826 - DNA, 15 bp, Homo sapiens
aggcttacgtacatg

SEQ ID NO: 18827 - DNA, 15 bp, Homo sapiens
aaggcttacgtacat

SEQ ID NO: 18828 - DNA, 15 bp, Homo sapiens
caaggcttacgtaca

SEQ ID NO: 18829 - DNA, 15 bp, Homo sapiens
acaaggcttacgtac

SEQ ID NO: 18830 - DNA, 15 bp, Homo sapiens
aacaaggcttacgta

SEQ ID NO: 18831 - DNA, 15 bp, Homo sapiens
aaacaaggcttacgt

SEQ ID NO: 18832 - DNA, 15 bp, Homo sapiens
taaacaaggcttacg

SEQ ID NO: 18833 - DNA, 15 bp, Homo sapiens
ataaacaaggcttac

SEQ ID NO: 18834 - DNA, 15 bp, Homo sapiens
gataaacaaggctta

SEQ ID NO: 18835 - DNA, 15 bp, Homo sapiens
agataaacaaggctt

SEQ ID NO: 18836 - DNA, 15 bp, Homo sapiens
cagataaacaaggct

SEQ ID NO: 18837 - DNA, 15 bp, Homo sapiens
ccagataaacaaggc

SEQ ID NO: 18838 - DNA, 15 bp, Homo sapiens
tccagataaacaagg

SEQ ID NO: 18839 - DNA, 15 bp, Homo sapiens
ttccagataaacaag

SEQ ID NO: 18840 - DNA, 15 bp, Homo sapiens
tttccagataaacaa

SEQ ID NO: 18841 - DNA, 15 bp, Homo sapiens
atttccagataaaca

SEQ ID NO: 18842 - DNA, 15 bp, Homo sapiens
gatttccagataaac

SEQ ID NO: 18843 - DNA, 15 bp, Homo sapiens
tgatttccagataaa

SEQ ID NO: 18844 - DNA, 15 bp, Homo sapiens
atgatttccagataa

SEQ ID NO: 18845 - DNA, 15 bp, Homo sapiens
aatgatttccagata

SEQ ID NO: 18846 - DNA, 15 bp, Homo sapiens
aaatgatttccagat

SEQ ID NO: 18847 - DNA, 15 bp, Homo sapiens
gaaatgatttccaga

SEQ ID NO: 18848 - DNA, 15 bp, Homo sapiens
agaaatgatttccag

SEQ ID NO: 18849 - DNA, 15 bp, Homo sapiens
aagaaatgatttcca

SEQ ID NO: 18850 - DNA, 15 bp, Homo sapiens
aaagaaatgatttcc

SEQ ID NO: 18851 - DNA, 15 bp, Homo sapiens
gaaagaaatgatttc

SEQ ID NO: 18852 - DNA, 15 bp, Homo sapiens
agaaagaaatgattt

SEQ ID NO: 18853 - DNA, 15 bp, Homo sapiens
cagaaagaaatgatt

SEQ ID NO: 18854 - DNA, 15 bp, Homo sapiens
gcagaaagaaatgat

SEQ ID NO: 18855 - DNA, 15 bp, Homo sapiens
agcagaaagaaatga

SEQ ID NO: 18856 - DNA, 15 bp, Homo sapiens
aagcagaaagaaatg

SEQ ID NO: 18857 - DNA, 15 bp, Homo sapiens
taagcagaaagaaat

SEQ ID NO: 18858 - DNA, 15 bp, Homo sapiens
ataagcagaaagaaa

SEQ ID NO: 18859 - DNA, 15 bp, Homo sapiens
tataagcagaaagaa

SEQ ID NO: 18860 - DNA, 15 bp, Homo sapiens
atataagcagaaaga

SEQ ID NO: 18861 - DNA, 15 bp, Homo sapiens
gatataagcagaaag

SEQ ID NO: 18862 - DNA, 15 bp, Homo sapiens
tgatataagcagaaa

SEQ ID NO: 18863 - DNA, 15 bp, Homo sapiens
atgatataagcagaa

SEQ ID NO: 18864 - DNA, 15 bp, Homo sapiens
aatgatataagcaga

SEQ ID NO: 18865 - DNA, 15 bp, Homo sapiens
aaatgatataagcag

SEQ ID NO: 18866 - DNA, 15 bp, Homo sapiens
taaatgatataagca

SEQ ID NO: 18867 - DNA, 15 bp, Homo sapiens
ataaatgatataagc

SEQ ID NO: 18868 - DNA, 15 bp, Homo sapiens
tataaatgatataag

SEQ ID NO: 18869 - DNA, 15 bp, Homo sapiens
ttataaatgatataa

SEQ ID NO: 18870 - DNA, 15 bp, Homo sapiens
tttataaatgatata

SEQ ID NO: 18871 - DNA, 15 bp, Homo sapiens
atttataaatgatat

SEQ ID NO: 18872 - DNA, 15 bp, Homo sapiens
tatttataaatgata

SEQ ID NO: 18873 - DNA, 15 bp, Homo sapiens
ctatttataaatgat

SEQ ID NO: 18874 - DNA, 15 bp, Homo sapiens
tctatttataaatga

SEQ ID NO: 18875 - DNA, 15 bp, Homo sapiens
ttctatttataaatg

SEQ ID NO: 18876 - DNA, 15 bp, Homo sapiens
tttctatttataaat

SEQ ID NO: 18877 - DNA, 15 bp, Homo sapiens
ttttctatttataaa

SEQ ID NO: 18878 - DNA, 15 bp, Homo sapiens
attttctatttataa

SEQ ID NO: 18879 - DNA, 15 bp, Homo sapiens
cattttctatttata

SEQ ID NO: 18880 - DNA, 15 bp, Homo sapiens
acattttctatttat

SEQ ID NO: 18881 - DNA, 15 bp, Homo sapiens
aacattttctattta

SEQ ID NO: 18882 - DNA, 15 bp, Homo sapiens
gaacattttctattt

SEQ ID NO: 18883 - DNA, 15 bp, Homo sapiens
agaacattttctatt

SEQ ID NO: 18884 - DNA, 15 bp, Homo sapiens
cagaacattttctat

SEQ ID NO: 18885 - DNA, 15 bp, Homo sapiens
acagaacattttcta

SEQ ID NO: 18886 - DNA, 15 bp, Homo sapiens
tacagaacattttct

SEQ ID NO: 18887 - DNA, 15 bp, Homo sapiens
ttacagaacattttc

SEQ ID NO: 18888 - DNA, 15 bp, Homo sapiens
attacagaacatttt

SEQ ID NO: 18889 - DNA, 15 bp, Homo sapiens
tattacagaacattt

SEQ ID NO: 18890 - DNA, 15 bp, Homo sapiens
ttattacagaacatt

SEQ ID NO: 18891 - DNA, 15 bp, Homo sapiens
gttattacagaacat

SEQ ID NO: 18892 - DNA, 15 bp, Homo sapiens
agttattacagaaca

SEQ ID NO: 18893 - DNA, 15 bp, Homo sapiens
aagttattacagaac

SEQ ID NO: 18894 - DNA, 15 bp, Homo sapiens
taagttattacagaa

SEQ ID NO: 18895 - DNA, 15 bp, Homo sapiens
ttaagttattacaga

SEQ ID NO: 18896 - DNA, 15 bp, Homo sapiens
tttaagttattacag

SEQ ID NO: 18897 - DNA, 15 bp, Homo sapiens
ttttaagttattaca

SEQ ID NO: 18898 - DNA, 15 bp, Homo sapiens
attttaagttattac

SEQ ID NO: 18899 - DNA, 15 bp, Homo sapiens
tattttaagttatta

SEQ ID NO: 18900 - DNA, 15 bp, Homo sapiens
ctattttaagttatt

SEQ ID NO: 18901 - DNA, 15 bp, Homo sapiens
actattttaagttat

SEQ ID NO: 18902 - DNA, 15 bp, Homo sapiens
aactattttaagtta

SEQ ID NO: 18903 - DNA, 15 bp, Homo sapiens
gaactattttaagtt

SEQ ID NO: 18904 - DNA, 15 bp, Homo sapiens
ggaactattttaagt

SEQ ID NO: 18905 - DNA, 15 bp, Homo sapiens
tggaactattttaag

SEQ ID NO: 18906 - DNA, 15 bp, Homo sapiens
gtggaactattttaa

SEQ ID NO: 18907 - DNA, 15 bp, Homo sapiens
tgtggaactatttta

SEQ ID NO: 18908 - DNA, 15 bp, Homo sapiens
atgtggaactatttt

SEQ ID NO: 18909 - DNA, 15 bp, Homo sapiens
tatgtggaactattt

SEQ ID NO: 18910 - DNA, 15 bp, Homo sapiens
gtatgtggaactatt

SEQ ID NO: 18911 - DNA, 15 bp, Homo sapiens
tgtatgtggaactat

SEQ ID NO: 18912 - DNA, 15 bp, Homo sapiens
atgtatgtggaacta

SEQ ID NO: 18913 - DNA, 15 bp, Homo sapiens
tatgtatgtggaact

SEQ ID NO: 18914 - DNA, 15 bp, Homo sapiens
ttatgtatgtggaac

SEQ ID NO: 18915 - DNA, 15 bp, Homo sapiens
attatgtatgtggaa

SEQ ID NO: 18916 - DNA, 15 bp, Homo sapiens
cattatgtatgtgga

SEQ ID NO: 18917 - DNA, 15 bp, Homo sapiens
gcattatgtatgtgg

SEQ ID NO: 18918 - DNA, 15 bp, Homo sapiens
agcattatgtatgtg

SEQ ID NO: 18919 - DNA, 15 bp, Homo sapiens
aagcattatgtatgt

SEQ ID NO: 18920 - DNA, 15 bp, Homo sapiens
aaagcattatgtatg

SEQ ID NO: 18921 - DNA, 15 bp, Homo sapiens
aaaagcattatgtat

SEQ ID NO: 18922 - DNA, 15 bp, Homo sapiens
taaaagcattatgta

SEQ ID NO: 18923 - DNA, 15 bp, Homo sapiens
ctaaaagcattatgt

SEQ ID NO: 18924 - DNA, 15 bp, Homo sapiens
actaaaagcattatg

SEQ ID NO: 18925 - DNA, 15 bp, Homo sapiens
cactaaaagcattat

SEQ ID NO: 18926 - DNA, 15 bp, Homo sapiens
acactaaaagcatta

SEQ ID NO: 18927 - DNA, 15 bp, Homo sapiens
gacactaaaagcatt

SEQ ID NO: 18928 - DNA, 15 bp, Homo sapiens
tgacactaaaagcat

SEQ ID NO: 18929 - DNA, 15 bp, Homo sapiens
atgacactaaaagca

SEQ ID NO: 18930 - DNA, 15 bp, Homo sapiens
tatgacactaaaagc

SEQ ID NO: 18931 - DNA, 15 bp, Homo sapiens
ttatgacactaaaag

SEQ ID NO: 18932 - DNA, 15 bp, Homo sapiens
attatgacactaaaa

SEQ ID NO: 18933 - DNA, 15 bp, Homo sapiens
tattatgacactaaa

SEQ ID NO: 18934 - DNA, 15 bp, Homo sapiens
gtattatgacactaa

SEQ ID NO: 18935 - DNA, 15 bp, Homo sapiens
agtattatgacacta

SEQ ID NO: 18936 - DNA, 15 bp, Homo sapiens
aagtattatgacact

SEQ ID NO: 18937 - DNA, 15 bp, Homo sapiens
taagtattatgacac

SEQ ID NO: 18938 - DNA, 15 bp, Homo sapiens
gtaagtattatgaca

SEQ ID NO: 18939 - DNA, 15 bp, Homo sapiens
agtaagtattatgac

SEQ ID NO: 18940 - DNA, 15 bp, Homo sapiens
tagtaagtattatga

SEQ ID NO: 18941 - DNA, 15 bp, Homo sapiens
gtagtaagtattatg

SEQ ID NO: 18942 - DNA, 15 bp, Homo sapiens
agtagtaagtattat

SEQ ID NO: 18943 - DNA, 15 bp, Homo sapiens
cagtagtaagtatta

SEQ ID NO: 18944 - DNA, 15 bp, Homo sapiens
ccagtagtaagtatt

SEQ ID NO: 18945 - DNA, 15 bp, Homo sapiens
accagtagtaagtat

SEQ ID NO: 18946 - DNA, 15 bp, Homo sapiens
gaccagtagtaagta

SEQ ID NO: 18947 - DNA, 15 bp, Homo sapiens
agaccagtagtaagt

SEQ ID NO: 18948 - DNA, 15 bp, Homo sapiens
tagaccagtagtaag

SEQ ID NO: 18949 - DNA, 15 bp, Homo sapiens
atagaccagtagtaa

SEQ ID NO: 18950 - DNA, 15 bp, Homo sapiens
tatagaccagtagta

SEQ ID NO: 18951 - DNA, 15 bp, Homo sapiens
atatagaccagtagt

SEQ ID NO: 18952 - DNA, 15 bp, Homo sapiens
aatatagaccagtag

SEQ ID NO: 18953 - DNA, 15 bp, Homo sapiens
aaatatagaccagta

SEQ ID NO: 18954 - DNA, 15 bp, Homo sapiens
taaatatagaccagt

SEQ ID NO: 18955 - DNA, 15 bp, Homo sapiens
gtaaatatagaccag

SEQ ID NO: 18956 - DNA, 15 bp, Homo sapiens
ggtaaatatagacca

SEQ ID NO: 18957 - DNA, 15 bp, Homo sapiens
tggtaaatatagacc

SEQ ID NO: 18958 - DNA, 15 bp, Homo sapiens
ttggtaaatatagac

SEQ ID NO: 18959 - DNA, 15 bp, Homo sapiens
gttggtaaatataga

SEQ ID NO: 18960 - DNA, 15 bp, Homo sapiens
tgttggtaaatatag

SEQ ID NO: 18961 - DNA, 15 bp, Homo sapiens
atgttggtaaatata

SEQ ID NO: 18962 - DNA, 15 bp, Homo sapiens
aatgttggtaaatat

SEQ ID NO: 18963 - DNA, 15 bp, Homo sapiens
aaatgttggtaaata

SEQ ID NO: 18964 - DNA, 15 bp, Homo sapiens
taaatgttggtaaat

SEQ ID NO: 18965 - DNA, 15 bp, Homo sapiens
ataaatgttggtaaa

SEQ ID NO: 18966 - DNA, 15 bp, Homo sapiens
gataaatgttggtaa

SEQ ID NO: 18967 - DNA, 15 bp, Homo sapiens
tgataaatgttggta

SEQ ID NO: 18968 - DNA, 15 bp, Homo sapiens
gtgataaatgttggt

SEQ ID NO: 18969 - DNA, 15 bp, Homo sapiens
tgtgataaatgttgg

SEQ ID NO: 18970 - DNA, 15 bp, Homo sapiens
atgtgataaatgttg

SEQ ID NO: 18971 - DNA, 15 bp, Homo sapiens
aatgtgataaatgtt

SEQ ID NO: 18972 - DNA, 15 bp, Homo sapiens
aaatgtgataaatgt

SEQ ID NO: 18973 - DNA, 15 bp, Homo sapiens
aaaatgtgataaatg

SEQ ID NO: 18974 - DNA, 15 bp, Homo sapiens
taaaatgtgataaat

SEQ ID NO: 18975 - DNA, 15 bp, Homo sapiens
gtaaaatgtgataaa

SEQ ID NO: 18976 - DNA, 15 bp, Homo sapiens
tgtaaaatgtgataa

SEQ ID NO: 18977 - DNA, 15 bp, Homo sapiens
ttgtaaaatgtgata

SEQ ID NO: 18978 - DNA, 15 bp, Homo sapiens
tttgtaaaatgtgat

SEQ ID NO: 18979 - DNA, 15 bp, Homo sapiens
ttttgtaaaatgtga

SEQ ID NO: 18980 - DNA, 15 bp, Homo sapiens
attttgtaaaatgtg

SEQ ID NO: 18981 - DNA, 15 bp, Homo sapiens
cattttgtaaaatgt

SEQ ID NO: 18982 - DNA, 15 bp, Homo sapiens
tcattttgtaaaatg

SEQ ID NO: 18983 - DNA, 15 bp, Homo sapiens
ttcattttgtaaaat

SEQ ID NO: 18984 - DNA, 15 bp, Homo sapiens
cttcattttgtaaaa

SEQ ID NO: 18985 - DNA, 15 bp, Homo sapiens
acttcattttgtaaa

SEQ ID NO: 18986 - DNA, 15 bp, Homo sapiens
tacttcattttgtaa

SEQ ID NO: 18987 - DNA, 15 bp, Homo sapiens
ctacttcattttgta

SEQ ID NO: 18988 - DNA, 15 bp, Homo sapiens
tctacttcattttgt

SEQ ID NO: 18989 - DNA, 15 bp, Homo sapiens
ttctacttcattttg

SEQ ID NO: 18990 - DNA, 15 bp, Homo sapiens
cttctacttcatttt

SEQ ID NO: 18991 - DNA, 15 bp, Homo sapiens
tcttctacttcattt

SEQ ID NO: 18992 - DNA, 15 bp, Homo sapiens
ttcttctacttcatt

SEQ ID NO: 18993 - DNA, 15 bp, Homo sapiens
tttcttctacttcat

SEQ ID NO: 18994 - DNA, 15 bp, Homo sapiens
ttttcttctacttca

SEQ ID NO: 18995 - DNA, 15 bp, Homo sapiens
tttttcttctacttc

SEQ ID NO: 18996 - DNA, 15 bp, Homo sapiens
ttttttcttctactt

SEQ ID NO: 18997 - DNA, 15 bp, Homo sapiens
tttttttcttctact

SEQ ID NO: 18998 - DNA, 15 bp, Homo sapiens
ttttttttcttctac

SEQ ID NO: 18999 - DNA, 15 bp, Homo sapiens
cttttttttcttcta

SEQ ID NO: 19000 - DNA, 15 bp, Homo sapiens
tcttttttttcttct

SEQ ID NO: 19001 - DNA, 15 bp, Homo sapiens
gtcttttttttcttc

SEQ ID NO: 19002 - DNA, 15 bp, Homo sapiens
tgtcttttttttctt

SEQ ID NO: 19003 - DNA, 15 bp, Homo sapiens
ttgtcttttttttct

SEQ ID NO: 19004 - DNA, 15 bp, Homo sapiens
gttgtcttttttttc

SEQ ID NO: 19005 - DNA, 15 bp, Homo sapiens
cgttgtctttttttt

SEQ ID NO: 19006 - DNA, 15 bp, Homo sapiens
tcgttgtcttttttt

SEQ ID NO: 19007 - DNA, 15 bp, Homo sapiens
gtcgttgtctttttt

SEQ ID NO: 19008 - DNA, 15 bp, Homo sapiens
agtcgttgtcttttt

SEQ ID NO: 19009 - DNA, 15 bp, Homo sapiens
aagtcgttgtctttt

SEQ ID NO: 19010 - DNA, 15 bp, Homo sapiens
aaagtcgttgtcttt

SEQ ID NO: 19011 - DNA, 15 bp, Homo sapiens
taaagtcgttgtctt

SEQ ID NO: 19012 - DNA, 15 bp, Homo sapiens
ataaagtcgttgtct

SEQ ID NO: 19013 - DNA, 15 bp, Homo sapiens
cataaagtcgttgtc

SEQ ID NO: 19014 - DNA, 15 bp, Homo sapiens
ccataaagtcgttgt

SEQ ID NO: 19015 - DNA, 15 bp, Homo sapiens
gccataaagtcgttg

SEQ ID NO: 19016 - DNA, 15 bp, Homo sapiens
ggccataaagtcgtt

SEQ ID NO: 19017 - DNA, 15 bp, Homo sapiens
gggccataaagtcgt

SEQ ID NO: 19018 - DNA, 15 bp, Homo sapiens
agggccataaagtcg

SEQ ID NO: 19019 - DNA, 15 bp, Homo sapiens
cagggccataaagtc

SEQ ID NO: 19020 - DNA, 15 bp, Homo sapiens
ccagggccataaagt

SEQ ID NO: 19021 - DNA, 15 bp, Homo sapiens
tccagggccataaag

SEQ ID NO: 19022 - DNA, 15 bp, Homo sapiens
ttccagggccataaa

SEQ ID NO: 19023 - DNA, 15 bp, Homo sapiens
attccagggccataa

SEQ ID NO: 19024 - DNA, 15 bp, Homo sapiens
aattccagggccata

SEQ ID NO: 19025 - DNA, 15 bp, Homo sapiens
gaattccagggccat

SEQ ID NO: 19026 - DNA, 15 bp, Homo sapiens
ggaattccagggcca

SEQ ID NO: 19027 - DNA, 15 bp, Homo sapiens
tggaattccagggcc

SEQ ID NO: 19028 - DNA, 15 bp, Homo sapiens
ctggaattccagggc

SEQ ID NO: 19029 - DNA, 15 bp, Homo sapiens
actggaattccaggg

SEQ ID NO: 19030 - DNA, 15 bp, Homo sapiens
tactggaattccagg

SEQ ID NO: 19031 - DNA, 15 bp, Homo sapiens
ttactggaattccag

SEQ ID NO: 19032 - DNA, 15 bp, Homo sapiens
attactggaattcca

SEQ ID NO: 19033 - DNA, 15 bp, Homo sapiens
cattactggaattcc

SEQ ID NO: 19034 - DNA, 15 bp, Homo sapiens
ccattactggaattc

SEQ ID NO: 19035 - DNA, 15 bp, Homo sapiens
accattactggaatt

SEQ ID NO: 19036 - DNA, 15 bp, Homo sapiens
caccattactggaat

SEQ ID NO: 19037 - DNA, 15 bp, Homo sapiens
tcaccattactggaa

SEQ ID NO: 19038 - DNA, 15 bp, Homo sapiens
gtcaccattactgga

SEQ ID NO: 19039 - DNA, 15 bp, Homo sapiens
ggtcaccattactgg

SEQ ID NO: 19040 - DNA, 15 bp, Homo sapiens
tggtcaccattactg

SEQ ID NO: 19041 - DNA, 15 bp, Homo sapiens
ttggtcaccattact

SEQ ID NO: 19042 - DNA, 15 bp, Homo sapiens
gttggtcaccattac

SEQ ID NO: 19043 - DNA, 15 bp, Homo sapiens
tgttggtcaccatta

SEQ ID NO: 19044 - DNA, 15 bp, Homo sapiens
atgttggtcaccatt

SEQ ID NO: 19045 - DNA, 15 bp, Homo sapiens
catgttggtcaccat

SEQ ID NO: 19046 - DNA, 15 bp, Homo sapiens
acatgttggtcacca

SEQ ID NO: 19047 - DNA, 15 bp, Homo sapiens
aacatgttggtcacc

SEQ ID NO: 19048 - DNA, 15 bp, Homo sapiens
aaacatgttggtcac

SEQ ID NO: 19049 - DNA, 15 bp, Homo sapiens
aaaacatgttggtca

SEQ ID NO: 19050 - DNA, 15 bp, Homo sapiens
taaaacatgttggtc

SEQ ID NO: 19051 - DNA, 15 bp, Homo sapiens
ttaaaacatgttggt

SEQ ID NO: 19052 - DNA, 15 bp, Homo sapiens
tttaaaacatgttgg

SEQ ID NO: 19053 - DNA, 15 bp, Homo sapiens
atttaaaacatgttg

SEQ ID NO: 19054 - DNA, 15 bp, Homo sapiens
aatttaaaacatgtt

SEQ ID NO: 19055 - DNA, 15 bp, Homo sapiens
gaatttaaaacatgt

SEQ ID NO: 19056 - DNA, 15 bp, Homo sapiens
ggaatttaaaacatg

SEQ ID NO: 19057 - DNA, 15 bp, Homo sapiens
tggaatttaaaacat

SEQ ID NO: 19058 - DNA, 15 bp, Homo sapiens
ctggaatttaaaaca

SEQ ID NO: 19059 - DNA, 15 bp, Homo sapiens
actggaatttaaaac

SEQ ID NO: 19060 - DNA, 15 bp, Homo sapiens
tactggaatttaaaa

SEQ ID NO: 19061 - DNA, 15 bp, Homo sapiens
ttactggaatttaaa

SEQ ID NO: 19062 - DNA, 15 bp, Homo sapiens
tttactggaatttaa

SEQ ID NO: 19063 - DNA, 15 bp, Homo sapiens
ctttactggaattta

SEQ ID NO: 19064 - DNA, 15 bp, Homo sapiens
cctttactggaattt

SEQ ID NO: 19065 - DNA, 15 bp, Homo sapiens
acctttactggaatt

SEQ ID NO: 19066 - DNA, 15 bp, Homo sapiens
aacctttactggaat

SEQ ID NO: 19067 - DNA, 15 bp, Homo sapiens
taacctttactggaa

SEQ ID NO: 19068 - DNA, 15 bp, Homo sapiens
ataacctttactgga

SEQ ID NO: 19069 - DNA, 15 bp, Homo sapiens
cataacctttactgg

SEQ ID NO: 19070 - DNA, 15 bp, Homo sapiens
ccataacctttactg

SEQ ID NO: 19071 - DNA, 15 bp, Homo sapiens
accataacctttact

SEQ ID NO: 19072 - DNA, 15 bp, Homo sapiens
aaccataacctttac

SEQ ID NO: 19073 - DNA, 15 bp, Homo sapiens
taaccataaccttta

SEQ ID NO: 19074 - DNA, 15 bp, Homo sapiens
gtaaccataaccttt

SEQ ID NO: 19075 - DNA, 15 bp, Homo sapiens
tgtaaccataacctt

SEQ ID NO: 19076 - DNA, 15 bp, Homo sapiens
atgtaaccataacct

SEQ ID NO: 19077 - DNA, 15 bp, Homo sapiens
aatgtaaccataacc

SEQ ID NO: 19078 - DNA, 15 bp, Homo sapiens
aaatgtaaccataac

SEQ ID NO: 19079 - DNA, 15 bp, Homo sapiens
gaaatgtaaccataa

SEQ ID NO: 19080 - DNA, 15 bp, Homo sapiens
tgaaatgtaaccata

SEQ ID NO: 19081 - DNA, 15 bp, Homo sapiens
ttgaaatgtaaccat

SEQ ID NO: 19082 - DNA, 15 bp, Homo sapiens
gttgaaatgtaacca

SEQ ID NO: 19083 - DNA, 15 bp, Homo sapiens
tgttgaaatgtaacc

SEQ ID NO: 19084 - DNA, 15 bp, Homo sapiens
ttgttgaaatgtaac

SEQ ID NO: 19085 - DNA, 15 bp, Homo sapiens
cttgttgaaatgtaa

SEQ ID NO: 19086 - DNA, 15 bp, Homo sapiens
acttgttgaaatgta

SEQ ID NO: 19087 - DNA, 15 bp, Homo sapiens
cacttgttgaaatgt

SEQ ID NO: 19088 - DNA, 15 bp, Homo sapiens
acacttgttgaaatg

SEQ ID NO: 19089 - DNA, 15 bp, Homo sapiens
gacacttgttgaaat

SEQ ID NO: 19090 - DNA, 15 bp, Homo sapiens
agacacttgttgaaa

SEQ ID NO: 19091 - DNA, 15 bp, Homo sapiens
gagacacttgttgaa

SEQ ID NO: 19092 - DNA, 15 bp, Homo sapiens
agagacacttgttga

SEQ ID NO: 19093 - DNA, 15 bp, Homo sapiens
aagagacacttgttg

SEQ ID NO: 19094 - DNA, 15 bp, Homo sapiens
aaagagacacttgtt

SEQ ID NO: 19095 - DNA, 15 bp, Homo sapiens
gaaagagacacttgt

SEQ ID NO: 19096 - DNA, 15 bp, Homo sapiens
ggaaagagacacttg

SEQ ID NO: 19097 - DNA, 15 bp, Homo sapiens
aggaaagagacactt

SEQ ID NO: 19098 - DNA, 15 bp, Homo sapiens
aaggaaagagacact

SEQ ID NO: 19099 - DNA, 15 bp, Homo sapiens
aaaggaaagagacac

SEQ ID NO: 19100 - DNA, 15 bp, Homo sapiens
aaaaggaaagagaca

SEQ ID NO: 19101 - DNA, 15 bp, Homo sapiens
aaaaaggaaagagac

SEQ ID NO: 19102 - DNA, 15 bp, Homo sapiens
aaaaaaggaaagaga

SEQ ID NO: 19103 - DNA, 15 bp, Homo sapiens
aaaaaaaggaaagag

SEQ ID NO: 19104 - DNA, 15 bp, Homo sapiens
taaaaaaaaggaaag

SEQ ID NO: 19105 - DNA, 15 bp, Homo sapiens
gtaaaaaaaaggaaa

SEQ ID NO: 19106 - DNA, 15 bp, Homo sapiens
ggtaaaaaaaaggaa

SEQ ID NO: 19107 - DNA, 15 bp, Homo sapiens
aggtaaaaaaaagga

SEQ ID NO: 19108 - DNA, 15 bp, Homo sapiens
gaggtaaaaaaaagg

SEQ ID NO: 19109 - DNA, 15 bp, Homo sapiens
agaggtaaaaaaaag

SEQ ID NO: 19110 - DNA, 15 bp, Homo sapiens
gagaggtaaaaaaaa

SEQ ID NO: 19111 - DNA, 15 bp, Homo sapiens
ggagaggtaaaaaaa

SEQ ID NO: 19112 - DNA, 15 bp, Homo sapiens
aggagaggtaaaaaa

SEQ ID NO: 19113 - DNA, 15 bp, Homo sapiens
caggagaggtaaaaa

SEQ ID NO: 19114 - DNA, 15 bp, Homo sapiens
gcaggagaggtaaaa

SEQ ID NO: 19115 - DNA, 15 bp, Homo sapiens
agcaggagaggtaaa

SEQ ID NO: 19116 - DNA, 15 bp, Homo sapiens
tagcaggagaggtaa

SEQ ID NO: 19117 - DNA, 15 bp, Homo sapiens
ttagcaggagaggta

SEQ ID NO: 19118 - DNA, 15 bp, Homo sapiens
gttagcaggagaggt

SEQ ID NO: 19119 - DNA, 15 bp, Homo sapiens
ggttagcaggagagg

SEQ ID NO: 19120 - DNA, 15 bp, Homo sapiens
gggttagcaggagag

SEQ ID NO: 19121 - DNA, 15 bp, Homo sapiens
tgggttagcaggaga

SEQ ID NO: 19122 - DNA, 15 bp, Homo sapiens
ctgggttagcaggag

SEQ ID NO: 19123 - DNA, 15 bp, Homo sapiens
tctgggttagcagga

SEQ ID NO: 19124 - DNA, 15 bp, Homo sapiens
ctctgggttagcagg

SEQ ID NO: 19125 - DNA, 15 bp, Homo sapiens
cctctgggttagcag

SEQ ID NO: 19126 - DNA, 15 bp, Homo sapiens
acctctgggttagca

SEQ ID NO: 19127 - DNA, 15 bp, Homo sapiens
tacctctgggttagc

SEQ ID NO: 19128 - DNA, 15 bp, Homo sapiens
ttacctctgggttag

SEQ ID NO: 19129 - DNA, 15 bp, Homo sapiens
tttacctctgggtta

SEQ ID NO: 19130 - DNA, 15 bp, Homo sapiens
atttacctctgggtt

SEQ ID NO: 19131 - DNA, 15 bp, Homo sapiens
aatttacctctgggt

SEQ ID NO: 19132 - DNA, 15 bp, Homo sapiens
aaatttacctctggg

SEQ ID NO: 19133 - DNA, 15 bp, Homo sapiens
gaaatttacctctgg

SEQ ID NO: 19134 - DNA, 15 bp, Homo sapiens
ggaaatttacctctg

SEQ ID NO: 19135 - DNA, 15 bp, Homo sapiens
gggaaatttacctct

SEQ ID NO: 19136 - DNA, 15 bp, Homo sapiens
tgggaaatttacctc

SEQ ID NO: 19137 - DNA, 15 bp, Homo sapiens
ttgggaaatttacct

SEQ ID NO: 19138 - DNA, 15 bp, Homo sapiens
tttgggaaatttacc

SEQ ID NO: 19139 - DNA, 15 bp, Homo sapiens
ttttgggaaatttac

SEQ ID NO: 19140 - DNA, 15 bp, Homo sapiens
tttttgggaaattta

SEQ ID NO: 19141 - DNA, 15 bp, Homo sapiens
ttttttgggaaattt

SEQ ID NO: 19142 - DNA, 15 bp, Homo sapiens
tttttttgggaaatt

SEQ ID NO: 19143 - DNA, 15 bp, Homo sapiens
ttttttttgggaaat

SEQ ID NO: 19144 - DNA, 15 bp, Homo sapiens
tttttttttgggaaa

SEQ ID NO: 19145 - DNA, 15 bp, Homo sapiens
ttttttttttgggaa

SEQ ID NO: 19146 - DNA, 15 bp, Homo sapiens
tttttttttttggga

SEQ ID NO: 19147 - DNA, 15 bp, Homo sapiens
ttttttttttttggg

SEQ ID NO: 19148 - DNA, 15 bp, Homo sapiens
taagacttttttttt

SEQ ID NO: 19149 - DNA, 15 bp, Homo sapiens
ttaagactttttttt

SEQ ID NO: 19150 - DNA, 15 bp, Homo sapiens
cttaagacttttttt

SEQ ID NO: 19151 - DNA, 15 bp, Homo sapiens
gcttaagactttttt

SEQ ID NO: 19152 - DNA, 15 bp, Homo sapiens
tgcttaagacttttt

SEQ ID NO: 19153 - DNA, 15 bp, Homo sapiens
ttgcttaagactttt

SEQ ID NO: 19154 - DNA, 15 bp, Homo sapiens
cttgcttaagacttt

SEQ ID NO: 19155 - DNA, 15 bp, Homo sapiens
ccttgcttaagactt

SEQ ID NO: 19156 - DNA, 15 bp, Homo sapiens
gccttgcttaagact

SEQ ID NO: 19157 - DNA, 15 bp, Homo sapiens
tgccttgcttaagac

SEQ ID NO: 19158 - DNA, 15 bp, Homo sapiens
atgccttgcttaaga

SEQ ID NO: 19159 - DNA, 15 bp, Homo sapiens
aatgccttgcttaag

SEQ ID NO: 19160 - DNA, 15 bp, Homo sapiens
aaatgccttgcttaa

SEQ ID NO: 19161 - DNA, 15 bp, Homo sapiens
caaatgccttgctta

SEQ ID NO: 19162 - DNA, 15 bp, Homo sapiens
gcaaatgccttgctt

SEQ ID NO: 19163 - DNA, 15 bp, Homo sapiens
tgcaaatgccttgct

SEQ ID NO: 19164 - DNA, 15 bp, Homo sapiens
ttgcaaatgccttgc

SEQ ID NO: 19165 - DNA, 15 bp, Homo sapiens
tttgcaaatgccttg

SEQ ID NO: 19166 - DNA, 15 bp, Homo sapiens
ttttgcaaatgcctt

SEQ ID NO: 19167 - DNA, 15 bp, Homo sapiens
attttgcaaatgcct

SEQ ID NO: 19168 - DNA, 15 bp, Homo sapiens
gattttgcaaatgcc

SEQ ID NO: 19169 - DNA, 15 bp, Homo sapiens
tgattttgcaaatgc

SEQ ID NO: 19170 - DNA, 15 bp, Homo sapiens
ctgattttgcaaatg

SEQ ID NO: 19171 - DNA, 15 bp, Homo sapiens
tctgattttgcaaat

SEQ ID NO: 19172 - DNA, 15 bp, Homo sapiens
ttctgattttgcaaa

SEQ ID NO: 19173 - DNA, 15 bp, Homo sapiens
tttctgattttgcaa

SEQ ID NO: 19174 - DNA, 15 bp, Homo sapiens
ttttctgattttgca

SEQ ID NO: 19175 - DNA, 15 bp, Homo sapiens
gttttctgattttgc

SEQ ID NO: 19176 - DNA, 15 bp, Homo sapiens
tgttttctgattttg

SEQ ID NO: 19177 - DNA, 15 bp, Homo sapiens
ctgttttctgatttt

SEQ ID NO: 19178 - DNA, 15 bp, Homo sapiens
cctgttttctgattt

SEQ ID NO: 19179 - DNA, 15 bp, Homo sapiens
tcctgttttctgatt

SEQ ID NO: 19180 - DNA, 15 bp, Homo sapiens
ttcctgttttctgat

SEQ ID NO: 19181 - DNA, 15 bp, Homo sapiens
gttcctgttttctga

SEQ ID NO: 19182 - DNA, 15 bp, Homo sapiens
tgttcctgttttctg

SEQ ID NO: 19183 - DNA, 15 bp, Homo sapiens
ctgttcctgttttct

SEQ ID NO: 19184 - DNA, 15 bp, Homo sapiens
cctgttcctgttttc

SEQ ID NO: 19185 - DNA, 15 bp, Homo sapiens
tcctgttcctgtttt

SEQ ID NO: 19186 - DNA, 15 bp, Homo sapiens
ctcctgttcctgttt

SEQ ID NO: 19187 - DNA, 15 bp, Homo sapiens
actcctgttcctgtt

SEQ ID NO: 19188 - DNA, 15 bp, Homo sapiens
aactcctgttcctgt

SEQ ID NO: 19189 - DNA, 15 bp, Homo sapiens
aaactcctgttcctg

SEQ ID NO: 19190 - DNA, 15 bp, Homo sapiens
taaactcctgttcct

SEQ ID NO: 19191 - DNA, 15 bp, Homo sapiens
ctaaactcctgttcc

SEQ ID NO: 19192 - DNA, 15 bp, Homo sapiens
actaaactcctgttc

SEQ ID NO: 19193 - DNA, 15 bp, Homo sapiens
cactaaactcctgtt

SEQ ID NO: 19194 - DNA, 15 bp, Homo sapiens
tcactaaactcctgt

SEQ ID NO: 19195 - DNA, 15 bp, Homo sapiens
atcactaaactcctg

SEQ ID NO: 19196 - DNA, 15 bp, Homo sapiens
aatcactaaactcct

SEQ ID NO: 19197 - DNA, 15 bp, Homo sapiens
caatcactaaactcc

SEQ ID NO: 19198 - DNA, 15 bp, Homo sapiens
acaatcactaaactc

SEQ ID NO: 19199 - DNA, 15 bp, Homo sapiens
aacaatcactaaact

SEQ ID NO: 19200 - DNA, 15 bp, Homo sapiens
aaacaatcactaaac

SEQ ID NO: 19201 - DNA, 15 bp, Homo sapiens
aaaacaatcactaaa

SEQ ID NO: 19202 - DNA, 15 bp, Homo sapiens
aaaaacaatcactaa

SEQ ID NO: 19203 - DNA, 15 bp, Homo sapiens
taaaaacaatcacta

SEQ ID NO: 19204 - DNA, 15 bp, Homo sapiens
ttaaaaacaatcact

SEQ ID NO: 19205 - DNA, 15 bp, Homo sapiens
tttaaaaacaatcac

SEQ ID NO: 19206 - DNA, 15 bp, Homo sapiens
ttttaaaaacaatca

SEQ ID NO: 19207 - DNA, 15 bp, Homo sapiens
cttttaaaaacaatc

SEQ ID NO: 19208 - DNA, 15 bp, Homo sapiens
ccttttaaaaacaat

SEQ ID NO: 19209 - DNA, 15 bp, Homo sapiens
accttttaaaaacaa

SEQ ID NO: 19210 - DNA, 15 bp, Homo sapiens
caccttttaaaaaca

SEQ ID NO: 19211 - DNA, 15 bp, Homo sapiens
gcaccttttaaaaac

SEQ ID NO: 19212 - DNA, 15 bp, Homo sapiens
agcaccttttaaaaa

SEQ ID NO: 19213 - DNA, 15 bp, Homo sapiens
cagcaccttttaaaa

SEQ ID NO: 19214 - DNA, 15 bp, Homo sapiens
acagcaccttttaaa

SEQ ID NO: 19215 - DNA, 15 bp, Homo sapiens
aacagcaccttttaa

SEQ ID NO: 19216 - DNA, 15 bp, Homo sapiens
gaacagcacctttta

SEQ ID NO: 19217 - DNA, 15 bp, Homo sapiens
ggaacagcacctttt

SEQ ID NO: 19218 - DNA, 15 bp, Homo sapiens
gggaacagcaccttt

SEQ ID NO: 19219 - DNA, 15 bp, Homo sapiens
tgggaacagcacctt

SEQ ID NO: 19220 - DNA, 15 bp, Homo sapiens
ctgggaacagcacct

SEQ ID NO: 19221 - DNA, 15 bp, Homo sapiens
cctgggaacagcacc

SEQ ID NO: 19222 - DNA, 15 bp, Homo sapiens
ccctgggaacagcac

SEQ ID NO: 19223 - DNA, 15 bp, Homo sapiens
accctgggaacagca

SEQ ID NO: 19224 - DNA, 15 bp, Homo sapiens
gaccctgggaacagc

SEQ ID NO: 19225 - DNA, 15 bp, Homo sapiens
tgaccctgggaacag

SEQ ID NO: 19226 - DNA, 15 bp, Homo sapiens
ttgaccctgggaaca

SEQ ID NO: 19227 - DNA, 15 bp, Homo sapiens
tttgaccctgggaac

SEQ ID NO: 19228 - DNA, 15 bp, Homo sapiens
ttttgaccctgggaa

SEQ ID NO: 19229 - DNA, 15 bp, Homo sapiens
gttttgaccctggga

SEQ ID NO: 19230 - DNA, 15 bp, Homo sapiens
agttttgaccctggg

SEQ ID NO: 19231 - DNA, 15 bp, Homo sapiens
aagttttgaccctgg

SEQ ID NO: 19232 - DNA, 15 bp, Homo sapiens
aaagttttgaccctg

SEQ ID NO: 19233 - DNA, 15 bp, Homo sapiens
caaagttttgaccct

SEQ ID NO: 19234 - DNA, 15 bp, Homo sapiens
acaaagttttgaccc

SEQ ID NO: 19235 - DNA, 15 bp, Homo sapiens
cacaaagttttgacc

SEQ ID NO: 19236 - DNA, 15 bp, Homo sapiens
ccacaaagttttgac

SEQ ID NO: 19237 - DNA, 15 bp, Homo sapiens
accacaaagttttga

SEQ ID NO: 19238 - DNA, 15 bp, Homo sapiens
caccacaaagttttg

SEQ ID NO: 19239 - DNA, 15 bp, Homo sapiens
acaccacaaagtttt

SEQ ID NO: 19240 - DNA, 15 bp, Homo sapiens
tacaccacaaagttt

SEQ ID NO: 19241 - DNA, 15 bp, Homo sapiens
ttacaccacaaagtt

SEQ ID NO: 19242 - DNA, 15 bp, Homo sapiens
attacaccacaaagt

SEQ ID NO: 19243 - DNA, 15 bp, Homo sapiens
aattacaccacaaag

SEQ ID NO: 19244 - DNA, 15 bp, Homo sapiens
aaattacaccacaaa

SEQ ID NO: 19245 - DNA, 15 bp, Homo sapiens
gaaattacaccacaa

SEQ ID NO: 19246 - DNA, 15 bp, Homo sapiens
tgaaattacaccaca

SEQ ID NO: 19247 - DNA, 15 bp, Homo sapiens
ttgaaattacaccac

SEQ ID NO: 19248 - DNA, 15 bp, Homo sapiens
gttgaaattacacca

SEQ ID NO: 19249 - DNA, 15 bp, Homo sapiens
tgttgaaattacacc

SEQ ID NO: 19250 - DNA, 15 bp, Homo sapiens
atgttgaaattacac

SEQ ID NO: 19251 - DNA, 15 bp, Homo sapiens
catgttgaaattaca

SEQ ID NO: 19252 - DNA, 15 bp, Homo sapiens
gcatgttgaaattac

SEQ ID NO: 19253 - DNA, 15 bp, Homo sapiens
agcatgttgaaatta

SEQ ID NO: 19254 - DNA, 15 bp, Homo sapiens
tagcatgttgaaatt

SEQ ID NO: 19255 - DNA, 15 bp, Homo sapiens
atagcatgttgaaat

SEQ ID NO: 19256 - DNA, 15 bp, Homo sapiens
catagcatgttgaaa

SEQ ID NO: 19257 - DNA, 15 bp, Homo sapiens
acatagcatgttgaa

SEQ ID NO: 19258 - DNA, 15 bp, Homo sapiens
aacatagcatgttga

SEQ ID NO: 19259 - DNA, 15 bp, Homo sapiens
taacatagcatgttg

SEQ ID NO: 19260 - DNA, 15 bp, Homo sapiens
gtaacatagcatgtt

SEQ ID NO: 19261 - DNA, 15 bp, Homo sapiens
ggtaacatagcatgt

SEQ ID NO: 19262 - DNA, 15 bp, Homo sapiens
aggtaacatagcatg

SEQ ID NO: 19263 - DNA, 15 bp, Homo sapiens
taggtaacatagcat

SEQ ID NO: 19264 - DNA, 15 bp, Homo sapiens
ataggtaacatagca

SEQ ID NO: 19265 - DNA, 15 bp, Homo sapiens
aataggtaacatagc

SEQ ID NO: 19266 - DNA, 15 bp, Homo sapiens
taataggtaacatag

SEQ ID NO: 19267 - DNA, 15 bp, Homo sapiens
ataataggtaacata

SEQ ID NO: 19268 - DNA, 15 bp, Homo sapiens
cataataggtaacat

SEQ ID NO: 19269 - DNA, 15 bp, Homo sapiens
acataataggtaaca

SEQ ID NO: 19270 - DNA, 15 bp, Homo sapiens
cacataataggtaac

SEQ ID NO: 19271 - DNA, 15 bp, Homo sapiens
acacataataggtaa

SEQ ID NO: 19272 - DNA, 15 bp, Homo sapiens
tacacataataggta

SEQ ID NO: 19273 - DNA, 15 bp, Homo sapiens
ttacacataataggt

SEQ ID NO: 19274 - DNA, 15 bp, Homo sapiens
attacacataatagg

SEQ ID NO: 19275 - DNA, 15 bp, Homo sapiens
cattacacataatag

SEQ ID NO: 19276 - DNA, 15 bp, Homo sapiens
gcattacacataata

SEQ ID NO: 19277 - DNA, 15 bp, Homo sapiens
ggcattacacataat

SEQ ID NO: 19278 - DNA, 15 bp, Homo sapiens
aggcattacacataa

SEQ ID NO: 19279 - DNA, 15 bp, Homo sapiens
aaggcattacacata

SEQ ID NO: 19280 - DNA, 15 bp, Homo sapiens
caaggcattacacat

SEQ ID NO: 19281 - DNA, 15 bp, Homo sapiens
tcaaggcattacaca

SEQ ID NO: 19282 - DNA, 15 bp, Homo sapiens
ttcaaggcattacac

SEQ ID NO: 19283 - DNA, 15 bp, Homo sapiens
tttcaaggcattaca

SEQ ID NO: 19284 - DNA, 15 bp, Homo sapiens
gtttcaaggcattac

SEQ ID NO: 19285 - DNA, 15 bp, Homo sapiens
cgtttcaaggcatta

SEQ ID NO: 19286 - DNA, 15 bp, Homo sapiens
gcgtttcaaggcatt

SEQ ID NO: 19287 - DNA, 15 bp, Homo sapiens
agcgtttcaaggcat

SEQ ID NO: 19288 - DNA, 15 bp, Homo sapiens
tagcgtttcaaggca

SEQ ID NO: 19289 - DNA, 15 bp, Homo sapiens
gtagcgtttcaaggc

SEQ ID NO: 19290 - DNA, 15 bp, Homo sapiens
tgtagcgtttcaagg

SEQ ID NO: 19291 - DNA, 15 bp, Homo sapiens
atgtagcgtttcaag

SEQ ID NO: 19292 - DNA, 15 bp, Homo sapiens
catgtagcgtttcaa

SEQ ID NO: 19293 - DNA, 15 bp, Homo sapiens
gcatgtagcgtttca

SEQ ID NO: 19294 - DNA, 15 bp, Homo sapiens
ggcatgtagcgtttc

SEQ ID NO: 19295 - DNA, 15 bp, Homo sapiens
tggcatgtagcgttt

SEQ ID NO: 19296 - DNA, 15 bp, Homo sapiens
atggcatgtagcgtt

SEQ ID NO: 19297 - DNA, 15 bp, Homo sapiens
tatggcatgtagcgt

SEQ ID NO: 19298 - DNA, 15 bp, Homo sapiens
ttatggcatgtagcg

SEQ ID NO: 19299 - DNA, 15 bp, Homo sapiens
gttatggcatgtagc

SEQ ID NO: 19300 - DNA, 15 bp, Homo sapiens
tgttatggcatgtag

SEQ ID NO: 19301 - DNA, 15 bp, Homo sapiens
atgttatggcatgta

SEQ ID NO: 19302 - DNA, 15 bp, Homo sapiens
gatgttatggcatgt

SEQ ID NO: 19303 - DNA, 15 bp, Homo sapiens
tgatgttatggcatg

SEQ ID NO: 19304 - DNA, 15 bp, Homo sapiens
ctgatgttatggcat

SEQ ID NO: 19305 - DNA, 15 bp, Homo sapiens
tctgatgttatggca

SEQ ID NO: 19306 - DNA, 15 bp, Homo sapiens
ttctgatgttatggc

SEQ ID NO: 19307 - DNA, 15 bp, Homo sapiens
tttctgatgttatgg

SEQ ID NO: 19308 - DNA, 15 bp, Homo sapiens
atttctgatgttatg

SEQ ID NO: 19309 - DNA, 15 bp, Homo sapiens
gatttctgatgttat

SEQ ID NO: 19310 - DNA, 15 bp, Homo sapiens
agatttctgatgtta

SEQ ID NO: 19311 - DNA, 15 bp, Homo sapiens
gagatttctgatgtt

SEQ ID NO: 19312 - DNA, 15 bp, Homo sapiens
ggagatttctgatgt

SEQ ID NO: 19313 - DNA, 15 bp, Homo sapiens
tggagatttctgatg

SEQ ID NO: 19314 - DNA, 15 bp, Homo sapiens
ttggagatttctgat

SEQ ID NO: 19315 - DNA, 15 bp, Homo sapiens
gttggagatttctga

SEQ ID NO: 19316 - DNA, 15 bp, Homo sapiens
ggttggagatttctg

SEQ ID NO: 19317 - DNA, 15 bp, Homo sapiens
aggttggagatttct

SEQ ID NO: 19318 - DNA, 15 bp, Homo sapiens
taggttggagatttc

SEQ ID NO: 19319 - DNA, 15 bp, Homo sapiens
ttaggttggagattt

SEQ ID NO: 19320 - DNA, 15 bp, Homo sapiens
tttaggttggagatt

SEQ ID NO: 19321 - DNA, 15 bp, Homo sapiens
ttttaggttggagat

SEQ ID NO: 19322 - DNA, 15 bp, Homo sapiens
tttttaggttggaga

SEQ ID NO: 19323 - DNA, 15 bp, Homo sapiens
atttttaggttggag

SEQ ID NO: 19324 - DNA, 15 bp, Homo sapiens
aatttttaggttgga

SEQ ID NO: 19325 - DNA, 15 bp, Homo sapiens
taatttttaggttgg

SEQ ID NO: 19326 - DNA, 15 bp, Homo sapiens
ataatttttaggttg

SEQ ID NO: 19327 - DNA, 15 bp, Homo sapiens
cataatttttaggtt

SEQ ID NO: 19328 - DNA, 15 bp, Homo sapiens
acataatttttaggt

SEQ ID NO: 19329 - DNA, 15 bp, Homo sapiens
aacataatttttagg

SEQ ID NO: 19330 - DNA, 15 bp, Homo sapiens
caacataatttttag

SEQ ID NO: 19331 - DNA, 15 bp, Homo sapiens
gcaacataattttta

SEQ ID NO: 19332 - DNA, 15 bp, Homo sapiens
tgcaacataattttt

SEQ ID NO: 19333 - DNA, 15 bp, Homo sapiens
atgcaacataatttt

SEQ ID NO: 19334 - DNA, 15 bp, Homo sapiens
catgcaacataattt

SEQ ID NO: 19335 - DNA, 15 bp, Homo sapiens
tcatgcaacataatt

SEQ ID NO: 19336 - DNA, 15 bp, Homo sapiens
ctcatgcaacataat

SEQ ID NO: 19337 - DNA, 15 bp, Homo sapiens
tctcatgcaacataa

SEQ ID NO: 19338 - DNA, 15 bp, Homo sapiens
atctcatgcaacata

SEQ ID NO: 19339 - DNA, 15 bp, Homo sapiens
tatctcatgcaacat

SEQ ID NO: 19340 - DNA, 15 bp, Homo sapiens
ttatctcatgcaaca

SEQ ID NO: 19341 - DNA, 15 bp, Homo sapiens
cttatctcatgcaac

SEQ ID NO: 19342 - DNA, 15 bp, Homo sapiens
gcttatctcatgcaa

SEQ ID NO: 19343 - DNA, 15 bp, Homo sapiens
tgcttatctcatgca

SEQ ID NO: 19344 - DNA, 15 bp, Homo sapiens
atgcttatctcatgc

SEQ ID NO: 19345 - DNA, 15 bp, Homo sapiens
aatgcttatctcatg

SEQ ID NO: 19346 - DNA, 15 bp, Homo sapiens
caatgcttatctcat

SEQ ID NO: 19347 - DNA, 15 bp, Homo sapiens
tcaatgcttatctca

SEQ ID NO: 19348 - DNA, 15 bp, Homo sapiens
ttcaatgcttatctc

SEQ ID NO: 19349 - DNA, 15 bp, Homo sapiens
cttcaatgcttatct

SEQ ID NO: 19350 - DNA, 15 bp, Homo sapiens
ccttcaatgcttatc

SEQ ID NO: 19351 - DNA, 15 bp, Homo sapiens
gccttcaatgcttat

SEQ ID NO: 19352 - DNA, 15 bp, Homo sapiens
tgccttcaatgctta

SEQ ID NO: 19353 - DNA, 15 bp, Homo sapiens
gtgccttcaatgctt

SEQ ID NO: 19354 - DNA, 15 bp, Homo sapiens
tgtgccttcaatgct

SEQ ID NO: 19355 - DNA, 15 bp, Homo sapiens
gtgtgccttcaatgc

SEQ ID NO: 19356 - DNA, 15 bp, Homo sapiens
tgtgtgccttcaatg

SEQ ID NO: 19357 - DNA, 15 bp, Homo sapiens
gtgtgtgccttcaat

SEQ ID NO: 19358 - DNA, 15 bp, Homo sapiens
cgtgtgtgccttcaa

SEQ ID NO: 19359 - DNA, 15 bp, Homo sapiens
acgtgtgtgccttca

SEQ ID NO: 19360 - DNA, 15 bp, Homo sapiens
aacgtgtgtgccttc

SEQ ID NO: 19361 - DNA, 15 bp, Homo sapiens
gaacgtgtgtgcctt

SEQ ID NO: 19362 - DNA, 15 bp, Homo sapiens
tgaacgtgtgtgcct

SEQ ID NO: 19363 - DNA, 15 bp, Homo sapiens
atgaacgtgtgtgcc

SEQ ID NO: 19364 - DNA, 15 bp, Homo sapiens
tatgaacgtgtgtgc

SEQ ID NO: 19365 - DNA, 15 bp, Homo sapiens
gtatgaacgtgtgtg

SEQ ID NO: 19366 - DNA, 15 bp, Homo sapiens
tgtatgaacgtgtgt

SEQ ID NO: 19367 - DNA, 15 bp, Homo sapiens
ttgtatgaacgtgtg

SEQ ID NO: 19368 - DNA, 15 bp, Homo sapiens
tttgtatgaacgtgt

SEQ ID NO: 19369 - DNA, 15 bp, Homo sapiens
atttgtatgaacgtg

SEQ ID NO: 19370 - DNA, 15 bp, Homo sapiens
aatttgtatgaacgt

SEQ ID NO: 19371 - DNA, 15 bp, Homo sapiens
taatttgtatgaacg

SEQ ID NO: 19372 - DNA, 15 bp, Homo sapiens
ttaatttgtatgaac

SEQ ID NO: 19373 - DNA, 15 bp, Homo sapiens
tttaatttgtatgaa

SEQ ID NO: 19374 - DNA, 15 bp, Homo sapiens
atttaatttgtatga

SEQ ID NO: 19375 - DNA, 15 bp, Homo sapiens
gatttaatttgtatg

SEQ ID NO: 19376 - DNA, 15 bp, Homo sapiens
agatttaatttgtat

SEQ ID NO: 19377 - DNA, 15 bp, Homo sapiens
cagatttaatttgta

SEQ ID NO: 19378 - DNA, 15 bp, Homo sapiens
acagatttaatttgt

SEQ ID NO: 19379 - DNA, 15 bp, Homo sapiens
tacagatttaatttg

SEQ ID NO: 19380 - DNA, 15 bp, Homo sapiens
ttacagatttaattt

SEQ ID NO: 19381 - DNA, 15 bp, Homo sapiens
attacagatttaatt

SEQ ID NO: 19382 - DNA, 15 bp, Homo sapiens
aattacagatttaat

SEQ ID NO: 19383 - DNA, 15 bp, Homo sapiens
taattacagatttaa

SEQ ID NO: 19384 - DNA, 15 bp, Homo sapiens
ataattacagattta

SEQ ID NO: 19385 - DNA, 15 bp, Homo sapiens
cataattacagattt

SEQ ID NO: 19386 - DNA, 15 bp, Homo sapiens
gcataattacagatt

SEQ ID NO: 19387 - DNA, 15 bp, Homo sapiens
ggcataattacagat

SEQ ID NO: 19388 - DNA, 15 bp, Homo sapiens
aggcataattacaga

SEQ ID NO: 19389 - DNA, 15 bp, Homo sapiens
gaggcataattacag

SEQ ID NO: 19390 - DNA, 15 bp, Homo sapiens
tgaggcataattaca

SEQ ID NO: 19391 - DNA, 15 bp, Homo sapiens
ttgaggcataattac

SEQ ID NO: 19392 - DNA, 15 bp, Homo sapiens
attgaggcataatta

SEQ ID NO: 19393 - DNA, 15 bp, Homo sapiens
tattgaggcataatt

SEQ ID NO: 19394 - DNA, 15 bp, Homo sapiens
ttattgaggcataat

SEQ ID NO: 19395 - DNA, 15 bp, Homo sapiens
cttattgaggcataa

SEQ ID NO: 19396 - DNA, 15 bp, Homo sapiens
acttattgaggcata

SEQ ID NO: 19397 - DNA, 15 bp, Homo sapiens
aacttattgaggcat

SEQ ID NO: 19398 - DNA, 15 bp, Homo sapiens
taacttattgaggca

SEQ ID NO: 19399 - DNA, 15 bp, Homo sapiens
ttaacttattgaggc

SEQ ID NO: 19400 - DNA, 15 bp, Homo sapiens
tttaacttattgagg

SEQ ID NO: 19401 - DNA, 15 bp, Homo sapiens
ttttaacttattgag

SEQ ID NO: 19402 - DNA, 15 bp, Homo sapiens
attttaacttattga

SEQ ID NO: 19403 - DNA, 15 bp, Homo sapiens
cattttaacttattg

SEQ ID NO: 19404 - DNA, 15 bp, Homo sapiens
acattttaacttatt

SEQ ID NO: 19405 - DNA, 15 bp, Homo sapiens
tacattttaacttat

SEQ ID NO: 19406 - DNA, 15 bp, Homo sapiens
ttacattttaactta

SEQ ID NO: 19407 - DNA, 15 bp, Homo sapiens
tttacattttaactt

SEQ ID NO: 19408 - DNA, 15 bp, Homo sapiens
ctttacattttaact

SEQ ID NO: 19409 - DNA, 15 bp, Homo sapiens
tctttacattttaac

SEQ ID NO: 19410 - DNA, 15 bp, Homo sapiens
gtctttacattttaa

SEQ ID NO: 19411 - DNA, 15 bp, Homo sapiens
tgtctttacatttta

SEQ ID NO: 19412 - DNA, 15 bp, Homo sapiens
atgtctttacatttt

SEQ ID NO: 19413 - DNA, 15 bp, Homo sapiens
tatgtctttacattt

SEQ ID NO: 19414 - DNA, 15 bp, Homo sapiens
atatgtctttacatt

SEQ ID NO: 19415 - DNA, 15 bp, Homo sapiens
gatatgtctttacat

SEQ ID NO: 19416 - DNA, 15 bp, Homo sapiens
tgatatgtctttaca

SEQ ID NO: 19417 - DNA, 15 bp, Homo sapiens
ttgatatgtctttac

SEQ ID NO: 19418 - DNA, 15 bp, Homo sapiens
tttgatatgtcttta

SEQ ID NO: 19419 - DNA, 15 bp, Homo sapiens
atttgatatgtcttt

SEQ ID NO: 19420 - DNA, 15 bp, Homo sapiens
aatttgatatgtctt

SEQ ID NO: 19421 - DNA, 15 bp, Homo sapiens
caatttgatatgtct

SEQ ID NO: 19422 - DNA, 15 bp, Homo sapiens
acaatttgatatgtc

SEQ ID NO: 19423 - DNA, 15 bp, Homo sapiens
tacaatttgatatgt

SEQ ID NO: 19424 - DNA, 15 bp, Homo sapiens
ttacaatttgatatg

SEQ ID NO: 19425 - DNA, 15 bp, Homo sapiens
cttacaatttgatat

SEQ ID NO: 19426 - DNA, 15 bp, Homo sapiens
tcttacaatttgata

SEQ ID NO: 19427 - DNA, 15 bp, Homo sapiens
gtcttacaatttgat

SEQ ID NO: 19428 - DNA, 15 bp, Homo sapiens
ggtcttacaatttga

SEQ ID NO: 19429 - DNA, 15 bp, Homo sapiens
tggtcttacaatttg

SEQ ID NO: 19430 - DNA, 15 bp, Homo sapiens
ttggtcttacaattt

SEQ ID NO: 19431 - DNA, 15 bp, Homo sapiens
tttggtcttacaatt

SEQ ID NO: 19432 - DNA, 15 bp, Homo sapiens
ttttggtcttacaat

SEQ ID NO: 19433 - DNA, 15 bp, Homo sapiens
attttggtcttacaa

SEQ ID NO: 19434 - DNA, 15 bp, Homo sapiens
cattttggtcttaca

SEQ ID NO: 19435 - DNA, 15 bp, Homo sapiens
ccattttggtcttac

SEQ ID NO: 19436 - DNA, 15 bp, Homo sapiens
gccattttggtctta

SEQ ID NO: 19437 - DNA, 15 bp, Homo sapiens
agccattttggtctt

SEQ ID NO: 19438 - DNA, 15 bp, Homo sapiens
aagccattttggtct

SEQ ID NO: 19439 - DNA, 15 bp, Homo sapiens
aaagccattttggtc

SEQ ID NO: 19440 - DNA, 15 bp, Homo sapiens
aaaagccattttggt

SEQ ID NO: 19441 - DNA, 15 bp, Homo sapiens
caaaagccattttgg

SEQ ID NO: 19442 - DNA, 15 bp, Homo sapiens
tcaaaagccattttg

SEQ ID NO: 19443 - DNA, 15 bp, Homo sapiens
gtcaaaagccatttt

SEQ ID NO: 19444 - DNA, 15 bp, Homo sapiens
ggtcaaaagccattt

SEQ ID NO: 19445 - DNA, 15 bp, Homo sapiens
aggtcaaaagccatt

SEQ ID NO: 19446 - DNA, 15 bp, Homo sapiens
aaggtcaaaagccat

SEQ ID NO: 19447 - DNA, 15 bp, Homo sapiens
taaggtcaaaagcca

SEQ ID NO: 19448 - DNA, 15 bp, Homo sapiens
gtaaggtcaaaagcc

SEQ ID NO: 19449 - DNA, 15 bp, Homo sapiens
tgtaaggtcaaaagc

SEQ ID NO: 19450 - DNA, 15 bp, Homo sapiens
ttgtaaggtcaaaag

SEQ ID NO: 19451 - DNA, 15 bp, Homo sapiens
gttgtaaggtcaaaa

SEQ ID NO: 19452 - DNA, 15 bp, Homo sapiens
tgttgtaaggtcaaa

SEQ ID NO: 19453 - DNA, 15 bp, Homo sapiens
ttgttgtaaggtcaa

SEQ ID NO: 19454 - DNA, 15 bp, Homo sapiens
tttgttgtaaggtca

SEQ ID NO: 19455 - DNA, 15 bp, Homo sapiens
gtttgttgtaaggtc

SEQ ID NO: 19456 - DNA, 15 bp, Homo sapiens
agtttgttgtaaggt

SEQ ID NO: 19457 - DNA, 15 bp, Homo sapiens
gagtttgttgtaagg

SEQ ID NO: 19458 - DNA, 15 bp, Homo sapiens
tgagtttgttgtaag

SEQ ID NO: 19459 - DNA, 15 bp, Homo sapiens
atgagtttgttgtaa

SEQ ID NO: 19460 - DNA, 15 bp, Homo sapiens
tatgagtttgttgta

SEQ ID NO: 19461 - DNA, 15 bp, Homo sapiens
atatgagtttgttgt

SEQ ID NO: 19462 - DNA, 15 bp, Homo sapiens
tatatgagtttgttg

SEQ ID NO: 19463 - DNA, 15 bp, Homo sapiens
ttatatgagtttgtt

SEQ ID NO: 19464 - DNA, 15 bp, Homo sapiens
tttatatgagtttgt

SEQ ID NO: 19465 - DNA, 15 bp, Homo sapiens
ttttatatgagtttg

SEQ ID NO: 19466 - DNA, 15 bp, Homo sapiens
tttttatatgagttt

SEQ ID NO: 19467 - DNA, 15 bp, Homo sapiens
atttttatatgagtt

SEQ ID NO: 19468 - DNA, 15 bp, Homo sapiens
tatttttatatgagt

SEQ ID NO: 19469 - DNA, 15 bp, Homo sapiens
ctatttttatatgag

SEQ ID NO: 19470 - DNA, 15 bp, Homo sapiens
tctatttttatatga

SEQ ID NO: 19471 - DNA, 15 bp, Homo sapiens
atctatttttatatg

SEQ ID NO: 19472 - DNA, 15 bp, Homo sapiens
aatctatttttatat

SEQ ID NO: 19473 - DNA, 15 bp, Homo sapiens
aaatctatttttata

SEQ ID NO: 19474 - DNA, 15 bp, Homo sapiens
aaaatctatttttat

SEQ ID NO: 19475 - DNA, 15 bp, Homo sapiens
aaaaatctattttta

SEQ ID NO: 19476 - DNA, 15 bp, Homo sapiens
gaaaaatctattttt

SEQ ID NO: 19477 - DNA, 15 bp, Homo sapiens
ggaaaaatctatttt

SEQ ID NO: 19478 - DNA, 15 bp, Homo sapiens
tggaaaaatctattt

SEQ ID NO: 19479 - DNA, 15 bp, Homo sapiens
atggaaaaatctatt

SEQ ID NO: 19480 - DNA, 15 bp, Homo sapiens
tatggaaaaatctat

SEQ ID NO: 19481 - DNA, 15 bp, Homo sapiens
ttatggaaaaatcta

SEQ ID NO: 19482 - DNA, 15 bp, Homo sapiens
attatggaaaaatct

SEQ ID NO: 19483 - DNA, 15 bp, Homo sapiens
tattatggaaaaatc

SEQ ID NO: 19484 - DNA, 15 bp, Homo sapiens
ttattatggaaaaat

SEQ ID NO: 19485 - DNA, 15 bp, Homo sapiens
attattatggaaaaa

SEQ ID NO: 19486 - DNA, 15 bp, Homo sapiens
tattattatggaaaa

SEQ ID NO: 19487 - DNA, 15 bp, Homo sapiens
ttattattatggaaa

SEQ ID NO: 19488 - DNA, 15 bp, Homo sapiens
tttattattatggaa

SEQ ID NO: 19489 - DNA, 15 bp, Homo sapiens
ctttattattatgga

SEQ ID NO: 19490 - DNA, 15 bp, Homo sapiens
cctttattattatgg

SEQ ID NO: 19491 - DNA, 15 bp, Homo sapiens
ccctttattattatg

SEQ ID NO: 19492 - DNA, 15 bp, Homo sapiens
cccctttattattat

SEQ ID NO: 19493 - DNA, 15 bp, Homo sapiens
tcccctttattatta

SEQ ID NO: 19494 - DNA, 15 bp, Homo sapiens
ctcccctttattatt

SEQ ID NO: 19495 - DNA, 15 bp, Homo sapiens
tctcccctttattat

SEQ ID NO: 19496 - DNA, 15 bp, Homo sapiens
ctctcccctttatta

SEQ ID NO: 19497 - DNA, 15 bp, Homo sapiens
tctctcccctttatt

SEQ ID NO: 19498 - DNA, 15 bp, Homo sapiens
ctctctcccctttat

SEQ ID NO: 19499 - DNA, 15 bp, Homo sapiens
tctctctccccttta

SEQ ID NO: 19500 - DNA, 15 bp, Homo sapiens
ctctctctccccttt

SEQ ID NO: 19501 - DNA, 15 bp, Homo sapiens
tctctctctcccctt

SEQ ID NO: 19502 - DNA, 15 bp, Homo sapiens
atctctctctcccct

SEQ ID NO: 19503 - DNA, 15 bp, Homo sapiens
aatctctctctcccc

SEQ ID NO: 19504 - DNA, 15 bp, Homo sapiens
aaatctctctctccc

SEQ ID NO: 19505 - DNA, 15 bp, Homo sapiens
aaaatctctctctcc

SEQ ID NO: 19506 - DNA, 15 bp, Homo sapiens
caaaatctctctctc

SEQ ID NO: 19507 - DNA, 15 bp, Homo sapiens
gcaaaatctctctct

SEQ ID NO: 19508 - DNA, 15 bp, Homo sapiens
tgcaaaatctctctc

SEQ ID NO: 19509 - DNA, 15 bp, Homo sapiens
ctgcaaaatctctct

SEQ ID NO: 19510 - DNA, 15 bp, Homo sapiens
cctgcaaaatctctc

SEQ ID NO: 19511 - DNA, 15 bp, Homo sapiens
tcctgcaaaatctct

SEQ ID NO: 19512 - DNA, 15 bp, Homo sapiens
atcctgcaaaatctc

SEQ ID NO: 19513 - DNA, 15 bp, Homo sapiens
tatcctgcaaaatct

SEQ ID NO: 19514 - DNA, 15 bp, Homo sapiens
atatcctgcaaaatc

SEQ ID NO: 19515 - DNA, 15 bp, Homo sapiens
aatatcctgcaaaat

SEQ ID NO: 19516 - DNA, 15 bp, Homo sapiens
caatatcctgcaaaa

SEQ ID NO: 19517 - DNA, 15 bp, Homo sapiens
tcaatatcctgcaaa

SEQ ID NO: 19518 - DNA, 15 bp, Homo sapiens
ctcaatatcctgcaa

SEQ ID NO: 19519 - DNA, 15 bp, Homo sapiens
actcaatatcctgca

SEQ ID NO: 19520 - DNA, 15 bp, Homo sapiens
gactcaatatcctgc

SEQ ID NO: 19521 - DNA, 15 bp, Homo sapiens
tgactcaatatcctg

SEQ ID NO: 19522 - DNA, 15 bp, Homo sapiens
ctgactcaatatcct

SEQ ID NO: 19523 - DNA, 15 bp, Homo sapiens
actgactcaatatcc

SEQ ID NO: 19524 - DNA, 15 bp, Homo sapiens
tactgactcaatatc

SEQ ID NO: 19525 - DNA, 15 bp, Homo sapiens
ctactgactcaatat

SEQ ID NO: 19526 - DNA, 15 bp, Homo sapiens
cctactgactcaata

SEQ ID NO: 19527 - DNA, 15 bp, Homo sapiens
ccctactgactcaat

SEQ ID NO: 19528 - DNA, 15 bp, Homo sapiens
tccctactgactcaa

SEQ ID NO: 19529 - DNA, 15 bp, Homo sapiens
ctccctactgactca

SEQ ID NO: 19530 - DNA, 15 bp, Homo sapiens
cctccctactgactc

SEQ ID NO: 19531 - DNA, 15 bp, Homo sapiens
ccctccctactgact

SEQ ID NO: 19532 - DNA, 15 bp, Homo sapiens
cccctccctactgac

SEQ ID NO: 19533 - DNA, 15 bp, Homo sapiens
acccctccctactga

SEQ ID NO: 19534 - DNA, 15 bp, Homo sapiens
gacccctccctactg

SEQ ID NO: 19535 - DNA, 15 bp, Homo sapiens
agacccctccctact

SEQ ID NO: 19536 - DNA, 15 bp, Homo sapiens
gagacccctccctac

SEQ ID NO: 19537 - DNA, 15 bp, Homo sapiens
tgagacccctcccta

SEQ ID NO: 19538 - DNA, 15 bp, Homo sapiens
atgagacccctccct

SEQ ID NO: 19539 - DNA, 15 bp, Homo sapiens
aatgagacccctccc

SEQ ID NO: 19540 - DNA, 15 bp, Homo sapiens
aaatgagacccctcc

SEQ ID NO: 19541 - DNA, 15 bp, Homo sapiens
taaatgagacccctc

SEQ ID NO: 19542 - DNA, 15 bp, Homo sapiens
ttaaatgagacccct

SEQ ID NO: 19543 - DNA, 15 bp, Homo sapiens
attaaatgagacccc

SEQ ID NO: 19544 - DNA, 15 bp, Homo sapiens
tattaaatgagaccc

SEQ ID NO: 19545 - DNA, 15 bp, Homo sapiens
atattaaatgagacc

SEQ ID NO: 19546 - DNA, 15 bp, Homo sapiens
gatattaaatgagac

SEQ ID NO: 19547 - DNA, 15 bp, Homo sapiens
tgatattaaatgaga

SEQ ID NO: 19548 - DNA, 15 bp, Homo sapiens
atgatattaaatgag

SEQ ID NO: 19549 - DNA, 15 bp, Homo sapiens
catgatattaaatga

SEQ ID NO: 19550 - DNA, 15 bp, Homo sapiens
acatgatattaaatg

SEQ ID NO: 19551 - DNA, 15 bp, Homo sapiens
gacatgatattaaat

SEQ ID NO: 19552 - DNA, 15 bp, Homo sapiens
cgacatgatattaaa

SEQ ID NO: 19553 - DNA, 15 bp, Homo sapiens
gcgacatgatattaa

SEQ ID NO: 19554 - DNA, 15 bp, Homo sapiens
ggcgacatgatatta

SEQ ID NO: 19555 - DNA, 15 bp, Homo sapiens
aggcgacatgatatt

SEQ ID NO: 19556 - DNA, 15 bp, Homo sapiens
aaggcgacatgatat

SEQ ID NO: 19557 - DNA, 15 bp, Homo sapiens
aaaggcgacatgata

SEQ ID NO: 19558 - DNA, 15 bp, Homo sapiens
aaaaggcgacatgat

SEQ ID NO: 19559 - DNA, 15 bp, Homo sapiens
taaaaggcgacatga

SEQ ID NO: 19560 - DNA, 15 bp, Homo sapiens
ataaaaggcgacatg

SEQ ID NO: 19561 - DNA, 15 bp, Homo sapiens
tataaaaggcgacat

SEQ ID NO: 19562 - DNA, 15 bp, Homo sapiens
atataaaaggcgaca

SEQ ID NO: 19563 - DNA, 15 bp, Homo sapiens
catataaaaggcgac

SEQ ID NO: 19564 - DNA, 15 bp, Homo sapiens
gcatataaaaggcga

SEQ ID NO: 19565 - DNA, 15 bp, Homo sapiens
tgcatataaaaggcg

SEQ ID NO: 19566 - DNA, 15 bp, Homo sapiens
ctgcatataaaaggc

SEQ ID NO: 19567 - DNA, 15 bp, Homo sapiens
actgcatataaaagg

SEQ ID NO: 19568 - DNA, 15 bp, Homo sapiens
aactgcatataaaag

SEQ ID NO: 19569 - DNA, 15 bp, Homo sapiens
taactgcatataaaa

SEQ ID NO: 19570 - DNA, 15 bp, Homo sapiens
ctaactgcatataaa

SEQ ID NO: 19571 - DNA, 15 bp, Homo sapiens
tctaactgcatataa

SEQ ID NO: 19572 - DNA, 15 bp, Homo sapiens
ttctaactgcatata

SEQ ID NO: 19573 - DNA, 15 bp, Homo sapiens
tttctaactgcatat

SEQ ID NO: 19574 - DNA, 15 bp, Homo sapiens
ttttctaactgcata

SEQ ID NO: 19575 - DNA, 15 bp, Homo sapiens
attttctaactgcat

SEQ ID NO: 19576 - DNA, 15 bp, Homo sapiens
gattttctaactgca

SEQ ID NO: 19577 - DNA, 15 bp, Homo sapiens
tgattttctaactgc

SEQ ID NO: 19578 - DNA, 15 bp, Homo sapiens
ttgattttctaactg

SEQ ID NO: 19579 - DNA, 15 bp, Homo sapiens
gttgattttctaact

SEQ ID NO: 19580 - DNA, 15 bp, Homo sapiens
cgttgattttctaac

SEQ ID NO: 19581 - DNA, 15 bp, Homo sapiens
acgttgattttctaa

SEQ ID NO: 19582 - DNA, 15 bp, Homo sapiens
aacgttgattttcta

SEQ ID NO: 19583 - DNA, 15 bp, Homo sapiens
gaacgttgattttct

SEQ ID NO: 19584 - DNA, 15 bp, Homo sapiens
ggaacgttgattttc

SEQ ID NO: 19585 - DNA, 15 bp, Homo sapiens
gggaacgttgatttt

SEQ ID NO: 19586 - DNA, 15 bp, Homo sapiens
tgggaacgttgattt

SEQ ID NO: 19587 - DNA, 15 bp, Homo sapiens
ttgggaacgttgatt

SEQ ID NO: 19588 - DNA, 15 bp, Homo sapiens
attgggaacgttgat

SEQ ID NO: 19589 - DNA, 15 bp, Homo sapiens
aattgggaacgttga

SEQ ID NO: 19590 - DNA, 15 bp, Homo sapiens
taattgggaacgttg

SEQ ID NO: 19591 - DNA, 15 bp, Homo sapiens
gtaattgggaacgtt

SEQ ID NO: 19592 - DNA, 15 bp, Homo sapiens
tgtaattgggaacgt

SEQ ID NO: 19593 - DNA, 15 bp, Homo sapiens
atgtaattgggaacg

SEQ ID NO: 19594 - DNA, 15 bp, Homo sapiens
tatgtaattgggaac

SEQ ID NO: 19595 - DNA, 15 bp, Homo sapiens
atatgtaattgggaa

SEQ ID NO: 19596 - DNA, 15 bp, Homo sapiens
aatatgtaattggga

SEQ ID NO: 19597 - DNA, 15 bp, Homo sapiens
taatatgtaattggg

SEQ ID NO: 19598 - DNA, 15 bp, Homo sapiens
gtaatatgtaattgg

SEQ ID NO: 19599 - DNA, 15 bp, Homo sapiens
agtaatatgtaattg

SEQ ID NO: 19600 - DNA, 15 bp, Homo sapiens
aagtaatatgtaatt

SEQ ID NO: 19601 - DNA, 15 bp, Homo sapiens
aaagtaatatgtaat

SEQ ID NO: 19602 - DNA, 15 bp, Homo sapiens
caaagtaatatgtaa

SEQ ID NO: 19603 - DNA, 15 bp, Homo sapiens
gcaaagtaatatgta

SEQ ID NO: 19604 - DNA, 15 bp, Homo sapiens
agcaaagtaatatgt

SEQ ID NO: 19605 - DNA, 15 bp, Homo sapiens
aagcaaagtaatatg

SEQ ID NO: 19606 - DNA, 15 bp, Homo sapiens
aaagcaaagtaatat

SEQ ID NO: 19607 - DNA, 15 bp, Homo sapiens
taaagcaaagtaata

SEQ ID NO: 19608 - DNA, 15 bp, Homo sapiens
ttaaagcaaagtaat

SEQ ID NO: 19609 - DNA, 15 bp, Homo sapiens
tttaaagcaaagtaa

SEQ ID NO: 19610 - DNA, 15 bp, Homo sapiens
ttttaaagcaaagta

SEQ ID NO: 19611 - DNA, 15 bp, Homo sapiens
cttttaaagcaaagt

SEQ ID NO: 19612 - DNA, 15 bp, Homo sapiens
tcttttaaagcaaag

SEQ ID NO: 19613 - DNA, 15 bp, Homo sapiens
atcttttaaagcaaa

SEQ ID NO: 19614 - DNA, 15 bp, Homo sapiens
aatcttttaaagcaa

SEQ ID NO: 19615 - DNA, 15 bp, Homo sapiens
taatcttttaaagca

SEQ ID NO: 19616 - DNA, 15 bp, Homo sapiens
gtaatcttttaaagc

SEQ ID NO: 19617 - DNA, 15 bp, Homo sapiens
agtaatcttttaaag

SEQ ID NO: 19618 - DNA, 15 bp, Homo sapiens
tagtaatcttttaaa

SEQ ID NO: 19619 - DNA, 15 bp, Homo sapiens
ctagtaatcttttaa

SEQ ID NO: 19620 - DNA, 15 bp, Homo sapiens
cctagtaatctttta

SEQ ID NO: 19621 - DNA, 15 bp, Homo sapiens
tcctagtaatctttt

SEQ ID NO: 19622 - DNA, 15 bp, Homo sapiens
ctcctagtaatcttt

SEQ ID NO: 19623 - DNA, 15 bp, Homo sapiens
cctcctagtaatctt

SEQ ID NO: 19624 - DNA, 15 bp, Homo sapiens
tcctcctagtaatct

SEQ ID NO: 19625 - DNA, 15 bp, Homo sapiens
atcctcctagtaatc

SEQ ID NO: 19626 - DNA, 15 bp, Homo sapiens
aatcctcctagtaat

SEQ ID NO: 19627 - DNA, 15 bp, Homo sapiens
taatcctcctagtaa

SEQ ID NO: 19628 - DNA, 15 bp, Homo sapiens
ttaatcctcctagta

SEQ ID NO: 19629 - DNA, 15 bp, Homo sapiens
attaatcctcctagt

SEQ ID NO: 19630 - DNA, 15 bp, Homo sapiens
tattaatcctcctag

SEQ ID NO: 19631 - DNA, 15 bp, Homo sapiens
ttattaatcctccta

SEQ ID NO: 19632 - DNA, 15 bp, Homo sapiens
tttattaatcctcct

SEQ ID NO: 19633 - DNA, 15 bp, Homo sapiens
gtttattaatcctcc

SEQ ID NO: 19634 - DNA, 15 bp, Homo sapiens
tgtttattaatcctc

SEQ ID NO: 19635 - DNA, 15 bp, Homo sapiens
gtgtttattaatcct

SEQ ID NO: 19636 - DNA, 15 bp, Homo sapiens
agtgtttattaatcc

SEQ ID NO: 19637 - DNA, 15 bp, Homo sapiens
gagtgtttattaatc

SEQ ID NO: 19638 - DNA, 15 bp, Homo sapiens
tgagtgtttattaat

SEQ ID NO: 19639 - DNA, 15 bp, Homo sapiens
ctgagtgtttattaa

SEQ ID NO: 19640 - DNA, 15 bp, Homo sapiens
tctgagtgtttatta

SEQ ID NO: 19641 - DNA, 15 bp, Homo sapiens
ttctgagtgtttatt

SEQ ID NO: 19642 - DNA, 15 bp, Homo sapiens
tttctgagtgtttat

SEQ ID NO: 19643 - DNA, 15 bp, Homo sapiens
atttctgagtgttta

SEQ ID NO: 19644 - DNA, 15 bp, Homo sapiens
tatttctgagtgttt

SEQ ID NO: 19645 - DNA, 15 bp, Homo sapiens
atatttctgagtgtt

SEQ ID NO: 19646 - DNA, 15 bp, Homo sapiens
catatttctgagtgt

SEQ ID NO: 19647 - DNA, 15 bp, Homo sapiens
gcatatttctgagtg

SEQ ID NO: 19648 - DNA, 15 bp, Homo sapiens
ggcatatttctgagt

SEQ ID NO: 19649 - DNA, 15 bp, Homo sapiens
aggcatatttctgag

SEQ ID NO: 19650 - DNA, 15 bp, Homo sapiens
aaggcatatttctga

SEQ ID NO: 19651 - DNA, 15 bp, Homo sapiens
aaaggcatatttctg

SEQ ID NO: 19652 - DNA, 15 bp, Homo sapiens
gaaaggcatatttct

SEQ ID NO: 19653 - DNA, 15 bp, Homo sapiens
agaaaggcatatttc

SEQ ID NO: 19654 - DNA, 15 bp, Homo sapiens
aagaaaggcatattt

SEQ ID NO: 19655 - DNA, 15 bp, Homo sapiens
aaagaaaggcatatt

SEQ ID NO: 19656 - DNA, 15 bp, Homo sapiens
caaagaaaggcatat

SEQ ID NO: 19657 - DNA, 15 bp, Homo sapiens
gcaaagaaaggcata

SEQ ID NO: 19658 - DNA, 15 bp, Homo sapiens
agcaaagaaaggcat

SEQ ID NO: 19659 - DNA, 15 bp, Homo sapiens
aagcaaagaaaggca

SEQ ID NO: 19660 - DNA, 15 bp, Homo sapiens
gaagcaaagaaaggc

SEQ ID NO: 19661 - DNA, 15 bp, Homo sapiens
agaagcaaagaaagg

SEQ ID NO: 19662 - DNA, 15 bp, Homo sapiens
cagaagcaaagaaag

SEQ ID NO: 19663 - DNA, 15 bp, Homo sapiens
ccagaagcaaagaaa

SEQ ID NO: 19664 - DNA, 15 bp, Homo sapiens
gccagaagcaaagaa

SEQ ID NO: 19665 - DNA, 15 bp, Homo sapiens
ggccagaagcaaaga

SEQ ID NO: 19666 - DNA, 15 bp, Homo sapiens
tggccagaagcaaag

SEQ ID NO: 19667 - DNA, 15 bp, Homo sapiens
ttggccagaagcaaa

SEQ ID NO: 19668 - DNA, 15 bp, Homo sapiens
cttggccagaagcaa

SEQ ID NO: 19669 - DNA, 15 bp, Homo sapiens
tcttggccagaagca

SEQ ID NO: 19670 - DNA, 15 bp, Homo sapiens
ttcttggccagaagc

SEQ ID NO: 19671 - DNA, 15 bp, Homo sapiens
gttcttggccagaag

SEQ ID NO: 19672 - DNA, 15 bp, Homo sapiens
tgttcttggccagaa

SEQ ID NO: 19673 - DNA, 15 bp, Homo sapiens
atgttcttggccaga

SEQ ID NO: 19674 - DNA, 15 bp, Homo sapiens
aatgttcttggccag

SEQ ID NO: 19675 - DNA, 15 bp, Homo sapiens
gaatgttcttggcca

SEQ ID NO: 19676 - DNA, 15 bp, Homo sapiens
ggaatgttcttggcc

SEQ ID NO: 19677 - DNA, 15 bp, Homo sapiens
aggaatgttcttggc

SEQ ID NO: 19678 - DNA, 15 bp, Homo sapiens
caggaatgttcttgg

SEQ ID NO: 19679 - DNA, 15 bp, Homo sapiens
gcaggaatgttcttg

SEQ ID NO: 19680 - DNA, 15 bp, Homo sapiens
cgcaggaatgttctt

SEQ ID NO: 19681 - DNA, 15 bp, Homo sapiens
acgcaggaatgttct

SEQ ID NO: 19682 - DNA, 15 bp, Homo sapiens
cacgcaggaatgttc

SEQ ID NO: 19683 - DNA, 15 bp, Homo sapiens
gcacgcaggaatgtt

SEQ ID NO: 19684 - DNA, 15 bp, Homo sapiens
agcacgcaggaatgt

SEQ ID NO: 19685 - DNA, 15 bp, Homo sapiens
aagcacgcaggaatg

SEQ ID NO: 19686 - DNA, 15 bp, Homo sapiens
caagcacgcaggaat

SEQ ID NO: 19687 - DNA, 15 bp, Homo sapiens
acaagcacgcaggaa

SEQ ID NO: 19688 - DNA, 15 bp, Homo sapiens
gacaagcacgcagga

SEQ ID NO: 19689 - DNA, 15 bp, Homo sapiens
cgacaagcacgcagg

SEQ ID NO: 19690 - DNA, 15 bp, Homo sapiens
ccgacaagcacgcag

SEQ ID NO: 19691 - DNA, 15 bp, Homo sapiens
tccgacaagcacgca

SEQ ID NO: 19692 - DNA, 15 bp, Homo sapiens
ttccgacaagcacgc

SEQ ID NO: 19693 - DNA, 15 bp, Homo sapiens
tttccgacaagcacg

SEQ ID NO: 19694 - DNA, 15 bp, Homo sapiens
ttttccgacaagcac

SEQ ID NO: 19695 - DNA, 15 bp, Homo sapiens
attttccgacaagca

SEQ ID NO: 19696 - DNA, 15 bp, Homo sapiens
cattttccgacaagc

SEQ ID NO: 19697 - DNA, 15 bp, Homo sapiens
acattttccgacaag

SEQ ID NO: 19698 - DNA, 15 bp, Homo sapiens
aacattttccgacaa

SEQ ID NO: 19699 - DNA, 15 bp, Homo sapiens
gaacattttccgaca

SEQ ID NO: 19700 - DNA, 15 bp, Homo sapiens
agaacattttccgac

SEQ ID NO: 19701 - DNA, 15 bp, Homo sapiens
aagaacattttccga

SEQ ID NO: 19702 - DNA, 15 bp, Homo sapiens
aaagaacattttccg

SEQ ID NO: 19703 - DNA, 15 bp, Homo sapiens
caaagaacattttcc

SEQ ID NO: 19704 - DNA, 15 bp, Homo sapiens
ccaaagaacattttc

SEQ ID NO: 19705 - DNA, 15 bp, Homo sapiens
accaaagaacatttt

SEQ ID NO: 19706 - DNA, 15 bp, Homo sapiens
aaccaaagaacattt

SEQ ID NO: 19707 - DNA, 15 bp, Homo sapiens
caaccaaagaacatt

SEQ ID NO: 19708 - DNA, 15 bp, Homo sapiens
gcaaccaaagaacat

SEQ ID NO: 19709 - DNA, 15 bp, Homo sapiens
agcaaccaaagaaca

SEQ ID NO: 19710 - DNA, 15 bp, Homo sapiens
tagcaaccaaagaac

SEQ ID NO: 19711 - DNA, 15 bp, Homo sapiens
gtagcaaccaaagaa

SEQ ID NO: 19712 - DNA, 15 bp, Homo sapiens
agtagcaaccaaaga

SEQ ID NO: 19713 - DNA, 15 bp, Homo sapiens
cagtagcaaccaaag

SEQ ID NO: 19714 - DNA, 15 bp, Homo sapiens
tcagtagcaaccaaa

SEQ ID NO: 19715 - DNA, 15 bp, Homo sapiens
gtcagtagcaaccaa

SEQ ID NO: 19716 - DNA, 15 bp, Homo sapiens
tgtcagtagcaacca

SEQ ID NO: 19717 - DNA, 15 bp, Homo sapiens
atgtcagtagcaacc

SEQ ID NO: 19718 - DNA, 15 bp, Homo sapiens
aatgtcagtagcaac

SEQ ID NO: 19719 - DNA, 15 bp, Homo sapiens
taatgtcagtagcaa

SEQ ID NO: 19720 - DNA, 15 bp, Homo sapiens
ttaatgtcagtagca

SEQ ID NO: 19721 - DNA, 15 bp, Homo sapiens
cttaatgtcagtagc

SEQ ID NO: 19722 - DNA, 15 bp, Homo sapiens
ccttaatgtcagtag

SEQ ID NO: 19723 - DNA, 15 bp, Homo sapiens
tccttaatgtcagta

SEQ ID NO: 19724 - DNA, 15 bp, Homo sapiens
ctccttaatgtcagt

SEQ ID NO: 19725 - DNA, 15 bp, Homo sapiens
actccttaatgtcag

SEQ ID NO: 19726 - DNA, 15 bp, Homo sapiens
tactccttaatgtca

SEQ ID NO: 19727 - DNA, 15 bp, Homo sapiens
ttactccttaatgtc

SEQ ID NO: 19728 - DNA, 15 bp, Homo sapiens
cttactccttaatgt

SEQ ID NO: 19729 - DNA, 15 bp, Homo sapiens
acttactccttaatg

SEQ ID NO: 19730 - DNA, 15 bp, Homo sapiens
cacttactccttaat

SEQ ID NO: 19731 - DNA, 15 bp, Homo sapiens
gcacttactccttaa

SEQ ID NO: 19732 - DNA, 15 bp, Homo sapiens
tgcacttactcctta

SEQ ID NO: 19733 - DNA, 15 bp, Homo sapiens
ctgcacttactcctt

SEQ ID NO: 19734 - DNA, 15 bp, Homo sapiens
cctgcacttactcct

SEQ ID NO: 19735 - DNA, 15 bp, Homo sapiens
tcctgcacttactcc

SEQ ID NO: 19736 - DNA, 15 bp, Homo sapiens
atcctgcacttactc

SEQ ID NO: 19737 - DNA, 15 bp, Homo sapiens
tatcctgcacttact

SEQ ID NO: 19738 - DNA, 15 bp, Homo sapiens
ttatcctgcacttac

SEQ ID NO: 19739 - DNA, 15 bp, Homo sapiens
gttatcctgcactta

SEQ ID NO: 19740 - DNA, 15 bp, Homo sapiens
agttatcctgcactt

SEQ ID NO: 19741 - DNA, 15 bp, Homo sapiens
tagttatcctgcact

SEQ ID NO: 19742 - DNA, 15 bp, Homo sapiens
ctagttatcctgcac

SEQ ID NO: 19743 - DNA, 15 bp, Homo sapiens
tctagttatcctgca

SEQ ID NO: 19744 - DNA, 15 bp, Homo sapiens
ctctagttatcctgc

SEQ ID NO: 19745 - DNA, 15 bp, Homo sapiens
cctctagttatcctg

SEQ ID NO: 19746 - DNA, 15 bp, Homo sapiens
tcctctagttatcct

SEQ ID NO: 19747 - DNA, 15 bp, Homo sapiens
gtcctctagttatcc

SEQ ID NO: 19748 - DNA, 15 bp, Homo sapiens
ggtcctctagttatc

SEQ ID NO: 19749 - DNA, 15 bp, Homo sapiens
gggtcctctagttat

SEQ ID NO: 19750 - DNA, 15 bp, Homo sapiens
agggtcctctagtta

SEQ ID NO: 19751 - DNA, 15 bp, Homo sapiens
tagggtcctctagtt

SEQ ID NO: 19752 - DNA, 15 bp, Homo sapiens
ttagggtcctctagt

SEQ ID NO: 19753 - DNA, 15 bp, Homo sapiens
tttagggtcctctag

SEQ ID NO: 19754 - DNA, 15 bp, Homo sapiens
ttttagggtcctcta

SEQ ID NO: 19755 - DNA, 15 bp, Homo sapiens
attttagggtcctct

SEQ ID NO: 19756 - DNA, 15 bp, Homo sapiens
tattttagggtcctc

SEQ ID NO: 19757 - DNA, 15 bp, Homo sapiens
ttattttagggtcct

SEQ ID NO: 19758 - DNA, 15 bp, Homo sapiens
cttattttagggtcc

SEQ ID NO: 19759 - DNA, 15 bp, Homo sapiens
tcttattttagggtc

SEQ ID NO: 19760 - DNA, 15 bp, Homo sapiens
atcttattttagggt

SEQ ID NO: 19761 - DNA, 15 bp, Homo sapiens
gatcttattttaggg

SEQ ID NO: 19762 - DNA, 15 bp, Homo sapiens
ggatcttattttagg

SEQ ID NO: 19763 - DNA, 15 bp, Homo sapiens
tggatcttattttag

SEQ ID NO: 19764 - DNA, 15 bp, Homo sapiens
ttggatcttatttta

SEQ ID NO: 19765 - DNA, 15 bp, Homo sapiens
cttggatcttatttt

SEQ ID NO: 19766 - DNA, 15 bp, Homo sapiens
tcttggatcttattt

SEQ ID NO: 19767 - DNA, 15 bp, Homo sapiens
ttcttggatcttatt

SEQ ID NO: 19768 - DNA, 15 bp, Homo sapiens
cttcttggatcttat

SEQ ID NO: 19769 - DNA, 15 bp, Homo sapiens
gcttcttggatctta

SEQ ID NO: 19770 - DNA, 15 bp, Homo sapiens
ggcttcttggatctt

SEQ ID NO: 19771 - DNA, 15 bp, Homo sapiens
gggcttcttggatct

SEQ ID NO: 19772 - DNA, 15 bp, Homo sapiens
agggcttcttggatc

SEQ ID NO: 19773 - DNA, 15 bp, Homo sapiens
tagggcttcttggat

SEQ ID NO: 19774 - DNA, 15 bp, Homo sapiens
ttagggcttcttgga

SEQ ID NO: 19775 - DNA, 15 bp, Homo sapiens
gttagggcttcttgg

SEQ ID NO: 19776 - DNA, 15 bp, Homo sapiens
tgttagggcttcttg

SEQ ID NO: 19777 - DNA, 15 bp, Homo sapiens
gtgttagggcttctt

SEQ ID NO: 19778 - DNA, 15 bp, Homo sapiens
tgtgttagggcttct

SEQ ID NO: 19779 - DNA, 15 bp, Homo sapiens
gtgtgttagggcttc

SEQ ID NO: 19780 - DNA, 15 bp, Homo sapiens
ggtgtgttagggctt

SEQ ID NO: 19781 - DNA, 15 bp, Homo sapiens
cggtgtgttagggct

SEQ ID NO: 19782 - DNA, 15 bp, Homo sapiens
gcggtgtgttagggc

SEQ ID NO: 19783 - DNA, 15 bp, Homo sapiens
ggcggtgtgttaggg

SEQ ID NO: 19784 - DNA, 15 bp, Homo sapiens
tggcggtgtgttagg

SEQ ID NO: 19785 - DNA, 15 bp, Homo sapiens
ttggcggtgtgttag

SEQ ID NO: 19786 - DNA, 15 bp, Homo sapiens
attggcggtgtgtta

SEQ ID NO: 19787 - DNA, 15 bp, Homo sapiens
gattggcggtgtgtt

SEQ ID NO: 19788 - DNA, 15 bp, Homo sapiens
cgattggcggtgtgt

SEQ ID NO: 19789 - DNA, 15 bp, Homo sapiens
tcgattggcggtgtg

SEQ ID NO: 19790 - DNA, 15 bp, Homo sapiens
ctcgattggcggtgt

SEQ ID NO: 19791 - DNA, 15 bp, Homo sapiens
cctcgattggcggtg

SEQ ID NO: 19792 - DNA, 15 bp, Homo sapiens
gcctcgattggcggt

SEQ ID NO: 19793 - DNA, 15 bp, Homo sapiens
agcctcgattggcgg

SEQ ID NO: 19794 - DNA, 15 bp, Homo sapiens
aagcctcgattggcg

SEQ ID NO: 19795 - DNA, 15 bp, Homo sapiens
taagcctcgattggc

SEQ ID NO: 19796 - DNA, 15 bp, Homo sapiens
ataagcctcgattgg

SEQ ID NO: 19797 - DNA, 15 bp, Homo sapiens
gataagcctcgattg

SEQ ID NO: 19798 - DNA, 15 bp, Homo sapiens
tgataagcctcgatt

SEQ ID NO: 19799 - DNA, 15 bp, Homo sapiens
ttgataagcctcgat

SEQ ID NO: 19800 - DNA, 15 bp, Homo sapiens
tttgataagcctcga

SEQ ID NO: 19801 - DNA, 15 bp, Homo sapiens
ctttgataagcctcg

SEQ ID NO: 19802 - DNA, 15 bp, Homo sapiens
gctttgataagcctc

SEQ ID NO: 19803 - DNA, 15 bp, Homo sapiens
agctttgataagcct

SEQ ID NO: 19804 - DNA, 15 bp, Homo sapiens
gagctttgataagcc

SEQ ID NO: 19805 - DNA, 15 bp, Homo sapiens
ggagctttgataagc

SEQ ID NO: 19806 - DNA, 15 bp, Homo sapiens
gggagctttgataag

SEQ ID NO: 19807 - DNA, 15 bp, Homo sapiens
ggggagctttgataa

SEQ ID NO: 19808 - DNA, 15 bp, Homo sapiens
gggggagctttgata

SEQ ID NO: 19809 - DNA, 15 bp, Homo sapiens
tgggggagctttgat

SEQ ID NO: 19810 - DNA, 15 bp, Homo sapiens
ctgggggagctttga

SEQ ID NO: 19811 - DNA, 15 bp, Homo sapiens
gctgggggagctttg

SEQ ID NO: 19812 - DNA, 15 bp, Homo sapiens
cgctgggggagcttt

SEQ ID NO: 19813 - DNA, 15 bp, Homo sapiens
gcgctgggggagctt

SEQ ID NO: 19814 - DNA, 15 bp, Homo sapiens
cgcgctgggggagct

SEQ ID NO: 19815 - DNA, 15 bp, Homo sapiens
tcgcgctgggggagc

SEQ ID NO: 19816 - DNA, 15 bp, Homo sapiens
ctcgcgctgggggag

SEQ ID NO: 19817 - DNA, 15 bp, Homo sapiens
cctcgcgctggggga

SEQ ID NO: 19818 - DNA, 15 bp, Homo sapiens
tcctcgcgctggggg

SEQ ID NO: 19819 - DNA, 15 bp, Homo sapiens
ttcctcgcgctgggg

SEQ ID NO: 19820 - DNA, 15 bp, Homo sapiens
tttcctcgcgctggg

SEQ ID NO: 19821 - DNA, 15 bp, Homo sapiens
ttttcctcgcgctgg

SEQ ID NO: 19822 - DNA, 15 bp, Homo sapiens
gttttcctcgcgctg

SEQ ID NO: 19823 - DNA, 15 bp, Homo sapiens
agttttcctcgcgct

SEQ ID NO: 19824 - DNA, 15 bp, Homo sapiens
aagttttcctcgcgc

SEQ ID NO: 19825 - DNA, 15 bp, Homo sapiens
caagttttcctcgcg

SEQ ID NO: 19826 - DNA, 15 bp, Homo sapiens
gcaagttttcctcgc

SEQ ID NO: 19827 - DNA, 15 bp, Homo sapiens
tgcaagttttcctcg

SEQ ID NO: 19828 - DNA, 15 bp, Homo sapiens
atgcaagttttcctc

SEQ ID NO: 19829 - DNA, 15 bp, Homo sapiens
tatgcaagttttcct

SEQ ID NO: 19830 - DNA, 15 bp, Homo sapiens
ctatgcaagttttcc

SEQ ID NO: 19831 - DNA, 15 bp, Homo sapiens
tctatgcaagttttc

SEQ ID NO: 19832 - DNA, 15 bp, Homo sapiens
ttctatgcaagtttt

SEQ ID NO: 19833 - DNA, 15 bp, Homo sapiens
cttctatgcaagttt

SEQ ID NO: 19834 - DNA, 15 bp, Homo sapiens
gcttctatgcaagtt

SEQ ID NO: 19835 - DNA, 15 bp, Homo sapiens
ggcttctatgcaagt

SEQ ID NO: 19836 - DNA, 15 bp, Homo sapiens
tggcttctatgcaag

SEQ ID NO: 19837 - DNA, 15 bp, Homo sapiens
ttggcttctatgcaa

SEQ ID NO: 19838 - DNA, 15 bp, Homo sapiens
tttggcttctatgca

SEQ ID NO: 19839 - DNA, 15 bp, Homo sapiens
gtttggcttctatgc

SEQ ID NO: 19840 - DNA, 15 bp, Homo sapiens
tgtttggcttctatg

SEQ ID NO: 19841 - DNA, 15 bp, Homo sapiens
ttgtttggcttctat

SEQ ID NO: 19842 - DNA, 15 bp, Homo sapiens
cttgtttggcttcta

SEQ ID NO: 19843 - DNA, 15 bp, Homo sapiens
tcttgtttggcttct

SEQ ID NO: 19844 - DNA, 15 bp, Homo sapiens
ttcttgtttggcttc

SEQ ID NO: 19845 - DNA, 15 bp, Homo sapiens
gttcttgtttggctt

SEQ ID NO: 19846 - DNA, 15 bp, Homo sapiens
cgttcttgtttggct

SEQ ID NO: 19847 - DNA, 15 bp, Homo sapiens
tcgttcttgtttggc

SEQ ID NO: 19848 - DNA, 15 bp, Homo sapiens
ctcgttcttgtttgg

SEQ ID NO: 19849 - DNA, 15 bp, Homo sapiens
cctcgttcttgtttg

SEQ ID NO: 19850 - DNA, 15 bp, Homo sapiens
tcctcgttcttgttt

SEQ ID NO: 19851 - DNA, 15 bp, Homo sapiens
ctcctcgttcttgtt

SEQ ID NO: 19852 - DNA, 15 bp, Homo sapiens
actcctcgttcttgt

SEQ ID NO: 19853 - DNA, 15 bp, Homo sapiens
gactcctcgttcttg

SEQ ID NO: 19854 - DNA, 15 bp, Homo sapiens
tgactcctcgttctt

SEQ ID NO: 19855 - DNA, 15 bp, Homo sapiens
ttgactcctcgttct

SEQ ID NO: 19856 - DNA, 15 bp, Homo sapiens
tttgactcctcgttc

SEQ ID NO: 19857 - DNA, 15 bp, Homo sapiens
ttttgactcctcgtt

SEQ ID NO: 19858 - DNA, 15 bp, Homo sapiens
attttgactcctcgt

SEQ ID NO: 19859 - DNA, 15 bp, Homo sapiens
gattttgactcctcg

SEQ ID NO: 19860 - DNA, 15 bp, Homo sapiens
ggattttgactcctc

SEQ ID NO: 19861 - DNA, 15 bp, Homo sapiens
tggattttgactcct

SEQ ID NO: 19862 - DNA, 15 bp, Homo sapiens
gtggattttgactcc

SEQ ID NO: 19863 - DNA, 15 bp, Homo sapiens
ggtggattttgactc

SEQ ID NO: 19864 - DNA, 15 bp, Homo sapiens
cggtggattttgact

SEQ ID NO: 19865 - DNA, 15 bp, Homo sapiens
tcggtggattttgac

SEQ ID NO: 19866 - DNA, 15 bp, Homo sapiens
gtcggtggattttga

SEQ ID NO: 19867 - DNA, 15 bp, Homo sapiens
cgtcggtggattttg

SEQ ID NO: 19868 - DNA, 15 bp, Homo sapiens
tcgtcggtggatttt

SEQ ID NO: 19869 - DNA, 15 bp, Homo sapiens
gtcgtcggtggattt

SEQ ID NO: 19870 - DNA, 15 bp, Homo sapiens
cgtcgtcggtggatt

SEQ ID NO: 19871 - DNA, 15 bp, Homo sapiens
tcgtcgtcggtggat

SEQ ID NO: 19872 - DNA, 15 bp, Homo sapiens
ctcgtcgtcggtgga

SEQ ID NO: 19873 - DNA, 15 bp, Homo sapiens
actcgtcgtcggtgg

SEQ ID NO: 19874 - DNA, 15 bp, Homo sapiens
gactcgtcgtcggtg

SEQ ID NO: 19875 - DNA, 15 bp, Homo sapiens
cgactcgtcgtcggt

SEQ ID NO: 19876 - DNA, 15 bp, Homo sapiens
gcgactcgtcgtcgg

SEQ ID NO: 19877 - DNA, 15 bp, Homo sapiens
tgcgactcgtcgtcg

SEQ ID NO: 19878 - DNA, 15 bp, Homo sapiens
gtgcgactcgtcgtc

SEQ ID NO: 19879 - DNA, 15 bp, Homo sapiens
cgtgcgactcgtcgt

SEQ ID NO: 19880 - DNA, 15 bp, Homo sapiens
gcgtgcgactcgtcg

SEQ ID NO: 19881 - DNA, 15 bp, Homo sapiens
ggcgtgcgactcgtc

SEQ ID NO: 19882 - DNA, 15 bp, Homo sapiens
gggcgtgcgactcgt

SEQ ID NO: 19883 - DNA, 15 bp, Homo sapiens
ggggcgtgcgactcg

SEQ ID NO: 19884 - DNA, 15 bp, Homo sapiens
tggggcgtgcgactc

SEQ ID NO: 19885 - DNA, 15 bp, Homo sapiens
gtggggcgtgcgact

SEQ ID NO: 19886 - DNA, 15 bp, Homo sapiens
ggtggggcgtgcgac

SEQ ID NO: 19887 - DNA, 15 bp, Homo sapiens
cggtggggcgtgcga

SEQ ID NO: 19888 - DNA, 15 bp, Homo sapiens
tcggtggggcgtgcg

SEQ ID NO: 19889 - DNA, 15 bp, Homo sapiens
ctcggtggggcgtgc

SEQ ID NO: 19890 - DNA, 15 bp, Homo sapiens
gctcggtggggcgtg

SEQ ID NO: 19891 - DNA, 15 bp, Homo sapiens
agctcggtggggcgt

SEQ ID NO: 19892 - DNA, 15 bp, Homo sapiens
cagctcggtggggcg

SEQ ID NO: 19893 - DNA, 15 bp, Homo sapiens
ccagctcggtggggc

SEQ ID NO: 19894 - DNA, 15 bp, Homo sapiens
tccagctcggtgggg

SEQ ID NO: 19895 - DNA, 15 bp, Homo sapiens
ctccagctcggtggg

SEQ ID NO: 19896 - DNA, 15 bp, Homo sapiens
actccagctcggtgg

SEQ ID NO: 19897 - DNA, 15 bp, Homo sapiens
gactccagctcggtg

SEQ ID NO: 19898 - DNA, 15 bp, Homo sapiens
tgactccagctcggt

SEQ ID NO: 19899 - DNA, 15 bp, Homo sapiens
ctgactccagctcgg

SEQ ID NO: 19900 - DNA, 15 bp, Homo sapiens
gctgactccagctcg

SEQ ID NO: 19901 - DNA, 15 bp, Homo sapiens
tgctgactccagctc

SEQ ID NO: 19902 - DNA, 15 bp, Homo sapiens
ctgctgactccagct

SEQ ID NO: 19903 - DNA, 15 bp, Homo sapiens
gctgctgactccagc

SEQ ID NO: 19904 - DNA, 15 bp, Homo sapiens
tgctgctgactccag

SEQ ID NO: 19905 - DNA, 15 bp, Homo sapiens
gtgctgctgactcca

SEQ ID NO: 19906 - DNA, 15 bp, Homo sapiens
ggtgctgctgactcc

SEQ ID NO: 19907 - DNA, 15 bp, Homo sapiens
tggtgctgctgactc

SEQ ID NO: 19908 - DNA, 15 bp, Homo sapiens
atggtgctgctgact

SEQ ID NO: 19909 - DNA, 15 bp, Homo sapiens
aatggtgctgctgac

SEQ ID NO: 19910 - DNA, 15 bp, Homo sapiens
gaatggtgctgctga

SEQ ID NO: 19911 - DNA, 15 bp, Homo sapiens
tgaatggtgctgctg

SEQ ID NO: 19912 - DNA, 15 bp, Homo sapiens
ttgaatggtgctgct

SEQ ID NO: 19913 - DNA, 15 bp, Homo sapiens
gttgaatggtgctgc

SEQ ID NO: 19914 - DNA, 15 bp, Homo sapiens
tgttgaatggtgctg

SEQ ID NO: 19915 - DNA, 15 bp, Homo sapiens
ttgttgaatggtgct

SEQ ID NO: 19916 - DNA, 15 bp, Homo sapiens
cttgttgaatggtgc

SEQ ID NO: 19917 - DNA, 15 bp, Homo sapiens
acttgttgaatggtg

SEQ ID NO: 19918 - DNA, 15 bp, Homo sapiens
gacttgttgaatggt

SEQ ID NO: 19919 - DNA, 15 bp, Homo sapiens
ggacttgttgaatgg

SEQ ID NO: 19920 - DNA, 15 bp, Homo sapiens
gggacttgttgaatg

SEQ ID NO: 19921 - DNA, 15 bp, Homo sapiens
agggacttgttgaat

SEQ ID NO: 19922 - DNA, 15 bp, Homo sapiens
gagggacttgttgaa

SEQ ID NO: 19923 - DNA, 15 bp, Homo sapiens
ggagggacttgttga

SEQ ID NO: 19924 - DNA, 15 bp, Homo sapiens
aggagggacttgttg

SEQ ID NO: 19925 - DNA, 15 bp, Homo sapiens
taggagggacttgtt

SEQ ID NO: 19926 - DNA, 15 bp, Homo sapiens
gtaggagggacttgt

SEQ ID NO: 19927 - DNA, 15 bp, Homo sapiens
ggtaggagggacttg

SEQ ID NO: 19928 - DNA, 15 bp, Homo sapiens
tggtaggagggactt

SEQ ID NO: 19929 - DNA, 15 bp, Homo sapiens
ctggtaggagggact

SEQ ID NO: 19930 - DNA, 15 bp, Homo sapiens
gctggtaggagggac

SEQ ID NO: 19931 - DNA, 15 bp, Homo sapiens
agctggtaggaggga

SEQ ID NO: 19932 - DNA, 15 bp, Homo sapiens
gagctggtaggaggg

SEQ ID NO: 19933 - DNA, 15 bp, Homo sapiens
agagctggtaggagg

SEQ ID NO: 19934 - DNA, 15 bp, Homo sapiens
gagagctggtaggag

SEQ ID NO: 19935 - DNA, 15 bp, Homo sapiens
agagagctggtagga

SEQ ID NO: 19936 - DNA, 15 bp, Homo sapiens
tagagagctggtagg

SEQ ID NO: 19937 - DNA, 15 bp, Homo sapiens
ttagagagctggtag

SEQ ID NO: 19938 - DNA, 15 bp, Homo sapiens
cttagagagctggta

SEQ ID NO: 19939 - DNA, 15 bp, Homo sapiens
ccttagagagctggt

SEQ ID NO: 19940 - DNA, 15 bp, Homo sapiens
cccttagagagctgg

SEQ ID NO: 19941 - DNA, 15 bp, Homo sapiens
tcccttagagagctg

SEQ ID NO: 19942 - DNA, 15 bp, Homo sapiens
atcccttagagagct

SEQ ID NO: 19943 - DNA, 15 bp, Homo sapiens
gatcccttagagagc

SEQ ID NO: 19944 - DNA, 15 bp, Homo sapiens
ggatcccttagagag

SEQ ID NO: 19945 - DNA, 15 bp, Homo sapiens
gggatcccttagaga

SEQ ID NO: 19946 - DNA, 15 bp, Homo sapiens
cgggatcccttagag

SEQ ID NO: 19947 - DNA, 15 bp, Homo sapiens
gcgggatcccttaga

SEQ ID NO: 19948 - DNA, 15 bp, Homo sapiens
tgcgggatcccttag

SEQ ID NO: 19949 - DNA, 15 bp, Homo sapiens
ttgcgggatccctta

SEQ ID NO: 19950 - DNA, 15 bp, Homo sapiens
tttgcgggatccctt

SEQ ID NO: 19951 - DNA, 15 bp, Homo sapiens
ttttgcgggatccct

SEQ ID NO: 19952 - DNA, 15 bp, Homo sapiens
gttttgcgggatccc

SEQ ID NO: 19953 - DNA, 15 bp, Homo sapiens
ggttttgcgggatcc

SEQ ID NO: 19954 - DNA, 15 bp, Homo sapiens
aggttttgcgggatc

SEQ ID NO: 19955 - DNA, 15 bp, Homo sapiens
aaggttttgcgggat

SEQ ID NO: 19956 - DNA, 15 bp, Homo sapiens
gaaggttttgcggga

SEQ ID NO: 19957 - DNA, 15 bp, Homo sapiens
ggaaggttttgcggg

SEQ ID NO: 19958 - DNA, 15 bp, Homo sapiens
aggaaggttttgcgg

SEQ ID NO: 19959 - DNA, 15 bp, Homo sapiens
aaggaaggttttgcg

SEQ ID NO: 19960 - DNA, 15 bp, Homo sapiens
aaaggaaggttttgc

SEQ ID NO: 19961 - DNA, 15 bp, Homo sapiens
taaaggaaggttttg

SEQ ID NO: 19962 - DNA, 15 bp, Homo sapiens
gtaaaggaaggtttt

SEQ ID NO: 19963 - DNA, 15 bp, Homo sapiens
ggtaaaggaaggttt

SEQ ID NO: 19964 - DNA, 15 bp, Homo sapiens
tggtaaaggaaggtt

SEQ ID NO: 19965 - DNA, 15 bp, Homo sapiens
gtggtaaaggaaggt

SEQ ID NO: 19966 - DNA, 15 bp, Homo sapiens
agtggtaaaggaagg

SEQ ID NO: 19967 - DNA, 15 bp, Homo sapiens
aagtggtaaaggaag

SEQ ID NO: 19968 - DNA, 15 bp, Homo sapiens
gaagtggtaaaggaa

SEQ ID NO: 19969 - DNA, 15 bp, Homo sapiens
ggaagtggtaaagga

SEQ ID NO: 19970 - DNA, 15 bp, Homo sapiens
gggaagtggtaaagg

SEQ ID NO: 19971 - DNA, 15 bp, Homo sapiens
ggggaagtggtaaag

SEQ ID NO: 19972 - DNA, 15 bp, Homo sapiens
tggggaagtggtaaa

SEQ ID NO: 19973 - DNA, 15 bp, Homo sapiens
gtggggaagtggtaa

SEQ ID NO: 19974 - DNA, 15 bp, Homo sapiens
ggtggggaagtggta

SEQ ID NO: 19975 - DNA, 15 bp, Homo sapiens
gggtggggaagtggt

SEQ ID NO: 19976 - DNA, 15 bp, Homo sapiens
ggggtggggaagtgg

SEQ ID NO: 19977 - DNA, 15 bp, Homo sapiens
gggggtggggaagtg

SEQ ID NO: 19978 - DNA, 15 bp, Homo sapiens
tgggggtggggaagt

SEQ ID NO: 19979 - DNA, 15 bp, Homo sapiens
ctgggggtggggaag

SEQ ID NO: 19980 - DNA, 15 bp, Homo sapiens
gctgggggtggggaa

SEQ ID NO: 19981 - DNA, 15 bp, Homo sapiens
ggctgggggtgggga

SEQ ID NO: 19982 - DNA, 15 bp, Homo sapiens
aggctgggggtgggg

SEQ ID NO: 19983 - DNA, 15 bp, Homo sapiens
gaggctgggggtggg

SEQ ID NO: 19984 - DNA, 15 bp, Homo sapiens
ggaggctgggggtgg

SEQ ID NO: 19985 - DNA, 15 bp, Homo sapiens
gggaggctgggggtg

SEQ ID NO: 19986 - DNA, 15 bp, Homo sapiens
cgggaggctgggggt

SEQ ID NO: 19987 - DNA, 15 bp, Homo sapiens
gcgggaggctggggg

SEQ ID NO: 19988 - DNA, 15 bp, Homo sapiens
ggcgggaggctgggg

SEQ ID NO: 19989 - DNA, 15 bp, Homo sapiens
gggcgggaggctggg

SEQ ID NO: 19990 - DNA, 15 bp, Homo sapiens
ggggcgggaggctgg

SEQ ID NO: 19991 - DNA, 15 bp, Homo sapiens
gggggcgggaggctg

SEQ ID NO: 19992 - DNA, 15 bp, Homo sapiens
tgggggcgggaggct

SEQ ID NO: 19993 - DNA, 15 bp, Homo sapiens
ctgggggcgggaggc

SEQ ID NO: 19994 - DNA, 15 bp, Homo sapiens
actgggggcgggagg

SEQ ID NO: 19995 - DNA, 15 bp, Homo sapiens
tactgggggcgggag

SEQ ID NO: 19996 - DNA, 15 bp, Homo sapiens
ctactgggggcggga

SEQ ID NO: 19997 - DNA, 15 bp, Homo sapiens
gctactgggggcggg

SEQ ID NO: 19998 - DNA, 15 bp, Homo sapiens
agctactgggggcgg

SEQ ID NO: 19999 - DNA, 15 bp, Homo sapiens
cagctactgggggcg

SEQ ID NO: 20000 - DNA, 15 bp, Homo sapiens
gcagctactgggggc

SEQ ID NO: 20001 - DNA, 15 bp, Homo sapiens
agcagctactggggg

SEQ ID NO: 20002 - DNA, 15 bp, Homo sapiens
gagcagctactgggg

SEQ ID NO: 20003 - DNA, 15 bp, Homo sapiens
agagcagctactggg

SEQ ID NO: 20004 - DNA, 15 bp, Homo sapiens
aagagcagctactgg

SEQ ID NO: 20005 - DNA, 15 bp, Homo sapiens
caagagcagctactg

SEQ ID NO: 20006 - DNA, 15 bp, Homo sapiens
ccaagagcagctact

SEQ ID NO: 20007 - DNA, 15 bp, Homo sapiens
gccaagagcagctac

SEQ ID NO: 20008 - DNA, 15 bp, Homo sapiens
tgccaagagcagcta

SEQ ID NO: 20009 - DNA, 15 bp, Homo sapiens
ctgccaagagcagct

SEQ ID NO: 20010 - DNA, 15 bp, Homo sapiens
gctgccaagagcagc

SEQ ID NO: 20011 - DNA, 15 bp, Homo sapiens
tgctgccaagagcag

SEQ ID NO: 20012 - DNA, 15 bp, Homo sapiens
atgctgccaagagca

SEQ ID NO: 20013 - DNA, 15 bp, Homo sapiens
catgctgccaagagc

SEQ ID NO: 20014 - DNA, 15 bp, Homo sapiens
ccatgctgccaagag

SEQ ID NO: 20015 - DNA, 15 bp, Homo sapiens
gccatgctgccaaga

SEQ ID NO: 20016 - DNA, 15 bp, Homo sapiens
ggccatgctgccaag

SEQ ID NO: 20017 - DNA, 15 bp, Homo sapiens
cggccatgctgccaa

SEQ ID NO: 20018 - DNA, 15 bp, Homo sapiens
ccggccatgctgcca

SEQ ID NO: 20019 - DNA, 15 bp, Homo sapiens
gccggccatgctgcc

SEQ ID NO: 20020 - DNA, 15 bp, Homo sapiens
tgccggccatgctgc

SEQ ID NO: 20021 - DNA, 15 bp, Homo sapiens
ctgccggccatgctg

SEQ ID NO: 20022 - DNA, 15 bp, Homo sapiens
tctgccggccatgct

SEQ ID NO: 20023 - DNA, 15 bp, Homo sapiens
ctctgccggccatgc

SEQ ID NO: 20024 - DNA, 15 bp, Homo sapiens
cctctgccggccatg

SEQ ID NO: 20025 - DNA, 15 bp, Homo sapiens
ccctctgccggccat

SEQ ID NO: 20026 - DNA, 15 bp, Homo sapiens
gccctctgccggcca

SEQ ID NO: 20027 - DNA, 15 bp, Homo sapiens
tgccctctgccggcc

SEQ ID NO: 20028 - DNA, 15 bp, Homo sapiens
gtgccctctgccggc

SEQ ID NO: 20029 - DNA, 15 bp, Homo sapiens
ggtgccctctgccgg

SEQ ID NO: 20030 - DNA, 15 bp, Homo sapiens
gggtgccctctgccg

SEQ ID NO: 20031 - DNA, 15 bp, Homo sapiens
agggtgccctctgcc

SEQ ID NO: 20032 - DNA, 15 bp, Homo sapiens
gagggtgccctctgc

SEQ ID NO: 20033 - DNA, 15 bp, Homo sapiens
agagggtgccctctg

SEQ ID NO: 20034 - DNA, 15 bp, Homo sapiens
aactttgttgagctc

SEQ ID NO: 20035 - DNA, 15 bp, Homo sapiens
taactttgttgagct

SEQ ID NO: 20036 - DNA, 15 bp, Homo sapiens
ctaactttgttgagc

SEQ ID NO: 20037 - DNA, 15 bp, Homo sapiens
tctaactttgttgag

SEQ ID NO: 20038 - DNA, 15 bp, Homo sapiens
atctaactttgttga

SEQ ID NO: 20039 - DNA, 15 bp, Homo sapiens
aatctaactttgttg

SEQ ID NO: 20040 - DNA, 15 bp, Homo sapiens
aaatctaactttgtt

SEQ ID NO: 20041 - DNA, 15 bp, Homo sapiens
aaaatctaactttgt

SEQ ID NO: 20042 - DNA, 15 bp, Homo sapiens
taaaatctaactttg

SEQ ID NO: 20043 - DNA, 15 bp, Homo sapiens
ataaaatctaacttt

SEQ ID NO: 20044 - DNA, 15 bp, Homo sapiens
aataaaatctaactt

SEQ ID NO: 20045 - DNA, 15 bp, Homo sapiens
taataaaatctaact

SEQ ID NO: 20046 - DNA, 15 bp, Homo sapiens
ataataaaatctaac

SEQ ID NO: 20047 - DNA, 15 bp, Homo sapiens
aataataaaatctaa

SEQ ID NO: 20048 - DNA, 15 bp, Homo sapiens
taataataaaatcta

SEQ ID NO: 20049 - DNA, 15 bp, Homo sapiens
ttaataataaaatct

SEQ ID NO: 20050 - DNA, 15 bp, Homo sapiens
attaataataaaatc

SEQ ID NO: 20051 - DNA, 15 bp, Homo sapiens
cattaataataaaat

SEQ ID NO: 20052 - DNA, 15 bp, Homo sapiens
acattaataataaaa

SEQ ID NO: 20053 - DNA, 15 bp, Homo sapiens
tacattaataataaa

SEQ ID NO: 20054 - DNA, 15 bp, Homo sapiens
atacattaataataa

SEQ ID NO: 20055 - DNA, 15 bp, Homo sapiens
tatacattaataata

SEQ ID NO: 20056 - DNA, 15 bp, Homo sapiens
atatacattaataat

SEQ ID NO: 20057 - DNA, 15 bp, Homo sapiens
catatacattaataa

SEQ ID NO: 20058 - DNA, 15 bp, Homo sapiens
tcatatacattaata

SEQ ID NO: 20059 - DNA, 15 bp, Homo sapiens
atcatatacattaat

SEQ ID NO: 20060 - DNA, 15 bp, Homo sapiens
gatcatatacattaa

SEQ ID NO: 20061 - DNA, 15 bp, Homo sapiens
ggatcatatacatta

SEQ ID NO: 20062 - DNA, 15 bp, Homo sapiens
aggatcatatacatt

SEQ ID NO: 20063 - DNA, 15 bp, Homo sapiens
taggatcatatacat

SEQ ID NO: 20064 - DNA, 15 bp, Homo sapiens
ttaggatcatataca

SEQ ID NO: 20065 - DNA, 15 bp, Homo sapiens
gttaggatcatatac

SEQ ID NO: 20066 - DNA, 15 bp, Homo sapiens
tgttaggatcatata

SEQ ID NO: 20067 - DNA, 15 bp, Homo sapiens
ttgttaggatcatat

SEQ ID NO: 20068 - DNA, 15 bp, Homo sapiens
tttgttaggatcata

SEQ ID NO: 20069 - DNA, 15 bp, Homo sapiens
ttttgttaggatcat

SEQ ID NO: 20070 - DNA, 15 bp, Homo sapiens
gttttgttaggatca

SEQ ID NO: 20071 - DNA, 15 bp, Homo sapiens
tgttttgttaggatc

SEQ ID NO: 20072 - DNA, 15 bp, Homo sapiens
atgttttgttaggat

SEQ ID NO: 20073 - DNA, 15 bp, Homo sapiens
aatgttttgttagga

SEQ ID NO: 20074 - DNA, 15 bp, Homo sapiens
caatgttttgttagg

SEQ ID NO: 20075 - DNA, 15 bp, Homo sapiens
acaatgttttgttag

SEQ ID NO: 20076 - DNA, 15 bp, Homo sapiens
tacaatgttttgtta

SEQ ID NO: 20077 - DNA, 15 bp, Homo sapiens
ttacaatgttttgtt

SEQ ID NO: 20078 - DNA, 15 bp, Homo sapiens
attacaatgttttgt

SEQ ID NO: 20079 - DNA, 15 bp, Homo sapiens
tattacaatgttttg

SEQ ID NO: 20080 - DNA, 15 bp, Homo sapiens
gtattacaatgtttt

SEQ ID NO: 20081 - DNA, 15 bp, Homo sapiens
agtattacaatgttt

SEQ ID NO: 20082 - DNA, 15 bp, Homo sapiens
cagtattacaatgtt

SEQ ID NO: 20083 - DNA, 15 bp, Homo sapiens
acagtattacaatgt

SEQ ID NO: 20084 - DNA, 15 bp, Homo sapiens
aacagtattacaatg

SEQ ID NO: 20085 - DNA, 15 bp, Homo sapiens
aaacagtattacaat

SEQ ID NO: 20086 - DNA, 15 bp, Homo sapiens
gaaacagtattacaa

SEQ ID NO: 20087 - DNA, 15 bp, Homo sapiens
ggaaacagtattaca

SEQ ID NO: 20088 - DNA, 15 bp, Homo sapiens
tggaaacagtattac

SEQ ID NO: 20089 - DNA, 15 bp, Homo sapiens
atggaaacagtatta

SEQ ID NO: 20090 - DNA, 15 bp, Homo sapiens
aatggaaacagtatt

SEQ ID NO: 20091 - DNA, 15 bp, Homo sapiens
aaatggaaacagtat

SEQ ID NO: 20092 - DNA, 15 bp, Homo sapiens
aaaatggaaacagta

SEQ ID NO: 20093 - DNA, 15 bp, Homo sapiens
taaaatggaaacagt

SEQ ID NO: 20094 - DNA, 15 bp, Homo sapiens
ataaaatggaaacag

SEQ ID NO: 20095 - DNA, 15 bp, Homo sapiens
cataaaatggaaaca

SEQ ID NO: 20096 - DNA, 15 bp, Homo sapiens
tcataaaatggaaac

SEQ ID NO: 20097 - DNA, 15 bp, Homo sapiens
atcataaaatggaaa

SEQ ID NO: 20098 - DNA, 15 bp, Homo sapiens
aatcataaaatggaa

SEQ ID NO: 20099 - DNA, 15 bp, Homo sapiens
taatcataaaatgga

SEQ ID NO: 20100 - DNA, 15 bp, Homo sapiens
ataatcataaaatgg

SEQ ID NO: 20101 - DNA, 15 bp, Homo sapiens
cataatcataaaatg

SEQ ID NO: 20102 - DNA, 15 bp, Homo sapiens
tcataatcataaaat

SEQ ID NO: 20103 - DNA, 15 bp, Homo sapiens
ttcataatcataaaa

SEQ ID NO: 20104 - DNA, 15 bp, Homo sapiens
tttcataatcataaa

SEQ ID NO: 20105 - DNA, 15 bp, Homo sapiens
ttttcataatcataa

SEQ ID NO: 20106 - DNA, 15 bp, Homo sapiens
gttttcataatcata

SEQ ID NO: 20107 - DNA, 15 bp, Homo sapiens
agttttcataatcat

SEQ ID NO: 20108 - DNA, 15 bp, Homo sapiens
cagttttcataatca

SEQ ID NO: 20109 - DNA, 15 bp, Homo sapiens
ccagttttcataatc

SEQ ID NO: 20110 - DNA, 15 bp, Homo sapiens
cccagttttcataat

SEQ ID NO: 20111 - DNA, 15 bp, Homo sapiens
gcccagttttcataa

SEQ ID NO: 20112 - DNA, 15 bp, Homo sapiens
agcccagttttcata

SEQ ID NO: 20113 - DNA, 15 bp, Homo sapiens
aagcccagttttcat

SEQ ID NO: 20114 - DNA, 15 bp, Homo sapiens
gaagcccagttttca

SEQ ID NO: 20115 - DNA, 15 bp, Homo sapiens
tgaagcccagttttc

SEQ ID NO: 20116 - DNA, 15 bp, Homo sapiens
ttgaagcccagtttt

SEQ ID NO: 20117 - DNA, 15 bp, Homo sapiens
tttgaagcccagttt

SEQ ID NO: 20118 - DNA, 15 bp, Homo sapiens
ttttgaagcccagtt

SEQ ID NO: 20119 - DNA, 15 bp, Homo sapiens
tttttgaagcccagt

SEQ ID NO: 20120 - DNA, 15 bp, Homo sapiens
ctttttgaagcccag

SEQ ID NO: 20121 - DNA, 15 bp, Homo sapiens
cctttttgaagccca

SEQ ID NO: 20122 - DNA, 15 bp, Homo sapiens
ccctttttgaagccc

SEQ ID NO: 20123 - DNA, 15 bp, Homo sapiens
accctttttgaagcc

SEQ ID NO: 20124 - DNA, 15 bp, Homo sapiens
taccctttttgaagc

SEQ ID NO: 20125 - DNA, 15 bp, Homo sapiens
ctaccctttttgaag

SEQ ID NO: 20126 - DNA, 15 bp, Homo sapiens
cctaccctttttgaa

SEQ ID NO: 20127 - DNA, 15 bp, Homo sapiens
acctaccctttttga

SEQ ID NO: 20128 - DNA, 15 bp, Homo sapiens
cacctaccctttttg

SEQ ID NO: 20129 - DNA, 15 bp, Homo sapiens
tcacctacccttttt

SEQ ID NO: 20130 - DNA, 15 bp, Homo sapiens
gtcacctaccctttt

SEQ ID NO: 20131 - DNA, 15 bp, Homo sapiens
tgtcacctacccttt

SEQ ID NO: 20132 - DNA, 15 bp, Homo sapiens
ttgtcacctaccctt

SEQ ID NO: 20133 - DNA, 15 bp, Homo sapiens
attgtcacctaccct

SEQ ID NO: 20134 - DNA, 15 bp, Homo sapiens
aattgtcacctaccc

SEQ ID NO: 20135 - DNA, 15 bp, Homo sapiens
taattgtcacctacc

SEQ ID NO: 20136 - DNA, 15 bp, Homo sapiens
ctaattgtcacctac

SEQ ID NO: 20137 - DNA, 15 bp, Homo sapiens
gctaattgtcaccta

SEQ ID NO: 20138 - DNA, 15 bp, Homo sapiens
agctaattgtcacct

SEQ ID NO: 20139 - DNA, 15 bp, Homo sapiens
tagctaattgtcacc

SEQ ID NO: 20140 - DNA, 15 bp, Homo sapiens
atagctaattgtcac

SEQ ID NO: 20141 - DNA, 15 bp, Homo sapiens
aatagctaattgtca

SEQ ID NO: 20142 - DNA, 15 bp, Homo sapiens
aaatagctaattgtc

SEQ ID NO: 20143 - DNA, 15 bp, Homo sapiens
caaatagctaattgt

SEQ ID NO: 20144 - DNA, 15 bp, Homo sapiens
tcaaatagctaattg

SEQ ID NO: 20145 - DNA, 15 bp, Homo sapiens
ttcaaatagctaatt

SEQ ID NO: 20146 - DNA, 15 bp, Homo sapiens
tttcaaatagctaat

SEQ ID NO: 20147 - DNA, 15 bp, Homo sapiens
ttttcaaatagctaa

SEQ ID NO: 20148 - DNA, 15 bp, Homo sapiens
attttcaaatagcta

SEQ ID NO: 20149 - DNA, 15 bp, Homo sapiens
gattttcaaatagct

SEQ ID NO: 20150 - DNA, 15 bp, Homo sapiens
agattttcaaatagc

SEQ ID NO: 20151 - DNA, 15 bp, Homo sapiens
gagattttcaaatag

SEQ ID NO: 20152 - DNA, 15 bp, Homo sapiens
agagattttcaaata

SEQ ID NO: 20153 - DNA, 15 bp, Homo sapiens
gagagattttcaaat

SEQ ID NO: 20154 - DNA, 15 bp, Homo sapiens
tgagagattttcaaa

SEQ ID NO: 20155 - DNA, 15 bp, Homo sapiens
atgagagattttcaa

SEQ ID NO: 20156 - DNA, 15 bp, Homo sapiens
gatgagagattttca

SEQ ID NO: 20157 - DNA, 15 bp, Homo sapiens
cgatgagagattttc

SEQ ID NO: 20158 - DNA, 15 bp, Homo sapiens
ccgatgagagatttt

SEQ ID NO: 20159 - DNA, 15 bp, Homo sapiens
accgatgagagattt

SEQ ID NO: 20160 - DNA, 15 bp, Homo sapiens
aaccgatgagagatt

SEQ ID NO: 20161 - DNA, 15 bp, Homo sapiens
taaccgatgagagat

SEQ ID NO: 20162 - DNA, 15 bp, Homo sapiens
ctaaccgatgagaga

SEQ ID NO: 20163 - DNA, 15 bp, Homo sapiens
gctaaccgatgagag

SEQ ID NO: 20164 - DNA, 15 bp, Homo sapiens
tgctaaccgatgaga

SEQ ID NO: 20165 - DNA, 15 bp, Homo sapiens
ttgctaaccgatgag

SEQ ID NO: 20166 - DNA, 15 bp, Homo sapiens
tttgctaaccgatga

SEQ ID NO: 20167 - DNA, 15 bp, Homo sapiens
ctttgctaaccgatg

SEQ ID NO: 20168 - DNA, 15 bp, Homo sapiens
tctttgctaaccgat

SEQ ID NO: 20169 - DNA, 15 bp, Homo sapiens
atctttgctaaccga

SEQ ID NO: 20170 - DNA, 15 bp, Homo sapiens
gatctttgctaaccg

SEQ ID NO: 20171 - DNA, 15 bp, Homo sapiens
tgatctttgctaacc

SEQ ID NO: 20172 - DNA, 15 bp, Homo sapiens
ttgatctttgctaac

SEQ ID NO: 20173 - DNA, 15 bp, Homo sapiens
tttgatctttgctaa

SEQ ID NO: 20174 - DNA, 15 bp, Homo sapiens
ttttgatctttgcta

SEQ ID NO: 20175 - DNA, 15 bp, Homo sapiens
attttgatctttgct

SEQ ID NO: 20176 - DNA, 15 bp, Homo sapiens
cattttgatctttgc

SEQ ID NO: 20177 - DNA, 15 bp, Homo sapiens
tcattttgatctttg

SEQ ID NO: 20178 - DNA, 15 bp, Homo sapiens
atcattttgatcttt

SEQ ID NO: 20179 - DNA, 15 bp, Homo sapiens
aatcattttgatctt

SEQ ID NO: 20180 - DNA, 15 bp, Homo sapiens
gaatcattttgatct

SEQ ID NO: 20181 - DNA, 15 bp, Homo sapiens
agaatcattttgatc

SEQ ID NO: 20182 - DNA, 15 bp, Homo sapiens
tagaatcattttgat

SEQ ID NO: 20183 - DNA, 15 bp, Homo sapiens
ttagaatcattttga

SEQ ID NO: 20184 - DNA, 15 bp, Homo sapiens
tttagaatcattttg

SEQ ID NO: 20185 - DNA, 15 bp, Homo sapiens
ctttagaatcatttt

SEQ ID NO: 20186 - DNA, 15 bp, Homo sapiens
actttagaatcattt

SEQ ID NO: 20187 - DNA, 15 bp, Homo sapiens
tactttagaatcatt

SEQ ID NO: 20188 - DNA, 15 bp, Homo sapiens
ctactttagaatcat

SEQ ID NO: 20189 - DNA, 15 bp, Homo sapiens
gctactttagaatca

SEQ ID NO: 20190 - DNA, 15 bp, Homo sapiens
tgctactttagaatc

SEQ ID NO: 20191 - DNA, 15 bp, Homo sapiens
gtgctactttagaat

SEQ ID NO: 20192 - DNA, 15 bp, Homo sapiens
agtgctactttagaa

SEQ ID NO: 20193 - DNA, 15 bp, Homo sapiens
gagtgctactttaga

SEQ ID NO: 20194 - DNA, 15 bp, Homo sapiens
ggagtgctactttag

SEQ ID NO: 20195 - DNA, 15 bp, Homo sapiens
aggagtgctacttta

SEQ ID NO: 20196 - DNA, 15 bp, Homo sapiens
caggagtgctacttt

SEQ ID NO: 20197 - DNA, 15 bp, Homo sapiens
ccaggagtgctactt

SEQ ID NO: 20198 - DNA, 15 bp, Homo sapiens
tccaggagtgctact

SEQ ID NO: 20199 - DNA, 15 bp, Homo sapiens
ttccaggagtgctac

SEQ ID NO: 20200 - DNA, 15 bp, Homo sapiens
tttccaggagtgcta

SEQ ID NO: 20201 - DNA, 15 bp, Homo sapiens
atttccaggagtgct

SEQ ID NO: 20202 - DNA, 15 bp, Homo sapiens
catttccaggagtgc

SEQ ID NO: 20203 - DNA, 15 bp, Homo sapiens
tcatttccaggagtg

SEQ ID NO: 20204 - DNA, 15 bp, Homo sapiens
ttcatttccaggagt

SEQ ID NO: 20205 - DNA, 15 bp, Homo sapiens
attcatttccaggag

SEQ ID NO: 20206 - DNA, 15 bp, Homo sapiens
aattcatttccagga

SEQ ID NO: 20207 - DNA, 15 bp, Homo sapiens
caattcatttccagg

SEQ ID NO: 20208 - DNA, 15 bp, Homo sapiens
acaattcatttccag

SEQ ID NO: 20209 - DNA, 15 bp, Homo sapiens
cacaattcatttcca

SEQ ID NO: 20210 - DNA, 15 bp, Homo sapiens
tcacaattcatttcc

SEQ ID NO: 20211 - DNA, 15 bp, Homo sapiens
ctcacaattcatttc

SEQ ID NO: 20212 - DNA, 15 bp, Homo sapiens
tctcacaattcattt

SEQ ID NO: 20213 - DNA, 15 bp, Homo sapiens
gtctcacaattcatt

SEQ ID NO: 20214 - DNA, 15 bp, Homo sapiens
agtctcacaattcat

SEQ ID NO: 20215 - DNA, 15 bp, Homo sapiens
gagtctcacaattca

SEQ ID NO: 20216 - DNA, 15 bp, Homo sapiens
tgagtctcacaattc

SEQ ID NO: 20217 - DNA, 15 bp, Homo sapiens
atgagtctcacaatt

SEQ ID NO: 20218 - DNA, 15 bp, Homo sapiens
catgagtctcacaat

SEQ ID NO: 20219 - DNA, 15 bp, Homo sapiens
ccatgagtctcacaa

SEQ ID NO: 20220 - DNA, 15 bp, Homo sapiens
gccatgagtctcaca

SEQ ID NO: 20221 - DNA, 15 bp, Homo sapiens
ggccatgagtctcac

SEQ ID NO: 20222 - DNA, 15 bp, Homo sapiens
tggccatgagtctca

SEQ ID NO: 20223 - DNA, 15 bp, Homo sapiens
atggccatgagtctc

SEQ ID NO: 20224 - DNA, 15 bp, Homo sapiens
gatggccatgagtct

SEQ ID NO: 20225 - DNA, 15 bp, Homo sapiens
agatggccatgagtc

SEQ ID NO: 20226 - DNA, 15 bp, Homo sapiens
gagatggccatgagt

SEQ ID NO: 20227 - DNA, 15 bp, Homo sapiens
tgagatggccatgag

SEQ ID NO: 20228 - DNA, 15 bp, Homo sapiens
ttgagatggccatga

SEQ ID NO: 20229 - DNA, 15 bp, Homo sapiens
tttgagatggccatg

SEQ ID NO: 20230 - DNA, 15 bp, Homo sapiens
ctttgagatggccat

SEQ ID NO: 20231 - DNA, 15 bp, Homo sapiens
tctttgagatggcca

SEQ ID NO: 20232 - DNA, 15 bp, Homo sapiens
ctctttgagatggcc

SEQ ID NO: 20233 - DNA, 15 bp, Homo sapiens
actctttgagatggc

SEQ ID NO: 20234 - DNA, 15 bp, Homo sapiens
aactctttgagatgg

SEQ ID NO: 20235 - DNA, 15 bp, Homo sapiens
caactctttgagatg

SEQ ID NO: 20236 - DNA, 15 bp, Homo sapiens
acaactctttgagat

SEQ ID NO: 20237 - DNA, 15 bp, Homo sapiens
cacaactctttgaga

SEQ ID NO: 20238 - DNA, 15 bp, Homo sapiens
ccacaactctttgag

SEQ ID NO: 20239 - DNA, 15 bp, Homo sapiens
accacaactctttga

SEQ ID NO: 20240 - DNA, 15 bp, Homo sapiens
gaccacaactctttg

SEQ ID NO: 20241 - DNA, 15 bp, Homo sapiens
tgaccacaactcttt

SEQ ID NO: 20242 - DNA, 15 bp, Homo sapiens
ttgaccacaactctt

SEQ ID NO: 20243 - DNA, 15 bp, Homo sapiens
cttgaccacaactct

SEQ ID NO: 20244 - DNA, 15 bp, Homo sapiens
tcttgaccacaactc

SEQ ID NO: 20245 - DNA, 15 bp, Homo sapiens
atcttgaccacaact

SEQ ID NO: 20246 - DNA, 15 bp, Homo sapiens
gatcttgaccacaac

SEQ ID NO: 20247 - DNA, 15 bp, Homo sapiens
agatcttgaccacaa

SEQ ID NO: 20248 - DNA, 15 bp, Homo sapiens
aagatcttgaccaca

SEQ ID NO: 20249 - DNA, 15 bp, Homo sapiens
caagatcttgaccac

SEQ ID NO: 20250 - DNA, 15 bp, Homo sapiens
acaagatcttgacca

SEQ ID NO: 20251 - DNA, 15 bp, Homo sapiens
tacaagatcttgacc

SEQ ID NO: 20252 - DNA, 15 bp, Homo sapiens
ttacaagatcttgac

SEQ ID NO: 20253 - DNA, 15 bp, Homo sapiens
cttacaagatcttga

SEQ ID NO: 20254 - DNA, 15 bp, Homo sapiens
tcttacaagatcttg

SEQ ID NO: 20255 - DNA, 15 bp, Homo sapiens
ttcttacaagatctt

SEQ ID NO: 20256 - DNA, 15 bp, Homo sapiens
tttcttacaagatct

SEQ ID NO: 20257 - DNA, 15 bp, Homo sapiens
ttttcttacaagatc

SEQ ID NO: 20258 - DNA, 15 bp, Homo sapiens
attttcttacaagat

SEQ ID NO: 20259 - DNA, 15 bp, Homo sapiens
cattttcttacaaga

SEQ ID NO: 20260 - DNA, 15 bp, Homo sapiens
acattttcttacaag

SEQ ID NO: 20261 - DNA, 15 bp, Homo sapiens
cacattttcttacaa

SEQ ID NO: 20262 - DNA, 15 bp, Homo sapiens
acacattttcttaca

SEQ ID NO: 20263 - DNA, 15 bp, Homo sapiens
tacacattttcttac

SEQ ID NO: 20264 - DNA, 15 bp, Homo sapiens
atacacattttctta

SEQ ID NO: 20265 - DNA, 15 bp, Homo sapiens
catacacattttctt

SEQ ID NO: 20266 - DNA, 15 bp, Homo sapiens
acatacacattttct

SEQ ID NO: 20267 - DNA, 15 bp, Homo sapiens
tacatacacattttc

SEQ ID NO: 20268 - DNA, 15 bp, Homo sapiens
ttacatacacatttt

SEQ ID NO: 20269 - DNA, 15 bp, Homo sapiens
tttacatacacattt

SEQ ID NO: 20270 - DNA, 15 bp, Homo sapiens
gtttacatacacatt

SEQ ID NO: 20271 - DNA, 15 bp, Homo sapiens
ggtttacatacacat

SEQ ID NO: 20272 - DNA, 15 bp, Homo sapiens
tggtttacatacaca

SEQ ID NO: 20273 - DNA, 15 bp, Homo sapiens
atggtttacatacac

SEQ ID NO: 20274 - DNA, 15 bp, Homo sapiens
gatggtttacataca

SEQ ID NO: 20275 - DNA, 15 bp, Homo sapiens
agatggtttacatac

SEQ ID NO: 20276 - DNA, 15 bp, Homo sapiens
cagatggtttacata

SEQ ID NO: 20277 - DNA, 15 bp, Homo sapiens
tcagatggtttacat

SEQ ID NO: 20278 - DNA, 15 bp, Homo sapiens
atcagatggtttaca

SEQ ID NO: 20279 - DNA, 15 bp, Homo sapiens
tatcagatggtttac

SEQ ID NO: 20280 - DNA, 15 bp, Homo sapiens
ttatcagatggttta

SEQ ID NO: 20281 - DNA, 15 bp, Homo sapiens
attatcagatggttt

SEQ ID NO: 20282 - DNA, 15 bp, Homo sapiens
cattatcagatggtt

SEQ ID NO: 20283 - DNA, 15 bp, Homo sapiens
ccattatcagatggt

SEQ ID NO: 20284 - DNA, 15 bp, Homo sapiens
cccattatcagatgg

SEQ ID NO: 20285 - DNA, 15 bp, Homo sapiens
tcccattatcagatg

SEQ ID NO: 20286 - DNA, 15 bp, Homo sapiens
ctcccattatcagat

SEQ ID NO: 20287 - DNA, 15 bp, Homo sapiens
tctcccattatcaga

SEQ ID NO: 20288 - DNA, 15 bp, Homo sapiens
gtctcccattatcag

SEQ ID NO: 20289 - DNA, 15 bp, Homo sapiens
ggtctcccattatca

SEQ ID NO: 20290 - DNA, 15 bp, Homo sapiens
gggtctcccattatc

SEQ ID NO: 20291 - DNA, 15 bp, Homo sapiens
tgggtctcccattat

SEQ ID NO: 20292 - DNA, 15 bp, Homo sapiens
ctgggtctcccatta

SEQ ID NO: 20293 - DNA, 15 bp, Homo sapiens
tctgggtctcccatt

SEQ ID NO: 20294 - DNA, 15 bp, Homo sapiens
atctgggtctcccat

SEQ ID NO: 20295 - DNA, 15 bp, Homo sapiens
aatctgggtctccca

SEQ ID NO: 20296 - DNA, 15 bp, Homo sapiens
taatctgggtctccc

SEQ ID NO: 20297 - DNA, 15 bp, Homo sapiens
ttaatctgggtctcc

SEQ ID NO: 20298 - DNA, 15 bp, Homo sapiens
tttaatctgggtctc

SEQ ID NO: 20299 - DNA, 15 bp, Homo sapiens
atttaatctgggtct

SEQ ID NO: 20300 - DNA, 15 bp, Homo sapiens
gatttaatctgggtc

SEQ ID NO: 20301 - DNA, 15 bp, Homo sapiens
agatttaatctgggt

SEQ ID NO: 20302 - DNA, 15 bp, Homo sapiens
cagatttaatctggg

SEQ ID NO: 20303 - DNA, 15 bp, Homo sapiens
ccagatttaatctgg

SEQ ID NO: 20304 - DNA, 15 bp, Homo sapiens
cccagatttaatctg

SEQ ID NO: 20305 - DNA, 15 bp, Homo sapiens
acccagatttaatct

SEQ ID NO: 20306 - DNA, 15 bp, Homo sapiens
cacccagatttaatc

SEQ ID NO: 20307 - DNA, 15 bp, Homo sapiens
ccacccagatttaat

SEQ ID NO: 20308 - DNA, 15 bp, Homo sapiens
accacccagatttaa

SEQ ID NO: 20309 - DNA, 15 bp, Homo sapiens
taccacccagattta

SEQ ID NO: 20310 - DNA, 15 bp, Homo sapiens
ctaccacccagattt

SEQ ID NO: 20311 - DNA, 15 bp, Homo sapiens
gctaccacccagatt

SEQ ID NO: 20312 - DNA, 15 bp, Homo sapiens
agctaccacccagat

SEQ ID NO: 20313 - DNA, 15 bp, Homo sapiens
tagctaccacccaga

SEQ ID NO: 20314 - DNA, 15 bp, Homo sapiens
atagctaccacccag

SEQ ID NO: 20315 - DNA, 15 bp, Homo sapiens
tatagctaccaccca

SEQ ID NO: 20316 - DNA, 15 bp, Homo sapiens
ttatagctaccaccc

SEQ ID NO: 20317 - DNA, 15 bp, Homo sapiens
cttatagctaccacc

SEQ ID NO: 20318 - DNA, 15 bp, Homo sapiens
tcttatagctaccac

SEQ ID NO: 20319 - DNA, 15 bp, Homo sapiens
atcttatagctacca

SEQ ID NO: 20320 - DNA, 15 bp, Homo sapiens
catcttatagctacc

SEQ ID NO: 20321 - DNA, 15 bp, Homo sapiens
ccatcttatagctac

SEQ ID NO: 20322 - DNA, 15 bp, Homo sapiens
cccatcttatagcta

SEQ ID NO: 20323 - DNA, 15 bp, Homo sapiens
ccccatcttatagct

SEQ ID NO: 20324 - DNA, 15 bp, Homo sapiens
tccccatcttatagc

SEQ ID NO: 20325 - DNA, 15 bp, Homo sapiens
ctccccatcttatag

SEQ ID NO: 20326 - DNA, 15 bp, Homo sapiens
cctccccatcttata

SEQ ID NO: 20327 - DNA, 15 bp, Homo sapiens
gcctccccatcttat

SEQ ID NO: 20328 - DNA, 15 bp, Homo sapiens
tgcctccccatctta

SEQ ID NO: 20329 - DNA, 15 bp, Homo sapiens
gtgcctccccatctt

SEQ ID NO: 20330 - DNA, 15 bp, Homo sapiens
tgtgcctccccatct

SEQ ID NO: 20331 - DNA, 15 bp, Homo sapiens
ttgtgcctccccatc

SEQ ID NO: 20332 - DNA, 15 bp, Homo sapiens
gttgtgcctccccat

SEQ ID NO: 20333 - DNA, 15 bp, Homo sapiens
agttgtgcctcccca

SEQ ID NO: 20334 - DNA, 15 bp, Homo sapiens
aagttgtgcctcccc

SEQ ID NO: 20335 - DNA, 15 bp, Homo sapiens
gaagttgtgcctccc

SEQ ID NO: 20336 - DNA, 15 bp, Homo sapiens
tgaagttgtgcctcc

SEQ ID NO: 20337 - DNA, 15 bp, Homo sapiens
atgaagttgtgcctc

SEQ ID NO: 20338 - DNA, 15 bp, Homo sapiens
tatgaagttgtgcct

SEQ ID NO: 20339 - DNA, 15 bp, Homo sapiens
ttatgaagttgtgcc

SEQ ID NO: 20340 - DNA, 15 bp, Homo sapiens
attatgaagttgtgc

SEQ ID NO: 20341 - DNA, 15 bp, Homo sapiens
cattatgaagttgtg

SEQ ID NO: 20342 - DNA, 15 bp, Homo sapiens
ccattatgaagttgt

SEQ ID NO: 20343 - DNA, 15 bp, Homo sapiens
tccattatgaagttg

SEQ ID NO: 20344 - DNA, 15 bp, Homo sapiens
gtccattatgaagtt

SEQ ID NO: 20345 - DNA, 15 bp, Homo sapiens
agtccattatgaagt

SEQ ID NO: 20346 - DNA, 15 bp, Homo sapiens
aagtccattatgaag

SEQ ID NO: 20347 - DNA, 15 bp, Homo sapiens
aaagtccattatgaa

SEQ ID NO: 20348 - DNA, 15 bp, Homo sapiens
caaagtccattatga

SEQ ID NO: 20349 - DNA, 15 bp, Homo sapiens
ccaaagtccattatg

SEQ ID NO: 20350 - DNA, 15 bp, Homo sapiens
tccaaagtccattat

SEQ ID NO: 20351 - DNA, 15 bp, Homo sapiens
ttccaaagtccatta

SEQ ID NO: 20352 - DNA, 15 bp, Homo sapiens
gttccaaagtccatt

SEQ ID NO: 20353 - DNA, 15 bp, Homo sapiens
ggttccaaagtccat

SEQ ID NO: 20354 - DNA, 15 bp, Homo sapiens
tggttccaaagtcca

SEQ ID NO: 20355 - DNA, 15 bp, Homo sapiens
ctggttccaaagtcc

SEQ ID NO: 20356 - DNA, 15 bp, Homo sapiens
tctggttccaaagtc

SEQ ID NO: 20357 - DNA, 15 bp, Homo sapiens
ttctggttccaaagt

SEQ ID NO: 20358 - DNA, 15 bp, Homo sapiens
tttctggttccaaag

SEQ ID NO: 20359 - DNA, 15 bp, Homo sapiens
ttttctggttccaaa

SEQ ID NO: 20360 - DNA, 15 bp, Homo sapiens
gttttctggttccaa

SEQ ID NO: 20361 - DNA, 15 bp, Homo sapiens
agttttctggttcca

SEQ ID NO: 20362 - DNA, 15 bp, Homo sapiens
aagttttctggttcc

SEQ ID NO: 20363 - DNA, 15 bp, Homo sapiens
aaagttttctggttc

SEQ ID NO: 20364 - DNA, 15 bp, Homo sapiens
caaagttttctggtt

SEQ ID NO: 20365 - DNA, 15 bp, Homo sapiens
ccaaagttttctggt

SEQ ID NO: 20366 - DNA, 15 bp, Homo sapiens
cccaaagttttctgg

SEQ ID NO: 20367 - DNA, 15 bp, Homo sapiens
acccaaagttttctg

SEQ ID NO: 20368 - DNA, 15 bp, Homo sapiens
aacccaaagttttct

SEQ ID NO: 20369 - DNA, 15 bp, Homo sapiens
aaacccaaagttttc

SEQ ID NO: 20370 - DNA, 15 bp, Homo sapiens
caaacccaaagtttt

SEQ ID NO: 20371 - DNA, 15 bp, Homo sapiens
tcaaacccaaagttt

SEQ ID NO: 20372 - DNA, 15 bp, Homo sapiens
ttcaaacccaaagtt

SEQ ID NO: 20373 - DNA, 15 bp, Homo sapiens
cttcaaacccaaagt

SEQ ID NO: 20374 - DNA, 15 bp, Homo sapiens
acttcaaacccaaag

SEQ ID NO: 20375 - DNA, 15 bp, Homo sapiens
aacttcaaacccaaa

SEQ ID NO: 20376 - DNA, 15 bp, Homo sapiens
aaacttcaaacccaa

SEQ ID NO: 20377 - DNA, 15 bp, Homo sapiens
taaacttcaaaccca

SEQ ID NO: 20378 - DNA, 15 bp, Homo sapiens
ctaaacttcaaaccc

SEQ ID NO: 20379 - DNA, 15 bp, Homo sapiens
gctaaacttcaaacc

SEQ ID NO: 20380 - DNA, 15 bp, Homo sapiens
agctaaacttcaaac

SEQ ID NO: 20381 - DNA, 15 bp, Homo sapiens
aagctaaacttcaaa

SEQ ID NO: 20382 - DNA, 15 bp, Homo sapiens
gaagctaaacttcaa

SEQ ID NO: 20383 - DNA, 15 bp, Homo sapiens
agaagctaaacttca

SEQ ID NO: 20384 - DNA, 15 bp, Homo sapiens
gagaagctaaacttc

SEQ ID NO: 20385 - DNA, 15 bp, Homo sapiens
ggagaagctaaactt

SEQ ID NO: 20386 - DNA, 15 bp, Homo sapiens
tggagaagctaaact

SEQ ID NO: 20387 - DNA, 15 bp, Homo sapiens
gtggagaagctaaac

SEQ ID NO: 20388 - DNA, 15 bp, Homo sapiens
agtggagaagctaaa

SEQ ID NO: 20389 - DNA, 15 bp, Homo sapiens
aagtggagaagctaa

SEQ ID NO: 20390 - DNA, 15 bp, Homo sapiens
gaagtggagaagcta

SEQ ID NO: 20391 - DNA, 15 bp, Homo sapiens
tgaagtggagaagct

SEQ ID NO: 20392 - DNA, 15 bp, Homo sapiens
ctgaagtggagaagc

SEQ ID NO: 20393 - DNA, 15 bp, Homo sapiens
tctgaagtggagaag

SEQ ID NO: 20394 - DNA, 15 bp, Homo sapiens
atctgaagtggagaa

SEQ ID NO: 20395 - DNA, 15 bp, Homo sapiens
aatctgaagtggaga

SEQ ID NO: 20396 - DNA, 15 bp, Homo sapiens
aaatctgaagtggag

SEQ ID NO: 20397 - DNA, 15 bp, Homo sapiens
aaaatctgaagtgga

SEQ ID NO: 20398 - DNA, 15 bp, Homo sapiens
gaaaatctgaagtgg

SEQ ID NO: 20399 - DNA, 15 bp, Homo sapiens
agaaaatctgaagtg

SEQ ID NO: 20400 - DNA, 15 bp, Homo sapiens
cagaaaatctgaagt

SEQ ID NO: 20401 - DNA, 15 bp, Homo sapiens
acagaaaatctgaag

SEQ ID NO: 20402 - DNA, 15 bp, Homo sapiens
cacagaaaatctgaa

SEQ ID NO: 20403 - DNA, 15 bp, Homo sapiens
acacagaaaatctga

SEQ ID NO: 20404 - DNA, 15 bp, Homo sapiens
aacacagaaaatctg

SEQ ID NO: 20405 - DNA, 15 bp, Homo sapiens
taacacagaaaatct

SEQ ID NO: 20406 - DNA, 15 bp, Homo sapiens
ctaacacagaaaatc

SEQ ID NO: 20407 - DNA, 15 bp, Homo sapiens
actaacacagaaaat

SEQ ID NO: 20408 - DNA, 15 bp, Homo sapiens
aactaacacagaaaa

SEQ ID NO: 20409 - DNA, 15 bp, Homo sapiens
aaactaacacagaaa

SEQ ID NO: 20410 - DNA, 15 bp, Homo sapiens
caaactaacacagaa

SEQ ID NO: 20411 - DNA, 15 bp, Homo sapiens
ccaaactaacacaga

SEQ ID NO: 20412 - DNA, 15 bp, Homo sapiens
cccaaactaacacag

SEQ ID NO: 20413 - DNA, 15 bp, Homo sapiens
gcccaaactaacaca

SEQ ID NO: 20414 - DNA, 15 bp, Homo sapiens
tgcccaaactaacac

SEQ ID NO: 20415 - DNA, 15 bp, Homo sapiens
ttgcccaaactaaca

SEQ ID NO: 20416 - DNA, 15 bp, Homo sapiens
cttgcccaaactaac

SEQ ID NO: 20417 - DNA, 15 bp, Homo sapiens
acttgcccaaactaa

SEQ ID NO: 20418 - DNA, 15 bp, Homo sapiens
aacttgcccaaacta

SEQ ID NO: 20419 - DNA, 15 bp, Homo sapiens
taacttgcccaaact

SEQ ID NO: 20420 - DNA, 15 bp, Homo sapiens
gtaacttgcccaaac

SEQ ID NO: 20421 - DNA, 15 bp, Homo sapiens
agtaacttgcccaaa

SEQ ID NO: 20422 - DNA, 15 bp, Homo sapiens
aagtaacttgcccaa

SEQ ID NO: 20423 - DNA, 15 bp, Homo sapiens
taagtaacttgccca

SEQ ID NO: 20424 - DNA, 15 bp, Homo sapiens
ttaagtaacttgccc

SEQ ID NO: 20425 - DNA, 15 bp, Homo sapiens
tttaagtaacttgcc

SEQ ID NO: 20426 - DNA, 15 bp, Homo sapiens
atttaagtaacttgc

SEQ ID NO: 20427 - DNA, 15 bp, Homo sapiens
aatttaagtaacttg

SEQ ID NO: 20428 - DNA, 15 bp, Homo sapiens
gaatttaagtaactt

SEQ ID NO: 20429 - DNA, 15 bp, Homo sapiens
agaatttaagtaact

SEQ ID NO: 20430 - DNA, 15 bp, Homo sapiens
gagaatttaagtaac

SEQ ID NO: 20431 - DNA, 15 bp, Homo sapiens
agagaatttaagtaa

SEQ ID NO: 20432 - DNA, 15 bp, Homo sapiens
cagagaatttaagta

SEQ ID NO: 20433 - DNA, 15 bp, Homo sapiens
tcagagaatttaagt

SEQ ID NO: 20434 - DNA, 15 bp, Homo sapiens
ctcagagaatttaag

SEQ ID NO: 20435 - DNA, 15 bp, Homo sapiens
gctcagagaatttaa

SEQ ID NO: 20436 - DNA, 15 bp, Homo sapiens
agctcagagaattta

SEQ ID NO: 20437 - DNA, 15 bp, Homo sapiens
gagctcagagaattt

SEQ ID NO: 20438 - DNA, 15 bp, Homo sapiens
agagctcagagaatt

SEQ ID NO: 20439 - DNA, 15 bp, Homo sapiens
tagagctcagagaat

SEQ ID NO: 20440 - DNA, 15 bp, Homo sapiens
ctagagctcagagaa

SEQ ID NO: 20441 - DNA, 15 bp, Homo sapiens
actagagctcagaga

SEQ ID NO: 20442 - DNA, 15 bp, Homo sapiens
aactagagctcagag

SEQ ID NO: 20443 - DNA, 15 bp, Homo sapiens
aaactagagctcaga

SEQ ID NO: 20444 - DNA, 15 bp, Homo sapiens
aaaactagagctcag

SEQ ID NO: 20445 - DNA, 15 bp, Homo sapiens
gaaaactagagctca

SEQ ID NO: 20446 - DNA, 15 bp, Homo sapiens
agaaaactagagctc

SEQ ID NO: 20447 - DNA, 15 bp, Homo sapiens
aagaaaactagagct

SEQ ID NO: 20448 - DNA, 15 bp, Homo sapiens
taagaaaactagagc

SEQ ID NO: 20449 - DNA, 15 bp, Homo sapiens
ttaagaaaactagag

SEQ ID NO: 20450 - DNA, 15 bp, Homo sapiens
attaagaaaactaga

SEQ ID NO: 20451 - DNA, 15 bp, Homo sapiens
gattaagaaaactag

SEQ ID NO: 20452 - DNA, 15 bp, Homo sapiens
agattaagaaaacta

SEQ ID NO: 20453 - DNA, 15 bp, Homo sapiens
tagattaagaaaact

SEQ ID NO: 20454 - DNA, 15 bp, Homo sapiens
atagattaagaaaac

SEQ ID NO: 20455 - DNA, 15 bp, Homo sapiens
gatagattaagaaaa

SEQ ID NO: 20456 - DNA, 15 bp, Homo sapiens
agatagattaagaaa

SEQ ID NO: 20457 - DNA, 15 bp, Homo sapiens
gagatagattaagaa

SEQ ID NO: 20458 - DNA, 15 bp, Homo sapiens
agagatagattaaga

SEQ ID NO: 20459 - DNA, 15 bp, Homo sapiens
cagagatagattaag

SEQ ID NO: 20460 - DNA, 15 bp, Homo sapiens
tcagagatagattaa

SEQ ID NO: 20461 - DNA, 15 bp, Homo sapiens
ctcagagatagatta

SEQ ID NO: 20462 - DNA, 15 bp, Homo sapiens
tctcagagatagatt

SEQ ID NO: 20463 - DNA, 15 bp, Homo sapiens
ctctcagagatagat

SEQ ID NO: 20464 - DNA, 15 bp, Homo sapiens
actctcagagataga

SEQ ID NO: 20465 - DNA, 15 bp, Homo sapiens
aactctcagagatag

SEQ ID NO: 20466 - DNA, 15 bp, Homo sapiens
taactctcagagata

SEQ ID NO: 20467 - DNA, 15 bp, Homo sapiens
gtaactctcagagat

SEQ ID NO: 20468 - DNA, 15 bp, Homo sapiens
agtaactctcagaga

SEQ ID NO: 20469 - DNA, 15 bp, Homo sapiens
aagtaactctcagag

SEQ ID NO: 20470 - DNA, 15 bp, Homo sapiens
aaagtaactctcaga

SEQ ID NO: 20471 - DNA, 15 bp, Homo sapiens
taaagtaactctcag

SEQ ID NO: 20472 - DNA, 15 bp, Homo sapiens
ttaaagtaactctca

SEQ ID NO: 20473 - DNA, 15 bp, Homo sapiens
cttaaagtaactctc

SEQ ID NO: 20474 - DNA, 15 bp, Homo sapiens
tcttaaagtaactct

SEQ ID NO: 20475 - DNA, 15 bp, Homo sapiens
ctcttaaagtaactc

SEQ ID NO: 20476 - DNA, 15 bp, Homo sapiens
actcttaaagtaact

SEQ ID NO: 20477 - DNA, 15 bp, Homo sapiens
aactcttaaagtaac

SEQ ID NO: 20478 - DNA, 15 bp, Homo sapiens
taactcttaaagtaa

SEQ ID NO: 20479 - DNA, 15 bp, Homo sapiens
ttaactcttaaagta

SEQ ID NO: 20480 - DNA, 15 bp, Homo sapiens
cttaactcttaaagt

SEQ ID NO: 20481 - DNA, 15 bp, Homo sapiens
acttaactcttaaag

SEQ ID NO: 20482 - DNA, 15 bp, Homo sapiens
tacttaactcttaaa

SEQ ID NO: 20483 - DNA, 15 bp, Homo sapiens
ttacttaactcttaa

SEQ ID NO: 20484 - DNA, 15 bp, Homo sapiens
attacttaactctta

SEQ ID NO: 20485 - DNA, 15 bp, Homo sapiens
tattacttaactctt

SEQ ID NO: 20486 - DNA, 15 bp, Homo sapiens
atattacttaactct

SEQ ID NO: 20487 - DNA, 15 bp, Homo sapiens
tatattacttaactc

SEQ ID NO: 20488 - DNA, 15 bp, Homo sapiens
atatattacttaact

SEQ ID NO: 20489 - DNA, 15 bp, Homo sapiens
catatattacttaac

SEQ ID NO: 20490 - DNA, 15 bp, Homo sapiens
gcatatattacttaa

SEQ ID NO: 20491 - DNA, 15 bp, Homo sapiens
ggcatatattactta

SEQ ID NO: 20492 - DNA, 15 bp, Homo sapiens
tggcatatattactt

SEQ ID NO: 20493 - DNA, 15 bp, Homo sapiens
ttggcatatattact

SEQ ID NO: 20494 - DNA, 15 bp, Homo sapiens
tttggcatatattac

SEQ ID NO: 20495 - DNA, 15 bp, Homo sapiens
atttggcatatatta

SEQ ID NO: 20496 - DNA, 15 bp, Homo sapiens
tatttggcatatatt

SEQ ID NO: 20497 - DNA, 15 bp, Homo sapiens
gtatttggcatatat

SEQ ID NO: 20498 - DNA, 15 bp, Homo sapiens
tgtatttggcatata

SEQ ID NO: 20499 - DNA, 15 bp, Homo sapiens
ttgtatttggcatat

SEQ ID NO: 20500 - DNA, 15 bp, Homo sapiens
tttgtatttggcata

SEQ ID NO: 20501 - DNA, 15 bp, Homo sapiens
ttttgtatttggcat

SEQ ID NO: 20502 - DNA, 15 bp, Homo sapiens
gttttgtatttggca

SEQ ID NO: 20503 - DNA, 15 bp, Homo sapiens
tgttttgtatttggc

SEQ ID NO: 20504 - DNA, 15 bp, Homo sapiens
ttgttttgtatttgg

SEQ ID NO: 20505 - DNA, 15 bp, Homo sapiens
tttgttttgtatttg

SEQ ID NO: 20506 - DNA, 15 bp, Homo sapiens
atttgttttgtattt

SEQ ID NO: 20507 - DNA, 15 bp, Homo sapiens
tatttgttttgtatt

SEQ ID NO: 20508 - DNA, 15 bp, Homo sapiens
ttatttgttttgtat

SEQ ID NO: 20509 - DNA, 15 bp, Homo sapiens
gttatttgttttgta

SEQ ID NO: 20510 - DNA, 15 bp, Homo sapiens
tgttatttgttttgt

SEQ ID NO: 20511 - DNA, 15 bp, Homo sapiens
ctgttatttgttttg

SEQ ID NO: 20512 - DNA, 15 bp, Homo sapiens
gctgttatttgtttt

SEQ ID NO: 20513 - DNA, 15 bp, Homo sapiens
tgctgttatttgttt

SEQ ID NO: 20514 - DNA, 15 bp, Homo sapiens
gtgctgttatttgtt

SEQ ID NO: 20515 - DNA, 15 bp, Homo sapiens
agtgctgttatttgt

SEQ ID NO: 20516 - DNA, 15 bp, Homo sapiens
cagtgctgttatttg

SEQ ID NO: 20517 - DNA, 15 bp, Homo sapiens
ccagtgctgttattt

SEQ ID NO: 20518 - DNA, 15 bp, Homo sapiens
tccagtgctgttatt

SEQ ID NO: 20519 - DNA, 15 bp, Homo sapiens
atccagtgctgttat

SEQ ID NO: 20520 - DNA, 15 bp, Homo sapiens
catccagtgctgtta

SEQ ID NO: 20521 - DNA, 15 bp, Homo sapiens
tcatccagtgctgtt

SEQ ID NO: 20522 - DNA, 15 bp, Homo sapiens
ttcatccagtgctgt

SEQ ID NO: 20523 - DNA, 15 bp, Homo sapiens
attcatccagtgctg

SEQ ID NO: 20524 - DNA, 15 bp, Homo sapiens
cattcatccagtgct

SEQ ID NO: 20525 - DNA, 15 bp, Homo sapiens
gcattcatccagtgc

SEQ ID NO: 20526 - DNA, 15 bp, Homo sapiens
tgcattcatccagtg

SEQ ID NO: 20527 - DNA, 15 bp, Homo sapiens
ctgcattcatccagt

SEQ ID NO: 20528 - DNA, 15 bp, Homo sapiens
tctgcattcatccag

SEQ ID NO: 20529 - DNA, 15 bp, Homo sapiens
ctctgcattcatcca

SEQ ID NO: 20530 - DNA, 15 bp, Homo sapiens
actctgcattcatcc

SEQ ID NO: 20531 - DNA, 15 bp, Homo sapiens
tactctgcattcatc

SEQ ID NO: 20532 - DNA, 15 bp, Homo sapiens
ttactctgcattcat

SEQ ID NO: 20533 - DNA, 15 bp, Homo sapiens
tttactctgcattca

SEQ ID NO: 20534 - DNA, 15 bp, Homo sapiens
atttactctgcattc

SEQ ID NO: 20535 - DNA, 15 bp, Homo sapiens
catttactctgcatt

SEQ ID NO: 20536 - DNA, 15 bp, Homo sapiens
acatttactctgcat

SEQ ID NO: 20537 - DNA, 15 bp, Homo sapiens
gacatttactctgca

SEQ ID NO: 20538 - DNA, 15 bp, Homo sapiens
tgacatttactctgc

SEQ ID NO: 20539 - DNA, 15 bp, Homo sapiens
atgacatttactctg

SEQ ID NO: 20540 - DNA, 15 bp, Homo sapiens
gatgacatttactct

SEQ ID NO: 20541 - DNA, 15 bp, Homo sapiens
ggatgacatttactc

SEQ ID NO: 20542 - DNA, 15 bp, Homo sapiens
gggatgacatttact

SEQ ID NO: 20543 - DNA, 15 bp, Homo sapiens
tgggatgacatttac

SEQ ID NO: 20544 - DNA, 15 bp, Homo sapiens
gtgggatgacattta

SEQ ID NO: 20545 - DNA, 15 bp, Homo sapiens
tgtgggatgacattt

SEQ ID NO: 20546 - DNA, 15 bp, Homo sapiens
atgtgggatgacatt

SEQ ID NO: 20547 - DNA, 15 bp, Homo sapiens
gatgtgggatgacat

SEQ ID NO: 20548 - DNA, 15 bp, Homo sapiens
tgatgtgggatgaca

SEQ ID NO: 20549 - DNA, 15 bp, Homo sapiens
atgatgtgggatgac

SEQ ID NO: 20550 - DNA, 15 bp, Homo sapiens
aatgatgtgggatga

SEQ ID NO: 20551 - DNA, 15 bp, Homo sapiens
taatgatgtgggatg

SEQ ID NO: 20552 - DNA, 15 bp, Homo sapiens
ataatgatgtgggat

SEQ ID NO: 20553 - DNA, 15 bp, Homo sapiens
tataatgatgtggga

SEQ ID NO: 20554 - DNA, 15 bp, Homo sapiens
ttataatgatgtggg

SEQ ID NO: 20555 - DNA, 15 bp, Homo sapiens
attataatgatgtgg

SEQ ID NO: 20556 - DNA, 15 bp, Homo sapiens
aattataatgatgtg

SEQ ID NO: 20557 - DNA, 15 bp, Homo sapiens
aaattataatgatgt

SEQ ID NO: 20558 - DNA, 15 bp, Homo sapiens
gaaattataatgatg

SEQ ID NO: 20559 - DNA, 15 bp, Homo sapiens
ggaaattataatgat

SEQ ID NO: 20560 - DNA, 15 bp, Homo sapiens
gggaaattataatga

SEQ ID NO: 20561 - DNA, 15 bp, Homo sapiens
tgggaaattataatg

SEQ ID NO: 20562 - DNA, 15 bp, Homo sapiens
atgggaaattataat

SEQ ID NO: 20563 - DNA, 15 bp, Homo sapiens
catgggaaattataa

SEQ ID NO: 20564 - DNA, 15 bp, Homo sapiens
ccatgggaaattata

SEQ ID NO: 20565 - DNA, 15 bp, Homo sapiens
accatgggaaattat

SEQ ID NO: 20566 - DNA, 15 bp, Homo sapiens
caccatgggaaatta

SEQ ID NO: 20567 - DNA, 15 bp, Homo sapiens
acaccatgggaaatt

SEQ ID NO: 20568 - DNA, 15 bp, Homo sapiens
tacaccatgggaaat

SEQ ID NO: 20569 - DNA, 15 bp, Homo sapiens
ctacaccatgggaaa

SEQ ID NO: 20570 - DNA, 15 bp, Homo sapiens
actacaccatgggaa

SEQ ID NO: 20571 - DNA, 15 bp, Homo sapiens
tactacaccatggga

SEQ ID NO: 20572 - DNA, 15 bp, Homo sapiens
ttactacaccatggg

SEQ ID NO: 20573 - DNA, 15 bp, Homo sapiens
attactacaccatgg

SEQ ID NO: 20574 - DNA, 15 bp, Homo sapiens
cattactacaccatg

SEQ ID NO: 20575 - DNA, 15 bp, Homo sapiens
tcattactacaccat

SEQ ID NO: 20576 - DNA, 15 bp, Homo sapiens
gtcattactacacca

SEQ ID NO: 20577 - DNA, 15 bp, Homo sapiens
tgtcattactacacc

SEQ ID NO: 20578 - DNA, 15 bp, Homo sapiens
ttgtcattactacac

SEQ ID NO: 20579 - DNA, 15 bp, Homo sapiens
tttgtcattactaca

SEQ ID NO: 20580 - DNA, 15 bp, Homo sapiens
gtttgtcattactac

SEQ ID NO: 20581 - DNA, 15 bp, Homo sapiens
tgtttgtcattacta

SEQ ID NO: 20582 - DNA, 15 bp, Homo sapiens
ctgtttgtcattact

SEQ ID NO: 20583 - DNA, 15 bp, Homo sapiens
cctgtttgtcattac

SEQ ID NO: 20584 - DNA, 15 bp, Homo sapiens
tcctgtttgtcatta

SEQ ID NO: 20585 - DNA, 15 bp, Homo sapiens
ttcctgtttgtcatt

SEQ ID NO: 20586 - DNA, 15 bp, Homo sapiens
cttcctgtttgtcat

SEQ ID NO: 20587 - DNA, 15 bp, Homo sapiens
tcttcctgtttgtca

SEQ ID NO: 20588 - DNA, 15 bp, Homo sapiens
ctcttcctgtttgtc

SEQ ID NO: 20589 - DNA, 15 bp, Homo sapiens
actcttcctgtttgt

SEQ ID NO: 20590 - DNA, 15 bp, Homo sapiens
aactcttcctgtttg

SEQ ID NO: 20591 - DNA, 15 bp, Homo sapiens
aaactcttcctgttt

SEQ ID NO: 20592 - DNA, 15 bp, Homo sapiens
gaaactcttcctgtt

SEQ ID NO: 20593 - DNA, 15 bp, Homo sapiens
tgaaactcttcctgt

SEQ ID NO: 20594 - DNA, 15 bp, Homo sapiens
ctgaaactcttcctg

SEQ ID NO: 20595 - DNA, 15 bp, Homo sapiens
actgaaactcttcct

SEQ ID NO: 20596 - DNA, 15 bp, Homo sapiens
tactgaaactcttcc

SEQ ID NO: 20597 - DNA, 15 bp, Homo sapiens
ttactgaaactcttc

SEQ ID NO: 20598 - DNA, 15 bp, Homo sapiens
attactgaaactctt

SEQ ID NO: 20599 - DNA, 15 bp, Homo sapiens
gattactgaaactct

SEQ ID NO: 20600 - DNA, 15 bp, Homo sapiens
agattactgaaactc

SEQ ID NO: 20601 - DNA, 15 bp, Homo sapiens
gagattactgaaact

SEQ ID NO: 20602 - DNA, 15 bp, Homo sapiens
agagattactgaaac

SEQ ID NO: 20603 - DNA, 15 bp, Homo sapiens
aagagattactgaaa

SEQ ID NO: 20604 - DNA, 15 bp, Homo sapiens
caagagattactgaa

SEQ ID NO: 20605 - DNA, 15 bp, Homo sapiens
ccaagagattactga

SEQ ID NO: 20606 - DNA, 15 bp, Homo sapiens
cccaagagattactg

SEQ ID NO: 20607 - DNA, 15 bp, Homo sapiens
acccaagagattact

SEQ ID NO: 20608 - DNA, 15 bp, Homo sapiens
aacccaagagattac

SEQ ID NO: 20609 - DNA, 15 bp, Homo sapiens
taacccaagagatta

SEQ ID NO: 20610 - DNA, 15 bp, Homo sapiens
ctaacccaagagatt

SEQ ID NO: 20611 - DNA, 15 bp, Homo sapiens
actaacccaagagat

SEQ ID NO: 20612 - DNA, 15 bp, Homo sapiens
cactaacccaagaga

SEQ ID NO: 20613 - DNA, 15 bp, Homo sapiens
tcactaacccaagag

SEQ ID NO: 20614 - DNA, 15 bp, Homo sapiens
ctcactaacccaaga

SEQ ID NO: 20615 - DNA, 15 bp, Homo sapiens
cctcactaacccaag

SEQ ID NO: 20616 - DNA, 15 bp, Homo sapiens
acctcactaacccaa

SEQ ID NO: 20617 - DNA, 15 bp, Homo sapiens
gacctcactaaccca

SEQ ID NO: 20618 - DNA, 15 bp, Homo sapiens
tgacctcactaaccc

SEQ ID NO: 20619 - DNA, 15 bp, Homo sapiens
ctgacctcactaacc

SEQ ID NO: 20620 - DNA, 15 bp, Homo sapiens
tctgacctcactaac

SEQ ID NO: 20621 - DNA, 15 bp, Homo sapiens
ttctgacctcactaa

SEQ ID NO: 20622 - DNA, 15 bp, Homo sapiens
gttctgacctcacta

SEQ ID NO: 20623 - DNA, 15 bp, Homo sapiens
tgttctgacctcact

SEQ ID NO: 20624 - DNA, 15 bp, Homo sapiens
ctgttctgacctcac

SEQ ID NO: 20625 - DNA, 15 bp, Homo sapiens
cctgttctgacctca

SEQ ID NO: 20626 - DNA, 15 bp, Homo sapiens
acctgttctgacctc

SEQ ID NO: 20627 - DNA, 15 bp, Homo sapiens
tacctgttctgacct

SEQ ID NO: 20628 - DNA, 15 bp, Homo sapiens
atacctgttctgacc

SEQ ID NO: 20629 - DNA, 15 bp, Homo sapiens
gatacctgttctgac

SEQ ID NO: 20630 - DNA, 15 bp, Homo sapiens
agatacctgttctga

SEQ ID NO: 20631 - DNA, 15 bp, Homo sapiens
aagatacctgttctg

SEQ ID NO: 20632 - DNA, 15 bp, Homo sapiens
taagatacctgttct

SEQ ID NO: 20633 - DNA, 15 bp, Homo sapiens
ttaagatacctgttc

SEQ ID NO: 20634 - DNA, 15 bp, Homo sapiens
cttaagatacctgtt

SEQ ID NO: 20635 - DNA, 15 bp, Homo sapiens
gcttaagatacctgt

SEQ ID NO: 20636 - DNA, 15 bp, Homo sapiens
tgcttaagatacctg

SEQ ID NO: 20637 - DNA, 15 bp, Homo sapiens
ttgcttaagatacct

SEQ ID NO: 20638 - DNA, 15 bp, Homo sapiens
attgcttaagatacc

SEQ ID NO: 20639 - DNA, 15 bp, Homo sapiens
cattgcttaagatac

SEQ ID NO: 20640 - DNA, 15 bp, Homo sapiens
gcattgcttaagata

SEQ ID NO: 20641 - DNA, 15 bp, Homo sapiens
agcattgcttaagat

SEQ ID NO: 20642 - DNA, 15 bp, Homo sapiens
cagcattgcttaaga

SEQ ID NO: 20643 - DNA, 15 bp, Homo sapiens
tcagcattgcttaag

SEQ ID NO: 20644 - DNA, 15 bp, Homo sapiens
ctcagcattgcttaa

SEQ ID NO: 20645 - DNA, 15 bp, Homo sapiens
actcagcattgctta

SEQ ID NO: 20646 - DNA, 15 bp, Homo sapiens
aactcagcattgctt

SEQ ID NO: 20647 - DNA, 15 bp, Homo sapiens
taactcagcattgct

SEQ ID NO: 20648 - DNA, 15 bp, Homo sapiens
ttaactcagcattgc

SEQ ID NO: 20649 - DNA, 15 bp, Homo sapiens
attaactcagcattg

SEQ ID NO: 20650 - DNA, 15 bp, Homo sapiens
cattaactcagcatt

SEQ ID NO: 20651 - DNA, 15 bp, Homo sapiens
tcattaactcagcat

SEQ ID NO: 20652 - DNA, 15 bp, Homo sapiens
gtcattaactcagca

SEQ ID NO: 20653 - DNA, 15 bp, Homo sapiens
ggtcattaactcagc

SEQ ID NO: 20654 - DNA, 15 bp, Homo sapiens
tggtcattaactcag

SEQ ID NO: 20655 - DNA, 15 bp, Homo sapiens
ctggtcattaactca

SEQ ID NO: 20656 - DNA, 15 bp, Homo sapiens
tctggtcattaactc

SEQ ID NO: 20657 - DNA, 15 bp, Homo sapiens
ttctggtcattaact

SEQ ID NO: 20658 - DNA, 15 bp, Homo sapiens
attctggtcattaac

SEQ ID NO: 20659 - DNA, 15 bp, Homo sapiens
gattctggtcattaa

SEQ ID NO: 20660 - DNA, 15 bp, Homo sapiens
agattctggtcatta

SEQ ID NO: 20661 - DNA, 15 bp, Homo sapiens
cagattctggtcatt

SEQ ID NO: 20662 - DNA, 15 bp, Homo sapiens
tcagattctggtcat

SEQ ID NO: 20663 - DNA, 15 bp, Homo sapiens
ttcagattctggtca

SEQ ID NO: 20664 - DNA, 15 bp, Homo sapiens
gttcagattctggtc

SEQ ID NO: 20665 - DNA, 15 bp, Homo sapiens
agttcagattctggt

SEQ ID NO: 20666 - DNA, 15 bp, Homo sapiens
aagttcagattctgg

SEQ ID NO: 20667 - DNA, 15 bp, Homo sapiens
aaagttcagattctg

SEQ ID NO: 20668 - DNA, 15 bp, Homo sapiens
aaaagttcagattct

SEQ ID NO: 20669 - DNA, 15 bp, Homo sapiens
aaaaagttcagattc

SEQ ID NO: 20670 - DNA, 15 bp, Homo sapiens
taaaaagttcagatt

SEQ ID NO: 20671 - DNA, 15 bp, Homo sapiens
ataaaaagttcagat

SEQ ID NO: 20672 - DNA, 15 bp, Homo sapiens
gataaaaagttcaga

SEQ ID NO: 20673 - DNA, 15 bp, Homo sapiens
agataaaaagttcag

SEQ ID NO: 20674 - DNA, 15 bp, Homo sapiens
aagataaaaagttca

SEQ ID NO: 20675 - DNA, 15 bp, Homo sapiens
aaagataaaaagttc

SEQ ID NO: 20676 - DNA, 15 bp, Homo sapiens
aaaagataaaaagtt

SEQ ID NO: 20677 - DNA, 15 bp, Homo sapiens
aaaaagataaaaagt

SEQ ID NO: 20678 - DNA, 15 bp, Homo sapiens
gaaaaagataaaaag

SEQ ID NO: 20679 - DNA, 15 bp, Homo sapiens
tgaaaaagataaaaa

SEQ ID NO: 20680 - DNA, 15 bp, Homo sapiens
ttgaaaaagataaaa

SEQ ID NO: 20681 - DNA, 15 bp, Homo sapiens
attgaaaaagataaa

SEQ ID NO: 20682 - DNA, 15 bp, Homo sapiens
cattgaaaaagataa

SEQ ID NO: 20683 - DNA, 15 bp, Homo sapiens
ccattgaaaaagata

SEQ ID NO: 20684 - DNA, 15 bp, Homo sapiens
tccattgaaaaagat

SEQ ID NO: 20685 - DNA, 15 bp, Homo sapiens
ctccattgaaaaaga

SEQ ID NO: 20686 - DNA, 15 bp, Homo sapiens
actccattgaaaaag

SEQ ID NO: 20687 - DNA, 15 bp, Homo sapiens
cactccattgaaaaa

SEQ ID NO: 20688 - DNA, 15 bp, Homo sapiens
tcactccattgaaaa

SEQ ID NO: 20689 - DNA, 15 bp, Homo sapiens
atcactccattgaaa

SEQ ID NO: 20690 - DNA, 15 bp, Homo sapiens
catcactccattgaa

SEQ ID NO: 20691 - DNA, 15 bp, Homo sapiens
ccatcactccattga

SEQ ID NO: 20692 - DNA, 15 bp, Homo sapiens
tccatcactccattg

SEQ ID NO: 20693 - DNA, 15 bp, Homo sapiens
atccatcactccatt

SEQ ID NO: 20694 - DNA, 15 bp, Homo sapiens
aatccatcactccat

SEQ ID NO: 20695 - DNA, 15 bp, Homo sapiens
caatccatcactcca

SEQ ID NO: 20696 - DNA, 15 bp, Homo sapiens
gcaatccatcactcc

SEQ ID NO: 20697 - DNA, 15 bp, Homo sapiens
agcaatccatcactc

SEQ ID NO: 20698 - DNA, 15 bp, Homo sapiens
tagcaatccatcact

SEQ ID NO: 20699 - DNA, 15 bp, Homo sapiens
ctagcaatccatcac

SEQ ID NO: 20700 - DNA, 15 bp, Homo sapiens
cctagcaatccatca

SEQ ID NO: 20701 - DNA, 15 bp, Homo sapiens
ccctagcaatccatc

SEQ ID NO: 20702 - DNA, 15 bp, Homo sapiens
accctagcaatccat

SEQ ID NO: 20703 - DNA, 15 bp, Homo sapiens
taccctagcaatcca

SEQ ID NO: 20704 - DNA, 15 bp, Homo sapiens
ttaccctagcaatcc

SEQ ID NO: 20705 - DNA, 15 bp, Homo sapiens
attaccctagcaatc

SEQ ID NO: 20706 - DNA, 15 bp, Homo sapiens
cattaccctagcaat

SEQ ID NO: 20707 - DNA, 15 bp, Homo sapiens
ccattaccctagcaa

SEQ ID NO: 20708 - DNA, 15 bp, Homo sapiens
cccattaccctagca

SEQ ID NO: 20709 - DNA, 15 bp, Homo sapiens
ccccattaccctagc

SEQ ID NO: 20710 - DNA, 15 bp, Homo sapiens
accccattaccctag

SEQ ID NO: 20711 - DNA, 15 bp, Homo sapiens
aaccccattacccta

SEQ ID NO: 20712 - DNA, 15 bp, Homo sapiens
caaccccattaccct

SEQ ID NO: 20713 - DNA, 15 bp, Homo sapiens
acaaccccattaccc

SEQ ID NO: 20714 - DNA, 15 bp, Homo sapiens
cacaaccccattacc

SEQ ID NO: 20715 - DNA, 15 bp, Homo sapiens
gcacaaccccattac

SEQ ID NO: 20716 - DNA, 15 bp, Homo sapiens
agcacaaccccatta

SEQ ID NO: 20717 - DNA, 15 bp, Homo sapiens
cagcacaaccccatt

SEQ ID NO: 20718 - DNA, 15 bp, Homo sapiens
ccagcacaaccccat

SEQ ID NO: 20719 - DNA, 15 bp, Homo sapiens
accagcacaacccca

SEQ ID NO: 20720 - DNA, 15 bp, Homo sapiens
caccagcacaacccc

SEQ ID NO: 20721 - DNA, 15 bp, Homo sapiens
tcaccagcacaaccc

SEQ ID NO: 20722 - DNA, 15 bp, Homo sapiens
atcaccagcacaacc

SEQ ID NO: 20723 - DNA, 15 bp, Homo sapiens
catcaccagcacaac

SEQ ID NO: 20724 - DNA, 15 bp, Homo sapiens
gcatcaccagcacaa

SEQ ID NO: 20725 - DNA, 15 bp, Homo sapiens
agcatcaccagcaca

SEQ ID NO: 20726 - DNA, 15 bp, Homo sapiens
tagcatcaccagcac

SEQ ID NO: 20727 - DNA, 15 bp, Homo sapiens
ttagcatcaccagca

SEQ ID NO: 20728 - DNA, 15 bp, Homo sapiens
tttagcatcaccagc

SEQ ID NO: 20729 - DNA, 15 bp, Homo sapiens
ctttagcatcaccag

SEQ ID NO: 20730 - DNA, 15 bp, Homo sapiens
tctttagcatcacca

SEQ ID NO: 20731 - DNA, 15 bp, Homo sapiens
atctttagcatcacc

SEQ ID NO: 20732 - DNA, 15 bp, Homo sapiens
tatctttagcatcac

SEQ ID NO: 20733 - DNA, 15 bp, Homo sapiens
ttatctttagcatca

SEQ ID NO: 20734 - DNA, 15 bp, Homo sapiens
tttatctttagcatc

SEQ ID NO: 20735 - DNA, 15 bp, Homo sapiens
gtttatctttagcat

SEQ ID NO: 20736 - DNA, 15 bp, Homo sapiens
cgtttatctttagca

SEQ ID NO: 20737 - DNA, 15 bp, Homo sapiens
acgtttatctttagc

SEQ ID NO: 20738 - DNA, 15 bp, Homo sapiens
aacgtttatctttag

SEQ ID NO: 20739 - DNA, 15 bp, Homo sapiens
taacgtttatcttta

SEQ ID NO: 20740 - DNA, 15 bp, Homo sapiens
ctaacgtttatcttt

SEQ ID NO: 20741 - DNA, 15 bp, Homo sapiens
tctaacgtttatctt

SEQ ID NO: 20742 - DNA, 15 bp, Homo sapiens
ctctaacgtttatct

SEQ ID NO: 20743 - DNA, 15 bp, Homo sapiens
actctaacgtttatc

SEQ ID NO: 20744 - DNA, 15 bp, Homo sapiens
tactctaacgtttat

SEQ ID NO: 20745 - DNA, 15 bp, Homo sapiens
ttactctaacgttta

SEQ ID NO: 20746 - DNA, 15 bp, Homo sapiens
attactctaacgttt

SEQ ID NO: 20747 - DNA, 15 bp, Homo sapiens
tattactctaacgtt

SEQ ID NO: 20748 - DNA, 15 bp, Homo sapiens
ctattactctaacgt

SEQ ID NO: 20749 - DNA, 15 bp, Homo sapiens
gctattactctaacg

SEQ ID NO: 20750 - DNA, 15 bp, Homo sapiens
tgctattactctaac

SEQ ID NO: 20751 - DNA, 15 bp, Homo sapiens
ttgctattactctaa

SEQ ID NO: 20752 - DNA, 15 bp, Homo sapiens
cttgctattactcta

SEQ ID NO: 20753 - DNA, 15 bp, Homo sapiens
gcttgctattactct

SEQ ID NO: 20754 - DNA, 15 bp, Homo sapiens
agcttgctattactc

SEQ ID NO: 20755 - DNA, 15 bp, Homo sapiens
gagcttgctattact

SEQ ID NO: 20756 - DNA, 15 bp, Homo sapiens
tgagcttgctattac

SEQ ID NO: 20757 - DNA, 15 bp, Homo sapiens
ctgagcttgctatta

SEQ ID NO: 20758 - DNA, 15 bp, Homo sapiens
actgagcttgctatt

SEQ ID NO: 20759 - DNA, 15 bp, Homo sapiens
gactgagcttgctat

SEQ ID NO: 20760 - DNA, 15 bp, Homo sapiens
tgactgagcttgcta

SEQ ID NO: 20761 - DNA, 15 bp, Homo sapiens
ttgactgagcttgct

SEQ ID NO: 20762 - DNA, 15 bp, Homo sapiens
attgactgagcttgc

SEQ ID NO: 20763 - DNA, 15 bp, Homo sapiens
tattgactgagcttg

SEQ ID NO: 20764 - DNA, 15 bp, Homo sapiens
ctattgactgagctt

SEQ ID NO: 20765 - DNA, 15 bp, Homo sapiens
tctattgactgagct

SEQ ID NO: 20766 - DNA, 15 bp, Homo sapiens
ttctattgactgagc

SEQ ID NO: 20767 - DNA, 15 bp, Homo sapiens
tttctattgactgag

SEQ ID NO: 20768 - DNA, 15 bp, Homo sapiens
gtttctattgactga

SEQ ID NO: 20769 - DNA, 15 bp, Homo sapiens
tgtttctattgactg

SEQ ID NO: 20770 - DNA, 15 bp, Homo sapiens
atgtttctattgact

SEQ ID NO: 20771 - DNA, 15 bp, Homo sapiens
catgtttctattgac

SEQ ID NO: 20772 - DNA, 15 bp, Homo sapiens
gcatgtttctattga

SEQ ID NO: 20773 - DNA, 15 bp, Homo sapiens
agcatgtttctattg

SEQ ID NO: 20774 - DNA, 15 bp, Homo sapiens
aagcatgtttctatt

SEQ ID NO: 20775 - DNA, 15 bp, Homo sapiens
taagcatgtttctat

SEQ ID NO: 20776 - DNA, 15 bp, Homo sapiens
gtaagcatgtttcta

SEQ ID NO: 20777 - DNA, 15 bp, Homo sapiens
ggtaagcatgtttct

SEQ ID NO: 20778 - DNA, 15 bp, Homo sapiens
tggtaagcatgtttc

SEQ ID NO: 20779 - DNA, 15 bp, Homo sapiens
atggtaagcatgttt

SEQ ID NO: 20780 - DNA, 15 bp, Homo sapiens
tatggtaagcatgtt

SEQ ID NO: 20781 - DNA, 15 bp, Homo sapiens
gtatggtaagcatgt

SEQ ID NO: 20782 - DNA, 15 bp, Homo sapiens
ggtatggtaagcatg

SEQ ID NO: 20783 - DNA, 15 bp, Homo sapiens
gggtatggtaagcat

SEQ ID NO: 20784 - DNA, 15 bp, Homo sapiens
agggtatggtaagca

SEQ ID NO: 20785 - DNA, 15 bp, Homo sapiens
cagggtatggtaagc

SEQ ID NO: 20786 - DNA, 15 bp, Homo sapiens
ccagggtatggtaag

SEQ ID NO: 20787 - DNA, 15 bp, Homo sapiens
gccagggtatggtaa

SEQ ID NO: 20788 - DNA, 15 bp, Homo sapiens
ggccagggtatggta

SEQ ID NO: 20789 - DNA, 15 bp, Homo sapiens
aggccagggtatggt

SEQ ID NO: 20790 - DNA, 15 bp, Homo sapiens
aaggccagggtatgg

SEQ ID NO: 20791 - DNA, 15 bp, Homo sapiens
gaaggccagggtatg

SEQ ID NO: 20792 - DNA, 15 bp, Homo sapiens
agaaggccagggtat

SEQ ID NO: 20793 - DNA, 15 bp, Homo sapiens
gagaaggccagggta

SEQ ID NO: 20794 - DNA, 15 bp, Homo sapiens
tgagaaggccagggt

SEQ ID NO: 20795 - DNA, 15 bp, Homo sapiens
ctgagaaggccaggg

SEQ ID NO: 20796 - DNA, 15 bp, Homo sapiens
actgagaaggccagg

SEQ ID NO: 20797 - DNA, 15 bp, Homo sapiens
tactgagaaggccag

SEQ ID NO: 20798 - DNA, 15 bp, Homo sapiens
atactgagaaggcca

SEQ ID NO: 20799 - DNA, 15 bp, Homo sapiens
aatactgagaaggcc

SEQ ID NO: 20800 - DNA, 15 bp, Homo sapiens
aaatactgagaaggc

SEQ ID NO: 20801 - DNA, 15 bp, Homo sapiens
caaatactgagaagg

SEQ ID NO: 20802 - DNA, 15 bp, Homo sapiens
ccaaatactgagaag

SEQ ID NO: 20803 - DNA, 15 bp, Homo sapiens
accaaatactgagaa

SEQ ID NO: 20804 - DNA, 15 bp, Homo sapiens
gaccaaatactgaga

SEQ ID NO: 20805 - DNA, 15 bp, Homo sapiens
ggaccaaatactgag

SEQ ID NO: 20806 - DNA, 15 bp, Homo sapiens
aggaccaaatactga

SEQ ID NO: 20807 - DNA, 15 bp, Homo sapiens
aaggaccaaatactg

SEQ ID NO: 20808 - DNA, 15 bp, Homo sapiens
aaaggaccaaatact

SEQ ID NO: 20809 - DNA, 15 bp, Homo sapiens
gaaaggaccaaatac

SEQ ID NO: 20810 - DNA, 15 bp, Homo sapiens
ggaaaggaccaaata

SEQ ID NO: 20811 - DNA, 15 bp, Homo sapiens
gggaaaggaccaaat

SEQ ID NO: 20812 - DNA, 15 bp, Homo sapiens
ggggaaaggaccaaa

SEQ ID NO: 20813 - DNA, 15 bp, Homo sapiens
tggggaaaggaccaa

SEQ ID NO: 20814 - DNA, 15 bp, Homo sapiens
gtggggaaaggacca

SEQ ID NO: 20815 - DNA, 15 bp, Homo sapiens
agtggggaaaggacc

SEQ ID NO: 20816 - DNA, 15 bp, Homo sapiens
aagtggggaaaggac

SEQ ID NO: 20817 - DNA, 15 bp, Homo sapiens
caagtggggaaagga

SEQ ID NO: 20818 - DNA, 15 bp, Homo sapiens
tcaagtggggaaagg

SEQ ID NO: 20819 - DNA, 15 bp, Homo sapiens
gtcaagtggggaaag

SEQ ID NO: 20820 - DNA, 15 bp, Homo sapiens
tgtcaagtggggaaa

SEQ ID NO: 20821 - DNA, 15 bp, Homo sapiens
ctgtcaagtggggaa

SEQ ID NO: 20822 - DNA, 15 bp, Homo sapiens
gctgtcaagtgggga

SEQ ID NO: 20823 - DNA, 15 bp, Homo sapiens
agctgtcaagtgggg

SEQ ID NO: 20824 - DNA, 15 bp, Homo sapiens
aagctgtcaagtggg

SEQ ID NO: 20825 - DNA, 15 bp, Homo sapiens
caagctgtcaagtgg

SEQ ID NO: 20826 - DNA, 15 bp, Homo sapiens
acaagctgtcaagtg

SEQ ID NO: 20827 - DNA, 15 bp, Homo sapiens
gacaagctgtcaagt

SEQ ID NO: 20828 - DNA, 15 bp, Homo sapiens
agacaagctgtcaag

SEQ ID NO: 20829 - DNA, 15 bp, Homo sapiens
tagacaagctgtcaa

SEQ ID NO: 20830 - DNA, 15 bp, Homo sapiens
ttagacaagctgtca

SEQ ID NO: 20831 - DNA, 15 bp, Homo sapiens
attagacaagctgtc

SEQ ID NO: 20832 - DNA, 15 bp, Homo sapiens
cattagacaagctgt

SEQ ID NO: 20833 - DNA, 15 bp, Homo sapiens
ccattagacaagctg

SEQ ID NO: 20834 - DNA, 15 bp, Homo sapiens
gccattagacaagct

SEQ ID NO: 20835 - DNA, 15 bp, Homo sapiens
tgccattagacaagc

SEQ ID NO: 20836 - DNA, 15 bp, Homo sapiens
ttgccattagacaag

SEQ ID NO: 20837 - DNA, 15 bp, Homo sapiens
tttgccattagacaa

SEQ ID NO: 20838 - DNA, 15 bp, Homo sapiens
atttgccattagaca

SEQ ID NO: 20839 - DNA, 15 bp, Homo sapiens
catttgccattagac

SEQ ID NO: 20840 - DNA, 15 bp, Homo sapiens
acatttgccattaga

SEQ ID NO: 20841 - DNA, 15 bp, Homo sapiens
cacatttgccattag

SEQ ID NO: 20842 - DNA, 15 bp, Homo sapiens
tcacatttgccatta

SEQ ID NO: 20843 - DNA, 15 bp, Homo sapiens
ttcacatttgccatt

SEQ ID NO: 20844 - DNA, 15 bp, Homo sapiens
attcacatttgccat

SEQ ID NO: 20845 - DNA, 15 bp, Homo sapiens
aattcacatttgcca

SEQ ID NO: 20846 - DNA, 15 bp, Homo sapiens
aaattcacatttgcc

SEQ ID NO: 20847 - DNA, 15 bp, Homo sapiens
aaaattcacatttgc

SEQ ID NO: 20848 - DNA, 15 bp, Homo sapiens
taaaattcacatttg

SEQ ID NO: 20849 - DNA, 15 bp, Homo sapiens
ttaaaattcacattt

SEQ ID NO: 20850 - DNA, 15 bp, Homo sapiens
tttaaaattcacatt

SEQ ID NO: 20851 - DNA, 15 bp, Homo sapiens
ttttaaaattcacat

SEQ ID NO: 20852 - DNA, 15 bp, Homo sapiens
cttttaaaattcaca

SEQ ID NO: 20853 - DNA, 15 bp, Homo sapiens
acttttaaaattcac

SEQ ID NO: 20854 - DNA, 15 bp, Homo sapiens
aacttttaaaattca

SEQ ID NO: 20855 - DNA, 15 bp, Homo sapiens
aaacttttaaaattc

SEQ ID NO: 20856 - DNA, 15 bp, Homo sapiens
aaaacttttaaaatt

SEQ ID NO: 20857 - DNA, 15 bp, Homo sapiens
gaaaacttttaaaat

SEQ ID NO: 20858 - DNA, 15 bp, Homo sapiens
agaaaacttttaaaa

SEQ ID NO: 20859 - DNA, 15 bp, Homo sapiens
gagaaaacttttaaa

SEQ ID NO: 20860 - DNA, 15 bp, Homo sapiens
ggagaaaacttttaa

SEQ ID NO: 20861 - DNA, 15 bp, Homo sapiens
gggagaaaactttta

SEQ ID NO: 20862 - DNA, 15 bp, Homo sapiens
tgggagaaaactttt

SEQ ID NO: 20863 - DNA, 15 bp, Homo sapiens
ttgggagaaaacttt

SEQ ID NO: 20864 - DNA, 15 bp, Homo sapiens
attgggagaaaactt

SEQ ID NO: 20865 - DNA, 15 bp, Homo sapiens
cattgggagaaaact

SEQ ID NO: 20866 - DNA, 15 bp, Homo sapiens
gcattgggagaaaac

SEQ ID NO: 20867 - DNA, 15 bp, Homo sapiens
agcattgggagaaaa

SEQ ID NO: 20868 - DNA, 15 bp, Homo sapiens
cagcattgggagaaa

SEQ ID NO: 20869 - DNA, 15 bp, Homo sapiens
tcagcattgggagaa

SEQ ID NO: 20870 - DNA, 15 bp, Homo sapiens
atcagcattgggaga

SEQ ID NO: 20871 - DNA, 15 bp, Homo sapiens
aatcagcattgggag

SEQ ID NO: 20872 - DNA, 15 bp, Homo sapiens
aaatcagcattggga

SEQ ID NO: 20873 - DNA, 15 bp, Homo sapiens
gaaatcagcattggg

SEQ ID NO: 20874 - DNA, 15 bp, Homo sapiens
ggaaatcagcattgg

SEQ ID NO: 20875 - DNA, 15 bp, Homo sapiens
aggaaatcagcattg

SEQ ID NO: 20876 - DNA, 15 bp, Homo sapiens
aaggaaatcagcatt

SEQ ID NO: 20877 - DNA, 15 bp, Homo sapiens
aaaggaaatcagcat

SEQ ID NO: 20878 - DNA, 15 bp, Homo sapiens
aaaaggaaatcagca

SEQ ID NO: 20879 - DNA, 15 bp, Homo sapiens
caaaaggaaatcagc

SEQ ID NO: 20880 - DNA, 15 bp, Homo sapiens
gcaaaaggaaatcag

SEQ ID NO: 20881 - DNA, 15 bp, Homo sapiens
ggcaaaaggaaatca

SEQ ID NO: 20882 - DNA, 15 bp, Homo sapiens
tggcaaaaggaaatc

SEQ ID NO: 20883 - DNA, 15 bp, Homo sapiens
ctggcaaaaggaaat

SEQ ID NO: 20884 - DNA, 15 bp, Homo sapiens
cctggcaaaaggaaa

SEQ ID NO: 20885 - DNA, 15 bp, Homo sapiens
tcctggcaaaaggaa

SEQ ID NO: 20886 - DNA, 15 bp, Homo sapiens
ttcctggcaaaagga

SEQ ID NO: 20887 - DNA, 15 bp, Homo sapiens
cttcctggcaaaagg

SEQ ID NO: 20888 - DNA, 15 bp, Homo sapiens
ccttcctggcaaaag

SEQ ID NO: 20889 - DNA, 15 bp, Homo sapiens
tccttcctggcaaaa

SEQ ID NO: 20890 - DNA, 15 bp, Homo sapiens
ttccttcctggcaaa

SEQ ID NO: 20891 - DNA, 15 bp, Homo sapiens
tttccttcctggcaa

SEQ ID NO: 20892 - DNA, 15 bp, Homo sapiens
gtttccttcctggca

SEQ ID NO: 20893 - DNA, 15 bp, Homo sapiens
tgtttccttcctggc

SEQ ID NO: 20894 - DNA, 15 bp, Homo sapiens
ttgtttccttcctgg

SEQ ID NO: 20895 - DNA, 15 bp, Homo sapiens
gttgtttccttcctg

SEQ ID NO: 20896 - DNA, 15 bp, Homo sapiens
tgttgtttccttcct

SEQ ID NO: 20897 - DNA, 15 bp, Homo sapiens
ttgttgtttccttcc

SEQ ID NO: 20898 - DNA, 15 bp, Homo sapiens
attgttgtttccttc

SEQ ID NO: 20899 - DNA, 15 bp, Homo sapiens
cattgttgtttcctt

SEQ ID NO: 20900 - DNA, 15 bp, Homo sapiens
ccattgttgtttcct

SEQ ID NO: 20901 - DNA, 15 bp, Homo sapiens
gccattgttgtttcc

SEQ ID NO: 20902 - DNA, 15 bp, Homo sapiens
agccattgttgtttc

SEQ ID NO: 20903 - DNA, 15 bp, Homo sapiens
tagccattgttgttt

SEQ ID NO: 20904 - DNA, 15 bp, Homo sapiens
ttagccattgttgtt

SEQ ID NO: 20905 - DNA, 15 bp, Homo sapiens
attagccattgttgt

SEQ ID NO: 20906 - DNA, 15 bp, Homo sapiens
cattagccattgttg

SEQ ID NO: 20907 - DNA, 15 bp, Homo sapiens
acattagccattgtt

SEQ ID NO: 20908 - DNA, 15 bp, Homo sapiens
aacattagccattgt

SEQ ID NO: 20909 - DNA, 15 bp, Homo sapiens
caacattagccattg

SEQ ID NO: 20910 - DNA, 15 bp, Homo sapiens
tcaacattagccatt

SEQ ID NO: 20911 - DNA, 15 bp, Homo sapiens
gtcaacattagccat

SEQ ID NO: 20912 - DNA, 15 bp, Homo sapiens
tgtcaacattagcca

SEQ ID NO: 20913 - DNA, 15 bp, Homo sapiens
atgtcaacattagcc

SEQ ID NO: 20914 - DNA, 15 bp, Homo sapiens
aatgtcaacattagc

SEQ ID NO: 20915 - DNA, 15 bp, Homo sapiens
aaatgtcaacattag

SEQ ID NO: 20916 - DNA, 15 bp, Homo sapiens
taaatgtcaacatta

SEQ ID NO: 20917 - DNA, 15 bp, Homo sapiens
gtaaatgtcaacatt

SEQ ID NO: 20918 - DNA, 15 bp, Homo sapiens
agtaaatgtcaacat

SEQ ID NO: 20919 - DNA, 15 bp, Homo sapiens
tagtaaatgtcaaca

SEQ ID NO: 20920 - DNA, 15 bp, Homo sapiens
ttagtaaatgtcaac

SEQ ID NO: 20921 - DNA, 15 bp, Homo sapiens
tttagtaaatgtcaa

SEQ ID NO: 20922 - DNA, 15 bp, Homo sapiens
atttagtaaatgtca

SEQ ID NO: 20923 - DNA, 15 bp, Homo sapiens
aatttagtaaatgtc

SEQ ID NO: 20924 - DNA, 15 bp, Homo sapiens
taatttagtaaatgt

SEQ ID NO: 20925 - DNA, 15 bp, Homo sapiens
ttaatttagtaaatg

SEQ ID NO: 20926 - DNA, 15 bp, Homo sapiens
attaatttagtaaat

SEQ ID NO: 20927 - DNA, 15 bp, Homo sapiens
tattaatttagtaaa

SEQ ID NO: 20928 - DNA, 15 bp, Homo sapiens
atattaatttagtaa

SEQ ID NO: 20929 - DNA, 15 bp, Homo sapiens
aatattaatttagta

SEQ ID NO: 20930 - DNA, 15 bp, Homo sapiens
aaatattaatttagt

SEQ ID NO: 20931 - DNA, 15 bp, Homo sapiens
gaaatattaatttag

SEQ ID NO: 20932 - DNA, 15 bp, Homo sapiens
agaaatattaattta

SEQ ID NO: 20933 - DNA, 15 bp, Homo sapiens
cagaaatattaattt

SEQ ID NO: 20934 - DNA, 15 bp, Homo sapiens
tcagaaatattaatt

SEQ ID NO: 20935 - DNA, 15 bp, Homo sapiens
ttcagaaatattaat

SEQ ID NO: 20936 - DNA, 15 bp, Homo sapiens
attcagaaatattaa

SEQ ID NO: 20937 - DNA, 15 bp, Homo sapiens
gattcagaaatatta

SEQ ID NO: 20938 - DNA, 15 bp, Homo sapiens
agattcagaaatatt

SEQ ID NO: 20939 - DNA, 15 bp, Homo sapiens
tagattcagaaatat

SEQ ID NO: 20940 - DNA, 15 bp, Homo sapiens
atagattcagaaata

SEQ ID NO: 20941 - DNA, 15 bp, Homo sapiens
catagattcagaaat

SEQ ID NO: 20942 - DNA, 15 bp, Homo sapiens
gcatagattcagaaa

SEQ ID NO: 20943 - DNA, 15 bp, Homo sapiens
agcatagattcagaa

SEQ ID NO: 20944 - DNA, 15 bp, Homo sapiens
cagcatagattcaga

SEQ ID NO: 20945 - DNA, 15 bp, Homo sapiens
acagcatagattcag

SEQ ID NO: 20946 - DNA, 15 bp, Homo sapiens
cacagcatagattca

SEQ ID NO: 20947 - DNA, 15 bp, Homo sapiens
acacagcatagattc

SEQ ID NO: 20948 - DNA, 15 bp, Homo sapiens
aacacagcatagatt

SEQ ID NO: 20949 - DNA, 15 bp, Homo sapiens
taacacagcatagat

SEQ ID NO: 20950 - DNA, 15 bp, Homo sapiens
ttaacacagcataga

SEQ ID NO: 20951 - DNA, 15 bp, Homo sapiens
attaacacagcatag

SEQ ID NO: 20952 - DNA, 15 bp, Homo sapiens
tattaacacagcata

SEQ ID NO: 20953 - DNA, 15 bp, Homo sapiens
ttattaacacagcat

SEQ ID NO: 20954 - DNA, 15 bp, Homo sapiens
cttattaacacagca

SEQ ID NO: 20955 - DNA, 15 bp, Homo sapiens
acttattaacacagc

SEQ ID NO: 20956 - DNA, 15 bp, Homo sapiens
cacttattaacacag

SEQ ID NO: 20957 - DNA, 15 bp, Homo sapiens
gcacttattaacaca

SEQ ID NO: 20958 - DNA, 15 bp, Homo sapiens
agcacttattaacac

SEQ ID NO: 20959 - DNA, 15 bp, Homo sapiens
aagcacttattaaca

SEQ ID NO: 20960 - DNA, 15 bp, Homo sapiens
gaagcacttattaac

SEQ ID NO: 20961 - DNA, 15 bp, Homo sapiens
agaagcacttattaa

SEQ ID NO: 20962 - DNA, 15 bp, Homo sapiens
gagaagcacttatta

SEQ ID NO: 20963 - DNA, 15 bp, Homo sapiens
tgagaagcacttatt

SEQ ID NO: 20964 - DNA, 15 bp, Homo sapiens
ttgagaagcacttat

SEQ ID NO: 20965 - DNA, 15 bp, Homo sapiens
cttgagaagcactta

SEQ ID NO: 20966 - DNA, 15 bp, Homo sapiens
acttgagaagcactt

SEQ ID NO: 20967 - DNA, 15 bp, Homo sapiens
cacttgagaagcact

SEQ ID NO: 20968 - DNA, 15 bp, Homo sapiens
acacttgagaagcac

SEQ ID NO: 20969 - DNA, 15 bp, Homo sapiens
aacacttgagaagca

SEQ ID NO: 20970 - DNA, 15 bp, Homo sapiens
gaacacttgagaagc

SEQ ID NO: 20971 - DNA, 15 bp, Homo sapiens
agaacacttgagaag

SEQ ID NO: 20972 - DNA, 15 bp, Homo sapiens
cagaacacttgagaa

SEQ ID NO: 20973 - DNA, 15 bp, Homo sapiens
acagaacacttgaga

SEQ ID NO: 20974 - DNA, 15 bp, Homo sapiens
aacagaacacttgag

SEQ ID NO: 20975 - DNA, 15 bp, Homo sapiens
caacagaacacttga

SEQ ID NO: 20976 - DNA, 15 bp, Homo sapiens
acaacagaacacttg

SEQ ID NO: 20977 - DNA, 15 bp, Homo sapiens
aacaacagaacactt

SEQ ID NO: 20978 - DNA, 15 bp, Homo sapiens
taacaacagaacact

SEQ ID NO: 20979 - DNA, 15 bp, Homo sapiens
ttaacaacagaacac

SEQ ID NO: 20980 - DNA, 15 bp, Homo sapiens
tttaacaacagaaca

SEQ ID NO: 20981 - DNA, 15 bp, Homo sapiens
atttaacaacagaac

SEQ ID NO: 20982 - DNA, 15 bp, Homo sapiens
tatttaacaacagaa

SEQ ID NO: 20983 - DNA, 15 bp, Homo sapiens
atatttaacaacaga

SEQ ID NO: 20984 - DNA, 15 bp, Homo sapiens
catatttaacaacag

SEQ ID NO: 20985 - DNA, 15 bp, Homo sapiens
acatatttaacaaca

SEQ ID NO: 20986 - DNA, 15 bp, Homo sapiens
cacatatttaacaac

SEQ ID NO: 20987 - DNA, 15 bp, Homo sapiens
acacatatttaacaa

SEQ ID NO: 20988 - DNA, 15 bp, Homo sapiens
cacacatatttaaca

SEQ ID NO: 20989 - DNA, 15 bp, Homo sapiens
ccacacatatttaac

SEQ ID NO: 20990 - DNA, 15 bp, Homo sapiens
cccacacatatttaa

SEQ ID NO: 20991 - DNA, 15 bp, Homo sapiens
tcccacacatattta

SEQ ID NO: 20992 - DNA, 15 bp, Homo sapiens
ttcccacacatattt

SEQ ID NO: 20993 - DNA, 15 bp, Homo sapiens
tttcccacacatatt

SEQ ID NO: 20994 - DNA, 15 bp, Homo sapiens
atttcccacacatat

SEQ ID NO: 20995 - DNA, 15 bp, Homo sapiens
catttcccacacata

SEQ ID NO: 20996 - DNA, 15 bp, Homo sapiens
acatttcccacacat

SEQ ID NO: 20997 - DNA, 15 bp, Homo sapiens
aacatttcccacaca

SEQ ID NO: 20998 - DNA, 15 bp, Homo sapiens
taacatttcccacac

SEQ ID NO: 20999 - DNA, 15 bp, Homo sapiens
gtaacatttcccaca

SEQ ID NO: 21000 - DNA, 15 bp, Homo sapiens
tgtaacatttcccac

SEQ ID NO: 21001 - DNA, 15 bp, Homo sapiens
gtgtaacatttccca

SEQ ID NO: 21002 - DNA, 15 bp, Homo sapiens
tgtgtaacatttccc

SEQ ID NO: 21003 - DNA, 15 bp, Homo sapiens
ctgtgtaacatttcc

SEQ ID NO: 21004 - DNA, 15 bp, Homo sapiens
actgtgtaacatttc

SEQ ID NO: 21005 - DNA, 15 bp, Homo sapiens
tactgtgtaacattt

SEQ ID NO: 21006 - DNA, 15 bp, Homo sapiens
ctactgtgtaacatt

SEQ ID NO: 21007 - DNA, 15 bp, Homo sapiens
actactgtgtaacat

SEQ ID NO: 21008 - DNA, 15 bp, Homo sapiens
tactactgtgtaaca

SEQ ID NO: 21009 - DNA, 15 bp, Homo sapiens
gtactactgtgtaac

SEQ ID NO: 21010 - DNA, 15 bp, Homo sapiens
agtactactgtgtaa

SEQ ID NO: 21011 - DNA, 15 bp, Homo sapiens
aagtactactgtgta

SEQ ID NO: 21012 - DNA, 15 bp, Homo sapiens
caagtactactgtgt

SEQ ID NO: 21013 - DNA, 15 bp, Homo sapiens
gcaagtactactgtg

SEQ ID NO: 21014 - DNA, 15 bp, Homo sapiens
tgcaagtactactgt

SEQ ID NO: 21015 - DNA, 15 bp, Homo sapiens
atgcaagtactactg

SEQ ID NO: 21016 - DNA, 15 bp, Homo sapiens
catgcaagtactact

SEQ ID NO: 21017 - DNA, 15 bp, Homo sapiens
gcatgcaagtactac

SEQ ID NO: 21018 - DNA, 15 bp, Homo sapiens
agcatgcaagtacta

SEQ ID NO: 21019 - DNA, 15 bp, Homo sapiens
aagcatgcaagtact

SEQ ID NO: 21020 - DNA, 15 bp, Homo sapiens
aaagcatgcaagtac

SEQ ID NO: 21021 - DNA, 15 bp, Homo sapiens
gaaagcatgcaagta

SEQ ID NO: 21022 - DNA, 15 bp, Homo sapiens
agaaagcatgcaagt

SEQ ID NO: 21023 - DNA, 15 bp, Homo sapiens
gagaaagcatgcaag

SEQ ID NO: 21024 - DNA, 15 bp, Homo sapiens
tgagaaagcatgcaa

SEQ ID NO: 21025 - DNA, 15 bp, Homo sapiens
gtgagaaagcatgca

SEQ ID NO: 21026 - DNA, 15 bp, Homo sapiens
ggtgagaaagcatgc

SEQ ID NO: 21027 - DNA, 15 bp, Homo sapiens
tggtgagaaagcatg

SEQ ID NO: 21028 - DNA, 15 bp, Homo sapiens
ctggtgagaaagcat

SEQ ID NO: 21029 - DNA, 15 bp, Homo sapiens
actggtgagaaagca

SEQ ID NO: 21030 - DNA, 15 bp, Homo sapiens
tactggtgagaaagc

SEQ ID NO: 21031 - DNA, 15 bp, Homo sapiens
atactggtgagaaag

SEQ ID NO: 21032 - DNA, 15 bp, Homo sapiens
tatactggtgagaaa

SEQ ID NO: 21033 - DNA, 15 bp, Homo sapiens
gtatactggtgagaa

SEQ ID NO: 21034 - DNA, 15 bp, Homo sapiens
tgtatactggtgaga

SEQ ID NO: 21035 - DNA, 15 bp, Homo sapiens
atgtatactggtgag

SEQ ID NO: 21036 - DNA, 15 bp, Homo sapiens
gatgtatactggtga

SEQ ID NO: 21037 - DNA, 15 bp, Homo sapiens
tgatgtatactggtg

SEQ ID NO: 21038 - DNA, 15 bp, Homo sapiens
gtgatgtatactggt

SEQ ID NO: 21039 - DNA, 15 bp, Homo sapiens
tgtgatgtatactgg

SEQ ID NO: 21040 - DNA, 15 bp, Homo sapiens
ctgtgatgtatactg

SEQ ID NO: 21041 - DNA, 15 bp, Homo sapiens
tctgtgatgtatact

SEQ ID NO: 21042 - DNA, 15 bp, Homo sapiens
gtctgtgatgtatac

SEQ ID NO: 21043 - DNA, 15 bp, Homo sapiens
tgtctgtgatgtata

SEQ ID NO: 21044 - DNA, 15 bp, Homo sapiens
gtgtctgtgatgtat

SEQ ID NO: 21045 - DNA, 15 bp, Homo sapiens
ggtgtctgtgatgta

SEQ ID NO: 21046 - DNA, 15 bp, Homo sapiens
aggtgtctgtgatgt

SEQ ID NO: 21047 - DNA, 15 bp, Homo sapiens
aaggtgtctgtgatg

SEQ ID NO: 21048 - DNA, 15 bp, Homo sapiens
gaaggtgtctgtgat

SEQ ID NO: 21049 - DNA, 15 bp, Homo sapiens
tgaaggtgtctgtga

SEQ ID NO: 21050 - DNA, 15 bp, Homo sapiens
atgaaggtgtctgtg

SEQ ID NO: 21051 - DNA, 15 bp, Homo sapiens
tatgaaggtgtctgt

SEQ ID NO: 21052 - DNA, 15 bp, Homo sapiens
atatgaaggtgtctg

SEQ ID NO: 21053 - DNA, 15 bp, Homo sapiens
gatatgaaggtgtct

SEQ ID NO: 21054 - DNA, 15 bp, Homo sapiens
tgatatgaaggtgtc

SEQ ID NO: 21055 - DNA, 15 bp, Homo sapiens
gtgatatgaaggtgt

SEQ ID NO: 21056 - DNA, 15 bp, Homo sapiens
cgtgatatgaaggtg

SEQ ID NO: 21057 - DNA, 15 bp, Homo sapiens
acgtgatatgaaggt

SEQ ID NO: 21058 - DNA, 15 bp, Homo sapiens
gacgtgatatgaagg

SEQ ID NO: 21059 - DNA, 15 bp, Homo sapiens
tgacgtgatatgaag

SEQ ID NO: 21060 - DNA, 15 bp, Homo sapiens
ctgacgtgatatgaa

SEQ ID NO: 21061 - DNA, 15 bp, Homo sapiens
actgacgtgatatga

SEQ ID NO: 21062 - DNA, 15 bp, Homo sapiens
aactgacgtgatatg

SEQ ID NO: 21063 - DNA, 15 bp, Homo sapiens
aaactgacgtgatat

SEQ ID NO: 21064 - DNA, 15 bp, Homo sapiens
aaaactgacgtgata

SEQ ID NO: 21065 - DNA, 15 bp, Homo sapiens
taaaactgacgtgat

SEQ ID NO: 21066 - DNA, 15 bp, Homo sapiens
ataaaactgacgtga

SEQ ID NO: 21067 - DNA, 15 bp, Homo sapiens
tataaaactgacgtg

SEQ ID NO: 21068 - DNA, 15 bp, Homo sapiens
ctataaaactgacgt

SEQ ID NO: 21069 - DNA, 15 bp, Homo sapiens
tctataaaactgacg

SEQ ID NO: 21070 - DNA, 15 bp, Homo sapiens
atctataaaactgac

SEQ ID NO: 21071 - DNA, 15 bp, Homo sapiens
tatctataaaactga

SEQ ID NO: 21072 - DNA, 15 bp, Homo sapiens
atatctataaaactg

SEQ ID NO: 21073 - DNA, 15 bp, Homo sapiens
aatatctataaaact

SEQ ID NO: 21074 - DNA, 15 bp, Homo sapiens
aaatatctataaaac

SEQ ID NO: 21075 - DNA, 15 bp, Homo sapiens
gaaatatctataaaa

SEQ ID NO: 21076 - DNA, 15 bp, Homo sapiens
tgaaatatctataaa

SEQ ID NO: 21077 - DNA, 15 bp, Homo sapiens
ttgaaatatctataa

SEQ ID NO: 21078 - DNA, 15 bp, Homo sapiens
tttgaaatatctata

SEQ ID NO: 21079 - DNA, 15 bp, Homo sapiens
ttttgaaatatctat

SEQ ID NO: 21080 - DNA, 15 bp, Homo sapiens
attttgaaatatcta

SEQ ID NO: 21081 - DNA, 15 bp, Homo sapiens
tattttgaaatatct

SEQ ID NO: 21082 - DNA, 15 bp, Homo sapiens
gtattttgaaatatc

SEQ ID NO: 21083 - DNA, 15 bp, Homo sapiens
tgtattttgaaatat

SEQ ID NO: 21084 - DNA, 15 bp, Homo sapiens
atgtattttgaaata

SEQ ID NO: 21085 - DNA, 15 bp, Homo sapiens
aatgtattttgaaat

SEQ ID NO: 21086 - DNA, 15 bp, Homo sapiens
caatgtattttgaaa

SEQ ID NO: 21087 - DNA, 15 bp, Homo sapiens
tcaatgtattttgaa

SEQ ID NO: 21088 - DNA, 15 bp, Homo sapiens
atcaatgtattttga

SEQ ID NO: 21089 - DNA, 15 bp, Homo sapiens
tatcaatgtattttg

SEQ ID NO: 21090 - DNA, 15 bp, Homo sapiens
gtatcaatgtatttt

SEQ ID NO: 21091 - DNA, 15 bp, Homo sapiens
agtatcaatgtattt

SEQ ID NO: 21092 - DNA, 15 bp, Homo sapiens
aagtatcaatgtatt

SEQ ID NO: 21093 - DNA, 15 bp, Homo sapiens
taagtatcaatgtat

SEQ ID NO: 21094 - DNA, 15 bp, Homo sapiens
ataagtatcaatgta

SEQ ID NO: 21095 - DNA, 15 bp, Homo sapiens
gataagtatcaatgt

SEQ ID NO: 21096 - DNA, 15 bp, Homo sapiens
tgataagtatcaatg

SEQ ID NO: 21097 - DNA, 15 bp, Homo sapiens
atgataagtatcaat

SEQ ID NO: 21098 - DNA, 15 bp, Homo sapiens
aatgataagtatcaa

SEQ ID NO: 21099 - DNA, 15 bp, Homo sapiens
taatgataagtatca

SEQ ID NO: 21100 - DNA, 15 bp, Homo sapiens
ataatgataagtatc

SEQ ID NO: 21101 - DNA, 15 bp, Homo sapiens
aataatgataagtat

SEQ ID NO: 21102 - DNA, 15 bp, Homo sapiens
aaataatgataagta

SEQ ID NO: 21103 - DNA, 15 bp, Homo sapiens
gaaataatgataagt

SEQ ID NO: 21104 - DNA, 15 bp, Homo sapiens
tgaaataatgataag

SEQ ID NO: 21105 - DNA, 15 bp, Homo sapiens
ttgaaataatgataa

SEQ ID NO: 21106 - DNA, 15 bp, Homo sapiens
tttgaaataatgata

SEQ ID NO: 21107 - DNA, 15 bp, Homo sapiens
ttttgaaataatgat

SEQ ID NO: 21108 - DNA, 15 bp, Homo sapiens
attttgaaataatga

SEQ ID NO: 21109 - DNA, 15 bp, Homo sapiens
aattttgaaataatg

SEQ ID NO: 21110 - DNA, 15 bp, Homo sapiens
taattttgaaataat

SEQ ID NO: 21111 - DNA, 15 bp, Homo sapiens
ataattttgaaataa

SEQ ID NO: 21112 - DNA, 15 bp, Homo sapiens
tataattttgaaata

SEQ ID NO: 21113 - DNA, 15 bp, Homo sapiens
ttataattttgaaat

SEQ ID NO: 21114 - DNA, 15 bp, Homo sapiens
attataattttgaaa

SEQ ID NO: 21115 - DNA, 15 bp, Homo sapiens
tattataattttgaa

SEQ ID NO: 21116 - DNA, 15 bp, Homo sapiens
atattataattttga

SEQ ID NO: 21117 - DNA, 15 bp, Homo sapiens
aatattataattttg

SEQ ID NO: 21118 - DNA, 15 bp, Homo sapiens
aaatattataatttt

SEQ ID NO: 21119 - DNA, 15 bp, Homo sapiens
taaatattataattt

SEQ ID NO: 21120 - DNA, 15 bp, Homo sapiens
gtaaatattataatt

SEQ ID NO: 21121 - DNA, 15 bp, Homo sapiens
ggtaaatattataat

SEQ ID NO: 21122 - DNA, 15 bp, Homo sapiens
aggtaaatattataa

SEQ ID NO: 21123 - DNA, 15 bp, Homo sapiens
aaggtaaatattata

SEQ ID NO: 21124 - DNA, 15 bp, Homo sapiens
caaggtaaatattat

SEQ ID NO: 21125 - DNA, 15 bp, Homo sapiens
gcaaggtaaatatta

SEQ ID NO: 21126 - DNA, 15 bp, Homo sapiens
agcaaggtaaatatt

SEQ ID NO: 21127 - DNA, 15 bp, Homo sapiens
cagcaaggtaaatat

SEQ ID NO: 21128 - DNA, 15 bp, Homo sapiens
acagcaaggtaaata

SEQ ID NO: 21129 - DNA, 15 bp, Homo sapiens
aacagcaaggtaaat

SEQ ID NO: 21130 - DNA, 15 bp, Homo sapiens
taacagcaaggtaaa

SEQ ID NO: 21131 - DNA, 15 bp, Homo sapiens
ctaacagcaaggtaa

SEQ ID NO: 21132 - DNA, 15 bp, Homo sapiens
tctaacagcaaggta

SEQ ID NO: 21133 - DNA, 15 bp, Homo sapiens
atctaacagcaaggt

SEQ ID NO: 21134 - DNA, 15 bp, Homo sapiens
gatctaacagcaagg

SEQ ID NO: 21135 - DNA, 15 bp, Homo sapiens
agatctaacagcaag

SEQ ID NO: 21136 - DNA, 15 bp, Homo sapiens
aagatctaacagcaa

SEQ ID NO: 21137 - DNA, 15 bp, Homo sapiens
taagatctaacagca

SEQ ID NO: 21138 - DNA, 15 bp, Homo sapiens
ataagatctaacagc

SEQ ID NO: 21139 - DNA, 15 bp, Homo sapiens
aataagatctaacag

SEQ ID NO: 21140 - DNA, 15 bp, Homo sapiens
aaataagatctaaca

SEQ ID NO: 21141 - DNA, 15 bp, Homo sapiens
taaataagatctaac

SEQ ID NO: 21142 - DNA, 15 bp, Homo sapiens
ttaaataagatctaa

SEQ ID NO: 21143 - DNA, 15 bp, Homo sapiens
attaaataagatcta

SEQ ID NO: 21144 - DNA, 15 bp, Homo sapiens
cattaaataagatct

SEQ ID NO: 21145 - DNA, 15 bp, Homo sapiens
acattaaataagatc

SEQ ID NO: 21146 - DNA, 15 bp, Homo sapiens
tacattaaataagat

SEQ ID NO: 21147 - DNA, 15 bp, Homo sapiens
atacattaaataaga

SEQ ID NO: 21148 - DNA, 15 bp, Homo sapiens
aatacattaaataag

SEQ ID NO: 21149 - DNA, 15 bp, Homo sapiens
taatacattaaataa

SEQ ID NO: 21150 - DNA, 15 bp, Homo sapiens
ttaatacattaaata

SEQ ID NO: 21151 - DNA, 15 bp, Homo sapiens
tttaatacattaaat

SEQ ID NO: 21152 - DNA, 15 bp, Homo sapiens
ttttaatacattaaa

SEQ ID NO: 21153 - DNA, 15 bp, Homo sapiens
tttttaatacattaa

SEQ ID NO: 21154 - DNA, 15 bp, Homo sapiens
ctttttaatacatta

SEQ ID NO: 21155 - DNA, 15 bp, Homo sapiens
gctttttaatacatt

SEQ ID NO: 21156 - DNA, 15 bp, Homo sapiens
tgctttttaatacat

SEQ ID NO: 21157 - DNA, 15 bp, Homo sapiens
atgctttttaataca

SEQ ID NO: 21158 - DNA, 15 bp, Homo sapiens
tatgctttttaatac

SEQ ID NO: 21159 - DNA, 15 bp, Homo sapiens
atatgctttttaata

SEQ ID NO: 21160 - DNA, 15 bp, Homo sapiens
tatatgctttttaat

SEQ ID NO: 21161 - DNA, 15 bp, Homo sapiens
atatatgctttttaa

SEQ ID NO: 21162 - DNA, 15 bp, Homo sapiens
tatatatgcttttta

SEQ ID NO: 21163 - DNA, 15 bp, Homo sapiens
atatatatgcttttt

SEQ ID NO: 21164 - DNA, 15 bp, Homo sapiens
aatatatatgctttt

SEQ ID NO: 21165 - DNA, 15 bp, Homo sapiens
taatatatatgcttt

SEQ ID NO: 21166 - DNA, 15 bp, Homo sapiens
gtaatatatatgctt

SEQ ID NO: 21167 - DNA, 15 bp, Homo sapiens
agtaatatatatgct

SEQ ID NO: 21168 - DNA, 15 bp, Homo sapiens
tagtaatatatatgc

SEQ ID NO: 21169 - DNA, 15 bp, Homo sapiens
atagtaatatatatg

SEQ ID NO: 21170 - DNA, 15 bp, Homo sapiens
tatagtaatatatat

SEQ ID NO: 21171 - DNA, 15 bp, Homo sapiens
atatagtaatatata

SEQ ID NO: 21172 - DNA, 15 bp, Homo sapiens
gatatagtaatatat

SEQ ID NO: 21173 - DNA, 15 bp, Homo sapiens
tgatatagtaatata

SEQ ID NO: 21174 - DNA, 15 bp, Homo sapiens
gtgatatagtaatat

SEQ ID NO: 21175 - DNA, 15 bp, Homo sapiens
tgtgatatagtaata

SEQ ID NO: 21176 - DNA, 15 bp, Homo sapiens
gtgtgatatagtaat

SEQ ID NO: 21177 - DNA, 15 bp, Homo sapiens
tgtgtgatatagtaa

SEQ ID NO: 21178 - DNA, 15 bp, Homo sapiens
ttgtgtgatatagta

SEQ ID NO: 21179 - DNA, 15 bp, Homo sapiens
attgtgtgatatagt

SEQ ID NO: 21180 - DNA, 15 bp, Homo sapiens
tattgtgtgatatag

SEQ ID NO: 21181 - DNA, 15 bp, Homo sapiens
atattgtgtgatata

SEQ ID NO: 21182 - DNA, 15 bp, Homo sapiens
tatattgtgtgatat

SEQ ID NO: 21183 - DNA, 15 bp, Homo sapiens
atatattgtgtgata

SEQ ID NO: 21184 - DNA, 15 bp, Homo sapiens
aatatattgtgtgat

SEQ ID NO: 21185 - DNA, 15 bp, Homo sapiens
taatatattgtgtga

SEQ ID NO: 21186 - DNA, 15 bp, Homo sapiens
ataatatattgtgtg

SEQ ID NO: 21187 - DNA, 15 bp, Homo sapiens
aataatatattgtgt

SEQ ID NO: 21188 - DNA, 15 bp, Homo sapiens
aaataatatattgtg

SEQ ID NO: 21189 - DNA, 15 bp, Homo sapiens
aaaataatatattgt

SEQ ID NO: 21190 - DNA, 15 bp, Homo sapiens
taaaataatatattg

SEQ ID NO: 21191 - DNA, 15 bp, Homo sapiens
ttaaaataatatatt

SEQ ID NO: 21192 - DNA, 15 bp, Homo sapiens
tttaaaataatatat

SEQ ID NO: 21193 - DNA, 15 bp, Homo sapiens
atttaaaataatata

SEQ ID NO: 21194 - DNA, 15 bp, Homo sapiens
catttaaaataatat

SEQ ID NO: 21195 - DNA, 15 bp, Homo sapiens
acatttaaaataata

SEQ ID NO: 21196 - DNA, 15 bp, Homo sapiens
aacatttaaaataat

SEQ ID NO: 21197 - DNA, 15 bp, Homo sapiens
aaacatttaaaataa

SEQ ID NO: 21198 - DNA, 15 bp, Homo sapiens
aaaacatttaaaata

SEQ ID NO: 21199 - DNA, 15 bp, Homo sapiens
aaaaacatttaaaat

SEQ ID NO: 21200 - DNA, 15 bp, Homo sapiens
taaaaacatttaaaa

SEQ ID NO: 21201 - DNA, 15 bp, Homo sapiens
ataaaaacatttaaa

SEQ ID NO: 21202 - DNA, 15 bp, Homo sapiens
tataaaaacatttaa

SEQ ID NO: 21203 - DNA, 15 bp, Homo sapiens
ttataaaaacattta

SEQ ID NO: 21204 - DNA, 15 bp, Homo sapiens
gttataaaaacattt

SEQ ID NO: 21205 - DNA, 15 bp, Homo sapiens
agttataaaaacatt

SEQ ID NO: 21206 - DNA, 15 bp, Homo sapiens
cagttataaaaacat

SEQ ID NO: 21207 - DNA, 15 bp, Homo sapiens
acagttataaaaaca

SEQ ID NO: 21208 - DNA, 15 bp, Homo sapiens
tacagttataaaaac

SEQ ID NO: 21209 - DNA, 15 bp, Homo sapiens
gtacagttataaaaa

SEQ ID NO: 21210 - DNA, 15 bp, Homo sapiens
tgtacagttataaaa

SEQ ID NO: 21211 - DNA, 15 bp, Homo sapiens
atgtacagttataaa

SEQ ID NO: 21212 - DNA, 15 bp, Homo sapiens
gatgtacagttataa

SEQ ID NO: 21213 - DNA, 15 bp, Homo sapiens
tgatgtacagttata

SEQ ID NO: 21214 - DNA, 15 bp, Homo sapiens
ttgatgtacagttat

SEQ ID NO: 21215 - DNA, 15 bp, Homo sapiens
attgatgtacagtta

SEQ ID NO: 21216 - DNA, 15 bp, Homo sapiens
cattgatgtacagtt

SEQ ID NO: 21217 - DNA, 15 bp, Homo sapiens
gcattgatgtacagt

SEQ ID NO: 21218 - DNA, 15 bp, Homo sapiens
ggcattgatgtacag

SEQ ID NO: 21219 - DNA, 15 bp, Homo sapiens
tggcattgatgtaca

SEQ ID NO: 21220 - DNA, 15 bp, Homo sapiens
gtggcattgatgtac

SEQ ID NO: 21221 - DNA, 15 bp, Homo sapiens
agtggcattgatgta

SEQ ID NO: 21222 - DNA, 15 bp, Homo sapiens
cagtggcattgatgt

SEQ ID NO: 21223 - DNA, 15 bp, Homo sapiens
ccagtggcattgatg

SEQ ID NO: 21224 - DNA, 15 bp, Homo sapiens
gccagtggcattgat

SEQ ID NO: 21225 - DNA, 15 bp, Homo sapiens
agccagtggcattga

SEQ ID NO: 21226 - DNA, 15 bp, Homo sapiens
aagccagtggcattg

SEQ ID NO: 21227 - DNA, 15 bp, Homo sapiens
gaagccagtggcatt

SEQ ID NO: 21228 - DNA, 15 bp, Homo sapiens
ggaagccagtggcat

SEQ ID NO: 21229 - DNA, 15 bp, Homo sapiens
aggaagccagtggca

SEQ ID NO: 21230 - DNA, 15 bp, Homo sapiens
aaggaagccagtggc

SEQ ID NO: 21231 - DNA, 15 bp, Homo sapiens
aaaggaagccagtgg

SEQ ID NO: 21232 - DNA, 15 bp, Homo sapiens
caaaggaagccagtg

SEQ ID NO: 21233 - DNA, 15 bp, Homo sapiens
acaaaggaagccagt

SEQ ID NO: 21234 - DNA, 15 bp, Homo sapiens
tacaaaggaagccag

SEQ ID NO: 21235 - DNA, 15 bp, Homo sapiens
ttacaaaggaagcca

SEQ ID NO: 21236 - DNA, 15 bp, Homo sapiens
attacaaaggaagcc

SEQ ID NO: 21237 - DNA, 15 bp, Homo sapiens
gattacaaaggaagc

SEQ ID NO: 21238 - DNA, 15 bp, Homo sapiens
agattacaaaggaag

SEQ ID NO: 21239 - DNA, 15 bp, Homo sapiens
aagattacaaaggaa

SEQ ID NO: 21240 - DNA, 15 bp, Homo sapiens
taagattacaaagga

SEQ ID NO: 21241 - DNA, 15 bp, Homo sapiens
ataagattacaaagg

SEQ ID NO: 21242 - DNA, 15 bp, Homo sapiens
tataagattacaaag

SEQ ID NO: 21243 - DNA, 15 bp, Homo sapiens
gtataagattacaaa

SEQ ID NO: 21244 - DNA, 15 bp, Homo sapiens
tgtataagattacaa

SEQ ID NO: 21245 - DNA, 15 bp, Homo sapiens
atgtataagattaca

SEQ ID NO: 21246 - DNA, 15 bp, Homo sapiens
aatgtataagattac

SEQ ID NO: 21247 - DNA, 15 bp, Homo sapiens
aaatgtataagatta

SEQ ID NO: 21248 - DNA, 15 bp, Homo sapiens
taaatgtataagatt

SEQ ID NO: 21249 - DNA, 15 bp, Homo sapiens
ataaatgtataagat

SEQ ID NO: 21250 - DNA, 15 bp, Homo sapiens
aataaatgtataaga

SEQ ID NO: 21251 - DNA, 15 bp, Homo sapiens
aaataaatgtataag

SEQ ID NO: 21252 - DNA, 15 bp, Homo sapiens
gaaataaatgtataa

SEQ ID NO: 21253 - DNA, 15 bp, Homo sapiens
tgaaataaatgtata

SEQ ID NO: 21254 - DNA, 15 bp, Homo sapiens
atgaaataaatgtat

SEQ ID NO: 21255 - DNA, 15 bp, Homo sapiens
aatgaaataaatgta

SEQ ID NO: 21256 - DNA, 15 bp, Homo sapiens
gaatgaaataaatgt

SEQ ID NO: 21257 - DNA, 15 bp, Homo sapiens
tgaatgaaataaatg

SEQ ID NO: 21258 - DNA, 15 bp, Homo sapiens
gtgaatgaaataaat

SEQ ID NO: 21259 - DNA, 15 bp, Homo sapiens
agtgaatgaaataaa

SEQ ID NO: 21260 - DNA, 15 bp, Homo sapiens
aagtgaatgaaataa

SEQ ID NO: 21261 - DNA, 15 bp, Homo sapiens
taagtgaatgaaata

SEQ ID NO: 21262 - DNA, 15 bp, Homo sapiens
ctaagtgaatgaaat

SEQ ID NO: 21263 - DNA, 15 bp, Homo sapiens
tctaagtgaatgaaa

SEQ ID NO: 21264 - DNA, 15 bp, Homo sapiens
ttctaagtgaatgaa

SEQ ID NO: 21265 - DNA, 15 bp, Homo sapiens
attctaagtgaatga

SEQ ID NO: 21266 - DNA, 15 bp, Homo sapiens
aattctaagtgaatg

SEQ ID NO: 21267 - DNA, 15 bp, Homo sapiens
aaattctaagtgaat

SEQ ID NO: 21268 - DNA, 15 bp, Homo sapiens
aaaattctaagtgaa

SEQ ID NO: 21269 - DNA, 15 bp, Homo sapiens
aaaaattctaagtga

SEQ ID NO: 21270 - DNA, 15 bp, Homo sapiens
aaaaaattctaagtg

SEQ ID NO: 21271 - DNA, 15 bp, Homo sapiens
aaaaaaattctaagt

SEQ ID NO: 21272 - DNA, 15 bp, Homo sapiens
aaaaaaaattctaag

SEQ ID NO: 21273 - DNA, 15 bp, Homo sapiens
aaaaaaaaattctaa

SEQ ID NO: 21274 - DNA, 15 bp, Homo sapiens
aaaaaaaaaattcta

SEQ ID NO: 21275 - DNA, 15 bp, Homo sapiens
aaaaaaaaaaattct

SEQ ID NO: 21276 - DNA, 15 bp, Homo sapiens
aaaaaaaaaaaattc

SEQ ID NO: 21277 - DNA, 15 bp, Homo sapiens
ttgtctcaaaaaaaa

SEQ ID NO: 21278 - DNA, 15 bp, Homo sapiens
tttgtctcaaaaaaa

SEQ ID NO: 21279 - DNA, 15 bp, Homo sapiens
ctttgtctcaaaaaa

SEQ ID NO: 21280 - DNA, 15 bp, Homo sapiens
actttgtctcaaaaa

SEQ ID NO: 21281 - DNA, 15 bp, Homo sapiens
gactttgtctcaaaa

SEQ ID NO: 21282 - DNA, 15 bp, Homo sapiens
agactttgtctcaaa

SEQ ID NO: 21283 - DNA, 15 bp, Homo sapiens
gagactttgtctcaa

SEQ ID NO: 21284 - DNA, 15 bp, Homo sapiens
tgagactttgtctca

SEQ ID NO: 21285 - DNA, 15 bp, Homo sapiens
gtgagactttgtctc

SEQ ID NO: 21286 - DNA, 15 bp, Homo sapiens
agtgagactttgtct

SEQ ID NO: 21287 - DNA, 15 bp, Homo sapiens
cagtgagactttgtc

SEQ ID NO: 21288 - DNA, 15 bp, Homo sapiens
acagtgagactttgt

SEQ ID NO: 21289 - DNA, 15 bp, Homo sapiens
cacagtgagactttg

SEQ ID NO: 21290 - DNA, 15 bp, Homo sapiens
acacagtgagacttt

SEQ ID NO: 21291 - DNA, 15 bp, Homo sapiens
gacacagtgagactt

SEQ ID NO: 21292 - DNA, 15 bp, Homo sapiens
tgacacagtgagact

SEQ ID NO: 21293 - DNA, 15 bp, Homo sapiens
atgacacagtgagac

SEQ ID NO: 21294 - DNA, 15 bp, Homo sapiens
gatgacacagtgaga

SEQ ID NO: 21295 - DNA, 15 bp, Homo sapiens
ggatgacacagtgag

SEQ ID NO: 21296 - DNA, 15 bp, Homo sapiens
tggatgacacagtga

SEQ ID NO: 21297 - DNA, 15 bp, Homo sapiens
ctggatgacacagtg

SEQ ID NO: 21298 - DNA, 15 bp, Homo sapiens
cctggatgacacagt

SEQ ID NO: 21299 - DNA, 15 bp, Homo sapiens
gcctggatgacacag

SEQ ID NO: 21300 - DNA, 15 bp, Homo sapiens
agcctggatgacaca

SEQ ID NO: 21301 - DNA, 15 bp, Homo sapiens
cagcctggatgacac

SEQ ID NO: 21302 - DNA, 15 bp, Homo sapiens
ccagcctggatgaca

SEQ ID NO: 21303 - DNA, 15 bp, Homo sapiens
tccagcctggatgac

SEQ ID NO: 21304 - DNA, 15 bp, Homo sapiens
ctccagcctggatga

SEQ ID NO: 21305 - DNA, 15 bp, Homo sapiens
actccagcctggatg

SEQ ID NO: 21306 - DNA, 15 bp, Homo sapiens
cactccagcctggat

SEQ ID NO: 21307 - DNA, 15 bp, Homo sapiens
gcactccagcctgga

SEQ ID NO: 21308 - DNA, 15 bp, Homo sapiens
agccactgcactcca

SEQ ID NO: 21309 - DNA, 15 bp, Homo sapiens
tagccactgcactcc

SEQ ID NO: 21310 - DNA, 15 bp, Homo sapiens
ttagccactgcactc

SEQ ID NO: 21311 - DNA, 15 bp, Homo sapiens
attagccactgcact

SEQ ID NO: 21312 - DNA, 15 bp, Homo sapiens
gattagccactgcac

SEQ ID NO: 21313 - DNA, 15 bp, Homo sapiens
agattagccactgca

SEQ ID NO: 21314 - DNA, 15 bp, Homo sapiens
gagattagccactgc

SEQ ID NO: 21315 - DNA, 15 bp, Homo sapiens
cgagattagccactg

SEQ ID NO: 21316 - DNA, 15 bp, Homo sapiens
ccgagattagccact

SEQ ID NO: 21317 - DNA, 15 bp, Homo sapiens
gccgagattagccac

SEQ ID NO: 21318 - DNA, 15 bp, Homo sapiens
agccgagattagcca

SEQ ID NO: 21319 - DNA, 15 bp, Homo sapiens
gagccgagattagcc

SEQ ID NO: 21320 - DNA, 15 bp, Homo sapiens
tgagccgagattagc

SEQ ID NO: 21321 - DNA, 15 bp, Homo sapiens
gtgagccgagattag

SEQ ID NO: 21322 - DNA, 15 bp, Homo sapiens
agtgagccgagatta

SEQ ID NO: 21323 - DNA, 15 bp, Homo sapiens
tgggaggtggaggtt

SEQ ID NO: 21324 - DNA, 15 bp, Homo sapiens
ctgggaggtggaggt

SEQ ID NO: 21325 - DNA, 15 bp, Homo sapiens
tctgggaggtggagg

SEQ ID NO: 21326 - DNA, 15 bp, Homo sapiens
atctgggaggtggag

SEQ ID NO: 21327 - DNA, 15 bp, Homo sapiens
aatctgggaggtgga

SEQ ID NO: 21328 - DNA, 15 bp, Homo sapiens
gaatctgggaggtgg

SEQ ID NO: 21329 - DNA, 15 bp, Homo sapiens
tgaatctgggaggtg

SEQ ID NO: 21330 - DNA, 15 bp, Homo sapiens
ttgaatctgggaggt

SEQ ID NO: 21331 - DNA, 15 bp, Homo sapiens
cttgaatctgggagg

SEQ ID NO: 21332 - DNA, 15 bp, Homo sapiens
acttgaatctgggag

SEQ ID NO: 21333 - DNA, 15 bp, Homo sapiens
cacttgaatctggga

SEQ ID NO: 21334 - DNA, 15 bp, Homo sapiens
tcacttgaatctggg

SEQ ID NO: 21335 - DNA, 15 bp, Homo sapiens
atcacttgaatctgg

SEQ ID NO: 21336 - DNA, 15 bp, Homo sapiens
aatcacttgaatctg

SEQ ID NO: 21337 - DNA, 15 bp, Homo sapiens
gaatcacttgaatct

SEQ ID NO: 21338 - DNA, 15 bp, Homo sapiens
agaatcacttgaatc

SEQ ID NO: 21339 - DNA, 15 bp, Homo sapiens
gagaatcacttgaat

SEQ ID NO: 21340 - DNA, 15 bp, Homo sapiens
gctgaggcacgagaa

SEQ ID NO: 21341 - DNA, 15 bp, Homo sapiens
ggctgaggcacgaga

SEQ ID NO: 21342 - DNA, 15 bp, Homo sapiens
aggctgaggcacgag

SEQ ID NO: 21343 - DNA, 15 bp, Homo sapiens
aaggctgaggcacga

SEQ ID NO: 21344 - DNA, 15 bp, Homo sapiens
gaaggctgaggcacg

SEQ ID NO: 21345 - DNA, 15 bp, Homo sapiens
ggaaggctgaggcac

SEQ ID NO: 21346 - DNA, 15 bp, Homo sapiens
tggaaggctgaggca

SEQ ID NO: 21347 - DNA, 15 bp, Homo sapiens
ttggaaggctgaggc

SEQ ID NO: 21348 - DNA, 15 bp, Homo sapiens
cttggaaggctgagg

SEQ ID NO: 21349 - DNA, 15 bp, Homo sapiens
acttggaaggctgag

SEQ ID NO: 21350 - DNA, 15 bp, Homo sapiens
tacttggaaggctga

SEQ ID NO: 21351 - DNA, 15 bp, Homo sapiens
ctacttggaaggctg

SEQ ID NO: 21352 - DNA, 15 bp, Homo sapiens
gctacttggaaggct

SEQ ID NO: 21353 - DNA, 15 bp, Homo sapiens
agctacttggaaggc

SEQ ID NO: 21354 - DNA, 15 bp, Homo sapiens
cagctacttggaagg

SEQ ID NO: 21355 - DNA, 15 bp, Homo sapiens
ccagctacttggaag

SEQ ID NO: 21356 - DNA, 15 bp, Homo sapiens
cccagctacttggaa

SEQ ID NO: 21357 - DNA, 15 bp, Homo sapiens
tcccagctacttgga

SEQ ID NO: 21358 - DNA, 15 bp, Homo sapiens
ttaatcccagctact

SEQ ID NO: 21359 - DNA, 15 bp, Homo sapiens
tttaatcccagctac

SEQ ID NO: 21360 - DNA, 15 bp, Homo sapiens
ctttaatcccagcta

SEQ ID NO: 21361 - DNA, 15 bp, Homo sapiens
cctttaatcccagct

SEQ ID NO: 21362 - DNA, 15 bp, Homo sapiens
acctttaatcccagc

SEQ ID NO: 21363 - DNA, 15 bp, Homo sapiens
tacctttaatcccag

SEQ ID NO: 21364 - DNA, 15 bp, Homo sapiens
gtacctttaatccca

SEQ ID NO: 21365 - DNA, 15 bp, Homo sapiens
tgtacctttaatccc

SEQ ID NO: 21366 - DNA, 15 bp, Homo sapiens
atgtacctttaatcc

SEQ ID NO: 21367 - DNA, 15 bp, Homo sapiens
catgtacctttaatc

SEQ ID NO: 21368 - DNA, 15 bp, Homo sapiens
gcatgtacctttaat

SEQ ID NO: 21369 - DNA, 15 bp, Homo sapiens
ggcatgtacctttaa

SEQ ID NO: 21370 - DNA, 15 bp, Homo sapiens
tggcatgtaccttta

SEQ ID NO: 21371 - DNA, 15 bp, Homo sapiens
gtggcatgtaccttt

SEQ ID NO: 21372 - DNA, 15 bp, Homo sapiens
ggtggcatgtacctt

SEQ ID NO: 21373 - DNA, 15 bp, Homo sapiens
tggtggcatgtacct

SEQ ID NO: 21374 - DNA, 15 bp, Homo sapiens
gtggtggcatgtacc

SEQ ID NO: 21375 - DNA, 15 bp, Homo sapiens
cgtggtggcatgtac

SEQ ID NO: 21376 - DNA, 15 bp, Homo sapiens
gcgtggtggcatgta

SEQ ID NO: 21377 - DNA, 15 bp, Homo sapiens
ggcgtggtggcatgt

SEQ ID NO: 21378 - DNA, 15 bp, Homo sapiens
gggcgtggtggcatg

SEQ ID NO: 21379 - DNA, 15 bp, Homo sapiens
tgggcgtggtggcat

SEQ ID NO: 21380 - DNA, 15 bp, Homo sapiens
ctgggcgtggtggca

SEQ ID NO: 21381 - DNA, 15 bp, Homo sapiens
gctgggcgtggtggc

SEQ ID NO: 21382 - DNA, 15 bp, Homo sapiens
agctgggcgtggtgg

SEQ ID NO: 21383 - DNA, 15 bp, Homo sapiens
tagctgggcgtggtg

SEQ ID NO: 21384 - DNA, 15 bp, Homo sapiens
ttagctgggcgtggt

SEQ ID NO: 21385 - DNA, 15 bp, Homo sapiens
attagctgggcgtgg

SEQ ID NO: 21386 - DNA, 15 bp, Homo sapiens
aattagctgggcgtg

SEQ ID NO: 21387 - DNA, 15 bp, Homo sapiens
aaattagctgggcgt

SEQ ID NO: 21388 - DNA, 15 bp, Homo sapiens
aaaattagctgggcg

SEQ ID NO: 21389 - DNA, 15 bp, Homo sapiens
aaaaaattagctggg

SEQ ID NO: 21390 - DNA, 15 bp, Homo sapiens
aaaaaaattagctgg

SEQ ID NO: 21391 - DNA, 15 bp, Homo sapiens
aaaaaaaattagctg

SEQ ID NO: 21392 - DNA, 15 bp, Homo sapiens
aaaaaaaaattagct

SEQ ID NO: 21393 - DNA, 15 bp, Homo sapiens
aaaaaaaaaattagc

SEQ ID NO: 21394 - DNA, 15 bp, Homo sapiens
aaaaaaaaaaattag

SEQ ID NO: 21395 - DNA, 15 bp, Homo sapiens
ccaaaaaaaaaaaat

SEQ ID NO: 21396 - DNA, 15 bp, Homo sapiens
ttaccaaaaaaaaaa

SEQ ID NO: 21397 - DNA, 15 bp, Homo sapiens
tttaccaaaaaaaaa

SEQ ID NO: 21398 - DNA, 15 bp, Homo sapiens
ctttaccaaaaaaaa

SEQ ID NO: 21399 - DNA, 15 bp, Homo sapiens
tctttaccaaaaaaa

SEQ ID NO: 21400 - DNA, 15 bp, Homo sapiens
gtctttaccaaaaaa

SEQ ID NO: 21401 - DNA, 15 bp, Homo sapiens
tgtctttaccaaaaa

SEQ ID NO: 21402 - DNA, 15 bp, Homo sapiens
ctgtctttaccaaaa

SEQ ID NO: 21403 - DNA, 15 bp, Homo sapiens
cctgtctttaccaaa

SEQ ID NO: 21404 - DNA, 15 bp, Homo sapiens
ccctgtctttaccaa

SEQ ID NO: 21405 - DNA, 15 bp, Homo sapiens
accctgtctttacca

SEQ ID NO: 21406 - DNA, 15 bp, Homo sapiens
aaccctgtctttacc

SEQ ID NO: 21407 - DNA, 15 bp, Homo sapiens
aaaccctgtctttac

SEQ ID NO: 21408 - DNA, 15 bp, Homo sapiens
aaaaccctgtcttta

SEQ ID NO: 21409 - DNA, 15 bp, Homo sapiens
caaaaccctgtcttt

SEQ ID NO: 21410 - DNA, 15 bp, Homo sapiens
gcaaaaccctgtctt

SEQ ID NO: 21411 - DNA, 15 bp, Homo sapiens
ggcaaaaccctgtct

SEQ ID NO: 21412 - DNA, 15 bp, Homo sapiens
tggcaaaaccctgtc

SEQ ID NO: 21413 - DNA, 15 bp, Homo sapiens
atggcaaaaccctgt

SEQ ID NO: 21414 - DNA, 15 bp, Homo sapiens
catggcaaaaccctg

SEQ ID NO: 21415 - DNA, 15 bp, Homo sapiens
acatggcaaaaccct

SEQ ID NO: 21416 - DNA, 15 bp, Homo sapiens
cagaccagcctggcc

SEQ ID NO: 21417 - DNA, 15 bp, Homo sapiens
ccagaccagcctggc

SEQ ID NO: 21418 - DNA, 15 bp, Homo sapiens
tccagaccagcctgg

SEQ ID NO: 21419 - DNA, 15 bp, Homo sapiens
ttccagaccagcctg

SEQ ID NO: 21420 - DNA, 15 bp, Homo sapiens
gttccagaccagcct

SEQ ID NO: 21421 - DNA, 15 bp, Homo sapiens
cgggtggatcacttg

SEQ ID NO: 21422 - DNA, 15 bp, Homo sapiens
gcgggtggatcactt

SEQ ID NO: 21423 - DNA, 15 bp, Homo sapiens
ggcgggtggatcact

SEQ ID NO: 21424 - DNA, 15 bp, Homo sapiens
aaggcgggtggatca

SEQ ID NO: 21425 - DNA, 15 bp, Homo sapiens
caaggcgggtggatc

SEQ ID NO: 21426 - DNA, 15 bp, Homo sapiens
ccaaggcgggtggat

SEQ ID NO: 21427 - DNA, 15 bp, Homo sapiens
gccaaggcgggtgga

SEQ ID NO: 21428 - DNA, 15 bp, Homo sapiens
ggccaaggcgggtgg

SEQ ID NO: 21429 - DNA, 15 bp, Homo sapiens
aggccaaggcgggtg

SEQ ID NO: 21430 - DNA, 15 bp, Homo sapiens
gaggccaaggcgggt

SEQ ID NO: 21431 - DNA, 15 bp, Homo sapiens
tcacacctgtaatct

SEQ ID NO: 21432 - DNA, 15 bp, Homo sapiens
cggctcacacctgta

SEQ ID NO: 21433 - DNA, 15 bp, Homo sapiens
acggctcacacctgt

SEQ ID NO: 21434 - DNA, 15 bp, Homo sapiens
gacggctcacacctg

SEQ ID NO: 21435 - DNA, 15 bp, Homo sapiens
cgacggctcacacct

SEQ ID NO: 21436 - DNA, 15 bp, Homo sapiens
gcgacggctcacacc

SEQ ID NO: 21437 - DNA, 15 bp, Homo sapiens
cgcgacggctcacac

SEQ ID NO: 21438 - DNA, 15 bp, Homo sapiens
gcgcgacggctcaca

SEQ ID NO: 21439 - DNA, 15 bp, Homo sapiens
ggcgcgacggctcac

SEQ ID NO: 21440 - DNA, 15 bp, Homo sapiens
aggcgcgacggctca

SEQ ID NO: 21441 - DNA, 15 bp, Homo sapiens
caggcgcgacggctc

SEQ ID NO: 21442 - DNA, 15 bp, Homo sapiens
ccaggcgcgacggct

SEQ ID NO: 21443 - DNA, 15 bp, Homo sapiens
gccaggcgcgacggc

SEQ ID NO: 21444 - DNA, 15 bp, Homo sapiens
ggccaggcgcgacgg

SEQ ID NO: 21445 - DNA, 15 bp, Homo sapiens
gggccaggcgcgacg

SEQ ID NO: 21446 - DNA, 15 bp, Homo sapiens
ggggccaggcgcgac

SEQ ID NO: 21447 - DNA, 15 bp, Homo sapiens
tggggccaggcgcga

SEQ ID NO: 21448 - DNA, 15 bp, Homo sapiens
atggggccaggcgcg

SEQ ID NO: 21449 - DNA, 15 bp, Homo sapiens
aatggggccaggcgc

SEQ ID NO: 21450 - DNA, 15 bp, Homo sapiens
aaatggggccaggcg

SEQ ID NO: 21451 - DNA, 15 bp, Homo sapiens
taaatggggccaggc

SEQ ID NO: 21452 - DNA, 15 bp, Homo sapiens
ctaaatggggccagg

SEQ ID NO: 21453 - DNA, 15 bp, Homo sapiens
tctaaatggggccag

SEQ ID NO: 21454 - DNA, 15 bp, Homo sapiens
gtctaaatggggcca

SEQ ID NO: 21455 - DNA, 15 bp, Homo sapiens
tgtctaaatggggcc

SEQ ID NO: 21456 - DNA, 15 bp, Homo sapiens
atgtctaaatggggc

SEQ ID NO: 21457 - DNA, 15 bp, Homo sapiens
aatgtctaaatgggg

SEQ ID NO: 21458 - DNA, 15 bp, Homo sapiens
aaatgtctaaatggg

SEQ ID NO: 21459 - DNA, 15 bp, Homo sapiens
aaaatgtctaaatgg

SEQ ID NO: 21460 - DNA, 15 bp, Homo sapiens
aaaaatgtctaaatg

SEQ ID NO: 21461 - DNA, 15 bp, Homo sapiens
taaaaatgtctaaat

SEQ ID NO: 21462 - DNA, 15 bp, Homo sapiens
ataaaaatgtctaaa

SEQ ID NO: 21463 - DNA, 15 bp, Homo sapiens
cataaaaatgtctaa

SEQ ID NO: 21464 - DNA, 15 bp, Homo sapiens
tcataaaaatgtcta

SEQ ID NO: 21465 - DNA, 15 bp, Homo sapiens
ctcataaaaatgtct

SEQ ID NO: 21466 - DNA, 15 bp, Homo sapiens
tctcataaaaatgtc

SEQ ID NO: 21467 - DNA, 15 bp, Homo sapiens
ttctcataaaaatgt

SEQ ID NO: 21468 - DNA, 15 bp, Homo sapiens
cttctcataaaaatg

SEQ ID NO: 21469 - DNA, 15 bp, Homo sapiens
ccttctcataaaaat

SEQ ID NO: 21470 - DNA, 15 bp, Homo sapiens
cccttctcataaaaa

SEQ ID NO: 21471 - DNA, 15 bp, Homo sapiens
acccttctcataaaa

SEQ ID NO: 21472 - DNA, 15 bp, Homo sapiens
aacccttctcataaa

SEQ ID NO: 21473 - DNA, 15 bp, Homo sapiens
aaacccttctcataa

SEQ ID NO: 21474 - DNA, 15 bp, Homo sapiens
taaacccttctcata

SEQ ID NO: 21475 - DNA, 15 bp, Homo sapiens
gtaaacccttctcat

SEQ ID NO: 21476 - DNA, 15 bp, Homo sapiens
tgtaaacccttctca

SEQ ID NO: 21477 - DNA, 15 bp, Homo sapiens
atgtaaacccttctc

SEQ ID NO: 21478 - DNA, 15 bp, Homo sapiens
tatgtaaacccttct

SEQ ID NO: 21479 - DNA, 15 bp, Homo sapiens
ttatgtaaacccttc

SEQ ID NO: 21480 - DNA, 15 bp, Homo sapiens
cttatgtaaaccctt

SEQ ID NO: 21481 - DNA, 15 bp, Homo sapiens
gcttatgtaaaccct

SEQ ID NO: 21482 - DNA, 15 bp, Homo sapiens
agcttatgtaaaccc

SEQ ID NO: 21483 - DNA, 15 bp, Homo sapiens
aagcttatgtaaacc

SEQ ID NO: 21484 - DNA, 15 bp, Homo sapiens
aaagcttatgtaaac

SEQ ID NO: 21485 - DNA, 15 bp, Homo sapiens
taaagcttatgtaaa

SEQ ID NO: 21486 - DNA, 15 bp, Homo sapiens
gtaaagcttatgtaa

SEQ ID NO: 21487 - DNA, 15 bp, Homo sapiens
ggtaaagcttatgta

SEQ ID NO: 21488 - DNA, 15 bp, Homo sapiens
tggtaaagcttatgt

SEQ ID NO: 21489 - DNA, 15 bp, Homo sapiens
ctggtaaagcttatg

SEQ ID NO: 21490 - DNA, 15 bp, Homo sapiens
tctggtaaagcttat

SEQ ID NO: 21491 - DNA, 15 bp, Homo sapiens
gtctggtaaagctta

SEQ ID NO: 21492 - DNA, 15 bp, Homo sapiens
agtctggtaaagctt

SEQ ID NO: 21493 - DNA, 15 bp, Homo sapiens
cagtctggtaaagct

SEQ ID NO: 21494 - DNA, 15 bp, Homo sapiens
gcagtctggtaaagc

SEQ ID NO: 21495 - DNA, 15 bp, Homo sapiens
ggcagtctggtaaag

SEQ ID NO: 21496 - DNA, 15 bp, Homo sapiens
tggcagtctggtaaa

SEQ ID NO: 21497 - DNA, 15 bp, Homo sapiens
ttggcagtctggtaa

SEQ ID NO: 21498 - DNA, 15 bp, Homo sapiens
cttggcagtctggta

SEQ ID NO: 21499 - DNA, 15 bp, Homo sapiens
tcttggcagtctggt

SEQ ID NO: 21500 - DNA, 15 bp, Homo sapiens
ctcttggcagtctgg

SEQ ID NO: 21501 - DNA, 15 bp, Homo sapiens
tctcttggcagtctg

SEQ ID NO: 21502 - DNA, 15 bp, Homo sapiens
ctctcttggcagtct

SEQ ID NO: 21503 - DNA, 15 bp, Homo sapiens
actctcttggcagtc

SEQ ID NO: 21504 - DNA, 15 bp, Homo sapiens
aactctcttggcagt

SEQ ID NO: 21505 - DNA, 15 bp, Homo sapiens
caactctcttggcag

SEQ ID NO: 21506 - DNA, 15 bp, Homo sapiens
tcaactctcttggca

SEQ ID NO: 21507 - DNA, 15 bp, Homo sapiens
ctcaactctcttggc

SEQ ID NO: 21508 - DNA, 15 bp, Homo sapiens
actcaactctcttgg

SEQ ID NO: 21509 - DNA, 15 bp, Homo sapiens
gactcaactctcttg

SEQ ID NO: 21510 - DNA, 15 bp, Homo sapiens
ggactcaactctctt

SEQ ID NO: 21511 - DNA, 15 bp, Homo sapiens
tggactcaactctct

SEQ ID NO: 21512 - DNA, 15 bp, Homo sapiens
atggactcaactctc

SEQ ID NO: 21513 - DNA, 15 bp, Homo sapiens
catggactcaactct

SEQ ID NO: 21514 - DNA, 15 bp, Homo sapiens
ccatggactcaactc

SEQ ID NO: 21515 - DNA, 15 bp, Homo sapiens
gccatggactcaact

SEQ ID NO: 21516 - DNA, 15 bp, Homo sapiens
tgccatggactcaac

SEQ ID NO: 21517 - DNA, 15 bp, Homo sapiens
atgccatggactcaa

SEQ ID NO: 21518 - DNA, 15 bp, Homo sapiens
catgccatggactca

SEQ ID NO: 21519 - DNA, 15 bp, Homo sapiens
tcatgccatggactc

SEQ ID NO: 21520 - DNA, 15 bp, Homo sapiens
ttcatgccatggact

SEQ ID NO: 21521 - DNA, 15 bp, Homo sapiens
tttcatgccatggac

SEQ ID NO: 21522 - DNA, 15 bp, Homo sapiens
ctttcatgccatgga

SEQ ID NO: 21523 - DNA, 15 bp, Homo sapiens
actttcatgccatgg

SEQ ID NO: 21524 - DNA, 15 bp, Homo sapiens
gactttcatgccatg

SEQ ID NO: 21525 - DNA, 15 bp, Homo sapiens
tgactttcatgccat

SEQ ID NO: 21526 - DNA, 15 bp, Homo sapiens
atgactttcatgcca

SEQ ID NO: 21527 - DNA, 15 bp, Homo sapiens
aatgactttcatgcc

SEQ ID NO: 21528 - DNA, 15 bp, Homo sapiens
taatgactttcatgc

SEQ ID NO: 21529 - DNA, 15 bp, Homo sapiens
gtaatgactttcatg

SEQ ID NO: 21530 - DNA, 15 bp, Homo sapiens
tgtaatgactttcat

SEQ ID NO: 21531 - DNA, 15 bp, Homo sapiens
ctgtaatgactttca

SEQ ID NO: 21532 - DNA, 15 bp, Homo sapiens
actgtaatgactttc

SEQ ID NO: 21533 - DNA, 15 bp, Homo sapiens
cactgtaatgacttt

SEQ ID NO: 21534 - DNA, 15 bp, Homo sapiens
tcactgtaatgactt

SEQ ID NO: 21535 - DNA, 15 bp, Homo sapiens
ctcactgtaatgact

SEQ ID NO: 21536 - DNA, 15 bp, Homo sapiens
gctcactgtaatgac

SEQ ID NO: 21537 - DNA, 15 bp, Homo sapiens
tgctcactgtaatga

SEQ ID NO: 21538 - DNA, 15 bp, Homo sapiens
ttgctcactgtaatg

SEQ ID NO: 21539 - DNA, 15 bp, Homo sapiens
attgctcactgtaat

SEQ ID NO: 21540 - DNA, 15 bp, Homo sapiens
aattgctcactgtaa

SEQ ID NO: 21541 - DNA, 15 bp, Homo sapiens
gaattgctcactgta

SEQ ID NO: 21542 - DNA, 15 bp, Homo sapiens
agaattgctcactgt

SEQ ID NO: 21543 - DNA, 15 bp, Homo sapiens
aagaattgctcactg

SEQ ID NO: 21544 - DNA, 15 bp, Homo sapiens
aaagaattgctcact

SEQ ID NO: 21545 - DNA, 15 bp, Homo sapiens
gaaagaattgctcac

SEQ ID NO: 21546 - DNA, 15 bp, Homo sapiens
agaaagaattgctca

SEQ ID NO: 21547 - DNA, 15 bp, Homo sapiens
aagaaagaattgctc

SEQ ID NO: 21548 - DNA, 15 bp, Homo sapiens
aaagaaagaattgct

SEQ ID NO: 21549 - DNA, 15 bp, Homo sapiens
gaaagaaagaattgc

SEQ ID NO: 21550 - DNA, 15 bp, Homo sapiens
agaaagaaagaattg

SEQ ID NO: 21551 - DNA, 15 bp, Homo sapiens
aagaaagaaagaatt

SEQ ID NO: 21552 - DNA, 15 bp, Homo sapiens
aaagaaagaaagaat

SEQ ID NO: 21553 - DNA, 15 bp, Homo sapiens
tggcaaaaaaaaaaa

SEQ ID NO: 21554 - DNA, 15 bp, Homo sapiens
ctggcaaaaaaaaaa

SEQ ID NO: 21555 - DNA, 15 bp, Homo sapiens
cctggcaaaaaaaaa

SEQ ID NO: 21556 - DNA, 15 bp, Homo sapiens
gcctggcaaaaaaaa

SEQ ID NO: 21557 - DNA, 15 bp, Homo sapiens
agcctggcaaaaaaa

SEQ ID NO: 21558 - DNA, 15 bp, Homo sapiens
cagcctggcaaaaaa

SEQ ID NO: 21559 - DNA, 15 bp, Homo sapiens
ccagcctggcaaaaa

SEQ ID NO: 21560 - DNA, 15 bp, Homo sapiens
tccagcctggcaaaa

SEQ ID NO: 21561 - DNA, 15 bp, Homo sapiens
ctccagcctggcaaa

SEQ ID NO: 21562 - DNA, 15 bp, Homo sapiens
actccagcctggcaa

SEQ ID NO: 21563 - DNA, 15 bp, Homo sapiens
cactccagcctggca

SEQ ID NO: 21564 - DNA, 15 bp, Homo sapiens
gcactccagcctggc

SEQ ID NO: 21565 - DNA, 15 bp, Homo sapiens
atgccattgcactcc

SEQ ID NO: 21566 - DNA, 15 bp, Homo sapiens
catgccattgcactc

SEQ ID NO: 21567 - DNA, 15 bp, Homo sapiens
tcatgccattgcact

SEQ ID NO: 21568 - DNA, 15 bp, Homo sapiens
atcatgccattgcac

SEQ ID NO: 21569 - DNA, 15 bp, Homo sapiens
gatcatgccattgca

SEQ ID NO: 21570 - DNA, 15 bp, Homo sapiens
agatcatgccattgc

SEQ ID NO: 21571 - DNA, 15 bp, Homo sapiens
gagatcatgccattg

SEQ ID NO: 21572 - DNA, 15 bp, Homo sapiens
cgagatcatgccatt

SEQ ID NO: 21573 - DNA, 15 bp, Homo sapiens
ccgagatcatgccat

SEQ ID NO: 21574 - DNA, 15 bp, Homo sapiens
gccgagatcatgcca

SEQ ID NO: 21575 - DNA, 15 bp, Homo sapiens
agccgagatcatgcc

SEQ ID NO: 21576 - DNA, 15 bp, Homo sapiens
aagccgagatcatgc

SEQ ID NO: 21577 - DNA, 15 bp, Homo sapiens
taagccgagatcatg

SEQ ID NO: 21578 - DNA, 15 bp, Homo sapiens
gtaagccgagatcat

SEQ ID NO: 21579 - DNA, 15 bp, Homo sapiens
agtaagccgagatca

SEQ ID NO: 21580 - DNA, 15 bp, Homo sapiens
tagtaagccgagatc

SEQ ID NO: 21581 - DNA, 15 bp, Homo sapiens
gtagtaagccgagat

SEQ ID NO: 21582 - DNA, 15 bp, Homo sapiens
tgtagtaagccgaga

SEQ ID NO: 21583 - DNA, 15 bp, Homo sapiens
ctgtagtaagccgag

SEQ ID NO: 21584 - DNA, 15 bp, Homo sapiens
gctgtagtaagccga

SEQ ID NO: 21585 - DNA, 15 bp, Homo sapiens
ggctgtagtaagccg

SEQ ID NO: 21586 - DNA, 15 bp, Homo sapiens
aggctgtagtaagcc

SEQ ID NO: 21587 - DNA, 15 bp, Homo sapiens
gaggctgtagtaagc

SEQ ID NO: 21588 - DNA, 15 bp, Homo sapiens
agaggctgtagtaag

SEQ ID NO: 21589 - DNA, 15 bp, Homo sapiens
cagaggctgtagtaa

SEQ ID NO: 21590 - DNA, 15 bp, Homo sapiens
acagaggctgtagta

SEQ ID NO: 21591 - DNA, 15 bp, Homo sapiens
gacagaggctgtagt

SEQ ID NO: 21592 - DNA, 15 bp, Homo sapiens
agacagaggctgtag

SEQ ID NO: 21593 - DNA, 15 bp, Homo sapiens
gagacagaggctgta

SEQ ID NO: 21594 - DNA, 15 bp, Homo sapiens
ggagacagaggctgt

SEQ ID NO: 21595 - DNA, 15 bp, Homo sapiens
tggagacagaggctg

SEQ ID NO: 21596 - DNA, 15 bp, Homo sapiens
atggagacagaggct

SEQ ID NO: 21597 - DNA, 15 bp, Homo sapiens
catggagacagaggc

SEQ ID NO: 21598 - DNA, 15 bp, Homo sapiens
ccatggagacagagg

SEQ ID NO: 21599 - DNA, 15 bp, Homo sapiens
accatggagacagag

SEQ ID NO: 21600 - DNA, 15 bp, Homo sapiens
aaccatggagacaga

SEQ ID NO: 21601 - DNA, 15 bp, Homo sapiens
gaaccatggagacag

SEQ ID NO: 21602 - DNA, 15 bp, Homo sapiens
tgaaccatggagaca

SEQ ID NO: 21603 - DNA, 15 bp, Homo sapiens
ttgaaccatggagac

SEQ ID NO: 21604 - DNA, 15 bp, Homo sapiens
cttgaaccatggaga

SEQ ID NO: 21605 - DNA, 15 bp, Homo sapiens
acttgaaccatggag

SEQ ID NO: 21606 - DNA, 15 bp, Homo sapiens
aacttgaaccatgga

SEQ ID NO: 21607 - DNA, 15 bp, Homo sapiens
taacttgaaccatgg

SEQ ID NO: 21608 - DNA, 15 bp, Homo sapiens
ctaacttgaaccatg

SEQ ID NO: 21609 - DNA, 15 bp, Homo sapiens
actaacttgaaccat

SEQ ID NO: 21610 - DNA, 15 bp, Homo sapiens
gactaacttgaacca

SEQ ID NO: 21611 - DNA, 15 bp, Homo sapiens
agactaacttgaacc

SEQ ID NO: 21612 - DNA, 15 bp, Homo sapiens
gagactaacttgaac

SEQ ID NO: 21613 - DNA, 15 bp, Homo sapiens
ggagactaacttgaa

SEQ ID NO: 21614 - DNA, 15 bp, Homo sapiens
aggagactaacttga

SEQ ID NO: 21615 - DNA, 15 bp, Homo sapiens
taggagactaacttg

SEQ ID NO: 21616 - DNA, 15 bp, Homo sapiens
gtaggagactaactt

SEQ ID NO: 21617 - DNA, 15 bp, Homo sapiens
ggtaggagactaact

SEQ ID NO: 21618 - DNA, 15 bp, Homo sapiens
aggtaggagactaac

SEQ ID NO: 21619 - DNA, 15 bp, Homo sapiens
gaggtaggagactaa

SEQ ID NO: 21620 - DNA, 15 bp, Homo sapiens
tgaggtaggagacta

SEQ ID NO: 21621 - DNA, 15 bp, Homo sapiens
ctgaggtaggagact

SEQ ID NO: 21622 - DNA, 15 bp, Homo sapiens
gctgaggtaggagac

SEQ ID NO: 21623 - DNA, 15 bp, Homo sapiens
ggctgaggtaggaga

SEQ ID NO: 21624 - DNA, 15 bp, Homo sapiens
aggctgaggtaggag

SEQ ID NO: 21625 - DNA, 15 bp, Homo sapiens
gaggctgaggtagga

SEQ ID NO: 21626 - DNA, 15 bp, Homo sapiens
ggaggctgaggtagg

SEQ ID NO: 21627 - DNA, 15 bp, Homo sapiens
gggaggctgaggtag

SEQ ID NO: 21628 - DNA, 15 bp, Homo sapiens
tgggaggctgaggta

SEQ ID NO: 21629 - DNA, 15 bp, Homo sapiens
tcatgcctgtaatct

SEQ ID NO: 21630 - DNA, 15 bp, Homo sapiens
agtggttcatgcctg

SEQ ID NO: 21631 - DNA, 15 bp, Homo sapiens
tagtggttcatgcct

SEQ ID NO: 21632 - DNA, 15 bp, Homo sapiens
ttagtggttcatgcc

SEQ ID NO: 21633 - DNA, 15 bp, Homo sapiens
attagtggttcatgc

SEQ ID NO: 21634 - DNA, 15 bp, Homo sapiens
aattagtggttcatg

SEQ ID NO: 21635 - DNA, 15 bp, Homo sapiens
aaattagtggttcat

SEQ ID NO: 21636 - DNA, 15 bp, Homo sapiens
aaaattagtggttca

SEQ ID NO: 21637 - DNA, 15 bp, Homo sapiens
aaaaattagtggttc

SEQ ID NO: 21638 - DNA, 15 bp, Homo sapiens
aaaaaattagtggtt

SEQ ID NO: 21639 - DNA, 15 bp, Homo sapiens
caaaaaattagtggt

SEQ ID NO: 21640 - DNA, 15 bp, Homo sapiens
acaaaaaattagtgg

SEQ ID NO: 21641 - DNA, 15 bp, Homo sapiens
tacaaaaaattagtg

SEQ ID NO: 21642 - DNA, 15 bp, Homo sapiens
atacaaaaaattagt

SEQ ID NO: 21643 - DNA, 15 bp, Homo sapiens
aatacaaaaaattag

SEQ ID NO: 21644 - DNA, 15 bp, Homo sapiens
aaatacaaaaaatta

SEQ ID NO: 21645 - DNA, 15 bp, Homo sapiens
aaaatacaaaaaatt

SEQ ID NO: 21646 - DNA, 15 bp, Homo sapiens
aaaaatacaaaaaat

SEQ ID NO: 21647 - DNA, 15 bp, Homo sapiens
aaaaccctgtctcta

SEQ ID NO: 21648 - DNA, 15 bp, Homo sapiens
caaaaccctgtctct

SEQ ID NO: 21649 - DNA, 15 bp, Homo sapiens
gcaaaaccctgtctc

SEQ ID NO: 21650 - DNA, 15 bp, Homo sapiens
agtggatcacttgag

SEQ ID NO: 21651 - DNA, 15 bp, Homo sapiens
gagtggatcacttga

SEQ ID NO: 21652 - DNA, 15 bp, Homo sapiens
tgagtggatcacttg

SEQ ID NO: 21653 - DNA, 15 bp, Homo sapiens
gtgagtggatcactt

SEQ ID NO: 21654 - DNA, 15 bp, Homo sapiens
ggtgagtggatcact

SEQ ID NO: 21655 - DNA, 15 bp, Homo sapiens
aggtgagtggatcac

SEQ ID NO: 21656 - DNA, 15 bp, Homo sapiens
gaggtgagtggatca

SEQ ID NO: 21657 - DNA, 15 bp, Homo sapiens
cgaggtgagtggatc

SEQ ID NO: 21658 - DNA, 15 bp, Homo sapiens
ccgaggtgagtggat

SEQ ID NO: 21659 - DNA, 15 bp, Homo sapiens
gccgaggtgagtgga

SEQ ID NO: 21660 - DNA, 15 bp, Homo sapiens
ggccgaggtgagtgg

SEQ ID NO: 21661 - DNA, 15 bp, Homo sapiens
aggccgaggtgagtg

SEQ ID NO: 21662 - DNA, 15 bp, Homo sapiens
gaggccgaggtgagt

SEQ ID NO: 21663 - DNA, 15 bp, Homo sapiens
ggaggccgaggtgag

SEQ ID NO: 21664 - DNA, 15 bp, Homo sapiens
gggaggccgaggtga

SEQ ID NO: 21665 - DNA, 15 bp, Homo sapiens
tgggaggccgaggtg

SEQ ID NO: 21666 - DNA, 15 bp, Homo sapiens
ttgggaggccgaggt

SEQ ID NO: 21667 - DNA, 15 bp, Homo sapiens
cgcctgtaatcccaa

SEQ ID NO: 21668 - DNA, 15 bp, Homo sapiens
aacgcctgtaatccc

SEQ ID NO: 21669 - DNA, 15 bp, Homo sapiens
taacgcctgtaatcc

SEQ ID NO: 21670 - DNA, 15 bp, Homo sapiens
ctaacgcctgtaatc

SEQ ID NO: 21671 - DNA, 15 bp, Homo sapiens
gctaacgcctgtaat

SEQ ID NO: 21672 - DNA, 15 bp, Homo sapiens
ggctaacgcctgtaa

SEQ ID NO: 21673 - DNA, 15 bp, Homo sapiens
tggctaacgcctgta

SEQ ID NO: 21674 - DNA, 15 bp, Homo sapiens
gtggctaacgcctgt

SEQ ID NO: 21675 - DNA, 15 bp, Homo sapiens
ggtggctaacgcctg

SEQ ID NO: 21676 - DNA, 15 bp, Homo sapiens
tggtggctaacgcct

SEQ ID NO: 21677 - DNA, 15 bp, Homo sapiens
gtggtggctaacgcc

SEQ ID NO: 21678 - DNA, 15 bp, Homo sapiens
tgtggtggctaacgc

SEQ ID NO: 21679 - DNA, 15 bp, Homo sapiens
gtgtggtggctaacg

SEQ ID NO: 21680 - DNA, 15 bp, Homo sapiens
agtgtggtggctaac

SEQ ID NO: 21681 - DNA, 15 bp, Homo sapiens
cagtgtggtggctaa

SEQ ID NO: 21682 - DNA, 15 bp, Homo sapiens
ccagtgtggtggcta

SEQ ID NO: 21683 - DNA, 15 bp, Homo sapiens
cccagtgtggtggct

SEQ ID NO: 21684 - DNA, 15 bp, Homo sapiens
gcccagtgtggtggc

SEQ ID NO: 21685 - DNA, 15 bp, Homo sapiens
tgcccagtgtggtgg

SEQ ID NO: 21686 - DNA, 15 bp, Homo sapiens
atgcccagtgtggtg

SEQ ID NO: 21687 - DNA, 15 bp, Homo sapiens
gatgcccagtgtggt

SEQ ID NO: 21688 - DNA, 15 bp, Homo sapiens
tgatgcccagtgtgg

SEQ ID NO: 21689 - DNA, 15 bp, Homo sapiens
ctgatgcccagtgtg

SEQ ID NO: 21690 - DNA, 15 bp, Homo sapiens
tctgatgcccagtgt

SEQ ID NO: 21691 - DNA, 15 bp, Homo sapiens
ctctgatgcccagtg

SEQ ID NO: 21692 - DNA, 15 bp, Homo sapiens
gctctgatgcccagt

SEQ ID NO: 21693 - DNA, 15 bp, Homo sapiens
tgctctgatgcccag

SEQ ID NO: 21694 - DNA, 15 bp, Homo sapiens
ttgctctgatgccca

SEQ ID NO: 21695 - DNA, 15 bp, Homo sapiens
attgctctgatgccc

SEQ ID NO: 21696 - DNA, 15 bp, Homo sapiens
aattgctctgatgcc

SEQ ID NO: 21697 - DNA, 15 bp, Homo sapiens
gaattgctctgatgc

SEQ ID NO: 21698 - DNA, 15 bp, Homo sapiens
agaattgctctgatg

SEQ ID NO: 21699 - DNA, 15 bp, Homo sapiens
aagaattgctctgat

SEQ ID NO: 21700 - DNA, 15 bp, Homo sapiens
taagaattgctctga

SEQ ID NO: 21701 - DNA, 15 bp, Homo sapiens
ttaagaattgctctg

SEQ ID NO: 21702 - DNA, 15 bp, Homo sapiens
tttaagaattgctct

SEQ ID NO: 21703 - DNA, 15 bp, Homo sapiens
gtttaagaattgctc

SEQ ID NO: 21704 - DNA, 15 bp, Homo sapiens
tgtttaagaattgct

SEQ ID NO: 21705 - DNA, 15 bp, Homo sapiens
atgtttaagaattgc

SEQ ID NO: 21706 - DNA, 15 bp, Homo sapiens
aatgtttaagaattg

SEQ ID NO: 21707 - DNA, 15 bp, Homo sapiens
caatgtttaagaatt

SEQ ID NO: 21708 - DNA, 15 bp, Homo sapiens
tcaatgtttaagaat

SEQ ID NO: 21709 - DNA, 15 bp, Homo sapiens
atcaatgtttaagaa

SEQ ID NO: 21710 - DNA, 15 bp, Homo sapiens
aatcaatgtttaaga

SEQ ID NO: 21711 - DNA, 15 bp, Homo sapiens
taatcaatgtttaag

SEQ ID NO: 21712 - DNA, 15 bp, Homo sapiens
ataatcaatgtttaa

SEQ ID NO: 21713 - DNA, 15 bp, Homo sapiens
cataatcaatgttta

SEQ ID NO: 21714 - DNA, 15 bp, Homo sapiens
ccataatcaatgttt

SEQ ID NO: 21715 - DNA, 15 bp, Homo sapiens
tccataatcaatgtt

SEQ ID NO: 21716 - DNA, 15 bp, Homo sapiens
ttccataatcaatgt

SEQ ID NO: 21717 - DNA, 15 bp, Homo sapiens
cttccataatcaatg

SEQ ID NO: 21718 - DNA, 15 bp, Homo sapiens
acttccataatcaat

SEQ ID NO: 21719 - DNA, 15 bp, Homo sapiens
aacttccataatcaa

SEQ ID NO: 21720 - DNA, 15 bp, Homo sapiens
taacttccataatca

SEQ ID NO: 21721 - DNA, 15 bp, Homo sapiens
ataacttccataatc

SEQ ID NO: 21722 - DNA, 15 bp, Homo sapiens
aataacttccataat

SEQ ID NO: 21723 - DNA, 15 bp, Homo sapiens
caataacttccataa

SEQ ID NO: 21724 - DNA, 15 bp, Homo sapiens
ccaataacttccata

SEQ ID NO: 21725 - DNA, 15 bp, Homo sapiens
gccaataacttccat

SEQ ID NO: 21726 - DNA, 15 bp, Homo sapiens
tgccaataacttcca

SEQ ID NO: 21727 - DNA, 15 bp, Homo sapiens
ttgccaataacttcc

SEQ ID NO: 21728 - DNA, 15 bp, Homo sapiens
cttgccaataacttc

SEQ ID NO: 21729 - DNA, 15 bp, Homo sapiens
acttgccaataactt

SEQ ID NO: 21730 - DNA, 15 bp, Homo sapiens
tacttgccaataact

SEQ ID NO: 21731 - DNA, 15 bp, Homo sapiens
ttacttgccaataac

SEQ ID NO: 21732 - DNA, 15 bp, Homo sapiens
cttacttgccaataa

SEQ ID NO: 21733 - DNA, 15 bp, Homo sapiens
tcttacttgccaata

SEQ ID NO: 21734 - DNA, 15 bp, Homo sapiens
ttcttacttgccaat

SEQ ID NO: 21735 - DNA, 15 bp, Homo sapiens
cttcttacttgccaa

SEQ ID NO: 21736 - DNA, 15 bp, Homo sapiens
acttcttacttgcca

SEQ ID NO: 21737 - DNA, 15 bp, Homo sapiens
gacttcttacttgcc

SEQ ID NO: 21738 - DNA, 15 bp, Homo sapiens
ggacttcttacttgc

SEQ ID NO: 21739 - DNA, 15 bp, Homo sapiens
aggacttcttacttg

SEQ ID NO: 21740 - DNA, 15 bp, Homo sapiens
aaggacttcttactt

SEQ ID NO: 21741 - DNA, 15 bp, Homo sapiens
taaggacttcttact

SEQ ID NO: 21742 - DNA, 15 bp, Homo sapiens
ctaaggacttcttac

SEQ ID NO: 21743 - DNA, 15 bp, Homo sapiens
gctaaggacttctta

SEQ ID NO: 21744 - DNA, 15 bp, Homo sapiens
cgctaaggacttctt

SEQ ID NO: 21745 - DNA, 15 bp, Homo sapiens
ccgctaaggacttct

SEQ ID NO: 21746 - DNA, 15 bp, Homo sapiens
tccgctaaggacttc

SEQ ID NO: 21747 - DNA, 15 bp, Homo sapiens
ctccgctaaggactt

SEQ ID NO: 21748 - DNA, 15 bp, Homo sapiens
cctccgctaaggact

SEQ ID NO: 21749 - DNA, 15 bp, Homo sapiens
tcctccgctaaggac

SEQ ID NO: 21750 - DNA, 15 bp, Homo sapiens
ctcctccgctaagga

SEQ ID NO: 21751 - DNA, 15 bp, Homo sapiens
cctcctccgctaagg

SEQ ID NO: 21752 - DNA, 15 bp, Homo sapiens
tcctcctccgctaag

SEQ ID NO: 21753 - DNA, 15 bp, Homo sapiens
ttcctcctccgctaa

SEQ ID NO: 21754 - DNA, 15 bp, Homo sapiens
cttcctcctccgcta

SEQ ID NO: 21755 - DNA, 15 bp, Homo sapiens
ccttcctcctccgct

SEQ ID NO: 21756 - DNA, 15 bp, Homo sapiens
accttcctcctccgc

SEQ ID NO: 21757 - DNA, 15 bp, Homo sapiens
caccttcctcctccg

SEQ ID NO: 21758 - DNA, 15 bp, Homo sapiens
tcaccttcctcctcc

SEQ ID NO: 21759 - DNA, 15 bp, Homo sapiens
ttcaccttcctcctc

SEQ ID NO: 21760 - DNA, 15 bp, Homo sapiens
tttcaccttcctcct

SEQ ID NO: 21761 - DNA, 15 bp, Homo sapiens
ctttcaccttcctcc

SEQ ID NO: 21762 - DNA, 15 bp, Homo sapiens
gctttcaccttcctc

SEQ ID NO: 21763 - DNA, 15 bp, Homo sapiens
tgctttcaccttcct

SEQ ID NO: 21764 - DNA, 15 bp, Homo sapiens
ctgctttcaccttcc

SEQ ID NO: 21765 - DNA, 15 bp, Homo sapiens
tctgctttcaccttc

SEQ ID NO: 21766 - DNA, 15 bp, Homo sapiens
ttctgctttcacctt

SEQ ID NO: 21767 - DNA, 15 bp, Homo sapiens
cttctgctttcacct

SEQ ID NO: 21768 - DNA, 15 bp, Homo sapiens
tcttctgctttcacc

SEQ ID NO: 21769 - DNA, 15 bp, Homo sapiens
ttcttctgctttcac

SEQ ID NO: 21770 - DNA, 15 bp, Homo sapiens
tttcttctgctttca

SEQ ID NO: 21771 - DNA, 15 bp, Homo sapiens
atttcttctgctttc

SEQ ID NO: 21772 - DNA, 15 bp, Homo sapiens
gatttcttctgcttt

SEQ ID NO: 21773 - DNA, 15 bp, Homo sapiens
tgatttcttctgctt

SEQ ID NO: 21774 - DNA, 15 bp, Homo sapiens
atgatttcttctgct

SEQ ID NO: 21775 - DNA, 15 bp, Homo sapiens
aatgatttcttctgc

SEQ ID NO: 21776 - DNA, 15 bp, Homo sapiens
caatgatttcttctg

SEQ ID NO: 21777 - DNA, 15 bp, Homo sapiens
acaatgatttcttct

SEQ ID NO: 21778 - DNA, 15 bp, Homo sapiens
aacaatgatttcttc

SEQ ID NO: 21779 - DNA, 15 bp, Homo sapiens
aaacaatgatttctt

SEQ ID NO: 21780 - DNA, 15 bp, Homo sapiens
gaaacaatgatttct

SEQ ID NO: 21781 - DNA, 15 bp, Homo sapiens
ggaaacaatgatttc

SEQ ID NO: 21782 - DNA, 15 bp, Homo sapiens
aggaaacaatgattt

SEQ ID NO: 21783 - DNA, 15 bp, Homo sapiens
taggaaacaatgatt

SEQ ID NO: 21784 - DNA, 15 bp, Homo sapiens
gtaggaaacaatgat

SEQ ID NO: 21785 - DNA, 15 bp, Homo sapiens
agtaggaaacaatga

SEQ ID NO: 21786 - DNA, 15 bp, Homo sapiens
tagtaggaaacaatg

SEQ ID NO: 21787 - DNA, 15 bp, Homo sapiens
ttagtaggaaacaat

SEQ ID NO: 21788 - DNA, 15 bp, Homo sapiens
tttagtaggaaacaa

SEQ ID NO: 21789 - DNA, 15 bp, Homo sapiens
ctttagtaggaaaca

SEQ ID NO: 21790 - DNA, 15 bp, Homo sapiens
actttagtaggaaac

SEQ ID NO: 21791 - DNA, 15 bp, Homo sapiens
tactttagtaggaaa

SEQ ID NO: 21792 - DNA, 15 bp, Homo sapiens
ctactttagtaggaa

SEQ ID NO: 21793 - DNA, 15 bp, Homo sapiens
gctactttagtagga

SEQ ID NO: 21794 - DNA, 15 bp, Homo sapiens
ggctactttagtagg

SEQ ID NO: 21795 - DNA, 15 bp, Homo sapiens
tggctactttagtag

SEQ ID NO: 21796 - DNA, 15 bp, Homo sapiens
ctggctactttagta

SEQ ID NO: 21797 - DNA, 15 bp, Homo sapiens
tctggctactttagt

SEQ ID NO: 21798 - DNA, 15 bp, Homo sapiens
ttctggctactttag

SEQ ID NO: 21799 - DNA, 15 bp, Homo sapiens
gttctggctacttta

SEQ ID NO: 21800 - DNA, 15 bp, Homo sapiens
tgttctggctacttt

SEQ ID NO: 21801 - DNA, 15 bp, Homo sapiens
ttgttctggctactt

SEQ ID NO: 21802 - DNA, 15 bp, Homo sapiens
gttgttctggctact

SEQ ID NO: 21803 - DNA, 15 bp, Homo sapiens
tgttgttctggctac

SEQ ID NO: 21804 - DNA, 15 bp, Homo sapiens
ttgttgttctggcta

SEQ ID NO: 21805 - DNA, 15 bp, Homo sapiens
attgttgttctggct

SEQ ID NO: 21806 - DNA, 15 bp, Homo sapiens
cattgttgttctggc

SEQ ID NO: 21807 - DNA, 15 bp, Homo sapiens
tcattgttgttctgg

SEQ ID NO: 21808 - DNA, 15 bp, Homo sapiens
ctcattgttgttctg

SEQ ID NO: 21809 - DNA, 15 bp, Homo sapiens
gctcattgttgttct

SEQ ID NO: 21810 - DNA, 15 bp, Homo sapiens
tgctcattgttgttc

SEQ ID NO: 21811 - DNA, 15 bp, Homo sapiens
atgctcattgttgtt

SEQ ID NO: 21812 - DNA, 15 bp, Homo sapiens
catgctcattgttgt

SEQ ID NO: 21813 - DNA, 15 bp, Homo sapiens
ccatgctcattgttg

SEQ ID NO: 21814 - DNA, 15 bp, Homo sapiens
tccatgctcattgtt

SEQ ID NO: 21815 - DNA, 15 bp, Homo sapiens
ttccatgctcattgt

SEQ ID NO: 21816 - DNA, 15 bp, Homo sapiens
cttccatgctcattg

SEQ ID NO: 21817 - DNA, 15 bp, Homo sapiens
ccttccatgctcatt

SEQ ID NO: 21818 - DNA, 15 bp, Homo sapiens
accttccatgctcat

SEQ ID NO: 21819 - DNA, 15 bp, Homo sapiens
taccttccatgctca

SEQ ID NO: 21820 - DNA, 15 bp, Homo sapiens
ctaccttccatgctc

SEQ ID NO: 21821 - DNA, 15 bp, Homo sapiens
tctaccttccatgct

SEQ ID NO: 21822 - DNA, 15 bp, Homo sapiens
ctctaccttccatgc

SEQ ID NO: 21823 - DNA, 15 bp, Homo sapiens
tctctaccttccatg

SEQ ID NO: 21824 - DNA, 15 bp, Homo sapiens
ttctctaccttccat

SEQ ID NO: 21825 - DNA, 15 bp, Homo sapiens
gttctctaccttcca

SEQ ID NO: 21826 - DNA, 15 bp, Homo sapiens
tgttctctaccttcc

SEQ ID NO: 21827 - DNA, 15 bp, Homo sapiens
ctgttctctaccttc

SEQ ID NO: 21828 - DNA, 15 bp, Homo sapiens
actgttctctacctt

SEQ ID NO: 21829 - DNA, 15 bp, Homo sapiens
gactgttctctacct

SEQ ID NO: 21830 - DNA, 15 bp, Homo sapiens
tgactgttctctacc

SEQ ID NO: 21831 - DNA, 15 bp, Homo sapiens
ttgactgttctctac

SEQ ID NO: 21832 - DNA, 15 bp, Homo sapiens
attgactgttctcta

SEQ ID NO: 21833 - DNA, 15 bp, Homo sapiens
aattgactgttctct

SEQ ID NO: 21834 - DNA, 15 bp, Homo sapiens
gaattgactgttctc

SEQ ID NO: 21835 - DNA, 15 bp, Homo sapiens
tgaattgactgttct

SEQ ID NO: 21836 - DNA, 15 bp, Homo sapiens
ttgaattgactgttc

SEQ ID NO: 21837 - DNA, 15 bp, Homo sapiens
cttgaattgactgtt

SEQ ID NO: 21838 - DNA, 15 bp, Homo sapiens
tcttgaattgactgt

SEQ ID NO: 21839 - DNA, 15 bp, Homo sapiens
ctcttgaattgactg

SEQ ID NO: 21840 - DNA, 15 bp, Homo sapiens
gctcttgaattgact

SEQ ID NO: 21841 - DNA, 15 bp, Homo sapiens
ggctcttgaattgac

SEQ ID NO: 21842 - DNA, 15 bp, Homo sapiens
gggctcttgaattga

SEQ ID NO: 21843 - DNA, 15 bp, Homo sapiens
ggggctcttgaattg

SEQ ID NO: 21844 - DNA, 15 bp, Homo sapiens
aggggctcttgaatt

SEQ ID NO: 21845 - DNA, 15 bp, Homo sapiens
caggggctcttgaat

SEQ ID NO: 21846 - DNA, 15 bp, Homo sapiens
acaggggctcttgaa

SEQ ID NO: 21847 - DNA, 15 bp, Homo sapiens
tacaggggctcttga

SEQ ID NO: 21848 - DNA, 15 bp, Homo sapiens
atacaggggctcttg

SEQ ID NO: 21849 - DNA, 15 bp, Homo sapiens
tatacaggggctctt

SEQ ID NO: 21850 - DNA, 15 bp, Homo sapiens
ttatacaggggctct

SEQ ID NO: 21851 - DNA, 15 bp, Homo sapiens
attatacaggggctc

SEQ ID NO: 21852 - DNA, 15 bp, Homo sapiens
aattatacaggggct

SEQ ID NO: 21853 - DNA, 15 bp, Homo sapiens
taattatacaggggc

SEQ ID NO: 21854 - DNA, 15 bp, Homo sapiens
ctaattatacagggg

SEQ ID NO: 21855 - DNA, 15 bp, Homo sapiens
tctaattatacaggg

SEQ ID NO: 21856 - DNA, 15 bp, Homo sapiens
ttctaattatacagg

SEQ ID NO: 21857 - DNA, 15 bp, Homo sapiens
gttctaattatacag

SEQ ID NO: 21858 - DNA, 15 bp, Homo sapiens
agttctaattataca

SEQ ID NO: 21859 - DNA, 15 bp, Homo sapiens
gagttctaattatac

SEQ ID NO: 21860 - DNA, 15 bp, Homo sapiens
ggagttctaattata

SEQ ID NO: 21861 - DNA, 15 bp, Homo sapiens
tggagttctaattat

SEQ ID NO: 21862 - DNA, 15 bp, Homo sapiens
gtggagttctaatta

SEQ ID NO: 21863 - DNA, 15 bp, Homo sapiens
agtggagttctaatt

SEQ ID NO: 21864 - DNA, 15 bp, Homo sapiens
cagtggagttctaat

SEQ ID NO: 21865 - DNA, 15 bp, Homo sapiens
acagtggagttctaa

SEQ ID NO: 21866 - DNA, 15 bp, Homo sapiens
cacagtggagttcta

SEQ ID NO: 21867 - DNA, 15 bp, Homo sapiens
tcacagtggagttct

SEQ ID NO: 21868 - DNA, 15 bp, Homo sapiens
gtcacagtggagttc

SEQ ID NO: 21869 - DNA, 15 bp, Homo sapiens
agtcacagtggagtt

SEQ ID NO: 21870 - DNA, 15 bp, Homo sapiens
aagtcacagtggagt

SEQ ID NO: 21871 - DNA, 15 bp, Homo sapiens
gaagtcacagtggag

SEQ ID NO: 21872 - DNA, 15 bp, Homo sapiens
ggaagtcacagtgga

SEQ ID NO: 21873 - DNA, 15 bp, Homo sapiens
gggaagtcacagtgg

SEQ ID NO: 21874 - DNA, 15 bp, Homo sapiens
agggaagtcacagtg

SEQ ID NO: 21875 - DNA, 15 bp, Homo sapiens
aagggaagtcacagt

SEQ ID NO: 21876 - DNA, 15 bp, Homo sapiens
aaagggaagtcacag

SEQ ID NO: 21877 - DNA, 15 bp, Homo sapiens
aaaagggaagtcaca

SEQ ID NO: 21878 - DNA, 15 bp, Homo sapiens
aaaaagggaagtcac

SEQ ID NO: 21879 - DNA, 15 bp, Homo sapiens
taaaaagggaagtca

SEQ ID NO: 21880 - DNA, 15 bp, Homo sapiens
ataaaaagggaagtc

SEQ ID NO: 21881 - DNA, 15 bp, Homo sapiens
aataaaaagggaagt

SEQ ID NO: 21882 - DNA, 15 bp, Homo sapiens
aaataaaaagggaag

SEQ ID NO: 21883 - DNA, 15 bp, Homo sapiens
gaaataaaaagggaa

SEQ ID NO: 21884 - DNA, 15 bp, Homo sapiens
agaaataaaaaggga

SEQ ID NO: 21885 - DNA, 15 bp, Homo sapiens
gagaaataaaaaggg

SEQ ID NO: 21886 - DNA, 15 bp, Homo sapiens
tgagaaataaaaagg

SEQ ID NO: 21887 - DNA, 15 bp, Homo sapiens
ttgagaaataaaaag

SEQ ID NO: 21888 - DNA, 15 bp, Homo sapiens
attgagaaataaaaa

SEQ ID NO: 21889 - DNA, 15 bp, Homo sapiens
aattgagaaataaaa

SEQ ID NO: 21890 - DNA, 15 bp, Homo sapiens
aaattgagaaataaa

SEQ ID NO: 21891 - DNA, 15 bp, Homo sapiens
aaaattgagaaataa

SEQ ID NO: 21892 - DNA, 15 bp, Homo sapiens
aaaaattgagaaata

SEQ ID NO: 21893 - DNA, 15 bp, Homo sapiens
aaaaaattgagaaat

SEQ ID NO: 21894 - DNA, 15 bp, Homo sapiens
gaaaaaattgagaaa

SEQ ID NO: 21895 - DNA, 15 bp, Homo sapiens
ggaaaaaattgagaa

SEQ ID NO: 21896 - DNA, 15 bp, Homo sapiens
gggaaaaaattgaga

SEQ ID NO: 21897 - DNA, 15 bp, Homo sapiens
tgggaaaaaattgag

SEQ ID NO: 21898 - DNA, 15 bp, Homo sapiens
gtgggaaaaaattga

SEQ ID NO: 21899 - DNA, 15 bp, Homo sapiens
tgtgggaaaaaattg

SEQ ID NO: 21900 - DNA, 15 bp, Homo sapiens
atgtgggaaaaaatt

SEQ ID NO: 21901 - DNA, 15 bp, Homo sapiens
aatgtgggaaaaaat

SEQ ID NO: 21902 - DNA, 15 bp, Homo sapiens
gaatgtgggaaaaaa

SEQ ID NO: 21903 - DNA, 15 bp, Homo sapiens
agaatgtgggaaaaa

SEQ ID NO: 21904 - DNA, 15 bp, Homo sapiens
gagaatgtgggaaaa

SEQ ID NO: 21905 - DNA, 15 bp, Homo sapiens
agagaatgtgggaaa

SEQ ID NO: 21906 - DNA, 15 bp, Homo sapiens
aagagaatgtgggaa

SEQ ID NO: 21907 - DNA, 15 bp, Homo sapiens
aaagagaatgtggga

SEQ ID NO: 21908 - DNA, 15 bp, Homo sapiens
gaaagagaatgtggg

SEQ ID NO: 21909 - DNA, 15 bp, Homo sapiens
agaaagagaatgtgg

SEQ ID NO: 21910 - DNA, 15 bp, Homo sapiens
aagaaagagaatgtg

SEQ ID NO: 21911 - DNA, 15 bp, Homo sapiens
aaagaaagagaatgt

SEQ ID NO: 21912 - DNA, 15 bp, Homo sapiens
aaaagaaagagaatg

SEQ ID NO: 21913 - DNA, 15 bp, Homo sapiens
gaaaagaaagagaat

SEQ ID NO: 21914 - DNA, 15 bp, Homo sapiens
agaaaagaaagagaa

SEQ ID NO: 21915 - DNA, 15 bp, Homo sapiens
gagaaaagaaagaga

SEQ ID NO: 21916 - DNA, 15 bp, Homo sapiens
agagaaaagaaagag

SEQ ID NO: 21917 - DNA, 15 bp, Homo sapiens
tagagaaaagaaaga

SEQ ID NO: 21918 - DNA, 15 bp, Homo sapiens
atagagaaaagaaag

SEQ ID NO: 21919 - DNA, 15 bp, Homo sapiens
aatagagaaaagaaa

SEQ ID NO: 21920 - DNA, 15 bp, Homo sapiens
gaatagagaaaagaa

SEQ ID NO: 21921 - DNA, 15 bp, Homo sapiens
tgaatagagaaaaga

SEQ ID NO: 21922 - DNA, 15 bp, Homo sapiens
gtgaatagagaaaag

SEQ ID NO: 21923 - DNA, 15 bp, Homo sapiens
agtgaatagagaaaa

SEQ ID NO: 21924 - DNA, 15 bp, Homo sapiens
gagtgaatagagaaa

SEQ ID NO: 21925 - DNA, 15 bp, Homo sapiens
tgagtgaatagagaa

SEQ ID NO: 21926 - DNA, 15 bp, Homo sapiens
gtgagtgaatagaga

SEQ ID NO: 21927 - DNA, 15 bp, Homo sapiens
tgtgagtgaatagag

SEQ ID NO: 21928 - DNA, 15 bp, Homo sapiens
gtgtgagtgaataga

SEQ ID NO: 21929 - DNA, 15 bp, Homo sapiens
agtgtgagtgaatag

SEQ ID NO: 21930 - DNA, 15 bp, Homo sapiens
cagtgtgagtgaata

SEQ ID NO: 21931 - DNA, 15 bp, Homo sapiens
gcagtgtgagtgaat

SEQ ID NO: 21932 - DNA, 15 bp, Homo sapiens
tgcagtgtgagtgaa

SEQ ID NO: 21933 - DNA, 15 bp, Homo sapiens
ttgcagtgtgagtga

SEQ ID NO: 21934 - DNA, 15 bp, Homo sapiens
attgcagtgtgagtg

SEQ ID NO: 21935 - DNA, 15 bp, Homo sapiens
cattgcagtgtgagt

SEQ ID NO: 21936 - DNA, 15 bp, Homo sapiens
gcattgcagtgtgag

SEQ ID NO: 21937 - DNA, 15 bp, Homo sapiens
ggcattgcagtgtga

SEQ ID NO: 21938 - DNA, 15 bp, Homo sapiens
gggcattgcagtgtg

SEQ ID NO: 21939 - DNA, 15 bp, Homo sapiens
agggcattgcagtgt

SEQ ID NO: 21940 - DNA, 15 bp, Homo sapiens
tagggcattgcagtg

SEQ ID NO: 21941 - DNA, 15 bp, Homo sapiens
atagggcattgcagt

SEQ ID NO: 21942 - DNA, 15 bp, Homo sapiens
gatagggcattgcag

SEQ ID NO: 21943 - DNA, 15 bp, Homo sapiens
ggatagggcattgca

SEQ ID NO: 21944 - DNA, 15 bp, Homo sapiens
gggatagggcattgc

SEQ ID NO: 21945 - DNA, 15 bp, Homo sapiens
tgggatagggcattg

SEQ ID NO: 21946 - DNA, 15 bp, Homo sapiens
ttgggatagggcatt

SEQ ID NO: 21947 - DNA, 15 bp, Homo sapiens
tttgggatagggcat

SEQ ID NO: 21948 - DNA, 15 bp, Homo sapiens
ctttgggatagggca

SEQ ID NO: 21949 - DNA, 15 bp, Homo sapiens
cctttgggatagggc

SEQ ID NO: 21950 - DNA, 15 bp, Homo sapiens
gcctttgggataggg

SEQ ID NO: 21951 - DNA, 15 bp, Homo sapiens
agcctttgggatagg

SEQ ID NO: 21952 - DNA, 15 bp, Homo sapiens
aagcctttgggatag

SEQ ID NO: 21953 - DNA, 15 bp, Homo sapiens
aaagcctttgggata

SEQ ID NO: 21954 - DNA, 15 bp, Homo sapiens
caaagcctttgggat

SEQ ID NO: 21955 - DNA, 15 bp, Homo sapiens
ccaaagcctttggga

SEQ ID NO: 21956 - DNA, 15 bp, Homo sapiens
tccaaagcctttggg

SEQ ID NO: 21957 - DNA, 15 bp, Homo sapiens
atccaaagcctttgg

SEQ ID NO: 21958 - DNA, 15 bp, Homo sapiens
catccaaagcctttg

SEQ ID NO: 21959 - DNA, 15 bp, Homo sapiens
acatccaaagccttt

SEQ ID NO: 21960 - DNA, 15 bp, Homo sapiens
aacatccaaagcctt

SEQ ID NO: 21961 - DNA, 15 bp, Homo sapiens
aaacatccaaagcct

SEQ ID NO: 21962 - DNA, 15 bp, Homo sapiens
caaacatccaaagcc

SEQ ID NO: 21963 - DNA, 15 bp, Homo sapiens
acaaacatccaaagc

SEQ ID NO: 21964 - DNA, 15 bp, Homo sapiens
cacaaacatccaaag

SEQ ID NO: 21965 - DNA, 15 bp, Homo sapiens
tcacaaacatccaaa

SEQ ID NO: 21966 - DNA, 15 bp, Homo sapiens
gtcacaaacatccaa

SEQ ID NO: 21967 - DNA, 15 bp, Homo sapiens
tgtcacaaacatcca

SEQ ID NO: 21968 - DNA, 15 bp, Homo sapiens
gtgtcacaaacatcc

SEQ ID NO: 21969 - DNA, 15 bp, Homo sapiens
ggtgtcacaaacatc

SEQ ID NO: 21970 - DNA, 15 bp, Homo sapiens
aggtgtcacaaacat

SEQ ID NO: 21971 - DNA, 15 bp, Homo sapiens
aaggtgtcacaaaca

SEQ ID NO: 21972 - DNA, 15 bp, Homo sapiens
aaaggtgtcacaaac

SEQ ID NO: 21973 - DNA, 15 bp, Homo sapiens
gaaaggtgtcacaaa

SEQ ID NO: 21974 - DNA, 15 bp, Homo sapiens
agaaaggtgtcacaa

SEQ ID NO: 21975 - DNA, 15 bp, Homo sapiens
cagaaaggtgtcaca

SEQ ID NO: 21976 - DNA, 15 bp, Homo sapiens
gcagaaaggtgtcac

SEQ ID NO: 21977 - DNA, 15 bp, Homo sapiens
tgcagaaaggtgtca

SEQ ID NO: 21978 - DNA, 15 bp, Homo sapiens
ttgcagaaaggtgtc

SEQ ID NO: 21979 - DNA, 15 bp, Homo sapiens
attgcagaaaggtgt

SEQ ID NO: 21980 - DNA, 15 bp, Homo sapiens
gattgcagaaaggtg

SEQ ID NO: 21981 - DNA, 15 bp, Homo sapiens
tgattgcagaaaggt

SEQ ID NO: 21982 - DNA, 15 bp, Homo sapiens
gtgattgcagaaagg

SEQ ID NO: 21983 - DNA, 15 bp, Homo sapiens
ggtgattgcagaaag

SEQ ID NO: 21984 - DNA, 15 bp, Homo sapiens
aggtgattgcagaaa

SEQ ID NO: 21985 - DNA, 15 bp, Homo sapiens
taggtgattgcagaa

SEQ ID NO: 21986 - DNA, 15 bp, Homo sapiens
ttaggtgattgcaga

SEQ ID NO: 21987 - DNA, 15 bp, Homo sapiens
attaggtgattgcag

SEQ ID NO: 21988 - DNA, 15 bp, Homo sapiens
aattaggtgattgca

SEQ ID NO: 21989 - DNA, 15 bp, Homo sapiens
aaattaggtgattgc

SEQ ID NO: 21990 - DNA, 15 bp, Homo sapiens
caaattaggtgattg

SEQ ID NO: 21991 - DNA, 15 bp, Homo sapiens
acaaattaggtgatt

SEQ ID NO: 21992 - DNA, 15 bp, Homo sapiens
cacaaattaggtgat

SEQ ID NO: 21993 - DNA, 15 bp, Homo sapiens
acacaaattaggtga

SEQ ID NO: 21994 - DNA, 15 bp, Homo sapiens
tacacaaattaggtg

SEQ ID NO: 21995 - DNA, 15 bp, Homo sapiens
atacacaaattaggt

SEQ ID NO: 21996 - DNA, 15 bp, Homo sapiens
aatacacaaattagg

SEQ ID NO: 21997 - DNA, 15 bp, Homo sapiens
aaatacacaaattag

SEQ ID NO: 21998 - DNA, 15 bp, Homo sapiens
aaaatacacaaatta

SEQ ID NO: 21999 - DNA, 15 bp, Homo sapiens
aaaaatacacaaatt

SEQ ID NO: 22000 - DNA, 15 bp, Homo sapiens
aaaaaatacacaaat

SEQ ID NO: 22001 - DNA, 15 bp, Homo sapiens
gaaaaaatacacaaa

SEQ ID NO: 22002 - DNA, 15 bp, Homo sapiens
ggaaaaaatacacaa

SEQ ID NO: 22003 - DNA, 15 bp, Homo sapiens
gggaaaaaatacaca

SEQ ID NO: 22004 - DNA, 15 bp, Homo sapiens
ggggaaaaaatacac

SEQ ID NO: 22005 - DNA, 15 bp, Homo sapiens
tggggaaaaaataca

SEQ ID NO: 22006 - DNA, 15 bp, Homo sapiens
gtggggaaaaaatac

SEQ ID NO: 22007 - DNA, 15 bp, Homo sapiens
tgtggggaaaaaata

SEQ ID NO: 22008 - DNA, 15 bp, Homo sapiens
ctgtggggaaaaaat

SEQ ID NO: 22009 - DNA, 15 bp, Homo sapiens
actgtggggaaaaaa

SEQ ID NO: 22010 - DNA, 15 bp, Homo sapiens
tactgtggggaaaaa

SEQ ID NO: 22011 - DNA, 15 bp, Homo sapiens
ttactgtggggaaaa

SEQ ID NO: 22012 - DNA, 15 bp, Homo sapiens
gttactgtggggaaa

SEQ ID NO: 22013 - DNA, 15 bp, Homo sapiens
ggttactgtggggaa

SEQ ID NO: 22014 - DNA, 15 bp, Homo sapiens
aggttactgtgggga

SEQ ID NO: 22015 - DNA, 15 bp, Homo sapiens
aaggttactgtgggg

SEQ ID NO: 22016 - DNA, 15 bp, Homo sapiens
caaggttactgtggg

SEQ ID NO: 22017 - DNA, 15 bp, Homo sapiens
acaaggttactgtgg

SEQ ID NO: 22018 - DNA, 15 bp, Homo sapiens
aacaaggttactgtg

SEQ ID NO: 22019 - DNA, 15 bp, Homo sapiens
taacaaggttactgt

SEQ ID NO: 22020 - DNA, 15 bp, Homo sapiens
gtaacaaggttactg

SEQ ID NO: 22021 - DNA, 15 bp, Homo sapiens
agtaacaaggttact

SEQ ID NO: 22022 - DNA, 15 bp, Homo sapiens
aagtaacaaggttac

SEQ ID NO: 22023 - DNA, 15 bp, Homo sapiens
taagtaacaaggtta

SEQ ID NO: 22024 - DNA, 15 bp, Homo sapiens
ctaagtaacaaggtt

SEQ ID NO: 22025 - DNA, 15 bp, Homo sapiens
tctaagtaacaaggt

SEQ ID NO: 22026 - DNA, 15 bp, Homo sapiens
ctctaagtaacaagg

SEQ ID NO: 22027 - DNA, 15 bp, Homo sapiens
tctctaagtaacaag

SEQ ID NO: 22028 - DNA, 15 bp, Homo sapiens
gtctctaagtaacaa

SEQ ID NO: 22029 - DNA, 15 bp, Homo sapiens
tgtctctaagtaaca

SEQ ID NO: 22030 - DNA, 15 bp, Homo sapiens
ctgtctctaagtaac

SEQ ID NO: 22031 - DNA, 15 bp, Homo sapiens
cctgtctctaagtaa

SEQ ID NO: 22032 - DNA, 15 bp, Homo sapiens
tcctgtctctaagta

SEQ ID NO: 22033 - DNA, 15 bp, Homo sapiens
ctcctgtctctaagt

SEQ ID NO: 22034 - DNA, 15 bp, Homo sapiens
cctcctgtctctaag

SEQ ID NO: 22035 - DNA, 15 bp, Homo sapiens
acctcctgtctctaa

SEQ ID NO: 22036 - DNA, 15 bp, Homo sapiens
cacctcctgtctcta

SEQ ID NO: 22037 - DNA, 15 bp, Homo sapiens
ccacctcctgtctct

SEQ ID NO: 22038 - DNA, 15 bp, Homo sapiens
accacctcctgtctc

SEQ ID NO: 22039 - DNA, 15 bp, Homo sapiens
aaccacctcctgtct

SEQ ID NO: 22040 - DNA, 15 bp, Homo sapiens
caaccacctcctgtc

SEQ ID NO: 22041 - DNA, 15 bp, Homo sapiens
tcaaccacctcctgt

SEQ ID NO: 22042 - DNA, 15 bp, Homo sapiens
atcaaccacctcctg

SEQ ID NO: 22043 - DNA, 15 bp, Homo sapiens
tatcaaccacctcct

SEQ ID NO: 22044 - DNA, 15 bp, Homo sapiens
atatcaaccacctcc

SEQ ID NO: 22045 - DNA, 15 bp, Homo sapiens
tatatcaaccacctc

SEQ ID NO: 22046 - DNA, 15 bp, Homo sapiens
atatatcaaccacct

SEQ ID NO: 22047 - DNA, 15 bp, Homo sapiens
aatatatcaaccacc

SEQ ID NO: 22048 - DNA, 15 bp, Homo sapiens
aaatatatcaaccac

SEQ ID NO: 22049 - DNA, 15 bp, Homo sapiens
gaaatatatcaacca

SEQ ID NO: 22050 - DNA, 15 bp, Homo sapiens
ggaaatatatcaacc

SEQ ID NO: 22051 - DNA, 15 bp, Homo sapiens
aggaaatatatcaac

SEQ ID NO: 22052 - DNA, 15 bp, Homo sapiens
aaggaaatatatcaa

SEQ ID NO: 22053 - DNA, 15 bp, Homo sapiens
caaggaaatatatca

SEQ ID NO: 22054 - DNA, 15 bp, Homo sapiens
tcaaggaaatatatc

SEQ ID NO: 22055 - DNA, 15 bp, Homo sapiens
ttcaaggaaatatat

SEQ ID NO: 22056 - DNA, 15 bp, Homo sapiens
cttcaaggaaatata

SEQ ID NO: 22057 - DNA, 15 bp, Homo sapiens
gcttcaaggaaatat

SEQ ID NO: 22058 - DNA, 15 bp, Homo sapiens
cgcttcaaggaaata

SEQ ID NO: 22059 - DNA, 15 bp, Homo sapiens
ccgcttcaaggaaat

SEQ ID NO: 22060 - DNA, 15 bp, Homo sapiens
cccgcttcaaggaaa

SEQ ID NO: 22061 - DNA, 15 bp, Homo sapiens
tcccgcttcaaggaa

SEQ ID NO: 22062 - DNA, 15 bp, Homo sapiens
ctcccgcttcaagga

SEQ ID NO: 22063 - DNA, 15 bp, Homo sapiens
cctcccgcttcaagg

SEQ ID NO: 22064 - DNA, 15 bp, Homo sapiens
tcctcccgcttcaag

SEQ ID NO: 22065 - DNA, 15 bp, Homo sapiens
ttcctcccgcttcaa

SEQ ID NO: 22066 - DNA, 15 bp, Homo sapiens
attcctcccgcttca

SEQ ID NO: 22067 - DNA, 15 bp, Homo sapiens
gattcctcccgcttc

SEQ ID NO: 22068 - DNA, 15 bp, Homo sapiens
tgattcctcccgctt

SEQ ID NO: 22069 - DNA, 15 bp, Homo sapiens
ttgattcctcccgct

SEQ ID NO: 22070 - DNA, 15 bp, Homo sapiens
attgattcctcccgc

SEQ ID NO: 22071 - DNA, 15 bp, Homo sapiens
aattgattcctcccg

SEQ ID NO: 22072 - DNA, 15 bp, Homo sapiens
gaattgattcctccc

SEQ ID NO: 22073 - DNA, 15 bp, Homo sapiens
agaattgattcctcc

SEQ ID NO: 22074 - DNA, 15 bp, Homo sapiens
tagaattgattcctc

SEQ ID NO: 22075 - DNA, 15 bp, Homo sapiens
ttagaattgattcct

SEQ ID NO: 22076 - DNA, 15 bp, Homo sapiens
gttagaattgattcc

SEQ ID NO: 22077 - DNA, 15 bp, Homo sapiens
agttagaattgattc

SEQ ID NO: 22078 - DNA, 15 bp, Homo sapiens
gagttagaattgatt

SEQ ID NO: 22079 - DNA, 15 bp, Homo sapiens
ggagttagaattgat

SEQ ID NO: 22080 - DNA, 15 bp, Homo sapiens
aggagttagaattga

SEQ ID NO: 22081 - DNA, 15 bp, Homo sapiens
aaggagttagaattg

SEQ ID NO: 22082 - DNA, 15 bp, Homo sapiens
aaaggagttagaatt

SEQ ID NO: 22083 - DNA, 15 bp, Homo sapiens
aaaaggagttagaat

SEQ ID NO: 22084 - DNA, 15 bp, Homo sapiens
caaaaggagttagaa

SEQ ID NO: 22085 - DNA, 15 bp, Homo sapiens
ccaaaaggagttaga

SEQ ID NO: 22086 - DNA, 15 bp, Homo sapiens
accaaaaggagttag

SEQ ID NO: 22087 - DNA, 15 bp, Homo sapiens
taccaaaaggagtta

SEQ ID NO: 22088 - DNA, 15 bp, Homo sapiens
gtaccaaaaggagtt

SEQ ID NO: 22089 - DNA, 15 bp, Homo sapiens
agtaccaaaaggagt

SEQ ID NO: 22090 - DNA, 15 bp, Homo sapiens
cagtaccaaaaggag

SEQ ID NO: 22091 - DNA, 15 bp, Homo sapiens
tcagtaccaaaagga

SEQ ID NO: 22092 - DNA, 15 bp, Homo sapiens
atcagtaccaaaagg

SEQ ID NO: 22093 - DNA, 15 bp, Homo sapiens
catcagtaccaaaag

SEQ ID NO: 22094 - DNA, 15 bp, Homo sapiens
tcatcagtaccaaaa

SEQ ID NO: 22095 - DNA, 15 bp, Homo sapiens
ctcatcagtaccaaa

SEQ ID NO: 22096 - DNA, 15 bp, Homo sapiens
gctcatcagtaccaa

SEQ ID NO: 22097 - DNA, 15 bp, Homo sapiens
tgctcatcagtacca

SEQ ID NO: 22098 - DNA, 15 bp, Homo sapiens
atgctcatcagtacc

SEQ ID NO: 22099 - DNA, 15 bp, Homo sapiens
catgctcatcagtac

SEQ ID NO: 22100 - DNA, 15 bp, Homo sapiens
ccatgctcatcagta

SEQ ID NO: 22101 - DNA, 15 bp, Homo sapiens
accatgctcatcagt

SEQ ID NO: 22102 - DNA, 15 bp, Homo sapiens
caccatgctcatcag

SEQ ID NO: 22103 - DNA, 15 bp, Homo sapiens
gcaccatgctcatca

SEQ ID NO: 22104 - DNA, 15 bp, Homo sapiens
agcaccatgctcatc

SEQ ID NO: 22105 - DNA, 15 bp, Homo sapiens
tagcaccatgctcat

SEQ ID NO: 22106 - DNA, 15 bp, Homo sapiens
gtagcaccatgctca

SEQ ID NO: 22107 - DNA, 15 bp, Homo sapiens
tgtagcaccatgctc

SEQ ID NO: 22108 - DNA, 15 bp, Homo sapiens
ttgtagcaccatgct

SEQ ID NO: 22109 - DNA, 15 bp, Homo sapiens
cttgtagcaccatgc

SEQ ID NO: 22110 - DNA, 15 bp, Homo sapiens
ccttgtagcaccatg

SEQ ID NO: 22111 - DNA, 15 bp, Homo sapiens
tccttgtagcaccat

SEQ ID NO: 22112 - DNA, 15 bp, Homo sapiens
ttccttgtagcacca

SEQ ID NO: 22113 - DNA, 15 bp, Homo sapiens
tttccttgtagcacc

SEQ ID NO: 22114 - DNA, 15 bp, Homo sapiens
atttccttgtagcac

SEQ ID NO: 22115 - DNA, 15 bp, Homo sapiens
aatttccttgtagca

SEQ ID NO: 22116 - DNA, 15 bp, Homo sapiens
aaatttccttgtagc

SEQ ID NO: 22117 - DNA, 15 bp, Homo sapiens
gaaatttccttgtag

SEQ ID NO: 22118 - DNA, 15 bp, Homo sapiens
agaaatttccttgta

SEQ ID NO: 22119 - DNA, 15 bp, Homo sapiens
tagaaatttccttgt

SEQ ID NO: 22120 - DNA, 15 bp, Homo sapiens
ctagaaatttccttg

SEQ ID NO: 22121 - DNA, 15 bp, Homo sapiens
tctagaaatttcctt

SEQ ID NO: 22122 - DNA, 15 bp, Homo sapiens
atctagaaatttcct

SEQ ID NO: 22123 - DNA, 15 bp, Homo sapiens
tatctagaaatttcc

SEQ ID NO: 22124 - DNA, 15 bp, Homo sapiens
ctatctagaaatttc

SEQ ID NO: 22125 - DNA, 15 bp, Homo sapiens
gctatctagaaattt

SEQ ID NO: 22126 - DNA, 15 bp, Homo sapiens
tgctatctagaaatt

SEQ ID NO: 22127 - DNA, 15 bp, Homo sapiens
atgctatctagaaat

SEQ ID NO: 22128 - DNA, 15 bp, Homo sapiens
tatgctatctagaaa

SEQ ID NO: 22129 - DNA, 15 bp, Homo sapiens
ttatgctatctagaa

SEQ ID NO: 22130 - DNA, 15 bp, Homo sapiens
gttatgctatctaga

SEQ ID NO: 22131 - DNA, 15 bp, Homo sapiens
tgttatgctatctag

SEQ ID NO: 22132 - DNA, 15 bp, Homo sapiens
atgttatgctatcta

SEQ ID NO: 22133 - DNA, 15 bp, Homo sapiens
aatgttatgctatct

SEQ ID NO: 22134 - DNA, 15 bp, Homo sapiens
taatgttatgctatc

SEQ ID NO: 22135 - DNA, 15 bp, Homo sapiens
ataatgttatgctat

SEQ ID NO: 22136 - DNA, 15 bp, Homo sapiens
tataatgttatgcta

SEQ ID NO: 22137 - DNA, 15 bp, Homo sapiens
ttataatgttatgct

SEQ ID NO: 22138 - DNA, 15 bp, Homo sapiens
gttataatgttatgc

SEQ ID NO: 22139 - DNA, 15 bp, Homo sapiens
tgttataatgttatg

SEQ ID NO: 22140 - DNA, 15 bp, Homo sapiens
atgttataatgttat

SEQ ID NO: 22141 - DNA, 15 bp, Homo sapiens
aatgttataatgtta

SEQ ID NO: 22142 - DNA, 15 bp, Homo sapiens
gaatgttataatgtt

SEQ ID NO: 22143 - DNA, 15 bp, Homo sapiens
tgaatgttataatgt

SEQ ID NO: 22144 - DNA, 15 bp, Homo sapiens
gtgaatgttataatg

SEQ ID NO: 22145 - DNA, 15 bp, Homo sapiens
agtgaatgttataat

SEQ ID NO: 22146 - DNA, 15 bp, Homo sapiens
gagtgaatgttataa

SEQ ID NO: 22147 - DNA, 15 bp, Homo sapiens
agagtgaatgttata

SEQ ID NO: 22148 - DNA, 15 bp, Homo sapiens
cagagtgaatgttat

SEQ ID NO: 22149 - DNA, 15 bp, Homo sapiens
ccagagtgaatgtta

SEQ ID NO: 22150 - DNA, 15 bp, Homo sapiens
cccagagtgaatgtt

SEQ ID NO: 22151 - DNA, 15 bp, Homo sapiens
tcccagagtgaatgt

SEQ ID NO: 22152 - DNA, 15 bp, Homo sapiens
ttcccagagtgaatg

SEQ ID NO: 22153 - DNA, 15 bp, Homo sapiens
gttcccagagtgaat

SEQ ID NO: 22154 - DNA, 15 bp, Homo sapiens
tgttcccagagtgaa

SEQ ID NO: 22155 - DNA, 15 bp, Homo sapiens
ttgttcccagagtga

SEQ ID NO: 22156 - DNA, 15 bp, Homo sapiens
tttgttcccagagtg

SEQ ID NO: 22157 - DNA, 15 bp, Homo sapiens
ctttgttcccagagt

SEQ ID NO: 22158 - DNA, 15 bp, Homo sapiens
tctttgttcccagag

SEQ ID NO: 22159 - DNA, 15 bp, Homo sapiens
atctttgttcccaga

SEQ ID NO: 22160 - DNA, 15 bp, Homo sapiens
gatctttgttcccag

SEQ ID NO: 22161 - DNA, 15 bp, Homo sapiens
agatctttgttccca

SEQ ID NO: 22162 - DNA, 15 bp, Homo sapiens
gagatctttgttccc

SEQ ID NO: 22163 - DNA, 15 bp, Homo sapiens
tgagatctttgttcc

SEQ ID NO: 22164 - DNA, 15 bp, Homo sapiens
ctgagatctttgttc

SEQ ID NO: 22165 - DNA, 15 bp, Homo sapiens
tctgagatctttgtt

SEQ ID NO: 22166 - DNA, 15 bp, Homo sapiens
ctctgagatctttgt

SEQ ID NO: 22167 - DNA, 15 bp, Homo sapiens
gctctgagatctttg

SEQ ID NO: 22168 - DNA, 15 bp, Homo sapiens
tgctctgagatcttt

SEQ ID NO: 22169 - DNA, 15 bp, Homo sapiens
atgctctgagatctt

SEQ ID NO: 22170 - DNA, 15 bp, Homo sapiens
aatgctctgagatct

SEQ ID NO: 22171 - DNA, 15 bp, Homo sapiens
aaatgctctgagatc

SEQ ID NO: 22172 - DNA, 15 bp, Homo sapiens
aaaatgctctgagat

SEQ ID NO: 22173 - DNA, 15 bp, Homo sapiens
gaaaatgctctgaga

SEQ ID NO: 22174 - DNA, 15 bp, Homo sapiens
agaaaatgctctgag

SEQ ID NO: 22175 - DNA, 15 bp, Homo sapiens
cagaaaatgctctga

SEQ ID NO: 22176 - DNA, 15 bp, Homo sapiens
gcagaaaatgctctg

SEQ ID NO: 22177 - DNA, 15 bp, Homo sapiens
ggcagaaaatgctct

SEQ ID NO: 22178 - DNA, 15 bp, Homo sapiens
cggcagaaaatgctc

SEQ ID NO: 22179 - DNA, 15 bp, Homo sapiens
gcggcagaaaatgct

SEQ ID NO: 22180 - DNA, 15 bp, Homo sapiens
agcggcagaaaatgc

SEQ ID NO: 22181 - DNA, 15 bp, Homo sapiens
tagcggcagaaaatg

SEQ ID NO: 22182 - DNA, 15 bp, Homo sapiens
atagcggcagaaaat

SEQ ID NO: 22183 - DNA, 15 bp, Homo sapiens
aatagcggcagaaaa

SEQ ID NO: 22184 - DNA, 15 bp, Homo sapiens
aaatagcggcagaaa

SEQ ID NO: 22185 - DNA, 15 bp, Homo sapiens
taaatagcggcagaa

SEQ ID NO: 22186 - DNA, 15 bp, Homo sapiens
ctaaatagcggcaga

SEQ ID NO: 22187 - DNA, 15 bp, Homo sapiens
cctaaatagcggcag

SEQ ID NO: 22188 - DNA, 15 bp, Homo sapiens
tcctaaatagcggca

SEQ ID NO: 22189 - DNA, 15 bp, Homo sapiens
ttcctaaatagcggc

SEQ ID NO: 22190 - DNA, 15 bp, Homo sapiens
tttcctaaatagcgg

SEQ ID NO: 22191 - DNA, 15 bp, Homo sapiens
ttttcctaaatagcg

SEQ ID NO: 22192 - DNA, 15 bp, Homo sapiens
attttcctaaatagc

SEQ ID NO: 22193 - DNA, 15 bp, Homo sapiens
aattttcctaaatag

SEQ ID NO: 22194 - DNA, 15 bp, Homo sapiens
caattttcctaaata

SEQ ID NO: 22195 - DNA, 15 bp, Homo sapiens
acaattttcctaaat

SEQ ID NO: 22196 - DNA, 15 bp, Homo sapiens
aacaattttcctaaa

SEQ ID NO: 22197 - DNA, 15 bp, Homo sapiens
caacaattttcctaa

SEQ ID NO: 22198 - DNA, 15 bp, Homo sapiens
ccaacaattttccta

SEQ ID NO: 22199 - DNA, 15 bp, Homo sapiens
tccaacaattttcct

SEQ ID NO: 22200 - DNA, 15 bp, Homo sapiens
atccaacaattttcc

SEQ ID NO: 22201 - DNA, 15 bp, Homo sapiens
gatccaacaattttc

SEQ ID NO: 22202 - DNA, 15 bp, Homo sapiens
tgatccaacaatttt

SEQ ID NO: 22203 - DNA, 15 bp, Homo sapiens
gtgatccaacaattt

SEQ ID NO: 22204 - DNA, 15 bp, Homo sapiens
ggtgatccaacaatt

SEQ ID NO: 22205 - DNA, 15 bp, Homo sapiens
aggtgatccaacaat

SEQ ID NO: 22206 - DNA, 15 bp, Homo sapiens
aaggtgatccaacaa

SEQ ID NO: 22207 - DNA, 15 bp, Homo sapiens
aaaggtgatccaaca

SEQ ID NO: 22208 - DNA, 15 bp, Homo sapiens
gaaaggtgatccaac

SEQ ID NO: 22209 - DNA, 15 bp, Homo sapiens
ggaaaggtgatccaa

SEQ ID NO: 22210 - DNA, 15 bp, Homo sapiens
gggaaaggtgatcca

SEQ ID NO: 22211 - DNA, 15 bp, Homo sapiens
tgggaaaggtgatcc

SEQ ID NO: 22212 - DNA, 15 bp, Homo sapiens
ctgggaaaggtgatc

SEQ ID NO: 22213 - DNA, 15 bp, Homo sapiens
cctgggaaaggtgat

SEQ ID NO: 22214 - DNA, 15 bp, Homo sapiens
acctgggaaaggtga

SEQ ID NO: 22215 - DNA, 15 bp, Homo sapiens
aacctgggaaaggtg

SEQ ID NO: 22216 - DNA, 15 bp, Homo sapiens
caacctgggaaaggt

SEQ ID NO: 22217 - DNA, 15 bp, Homo sapiens
gcaacctgggaaagg

SEQ ID NO: 22218 - DNA, 15 bp, Homo sapiens
cgcaacctgggaaag

SEQ ID NO: 22219 - DNA, 15 bp, Homo sapiens
tcgcaacctgggaaa

SEQ ID NO: 22220 - DNA, 15 bp, Homo sapiens
ttcgcaacctgggaa

SEQ ID NO: 22221 - DNA, 15 bp, Homo sapiens
cttcgcaacctggga

SEQ ID NO: 22222 - DNA, 15 bp, Homo sapiens
tcttcgcaacctggg

SEQ ID NO: 22223 - DNA, 15 bp, Homo sapiens
atcttcgcaacctgg

SEQ ID NO: 22224 - DNA, 15 bp, Homo sapiens
aatcttcgcaacctg

SEQ ID NO: 22225 - DNA, 15 bp, Homo sapiens
aaatcttcgcaacct

SEQ ID NO: 22226 - DNA, 15 bp, Homo sapiens
aaaatcttcgcaacc

SEQ ID NO: 22227 - DNA, 15 bp, Homo sapiens
caaaatcttcgcaac

SEQ ID NO: 22228 - DNA, 15 bp, Homo sapiens
ccaaaatcttcgcaa

SEQ ID NO: 22229 - DNA, 15 bp, Homo sapiens
tccaaaatcttcgca

SEQ ID NO: 22230 - DNA, 15 bp, Homo sapiens
ctccaaaatcttcgc

SEQ ID NO: 22231 - DNA, 15 bp, Homo sapiens
actccaaaatcttcg

SEQ ID NO: 22232 - DNA, 15 bp, Homo sapiens
cactccaaaatcttc

SEQ ID NO: 22233 - DNA, 15 bp, Homo sapiens
ccactccaaaatctt

SEQ ID NO: 22234 - DNA, 15 bp, Homo sapiens
tccactccaaaatct

SEQ ID NO: 22235 - DNA, 15 bp, Homo sapiens
atccactccaaaatc

SEQ ID NO: 22236 - DNA, 15 bp, Homo sapiens
aatccactccaaaat

SEQ ID NO: 22237 - DNA, 15 bp, Homo sapiens
aaatccactccaaaa

SEQ ID NO: 22238 - DNA, 15 bp, Homo sapiens
taaatccactccaaa

SEQ ID NO: 22239 - DNA, 15 bp, Homo sapiens
ttaaatccactccaa

SEQ ID NO: 22240 - DNA, 15 bp, Homo sapiens
gttaaatccactcca

SEQ ID NO: 22241 - DNA, 15 bp, Homo sapiens
tgttaaatccactcc

SEQ ID NO: 22242 - DNA, 15 bp, Homo sapiens
atgttaaatccactc

SEQ ID NO: 22243 - DNA, 15 bp, Homo sapiens
aatgttaaatccact

SEQ ID NO: 22244 - DNA, 15 bp, Homo sapiens
gaatgttaaatccac

SEQ ID NO: 22245 - DNA, 15 bp, Homo sapiens
tgaatgttaaatcca

SEQ ID NO: 22246 - DNA, 15 bp, Homo sapiens
gtgaatgttaaatcc

SEQ ID NO: 22247 - DNA, 15 bp, Homo sapiens
agtgaatgttaaatc

SEQ ID NO: 22248 - DNA, 15 bp, Homo sapiens
gagtgaatgttaaat

SEQ ID NO: 22249 - DNA, 15 bp, Homo sapiens
tgagtgaatgttaaa

SEQ ID NO: 22250 - DNA, 15 bp, Homo sapiens
ttgagtgaatgttaa

SEQ ID NO: 22251 - DNA, 15 bp, Homo sapiens
tttgagtgaatgtta

SEQ ID NO: 22252 - DNA, 15 bp, Homo sapiens
ctttgagtgaatgtt

SEQ ID NO: 22253 - DNA, 15 bp, Homo sapiens
cctttgagtgaatgt

SEQ ID NO: 22254 - DNA, 15 bp, Homo sapiens
acctttgagtgaatg

SEQ ID NO: 22255 - DNA, 15 bp, Homo sapiens
aacctttgagtgaat

SEQ ID NO: 22256 - DNA, 15 bp, Homo sapiens
taacctttgagtgaa

SEQ ID NO: 22257 - DNA, 15 bp, Homo sapiens
ttaacctttgagtga

SEQ ID NO: 22258 - DNA, 15 bp, Homo sapiens
tttaacctttgagtg

SEQ ID NO: 22259 - DNA, 15 bp, Homo sapiens
ttttaacctttgagt

SEQ ID NO: 22260 - DNA, 15 bp, Homo sapiens
tttttaacctttgag

SEQ ID NO: 22261 - DNA, 15 bp, Homo sapiens
gtttttaacctttga

SEQ ID NO: 22262 - DNA, 15 bp, Homo sapiens
agtttttaacctttg

SEQ ID NO: 22263 - DNA, 15 bp, Homo sapiens
aagtttttaaccttt

SEQ ID NO: 22264 - DNA, 15 bp, Homo sapiens
aaagtttttaacctt

SEQ ID NO: 22265 - DNA, 15 bp, Homo sapiens
caaagtttttaacct

SEQ ID NO: 22266 - DNA, 15 bp, Homo sapiens
tcaaagtttttaacc

SEQ ID NO: 22267 - DNA, 15 bp, Homo sapiens
gtcaaagtttttaac

SEQ ID NO: 22268 - DNA, 15 bp, Homo sapiens
tgtcaaagtttttaa

SEQ ID NO: 22269 - DNA, 15 bp, Homo sapiens
ttgtcaaagttttta

SEQ ID NO: 22270 - DNA, 15 bp, Homo sapiens
tttgtcaaagttttt

SEQ ID NO: 22271 - DNA, 15 bp, Homo sapiens
ctttgtcaaagtttt

SEQ ID NO: 22272 - DNA, 15 bp, Homo sapiens
actttgtcaaagttt

SEQ ID NO: 22273 - DNA, 15 bp, Homo sapiens
tactttgtcaaagtt

SEQ ID NO: 22274 - DNA, 15 bp, Homo sapiens
gtactttgtcaaagt

SEQ ID NO: 22275 - DNA, 15 bp, Homo sapiens
tgtactttgtcaaag

SEQ ID NO: 22276 - DNA, 15 bp, Homo sapiens
atgtactttgtcaaa

SEQ ID NO: 22277 - DNA, 15 bp, Homo sapiens
aatgtactttgtcaa

SEQ ID NO: 22278 - DNA, 15 bp, Homo sapiens
aaatgtactttgtca

SEQ ID NO: 22279 - DNA, 15 bp, Homo sapiens
aaaatgtactttgtc

SEQ ID NO: 22280 - DNA, 15 bp, Homo sapiens
taaaatgtactttgt

SEQ ID NO: 22281 - DNA, 15 bp, Homo sapiens
gtaaaatgtactttg

SEQ ID NO: 22282 - DNA, 15 bp, Homo sapiens
agtaaaatgtacttt

SEQ ID NO: 22283 - DNA, 15 bp, Homo sapiens
aagtaaaatgtactt

SEQ ID NO: 22284 - DNA, 15 bp, Homo sapiens
gaagtaaaatgtact

SEQ ID NO: 22285 - DNA, 15 bp, Homo sapiens
ggaagtaaaatgtac

SEQ ID NO: 22286 - DNA, 15 bp, Homo sapiens
aggaagtaaaatgta

SEQ ID NO: 22287 - DNA, 15 bp, Homo sapiens
caggaagtaaaatgt

SEQ ID NO: 22288 - DNA, 15 bp, Homo sapiens
acaggaagtaaaatg

SEQ ID NO: 22289 - DNA, 15 bp, Homo sapiens
tacaggaagtaaaat

SEQ ID NO: 22290 - DNA, 15 bp, Homo sapiens
ctacaggaagtaaaa

SEQ ID NO: 22291 - DNA, 15 bp, Homo sapiens
actacaggaagtaaa

SEQ ID NO: 22292 - DNA, 15 bp, Homo sapiens
cactacaggaagtaa

SEQ ID NO: 22293 - DNA, 15 bp, Homo sapiens
ccactacaggaagta

SEQ ID NO: 22294 - DNA, 15 bp, Homo sapiens
accactacaggaagt

SEQ ID NO: 22295 - DNA, 15 bp, Homo sapiens
gaccactacaggaag

SEQ ID NO: 22296 - DNA, 15 bp, Homo sapiens
agaccactacaggaa

SEQ ID NO: 22297 - DNA, 15 bp, Homo sapiens
cagaccactacagga

SEQ ID NO: 22298 - DNA, 15 bp, Homo sapiens
ccagaccactacagg

SEQ ID NO: 22299 - DNA, 15 bp, Homo sapiens
cccagaccactacag

SEQ ID NO: 22300 - DNA, 15 bp, Homo sapiens
tcccagaccactaca

SEQ ID NO: 22301 - DNA, 15 bp, Homo sapiens
ttcccagaccactac

SEQ ID NO: 22302 - DNA, 15 bp, Homo sapiens
tttcccagaccacta

SEQ ID NO: 22303 - DNA, 15 bp, Homo sapiens
atttcccagaccact

SEQ ID NO: 22304 - DNA, 15 bp, Homo sapiens
catttcccagaccac

SEQ ID NO: 22305 - DNA, 15 bp, Homo sapiens
gcatttcccagacca

SEQ ID NO: 22306 - DNA, 15 bp, Homo sapiens
ggcatttcccagacc

SEQ ID NO: 22307 - DNA, 15 bp, Homo sapiens
gggcatttcccagac

SEQ ID NO: 22308 - DNA, 15 bp, Homo sapiens
tgggcatttcccaga

SEQ ID NO: 22309 - DNA, 15 bp, Homo sapiens
ctgggcatttcccag

SEQ ID NO: 22310 - DNA, 15 bp, Homo sapiens
tctgggcatttccca

SEQ ID NO: 22311 - DNA, 15 bp, Homo sapiens
ctctgggcatttccc

SEQ ID NO: 22312 - DNA, 15 bp, Homo sapiens
actctgggcatttcc

SEQ ID NO: 22313 - DNA, 15 bp, Homo sapiens
cactctgggcatttc

SEQ ID NO: 22314 - DNA, 15 bp, Homo sapiens
ccactctgggcattt

SEQ ID NO: 22315 - DNA, 15 bp, Homo sapiens
tccactctgggcatt

SEQ ID NO: 22316 - DNA, 15 bp, Homo sapiens
atccactctgggcat

SEQ ID NO: 22317 - DNA, 15 bp, Homo sapiens
gatccactctgggca

SEQ ID NO: 22318 - DNA, 15 bp, Homo sapiens
tgatccactctgggc

SEQ ID NO: 22319 - DNA, 15 bp, Homo sapiens
ttgatccactctggg

SEQ ID NO: 22320 - DNA, 15 bp, Homo sapiens
tttgatccactctgg

SEQ ID NO: 22321 - DNA, 15 bp, Homo sapiens
ttttgatccactctg

SEQ ID NO: 22322 - DNA, 15 bp, Homo sapiens
attttgatccactct

SEQ ID NO: 22323 - DNA, 15 bp, Homo sapiens
cattttgatccactc

SEQ ID NO: 22324 - DNA, 15 bp, Homo sapiens
acattttgatccact

SEQ ID NO: 22325 - DNA, 15 bp, Homo sapiens
gacattttgatccac

SEQ ID NO: 22326 - DNA, 15 bp, Homo sapiens
ggacattttgatcca

SEQ ID NO: 22327 - DNA, 15 bp, Homo sapiens
aggacattttgatcc

SEQ ID NO: 22328 - DNA, 15 bp, Homo sapiens
taggacattttgatc

SEQ ID NO: 22329 - DNA, 15 bp, Homo sapiens
ataggacattttgat

SEQ ID NO: 22330 - DNA, 15 bp, Homo sapiens
tataggacattttga

SEQ ID NO: 22331 - DNA, 15 bp, Homo sapiens
gtataggacattttg

SEQ ID NO: 22332 - DNA, 15 bp, Homo sapiens
tgtataggacatttt

SEQ ID NO: 22333 - DNA, 15 bp, Homo sapiens
ttgtataggacattt

SEQ ID NO: 22334 - DNA, 15 bp, Homo sapiens
cttgtataggacatt

SEQ ID NO: 22335 - DNA, 15 bp, Homo sapiens
gcttgtataggacat

SEQ ID NO: 22336 - DNA, 15 bp, Homo sapiens
agcttgtataggaca

SEQ ID NO: 22337 - DNA, 15 bp, Homo sapiens
tagcttgtataggac

SEQ ID NO: 22338 - DNA, 15 bp, Homo sapiens
gtagcttgtatagga

SEQ ID NO: 22339 - DNA, 15 bp, Homo sapiens
tgtagcttgtatagg

SEQ ID NO: 22340 - DNA, 15 bp, Homo sapiens
ctgtagcttgtatag

SEQ ID NO: 22341 - DNA, 15 bp, Homo sapiens
gctgtagcttgtata

SEQ ID NO: 22342 - DNA, 15 bp, Homo sapiens
agctgtagcttgtat

SEQ ID NO: 22343 - DNA, 15 bp, Homo sapiens
aagctgtagcttgta

SEQ ID NO: 22344 - DNA, 15 bp, Homo sapiens
aaagctgtagcttgt

SEQ ID NO: 22345 - DNA, 15 bp, Homo sapiens
gaaagctgtagcttg

SEQ ID NO: 22346 - DNA, 15 bp, Homo sapiens
agaaagctgtagctt

SEQ ID NO: 22347 - DNA, 15 bp, Homo sapiens
gagaaagctgtagct

SEQ ID NO: 22348 - DNA, 15 bp, Homo sapiens
ggagaaagctgtagc

SEQ ID NO: 22349 - DNA, 15 bp, Homo sapiens
gggagaaagctgtag

SEQ ID NO: 22350 - DNA, 15 bp, Homo sapiens
tgggagaaagctgta

SEQ ID NO: 22351 - DNA, 15 bp, Homo sapiens
ctgggagaaagctgt

SEQ ID NO: 22352 - DNA, 15 bp, Homo sapiens
gctgggagaaagctg

SEQ ID NO: 22353 - DNA, 15 bp, Homo sapiens
agctgggagaaagct

SEQ ID NO: 22354 - DNA, 15 bp, Homo sapiens
aagctgggagaaagc

SEQ ID NO: 22355 - DNA, 15 bp, Homo sapiens
gaagctgggagaaag

SEQ ID NO: 22356 - DNA, 15 bp, Homo sapiens
tgaagctgggagaaa

SEQ ID NO: 22357 - DNA, 15 bp, Homo sapiens
ctgaagctgggagaa

SEQ ID NO: 22358 - DNA, 15 bp, Homo sapiens
cctgaagctgggaga

SEQ ID NO: 22359 - DNA, 15 bp, Homo sapiens
gcctgaagctgggag

SEQ ID NO: 22360 - DNA, 15 bp, Homo sapiens
agcctgaagctggga

SEQ ID NO: 22361 - DNA, 15 bp, Homo sapiens
cagcctgaagctggg

SEQ ID NO: 22362 - DNA, 15 bp, Homo sapiens
tcagcctgaagctgg

SEQ ID NO: 22363 - DNA, 15 bp, Homo sapiens
ttcagcctgaagctg

SEQ ID NO: 22364 - DNA, 15 bp, Homo sapiens
attcagcctgaagct

SEQ ID NO: 22365 - DNA, 15 bp, Homo sapiens
aattcagcctgaagc

SEQ ID NO: 22366 - DNA, 15 bp, Homo sapiens
gaattcagcctgaag

SEQ ID NO: 22367 - DNA, 15 bp, Homo sapiens
agaattcagcctgaa

SEQ ID NO: 22368 - DNA, 15 bp, Homo sapiens
aagaattcagcctga

SEQ ID NO: 22369 - DNA, 15 bp, Homo sapiens
taagaattcagcctg

SEQ ID NO: 22370 - DNA, 15 bp, Homo sapiens
ttaagaattcagcct

SEQ ID NO: 22371 - DNA, 15 bp, Homo sapiens
tttaagaattcagcc

SEQ ID NO: 22372 - DNA, 15 bp, Homo sapiens
atttaagaattcagc

SEQ ID NO: 22373 - DNA, 15 bp, Homo sapiens
gatttaagaattcag

SEQ ID NO: 22374 - DNA, 15 bp, Homo sapiens
ggatttaagaattca

SEQ ID NO: 22375 - DNA, 15 bp, Homo sapiens
tggatttaagaattc

SEQ ID NO: 22376 - DNA, 15 bp, Homo sapiens
ctggatttaagaatt

SEQ ID NO: 22377 - DNA, 15 bp, Homo sapiens
tctggatttaagaat

SEQ ID NO: 22378 - DNA, 15 bp, Homo sapiens
ctctggatttaagaa

SEQ ID NO: 22379 - DNA, 15 bp, Homo sapiens
cctctggatttaaga

SEQ ID NO: 22380 - DNA, 15 bp, Homo sapiens
acctctggatttaag

SEQ ID NO: 22381 - DNA, 15 bp, Homo sapiens
aacctctggatttaa

SEQ ID NO: 22382 - DNA, 15 bp, Homo sapiens
caacctctggattta

SEQ ID NO: 22383 - DNA, 15 bp, Homo sapiens
gcaacctctggattt

SEQ ID NO: 22384 - DNA, 15 bp, Homo sapiens
tgcaacctctggatt

SEQ ID NO: 22385 - DNA, 15 bp, Homo sapiens
atgcaacctctggat

SEQ ID NO: 22386 - DNA, 15 bp, Homo sapiens
catgcaacctctgga

SEQ ID NO: 22387 - DNA, 15 bp, Homo sapiens
acatgcaacctctgg

SEQ ID NO: 22388 - DNA, 15 bp, Homo sapiens
aacatgcaacctctg

SEQ ID NO: 22389 - DNA, 15 bp, Homo sapiens
taacatgcaacctct

SEQ ID NO: 22390 - DNA, 15 bp, Homo sapiens
gtaacatgcaacctc

SEQ ID NO: 22391 - DNA, 15 bp, Homo sapiens
agtaacatgcaacct

SEQ ID NO: 22392 - DNA, 15 bp, Homo sapiens
tagtaacatgcaacc

SEQ ID NO: 22393 - DNA, 15 bp, Homo sapiens
ttagtaacatgcaac

SEQ ID NO: 22394 - DNA, 15 bp, Homo sapiens
tttagtaacatgcaa

SEQ ID NO: 22395 - DNA, 15 bp, Homo sapiens
gtttagtaacatgca

SEQ ID NO: 22396 - DNA, 15 bp, Homo sapiens
agtttagtaacatgc

SEQ ID NO: 22397 - DNA, 15 bp, Homo sapiens
cagtttagtaacatg

SEQ ID NO: 22398 - DNA, 15 bp, Homo sapiens
gcagtttagtaacat

SEQ ID NO: 22399 - DNA, 15 bp, Homo sapiens
agcagtttagtaaca

SEQ ID NO: 22400 - DNA, 15 bp, Homo sapiens
cagcagtttagtaac

SEQ ID NO: 22401 - DNA, 15 bp, Homo sapiens
ccagcagtttagtaa

SEQ ID NO: 22402 - DNA, 15 bp, Homo sapiens
accagcagtttagta

SEQ ID NO: 22403 - DNA, 15 bp, Homo sapiens
aaccagcagtttagt

SEQ ID NO: 22404 - DNA, 15 bp, Homo sapiens
aaaccagcagtttag

SEQ ID NO: 22405 - DNA, 15 bp, Homo sapiens
aaaaccagcagttta

SEQ ID NO: 22406 - DNA, 15 bp, Homo sapiens
aaaaaccagcagttt

SEQ ID NO: 22407 - DNA, 15 bp, Homo sapiens
taaaaaccagcagtt

SEQ ID NO: 22408 - DNA, 15 bp, Homo sapiens
ctaaaaaccagcagt

SEQ ID NO: 22409 - DNA, 15 bp, Homo sapiens
tctaaaaaccagcag

SEQ ID NO: 22410 - DNA, 15 bp, Homo sapiens
gtctaaaaaccagca

SEQ ID NO: 22411 - DNA, 15 bp, Homo sapiens
tgtctaaaaaccagc

SEQ ID NO: 22412 - DNA, 15 bp, Homo sapiens
gtgtctaaaaaccag

SEQ ID NO: 22413 - DNA, 15 bp, Homo sapiens
agtgtctaaaaacca

SEQ ID NO: 22414 - DNA, 15 bp, Homo sapiens
tagtgtctaaaaacc

SEQ ID NO: 22415 - DNA, 15 bp, Homo sapiens
ctagtgtctaaaaac

SEQ ID NO: 22416 - DNA, 15 bp, Homo sapiens
tctagtgtctaaaaa

SEQ ID NO: 22417 - DNA, 15 bp, Homo sapiens
gtctagtgtctaaaa

SEQ ID NO: 22418 - DNA, 15 bp, Homo sapiens
agtctagtgtctaaa

SEQ ID NO: 22419 - DNA, 15 bp, Homo sapiens
aagtctagtgtctaa

SEQ ID NO: 22420 - DNA, 15 bp, Homo sapiens
aaagtctagtgtcta

SEQ ID NO: 22421 - DNA, 15 bp, Homo sapiens
taaagtctagtgtct

SEQ ID NO: 22422 - DNA, 15 bp, Homo sapiens
ttaaagtctagtgtc

SEQ ID NO: 22423 - DNA, 15 bp, Homo sapiens
tttaaagtctagtgt

SEQ ID NO: 22424 - DNA, 15 bp, Homo sapiens
ctttaaagtctagtg

SEQ ID NO: 22425 - DNA, 15 bp, Homo sapiens
tctttaaagtctagt

SEQ ID NO: 22426 - DNA, 15 bp, Homo sapiens
atctttaaagtctag

SEQ ID NO: 22427 - DNA, 15 bp, Homo sapiens
aatctttaaagtcta

SEQ ID NO: 22428 - DNA, 15 bp, Homo sapiens
aaatctttaaagtct

SEQ ID NO: 22429 - DNA, 15 bp, Homo sapiens
aaaatctttaaagtc

SEQ ID NO: 22430 - DNA, 15 bp, Homo sapiens
aaaaatctttaaagt

SEQ ID NO: 22431 - DNA, 15 bp, Homo sapiens
aaaaaatctttaaag

SEQ ID NO: 22432 - DNA, 15 bp, Homo sapiens
taaaaaatctttaaa

SEQ ID NO: 22433 - DNA, 15 bp, Homo sapiens
ataaaaaatctttaa

SEQ ID NO: 22434 - DNA, 15 bp, Homo sapiens
aataaaaaatcttta

SEQ ID NO: 22435 - DNA, 15 bp, Homo sapiens
aaataaaaaatcttt

SEQ ID NO: 22436 - DNA, 15 bp, Homo sapiens
aaaataaaaaatctt

SEQ ID NO: 22437 - DNA, 15 bp, Homo sapiens
aaaaataaaaaatct

SEQ ID NO: 22438 - DNA, 15 bp, Homo sapiens
taaaaataaaaaatc

SEQ ID NO: 22439 - DNA, 15 bp, Homo sapiens
ttaaaaataaaaaat

SEQ ID NO: 22440 - DNA, 15 bp, Homo sapiens
tttaaaaataaaaaa

SEQ ID NO: 22441 - DNA, 15 bp, Homo sapiens
atttaaaaataaaaa

SEQ ID NO: 22442 - DNA, 15 bp, Homo sapiens
aatttaaaaataaaa

SEQ ID NO: 22443 - DNA, 15 bp, Homo sapiens
taatttaaaaataaa

SEQ ID NO: 22444 - DNA, 15 bp, Homo sapiens
ttaatttaaaaataa

SEQ ID NO: 22445 - DNA, 15 bp, Homo sapiens
attaatttaaaaata

SEQ ID NO: 22446 - DNA, 15 bp, Homo sapiens
tattaatttaaaaat

SEQ ID NO: 22447 - DNA, 15 bp, Homo sapiens
gtattaatttaaaaa

SEQ ID NO: 22448 - DNA, 15 bp, Homo sapiens
agtattaatttaaaa

SEQ ID NO: 22449 - DNA, 15 bp, Homo sapiens
aagtattaatttaaa

SEQ ID NO: 22450 - DNA, 15 bp, Homo sapiens
aaagtattaatttaa

SEQ ID NO: 22451 - DNA, 15 bp, Homo sapiens
caaagtattaattta

SEQ ID NO: 22452 - DNA, 15 bp, Homo sapiens
acaaagtattaattt

SEQ ID NO: 22453 - DNA, 15 bp, Homo sapiens
tacaaagtattaatt

SEQ ID NO: 22454 - DNA, 15 bp, Homo sapiens
ttacaaagtattaat

SEQ ID NO: 22455 - DNA, 15 bp, Homo sapiens
attacaaagtattaa

SEQ ID NO: 22456 - DNA, 15 bp, Homo sapiens
tattacaaagtatta

SEQ ID NO: 22457 - DNA, 15 bp, Homo sapiens
gtattacaaagtatt

SEQ ID NO: 22458 - DNA, 15 bp, Homo sapiens
tgtattacaaagtat

SEQ ID NO: 22459 - DNA, 15 bp, Homo sapiens
atgtattacaaagta

SEQ ID NO: 22460 - DNA, 15 bp, Homo sapiens
aatgtattacaaagt

SEQ ID NO: 22461 - DNA, 15 bp, Homo sapiens
aaatgtattacaaag

SEQ ID NO: 22462 - DNA, 15 bp, Homo sapiens
aaaatgtattacaaa

SEQ ID NO: 22463 - DNA, 15 bp, Homo sapiens
caaaatgtattacaa

SEQ ID NO: 22464 - DNA, 15 bp, Homo sapiens
gcaaaatgtattaca

SEQ ID NO: 22465 - DNA, 15 bp, Homo sapiens
ggcaaaatgtattac

SEQ ID NO: 22466 - DNA, 15 bp, Homo sapiens
tggcaaaatgtatta

SEQ ID NO: 22467 - DNA, 15 bp, Homo sapiens
atggcaaaatgtatt

SEQ ID NO: 22468 - DNA, 15 bp, Homo sapiens
aatggcaaaatgtat

SEQ ID NO: 22469 - DNA, 15 bp, Homo sapiens
aaatggcaaaatgta

SEQ ID NO: 22470 - DNA, 15 bp, Homo sapiens
caaatggcaaaatgt

SEQ ID NO: 22471 - DNA, 15 bp, Homo sapiens
acaaatggcaaaatg

SEQ ID NO: 22472 - DNA, 15 bp, Homo sapiens
gacaaatggcaaaat

SEQ ID NO: 22473 - DNA, 15 bp, Homo sapiens
agacaaatggcaaaa

SEQ ID NO: 22474 - DNA, 15 bp, Homo sapiens
tagacaaatggcaaa

SEQ ID NO: 22475 - DNA, 15 bp, Homo sapiens
ttagacaaatggcaa

SEQ ID NO: 22476 - DNA, 15 bp, Homo sapiens
tttagacaaatggca

SEQ ID NO: 22477 - DNA, 15 bp, Homo sapiens
ttttagacaaatggc

SEQ ID NO: 22478 - DNA, 15 bp, Homo sapiens
attttagacaaatgg

SEQ ID NO: 22479 - DNA, 15 bp, Homo sapiens
tattttagacaaatg

SEQ ID NO: 22480 - DNA, 15 bp, Homo sapiens
ctattttagacaaat

SEQ ID NO: 22481 - DNA, 15 bp, Homo sapiens
tctattttagacaaa

SEQ ID NO: 22482 - DNA, 15 bp, Homo sapiens
ttctattttagacaa

SEQ ID NO: 22483 - DNA, 15 bp, Homo sapiens
attctattttagaca

SEQ ID NO: 22484 - DNA, 15 bp, Homo sapiens
aattctattttagac

SEQ ID NO: 22485 - DNA, 15 bp, Homo sapiens
gaattctattttaga

SEQ ID NO: 22486 - DNA, 15 bp, Homo sapiens
tgaattctattttag

SEQ ID NO: 22487 - DNA, 15 bp, Homo sapiens
ttgaattctatttta

SEQ ID NO: 22488 - DNA, 15 bp, Homo sapiens
cttgaattctatttt

SEQ ID NO: 22489 - DNA, 15 bp, Homo sapiens
tcttgaattctattt

SEQ ID NO: 22490 - DNA, 15 bp, Homo sapiens
ttcttgaattctatt

SEQ ID NO: 22491 - DNA, 15 bp, Homo sapiens
attcttgaattctat

SEQ ID NO: 22492 - DNA, 15 bp, Homo sapiens
cattcttgaattcta

SEQ ID NO: 22493 - DNA, 15 bp, Homo sapiens
tcattcttgaattct

SEQ ID NO: 22494 - DNA, 15 bp, Homo sapiens
atcattcttgaattc

SEQ ID NO: 22495 - DNA, 15 bp, Homo sapiens
catcattcttgaatt

SEQ ID NO: 22496 - DNA, 15 bp, Homo sapiens
acatcattcttgaat

SEQ ID NO: 22497 - DNA, 15 bp, Homo sapiens
gacatcattcttgaa

SEQ ID NO: 22498 - DNA, 15 bp, Homo sapiens
agacatcattcttga

SEQ ID NO: 22499 - DNA, 15 bp, Homo sapiens
cagacatcattcttg

SEQ ID NO: 22500 - DNA, 15 bp, Homo sapiens
acagacatcattctt

SEQ ID NO: 22501 - DNA, 15 bp, Homo sapiens
aacagacatcattct

SEQ ID NO: 22502 - DNA, 15 bp, Homo sapiens
taacagacatcattc

SEQ ID NO: 22503 - DNA, 15 bp, Homo sapiens
ataacagacatcatt

SEQ ID NO: 22504 - DNA, 15 bp, Homo sapiens
cataacagacatcat

SEQ ID NO: 22505 - DNA, 15 bp, Homo sapiens
gcataacagacatca

SEQ ID NO: 22506 - DNA, 15 bp, Homo sapiens
ggcataacagacatc

SEQ ID NO: 22507 - DNA, 15 bp, Homo sapiens
aggcataacagacat

SEQ ID NO: 22508 - DNA, 15 bp, Homo sapiens
taggcataacagaca

SEQ ID NO: 22509 - DNA, 15 bp, Homo sapiens
ctaggcataacagac

SEQ ID NO: 22510 - DNA, 15 bp, Homo sapiens
actaggcataacaga

SEQ ID NO: 22511 - DNA, 15 bp, Homo sapiens
cactaggcataacag

SEQ ID NO: 22512 - DNA, 15 bp, Homo sapiens
gcactaggcataaca

SEQ ID NO: 22513 - DNA, 15 bp, Homo sapiens
tgcactaggcataac

SEQ ID NO: 22514 - DNA, 15 bp, Homo sapiens
atgcactaggcataa

SEQ ID NO: 22515 - DNA, 15 bp, Homo sapiens
gatgcactaggcata

SEQ ID NO: 22516 - DNA, 15 bp, Homo sapiens
tgatgcactaggcat

SEQ ID NO: 22517 - DNA, 15 bp, Homo sapiens
ctgatgcactaggca

SEQ ID NO: 22518 - DNA, 15 bp, Homo sapiens
tctgatgcactaggc

SEQ ID NO: 22519 - DNA, 15 bp, Homo sapiens
ttctgatgcactagg

SEQ ID NO: 22520 - DNA, 15 bp, Homo sapiens
cttctgatgcactag

SEQ ID NO: 22521 - DNA, 15 bp, Homo sapiens
acttctgatgcacta

SEQ ID NO: 22522 - DNA, 15 bp, Homo sapiens
aacttctgatgcact

SEQ ID NO: 22523 - DNA, 15 bp, Homo sapiens
taacttctgatgcac

SEQ ID NO: 22524 - DNA, 15 bp, Homo sapiens
ataacttctgatgca

SEQ ID NO: 22525 - DNA, 15 bp, Homo sapiens
aataacttctgatgc

SEQ ID NO: 22526 - DNA, 15 bp, Homo sapiens
aaataacttctgatg

SEQ ID NO: 22527 - DNA, 15 bp, Homo sapiens
aaaataacttctgat

SEQ ID NO: 22528 - DNA, 15 bp, Homo sapiens
taaaataacttctga

SEQ ID NO: 22529 - DNA, 15 bp, Homo sapiens
ttaaaataacttctg

SEQ ID NO: 22530 - DNA, 15 bp, Homo sapiens
tttaaaataacttct

SEQ ID NO: 22531 - DNA, 15 bp, Homo sapiens
atttaaaataacttc

SEQ ID NO: 22532 - DNA, 15 bp, Homo sapiens
tatttaaaataactt

SEQ ID NO: 22533 - DNA, 15 bp, Homo sapiens
atatttaaaataact

SEQ ID NO: 22534 - DNA, 15 bp, Homo sapiens
catatttaaaataac

SEQ ID NO: 22535 - DNA, 15 bp, Homo sapiens
tcatatttaaaataa

SEQ ID NO: 22536 - DNA, 15 bp, Homo sapiens
gtcatatttaaaata

SEQ ID NO: 22537 - DNA, 15 bp, Homo sapiens
tgtcatatttaaaat

SEQ ID NO: 22538 - DNA, 15 bp, Homo sapiens
atgtcatatttaaaa

SEQ ID NO: 22539 - DNA, 15 bp, Homo sapiens
gatgtcatatttaaa

SEQ ID NO: 22540 - DNA, 15 bp, Homo sapiens
agatgtcatatttaa

SEQ ID NO: 22541 - DNA, 15 bp, Homo sapiens
aagatgtcatattta

SEQ ID NO: 22542 - DNA, 15 bp, Homo sapiens
taaagatgtcatatt

SEQ ID NO: 22543 - DNA, 15 bp, Homo sapiens
ataaagatgtcatat

SEQ ID NO: 22544 - DNA, 15 bp, Homo sapiens
tataaagatgtcata

SEQ ID NO: 22545 - DNA, 15 bp, Homo sapiens
ttataaagatgtcat

SEQ ID NO: 22546 - DNA, 15 bp, Homo sapiens
tttataaagatgtca

SEQ ID NO: 22547 - DNA, 15 bp, Homo sapiens
ttttataaagatgtc

SEQ ID NO: 22548 - DNA, 15 bp, Homo sapiens
cttttataaagatgt

SEQ ID NO: 22549 - DNA, 15 bp, Homo sapiens
acttttataaagatg

SEQ ID NO: 22550 - DNA, 15 bp, Homo sapiens
gacttttataaagat

SEQ ID NO: 22551 - DNA, 15 bp, Homo sapiens
tgacttttataaaga

SEQ ID NO: 22552 - DNA, 15 bp, Homo sapiens
ttgacttttataaag

SEQ ID NO: 22553 - DNA, 15 bp, Homo sapiens
attgacttttataaa

SEQ ID NO: 22554 - DNA, 15 bp, Homo sapiens
tattgacttttataa

SEQ ID NO: 22555 - DNA, 15 bp, Homo sapiens
ctattgacttttata

SEQ ID NO: 22556 - DNA, 15 bp, Homo sapiens
gctattgacttttat

SEQ ID NO: 22557 - DNA, 15 bp, Homo sapiens
agctattgactttta

SEQ ID NO: 22558 - DNA, 15 bp, Homo sapiens
cagctattgactttt

SEQ ID NO: 22559 - DNA, 15 bp, Homo sapiens
gcagctattgacttt

SEQ ID NO: 22560 - DNA, 15 bp, Homo sapiens
ggcagctattgactt

SEQ ID NO: 22561 - DNA, 15 bp, Homo sapiens
aggcagctattgact

SEQ ID NO: 22562 - DNA, 15 bp, Homo sapiens
gaggcagctattgac

SEQ ID NO: 22563 - DNA, 15 bp, Homo sapiens
tgaggcagctattga

SEQ ID NO: 22564 - DNA, 15 bp, Homo sapiens
atgaggcagctattg

SEQ ID NO: 22565 - DNA, 15 bp, Homo sapiens
gatgaggcagctatt

SEQ ID NO: 22566 - DNA, 15 bp, Homo sapiens
tgatgaggcagctat

SEQ ID NO: 22567 - DNA, 15 bp, Homo sapiens
ttgatgaggcagcta

SEQ ID NO: 22568 - DNA, 15 bp, Homo sapiens
tttgatgaggcagct

SEQ ID NO: 22569 - DNA, 15 bp, Homo sapiens
ctttgatgaggcagc

SEQ ID NO: 22570 - DNA, 15 bp, Homo sapiens
cctttgatgaggcag

SEQ ID NO: 22571 - DNA, 15 bp, Homo sapiens
ccctttgatgaggca

SEQ ID NO: 22572 - DNA, 15 bp, Homo sapiens
gccctttgatgaggc

SEQ ID NO: 22573 - DNA, 15 bp, Homo sapiens
tgccctttgatgagg

SEQ ID NO: 22574 - DNA, 15 bp, Homo sapiens
ttgccctttgatgag

SEQ ID NO: 22575 - DNA, 15 bp, Homo sapiens
attgccctttgatga

SEQ ID NO: 22576 - DNA, 15 bp, Homo sapiens
gattgccctttgatg

SEQ ID NO: 22577 - DNA, 15 bp, Homo sapiens
tgattgccctttgat

SEQ ID NO: 22578 - DNA, 15 bp, Homo sapiens
atgattgccctttga

SEQ ID NO: 22579 - DNA, 15 bp, Homo sapiens
catgattgccctttg

SEQ ID NO: 22580 - DNA, 15 bp, Homo sapiens
acatgattgcccttt

SEQ ID NO: 22581 - DNA, 15 bp, Homo sapiens
gacatgattgccctt

SEQ ID NO: 22582 - DNA, 15 bp, Homo sapiens
agacatgattgccct

SEQ ID NO: 22583 - DNA, 15 bp, Homo sapiens
tagacatgattgccc

SEQ ID NO: 22584 - DNA, 15 bp, Homo sapiens
ctagacatgattgcc

SEQ ID NO: 22585 - DNA, 15 bp, Homo sapiens
actagacatgattgc

SEQ ID NO: 22586 - DNA, 15 bp, Homo sapiens
cactagacatgattg

SEQ ID NO: 22587 - DNA, 15 bp, Homo sapiens
acactagacatgatt

SEQ ID NO: 22588 - DNA, 15 bp, Homo sapiens
cacactagacatgat

SEQ ID NO: 22589 - DNA, 15 bp, Homo sapiens
ccacactagacatga

SEQ ID NO: 22590 - DNA, 15 bp, Homo sapiens
cccacactagacatg

SEQ ID NO: 22591 - DNA, 15 bp, Homo sapiens
acccacactagacat

SEQ ID NO: 22592 - DNA, 15 bp, Homo sapiens
cacccacactagaca

SEQ ID NO: 22593 - DNA, 15 bp, Homo sapiens
ccacccacactagac

SEQ ID NO: 22594 - DNA, 15 bp, Homo sapiens
gccacccacactaga

SEQ ID NO: 22595 - DNA, 15 bp, Homo sapiens
agccacccacactag

SEQ ID NO: 22596 - DNA, 15 bp, Homo sapiens
cagccacccacacta

SEQ ID NO: 22597 - DNA, 15 bp, Homo sapiens
acagccacccacact

SEQ ID NO: 22598 - DNA, 15 bp, Homo sapiens
cacagccacccacac

SEQ ID NO: 22599 - DNA, 15 bp, Homo sapiens
gcacagccacccaca

SEQ ID NO: 22600 - DNA, 15 bp, Homo sapiens
ggcacagccacccac

SEQ ID NO: 22601 - DNA, 15 bp, Homo sapiens
tggcacagccaccca

SEQ ID NO: 22602 - DNA, 15 bp, Homo sapiens
ttggcacagccaccc

SEQ ID NO: 22603 - DNA, 15 bp, Homo sapiens
attggcacagccacc

SEQ ID NO: 22604 - DNA, 15 bp, Homo sapiens
aattggcacagccac

SEQ ID NO: 22605 - DNA, 15 bp, Homo sapiens
caattggcacagcca

SEQ ID NO: 22606 - DNA, 15 bp, Homo sapiens
acaattggcacagcc

SEQ ID NO: 22607 - DNA, 15 bp, Homo sapiens
aacaattggcacagc

SEQ ID NO: 22608 - DNA, 15 bp, Homo sapiens
aaacaattggcacag

SEQ ID NO: 22609 - DNA, 15 bp, Homo sapiens
aaaacaattggcaca

SEQ ID NO: 22610 - DNA, 15 bp, Homo sapiens
aaaaacaattggcac

SEQ ID NO: 22611 - DNA, 15 bp, Homo sapiens
caaaaacaattggca

SEQ ID NO: 22612 - DNA, 15 bp, Homo sapiens
tcaaaaacaattggc

SEQ ID NO: 22613 - DNA, 15 bp, Homo sapiens
ttcaaaaacaattgg

SEQ ID NO: 22614 - DNA, 15 bp, Homo sapiens
gttcaaaaacaattg

SEQ ID NO: 22615 - DNA, 15 bp, Homo sapiens
agttcaaaaacaatt

SEQ ID NO: 22616 - DNA, 15 bp, Homo sapiens
tagttcaaaaacaat

SEQ ID NO: 22617 - DNA, 15 bp, Homo sapiens
gtagttcaaaaacaa

SEQ ID NO: 22618 - DNA, 15 bp, Homo sapiens
agtagttcaaaaaca

SEQ ID NO: 22619 - DNA, 15 bp, Homo sapiens
cagtagttcaaaaac

SEQ ID NO: 22620 - DNA, 15 bp, Homo sapiens
gcagtagttcaaaaa

SEQ ID NO: 22621 - DNA, 15 bp, Homo sapiens
tgcagtagttcaaaa

SEQ ID NO: 22622 - DNA, 15 bp, Homo sapiens
ctgcagtagttcaaa

SEQ ID NO: 22623 - DNA, 15 bp, Homo sapiens
gctgcagtagttcaa

SEQ ID NO: 22624 - DNA, 15 bp, Homo sapiens
tgctgcagtagttca

SEQ ID NO: 22625 - DNA, 15 bp, Homo sapiens
ttgctgcagtagttc

SEQ ID NO: 22626 - DNA, 15 bp, Homo sapiens
attgctgcagtagtt

SEQ ID NO: 22627 - DNA, 15 bp, Homo sapiens
gattgctgcagtagt

SEQ ID NO: 22628 - DNA, 15 bp, Homo sapiens
agattgctgcagtag

SEQ ID NO: 22629 - DNA, 15 bp, Homo sapiens
tagattgctgcagta

SEQ ID NO: 22630 - DNA, 15 bp, Homo sapiens
ctagattgctgcagt

SEQ ID NO: 22631 - DNA, 15 bp, Homo sapiens
gctagattgctgcag

SEQ ID NO: 22632 - DNA, 15 bp, Homo sapiens
ggctagattgctgca

SEQ ID NO: 22633 - DNA, 15 bp, Homo sapiens
tggctagattgctgc

SEQ ID NO: 22634 - DNA, 15 bp, Homo sapiens
ttggctagattgctg

SEQ ID NO: 22635 - DNA, 15 bp, Homo sapiens
attggctagattgct

SEQ ID NO: 22636 - DNA, 15 bp, Homo sapiens
gattggctagattgc

SEQ ID NO: 22637 - DNA, 15 bp, Homo sapiens
ggattggctagattg

SEQ ID NO: 22638 - DNA, 15 bp, Homo sapiens
gggattggctagatt

SEQ ID NO: 22639 - DNA, 15 bp, Homo sapiens
tgggattggctagat

SEQ ID NO: 22640 - DNA, 15 bp, Homo sapiens
ctgggattggctaga

SEQ ID NO: 22641 - DNA, 15 bp, Homo sapiens
cctgggattggctag

SEQ ID NO: 22642 - DNA, 15 bp, Homo sapiens
ccctgggattggcta

SEQ ID NO: 22643 - DNA, 15 bp, Homo sapiens
tccctgggattggct

SEQ ID NO: 22644 - DNA, 15 bp, Homo sapiens
ttccctgggattggc

SEQ ID NO: 22645 - DNA, 15 bp, Homo sapiens
attccctgggattgg

SEQ ID NO: 22646 - DNA, 15 bp, Homo sapiens
cattccctgggattg

SEQ ID NO: 22647 - DNA, 15 bp, Homo sapiens
ccattccctgggatt

SEQ ID NO: 22648 - DNA, 15 bp, Homo sapiens
gccattccctgggat

SEQ ID NO: 22649 - DNA, 15 bp, Homo sapiens
agccattccctggga

SEQ ID NO: 22650 - DNA, 15 bp, Homo sapiens
aagccattccctggg

SEQ ID NO: 22651 - DNA, 15 bp, Homo sapiens
caagccattccctgg

SEQ ID NO: 22652 - DNA, 15 bp, Homo sapiens
gcaagccattccctg

SEQ ID NO: 22653 - DNA, 15 bp, Homo sapiens
tgcaagccattccct

SEQ ID NO: 22654 - DNA, 15 bp, Homo sapiens
ctgcaagccattccc

SEQ ID NO: 22655 - DNA, 15 bp, Homo sapiens
actgcaagccattcc

SEQ ID NO: 22656 - DNA, 15 bp, Homo sapiens
gactgcaagccattc

SEQ ID NO: 22657 - DNA, 15 bp, Homo sapiens
agactgcaagccatt

SEQ ID NO: 22658 - DNA, 15 bp, Homo sapiens
aagactgcaagccat

SEQ ID NO: 22659 - DNA, 15 bp, Homo sapiens
aaagactgcaagcca

SEQ ID NO: 22660 - DNA, 15 bp, Homo sapiens
gaaagactgcaagcc

SEQ ID NO: 22661 - DNA, 15 bp, Homo sapiens
agaaagactgcaagc

SEQ ID NO: 22662 - DNA, 15 bp, Homo sapiens
tagaaagactgcaag

SEQ ID NO: 22663 - DNA, 15 bp, Homo sapiens
gtagaaagactgcaa

SEQ ID NO: 22664 - DNA, 15 bp, Homo sapiens
tgtagaaagactgca

SEQ ID NO: 22665 - DNA, 15 bp, Homo sapiens
gtgtagaaagactgc

SEQ ID NO: 22666 - DNA, 15 bp, Homo sapiens
ggtgtagaaagactg

SEQ ID NO: 22667 - DNA, 15 bp, Homo sapiens
gggtgtagaaagact

SEQ ID NO: 22668 - DNA, 15 bp, Homo sapiens
tgggtgtagaaagac

SEQ ID NO: 22669 - DNA, 15 bp, Homo sapiens
gtgggtgtagaaaga

SEQ ID NO: 22670 - DNA, 15 bp, Homo sapiens
tgtgggtgtagaaag

SEQ ID NO: 22671 - DNA, 15 bp, Homo sapiens
atgtgggtgtagaaa

SEQ ID NO: 22672 - DNA, 15 bp, Homo sapiens
aatgtgggtgtagaa

SEQ ID NO: 22673 - DNA, 15 bp, Homo sapiens
aaatgtgggtgtaga

SEQ ID NO: 22674 - DNA, 15 bp, Homo sapiens
aaaatgtgggtgtag

SEQ ID NO: 22675 - DNA, 15 bp, Homo sapiens
aaaaatgtgggtgta

SEQ ID NO: 22676 - DNA, 15 bp, Homo sapiens
aaaaaatgtgggtgt

SEQ ID NO: 22677 - DNA, 15 bp, Homo sapiens
aaaaaaatgtgggtg

SEQ ID NO: 22678 - DNA, 15 bp, Homo sapiens
aaaaaaaatgtgggt

SEQ ID NO: 22679 - DNA, 15 bp, Homo sapiens
gaaaaaaaatgtggg

SEQ ID NO: 22680 - DNA, 15 bp, Homo sapiens
agaaaaaaaatgtgg

SEQ ID NO: 22681 - DNA, 15 bp, Homo sapiens
aagaaaaaaaatgtg

SEQ ID NO: 22682 - DNA, 15 bp, Homo sapiens
taagaaaaaaaatgt

SEQ ID NO: 22683 - DNA, 15 bp, Homo sapiens
ttaagaaaaaaaatg

SEQ ID NO: 22684 - DNA, 15 bp, Homo sapiens
attaagaaaaaaaat

SEQ ID NO: 22685 - DNA, 15 bp, Homo sapiens
aattaagaaaaaaaa

SEQ ID NO: 22686 - DNA, 15 bp, Homo sapiens
taattaagaaaaaaa

SEQ ID NO: 22687 - DNA, 15 bp, Homo sapiens
ataattaagaaaaaa

SEQ ID NO: 22688 - DNA, 15 bp, Homo sapiens
gataattaagaaaaa

SEQ ID NO: 22689 - DNA, 15 bp, Homo sapiens
agataattaagaaaa

SEQ ID NO: 22690 - DNA, 15 bp, Homo sapiens
gagataattaagaaa

SEQ ID NO: 22691 - DNA, 15 bp, Homo sapiens
ggagataattaagaa

SEQ ID NO: 22692 - DNA, 15 bp, Homo sapiens
tggagataattaaga

SEQ ID NO: 22693 - DNA, 15 bp, Homo sapiens
gtggagataattaag

SEQ ID NO: 22694 - DNA, 15 bp, Homo sapiens
ggtggagataattaa

SEQ ID NO: 22695 - DNA, 15 bp, Homo sapiens
tggtggagataatta

SEQ ID NO: 22696 - DNA, 15 bp, Homo sapiens
ctggtggagataatt

SEQ ID NO: 22697 - DNA, 15 bp, Homo sapiens
cctggtggagataat

SEQ ID NO: 22698 - DNA, 15 bp, Homo sapiens
gcctggtggagataa

SEQ ID NO: 22699 - DNA, 15 bp, Homo sapiens
agcctggtggagata

SEQ ID NO: 22700 - DNA, 15 bp, Homo sapiens
cagcctggtggagat

SEQ ID NO: 22701 - DNA, 15 bp, Homo sapiens
tcagcctggtggaga

SEQ ID NO: 22702 - DNA, 15 bp, Homo sapiens
ctcagcctggtggag

SEQ ID NO: 22703 - DNA, 15 bp, Homo sapiens
actcagcctggtgga

SEQ ID NO: 22704 - DNA, 15 bp, Homo sapiens
aactcagcctggtgg

SEQ ID NO: 22705 - DNA, 15 bp, Homo sapiens
taactcagcctggtg

SEQ ID NO: 22706 - DNA, 15 bp, Homo sapiens
ctaactcagcctggt

SEQ ID NO: 22707 - DNA, 15 bp, Homo sapiens
actaactcagcctgg

SEQ ID NO: 22708 - DNA, 15 bp, Homo sapiens
aactaactcagcctg

SEQ ID NO: 22709 - DNA, 15 bp, Homo sapiens
taactaactcagcct

SEQ ID NO: 22710 - DNA, 15 bp, Homo sapiens
ttaactaactcagcc

SEQ ID NO: 22711 - DNA, 15 bp, Homo sapiens
cttaactaactcagc

SEQ ID NO: 22712 - DNA, 15 bp, Homo sapiens
ccttaactaactcag

SEQ ID NO: 22713 - DNA, 15 bp, Homo sapiens
tccttaactaactca

SEQ ID NO: 22714 - DNA, 15 bp, Homo sapiens
gtccttaactaactc

SEQ ID NO: 22715 - DNA, 15 bp, Homo sapiens
tgtccttaactaact

SEQ ID NO: 22716 - DNA, 15 bp, Homo sapiens
ctgtccttaactaac

SEQ ID NO: 22717 - DNA, 15 bp, Homo sapiens
tctgtccttaactaa

SEQ ID NO: 22718 - DNA, 15 bp, Homo sapiens
atctgtccttaacta

SEQ ID NO: 22719 - DNA, 15 bp, Homo sapiens
gatctgtccttaact

SEQ ID NO: 22720 - DNA, 15 bp, Homo sapiens
agatctgtccttaac

SEQ ID NO: 22721 - DNA, 15 bp, Homo sapiens
tagatctgtccttaa

SEQ ID NO: 22722 - DNA, 15 bp, Homo sapiens
atagatctgtcctta

SEQ ID NO: 22723 - DNA, 15 bp, Homo sapiens
tatagatctgtcctt

SEQ ID NO: 22724 - DNA, 15 bp, Homo sapiens
ctatagatctgtcct

SEQ ID NO: 22725 - DNA, 15 bp, Homo sapiens
gctatagatctgtcc

SEQ ID NO: 22726 - DNA, 15 bp, Homo sapiens
tgctatagatctgtc

SEQ ID NO: 22727 - DNA, 15 bp, Homo sapiens
atgctatagatctgt

SEQ ID NO: 22728 - DNA, 15 bp, Homo sapiens
aatgctatagatctg

SEQ ID NO: 22729 - DNA, 15 bp, Homo sapiens
aaatgctatagatct

SEQ ID NO: 22730 - DNA, 15 bp, Homo sapiens
gaaatgctatagatc

SEQ ID NO: 22731 - DNA, 15 bp, Homo sapiens
ggaaatgctatagat

SEQ ID NO: 22732 - DNA, 15 bp, Homo sapiens
aggaaatgctataga

SEQ ID NO: 22733 - DNA, 15 bp, Homo sapiens
caggaaatgctatag

SEQ ID NO: 22734 - DNA, 15 bp, Homo sapiens
ccaggaaatgctata

SEQ ID NO: 22735 - DNA, 15 bp, Homo sapiens
tccaggaaatgctat

SEQ ID NO: 22736 - DNA, 15 bp, Homo sapiens
atccaggaaatgcta

SEQ ID NO: 22737 - DNA, 15 bp, Homo sapiens
catccaggaaatgct

SEQ ID NO: 22738 - DNA, 15 bp, Homo sapiens
acatccaggaaatgc

SEQ ID NO: 22739 - DNA, 15 bp, Homo sapiens
gacatccaggaaatg

SEQ ID NO: 22740 - DNA, 15 bp, Homo sapiens
tgacatccaggaaat

SEQ ID NO: 22741 - DNA, 15 bp, Homo sapiens
ttgacatccaggaaa

SEQ ID NO: 22742 - DNA, 15 bp, Homo sapiens
tttgacatccaggaa

SEQ ID NO: 22743 - DNA, 15 bp, Homo sapiens
ttttgacatccagga

SEQ ID NO: 22744 - DNA, 15 bp, Homo sapiens
attttgacatccagg

SEQ ID NO: 22745 - DNA, 15 bp, Homo sapiens
cattttgacatccag

SEQ ID NO: 22746 - DNA, 15 bp, Homo sapiens
gcattttgacatcca

SEQ ID NO: 22747 - DNA, 15 bp, Homo sapiens
ggcattttgacatcc

SEQ ID NO: 22748 - DNA, 15 bp, Homo sapiens
gggcattttgacatc

SEQ ID NO: 22749 - DNA, 15 bp, Homo sapiens
tgggcattttgacat

SEQ ID NO: 22750 - DNA, 15 bp, Homo sapiens
gtgggcattttgaca

SEQ ID NO: 22751 - DNA, 15 bp, Homo sapiens
tgtgggcattttgac

SEQ ID NO: 22752 - DNA, 15 bp, Homo sapiens
gtgtgggcattttga

SEQ ID NO: 22753 - DNA, 15 bp, Homo sapiens
tgtgtgggcattttg

SEQ ID NO: 22754 - DNA, 15 bp, Homo sapiens
gtgtgtgggcatttt

SEQ ID NO: 22755 - DNA, 15 bp, Homo sapiens
ggtgtgtgggcattt

SEQ ID NO: 22756 - DNA, 15 bp, Homo sapiens
aggtgtgtgggcatt

SEQ ID NO: 22757 - DNA, 15 bp, Homo sapiens
aaggtgtgtgggcat

SEQ ID NO: 22758 - DNA, 15 bp, Homo sapiens
gaaggtgtgtgggca

SEQ ID NO: 22759 - DNA, 15 bp, Homo sapiens
agaaggtgtgtgggc

SEQ ID NO: 22760 - DNA, 15 bp, Homo sapiens
cagaaggtgtgtggg

SEQ ID NO: 22761 - DNA, 15 bp, Homo sapiens
gcagaaggtgtgtgg

SEQ ID NO: 22762 - DNA, 15 bp, Homo sapiens
tgcagaaggtgtgtg

SEQ ID NO: 22763 - DNA, 15 bp, Homo sapiens
ttgcagaaggtgtgt

SEQ ID NO: 22764 - DNA, 15 bp, Homo sapiens
attgcagaaggtgtg

SEQ ID NO: 22765 - DNA, 15 bp, Homo sapiens
gattgcagaaggtgt

SEQ ID NO: 22766 - DNA, 15 bp, Homo sapiens
ggattgcagaaggtg

SEQ ID NO: 22767 - DNA, 15 bp, Homo sapiens
aggattgcagaaggt

SEQ ID NO: 22768 - DNA, 15 bp, Homo sapiens
aaggattgcagaagg

SEQ ID NO: 22769 - DNA, 15 bp, Homo sapiens
caaggattgcagaag

SEQ ID NO: 22770 - DNA, 15 bp, Homo sapiens
ccaaggattgcagaa

SEQ ID NO: 22771 - DNA, 15 bp, Homo sapiens
cccaaggattgcaga

SEQ ID NO: 22772 - DNA, 15 bp, Homo sapiens
gcccaaggattgcag

SEQ ID NO: 22773 - DNA, 15 bp, Homo sapiens
agcccaaggattgca

SEQ ID NO: 22774 - DNA, 15 bp, Homo sapiens
tagcccaaggattgc

SEQ ID NO: 22775 - DNA, 15 bp, Homo sapiens
gtagcccaaggattg

SEQ ID NO: 22776 - DNA, 15 bp, Homo sapiens
ggtagcccaaggatt

SEQ ID NO: 22777 - DNA, 15 bp, Homo sapiens
aggtagcccaaggat

SEQ ID NO: 22778 - DNA, 15 bp, Homo sapiens
caggtagcccaagga

SEQ ID NO: 22779 - DNA, 15 bp, Homo sapiens
gcaggtagcccaagg

SEQ ID NO: 22780 - DNA, 15 bp, Homo sapiens
agcaggtagcccaag

SEQ ID NO: 22781 - DNA, 15 bp, Homo sapiens
aagcaggtagcccaa

SEQ ID NO: 22782 - DNA, 15 bp, Homo sapiens
gaagcaggtagccca

SEQ ID NO: 22783 - DNA, 15 bp, Homo sapiens
ggaagcaggtagccc

SEQ ID NO: 22784 - DNA, 15 bp, Homo sapiens
aggaagcaggtagcc

SEQ ID NO: 22785 - DNA, 15 bp, Homo sapiens
aaggaagcaggtagc

SEQ ID NO: 22786 - DNA, 15 bp, Homo sapiens
aaaggaagcaggtag

SEQ ID NO: 22787 - DNA, 15 bp, Homo sapiens
gaaaggaagcaggta

SEQ ID NO: 22788 - DNA, 15 bp, Homo sapiens
tgaaaggaagcaggt

SEQ ID NO: 22789 - DNA, 15 bp, Homo sapiens
atgaaaggaagcagg

SEQ ID NO: 22790 - DNA, 15 bp, Homo sapiens
catgaaaggaagcag

SEQ ID NO: 22791 - DNA, 15 bp, Homo sapiens
acatgaaaggaagca

SEQ ID NO: 22792 - DNA, 15 bp, Homo sapiens
aacatgaaaggaagc

SEQ ID NO: 22793 - DNA, 15 bp, Homo sapiens
aaacatgaaaggaag

SEQ ID NO: 22794 - DNA, 15 bp, Homo sapiens
gaaacatgaaaggaa

SEQ ID NO: 22795 - DNA, 15 bp, Homo sapiens
agaaacatgaaagga

SEQ ID NO: 22796 - DNA, 15 bp, Homo sapiens
aagaaacatgaaagg

SEQ ID NO: 22797 - DNA, 15 bp, Homo sapiens
aaagaaacatgaaag

SEQ ID NO: 22798 - DNA, 15 bp, Homo sapiens
aaaagaaacatgaaa

SEQ ID NO: 22799 - DNA, 15 bp, Homo sapiens
caaaagaaacatgaa

SEQ ID NO: 22800 - DNA, 15 bp, Homo sapiens
ccaaaagaaacatga

SEQ ID NO: 22801 - DNA, 15 bp, Homo sapiens
gccaaaagaaacatg

SEQ ID NO: 22802 - DNA, 15 bp, Homo sapiens
agccaaaagaaacat

SEQ ID NO: 22803 - DNA, 15 bp, Homo sapiens
aagccaaaagaaaca

SEQ ID NO: 22804 - DNA, 15 bp, Homo sapiens
caagccaaaagaaac

SEQ ID NO: 22805 - DNA, 15 bp, Homo sapiens
acaagccaaaagaaa

SEQ ID NO: 22806 - DNA, 15 bp, Homo sapiens
gacaagccaaaagaa

SEQ ID NO: 22807 - DNA, 15 bp, Homo sapiens
ggacaagccaaaaga

SEQ ID NO: 22808 - DNA, 15 bp, Homo sapiens
tggacaagccaaaag

SEQ ID NO: 22809 - DNA, 15 bp, Homo sapiens
atggacaagccaaaa

SEQ ID NO: 22810 - DNA, 15 bp, Homo sapiens
gatggacaagccaaa

SEQ ID NO: 22811 - DNA, 15 bp, Homo sapiens
agatggacaagccaa

SEQ ID NO: 22812 - DNA, 15 bp, Homo sapiens
tagatggacaagcca

SEQ ID NO: 22813 - DNA, 15 bp, Homo sapiens
ttagatggacaagcc

SEQ ID NO: 22814 - DNA, 15 bp, Homo sapiens
attagatggacaagc

SEQ ID NO: 22815 - DNA, 15 bp, Homo sapiens
aattagatggacaag

SEQ ID NO: 22816 - DNA, 15 bp, Homo sapiens
taattagatggacaa

SEQ ID NO: 22817 - DNA, 15 bp, Homo sapiens
ataattagatggaca

SEQ ID NO: 22818 - DNA, 15 bp, Homo sapiens
gataattagatggac

SEQ ID NO: 22819 - DNA, 15 bp, Homo sapiens
agataattagatgga

SEQ ID NO: 22820 - DNA, 15 bp, Homo sapiens
tagataattagatgg

SEQ ID NO: 22821 - DNA, 15 bp, Homo sapiens
atagataattagatg

SEQ ID NO: 22822 - DNA, 15 bp, Homo sapiens
aatagataattagat

SEQ ID NO: 22823 - DNA, 15 bp, Homo sapiens
taatagataattaga

SEQ ID NO: 22824 - DNA, 15 bp, Homo sapiens
ataatagataattag

SEQ ID NO: 22825 - DNA, 15 bp, Homo sapiens
gataatagataatta

SEQ ID NO: 22826 - DNA, 15 bp, Homo sapiens
tgataatagataatt

SEQ ID NO: 22827 - DNA, 15 bp, Homo sapiens
atgataatagataat

SEQ ID NO: 22828 - DNA, 15 bp, Homo sapiens
catgataatagataa

SEQ ID NO: 22829 - DNA, 15 bp, Homo sapiens
acatgataatagata

SEQ ID NO: 22830 - DNA, 15 bp, Homo sapiens
cacatgataatagat

SEQ ID NO: 22831 - DNA, 15 bp, Homo sapiens
acacatgataataga

SEQ ID NO: 22832 - DNA, 15 bp, Homo sapiens
tacacatgataatag

SEQ ID NO: 22833 - DNA, 15 bp, Homo sapiens
atacacatgataata

SEQ ID NO: 22834 - DNA, 15 bp, Homo sapiens
tatacacatgataat

SEQ ID NO: 22835 - DNA, 15 bp, Homo sapiens
atatacacatgataa

SEQ ID NO: 22836 - DNA, 15 bp, Homo sapiens
tatatacacatgata

SEQ ID NO: 22837 - DNA, 15 bp, Homo sapiens
ttatatacacatgat

SEQ ID NO: 22838 - DNA, 15 bp, Homo sapiens
attatatacacatga

SEQ ID NO: 22839 - DNA, 15 bp, Homo sapiens
cattatatacacatg

SEQ ID NO: 22840 - DNA, 15 bp, Homo sapiens
gcattatatacacat

SEQ ID NO: 22841 - DNA, 15 bp, Homo sapiens
tgcattatatacaca

SEQ ID NO: 22842 - DNA, 15 bp, Homo sapiens
atgcattatatacac

SEQ ID NO: 22843 - DNA, 15 bp, Homo sapiens
aatgcattatataca

SEQ ID NO: 22844 - DNA, 15 bp, Homo sapiens
taatgcattatatac

SEQ ID NO: 22845 - DNA, 15 bp, Homo sapiens
ataatgcattatata

SEQ ID NO: 22846 - DNA, 15 bp, Homo sapiens
aataatgcattatat

SEQ ID NO: 22847 - DNA, 15 bp, Homo sapiens
gaataatgcattata

SEQ ID NO: 22848 - DNA, 15 bp, Homo sapiens
tgaataatgcattat

SEQ ID NO: 22849 - DNA, 15 bp, Homo sapiens
atgaataatgcatta

SEQ ID NO: 22850 - DNA, 15 bp, Homo sapiens
catgaataatgcatt

SEQ ID NO: 22851 - DNA, 15 bp, Homo sapiens
tcatgaataatgcat

SEQ ID NO: 22852 - DNA, 15 bp, Homo sapiens
ctcatgaataatgca

SEQ ID NO: 22853 - DNA, 15 bp, Homo sapiens
tctcatgaataatgc

SEQ ID NO: 22854 - DNA, 15 bp, Homo sapiens
gtctcatgaataatg

SEQ ID NO: 22855 - DNA, 15 bp, Homo sapiens
ggtctcatgaataat

SEQ ID NO: 22856 - DNA, 15 bp, Homo sapiens
gggtctcatgaataa

SEQ ID NO: 22857 - DNA, 15 bp, Homo sapiens
tgggtctcatgaata

SEQ ID NO: 22858 - DNA, 15 bp, Homo sapiens
ctgggtctcatgaat

SEQ ID NO: 22859 - DNA, 15 bp, Homo sapiens
cctgggtctcatgaa

SEQ ID NO: 22860 - DNA, 15 bp, Homo sapiens
gcctgggtctcatga

SEQ ID NO: 22861 - DNA, 15 bp, Homo sapiens
tgcctgggtctcatg

SEQ ID NO: 22862 - DNA, 15 bp, Homo sapiens
ttgcctgggtctcat

SEQ ID NO: 22863 - DNA, 15 bp, Homo sapiens
attgcctgggtctca

SEQ ID NO: 22864 - DNA, 15 bp, Homo sapiens
aattgcctgggtctc

SEQ ID NO: 22865 - DNA, 15 bp, Homo sapiens
aaattgcctgggtct

SEQ ID NO: 22866 - DNA, 15 bp, Homo sapiens
gaaattgcctgggtc

SEQ ID NO: 22867 - DNA, 15 bp, Homo sapiens
tgaaattgcctgggt

SEQ ID NO: 22868 - DNA, 15 bp, Homo sapiens
ctgaaattgcctggg

SEQ ID NO: 22869 - DNA, 15 bp, Homo sapiens
cctgaaattgcctgg

SEQ ID NO: 22870 - DNA, 15 bp, Homo sapiens
tcctgaaattgcctg

SEQ ID NO: 22871 - DNA, 15 bp, Homo sapiens
atcctgaaattgcct

SEQ ID NO: 22872 - DNA, 15 bp, Homo sapiens
catcctgaaattgcc

SEQ ID NO: 22873 - DNA, 15 bp, Homo sapiens
acatcctgaaattgc

SEQ ID NO: 22874 - DNA, 15 bp, Homo sapiens
tacatcctgaaattg

SEQ ID NO: 22875 - DNA, 15 bp, Homo sapiens
ttacatcctgaaatt

SEQ ID NO: 22876 - DNA, 15 bp, Homo sapiens
attacatcctgaaat

SEQ ID NO: 22877 - DNA, 15 bp, Homo sapiens
tattacatcctgaaa

SEQ ID NO: 22878 - DNA, 15 bp, Homo sapiens
atattacatcctgaa

SEQ ID NO: 22879 - DNA, 15 bp, Homo sapiens
aatattacatcctga

SEQ ID NO: 22880 - DNA, 15 bp, Homo sapiens
aaatattacatcctg

SEQ ID NO: 22881 - DNA, 15 bp, Homo sapiens
aaaatattacatcct

SEQ ID NO: 22882 - DNA, 15 bp, Homo sapiens
aaaaatattacatcc

SEQ ID NO: 22883 - DNA, 15 bp, Homo sapiens
caaaaatattacatc

SEQ ID NO: 22884 - DNA, 15 bp, Homo sapiens
tcaaaaatattacat

SEQ ID NO: 22885 - DNA, 15 bp, Homo sapiens
atcaaaaatattaca

SEQ ID NO: 22886 - DNA, 15 bp, Homo sapiens
aatcaaaaatattac

SEQ ID NO: 22887 - DNA, 15 bp, Homo sapiens
aaatcaaaaatatta

SEQ ID NO: 22888 - DNA, 15 bp, Homo sapiens
aaaatcaaaaatatt

SEQ ID NO: 22889 - DNA, 15 bp, Homo sapiens
taaaatcaaaaatat

SEQ ID NO: 22890 - DNA, 15 bp, Homo sapiens
ttaaaatcaaaaata

SEQ ID NO: 22891 - DNA, 15 bp, Homo sapiens
tttaaaatcaaaaat

SEQ ID NO: 22892 - DNA, 15 bp, Homo sapiens
ttttaaaatcaaaaa

SEQ ID NO: 22893 - DNA, 15 bp, Homo sapiens
cttttaaaatcaaaa

SEQ ID NO: 22894 - DNA, 15 bp, Homo sapiens
ccttttaaaatcaaa

SEQ ID NO: 22895 - DNA, 15 bp, Homo sapiens
tccttttaaaatcaa

SEQ ID NO: 22896 - DNA, 15 bp, Homo sapiens
ttccttttaaaatca

SEQ ID NO: 22897 - DNA, 15 bp, Homo sapiens
tttccttttaaaatc

SEQ ID NO: 22898 - DNA, 15 bp, Homo sapiens
atttccttttaaaat

SEQ ID NO: 22899 - DNA, 15 bp, Homo sapiens
catttccttttaaaa

SEQ ID NO: 22900 - DNA, 15 bp, Homo sapiens
tcatttccttttaaa

SEQ ID NO: 22901 - DNA, 15 bp, Homo sapiens
gtcatttccttttaa

SEQ ID NO: 22902 - DNA, 15 bp, Homo sapiens
ggtcatttcctttta

SEQ ID NO: 22903 - DNA, 15 bp, Homo sapiens
aggtcatttcctttt

SEQ ID NO: 22904 - DNA, 15 bp, Homo sapiens
caggtcatttccttt

SEQ ID NO: 22905 - DNA, 15 bp, Homo sapiens
tcaggtcatttcctt

SEQ ID NO: 22906 - DNA, 15 bp, Homo sapiens
ttcaggtcatttcct

SEQ ID NO: 22907 - DNA, 15 bp, Homo sapiens
tttcaggtcatttcc

SEQ ID NO: 22908 - DNA, 15 bp, Homo sapiens
ttttcaggtcatttc

SEQ ID NO: 22909 - DNA, 15 bp, Homo sapiens
tttttcaggtcattt

SEQ ID NO: 22910 - DNA, 15 bp, Homo sapiens
atttttcaggtcatt

SEQ ID NO: 22911 - DNA, 15 bp, Homo sapiens
aatttttcaggtcat

SEQ ID NO: 22912 - DNA, 15 bp, Homo sapiens
taatttttcaggtca

SEQ ID NO: 22913 - DNA, 15 bp, Homo sapiens
ataatttttcaggtc

SEQ ID NO: 22914 - DNA, 15 bp, Homo sapiens
tataatttttcaggt

SEQ ID NO: 22915 - DNA, 15 bp, Homo sapiens
ttataatttttcagg

SEQ ID NO: 22916 - DNA, 15 bp, Homo sapiens
gttataatttttcag

SEQ ID NO: 22917 - DNA, 15 bp, Homo sapiens
agttataatttttca

SEQ ID NO: 22918 - DNA, 15 bp, Homo sapiens
aagttataatttttc

SEQ ID NO: 22919 - DNA, 15 bp, Homo sapiens
gaagttataattttt

SEQ ID NO: 22920 - DNA, 15 bp, Homo sapiens
agaagttataatttt

SEQ ID NO: 22921 - DNA, 15 bp, Homo sapiens
cagaagttataattt

SEQ ID NO: 22922 - DNA, 15 bp, Homo sapiens
gcagaagttataatt

SEQ ID NO: 22923 - DNA, 15 bp, Homo sapiens
agcagaagttataat

SEQ ID NO: 22924 - DNA, 15 bp, Homo sapiens
aagcagaagttataa

SEQ ID NO: 22925 - DNA, 15 bp, Homo sapiens
caagcagaagttata

SEQ ID NO: 22926 - DNA, 15 bp, Homo sapiens
gcaagcagaagttat

SEQ ID NO: 22927 - DNA, 15 bp, Homo sapiens
tgcaagcagaagtta

SEQ ID NO: 22928 - DNA, 15 bp, Homo sapiens
gtgcaagcagaagtt

SEQ ID NO: 22929 - DNA, 15 bp, Homo sapiens
tgtgcaagcagaagt

SEQ ID NO: 22930 - DNA, 15 bp, Homo sapiens
ttgtgcaagcagaag

SEQ ID NO: 22931 - DNA, 15 bp, Homo sapiens
tttgtgcaagcagaa

SEQ ID NO: 22932 - DNA, 15 bp, Homo sapiens
ctttgtgcaagcaga

SEQ ID NO: 22933 - DNA, 15 bp, Homo sapiens
tctttgtgcaagcag

SEQ ID NO: 22934 - DNA, 15 bp, Homo sapiens
ttctttgtgcaagca

SEQ ID NO: 22935 - DNA, 15 bp, Homo sapiens
tttctttgtgcaagc

SEQ ID NO: 22936 - DNA, 15 bp, Homo sapiens
ttttctttgtgcaag

SEQ ID NO: 22937 - DNA, 15 bp, Homo sapiens
attttctttgtgcaa

SEQ ID NO: 22938 - DNA, 15 bp, Homo sapiens
tattttctttgtgca

SEQ ID NO: 22939 - DNA, 15 bp, Homo sapiens
ttattttctttgtgc

SEQ ID NO: 22940 - DNA, 15 bp, Homo sapiens
cttattttctttgtg

SEQ ID NO: 22941 - DNA, 15 bp, Homo sapiens
gcttattttctttgt

SEQ ID NO: 22942 - DNA, 15 bp, Homo sapiens
tgcttattttctttg

SEQ ID NO: 22943 - DNA, 15 bp, Homo sapiens
ctgcttattttcttt

SEQ ID NO: 22944 - DNA, 15 bp, Homo sapiens
actgcttattttctt

SEQ ID NO: 22945 - DNA, 15 bp, Homo sapiens
tactgcttattttct

SEQ ID NO: 22946 - DNA, 15 bp, Homo sapiens
ttactgcttattttc

SEQ ID NO: 22947 - DNA, 15 bp, Homo sapiens
tttactgcttatttt

SEQ ID NO: 22948 - DNA, 15 bp, Homo sapiens
atttactgcttattt

SEQ ID NO: 22949 - DNA, 15 bp, Homo sapiens
aatttactgcttatt

SEQ ID NO: 22950 - DNA, 15 bp, Homo sapiens
aaatttactgcttat

SEQ ID NO: 22951 - DNA, 15 bp, Homo sapiens
caaatttactgctta

SEQ ID NO: 22952 - DNA, 15 bp, Homo sapiens
tcaaatttactgctt

SEQ ID NO: 22953 - DNA, 15 bp, Homo sapiens
atcaaatttactgct

SEQ ID NO: 22954 - DNA, 15 bp, Homo sapiens
tatcaaatttactgc

SEQ ID NO: 22955 - DNA, 15 bp, Homo sapiens
ctatcaaatttactg

SEQ ID NO: 22956 - DNA, 15 bp, Homo sapiens
gctatcaaatttact

SEQ ID NO: 22957 - DNA, 15 bp, Homo sapiens
tgctatcaaatttac

SEQ ID NO: 22958 - DNA, 15 bp, Homo sapiens
ctgctatcaaattta

SEQ ID NO: 22959 - DNA, 15 bp, Homo sapiens
cctgctatcaaattt

SEQ ID NO: 22960 - DNA, 15 bp, Homo sapiens
acctgctatcaaatt

SEQ ID NO: 22961 - DNA, 15 bp, Homo sapiens
gacctgctatcaaat

SEQ ID NO: 22962 - DNA, 15 bp, Homo sapiens
agacctgctatcaaa

SEQ ID NO: 22963 - DNA, 15 bp, Homo sapiens
aagacctgctatcaa

SEQ ID NO: 22964 - DNA, 15 bp, Homo sapiens
gaagacctgctatca

SEQ ID NO: 22965 - DNA, 15 bp, Homo sapiens
ggaagacctgctatc

SEQ ID NO: 22966 - DNA, 15 bp, Homo sapiens
tggaagacctgctat

SEQ ID NO: 22967 - DNA, 15 bp, Homo sapiens
atggaagacctgcta

SEQ ID NO: 22968 - DNA, 15 bp, Homo sapiens
gatggaagacctgct

SEQ ID NO: 22969 - DNA, 15 bp, Homo sapiens
cgatggaagacctgc

SEQ ID NO: 22970 - DNA, 15 bp, Homo sapiens
gcgatggaagacctg

SEQ ID NO: 22971 - DNA, 15 bp, Homo sapiens
tgcgatggaagacct

SEQ ID NO: 22972 - DNA, 15 bp, Homo sapiens
gtgcgatggaagacc

SEQ ID NO: 22973 - DNA, 15 bp, Homo sapiens
ggtgcgatggaagac

SEQ ID NO: 22974 - DNA, 15 bp, Homo sapiens
tggtgcgatggaaga

SEQ ID NO: 22975 - DNA, 15 bp, Homo sapiens
gtggtgcgatggaag

SEQ ID NO: 22976 - DNA, 15 bp, Homo sapiens
ggtggtgcgatggaa

SEQ ID NO: 22977 - DNA, 15 bp, Homo sapiens
aggtggtgcgatgga

SEQ ID NO: 22978 - DNA, 15 bp, Homo sapiens
caggtggtgcgatgg

SEQ ID NO: 22979 - DNA, 15 bp, Homo sapiens
gcaggtggtgcgatg

SEQ ID NO: 22980 - DNA, 15 bp, Homo sapiens
agcaggtggtgcgat

SEQ ID NO: 22981 - DNA, 15 bp, Homo sapiens
aagcaggtggtgcga

SEQ ID NO: 22982 - DNA, 15 bp, Homo sapiens
aaagcaggtggtgcg

SEQ ID NO: 22983 - DNA, 15 bp, Homo sapiens
aaaagcaggtggtgc

SEQ ID NO: 22984 - DNA, 15 bp, Homo sapiens
taaaagcaggtggtg

SEQ ID NO: 22985 - DNA, 15 bp, Homo sapiens
ttaaaagcaggtggt

SEQ ID NO: 22986 - DNA, 15 bp, Homo sapiens
tttaaaagcaggtgg

SEQ ID NO: 22987 - DNA, 15 bp, Homo sapiens
ttttaaaagcaggtg

SEQ ID NO: 22988 - DNA, 15 bp, Homo sapiens
tttttaaaagcaggt

SEQ ID NO: 22989 - DNA, 15 bp, Homo sapiens
atttttaaaagcagg

SEQ ID NO: 22990 - DNA, 15 bp, Homo sapiens
tatttttaaaagcag

SEQ ID NO: 22991 - DNA, 15 bp, Homo sapiens
ttatttttaaaagca

SEQ ID NO: 22992 - DNA, 15 bp, Homo sapiens
attatttttaaaagc

SEQ ID NO: 22993 - DNA, 15 bp, Homo sapiens
gattatttttaaaag

SEQ ID NO: 22994 - DNA, 15 bp, Homo sapiens
ggattatttttaaaa

SEQ ID NO: 22995 - DNA, 15 bp, Homo sapiens
cggattatttttaaa

SEQ ID NO: 22996 - DNA, 15 bp, Homo sapiens
gcggattatttttaa

SEQ ID NO: 22997 - DNA, 15 bp, Homo sapiens
tgcggattattttta

SEQ ID NO: 22998 - DNA, 15 bp, Homo sapiens
ctgcggattattttt

SEQ ID NO: 22999 - DNA, 15 bp, Homo sapiens
tctgcggattatttt

SEQ ID NO: 23000 - DNA, 15 bp, Homo sapiens
ttctgcggattattt

SEQ ID NO: 23001 - DNA, 15 bp, Homo sapiens
tttctgcggattatt

SEQ ID NO: 23002 - DNA, 15 bp, Homo sapiens
atttctgcggattat

SEQ ID NO: 23003 - DNA, 15 bp, Homo sapiens
aatttctgcggatta

SEQ ID NO: 23004 - DNA, 15 bp, Homo sapiens
aaatttctgcggatt

SEQ ID NO: 23005 - DNA, 15 bp, Homo sapiens
caaatttctgcggat

SEQ ID NO: 23006 - DNA, 15 bp, Homo sapiens
tcaaatttctgcgga

SEQ ID NO: 23007 - DNA, 15 bp, Homo sapiens
ctcaaatttctgcgg

SEQ ID NO: 23008 - DNA, 15 bp, Homo sapiens
tctcaaatttctgcg

SEQ ID NO: 23009 - DNA, 15 bp, Homo sapiens
atctcaaatttctgc

SEQ ID NO: 23010 - DNA, 15 bp, Homo sapiens
gatctcaaatttctg

SEQ ID NO: 23011 - DNA, 15 bp, Homo sapiens
tgatctcaaatttct

SEQ ID NO: 23012 - DNA, 15 bp, Homo sapiens
atgatctcaaatttc

SEQ ID NO: 23013 - DNA, 15 bp, Homo sapiens
aatgatctcaaattt

SEQ ID NO: 23014 - DNA, 15 bp, Homo sapiens
gaatgatctcaaatt

SEQ ID NO: 23015 - DNA, 15 bp, Homo sapiens
agaatgatctcaaat

SEQ ID NO: 23016 - DNA, 15 bp, Homo sapiens
gagaatgatctcaaa

SEQ ID NO: 23017 - DNA, 15 bp, Homo sapiens
agagaatgatctcaa

SEQ ID NO: 23018 - DNA, 15 bp, Homo sapiens
tagagaatgatctca

SEQ ID NO: 23019 - DNA, 15 bp, Homo sapiens
ttagagaatgatctc

SEQ ID NO: 23020 - DNA, 15 bp, Homo sapiens
tttagagaatgatct

SEQ ID NO: 23021 - DNA, 15 bp, Homo sapiens
atttagagaatgatc

SEQ ID NO: 23022 - DNA, 15 bp, Homo sapiens
aatttagagaatgat

SEQ ID NO: 23023 - DNA, 15 bp, Homo sapiens
taatttagagaatga

SEQ ID NO: 23024 - DNA, 15 bp, Homo sapiens
ttaatttagagaatg

SEQ ID NO: 23025 - DNA, 15 bp, Homo sapiens
tttaatttagagaat

SEQ ID NO: 23026 - DNA, 15 bp, Homo sapiens
ttttaatttagagaa

SEQ ID NO: 23027 - DNA, 15 bp, Homo sapiens
gttttaatttagaga

SEQ ID NO: 23028 - DNA, 15 bp, Homo sapiens
agttttaatttagag

SEQ ID NO: 23029 - DNA, 15 bp, Homo sapiens
aagttttaatttaga

SEQ ID NO: 23030 - DNA, 15 bp, Homo sapiens
aaagttttaatttag

SEQ ID NO: 23031 - DNA, 15 bp, Homo sapiens
gaaagttttaattta

SEQ ID NO: 23032 - DNA, 15 bp, Homo sapiens
ggaaagttttaattt

SEQ ID NO: 23033 - DNA, 15 bp, Homo sapiens
aggaaagttttaatt

SEQ ID NO: 23034 - DNA, 15 bp, Homo sapiens
taggaaagttttaat

SEQ ID NO: 23035 - DNA, 15 bp, Homo sapiens
ctaggaaagttttaa

SEQ ID NO: 23036 - DNA, 15 bp, Homo sapiens
gctaggaaagtttta

SEQ ID NO: 23037 - DNA, 15 bp, Homo sapiens
ggctaggaaagtttt

SEQ ID NO: 23038 - DNA, 15 bp, Homo sapiens
tggctaggaaagttt

SEQ ID NO: 23039 - DNA, 15 bp, Homo sapiens
atggctaggaaagtt

SEQ ID NO: 23040 - DNA, 15 bp, Homo sapiens
gatggctaggaaagt

SEQ ID NO: 23041 - DNA, 15 bp, Homo sapiens
tgatggctaggaaag

SEQ ID NO: 23042 - DNA, 15 bp, Homo sapiens
atgatggctaggaaa

SEQ ID NO: 23043 - DNA, 15 bp, Homo sapiens
aatgatggctaggaa

SEQ ID NO: 23044 - DNA, 15 bp, Homo sapiens
gaatgatggctagga

SEQ ID NO: 23045 - DNA, 15 bp, Homo sapiens
ggaatgatggctagg

SEQ ID NO: 23046 - DNA, 15 bp, Homo sapiens
tggaatgatggctag

SEQ ID NO: 23047 - DNA, 15 bp, Homo sapiens
atggaatgatggcta

SEQ ID NO: 23048 - DNA, 15 bp, Homo sapiens
tatggaatgatggct

SEQ ID NO: 23049 - DNA, 15 bp, Homo sapiens
ttatggaatgatggc

SEQ ID NO: 23050 - DNA, 15 bp, Homo sapiens
tttatggaatgatgg

SEQ ID NO: 23051 - DNA, 15 bp, Homo sapiens
atttatggaatgatg

SEQ ID NO: 23052 - DNA, 15 bp, Homo sapiens
catttatggaatgat

SEQ ID NO: 23053 - DNA, 15 bp, Homo sapiens
tcatttatggaatga

SEQ ID NO: 23054 - DNA, 15 bp, Homo sapiens
ttcatttatggaatg

SEQ ID NO: 23055 - DNA, 15 bp, Homo sapiens
gttcatttatggaat

SEQ ID NO: 23056 - DNA, 15 bp, Homo sapiens
tgttcatttatggaa

SEQ ID NO: 23057 - DNA, 15 bp, Homo sapiens
ctgttcatttatgga

SEQ ID NO: 23058 - DNA, 15 bp, Homo sapiens
cctgttcatttatgg

SEQ ID NO: 23059 - DNA, 15 bp, Homo sapiens
acctgttcatttatg

SEQ ID NO: 23060 - DNA, 15 bp, Homo sapiens
aacctgttcatttat

SEQ ID NO: 23061 - DNA, 15 bp, Homo sapiens
gaacctgttcattta

SEQ ID NO: 23062 - DNA, 15 bp, Homo sapiens
tgaacctgttcattt

SEQ ID NO: 23063 - DNA, 15 bp, Homo sapiens
ttgaacctgttcatt

SEQ ID NO: 23064 - DNA, 15 bp, Homo sapiens
gttgaacctgttcat

SEQ ID NO: 23065 - DNA, 15 bp, Homo sapiens
tgttgaacctgttca

SEQ ID NO: 23066 - DNA, 15 bp, Homo sapiens
gtgttgaacctgttc

SEQ ID NO: 23067 - DNA, 15 bp, Homo sapiens
ggtgttgaacctgtt

SEQ ID NO: 23068 - DNA, 15 bp, Homo sapiens
aggtgttgaacctgt

SEQ ID NO: 23069 - DNA, 15 bp, Homo sapiens
taggtgttgaacctg

SEQ ID NO: 23070 - DNA, 15 bp, Homo sapiens
ctaggtgttgaacct

SEQ ID NO: 23071 - DNA, 15 bp, Homo sapiens
tctaggtgttgaacc

SEQ ID NO: 23072 - DNA, 15 bp, Homo sapiens
atctaggtgttgaac

SEQ ID NO: 23073 - DNA, 15 bp, Homo sapiens
aatctaggtgttgaa

SEQ ID NO: 23074 - DNA, 15 bp, Homo sapiens
gaatctaggtgttga

SEQ ID NO: 23075 - DNA, 15 bp, Homo sapiens
ggaatctaggtgttg

SEQ ID NO: 23076 - DNA, 15 bp, Homo sapiens
aggaatctaggtgtt

SEQ ID NO: 23077 - DNA, 15 bp, Homo sapiens
aaggaatctaggtgt

SEQ ID NO: 23078 - DNA, 15 bp, Homo sapiens
gaaggaatctaggtg

SEQ ID NO: 23079 - DNA, 15 bp, Homo sapiens
agaaggaatctaggt

SEQ ID NO: 23080 - DNA, 15 bp, Homo sapiens
tagaaggaatctagg

SEQ ID NO: 23081 - DNA, 15 bp, Homo sapiens
atagaaggaatctag

SEQ ID NO: 23082 - DNA, 15 bp, Homo sapiens
aatagaaggaatcta

SEQ ID NO: 23083 - DNA, 15 bp, Homo sapiens
gaatagaaggaatct

SEQ ID NO: 23084 - DNA, 15 bp, Homo sapiens
agaatagaaggaatc

SEQ ID NO: 23085 - DNA, 15 bp, Homo sapiens
cagaatagaaggaat

SEQ ID NO: 23086 - DNA, 15 bp, Homo sapiens
ccagaatagaaggaa

SEQ ID NO: 23087 - DNA, 15 bp, Homo sapiens
cccagaatagaagga

SEQ ID NO: 23088 - DNA, 15 bp, Homo sapiens
acccagaatagaagg

SEQ ID NO: 23089 - DNA, 15 bp, Homo sapiens
aacccagaatagaag

SEQ ID NO: 23090 - DNA, 15 bp, Homo sapiens
gaacccagaatagaa

SEQ ID NO: 23091 - DNA, 15 bp, Homo sapiens
tgaacccagaataga

SEQ ID NO: 23092 - DNA, 15 bp, Homo sapiens
ttgaacccagaatag

SEQ ID NO: 23093 - DNA, 15 bp, Homo sapiens
tttgaacccagaata

SEQ ID NO: 23094 - DNA, 15 bp, Homo sapiens
atttgaacccagaat

SEQ ID NO: 23095 - DNA, 15 bp, Homo sapiens
tatttgaacccagaa

SEQ ID NO: 23096 - DNA, 15 bp, Homo sapiens
atatttgaacccaga

SEQ ID NO: 23097 - DNA, 15 bp, Homo sapiens
catatttgaacccag

SEQ ID NO: 23098 - DNA, 15 bp, Homo sapiens
acatatttgaaccca

SEQ ID NO: 23099 - DNA, 15 bp, Homo sapiens
aacatatttgaaccc

SEQ ID NO: 23100 - DNA, 15 bp, Homo sapiens
taacatatttgaacc

SEQ ID NO: 23101 - DNA, 15 bp, Homo sapiens
gtaacatatttgaac

SEQ ID NO: 23102 - DNA, 15 bp, Homo sapiens
agtaacatatttgaa

SEQ ID NO: 23103 - DNA, 15 bp, Homo sapiens
aagtaacatatttga

SEQ ID NO: 23104 - DNA, 15 bp, Homo sapiens
aaagtaacatatttg

SEQ ID NO: 23105 - DNA, 15 bp, Homo sapiens
caaagtaacatattt

SEQ ID NO: 23106 - DNA, 15 bp, Homo sapiens
tcaaagtaacatatt

SEQ ID NO: 23107 - DNA, 15 bp, Homo sapiens
atcaaagtaacatat

SEQ ID NO: 23108 - DNA, 15 bp, Homo sapiens
aatcaaagtaacata

SEQ ID NO: 23109 - DNA, 15 bp, Homo sapiens
aaatcaaagtaacat

SEQ ID NO: 23110 - DNA, 15 bp, Homo sapiens
aaaatcaaagtaaca

SEQ ID NO: 23111 - DNA, 15 bp, Homo sapiens
aaaaatcaaagtaac

SEQ ID NO: 23112 - DNA, 15 bp, Homo sapiens
aaaaaatcaaagtaa

SEQ ID NO: 23113 - DNA, 15 bp, Homo sapiens
gaaaaaaatcaaagt

SEQ ID NO: 23114 - DNA, 15 bp, Homo sapiens
tgaaaaaaatcaaag

SEQ ID NO: 23115 - DNA, 15 bp, Homo sapiens
atgaaaaaaatcaaa

SEQ ID NO: 23116 - DNA, 15 bp, Homo sapiens
catgaaaaaaatcaa

SEQ ID NO: 23117 - DNA, 15 bp, Homo sapiens
tcatgaaaaaaatca

SEQ ID NO: 23118 - DNA, 15 bp, Homo sapiens
atcatgaaaaaaatc

SEQ ID NO: 23119 - DNA, 15 bp, Homo sapiens
tatcatgaaaaaaat

SEQ ID NO: 23120 - DNA, 15 bp, Homo sapiens
atatcatgaaaaaaa

SEQ ID NO: 23121 - DNA, 15 bp, Homo sapiens
tatatcatgaaaaaa

SEQ ID NO: 23122 - DNA, 15 bp, Homo sapiens
gtatatcatgaaaaa

SEQ ID NO: 23123 - DNA, 15 bp, Homo sapiens
agtatatcatgaaaa

SEQ ID NO: 23124 - DNA, 15 bp, Homo sapiens
aagtatatcatgaaa

SEQ ID NO: 23125 - DNA, 15 bp, Homo sapiens
gaagtatatcatgaa

SEQ ID NO: 23126 - DNA, 15 bp, Homo sapiens
agaagtatatcatga

SEQ ID NO: 23127 - DNA, 15 bp, Homo sapiens
aagaagtatatcatg

SEQ ID NO: 23128 - DNA, 15 bp, Homo sapiens
taagaagtatatcat

SEQ ID NO: 23129 - DNA, 15 bp, Homo sapiens
ttaagaagtatatca

SEQ ID NO: 23130 - DNA, 15 bp, Homo sapiens
gttaagaagtatatc

SEQ ID NO: 23131 - DNA, 15 bp, Homo sapiens
tgttaagaagtatat

SEQ ID NO: 23132 - DNA, 15 bp, Homo sapiens
ttgttaagaagtata

SEQ ID NO: 23133 - DNA, 15 bp, Homo sapiens
cttgttaagaagtat

SEQ ID NO: 23134 - DNA, 15 bp, Homo sapiens
acttgttaagaagta

SEQ ID NO: 23135 - DNA, 15 bp, Homo sapiens
aacttgttaagaagt

SEQ ID NO: 23136 - DNA, 15 bp, Homo sapiens
taacttgttaagaag

SEQ ID NO: 23137 - DNA, 15 bp, Homo sapiens
ttaacttgttaagaa

SEQ ID NO: 23138 - DNA, 15 bp, Homo sapiens
tttaacttgttaaga

SEQ ID NO: 23139 - DNA, 15 bp, Homo sapiens
ttttaacttgttaag

SEQ ID NO: 23140 - DNA, 15 bp, Homo sapiens
tttttaacttgttaa

SEQ ID NO: 23141 - DNA, 15 bp, Homo sapiens
atttttaacttgtta

SEQ ID NO: 23142 - DNA, 15 bp, Homo sapiens
aatttttaacttgtt

SEQ ID NO: 23143 - DNA, 15 bp, Homo sapiens
aaatttttaacttgt

SEQ ID NO: 23144 - DNA, 15 bp, Homo sapiens
caaatttttaacttg

SEQ ID NO: 23145 - DNA, 15 bp, Homo sapiens
gcaaatttttaactt

SEQ ID NO: 23146 - DNA, 15 bp, Homo sapiens
cgcaaatttttaact

SEQ ID NO: 23147 - DNA, 15 bp, Homo sapiens
ccgcaaatttttaac

SEQ ID NO: 23148 - DNA, 15 bp, Homo sapiens
accgcaaatttttaa

SEQ ID NO: 23149 - DNA, 15 bp, Homo sapiens
taccgcaaattttta

SEQ ID NO: 23150 - DNA, 15 bp, Homo sapiens
gtaccgcaaattttt

SEQ ID NO: 23151 - DNA, 15 bp, Homo sapiens
ggtaccgcaaatttt

SEQ ID NO: 23152 - DNA, 15 bp, Homo sapiens
gggtaccgcaaattt

SEQ ID NO: 23153 - DNA, 15 bp, Homo sapiens
tgggtaccgcaaatt

SEQ ID NO: 23154 - DNA, 15 bp, Homo sapiens
gtgggtaccgcaaat

SEQ ID NO: 23155 - DNA, 15 bp, Homo sapiens
ggtgggtaccgcaaa

SEQ ID NO: 23156 - DNA, 15 bp, Homo sapiens
gggtgggtaccgcaa

SEQ ID NO: 23157 - DNA, 15 bp, Homo sapiens
tgggtgggtaccgca

SEQ ID NO: 23158 - DNA, 15 bp, Homo sapiens
ctgggtgggtaccgc

SEQ ID NO: 23159 - DNA, 15 bp, Homo sapiens
tctgggtgggtaccg

SEQ ID NO: 23160 - DNA, 15 bp, Homo sapiens
ttctgggtgggtacc

SEQ ID NO: 23161 - DNA, 15 bp, Homo sapiens
attctgggtgggtac

SEQ ID NO: 23162 - DNA, 15 bp, Homo sapiens
aattctgggtgggta

SEQ ID NO: 23163 - DNA, 15 bp, Homo sapiens
caattctgggtgggt

SEQ ID NO: 23164 - DNA, 15 bp, Homo sapiens
acaattctgggtggg

SEQ ID NO: 23165 - DNA, 15 bp, Homo sapiens
tacaattctgggtgg

SEQ ID NO: 23166 - DNA, 15 bp, Homo sapiens
ttacaattctgggtg

SEQ ID NO: 23167 - DNA, 15 bp, Homo sapiens
tttacaattctgggt

SEQ ID NO: 23168 - DNA, 15 bp, Homo sapiens
atttacaattctggg

SEQ ID NO: 23169 - DNA, 15 bp, Homo sapiens
gatttacaattctgg

SEQ ID NO: 23170 - DNA, 15 bp, Homo sapiens
tgatttacaattctg

SEQ ID NO: 23171 - DNA, 15 bp, Homo sapiens
gtgatttacaattct

SEQ ID NO: 23172 - DNA, 15 bp, Homo sapiens
ggtgatttacaattc

SEQ ID NO: 23173 - DNA, 15 bp, Homo sapiens
tggtgatttacaatt

SEQ ID NO: 23174 - DNA, 15 bp, Homo sapiens
ttggtgatttacaat

SEQ ID NO: 23175 - DNA, 15 bp, Homo sapiens
tttggtgatttacaa

SEQ ID NO: 23176 - DNA, 15 bp, Homo sapiens
ctttggtgatttaca

SEQ ID NO: 23177 - DNA, 15 bp, Homo sapiens
cctttggtgatttac

SEQ ID NO: 23178 - DNA, 15 bp, Homo sapiens
acctttggtgattta

SEQ ID NO: 23179 - DNA, 15 bp, Homo sapiens
aacctttggtgattt

SEQ ID NO: 23180 - DNA, 15 bp, Homo sapiens
taacctttggtgatt

SEQ ID NO: 23181 - DNA, 15 bp, Homo sapiens
ctaacctttggtgat

SEQ ID NO: 23182 - DNA, 15 bp, Homo sapiens
cctaacctttggtga

SEQ ID NO: 23183 - DNA, 15 bp, Homo sapiens
ccctaacctttggtg

SEQ ID NO: 23184 - DNA, 15 bp, Homo sapiens
accctaacctttggt

SEQ ID NO: 23185 - DNA, 15 bp, Homo sapiens
taccctaacctttgg

SEQ ID NO: 23186 - DNA, 15 bp, Homo sapiens
ttaccctaacctttg

SEQ ID NO: 23187 - DNA, 15 bp, Homo sapiens
gttaccctaaccttt

SEQ ID NO: 23188 - DNA, 15 bp, Homo sapiens
agttaccctaacctt

SEQ ID NO: 23189 - DNA, 15 bp, Homo sapiens
aagttaccctaacct

SEQ ID NO: 23190 - DNA, 15 bp, Homo sapiens
taagttaccctaacc

SEQ ID NO: 23191 - DNA, 15 bp, Homo sapiens
ctaagttaccctaac

SEQ ID NO: 23192 - DNA, 15 bp, Homo sapiens
cctaagttaccctaa

SEQ ID NO: 23193 - DNA, 15 bp, Homo sapiens
gcctaagttacccta

SEQ ID NO: 23194 - DNA, 15 bp, Homo sapiens
ggcctaagttaccct

SEQ ID NO: 23195 - DNA, 15 bp, Homo sapiens
aggcctaagttaccc

SEQ ID NO: 23196 - DNA, 15 bp, Homo sapiens
aaggcctaagttacc

SEQ ID NO: 23197 - DNA, 15 bp, Homo sapiens
taaggcctaagttac

SEQ ID NO: 23198 - DNA, 15 bp, Homo sapiens
ttaaggcctaagtta

SEQ ID NO: 23199 - DNA, 15 bp, Homo sapiens
attaaggcctaagtt

SEQ ID NO: 23200 - DNA, 15 bp, Homo sapiens
aattaaggcctaagt

SEQ ID NO: 23201 - DNA, 15 bp, Homo sapiens
aaattaaggcctaag

SEQ ID NO: 23202 - DNA, 15 bp, Homo sapiens
gaaattaaggcctaa

SEQ ID NO: 23203 - DNA, 15 bp, Homo sapiens
ggaaattaaggccta

SEQ ID NO: 23204 - DNA, 15 bp, Homo sapiens
gggaaattaaggcct

SEQ ID NO: 23205 - DNA, 15 bp, Homo sapiens
ggggaaattaaggcc

SEQ ID NO: 23206 - DNA, 15 bp, Homo sapiens
aggggaaattaaggc

SEQ ID NO: 23207 - DNA, 15 bp, Homo sapiens
taggggaaattaagg

SEQ ID NO: 23208 - DNA, 15 bp, Homo sapiens
gtaggggaaattaag

SEQ ID NO: 23209 - DNA, 15 bp, Homo sapiens
tgtaggggaaattaa

SEQ ID NO: 23210 - DNA, 15 bp, Homo sapiens
gtgtaggggaaatta

SEQ ID NO: 23211 - DNA, 15 bp, Homo sapiens
agtgtaggggaaatt

SEQ ID NO: 23212 - DNA, 15 bp, Homo sapiens
cagtgtaggggaaat

SEQ ID NO: 23213 - DNA, 15 bp, Homo sapiens
gcagtgtaggggaaa

SEQ ID NO: 23214 - DNA, 15 bp, Homo sapiens
tgcagtgtaggggaa

SEQ ID NO: 23215 - DNA, 15 bp, Homo sapiens
ttgcagtgtagggga

SEQ ID NO: 23216 - DNA, 15 bp, Homo sapiens
cttgcagtgtagggg

SEQ ID NO: 23217 - DNA, 15 bp, Homo sapiens
tcttgcagtgtaggg

SEQ ID NO: 23218 - DNA, 15 bp, Homo sapiens
ttcttgcagtgtagg

SEQ ID NO: 23219 - DNA, 15 bp, Homo sapiens
tttcttgcagtgtag

SEQ ID NO: 23220 - DNA, 15 bp, Homo sapiens
atttcttgcagtgta

SEQ ID NO: 23221 - DNA, 15 bp, Homo sapiens
tatttcttgcagtgt

SEQ ID NO: 23222 - DNA, 15 bp, Homo sapiens
ctatttcttgcagtg

SEQ ID NO: 23223 - DNA, 15 bp, Homo sapiens
actatttcttgcagt

SEQ ID NO: 23224 - DNA, 15 bp, Homo sapiens
aactatttcttgcag

SEQ ID NO: 23225 - DNA, 15 bp, Homo sapiens
taactatttcttgca

SEQ ID NO: 23226 - DNA, 15 bp, Homo sapiens
ataactatttcttgc

SEQ ID NO: 23227 - DNA, 15 bp, Homo sapiens
tataactatttcttg

SEQ ID NO: 23228 - DNA, 15 bp, Homo sapiens
ctataactatttctt

SEQ ID NO: 23229 - DNA, 15 bp, Homo sapiens
tctataactatttct

SEQ ID NO: 23230 - DNA, 15 bp, Homo sapiens
gtctataactatttc

SEQ ID NO: 23231 - DNA, 15 bp, Homo sapiens
agtctataactattt

SEQ ID NO: 23232 - DNA, 15 bp, Homo sapiens
tagtctataactatt

SEQ ID NO: 23233 - DNA, 15 bp, Homo sapiens
atagtctataactat

SEQ ID NO: 23234 - DNA, 15 bp, Homo sapiens
tatagtctataacta

SEQ ID NO: 23235 - DNA, 15 bp, Homo sapiens
atatagtctataact

SEQ ID NO: 23236 - DNA, 15 bp, Homo sapiens
gatatagtctataac

SEQ ID NO: 23237 - DNA, 15 bp, Homo sapiens
agatatagtctataa

SEQ ID NO: 23238 - DNA, 15 bp, Homo sapiens
aagatatagtctata

SEQ ID NO: 23239 - DNA, 15 bp, Homo sapiens
aaagatatagtctat

SEQ ID NO: 23240 - DNA, 15 bp, Homo sapiens
aaaagatatagtcta

SEQ ID NO: 23241 - DNA, 15 bp, Homo sapiens
taaaagatatagtct

SEQ ID NO: 23242 - DNA, 15 bp, Homo sapiens
ataaaagatatagtc

SEQ ID NO: 23243 - DNA, 15 bp, Homo sapiens
tataaaagatatagt

SEQ ID NO: 23244 - DNA, 15 bp, Homo sapiens
atataaaagatatag

SEQ ID NO: 23245 - DNA, 15 bp, Homo sapiens
gatataaaagatata

SEQ ID NO: 23246 - DNA, 15 bp, Homo sapiens
tgatataaaagatat

SEQ ID NO: 23247 - DNA, 15 bp, Homo sapiens
gtgatataaaagata

SEQ ID NO: 23248 - DNA, 15 bp, Homo sapiens
agtgatataaaagat

SEQ ID NO: 23249 - DNA, 15 bp, Homo sapiens
gagtgatataaaaga

SEQ ID NO: 23250 - DNA, 15 bp, Homo sapiens
tgagtgatataaaag

SEQ ID NO: 23251 - DNA, 15 bp, Homo sapiens
ttgagtgatataaaa

SEQ ID NO: 23252 - DNA, 15 bp, Homo sapiens
tttgagtgatataaa

SEQ ID NO: 23253 - DNA, 15 bp, Homo sapiens
gtttgagtgatataa

SEQ ID NO: 23254 - DNA, 15 bp, Homo sapiens
agtttgagtgatata

SEQ ID NO: 23255 - DNA, 15 bp, Homo sapiens
aagtttgagtgatat

SEQ ID NO: 23256 - DNA, 15 bp, Homo sapiens
caagtttgagtgata

SEQ ID NO: 23257 - DNA, 15 bp, Homo sapiens
ccaagtttgagtgat

SEQ ID NO: 23258 - DNA, 15 bp, Homo sapiens
tccaagtttgagtga

SEQ ID NO: 23259 - DNA, 15 bp, Homo sapiens
ttccaagtttgagtg

SEQ ID NO: 23260 - DNA, 15 bp, Homo sapiens
gttccaagtttgagt

SEQ ID NO: 23261 - DNA, 15 bp, Homo sapiens
cgttccaagtttgag

SEQ ID NO: 23262 - DNA, 15 bp, Homo sapiens
ccgttccaagtttga

SEQ ID NO: 23263 - DNA, 15 bp, Homo sapiens
tccgttccaagtttg

SEQ ID NO: 23264 - DNA, 15 bp, Homo sapiens
ttccgttccaagttt

SEQ ID NO: 23265 - DNA, 15 bp, Homo sapiens
cttccgttccaagtt

SEQ ID NO: 23266 - DNA, 15 bp, Homo sapiens
acttccgttccaagt

SEQ ID NO: 23267 - DNA, 15 bp, Homo sapiens
cacttccgttccaag

SEQ ID NO: 23268 - DNA, 15 bp, Homo sapiens
ccacttccgttccaa

SEQ ID NO: 23269 - DNA, 15 bp, Homo sapiens
tccacttccgttcca

SEQ ID NO: 23270 - DNA, 15 bp, Homo sapiens
ttccacttccgttcc

SEQ ID NO: 23271 - DNA, 15 bp, Homo sapiens
attccacttccgttc

SEQ ID NO: 23272 - DNA, 15 bp, Homo sapiens
aattccacttccgtt

SEQ ID NO: 23273 - DNA, 15 bp, Homo sapiens
aaattccacttccgt

SEQ ID NO: 23274 - DNA, 15 bp, Homo sapiens
taaattccacttccg

SEQ ID NO: 23275 - DNA, 15 bp, Homo sapiens
ctaaattccacttcc

SEQ ID NO: 23276 - DNA, 15 bp, Homo sapiens
tctaaattccacttc

SEQ ID NO: 23277 - DNA, 15 bp, Homo sapiens
ctctaaattccactt

SEQ ID NO: 23278 - DNA, 15 bp, Homo sapiens
actctaaattccact

SEQ ID NO: 23279 - DNA, 15 bp, Homo sapiens
aactctaaattccac

SEQ ID NO: 23280 - DNA, 15 bp, Homo sapiens
aaactctaaattcca

SEQ ID NO: 23281 - DNA, 15 bp, Homo sapiens
taaactctaaattcc

SEQ ID NO: 23282 - DNA, 15 bp, Homo sapiens
ataaactctaaattc

SEQ ID NO: 23283 - DNA, 15 bp, Homo sapiens
aataaactctaaatt

SEQ ID NO: 23284 - DNA, 15 bp, Homo sapiens
gaataaactctaaat

SEQ ID NO: 23285 - DNA, 15 bp, Homo sapiens
agaataaactctaaa

SEQ ID NO: 23286 - DNA, 15 bp, Homo sapiens
cagaataaactctaa

SEQ ID NO: 23287 - DNA, 15 bp, Homo sapiens
tcagaataaactcta

SEQ ID NO: 23288 - DNA, 15 bp, Homo sapiens
ctcagaataaactct

SEQ ID NO: 23289 - DNA, 15 bp, Homo sapiens
tctcagaataaactc

SEQ ID NO: 23290 - DNA, 15 bp, Homo sapiens
ttctcagaataaact

SEQ ID NO: 23291 - DNA, 15 bp, Homo sapiens
gttctcagaataaac

SEQ ID NO: 23292 - DNA, 15 bp, Homo sapiens
tgttctcagaataaa

SEQ ID NO: 23293 - DNA, 15 bp, Homo sapiens
atgttctcagaataa

SEQ ID NO: 23294 - DNA, 15 bp, Homo sapiens
gatgttctcagaata

SEQ ID NO: 23295 - DNA, 15 bp, Homo sapiens
agatgttctcagaat

SEQ ID NO: 23296 - DNA, 15 bp, Homo sapiens
gagatgttctcagaa

SEQ ID NO: 23297 - DNA, 15 bp, Homo sapiens
agagatgttctcaga

SEQ ID NO: 23298 - DNA, 15 bp, Homo sapiens
aagagatgttctcag

SEQ ID NO: 23299 - DNA, 15 bp, Homo sapiens
aaagagatgttctca

SEQ ID NO: 23300 - DNA, 15 bp, Homo sapiens
aaaagagatgttctc

SEQ ID NO: 23301 - DNA, 15 bp, Homo sapiens
caaaagagatgttct

SEQ ID NO: 23302 - DNA, 15 bp, Homo sapiens
acaaaagagatgttc

SEQ ID NO: 23303 - DNA, 15 bp, Homo sapiens
aacaaaagagatgtt

SEQ ID NO: 23304 - DNA, 15 bp, Homo sapiens
aaacaaaagagatgt

SEQ ID NO: 23305 - DNA, 15 bp, Homo sapiens
aaaacaaaagagatg

SEQ ID NO: 23306 - DNA, 15 bp, Homo sapiens
taaaacaaaagagat

SEQ ID NO: 23307 - DNA, 15 bp, Homo sapiens
ataaaacaaaagaga

SEQ ID NO: 23308 - DNA, 15 bp, Homo sapiens
cataaaacaaaagag

SEQ ID NO: 23309 - DNA, 15 bp, Homo sapiens
acataaaacaaaaga

SEQ ID NO: 23310 - DNA, 15 bp, Homo sapiens
cacataaaacaaaag

SEQ ID NO: 23311 - DNA, 15 bp, Homo sapiens
acacataaaacaaaa

SEQ ID NO: 23312 - DNA, 15 bp, Homo sapiens
cacacataaaacaaa

SEQ ID NO: 23313 - DNA, 15 bp, Homo sapiens
tcacacataaaacaa

SEQ ID NO: 23314 - DNA, 15 bp, Homo sapiens
ctcacacataaaaca

SEQ ID NO: 23315 - DNA, 15 bp, Homo sapiens
cctcacacataaaac

SEQ ID NO: 23316 - DNA, 15 bp, Homo sapiens
tcctcacacataaaa

SEQ ID NO: 23317 - DNA, 15 bp, Homo sapiens
ttcctcacacataaa

SEQ ID NO: 23318 - DNA, 15 bp, Homo sapiens
cttcctcacacataa

SEQ ID NO: 23319 - DNA, 15 bp, Homo sapiens
gcttcctcacacata

SEQ ID NO: 23320 - DNA, 15 bp, Homo sapiens
tgcttcctcacacat

SEQ ID NO: 23321 - DNA, 15 bp, Homo sapiens
ctgcttcctcacaca

SEQ ID NO: 23322 - DNA, 15 bp, Homo sapiens
tctgcttcctcacac

SEQ ID NO: 23323 - DNA, 15 bp, Homo sapiens
ctctgcttcctcaca

SEQ ID NO: 23324 - DNA, 15 bp, Homo sapiens
tctctgcttcctcac

SEQ ID NO: 23325 - DNA, 15 bp, Homo sapiens
atctctgcttcctca

SEQ ID NO: 23326 - DNA, 15 bp, Homo sapiens
gatctctgcttcctc

SEQ ID NO: 23327 - DNA, 15 bp, Homo sapiens
tgatctctgcttcct

SEQ ID NO: 23328 - DNA, 15 bp, Homo sapiens
ttgatctctgcttcc

SEQ ID NO: 23329 - DNA, 15 bp, Homo sapiens
cttgatctctgcttc

SEQ ID NO: 23330 - DNA, 15 bp, Homo sapiens
tcttgatctctgctt

SEQ ID NO: 23331 - DNA, 15 bp, Homo sapiens
ctcttgatctctgct

SEQ ID NO: 23332 - DNA, 15 bp, Homo sapiens
actcttgatctctgc

SEQ ID NO: 23333 - DNA, 15 bp, Homo sapiens
cactcttgatctctg

SEQ ID NO: 23334 - DNA, 15 bp, Homo sapiens
tcactcttgatctct

SEQ ID NO: 23335 - DNA, 15 bp, Homo sapiens
gtcactcttgatctc

SEQ ID NO: 23336 - DNA, 15 bp, Homo sapiens
agtcactcttgatct

SEQ ID NO: 23337 - DNA, 15 bp, Homo sapiens
cagtcactcttgatc

SEQ ID NO: 23338 - DNA, 15 bp, Homo sapiens
tcagtcactcttgat

SEQ ID NO: 23339 - DNA, 15 bp, Homo sapiens
atcagtcactcttga

SEQ ID NO: 23340 - DNA, 15 bp, Homo sapiens
aatcagtcactcttg

SEQ ID NO: 23341 - DNA, 15 bp, Homo sapiens
caatcagtcactctt

SEQ ID NO: 23342 - DNA, 15 bp, Homo sapiens
tcaatcagtcactct

SEQ ID NO: 23343 - DNA, 15 bp, Homo sapiens
gtcaatcagtcactc

SEQ ID NO: 23344 - DNA, 15 bp, Homo sapiens
agtcaatcagtcact

SEQ ID NO: 23345 - DNA, 15 bp, Homo sapiens
aagtcaatcagtcac

SEQ ID NO: 23346 - DNA, 15 bp, Homo sapiens
aaagtcaatcagtca

SEQ ID NO: 23347 - DNA, 15 bp, Homo sapiens
aaaagtcaatcagtc

SEQ ID NO: 23348 - DNA, 15 bp, Homo sapiens
aaaaagtcaatcagt

SEQ ID NO: 23349 - DNA, 15 bp, Homo sapiens
aaaaaagtcaatcag

SEQ ID NO: 23350 - DNA, 15 bp, Homo sapiens
caaaaaagtcaatca

SEQ ID NO: 23351 - DNA, 15 bp, Homo sapiens
ccaaaaaagtcaatc

SEQ ID NO: 23352 - DNA, 15 bp, Homo sapiens
cccaaaaaagtcaat

SEQ ID NO: 23353 - DNA, 15 bp, Homo sapiens
acccaaaaaagtcaa

SEQ ID NO: 23354 - DNA, 15 bp, Homo sapiens
tacccaaaaaagtca

SEQ ID NO: 23355 - DNA, 15 bp, Homo sapiens
gtacccaaaaaagtc

SEQ ID NO: 23356 - DNA, 15 bp, Homo sapiens
agtacccaaaaaagt

SEQ ID NO: 23357 - DNA, 15 bp, Homo sapiens
cagtacccaaaaaag

SEQ ID NO: 23358 - DNA, 15 bp, Homo sapiens
tcagtacccaaaaaa

SEQ ID NO: 23359 - DNA, 15 bp, Homo sapiens
gtcagtacccaaaaa

SEQ ID NO: 23360 - DNA, 15 bp, Homo sapiens
tgtcagtacccaaaa

SEQ ID NO: 23361 - DNA, 15 bp, Homo sapiens
ttgtcagtacccaaa

SEQ ID NO: 23362 - DNA, 15 bp, Homo sapiens
cttgtcagtacccaa

SEQ ID NO: 23363 - DNA, 15 bp, Homo sapiens
gcttgtcagtaccca

SEQ ID NO: 23364 - DNA, 15 bp, Homo sapiens
cgcttgtcagtaccc

SEQ ID NO: 23365 - DNA, 15 bp, Homo sapiens
ccgcttgtcagtacc

SEQ ID NO: 23366 - DNA, 15 bp, Homo sapiens
accgcttgtcagtac

SEQ ID NO: 23367 - DNA, 15 bp, Homo sapiens
aaccgcttgtcagta

SEQ ID NO: 23368 - DNA, 15 bp, Homo sapiens
caaccgcttgtcagt

SEQ ID NO: 23369 - DNA, 15 bp, Homo sapiens
ccaaccgcttgtcag

SEQ ID NO: 23370 - DNA, 15 bp, Homo sapiens
tccaaccgcttgtca

SEQ ID NO: 23371 - DNA, 15 bp, Homo sapiens
ttccaaccgcttgtc

SEQ ID NO: 23372 - DNA, 15 bp, Homo sapiens
cttccaaccgcttgt

SEQ ID NO: 23373 - DNA, 15 bp, Homo sapiens
acttccaaccgcttg

SEQ ID NO: 23374 - DNA, 15 bp, Homo sapiens
tacttccaaccgctt

SEQ ID NO: 23375 - DNA, 15 bp, Homo sapiens
ttacttccaaccgct

SEQ ID NO: 23376 - DNA, 15 bp, Homo sapiens
tttacttccaaccgc

SEQ ID NO: 23377 - DNA, 15 bp, Homo sapiens
ctttacttccaaccg

SEQ ID NO: 23378 - DNA, 15 bp, Homo sapiens
gctttacttccaacc

SEQ ID NO: 23379 - DNA, 15 bp, Homo sapiens
ggctttacttccaac

SEQ ID NO: 23380 - DNA, 15 bp, Homo sapiens
aggctttacttccaa

SEQ ID NO: 23381 - DNA, 15 bp, Homo sapiens
taggctttacttcca

SEQ ID NO: 23382 - DNA, 15 bp, Homo sapiens
ttaggctttacttcc

SEQ ID NO: 23383 - DNA, 15 bp, Homo sapiens
tttaggctttacttc

SEQ ID NO: 23384 - DNA, 15 bp, Homo sapiens
gtttaggctttactt

SEQ ID NO: 23385 - DNA, 15 bp, Homo sapiens
agtttaggctttact

SEQ ID NO: 23386 - DNA, 15 bp, Homo sapiens
gagtttaggctttac

SEQ ID NO: 23387 - DNA, 15 bp, Homo sapiens
tgagtttaggcttta

SEQ ID NO: 23388 - DNA, 15 bp, Homo sapiens
ctgagtttaggcttt

SEQ ID NO: 23389 - DNA, 15 bp, Homo sapiens
cctgagtttaggctt

SEQ ID NO: 23390 - DNA, 15 bp, Homo sapiens
gcctgagtttaggct

SEQ ID NO: 23391 - DNA, 15 bp, Homo sapiens
agcctgagtttaggc

SEQ ID NO: 23392 - DNA, 15 bp, Homo sapiens
aagcctgagtttagg

SEQ ID NO: 23393 - DNA, 15 bp, Homo sapiens
aaagcctgagtttag

SEQ ID NO: 23394 - DNA, 15 bp, Homo sapiens
aaaagcctgagttta

SEQ ID NO: 23395 - DNA, 15 bp, Homo sapiens
taaaagcctgagttt

SEQ ID NO: 23396 - DNA, 15 bp, Homo sapiens
ttaaaagcctgagtt

SEQ ID NO: 23397 - DNA, 15 bp, Homo sapiens
attaaaagcctgagt

SEQ ID NO: 23398 - DNA, 15 bp, Homo sapiens
gattaaaagcctgag

SEQ ID NO: 23399 - DNA, 15 bp, Homo sapiens
agattaaaagcctga

SEQ ID NO: 23400 - DNA, 15 bp, Homo sapiens
aagattaaaagcctg

SEQ ID NO: 23401 - DNA, 15 bp, Homo sapiens
taagattaaaagcct

SEQ ID NO: 23402 - DNA, 15 bp, Homo sapiens
ataagattaaaagcc

SEQ ID NO: 23403 - DNA, 15 bp, Homo sapiens
aataagattaaaagc

SEQ ID NO: 23404 - DNA, 15 bp, Homo sapiens
gaataagattaaaag

SEQ ID NO: 23405 - DNA, 15 bp, Homo sapiens
tgaataagattaaaa

SEQ ID NO: 23406 - DNA, 15 bp, Homo sapiens
gtgaataagattaaa

SEQ ID NO: 23407 - DNA, 15 bp, Homo sapiens
agtgaataagattaa

SEQ ID NO: 23408 - DNA, 15 bp, Homo sapiens
cagtgaataagatta

SEQ ID NO: 23409 - DNA, 15 bp, Homo sapiens
acagtgaataagatt

SEQ ID NO: 23410 - DNA, 15 bp, Homo sapiens
cacagtgaataagat

SEQ ID NO: 23411 - DNA, 15 bp, Homo sapiens
acacagtgaataaga

SEQ ID NO: 23412 - DNA, 15 bp, Homo sapiens
aacacagtgaataag

SEQ ID NO: 23413 - DNA, 15 bp, Homo sapiens
gaacacagtgaataa

SEQ ID NO: 23414 - DNA, 15 bp, Homo sapiens
agaacacagtgaata

SEQ ID NO: 23415 - DNA, 15 bp, Homo sapiens
gagaacacagtgaat

SEQ ID NO: 23416 - DNA, 15 bp, Homo sapiens
agagaacacagtgaa

SEQ ID NO: 23417 - DNA, 15 bp, Homo sapiens
aagagaacacagtga

SEQ ID NO: 23418 - DNA, 15 bp, Homo sapiens
caagagaacacagtg

SEQ ID NO: 23419 - DNA, 15 bp, Homo sapiens
tcaagagaacacagt

SEQ ID NO: 23420 - DNA, 15 bp, Homo sapiens
ttcaagagaacacag

SEQ ID NO: 23421 - DNA, 15 bp, Homo sapiens
tttcaagagaacaca

SEQ ID NO: 23422 - DNA, 15 bp, Homo sapiens
ttttcaagagaacac

SEQ ID NO: 23423 - DNA, 15 bp, Homo sapiens
tttttcaagagaaca

SEQ ID NO: 23424 - DNA, 15 bp, Homo sapiens
ttttttcaagagaac

SEQ ID NO: 23425 - DNA, 15 bp, Homo sapiens
cttttttcaagagaa

SEQ ID NO: 23426 - DNA, 15 bp, Homo sapiens
ccttttttcaagaga

SEQ ID NO: 23427 - DNA, 15 bp, Homo sapiens
tccttttttcaagag

SEQ ID NO: 23428 - DNA, 15 bp, Homo sapiens
ttccttttttcaaga

SEQ ID NO: 23429 - DNA, 15 bp, Homo sapiens
attccttttttcaag

SEQ ID NO: 23430 - DNA, 15 bp, Homo sapiens
gattccttttttcaa

SEQ ID NO: 23431 - DNA, 15 bp, Homo sapiens
agattccttttttca

SEQ ID NO: 23432 - DNA, 15 bp, Homo sapiens
aagattccttttttc

SEQ ID NO: 23433 - DNA, 15 bp, Homo sapiens
taagattcctttttt

SEQ ID NO: 23434 - DNA, 15 bp, Homo sapiens
ataagattccttttt

SEQ ID NO: 23435 - DNA, 15 bp, Homo sapiens
cataagattcctttt

SEQ ID NO: 23436 - DNA, 15 bp, Homo sapiens
tcataagattccttt

SEQ ID NO: 23437 - DNA, 15 bp, Homo sapiens
ctcataagattcctt

SEQ ID NO: 23438 - DNA, 15 bp, Homo sapiens
actcataagattcct

SEQ ID NO: 23439 - DNA, 15 bp, Homo sapiens
gactcataagattcc

SEQ ID NO: 23440 - DNA, 15 bp, Homo sapiens
ggactcataagattc

SEQ ID NO: 23441 - DNA, 15 bp, Homo sapiens
tggactcataagatt

SEQ ID NO: 23442 - DNA, 15 bp, Homo sapiens
ctggactcataagat

SEQ ID NO: 23443 - DNA, 15 bp, Homo sapiens
tctggactcataaga

SEQ ID NO: 23444 - DNA, 15 bp, Homo sapiens
ctctggactcataag

SEQ ID NO: 23445 - DNA, 15 bp, Homo sapiens
cctctggactcataa

SEQ ID NO: 23446 - DNA, 15 bp, Homo sapiens
acctctggactcata

SEQ ID NO: 23447 - DNA, 15 bp, Homo sapiens
gacctctggactcat

SEQ ID NO: 23448 - DNA, 15 bp, Homo sapiens
agacctctggactca

SEQ ID NO: 23449 - DNA, 15 bp, Homo sapiens
cagacctctggactc

SEQ ID NO: 23450 - DNA, 15 bp, Homo sapiens
acagacctctggact

SEQ ID NO: 23451 - DNA, 15 bp, Homo sapiens
gacagacctctggac

SEQ ID NO: 23452 - DNA, 15 bp, Homo sapiens
ggacagacctctgga

SEQ ID NO: 23453 - DNA, 15 bp, Homo sapiens
gggacagacctctgg

SEQ ID NO: 23454 - DNA, 15 bp, Homo sapiens
ggggacagacctctg

SEQ ID NO: 23455 - DNA, 15 bp, Homo sapiens
aggggacagacctct

SEQ ID NO: 23456 - DNA, 15 bp, Homo sapiens
aaggggacagacctc

SEQ ID NO: 23457 - DNA, 15 bp, Homo sapiens
gaaggggacagacct

SEQ ID NO: 23458 - DNA, 15 bp, Homo sapiens
agaaggggacagacc

SEQ ID NO: 23459 - DNA, 15 bp, Homo sapiens
tagaaggggacagac

SEQ ID NO: 23460 - DNA, 15 bp, Homo sapiens
ttagaaggggacaga

SEQ ID NO: 23461 - DNA, 15 bp, Homo sapiens
cttagaaggggacag

SEQ ID NO: 23462 - DNA, 15 bp, Homo sapiens
ccttagaaggggaca

SEQ ID NO: 23463 - DNA, 15 bp, Homo sapiens
tccttagaaggggac

SEQ ID NO: 23464 - DNA, 15 bp, Homo sapiens
atccttagaagggga

SEQ ID NO: 23465 - DNA, 15 bp, Homo sapiens
aatccttagaagggg

SEQ ID NO: 23466 - DNA, 15 bp, Homo sapiens
caatccttagaaggg

SEQ ID NO: 23467 - DNA, 15 bp, Homo sapiens
ccaatccttagaagg

SEQ ID NO: 23468 - DNA, 15 bp, Homo sapiens
tccaatccttagaag

SEQ ID NO: 23469 - DNA, 15 bp, Homo sapiens
ctccaatccttagaa

SEQ ID NO: 23470 - DNA, 15 bp, Homo sapiens
gctccaatccttaga

SEQ ID NO: 23471 - DNA, 15 bp, Homo sapiens
tgctccaatccttag

SEQ ID NO: 23472 - DNA, 15 bp, Homo sapiens
ttgctccaatcctta

SEQ ID NO: 23473 - DNA, 15 bp, Homo sapiens
tttgctccaatcctt

SEQ ID NO: 23474 - DNA, 15 bp, Homo sapiens
atttgctccaatcct

SEQ ID NO: 23475 - DNA, 15 bp, Homo sapiens
tatttgctccaatcc

SEQ ID NO: 23476 - DNA, 15 bp, Homo sapiens
ttatttgctccaatc

SEQ ID NO: 23477 - DNA, 15 bp, Homo sapiens
tttatttgctccaat

SEQ ID NO: 23478 - DNA, 15 bp, Homo sapiens
ctttatttgctccaa

SEQ ID NO: 23479 - DNA, 15 bp, Homo sapiens
tctttatttgctcca

SEQ ID NO: 23480 - DNA, 15 bp, Homo sapiens
ctctttatttgctcc

SEQ ID NO: 23481 - DNA, 15 bp, Homo sapiens
tctctttatttgctc

SEQ ID NO: 23482 - DNA, 15 bp, Homo sapiens
gtctctttatttgct

SEQ ID NO: 23483 - DNA, 15 bp, Homo sapiens
ggtctctttatttgc

SEQ ID NO: 23484 - DNA, 15 bp, Homo sapiens
tggtctctttatttg

SEQ ID NO: 23485 - DNA, 15 bp, Homo sapiens
ctggtctctttattt

SEQ ID NO: 23486 - DNA, 15 bp, Homo sapiens
actggtctctttatt

SEQ ID NO: 23487 - DNA, 15 bp, Homo sapiens
gactggtctctttat

SEQ ID NO: 23488 - DNA, 15 bp, Homo sapiens
agactggtctcttta

SEQ ID NO: 23489 - DNA, 15 bp, Homo sapiens
aagactggtctcttt

SEQ ID NO: 23490 - DNA, 15 bp, Homo sapiens
aaagactggtctctt

SEQ ID NO: 23491 - DNA, 15 bp, Homo sapiens
caaagactggtctct

SEQ ID NO: 23492 - DNA, 15 bp, Homo sapiens
acaaagactggtctc

SEQ ID NO: 23493 - DNA, 15 bp, Homo sapiens
gacaaagactggtct

SEQ ID NO: 23494 - DNA, 15 bp, Homo sapiens
agacaaagactggtc

SEQ ID NO: 23495 - DNA, 15 bp, Homo sapiens
gagacaaagactggt

SEQ ID NO: 23496 - DNA, 15 bp, Homo sapiens
agagacaaagactgg

SEQ ID NO: 23497 - DNA, 15 bp, Homo sapiens
tagagacaaagactg

SEQ ID NO: 23498 - DNA, 15 bp, Homo sapiens
ctagagacaaagact

SEQ ID NO: 23499 - DNA, 15 bp, Homo sapiens
cctagagacaaagac

SEQ ID NO: 23500 - DNA, 15 bp, Homo sapiens
gcctagagacaaaga

SEQ ID NO: 23501 - DNA, 15 bp, Homo sapiens
ggcctagagacaaag

SEQ ID NO: 23502 - DNA, 15 bp, Homo sapiens
tggcctagagacaaa

SEQ ID NO: 23503 - DNA, 15 bp, Homo sapiens
gtggcctagagacaa

SEQ ID NO: 23504 - DNA, 15 bp, Homo sapiens
tgtggcctagagaca

SEQ ID NO: 23505 - DNA, 15 bp, Homo sapiens
ttgtggcctagagac

SEQ ID NO: 23506 - DNA, 15 bp, Homo sapiens
cttgtggcctagaga

SEQ ID NO: 23507 - DNA, 15 bp, Homo sapiens
tcttgtggcctagag

SEQ ID NO: 23508 - DNA, 15 bp, Homo sapiens
atcttgtggcctaga

SEQ ID NO: 23509 - DNA, 15 bp, Homo sapiens
gatcttgtggcctag

SEQ ID NO: 23510 - DNA, 15 bp, Homo sapiens
ggatcttgtggccta

SEQ ID NO: 23511 - DNA, 15 bp, Homo sapiens
tggatcttgtggcct

SEQ ID NO: 23512 - DNA, 15 bp, Homo sapiens
gtggatcttgtggcc

SEQ ID NO: 23513 - DNA, 15 bp, Homo sapiens
ggtggatcttgtggc

SEQ ID NO: 23514 - DNA, 15 bp, Homo sapiens
tggtggatcttgtgg

SEQ ID NO: 23515 - DNA, 15 bp, Homo sapiens
ttggtggatcttgtg

SEQ ID NO: 23516 - DNA, 15 bp, Homo sapiens
cttggtggatcttgt

SEQ ID NO: 23517 - DNA, 15 bp, Homo sapiens
tcttggtggatcttg

SEQ ID NO: 23518 - DNA, 15 bp, Homo sapiens
atcttggtggatctt

SEQ ID NO: 23519 - DNA, 15 bp, Homo sapiens
tatcttggtggatct

SEQ ID NO: 23520 - DNA, 15 bp, Homo sapiens
ctatcttggtggatc

SEQ ID NO: 23521 - DNA, 15 bp, Homo sapiens
cctatcttggtggat

SEQ ID NO: 23522 - DNA, 15 bp, Homo sapiens
ccctatcttggtgga

SEQ ID NO: 23523 - DNA, 15 bp, Homo sapiens
tccctatcttggtgg

SEQ ID NO: 23524 - DNA, 15 bp, Homo sapiens
gtccctatcttggtg

SEQ ID NO: 23525 - DNA, 15 bp, Homo sapiens
ggtccctatcttggt

SEQ ID NO: 23526 - DNA, 15 bp, Homo sapiens
tggtccctatcttgg

SEQ ID NO: 23527 - DNA, 15 bp, Homo sapiens
atggtccctatcttg

SEQ ID NO: 23528 - DNA, 15 bp, Homo sapiens
aatggtccctatctt

SEQ ID NO: 23529 - DNA, 15 bp, Homo sapiens
aaatggtccctatct

SEQ ID NO: 23530 - DNA, 15 bp, Homo sapiens
caaatggtccctatc

SEQ ID NO: 23531 - DNA, 15 bp, Homo sapiens
ccaaatggtccctat

SEQ ID NO: 23532 - DNA, 15 bp, Homo sapiens
accaaatggtcccta

SEQ ID NO: 23533 - DNA, 15 bp, Homo sapiens
gaccaaatggtccct

SEQ ID NO: 23534 - DNA, 15 bp, Homo sapiens
agaccaaatggtccc

SEQ ID NO: 23535 - DNA, 15 bp, Homo sapiens
aagaccaaatggtcc

SEQ ID NO: 23536 - DNA, 15 bp, Homo sapiens
caagaccaaatggtc

SEQ ID NO: 23537 - DNA, 15 bp, Homo sapiens
gcaagaccaaatggt

SEQ ID NO: 23538 - DNA, 15 bp, Homo sapiens
agcaagaccaaatgg

SEQ ID NO: 23539 - DNA, 15 bp, Homo sapiens
aagcaagaccaaatg

SEQ ID NO: 23540 - DNA, 15 bp, Homo sapiens
caagcaagaccaaat

SEQ ID NO: 23541 - DNA, 15 bp, Homo sapiens
acaagcaagaccaaa

SEQ ID NO: 23542 - DNA, 15 bp, Homo sapiens
aacaagcaagaccaa

SEQ ID NO: 23543 - DNA, 15 bp, Homo sapiens
gaacaagcaagacca

SEQ ID NO: 23544 - DNA, 15 bp, Homo sapiens
agaacaagcaagacc

SEQ ID NO: 23545 - DNA, 15 bp, Homo sapiens
aagaacaagcaagac

SEQ ID NO: 23546 - DNA, 15 bp, Homo sapiens
caagaacaagcaaga

SEQ ID NO: 23547 - DNA, 15 bp, Homo sapiens
tcaagaacaagcaag

SEQ ID NO: 23548 - DNA, 15 bp, Homo sapiens
ttcaagaacaagcaa

SEQ ID NO: 23549 - DNA, 15 bp, Homo sapiens
attcaagaacaagca

SEQ ID NO: 23550 - DNA, 15 bp, Homo sapiens
gattcaagaacaagc

SEQ ID NO: 23551 - DNA, 15 bp, Homo sapiens
agattcaagaacaag

SEQ ID NO: 23552 - DNA, 15 bp, Homo sapiens
gagattcaagaacaa

SEQ ID NO: 23553 - DNA, 15 bp, Homo sapiens
ggagattcaagaaca

SEQ ID NO: 23554 - DNA, 15 bp, Homo sapiens
tggagattcaagaac

SEQ ID NO: 23555 - DNA, 15 bp, Homo sapiens
ctggagattcaagaa

SEQ ID NO: 23556 - DNA, 15 bp, Homo sapiens
tctggagattcaaga

SEQ ID NO: 23557 - DNA, 15 bp, Homo sapiens
atctggagattcaag

SEQ ID NO: 23558 - DNA, 15 bp, Homo sapiens
aatctggagattcaa

SEQ ID NO: 23559 - DNA, 15 bp, Homo sapiens
caatctggagattca

SEQ ID NO: 23560 - DNA, 15 bp, Homo sapiens
acaatctggagattc

SEQ ID NO: 23561 - DNA, 15 bp, Homo sapiens
tacaatctggagatt

SEQ ID NO: 23562 - DNA, 15 bp, Homo sapiens
ttacaatctggagat

SEQ ID NO: 23563 - DNA, 15 bp, Homo sapiens
attacaatctggaga

SEQ ID NO: 23564 - DNA, 15 bp, Homo sapiens
tattacaatctggag

SEQ ID NO: 23565 - DNA, 15 bp, Homo sapiens
gtattacaatctgga

SEQ ID NO: 23566 - DNA, 15 bp, Homo sapiens
tgtattacaatctgg

SEQ ID NO: 23567 - DNA, 15 bp, Homo sapiens
actgtattacaatct

SEQ ID NO: 23568 - DNA, 15 bp, Homo sapiens
aactgtattacaatc

SEQ ID NO: 23569 - DNA, 15 bp, Homo sapiens
gaactgtattacaat

SEQ ID NO: 23570 - DNA, 15 bp, Homo sapiens
ggaactgtattacaa

SEQ ID NO: 23571 - DNA, 15 bp, Homo sapiens
aggaactgtattaca

SEQ ID NO: 23572 - DNA, 15 bp, Homo sapiens
caggaactgtattac

SEQ ID NO: 23573 - DNA, 15 bp, Homo sapiens
ccaggaactgtatta

SEQ ID NO: 23574 - DNA, 15 bp, Homo sapiens
gccaggaactgtatt

SEQ ID NO: 23575 - DNA, 15 bp, Homo sapiens
tgccaggaactgtat

SEQ ID NO: 23576 - DNA, 15 bp, Homo sapiens
gtgccaggaactgta

SEQ ID NO: 23577 - DNA, 15 bp, Homo sapiens
tgtgccaggaactgt

SEQ ID NO: 23578 - DNA, 15 bp, Homo sapiens
atgtgccaggaactg

SEQ ID NO: 23579 - DNA, 15 bp, Homo sapiens
tatgtgccaggaact

SEQ ID NO: 23580 - DNA, 15 bp, Homo sapiens
ttatgtgccaggaac

SEQ ID NO: 23581 - DNA, 15 bp, Homo sapiens
attatgtgccaggaa

SEQ ID NO: 23582 - DNA, 15 bp, Homo sapiens
cattatgtgccagga

SEQ ID NO: 23583 - DNA, 15 bp, Homo sapiens
ccattatgtgccagg

SEQ ID NO: 23584 - DNA, 15 bp, Homo sapiens
gccattatgtgccag

SEQ ID NO: 23585 - DNA, 15 bp, Homo sapiens
tgccattatgtgcca

SEQ ID NO: 23586 - DNA, 15 bp, Homo sapiens
ttgccattatgtgcc

SEQ ID NO: 23587 - DNA, 15 bp, Homo sapiens
tttgccattatgtgc

SEQ ID NO: 23588 - DNA, 15 bp, Homo sapiens
atttgccattatgtg

SEQ ID NO: 23589 - DNA, 15 bp, Homo sapiens
aatttgccattatgt

SEQ ID NO: 23590 - DNA, 15 bp, Homo sapiens
taatttgccattatg

SEQ ID NO: 23591 - DNA, 15 bp, Homo sapiens
ataatttgccattat

SEQ ID NO: 23592 - DNA, 15 bp, Homo sapiens
cataatttgccatta

SEQ ID NO: 23593 - DNA, 15 bp, Homo sapiens
acataatttgccatt

SEQ ID NO: 23594 - DNA, 15 bp, Homo sapiens
cacataatttgccat

SEQ ID NO: 23595 - DNA, 15 bp, Homo sapiens
acacataatttgcca

SEQ ID NO: 23596 - DNA, 15 bp, Homo sapiens
aacacataatttgcc

SEQ ID NO: 23597 - DNA, 15 bp, Homo sapiens
caacacataatttgc

SEQ ID NO: 23598 - DNA, 15 bp, Homo sapiens
gcaacacataatttg

SEQ ID NO: 23599 - DNA, 15 bp, Homo sapiens
ggcaacacataattt

SEQ ID NO: 23600 - DNA, 15 bp, Homo sapiens
tggcaacacataatt

SEQ ID NO: 23601 - DNA, 15 bp, Homo sapiens
ttggcaacacataat

SEQ ID NO: 23602 - DNA, 15 bp, Homo sapiens
attggcaacacataa

SEQ ID NO: 23603 - DNA, 15 bp, Homo sapiens
aattggcaacacata

SEQ ID NO: 23604 - DNA, 15 bp, Homo sapiens
taattggcaacacat

SEQ ID NO: 23605 - DNA, 15 bp, Homo sapiens
ttaattggcaacaca

SEQ ID NO: 23606 - DNA, 15 bp, Homo sapiens
attaattggcaacac

SEQ ID NO: 23607 - DNA, 15 bp, Homo sapiens
tattaattggcaaca

SEQ ID NO: 23608 - DNA, 15 bp, Homo sapiens
gtattaattggcaac

SEQ ID NO: 23609 - DNA, 15 bp, Homo sapiens
agtattaattggcaa

SEQ ID NO: 23610 - DNA, 15 bp, Homo sapiens
aagtattaattggca

SEQ ID NO: 23611 - DNA, 15 bp, Homo sapiens
taagtattaattggc

SEQ ID NO: 23612 - DNA, 15 bp, Homo sapiens
gtaagtattaattgg

SEQ ID NO: 23613 - DNA, 15 bp, Homo sapiens
tgtaagtattaattg

SEQ ID NO: 23614 - DNA, 15 bp, Homo sapiens
ttgtaagtattaatt

SEQ ID NO: 23615 - DNA, 15 bp, Homo sapiens
tttgtaagtattaat

SEQ ID NO: 23616 - DNA, 15 bp, Homo sapiens
ttttgtaagtattaa

SEQ ID NO: 23617 - DNA, 15 bp, Homo sapiens
attttgtaagtatta

SEQ ID NO: 23618 - DNA, 15 bp, Homo sapiens
tattttgtaagtatt

SEQ ID NO: 23619 - DNA, 15 bp, Homo sapiens
ttattttgtaagtat

SEQ ID NO: 23620 - DNA, 15 bp, Homo sapiens
tttattttgtaagta

SEQ ID NO: 23621 - DNA, 15 bp, Homo sapiens
ttttattttgtaagt

SEQ ID NO: 23622 - DNA, 15 bp, Homo sapiens
attttattttgtaag

SEQ ID NO: 23623 - DNA, 15 bp, Homo sapiens
aattttattttgtaa

SEQ ID NO: 23624 - DNA, 15 bp, Homo sapiens
taattttattttgta

SEQ ID NO: 23625 - DNA, 15 bp, Homo sapiens
ataattttattttgt

SEQ ID NO: 23626 - DNA, 15 bp, Homo sapiens
cataattttattttg

SEQ ID NO: 23627 - DNA, 15 bp, Homo sapiens
tcataattttatttt

SEQ ID NO: 23628 - DNA, 15 bp, Homo sapiens
ttcataattttattt

SEQ ID NO: 23629 - DNA, 15 bp, Homo sapiens
attcataattttatt

SEQ ID NO: 23630 - DNA, 15 bp, Homo sapiens
cattcataattttat

SEQ ID NO: 23631 - DNA, 15 bp, Homo sapiens
gcattcataatttta

SEQ ID NO: 23632 - DNA, 15 bp, Homo sapiens
agcattcataatttt

SEQ ID NO: 23633 - DNA, 15 bp, Homo sapiens
tagcattcataattt

SEQ ID NO: 23634 - DNA, 15 bp, Homo sapiens
ctagcattcataatt

SEQ ID NO: 23635 - DNA, 15 bp, Homo sapiens
tctagcattcataat

SEQ ID NO: 23636 - DNA, 15 bp, Homo sapiens
ctctagcattcataa

SEQ ID NO: 23637 - DNA, 15 bp, Homo sapiens
actctagcattcata

SEQ ID NO: 23638 - DNA, 15 bp, Homo sapiens
gactctagcattcat

SEQ ID NO: 23639 - DNA, 15 bp, Homo sapiens
agactctagcattca

SEQ ID NO: 23640 - DNA, 15 bp, Homo sapiens
gagactctagcattc

SEQ ID NO: 23641 - DNA, 15 bp, Homo sapiens
agagactctagcatt

SEQ ID NO: 23642 - DNA, 15 bp, Homo sapiens
tagagactctagcat

SEQ ID NO: 23643 - DNA, 15 bp, Homo sapiens
atagagactctagca

SEQ ID NO: 23644 - DNA, 15 bp, Homo sapiens
tatagagactctagc

SEQ ID NO: 23645 - DNA, 15 bp, Homo sapiens
ctatagagactctag

SEQ ID NO: 23646 - DNA, 15 bp, Homo sapiens
tctatagagactcta

SEQ ID NO: 23647 - DNA, 15 bp, Homo sapiens
ttctatagagactct

SEQ ID NO: 23648 - DNA, 15 bp, Homo sapiens
tttctatagagactc

SEQ ID NO: 23649 - DNA, 15 bp, Homo sapiens
ctttctatagagact

SEQ ID NO: 23650 - DNA, 15 bp, Homo sapiens
actttctatagagac

SEQ ID NO: 23651 - DNA, 15 bp, Homo sapiens
tactttctatagaga

SEQ ID NO: 23652 - DNA, 15 bp, Homo sapiens
atactttctatagag

SEQ ID NO: 23653 - DNA, 15 bp, Homo sapiens
tatactttctataga

SEQ ID NO: 23654 - DNA, 15 bp, Homo sapiens
gtatactttctatag

SEQ ID NO: 23655 - DNA, 15 bp, Homo sapiens
ggtatactttctata

SEQ ID NO: 23656 - DNA, 15 bp, Homo sapiens
aggtatactttctat

SEQ ID NO: 23657 - DNA, 15 bp, Homo sapiens
aaggtatactttcta

SEQ ID NO: 23658 - DNA, 15 bp, Homo sapiens
aaaggtatactttct

SEQ ID NO: 23659 - DNA, 15 bp, Homo sapiens
aaaaggtatactttc

SEQ ID NO: 23660 - DNA, 15 bp, Homo sapiens
caaaaggtatacttt

SEQ ID NO: 23661 - DNA, 15 bp, Homo sapiens
ccaaaaggtatactt

SEQ ID NO: 23662 - DNA, 15 bp, Homo sapiens
cccaaaaggtatact

SEQ ID NO: 23663 - DNA, 15 bp, Homo sapiens
gcccaaaaggtatac

SEQ ID NO: 23664 - DNA, 15 bp, Homo sapiens
tgcccaaaaggtata

SEQ ID NO: 23665 - DNA, 15 bp, Homo sapiens
ttgcccaaaaggtat

SEQ ID NO: 23666 - DNA, 15 bp, Homo sapiens
tttgcccaaaaggta

SEQ ID NO: 23667 - DNA, 15 bp, Homo sapiens
ttttgcccaaaaggt

SEQ ID NO: 23668 - DNA, 15 bp, Homo sapiens
attttgcccaaaagg

SEQ ID NO: 23669 - DNA, 15 bp, Homo sapiens
cattttgcccaaaag

SEQ ID NO: 23670 - DNA, 15 bp, Homo sapiens
ccattttgcccaaaa

SEQ ID NO: 23671 - DNA, 15 bp, Homo sapiens
cccattttgcccaaa

SEQ ID NO: 23672 - DNA, 15 bp, Homo sapiens
tcccattttgcccaa

SEQ ID NO: 23673 - DNA, 15 bp, Homo sapiens
ttcccattttgccca

SEQ ID NO: 23674 - DNA, 15 bp, Homo sapiens
tttcccattttgccc

SEQ ID NO: 23675 - DNA, 15 bp, Homo sapiens
atttcccattttgcc

SEQ ID NO: 23676 - DNA, 15 bp, Homo sapiens
catttcccattttgc

SEQ ID NO: 23677 - DNA, 15 bp, Homo sapiens
tcatttcccattttg

SEQ ID NO: 23678 - DNA, 15 bp, Homo sapiens
atcatttcccatttt

SEQ ID NO: 23679 - DNA, 15 bp, Homo sapiens
gatcatttcccattt

SEQ ID NO: 23680 - DNA, 15 bp, Homo sapiens
tgatcatttcccatt

SEQ ID NO: 23681 - DNA, 15 bp, Homo sapiens
ctgatcatttcccat

SEQ ID NO: 23682 - DNA, 15 bp, Homo sapiens
gctgatcatttccca

SEQ ID NO: 23683 - DNA, 15 bp, Homo sapiens
ggctgatcatttccc

SEQ ID NO: 23684 - DNA, 15 bp, Homo sapiens
tggctgatcatttcc

SEQ ID NO: 23685 - DNA, 15 bp, Homo sapiens
ttggctgatcatttc

SEQ ID NO: 23686 - DNA, 15 bp, Homo sapiens
cttggctgatcattt

SEQ ID NO: 23687 - DNA, 15 bp, Homo sapiens
gcttggctgatcatt

SEQ ID NO: 23688 - DNA, 15 bp, Homo sapiens
agcttggctgatcat

SEQ ID NO: 23689 - DNA, 15 bp, Homo sapiens
gagcttggctgatca

SEQ ID NO: 23690 - DNA, 15 bp, Homo sapiens
tgagcttggctgatc

SEQ ID NO: 23691 - DNA, 15 bp, Homo sapiens
atgagcttggctgat

SEQ ID NO: 23692 - DNA, 15 bp, Homo sapiens
catgagcttggctga

SEQ ID NO: 23693 - DNA, 15 bp, Homo sapiens
tcatgagcttggctg

SEQ ID NO: 23694 - DNA, 15 bp, Homo sapiens
atcatgagcttggct

SEQ ID NO: 23695 - DNA, 15 bp, Homo sapiens
gatcatgagcttggc

SEQ ID NO: 23696 - DNA, 15 bp, Homo sapiens
ggatcatgagcttgg

SEQ ID NO: 23697 - DNA, 15 bp, Homo sapiens
tggatcatgagcttg

SEQ ID NO: 23698 - DNA, 15 bp, Homo sapiens
gtggatcatgagctt

SEQ ID NO: 23699 - DNA, 15 bp, Homo sapiens
tgtggatcatgagct

SEQ ID NO: 23700 - DNA, 15 bp, Homo sapiens
atgtggatcatgagc

SEQ ID NO: 23701 - DNA, 15 bp, Homo sapiens
tatgtggatcatgag

SEQ ID NO: 23702 - DNA, 15 bp, Homo sapiens
ttatgtggatcatga

SEQ ID NO: 23703 - DNA, 15 bp, Homo sapiens
cttatgtggatcatg

SEQ ID NO: 23704 - DNA, 15 bp, Homo sapiens
acttatgtggatcat

SEQ ID NO: 23705 - DNA, 15 bp, Homo sapiens
tacttatgtggatca

SEQ ID NO: 23706 - DNA, 15 bp, Homo sapiens
atacttatgtggatc

SEQ ID NO: 23707 - DNA, 15 bp, Homo sapiens
gatacttatgtggat

SEQ ID NO: 23708 - DNA, 15 bp, Homo sapiens
tgatacttatgtgga

SEQ ID NO: 23709 - DNA, 15 bp, Homo sapiens
ctgatacttatgtgg

SEQ ID NO: 23710 - DNA, 15 bp, Homo sapiens
tctgatacttatgtg

SEQ ID NO: 23711 - DNA, 15 bp, Homo sapiens
ttctgatacttatgt

SEQ ID NO: 23712 - DNA, 15 bp, Homo sapiens
gttctgatacttatg

SEQ ID NO: 23713 - DNA, 15 bp, Homo sapiens
tgttctgatacttat

SEQ ID NO: 23714 - DNA, 15 bp, Homo sapiens
atgttctgatactta

SEQ ID NO: 23715 - DNA, 15 bp, Homo sapiens
gatgttctgatactt

SEQ ID NO: 23716 - DNA, 15 bp, Homo sapiens
agatgttctgatact

SEQ ID NO: 23717 - DNA, 15 bp, Homo sapiens
tagatgttctgatac

SEQ ID NO: 23718 - DNA, 15 bp, Homo sapiens
gtagatgttctgata

SEQ ID NO: 23719 - DNA, 15 bp, Homo sapiens
ggtagatgttctgat

SEQ ID NO: 23720 - DNA, 15 bp, Homo sapiens
tggtagatgttctga

SEQ ID NO: 23721 - DNA, 15 bp, Homo sapiens
ttggtagatgttctg

SEQ ID NO: 23722 - DNA, 15 bp, Homo sapiens
cttggtagatgttct

SEQ ID NO: 23723 - DNA, 15 bp, Homo sapiens
tcttggtagatgttc

SEQ ID NO: 23724 - DNA, 15 bp, Homo sapiens
atcttggtagatgtt

SEQ ID NO: 23725 - DNA, 15 bp, Homo sapiens
tatcttggtagatgt

SEQ ID NO: 23726 - DNA, 15 bp, Homo sapiens
ttatcttggtagatg

SEQ ID NO: 23727 - DNA, 15 bp, Homo sapiens
tttatcttggtagat

SEQ ID NO: 23728 - DNA, 15 bp, Homo sapiens
gtttatcttggtaga

SEQ ID NO: 23729 - DNA, 15 bp, Homo sapiens
tgtttatcttggtag

SEQ ID NO: 23730 - DNA, 15 bp, Homo sapiens
ttgtttatcttggta

SEQ ID NO: 23731 - DNA, 15 bp, Homo sapiens
cttgtttatcttggt

SEQ ID NO: 23732 - DNA, 15 bp, Homo sapiens
acttgtttatcttgg

SEQ ID NO: 23733 - DNA, 15 bp, Homo sapiens
tacttgtttatcttg

SEQ ID NO: 23734 - DNA, 15 bp, Homo sapiens
gtacttgtttatctt

SEQ ID NO: 23735 - DNA, 15 bp, Homo sapiens
ggtacttgtttatct

SEQ ID NO: 23736 - DNA, 15 bp, Homo sapiens
gggtacttgtttatc

SEQ ID NO: 23737 - DNA, 15 bp, Homo sapiens
tgggtacttgtttat

SEQ ID NO: 23738 - DNA, 15 bp, Homo sapiens
ctgggtacttgttta

SEQ ID NO: 23739 - DNA, 15 bp, Homo sapiens
actgggtacttgttt

SEQ ID NO: 23740 - DNA, 15 bp, Homo sapiens
cactgggtacttgtt

SEQ ID NO: 23741 - DNA, 15 bp, Homo sapiens
acactgggtacttgt

SEQ ID NO: 23742 - DNA, 15 bp, Homo sapiens
gacactgggtacttg

SEQ ID NO: 23743 - DNA, 15 bp, Homo sapiens
ggacactgggtactt

SEQ ID NO: 23744 - DNA, 15 bp, Homo sapiens
tggacactgggtact

SEQ ID NO: 23745 - DNA, 15 bp, Homo sapiens
ttggacactgggtac

SEQ ID NO: 23746 - DNA, 15 bp, Homo sapiens
cttggacactgggta

SEQ ID NO: 23747 - DNA, 15 bp, Homo sapiens
tcttggacactgggt

SEQ ID NO: 23748 - DNA, 15 bp, Homo sapiens
gtcttggacactggg

SEQ ID NO: 23749 - DNA, 15 bp, Homo sapiens
agtcttggacactgg

SEQ ID NO: 23750 - DNA, 15 bp, Homo sapiens
cagtcttggacactg

SEQ ID NO: 23751 - DNA, 15 bp, Homo sapiens
ccagtcttggacact

SEQ ID NO: 23752 - DNA, 15 bp, Homo sapiens
cccagtcttggacac

SEQ ID NO: 23753 - DNA, 15 bp, Homo sapiens
tcccagtcttggaca

SEQ ID NO: 23754 - DNA, 15 bp, Homo sapiens
atcccagtcttggac

SEQ ID NO: 23755 - DNA, 15 bp, Homo sapiens
catcccagtcttgga

SEQ ID NO: 23756 - DNA, 15 bp, Homo sapiens
tcatcccagtcttgg

SEQ ID NO: 23757 - DNA, 15 bp, Homo sapiens
ttcatcccagtcttg

SEQ ID NO: 23758 - DNA, 15 bp, Homo sapiens
tttcatcccagtctt

SEQ ID NO: 23759 - DNA, 15 bp, Homo sapiens
atttcatcccagtct

SEQ ID NO: 23760 - DNA, 15 bp, Homo sapiens
aatttcatcccagtc

SEQ ID NO: 23761 - DNA, 15 bp, Homo sapiens
gaatttcatcccagt

SEQ ID NO: 23762 - DNA, 15 bp, Homo sapiens
ggaatttcatcccag

SEQ ID NO: 23763 - DNA, 15 bp, Homo sapiens
tggaatttcatccca

SEQ ID NO: 23764 - DNA, 15 bp, Homo sapiens
ctggaatttcatccc

SEQ ID NO: 23765 - DNA, 15 bp, Homo sapiens
tctggaatttcatcc

SEQ ID NO: 23766 - DNA, 15 bp, Homo sapiens
ctctggaatttcatc

SEQ ID NO: 23767 - DNA, 15 bp, Homo sapiens
cctctggaatttcat

SEQ ID NO: 23768 - DNA, 15 bp, Homo sapiens
tcctctggaatttca

SEQ ID NO: 23769 - DNA, 15 bp, Homo sapiens
atcctctggaatttc

SEQ ID NO: 23770 - DNA, 15 bp, Homo sapiens
aatcctctggaattt

SEQ ID NO: 23771 - DNA, 15 bp, Homo sapiens
caatcctctggaatt

SEQ ID NO: 23772 - DNA, 15 bp, Homo sapiens
tcaatcctctggaat

SEQ ID NO: 23773 - DNA, 15 bp, Homo sapiens
ttcaatcctctggaa

SEQ ID NO: 23774 - DNA, 15 bp, Homo sapiens
tttcaatcctctgga

SEQ ID NO: 23775 - DNA, 15 bp, Homo sapiens
gtttcaatcctctgg

SEQ ID NO: 23776 - DNA, 15 bp, Homo sapiens
tgtttcaatcctctg

SEQ ID NO: 23777 - DNA, 15 bp, Homo sapiens
ttgtttcaatcctct

SEQ ID NO: 23778 - DNA, 15 bp, Homo sapiens
tttgtttcaatcctc

SEQ ID NO: 23779 - DNA, 15 bp, Homo sapiens
ttttgtttcaatcct

SEQ ID NO: 23780 - DNA, 15 bp, Homo sapiens
gttttgtttcaatcc

SEQ ID NO: 23781 - DNA, 15 bp, Homo sapiens
tgttttgtttcaatc

SEQ ID NO: 23782 - DNA, 15 bp, Homo sapiens
ttgttttgtttcaat

SEQ ID NO: 23783 - DNA, 15 bp, Homo sapiens
cttgttttgtttcaa

SEQ ID NO: 23784 - DNA, 15 bp, Homo sapiens
gcttgttttgtttca

SEQ ID NO: 23785 - DNA, 15 bp, Homo sapiens
ggcttgttttgtttc

SEQ ID NO: 23786 - DNA, 15 bp, Homo sapiens
tggcttgttttgttt

SEQ ID NO: 23787 - DNA, 15 bp, Homo sapiens
ctggcttgttttgtt

SEQ ID NO: 23788 - DNA, 15 bp, Homo sapiens
gctggcttgttttgt

SEQ ID NO: 23789 - DNA, 15 bp, Homo sapiens
tgctggcttgttttg

SEQ ID NO: 23790 - DNA, 15 bp, Homo sapiens
atgctggcttgtttt

SEQ ID NO: 23791 - DNA, 15 bp, Homo sapiens
catgctggcttgttt

SEQ ID NO: 23792 - DNA, 15 bp, Homo sapiens
tcatgctggcttgtt

SEQ ID NO: 23793 - DNA, 15 bp, Homo sapiens
ttcatgctggcttgt

SEQ ID NO: 23794 - DNA, 15 bp, Homo sapiens
attcatgctggcttg

SEQ ID NO: 23795 - DNA, 15 bp, Homo sapiens
aattcatgctggctt

SEQ ID NO: 23796 - DNA, 15 bp, Homo sapiens
gaattcatgctggct

SEQ ID NO: 23797 - DNA, 15 bp, Homo sapiens
tgaattcatgctggc

SEQ ID NO: 23798 - DNA, 15 bp, Homo sapiens
atgaattcatgctgg

SEQ ID NO: 23799 - DNA, 15 bp, Homo sapiens
catgaattcatgctg

SEQ ID NO: 23800 - DNA, 15 bp, Homo sapiens
acatgaattcatgct

SEQ ID NO: 23801 - DNA, 15 bp, Homo sapiens
tacatgaattcatgc

SEQ ID NO: 23802 - DNA, 15 bp, Homo sapiens
atacatgaattcatg

SEQ ID NO: 23803 - DNA, 15 bp, Homo sapiens
gatacatgaattcat

SEQ ID NO: 23804 - DNA, 15 bp, Homo sapiens
tgatacatgaattca

SEQ ID NO: 23805 - DNA, 15 bp, Homo sapiens
ctgatacatgaattc

SEQ ID NO: 23806 - DNA, 15 bp, Homo sapiens
tctgatacatgaatt

SEQ ID NO: 23807 - DNA, 15 bp, Homo sapiens
atctgatacatgaat

SEQ ID NO: 23808 - DNA, 15 bp, Homo sapiens
tatctgatacatgaa

SEQ ID NO: 23809 - DNA, 15 bp, Homo sapiens
atatctgatacatga

SEQ ID NO: 23810 - DNA, 15 bp, Homo sapiens
catatctgatacatg

SEQ ID NO: 23811 - DNA, 15 bp, Homo sapiens
tcatatctgatacat

SEQ ID NO: 23812 - DNA, 15 bp, Homo sapiens
ctcatatctgataca

SEQ ID NO: 23813 - DNA, 15 bp, Homo sapiens
gctcatatctgatac

SEQ ID NO: 23814 - DNA, 15 bp, Homo sapiens
agctcatatctgata

SEQ ID NO: 23815 - DNA, 15 bp, Homo sapiens
cagctcatatctgat

SEQ ID NO: 23816 - DNA, 15 bp, Homo sapiens
ccagctcatatctga

SEQ ID NO: 23817 - DNA, 15 bp, Homo sapiens
cccagctcatatctg

SEQ ID NO: 23818 - DNA, 15 bp, Homo sapiens
gcccagctcatatct

SEQ ID NO: 23819 - DNA, 15 bp, Homo sapiens
agcccagctcatatc

SEQ ID NO: 23820 - DNA, 15 bp, Homo sapiens
tagcccagctcatat

SEQ ID NO: 23821 - DNA, 15 bp, Homo sapiens
ttagcccagctcata

SEQ ID NO: 23822 - DNA, 15 bp, Homo sapiens
cttagcccagctcat

SEQ ID NO: 23823 - DNA, 15 bp, Homo sapiens
acttagcccagctca

SEQ ID NO: 23824 - DNA, 15 bp, Homo sapiens
cacttagcccagctc

SEQ ID NO: 23825 - DNA, 15 bp, Homo sapiens
tcacttagcccagct

SEQ ID NO: 23826 - DNA, 15 bp, Homo sapiens
gtcacttagcccagc

SEQ ID NO: 23827 - DNA, 15 bp, Homo sapiens
ggtcacttagcccag

SEQ ID NO: 23828 - DNA, 15 bp, Homo sapiens
aggtcacttagccca

SEQ ID NO: 23829 - DNA, 15 bp, Homo sapiens
gaggtcacttagccc

SEQ ID NO: 23830 - DNA, 15 bp, Homo sapiens
agaggtcacttagcc

SEQ ID NO: 23831 - DNA, 15 bp, Homo sapiens
cagaggtcacttagc

SEQ ID NO: 23832 - DNA, 15 bp, Homo sapiens
tcagaggtcacttag

SEQ ID NO: 23833 - DNA, 15 bp, Homo sapiens
ctcagaggtcactta

SEQ ID NO: 23834 - DNA, 15 bp, Homo sapiens
tctcagaggtcactt

SEQ ID NO: 23835 - DNA, 15 bp, Homo sapiens
ttctcagaggtcact

SEQ ID NO: 23836 - DNA, 15 bp, Homo sapiens
agtaaagctactctt

SEQ ID NO: 23837 - DNA, 15 bp, Homo sapiens
cagtaaagctactct

SEQ ID NO: 23838 - DNA, 15 bp, Homo sapiens
ccagtaaagctactc

SEQ ID NO: 23839 - DNA, 15 bp, Homo sapiens
gccagtaaagctact

SEQ ID NO: 23840 - DNA, 15 bp, Homo sapiens
ggccagtaaagctac

SEQ ID NO: 23841 - DNA, 15 bp, Homo sapiens
aggccagtaaagcta

SEQ ID NO: 23842 - DNA, 15 bp, Homo sapiens
aaggccagtaaagct

SEQ ID NO: 23843 - DNA, 15 bp, Homo sapiens
aaaggccagtaaagc

SEQ ID NO: 23844 - DNA, 15 bp, Homo sapiens
caaaggccagtaaag

SEQ ID NO: 23845 - DNA, 15 bp, Homo sapiens
tcaaaggccagtaaa

SEQ ID NO: 23846 - DNA, 15 bp, Homo sapiens
ctcaaaggccagtaa

SEQ ID NO: 23847 - DNA, 15 bp, Homo sapiens
tctcaaaggccagta

SEQ ID NO: 23848 - DNA, 15 bp, Homo sapiens
ctctcaaaggccagt

SEQ ID NO: 23849 - DNA, 15 bp, Homo sapiens
tctctcaaaggccag

SEQ ID NO: 23850 - DNA, 15 bp, Homo sapiens
ttctctcaaaggcca

SEQ ID NO: 23851 - DNA, 15 bp, Homo sapiens
cttctctcaaaggcc

SEQ ID NO: 23852 - DNA, 15 bp, Homo sapiens
acttctctcaaaggc

SEQ ID NO: 23853 - DNA, 15 bp, Homo sapiens
tacttctctcaaagg

SEQ ID NO: 23854 - DNA, 15 bp, Homo sapiens
atacttctctcaaag

SEQ ID NO: 23855 - DNA, 15 bp, Homo sapiens
tatacttctctcaaa

SEQ ID NO: 23856 - DNA, 15 bp, Homo sapiens
atatacttctctcaa

SEQ ID NO: 23857 - DNA, 15 bp, Homo sapiens
aatatacttctctca

SEQ ID NO: 23858 - DNA, 15 bp, Homo sapiens
aaatatacttctctc

SEQ ID NO: 23859 - DNA, 15 bp, Homo sapiens
taaatatacttctct

SEQ ID NO: 23860 - DNA, 15 bp, Homo sapiens
ttaaatatacttctc

SEQ ID NO: 23861 - DNA, 15 bp, Homo sapiens
attaaatatacttct

SEQ ID NO: 23862 - DNA, 15 bp, Homo sapiens
tattaaatatacttc

SEQ ID NO: 23863 - DNA, 15 bp, Homo sapiens
ttattaaatatactt

SEQ ID NO: 23864 - DNA, 15 bp, Homo sapiens
tttattaaatatact

SEQ ID NO: 23865 - DNA, 15 bp, Homo sapiens
ttttattaaatatac

SEQ ID NO: 23866 - DNA, 15 bp, Homo sapiens
tttttattaaatata

SEQ ID NO: 23867 - DNA, 15 bp, Homo sapiens
ttttttattaaatat

SEQ ID NO: 23868 - DNA, 15 bp, Homo sapiens
attttttattaaata

SEQ ID NO: 23869 - DNA, 15 bp, Homo sapiens
tattttttattaaat

SEQ ID NO: 23870 - DNA, 15 bp, Homo sapiens
atattttttattaaa

SEQ ID NO: 23871 - DNA, 15 bp, Homo sapiens
catattttttattaa

SEQ ID NO: 23872 - DNA, 15 bp, Homo sapiens
gcatattttttatta

SEQ ID NO: 23873 - DNA, 15 bp, Homo sapiens
agcatattttttatt

SEQ ID NO: 23874 - DNA, 15 bp, Homo sapiens
gagcatattttttat

SEQ ID NO: 23875 - DNA, 15 bp, Homo sapiens
tgagcatatttttta

SEQ ID NO: 23876 - DNA, 15 bp, Homo sapiens
ctgagcatatttttt

SEQ ID NO: 23877 - DNA, 15 bp, Homo sapiens
actgagcatattttt

SEQ ID NO: 23878 - DNA, 15 bp, Homo sapiens
aactgagcatatttt

SEQ ID NO: 23879 - DNA, 15 bp, Homo sapiens
taactgagcatattt

SEQ ID NO: 23880 - DNA, 15 bp, Homo sapiens
ctaactgagcatatt

SEQ ID NO: 23881 - DNA, 15 bp, Homo sapiens
tctaactgagcatat

SEQ ID NO: 23882 - DNA, 15 bp, Homo sapiens
gtctaactgagcata

SEQ ID NO: 23883 - DNA, 15 bp, Homo sapiens
tgtctaactgagcat

SEQ ID NO: 23884 - DNA, 15 bp, Homo sapiens
atgtctaactgagca

SEQ ID NO: 23885 - DNA, 15 bp, Homo sapiens
gatgtctaactgagc

SEQ ID NO: 23886 - DNA, 15 bp, Homo sapiens
tgatgtctaactgag

SEQ ID NO: 23887 - DNA, 15 bp, Homo sapiens
atgatgtctaactga

SEQ ID NO: 23888 - DNA, 15 bp, Homo sapiens
aatgatgtctaactg

SEQ ID NO: 23889 - DNA, 15 bp, Homo sapiens
aaatgatgtctaact

SEQ ID NO: 23890 - DNA, 15 bp, Homo sapiens
aaaatgatgtctaac

SEQ ID NO: 23891 - DNA, 15 bp, Homo sapiens
taaaatgatgtctaa

SEQ ID NO: 23892 - DNA, 15 bp, Homo sapiens
ttaaaatgatgtcta

SEQ ID NO: 23893 - DNA, 15 bp, Homo sapiens
gttaaaatgatgtct

SEQ ID NO: 23894 - DNA, 15 bp, Homo sapiens
agttaaaatgatgtc

SEQ ID NO: 23895 - DNA, 15 bp, Homo sapiens
cagttaaaatgatgt

SEQ ID NO: 23896 - DNA, 15 bp, Homo sapiens
tcagttaaaatgatg

SEQ ID NO: 23897 - DNA, 15 bp, Homo sapiens
gtcagttaaaatgat

SEQ ID NO: 23898 - DNA, 15 bp, Homo sapiens
tgtcagttaaaatga

SEQ ID NO: 23899 - DNA, 15 bp, Homo sapiens
ctgtcagttaaaatg

SEQ ID NO: 23900 - DNA, 15 bp, Homo sapiens
tctgtcagttaaaat

SEQ ID NO: 23901 - DNA, 15 bp, Homo sapiens
atctgtcagttaaaa

SEQ ID NO: 23902 - DNA, 15 bp, Homo sapiens
aatctgtcagttaaa

SEQ ID NO: 23903 - DNA, 15 bp, Homo sapiens
caatctgtcagttaa

SEQ ID NO: 23904 - DNA, 15 bp, Homo sapiens
acaatctgtcagtta

SEQ ID NO: 23905 - DNA, 15 bp, Homo sapiens
tacaatctgtcagtt

SEQ ID NO: 23906 - DNA, 15 bp, Homo sapiens
ttacaatctgtcagt

SEQ ID NO: 23907 - DNA, 15 bp, Homo sapiens
cttacaatctgtcag

SEQ ID NO: 23908 - DNA, 15 bp, Homo sapiens
gcttacaatctgtca

SEQ ID NO: 23909 - DNA, 15 bp, Homo sapiens
tgcttacaatctgtc

SEQ ID NO: 23910 - DNA, 15 bp, Homo sapiens
ttgcttacaatctgt

SEQ ID NO: 23911 - DNA, 15 bp, Homo sapiens
attgcttacaatctg

SEQ ID NO: 23912 - DNA, 15 bp, Homo sapiens
tattgcttacaatct

SEQ ID NO: 23913 - DNA, 15 bp, Homo sapiens
atattgcttacaatc

SEQ ID NO: 23914 - DNA, 15 bp, Homo sapiens
catattgcttacaat

SEQ ID NO: 23915 - DNA, 15 bp, Homo sapiens
tcatattgcttacaa

SEQ ID NO: 23916 - DNA, 15 bp, Homo sapiens
atcatattgcttaca

SEQ ID NO: 23917 - DNA, 15 bp, Homo sapiens
gatcatattgcttac

SEQ ID NO: 23918 - DNA, 15 bp, Homo sapiens
cgatcatattgctta

SEQ ID NO: 23919 - DNA, 15 bp, Homo sapiens
tcgatcatattgctt

SEQ ID NO: 23920 - DNA, 15 bp, Homo sapiens
ctcgatcatattgct

SEQ ID NO: 23921 - DNA, 15 bp, Homo sapiens
actcgatcatattgc

SEQ ID NO: 23922 - DNA, 15 bp, Homo sapiens
cactcgatcatattg

SEQ ID NO: 23923 - DNA, 15 bp, Homo sapiens
tcactcgatcatatt

SEQ ID NO: 23924 - DNA, 15 bp, Homo sapiens
ttcactcgatcatat

SEQ ID NO: 23925 - DNA, 15 bp, Homo sapiens
attcactcgatcata

SEQ ID NO: 23926 - DNA, 15 bp, Homo sapiens
cattcactcgatcat

SEQ ID NO: 23927 - DNA, 15 bp, Homo sapiens
acattcactcgatca

SEQ ID NO: 23928 - DNA, 15 bp, Homo sapiens
aacattcactcgatc

SEQ ID NO: 23929 - DNA, 15 bp, Homo sapiens
taacattcactcgat

SEQ ID NO: 23930 - DNA, 15 bp, Homo sapiens
gtaacattcactcga

SEQ ID NO: 23931 - DNA, 15 bp, Homo sapiens
agtaacattcactcg

SEQ ID NO: 23932 - DNA, 15 bp, Homo sapiens
aagtaacattcactc

SEQ ID NO: 23933 - DNA, 15 bp, Homo sapiens
caagtaacattcact

SEQ ID NO: 23934 - DNA, 15 bp, Homo sapiens
tcaagtaacattcac

SEQ ID NO: 23935 - DNA, 15 bp, Homo sapiens
ctcaagtaacattca

SEQ ID NO: 23936 - DNA, 15 bp, Homo sapiens
gctcaagtaacattc

SEQ ID NO: 23937 - DNA, 15 bp, Homo sapiens
tgctcaagtaacatt

SEQ ID NO: 23938 - DNA, 15 bp, Homo sapiens
ttgctcaagtaacat

SEQ ID NO: 23939 - DNA, 15 bp, Homo sapiens
cttgctcaagtaaca

SEQ ID NO: 23940 - DNA, 15 bp, Homo sapiens
acttgctcaagtaac

SEQ ID NO: 23941 - DNA, 15 bp, Homo sapiens
aacttgctcaagtaa

SEQ ID NO: 23942 - DNA, 15 bp, Homo sapiens
aaacttgctcaagta

SEQ ID NO: 23943 - DNA, 15 bp, Homo sapiens
caaacttgctcaagt

SEQ ID NO: 23944 - DNA, 15 bp, Homo sapiens
tcaaacttgctcaag

SEQ ID NO: 23945 - DNA, 15 bp, Homo sapiens
ctcaaacttgctcaa

SEQ ID NO: 23946 - DNA, 15 bp, Homo sapiens
gctcaaacttgctca

SEQ ID NO: 23947 - DNA, 15 bp, Homo sapiens
ggctcaaacttgctc

SEQ ID NO: 23948 - DNA, 15 bp, Homo sapiens
aggctcaaacttgct

SEQ ID NO: 23949 - DNA, 15 bp, Homo sapiens
caggctcaaacttgc

SEQ ID NO: 23950 - DNA, 15 bp, Homo sapiens
ccaggctcaaacttg

SEQ ID NO: 23951 - DNA, 15 bp, Homo sapiens
accaggctcaaactt

SEQ ID NO: 23952 - DNA, 15 bp, Homo sapiens
gaccaggctcaaact

SEQ ID NO: 23953 - DNA, 15 bp, Homo sapiens
ggaccaggctcaaac

SEQ ID NO: 23954 - DNA, 15 bp, Homo sapiens
gggaccaggctcaaa

SEQ ID NO: 23955 - DNA, 15 bp, Homo sapiens
tgggaccaggctcaa

SEQ ID NO: 23956 - DNA, 15 bp, Homo sapiens
ttgggaccaggctca

SEQ ID NO: 23957 - DNA, 15 bp, Homo sapiens
tttgggaccaggctc

SEQ ID NO: 23958 - DNA, 15 bp, Homo sapiens
ttttgggaccaggct

SEQ ID NO: 23959 - DNA, 15 bp, Homo sapiens
attttgggaccaggc

SEQ ID NO: 23960 - DNA, 15 bp, Homo sapiens
aattttgggaccagg

SEQ ID NO: 23961 - DNA, 15 bp, Homo sapiens
taattttgggaccag

SEQ ID NO: 23962 - DNA, 15 bp, Homo sapiens
gtaattttgggacca

SEQ ID NO: 23963 - DNA, 15 bp, Homo sapiens
tgtaattttgggacc

SEQ ID NO: 23964 - DNA, 15 bp, Homo sapiens
ctgtaattttgggac

SEQ ID NO: 23965 - DNA, 15 bp, Homo sapiens
tctgtaattttggga

SEQ ID NO: 23966 - DNA, 15 bp, Homo sapiens
ttctgtaattttggg

SEQ ID NO: 23967 - DNA, 15 bp, Homo sapiens
attctgtaattttgg

SEQ ID NO: 23968 - DNA, 15 bp, Homo sapiens
aattctgtaattttg

SEQ ID NO: 23969 - DNA, 15 bp, Homo sapiens
taattctgtaatttt

SEQ ID NO: 23970 - DNA, 15 bp, Homo sapiens
gtaattctgtaattt

SEQ ID NO: 23971 - DNA, 15 bp, Homo sapiens
tgtaattctgtaatt

SEQ ID NO: 23972 - DNA, 15 bp, Homo sapiens
ttgtaattctgtaat

SEQ ID NO: 23973 - DNA, 15 bp, Homo sapiens
tttgtaattctgtaa

SEQ ID NO: 23974 - DNA, 15 bp, Homo sapiens
ttttgtaattctgta

SEQ ID NO: 23975 - DNA, 15 bp, Homo sapiens
attttgtaattctgt

SEQ ID NO: 23976 - DNA, 15 bp, Homo sapiens
tattttgtaattctg

SEQ ID NO: 23977 - DNA, 15 bp, Homo sapiens
ttattttgtaattct

SEQ ID NO: 23978 - DNA, 15 bp, Homo sapiens
tttattttgtaattc

SEQ ID NO: 23979 - DNA, 15 bp, Homo sapiens
ttttattttgtaatt

SEQ ID NO: 23980 - DNA, 15 bp, Homo sapiens
tttttattttgtaat

SEQ ID NO: 23981 - DNA, 15 bp, Homo sapiens
gtttttattttgtaa

SEQ ID NO: 23982 - DNA, 15 bp, Homo sapiens
ggtttttattttgta

SEQ ID NO: 23983 - DNA, 15 bp, Homo sapiens
gggtttttattttgt

SEQ ID NO: 23984 - DNA, 15 bp, Homo sapiens
agggtttttattttg

SEQ ID NO: 23985 - DNA, 15 bp, Homo sapiens
aagggtttttatttt

SEQ ID NO: 23986 - DNA, 15 bp, Homo sapiens
aaagggtttttattt

SEQ ID NO: 23987 - DNA, 15 bp, Homo sapiens
caaagggtttttatt

SEQ ID NO: 23988 - DNA, 15 bp, Homo sapiens
acaaagggtttttat

SEQ ID NO: 23989 - DNA, 15 bp, Homo sapiens
tacaaagggttttta

SEQ ID NO: 23990 - DNA, 15 bp, Homo sapiens
ttacaaagggttttt

SEQ ID NO: 23991 - DNA, 15 bp, Homo sapiens
cttacaaagggtttt

SEQ ID NO: 23992 - DNA, 15 bp, Homo sapiens
acttacaaagggttt

SEQ ID NO: 23993 - DNA, 15 bp, Homo sapiens
gacttacaaagggtt

SEQ ID NO: 23994 - DNA, 15 bp, Homo sapiens
tgacttacaaagggt

SEQ ID NO: 23995 - DNA, 15 bp, Homo sapiens
atgacttacaaaggg

SEQ ID NO: 23996 - DNA, 15 bp, Homo sapiens
catgacttacaaagg

SEQ ID NO: 23997 - DNA, 15 bp, Homo sapiens
gcatgacttacaaag

SEQ ID NO: 23998 - DNA, 15 bp, Homo sapiens
agcatgacttacaaa

SEQ ID NO: 23999 - DNA, 15 bp, Homo sapiens
aagcatgacttacaa

SEQ ID NO: 24000 - DNA, 15 bp, Homo sapiens
aaagcatgacttaca

SEQ ID NO: 24001 - DNA, 15 bp, Homo sapiens
taaagcatgacttac

SEQ ID NO: 24002 - DNA, 15 bp, Homo sapiens
ttaaagcatgactta

SEQ ID NO: 24003 - DNA, 15 bp, Homo sapiens
attaaagcatgactt

SEQ ID NO: 24004 - DNA, 15 bp, Homo sapiens
cattaaagcatgact

SEQ ID NO: 24005 - DNA, 15 bp, Homo sapiens
gcattaaagcatgac

SEQ ID NO: 24006 - DNA, 15 bp, Homo sapiens
agcattaaagcatga

SEQ ID NO: 24007 - DNA, 15 bp, Homo sapiens
cagcattaaagcatg

SEQ ID NO: 24008 - DNA, 15 bp, Homo sapiens
ccagcattaaagcat

SEQ ID NO: 24009 - DNA, 15 bp, Homo sapiens
accagcattaaagca

SEQ ID NO: 24010 - DNA, 15 bp, Homo sapiens
aaccagcattaaagc

SEQ ID NO: 24011 - DNA, 15 bp, Homo sapiens
aaaccagcattaaag

SEQ ID NO: 24012 - DNA, 15 bp, Homo sapiens
aaaaccagcattaaa

SEQ ID NO: 24013 - DNA, 15 bp, Homo sapiens
gaaaaccagcattaa

SEQ ID NO: 24014 - DNA, 15 bp, Homo sapiens
ggaaaaccagcatta

SEQ ID NO: 24015 - DNA, 15 bp, Homo sapiens
gggaaaaccagcatt

SEQ ID NO: 24016 - DNA, 15 bp, Homo sapiens
agggaaaaccagcat

SEQ ID NO: 24017 - DNA, 15 bp, Homo sapiens
gagggaaaaccagca

SEQ ID NO: 24018 - DNA, 15 bp, Homo sapiens
tgagggaaaaccagc

SEQ ID NO: 24019 - DNA, 15 bp, Homo sapiens
atgagggaaaaccag

SEQ ID NO: 24020 - DNA, 15 bp, Homo sapiens
aatgagggaaaacca

SEQ ID NO: 24021 - DNA, 15 bp, Homo sapiens
aaatgagggaaaacc

SEQ ID NO: 24022 - DNA, 15 bp, Homo sapiens
gaaatgagggaaaac

SEQ ID NO: 24023 - DNA, 15 bp, Homo sapiens
agaaatgagggaaaa

SEQ ID NO: 24024 - DNA, 15 bp, Homo sapiens
cagaaatgagggaaa

SEQ ID NO: 24025 - DNA, 15 bp, Homo sapiens
acagaaatgagggaa

SEQ ID NO: 24026 - DNA, 15 bp, Homo sapiens
aacagaaatgaggga

SEQ ID NO: 24027 - DNA, 15 bp, Homo sapiens
aaacagaaatgaggg

SEQ ID NO: 24028 - DNA, 15 bp, Homo sapiens
gaaacagaaatgagg

SEQ ID NO: 24029 - DNA, 15 bp, Homo sapiens
agaaacagaaatgag

SEQ ID NO: 24030 - DNA, 15 bp, Homo sapiens
aagaaacagaaatga

SEQ ID NO: 24031 - DNA, 15 bp, Homo sapiens
caagaaacagaaatg

SEQ ID NO: 24032 - DNA, 15 bp, Homo sapiens
ccaagaaacagaaat

SEQ ID NO: 24033 - DNA, 15 bp, Homo sapiens
gccaagaaacagaaa

SEQ ID NO: 24034 - DNA, 15 bp, Homo sapiens
agccaagaaacagaa

SEQ ID NO: 24035 - DNA, 15 bp, Homo sapiens
cagccaagaaacaga

SEQ ID NO: 24036 - DNA, 15 bp, Homo sapiens
tcagccaagaaacag

SEQ ID NO: 24037 - DNA, 15 bp, Homo sapiens
atcagccaagaaaca

SEQ ID NO: 24038 - DNA, 15 bp, Homo sapiens
aatcagccaagaaac

SEQ ID NO: 24039 - DNA, 15 bp, Homo sapiens
taatcagccaagaaa

SEQ ID NO: 24040 - DNA, 15 bp, Homo sapiens
ataatcagccaagaa

SEQ ID NO: 24041 - DNA, 15 bp, Homo sapiens
gataatcagccaaga

SEQ ID NO: 24042 - DNA, 15 bp, Homo sapiens
agataatcagccaag

SEQ ID NO: 24043 - DNA, 15 bp, Homo sapiens
tagataatcagccaa

SEQ ID NO: 24044 - DNA, 15 bp, Homo sapiens
atagataatcagcca

SEQ ID NO: 24045 - DNA, 15 bp, Homo sapiens
aatagataatcagcc

SEQ ID NO: 24046 - DNA, 15 bp, Homo sapiens
aaatagataatcagc

SEQ ID NO: 24047 - DNA, 15 bp, Homo sapiens
aaaatagataatcag

SEQ ID NO: 24048 - DNA, 15 bp, Homo sapiens
caaaatagataatca

SEQ ID NO: 24049 - DNA, 15 bp, Homo sapiens
acaaaatagataatc

SEQ ID NO: 24050 - DNA, 15 bp, Homo sapiens
cacaaaatagataat

SEQ ID NO: 24051 - DNA, 15 bp, Homo sapiens
ccacaaaatagataa

SEQ ID NO: 24052 - DNA, 15 bp, Homo sapiens
accacaaaatagata

SEQ ID NO: 24053 - DNA, 15 bp, Homo sapiens
gaccacaaaatagat

SEQ ID NO: 24054 - DNA, 15 bp, Homo sapiens
tgaccacaaaataga

SEQ ID NO: 24055 - DNA, 15 bp, Homo sapiens
atgaccacaaaatag

SEQ ID NO: 24056 - DNA, 15 bp, Homo sapiens
gatgaccacaaaata

SEQ ID NO: 24057 - DNA, 15 bp, Homo sapiens
ggatgaccacaaaat

SEQ ID NO: 24058 - DNA, 15 bp, Homo sapiens
tggatgaccacaaaa

SEQ ID NO: 24059 - DNA, 15 bp, Homo sapiens
ctggatgaccacaaa

SEQ ID NO: 24060 - DNA, 15 bp, Homo sapiens
actggatgaccacaa

SEQ ID NO: 24061 - DNA, 15 bp, Homo sapiens
gactggatgaccaca

SEQ ID NO: 24062 - DNA, 15 bp, Homo sapiens
ggactggatgaccac

SEQ ID NO: 24063 - DNA, 15 bp, Homo sapiens
gggactggatgacca

SEQ ID NO: 24064 - DNA, 15 bp, Homo sapiens
agggactggatgacc

SEQ ID NO: 24065 - DNA, 15 bp, Homo sapiens
aagggactggatgac

SEQ ID NO: 24066 - DNA, 15 bp, Homo sapiens
caagggactggatga

SEQ ID NO: 24067 - DNA, 15 bp, Homo sapiens
gcaagggactggatg

SEQ ID NO: 24068 - DNA, 15 bp, Homo sapiens
ggcaagggactggat

SEQ ID NO: 24069 - DNA, 15 bp, Homo sapiens
aggcaagggactgga

SEQ ID NO: 24070 - DNA, 15 bp, Homo sapiens
aaggcaagggactgg

SEQ ID NO: 24071 - DNA, 15 bp, Homo sapiens
gaaggcaagggactg

SEQ ID NO: 24072 - DNA, 15 bp, Homo sapiens
agaaggcaagggact

SEQ ID NO: 24073 - DNA, 15 bp, Homo sapiens
gagaaggcaagggac

SEQ ID NO: 24074 - DNA, 15 bp, Homo sapiens
agagaaggcaaggga

SEQ ID NO: 24075 - DNA, 15 bp, Homo sapiens
gagagaaggcaaggg

SEQ ID NO: 24076 - DNA, 15 bp, Homo sapiens
agagagaaggcaagg

SEQ ID NO: 24077 - DNA, 15 bp, Homo sapiens
gagagagaaggcaag

SEQ ID NO: 24078 - DNA, 15 bp, Homo sapiens
cgagagagaaggcaa

SEQ ID NO: 24079 - DNA, 15 bp, Homo sapiens
gcgagagagaaggca

SEQ ID NO: 24080 - DNA, 15 bp, Homo sapiens
agcgagagagaaggc

SEQ ID NO: 24081 - DNA, 15 bp, Homo sapiens
gagcgagagagaagg

SEQ ID NO: 24082 - DNA, 15 bp, Homo sapiens
tgagcgagagagaag

SEQ ID NO: 24083 - DNA, 15 bp, Homo sapiens
gtgagcgagagagaa

SEQ ID NO: 24084 - DNA, 15 bp, Homo sapiens
agtgagcgagagaga

SEQ ID NO: 24085 - DNA, 15 bp, Homo sapiens
cagtgagcgagagag

SEQ ID NO: 24086 - DNA, 15 bp, Homo sapiens
gcagtgagcgagaga

SEQ ID NO: 24087 - DNA, 15 bp, Homo sapiens
ggcagtgagcgagag

SEQ ID NO: 24088 - DNA, 15 bp, Homo sapiens
aggcagtgagcgaga

SEQ ID NO: 24089 - DNA, 15 bp, Homo sapiens
caggcagtgagcgag

SEQ ID NO: 24090 - DNA, 15 bp, Homo sapiens
tcaggcagtgagcga

SEQ ID NO: 24091 - DNA, 15 bp, Homo sapiens
atcaggcagtgagcg

SEQ ID NO: 24092 - DNA, 15 bp, Homo sapiens
aatcaggcagtgagc

SEQ ID NO: 24093 - DNA, 15 bp, Homo sapiens
aaatcaggcagtgag

SEQ ID NO: 24094 - DNA, 15 bp, Homo sapiens
aaaatcaggcagtga

SEQ ID NO: 24095 - DNA, 15 bp, Homo sapiens
caaaatcaggcagtg

SEQ ID NO: 24096 - DNA, 15 bp, Homo sapiens
ccaaaatcaggcagt

SEQ ID NO: 24097 - DNA, 15 bp, Homo sapiens
tccaaaatcaggcag

SEQ ID NO: 24098 - DNA, 15 bp, Homo sapiens
ttccaaaatcaggca

SEQ ID NO: 24099 - DNA, 15 bp, Homo sapiens
attccaaaatcaggc

SEQ ID NO: 24100 - DNA, 15 bp, Homo sapiens
cattccaaaatcagg

SEQ ID NO: 24101 - DNA, 15 bp, Homo sapiens
acattccaaaatcag

SEQ ID NO: 24102 - DNA, 15 bp, Homo sapiens
aacattccaaaatca

SEQ ID NO: 24103 - DNA, 15 bp, Homo sapiens
caacattccaaaatc

SEQ ID NO: 24104 - DNA, 15 bp, Homo sapiens
acaacattccaaaat

SEQ ID NO: 24105 - DNA, 15 bp, Homo sapiens
aacaacattccaaaa

SEQ ID NO: 24106 - DNA, 15 bp, Homo sapiens
aaacaacattccaaa

SEQ ID NO: 24107 - DNA, 15 bp, Homo sapiens
gaaacaacattccaa

SEQ ID NO: 24108 - DNA, 15 bp, Homo sapiens
agaaacaacattcca

SEQ ID NO: 24109 - DNA, 15 bp, Homo sapiens
aagaaacaacattcc

SEQ ID NO: 24110 - DNA, 15 bp, Homo sapiens
taagaaacaacattc

SEQ ID NO: 24111 - DNA, 15 bp, Homo sapiens
gtaagaaacaacatt

SEQ ID NO: 24112 - DNA, 15 bp, Homo sapiens
agtaagaaacaacat

SEQ ID NO: 24113 - DNA, 15 bp, Homo sapiens
tagtaagaaacaaca

SEQ ID NO: 24114 - DNA, 15 bp, Homo sapiens
ttagtaagaaacaac

SEQ ID NO: 24115 - DNA, 15 bp, Homo sapiens
tttagtaagaaacaa

SEQ ID NO: 24116 - DNA, 15 bp, Homo sapiens
ctttagtaagaaaca

SEQ ID NO: 24117 - DNA, 15 bp, Homo sapiens
gctttagtaagaaac

SEQ ID NO: 24118 - DNA, 15 bp, Homo sapiens
agctttagtaagaaa

SEQ ID NO: 24119 - DNA, 15 bp, Homo sapiens
aagctttagtaagaa

SEQ ID NO: 24120 - DNA, 15 bp, Homo sapiens
gaagctttagtaaga

SEQ ID NO: 24121 - DNA, 15 bp, Homo sapiens
ggaagctttagtaag

SEQ ID NO: 24122 - DNA, 15 bp, Homo sapiens
gggaagctttagtaa

SEQ ID NO: 24123 - DNA, 15 bp, Homo sapiens
ggggaagctttagta

SEQ ID NO: 24124 - DNA, 15 bp, Homo sapiens
aggggaagctttagt

SEQ ID NO: 24125 - DNA, 15 bp, Homo sapiens
taggggaagctttag

SEQ ID NO: 24126 - DNA, 15 bp, Homo sapiens
ctaggggaagcttta

SEQ ID NO: 24127 - DNA, 15 bp, Homo sapiens
tctaggggaagcttt

SEQ ID NO: 24128 - DNA, 15 bp, Homo sapiens
ctctaggggaagctt

SEQ ID NO: 24129 - DNA, 15 bp, Homo sapiens
cctctaggggaagct

SEQ ID NO: 24130 - DNA, 15 bp, Homo sapiens
tcctctaggggaagc

SEQ ID NO: 24131 - DNA, 15 bp, Homo sapiens
gtcctctaggggaag

SEQ ID NO: 24132 - DNA, 15 bp, Homo sapiens
tgtcctctaggggaa

SEQ ID NO: 24133 - DNA, 15 bp, Homo sapiens
ctgtcctctagggga

SEQ ID NO: 24134 - DNA, 15 bp, Homo sapiens
cctgtcctctagggg

SEQ ID NO: 24135 - DNA, 15 bp, Homo sapiens
gcctgtcctctaggg

SEQ ID NO: 24136 - DNA, 15 bp, Homo sapiens
ggcctgtcctctagg

SEQ ID NO: 24137 - DNA, 15 bp, Homo sapiens
tggcctgtcctctag

SEQ ID NO: 24138 - DNA, 15 bp, Homo sapiens
ctggcctgtcctcta

SEQ ID NO: 24139 - DNA, 15 bp, Homo sapiens
cctggcctgtcctct

SEQ ID NO: 24140 - DNA, 15 bp, Homo sapiens
tcctggcctgtcctc

SEQ ID NO: 24141 - DNA, 15 bp, Homo sapiens
ttcctggcctgtcct

SEQ ID NO: 24142 - DNA, 15 bp, Homo sapiens
tttcctggcctgtcc

SEQ ID NO: 24143 - DNA, 15 bp, Homo sapiens
ttttcctggcctgtc

SEQ ID NO: 24144 - DNA, 15 bp, Homo sapiens
cttttcctggcctgt

SEQ ID NO: 24145 - DNA, 15 bp, Homo sapiens
ccttttcctggcctg

SEQ ID NO: 24146 - DNA, 15 bp, Homo sapiens
tccttttcctggcct

SEQ ID NO: 24147 - DNA, 15 bp, Homo sapiens
ttccttttcctggcc

SEQ ID NO: 24148 - DNA, 15 bp, Homo sapiens
tttccttttcctggc

SEQ ID NO: 24149 - DNA, 15 bp, Homo sapiens
ctttccttttcctgg

SEQ ID NO: 24150 - DNA, 15 bp, Homo sapiens
tctttccttttcctg

SEQ ID NO: 24151 - DNA, 15 bp, Homo sapiens
ttctttccttttcct

SEQ ID NO: 24152 - DNA, 15 bp, Homo sapiens
tttctttccttttcc

SEQ ID NO: 24153 - DNA, 15 bp, Homo sapiens
gtttctttccttttc

SEQ ID NO: 24154 - DNA, 15 bp, Homo sapiens
agtttctttcctttt

SEQ ID NO: 24155 - DNA, 15 bp, Homo sapiens
tagtttctttccttt

SEQ ID NO: 24156 - DNA, 15 bp, Homo sapiens
ttagtttctttcctt

SEQ ID NO: 24157 - DNA, 15 bp, Homo sapiens
tttagtttctttcct

SEQ ID NO: 24158 - DNA, 15 bp, Homo sapiens
atttagtttctttcc

SEQ ID NO: 24159 - DNA, 15 bp, Homo sapiens
aatttagtttctttc

SEQ ID NO: 24160 - DNA, 15 bp, Homo sapiens
gaatttagtttcttt

SEQ ID NO: 24161 - DNA, 15 bp, Homo sapiens
tgaatttagtttctt

SEQ ID NO: 24162 - DNA, 15 bp, Homo sapiens
gtgaatttagtttct

SEQ ID NO: 24163 - DNA, 15 bp, Homo sapiens
ggtgaatttagtttc

SEQ ID NO: 24164 - DNA, 15 bp, Homo sapiens
tggtgaatttagttt

SEQ ID NO: 24165 - DNA, 15 bp, Homo sapiens
ctggtgaatttagtt

SEQ ID NO: 24166 - DNA, 15 bp, Homo sapiens
gctggtgaatttagt

SEQ ID NO: 24167 - DNA, 15 bp, Homo sapiens
agctggtgaatttag

SEQ ID NO: 24168 - DNA, 15 bp, Homo sapiens
aagctggtgaattta

SEQ ID NO: 24169 - DNA, 15 bp, Homo sapiens
gaagctggtgaattt

SEQ ID NO: 24170 - DNA, 15 bp, Homo sapiens
agaagctggtgaatt

SEQ ID NO: 24171 - DNA, 15 bp, Homo sapiens
gagaagctggtgaat

SEQ ID NO: 24172 - DNA, 15 bp, Homo sapiens
agagaagctggtgaa

SEQ ID NO: 24173 - DNA, 15 bp, Homo sapiens
aagagaagctggtga

SEQ ID NO: 24174 - DNA, 15 bp, Homo sapiens
gaagagaagctggtg

SEQ ID NO: 24175 - DNA, 15 bp, Homo sapiens
agaagagaagctggt

SEQ ID NO: 24176 - DNA, 15 bp, Homo sapiens
aagaagagaagctgg

SEQ ID NO: 24177 - DNA, 15 bp, Homo sapiens
taagaagagaagctg

SEQ ID NO: 24178 - DNA, 15 bp, Homo sapiens
ataagaagagaagct

SEQ ID NO: 24179 - DNA, 15 bp, Homo sapiens
aataagaagagaagc

SEQ ID NO: 24180 - DNA, 15 bp, Homo sapiens
taataagaagagaag

SEQ ID NO: 24181 - DNA, 15 bp, Homo sapiens
ttaataagaagagaa

SEQ ID NO: 24182 - DNA, 15 bp, Homo sapiens
cttaataagaagaga

SEQ ID NO: 24183 - DNA, 15 bp, Homo sapiens
tcttaataagaagag

SEQ ID NO: 24184 - DNA, 15 bp, Homo sapiens
ttcttaataagaaga

SEQ ID NO: 24185 - DNA, 15 bp, Homo sapiens
attcttaataagaag

SEQ ID NO: 24186 - DNA, 15 bp, Homo sapiens
aattcttaataagaa

SEQ ID NO: 24187 - DNA, 15 bp, Homo sapiens
aaattcttaataaga

SEQ ID NO: 24188 - DNA, 15 bp, Homo sapiens
taaattcttaataag

SEQ ID NO: 24189 - DNA, 15 bp, Homo sapiens
ctaaattcttaataa

SEQ ID NO: 24190 - DNA, 15 bp, Homo sapiens
tctaaattcttaata

SEQ ID NO: 24191 - DNA, 15 bp, Homo sapiens
atctaaattcttaat

SEQ ID NO: 24192 - DNA, 15 bp, Homo sapiens
gatctaaattcttaa

SEQ ID NO: 24193 - DNA, 15 bp, Homo sapiens
tgatctaaattctta

SEQ ID NO: 24194 - DNA, 15 bp, Homo sapiens
ctgatctaaattctt

SEQ ID NO: 24195 - DNA, 15 bp, Homo sapiens
tctgatctaaattct

SEQ ID NO: 24196 - DNA, 15 bp, Homo sapiens
ttctgatctaaattc

SEQ ID NO: 24197 - DNA, 15 bp, Homo sapiens
tttctgatctaaatt

SEQ ID NO: 24198 - DNA, 15 bp, Homo sapiens
atttctgatctaaat

SEQ ID NO: 24199 - DNA, 15 bp, Homo sapiens
gatttctgatctaaa

SEQ ID NO: 24200 - DNA, 15 bp, Homo sapiens
agatttctgatctaa

SEQ ID NO: 24201 - DNA, 15 bp, Homo sapiens
cagatttctgatcta

SEQ ID NO: 24202 - DNA, 15 bp, Homo sapiens
tcagatttctgatct

SEQ ID NO: 24203 - DNA, 15 bp, Homo sapiens
atcagatttctgatc

SEQ ID NO: 24204 - DNA, 15 bp, Homo sapiens
tatcagatttctgat

SEQ ID NO: 24205 - DNA, 15 bp, Homo sapiens
ctatcagatttctga

SEQ ID NO: 24206 - DNA, 15 bp, Homo sapiens
cctatcagatttctg

SEQ ID NO: 24207 - DNA, 15 bp, Homo sapiens
ccctatcagatttct

SEQ ID NO: 24208 - DNA, 15 bp, Homo sapiens
tccctatcagatttc

SEQ ID NO: 24209 - DNA, 15 bp, Homo sapiens
ttccctatcagattt

SEQ ID NO: 24210 - DNA, 15 bp, Homo sapiens
tttccctatcagatt

SEQ ID NO: 24211 - DNA, 15 bp, Homo sapiens
ctttccctatcagat

SEQ ID NO: 24212 - DNA, 15 bp, Homo sapiens
tctttccctatcaga

SEQ ID NO: 24213 - DNA, 15 bp, Homo sapiens
ctctttccctatcag

SEQ ID NO: 24214 - DNA, 15 bp, Homo sapiens
actctttccctatca

SEQ ID NO: 24215 - DNA, 15 bp, Homo sapiens
gactctttccctatc

SEQ ID NO: 24216 - DNA, 15 bp, Homo sapiens
agactctttccctat

SEQ ID NO: 24217 - DNA, 15 bp, Homo sapiens
cagactctttcccta

SEQ ID NO: 24218 - DNA, 15 bp, Homo sapiens
ccagactctttccct

SEQ ID NO: 24219 - DNA, 15 bp, Homo sapiens
gccagactctttccc

SEQ ID NO: 24220 - DNA, 15 bp, Homo sapiens
tgccagactctttcc

SEQ ID NO: 24221 - DNA, 15 bp, Homo sapiens
ttgccagactctttc

SEQ ID NO: 24222 - DNA, 15 bp, Homo sapiens
tttgccagactcttt

SEQ ID NO: 24223 - DNA, 15 bp, Homo sapiens
atttgccagactctt

SEQ ID NO: 24224 - DNA, 15 bp, Homo sapiens
catttgccagactct

SEQ ID NO: 24225 - DNA, 15 bp, Homo sapiens
tcatttgccagactc

SEQ ID NO: 24226 - DNA, 15 bp, Homo sapiens
ttcatttgccagact

SEQ ID NO: 24227 - DNA, 15 bp, Homo sapiens
tttcatttgccagac

SEQ ID NO: 24228 - DNA, 15 bp, Homo sapiens
ctttcatttgccaga

SEQ ID NO: 24229 - DNA, 15 bp, Homo sapiens
cctttcatttgccag

SEQ ID NO: 24230 - DNA, 15 bp, Homo sapiens
ccctttcatttgcca

SEQ ID NO: 24231 - DNA, 15 bp, Homo sapiens
cccctttcatttgcc

SEQ ID NO: 24232 - DNA, 15 bp, Homo sapiens
tcccctttcatttgc

SEQ ID NO: 24233 - DNA, 15 bp, Homo sapiens
ttcccctttcatttg

SEQ ID NO: 24234 - DNA, 15 bp, Homo sapiens
cttcccctttcattt

SEQ ID NO: 24235 - DNA, 15 bp, Homo sapiens
gcttcccctttcatt

SEQ ID NO: 24236 - DNA, 15 bp, Homo sapiens
agcttcccctttcat

SEQ ID NO: 24237 - DNA, 15 bp, Homo sapiens
aagcttcccctttca

SEQ ID NO: 24238 - DNA, 15 bp, Homo sapiens
taagcttcccctttc

SEQ ID NO: 24239 - DNA, 15 bp, Homo sapiens
ataagcttccccttt

SEQ ID NO: 24240 - DNA, 15 bp, Homo sapiens
aataagcttcccctt

SEQ ID NO: 24241 - DNA, 15 bp, Homo sapiens
aaataagcttcccct

SEQ ID NO: 24242 - DNA, 15 bp, Homo sapiens
taaataagcttcccc

SEQ ID NO: 24243 - DNA, 15 bp, Homo sapiens
ataaataagcttccc

SEQ ID NO: 24244 - DNA, 15 bp, Homo sapiens
cataaataagcttcc

SEQ ID NO: 24245 - DNA, 15 bp, Homo sapiens
acataaataagcttc

SEQ ID NO: 24246 - DNA, 15 bp, Homo sapiens
aacataaataagctt

SEQ ID NO: 24247 - DNA, 15 bp, Homo sapiens
caacataaataagct

SEQ ID NO: 24248 - DNA, 15 bp, Homo sapiens
tcaacataaataagc

SEQ ID NO: 24249 - DNA, 15 bp, Homo sapiens
atcaacataaataag

SEQ ID NO: 24250 - DNA, 15 bp, Homo sapiens
aatcaacataaataa

SEQ ID NO: 24251 - DNA, 15 bp, Homo sapiens
aaatcaacataaata

SEQ ID NO: 24252 - DNA, 15 bp, Homo sapiens
aaaatcaacataaat

SEQ ID NO: 24253 - DNA, 15 bp, Homo sapiens
taaaatcaacataaa

SEQ ID NO: 24254 - DNA, 15 bp, Homo sapiens
ctaaaatcaacataa

SEQ ID NO: 24255 - DNA, 15 bp, Homo sapiens
tctaaaatcaacata

SEQ ID NO: 24256 - DNA, 15 bp, Homo sapiens
atctaaaatcaacat

SEQ ID NO: 24257 - DNA, 15 bp, Homo sapiens
gatctaaaatcaaca

SEQ ID NO: 24258 - DNA, 15 bp, Homo sapiens
agatctaaaatcaac

SEQ ID NO: 24259 - DNA, 15 bp, Homo sapiens
aagatctaaaatcaa

SEQ ID NO: 24260 - DNA, 15 bp, Homo sapiens
aaagatctaaaatca

SEQ ID NO: 24261 - DNA, 15 bp, Homo sapiens
taaagatctaaaatc

SEQ ID NO: 24262 - DNA, 15 bp, Homo sapiens
ttaaagatctaaaat

SEQ ID NO: 24263 - DNA, 15 bp, Homo sapiens
tttaaagatctaaaa

SEQ ID NO: 24264 - DNA, 15 bp, Homo sapiens
ttttaaagatctaaa

SEQ ID NO: 24265 - DNA, 15 bp, Homo sapiens
cttttaaagatctaa

SEQ ID NO: 24266 - DNA, 15 bp, Homo sapiens
gcttttaaagatcta

SEQ ID NO: 24267 - DNA, 15 bp, Homo sapiens
ggcttttaaagatct

SEQ ID NO: 24268 - DNA, 15 bp, Homo sapiens
aggcttttaaagatc

SEQ ID NO: 24269 - DNA, 15 bp, Homo sapiens
aaggcttttaaagat

SEQ ID NO: 24270 - DNA, 15 bp, Homo sapiens
gaaggcttttaaaga

SEQ ID NO: 24271 - DNA, 15 bp, Homo sapiens
agaaggcttttaaag

SEQ ID NO: 24272 - DNA, 15 bp, Homo sapiens
aagaaggcttttaaa

SEQ ID NO: 24273 - DNA, 15 bp, Homo sapiens
aaagaaggcttttaa

SEQ ID NO: 24274 - DNA, 15 bp, Homo sapiens
gaaagaaggctttta

SEQ ID NO: 24275 - DNA, 15 bp, Homo sapiens
ggaaagaaggctttt

SEQ ID NO: 24276 - DNA, 15 bp, Homo sapiens
tggaaagaaggcttt

SEQ ID NO: 24277 - DNA, 15 bp, Homo sapiens
ttggaaagaaggctt

SEQ ID NO: 24278 - DNA, 15 bp, Homo sapiens
attggaaagaaggct

SEQ ID NO: 24279 - DNA, 15 bp, Homo sapiens
cattggaaagaaggc

SEQ ID NO: 24280 - DNA, 15 bp, Homo sapiens
acattggaaagaagg

SEQ ID NO: 24281 - DNA, 15 bp, Homo sapiens
tacattggaaagaag

SEQ ID NO: 24282 - DNA, 15 bp, Homo sapiens
gtacattggaaagaa

SEQ ID NO: 24283 - DNA, 15 bp, Homo sapiens
tgtacattggaaaga

SEQ ID NO: 24284 - DNA, 15 bp, Homo sapiens
atgtacattggaaag

SEQ ID NO: 24285 - DNA, 15 bp, Homo sapiens
aatgtacattggaaa

SEQ ID NO: 24286 - DNA, 15 bp, Homo sapiens
taatgtacattggaa

SEQ ID NO: 24287 - DNA, 15 bp, Homo sapiens
ttaatgtacattgga

SEQ ID NO: 24288 - DNA, 15 bp, Homo sapiens
attaatgtacattgg

SEQ ID NO: 24289 - DNA, 15 bp, Homo sapiens
tattaatgtacattg

SEQ ID NO: 24290 - DNA, 15 bp, Homo sapiens
ctattaatgtacatt

SEQ ID NO: 24291 - DNA, 15 bp, Homo sapiens
tctattaatgtacat

SEQ ID NO: 24292 - DNA, 15 bp, Homo sapiens
gtctattaatgtaca

SEQ ID NO: 24293 - DNA, 15 bp, Homo sapiens
tgtctattaatgtac

SEQ ID NO: 24294 - DNA, 15 bp, Homo sapiens
ttgtctattaatgta

SEQ ID NO: 24295 - DNA, 15 bp, Homo sapiens
attgtctattaatgt

SEQ ID NO: 24296 - DNA, 15 bp, Homo sapiens
aattgtctattaatg

SEQ ID NO: 24297 - DNA, 15 bp, Homo sapiens
caattgtctattaat

SEQ ID NO: 24298 - DNA, 15 bp, Homo sapiens
tcaattgtctattaa

SEQ ID NO: 24299 - DNA, 15 bp, Homo sapiens
ttcaattgtctatta

SEQ ID NO: 24300 - DNA, 15 bp, Homo sapiens
tttcaattgtctatt

SEQ ID NO: 24301 - DNA, 15 bp, Homo sapiens
ttttcaattgtctat

SEQ ID NO: 24302 - DNA, 15 bp, Homo sapiens
tttttcaattgtcta

SEQ ID NO: 24303 - DNA, 15 bp, Homo sapiens
atttttcaattgtct

SEQ ID NO: 24304 - DNA, 15 bp, Homo sapiens
tatttttcaattgtc

SEQ ID NO: 24305 - DNA, 15 bp, Homo sapiens
ttatttttcaattgt

SEQ ID NO: 24306 - DNA, 15 bp, Homo sapiens
attatttttcaattg

SEQ ID NO: 24307 - DNA, 15 bp, Homo sapiens
tattatttttcaatt

SEQ ID NO: 24308 - DNA, 15 bp, Homo sapiens
atattatttttcaat

SEQ ID NO: 24309 - DNA, 15 bp, Homo sapiens
aatattatttttcaa

SEQ ID NO: 24310 - DNA, 15 bp, Homo sapiens
aaatattatttttca

SEQ ID NO: 24311 - DNA, 15 bp, Homo sapiens
aaaatattatttttc

SEQ ID NO: 24312 - DNA, 15 bp, Homo sapiens
taaaatattattttt

SEQ ID NO: 24313 - DNA, 15 bp, Homo sapiens
ataaaatattatttt

SEQ ID NO: 24314 - DNA, 15 bp, Homo sapiens
tataaaatattattt

SEQ ID NO: 24315 - DNA, 15 bp, Homo sapiens
ttataaaatattatt

SEQ ID NO: 24316 - DNA, 15 bp, Homo sapiens
cttataaaatattat

SEQ ID NO: 24317 - DNA, 15 bp, Homo sapiens
gcttataaaatatta

SEQ ID NO: 24318 - DNA, 15 bp, Homo sapiens
ggcttataaaatatt

SEQ ID NO: 24319 - DNA, 15 bp, Homo sapiens
tggcttataaaatat

SEQ ID NO: 24320 - DNA, 15 bp, Homo sapiens
ttggcttataaaata

SEQ ID NO: 24321 - DNA, 15 bp, Homo sapiens
gttggcttataaaat

SEQ ID NO: 24322 - DNA, 15 bp, Homo sapiens
agttggcttataaaa

SEQ ID NO: 24323 - DNA, 15 bp, Homo sapiens
tagttggcttataaa

SEQ ID NO: 24324 - DNA, 15 bp, Homo sapiens
ttagttggcttataa

SEQ ID NO: 24325 - DNA, 15 bp, Homo sapiens
attagttggcttata

SEQ ID NO: 24326 - DNA, 15 bp, Homo sapiens
gattagttggcttat

SEQ ID NO: 24327 - DNA, 15 bp, Homo sapiens
tgattagttggctta

SEQ ID NO: 24328 - DNA, 15 bp, Homo sapiens
gtgattagttggctt

SEQ ID NO: 24329 - DNA, 15 bp, Homo sapiens
agtgattagttggct

SEQ ID NO: 24330 - DNA, 15 bp, Homo sapiens
aagtgattagttggc

SEQ ID NO: 24331 - DNA, 15 bp, Homo sapiens
caagtgattagttgg

SEQ ID NO: 24332 - DNA, 15 bp, Homo sapiens
gcaagtgattagttg

SEQ ID NO: 24333 - DNA, 15 bp, Homo sapiens
agcaagtgattagtt

SEQ ID NO: 24334 - DNA, 15 bp, Homo sapiens
aagcaagtgattagt

SEQ ID NO: 24335 - DNA, 15 bp, Homo sapiens
aaagcaagtgattag

SEQ ID NO: 24336 - DNA, 15 bp, Homo sapiens
aaaagcaagtgatta

SEQ ID NO: 24337 - DNA, 15 bp, Homo sapiens
taaaagcaagtgatt

SEQ ID NO: 24338 - DNA, 15 bp, Homo sapiens
ttaaaagcaagtgat

SEQ ID NO: 24339 - DNA, 15 bp, Homo sapiens
tttaaaagcaagtga

SEQ ID NO: 24340 - DNA, 15 bp, Homo sapiens
ttttaaaagcaagtg

SEQ ID NO: 24341 - DNA, 15 bp, Homo sapiens
attttaaaagcaagt

SEQ ID NO: 24342 - DNA, 15 bp, Homo sapiens
gattttaaaagcaag

SEQ ID NO: 24343 - DNA, 15 bp, Homo sapiens
ggattttaaaagcaa

SEQ ID NO: 24344 - DNA, 15 bp, Homo sapiens
gggattttaaaagca

SEQ ID NO: 24345 - DNA, 15 bp, Homo sapiens
ggggattttaaaagc

SEQ ID NO: 24346 - DNA, 15 bp, Homo sapiens
tggggattttaaaag

SEQ ID NO: 24347 - DNA, 15 bp, Homo sapiens
gtggggattttaaaa

SEQ ID NO: 24348 - DNA, 15 bp, Homo sapiens
agtggggattttaaa

SEQ ID NO: 24349 - DNA, 15 bp, Homo sapiens
aagtggggattttaa

SEQ ID NO: 24350 - DNA, 15 bp, Homo sapiens
taagtggggatttta

SEQ ID NO: 24351 - DNA, 15 bp, Homo sapiens
gtaagtggggatttt

SEQ ID NO: 24352 - DNA, 15 bp, Homo sapiens
agtaagtggggattt

SEQ ID NO: 24353 - DNA, 15 bp, Homo sapiens
tagtaagtggggatt

SEQ ID NO: 24354 - DNA, 15 bp, Homo sapiens
gtagtaagtggggat

SEQ ID NO: 24355 - DNA, 15 bp, Homo sapiens
ggtagtaagtgggga

SEQ ID NO: 24356 - DNA, 15 bp, Homo sapiens
aggtagtaagtgggg

SEQ ID NO: 24357 - DNA, 15 bp, Homo sapiens
aaggtagtaagtggg

SEQ ID NO: 24358 - DNA, 15 bp, Homo sapiens
caaggtagtaagtgg

SEQ ID NO: 24359 - DNA, 15 bp, Homo sapiens
tcaaggtagtaagtg

SEQ ID NO: 24360 - DNA, 15 bp, Homo sapiens
ctcaaggtagtaagt

SEQ ID NO: 24361 - DNA, 15 bp, Homo sapiens
gctcaaggtagtaag

SEQ ID NO: 24362 - DNA, 15 bp, Homo sapiens
tgctcaaggtagtaa

SEQ ID NO: 24363 - DNA, 15 bp, Homo sapiens
atgctcaaggtagta

SEQ ID NO: 24364 - DNA, 15 bp, Homo sapiens
tatgctcaaggtagt

SEQ ID NO: 24365 - DNA, 15 bp, Homo sapiens
atatgctcaaggtag

SEQ ID NO: 24366 - DNA, 15 bp, Homo sapiens
tatatgctcaaggta

SEQ ID NO: 24367 - DNA, 15 bp, Homo sapiens
gtatatgctcaaggt

SEQ ID NO: 24368 - DNA, 15 bp, Homo sapiens
tgtatatgctcaagg

SEQ ID NO: 24369 - DNA, 15 bp, Homo sapiens
atgtatatgctcaag

SEQ ID NO: 24370 - DNA, 15 bp, Homo sapiens
aatgtatatgctcaa

SEQ ID NO: 24371 - DNA, 15 bp, Homo sapiens
taatgtatatgctca

SEQ ID NO: 24372 - DNA, 15 bp, Homo sapiens
ctaatgtatatgctc

SEQ ID NO: 24373 - DNA, 15 bp, Homo sapiens
tctaatgtatatgct

SEQ ID NO: 24374 - DNA, 15 bp, Homo sapiens
atctaatgtatatgc

SEQ ID NO: 24375 - DNA, 15 bp, Homo sapiens
aatctaatgtatatg

SEQ ID NO: 24376 - DNA, 15 bp, Homo sapiens
taatctaatgtatat

SEQ ID NO: 24377 - DNA, 15 bp, Homo sapiens
ataatctaatgtata

SEQ ID NO: 24378 - DNA, 15 bp, Homo sapiens
cataatctaatgtat

SEQ ID NO: 24379 - DNA, 15 bp, Homo sapiens
acataatctaatgta

SEQ ID NO: 24380 - DNA, 15 bp, Homo sapiens
aacataatctaatgt

SEQ ID NO: 24381 - DNA, 15 bp, Homo sapiens
aaacataatctaatg

SEQ ID NO: 24382 - DNA, 15 bp, Homo sapiens
aaaacataatctaat

SEQ ID NO: 24383 - DNA, 15 bp, Homo sapiens
taaaacataatctaa

SEQ ID NO: 24384 - DNA, 15 bp, Homo sapiens
ttaaaacataatcta

SEQ ID NO: 24385 - DNA, 15 bp, Homo sapiens
tttaaaacataatct

SEQ ID NO: 24386 - DNA, 15 bp, Homo sapiens
ttttaaaacataatc

SEQ ID NO: 24387 - DNA, 15 bp, Homo sapiens
attttaaaacataat

SEQ ID NO: 24388 - DNA, 15 bp, Homo sapiens
tattttaaaacataa

SEQ ID NO: 24389 - DNA, 15 bp, Homo sapiens
ttattttaaaacata

SEQ ID NO: 24390 - DNA, 15 bp, Homo sapiens
gttattttaaaacat

SEQ ID NO: 24391 - DNA, 15 bp, Homo sapiens
agttattttaaaaca

SEQ ID NO: 24392 - DNA, 15 bp, Homo sapiens
tagttattttaaaac

SEQ ID NO: 24393 - DNA, 15 bp, Homo sapiens
ctagttattttaaaa

SEQ ID NO: 24394 - DNA, 15 bp, Homo sapiens
actagttattttaaa

SEQ ID NO: 24395 - DNA, 15 bp, Homo sapiens
tactagttattttaa

SEQ ID NO: 24396 - DNA, 15 bp, Homo sapiens
gtactagttatttta

SEQ ID NO: 24397 - DNA, 15 bp, Homo sapiens
agtactagttatttt

SEQ ID NO: 24398 - DNA, 15 bp, Homo sapiens
gagtactagttattt

SEQ ID NO: 24399 - DNA, 15 bp, Homo sapiens
agagtactagttatt

SEQ ID NO: 24400 - DNA, 15 bp, Homo sapiens
cagagtactagttat

SEQ ID NO: 24401 - DNA, 15 bp, Homo sapiens
ccagagtactagtta

SEQ ID NO: 24402 - DNA, 15 bp, Homo sapiens
accagagtactagtt

SEQ ID NO: 24403 - DNA, 15 bp, Homo sapiens
aaccagagtactagt

SEQ ID NO: 24404 - DNA, 15 bp, Homo sapiens
gaaccagagtactag

SEQ ID NO: 24405 - DNA, 15 bp, Homo sapiens
tgaaccagagtacta

SEQ ID NO: 24406 - DNA, 15 bp, Homo sapiens
ctgaaccagagtact

SEQ ID NO: 24407 - DNA, 15 bp, Homo sapiens
actgaaccagagtac

SEQ ID NO: 24408 - DNA, 15 bp, Homo sapiens
cactgaaccagagta

SEQ ID NO: 24409 - DNA, 15 bp, Homo sapiens
tcactgaaccagagt

SEQ ID NO: 24410 - DNA, 15 bp, Homo sapiens
ttcactgaaccagag

SEQ ID NO: 24411 - DNA, 15 bp, Homo sapiens
tttcactgaaccaga

SEQ ID NO: 24412 - DNA, 15 bp, Homo sapiens
atttcactgaaccag

SEQ ID NO: 24413 - DNA, 15 bp, Homo sapiens
catttcactgaacca

SEQ ID NO: 24414 - DNA, 15 bp, Homo sapiens
tcatttcactgaacc

SEQ ID NO: 24415 - DNA, 15 bp, Homo sapiens
ttcatttcactgaac

SEQ ID NO: 24416 - DNA, 15 bp, Homo sapiens
tttcatttcactgaa

SEQ ID NO: 24417 - DNA, 15 bp, Homo sapiens
ttttcatttcactga

SEQ ID NO: 24418 - DNA, 15 bp, Homo sapiens
attttcatttcactg

SEQ ID NO: 24419 - DNA, 15 bp, Homo sapiens
cattttcatttcact

SEQ ID NO: 24420 - DNA, 15 bp, Homo sapiens
tcattttcatttcac

SEQ ID NO: 24421 - DNA, 15 bp, Homo sapiens
atcattttcatttca

SEQ ID NO: 24422 - DNA, 15 bp, Homo sapiens
tatcattttcatttc

SEQ ID NO: 24423 - DNA, 15 bp, Homo sapiens
atatcattttcattt

SEQ ID NO: 24424 - DNA, 15 bp, Homo sapiens
catatcattttcatt

SEQ ID NO: 24425 - DNA, 15 bp, Homo sapiens
acatatcattttcat

SEQ ID NO: 24426 - DNA, 15 bp, Homo sapiens
cacatatcattttca

SEQ ID NO: 24427 - DNA, 15 bp, Homo sapiens
gcacatatcattttc

SEQ ID NO: 24428 - DNA, 15 bp, Homo sapiens
tgcacatatcatttt

SEQ ID NO: 24429 - DNA, 15 bp, Homo sapiens
ttgcacatatcattt

SEQ ID NO: 24430 - DNA, 15 bp, Homo sapiens
tttgcacatatcatt

SEQ ID NO: 24431 - DNA, 15 bp, Homo sapiens
ctttgcacatatcat

SEQ ID NO: 24432 - DNA, 15 bp, Homo sapiens
tctttgcacatatca

SEQ ID NO: 24433 - DNA, 15 bp, Homo sapiens
ctctttgcacatatc

SEQ ID NO: 24434 - DNA, 15 bp, Homo sapiens
tctctttgcacatat

SEQ ID NO: 24435 - DNA, 15 bp, Homo sapiens
ttctctttgcacata

SEQ ID NO: 24436 - DNA, 15 bp, Homo sapiens
attctctttgcacat

SEQ ID NO: 24437 - DNA, 15 bp, Homo sapiens
cattctctttgcaca

SEQ ID NO: 24438 - DNA, 15 bp, Homo sapiens
acattctctttgcac

SEQ ID NO: 24439 - DNA, 15 bp, Homo sapiens
gacattctctttgca

SEQ ID NO: 24440 - DNA, 15 bp, Homo sapiens
tgacattctctttgc

SEQ ID NO: 24441 - DNA, 15 bp, Homo sapiens
atgacattctctttg

SEQ ID NO: 24442 - DNA, 15 bp, Homo sapiens
tatgacattctcttt

SEQ ID NO: 24443 - DNA, 15 bp, Homo sapiens
ttatgacattctctt

SEQ ID NO: 24444 - DNA, 15 bp, Homo sapiens
attatgacattctct

SEQ ID NO: 24445 - DNA, 15 bp, Homo sapiens
cattatgacattctc

SEQ ID NO: 24446 - DNA, 15 bp, Homo sapiens
tcattatgacattct

SEQ ID NO: 24447 - DNA, 15 bp, Homo sapiens
atcattatgacattc

SEQ ID NO: 24448 - DNA, 15 bp, Homo sapiens
tatcattatgacatt

SEQ ID NO: 24449 - DNA, 15 bp, Homo sapiens
gtatcattatgacat

SEQ ID NO: 24450 - DNA, 15 bp, Homo sapiens
ggtatcattatgaca

SEQ ID NO: 24451 - DNA, 15 bp, Homo sapiens
aggtatcattatgac

SEQ ID NO: 24452 - DNA, 15 bp, Homo sapiens
gaggtatcattatga

SEQ ID NO: 24453 - DNA, 15 bp, Homo sapiens
ggaggtatcattatg

SEQ ID NO: 24454 - DNA, 15 bp, Homo sapiens
gggaggtatcattat

SEQ ID NO: 24455 - DNA, 15 bp, Homo sapiens
tgggaggtatcatta

SEQ ID NO: 24456 - DNA, 15 bp, Homo sapiens
atgggaggtatcatt

SEQ ID NO: 24457 - DNA, 15 bp, Homo sapiens
aatgggaggtatcat

SEQ ID NO: 24458 - DNA, 15 bp, Homo sapiens
aaatgggaggtatca

SEQ ID NO: 24459 - DNA, 15 bp, Homo sapiens
taaatgggaggtatc

SEQ ID NO: 24460 - DNA, 15 bp, Homo sapiens
ataaatgggaggtat

SEQ ID NO: 24461 - DNA, 15 bp, Homo sapiens
cataaatgggaggta

SEQ ID NO: 24462 - DNA, 15 bp, Homo sapiens
ccataaatgggaggt

SEQ ID NO: 24463 - DNA, 15 bp, Homo sapiens
tccataaatgggagg

SEQ ID NO: 24464 - DNA, 15 bp, Homo sapiens
ctccataaatgggag

SEQ ID NO: 24465 - DNA, 15 bp, Homo sapiens
actccataaatggga

SEQ ID NO: 24466 - DNA, 15 bp, Homo sapiens
cactccataaatggg

SEQ ID NO: 24467 - DNA, 15 bp, Homo sapiens
gcactccataaatgg

SEQ ID NO: 24468 - DNA, 15 bp, Homo sapiens
ggcactccataaatg

SEQ ID NO: 24469 - DNA, 15 bp, Homo sapiens
aggcactccataaat

SEQ ID NO: 24470 - DNA, 15 bp, Homo sapiens
caggcactccataaa

SEQ ID NO: 24471 - DNA, 15 bp, Homo sapiens
gcaggcactccataa

SEQ ID NO: 24472 - DNA, 15 bp, Homo sapiens
agcaggcactccata

SEQ ID NO: 24473 - DNA, 15 bp, Homo sapiens
aagcaggcactccat

SEQ ID NO: 24474 - DNA, 15 bp, Homo sapiens
gaagcaggcactcca

SEQ ID NO: 24475 - DNA, 15 bp, Homo sapiens
ggaagcaggcactcc

SEQ ID NO: 24476 - DNA, 15 bp, Homo sapiens
gggaagcaggcactc

SEQ ID NO: 24477 - DNA, 15 bp, Homo sapiens
tgggaagcaggcact

SEQ ID NO: 24478 - DNA, 15 bp, Homo sapiens
ctgggaagcaggcac

SEQ ID NO: 24479 - DNA, 15 bp, Homo sapiens
actgggaagcaggca

SEQ ID NO: 24480 - DNA, 15 bp, Homo sapiens
aactgggaagcaggc

SEQ ID NO: 24481 - DNA, 15 bp, Homo sapiens
aaactgggaagcagg

SEQ ID NO: 24482 - DNA, 15 bp, Homo sapiens
caaactgggaagcag

SEQ ID NO: 24483 - DNA, 15 bp, Homo sapiens
gcaaactgggaagca

SEQ ID NO: 24484 - DNA, 15 bp, Homo sapiens
tgcaaactgggaagc

SEQ ID NO: 24485 - DNA, 15 bp, Homo sapiens
ttgcaaactgggaag

SEQ ID NO: 24486 - DNA, 15 bp, Homo sapiens
tttgcaaactgggaa

SEQ ID NO: 24487 - DNA, 15 bp, Homo sapiens
ctttgcaaactggga

SEQ ID NO: 24488 - DNA, 15 bp, Homo sapiens
gctttgcaaactggg

SEQ ID NO: 24489 - DNA, 15 bp, Homo sapiens
ggctttgcaaactgg

SEQ ID NO: 24490 - DNA, 15 bp, Homo sapiens
gggctttgcaaactg

SEQ ID NO: 24491 - DNA, 15 bp, Homo sapiens
agggctttgcaaact

SEQ ID NO: 24492 - DNA, 15 bp, Homo sapiens
aagggctttgcaaac

SEQ ID NO: 24493 - DNA, 15 bp, Homo sapiens
taagggctttgcaaa

SEQ ID NO: 24494 - DNA, 15 bp, Homo sapiens
ataagggctttgcaa

SEQ ID NO: 24495 - DNA, 15 bp, Homo sapiens
tataagggctttgca

SEQ ID NO: 24496 - DNA, 15 bp, Homo sapiens
atataagggctttgc

SEQ ID NO: 24497 - DNA, 15 bp, Homo sapiens
tatataagggctttg

SEQ ID NO: 24498 - DNA, 15 bp, Homo sapiens
atatataagggcttt

SEQ ID NO: 24499 - DNA, 15 bp, Homo sapiens
tatatataagggctt

SEQ ID NO: 24500 - DNA, 15 bp, Homo sapiens
atatatataagggct

SEQ ID NO: 24501 - DNA, 15 bp, Homo sapiens
aatatatataagggc

SEQ ID NO: 24502 - DNA, 15 bp, Homo sapiens
gaatatatataaggg

SEQ ID NO: 24503 - DNA, 15 bp, Homo sapiens
agaatatatataagg

SEQ ID NO: 24504 - DNA, 15 bp, Homo sapiens
gagaatatatataag

SEQ ID NO: 24505 - DNA, 15 bp, Homo sapiens
agagaatatatataa

SEQ ID NO: 24506 - DNA, 15 bp, Homo sapiens
aagagaatatatata

SEQ ID NO: 24507 - DNA, 15 bp, Homo sapiens
gaagagaatatatat

SEQ ID NO: 24508 - DNA, 15 bp, Homo sapiens
agaagagaatatata

SEQ ID NO: 24509 - DNA, 15 bp, Homo sapiens
tagaagagaatatat

SEQ ID NO: 24510 - DNA, 15 bp, Homo sapiens
atagaagagaatata

SEQ ID NO: 24511 - DNA, 15 bp, Homo sapiens
gatagaagagaatat

SEQ ID NO: 24512 - DNA, 15 bp, Homo sapiens
ggatagaagagaata

SEQ ID NO: 24513 - DNA, 15 bp, Homo sapiens
aggatagaagagaat

SEQ ID NO: 24514 - DNA, 15 bp, Homo sapiens
gaggatagaagagaa

SEQ ID NO: 24515 - DNA, 15 bp, Homo sapiens
ggaggatagaagaga

SEQ ID NO: 24516 - DNA, 15 bp, Homo sapiens
tggaggatagaagag

SEQ ID NO: 24517 - DNA, 15 bp, Homo sapiens
ttggaggatagaaga

SEQ ID NO: 24518 - DNA, 15 bp, Homo sapiens
tttggaggatagaag

SEQ ID NO: 24519 - DNA, 15 bp, Homo sapiens
ttttggaggatagaa

SEQ ID NO: 24520 - DNA, 15 bp, Homo sapiens
tttttggaggataga

SEQ ID NO: 24521 - DNA, 15 bp, Homo sapiens
atttttggaggatag

SEQ ID NO: 24522 - DNA, 15 bp, Homo sapiens
aatttttggaggata

SEQ ID NO: 24523 - DNA, 15 bp, Homo sapiens
caatttttggaggat

SEQ ID NO: 24524 - DNA, 15 bp, Homo sapiens
gcaatttttggagga

SEQ ID NO: 24525 - DNA, 15 bp, Homo sapiens
agcaatttttggagg

SEQ ID NO: 24526 - DNA, 15 bp, Homo sapiens
cagcaatttttggag

SEQ ID NO: 24527 - DNA, 15 bp, Homo sapiens
acagcaatttttgga

SEQ ID NO: 24528 - DNA, 15 bp, Homo sapiens
cacagcaatttttgg

SEQ ID NO: 24529 - DNA, 15 bp, Homo sapiens
acacagcaatttttg

SEQ ID NO: 24530 - DNA, 15 bp, Homo sapiens
aacacagcaattttt

SEQ ID NO: 24531 - DNA, 15 bp, Homo sapiens
caacacagcaatttt

SEQ ID NO: 24532 - DNA, 15 bp, Homo sapiens
acaacacagcaattt

SEQ ID NO: 24533 - DNA, 15 bp, Homo sapiens
tacaacacagcaatt

SEQ ID NO: 24534 - DNA, 15 bp, Homo sapiens
ctacaacacagcaat

SEQ ID NO: 24535 - DNA, 15 bp, Homo sapiens
cctacaacacagcaa

SEQ ID NO: 24536 - DNA, 15 bp, Homo sapiens
acctacaacacagca

SEQ ID NO: 24537 - DNA, 15 bp, Homo sapiens
gacctacaacacagc

SEQ ID NO: 24538 - DNA, 15 bp, Homo sapiens
agacctacaacacag

SEQ ID NO: 24539 - DNA, 15 bp, Homo sapiens
aagacctacaacaca

SEQ ID NO: 24540 - DNA, 15 bp, Homo sapiens
taagacctacaacac

SEQ ID NO: 24541 - DNA, 15 bp, Homo sapiens
gtaagacctacaaca

SEQ ID NO: 24542 - DNA, 15 bp, Homo sapiens
agtaagacctacaac

SEQ ID NO: 24543 - DNA, 15 bp, Homo sapiens
tagtaagacctacaa

SEQ ID NO: 24544 - DNA, 15 bp, Homo sapiens
atagtaagacctaca

SEQ ID NO: 24545 - DNA, 15 bp, Homo sapiens
gatagtaagacctac

SEQ ID NO: 24546 - DNA, 15 bp, Homo sapiens
tgatagtaagaccta

SEQ ID NO: 24547 - DNA, 15 bp, Homo sapiens
ttgatagtaagacct

SEQ ID NO: 24548 - DNA, 15 bp, Homo sapiens
attgatagtaagacc

SEQ ID NO: 24549 - DNA, 15 bp, Homo sapiens
cattgatagtaagac

SEQ ID NO: 24550 - DNA, 15 bp, Homo sapiens
tcattgatagtaaga

SEQ ID NO: 24551 - DNA, 15 bp, Homo sapiens
gtcattgatagtaag

SEQ ID NO: 24552 - DNA, 15 bp, Homo sapiens
tgtcattgatagtaa

SEQ ID NO: 24553 - DNA, 15 bp, Homo sapiens
gtgtcattgatagta

SEQ ID NO: 24554 - DNA, 15 bp, Homo sapiens
agtgtcattgatagt

SEQ ID NO: 24555 - DNA, 15 bp, Homo sapiens
cagtgtcattgatag

SEQ ID NO: 24556 - DNA, 15 bp, Homo sapiens
tcagtgtcattgata

SEQ ID NO: 24557 - DNA, 15 bp, Homo sapiens
ttcagtgtcattgat

SEQ ID NO: 24558 - DNA, 15 bp, Homo sapiens
tttcagtgtcattga

SEQ ID NO: 24559 - DNA, 15 bp, Homo sapiens
ttttcagtgtcattg

SEQ ID NO: 24560 - DNA, 15 bp, Homo sapiens
tttttcagtgtcatt

SEQ ID NO: 24561 - DNA, 15 bp, Homo sapiens
ctttttcagtgtcat

SEQ ID NO: 24562 - DNA, 15 bp, Homo sapiens
gctttttcagtgtca

SEQ ID NO: 24563 - DNA, 15 bp, Homo sapiens
agctttttcagtgtc

SEQ ID NO: 24564 - DNA, 15 bp, Homo sapiens
tagctttttcagtgt

SEQ ID NO: 24565 - DNA, 15 bp, Homo sapiens
gtagctttttcagtg

SEQ ID NO: 24566 - DNA, 15 bp, Homo sapiens
agtagctttttcagt

SEQ ID NO: 24567 - DNA, 15 bp, Homo sapiens
cagtagctttttcag

SEQ ID NO: 24568 - DNA, 15 bp, Homo sapiens
ccagtagctttttca

SEQ ID NO: 24569 - DNA, 15 bp, Homo sapiens
gccagtagctttttc

SEQ ID NO: 24570 - DNA, 15 bp, Homo sapiens
tgccagtagcttttt

SEQ ID NO: 24571 - DNA, 15 bp, Homo sapiens
ctgccagtagctttt

SEQ ID NO: 24572 - DNA, 15 bp, Homo sapiens
cctgccagtagcttt

SEQ ID NO: 24573 - DNA, 15 bp, Homo sapiens
tcctgccagtagctt

SEQ ID NO: 24574 - DNA, 15 bp, Homo sapiens
atcctgccagtagct

SEQ ID NO: 24575 - DNA, 15 bp, Homo sapiens
catcctgccagtagc

SEQ ID NO: 24576 - DNA, 15 bp, Homo sapiens
gcatcctgccagtag

SEQ ID NO: 24577 - DNA, 15 bp, Homo sapiens
agcatcctgccagta

SEQ ID NO: 24578 - DNA, 15 bp, Homo sapiens
gagcatcctgccagt

SEQ ID NO: 24579 - DNA, 15 bp, Homo sapiens
tgagcatcctgccag

SEQ ID NO: 24580 - DNA, 15 bp, Homo sapiens
atgagcatcctgcca

SEQ ID NO: 24581 - DNA, 15 bp, Homo sapiens
tatgagcatcctgcc

SEQ ID NO: 24582 - DNA, 15 bp, Homo sapiens
atatgagcatcctgc

SEQ ID NO: 24583 - DNA, 15 bp, Homo sapiens
aatatgagcatcctg

SEQ ID NO: 24584 - DNA, 15 bp, Homo sapiens
gaatatgagcatcct

SEQ ID NO: 24585 - DNA, 15 bp, Homo sapiens
agaatatgagcatcc

SEQ ID NO: 24586 - DNA, 15 bp, Homo sapiens
gagaatatgagcatc

SEQ ID NO: 24587 - DNA, 15 bp, Homo sapiens
tgagaatatgagcat

SEQ ID NO: 24588 - DNA, 15 bp, Homo sapiens
atgagaatatgagca

SEQ ID NO: 24589 - DNA, 15 bp, Homo sapiens
gatgagaatatgagc

SEQ ID NO: 24590 - DNA, 15 bp, Homo sapiens
agatgagaatatgag

SEQ ID NO: 24591 - DNA, 15 bp, Homo sapiens
cagatgagaatatga

SEQ ID NO: 24592 - DNA, 15 bp, Homo sapiens
tcagatgagaatatg

SEQ ID NO: 24593 - DNA, 15 bp, Homo sapiens
ttcagatgagaatat

SEQ ID NO: 24594 - DNA, 15 bp, Homo sapiens
attcagatgagaata

SEQ ID NO: 24595 - DNA, 15 bp, Homo sapiens
gattcagatgagaat

SEQ ID NO: 24596 - DNA, 15 bp, Homo sapiens
tgattcagatgagaa

SEQ ID NO: 24597 - DNA, 15 bp, Homo sapiens
ttgattcagatgaga

SEQ ID NO: 24598 - DNA, 15 bp, Homo sapiens
attgattcagatgag

SEQ ID NO: 24599 - DNA, 15 bp, Homo sapiens
tattgattcagatga

SEQ ID NO: 24600 - DNA, 15 bp, Homo sapiens
gtattgattcagatg

SEQ ID NO: 24601 - DNA, 15 bp, Homo sapiens
agtattgattcagat

SEQ ID NO: 24602 - DNA, 15 bp, Homo sapiens
cagtattgattcaga

SEQ ID NO: 24603 - DNA, 15 bp, Homo sapiens
ccagtattgattcag

SEQ ID NO: 24604 - DNA, 15 bp, Homo sapiens
accagtattgattca

SEQ ID NO: 24605 - DNA, 15 bp, Homo sapiens
taccagtattgattc

SEQ ID NO: 24606 - DNA, 15 bp, Homo sapiens
ataccagtattgatt

SEQ ID NO: 24607 - DNA, 15 bp, Homo sapiens
tataccagtattgat

SEQ ID NO: 24608 - DNA, 15 bp, Homo sapiens
gtataccagtattga

SEQ ID NO: 24609 - DNA, 15 bp, Homo sapiens
agtataccagtattg

SEQ ID NO: 24610 - DNA, 15 bp, Homo sapiens
gagtataccagtatt

SEQ ID NO: 24611 - DNA, 15 bp, Homo sapiens
ggagtataccagtat

SEQ ID NO: 24612 - DNA, 15 bp, Homo sapiens
tggagtataccagta

SEQ ID NO: 24613 - DNA, 15 bp, Homo sapiens
atggagtataccagt

SEQ ID NO: 24614 - DNA, 15 bp, Homo sapiens
aatggagtataccag

SEQ ID NO: 24615 - DNA, 15 bp, Homo sapiens
caatggagtatacca

SEQ ID NO: 24616 - DNA, 15 bp, Homo sapiens
ccaatggagtatacc

SEQ ID NO: 24617 - DNA, 15 bp, Homo sapiens
cccaatggagtatac

SEQ ID NO: 24618 - DNA, 15 bp, Homo sapiens
ccccaatggagtata

SEQ ID NO: 24619 - DNA, 15 bp, Homo sapiens
cccccaatggagtat

SEQ ID NO: 24620 - DNA, 15 bp, Homo sapiens
tcccccaatggagta

SEQ ID NO: 24621 - DNA, 15 bp, Homo sapiens
ctcccccaatggagt

SEQ ID NO: 24622 - DNA, 15 bp, Homo sapiens
gctcccccaatggag

SEQ ID NO: 24623 - DNA, 15 bp, Homo sapiens
agctcccccaatgga

SEQ ID NO: 24624 - DNA, 15 bp, Homo sapiens
tagctcccccaatgg

SEQ ID NO: 24625 - DNA, 15 bp, Homo sapiens
ctagctcccccaatg

SEQ ID NO: 24626 - DNA, 15 bp, Homo sapiens
tctagctcccccaat

SEQ ID NO: 24627 - DNA, 15 bp, Homo sapiens
gtctagctcccccaa

SEQ ID NO: 24628 - DNA, 15 bp, Homo sapiens
ggtctagctccccca

SEQ ID NO: 24629 - DNA, 15 bp, Homo sapiens
tggtctagctccccc

SEQ ID NO: 24630 - DNA, 15 bp, Homo sapiens
ttggtctagctcccc

SEQ ID NO: 24631 - DNA, 15 bp, Homo sapiens
cttggtctagctccc

SEQ ID NO: 24632 - DNA, 15 bp, Homo sapiens
gcttggtctagctcc

SEQ ID NO: 24633 - DNA, 15 bp, Homo sapiens
agcttggtctagctc

SEQ ID NO: 24634 - DNA, 15 bp, Homo sapiens
tagcttggtctagct

SEQ ID NO: 24635 - DNA, 15 bp, Homo sapiens
ttagcttggtctagc

SEQ ID NO: 24636 - DNA, 15 bp, Homo sapiens
tttagcttggtctag

SEQ ID NO: 24637 - DNA, 15 bp, Homo sapiens
ttttagcttggtcta

SEQ ID NO: 24638 - DNA, 15 bp, Homo sapiens
attttagcttggtct

SEQ ID NO: 24639 - DNA, 15 bp, Homo sapiens
gattttagcttggtc

SEQ ID NO: 24640 - DNA, 15 bp, Homo sapiens
agattttagcttggt

SEQ ID NO: 24641 - DNA, 15 bp, Homo sapiens
gagattttagcttgg

SEQ ID NO: 24642 - DNA, 15 bp, Homo sapiens
tgagattttagcttg

SEQ ID NO: 24643 - DNA, 15 bp, Homo sapiens
gtgagattttagctt

SEQ ID NO: 24644 - DNA, 15 bp, Homo sapiens
tgtgagattttagct

SEQ ID NO: 24645 - DNA, 15 bp, Homo sapiens
atgtgagattttagc

SEQ ID NO: 24646 - DNA, 15 bp, Homo sapiens
tatgtgagattttag

SEQ ID NO: 24647 - DNA, 15 bp, Homo sapiens
gtatgtgagatttta

SEQ ID NO: 24648 - DNA, 15 bp, Homo sapiens
tgtatgtgagatttt

SEQ ID NO: 24649 - DNA, 15 bp, Homo sapiens
ctgtatgtgagattt

SEQ ID NO: 24650 - DNA, 15 bp, Homo sapiens
tctgtatgtgagatt

SEQ ID NO: 24651 - DNA, 15 bp, Homo sapiens
ttctgtatgtgagat

SEQ ID NO: 24652 - DNA, 15 bp, Homo sapiens
tttctgtatgtgaga

SEQ ID NO: 24653 - DNA, 15 bp, Homo sapiens
atttctgtatgtgag

SEQ ID NO: 24654 - DNA, 15 bp, Homo sapiens
tatttctgtatgtga

SEQ ID NO: 24655 - DNA, 15 bp, Homo sapiens
atatttctgtatgtg

SEQ ID NO: 24656 - DNA, 15 bp, Homo sapiens
aatatttctgtatgt

SEQ ID NO: 24657 - DNA, 15 bp, Homo sapiens
taatatttctgtatg

SEQ ID NO: 24658 - DNA, 15 bp, Homo sapiens
ttaatatttctgtat

SEQ ID NO: 24659 - DNA, 15 bp, Homo sapiens
attaatatttctgta

SEQ ID NO: 24660 - DNA, 15 bp, Homo sapiens
tattaatatttctgt

SEQ ID NO: 24661 - DNA, 15 bp, Homo sapiens
atattaatatttctg

SEQ ID NO: 24662 - DNA, 15 bp, Homo sapiens
catattaatatttct

SEQ ID NO: 24663 - DNA, 15 bp, Homo sapiens
gcatattaatatttc

SEQ ID NO: 24664 - DNA, 15 bp, Homo sapiens
tgcatattaatattt

SEQ ID NO: 24665 - DNA, 15 bp, Homo sapiens
ttgcatattaatatt

SEQ ID NO: 24666 - DNA, 15 bp, Homo sapiens
cttgcatattaatat

SEQ ID NO: 24667 - DNA, 15 bp, Homo sapiens
tcttgcatattaata

SEQ ID NO: 24668 - DNA, 15 bp, Homo sapiens
gtcttgcatattaat

SEQ ID NO: 24669 - DNA, 15 bp, Homo sapiens
ggtcttgcatattaa

SEQ ID NO: 24670 - DNA, 15 bp, Homo sapiens
tggtcttgcatatta

SEQ ID NO: 24671 - DNA, 15 bp, Homo sapiens
ttggtcttgcatatt

SEQ ID NO: 24672 - DNA, 15 bp, Homo sapiens
cttggtcttgcatat

SEQ ID NO: 24673 - DNA, 15 bp, Homo sapiens
ccttggtcttgcata

SEQ ID NO: 24674 - DNA, 15 bp, Homo sapiens
cccttggtcttgcat

SEQ ID NO: 24675 - DNA, 15 bp, Homo sapiens
ccccttggtcttgca

SEQ ID NO: 24676 - DNA, 15 bp, Homo sapiens
accccttggtcttgc

SEQ ID NO: 24677 - DNA, 15 bp, Homo sapiens
taccccttggtcttg

SEQ ID NO: 24678 - DNA, 15 bp, Homo sapiens
ataccccttggtctt

SEQ ID NO: 24679 - DNA, 15 bp, Homo sapiens
tataccccttggtct

SEQ ID NO: 24680 - DNA, 15 bp, Homo sapiens
ttataccccttggtc

SEQ ID NO: 24681 - DNA, 15 bp, Homo sapiens
tttataccccttggt

SEQ ID NO: 24682 - DNA, 15 bp, Homo sapiens
ttttataccccttgg

SEQ ID NO: 24683 - DNA, 15 bp, Homo sapiens
cttttataccccttg

SEQ ID NO: 24684 - DNA, 15 bp, Homo sapiens
acttttatacccctt

SEQ ID NO: 24685 - DNA, 15 bp, Homo sapiens
tacttttatacccct

SEQ ID NO: 24686 - DNA, 15 bp, Homo sapiens
ctacttttatacccc

SEQ ID NO: 24687 - DNA, 15 bp, Homo sapiens
cctacttttataccc

SEQ ID NO: 24688 - DNA, 15 bp, Homo sapiens
gcctacttttatacc

SEQ ID NO: 24689 - DNA, 15 bp, Homo sapiens
agcctacttttatac

SEQ ID NO: 24690 - DNA, 15 bp, Homo sapiens
tagcctacttttata

SEQ ID NO: 24691 - DNA, 15 bp, Homo sapiens
ctagcctacttttat

SEQ ID NO: 24692 - DNA, 15 bp, Homo sapiens
cctagcctactttta

SEQ ID NO: 24693 - DNA, 15 bp, Homo sapiens
acctagcctactttt

SEQ ID NO: 24694 - DNA, 15 bp, Homo sapiens
aacctagcctacttt

SEQ ID NO: 24695 - DNA, 15 bp, Homo sapiens
taacctagcctactt

SEQ ID NO: 24696 - DNA, 15 bp, Homo sapiens
gtaacctagcctact

SEQ ID NO: 24697 - DNA, 15 bp, Homo sapiens
agtaacctagcctac

SEQ ID NO: 24698 - DNA, 15 bp, Homo sapiens
cagtaacctagccta

SEQ ID NO: 24699 - DNA, 15 bp, Homo sapiens
acagtaacctagcct

SEQ ID NO: 24700 - DNA, 15 bp, Homo sapiens
aacagtaacctagcc

SEQ ID NO: 24701 - DNA, 15 bp, Homo sapiens
taacagtaacctagc

SEQ ID NO: 24702 - DNA, 15 bp, Homo sapiens
ttaacagtaacctag

SEQ ID NO: 24703 - DNA, 15 bp, Homo sapiens
attaacagtaaccta

SEQ ID NO: 24704 - DNA, 15 bp, Homo sapiens
aattaacagtaacct

SEQ ID NO: 24705 - DNA, 15 bp, Homo sapiens
aaattaacagtaacc

SEQ ID NO: 24706 - DNA, 15 bp, Homo sapiens
taaattaacagtaac

SEQ ID NO: 24707 - DNA, 15 bp, Homo sapiens
ttaaattaacagtaa

SEQ ID NO: 24708 - DNA, 15 bp, Homo sapiens
attaaattaacagta

SEQ ID NO: 24709 - DNA, 15 bp, Homo sapiens
tattaaattaacagt

SEQ ID NO: 24710 - DNA, 15 bp, Homo sapiens
ctattaaattaacag

SEQ ID NO: 24711 - DNA, 15 bp, Homo sapiens
gctattaaattaaca

SEQ ID NO: 24712 - DNA, 15 bp, Homo sapiens
tgctattaaattaac

SEQ ID NO: 24713 - DNA, 15 bp, Homo sapiens
atgctattaaattaa

SEQ ID NO: 24714 - DNA, 15 bp, Homo sapiens
gatgctattaaatta

SEQ ID NO: 24715 - DNA, 15 bp, Homo sapiens
agatgctattaaatt

SEQ ID NO: 24716 - DNA, 15 bp, Homo sapiens
tagatgctattaaat

SEQ ID NO: 24717 - DNA, 15 bp, Homo sapiens
ctagatgctattaaa

SEQ ID NO: 24718 - DNA, 15 bp, Homo sapiens
cctagatgctattaa

SEQ ID NO: 24719 - DNA, 15 bp, Homo sapiens
acctagatgctatta

SEQ ID NO: 24720 - DNA, 15 bp, Homo sapiens
aacctagatgctatt

SEQ ID NO: 24721 - DNA, 15 bp, Homo sapiens
taacctagatgctat

SEQ ID NO: 24722 - DNA, 15 bp, Homo sapiens
ttaacctagatgcta

SEQ ID NO: 24723 - DNA, 15 bp, Homo sapiens
tttaacctagatgct

SEQ ID NO: 24724 - DNA, 15 bp, Homo sapiens
ttttaacctagatgc

SEQ ID NO: 24725 - DNA, 15 bp, Homo sapiens
attttaacctagatg

SEQ ID NO: 24726 - DNA, 15 bp, Homo sapiens
aattttaacctagat

SEQ ID NO: 24727 - DNA, 15 bp, Homo sapiens
gaattttaacctaga

SEQ ID NO: 24728 - DNA, 15 bp, Homo sapiens
agaattttaacctag

SEQ ID NO: 24729 - DNA, 15 bp, Homo sapiens
gagaattttaaccta

SEQ ID NO: 24730 - DNA, 15 bp, Homo sapiens
agagaattttaacct

SEQ ID NO: 24731 - DNA, 15 bp, Homo sapiens
gagagaattttaacc

SEQ ID NO: 24732 - DNA, 15 bp, Homo sapiens
agagagaattttaac

SEQ ID NO: 24733 - DNA, 15 bp, Homo sapiens
gagagagaattttaa

SEQ ID NO: 24734 - DNA, 15 bp, Homo sapiens
agagagagaatttta

SEQ ID NO: 24735 - DNA, 15 bp, Homo sapiens
aagagagagaatttt

SEQ ID NO: 24736 - DNA, 15 bp, Homo sapiens
aaagagagagaattt

SEQ ID NO: 24737 - DNA, 15 bp, Homo sapiens
gaaagagagagaatt

SEQ ID NO: 24738 - DNA, 15 bp, Homo sapiens
ggaaagagagagaat

SEQ ID NO: 24739 - DNA, 15 bp, Homo sapiens
aggaaagagagagaa

SEQ ID NO: 24740 - DNA, 15 bp, Homo sapiens
gaggaaagagagaga

SEQ ID NO: 24741 - DNA, 15 bp, Homo sapiens
agaggaaagagagag

SEQ ID NO: 24742 - DNA, 15 bp, Homo sapiens
aagaggaaagagaga

SEQ ID NO: 24743 - DNA, 15 bp, Homo sapiens
aaagaggaaagagag

SEQ ID NO: 24744 - DNA, 15 bp, Homo sapiens
gaaagaggaaagaga

SEQ ID NO: 24745 - DNA, 15 bp, Homo sapiens
agaaagaggaaagag

SEQ ID NO: 24746 - DNA, 15 bp, Homo sapiens
aagaaagaggaaaga

SEQ ID NO: 24747 - DNA, 15 bp, Homo sapiens
gaagaaagaggaaag

SEQ ID NO: 24748 - DNA, 15 bp, Homo sapiens
ggaagaaagaggaaa

SEQ ID NO: 24749 - DNA, 15 bp, Homo sapiens
gggaagaaagaggaa

SEQ ID NO: 24750 - DNA, 15 bp, Homo sapiens
agggaagaaagagga

SEQ ID NO: 24751 - DNA, 15 bp, Homo sapiens
aagggaagaaagagg

SEQ ID NO: 24752 - DNA, 15 bp, Homo sapiens
gaagggaagaaagag

SEQ ID NO: 24753 - DNA, 15 bp, Homo sapiens
agaagggaagaaaga

SEQ ID NO: 24754 - DNA, 15 bp, Homo sapiens
aagaagggaagaaag

SEQ ID NO: 24755 - DNA, 15 bp, Homo sapiens
gaagaagggaagaaa

SEQ ID NO: 24756 - DNA, 15 bp, Homo sapiens
agaagaagggaagaa

SEQ ID NO: 24757 - DNA, 15 bp, Homo sapiens
gagaagaagggaaga

SEQ ID NO: 24758 - DNA, 15 bp, Homo sapiens
agagaagaagggaag

SEQ ID NO: 24759 - DNA, 15 bp, Homo sapiens
gagagaagaagggaa

SEQ ID NO: 24760 - DNA, 15 bp, Homo sapiens
ggagagaagaaggga

SEQ ID NO: 24761 - DNA, 15 bp, Homo sapiens
tggagagaagaaggg

SEQ ID NO: 24762 - DNA, 15 bp, Homo sapiens
atggagagaagaagg

SEQ ID NO: 24763 - DNA, 15 bp, Homo sapiens
gatggagagaagaag

SEQ ID NO: 24764 - DNA, 15 bp, Homo sapiens
tgatggagagaagaa

SEQ ID NO: 24765 - DNA, 15 bp, Homo sapiens
gtgatggagagaaga

SEQ ID NO: 24766 - DNA, 15 bp, Homo sapiens
ggtgatggagagaag

SEQ ID NO: 24767 - DNA, 15 bp, Homo sapiens
aggtgatggagagaa

SEQ ID NO: 24768 - DNA, 15 bp, Homo sapiens
aaggtgatggagaga

SEQ ID NO: 24769 - DNA, 15 bp, Homo sapiens
gaaggtgatggagag

SEQ ID NO: 24770 - DNA, 15 bp, Homo sapiens
agaaggtgatggaga

SEQ ID NO: 24771 - DNA, 15 bp, Homo sapiens
tagaaggtgatggag

SEQ ID NO: 24772 - DNA, 15 bp, Homo sapiens
ctagaaggtgatgga

SEQ ID NO: 24773 - DNA, 15 bp, Homo sapiens
actagaaggtgatgg

SEQ ID NO: 24774 - DNA, 15 bp, Homo sapiens
gactagaaggtgatg

SEQ ID NO: 24775 - DNA, 15 bp, Homo sapiens
agactagaaggtgat

SEQ ID NO: 24776 - DNA, 15 bp, Homo sapiens
aagactagaaggtga

SEQ ID NO: 24777 - DNA, 15 bp, Homo sapiens
gaagactagaaggtg

SEQ ID NO: 24778 - DNA, 15 bp, Homo sapiens
agaagactagaaggt

SEQ ID NO: 24779 - DNA, 15 bp, Homo sapiens
cagaagactagaagg

SEQ ID NO: 24780 - DNA, 15 bp, Homo sapiens
tcagaagactagaag

SEQ ID NO: 24781 - DNA, 15 bp, Homo sapiens
gtcagaagactagaa

SEQ ID NO: 24782 - DNA, 15 bp, Homo sapiens
agtcagaagactaga

SEQ ID NO: 24783 - DNA, 15 bp, Homo sapiens
cagtcagaagactag

SEQ ID NO: 24784 - DNA, 15 bp, Homo sapiens
tcagtcagaagacta

SEQ ID NO: 24785 - DNA, 15 bp, Homo sapiens
atcagtcagaagact

SEQ ID NO: 24786 - DNA, 15 bp, Homo sapiens
aatcagtcagaagac

SEQ ID NO: 24787 - DNA, 15 bp, Homo sapiens
gaatcagtcagaaga

SEQ ID NO: 24788 - DNA, 15 bp, Homo sapiens
ggaatcagtcagaag

SEQ ID NO: 24789 - DNA, 15 bp, Homo sapiens
tggaatcagtcagaa

SEQ ID NO: 24790 - DNA, 15 bp, Homo sapiens
ttggaatcagtcaga

SEQ ID NO: 24791 - DNA, 15 bp, Homo sapiens
tttggaatcagtcag

SEQ ID NO: 24792 - DNA, 15 bp, Homo sapiens
gtttggaatcagtca

SEQ ID NO: 24793 - DNA, 15 bp, Homo sapiens
tgtttggaatcagtc

SEQ ID NO: 24794 - DNA, 15 bp, Homo sapiens
ctgtttggaatcagt

SEQ ID NO: 24795 - DNA, 15 bp, Homo sapiens
cctgtttggaatcag

SEQ ID NO: 24796 - DNA, 15 bp, Homo sapiens
tcctgtttggaatca

SEQ ID NO: 24797 - DNA, 15 bp, Homo sapiens
gtcctgtttggaatc

SEQ ID NO: 24798 - DNA, 15 bp, Homo sapiens
tgtcctgtttggaat

SEQ ID NO: 24799 - DNA, 15 bp, Homo sapiens
ttgtcctgtttggaa

SEQ ID NO: 24800 - DNA, 15 bp, Homo sapiens
attgtcctgtttgga

SEQ ID NO: 24801 - DNA, 15 bp, Homo sapiens
aattgtcctgtttgg

SEQ ID NO: 24802 - DNA, 15 bp, Homo sapiens
caattgtcctgtttg

SEQ ID NO: 24803 - DNA, 15 bp, Homo sapiens
tcaattgtcctgttt

SEQ ID NO: 24804 - DNA, 15 bp, Homo sapiens
ttcaattgtcctgtt

SEQ ID NO: 24805 - DNA, 15 bp, Homo sapiens
tttcaattgtcctgt

SEQ ID NO: 24806 - DNA, 15 bp, Homo sapiens
atttcaattgtcctg

SEQ ID NO: 24807 - DNA, 15 bp, Homo sapiens
catttcaattgtcct

SEQ ID NO: 24808 - DNA, 15 bp, Homo sapiens
acatttcaattgtcc

SEQ ID NO: 24809 - DNA, 15 bp, Homo sapiens
gacatttcaattgtc

SEQ ID NO: 24810 - DNA, 15 bp, Homo sapiens
agacatttcaattgt

SEQ ID NO: 24811 - DNA, 15 bp, Homo sapiens
aagacatttcaattg

SEQ ID NO: 24812 - DNA, 15 bp, Homo sapiens
caagacatttcaatt

SEQ ID NO: 24813 - DNA, 15 bp, Homo sapiens
gcaagacatttcaat

SEQ ID NO: 24814 - DNA, 15 bp, Homo sapiens
ggcaagacatttcaa

SEQ ID NO: 24815 - DNA, 15 bp, Homo sapiens
aggcaagacatttca

SEQ ID NO: 24816 - DNA, 15 bp, Homo sapiens
aaggcaagacatttc

SEQ ID NO: 24817 - DNA, 15 bp, Homo sapiens
gaaggcaagacattt

SEQ ID NO: 24818 - DNA, 15 bp, Homo sapiens
tgaaggcaagacatt

SEQ ID NO: 24819 - DNA, 15 bp, Homo sapiens
atgaaggcaagacat

SEQ ID NO: 24820 - DNA, 15 bp, Homo sapiens
catgaaggcaagaca

SEQ ID NO: 24821 - DNA, 15 bp, Homo sapiens
gcatgaaggcaagac

SEQ ID NO: 24822 - DNA, 15 bp, Homo sapiens
agcatgaaggcaaga

SEQ ID NO: 24823 - DNA, 15 bp, Homo sapiens
cagcatgaaggcaag

SEQ ID NO: 24824 - DNA, 15 bp, Homo sapiens
tcagcatgaaggcaa

SEQ ID NO: 24825 - DNA, 15 bp, Homo sapiens
ttcagcatgaaggca

SEQ ID NO: 24826 - DNA, 15 bp, Homo sapiens
cttcagcatgaaggc

SEQ ID NO: 24827 - DNA, 15 bp, Homo sapiens
tcttcagcatgaagg

SEQ ID NO: 24828 - DNA, 15 bp, Homo sapiens
ctcttcagcatgaag

SEQ ID NO: 24829 - DNA, 15 bp, Homo sapiens
gctcttcagcatgaa

SEQ ID NO: 24830 - DNA, 15 bp, Homo sapiens
agctcttcagcatga

SEQ ID NO: 24831 - DNA, 15 bp, Homo sapiens
gagctcttcagcatg

SEQ ID NO: 24832 - DNA, 15 bp, Homo sapiens
agagctcttcagcat

SEQ ID NO: 24833 - DNA, 15 bp, Homo sapiens
aagagctcttcagca

SEQ ID NO: 24834 - DNA, 15 bp, Homo sapiens
aaagagctcttcagc

SEQ ID NO: 24835 - DNA, 15 bp, Homo sapiens
caaagagctcttcag

SEQ ID NO: 24836 - DNA, 15 bp, Homo sapiens
acaaagagctcttca

SEQ ID NO: 24837 - DNA, 15 bp, Homo sapiens
tacaaagagctcttc

SEQ ID NO: 24838 - DNA, 15 bp, Homo sapiens
ttacaaagagctctt

SEQ ID NO: 24839 - DNA, 15 bp, Homo sapiens
tttacaaagagctct

SEQ ID NO: 24840 - DNA, 15 bp, Homo sapiens
atttacaaagagctc

SEQ ID NO: 24841 - DNA, 15 bp, Homo sapiens
tatttacaaagagct

SEQ ID NO: 24842 - DNA, 15 bp, Homo sapiens
gtatttacaaagagc

SEQ ID NO: 24843 - DNA, 15 bp, Homo sapiens
tgtatttacaaagag

SEQ ID NO: 24844 - DNA, 15 bp, Homo sapiens
gtgtatttacaaaga

SEQ ID NO: 24845 - DNA, 15 bp, Homo sapiens
tgtgtatttacaaag

SEQ ID NO: 24846 - DNA, 15 bp, Homo sapiens
atgtgtatttacaaa

SEQ ID NO: 24847 - DNA, 15 bp, Homo sapiens
tatgtgtatttacaa

SEQ ID NO: 24848 - DNA, 15 bp, Homo sapiens
ttatgtgtatttaca

SEQ ID NO: 24849 - DNA, 15 bp, Homo sapiens
tttatgtgtatttac

SEQ ID NO: 24850 - DNA, 15 bp, Homo sapiens
gtttatgtgtattta

SEQ ID NO: 24851 - DNA, 15 bp, Homo sapiens
tgtttatgtgtattt

SEQ ID NO: 24852 - DNA, 15 bp, Homo sapiens
ctgtttatgtgtatt

SEQ ID NO: 24853 - DNA, 15 bp, Homo sapiens
actgtttatgtgtat

SEQ ID NO: 24854 - DNA, 15 bp, Homo sapiens
cactgtttatgtgta

SEQ ID NO: 24855 - DNA, 15 bp, Homo sapiens
tcactgtttatgtgt

SEQ ID NO: 24856 - DNA, 15 bp, Homo sapiens
ttcactgtttatgtg

SEQ ID NO: 24857 - DNA, 15 bp, Homo sapiens
attcactgtttatgt

SEQ ID NO: 24858 - DNA, 15 bp, Homo sapiens
tattcactgtttatg

SEQ ID NO: 24859 - DNA, 15 bp, Homo sapiens
atattcactgtttat

SEQ ID NO: 24860 - DNA, 15 bp, Homo sapiens
gatattcactgttta

SEQ ID NO: 24861 - DNA, 15 bp, Homo sapiens
tgatattcactgttt

SEQ ID NO: 24862 - DNA, 15 bp, Homo sapiens
ctgatattcactgtt

SEQ ID NO: 24863 - DNA, 15 bp, Homo sapiens
cctgatattcactgt

SEQ ID NO: 24864 - DNA, 15 bp, Homo sapiens
acctgatattcactg

SEQ ID NO: 24865 - DNA, 15 bp, Homo sapiens
cacctgatattcact

SEQ ID NO: 24866 - DNA, 15 bp, Homo sapiens
gcacctgatattcac

SEQ ID NO: 24867 - DNA, 15 bp, Homo sapiens
tgcacctgatattca

SEQ ID NO: 24868 - DNA, 15 bp, Homo sapiens
gtgcacctgatattc

SEQ ID NO: 24869 - DNA, 15 bp, Homo sapiens
ggtgcacctgatatt

SEQ ID NO: 24870 - DNA, 15 bp, Homo sapiens
tggtgcacctgatat

SEQ ID NO: 24871 - DNA, 15 bp, Homo sapiens
atggtgcacctgata

SEQ ID NO: 24872 - DNA, 15 bp, Homo sapiens
aatggtgcacctgat

SEQ ID NO: 24873 - DNA, 15 bp, Homo sapiens
aaatggtgcacctga

SEQ ID NO: 24874 - DNA, 15 bp, Homo sapiens
aaaatggtgcacctg

SEQ ID NO: 24875 - DNA, 15 bp, Homo sapiens
aaaaatggtgcacct

SEQ ID NO: 24876 - DNA, 15 bp, Homo sapiens
taaaaatggtgcacc

SEQ ID NO: 24877 - DNA, 15 bp, Homo sapiens
ttaaaaatggtgcac

SEQ ID NO: 24878 - DNA, 15 bp, Homo sapiens
tttaaaaatggtgca

SEQ ID NO: 24879 - DNA, 15 bp, Homo sapiens
ctttaaaaatggtgc

SEQ ID NO: 24880 - DNA, 15 bp, Homo sapiens
actttaaaaatggtg

SEQ ID NO: 24881 - DNA, 15 bp, Homo sapiens
cactttaaaaatggt

SEQ ID NO: 24882 - DNA, 15 bp, Homo sapiens
gcactttaaaaatgg

SEQ ID NO: 24883 - DNA, 15 bp, Homo sapiens
agcactttaaaaatg

SEQ ID NO: 24884 - DNA, 15 bp, Homo sapiens
tagcactttaaaaat

SEQ ID NO: 24885 - DNA, 15 bp, Homo sapiens
atagcactttaaaaa

SEQ ID NO: 24886 - DNA, 15 bp, Homo sapiens
aatagcactttaaaa

SEQ ID NO: 24887 - DNA, 15 bp, Homo sapiens
gaatagcactttaaa

SEQ ID NO: 24888 - DNA, 15 bp, Homo sapiens
tgaatagcactttaa

SEQ ID NO: 24889 - DNA, 15 bp, Homo sapiens
atgaatagcacttta

SEQ ID NO: 24890 - DNA, 15 bp, Homo sapiens
aatgaatagcacttt

SEQ ID NO: 24891 - DNA, 15 bp, Homo sapiens
aaatgaatagcactt

SEQ ID NO: 24892 - DNA, 15 bp, Homo sapiens
gaaatgaatagcact

SEQ ID NO: 24893 - DNA, 15 bp, Homo sapiens
ggaaatgaatagcac

SEQ ID NO: 24894 - DNA, 15 bp, Homo sapiens
tggaaatgaatagca

SEQ ID NO: 24895 - DNA, 15 bp, Homo sapiens
gtggaaatgaatagc

SEQ ID NO: 24896 - DNA, 15 bp, Homo sapiens
tgtggaaatgaatag

SEQ ID NO: 24897 - DNA, 15 bp, Homo sapiens
ttgtggaaatgaata

SEQ ID NO: 24898 - DNA, 15 bp, Homo sapiens
gttgtggaaatgaat

SEQ ID NO: 24899 - DNA, 15 bp, Homo sapiens
tgttgtggaaatgaa

SEQ ID NO: 24900 - DNA, 15 bp, Homo sapiens
ctgttgtggaaatga

SEQ ID NO: 24901 - DNA, 15 bp, Homo sapiens
actgttgtggaaatg

SEQ ID NO: 24902 - DNA, 15 bp, Homo sapiens
aactgttgtggaaat

SEQ ID NO: 24903 - DNA, 15 bp, Homo sapiens
aaactgttgtggaaa

SEQ ID NO: 24904 - DNA, 15 bp, Homo sapiens
taaactgttgtggaa

SEQ ID NO: 24905 - DNA, 15 bp, Homo sapiens
ctaaactgttgtgga

SEQ ID NO: 24906 - DNA, 15 bp, Homo sapiens
cctaaactgttgtgg

SEQ ID NO: 24907 - DNA, 15 bp, Homo sapiens
acctaaactgttgtg

SEQ ID NO: 24908 - DNA, 15 bp, Homo sapiens
cacctaaactgttgt

SEQ ID NO: 24909 - DNA, 15 bp, Homo sapiens
tcacctaaactgttg

SEQ ID NO: 24910 - DNA, 15 bp, Homo sapiens
ttcacctaaactgtt

SEQ ID NO: 24911 - DNA, 15 bp, Homo sapiens
tttcacctaaactgt

SEQ ID NO: 24912 - DNA, 15 bp, Homo sapiens
gtttcacctaaactg

SEQ ID NO: 24913 - DNA, 15 bp, Homo sapiens
ggtttcacctaaact

SEQ ID NO: 24914 - DNA, 15 bp, Homo sapiens
tggtttcacctaaac

SEQ ID NO: 24915 - DNA, 15 bp, Homo sapiens
atggtttcacctaaa

SEQ ID NO: 24916 - DNA, 15 bp, Homo sapiens
catggtttcacctaa

SEQ ID NO: 24917 - DNA, 15 bp, Homo sapiens
acatggtttcaccta

SEQ ID NO: 24918 - DNA, 15 bp, Homo sapiens
gacatggtttcacct

SEQ ID NO: 24919 - DNA, 15 bp, Homo sapiens
tgacatggtttcacc

SEQ ID NO: 24920 - DNA, 15 bp, Homo sapiens
atgacatggtttcac

SEQ ID NO: 24921 - DNA, 15 bp, Homo sapiens
gatgacatggtttca

SEQ ID NO: 24922 - DNA, 15 bp, Homo sapiens
agatgacatggtttc

SEQ ID NO: 24923 - DNA, 15 bp, Homo sapiens
aagatgacatggttt

SEQ ID NO: 24924 - DNA, 15 bp, Homo sapiens
taagatgacatggtt

SEQ ID NO: 24925 - DNA, 15 bp, Homo sapiens
gtaagatgacatggt

SEQ ID NO: 24926 - DNA, 15 bp, Homo sapiens
tgtaagatgacatgg

SEQ ID NO: 24927 - DNA, 15 bp, Homo sapiens
ttgtaagatgacatg

SEQ ID NO: 24928 - DNA, 15 bp, Homo sapiens
cttgtaagatgacat

SEQ ID NO: 24929 - DNA, 15 bp, Homo sapiens
acttgtaagatgaca

SEQ ID NO: 24930 - DNA, 15 bp, Homo sapiens
aacttgtaagatgac

SEQ ID NO: 24931 - DNA, 15 bp, Homo sapiens
caacttgtaagatga

SEQ ID NO: 24932 - DNA, 15 bp, Homo sapiens
tcaacttgtaagatg

SEQ ID NO: 24933 - DNA, 15 bp, Homo sapiens
ctcaacttgtaagat

SEQ ID NO: 24934 - DNA, 15 bp, Homo sapiens
actcaacttgtaaga

SEQ ID NO: 24935 - DNA, 15 bp, Homo sapiens
cactcaacttgtaag

SEQ ID NO: 24936 - DNA, 15 bp, Homo sapiens
acactcaacttgtaa

SEQ ID NO: 24937 - DNA, 15 bp, Homo sapiens
cacactcaacttgta

SEQ ID NO: 24938 - DNA, 15 bp, Homo sapiens
acacactcaacttgt

SEQ ID NO: 24939 - DNA, 15 bp, Homo sapiens
cacacactcaacttg

SEQ ID NO: 24940 - DNA, 15 bp, Homo sapiens
acacacactcaactt

SEQ ID NO: 24941 - DNA, 15 bp, Homo sapiens
cacacacactcaact

SEQ ID NO: 24942 - DNA, 15 bp, Homo sapiens
acacacacactcaac

SEQ ID NO: 24943 - DNA, 15 bp, Homo sapiens
cacacacacactcaa

SEQ ID NO: 24944 - DNA, 15 bp, Homo sapiens
acacacacacactca

SEQ ID NO: 24945 - DNA, 15 bp, Homo sapiens
ctacacacacacaca

SEQ ID NO: 24946 - DNA, 15 bp, Homo sapiens
tctacacacacacac

SEQ ID NO: 24947 - DNA, 15 bp, Homo sapiens
ctctacacacacaca

SEQ ID NO: 24948 - DNA, 15 bp, Homo sapiens
cctctacacacacac

SEQ ID NO: 24949 - DNA, 15 bp, Homo sapiens
tcctctacacacaca

SEQ ID NO: 24950 - DNA, 15 bp, Homo sapiens
atcctctacacacac

SEQ ID NO: 24951 - DNA, 15 bp, Homo sapiens
catcctctacacaca

SEQ ID NO: 24952 - DNA, 15 bp, Homo sapiens
tcatcctctacacac

SEQ ID NO: 24953 - DNA, 15 bp, Homo sapiens
gtcatcctctacaca

SEQ ID NO: 24954 - DNA, 15 bp, Homo sapiens
cgtcatcctctacac

SEQ ID NO: 24955 - DNA, 15 bp, Homo sapiens
acgtcatcctctaca

SEQ ID NO: 24956 - DNA, 15 bp, Homo sapiens
cacgtcatcctctac

SEQ ID NO: 24957 - DNA, 15 bp, Homo sapiens
tcacgtcatcctcta

SEQ ID NO: 24958 - DNA, 15 bp, Homo sapiens
gtcacgtcatcctct

SEQ ID NO: 24959 - DNA, 15 bp, Homo sapiens
tgtcacgtcatcctc

SEQ ID NO: 24960 - DNA, 15 bp, Homo sapiens
gtgtcacgtcatcct

SEQ ID NO: 24961 - DNA, 15 bp, Homo sapiens
agtgtcacgtcatcc

SEQ ID NO: 24962 - DNA, 15 bp, Homo sapiens
aagtgtcacgtcatc

SEQ ID NO: 24963 - DNA, 15 bp, Homo sapiens
aaagtgtcacgtcat

SEQ ID NO: 24964 - DNA, 15 bp, Homo sapiens
aaaagtgtcacgtca

SEQ ID NO: 24965 - DNA, 15 bp, Homo sapiens
caaaagtgtcacgtc

SEQ ID NO: 24966 - DNA, 15 bp, Homo sapiens
tcaaaagtgtcacgt

SEQ ID NO: 24967 - DNA, 15 bp, Homo sapiens
ctcaaaagtgtcacg

SEQ ID NO: 24968 - DNA, 15 bp, Homo sapiens
cctcaaaagtgtcac

SEQ ID NO: 24969 - DNA, 15 bp, Homo sapiens
acctcaaaagtgtca

SEQ ID NO: 24970 - DNA, 15 bp, Homo sapiens
aacctcaaaagtgtc

SEQ ID NO: 24971 - DNA, 15 bp, Homo sapiens
aaacctcaaaagtgt

SEQ ID NO: 24972 - DNA, 15 bp, Homo sapiens
taaacctcaaaagtg

SEQ ID NO: 24973 - DNA, 15 bp, Homo sapiens
ataaacctcaaaagt

SEQ ID NO: 24974 - DNA, 15 bp, Homo sapiens
aataaacctcaaaag

SEQ ID NO: 24975 - DNA, 15 bp, Homo sapiens
aaataaacctcaaaa

SEQ ID NO: 24976 - DNA, 15 bp, Homo sapiens
taaataaacctcaaa

SEQ ID NO: 24977 - DNA, 15 bp, Homo sapiens
ttaaataaacctcaa

SEQ ID NO: 24978 - DNA, 15 bp, Homo sapiens
cttaaataaacctca

SEQ ID NO: 24979 - DNA, 15 bp, Homo sapiens
acttaaataaacctc

SEQ ID NO: 24980 - DNA, 15 bp, Homo sapiens
aacttaaataaacct

SEQ ID NO: 24981 - DNA, 15 bp, Homo sapiens
caacttaaataaacc

SEQ ID NO: 24982 - DNA, 15 bp, Homo sapiens
acaacttaaataaac

SEQ ID NO: 24983 - DNA, 15 bp, Homo sapiens
aacaacttaaataaa

SEQ ID NO: 24984 - DNA, 15 bp, Homo sapiens
taacaacttaaataa

SEQ ID NO: 24985 - DNA, 15 bp, Homo sapiens
ttaacaacttaaata

SEQ ID NO: 24986 - DNA, 15 bp, Homo sapiens
tttaacaacttaaat

SEQ ID NO: 24987 - DNA, 15 bp, Homo sapiens
ctttaacaacttaaa

SEQ ID NO: 24988 - DNA, 15 bp, Homo sapiens
tctttaacaacttaa

SEQ ID NO: 24989 - DNA, 15 bp, Homo sapiens
gtctttaacaactta

SEQ ID NO: 24990 - DNA, 15 bp, Homo sapiens
ggtctttaacaactt

SEQ ID NO: 24991 - DNA, 15 bp, Homo sapiens
aggtctttaacaact

SEQ ID NO: 24992 - DNA, 15 bp, Homo sapiens
gaggtctttaacaac

SEQ ID NO: 24993 - DNA, 15 bp, Homo sapiens
tgaggtctttaacaa

SEQ ID NO: 24994 - DNA, 15 bp, Homo sapiens
ttgaggtctttaaca

SEQ ID NO: 24995 - DNA, 15 bp, Homo sapiens
cttgaggtctttaac

SEQ ID NO: 24996 - DNA, 15 bp, Homo sapiens
ccttgaggtctttaa

SEQ ID NO: 24997 - DNA, 15 bp, Homo sapiens
accttgaggtcttta

SEQ ID NO: 24998 - DNA, 15 bp, Homo sapiens
aaccttgaggtcttt

SEQ ID NO: 24999 - DNA, 15 bp, Homo sapiens
taaccttgaggtctt

SEQ ID NO: 25000 - DNA, 15 bp, Homo sapiens
gtaaccttgaggtct

SEQ ID NO: 25001 - DNA, 15 bp, Homo sapiens
tgtaaccttgaggtc

SEQ ID NO: 25002 - DNA, 15 bp, Homo sapiens
ttgtaaccttgaggt

SEQ ID NO: 25003 - DNA, 15 bp, Homo sapiens
cttgtaaccttgagg

SEQ ID NO: 25004 - DNA, 15 bp, Homo sapiens
tcttgtaaccttgag

SEQ ID NO: 25005 - DNA, 15 bp, Homo sapiens
gtcttgtaaccttga

SEQ ID NO: 25006 - DNA, 15 bp, Homo sapiens
agtcttgtaaccttg

SEQ ID NO: 25007 - DNA, 15 bp, Homo sapiens
aagtcttgtaacctt

SEQ ID NO: 25008 - DNA, 15 bp, Homo sapiens
taagtcttgtaacct

SEQ ID NO: 25009 - DNA, 15 bp, Homo sapiens
ctaagtcttgtaacc

SEQ ID NO: 25010 - DNA, 15 bp, Homo sapiens
tctaagtcttgtaac

SEQ ID NO: 25011 - DNA, 15 bp, Homo sapiens
gtctaagtcttgtaa

SEQ ID NO: 25012 - DNA, 15 bp, Homo sapiens
agtctaagtcttgta

SEQ ID NO: 25013 - DNA, 15 bp, Homo sapiens
cagtctaagtcttgt

SEQ ID NO: 25014 - DNA, 15 bp, Homo sapiens
acagtctaagtcttg

SEQ ID NO: 25015 - DNA, 15 bp, Homo sapiens
aacagtctaagtctt

SEQ ID NO: 25016 - DNA, 15 bp, Homo sapiens
taacagtctaagtct

SEQ ID NO: 25017 - DNA, 15 bp, Homo sapiens
ttaacagtctaagtc

SEQ ID NO: 25018 - DNA, 15 bp, Homo sapiens
cttaacagtctaagt

SEQ ID NO: 25019 - DNA, 15 bp, Homo sapiens
gcttaacagtctaag

SEQ ID NO: 25020 - DNA, 15 bp, Homo sapiens
tgcttaacagtctaa

SEQ ID NO: 25021 - DNA, 15 bp, Homo sapiens
atgcttaacagtcta

SEQ ID NO: 25022 - DNA, 15 bp, Homo sapiens
aatgcttaacagtct

SEQ ID NO: 25023 - DNA, 15 bp, Homo sapiens
aaatgcttaacagtc

SEQ ID NO: 25024 - DNA, 15 bp, Homo sapiens
aaaatgcttaacagt

SEQ ID NO: 25025 - DNA, 15 bp, Homo sapiens
aaaaatgcttaacag

SEQ ID NO: 25026 - DNA, 15 bp, Homo sapiens
gaaaaatgcttaaca

SEQ ID NO: 25027 - DNA, 15 bp, Homo sapiens
ggaaaaatgcttaac

SEQ ID NO: 25028 - DNA, 15 bp, Homo sapiens
aggaaaaatgcttaa

SEQ ID NO: 25029 - DNA, 15 bp, Homo sapiens
gaggaaaaatgctta

SEQ ID NO: 25030 - DNA, 15 bp, Homo sapiens
ggaggaaaaatgctt

SEQ ID NO: 25031 - DNA, 15 bp, Homo sapiens
gggaggaaaaatgct

SEQ ID NO: 25032 - DNA, 15 bp, Homo sapiens
tgggaggaaaaatgc

SEQ ID NO: 25033 - DNA, 15 bp, Homo sapiens
ctgggaggaaaaatg

SEQ ID NO: 25034 - DNA, 15 bp, Homo sapiens
tctgggaggaaaaat

SEQ ID NO: 25035 - DNA, 15 bp, Homo sapiens
ctctgggaggaaaaa

SEQ ID NO: 25036 - DNA, 15 bp, Homo sapiens
tctctgggaggaaaa

SEQ ID NO: 25037 - DNA, 15 bp, Homo sapiens
gtctctgggaggaaa

SEQ ID NO: 25038 - DNA, 15 bp, Homo sapiens
tgtctctgggaggaa

SEQ ID NO: 25039 - DNA, 15 bp, Homo sapiens
gtgtctctgggagga

SEQ ID NO: 25040 - DNA, 15 bp, Homo sapiens
cgtgtctctgggagg

SEQ ID NO: 25041 - DNA, 15 bp, Homo sapiens
tcgtgtctctgggag

SEQ ID NO: 25042 - DNA, 15 bp, Homo sapiens
ttcgtgtctctggga

SEQ ID NO: 25043 - DNA, 15 bp, Homo sapiens
tttcgtgtctctggg

SEQ ID NO: 25044 - DNA, 15 bp, Homo sapiens
atttcgtgtctctgg

SEQ ID NO: 25045 - DNA, 15 bp, Homo sapiens
gatttcgtgtctctg

SEQ ID NO: 25046 - DNA, 15 bp, Homo sapiens
agatttcgtgtctct

SEQ ID NO: 25047 - DNA, 15 bp, Homo sapiens
tagatttcgtgtctc

SEQ ID NO: 25048 - DNA, 15 bp, Homo sapiens
gtagatttcgtgtct

SEQ ID NO: 25049 - DNA, 15 bp, Homo sapiens
tgtagatttcgtgtc

SEQ ID NO: 25050 - DNA, 15 bp, Homo sapiens
ttgtagatttcgtgt

SEQ ID NO: 25051 - DNA, 15 bp, Homo sapiens
attgtagatttcgtg

SEQ ID NO: 25052 - DNA, 15 bp, Homo sapiens
aattgtagatttcgt

SEQ ID NO: 25053 - DNA, 15 bp, Homo sapiens
aaattgtagatttcg

SEQ ID NO: 25054 - DNA, 15 bp, Homo sapiens
aaaattgtagatttc

SEQ ID NO: 25055 - DNA, 15 bp, Homo sapiens
gaaaattgtagattt

SEQ ID NO: 25056 - DNA, 15 bp, Homo sapiens
agaaaattgtagatt

SEQ ID NO: 25057 - DNA, 15 bp, Homo sapiens
gagaaaattgtagat

SEQ ID NO: 25058 - DNA, 15 bp, Homo sapiens
cgagaaaattgtaga

SEQ ID NO: 25059 - DNA, 15 bp, Homo sapiens
tcgagaaaattgtag

SEQ ID NO: 25060 - DNA, 15 bp, Homo sapiens
atcgagaaaattgta

SEQ ID NO: 25061 - DNA, 15 bp, Homo sapiens
aatcgagaaaattgt

SEQ ID NO: 25062 - DNA, 15 bp, Homo sapiens
gaatcgagaaaattg

SEQ ID NO: 25063 - DNA, 15 bp, Homo sapiens
tgaatcgagaaaatt

SEQ ID NO: 25064 - DNA, 15 bp, Homo sapiens
ttgaatcgagaaaat

SEQ ID NO: 25065 - DNA, 15 bp, Homo sapiens
gttgaatcgagaaaa

SEQ ID NO: 25066 - DNA, 15 bp, Homo sapiens
agttgaatcgagaaa

SEQ ID NO: 25067 - DNA, 15 bp, Homo sapiens
cagttgaatcgagaa

SEQ ID NO: 25068 - DNA, 15 bp, Homo sapiens
acagttgaatcgaga

SEQ ID NO: 25069 - DNA, 15 bp, Homo sapiens
gacagttgaatcgag

SEQ ID NO: 25070 - DNA, 15 bp, Homo sapiens
tgacagttgaatcga

SEQ ID NO: 25071 - DNA, 15 bp, Homo sapiens
ttgacagttgaatcg

SEQ ID NO: 25072 - DNA, 15 bp, Homo sapiens
gttgacagttgaatc

SEQ ID NO: 25073 - DNA, 15 bp, Homo sapiens
agttgacagttgaat

SEQ ID NO: 25074 - DNA, 15 bp, Homo sapiens
tagttgacagttgaa

SEQ ID NO: 25075 - DNA, 15 bp, Homo sapiens
ttagttgacagttga

SEQ ID NO: 25076 - DNA, 15 bp, Homo sapiens
tttagttgacagttg

SEQ ID NO: 25077 - DNA, 15 bp, Homo sapiens
atttagttgacagtt

SEQ ID NO: 25078 - DNA, 15 bp, Homo sapiens
aatttagttgacagt

SEQ ID NO: 25079 - DNA, 15 bp, Homo sapiens
caatttagttgacag

SEQ ID NO: 25080 - DNA, 15 bp, Homo sapiens
ccaatttagttgaca

SEQ ID NO: 25081 - DNA, 15 bp, Homo sapiens
gccaatttagttgac

SEQ ID NO: 25082 - DNA, 15 bp, Homo sapiens
tgccaatttagttga

SEQ ID NO: 25083 - DNA, 15 bp, Homo sapiens
ttgccaatttagttg

SEQ ID NO: 25084 - DNA, 15 bp, Homo sapiens
cttgccaatttagtt

SEQ ID NO: 25085 - DNA, 15 bp, Homo sapiens
acttgccaatttagt

SEQ ID NO: 25086 - DNA, 15 bp, Homo sapiens
gacttgccaatttag

SEQ ID NO: 25087 - DNA, 15 bp, Homo sapiens
tgacttgccaattta

SEQ ID NO: 25088 - DNA, 15 bp, Homo sapiens
ttgacttgccaattt

SEQ ID NO: 25089 - DNA, 15 bp, Homo sapiens
gttgacttgccaatt

SEQ ID NO: 25090 - DNA, 15 bp, Homo sapiens
agttgacttgccaat

SEQ ID NO: 25091 - DNA, 15 bp, Homo sapiens
tagttgacttgccaa

SEQ ID NO: 25092 - DNA, 15 bp, Homo sapiens
ttagttgacttgcca

SEQ ID NO: 25093 - DNA, 15 bp, Homo sapiens
tttagttgacttgcc

SEQ ID NO: 25094 - DNA, 15 bp, Homo sapiens
ttttagttgacttgc

SEQ ID NO: 25095 - DNA, 15 bp, Homo sapiens
cttttagttgacttg

SEQ ID NO: 25096 - DNA, 15 bp, Homo sapiens
ccttttagttgactt

SEQ ID NO: 25097 - DNA, 15 bp, Homo sapiens
tccttttagttgact

SEQ ID NO: 25098 - DNA, 15 bp, Homo sapiens
atccttttagttgac

SEQ ID NO: 25099 - DNA, 15 bp, Homo sapiens
tatccttttagttga

SEQ ID NO: 25100 - DNA, 15 bp, Homo sapiens
ttatccttttagttg

SEQ ID NO: 25101 - DNA, 15 bp, Homo sapiens
attatccttttagtt

SEQ ID NO: 25102 - DNA, 15 bp, Homo sapiens
tattatccttttagt

SEQ ID NO: 25103 - DNA, 15 bp, Homo sapiens
atattatccttttag

SEQ ID NO: 25104 - DNA, 15 bp, Homo sapiens
aatattatcctttta

SEQ ID NO: 25105 - DNA, 15 bp, Homo sapiens
gaatattatcctttt

SEQ ID NO: 25106 - DNA, 15 bp, Homo sapiens
ggaatattatccttt

SEQ ID NO: 25107 - DNA, 15 bp, Homo sapiens
gggaatattatcctt

SEQ ID NO: 25108 - DNA, 15 bp, Homo sapiens
agggaatattatcct

SEQ ID NO: 25109 - DNA, 15 bp, Homo sapiens
aagggaatattatcc

SEQ ID NO: 25110 - DNA, 15 bp, Homo sapiens
taagggaatattatc

SEQ ID NO: 25111 - DNA, 15 bp, Homo sapiens
ttaagggaatattat

SEQ ID NO: 25112 - DNA, 15 bp, Homo sapiens
gttaagggaatatta

SEQ ID NO: 25113 - DNA, 15 bp, Homo sapiens
cgttaagggaatatt

SEQ ID NO: 25114 - DNA, 15 bp, Homo sapiens
tcgttaagggaatat

SEQ ID NO: 25115 - DNA, 15 bp, Homo sapiens
atcgttaagggaata

SEQ ID NO: 25116 - DNA, 15 bp, Homo sapiens
catcgttaagggaat

SEQ ID NO: 25117 - DNA, 15 bp, Homo sapiens
gcatcgttaagggaa

SEQ ID NO: 25118 - DNA, 15 bp, Homo sapiens
tgcatcgttaaggga

SEQ ID NO: 25119 - DNA, 15 bp, Homo sapiens
atgcatcgttaaggg

SEQ ID NO: 25120 - DNA, 15 bp, Homo sapiens
aatgcatcgttaagg

SEQ ID NO: 25121 - DNA, 15 bp, Homo sapiens
gaatgcatcgttaag

SEQ ID NO: 25122 - DNA, 15 bp, Homo sapiens
tgaatgcatcgttaa

SEQ ID NO: 25123 - DNA, 15 bp, Homo sapiens
atgaatgcatcgtta

SEQ ID NO: 25124 - DNA, 15 bp, Homo sapiens
aatgaatgcatcgtt

SEQ ID NO: 25125 - DNA, 15 bp, Homo sapiens
aaatgaatgcatcgt

SEQ ID NO: 25126 - DNA, 15 bp, Homo sapiens
caaatgaatgcatcg

SEQ ID NO: 25127 - DNA, 15 bp, Homo sapiens
tcaaatgaatgcatc

SEQ ID NO: 25128 - DNA, 15 bp, Homo sapiens
ttcaaatgaatgcat

SEQ ID NO: 25129 - DNA, 15 bp, Homo sapiens
cttcaaatgaatgca

SEQ ID NO: 25130 - DNA, 15 bp, Homo sapiens
gcttcaaatgaatgc

SEQ ID NO: 25131 - DNA, 15 bp, Homo sapiens
ggcttcaaatgaatg

SEQ ID NO: 25132 - DNA, 15 bp, Homo sapiens
gggcttcaaatgaat

SEQ ID NO: 25133 - DNA, 15 bp, Homo sapiens
agggcttcaaatgaa

SEQ ID NO: 25134 - DNA, 15 bp, Homo sapiens
tagggcttcaaatga

SEQ ID NO: 25135 - DNA, 15 bp, Homo sapiens
ctagggcttcaaatg

SEQ ID NO: 25136 - DNA, 15 bp, Homo sapiens
gctagggcttcaaat

SEQ ID NO: 25137 - DNA, 15 bp, Homo sapiens
tgctagggcttcaaa

SEQ ID NO: 25138 - DNA, 15 bp, Homo sapiens
ttgctagggcttcaa

SEQ ID NO: 25139 - DNA, 15 bp, Homo sapiens
gttgctagggcttca

SEQ ID NO: 25140 - DNA, 15 bp, Homo sapiens
agttgctagggcttc

SEQ ID NO: 25141 - DNA, 15 bp, Homo sapiens
cagttgctagggctt

SEQ ID NO: 25142 - DNA, 15 bp, Homo sapiens
acagttgctagggct

SEQ ID NO: 25143 - DNA, 15 bp, Homo sapiens
tacagttgctagggc

SEQ ID NO: 25144 - DNA, 15 bp, Homo sapiens
atacagttgctaggg

SEQ ID NO: 25145 - DNA, 15 bp, Homo sapiens
aatacagttgctagg

SEQ ID NO: 25146 - DNA, 15 bp, Homo sapiens
taatacagttgctag

SEQ ID NO: 25147 - DNA, 15 bp, Homo sapiens
ctaatacagttgcta

SEQ ID NO: 25148 - DNA, 15 bp, Homo sapiens
cctaatacagttgct

SEQ ID NO: 25149 - DNA, 15 bp, Homo sapiens
gcctaatacagttgc

SEQ ID NO: 25150 - DNA, 15 bp, Homo sapiens
tgcctaatacagttg

SEQ ID NO: 25151 - DNA, 15 bp, Homo sapiens
ctgcctaatacagtt

SEQ ID NO: 25152 - DNA, 15 bp, Homo sapiens
gctgcctaatacagt

SEQ ID NO: 25153 - DNA, 15 bp, Homo sapiens
tgctgcctaatacag

SEQ ID NO: 25154 - DNA, 15 bp, Homo sapiens
ctgctgcctaataca

SEQ ID NO: 25155 - DNA, 15 bp, Homo sapiens
gctgctgcctaatac

SEQ ID NO: 25156 - DNA, 15 bp, Homo sapiens
cgctgctgcctaata

SEQ ID NO: 25157 - DNA, 15 bp, Homo sapiens
tcgctgctgcctaat

SEQ ID NO: 25158 - DNA, 15 bp, Homo sapiens
ctcgctgctgcctaa

SEQ ID NO: 25159 - DNA, 15 bp, Homo sapiens
actcgctgctgccta

SEQ ID NO: 25160 - DNA, 15 bp, Homo sapiens
tactcgctgctgcct

SEQ ID NO: 25161 - DNA, 15 bp, Homo sapiens
atactcgctgctgcc

SEQ ID NO: 25162 - DNA, 15 bp, Homo sapiens
aatactcgctgctgc

SEQ ID NO: 25163 - DNA, 15 bp, Homo sapiens
gaatactcgctgctg

SEQ ID NO: 25164 - DNA, 15 bp, Homo sapiens
cgaatactcgctgct

SEQ ID NO: 25165 - DNA, 15 bp, Homo sapiens
gcgaatactcgctgc

SEQ ID NO: 25166 - DNA, 15 bp, Homo sapiens
agcgaatactcgctg

SEQ ID NO: 25167 - DNA, 15 bp, Homo sapiens
tagcgaatactcgct

SEQ ID NO: 25168 - DNA, 15 bp, Homo sapiens
ctagcgaatactcgc

SEQ ID NO: 25169 - DNA, 15 bp, Homo sapiens
gctagcgaatactcg

SEQ ID NO: 25170 - DNA, 15 bp, Homo sapiens
tgctagcgaatactc

SEQ ID NO: 25171 - DNA, 15 bp, Homo sapiens
ttgctagcgaatact

SEQ ID NO: 25172 - DNA, 15 bp, Homo sapiens
cttgctagcgaatac

SEQ ID NO: 25173 - DNA, 15 bp, Homo sapiens
ccttgctagcgaata

SEQ ID NO: 25174 - DNA, 15 bp, Homo sapiens
cccttgctagcgaat

SEQ ID NO: 25175 - DNA, 15 bp, Homo sapiens
tcccttgctagcgaa

SEQ ID NO: 25176 - DNA, 15 bp, Homo sapiens
atcccttgctagcga

SEQ ID NO: 25177 - DNA, 15 bp, Homo sapiens
catcccttgctagcg

SEQ ID NO: 25178 - DNA, 15 bp, Homo sapiens
ccatcccttgctagc

SEQ ID NO: 25179 - DNA, 15 bp, Homo sapiens
gccatcccttgctag

SEQ ID NO: 25180 - DNA, 15 bp, Homo sapiens
cgccatcccttgcta

SEQ ID NO: 25181 - DNA, 15 bp, Homo sapiens
gcgccatcccttgct

SEQ ID NO: 25182 - DNA, 15 bp, Homo sapiens
cgcgccatcccttgc

SEQ ID NO: 25183 - DNA, 15 bp, Homo sapiens
ccgcgccatcccttg

SEQ ID NO: 25184 - DNA, 15 bp, Homo sapiens
cccgcgccatccctt

SEQ ID NO: 25185 - DNA, 15 bp, Homo sapiens
ccccgcgccatccct

SEQ ID NO: 25186 - DNA, 15 bp, Homo sapiens
tccccgcgccatccc

SEQ ID NO: 25187 - DNA, 15 bp, Homo sapiens
ctccccgcgccatcc

SEQ ID NO: 25188 - DNA, 15 bp, Homo sapiens
tctccccgcgccatc

SEQ ID NO: 25189 - DNA, 15 bp, Homo sapiens
ctctccccgcgccat

SEQ ID NO: 25190 - DNA, 15 bp, Homo sapiens
cctctccccgcgcca

SEQ ID NO: 25191 - DNA, 15 bp, Homo sapiens
ccctctccccgcgcc

SEQ ID NO: 25192 - DNA, 15 bp, Homo sapiens
tccctctccccgcgc

SEQ ID NO: 25193 - DNA, 15 bp, Homo sapiens
ttccctctccccgcg

SEQ ID NO: 25194 - DNA, 15 bp, Homo sapiens
gttccctctccccgc

SEQ ID NO: 25195 - DNA, 15 bp, Homo sapiens
agttccctctccccg

SEQ ID NO: 25196 - DNA, 15 bp, Homo sapiens
gagttccctctcccc

SEQ ID NO: 25197 - DNA, 15 bp, Homo sapiens
agagttccctctccc

SEQ ID NO: 25198 - DNA, 15 bp, Homo sapiens
cagagttccctctcc

SEQ ID NO: 25199 - DNA, 15 bp, Homo sapiens
gcagagttccctctc

SEQ ID NO: 25200 - DNA, 15 bp, Homo sapiens
tgcagagttccctct

SEQ ID NO: 25201 - DNA, 15 bp, Homo sapiens
ttgcagagttccctc

SEQ ID NO: 25202 - DNA, 15 bp, Homo sapiens
attgcagagttccct

SEQ ID NO: 25203 - DNA, 15 bp, Homo sapiens
aattgcagagttccc

SEQ ID NO: 25204 - DNA, 15 bp, Homo sapiens
aaattgcagagttcc

SEQ ID NO: 25205 - DNA, 15 bp, Homo sapiens
taaattgcagagttc

SEQ ID NO: 25206 - DNA, 15 bp, Homo sapiens
ctaaattgcagagtt

SEQ ID NO: 25207 - DNA, 15 bp, Homo sapiens
tctaaattgcagagt

SEQ ID NO: 25208 - DNA, 15 bp, Homo sapiens
ctctaaattgcagag

SEQ ID NO: 25209 - DNA, 15 bp, Homo sapiens
actctaaattgcaga

SEQ ID NO: 25210 - DNA, 15 bp, Homo sapiens
cactctaaattgcag

SEQ ID NO: 25211 - DNA, 15 bp, Homo sapiens
tcactctaaattgca

SEQ ID NO: 25212 - DNA, 15 bp, Homo sapiens
gtcactctaaattgc

SEQ ID NO: 25213 - DNA, 15 bp, Homo sapiens
tgtcactctaaattg

SEQ ID NO: 25214 - DNA, 15 bp, Homo sapiens
ctgtcactctaaatt

SEQ ID NO: 25215 - DNA, 15 bp, Homo sapiens
tctgtcactctaaat

SEQ ID NO: 25216 - DNA, 15 bp, Homo sapiens
atctgtcactctaaa

SEQ ID NO: 25217 - DNA, 15 bp, Homo sapiens
catctgtcactctaa

SEQ ID NO: 25218 - DNA, 15 bp, Homo sapiens
tcatctgtcactcta

SEQ ID NO: 25219 - DNA, 15 bp, Homo sapiens
atcatctgtcactct

SEQ ID NO: 25220 - DNA, 15 bp, Homo sapiens
aatcatctgtcactc

SEQ ID NO: 25221 - DNA, 15 bp, Homo sapiens
aaatcatctgtcact

SEQ ID NO: 25222 - DNA, 15 bp, Homo sapiens
gaaatcatctgtcac

SEQ ID NO: 25223 - DNA, 15 bp, Homo sapiens
agaaatcatctgtca

SEQ ID NO: 25224 - DNA, 15 bp, Homo sapiens
aagaaatcatctgtc

SEQ ID NO: 25225 - DNA, 15 bp, Homo sapiens
aaagaaatcatctgt

SEQ ID NO: 25226 - DNA, 15 bp, Homo sapiens
gaaagaaatcatctg

SEQ ID NO: 25227 - DNA, 15 bp, Homo sapiens
ggaaagaaatcatct

SEQ ID NO: 25228 - DNA, 15 bp, Homo sapiens
gggaaagaaatcatc

SEQ ID NO: 25229 - DNA, 15 bp, Homo sapiens
tgggaaagaaatcat

SEQ ID NO: 25230 - DNA, 15 bp, Homo sapiens
atgggaaagaaatca

SEQ ID NO: 25231 - DNA, 15 bp, Homo sapiens
gatgggaaagaaatc

SEQ ID NO: 25232 - DNA, 15 bp, Homo sapiens
ggatgggaaagaaat

SEQ ID NO: 25233 - DNA, 15 bp, Homo sapiens
tggatgggaaagaaa

SEQ ID NO: 25234 - DNA, 15 bp, Homo sapiens
atggatgggaaagaa

SEQ ID NO: 25235 - DNA, 15 bp, Homo sapiens
gatggatgggaaaga

SEQ ID NO: 25236 - DNA, 15 bp, Homo sapiens
tgatggatgggaaag

SEQ ID NO: 25237 - DNA, 15 bp, Homo sapiens
ttgatggatgggaaa

SEQ ID NO: 25238 - DNA, 15 bp, Homo sapiens
cttgatggatgggaa

SEQ ID NO: 25239 - DNA, 15 bp, Homo sapiens
gcttgatggatggga

SEQ ID NO: 25240 - DNA, 15 bp, Homo sapiens
agcttgatggatggg

SEQ ID NO: 25241 - DNA, 15 bp, Homo sapiens
cagcttgatggatgg

SEQ ID NO: 25242 - DNA, 15 bp, Homo sapiens
gcagcttgatggatg

SEQ ID NO: 25243 - DNA, 15 bp, Homo sapiens
ggcagcttgatggat

SEQ ID NO: 25244 - DNA, 15 bp, Homo sapiens
aggcagcttgatgga

SEQ ID NO: 25245 - DNA, 15 bp, Homo sapiens
gaggcagcttgatgg

SEQ ID NO: 25246 - DNA, 15 bp, Homo sapiens
tgaggcagcttgatg

SEQ ID NO: 25247 - DNA, 15 bp, Homo sapiens
ttgaggcagcttgat

SEQ ID NO: 25248 - DNA, 15 bp, Homo sapiens
tttgaggcagcttga

SEQ ID NO: 25249 - DNA, 15 bp, Homo sapiens
ttttgaggcagcttg

SEQ ID NO: 25250 - DNA, 15 bp, Homo sapiens
attttgaggcagctt

SEQ ID NO: 25251 - DNA, 15 bp, Homo sapiens
cattttgaggcagct

SEQ ID NO: 25252 - DNA, 15 bp, Homo sapiens
acattttgaggcagc

SEQ ID NO: 25253 - DNA, 15 bp, Homo sapiens
gacattttgaggcag

SEQ ID NO: 25254 - DNA, 15 bp, Homo sapiens
tgacattttgaggca

SEQ ID NO: 25255 - DNA, 15 bp, Homo sapiens
gtgacattttgaggc

SEQ ID NO: 25256 - DNA, 15 bp, Homo sapiens
tgtgacattttgagg

SEQ ID NO: 25257 - DNA, 15 bp, Homo sapiens
ttgtgacattttgag

SEQ ID NO: 25258 - DNA, 15 bp, Homo sapiens
attgtgacattttga

SEQ ID NO: 25259 - DNA, 15 bp, Homo sapiens
tattgtgacattttg

SEQ ID NO: 25260 - DNA, 15 bp, Homo sapiens
atattgtgacatttt

SEQ ID NO: 25261 - DNA, 15 bp, Homo sapiens
aatattgtgacattt

SEQ ID NO: 25262 - DNA, 15 bp, Homo sapiens
aaatattgtgacatt

SEQ ID NO: 25263 - DNA, 15 bp, Homo sapiens
taaatattgtgacat

SEQ ID NO: 25264 - DNA, 15 bp, Homo sapiens
gtaaatattgtgaca

SEQ ID NO: 25265 - DNA, 15 bp, Homo sapiens
tgtaaatattgtgac

SEQ ID NO: 25266 - DNA, 15 bp, Homo sapiens
gtgtaaatattgtga

SEQ ID NO: 25267 - DNA, 15 bp, Homo sapiens
ggtgtaaatattgtg

SEQ ID NO: 25268 - DNA, 15 bp, Homo sapiens
aggtgtaaatattgt

SEQ ID NO: 25269 - DNA, 15 bp, Homo sapiens
gaggtgtaaatattg

SEQ ID NO: 25270 - DNA, 15 bp, Homo sapiens
agaggtgtaaatatt

SEQ ID NO: 25271 - DNA, 15 bp, Homo sapiens
aagaggtgtaaatat

SEQ ID NO: 25272 - DNA, 15 bp, Homo sapiens
aaagaggtgtaaata

SEQ ID NO: 25273 - DNA, 15 bp, Homo sapiens
gaaagaggtgtaaat

SEQ ID NO: 25274 - DNA, 15 bp, Homo sapiens
agaaagaggtgtaaa

SEQ ID NO: 25275 - DNA, 15 bp, Homo sapiens
aagaaagaggtgtaa

SEQ ID NO: 25276 - DNA, 15 bp, Homo sapiens
caagaaagaggtgta

SEQ ID NO: 25277 - DNA, 15 bp, Homo sapiens
ccaagaaagaggtgt

SEQ ID NO: 25278 - DNA, 15 bp, Homo sapiens
accaagaaagaggtg

SEQ ID NO: 25279 - DNA, 15 bp, Homo sapiens
caccaagaaagaggt

SEQ ID NO: 25280 - DNA, 15 bp, Homo sapiens
tcaccaagaaagagg

SEQ ID NO: 25281 - DNA, 15 bp, Homo sapiens
ttcaccaagaaagag

SEQ ID NO: 25282 - DNA, 15 bp, Homo sapiens
attcaccaagaaaga

SEQ ID NO: 25283 - DNA, 15 bp, Homo sapiens
aattcaccaagaaag

SEQ ID NO: 25284 - DNA, 15 bp, Homo sapiens
taattcaccaagaaa

SEQ ID NO: 25285 - DNA, 15 bp, Homo sapiens
ctaattcaccaagaa

SEQ ID NO: 25286 - DNA, 15 bp, Homo sapiens
tctaattcaccaaga

SEQ ID NO: 25287 - DNA, 15 bp, Homo sapiens
ttctaattcaccaag

SEQ ID NO: 25288 - DNA, 15 bp, Homo sapiens
attctaattcaccaa

SEQ ID NO: 25289 - DNA, 15 bp, Homo sapiens
gattctaattcacca

SEQ ID NO: 25290 - DNA, 15 bp, Homo sapiens
ggattctaattcacc

SEQ ID NO: 25291 - DNA, 15 bp, Homo sapiens
tggattctaattcac

SEQ ID NO: 25292 - DNA, 15 bp, Homo sapiens
ctggattctaattca

SEQ ID NO: 25293 - DNA, 15 bp, Homo sapiens
tctggattctaattc

SEQ ID NO: 25294 - DNA, 15 bp, Homo sapiens
ctctggattctaatt

SEQ ID NO: 25295 - DNA, 15 bp, Homo sapiens
tctctggattctaat

SEQ ID NO: 25296 - DNA, 15 bp, Homo sapiens
gtctctggattctaa

SEQ ID NO: 25297 - DNA, 15 bp, Homo sapiens
tgtctctggattcta

SEQ ID NO: 25298 - DNA, 15 bp, Homo sapiens
ttgtctctggattct

SEQ ID NO: 25299 - DNA, 15 bp, Homo sapiens
cttgtctctggattc

SEQ ID NO: 25300 - DNA, 15 bp, Homo sapiens
gcttgtctctggatt

SEQ ID NO: 25301 - DNA, 15 bp, Homo sapiens
tgcttgtctctggat

SEQ ID NO: 25302 - DNA, 15 bp, Homo sapiens
ctgcttgtctctgga

SEQ ID NO: 25303 - DNA, 15 bp, Homo sapiens
tctgcttgtctctgg

SEQ ID NO: 25304 - DNA, 15 bp, Homo sapiens
gtctgcttgtctctg

SEQ ID NO: 25305 - DNA, 15 bp, Homo sapiens
tgtctgcttgtctct

SEQ ID NO: 25306 - DNA, 15 bp, Homo sapiens
ctgtctgcttgtctc

SEQ ID NO: 25307 - DNA, 15 bp, Homo sapiens
tctgtctgcttgtct

SEQ ID NO: 25308 - DNA, 15 bp, Homo sapiens
ttctgtctgcttgtc

SEQ ID NO: 25309 - DNA, 15 bp, Homo sapiens
tttctgtctgcttgt

SEQ ID NO: 25310 - DNA, 15 bp, Homo sapiens
ctttctgtctgcttg

SEQ ID NO: 25311 - DNA, 15 bp, Homo sapiens
tctttctgtctgctt

SEQ ID NO: 25312 - DNA, 15 bp, Homo sapiens
ttctttctgtctgct

SEQ ID NO: 25313 - DNA, 15 bp, Homo sapiens
tttctttctgtctgc

SEQ ID NO: 25314 - DNA, 15 bp, Homo sapiens
ttttctttctgtctg

SEQ ID NO: 25315 - DNA, 15 bp, Homo sapiens
tttttctttctgtct

SEQ ID NO: 25316 - DNA, 15 bp, Homo sapiens
ttttttctttctgtc

SEQ ID NO: 25317 - DNA, 15 bp, Homo sapiens
tttttttctttctgt

SEQ ID NO: 25318 - DNA, 15 bp, Homo sapiens
atttttttctttctg

SEQ ID NO: 25319 - DNA, 15 bp, Homo sapiens
tatttttttctttct

SEQ ID NO: 25320 - DNA, 15 bp, Homo sapiens
ttatttttttctttc

SEQ ID NO: 25321 - DNA, 15 bp, Homo sapiens
attatttttttcttt

SEQ ID NO: 25322 - DNA, 15 bp, Homo sapiens
tattatttttttctt

SEQ ID NO: 25323 - DNA, 15 bp, Homo sapiens
ttattatttttttct

SEQ ID NO: 25324 - DNA, 15 bp, Homo sapiens
attattatttttttc

SEQ ID NO: 25325 - DNA, 15 bp, Homo sapiens
aattattattttttt

SEQ ID NO: 25326 - DNA, 15 bp, Homo sapiens
gaattattatttttt

SEQ ID NO: 25327 - DNA, 15 bp, Homo sapiens
ggaattattattttt

SEQ ID NO: 25328 - DNA, 15 bp, Homo sapiens
cggaattattatttt

SEQ ID NO: 25329 - DNA, 15 bp, Homo sapiens
ccggaattattattt

SEQ ID NO: 25330 - DNA, 15 bp, Homo sapiens
gccggaattattatt

SEQ ID NO: 25331 - DNA, 15 bp, Homo sapiens
ggccggaattattat

SEQ ID NO: 25332 - DNA, 15 bp, Homo sapiens
cggccggaattatta

SEQ ID NO: 25333 - DNA, 15 bp, Homo sapiens
ccggccggaattatt

SEQ ID NO: 25334 - DNA, 15 bp, Homo sapiens
accggccggaattat

SEQ ID NO: 25335 - DNA, 15 bp, Homo sapiens
aaccggccggaatta

SEQ ID NO: 25336 - DNA, 15 bp, Homo sapiens
caaccggccggaatt

SEQ ID NO: 25337 - DNA, 15 bp, Homo sapiens
gcaaccggccggaat

SEQ ID NO: 25338 - DNA, 15 bp, Homo sapiens
ggcaaccggccggaa

SEQ ID NO: 25339 - DNA, 15 bp, Homo sapiens
cggcaaccggccgga

SEQ ID NO: 25340 - DNA, 15 bp, Homo sapiens
gcggcaaccggccgg

SEQ ID NO: 25341 - DNA, 15 bp, Homo sapiens
ggcggcaaccggccg

SEQ ID NO: 25342 - DNA, 15 bp, Homo sapiens
aggcggcaaccggcc

SEQ ID NO: 25343 - DNA, 15 bp, Homo sapiens
caggcggcaaccggc

SEQ ID NO: 25344 - DNA, 15 bp, Homo sapiens
tcaggcggcaaccgg

SEQ ID NO: 25345 - DNA, 15 bp, Homo sapiens
atcaggcggcaaccg

SEQ ID NO: 25346 - DNA, 15 bp, Homo sapiens
aatcaggcggcaacc

SEQ ID NO: 25347 - DNA, 15 bp, Homo sapiens
caatcaggcggcaac

SEQ ID NO: 25348 - DNA, 15 bp, Homo sapiens
ccaatcaggcggcaa

SEQ ID NO: 25349 - DNA, 15 bp, Homo sapiens
tccaatcaggcggca

SEQ ID NO: 25350 - DNA, 15 bp, Homo sapiens
ttccaatcaggcggc

SEQ ID NO: 25351 - DNA, 15 bp, Homo sapiens
tttccaatcaggcgg

SEQ ID NO: 25352 - DNA, 15 bp, Homo sapiens
ttttccaatcaggcg

SEQ ID NO: 25353 - DNA, 15 bp, Homo sapiens
tttttccaatcaggc

SEQ ID NO: 25354 - DNA, 15 bp, Homo sapiens
ctttttccaatcagg

SEQ ID NO: 25355 - DNA, 15 bp, Homo sapiens
gctttttccaatcag

SEQ ID NO: 25356 - DNA, 15 bp, Homo sapiens
tgctttttccaatca

SEQ ID NO: 25357 - DNA, 15 bp, Homo sapiens
ttgctttttccaatc

SEQ ID NO: 25358 - DNA, 15 bp, Homo sapiens
cttgctttttccaat

SEQ ID NO: 25359 - DNA, 15 bp, Homo sapiens
gcttgctttttccaa

SEQ ID NO: 25360 - DNA, 15 bp, Homo sapiens
cgcttgctttttcca

SEQ ID NO: 25361 - DNA, 15 bp, Homo sapiens
acgcttgctttttcc

SEQ ID NO: 25362 - DNA, 15 bp, Homo sapiens
aacgcttgctttttc

SEQ ID NO: 25363 - DNA, 15 bp, Homo sapiens
caacgcttgcttttt

SEQ ID NO: 25364 - DNA, 15 bp, Homo sapiens
gcaacgcttgctttt

SEQ ID NO: 25365 - DNA, 15 bp, Homo sapiens
tgcaacgcttgcttt

SEQ ID NO: 25366 - DNA, 15 bp, Homo sapiens
gtgcaacgcttgctt

SEQ ID NO: 25367 - DNA, 15 bp, Homo sapiens
ggtgcaacgcttgct

SEQ ID NO: 25368 - DNA, 15 bp, Homo sapiens
aggtgcaacgcttgc

SEQ ID NO: 25369 - DNA, 15 bp, Homo sapiens
aaggtgcaacgcttg

SEQ ID NO: 25370 - DNA, 15 bp, Homo sapiens
aaaggtgcaacgctt

SEQ ID NO: 25371 - DNA, 15 bp, Homo sapiens
taaaggtgcaacgct

SEQ ID NO: 25372 - DNA, 15 bp, Homo sapiens
ttaaaggtgcaacgc

SEQ ID NO: 25373 - DNA, 15 bp, Homo sapiens
tttaaaggtgcaacg

SEQ ID NO: 25374 - DNA, 15 bp, Homo sapiens
atttaaaggtgcaac

SEQ ID NO: 25375 - DNA, 15 bp, Homo sapiens
aatttaaaggtgcaa

SEQ ID NO: 25376 - DNA, 15 bp, Homo sapiens
gaatttaaaggtgca

SEQ ID NO: 25377 - DNA, 15 bp, Homo sapiens
agaatttaaaggtgc

SEQ ID NO: 25378 - DNA, 15 bp, Homo sapiens
cagaatttaaaggtg

SEQ ID NO: 25379 - DNA, 15 bp, Homo sapiens
gcagaatttaaaggt

SEQ ID NO: 25380 - DNA, 15 bp, Homo sapiens
agcagaatttaaagg

SEQ ID NO: 25381 - DNA, 15 bp, Homo sapiens
gagcagaatttaaag

SEQ ID NO: 25382 - DNA, 15 bp, Homo sapiens
ggagcagaatttaaa

SEQ ID NO: 25383 - DNA, 15 bp, Homo sapiens
aggagcagaatttaa

SEQ ID NO: 25384 - DNA, 15 bp, Homo sapiens
gaggagcagaattta

SEQ ID NO: 25385 - DNA, 15 bp, Homo sapiens
ggaggagcagaattt

SEQ ID NO: 25386 - DNA, 15 bp, Homo sapiens
tggaggagcagaatt

SEQ ID NO: 25387 - DNA, 15 bp, Homo sapiens
atggaggagcagaat

SEQ ID NO: 25388 - DNA, 15 bp, Homo sapiens
aatggaggagcagaa

SEQ ID NO: 25389 - DNA, 15 bp, Homo sapiens
gaatggaggagcaga

SEQ ID NO: 25390 - DNA, 15 bp, Homo sapiens
ggaatggaggagcag

SEQ ID NO: 25391 - DNA, 15 bp, Homo sapiens
gggaatggaggagca

SEQ ID NO: 25392 - DNA, 15 bp, Homo sapiens
ggggaatggaggagc

SEQ ID NO: 25393 - DNA, 15 bp, Homo sapiens
cggggaatggaggag

SEQ ID NO: 25394 - DNA, 15 bp, Homo sapiens
acggggaatggagga

SEQ ID NO: 25395 - DNA, 15 bp, Homo sapiens
aacggggaatggagg

SEQ ID NO: 25396 - DNA, 15 bp, Homo sapiens
gaacggggaatggag

SEQ ID NO: 25397 - DNA, 15 bp, Homo sapiens
ggaacggggaatgga

SEQ ID NO: 25398 - DNA, 15 bp, Homo sapiens
cggaacggggaatgg

SEQ ID NO: 25399 - DNA, 15 bp, Homo sapiens
gcggaacggggaatg

SEQ ID NO: 25400 - DNA, 15 bp, Homo sapiens
tgcggaacggggaat

SEQ ID NO: 25401 - DNA, 15 bp, Homo sapiens
gtgcggaacggggaa

SEQ ID NO: 25402 - DNA, 15 bp, Homo sapiens
tgtgcggaacgggga

SEQ ID NO: 25403 - DNA, 15 bp, Homo sapiens
gtgtgcggaacgggg

SEQ ID NO: 25404 - DNA, 15 bp, Homo sapiens
ggtgtgcggaacggg

SEQ ID NO: 25405 - DNA, 15 bp, Homo sapiens
tggtgtgcggaacgg

SEQ ID NO: 25406 - DNA, 15 bp, Homo sapiens
gtggtgtgcggaacg

SEQ ID NO: 25407 - DNA, 15 bp, Homo sapiens
ggtggtgtgcggaac

SEQ ID NO: 25408 - DNA, 15 bp, Homo sapiens
gggtggtgtgcggaa

SEQ ID NO: 25409 - DNA, 15 bp, Homo sapiens
ggggtggtgtgcgga

SEQ ID NO: 25410 - DNA, 15 bp, Homo sapiens
gggggtggtgtgcgg

SEQ ID NO: 25411 - DNA, 15 bp, Homo sapiens
ggggggtggtgtgcg

SEQ ID NO: 25412 - DNA, 15 bp, Homo sapiens
gggggggtggtgtgc

SEQ ID NO: 25413 - DNA, 15 bp, Homo sapiens
ggggggggtggtgtg

SEQ ID NO: 25414 - DNA, 15 bp, Homo sapiens
gggggggggtggtgt

SEQ ID NO: 25415 - DNA, 15 bp, Homo sapiens
cgggggggggtggtg

SEQ ID NO: 25416 - DNA, 15 bp, Homo sapiens
gcgggggggggtggt

SEQ ID NO: 25417 - DNA, 15 bp, Homo sapiens
ggcgggggggggtgg

SEQ ID NO: 25418 - DNA, 15 bp, Homo sapiens
gggcgggggggggtg

SEQ ID NO: 25419 - DNA, 15 bp, Homo sapiens
ggggcgggggggggt

SEQ ID NO: 25420 - DNA, 15 bp, Homo sapiens
aggggcggggggggg

SEQ ID NO: 25421 - DNA, 15 bp, Homo sapiens
gaggggcgggggggg

SEQ ID NO: 25422 - DNA, 15 bp, Homo sapiens
ggaggggcggggggg

SEQ ID NO: 25423 - DNA, 15 bp, Homo sapiens
gggaggggcgggggg

SEQ ID NO: 25424 - DNA, 15 bp, Homo sapiens
cgggaggggcggggg

SEQ ID NO: 25425 - DNA, 15 bp, Homo sapiens
ccgggaggggcgggg

SEQ ID NO: 25426 - DNA, 15 bp, Homo sapiens
cccgggaggggcggg

SEQ ID NO: 25427 - DNA, 15 bp, Homo sapiens
tcccgggaggggcgg

SEQ ID NO: 25428 - DNA, 15 bp, Homo sapiens
atcccgggaggggcg

SEQ ID NO: 25429 - DNA, 15 bp, Homo sapiens
aatcccgggaggggc

SEQ ID NO: 25430 - DNA, 15 bp, Homo sapiens
aaatcccgggagggg

SEQ ID NO: 25431 - DNA, 15 bp, Homo sapiens
aaaatcccgggaggg

SEQ ID NO: 25432 - DNA, 15 bp, Homo sapiens
caaaatcccgggagg

SEQ ID NO: 25433 - DNA, 15 bp, Homo sapiens
gcaaaatcccgggag

SEQ ID NO: 25434 - DNA, 15 bp, Homo sapiens
tgcaaaatcccggga

SEQ ID NO: 25435 - DNA, 15 bp, Homo sapiens
ttgcaaaatcccggg

SEQ ID NO: 25436 - DNA, 15 bp, Homo sapiens
attgcaaaatcccgg

SEQ ID NO: 25437 - DNA, 15 bp, Homo sapiens
tattgcaaaatcccg

SEQ ID NO: 25438 - DNA, 15 bp, Homo sapiens
ttattgcaaaatccc

SEQ ID NO: 25439 - DNA, 15 bp, Homo sapiens
tttattgcaaaatcc

SEQ ID NO: 25440 - DNA, 15 bp, Homo sapiens
atttattgcaaaatc

SEQ ID NO: 25441 - DNA, 15 bp, Homo sapiens
gatttattgcaaaat

SEQ ID NO: 25442 - DNA, 15 bp, Homo sapiens
agatttattgcaaaa

SEQ ID NO: 25443 - DNA, 15 bp, Homo sapiens
gagatttattgcaaa

SEQ ID NO: 25444 - DNA, 15 bp, Homo sapiens
ggagatttattgcaa

SEQ ID NO: 25445 - DNA, 15 bp, Homo sapiens
gggagatttattgca

SEQ ID NO: 25446 - DNA, 15 bp, Homo sapiens
tgggagatttattgc

SEQ ID NO: 25447 - DNA, 15 bp, Homo sapiens
ctgggagatttattg

SEQ ID NO: 25448 - DNA, 15 bp, Homo sapiens
actgggagatttatt

SEQ ID NO: 25449 - DNA, 15 bp, Homo sapiens
aactgggagatttat

SEQ ID NO: 25450 - DNA, 15 bp, Homo sapiens
gaactgggagattta

SEQ ID NO: 25451 - DNA, 15 bp, Homo sapiens
agaactgggagattt

SEQ ID NO: 25452 - DNA, 15 bp, Homo sapiens
cagaactgggagatt

SEQ ID NO: 25453 - DNA, 15 bp, Homo sapiens
gcagaactgggagat

SEQ ID NO: 25454 - DNA, 15 bp, Homo sapiens
cgcagaactgggaga

SEQ ID NO: 25455 - DNA, 15 bp, Homo sapiens
acgcagaactgggag

SEQ ID NO: 25456 - DNA, 15 bp, Homo sapiens
aacgcagaactggga

SEQ ID NO: 25457 - DNA, 15 bp, Homo sapiens
gaacgcagaactggg

SEQ ID NO: 25458 - DNA, 15 bp, Homo sapiens
tgaacgcagaactgg

SEQ ID NO: 25459 - DNA, 15 bp, Homo sapiens
ctgaacgcagaactg

SEQ ID NO: 25460 - DNA, 15 bp, Homo sapiens
gctgaacgcagaact

SEQ ID NO: 25461 - DNA, 15 bp, Homo sapiens
ggctgaacgcagaac

SEQ ID NO: 25462 - DNA, 15 bp, Homo sapiens
gggctgaacgcagaa

SEQ ID NO: 25463 - DNA, 15 bp, Homo sapiens
agggctgaacgcaga

SEQ ID NO: 25464 - DNA, 15 bp, Homo sapiens
cagggctgaacgcag

SEQ ID NO: 25465 - DNA, 15 bp, Homo sapiens
gcagggctgaacgca

SEQ ID NO: 25466 - DNA, 15 bp, Homo sapiens
tgcagggctgaacgc

SEQ ID NO: 25467 - DNA, 15 bp, Homo sapiens
ctgcagggctgaacg

SEQ ID NO: 25468 - DNA, 15 bp, Homo sapiens
tctgcagggctgaac

SEQ ID NO: 25469 - DNA, 15 bp, Homo sapiens
atctgcagggctgaa

SEQ ID NO: 25470 - DNA, 15 bp, Homo sapiens
gatctgcagggctga

SEQ ID NO: 25471 - DNA, 15 bp, Homo sapiens
ggatctgcagggctg

SEQ ID NO: 25472 - DNA, 15 bp, Homo sapiens
cggatctgcagggct

SEQ ID NO: 25473 - DNA, 15 bp, Homo sapiens
acggatctgcagggc

SEQ ID NO: 25474 - DNA, 15 bp, Homo sapiens
tacggatctgcaggg

SEQ ID NO: 25475 - DNA, 15 bp, Homo sapiens
atacggatctgcagg

SEQ ID NO: 25476 - DNA, 15 bp, Homo sapiens
aatacggatctgcag

SEQ ID NO: 25477 - DNA, 15 bp, Homo sapiens
aaatacggatctgca

SEQ ID NO: 25478 - DNA, 15 bp, Homo sapiens
taaatacggatctgc

SEQ ID NO: 25479 - DNA, 15 bp, Homo sapiens
ttaaatacggatctg

SEQ ID NO: 25480 - DNA, 15 bp, Homo sapiens
tttaaatacggatct

SEQ ID NO: 25481 - DNA, 15 bp, Homo sapiens
ttttaaatacggatc

SEQ ID NO: 25482 - DNA, 15 bp, Homo sapiens
gttttaaatacggat

SEQ ID NO: 25483 - DNA, 15 bp, Homo sapiens
tgttttaaatacgga

SEQ ID NO: 25484 - DNA, 15 bp, Homo sapiens
ctgttttaaatacgg

SEQ ID NO: 25485 - DNA, 15 bp, Homo sapiens
gctgttttaaatacg

SEQ ID NO: 25486 - DNA, 15 bp, Homo sapiens
tgctgttttaaatac

SEQ ID NO: 25487 - DNA, 15 bp, Homo sapiens
gtgctgttttaaata

SEQ ID NO: 25488 - DNA, 15 bp, Homo sapiens
ggtgctgttttaaat

SEQ ID NO: 25489 - DNA, 15 bp, Homo sapiens
tggtgctgttttaaa

SEQ ID NO: 25490 - DNA, 15 bp, Homo sapiens
atggtgctgttttaa

SEQ ID NO: 25491 - DNA, 15 bp, Homo sapiens
gatggtgctgtttta

SEQ ID NO: 25492 - DNA, 15 bp, Homo sapiens
agatggtgctgtttt

SEQ ID NO: 25493 - DNA, 15 bp, Homo sapiens
cagatggtgctgttt

SEQ ID NO: 25494 - DNA, 15 bp, Homo sapiens
ccagatggtgctgtt

SEQ ID NO: 25495 - DNA, 15 bp, Homo sapiens
cccagatggtgctgt

SEQ ID NO: 25496 - DNA, 15 bp, Homo sapiens
tcccagatggtgctg

SEQ ID NO: 25497 - DNA, 15 bp, Homo sapiens
ttcccagatggtgct

SEQ ID NO: 25498 - DNA, 15 bp, Homo sapiens
cttcccagatggtgc

SEQ ID NO: 25499 - DNA, 15 bp, Homo sapiens
ccttcccagatggtg

SEQ ID NO: 25500 - DNA, 15 bp, Homo sapiens
cccttcccagatggt

SEQ ID NO: 25501 - DNA, 15 bp, Homo sapiens
acccttcccagatgg

SEQ ID NO: 25502 - DNA, 15 bp, Homo sapiens
cacccttcccagatg

SEQ ID NO: 25503 - DNA, 15 bp, Homo sapiens
ccacccttcccagat

SEQ ID NO: 25504 - DNA, 15 bp, Homo sapiens
cccacccttcccaga

SEQ ID NO: 25505 - DNA, 15 bp, Homo sapiens
acccacccttcccag

SEQ ID NO: 25506 - DNA, 15 bp, Homo sapiens
cacccacccttccca

SEQ ID NO: 25507 - DNA, 15 bp, Homo sapiens
ccacccacccttccc

SEQ ID NO: 25508 - DNA, 15 bp, Homo sapiens
gccacccacccttcc

SEQ ID NO: 25509 - DNA, 15 bp, Homo sapiens
cgccacccacccttc

SEQ ID NO: 25510 - DNA, 15 bp, Homo sapiens
tcgccacccaccctt

SEQ ID NO: 25511 - DNA, 15 bp, Homo sapiens
atcgccacccaccct

SEQ ID NO: 25512 - DNA, 15 bp, Homo sapiens
catcgccacccaccc

SEQ ID NO: 25513 - DNA, 15 bp, Homo sapiens
ccatcgccacccacc

SEQ ID NO: 25514 - DNA, 15 bp, Homo sapiens
accatcgccacccac

SEQ ID NO: 25515 - DNA, 15 bp, Homo sapiens
caccatcgccaccca

SEQ ID NO: 25516 - DNA, 15 bp, Homo sapiens
tcaccatcgccaccc

SEQ ID NO: 25517 - DNA, 15 bp, Homo sapiens
atcaccatcgccacc

SEQ ID NO: 25518 - DNA, 15 bp, Homo sapiens
catcaccatcgccac

SEQ ID NO: 25519 - DNA, 15 bp, Homo sapiens
gcatcaccatcgcca

SEQ ID NO: 25520 - DNA, 15 bp, Homo sapiens
cgcatcaccatcgcc

SEQ ID NO: 25521 - DNA, 15 bp, Homo sapiens
ccgcatcaccatcgc

SEQ ID NO: 25522 - DNA, 15 bp, Homo sapiens
cccgcatcaccatcg

SEQ ID NO: 25523 - DNA, 15 bp, Homo sapiens
gcccgcatcaccatc

SEQ ID NO: 25524 - DNA, 15 bp, Homo sapiens
cgcccgcatcaccat

SEQ ID NO: 25525 - DNA, 15 bp, Homo sapiens
gcgcccgcatcacca

SEQ ID NO: 25526 - DNA, 15 bp, Homo sapiens
ggcgcccgcatcacc

SEQ ID NO: 25527 - DNA, 15 bp, Homo sapiens
aggcgcccgcatcac

SEQ ID NO: 25528 - DNA, 15 bp, Homo sapiens
aaggcgcccgcatca

SEQ ID NO: 25529 - DNA, 15 bp, Homo sapiens
caaggcgcccgcatc

SEQ ID NO: 25530 - DNA, 15 bp, Homo sapiens
ccaaggcgcccgcat

SEQ ID NO: 25531 - DNA, 15 bp, Homo sapiens
tccaaggcgcccgca

SEQ ID NO: 25532 - DNA, 15 bp, Homo sapiens
ctccaaggcgcccgc

SEQ ID NO: 25533 - DNA, 15 bp, Homo sapiens
actccaaggcgcccg

SEQ ID NO: 25534 - DNA, 15 bp, Homo sapiens
aactccaaggcgccc

SEQ ID NO: 25535 - DNA, 15 bp, Homo sapiens
gaactccaaggcgcc

SEQ ID NO: 25536 - DNA, 15 bp, Homo sapiens
ggaactccaaggcgc

SEQ ID NO: 25537 - DNA, 15 bp, Homo sapiens
aggaactccaaggcg

SEQ ID NO: 25538 - DNA, 15 bp, Homo sapiens
aaggaactccaaggc

SEQ ID NO: 25539 - DNA, 15 bp, Homo sapiens
aaaggaactccaagg

SEQ ID NO: 25540 - DNA, 15 bp, Homo sapiens
caaaggaactccaag

SEQ ID NO: 25541 - DNA, 15 bp, Homo sapiens
gcaaaggaactccaa

SEQ ID NO: 25542 - DNA, 15 bp, Homo sapiens
tgcaaaggaactcca

SEQ ID NO: 25543 - DNA, 15 bp, Homo sapiens
ctgcaaaggaactcc

SEQ ID NO: 25544 - DNA, 15 bp, Homo sapiens
gctgcaaaggaactc

SEQ ID NO: 25545 - DNA, 15 bp, Homo sapiens
tgctgcaaaggaact

SEQ ID NO: 25546 - DNA, 15 bp, Homo sapiens
gtgctgcaaaggaac

SEQ ID NO: 25547 - DNA, 15 bp, Homo sapiens
cgtgctgcaaaggaa

SEQ ID NO: 25548 - DNA, 15 bp, Homo sapiens
gcgtgctgcaaagga

SEQ ID NO: 25549 - DNA, 15 bp, Homo sapiens
agcgtgctgcaaagg

SEQ ID NO: 25550 - DNA, 15 bp, Homo sapiens
aagcgtgctgcaaag

SEQ ID NO: 25551 - DNA, 15 bp, Homo sapiens
caagcgtgctgcaaa

SEQ ID NO: 25552 - DNA, 15 bp, Homo sapiens
ccaagcgtgctgcaa

SEQ ID NO: 25553 - DNA, 15 bp, Homo sapiens
tccaagcgtgctgca

SEQ ID NO: 25554 - DNA, 15 bp, Homo sapiens
ttccaagcgtgctgc

SEQ ID NO: 25555 - DNA, 15 bp, Homo sapiens
attccaagcgtgctg

SEQ ID NO: 25556 - DNA, 15 bp, Homo sapiens
aattccaagcgtgct

SEQ ID NO: 25557 - DNA, 15 bp, Homo sapiens
caattccaagcgtgc

SEQ ID NO: 25558 - DNA, 15 bp, Homo sapiens
gcaattccaagcgtg

SEQ ID NO: 25559 - DNA, 15 bp, Homo sapiens
tgcaattccaagcgt

SEQ ID NO: 25560 - DNA, 15 bp, Homo sapiens
atgcaattccaagcg

SEQ ID NO: 25561 - DNA, 15 bp, Homo sapiens
gatgcaattccaagc

SEQ ID NO: 25562 - DNA, 15 bp, Homo sapiens
tgatgcaattccaag

SEQ ID NO: 25563 - DNA, 15 bp, Homo sapiens
ctgatgcaattccaa

SEQ ID NO: 25564 - DNA, 15 bp, Homo sapiens
tctgatgcaattcca

SEQ ID NO: 25565 - DNA, 15 bp, Homo sapiens
gtctgatgcaattcc

SEQ ID NO: 25566 - DNA, 15 bp, Homo sapiens
agtctgatgcaattc

SEQ ID NO: 25567 - DNA, 15 bp, Homo sapiens
cagtctgatgcaatt

SEQ ID NO: 25568 - DNA, 15 bp, Homo sapiens
tcagtctgatgcaat

SEQ ID NO: 25569 - DNA, 15 bp, Homo sapiens
atcagtctgatgcaa

SEQ ID NO: 25570 - DNA, 15 bp, Homo sapiens
gatcagtctgatgca

SEQ ID NO: 25571 - DNA, 15 bp, Homo sapiens
tgatcagtctgatgc

SEQ ID NO: 25572 - DNA, 15 bp, Homo sapiens
ctgatcagtctgatg

SEQ ID NO: 25573 - DNA, 15 bp, Homo sapiens
tctgatcagtctgat

SEQ ID NO: 25574 - DNA, 15 bp, Homo sapiens
ttctgatcagtctga

SEQ ID NO: 25575 - DNA, 15 bp, Homo sapiens
tttctgatcagtctg

SEQ ID NO: 25576 - DNA, 15 bp, Homo sapiens
atttctgatcagtct

SEQ ID NO: 25577 - DNA, 15 bp, Homo sapiens
gatttctgatcagtc

SEQ ID NO: 25578 - DNA, 15 bp, Homo sapiens
ggatttctgatcagt

SEQ ID NO: 25579 - DNA, 15 bp, Homo sapiens
gggatttctgatcag

SEQ ID NO: 25580 - DNA, 15 bp, Homo sapiens
ggggatttctgatca

SEQ ID NO: 25581 - DNA, 15 bp, Homo sapiens
gggggatttctgatc

SEQ ID NO: 25582 - DNA, 15 bp, Homo sapiens
ggggggatttctgat

SEQ ID NO: 25583 - DNA, 15 bp, Homo sapiens
cggggggatttctga

SEQ ID NO: 25584 - DNA, 15 bp, Homo sapiens
gcggggggatttctg

SEQ ID NO: 25585 - DNA, 15 bp, Homo sapiens
ggcggggggatttct

SEQ ID NO: 25586 - DNA, 15 bp, Homo sapiens
gggcggggggatttc

SEQ ID NO: 25587 - DNA, 15 bp, Homo sapiens
ggggcggggggattt

SEQ ID NO: 25588 - DNA, 15 bp, Homo sapiens
gggggcggggggatt

SEQ ID NO: 25589 - DNA, 15 bp, Homo sapiens
tgggggcggggggat

SEQ ID NO: 25590 - DNA, 15 bp, Homo sapiens
ttgggggcgggggga

SEQ ID NO: 25591 - DNA, 15 bp, Homo sapiens
cttgggggcgggggg

SEQ ID NO: 25592 - DNA, 15 bp, Homo sapiens
gcttgggggcggggg

SEQ ID NO: 25593 - DNA, 15 bp, Homo sapiens
agcttgggggcgggg

SEQ ID NO: 25594 - DNA, 15 bp, Homo sapiens
gagcttgggggcggg

SEQ ID NO: 25595 - DNA, 15 bp, Homo sapiens
tgagcttgggggcgg

SEQ ID NO: 25596 - DNA, 15 bp, Homo sapiens
ctgagcttgggggcg

SEQ ID NO: 25597 - DNA, 15 bp, Homo sapiens
gctgagcttgggggc

SEQ ID NO: 25598 - DNA, 15 bp, Homo sapiens
ggctgagcttggggg

SEQ ID NO: 25599 - DNA, 15 bp, Homo sapiens
gggctgagcttgggg

SEQ ID NO: 25600 - DNA, 15 bp, Homo sapiens
ggggctgagcttggg

SEQ ID NO: 25601 - DNA, 15 bp, Homo sapiens
aggggctgagcttgg

SEQ ID NO: 25602 - DNA, 15 bp, Homo sapiens
gaggggctgagcttg

SEQ ID NO: 25603 - DNA, 15 bp, Homo sapiens
ggaggggctgagctt

SEQ ID NO: 25604 - DNA, 15 bp, Homo sapiens
gggaggggctgagct

SEQ ID NO: 25605 - DNA, 15 bp, Homo sapiens
cgggaggggctgagc

SEQ ID NO: 25606 - DNA, 15 bp, Homo sapiens
gcgggaggggctgag

SEQ ID NO: 25607 - DNA, 15 bp, Homo sapiens
ggcgggaggggctga

SEQ ID NO: 25608 - DNA, 15 bp, Homo sapiens
tggcgggaggggctg

SEQ ID NO: 25609 - DNA, 15 bp, Homo sapiens
gtggcgggaggggct

SEQ ID NO: 25610 - DNA, 15 bp, Homo sapiens
cgtggcgggaggggc

SEQ ID NO: 25611 - DNA, 15 bp, Homo sapiens
gcgtggcgggagggg

SEQ ID NO: 25612 - DNA, 15 bp, Homo sapiens
agcgtggcgggaggg

SEQ ID NO: 25613 - DNA, 15 bp, Homo sapiens
gagcgtggcgggagg

SEQ ID NO: 25614 - DNA, 15 bp, Homo sapiens
ggagcgtggcgggag

SEQ ID NO: 25615 - DNA, 15 bp, Homo sapiens
gggagcgtggcggga

SEQ ID NO: 25616 - DNA, 15 bp, Homo sapiens
ggggagcgtggcggg

SEQ ID NO: 25617 - DNA, 15 bp, Homo sapiens
aggggagcgtggcgg

SEQ ID NO: 25618 - DNA, 15 bp, Homo sapiens
caggggagcgtggcg

SEQ ID NO: 25619 - DNA, 15 bp, Homo sapiens
gcaggggagcgtggc

SEQ ID NO: 25620 - DNA, 15 bp, Homo sapiens
ggcaggggagcgtgg

SEQ ID NO: 25621 - DNA, 15 bp, Homo sapiens
gggcaggggagcgtg

SEQ ID NO: 25622 - DNA, 15 bp, Homo sapiens
cgggcaggggagcgt

SEQ ID NO: 25623 - DNA, 15 bp, Homo sapiens
gcgggcaggggagcg

SEQ ID NO: 25624 - DNA, 15 bp, Homo sapiens
ggcgggcaggggagc

SEQ ID NO: 25625 - DNA, 15 bp, Homo sapiens
gggcgggcaggggag

SEQ ID NO: 25626 - DNA, 15 bp, Homo sapiens
ggggcgggcagggga

SEQ ID NO: 25627 - DNA, 15 bp, Homo sapiens
aggggcgggcagggg

SEQ ID NO: 25628 - DNA, 15 bp, Homo sapiens
gaggggcgggcaggg

SEQ ID NO: 25629 - DNA, 15 bp, Homo sapiens
ggaggggcgggcagg

SEQ ID NO: 25630 - DNA, 15 bp, Homo sapiens
gggaggggcgggcag

SEQ ID NO: 25631 - DNA, 15 bp, Homo sapiens
ggggaggggcgggca

SEQ ID NO: 25632 - DNA, 15 bp, Homo sapiens
aggggaggggcgggc

SEQ ID NO: 25633 - DNA, 15 bp, Homo sapiens
gaggggaggggcggg

SEQ ID NO: 25634 - DNA, 15 bp, Homo sapiens
ggaggggaggggcgg

SEQ ID NO: 25635 - DNA, 15 bp, Homo sapiens
gggaggggaggggcg

SEQ ID NO: 25636 - DNA, 15 bp, Homo sapiens
ggggaggggaggggc

SEQ ID NO: 25637 - DNA, 15 bp, Homo sapiens
aggggaggggagggg

SEQ ID NO: 25638 - DNA, 15 bp, Homo sapiens
gaggggaggggaggg

SEQ ID NO: 25639 - DNA, 15 bp, Homo sapiens
ggaggggaggggagg

SEQ ID NO: 25640 - DNA, 15 bp, Homo sapiens
gggaggggaggggag

SEQ ID NO: 25641 - DNA, 15 bp, Homo sapiens
agggaggggagggga

SEQ ID NO: 25642 - DNA, 15 bp, Homo sapiens
aagggaggggagggg

SEQ ID NO: 25643 - DNA, 15 bp, Homo sapiens
gaagggaggggaggg

SEQ ID NO: 25644 - DNA, 15 bp, Homo sapiens
cgaagggaggggagg

SEQ ID NO: 25645 - DNA, 15 bp, Homo sapiens
gcgaagggaggggag

SEQ ID NO: 25646 - DNA, 15 bp, Homo sapiens
cgcgaagggagggga

SEQ ID NO: 25647 - DNA, 15 bp, Homo sapiens
acgcgaagggagggg

SEQ ID NO: 25648 - DNA, 15 bp, Homo sapiens
tacgcgaagggaggg

SEQ ID NO: 25649 - DNA, 15 bp, Homo sapiens
ctacgcgaagggagg

SEQ ID NO: 25650 - DNA, 15 bp, Homo sapiens
tctacgcgaagggag

SEQ ID NO: 25651 - DNA, 15 bp, Homo sapiens
atctacgcgaaggga

SEQ ID NO: 25652 - DNA, 15 bp, Homo sapiens
gatctacgcgaaggg

SEQ ID NO: 25653 - DNA, 15 bp, Homo sapiens
agatctacgcgaagg

SEQ ID NO: 25654 - DNA, 15 bp, Homo sapiens
cagatctacgcgaag

SEQ ID NO: 25655 - DNA, 15 bp, Homo sapiens
tcagatctacgcgaa

SEQ ID NO: 25656 - DNA, 15 bp, Homo sapiens
gtcagatctacgcga

SEQ ID NO: 25657 - DNA, 15 bp, Homo sapiens
agtcagatctacgcg

SEQ ID NO: 25658 - DNA, 15 bp, Homo sapiens
cagtcagatctacgc

SEQ ID NO: 25659 - DNA, 15 bp, Homo sapiens
tcagtcagatctacg

SEQ ID NO: 25660 - DNA, 15 bp, Homo sapiens
ctcagtcagatctac

SEQ ID NO: 25661 - DNA, 15 bp, Homo sapiens
tctcagtcagatcta

SEQ ID NO: 25662 - DNA, 15 bp, Homo sapiens
ttctcagtcagatct

SEQ ID NO: 25663 - DNA, 15 bp, Homo sapiens
tttctcagtcagatc

SEQ ID NO: 25664 - DNA, 15 bp, Homo sapiens
ttttctcagtcagat

SEQ ID NO: 25665 - DNA, 15 bp, Homo sapiens
gttttctcagtcaga

SEQ ID NO: 25666 - DNA, 15 bp, Homo sapiens
cgttttctcagtcag

SEQ ID NO: 25667 - DNA, 15 bp, Homo sapiens
tcgttttctcagtca

SEQ ID NO: 25668 - DNA, 15 bp, Homo sapiens
gtcgttttctcagtc

SEQ ID NO: 25669 - DNA, 15 bp, Homo sapiens
agtcgttttctcagt

SEQ ID NO: 25670 - DNA, 15 bp, Homo sapiens
cagtcgttttctcag

SEQ ID NO: 25671 - DNA, 15 bp, Homo sapiens
ccagtcgttttctca

SEQ ID NO: 25672 - DNA, 15 bp, Homo sapiens
tccagtcgttttctc

SEQ ID NO: 25673 - DNA, 15 bp, Homo sapiens
atccagtcgttttct

SEQ ID NO: 25674 - DNA, 15 bp, Homo sapiens
gatccagtcgttttc

SEQ ID NO: 25675 - DNA, 15 bp, Homo sapiens
agatccagtcgtttt

SEQ ID NO: 25676 - DNA, 15 bp, Homo sapiens
gagatccagtcgttt

SEQ ID NO: 25677 - DNA, 15 bp, Homo sapiens
cgagatccagtcgtt

SEQ ID NO: 25678 - DNA, 15 bp, Homo sapiens
ccgagatccagtcgt

SEQ ID NO: 25679 - DNA, 15 bp, Homo sapiens
tccgagatccagtcg

SEQ ID NO: 25680 - DNA, 15 bp, Homo sapiens
ttccgagatccagtc

SEQ ID NO: 25681 - DNA, 15 bp, Homo sapiens
gttccgagatccagt

SEQ ID NO: 25682 - DNA, 15 bp, Homo sapiens
tgttccgagatccag

SEQ ID NO: 25683 - DNA, 15 bp, Homo sapiens
ttgttccgagatcca

SEQ ID NO: 25684 - DNA, 15 bp, Homo sapiens
attgttccgagatcc

SEQ ID NO: 25685 - DNA, 15 bp, Homo sapiens
gattgttccgagatc

SEQ ID NO: 25686 - DNA, 15 bp, Homo sapiens
agattgttccgagat

SEQ ID NO: 25687 - DNA, 15 bp, Homo sapiens
cagattgttccgaga

SEQ ID NO: 25688 - DNA, 15 bp, Homo sapiens
acagattgttccgag

SEQ ID NO: 25689 - DNA, 15 bp, Homo sapiens
cacagattgttccga

SEQ ID NO: 25690 - DNA, 15 bp, Homo sapiens
gcacagattgttccg

SEQ ID NO: 25691 - DNA, 15 bp, Homo sapiens
ggcacagattgttcc

SEQ ID NO: 25692 - DNA, 15 bp, Homo sapiens
gggcacagattgttc

SEQ ID NO: 25693 - DNA, 15 bp, Homo sapiens
ggggcacagattgtt

SEQ ID NO: 25694 - DNA, 15 bp, Homo sapiens
tggggcacagattgt

SEQ ID NO: 25695 - DNA, 15 bp, Homo sapiens
atggggcacagattg

SEQ ID NO: 25696 - DNA, 15 bp, Homo sapiens
aatggggcacagatt

SEQ ID NO: 25697 - DNA, 15 bp, Homo sapiens
gaatggggcacagat

SEQ ID NO: 25698 - DNA, 15 bp, Homo sapiens
cgaatggggcacaga

SEQ ID NO: 25699 - DNA, 15 bp, Homo sapiens
gcgaatggggcacag

SEQ ID NO: 25700 - DNA, 15 bp, Homo sapiens
agcgaatggggcaca

SEQ ID NO: 25701 - DNA, 15 bp, Homo sapiens
cagcgaatggggcac

SEQ ID NO: 25702 - DNA, 15 bp, Homo sapiens
gcagcgaatggggca

SEQ ID NO: 25703 - DNA, 15 bp, Homo sapiens
tgcagcgaatggggc

SEQ ID NO: 25704 - DNA, 15 bp, Homo sapiens
ctgcagcgaatgggg

SEQ ID NO: 25705 - DNA, 15 bp, Homo sapiens
cctgcagcgaatggg

SEQ ID NO: 25706 - DNA, 15 bp, Homo sapiens
gcctgcagcgaatgg

SEQ ID NO: 25707 - DNA, 15 bp, Homo sapiens
agcctgcagcgaatg

SEQ ID NO: 25708 - DNA, 15 bp, Homo sapiens
aagcctgcagcgaat

SEQ ID NO: 25709 - DNA, 15 bp, Homo sapiens
caagcctgcagcgaa

SEQ ID NO: 25710 - DNA, 15 bp, Homo sapiens
gcaagcctgcagcga

SEQ ID NO: 25711 - DNA, 15 bp, Homo sapiens
agcaagcctgcagcg

SEQ ID NO: 25712 - DNA, 15 bp, Homo sapiens
gagcaagcctgcagc

SEQ ID NO: 25713 - DNA, 15 bp, Homo sapiens
ggagcaagcctgcag

SEQ ID NO: 25714 - DNA, 15 bp, Homo sapiens
cggagcaagcctgca

SEQ ID NO: 25715 - DNA, 15 bp, Homo sapiens
acggagcaagcctgc

SEQ ID NO: 25716 - DNA, 15 bp, Homo sapiens
tacggagcaagcctg

SEQ ID NO: 25717 - DNA, 15 bp, Homo sapiens
ttacggagcaagcct

SEQ ID NO: 25718 - DNA, 15 bp, Homo sapiens
tttacggagcaagcc

SEQ ID NO: 25719 - DNA, 15 bp, Homo sapiens
gtttacggagcaagc

SEQ ID NO: 25720 - DNA, 15 bp, Homo sapiens
ggtttacggagcaag

SEQ ID NO: 25721 - DNA, 15 bp, Homo sapiens
gggtttacggagcaa

SEQ ID NO: 25722 - DNA, 15 bp, Homo sapiens
agggtttacggagca

SEQ ID NO: 25723 - DNA, 15 bp, Homo sapiens
cagggtttacggagc

SEQ ID NO: 25724 - DNA, 15 bp, Homo sapiens
gcagggtttacggag

SEQ ID NO: 25725 - DNA, 15 bp, Homo sapiens
ggcagggtttacgga

SEQ ID NO: 25726 - DNA, 15 bp, Homo sapiens
gggcagggtttacgg

SEQ ID NO: 25727 - DNA, 15 bp, Homo sapiens
agggcagggtttacg

SEQ ID NO: 25728 - DNA, 15 bp, Homo sapiens
tagggcagggtttac

SEQ ID NO: 25729 - DNA, 15 bp, Homo sapiens
gtagggcagggttta

SEQ ID NO: 25730 - DNA, 15 bp, Homo sapiens
cgtagggcagggttt

SEQ ID NO: 25731 - DNA, 15 bp, Homo sapiens
gcgtagggcagggtt

SEQ ID NO: 25732 - DNA, 15 bp, Homo sapiens
agcgtagggcagggt

SEQ ID NO: 25733 - DNA, 15 bp, Homo sapiens
gagcgtagggcaggg

SEQ ID NO: 25734 - DNA, 15 bp, Homo sapiens
ggagcgtagggcagg

SEQ ID NO: 25735 - DNA, 15 bp, Homo sapiens
gggagcgtagggcag

SEQ ID NO: 25736 - DNA, 15 bp, Homo sapiens
agggagcgtagggca

SEQ ID NO: 25737 - DNA, 15 bp, Homo sapiens
aagggagcgtagggc

SEQ ID NO: 25738 - DNA, 15 bp, Homo sapiens
aaagggagcgtaggg

SEQ ID NO: 25739 - DNA, 15 bp, Homo sapiens
caaagggagcgtagg

SEQ ID NO: 25740 - DNA, 15 bp, Homo sapiens
acaaagggagcgtag

SEQ ID NO: 25741 - DNA, 15 bp, Homo sapiens
cacaaagggagcgta

SEQ ID NO: 25742 - DNA, 15 bp, Homo sapiens
acacaaagggagcgt

SEQ ID NO: 25743 - DNA, 15 bp, Homo sapiens
cacacaaagggagcg

SEQ ID NO: 25744 - DNA, 15 bp, Homo sapiens
gcacacaaagggagc

SEQ ID NO: 25745 - DNA, 15 bp, Homo sapiens
ggcacacaaagggag

SEQ ID NO: 25746 - DNA, 15 bp, Homo sapiens
cggcacacaaaggga

SEQ ID NO: 25747 - DNA, 15 bp, Homo sapiens
tcggcacacaaaggg

SEQ ID NO: 25748 - DNA, 15 bp, Homo sapiens
ctcggcacacaaagg

SEQ ID NO: 25749 - DNA, 15 bp, Homo sapiens
gctcggcacacaaag

SEQ ID NO: 25750 - DNA, 15 bp, Homo sapiens
tgctcggcacacaaa

SEQ ID NO: 25751 - DNA, 15 bp, Homo sapiens
ctgctcggcacacaa

SEQ ID NO: 25752 - DNA, 15 bp, Homo sapiens
gctgctcggcacaca

SEQ ID NO: 25753 - DNA, 15 bp, Homo sapiens
ggctgctcggcacac

SEQ ID NO: 25754 - DNA, 15 bp, Homo sapiens
aggctgctcggcaca

SEQ ID NO: 25755 - DNA, 15 bp, Homo sapiens
taggctgctcggcac

SEQ ID NO: 25756 - DNA, 15 bp, Homo sapiens
ataggctgctcggca

SEQ ID NO: 25757 - DNA, 15 bp, Homo sapiens
gataggctgctcggc

SEQ ID NO: 25758 - DNA, 15 bp, Homo sapiens
tgataggctgctcgg

SEQ ID NO: 25759 - DNA, 15 bp, Homo sapiens
gtgataggctgctcg

SEQ ID NO: 25760 - DNA, 15 bp, Homo sapiens
ggtgataggctgctc

SEQ ID NO: 25761 - DNA, 15 bp, Homo sapiens
cggtgataggctgct

SEQ ID NO: 25762 - DNA, 15 bp, Homo sapiens
acggtgataggctgc

SEQ ID NO: 25763 - DNA, 15 bp, Homo sapiens
gacggtgataggctg

SEQ ID NO: 25764 - DNA, 15 bp, Homo sapiens
tgacggtgataggct

SEQ ID NO: 25765 - DNA, 15 bp, Homo sapiens
atgacggtgataggc

SEQ ID NO: 25766 - DNA, 15 bp, Homo sapiens
gatgacggtgatagg

SEQ ID NO: 25767 - DNA, 15 bp, Homo sapiens
agatgacggtgatag

SEQ ID NO: 25768 - DNA, 15 bp, Homo sapiens
cagatgacggtgata

SEQ ID NO: 25769 - DNA, 15 bp, Homo sapiens
tcagatgacggtgat

SEQ ID NO: 25770 - DNA, 15 bp, Homo sapiens
atcagatgacggtga

SEQ ID NO: 25771 - DNA, 15 bp, Homo sapiens
gatcagatgacggtg

SEQ ID NO: 25772 - DNA, 15 bp, Homo sapiens
ggatcagatgacggt

SEQ ID NO: 25773 - DNA, 15 bp, Homo sapiens
aggatcagatgacgg

SEQ ID NO: 25774 - DNA, 15 bp, Homo sapiens
taggatcagatgacg

SEQ ID NO: 25775 - DNA, 15 bp, Homo sapiens
ctaggatcagatgac

SEQ ID NO: 25776 - DNA, 15 bp, Homo sapiens
gctaggatcagatga

SEQ ID NO: 25777 - DNA, 15 bp, Homo sapiens
cgctaggatcagatg

SEQ ID NO: 25778 - DNA, 15 bp, Homo sapiens
gcgctaggatcagat

SEQ ID NO: 25779 - DNA, 15 bp, Homo sapiens
ggcgctaggatcaga

SEQ ID NO: 25780 - DNA, 15 bp, Homo sapiens
aggcgctaggatcag

SEQ ID NO: 25781 - DNA, 15 bp, Homo sapiens
caggcgctaggatca

SEQ ID NO: 25782 - DNA, 15 bp, Homo sapiens
acaggcgctaggatc

SEQ ID NO: 25783 - DNA, 15 bp, Homo sapiens
aacaggcgctaggat

SEQ ID NO: 25784 - DNA, 15 bp, Homo sapiens
aaacaggcgctagga

SEQ ID NO: 25785 - DNA, 15 bp, Homo sapiens
aaaacaggcgctagg

SEQ ID NO: 25786 - DNA, 15 bp, Homo sapiens
aaaaacaggcgctag

SEQ ID NO: 25787 - DNA, 15 bp, Homo sapiens
aaaaaacaggcgcta

SEQ ID NO: 25788 - DNA, 15 bp, Homo sapiens
taaaaaacaggcgct

SEQ ID NO: 25789 - DNA, 15 bp, Homo sapiens
ataaaaaacaggcgc

SEQ ID NO: 25790 - DNA, 15 bp, Homo sapiens
gataaaaaacaggcg

SEQ ID NO: 25791 - DNA, 15 bp, Homo sapiens
agataaaaaacaggc

SEQ ID NO: 25792 - DNA, 15 bp, Homo sapiens
aagataaaaaacagg

SEQ ID NO: 25793 - DNA, 15 bp, Homo sapiens
aaagataaaaaacag

SEQ ID NO: 25794 - DNA, 15 bp, Homo sapiens
aaaagataaaaaaca

SEQ ID NO: 25795 - DNA, 15 bp, Homo sapiens
gaaaagataaaaaac

SEQ ID NO: 25796 - DNA, 15 bp, Homo sapiens
ggaaaagataaaaaa

SEQ ID NO: 25797 - DNA, 15 bp, Homo sapiens
aggaaaagataaaaa

SEQ ID NO: 25798 - DNA, 15 bp, Homo sapiens
aaggaaaagataaaa

SEQ ID NO: 25799 - DNA, 15 bp, Homo sapiens
gaaggaaaagataaa

SEQ ID NO: 25800 - DNA, 15 bp, Homo sapiens
agaaggaaaagataa

SEQ ID NO: 25801 - DNA, 15 bp, Homo sapiens
cagaaggaaaagata

SEQ ID NO: 25802 - DNA, 15 bp, Homo sapiens
tcagaaggaaaagat

SEQ ID NO: 25803 - DNA, 15 bp, Homo sapiens
ttcagaaggaaaaga

SEQ ID NO: 25804 - DNA, 15 bp, Homo sapiens
attcagaaggaaaag

SEQ ID NO: 25805 - DNA, 15 bp, Homo sapiens
aattcagaaggaaaa

SEQ ID NO: 25806 - DNA, 15 bp, Homo sapiens
aaattcagaaggaaa

SEQ ID NO: 25807 - DNA, 15 bp, Homo sapiens
gaaattcagaaggaa

SEQ ID NO: 25808 - DNA, 15 bp, Homo sapiens
ggaaattcagaagga

SEQ ID NO: 25809 - DNA, 15 bp, Homo sapiens
tggaaattcagaagg

SEQ ID NO: 25810 - DNA, 15 bp, Homo sapiens
gtggaaattcagaag

SEQ ID NO: 25811 - DNA, 15 bp, Homo sapiens
tgtggaaattcagaa

SEQ ID NO: 25812 - DNA, 15 bp, Homo sapiens
ttgtggaaattcaga

SEQ ID NO: 25813 - DNA, 15 bp, Homo sapiens
attgtggaaattcag

SEQ ID NO: 25814 - DNA, 15 bp, Homo sapiens
tattgtggaaattca

SEQ ID NO: 25815 - DNA, 15 bp, Homo sapiens
atattgtggaaattc

SEQ ID NO: 25816 - DNA, 15 bp, Homo sapiens
gatattgtggaaatt

SEQ ID NO: 25817 - DNA, 15 bp, Homo sapiens
ggatattgtggaaat

SEQ ID NO: 25818 - DNA, 15 bp, Homo sapiens
aggatattgtggaaa

SEQ ID NO: 25819 - DNA, 15 bp, Homo sapiens
gaggatattgtggaa

SEQ ID NO: 25820 - DNA, 15 bp, Homo sapiens
cgaggatattgtgga

SEQ ID NO: 25821 - DNA, 15 bp, Homo sapiens
gcgaggatattgtgg

SEQ ID NO: 25822 - DNA, 15 bp, Homo sapiens
agcgaggatattgtg

SEQ ID NO: 25823 - DNA, 15 bp, Homo sapiens
aagcgaggatattgt

SEQ ID NO: 25824 - DNA, 15 bp, Homo sapiens
gaagcgaggatattg

SEQ ID NO: 25825 - DNA, 15 bp, Homo sapiens
cgaagcgaggatatt

SEQ ID NO: 25826 - DNA, 15 bp, Homo sapiens
gcgaagcgaggatat

SEQ ID NO: 25827 - DNA, 15 bp, Homo sapiens
ggcgaagcgaggata

SEQ ID NO: 25828 - DNA, 15 bp, Homo sapiens
aggcgaagcgaggat

SEQ ID NO: 25829 - DNA, 15 bp, Homo sapiens
taggcgaagcgagga

SEQ ID NO: 25830 - DNA, 15 bp, Homo sapiens
ataggcgaagcgagg

SEQ ID NO: 25831 - DNA, 15 bp, Homo sapiens
cataggcgaagcgag

SEQ ID NO: 25832 - DNA, 15 bp, Homo sapiens
tcataggcgaagcga

SEQ ID NO: 25833 - DNA, 15 bp, Homo sapiens
ttcataggcgaagcg

SEQ ID NO: 25834 - DNA, 15 bp, Homo sapiens
attcataggcgaagc

SEQ ID NO: 25835 - DNA, 15 bp, Homo sapiens
gattcataggcgaag

SEQ ID NO: 25836 - DNA, 15 bp, Homo sapiens
ggattcataggcgaa

SEQ ID NO: 25837 - DNA, 15 bp, Homo sapiens
tggattcataggcga

SEQ ID NO: 25838 - DNA, 15 bp, Homo sapiens
gtggattcataggcg

SEQ ID NO: 25839 - DNA, 15 bp, Homo sapiens
ggtggattcataggc

SEQ ID NO: 25840 - DNA, 15 bp, Homo sapiens
aggtggattcatagg

SEQ ID NO: 25841 - DNA, 15 bp, Homo sapiens
caggtggattcatag

SEQ ID NO: 25842 - DNA, 15 bp, Homo sapiens
gcaggtggattcata

SEQ ID NO: 25843 - DNA, 15 bp, Homo sapiens
cgcaggtggattcat

SEQ ID NO: 25844 - DNA, 15 bp, Homo sapiens
gcgcaggtggattca

SEQ ID NO: 25845 - DNA, 15 bp, Homo sapiens
tgcgcaggtggattc

SEQ ID NO: 25846 - DNA, 15 bp, Homo sapiens
ctgcgcaggtggatt

SEQ ID NO: 25847 - DNA, 15 bp, Homo sapiens
tctgcgcaggtggat

SEQ ID NO: 25848 - DNA, 15 bp, Homo sapiens
ctctgcgcaggtgga

SEQ ID NO: 25849 - DNA, 15 bp, Homo sapiens
actctgcgcaggtgg

SEQ ID NO: 25850 - DNA, 15 bp, Homo sapiens
aactctgcgcaggtg

SEQ ID NO: 25851 - DNA, 15 bp, Homo sapiens
caactctgcgcaggt

SEQ ID NO: 25852 - DNA, 15 bp, Homo sapiens
ccaactctgcgcagg

SEQ ID NO: 25853 - DNA, 15 bp, Homo sapiens
cccaactctgcgcag

SEQ ID NO: 25854 - DNA, 15 bp, Homo sapiens
tcccaactctgcgca

SEQ ID NO: 25855 - DNA, 15 bp, Homo sapiens
atcccaactctgcgc

SEQ ID NO: 25856 - DNA, 15 bp, Homo sapiens
aatcccaactctgcg

SEQ ID NO: 25857 - DNA, 15 bp, Homo sapiens
agaatcccaactctg

SEQ ID NO: 25858 - DNA, 15 bp, Homo sapiens
aagaatcccaactct

SEQ ID NO: 25859 - DNA, 15 bp, Homo sapiens
aaagaatcccaactc

SEQ ID NO: 25860 - DNA, 15 bp, Homo sapiens
gaaagaatcccaact

SEQ ID NO: 25861 - DNA, 15 bp, Homo sapiens
agaaagaatcccaac

SEQ ID NO: 25862 - DNA, 15 bp, Homo sapiens
aagaaagaatcccaa

SEQ ID NO: 25863 - DNA, 15 bp, Homo sapiens
aaagaaagaatccca

SEQ ID NO: 25864 - DNA, 15 bp, Homo sapiens
gaaagaaagaatccc

SEQ ID NO: 25865 - DNA, 15 bp, Homo sapiens
cgaaagaaagaatcc

SEQ ID NO: 25866 - DNA, 15 bp, Homo sapiens
acgaaagaaagaatc

SEQ ID NO: 25867 - DNA, 15 bp, Homo sapiens
aacgaaagaaagaat

SEQ ID NO: 25868 - DNA, 15 bp, Homo sapiens
gaacgaaagaaagaa

SEQ ID NO: 25869 - DNA, 15 bp, Homo sapiens
cgaacgaaagaaaga

SEQ ID NO: 25870 - DNA, 15 bp, Homo sapiens
acgaacgaaagaaag

SEQ ID NO: 25871 - DNA, 15 bp, Homo sapiens
aacgaacgaaagaaa

SEQ ID NO: 25872 - DNA, 15 bp, Homo sapiens
taacgaacgaaagaa

SEQ ID NO: 25873 - DNA, 15 bp, Homo sapiens
ttaacgaacgaaaga

SEQ ID NO: 25874 - DNA, 15 bp, Homo sapiens
tttaacgaacgaaag

SEQ ID NO: 25875 - DNA, 15 bp, Homo sapiens
ttttaacgaacgaaa

SEQ ID NO: 25876 - DNA, 15 bp, Homo sapiens
gttttaacgaacgaa

SEQ ID NO: 25877 - DNA, 15 bp, Homo sapiens
tgttttaacgaacga

SEQ ID NO: 25878 - DNA, 15 bp, Homo sapiens
ctgttttaacgaacg

SEQ ID NO: 25879 - DNA, 15 bp, Homo sapiens
actgttttaacgaac

SEQ ID NO: 25880 - DNA, 15 bp, Homo sapiens
cactgttttaacgaa

SEQ ID NO: 25881 - DNA, 15 bp, Homo sapiens
ccactgttttaacga

SEQ ID NO: 25882 - DNA, 15 bp, Homo sapiens
accactgttttaacg

SEQ ID NO: 25883 - DNA, 15 bp, Homo sapiens
gaccactgttttaac

SEQ ID NO: 25884 - DNA, 15 bp, Homo sapiens
agaccactgttttaa

SEQ ID NO: 25885 - DNA, 15 bp, Homo sapiens
aagaccactgtttta

SEQ ID NO: 25886 - DNA, 15 bp, Homo sapiens
caagaccactgtttt

SEQ ID NO: 25887 - DNA, 15 bp, Homo sapiens
tcaagaccactgttt

SEQ ID NO: 25888 - DNA, 15 bp, Homo sapiens
ctcaagaccactgtt

SEQ ID NO: 25889 - DNA, 15 bp, Homo sapiens
actcaagaccactgt

SEQ ID NO: 25890 - DNA, 15 bp, Homo sapiens
aactcaagaccactg

SEQ ID NO: 25891 - DNA, 15 bp, Homo sapiens
aaactcaagaccact

SEQ ID NO: 25892 - DNA, 15 bp, Homo sapiens
gaaactcaagaccac

SEQ ID NO: 25893 - DNA, 15 bp, Homo sapiens
cgaaactcaagacca

SEQ ID NO: 25894 - DNA, 15 bp, Homo sapiens
ccgaaactcaagacc

SEQ ID NO: 25895 - DNA, 15 bp, Homo sapiens
tccgaaactcaagac

SEQ ID NO: 25896 - DNA, 15 bp, Homo sapiens
ttccgaaactcaaga

SEQ ID NO: 25897 - DNA, 15 bp, Homo sapiens
tttccgaaactcaag

SEQ ID NO: 25898 - DNA, 15 bp, Homo sapiens
gtttccgaaactcaa

SEQ ID NO: 25899 - DNA, 15 bp, Homo sapiens
tgtttccgaaactca

SEQ ID NO: 25900 - DNA, 15 bp, Homo sapiens
ctgtttccgaaactc

SEQ ID NO: 25901 - DNA, 15 bp, Homo sapiens
tctgtttccgaaact

SEQ ID NO: 25902 - DNA, 15 bp, Homo sapiens
atctgtttccgaaac

SEQ ID NO: 25903 - DNA, 15 bp, Homo sapiens
aatctgtttccgaaa

SEQ ID NO: 25904 - DNA, 15 bp, Homo sapiens
aaatctgtttccgaa

SEQ ID NO: 25905 - DNA, 15 bp, Homo sapiens
aaaatctgtttccga

SEQ ID NO: 25906 - DNA, 15 bp, Homo sapiens
aaaaatctgtttccg

SEQ ID NO: 25907 - DNA, 15 bp, Homo sapiens
gaaaaatctgtttcc

SEQ ID NO: 25908 - DNA, 15 bp, Homo sapiens
ggaaaaatctgtttc

SEQ ID NO: 25909 - DNA, 15 bp, Homo sapiens
aggaaaaatctgttt

SEQ ID NO: 25910 - DNA, 15 bp, Homo sapiens
taggaaaaatctgtt

SEQ ID NO: 25911 - DNA, 15 bp, Homo sapiens
gtaggaaaaatctgt

SEQ ID NO: 25912 - DNA, 15 bp, Homo sapiens
cgtaggaaaaatctg

SEQ ID NO: 25913 - DNA, 15 bp, Homo sapiens
acgtaggaaaaatct

SEQ ID NO: 25914 - DNA, 15 bp, Homo sapiens
aacgtaggaaaaatc

SEQ ID NO: 25915 - DNA, 15 bp, Homo sapiens
gaacgtaggaaaaat

SEQ ID NO: 25916 - DNA, 15 bp, Homo sapiens
ggaacgtaggaaaaa

SEQ ID NO: 25917 - DNA, 15 bp, Homo sapiens
gggaacgtaggaaaa

SEQ ID NO: 25918 - DNA, 15 bp, Homo sapiens
ggggaacgtaggaaa

SEQ ID NO: 25919 - DNA, 15 bp, Homo sapiens
aggggaacgtaggaa

SEQ ID NO: 25920 - DNA, 15 bp, Homo sapiens
gaggggaacgtagga

SEQ ID NO: 25921 - DNA, 15 bp, Homo sapiens
tgaggggaacgtagg

SEQ ID NO: 25922 - DNA, 15 bp, Homo sapiens
gtgaggggaacgtag

SEQ ID NO: 25923 - DNA, 15 bp, Homo sapiens
ggtgaggggaacgta

SEQ ID NO: 25924 - DNA, 15 bp, Homo sapiens
gggtgaggggaacgt

SEQ ID NO: 25925 - DNA, 15 bp, Homo sapiens
ggggtgaggggaacg

SEQ ID NO: 25926 - DNA, 15 bp, Homo sapiens
aggggtgaggggaac

SEQ ID NO: 25927 - DNA, 15 bp, Homo sapiens
taggggtgaggggaa

SEQ ID NO: 25928 - DNA, 15 bp, Homo sapiens
gtaggggtgagggga

SEQ ID NO: 25929 - DNA, 15 bp, Homo sapiens
ggtaggggtgagggg

SEQ ID NO: 25930 - DNA, 15 bp, Homo sapiens
gggtaggggtgaggg

SEQ ID NO: 25931 - DNA, 15 bp, Homo sapiens
ggggtaggggtgagg

SEQ ID NO: 25932 - DNA, 15 bp, Homo sapiens
tggggtaggggtgag

SEQ ID NO: 25933 - DNA, 15 bp, Homo sapiens
ttggggtaggggtga

SEQ ID NO: 25934 - DNA, 15 bp, Homo sapiens
cttggggtaggggtg

SEQ ID NO: 25935 - DNA, 15 bp, Homo sapiens
gcttggggtaggggt

SEQ ID NO: 25936 - DNA, 15 bp, Homo sapiens
agcttggggtagggg

SEQ ID NO: 25937 - DNA, 15 bp, Homo sapiens
gagcttggggtaggg

SEQ ID NO: 25938 - DNA, 15 bp, Homo sapiens
agagcttggggtagg

SEQ ID NO: 25939 - DNA, 15 bp, Homo sapiens
aagagcttggggtag

SEQ ID NO: 25940 - DNA, 15 bp, Homo sapiens
caagagcttggggta

SEQ ID NO: 25941 - DNA, 15 bp, Homo sapiens
gcaagagcttggggt

SEQ ID NO: 25942 - DNA, 15 bp, Homo sapiens
ggcaagagcttgggg

SEQ ID NO: 25943 - DNA, 15 bp, Homo sapiens
aggcaagagcttggg

SEQ ID NO: 25944 - DNA, 15 bp, Homo sapiens
aaggcaagagcttgg

SEQ ID NO: 25945 - DNA, 15 bp, Homo sapiens
aaaggcaagagcttg

SEQ ID NO: 25946 - DNA, 15 bp, Homo sapiens
aaaaggcaagagctt

SEQ ID NO: 25947 - DNA, 15 bp, Homo sapiens
taaaaggcaagagct

SEQ ID NO: 25948 - DNA, 15 bp, Homo sapiens
ttaaaaggcaagagc

SEQ ID NO: 25949 - DNA, 15 bp, Homo sapiens
attaaaaggcaagag

SEQ ID NO: 25950 - DNA, 15 bp, Homo sapiens
aattaaaaggcaaga

SEQ ID NO: 25951 - DNA, 15 bp, Homo sapiens
taattaaaaggcaag

SEQ ID NO: 25952 - DNA, 15 bp, Homo sapiens
ttaattaaaaggcaa

SEQ ID NO: 25953 - DNA, 15 bp, Homo sapiens
cttaattaaaaggca

SEQ ID NO: 25954 - DNA, 15 bp, Homo sapiens
tcttaattaaaaggc

SEQ ID NO: 25955 - DNA, 15 bp, Homo sapiens
ttcttaattaaaagg

SEQ ID NO: 25956 - DNA, 15 bp, Homo sapiens
cttcttaattaaaag

SEQ ID NO: 25957 - DNA, 15 bp, Homo sapiens
tcttcttaattaaaa

SEQ ID NO: 25958 - DNA, 15 bp, Homo sapiens
ctcttcttaattaaa

SEQ ID NO: 25959 - DNA, 15 bp, Homo sapiens
gctcttcttaattaa

SEQ ID NO: 25960 - DNA, 15 bp, Homo sapiens
agctcttcttaatta

SEQ ID NO: 25961 - DNA, 15 bp, Homo sapiens
cagctcttcttaatt

SEQ ID NO: 25962 - DNA, 15 bp, Homo sapiens
tcagctcttcttaat

SEQ ID NO: 25963 - DNA, 15 bp, Homo sapiens
atcagctcttcttaa

SEQ ID NO: 25964 - DNA, 15 bp, Homo sapiens
gatcagctcttctta

SEQ ID NO: 25965 - DNA, 15 bp, Homo sapiens
cgatcagctcttctt

SEQ ID NO: 25966 - DNA, 15 bp, Homo sapiens
ccgatcagctcttct

SEQ ID NO: 25967 - DNA, 15 bp, Homo sapiens
cccgatcagctcttc

SEQ ID NO: 25968 - DNA, 15 bp, Homo sapiens
ccccgatcagctctt

SEQ ID NO: 25969 - DNA, 15 bp, Homo sapiens
cccccgatcagctct

SEQ ID NO: 25970 - DNA, 15 bp, Homo sapiens
tcccccgatcagctc

SEQ ID NO: 25971 - DNA, 15 bp, Homo sapiens
ctcccccgatcagct

SEQ ID NO: 25972 - DNA, 15 bp, Homo sapiens
cctcccccgatcagc

SEQ ID NO: 25973 - DNA, 15 bp, Homo sapiens
tcctcccccgatcag

SEQ ID NO: 25974 - DNA, 15 bp, Homo sapiens
ctcctcccccgatca

SEQ ID NO: 25975 - DNA, 15 bp, Homo sapiens
actcctcccccgatc

SEQ ID NO: 25976 - DNA, 15 bp, Homo sapiens
gactcctcccccgat

SEQ ID NO: 25977 - DNA, 15 bp, Homo sapiens
ggactcctcccccga

SEQ ID NO: 25978 - DNA, 15 bp, Homo sapiens
tggactcctcccccg

SEQ ID NO: 25979 - DNA, 15 bp, Homo sapiens
ctggactcctccccc

SEQ ID NO: 25980 - DNA, 15 bp, Homo sapiens
tctggactcctcccc

SEQ ID NO: 25981 - DNA, 15 bp, Homo sapiens
ttctggactcctccc

SEQ ID NO: 25982 - DNA, 15 bp, Homo sapiens
gttctggactcctcc

SEQ ID NO: 25983 - DNA, 15 bp, Homo sapiens
cgttctggactcctc

SEQ ID NO: 25984 - DNA, 15 bp, Homo sapiens
tcgttctggactcct

SEQ ID NO: 25985 - DNA, 15 bp, Homo sapiens
gtcgttctggactcc

SEQ ID NO: 25986 - DNA, 15 bp, Homo sapiens
ggtcgttctggactc

SEQ ID NO: 25987 - DNA, 15 bp, Homo sapiens
tggtcgttctggact

SEQ ID NO: 25988 - DNA, 15 bp, Homo sapiens
ttggtcgttctggac

SEQ ID NO: 25989 - DNA, 15 bp, Homo sapiens
tttggtcgttctgga

SEQ ID NO: 25990 - DNA, 15 bp, Homo sapiens
gtttggtcgttctgg

SEQ ID NO: 25991 - DNA, 15 bp, Homo sapiens
ggtttggtcgttctg

SEQ ID NO: 25992 - DNA, 15 bp, Homo sapiens
gggtttggtcgttct

SEQ ID NO: 25993 - DNA, 15 bp, Homo sapiens
agggtttggtcgttc

SEQ ID NO: 25994 - DNA, 15 bp, Homo sapiens
cagggtttggtcgtt

SEQ ID NO: 25995 - DNA, 15 bp, Homo sapiens
ccagggtttggtcgt

SEQ ID NO: 25996 - DNA, 15 bp, Homo sapiens
cccagggtttggtcg

SEQ ID NO: 25997 - DNA, 15 bp, Homo sapiens
ccccagggtttggtc

SEQ ID NO: 25998 - DNA, 15 bp, Homo sapiens
gccccagggtttggt

SEQ ID NO: 25999 - DNA, 15 bp, Homo sapiens
cgccccagggtttgg

SEQ ID NO: 26000 - DNA, 15 bp, Homo sapiens
tcgccccagggtttg

SEQ ID NO: 26001 - DNA, 15 bp, Homo sapiens
ttcgccccagggttt

SEQ ID NO: 26002 - DNA, 15 bp, Homo sapiens
tttcgccccagggtt

SEQ ID NO: 26003 - DNA, 15 bp, Homo sapiens
ttttcgccccagggt

SEQ ID NO: 26004 - DNA, 15 bp, Homo sapiens
gttttcgccccaggg

SEQ ID NO: 26005 - DNA, 15 bp, Homo sapiens
agttttcgccccagg

SEQ ID NO: 26006 - DNA, 15 bp, Homo sapiens
cagttttcgccccag

SEQ ID NO: 26007 - DNA, 15 bp, Homo sapiens
gcagttttcgcccca

SEQ ID NO: 26008 - DNA, 15 bp, Homo sapiens
ggcagttttcgcccc

SEQ ID NO: 26009 - DNA, 15 bp, Homo sapiens
tggcagttttcgccc

SEQ ID NO: 26010 - DNA, 15 bp, Homo sapiens
gtggcagttttcgcc

SEQ ID NO: 26011 - DNA, 15 bp, Homo sapiens
ggtggcagttttcgc

SEQ ID NO: 26012 - DNA, 15 bp, Homo sapiens
cggtggcagttttcg

SEQ ID NO: 26013 - DNA, 15 bp, Homo sapiens
ccggtggcagttttc

SEQ ID NO: 26014 - DNA, 15 bp, Homo sapiens
cccggtggcagtttt

SEQ ID NO: 26015 - DNA, 15 bp, Homo sapiens
gcccggtggcagttt

SEQ ID NO: 26016 - DNA, 15 bp, Homo sapiens
agcccggtggcagtt

SEQ ID NO: 26017 - DNA, 15 bp, Homo sapiens
aagcccggtggcagt

SEQ ID NO: 26018 - DNA, 15 bp, Homo sapiens
caagcccggtggcag

SEQ ID NO: 26019 - DNA, 15 bp, Homo sapiens
ccaagcccggtggca

SEQ ID NO: 26020 - DNA, 15 bp, Homo sapiens
gccaagcccggtggc

SEQ ID NO: 26021 - DNA, 15 bp, Homo sapiens
agccaagcccggtgg

SEQ ID NO: 26022 - DNA, 15 bp, Homo sapiens
gagccaagcccggtg

SEQ ID NO: 26023 - DNA, 15 bp, Homo sapiens
agagccaagcccggt

SEQ ID NO: 26024 - DNA, 15 bp, Homo sapiens
cagagccaagcccgg

SEQ ID NO: 26025 - DNA, 15 bp, Homo sapiens
acagagccaagcccg

SEQ ID NO: 26026 - DNA, 15 bp, Homo sapiens
cacagagccaagccc

SEQ ID NO: 26027 - DNA, 15 bp, Homo sapiens
ccacagagccaagcc

SEQ ID NO: 26028 - DNA, 15 bp, Homo sapiens
gccacagagccaagc

SEQ ID NO: 26029 - DNA, 15 bp, Homo sapiens
ggccacagagccaag

SEQ ID NO: 26030 - DNA, 15 bp, Homo sapiens
cggccacagagccaa

SEQ ID NO: 26031 - DNA, 15 bp, Homo sapiens
ccggccacagagcca

SEQ ID NO: 26032 - DNA, 15 bp, Homo sapiens
tccggccacagagcc

SEQ ID NO: 26033 - DNA, 15 bp, Homo sapiens
ttccggccacagagc

SEQ ID NO: 26034 - DNA, 15 bp, Homo sapiens
gttccggccacagag

SEQ ID NO: 26035 - DNA, 15 bp, Homo sapiens
tgttccggccacaga

SEQ ID NO: 26036 - DNA, 15 bp, Homo sapiens
ttgttccggccacag

SEQ ID NO: 26037 - DNA, 15 bp, Homo sapiens
tttgttccggccaca

SEQ ID NO: 26038 - DNA, 15 bp, Homo sapiens
ttttgttccggccac

SEQ ID NO: 26039 - DNA, 15 bp, Homo sapiens
cttttgttccggcca

SEQ ID NO: 26040 - DNA, 15 bp, Homo sapiens
ccttttgttccggcc

SEQ ID NO: 26041 - DNA, 15 bp, Homo sapiens
gccttttgttccggc

SEQ ID NO: 26042 - DNA, 15 bp, Homo sapiens
ggccttttgttccgg

SEQ ID NO: 26043 - DNA, 15 bp, Homo sapiens
aggccttttgttccg

SEQ ID NO: 26044 - DNA, 15 bp, Homo sapiens
caggccttttgttcc

SEQ ID NO: 26045 - DNA, 15 bp, Homo sapiens
tcaggccttttgttc

SEQ ID NO: 26046 - DNA, 15 bp, Homo sapiens
ctcaggccttttgtt

SEQ ID NO: 26047 - DNA, 15 bp, Homo sapiens
tctcaggccttttgt

SEQ ID NO: 26048 - DNA, 15 bp, Homo sapiens
ttctcaggccttttg

SEQ ID NO: 26049 - DNA, 15 bp, Homo sapiens
cttctcaggcctttt

SEQ ID NO: 26050 - DNA, 15 bp, Homo sapiens
ccttctcaggccttt

SEQ ID NO: 26051 - DNA, 15 bp, Homo sapiens
cccttctcaggcctt

SEQ ID NO: 26052 - DNA, 15 bp, Homo sapiens
ccccttctcaggcct

SEQ ID NO: 26053 - DNA, 15 bp, Homo sapiens
cccccttctcaggcc

SEQ ID NO: 26054 - DNA, 15 bp, Homo sapiens
acccccttctcaggc

SEQ ID NO: 26055 - DNA, 15 bp, Homo sapiens
cacccccttctcagg

SEQ ID NO: 26056 - DNA, 15 bp, Homo sapiens
ccacccccttctcag

SEQ ID NO: 26057 - DNA, 15 bp, Homo sapiens
cccacccccttctca

SEQ ID NO: 26058 - DNA, 15 bp, Homo sapiens
ccccacccccttctc

SEQ ID NO: 26059 - DNA, 15 bp, Homo sapiens
cccccacccccttct

SEQ ID NO: 26060 - DNA, 15 bp, Homo sapiens
acccccacccccttc

SEQ ID NO: 26061 - DNA, 15 bp, Homo sapiens
cacccccaccccctt

SEQ ID NO: 26062 - DNA, 15 bp, Homo sapiens
tcacccccaccccct

SEQ ID NO: 26063 - DNA, 15 bp, Homo sapiens
ctcacccccaccccc

SEQ ID NO: 26064 - DNA, 15 bp, Homo sapiens
cctcacccccacccc

SEQ ID NO: 26065 - DNA, 15 bp, Homo sapiens
ccctcacccccaccc

SEQ ID NO: 26066 - DNA, 15 bp, Homo sapiens
accctcacccccacc

SEQ ID NO: 26067 - DNA, 15 bp, Homo sapiens
aaccctcacccccac

SEQ ID NO: 26068 - DNA, 15 bp, Homo sapiens
taaccctcaccccca

SEQ ID NO: 26069 - DNA, 15 bp, Homo sapiens
ataaccctcaccccc

SEQ ID NO: 26070 - DNA, 15 bp, Homo sapiens
tataaccctcacccc

SEQ ID NO: 26071 - DNA, 15 bp, Homo sapiens
ctataaccctcaccc

SEQ ID NO: 26072 - DNA, 15 bp, Homo sapiens
cctataaccctcacc

SEQ ID NO: 26073 - DNA, 15 bp, Homo sapiens
tcctataaccctcac

SEQ ID NO: 26074 - DNA, 15 bp, Homo sapiens
ctcctataaccctca

SEQ ID NO: 26075 - DNA, 15 bp, Homo sapiens
actcctataaccctc

SEQ ID NO: 26076 - DNA, 15 bp, Homo sapiens
cactcctataaccct

SEQ ID NO: 26077 - DNA, 15 bp, Homo sapiens
acactcctataaccc

SEQ ID NO: 26078 - DNA, 15 bp, Homo sapiens
cacactcctataacc

SEQ ID NO: 26079 - DNA, 15 bp, Homo sapiens
ccacactcctataac

SEQ ID NO: 26080 - DNA, 15 bp, Homo sapiens
tccacactcctataa

SEQ ID NO: 26081 - DNA, 15 bp, Homo sapiens
ctccacactcctata

SEQ ID NO: 26082 - DNA, 15 bp, Homo sapiens
tctccacactcctat

SEQ ID NO: 26083 - DNA, 15 bp, Homo sapiens
ctctccacactccta

SEQ ID NO: 26084 - DNA, 15 bp, Homo sapiens
gctctccacactcct

SEQ ID NO: 26085 - DNA, 15 bp, Homo sapiens
ggctctccacactcc

SEQ ID NO: 26086 - DNA, 15 bp, Homo sapiens
aggctctccacactc

SEQ ID NO: 26087 - DNA, 15 bp, Homo sapiens
caggctctccacact

SEQ ID NO: 26088 - DNA, 15 bp, Homo sapiens
ccaggctctccacac

SEQ ID NO: 26089 - DNA, 15 bp, Homo sapiens
accaggctctccaca

SEQ ID NO: 26090 - DNA, 15 bp, Homo sapiens
caccaggctctccac

SEQ ID NO: 26091 - DNA, 15 bp, Homo sapiens
ccaccaggctctcca

SEQ ID NO: 26092 - DNA, 15 bp, Homo sapiens
gccaccaggctctcc

SEQ ID NO: 26093 - DNA, 15 bp, Homo sapiens
ggccaccaggctctc

SEQ ID NO: 26094 - DNA, 15 bp, Homo sapiens
gggccaccaggctct

SEQ ID NO: 26095 - DNA, 15 bp, Homo sapiens
ggggccaccaggctc

SEQ ID NO: 26096 - DNA, 15 bp, Homo sapiens
gggggccaccaggct

SEQ ID NO: 26097 - DNA, 15 bp, Homo sapiens
cgggggccaccaggc

SEQ ID NO: 26098 - DNA, 15 bp, Homo sapiens
gcgggggccaccagg

SEQ ID NO: 26099 - DNA, 15 bp, Homo sapiens
ggcgggggccaccag

SEQ ID NO: 26100 - DNA, 15 bp, Homo sapiens
gggcgggggccacca

SEQ ID NO: 26101 - DNA, 15 bp, Homo sapiens
tgggcgggggccacc

SEQ ID NO: 26102 - DNA, 15 bp, Homo sapiens
ctgggcgggggccac

SEQ ID NO: 26103 - DNA, 15 bp, Homo sapiens
cctgggcgggggcca

SEQ ID NO: 26104 - DNA, 15 bp, Homo sapiens
ccctgggcgggggcc

SEQ ID NO: 26105 - DNA, 15 bp, Homo sapiens
cccctgggcgggggc

SEQ ID NO: 26106 - DNA, 15 bp, Homo sapiens
gcccctgggcggggg

SEQ ID NO: 26107 - DNA, 15 bp, Homo sapiens
cgcccctgggcgggg

SEQ ID NO: 26108 - DNA, 15 bp, Homo sapiens
gcgcccctgggcggg

SEQ ID NO: 26109 - DNA, 15 bp, Homo sapiens
ggcgcccctgggcgg

SEQ ID NO: 26110 - DNA, 15 bp, Homo sapiens
aggcgcccctgggcg

SEQ ID NO: 26111 - DNA, 15 bp, Homo sapiens
taggcgcccctgggc

SEQ ID NO: 26112 - DNA, 15 bp, Homo sapiens
ttaggcgcccctggg

SEQ ID NO: 26113 - DNA, 15 bp, Homo sapiens
cttaggcgcccctgg

SEQ ID NO: 26114 - DNA, 15 bp, Homo sapiens
acttaggcgcccctg

SEQ ID NO: 26115 - DNA, 15 bp, Homo sapiens
gacttaggcgcccct

SEQ ID NO: 26116 - DNA, 15 bp, Homo sapiens
ggacttaggcgcccc

SEQ ID NO: 26117 - DNA, 15 bp, Homo sapiens
gggacttaggcgccc

SEQ ID NO: 26118 - DNA, 15 bp, Homo sapiens
agggacttaggcgcc

SEQ ID NO: 26119 - DNA, 15 bp, Homo sapiens
cagggacttaggcgc

SEQ ID NO: 26120 - DNA, 15 bp, Homo sapiens
tcagggacttaggcg

SEQ ID NO: 26121 - DNA, 15 bp, Homo sapiens
ctcagggacttaggc

SEQ ID NO: 26122 - DNA, 15 bp, Homo sapiens
gctcagggacttagg

SEQ ID NO: 26123 - DNA, 15 bp, Homo sapiens
agctcagggacttag

SEQ ID NO: 26124 - DNA, 15 bp, Homo sapiens
gagctcagggactta

SEQ ID NO: 26125 - DNA, 15 bp, Homo sapiens
ggagctcagggactt

SEQ ID NO: 26126 - DNA, 15 bp, Homo sapiens
gggagctcagggact

SEQ ID NO: 26127 - DNA, 15 bp, Homo sapiens
agggagctcagggac

SEQ ID NO: 26128 - DNA, 15 bp, Homo sapiens
cagggagctcaggga

SEQ ID NO: 26129 - DNA, 15 bp, Homo sapiens
tcagggagctcaggg

SEQ ID NO: 26130 - DNA, 15 bp, Homo sapiens
ttcagggagctcagg

SEQ ID NO: 26131 - DNA, 15 bp, Homo sapiens
cttcagggagctcag

SEQ ID NO: 26132 - DNA, 15 bp, Homo sapiens
tcttcagggagctca

SEQ ID NO: 26133 - DNA, 15 bp, Homo sapiens
ctcttcagggagctc

SEQ ID NO: 26134 - DNA, 15 bp, Homo sapiens
actcttcagggagct

SEQ ID NO: 26135 - DNA, 15 bp, Homo sapiens
cactcttcagggagc

SEQ ID NO: 26136 - DNA, 15 bp, Homo sapiens
ccactcttcagggag

SEQ ID NO: 26137 - DNA, 15 bp, Homo sapiens
gccactcttcaggga

SEQ ID NO: 26138 - DNA, 15 bp, Homo sapiens
tgccactcttcaggg

SEQ ID NO: 26139 - DNA, 15 bp, Homo sapiens
ttgccactcttcagg

SEQ ID NO: 26140 - DNA, 15 bp, Homo sapiens
cttgccactcttcag

SEQ ID NO: 26141 - DNA, 15 bp, Homo sapiens
tcttgccactcttca

SEQ ID NO: 26142 - DNA, 15 bp, Homo sapiens
ctcttgccactcttc

SEQ ID NO: 26143 - DNA, 15 bp, Homo sapiens
cctcttgccactctt

SEQ ID NO: 26144 - DNA, 15 bp, Homo sapiens
tcctcttgccactct

SEQ ID NO: 26145 - DNA, 15 bp, Homo sapiens
atcctcttgccactc

SEQ ID NO: 26146 - DNA, 15 bp, Homo sapiens
tatcctcttgccact

SEQ ID NO: 26147 - DNA, 15 bp, Homo sapiens
ttatcctcttgccac

SEQ ID NO: 26148 - DNA, 15 bp, Homo sapiens
gttatcctcttgcca

SEQ ID NO: 26149 - DNA, 15 bp, Homo sapiens
cgttatcctcttgcc

SEQ ID NO: 26150 - DNA, 15 bp, Homo sapiens
gcgttatcctcttgc

SEQ ID NO: 26151 - DNA, 15 bp, Homo sapiens
tgcgttatcctcttg

SEQ ID NO: 26152 - DNA, 15 bp, Homo sapiens
ctgcgttatcctctt

SEQ ID NO: 26153 - DNA, 15 bp, Homo sapiens
gctgcgttatcctct

SEQ ID NO: 26154 - DNA, 15 bp, Homo sapiens
ggctgcgttatcctc

SEQ ID NO: 26155 - DNA, 15 bp, Homo sapiens
cggctgcgttatcct

SEQ ID NO: 26156 - DNA, 15 bp, Homo sapiens
gcggctgcgttatcc

SEQ ID NO: 26157 - DNA, 15 bp, Homo sapiens
cgcggctgcgttatc

SEQ ID NO: 26158 - DNA, 15 bp, Homo sapiens
gcgcggctgcgttat

SEQ ID NO: 26159 - DNA, 15 bp, Homo sapiens
cgcgcggctgcgtta

SEQ ID NO: 26160 - DNA, 15 bp, Homo sapiens
acgcgcggctgcgtt

SEQ ID NO: 26161 - DNA, 15 bp, Homo sapiens
aacgcgcggctgcgt

SEQ ID NO: 26162 - DNA, 15 bp, Homo sapiens
gaacgcgcggctgcg

SEQ ID NO: 26163 - DNA, 15 bp, Homo sapiens
ggaacgcgcggctgc

SEQ ID NO: 26164 - DNA, 15 bp, Homo sapiens
cggaacgcgcggctg

SEQ ID NO: 26165 - DNA, 15 bp, Homo sapiens
ccggaacgcgcggct

SEQ ID NO: 26166 - DNA, 15 bp, Homo sapiens
gccggaacgcgcggc

SEQ ID NO: 26167 - DNA, 15 bp, Homo sapiens
tgccggaacgcgcgg

SEQ ID NO: 26168 - DNA, 15 bp, Homo sapiens
ctgccggaacgcgcg

SEQ ID NO: 26169 - DNA, 15 bp, Homo sapiens
actgccggaacgcgc

SEQ ID NO: 26170 - DNA, 15 bp, Homo sapiens
aactgccggaacgcg

SEQ ID NO: 26171 - DNA, 15 bp, Homo sapiens
gaactgccggaacgc

SEQ ID NO: 26172 - DNA, 15 bp, Homo sapiens
cgaactgccggaacg

SEQ ID NO: 26173 - DNA, 15 bp, Homo sapiens
gcgaactgccggaac

SEQ ID NO: 26174 - DNA, 15 bp, Homo sapiens
agcgaactgccggaa

SEQ ID NO: 26175 - DNA, 15 bp, Homo sapiens
cagcgaactgccgga

SEQ ID NO: 26176 - DNA, 15 bp, Homo sapiens
acagcgaactgccgg

SEQ ID NO: 26177 - DNA, 15 bp, Homo sapiens
gacagcgaactgccg

SEQ ID NO: 26178 - DNA, 15 bp, Homo sapiens
ggacagcgaactgcc

SEQ ID NO: 26179 - DNA, 15 bp, Homo sapiens
gggacagcgaactgc

SEQ ID NO: 26180 - DNA, 15 bp, Homo sapiens
ggggacagcgaactg

SEQ ID NO: 26181 - DNA, 15 bp, Homo sapiens
gggggacagcgaact

SEQ ID NO: 26182 - DNA, 15 bp, Homo sapiens
cgggggacagcgaac

SEQ ID NO: 26183 - DNA, 15 bp, Homo sapiens
ccgggggacagcgaa

SEQ ID NO: 26184 - DNA, 15 bp, Homo sapiens
cccgggggacagcga

SEQ ID NO: 26185 - DNA, 15 bp, Homo sapiens
ccccgggggacagcg

SEQ ID NO: 26186 - DNA, 15 bp, Homo sapiens
cccccgggggacagc

SEQ ID NO: 26187 - DNA, 15 bp, Homo sapiens
acccccgggggacag

SEQ ID NO: 26188 - DNA, 15 bp, Homo sapiens
cacccccgggggaca

SEQ ID NO: 26189 - DNA, 15 bp, Homo sapiens
gcacccccgggggac

SEQ ID NO: 26190 - DNA, 15 bp, Homo sapiens
tgcacccccggggga

SEQ ID NO: 26191 - DNA, 15 bp, Homo sapiens
ctgcacccccggggg

SEQ ID NO: 26192 - DNA, 15 bp, Homo sapiens
cctgcacccccgggg

SEQ ID NO: 26193 - DNA, 15 bp, Homo sapiens
gcctgcacccccggg

SEQ ID NO: 26194 - DNA, 15 bp, Homo sapiens
cgcctgcacccccgg

SEQ ID NO: 26195 - DNA, 15 bp, Homo sapiens
ccgcctgcacccccg

SEQ ID NO: 26196 - DNA, 15 bp, Homo sapiens
cccgcctgcaccccc

SEQ ID NO: 26197 - DNA, 15 bp, Homo sapiens
ccccgcctgcacccc

SEQ ID NO: 26198 - DNA, 15 bp, Homo sapiens
cccccgcctgcaccc

SEQ ID NO: 26199 - DNA, 15 bp, Homo sapiens
gcccccgcctgcacc

SEQ ID NO: 26200 - DNA, 15 bp, Homo sapiens
cgcccccgcctgcac

SEQ ID NO: 26201 - DNA, 15 bp, Homo sapiens
ccgcccccgcctgca

SEQ ID NO: 26202 - DNA, 15 bp, Homo sapiens
cccgcccccgcctgc

SEQ ID NO: 26203 - DNA, 15 bp, Homo sapiens
tcccgcccccgcctg

SEQ ID NO: 26204 - DNA, 15 bp, Homo sapiens
ctcccgcccccgcct

SEQ ID NO: 26205 - DNA, 15 bp, Homo sapiens
tctcccgcccccgcc

SEQ ID NO: 26206 - DNA, 15 bp, Homo sapiens
ctctcccgcccccgc

SEQ ID NO: 26207 - DNA, 15 bp, Homo sapiens
cctctcccgcccccg

SEQ ID NO: 26208 - DNA, 15 bp, Homo sapiens
acctctcccgccccc

SEQ ID NO: 26209 - DNA, 15 bp, Homo sapiens
tacctctcccgcccc

SEQ ID NO: 26210 - DNA, 15 bp, Homo sapiens
ctacctctcccgccc

SEQ ID NO: 26211 - DNA, 15 bp, Homo sapiens
tctacctctcccgcc

SEQ ID NO: 26212 - DNA, 15 bp, Homo sapiens
ttctacctctcccgc

SEQ ID NO: 26213 - DNA, 15 bp, Homo sapiens
gttctacctctcccg

SEQ ID NO: 26214 - DNA, 15 bp, Homo sapiens
tgttctacctctccc

SEQ ID NO: 26215 - DNA, 15 bp, Homo sapiens
gtgttctacctctcc

SEQ ID NO: 26216 - DNA, 15 bp, Homo sapiens
tgtgttctacctctc

SEQ ID NO: 26217 - DNA, 15 bp, Homo sapiens
ctgtgttctacctct

SEQ ID NO: 26218 - DNA, 15 bp, Homo sapiens
cctgtgttctacctc

SEQ ID NO: 26219 - DNA, 15 bp, Homo sapiens
acctgtgttctacct

SEQ ID NO: 26220 - DNA, 15 bp, Homo sapiens
gacctgtgttctacc

SEQ ID NO: 26221 - DNA, 15 bp, Homo sapiens
agacctgtgttctac

SEQ ID NO: 26222 - DNA, 15 bp, Homo sapiens
cagacctgtgttcta

SEQ ID NO: 26223 - DNA, 15 bp, Homo sapiens
ccagacctgtgttct

SEQ ID NO: 26224 - DNA, 15 bp, Homo sapiens
cccagacctgtgttc

SEQ ID NO: 26225 - DNA, 15 bp, Homo sapiens
gcccagacctgtgtt

SEQ ID NO: 26226 - DNA, 15 bp, Homo sapiens
cgcccagacctgtgt

SEQ ID NO: 26227 - DNA, 15 bp, Homo sapiens
ccgcccagacctgtg

SEQ ID NO: 26228 - DNA, 15 bp, Homo sapiens
gccgcccagacctgt

SEQ ID NO: 26229 - DNA, 15 bp, Homo sapiens
agccgcccagacctg

SEQ ID NO: 26230 - DNA, 15 bp, Homo sapiens
gagccgcccagacct

SEQ ID NO: 26231 - DNA, 15 bp, Homo sapiens
ggagccgcccagacc

SEQ ID NO: 26232 - DNA, 15 bp, Homo sapiens
cggagccgcccagac

SEQ ID NO: 26233 - DNA, 15 bp, Homo sapiens
gcggagccgcccaga

SEQ ID NO: 26234 - DNA, 15 bp, Homo sapiens
cgcggagccgcccag

SEQ ID NO: 26235 - DNA, 15 bp, Homo sapiens
gcgcggagccgccca

SEQ ID NO: 26236 - DNA, 15 bp, Homo sapiens
ggcgcggagccgccc

SEQ ID NO: 26237 - DNA, 15 bp, Homo sapiens
cggcgcggagccgcc

SEQ ID NO: 26238 - DNA, 15 bp, Homo sapiens
gcggcgcggagccgc

SEQ ID NO: 26239 - DNA, 15 bp, Homo sapiens
agcggcgcggagccg

SEQ ID NO: 26240 - DNA, 15 bp, Homo sapiens
aagcggcgcggagcc

SEQ ID NO: 26241 - DNA, 15 bp, Homo sapiens
gaagcggcgcggagc

SEQ ID NO: 26242 - DNA, 15 bp, Homo sapiens
agaagcggcgcggag

SEQ ID NO: 26243 - DNA, 15 bp, Homo sapiens
tagaagcggcgcgga

SEQ ID NO: 26244 - DNA, 15 bp, Homo sapiens
atagaagcggcgcgg

SEQ ID NO: 26245 - DNA, 15 bp, Homo sapiens
gatagaagcggcgcg

SEQ ID NO: 26246 - DNA, 15 bp, Homo sapiens
agatagaagcggcgc

SEQ ID NO: 26247 - DNA, 15 bp, Homo sapiens
gagatagaagcggcg

SEQ ID NO: 26248 - DNA, 15 bp, Homo sapiens
tgagatagaagcggc

SEQ ID NO: 26249 - DNA, 15 bp, Homo sapiens
gtgagatagaagcgg

SEQ ID NO: 26250 - DNA, 15 bp, Homo sapiens
ggtgagatagaagcg

SEQ ID NO: 26251 - DNA, 15 bp, Homo sapiens
gggtgagatagaagc

SEQ ID NO: 26252 - DNA, 15 bp, Homo sapiens
cgggtgagatagaag

SEQ ID NO: 26253 - DNA, 15 bp, Homo sapiens
gcgggtgagatagaa

SEQ ID NO: 26254 - DNA, 15 bp, Homo sapiens
ggcgggtgagataga

SEQ ID NO: 26255 - DNA, 15 bp, Homo sapiens
tggcgggtgagatag

SEQ ID NO: 26256 - DNA, 15 bp, Homo sapiens
ttggcgggtgagata

SEQ ID NO: 26257 - DNA, 15 bp, Homo sapiens
cttggcgggtgagat

SEQ ID NO: 26258 - DNA, 15 bp, Homo sapiens
gcttggcgggtgaga

SEQ ID NO: 26259 - DNA, 15 bp, Homo sapiens
ggcttggcgggtgag

SEQ ID NO: 26260 - DNA, 15 bp, Homo sapiens
gggcttggcgggtga

SEQ ID NO: 26261 - DNA, 15 bp, Homo sapiens
ggggcttggcgggtg

SEQ ID NO: 26262 - DNA, 15 bp, Homo sapiens
aggggcttggcgggt

SEQ ID NO: 26263 - DNA, 15 bp, Homo sapiens
gaggggcttggcggg

SEQ ID NO: 26264 - DNA, 15 bp, Homo sapiens
tgaggggcttggcgg

SEQ ID NO: 26265 - DNA, 15 bp, Homo sapiens
gtgaggggcttggcg

SEQ ID NO: 26266 - DNA, 15 bp, Homo sapiens
ggtgaggggcttggc

SEQ ID NO: 26267 - DNA, 15 bp, Homo sapiens
aggtgaggggcttgg

SEQ ID NO: 26268 - DNA, 15 bp, Homo sapiens
gaggtgaggggcttg

SEQ ID NO: 26269 - DNA, 15 bp, Homo sapiens
ggaggtgaggggctt

SEQ ID NO: 26270 - DNA, 15 bp, Homo sapiens
tggaggtgaggggct

SEQ ID NO: 26271 - DNA, 15 bp, Homo sapiens
gtggaggtgaggggc

SEQ ID NO: 26272 - DNA, 15 bp, Homo sapiens
ggtggaggtgagggg

SEQ ID NO: 26273 - DNA, 15 bp, Homo sapiens
gggtggaggtgaggg

SEQ ID NO: 26274 - DNA, 15 bp, Homo sapiens
tgggtggaggtgagg

SEQ ID NO: 26275 - DNA, 15 bp, Homo sapiens
gtgggtggaggtgag

SEQ ID NO: 26276 - DNA, 15 bp, Homo sapiens
ggtgggtggaggtga

SEQ ID NO: 26277 - DNA, 15 bp, Homo sapiens
cggtgggtggaggtg

SEQ ID NO: 26278 - DNA, 15 bp, Homo sapiens
gcggtgggtggaggt

SEQ ID NO: 26279 - DNA, 15 bp, Homo sapiens
ggcggtgggtggagg

SEQ ID NO: 26280 - DNA, 15 bp, Homo sapiens
tggcggtgggtggag

SEQ ID NO: 26281 - DNA, 15 bp, Homo sapiens
ctggcggtgggtgga

SEQ ID NO: 26282 - DNA, 15 bp, Homo sapiens
actggcggtgggtgg

SEQ ID NO: 26283 - DNA, 15 bp, Homo sapiens
gactggcggtgggtg

SEQ ID NO: 26284 - DNA, 15 bp, Homo sapiens
ggactggcggtgggt

SEQ ID NO: 26285 - DNA, 15 bp, Homo sapiens
gggactggcggtggg

SEQ ID NO: 26286 - DNA, 15 bp, Homo sapiens
ggggactggcggtgg

SEQ ID NO: 26287 - DNA, 15 bp, Homo sapiens
aggggactggcggtg

SEQ ID NO: 26288 - DNA, 15 bp, Homo sapiens
caggggactggcggt

SEQ ID NO: 26289 - DNA, 15 bp, Homo sapiens
gcaggggactggcgg

SEQ ID NO: 26290 - DNA, 15 bp, Homo sapiens
ggcaggggactggcg

SEQ ID NO: 26291 - DNA, 15 bp, Homo sapiens
gggcaggggactggc

SEQ ID NO: 26292 - DNA, 15 bp, Homo sapiens
tgggcaggggactgg

SEQ ID NO: 26293 - DNA, 15 bp, Homo sapiens
gtgggcaggggactg

SEQ ID NO: 26294 - DNA, 15 bp, Homo sapiens
ggtgggcaggggact

SEQ ID NO: 26295 - DNA, 15 bp, Homo sapiens
gggtgggcaggggac

SEQ ID NO: 26296 - DNA, 15 bp, Homo sapiens
cgggtgggcagggga

SEQ ID NO: 26297 - DNA, 15 bp, Homo sapiens
ccgggtgggcagggg

SEQ ID NO: 26298 - DNA, 15 bp, Homo sapiens
cccgggtgggcaggg

SEQ ID NO: 26299 - DNA, 15 bp, Homo sapiens
acccgggtgggcagg

SEQ ID NO: 26300 - DNA, 15 bp, Homo sapiens
cacccgggtgggcag

SEQ ID NO: 26301 - DNA, 15 bp, Homo sapiens
ccacccgggtgggca

SEQ ID NO: 26302 - DNA, 15 bp, Homo sapiens
gccacccgggtgggc

SEQ ID NO: 26303 - DNA, 15 bp, Homo sapiens
cgccacccgggtggg

SEQ ID NO: 26304 - DNA, 15 bp, Homo sapiens
ccgccacccgggtgg

SEQ ID NO: 26305 - DNA, 15 bp, Homo sapiens
gccgccacccgggtg

SEQ ID NO: 26306 - DNA, 15 bp, Homo sapiens
cgccgccacccgggt

SEQ ID NO: 26307 - DNA, 15 bp, Homo sapiens
ccgccgccacccggg

SEQ ID NO: 26308 - DNA, 15 bp, Homo sapiens
gccgccgccacccgg

SEQ ID NO: 26309 - DNA, 15 bp, Homo sapiens
cgccgccgccacccg

SEQ ID NO: 26310 - DNA, 15 bp, Homo sapiens
ccgccgccgccaccc

SEQ ID NO: 26311 - DNA, 15 bp, Homo sapiens
gccgccgccgccacc

SEQ ID NO: 26312 - DNA, 15 bp, Homo sapiens
agccgccgccgccac

SEQ ID NO: 26313 - DNA, 15 bp, Homo sapiens
gagccgccgccgcca

SEQ ID NO: 26314 - DNA, 15 bp, Homo sapiens
tgagccgccgccgcc

SEQ ID NO: 26315 - DNA, 15 bp, Homo sapiens
ctgagccgccgccgc

SEQ ID NO: 26316 - DNA, 15 bp, Homo sapiens
gctgagccgccgccg

SEQ ID NO: 26317 - DNA, 15 bp, Homo sapiens
cgctgagccgccgcc

SEQ ID NO: 26318 - DNA, 15 bp, Homo sapiens
tcgctgagccgccgc

SEQ ID NO: 26319 - DNA, 15 bp, Homo sapiens
gtcgctgagccgccg

SEQ ID NO: 26320 - DNA, 15 bp, Homo sapiens
agtcgctgagccgcc

SEQ ID NO: 26321 - DNA, 15 bp, Homo sapiens
tagtcgctgagccgc

SEQ ID NO: 26322 - DNA, 15 bp, Homo sapiens
ctagtcgctgagccg

SEQ ID NO: 26323 - DNA, 15 bp, Homo sapiens
gctagtcgctgagcc

SEQ ID NO: 26324 - DNA, 15 bp, Homo sapiens
ggctagtcgctgagc

SEQ ID NO: 26325 - DNA, 15 bp, Homo sapiens
cggctagtcgctgag

SEQ ID NO: 26326 - DNA, 15 bp, Homo sapiens
ccggctagtcgctga

SEQ ID NO: 26327 - DNA, 15 bp, Homo sapiens
gccggctagtcgctg

SEQ ID NO: 26328 - DNA, 15 bp, Homo sapiens
ggccggctagtcgct

SEQ ID NO: 26329 - DNA, 15 bp, Homo sapiens
cggccggctagtcgc

SEQ ID NO: 26330 - DNA, 15 bp, Homo sapiens
gcggccggctagtcg

SEQ ID NO: 26331 - DNA, 15 bp, Homo sapiens
ggcggccggctagtc

SEQ ID NO: 26332 - DNA, 15 bp, Homo sapiens
gggcggccggctagt

SEQ ID NO: 26333 - DNA, 15 bp, Homo sapiens
agggcggccggctag

SEQ ID NO: 26334 - DNA, 15 bp, Homo sapiens
gagggcggccggcta

SEQ ID NO: 26335 - DNA, 15 bp, Homo sapiens
ggagggcggccggct

SEQ ID NO: 26336 - DNA, 15 bp, Homo sapiens
tggagggcggccggc

SEQ ID NO: 26337 - DNA, 15 bp, Homo sapiens
gtggagggcggccgg

SEQ ID NO: 26338 - DNA, 15 bp, Homo sapiens
ggtggagggcggccg

SEQ ID NO: 26339 - DNA, 15 bp, Homo sapiens
cggtggagggcggcc

SEQ ID NO: 26340 - DNA, 15 bp, Homo sapiens
ccggtggagggcggc

SEQ ID NO: 26341 - DNA, 15 bp, Homo sapiens
gccggtggagggcgg

SEQ ID NO: 26342 - DNA, 15 bp, Homo sapiens
cgccggtggagggcg

SEQ ID NO: 26343 - DNA, 15 bp, Homo sapiens
gcgccggtggagggc

SEQ ID NO: 26344 - DNA, 15 bp, Homo sapiens
ggcgccggtggaggg

SEQ ID NO: 26345 - DNA, 15 bp, Homo sapiens
aggcgccggtggagg

SEQ ID NO: 26346 - DNA, 15 bp, Homo sapiens
gaggcgccggtggag

SEQ ID NO: 26347 - DNA, 15 bp, Homo sapiens
ggaggcgccggtgga

SEQ ID NO: 26348 - DNA, 15 bp, Homo sapiens
cggaggcgccggtgg

SEQ ID NO: 26349 - DNA, 15 bp, Homo sapiens
ccggaggcgccggtg

SEQ ID NO: 26350 - DNA, 15 bp, Homo sapiens
tccggaggcgccggt

SEQ ID NO: 26351 - DNA, 15 bp, Homo sapiens
gtccggaggcgccgg

SEQ ID NO: 26352 - DNA, 15 bp, Homo sapiens
cgtccggaggcgccg

SEQ ID NO: 26353 - DNA, 15 bp, Homo sapiens
gcgtccggaggcgcc

SEQ ID NO: 26354 - DNA, 15 bp, Homo sapiens
tgcgtccggaggcgc

SEQ ID NO: 26355 - DNA, 15 bp, Homo sapiens
ttgcgtccggaggcg

SEQ ID NO: 26356 - DNA, 15 bp, Homo sapiens
gttgcgtccggaggc

SEQ ID NO: 26357 - DNA, 15 bp, Homo sapiens
ggttgcgtccggagg

SEQ ID NO: 26358 - DNA, 15 bp, Homo sapiens
aggttgcgtccggag

SEQ ID NO: 26359 - DNA, 15 bp, Homo sapiens
gaggttgcgtccgga

SEQ ID NO: 26360 - DNA, 15 bp, Homo sapiens
cgaggttgcgtccgg

SEQ ID NO: 26361 - DNA, 15 bp, Homo sapiens
gcgaggttgcgtccg

SEQ ID NO: 26362 - DNA, 15 bp, Homo sapiens
ggcgaggttgcgtcc

SEQ ID NO: 26363 - DNA, 15 bp, Homo sapiens
gggcgaggttgcgtc

SEQ ID NO: 26364 - DNA, 15 bp, Homo sapiens
agggcgaggttgcgt

SEQ ID NO: 26365 - DNA, 15 bp, Homo sapiens
cagggcgaggttgcg

SEQ ID NO: 26366 - DNA, 15 bp, Homo sapiens
ccagggcgaggttgc

SEQ ID NO: 26367 - DNA, 15 bp, Homo sapiens
gccagggcgaggttg

SEQ ID NO: 26368 - DNA, 15 bp, Homo sapiens
tgccagggcgaggtt

SEQ ID NO: 26369 - DNA, 15 bp, Homo sapiens
ctgccagggcgaggt

SEQ ID NO: 26370 - DNA, 15 bp, Homo sapiens
cctgccagggcgagg

SEQ ID NO: 26371 - DNA, 15 bp, Homo sapiens
ccctgccagggcgag

SEQ ID NO: 26372 - DNA, 15 bp, Homo sapiens
gccctgccagggcga

SEQ ID NO: 26373 - DNA, 15 bp, Homo sapiens
cgccctgccagggcg

SEQ ID NO: 26374 - DNA, 15 bp, Homo sapiens
ccgccctgccagggc

SEQ ID NO: 26375 - DNA, 15 bp, Homo sapiens
accgccctgccaggg

SEQ ID NO: 26376 - DNA, 15 bp, Homo sapiens
gaccgccctgccagg

SEQ ID NO: 26377 - DNA, 15 bp, Homo sapiens
agaccgccctgccag

SEQ ID NO: 26378 - DNA, 15 bp, Homo sapiens
cagaccgccctgcca

SEQ ID NO: 26379 - DNA, 15 bp, Homo sapiens
gcagaccgccctgcc

SEQ ID NO: 26380 - DNA, 15 bp, Homo sapiens
cgcagaccgccctgc

SEQ ID NO: 26381 - DNA, 15 bp, Homo sapiens
gcgcagaccgccctg

SEQ ID NO: 26382 - DNA, 15 bp, Homo sapiens
cgcgcagaccgccct

SEQ ID NO: 26383 - DNA, 15 bp, Homo sapiens
acgcgcagaccgccc

SEQ ID NO: 26384 - DNA, 15 bp, Homo sapiens
gacgcgcagaccgcc

SEQ ID NO: 26385 - DNA, 15 bp, Homo sapiens
ggacgcgcagaccgc

SEQ ID NO: 26386 - DNA, 15 bp, Homo sapiens
tggacgcgcagaccg

SEQ ID NO: 26387 - DNA, 15 bp, Homo sapiens
ctggacgcgcagacc

SEQ ID NO: 26388 - DNA, 15 bp, Homo sapiens
gctggacgcgcagac

SEQ ID NO: 26389 - DNA, 15 bp, Homo sapiens
agctggacgcgcaga

SEQ ID NO: 26390 - DNA, 15 bp, Homo sapiens
cagctggacgcgcag

SEQ ID NO: 26391 - DNA, 15 bp, Homo sapiens
tcagctggacgcgca

SEQ ID NO: 26392 - DNA, 15 bp, Homo sapiens
atcagctggacgcgc

SEQ ID NO: 26393 - DNA, 15 bp, Homo sapiens
aatcagctggacgcg

SEQ ID NO: 26394 - DNA, 15 bp, Homo sapiens
caatcagctggacgc

SEQ ID NO: 26395 - DNA, 15 bp, Homo sapiens
ccaatcagctggacg

SEQ ID NO: 26396 - DNA, 15 bp, Homo sapiens
accaatcagctggac

SEQ ID NO: 26397 - DNA, 15 bp, Homo sapiens
caccaatcagctgga

SEQ ID NO: 26398 - DNA, 15 bp, Homo sapiens
ccaccaatcagctgg

SEQ ID NO: 26399 - DNA, 15 bp, Homo sapiens
gccaccaatcagctg

SEQ ID NO: 26400 - DNA, 15 bp, Homo sapiens
agccaccaatcagct

SEQ ID NO: 26401 - DNA, 15 bp, Homo sapiens
gagccaccaatcagc

SEQ ID NO: 26402 - DNA, 15 bp, Homo sapiens
agagccaccaatcag

SEQ ID NO: 26403 - DNA, 15 bp, Homo sapiens
cagagccaccaatca

SEQ ID NO: 26404 - DNA, 15 bp, Homo sapiens
acagagccaccaatc

SEQ ID NO: 26405 - DNA, 15 bp, Homo sapiens
gacagagccaccaat

SEQ ID NO: 26406 - DNA, 15 bp, Homo sapiens
ggacagagccaccaa

SEQ ID NO: 26407 - DNA, 15 bp, Homo sapiens
tggacagagccacca

SEQ ID NO: 26408 - DNA, 15 bp, Homo sapiens
ctggacagagccacc

SEQ ID NO: 26409 - DNA, 15 bp, Homo sapiens
gctggacagagccac

SEQ ID NO: 26410 - DNA, 15 bp, Homo sapiens
ggctggacagagcca

SEQ ID NO: 26411 - DNA, 15 bp, Homo sapiens
cggctggacagagcc

SEQ ID NO: 26412 - DNA, 15 bp, Homo sapiens
gcggctggacagagc

SEQ ID NO: 26413 - DNA, 15 bp, Homo sapiens
ggcggctggacagag

SEQ ID NO: 26414 - DNA, 15 bp, Homo sapiens
cggcggctggacaga

SEQ ID NO: 26415 - DNA, 15 bp, Homo sapiens
gcggcggctggacag

SEQ ID NO: 26416 - DNA, 15 bp, Homo sapiens
tgcggcggctggaca

SEQ ID NO: 26417 - DNA, 15 bp, Homo sapiens
gtgcggcggctggac

SEQ ID NO: 26418 - DNA, 15 bp, Homo sapiens
cgtgcggcggctgga

SEQ ID NO: 26419 - DNA, 15 bp, Homo sapiens
ccgtgcggcggctgg

SEQ ID NO: 26420 - DNA, 15 bp, Homo sapiens
tccgtgcggcggctg

SEQ ID NO: 26421 - DNA, 15 bp, Homo sapiens
ctccgtgcggcggct

SEQ ID NO: 26422 - DNA, 15 bp, Homo sapiens
gctccgtgcggcggc

SEQ ID NO: 26423 - DNA, 15 bp, Homo sapiens
agctccgtgcggcgg

SEQ ID NO: 26424 - DNA, 15 bp, Homo sapiens
tagctccgtgcggcg

SEQ ID NO: 26425 - DNA, 15 bp, Homo sapiens
ttagctccgtgcggc

SEQ ID NO: 26426 - DNA, 15 bp, Homo sapiens
tttagctccgtgcgg

SEQ ID NO: 26427 - DNA, 15 bp, Homo sapiens
ttttagctccgtgcg

SEQ ID NO: 26428 - DNA, 15 bp, Homo sapiens
cttttagctccgtgc

SEQ ID NO: 26429 - DNA, 15 bp, Homo sapiens
acttttagctccgtg

SEQ ID NO: 26430 - DNA, 15 bp, Homo sapiens
cacttttagctccgt

SEQ ID NO: 26431 - DNA, 15 bp, Homo sapiens
acacttttagctccg

SEQ ID NO: 26432 - DNA, 15 bp, Homo sapiens
aacacttttagctcc

SEQ ID NO: 26433 - DNA, 15 bp, Homo sapiens
gaacacttttagctc

SEQ ID NO: 26434 - DNA, 15 bp, Homo sapiens
agaacacttttagct

SEQ ID NO: 26435 - DNA, 15 bp, Homo sapiens
aagaacacttttagc

SEQ ID NO: 26436 - DNA, 15 bp, Homo sapiens
gaagaacacttttag

SEQ ID NO: 26437 - DNA, 15 bp, Homo sapiens
agaagaacactttta

SEQ ID NO: 26438 - DNA, 15 bp, Homo sapiens
gagaagaacactttt

SEQ ID NO: 26439 - DNA, 15 bp, Homo sapiens
ggagaagaacacttt

SEQ ID NO: 26440 - DNA, 15 bp, Homo sapiens
tggagaagaacactt

SEQ ID NO: 26441 - DNA, 15 bp, Homo sapiens
gtggagaagaacact

SEQ ID NO: 26442 - DNA, 15 bp, Homo sapiens
ggtggagaagaacac

SEQ ID NO: 26443 - DNA, 15 bp, Homo sapiens
cggtggagaagaaca

SEQ ID NO: 26444 - DNA, 15 bp, Homo sapiens
gcggtggagaagaac

SEQ ID NO: 26445 - DNA, 15 bp, Homo sapiens
ggcggtggagaagaa

SEQ ID NO: 26446 - DNA, 15 bp, Homo sapiens
aggcggtggagaaga

SEQ ID NO: 26447 - DNA, 15 bp, Homo sapiens
gaggcggtggagaag

SEQ ID NO: 26448 - DNA, 15 bp, Homo sapiens
ggaggcggtggagaa

SEQ ID NO: 26449 - DNA, 15 bp, Homo sapiens
tggaggcggtggaga

SEQ ID NO: 26450 - DNA, 15 bp, Homo sapiens
ctggaggcggtggag

SEQ ID NO: 26451 - DNA, 15 bp, Homo sapiens
gctggaggcggtgga

SEQ ID NO: 26452 - DNA, 15 bp, Homo sapiens
ggctggaggcggtgg

SEQ ID NO: 26453 - DNA, 15 bp, Homo sapiens
cggctggaggcggtg

SEQ ID NO: 26454 - DNA, 15 bp, Homo sapiens
gcggctggaggcggt

SEQ ID NO: 26455 - DNA, 15 bp, Homo sapiens
ggcggctggaggcgg

SEQ ID NO: 26456 - DNA, 15 bp, Homo sapiens
gggcggctggaggcg

SEQ ID NO: 26457 - DNA, 15 bp, Homo sapiens
tgggcggctggaggc

SEQ ID NO: 26458 - DNA, 15 bp, Homo sapiens
ctgggcggctggagg

SEQ ID NO: 26459 - DNA, 15 bp, Homo sapiens
cctgggcggctggag

SEQ ID NO: 26460 - DNA, 15 bp, Homo sapiens
gcctgggcggctgga

SEQ ID NO: 26461 - DNA, 15 bp, Homo sapiens
ggcctgggcggctgg

SEQ ID NO: 26462 - DNA, 15 bp, Homo sapiens
gggcctgggcggctg

SEQ ID NO: 26463 - DNA, 15 bp, Homo sapiens
ggggcctgggcggct

SEQ ID NO: 26464 - DNA, 15 bp, Homo sapiens
gggggcctgggcggc

SEQ ID NO: 26465 - DNA, 15 bp, Homo sapiens
agggggcctgggcgg

SEQ ID NO: 26466 - DNA, 15 bp, Homo sapiens
gagggggcctgggcg

SEQ ID NO: 26467 - DNA, 15 bp, Homo sapiens
cgagggggcctgggc

SEQ ID NO: 26468 - DNA, 15 bp, Homo sapiens
gcgagggggcctggg

SEQ ID NO: 26469 - DNA, 15 bp, Homo sapiens
ggcgagggggcctgg

SEQ ID NO: 26470 - DNA, 15 bp, Homo sapiens
gggcgagggggcctg

SEQ ID NO: 26471 - DNA, 15 bp, Homo sapiens
cgggcgagggggcct

SEQ ID NO: 26472 - DNA, 15 bp, Homo sapiens
ccgggcgagggggcc

SEQ ID NO: 26473 - DNA, 15 bp, Homo sapiens
gccgggcgagggggc

SEQ ID NO: 26474 - DNA, 15 bp, Homo sapiens
ggccgggcgaggggg

SEQ ID NO: 26475 - DNA, 15 bp, Homo sapiens
gggccgggcgagggg

SEQ ID NO: 26476 - DNA, 15 bp, Homo sapiens
cgggccgggcgaggg

SEQ ID NO: 26477 - DNA, 15 bp, Homo sapiens
gcgggccgggcgagg

SEQ ID NO: 26478 - DNA, 15 bp, Homo sapiens
agcgggccgggcgag

SEQ ID NO: 26479 - DNA, 15 bp, Homo sapiens
gagcgggccgggcga

SEQ ID NO: 26480 - DNA, 15 bp, Homo sapiens
agagcgggccgggcg

SEQ ID NO: 26481 - DNA, 15 bp, Homo sapiens
gagagcgggccgggc

SEQ ID NO: 26482 - DNA, 15 bp, Homo sapiens
agagagcgggccggg

SEQ ID NO: 26483 - DNA, 15 bp, Homo sapiens
cagagagcgggccgg

SEQ ID NO: 26484 - DNA, 15 bp, Homo sapiens
ccagagagcgggccg

SEQ ID NO: 26485 - DNA, 15 bp, Homo sapiens
gccagagagcgggcc

SEQ ID NO: 26486 - DNA, 15 bp, Homo sapiens
agccagagagcgggc

SEQ ID NO: 26487 - DNA, 15 bp, Homo sapiens
gagccagagagcggg

SEQ ID NO: 26488 - DNA, 15 bp, Homo sapiens
agagccagagagcgg

SEQ ID NO: 26489 - DNA, 15 bp, Homo sapiens
aagagccagagagcg

SEQ ID NO: 26490 - DNA, 15 bp, Homo sapiens
gaagagccagagagc

SEQ ID NO: 26491 - DNA, 15 bp, Homo sapiens
cgaagagccagagag

SEQ ID NO: 26492 - DNA, 15 bp, Homo sapiens
ccgaagagccagaga

SEQ ID NO: 26493 - DNA, 15 bp, Homo sapiens
accgaagagccagag

SEQ ID NO: 26494 - DNA, 15 bp, Homo sapiens
gaccgaagagccaga

SEQ ID NO: 26495 - DNA, 15 bp, Homo sapiens
ggaccgaagagccag

SEQ ID NO: 26496 - DNA, 15 bp, Homo sapiens
cggaccgaagagcca

SEQ ID NO: 26497 - DNA, 15 bp, Homo sapiens
ccggaccgaagagcc

SEQ ID NO: 26498 - DNA, 15 bp, Homo sapiens
tccggaccgaagagc

SEQ ID NO: 26499 - DNA, 15 bp, Homo sapiens
ttccggaccgaagag

SEQ ID NO: 26500 - DNA, 15 bp, Homo sapiens
tttccggaccgaaga

SEQ ID NO: 26501 - DNA, 15 bp, Homo sapiens
ctttccggaccgaag

SEQ ID NO: 26502 - DNA, 15 bp, Homo sapiens
cctttccggaccgaa

SEQ ID NO: 26503 - DNA, 15 bp, Homo sapiens
tcctttccggaccga

SEQ ID NO: 26504 - DNA, 15 bp, Homo sapiens
gtcctttccggaccg

SEQ ID NO: 26505 - DNA, 15 bp, Homo sapiens
ggtcctttccggacc

SEQ ID NO: 26506 - DNA, 15 bp, Homo sapiens
aggtcctttccggac

SEQ ID NO: 26507 - DNA, 15 bp, Homo sapiens
aaggtcctttccgga

SEQ ID NO: 26508 - DNA, 15 bp, Homo sapiens
gaaggtcctttccgg

SEQ ID NO: 26509 - DNA, 15 bp, Homo sapiens
agaaggtcctttccg

SEQ ID NO: 26510 - DNA, 15 bp, Homo sapiens
tagaaggtcctttcc

SEQ ID NO: 26511 - DNA, 15 bp, Homo sapiens
gtagaaggtcctttc

SEQ ID NO: 26512 - DNA, 15 bp, Homo sapiens
agtagaaggtccttt

SEQ ID NO: 26513 - DNA, 15 bp, Homo sapiens
gagtagaaggtcctt

SEQ ID NO: 26514 - DNA, 15 bp, Homo sapiens
ggagtagaaggtcct

SEQ ID NO: 26515 - DNA, 15 bp, Homo sapiens
gggagtagaaggtcc

SEQ ID NO: 26516 - DNA, 15 bp, Homo sapiens
tgggagtagaaggtc

SEQ ID NO: 26517 - DNA, 15 bp, Homo sapiens
ctgggagtagaaggt

SEQ ID NO: 26518 - DNA, 15 bp, Homo sapiens
cctgggagtagaagg

SEQ ID NO: 26519 - DNA, 15 bp, Homo sapiens
gcctgggagtagaag

SEQ ID NO: 26520 - DNA, 15 bp, Homo sapiens
cgcctgggagtagaa

SEQ ID NO: 26521 - DNA, 15 bp, Homo sapiens
ccgcctgggagtaga

SEQ ID NO: 26522 - DNA, 15 bp, Homo sapiens
tccgcctgggagtag

SEQ ID NO: 26523 - DNA, 15 bp, Homo sapiens
ctccgcctgggagta

SEQ ID NO: 26524 - DNA, 15 bp, Homo sapiens
cctccgcctgggagt

SEQ ID NO: 26525 - DNA, 15 bp, Homo sapiens
gcctccgcctgggag

SEQ ID NO: 26526 - DNA, 15 bp, Homo sapiens
agcctccgcctggga

SEQ ID NO: 26527 - DNA, 15 bp, Homo sapiens
gagcctccgcctggg

SEQ ID NO: 26528 - DNA, 15 bp, Homo sapiens
ggagcctccgcctgg

SEQ ID NO: 26529 - DNA, 15 bp, Homo sapiens
gggagcctccgcctg

SEQ ID NO: 26530 - DNA, 15 bp, Homo sapiens
ggggagcctccgcct

SEQ ID NO: 26531 - DNA, 15 bp, Homo sapiens
aggggagcctccgcc

SEQ ID NO: 26532 - DNA, 15 bp, Homo sapiens
aaggggagcctccgc

SEQ ID NO: 26533 - DNA, 15 bp, Homo sapiens
aaaggggagcctccg

SEQ ID NO: 26534 - DNA, 15 bp, Homo sapiens
gaaaggggagcctcc

SEQ ID NO: 26535 - DNA, 15 bp, Homo sapiens
ggaaaggggagcctc

SEQ ID NO: 26536 - DNA, 15 bp, Homo sapiens
gggaaaggggagcct

SEQ ID NO: 26537 - DNA, 15 bp, Homo sapiens
agggaaaggggagcc

SEQ ID NO: 26538 - DNA, 15 bp, Homo sapiens
cagggaaaggggagc

SEQ ID NO: 26539 - DNA, 15 bp, Homo sapiens
tcagggaaaggggag

SEQ ID NO: 26540 - DNA, 15 bp, Homo sapiens
ctcagggaaagggga

SEQ ID NO: 26541 - DNA, 15 bp, Homo sapiens
actcagggaaagggg

SEQ ID NO: 26542 - DNA, 15 bp, Homo sapiens
aactcagggaaaggg

SEQ ID NO: 26543 - DNA, 15 bp, Homo sapiens
taactcagggaaagg

SEQ ID NO: 26544 - DNA, 15 bp, Homo sapiens
gtaactcagggaaag

SEQ ID NO: 26545 - DNA, 15 bp, Homo sapiens
ggtaactcagggaaa

SEQ ID NO: 26546 - DNA, 15 bp, Homo sapiens
gggtaactcagggaa

SEQ ID NO: 26547 - DNA, 15 bp, Homo sapiens
ggggtaactcaggga

SEQ ID NO: 26548 - DNA, 15 bp, Homo sapiens
cggggtaactcaggg

SEQ ID NO: 26549 - DNA, 15 bp, Homo sapiens
tcggggtaactcagg

SEQ ID NO: 26550 - DNA, 15 bp, Homo sapiens
gtcggggtaactcag

SEQ ID NO: 26551 - DNA, 15 bp, Homo sapiens
agtcggggtaactca

SEQ ID NO: 26552 - DNA, 15 bp, Homo sapiens
cagtcggggtaactc

SEQ ID NO: 26553 - DNA, 15 bp, Homo sapiens
tcagtcggggtaact

SEQ ID NO: 26554 - DNA, 15 bp, Homo sapiens
gtcagtcggggtaac

SEQ ID NO: 26555 - DNA, 15 bp, Homo sapiens
agtcagtcggggtaa

SEQ ID NO: 26556 - DNA, 15 bp, Homo sapiens
gagtcagtcggggta

SEQ ID NO: 26557 - DNA, 15 bp, Homo sapiens
cgagtcagtcggggt

SEQ ID NO: 26558 - DNA, 15 bp, Homo sapiens
ccgagtcagtcgggg

SEQ ID NO: 26559 - DNA, 15 bp, Homo sapiens
tccgagtcagtcggg

SEQ ID NO: 26560 - DNA, 15 bp, Homo sapiens
gtccgagtcagtcgg

SEQ ID NO: 26561 - DNA, 15 bp, Homo sapiens
ggtccgagtcagtcg

SEQ ID NO: 26562 - DNA, 15 bp, Homo sapiens
aggtccgagtcagtc

SEQ ID NO: 26563 - DNA, 15 bp, Homo sapiens
caggtccgagtcagt

SEQ ID NO: 26564 - DNA, 15 bp, Homo sapiens
ccaggtccgagtcag

SEQ ID NO: 26565 - DNA, 15 bp, Homo sapiens
cccaggtccgagtca

SEQ ID NO: 26566 - DNA, 15 bp, Homo sapiens
gcccaggtccgagtc

SEQ ID NO: 26567 - DNA, 15 bp, Homo sapiens
agcccaggtccgagt

SEQ ID NO: 26568 - DNA, 15 bp, Homo sapiens
gagcccaggtccgag

SEQ ID NO: 26569 - DNA, 15 bp, Homo sapiens
tgagcccaggtccga

SEQ ID NO: 26570 - DNA, 15 bp, Homo sapiens
ctgagcccaggtccg

SEQ ID NO: 26571 - DNA, 15 bp, Homo sapiens
actgagcccaggtcc

SEQ ID NO: 26572 - DNA, 15 bp, Homo sapiens
cactgagcccaggtc

SEQ ID NO: 26573 - DNA, 15 bp, Homo sapiens
tcactgagcccaggt

SEQ ID NO: 26574 - DNA, 15 bp, Homo sapiens
ctcactgagcccagg

SEQ ID NO: 26575 - DNA, 15 bp, Homo sapiens
cctcactgagcccag

SEQ ID NO: 26576 - DNA, 15 bp, Homo sapiens
gcctcactgagccca

SEQ ID NO: 26577 - DNA, 15 bp, Homo sapiens
tgcctcactgagccc

SEQ ID NO: 26578 - DNA, 15 bp, Homo sapiens
atgcctcactgagcc

SEQ ID NO: 26579 - DNA, 15 bp, Homo sapiens
gatgcctcactgagc

SEQ ID NO: 26580 - DNA, 15 bp, Homo sapiens
ggatgcctcactgag

SEQ ID NO: 26581 - DNA, 15 bp, Homo sapiens
cggatgcctcactga

SEQ ID NO: 26582 - DNA, 15 bp, Homo sapiens
ccggatgcctcactg

SEQ ID NO: 26583 - DNA, 15 bp, Homo sapiens
gccggatgcctcact

SEQ ID NO: 26584 - DNA, 15 bp, Homo sapiens
ggccggatgcctcac

SEQ ID NO: 26585 - DNA, 15 bp, Homo sapiens
gggccggatgcctca

SEQ ID NO: 26586 - DNA, 15 bp, Homo sapiens
cgggccggatgcctc

SEQ ID NO: 26587 - DNA, 15 bp, Homo sapiens
ccgggccggatgcct

SEQ ID NO: 26588 - DNA, 15 bp, Homo sapiens
gccgggccggatgcc

SEQ ID NO: 26589 - DNA, 15 bp, Homo sapiens
agccgggccggatgc

SEQ ID NO: 26590 - DNA, 15 bp, Homo sapiens
cagccgggccggatg

SEQ ID NO: 26591 - DNA, 15 bp, Homo sapiens
ccagccgggccggat

SEQ ID NO: 26592 - DNA, 15 bp, Homo sapiens
cccagccgggccgga

SEQ ID NO: 26593 - DNA, 15 bp, Homo sapiens
ccccagccgggccgg

SEQ ID NO: 26594 - DNA, 15 bp, Homo sapiens
tccccagccgggccg

SEQ ID NO: 26595 - DNA, 15 bp, Homo sapiens
ctccccagccgggcc

SEQ ID NO: 26596 - DNA, 15 bp, Homo sapiens
gctccccagccgggc

SEQ ID NO: 26597 - DNA, 15 bp, Homo sapiens
cgctccccagccggg

SEQ ID NO: 26598 - DNA, 15 bp, Homo sapiens
ccgctccccagccgg

SEQ ID NO: 26599 - DNA, 15 bp, Homo sapiens
tccgctccccagccg

SEQ ID NO: 26600 - DNA, 15 bp, Homo sapiens
ctccgctccccagcc

SEQ ID NO: 26601 - DNA, 15 bp, Homo sapiens
gctccgctccccagc

SEQ ID NO: 26602 - DNA, 15 bp, Homo sapiens
cgctccgctccccag

SEQ ID NO: 26603 - DNA, 15 bp, Homo sapiens
gcgctccgctcccca

SEQ ID NO: 26604 - DNA, 15 bp, Homo sapiens
cgcgctccgctcccc

SEQ ID NO: 26605 - DNA, 15 bp, Homo sapiens
ccgcgctccgctccc

SEQ ID NO: 26606 - DNA, 15 bp, Homo sapiens
accgcgctccgctcc

SEQ ID NO: 26607 - DNA, 15 bp, Homo sapiens
gaccgcgctccgctc

SEQ ID NO: 26608 - DNA, 15 bp, Homo sapiens
agaccgcgctccgct

SEQ ID NO: 26609 - DNA, 15 bp, Homo sapiens
gagaccgcgctccgc

SEQ ID NO: 26610 - DNA, 15 bp, Homo sapiens
cgagaccgcgctccg

SEQ ID NO: 26611 - DNA, 15 bp, Homo sapiens
ccgagaccgcgctcc

SEQ ID NO: 26612 - DNA, 15 bp, Homo sapiens
gccgagaccgcgctc

SEQ ID NO: 26613 - DNA, 15 bp, Homo sapiens
tgccgagaccgcgct

SEQ ID NO: 26614 - DNA, 15 bp, Homo sapiens
ctgccgagaccgcgc

SEQ ID NO: 26615 - DNA, 15 bp, Homo sapiens
gctgccgagaccgcg

SEQ ID NO: 26616 - DNA, 15 bp, Homo sapiens
agctgccgagaccgc

SEQ ID NO: 26617 - DNA, 15 bp, Homo sapiens
gagctgccgagaccg

SEQ ID NO: 26618 - DNA, 15 bp, Homo sapiens
ggagctgccgagacc

SEQ ID NO: 26619 - DNA, 15 bp, Homo sapiens
gggagctgccgagac

SEQ ID NO: 26620 - DNA, 15 bp, Homo sapiens
ggggagctgccgaga

SEQ ID NO: 26621 - DNA, 15 bp, Homo sapiens
aggggagctgccgag

SEQ ID NO: 26622 - DNA, 15 bp, Homo sapiens
aaggggagctgccga

SEQ ID NO: 26623 - DNA, 15 bp, Homo sapiens
gaaggggagctgccg

SEQ ID NO: 26624 - DNA, 15 bp, Homo sapiens
ggaaggggagctgcc

SEQ ID NO: 26625 - DNA, 15 bp, Homo sapiens
gggaaggggagctgc

SEQ ID NO: 26626 - DNA, 15 bp, Homo sapiens
agggaaggggagctg

SEQ ID NO: 26627 - DNA, 15 bp, Homo sapiens
aagggaaggggagct

SEQ ID NO: 26628 - DNA, 15 bp, Homo sapiens
caagggaaggggagc

SEQ ID NO: 26629 - DNA, 15 bp, Homo sapiens
tcaagggaaggggag

SEQ ID NO: 26630 - DNA, 15 bp, Homo sapiens
ctcaagggaagggga

SEQ ID NO: 26631 - DNA, 15 bp, Homo sapiens
tctcaagggaagggg

SEQ ID NO: 26632 - DNA, 15 bp, Homo sapiens
ttctcaagggaaggg

SEQ ID NO: 26633 - DNA, 15 bp, Homo sapiens
tttctcaagggaagg

SEQ ID NO: 26634 - DNA, 15 bp, Homo sapiens
ctttctcaagggaag

SEQ ID NO: 26635 - DNA, 15 bp, Homo sapiens
gctttctcaagggaa

SEQ ID NO: 26636 - DNA, 15 bp, Homo sapiens
cgctttctcaaggga

SEQ ID NO: 26637 - DNA, 15 bp, Homo sapiens
ccgctttctcaaggg

SEQ ID NO: 26638 - DNA, 15 bp, Homo sapiens
cccgctttctcaagg

SEQ ID NO: 26639 - DNA, 15 bp, Homo sapiens
tcccgctttctcaag

SEQ ID NO: 26640 - DNA, 15 bp, Homo sapiens
ttcccgctttctcaa

SEQ ID NO: 26641 - DNA, 15 bp, Homo sapiens
gttcccgctttctca

SEQ ID NO: 26642 - DNA, 15 bp, Homo sapiens
ggttcccgctttctc

SEQ ID NO: 26643 - DNA, 15 bp, Homo sapiens
gggttcccgctttct

SEQ ID NO: 26644 - DNA, 15 bp, Homo sapiens
agggttcccgctttc

SEQ ID NO: 26645 - DNA, 15 bp, Homo sapiens
gagggttcccgcttt

SEQ ID NO: 26646 - DNA, 15 bp, Homo sapiens
agagggttcccgctt

SEQ ID NO: 26647 - DNA, 15 bp, Homo sapiens
tagagggttcccgct

SEQ ID NO: 26648 - DNA, 15 bp, Homo sapiens
ttagagggttcccgc

SEQ ID NO: 26649 - DNA, 15 bp, Homo sapiens
cttagagggttcccg

SEQ ID NO: 26650 - DNA, 15 bp, Homo sapiens
gcttagagggttccc

SEQ ID NO: 26651 - DNA, 15 bp, Homo sapiens
ggcttagagggttcc

SEQ ID NO: 26652 - DNA, 15 bp, Homo sapiens
tggcttagagggttc

SEQ ID NO: 26653 - DNA, 15 bp, Homo sapiens
ctggcttagagggtt

SEQ ID NO: 26654 - DNA, 15 bp, Homo sapiens
gctggcttagagggt

SEQ ID NO: 26655 - DNA, 15 bp, Homo sapiens
cgctggcttagaggg

SEQ ID NO: 26656 - DNA, 15 bp, Homo sapiens
gcgctggcttagagg

SEQ ID NO: 26657 - DNA, 15 bp, Homo sapiens
ggcgctggcttagag

SEQ ID NO: 26658 - DNA, 15 bp, Homo sapiens
gggcgctggcttaga

SEQ ID NO: 26659 - DNA, 15 bp, Homo sapiens
cgggcgctggcttag

SEQ ID NO: 26660 - DNA, 15 bp, Homo sapiens
tcgggcgctggctta

SEQ ID NO: 26661 - DNA, 15 bp, Homo sapiens
ttcgggcgctggctt

SEQ ID NO: 26662 - DNA, 15 bp, Homo sapiens
tttcgggcgctggct

SEQ ID NO: 26663 - DNA, 15 bp, Homo sapiens
gtttcgggcgctggc

SEQ ID NO: 26664 - DNA, 15 bp, Homo sapiens
agtttcgggcgctgg

SEQ ID NO: 26665 - DNA, 15 bp, Homo sapiens
gagtttcgggcgctg

SEQ ID NO: 26666 - DNA, 15 bp, Homo sapiens
cgagtttcgggcgct

SEQ ID NO: 26667 - DNA, 15 bp, Homo sapiens
gcgagtttcgggcgc

SEQ ID NO: 26668 - DNA, 15 bp, Homo sapiens
cgcgagtttcgggcg

SEQ ID NO: 26669 - DNA, 15 bp, Homo sapiens
ccgcgagtttcgggc

SEQ ID NO: 26670 - DNA, 15 bp, Homo sapiens
cccgcgagtttcggg

SEQ ID NO: 26671 - DNA, 15 bp, Homo sapiens
ccccgcgagtttcgg

SEQ ID NO: 26672 - DNA, 15 bp, Homo sapiens
tccccgcgagtttcg

SEQ ID NO: 26673 - DNA, 15 bp, Homo sapiens
ctccccgcgagtttc

SEQ ID NO: 26674 - DNA, 15 bp, Homo sapiens
cctccccgcgagttt

SEQ ID NO: 26675 - DNA, 15 bp, Homo sapiens
ccctccccgcgagtt

SEQ ID NO: 26676 - DNA, 15 bp, Homo sapiens
tccctccccgcgagt

SEQ ID NO: 26677 - DNA, 15 bp, Homo sapiens
ctccctccccgcgag

SEQ ID NO: 26678 - DNA, 15 bp, Homo sapiens
cctccctccccgcga

SEQ ID NO: 26679 - DNA, 15 bp, Homo sapiens
tcctccctccccgcg

SEQ ID NO: 26680 - DNA, 15 bp, Homo sapiens
gtcctccctccccgc

SEQ ID NO: 26681 - DNA, 15 bp, Homo sapiens
tgtcctccctccccg

SEQ ID NO: 26682 - DNA, 15 bp, Homo sapiens
ctgtcctccctcccc

SEQ ID NO: 26683 - DNA, 15 bp, Homo sapiens
tctgtcctccctccc

SEQ ID NO: 26684 - DNA, 15 bp, Homo sapiens
ttctgtcctccctcc

SEQ ID NO: 26685 - DNA, 15 bp, Homo sapiens
cttctgtcctccctc

SEQ ID NO: 26686 - DNA, 15 bp, Homo sapiens
ccttctgtcctccct

SEQ ID NO: 26687 - DNA, 15 bp, Homo sapiens
cccttctgtcctccc

SEQ ID NO: 26688 - DNA, 15 bp, Homo sapiens
tcccttctgtcctcc

SEQ ID NO: 26689 - DNA, 15 bp, Homo sapiens
ttcccttctgtcctc

SEQ ID NO: 26690 - DNA, 15 bp, Homo sapiens
tttcccttctgtcct

SEQ ID NO: 26691 - DNA, 15 bp, Homo sapiens
ttttcccttctgtcc

SEQ ID NO: 26692 - DNA, 15 bp, Homo sapiens
tttttcccttctgtc

SEQ ID NO: 26693 - DNA, 15 bp, Homo sapiens
ttttttcccttctgt

SEQ ID NO: 26694 - DNA, 15 bp, Homo sapiens
tttttttcccttctg

SEQ ID NO: 26695 - DNA, 15 bp, Homo sapiens
ttttttttcccttct

SEQ ID NO: 26696 - DNA, 15 bp, Homo sapiens
tttttttttcccttc

SEQ ID NO: 26697 - DNA, 15 bp, Homo sapiens
ttttttttttccctt

SEQ ID NO: 26698 - DNA, 15 bp, Homo sapiens
cttttttttttccct

SEQ ID NO: 26699 - DNA, 15 bp, Homo sapiens
tcttttttttttccc

SEQ ID NO: 26700 - DNA, 15 bp, Homo sapiens
ttcttttttttttcc

SEQ ID NO: 26701 - DNA, 15 bp, Homo sapiens
tttcttttttttttc

SEQ ID NO: 26702 - DNA, 15 bp, Homo sapiens
gttttcttttttttt

SEQ ID NO: 26703 - DNA, 15 bp, Homo sapiens
ggttttctttttttt

SEQ ID NO: 26704 - DNA, 15 bp, Homo sapiens
gggttttcttttttt

SEQ ID NO: 26705 - DNA, 15 bp, Homo sapiens
tgggttttctttttt

SEQ ID NO: 26706 - DNA, 15 bp, Homo sapiens
ctgggttttcttttt

SEQ ID NO: 26707 - DNA, 15 bp, Homo sapiens
tctgggttttctttt

SEQ ID NO: 26708 - DNA, 15 bp, Homo sapiens
ttctgggttttcttt

SEQ ID NO: 26709 - DNA, 15 bp, Homo sapiens
tttctgggttttctt

SEQ ID NO: 26710 - DNA, 15 bp, Homo sapiens
ctttctgggttttct

SEQ ID NO: 26711 - DNA, 15 bp, Homo sapiens
tctttctgggttttc

SEQ ID NO: 26712 - DNA, 15 bp, Homo sapiens
ttctttctgggtttt

SEQ ID NO: 26713 - DNA, 15 bp, Homo sapiens
cttctttctgggttt

SEQ ID NO: 26714 - DNA, 15 bp, Homo sapiens
gcttctttctgggtt

SEQ ID NO: 26715 - DNA, 15 bp, Homo sapiens
tgcttctttctgggt

SEQ ID NO: 26716 - DNA, 15 bp, Homo sapiens
atgcttctttctggg

SEQ ID NO: 26717 - DNA, 15 bp, Homo sapiens
gatgcttctttctgg

SEQ ID NO: 26718 - DNA, 15 bp, Homo sapiens
ggatgcttctttctg

SEQ ID NO: 26719 - DNA, 15 bp, Homo sapiens
tggatgcttctttct

SEQ ID NO: 26720 - DNA, 15 bp, Homo sapiens
ctggatgcttctttc

SEQ ID NO: 26721 - DNA, 15 bp, Homo sapiens
gctggatgcttcttt

SEQ ID NO: 26722 - DNA, 15 bp, Homo sapiens
cgctggatgcttctt

SEQ ID NO: 26723 - DNA, 15 bp, Homo sapiens
tcgctggatgcttct

SEQ ID NO: 26724 - DNA, 15 bp, Homo sapiens
ctcgctggatgcttc

SEQ ID NO: 26725 - DNA, 15 bp, Homo sapiens
cctcgctggatgctt

SEQ ID NO: 26726 - DNA, 15 bp, Homo sapiens
tcctcgctggatgct

SEQ ID NO: 26727 - DNA, 15 bp, Homo sapiens
ctcctcgctggatgc

SEQ ID NO: 26728 - DNA, 15 bp, Homo sapiens
gctcctcgctggatg

SEQ ID NO: 26729 - DNA, 15 bp, Homo sapiens
cgctcctcgctggat

SEQ ID NO: 26730 - DNA, 15 bp, Homo sapiens
tcgctcctcgctgga

SEQ ID NO: 26731 - DNA, 15 bp, Homo sapiens
ctcgctcctcgctgg

SEQ ID NO: 26732 - DNA, 15 bp, Homo sapiens
cctcgctcctcgctg

SEQ ID NO: 26733 - DNA, 15 bp, Homo sapiens
ccctcgctcctcgct

SEQ ID NO: 26734 - DNA, 15 bp, Homo sapiens
gccctcgctcctcgc

SEQ ID NO: 26735 - DNA, 15 bp, Homo sapiens
cgccctcgctcctcg

SEQ ID NO: 26736 - DNA, 15 bp, Homo sapiens
tcgccctcgctcctc

SEQ ID NO: 26737 - DNA, 15 bp, Homo sapiens
gtcgccctcgctcct

SEQ ID NO: 26738 - DNA, 15 bp, Homo sapiens
cgtcgccctcgctcc

SEQ ID NO: 26739 - DNA, 15 bp, Homo sapiens
ccgtcgccctcgctc

SEQ ID NO: 26740 - DNA, 15 bp, Homo sapiens
tccgtcgccctcgct

SEQ ID NO: 26741 - DNA, 15 bp, Homo sapiens
ctccgtcgccctcgc

SEQ ID NO: 26742 - DNA, 15 bp, Homo sapiens
tctccgtcgccctcg

SEQ ID NO: 26743 - DNA, 15 bp, Homo sapiens
ctctccgtcgccctc

SEQ ID NO: 26744 - DNA, 15 bp, Homo sapiens
cctctccgtcgccct

SEQ ID NO: 26745 - DNA, 15 bp, Homo sapiens
tcctctccgtcgccc

SEQ ID NO: 26746 - DNA, 15 bp, Homo sapiens
ttcctctccgtcgcc

SEQ ID NO: 26747 - DNA, 15 bp, Homo sapiens
cttcctctccgtcgc

SEQ ID NO: 26748 - DNA, 15 bp, Homo sapiens
tcttcctctccgtcg

SEQ ID NO: 26749 - DNA, 15 bp, Homo sapiens
ctcttcctctccgtc

SEQ ID NO: 26750 - DNA, 15 bp, Homo sapiens
tctcttcctctccgt

SEQ ID NO: 26751 - DNA, 15 bp, Homo sapiens
atctcttcctctccg

SEQ ID NO: 26752 - DNA, 15 bp, Homo sapiens
tatctcttcctctcc

SEQ ID NO: 26753 - DNA, 15 bp, Homo sapiens
ctatctcttcctctc

SEQ ID NO: 26754 - DNA, 15 bp, Homo sapiens
tctatctcttcctct

SEQ ID NO: 26755 - DNA, 15 bp, Homo sapiens
ttctatctcttcctc

SEQ ID NO: 26756 - DNA, 15 bp, Homo sapiens
attctatctcttcct

SEQ ID NO: 26757 - DNA, 15 bp, Homo sapiens
cattctatctcttcc

SEQ ID NO: 26758 - DNA, 15 bp, Homo sapiens
tcattctatctcttc

SEQ ID NO: 26759 - DNA, 15 bp, Homo sapiens
ctcattctatctctt

SEQ ID NO: 26760 - DNA, 15 bp, Homo sapiens
cctcattctatctct

SEQ ID NO: 26761 - DNA, 15 bp, Homo sapiens
ccctcattctatctc

SEQ ID NO: 26762 - DNA, 15 bp, Homo sapiens
tccctcattctatct

SEQ ID NO: 26763 - DNA, 15 bp, Homo sapiens
ctccctcattctatc

SEQ ID NO: 26764 - DNA, 15 bp, Homo sapiens
cctccctcattctat

SEQ ID NO: 26765 - DNA, 15 bp, Homo sapiens
ccctccctcattcta

SEQ ID NO: 26766 - DNA, 15 bp, Homo sapiens
tccctccctcattct

SEQ ID NO: 26767 - DNA, 15 bp, Homo sapiens
atccctccctcattc

SEQ ID NO: 26768 - DNA, 15 bp, Homo sapiens
catccctccctcatt

SEQ ID NO: 26769 - DNA, 15 bp, Homo sapiens
ccatccctccctcat

SEQ ID NO: 26770 - DNA, 15 bp, Homo sapiens
tccatccctccctca

SEQ ID NO: 26771 - DNA, 15 bp, Homo sapiens
ctccatccctccctc

SEQ ID NO: 26772 - DNA, 15 bp, Homo sapiens
cctccatccctccct

SEQ ID NO: 26773 - DNA, 15 bp, Homo sapiens
gcctccatccctccc

SEQ ID NO: 26774 - DNA, 15 bp, Homo sapiens
agcctccatccctcc

SEQ ID NO: 26775 - DNA, 15 bp, Homo sapiens
cagcctccatccctc

SEQ ID NO: 26776 - DNA, 15 bp, Homo sapiens
ccagcctccatccct

SEQ ID NO: 26777 - DNA, 15 bp, Homo sapiens
tccagcctccatccc

SEQ ID NO: 26778 - DNA, 15 bp, Homo sapiens
ctccagcctccatcc

SEQ ID NO: 26779 - DNA, 15 bp, Homo sapiens
cctccagcctccatc

SEQ ID NO: 26780 - DNA, 15 bp, Homo sapiens
tcctccagcctccat

SEQ ID NO: 26781 - DNA, 15 bp, Homo sapiens
ctcctccagcctcca

SEQ ID NO: 26782 - DNA, 15 bp, Homo sapiens
cctcctccagcctcc

SEQ ID NO: 26783 - DNA, 15 bp, Homo sapiens
ccctcctccagcctc

SEQ ID NO: 26784 - DNA, 15 bp, Homo sapiens
cccctcctccagcct

SEQ ID NO: 26785 - DNA, 15 bp, Homo sapiens
ccccctcctccagcc

SEQ ID NO: 26786 - DNA, 15 bp, Homo sapiens
gccccctcctccagc

SEQ ID NO: 26787 - DNA, 15 bp, Homo sapiens
cgccccctcctccag

SEQ ID NO: 26788 - DNA, 15 bp, Homo sapiens
ccgccccctcctcca

SEQ ID NO: 26789 - DNA, 15 bp, Homo sapiens
cccgccccctcctcc

SEQ ID NO: 26790 - DNA, 15 bp, Homo sapiens
ccccgccccctcctc

SEQ ID NO: 26791 - DNA, 15 bp, Homo sapiens
accccgccccctcct

SEQ ID NO: 26792 - DNA, 15 bp, Homo sapiens
caccccgccccctcc

SEQ ID NO: 26793 - DNA, 15 bp, Homo sapiens
ccaccccgccccctc

SEQ ID NO: 26794 - DNA, 15 bp, Homo sapiens
tccaccccgccccct

SEQ ID NO: 26795 - DNA, 15 bp, Homo sapiens
ttccaccccgccccc

SEQ ID NO: 26796 - DNA, 15 bp, Homo sapiens
cttccaccccgcccc

SEQ ID NO: 26797 - DNA, 15 bp, Homo sapiens
tcttccaccccgccc

SEQ ID NO: 26798 - DNA, 15 bp, Homo sapiens
ttcttccaccccgcc

SEQ ID NO: 26799 - DNA, 15 bp, Homo sapiens
cttcttccaccccgc

SEQ ID NO: 26800 - DNA, 15 bp, Homo sapiens
ccttcttccaccccg

SEQ ID NO: 26801 - DNA, 15 bp, Homo sapiens
cccttcttccacccc

SEQ ID NO: 26802 - DNA, 15 bp, Homo sapiens
ccccttcttccaccc

SEQ ID NO: 26803 - DNA, 15 bp, Homo sapiens
cccccttcttccacc

SEQ ID NO: 26804 - DNA, 15 bp, Homo sapiens
ccccccttcttccac

SEQ ID NO: 26805 - DNA, 15 bp, Homo sapiens
gccccccttcttcca

SEQ ID NO: 26806 - DNA, 15 bp, Homo sapiens
cgccccccttcttcc

SEQ ID NO: 26807 - DNA, 15 bp, Homo sapiens
ccgccccccttcttc

SEQ ID NO: 26808 - DNA, 15 bp, Homo sapiens
cccgccccccttctt

SEQ ID NO: 26809 - DNA, 15 bp, Homo sapiens
tcccgccccccttct

SEQ ID NO: 26810 - DNA, 15 bp, Homo sapiens
ttcccgccccccttc

SEQ ID NO: 26811 - DNA, 15 bp, Homo sapiens
cttcccgcccccctt

SEQ ID NO: 26812 - DNA, 15 bp, Homo sapiens
ccttcccgcccccct

SEQ ID NO: 26813 - DNA, 15 bp, Homo sapiens
tccttcccgcccccc

SEQ ID NO: 26814 - DNA, 15 bp, Homo sapiens
ctccttcccgccccc

SEQ ID NO: 26815 - DNA, 15 bp, Homo sapiens
cctccttcccgcccc

SEQ ID NO: 26816 - DNA, 15 bp, Homo sapiens
ccctccttcccgccc

SEQ ID NO: 26817 - DNA, 15 bp, Homo sapiens
tccctccttcccgcc

SEQ ID NO: 26818 - DNA, 15 bp, Homo sapiens
ctccctccttcccgc

SEQ ID NO: 26819 - DNA, 15 bp, Homo sapiens
cctccctccttcccg

SEQ ID NO: 26820 - DNA, 15 bp, Homo sapiens
ccctccctccttccc

SEQ ID NO: 26821 - DNA, 15 bp, Homo sapiens
tccctccctccttcc

SEQ ID NO: 26822 - DNA, 15 bp, Homo sapiens
ctccctccctccttc

SEQ ID NO: 26823 - DNA, 15 bp, Homo sapiens
cctccctccctcctt

SEQ ID NO: 26824 - DNA, 15 bp, Homo sapiens
ccctccctccctcct

SEQ ID NO: 26825 - DNA, 15 bp, Homo sapiens
cccctccctccctcc

SEQ ID NO: 26826 - DNA, 15 bp, Homo sapiens
ccccctccctccctc

SEQ ID NO: 26827 - DNA, 15 bp, Homo sapiens
tccccctccctccct

SEQ ID NO: 26828 - DNA, 15 bp, Homo sapiens
ttccccctccctccc

SEQ ID NO: 26829 - DNA, 15 bp, Homo sapiens
tttccccctccctcc

SEQ ID NO: 26830 - DNA, 15 bp, Homo sapiens
ctttccccctccctc

SEQ ID NO: 26831 - DNA, 15 bp, Homo sapiens
tctttccccctccct

SEQ ID NO: 26832 - DNA, 15 bp, Homo sapiens
ctctttccccctccc

SEQ ID NO: 26833 - DNA, 15 bp, Homo sapiens
tctctttccccctcc

SEQ ID NO: 26834 - DNA, 15 bp, Homo sapiens
ctctctttccccctc

SEQ ID NO: 26835 - DNA, 15 bp, Homo sapiens
cctctctttccccct

SEQ ID NO: 26836 - DNA, 15 bp, Homo sapiens
ccctctctttccccc

SEQ ID NO: 26837 - DNA, 15 bp, Homo sapiens
tccctctctttcccc

SEQ ID NO: 26838 - DNA, 15 bp, Homo sapiens
ctccctctctttccc

SEQ ID NO: 26839 - DNA, 15 bp, Homo sapiens
cctccctctctttcc

SEQ ID NO: 26840 - DNA, 15 bp, Homo sapiens
ccctccctctctttc

SEQ ID NO: 26841 - DNA, 15 bp, Homo sapiens
tccctccctctcttt

SEQ ID NO: 26842 - DNA, 15 bp, Homo sapiens
ctccctccctctctt

SEQ ID NO: 26843 - DNA, 15 bp, Homo sapiens
cctccctccctctct

SEQ ID NO: 26844 - DNA, 15 bp, Homo sapiens
ccctccctccctctc

SEQ ID NO: 26845 - DNA, 15 bp, Homo sapiens
tccctccctccctct

SEQ ID NO: 26846 - DNA, 15 bp, Homo sapiens
atccctccctccctc

SEQ ID NO: 26847 - DNA, 15 bp, Homo sapiens
tatccctccctccct

SEQ ID NO: 26848 - DNA, 15 bp, Homo sapiens
gtatccctccctccc

SEQ ID NO: 26849 - DNA, 15 bp, Homo sapiens
tgtatccctccctcc

SEQ ID NO: 26850 - DNA, 15 bp, Homo sapiens
ctgtatccctccctc

SEQ ID NO: 26851 - DNA, 15 bp, Homo sapiens
tctgtatccctccct

SEQ ID NO: 26852 - DNA, 15 bp, Homo sapiens
ctctgtatccctccc

SEQ ID NO: 26853 - DNA, 15 bp, Homo sapiens
tctctgtatccctcc

SEQ ID NO: 26854 - DNA, 15 bp, Homo sapiens
ctctctgtatccctc

SEQ ID NO: 26855 - DNA, 15 bp, Homo sapiens
tctctctgtatccct

SEQ ID NO: 26856 - DNA, 15 bp, Homo sapiens
ttctctctgtatccc

SEQ ID NO: 26857 - DNA, 15 bp, Homo sapiens
attctctctgtatcc

SEQ ID NO: 26858 - DNA, 15 bp, Homo sapiens
cattctctctgtatc

SEQ ID NO: 26859 - DNA, 15 bp, Homo sapiens
tcattctctctgtat

SEQ ID NO: 26860 - DNA, 15 bp, Homo sapiens
ttcattctctctgta

SEQ ID NO: 26861 - DNA, 15 bp, Homo sapiens
attcattctctctgt

SEQ ID NO: 26862 - DNA, 15 bp, Homo sapiens
gattcattctctctg

SEQ ID NO: 26863 - DNA, 15 bp, Homo sapiens
ggattcattctctct

SEQ ID NO: 26864 - DNA, 15 bp, Homo sapiens
aggattcattctctc

SEQ ID NO: 26865 - DNA, 15 bp, Homo sapiens
aaggattcattctct

SEQ ID NO: 26866 - DNA, 15 bp, Homo sapiens
gaaggattcattctc

SEQ ID NO: 26867 - DNA, 15 bp, Homo sapiens
agaaggattcattct

SEQ ID NO: 26868 - DNA, 15 bp, Homo sapiens
gagaaggattcattc

SEQ ID NO: 26869 - DNA, 15 bp, Homo sapiens
tgagaaggattcatt

SEQ ID NO: 26870 - DNA, 15 bp, Homo sapiens
gtgagaaggattcat

SEQ ID NO: 26871 - DNA, 15 bp, Homo sapiens
agtgagaaggattca

SEQ ID NO: 26872 - DNA, 15 bp, Homo sapiens
tagtgagaaggattc

SEQ ID NO: 26873 - DNA, 15 bp, Homo sapiens
ctagtgagaaggatt

SEQ ID NO: 26874 - DNA, 15 bp, Homo sapiens
tctagtgagaaggat

SEQ ID NO: 26875 - DNA, 15 bp, Homo sapiens
ttctagtgagaagga

SEQ ID NO: 26876 - DNA, 15 bp, Homo sapiens
cttctagtgagaagg

SEQ ID NO: 26877 - DNA, 15 bp, Homo sapiens
tcttctagtgagaag

SEQ ID NO: 26878 - DNA, 15 bp, Homo sapiens
ctcttctagtgagaa

SEQ ID NO: 26879 - DNA, 15 bp, Homo sapiens
gctcttctagtgaga

SEQ ID NO: 26880 - DNA, 15 bp, Homo sapiens
agctcttctagtgag

SEQ ID NO: 26881 - DNA, 15 bp, Homo sapiens
cagctcttctagtga

SEQ ID NO: 26882 - DNA, 15 bp, Homo sapiens
tcagctcttctagtg

SEQ ID NO: 26883 - DNA, 15 bp, Homo sapiens
ttcagctcttctagt

SEQ ID NO: 26884 - DNA, 15 bp, Homo sapiens
tttcagctcttctag

SEQ ID NO: 26885 - DNA, 15 bp, Homo sapiens
atttcagctcttcta

SEQ ID NO: 26886 - DNA, 15 bp, Homo sapiens
aatttcagctcttct

SEQ ID NO: 26887 - DNA, 15 bp, Homo sapiens
taatttcagctcttc

SEQ ID NO: 26888 - DNA, 15 bp, Homo sapiens
gtaatttcagctctt

SEQ ID NO: 26889 - DNA, 15 bp, Homo sapiens
ggtaatttcagctct

SEQ ID NO: 26890 - DNA, 15 bp, Homo sapiens
aggtaatttcagctc

SEQ ID NO: 26891 - DNA, 15 bp, Homo sapiens
aaggtaatttcagct

SEQ ID NO: 26892 - DNA, 15 bp, Homo sapiens
caaggtaatttcagc

SEQ ID NO: 26893 - DNA, 15 bp, Homo sapiens
tcaaggtaatttcag

SEQ ID NO: 26894 - DNA, 15 bp, Homo sapiens
atcaaggtaatttca

SEQ ID NO: 26895 - DNA, 15 bp, Homo sapiens
aatcaaggtaatttc

SEQ ID NO: 26896 - DNA, 15 bp, Homo sapiens
gaatcaaggtaattt

SEQ ID NO: 26897 - DNA, 15 bp, Homo sapiens
tgaatcaaggtaatt

SEQ ID NO: 26898 - DNA, 15 bp, Homo sapiens
atgaatcaaggtaat

SEQ ID NO: 26899 - DNA, 15 bp, Homo sapiens
aatgaatcaaggtaa

SEQ ID NO: 26900 - DNA, 15 bp, Homo sapiens
aaatgaatcaaggta

SEQ ID NO: 26901 - DNA, 15 bp, Homo sapiens
aaaatgaatcaaggt

SEQ ID NO: 26902 - DNA, 15 bp, Homo sapiens
aaaaatgaatcaagg

SEQ ID NO: 26903 - DNA, 15 bp, Homo sapiens
aaaaaatgaatcaag

SEQ ID NO: 26904 - DNA, 15 bp, Homo sapiens
aaaaaaatgaatcaa

SEQ ID NO: 26905 - DNA, 15 bp, Homo sapiens
caaaaaaatgaatca

SEQ ID NO: 26906 - DNA, 15 bp, Homo sapiens
acaaaaaaatgaatc

SEQ ID NO: 26907 - DNA, 15 bp, Homo sapiens
cacaaaaaaatgaat

SEQ ID NO: 26908 - DNA, 15 bp, Homo sapiens
acacaaaaaaatgaa

SEQ ID NO: 26909 - DNA, 15 bp, Homo sapiens
aacacaaaaaaatga

SEQ ID NO: 26910 - DNA, 15 bp, Homo sapiens
caacacaaaaaaatg

SEQ ID NO: 26911 - DNA, 15 bp, Homo sapiens
ccaacacaaaaaaat

SEQ ID NO: 26912 - DNA, 15 bp, Homo sapiens
tccaacacaaaaaaa

SEQ ID NO: 26913 - DNA, 15 bp, Homo sapiens
ctccaacacaaaaaa

SEQ ID NO: 26914 - DNA, 15 bp, Homo sapiens
cctccaacacaaaaa

SEQ ID NO: 26915 - DNA, 15 bp, Homo sapiens
acctccaacacaaaa

SEQ ID NO: 26916 - DNA, 15 bp, Homo sapiens
aacctccaacacaaa

SEQ ID NO: 26917 - DNA, 15 bp, Homo sapiens
aaacctccaacacaa

SEQ ID NO: 26918 - DNA, 15 bp, Homo sapiens
taaacctccaacaca

SEQ ID NO: 26919 - DNA, 15 bp, Homo sapiens
ctaaacctccaacac

SEQ ID NO: 26920 - DNA, 15 bp, Homo sapiens
gctaaacctccaaca

SEQ ID NO: 26921 - DNA, 15 bp, Homo sapiens
agctaaacctccaac

SEQ ID NO: 26922 - DNA, 15 bp, Homo sapiens
aagctaaacctccaa

SEQ ID NO: 26923 - DNA, 15 bp, Homo sapiens
aaagctaaacctcca

SEQ ID NO: 26924 - DNA, 15 bp, Homo sapiens
taaagctaaacctcc

SEQ ID NO: 26925 - DNA, 15 bp, Homo sapiens
gtaaagctaaacctc

SEQ ID NO: 26926 - DNA, 15 bp, Homo sapiens
ggtaaagctaaacct

SEQ ID NO: 26927 - DNA, 15 bp, Homo sapiens
aggtaaagctaaacc

SEQ ID NO: 26928 - DNA, 15 bp, Homo sapiens
gaggtaaagctaaac

SEQ ID NO: 26929 - DNA, 15 bp, Homo sapiens
ggaggtaaagctaaa

SEQ ID NO: 26930 - DNA, 15 bp, Homo sapiens
aggaggtaaagctaa

SEQ ID NO: 26931 - DNA, 15 bp, Homo sapiens
aaggaggtaaagcta

SEQ ID NO: 26932 - DNA, 15 bp, Homo sapiens
gaaggaggtaaagct

SEQ ID NO: 26933 - DNA, 15 bp, Homo sapiens
ggaaggaggtaaagc

SEQ ID NO: 26934 - DNA, 15 bp, Homo sapiens
gggaaggaggtaaag

SEQ ID NO: 26935 - DNA, 15 bp, Homo sapiens
agggaaggaggtaaa

SEQ ID NO: 26936 - DNA, 15 bp, Homo sapiens
gagggaaggaggtaa

SEQ ID NO: 26937 - DNA, 15 bp, Homo sapiens
agagggaaggaggta

SEQ ID NO: 26938 - DNA, 15 bp, Homo sapiens
aagagggaaggaggt

SEQ ID NO: 26939 - DNA, 15 bp, Homo sapiens
gaagagggaaggagg

SEQ ID NO: 26940 - DNA, 15 bp, Homo sapiens
ggaagagggaaggag

SEQ ID NO: 26941 - DNA, 15 bp, Homo sapiens
gggaagagggaagga

SEQ ID NO: 26942 - DNA, 15 bp, Homo sapiens
tgggaagagggaagg

SEQ ID NO: 26943 - DNA, 15 bp, Homo sapiens
ttgggaagagggaag

SEQ ID NO: 26944 - DNA, 15 bp, Homo sapiens
gttgggaagagggaa

SEQ ID NO: 26945 - DNA, 15 bp, Homo sapiens
ggttgggaagaggga

SEQ ID NO: 26946 - DNA, 15 bp, Homo sapiens
aggttgggaagaggg

SEQ ID NO: 26947 - DNA, 15 bp, Homo sapiens
gaggttgggaagagg

SEQ ID NO: 26948 - DNA, 15 bp, Homo sapiens
ggaggttgggaagag

SEQ ID NO: 26949 - DNA, 15 bp, Homo sapiens
tggaggttgggaaga

SEQ ID NO: 26950 - DNA, 15 bp, Homo sapiens
gtggaggttgggaag

SEQ ID NO: 26951 - DNA, 15 bp, Homo sapiens
ggtggaggttgggaa

SEQ ID NO: 26952 - DNA, 15 bp, Homo sapiens
aggtggaggttggga

SEQ ID NO: 26953 - DNA, 15 bp, Homo sapiens
gaggtggaggttggg

SEQ ID NO: 26954 - DNA, 15 bp, Homo sapiens
ggaggtggaggttgg

SEQ ID NO: 26955 - DNA, 15 bp, Homo sapiens
gaggaggtggaggtt

SEQ ID NO: 26956 - DNA, 15 bp, Homo sapiens
agaggaggtggaggt

SEQ ID NO: 26957 - DNA, 15 bp, Homo sapiens
gagaggaggtggagg

SEQ ID NO: 26958 - DNA, 15 bp, Homo sapiens
ggagaggaggtggag

SEQ ID NO: 26959 - DNA, 15 bp, Homo sapiens
gggagaggaggtgga

SEQ ID NO: 26960 - DNA, 15 bp, Homo sapiens
ggggagaggaggtgg

SEQ ID NO: 26961 - DNA, 15 bp, Homo sapiens
tggggagaggaggtg

SEQ ID NO: 26962 - DNA, 15 bp, Homo sapiens
gtggggagaggaggt

SEQ ID NO: 26963 - DNA, 15 bp, Homo sapiens
ggtggggagaggagg

SEQ ID NO: 26964 - DNA, 15 bp, Homo sapiens
cggtggggagaggag

SEQ ID NO: 26965 - DNA, 15 bp, Homo sapiens
gcggtggggagagga

SEQ ID NO: 26966 - DNA, 15 bp, Homo sapiens
tgcggtggggagagg

SEQ ID NO: 26967 - DNA, 15 bp, Homo sapiens
gtgcggtggggagag

SEQ ID NO: 26968 - DNA, 15 bp, Homo sapiens
tgtgcggtggggaga

SEQ ID NO: 26969 - DNA, 15 bp, Homo sapiens
gtgtgcggtggggag

SEQ ID NO: 26970 - DNA, 15 bp, Homo sapiens
ggtgtgcggtgggga

SEQ ID NO: 26971 - DNA, 15 bp, Homo sapiens
tggtgtgcggtgggg

SEQ ID NO: 26972 - DNA, 15 bp, Homo sapiens
gtggtgtgcggtggg

SEQ ID NO: 26973 - DNA, 15 bp, Homo sapiens
ggtggtgtgcggtgg

SEQ ID NO: 26974 - DNA, 15 bp, Homo sapiens
aggtggtgtgcggtg

SEQ ID NO: 26975 - DNA, 15 bp, Homo sapiens
gaggtggtgtgcggt

SEQ ID NO: 26976 - DNA, 15 bp, Homo sapiens
ggaggtggtgtgcgg

SEQ ID NO: 26977 - DNA, 15 bp, Homo sapiens
tggaggtggtgtgcg

SEQ ID NO: 26978 - DNA, 15 bp, Homo sapiens
gtggaggtggtgtgc

SEQ ID NO: 26979 - DNA, 15 bp, Homo sapiens
ggtggaggtggtgtg

SEQ ID NO: 26980 - DNA, 15 bp, Homo sapiens
cggtggaggtggtgt

SEQ ID NO: 26981 - DNA, 15 bp, Homo sapiens
gcggtggaggtggtg

SEQ ID NO: 26982 - DNA, 15 bp, Homo sapiens
ggcggtggaggtggt

SEQ ID NO: 26983 - DNA, 15 bp, Homo sapiens
aggcggtggaggtgg

SEQ ID NO: 26984 - DNA, 15 bp, Homo sapiens
caggcggtggaggtg

SEQ ID NO: 26985 - DNA, 15 bp, Homo sapiens
tcaggcggtggaggt

SEQ ID NO: 26986 - DNA, 15 bp, Homo sapiens
atcaggcggtggagg

SEQ ID NO: 26987 - DNA, 15 bp, Homo sapiens
aatcaggcggtggag

SEQ ID NO: 26988 - DNA, 15 bp, Homo sapiens
gaatcaggcggtgga

SEQ ID NO: 26989 - DNA, 15 bp, Homo sapiens
agaatcaggcggtgg

SEQ ID NO: 26990 - DNA, 15 bp, Homo sapiens
tagaatcaggcggtg

SEQ ID NO: 26991 - DNA, 15 bp, Homo sapiens
ttagaatcaggcggt

SEQ ID NO: 26992 - DNA, 15 bp, Homo sapiens
tttagaatcaggcgg

SEQ ID NO: 26993 - DNA, 15 bp, Homo sapiens
atttagaatcaggcg

SEQ ID NO: 26994 - DNA, 15 bp, Homo sapiens
catttagaatcaggc

SEQ ID NO: 26995 - DNA, 15 bp, Homo sapiens
gcatttagaatcagg

SEQ ID NO: 26996 - DNA, 15 bp, Homo sapiens
agcatttagaatcag

SEQ ID NO: 26997 - DNA, 15 bp, Homo sapiens
tagcatttagaatca

SEQ ID NO: 26998 - DNA, 15 bp, Homo sapiens
gtagcatttagaatc

SEQ ID NO: 26999 - DNA, 15 bp, Homo sapiens
tgtagcatttagaat

SEQ ID NO: 27000 - DNA, 15 bp, Homo sapiens
ttgtagcatttagaa

SEQ ID NO: 27001 - DNA, 15 bp, Homo sapiens
tttgtagcatttaga

SEQ ID NO: 27002 - DNA, 15 bp, Homo sapiens
ctttgtagcatttag

SEQ ID NO: 27003 - DNA, 15 bp, Homo sapiens
actttgtagcattta

SEQ ID NO: 27004 - DNA, 15 bp, Homo sapiens
gactttgtagcattt

SEQ ID NO: 27005 - DNA, 15 bp, Homo sapiens
tgactttgtagcatt

SEQ ID NO: 27006 - DNA, 15 bp, Homo sapiens
ttgactttgtagcat

SEQ ID NO: 27007 - DNA, 15 bp, Homo sapiens
tttgactttgtagca

SEQ ID NO: 27008 - DNA, 15 bp, Homo sapiens
atttgactttgtagc

SEQ ID NO: 27009 - DNA, 15 bp, Homo sapiens
aatttgactttgtag

SEQ ID NO: 27010 - DNA, 15 bp, Homo sapiens
aaatttgactttgta

SEQ ID NO: 27011 - DNA, 15 bp, Homo sapiens
aaaatttgactttgt

SEQ ID NO: 27012 - DNA, 15 bp, Homo sapiens
taaaatttgactttg

SEQ ID NO: 27013 - DNA, 15 bp, Homo sapiens
ctaaaatttgacttt

SEQ ID NO: 27014 - DNA, 15 bp, Homo sapiens
cctaaaatttgactt

SEQ ID NO: 27015 - DNA, 15 bp, Homo sapiens
tcctaaaatttgact

SEQ ID NO: 27016 - DNA, 15 bp, Homo sapiens
ttcctaaaatttgac

SEQ ID NO: 27017 - DNA, 15 bp, Homo sapiens
attcctaaaatttga

SEQ ID NO: 27018 - DNA, 15 bp, Homo sapiens
aattcctaaaatttg

SEQ ID NO: 27019 - DNA, 15 bp, Homo sapiens
gaattcctaaaattt

SEQ ID NO: 27020 - DNA, 15 bp, Homo sapiens
cgaattcctaaaatt

SEQ ID NO: 27021 - DNA, 15 bp, Homo sapiens
tcgaattcctaaaat

SEQ ID NO: 27022 - DNA, 15 bp, Homo sapiens
ttcgaattcctaaaa

SEQ ID NO: 27023 - DNA, 15 bp, Homo sapiens
attcgaattcctaaa

SEQ ID NO: 27024 - DNA, 15 bp, Homo sapiens
cattcgaattcctaa

SEQ ID NO: 27025 - DNA, 15 bp, Homo sapiens
acattcgaattccta

SEQ ID NO: 27026 - DNA, 15 bp, Homo sapiens
aacattcgaattcct

SEQ ID NO: 27027 - DNA, 15 bp, Homo sapiens
aaacattcgaattcc

SEQ ID NO: 27028 - DNA, 15 bp, Homo sapiens
aaaacattcgaattc

SEQ ID NO: 27029 - DNA, 15 bp, Homo sapiens
caaaacattcgaatt

SEQ ID NO: 27030 - DNA, 15 bp, Homo sapiens
gcaaaacattcgaat

SEQ ID NO: 27031 - DNA, 15 bp, Homo sapiens
tgcaaaacattcgaa

SEQ ID NO: 27032 - DNA, 15 bp, Homo sapiens
ttgcaaaacattcga

SEQ ID NO: 27033 - DNA, 15 bp, Homo sapiens
tttgcaaaacattcg

SEQ ID NO: 27034 - DNA, 15 bp, Homo sapiens
ttttgcaaaacattc

SEQ ID NO: 27035 - DNA, 15 bp, Homo sapiens
cttttgcaaaacatt

SEQ ID NO: 27036 - DNA, 15 bp, Homo sapiens
gcttttgcaaaacat

SEQ ID NO: 27037 - DNA, 15 bp, Homo sapiens
agcttttgcaaaaca

SEQ ID NO: 27038 - DNA, 15 bp, Homo sapiens
aagcttttgcaaaac

SEQ ID NO: 27039 - DNA, 15 bp, Homo sapiens
gaagcttttgcaaaa

SEQ ID NO: 27040 - DNA, 15 bp, Homo sapiens
tgaagcttttgcaaa

SEQ ID NO: 27041 - DNA, 15 bp, Homo sapiens
atgaagcttttgcaa

SEQ ID NO: 27042 - DNA, 15 bp, Homo sapiens
tatgaagcttttgca

SEQ ID NO: 27043 - DNA, 15 bp, Homo sapiens
ttatgaagcttttgc

SEQ ID NO: 27044 - DNA, 15 bp, Homo sapiens
attatgaagcttttg

SEQ ID NO: 27045 - DNA, 15 bp, Homo sapiens
aattatgaagctttt

SEQ ID NO: 27046 - DNA, 15 bp, Homo sapiens
taattatgaagcttt

SEQ ID NO: 27047 - DNA, 15 bp, Homo sapiens
ctaattatgaagctt

SEQ ID NO: 27048 - DNA, 15 bp, Homo sapiens
actaattatgaagct

SEQ ID NO: 27049 - DNA, 15 bp, Homo sapiens
tactaattatgaagc

SEQ ID NO: 27050 - DNA, 15 bp, Homo sapiens
ttactaattatgaag

SEQ ID NO: 27051 - DNA, 15 bp, Homo sapiens
attactaattatgaa

SEQ ID NO: 27052 - DNA, 15 bp, Homo sapiens
cattactaattatga

SEQ ID NO: 27053 - DNA, 15 bp, Homo sapiens
tcattactaattatg

SEQ ID NO: 27054 - DNA, 15 bp, Homo sapiens
ttcattactaattat

SEQ ID NO: 27055 - DNA, 15 bp, Homo sapiens
attcattactaatta

SEQ ID NO: 27056 - DNA, 15 bp, Homo sapiens
gattcattactaatt

SEQ ID NO: 27057 - DNA, 15 bp, Homo sapiens
agattcattactaat

SEQ ID NO: 27058 - DNA, 15 bp, Homo sapiens
tagattcattactaa

SEQ ID NO: 27059 - DNA, 15 bp, Homo sapiens
gtagattcattacta

SEQ ID NO: 27060 - DNA, 15 bp, Homo sapiens
agtagattcattact

SEQ ID NO: 27061 - DNA, 15 bp, Homo sapiens
cagtagattcattac

SEQ ID NO: 27062 - DNA, 15 bp, Homo sapiens
acagtagattcatta

SEQ ID NO: 27063 - DNA, 15 bp, Homo sapiens
tacagtagattcatt

SEQ ID NO: 27064 - DNA, 15 bp, Homo sapiens
gtacagtagattcat

SEQ ID NO: 27065 - DNA, 15 bp, Homo sapiens
tgtacagtagattca

SEQ ID NO: 27066 - DNA, 15 bp, Homo sapiens
gtgtacagtagattc

SEQ ID NO: 27067 - DNA, 15 bp, Homo sapiens
tgtgtacagtagatt

SEQ ID NO: 27068 - DNA, 15 bp, Homo sapiens
gtgtgtacagtagat

SEQ ID NO: 27069 - DNA, 15 bp, Homo sapiens
tgtgtgtacagtaga

SEQ ID NO: 27070 - DNA, 15 bp, Homo sapiens
gtgtgtgtacagtag

SEQ ID NO: 27071 - DNA, 15 bp, Homo sapiens
tgtgtgtgtacagta

SEQ ID NO: 27072 - DNA, 15 bp, Homo sapiens
gtgtgtgtgtacagt

SEQ ID NO: 27073 - DNA, 15 bp, Homo sapiens
tgtgtgtgtgtacag

SEQ ID NO: 27074 - DNA, 15 bp, Homo sapiens
gtgtgtgtgtgtaca

SEQ ID NO: 27075 - DNA, 15 bp, Homo sapiens
tgtgtgtgtgtgtac

SEQ ID NO: 27076 - DNA, 15 bp, Homo sapiens
ggtgtgtgtgtgtgt

SEQ ID NO: 27077 - DNA, 15 bp, Homo sapiens
tggtgtgtgtgtgtg

SEQ ID NO: 27078 - DNA, 15 bp, Homo sapiens
ctggtgtgtgtgtgt

SEQ ID NO: 27079 - DNA, 15 bp, Homo sapiens
gctggtgtgtgtgtg

SEQ ID NO: 27080 - DNA, 15 bp, Homo sapiens
tgctggtgtgtgtgt

SEQ ID NO: 27081 - DNA, 15 bp, Homo sapiens
ttgctggtgtgtgtg

SEQ ID NO: 27082 - DNA, 15 bp, Homo sapiens
tttgctggtgtgtgt

SEQ ID NO: 27083 - DNA, 15 bp, Homo sapiens
ctttgctggtgtgtg

SEQ ID NO: 27084 - DNA, 15 bp, Homo sapiens
tctttgctggtgtgt

SEQ ID NO: 27085 - DNA, 15 bp, Homo sapiens
ctctttgctggtgtg

SEQ ID NO: 27086 - DNA, 15 bp, Homo sapiens
tctctttgctggtgt

SEQ ID NO: 27087 - DNA, 15 bp, Homo sapiens
ttctctttgctggtg

SEQ ID NO: 27088 - DNA, 15 bp, Homo sapiens
gttctctttgctggt

SEQ ID NO: 27089 - DNA, 15 bp, Homo sapiens
cgttctctttgctgg

SEQ ID NO: 27090 - DNA, 15 bp, Homo sapiens
ccgttctctttgctg

SEQ ID NO: 27091 - DNA, 15 bp, Homo sapiens
tccgttctctttgct

SEQ ID NO: 27092 - DNA, 15 bp, Homo sapiens
ttccgttctctttgc

SEQ ID NO: 27093 - DNA, 15 bp, Homo sapiens
tttccgttctctttg

SEQ ID NO: 27094 - DNA, 15 bp, Homo sapiens
ttttccgttctcttt

SEQ ID NO: 27095 - DNA, 15 bp, Homo sapiens
cttttccgttctctt

SEQ ID NO: 27096 - DNA, 15 bp, Homo sapiens
tcttttccgttctct

SEQ ID NO: 27097 - DNA, 15 bp, Homo sapiens
ctcttttccgttctc

SEQ ID NO: 27098 - DNA, 15 bp, Homo sapiens
cctcttttccgttct

SEQ ID NO: 27099 - DNA, 15 bp, Homo sapiens
ccctcttttccgttc

SEQ ID NO: 27100 - DNA, 15 bp, Homo sapiens
tccctcttttccgtt

SEQ ID NO: 27101 - DNA, 15 bp, Homo sapiens
ctccctcttttccgt

SEQ ID NO: 27102 - DNA, 15 bp, Homo sapiens
cctccctcttttccg

SEQ ID NO: 27103 - DNA, 15 bp, Homo sapiens
acctccctcttttcc

SEQ ID NO: 27104 - DNA, 15 bp, Homo sapiens
cacctccctcttttc

SEQ ID NO: 27105 - DNA, 15 bp, Homo sapiens
tcacctccctctttt

SEQ ID NO: 27106 - DNA, 15 bp, Homo sapiens
ttcacctccctcttt

SEQ ID NO: 27107 - DNA, 15 bp, Homo sapiens
cttcacctccctctt

SEQ ID NO: 27108 - DNA, 15 bp, Homo sapiens
tcttcacctccctct

SEQ ID NO: 27109 - DNA, 15 bp, Homo sapiens
ctcttcacctccctc

SEQ ID NO: 27110 - DNA, 15 bp, Homo sapiens
cctcttcacctccct

SEQ ID NO: 27111 - DNA, 15 bp, Homo sapiens
tcctcttcacctccc

SEQ ID NO: 27112 - DNA, 15 bp, Homo sapiens
ctcctcttcacctcc

SEQ ID NO: 27113 - DNA, 15 bp, Homo sapiens
tctcctcttcacctc

SEQ ID NO: 27114 - DNA, 15 bp, Homo sapiens
ttctcctcttcacct

SEQ ID NO: 27115 - DNA, 15 bp, Homo sapiens
tttctcctcttcacc

SEQ ID NO: 27116 - DNA, 15 bp, Homo sapiens
ttttctcctcttcac

SEQ ID NO: 27117 - DNA, 15 bp, Homo sapiens
tttttctcctcttca

SEQ ID NO: 27118 - DNA, 15 bp, Homo sapiens
ctttttctcctcttc

SEQ ID NO: 27119 - DNA, 15 bp, Homo sapiens
tctttttctcctctt

SEQ ID NO: 27120 - DNA, 15 bp, Homo sapiens
ctctttttctcctct

SEQ ID NO: 27121 - DNA, 15 bp, Homo sapiens
tctctttttctcctc

SEQ ID NO: 27122 - DNA, 15 bp, Homo sapiens
ctctctttttctcct

SEQ ID NO: 27123 - DNA, 15 bp, Homo sapiens
tctctctttttctcc

SEQ ID NO: 27124 - DNA, 15 bp, Homo sapiens
atctctctttttctc

SEQ ID NO: 27125 - DNA, 15 bp, Homo sapiens
tatctctctttttct

SEQ ID NO: 27126 - DNA, 15 bp, Homo sapiens
ttatctctctttttc

SEQ ID NO: 27127 - DNA, 15 bp, Homo sapiens
tttatctctcttttt

SEQ ID NO: 27128 - DNA, 15 bp, Homo sapiens
atttatctctctttt

SEQ ID NO: 27129 - DNA, 15 bp, Homo sapiens
gatttatctctcttt

SEQ ID NO: 27130 - DNA, 15 bp, Homo sapiens
agatttatctctctt

SEQ ID NO: 27131 - DNA, 15 bp, Homo sapiens
aagatttatctctct

SEQ ID NO: 27132 - DNA, 15 bp, Homo sapiens
taagatttatctctc

SEQ ID NO: 27133 - DNA, 15 bp, Homo sapiens
gtaagatttatctct

SEQ ID NO: 27134 - DNA, 15 bp, Homo sapiens
tgtaagatttatctc

SEQ ID NO: 27135 - DNA, 15 bp, Homo sapiens
atgtaagatttatct

SEQ ID NO: 27136 - DNA, 15 bp, Homo sapiens
aatgtaagatttatc

SEQ ID NO: 27137 - DNA, 15 bp, Homo sapiens
aaatgtaagatttat

SEQ ID NO: 27138 - DNA, 15 bp, Homo sapiens
caaatgtaagattta

SEQ ID NO: 27139 - DNA, 15 bp, Homo sapiens
tcaaatgtaagattt

SEQ ID NO: 27140 - DNA, 15 bp, Homo sapiens
ttcaaatgtaagatt

SEQ ID NO: 27141 - DNA, 15 bp, Homo sapiens
attcaaatgtaagat

SEQ ID NO: 27142 - DNA, 15 bp, Homo sapiens
gattcaaatgtaaga

SEQ ID NO: 27143 - DNA, 15 bp, Homo sapiens
tgattcaaatgtaag

SEQ ID NO: 27144 - DNA, 15 bp, Homo sapiens
ctgattcaaatgtaa

SEQ ID NO: 27145 - DNA, 15 bp, Homo sapiens
tctgattcaaatgta

SEQ ID NO: 27146 - DNA, 15 bp, Homo sapiens
gtctgattcaaatgt

SEQ ID NO: 27147 - DNA, 15 bp, Homo sapiens
tgtctgattcaaatg

SEQ ID NO: 27148 - DNA, 15 bp, Homo sapiens
atgtctgattcaaat

SEQ ID NO: 27149 - DNA, 15 bp, Homo sapiens
aatgtctgattcaaa

SEQ ID NO: 27150 - DNA, 15 bp, Homo sapiens
aaatgtctgattcaa

SEQ ID NO: 27151 - DNA, 15 bp, Homo sapiens
caaatgtctgattca

SEQ ID NO: 27152 - DNA, 15 bp, Homo sapiens
gcaaatgtctgattc

SEQ ID NO: 27153 - DNA, 15 bp, Homo sapiens
tgcaaatgtctgatt

SEQ ID NO: 27154 - DNA, 15 bp, Homo sapiens
ctgcaaatgtctgat

SEQ ID NO: 27155 - DNA, 15 bp, Homo sapiens
cctgcaaatgtctga

SEQ ID NO: 27156 - DNA, 15 bp, Homo sapiens
acctgcaaatgtctg

SEQ ID NO: 27157 - DNA, 15 bp, Homo sapiens
gacctgcaaatgtct

SEQ ID NO: 27158 - DNA, 15 bp, Homo sapiens
ggacctgcaaatgtc

SEQ ID NO: 27159 - DNA, 15 bp, Homo sapiens
tggacctgcaaatgt

SEQ ID NO: 27160 - DNA, 15 bp, Homo sapiens
ttggacctgcaaatg

SEQ ID NO: 27161 - DNA, 15 bp, Homo sapiens
cttggacctgcaaat

SEQ ID NO: 27162 - DNA, 15 bp, Homo sapiens
acttggacctgcaaa

SEQ ID NO: 27163 - DNA, 15 bp, Homo sapiens
aacttggacctgcaa

SEQ ID NO: 27164 - DNA, 15 bp, Homo sapiens
taacttggacctgca

SEQ ID NO: 27165 - DNA, 15 bp, Homo sapiens
ttaacttggacctgc

SEQ ID NO: 27166 - DNA, 15 bp, Homo sapiens
gttaacttggacctg

SEQ ID NO: 27167 - DNA, 15 bp, Homo sapiens
agttaacttggacct

SEQ ID NO: 27168 - DNA, 15 bp, Homo sapiens
tagttaacttggacc

SEQ ID NO: 27169 - DNA, 15 bp, Homo sapiens
ttagttaacttggac

SEQ ID NO: 27170 - DNA, 15 bp, Homo sapiens
tttagttaacttgga

SEQ ID NO: 27171 - DNA, 15 bp, Homo sapiens
gtttagttaacttgg

SEQ ID NO: 27172 - DNA, 15 bp, Homo sapiens
agtttagttaacttg

SEQ ID NO: 27173 - DNA, 15 bp, Homo sapiens
gagtttagttaactt

SEQ ID NO: 27174 - DNA, 15 bp, Homo sapiens
tgagtttagttaact

SEQ ID NO: 27175 - DNA, 15 bp, Homo sapiens
atgagtttagttaac

SEQ ID NO: 27176 - DNA, 15 bp, Homo sapiens
aatgagtttagttaa

SEQ ID NO: 27177 - DNA, 15 bp, Homo sapiens
taatgagtttagtta

SEQ ID NO: 27178 - DNA, 15 bp, Homo sapiens
ataatgagtttagtt

SEQ ID NO: 27179 - DNA, 15 bp, Homo sapiens
tataatgagtttagt

SEQ ID NO: 27180 - DNA, 15 bp, Homo sapiens
atataatgagtttag

SEQ ID NO: 27181 - DNA, 15 bp, Homo sapiens
gatataatgagttta

SEQ ID NO: 27182 - DNA, 15 bp, Homo sapiens
ggatataatgagttt

SEQ ID NO: 27183 - DNA, 15 bp, Homo sapiens
cggatataatgagtt

SEQ ID NO: 27184 - DNA, 15 bp, Homo sapiens
gcggatataatgagt

SEQ ID NO: 27185 - DNA, 15 bp, Homo sapiens
tgcggatataatgag

SEQ ID NO: 27186 - DNA, 15 bp, Homo sapiens
ctgcggatataatga

SEQ ID NO: 27187 - DNA, 15 bp, Homo sapiens
cctgcggatataatg

SEQ ID NO: 27188 - DNA, 15 bp, Homo sapiens
tcctgcggatataat

SEQ ID NO: 27189 - DNA, 15 bp, Homo sapiens
ttcctgcggatataa

SEQ ID NO: 27190 - DNA, 15 bp, Homo sapiens
cttcctgcggatata

SEQ ID NO: 27191 - DNA, 15 bp, Homo sapiens
tcttcctgcggatat

SEQ ID NO: 27192 - DNA, 15 bp, Homo sapiens
gtcttcctgcggata

SEQ ID NO: 27193 - DNA, 15 bp, Homo sapiens
agtcttcctgcggat

SEQ ID NO: 27194 - DNA, 15 bp, Homo sapiens
cagtcttcctgcgga

SEQ ID NO: 27195 - DNA, 15 bp, Homo sapiens
tcagtcttcctgcgg

SEQ ID NO: 27196 - DNA, 15 bp, Homo sapiens
ctcagtcttcctgcg

SEQ ID NO: 27197 - DNA, 15 bp, Homo sapiens
actcagtcttcctgc

SEQ ID NO: 27198 - DNA, 15 bp, Homo sapiens
aactcagtcttcctg

SEQ ID NO: 27199 - DNA, 15 bp, Homo sapiens
aaactcagtcttcct

SEQ ID NO: 27200 - DNA, 15 bp, Homo sapiens
gaaactcagtcttcc

SEQ ID NO: 27201 - DNA, 15 bp, Homo sapiens
agaaactcagtcttc

SEQ ID NO: 27202 - DNA, 15 bp, Homo sapiens
aagaaactcagtctt

SEQ ID NO: 27203 - DNA, 15 bp, Homo sapiens
aaagaaactcagtct

SEQ ID NO: 27204 - DNA, 15 bp, Homo sapiens
aaaagaaactcagtc

SEQ ID NO: 27205 - DNA, 15 bp, Homo sapiens
aaaaagaaactcagt

SEQ ID NO: 27206 - DNA, 15 bp, Homo sapiens
aaaaaagaaactcag

SEQ ID NO: 27207 - DNA, 15 bp, Homo sapiens
aaaaaaagaaactca

SEQ ID NO: 27208 - DNA, 15 bp, Homo sapiens
aaaaaaaagaaactc

SEQ ID NO: 27209 - DNA, 15 bp, Homo sapiens
gaaaaaaaagaaact

SEQ ID NO: 27210 - DNA, 15 bp, Homo sapiens
agaaaaaaaagaaac

SEQ ID NO: 27211 - DNA, 15 bp, Homo sapiens
aagaaaaaaaagaaa

SEQ ID NO: 27212 - DNA, 15 bp, Homo sapiens
aaagaaaaaaaagaa

SEQ ID NO: 27213 - DNA, 15 bp, Homo sapiens
gaaagaaaaaaaaga

SEQ ID NO: 27214 - DNA, 15 bp, Homo sapiens
agaaagaaaaaaaag

SEQ ID NO: 27215 - DNA, 15 bp, Homo sapiens
gagaaagaaaaaaaa

SEQ ID NO: 27216 - DNA, 15 bp, Homo sapiens
ggagaaagaaaaaaa

SEQ ID NO: 27217 - DNA, 15 bp, Homo sapiens
gggagaaagaaaaaa

SEQ ID NO: 27218 - DNA, 15 bp, Homo sapiens
agggagaaagaaaaa

SEQ ID NO: 27219 - DNA, 15 bp, Homo sapiens
aagggagaaagaaaa

SEQ ID NO: 27220 - DNA, 15 bp, Homo sapiens
aaagggagaaagaaa

SEQ ID NO: 27221 - DNA, 15 bp, Homo sapiens
caaagggagaaagaa

SEQ ID NO: 27222 - DNA, 15 bp, Homo sapiens
gcaaagggagaaaga

SEQ ID NO: 27223 - DNA, 15 bp, Homo sapiens
ggcaaagggagaaag

SEQ ID NO: 27224 - DNA, 15 bp, Homo sapiens
gggcaaagggagaaa

SEQ ID NO: 27225 - DNA, 15 bp, Homo sapiens
ggggcaaagggagaa

SEQ ID NO: 27226 - DNA, 15 bp, Homo sapiens
tggggcaaagggaga

SEQ ID NO: 27227 - DNA, 15 bp, Homo sapiens
ctggggcaaagggag

SEQ ID NO: 27228 - DNA, 15 bp, Homo sapiens
cctggggcaaaggga

SEQ ID NO: 27229 - DNA, 15 bp, Homo sapiens
ccctggggcaaaggg

SEQ ID NO: 27230 - DNA, 15 bp, Homo sapiens
accctggggcaaagg

SEQ ID NO: 27231 - DNA, 15 bp, Homo sapiens
aaccctggggcaaag

SEQ ID NO: 27232 - DNA, 15 bp, Homo sapiens
gaaccctggggcaaa

SEQ ID NO: 27233 - DNA, 15 bp, Homo sapiens
agaaccctggggcaa

SEQ ID NO: 27234 - DNA, 15 bp, Homo sapiens
gagaaccctggggca

SEQ ID NO: 27235 - DNA, 15 bp, Homo sapiens
tgagaaccctggggc

SEQ ID NO: 27236 - DNA, 15 bp, Homo sapiens
gtgagaaccctgggg

SEQ ID NO: 27237 - DNA, 15 bp, Homo sapiens
ggtgagaaccctggg

SEQ ID NO: 27238 - DNA, 15 bp, Homo sapiens
aggtgagaaccctgg

SEQ ID NO: 27239 - DNA, 15 bp, Homo sapiens
taggtgagaaccctg

SEQ ID NO: 27240 - DNA, 15 bp, Homo sapiens
ctaggtgagaaccct

SEQ ID NO: 27241 - DNA, 15 bp, Homo sapiens
cctaggtgagaaccc

SEQ ID NO: 27242 - DNA, 15 bp, Homo sapiens
ccctaggtgagaacc

SEQ ID NO: 27243 - DNA, 15 bp, Homo sapiens
gccctaggtgagaac

SEQ ID NO: 27244 - DNA, 15 bp, Homo sapiens
tgccctaggtgagaa

SEQ ID NO: 27245 - DNA, 15 bp, Homo sapiens
ttgccctaggtgaga

SEQ ID NO: 27246 - DNA, 15 bp, Homo sapiens
attgccctaggtgag

SEQ ID NO: 27247 - DNA, 15 bp, Homo sapiens
aattgccctaggtga

SEQ ID NO: 27248 - DNA, 15 bp, Homo sapiens
gaattgccctaggtg

SEQ ID NO: 27249 - DNA, 15 bp, Homo sapiens
tgaattgccctaggt

SEQ ID NO: 27250 - DNA, 15 bp, Homo sapiens
ttgaattgccctagg

SEQ ID NO: 27251 - DNA, 15 bp, Homo sapiens
tttgaattgccctag

SEQ ID NO: 27252 - DNA, 15 bp, Homo sapiens
gtttgaattgcccta

SEQ ID NO: 27253 - DNA, 15 bp, Homo sapiens
agtttgaattgccct

SEQ ID NO: 27254 - DNA, 15 bp, Homo sapiens
cagtttgaattgccc

SEQ ID NO: 27255 - DNA, 15 bp, Homo sapiens
ccagtttgaattgcc

SEQ ID NO: 27256 - DNA, 15 bp, Homo sapiens
cccagtttgaattgc

SEQ ID NO: 27257 - DNA, 15 bp, Homo sapiens
gcccagtttgaattg

SEQ ID NO: 27258 - DNA, 15 bp, Homo sapiens
tgcccagtttgaatt

SEQ ID NO: 27259 - DNA, 15 bp, Homo sapiens
ttgcccagtttgaat

SEQ ID NO: 27260 - DNA, 15 bp, Homo sapiens
tttgcccagtttgaa

SEQ ID NO: 27261 - DNA, 15 bp, Homo sapiens
atttgcccagtttga

SEQ ID NO: 27262 - DNA, 15 bp, Homo sapiens
tatttgcccagtttg

SEQ ID NO: 27263 - DNA, 15 bp, Homo sapiens
gtatttgcccagttt

SEQ ID NO: 27264 - DNA, 15 bp, Homo sapiens
ggtatttgcccagtt

SEQ ID NO: 27265 - DNA, 15 bp, Homo sapiens
tggtatttgcccagt

SEQ ID NO: 27266 - DNA, 15 bp, Homo sapiens
ttggtatttgcccag

SEQ ID NO: 27267 - DNA, 15 bp, Homo sapiens
cttggtatttgccca

SEQ ID NO: 27268 - DNA, 15 bp, Homo sapiens
tcttggtatttgccc

SEQ ID NO: 27269 - DNA, 15 bp, Homo sapiens
ttcttggtatttgcc

SEQ ID NO: 27270 - DNA, 15 bp, Homo sapiens
tttcttggtatttgc

SEQ ID NO: 27271 - DNA, 15 bp, Homo sapiens
gtttcttggtatttg

SEQ ID NO: 27272 - DNA, 15 bp, Homo sapiens
tgtttcttggtattt

SEQ ID NO: 27273 - DNA, 15 bp, Homo sapiens
ttgtttcttggtatt

SEQ ID NO: 27274 - DNA, 15 bp, Homo sapiens
gttgtttcttggtat

SEQ ID NO: 27275 - DNA, 15 bp, Homo sapiens
ggttgtttcttggta

SEQ ID NO: 27276 - DNA, 15 bp, Homo sapiens
gggttgtttcttggt

SEQ ID NO: 27277 - DNA, 15 bp, Homo sapiens
ggggttgtttcttgg

SEQ ID NO: 27278 - DNA, 15 bp, Homo sapiens
gggggttgtttcttg

SEQ ID NO: 27279 - DNA, 15 bp, Homo sapiens
agggggttgtttctt

SEQ ID NO: 27280 - DNA, 15 bp, Homo sapiens
gagggggttgtttct

SEQ ID NO: 27281 - DNA, 15 bp, Homo sapiens
agagggggttgtttc

SEQ ID NO: 27282 - DNA, 15 bp, Homo sapiens
gagagggggttgttt

SEQ ID NO: 27283 - DNA, 15 bp, Homo sapiens
tgagagggggttgtt

SEQ ID NO: 27284 - DNA, 15 bp, Homo sapiens
atgagagggggttgt

SEQ ID NO: 27285 - DNA, 15 bp, Homo sapiens
catgagagggggttg

SEQ ID NO: 27286 - DNA, 15 bp, Homo sapiens
gcatgagagggggtt

SEQ ID NO: 27287 - DNA, 15 bp, Homo sapiens
agcatgagagggggt

SEQ ID NO: 27288 - DNA, 15 bp, Homo sapiens
gagcatgagaggggg

SEQ ID NO: 27289 - DNA, 15 bp, Homo sapiens
agagcatgagagggg

SEQ ID NO: 27290 - DNA, 15 bp, Homo sapiens
gagagcatgagaggg

SEQ ID NO: 27291 - DNA, 15 bp, Homo sapiens
ggagagcatgagagg

SEQ ID NO: 27292 - DNA, 15 bp, Homo sapiens
gggagagcatgagag

SEQ ID NO: 27293 - DNA, 15 bp, Homo sapiens
agggagagcatgaga

SEQ ID NO: 27294 - DNA, 15 bp, Homo sapiens
gagggagagcatgag

SEQ ID NO: 27295 - DNA, 15 bp, Homo sapiens
agagggagagcatga

SEQ ID NO: 27296 - DNA, 15 bp, Homo sapiens
tagagggagagcatg

SEQ ID NO: 27297 - DNA, 15 bp, Homo sapiens
gtagagggagagcat

SEQ ID NO: 27298 - DNA, 15 bp, Homo sapiens
ggtagagggagagca

SEQ ID NO: 27299 - DNA, 15 bp, Homo sapiens
aggtagagggagagc

SEQ ID NO: 27300 - DNA, 15 bp, Homo sapiens
gaggtagagggagag

SEQ ID NO: 27301 - DNA, 15 bp, Homo sapiens
ggaggtagagggaga

SEQ ID NO: 27302 - DNA, 15 bp, Homo sapiens
aggaggtagagggag

SEQ ID NO: 27303 - DNA, 15 bp, Homo sapiens
gaggaggtagaggga

SEQ ID NO: 27304 - DNA, 15 bp, Homo sapiens
ggaggaggtagaggg

SEQ ID NO: 27305 - DNA, 15 bp, Homo sapiens
gggaggaggtagagg

SEQ ID NO: 27306 - DNA, 15 bp, Homo sapiens
ggggaggaggtagag

SEQ ID NO: 27307 - DNA, 15 bp, Homo sapiens
aggggaggaggtaga

SEQ ID NO: 27308 - DNA, 15 bp, Homo sapiens
gaggggaggaggtag

SEQ ID NO: 27309 - DNA, 15 bp, Homo sapiens
ggaggggaggaggta

SEQ ID NO: 27310 - DNA, 15 bp, Homo sapiens
tggaggggaggaggt

SEQ ID NO: 27311 - DNA, 15 bp, Homo sapiens
gtggaggggaggagg

SEQ ID NO: 27312 - DNA, 15 bp, Homo sapiens
ggtggaggggaggag

SEQ ID NO: 27313 - DNA, 15 bp, Homo sapiens
tggtggaggggagga

SEQ ID NO: 27314 - DNA, 15 bp, Homo sapiens
gtggtggaggggagg

SEQ ID NO: 27315 - DNA, 15 bp, Homo sapiens
cgtggtggaggggag

SEQ ID NO: 27316 - DNA, 15 bp, Homo sapiens
gcgtggtggagggga

SEQ ID NO: 27317 - DNA, 15 bp, Homo sapiens
cgcgtggtggagggg

SEQ ID NO: 27318 - DNA, 15 bp, Homo sapiens
acgcgtggtggaggg

SEQ ID NO: 27319 - DNA, 15 bp, Homo sapiens
gacgcgtggtggagg

SEQ ID NO: 27320 - DNA, 15 bp, Homo sapiens
ggacgcgtggtggag

SEQ ID NO: 27321 - DNA, 15 bp, Homo sapiens
aggacgcgtggtgga

SEQ ID NO: 27322 - DNA, 15 bp, Homo sapiens
gaggacgcgtggtgg

SEQ ID NO: 27323 - DNA, 15 bp, Homo sapiens
agaggacgcgtggtg

SEQ ID NO: 27324 - DNA, 15 bp, Homo sapiens
gagaggacgcgtggt

SEQ ID NO: 27325 - DNA, 15 bp, Homo sapiens
ggagaggacgcgtgg

SEQ ID NO: 27326 - DNA, 15 bp, Homo sapiens
cggagaggacgcgtg

SEQ ID NO: 27327 - DNA, 15 bp, Homo sapiens
ccggagaggacgcgt

SEQ ID NO: 27328 - DNA, 15 bp, Homo sapiens
tccggagaggacgcg

SEQ ID NO: 27329 - DNA, 15 bp, Homo sapiens
ttccggagaggacgc

SEQ ID NO: 27330 - DNA, 15 bp, Homo sapiens
cttccggagaggacg

SEQ ID NO: 27331 - DNA, 15 bp, Homo sapiens
tcttccggagaggac

SEQ ID NO: 27332 - DNA, 15 bp, Homo sapiens
gtcttccggagagga

SEQ ID NO: 27333 - DNA, 15 bp, Homo sapiens
tgtcttccggagagg

SEQ ID NO: 27334 - DNA, 15 bp, Homo sapiens
ctgtcttccggagag

SEQ ID NO: 27335 - DNA, 15 bp, Homo sapiens
actgtcttccggaga

SEQ ID NO: 27336 - DNA, 15 bp, Homo sapiens
tactgtcttccggag

SEQ ID NO: 27337 - DNA, 15 bp, Homo sapiens
atactgtcttccgga

SEQ ID NO: 27338 - DNA, 15 bp, Homo sapiens
gatactgtcttccgg

SEQ ID NO: 27339 - DNA, 15 bp, Homo sapiens
tgatactgtcttccg

SEQ ID NO: 27340 - DNA, 15 bp, Homo sapiens
ttgatactgtcttcc

SEQ ID NO: 27341 - DNA, 15 bp, Homo sapiens
tttgatactgtcttc

SEQ ID NO: 27342 - DNA, 15 bp, Homo sapiens
ttttgatactgtctt

SEQ ID NO: 27343 - DNA, 15 bp, Homo sapiens
attttgatactgtct

SEQ ID NO: 27344 - DNA, 15 bp, Homo sapiens
tattttgatactgtc

SEQ ID NO: 27345 - DNA, 15 bp, Homo sapiens
ctattttgatactgt

SEQ ID NO: 27346 - DNA, 15 bp, Homo sapiens
gctattttgatactg

SEQ ID NO: 27347 - DNA, 15 bp, Homo sapiens
agctattttgatact

SEQ ID NO: 27348 - DNA, 15 bp, Homo sapiens
gagctattttgatac

SEQ ID NO: 27349 - DNA, 15 bp, Homo sapiens
tgagctattttgata

SEQ ID NO: 27350 - DNA, 15 bp, Homo sapiens
ttgagctattttgat

SEQ ID NO: 27351 - DNA, 15 bp, Homo sapiens
cttgagctattttga

SEQ ID NO: 27352 - DNA, 15 bp, Homo sapiens
tcttgagctattttg

SEQ ID NO: 27353 - DNA, 15 bp, Homo sapiens
ttcttgagctatttt

SEQ ID NO: 27354 - DNA, 15 bp, Homo sapiens
attcttgagctattt

SEQ ID NO: 27355 - DNA, 15 bp, Homo sapiens
aattcttgagctatt

SEQ ID NO: 27356 - DNA, 15 bp, Homo sapiens
caattcttgagctat

SEQ ID NO: 27357 - DNA, 15 bp, Homo sapiens
ccaattcttgagcta

SEQ ID NO: 27358 - DNA, 15 bp, Homo sapiens
cccaattcttgagct

SEQ ID NO: 27359 - DNA, 15 bp, Homo sapiens
ccccaattcttgagc

SEQ ID NO: 27360 - DNA, 15 bp, Homo sapiens
tccccaattcttgag

SEQ ID NO: 27361 - DNA, 15 bp, Homo sapiens
atccccaattcttga

SEQ ID NO: 27362 - DNA, 15 bp, Homo sapiens
catccccaattcttg

SEQ ID NO: 27363 - DNA, 15 bp, Homo sapiens
gcatccccaattctt

SEQ ID NO: 27364 - DNA, 15 bp, Homo sapiens
tgcatccccaattct

SEQ ID NO: 27365 - DNA, 15 bp, Homo sapiens
ttgcatccccaattc

SEQ ID NO: 27366 - DNA, 15 bp, Homo sapiens
cttgcatccccaatt

SEQ ID NO: 27367 - DNA, 15 bp, Homo sapiens
ccttgcatccccaat

SEQ ID NO: 27368 - DNA, 15 bp, Homo sapiens
cccttgcatccccaa

SEQ ID NO: 27369 - DNA, 15 bp, Homo sapiens
ccccttgcatcccca

SEQ ID NO: 27370 - DNA, 15 bp, Homo sapiens
accccttgcatcccc

SEQ ID NO: 27371 - DNA, 15 bp, Homo sapiens
gaccccttgcatccc

SEQ ID NO: 27372 - DNA, 15 bp, Homo sapiens
ggaccccttgcatcc

SEQ ID NO: 27373 - DNA, 15 bp, Homo sapiens
gggaccccttgcatc

SEQ ID NO: 27374 - DNA, 15 bp, Homo sapiens
ggggaccccttgcat

SEQ ID NO: 27375 - DNA, 15 bp, Homo sapiens
cggggaccccttgca

SEQ ID NO: 27376 - DNA, 15 bp, Homo sapiens
gcggggaccccttgc

SEQ ID NO: 27377 - DNA, 15 bp, Homo sapiens
ggcggggaccccttg

SEQ ID NO: 27378 - DNA, 15 bp, Homo sapiens
gggcggggacccctt

SEQ ID NO: 27379 - DNA, 15 bp, Homo sapiens
agggcggggacccct

SEQ ID NO: 27380 - DNA, 15 bp, Homo sapiens
cagggcggggacccc

SEQ ID NO: 27381 - DNA, 15 bp, Homo sapiens
ccagggcggggaccc

SEQ ID NO: 27382 - DNA, 15 bp, Homo sapiens
accagggcggggacc

SEQ ID NO: 27383 - DNA, 15 bp, Homo sapiens
caccagggcggggac

SEQ ID NO: 27384 - DNA, 15 bp, Homo sapiens
gcaccagggcgggga

SEQ ID NO: 27385 - DNA, 15 bp, Homo sapiens
agcaccagggcgggg

SEQ ID NO: 27386 - DNA, 15 bp, Homo sapiens
aagcaccagggcggg

SEQ ID NO: 27387 - DNA, 15 bp, Homo sapiens
taagcaccagggcgg

SEQ ID NO: 27388 - DNA, 15 bp, Homo sapiens
gtaagcaccagggcg

SEQ ID NO: 27389 - DNA, 15 bp, Homo sapiens
ggtaagcaccagggc

SEQ ID NO: 27390 - DNA, 15 bp, Homo sapiens
aggtaagcaccaggg

SEQ ID NO: 27391 - DNA, 15 bp, Homo sapiens
aaggtaagcaccagg

SEQ ID NO: 27392 - DNA, 15 bp, Homo sapiens
gaaggtaagcaccag

SEQ ID NO: 27393 - DNA, 15 bp, Homo sapiens
agaaggtaagcacca

SEQ ID NO: 27394 - DNA, 15 bp, Homo sapiens
aagaaggtaagcacc

SEQ ID NO: 27395 - DNA, 15 bp, Homo sapiens
aaagaaggtaagcac

SEQ ID NO: 27396 - DNA, 15 bp, Homo sapiens
caaagaaggtaagca

SEQ ID NO: 27397 - DNA, 15 bp, Homo sapiens
gcaaagaaggtaagc

SEQ ID NO: 27398 - DNA, 15 bp, Homo sapiens
cgcaaagaaggtaag

SEQ ID NO: 27399 - DNA, 15 bp, Homo sapiens
ccgcaaagaaggtaa

SEQ ID NO: 27400 - DNA, 15 bp, Homo sapiens
gccgcaaagaaggta

SEQ ID NO: 27401 - DNA, 15 bp, Homo sapiens
agccgcaaagaaggt

SEQ ID NO: 27402 - DNA, 15 bp, Homo sapiens
aagccgcaaagaagg

SEQ ID NO: 27403 - DNA, 15 bp, Homo sapiens
taagccgcaaagaag

SEQ ID NO: 27404 - DNA, 15 bp, Homo sapiens
gtaagccgcaaagaa

SEQ ID NO: 27405 - DNA, 15 bp, Homo sapiens
tgtaagccgcaaaga

SEQ ID NO: 27406 - DNA, 15 bp, Homo sapiens
gtgtaagccgcaaag

SEQ ID NO: 27407 - DNA, 15 bp, Homo sapiens
ggtgtaagccgcaaa

SEQ ID NO: 27408 - DNA, 15 bp, Homo sapiens
tggtgtaagccgcaa

SEQ ID NO: 27409 - DNA, 15 bp, Homo sapiens
gtggtgtaagccgca

SEQ ID NO: 27410 - DNA, 15 bp, Homo sapiens
ggtggtgtaagccgc

SEQ ID NO: 27411 - DNA, 15 bp, Homo sapiens
gggtggtgtaagccg

SEQ ID NO: 27412 - DNA, 15 bp, Homo sapiens
ggggtggtgtaagcc

SEQ ID NO: 27413 - DNA, 15 bp, Homo sapiens
cggggtggtgtaagc

SEQ ID NO: 27414 - DNA, 15 bp, Homo sapiens
ccggggtggtgtaag

SEQ ID NO: 27415 - DNA, 15 bp, Homo sapiens
accggggtggtgtaa

SEQ ID NO: 27416 - DNA, 15 bp, Homo sapiens
caccggggtggtgta

SEQ ID NO: 27417 - DNA, 15 bp, Homo sapiens
ccaccggggtggtgt

SEQ ID NO: 27418 - DNA, 15 bp, Homo sapiens
gccaccggggtggtg

SEQ ID NO: 27419 - DNA, 15 bp, Homo sapiens
agccaccggggtggt

SEQ ID NO: 27420 - DNA, 15 bp, Homo sapiens
tagccaccggggtgg

SEQ ID NO: 27421 - DNA, 15 bp, Homo sapiens
ctagccaccggggtg

SEQ ID NO: 27422 - DNA, 15 bp, Homo sapiens
tctagccaccggggt

SEQ ID NO: 27423 - DNA, 15 bp, Homo sapiens
atctagccaccgggg

SEQ ID NO: 27424 - DNA, 15 bp, Homo sapiens
gatctagccaccggg

SEQ ID NO: 27425 - DNA, 15 bp, Homo sapiens
ggatctagccaccgg

SEQ ID NO: 27426 - DNA, 15 bp, Homo sapiens
aggatctagccaccg

SEQ ID NO: 27427 - DNA, 15 bp, Homo sapiens
caggatctagccacc

SEQ ID NO: 27428 - DNA, 15 bp, Homo sapiens
ccaggatctagccac

SEQ ID NO: 27429 - DNA, 15 bp, Homo sapiens
tccaggatctagcca

SEQ ID NO: 27430 - DNA, 15 bp, Homo sapiens
ctccaggatctagcc

SEQ ID NO: 27431 - DNA, 15 bp, Homo sapiens
tctccaggatctagc

SEQ ID NO: 27432 - DNA, 15 bp, Homo sapiens
atctccaggatctag

SEQ ID NO: 27433 - DNA, 15 bp, Homo sapiens
tatctccaggatcta

SEQ ID NO: 27434 - DNA, 15 bp, Homo sapiens
ttatctccaggatct

SEQ ID NO: 27435 - DNA, 15 bp, Homo sapiens
tttatctccaggatc

SEQ ID NO: 27436 - DNA, 15 bp, Homo sapiens
gtttatctccaggat

SEQ ID NO: 27437 - DNA, 15 bp, Homo sapiens
tgtttatctccagga

SEQ ID NO: 27438 - DNA, 15 bp, Homo sapiens
gtgtttatctccagg

SEQ ID NO: 27439 - DNA, 15 bp, Homo sapiens
agtgtttatctccag

SEQ ID NO: 27440 - DNA, 15 bp, Homo sapiens
aagtgtttatctcca

SEQ ID NO: 27441 - DNA, 15 bp, Homo sapiens
caagtgtttatctcc

SEQ ID NO: 27442 - DNA, 15 bp, Homo sapiens
gcaagtgtttatctc

SEQ ID NO: 27443 - DNA, 15 bp, Homo sapiens
tgcaagtgtttatct

SEQ ID NO: 27444 - DNA, 15 bp, Homo sapiens
atgcaagtgtttatc

SEQ ID NO: 27445 - DNA, 15 bp, Homo sapiens
aatgcaagtgtttat

SEQ ID NO: 27446 - DNA, 15 bp, Homo sapiens
aaatgcaagtgttta

SEQ ID NO: 27447 - DNA, 15 bp, Homo sapiens
gaaatgcaagtgttt

SEQ ID NO: 27448 - DNA, 15 bp, Homo sapiens
ggaaatgcaagtgtt

SEQ ID NO: 27449 - DNA, 15 bp, Homo sapiens
gggaaatgcaagtgt

SEQ ID NO: 27450 - DNA, 15 bp, Homo sapiens
tgggaaatgcaagtg

SEQ ID NO: 27451 - DNA, 15 bp, Homo sapiens
ttgggaaatgcaagt

SEQ ID NO: 27452 - DNA, 15 bp, Homo sapiens
tttgggaaatgcaag

SEQ ID NO: 27453 - DNA, 15 bp, Homo sapiens
ctttgggaaatgcaa

SEQ ID NO: 27454 - DNA, 15 bp, Homo sapiens
actttgggaaatgca

SEQ ID NO: 27455 - DNA, 15 bp, Homo sapiens
aactttgggaaatgc

SEQ ID NO: 27456 - DNA, 15 bp, Homo sapiens
taactttgggaaatg

SEQ ID NO: 27457 - DNA, 15 bp, Homo sapiens
ttaactttgggaaat

SEQ ID NO: 27458 - DNA, 15 bp, Homo sapiens
gttaactttgggaaa

SEQ ID NO: 27459 - DNA, 15 bp, Homo sapiens
ggttaactttgggaa

SEQ ID NO: 27460 - DNA, 15 bp, Homo sapiens
gggttaactttggga

SEQ ID NO: 27461 - DNA, 15 bp, Homo sapiens
tgggttaactttggg

SEQ ID NO: 27462 - DNA, 15 bp, Homo sapiens
ctgggttaactttgg

SEQ ID NO: 27463 - DNA, 15 bp, Homo sapiens
actgggttaactttg

SEQ ID NO: 27464 - DNA, 15 bp, Homo sapiens
tactgggttaacttt

SEQ ID NO: 27465 - DNA, 15 bp, Homo sapiens
atactgggttaactt

SEQ ID NO: 27466 - DNA, 15 bp, Homo sapiens
tatactgggttaact

SEQ ID NO: 27467 - DNA, 15 bp, Homo sapiens
gtatactgggttaac

SEQ ID NO: 27468 - DNA, 15 bp, Homo sapiens
ggtatactgggttaa

SEQ ID NO: 27469 - DNA, 15 bp, Homo sapiens
tggtatactgggtta

SEQ ID NO: 27470 - DNA, 15 bp, Homo sapiens
ttggtatactgggtt

SEQ ID NO: 27471 - DNA, 15 bp, Homo sapiens
gttggtatactgggt

SEQ ID NO: 27472 - DNA, 15 bp, Homo sapiens
ggttggtatactggg

SEQ ID NO: 27473 - DNA, 15 bp, Homo sapiens
gggttggtatactgg

SEQ ID NO: 27474 - DNA, 15 bp, Homo sapiens
cgggttggtatactg

SEQ ID NO: 27475 - DNA, 15 bp, Homo sapiens
ccgggttggtatact

SEQ ID NO: 27476 - DNA, 15 bp, Homo sapiens
tccgggttggtatac

SEQ ID NO: 27477 - DNA, 15 bp, Homo sapiens
ctccgggttggtata

SEQ ID NO: 27478 - DNA, 15 bp, Homo sapiens
gctccgggttggtat

SEQ ID NO: 27479 - DNA, 15 bp, Homo sapiens
agctccgggttggta

SEQ ID NO: 27480 - DNA, 15 bp, Homo sapiens
aagctccgggttggt

SEQ ID NO: 27481 - DNA, 15 bp, Homo sapiens
caagctccgggttgg

SEQ ID NO: 27482 - DNA, 15 bp, Homo sapiens
gcaagctccgggttg

SEQ ID NO: 27483 - DNA, 15 bp, Homo sapiens
ggcaagctccgggtt

SEQ ID NO: 27484 - DNA, 15 bp, Homo sapiens
tggcaagctccgggt

SEQ ID NO: 27485 - DNA, 15 bp, Homo sapiens
ttggcaagctccggg

SEQ ID NO: 27486 - DNA, 15 bp, Homo sapiens
cttggcaagctccgg

SEQ ID NO: 27487 - DNA, 15 bp, Homo sapiens
tcttggcaagctccg

SEQ ID NO: 27488 - DNA, 15 bp, Homo sapiens
ctcttggcaagctcc

SEQ ID NO: 27489 - DNA, 15 bp, Homo sapiens
actcttggcaagctc

SEQ ID NO: 27490 - DNA, 15 bp, Homo sapiens
gactcttggcaagct

SEQ ID NO: 27491 - DNA, 15 bp, Homo sapiens
agactcttggcaagc

SEQ ID NO: 27492 - DNA, 15 bp, Homo sapiens
tagactcttggcaag

SEQ ID NO: 27493 - DNA, 15 bp, Homo sapiens
atagactcttggcaa

SEQ ID NO: 27494 - DNA, 15 bp, Homo sapiens
aatagactcttggca

SEQ ID NO: 27495 - DNA, 15 bp, Homo sapiens
gaatagactcttggc

SEQ ID NO: 27496 - DNA, 15 bp, Homo sapiens
ggaatagactcttgg

SEQ ID NO: 27497 - DNA, 15 bp, Homo sapiens
tggaatagactcttg

SEQ ID NO: 27498 - DNA, 15 bp, Homo sapiens
ctggaatagactctt

SEQ ID NO: 27499 - DNA, 15 bp, Homo sapiens
gctggaatagactct

SEQ ID NO: 27500 - DNA, 15 bp, Homo sapiens
ggctggaatagactc

SEQ ID NO: 27501 - DNA, 15 bp, Homo sapiens
aggctggaatagact

SEQ ID NO: 27502 - DNA, 15 bp, Homo sapiens
taggctggaatagac

SEQ ID NO: 27503 - DNA, 15 bp, Homo sapiens
gtaggctggaataga

SEQ ID NO: 27504 - DNA, 15 bp, Homo sapiens
tgtaggctggaatag

SEQ ID NO: 27505 - DNA, 15 bp, Homo sapiens
gtgtaggctggaata

SEQ ID NO: 27506 - DNA, 15 bp, Homo sapiens
ggtgtaggctggaat

SEQ ID NO: 27507 - DNA, 15 bp, Homo sapiens
cggtgtaggctggaa

SEQ ID NO: 27508 - DNA, 15 bp, Homo sapiens
gcggtgtaggctgga

SEQ ID NO: 27509 - DNA, 15 bp, Homo sapiens
agcggtgtaggctgg

SEQ ID NO: 27510 - DNA, 15 bp, Homo sapiens
tagcggtgtaggctg

SEQ ID NO: 27511 - DNA, 15 bp, Homo sapiens
ctagcggtgtaggct

SEQ ID NO: 27512 - DNA, 15 bp, Homo sapiens
cctagcggtgtaggc

SEQ ID NO: 27513 - DNA, 15 bp, Homo sapiens
tcctagcggtgtagg

SEQ ID NO: 27514 - DNA, 15 bp, Homo sapiens
ttcctagcggtgtag

SEQ ID NO: 27515 - DNA, 15 bp, Homo sapiens
cttcctagcggtgta

SEQ ID NO: 27516 - DNA, 15 bp, Homo sapiens
gcttcctagcggtgt

SEQ ID NO: 27517 - DNA, 15 bp, Homo sapiens
ggcttcctagcggtg

SEQ ID NO: 27518 - DNA, 15 bp, Homo sapiens
tggcttcctagcggt

SEQ ID NO: 27519 - DNA, 15 bp, Homo sapiens
ttggcttcctagcgg

SEQ ID NO: 27520 - DNA, 15 bp, Homo sapiens
gttggcttcctagcg

SEQ ID NO: 27521 - DNA, 15 bp, Homo sapiens
agttggcttcctagc

SEQ ID NO: 27522 - DNA, 15 bp, Homo sapiens
aagttggcttcctag

SEQ ID NO: 27523 - DNA, 15 bp, Homo sapiens
gaagttggcttccta

SEQ ID NO: 27524 - DNA, 15 bp, Homo sapiens
tgaagttggcttcct

SEQ ID NO: 27525 - DNA, 15 bp, Homo sapiens
ctgaagttggcttcc

SEQ ID NO: 27526 - DNA, 15 bp, Homo sapiens
gctgaagttggcttc

SEQ ID NO: 27527 - DNA, 15 bp, Homo sapiens
cgctgaagttggctt

SEQ ID NO: 27528 - DNA, 15 bp, Homo sapiens
tcgctgaagttggct

SEQ ID NO: 27529 - DNA, 15 bp, Homo sapiens
ctcgctgaagttggc

SEQ ID NO: 27530 - DNA, 15 bp, Homo sapiens
gctcgctgaagttgg

SEQ ID NO: 27531 - DNA, 15 bp, Homo sapiens
agctcgctgaagttg

SEQ ID NO: 27532 - DNA, 15 bp, Homo sapiens
gagctcgctgaagtt

SEQ ID NO: 27533 - DNA, 15 bp, Homo sapiens
tgagctcgctgaagt

SEQ ID NO: 27534 - DNA, 15 bp, Homo sapiens
ttgagctcgctgaag

SEQ ID NO: 27535 - DNA, 15 bp, Homo sapiens
attgagctcgctgaa

SEQ ID NO: 27536 - DNA, 15 bp, Homo sapiens
cattgagctcgctga

SEQ ID NO: 27537 - DNA, 15 bp, Homo sapiens
tcattgagctcgctg

SEQ ID NO: 27538 - DNA, 15 bp, Homo sapiens
ctcattgagctcgct

SEQ ID NO: 27539 - DNA, 15 bp, Homo sapiens
cctcattgagctcgc

SEQ ID NO: 27540 - DNA, 15 bp, Homo sapiens
ccctcattgagctcg

SEQ ID NO: 27541 - DNA, 15 bp, Homo sapiens
cccctcattgagctc

SEQ ID NO: 27542 - DNA, 15 bp, Homo sapiens
tcccctcattgagct

SEQ ID NO: 27543 - DNA, 15 bp, Homo sapiens
gtcccctcattgagc

SEQ ID NO: 27544 - DNA, 15 bp, Homo sapiens
ggtcccctcattgag

SEQ ID NO: 27545 - DNA, 15 bp, Homo sapiens
tggtcccctcattga

SEQ ID NO: 27546 - DNA, 15 bp, Homo sapiens
ttggtcccctcattg

SEQ ID NO: 27547 - DNA, 15 bp, Homo sapiens
tttggtcccctcatt

SEQ ID NO: 27548 - DNA, 15 bp, Homo sapiens
gtttggtcccctcat

SEQ ID NO: 27549 - DNA, 15 bp, Homo sapiens
agtttggtcccctca

SEQ ID NO: 27550 - DNA, 15 bp, Homo sapiens
cagtttggtcccctc

SEQ ID NO: 27551 - DNA, 15 bp, Homo sapiens
ccagtttggtcccct

SEQ ID NO: 27552 - DNA, 15 bp, Homo sapiens
cccagtttggtcccc

SEQ ID NO: 27553 - DNA, 15 bp, Homo sapiens
ccccagtttggtccc

SEQ ID NO: 27554 - DNA, 15 bp, Homo sapiens
gccccagtttggtcc

SEQ ID NO: 27555 - DNA, 15 bp, Homo sapiens
agccccagtttggtc

SEQ ID NO: 27556 - DNA, 15 bp, Homo sapiens
gagccccagtttggt

SEQ ID NO: 27557 - DNA, 15 bp, Homo sapiens
cgagccccagtttgg

SEQ ID NO: 27558 - DNA, 15 bp, Homo sapiens
gcgagccccagtttg

SEQ ID NO: 27559 - DNA, 15 bp, Homo sapiens
agcgagccccagttt

SEQ ID NO: 27560 - DNA, 15 bp, Homo sapiens
aagcgagccccagtt

SEQ ID NO: 27561 - DNA, 15 bp, Homo sapiens
aaagcgagccccagt

SEQ ID NO: 27562 - DNA, 15 bp, Homo sapiens
gaaagcgagccccag

SEQ ID NO: 27563 - DNA, 15 bp, Homo sapiens
ggaaagcgagcccca

SEQ ID NO: 27564 - DNA, 15 bp, Homo sapiens
tggaaagcgagcccc

SEQ ID NO: 27565 - DNA, 15 bp, Homo sapiens
ttggaaagcgagccc

SEQ ID NO: 27566 - DNA, 15 bp, Homo sapiens
tttggaaagcgagcc

SEQ ID NO: 27567 - DNA, 15 bp, Homo sapiens
gtttggaaagcgagc

SEQ ID NO: 27568 - DNA, 15 bp, Homo sapiens
cgtttggaaagcgag

SEQ ID NO: 27569 - DNA, 15 bp, Homo sapiens
gcgtttggaaagcga

SEQ ID NO: 27570 - DNA, 15 bp, Homo sapiens
agcgtttggaaagcg

SEQ ID NO: 27571 - DNA, 15 bp, Homo sapiens
gagcgtttggaaagc

SEQ ID NO: 27572 - DNA, 15 bp, Homo sapiens
ggagcgtttggaaag

SEQ ID NO: 27573 - DNA, 15 bp, Homo sapiens
cggagcgtttggaaa

SEQ ID NO: 27574 - DNA, 15 bp, Homo sapiens
gcggagcgtttggaa

SEQ ID NO: 27575 - DNA, 15 bp, Homo sapiens
agcggagcgtttgga

SEQ ID NO: 27576 - DNA, 15 bp, Homo sapiens
gagcggagcgtttgg

SEQ ID NO: 27577 - DNA, 15 bp, Homo sapiens
ggagcggagcgtttg

SEQ ID NO: 27578 - DNA, 15 bp, Homo sapiens
tggagcggagcgttt

SEQ ID NO: 27579 - DNA, 15 bp, Homo sapiens
ttggagcggagcgtt

SEQ ID NO: 27580 - DNA, 15 bp, Homo sapiens
tttggagcggagcgt

SEQ ID NO: 27581 - DNA, 15 bp, Homo sapiens
ttttggagcggagcg

SEQ ID NO: 27582 - DNA, 15 bp, Homo sapiens
attttggagcggagc

SEQ ID NO: 27583 - DNA, 15 bp, Homo sapiens
gattttggagcggag

SEQ ID NO: 27584 - DNA, 15 bp, Homo sapiens
agattttggagcgga

SEQ ID NO: 27585 - DNA, 15 bp, Homo sapiens
cagattttggagcgg

SEQ ID NO: 27586 - DNA, 15 bp, Homo sapiens
tcagattttggagcg

SEQ ID NO: 27587 - DNA, 15 bp, Homo sapiens
gtcagattttggagc

SEQ ID NO: 27588 - DNA, 15 bp, Homo sapiens
agtcagattttggag

SEQ ID NO: 27589 - DNA, 15 bp, Homo sapiens
gagtcagattttgga

SEQ ID NO: 27590 - DNA, 15 bp, Homo sapiens
agagtcagattttgg

SEQ ID NO: 27591 - DNA, 15 bp, Homo sapiens
gagagtcagattttg

SEQ ID NO: 27592 - DNA, 15 bp, Homo sapiens
agagagtcagatttt

SEQ ID NO: 27593 - DNA, 15 bp, Homo sapiens
gagagagtcagattt

SEQ ID NO: 27594 - DNA, 15 bp, Homo sapiens
agagagagtcagatt

SEQ ID NO: 27595 - DNA, 15 bp, Homo sapiens
gagagagagtcagat

SEQ ID NO: 27596 - DNA, 15 bp, Homo sapiens
ggagagagagtcaga

SEQ ID NO: 27597 - DNA, 15 bp, Homo sapiens
tggagagagagtcag

SEQ ID NO: 27598 - DNA, 15 bp, Homo sapiens
ctggagagagagtca

SEQ ID NO: 27599 - DNA, 15 bp, Homo sapiens
gctggagagagagtc

SEQ ID NO: 27600 - DNA, 15 bp, Homo sapiens
ggctggagagagagt

SEQ ID NO: 27601 - DNA, 15 bp, Homo sapiens
gggctggagagagag

SEQ ID NO: 27602 - DNA, 15 bp, Homo sapiens
ggggctggagagaga

SEQ ID NO: 27603 - DNA, 15 bp, Homo sapiens
cggggctggagagag

SEQ ID NO: 27604 - DNA, 15 bp, Homo sapiens
tcggggctggagaga

SEQ ID NO: 27605 - DNA, 15 bp, Homo sapiens
atcggggctggagag

SEQ ID NO: 27606 - DNA, 15 bp, Homo sapiens
gatcggggctggaga

SEQ ID NO: 27607 - DNA, 15 bp, Homo sapiens
agatcggggctggag

SEQ ID NO: 27608 - DNA, 15 bp, Homo sapiens
gagatcggggctgga

SEQ ID NO: 27609 - DNA, 15 bp, Homo sapiens
tgagatcggggctgg

SEQ ID NO: 27610 - DNA, 15 bp, Homo sapiens
ctgagatcggggctg

SEQ ID NO: 27611 - DNA, 15 bp, Homo sapiens
actgagatcggggct

SEQ ID NO: 27612 - DNA, 15 bp, Homo sapiens
cactgagatcggggc

SEQ ID NO: 27613 - DNA, 15 bp, Homo sapiens
acactgagatcgggg

SEQ ID NO: 27614 - DNA, 15 bp, Homo sapiens
cacactgagatcggg

SEQ ID NO: 27615 - DNA, 15 bp, Homo sapiens
tcacactgagatcgg

SEQ ID NO: 27616 - DNA, 15 bp, Homo sapiens
ctcacactgagatcg

SEQ ID NO: 27617 - DNA, 15 bp, Homo sapiens
gctcacactgagatc

SEQ ID NO: 27618 - DNA, 15 bp, Homo sapiens
ggctcacactgagat

SEQ ID NO: 27619 - DNA, 15 bp, Homo sapiens
cggctcacactgaga

SEQ ID NO: 27620 - DNA, 15 bp, Homo sapiens
tcggctcacactgag

SEQ ID NO: 27621 - DNA, 15 bp, Homo sapiens
ttcggctcacactga

SEQ ID NO: 27622 - DNA, 15 bp, Homo sapiens
gttcggctcacactg

SEQ ID NO: 27623 - DNA, 15 bp, Homo sapiens
ggttcggctcacact

SEQ ID NO: 27624 - DNA, 15 bp, Homo sapiens
aggttcggctcacac

SEQ ID NO: 27625 - DNA, 15 bp, Homo sapiens
gaggttcggctcaca

SEQ ID NO: 27626 - DNA, 15 bp, Homo sapiens
tgaggttcggctcac

SEQ ID NO: 27627 - DNA, 15 bp, Homo sapiens
ctgaggttcggctca

SEQ ID NO: 27628 - DNA, 15 bp, Homo sapiens
tctgaggttcggctc

SEQ ID NO: 27629 - DNA, 15 bp, Homo sapiens
ttctgaggttcggct

SEQ ID NO: 27630 - DNA, 15 bp, Homo sapiens
tttctgaggttcggc

SEQ ID NO: 27631 - DNA, 15 bp, Homo sapiens
ttttctgaggttcgg

SEQ ID NO: 27632 - DNA, 15 bp, Homo sapiens
cttttctgaggttcg

SEQ ID NO: 27633 - DNA, 15 bp, Homo sapiens
tcttttctgaggttc

SEQ ID NO: 27634 - DNA, 15 bp, Homo sapiens
gtcttttctgaggtt

SEQ ID NO: 27635 - DNA, 15 bp, Homo sapiens
cgtcttttctgaggt

SEQ ID NO: 27636 - DNA, 15 bp, Homo sapiens
gcgtcttttctgagg

SEQ ID NO: 27637 - DNA, 15 bp, Homo sapiens
agcgtcttttctgag

SEQ ID NO: 27638 - DNA, 15 bp, Homo sapiens
aagcgtcttttctga

SEQ ID NO: 27639 - DNA, 15 bp, Homo sapiens
aaagcgtcttttctg

SEQ ID NO: 27640 - DNA, 15 bp, Homo sapiens
aaaagcgtcttttct

SEQ ID NO: 27641 - DNA, 15 bp, Homo sapiens
aaaaagcgtcttttc

SEQ ID NO: 27642 - DNA, 15 bp, Homo sapiens
taaaaagcgtctttt

SEQ ID NO: 27643 - DNA, 15 bp, Homo sapiens
ttaaaaagcgtcttt

SEQ ID NO: 27644 - DNA, 15 bp, Homo sapiens
cttaaaaagcgtctt

SEQ ID NO: 27645 - DNA, 15 bp, Homo sapiens
ccttaaaaagcgtct

SEQ ID NO: 27646 - DNA, 15 bp, Homo sapiens
cccttaaaaagcgtc

SEQ ID NO: 27647 - DNA, 15 bp, Homo sapiens
gcccttaaaaagcgt

SEQ ID NO: 27648 - DNA, 15 bp, Homo sapiens
cgcccttaaaaagcg

SEQ ID NO: 27649 - DNA, 15 bp, Homo sapiens
tcgcccttaaaaagc

SEQ ID NO: 27650 - DNA, 15 bp, Homo sapiens
gtcgcccttaaaaag

SEQ ID NO: 27651 - DNA, 15 bp, Homo sapiens
tgtcgcccttaaaaa

SEQ ID NO: 27652 - DNA, 15 bp, Homo sapiens
gtgtcgcccttaaaa

SEQ ID NO: 27653 - DNA, 15 bp, Homo sapiens
tgtgtcgcccttaaa

SEQ ID NO: 27654 - DNA, 15 bp, Homo sapiens
ctgtgtcgcccttaa

SEQ ID NO: 27655 - DNA, 15 bp, Homo sapiens
cctgtgtcgccctta

SEQ ID NO: 27656 - DNA, 15 bp, Homo sapiens
ccctgtgtcgccctt

SEQ ID NO: 27657 - DNA, 15 bp, Homo sapiens
accctgtgtcgccct

SEQ ID NO: 27658 - DNA, 15 bp, Homo sapiens
aaccctgtgtcgccc

SEQ ID NO: 27659 - DNA, 15 bp, Homo sapiens
caaccctgtgtcgcc

SEQ ID NO: 27660 - DNA, 15 bp, Homo sapiens
ccaaccctgtgtcgc

SEQ ID NO: 27661 - DNA, 15 bp, Homo sapiens
gccaaccctgtgtcg

SEQ ID NO: 27662 - DNA, 15 bp, Homo sapiens
agccaaccctgtgtc

SEQ ID NO: 27663 - DNA, 15 bp, Homo sapiens
aagccaaccctgtgt

SEQ ID NO: 27664 - DNA, 15 bp, Homo sapiens
aaagccaaccctgtg

SEQ ID NO: 27665 - DNA, 15 bp, Homo sapiens
taaagccaaccctgt

SEQ ID NO: 27666 - DNA, 15 bp, Homo sapiens
gtaaagccaaccctg

SEQ ID NO: 27667 - DNA, 15 bp, Homo sapiens
tgtaaagccaaccct

SEQ ID NO: 27668 - DNA, 15 bp, Homo sapiens
ctgtaaagccaaccc

SEQ ID NO: 27669 - DNA, 15 bp, Homo sapiens
gctgtaaagccaacc

SEQ ID NO: 27670 - DNA, 15 bp, Homo sapiens
cgctgtaaagccaac

SEQ ID NO: 27671 - DNA, 15 bp, Homo sapiens
ccgctgtaaagccaa

SEQ ID NO: 27672 - DNA, 15 bp, Homo sapiens
cccgctgtaaagcca

SEQ ID NO: 27673 - DNA, 15 bp, Homo sapiens
ccccgctgtaaagcc

SEQ ID NO: 27674 - DNA, 15 bp, Homo sapiens
gccccgctgtaaagc

SEQ ID NO: 27675 - DNA, 15 bp, Homo sapiens
ggccccgctgtaaag

SEQ ID NO: 27676 - DNA, 15 bp, Homo sapiens
tggccccgctgtaaa

SEQ ID NO: 27677 - DNA, 15 bp, Homo sapiens
ttggccccgctgtaa

SEQ ID NO: 27678 - DNA, 15 bp, Homo sapiens
cttggccccgctgta

SEQ ID NO: 27679 - DNA, 15 bp, Homo sapiens
tcttggccccgctgt

SEQ ID NO: 27680 - DNA, 15 bp, Homo sapiens
ttcttggccccgctg

SEQ ID NO: 27681 - DNA, 15 bp, Homo sapiens
cttcttggccccgct

SEQ ID NO: 27682 - DNA, 15 bp, Homo sapiens
tcttcttggccccgc

SEQ ID NO: 27683 - DNA, 15 bp, Homo sapiens
gtcttcttggccccg

SEQ ID NO: 27684 - DNA, 15 bp, Homo sapiens
agtcttcttggcccc

SEQ ID NO: 27685 - DNA, 15 bp, Homo sapiens
tagtcttcttggccc

SEQ ID NO: 27686 - DNA, 15 bp, Homo sapiens
gtagtcttcttggcc

SEQ ID NO: 27687 - DNA, 15 bp, Homo sapiens
ggtagtcttcttggc

SEQ ID NO: 27688 - DNA, 15 bp, Homo sapiens
aggtagtcttcttgg

SEQ ID NO: 27689 - DNA, 15 bp, Homo sapiens
caggtagtcttcttg

SEQ ID NO: 27690 - DNA, 15 bp, Homo sapiens
ccaggtagtcttctt

SEQ ID NO: 27691 - DNA, 15 bp, Homo sapiens
cccaggtagtcttct

SEQ ID NO: 27692 - DNA, 15 bp, Homo sapiens
ccccaggtagtcttc

SEQ ID NO: 27693 - DNA, 15 bp, Homo sapiens
cccccaggtagtctt

SEQ ID NO: 27694 - DNA, 15 bp, Homo sapiens
acccccaggtagtct

SEQ ID NO: 27695 - DNA, 15 bp, Homo sapiens
tacccccaggtagtc

SEQ ID NO: 27696 - DNA, 15 bp, Homo sapiens
gtacccccaggtagt

SEQ ID NO: 27697 - DNA, 15 bp, Homo sapiens
ggtacccccaggtag

SEQ ID NO: 27698 - DNA, 15 bp, Homo sapiens
cggtacccccaggta

SEQ ID NO: 27699 - DNA, 15 bp, Homo sapiens
gcggtacccccaggt

SEQ ID NO: 27700 - DNA, 15 bp, Homo sapiens
ggcggtacccccagg

SEQ ID NO: 27701 - DNA, 15 bp, Homo sapiens
tggcggtacccccag

SEQ ID NO: 27702 - DNA, 15 bp, Homo sapiens
gtggcggtaccccca

SEQ ID NO: 27703 - DNA, 15 bp, Homo sapiens
ggtggcggtaccccc

SEQ ID NO: 27704 - DNA, 15 bp, Homo sapiens
aggtggcggtacccc

SEQ ID NO: 27705 - DNA, 15 bp, Homo sapiens
gaggtggcggtaccc

SEQ ID NO: 27706 - DNA, 15 bp, Homo sapiens
cgaggtggcggtacc

SEQ ID NO: 27707 - DNA, 15 bp, Homo sapiens
ccgaggtggcggtac

SEQ ID NO: 27708 - DNA, 15 bp, Homo sapiens
tccgaggtggcggta

SEQ ID NO: 27709 - DNA, 15 bp, Homo sapiens
gtccgaggtggcggt

SEQ ID NO: 27710 - DNA, 15 bp, Homo sapiens
tgtccgaggtggcgg

SEQ ID NO: 27711 - DNA, 15 bp, Homo sapiens
ttgtccgaggtggcg

SEQ ID NO: 27712 - DNA, 15 bp, Homo sapiens
tttgtccgaggtggc

SEQ ID NO: 27713 - DNA, 15 bp, Homo sapiens
atttgtccgaggtgg

SEQ ID NO: 27714 - DNA, 15 bp, Homo sapiens
gatttgtccgaggtg

SEQ ID NO: 27715 - DNA, 15 bp, Homo sapiens
ggatttgtccgaggt

SEQ ID NO: 27716 - DNA, 15 bp, Homo sapiens
cggatttgtccgagg

SEQ ID NO: 27717 - DNA, 15 bp, Homo sapiens
acggatttgtccgag

SEQ ID NO: 27718 - DNA, 15 bp, Homo sapiens
aacggatttgtccga

SEQ ID NO: 27719 - DNA, 15 bp, Homo sapiens
caacggatttgtccg

SEQ ID NO: 27720 - DNA, 15 bp, Homo sapiens
ccaacggatttgtcc

SEQ ID NO: 27721 - DNA, 15 bp, Homo sapiens
gccaacggatttgtc

SEQ ID NO: 27722 - DNA, 15 bp, Homo sapiens
agccaacggatttgt

SEQ ID NO: 27723 - DNA, 15 bp, Homo sapiens
gagccaacggatttg

SEQ ID NO: 27724 - DNA, 15 bp, Homo sapiens
agagccaacggattt

SEQ ID NO: 27725 - DNA, 15 bp, Homo sapiens
cagagccaacggatt

SEQ ID NO: 27726 - DNA, 15 bp, Homo sapiens
acagagccaacggat

SEQ ID NO: 27727 - DNA, 15 bp, Homo sapiens
gacagagccaacgga

SEQ ID NO: 27728 - DNA, 15 bp, Homo sapiens
ggacagagccaacgg

SEQ ID NO: 27729 - DNA, 15 bp, Homo sapiens
tggacagagccaacg

SEQ ID NO: 27730 - DNA, 15 bp, Homo sapiens
ttggacagagccaac

SEQ ID NO: 27731 - DNA, 15 bp, Homo sapiens
cttggacagagccaa

SEQ ID NO: 27732 - DNA, 15 bp, Homo sapiens
ccttggacagagcca

SEQ ID NO: 27733 - DNA, 15 bp, Homo sapiens
accttggacagagcc

SEQ ID NO: 27734 - DNA, 15 bp, Homo sapiens
caccttggacagagc

SEQ ID NO: 27735 - DNA, 15 bp, Homo sapiens
gcaccttggacagag

SEQ ID NO: 27736 - DNA, 15 bp, Homo sapiens
agcaccttggacaga

SEQ ID NO: 27737 - DNA, 15 bp, Homo sapiens
cagcaccttggacag

SEQ ID NO: 27738 - DNA, 15 bp, Homo sapiens
tcagcaccttggaca

SEQ ID NO: 27739 - DNA, 15 bp, Homo sapiens
ttcagcaccttggac

SEQ ID NO: 27740 - DNA, 15 bp, Homo sapiens
attcagcaccttgga

SEQ ID NO: 27741 - DNA, 15 bp, Homo sapiens
cattcagcaccttgg

SEQ ID NO: 27742 - DNA, 15 bp, Homo sapiens
ccattcagcaccttg

SEQ ID NO: 27743 - DNA, 15 bp, Homo sapiens
tccattcagcacctt

SEQ ID NO: 27744 - DNA, 15 bp, Homo sapiens
gtccattcagcacct

SEQ ID NO: 27745 - DNA, 15 bp, Homo sapiens
agtccattcagcacc

SEQ ID NO: 27746 - DNA, 15 bp, Homo sapiens
gagtccattcagcac

SEQ ID NO: 27747 - DNA, 15 bp, Homo sapiens
ggagtccattcagca

SEQ ID NO: 27748 - DNA, 15 bp, Homo sapiens
aggagtccattcagc

SEQ ID NO: 27749 - DNA, 15 bp, Homo sapiens
taggagtccattcag

SEQ ID NO: 27750 - DNA, 15 bp, Homo sapiens
ataggagtccattca

SEQ ID NO: 27751 - DNA, 15 bp, Homo sapiens
gataggagtccattc

SEQ ID NO: 27752 - DNA, 15 bp, Homo sapiens
cgataggagtccatt

SEQ ID NO: 27753 - DNA, 15 bp, Homo sapiens
gcgataggagtccat

SEQ ID NO: 27754 - DNA, 15 bp, Homo sapiens
ggcgataggagtcca

SEQ ID NO: 27755 - DNA, 15 bp, Homo sapiens
gggcgataggagtcc

SEQ ID NO: 27756 - DNA, 15 bp, Homo sapiens
cgggcgataggagtc

SEQ ID NO: 27757 - DNA, 15 bp, Homo sapiens
ccgggcgataggagt

SEQ ID NO: 27758 - DNA, 15 bp, Homo sapiens
tccgggcgataggag

SEQ ID NO: 27759 - DNA, 15 bp, Homo sapiens
atccgggcgatagga

SEQ ID NO: 27760 - DNA, 15 bp, Homo sapiens
aatccgggcgatagg

SEQ ID NO: 27761 - DNA, 15 bp, Homo sapiens
taatccgggcgatag

SEQ ID NO: 27762 - DNA, 15 bp, Homo sapiens
gtaatccgggcgata

SEQ ID NO: 27763 - DNA, 15 bp, Homo sapiens
tgtaatccgggcgat

SEQ ID NO: 27764 - DNA, 15 bp, Homo sapiens
gtgtaatccgggcga

SEQ ID NO: 27765 - DNA, 15 bp, Homo sapiens
tgtgtaatccgggcg

SEQ ID NO: 27766 - DNA, 15 bp, Homo sapiens
gtgtgtaatccgggc

SEQ ID NO: 27767 - DNA, 15 bp, Homo sapiens
ggtgtgtaatccggg

SEQ ID NO: 27768 - DNA, 15 bp, Homo sapiens
gggtgtgtaatccgg

SEQ ID NO: 27769 - DNA, 15 bp, Homo sapiens
cgggtgtgtaatccg

SEQ ID NO: 27770 - DNA, 15 bp, Homo sapiens
ccgggtgtgtaatcc

SEQ ID NO: 27771 - DNA, 15 bp, Homo sapiens
gccgggtgtgtaatc

SEQ ID NO: 27772 - DNA, 15 bp, Homo sapiens
tgccgggtgtgtaat

SEQ ID NO: 27773 - DNA, 15 bp, Homo sapiens
gtgccgggtgtgtaa

SEQ ID NO: 27774 - DNA, 15 bp, Homo sapiens
tgtgccgggtgtgta

SEQ ID NO: 27775 - DNA, 15 bp, Homo sapiens
ctgtgccgggtgtgt

SEQ ID NO: 27776 - DNA, 15 bp, Homo sapiens
gctgtgccgggtgtg

SEQ ID NO: 27777 - DNA, 15 bp, Homo sapiens
tgctgtgccgggtgt

SEQ ID NO: 27778 - DNA, 15 bp, Homo sapiens
ctgctgtgccgggtg

SEQ ID NO: 27779 - DNA, 15 bp, Homo sapiens
cctgctgtgccgggt

SEQ ID NO: 27780 - DNA, 15 bp, Homo sapiens
tcctgctgtgccggg

SEQ ID NO: 27781 - DNA, 15 bp, Homo sapiens
ctcctgctgtgccgg

SEQ ID NO: 27782 - DNA, 15 bp, Homo sapiens
cctcctgctgtgccg

SEQ ID NO: 27783 - DNA, 15 bp, Homo sapiens
tcctcctgctgtgcc

SEQ ID NO: 27784 - DNA, 15 bp, Homo sapiens
ttcctcctgctgtgc

SEQ ID NO: 27785 - DNA, 15 bp, Homo sapiens
tttcctcctgctgtg

SEQ ID NO: 27786 - DNA, 15 bp, Homo sapiens
ttttcctcctgctgt

SEQ ID NO: 27787 - DNA, 15 bp, Homo sapiens
cttttcctcctgctg

SEQ ID NO: 27788 - DNA, 15 bp, Homo sapiens
ccttttcctcctgct

SEQ ID NO: 27789 - DNA, 15 bp, Homo sapiens
gccttttcctcctgc

SEQ ID NO: 27790 - DNA, 15 bp, Homo sapiens
agccttttcctcctg

SEQ ID NO: 27791 - DNA, 15 bp, Homo sapiens
aagccttttcctcct

SEQ ID NO: 27792 - DNA, 15 bp, Homo sapiens
taagccttttcctcc

SEQ ID NO: 27793 - DNA, 15 bp, Homo sapiens
ttaagccttttcctc

SEQ ID NO: 27794 - DNA, 15 bp, Homo sapiens
tttaagccttttcct

SEQ ID NO: 27795 - DNA, 15 bp, Homo sapiens
ttttaagccttttcc

SEQ ID NO: 27796 - DNA, 15 bp, Homo sapiens
tttttaagccttttc

SEQ ID NO: 27797 - DNA, 15 bp, Homo sapiens
atttttaagcctttt

SEQ ID NO: 27798 - DNA, 15 bp, Homo sapiens
gatttttaagccttt

SEQ ID NO: 27799 - DNA, 15 bp, Homo sapiens
agatttttaagcctt

SEQ ID NO: 27800 - DNA, 15 bp, Homo sapiens
gagatttttaagcct

SEQ ID NO: 27801 - DNA, 15 bp, Homo sapiens
agagatttttaagcc

SEQ ID NO: 27802 - DNA, 15 bp, Homo sapiens
tagagatttttaagc

SEQ ID NO: 27803 - DNA, 15 bp, Homo sapiens
ttagagatttttaag

SEQ ID NO: 27804 - DNA, 15 bp, Homo sapiens
attagagatttttaa

SEQ ID NO: 27805 - DNA, 15 bp, Homo sapiens
aattagagattttta

SEQ ID NO: 27806 - DNA, 15 bp, Homo sapiens
taattagagattttt

SEQ ID NO: 27807 - DNA, 15 bp, Homo sapiens
ttaattagagatttt

SEQ ID NO: 27808 - DNA, 15 bp, Homo sapiens
cttaattagagattt

SEQ ID NO: 27809 - DNA, 15 bp, Homo sapiens
acttaattagagatt

SEQ ID NO: 27810 - DNA, 15 bp, Homo sapiens
cacttaattagagat

SEQ ID NO: 27811 - DNA, 15 bp, Homo sapiens
tcacttaattagaga

SEQ ID NO: 27812 - DNA, 15 bp, Homo sapiens
atcacttaattagag

SEQ ID NO: 27813 - DNA, 15 bp, Homo sapiens
tatcacttaattaga

SEQ ID NO: 27814 - DNA, 15 bp, Homo sapiens
gtatcacttaattag

SEQ ID NO: 27815 - DNA, 15 bp, Homo sapiens
agtatcacttaatta

SEQ ID NO: 27816 - DNA, 15 bp, Homo sapiens
aagtatcacttaatt

SEQ ID NO: 27817 - DNA, 15 bp, Homo sapiens
caagtatcacttaat

SEQ ID NO: 27818 - DNA, 15 bp, Homo sapiens
tcaagtatcacttaa

SEQ ID NO: 27819 - DNA, 15 bp, Homo sapiens
atcaagtatcactta

SEQ ID NO: 27820 - DNA, 15 bp, Homo sapiens
tatcaagtatcactt

SEQ ID NO: 27821 - DNA, 15 bp, Homo sapiens
atatcaagtatcact

SEQ ID NO: 27822 - DNA, 15 bp, Homo sapiens
aatatcaagtatcac

SEQ ID NO: 27823 - DNA, 15 bp, Homo sapiens
caatatcaagtatca

SEQ ID NO: 27824 - DNA, 15 bp, Homo sapiens
gcaatatcaagtatc

SEQ ID NO: 27825 - DNA, 15 bp, Homo sapiens
agcaatatcaagtat

SEQ ID NO: 27826 - DNA, 15 bp, Homo sapiens
gagcaatatcaagta

SEQ ID NO: 27827 - DNA, 15 bp, Homo sapiens
agagcaatatcaagt

SEQ ID NO: 27828 - DNA, 15 bp, Homo sapiens
tagagcaatatcaag

SEQ ID NO: 27829 - DNA, 15 bp, Homo sapiens
ctagagcaatatcaa

SEQ ID NO: 27830 - DNA, 15 bp, Homo sapiens
tctagagcaatatca

SEQ ID NO: 27831 - DNA, 15 bp, Homo sapiens
gtctagagcaatatc

SEQ ID NO: 27832 - DNA, 15 bp, Homo sapiens
cgtctagagcaatat

SEQ ID NO: 27833 - DNA, 15 bp, Homo sapiens
ccgtctagagcaata

SEQ ID NO: 27834 - DNA, 15 bp, Homo sapiens
accgtctagagcaat

SEQ ID NO: 27835 - DNA, 15 bp, Homo sapiens
aaccgtctagagcaa

SEQ ID NO: 27836 - DNA, 15 bp, Homo sapiens
aaaccgtctagagca

SEQ ID NO: 27837 - DNA, 15 bp, Homo sapiens
gaaaccgtctagagc

SEQ ID NO: 27838 - DNA, 15 bp, Homo sapiens
agaaaccgtctagag

SEQ ID NO: 27839 - DNA, 15 bp, Homo sapiens
aagaaaccgtctaga

SEQ ID NO: 27840 - DNA, 15 bp, Homo sapiens
gaagaaaccgtctag

SEQ ID NO: 27841 - DNA, 15 bp, Homo sapiens
ggaagaaaccgtcta

SEQ ID NO: 27842 - DNA, 15 bp, Homo sapiens
tggaagaaaccgtct

SEQ ID NO: 27843 - DNA, 15 bp, Homo sapiens
gtggaagaaaccgtc

SEQ ID NO: 27844 - DNA, 15 bp, Homo sapiens
agtggaagaaaccgt

SEQ ID NO: 27845 - DNA, 15 bp, Homo sapiens
aagtggaagaaaccg

SEQ ID NO: 27846 - DNA, 15 bp, Homo sapiens
gaagtggaagaaacc

SEQ ID NO: 27847 - DNA, 15 bp, Homo sapiens
ggaagtggaagaaac

SEQ ID NO: 27848 - DNA, 15 bp, Homo sapiens
aggaagtggaagaaa

SEQ ID NO: 27849 - DNA, 15 bp, Homo sapiens
aaggaagtggaagaa

SEQ ID NO: 27850 - DNA, 15 bp, Homo sapiens
taaggaagtggaaga

SEQ ID NO: 27851 - DNA, 15 bp, Homo sapiens
gtaaggaagtggaag

SEQ ID NO: 27852 - DNA, 15 bp, Homo sapiens
cgtaaggaagtggaa

SEQ ID NO: 27853 - DNA, 15 bp, Homo sapiens
ccgtaaggaagtgga

SEQ ID NO: 27854 - DNA, 15 bp, Homo sapiens
accgtaaggaagtgg

SEQ ID NO: 27855 - DNA, 15 bp, Homo sapiens
aaccgtaaggaagtg

SEQ ID NO: 27856 - DNA, 15 bp, Homo sapiens
aaaccgtaaggaagt

SEQ ID NO: 27857 - DNA, 15 bp, Homo sapiens
caaaccgtaaggaag

SEQ ID NO: 27858 - DNA, 15 bp, Homo sapiens
acaaaccgtaaggaa

SEQ ID NO: 27859 - DNA, 15 bp, Homo sapiens
gacaaaccgtaagga

SEQ ID NO: 27860 - DNA, 15 bp, Homo sapiens
tgacaaaccgtaagg

SEQ ID NO: 27861 - DNA, 15 bp, Homo sapiens
gtgacaaaccgtaag

SEQ ID NO: 27862 - DNA, 15 bp, Homo sapiens
cgtgacaaaccgtaa

SEQ ID NO: 27863 - DNA, 15 bp, Homo sapiens
acgtgacaaaccgta

SEQ ID NO: 27864 - DNA, 15 bp, Homo sapiens
cacgtgacaaaccgt

SEQ ID NO: 27865 - DNA, 15 bp, Homo sapiens
gcacgtgacaaaccg

SEQ ID NO: 27866 - DNA, 15 bp, Homo sapiens
cgcacgtgacaaacc

SEQ ID NO: 27867 - DNA, 15 bp, Homo sapiens
ccgcacgtgacaaac

SEQ ID NO: 27868 - DNA, 15 bp, Homo sapiens
tccgcacgtgacaaa

SEQ ID NO: 27869 - DNA, 15 bp, Homo sapiens
atccgcacgtgacaa

SEQ ID NO: 27870 - DNA, 15 bp, Homo sapiens
catccgcacgtgaca

SEQ ID NO: 27871 - DNA, 15 bp, Homo sapiens
ccatccgcacgtgac

SEQ ID NO: 27872 - DNA, 15 bp, Homo sapiens
gccatccgcacgtga

SEQ ID NO: 27873 - DNA, 15 bp, Homo sapiens
agccatccgcacgtg

SEQ ID NO: 27874 - DNA, 15 bp, Homo sapiens
aagccatccgcacgt

SEQ ID NO: 27875 - DNA, 15 bp, Homo sapiens
aaagccatccgcacg

SEQ ID NO: 27876 - DNA, 15 bp, Homo sapiens
caaagccatccgcac

SEQ ID NO: 27877 - DNA, 15 bp, Homo sapiens
gcaaagccatccgca

SEQ ID NO: 27878 - DNA, 15 bp, Homo sapiens
ggcaaagccatccgc

SEQ ID NO: 27879 - DNA, 15 bp, Homo sapiens
tggcaaagccatccg

SEQ ID NO: 27880 - DNA, 15 bp, Homo sapiens
ttggcaaagccatcc

SEQ ID NO: 27881 - DNA, 15 bp, Homo sapiens
tttggcaaagccatc

SEQ ID NO: 27882 - DNA, 15 bp, Homo sapiens
ctttggcaaagccat

SEQ ID NO: 27883 - DNA, 15 bp, Homo sapiens
gctttggcaaagcca

SEQ ID NO: 27884 - DNA, 15 bp, Homo sapiens
ggctttggcaaagcc

SEQ ID NO: 27885 - DNA, 15 bp, Homo sapiens
tggctttggcaaagc

SEQ ID NO: 27886 - DNA, 15 bp, Homo sapiens
atggctttggcaaag

SEQ ID NO: 27887 - DNA, 15 bp, Homo sapiens
gatggctttggcaaa

SEQ ID NO: 27888 - DNA, 15 bp, Homo sapiens
ggatggctttggcaa

SEQ ID NO: 27889 - DNA, 15 bp, Homo sapiens
aggatggctttggca

SEQ ID NO: 27890 - DNA, 15 bp, Homo sapiens
caggatggctttggc

SEQ ID NO: 27891 - DNA, 15 bp, Homo sapiens
acaggatggctttgg

SEQ ID NO: 27892 - DNA, 15 bp, Homo sapiens
aacaggatggctttg

SEQ ID NO: 27893 - DNA, 15 bp, Homo sapiens
taacaggatggcttt

SEQ ID NO: 27894 - DNA, 15 bp, Homo sapiens
ttaacaggatggctt

SEQ ID NO: 27895 - DNA, 15 bp, Homo sapiens
attaacaggatggct

SEQ ID NO: 27896 - DNA, 15 bp, Homo sapiens
tattaacaggatggc

SEQ ID NO: 27897 - DNA, 15 bp, Homo sapiens
ctattaacaggatgg

SEQ ID NO: 27898 - DNA, 15 bp, Homo sapiens
actattaacaggatg

SEQ ID NO: 27899 - DNA, 15 bp, Homo sapiens
aactattaacaggat

SEQ ID NO: 27900 - DNA, 15 bp, Homo sapiens
caactattaacagga

SEQ ID NO: 27901 - DNA, 15 bp, Homo sapiens
tcaactattaacagg

SEQ ID NO: 27902 - DNA, 15 bp, Homo sapiens
atcaactattaacag

SEQ ID NO: 27903 - DNA, 15 bp, Homo sapiens
gatcaactattaaca

SEQ ID NO: 27904 - DNA, 15 bp, Homo sapiens
tgatcaactattaac

SEQ ID NO: 27905 - DNA, 15 bp, Homo sapiens
gtgatcaactattaa

SEQ ID NO: 27906 - DNA, 15 bp, Homo sapiens
tgtgatcaactatta

SEQ ID NO: 27907 - DNA, 15 bp, Homo sapiens
atgtgatcaactatt

SEQ ID NO: 27908 - DNA, 15 bp, Homo sapiens
catgtgatcaactat

SEQ ID NO: 27909 - DNA, 15 bp, Homo sapiens
acatgtgatcaacta

SEQ ID NO: 27910 - DNA, 15 bp, Homo sapiens
aacatgtgatcaact

SEQ ID NO: 27911 - DNA, 15 bp, Homo sapiens
caacatgtgatcaac

SEQ ID NO: 27912 - DNA, 15 bp, Homo sapiens
tcaacatgtgatcaa

SEQ ID NO: 27913 - DNA, 15 bp, Homo sapiens
atcaacatgtgatca

SEQ ID NO: 27914 - DNA, 15 bp, Homo sapiens
catcaacatgtgatc

SEQ ID NO: 27915 - DNA, 15 bp, Homo sapiens
tcatcaacatgtgat

SEQ ID NO: 27916 - DNA, 15 bp, Homo sapiens
ctcatcaacatgtga

SEQ ID NO: 27917 - DNA, 15 bp, Homo sapiens
tctcatcaacatgtg

SEQ ID NO: 27918 - DNA, 15 bp, Homo sapiens
ttctcatcaacatgt

SEQ ID NO: 27919 - DNA, 15 bp, Homo sapiens
gttctcatcaacatg

SEQ ID NO: 27920 - DNA, 15 bp, Homo sapiens
ggttctcatcaacat

SEQ ID NO: 27921 - DNA, 15 bp, Homo sapiens
aggttctcatcaaca

SEQ ID NO: 27922 - DNA, 15 bp, Homo sapiens
aaggttctcatcaac

SEQ ID NO: 27923 - DNA, 15 bp, Homo sapiens
aaaggttctcatcaa

SEQ ID NO: 27924 - DNA, 15 bp, Homo sapiens
aaaaggttctcatca

SEQ ID NO: 27925 - DNA, 15 bp, Homo sapiens
gaaaaggttctcatc

SEQ ID NO: 27926 - DNA, 15 bp, Homo sapiens
agaaaaggttctcat

SEQ ID NO: 27927 - DNA, 15 bp, Homo sapiens
aagaaaaggttctca

SEQ ID NO: 27928 - DNA, 15 bp, Homo sapiens
gaagaaaaggttctc

SEQ ID NO: 27929 - DNA, 15 bp, Homo sapiens
agaagaaaaggttct

SEQ ID NO: 27930 - DNA, 15 bp, Homo sapiens
tagaagaaaaggttc

SEQ ID NO: 27931 - DNA, 15 bp, Homo sapiens
gtagaagaaaaggtt

SEQ ID NO: 27932 - DNA, 15 bp, Homo sapiens
cgtagaagaaaaggt

SEQ ID NO: 27933 - DNA, 15 bp, Homo sapiens
tcgtagaagaaaagg

SEQ ID NO: 27934 - DNA, 15 bp, Homo sapiens
ctcgtagaagaaaag

SEQ ID NO: 27935 - DNA, 15 bp, Homo sapiens
tctcgtagaagaaaa

SEQ ID NO: 27936 - DNA, 15 bp, Homo sapiens
ctctcgtagaagaaa

SEQ ID NO: 27937 - DNA, 15 bp, Homo sapiens
cctctcgtagaagaa

SEQ ID NO: 27938 - DNA, 15 bp, Homo sapiens
tcctctcgtagaaga

SEQ ID NO: 27939 - DNA, 15 bp, Homo sapiens
atcctctcgtagaag

SEQ ID NO: 27940 - DNA, 15 bp, Homo sapiens
aatcctctcgtagaa

SEQ ID NO: 27941 - DNA, 15 bp, Homo sapiens
taatcctctcgtaga

SEQ ID NO: 27942 - DNA, 15 bp, Homo sapiens
gtaatcctctcgtag

SEQ ID NO: 27943 - DNA, 15 bp, Homo sapiens
ggtaatcctctcgta

SEQ ID NO: 27944 - DNA, 15 bp, Homo sapiens
gggtaatcctctcgt

SEQ ID NO: 27945 - DNA, 15 bp, Homo sapiens
tgggtaatcctctcg

SEQ ID NO: 27946 - DNA, 15 bp, Homo sapiens
atgggtaatcctctc

SEQ ID NO: 27947 - DNA, 15 bp, Homo sapiens
aatgggtaatcctct

SEQ ID NO: 27948 - DNA, 15 bp, Homo sapiens
taatgggtaatcctc

SEQ ID NO: 27949 - DNA, 15 bp, Homo sapiens
gtaatgggtaatcct

SEQ ID NO: 27950 - DNA, 15 bp, Homo sapiens
ggtaatgggtaatcc

SEQ ID NO: 27951 - DNA, 15 bp, Homo sapiens
cggtaatgggtaatc

SEQ ID NO: 27952 - DNA, 15 bp, Homo sapiens
ccggtaatgggtaat

SEQ ID NO: 27953 - DNA, 15 bp, Homo sapiens
accggtaatgggtaa

SEQ ID NO: 27954 - DNA, 15 bp, Homo sapiens
caccggtaatgggta

SEQ ID NO: 27955 - DNA, 15 bp, Homo sapiens
tcaccggtaatgggt

SEQ ID NO: 27956 - DNA, 15 bp, Homo sapiens
atcaccggtaatggg

SEQ ID NO: 27957 - DNA, 15 bp, Homo sapiens
tatcaccggtaatgg

SEQ ID NO: 27958 - DNA, 15 bp, Homo sapiens
atatcaccggtaatg

SEQ ID NO: 27959 - DNA, 15 bp, Homo sapiens
catatcaccggtaat

SEQ ID NO: 27960 - DNA, 15 bp, Homo sapiens
gcatatcaccggtaa

SEQ ID NO: 27961 - DNA, 15 bp, Homo sapiens
tgcatatcaccggta

SEQ ID NO: 27962 - DNA, 15 bp, Homo sapiens
gtgcatatcaccggt

SEQ ID NO: 27963 - DNA, 15 bp, Homo sapiens
agtgcatatcaccgg

SEQ ID NO: 27964 - DNA, 15 bp, Homo sapiens
aagtgcatatcaccg

SEQ ID NO: 27965 - DNA, 15 bp, Homo sapiens
gaagtgcatatcacc

SEQ ID NO: 27966 - DNA, 15 bp, Homo sapiens
agaagtgcatatcac

SEQ ID NO: 27967 - DNA, 15 bp, Homo sapiens
cagaagtgcatatca

SEQ ID NO: 27968 - DNA, 15 bp, Homo sapiens
tcagaagtgcatatc

SEQ ID NO: 27969 - DNA, 15 bp, Homo sapiens
gtcagaagtgcatat

SEQ ID NO: 27970 - DNA, 15 bp, Homo sapiens
agtcagaagtgcata

SEQ ID NO: 27971 - DNA, 15 bp, Homo sapiens
aagtcagaagtgcat

SEQ ID NO: 27972 - DNA, 15 bp, Homo sapiens
taagtcagaagtgca

SEQ ID NO: 27973 - DNA, 15 bp, Homo sapiens
ataagtcagaagtgc

SEQ ID NO: 27974 - DNA, 15 bp, Homo sapiens
aataagtcagaagtg

SEQ ID NO: 27975 - DNA, 15 bp, Homo sapiens
aaataagtcagaagt

SEQ ID NO: 27976 - DNA, 15 bp, Homo sapiens
gaaataagtcagaag

SEQ ID NO: 27977 - DNA, 15 bp, Homo sapiens
agaaataagtcagaa

SEQ ID NO: 27978 - DNA, 15 bp, Homo sapiens
gagaaataagtcaga

SEQ ID NO: 27979 - DNA, 15 bp, Homo sapiens
agagaaataagtcag

SEQ ID NO: 27980 - DNA, 15 bp, Homo sapiens
gagagaaataagtca

SEQ ID NO: 27981 - DNA, 15 bp, Homo sapiens
ggagagaaataagtc

SEQ ID NO: 27982 - DNA, 15 bp, Homo sapiens
gggagagaaataagt

SEQ ID NO: 27983 - DNA, 15 bp, Homo sapiens
ggggagagaaataag

SEQ ID NO: 27984 - DNA, 15 bp, Homo sapiens
gggggagagaaataa

SEQ ID NO: 27985 - DNA, 15 bp, Homo sapiens
ggggggagagaaata

SEQ ID NO: 27986 - DNA, 15 bp, Homo sapiens
tggggggagagaaat

SEQ ID NO: 27987 - DNA, 15 bp, Homo sapiens
ttggggggagagaaa

SEQ ID NO: 27988 - DNA, 15 bp, Homo sapiens
gttggggggagagaa

SEQ ID NO: 27989 - DNA, 15 bp, Homo sapiens
ggttggggggagaga

SEQ ID NO: 27990 - DNA, 15 bp, Homo sapiens
gggttggggggagag

SEQ ID NO: 27991 - DNA, 15 bp, Homo sapiens
ggggttggggggaga

SEQ ID NO: 27992 - DNA, 15 bp, Homo sapiens
tggggttggggggag

SEQ ID NO: 27993 - DNA, 15 bp, Homo sapiens
gtggggttgggggga

SEQ ID NO: 27994 - DNA, 15 bp, Homo sapiens
ggtggggttgggggg

SEQ ID NO: 27995 - DNA, 15 bp, Homo sapiens
gggtggggttggggg

SEQ ID NO: 27996 - DNA, 15 bp, Homo sapiens
ggggtggggttgggg

SEQ ID NO: 27997 - DNA, 15 bp, Homo sapiens
gggggtggggttggg

SEQ ID NO: 27998 - DNA, 15 bp, Homo sapiens
ggggggtggggttgg

SEQ ID NO: 27999 - DNA, 15 bp, Homo sapiens
tggggggtggggttg

SEQ ID NO: 28000 - DNA, 15 bp, Homo sapiens
atggggggtggggtt

SEQ ID NO: 28001 - DNA, 15 bp, Homo sapiens
gatggggggtggggt

SEQ ID NO: 28002 - DNA, 15 bp, Homo sapiens
agatggggggtgggg

SEQ ID NO: 28003 - DNA, 15 bp, Homo sapiens
tagatggggggtggg

SEQ ID NO: 28004 - DNA, 15 bp, Homo sapiens
gtagatggggggtgg

SEQ ID NO: 28005 - DNA, 15 bp, Homo sapiens
tgtagatggggggtg

SEQ ID NO: 28006 - DNA, 15 bp, Homo sapiens
gtgtagatggggggt

SEQ ID NO: 28007 - DNA, 15 bp, Homo sapiens
ggtgtagatgggggg

SEQ ID NO: 28008 - DNA, 15 bp, Homo sapiens
aggtgtagatggggg

SEQ ID NO: 28009 - DNA, 15 bp, Homo sapiens
taggtgtagatgggg

SEQ ID NO: 28010 - DNA, 15 bp, Homo sapiens
ttaggtgtagatggg

SEQ ID NO: 28011 - DNA, 15 bp, Homo sapiens
tttaggtgtagatgg

SEQ ID NO: 28012 - DNA, 15 bp, Homo sapiens
gtttaggtgtagatg

SEQ ID NO: 28013 - DNA, 15 bp, Homo sapiens
agtttaggtgtagat

SEQ ID NO: 28014 - DNA, 15 bp, Homo sapiens
gagtttaggtgtaga

SEQ ID NO: 28015 - DNA, 15 bp, Homo sapiens
ggagtttaggtgtag

SEQ ID NO: 28016 - DNA, 15 bp, Homo sapiens
gggagtttaggtgta

SEQ ID NO: 28017 - DNA, 15 bp, Homo sapiens
tgggagtttaggtgt

SEQ ID NO: 28018 - DNA, 15 bp, Homo sapiens
ctgggagtttaggtg

SEQ ID NO: 28019 - DNA, 15 bp, Homo sapiens
actgggagtttaggt

SEQ ID NO: 28020 - DNA, 15 bp, Homo sapiens
gactgggagtttagg

SEQ ID NO: 28021 - DNA, 15 bp, Homo sapiens
agactgggagtttag

SEQ ID NO: 28022 - DNA, 15 bp, Homo sapiens
aagactgggagttta

SEQ ID NO: 28023 - DNA, 15 bp, Homo sapiens
aaagactgggagttt

SEQ ID NO: 28024 - DNA, 15 bp, Homo sapiens
taaagactgggagtt

SEQ ID NO: 28025 - DNA, 15 bp, Homo sapiens
gtaaagactgggagt

SEQ ID NO: 28026 - DNA, 15 bp, Homo sapiens
ggtaaagactgggag

SEQ ID NO: 28027 - DNA, 15 bp, Homo sapiens
gggtaaagactggga

SEQ ID NO: 28028 - DNA, 15 bp, Homo sapiens
ggggtaaagactggg

SEQ ID NO: 28029 - DNA, 15 bp, Homo sapiens
tggggtaaagactgg

SEQ ID NO: 28030 - DNA, 15 bp, Homo sapiens
gtggggtaaagactg

SEQ ID NO: 28031 - DNA, 15 bp, Homo sapiens
ggtggggtaaagact

SEQ ID NO: 28032 - DNA, 15 bp, Homo sapiens
gggtggggtaaagac

SEQ ID NO: 28033 - DNA, 15 bp, Homo sapiens
agggtggggtaaaga

SEQ ID NO: 28034 - DNA, 15 bp, Homo sapiens
aagggtggggtaaag

SEQ ID NO: 28035 - DNA, 15 bp, Homo sapiens
taagggtggggtaaa

SEQ ID NO: 28036 - DNA, 15 bp, Homo sapiens
gtaagggtggggtaa

SEQ ID NO: 28037 - DNA, 15 bp, Homo sapiens
ggtaagggtggggta

SEQ ID NO: 28038 - DNA, 15 bp, Homo sapiens
gggtaagggtggggt

SEQ ID NO: 28039 - DNA, 15 bp, Homo sapiens
ggggtaagggtgggg

SEQ ID NO: 28040 - DNA, 15 bp, Homo sapiens
gggggtaagggtggg

SEQ ID NO: 28041 - DNA, 15 bp, Homo sapiens
tgggggtaagggtgg

SEQ ID NO: 28042 - DNA, 15 bp, Homo sapiens
gtgggggtaagggtg

SEQ ID NO: 28043 - DNA, 15 bp, Homo sapiens
agtgggggtaagggt

SEQ ID NO: 28044 - DNA, 15 bp, Homo sapiens
gagtgggggtaaggg

SEQ ID NO: 28045 - DNA, 15 bp, Homo sapiens
ggagtgggggtaagg

SEQ ID NO: 28046 - DNA, 15 bp, Homo sapiens
tggagtgggggtaag

SEQ ID NO: 28047 - DNA, 15 bp, Homo sapiens
gtggagtgggggtaa

SEQ ID NO: 28048 - DNA, 15 bp, Homo sapiens
ggtggagtgggggta

SEQ ID NO: 28049 - DNA, 15 bp, Homo sapiens
gggtggagtgggggt

SEQ ID NO: 28050 - DNA, 15 bp, Homo sapiens
ggggtggagtggggg

SEQ ID NO: 28051 - DNA, 15 bp, Homo sapiens
gggggtggagtgggg

SEQ ID NO: 28052 - DNA, 15 bp, Homo sapiens
agggggtggagtggg

SEQ ID NO: 28053 - DNA, 15 bp, Homo sapiens
tagggggtggagtgg

SEQ ID NO: 28054 - DNA, 15 bp, Homo sapiens
ttagggggtggagtg

SEQ ID NO: 28055 - DNA, 15 bp, Homo sapiens
gttagggggtggagt

SEQ ID NO: 28056 - DNA, 15 bp, Homo sapiens
ggttagggggtggag

SEQ ID NO: 28057 - DNA, 15 bp, Homo sapiens
gggttagggggtgga

SEQ ID NO: 28058 - DNA, 15 bp, Homo sapiens
ggggttagggggtgg

SEQ ID NO: 28059 - DNA, 15 bp, Homo sapiens
tggggttagggggtg

SEQ ID NO: 28060 - DNA, 15 bp, Homo sapiens
ttggggttagggggt

SEQ ID NO: 28061 - DNA, 15 bp, Homo sapiens
gttggggttaggggg

SEQ ID NO: 28062 - DNA, 15 bp, Homo sapiens
ggttggggttagggg

SEQ ID NO: 28063 - DNA, 15 bp, Homo sapiens
aggttggggttaggg

SEQ ID NO: 28064 - DNA, 15 bp, Homo sapiens
gaggttggggttagg

SEQ ID NO: 28065 - DNA, 15 bp, Homo sapiens
agaggttggggttag

SEQ ID NO: 28066 - DNA, 15 bp, Homo sapiens
tagaggttggggtta

SEQ ID NO: 28067 - DNA, 15 bp, Homo sapiens
ttagaggttggggtt

SEQ ID NO: 28068 - DNA, 15 bp, Homo sapiens
gttagaggttggggt

SEQ ID NO: 28069 - DNA, 15 bp, Homo sapiens
tgttagaggttgggg

SEQ ID NO: 28070 - DNA, 15 bp, Homo sapiens
ctgttagaggttggg

SEQ ID NO: 28071 - DNA, 15 bp, Homo sapiens
gctgttagaggttgg

SEQ ID NO: 28072 - DNA, 15 bp, Homo sapiens
tgctgttagaggttg

SEQ ID NO: 28073 - DNA, 15 bp, Homo sapiens
atgctgttagaggtt

SEQ ID NO: 28074 - DNA, 15 bp, Homo sapiens
aatgctgttagaggt

SEQ ID NO: 28075 - DNA, 15 bp, Homo sapiens
taatgctgttagagg

SEQ ID NO: 28076 - DNA, 15 bp, Homo sapiens
ataatgctgttagag

SEQ ID NO: 28077 - DNA, 15 bp, Homo sapiens
aataatgctgttaga

SEQ ID NO: 28078 - DNA, 15 bp, Homo sapiens
caataatgctgttag

SEQ ID NO: 28079 - DNA, 15 bp, Homo sapiens
acaataatgctgtta

SEQ ID NO: 28080 - DNA, 15 bp, Homo sapiens
aacaataatgctgtt

SEQ ID NO: 28081 - DNA, 15 bp, Homo sapiens
aaacaataatgctgt

SEQ ID NO: 28082 - DNA, 15 bp, Homo sapiens
aaaacaataatgctg

SEQ ID NO: 28083 - DNA, 15 bp, Homo sapiens
aaaaacaataatgct

SEQ ID NO: 28084 - DNA, 15 bp, Homo sapiens
taaaaacaataatgc

SEQ ID NO: 28085 - DNA, 15 bp, Homo sapiens
ctaaaaacaataatg

SEQ ID NO: 28086 - DNA, 15 bp, Homo sapiens
tctaaaaacaataat

SEQ ID NO: 28087 - DNA, 15 bp, Homo sapiens
atctaaaaacaataa

SEQ ID NO: 28088 - DNA, 15 bp, Homo sapiens
catctaaaaacaata

SEQ ID NO: 28089 - DNA, 15 bp, Homo sapiens
ccatctaaaaacaat

SEQ ID NO: 28090 - DNA, 15 bp, Homo sapiens
tccatctaaaaacaa

SEQ ID NO: 28091 - DNA, 15 bp, Homo sapiens
ttccatctaaaaaca

SEQ ID NO: 28092 - DNA, 15 bp, Homo sapiens
tttccatctaaaaac

SEQ ID NO: 28093 - DNA, 15 bp, Homo sapiens
atttccatctaaaaa

SEQ ID NO: 28094 - DNA, 15 bp, Homo sapiens
aatttccatctaaaa

SEQ ID NO: 28095 - DNA, 15 bp, Homo sapiens
taatttccatctaaa

SEQ ID NO: 28096 - DNA, 15 bp, Homo sapiens
ttaatttccatctaa

SEQ ID NO: 28097 - DNA, 15 bp, Homo sapiens
gttaatttccatcta

SEQ ID NO: 28098 - DNA, 15 bp, Homo sapiens
ggttaatttccatct

SEQ ID NO: 28099 - DNA, 15 bp, Homo sapiens
gggttaatttccatc

SEQ ID NO: 28100 - DNA, 15 bp, Homo sapiens
ggggttaatttccat

SEQ ID NO: 28101 - DNA, 15 bp, Homo sapiens
gggggttaatttcca

SEQ ID NO: 28102 - DNA, 15 bp, Homo sapiens
agggggttaatttcc

SEQ ID NO: 28103 - DNA, 15 bp, Homo sapiens
aagggggttaatttc

SEQ ID NO: 28104 - DNA, 15 bp, Homo sapiens
caagggggttaattt

SEQ ID NO: 28105 - DNA, 15 bp, Homo sapiens
gcaagggggttaatt

SEQ ID NO: 28106 - DNA, 15 bp, Homo sapiens
tgcaagggggttaat

SEQ ID NO: 28107 - DNA, 15 bp, Homo sapiens
ttgcaagggggttaa

SEQ ID NO: 28108 - DNA, 15 bp, Homo sapiens
tttgcaagggggtta

SEQ ID NO: 28109 - DNA, 15 bp, Homo sapiens
atttgcaagggggtt

SEQ ID NO: 28110 - DNA, 15 bp, Homo sapiens
catttgcaagggggt

SEQ ID NO: 28111 - DNA, 15 bp, Homo sapiens
acatttgcaaggggg

SEQ ID NO: 28112 - DNA, 15 bp, Homo sapiens
gacatttgcaagggg

SEQ ID NO: 28113 - DNA, 15 bp, Homo sapiens
tgacatttgcaaggg

SEQ ID NO: 28114 - DNA, 15 bp, Homo sapiens
ttgacatttgcaagg

SEQ ID NO: 28115 - DNA, 15 bp, Homo sapiens
attgacatttgcaag

SEQ ID NO: 28116 - DNA, 15 bp, Homo sapiens
aattgacatttgcaa

SEQ ID NO: 28117 - DNA, 15 bp, Homo sapiens
taattgacatttgca

SEQ ID NO: 28118 - DNA, 15 bp, Homo sapiens
gtaattgacatttgc

SEQ ID NO: 28119 - DNA, 15 bp, Homo sapiens
tgtaattgacatttg

SEQ ID NO: 28120 - DNA, 15 bp, Homo sapiens
atgtaattgacattt

SEQ ID NO: 28121 - DNA, 15 bp, Homo sapiens
catgtaattgacatt

SEQ ID NO: 28122 - DNA, 15 bp, Homo sapiens
gcatgtaattgacat

SEQ ID NO: 28123 - DNA, 15 bp, Homo sapiens
ggcatgtaattgaca

SEQ ID NO: 28124 - DNA, 15 bp, Homo sapiens
gggcatgtaattgac

SEQ ID NO: 28125 - DNA, 15 bp, Homo sapiens
tgggcatgtaattga

SEQ ID NO: 28126 - DNA, 15 bp, Homo sapiens
gtgggcatgtaattg

SEQ ID NO: 28127 - DNA, 15 bp, Homo sapiens
tgtgggcatgtaatt

SEQ ID NO: 28128 - DNA, 15 bp, Homo sapiens
atgtgggcatgtaat

SEQ ID NO: 28129 - DNA, 15 bp, Homo sapiens
tatgtgggcatgtaa

SEQ ID NO: 28130 - DNA, 15 bp, Homo sapiens
atatgtgggcatgta

SEQ ID NO: 28131 - DNA, 15 bp, Homo sapiens
tatatgtgggcatgt

SEQ ID NO: 28132 - DNA, 15 bp, Homo sapiens
ttatatgtgggcatg

SEQ ID NO: 28133 - DNA, 15 bp, Homo sapiens
tttatatgtgggcat

SEQ ID NO: 28134 - DNA, 15 bp, Homo sapiens
atttatatgtgggca

SEQ ID NO: 28135 - DNA, 15 bp, Homo sapiens
gatttatatgtgggc

SEQ ID NO: 28136 - DNA, 15 bp, Homo sapiens
tgatttatatgtggg

SEQ ID NO: 28137 - DNA, 15 bp, Homo sapiens
atgatttatatgtgg

SEQ ID NO: 28138 - DNA, 15 bp, Homo sapiens
tatgatttatatgtg

SEQ ID NO: 28139 - DNA, 15 bp, Homo sapiens
ctatgatttatatgt

SEQ ID NO: 28140 - DNA, 15 bp, Homo sapiens
tctatgatttatatg

SEQ ID NO: 28141 - DNA, 15 bp, Homo sapiens
ttctatgatttatat

SEQ ID NO: 28142 - DNA, 15 bp, Homo sapiens
attctatgatttata

SEQ ID NO: 28143 - DNA, 15 bp, Homo sapiens
tattctatgatttat

SEQ ID NO: 28144 - DNA, 15 bp, Homo sapiens
atattctatgattta

SEQ ID NO: 28145 - DNA, 15 bp, Homo sapiens
catattctatgattt

SEQ ID NO: 28146 - DNA, 15 bp, Homo sapiens
tcatattctatgatt

SEQ ID NO: 28147 - DNA, 15 bp, Homo sapiens
atcatattctatgat

SEQ ID NO: 28148 - DNA, 15 bp, Homo sapiens
gatcatattctatga

SEQ ID NO: 28149 - DNA, 15 bp, Homo sapiens
tgatcatattctatg

SEQ ID NO: 28150 - DNA, 15 bp, Homo sapiens
atgatcatattctat

SEQ ID NO: 28151 - DNA, 15 bp, Homo sapiens
tatgatcatattcta

SEQ ID NO: 28152 - DNA, 15 bp, Homo sapiens
gtatgatcatattct

SEQ ID NO: 28153 - DNA, 15 bp, Homo sapiens
tgtatgatcatattc

SEQ ID NO: 28154 - DNA, 15 bp, Homo sapiens
gtgtatgatcatatt

SEQ ID NO: 28155 - DNA, 15 bp, Homo sapiens
ggtgtatgatcatat

SEQ ID NO: 28156 - DNA, 15 bp, Homo sapiens
tggtgtatgatcata

SEQ ID NO: 28157 - DNA, 15 bp, Homo sapiens
atggtgtatgatcat

SEQ ID NO: 28158 - DNA, 15 bp, Homo sapiens
tatggtgtatgatca

SEQ ID NO: 28159 - DNA, 15 bp, Homo sapiens
gtatggtgtatgatc

SEQ ID NO: 28160 - DNA, 15 bp, Homo sapiens
tgtatggtgtatgat

SEQ ID NO: 28161 - DNA, 15 bp, Homo sapiens
gtgtatggtgtatga

SEQ ID NO: 28162 - DNA, 15 bp, Homo sapiens
tgtgtatggtgtatg

SEQ ID NO: 28163 - DNA, 15 bp, Homo sapiens
atgtgtatggtgtat

SEQ ID NO: 28164 - DNA, 15 bp, Homo sapiens
aatgtgtatggtgta

SEQ ID NO: 28165 - DNA, 15 bp, Homo sapiens
taatgtgtatggtgt

SEQ ID NO: 28166 - DNA, 15 bp, Homo sapiens
ttaatgtgtatggtg

SEQ ID NO: 28167 - DNA, 15 bp, Homo sapiens
cttaatgtgtatggt

SEQ ID NO: 28168 - DNA, 15 bp, Homo sapiens
ccttaatgtgtatgg

SEQ ID NO: 28169 - DNA, 15 bp, Homo sapiens
tccttaatgtgtatg

SEQ ID NO: 28170 - DNA, 15 bp, Homo sapiens
ttccttaatgtgtat

SEQ ID NO: 28171 - DNA, 15 bp, Homo sapiens
tttccttaatgtgta

SEQ ID NO: 28172 - DNA, 15 bp, Homo sapiens
ttttccttaatgtgt

SEQ ID NO: 28173 - DNA, 15 bp, Homo sapiens
cttttccttaatgtg

SEQ ID NO: 28174 - DNA, 15 bp, Homo sapiens
tcttttccttaatgt

SEQ ID NO: 28175 - DNA, 15 bp, Homo sapiens
ttcttttccttaatg

SEQ ID NO: 28176 - DNA, 15 bp, Homo sapiens
attcttttccttaat

SEQ ID NO: 28177 - DNA, 15 bp, Homo sapiens
tattcttttccttaa

SEQ ID NO: 28178 - DNA, 15 bp, Homo sapiens
ctattcttttcctta

SEQ ID NO: 28179 - DNA, 15 bp, Homo sapiens
tctattcttttcctt

SEQ ID NO: 28180 - DNA, 15 bp, Homo sapiens
ttctattcttttcct

SEQ ID NO: 28181 - DNA, 15 bp, Homo sapiens
attctattcttttcc

SEQ ID NO: 28182 - DNA, 15 bp, Homo sapiens
cattctattcttttc

SEQ ID NO: 28183 - DNA, 15 bp, Homo sapiens
gcattctattctttt

SEQ ID NO: 28184 - DNA, 15 bp, Homo sapiens
tgcattctattcttt

SEQ ID NO: 28185 - DNA, 15 bp, Homo sapiens
ttgcattctattctt

SEQ ID NO: 28186 - DNA, 15 bp, Homo sapiens
cttgcattctattct

SEQ ID NO: 28187 - DNA, 15 bp, Homo sapiens
tcttgcattctattc

SEQ ID NO: 28188 - DNA, 15 bp, Homo sapiens
gtcttgcattctatt

SEQ ID NO: 28189 - DNA, 15 bp, Homo sapiens
agtcttgcattctat

SEQ ID NO: 28190 - DNA, 15 bp, Homo sapiens
cagtcttgcattcta

SEQ ID NO: 28191 - DNA, 15 bp, Homo sapiens
gcagtcttgcattct

SEQ ID NO: 28192 - DNA, 15 bp, Homo sapiens
agcagtcttgcattc

SEQ ID NO: 28193 - DNA, 15 bp, Homo sapiens
cagcagtcttgcatt

SEQ ID NO: 28194 - DNA, 15 bp, Homo sapiens
tcagcagtcttgcat

SEQ ID NO: 28195 - DNA, 15 bp, Homo sapiens
ctcagcagtcttgca

SEQ ID NO: 28196 - DNA, 15 bp, Homo sapiens
tctcagcagtcttgc

SEQ ID NO: 28197 - DNA, 15 bp, Homo sapiens
ctctcagcagtcttg

SEQ ID NO: 28198 - DNA, 15 bp, Homo sapiens
tctctcagcagtctt

SEQ ID NO: 28199 - DNA, 15 bp, Homo sapiens
gtctctcagcagtct

SEQ ID NO: 28200 - DNA, 15 bp, Homo sapiens
tgtctctcagcagtc

SEQ ID NO: 28201 - DNA, 15 bp, Homo sapiens
ttgtctctcagcagt

SEQ ID NO: 28202 - DNA, 15 bp, Homo sapiens
cttgtctctcagcag

SEQ ID NO: 28203 - DNA, 15 bp, Homo sapiens
gcttgtctctcagca

SEQ ID NO: 28204 - DNA, 15 bp, Homo sapiens
tgcttgtctctcagc

SEQ ID NO: 28205 - DNA, 15 bp, Homo sapiens
atgcttgtctctcag

SEQ ID NO: 28206 - DNA, 15 bp, Homo sapiens
gatgcttgtctctca

SEQ ID NO: 28207 - DNA, 15 bp, Homo sapiens
tgatgcttgtctctc

SEQ ID NO: 28208 - DNA, 15 bp, Homo sapiens
ctgatgcttgtctct

SEQ ID NO: 28209 - DNA, 15 bp, Homo sapiens
gctgatgcttgtctc

SEQ ID NO: 28210 - DNA, 15 bp, Homo sapiens
ggctgatgcttgtct

SEQ ID NO: 28211 - DNA, 15 bp, Homo sapiens
aggctgatgcttgtc

SEQ ID NO: 28212 - DNA, 15 bp, Homo sapiens
aaggctgatgcttgt

SEQ ID NO: 28213 - DNA, 15 bp, Homo sapiens
caaggctgatgcttg

SEQ ID NO: 28214 - DNA, 15 bp, Homo sapiens
tcaaggctgatgctt

SEQ ID NO: 28215 - DNA, 15 bp, Homo sapiens
ttcaaggctgatgct

SEQ ID NO: 28216 - DNA, 15 bp, Homo sapiens
gttcaaggctgatgc

SEQ ID NO: 28217 - DNA, 15 bp, Homo sapiens
tgttcaaggctgatg

SEQ ID NO: 28218 - DNA, 15 bp, Homo sapiens
ttgttcaaggctgat

SEQ ID NO: 28219 - DNA, 15 bp, Homo sapiens
gttgttcaaggctga

SEQ ID NO: 28220 - DNA, 15 bp, Homo sapiens
ggttgttcaaggctg

SEQ ID NO: 28221 - DNA, 15 bp, Homo sapiens
tggttgttcaaggct

SEQ ID NO: 28222 - DNA, 15 bp, Homo sapiens
ttggttgttcaaggc

SEQ ID NO: 28223 - DNA, 15 bp, Homo sapiens
attggttgttcaagg

SEQ ID NO: 28224 - DNA, 15 bp, Homo sapiens
tattggttgttcaag

SEQ ID NO: 28225 - DNA, 15 bp, Homo sapiens
atattggttgttcaa

SEQ ID NO: 28226 - DNA, 15 bp, Homo sapiens
tatattggttgttca

SEQ ID NO: 28227 - DNA, 15 bp, Homo sapiens
ttatattggttgttc

SEQ ID NO: 28228 - DNA, 15 bp, Homo sapiens
gttatattggttgtt

SEQ ID NO: 28229 - DNA, 15 bp, Homo sapiens
tgttatattggttgt

SEQ ID NO: 28230 - DNA, 15 bp, Homo sapiens
gtgttatattggttg

SEQ ID NO: 28231 - DNA, 15 bp, Homo sapiens
tgtgttatattggtt

SEQ ID NO: 28232 - DNA, 15 bp, Homo sapiens
gtgtgttatattggt

SEQ ID NO: 28233 - DNA, 15 bp, Homo sapiens
tgtgtgttatattgg

SEQ ID NO: 28234 - DNA, 15 bp, Homo sapiens
gtgtgtgttatattg

SEQ ID NO: 28235 - DNA, 15 bp, Homo sapiens
ggtgtgtgttatatt

SEQ ID NO: 28236 - DNA, 15 bp, Homo sapiens
gggtgtgtgttatat

SEQ ID NO: 28237 - DNA, 15 bp, Homo sapiens
ggggtgtgtgttata

SEQ ID NO: 28238 - DNA, 15 bp, Homo sapiens
gggggtgtgtgttat

SEQ ID NO: 28239 - DNA, 15 bp, Homo sapiens
ggggggtgtgtgtta

SEQ ID NO: 28240 - DNA, 15 bp, Homo sapiens
gggggggtgtgtgtt

SEQ ID NO: 28241 - DNA, 15 bp, Homo sapiens
tgggggggtgtgtgt

SEQ ID NO: 28242 - DNA, 15 bp, Homo sapiens
gtgggggggtgtgtg

SEQ ID NO: 28243 - DNA, 15 bp, Homo sapiens
ggtgggggggtgtgt

SEQ ID NO: 28244 - DNA, 15 bp, Homo sapiens
gggtgggggggtgtg

SEQ ID NO: 28245 - DNA, 15 bp, Homo sapiens
tgggtgggggggtgt

SEQ ID NO: 28246 - DNA, 15 bp, Homo sapiens
ctgggtgggggggtg

SEQ ID NO: 28247 - DNA, 15 bp, Homo sapiens
gctgggtgggggggt

SEQ ID NO: 28248 - DNA, 15 bp, Homo sapiens
agctgggtggggggg

SEQ ID NO: 28249 - DNA, 15 bp, Homo sapiens
gagctgggtgggggg

SEQ ID NO: 28250 - DNA, 15 bp, Homo sapiens
ggagctgggtggggg

SEQ ID NO: 28251 - DNA, 15 bp, Homo sapiens
tggagctgggtgggg

SEQ ID NO: 28252 - DNA, 15 bp, Homo sapiens
ttggagctgggtggg

SEQ ID NO: 28253 - DNA, 15 bp, Homo sapiens
cttggagctgggtgg

SEQ ID NO: 28254 - DNA, 15 bp, Homo sapiens
acttggagctgggtg

SEQ ID NO: 28255 - DNA, 15 bp, Homo sapiens
aacttggagctgggt

SEQ ID NO: 28256 - DNA, 15 bp, Homo sapiens
aaacttggagctggg

SEQ ID NO: 28257 - DNA, 15 bp, Homo sapiens
caaacttggagctgg

SEQ ID NO: 28258 - DNA, 15 bp, Homo sapiens
acaaacttggagctg

SEQ ID NO: 28259 - DNA, 15 bp, Homo sapiens
aacaaacttggagct

SEQ ID NO: 28260 - DNA, 15 bp, Homo sapiens
gaacaaacttggagc

SEQ ID NO: 28261 - DNA, 15 bp, Homo sapiens
ggaacaaacttggag

SEQ ID NO: 28262 - DNA, 15 bp, Homo sapiens
tggaacaaacttgga

SEQ ID NO: 28263 - DNA, 15 bp, Homo sapiens
gtggaacaaacttgg

SEQ ID NO: 28264 - DNA, 15 bp, Homo sapiens
cgtggaacaaacttg

SEQ ID NO: 28265 - DNA, 15 bp, Homo sapiens
gcgtggaacaaactt

SEQ ID NO: 28266 - DNA, 15 bp, Homo sapiens
tgcgtggaacaaact

SEQ ID NO: 28267 - DNA, 15 bp, Homo sapiens
ctgcgtggaacaaac

SEQ ID NO: 28268 - DNA, 15 bp, Homo sapiens
actgcgtggaacaaa

SEQ ID NO: 28269 - DNA, 15 bp, Homo sapiens
aactgcgtggaacaa

SEQ ID NO: 28270 - DNA, 15 bp, Homo sapiens
gaactgcgtggaaca

SEQ ID NO: 28271 - DNA, 15 bp, Homo sapiens
ggaactgcgtggaac

SEQ ID NO: 28272 - DNA, 15 bp, Homo sapiens
tggaactgcgtggaa

SEQ ID NO: 28273 - DNA, 15 bp, Homo sapiens
gtggaactgcgtgga

SEQ ID NO: 28274 - DNA, 15 bp, Homo sapiens
tgtggaactgcgtgg

SEQ ID NO: 28275 - DNA, 15 bp, Homo sapiens
atgtggaactgcgtg

SEQ ID NO: 28276 - DNA, 15 bp, Homo sapiens
tatgtggaactgcgt

SEQ ID NO: 28277 - DNA, 15 bp, Homo sapiens
ctatgtggaactgcg

SEQ ID NO: 28278 - DNA, 15 bp, Homo sapiens
gctatgtggaactgc

SEQ ID NO: 28279 - DNA, 15 bp, Homo sapiens
agctatgtggaactg

SEQ ID NO: 28280 - DNA, 15 bp, Homo sapiens
cagctatgtggaact

SEQ ID NO: 28281 - DNA, 15 bp, Homo sapiens
acagctatgtggaac

SEQ ID NO: 28282 - DNA, 15 bp, Homo sapiens
cacagctatgtggaa

SEQ ID NO: 28283 - DNA, 15 bp, Homo sapiens
acacagctatgtgga

SEQ ID NO: 28284 - DNA, 15 bp, Homo sapiens
gacacagctatgtgg

SEQ ID NO: 28285 - DNA, 15 bp, Homo sapiens
tgacacagctatgtg

SEQ ID NO: 28286 - DNA, 15 bp, Homo sapiens
ttgacacagctatgt

SEQ ID NO: 28287 - DNA, 15 bp, Homo sapiens
tttgacacagctatg

SEQ ID NO: 28288 - DNA, 15 bp, Homo sapiens
atttgacacagctat

SEQ ID NO: 28289 - DNA, 15 bp, Homo sapiens
gatttgacacagcta

SEQ ID NO: 28290 - DNA, 15 bp, Homo sapiens
agatttgacacagct

SEQ ID NO: 28291 - DNA, 15 bp, Homo sapiens
gagatttgacacagc

SEQ ID NO: 28292 - DNA, 15 bp, Homo sapiens
tgagatttgacacag

SEQ ID NO: 28293 - DNA, 15 bp, Homo sapiens
ttgagatttgacaca

SEQ ID NO: 28294 - DNA, 15 bp, Homo sapiens
tttgagatttgacac

SEQ ID NO: 28295 - DNA, 15 bp, Homo sapiens
atttgagatttgaca

SEQ ID NO: 28296 - DNA, 15 bp, Homo sapiens
catttgagatttgac

SEQ ID NO: 28297 - DNA, 15 bp, Homo sapiens
tcatttgagatttga

SEQ ID NO: 28298 - DNA, 15 bp, Homo sapiens
atcatttgagatttg

SEQ ID NO: 28299 - DNA, 15 bp, Homo sapiens
aatcatttgagattt

SEQ ID NO: 28300 - DNA, 15 bp, Homo sapiens
gaatcatttgagatt

SEQ ID NO: 28301 - DNA, 15 bp, Homo sapiens
ggaatcatttgagat

SEQ ID NO: 28302 - DNA, 15 bp, Homo sapiens
tggaatcatttgaga

SEQ ID NO: 28303 - DNA, 15 bp, Homo sapiens
ttggaatcatttgag

SEQ ID NO: 28304 - DNA, 15 bp, Homo sapiens
attggaatcatttga

SEQ ID NO: 28305 - DNA, 15 bp, Homo sapiens
aattggaatcatttg

SEQ ID NO: 28306 - DNA, 15 bp, Homo sapiens
taattggaatcattt

SEQ ID NO: 28307 - DNA, 15 bp, Homo sapiens
ttaattggaatcatt

SEQ ID NO: 28308 - DNA, 15 bp, Homo sapiens
tttaattggaatcat

SEQ ID NO: 28309 - DNA, 15 bp, Homo sapiens
ctttaattggaatca

SEQ ID NO: 28310 - DNA, 15 bp, Homo sapiens
actttaattggaatc

SEQ ID NO: 28311 - DNA, 15 bp, Homo sapiens
aactttaattggaat

SEQ ID NO: 28312 - DNA, 15 bp, Homo sapiens
caactttaattggaa

SEQ ID NO: 28313 - DNA, 15 bp, Homo sapiens
gcaactttaattgga

SEQ ID NO: 28314 - DNA, 15 bp, Homo sapiens
tgcaactttaattgg

SEQ ID NO: 28315 - DNA, 15 bp, Homo sapiens
gtgcaactttaattg

SEQ ID NO: 28316 - DNA, 15 bp, Homo sapiens
agtgcaactttaatt

SEQ ID NO: 28317 - DNA, 15 bp, Homo sapiens
cagtgcaactttaat

SEQ ID NO: 28318 - DNA, 15 bp, Homo sapiens
acagtgcaactttaa

SEQ ID NO: 28319 - DNA, 15 bp, Homo sapiens
cacagtgcaacttta

SEQ ID NO: 28320 - DNA, 15 bp, Homo sapiens
acacagtgcaacttt

SEQ ID NO: 28321 - DNA, 15 bp, Homo sapiens
tacacagtgcaactt

SEQ ID NO: 28322 - DNA, 15 bp, Homo sapiens
ttacacagtgcaact

SEQ ID NO: 28323 - DNA, 15 bp, Homo sapiens
tttacacagtgcaac

SEQ ID NO: 28324 - DNA, 15 bp, Homo sapiens
ttttacacagtgcaa

SEQ ID NO: 28325 - DNA, 15 bp, Homo sapiens
tttttacacagtgca

SEQ ID NO: 28326 - DNA, 15 bp, Homo sapiens
gtttttacacagtgc

SEQ ID NO: 28327 - DNA, 15 bp, Homo sapiens
ggtttttacacagtg

SEQ ID NO: 28328 - DNA, 15 bp, Homo sapiens
gggtttttacacagt

SEQ ID NO: 28329 - DNA, 15 bp, Homo sapiens
cgggtttttacacag

SEQ ID NO: 28330 - DNA, 15 bp, Homo sapiens
tcgggtttttacaca

SEQ ID NO: 28331 - DNA, 15 bp, Homo sapiens
atcgggtttttacac

SEQ ID NO: 28332 - DNA, 15 bp, Homo sapiens
aatcgggtttttaca

SEQ ID NO: 28333 - DNA, 15 bp, Homo sapiens
gaatcgggtttttac

SEQ ID NO: 28334 - DNA, 15 bp, Homo sapiens
ggaatcgggttttta

SEQ ID NO: 28335 - DNA, 15 bp, Homo sapiens
gggaatcgggttttt

SEQ ID NO: 28336 - DNA, 15 bp, Homo sapiens
ggggaatcgggtttt

SEQ ID NO: 28337 - DNA, 15 bp, Homo sapiens
aggggaatcgggttt

SEQ ID NO: 28338 - DNA, 15 bp, Homo sapiens
caggggaatcgggtt

SEQ ID NO: 28339 - DNA, 15 bp, Homo sapiens
ccaggggaatcgggt

SEQ ID NO: 28340 - DNA, 15 bp, Homo sapiens
gccaggggaatcggg

SEQ ID NO: 28341 - DNA, 15 bp, Homo sapiens
ggccaggggaatcgg

SEQ ID NO: 28342 - DNA, 15 bp, Homo sapiens
aggccaggggaatcg

SEQ ID NO: 28343 - DNA, 15 bp, Homo sapiens
caggccaggggaatc

SEQ ID NO: 28344 - DNA, 15 bp, Homo sapiens
tcaggccaggggaat

SEQ ID NO: 28345 - DNA, 15 bp, Homo sapiens
ctcaggccaggggaa

SEQ ID NO: 28346 - DNA, 15 bp, Homo sapiens
actcaggccagggga

SEQ ID NO: 28347 - DNA, 15 bp, Homo sapiens
tactcaggccagggg

SEQ ID NO: 28348 - DNA, 15 bp, Homo sapiens
ctactcaggccaggg

SEQ ID NO: 28349 - DNA, 15 bp, Homo sapiens
gctactcaggccagg

SEQ ID NO: 28350 - DNA, 15 bp, Homo sapiens
agctactcaggccag

SEQ ID NO: 28351 - DNA, 15 bp, Homo sapiens
cagctactcaggcca

SEQ ID NO: 28352 - DNA, 15 bp, Homo sapiens
gcagctactcaggcc

SEQ ID NO: 28353 - DNA, 15 bp, Homo sapiens
agcagctactcaggc

SEQ ID NO: 28354 - DNA, 15 bp, Homo sapiens
cagcagctactcagg

SEQ ID NO: 28355 - DNA, 15 bp, Homo sapiens
acagcagctactcag

SEQ ID NO: 28356 - DNA, 15 bp, Homo sapiens
aacagcagctactca

SEQ ID NO: 28357 - DNA, 15 bp, Homo sapiens
gaacagcagctactc

SEQ ID NO: 28358 - DNA, 15 bp, Homo sapiens
agaacagcagctact

SEQ ID NO: 28359 - DNA, 15 bp, Homo sapiens
aagaacagcagctac

SEQ ID NO: 28360 - DNA, 15 bp, Homo sapiens
aaagaacagcagcta

SEQ ID NO: 28361 - DNA, 15 bp, Homo sapiens
caaagaacagcagct

SEQ ID NO: 28362 - DNA, 15 bp, Homo sapiens
ccaaagaacagcagc

SEQ ID NO: 28363 - DNA, 15 bp, Homo sapiens
gccaaagaacagcag

SEQ ID NO: 28364 - DNA, 15 bp, Homo sapiens
cgccaaagaacagca

SEQ ID NO: 28365 - DNA, 15 bp, Homo sapiens
acgccaaagaacagc

SEQ ID NO: 28366 - DNA, 15 bp, Homo sapiens
cacgccaaagaacag

SEQ ID NO: 28367 - DNA, 15 bp, Homo sapiens
acacgccaaagaaca

SEQ ID NO: 28368 - DNA, 15 bp, Homo sapiens
cacacgccaaagaac

SEQ ID NO: 28369 - DNA, 15 bp, Homo sapiens
tcacacgccaaagaa

SEQ ID NO: 28370 - DNA, 15 bp, Homo sapiens
ttcacacgccaaaga

SEQ ID NO: 28371 - DNA, 15 bp, Homo sapiens
cttcacacgccaaag

SEQ ID NO: 28372 - DNA, 15 bp, Homo sapiens
acttcacacgccaaa

SEQ ID NO: 28373 - DNA, 15 bp, Homo sapiens
cacttcacacgccaa

SEQ ID NO: 28374 - DNA, 15 bp, Homo sapiens
gcacttcacacgcca

SEQ ID NO: 28375 - DNA, 15 bp, Homo sapiens
agcacttcacacgcc

SEQ ID NO: 28376 - DNA, 15 bp, Homo sapiens
tagcacttcacacgc

SEQ ID NO: 28377 - DNA, 15 bp, Homo sapiens
ctagcacttcacacg

SEQ ID NO: 28378 - DNA, 15 bp, Homo sapiens
cctagcacttcacac

SEQ ID NO: 28379 - DNA, 15 bp, Homo sapiens
tcctagcacttcaca

SEQ ID NO: 28380 - DNA, 15 bp, Homo sapiens
ttcctagcacttcac

SEQ ID NO: 28381 - DNA, 15 bp, Homo sapiens
cttcctagcacttca

SEQ ID NO: 28382 - DNA, 15 bp, Homo sapiens
tcttcctagcacttc

SEQ ID NO: 28383 - DNA, 15 bp, Homo sapiens
ctcttcctagcactt

SEQ ID NO: 28384 - DNA, 15 bp, Homo sapiens
gctcttcctagcact

SEQ ID NO: 28385 - DNA, 15 bp, Homo sapiens
ggctcttcctagcac

SEQ ID NO: 28386 - DNA, 15 bp, Homo sapiens
cggctcttcctagca

SEQ ID NO: 28387 - DNA, 15 bp, Homo sapiens
acggctcttcctagc

SEQ ID NO: 28388 - DNA, 15 bp, Homo sapiens
cacggctcttcctag

SEQ ID NO: 28389 - DNA, 15 bp, Homo sapiens
tcacggctcttccta

SEQ ID NO: 28390 - DNA, 15 bp, Homo sapiens
atcacggctcttcct

SEQ ID NO: 28391 - DNA, 15 bp, Homo sapiens
tatcacggctcttcc

SEQ ID NO: 28392 - DNA, 15 bp, Homo sapiens
atatcacggctcttc

SEQ ID NO: 28393 - DNA, 15 bp, Homo sapiens
catatcacggctctt

SEQ ID NO: 28394 - DNA, 15 bp, Homo sapiens
gcatatcacggctct

SEQ ID NO: 28395 - DNA, 15 bp, Homo sapiens
ggcatatcacggctc

SEQ ID NO: 28396 - DNA, 15 bp, Homo sapiens
gggcatatcacggct

SEQ ID NO: 28397 - DNA, 15 bp, Homo sapiens
cgggcatatcacggc

SEQ ID NO: 28398 - DNA, 15 bp, Homo sapiens
acgggcatatcacgg

SEQ ID NO: 28399 - DNA, 15 bp, Homo sapiens
aacgggcatatcacg

SEQ ID NO: 28400 - DNA, 15 bp, Homo sapiens
caacgggcatatcac

SEQ ID NO: 28401 - DNA, 15 bp, Homo sapiens
acaacgggcatatca

SEQ ID NO: 28402 - DNA, 15 bp, Homo sapiens
aacaacgggcatatc

SEQ ID NO: 28403 - DNA, 15 bp, Homo sapiens
taacaacgggcatat

SEQ ID NO: 28404 - DNA, 15 bp, Homo sapiens
ttaacaacgggcata

SEQ ID NO: 28405 - DNA, 15 bp, Homo sapiens
cttaacaacgggcat

SEQ ID NO: 28406 - DNA, 15 bp, Homo sapiens
gcttaacaacgggca

SEQ ID NO: 28407 - DNA, 15 bp, Homo sapiens
tgcttaacaacgggc

SEQ ID NO: 28408 - DNA, 15 bp, Homo sapiens
ttgcttaacaacggg

SEQ ID NO: 28409 - DNA, 15 bp, Homo sapiens
gttgcttaacaacgg

SEQ ID NO: 28410 - DNA, 15 bp, Homo sapiens
tgttgcttaacaacg

SEQ ID NO: 28411 - DNA, 15 bp, Homo sapiens
atgttgcttaacaac

SEQ ID NO: 28412 - DNA, 15 bp, Homo sapiens
catgttgcttaacaa

SEQ ID NO: 28413 - DNA, 15 bp, Homo sapiens
acatgttgcttaaca

SEQ ID NO: 28414 - DNA, 15 bp, Homo sapiens
gacatgttgcttaac

SEQ ID NO: 28415 - DNA, 15 bp, Homo sapiens
tgacatgttgcttaa

SEQ ID NO: 28416 - DNA, 15 bp, Homo sapiens
ttgacatgttgctta

SEQ ID NO: 28417 - DNA, 15 bp, Homo sapiens
cttgacatgttgctt

SEQ ID NO: 28418 - DNA, 15 bp, Homo sapiens
tcttgacatgttgct

SEQ ID NO: 28419 - DNA, 15 bp, Homo sapiens
atcttgacatgttgc

SEQ ID NO: 28420 - DNA, 15 bp, Homo sapiens
aatcttgacatgttg

SEQ ID NO: 28421 - DNA, 15 bp, Homo sapiens
aaatcttgacatgtt

SEQ ID NO: 28422 - DNA, 15 bp, Homo sapiens
aaaatcttgacatgt

SEQ ID NO: 28423 - DNA, 15 bp, Homo sapiens
aaaaatcttgacatg

SEQ ID NO: 28424 - DNA, 15 bp, Homo sapiens
gaaaaatcttgacat

SEQ ID NO: 28425 - DNA, 15 bp, Homo sapiens
tgaaaaatcttgaca

SEQ ID NO: 28426 - DNA, 15 bp, Homo sapiens
ttgaaaaatcttgac

SEQ ID NO: 28427 - DNA, 15 bp, Homo sapiens
attgaaaaatcttga

SEQ ID NO: 28428 - DNA, 15 bp, Homo sapiens
aattgaaaaatcttg

SEQ ID NO: 28429 - DNA, 15 bp, Homo sapiens
taattgaaaaatctt

SEQ ID NO: 28430 - DNA, 15 bp, Homo sapiens
ataattgaaaaatct

SEQ ID NO: 28431 - DNA, 15 bp, Homo sapiens
tataattgaaaaatc

SEQ ID NO: 28432 - DNA, 15 bp, Homo sapiens
ttataattgaaaaat

SEQ ID NO: 28433 - DNA, 15 bp, Homo sapiens
attataattgaaaaa

SEQ ID NO: 28434 - DNA, 15 bp, Homo sapiens
cattataattgaaaa

SEQ ID NO: 28435 - DNA, 15 bp, Homo sapiens
gcattataattgaaa

SEQ ID NO: 28436 - DNA, 15 bp, Homo sapiens
tgcattataattgaa

SEQ ID NO: 28437 - DNA, 15 bp, Homo sapiens
ctgcattataattga

SEQ ID NO: 28438 - DNA, 15 bp, Homo sapiens
cctgcattataattg

SEQ ID NO: 28439 - DNA, 15 bp, Homo sapiens
acctgcattataatt

SEQ ID NO: 28440 - DNA, 15 bp, Homo sapiens
aacctgcattataat

SEQ ID NO: 28441 - DNA, 15 bp, Homo sapiens
aaacctgcattataa

SEQ ID NO: 28442 - DNA, 15 bp, Homo sapiens
aaaacctgcattata

SEQ ID NO: 28443 - DNA, 15 bp, Homo sapiens
taaaacctgcattat

SEQ ID NO: 28444 - DNA, 15 bp, Homo sapiens
ataaaacctgcatta

SEQ ID NO: 28445 - DNA, 15 bp, Homo sapiens
aataaaacctgcatt

SEQ ID NO: 28446 - DNA, 15 bp, Homo sapiens
caataaaacctgcat

SEQ ID NO: 28447 - DNA, 15 bp, Homo sapiens
gcaataaaacctgca

SEQ ID NO: 28448 - DNA, 15 bp, Homo sapiens
agcaataaaacctgc

SEQ ID NO: 28449 - DNA, 15 bp, Homo sapiens
tagcaataaaacctg

SEQ ID NO: 28450 - DNA, 15 bp, Homo sapiens
gtagcaataaaacct

SEQ ID NO: 28451 - DNA, 15 bp, Homo sapiens
agtagcaataaaacc

SEQ ID NO: 28452 - DNA, 15 bp, Homo sapiens
gagtagcaataaaac

SEQ ID NO: 28453 - DNA, 15 bp, Homo sapiens
tgagtagcaataaaa

SEQ ID NO: 28454 - DNA, 15 bp, Homo sapiens
gtgagtagcaataaa

SEQ ID NO: 28455 - DNA, 15 bp, Homo sapiens
ggtgagtagcaataa

SEQ ID NO: 28456 - DNA, 15 bp, Homo sapiens
tggtgagtagcaata

SEQ ID NO: 28457 - DNA, 15 bp, Homo sapiens
atggtgagtagcaat

SEQ ID NO: 28458 - DNA, 15 bp, Homo sapiens
aatggtgagtagcaa

SEQ ID NO: 28459 - DNA, 15 bp, Homo sapiens
caatggtgagtagca

SEQ ID NO: 28460 - DNA, 15 bp, Homo sapiens
acaatggtgagtagc

SEQ ID NO: 28461 - DNA, 15 bp, Homo sapiens
cacaatggtgagtag

SEQ ID NO: 28462 - DNA, 15 bp, Homo sapiens
gcacaatggtgagta

SEQ ID NO: 28463 - DNA, 15 bp, Homo sapiens
ggcacaatggtgagt

SEQ ID NO: 28464 - DNA, 15 bp, Homo sapiens
aggcacaatggtgag

SEQ ID NO: 28465 - DNA, 15 bp, Homo sapiens
aaggcacaatggtga

SEQ ID NO: 28466 - DNA, 15 bp, Homo sapiens
aaaggcacaatggtg

SEQ ID NO: 28467 - DNA, 15 bp, Homo sapiens
caaaggcacaatggt

SEQ ID NO: 28468 - DNA, 15 bp, Homo sapiens
gcaaaggcacaatgg

SEQ ID NO: 28469 - DNA, 15 bp, Homo sapiens
agcaaaggcacaatg

SEQ ID NO: 28470 - DNA, 15 bp, Homo sapiens
cagcaaaggcacaat

SEQ ID NO: 28471 - DNA, 15 bp, Homo sapiens
acagcaaaggcacaa

SEQ ID NO: 28472 - DNA, 15 bp, Homo sapiens
gacagcaaaggcaca

SEQ ID NO: 28473 - DNA, 15 bp, Homo sapiens
ggacagcaaaggcac

SEQ ID NO: 28474 - DNA, 15 bp, Homo sapiens
aggacagcaaaggca

SEQ ID NO: 28475 - DNA, 15 bp, Homo sapiens
caggacagcaaaggc

SEQ ID NO: 28476 - DNA, 15 bp, Homo sapiens
ccaggacagcaaagg

SEQ ID NO: 28477 - DNA, 15 bp, Homo sapiens
tccaggacagcaaag

SEQ ID NO: 28478 - DNA, 15 bp, Homo sapiens
ctccaggacagcaaa

SEQ ID NO: 28479 - DNA, 15 bp, Homo sapiens
tctccaggacagcaa

SEQ ID NO: 28480 - DNA, 15 bp, Homo sapiens
gtctccaggacagca

SEQ ID NO: 28481 - DNA, 15 bp, Homo sapiens
agtctccaggacagc

SEQ ID NO: 28482 - DNA, 15 bp, Homo sapiens
gagtctccaggacag

SEQ ID NO: 28483 - DNA, 15 bp, Homo sapiens
tgagtctccaggaca

SEQ ID NO: 28484 - DNA, 15 bp, Homo sapiens
ttgagtctccaggac

SEQ ID NO: 28485 - DNA, 15 bp, Homo sapiens
cttgagtctccagga

SEQ ID NO: 28486 - DNA, 15 bp, Homo sapiens
acttgagtctccagg

SEQ ID NO: 28487 - DNA, 15 bp, Homo sapiens
cacttgagtctccag

SEQ ID NO: 28488 - DNA, 15 bp, Homo sapiens
acacttgagtctcca

SEQ ID NO: 28489 - DNA, 15 bp, Homo sapiens
gacacttgagtctcc

SEQ ID NO: 28490 - DNA, 15 bp, Homo sapiens
agacacttgagtctc

SEQ ID NO: 28491 - DNA, 15 bp, Homo sapiens
aagacacttgagtct

SEQ ID NO: 28492 - DNA, 15 bp, Homo sapiens
taagacacttgagtc

SEQ ID NO: 28493 - DNA, 15 bp, Homo sapiens
ttaagacacttgagt

SEQ ID NO: 28494 - DNA, 15 bp, Homo sapiens
tttaagacacttgag

SEQ ID NO: 28495 - DNA, 15 bp, Homo sapiens
ttttaagacacttga

SEQ ID NO: 28496 - DNA, 15 bp, Homo sapiens
attttaagacacttg

SEQ ID NO: 28497 - DNA, 15 bp, Homo sapiens
gattttaagacactt

SEQ ID NO: 28498 - DNA, 15 bp, Homo sapiens
agattttaagacact

SEQ ID NO: 28499 - DNA, 15 bp, Homo sapiens
gagattttaagacac

SEQ ID NO: 28500 - DNA, 15 bp, Homo sapiens
cgagattttaagaca

SEQ ID NO: 28501 - DNA, 15 bp, Homo sapiens
acgagattttaagac

SEQ ID NO: 28502 - DNA, 15 bp, Homo sapiens
gacgagattttaaga

SEQ ID NO: 28503 - DNA, 15 bp, Homo sapiens
agacgagattttaag

SEQ ID NO: 28504 - DNA, 15 bp, Homo sapiens
gagacgagattttaa

SEQ ID NO: 28505 - DNA, 15 bp, Homo sapiens
ggagacgagatttta

SEQ ID NO: 28506 - DNA, 15 bp, Homo sapiens
gggagacgagatttt

SEQ ID NO: 28507 - DNA, 15 bp, Homo sapiens
ggggagacgagattt

SEQ ID NO: 28508 - DNA, 15 bp, Homo sapiens
tggggagacgagatt

SEQ ID NO: 28509 - DNA, 15 bp, Homo sapiens
ttggggagacgagat

SEQ ID NO: 28510 - DNA, 15 bp, Homo sapiens
gttggggagacgaga

SEQ ID NO: 28511 - DNA, 15 bp, Homo sapiens
tgttggggagacgag

SEQ ID NO: 28512 - DNA, 15 bp, Homo sapiens
ctgttggggagacga

SEQ ID NO: 28513 - DNA, 15 bp, Homo sapiens
tctgttggggagacg

SEQ ID NO: 28514 - DNA, 15 bp, Homo sapiens
atctgttggggagac

SEQ ID NO: 28515 - DNA, 15 bp, Homo sapiens
catctgttggggaga

SEQ ID NO: 28516 - DNA, 15 bp, Homo sapiens
gcatctgttggggag

SEQ ID NO: 28517 - DNA, 15 bp, Homo sapiens
agcatctgttgggga

SEQ ID NO: 28518 - DNA, 15 bp, Homo sapiens
cagcatctgttgggg

SEQ ID NO: 28519 - DNA, 15 bp, Homo sapiens
ccagcatctgttggg

SEQ ID NO: 28520 - DNA, 15 bp, Homo sapiens
tccagcatctgttgg

SEQ ID NO: 28521 - DNA, 15 bp, Homo sapiens
ttccagcatctgttg

SEQ ID NO: 28522 - DNA, 15 bp, Homo sapiens
cttccagcatctgtt

SEQ ID NO: 28523 - DNA, 15 bp, Homo sapiens
ccttccagcatctgt

SEQ ID NO: 28524 - DNA, 15 bp, Homo sapiens
accttccagcatctg

SEQ ID NO: 28525 - DNA, 15 bp, Homo sapiens
taccttccagcatct

SEQ ID NO: 28526 - DNA, 15 bp, Homo sapiens
ttaccttccagcatc

SEQ ID NO: 28527 - DNA, 15 bp, Homo sapiens
attaccttccagcat

SEQ ID NO: 28528 - DNA, 15 bp, Homo sapiens
cattaccttccagca

SEQ ID NO: 28529 - DNA, 15 bp, Homo sapiens
acattaccttccagc

SEQ ID NO: 28530 - DNA, 15 bp, Homo sapiens
cacattaccttccag

SEQ ID NO: 28531 - DNA, 15 bp, Homo sapiens
acacattaccttcca

SEQ ID NO: 28532 - DNA, 15 bp, Homo sapiens
gacacattaccttcc

SEQ ID NO: 28533 - DNA, 15 bp, Homo sapiens
agacacattaccttc

SEQ ID NO: 28534 - DNA, 15 bp, Homo sapiens
aagacacattacctt

SEQ ID NO: 28535 - DNA, 15 bp, Homo sapiens
caagacacattacct

SEQ ID NO: 28536 - DNA, 15 bp, Homo sapiens
acaagacacattacc

SEQ ID NO: 28537 - DNA, 15 bp, Homo sapiens
aacaagacacattac

SEQ ID NO: 28538 - DNA, 15 bp, Homo sapiens
aaacaagacacatta

SEQ ID NO: 28539 - DNA, 15 bp, Homo sapiens
caaacaagacacatt

SEQ ID NO: 28540 - DNA, 15 bp, Homo sapiens
tcaaacaagacacat

SEQ ID NO: 28541 - DNA, 15 bp, Homo sapiens
ttcaaacaagacaca

SEQ ID NO: 28542 - DNA, 15 bp, Homo sapiens
cttcaaacaagacac

SEQ ID NO: 28543 - DNA, 15 bp, Homo sapiens
acttcaaacaagaca

SEQ ID NO: 28544 - DNA, 15 bp, Homo sapiens
gacttcaaacaagac

SEQ ID NO: 28545 - DNA, 15 bp, Homo sapiens
tgacttcaaacaaga

SEQ ID NO: 28546 - DNA, 15 bp, Homo sapiens
atgacttcaaacaag

SEQ ID NO: 28547 - DNA, 15 bp, Homo sapiens
gatgacttcaaacaa

SEQ ID NO: 28548 - DNA, 15 bp, Homo sapiens
tgatgacttcaaaca

SEQ ID NO: 28549 - DNA, 15 bp, Homo sapiens
atgatgacttcaaac

SEQ ID NO: 28550 - DNA, 15 bp, Homo sapiens
catgatgacttcaaa

SEQ ID NO: 28551 - DNA, 15 bp, Homo sapiens
acatgatgacttcaa

SEQ ID NO: 28552 - DNA, 15 bp, Homo sapiens
cacatgatgacttca

SEQ ID NO: 28553 - DNA, 15 bp, Homo sapiens
tcacatgatgacttc

SEQ ID NO: 28554 - DNA, 15 bp, Homo sapiens
ctcacatgatgactt

SEQ ID NO: 28555 - DNA, 15 bp, Homo sapiens
tctcacatgatgact

SEQ ID NO: 28556 - DNA, 15 bp, Homo sapiens
ttctcacatgatgac

SEQ ID NO: 28557 - DNA, 15 bp, Homo sapiens
cttctcacatgatga

SEQ ID NO: 28558 - DNA, 15 bp, Homo sapiens
acttctcacatgatg

SEQ ID NO: 28559 - DNA, 15 bp, Homo sapiens
aacttctcacatgat

SEQ ID NO: 28560 - DNA, 15 bp, Homo sapiens
gaacttctcacatga

SEQ ID NO: 28561 - DNA, 15 bp, Homo sapiens
cgaacttctcacatg

SEQ ID NO: 28562 - DNA, 15 bp, Homo sapiens
ccgaacttctcacat

SEQ ID NO: 28563 - DNA, 15 bp, Homo sapiens
gccgaacttctcaca

SEQ ID NO: 28564 - DNA, 15 bp, Homo sapiens
agccgaacttctcac

SEQ ID NO: 28565 - DNA, 15 bp, Homo sapiens
aagccgaacttctca

SEQ ID NO: 28566 - DNA, 15 bp, Homo sapiens
aaagccgaacttctc

SEQ ID NO: 28567 - DNA, 15 bp, Homo sapiens
caaagccgaacttct

SEQ ID NO: 28568 - DNA, 15 bp, Homo sapiens
gcaaagccgaacttc

SEQ ID NO: 28569 - DNA, 15 bp, Homo sapiens
agcaaagccgaactt

SEQ ID NO: 28570 - DNA, 15 bp, Homo sapiens
gagcaaagccgaact

SEQ ID NO: 28571 - DNA, 15 bp, Homo sapiens
tgagcaaagccgaac

SEQ ID NO: 28572 - DNA, 15 bp, Homo sapiens
ctgagcaaagccgaa

SEQ ID NO: 28573 - DNA, 15 bp, Homo sapiens
actgagcaaagccga

SEQ ID NO: 28574 - DNA, 15 bp, Homo sapiens
cactgagcaaagccg

SEQ ID NO: 28575 - DNA, 15 bp, Homo sapiens
ccactgagcaaagcc

SEQ ID NO: 28576 - DNA, 15 bp, Homo sapiens
tccactgagcaaagc

SEQ ID NO: 28577 - DNA, 15 bp, Homo sapiens
atccactgagcaaag

SEQ ID NO: 28578 - DNA, 15 bp, Homo sapiens
gatccactgagcaaa

SEQ ID NO: 28579 - DNA, 15 bp, Homo sapiens
cgatccactgagcaa

SEQ ID NO: 28580 - DNA, 15 bp, Homo sapiens
gcgatccactgagca

SEQ ID NO: 28581 - DNA, 15 bp, Homo sapiens
ggcgatccactgagc

SEQ ID NO: 28582 - DNA, 15 bp, Homo sapiens
gggcgatccactgag

SEQ ID NO: 28583 - DNA, 15 bp, Homo sapiens
tgggcgatccactga

SEQ ID NO: 28584 - DNA, 15 bp, Homo sapiens
gtgggcgatccactg

SEQ ID NO: 28585 - DNA, 15 bp, Homo sapiens
ggtgggcgatccact

SEQ ID NO: 28586 - DNA, 15 bp, Homo sapiens
tggtgggcgatccac

SEQ ID NO: 28587 - DNA, 15 bp, Homo sapiens
gtggtgggcgatcca

SEQ ID NO: 28588 - DNA, 15 bp, Homo sapiens
agtggtgggcgatcc

SEQ ID NO: 28589 - DNA, 15 bp, Homo sapiens
aagtggtgggcgatc

SEQ ID NO: 28590 - DNA, 15 bp, Homo sapiens
caagtggtgggcgat

SEQ ID NO: 28591 - DNA, 15 bp, Homo sapiens
ccaagtggtgggcga

SEQ ID NO: 28592 - DNA, 15 bp, Homo sapiens
accaagtggtgggcg

SEQ ID NO: 28593 - DNA, 15 bp, Homo sapiens
caccaagtggtgggc

SEQ ID NO: 28594 - DNA, 15 bp, Homo sapiens
acaccaagtggtggg

SEQ ID NO: 28595 - DNA, 15 bp, Homo sapiens
cacaccaagtggtgg

SEQ ID NO: 28596 - DNA, 15 bp, Homo sapiens
tcacaccaagtggtg

SEQ ID NO: 28597 - DNA, 15 bp, Homo sapiens
gtcacaccaagtggt

SEQ ID NO: 28598 - DNA, 15 bp, Homo sapiens
agtcacaccaagtgg

SEQ ID NO: 28599 - DNA, 15 bp, Homo sapiens
aagtcacaccaagtg

SEQ ID NO: 28600 - DNA, 15 bp, Homo sapiens
taagtcacaccaagt

SEQ ID NO: 28601 - DNA, 15 bp, Homo sapiens
ataagtcacaccaag

SEQ ID NO: 28602 - DNA, 15 bp, Homo sapiens
cataagtcacaccaa

SEQ ID NO: 28603 - DNA, 15 bp, Homo sapiens
tcataagtcacacca

SEQ ID NO: 28604 - DNA, 15 bp, Homo sapiens
ttcataagtcacacc

SEQ ID NO: 28605 - DNA, 15 bp, Homo sapiens
attcataagtcacac

SEQ ID NO: 28606 - DNA, 15 bp, Homo sapiens
gattcataagtcaca

SEQ ID NO: 28607 - DNA, 15 bp, Homo sapiens
agattcataagtcac

SEQ ID NO: 28608 - DNA, 15 bp, Homo sapiens
tagattcataagtca

SEQ ID NO: 28609 - DNA, 15 bp, Homo sapiens
ttagattcataagtc

SEQ ID NO: 28610 - DNA, 15 bp, Homo sapiens
attagattcataagt

SEQ ID NO: 28611 - DNA, 15 bp, Homo sapiens
tattagattcataag

SEQ ID NO: 28612 - DNA, 15 bp, Homo sapiens
ttattagattcataa

SEQ ID NO: 28613 - DNA, 15 bp, Homo sapiens
gttattagattcata

SEQ ID NO: 28614 - DNA, 15 bp, Homo sapiens
ggttattagattcat

SEQ ID NO: 28615 - DNA, 15 bp, Homo sapiens
gggttattagattca

SEQ ID NO: 28616 - DNA, 15 bp, Homo sapiens
agggttattagattc

SEQ ID NO: 28617 - DNA, 15 bp, Homo sapiens
aagggttattagatt

SEQ ID NO: 28618 - DNA, 15 bp, Homo sapiens
aaagggttattagat

SEQ ID NO: 28619 - DNA, 15 bp, Homo sapiens
caaagggttattaga

SEQ ID NO: 28620 - DNA, 15 bp, Homo sapiens
gcaaagggttattag

SEQ ID NO: 28621 - DNA, 15 bp, Homo sapiens
tgcaaagggttatta

SEQ ID NO: 28622 - DNA, 15 bp, Homo sapiens
ttgcaaagggttatt

SEQ ID NO: 28623 - DNA, 15 bp, Homo sapiens
attgcaaagggttat

SEQ ID NO: 28624 - DNA, 15 bp, Homo sapiens
tattgcaaagggtta

SEQ ID NO: 28625 - DNA, 15 bp, Homo sapiens
atattgcaaagggtt

SEQ ID NO: 28626 - DNA, 15 bp, Homo sapiens
gatattgcaaagggt

SEQ ID NO: 28627 - DNA, 15 bp, Homo sapiens
ggatattgcaaaggg

SEQ ID NO: 28628 - DNA, 15 bp, Homo sapiens
cggatattgcaaagg

SEQ ID NO: 28629 - DNA, 15 bp, Homo sapiens
gcggatattgcaaag

SEQ ID NO: 28630 - DNA, 15 bp, Homo sapiens
tgcggatattgcaaa

SEQ ID NO: 28631 - DNA, 15 bp, Homo sapiens
ttgcggatattgcaa

SEQ ID NO: 28632 - DNA, 15 bp, Homo sapiens
cttgcggatattgca

SEQ ID NO: 28633 - DNA, 15 bp, Homo sapiens
gcttgcggatattgc

SEQ ID NO: 28634 - DNA, 15 bp, Homo sapiens
agcttgcggatattg

SEQ ID NO: 28635 - DNA, 15 bp, Homo sapiens
aagcttgcggatatt

SEQ ID NO: 28636 - DNA, 15 bp, Homo sapiens
taagcttgcggatat

SEQ ID NO: 28637 - DNA, 15 bp, Homo sapiens
ttaagcttgcggata

SEQ ID NO: 28638 - DNA, 15 bp, Homo sapiens
tttaagcttgcggat

SEQ ID NO: 28639 - DNA, 15 bp, Homo sapiens
gtttaagcttgcgga

SEQ ID NO: 28640 - DNA, 15 bp, Homo sapiens
agtttaagcttgcgg

SEQ ID NO: 28641 - DNA, 15 bp, Homo sapiens
gagtttaagcttgcg

SEQ ID NO: 28642 - DNA, 15 bp, Homo sapiens
agagtttaagcttgc

SEQ ID NO: 28643 - DNA, 15 bp, Homo sapiens
gagagtttaagcttg

SEQ ID NO: 28644 - DNA, 15 bp, Homo sapiens
tgagagtttaagctt

SEQ ID NO: 28645 - DNA, 15 bp, Homo sapiens
ttgagagtttaagct

SEQ ID NO: 28646 - DNA, 15 bp, Homo sapiens
gttgagagtttaagc

SEQ ID NO: 28647 - DNA, 15 bp, Homo sapiens
ggttgagagtttaag

SEQ ID NO: 28648 - DNA, 15 bp, Homo sapiens
tggttgagagtttaa

SEQ ID NO: 28649 - DNA, 15 bp, Homo sapiens
gtggttgagagttta

SEQ ID NO: 28650 - DNA, 15 bp, Homo sapiens
ggtggttgagagttt

SEQ ID NO: 28651 - DNA, 15 bp, Homo sapiens
aggtggttgagagtt

SEQ ID NO: 28652 - DNA, 15 bp, Homo sapiens
aaggtggttgagagt

SEQ ID NO: 28653 - DNA, 15 bp, Homo sapiens
caaggtggttgagag

SEQ ID NO: 28654 - DNA, 15 bp, Homo sapiens
ccaaggtggttgaga

SEQ ID NO: 28655 - DNA, 15 bp, Homo sapiens
gccaaggtggttgag

SEQ ID NO: 28656 - DNA, 15 bp, Homo sapiens
cgccaaggtggttga

SEQ ID NO: 28657 - DNA, 15 bp, Homo sapiens
tcgccaaggtggttg

SEQ ID NO: 28658 - DNA, 15 bp, Homo sapiens
gtcgccaaggtggtt

SEQ ID NO: 28659 - DNA, 15 bp, Homo sapiens
agtcgccaaggtggt

SEQ ID NO: 28660 - DNA, 15 bp, Homo sapiens
tagtcgccaaggtgg

SEQ ID NO: 28661 - DNA, 15 bp, Homo sapiens
gtagtcgccaaggtg

SEQ ID NO: 28662 - DNA, 15 bp, Homo sapiens
tgtagtcgccaaggt

SEQ ID NO: 28663 - DNA, 15 bp, Homo sapiens
ctgtagtcgccaagg

SEQ ID NO: 28664 - DNA, 15 bp, Homo sapiens
tctgtagtcgccaag

SEQ ID NO: 28665 - DNA, 15 bp, Homo sapiens
ttctgtagtcgccaa

SEQ ID NO: 28666 - DNA, 15 bp, Homo sapiens
cttctgtagtcgcca

SEQ ID NO: 28667 - DNA, 15 bp, Homo sapiens
tcttctgtagtcgcc

SEQ ID NO: 28668 - DNA, 15 bp, Homo sapiens
gtcttctgtagtcgc

SEQ ID NO: 28669 - DNA, 15 bp, Homo sapiens
tgtcttctgtagtcg

SEQ ID NO: 28670 - DNA, 15 bp, Homo sapiens
ttgtcttctgtagtc

SEQ ID NO: 28671 - DNA, 15 bp, Homo sapiens
tttgtcttctgtagt

SEQ ID NO: 28672 - DNA, 15 bp, Homo sapiens
ctttgtcttctgtag

SEQ ID NO: 28673 - DNA, 15 bp, Homo sapiens
gctttgtcttctgta

SEQ ID NO: 28674 - DNA, 15 bp, Homo sapiens
tgctttgtcttctgt

SEQ ID NO: 28675 - DNA, 15 bp, Homo sapiens
ttgctttgtcttctg

SEQ ID NO: 28676 - DNA, 15 bp, Homo sapiens
gttgctttgtcttct

SEQ ID NO: 28677 - DNA, 15 bp, Homo sapiens
agttgctttgtcttc

SEQ ID NO: 28678 - DNA, 15 bp, Homo sapiens
cagttgctttgtctt

SEQ ID NO: 28679 - DNA, 15 bp, Homo sapiens
ccagttgctttgtct

SEQ ID NO: 28680 - DNA, 15 bp, Homo sapiens
gccagttgctttgtc

SEQ ID NO: 28681 - DNA, 15 bp, Homo sapiens
tgccagttgctttgt

SEQ ID NO: 28682 - DNA, 15 bp, Homo sapiens
atgccagttgctttg

SEQ ID NO: 28683 - DNA, 15 bp, Homo sapiens
gatgccagttgcttt

SEQ ID NO: 28684 - DNA, 15 bp, Homo sapiens
cgatgccagttgctt

SEQ ID NO: 28685 - DNA, 15 bp, Homo sapiens
tcgatgccagttgct

SEQ ID NO: 28686 - DNA, 15 bp, Homo sapiens
atcgatgccagttgc

SEQ ID NO: 28687 - DNA, 15 bp, Homo sapiens
catcgatgccagttg

SEQ ID NO: 28688 - DNA, 15 bp, Homo sapiens
acatcgatgccagtt

SEQ ID NO: 28689 - DNA, 15 bp, Homo sapiens
gacatcgatgccagt

SEQ ID NO: 28690 - DNA, 15 bp, Homo sapiens
cgacatcgatgccag

SEQ ID NO: 28691 - DNA, 15 bp, Homo sapiens
tcgacatcgatgcca

SEQ ID NO: 28692 - DNA, 15 bp, Homo sapiens
ttcgacatcgatgcc

SEQ ID NO: 28693 - DNA, 15 bp, Homo sapiens
tttcgacatcgatgc

SEQ ID NO: 28694 - DNA, 15 bp, Homo sapiens
ttttcgacatcgatg

SEQ ID NO: 28695 - DNA, 15 bp, Homo sapiens
tttttcgacatcgat

SEQ ID NO: 28696 - DNA, 15 bp, Homo sapiens
gtttttcgacatcga

SEQ ID NO: 28697 - DNA, 15 bp, Homo sapiens
ggtttttcgacatcg

SEQ ID NO: 28698 - DNA, 15 bp, Homo sapiens
aggtttttcgacatc

SEQ ID NO: 28699 - DNA, 15 bp, Homo sapiens
taggtttttcgacat

SEQ ID NO: 28700 - DNA, 15 bp, Homo sapiens
ataggtttttcgaca

SEQ ID NO: 28701 - DNA, 15 bp, Homo sapiens
tataggtttttcgac

SEQ ID NO: 28702 - DNA, 15 bp, Homo sapiens
ctataggtttttcga

SEQ ID NO: 28703 - DNA, 15 bp, Homo sapiens
tctataggtttttcg

SEQ ID NO: 28704 - DNA, 15 bp, Homo sapiens
atctataggtttttc

SEQ ID NO: 28705 - DNA, 15 bp, Homo sapiens
aatctataggttttt

SEQ ID NO: 28706 - DNA, 15 bp, Homo sapiens
aaatctataggtttt

SEQ ID NO: 28707 - DNA, 15 bp, Homo sapiens
taaatctataggttt

SEQ ID NO: 28708 - DNA, 15 bp, Homo sapiens
gtaaatctataggtt

SEQ ID NO: 28709 - DNA, 15 bp, Homo sapiens
cgtaaatctataggt

SEQ ID NO: 28710 - DNA, 15 bp, Homo sapiens
gcgtaaatctatagg

SEQ ID NO: 28711 - DNA, 15 bp, Homo sapiens
tgcgtaaatctatag

SEQ ID NO: 28712 - DNA, 15 bp, Homo sapiens
ttgcgtaaatctata

SEQ ID NO: 28713 - DNA, 15 bp, Homo sapiens
tttgcgtaaatctat

SEQ ID NO: 28714 - DNA, 15 bp, Homo sapiens
gtttgcgtaaatcta

SEQ ID NO: 28715 - DNA, 15 bp, Homo sapiens
cgtttgcgtaaatct

SEQ ID NO: 28716 - DNA, 15 bp, Homo sapiens
gcgtttgcgtaaatc

SEQ ID NO: 28717 - DNA, 15 bp, Homo sapiens
ggcgtttgcgtaaat

SEQ ID NO: 28718 - DNA, 15 bp, Homo sapiens
gggcgtttgcgtaaa

SEQ ID NO: 28719 - DNA, 15 bp, Homo sapiens
agggcgtttgcgtaa

SEQ ID NO: 28720 - DNA, 15 bp, Homo sapiens
gagggcgtttgcgta

SEQ ID NO: 28721 - DNA, 15 bp, Homo sapiens
tgagggcgtttgcgt

SEQ ID NO: 28722 - DNA, 15 bp, Homo sapiens
gtgagggcgtttgcg

SEQ ID NO: 28723 - DNA, 15 bp, Homo sapiens
agtgagggcgtttgc

SEQ ID NO: 28724 - DNA, 15 bp, Homo sapiens
gagtgagggcgtttg

SEQ ID NO: 28725 - DNA, 15 bp, Homo sapiens
ggagtgagggcgttt

SEQ ID NO: 28726 - DNA, 15 bp, Homo sapiens
cggagtgagggcgtt

SEQ ID NO: 28727 - DNA, 15 bp, Homo sapiens
tcggagtgagggcgt

SEQ ID NO: 28728 - DNA, 15 bp, Homo sapiens
ctcggagtgagggcg

SEQ ID NO: 28729 - DNA, 15 bp, Homo sapiens
tctcggagtgagggc

SEQ ID NO: 28730 - DNA, 15 bp, Homo sapiens
ctctcggagtgaggg

SEQ ID NO: 28731 - DNA, 15 bp, Homo sapiens
tctctcggagtgagg

SEQ ID NO: 28732 - DNA, 15 bp, Homo sapiens
gtctctcggagtgag

SEQ ID NO: 28733 - DNA, 15 bp, Homo sapiens
tgtctctcggagtga

SEQ ID NO: 28734 - DNA, 15 bp, Homo sapiens
gtgtctctcggagtg

SEQ ID NO: 28735 - DNA, 15 bp, Homo sapiens
cgtgtctctcggagt

SEQ ID NO: 28736 - DNA, 15 bp, Homo sapiens
acgtgtctctcggag

SEQ ID NO: 28737 - DNA, 15 bp, Homo sapiens
aacgtgtctctcgga

SEQ ID NO: 28738 - DNA, 15 bp, Homo sapiens
aaacgtgtctctcgg

SEQ ID NO: 28739 - DNA, 15 bp, Homo sapiens
gaaacgtgtctctcg

SEQ ID NO: 28740 - DNA, 15 bp, Homo sapiens
ggaaacgtgtctctc

SEQ ID NO: 28741 - DNA, 15 bp, Homo sapiens
aggaaacgtgtctct

SEQ ID NO: 28742 - DNA, 15 bp, Homo sapiens
aaggaaacgtgtctc

SEQ ID NO: 28743 - DNA, 15 bp, Homo sapiens
aaaggaaacgtgtct

SEQ ID NO: 28744 - DNA, 15 bp, Homo sapiens
aaaaggaaacgtgtc

SEQ ID NO: 28745 - DNA, 15 bp, Homo sapiens
caaaaggaaacgtgt

SEQ ID NO: 28746 - DNA, 15 bp, Homo sapiens
tcaaaaggaaacgtg

SEQ ID NO: 28747 - DNA, 15 bp, Homo sapiens
ctcaaaaggaaacgt

SEQ ID NO: 28748 - DNA, 15 bp, Homo sapiens
actcaaaaggaaacg

SEQ ID NO: 28749 - DNA, 15 bp, Homo sapiens
aactcaaaaggaaac

SEQ ID NO: 28750 - DNA, 15 bp, Homo sapiens
gaactcaaaaggaaa

SEQ ID NO: 28751 - DNA, 15 bp, Homo sapiens
agaactcaaaaggaa

SEQ ID NO: 28752 - DNA, 15 bp, Homo sapiens
aagaactcaaaagga

SEQ ID NO: 28753 - DNA, 15 bp, Homo sapiens
taagaactcaaaagg

SEQ ID NO: 28754 - DNA, 15 bp, Homo sapiens
gtaagaactcaaaag

SEQ ID NO: 28755 - DNA, 15 bp, Homo sapiens
cgtaagaactcaaaa

SEQ ID NO: 28756 - DNA, 15 bp, Homo sapiens
acgtaagaactcaaa

SEQ ID NO: 28757 - DNA, 15 bp, Homo sapiens
cacgtaagaactcaa

SEQ ID NO: 28758 - DNA, 15 bp, Homo sapiens
tcacgtaagaactca

SEQ ID NO: 28759 - DNA, 15 bp, Homo sapiens
atcacgtaagaactc

SEQ ID NO: 28760 - DNA, 15 bp, Homo sapiens
aatcacgtaagaact

SEQ ID NO: 28761 - DNA, 15 bp, Homo sapiens
gaatcacgtaagaac

SEQ ID NO: 28762 - DNA, 15 bp, Homo sapiens
agaatcacgtaagaa

SEQ ID NO: 28763 - DNA, 15 bp, Homo sapiens
tagaatcacgtaaga

SEQ ID NO: 28764 - DNA, 15 bp, Homo sapiens
ttagaatcacgtaag

SEQ ID NO: 28765 - DNA, 15 bp, Homo sapiens
attagaatcacgtaa

SEQ ID NO: 28766 - DNA, 15 bp, Homo sapiens
cattagaatcacgta

SEQ ID NO: 28767 - DNA, 15 bp, Homo sapiens
tcattagaatcacgt

SEQ ID NO: 28768 - DNA, 15 bp, Homo sapiens
ttcattagaatcacg

SEQ ID NO: 28769 - DNA, 15 bp, Homo sapiens
attcattagaatcac

SEQ ID NO: 28770 - DNA, 15 bp, Homo sapiens
cattcattagaatca

SEQ ID NO: 28771 - DNA, 15 bp, Homo sapiens
tcattcattagaatc

SEQ ID NO: 28772 - DNA, 15 bp, Homo sapiens
ctcattcattagaat

SEQ ID NO: 28773 - DNA, 15 bp, Homo sapiens
gctcattcattagaa

SEQ ID NO: 28774 - DNA, 15 bp, Homo sapiens
cgctcattcattaga

SEQ ID NO: 28775 - DNA, 15 bp, Homo sapiens
tcgctcattcattag

SEQ ID NO: 28776 - DNA, 15 bp, Homo sapiens
ctcgctcattcatta

SEQ ID NO: 28777 - DNA, 15 bp, Homo sapiens
cctcgctcattcatt

SEQ ID NO: 28778 - DNA, 15 bp, Homo sapiens
acctcgctcattcat

SEQ ID NO: 28779 - DNA, 15 bp, Homo sapiens
aacctcgctcattca

SEQ ID NO: 28780 - DNA, 15 bp, Homo sapiens
taacctcgctcattc

SEQ ID NO: 28781 - DNA, 15 bp, Homo sapiens
gtaacctcgctcatt

SEQ ID NO: 28782 - DNA, 15 bp, Homo sapiens
ggtaacctcgctcat

SEQ ID NO: 28783 - DNA, 15 bp, Homo sapiens
tggtaacctcgctca

SEQ ID NO: 28784 - DNA, 15 bp, Homo sapiens
ttggtaacctcgctc

SEQ ID NO: 28785 - DNA, 15 bp, Homo sapiens
attggtaacctcgct

SEQ ID NO: 28786 - DNA, 15 bp, Homo sapiens
cattggtaacctcgc

SEQ ID NO: 28787 - DNA, 15 bp, Homo sapiens
tcattggtaacctcg

SEQ ID NO: 28788 - DNA, 15 bp, Homo sapiens
atcattggtaacctc

SEQ ID NO: 28789 - DNA, 15 bp, Homo sapiens
aatcattggtaacct

SEQ ID NO: 28790 - DNA, 15 bp, Homo sapiens
caatcattggtaacc

SEQ ID NO: 28791 - DNA, 15 bp, Homo sapiens
gcaatcattggtaac

SEQ ID NO: 28792 - DNA, 15 bp, Homo sapiens
ggcaatcattggtaa

SEQ ID NO: 28793 - DNA, 15 bp, Homo sapiens
gggcaatcattggta

SEQ ID NO: 28794 - DNA, 15 bp, Homo sapiens
tgggcaatcattggt

SEQ ID NO: 28795 - DNA, 15 bp, Homo sapiens
ttgggcaatcattgg

SEQ ID NO: 28796 - DNA, 15 bp, Homo sapiens
gttgggcaatcattg

SEQ ID NO: 28797 - DNA, 15 bp, Homo sapiens
agttgggcaatcatt

SEQ ID NO: 28798 - DNA, 15 bp, Homo sapiens
cagttgggcaatcat

SEQ ID NO: 28799 - DNA, 15 bp, Homo sapiens
gcagttgggcaatca

SEQ ID NO: 28800 - DNA, 15 bp, Homo sapiens
ggcagttgggcaatc

SEQ ID NO: 28801 - DNA, 15 bp, Homo sapiens
gggcagttgggcaat

SEQ ID NO: 28802 - DNA, 15 bp, Homo sapiens
agggcagttgggcaa

SEQ ID NO: 28803 - DNA, 15 bp, Homo sapiens
cagggcagttgggca

SEQ ID NO: 28804 - DNA, 15 bp, Homo sapiens
gcagggcagttgggc

SEQ ID NO: 28805 - DNA, 15 bp, Homo sapiens
agcagggcagttggg

SEQ ID NO: 28806 - DNA, 15 bp, Homo sapiens
tagcagggcagttgg

SEQ ID NO: 28807 - DNA, 15 bp, Homo sapiens
atagcagggcagttg

SEQ ID NO: 28808 - DNA, 15 bp, Homo sapiens
catagcagggcagtt

SEQ ID NO: 28809 - DNA, 15 bp, Homo sapiens
acatagcagggcagt

SEQ ID NO: 28810 - DNA, 15 bp, Homo sapiens
tacatagcagggcag

SEQ ID NO: 28811 - DNA, 15 bp, Homo sapiens
ctacatagcagggca

SEQ ID NO: 28812 - DNA, 15 bp, Homo sapiens
gctacatagcagggc

SEQ ID NO: 28813 - DNA, 15 bp, Homo sapiens
tgctacatagcaggg

SEQ ID NO: 28814 - DNA, 15 bp, Homo sapiens
ctgctacatagcagg

SEQ ID NO: 28815 - DNA, 15 bp, Homo sapiens
cctgctacatagcag

SEQ ID NO: 28816 - DNA, 15 bp, Homo sapiens
acctgctacatagca

SEQ ID NO: 28817 - DNA, 15 bp, Homo sapiens
cacctgctacatagc

SEQ ID NO: 28818 - DNA, 15 bp, Homo sapiens
acacctgctacatag

SEQ ID NO: 28819 - DNA, 15 bp, Homo sapiens
aacacctgctacata

SEQ ID NO: 28820 - DNA, 15 bp, Homo sapiens
aaacacctgctacat

SEQ ID NO: 28821 - DNA, 15 bp, Homo sapiens
gaaacacctgctaca

SEQ ID NO: 28822 - DNA, 15 bp, Homo sapiens
ggaaacacctgctac

SEQ ID NO: 28823 - DNA, 15 bp, Homo sapiens
aggaaacacctgcta

SEQ ID NO: 28824 - DNA, 15 bp, Homo sapiens
taggaaacacctgct

SEQ ID NO: 28825 - DNA, 15 bp, Homo sapiens
ctaggaaacacctgc

SEQ ID NO: 28826 - DNA, 15 bp, Homo sapiens
cctaggaaacacctg

SEQ ID NO: 28827 - DNA, 15 bp, Homo sapiens
ccctaggaaacacct

SEQ ID NO: 28828 - DNA, 15 bp, Homo sapiens
gccctaggaaacacc

SEQ ID NO: 28829 - DNA, 15 bp, Homo sapiens
agccctaggaaacac

SEQ ID NO: 28830 - DNA, 15 bp, Homo sapiens
cagccctaggaaaca

SEQ ID NO: 28831 - DNA, 15 bp, Homo sapiens
gcagccctaggaaac

SEQ ID NO: 28832 - DNA, 15 bp, Homo sapiens
ggcagccctaggaaa

SEQ ID NO: 28833 - DNA, 15 bp, Homo sapiens
aggcagccctaggaa

SEQ ID NO: 28834 - DNA, 15 bp, Homo sapiens
aaggcagccctagga

SEQ ID NO: 28835 - DNA, 15 bp, Homo sapiens
gaaggcagccctagg

SEQ ID NO: 28836 - DNA, 15 bp, Homo sapiens
agaaggcagccctag

SEQ ID NO: 28837 - DNA, 15 bp, Homo sapiens
tagaaggcagcccta

SEQ ID NO: 28838 - DNA, 15 bp, Homo sapiens
ttagaaggcagccct

SEQ ID NO: 28839 - DNA, 15 bp, Homo sapiens
gttagaaggcagccc

SEQ ID NO: 28840 - DNA, 15 bp, Homo sapiens
ggttagaaggcagcc

SEQ ID NO: 28841 - DNA, 15 bp, Homo sapiens
cggttagaaggcagc

SEQ ID NO: 28842 - DNA, 15 bp, Homo sapiens
gcggttagaaggcag

SEQ ID NO: 28843 - DNA, 15 bp, Homo sapiens
ggcggttagaaggca

SEQ ID NO: 28844 - DNA, 15 bp, Homo sapiens
gggcggttagaaggc

SEQ ID NO: 28845 - DNA, 15 bp, Homo sapiens
cgggcggttagaagg

SEQ ID NO: 28846 - DNA, 15 bp, Homo sapiens
acgggcggttagaag

SEQ ID NO: 28847 - DNA, 15 bp, Homo sapiens
aacgggcggttagaa

SEQ ID NO: 28848 - DNA, 15 bp, Homo sapiens
taacgggcggttaga

SEQ ID NO: 28849 - DNA, 15 bp, Homo sapiens
gtaacgggcggttag

SEQ ID NO: 28850 - DNA, 15 bp, Homo sapiens
agtaacgggcggtta

SEQ ID NO: 28851 - DNA, 15 bp, Homo sapiens
cagtaacgggcggtt

SEQ ID NO: 28852 - DNA, 15 bp, Homo sapiens
ccagtaacgggcggt

SEQ ID NO: 28853 - DNA, 15 bp, Homo sapiens
cccagtaacgggcgg

SEQ ID NO: 28854 - DNA, 15 bp, Homo sapiens
acccagtaacgggcg

SEQ ID NO: 28855 - DNA, 15 bp, Homo sapiens
gacccagtaacgggc

SEQ ID NO: 28856 - DNA, 15 bp, Homo sapiens
ggacccagtaacggg

SEQ ID NO: 28857 - DNA, 15 bp, Homo sapiens
aggacccagtaacgg

SEQ ID NO: 28858 - DNA, 15 bp, Homo sapiens
caggacccagtaacg

SEQ ID NO: 28859 - DNA, 15 bp, Homo sapiens
ccaggacccagtaac

SEQ ID NO: 28860 - DNA, 15 bp, Homo sapiens
gccaggacccagtaa

SEQ ID NO: 28861 - DNA, 15 bp, Homo sapiens
tgccaggacccagta

SEQ ID NO: 28862 - DNA, 15 bp, Homo sapiens
gtgccaggacccagt

SEQ ID NO: 28863 - DNA, 15 bp, Homo sapiens
agtgccaggacccag

SEQ ID NO: 28864 - DNA, 15 bp, Homo sapiens
cagtgccaggaccca

SEQ ID NO: 28865 - DNA, 15 bp, Homo sapiens
tcagtgccaggaccc

SEQ ID NO: 28866 - DNA, 15 bp, Homo sapiens
ttcagtgccaggacc

SEQ ID NO: 28867 - DNA, 15 bp, Homo sapiens
tttcagtgccaggac

SEQ ID NO: 28868 - DNA, 15 bp, Homo sapiens
ctttcagtgccagga

SEQ ID NO: 28869 - DNA, 15 bp, Homo sapiens
actttcagtgccagg

SEQ ID NO: 28870 - DNA, 15 bp, Homo sapiens
aactttcagtgccag

SEQ ID NO: 28871 - DNA, 15 bp, Homo sapiens
gaactttcagtgcca

SEQ ID NO: 28872 - DNA, 15 bp, Homo sapiens
ggaactttcagtgcc

SEQ ID NO: 28873 - DNA, 15 bp, Homo sapiens
gggaactttcagtgc

SEQ ID NO: 28874 - DNA, 15 bp, Homo sapiens
tgggaactttcagtg

SEQ ID NO: 28875 - DNA, 15 bp, Homo sapiens
ctgggaactttcagt

SEQ ID NO: 28876 - DNA, 15 bp, Homo sapiens
tctgggaactttcag

SEQ ID NO: 28877 - DNA, 15 bp, Homo sapiens
ctctgggaactttca

SEQ ID NO: 28878 - DNA, 15 bp, Homo sapiens
tctctgggaactttc

SEQ ID NO: 28879 - DNA, 15 bp, Homo sapiens
ttctctgggaacttt

SEQ ID NO: 28880 - DNA, 15 bp, Homo sapiens
tttctctgggaactt

SEQ ID NO: 28881 - DNA, 15 bp, Homo sapiens
ctttctctgggaact

SEQ ID NO: 28882 - DNA, 15 bp, Homo sapiens
actttctctgggaac

SEQ ID NO: 28883 - DNA, 15 bp, Homo sapiens
cactttctctgggaa

SEQ ID NO: 28884 - DNA, 15 bp, Homo sapiens
tcactttctctggga

SEQ ID NO: 28885 - DNA, 15 bp, Homo sapiens
ctcactttctctggg

SEQ ID NO: 28886 - DNA, 15 bp, Homo sapiens
cctcactttctctgg

SEQ ID NO: 28887 - DNA, 15 bp, Homo sapiens
tcctcactttctctg

SEQ ID NO: 28888 - DNA, 15 bp, Homo sapiens
ctcctcactttctct

SEQ ID NO: 28889 - DNA, 15 bp, Homo sapiens
actcctcactttctc

SEQ ID NO: 28890 - DNA, 15 bp, Homo sapiens
aactcctcactttct

SEQ ID NO: 28891 - DNA, 15 bp, Homo sapiens
aaactcctcactttc

SEQ ID NO: 28892 - DNA, 15 bp, Homo sapiens
gaaactcctcacttt

SEQ ID NO: 28893 - DNA, 15 bp, Homo sapiens
tgaaactcctcactt

SEQ ID NO: 28894 - DNA, 15 bp, Homo sapiens
ctgaaactcctcact

SEQ ID NO: 28895 - DNA, 15 bp, Homo sapiens
cctgaaactcctcac

SEQ ID NO: 28896 - DNA, 15 bp, Homo sapiens
ccctgaaactcctca

SEQ ID NO: 28897 - DNA, 15 bp, Homo sapiens
accctgaaactcctc

SEQ ID NO: 28898 - DNA, 15 bp, Homo sapiens
taccctgaaactcct

SEQ ID NO: 28899 - DNA, 15 bp, Homo sapiens
gtaccctgaaactcc

SEQ ID NO: 28900 - DNA, 15 bp, Homo sapiens
ggtaccctgaaactc

SEQ ID NO: 28901 - DNA, 15 bp, Homo sapiens
gggtaccctgaaact

SEQ ID NO: 28902 - DNA, 15 bp, Homo sapiens
ggggtaccctgaaac

SEQ ID NO: 28903 - DNA, 15 bp, Homo sapiens
aggggtaccctgaaa

SEQ ID NO: 28904 - DNA, 15 bp, Homo sapiens
caggggtaccctgaa

SEQ ID NO: 28905 - DNA, 15 bp, Homo sapiens
acaggggtaccctga

SEQ ID NO: 28906 - DNA, 15 bp, Homo sapiens
tacaggggtaccctg

SEQ ID NO: 28907 - DNA, 15 bp, Homo sapiens
ttacaggggtaccct

SEQ ID NO: 28908 - DNA, 15 bp, Homo sapiens
tttacaggggtaccc

SEQ ID NO: 28909 - DNA, 15 bp, Homo sapiens
ttttacaggggtacc

SEQ ID NO: 28910 - DNA, 15 bp, Homo sapiens
tttttacaggggtac

SEQ ID NO: 28911 - DNA, 15 bp, Homo sapiens
ttttttacaggggta

SEQ ID NO: 28912 - DNA, 15 bp, Homo sapiens
tttttttacaggggt

SEQ ID NO: 28913 - DNA, 15 bp, Homo sapiens
ttttttttacagggg

SEQ ID NO: 28914 - DNA, 15 bp, Homo sapiens
tttttttttacaggg

SEQ ID NO: 28915 - DNA, 15 bp, Homo sapiens
ttttttttttacagg

SEQ ID NO: 28916 - DNA, 15 bp, Homo sapiens
tttttttttttacag

SEQ ID NO: 28917 - DNA, 15 bp, Homo sapiens
gtttttttttttaca

SEQ ID NO: 28918 - DNA, 15 bp, Homo sapiens
agtttttttttttac

SEQ ID NO: 28919 - DNA, 15 bp, Homo sapiens
gagttttttttttta

SEQ ID NO: 28920 - DNA, 15 bp, Homo sapiens
ctgagtttttttttt

SEQ ID NO: 28921 - DNA, 15 bp, Homo sapiens
gctgagttttttttt

SEQ ID NO: 28922 - DNA, 15 bp, Homo sapiens
ggctgagtttttttt

SEQ ID NO: 28923 - DNA, 15 bp, Homo sapiens
aggctgagttttttt

SEQ ID NO: 28924 - DNA, 15 bp, Homo sapiens
caggctgagtttttt

SEQ ID NO: 28925 - DNA, 15 bp, Homo sapiens
gcaggctgagttttt

SEQ ID NO: 28926 - DNA, 15 bp, Homo sapiens
tgcaggctgagtttt

SEQ ID NO: 28927 - DNA, 15 bp, Homo sapiens
gtgcaggctgagttt

SEQ ID NO: 28928 - DNA, 15 bp, Homo sapiens
tgtgcaggctgagtt

SEQ ID NO: 28929 - DNA, 15 bp, Homo sapiens
gtgtgcaggctgagt

SEQ ID NO: 28930 - DNA, 15 bp, Homo sapiens
ggtgtgcaggctgag

SEQ ID NO: 28931 - DNA, 15 bp, Homo sapiens
cggtgtgcaggctga

SEQ ID NO: 28932 - DNA, 15 bp, Homo sapiens
gcggtgtgcaggctg

SEQ ID NO: 28933 - DNA, 15 bp, Homo sapiens
agcggtgtgcaggct

SEQ ID NO: 28934 - DNA, 15 bp, Homo sapiens
gagcggtgtgcaggc

SEQ ID NO: 28935 - DNA, 15 bp, Homo sapiens
ggagcggtgtgcagg

SEQ ID NO: 28936 - DNA, 15 bp, Homo sapiens
gggagcggtgtgcag

SEQ ID NO: 28937 - DNA, 15 bp, Homo sapiens
agggagcggtgtgca

SEQ ID NO: 28938 - DNA, 15 bp, Homo sapiens
aagggagcggtgtgc

SEQ ID NO: 28939 - DNA, 15 bp, Homo sapiens
caagggagcggtgtg

SEQ ID NO: 28940 - DNA, 15 bp, Homo sapiens
gcaagggagcggtgt

SEQ ID NO: 28941 - DNA, 15 bp, Homo sapiens
ggcaagggagcggtg

SEQ ID NO: 28942 - DNA, 15 bp, Homo sapiens
gggcaagggagcggt

SEQ ID NO: 28943 - DNA, 15 bp, Homo sapiens
tgggcaagggagcgg

SEQ ID NO: 28944 - DNA, 15 bp, Homo sapiens
gtgggcaagggagcg

SEQ ID NO: 28945 - DNA, 15 bp, Homo sapiens
agtgggcaagggagc

SEQ ID NO: 28946 - DNA, 15 bp, Homo sapiens
tagtgggcaagggag

SEQ ID NO: 28947 - DNA, 15 bp, Homo sapiens
gtagtgggcaaggga

SEQ ID NO: 28948 - DNA, 15 bp, Homo sapiens
cgtagtgggcaaggg

SEQ ID NO: 28949 - DNA, 15 bp, Homo sapiens
gcgtagtgggcaagg

SEQ ID NO: 28950 - DNA, 15 bp, Homo sapiens
tgcgtagtgggcaag

SEQ ID NO: 28951 - DNA, 15 bp, Homo sapiens
ctgcgtagtgggcaa

SEQ ID NO: 28952 - DNA, 15 bp, Homo sapiens
cctgcgtagtgggca

SEQ ID NO: 28953 - DNA, 15 bp, Homo sapiens
acctgcgtagtgggc

SEQ ID NO: 28954 - DNA, 15 bp, Homo sapiens
gacctgcgtagtggg

SEQ ID NO: 28955 - DNA, 15 bp, Homo sapiens
tgacctgcgtagtgg

SEQ ID NO: 28956 - DNA, 15 bp, Homo sapiens
gtgacctgcgtagtg

SEQ ID NO: 28957 - DNA, 15 bp, Homo sapiens
tgtgacctgcgtagt

SEQ ID NO: 28958 - DNA, 15 bp, Homo sapiens
gtgtgacctgcgtag

SEQ ID NO: 28959 - DNA, 15 bp, Homo sapiens
ggtgtgacctgcgta

SEQ ID NO: 28960 - DNA, 15 bp, Homo sapiens
aggtgtgacctgcgt

SEQ ID NO: 28961 - DNA, 15 bp, Homo sapiens
caggtgtgacctgcg

SEQ ID NO: 28962 - DNA, 15 bp, Homo sapiens
ccaggtgtgacctgc

SEQ ID NO: 28963 - DNA, 15 bp, Homo sapiens
cccaggtgtgacctg

SEQ ID NO: 28964 - DNA, 15 bp, Homo sapiens
ccccaggtgtgacct

SEQ ID NO: 28965 - DNA, 15 bp, Homo sapiens
gccccaggtgtgacc

SEQ ID NO: 28966 - DNA, 15 bp, Homo sapiens
agccccaggtgtgac

SEQ ID NO: 28967 - DNA, 15 bp, Homo sapiens
gagccccaggtgtga

SEQ ID NO: 28968 - DNA, 15 bp, Homo sapiens
ggagccccaggtgtg

SEQ ID NO: 28969 - DNA, 15 bp, Homo sapiens
cggagccccaggtgt

SEQ ID NO: 28970 - DNA, 15 bp, Homo sapiens
ccggagccccaggtg

SEQ ID NO: 28971 - DNA, 15 bp, Homo sapiens
gccggagccccaggt

SEQ ID NO: 28972 - DNA, 15 bp, Homo sapiens
cgccggagccccagg

SEQ ID NO: 28973 - DNA, 15 bp, Homo sapiens
tcgccggagccccag

SEQ ID NO: 28974 - DNA, 15 bp, Homo sapiens
ttcgccggagcccca

SEQ ID NO: 28975 - DNA, 15 bp, Homo sapiens
cttcgccggagcccc

SEQ ID NO: 28976 - DNA, 15 bp, Homo sapiens
gcttcgccggagccc

SEQ ID NO: 28977 - DNA, 15 bp, Homo sapiens
agcttcgccggagcc

SEQ ID NO: 28978 - DNA, 15 bp, Homo sapiens
cagcttcgccggagc

SEQ ID NO: 28979 - DNA, 15 bp, Homo sapiens
tcagcttcgccggag

SEQ ID NO: 28980 - DNA, 15 bp, Homo sapiens
ttcagcttcgccgga

SEQ ID NO: 28981 - DNA, 15 bp, Homo sapiens
attcagcttcgccgg

SEQ ID NO: 28982 - DNA, 15 bp, Homo sapiens
aattcagcttcgccg

SEQ ID NO: 28983 - DNA, 15 bp, Homo sapiens
gaattcagcttcgcc

SEQ ID NO: 28984 - DNA, 15 bp, Homo sapiens
cgaattcagcttcgc

SEQ ID NO: 28985 - DNA, 15 bp, Homo sapiens
ccgaattcagcttcg

SEQ ID NO: 28986 - DNA, 15 bp, Homo sapiens
gccgaattcagcttc

(The sequence listing continues in the following parts.)

1. A single stranded oligonucleotide having a sequence 5′-X—Y—Z, wherein X is any nucleotide, Y is a nucleotide sequence of 6 nucleotides in length that is not a seed sequence of a human microRNA, and Z is a nucleotide sequence of 1-23 nucleotides in length, wherein the single stranded oligonucleotide is complementary with at least 8 consecutive nucleotides of a PRC2-associated region of a BDNF gene.

2. The single stranded oligonucleotide of claim 1, wherein the oligonucleotide does not comprise three or more consecutive guanosine nucleotides.

3. The single stranded oligonucleotide of claim 1, wherein the oligonucleotide does not comprise four or more consecutive guanosine nucleotides.

4. The single stranded oligonucleotide of claim 1, wherein the oligonucleotide is 8 to 30 nucleotides in length.

5. The single stranded oligonucleotide of claim 1, wherein the oligonucleotide is 8 to 10 nucleotides in length and all but 1, 2, or 3 of the nucleotides of the complementary sequence of the PRC2-associated region are cytosine or guanosine nucleotides.

6. The single stranded oligonucleotide of claim 1, wherein at least one nucleotide of the oligonucleotide is a nucleotide analogue.

7. The single stranded oligonucleotide of claim 6, wherein the at least one nucleotide analogue results in an increase in Tm of the oligonucleotide in a range of 1 to 5° C. compared with an oligonucleotide that does not have the at least one nucleotide analogue.

8. The single stranded oligonucleotide of claim 1, wherein at least one nucleotide of the oligonucleotide comprises a 2′ O-methyl.

9. The single stranded oligonucleotide of claim 1, wherein each nucleotide of the oligonucleotide comprises a 2′ O-methyl.

10. The single stranded oligonucleotide of claim 1, wherein the oligonucleotide comprises at least one ribonucleotide, at least one deoxyribonucleotide, or at least one bridged nucleotide.

11. The single strand oligonucleotide of claim 10, wherein the bridged nucleotide is a LNA nucleotide, a cEt nucleotide or a ENA modified nucleotide.

12. The single stranded oligonucleotide of claim 1, wherein each nucleotide of the oligonucleotide is a LNA nucleotide.

13. The single stranded oligonucleotide of claim 1, wherein the nucleotides of the oligonucleotide comprise alternating deoxyribonucleotides and 2′-fluoro-deoxyribonucleotides.

14. The single stranded oligonucleotide of claim 1, wherein the nucleotides of the oligonucleotide comprise alternating deoxyribonucleotides and 2′-O-methyl nucleotides.

15. The single stranded oligonucleotide of claim 1, wherein the nucleotides of the oligonucleotide comprise alternating deoxyribonucleotides and ENA nucleotide analogues.

16. The single stranded oligonucleotide of claim 1, wherein the nucleotides of the oligonucleotide comprise alternating deoxyribonucleotides and LNA nucleotides.

17. The single stranded oligonucleotide of claim 13, wherein the 5′ nucleotide of the oligonucleotide is a deoxyribonucleotide.

18. The single stranded oligonucleotide of claim 1, wherein the nucleotides of the oligonucleotide comprise alternating LNA nucleotides and 2′-O-methyl nucleotides.

19. The single stranded oligonucleotide of claim 18, wherein the 5′ nucleotide of the oligonucleotide is a LNA nucleotide.

20. The single stranded oligonucleotide of claim 1, wherein the nucleotides of the oligonucleotide comprise deoxyribonucleotides flanked by at least one LNA nucleotide on each of the 5′ and 3′ ends of the deoxyribonucleotides.

21. The single stranded oligonucleotide of claim 1, further comprising phosphorothioate internucleotide linkages between at least two nucleotides.

22. The single stranded oligonucleotide of claim 21, further comprising phosphorothioate internucleotide linkages between all nucleotides.

23. The single stranded oligonucleotide of claim 1, wherein the nucleotide at the 3′ position of the oligonucleotide has a 3′ hydroxyl group.

24. The single stranded oligonucleotide of claim 1, wherein the nucleotide at the 3′ position of the oligonucleotide has a 3′ thiophosphate.

25. The single stranded oligonucleotide of claim 1, further comprising a biotin moiety conjugated to the 5′ nucleotide.

26. A single stranded oligonucleotide comprising a region of complementarity that is complementary with at least 8 consecutive nucleotides of a PRC2-associated region of a BDNF gene, wherein the oligonucleotide has at least one of:
a) a sequence that is 5′X—Y—Z, wherein X is any nucleotide and wherein X is anchored at the 5′ end of the oligonucleotide, Y is a nucleotide sequence of 6 nucleotides in length that is not a human seed sequence of a microRNA, and Z is a nucleotide sequence of 1 to 23 nucleotides in length;
b) a sequence that does not comprise three or more consecutive guanosine nucleotides;
c) a sequence that has less than a threshold level of sequence identity with every sequence of nucleotides, of equivalent length to the second nucleotide sequence, that are between 50 kilobases upstream of a 5′-end of an off-target gene and 50 kilobases downstream of a 3′-end of the off-target gene;
d) a sequence that is complementary to a PRC2-associated region that encodes an RNA that forms a secondary structure comprising at least two single stranded loops; and/or
e) a sequence that has greater than 60% G-C content.

27. The single stranded oligonucleotide of claim 26, wherein the oligonucleotide has the sequence 5′X—Y—Z and wherein the oligonucleotide is 8-50 nucleotides in length.

28. A composition comprising a single stranded oligonucleotide of claim 1 and a carrier.

29. A composition comprising a single stranded oligonucleotide of claim 1 in a buffered solution.

30. A composition of claim 28, wherein the oligonucleotide is conjugated to the carrier.

31. The composition of claim 30, wherein the carrier is a peptide.

32. The composition of claim 30, wherein the carrier is a steroid.

33. A pharmaceutical composition comprising a composition of claim 28 and a pharmaceutically acceptable carrier.

34. A kit comprising a container housing the composition of claim 28.

35. A method of increasing expression of a BDNF gene in a cell, the method comprising delivering the single stranded oligonucleotide of claim 1 into the cell.

36. The method of claim 35, wherein delivery of the single stranded oligonucleotide into the cell results in a level of expression of the BDNF gene that is at least 50% greater than a level of expression of the BDNF gene in a control cell that does not comprise the single stranded oligonucleotide.

37. A method increasing levels of a BDNF gene in a subject, the method comprising administering the single stranded oligonucleotide of claim 1 to the subject.

38. A method of treating a condition associated with decreased levels of a BDNF gene in a subject, the method comprising administering the single stranded oligonucleotide of claim 1 to the subject.

39. The method of claim 38, wherein the condition is a neurodegeneration disease, such as amyotrophic lateral sclerosis (ALS, also known as Lou Gehrig's disease), Alzheimer's Disease (AD), and Parkinson's Disease (PD).
